United States Patent Application Publication US 2021/0368750 A1 - sequence listing, part 3

SEQ ID NO: 24243 - DNA, 201 bp, Bos taurus
gttttctaaaactggaaaatcaggagctgtgaaaggagcgtcttctaccccactctggagagagagatgatggggttgagctggggcccgactcccctccccatgatagtgcaacttcattcagttctagaatgcagatgcacctgctgctctgacctctcccaagacctcgggagacacgctatgaatctgggcctctct

SEQ ID NO: 24244 - DNA, 201 bp, Bos taurus
tagaaagtaaaactttccagaaagaggtaataaatgacattatttgtagatatgaacaccctgaaatgacttggtctatcagatctagccagtcacttagtaaagccttgagagaatgggatgcaaaatgggttgctggggggaaagaggaaaacattccccagcacaacagacatctgggagagtagacctggagaggaa

SEQ ID NO: 24245 - DNA, 201 bp, Bos taurus
ccagcctgggtagggattaacgaagtttttccagaaaggaaggtgcctaagccgagtcctagaggagtgcaataggaagagagttgggtgtggaggggaagtgcattccagacaagaactcaatcaatgcttgcgaaacagagctggagcagagaatccagactgagttgaagctggagtcaggcttgtccaggcacttct

SEQ ID NO: 24246 - DNA, 201 bp, Bos taurus
aggagcttactgtgatcatcaccttctccgggcctccctctgtgtgccttccatctcctctcaatattcacatctgttttccaaggtggtacttttcttccaagacttccccaataagtaatctctcagtgaccagtgatgatagtaaacgcaccaaaacagttctgtacttctcactgtcttctgtgctttagtgccatt

SEQ ID NO: 24247 - DNA, 201 bp, Bos taurus
ccctctgccttcctcaccttcccctgccgacctctgttcctccttctggctcggtcaggttggctctcccaggggctctgtggtaaagggtctttctctgtatgtcacggccctctgtgtctcctcttccctggcactcagccccatgtgtggagttgtctatttacttgtctttccctggtggactgagagctcttggga

SEQ ID NO: 24248 - DNA, 201 bp, Bos taurus
tttcacttgtgaaaaacaactgtactttgcctcattttctcaagcttgggggacatctctgagtaactcccaaatacttttgatacttataagtcagttacacaacctcattaaatccttataacagccaactattcaataggtactattatccccatttcacagatgcagaaactgaggctcagagatgctaagcaacat

SEQ ID NO: 24249 - DNA, 201 bp, Bos taurus
cacctacactggttctcttaccccaggactcggcgcggtgcagggcaccgaggagaggcacgaagagaaacctctcccttcacctccatgctgccgcccgtgagtatgaggctgacacgatggtggccgatcggagggcttcctgctgtggtctctgctgagtctgcaagctggtgaccctttcactagaattctggcccc

SEQ ID NO: 24250 - DNA, 201 bp, Bos taurus
tggcattgtctctgaggtgtaaaataactgtggcttactaagtgataatgtgcttcatttgtctttttttttttttaataattatttatgttaaactcttataggatgaagcagcagcacagccgctgaatctctcatcccgacccaagacagttgagcctgtaaagtccccaacatctcccacccagagcctcttctcag

SEQ ID NO: 24251 - DNA, 201 bp, Bos taurus
aggactggcctgggagtggcaggtgaggccacctggagaagtccacatcctcttgtatgatcccatcggttcttgtggggaatttgccttggaggcattcaaaattctaaggaagcagcatggatgggtgtgggtggcagcgtctcagcggcaccaatgtttactttgaagagaaaatgtctgctttgtaggcaaatgttt

SEQ ID NO: 24252 - DNA, 201 bp, Bos taurus
tcctttcactgctcttggttaccttgctttttcctgaacaattggcttccagtaatacactttggggataccgaaagtcaagcctcaccagggccctggtggtcactcagcatctgaaccccaaagtccagcatcagccttgtagggttgagacgtgccctgcaaagaccatgctggcccctgaagcagtgctctgtctac

SEQ ID NO: 24253 - DNA, 201 bp, Bos taurus
tagtccaaaaaaaataaaagaaaaaaccaaaaaagtgaagcccactactcaactgcatcaaactcagacctctactgggcctttgaaagcagattagttatggggctcattgggacagaggcatttggtcactgagaaataaaaccaatgacttcttggatccatgaggcccccttctgttctctccttccagcctgttct

SEQ ID NO: 24254 - DNA, 201 bp, Bos taurus
atgtattatccatcttcactgaaggaggtaaataattacatatattttcattgtataggctcaaggatgttttctgacaaaaataaaagtagtaactgacctcaaacttataaatacagaaatcagattggtagttgccagatgcaaggttttgggggcgggtgggaaaaataagggggtcaaaaggtaggaaagaaaaat

SEQ ID NO: 24255 - DNA, 201 bp, Bos taurus
agcttaacagaaccaatggctgcacacatatcccatcctccatctctcatcaccaccctccactcccatcccacactgcaatactctggctaacttgttcaagacatgaaggatggtacataaactgaatgcttgcaggacaacatattcctatctcttacgctggccaagataatggttaggcaccaatgtacagaaaga

SEQ ID NO: 24256 - DNA, 201 bp, Bos taurus
gacatgtagttaccggagacaccgtcctactttatagaaacagtcgaaggctcgctgtgcagggtgatgcaggcactggagagtcagagatacaaggttctgctactctgaggggcccattggcagaacctggagatcagtgaaacaaagtttaaaacaaggactttcaagcttttcctgaggagtctacaatccacggca

SEQ ID NO: 24257 - DNA, 201 bp, Bos taurus
ggcagcgtgacccctcgaaaatacttctagggatgaaaacacaatccacacagatggcttgttagatagggagtgcttctgaatgttaactgcatcccactcccctccattagcaggggttggcagggggcagatggtggtagtggaagagcccaggccccaggcggccctcagccccatccacactccaagagtgggtag

SEQ ID NO: 24258 - DNA, 201 bp, Bos taurus
tgctggagtaggcctgggtgtttgagaaatggcacagaaataaacacggctagaatggagtgaacaaaggaaagatcaggaagaggtgagaagggactcaggctagatcctggaggcccctggaagccactgcaggcactctgggatttcactctgaggaaacatgaggattcctcctgagacatccgaggagtcttgtca

SEQ ID NO: 24259 - DNA, 201 bp, Bos taurus
cgactgaactgaactgaattcaactgagagttttgagagtccaaaacacctggattctggagccaagttgcctggaattgaaccctaactctgccaccagcgaactggtgcacagtgtgcacagggacagtgcatcttagaggcagatttgagcccaagtaatcaaactatatataatcaaactttgtctcagtgagaaag

SEQ ID NO: 24260 - DNA, 201 bp, Bos taurus
aatgaattcagtgcttttctgtgtataggaagatgcaataatctgggctcattaaaagtattcctttgatatgcaccttagctatctagggccagcattccgcttttttgcatcctaaatcccctcagggcaacaggggcaactgcaatggctcctgacttgatggccctaacattctttgctgattgatatggcaggtga

SEQ ID NO: 24261 - DNA, 201 bp, Bos taurus
ctaacagacaggcccagcattctttggcagcaccccagatgtagtgtatgtgacagtgccttctggtttctctagtgttttatggaatttcctttgcattgctgggtcttgtcctgggcccaactttcaagacaacaaaggacaaatagcctagtgatcctgtcctaccttggcatcaccttttctccctttcaaatccta

SEQ ID NO: 24262 - DNA, 201 bp, Bos taurus
cccaaaggagccctccagaacaaggttttcaggtgaagcagcaggccaagagggaaaggtcatctacctgcattagtgacaaaaaaagagctttttctctcttttatctgttgaattcccaggccagttaatttttccagttcctttttatttttttacttacttgtcacctggtcttggtgaagtacctgctttcttacc

SEQ ID NO: 24263 - DNA, 201 bp, Bos taurus
ttactttattttaaaacattccccattattgggccatagctcagctatttctagtctttataagcgaacacctctcttaatacgtcactgtagataattaagcatatttctgatagatagcttcccgttaacttgaactactgaagcaaagtaaatgaacatgttaaaaccactataaaactaccctcacatatgttggtc

SEQ ID NO: 24264 - DNA, 201 bp, Bos taurus
caagcaaataggacaaactgctgacataagcgtggcactgacgtatctgtctatttgccttcagttgctaggattcactgtgtccatttttctctaagctgtaaaacatgcaactctttgatgttatgaagagtccatggttaaacaaaaagttggcagaacatttaacataaaaagtatttcaaattcaaatctctaatt

SEQ ID NO: 24265 - DNA, 201 bp, Bos taurus
ttcagcatctccggcctggccgggagagtggaggtcggtagtctgctgccggtgcgacctttccctggggtttgtttcgctttccaccgggccttgaacagtatcttctcggtctaccagccaatttcgctcctcaggttccttcagtcgagtagattccgagcagtccagagagggccctagtggtctgtgtgggagaaa

SEQ ID NO: 24266 - DNA, 201 bp, Bos taurus
tggccatgccgttaactctctgtgtccttcagcaaactgcttaatctctcgggacctcagtttcctcatttgcaaaatgaaaggttgagtaaggaagtctctaagggcctttccagttctgaatcattgaatctgaagcaaatgccttctggagagaaagccagtaagagtcggaagtttccactggaatctctcctttta

SEQ ID NO: 24267 - DNA, 201 bp, Bos taurus
aatatcatccacaaattcccttctcttacatatcagttggttttatttgctcatgttcccgtcccatatgcaaagaggagttttacatgattgtgtttatacctatgttaggctattacgattcccaggaatcattctcacataggaagaacccccagagaatctggctttgaatgtagaaattccacaggattgggggaa

SEQ ID NO: 24268 - DNA, 201 bp, Bos taurus
taggaacctcttcagtcctgggcaaagtaggatggttgatcaccctataggagaaggacaagaaagatcaccatgaaatcctcatggaggtgcaatgaagagggtaagatgggagggggtaaggatgcattaatttcattcatgaagaaaccacatgtggatcaagacagttagcagtaaggaccaaaaggagggaatgaa

SEQ ID NO: 24269 - DNA, 201 bp, Bos taurus
cacaaagagttggacacaactcagagactgaacaccacctctaatatagagtaggactcatatatcttaatgaaaggaagggcaaaggggaagaacacaagtgcctgggagtctgtggcaacggggagaatattagtagagtataactacccttgtgagctatatagtcactgagtagccctcaaagagctagatttgttt

SEQ ID NO: 24270 - DNA, 201 bp, Bos taurus
cataagtattttatttaacagctgttatgttagccatcagtggcattattaatcgatggctacatgtttgtttcttccttgggaggctttgtgggccccatggcagctagaaaccaaggggcctgaggacgagtcccgtatgcctcccgctgagccttgcttcatctttctgcagaccacaatcctctatctctgaagtga

SEQ ID NO: 24271 - DNA, 201 bp, Bos taurus
aaaagaagatgtcaaatatggcatttgtgacctttggatgtagggcagtgcttttcaagcaggggcaattctgtggcccatgggacatttggcactgtctagagacacttgggattgtgacaagtggggaaagagtgtgtctagtgggcagaggccagggatgctgcgaaacctcctacaaggcacaggacagccctacac

SEQ ID NO: 24272 - DNA, 201 bp, Bos taurus
ctactgcactctctccattcgccagctttgcttggcgaataactactaacagagaagatggaattctgagatttaagtggcttttgttctttatgtatcacgttaggcactcatacagaaatgcaacagcaggcagaagctggataatcttcacagatgacaggaaattttcatctgagaatagtactctctgaattgcaa

SEQ ID NO: 24273 - DNA, 201 bp, Bos taurus
accagcacccagtcaaagcagatgcagttacccctgcttccccttttcaaccaccaactgaacccaacacctgccctctcccctagcctcagtctccaggctagattccattctccaatctctcaagaagcccctctgaactattacagaaacaacatcttctctctcacacctgttctgctggttacactaggtcgcaag

SEQ ID NO: 24274 - DNA, 201 bp, Bos taurus
tgtgaagaaatatagcaataaatcagccctctgtgagctcaggagagaggcctgtaacagatcctccccttgcagctctcagaaagaaccaagatacccaccccttggtctcagacttgtggcctccaaaactgggagcaaataaatttctgttgcctaaaaacaaatgaaaaaaaacaattccatctttcctattttccg

SEQ ID NO: 24275 - DNA, 201 bp, Bos taurus
tcaggcccctagtagacatcgaggcaacagcattcccagactttttcaccagctgccttggctgtgtgaacttctctctcgataatcatcccttatcccatatcccagtgtggccctgcttcccctatcaagccctaactgatacactaggtaaatgagactgccactcctcatgggcctacagtggacctgtcattactt

SEQ ID NO: 24276 - DNA, 201 bp, Bos taurus
cattccctccggtagctccactcccaggcccagggagtggctggggcagagcaaacagattcgcgcgggctaggtctggagtcaggctgagccgggagatcgcgctccaggccagggctggggtcaagggaaggatggggtaccgagcactctccccaggcgaccctgtccgatgagctgtcagaggcagcagatagagag

SEQ ID NO: 24277 - DNA, 201 bp, Bos taurus
taatacagaacgttgagacatcataaaggttttcacatctttcatgtgataaatatttttaccgtcatgcttgagaaatggattttgtttgaaacggcctgtttcctttgatggcttctttgacatggattcaaagcctttcctggtcctgcaagagcctggggttgggagggcctgtttgttaacttttttcgaaggaca

SEQ ID NO: 24278 - DNA, 201 bp, Bos taurus
gcttaatgggggatggatgacacagaatcaaagaggactttatcaaaagtcaccacccaccctcattcagaggccagctttgggggcccacagaagagccatgtctgactccagggctttctggaactttatgcaggtctcactaatggatcagtgggccgtgggaggagtctggggtatatttgcatacacacctcccac

SEQ ID NO: 24279 - DNA, 201 bp, Bos taurus
ctgtcttctgctgggctcagtcaggcagctgtggccagttgctggttagctggttgagtcagcttctggaggtgggttgactgactgctggagtcatggtacttctgggccgtgagtggtttctcatccagtaggctactccaggctgcttcacatgatgctggtgacagggattctaagggcagcaagaaacagcaagca

SEQ ID NO: 24280 - DNA, 201 bp, Bos taurus
gtcctatttatgccaaacttggtccatggtgagccctcaggttctgctccttttctggtaggtcttcctccttgcttggccttcctgaagggagaaggtgttgtcccaggatcccttaagcccttgcccttcctcaagggatgctgctgtcttcagcctgggttttgccaccacctgctctacctcctgcaggccagagcc

SEQ ID NO: 24281 - DNA, 201 bp, Bos taurus
tttcaagaaaatatcctgaagctgaatgacgtaagtttcacaataaacaggcccattgagttcccagcacaattgataaaaatagtcactccaaggcatagaagggaaatttcagaaccccgtggccaaacaaaatactctaaaagttttcagagaagggtttaaaaaaaagattaccataatgcataaaatatgattgac

SEQ ID NO: 24282 - DNA, 201 bp, Bos taurus
gcccagaaacacagtcatgaaaactcagccatttgaaggctaaattttgagcaggagtgactgacagctctgagtgagtgaggcctgtgtagagctgtgcgggtcatgaactggagtacaaagcagaagtgggctggcaggacactcacaatcgggacaaggcaggcagcaggggacttgggtggtgcttaagtcgccagt

SEQ ID NO: 24283 - DNA, 201 bp, Bos taurus
agggaaggaggacattcacacaggccaatctcaccacctcttctcccagcccccacacacagcctccctctctaatggcatcaaagccacgacgggctgcccccactgacgagggccctaagcctcagtgtcagggacatgcagagcagggattcattatcttggaccctgcgctggttcccgagagaggctgtaacaaag

SEQ ID NO: 24284 - DNA, 201 bp, Bos taurus
ctttgctaaaatagcaataagactgactttcacccacggacgctcaatgcctccagaagaactggctgctcattttctgagctctgggcctgttgacaactctctactgaaacaaattgaaatttctatcatcaattcacttcgaaatgtcataaagccgcttaggcctcggctggctgagcagtaaagcaggccctcttg

SEQ ID NO: 24285 - DNA, 201 bp, Bos taurus
caagaaaaataccacttagcacaaaatctaccaaagtgacttcccacctagatttttaaatcagtatttaaaattgttctacacggccctaggtctgattcagtgtcccccactcctccctctacccacactatttctctgatctagttttctgccactgactcttgctcattctgttcccacgcccttggcctcgttgag

SEQ ID NO: 24286 - DNA, 201 bp, Bos taurus
aagaccactgtgatacatttcccatgctgtggttgacttgcctgttgggaatacacccagtctataaagatgactgcagaaaggggaagggctattcaaaggaggagggattcagattaacaacaactctccgttctggatttctaaaagatgcaaagtaattttgatctaaatttatggaactggaaatatctaatagat

SEQ ID NO: 24287 - DNA, 201 bp, Bos taurus
gtctgatttctttcactcagaataattattttgagatttatccatgtttttaagattcacccatgttttcctatttgggcctgttacaaataatgctgcaatgaatattcatgtataagtctttacgggtaaatacctaggagtggaacggctggatcatatggtcggtatgtgtaactctttttaaaatggccaagtgtt

SEQ ID NO: 24288 - DNA, 201 bp, Bos taurus
aggcacagaggaagagctgaatcagcaatacctgatggcatgcaaaccaatcaacaccaggacttgaatccattcaacatctgagaactctgaagggccccaactggaaccatctccaatgggctacaggaacagagagcggggttctgggctcagagaccacatggaaactacaggccactcgatgtgccagcctgcagc

SEQ ID NO: 24289 - DNA, 201 bp, Bos taurus
cacgactgagcatctaagcacagcacacaactactccaaactagctatcaataccctagaaggtgagggctgacagaggctctatggctgcctggctctacggctgccactgatgcttcagtcaggggaggaatttctcctatgggagttccagttgcagccaatttctccctaaagtggccaaatgttggttaccacatc

SEQ ID NO: 24290 - DNA, 201 bp, Bos taurus
gtggctctgacctcaaccttggaaccagagggtccccaaaaaaagcggggtaatcctgtaaaaggctgatattctagacccctgtacaggcccctttgcagtgttccttgctcactgttatgcagggtgaccaactgagctgcaagccacccctccctcggaggctctagaatggcaaggaagggcccagctgcaggtgcg

SEQ ID NO: 24291 - DNA, 201 bp, Bos taurus
tccctaggagtcattcaggagttagctctctggcttggcttggggactctgctctctagtctcagggaaagctatctccaccaaaggccattttatggctcgctagtttgagccaggaccaaggagaaagaagcacctcctccctgccctgccctggccttctctacattctgtcctaagaagcaacctccaggtaaagga

SEQ ID NO: 24292 - DNA, 201 bp, Bos taurus
caagctttcattatctcttgaatatattaaaatgctgcataatcctttcatcatagaaaatttgattttgatacggttctggtgattgtactgatgggagtatagtttccttgaattttgttcaaatggtttttctaacttcacagagcaccctcttctgctgtgtccatgtaatgtcaaaaagtggcactctgccttcta

SEQ ID NO: 24293 - DNA, 201 bp, Bos taurus
tcctggcttggcggctcgggattttgctagaacacccgtatcttcgaaagtgtgtttatgtgggtcggcgacgagggccatagggttttcccaaagtgccgtggagtataagttgaaacatagctataaactttgccaaatgttggcatctatttttttccccctgggaacctggggttcgtttacttactgttgaaggcc

SEQ ID NO: 24294 - DNA, 201 bp, Bos taurus
tggtacaacagctaaaggttgcaagtcaagtaagcagtaaaatcaaggttagagaagttttcaatgatccaaacgttgttggactaagaataaagggtgtggactgttgccccagaaagaggtttagagccatcaggtgacatcaggacaccagccattaggttgagcaacatttgggtactggatttagaatgacttgga

SEQ ID NO: 24295 - DNA, 201 bp, Bos taurus
tattcacatgatctttttcatttaggacggcttgtatggctgtacatgggtcggcagtggtgtgcctcaaggacaggggctctgggtgcagcagacatgggtatcacataagcactcttgaaggaggtcgccattaaccctaccatagagctgccagaacttaactggactgggaaatagactattgcagggcacaacaga

SEQ ID NO: 24296 - DNA, 201 bp, Bos taurus
attttgtttctttttcttttattattatctgggaagaatttatagtatgatgctaaataaaagtgatagcacttttcttttaaagtttcattgttgcactttttatttgctaaaaggtatttgataaatgtctatatcagattaaggacttccctgaaggtccagtggttgagagtccacattcccaatgcaaggtgtcac

SEQ ID NO: 24297 - DNA, 201 bp, Bos taurus
caggggccctataaaaacaactctccccccagtacacacatacagtatacacaccactctacttatcaggctgtacactccctactgaaaggtcacgtgctgattacttgaactgaaaacatacaaaatatctgaccaactctccaatgatatcatggcaaatatatggatttaggggtagactgtcactaaacattgaca

SEQ ID NO: 24298 - DNA, 201 bp, Bos taurus
ttcaggatcccctttgtgagacggaggtgtgctaagtattacagggctgtacggcactaacttaactaaccccacccacttctctcattccgtttcaactgatcctttcctctcttagcggaacgctcttctgctcactaaactctatcagcttctgttttccacaactgtccacagtcttctgcattagaaagaatcgca

SEQ ID NO: 24299 - DNA, 201 bp, Bos taurus
actagggaaggaagagtcaagctgcagatgggaaccgccctgcaagcaggcctgtccagatggggggccatctaaaaggccttggcttgacacccaccaatggacctaagcatggtgcttccccatcctcaagtggggctgtgccttctgcacatctggcccaagacatcccagataggtggttcccaggggcctgcctca

SEQ ID NO: 24300 - DNA, 201 bp, Bos taurus
cccgaaggggatagttactacctgatagccgggtacaggcccagctcttagaggcactagagacgtgggactggggaaacctgagactccaggagacctgaacagaaggaggccggtcaaaagggccccaaatcttcctgcagagacagagctacacatagcgcccgccacccgcccccaacacacccccaacacacacac

SEQ ID NO: 24301 - DNA, 201 bp, Bos taurus
aacttgggagtctatgtttacaggtggttcatttccaaggaataattcttaaattctttatggaatcctgcctaattaaaacttttattctgacagtaaatatggctggtcaggtacacacagggatgtatataccaggagctttatacttcttgttataaattcccttataacacgcaaagatagtagcaaacaaagttt

SEQ ID NO: 24302 - DNA, 201 bp, Bos taurus
gtgagagcccacgtgcagcaatgaagacccagagcaaccaaaaataaataagtaaatttttaacaagtgtggtcccaaagcaataactttaggaattaaacacgataaaaactcttagaagaatgaaaaaaaaaatctgctatgaggaaacagtcaacagaacattagaactaatcactaaacacaaaaaggagcagcatt

SEQ ID NO: 24303 - DNA, 201 bp, Bos taurus
ggtgtatattaatataatccctaataactttttctaaatgcttgcttcagggactatatctggaactgaacatagccacagcgctgtggtatggccacccttgctctacactctggtctcttcaagaggtgaacatagcagtcattatcctggtaaggcatgtagattagtaatcaccattctgttacctgcagagaaata

SEQ ID NO: 24304 - DNA, 201 bp, Bos taurus
gccacatggcatggccacacacacgcgtggacgagacaaagctaccccaaaacaatatatgcaacaccaaagcactgatcaaggtaaggaaaaaaaggaattcagtgctggtagattataaaatggtacaaccatattggaaaactggcattacctgacatgcacttatctcataacctagcaatttccctcttatatatt

SEQ ID NO: 24305 - DNA, 201 bp, Bos taurus
gaccatgggagcagaacgttgtaaacagaggctatggcaggggcatagcaatgggatagcatgatttgtagtagctggtagttaggatctttggttgcaacaatcacattatcttaagtgatagacttctccaaggcaacgtggaagaataaagaagacaggaatctcagtcacataggactaagaccttgtgggggatta

SEQ ID NO: 24306 - DNA, 201 bp, Bos taurus
tgattaaagtgttttcaaagtaaccagctttttttctgtagagatttgtggtttgagataagaagagtacttagctatttcggtagtcaaatctctttggacttaagcaatgtttttttttccctaggaatatttcttgattcagagcggaggaagtctgatgccagctccgtcatgtctcccctgaaaatctccctcatt

SEQ ID NO: 24307 - DNA, 201 bp, Bos taurus
agaaggtttttaaaaaaacaaaaaactagagacacaacagcatgtctgttgtgctgatgtgaaagactagcagagagagaaaaatcgtaatgtaggaaagaaagggcagaatgacgggaataacgcccttgatttgctgagagaagagggagctggtgagcaaagtggagggaggagccttggctggatgctctgagggtt

SEQ ID NO: 24308 - DNA, 201 bp, Bos taurus
ggcctcacaggccagactgagctgccttgaggaaagtcttcagtagctggtgctgcttctggagccatgtgctcattcctcaagctgcacccctctgttgactgtgtagggtaagttcctgctaggcctcttctagaagtggccatcggatccaaggtggttgggggcgtgagggaggaccattataaggggaagtgtcac

SEQ ID NO: 24309 - DNA, 201 bp, Bos taurus
atgccttgtgatgttgattagaagtcatcttgggatcttttctagaaaacactgcctaggagaactgggctttattttgtttgaactttcatatcttttagttcctaaaaaggagacttatgctaataatctttagggctttgcctgagtatataattgccttgtctgttttggcatctttggcagaattgaattgttact

SEQ ID NO: 24310 - DNA, 201 bp, Bos taurus
gagaaattagtgttggcagtcactaattagtgtcactagctggtgtggctaatttgtgtcaaggtgggaagtgctcacttaaagctgtttgcagcagtccttcctttctggcagctctctcagagtgaggacctcatgttccgctctacctcgtctgtcttttgtgcctagtggagcccctattcttcagtgaggatactc

SEQ ID NO: 24311 - DNA, 201 bp, Bos taurus
gccggactctcaggtggtggcttccccggctttcagcaggcaggactcaggccagctctctggttccatgggcagattcagttcaccctgagcaagtctgaaatggttgaagggaaggggaagggccgaggccagactccatggggctctcctgaggggtacaccgcaccagcctcctctgagcctggcttttgcctgtct

SEQ ID NO: 24312 - DNA, 201 bp, Bos taurus
gtgtccatgattgtatttttaaatgtctgtgtacaaggcgggtctgtgtgtgctgtgtgcgtgtgatgggtgagtatgcctgtgtacgtgtgttttaaatatatgtgcacaagagccctgtgtgtgtcctgtgccctgtgtgctacatgcagatacacgcatggacgttctagtgagaaggggttcccagacctggccagt

SEQ ID NO: 24313 - DNA, 201 bp, Bos taurus
taaaattatggcaaagaaaagtggatttacatacattctgactatgctgagaggtctatgtgatgttactgctggactgaactttatttaaatttaataagtggtaaagactgtttgcatttcttggtatgaatatgcttaatttttgagttctgcaaatttgataatatagtagaacatctttatatattaatggtttta

SEQ ID NO: 24314 - DNA, 201 bp, Bos taurus
tttgcttgcttacattttattcctcccaattaatacatagtctcctcgaaatggtgtttattcctgtatcacaaataactagtgtttgggactaatatgtgctggagaaaacctgttactagaatttatacatgacttgtataatgcatatgccaggtggaatatacttcccaattcctttgtacaatatttatggagctt

SEQ ID NO: 24315 - DNA, 201 bp, Bos taurus
tcttggagaagagttttggatgaaaaagaaaagaattgctttattactttgccaggcaaaaggggacatagtggactcatggcctcaaaactgtgtatccagaccaagggggattttttaaggagttttatggcactgtttcaagggtgaagttgttgataggaattaaaatgtgtgcagggcttgcattcctttaatctg

SEQ ID NO: 24316 - DNA, 201 bp, Bos taurus
gacaagggcatcagctaatcggtcccacctggtccaacccgtccagttcaggggcatcaagtgtgctgaggccccgggtgccactgtaggccctgtgaccatcaccaacactgttgctgggctccattgggcaaatgtagtccgtcgattcatcaaacttcttttttcttatgtttccaaaatgtgaaaatcccagcttcc

SEQ ID NO: 24317 - DNA, 201 bp, Bos taurus
cccttcctgtatgccaattttcacagaataggccagaaatgacaggtgctctcttatgctcagagaggtgtctgttccaaagctgggaagtctacaacagcgcagaggccctgcatctgaccatcagaaaaagtatggtacttccatgaccactgagactggagttgtgtggcaagaggtttgggacaaagtcatgcagac

SEQ ID NO: 24318 - DNA, 201 bp, Bos taurus
aacaaatcaatgaagtgaagaaaaaaaatccttggatgcaaaattgtgtagttgtatatttggcctgagcttaattttttaaaatagggggacaggagaaataaaaagattggaagaaaaagccaacgtgttaaattctttttgatgtcccaaagtttctaaaataatcgtatattctatcaatacttccattcataaaat

SEQ ID NO: 24319 - DNA, 201 bp, Bos taurus
aagcgaatcaccacctgctcacccatcagcaggctctgacatagagtggttggtcattctttattttttcattcttttctcctcactctcaggcctgacagttacattcttggtgatgtctgtttcacaggcagaatcttcccagccccgagtattcaaataccagcatagctttcaagtaagcccgctgtttgtctgagg

SEQ ID NO: 24320 - DNA, 201 bp, Bos taurus
gctaaaagaatgtgatgggggagcacagcccaggggtcatcatcagtacttggtggtgatcaagtactacatcctcagtacttcagctgagggctgggtcgtgcctgttcttcttgttgttccctcattactctgtacatgtacagtgtgtgcactgtgtggcatacatgtgtattataaaaatgaaaccttggtaaatct

SEQ ID NO: 24321 - DNA, 201 bp, Bos taurus
gtgcaaactgcaaggattattaaggggtattaacttgggtctgcagggaccataccattattaaggtactgagccaggtaaacagatcactccaaggcctcaactctaagaagtccatcgaattagggcatggtaactgccaagtggcataactggattctactgtaactgacataaagagaggaacatatttaaaaggac

SEQ ID NO: 24322 - DNA, 201 bp, Bos taurus
aaatagttctcaaaaacaagttaataacagtataacgaaataccatggggcagcaaacaaacagatctatgaaggtcatttcaactgcaaagagtacaagctggcacatgcagcactcaccagccgagacagtgaaattctaagaaaaatgaattaccatactaacatttattgagggtatactgcatatttactatgttc

SEQ ID NO: 24323 - DNA, 201 bp, Bos taurus
ctaacttggcccagtgcattcattcattaaaccacgatatgctgtgaatctatgttctagggacgagtatggcactagagatgaaacacggctatagttttgtccctcctatctgagggcctctgctttgggtcttctatctgtatcccctttactaagcatgcgcttggccaataatgctcagaaatcaggtaattgaat

SEQ ID NO: 24324 - DNA, 201 bp, Bos taurus
ccttcaagccatcgtcaagccctggccattctacctgctaaaccttccgcagagctatccacttctccccatgttcattgctgacactcatccaagactctatcagagccacaccctggcctggtgtgtcatgagggctgtcctaagataacttccccatctgtgtgatcctgtgtttacaaaggggcagcagcggtgatt

SEQ ID NO: 24325 - DNA, 201 bp, Bos taurus
atcagctcctgacgtttgtgggggagttgacaggagctggaggcttggcaagctaggaaatttgtcggggcgaccacagcaaaggtagcttcccatcgcaaggacagcagcaggcggcgcgggtggcaaaaggctgacaggtgaaagatgcgctctggtacttgggttcccacacccaggtagcgaagcaacagctgccca

SEQ ID NO: 24326 - DNA, 201 bp, Bos taurus
gtctggttccctgaccagggatcaaacctgggccccttgcattgggagcgtggtcttagtcactgaaccaccagagaagtcctgaaaactccctgcttttgaaatgcagttaggcctggcctatccatataatctccttttcttacagtcaagtatgtcatataatacaacctaatcagagaagcaaaacctgtcatattc

SEQ ID NO: 24327 - DNA, 201 bp, Bos taurus
gggcctccaggaagagggactggccatccctttccaactggtgcccctccccgcagacagaggcagtgctgggggagtgccgggtgcgcttcctgtcctttctggccgtgggcagagatgtccacacgtttgcattcatcatggctgctggcccagcctccttctgctgccacatgttctggtgcgagcccaatgctgcca

SEQ ID NO: 24328 - DNA, 201 bp, Bos taurus
tggagaccccaggtcagggccttacttgagggctaaaagggccataggaaggctcacccgggaggttaaacagagaaggcgtctaggaatacattcgtgcttctggggccctgtgagacctgctggtggaaggcacggctgaggacaacaagccaaggtactgaaaatggaaaagcagtggcagacacagagagggcccat

SEQ ID NO: 24329 - DNA, 201 bp, Bos taurus
ttacagaaaagttccataatcaaataagcatgaaaaatgctgacactgtgagtcatgtacatggctatccaaaagagggctagagttttcagcctttctcacacatttgtgaccatagatatttgtatccatgtttatataacttcttgatagcacatcaatttacactggtaaagtaatctagtgttcgatcagccacaa

SEQ ID NO: 24330 - DNA, 201 bp, Bos taurus
tgtccaacaaagtgaagtaggaattccttttggaggaagtttgtagcctttgttcttgggtaagtttctaggggtaactcttaggatggcctgtctcagacggtggactgactgcctgcaggtctgatgtgctgcccagcagctacttccctggtggggtgagctcacagtttctgatgttgtttcaggcccagtgctgtc

SEQ ID NO: 24331 - DNA, 201 bp, Bos taurus
gagcactgaggctcagtcagtccatgcctcatagatgccccaccatctgctacatcattcctgttccttaagttcagggtctgtcttgtcaagttctcacgattcctggttgctttatatacacatttatttattttaaatgtactcatatagatatttatttattcaccaaacattactgggcaccaattaaattctggc

SEQ ID NO: 24332 - DNA, 201 bp, Bos taurus
ctgccctcagggagtctagagaatgaggaaatagtttgaggtggggggagagtggatatgaatggagtaagaaattggggaatcaggacagtaaattggccatgtccccatgggtttaagcggcacatgcagtgaactgaaaggcaggtcttatctgttgattcatctcaagagctctagttgaaggtgaaaagatagagc

SEQ ID NO: 24333 - DNA, 201 bp, Bos taurus
ctatatcaggccctattgaaagttttcatctccttttcattccaggctcctggactcacctttcttcattgtctccttcttacaattttcctggcctcaacttgggacttaccagcttccgaagtttgcactgcctctatttctggttgttggaaaaaggacccgaactggcctcttcaaaggctctagaggctgatttta

SEQ ID NO: 24334 - DNA, 201 bp, Bos taurus
ggccccctggcagcagtagctagtgatagaactacatacaagtgggactggagttgaactcaaaggggacaggggtgtttccagtatgcagtcagaaccatgacatcaggcctgacactggtgtgctggtttgcattcccataacagtcctccttaatcataagctctacctggattccaagctccctcaaagacattatt

SEQ ID NO: 24335 - DNA, 201 bp, Bos taurus
tatatatcaggacatagtgattatggaaaattctaatattttgatatgtcaaggtcaataacatatttcaatatttaggttaatttcacacagagtgcacctcataatttctatagagacattgaaggattattatgcagctactcccatcacaaatgaatccttctataagacaaccccaaattgctgcaaaagatgaaa

SEQ ID NO: 24336 - DNA, 201 bp, Bos taurus
cctgaactccttttagggagtgttaaagttcagcagctgcagtggctctaattggatctttgtagaggtagaacgcaagtgccaatttataggtgacagtatattgtattgctttttaactttatcggtctatgctctctcttctccaaactttattgtatcaaagaatatcctatagtaatcttttctctacagctattc

SEQ ID NO: 24337 - DNA, 201 bp, Bos taurus
caaagccagcaaatgagcttcccatcctcctcacagaaaagctggagtttctctccatggtgcacacaaagaatcaccttcagctgcttccctgagcccaccaccacctccctgagcctctcggctatgttggccaggtgccgattgggccgcaggttcccaagccagtagctggtctggcacacaggacacctgctctgc

SEQ ID NO: 24338 - DNA, 201 bp, Bos taurus
aaaggaattaatttcattgacagttggtcctaggaatcaaatgtgatattttgttctcagggaatgacaatccacatgatggccactttgaatttgatcaattttaatccagactccttcattttgatggggatcccagaactggagcagttccacatcttgtttgggattcctttcttctccatctaccttgtggccctt

SEQ ID NO: 24339 - DNA, 201 bp, Bos taurus
aaactacaaagagagcagttggaatttagggcattttggagataagtagaagaagatgaaactaaataggattaacttcctcttgggcctgaaattgctagatttcctaagctatttactttatcctaaatattttctgcagaaataacaatcacttttctattttagaaagattattatggcctcttggtcttcctaggt

SEQ ID NO: 24340 - DNA, 201 bp, Bos taurus
attcattaaactacacttcaacattcccattaaataaacagagttaatagaagggagaatagaggtgggatgaggagggatgtggctccaaatgcagcaaagagcttgtgcgtgtaagtgatttaaacattactcatttattcagtacaaattaagtgttttatagaaattcaactagaataagcagattaaactatgaat

SEQ ID NO: 24341 - DNA, 201 bp, Bos taurus
tggtacaggctggccactgcgctgctctctccagtcctggacctagggctcataggtgcttcctacgccttcatcctccacatggtctgtcacctgcccttccacagcacccggcacaaggccctgggcacctgcggggcccatgccagtgtcatcaccctcttctacacacccgctctcttcttcctggctcacagtttt

SEQ ID NO: 24342 - DNA, 201 bp, Bos taurus
acacacatttacactgtcacacatgcatacacaagcacagactttacagacagacactaataatgacctttagagatactaaatcctaaagaactttggtattctgtatacattaaattgtttctaaatgagaccctaagattaatgtattaaaatccaatacatttccagttttttgtgaggaagacattgatgctttga

SEQ ID NO: 24343 - DNA, 201 bp, Bos taurus
taacttgtaatattaatatatctgttatttcagcaatatttattgagccctaaggtagatattagcagtagcaaggtagatattgaagttagctctgtgatcaaacaggataacaaatatttgtccataaggagcttgcatcctaaaacctttattttccatttacaattacttgattaaaatagaatttcaagtgtggta

SEQ ID NO: 24344 - DNA, 201 bp, Bos taurus
gcttctgattccaaaaccagttgcagtctcattgctaatatagtgctgagatttaccttgaaatagcaccgaagtctattgttgttttggatagagagaaaaactgcttggaatttccattaggaacaaagaagacagagttctttaaatttgttggactgcattattattccaatatattaaatataatttctttcattt

SEQ ID NO: 24345 - DNA, 201 bp, Bos taurus
agacaaaagccaccagagagcctcctctggtccactaagagctagcgataccagcagaagcagcgcattgcactttcaatctggccaaatcctgcaattcgctatctgtgtcctcagaaacctcatggacatcagcagtgtttttatccctatagatttgaggcacagccatgacaaagactcactttcaggttgctggcc

SEQ ID NO: 24346 - DNA, 201 bp, Bos taurus
agaaggaaggccccaggtttctctgtgcaacccttggaagaaactggctatttccagtacctgaataaagaggggacacagaagaaaaaaagtcaaagaggtagggccatggcctccctttgactgtgaactaaactcatccaatcatccagacaagaggtgactactgtaatgaacagagctgagagctctgtggacatc

SEQ ID NO: 24347 - DNA, 201 bp, Bos taurus
aagctggcgtgctgcaattactgaagcctgcccacctagagctggtgcttcaaaccaagagaaacctgcacactgcaaggaagaaaatccacacagagcagggaagacccagcacattcaaaaataaagaaaaagaataagcttaatcacagaagtgagaaaaggcagaaacaaaggaaaactgtctaacaaaactaaata

SEQ ID NO: 24348 - DNA, 201 bp, Bos taurus
aaactatggctgaagaaacttacaaaaacatccagcctgattaaagatctggctatctcaaagtgagcccctaacccagcccaggtttccatcatcccccctgcacgcatgggatatgggcccaggacaagagcttttccataaaagtctattctgtttatagactctgatccacagaaaaattcagcgggtcactagggg

SEQ ID NO: 24349 - DNA, 201 bp, Bos taurus
acaggagacatcaaatttaaccccagcctgaggcccaatcacaaaatcaatgcagttaaggtcttgagcttttaataaggaaaagaactaaaaatccacccaaaaatcttaaatcattcattgatttattcttcattattgatgtttaccttgtatacaactcaggtgctagacacacacacaaacacacaaaacaacaac

SEQ ID NO: 24350 - DNA, 201 bp, Bos taurus
tcacaggtttggtattgacatgacaatcaaaaaaaaaacaaacaaacaagtcttaaataagaaagtgctttgaaaagtgtgaagcaccaattaatctgacaggtcattataatatgattatcacaagctagctggagagaagattaatgtccatgaaacaattagaaggtgaaacagtatagttaattaggcaccaaatga

SEQ ID NO: 24351 - DNA, 201 bp, Bos taurus
tggcttctccaaggggaaatttgcaaccccaggggagggtgagtgggtcgggagtttgtgagcttattaaaactgtatctgagaattaaggtcatttaatggagtgaaaccgtactttttgttttcccacgtgtcccacataaagttagacgagaaacagggtgaggtttctggattacttattttagccataaggacctt

SEQ ID NO: 24352 - DNA, 201 bp, Bos taurus
caagtccccggggtgagtttaactttcttggcccttctcagacacagcaggtggcaggcacatctcttaaatcctggattctggacccccaggtccttggccactctgaaagaggaaccctgccactccaaaagctcatgctgccagaaagctcttccctgagctgctgactgatgggagcatccaaaacacagagctagg

SEQ ID NO: 24353 - DNA, 201 bp, Bos taurus
caggtctggtccttcacacctgctccgtggatcaccagccctggtctctccaccccttgaagccacatgtgtgaccctgacttctgtagctctgttgttgctccagccagtgctgggtgtacctactcttccctggaaagcaccctctcctctctgtagggccagtgctctagcttgtgctccaagcgtgtctgagaggtt

SEQ ID NO: 24354 - DNA, 201 bp, Bos taurus
cagcccttttggctaaatgcagtttcattttcagaagtgactaccctcatttggaagttagaaagctgacttttcaatcgaggctacagatgaagatactgattaaaaggcctcctgttattcagatcccacatctccagctttcaatcaactttccagagggcagggcagacttgagaatccccctgcaaagcacagaag

SEQ ID NO: 24355 - DNA, 201 bp, Bos taurus
caacaagagaagccaccacaatgagaagcccatgcaacaaggagtaaccctcgatcaccgcaactagagagcccccacatgcaacaacaaatacccagcatggccaaaaaagctggagccaaattaaaaaaaaaaaaaatcctggctctaggactttaataactgcaagcttccccatctgtaaaatgggagtaagaatac

SEQ ID NO: 24356 - DNA, 201 bp, Bos taurus
aatgtcttcaccattgattctgatacctctgcatcacagaggagattgtattataaacctgataggttgttgggcttttggtttttttaatgcaagtgccagacttaagctttgattgcctatacatctacttcaaagatggctatctttttcggggggtgggaagaggggagcaaataatttttaattttctttctttct

SEQ ID NO: 24357 - DNA, 201 bp, Bos taurus
ccctctacccactcgtcctccatcctggcttcccaagcatcactctgccgtgctcagccctacccgggagacaaggggaaatcgtgacgctgaatagctcagttctgccaaaggcctcaggccccgtctgcccgccgcctgcctcccggggctgccggtcctctcctgccctgtcaccgccagcccacgccctggctcctg

SEQ ID NO: 24358 - DNA, 201 bp, Bos taurus
gggggccaaaggagcccaagtgactcactgactacaaggaagtgagtttggttcccagctcagtgtgaggatttcctccaaggcatcaccaccagagcaaaggccccaccccactcaggcctcctgcatgggagggcaaggcctggggttcgatactcacctgctgacttcttggacattgttggctcgagcagcttccat

SEQ ID NO: 24359 - DNA, 201 bp, Bos taurus
ccacaaaggggacaataatcctgtccatccttgggagagccccccagtcaagcgatggttcttttcctccagctactctcaagagaagatgaagaagccctaggagtttgtgtagaagcgagcggacaggcaacggttgactgtccaaggcaacaggcctgaggcacgtgctttctgccaacccagctcctcacttttacc

SEQ ID NO: 24360 - DNA, 201 bp, Bos taurus
atgtccccatatatttcctgaccaactccaggatgtaacttggtgactcgaagccagtcaccttggctgcaaatacactcacacattcagtgaccctctccccacccccttcaagtaagacatccagtaaaacctttcactggggcccagcagtggcttttcctggttacatacaacagtttataacatatatatacacac

SEQ ID NO: 24361 - DNA, 201 bp, Bos taurus
ggaccagggcccttgtcactgatcactggtctagtggctaggatctggtgcttttactgctgtaacatggtctcaatctctggctgggaatccaaatcccgttccaagcctttgtaggctgaggccacacaagattaacaggaaggctatttgtacatccagatgagaccttcgaagacacaggaggaaaaaaagcaaggt

SEQ ID NO: 24362 - DNA, 201 bp, Bos taurus
atgatgatgagagcatatgtccctttgcattccagttctatagcaatggtcaccctctcaactcccttcccactcccaaatgtcagagacaaaataatagaatgggtaatgcacttctatggaggaaaaatggaaagcaatggcaactgttgtgagctggagtactcatccacctaaaagaagaatcattcattcagttcc

SEQ ID NO: 24363 - DNA, 201 bp, Bos taurus
tcctggggagggagtggactagctacgctcagaaatgcaggcttcattcactcacctgtagccggactttagcagtatccaggggaaaggtgatgaggtcagcaatgcaggcagctgtgcctgcccccaggaacttcacagtggctgtagggggcacatctgtggccttgaacccaaccataatgacgattcctgcaacct

SEQ ID NO: 24364 - DNA, 201 bp, Bos taurus
ggcctgatgccggtctctgggggctgcccctgccccatgcccacctctcccaggccagggttccaaatcctcctcgacatgaggctcagtctcctcatgcctcagcttcccatgcctcagctctgcctctgagtctgcaccaccctgatctcctgacccacagcctagatcctgccttgacccacccctcagcactcacgg

SEQ ID NO: 24365 - DNA, 201 bp, Bos taurus
ggccatgtatggagccatttttggttgtcacaaatgggggaggagtgctactagcatttggtggacagagaccagggatgccgctgaatatcctacgatgtgcagataggcccccacagacaaaacccatgctcaggcgtcaaaggtgccgaggctgagagaaactgctccagggcaaagcagagctccttcttctctttc

SEQ ID NO: 24366 - DNA, 201 bp, Bos taurus
aaatctatttctccaaaattgggtaattggaatttttttaacctgacaagactttcttgtcatgttacttgatgtcagatttgaggaaacacttttgattagttaggaaaaacttcttcctttatactatgaaatagttacttttagagaagaaacatttaagtaataaatagctcttttaaaagcatggtccacttatat

SEQ ID NO: 24367 - DNA, 201 bp, Bos taurus
aaagaatttcaatgagcagagattgggatgaagggcattttatgatgagggaatggtagaaacagaagccaaaatcaagaatgttcaagtagtattgtgactatagtctaaggcaaagcgaagcagggaataaacataaaaaggctatatgggcttcactaattagagttgtgactgtcatgtttttaggaagatatcgtt

SEQ ID NO: 24368 - DNA, 201 bp, Bos taurus
atctgagcaccattttcccaataaacctagaagataggtaaacacagctataagcacttgaaatgttgaccatattttttcctagctacagtagggaaatttgactttacaaagaagcataccaaattagtcaagtagacaatgtcaacgctgggctaacttaataaatacctaaggatactgatggtaatgattccaaag

SEQ ID NO: 24369 - DNA, 201 bp, Bos taurus
gagcactcagtctggtttggggttttacctacctcagagaaaaaagacactggccacttccactactctgccttccaaaacaacatcactgtgtgtgtacgtggctcagatatccttagtctacagcttagaaaaaccgccaaagacagccttgcatcctagtctctgaaaaaacacgtcattccttttaaacaaagctcc

SEQ ID NO: 24370 - DNA, 201 bp, Bos taurus
gctctgccctcaccaccattggtccggcccctccaggccccgccccgaagcgctcaccgatcgcgcagatcttgcgctcgcccagccaaactccggtgtagggtgggggccgcgcgcgggcgccgggtaggcccaggagctcgcacagtcgcaccgcgcacgcctccagcgcggccacgtgggcgcgcaggcgcaggccga

SEQ ID NO: 24371 - DNA, 201 bp, Bos taurus
agtgaataaaccttagttcttgattatgtgtattatcttagcttttgtgatttcatattgctcaagaatgcagagaagttaaatcttaagccatgaagtggatgtttggcaagagtcaagtagaagttgacttacttaaaaaataagagggctttatatccaataagaaaatagtctcagaactttcctgtttgttctaat

SEQ ID NO: 24372 - DNA, 201 bp, Bos taurus
agttacacaaagctgtggtccatgtgatcagattggtttgttttccctgggggtagagagcttaaataggaagtgaaaatcacaaatcagaaaggaaaggctcatttataccaccatttacacaaaataaacttatgcatgacaaaagcagcaaagacaaaacttaaagacacaatctgggaaaagatattcactaagtat

SEQ ID NO: 24373 - DNA, 201 bp, Bos taurus
ccgagggacgcatggaagttggcccacagctgcacagccccccgcccaaggcagtaggatccattccttccatgttggccaactgaggctgttcagtcttctctaagaagctgtgagttttccccactgtatcatccagcagctatcatgtcatccttcctgcgctgccggagcgcacggcatgggcctctctttggtcct

SEQ ID NO: 24374 - DNA, 201 bp, Bos taurus
cacacccaaccagtctccctgacctggcccaagttcatacatcctggcttctctacccctgtctccttgccccagctttctctgcctgtctctggatgcttcatccctggttctgcttacctattaagccggtccatactggtgtctccatgtgaagacttgttagaggctgagccatgacctattaaaccctcggttcct

SEQ ID NO: 24375 - DNA, 201 bp, Bos taurus
tcataccgtaggttgttcattaaatgtgcgctgaggtcaactcagggactgctgaggcaattctggctcatccctacttcaggatgagcctctaatgagcggtcccggtagttttatgtttacaactccatcactgctgtttgaactctattgatgtcatcaagcgactgtccttgaaattcttaggaacaacagctactt

SEQ ID NO: 24376 - DNA, 201 bp, Bos taurus
ctgccacaaacctcccctgaggtcagagaatccagagcccagtacctgctgggatagaagtagagaggaggaagggagaagcccacaggggaacaaacacccttgaactgattttggaataaatttccttacccgggcgagtctaggcttaagccagtcaacacctggaagcaaggtggaggaggcttggaacagggcact

SEQ ID NO: 24377 - DNA, 201 bp, Bos taurus
gatccaacttgtataataaaacttggccatctcccttttcacaagtatgggacacggacagaaaggaggaagagatccccttgccctgctaatcaatacacctgcttgggtatgaggcaaacttcaggatatccaaagagggtgtgaagtactgcagggcctctcacaagctctcttcccctccccctgccacgcctcagc

SEQ ID NO: 24378 - DNA, 201 bp, Bos taurus
gagggggtgaggtaggctacctgggtgtgcaggtgagagggggccgatggattcccccacagaaggtgtcttcctgccatggtgggaggggctcccatcggaagaggtaggcagtggcaggcccagggaaggggatttattttgtctgtgttcttcctccactatactattcctggactccaccaagaccacgacccctct

SEQ ID NO: 24379 - DNA, 201 bp, Bos taurus
taagcattccttctggcccagtcaaggtagattgtggcaacagcagtagtacctcagagaaagagtgcaggctcccagctcccaccgcttgatcgtggacgagctgttctaatctttgggcctccttttcacaatatctaaaatgaggctgagaaaaaaaaaaaaagatcaaaaactaagatcatgggatccagtcccatc

SEQ ID NO: 24380 - DNA, 201 bp, Bos taurus
tataagccttgtgtggtaagagcctccaagatggcccacaataaccttgaccctctggaaggcatagctctgtgtagtcctctaccacactagagctgactcatgcaaccagtaggatactgtaaaaaagatggtgtgtgagtttcaaagtcaggtcacagaagacattgtggcttcatcttgatctctcttgaatcacct

SEQ ID NO: 24381 - DNA, 201 bp, Bos taurus
tccctgctgccggcccatcaacactgtgggtaagccaagaacccaggctgggaggggttgggttacagggcaaaagacttgggcttgggctgaaggggaatggaaatgggccagacacatccttgtcctcctggaattcaggttctatactgggaaatggacatactagcaagtaacccagatgcaaggcatctgagatga

SEQ ID NO: 24382 - DNA, 201 bp, Bos taurus
ggccaggctcagagtgaggtttaaggaacaggaggctgaggtttagggctttgtacagcaaacttctatggagatgggagtgggcagggcagacggggtccctgaggatgtctggcctgctgtctgggaaactactgtccagtccagggttcaggaattcatccccccgagtaaggaagagccctgggaggtgcttgggct

SEQ ID NO: 24383 - DNA, 201 bp, Bos taurus
gcctgaaatatttacaatctggccgtcgactgagaaaatttgtagatcactgatctagtaacacacctgatcatctgcctggaattacttttggtctttgagtatgtgaaattatctgtttccttgagcagtttaataggcactcacccagactggtgcctatcctgtttgcttctttgaaaaagaattgttaggcctggc

SEQ ID NO: 24384 - DNA, 201 bp, Bos taurus
agtggttgttgttttcataaagggtttgggtaaatgtatacatatctaagtgtatgaagagttacctggtcgtatgaggtggtaaatcttaagtggcccaagatgatgtgaataattgctttcgaggttctgaggacatgggttctgctacctgttcttaccacagtgtagctggcacgaagcatctttccaggtgtcctg

SEQ ID NO: 24385 - DNA, 201 bp, Bos taurus
agctgccagaagaaaaagaaatagactaatctgctttaaaaatttttttaattatttggattgaatttagtaaattagtttatggacagtgtgtttatggacagtgttctttttcgggaaagattctgttaaagagatatttcaaagaatagaaattccaacccaaatagacagatttaagatactagaataattttgggg

SEQ ID NO: 24386 - DNA, 201 bp, Bos taurus
aggcttcttctcttctttcttgaatgtccaaggaaacttaagagtgtgggtgtagtttacaaatactaaccataatatacacttgtattgacttcaatggtatttggtatacttacacgtgtgattctcatttcatactcagatcagatcagatcagtcgctcagtcgtgtccgactctttgcgaccccatgaatcgcagc

SEQ ID NO: 24387 - DNA, 201 bp, Bos taurus
ctctgaagaggaactgtcacttggccccaccccaaagccccacagaatcctagatttccaatcctagatttctcccctctgagtggggagagtgctgggcaggggccaaagagccagatgcgctctgcgcctggccaggcctcagcctccctcctgaacctcgaggggtgagagggcctgcatgagcccacagcagcctct

SEQ ID NO: 24388 - DNA, 201 bp, Bos taurus
agcacacactccaggcgcttgttcaacagaggctgagttttctgcacagacgctggtgggaggcccacgctaggatgccccaccaacggccctcggccccgtatcagctctgtgaccacaggaaaggtccttcccatcttggaatttcctcatctgcaaaacagattgagagcccagaagactaatctccaggttccctcc

SEQ ID NO: 24389 - DNA, 201 bp, Bos taurus
aaccatagaaacggggtgggaaggactgtggcaccctggacccccaacttagtttctgctgccctttttactgaacacctgctgcaggccagtccttcatgtcctgtggcaaatgagggtaaagataaccacagacagcctcaggtatctttagtctcaactactgacttggaaactgaggctcagagaggttaaataact

SEQ ID NO: 24390 - DNA, 201 bp, Bos taurus
tgctaaaaaaaccagtagctcaacttgaagaggaaatttaaaaataccttgagataatgtcagtgaaaacacaaccatacaaaattaaaaatgggatgcagcaaaagcagtcttaagagggaagtttatagcaatataggccttcttcaaaaaaaaaaaaaagaaaaagaagaaaaatctcaaacaacctaacctatcatt

SEQ ID NO: 24391 - DNA, 201 bp, Bos taurus
ggtcaggaataggagacagacctcttttttcctgtacaccttttcatactgtttgaatttttaaccaaatgcttgtattagcctttcaaaaaataatttagaaataaaagagtgggatagtttatataacccttaagtgagctacagtaatatttttaaactctcttctttattctttagttatagtgaaaatggtatcat

SEQ ID NO: 24392 - DNA, 201 bp, Bos taurus
ccctctcctactggccaattcaacgtggaacaagggatcatccaactttcctccccttcctggtcatctggcccagagaacctgtttgtcttagaggtggagacaggttcctttgccttatgccacctcagtttttcagactaggtgaggcagaataagcaatggaccaagaccttttatcctagatgaaaacaaccaccc

SEQ ID NO: 24393 - DNA, 201 bp, Bos taurus
caataattctcatctgtcagcactcttcctaacaagtgctgaataagggcaaaacagtaccctttctctgtatatctctgtatgcgtatgcactatacacagtcatgtaatcaccacttctcaatgtctattggaaaggaagactcgagagttgggtggagagccgagggccagataagccagcctggaacctcgggccca

SEQ ID NO: 24394 - DNA, 201 bp, Bos taurus
attaaattggtacaacttctttggaaaactcttaggaattattttagaaatctgaagatatatttgccctaatatccaataattcacaactagaatgtctcctaggtaaacatgtgcttttgggcactaaatataaagcactgttcttagcagcattccttgtcatagcctcaaacagccaaaaactccaaaatgctcact

SEQ ID NO: 24395 - DNA, 201 bp, Bos taurus
tattaagaaacaatgccccaaatatcactactttgatacctgccagattaattgataaatataaatcaattatcaacacattttctatcagtatattttattttagagtccaaagttggaagttccagctagagtcatatgaaacttaaaacacaaagtactctttgcattgggattttaaggcatcatttcaaagatatc

SEQ ID NO: 24396 - DNA, 201 bp, Bos taurus
gtggtccctgtttccatttctatatctgtctttaggatttttcattatgttataaaatatgatgtttgagagaatatgggctttattctctgatttcaacctctcaccagaatacatttgctctgcatcttgtcaattacttatttttgtcaaaactctaataatacttcactgagttcttataatagttcaataacaatt

SEQ ID NO: 24397 - DNA, 201 bp, Bos taurus
gttttcaaaatgtttaagtacattaaatgacagagatgcattttattttttctgaaagttactggcaagattctgtattattacctttttttgcttatttattggatatatgggtcatatgaaaatgatacttggttaaaccttgagaaaacatggaaaaaaagaggttattatatttaaggagaaagaaaagaaagaagg

SEQ ID NO: 24398 - DNA, 201 bp, Bos taurus
gtgaatttctttactttaagaagcaatattaaaagaaaaaaacacttttcttttgtacttatttatttcctggctacacaaaatgccccattttcggaacattctccctattccctagatttctatttaatagcatcacacagttgtaatagtaatggtaataataagaagcacatttataatattttatatagtttttac

SEQ ID NO: 24399 - DNA, 201 bp, Bos taurus
tatcatgtttattaaaattcacattccgtgggacacactgtgcaagtatgcagagagactgaatattaggatgcccttcaggtactttcaggttttgttttgttctatctcagaatatgttaaggtgagcctgtttttttgcaaagccagagagtaataaatgtaattctttctgcagaagaaatgcttttttcccccaag

SEQ ID NO: 24400 - DNA, 201 bp, Bos taurus
gatatctttggatataaaaaaaaaagctaaattcccctactgggtggaattttatgagctctgtgggagaatttctttgtggtccttttctctactgtacctaatatatgctgatgattgttgtgaaaaactattcttattgcatttttcaaaagcccaagtcttaacatcaacagtcttagaagtttagaaccatctaga

SEQ ID NO: 24401 - DNA, 201 bp, Bos taurus
gggccctgtatgcaaactctgcagaaggctgctcagtgttatttcttggcaaaggagcccagtagtgacaagtaagtgttccctcccactctagactcagccttgaaaacagaagctgcctgcatcagcaagatttcccgtttatctcaggaaatttgtgcccaggatgatgtctgtaaagcagtaaataacattattcct

SEQ ID NO: 24402 - DNA, 201 bp, Bos taurus
tgcttggtaggatttaaagtgcaggcactcccttatcagagtctttcccaaccagagagcagaaatactgacgaaggcaaaagtttgacagagaagactagtgtttttgatattgataggcttctctggtggctcagacaatctgcctgcaatgcagaagacccgggtttgacccctgggtcagcaagatcctctaaagaa

SEQ ID NO: 24403 - DNA, 201 bp, Bos taurus
ggtcgtatagttcaaaaatagtttagagtgaaaggtattttaaaggctcataaacattaaccataaatcaaaagtgcttattcatgggagtcaagagttagaaagaacttagttttcaatcccatccttgtaattccatcctttttaagagttcatggcaactctgggctttctaggtggcactaatggtaaagaatctgc

SEQ ID NO: 24404 - DNA, 201 bp, Bos taurus
ttattttaaaaaagacacaagcagctctacaaagatactctatctcactagtagttgggaaactggaaattagaacaacaatgagatattgtgtcggccatactggcagaattcttttgtgaatagtgacatcaaatgatgagtcagaagtgaggaaatggatactcttacccagatgagtcagaaaaacaaggctgttga

SEQ ID NO: 24405 - DNA, 201 bp, Bos taurus
atctgtgaaagccctatccctgaaaataaactgatcaggctaggggagggggtcccccttatttatttagtcccagccctaaggctaaactggtggcctgacagctcagagtgtttttctctgagctgaaaagccaactccaagtgctggggtgagcaggttaggaaacttgagaaccacacagacatcagggaaaattcc

SEQ ID NO: 24406 - DNA, 201 bp, Bos taurus
attgtatacatatacactatgtcagttaattcttaaaagcacaatatgagaaagatctcattttataaatgaggaaactacggcacaaagaagttaagtaatatgcccaaggtcacacaaatggtaaatgaaagatcactacagatctctcatatacatatgagataacactgaaaacaatttattttttggccaataaat

SEQ ID NO: 24407 - DNA, 201 bp, Bos taurus
gcttgctggtctgggccttttgccatagggttatttaattttaaatatactgtgattgacccaatgttatctaactttgaataaaccctcctatttgtgttagataaaactgcacttttgctgccacggtgttagtaataacgcaaatattacccagccatatgagaagtcgataaattatgtttaataaattacaaacag

SEQ ID NO: 24408 - DNA, 201 bp, Bos taurus
cagtctcaaaaggcttgttcttttcctttaagtctctgcagccctttggaattcatctctcatcacagagaagtttcagtgcctttagattagggatctatacccacaaatgatgatccactggactctgatccttggccttggagaagagccaacagagctggttacaaattcattgttaattactgtgtgtaatcacag

SEQ ID NO: 24409 - DNA, 201 bp, Bos taurus
ggtctagagttaggacttggcactttcactgctgtggcctgggtttagtccctggtcaggaaaccgaggtccccaaagctgtgtggcatggccaaaaaaaaccccccagaacagagaaagatcatttcatcaagccatctagttttactgataaaaaaccaaaggccacggaggacttgcctcccatcatgaagaaagttt

SEQ ID NO: 24410 - DNA, 201 bp, Bos taurus
ctttatcattgagctacctgtgaagcccttatgaaaaaagtaaataacactatgatgttctatgataatttattcattcactcaacaaaaatttatggaacacctattatatgccatacgaactgctgggggtatatgaagatgaataaggtgccagtccctgctttcaaggagttcatagtctagtggaggacatggaaa

SEQ ID NO: 24411 - DNA, 201 bp, Bos taurus
ataatgtgcatatacatatctacacaacctctttcatgtagttttagaaattcattggatccactgaagtctaataagggcccaccaaaaccaaataataatttctattgtaagtggttgcttatgacatatagatacatattttcactttgaatgttatatatctggtttgtctctaagctcttctgctactgctactac

SEQ ID NO: 24412 - DNA, 201 bp, Bos taurus
cccaaagtaaaacatgttatggtaaaaatgtaagagtttaatctggcattgcctctttgtatcagcataattgcttcccttacagaaaaacccagtaagaataagctcttggcgtcctttctggcctcaaaactttcagtgatctcttttgtctccttttgaggtccctatcctgtttttccatcttgctgacacctccta

SEQ ID NO: 24413 - DNA, 201 bp, Bos taurus
gactggaagtaaggaacatggtgaatacaagggtctaaactatggtcactgtaactagaacgcagaatgtgaaggtaaaaggagtccacaataagaaacagtgtttttttctaatactactgggaaacaattcatgtactttcatcagggacacgatatgacaaggttttttggtaatgtttattctgactcaagtgtgaa

SEQ ID NO: 24414 - DNA, 201 bp, Bos taurus
gtttatatatgacatctgaattgaagcctaaaaattatttcaaaaaagtgatgctgttcagactaaagaattggaaattgtgctaaaaatccactcctatgtattaggaaaggattatatagcaaaaagtaggctacatgagctaatgtaaacaattcagaccttcagcactttctctgaagggaaaaattttttaacctt

SEQ ID NO: 24415 - DNA, 201 bp, Bos taurus
aagattgtaaagtaattatcctccaattaaaattaaaaaaaaaaaaatactgtctctctgagaaatagactttgcatccctgtttgctttcctacatttgtaccctagaagggactaagtccctgaaaatctaagggttgcactgatctttatatcttcttcctgtcagttttgtccagttttaatacatagtgtgcgacc

SEQ ID NO: 24416 - DNA, 201 bp, Bos taurus
gttagatgcatgttttaaagcagcaagtaaactagctctgatttattttgaatgccatttcagaactattttgagaagagaacacatgatttttcaagagcaggccatagctaatggagaggattctgttgtgtccactcaagtcccccttcagacctgaagaacttttgcccccacctgccaggagactagcatctgtca

SEQ ID NO: 24417 - DNA, 201 bp, Bos taurus
ggggagaagaccagaaattattcatgtaattttaattccccacatccctaaattggcagatctttcaaccatgcacaaagcaaaagtatagctgcaactttctgaaatcataacagattcctcatatttgtagaatcgtgagaccttcacggtctgttacgctatttactcttctagcatctctcagttgctcagatgcca

SEQ ID NO: 24418 - DNA, 201 bp, Bos taurus
gaaatgtttggcctaatttctcaaaataaagtcatttttatgggtggtgaaatttctcatgccccacttgctgaaggatttcatgtaaacttaaaaagtttacaggaatttgatcctcatcacaggcactgtccaaattttaagggatgaaaagaagttcaatagatacctgtttaatgctttcacttactaaacaagtat

SEQ ID NO: 24419 - DNA, 201 bp, Bos taurus
tgggccaggtgctcagctttatcagtcaggggaggacaaaaaaaaaaaaaaaagccacagtgcccgaacaaaaccgcaggtaggagtagatcctcaaatcgaaaggcctggctgtgaacctggctctatcactgctagctgtgcaaagtaaacaagagatataaactctctaagcctcaactttctcctccgtaaaatggg

SEQ ID NO: 24420 - DNA, 201 bp, Bos taurus
gaagcagcctaagatcccccgccccattccccttggggccgctgtgaacgttctgtcccaccaagcagctctgccaaaggggactcagagctttgacactaaccctctctaaaggccaattaatcaggagagactatgaagaagtattactgaaaataaaggacatgatctctgtctcttttcttctttgtgctataagaa

SEQ ID NO: 24421 - DNA, 201 bp, Bos taurus
agaaggtttaagccagtatcagattgtcctccaagtttaagccctcctgaattgaaagctcaattaaaaacaaacacacacagttgggggccaactctaacacatctgtgagctgaatttggcctaccagatgcaagcttctggaatcctctttccggaatttcagaagtgaaatgaagaagcatctccaatccagtctag

SEQ ID NO: 24422 - DNA, 201 bp, Bos taurus
tttcaaacactgggcgcacctgaaaaacatggcttcatctggctcagtccaggagaaagcgtgttaagagacacaaaaaacacaaccatttacttttttatatgttgggggagatagtcatgaacagtgttgggtctaatggataaaaaggaatttttttgggggggtattaaaactctgccaaaggaaactgaattctcc

SEQ ID NO: 24423 - DNA, 201 bp, Bos taurus
acaattagctgtctatgcaacttgaaatttccattttgccagctgagtaatcagttgactggagtttctcattttggatgcatttctaagccttttgtgttcaggttttttaaaaatgtggattctaaagtaaataaacagtgcgcttaatcagatgtatcctttttagaaacaccctcttcccaaacatacagacaaacc

SEQ ID NO: 24424 - DNA, 201 bp, Bos taurus
gtcataatttcccttaagaggttttgctgataattgcttaagacatcagatttcctagttgttttctattttaaataggccacaatgaaaaagtaattcaggacccaaaggaccgaatgaaaggtagaaaattctaggcacagggatagcacttggtgcctcccatcatgctggcaaactaccaggccagtgctctattgg

SEQ ID NO: 24425 - DNA, 201 bp, Bos taurus
tttgagaatctgctatatgaggaggcactggtgatgcagaaatgaataagacattatttctattttaaggagctcactatttaataattaaagggatttgtccaatctgtattacagggtaaattcagttgagtaaatccagttggctaaatatgaatttcaaaattgatcagaagtagaaaagacctctgtcaaagactt

SEQ ID NO: 24426 - DNA, 201 bp, Bos taurus
cgaactcgaaatagcctattaaatgctgtagaggtggcgcacaaggtaaaatgatgtgaagaatgagatcaaaagttgaatcaagcaattagaaaaaagtatacaagataaaaatagagccataattccacgggggaaccagatgtgcttttgtcaggggggaaatctatatgcatgtggttctgtcatgactaaactggc

SEQ ID NO: 24427 - DNA, 201 bp, Bos taurus
atatacaaaaaatgaaaagttaacaacgaccaagaaaaagaggttgttttcattactctagaaggtatccctggggtcttcagggagcatatttccccaagggtgatctcaaacctttccctaaagaacccccaggcataagagccccagtgcatctccagcccaggatctggaggcatacacccaggcatgaaatgtctt

SEQ ID NO: 24428 - DNA, 201 bp, Bos taurus
gaaggggcattgggctgagaagagtggagagggtagacagaaggtagcatcaggtcagaaagctggacaaacactctgggcttggatgagcagaggagatcgcaggccccaagcctaaggcagcccgcaaccatatgggttggatggggactgtcaacaagattgagctttaagtccacaggactggctgggagtcacagt

SEQ ID NO: 24429 - DNA, 201 bp, Bos taurus
ttcactcacctcatcctcgagaaggccttgagttttggtaaaagcggagggcagacacacaaaagagaaaaagaaatacgaagaatcagtgctcatgttatacagttccgctggtcgataaggacgtagtacagtggcggctcacccacactactttgataacgatttgcgtgcagtcaaaacagtcaagcaggcacactg

SEQ ID NO: 24430 - DNA, 201 bp, Bos taurus
cacttaaattggagcactgaacatttagatgcataccgaattatgcatgggccctaatcacacagacaaggctggtgccagccttaggcttgacacggcagtgttcaccctctggccagacgactgtggttcaagacacatgtaaattgctttttaacagctgatactgtataagacaaagccaaaatgcaaaattaggct

SEQ ID NO: 24431 - DNA, 201 bp, Bos taurus
gagagagagacattagcaacactaattttttcattgggaggcttatcgcatgattcaacaaatgtttgtctaccaaacatttgctcttcccatctttctgcgaattgctgtccttccctttcaagtgccagacccctacactcctctccttagctcaaagttggcctataagcctctattcccgggctgcatgggaagagt

SEQ ID NO: 24432 - DNA, 201 bp, Bos taurus
cgcagggctatgtctatgtccatcctctctattgagtgtagtccaaagagactgaaacgatctgacgattatgcagaatactgctgggacttgatccaccatatgatatcattttgtcagtgatgaaagtgaaagtgttagttgttcagtcgtgtccaacacttttgtgactccatggactgtagcctgccaggctcctct

SEQ ID NO: 24433 - DNA, 201 bp, Bos taurus
aggagaaaattaaatttgttgacaacatttaaaaactaggaacttcagataaacattctaaatttttgtcttcctttgaaaattttaagttaggacctatgtggtgacagacgattgagactgagtaatgactgttctcttcaggtaggaaattacatactttgtagttgaccattttctcttctgttacctctcagccag

SEQ ID NO: 24434 - DNA, 201 bp, Bos taurus
aggaagtcatttattaagggtctgctaatatctcccagggctaccctaagaagtcaggttcccttatggcacaggaataatgtggttgaatgtcaatacccctctaccctcttctcttctcttctcctcaaagtcatgtcagtcatcatatgaggcaggaaggctcacaaacattaaatattccctagcaattagatttaa

SEQ ID NO: 24435 - DNA, 201 bp, Bos taurus
tcagaggctccaggatggctttcctggccttagcctgccaggatggctcctccttggacaagttctcccttctccccatcaacctggatggttcttttcctttcacatggggcctgagaaagttgaccttcttctcttcggtccctttttgctctcaattcctgctgagcctccaaggctgtgagcagggtttggggggag

SEQ ID NO: 24436 - DNA, 201 bp, Bos taurus
cacaggtgcttttgacttgcatgtgatttactccaggagtttgatggagtgaatggagtgtcatgccccagctggaatggcctggtctgttgaaatttgtcggctggtcatcagatatctcaaaatgtcacagggacagcctgtggtctggcatcccagtcctcggccaacctgtcttcattctgccctgcctgacctgcg

SEQ ID NO: 24437 - DNA, 201 bp, Bos taurus
caggtctcctaccggcttggcctccagctgctccagctccagggagctctttccaaaacgttaagaatagacttggcacctggttgtgtccatcgccccagagccagcaagctcgtctttctaaacaggctggctgaggggcaggggcattagagagagggtacccagaagcaccccttccctagcctgtttcattctttt

SEQ ID NO: 24438 - DNA, 201 bp, Bos taurus
cctgtaagagcttgcacttcatactttatcacattcaaattgcctccttaacgtttgaatatcttccccattaggctttaaactctgtgagggaaggcccatatctactcctggatccaatatttattaggtgctcattcagatttcattggggcttccctggtagcttagctggttaagaatctgcctgcaatgcaggag

SEQ ID NO: 24439 - DNA, 201 bp, Bos taurus
agaaaagaaagctgggcgaatgacatttatctccccatcccccagacgaggaaccctaaggatgggagaagttaggtatccccatggccagacagccagggagtcggaaggtggcagatgactgttctagctgtagagcagtggttgccatgggacgtcggagtcccctctcagtatgggtctcaaccttagagtcaccag

SEQ ID NO: 24440 - DNA, 201 bp, Bos taurus
gtgcacagagagaaccctgctgtgcttgttgaatggtggagttaggtttgtttgtttccgtgggctcccacttctgagaggacagaggctgcgtgcagaggatgtgccccagcttggaactcacgggtcttcgtcctgtccccagccctgccactaacctgccccgtgactgcaggcaagtgatggtccttcccacacccg

SEQ ID NO: 24441 - DNA, 201 bp, Bos taurus
gatgcaattaactgaacataaaatgataagcccaaagccagaagataggcagaccactggctggcctctccacccatcctgagtcttgtctttgttgctgctgtgtaaagatgtgattccagggcatttatgggctggcattcgattatagcttgacatgaacaactctgcgtctgggttagaaataatcgctttgcattt

SEQ ID NO: 24442 - DNA, 201 bp, Bos taurus
atttggcctttgtgctgagagcacggagggcgttgcagtattttaggtgagggatggcattaggtttccatttagaaaacatttgcagtggtgaggtggcagggtgggaggccaggagaggaggacggtgagatgggatatgaggaaagcactcaggaggcccctcgacacccccaccccacccatcacatccccctgctg

SEQ ID NO: 24443 - DNA, 201 bp, Bos taurus
ctcaccaaattttagctgtcagtatcaggcagcgccctccccgcccccactaaaagtgctgtgtcaaaacagcaattgtgattgcacaagtaataataacgccaaagctaacatacagagcacatgtggccagaacctcaagccagctccttgaagctggttgtgtgctagctaaccaaaatcttggcagtcggcgagtca

SEQ ID NO: 24444 - DNA, 201 bp, Bos taurus
ccttaagggagctactggtagcaaatgcagggtctgtaggcacatgagtggtatcatacaaaaaggagagtcagagtgcctccagatggtcatctgtaatatgttgcaggattttcaaggaggaaaggatcactcacaactgtgaagatcctagagggtttcttggaggaaggagcatttgaatgaaaccttaaaggatga

SEQ ID NO: 24445 - DNA, 201 bp, Bos taurus
ttacttttaattatatttttattctgttgcttttagaagggagaagttggttataaatgctgttttaaacctcttctgttattttgtgaagtcttaaaccgtgttcccatacttgagagatttccttattcttttatttttatctgaacattctctcttttttcttctcctgctttggctttgttcaattttaaatcagtt

SEQ ID NO: 24446 - DNA, 201 bp, Bos taurus
tatctttctgtttacattataatgagaggaacttaatactcaggagcatatctgcttgtgatctctagttgacactacaaaatgtagaaatcccttcttgaaaaaattaggatttcctcattctaaagttcttgaaagttgcaccagaaagatcaattagtttcattaatcagtggtcttttctcaaaatagattaggact

SEQ ID NO: 24447 - DNA, 201 bp, Bos taurus
ttgtcaagctttatacccgtttcagtccattttcagcacatcatattattcttccatttaaatttcatgtatgtcctttacacacacacacatgctcacttacatggtgatagtgattgtctaggtattagaaaagtattttaaagaatgaatcaaagaattataatttgtttctgaaatatataccatggactagattgt

SEQ ID NO: 24448 - DNA, 201 bp, Bos taurus
tcctgtagcatctctctgtttttctggtcatcatccatgttcagtgtttgtttttatgttgctataagtataacatggacacaactcaggagaatgcaaactgtttacaacaaacagcctttcttcttccgaggttcattatgtcagtgtgtagtcttctttattctttccttttagtttttgtacctaacgcatttgctg

SEQ ID NO: 24449 - DNA, 201 bp, Bos taurus
ttggaagaaactggcagcattccacaatttttacactgtttaaaagtatcaactgtggccttgccagaattccatcactgacatttgaagaggccacctcaggtctaggagaaccatgctttaccagctaaacatgagaagaaagaagtaagggtaagaacacattaacagaataaagacaacaaaggcctttctctgaga

SEQ ID NO: 24450 - DNA, 201 bp, Bos taurus
caaatgttggatcttttgatattattccaaagatacatgtgacttgtttaatggttttgatttttgctctgcttctcagattggatcaattcagttcagtcgctcagtcatgtccatctcttcactacctcatggactgcagcacgccaggcttccctgtccatcaccaactcccagagcttactcaaactcatgtccatc

SEQ ID NO: 24451 - DNA, 201 bp, Bos taurus
ttagttcacaatggagcccattttaattaatctctgattagagctgaggtggaacaattcaggaatagatactatttcaaatctatttagaacagtgtgtatgcagaaatattagaaggatcagggattttttttttttttttttgtcttatagtacattcttatggactctgtgggagagggagagggtgggaagatttg

SEQ ID NO: 24452 - DNA, 201 bp, Bos taurus
agagtcaaaggtatttacttatttctacagccccattcattgtactgtaattatctagtgaaacatgaagccaaatctagaggtttaaacatatcaagaataaaattctaacttttgaagagtactgtctcatctatttgagtttaagcaactcaaatatgattcataattctaatcaagaaactaacattttggtaaatt

SEQ ID NO: 24453 - DNA, 201 bp, Bos taurus
gttggtaatggacagggaaggccggcattctgcactccatggcgtcgcaaagagttggacaagattgagcaactgaactgaactgaactgaactgaacttctcaacccatgatattttcttctatatggagaaatttctacttgtgggatacatctggcccccattttaaccaattttcattacatctgagaagatgaata

SEQ ID NO: 24454 - DNA, 201 bp, Bos taurus
actcttttcatagctatttgtaaggcctcctccgctctggtatagggtgcccatgacataaactttatgtataatgtgtattagcccaaagtttctcatacggaaaactttctttaagatactgaaagatgatagaaatcagaagtcattttatttatgcaagttcatttcatgataccatttgttgatgaatattcttgc

SEQ ID NO: 24455 - DNA, 201 bp, Bos taurus
ttgttattgagagacttttaaatggctgcgtcctcagattaaaagcagtatacatgtgtctctactacatggtacttaatatttactaagctttctttcccttcaactcataaaagtactagttaaaatcatcttctcaggaaacatcacaatgcaggatgctgcagaagtaaaacagtttaaatcatttacatctcatgt

SEQ ID NO: 24456 - DNA, 201 bp, Bos taurus
ttagtttctagacatgaacatggatctgtatatgatatggacttagaattatatgtgaaggatcaattatagctactaatgggaattgctaactttgtattagtaaggatgctgaccgcacctctgcaatgagaggtccccaaacagcatcttatataatacacacatgttttattttacatgctcactcaaggctgttat

SEQ ID NO: 24457 - DNA, 201 bp, Bos taurus
tctcacagaatctctactggcaggtgattttctgtccctgagtttagaggagcaaatcgacatttgaagagtttaagtaagtgactcactgtcacacaagcgactgtactggtttacgattcttggttgcctgacttcaaaacccatgttcttaaccatgagtctccatgaccttccattccacagccacaaataccccct

SEQ ID NO: 24458 - DNA, 201 bp, Bos taurus
aaccttaagtgacttggtgctaaatgaatgtcatcatgtgacataatagactagaacaataatctagcttttcaagtcagagcaaatattaacatttaaatagctaattcctgtgctcacttgatttttctcattcttttttaacggctaacagagaatgaacatctcaggagtgtaccagttctatgagaattaaaaata

SEQ ID NO: 24459 - DNA, 201 bp, Bos taurus
attttcagagacaggttgaggcaatgggtaaattcgaatagagattctatttctcccagaccctatgctcatttcacctcatctggcttcaatcccagctactcgttcttgcttttatttcccttctgtttctttccttgagttgcatttctgatgccaggtgggagcaacagctgaacacggtggaggcgtaagatacgg

SEQ ID NO: 24460 - DNA, 201 bp, Bos taurus
gtgtaaattaaggtgttaattaatttatctgtttattcagtcatatgattgtacatgaactatttgcatattttatcttaagccatagtatcttctttgaaggagtttatagtgtaattagggggataaattaaacaaataaattacatataaagtgaggatatatgagccatataagataagtaaagtaaaagggctata

SEQ ID NO: 24461 - DNA, 201 bp, Bos taurus
acacacatatagtacattagaagtacaggtatttgtcagaagaatattcagccagaggggacaaccagtgccaaggccttaggacaaaagcatgactgatctgagaacagcaaaatagccagcgtgtctgaagcagagtgaaggagaaggaaggtagcaggacgtgaggtcagactggccaggagtgtcttgaggttagat

SEQ ID NO: 24462 - DNA, 201 bp, Bos taurus
caggagcagtgggtggccgggaaggactgagaggccagacggtaacctgtccgggtaaagtgagaacagcttcacgtggcctctggggctgtgtctgatttactcttccttctgcctattgatttccagtctcctctccttgatgctattgctcctctacgggtattgctgggtttgtccaccatcattaattcattaact

SEQ ID NO: 24463 - DNA, 201 bp, Bos taurus
gtctccctagggcccagagtatgcaagcccactcgatgcttccagctcagggatgtgggccaacaccattcttgcactggggagcagggcccccagatatattcaggcatccttttcattcctgggatcccgggactcaatggtgtgtctccacatctctgtcccagtatctggcttcatggtgccacgcccaggccacct

SEQ ID NO: 24464 - DNA, 201 bp, Bos taurus
gctgattttgagataataattgatagtgacaggatgaaaaaagctgattttgagataaccaatagaaagactataaaatgcagtcatgagaactcaaagaacacactggttcaagactgtttaatgtagtggaaacaagccctacacatttcagtacgtcttgagtgcatagctcctctctggccagcaacaggttcacgc

SEQ ID NO: 24465 - DNA, 201 bp, Bos taurus
agaaagcccaagaagcagggcagactgcacactgaaaacatggaccacaggcagcttgccccaaagcaggcctcggagcagtctgacacttacctcagggtccttcatattgaaatcaggttccaagtggttgtcagctaaaccaccaactcatgtggcattaatgattcctataagttggggtcacagctcattaattaa

SEQ ID NO: 24466 - DNA, 201 bp, Bos taurus
tcttttgtgggtcttatatttctacaagctttagcaactagatacacagctaatcatttgatgattacaaaggaggtgtctgcggagacagcagaggatcggcttggggtacccagttggcctggtctacagggaggtggtcagatgaggtctgtttgaggaagtgatgcttgaagtatgctctgcatcagaggttggcaa

SEQ ID NO: 24467 - DNA, 201 bp, Bos taurus
gagagtcagaagcagacatgactgtgttcccctgggctactcctaggtaggtgggcccttgctgacccaacaggcagtgataatcgaggaaaggccaaggatttggctagtatctcccatccctctgctagccttccccagtgtctgtcctagtttctgaaaccagaatgttctggatcacctttgcccaaggccttcctt

SEQ ID NO: 24468 - DNA, 201 bp, Bos taurus
taggagctcaggtctttaagacaaagaccaaatatgtttattactataccacacctctccactgcttgctgtgctagcttcatcctagggggaattcctgctggggtcttctgcaggatgtgcctgccatttgcaataatggcttcgtgctttctccagagggtaggacagtcattcccatgagggaggtgcagcatctga

SEQ ID NO: 24469 - DNA, 201 bp, Bos taurus
gttcatctgaagctttcctgggctgaaatatctggcagactgtgggcaggaggcctctgtttctcactgccttggcctctctgcaggacagcttgacttatattttgatgcggctctgggctttcaccagggtgagtgatccaaggaagagcagggaggaggccacagtgccttttgtgacacagtcctaaaagtgacacc

SEQ ID NO: 24470 - DNA, 201 bp, Bos taurus
gcagccagcccctcccggcctccaacctctgcgctccgaggcccgggacacagtcagccacagcgcctcccatatgagtaacagcgctttaattaggatactataggaagtggggcccacggcggcttctggcgagaagtgccagcagcaattccggagccgcacgaagatggatggatcgtgtattacaccctgcaccgc

SEQ ID NO: 24471 - DNA, 201 bp, Bos taurus
gaattggcaggacacagccctccaagcagcggcatgagaggggcccttagtaccaggacaagaccacgaagttactccttaggatctaagccatcaaggcactacacacagccgaggtggggccgggtcagccctgcctacgtggcgctctgaccaccatttcctggctggaaacaggtgcctctgtgtcagcaggaaaca

SEQ ID NO: 24472 - DNA, 201 bp, Bos taurus
gctgtcttagccctagccaggaggaaggggcatcgggggctgctgctgaaaggaggggagagcaagcctggaaggactgagcagagaaactgggacggccagagggcttagggccagagtcagtgcttgtctgacagcatctcagacggcaggatgattccctttgcctgcctttttgatgatgggtctcttccctaaggt

SEQ ID NO: 24473 - DNA, 201 bp, Bos taurus
caaggatgctgatgaaactggtgagcctccggacactgagcagcgtccactcagagcaagtgtttgccctgcgcctgcaggataagaagcttcccccgcttctctctgagatctgggacgtgcacgaatgacagttcctcctccgtgtcttctgttttcctgggctggatgactgaggctgggtggctgcctcctagaggt

SEQ ID NO: 24474 - DNA, 201 bp, Bos taurus
aaaacttactcctgtgacagcttgggaatagctcttcatttcattcatggtggaaacctataacaggaagaaagcctttattagaacgagtgagaaaattaagctggtattaatagctaattgtcctccccgtatcaaaacagtctatttttgaattcaagttctttgacaacctgaaaattaatttacaggatgaaaaca

SEQ ID NO: 24475 - DNA, 201 bp, Bos taurus
ggtctctgaatctctaaaaagaagttgaggcagagaagatctaagctgcactgtttaggttatttgtacctaataaaatatactagtaacagaataaagtgtagtaaaataaaaggctgattattttgagtgaagaagttgtaaggatgctaactgattctttctctctctccaaagaactggaggtagacatgtagggct

SEQ ID NO: 24476 - DNA, 201 bp, Bos taurus
ataagctcatttaatcctcataacatccccacaagatagattattacttttcttctcatttcttcagaggaagaaagtgagaaacacatttagaaacttacagaagcatagtcagccaataagttgcagagttaagacttgggcccaggcagttctgctatagagtctgtgggcttcaccatagtatcctgacacataaac

SEQ ID NO: 24477 - DNA, 201 bp, Bos taurus
gagcctacttatcaatatgttgatttaataatcacagtctgaaaccacaataatgtttgcaccaacctgttttattatgactcactgcaacttctatttaacatatcgctgatccatgtagcataaattactccctgtcactttgagggtaaacccatcccactcagtgtttcatcagtaactttggtacctctatttgca

SEQ ID NO: 24478 - DNA, 201 bp, Bos taurus
tgcgccgagggctttaatgtccgttgctccaaatctttgttgtgacgagacaaagaaccaaggaacacacactcgagtgacatttatggtgccatgactcaggcttaacctggctgaaacaacctccgaggggaagaggccaagcacagcaggagcccaacccagtgaagctcccgagctagaagcggaaggcaaagaaac

SEQ ID NO: 24479 - DNA, 201 bp, Bos taurus
ttggctccatctctataactcttccctacctatccctattcaaatatttccctttcagccctggctagccttcagaagatccctgaaatcttggtcactgtctgcaactgagcttgggacctgcattttctgctggggccagacttggttgccactaagtacatccgaaagtattaacacatccaaatgatggttgactag

SEQ ID NO: 24480 - DNA, 201 bp, Bos taurus
ttctttttccagctggtggtttgatacttgggtaggggtgatgtggggagaatcagatgaaagtatataataataataataagatgagagcttgttgttacgtagagaagtgaatattcctctgattatacatgaggggccctctaatcatgaataaaccatcctgctctttaatcaatcacatgaagacccagacacata

SEQ ID NO: 24481 - DNA, 201 bp, Bos taurus
tttgagccaaagattaagagtaaccatttattggaaattgaggcatggccatcttagtgagtatgtttctcctgaggactctcttcagtgcttgttttacatatttgttcctcagagtgtagatcaatggattaagtactggacttacaaaggtgtagaaaacagctattatcttggattcttccaccgtcttgtctgttg

SEQ ID NO: 24482 - DNA, 201 bp, Bos taurus
tgaagtcagtttacggtcaggcaatgatgtcactgtaactctctatgacatgaatgctattctcgcttctgacaaggaagggcccaactttcaccctccaattccctggtcctggtgaacgggaggcagatctcagctgacagttccttcagggccaggtttccagatcccacccagctgtcatcgctgagggagccgggg

SEQ ID NO: 24483 - DNA, 201 bp, Bos taurus
ggggctaaggacacgtgtagaaagcgtgtctagctggtgggctgcaagaagggacgcccccttcacgcatcgctcaacctccagggcctgaaacacctgcgaaccaatccaagttggagtgaagctctggagctcacagctgcagagccaggagctgcaactttgtgacacccagcccatctcagccaggtccattccctc

SEQ ID NO: 24484 - DNA, 201 bp, Bos taurus
cttactctgtcacgaattgcttcagtttattaacttgtgtttactgagtgaaatctccttcaattgtaaagtgagatcatccttaggatggctgctccactgtgcaatggcaaagactgaatatgataatggatgcaaagctgctttagcaacactctgtataaagtatggtatttgctgtttctttcttacttcctcccc

SEQ ID NO: 24485 - DNA, 201 bp, Bos taurus
ccagcgacctcatcccacagatggtgaccaggatgtaggcacaagagaccaagatgactgagactgtggggacggtggtcaaggcggaaaagatgagcagaatgacgttggccacagtggtgtctgagcaggccaggtggagcacaggggggatgtcacagaagtaatggtcaatgacgttgggaccacagtagggcaagc

SEQ ID NO: 24486 - DNA, 201 bp, Bos taurus
gcataacgctagtgatgagcatacatggggcctgaatctattttctatgtgattagttaccagagtgtaaagtgtacatacaggccttgagtatatttcacgttttatgtacaacaaaatgatataaaagctaagagagtgcaaatacccaaatgggacgggcctggcagagctgctgggaaacgtgcccacactcggtct

SEQ ID NO: 24487 - DNA, 201 bp, Bos taurus
acattgggcccacagaaagagagactgaaggtgattccaacatggatggaggcattcaggaagccacagacaccggggcctgtggacagaccagcacacatgcttgtcgtcatagttgcggtgtaacggaggggcgtgcacactgctgcatagcggtcataggccattgctgccaagagaaaattttccatagtggcaaag

SEQ ID NO: 24488 - DNA, 201 bp, Bos taurus
taatacaggagtgcctgaattcatcctgctgggactcaccagtgcccccggactgcaggtccccctctttataatattcctgctcatttatcttgtcaatatggttgggactgatcctgctgattctcttggagtctcgtctccacattcccatgtacttttcccctacaaatctgtctctggtggacttttgctactcca

SEQ ID NO: 24489 - DNA, 201 bp, Bos taurus
tcctgactgctttttacatgtattacacttgctcaaaacgtggatggaatatagaagcttacctgtctcttgaaaatagctgcaaatcctgaattttcagtctgatctaaagctcttcaagggtagaatttaaaaattctgtggaaggagctctctgtgtgatgctaaccaaagggtgtccttataattgtcacttacctt

SEQ ID NO: 24490 - DNA, 201 bp, Bos taurus
gcctctggcaggcggattggggggaggggctggtccacagctagctagctctcctctggtgtttgctcagtccttatcctgtgagcaggccaggctcttgtggaaaagttctctctctgactctttttttccctctctctctctctctctggctatctcatgtttgctccctcagattgtcctcagggcattcaggcccag

SEQ ID NO: 24491 - DNA, 201 bp, Bos taurus
aatggggtcttaaggagttgacctgtctaccgagaaatgatcattacgttcttgtgactagatgcataacctctcacttctcttcattgtgaagttatccaatacttttctactctgaacccaaacaggaaattgctcaattgattccctgcgtctgtcttcatttgcactaaattgggaaaacaaggccccgtgatgaat

SEQ ID NO: 24492 - DNA, 201 bp, Bos taurus
ggccgtggcagacaccaaaaaggcggtcaagtatcagagtgaagctcgcagggtgagccccgcatctcggagggaccggccggcttctcctctccctggtcgcccccatccatgtccctgagatctccctgccttcctctgtctggcctcctccaagagccttcgtcagctctccctggagaatagctccccttccctccc

SEQ ID NO: 24493 - DNA, 201 bp, Bos taurus
ctcgtgcccagggtcgtgccagcctctttcccccaccttgacctgagtcctgcaagggtggtgccgggggctttgagtaaccacctcctggttttcgcacgtgtcattctataggaactggccatgtgctgagtgggcatgggtgatgaaaacaggggctgctgtaagggaatgcgctttcccaccccttgactccattgt

SEQ ID NO: 24494 - DNA, 201 bp, Bos taurus
ttttcagcagtctccagccctgttggtttgaacgtctggaagcaaataggaaagacaaaaaattatggttgaaagaggttggtcagcaggctgcataatatgggcgaagcactgtgcgaggtcaaaacagggaatcaagaagggctgtgcgtgatggcctgtttggtcatccttcttaaatgataaataccccattctcag

SEQ ID NO: 24495 - DNA, 201 bp, Bos taurus
tgttgtgctccagccaccttcctcgtttgtttcactcagaatttttcttctcgtaaaccattgtcccgtttggaagtgtgtacattctgcctgtgcattcggtaggacagcctggtgtgtgaccaaggctgaagcagagggttacttgggttacataaggctctgtaacgggcagacgtcactagggtcttgtgaggacta

SEQ ID NO: 24496 - DNA, 201 bp, Bos taurus
ggcctggcggggcccagcctgtctgggctgcaggcggatcaagatgcatgtgatggtggctgaggagcctccgtttattgtcttcggggacgttcgttacgatcctggcctgcttgagaccgcctgattgattcgtgaggctgaggcgaggcggttccacatgagtctctggggtgcgtggtctcctgcctcgcagagcgg

SEQ ID NO: 24497 - DNA, 201 bp, Bos taurus
gcctgccgtaggggggctgtttagtctgtgtcttgccctcacttccctccgcccttctcgccagtggtcctgctttgctctcatctctggagcctgacccgcacttcttggccacagctcagctctgtgagcagcgtctccgcagggagcatgacatctggtatggccgggggcccgtctccctcgcagcctggagttccc

SEQ ID NO: 24498 - DNA, 201 bp, Bos taurus
tcaggtgggtgcctatggcctccttcgtccccagaaggggcgcccctgatggcacttgtgacctcgtggacacacaggcacatttctgaccaactgctgcagagcgatagggccaccagggggcacggggccccagcagggtccccaccctgccccgtccggccgcgctccaaagcaagaggccatggctgaggccccgtc

SEQ ID NO: 24499 - DNA, 201 bp, Bos taurus
attaaaattttctgaatatcacttatcaacttatggccttattttcattttaataccttgtcttctttagtatctttagtattcttgacttctggaggaaatcaactccaggacaaaagtcaaatgtattgccttcagatcagatcagatcagtcactcagtagtgtccgactctttgtgactccatgaatatcagcatgc

SEQ ID NO: 24500 - DNA, 201 bp, Bos taurus
tagtaaaaggcccgtggtttgtgcctaacaaatgtctatgtttatgtttaattagattaaaaacataagttggatcctaaacatgttaggatggcactgtctggtgggtcctggttgggttcctggtccctaagtaccatgcttctcaaggcagggattagcaccttttggtagctgcaaagaagttagaaggacaaagaa

SEQ ID NO: 24501 - DNA, 201 bp, Bos taurus
tctttggggccagcctctcaccctctgttcttggcctcatggaggagagtgggctggaaatgtctctcagagtgtctgggcctatcattgtgggaaaagatccctcaaagggatactttatacatgggcattcggcaaagccaggacaaatgccctggcatcaggccccaggatggcgtgagctgggatcctagaagccag

SEQ ID NO: 24502 - DNA, 201 bp, Bos taurus
gcttcactatcctcatagcctttcacactgatgccagaggataagtaagtctatcctaaacacccttcagtcatatcactctgctgtgcacttatgtagcgactcccccgcacctctagatctgagatccaagtccttggggcaggacaagaggctatcgtgactttttcccataccctctccccttctcaccagtcttga

SEQ ID NO: 24503 - DNA, 201 bp, Bos taurus
aggagcctggaagagcctgagtcaacactatcgctgacattgcttctatggctaaagatggcccagccttcaaaacatgactccaatccttttctcctcaactctcttctcctttcttatttcatctcccatgcccttctctccctctcttcttcaccattttcactttatttattttcctttcttctttttgttgctatt

SEQ ID NO: 24504 - DNA, 201 bp, Bos taurus
cactaggctacaggggtgggcagggctctccctggttccttcagtgatgtcttcgaagggctgcccaccccgcttgcctgcggtggggccccacatggtgcttcagtgcctcgacgctattgcttcccctttgtctggggcagtcatctctctgactagctctcagcacagccccaggggtgatgaggccttagaccatga

SEQ ID NO: 24505 - DNA, 201 bp, Bos taurus
cccaagtgaaaaggaaagatagggattattataccccttttgacagataggaagactgaggcacagagaagtgatgtgacttgctcaaagtcactcatctttggagaaattgggaccaaaagcccagtattctgattgtacgcagactgctaaggcagagtagatcaggagactcaccgggatatctgggcgatgtcatag

SEQ ID NO: 24506 - DNA, 201 bp, Bos taurus
cttcatccagtcagtggggtcaaaagagttggacaactgagcaaccagcacacacaagaagaatgaaaagccaacctcaaactgggagaaaatatagtcgaacttgtaaagatttcaggattggtgttcggaatatgtaaagaactcatacaattgataagaaagagacaaacaacccaacagaaaaatgggcaagagaca

SEQ ID NO: 24507 - DNA, 201 bp, Bos taurus
cagagtgtgttaaacatggccctttgtcaactgaaggcagaggcgggacttttaaaacacagcttggaatactttagaatgttaactaaaacacaaatacataaggtagcagagaggaggccacaggcacaggctgagtttatgtttctttagtcttgcttcaaagaggtttgcgtttactattatccccatggggttgca

SEQ ID NO: 24508 - DNA, 201 bp, Bos taurus
aacggggagaccagagcagctgggccattaaacatggatggaaaccaacccatggaagaaagaggtggcacttctcctgttggccagagggagggacaagtaagatttagcaaaggtcagcagggctcatactgagcagtattcggtctcaactactcacacccttcacattctgtcagttggacaaaaaaggcatggcct

SEQ ID NO: 24509 - DNA, 201 bp, Bos taurus
caaagctgctagggttcctctttgactgccttctgctgccacctgctgcctgcagaggggaaaagaccaaggcctgccaggagggaacttccagggttttagggcatggggggcgtgggtaaggaggttgagctatgcaggcggggacctcactctatccctggctctgctccccaacgggtgcaagtttgactccgatcc

SEQ ID NO: 24510 - DNA, 201 bp, Bos taurus
gccttgggggagaagttgagagggcttacaaaggcttctgtcttttcctgtgctttctgttgattcttaatgatggaaaagtcagaatggaacagagcaccggcctggagagggccagtgactaccttgggtggaaggaaggaggagtgactggcagaggatgtctgggacctggcaattccttgactacttagtggttat

SEQ ID NO: 24511 - DNA, 201 bp, Bos taurus
accagatgtgtaaccttggacgagtcactgatcctcaatttcctcaacttaaatgaagataataagtacctctcaagtttgccatgagattacctcacaccggttagaatggccatcattgaaaaatctacaaacaataaatgctggagagggtgtggagaaaagggaaccctcttgcactactggggagaaggatatggc

SEQ ID NO: 24512 - DNA, 201 bp, Bos taurus
ttcatactgacccatcattagcctcttccacactgctgagcacttggagtataacctcagttctctgtgtaatggcattcttggtctcttgcatgataagatgttccacatctgtcatgcatatttcttgttctagatctagaatcatccacttttcaaaggagttctgcttcattttagtgagaaatggtatttagagag

SEQ ID NO: 24513 - DNA, 201 bp, Bos taurus
gggaatgagaacctaatctgccttttcttaactaacccatcacccaacaaaactacagttatcccatttcaaaaataaattccaaggaaaaaattctgtatgtggaaacaagaaagcactgagagtgaggaggggaaggcagtcctagaaacgttgatttcagtgataccagctctgtcttgcagctggagcaagaggttt

SEQ ID NO: 24514 - DNA, 201 bp, Bos taurus
gtgcgagtttggctctgggaagtgctttggagcttctccatccagccactgagctggtcatcgtcagttgtataaaatccaccttttgttgctcatcccagtatgatcgagaaatggttcgttgttgcatagtatgagagaaaacaacacttcagaacagtgatatttttgatttttggtcagatcacgaggcttccactc

SEQ ID NO: 24515 - DNA, 201 bp, Bos taurus
cttatcctgtccagggagtgttctcatactaactttaccttgttatatttatttcaatatttatatgtatgaatttttgaagttgcatgcgtttgtacttgtctctctatctttgatatatgtttaggtatgtgcatcttatgttagactgattcttagatcaggtacctttattaaccagttgccctaaaagtttcctga

SEQ ID NO: 24516 - DNA, 201 bp, Bos taurus
ctaaggccttaaggcaggatcatgcatggcctgttaaggaatagctgtgtgattggaaagggtgaatgggagttgttaggggaaaaggccagggatgtgacagggaccatatcatccagggcaattagctgctgtaaggattggtctttactcttgttatagccacacattctgggaaacaagctcactcagaaggacaat

SEQ ID NO: 24517 - DNA, 201 bp, Bos taurus
aggtgcgcacaggaggaccagctagaggagcagcaagggctgggatctcatccaaaggctgacgataccagccaggagtgtttttatgggggagggatgtcggggccatagaggagaggaagaagtgaagacagtatctctagctgccaggtttttttcttaaatagcatcactgcctaggcccacttggtccctctggga

SEQ ID NO: 24518 - DNA, 201 bp, Bos taurus
cctcgggcggggggctgggagccagcctggggtcgggttccggggagagcggtgcggggaacctggacgtgcctgatcccgagggccgagggaagaaggaaggcagccggaagcgggggtccggttcccgcgagctgtccgccgccggctccatctcccggtgtcggcagtctctcacggaggtagggacgcggagctcga

SEQ ID NO: 24519 - DNA, 201 bp, Bos taurus
ccagacagacccacaaattgtgggtggccctgtttcctgtggtaactcccagcaaaagacctacagctgtgagtgggactctaggaccctctaatgcagtaatccttggtctttctggatttgaggcccattgcagtcttactaaatccaaggtgccctttctccagaaaatgtcacatatgcatgtgcacagaaaaattt

SEQ ID NO: 24520 - DNA, 201 bp, Bos taurus
ctcatttcagaaatgttaaaatatgtataggggaagaagggagatgcatattatgatgaagagaaaatggtaatcaggagacagtcaaaccaatggcctaattaaattcatcagtaaatgcagtcagcatgatttattgacctgttctgtgatagagaacctttttaggtgagaggtttttgtgtgttgatggacacactg

SEQ ID NO: 24521 - DNA, 201 bp, Bos taurus
ctgggtgtctcctgggacatggggctcagctggtgtccagtgcaaggcaggccctggatcccttgatgggcgatggcgagcagctcaaacagctctggcctagaacgccattgaccattgctaccctctcccagctctggcagcatttaaagtcctggtctcaccagccctgggacttggtgaccaggcctgggaagggcc

SEQ ID NO: 24522 - DNA, 201 bp, Bos taurus
caggcatcgtgcgggggacgggccccctgagcctggtttctgtagtttacagtcagagctctattttgttatggtttttaaaatttttaagtcctgctctattgtactgggcaggtttatgttgatgtttacccactacagttttttaacaatggaagctcacatgccttctctgtgccaccacagtacccaccgccctgt

SEQ ID NO: 24523 - DNA, 201 bp, Bos taurus
attttataccatgagtgtgtatctaacacgagtgcattaaaagtcattagctctgtcacctcctgttgtgtagaataggcctcccaggcgggtcagtgttaaagagtctgcctgcaaatgcaggacacgtgcgtttgatccctgggctggcaagatgccccagagaaggcaatggcaaccccttctagtattctggcctgc

SEQ ID NO: 24524 - DNA, 201 bp, Bos taurus
tcagaatctgatttttatcaccatttttggagtctcagacaaatttaggatattaaacatgcaactttggaaacacagggcctgacacagaaactctgaagagtttaagaactcaacgcattctacacctgatattcaaatttgctgtcagcctctaaatcagtgtttctgaaagtgtttgtggcccacctgcatcagaat

SEQ ID NO: 24525 - DNA, 201 bp, Bos taurus
ggggacattctcagcagatcctgaggccacacagcaaacagcctggggagggggacggcacccacctacagagccatcttctgcagaaaagaggaactggcgggccttatgttggcctctttgtgacaaaggccttcatgtaaagcctagcctgaccaggagttgagtttccttcttctgacagtcactgcccttctgtgt

SEQ ID NO: 24526 - DNA, 201 bp, Bos taurus
tgccggtaggccccgctgctgatctgtttcaccagcatcttgtggtcctgcccatcaaagggcatggagccatgcaccaggatgtagaggagaacgcccaaggaccagctgtccacctgagggagagacggggtcagccaggaggtcctcatgccgcagggcaaacggctccaggctccccttcagtacccacggagggga

SEQ ID NO: 24527 - DNA, 201 bp, Bos taurus
ttcctccatcagtggaagcccaaactgtgtctagagtctatccgatggaaaacactcagttcaaaatgtccacctggctttgctggtagtcttaaccaccaaatcaaatgggccatacatgtggcttgataacacacacacacatatagtattcaaaagtgtgcagaaattgacacaatccaaatctcaaagtggtttgta

SEQ ID NO: 24528 - DNA, 201 bp, Bos taurus
catgcagattgatgtggccaggcatacaccagcgggggaggtcaggatgagctcgtgagggaggcagaggccgggtcacctaggggcctctcaggccatgtctccacaagcgattccctgaacaagcttgaaagaggcccagagtcccccaaatgaaagaaatatactgtgcatgtgactctgggaagggagcccctcagc

SEQ ID NO: 24529 - DNA, 201 bp, Bos taurus
gctcggccgggaaactatttcctttcataaagaggcatgtaattagcctggggaaacgggaggaccccacagtcaatgtgtcctttggctacactgacgatagaggaggggccccagggggatgggaagcccccctcccagcctcccggcctctgcaacacacgaacccttgatgctctgcctgtttctctcgtatacaca

SEQ ID NO: 24530 - DNA, 201 bp, Bos taurus
caactgcttcaaattgcttagttgttattattttcattggaggttcagtcacacatttggtaatgccaaaaacaactatcttgtaaaacaaacaaagtacaaaaaacatagctagccatattattaaagtcttaagtaagaatgaagccagaacttacactaggtgcatcccagtatattctcaagtcatctgacttagac

SEQ ID NO: 24531 - DNA, 201 bp, Bos taurus
aggcggcttctccaccacactttcttccccttccacagctgaccagagtcagtgagactcctcacacctcatttgccagttgctccactgccgtcatcaacggcccacttccaaacatgttcggcattggtgtctgctccagtctggaagagaaagggagctttcaagactcacccaactcagcagtccaaggagaagacg

SEQ ID NO: 24532 - DNA, 201 bp, Bos taurus
acgcattgaggccacccaaggggagggggcctggggcttcttgctttgaaggttggagacttggggtgttacagggggacagtagagctctgaaaacccctgaggaaggctgcaggccacttttggggaggcctgagggcctttgagaggtttggggcagttgtggagacctggctcgcaggtccatccccaaccttaagt

SEQ ID NO: 24533 - DNA, 201 bp, Bos taurus
cactatgaccatcccacagatgaggaaaatgagactcagagaggtgacatgactgtcctaagatcacacaagtttctcttgagtacctgagaccaggccacgggaccctcaagctcagattctttcacgatgtcatccttcatgctgttatgcccaccgaccttcctcggccttcccaggacaggcctttgcccttttctg

SEQ ID NO: 24534 - DNA, 201 bp, Bos taurus
ctccaaaaaatgaccagaaacaggcctcccagaacacagtcgtcttggaaggtcccactttgttttttacataggaggaaggcccttctcttcatcacttccagagctagaatttggaaagtgggggcatggagttgaggaaagaaacgaggagattccaggcctaggttctatcctcactttgccacttcctagctgtgt

SEQ ID NO: 24535 - DNA, 201 bp, Bos taurus
tgcaagtatgctctctgctaacaaaatagtaaacgcctgaaagattgtgaccataccttatattcttttgccattccctcattagttcaaatttggatgtggaacttactgactaaaaagttgggtcatgtggaattttcactaaacatgaaaatctataaattgatagtaaaattaacacagagaaatcttaaaacacta

SEQ ID NO: 24536 - DNA, 201 bp, Bos taurus
tttatttccaagaaatcaacattaaaccttcgttaggaaaatatattgaaagtaagtagagacacttccatatttccttaaacattcattcaaacttgtataagaaacatttcattcattttggccaaaagattattgatatcataaacttacatttagtttttactggggtgtaatctcctgctgttcctcattaaccac

SEQ ID NO: 24537 - DNA, 201 bp, Bos taurus
tagtgagccctctgggttcttctgtgggaaaggagacatgacaaaaaatggtagaaggatgaatgaatttttatggcagagaaggccaaaatggaggtttgggggaataatccatgtacagtatgagagcaagcaagattagagaagaaggaataagtatttgggaaacctaagaggacagggtgactgactggataaaga

SEQ ID NO: 24538 - DNA, 201 bp, Bos taurus
acggcatcgtgcaccgcgacatcaagcccgggaacatcatgcgcctgctgggcgaggagggccagagcatctacaagctgactgacttcggggccgcccgcgagctggacgacgacgaaaagttcgtctcagtctatggcaccgaggaatacctggtgagcggcgtgggggctggcccgcgccctgggactctcggcgccc

SEQ ID NO: 24539 - DNA, 201 bp, Bos taurus
gaaagccagccccaccgcctcgcatcccacacagtgacgccgccccaggagccctcgtgttcctgctcacactgccagcccggtttgcccctctggccactaggcagtgtcaaggacctagaggatcccccaggggcactggtgttacatacaaagcccaagcccttaagaagggtgatggtgccccgagccccgagccct

SEQ ID NO: 24540 - DNA, 201 bp, Bos taurus
tgtgtactccaaggacacaatgtggcccgagaatctggggcctgtttttcccttaaatattgaattcccactgagcaaggaggttccttttataaggaaatgtgtgttctttcactggccagacaaagcaggcaggctcttgctggtgcccaggggtcatgcaaagcccctccctgcaggattcatcatcctgacattggc

SEQ ID NO: 24541 - DNA, 201 bp, Bos taurus
aggtctcagggtcccacctggccagactcaacgcttctctgacagagaagtcagagctggagaaaccctgaccggctgtgcagctgggcccacagagatctggggaaacgtgactcgtgtgggaaagactccgaggtgagacagcaaagcgctgggcacctccctgaccaaagccagggtgtctccctccccccaagaggc

SEQ ID NO: 24542 - DNA, 201 bp, Bos taurus
tttgaacagcagatttagcatttttttccctttttttcttcttagcaccttcttacatttttctctttttcatggtgtttggtttttttgctctttttcttccatctattttcaaagaatcttatttcagagatactcagtaagtagaattttcctctgtgtgttactattccttgcagaaaaaggtgacgtaaaataaag

SEQ ID NO: 24543 - DNA, 201 bp, Bos taurus
catttcctagacagggcttcccacagctgtcagatggtaaaggacacgtccagtgattaattggtctctctgcacacacaccttatctgctgaggccaggtctgagcctgatgccttcctcgggagcccgttgcatccccagagccgacattccctgagccagaggtctttcctccctctcccttcaggggagctctgctt

SEQ ID NO: 24544 - DNA, 201 bp, Bos taurus
ttggccttgtgcatcacacccagctgcttcacgaagatgtgattactgagtaacagtggatgccgcctacgcaagtgtaactctcccgtgctgaagggtgctcttcatcactgctgccgacggccctctgctgggaaagaggtggtcagcccgggctccagggctccagggattgggagtggtgatcctcagggttccagg

SEQ ID NO: 24545 - DNA, 201 bp, Bos taurus
ccagtagcattttacttggctgagcactccttgccccttggcgtggtttttcccttgtcctcagggatgccactcttctcgtatttctttttactgctcaagtcgctctttcaagctgcttttcagcctctcctgctctgaattataaatgtctggcttctctggggtttggttctggactctctcgtcactctgcactct

SEQ ID NO: 24546 - DNA, 201 bp, Bos taurus
taaaatatcatgtccagaattttttcttctgttgccacattttgtgtaatttctcaacatagatgcacacatcaaaagagaaaaaggcctgtacaattcaactcttcaactcttcgatactgccttcagtccttcctgggggctcgctgttttgtacactgagagagaggcattcaaacactttaggcctggcttctctga

SEQ ID NO: 24547 - DNA, 201 bp, Bos taurus
caccctgggcccctgaggcaccacagaagggagcttggcatccctcaggggtcagagcttggtggtttttactcactgcctagatgggtgagaagaaagtaggggcatggaagaggcccaggcagacggctctgggccaatgagagcagaagagaaatccagattgatggagactggctaaatggagacagatatttacaa

SEQ ID NO: 24548 - DNA, 201 bp, Bos taurus
aggggaagaggtatcttccctgacgtggggcctgtgaaagaccagtcttatttacatttttcttctccttcctatggaatgctgtctcatctggagagaggaggccctcctgtagggacagcaggtgtcaaatctttagcttgacactcatacatctcacttgctgcctctgagcaaacctctccacctctcaggacctcg

SEQ ID NO: 24549 - DNA, 201 bp, Bos taurus
tgtcacttggataagaaaacacacagcccaatgattgcaattccagtctcttatccagttgaagcctttttcctttcttccagctatgcttggaggcctgctgtttgggagggggactgctcagggtaccgtgctttgttggacccccttctctactcagagctgctgttggggcccctctggggctgggcgtggagggga

SEQ ID NO: 24550 - DNA, 201 bp, Bos taurus
attaatctctcagttctcagctgtgcctggtgtttctgtgtttagttatctggtacaattgctttactttcagctggaattctccacatccacaccttcttagttccacgttcctctaattcctgatgtttctgcagcttcagcacaaaaggctgcttttctccggcttcccagtctcaggcttgggatcacattctccct

SEQ ID NO: 24551 - DNA, 201 bp, Bos taurus
acagctttgcattctaccaaggatgaagtggttcatctcacatatttgcatgtatttgaatctttgctgtcagctctaactcataacatcaagttgggcctgttcctcagtctttcccttgcccatcttccatgagatgaacaccgacttttgcatatcttttcacccccagggtggcatctgccagaccacacattccac

SEQ ID NO: 24552 - DNA, 201 bp, Bos taurus
tctcactgcggtgacttttcttgttgtgtgtcacaggctctaggtcatggcctcagtagttgtggtatgtgggctcagtagctgtggcttgtgagttgctacatggcatgtggaatcttcctgggccaaggatctaacccatgtactctgcatcaacagatagattcttatccactgtactacaaaggaagtccgccaaat

SEQ ID NO: 24553 - DNA, 201 bp, Bos taurus
ttggcagaatctcagggcaggcaggtgggggatggtgtgtggggtgagaagggggaggaggtgagctgagaagaaggaaacatggccaaaagcgaaggaccgtcacagactgagggaataaaaatgggtcaactcagactgaggctcaagccctagccataaaggcccccagataaagaatgcctccttatctgtgcttcc

SEQ ID NO: 24554 - DNA, 201 bp, Bos taurus
aaggtaaaagccatcacacaagagattcctcaggttctcaggcctggacctggtgagcacactaccacagccatggcacaagaagatacgtccttccagggttgaaaaatctcccttccctggaatccatctgctctcacttaatggtgactctgagcctcaactatcagtcctctttttgaagattgtagaaaaacttga

SEQ ID NO: 24555 - DNA, 201 bp, Bos taurus
agagatttcaaggattcagcccactacaaacccaagtatttttatccttaagtagttataacctaaggaagaaaaggaagatgacttcatttcttctatttgactagcaactcagagtctttaaggtttgtaccaaagaaagaactcgggaccgcactacctcttcattcaggcagtgaatggaaataggttcctagtagg

SEQ ID NO: 24556 - DNA, 201 bp, Bos taurus
tctgtagtttaaacattgaatagcatatcttcttggtcatcataatcaagccatctgtgttgttctgcatagaaattggaaggaaaatctagaagtacacagtgatttcctttgacagctttagagaggtataatttacatgccataaaattcattcatgttaagtgtagaatacaaccacgttaatatatttacaaattt

SEQ ID NO: 24557 - DNA, 201 bp, Bos taurus
cttttgaatatgctgtaactgaaattcagagcagattttggtttttctctttcgcaagccatttatgtgctcacaaacagaccaaactcactatcaaaatagcctatttttacaaacaaaaaattacaaagactatttgaatgtactctctttcacattcttatttggctattatttagataaatccattgaaatgaaagg

SEQ ID NO: 24558 - DNA, 201 bp, Bos taurus
cccaaatcagtgccttaaccaatttacaggtatttctgacaccatagcctattcttatctccctagaacatttgggctccaaaccatactttcctccataacaacctcatctcactttccacaaacaatgtactttattgtttcctcatctctgctgagaatgttcttcatagttcatagtgctgaattaatacttctgag

SEQ ID NO: 24559 - DNA, 201 bp, Bos taurus
aatgtgatgttcagtaccccccccccttttttttccaccagaggtgcccctccctgctctagatggggtggagacagactttacactgaagctttccttctctggttgatcttagcctgtttccttaccgatgcaggcttcttatttgttcccttcagcacttgttctactatcaaggtggggtggagatgcaccaggggt

SEQ ID NO: 24560 - DNA, 201 bp, Bos taurus
cttgatcagaatatcttataggacactttgctaaatgtgcagaggtggaaatttgtatagatcaatatcagcatgagaattgaatatttggcctgttttcttcctaatgtttgtaaaataaatcttcattagtataaagaagagcatttcatagtaagtatgtacatttgttactacactaacaggatttacttttcagct

SEQ ID NO: 24561 - DNA, 201 bp, Bos taurus
tttaatccacacagtcaaagactttggcatagtcaataacattcctacacataggttattgatttggggggatgagagcaatggtattcctttgctgtctgaacagtaggcatcttttttgttaatataactgatacttcccagggttctaattaattacatacaatgagaaaaattacataggttttaagaagtagaatg

SEQ ID NO: 24562 - DNA, 201 bp, Bos taurus
aatgtgaacaatttaggggtaaaattgagcttcctaggcttttttagtataattccatgattgtctagagatttgcatcaaaagatcaaaatgaggaggttattatgcgcaggttcaaaatttcaatcacaccatccatgggtggtctcagtaatgagaccctcattgcctaagggaatgaaaatctgcaggctagtttct

SEQ ID NO: 24563 - DNA, 201 bp, Bos taurus
cagcaagttagggcgggggtaggggaggggaaacagacttgcccaaagcagttcagcaaagcatttgttttgcttgtgatcatcaagtaggtaatttcttacatctggtgattttttttagcatctgtaacacagatactgttatctgggtacttcagagagaaaataaagcagaggatatgggggagggtctgtctccag

SEQ ID NO: 24564 - DNA, 201 bp, Bos taurus
gacctaaccaatggggataaaagaaacactaaaacgcatgccagttttcaatgtcagagacccaggaccctcctacctggttagagcttctgctaaattgatcctcttctgcatttcttcctagatcactgcctccccaggatccccagttacactactgtacttaccaagttttctatgagactttgttcttcattaaaa

SEQ ID NO: 24565 - DNA, 201 bp, Bos taurus
ctctgtgcttagaagaatcatttattcaaatattttgcctgaccaaataagcactggacttggaaccacataatctatgcttaaagttgtctcctgcttttattagctgtgtgtgaacttgggttgttctctatgcatagcagagtggaaattaagtagggaggttattattatcacttcactaattagaaaaatatcggt

SEQ ID NO: 24566 - DNA, 201 bp, Bos taurus
aatgtgtacccacagggcacagagtgtcttgttttctttttaactttggaccattagcatctgcgatttctagtacaatttattctctgcttccacaaatcctcaaatcactcttgtctatatgacacactgagggtcttgaggaccttcagatgttactcttaggttctaaacaagctgcagcatgagggttttgagttg

SEQ ID NO: 24567 - DNA, 201 bp, Bos taurus
catatgagaaacatcccatttgacaaatgatggagcttagattcataattttggttaagttttatattaatagttcttttttactttaatgttcacagaaatgaccctagatgttcttgaaaatagtgcatgctttcttccttgtcccttaatgtgtacaatgcctaggaaatacattgtgattgaaagtaaaaatgctag

SEQ ID NO: 24568 - DNA, 201 bp, Bos taurus
tatcagaggaaagaaccgtggcctgctctgaaatgcacttgtgtgttaaggcatgaagtgtgtctggagcagagtgagcagggaaagagcagaatgatttcaggaaaaagagaaagattggagacactttgtgtaaaagattgagcatgctgccaaaggcattatattatgaaacttggataagagaaagacaaagcccca

SEQ ID NO: 24569 - DNA, 201 bp, Bos taurus
tgattcgatctataccattacaagaactctcaaaactgaccagctaactatgtgctttaggatcagatagcacactgaaaaggaacttctggatgtggcacgaaaataagcaatgtagagaccaaaacgggaaaaaagaggggaaaggtccagataaaagtgaaggagggaagctggcccagaaaagcaaagtcaagccac

SEQ ID NO: 24570 - DNA, 201 bp, Bos taurus
ttacttatttatatcaacatggacttgtgaatatttattttatactttgggttctaatctgattttttatatttattttgtggctcaaatttttccagctttggccattaggagttctttcagaaccagtgttcataccgaatgggactcttgggcttgagatctctgtagtctcacttgagtccacattcaagtggcctc

SEQ ID NO: 24571 - DNA, 201 bp, Bos taurus
tctgtgcaagttctgagaaagttttccaatcagtttgaccctgatactggcttgggaagtagacatgaacctggggattattcttcctgattttggaggacttaattattggtttaaaattgggagtgctattctgagtgtagtgatacatatctaggtacccattcccttttttgaggggtttaatacatgtccttggga

SEQ ID NO: 24572 - DNA, 201 bp, Bos taurus
ccaggatccacggttatagctattgtaattatcaagtcttctgtgagactctgttctttataaaaagcaaactctgttagaggactgaattcaattctacgtttccaaatagctgttatcaatcatgtggtattttttcccagtctttatttgccaaacaacgtttgcatgtccactgagtcagtggctgtccacactcac

SEQ ID NO: 24573 - DNA, 201 bp, Bos taurus
aatattaatgaaactatcgttaaaaaaaatgaatgtattcccaaaggtgtatatgtcaacccctttttcttgagaagagtgtgagcttttaggaatgtaataaaggaagaaagttacacacacaaacacatatacacagattgttattcttctttccttgaaaacaggtaacttgcgaaaaaacttaaatttgtacttaat

SEQ ID NO: 24574 - DNA, 201 bp, Bos taurus
atatagtacactttacttgctcacgttcttcttttgactaaaatggcttttttacatgaagcaacatgtaccaggacctctattattcactacaaagaaagtagtgaataatgctccatgtctcagaattcttgtgtataaaatgagaattatcaaatacttagctaagtaggagccaagatttggtaagttctaagttag

SEQ ID NO: 24575 - DNA, 201 bp, Bos taurus
tgtttaggaaagtaggaagctacaaataaaacagagaaattgtaaacttgtttacaaaacagaagtaggctcacagacatagaaaacaaggttacaaaaaggcaaagcatgggagagataaattaggactttgggattaatgtatgcacactactatatattagatagataaccaccaaggagctactgtatagcacaggg

SEQ ID NO: 24576 - DNA, 201 bp, Bos taurus
tttcaaatgaacccagattgcttcatctgcccatacatagaaatgttatgaaattattaacctgagatgtctgcacattgtcatcaacagtaaacttctgatttttgactacatggttttccagcaaataaataaataagctcatacatatcctagtatcacctttatctcttcagagcagattctcagaactacctgaga

SEQ ID NO: 24577 - DNA, 201 bp, Bos taurus
atagggtggggggggcccacaggctgagagcaatagtgtaagggaatgcaggagggatgttctgccacatgtcttgcagcctcagcttttatagtaaatcaggttagtttccaggttatctctggccagtcatcttgtttggccatgtttggtctgactcagggtccttcctggtgtcacgtgcctctctcagccaaaatg

SEQ ID NO: 24578 - DNA, 201 bp, Bos taurus
atgtcttagttttctatatacatttatatctcaaaaaatgtccacaattttgattacatataagtggaaagcactgtttattgttcatttccctaagccacttactttgacccttagaaagtctctgaaatttgtttggatataaaaactgtagaaattaataacacatcccaatgaaaacatctaggtagtggtgtatcc

SEQ ID NO: 24579 - DNA, 201 bp, Bos taurus
tgaagctattattgctctctataacattttgaactttatcccatggtgtgtttatttaaatggcatttttcacaaagatgcaatgtttccctgtgtgcgcactcagtcgcttccatggtgtctgactgtttgcaaccccatggacggtagcctgccaggttgctctgtccatgggattctccaggcaagaatacatgaatg

SEQ ID NO: 24580 - DNA, 201 bp, Bos taurus
tcctgaataaatgattttctcatttcaaatattatttcagatgaagacattagccataacctgcatgattctgaatttcaatatttaattctggcaacttctttttttttcctttgtcccctgctgaacttttttttctatagtctgagtgtaaacgttccagctacaagaaaatatttgtgctttatttcattgtgagat

SEQ ID NO: 24581 - DNA, 201 bp, Bos taurus
aacactgctggcttattgaaatagcgggtggtatttttttgtccacaatattctttctatattccagatatttctagactgttattgcatttttaacatatacataagtcctacaaatttttaatcactttctcatgtaaatctcagttagctttttatttaaattttattgtgtacaggaatatgcttgagataatgtat

SEQ ID NO: 24582 - DNA, 201 bp, Bos taurus
tacatctaaaataaataatcattaaggatatattatacagcacaaggaaatataggcattattcggtaataacttcaaatggactgtataaaaatatcgaatcgttatgttgtgcacctgaaactagtataacagtaaaatgtgtacttcaaaaaatttttaaatactcaaaataagaaaataagtagcaaatatttctgt

SEQ ID NO: 24583 - DNA, 201 bp, Bos taurus
caaggctggcggacacagtgagaagtggtcaaagggatcatgtcatgtaacagactacaatatgccaatgacatctaatacacagctttctggttaaattccataaactttgaatgatatccttagcacttcagggttcgaccctgcctaccacagtttttgctaatttctgaaatattatctttccatgaagaagcattg

SEQ ID NO: 24584 - DNA, 201 bp, Bos taurus
gtcaggagccattggcctttgtgaagctaatccactgcccaggatccgcggcagcccaggagctgctgtccaacacagagtcgatccactgcccaggagctggaggtacccaggccttgccactgctgctggtctctccagggccaatcttctgtcaccaccagccccgcactgggaactggggtcactggtcactaccct

SEQ ID NO: 24585 - DNA, 201 bp, Bos taurus
gtgacctgtaatgaaatcctggtaaacttagaaattataggcaatgtggatgtcctcagtaattttgttttctactctggccaggtattagttgtgggttttttttttttttttctttagaaactactgaaatgatgatgtaacacctggatagaatctgtttaaaaaggaataactgaatgctaaatctttcaggccaga

SEQ ID NO: 24586 - DNA, 201 bp, Bos taurus
gataaataattaacattcagctgaaaatatttataattatcaaaaaatgataaggaaattataagattacacaaaatctatttttacaaatggcatgaaacctgaaaaacacatcaaaaatcaagtcaaaggaaaaggaaacaacaaaaaaagattcatgaaagacttacttaagaaatgtaagagaaattttacaaaatt

SEQ ID NO: 24587 - DNA, 201 bp, Bos taurus
ttaatggatttttcccaaaaggccagggttttaatacagctccaaaataacatatacattacaatttcattttcaatccatgggtaaagttgaattccccattcttttttcttatccttgtggcccaagagggggaaaggggtttatttaggaactaattactgattcctcctttttatcccacttgcctctttctttctt

SEQ ID NO: 24588 - DNA, 201 bp, Bos taurus
acacaacaaattcagctcaaggatctatgatatttcttccagttcccctggagattaacacttattattagtacttgttaaatttctgcaacatacattcaatcatgtatttgtggcactgataccatcagtaataattattagttttaagttaacttattgaaacatcacatgtgtatatttgtgtgtatatacacaata

SEQ ID NO: 24589 - DNA, 201 bp, Bos taurus
ttcctttaatctaggctccaagtaagcttgactattccaaacactgagattttcccaaagttctgactctaagtggtgcttccaaccacatctgtattgtggtgagatacatttacagtttgataaattccatatctatccaaatagttacattctccaaagtatttagtgtggattacttctggttttgttttaatttat

SEQ ID NO: 24590 - DNA, 201 bp, Bos taurus
aactttgtagccatacgtcccaatggcgatacacctaatcagggtgaagatttcaagttctctgctacagacctcatcctaaccctgtcaaacatcacagaactggtaatcactccaaggtaacgtgcaatgatagcttcccaggtcggacatcatcctcgctggttcaaattcaggtttgcctcaggtatctccctgaac

SEQ ID NO: 24591 - DNA, 201 bp, Bos taurus
agttaccaccactgttcactgtagttgatacattattctggatcccagaatgagagctttaatgagtagaactcccaggcctgctcatctatgcatatggaatgggcaggaagtaaattgtggtggttgttttaaatttgtcaagacagcataggctctattttgaattataaaccaaacttgaaaaattggccttcagtt

SEQ ID NO: 24592 - DNA, 201 bp, Bos taurus
gagatgagaaggagtctagagactagcctgttgaagatgggtgaggacaaggaagaagaaacaagggcaggtctggccttcggcattccatggaagatgctgtgcttatgcctgcttggggaaagcaacatcatcccaacaagatgagtgggggccagaggggacccaggtgagaataagacaagcatgaaccctcatgtg

SEQ ID NO: 24593 - DNA, 201 bp, Bos taurus
aattataaccttaccacacagagtattcttggttgaaagtttttcctttcattgctttgaataaacataccacattctactggcctgtaagttcagttcagtttaatcgctcagtcgtgtccaactccttgagaccccatgaattacagcatgccaggcctcccagtctatcaccaactcccagagttcacccaaactcac

SEQ ID NO: 24594 - DNA, 201 bp, Bos taurus
attgcaaatcagacagaggtgatttggctttcacagatctgtgggccaacagtgagcataatttagaaggaaaaggtcattcacccagtcactcagccatctgccccctaaatctcagaggccacttaaatttcatgttacttctaggaatgtgggtccgtgccagcatccacagctatgaaattggggcaagagacatca

SEQ ID NO: 24595 - DNA, 201 bp, Bos taurus
aggttctaataacacagagatgttctaattctacaacttcagacttcaaagtccttgattgtggaaaacgaagagacaagcagaagacgtgaagaagtccatgggtcgtgacgagaagctgttggtgcagccgccatcttgaagcaccaggagcttcttaagcttaattgttctgcctcagctctggcaggactcaacttt

SEQ ID NO: 24596 - DNA, 201 bp, Bos taurus
aactggggctcaggaaaccagtgtaaacatgctgacaatctagctactgcttccagtaataaagtccttcttctctgatccaggaatcttgtgtcttttgtcatcatctatgaaactgatgcaaattagcttggcagcttgtaagtacagtaaaatctcagacccttcacagttcttgaccaggagttggcaaatttttct

SEQ ID NO: 24597 - DNA, 201 bp, Bos taurus
tgaggactaatcaggcctcaccctgcatttgggcagacgagaagacagtgactctttcatagcagctgtgcagagaaaatcccagggcctcactggtcagaacagtacaccctttccccgcttccctttctctcgctgtgaggctttgctgtgcttcctgctttggcctctgaaagcaaacagcgtgccaagggtcccctc

SEQ ID NO: 24598 - DNA, 201 bp, Bos taurus
ttaataatacccttatagaaagaaaataagacatattatcatttgaatgtcttcgtttccatttgtactgtggcaggtatgtgcatttctcatttttctcacaacttttggctaagcagagataagcattactccttccaactagcagataaactagaacaagatggagttaaataacttactcaaatataagagtcagac

SEQ ID NO: 24599 - DNA, 201 bp, Bos taurus
tttagatatttgtttttaattcaaacaacaaatcctttatacttgagcaaggggatcaatttatctgccttttaaaagaccttcttgtcttttaattcttcatctctctgggttgtgcaggttttctttctgagaactgagcctattattttttccagtggttcctactgcgctgatgaagagttacagacagagtattca

SEQ ID NO: 24600 - DNA, 201 bp, Bos taurus
aggtggcagaggggcacaaatataataaattataggctaatgctccttttcctcttgattggtttttcattctgtgttcccggaggtcttattttactcacacatgtcacagaaaccttcctgttctcagagcctctctgtgtctggatagcctggaatgtatgtgggagaggatgggggacagattatggaggatactgc

SEQ ID NO: 24601 - DNA, 201 bp, Bos taurus
ttcttctttgggccccttagacttatttcagcaaagatgctgcaagttagattggttaaaacctttcagtgatgtgtcattttgctcagagaataagtcacagttctaacaaggggcctagaaagcccttcaaatgtgtcccctcacttttgtatctgtttgatctgacctcatctcctgccaaagctggcttctaggtcc

SEQ ID NO: 24602 - DNA, 201 bp, Bos taurus
ttgttccttcagtttggcccgagtttccctgtttcttcatatagcttattattattattatttgtcatgatagaaaacaacccagacactttcaccagtcgttatatagcctggcctcatacaggggaaggccttcaccaatcagtttgggtagagactctggggacctctcaagccttagcagcagcagcatctctggaa

SEQ ID NO: 24603 - DNA, 201 bp, Bos taurus
gtgttcaagatgtgagggtgagggaaaaggcccagcacttgatgtgaggcatgtctgggtcagagtcacactgtgagatcatgtagaatgggagcgatcactgtggccatctttggaaaatacagtctgtctcaaggatacagtagagaaattaaaacttccatagttgtggaaagaattcagataatgaagtcctgaatg

SEQ ID NO: 24604 - DNA, 201 bp, Bos taurus
tttggtaaagaagttaactaaaaatcatacaacgaggtgctttgtttctctcaaagcttggttttggttcttccagtagaaacctgggagtggcctctccggttctcaggggctggttctcaagtagccccaggactgagtcttttctccatctcttatccccaggcccccatcccccaaggactgattatctcctcaaac

SEQ ID NO: 24605 - DNA, 201 bp, Bos taurus
gagcagaggggagcccctaggatggttggaaaaggaaaacagggactcttgtagaatatatacataccacattaacactaaatgatagacaatattgattatggtaagatgcgtttaccttgtagttgttacatattaaagttgcaaaaggaagagttcatctttgttccttcctctcccacctggaatttttaaagctgt

SEQ ID NO: 24606 - DNA, 201 bp, Bos taurus
taaactgttttaaaaaagaggactttatatgacagcattgatatctggtagggtaaaggtattgccttggctcttgttttcggcccatccacttaaaaagtagcattagaattaggttgtcagtttacacttgcacactcacacattcacacactggaaataaatcgaataaatggaataattgggagagacttgaaattt

SEQ ID NO: 24607 - DNA, 201 bp, Bos taurus
aatgatatgatccctaccccgagaacctggcctttctgtggtctcctatgaattgtgtaggctgtggtgtatcttcactctggctggacttcaacttgaatttctgtcacactgggtggcctctctagtctctgcccaggtatttgggttacttttctgtgattccctcctcttgtaactcaccatcaaatccagtctttt

SEQ ID NO: 24608 - DNA, 201 bp, Bos taurus
gcatcaaaaagaataaactacttaggaataaacctaaggaggtgaaagatttgtactctgaaatctgtaaaactctgatgaaagaaattgaaaataacacaaactaatggaaagatgtactgtgcccatggattgaaaaatgagtattgcttatatgttcaacaggcatcccaaaatgtatgtggccaatacctttcctca

SEQ ID NO: 24609 - DNA, 201 bp, Bos taurus
aatcagcatctttcttgaaacagaggcattgcagcaagagcagcagcagcagcagcagcagcagagatatttacagatcttagtgagccatctgctcttaagagtgtggatctcagcacattccataactactcctctattttcctcttttctctttcccccctcctccctcttttttaacttctctttcgtaagtgaaga

SEQ ID NO: 24610 - DNA, 201 bp, Bos taurus
gttaaaaaatttgttaaatatgttaaatgttaaatccttcaaaaggatcagttcttcggtgctcagccttctgagttaaaaaattaaaattataaaaaagcgaagagaaaaataaatggaagaaggaataaagaaaggaaaactccacagaactgcaaaagcccaacatagaagcagaggtttctaacaacaataaaaatt

SEQ ID NO: 24611 - DNA, 201 bp, Bos taurus
atttgataatattgtgtctgatagccttttgatgaaacagcagattgtactcagttggttatatctgtgtgaaatgacatatgcttgaaacagaaaataaacacccagccactgaatgtattgcacataacaggaactctcttgtcaggggcagtaccatttattgtacactgcacatttaaaatttttaaaattaattat

SEQ ID NO: 24612 - DNA, 201 bp, Bos taurus
ccttttccattcttctttttattttgttcttttgtaatgcccacctcattctttttttgctttgcaggggtttgcagcagatacaggtctgtctgcacactggaagcctaacatgcaacatacaagatttgtgtgtgtggtgtgtgtgtcttttttagcgaactgatggttgtgaagattattttcctagagtaacatatt

SEQ ID NO: 24613 - DNA, 201 bp, Bos taurus
taaatgggagttgctaattttcactccagaatattatgaaaaactggaaaccaaatataataaacatggctcgctcttaaaattaaaaaaaaaaggaactgtttctggaagaaataatgcttcccaatagatttagcacaaaaatgggaaatgaacagcattatatgtttcttaaaaatgcctttcattgagttcaaattt

SEQ ID NO: 24614 - DNA, 201 bp, Bos taurus
agaaatctttttcaaacaaacagaaaatgagataaaacaatttataaccagcagatctgacatataagaaatgttaaaggaaattatttatgtggaataaggtaatattaatcaaaaatttgaatcactattatgaaaggaagagcatcaaaaaataaatgaaagttgaaatacattttgtttttaaaaactgatgtctaa

SEQ ID NO: 24615 - DNA, 201 bp, Bos taurus
aatgatcctgtattcctaaaagcttgcctcttaaacagttcacagaaaagattcacatctttgcagaaaataagatcttcaggtgagctgtctagaaggggaagaaaacagaaccccaaccatgagaacacaaaattgagtctagaataagaagctagaagagtaaaatatgctatatgaatctcatggaatccaagccag

SEQ ID NO: 24616 - DNA, 201 bp, Bos taurus
tggactgcagcctaccaggctcctctgcccatgggattttccaggcaggagtactggagtggggtgccattgccttctccgtggctacagtaaggtgatatataaatcctttctaaaccttagaaatctctacatacaagattatgtcatcattgaattaagactgttttacttcatccattcacatctgtaagtctttaa

SEQ ID NO: 24617 - DNA, 201 bp, Bos taurus
tggatgagaacaaagcctttatcagacggtcaccaacacctcatactgagcagtcacctctgatttcatggagggggaggcagccttggcttctgttgtgcggctaatttcattctcaggaatcaggcagaagtcttgtttgcttgactttttaaataaattaatatccactgagttgataactaacacaatcagaaatgg

SEQ ID NO: 24618 - DNA, 201 bp, Bos taurus
ctttctctaggtggcagctctgctttgttactactatccctctcatgaattcccatgacagtaaaatgctttttctcactgaagtgaattccaaagcctgtgatcatgtggtttctttgagttaagtcaacttttgttgctattcaaaaatttttgagataagtaaaaatgctatattcatttcattaaagaacattagct

SEQ ID NO: 24619 - DNA, 201 bp, Bos taurus
taatctaggtggtcataagaaaatctaaaatcttacatttgtattaaaaatgaatgaataaaggaagcaataaacagtttctgctatatccatggtagaccgtcaatcaaaaaacaaaactgcctacagaagaatatataatgatcacatgcagaatatataatagtcacataaaatataccaatatatgctattatattt

SEQ ID NO: 24620 - DNA, 201 bp, Bos taurus
cttttgatgaaatgcaacattataaaatatagccaccttatggtgactggcctttttcatttcttttttcttgttcacttctctgttataaatctgcaaagaaatggataggagcagcttttactctagatagttttgaattagctacataattcttatgcagaaacattacttaaagaacaattcttttccctccctaaa

SEQ ID NO: 24621 - DNA, 201 bp, Bos taurus
tcccaggtgttccttaatccccaaattattatcattttttgcatccatttttataaaattatatcagccatttcatgatactactggaactttattcacttttatttgcttgacttttgcttacaagtgtactgtgtatcatgagaaacactggactggaagaaacacaagctggaatcaagattgttgggagaaatatca

SEQ ID NO: 24622 - DNA, 201 bp, Bos taurus
gaggagagagagttgtttgcttaaggatttcagtattgggactgtgacaactggttgcatggcagaatgtaggctctattttgaagaaacgtactggatatgcaaagtttagaaaaagtaagctgtccatgcttctccactaactgtaagataaaatccctctgcttttattattttttaaaaaaattttatccaagtgta

SEQ ID NO: 24623 - DNA, 201 bp, Bos taurus
agaaatccacttcctctcaccacccatactgctgttctcctgatccaagccacctgatatcttatgtggattttgcacagtctctcaaatggccttctgactgtgtcttgtctcctggagtcaacgccccaacctaacacccagagtcactttgttaaaaagcaagtgagctcacaggattcttttggtaattttccttca

SEQ ID NO: 24624 - DNA, 201 bp, Bos taurus
gaatcccatggacagaggagcctggcagactttagtcaaaggggtcacaaagagtccaacacaacttagcaactaaacaacagcagcaacaagaagttaggagacagttttcattctgtctgtgcctcttagtagctttgtgattataggccagctacctaacatttaactttctcagtttcatcttctgtaacatcagaa

SEQ ID NO: 24625 - DNA, 201 bp, Bos taurus
tagcaagccagaaggtgtgatgaatatccctgtttcattttgtttcctctttattcctgctctgagaatgattccagataaggagctgaatgatggcagttgtggccaaataagaataaaatatgctaagaaaaatctagctttctggccagagaaaccagaaaagtgccccttgtggcccaaagaatgtatggcacaaaa

SEQ ID NO: 24626 - DNA, 201 bp, Bos taurus
taaatgggcttcatgttcatcctggctctacaagaattttgatagcctggtgagaatcatttcaactgagttgtgaagtcattatggacccagtggatggcgagtaggtttaattttgtgccctctaaagacatgctcaagtcgtagccctcataccagtgaatgtgaccatgtttggaaatagagccttggcagatatga

SEQ ID NO: 24627 - DNA, 201 bp, Bos taurus
atacataagcacccatctattttgatataatcactccatatagcctgttttataaatagagaatggaaagaatggggatgctcctgaagattcatggaagccagtatagcatagccaagaagcccttggctaatcagcccctgtcctacccaactttatcttgcttggcagaagtagggcacaacaggagctctgttggct

SEQ ID NO: 24628 - DNA, 201 bp, Bos taurus
aactccgggaactggtgatggacagggaggcctggcgtgcggcagtccatggggtcgcagagtcgcatatgactgagagactgaatgacccttgtgctgacagaaagaacactggccataccgtatcatggagagtaacaagagcttctcatcttccaagaatgttatacatatcatgatttagtatgtgtacaaagtaaa

SEQ ID NO: 24629 - DNA, 201 bp, Bos taurus
aaaggagattcctgaaagaattcaggaggctaggatggtgaagaggggatttgttaggagggcagagatgaagcgtgaagctagaaagtaggcaaaaggagactggcagtaacactttttccccaagagtgatggactgggtcaagattcagggaggttttgctggcagtgggtcagcaaaattaaggaaaggaataaaag

SEQ ID NO: 24630 - DNA, 201 bp, Bos taurus
tattttctttagttcttaacaactaccttactaagtaagtactgttattcccatcttatctagatgaggaacttgagtctcagaaaggccaagtggcttattcaaggctcaaagctactcagtggtacagtcaaagccaaacccaagtacacctcagttctggctcagaacctttctaacacaccattcccactgcaggcc

SEQ ID NO: 24631 - DNA, 201 bp, Bos taurus
tctactctaatggaatgatgaaaggatgaaacaagataattaatgtaaaacacttagaataatgtgtggcgaattttaagaattgaatatattattattacgaaaaattaacaaacatttcatatattactggtataaaggcattgcattcaattggagagggtgaaaccagctgtttacattgtccacataacgtaatta

SEQ ID NO: 24632 - DNA, 201 bp, Bos taurus
ggggcatgaaatatttattgagtgcccactttcatcaggcattttttttttttttgcatgctattttattagatcattaaacttaacatactttaagtaaaagcataaatttctttggcttccaaacccacagtctgtaccactgtatatcttacatcggaaaataaaatgcactattttaaaacttatacccaatacgat

SEQ ID NO: 24633 - DNA, 201 bp, Bos taurus
cttgcctcaaaatcttcctcatggcttccccatcactgaaaaaggaagtgtaaagtcttctgcattccaagaagaaactccaagcataaaggcctggagacagcagcatatttgctctgttcaagaaacaggaaggagacccaagtggcgaggcaaaatcagacataggacagggtaggccgatggggaagggagatggga

SEQ ID NO: 24634 - DNA, 201 bp, Bos taurus
ctccgcaaagaaagcgggtgagaacctccttgcgggtcgagcatggaagtcaagtgggtgtttgcggcgtttctcgaagattctgggtgttcgtaccaggagaacgggccctaaggggacagaaaagatagacgtacggacagcatcccggtggctgttttcagcgcgaagttcacgtctattgttttctgcctcgggaaa

SEQ ID NO: 24635 - DNA, 201 bp, Bos taurus
atatagggataacactatttttcactgcttggaaaccctacccaagaatataagcattgtgaaaaaagacatttgatatgatgatagcaagcatttgctacagtaatatagacactattttcatcaaagtagtccgtaagctgttcgtcagaaggagaacacagattatgtactcttaatacagaccacatgcaagtagaa

SEQ ID NO: 24636 - DNA, 201 bp, Bos taurus
gtttttgaccagagccatggttcatccaacccagtaaattagcatgacggccttatgatgaatctggtggttgcccactatgttgccacttttcaacttcatgttctttacataagttagaggcctcaagacccctggtgctctgtacaactgtttagggtgtgccctgcataagagagcctgtccggcaggcttagatct

SEQ ID NO: 24637 - DNA, 201 bp, Bos taurus
tgaaggccatgactcaccaaggatggtaggagctaccagatgctggaagaatcaagaaagaatgactccctagagtcttaggaatgagggtgaccctaccgacacttcagtgtcagacctcaggccttcagaactgtgagggaatatacttaagtcttcttatgcaattcagtttatgataatttcttagaatagccctag

SEQ ID NO: 24638 - DNA, 201 bp, Bos taurus
gattctcaaatgctatgttactgccatatagcgtcatataacataattgctttgtgcaagtgaaatctcacaaggtctacaacctctggatacgttcatcgttccattgaaaaccttccatctggtttatgttatttctttttacggttgaggaaatggaggtacagatgggcatagagatgaatggtcaaaaattagatg

SEQ ID NO: 24639 - DNA, 201 bp, Bos taurus
tgaccaattaaaaaaagtcagatcttttggagcaggtccaaccatcagcatagtttcaaaaccattccatgtgattcctgagtgaagtcaagtttgagaaccagaactttgggccgtcagggtctaccagaatgaaagaggttggaagaaggctttgcatggcctcattggctccaggcccctggaagccagctgaggcca

SEQ ID NO: 24640 - DNA, 201 bp, Bos taurus
ttaaatcaaccctacttcaatagaaaaaattaaaatagagcgagacagccttggttagacaacaatgtgacagagtcagtaagtgcagaagaaatcagagtggcaagaacaactgtggactagggtagctggaaaaggcttcatgcaggtgatgggacaaaatttggaagtctcaaaacatcctttagctaattttacatc

SEQ ID NO: 24641 - DNA, 201 bp, Bos taurus
gagttttcctgtatcttaatatgtcattttaacatccagtgtaacattcagaagcacattttattgaattattgaatctcagggccattaagtccaaatccttatctgatacctgaacaccatttaaaatgccttttacttttaatttactttttagtgcacttttttagaaaggttatttaaggattccatgtgatacac

SEQ ID NO: 24642 - DNA, 201 bp, Bos taurus
tccctcttctgtgagagaaattaacttacacatctatgatttttctttagttgacttaaggagctaaaggcaaaatgtgtgcataatacacacatatatacacacaattttctgatgatgcacctcgtgtgaaatgcagagaatgtttaaagttgatgaaaaggaaaacaaggtatttaacaaaatacaaataaacttaat

SEQ ID NO: 24643 - DNA, 201 bp, Bos taurus
attgttaactcttggctttcagggcccatccattttccccaggctttcggaaagtgcaagacttcaaagcaacatttcagtgcaaacataggaagctttgattcacctgtggggcctgggtttttttgagtaaatatttcgcaaacccctctcccaacatccagccttctatgacctcagcaattctggtcgttccaggac

SEQ ID NO: 24644 - DNA, 201 bp, Bos taurus
gactggaagaagccatagaaagcgcgtgtgcaatgagagattcatttcttggaagcattcctggcaaaaatgcagctgagtatgaggtgatcattgtgatcgagcctgggctgctttttgagatcatggaggtgagtcacagtttgttccttttgaaatggggttcatatcaaagtgctccatgtaaaatctggtttcaga

SEQ ID NO: 24645 - DNA, 201 bp, Bos taurus
acctatttacttaccattctgaatatgggcattaagaatatgcttcaagtgttctattgacctaacaaaaaaacgtgcttccttgcatagaggaagcaaggagagagaaagaagaggtattattcaatagttgcttcaaatataaatggagacttcttacatacatttctacataaacccaagaatgttacaagaacatgg

SEQ ID NO: 24646 - DNA, 201 bp, Bos taurus
cctttcattatagctggccaccacaggggctggtaaatatcactctgaagagtggcacatgttttgtggtgcatcaaccactgtgatgactagagagccctggcccagagtaatttttcaaggccttcaactttagttaataagtccatcatgtgcagttttcattgtcactgtcactgtgctgtcacagacacgcacacg

SEQ ID NO: 24647 - DNA, 201 bp, Bos taurus
ctccccatatgagcttttctggaattctttatcttgaagaatgtcacctcccacccacactcagacagctacaccagagagctgggagtcaccatggacctctctccctcaatctcagtgatccatctgtctccacctcttgctaattgctgcctgtctatctctcctatccacagcctcgttgccaactttttttgtttt

SEQ ID NO: 24648 - DNA, 201 bp, Bos taurus
ttgcatccaagtttcttgccagtaagatggtataaatttgatcctttttcctgtgtaagttatttttcttacttttagaagcattttgaatgccttcttcacctttgatatctttaggcatgctgtgagacttttaaaactaaattatttcatttcatttttggttaattctgaaaagttgatcatgattttttaaatatt

SEQ ID NO: 24649 - DNA, 201 bp, Bos taurus
tatgtgtttctaattcctttccttatctgaagctcattcttcagtaaatgctttagggaaggcccataaggaataatactttctgagcttattcagattggtaataatttgtctgtgccccttgtactttccttttccttttcttctcttaatatcttaaacatgttactctattttcttctcccataaagtgttgctgtc

SEQ ID NO: 24650 - DNA, 201 bp, Bos taurus
gtgtctataaaaataagctttgtatctgttttcacagtgtttgcctccttgaaacattcttgctttcaaatgggagaatgagccagggccacttcacttctagcctctggcccctggtggtcaagtgtctaggattcctggttttcatccaggctactcagggaactaactcctgcccaagtcctgggcagggaactaaga

SEQ ID NO: 24651 - DNA, 201 bp, Bos taurus
gtgcacatgctcgccggcctggcgggaatcttttccagtgaagtgatttttcactttgtccgaggaggcaggagaaaaggctcgatcatctgtcagacactggagggggttgggggccctaaaacgcaaagggtttcagctttgtctgggcttccaggggcttggggtttgtgtatttttagagttatttattcttgactc

SEQ ID NO: 24652 - DNA, 201 bp, Bos taurus
accagaatttcaattctgtggagagctctgggctgggctcagtgttcagagatatttcagattcaggcatggggccaggtctttgtacctcagggaaccctgctctctaataatatttcctctggtcaaactggcctatgaggacagctaccgctgagctggatgatgctcaccagcgcgttccttactgctttggggata

SEQ ID NO: 24653 - DNA, 201 bp, Bos taurus
aatggccaaccatgtctacatgaccgagctccaattaagatgctggacaccaagcctcggtgagcttctccggttgtcaatactcaacgtgtattgacacgcactgttgctggggaacaggccctgtgtgtacagctcactgggagagaaatactaaaagctcatgcctggttcctcctggacctgtgtgcctctcttcct

SEQ ID NO: 24654 - DNA, 201 bp, Bos taurus
ttggagagtcagccactcatttgagtttctgacgcctcacaggtgtgaggcacctggagccaaattccacaaggtgtgtgaggtaaggccccttgaggtgtggggcaaaagctccccagattttaaccccagagaagtgggctgggggcagatgtggcctggggctggctggcaggcatgcctggtctgacaaaagccgtc

SEQ ID NO: 24655 - DNA, 201 bp, Bos taurus
aaaccagaataacacaaatcttcaccatggccttgccagacctgacccctgttgcctctcccactactttccctccacattcacttcactccagccacgatggcctttttttctgtctctcgtacaaaccaagctggcttcatttcaggtccttgcacttgctgttccatctccctagaaggcctttcctccagatctttg

SEQ ID NO: 24656 - DNA, 201 bp, Bos taurus
acacagctcctattataaccctactggacactgctgatgccagggagaaacattggagtgaagccctggatgtagacaggcccccccatgatgccccttatccgcagcccagaggcgtgcaggagagtgtgtgtctccctgagtcaaacctgtgcttccaggtgactcgggctgccccacaggacaccctggcctctttct

SEQ ID NO: 24657 - DNA, 201 bp, Bos taurus
gcgccctctagtggcgctgggagcctttcctaggcagctgagcggtcggaatgggtctgggcagccaggacaagcttcctcctgggcctaccttgtaaagagtatctttaggagccacctacctactgttgctgagaacccgtctgtgaaatgagtgggggaaaactggaaagaggacttgaaatccaatagctgcaattc

SEQ ID NO: 24658 - DNA, 201 bp, Bos taurus
gttacaaggagatagtagatgtgataagttaatatctgctgaattgaaaaaaaatgaaaaccactaaaagaaaaaagtcattttttatgatgtattctagatataactttttcctaatattacctaatcatgatataaagaactttctgcctcttgggtgaaaattaaaactgctctttctcattctctaataggaaatag

SEQ ID NO: 24659 - DNA, 201 bp, Bos taurus
ccaatgagcctttctcgtcctaggctgctgcctccagttgtgtgggtcaaaggtgataccacatgtggttggcagctctgtgctttgataataacatgttttgttggccagccacagagcacagtttaagacaaaggaatgtagacctccgctccttgatggaagaatgtcaaagaatttggggctaccttttgaaatcac

SEQ ID NO: 24660 - DNA, 201 bp, Bos taurus
tcctgtctacctgacagagaaatgccttctggctcagatctgtacatggcaattcagtaactaaagccctgggaggccagggaggctccacttcaacccatatccccagcgtccaatttttgtgagcgtcaggaatgatactgctcagtatggccttgggcatagctcacagagattgggttcatcaccccagccctaaat

SEQ ID NO: 24661 - DNA, 201 bp, Bos taurus
cagcccaccaggctccccagtccctggtcatctttttcttcatctgcccatccttttcttttttatacctgttctgaagtggccgatgattcttgcctgatggttcacatttagcaatgaagaactagaataggatctgggagtgtgagtttgggatgggctggggagtggttcagttgacactccttgcctcctgtgcag

SEQ ID NO: 24662 - DNA, 201 bp, Bos taurus
tggtgaggtgggttgattagtcatgtggttggtagaacatgtagcaacagagctacgtatagtagccattagttgttcttttttttaattgccggcattcgtttcccctttattggagatagcaccccagcttttgtttgtggagttaagcctctctcctgtgtgcactctgtgtgggacagtgaatcaggggactctccc

SEQ ID NO: 24663 - DNA, 201 bp, Bos taurus
gaaagatcatttgtgtcactcaattcatctggaagtagattaatgtcatggctactactacagcaaattaacataacaagtcacagctggagcaacaggaactgcggctaaatggaggaaagtcatcttctagaaagaacacaatggttatctccccacactgctgcatcttagaacacgctgcaattcggagagtgaaaa

SEQ ID NO: 24664 - DNA, 201 bp, Bos taurus
atagtgcaataaattttgatctaaatatcaatcaaattaaaacttggtacgctttggagcaactggtcatagccagaaagggtattgtattgtggcattcagagcattctttttctagtagcaaaagggtcatgaccttataagcatagagaacaaaatgtgtagggaaagagcaaatcagccaacgtggcatggtcagct

SEQ ID NO: 24665 - DNA, 201 bp, Bos taurus
cttggtgtcttatctccagtacctggagagctacagtcttctctgagtgggcccataaatgagtcagggagcagttttgcactttttctgttgaaaagagctggtgggcttctccacctcagggcctgatcacctgtgctctttccaggtcttgtccaggcctgctcaaaagtctggactggctcttggaaggagttgttc

SEQ ID NO: 24666 - DNA, 201 bp, Bos taurus
tataactttgcaagtgtgtgatgatgtagatcatgacaaatgcattgcaagtgggtggagaatgctggtcaggaacttttatccccagctactgccctctccctgtcttgctgggaaaaagaattaatgaaagagaagaaatgggcagtacagggaggtttgcaaccggttgctgcttctctatgtgcagtctggcagcag

SEQ ID NO: 24667 - DNA, 201 bp, Bos taurus
aaaaaagcaaagttgtctccctctaaaatatgaagatcattgccctatgagacaagggtgaatagagagaacacatatttaggacagaaatggaagtcttggaaggaaaaatcttttaatttaattaaaatcattactaatctcagatagactcatagcatcctttaattggtgcagtggatttatggcatttgcacatta

SEQ ID NO: 24668 - DNA, 201 bp, Bos taurus
atctgtttaaaccaccggaaaaacccaggccctgatttttaggactgaagatatatttaaatttgttgtaggtgttcatggacattgagatagtttcagtattatgtcagtttcttgaaaggtgtgttatttaactttgcaacatctctgtgagatggataaggggaaattttcattttttctgtagatttaacatgtaaa

SEQ ID NO: 24669 - DNA, 201 bp, Bos taurus
ggcctggagaatcccagggacaggggagcctggtgggctgccgtctatggggtcgcacagagtcggacacggctgaagtgacttagcatagcatagggtgagagtgaaagaagaggccctcagagaacttgaactaaacacagaaacataccttctgtcttgagtatttcttttatttagaggatcttttctttagatctc

SEQ ID NO: 24670 - DNA, 201 bp, Bos taurus
catcattccagcggtaaaactctgtgtgtggtgggaatgcaaaggaagaaacaagtaactgtaactgtgaggatcaggaatatcttcatgaaaaaagtgggatatgtgtggagtgaggctgatcactggagggaagggctctgtgtgtacccagcccttgaagccctgcagctgttgagctttattgtcatagaggggact

SEQ ID NO: 24671 - DNA, 201 bp, Bos taurus
tcccctgaaagactcgcattcaaaaggttttgctcatccccagccagacctgtatcaccatcactggttgtcagagtgatctgatcagctgacagatgacgtatctcctcgggtgcaagtgagggccagtacctctggattcctgggcagcagccagtataagtagtcaaggctgtgggtccaagcctggattagtggaat

SEQ ID NO: 24672 - DNA, 201 bp, Bos taurus
acaatgccccagagtgtaatctagcacttgcctcttaagccttctcagacctgaaggcgaggctttcttcaacaacttggactcaatgtttcatattcccagaaactatgcccctggtaccccgcgtcatcacaccacactttccagactccaagcctccaacactggagactacatgcaggttcattcatctcttagaac

SEQ ID NO: 24673 - DNA, 201 bp, Bos taurus
gccttgatcacaaacctggagtcagtcctgtgccacctgagaccctgccacgtgatgcttccagccctgggccaggcctttcagacgatgggcccctgacaagccactcaaccaggacaagaatttgggggcaaagaaaagaaagttcacaaatctcttcacattagttgagaggtgagcagaaaatagtgtttcagagac

SEQ ID NO: 24674 - DNA, 201 bp, Bos taurus
gtttgttatgagtattaaaattgttcttatttgaatagcacttagaacgttgcctggcacataggcagcaatatgtgttagttcaaaaaagttcttttgagatctttgctgctaataaatactacttgacaccatatacatacctagacacatgtggacgtctatcctgtaggagcttgattcaatgtgacttattatgtt

SEQ ID NO: 24675 - DNA, 201 bp, Bos taurus
aggaagattgtagatctggaagcatgtttctgatgtgttttgaaagccaaaatcaggataaatatattaaggagaaattaaggaaggtataaacttgtatcttggtagtccaagctgaagtttttggtatttgacacacaaaacatttcagttttcataattcacatataacttaaaatgtctctttttaaaaaaaagtgg

SEQ ID NO: 24676 - DNA, 201 bp, Bos taurus
atgttggccttgaaaggccttgtggcttccattttcaccattttggaacactgtgctcagtccagcctggaggatagaggacacgtggaacagagccaagcgctccagctgaggcctcctatactaacatgtctgtgcttgcaccaaatatttgacacacagatgaagccatcttacattatcctgtcccaggcaaaccac

SEQ ID NO: 24677 - DNA, 201 bp, Bos taurus
taaagagcctcttgatgagggtgaaagaggagagtaaaaagctggcttaaacttaatgtcaaaacaaacaaacaaaacccaaacccaaagttaacacaccatagttggctgttatgtctctggtttctgctaatctacaacagaagccctcagaattttgttgactttttatgataatgatttgctctaaggggccacact

SEQ ID NO: 24678 - DNA, 201 bp, Bos taurus
acttatacttttctttctccctaactagactgtttcatgtgactctgtatactcaactagcacttagaacatgtgcgaaaaagtattctgaatgaaatatcggttgaataaacttttgttggttggatggatggatggaacatcaacttgtgatactaaccaaatccagattaaatttgaatttacactggtctgttctgc

SEQ ID NO: 24679 - DNA, 201 bp, Bos taurus
tggctttccatgaaagtatgagatctggcaaatctcatgctgaattctctcatggggactcttggagctgaatgttgtcagccttcctgcagtcaggtgtttctggtttcccagagtccccatacaactgctattgttcccaacctattcacccacttaaaatacctgcatgacctcaggtagcattttgagctgacaaac

SEQ ID NO: 24680 - DNA, 201 bp, Bos taurus
aatggtacatttgctaaatgtttaaaaaggttagttacatttacatgagctaccactgccctgttttcatctccagctgttactcctattggatgttaccatatcattaaacaagtttctgtcattattgaacttacctataaaattaacttaaaatactattttttgcctcttaagttactgataatgctcacatattaa

SEQ ID NO: 24681 - DNA, 201 bp, Bos taurus
tgtcatagaagggtgggatagtaggagatcaggagtcttggggatttagttgcctgatttcttgcctaaatgctagtgcaaatgatgcaaagcactccaagggcttctgttctgccactgtagagtatatttgttgccttttggctgtgaagcatccacacatttcctactagcaccgcaatgtcccttcattaggaattc

SEQ ID NO: 24682 - DNA, 201 bp, Bos taurus
ttggtctgccttaatttagtgaagcagcttgaaaatatttcatctcacatttcaaatattttgttccaaggatactgagtaataaaatgtactccccaacatcttgaataataaatccatttattcatgaggcagctaattttgtaaatttcatgtaatttaggtttttctgatctgatctaagattttccaagaaagagg

SEQ ID NO: 24683 - DNA, 201 bp, Bos taurus
ctgaacttaacgttttgcaggatgtgattaaaataatgtgattaaagtacacacctttaattcaagtctatttgcacaactctgtgaagagatggacacacgtcttctcttatatacagaagtgaggtggttttctaaaggtagatcactggctagagtttctgagttatgagagtcactccagagatttcttttagaaaa

SEQ ID NO: 24684 - DNA, 201 bp, Bos taurus
agttttacctgatttcagaggccatgtgcctggaattgagatagggcaggaaaaaaatcttcacttaggacaatatcttagacatagtcatggataagatgaagtccagctgagcagcaggccagatgggcaaacctctgacttgctatgagttatctatccacttggcacttggtttcagcacattgcttcttgctctaa

SEQ ID NO: 24685 - DNA, 201 bp, Bos taurus
tcccggtgctccaggtatgccctgaatcttctgtaaaacccattaggaattttaagaaagtttaagaaacagagactcagagactcctctgcctggtaccacagtgcatttcagtgcatacaggtaaggtgaaagccaaccattccctatccctcataaagctacggtgggattccacaatgggattccaccatgagaagc

SEQ ID NO: 24686 - DNA, 201 bp, Bos taurus
ttttgataattctattatttaaaggttcgaggtgaagtaatgaaattagtacatctggcttaacacagccacattacactgttcacatagtaacagttgtttagagatgcagttttactcctgagtttgttcatgcttgaatatccagatgaaaaataaactggagtcttacagtaaatttgttgttgaactttatttagc

SEQ ID NO: 24687 - DNA, 201 bp, Bos taurus
catttctataagctgctgcagtattcgaccctggtgacatagaaaaaaataagatgtgattatagggttacatttcatatgactgcttggaatttcctagtaggtgggtttgctgaacagatatagataaatacacaggcatacaagaaactattttttttaaatacagtacttgtttttcaaagagataccctaggactc

SEQ ID NO: 24688 - DNA, 201 bp, Bos taurus
atgaacattgaagatttaaacacacatacggtactcatattaaatagtacataatacatttctgtatatgccaggatactaaactaactatctcgaatacacttatgtgccaacatagtgagtcaaatctaattttttaacttaatttttaaaaattccttctttacttatccttgaaagatgctctgattgaatttataa

SEQ ID NO: 24689 - DNA, 201 bp, Bos taurus
gcaccagaaaagcctgaaaaggtaattcaaaaccatgggtccattaactctaaaatgaacaaaaccaagtacaagtcttttcccttccataaaattagttttgttgttttgtgttctatttttacaacatataaagaaaaggactcttgaagcttgtctttgcacaatttttaaaaatacgaacatttattttctttattc

SEQ ID NO: 24690 - DNA, 201 bp, Bos taurus
tctgcagccagttaaggttctctggttttatggactcctgtgattacactgcgcctatggggatgatccagaataatttccccagctcaaggcctgtaattttaatcaaatctacaatgactctgccatgtaaggttgttaggctgcacccacaggcctgtaagccttgtagctagttgccaggcctcaagacagaagaaa

SEQ ID NO: 24691 - DNA, 201 bp, Bos taurus
gaaccagaagtttgatgtcaccaaggcctgggcggatcggcttcagaatgctagaggagtgcctgtcgttaaaccattgagatctggacgaagaatctgtaaagtgaggccccctgcagtaggaagagtaagaatctgagaggtaagtcccagaacggacttgtgtaactaagagggaattttggaaagggacggcggcac

SEQ ID NO: 24692 - DNA, 201 bp, Bos taurus
tcacgaatgctcggcgtgggcctcatccccagcaggaggagcgtactgtatcacagcttctcattcttaaccacggtccctcttagaacgtccgttcagattctctttcccaggtggccagcaccaaagatttaaccttgggacgggggaatgctctgcctttcttccagtagatttccggctcttaaactgtattcatct

SEQ ID NO: 24693 - DNA, 201 bp, Bos taurus
aaattgaatttgcagtatattacttgtacagtgacagatttttaatattttcctactatctacaggcaaaagactttgaccccttaggtggggcaacagagctctccccaagcagacctcaagctgactttgtggcaataattcctctgcagtacttgtctactcactgggcctgtgcttcttgcttacatctgctctgtc

SEQ ID NO: 24694 - DNA, 201 bp, Bos taurus
accattggctatgataggtctcccacatggtaatataaagttactgagcataagaaactacgtcaagtacagggattaatagagctgaaaagattataaactgatactgaactaaagcggagataaatttaagatccttatgaaatcttaagatatcaaaaagtcaaataagtgaataattttggtggtatttaggaaaat

SEQ ID NO: 24695 - DNA, 201 bp, Bos taurus
atgtgctgtggttcatggggtcacaaatagtcagacaggactgagcgactgaactgaactgaactttctaccatcatctaataagacactagaccttagaaaaggaagaccagaatccttacttccttatctctgtacttctttggatcctgaattcatcaccctgattgaataactctggtggcaacctgccccttgctg

SEQ ID NO: 24696 - DNA, 201 bp, Bos taurus
gctgaatggcctcaatatttcgaagaaactgacagtctagtgacttcctcccgctttggagcgaagggcgcttggagtttgaagcgtcggggaggtgagcctctaaaatccgaggccccggctgctaatattccccggggctccagatcccccaattttagaagtcagtgagtcactggctctatcgtacatttcgctgag

SEQ ID NO: 24697 - DNA, 201 bp, Bos taurus
ctaggtctctttaggagcaatactcagtcttttagtttcccttccttgtccctcagctctttctaaaattgtctctgggcttatgcagaaatagaacttatatgaccttgtggtgaagcaaagccaaagtttcccaaattcaaacacagtcttgggcctgtcctctgaatcctctggtctcctgatgttcctattgtagat

SEQ ID NO: 24698 - DNA, 201 bp, Bos taurus
ttagatatagatgatacttatttggcttgaagatattctagccacatcatttatcttgtaacctcagtctgtcctgatctctgtattgtggaacctgcaataataggttgctctgggggtcctataactctgaaaatattgcatgaaatacagaccataaatttgtattttccactatgaaataaccgatgtatttttttt

SEQ ID NO: 24699 - DNA, 201 bp, Bos taurus
actattcatggaatatcttctctaacactgagtctgcaagaggtcaacacaaaagttttgtgataaatgctgactgtgtgatcacttgaatgatgaacacgtattttgtatcttgcccagagttttgccatgattttctaagtctctctccttattcagtccttaacgctggttcccactgctaagtcaggcctctcacac

SEQ ID NO: 24700 - DNA, 201 bp, Bos taurus
tccctttttactgtcctttttactggctcatatacaagagaatctcactgtttgaaggaaaatttttctagatatctttggaattagaaaaatctttgacgttgttcttctcattgaccatacccacctcctttcccattttaggggaagagacaggtgctaggtagaaagacagaagcaaataaatatatcctctttctt

SEQ ID NO: 24701 - DNA, 201 bp, Bos taurus
tgtgctcccagagagcaagtggttacttcatgaaactattgccagtgtaatgttcatatataaagttgtcccaagtatgacctctctttggttgtatttaattataaatggttttctgccgccatagactgtttggtaccagatgcataaagtccttttttaagcaatttttaaagagagctttatagaagttttgattgt

SEQ ID NO: 24702 - DNA, 201 bp, Bos taurus
cagacacactgattattttcatctggtatttaatttgatttattaatgacacttagctttcctcatttacacttgcacttcctctccttcaaaattctctgtcagcttcattcttgttgaatctcattttgatgtggtgaactatctagtctcctcttttctcttcttaattgaaatatagtctatgatattgtgttagtt

SEQ ID NO: 24703 - DNA, 201 bp, Bos taurus
caagtgagtcaactctagagcctcagtttgcccagctggaaaatgggaataatagaaggatgggcttcagcttgggatcggcttaactgatgtctgacccgtggccagtgctccatacatggtagctactgttcttattattatgagggctattattatttgacccttcgggtactgaacgtctggacttcggccattctt

SEQ ID NO: 24704 - DNA, 201 bp, Bos taurus
ctagctcaaaggtcaggtcctgtttgtcacctggcttgctacgtacactccttacatcacccacttagaagtgtttgatcattagtccctctggccatttcaaagtctggcacgtgagctaccgcccccttcttccattgcctcctgcgtgtgtgtccacctgccaggccccaagccctgattctggagatggcagcatgt

SEQ ID NO: 24705 - DNA, 201 bp, Bos taurus
tcactgagccttcagatctgtggccacacgagtgacacttgggaggggcaggggatcatgaataggagtggatggtagccatagaagcccttctggaaccctccaggctggcctagactgctggacttcagctctgggacatgaatccaacatttcagaatttctcagaagtacctcaggactcttggtcctcatgagggt

SEQ ID NO: 24706 - DNA, 201 bp, Bos taurus
aacactcgcctagtctgcttctcactgcctcctccaggccagaaaggagacagtgtccaaaccaccatgtcagggagtgtgcttccgtggggaggctattcgggccagatttcaaaaagtgaatcacattcggggagatgcacgtatacccatggaccaaaccaatgcatgtaatcacagttttttttatgagcagctaga

SEQ ID NO: 24707 - DNA, 201 bp, Bos taurus
cttatttctcagttgctttctgggagttgtatcagctgtcatcctgggacttccttacaatggctttattcctttttcaaactttactgatagtctggttgtatacagaataacaggttgaaaattattttttctcagccctttgaagatatttttttccactgctctctagcttctcttgttgttttgagaaggccgttg

SEQ ID NO: 24708 - DNA, 201 bp, Bos taurus
ggctggcaccttccagtctgatctgaggccctaaaagagagcgcagcagcccacttttattcttttggatggtaagttggagccaggctcaggatggctcgggaggacaggaggccagggtggcccgtgtgtaacttccagcccagaggaacaagggtccccttgtggtagcctcaggaacccaactctatagccaatgga

SEQ ID NO: 24709 - DNA, 201 bp, Bos taurus
ggctgtgacctgggggagattgatggccagcctgtgcggtggatgctaacagtttccctgatttatagagttacttacgctaagtgaggccacttagacgtgtctggatagtaaaccttttaactggactaaaaaatcataataaataaataaaccaaggggcacacgtagggcccagcagctgggcccccccagttgccc

SEQ ID NO: 24710 - DNA, 201 bp, Bos taurus
tgagttttcagtgacaggtgggagcgcggcccgcaatgaccatggtccgattcagtgggacccggttcttggcaggagaggcaggttttaccaggaacacggacaggcctctcactgagaagccatttccagataaaacaacacttgcttcacaaatgccaacttctttttctttagagagcctcagatttcagcaacacc

SEQ ID NO: 24711 - DNA, 201 bp, Bos taurus
agatgtttgcctcagcaaggccaactgaggccacatggtgaggccaccatgtaactttccagctgatagccggggctgaggtcccagccaacattggccatctgatgaatgaagaagacagacacctccacatggtcccagccatggaaccacccccagctttcaagtcttcctagctgaggcccccagatattgtggaac

SEQ ID NO: 24712 - DNA, 201 bp, Bos taurus
aagacgtgaaaacaacacgcgacagccagggtttggcaagagaccaacatcagctaggacttcctacctgagcacaggccatttggctgtgactctgtaacatgaaatttgtatcaactctgattccttcctttaagcgatcagaggctttcctaaaatttgatggggctcaaattcaagtttcataaatggccttttgaa

SEQ ID NO: 24713 - DNA, 201 bp, Bos taurus
gctatgttcatgcctgcattcataaacagcccaggtcccctcattttcaaatattagattgtatataaaagtatcactgaaagagacaggggataccaaatcttggggatttctcataatatagaatgaaaaggttgttggaaaagctgagccgagaactctcaccatccccgctgttgttcctctcgctccggaagatac

SEQ ID NO: 24714 - DNA, 201 bp, Bos taurus
agcctggcacacagaaagagctcagtagagtaagctatcctatcactattgttgtgatgtggttgtttatacagttatggacatctgccagaatggtgtcagaaattcggacggaaggaagaactaagacacacaccaatgtcttcaaacagagcaatggtagaggacagtgtaattgaatgatacactttggcataaaca

SEQ ID NO: 24715 - DNA, 201 bp, Bos taurus
aagaacaaaacagaaaggatccgatttcaaaaatggataaaggggaatttcctggtggtcaagtgtttaggactccatgctttcactaccgagggcctgcattcaatccctggtccctgaactaagatctaacaagccacttggtgcagctaagggggaaaataatggatgaaggatttgaatatacagttctccaaaaaa

SEQ ID NO: 24716 - DNA, 201 bp, Bos taurus
aaataaatattttttaaaaagagtatggcctaacctagtaatgaagaattcaatgctgaggataaggtctgagggtgtgacaagtgtctgaagcctaagcggaagggcccacaggcaggatctgtatgcagcttcactctggctggcaggatgcccacggctttacagtggtacagttacccaggtaacaggagcaacatg

SEQ ID NO: 24717 - DNA, 201 bp, Bos taurus
aatcagctgcacacagcttcaaaactgttttctcccacctggtggcctgacactctccagcccatgcaggcgtacatgtgcacgcgcgcacacacacacacacacacacacttcacctcttggcccaggaagccaaggcaatgagtttaaattctgccttccaacctggatcccagacaaatgacttggcttctttgagcg

SEQ ID NO: 24718 - DNA, 201 bp, Bos taurus
ctgtaggtggattgaccttccccaccatacctgaaagggcctctgaagtaactcaggttcttcttcaagaaaatccctagattcattcttcccacctctcctcagaatgacaatggcccagttttcacctctcaaactacccaagaagtgtctcaagtttagatattaaatacacattacattacatgcagcctggcatac

SEQ ID NO: 24719 - DNA, 201 bp, Bos taurus
ctccgtgcaggctctgacatgctggcccctccctggtcctggcagcagagcgtggtaacagggggaacatgctggcccctcttgatctgtgctgggcacttggggcagacggaggaggaagatgacagtctggctggagaggaaaaccaggcctgtgtgggtggggtccccatagtgctgagaggccttggaattagccat

SEQ ID NO: 24720 - DNA, 201 bp, Bos taurus
gccctgcatggtggctggctgagcccagggaccccagcacggagtccttctcatccgccccatcaggctgccagcccatagcatggtgctgaggggacttttgtgacacctggcccatgcaggtgctgacccaatgttcccattggatctgcatgaaaacatcgaggcctcaagccgccctgtccagcctctgtggtctcc

SEQ ID NO: 24721 - DNA, 201 bp, Bos taurus
aacctgaaatctcccaaacctgcagaatggtcccctcctccctaggaaaagctggcacccacctccacctcccatcctaggaaataatgcagaggcctcagtgcaagaaatgttcccacattctctactaaatattgggcggaaaacttgggttacataacagtataactcagaaggcatgtgctggcctgataggaaagg

SEQ ID NO: 24722 - DNA, 201 bp, Bos taurus
cagcccatatttagtgtatttttcacgtcacggaaacctggactgggaacagaatgccacattcataaaacaggtgatgacaaggggctttgtgacaaaacgctgctagacgcacaaaggctgtcccctctactgtcagtgggaggcgtgctgctccaaaaaggagacctgaggggagattcaagggcgagtcagaggcat

SEQ ID NO: 24723 - DNA, 201 bp, Bos taurus
tgataaggagcccattgggcaagtcctttctctctgagctggggccctgcatcagtaacagaggctgtggttcagcctccccttgttcctgagaacagacacagcgattcctgctcctaccttggccgggcattttagcctgcaggctccacagcatcccagagccccacatcaagggttttggaagtaccaaaaacagat

SEQ ID NO: 24724 - DNA, 201 bp, Bos taurus
cgtcagcgaaactagtcagttaactgatgtacatcacaatgtgtttgcctattaaaaattcagattatcaggcttctacctgggaatctgtgtttttacacgtccccaccccagaaattcagatgggtgactgaatatgagaagaatatagaagaatgcagtagtctacagatgaaagaataaaaagatatattttttaca

SEQ ID NO: 24725 - DNA, 201 bp, Bos taurus
tggccattgttgcacctgctgaccctttcacctggcacgggtaagctctgtcacccctcctttttctcctcccaacttgggtaaattctgttccttgtgtctgggcaccagggaagctggcctgctggtgggagcagggtttgcctggacccaggagaagccgggacagcccaggatttattgggaagggaaggaagagaa

SEQ ID NO: 24726 - DNA, 201 bp, Bos taurus
attcaaaagagtgtatgtaacatatgtaaacaactaaaagaacagtaatacaacaagcacggtctacccagcccccgacctgaaggcgcatgacccataagggggttgtcttgctcttttctgtcacctctgcatacccccgagcccacaccttcctgaatgctatgtgcctcccaaactgtcttttcctttttaaaaaaa

SEQ ID NO: 24727 - DNA, 201 bp, Bos taurus
gctcctgaagctgagcagccccgcctctccctgcaccggggccacttttcagcctggggggaccaggacacagagccaggtttgggagaaccccagtgacgactcaggacaggcccatccttagcgagagcctgactgagctctgagcactgccattcccccgagcgctcatgggagccaaggaaacagaaagttaccccg

SEQ ID NO: 24728 - DNA, 201 bp, Bos taurus
gaccctgaatccgggcgggctctctcatccgggctttcccacagggcagaccacgcgtcagccaccacccaaacaaacacctccctcctctgaggccaggacaaggtctctgctcacaagcagtcgtgttctgacccctccctgcacaggcatcacgtaaattcgtcaggaaggcaggttctcaggccctacgacgctgct

SEQ ID NO: 24729 - DNA, 201 bp, Bos taurus
ctgggactcagtgccccgccagacctggagccagctcagtgttaagcatgttcatgctgttcgctgagctgctactcagggcctcgtgtgctgcagatattgtctttgctccgcccacatgtgcacgtcccattcaaccaagaagaaaacagtcccagagaggctgtcactttgcaaaggtcaggaagagccctggagtgc

SEQ ID NO: 24730 - DNA, 201 bp, Bos taurus
gctgctccagcctgagagcctaggccccaggtcagaagtggccaatggatgctgcccagtccaagcccctccttttacaaactaaatgttgcacagagagggggcacatctgcccaggggccctctctgtgtgtgctcatggagggcaggtggtccctgctgggccctctgcactatttggatggatggatggatccatcc

SEQ ID NO: 24731 - DNA, 201 bp, Bos taurus
gaattcctacaactaatgattctttaatcaaagagttctatcttgagtgtttgcttgcttaaagtttaattaggaaggaaagtctgggaccaaaatgatacgtgtatggtgtgtatagatccttcttgaaacagatttttgatgcccgtttctttgctgtgtttccacttcttttctgtgatccccttctccctccccacc

SEQ ID NO: 24732 - DNA, 201 bp, Bos taurus
cccttgagagaacctccttttggcgcccccaggactcctgcaggaggtggaccagcccccagagacttaaggtgggatcaggcccgttcatttgtttcccatgaatcctcagctgagtgcttacacagggactggggttcagcgctcaccaccgccgtggccagtaactctttcagctgctcattcagacactcaggtggt

SEQ ID NO: 24733 - DNA, 201 bp, Bos taurus
ctattcattctttgctgtccctacctggatcttgggaagtaagctggccaccagatgagctaaaaaggccacaaacctgcacgctgggcatcgaagtcccacatgtggtcacatagaagtggagacttgggcagaggtcagaatcaaattcctgtaagcagagtttcccaaacatcagcctctttaacgtacttcgggttc

SEQ ID NO: 24734 - DNA, 201 bp, Bos taurus
ccctgccctggccacagagcggcagctgccaggagctactcatggtaccaggaaggtcacaggctctgaaagtgggaggagagcaaatattgaagcctcagttgagggcccctgagcaagagaatgagtgaaatggggctaatgaacacagcgctgcccggatgcacgactgccgaatcgtatttaaaattactccttagt

SEQ ID NO: 24735 - DNA, 201 bp, Bos taurus
cggggtaccgctggacattgggacctccaaccggcctggggcgaggtaaggccagcaggattcggggacacgtgtcgggcagcctggcggccaccgtgcacacaaaactcatggagaggcgctttcgctcacccagagtggagttggaagtcagtgtctggccccaaagtatcctctgggagcagggaagcatgtcgggtt

SEQ ID NO: 24736 - DNA, 201 bp, Bos taurus
cattccctctaaacagggtatttatctaggaagttccccaaggttgatccttgaacaccatcagtctatgcaaaagtttccaatgggccatagtgaaatacgaaaaagaaggacaatgttacgagtttttcatgaaatcctgtttatttagtatcaaggcctgctcttgactttgagatcatgtctgcccatcttcccccc

SEQ ID NO: 24737 - DNA, 201 bp, Bos taurus
agaacctggagcttgggtgggaccaccctctcattctgtctggaggtggctgtttctgacagcttctggctcaggcgggccacttcgttctgaaggttcgtgatcacggcatctttgtatttggattcgagttcgaaatccgatagacggctgacttcttttcccagcagcagaattatttcatcctgggtggaggccaga

SEQ ID NO: 24738 - DNA, 201 bp, Bos taurus
ggagtcttagccactggaccaccagggacgtccttctgcatcctcttttaggcagcccacctagcagtctctgtctttcaccatttcagctctcactgcaccctcgtttcctgcagaaaagcgtcctagtactgagatagtggaggtgatggttcttgtagctacttcgtaaggcatccccccatcaccctccaacctgct

SEQ ID NO: 24739 - DNA, 201 bp, Bos taurus
ccaggctggaaaaacaactccacagaaagagagaggcttgtccaagcttaggaactgcccctgccccctctagactagatcttgcaccacctggaccctttcaggggcaaacaggggtgacaggtctgggactgcaatcacagagaacctcacaagactgaagcccatttacctgctctgggaccatctgcaggcacttcc

SEQ ID NO: 24740 - DNA, 201 bp, Bos taurus
cctacaggcccagcaggagccagacatgcacatggctcccggaagagggtctcagacccagggagcaaaccacttagcacacacacctgatgcaggaaagcgttaggactctccaagaggccagcatggtaggagccaatgaaggggaagagaaagtgggtcagggtgaggccagtggctagtcagggaggcaggtgtctt

SEQ ID NO: 24741 - DNA, 201 bp, Bos taurus
aatggcctggcatcaatctcaggatggggactgtttcccaatactccagaaggccggacactgcctccatggttactgcaacctgtgctttctggcccattcccacttgctgtagatgaagcagaactgtaaccacctcatatcctcataggtacctactcatcacctccaaatgcaaagttctcatctggtcacacgaag

SEQ ID NO: 24742 - DNA, 201 bp, Bos taurus
gtcagtgacaccaccccaccatcttatttcagcacttggaactgatgtgggatgcaagctgtcaggagtcaaccagaaccagcaattttcacaactgcttcgtcatttcccattagcccaagatctctttgtacctgctttgttttcttgcatcaagatccttcttcacagcaggaagatcttattaaaatatttccattt

SEQ ID NO: 24743 - DNA, 201 bp, Bos taurus
tattacagggcaaacctaaatgtggccatgaccttgaccacattctaaacatccccaaatgaaagagctcatagccataaattactaagaaccttaaacacgcaaatccccttctgtaactggccctagctttgagagttgatcttcaaagctgaatggtttctgttctttcacgtgcttgtttacatttgagagaactga

SEQ ID NO: 24744 - DNA, 201 bp, Bos taurus
gaaaagaatgctaagtgaatacatttctttgatctgcagagtgtcaaaatggcaagataatacaggctgctctttctttcctcccaaaaccaaccttggagaaactattgaaaaatgaacaagccacaaagatgtggcttccataaagtaagaacagaaaatagtaacaaaaggttggaaactctggctaaaacctgtctt

SEQ ID NO: 24745 - DNA, 201 bp, Bos taurus
cccaaggtgacctttaaagtgctggcttctgtaatcaaagcatcacaccttggcagagggaatgactgacctgtgagattctgcctcaggttctgatagtcactgtggccttggttatggtcttgattatgtttgcagcctttaggtcaaacaacagccctgccatctatggagaatttattctgcatcatgcacttggct

SEQ ID NO: 24746 - DNA, 201 bp, Bos taurus
acgatgttattcaacgtccagagcctaggagatagaggccttgcagctcctcttctcaccctgttggaacctagagatcaccatgtagtgaagaagcccggttcactctattggaagataggaggccatgtggaggagaaccaaagtgccctgaaatacaacatagtcaactgccaaatccgtgagtaaggtacatgttgg

SEQ ID NO: 24747 - DNA, 201 bp, Bos taurus
tgttctaattactgaactggtggttggaataaatttagttttgtatttatgccttccaccctcattatttattagatcaattaattaatccaattagatcgcaaaacaattggaaacacaatcggggagcatgagttacatattttcttaaacaccttacagatggcgtctgtgctctaatagtgtttattacctcatagg

SEQ ID NO: 24748 - DNA, 201 bp, Bos taurus
agattagcatttgattcagtagactgagtagacttccacacgcaccaaggtgggtgggaatcatgaaatccatttcaggccatactgaacaaaaaagcaaaagagggcagaattctctctcgcttgagctgggatgtcgatcttttcctgcccttgaacatcagagctactaggtctcaggcccttagacttggactcctt

SEQ ID NO: 24749 - DNA, 201 bp, Bos taurus
tggtgatagtaaagaacaaaacaaacaaacaaaaaagcacttgaggggaaaaatatgcaagagttgcagtagccttgatgatccatagtctagtgaatgggtttgaattggatcaaatgagtcaacactgtaacctaatggtagatactaagatgtctctgaattctgttttactgttaagtatctttaatataccatatt

SEQ ID NO: 24750 - DNA, 201 bp, Bos taurus
ttgtaagagaaaatgggaaggaagctgggtgagccatgctagtctgactccgaaagaagagaggaagggaagagggtcagatggaagtgtcttggatgtggggcacttttaaggaaagtttggcaaagccactggggtggcctgtgagcgcccacttttcccagaagctggcctgcctttgggttcttgctgtgctcagtc

SEQ ID NO: 24751 - DNA, 201 bp, Bos taurus
tcatgacttaaggggatttgaggagaacaaagggtgattgccagagttcattgccaatagggcatctttatagaaactacaacatgttttccaagccatacttctcctttttttgcccagggacaatgttgtctgttcacatttttatctcatattctttcctatccttggaagaggataacttatccatccttgtaaact

SEQ ID NO: 24752 - DNA, 201 bp, Bos taurus
ccatctctattcattagggatactgacctgtagttttctttctttgtagtgcccttatctggctttgctatcagggcaatgctgggctcataaaatgactttgggagtgtttgtttccctcttactcaattttttggaagagtttgagaagaactggcactgctgctgctgctgctaagtcgcttcagtcgtgtccgactg

SEQ ID NO: 24753 - DNA, 201 bp, Bos taurus
tatgaggattaagtgagagcaaggatatgactttcttaatgcaatgcctggcacataaacagtcctccagaagtgctgctggtgttaccttttgcttactacttaaccgtaccaagaaggatttgtagtttacccaaatattttctttttttataatttatttattttttgactgtgctgggctttcgttgctgcatgcag

SEQ ID NO: 24754 - DNA, 201 bp, Bos taurus
cacatctcttatggcaccaagttgtgaatcccacatttttctcccttgctgtgagctctgtgactgtgcacatccctacaggaaagggatctcatcagaagtttttgagagactgaaccagacctgtcccatctgaccaagagagctgtccgtcacactggcatgtggatcctcccctgatcccaaataacctttacaggt

SEQ ID NO: 24755 - DNA, 201 bp, Bos taurus
gtgagcatgttaggtacagagctggagcagtaacagaggagagcagagcagtagtggagtaatgaagatccttgctgttattttctggagggagaaagcccggctcccctaagcaaagtaagatggaaagaagttactaaagagtagcttgtctcacccacccagcctgacagccagacaggtgagttagcaaatgctaca

SEQ ID NO: 24756 - DNA, 201 bp, Bos taurus
gatgccgtcagtagcaaggccagggtgaccatggagatgctagtcctgatctccctttaagattgttatcccattttatagatgaggaaacagaggctccgaggttgagtagctggcctagactcacacgagagctggactccactgtctttagttttggattcaacttcctcactgacctgaagggtctctgcccacact

SEQ ID NO: 24757 - DNA, 201 bp, Bos taurus
ttctttactgattaaagaaaaaagcaagagaaaccctaacacacacacacacatgcatatacccctatatgtacaattcaaggaaaatactgaacgcatggagaaaaattgcaaaaaagcaactctaccaggaaactaactatatattaccacattacataaaaactatgaaataagtgattattattcaataatcttagc

SEQ ID NO: 24758 - DNA, 201 bp, Bos taurus
cataggccagatgtctatttctacatcgtagctaccctaagagagggtctacaattgctgtgggaaagagggcttgaaagtcctctttagtaaaatcccagatgtcgttggctactccctatgatgcatcttagaaagccaagcgaagggaatgtctatgccctaagggaaacccagctttcctgacctttgcggtctgca

SEQ ID NO: 24759 - DNA, 201 bp, Bos taurus
agctcctcatgtgagggtgtttgtctgccttgcttggtgatgtctgctatcactctgggaggtttgccctgtttgtggccagaccttagctttcattttctagttgaatgaagatggttaggtgagagccagcgaggggtgggggcaaatgagtgcatgtggccaggatgcattatgtaattataataatattgacaaata

SEQ ID NO: 24760 - DNA, 201 bp, Bos taurus
cacggggcaaggcgtcttcacaatcacatcacttggcctggagcgtcgccctgtgttgtccacgccccacagggtgaacctggcagggagaggagggcatcaacagagagaactcaccgggttctggctgacaacccagccttgcccagatggacgggtttcccctggctgctcttgccacccagtcgtgcacttaccacc

SEQ ID NO: 24761 - DNA, 201 bp, Bos taurus
gatcacgcagctggtgatgctgatcaatgtcaaggtcgtcttgttcacaggacttcggggagagcccactgaaaacaagacaagagcaaagcatttggtggtaagaatcttggcagtaaagggccttttgctgcccaacctggcaaataggggagggagcatgcaaacacagcccaggtgggagatgtgtctagtccatga

SEQ ID NO: 24762 - DNA, 201 bp, Bos taurus
gagcagctctgttcttctctcaaaatcacagtacaaacaatccctggagggtacttctcttgttgaagtcttccccgtatgtgatagccagctttcaagacggcctccagagattctcatttctggtgtccaccccctttttgtgcaaccccctcccacagggtatcaggcttggtctccatgaacaataaacacagcaga

SEQ ID NO: 24763 - DNA, 201 bp, Bos taurus
tatagaaaaaatactattagaaaagatatttgcaccctatgttcactgcagtattgtttacaatgcccaagatatggatgcaaactaagagtctatcaatcagctgaatggattaaaaatatggagcatgcaaatatataaaggagtattgctcagccctaagtatgaaatcttgccatttgcaacaacatgagttgacct

SEQ ID NO: 24764 - DNA, 201 bp, Bos taurus
ctttttccactcttatcaggtgagaatatacatatgactttgtatccccaaactaagtcatcaataatactgacatattcagtaccttaagacagatacatttttagttctttcagaacaaaatataatgtatttgttatagtattttcaagtcaactataacatagatgttagagaaaacatctgtatcttcagtggcat

SEQ ID NO: 24765 - DNA, 201 bp, Bos taurus
ggaatgaacttataaatatgccatctgtaaaaggaaagtgttttcttttattaaagactatcgccaatgaacaacattaccagttaagaattttttgatagcagtctgccaaatgtatagttacattcccaaacattttgtttttcaggtagagggaaagtaatttttctggggattatttattgtaaatgaacaaaaata

SEQ ID NO: 24766 - DNA, 201 bp, Bos taurus
cctaacccacagaggtctatgatgggaactgggctgcaaagaggaatgaatccatagtgctgtgttccccaaatcctgctgcggatttaaagttgaacaatgaattgggagggcagacataaatataactggagttaaaagtttttacactctttttggccagtttttagttgaaaagtttattgcctgtaggtactgaaa

SEQ ID NO: 24767 - DNA, 201 bp, Bos taurus
ggctgggcctcgctggtcactcctggttctgtttcctgaggaatgaaaatccgacaaagcccagaaagcatcaccagccagtgtgatgccagcctcctgcagagaggccaccaggtgaaatgtgttttgctgcgtattcaaatcccccgagggagcttcgaaaactgcggtgcctggcttcatctcatggcagaatggctg

SEQ ID NO: 24768 - DNA, 201 bp, Bos taurus
ccacctcctgggcaccatgccttctttccacctcatcaggcacactcatccattcaacaagtatttcctgaacacctacttgctggaaatcagaacagtgtgtaggacggttgaggagctgccctgggggagctcccactggcctgggtgagactatgagagagacacccgcgtgcactgtaatttcagagtctccaaggt

SEQ ID NO: 24769 - DNA, 201 bp, Bos taurus
tgttgcccagctgcctgcagctacatgtgcgctggagccatgtgccctgtgtcccctgctgccaccggattctctggggctgcgagctcagctgccgtggggggaaggccaggactgcaggtaccacctctcatatttcctcagttctgcctcctatattccacttcactgacctttagatgtacagatatttggaattct

SEQ ID NO: 24770 - DNA, 201 bp, Bos taurus
ttccttttctctggatgtcaagcataatctttgggaagttttatttacttctgctttataagaagaaacaggtttttctctctgctttctttagaagactacttctcttttttctagagtgtttgtgcttctaatgctaattaaccctgtttctcaagttggagtctcaatttcattgctctttatgtgtatttgaatgct

SEQ ID NO: 24771 - DNA, 201 bp, Bos taurus
tcctttggagatgaccttgatccactgagcaggagcagccccctgttctgctcttaggcatccttacccgacagggattttttttctgtcattttaactatgtggcctctagtcagtagcttttatgtgctgggagtgtgttggagccaggaacgaggttgaggaggaggaagcactgtgaggtgtcagaggctgaccact

SEQ ID NO: 24772 - DNA, 201 bp, Bos taurus
cagcagtattagctttatatatctctattgtactttctactctgcacagaagattagtgtgcttcaagttcagggggtgagactaggccattaagtactatggtctgttttcttttagattatagataacagccacaaggtcttaaaaacctttctccccaccattgggccaatatctaccattaaatgttataatctaac

SEQ ID NO: 24773 - DNA, 201 bp, Bos taurus
cctgtgtcttagtaggatcacaatggttctgcattaagaatagactcaatagagaggggagcatatatggacacaaggtgaccagttatgaggcttgatcaggtgttgagctggagaggcctgagaagtgtgtgttgagactgctgcctggccaggaactgcctggaggcctagctggggatactgggctttctttttttc

SEQ ID NO: 24774 - DNA, 201 bp, Bos taurus
tttctaaccttgtctgggatcatctggaaaggatcagcaggaggatttgggaacctggggtgctaaatgactaattcagggtctaatttgtggggccccatggagcggctgagcatatcccaaggtgcacagctggtttttcaaagtgttgctattataggattattggaaatggcaagtgggcctcaagcatggggcctc

SEQ ID NO: 24775 - DNA, 201 bp, Bos taurus
gggcaccatactgttcaagttagttgttacttgttgccagagaggcaagaaataaaatgacaggtgtatcactggggtcatactaggccatctgggattgaatttctttcttggatagttggaggcaatctgttgtggagccatccggttggtaggtgtggccctctgcctacaagaagaagggggctgtcaaggagggtt

SEQ ID NO: 24776 - DNA, 201 bp, Bos taurus
gcgtgtgtggaaaggctgggagacgacttttcctgtgagcatactggcctctgggaggggtgcagacagtgtccgtggagacgatggtggtggccctgtctatgtctggggtttaggcatgaggtcccgtctctgccctacttctggtccctctagggcagatgtgtcgttctccatggcccaggcaggggctatgatctc

SEQ ID NO: 24777 - DNA, 201 bp, Bos taurus
ggaaagtctgcccactccggtattctggcctggagaattcaatggactttacagtccatggagtcgcaaaaagtaggacatgactgagcaactttcactccctatggggcccatgtgctcaaaaggatgcagccataatcatagctggcattggagtggcactttacaactgatacatatcttgtccctgcataatgttat

SEQ ID NO: 24778 - DNA, 201 bp, Bos taurus
gattaggagaagctctgctgcaagaagaatgatctctggggactctggggaatcagccctcatgtgcttggttaggtcagccctcttagacaacaaatactcttccatatgctaacttcagattgaaggttccttgcaaacaatggctctgccctccgttggagcttccttggaaccctaaatatttggctctctggattt

SEQ ID NO: 24779 - DNA, 201 bp, Bos taurus
caggcttaacaggcagggactccggcattgtggctctctgtccagcgtccctagctctgaggggacgtgaagcagcggccctcccacgtcccttgagctggggctgctcactcggtcaactggagaacttggctgctggagtttgctaagaaggatacactgcatgaccgctccacaggcccctggatatttgtccaagaa

SEQ ID NO: 24780 - DNA, 201 bp, Bos taurus
aggagacttggtagaaacagcacgtaccccccacacccaagcagagtggcaatgccaggctccttcccagggagccacactcctcatctcagcatcaagccgctctatcccttttgtctgttttatttttgtttaaactttttattttatattggagcatgctgtgatagtttcaggtccacagcaccatgacccagccat

SEQ ID NO: 24781 - DNA, 201 bp, Bos taurus
gggctcaggtgatggctactgctatcatgggcttccacctgttaaccaaccaacgtcagcctcccagaagggcaagcagggcagagagaagccctcaagttgtcgtgagggaatatcagccccaaacagccaactcttccagcacagcctctcccatccccacgcccactcaaaaggagatccttatttctaaccagacta

SEQ ID NO: 24782 - DNA, 201 bp, Bos taurus
aggaaaaagaacaaacctggaggcataaccctcccagacttcagacaagactacaaagctacaataaccaaaacactgtggtcttggcagaaaaacagacatatgggttaatggacaagaaagacggcccaaaacacccatgatcaattaaccttccacaaaggaagcaataatatacaatggagaaaagacagtctctta

SEQ ID NO: 24783 - DNA, 201 bp, Bos taurus
gagggggcagggaggccgcatgcatcctgccgctaggcctgcggcctttcaggtcacaacacccagttccatcccgatcatgttgttccaaatcccatatcttcttaagggaaatgagcggtaaataaacattttaagcactgactgggtccccggcactttgttcattgcttcacaagagatatgcacccagtcaacccc

SEQ ID NO: 24784 - DNA, 201 bp, Bos taurus
gcaatgaaagacctatccgaatggatttaaaagcactttgcaaactagaaagcacttcaggaaatccattttttctaaatgaaataagcactgcccattgacttttatggaaaactgaggttaattcacatcagcaagagaaagctcagggagttgcttatggttgtgtttctgatttattaacacaacacttgatattag

SEQ ID NO: 24785 - DNA, 201 bp, Bos taurus
gtcctgtggtggagacagactgtaaacatctttttacaatatatttgtgcaaactgtgattcgtgttttaaaggaaccagggcgctgagaagaagatagcagagtggaactaattaaatagagaagtcagcaaagtcttctctaacttgggattttttttttcttctgttttttaaattaaagtataactaaggtacaaca

SEQ ID NO: 24786 - DNA, 201 bp, Bos taurus
ataatggctttggaataattatgtttgtcaaagtagccctgattattcgaacttgtttaattatttttgctattttatgcagggcaaaaaatacagttgcgtggtccttattgacaggtgctttccctgctttctaagccttaaactctatgatcagtgcctgcttttgtggcaaaagaacaaaaacatggcttcgtggct

SEQ ID NO: 24787 - DNA, 201 bp, Bos taurus
tcctttttgttctattcagcggagtcagctaggccatctttcaaggtcaggagacatttcaaactttctaattgggccagttagtctaatgttagtatgtccttaaccttcgttactgagaaactgtacttaaaagcatttttagtgaatccttccagggttacccgtttttggcctatagaaacagaaactagggtttag

SEQ ID NO: 24788 - DNA, 201 bp, Bos taurus
agtggcagagttgggatcagaacccagcccctctgactccagagcccctcctgactgcactgtccactctgactctgagagaaagagcactggcctgtgaataaggaaatcggggttctatgctgcagctctcagcagttagcagcagaagcttgggcaaatccctgaccctgacatcttcatctctcaaatgaggagact

SEQ ID NO: 24789 - DNA, 201 bp, Bos taurus
gtgtggagagctcgactcatgtggcaaaattagcatgagcaggtgttggagggataagtagagaatgaccatgaccccaaagtagagactgcaggaagacggatctgggattgggcttttctaagtgagtaaaacaaaaagacaagggcatctgaggtatttgcaactgggccaaactagaaggaactgaggatgtaaggg

SEQ ID NO: 24790 - DNA, 201 bp, Bos taurus
tattaactgagtgactgtgaatcctaaatgtgatatgactctgttttcaggataagggaaatcttgaaggcgtcacgaaaattgcaaggtgatcccgactcgcccacgtcatttactttggccatagtggagtccgactctaccatagtctactacaaactcactgatggatttatgctgccggatcctcaggtcagtttg

SEQ ID NO: 24791 - DNA, 201 bp, Bos taurus
ctctggactgccagcatctttaatgaacagatggagccatcctcccttccttggctatatctgtttaatcagctttggaaggagctatcataccaccagccaataaaagtcttaataaatatctaaactgcaataccaccagacaggtgttcatgctattagaaaaatctgacaaaagaatgcctggatttttatttaaga

SEQ ID NO: 24792 - DNA, 201 bp, Bos taurus
aatctatggcagcatttcccaaatttatttgatcaagacccctgtatcagttttccatagctgctgtaccaaatcactacaaactcaacagcataaacaatacaaatgccttatcttacagtctgcagattagaggtctcatgatggtctctacaggctcaaatcaaggtgtcagcagggctatgttcctttcttgaggct

SEQ ID NO: 24793 - DNA, 201 bp, Bos taurus
cactcttacagtgacacctagaaaaatgttagatcaaatacttgggtatctcatgactcaggcaaatggacatattaattaaccattacatggaattacgcaattattctacttttcctgggccctgggaatacatatttaaaatttgatgaataataaaaatggctttcacccagaatagcattttcaattggcaattct

SEQ ID NO: 24794 - DNA, 201 bp, Bos taurus
attgaatattttaggctctgcaggccacactgtggcatattcctttttgtttttattgctgctattttgtttttgcttctttacaactcttttaaaaatgtaaaaccattcttggctcatgggccacacaaaaacaaacttccagccaaatcatctaaatggacttatgacctatatgaatttatgggtttgctgaatagt

SEQ ID NO: 24795 - DNA, 201 bp, Bos taurus
ttacacaaaaataatcaccatgcccttttctttttaaaattgtatatttttacccaattttggaactcaggttttaatctcagtctgctcatccagagttgtaatattgtgctttgtggctatacccacgcacaaaaaaacttaggcatggatacacagtatattgaaaaacaaatgaattaaaagttagcagctgtattt

SEQ ID NO: 24796 - DNA, 201 bp, Bos taurus
ttgggggaatctctctctctctctctctctcacacacacacacacacacgcacacacaaaaccagcacaatgggagctaatccataggggcccaaggtgccggtgagggcgaggaggggcacaagtcccaggggaggagctgtgaggaggtcctgaggtggttagaggccaagccagagctcagcaacttgttcaccacgg

SEQ ID NO: 24797 - DNA, 201 bp, Bos taurus
ccttaattttctcaacagtaaaatgggaataatgatggcagttgtctcatgtttatgtacgttctaaatatccaataaatgatccttattattgcaagcagttaggaagttttactctgtactctaccagtgtagagtaagcaggttgtttatcattcttttctgcagttctctatcttactcagaatttcaaacttagaa

SEQ ID NO: 24798 - DNA, 201 bp, Bos taurus
tgacagagagcagtctgccatctggaggaagagagcttttttcctaattcgcccaagggtgctgtggtggactggcagtggccttgactgagcccctcttactgtgcagatactgagatgacatctttgtattccttatctcattggatgagctactttgacctggggcttgtgcttggccagctttctttgtggagacca

SEQ ID NO: 24799 - DNA, 201 bp, Bos taurus
caaagcaatatatacataatataatcccatttttctaagagcaaacaacctaaaaaaatatatcccacaaaacatgtgttttatatgctatatgaacatggagaaaagcacagaatagcgtatgctaagttgttcacactagttgcttgagttggaggaggggatgtgggggaaggagagaaagttaagttttagaagggc

SEQ ID NO: 24800 - DNA, 201 bp, Bos taurus
ttgtcaaggcccaaatattaaagtagggaactgtccttcagaaccaagtcttgcctttaattttcccaggcaactcttttgaaagccttaaggggcacacatcatagtcataggccataatcctcagtatcctggcttgacaagtttcatttgacatgttgttgcaagaccatgttaattccttcataaaaaccttaaaca

SEQ ID NO: 24801 - DNA, 201 bp, Bos taurus
gagcacattacctgccatcaagtgcagatacgcatcaggttgagtgagtgattgaatgatacatcatgctttaaaaaaaaaacatgaaaattggcacttacgctcattctgaaaaacctaaaaaagacaagaagaaatttgcttatattcttagcagtattcttgctgctatagattcagaactgattgttggggttgagc

SEQ ID NO: 24802 - DNA, 201 bp, Bos taurus
ctggatctagcaacctgttactctgaacttccccagttccaagagtgggtagggtcaacatactgcaggtgattgagagaactagaaggtaaggctggccgggtcattcttaatctaaaagtatttacttgaagataaaataatgggcatcagcacaaatatgtttaccattaagttaatttttagacttagtaatgacta

SEQ ID NO: 24803 - DNA, 201 bp, Bos taurus
ttaagatttacatattcaaagttttgaaatttatttagttgaatatattggtcttctaaatttttaatatcttctttcacttttggatttagaattcaacagtccttcagatttctaattggtagtttttgacttttaattttgaagtgatttctgattaaaagttgtaaatatagtatagagttcctatgaatttttcag

SEQ ID NO: 24804 - DNA, 201 bp, Bos taurus
gtatgtagtctatggacctgggtgatgaggatgtgttagttcaggtacatcaggggcaacatacattatcattctattgtgcggtacttgtggggaaagttcatatgcgtagggggaagggacatatgggaactctctctctcccctctaaaaacctaaaaatactctaaaaagtaacatctgtttttaaaaatgtgtagt

SEQ ID NO: 24805 - DNA, 201 bp, Bos taurus
acagtccaggttcctctttccaggggttggaaagagtcagacatgacttagtgactaaaccaccaccgtcacccagcagtggaccctaaaggaaaatataattacctttgtattccaagcttggtaaagaaggtcataattagtaacatgtatttgaaaatgttaagatagtcataatttattctgactgtgtatgttagt

SEQ ID NO: 24806 - DNA, 201 bp, Bos taurus
ccaacttccatgggtgaatagcatcattggcgttcccattatatgtattcatgaaagttacatgacttctttaaaatccgctgatgtggctgggttttcagtctagattggtatgaccacaaaacaatgtatttccattaaagggttatttcatttttgagaactgttttgcttttcctccactttaagattagttatagt

SEQ ID NO: 24807 - DNA, 201 bp, Bos taurus
tagatgttgtgaagagtacaaaataatcttttggaaaagatcttcgttaaaaagagaaaagggaataatcttgttggtttgacaggaaaaacagcattgagaacaataacaaataaaaagagctttatatctgagaaattttacacttataatggtagctgtatcactcagaaatgctgactagatgatgctgaagcacaa

SEQ ID NO: 24808 - DNA, 201 bp, Bos taurus
tattgtttctcttgtctctgttctgattttttggccacgaggtgtgtatggaatcttagctcccaaacagggatcaagcctgcagcttgggttggaaggcacagtcttaattactggactgctggccaagtgattttacctatagttctgtgttttgctgtttttgtttaatggtatatgataaacatttacttgtttttc

SEQ ID NO: 24809 - DNA, 201 bp, Bos taurus
tttttttggtgatggccattttgactggtgtgaggtgatatctcattgtagttttgatttgtgtttctcaaataattagcactgttgagcatgtgcctcttttcatgtgcctctcggccatctgtatgtcttctttgcaaaaatgtttattcaggtatcctgtgcattttccaattgggttattggggtttttttgtttgt

SEQ ID NO: 24810 - DNA, 201 bp, Bos taurus
attttttcgtctccagtaattacgaaaagcatggaatcatgtcaacattcctcagcttctgggaaaacaaacacttgagcacttgagttttttcccagcaatattaattaagagaaggacaacagggaaaagagatttcagtgagtggactcaggcgtctcgcataaataactgggaagtgccagaaacgacttgtgaact

SEQ ID NO: 24811 - DNA, 201 bp, Bos taurus
ttgaaagaaaagtttgcagaagatagccttctcttcctcctcctcttcttcctttttgcatagattattatacagtaccctctgccttttgagtatgtgaccaggaagtaaataaatatgtattggtactcattagaagtatatacacaaatgccgtatatgtttgcttcacattctgccacttggtttttcttgcaggct

SEQ ID NO: 24812 - DNA, 201 bp, Bos taurus
ttgtcagtgactttgggctgatccactgtacactgatttattaaaaaaaaaaaaaagaatagtactgttaataaggagtacaatcgcttttttttttttttaaaggaaaagcatctttttaattatcttttgttcattgaataattccccttaggaactaataaaatgcattttatgggttatactcggctgtgtttgggg

SEQ ID NO: 24813 - DNA, 201 bp, Bos taurus
tcctcctcacaacagcacactgtatcttccccagtagcagcttccctctctgcgccccatccccgccctctcaagggttacttgccttctgagaattccctgcattttccttcttgtgtagttctctgttcaacattttaaaggcaactctatcaattgagaagagtctattccaaatgtaccatctaatctttgcaactg

SEQ ID NO: 24814 - DNA, 201 bp, Bos taurus
tttaagcaacaggcctcccaaccctcaactctacataccaaatctcatgtagaacttatcagttagaagaaataaaaaaggaattgctctggtttaaatataggcaagaggcctggagactactctttagcgtctctcccaataatccatccctccagcccctatggcacctttgacacaaccaatttcttttaatacaaa

SEQ ID NO: 24815 - DNA, 201 bp, Bos taurus
ggaaattaaacaacacactcttgaataaccaatgggtcaaggaagtaatcaaaagataaattagaaaatatctcaaaacaagggaaaaagaaaatatgccaaaaattatgagatgcagtaaaagaaacattaattgagaagttgatagtgataaatgcctacatttaaaaaggaaaggaaaagcctgactacacctcaaaa

SEQ ID NO: 24816 - DNA, 201 bp, Bos taurus
tcctttctcacaggagggaagaagagaaagatggtgcagaggcaggagggtttataccatcagaagggagtacaggtctgatcacctcagtatggctttttcttcattcacctcacttggtgcattggacctttcaaactgaatggttgtaggtttgtttgtttgtttcagagcagtttaggtttacaatagaattgagga

SEQ ID NO: 24817 - DNA, 201 bp, Bos taurus
ggtgggccagaaacacttatcagagtgcccatgagcagagacgataatgtgagcccatcaactggctctcatgccaaaaacatccctctggaagcaggaaaggaagacctttcctcctgctctggcctcatggtgcccctctaggacctggtgctgacaaagtctaaaactgatccaggagaaatcaaaggagacgtgttt

SEQ ID NO: 24818 - DNA, 201 bp, Bos taurus
aaataatttagtttctcagctttaccacataatatttatcaaatgctcactaatctaacttcttagagttttcaacttctaagaaaatacttttatcttccttaaatttcttagatgttaataagaaagctaattttaaaaataatatttttcattgtatgtgaactttggagtgagttttattgtggcatttgttagcca

SEQ ID NO: 24819 - DNA, 201 bp, Bos taurus
ttggtcagaagcacaggtaaccagttggacccaagactgacatctgaagtggaggagggtatggtggaactgagctcttttccagtggaatctgattcaatctccagttaggtatagggccagaaatgaattgacttcttggacaccttgctggcatctgagaattgctcattggtttgggaacgccccccacccccgacc

SEQ ID NO: 24820 - DNA, 201 bp, Bos taurus
aagatggtttgaaccaaacgcagaagtttgtgtacacctattcatatgtaaaataggcatcaggtgctaattgtttgcaagcgctcaattccttttgaatcattctgtgctgctttttatggttttcagtcccatggagtaattactctgagagttcacacatctctgtgtagccaaacaactattctccacgctaatcaa

SEQ ID NO: 24821 - DNA, 201 bp, Bos taurus
ccagtcagataaatgacaagttcattcaaatttattgtttataaaccagcattattaaaaatgactacattttagactgaatgtactaaattgattagtcttttttcagataaaacttttaccaagatggactccatttatctccttctggttatttccaagttttagaatgactgtatgtttggaatgaaaagttacaag

SEQ ID NO: 24822 - DNA, 201 bp, Bos taurus
gactggggaggccacagtccatgaggtcacaaagagtcagacacaactgaagcgaccaaaacctgagcacatacaacgtattaaatgggaagaacctggacattacaacaagagaagtaaaatttgaactgttcactatatttgtgttttctgaaaaatgacaaaatatatcgcatagaaaagtctctatttataaacatt

SEQ ID NO: 24823 - DNA, 201 bp, Bos taurus
caccttgttattacttgatgcgcccaactgtaactgtggcaaaggcttgcttccttatcaagagctgccacagagtctctgacgtgctagaggtaggagatatatgttaccagaaaataactcgagtgccttttgtgtacaaaccaatttagttacctgaaggaattagcattatgataatggtttttgtgactgaagctt

SEQ ID NO: 24824 - DNA, 201 bp, Bos taurus
acagcaccacagatacatgtgactcttggttaacacaaaacctccctaaggatgccccttcaaacatggaggagaagcgaggtacctctgctctcagagccacaccaaacatctgaacggacacgggccagtgtctcctcacccacgaatcccagactctgcttccctggcaccattagtgtcctcttaggccgaatgcac

SEQ ID NO: 24825 - DNA, 201 bp, Bos taurus
caccatgcatatccttccccatttctaaaactgtccaaagaatgacattccatactgttctgcaaagtggcacagccagattgctcagtcccgtgttaattgtgatgtgctgcataaaatcagctcttccagaagaaaacaatgatagaaaaagtcttcattcatttctcctctgtcccaaacaccccagtctcaggaggt

SEQ ID NO: 24826 - DNA, 201 bp, Bos taurus
atttggctgagagtgaagaatgaaatgaagtccataaagatatccctgaggtgaaggatgaaggaactgtatctctgggccactgggacaagagcaactttaagaagaaagcaatcttagcatcctgtccaccagtccttccagatgctggagggagtgcctttctcttctggatcaggcctagatcagcccaagtagaag

SEQ ID NO: 24827 - DNA, 201 bp, Bos taurus
ttttcaaggtatcgtactataagattaaaatgtattattttgtgtttgttttttatgtattatttgtgtgaaaaatatcataaatctattacagtacagttctattaatatacagccaacggtgttagttggctacctaggctaactctgttggacttacaaacacattggacttaggagggtgacctcaggatggaactt

SEQ ID NO: 24828 - DNA, 201 bp, Bos taurus
gaaaacctgttaggtcagtcaacagcaaagggcacaaatctcccccagatcaaatcagatccaggcagcagcttagaggaaagccataggccctgatgagctgggctgtggaaaatgtccctggtgaagccgaagacccatgactgctaggagggcagagggagaggaagaggatttgcatgagcaagaaaatccaagggg

SEQ ID NO: 24829 - DNA, 201 bp, Bos taurus
atatagtgcaaagaaaaaaaaaaaaaaaccccaactatttttcacttctgaaagtcaaaatggactttttcatttgtcactcaaatgaattttaaatagaagtgatagatacttcagtcttacttctttacacaaaatttcaagaccttgcagaagtttttattttcctttttgctaatgtaaattattttaaacactctc

SEQ ID NO: 24830 - DNA, 201 bp, Bos taurus
tttatagctacatttgaaaatatcatcatttaaattgtaaaagacaaaaacttaattatgaaattctttctcctagaaacccaaattgtctggatacaagggggcttgactctataggcccatttttaaatatataaactctttcttttttttaggtaagaagtggatttatttagagagaaacaaactctagagagagag

SEQ ID NO: 24831 - DNA, 201 bp, Bos taurus
ctgctttcagggctgggcgctggcccccgggtacccagagacacacacacactctgcccggctcagccttgcagcgttgataacattgttattattagacgtggcctctggaatcccggaggtcattcccaaacaacggcccttctggtgcaatgaaaaagcagctccggttatcacggtgggggcccggatccattacct

SEQ ID NO: 24832 - DNA, 201 bp, Bos taurus
aagcctggcatgctgcagtccatggggtcgcaaagagtcagatgggactgagtgactgaacaacagcaagaacaactttaaaagccaacagatttacttacgacttagggggaacatttcagtgtattcatcagtgggcctggccacccatctcttttcacaatatactgctgctgctgctaagtcgcttcaatcgtgtcc

SEQ ID NO: 24833 - DNA, 201 bp, Bos taurus
accacggagatgtaagataattcctcttactgacggggagcctctatcatttcagaatatgcttatttttcagcaaggaaaccaggccaattcactcaactgcttacaatgtcatcgtgcatttgtgaaatggaagctttctctgggctcaatgtgacaaaatgctgatggctgactttcagtggccgcgtcaccaggaaa

SEQ ID NO: 24834 - DNA, 201 bp, Bos taurus
atggtcctctattctctgcattactctaaagtcttctttctctctcctctcttcctctaagttctcatcccatcatcgccgtattctgctgaaggccttcccatcgttcttcccattcctgttgctttcatccacccttgaactgaactaaaccatcatggcaacttctgggctccaactttccagttctgggcctttccg

SEQ ID NO: 24835 - DNA, 201 bp, Bos taurus
aattacaccaaagtttgggagtggtaaaaaggggacccacagcagaaatccctccagctcaaaggcatcatttgcctgccccacaggcccctacggtgcataggttaataagttcacccaagacacgtggacctgggctcccccgagggacccatccaggaacatggccagtcagacatgtcccctctgaattgcttcctc

SEQ ID NO: 24836 - DNA, 201 bp, Bos taurus
gagccccaggacacctgagtcccctaagtcaagggattatcaggactcaggagacctgggacccagtcgaagtttcccctccagccaatggcgtaacttattgcaagccataaatgcttcttccatgttccagtctgtaaaatttatttcatatttattatcagctgaaggaggaaatggcaacctgctccagtattctgc

SEQ ID NO: 24837 - DNA, 201 bp, Bos taurus
tgtccagggactggggtggccctaagggaggtcccggtgcccgcttgacacccgtttctagtaggagggtgcaagttcctgttcatcttgggacacccctcttgcaccatctctggggcccagagtggttgtgggtggcaggagcgtgtcctgcaggggggtctgagggggcggtgattcaggtcctccgggtccagcggc

SEQ ID NO: 24838 - DNA, 201 bp, Bos taurus
tgggccctggggctctccgataggaaatactggggagatgaagaagagcccacgttgtctgtgccaactcttcctttccccacaattctcttttgctctcaaggccatgccccatcctgtctgctgtcagcacactcttgctgcctttctggcactgacttttgctgacgtatttgtcctgcagccatccaagtttgggcc

SEQ ID NO: 24839 - DNA, 201 bp, Bos taurus
gtagcctagtttatccatcctactgtgaatggacatttgggttgtttccagaatcaacgatgctgctgtgaacacggctgcacacgtgctcagtgcagggcttcccttggacacagggctggagctcttggttcctgggctacgtggatactccttcattctcccccttatacgggtgggcaagtcgtactccacttttcc

SEQ ID NO: 24840 - DNA, 201 bp, Bos taurus
taactgaatttaactgtacagttcagtggcactaagtacattcatacttttgtgcaactatcacaatcatccatctcctaaagttttcacctttgtaactggatctctaatataataagtattttttgaagatttttgttttcatgaaatctaatttatcatttttcattccttttggggatttatttttgagttttatct

SEQ ID NO: 24841 - DNA, 201 bp, Bos taurus
attttattggaaagggcacccgggtggagagcagtagggtaagggaacccaggagaacagttccgccacatggctcacagttttatggtgtttgggattagtttctgggttgtctttagcccatcattctgactcacagtccatcctggtggtgcatgccttgttcagccaagatggatgccagcgagaaggattctggga

SEQ ID NO: 24842 - DNA, 201 bp, Bos taurus
ctggccagcattcaattcaatcctcacattgtttccccttgtttctgtcacccgacctaggacatcaggttacccagctgagtgttcaccgattttgtccggggccatgcgatcctgtccagggagaagcagagatgtaaattattgaggaaacctcaggttctcaacaactccctagccatccccatctgcctggaaact

SEQ ID NO: 24843 - DNA, 201 bp, Bos taurus
acgcaaacacacacacatccatacagtatgcggacaaagtatggaaatgacatggcctacattttctggtataatcctcaaaaagattgcccatatcacactatgaaatattttgcactataaattttaaaatcacaataaagacattattctttagaaatctgtttatggttacttaacagtcatgatttacaaagtaat

SEQ ID NO: 24844 - DNA, 201 bp, Bos taurus
atctgtaataggttgtgccaaattgttgaactggattgaactgtgtgcaaaagggtagtgagatgtaaccccacctttgggaactgacaatctaataaccaccggggagagtcagagacagttcacgttgcacctggtacatgatgttatgggtcttgcgtggttttcattaaccagacatatggctgaactacaccagtg

SEQ ID NO: 24845 - DNA, 201 bp, Bos taurus
cctgagcatctgaaggagtggactcagagagctgctgcgccctacactctgaatgacccatcacctgatccagaaagtgttggggcctcctatgtgctgatggctgaaggcagttagaagagctctgcccttgaaccttgaacacataagagataagatggccaggcttgtggctgagtacaagataaggatgctttgctg

SEQ ID NO: 24846 - DNA, 201 bp, Bos taurus
cgtaaccctctcggttatcttcccctctgaggagcccatctctggcgcagtccgcctgctccccacacccacccaggcactcttgcttctgcaggatcctttggggaatacaagattactcccaactgggctcccagttcctccccatcctgacacatcaccaagacacccctgcagggacagggcgcgagtggaactaac

SEQ ID NO: 24847 - DNA, 201 bp, Bos taurus
cttggccctatggctgtcaggggacatcgcatggaagcttctgcccagcacacacaagtgtagggagccctaactagaggtgagttcagtctggaccaccgctgggccctggaaatcccccctcacgtcactgtgtgccgagaggcagcaagatggccgcagtcccgactctgctcggagaccccagcaccatctcagctt

SEQ ID NO: 24848 - DNA, 201 bp, Bos taurus
gaaaaaataatcagactgtgctctcctctctgttagagccaagaatgcacctgtttaatagaatcttttaaaataaattttaaaatggcctctctacttccgtcctctctaggacgagaaaccacaaagcagagaggagtaacattacctacagccatgctctcagccccagaaaaaggccctgccctgggactcaggaat

SEQ ID NO: 24849 - DNA, 201 bp, Bos taurus
cacctactgatgggatgcacagggccttgtggaaaaaaaaaaaaaaacaaaacacagtgtctagcagctcaggaaagaagtgtttacattatgacagcagatgaggccaggaagggcttcccagaggaggtaatattctagctgggttttgtaggataaatagaaattggctagtaggggtgggaagtgctctctagggag

SEQ ID NO: 24850 - DNA, 201 bp, Bos taurus
aatttgaactatcatgtcaaggaacattatctctcagctgatggccaatttcatccattgtgtgatgtagagctcagattcctctgctacagcaggctgccggcttcaagtcttctctcactgctaagtggactgatagtgcagtccatcagcatggtgtccagatgtgtatggctcctttcaaatggggggctaaaaatc

SEQ ID NO: 24851 - DNA, 201 bp, Bos taurus
cccctcttcctcggtttccgcagggccagttcctctacaacatgttggggctccctccactttcttctcccaaagcgaagcagacagagacacacttggtcgttgtttccaccagccctgatcggcctgaactggatctgcctccagtcaaaacactgagagatgaagacagaaaattggctccagtttccagccgtgagt

SEQ ID NO: 24852 - DNA, 201 bp, Bos taurus
taaacagtagatagaaagactaaacaagagaagcagcgatatgatacttacaaattttatcttgtgaattcttccttgcactgtatcctgaaccaagatcgggaaacccgccaacattttcaaaacagaacttcttattaatatagagaaaaaggagcagcatcaagataataaacaccccaacagcagacaaaaatccaa

SEQ ID NO: 24853 - DNA, 201 bp, Bos taurus
gtgggcgtggggtgggcggggaggagaggaggtgagtctgaagcagcaggaagcagacaggtggggtcaccaaggccccagctgaggccttgaaaggttgttttctcctgtgcgctctgccaccgatttcctgtatggctaaggacagtcatcctgggtctcagtttatttgctgcaagatgagaggctttgctaagatga

SEQ ID NO: 24854 - DNA, 201 bp, Bos taurus
gtgggcttcaggtcataggtgcctggccttcctctcctgcttatggctgcagccccagcatctgcagctatgcctggatcagcgtggacccaccattcatattttttgataactgaatcgacacacttgggaagcatttatgcaaatttacctgtagcataaatttctcaggtgtagcgttaatctctctctccccagcca

SEQ ID NO: 24855 - DNA, 201 bp, Bos taurus
cagtggctccttattgttcgtaaagttcaaactcattagctttgcaagctctttagaacctttgaaatcctttcccaggatcctctcaccattcctacccttgtttcttcttaccattcaggttcttctccctttcaaagtcaccctcccttggacgtgtaaggtgctccctaagcactgggtgtttctctgatcacagct

SEQ ID NO: 24856 - DNA, 201 bp, Bos taurus
ggaagaccaggacccccacgaatgccagagtatgagcctgggaccccccacctcccctgcaaccactggctggggtgctggcctctctgggccgtgatgacctcctctgggacacggggagaatctcatctttattattaatatttaaatctaaaccaattgccccgtaactaaagctctccttgctctttggggaaggag

SEQ ID NO: 24857 - DNA, 201 bp, Bos taurus
ttactagaatttctaccttgtaacttctcaggaaggcttacaggggatcaagagggagagggagccgtgccaaagaggccagttgactaactgagggaacatcgatccacccccaccgtgctccatgactgccccgcggcattttggaagaagtaggccagagatcactggggaacaatggctgcggggttcactgccaca

SEQ ID NO: 24858 - DNA, 201 bp, Bos taurus
tccctttccagctctggaggagcatgacggcactaaaggctgggcatgctcgtgattcctccttcatcctccagtacactcactggcctccccctccagagggcagcaagagtcttggaggcctggcattgcactctggggacttattctgactttctcctggggcccacatggccattccctatctggtggtctagaact

SEQ ID NO: 24859 - DNA, 201 bp, Bos taurus
attaggtggctcccagccagtgactgagattggcagggacactaaagcagactgccatgggagatcctggactcttttgaaagtttggcttgatgactctatggtgggcctgctgaacattcctgagtctgtctggtgttctagaacagtttcttcctctctgcttcctctggaagatgagacttgccatgtgggccaatg

SEQ ID NO: 24860 - DNA, 201 bp, Bos taurus
ctttctgagctcgtcaacaaggccccgtcaatgggagcaacaggacaccggaccagcacggagattcagcccatcagtcaatgtttctgcaggagacaacagggccctccctggagagtctcggccttggggacagcagttacttctgcagggaagctcggtttattcaaaccagaaggcagagaggaatgcggattgcca

SEQ ID NO: 24861 - DNA, 201 bp, Bos taurus
attaataagcattataaactcacaagaattctcataaatcatccagacggctgtggttttagctcaaagagaccatctcccctccctgtggcatctcctcttctcctgcctccattcaacccaccctgcatcacaacaacacatacatgtgcacacacacagtaacgcacaccgattgtcagcacacacgtgaatacacgg

SEQ ID NO: 24862 - DNA, 201 bp, Bos taurus
tagcaatgaagccagccgttggtggcatggggatagaaggtgttggtggtgtgggtgttatgggctgattctaaaggtttaggtctgttgggtcttctgtggtgcaagctggctgggcgcccatctccttgtcagcccctggcttcatccccactgctgcctctacctccacatccgcctgtgctcggccctgaggtgtct

SEQ ID NO: 24863 - DNA, 201 bp, Bos taurus
ctgtgggttctgcagatctggataaagaaggtagcaggggccgcttgggtgaaggtggctctggacactgttttaggcaaaacttttgatgccactttgatattatcacattggccttcaaggaaaggtttgcttcatggctgagcatggcgttcatggtgttgggtggaatgaaagcccacccgtgggcctctgggtact

SEQ ID NO: 24864 - DNA, 201 bp, Bos taurus
cacttcctgagaacccccctctctccagctgggcttcgaatgccctccaggcgctgactaacagctgggttgtcatccaggccactgagccctgccggcaatgtgactgcattttttccaagttcaactccagatgcttgctcacaagtcactaaattaacagcagattcattttgggctcattaacattacaccaagatc

SEQ ID NO: 24865 - DNA, 201 bp, Bos taurus
atccctcgacagaggccagaatagcatcaaccagaatgatttctactctcttctctctatgtgaccattagacatgtgttcctctggaggcagcccagagcggccttgattaatgcccacaggttactgcagactgcttctcttcctactggcgcttggttcttgagacactgatcatgggcagacagcataatgcggatg

SEQ ID NO: 24866 - DNA, 201 bp, Bos taurus
tcgaataaaaggacacaaacagcatggttctggccaaatggaatgctgggggcttgtgtcaggaagggtggtgagctgacggaccagtctagaagccagactgctgagttcctgggagtgtggcctcaatgtctaggcctaaggatttcccaagggatactgttaaaatgcagattctgtattactaggtgaggatgcggc

SEQ ID NO: 24867 - DNA, 201 bp, Bos taurus
ttttaagatcttgccattctctaggagtgtgtacggaggacacccctaatgttaattagagcttgcttcattaacaacttaaccaaaaggccacactttgtgaaattatttgggagcctacaaggaatgagagttgatgaaaagaaattaccatgagtatctttcccatcagttaatgaagaatatgatgtataaatcatt

SEQ ID NO: 24868 - DNA, 201 bp, Bos taurus
acgatgttccctacactgtcgaatggggatctgtcagaatccgtttctctcatccttgattacgagccccttatggagaggaccgtgtatcctgagatgacgtgtactaaagcagaggacagtgttatccacatcgtcagtatttctcaaactttaatgggtgcacaaatcagtgagaggatcctgtcaaatgcagtttct

SEQ ID NO: 24869 - DNA, 201 bp, Bos taurus
ccggggctggagggatcagagccgtccggccacggtgccatgaataatatactccccctgtccgcggaactcttcagaggcccccaaagcaacatttggcgtcatcaaaggagtcctgttgggaaccgtgttttattacaaccagagcatccgccgggcggctgccggctcatcgcctgttcctctggctcccgaagactt

SEQ ID NO: 24870 - DNA, 201 bp, Bos taurus
cttcttgtgtcaggaattgaaaatgattcaatctaatgtgtgtagctcttgcccttgctgccagaaaccttagagctagcttctggcacctgtgccagtcagtccaacgtaactgcttacttgtctacgcttcttgcatccttcagctgtgctctgcagggctttactatgaattatcttattttggactgtgtttcaatc

SEQ ID NO: 24871 - DNA, 201 bp, Bos taurus
ggtggaacagcatcagcaagtgagaagtggacactcaactgaaaaagatgagtgctatcaaaagatctcaaaagacagaaccggagaaaaacttaaaatgtgagggaccgcgattaaactttagcgtcaatatagtagtaataggcaacaacatagaatgggcaggtctttatctgttcacaactgtgtggaaaagacaga

SEQ ID NO: 24872 - DNA, 201 bp, Bos taurus
aggcctgggttctgtctctcaccaggagctctctatccacattcaagagcaggagtcctgctgccagtttgcatcccatagccaatggtggggggcggggatggaatcaggcccccacatgaagccaagagatttctgtcccaaatggacattccccttcctttttagagctcacctgtatatttttacaaaagctactgt

SEQ ID NO: 24873 - DNA, 201 bp, Bos taurus
tgaacattaatcatctctttatttatatgtatatatatggcattctcacaggatattcaaaactgggaacttctgtaagtttgcatttagtaggacctaagtaaaagcaataaattcaggaaccagaatgactcactatcataaaccttaatcagtaatatttaaatatccatgcaaaataatttcttgaacaatatactc

SEQ ID NO: 24874 - DNA, 201 bp, Bos taurus
cacgagagaagacgatgttcctgcctctcgagatttttttaaaaggatgaacatgctgaatactgaatgcaataaagcacctacaaatatcaacacactcttccacggatataactgctctcagcgttttgatcacagatgaaaacttattaagtgccattaatactgatcattactcacgtccaattgtaacattcctaa

SEQ ID NO: 24875 - DNA, 201 bp, Bos taurus
ttaaaatttaaacttaaaatgaacgttgttgtagtaaattctagatcaatgtgtagagatctatagtcattaataacttggagacatggagtgtaaaactcactgtctcccgtgactgccatcctccaatcagactttgctgaaagataatcaggtcaccagaaagccactagatggtggagaacactcttctcttgacct

SEQ ID NO: 24876 - DNA, 201 bp, Bos taurus
ctacgtcccctcttctcctcccctcttctctgcccccggctgggtcagaaacatctttgagcaggaatgatcccggaagaaagagggccctgccttacccacagtcatggcaagcccacagcaggacccagctggagagggaaatttccctttaaatcaggtgtgaagttttgattatgacctgagcctggacactttggc

SEQ ID NO: 24877 - DNA, 201 bp, Bos taurus
agagtggaaagaactgtagaggggaaagaaaaggggaaatacagtgtggggaggagagacgagaggactgtgttgaggagaaaggggagaaggaccacagtgacggagggatcagcagagacaccaggactgagaacctctgatacacagttaaccttgggttaacctctgataaccgtctcacatcccaaccttctcata

SEQ ID NO: 24878 - DNA, 201 bp, Bos taurus
tctgtgatttattcagctattccccagtcggtggttggtctctctgcttgtatacttccatgctcccaggacagatgctaaacacaggccaggctctgctcgggtggaatggggttaggaccccgagacctccacagcccctcagaaaccccctgttacttggcccactctggggtgccctcaaggatgctccagccccac

SEQ ID NO: 24879 - DNA, 201 bp, Bos taurus
ctagggagactctcggggctgagccccttgacctacttgcggggagaagtagatgctcactaaatatttcctgaccacataaatgtttgggcaaagtggagtcaaacacgcacgggaaaaactgaggatcaggaagcagagagaccagtctactcgagcaatgcctgctccttcttggggtcagggaggacaaatgtttgc

SEQ ID NO: 24880 - DNA, 201 bp, Bos taurus
gattcctggtggtcggggaactcctgtgagtagagagtctcgccgcgttccttcccctcccacctccaaaccaaaggtatctcagtccacctatttgcagggattggcgctgtctgcaaggggggcactttgcatctcacactccagctggaggttttgctacaacaatggaacataactctggggggaaaaatgtccccg

SEQ ID NO: 24881 - DNA, 201 bp, Bos taurus
gtccgtctgtggtggggttggaataggatcagtgggtgatttggattctcagttccaagagtgaccactacctgtggcctcagccattgaaaatgcagatgctggtgccttaagtgtttcctcctcctcaatgagactcattccctaggatgatcaaaaggcagaaaatgatatggccatgaaacgagcagctttgttgga

SEQ ID NO: 24882 - DNA, 201 bp, Bos taurus
tcctcctggcccagaaggaccccatcctgtgtacgcccttcctcttctaccacagagccacctaccaccccctgaacgacaggcagaaggcctcgggcgcgcgcaggaagagcccctacgcccctgacaacccgccgggaaccgccttcaccgacatgaaggtgttcgaggtccacttcccctgggaggcctacactctgg

SEQ ID NO: 24883 - DNA, 201 bp, Bos taurus
ggtgtgggcggtttcctccctccgctcctccccatctgtgatgagcatcaaagcctaagtagcaagggctcgtgtgactcctaaagaccctcagtgacccggtgtcacgggaggggcgagtggagcgaccacagctggggggccttaggggtgggtgggagctggcggagctctgggtctgcgtcagggaggagcccaccc

SEQ ID NO: 24884 - DNA, 201 bp, Bos taurus
agttctaaagggcacctgccagaaccttctgcccgccccacccctggtcctgcctggccacaggagagccttctcagagatgagcagagggccctcggggtgtccatctttcccccgattaaaacaatttttttttaactgaaaagagcttcgtattttcccaaactcacagatggggccatgggggagatgtgtgtacaa

SEQ ID NO: 24885 - DNA, 201 bp, Bos taurus
gaaaggaagaaaaggagacaggccggtggtctggggactgggggctgggctgggcggcgagcacagaggaggagttggagttgtagtaaggtgttggtagaaagacaggaagaaacagtcgttcttctggtggaaacaggaggtgggaagtttacgctgtggcgggggagggggaggggtttgaggagatgggtgactggg

SEQ ID NO: 24886 - DNA, 201 bp, Bos taurus
taacactaggaggtaaggatcaccagcagagttctgaccatattcacaccagcaaatgtggacaagatgctttcacacaggtgtgtgtcagaacacaagaacttaaaaattggagggatgtcacagaagaagtgatagatgacattggaactgcagaatgacaagctgttcacataacctgtgtgaaccacagagttgaac

SEQ ID NO: 24887 - DNA, 201 bp, Bos taurus
cacggctgagccgctggggagcctgttattttatacatatcacacctgttacaaacttcaaatctgaaaatgttgctataatcatggcctctgttctccggcgccaaatggcaacagagttttgggtgaagtggaaaagagtagcttttattgctttgccaggcagagggggccacagtgagttaattccctgaagactgc

SEQ ID NO: 24888 - DNA, 201 bp, Bos taurus
tatgcttaatttatcaattaaactttatcatgggtatatatgtatggaaataacagtacatacaggtttcagtgccatctgcggttttagggatccactggaggtcttggaatgccttcccagtgtagggaaggcttctgtatatatatatatatatagaaacaatagggttttccagtcttaggaattcactcctttgat

SEQ ID NO: 24889 - DNA, 201 bp, Bos taurus
gaggctgaataaaggctgtgtctataatgaaagaaatggaggacaaaaaggccttgtgaccaggagccccacaggaccctgcatagtatcaaaacctgataaatgtagaactaaacctttttgccaaggtgtcccctagtgctcaacattatttttagactgtcttgtttttgactgagttttctttcaccagtgattatg

SEQ ID NO: 24890 - DNA, 201 bp, Bos taurus
tgcattcaaaattgccccatcaccagcaactatttattggacattttctattaatgcataataaatgagtcaaagagcttagagtacacctggctttatacgatgtgcttctgaaagccaagtgtgtaataaaagggattattttatacatgattttataaagcactggatttaaacatatagaattcttgtaagtttatc

SEQ ID NO: 24891 - DNA, 201 bp, Bos taurus
cagggttgagggcagtgagtgtagcagtacattaatggaatcttttgaaggaggtcctcattatcttcattacctccaccatagtttggccccaggtaaacagtgaggagggaacatagcttcccccatcaacagaaaattgaattaaagatttaataagcagggccccgcccatcagaacaagacccagtttccccttca

SEQ ID NO: 24892 - DNA, 201 bp, Bos taurus
tattataatgttttaacagaatctctatttacttgttaaaaatgagtatttacttactaaaaatgagtatcacctatctttgtccttcttcattggctttacttagtttactttgtccaggcaaaattcatacatgcaacttgaagtaaattgtttgacaaaaaaataccagaagaaagaaacttgaattactgattagat

SEQ ID NO: 24893 - DNA, 201 bp, Bos taurus
tcaaactagctgttgtgatttgtaagggaaaaatacactgcttgaatgaagcagaatacaagtacctgtactgacttgttgcctttaggcaaatttgattactctaaccttgtataaagagctaggattatgtttttcttaaactttccaagaaggtagactgggaatatgtttctacatcttttgacatttaatgcatgt

SEQ ID NO: 24894 - DNA, 201 bp, Bos taurus
aaattcatatatatatatatatatatatatatatatatatatatactcatttcattttattaatttggctcttttcaaagttttccatttcacttgttttgccctgctaagctattttatttcatatatttcattctcacccatttttgagctctccacagtgatactttgctgtacaacagctatcataagtccagttcc

SEQ ID NO: 24895 - DNA, 201 bp, Bos taurus
ggagaacgccaagggcaagggcgagtgccggctgctctttccagaagctggtcggcgaaagggtggcgaagcatggggtcctgtttaacagagacagagcgtgtggcagaggggaagtagtcagtggacagggaattatgaagggaatgggtctgtctctgtctccaagagagccgagggtgggatcgggggtgtagatgg

SEQ ID NO: 24896 - DNA, 201 bp, Bos taurus
aaacattgtaacattctcatccattacaattgttcccattacaattgttcccattttgcttctgattcttgagcaccctcacttgatctctaattattcatggatcataccatctcctttgcaatgagcttggtcctaccaccagacttggtctacagaggacagccaccactaagtttctaaacattatatctcaacatt

SEQ ID NO: 24897 - DNA, 201 bp, Bos taurus
gatcaagcccaagaccaattatgtagactgttccaccaggtccagttgtataagctgtgcttcacacaaccctaaggttgcaaatcacctctgaaattatttagaacagacctattcacctggatgtggtgatcctgagcaggcaccttggcctcaaagaaacaatttcagttgagaggcaagaggtgttgttggggagct

SEQ ID NO: 24898 - DNA, 201 bp, Bos taurus
gaggatatatacaccagactggacatgtcacctgccctcaatcagccccagggcttcttggcctctcgcagaatgagcaatactcctcactgaatgggaatttaatgtttgtttaaagataggtatttaaacaaacctcattagcttatataaaaacctcattttcattacaaacaaatataattactacttctgtggtct

SEQ ID NO: 24899 - DNA, 201 bp, Bos taurus
atgttcaagctaccgtacaactgtgctcatttcatctgctagaaaggtactggtcaaagtccttcaagctagcttaaacttgaaccaaaagcttccagatatacaagctggatttagaaaagacagaggaatctgagatcaaattaccatcattcgctggatcatagagaaaacaagagaattccagaaaaacatctactt

SEQ ID NO: 24900 - DNA, 201 bp, Bos taurus
cccttgagaagtgcccgtgggcctgttcccaaccacgctcagggtgttctgaactgcagaagccctggatgaagcccctcaagcctgattctaaggttcttacagctctcttctctgggccttccaccccatgggggctgtaagcaagtgtgtccacccccaggtttcagggggaccaggagggaacagtgagtgtgcatg

SEQ ID NO: 24901 - DNA, 201 bp, Bos taurus
ctgttctcctgctctctgcacatcacctgcctgaccaggacctgtttccctgacaccctgcttacagggctgaccttcctacatacttgccccaggcctcagctagtgactgttcttatcaaagtgtggtgaggaacttgcccctcttctggcttccctggtaaccaatgaatcactctgatgccagcaccccctataact

SEQ ID NO: 24902 - DNA, 201 bp, Bos taurus
agccaagatggacgccattcagcgcgccccgcctctacccccactcctaacctgcctccccatcgccagggggcctgacaaacccagcttcttgctccaggaatcaaagcagaattcctaactgtgatctgagaaggctgggtggaggcgagtaagaaaaactaggtaaaaaatcaacagttttgttcccttgccttcata

SEQ ID NO: 24903 - DNA, 201 bp, Bos taurus
gtcacttacagatgaagaaaaacatggccagagaatctgagtgaccttcccagaagcacacagaataacggtccaccccgagctcgttcagcccactggtacccgccagggcccctcccggtggtctattgaaccccccgtaggcccaggataggattcaggacccgtccccacagtttcaccatgtgccctctgtctcct

SEQ ID NO: 24904 - DNA, 201 bp, Bos taurus
aacagacatgccacattctctcctctcacgggggacccaacagacgcacccatgggcagcagtcatctcaccactctttttaggtggagctcatacaggcctaccacacaacgcagtccacggccaagcaagtgcctcgtgacacacatgcgcagtgctacaagtgatctcagctgttacataagcctcatgaaggcacag

SEQ ID NO: 24905 - DNA, 201 bp, Bos taurus
accaggatgagtaacacacataacggcactgaagactcttaccaggatgggaaagcccaattaccattattttataattaaatactggagacgcatcagtttaacttccaggtaggttttaaaaatagtaatcatactggtatataattcacaacaatcactatttattttcttctaaactttaagatacataaataatac

SEQ ID NO: 24906 - DNA, 201 bp, Bos taurus
tgaactcacgttctgcccaagcagaggggccctgagtgggtggtgtgtttcatactctgaaggggcggggttagggaaagtcagcctctacctcccactccgtaccctggcctgctacccacttggaacgacaagctttccgctcgagcctcttggactccccctaacgaagcctatcaacaggcccgcctactctcagtg

SEQ ID NO: 24907 - DNA, 201 bp, Bos taurus
tcacctaagaacatcagatgatgctgagtcagacaatggtcttgtctgagtcgttcaccgctctctgtgtttggaggacggggctcaccaggtccacctctggggccgatcggtccagcggggatgtgggtccagtaggctacaccttcaggggcactggcaggcggccccagcgaggggttctatgtggaagacattcag

SEQ ID NO: 24908 - DNA, 201 bp, Bos taurus
cacatttctttgtaaacctagtgaccaaccgactctcaagctcaggtctatctggacaaacagctgaggaaggatcactcaacaccagttttagttcattctctctgaataaactgagtcttggcttagcaaacattacacacgactccttaacatatggacagcaaggactaaattttcagcagggaaagctttccagtc

SEQ ID NO: 24909 - DNA, 201 bp, Bos taurus
gtcatgatatgtctcccaaatatgggctgaattttgggccaagagaggaaactgatcaatggaatatttcttgccatatcagtaaacaaggatgtcacagtcattaccgattgcaaccctcttatgtgacccagtgagccctcagggaactcaggaaggagaagaatccctgccatctagcagctattagactgcagccac

SEQ ID NO: 24910 - DNA, 201 bp, Bos taurus
ctttcaattaattattactattcttttgacttaaccctctacttttgtctaggggaaaggaataacttcagtatgaaggattcctatccaagaacttggaagttctaagaaacattccttcaaataaatctgaaaatcagtagttctggagagcagtgataaccattgttattgacttcccagttatttgaatggctgagt

SEQ ID NO: 24911 - DNA, 201 bp, Bos taurus
tacaacatgccatacagaatgcaaaatttacatgattgttttgtcataacagtgttcgtgttctgcattttggtggttttgagcataggagaaaattagacacatgataaaatgtgtaatttgtattattggtaaaggcagttatactctttaaatgttccacatttcaggtattgatgaaccattgcacatcaagagaag

SEQ ID NO: 24912 - DNA, 201 bp, Bos taurus
tcagtgaggccagaccctcgccttctccatatgtagagaagcactaatttcattactttgagaagtctggctttctatacttaacagtgatctgtttgatgttctgactacctggtttttgttgcaaaaactcctctaaaccctggctcctcccttacccctttggagcagtccctcagcactacctgacaggctggttcc

SEQ ID NO: 24913 - DNA, 201 bp, Bos taurus
acagttgagttccagccaacgtcctggcttggaaacacattgtgttggaaggttccctcctgtccattctctccttccacacgcagaagctcaggcccaggcaggtaatgtctcctgctggagatcttgtgagtcttactagtgaaatcctgaatataaattctccactgcccaaagaccaggctcttccaggtctgggcc

SEQ ID NO: 24914 - DNA, 201 bp, Bos taurus
tccgctcctcctgggatcctagcacctcttctccccactctgaactctacagaaccaaatatctcacgggccttttaaaaatggggccaggggagcagagtgggtgtctcctgtgttgtcttagcatcatttgtcagaagattcaacagactcaactaagaatgccggcccagcaagctacaaactaattgagaaatcaga

SEQ ID NO: 24915 - DNA, 201 bp, Bos taurus
caagcctgtgtgcctggagcctgtgctccacatgaacagcagtcatcttaacgaggagcttacacactgcaactcaagggtggcccccatgcaccacaacaagagaaagccgctgagcaacagccaagacccagcgaagtcataaagaagtacattttttaaaagataccaaagggttttagttaattacaggggactggc

SEQ ID NO: 24916 - DNA, 201 bp, Bos taurus
cagataaaagtgaatgggaagtacagagaccagaagagaaacaggacatggcttgatctagaagctgaaagaaatctgattcgttgtagcccaggagaagtacatggccacccactccagtatccttgccgggagaatctacggacagagaatcctagcagtccatggggtcacacggagttgcacactactgaagtgact

SEQ ID NO: 24917 - DNA, 201 bp, Bos taurus
ggcggggaggcctcggggagcagctgctctgcgggccctgccccgggagacacacgagtcagaacgggtgcggccctgcggggccctgtccccccggccattgtggttctaaagatttctgaccatgattctcaaagaacaaaaaacggttacagttttaggaagaaaaaataaaaccagaaactctaccctcatagagga

SEQ ID NO: 24918 - DNA, 201 bp, Bos taurus
caacaccaaggtcatgccaccatgaatcctatggccagttatctcactctctcttctgtgaatacgcaaaacaaggggaaagatttagattttcactcatgtaacagtatggccaggccttagctgcacacacacaccctgcacgccttacctggaaccccatatctacaaaacatccaaagacagtgctcaagcaggccg

SEQ ID NO: 24919 - DNA, 201 bp, Bos taurus
agaaaagaaagatgacaactgcagatcaccagggcagctgcctcactggttcccattaggggctatgtagctatccaaaaagcaaaccttcttcttcaaggacggtgatgttcaatagtctctctcatggactcggaccaaagtcagtctgcatgaggaaaaatttaagtagttgtttatccaacttgtattgcctctttt

SEQ ID NO: 24920 - DNA, 201 bp, Bos taurus
cccatgctttcttccataaaatatttttaaaatttctgtttaacatagatcaattttgcttaacacttgagatactgttctaaatagccttttctttccctactccagatggccacctggttatccgaccactatttattgaacagagcatctttctccaattaacttgaaacgccatcttttgtcatatactaaacatga

SEQ ID NO: 24921 - DNA, 201 bp, Bos taurus
aacacacaatgcaaatgtcagagttctttttcaatcaggtcccacatattttatcttttatataaagaagaaaaaataacaaagagaaaaacaagacttaggaagtatttcattttatgtaaaaatgcatgttcctgaaaaactgagttgcacccgggtaataaaaaacccataccttattactgagtaaatatttttctt

SEQ ID NO: 24922 - DNA, 201 bp, Bos taurus
cagactggatggtaatgatgtggataacaactgcttgtcattaagaaacaggcagtcttcaaatgtggcttctcctctggccagtctaagcagctggttaaatgggtagagaatattgaattctgtctgctaatttacttagaattactattgaataaaccattcagattaaatagaaaatccaggccaggcatgggaggt

SEQ ID NO: 24923 - DNA, 201 bp, Bos taurus
attaaatatgtattatatttgaattgcttatagagttagcataaacattgagaaaatattcctaattttttatatttataatattaccaagtaaattgacgtcaggggccaagaaaattcacacagtgcaaaagcatgttgcattatgcttatttgaaaggaaattgctctctgttttctacatagcaccagtattatttt

SEQ ID NO: 24924 - DNA, 201 bp, Bos taurus
ttctatcagcaaagcatatttggacattggaagttgctggttatactatgagctacgaatgttatttttaaaaggtggatatgccatacttcccttttcctgtagtcacagaaatagttttcatttctaatggggactttttagatttctttatttcaagctgttgcctgtcaatgtacaataaatttggctttgatattt

SEQ ID NO: 24925 - DNA, 201 bp, Bos taurus
cacacacgactgagcaactgaactgaattggactgtggcctaccaggctcctctgtccaaggggagtttccaggcaagaatactggagtggttttccatatgcttttccaggcctctagtctgtaggaacccattttcttaattcctgtaacctgaaggatcgtttttctcacgatattagctacttaaacttctgaaaga

SEQ ID NO: 24926 - DNA, 201 bp, Bos taurus
tatttaaatggtattttctgggtttctccttgggaagaggtactgtgaaactgttatcatcttcatcaaatgatttcaatacattcaatatatggccttaagatttcctgttttatagaatgaattatcctgttcagttgtgtttatcttgatactgaaattgtctcttatttggccagtgggatttccttccagttggct

SEQ ID NO: 24927 - DNA, 201 bp, Bos taurus
gccgcagtcacacatatgtcacgtcctttttagctccgctcccctcgcaacccgcccctctaggtcatttcagagtgccaggccaggcgcccgacttctcccggggtacccgtcctactcagggtagtgtgtacgcgataatggcgctttctccattcgtcccactctttccttccctcactggccttttcgttttctaaa

SEQ ID NO: 24928 - DNA, 201 bp, Bos taurus
tcagttctgtctcgtcacaacaaagatttgaagcgatgaacattaaagccctcggcgcattatagctcttggacagactgtgttttagctcttggattgcaaacagaccatgttagagctcttagatccttgttacagctcagttttatttagaaaatagcaggaaagtacatccttgaggcgtgagggaatgccaaccca

SEQ ID NO: 24929 - DNA, 201 bp, Bos taurus
ggatatgtgtggcaaaagacctgatggtttactttcagacttcagtgaagcatagtgtggatttaggggggaacaggaatgttaggatttcacaaagaacatgaagtccagacagacaaaagatggcgtgggaatgatgataagtcacctcagaataggaaagaggttatgcagggagctgccatgaagtatattggaatt

SEQ ID NO: 24930 - DNA, 201 bp, Bos taurus
tttataagaagttataatcagggcaggaatatatttacaaaatgtcataccataaaaacaaattataatagctgttgtttcagtaccagagatttcatggtggattaataagatttttttgtgctgttattactttttttccttagtaggagattgtgtaagccaattttctaagtgaggaaaatgaaaataatcaggtgc

SEQ ID NO: 24931 - DNA, 201 bp, Bos taurus
tagaccattgctgtgagagatcctatccagtggtgacacttatgaaacaagttgcacaaaatagtacttgcagtataaacatagtatttcaataaagtacaagtagtttagtaaaggtaatttctggttaagtccatgattaatgcagaaaatatatgaatagtaattataaggcatgttgtaaagaaaagtcaaagaatt

SEQ ID NO: 24932 - DNA, 201 bp, Bos taurus
atagttaggggaatggtctgtaagcctgtttgaagcaggtgggggagcaggaatctttgttgtgactgcggtgagatttaagagtagaacattagtacaatggggttacaatggttgtagcaagagaataaagtggaaattttgaatacaataagttaagattgcacacggctgcaattcagagtgtaacaaaaataatcc

SEQ ID NO: 24933 - DNA, 201 bp, Bos taurus
gcctgcagcctggcaggggaggaggaaaggggtccccaggatggagaacgggtcccccaccccaggacagagcagtgggcttccccccggctcccacctgcacccaggcctccaagggaaggatcagacgtgcaacgagctgtgagagtaagtgactgttccctcccattcggggaggaaatcagcctttccagaggggga

SEQ ID NO: 24934 - DNA, 201 bp, Bos taurus
aagatggaaacagagcaaagaaatctgagataatcactactaacaaattattattcttttacatatctctttatggacatgagaaatgtatactgaactattttcaggttcagtactttccatattttaaggtggcctagccaaggcaccattctggaagaagatagggatcaattttgaaagtgtaacaatgcagtaaaa

SEQ ID NO: 24935 - DNA, 201 bp, Bos taurus
gggtttctgtgacaggcctgtagccagctctgtggctcagagagcgtatgaaggacaccagcgcactcttttcacacccattcagcctggattctctgcttcccgtcgtttcctctgtccccttccgccatgccactttggaccaaaccctgtttgcggggaagctcttctgatgggctgcgcagtccttctccttccatt

SEQ ID NO: 24936 - DNA, 201 bp, Bos taurus
agctttgttgtcttgtgtttcactagaatttcactgtagattgatggaaccattagtcatacgtttaaactcgttctccaggccctctcccctctgtggagatcaggctgatatcaccaggctcagttccccaaccctcatgagtcatcatcttagtataaacaagggacccaaggtgagtcacagcattagcataaactc

SEQ ID NO: 24937 - DNA, 201 bp, Bos taurus
ggctgaagaaggtggccttcaaggatcctttagaggattagacagttggacggcattattgattcaatggatatgagcttcggcaaactccgagagacgacgagggacagggaggcctggcgtgctgcagtccattgactcgcaaagagtcagacacaactgagcaactgaaaaacagtatcttttaaaggttcaaaacgt

SEQ ID NO: 24938 - DNA, 201 bp, Bos taurus
gagggccctgggtatttgggatcgggaggatgagacaggtgctaggacacgagtgaagaaagaggagtgggaaaatggcaaagacacacttgcagctctgaaaggttgtgggccagttctttctctgtaataaaggccttaagtcaatagtactgggcactctggagaaatggttttgtatttttgtcttaaattcgtgtt

SEQ ID NO: 24939 - DNA, 201 bp, Bos taurus
tgcaaaggaaaacaaaattgaatacttctgcatattcaaatttaggttgaaggaaatgaagttcttcaatgtacctttgcctaacttcaaagataaattacacattaaatactcttacaacaacaatgataaatgtgagtgcattttaaatattaattttccatcaaagaaatttattatgcatttatctattagagctaa

SEQ ID NO: 24940 - DNA, 201 bp, Bos taurus
aggtaaaaatgttttcacaatactttggaatttttataattgtcctctgtattgtttgactgtcagttaaattagaacgtgtgataattgtagggagctgataagactttctattaaaggtatgtcattatgttaatcctggttcaaatatagtttgctcaaattttattttgattatataatattagaataaattaacct

SEQ ID NO: 24941 - DNA, 201 bp, Bos taurus
aagggcctaagaagtcttattataaagaatgtacagtagtgagctgattttaattttagttataattttccaaactgtgtatcacaccttcttcagtgatactcacttgtcataaaatagattcattagaatttcattatccattacctaccttctgaagcctacataaattagctctaaaatagtcaaaaggcttgaagt

SEQ ID NO: 24942 - DNA, 201 bp, Bos taurus
gtgttcagttctcttcccatctctgctgtgttattagaaaataagagaatgcgtttttaaatattagagttttgaaaacccagtttgaggctgggatatgagaatgaaatcagttctactcatagagaatggtcaggatgcctcactgcatccctttaggtgtcagatacaccttaagcctgagatctggtcctctcccag

SEQ ID NO: 24943 - DNA, 201 bp, Bos taurus
tgtactctcaaggtgagaagtgcttatgaaactatcacaatgagctttggcggggagggagaggaattgttccttttaagaggtctttctctacctggccgctgtgctctgcctctacccgagtcccacctgcgggtgctgacaccttggctctggggctgtgtgcagaagttctgcaaccaagacagaagtagcaggcca

SEQ ID NO: 24944 - DNA, 201 bp, Bos taurus
ttttctttgatttagagaaaggcagcccagggtaggttagatgaccctacattgtcatcagatctgaggatctttctgactttcttttcagccctcctttcggtcatccagctttcaccctcatgcttgttgcctcatggtgacaaagtggctgccacacctccagggtcctcctagaaatgaagaagttgaaaggaaagg

SEQ ID NO: 24945 - DNA, 201 bp, Bos taurus
ttgtcatttggctttgccaagttttatcttgttttatttttttacctaatataatacaataataaattctcctagtgtttaaatataacttggtttcttattagtgagggagcaatataaaaaatttaaattcaaaaaccctaatctgtcacaaaaatatttgttaaaaggaaaatctttgctcttttactatgtttggaa

SEQ ID NO: 24946 - DNA, 201 bp, Bos taurus
agtttaatcatgggtggttgagactgaaagaagaggaagagtagaaagtagcagcctgagagaacaagagcgaaaaagtgaagcagccggcccagattcaaatcttcaagtctcctgtctgctctcgagccattggctggtaaccagcagccctgtggtgaatggaggggtgaggccaagttgactgaggagccacttgtt

SEQ ID NO: 24947 - DNA, 201 bp, Bos taurus
ttgctttccttaactattaaatacctaacaccagaatatttaggaggactatgatgattaaacaccatgtgtcaaatataaaaactgagtgtgtataacatggtataattgagtgtataatagaaagaaaacaagaaatgagttatgactcacaaaaaaatgtaatcacaaattaaaattctaccaactataagccttttt

SEQ ID NO: 24948 - DNA, 201 bp, Bos taurus
tattattattactactactaacaaaaatagtaactattattgctgaatcttgtggactctctgagggatggagttggcaacttggacatgggaagtagaagagtctggctgtggctggtggataagccttgggtaaatgccaactatgtaaaataagtggcctttgcttatgttctaaagccccatgaggaaaacctttcg

SEQ ID NO: 24949 - DNA, 201 bp, Bos taurus
tggcagcaaatcttgccagcggatctcagagaaaacagaagcaaaagagtttcctcaattcctgccaccaaatttcagacttgatcttatccacgtctgccgtttcctctgtcctcctgttccagtgggagacgtgtctccttcaaggctgcttctccaggctgctttctggatcacagtgcatcttatgtcctcaaggac

SEQ ID NO: 24950 - DNA, 201 bp, Bos taurus
agtaggcaggtctttatattggaggaagacaaggatgggaagccaggtactagtcagcgtgacatcagggatcaggcctcatacatagtagggcctggcacacagtaggtactttgtgatcatttcatgaaggaataatttaaagaaagtacaaaggtgaaacacatagagagtatttaagaaaccacaagttgtccggtt

SEQ ID NO: 24951 - DNA, 201 bp, Bos taurus
ttttgtatacttcatattttaaaacaatgaggttttgtacacattaagaaaaaaaaacagctaaaactatatataaaccaaggaaatacacattagatgtcaaaaaaggtagtttaggttttcaagtaagtcctgaagattgtcaggcttcttaaatgttgatggtgttaaggaaatctttatctagacccttggctttca

SEQ ID NO: 24952 - DNA, 201 bp, Bos taurus
aaaccatctacctctaattcaacctgacactgctaattttggcattagagtttgaaacgaaaatcaatatctgttttgagcttgaaaacagagcgactgtgccttgggtggagcatgggccaggcacttattttcagtgatctgtaaggaaggtaatagaaattttccaatttggagcattgaaaaggcttatccagatga

SEQ ID NO: 24953 - DNA, 201 bp, Bos taurus
gctgttaaagcatggagtgactgcttttctccccaaaacatttcccccaaatattgaactgacatgttttgcaaataataaaagtgaaatgcctttgaagtagtagcatagaaaatgtaatcatcctgtcccacaaagagaggaaaagaaactctgtccagtaggtgacctactaaatttctcaaaactgcattgatttaa

SEQ ID NO: 24954 - DNA, 201 bp, Bos taurus
cttacagtttatatttcatactatcatagtgacctaaatggttgctacttcaaagttacccaaatggttactacttcctgcaatagtacttatattaatcataaaatgctaattactcattattaagtatattcaatttctaattacatacttaaaatttcatgacattttatagctacctgttagtgaaaatccattcat

SEQ ID NO: 24955 - DNA, 201 bp, Bos taurus
taagtatctattcttctttttctctgaatgtggcactcatgagagcaaagaccagtcatcaggggtgaattatttaatacaataatgttttaatagctgagaggagacacaaatagtcgcagtgcctgtggctaatggatttccctggtaggagataaaaggctgattacacagcagagcaagtgagggcctggtgcgtta

SEQ ID NO: 24956 - DNA, 201 bp, Bos taurus
cctttcactgtcaacgtttgccatatacgtcggcaactcctacattcccgagttgtgtcacttgcccttcttcttcccaggtggctgctggggaagccatattccataacccactatgtggcccttcatctgactctggaagtaagtggcatgattgactcagcacctccaatcctcggtgggaaagctgctgtagctcct

SEQ ID NO: 24957 - DNA, 201 bp, Bos taurus
aaaaacagaatttgctgacttttgactacccccagaatttgactcagcaatttgtggctttctcagtagatgaacaagagatctgattgagaaatcgagtatcactccctgataacttacaaaagccatacccccttcctctttcaacccgcctccctctttcccactgcaggaaggaaaggaacctgctttcatctaagg

SEQ ID NO: 24958 - DNA, 201 bp, Bos taurus
tggttctgagtacatggcagacgtttaaaaaaaaagagtatagaataaccaagtgactgatgaatgaaataacccagtttgatatttgtgtttatgaaggcgggaaagaaaacagtgttacggcattcccattgcttttttctcctctgttgccaagcagagtttgagtgtggtttgttggagtcacaaacaactcttctg

SEQ ID NO: 24959 - DNA, 201 bp, Bos taurus
aggattccccatgctgcagagcaaccatgcccatgtgtcacaagtactgaagcctgtgagccctagagcctgagccccgcaacaaaagcggtcacggccatgagaagcttgggcaccgcgactggagagcggctgggtgtggctgtgttaaaaagctctacttatacaaacagctagcagatttgacttggcctgtgggca

SEQ ID NO: 24960 - DNA, 201 bp, Bos taurus
ttactcccactctcagttgacctagttgctccattttcaagtagttttctgcagcgtgtagaagccataggcagctataggtgggaattaactctctagggtaattctttcacgttatttagtgtttggttatgattcttcccccttggctcatccataaggtagagcagtgacattaataaagtgactagggcttgcttt

SEQ ID NO: 24961 - DNA, 201 bp, Bos taurus
caggccctcctgtctctagctgtacctctagttcagttgttgctgtgcactgcgcaaaacagagatgccaggcctttaggaataaggttggccattcagccgtccaggtctgaaaggcaacaaatctaagataacaggaagaggctagtcaggcagtgaaataaggcaggttcatttcggtcaacacagagagaacttctt

SEQ ID NO: 24962 - DNA, 201 bp, Bos taurus
gaaatgagaagaatgctgagatattgcccagtggttaagactctgtgcttccaacactgggggcatgggttcaggccctgatagggagactaagatcccaagggcagcgggtagcatggccaaaacaaaaccaaaaactgaggatctagggccaaaagacaggccagggagaatcaggaacttgcttggaatgtatgagga

SEQ ID NO: 24963 - DNA, 201 bp, Bos taurus
cagtccccacaatcctgtaaaccaattctaatagtttttttcttttaaagctttcttcctcatatttattttatgttaatcttttggccacaccacatagcaaataggatcttagttccccaaccaaggatcaaaccttgcatggcagcacagagtcttaaccactggactgagcaccaggaaagcccttaagccaattct

SEQ ID NO: 24964 - DNA, 201 bp, Bos taurus
ttcagactacatccatggtcctcattctacttcctgtttagctttgggccaaagactgcattcaaaacaggcaggtgacaaatatacccatagtgacctccaaacgactaaaatggtaaaaggggcacagagagtccaaggctcctgatcaccctccccagacactcaaccataggcccctgggctccaagaagggatctg

SEQ ID NO: 24965 - DNA, 201 bp, Bos taurus
atacagacactatttaaactgtgttacaaaagcaacaggtaccttaattggagataatcaaggatgcaatatgtggggttagcttatctcaattttgtgaagttgttggaaaaatgcttttcctgcaatctttctttattggaattttcctgaaattgcaatgggagctctgcaaaacctgttatttacaactgtgtatct

SEQ ID NO: 24966 - DNA, 201 bp, Bos taurus
tcctatatggccttataaacatagctcctgtaaaacgactgaaaggaacatgcatttacagcttgtcttcacaaggattagaaacttcttacgggaaggggttaggcctttccctctgctggctaccacacaaggcagatttacaaaagctccagagatacctctttattaattcactcaacagacacttggtgagcctcc

SEQ ID NO: 24967 - DNA, 201 bp, Bos taurus
ttatttgttttagcataggagcagtttagtgaagtgattgcttgtggactttagagcaaggtaggctgaaatcctagattttgccacaacaaaaaaagaattgaaaaagacatctacaaagttgtgattataacttgaaaatttagaatttgagtatttgtagtatatatgacagggttctcagttaaggaaaacatttct

SEQ ID NO: 24968 - DNA, 201 bp, Bos taurus
gttcactgtgctaaatgattgtcccatttagcacttatttgctagcttgatttcttgtttctggactaattatttttctttaaaggggcactggcaaatagaagaggctgttagtctaaacatttactgtgggttctattatcttctctttctatttcactaacaacaaatacaacattgacttaaacaacagcaaacggc

SEQ ID NO: 24969 - DNA, 201 bp, Bos taurus
taactaacacctaactgtattataaaagtatgaaacagcttccttggacggggtaatgggaaaaggtactgattaagcaactttgcaaatgagctgaattcataaaactaaagttaaaaaatatcatgtataagctctgcatgaagttgtttctcacctggggacaggttacagtttgggtgttgctttacaagtatactg

SEQ ID NO: 24970 - DNA, 201 bp, Bos taurus
agaagcacggtttccacacaggccattaaatgtgaccttacttgggcttgtacccttgctgttcttcttaattttcagttgctgaaggtggaaaatcacttactaacgtggtgccttctacggttttctgaggaattagcaagacctggactgggcagttttttaggaacattacacataaaaagcgttctagattttttg

SEQ ID NO: 24971 - DNA, 201 bp, Bos taurus
gaatcgtaggctttgtgataactgagaattatattcagaacttgaaacagcgatggaaaaaagagaccagttgttggccgtaaacaccttctgagtatgcatctctaaaaacagctactagggaaaaggtctgggacctgtgattccaggtctctggaggtgggtgagtgggcaggtgctggaggccctccagactaattt

SEQ ID NO: 24972 - DNA, 201 bp, Bos taurus
ctgttccgttggcttctccattctgctttccccagcacatacatgcagtagttgcttccccttggtattagcatctttgactttgaacttgcaacctaaatgagtatctgagaaaagacgataccaaactggagatgaattattatgagaccgtaagagccatttgaaaagcacaccaacaatgcaagaacaaggtttctg

SEQ ID NO: 24973 - DNA, 201 bp, Bos taurus
ttatgaataggaggtctttatgtattttgtgattagagtatcatagtgttgccatataatctcattgcaaaacttctgataacctgtgtaggccaatataggtaaacatagtttggcttgaggattagattagtgaaagttaaagtggctcagtcatgtctgactcattttgaccccatagactgtgtagtccatggaatt

SEQ ID NO: 24974 - DNA, 201 bp, Bos taurus
gccttcagggcctgcttgagcataacctcatagatactacttccacttgaaggaggagtgttggtgtgcatgcccaggcttatggcttgatgggtcccacatcattcagttcatcacggccagttcaggttacatagtaactcggtggccaatggtacaacattcaactgccaagtccagtatgaaaccaaaaggtttttt

SEQ ID NO: 24975 - DNA, 201 bp, Bos taurus
tgtcttttcccttccctcgctctctccagggggccgcatgtgtgctggggaaagtgatcaagacctcctgtcctgcgctgccggccacagccggactccttctgctgcctctcaatccagcagaaactcctctctgtggggaagcagccaaggaaacgaccacgctgagtgccaactctgggccaagtaccctggtgggca

SEQ ID NO: 24976 - DNA, 201 bp, Bos taurus
aagccttcttttcagcttcaactctcacgtggccacctctttcattgctggtaggttcctgctgccaagggtgggcgacggtgggtgcccttgctaggacttcttatttaaacaaggccactttccagcctattttgcatgcaaatgcttacaagagcatgccagcttgctccttaaaattagatgaaataaagacacttg

SEQ ID NO: 24977 - DNA, 201 bp, Bos taurus
gtcgaggtctcactctcctcttttgttctcccttgtctcacagcaccctggagggatattatgtggacgatgccctgcagggccagggagtttacacttatgaggatggaggagttctccagggcacatatgtagacggagagctgaatggaccggcccaggagtacgacacagacgggaggctgatcttcaagggacaat

SEQ ID NO: 24978 - DNA, 201 bp, Bos taurus
ctatcagagggcattaaacaggacacgtgtataagtgaaagctccccttgttcttcaccaagcactgtctgattgccagtccaccttcagggagaacatattctgatcatgctagcatcacttcacaaaccgtatatcactaaactcggattcaagagatgcaagaaacacaaggttcgatccctgggtcagggagatccc

SEQ ID NO: 24979 - DNA, 201 bp, Bos taurus
ggtcgtctagaagctgggagcaaggggcctactccggaaccacggccttcggagcgtggggacggggaggaggaaacctgtggtcccgggcgcgcgggccgtagagggaacctcaaggaagggacgaaggagtgcattcagcctgactaggagtacgaaggcggggtcccgggcgggggtggcccggtgcccggtgggccg

SEQ ID NO: 24980 - DNA, 201 bp, Bos taurus
gagttactatcactaaaataggaagtttttatccttctccaaaattacaggatgttaaaagtatatgacattaaatggataaaatgtctccttcatctgattcctacctgtaatttttttaaagcctgttgcccttggtacttgtatctaatagagcacacagttacatatttggttttaaagtgtaatatatttgattca

SEQ ID NO: 24981 - DNA, 201 bp, Bos taurus
atcaagtagactattaccagacgaggagacagcatcaggtgtgttagaagagtttgagatcagcagtaaacaaacccatgaaaaaatgaccgctacctacagctctctgagcttttattttggcatttagtcctggaaaagaaaaaagccttcatttctctctgctcttggctggtctcccttgggaccaataactagcat

SEQ ID NO: 24982 - DNA, 201 bp, Bos taurus
gcaaaagcttctaggggttcaatatttcagtggggcttgggaaagaccaaaatagtcttattaaaaaaaacacataagagtatttcccacattcaggtatcagagtaagtatttgcacaacagtggaatgtccagggtcttgattatagaagagaaaagtatccgagagcccttcactttgggacattgtgtcccagcgta

SEQ ID NO: 24983 - DNA, 201 bp, Bos taurus
tctctcatggtcctactttaaattttttctttcagaagtcatgtcttagtggaacttctccaggcttctagcaaacagtccaaccaaggcctcagtctgtcacctcttgaagctccagtctactcgtacagctcactcttctggttctgtttttttctttcattattcgcaattaggttagaacctttactacacagttca

SEQ ID NO: 24984 - DNA, 201 bp, Bos taurus
gggacagaggaccctggtggactacagtccatggggtcgcaaacagtcagatgcgactgagtgactaacactttcactttcacttcacagtatgctttgcgatgatgaggattatattaataattttctagctgttccatatgccacgagaaggtaaaaaggctgtcccttagaagcatgattcagcagctgctatagaac

SEQ ID NO: 24985 - DNA, 201 bp, Bos taurus
cttgctgtctggttttgcatcttttcatgcattcttgatctctcctctgcgtggttataagtccctctggagcagggtgacgacagtgatacccccctttgtaatgttgcacatagtggatgctcacagatagtttggtgataatcttttgtaacactgactgcaaaagtgactttcaacatgtgaaaaatgaaaatagct

SEQ ID NO: 24986 - DNA, 201 bp, Bos taurus
aaagcgttttctatcatcaccaggggccaaatggggacaatgcatttaggggaggaaaaaaaaatctgactttcccagatgttcttaatttagggtgaacatgggcccatttcctgaggcagtatcagtttaggcttcttatcccaggaactatagaaagtgccttcttcagtccccggagtatccggtaatgggcaatac

SEQ ID NO: 24987 - DNA, 201 bp, Bos taurus
tttttaagaataccatctaaaggacaaaacagtgataattttttcttgttacaaggaccgtaatagttttccacaagataatgcacttcaatgggtactgatatctttccttaaagtttcattgttttgaaaaaaaaaggaagaattcaaaactgggacagcctttttcatttaataactaagaaacaagtaaatattcct

SEQ ID NO: 24988 - DNA, 201 bp, Bos taurus
aaacacttgctggggccggagcatgtatgtaagaaagtcagtcctgtgattaggttgaagcaggtgctggtcaaaagatatacagagagcaagagaatagtcctcttgggtggcctggacatacagcctgtatgtgtgtgtgtgtgtgtgtgtgtgtttagtgaaagtcactcattcacgtctgactctttgtgacctcat

SEQ ID NO: 24989 - DNA, 201 bp, Bos taurus
aggttaaggaaggaaaaaaatagacaatatagatgcaacttggcccttgacaacataggcaatgtgtcattttatatagcttaaacctaatcattgttgcgaaagaaaaatttcagagttgtcatggcattaaagtgactttcataagcattagagcattgaaacatattaaagaagatttatgtctttttattcaatgct

SEQ ID NO: 24990 - DNA, 201 bp, Bos taurus
tctctatctgttgaggtaaagaaacaaacaaaaaaagacactatttgggaataaataattaaaagcaaaatctcctcccagaatgtgatgcccatcacaggaaatccactaagaaactgcaaagagagaaagaaatcttactttttttatataatcaggtagattatcagtcatcacataaatgttcccaagataaatgat

SEQ ID NO: 24991 - DNA, 201 bp, Bos taurus
cttctgctggttgtggaagcatgttccttgcaaaaagttgtcaagatgcctgaagaagtggtagttggttggcgagaagtcaagtgaatatggcaaatgaagccaaatctgttcaacttttgaaatatgtgttgtgcgacatatggtcgggcattgtcatgaagaagaattgggtcctttctgttgaacaatgaactgcag

SEQ ID NO: 24992 - DNA, 201 bp, Bos taurus
cttgaggaaatgagatggtatgaccaaagtatcagtcagaatacacagttagttattcatttcattgtgcttaagaattgatctaaaattagaagcatgtactttgtctggcttatgtgatgttcaaatagttaacttcaaaagctataccattaaaaatcattttagtaaagggagttgaggggattagcagaaagcagt

SEQ ID NO: 24993 - DNA, 201 bp, Bos taurus
gacaccccagacttatataaccaatttcatacttgatatttttaactggatgccaaataatcatcttgttcaacctaccatcctgcttctaccaaattcttccacatctcaggtgttgacatctgcatacttcagtttaccaggcaaaaaacttaatgttaaagccctctcttttcccctcatatcctacatccaatccat

SEQ ID NO: 24994 - DNA, 201 bp, Bos taurus
tgggcctcctgcactgacaggcagattctttaccactgagccatcagggaagctccaatcctagtccatggaaaaactgtcttccatgaaaccagtccctgctaccaaaaaggttggggccactgagttacaagtcaatagttagaatagcaggagggtgagatggctacttgaactagcatgatgtcagtggaaagaaaa

SEQ ID NO: 24995 - DNA, 201 bp, Bos taurus
tctttttcttacttacttcactctgtataataaagcctgttgctcttatcaatgactttatttgctgaatgaattcaaaactattagatggcctcatactgcctaatggtccttgtttctcacagttgttctctctatattcattcagttcagttcagtcgctcagtcatgtgcgactctttgcgaccccatgaatcgcag

SEQ ID NO: 24996 - DNA, 201 bp, Bos taurus
ttgtctttttatcaacaggataatttatatacactttccaggaggaagttatttcctcaggcaaataaacacctaactggatggaagaaacatcccagggcggcctcaagttgctggacatgggatatgtacatgcatgctaagtcttttcagtcatgtctgactatttgctaccccatggactgtagccctccaggctcc

SEQ ID NO: 24997 - DNA, 201 bp, Bos taurus
actctgggagttggtgatggacagggaggcctggtgtcctgtgattcatagggtcgcaaagagtcggacatgactgagcaactgaactgaactgaactgatctgataatgtagtctcaccaattataaaaatgtttcactgtggtacaggatgttgacagtaggggagaatgtgtatatttgggggagaaggagtacatgg

SEQ ID NO: 24998 - DNA, 201 bp, Bos taurus
tgttttcttgacatccttttttgtaaggtgggttatttagtttacacaaattctaagagaatagccattaggtcactcagctttatttgttgaggcttctgtcatgtttcccacaaaatcagacacttcttcactttgtcttttgcagcatgctagcataaattgaaggtcacattaagaggatttagtgaatgaccccgc

SEQ ID NO: 24999 - DNA, 201 bp, Bos taurus
ctgttcactatatatacattattgaacagatataaaaaaaacagtcctcttctgtttgcaaaatgtgcagaactctgaagaccatcttactcactagtgtattgtttgtgttgaataattaatagaagttttacctttcatatatccagttctaaaagtttactatttctttactttgccttgtgttacactagtggttct

SEQ ID NO: 25000 - DNA, 201 bp, Bos taurus
aaaaaaaaaaacaatccttaagtgtgccatgctctgaatacaattaagtgaatgctggttagaaaatcatgatcacatatgggaccaaatagctgaatttcagtgaactattttcattaactttcaggctgtaactatggcattggctagctatgccatgtgattccattgcaaatatgtctggaggaagagaccttgatg

SEQ ID NO: 25001 - DNA, 201 bp, Bos taurus
gggtaatttacaacatttaattataagttggttaaaaaaaagcattttcatgtctgattataaatttccttcttatatttaaaatattaatattttctgatactaaaataatcactgaaaattttgacccctgtggtttaataacaacataattttcatctataaatacatatttgtatttctttttcataaatttgtgtt

SEQ ID NO: 25002 - DNA, 201 bp, Bos taurus
cactaaggaaccctcataaagtgaggactctgctttggtgaacaaatcatgaatagatcagcaaagaggtttttgttttttttttttaatagataagatacagtgaatataatgtaaagcaatgcatttcaaatatctttaaaaggaaactatcttaatatcacaaaagaatgatgataatgagattcttatgtatatttg

SEQ ID NO: 25003 - DNA, 201 bp, Bos taurus
tttttatgttttagaggatggggccaagataagcactcatataggaaggggcttgcttgtattatttgaatatacgacttaagctagagaaatagcccccaggccctttcatcagctttatatatgtgggacacaggaagaagagctaaaggtaaggtttaaagatgacagtgtcaaacataaaaaaatagaatcagcata

SEQ ID NO: 25004 - DNA, 201 bp, Bos taurus
caaatcttacagtaataggaggagtaggtcactagaatgtgtcagtagggggtgctcatgtatagggtaccactgtgacttccgcaaacatcatctgactgggggaagggcacaccagaagcaccaattctgagaaatacatgtttgaagaaaaattcagaacccattactgaaaatacgccaaacagaagaatcattatt

SEQ ID NO: 25005 - DNA, 201 bp, Bos taurus
ttggaagtgacagtgtagttaccatagtgactaaaatgctcaggtgtgggctataaaatataaaaaacacgagtagcctgagtttcagagatgcaggggagtatggaacttataatggatataaatgaaatatatatctctgttgacaattccaataatcgaagtttgcaatctccagtgtaatacttctttctttaaatt

SEQ ID NO: 25006 - DNA, 201 bp, Bos taurus
tttaaaaattatttcctgcttaatttgaaaattaaagaaatacttctctaggtaacaaaaattatagtaaaaagaagatatttggagttttaaagtgtttgcaaatggagaagaattaagtgcatttaaataaaataattcttatgcatgttttaaaatacaactgtttaaaatatatatttattctgcaaaaattgttgc

SEQ ID NO: 25007 - DNA, 201 bp, Bos taurus
ctaaactacttagtgtcttaattcaggccctcatcagtaatcattcagttgactatgtgactggctcaggtctctgtccctttagactcttgctcttctcgttctttacttctggtggagctgggcctttaagaatgaaaatattttatgttactttaaaaatattatgatatcaagactcaaacatcagcatgaaaaaaa

SEQ ID NO: 25008 - DNA, 201 bp, Bos taurus
ttctttgtttgccctctgctcggttcttttagttgccgtttcctctaactgcctttttggacccccttttccctactctaactatctaacaaaatgttacggggagaagtgcctaaaattctaattaattggtttgcctagtagtctattatagaaggaatgttgaattaagaacatgcccttcaaagaaaaaaaggaaaa

SEQ ID NO: 25009 - DNA, 201 bp, Bos taurus
aaaataaggccatttgattcaacaggacttcaaagataagtgggtaaagatgcaaattaatttaatggataaaccactaaagggctgattaggagcttttcagttgattgcaagataaatccaaaaactaagggtgaaagggaaacacagagacagcaggtcgtttgttttgttttgttttgtgaaagattcttgaaaata

SEQ ID NO: 25010 - DNA, 201 bp, Bos taurus
cttgagctgagatgcctaaagaagatcttggctgacaaccttagataaataatctaggaatgtaggtccttgaggcagtaatgcaaactacatgaatatggtggccagagagccctgaatccttgcctgcagcccatccagaaactgaatgttgtgcatcaggtggagtgtgggtagggcagctttctcccacgtgtcctg

SEQ ID NO: 25011 - DNA, 201 bp, Bos taurus
gcttaatcacttaagaaaatgccaaatcactttttaaaaaagactctggagcctaaattatgattttgaatatttcattgatacatacagctaaacactgtaatactgtatacaccataatgcaaaacagatgcagaaaaacacatttttaatcttactgacaaagacagctacaatagcaaatcacttacatagtatgta

SEQ ID NO: 25012 - DNA, 201 bp, Bos taurus
atactagcactccttttatattcttttcttttttgttttctcttcttaccaatcagattttgtttgcattatttcactagcatcttaaacctaagactctctttgtggtcttgaatcttgcactaatgtacttccttctactaaccaccctccttaaactatgaagaagagaatgaggacagcctgagagaaaggatctaa

SEQ ID NO: 25013 - DNA, 201 bp, Bos taurus
tccttcatggccatttccacagtaccttttttacacaacaattcccatcttgacatttgtttttagaagtaaccaaattgatacaatcggtataattgataagtctctggccaaactgttgaagaaaatacaaggcacaaaaaacaaatatcaagaatgagagtggacatggtcacagatcttaaagacttcaaaaggata

SEQ ID NO: 25014 - DNA, 201 bp, Bos taurus
gttcatttgtgacaggtgtaactttattattttattgtaagcagctaacaatccttaatgtactaatgccaggtgatcaatattgattataaattgacaccttatcaatgactgcagtttggttcaacatttttttattgtattttatttttaaactttacaatattgtattggttttgccatatatcgaaatgaatccac

SEQ ID NO: 25015 - DNA, 201 bp, Bos taurus
tcttttcctcttaataaatactttactttcttcactactttttgtctttatggaaattcttttcttcaaagcccaagagccagggcctttaccactgaccgctggtctagtggctaaacattggtgcttttaccactgcgacccaacctcaatctccagctgggaacccgggccctgctctaagccactgcaagctgcggc

SEQ ID NO: 25016 - DNA, 201 bp, Bos taurus
tttcagtttttgctatccttggggccgtgtcatttggggccatctatttggcacttcaatgtagaaataattttgacaatttgtgcccgtgttctgaaatatgtctggaagacaaaattttcagaggtccttactctaactgttccataagtcctgtctcccagacattttgatttcttaaaataatgacatgattgaagt

SEQ ID NO: 25017 - DNA, 201 bp, Bos taurus
tttaaatagtgccaacttatacaaaaatattctacttattccaatccagtttcaacttgaacaataaaatatgcttccttttattttacctatttcatttattttatgtaatatcttgctttttattctgttgataacctcagaaataagtacaagccaagcatatcaaacattgggaaaacaatatttatgttatatgaa

SEQ ID NO: 25018 - DNA, 201 bp, Bos taurus
tagtaattgactccaaaattcattagagggaccattagtggacatggactgccagaagaaagaatatgtgagttgggatataatacagagaaagaaatgggatgaagaaatagaaacagagctcagagaaacgtgggaaattttaagtgcaccaatatacgcataaggagagtactggaaggagaggagaaaaataaatca

SEQ ID NO: 25019 - DNA, 201 bp, Bos taurus
ttgtaatttagactgtctagatttcaattacttaaacttttattatattgcaggagcagaaatgatcaagaacttgaatgcaacacattaacattttttcaataaaattctatagatgcagcttcctaaatcactttagagaattctttcatagtaagactttataaaatcattattgtatctaatttttcatacttttaa

SEQ ID NO: 25020 - DNA, 201 bp, Bos taurus
acaagggaacctaagagttcaggaatgatctttttgttaccacgctgcctttgtctctaagtctttagacaccaccagcattaggacaaagcacctcaccctgaggaaactcagagtcagcaggagatagagtgctcacaatgggctgtgcataggtgcattttagctacacaggcagatttaatcttaaaattccctgcc

SEQ ID NO: 25021 - DNA, 201 bp, Bos taurus
gtctcacagaggcacagaagaaggccatggctgaagactgcctgggaatgcaaaggtgtgtaacagcaggactacacagatgggcctgagtccttgactgaagctcccttctgagcctgcaaagcactgattgcaccccaagcctggtatggggaggggacagatttgccctaatgaggcccgccagttatttaaagtcaa

SEQ ID NO: 25022 - DNA, 201 bp, Bos taurus
aacctctaggtctttaattactgtaaagttgtaacagcccaggaagatatcctctgtggaagtcagagacaagatacacccagaatattgcagaacacttggaacctcaagggtctctcagaatcttctgaggctcatcaggttctggaagatgcatttatgaagaccattgttatgatactttccgtataacaagtgggc

SEQ ID NO: 25023 - DNA, 201 bp, Bos taurus
cattacaagttcagctgtgcagtgtgtgaagtagatgagctactcagtaggcctagtcttaacacacagacagagcagtctgagattcatcagtaagttctaggtctaactgtctgttacagtggcccttctgttactctacatttaaagagaatatcaaataaggtccacattcatatttaaattggagaaggaaatggc

SEQ ID NO: 25024 - DNA, 201 bp, Bos taurus
acagaatttttttaaaaaacagaaaattagatactcctggacccagttctaaactataagagaaaaatacactggatctgggaacagggtggcaggattattctaatcagaataactgaagaaaaaggcaccttgtacactgttgggaaatgtccactagaaatatgatattgaaaagaggaaagaagctgactgtagtat

SEQ ID NO: 25025 - DNA, 201 bp, Bos taurus
tctgaaacacacatatctaaaacacaaaaaactttctatcgtatgtatcagaacagtgataccattactttttgaaatgtttaatgattttttttcagccatgtaatatttttaagatgatgcaactaagaattattatagaccataagtaagaatgttatcttctatgtgtgacaatatattcttttttatacaggctat

SEQ ID NO: 25026 - DNA, 201 bp, Bos taurus
caaaaatttgattcaaattcttgataattttgtggaaatgtgtgtgtttcactgttactgaactcagacccagttgcttgctgctcaaaggtcaatgtgagtgttggttagaaaggaaaggtttatttattcaggaggccggtaacctggggaaaaggtgggactcatgtccaaaagacagctccccactgctgatcaggg

SEQ ID NO: 25027 - DNA, 201 bp, Bos taurus
gtataagatgttataaatatcttatagacttgctggaatggctaaatgagaatatatatgtgtcatgcttataagggcgcagaaatcattttaagtacaacgactcaagtcacatgtatcctcttgctgtgcaacaatgcaagagcactgaccattcagcagtcacttttttatactgcagatgctagggaagttgccagc

SEQ ID NO: 25028 - DNA, 201 bp, Bos taurus
gaatttgggattagtagacagaaactagtatatataaaatagataaacaaggtcctactgtatagcaccagagaactgtgttaaatatcctgtagcaaaccataatgtaaaagaaaaaaagaaaaagaaaataactgaggctattggttcagttcagttgctcagtcctgtccgattctttgtgactccatggattgcagc

SEQ ID NO: 25029 - DNA, 201 bp, Bos taurus
ttatctattttatatatagtactgtgcatattttaatcttaaactcttaatttattcctactcccctcccctttggtaactgtaagcttgtttcctatgtcggaggctatttttgttctgcaagtaagttcattttcatatggtatttattatatgtagtatctaaagccacaataatttaaagaaaacctacaatgtggt

SEQ ID NO: 25030 - DNA, 201 bp, Bos taurus
ccagagcactaagttccccatacttctagcctgacttccacactgactgagttccaatgacttcagaaagaagagagaaaggcatagcttgcatttacagaagtatcatgtccatgtgaattttagcgtgcaaagaattttatgctatggttgaaatcagatgtagatcaatgagatgtgactcagcacactgaagcactg

SEQ ID NO: 25031 - DNA, 201 bp, Bos taurus
ttttttttttccttatccaagctactactctggagtccagaatcactccactattactgttgctacagaaactcccagaaaattccaggtactgccaataattgcaatgtcattgaagcccaaaacaggaagttttttccaatttatagccttttgattctctaacaatatcccctacgatagacataggagcaagccagc

SEQ ID NO: 25032 - DNA, 201 bp, Bos taurus
tgcctaaatctttttgtcacccaggttattaacctaagaagctattattcatttactcttaagaagtcatctttaatttaaagcatttgtctatcttctcaatcttttcccggggtaggattgtctactgaatttcactagaatcagatttcaatgtctccagacaatttctgaagcatcttagatatataacatccaaag

SEQ ID NO: 25033 - DNA, 201 bp, Bos taurus
taaataactgtgctccctgttgctggtattttatcaagctctgtttgttataactgcgcattatgttccatacaagacagcgtctttgagctctcttttcgtattttcctactacagtttaactccgtgaggagcaataccaatgtgccaccaggatggagaagaaatagcaggacccgctgctattaaatactcccacct

SEQ ID NO: 25034 - DNA, 201 bp, Bos taurus
tgtcagagctctcgcctcctgcaccatcgtgcccgtttcatcaagaggccagaatgcttctcctgatgatgtctgtcctcctgctgatagagctgctggcatggatgcacttcttctcggaggcctcgctctccgagtcactcatctctacgtcagggacatacccgtcattctcgttgtcagctttcagtttgctttttg

SEQ ID NO: 25035 - DNA, 201 bp, Bos taurus
aggcagcttatagctgcagagaaagctcacgttacaaagacttcattacttttacaaaatatgcacccaaggacatttactagtgtattgagagctattatcataaataattaaaactaaactattcttctctaaataaatgtataaagtacattgggtgattccaagcactaagctttctcaacatactgctttgtagac

SEQ ID NO: 25036 - DNA, 201 bp, Bos taurus
tgtaggttgtggcctcgaacccaagtatcttggcttggaagaggtattcttccagttttaccatgctgccttccctctaaaagtcctgggagttcctagaaccaaatataaaaaagactattagttggatttcatttaatcacttttatatatggtttgatttgttcccaggtccattataaccatatttggaataaatta

SEQ ID NO: 25037 - DNA, 201 bp, Bos taurus
acaacaaaagcccttcccattagctgttggtttcacttataagcaattaccaggactctggcagcaagtcatttggggccctcttgacaagattcagacacgatctacagaaggtagggagaaatctcctcatctctgcatgttaattaaggaagacagatggccctgtgattattcaaccatatgtaggtcaagactaaa

SEQ ID NO: 25038 - DNA, 201 bp, Bos taurus
tgatgaccttaataatgacattaaaataatattttttgcttctcaatctatcaaagaaaagatttataataaccagtgttggtaaggacgtagaaaagcagatgctattagtaaaagggtaaactttacaaccattctagagtatgttaattgggaatatattttcacttagaacttcaacttctaggaatttatgttagg

SEQ ID NO: 25039 - DNA, 201 bp, Bos taurus
tatattgaacatcttttgatatgttatacatatatatatgtatgtgtatataaagacttaagacttcaacacattgaaaaaattttactcaaatgtatataaaataaattttgaaatacaaaatgggcttcaattagacattactttaaaaaataatctatttgtaggcataacatgaagttgacatcacagtaccccacc

SEQ ID NO: 25040 - DNA, 201 bp, Bos taurus
aaatagttattgctaaagagtttcagacagaatatttagagatctagaagtaaaattgacagagagctatatttatagcagtgccctacctctttagccaacgtctgctggaaaactgcacgaatggagagacaacactgatggaaattctttatcagttgagggtggatcgagccactcagctgtgccacctcttcatgg

SEQ ID NO: 25041 - DNA, 201 bp, Bos taurus
aaagcagagtaattcaaaccccgcatctactgcttgccggcgccgccatgttgcctcctctcgggaagcgagcggggccacgtgaccaccaatcctcagccgcaattggtggcagctcaggttgccagggagacggggaagcttcttggagagaactgagatccacagaaaggagccaatgaactaaaatttctaggacat

SEQ ID NO: 25042 - DNA, 201 bp, Bos taurus
accccaacaggttctggaacttcaggggcttcttctaatcagcactgtttccagtctgtctcttacattacaaattagtgtgaaattaggtgggtggctgcgaccggcgcacttaggtgtggcagagaggagctaccccacgtctgatgtcaggggcagaagccaggaggaccccatgcccgaagggcggcagccaagagg

SEQ ID NO: 25043 - DNA, 201 bp, Bos taurus
cacaacaaagatttgaggtgccggacattaaagccctcagggtgtcacagctcttgggtcatggacagactgcattatagttctcaggtctcaaacagactgtgttgtagctcttagacagatcggtgttacagctccatgttacagctctattttatttagaaaatagcaggaaaatccatcctcgaggcgtgagggcat

SEQ ID NO: 25044 - DNA, 201 bp, Bos taurus
aaagtggcaggaagttagttttgaagaatcactcagcaaaacaacagtaacagtgactataatgatgatgatgacaaactaactccatcagaataatgtgtcaggttcaatggatttaagctgtaaagagagacttaacatgctgaatgggaagaatggcaaggactagacactaggctggggtctagatttatatcccta

SEQ ID NO: 25045 - DNA, 201 bp, Bos taurus
atttgtctgagaagctataatacagaaaaatagaagttggtctttatgatttagatcagcaaattctttcaagctattaaaattcttccataacctgatttaattggcattgtgcaattaaattatttattcattgaattgaagcttcagtatttacagtacgcattacactctctgagatgttctttagttttgcattat

SEQ ID NO: 25046 - DNA, 201 bp, Bos taurus
ggtacatttgttatgactgatgaaactacattggtaccataaacaaatggtttaggttttgaaacagtaagttctgatgatctactgtgtacctcatatacaagtggactctttaaaatttgtgaaaaatacatgtagcaatctttgtacagagagtcctcttctgttgaattatttctgttatttaatttgggaaggttg

SEQ ID NO: 25047 - DNA, 201 bp, Bos taurus
cacatacgggggagggccatctactctactcctttgaccaattcaaatgctaatctcatccagaaatatccttagagtcccccagaaataatatttgatcaggtcacctcctggccagtcaagctgacacatcaaactaaccatcatgctgaagattcaaaagtctttggactctaaagtttacaactgtttatttagcct

SEQ ID NO: 25048 - DNA, 201 bp, Bos taurus
tattttacatattatagtgtaaaataattaaacatacttgttacatttatagtgtactgacataaaaaataactgaaacacacataaattcagaacacatctatctttgtaacactgaagacttaatatattgacttcccatgacaaatgcttcacaattttcctggaatttttttcatattaagatttctttatgtttaa

SEQ ID NO: 25049 - DNA, 201 bp, Bos taurus
ggatcctttctttttgctaagatgatttagaaccattgtatattcatctccctcaatttaacaaaatgcctattataaaacaaacatccactaatcatttatttaaaaaattacaagatccatgtattgcaatccccatgaatttcaaaataatagttgtctactgcttattctgaattctcctcaaatttgtatttctta

SEQ ID NO: 25050 - DNA, 201 bp, Bos taurus
ctatagttattagaatatatagagacaggataagatttcatagtctggaattttgttttattcttcctcggctatttgaaccatatttctaggcaatgtccatttaaattatgcatcttgaatgttgagctcctttagaaacaaatgaattggtggaatgacattaataatcagagtttgagtgctaggaattgattttcg

SEQ ID NO: 25051 - DNA, 201 bp, Bos taurus
tatggcacaataaatttttgctaatttgttttagaatgcatagcatgtcctttgtatcaacattatttatttagcaccgtttccattcctttactggacaacaaaatcggaagcatgaattttgaagatgcagaactatatccactgtgacaacagtgagaaaagggatcagtctgcacctaagtgtgccttatttctatc

SEQ ID NO: 25052 - DNA, 201 bp, Bos taurus
attagtgtcataataataaaaaagaaactacataggttgaaacaacagagacattgtttttcctggaaaggaggcctcttaagcaatagctattaatttgtgtaacagacttccacatggccgttcttggtgccttcccttggaactcaaagaaaaatgtcttcatgaacaaaagatcaaatatatttcagaatattcaaa

SEQ ID NO: 25053 - DNA, 201 bp, Bos taurus
gcagggaatcctagagggaaaagaaaaccaagtcttaatgttcataaatcacaaaaataatagcaagcttaacaatgggttgtagacagaactactaaagagaatgtagaaaacaccccaaggtaatatttgtgaatacatagacaggtgattgagtaatttttagttttgttataagaaaaatatttttatttacgaact

SEQ ID NO: 25054 - DNA, 201 bp, Bos taurus
gttaggactacaaagataagaccaccctgagtggctcgtgtgaacactgtcacagctgcttcttttcgctttgaaatcattcaaagtgatgcatgaggaacgagtctgcttttatcagcctcccactcggggtctgcttagcccactgaggaaaatacttgtgatacactgctgacagaaaacaaaacatgatccaaacag

SEQ ID NO: 25055 - DNA, 201 bp, Bos taurus
agatacaaccaataataatatgaaattctagctcccaactactgctttcaatattcttggagaaacacatttgcttttcattttaggagtggttggaacttgggaactgaaacttggtttacaatttcagcactttagttcacaggagataccctgacaaacaattttttctcataaaaaaagtcatcatggtgaattctc

SEQ ID NO: 25056 - DNA, 201 bp, Bos taurus
aggtaaatagtatggttaaaggtattgactgccaacagttattgaccgtaagaatattatatccaatacatcatttaatactcattacagtcttatgaatcagctcccagtggtattctcaatgtaggttgaggaatctagggtaccgaaaatgtaaataaatgcccaagattgtatgccattaacattatattaatgtta

SEQ ID NO: 25057 - DNA, 201 bp, Bos taurus
ctggaattgaaaaattagcaactgtactgagaacagaatagcaagcaagaagcttaaataggaaatcatgggaagagcgttttagcagcaaaagcatttcctgaataatattaaactttggaaagaatttgaaagatatctcttctaacagattcttatcagatttgacacaatgtagccatacttctgtaaggaactaga

SEQ ID NO: 25058 - DNA, 201 bp, Bos taurus
ggtattcaggccctcagtagactggatgatgcccagcgcttggtggggatgatctcctttactccgttgacaacagtgcaagggagtgttaatcgctcaatcatggccaactctttgcgaccttgcggactgcagcccaccaagctcctctgtccatggagctctccaggcaagaatactggagtgggttgccatgccctc

SEQ ID NO: 25059 - DNA, 201 bp, Bos taurus
gtacggtagaattgggcaagctgttaaacaagttaaatttgttcatgaaatgcaactttgaaaatgagatgtgtattttaatgaatgacagagctgaggacgaactttatactgaatctgtaatgtggatctatggtatttttcttttgcagaaacagggaaagaacttgaagagctattttctttgaaattaatgccatg

SEQ ID NO: 25060 - DNA, 201 bp, Bos taurus
gacctttcaggtcagaggccagtggtggcttttcatgcaaaccataggacaggatggagatgctcatggtcttcacgcttcctcccatgggcagtgactccggtgggccacgctgactctaggaggactgggacagtggcaaatatcactcagttccttagaatcaataaagtgttagtcactcagtcatatcagactctt

SEQ ID NO: 25061 - DNA, 201 bp, Bos taurus
tggtggtcaaaattgctatcacactcctcgtaaccctaacccagaagacaacagaacaatgcctccaaaattgtgaaaggaggtatatccaaagtctaggtttatataaccaagcatagtagtaactaacactctatatgacaggcaggctgggtggattattctctcttctctcatcaagcatgcctttcttaaggccac

SEQ ID NO: 25062 - DNA, 201 bp, Bos taurus
aggagcctagcgggctacagtccatggagttgcgacaagtcagacatgatggagcaactaacactaacactttccagatggtgggttgacacattggaggagaaggcggttgagccctaaactgaaccactttatgaagcttatcctatatgcccttaaactttgggtcatgtgaattacatgtaagtaggattcagactg

SEQ ID NO: 25063 - DNA, 201 bp, Bos taurus
gaagtactgcaggcaaacggtaagctatgctatcaggcagagttgaaacaggtcgtcaggtttgtgagtgtagaaaggaaagaagtttcaattggactccgttcaacaggacatgggcccggaaggactgcttgagtcttatgatagaaagagaagttatataagttgaacaaatgcgcctctctttcaggaatgtcttac

SEQ ID NO: 25064 - DNA, 201 bp, Bos taurus
ttttgttctcataaacggtaaaccagaatatttttcacacaaattcctcccacaatctacagatttgatccagttcaagaatgcaaaggaaaaaatgcctattctccactaccatgagccaaatctcatcagcttcaggaataaggcagaaagaagtccatttcatctattaacttcactgaatggccctggactgtctta

SEQ ID NO: 25065 - DNA, 201 bp, Bos taurus
tttgaaataatctgcttcatatacaacaagtttttggttgtcttaatattttaaaaaagaaaaatttctatttccatttgagaagactatatactataatcaaagctgaaagagaaaaagatagctattaaaaattcaaaaaattataccattgaatacttcacatgtaataggaaccttttaggtggataatatgaagaa

SEQ ID NO: 25066 - DNA, 201 bp, Bos taurus
acatatactgccctaaacacaagcattacttatgataattttcttggtgcatgcaaaatgcaagcaaattttcattttaaaaccaaaatagctacaagagtcttaacacgtcctagaacaacaagaaataagtcccaattcctagtaaaatgctgcattaggccatctctctagggaaagtcttacctttaatccattcta

SEQ ID NO: 25067 - DNA, 201 bp, Bos taurus
tttctttcttcttggtttctgtctagggagactgtacctttctgagaatttgtctatttcttccaggttgtccgttttactggcctgcagttgttcattggagtctcttatgacccttggcatttctggggtcagttgtaacttctttttcattcttaattttactgatttgagccctctcccttttttcttgatgagtct

SEQ ID NO: 25068 - DNA, 201 bp, Bos taurus
aacccataaaaacttataaaaatcaatttcttacagtatctactggatctcctatttcacgtcctaaagtggaagtgtttgagctacctgagctacaggtacgagcaaatgtaacacaggtccaaacagctgcagacattagatgattctagattcttctaataacacaatgaatggcaatggtggctgtagccatgaaat

SEQ ID NO: 25069 - DNA, 201 bp, Bos taurus
cccacaacaaagtcttgataaatatctctttttattttctatgacaaaataattagttcttcactccttccagaatctgtttcagtagatagtacaaggtcagcctcttaaagtttttctcctaactagctagtgaattttcctagcaccatttatatcttaaacttaacttctccacagaatttaagttttaaaaattta

SEQ ID NO: 25070 - DNA, 201 bp, Bos taurus
agcgaacagctacccactccagtattttggcatggagaattccatggactgtatggtccatgggtcacaaagagtcagacacaaccgagtgactattactccactgcacttggtagaactatttaaagacattgttctctataacaccagatattaaaattcctcaaataaaatgtattattggtctggctaaagccatat

SEQ ID NO: 25071 - DNA, 201 bp, Bos taurus
gtgaggcatacagatcattgagtcagtttttcatgctgttaaaacttagtccaaagcagagattctttttttgtttctttgcttgttttcaatccttattccttagaaatatttgtcttttagatgtattaataagacacaaagaatatgtattctacaccatttcatgtatatgagaattatatttttcaaagcaatata

SEQ ID NO: 25072 - DNA, 201 bp, Bos taurus
ttccacttgtcaaatccagtgaaaccctttcagaatttaatcatactggatttctctggaccttctgatattgttaacaatccttcctttctaaaacattcttctcctttggcactttcccccttaggcctctaagacacaccttttttgcttatctctctctctctctctctttttttttttttaccccagccattcttt

SEQ ID NO: 25073 - DNA, 201 bp, Bos taurus
agaaatatatataaatgatatataaatgaacttatttattaaacagaatcagacccacagacttagaaaagaaacttaagaggaaagagataaattaggaagctggggttaggatatacacacaattatatataaaatagatcatcagcaaggaaatactgtatagtacataaagctctacttaatattctaaattaacct

SEQ ID NO: 25074 - DNA, 201 bp, Bos taurus
aaatgccaaattctttcaatttgaaagaattgaaagtcattttctgagaaattacagttaatagtaaccaaactgtgcttgaagacttaatttatttaacgtgaaacagtaactttgcttacttgcaatggttagactttatgaaagagctgttcaaaaacagtcatatgaacatcacttttttttctgaaaaatatctta

SEQ ID NO: 25075 - DNA, 201 bp, Bos taurus
ttaaaattgtatacatatttaagcaccttcttttctctcttttcctctttgtgtctttaaccttccatctaaaatcattttcctttgcctaaagaaatgcattcagaattaaccttaagacaagttattagacatgtattttcttactatttttgaaagcatatttattttaatttgtatgtgtgtgtataaaattctaag

SEQ ID NO: 25076 - DNA, 201 bp, Bos taurus
cattcctttgatatgcaccttaactctctggggccagtgttctttccatttcactcttgagttccttcagggtgtacagctggggacagatgctgtggctattggcttgatggcctcaacaacctttgcttaatgtatggcaggtgacattcttcacccacaattatttacagtttccattatctcagtgaatctctctaa

SEQ ID NO: 25077 - DNA, 201 bp, Bos taurus
agacatacatgaagtcagtcttccccttaactttgatgatggctccaaacctcactcccccttctcaggtgtggtggacatcccctgacagctggtcatgcaggggtctttcttccactctctttagttaggtctttacgtgacacaagaagctttatcaactgcactcagtgcatcccaggcataccaggcatgaaatgt

SEQ ID NO: 25078 - DNA, 201 bp, Bos taurus
cctgaagattctaagtgattattttccatttctatactattctcaacttggtaacaaatgatatgccactgacagctatccagagaccataatttgaaaatgctctaaaatttggtttctcagtgattctggataacatggcataggatttaacatcatgtttgagaaatacacaccttttggttccactccctttatttt

SEQ ID NO: 25079 - DNA, 201 bp, Bos taurus
agaataaatttattaaaattaaagtcaacgtgaaattaaaaaaaatatggttattttgcaaattgcagacaacagaagatagcaaaagagaaaaaaaaatgttttgcttttaactttatgggacgttatcccagtaatatttactacttgacagagctattgcatacccttttaagctttagtgatttcagactgttagtg

SEQ ID NO: 25080 - DNA, 201 bp, Bos taurus
attcaggctgacactcctggaaatcctccactggtttctactccccacccccaggtctaaaacataaagaaaacattctttgaaaagtacagttgggtttaaaattgtaggaattaattttatctttatgttccaataagaaaatttcatgcttgaaatgtaggtttcaatgagctatccatcaaagacagtcatcaccta

SEQ ID NO: 25081 - DNA, 201 bp, Bos taurus
tggatccatatgagaaaggataaagaggcatttaaagtcagtaaaatatttagaagcagtgggaagcatccaataaccattttaagtgcttgccatgttccggatcctgccatacagcttaaggtgcttatttatctggtattttttatgcacatacatttggccaggaatagttctagacatgagggatataacagtaag

SEQ ID NO: 25082 - DNA, 201 bp, Bos taurus
attaaaatcatgttttaaaaaggagattagggattttttaaaagctttctatatattacatgaaaaaagagcaaaggcaaattagaaaaatatagtcagcatggttgcacaaatacacaaacatgcaaataaaactctgaaagttgttttctttgagtgatagaattatgggtaattcttattttctcatttgcagttttt

SEQ ID NO: 25083 - DNA, 201 bp, Bos taurus
ccatacccaggtctgcttcatcctagagcctcaaagggtacacataacaatatctttgagctgtttttcagatactgaaaccttcaccaggtaagacaagataactatgaagttgctcagtcgtgtccaactctttgcgaccccatggactgtagtctaccaggcttgtctgtccatgggattttccagtaagagtactgg

SEQ ID NO: 25084 - DNA, 201 bp, Bos taurus
tattttatttcctaagcagtagaagttacttaaggtttatgagcaaaaggatgttgtgactgacactcagagctgcgacagtatcagtaaaatgaaactgctaaaaaatatttaccatcattctaaaagcatttaatttcactagaagatgctgtaatttagttcctcctctgaaagttcccttgcttattcttatattaa

SEQ ID NO: 25085 - DNA, 201 bp, Bos taurus
gattcattttttaaaagccatctctttctgaaactcctaaagactcactgatggatcagtgttagttcagcaagtacttatttaggacatagtacacgttctaggctctgcactcaacactggactggcttaacgggttgttgaggctcccctatctaaaagcccactcaggaaaatatcagatgagagaatttgctcact

SEQ ID NO: 25086 - DNA, 201 bp, Bos taurus
agtgattacttgcagaattctgtggtgcagaaaagctggatttcattttttagcttattctttaaaattactaggtgatggatctttcctaagctttccttaaatgtccttactcatctccattctttaattaaatatatttcactaaaaaacttcatctatgcataaataacaatacattcagcaacccttctatatagg

SEQ ID NO: 25087 - DNA, 201 bp, Bos taurus
caacagtaactgagtaaatgttggaagccagtggttggtggagccagaattctaacccagccagagggactcttggccttcggctcttaactacttattatgctgccctgtaatttgttactcaactggcttataaattagtggctcaagcatttgaacatgaaaccttataaacaatttaaggctacgttggatggcccc

SEQ ID NO: 25088 - DNA, 201 bp, Bos taurus
tttaactgagataacaaagtaagtaggcactgcagacaaaaccatgtatgtgcagaaaatatgaaaatgtatttggaaataagtatatttgcattaagtctagtttgttcatcataatttatgctgtttctaattttatactaggaatgcttttctataggacacatacttaaaagaccaattctttaaatctcttaatgg

SEQ ID NO: 25089 - DNA, 201 bp, Bos taurus
tcaggaacccacccacaggcaattgcatttgtggctggggagctctgaccctctctggctatagctgattggaaccaggtaacagctgtccccagcccaccccccagattgtggcctgaagatcagaagaaaagacacagacacaaccatcaaatggtacggatgtcaatgacataggtcacaaatcaacagtcagtacct

SEQ ID NO: 25090 - DNA, 201 bp, Bos taurus
acatccttgccaacactaatgtctgtcttttctatttcagccttccaaggtgtgtttgaaggtgttgctctgtatttccctaatgacaatttttcatgtgattactggccatttacacgtctttgggtaaatatctattcaattctttgttcactttttaattgggctatttgtcttcatcactgcatgttaaggactctt

SEQ ID NO: 25091 - DNA, 201 bp, Bos taurus
ctgggttgctcagagtataagccctgtgtctgccaggactgttgcaacagctttcttaccggcatccctctcattcttggccggttacatatccattcagcgcaaaataaaggtcatgagagttattcaaggaaacctactagaggttagactaagagttacctgagtgactatgggcccccaaagcaggggactcacatt

SEQ ID NO: 25092 - DNA, 201 bp, Bos taurus
gtgatggttttgtggtgcccatgagaggaggtgagctcagggtcttaccatccttcggtcttgggaattgcttctcttcatagtactaattgaactaggactgttgattttgaattatttgaaatagttttcttaaatttaagttacaacattgtaattctgacaaaaacttgaaacaataaaactggtaaaataatcttc

SEQ ID NO: 25093 - DNA, 201 bp, Bos taurus
ttaaaagctagctcttcaaaactatccagtgaagtcttttattcttttttacttccttctgattcttctaaagcatggggaattttataagtcccctgctttcaattctccatatgacagtttacagtgaaacctgaggcttccgtttcaaaaacagagtcacttttaaagaacaggtgtcttgccattttcagaaatggc

SEQ ID NO: 25094 - DNA, 201 bp, Bos taurus
aagaagaagtcatcaataattgaactcactatccaaacagaacacttgacttatttgtattcctttcctgtgtgtataatttatatagataattatgataatgtaatagtgattatgaatcaaatttgtatcctacttattgcatctgttgctataatgtgaacatatctcatggcataaaaagttattcctaagccttat

SEQ ID NO: 25095 - DNA, 201 bp, Bos taurus
taaatttcatcactgtgctcaccgtatgcccagcacgctaaggcagagtgctaagtggaaccctttctctgtggaccaggggaggtcagaatgtaaataaggcagaagaagatgccttgggaagtgagggaccatggggattagagctgggcataaatcatagctccacagtaaagcaacacagggttttactttggcact

SEQ ID NO: 25096 - DNA, 201 bp, Bos taurus
accttaagagatacatacatatgctctatattttcttgagctggctgtggtattttgcattcttccatacaatctatattcattttaaaattgcaattcactgtagtaagtttattcagaataatccatgatctttaagaattctctacacttatatgccactgtgcataccctatttgtgaccatcttttttaccttaat

SEQ ID NO: 25097 - DNA, 201 bp, Bos taurus
ttaataatatgatcataagcaattgagattctaaaagtgatgtgctaccttaatttcttccaggtaaaaatgcttgtaagactatcctgtaaaaggagcaggccactatgtgtgagaagaatttacttgcaaatcaagcttagccactggtgttattaacataaaagatatcagagctctggatgtctgtttgttaaatca

SEQ ID NO: 25098 - DNA, 201 bp, Bos taurus
cacatgtcctttactcctacattttcataggtgtaaggactgtctccttgaatttatatctcttttaattttcagttgctcagctcattaactttcccttgtccttgttgacatagattgtgattgcttcactaagcaatatataaatatgcataattcaccatgataattaatatccaatttattatggcccaagtttgt

SEQ ID NO: 25099 - DNA, 201 bp, Bos taurus
taggtcattctgatatgatttgataagatcttttaattatcttataatttatatctattaaatcaattctgaatgtctttttagacccaaataaactacaatcctgtagagagcaatagataatatacattagacagatggtataacactataagtttcctgtggttgggagaactgtatgattcagtatataaaacattt

SEQ ID NO: 25100 - DNA, 201 bp, Bos taurus
aacacttcactgcttcaattcaaccccaagtatagcaattgtgaatttttccacaaaaatatgttctctcttctgtctccctttctcttcacaataagtcctaataactcagatactcaggaaacagatcacaagagtccaaattctcatgtattaattctctggctctaaagccaaaattacatgacatgatatcagggt

SEQ ID NO: 25101 - DNA, 201 bp, Bos taurus
tttcagtggctgatactagaaggggtgagcccagacccctctagcacatggatccacatacctaacatggcacacatcaagatgtgggcctgtgttttagaagtagatctcaaggcaggctggtgtcttcagcagttgagccctgcctttgaacttgcctgggggccatttaggtcccaggctcttccaggcaatagcctt

SEQ ID NO: 25102 - DNA, 201 bp, Bos taurus
aacggtgtttacagaccagacggaaggatgatggctccacacagacaacacaatatgtgttgtgcttgagatttcaattcagagttaactgactgttcacttggggctatagagtgatttttaatctcaccaagttaactgagggatgattaaaaaacattttatgcagaattaagttagattacagaaactaaatttagg

SEQ ID NO: 25103 - DNA, 201 bp, Bos taurus
tctttcattaaatcagataagaaatttctgagtagcaggtcataaaatgagcaggaaacacgcattccgcaggaaataactttatgacaagagataaacacgacagtaaatgtttttcttgaagaatgtcagagctcttagaactgaaagtgaaaaattctggttgctcctatcacatcccatgggaaagttcccacctct

SEQ ID NO: 25104 - DNA, 201 bp, Bos taurus
ttgtcctgttatttcagataatctcctcatttaactctgtcaaaatgtggtggaaataatgcctctctttggagacagttgggccacagtcaaatctgtatcctcatttacttttaaggctttgaatctttgaattgcttgacttgatttaacatatttctacacaaactatggtgcttaattttatatatcaatttacct

SEQ ID NO: 25105 - DNA, 201 bp, Bos taurus
tgaaatttgaggatgttaaattagcaaggagaaaaggaatcacatgatacagaggatgcggaaaagcaagtggggcgggcaattagaggtggagtgaggcaggcagagaggctggggctgccaggaaaggtaagagttttcatccatgtgtgccccaaatgaggacgaggtcctaaatgcctgatttcaagtcaagttctc

SEQ ID NO: 25106 - DNA, 201 bp, Bos taurus
ccaatactgttgatggagttaaaaattggaacaatataagagacaactggcaatacctataacgtctttaaaaggagctttccctgatttatcacttctacgtctaaacatactcagacttggctgcatatacacacatgctgcattttttaaattcatcctaaatttttactggcaaaatctcagtaacaacctgagtgt

SEQ ID NO: 25107 - DNA, 201 bp, Bos taurus
agaaagatgatgacctggtttcatctgcatcccaggtcacagccttcccttgcacagcagggggaagaaggaccagcctcaccccatgtccccagaggacgcgcaagctcactcctcataggcagaaccaagcaacagcagcacaacccatctagggagagggctcttcacacactcaatgccccaaacatctaactggca

SEQ ID NO: 25108 - DNA, 201 bp, Bos taurus
ggttcctcacatcaacagcagtagccagagtggccagtttcccaactctcagttctcacagggggataccaagagggccacagattagtagtaggctgacatacgggcaagagtcctggacttaaggagctgaatcctttctgctagatggtcggcatgccttgctttgcttcagagggaggtgctatctctatttctaag

SEQ ID NO: 25109 - DNA, 201 bp, Bos taurus
gattcacatcatttattatgtaaaataaatttacacaagctaacttagagttgataataactgctctgcttatcgtcaagtcaagtgtgactgctacagggcaccctgagaccacctgaacagcaattattgtaaatgggatttctattaaaaattatctgttcaacaagaagctctagttcttataatctacacaattac

SEQ ID NO: 25110 - DNA, 201 bp, Bos taurus
ccttgtccaaggcagcttctcatctgcaagagcagagttaagtgcttgggacagaagcttctggcaagaaaagccaaaattattgcctggcctttactttactgacactgatttagatcaaagttgcagccataatttccagcaattatctaaatagatattttcacttacgtgtcaggagtgtagaaggaatctaaggcc

SEQ ID NO: 25111 - DNA, 201 bp, Bos taurus
atgccagcattggcagctgaacaatagagaggctggcccatcaaatgcctgatacattgaactacagaataggaccccaaccggggtgaggggcccactatgtgcctgacacgtggaacaacaaagaaggaccccaggcaagggagccctctaagtgcctgaacaggctgagctacagagaaagactggccaaagaggcct

SEQ ID NO: 25112 - DNA, 201 bp, Bos taurus
aaaacatgaccttagagtcaaattatgttattgctctgtaattttgaacaaaatcttttcaaacctcaatttcctcacctaaaatgggagcaataatatcttgttcacagaactttgagataatgaaatcaacaacaaaacccaaacatgtccagtgcctcatatgaaaaaagtgtttttcttcttttttgcagaacattg

SEQ ID NO: 25113 - DNA, 201 bp, Bos taurus
atctgcaaccatggtgagccgcatgcaagtcccctaatagcaagggaaggagaatgctttcttagagagaaaaaggaaggtgaaagggctttagtaaacactccatggattgttcactgactgagtccttgccagaaaagaagaggattcattctccttttggtctcagctatcattgcaaagcatcagagctccccctct

SEQ ID NO: 25114 - DNA, 201 bp, Bos taurus
gcaaagtcaccaccaaatccacaaccccatgaaggcacacaacgtaagtgataactgaacaaggactgctcacacaggtaaacctcagatgccccacaaattccacgggggcccatctccccagatagagagcatgtgtgcacacagtgtggccatggtacagtgtggtgctccagcctgggcacatgggctgtgggaaca

SEQ ID NO: 25115 - DNA, 201 bp, Bos taurus
tcccttcactatgtggccaataagggtcaggggagaatctcaatggggtaaaccatttcactatcataaacagatcacagagcactattacagacaggccatttgtgtgcagtagcagaaaatgaccgggtgcaaaaggatacccgataaatgacagggagcgtgctacactggatctatgctggcctctttaacagtcta

SEQ ID NO: 25116 - DNA, 201 bp, Bos taurus
attttcagacaccattatctgtatgggtctatatattcctgatattttgatttcctttgacattttgatcacatgtataaccctgagatgaaatgaacccgaagaataccagacatatctaccaatatctgcattacatagcaaagtatacatccatagatatttgaactctacactcaagatctcagtcatttggtcatt

SEQ ID NO: 25117 - DNA, 201 bp, Bos taurus
cgactggcccccagcccggcccggttcgcccgcacggcgccgcgggcagtgcctcagcttctttctctcccctccagctctgccctccacgctacgttcttagccggccctaccctgagccatgtcgcaggtaaattgtgtttcctttcttctaaatgcagatgtttacacaggctttccttctcctgtaacccctaccct

SEQ ID NO: 25118 - DNA, 201 bp, Bos taurus
tgtacttagcagatgctaccaaaccactttccacacatgtaagaatctgaacagacttgccacgctccctggcaaagggtctggcctgtttccagctctcgccgccctgtaccacctatagatacgcgcgcgctaaagggaagcaagatgcgccctcgtcgctgttcccagacctcagcgccttgtcaccggctcctgtct

SEQ ID NO: 25119 - DNA, 201 bp, Bos taurus
aggagttgatgaaacttcaaggggagaagaggtccgtggaggtggagcactcacgcctgcagaaggagatgtcacagatccagcagcaggtggtggatctcgaagggcacctgcagtccgcacagagggagcgtgatgaaatggagacgcagttacaggtttgggggtgtctttgatgtgtgagggttcagctgaatgtgc

SEQ ID NO: 25120 - DNA, 201 bp, Bos taurus
ccttctgctaacagcaccctggatctcctgtgagggccccttctctccctcttccggcttggtgtttcaggtgacatcatccctgaacccacagttgagcatgtgatccagcctggccaatcagagcttcagcttcctctgaacaattggtttagggaaagccatgtgacccagtctgaaccaatcagagctctccatcag

SEQ ID NO: 25121 - DNA, 201 bp, Bos taurus
gggagagcctgaagtagtgttcccacctaagtgaagtttcccctcctcgaccagcaggacactcaactggctctgaaggcaaggccaaccaagttcatgcagagctcccctgctgcctctctcacaacaagggcaccaagctgcctgcagcttctggccttggaattctctgggtatcctgagcaaagtgaagatgctggc

SEQ ID NO: 25122 - DNA, 201 bp, Bos taurus
catctctgacctatgtcagagtacacattgaagcctgtgaggttgggataggtgcccaggggacagtttgaagtgggacaggcccctgagttgggcctccgggctgagggtccctgtgagcatgccaggaacgtgcaatgcaaggtctacagaaagcaagccagtccctcctgtgtgcttgctgcacccccaggcctagcc

SEQ ID NO: 25123 - DNA, 201 bp, Bos taurus
ttcttttattttaacctgttatctggggagcagtaacacttggagactggattatctgtcactttggaattgactgtaccagggcttgggggccttcctgaataagaaaacaggctcattctagatgccaggggagaaatggcaaagaagacagtcccgggagtcggggccacatggttgcacccccctgtacaggccctg

SEQ ID NO: 25124 - DNA, 201 bp, Bos taurus
gacccttcatcaggagacttggtggtgactcatggctctggcatgagaaccacaatgacccacaagaagaaatttcgccagactttgacaccagttggccacacagagagcctcacttcattgtgtagtgagtgttcagatgcagccagtgacctgctgctgaaataggccctttataggatgtataagcagttaccccag

SEQ ID NO: 25125 - DNA, 201 bp, Bos taurus
aaacatacgattgcctcaatttcgttctttctcaaatatacatacaggctcacattcacatgcactgctgaagggatcaaatttttcacagtgatttcacgtgcagtgattcaaagactgtggaaaccttcccagtctcatagcatcttcctctcaggagaatgcttctttctttaacctatattaaaaaaagcctcatat

SEQ ID NO: 25126 - DNA, 201 bp, Bos taurus
tgcaccagctccaggacctggcctcacccactggtgagtggacaccagcccacagccaccacagcccaacagcctgccacgccaggggctagtccaaccttcagaggccagcaccagacccaggacaccctgggccccttaaccagcccccttgggatcctgggccacccatcagctttgggagactgaggatcctgtagc

SEQ ID NO: 25127 - DNA, 201 bp, Bos taurus
gtgcccacaggctgttcgctggggcaggccctcccccgaaagccatgttttcacctggagacgcagtgtttacaggacggtctgccgggagggaagttggatttgggggccagtgggggcgagggtgctgcttgctctcctgacgctgaggcctttgtagaggcaggtgcgctgctgtccccagggcgttcccacgggctg

SEQ ID NO: 25128 - DNA, 201 bp, Bos taurus
atttttgacctggtgtttatggggttcctctgagctgggtcacaccctgcaagtggcctgcttacccccgcccctcacatgcaccgtgtgccactccaagccctttagattgactatttgagcgaattccctgctctaagtctcccctgttcctatacacagagagaaaggagtggggctagactggacttcagcgtgagc

SEQ ID NO: 25129 - DNA, 201 bp, Bos taurus
gtacactacggcatgaaacccaaaggctcctgtggtgctaaacacagtgtgtaacaatcctgtcaggatgttttaggtatctgccaaccaaagaaaaaagtaacttctcagctagaacctcttccatggagcccttcttgtcaccactctaggcaaactcagctccctcacaggacatatatataagaccaagatgactgg

SEQ ID NO: 25130 - DNA, 201 bp, Bos taurus
gagaagtgactgttcacaatgtttttttaaagctgattaaagatatcctctttttttttttttctataaaaataatatctctgtccaggctcgaacggtagaggtcatctctaggatggcttcatcctatgcattttgtaaagggagttcgctttgtgagcagttctgatttaaaataaataccagtcctgcaaaacttcc

SEQ ID NO: 25131 - DNA, 201 bp, Bos taurus
ttttctgcagtcctattagattggaatccccaggataaaaaggacttttcctctcttgttcagagcagcatctttcatgcctggaatggggcctgccacacgcactcgggaaactgggtcttcaatgatgtcacatcagccccttgggcagaatcggatgtgatattcctgtatcatgatctcagagcatcttcatcccca

SEQ ID NO: 25132 - DNA, 201 bp, Bos taurus
ggattcgtcatctttgggggcccataagcccctcactctccagctccttgaaacccatggggacttggctgacctgtgctggctctgactagggtacctcacctgggactgctgtgatgggccagcaaaaggggtggaccgaggagggatagaggaacccaggttgcaacagcttcacgcagaagcaccagatctttctcc

SEQ ID NO: 25133 - DNA, 201 bp, Bos taurus
tctcttatcttctatctgggcagggccctcctcccctcagttgtcctgctgttttcatcttggaccatcaatccacagaggacaaatcccaactgtttgcgctggggccccataaatctcctgcctcattgcaatgaggcgagggtggctctccccaggggtgttcaggggagggggaaacaggtggctggatgttgggtc

SEQ ID NO: 25134 - DNA, 201 bp, Bos taurus
gtgggatcttcccaggccagactttgatctcgtgtctcctgcattggcacgtggattctttactactgaaccatcagggatgcccaggattaagattcttgaagaaaagtattggcagggatgtgaaaagaaagctctctccacatttttcttggaagttgaaactggtacaatcagcttgaaaggcaatttgacctccct

SEQ ID NO: 25135 - DNA, 201 bp, Bos taurus
ggagtttaatctccaaatgatgttacatggcaacacgacctctctctaatctgtacgattagggaaaacggaaagtctgggcagctctgataaaacggcccattttgcaagtgttccaaacaagagtttctcgagaaagcaaacaaacaaacgagtaaagttggtagatttcctggcctgaaaaggtgccttttacatttg

SEQ ID NO: 25136 - DNA, 201 bp, Bos taurus
tggagaggacttataccaaaaagagtcagcctggctgagtttttgccccatttattgttgttacagctgaagtcacagcaggaagcagaagagatacagtgagagtggagagaaagttacagagagattattcatagaggtgtgggcagggagaaaggcccaataagtgactaaagcagcaggaagttcttacctccctgg

SEQ ID NO: 25137 - DNA, 201 bp, Bos taurus
gaaaggtggagggttgttcagtgggcacagaggttcagtttgggatgatgagagatttctggaggtgaatagtggggatggccatacatcaatgggaatgtacctaatgtcacagaactgtgcacttacacatggttaagggacttccctggtggtccaggggctaagactgtgctgccagtctggggggcccaggttcga

SEQ ID NO: 25138 - DNA, 201 bp, Bos taurus
aattacaaaatggccccattctcttcttatatctataccttttgtgtgtgactttgcaattttcccttcaaaagtagaagtctgttgccccactccttgagtttagcttggccctgggttttctttggccagcagtatatggcagaagtgacaatgtgctaattccaaagccaggtctcaggagacattgcacacttgcac

SEQ ID NO: 25139 - DNA, 201 bp, Bos taurus
ccctatttttcaaataaggaaactgagactctttgaaaatggagcagaaacagagatggggcaagttgcactcagtggcaaggacaggatttgagagactagctactgataaatccaaggtttggtgagataaattcttgtgcagaataagacacacaggagcactcacagctggtacccatgggattccccattaggaag

SEQ ID NO: 25140 - DNA, 201 bp, Bos taurus
gctgatttcatgcctctggagaagcataaaccgtgttctttgtctgaatgtcagtttcacctcagcatagtttctggttctgtctgtcagcttcacagatttcatgtttcaactctccattcacttgtcacctctcttgagtggaggagggtacagagccgactcctattagagacggcagagcagactaaaaggagtgat

SEQ ID NO: 25141 - DNA, 201 bp, Bos taurus
gaaaattgtgaatctccctaaagcattccataatatcctgaccttgaattccactccctagttcactctgttcatttggtattttcatctgggtcacagcgttattatgactgaagatgttccctgagtgcaggacaaggggactttgattccttgtatctttccgtggccagcgcccttgcatccgtcccagaatcttct

SEQ ID NO: 25142 - DNA, 201 bp, Bos taurus
caggatgagtgccagagacattctaggatttctgtctccttggagtgagcaccgcctgactaagcaagtggaatctgatggacaggtggcctctcctaggggcagttggattcccttcactcagaacagctttgggtctcccagaactcacctgtgttcttaggaggcccccggatacagggtgtctgggggcaaaaactc

SEQ ID NO: 25143 - DNA, 201 bp, Bos taurus
agcattggagtttcagcatcagtccttgactggagatcttgtctgaaaattaggtcagtgcagaagaaaatatatctaagagatgaagaaagagagagggtgggattcagagtcctaagaatattgattgaggagctggatcaaactgtacctgaaatcacatccttgacttttcactcatgagtgccagtaaattccttg

SEQ ID NO: 25144 - DNA, 201 bp, Bos taurus
ggtatcttttgcccacgtgtgggtcttctagagcttcagtaaccaggcaccacaaaccaggtaccttaacacaagaggaatttattctcgtggctctgacggccagaagtccaaagtcaaagtgtcagtggggttgtttcctgccagaggccggagaatctgttccattctgtcccccagcttctggtggtgccagcagtc

SEQ ID NO: 25145 - DNA, 201 bp, Bos taurus
gttactatccagctctgggaagaacatggaggtgatgtgaaaatgatacagaataagctccaattatagaacattcagtgaatattcaagaaacaaaatggtgtgtatagaagtctatgtttgtgttaaaaaagaaaaaaaggagggtatgattgctcatcaaggaaatgtacatcaaaaccacaatgagacaccacttca

SEQ ID NO: 25146 - DNA, 201 bp, Bos taurus
catctgcgtggggaccagggaggacttcagagaaagcaggacccagagagcagtgagtcgcggctgccctctgcccaccaggccccacccgccttgccccatgattcatgtgtgaggataaatactggaagtaaaaatacacatgggcgtctggagcgctccctgtctctggctgctgtacacagcatggcccacaggaca

SEQ ID NO: 25147 - DNA, 201 bp, Bos taurus
ccattttctaaaaaagttcaaaagataattagtggtgaattaagcaaacaaaccacaaaacaccaccatgtattcacaattccatcaaagcatgtaagtctggactaaattcaaacgaaataatctgtgacaagggataggtctttctttccactgcacctcaaggaatcatcgttcccttcattctagaatccacagaaa

SEQ ID NO: 25148 - DNA, 201 bp, Bos taurus
aatcttcgcagccatttaaaaaaaaaaaatgaaattttccctctcatactgaggtgtaatcatcaagtctatcattttgcctaaaagattgtttttaatatagccagaatgtttggtggtcaagaaaaacagaaaagtattatttttatgcacaaagtcaagttacagtgtccagagacacagctttcctatagtgtagtc

SEQ ID NO: 25149 - DNA, 201 bp, Bos taurus
cctcagcaaagctcggtcttcctttcccaccgaggcctgccccgagctcgtcgcgacggaagattcttcttcttagaccgaccggaccttaacatctgaagcagcagattcgtcacaggccgtatttccgtctttccttttattgtaggaaatttaatcacaggcattgagcatcaaaggcgtatcgtctccgaagagagt

SEQ ID NO: 25150 - DNA, 201 bp, Bos taurus
accaggcaagtgtgggattggtgggtgggggtgggtgtgggagggggaagacttcctcaggtagcaccgtcgtgaggccggggctggggggcattgaagtcgaggacaggttctcatacctgtctccattcacatttacctgggagtgggcggtggggtggggttgcgccagaccccagatcgcagctctggagccccagg

SEQ ID NO: 25151 - DNA, 201 bp, Bos taurus
ttcctttctgaatccagggcactgggaacagccaggtgccccagagcaaatatgctgagctgctggccatcatcgaagagctggggaaggagatcagacctacctacgcgggcagcaagagtgcgatggagagactaaaacgaggtaagtcatgtaccctggactcccctggtgggtgatgcccttctgctggctgacccc

SEQ ID NO: 25152 - DNA, 201 bp, Bos taurus
cagatgagaaaactgaggcccaaagcagaaagctggctaccccaagggcaccattcaagtccaggcagtctggctctgaaaaaaatccatctgtgtgtgtgtgctcagtcgcatccaactcttcttgaccccatagactgtagcctgccaggctcttctgtccacgggacttcccaggcaagaatactagagtgggttgcc

SEQ ID NO: 25153 - DNA, 201 bp, Bos taurus
ctgacttcacctctctgagcctctgttttctcctccgtaagatgggaacaataacaggagctgccccacgggattgttgtcaaggtcttagcccagtatcaagccatcagtaaggggcggtctggtcctctctcttccatagctcagatggttattaccataaggctgaagaggggagtggcccctctgccagtgacaggg

SEQ ID NO: 25154 - DNA, 201 bp, Bos taurus
acactggcccctgaagcggagctgagtgcatcaggcagcagatgggttcttccaaacagctggtctctgcagactctgacccaaagcgtgtgtgttgggaggaggccgttaatctgatttggggtcacggtcagagccgacagctccaaggacagaaacccgggaacttgagatgttgctcatggtgggctctttgaggct

SEQ ID NO: 25155 - DNA, 201 bp, Bos taurus
ccctcaggaagagatgcctgagcgtgggaagtgcaggaagggaaccctaggaagtttctgtcaggcgccggcatttaataagggggtgtgaacctgtttacatgtgggccaatggctcgggcaaacaagtctggctacatacgtgaaacttttcaccaagcagataataagatattgtgcggccctggaaaacaactcagg

SEQ ID NO: 25156 - DNA, 201 bp, Bos taurus
tgtttaggtttgtaatccattttgagttcatttctgtgtccagttcaaggaaaggacccaacttcattcatttgcctgtttagtcatctagtagaaatggcaacccactccagtgttcttgcctggagaatcccagggacgggggagcctggtgggctgccgtctatggggttgcacagagttggacacgactgagtgacg

SEQ ID NO: 25157 - DNA, 201 bp, Bos taurus
gggtctaaacaatccttcattttcaaacctagtattatttttcccataaacatcctgttggaaaaaaatgggtccccattatactctaagtagtgtccctagagcctggacttggccttgctggctaattgagggacctcagtgacattggctggagtcactgctttcccttaaccactcagtacaggaagtctacaatct

SEQ ID NO: 25158 - DNA, 201 bp, Bos taurus
tgtaaaacagttcaaaatgctttgttctatttattctatagtataaaggggatgggagctatttttaaaagttctgtcctcagaatgctcatgtgcctttgtcagacacccacacacaacctgacttttctattttccgcaactaatcaccaagtcaagctgcactcaagccatcttcctctggtttgtttttgttgccac

SEQ ID NO: 25159 - DNA, 201 bp, Bos taurus
atgtttggtattggtggtagtggaaatttggggggtttttttggttttgtttttcgctttggttatggacttttgaattttctgttgatgttttttaacactggattgaatttaattaatgacaggcagtaacatccaatgaacaaaagaaagggttcgcacagttgtttgttgcaaacctctgtgatctcattcaacccc

SEQ ID NO: 25160 - DNA, 201 bp, Bos taurus
atagaaaagaaaaaaagagtgttttaaatactgttgtcacatgacacccttaaagggcaggagtaacactgaagtatgatgggagatgcagttaggacccgcggatgaacactgggccaggcggaccttacctttctggcaggggtttgtcacagtagagctgcccagagctggactgttctctagctgaggtggcgtaaa

SEQ ID NO: 25161 - DNA, 201 bp, Bos taurus
ttgccctctcgcccaccctggatctttttacctctcacccagagcatttcaccaacctggccagagagagggggccttctctgtcatgtccacaagttcaatagctgtttaacctcagttttcccatcttacttacattttctaatgtgattcagtatttgctccctccataggggcatgagtttaggggagaaggggaga

SEQ ID NO: 25162 - DNA, 201 bp, Bos taurus
agtgaataatgctagactggtctctcttccaggactccgactctttttcttcaaaagagcggtctccattggcttttcctgggatctgggcctggttccatgggctgctaggagccaaaactaacaggctccagacggacaaaggttcattgaggagccgaggcgtggggagcggccccgcgtgaggcacggcaggcggag

SEQ ID NO: 25163 - DNA, 201 bp, Bos taurus
tcccagccaccattctggtatcagttcccccggccctcctgtcccctggtccccactgcgcagactcaacaagccagatctccaaagcaatgaatggagtatcctaacctcccacctcccaaccaaacccatctccccctctcctccccaacactcgccctgccctcaacctgctggccaccctggccttcccagccccgg

SEQ ID NO: 25164 - DNA, 201 bp, Bos taurus
tcttattttaagtgggattgctcaatttttaaattttgccatcaagttccaattaaaaataaaaacaacactgggctttggggccacacccgcacaccacatgctggatctagtttgtctgcaacctctgtggactgtaattctcagcttcaatgcctgtcttgcccatgagctcttgggagtctggagtgggactgggcc

SEQ ID NO: 25165 - DNA, 201 bp, Bos taurus
cttcatcttgaagagcaaccaacacatctctgcaagccctggaggcctggcaagcccccgttctctgtcctacctaccaaaggtccccagagaaatacccgctccctgtccaggaagggccggagccagacacaggctctcagcagcaagcctggctgagcagcagcttctaatttcacagttcactgtgcccacagccca

SEQ ID NO: 25166 - DNA, 201 bp, Bos taurus
ttattttacctagattgtgtgtatttggggtgtctggggtcggagggaggaaggagtttgcggagaaggagcgttgccttaacggagccgaagccagccatggcctgaaatgctagaactgacattgaccatccagcaaggtcgccgggcagggcggggaagctcagaaagggccctgtcatctcatattgtcattattta

SEQ ID NO: 25167 - DNA, 201 bp, Bos taurus
gtaaataagaacctgtgctcccaatgcagggggcacaggttcagtccctggttggggagctaagatcccgcatgctacctggtgtggccaacgaacaagcaaacacacaccctcttttccctatagacgtcctgcccagatcctcccactgtggccttatgggattggactcagtggtctgctcacccgagtgcccttgag

SEQ ID NO: 25168 - DNA, 201 bp, Bos taurus
tccactcttgaaacaatcacttgaatagagcagttgatgcccagttgaccagacttgagtcatagtggaacccctaaagctgacagcatggccagctccatggagtcccctttgacacacaaggattgattcctgacgtgaatcaggctgctgttatcatactaaaggaacttggatggattcaaggccggctaaagaaaa

SEQ ID NO: 25169 - DNA, 201 bp, Bos taurus
aacaataaaccgcccccactgtgaatgcatgtgtgtgagcatgcgtgtgtgtgtgtgtgtgtgtgtgtgtgcacatacccgctaaaggccctgagaactgcttcctgtcagttacttgcaactgacagatttctaacatagaaataagtcatctgcactcttatcatgggtgataaacaccgtggcccatccgccactgat

SEQ ID NO: 25170 - DNA, 201 bp, Bos taurus
caggcactaagccaagcactctacttactatagtgaatgtattaatacctttgtcacttggcatccattttgctggcttctgggaaatctacctgaaatttcctttgggaaacacctttcctaactctccgtggtttgaatggggctgtgacctctcccaggagagggcacctgactcagtcctggccaatcaggacagtg

SEQ ID NO: 25171 - DNA, 201 bp, Bos taurus
atagtccatggggttgctaagagtcggacacgactgagtgactttcacttccttataaaggttaccttaaaatacatagctggatttaaaatacatggccattttgttattcccatttggtgggtgagaagttgactcactttctcaaactcacataggcaggaaatacagagctgagattggaaccttgtttgcctgcgt

SEQ ID NO: 25172 - DNA, 201 bp, Bos taurus
atgtaaggaaggtgcctgagaagtgagtgggctcaggtgacacctgcaggactcatttctctggcttcatttttgtgtcatctcatggaatgagaggaggaggcacatgaaaggagatctttgttgatcaccaagtctagatatcttagacccttagagttaggactataatttaagtccatatcttaggtacaaattagg

SEQ ID NO: 25173 - DNA, 201 bp, Bos taurus
tgtggctggcgaatgactgaagagagtagaaggaagtgaggacagaaataagtcctgtgggcccttgacattgagatgagcagtttggccttgatgctgattcaggggacagctatggaagggttttgagcagaggagggacaggatgtgccttggggttgacaatatgcctgtggctgcttgtggggagggctgtacagg

SEQ ID NO: 25174 - DNA, 201 bp, Bos taurus
gctttccagttcagcttaacaccaaggggtgttttagctggctatgggatgtgttcctatctcctctgtggagcagttagaattggggaccatgggtctgggatgtgttaacttcacttttccagtgtcagctcagagctggttcaggtgttcattcagtaaaggtttgttggatggataaagaaggaaataataatgcct

SEQ ID NO: 25175 - DNA, 201 bp, Bos taurus
caattaaactgtttacaatgatcaacatcttagccacacacaccccagaacctcattcctcattagctgggcctgtcttccttgccgttttatctagcagttcttgacagtgtactgacccagcatcaaaatatgcctttcttggaaatgcgactctaattagaaatggctgataaaccttcattgaaatgagcattcttt

SEQ ID NO: 25176 - DNA, 201 bp, Bos taurus
ctaatgctgatatgctttgaaaagtgataatctcgcttttttaacatagcaaggctgggctcagagagagcatccagctggccacagaatctacatctcaactttaatcacagttttgttttgctatttttatttttactagaaccttctatttatggcaaaagaggttgatttttctatttattatagtgtatcaagttt

SEQ ID NO: 25177 - DNA, 201 bp, Bos taurus
ggtgggctgccatctatggggtcgcacggagttggacatgactgaagtgacttagcagcagcagcagcagcctacccccactaatcccacttccttacactcttcttcttggattttaccttctagtcattgacacacattaggaaacacttggttaactctttctctctgtttttagatgcattgtctcatgggacattc

SEQ ID NO: 25178 - DNA, 201 bp, Bos taurus
gaagcttgcaggcatttatgagtggtgtttttaatacggtgctggaatatttgccctataaattcttaagaacagacttatagattgcctattaccagcactatggactattaataaatcagttacaggcacgtatttttttttttgaaattgcattttccctttatgttcacattctaagcacctaaaaatcagagagag

SEQ ID NO: 25179 - DNA, 201 bp, Bos taurus
tggtggcatgcatcgtctacttacattctatttctcacttcccacaatttcatgaaaagtttcagaattgattttggtaggccttaattggcaccacctgggtcactgactcatcctgaaccaatcagagaggacaagagatatggacctctgattgactgggcctcagtcatgtggccatttctgaagccagaattcaca

SEQ ID NO: 25180 - DNA, 201 bp, Bos taurus
ccagggctctgctttgaacagcatgccttcctccagctaacatgacctctcctctgagattcagcttagaatcctcctcccagaaaccccatctgagctgccctgtgtcagcgtgtgaacaagggatgcatgcttcctgacagttgtctgtctccatgactttgctctaaccccagcggggatgggtgcctggtctgccct

SEQ ID NO: 25181 - DNA, 201 bp, Bos taurus
tctaggctggaaccacaaagttcctatcaggctttaactggggcactgctttcctttcctcccatgttgtgggacatataatgtgactgatacagtcttacgagtctaccagcccaccgtctgtaccctagtttacaggtggggtaggtcctggtactcaaagtgcatggatgcatgggaaaagcatcactgtaaattcaa

SEQ ID NO: 25182 - DNA, 201 bp, Bos taurus
cagctacagtccatggggtcacaaagagtcagacacaactgagcagctaagcacagcacagggttgcctgtagttttccagtagagcatgggtttctgaagccatcgttagaagaggccccaagttgctatctgagcactgggttcagccatcacttctgctccagatctgttttttcttggccacgtcatggttcctagg

SEQ ID NO: 25183 - DNA, 201 bp, Bos taurus
ggatgttgcggagtgtttttaaagcaggagtattttgatggctgccaaggcaacaacagttcaaagaaatgtcagtttatctgccctaacttcccaacacgatcaaagagctggtggcttcagtgggtgccagcatccactcccaccacccatcccactgcccctggccagaccgggaagcactgtattaacagtgaatga

SEQ ID NO: 25184 - DNA, 201 bp, Bos taurus
cctgccttgcaacctcagaaaccttcacttgctcttaaaatggtctctctctaaggaacacgtctctccccttctcttgccccatccaaccctgtttctgttgaaactcccacccatggatggcagttagctctatgttgccattttagtatcacggtaaaaccctttgctcaacctcagtaagaatatctttggagtcaa

SEQ ID NO: 25185 - DNA, 201 bp, Bos taurus
ctgaggaagcagaagacccattaaccataatcagatggaaagttccgcctctgcaaaaataagcaaagtttcacagcaaaggcttggctttcctcacgtttgagtgggtggcgttcatgttggagaaacatcttaatgcagagtcctcaccagcgctgctaacaacccacccacccacccaagggtatgaaagtttgctgg

SEQ ID NO: 25186 - DNA, 201 bp, Bos taurus
caaaagtaaccgagccgcagagaaccatgagacatcatctgagtgggccaatgtaggcattataggagtcccagatgggaggagagagaaaagggagtaggaaggacacccgaagaaatgaaggccaaaaactctcccaaattggagggaaaacattcatctgcatagcaaagaagctcaacaaacaccatgaagaataaa

SEQ ID NO: 25187 - DNA, 201 bp, Bos taurus
tattttgggtgctgacaggccctatgagtctgtcatgagcagaggtgggagagaatccgtcagtgagactgtcaccttccaataggtcaggttcctcatgtggagtccagcaggccccaccagggctcctggtttgcagatcgccggggaagagtgagtgtcacaactgttcccagtcagagcctgtgctcagcggctctt

SEQ ID NO: 25188 - DNA, 201 bp, Bos taurus
gaatcgataggaaatatcttgaacttactttacttttctctcaaaatatatgaatttcatatgaggaattatatagtatttgcaggggttattttgcctcacagttgagaaaagacaaagacttttcagatattttgtttaaggtgataattatgacattgatgacttctataacaacttttttatggtaaaaataatagc

SEQ ID NO: 25189 - DNA, 201 bp, Bos taurus
agggatgtatcatagtttggttaaccagtcctttacaaatgggcattttgtctgtctgtagttgttaactattacaggcaatgctgtaagtgttatctgtgtagtcttagaagtggcaaaagcctccttaggtcatcagtattgtcctccttgccctcttgtttcttgtaatcttaggggaaaaaaaagaattttatagct

SEQ ID NO: 25190 - DNA, 201 bp, Bos taurus
cagcaatggtggggaaatcatctctggggctggaacaaggctgtatcctctttgtgctcatttctccccgccccatctcccctgtgcacgtggccttgccccccctttacaaagatggtgcagtggttaacagtgtgagcttgagtcagtacttgttgaaactgagttccaggcctgccagtaacttgctgggggatggtg

SEQ ID NO: 25191 - DNA, 201 bp, Bos taurus
aaaggctctttgagttgtgaggccttgaggaggaagacttaggggtgttctcgagctgtgactaatggggcatgaaggtactggactactgggccaaagtcgggggttcatgctagatttcgtagtgatgtctccatagctgctgtttagtttagtcttgatggatggcctactgtgtttctggacctagatctgagtctg

SEQ ID NO: 25192 - DNA, 201 bp, Bos taurus
agtgtcatcatttcctcctcaatcaggtaccatcctgcgctgttgtgagtaacccctccttcttgagaaatggtcttctcctgactcaggcaccaatatccagactttgtcttttgttggcccagagggcttagggaagtgctgaggccacaggggtttggcaaggagctgggtgagaatcctgttttaactgcctaacca

SEQ ID NO: 25193 - DNA, 201 bp, Bos taurus
ctttggactaaatttgactttttccacagtccctgaagcgtgagttctgtagtagttttccacaagtctgatctgaggaaattagatcttgggacacaaactgtgagtccaaagaatcccctcaggcttgaatcatgtaaaggcgggtcatggaaatctcccagattgctcctgtgttctcagatgccctcgggactcaag

SEQ ID NO: 25194 - DNA, 201 bp, Bos taurus
cctcacccaggctccccagctccagactccctccctgggaactttagaaggatgccttcagcctctgctgactcagcgggtcaacagggacctctgacaccccctggcctttacagaaaccttaaggaggaaggggagagtggctcggagggcaggtttaaaattagaagggagcgcaaggctgcctgtggttcttgaacc

SEQ ID NO: 25195 - DNA, 201 bp, Bos taurus
gaatgaacgggggtcccttagaagaacagaccctgctgtcccaagttgagggaagcattcagaaacccccaattctgatttcaaggaacaagccagaggacgaggaagaggggcagggaggaggcagcctgtggttgaacggctctatctgcccatcagaatgtttcctgggggtcccgccaggaattcaggcctgtgggc

SEQ ID NO: 25196 - DNA, 201 bp, Bos taurus
tgccttccgagtgcctggcaccgtgccaacctcgctcctgtgctacctcacccatcctccccatcatgctctgaggccagtaattactatcacggcattaacctcagagcctctgtgctctcagattcccatgatgtcacatcacagagcaggtctcagctgtcacttccagtcccctagcagaggccacagatacacggg

SEQ ID NO: 25197 - DNA, 201 bp, Bos taurus
ttctcactttgtaaatggtgctaagttcctgaaagcagttggtgcttggtgagcaccccatgggtggcaacgaagtgaatcccaggaggaagtaaagagacggctgctcatttaggtgaaggtttgggaagacagacataaggggaggggactgtgcaacctcctgcctacacctgtgattttcagagtcagactagtgag

SEQ ID NO: 25198 - DNA, 201 bp, Bos taurus
atgcacacaggagcctggcaggctacaggccaagggatcgcaagagttgaacatgactcagctactaaaccaccaccaccaattattaattaattaatgacaaagcctgtttgagaccccaagaactatagcccaccagggtcctctgtccatggaattctttaggcaagaataatggagtgggttgtcatttccttctcc

SEQ ID NO: 25199 - DNA, 201 bp, Bos taurus
aagccccctgctgcccctccccacagggccctgagcaccccaacccaggcaagaagttcactgcaagaggcttcccacgccactgctatctgcccaacaacgagaagggccggaaggtgggtgccgcaggggcaagggtgtgtgggagcaggccggggccccagcactgaccatagccatctagtgtgcgtgtgtctagcc

SEQ ID NO: 25200 - DNA, 201 bp, Bos taurus
atcgtgatcgtcttcaagatgtggaaactaaggcttggagggagctgagggatttgccagaggtttctgtgtgccttcatttcctttgcaggatgggtgggtgggtgtcctcctccttgcggggcccagaggagcttgggagcttgctcaaggtcacagagctggcatatagtgggaccccatgtctctgcccccagtgcc

SEQ ID NO: 25201 - DNA, 201 bp, Bos taurus
cctagctccctgaccggggatcaaacccacattctctgcattgggaggtgaatccagagaattcttaatctctggaccaccaggaaagtccctaaagacccttttaaaatcaccactctgctcactgaaattctctctcactacttctggggactcatcatgcatttccaaggagtctgtttcatcaccctgctcaatccc

SEQ ID NO: 25202 - DNA, 201 bp, Bos taurus
ccatgcacgccgaaaacatctgctgatgggataggtccctttcacccccgctttggcatctcactgatgaccgtctgccatctttgacttcaattccggtactggccccttttcttttctcaacagccttacagatgcagtcatccacctggacaacctgatgaggttatatgccccatttctccttgtagccctggaaga

SEQ ID NO: 25203 - DNA, 201 bp, Bos taurus
gatctctgtctctcctggatcattccatgctgtgaagtcatgtaggtagcttatggaaagatccatgaggcaaggaactgaggcttctggccaaaaaccatgtgaatggaagtaaatttttcagccccgtcacatcttcagagattacagtccatgccaccctctgactgcaacctcatgaaattctcggccagaaccacc

SEQ ID NO: 25204 - DNA, 201 bp, Bos taurus
aaaaatgataaagatgttatgagtaaccattaaattccttaaatgagcccacagtcatttgaacacaaatatcctcaatctttcttattttcttttaaattcctcatcttttaaaaaggcagtctgccatttctccactgcccaaccctaaaatgaccaactatttaatcacagtcatttaaagcaattataatagagagt

SEQ ID NO: 25205 - DNA, 201 bp, Bos taurus
agccagtaatatcttacagttggcttactggttttagatattccagtgtgcccttgcccgttaattttaacctcgttgtaacccagggaggtatccttgtcggacagatgatgaagtaaaaacctatagaagtttggcaacaggactgagatgatgccgctggtgagtgccagagcctggtttcggagcctaggggtcttt

SEQ ID NO: 25206 - DNA, 201 bp, Bos taurus
gtttgtggtatgtttgtaggatagtttagttcccagacagctcatgtctcatttgatcttcctggacattttccttcgtggccatcgggttctgatgctatgtcacagaatcgcccagcaggaagctggtagtgagatgctctcagcctgcagggcaccctgttcatgtctccacaggcaagtctgtggccagccctgcct

SEQ ID NO: 25207 - DNA, 201 bp, Bos taurus
cacttaaaaatgtgactgtatttgaagacagggtctttaaagaggtaattaagtaaaatgaggatgggccctcgtcgttaggacgggccctaatccaactcactggtttccttcgaataggaggaaatagggacacagacacacagagaaaactatgttagatacagggagaagtcaagtacaagccagtgagagaggcct

SEQ ID NO: 25208 - DNA, 201 bp, Bos taurus
cctgaatgatgaagcatcagccttgggaaaggcatgttccagtgactgggaaaaatggttcaagtgcctgggacttaccggagtggaagaggggtacagattgagatagaaggtggagtggggattagagcaatcaggaaactgtagcctggggaaggaatgagatttctaaatttagtgggaagttactggaggatttca

SEQ ID NO: 25209 - DNA, 201 bp, Bos taurus
agtcaggacaacatgcctacttgctctttcatgttctctgtaactttctggatcattgtgaacagcttcagagtctaaagaaaggattatttagaaaagaccctcaatgctgagagaagataatcaatgttactctagtgacaggaaatacagtctatagaactgcagagaaccacttagaggatattgatgttttggtta

SEQ ID NO: 25210 - DNA, 201 bp, Bos taurus
aatggccaatcaggtaaatgcttagactggtgcgaaggaggtgcacagagaataggagctgtgactcctgcaagtgcccgtgcagtgaatgagcccctgtgctcattttccggcccctccccaggccggaagaagaaggggaagctcaaagaagggcagcagctacacttgttgtaaaaacaaaacgaactctttcataac

SEQ ID NO: 25211 - DNA, 201 bp, Bos taurus
agtgggcagttgagaagaaaagtccagtgctctttgcttccagatgggaattgggggagatggggaagagggtctctccacctgtggccatagtggtgcagtagatgagaggcgcttccattcccacaggcatggagccatgatcagctgtttcctgtctcctggccttgactaacgcttttccaaccacaaggaacaagc

SEQ ID NO: 25212 - DNA, 201 bp, Bos taurus
gcaagccagagcagggaaagtagcactgaggggacgagtctgtaagaagcaggttgtggggaggtgaggagcggagaagggtcacatcaccagcccaaagagggcctctgtgctggagaggcttccacctcctttgctcctgagacccctcagccaagtgtctgaacaacagccctttgactgagttacattttgagggac

SEQ ID NO: 25213 - DNA, 201 bp, Bos taurus
ggttgtagatgctgccattgtcaaacacctgctggatgaccagcccgaaggagaagggggagatgttcagcatgttcagcagcgtggcttcgctggcgcccactttgtctcctgtcttaatcagctgcacatcactctgaagaacaaggagttggcagttaacccctggatgtccggcaagtccaaggccaccgagtcccc

SEQ ID NO: 25214 - DNA, 201 bp, Bos taurus
aaccaggtccttcctgtcacacaagcacatgggctcaccgctggggccagcgggcccgggacactgaaatctcaggtcccacgctcctgtggaaaagcccctcaaaaagggccctgggctccaccccggctgagcccgggaaataatttgccccaacggaggctctacacctgactgggtgtcccagagatcggcctcatt

SEQ ID NO: 25215 - DNA, 201 bp, Bos taurus
taactgagagactgaacagtcacaactagccccgctagctcttatgttaatagctgtagtaaaaacaacagcgataataataacaggatccagaagtcttcagacactgactctgggccagcacccttgcttcatttaatctcttcacatccctgtaaataatgatgcaaacactcttattattattgtttctactttgca

SEQ ID NO: 25216 - DNA, 201 bp, Bos taurus
agaagatgggagaggattacgaggtacaaactactatgtgtgaagtaaataagctccaaggctacacagtgcaacccggggaatacagtcaatgtacagtgattacaagtgggatgtaaccttcagaactgtgaatcactatgttgtacacctacaacttacataaatttgtatatcaactatacgaaaataaaatacata

SEQ ID NO: 25217 - DNA, 201 bp, Bos taurus
aaattaactacacgatgaccagactgtacccaggacatacaccgccacaattccaagaactggcctcaaagaagtgtgaacaagtggaccccagaaccgatgatgaactgtacttaaccaagatgacactggtcagaccactgatgaccaatctgaagatgactgtcagagctgactgtgctgtttctgcatgtagcctcc

SEQ ID NO: 25218 - DNA, 201 bp, Bos taurus
cggtggcctcacccagccttgccctgggctgcgatgagaatccccgggtggttcccgatcaggctctgagcactgccgctgcctagaacgtcctctttggcccagattttgtgctttcactgctggctccctaactgagggctggccctggagtcaggcctcagctgctaccctctacctcacttgatcccacagggcttt

SEQ ID NO: 25219 - DNA, 201 bp, Bos taurus
tcccagctgtcctccctttcatcattcaagtggctgaagtctgaccacatttgcaatgtaggtaggagtattcttagagctcagctctgaattcgcagctctcctaattcatgtcttactcttcaccctcatttttatagaaaactctttactagaacttcatatagtactaagtactacataatacataaaatgaatttc

SEQ ID NO: 25220 - DNA, 201 bp, Bos taurus
atgctcagaggtggcagggaagcacagctgaattcaggctctgaggctgaagtccttgttgagtctgctcaggagagacccggcccttccctgtctgttctctccatgcccagccctcagcagggagctctgacccgtgggctgtctctggtccccatgacggcctgctgggggggtcacagaggcgggaaaggaggagaa

SEQ ID NO: 25221 - DNA, 201 bp, Bos taurus
gagcttcccttccgagggctgccattctccccaggtcacaccccactgctgatccagccctggggcagctccaagcctccgggcatgagaaggggccctccggttttcctctgacctcccaggtccctgatcctggcttggacccagtcttaggtcccctctgaagcttcagttgagaagagcttgggactctggaggacc

SEQ ID NO: 25222 - DNA, 201 bp, Bos taurus
ggtggggtgacctttcctctccggcaaaagccccacccagggccctgccggagtcctcacaatcggcccccgatgtccactctggcaggcaggccggtctagacaagttgtgtgcggagggggcggggggaagggaaggggcagacaaggatgcttcaggatcccccacagcccagggcctctttatttccaatccggctg

SEQ ID NO: 25223 - DNA, 201 bp, Bos taurus
gatcgcggggcggggggagacacggagaccgacaatgaacaccccaagccagttcagctgctggtgacgcctggcatcagggcacaggccttggcgagccaccgagcacagtgccttaattattccatccataaatgataagcctcgttcatttccaggccttcatgacaaatttatggccttaatgtgctcgctgcctga

SEQ ID NO: 25224 - DNA, 201 bp, Bos taurus
gtatccgggggagtgatgttgacaataataataacaacaccataacagcactggcctgtcaccgaggttgacaaagtgcgggctctgggcctggcagcctttggggaatttcagctctacagtcagcggtgctgcctttgtgagccggttcagggaaaggcggggaggcctcgagctcactctaatacccctcttcctcac

SEQ ID NO: 25225 - DNA, 201 bp, Bos taurus
cgggcagttatgaacatgggatctgaaagcaggcgagcctgggtttgaattctggctaggacacttcttgattgcgtgtcttggaatgaggtctttcagctgagcttcagtttgtgtgctgagtgctgagtcgtatctgactccttgcgaccccgtggattgcagccctccaggctcctctctccatgggattccccaggc

SEQ ID NO: 25226 - DNA, 201 bp, Bos taurus
ccagccctaggccccctcagctcaaagtgagttcctcagtcagcagtgccagcatcgcctgggtgtcacttacacttgccaaatccaggcctggcccagctggtcctctgcaatcagaatctgatctgagtatcaccaggatccccgagggacttgtacacatgccccagtttgggaggcaccaggcctggtcgtcggaag

SEQ ID NO: 25227 - DNA, 201 bp, Bos taurus
ctttcttacagtctgcaccgcccacttcctcctcttggcctccttccgagccagggctccacgccagtgggcttcgagtgtaatggctgaaagaggtcactgctggcattagaaggtgagagcaatcccttaaatacaagagcctcttcaagaatgacgcaccccctccacaaatgcctggacgccgctgcagcactccgc

SEQ ID NO: 25228 - DNA, 201 bp, Bos taurus
aggcctgcggaactctcaaaagcagcaggagaccttcaagaaccttgctacccaaggtccaggaaccagcagcctcagcaccatctgggagcacttagaattgtaccatcttaggccccattccagacttactgaatcagcatctgtcttttgataagattcccaggttaaaatatgagtatagcagaatgcacggcagac

SEQ ID NO: 25229 - DNA, 201 bp, Bos taurus
tttgagtaacttctatcttatttctattgaagagcattgaaggaggaggatccaattttcagtccacagcaaggcttcatctctctggctagggccccctgtatgttaataacctttgtcccagtctcgtgggatttgtaatctctgccttacttccctcttgtaggcctgttatgaggttttagtgaagtcctagagtta

SEQ ID NO: 25230 - DNA, 201 bp, Bos taurus
aggccgagttctaaagggggcagcacgtgaaattctagactcgggattgtggcaacaggggcagctcagctttccagttctgtcctggtggctcagaatggaatcagatgcctccatgaggccaacctgtccctttgggggagggggacagggagggagggagggagaatgtgggcacgtgcaagcacgtgcgtgcacacg

SEQ ID NO: 25231 - DNA, 201 bp, Bos taurus
tgccgtctctcccctgcacaggtgcgctggccagggtccaggtgttcgggaagtggcacagtgtcccaaggaagcaggcgacctacggcgacactgggctaacctacacgttttcaggcctcactctgtctccgaagccctggatccccgttctggagcgtgtacgggatcgtgtttctctggtgactggacagaccttca

SEQ ID NO: 25232 - DNA, 201 bp, Bos taurus
tgtcaaagtcacttcctcctgttcaaacagaagccctgtaagacttcagcacgttggttcccagaacatctgatcataacatcttataagtcaccattatttattttgctaatcaggaatgatcttgactgaagaggccatcagaggtcagttcactgactggtgaggaaactgaggcccaaagacttcactgatagcaga

SEQ ID NO: 25233 - DNA, 201 bp, Bos taurus
ctgattggagcccacggctctaggacgtgcctggaggaatgcttttgggttcagcccacactaggcaatgctgttcctatctctgggcctcagttagttgccttatctgaaaaatgggataataatagcacccacctcgtggggctcctggaaacatttggtaagacgtatgtaaaaagttccaatactttggccacctct

SEQ ID NO: 25234 - DNA, 201 bp, Bos taurus
agactcccttgcagttaggggtggctgcagccatgtggccgcattctggccaatggactctaaagactcctccctggtggccctcatgctctctccttccgcagtcattcactggctcctggcaacattgaaagccacgagcaggatgacagagccatgagatggaaggaggtcaggcccctgaaatgccacccactgatc

SEQ ID NO: 25235 - DNA, 201 bp, Bos taurus
tcacacacacacacacaacttgggctggaatcttggcttcatcacttactagcattgagaaggtgaggaagccacttaccttttctaagctgcgggttccacactcataaaatgggatgaggatgacggtactcgctgctggagttgtttagggggttagttcacgtaatgcatgtagagcacttagccgggagtcaggcg

SEQ ID NO: 25236 - DNA, 201 bp, Bos taurus
catgtgctctttttgcgccagtggccgcaggacggattcctctcctccgactgatcaagcctgggagggcagagtgtagagtcagccctgtgagagtaaaggagggggcccagaggagagtcgaggcgaaacgtccagacagggaggtggaactccggccaggaaaccacaggcgtccaccttgacagcctgagggcgctg

SEQ ID NO: 25237 - DNA, 201 bp, Bos taurus
tcctagccttgtgaagtcctagctccctcatatatatcagtcaggatcaacaaggtgctgtcgctgtaacaaacagtcctaaaatctcagtgatttattacaacaaaaattacttaccatgcatgctgtgtgtccaccatgcatcagcaggggtctttactttttctacattcacgggcctggcagatggagtcaccacca

SEQ ID NO: 25238 - DNA, 201 bp, Bos taurus
actgcgtgggccagcagctgccttcagaatcatcctgggtgtttgctaaaattcacattgctagaccccaccccatacctacagagtcagaggttggaacggaggtgggccgaacttggctttttttttttttttttttttttttgcgctaatgcatttgagaatgccctgctcctgagccctcaaaactgcaatacattg

SEQ ID NO: 25239 - DNA, 201 bp, Bos taurus
gtacctgcctccaaggccctccggggcaggacacaggctggggttgggagcccggctccgatgcgatgctgaggaggctgtgtttctaggtgatcgtgtacgaaatggagaacttccagggcaagcggtgcgagctcacagccgagtgccccaacctgacggaaagcctgctggagaaagtgggttccatccaggtggagt

SEQ ID NO: 25240 - DNA, 201 bp, Bos taurus
cccgttccactggccagaatcaaacagtctcacagacagagagaaaactctacaccacccaaaaggggagaggaaaaggagtgagcacgtattgacccatatttccgtttactacctgcaggccatagacccttttggagggctgtgggtggagcagtttaagaactggattggaacctgagtctcgtatggtgatttgca

SEQ ID NO: 25241 - DNA, 201 bp, Bos taurus
ctccagaggatcttcccgacccagggatcgaacccacgtctcctattggcaggcgggttctttactgctgagcaaccagggaagcccatcatttaatttctgcctggtatttcggggtccatgctctcttcaagcctttatcacccacaagagcctctcctccaagctgcaatctgagaggatcgacttggagaaacaaaa

SEQ ID NO: 25242 - DNA, 201 bp, Bos taurus
ccctttggcaaaatgtggcccatggaacaatcagccagcccccgtgggtgttgaatggcagcgaacagatgttctctggagcccacttgacaaggaggcaggtgggaaggagggacatcctgggccctgcagggggcggaaccagcctgtgtgatttaacctgtgcctgtaaaatggtaaaactccatccaccttctccat

SEQ ID NO: 25243 - DNA, 201 bp, Bos taurus
gtgcagcgggtagagacttgaatactaatgatggactgcctgggttccgatccccgggtggacacttgggagcagtgtggccttggcctgattgtgccagttttcttggctgtgcctccgtttccctgtgccagtatctactggagtgccccgcacacctcaggaggcgtgagtgggccccggagagcctctctcaccatc

SEQ ID NO: 25244 - DNA, 201 bp, Bos taurus
aacccgcatcctgggctgcggcgagaagcgggaaggatgttgatggctctgccctcgcgttccttcccgcctgtcccagcctgtcccatttgtcactgccggtgttggtttaaagggccgtgtgttgtttcgtgtgaatgatttacacccttggccggtgcaccggcacgtccagatcaggatcaattaccccgccaatgg

SEQ ID NO: 25245 - DNA, 201 bp, Bos taurus
tgtatcctttaccagtgtcaattatacttcatccaacccaacacacatgcatagttctgctaagtgcaagcaccaaatgcacgcactactaagctataacgctagtaagcactactagtagtactaagtgccagctcaagtaccaagtgctactacttgggagcactactgtgaatattaagtactgctacttagcagcac

SEQ ID NO: 25246 - DNA, 201 bp, Bos taurus
ctcccccgaggcccagatggaggcacacaggctccgttaatagcttggctggagggcagatgaaatctggttcttcccagagcccttccttagaggatacagcaggtgtggccaggggagaggcggcactgggggaggagggtttgtgtgactagtttaggtaacaaggtggcgaagcccacctcaccccgtctccaggac

SEQ ID NO: 25247 - DNA, 201 bp, Bos taurus
tgtagggcctcacgcacgagtcctaagcaagccttgttacctctctgcttgggtaatgatttccccaggtctcacagtgcttattatcgaagtcacaacagacaatcatgggcctcctaattaaaaaccagtcttcgtttggtccctgcgcttgggactgcagcttggcattaccttatccaagatggaaagctagttggc

SEQ ID NO: 25248 - DNA, 201 bp, Bos taurus
taagagagactgtaaaaagaaagagaacttagacaacgaaggctccttgtctcacagaaagccccatccctaccaaggaatgtttctggcagatgcaggaccgaaaagagattctctggttaaacaggtttggtgagcattgtaaagaaagaatgaagcgactgtctttcctgcagggcaggttgccgtccttagcgtgtg

SEQ ID NO: 25249 - DNA, 201 bp, Bos taurus
ggccttcagcaagtccctgttacaagtctgggcctctgtgaaataacacatttctaggagtccttccagctcggagatcaatggctttcttgcctcattccggactgtcccaggcctgactgctgggtgattctgatgactttggtttgtctcctggaccctccaggttttttaatccccctctcaatgttcacagtgcgt

SEQ ID NO: 25250 - DNA, 201 bp, Bos taurus
aaagccaataaagttcccaggaaaagtaatgaattcaagtcactgaaggagcaccctgataccacctcagcgagaggtgcccaggctacagcttcatgtattccttggtggacatgaactacctgaaaaaaattaagaatcgccaaggtctacacatgaaacagagacacggaaaaaactttacctatcactcaaaatggt

SEQ ID NO: 25251 - DNA, 201 bp, Bos taurus
atcttctccacaatttccagtttccttaaacttgaactgcccatgatgcttggagctgaaagcaaataattccaaatgataggttttaatgctaaacttggacctggatccttattttgcagctactttaatatatgtcttttacctccctttctggggcattttattcctgttttagagatttgggggatacttaagtag

SEQ ID NO: 25252 - DNA, 201 bp, Bos taurus
catcagccagaggaggtggccctgaccagaaggggaagagcccgctgccttcctccgagatccccaggaacagacaccaagcttgggccaggacacccccgtgccagcttgaggtcggaggagaaatggagtctgccatccactggctgtgtgacctttggcaaattatttaacacatctgggcctcagttccttcatcta

SEQ ID NO: 25253 - DNA, 201 bp, Bos taurus
ccagccgtgagttaccacatccttcattcatcggataaacttgtaccaaggcccattatgcagccacgcagcaggctcctggccagacgtctggggcagcgacaggtcttgctctcagtaggcttactgactagcgactccaaaaaggtccgggccacctgggtgggcagatacttagggtgttacccagaaggttctctg

SEQ ID NO: 25254 - DNA, 201 bp, Bos taurus
gaaagactttggatatgtagccccacgtgaccctgctgttgagccccagtttttagggagagagagaaaggagggatggcaaagattggacaggctgaaacggcgtcacccgttctgtacaagttttagctgcttgcctggtttgcacacatacgtgaccgtgatgggtttgagggggaggccgaaagaacaaagccagag

SEQ ID NO: 25255 - DNA, 201 bp, Bos taurus
ctgactctcaaaaacatttatgcaagcaagtggttccagttcaacacagtaaggcaaattcccagaaaattctccaatttcaaacaagagacttaactgaggttcaattctttccctctgctctgttctgttttcaataagccataaaatagcaacagaaatgaaatatcccagaatcctcaatttaagaggttcactgag

SEQ ID NO: 25256 - DNA, 201 bp, Bos taurus
cagtgagaccccaagagcaggcccaactctgacccagctctaaccccttcactcctcctggtgcccagcagcctcgggacctccaataggctcatggtcttggccttgactggacttacagccccttgtgcacacattcccaaggtggggtctccctggaagtcttggaattgtatgttgtctagtcgatagggagagggc

SEQ ID NO: 25257 - DNA, 201 bp, Bos taurus
ctagaccaggcttgtattgaagtcctggctcttgactaccagatgaccccacgttaaccatcccaggctttggttcccagcagagcattgctcctaacacagtaatccgaggccccaggaaggtggaggccctggctgagatgtacctcagaaaactgagatgtacctctgacgttgaccagcgccactcacagccgccag

SEQ ID NO: 25258 - DNA, 201 bp, Bos taurus
ttctctggctccaggtcaggcaggtggcctccctgaccatctctgggctccaaactgaggaggaggaggctggttaatcctgctaagcctggaacagcaggctgagctcacacagtgcttcgggccaggggggaattgagacacaaaccctgagctccccaagcctcaccagtcacctggggaaactcacagagcactgtt

SEQ ID NO: 25259 - DNA, 201 bp, Bos taurus
agagaagggaggagaccccagagcccagcccccgtccctcagctcccccctgcctcctctggctcctcttcagcgctttcctccgggcccctctcctccttttatgcttcatgactttcctacccaatcccgggctcctgtttagtatacaaccctccacgtgagatggcctccagacgccctgtcagtcctgacccctta

SEQ ID NO: 25260 - DNA, 201 bp, Bos taurus
ggaggacctcttccgagaggcccatgcggtcctcatgaaggccaaggacctgcctccagcagacactgccatgaaggagaggctgaagcccttagcgcagatgttcttgtagtgagtcccggccagcctgccacggcactcttaagaagtggtgctccctcccctcggctgtgggccaaaacacggctcccggctcagagt

SEQ ID NO: 25261 - DNA, 201 bp, Bos taurus
ccttgcagaaggtgactatctgtggaccggtccgctttcttggacgtctgatctgatgacaccaacacgaccctcaggccacgctgaccctgggcaacccaagctcccccaccatctgcaggaccaaccaaggtctccgcctgaccatgggccttaaagatcactgtgcgagggggcagtaaagaccctcccaattacctg

SEQ ID NO: 25262 - DNA, 201 bp, Bos taurus
ctgccagtgaggaccccgcatctttgtcccccagtggaaaccgatgaaatagcacgagagggtctggacgtagcttcatcccacacggatgtcacgttaccgctgtggccgccctgacacccgcctgcccccaccctgagccccgacagccccccatccctatgttcttatcattcgaggatgcagataagtgatgtcacg

SEQ ID NO: 25263 - DNA, 201 bp, Bos taurus
gtggggttacagatgaaggggccttccatgacggcccaggggttaagactccgccttccaaggcagggggtgtgggttcgaaccctggtcagggagctacgatcccacttgcctcggccaaaggacggaagcacaaaacagaagcagtgttatgataaatccagcgaagactttaaaagctagatgaggagcccgcagcct

SEQ ID NO: 25264 - DNA, 201 bp, Bos taurus
ctggggcgctaacaaccccaaggggcttgtgactccatccctgagtctgccgcgcgctcctgccttgacagacagctgtcgagactgccttctggcctctggtgtcctgtggcgcacgggctggctggggtgtggtgcccgtggaacctgcatggagccctgggctccctggccgccaccccctcgccccctctgctctgg

SEQ ID NO: 25265 - DNA, 201 bp, Bos taurus
ctgcccgggctccccacgggggcgcccaggagcagagtggccgctgcggagtgacccgaagctggagatctaactctcgagccctcgggacgcagcctgcagactcctgagctgagggccaccccaggagcccagggagacggcagcgagggcagatccggtcctccacccacgggagaagcaaagcgcctcggcccgggg

SEQ ID NO: 25266 - DNA, 201 bp, Bos taurus
tcggcaccgcggctgccatgatcaaggctgcgtgaatgttcgtgtctgtgctctggggcacgtgctcacctctgtctgcagctgtttccaaactgcaggtcacaactagcgactcgtgaggcctgcggcgctgccagcagagcaggagggagactgggcactgcgcgccagctcacggcagcccaacagctccactcgact

SEQ ID NO: 25267 - DNA, 201 bp, Bos taurus
ccccctcagcacccaggcctcctggatgtgaactggggcagatgccacaccctccccactggtgggtctggagctcctccagcagcctggatcccatccactgtcctcctgccccggcctttggcagacggggaaaatgcattaattcagagtgcttagaagagggctggaagcactgagatcttggtgggtgtcacaggt

SEQ ID NO: 25268 - DNA, 201 bp, Bos taurus
gcgctagaagatcacagctttctctaatgatcattaaagtggcaaaaaaaaaaaaaatcccccaaaaggaaagccaagtcaagcaggaggccccaggcgtgtcttaagttgctagtgagaccacagagatggacggggatcccctggtgacttaggaacacgggggccactggagtgggtgcagccctcaaatcatcctgg

SEQ ID NO: 25269 - DNA, 201 bp, Bos taurus
aattccaagtccatggggttgcaaagagttggacacgactgagcaactctcactagaccccactagaccaggtgtgtggcccagcgatgctgtgtgcagggtgagtgtggaaatggtcacacgcgcgcacattagcacatacacacgggaagaagggcacgttggccgtggtggggctctgggtggaggggtgcatgaacc

SEQ ID NO: 25270 - DNA, 201 bp, Bos taurus
acagggtgcttttccactcgctgggatcaaggccccctcctgacgctgtgggggaggaagccccctcgctcctggaggagcaggttcctggagttctgtaggaagatggtggggctgggggccccaggagctggacagtcggggaaggggcctccccgagaggctctgacagagtgtttggttctgggtcacggccagcct

SEQ ID NO: 25271 - DNA, 201 bp, Bos taurus
aacatgaagcttaaagatacatggcctgaagattaatagaagtataaaaattgccaaggggcctaaaagaggagctagctaggagaaccagggccagacactggtccatgacatcagtatttctcaaggtgtgagaagatgcaagaatctggactcaggaaaatctttacctgaaagtgtctaactttctgaaggcctgtt

SEQ ID NO: 25272 - DNA, 201 bp, Bos taurus
tcttttagtcctgaataacacctgtctggctgtaggaagcatggttgtaccccctccccactcctacacacagccgaattgtggagcaggaagaaaaagatgcttcttttcagacggtttaggccgcagcaccagcatgaaggaccctgctcagtgaggccgggacccagcagccagagctgcagtgacagcctgcagaca

SEQ ID NO: 25273 - DNA, 201 bp, Bos taurus
tctcctggcttctctttctaaaagccttacaacaaccagcctcagtttacggctagatcggtcagttcccctgtggccaacaagcctggtactccaagaggactgggtatggaagcatttctgggagactcaggcatggattcagccagctgaagcagaaggaaagattaattcttctcaggccgtaccatggtgtgcctc

SEQ ID NO: 25274 - DNA, 201 bp, Bos taurus
gaatgaaaacatgaagacattttcttccctactacaaaaacaggatttgtggtatctgaataaacctgtggcatgcaaacacagtttggtaggccctttcctcaccaaaagagatgacttaaacaaacaagcaccaagcaagggaggaatgcaaaacaaaagataggaatttggccatcactctgacctgtatgaacacca

SEQ ID NO: 25275 - DNA, 201 bp, Bos taurus
gccagctgtcacataatccaagtacccacagcagcagaacctgccctcgtgcccagtccagacgggcctcctctgaggcctgcagaaggcagtcagcaagccagcaaggactccttcaggctgatcataagaaggaggtggggctgagcacggagagctttttgagagcttactgtggcctgagcactgggaaacagactg

SEQ ID NO: 25276 - DNA, 201 bp, Bos taurus
cagttacggctgttagctgatgtccccttgctggggcagcaggcacagcacggggacggcagggcgacactggcagcccagagtcttccacctcctcacaacaagcagtctggaacctcggccacattttgaaatccatccctttgaaccaatgcagacagcttaatgaagcagtatttacggaaccgatgccactaggga

SEQ ID NO: 25277 - DNA, 201 bp, Bos taurus
acctgcggggctctggctatgggccagacgtggatgggcacaacttcatcatgaggtgagtcccagggaccccaaggctggatacgggacaagcctccagaaggaggcactggcctccttggccttgcccagctgtaggaggaattgccagctgctggggggtcctggaggaccctgattcccagaatcttccatgacaag

SEQ ID NO: 25278 - DNA, 201 bp, Bos taurus
cacagtcaagtgcctataggggaacgtggcaagactagtagtccgtggttctctctgcagtgtctgtaaagtcagattagagaacacctgggggctagcattggccgcttcccttcccaggagacaaatctggctctaaaacacagacatgcctataagaaaggcctgggattcaaatagttctcatcacggaaaattcct

SEQ ID NO: 25279 - DNA, 201 bp, Bos taurus
ccgagacgctggccgtgcagagcgaacaccaggcacccttcttgtaggggacgatggtcttcccgttgacctcccagttccctctgcgaaagcaagcagcagagggctgcaaggacctggccttggccgtggcagggacaggccctgctgcctgcccgcagcccctgtcagttccttcctgccccgccagggagtcaggga

SEQ ID NO: 25280 - DNA, 201 bp, Bos taurus
ttatcagagtgacttaagtgcttttgtgccatttctaaaatgtgttggcaaagtcaagaatcagtcttctttattaaaactggcctctcatgagctgcctggaagctgtatgccagtccacagagctctcaagatcgactcaggtgccctgggaaagggccagagccttgagctggtatgaagcaaagggtatttggtgac

SEQ ID NO: 25281 - DNA, 201 bp, Bos taurus
aaccagcaaaacaccagacgtcattataaagttctcaaaaacagccgggatctacgattcgagttatggaacctcggccctgcctttccctggccttgccgtctggccctgcctttcacagagagagagagagagaggggaagagcgcgctagccaggacgcacacgtgctccttgtctcctctgctctgtttcggcagaa

SEQ ID NO: 25282 - DNA, 201 bp, Bos taurus
gggagctggcatggcctggtgtgggtggcactgcaccttcccggtccccggtaggctgcagtgccaggctcttgggtacctggcgtggaggtgaggccatgtggagcctgtctggggcgtgtgtggggcttctccttctggctcccactgtcctgctcgccagggctgtgaccgccataggcctggggacgtgggttcagc

SEQ ID NO: 25283 - DNA, 201 bp, Bos taurus
tgaggtgggcagccctgaaaagtcaggtgatgctggaagctgcccactccagcaggatgcacgatgcacaggtagctgttggtgcactcaggtggacagacgtgcacgataccggccgtagctgggtttcaagtgtccttacttcctgctccggtcattcattccttcctcatctacagcaagcacagtgctggaaaggcc

SEQ ID NO: 25284 - DNA, 201 bp, Bos taurus
cagaacagaacctagatcctctgagccttatgaatgcgggaaaatcacttccgtcactctgaagtgaagctaggaacttaccgccgtccctcagggacttcagtagcaccaaactctgttccttgtaatgggtttgaaagatttgaagaccttaagcagaaatattaacctgttggcagtagcttcctaaggagtcattca

SEQ ID NO: 25285 - DNA, 201 bp, Bos taurus
agaagtgaggtagcgatctccagctttttttttcttttaaatttgagggaggggcatgtcctgattctgggtgtgacctgggaacttacacagacacagttctattttgggggagagagtaaccagcagcctttcctggtcatgcagggactgcagtagcaataactatggcagagatttttcccatggaaatttgcactg

SEQ ID NO: 25286 - DNA, 201 bp, Bos taurus
ttgatgtataattaactgcccatatttaaaatcaacaatttattagatgttggtatatctacgcacccatgaaacaatcaccacagttgggataattactgtagtgctcccacccaagatttctcgtgctcttttataatcgctgacttctgatcccttaaaacccacacaaccagtcatctgtttaatgtcacgataggt

SEQ ID NO: 25287 - DNA, 201 bp, Bos taurus
cagaagttttcagtggtcaattaggcatacagaaatggaataaagcaagaagccagaattctgattttcccagtagaaacatactcaggggcatcagtccattttatattctgactcgctttagctggtaggtttaaattcctgtgactcacttactctgatgctgactagtagtgtgaaagacggacatgtaagactgag

SEQ ID NO: 25288 - DNA, 201 bp, Bos taurus
agtgttcttgcctggagaaccccagggatgggggagcctggtgggctgtcatctatggggtcgcacagagtcagacacgactgaagcaatttagcagcaggagaaataattttccctataaaattttaagtgaacagagaagaggtttctcatgataatctaggagagcaggataatccaaataatctctttttatcaaat

SEQ ID NO: 25289 - DNA, 201 bp, Bos taurus
cttttaatttcatggctgcaacaccatctgcaatacagtttgatgagtctgaacatatgcaaacactcagggtaccatcaccacaaggaagtggttgtatccaacatctcccaaattttaaaaaagtcaacctggatagtaggagatccacaaatggaagcagatggtaacaagcaggtagtaagcagaattctaaaacag

SEQ ID NO: 25290 - DNA, 201 bp, Bos taurus
cttcctgaaagagatcatcacatgtatttatccctgggactggcactatgcagtcttcttcctagggaactgcatttgttcttggtaagactagtcctgacaaagccagtgaaggctctcagcagctacatgctgacccccaaactcccatctgctgctctctcctctgagaagaaattctccagccccagtctgaaaaag

SEQ ID NO: 25291 - DNA, 201 bp, Bos taurus
gtaattctcttctattctgccttggtcagaccactcctggtggtgctaagttcttgttgcaatattttggcaagagggaaaatgtcaagggaggagagatggagtggtcaggtgctaccctggccgagacctttgcagggctctcagctgtttcttagtctgtgggctggagaaaagatggttaaagagagcagagaactc

SEQ ID NO: 25292 - DNA, 201 bp, Bos taurus
ggccttcagttgagattttggtggctaggtacagtgcaaagtggaatttaggggaggaggtaaaaagttccatagagactgtgagtcagacaatcaaccatgaggcccagacaatcaacatgagttccaccgcccaagcccccagggcttcaaccggtcaaggttctgtgaatgtcctgccttcactttttccaagcacta

SEQ ID NO: 25293 - DNA, 201 bp, Bos taurus
aagtggccattaacaagcctgtctgtttggcttgtggtggaaaggctctaatggactggggacgtttattttcccagactgatttacagcaagaggccacatgaagctgctggaatgagaccaatcggatgaaaaatagttgcagccagtcatggctccattggctgatctgaaaatgggccgagggcgggccacgctaga

SEQ ID NO: 25294 - DNA, 201 bp, Bos taurus
ccgtctggcagcttgattaatttatttctccttcttggagactgctgcaaggggctttggtcaccctgtgtccccatgggcctgtaacctgagtgactgccgacacattagccttacggcaaggaagccagtccattgccctgcactaggaggctttggagtcagaaggtggtttgatatgggggcctcaactcaaaccct

SEQ ID NO: 25295 - DNA, 201 bp, Bos taurus
ggttgctcatggccacattctgggcatccaggcaagatctggctcctgggggaaaggacacttggttctttctgcctggagcctccatgggagagggccattgctgacagaagatgagacggaaaggggaaacacggagaaagaccgaggtgcctcgggcatgccagcagtattccgaatttgaccttcacgaccgtggaa

SEQ ID NO: 25296 - DNA, 201 bp, Bos taurus
cgcaaaggattcttcagctcacagcaagcagacctcacaggccaccccctgaacaccgcgccgggcgggaaagggggcctggcacccctaaggatgccccaggtgtttgggggctgggggataaaaagccgttcccttcatccttcccacagtttcaggaaggaccccgtcacagaggtgcacggcccccgcgtatctgtt

SEQ ID NO: 25297 - DNA, 201 bp, Bos taurus
tcgtgagggccacccccaagtttactgctggaatccccagaacctggaacagccccagcacactgtggctgctccaaacacatctactgtctgaactaattgataagcaggggccttgccatgccaggggcgagggcggtaaggaaatgccagtgaggatgctcagcccctgtgctaaagcactggaaggcaagactggtg

SEQ ID NO: 25298 - DNA, 201 bp, Bos taurus
gcacgcagcaatgggagatctctctcttctctatgaagcactggataccccgccccgccccccatgaatcagcaggagatgcattcaccaggccaccccagatctctgccctttgaacccttcccataagcatgtctacaagataggaagtcactgtaatgcgcaaagggccaagagaggctcccttttggatacctattt

SEQ ID NO: 25299 - DNA, 201 bp, Bos taurus
aacaatttgcccaaagtcatcaggacacaaaccctgctggtctgattctagagtctggtcttgactactgtgtaccatcccagggtatccactgttaatattgctggcctgtctcagcacgtcccctgggcctgtttacctctcccggcccctaacaatctcattcattcattcacctgtcagtctatccaatcatccata

SEQ ID NO: 25300 - DNA, 201 bp, Bos taurus
gactgcctgaatcagaaattccagggatggggctactggcaattagagttttaacaagtccttcaggcaatctggtgcccactaaagtctgagactcagcgccttatggccatgtatcttggccttggctgtggctacacacacctgggtggctggggcagggggtctttaattgatctgagttgggggcttccctggtgg

SEQ ID NO: 25301 - DNA, 201 bp, Bos taurus
aaacaaagcatcccctctgcatcctataatgaccatctcagattgtcctggactcaaacacacagtcaggggaggccatggaaaggagagagagaagaaactctcactgaggggatcttatgaactcctccaagaggaggtaaataagttcatcttctcttgatttttgcttttttttttttttttaagagatgggagaaa

SEQ ID NO: 25302 - DNA, 201 bp, Bos taurus
gttacgggaaccgttaaactctctgtccacaccaccctttaagccacttcaggtgtctccctcaccgactgcccaaaaggtcctgagtaaccacatgatctcgacacagaaaatgcatcctttccaggggcccagagttggacgcaaacgctgcccagcagccaagggcagaaacccctcctaccttctgcagagtcctct

SEQ ID NO: 25303 - DNA, 201 bp, Bos taurus
tgaggccctacagaggctgcagttacttggttaaaagaccatacaagatattcatggtggcagatcctctggtatcaagctgagcactttttccaacatgcccaggcaagatgcaccagggcctcttcatccagcaccctcctcctacaaatactctcagaccagatctaacacgactttccacagccatctgtccttaca

SEQ ID NO: 25304 - DNA, 201 bp, Bos taurus
cagggcagctggggatttatatcctacaggcagggtgagggataggatggaaagttactaagaggaattggttaggtatcaagggtgggtgaggaacttgattgggtatcaggggggattcttgctcaactggcttagcagaattcctgctaaaatcaggccttttgcttaacaatagattgtcaaattgtgaacagtctc

SEQ ID NO: 25305 - DNA, 201 bp, Bos taurus
tggagttgtttagactggggaatgcaatgacccagggtgtctgtgtgaatgtgtgcttactctcacatttttgtgtagttgatggtggcaggaggatactagggggaggttaagtgcagacaagggaaaggaggagggtcatgtcttgtcgcacacacatatctttgacagcaaatcaatctgtcccccaaagagccaggc

SEQ ID NO: 25306 - DNA, 201 bp, Bos taurus
ttatacccctctttctctcaggcattgtgtgaaagctggtggagcacagttagccaaagccctctggtaacgaagggtgatgcggcattgaaagagcaacggttaaactaaacaggctcttctcctgcagtcttatcagacagtccagcaatcacaggatctgattaaaatcaaatccttggatttacccaaaggagttga

SEQ ID NO: 25307 - DNA, 201 bp, Bos taurus
gagcaggcccagggcaccatggggaacggattggcgctttcatgatcagccctccagtcccagctgggacgaagatagaggcagaaatgtatggagacaggaagaggccaacagatagatttctgaacatggtgggggatgaatgtaaaacccacatctatttccttttctatcttgaaactaacactcattccaaattga

SEQ ID NO: 25308 - DNA, 201 bp, Bos taurus
atcttctctgccaatgacatttggggctgagatctgaaggacagatgcgggctgaccaggatggccgatgagatgcccatgcttactaggagggctgcacgagaagattcttgtgttgggaaggaacagaataagttggaagaactgagaaaagactggtatacctggataatgaggaatgaaggggatctcttgtgatgt

SEQ ID NO: 25309 - DNA, 201 bp, Bos taurus
atgtcaccgttatcctgagtgtttcagccatggccacaccttcagccctggcaggaggccccaccagggccccgtgtcttctaataggatagaagctttacggtttatatcattgtgattaaggaaataagtcaggtttgaaagttacctgcatataggtgataattaaagctgttaaaatggatataattaataaggaag

SEQ ID NO: 25310 - DNA, 201 bp, Bos taurus
atgagcagagactgtacctaacgtggaagcccacaggtggggctggagaagacctaagactcccggatcagagacaaaggacttgacctcttactgcagcgggcctcctggcccaggtcccacgggttgacgtgagggggccccagagggtgctgtacacactgcccatcctcccctgctggggaaccctgaacttagggc

SEQ ID NO: 25311 - DNA, 201 bp, Bos taurus
ggtaagaatacggagaagttaccaatatacgaataacacgtctgaaggccagaacatcatccacgttaaaaaaaagagtccgtgaggaaataatgtaaacagtgaccactgtatacaaagggcctaagtgaccaggcagtgccacacattaacaaacttaattcttaaaaccttttagcatgactcggcgattctactccc

SEQ ID NO: 25312 - DNA, 201 bp, Bos taurus
caaccactctatttccctttacctcattggtcagtctggatgtttgggatcccgtgaccacacttggatcccaactgctccgtcactggccaaagccactgagaaagttacaaaccgtgtgtcccaagtaccagcctaagacctgtcacaggacagacgccttacccccagccccaaggacatggccgtaagatcttccag

SEQ ID NO: 25313 - DNA, 201 bp, Bos taurus
tggggggcaaggggaaaggtgaacttacatttcaggaaaccaatccatcagtggctgggacccgtgtgtcctgcagaattctagtccagacaggtttggccagacaggtttggggaagtgaattctccatgcccctcatagggattcatgaggtcttgagggccccacccaaagagcccccctttcttcttccagtttggc

SEQ ID NO: 25314 - DNA, 201 bp, Bos taurus
caaggtttttcaaatgtccgttattaaacatttgccagtctagcactggttccagcccctcgagaagcgccaagtctagctggcaaggcagctggtgtgaacagacttgaggcaggcttctggctccttgacacccagggctcagctgagccctggaaagagacccagcctcagggcagcaacggccaccgagccggataa

SEQ ID NO: 25315 - DNA, 201 bp, Bos taurus
gcccttcactggcgcttggccccgagggaatgacgttccctctcaaacctcagtttcttcgtcagcacgggagggacaggagtggtcccagtcacagagatctgtgagaggttctgtcagggccgcggccctcgacccgtgggcgcctcgtcgacgccggccccacctgggggcctgtcagggatgcagattcccggtcca

SEQ ID NO: 25316 - DNA, 201 bp, Bos taurus
acaagtgacccgcgcactgtcctcggccgggcccgctcttggtagttctttttctggctgcatgaactcaggctgtgtgtgcagccaaagttaaactcaagagggctggacacgtggcctgggcggggagccggagcagatggcaggccacctgttgaggggcggctgcaaatcagcgctcctgctcctccagtggccccc

SEQ ID NO: 25317 - DNA, 201 bp, Bos taurus
gggccccaccatgctgattcctggtggtgccccaccctcaaggctgaccaggacagaactgctcacgaatcagggaaacccctcaccaccctcatgtgccgtctgccaggccaagccccgacgacctgccctgggccttgagccctggtccctgtgccacagtcttcccatttgtaaagttagctatgctgtccagatata

SEQ ID NO: 25318 - DNA, 201 bp, Bos taurus
agagaagggaaattatctctaagctcaggccttccaacagcccccgtggctttcggaagcttactctgtgccattaatccctggctcacatccccagtttttggcctcgaggacagagggatgggccagctggagcccgtgcagcagacagaaacccacgtggaggaggatccgaatcgcggcaggaggaaggaaggggag

SEQ ID NO: 25319 - DNA, 201 bp, Bos taurus
aggtgcttctgtagggtttaaaatctgcccacggtgatggcaaattcagacctctgccttcattcccaggttgcctgagaagccagaaaacagacctctccgcctaacccagggcttctggaccagggtctccaaggggagcagagcagaggtggggttaacaagccggtgctgctcttgaggccaggctggggaggctcc

SEQ ID NO: 25320 - DNA, 201 bp, Bos taurus
cctggaagccggcctcctgcgccgagcccgcctgtggccctgggccttcctccagggatgctgctgggagtggaagctctggcccttccgctgggtgacccaactctgactcacttccccagagaggtccccaccaagcttgacatcaggtcagctccttggagcatccagcccctgaggaccgcagggcaggtattggcc

SEQ ID NO: 25321 - DNA, 201 bp, Bos taurus
ctactagggccaagatgggggaatatttgccttccaggggaccctgagcttcattatacgttcattgtaacacatcggctaaatgacacatctacaattccgaggccagccatcaaaacccaaagagtagctggtggcctaacttctggaaatccccaccactttcaacccactccagtattcttgcctggaaaatcccat

SEQ ID NO: 25322 - DNA, 201 bp, Bos taurus
cccttattgtccatctttgtctaagctggatttaaaaaaaaaaaaacaaaaaactaagacagcaggcacgactgtcccgtcccaggatacggggcggccccagctgtgccttctctatcactaggcagtggttctccacacctctggcgagcactcagcatcctagcaacgcccctctctccccgtcctgtccgtggagac

SEQ ID NO: 25323 - DNA, 201 bp, Bos taurus
cgcgcgcgagtggagctgctgtgcttgtgcggccggctgtgcatgggcgaacgtgcagggcaggagtgtttgcgcgtaaccgaaagtgtgtcctccgtgggcaggcagggcctgagcgctcgtgcgagggctggggcgcctgagccgtgtgaggggtgttctttggaaagacggatggaggccgtgcgccttgctcaggat

SEQ ID NO: 25324 - DNA, 201 bp, Bos taurus
tggagagaagctaaggttccctcccacaaaggaattccctaaaactgtgtacaatatcccaacacctgtgaatgaacctccaaactgcaagagacacacacgtcccaggttgagaatcaatggattaggataagattgagaagaaacaagaacacccaagcatgtcaaataccctctcagagacctagaggcttctagccc

SEQ ID NO: 25325 - DNA, 201 bp, Bos taurus
ttgggtggagtggcagagcgctgggtctggagctggggacctgggtcaatgccacagctcttgtcatttcccagctgtgtgaccctggccgagtccccgctgccccagttggaaagtgggaatcacacagcttgcctctggggttggtaggaggagtaagcagtttcaaacagtgccagagtaaccattagaggtacgaag

SEQ ID NO: 25326 - DNA, 201 bp, Bos taurus
ggtgtgtcggtgcacacagggacgagaggatttagggaggcaagcctgctgtgtgtgttgcacagccggttagcgcaggggccaggtgcctcccccatccgccccaatgccggtctccttaccctgggcagctgcggcacttcccctggctcttacagctgtttagagtctgtaaacccgctaatccctggccatgtgtca

SEQ ID NO: 25327 - DNA, 201 bp, Bos taurus
ctcccagggcccggctctgagctcaggggcccgactcacagacaatcccagattgaccgggagcccaagagaggtgtggaacagagaaaggaagcagtggtcagcccaagacccaccccaagggcctcccaggctgtgaccacagcggccaggctgccctccccccaggctggcccacacaccacctctgcccaccctggg

SEQ ID NO: 25328 - DNA, 201 bp, Bos taurus
gccagcacatacaagcctctgaaagaacatgtgtttgctcccgtgggcatgacctgcatttgacttcagagctcctgattcagctcagctctaatgaaggctcccggggccaacacagaccaaaacacaagggactgcagccaacatggagcagtcaaactcccccgactcctctcgaatagtcagacttcctccccttcc

SEQ ID NO: 25329 - DNA, 201 bp, Bos taurus
catcaggaagcatacacagattaaaaccaagagacttctctcctggctaccaccaaggagcttatatcaaacagccgctcctgctgggaccagccataaaggctgaaaaagggaagttaaaatgctgcttgaggaggcagagggcaggcttgcagaggagggacaggtgcctgccacgaccccacgcacgtgccacacata

SEQ ID NO: 25330 - DNA, 201 bp, Bos taurus
acagcacgtgcaaaggccggaggcagggcttggtctgcagcagagggggcagaggggaacagtgtcggggctcagcttccgggctgtgggaaggatgctgtattttgtccagaggccagggaagggctctgaacgatttaagcagggcagcgtgcgatctggtgtttgtgctttcgtaattaaatgtttgtttccagataa

SEQ ID NO: 25331 - DNA, 201 bp, Bos taurus
cctggactgtgggggcttcctacagcaagtcagggactgaacgaggcccatcccaccactggcagccagttcctacaagcctgcggccctgatcgagctcactgtcactctgcaggagcaaaagcagtgatggggtcaccagtggcggttccgaatgggcacgggtgggtgattgctgcacccacgggggcccaggtagag

SEQ ID NO: 25332 - DNA, 201 bp, Bos taurus
ggggaatggtgccctgaaggcaggtcacaggcagccgtgggcaaggggctcgggtcagagtcacatgatgagaggtgggcctgcttccgcaggaaggacacacggacatgcggaaggagcaagcggctccaccgtcggacacgattcctgccactcctcctgcactcaggcaccctgtctggggccctgcgcccacaggca

SEQ ID NO: 25333 - DNA, 201 bp, Bos taurus
gtcccaggagaaggaaatgacaatccactctggtattcttgcctgggaaatcccatggacagaaggagcgtggcggactacagtccgtggggtcacaaaaagttggacacaacttactgtcagcaacaacaatatcactgtcacaacaattctgagcctctggccctttaatcctccctgacccaggaaccagctcagctt

SEQ ID NO: 25334 - DNA, 201 bp, Bos taurus
ggtagcgaagccagagcatgccagcaatggccagggccacgcagagccagttgaagaagctgaagaagttgatgacggagaagatatctttggagaaggcgtagagcagggtcatgatgcactgcaagcagagggcaggccatgagcctcaggatgagccagggggagggatgaccgcacgcaccccttcttagcagaaga

SEQ ID NO: 25335 - DNA, 201 bp, Bos taurus
gtgctttatgtctggcaagactgccaccagctcctgcagctcctcatggcgggcccccagctgcacagcatggcacggggagtggtcacgtgacagggccggggacagggtgacaagcacatgtcatcctaaggagaccatgcctagaaagcaggtctcactaggatagctgtgtcccggcccacttacctttaaaaatac

SEQ ID NO: 25336 - DNA, 201 bp, Bos taurus
ctgttgcttccagacattttatcatgggccttttaaatagattgcagaagcacatgtggctgagacccccgtcagcccttgaggagctgtgtggtgcccccacacaacccgggccccagcacctactccgtactcagcctgctcagcttcaggcagggcgggccaggtctctccccagcaggcggcttcagcagccccctg

SEQ ID NO: 25337 - DNA, 201 bp, Bos taurus
cttggcggcctgcacaaaccctgctgggcactggggtttgtactgttccccacgggtcaggcaggtggggctgcgggcatttctaggggcccagctgagcacagggtccccatccttctgcctcagactttcacctcttctcaggaagaggcacctcaggcgatccagaggcccttctcctgcatgctggcttccgtgcag

SEQ ID NO: 25338 - DNA, 201 bp, Bos taurus
ggggtgttggggaaagccgtgtactacagcagcattgcagtccccgtagttagggctggacagtgacacgtaaccatcgtgacacaggacacatggcctcgtgggctccaggtgaaagaccaacaccacccatccacttcggggacgttgacagattcccctatcaccccaggactgctgtgtgctggagagcaagaggtc

SEQ ID NO: 25339 - DNA, 201 bp, Bos taurus
tgccccagggtttgggcaggttgccccaggacttgagttgtgacaggccttagttgcctgccctctgctcctccagcaaacaccggaagctgtataaggacgtgtccggtcacacctggcgtggccctgtgacctcctggcactgcaagacaggctcagcccagggctggtgctgtgatgcaggttgtcatgcacctccag

SEQ ID NO: 25340 - DNA, 201 bp, Bos taurus
acaagcacaagccgggggtctccttcccaactgctccgactcaaaggcccagggcttcaggggtggctgtggactccgcaagcccacctatacctgctgtgtgcaccaagatgctcaaccatggcccagtgccagtgaggcaccaccttggggtatggtctgcctatcatgttgctggcagctaaggccctgcagacccag

SEQ ID NO: 25341 - DNA, 201 bp, Bos taurus
ttggataagctgattcaaaacctgaatagtgacctataaaagaatacatacaatttcacaatcaagtagtaccataaaagataatgtcatttaatacgaatatcttgaagagcttttgttactcttagaagttaccagaataattatgaaaaaaaaaaaaaaaaagagatgtgagaacatgatccctggcttcaggaaaaa

SEQ ID NO: 25342 - DNA, 201 bp, Bos taurus
agttacctacactgataaaccaaggccttcatttacaagcatcaacagaaaattaaggattaccagctatttgaggaaaataaagagagcaagagagaagaaacaagataaaacatgaggaacagggagtttcctggtggcctagtggttaggattctgggctttcactgctgaggcccaggttaaatccctggtcaaggc

SEQ ID NO: 25343 - DNA, 201 bp, Bos taurus
tgttgctgtcactggcaggaccagacaaccaactattggccatggctcaagagtcagaaaaaatgtgagagagaattgactgttgagtagagcatatagtactaagataactgtgtggagtttggccaggagtgccaaccctcagatcctgcccttgatcaggaaacatcctgcttaaggaattaatagcaacagctttcc

SEQ ID NO: 25344 - DNA, 201 bp, Bos taurus
ggtactgtaggaaaatgacagagctgagttctcaatcctggctgcacattagaatcaaaaagggagcttttaaaaatgccagcggccaggccacaccccaaaatctctggagaaggggctcaggcatcgatattctgtgtaactgaggatgagaagcactgcccttggatgatgcttctaaaacttcagcttgttaaaaac

SEQ ID NO: 25345 - DNA, 201 bp, Bos taurus
caagtttgaagatgttgaagggagggccactggtgggaggggacaggaacgaggggaaacttcaggaagagagaggaatggtgaaagtagtggaggaatgatagggctggacagggaggcctggcgagctgcgattcacggggtcacaaagagtcggacacgactgagggactgaactgaactgaactgatgcttttacat

SEQ ID NO: 25346 - DNA, 201 bp, Bos taurus
ctgagacaatagagagtggtggtgtttgtggcccacgggagaggaggtacatggcaataatgctcccatggaagcagcaacccgctactggctaaacgaacagatctgaccaggccacagggcctctggtcggcaaacctgcaaagggctgttccaccagggaaaatattcacactatttaaccacgggaatcccggttat

SEQ ID NO: 25347 - DNA, 201 bp, Bos taurus
cgggcaacttggcactcagtctgttgggtttcagtggtcccaacatcatcatgcttggaagaagaacgaactggggaaagaggaggaggccgaggaaaacgtgcaagagcggcaggggctggaatgactagattctgcttcagcccagatgaggggagggcaccctggtcttctgcgggtgccaaggagggggccccccca

SEQ ID NO: 25348 - DNA, 201 bp, Bos taurus
ttggttcagaagaggccagttctagagaggcacttaccacaggggcggtgagcttgcgtctcaggaggatgtggcaggtgaatgtcagcacaatggcaatagtcgatgcaatgggggccaatgctgagtttccactctggacaaatccagctttttccagtaacttcctttccttcttccttatacctagtaaatagaaat

SEQ ID NO: 25349 - DNA, 201 bp, Bos taurus
gtggctgccagtggaagaattcatggacagcctggcaagtctccccgggagtctggaaatgtacagaagcagagagactggaaccaacacctggccagacatgctgaaggtgagaggctgctggagcagcctgtcccagtggatacagtgaaagagggttgtagagctgtaggcactttgcaccactgagtggccaggatg

SEQ ID NO: 25350 - DNA, 201 bp, Bos taurus
accccatctggggaatttttttaagacaaatactctaactctcagttttatcatttctatctgataatttttcatagtttccatttctctggtgaaattcatttccttgctattttatccatttgttcttttgagtgtttggatatatttataataatgatttggagtccttttgttaatttcaatacctctgccatttaa

SEQ ID NO: 25351 - DNA, 201 bp, Bos taurus
caggttttgttttgtttttttccctttagttgccccataatattgttcctaggtggggctacctttttaaactagaggataaatagaggcctaaatcagtgtggttattcccactcattctaattaagaatctttgtttccactcaacaagatatgggaaaaaatagggcctcttcatgatatttctattgtccattaaat

SEQ ID NO: 25352 - DNA, 201 bp, Bos taurus
ctgtctccccaaaaagccactggtggggtctgctgccctctggcccagtctctccctctgctgaacccccaagtcctgtccatgtcgccacactgtggttcattcttagactgtcttgcttcctggccctgttgcccgttgacttattcctatctttccattcccatggaaaatcctgccttctccctttttgcctctgtc

SEQ ID NO: 25353 - DNA, 201 bp, Bos taurus
ggtgcctagtggcccacaagcactccggcccaaagggcacgcagaccagcggggatgccggccagcctcctcagcagagacggggagcccggaggccaccggacagacacagagaagggcaggggggaagtgagagcggtgccagacccagaaagcagggtgctcccaagagggccaccctccacccccacactgcaggac

SEQ ID NO: 25354 - DNA, 201 bp, Bos taurus
cagcctttgtgttccccaggacatctcattcaggcccttcacggagagagaggggctcaaggaatggtgagggggagggagagagggcaggagaagaaaggaagccctaatccgtggcccagaagaaatgaacatctctgacttccccgtatccctgatctaagtaggtcacacggaagaactcggagttcctgtcaaagt

SEQ ID NO: 25355 - DNA, 201 bp, Bos taurus
acagaagatgaatgatacacgaacaatttgtatgccaggcaactgtgtgctagataattagacattaaagtaagcataataatctcagagataaaggatggtgttagaagcatgaagcagcaacaggcattaacaaaagaaaagcaattggaaatgttagatctggaagatataatgggtaaaattaacaagcttagtaga

SEQ ID NO: 25356 - DNA, 201 bp, Bos taurus
ggcctctcaccatggggtagtggccagaggcggtggccgctgggctgggggaaggacaggagagtggacaggggagatggcactctggccccggtgctgctgtgactgcctgcacttcctctctggtcctccgtttcctcgtgggtgaaggaaacctttgctaccagctccctcccaaggctgtccagggggccaaaatgg

SEQ ID NO: 25357 - DNA, 201 bp, Bos taurus
taaatagtctaaagattttaagacacatgtgctacttttgttgcagcagattttagttataggaatgaagtatagagttatctgctttaaattgaaaaagaaatcagatttatatgggttctaaagacaccactgctctcaactatagcatgtcctcttagtactaggacaggggaatgtcttgccttgtctgtaacatag

SEQ ID NO: 25358 - DNA, 201 bp, Bos taurus
tgggcaggggcagagcaccatcacacccataactctgggagtcacctctaattcaagccagaagaatgaggctctagaaacccactaaccctctctcacttatcagtttagacaagcaaactcttctgatgcgtgcatgcgtgctcagtctctttcgtcatgtccaacactatgcgaccccgtggactgtagcccactagg

SEQ ID NO: 25359 - DNA, 201 bp, Bos taurus
tggccaaagtactggagtttcagctttagcatcattccttccaaaatgacttataatatttaatacatagcaaccattatgtaaataattgcaagtacaatgtaaatgctacataaatagttaccacaagaatggcaaattcaagttttgttttgaagaaatttctggaattttttcctattattttccatctgagggttg

SEQ ID NO: 25360 - DNA, 201 bp, Bos taurus
agtctcttgcattgtaggcagattctttaccatctgaaccaccagggggaatacgttgctttaacaggtaactcagaggagaggtctgtgcaagctctggaaaaggatatacctggattggctagagggactgaaagaggctcatgggaagtagaatctcatccttttccaaatctttcatttgatgatggtgacctatgg

SEQ ID NO: 25361 - DNA, 201 bp, Bos taurus
tttttccaactatcattttactcaaatggcctcctattttatgggaaataaagttagaactaatgaaggaaaccctttctgagctcaaagagatgtgcaggctgtggccatcttcattgtaaccaaatatttaaattatttagagctcattgtgaactattattgtccattgttttgacaaaatggtatcatgagttgatg

SEQ ID NO: 25362 - DNA, 201 bp, Bos taurus
atgtgtttaggtgacgtcccttcacttggttctctgtagagtatggtttgggaaatgtgccatcagccatactttaattctttgactttacccacacacacccctggcaaattgcacagtgcacattgcacagcatatactgagtgcccatcatatatttttctaagtgagaatgatgggtttgcataggttggagacagg

SEQ ID NO: 25363 - DNA, 201 bp, Bos taurus
ctaaatcaccagcgcttatgtgcattcacgccctgagtctggatttccccagaatccccaaacccagcttgatgtgtgctcagcctctcttatttccttcggtgagtttaagccacagtgtgctctgtggtttaatttcctctttcaaaagcaggtactataacaaaatatcaagagccatggctgggccatagactagca

SEQ ID NO: 25364 - DNA, 201 bp, Bos taurus
ttcttggcgctaccacttataaactccgtgattgagtgtgggtaggtaacaacctctggctcagtatccttgtctatgtatgcagagcccttgagatggtaacaggcatatagtacatgtttaataagggctaacagttcttatgggaacagtctcaacaggcttggactaaggtaatgagagtcttcctgggtacagtgt

SEQ ID NO: 25365 - DNA, 201 bp, Bos taurus
gctccaagctggtataaaagtcttagtgccactactgggtcagggcaccctgctatggctatcctgttttgctcctgtttcagtcatgggctgtttccttcggtaggggcaccacagccagtctttgccctaccactgaggactggggcagcgtcacacccaaatggaagaaaattcagctgaccctgaagtggttgaagg

SEQ ID NO: 25366 - DNA, 201 bp, Bos taurus
taccactacagccgacttatttaatcttttcttggctacagtgacacacagaatagagcaactagaacctgctgtagacagaggccagttctcatggaagaaggcacagcgcaaatctatggggcaactggaaaccgtgctgcagttactgagcacaggacacaaaaacattagcctgtcatcaccaggccttctccctgc

SEQ ID NO: 25367 - DNA, 201 bp, Bos taurus
tttaattcagtccatacagtggaatagtgtacagcagtgtataccacagaagtgtagtgtacagctatgaatacccaaaaagtgcagccagatgcataaacttggatgaatgtcacaaaaataacactgaagggggggaaagcaagcagaaaagaaaatgccgggtagaattctacttattaaacaggttagaaatatgta

SEQ ID NO: 25368 - DNA, 201 bp, Bos taurus
cttatatgtggatcttaaagagctgaaccaatagaagcagagagtggaataatggttaccaaaactaggaggagggagacatagagaggtgatggtagtcgctgttgacactccctcaatcatgtccgactctttgcgaccccatggactatagcacaccaggcttctctgtccttcaccatctttcagagcttgctcaaa

SEQ ID NO: 25369 - DNA, 201 bp, Bos taurus
tttacaaacgttatacctacctgattcaccctctggtcttgatgttcccagagtgctggcttccctgttgctgttgttaagctcagttctgatatggtgtctcccacagttacccctggcaagttgaggagccagcgcgagacatttcttaccagcatatttcttgtttacaaaacttctcaatggcacgctatccagtgg

SEQ ID NO: 25370 - DNA, 201 bp, Bos taurus
ccttaaagcacattaacctgccaatcctcagttttactgagaagaaacttattagatctcagttgacattttattacctatttgctaccacacttattttgttatcattttaaagtagttattccatttttaaatcactaaaactcagcgcatcaacagcagtgtggatggcagatgtatctcctacagaggtttgccaga

SEQ ID NO: 25371 - DNA, 201 bp, Bos taurus
catggtgctttccaatgtggatacatcatttaatattcctgtttgaaggttacagttcttaacatccttgtcaacactcgtcactgtctttatgaaaccgtgtgtgaagtggtatctcagagcactcttacatttcctttttctgatgtccagtgatgtgaaactgcttcttgtgtaggttgaccaggtataaatcttctt

SEQ ID NO: 25372 - DNA, 201 bp, Bos taurus
tgtgcatggaaagactggcaacagttaagaggtggcaataattaggaggcaggagttaagctttcagctgtgaccatattcttgtaacctgctcctgatacaaatatccaggggaaaaggctctaactttacaggcacacgtcctctttagggttgactctgtccctctggcccaagacgatgccacctctagtggctcct

SEQ ID NO: 25373 - DNA, 201 bp, Bos taurus
tgatctccctgcgctatacagcaacttcccactagctagccactttgcatgtggtgatgtatatatttcaatgctcctctctctattcgtcccaccctcttcttcctgcactgtgtctcagtggagcccttttggaagaacttgtcttagtccgtctccagacctggtgtagtgcagtggtgataagcacagattctagag

SEQ ID NO: 25374 - DNA, 201 bp, Bos taurus
gcactggcaggaggattctttaccactgagtcaccaaggaagcccaattagaggtttaattcagttcaaatcaagttaattattcatttgcaaaataaaaaatgttttattggtgaagtactattgattggtaagcaccaaatgacaggaaaattttaaaattgatctgcaaattaaataggcaagactatggaagaagct

SEQ ID NO: 25375 - DNA, 201 bp, Bos taurus
caagctctcaggtgacgcccatgtggctggcccacagaccatgcttccagtaataaggcaccagatacagagtacttcttaaaccccatatcctcataaacgaaaatgccttttctcataggcacacatctctgcaggtggtaatcagtgcagtaattgggtcaaaaattatcaggcacaggggacattcctggtttcctg

SEQ ID NO: 25376 - DNA, 201 bp, Bos taurus
agtgtgtgtatgtatgtacatgtacacatgagtgttgcctggccaactcagttatgaacttgataacaataatcccagggattgtaattatagccggtgctaactgggtgcttcctatgtgctaggcccagcacagagtgttttccaggcatttaccatttatgtcttatgatcatcttaagaagtagacactaatatgat

SEQ ID NO: 25377 - DNA, 201 bp, Bos taurus
caggtaataaagataactgttgcaaggactgtaaagattaaatgtcaggtgctcagtgccctggcacatggaaaccattcagtatgtgctggtcgctataaagacaatgatgctgaagatgactgttatcactgtgatgattcgctgccactagcttttctgctcactgtagagttatttaaagatgatctcggggccctg

SEQ ID NO: 25378 - DNA, 201 bp, Bos taurus
atcaaatgactgaaggcattggacaaaaatagtttgctgtgcatccctcccagtaggaaagcaagtttcaaacatgccttgtgtcggctgccataccaattgcatacaagaacagcctgttgcttggttagctgcaatagaaacctaatatttcacctgaaaccctgatttatgtgtaaccactctactccttactaaaag

SEQ ID NO: 25379 - DNA, 201 bp, Bos taurus
tgtatagatattaacatcatatgaattagttttagtttccagaggcttagaagtgcaggatcttccagggcctgatatcactaaggggcccttgccattgttcatgtttgcttacttgctcctgctttattgcaaattaagcctggaaagaagaaagaatgtagctatgattattgcctcaattggcccttttcctttccc

SEQ ID NO: 25380 - DNA, 201 bp, Bos taurus
actgcacgtgtgagtagaatgagtcgaaaatgtgaatcaactgctaaaggccgatggtgggcaagtatgggagtatacagtccttaggagcatggacccagaggggagtttacactcactgcaggcccttctccctggaccccaaaaagggacccatgagaaatgctggtaacaggtagtacttgttattcttatgtgact

SEQ ID NO: 25381 - DNA, 201 bp, Bos taurus
aatatggctaaagttactacctgcctcacagatacacatcaaatagcctggcatatagtctaaatgctaggcatttattagatattggaattattcaagtgggaggacaggacttggtgtccaagtctgtacagcaaaagcctgcatgagtgctgtcattctgtggttgtttgagaccatagaaagcctccaaaaaccaat

SEQ ID NO: 25382 - DNA, 201 bp, Bos taurus
gcacaaggatattctttgcagcattggttgtaatagcaaaagttagaaacaattccagtatccatcaatatgggactggttgaataaatgtggtgcatgtgcatagcagtagcagaaaggaatgagaatatacactcattggatggagtgtctccaggccatgttgctaagtaaaataaacatgaaaggtggaggaacgtg

SEQ ID NO: 25383 - DNA, 201 bp, Bos taurus
gcttacatttcactccggagatgagcaaggcccagagaggtgaagtgacctggccaaagtcacacagccaggaaatggccaattagaacccaaacagaccgacttgcacagtaacccactccccaccccacccccacatgctgctggagaatccagcagggatgagagggcccctgcccaccctggccttccctcctcaca

SEQ ID NO: 25384 - DNA, 201 bp, Bos taurus
gtcccaaataaatagggaaagtaggtggactttacacatcctcttgtagccttttactgagaaaacaagcaccaggccctgctgttaaaactgcctgttaatgtaaaccagggtgtcgagagaaaagcagagtactgcgcatgcccctgcattcaacaccaccagaggggcaggcgaaccacctaagccacacttctggcc

SEQ ID NO: 25385 - DNA, 201 bp, Bos taurus
tgactgagtaacgcccccaagtctggtaccatgtaacatgacccctccttggtgctctccccctggaccagtaatggccctggtcacaggcaaccactctctagagaggctggtcacctgtgaccagtgtgacctgcctgaaagagatgaattgggccgatcagatttcctcttttaaggatttaaaatgagagccataaa

SEQ ID NO: 25386 - DNA, 201 bp, Bos taurus
ggagcatccttgcctgacaatgtagattggcagtgtgatatgactttcagcgacctaggataatgtgttccctccatgccaggctcagagctgagggcccgtgtgcgtcatctcacagcagtttcataacgagtccatcattatctgaagtgggcactggtcactcttggccaacagcatcagacatgcccttcctatgag

SEQ ID NO: 25387 - DNA, 201 bp, Bos taurus
cgaaggctgagtggaggagcaggtagccccgcagcccctcccctgatgcatggatccccccgcccgcctccggcgccctgggccccctgctcctccctctgtgcagtgctgcagccaagccgcatcttgctgtggaaacttcttgtgccgcttttccgtgggctctatcccggttagggctccagagtggccgggcttcag

SEQ ID NO: 25388 - DNA, 201 bp, Bos taurus
agaccaggtagggacaggccgggataaggtgcggcaagggccggctgaccccgagcgggcgtggtacagaggatgacaggttgcagagccctgcagcgagcgagtagggttctgccgcggtggggcccttggggacccagattccaccctccaccaacctgtacctccttccacctacctgcggtctttctagccccggcc

SEQ ID NO: 25389 - DNA, 201 bp, Bos taurus
ctaactacatagacagactattcaataggcagaagtttcttttgcaggaagatcaacaaaaagttaaaaataacacaggtctcttggtctccagtgaatcggttgtggcctgtcacctgggtttggggaagtgacccttcctgccttgctgcactgccccatgaccttcagggggcgccctcccatacacaaatctagtct

SEQ ID NO: 25390 - DNA, 201 bp, Bos taurus
gtaccacaaactgagtgacttagaacaacagaaacctattgtttcactgtcctgaattcaagaagcctaaaaccaggatgttggctttctgaaggcaccagggaaggatttgctttaggcttcctagcttcctcaggcattcttggcttgtaaagcgccatcttctctctatctcttcacatcattcctctctctgtgtgt

SEQ ID NO: 25391 - DNA, 201 bp, Bos taurus
cctcctaacttcctaaaagaatttagacagagcatttctggaatattgttatcaccagagctatctgaaagagcatggggtaggggtggtggtggagacttttaagaagggcctagtgctcaggatccactctgtgtcccattgtctctgtagggcccagcaaacatgtatttatgcaacatttgttttttccatcttcaa

SEQ ID NO: 25392 - DNA, 201 bp, Bos taurus
ctaagcacagtgtactgggctctttcaaatttggtctccaactattgccagtgtcagctgacattcctttgtattgcgttcttcatggggatggtgtgagtgaccagaggcagggctttcatgaaccagtgcctttgccctatacctgaacccctcttgggctttctctctagtgttcagtcatatttcacaactaactca

SEQ ID NO: 25393 - DNA, 201 bp, Bos taurus
aagagtcagacaagacagagcgactttcactgttcacttttacttttcattgtattcatcagtaataagagagtaattccaggggattttttagtggatgaagtaaaatattattcacagtgcctagaaatcatagaaaacaaaaataagcaagcaaaacccaaaacctctggattgtattgaagtttcaagaaaccatca

SEQ ID NO: 25394 - DNA, 201 bp, Bos taurus
taaaaggactccccagtaaatctaagatggggatatttggccatctgtgttttgaggcacagaagtgaagctgttgaggcacaatgactttattttttgtgtatgttacctgttgtatggtcaggccattccctgtggcttccgtcttgctctcggtacatcccctgctcaaccagtgcctgcttcactgacagtcctcta

SEQ ID NO: 25395 - DNA, 201 bp, Bos taurus
catttcatctggtgcataaagagttaattagtgagagattttcaagtggcagtatatttaagacagagcaaggagccatttacagtgtcctcactttttcgaaagtgctgtatgagaaggccacaagggcagatagatagagtatatgggtatatgcttgtgcaagttggggtaggagacaaaattgggggtaaattatga

SEQ ID NO: 25396 - DNA, 201 bp, Bos taurus
ccccacccagagacatttttatgatggccattctgatctataggagtgctatctcattgtggtttttatttgcatttatctaataattggtaatattgaacatttttggtgtctactggccaactgtatgtattctttggagaaatatctatttaggtcttctgcccattttttgattgtgttttttttttgttgttgttg

SEQ ID NO: 25397 - DNA, 201 bp, Bos taurus
tgccaactactgcccctgccttcttgggagcaggcatggcccaactccatcacagtcaagggtcttatgacctagtgccagctgctgctcccacctagctgggagaatgtgtggcctttctttgccaagggcccctacaaccaggagtcaacctctgcctccacctccttgggaatgcacacaggccatgtacctgcacat

SEQ ID NO: 25398 - DNA, 201 bp, Bos taurus
tatattattctttcatattatgtattaaaacttcacctgatgaagagcttatatgtgaaaaaagattacatctataaaaacatatatacagacaagtctacacatatttggggacaataatattaattgataatgctaagtcacttcagttgtgtcctattctgtgcgaccacatagacggcagcccaccaggctcccccg

SEQ ID NO: 25399 - DNA, 201 bp, Bos taurus
catttatcaccagtccacgtttatgtcccagaagctaaccttgctctgtggacagaactgacatccaagtgtccctctatttgtattatgagttaaagccgtgggaagagccatctcagctcttcagctaatccagtagtaacaaactctcgcaattttatggtgcttaaacttaacattcatattacttcacactcacat

SEQ ID NO: 25400 - DNA, 201 bp, Bos taurus
tcccacctacctttttgcctaatgtcacttgtccaggcttaagccactataacaaaataccataagctgggtggcttaaaatataatcattgatttctcacagttctgcaaggtgggaggcctgaaatcaaggtgctggaagcttcagttttcgatgagagttctctttttggcttgcatatggcccctatttcactgtgt

SEQ ID NO: 25401 - DNA, 201 bp, Bos taurus
tgttgattgaacaaaagttaatatagatgagatcgttcaatgggatgagatgtagatgagatcccttgttcgatgggaatgtctaaaactcctccatctctatgcaactactgtgattagacttctcaaggaattcattgaaaatattggtgataatataaattgttttaattattatccaattaaagcctgatctactgg

SEQ ID NO: 25402 - DNA, 201 bp, Bos taurus
aggatagtgaggggggaaacaattaacttgaccctgtcttaaagggactcatattctattatgggagagtagacctgagtcacagagattggaagagatatattttgaaagagcagtgcagataaattggtactgggagtcagaaaaggaacagatttcagaggtgatcaatcatcttcagcctacttaacttgaaggaaa

SEQ ID NO: 25403 - DNA, 201 bp, Bos taurus
ctacccatggatgcctgttgcagagaactcagcgttttgagaaatgttgtcttgggttgaattttcaatgaactagcccaggcccactttcatctgcctccggtttacggaattatttcatcaagtacaagttcttattctagaattcaaaggtgcagtatggcctgaaccattaaccctgttgttaattatttgcatgtg

SEQ ID NO: 25404 - DNA, 201 bp, Bos taurus
cggcctgtcagttgtcttgacctcggggatcctggagccccagtgatttaggaatcactgaaaaagcatcactaggcaaagctattttaatgttaaataaataaaatttgcaggccaaattctcacctgtgacttctctcattctggctctgtgtttttaaaccagtctcaactgtatctaggcaaatgaaggatgcatag

SEQ ID NO: 25405 - DNA, 201 bp, Bos taurus
ttgctcacctcttctcaactctgtggtcagtgatgtctccttggcagcttgaaattggccacagtgggaatatttacactatggaattcagcaaaggtggcaaatcaccccatctgcaaggagtcagttgttgaataattccagcacaccactgctgtgaccactttctgaacagagccttggaataaataaccttctctt

SEQ ID NO: 25406 - DNA, 201 bp, Bos taurus
agtagctcctttacactataagagatttagggtttacttcattcattcaaacctctgaaaagtcctgtaaaatgaagatatattttgtttgctgtaatctatgcttcttaaacttcaatcatagaacccatcctaccttgtaacacttttttacatccttcagaatatacctcatgaaagagaacattagcctatatccaa

SEQ ID NO: 25407 - DNA, 201 bp, Bos taurus
aatgacgtagttcccagggggccttttctgtcttttgcttgggcatttctttccttctgccctgtaaccagatctgattctgggataccgaccagatcctaggccctgccctcaccttccctcagccaccatcttcctgcccttccccatgctccttctaccccagggccttagctctacctgggaatctcatccgcccct

SEQ ID NO: 25408 - DNA, 201 bp, Bos taurus
tgttaagtgactacaagaacagatcatgcacagactttcaatgaatgcctctgaaggaagccaacattgaattccattttaaacagacaaagctgtcatatgattgaagtaattctctgaactttcctggcccagagtgctgtgccaacagccagagagcttctacaacccagaggaggaaaccttgcaggagactcatag

SEQ ID NO: 25409 - DNA, 201 bp, Bos taurus
ggccttgttcaaccatgaagccttggaacctgaaaaattacttggcattgcagcatctgagcagggaacctggtcagtgactctgcagagacaagccagtgaccccacctggccaaagagtttgatggagaggtctgcctgttctgtgactacccctacctttctgtgtagtgaaactaagctgtagccctgctcatgctg

SEQ ID NO: 25410 - DNA, 201 bp, Bos taurus
ggcctcagtttccccctctgtcaaatgggcaccctgacaacaccactttacagggggtgggaggctttcatgagatggagatagagcgtgcctctgatgccctgctgctgatcattacggcccacgtctcactctggtctttgaaaggaccactgagagcctgtattcctaacccgcagcccctgccttaactctggtgca

SEQ ID NO: 25411 - DNA, 201 bp, Bos taurus
tagccagtgccctgggcctgaaatgatcgaaactgtccttttattttctcctctctcaaaatgactacttttaattcccctactgaagtttctctggccagctcatccaattttccatcagaattacccacagaattaatctgcacacactggcataaaagaatgggctgacaggacaggccacatccaagtaaaaattta

SEQ ID NO: 25412 - DNA, 201 bp, Bos taurus
cttctcaggggaggcccaaggaggtggaggccagagggctggaggcccagatcatcatacggggcacagtgtctgttcctggtccttaccctccatgagctacaccttcctccccttctggcctccctgcctccagtctggcccagacaatttcccttcctcagagaagtctttgccaagcacttccaggccccgccttga

SEQ ID NO: 25413 - DNA, 201 bp, Bos taurus
aagaaagggagagacgaagacaaaagtggggaggctgctgagggctcaaggcagtcagaagaaaagcagggactgggaggccagctctaccaggggcgctgcaggctgtgcttgcttcgaacctccgagggctttgttttcagaggacagaagggttcaggctgctgctgctccagaaagctgtctgttggttggcctgag

SEQ ID NO: 25414 - DNA, 201 bp, Bos taurus
ttcccagctctccagcacctagagaaaactgctaaagactggatgcaggaaggaaagaattggatcaacttttatttggttgttaaagaggcaatattttaattctttgtgaaggagtgagcagtaaagggtgtccctcccattcccattctgcaccctctcccacccttccaggctaccagactccacccaggaggcaaa

SEQ ID NO: 25415 - DNA, 201 bp, Bos taurus
ggatgtagcagaccccagaaccacagggaatcccttccaggctggtgaggtggccatgggctagtaactcggttggcctatttttaagacagtgttacagcgcaattgggaaaccctgcttgcaaggatggtttagagctcagcaaattggggaaagaatccaagaacaaggccaagtttcaaggtatcagcagggagaca

SEQ ID NO: 25416 - DNA, 201 bp, Bos taurus
agcgctggcgacaggatagaggtggagagccgggccggcgagggccggcgagggtggtgagtcacctgctgctttgtttcttaagctccggtcccgtctgcgctgtcgcagggaggccgccccggcccggcgagccgaaccaatgctggatctggaggtggtgcccgagcgctctctgggaaacgagcaatgggaattcgc

SEQ ID NO: 25417 - DNA, 201 bp, Bos taurus
gccacctcgaggccaagtagcgtggggtcgcggaggttcagcagctccttcaatgcaagcagcactggcacacactgaacgctctcctccaggccctgagtacgcaggggttggtctttctccagtcctcgacccctatcaaatcactaagactcccgcccatcctctcgcccagcgaattctcaccaaaccgaggaaaag

SEQ ID NO: 25418 - DNA, 201 bp, Bos taurus
aaggtcctttccagcccatctcctatttcctcttggccttcagtctctctggctccagtctactcttggtaagtgatcctgacaaaaggcagctgaccacgcttttcaggccctttgatggttcaccactgcacaggatggaagctgagcttcttggctggcattcaagcccttttatgtcagccccctgcctacttcttc

SEQ ID NO: 25419 - DNA, 201 bp, Bos taurus
cgctatttcccttccagcccccggccggcggctgctgcggagatggtgggggcggtgacttaaagggcttttccaccagtgcagcctcccgcgctcaggacgtcccgggccaggccgcttccagggaactcccctcaccctgtggtctcacctccgccggcactccctagcggggcctcacccagcactgacaatactcta

SEQ ID NO: 25420 - DNA, 201 bp, Bos taurus
tggctttgtaccacaggtctgagcctgggcttgaaggtgggcagtggatccaggagtctttagatccaaggagcatcatctccctggagatctgctatgaccaggccatgggcagcacctgggtcacctccagcccatatgcacagtgctgtcaaccacccattctgatgtctgtgtccattggacagatcggcagtgacc

SEQ ID NO: 25421 - DNA, 201 bp, Bos taurus
tctggattatttatttacccactcacctactgaagaacatcttggttgctcccaggttttggcaattatgcaaaaagttgttataaacatctatatgcaggtgtttgtatggacataagctttcaactcctttgggtaaataccaagtttttagttttgtaagaaattgccaaactgtcacctaatataatctgctttgta

SEQ ID NO: 25422 - DNA, 201 bp, Bos taurus
ggggtccaagcctcccagagatgggcctaggaagggagggctgctgatgttgtgaagtcgggagtcggaagcctggatcccatcccagccatggtgaccccgggttgtctcaggctgaactgggccatagtggagttcactggctgtccatccttccctgaccaggctgtgactctggttttggcaacgcgacggccaaga

SEQ ID NO: 25423 - DNA, 201 bp, Bos taurus
cagcttgtggtgtttgaaaagttcttcataccttagaccagaaatgaccccatggaggtggtggcagtgggtgccaggagaaaaagggtacctagtgtgggggtcagtgctgaaaactgtttccccagcttgttgtccttatgtgtgtttgtctcatctcttgtgacatttgttttcttccctgtccctggggaaatcttc

SEQ ID NO: 25424 - DNA, 201 bp, Bos taurus
caggggcctctgtcctggtaggagactccctccctgcagcttgacacacagcagctctcaggttgaaggcaggtagttcccaggcaatcaatttagaggacatgaagtatttggccatcttaacaacaaggaaaggcaggatgttgaaaagggaagagagagtcaaggcaggcagtgagaggcagggtaggatgggggaca

SEQ ID NO: 25425 - DNA, 201 bp, Bos taurus
agattaatcaggaggccatgaaaacagcccagtggagaagctatagaggctggaggtgcagtggaggaagaatagagaggaaggccagattaaagagatgcttaagagcagtagaaccatgggatgagggaaaaggaggaaggatcctacttaggggccagggtggacagtgactgtcaacagagactgggaacacatgag

SEQ ID NO: 25426 - DNA, 201 bp, Bos taurus
atggatcaccagagccaaagaatgaggaccaggaaggcagcaataactatgatgccaggggctgtgttgggggaagattttgagaatgaccgcatagttgacaaaataggactcccatgccttggagttctggttagtttctggtcttgagccagattctctctctgctgcagatgcgagaggacggagcggcaggagctc

SEQ ID NO: 25427 - DNA, 201 bp, Bos taurus
ggactgtgtgagcttaaaatctgcctcagttcccaaatgttctttacagtgtggacttcagcaagcaagtcagtagctcagcagcctgccatagcaggcagtttgaaccgctagtgtctggccgagctcaggtggttctctcctggtgggacattgaaatggaccctgaggggaagatcaagtgcaccatggccccctcct

SEQ ID NO: 25428 - DNA, 201 bp, Bos taurus
tgctggagtcaggttactgtcaacaaggttcaagtctagagaggtttggtaacttacacaaagtcacacagccctttagctgagtgtcagagtcagactttgtgcagacctgaaactaagttgggctggcagaaaccccttgaggtgaaggtagggagcaactgctggccttggggaaatgtcttgactgaactctggtga

SEQ ID NO: 25429 - DNA, 201 bp, Bos taurus
gtggttgatatttgaacctctttcagtgagagcagatccagctattcactacagtgcctaaagaggtccaggaggggttaaaggacacaccgtcagtgtaagaactgccactctattgcataatctacacaaccttgtagttgaatctgggtttctgggaacatcttaatcaaataactagggaatatgatataaccattg

SEQ ID NO: 25430 - DNA, 201 bp, Bos taurus
tctcttgagaatgatcatattcctctggtctgtccatctgtgcaactcaatgcagtagaggtcagaggggagcccagagaggaccccaagacaaaatgacgttggttaccggcttaagagactcaaagaactgtcctagaagagagcaaattctattctgagaataggtttttcaagaagaagcagattttccagtttcgg

SEQ ID NO: 25431 - DNA, 201 bp, Bos taurus
caggtccggctaacctccagccaatcattaaccctgcccgaggccttcaggacactcacacactcgggaattttaggagcccggaaactcagagcaaagtctattttcagaacatggcctgaagaaggaagcaaaggataaacagggaccaaatgttttaattatttgaaatggtttccaccccaacaccattccccaagt

SEQ ID NO: 25432 - DNA, 201 bp, Bos taurus
gctgctgcagagcagtcaggaaaccatggctgggggcccttttgcatgtattcaaatctccagcctctgggcacgtgggaaatacagggagtacgagagtgggggcggcagcaaggacctttccctccgggacccctagtgagctgttttgaggaaggacacagctcggctgcccacgcccactcccattctccccccccc

SEQ ID NO: 25433 - DNA, 201 bp, Bos taurus
ttgagatagcaggtgtcagaatcaagtgactaagaaagaattatgtatgccagtgttctactagagttttaagagttttagtgctactttggagtgaagcgtggatgcacaagatttcagttagggttttagtgatgaaataaggaaggaagagaataaatcttaatggattgaaagtatctgctgaaatgaatctcctcc

SEQ ID NO: 25434 - DNA, 201 bp, Bos taurus
tgatcagttactattcagtgaggctactagaacaagatttgtttaccttttggaaagtgcttggctaaagttgcttctatcagaaaggagaaggtagctcattgctagaaacgatagtgttttataaatatgaagtgatagtctgcatgctgggaattgctgattatctggaaaacaaatagaatttagtaggaggtatat

SEQ ID NO: 25435 - DNA, 201 bp, Bos taurus
tttccgtattactattctttttatggaggagggctttccaggaagcatagaactggacaagcctaaggggtggcccctctggaaggaaaggacacttggactgtacttggagaaaaactcagatcctcatcttggcctgtggacctgcaagactggcttctacagcacctttaaccttacttgttacacctcctgcctcca

SEQ ID NO: 25436 - DNA, 201 bp, Bos taurus
gtggagattatggttttcaaaattatttttaaagacattctccaggtagatcaataaagatatcatagatgaggctaagggccctgctgtcccttccccttattctaatgctggtgtctctggggatgaacgtcccagcactgctcccatgtatatatgtacgcgtgtctagggaggcagaatcccacttgcactcaattc

SEQ ID NO: 25437 - DNA, 201 bp, Bos taurus
ttatgatgaaagtaactggcattagttaaatttttaattgtatcgggttatttctgtgtgagcatataatgaataggagcatgacgagcaaaaaggaaaagtttatcaggaaataaaaattagttccatttctcacaaagtaaatataagcatctctgggtattcaggactttatagagttttggtgttttagagctgggg

SEQ ID NO: 25438 - DNA, 201 bp, Bos taurus
cacaggccagcaagaccatctgcacacaaatgcctcaagtttctgcttccattgtatctgttactgcctgactggtgggctttggggggacctaaggtcagggggccaggaagcgtgcctgattcacagtgagctgtggcaagaatgtggatggatgattctatcatgggacagcgaggaattgggaccaataatttaatc

SEQ ID NO: 25439 - DNA, 201 bp, Bos taurus
agctgactaagaaggtggctaatgtccgtgtgtgcatgtgtgtgtgcagctgcgtgagtgccatgtatgagtgggcatgctgagaatgttcccagggcctagggggtgttccctcagtgtgctgaatacaggtccctcctctgaggagcttacaggggtctctgatcatgaccctgagcacattcccagggtgtggccaat

SEQ ID NO: 25440 - DNA, 201 bp, Bos taurus
gcccttctggccgacagtctcggtccatgcctggggaccatggggacaatttcctcggtcccaccacccctccctccacaaggaagactgcttgtccctgtcccctccttccctgggcctccttggcggacatactcatttgcttgacccttgtggagatttgtttggactggtctatgggattgctagaacctggaggtt

SEQ ID NO: 25441 - DNA, 201 bp, Bos taurus
caggaacagggagctttgaggggcccttaagtgccagagcattggtcccagggcagtccatggagttatcaatggggcaggccagaggcttctcagagtccggctagatcattcctggatgcagcaggagcagagctcagactgtctcttggaggtgatgtcctggccagcaggagcgagcgtgtagtttcagagaggagc

SEQ ID NO: 25442 - DNA, 201 bp, Bos taurus
agatggcctagggaatgttagttgtgcacaagtaagatgggctccatttacagggaaaggaggtgtcagctccacctggttctgtgccttgacaagacaatgtctggtatgccatgtgtacatctgggcccatgtattaaaagggcatcaataaactaaggaacccaataaatagcattcagagtggaggaggagttccaa

SEQ ID NO: 25443 - DNA, 201 bp, Bos taurus
ttcctttcttcctttttctttccctttctgctttccttcttcctccctccctctctgtctgtctttcctacaattgcccatcctaatctctaagtcttttcattccaagtcaacataggactcaaaaacactaataaaattcggcatatgctgacagccgagtcagcatctgagtcatccattttactgcccaggccacag

SEQ ID NO: 25444 - DNA, 201 bp, Bos taurus
ttggccccaagcacgatctggcagctctgatgacaacagcgctgcctcaaggtcagggtcatgatttcacctccttaagaaaactcagctatggagagtacctcctctcgtaggcctcagaatcatgtgttctttcaggagtgacccagtgtcaggctgtctgctgggcttggggcttcagagctggctagagaacactag

SEQ ID NO: 25445 - DNA, 201 bp, Bos taurus
aggacaaataaatgccttcttctctaactggtcaggtatctccaagaaaccctataggttctctttaactcctgcaccttgctcaagcccgaaccaaatcaaagcggggctggctacccctggggcctgtctgtgtaccatccctgatgcaggcatttcccaaggctcagaaagtacctgacagaagcattgcccctactt

SEQ ID NO: 25446 - DNA, 201 bp, Bos taurus
tcttgcctggagaatcccatggacataggagcctggtgggctacagtccatggggtcacagagagtcagacacgactgagtgacttagcacagcaccacgcaaccaggtgattaaatgatgatggtgacttctggtttctactctgtctcacctcgggcagggctctcatgcagtcactcggcaccatcacctcacgtgac

SEQ ID NO: 25447 - DNA, 201 bp, Bos taurus
tctcctcacttggaatattcagttccatccacagagatggtatgtccaggcctgggcgatcacaagaggacagaaaagtgggcaaacctgggacctgtccgtgaagagtgattggaagaggcaggccagagaataggtcagtgctgtaagatgcagggggcaggggcccaggaacaggggtgtgatggtcagatgaggcta

SEQ ID NO: 25448 - DNA, 201 bp, Bos taurus
gaggttttaagagcagaagaaatattacagaagagtcagtgaagttgaaggtaaatcaatagaaattatccaacctgaaggacatacgcattgaaaaaaacgaacagtacttcaaggacaggcggggcaacatcaaaatgtctgcgttcgtgctaagttgcttcagtcgtgtctaactcttagcaaccccatggactgtag

SEQ ID NO: 25449 - DNA, 201 bp, Bos taurus
ggtgtgatcccacagaagagtagtaagaaagtttctccagggaaacagcatattgggtatgatcaaaggttgatgatgtcacgtgtgatttctgagcaccgctggggctgatcagcaggcctcccttcacgaggcaacttgccaggctggggcccagccccctaccccggggcacacccgtggctctacttggggccagag

SEQ ID NO: 25450 - DNA, 201 bp, Bos taurus
ttttctccctgtcactggccaagggaatcattctagaagcacacaaatggtcatcttactgtgtcagcctgtggctcccgagacgcctataaatttagaaggtacgagggccactcaggacaagagacgtgcagcagtcttcttgcctagatactgcagcagcctgccttgtgtagagttgtttagtatttctttcctttt

SEQ ID NO: 25451 - DNA, 201 bp, Bos taurus
agctctcccaacctcgggggccaactaagggggccattttctgttgccattctccctaccttccaaagagagacacccatttagttcaccagtttccccattctgatctcagttctggcctagcatctagggcaatgccttcgctctatctaccacacccctttccagctccagcatctccaggcccaggtcttgccctga

SEQ ID NO: 25452 - DNA, 201 bp, Bos taurus
tgcccccctgctggccagaggtttcatccttggtaggtccttaagctgccatcctcttgagtctgacccacagctggtaggcacctgactcagaaagagctcctctcctgggccctgcctcggttctctctcctttccttgcctgcccccaccctctgcgaggggctctgcccatggcctcaagctcctaacccccctcca

SEQ ID NO: 25453 - DNA, 201 bp, Bos taurus
ttcggttttctatgttctgaagttttcattatcaaaatttgccacactttataaaacagacaacatttttttttttttttttttggcctttgttttcatccaagatagacagaagctttgtctctggacatactggagattgctctccgcgtttggtggaaagggtcgtgctgtcttctgaagcagccaggatgcacactc

SEQ ID NO: 25454 - DNA, 201 bp, Bos taurus
tggaggagtacgctcgtctggagggcctggtggacacaccgcttcccctagcagagggaatgtgcacttaagaggagcccagcatcactgagatggtggatgatggctcgcctctgtgggcctggagctggtggggtcagctctcctggaacaagggtcactaacagcaatgagggcaagggagccccaaacaatcttggt

SEQ ID NO: 25455 - DNA, 201 bp, Bos taurus
tttctcctgcgacgcagacggcctcgaaatgccattggtacctggagcagatcacatcccacttgtctcctgtgtggtatttacctgttaaaccggaatctttcaccaaacctgttgtgcaactatctctttcaaatgtttgctgctctcctttcggccttgtttttggaaatccggtgggaataagggtgccagcttttt

SEQ ID NO: 25456 - DNA, 201 bp, Bos taurus
gtggggagccttgaaagtttacataaacatgcagatgggcgttttcaacgctgctacctgcccgttagatcttcttgaaacctctttaagtgtacactgagtgcagcccattcctcacaggaggaagtagaggcttagcgcaaggtcaaagccgagtggaggctcacaccagtggtcttctgactccaccctgtgttctca

SEQ ID NO: 25457 - DNA, 201 bp, Bos taurus
ccactgccagggttgtgggcacactggagaccagcctgggcccagcagcgaggtgggagcagaacctggcagctggggtgtggaatgggggcagtgggtcgtgtccagcaaggcccaccctcctctcccagcctctacccagtctcatgtgtcccaggcaggactatggcttctgcagcagcagcaacgacagagaagggg

SEQ ID NO: 25458 - DNA, 201 bp, Bos taurus
agttggaactactgtgctgccaggaattcctaattcatgctgttttaagagggctcttcatgaggcctggagacagcagcacttacttcaatagaaactttattgaatactaggccaggcaagcccctgatgagccaagtttggacagcacctgcagtgcatctgccctccctatctgggccaggtgtgtgccaagctggc

SEQ ID NO: 25459 - DNA, 201 bp, Bos taurus
cttggactgccatctccaccctcggccaccccgcaaactgaccgtccaccagtgacccctccaacatccaaattcaacatcccaattcctttcccagccacttccgctcccatgccgacgcaagcatgctcagaccaatgggaattctcaaaggctctaaagctccgccttccgcccaataggccctctcacagagtgtcg

SEQ ID NO: 25460 - DNA, 201 bp, Bos taurus
ccaataaataaataaataactaaatcttgggggaaaaagaattttcagaattaagtatattttatgtggttgtaatacatttcagttatgtatacagatgtttaaatgattccatcttttacaggttaaagagcctctgccaactggttcctcttccttaattaccctatctaaattacccaattaacccatcataattcc

SEQ ID NO: 25461 - DNA, 201 bp, Bos taurus
ggggagaggaaccacctcctggaatgccagaggccctttatgggcttgagagccaccacagagcaggtggtagaacaaccgctctccaggggctagctccacggcccttagggcatctttgtaagtgacctcttggaactggggcttttctctcagtagcaggtcctgcatcagcttctggattcggggagacttgagctg

SEQ ID NO: 25462 - DNA, 201 bp, Bos taurus
cctccctcacaggccagtcacgaggatgaaatgggtgcatgtgtgtaagcatttcacctggggcacagtaagctctccataagtaggagccaagctcatttacttcaggccgtggagacgattcctttacacgacacagcgctccctcactgtttatcacagcagcagcaccttccctggagtaaaggcagccggacacac

SEQ ID NO: 25463 - DNA, 201 bp, Bos taurus
tctgaggctctccatgtcatcgccttgagaggacaaaaggcttatttactcactctagatgtttaaactcatgttaaaaatgtaaggatactttccagaagaattaaaatattggattggccaaaaagttcatatgggtttttctgtaccttcttaacaaaacaccagatgaactttttggccaactcaacagaatgaaag

SEQ ID NO: 25464 - DNA, 201 bp, Bos taurus
gctgtatcttctccagcatttacaagagtacctggctcatagtgggtgctcaaagaaagtatggatgaatgaacaggcctgtgtctcctctccagcctcacctcccaccacagtcctcctccagcataaacctgggtttagtgggatgtggtggggagactgggttcaagtgtttaagagatcttgggcctcacattcaga

SEQ ID NO: 25465 - DNA, 201 bp, Bos taurus
agaccagggattgaacccatgccccctgcagtggaagcatggagccttaaccactagaccaccaggaagtccctgattcacctgttcattacatctcccataaggatgtcagttccacagccagggattttgcctgctttatttgctgttttatatccacacgtagtcagtgtctagcacagagcagatgctcagtgttta

SEQ ID NO: 25466 - DNA, 201 bp, Bos taurus
ccatagttcccaagaaggtgtaaatccttgtttctgaggaggtggttgttgcagagggacaggcagcatccatctcaccccctaccaactaaagacatgcctcctgccgggaagccagggcccagggcacggcattgggagccagcctcaggccgaatccctgcccagcctttggtactcatgggactcgggctgcctccc

SEQ ID NO: 25467 - DNA, 201 bp, Bos taurus
cctcagggccctgcagatggaatgcggaatccccatggcttgcagtttgtatatcaccaggggtttaaattcctgaccaccacgtggtagtcccactcctcgcctcttgattgacaggcccacagtggcataggggtggcagttttcctaaagggaaatggagccattgtgaccaggaggagggagggatggctcctgggc

SEQ ID NO: 25468 - DNA, 201 bp, Bos taurus
cttcctcctcccgtttttcctgcattccctcacttctctaattagtaactgtctgagtctgctcttcggaacttagggaaggcctaggaaagaaactaaagcccttttcaacaaataagaaacagggcttacagaggctgtgtatgtaccttggaggggtctgttgtggcctgcttggtttcaacactcccctcttttgtt

SEQ ID NO: 25469 - DNA, 201 bp, Bos taurus
tgagtgaatcacgaagtgaatgatttacccctgacctttcatcacacaccttgattcttttctaaacctcagttggagaggttggaaacctgggctctgaccctccccatccttcagtggagaccatccatcccgggactgcctcccagaggggctccctatcttgccttgtcctcaccctttggggcctccccaccctgc

SEQ ID NO: 25470 - DNA, 201 bp, Bos taurus
ctgcccagccatagttctccagccacctccagagaaggtcccaccccagcctagagagcaacggcctcagaaaactcaggagcctgaggcctggcacatgctattacactcataccttccacacacacgatcccaagcatccatccaacagttattaagtgcctactgcaggccaagcacttttctagggcactggcacta

SEQ ID NO: 25471 - DNA, 201 bp, Bos taurus
ggccaggactgacaaggctataatattgataaaatatctaaatacttcctggacttcatggtaaatagccactgccctgagggtctcctctactgctcccccgtggccttggccaccccagaatcccccgatctccccagaaaacagcacctaaagagttaatgctggactcagcaatgagcctccctaccttgctcctgc

SEQ ID NO: 25472 - DNA, 201 bp, Bos taurus
accagcctttcccagccattcatttgagaggcagtagaaccttgggataagccagatgtcctgggtttaaatcctagctccaacaagctgctggctgcatgagcttgggcgggtgactcaacgtccctgggtctcagttctctcatctgtaaaatgggcataacggtagtcccaacctggtagactggctgtaggaattca

SEQ ID NO: 25473 - DNA, 201 bp, Bos taurus
tgcaggagcccccgtgacagccatccttggaccctggccaggtgaagaaccctagttcctctgcggcgtggcagctttcatcctgtgcagtccagttagccgtattgcagggcctttgtgctaaaagagagaatggttaggtggtatggctggcttctcgtgaacctgtccccacaccgtgtcagcttgtgtagttttggt

SEQ ID NO: 25474 - DNA, 201 bp, Bos taurus
gctctgtgcatggtcatgctggagccacagcagtccccaagacagcccgacgcctgagggtctcaaccagtcaaaacggtggggcctcttacttgcttctccaatgcaggtttcaaccgcagtggaggtggtggctacaaccagaaccgctggggtaacaacaaccgggacaacaacaactccaacaaccgaggcagctac

SEQ ID NO: 25475 - DNA, 201 bp, Bos taurus
gccaaggggtcaaggaaagaaggtggagcagctagactgagaggtttcggtggggaaatgaaccatgtcggggaatacctgtgtggacgccccacttgcagaacaggctactttccgagaaaccggtggcccccatgatctgtccgatcacgtgcacctcagccattgccctgaaaggggaaaatataatcacagccttat

SEQ ID NO: 25476 - DNA, 201 bp, Bos taurus
ggctctgcctgctcggggctcctgcacttgttgagcctcaaatccaagctcagggtcagaaatgaggtcaaagccataggctctggagtcagatgggcctatgtgtgaattcagcctctgctgccttccagctgtgtgaccttgggtaagcgacctcccctctcttggccttggtttcctcacctgaaacatgagaccagg

SEQ ID NO: 25477 - DNA, 201 bp, Bos taurus
ggtgtccctccagggcaggaatcccaagaagatgagtgacaaggccttcccatagaggtactccaggtggtccatgcccactatcaccaggttctccagggcaggcattattaattggccaggtgaggggatttcacatactaatttcaatagtgacctgggcatgactatagtctttcttttaaaataaatttcctcagg

SEQ ID NO: 25478 - DNA, 201 bp, Bos taurus
agggggtgctttatttagcttcccatcgaggcctcggtagtcagggttagcaagtgctcatgtctgcacccttggtgttgttccaagtagtattgttaccgagcagggttcttggcctccttaatcaaaggaaattgagcagaggccagacaagaaactcaggcgaggttttatcgggacccctgctatagcagcagggag

SEQ ID NO: 25479 - DNA, 201 bp, Bos taurus
tgggggccaggaaggggactaaggagtgccaggggaacacggccacagagcgaggttccacatttgtccacactgtgggaaggagtcagctgagtggtgcggcaggagagccgggccttgacacccccctcaacccaaagcaagctctcttccaccctggacaaggcgccgccccctcttctttacaccctcttccctcat

SEQ ID NO: 25480 - DNA, 201 bp, Bos taurus
acaaactcacctccccttaagaggctgcgcatcattttcctcatctgaaagcggggttgtgggggcgagcaggagcacaccagtacccagggcctcagccatctcttctgcacccccaggtgttcaaatcgcgaacgccgcccgaggccatcgcgctctgctccagcctgctggagtacaccccctcctcgaggctctcgc

SEQ ID NO: 25481 - DNA, 201 bp, Bos taurus
ggacatggccctcactcagacccacatgcacacactcctcaggggaatccggaacttctggaactggggctgtttcagaagcagagagagcacacacacatattttcccagcgtcatgtgccatgtcctgcatacatctttgcatgtgcctcatggctgcctcaacccacccggagttatgactcaggacagggggagccc

SEQ ID NO: 25482 - DNA, 201 bp, Bos taurus
gctacccccacctctcctcctgagcccctactctcatcagctgaaattcccaccgtcaccaatgtccagaaccacaggtttggccaggaagccacaggatacacagaggatgaaaacgcacatcactcagactgaccacgtggagcacggaggcaggaagaggaagggcagcaccctggagatgggccggggacaaggatg

SEQ ID NO: 25483 - DNA, 201 bp, Bos taurus
gcaggtccttaggaagcctggagtgctcagggtgatgctcacgccgtgccaggcccttgtccgaactttatgaacttaacacaactccttgactcctcacggccacccctttgaggatggcctggtgttagctcagatttctgtaatggacagagtgaggcactcagataccatgtccagggcacatggctggtaacaggc

SEQ ID NO: 25484 - DNA, 201 bp, Bos taurus
cgccaccttcctgagcctctgtgccctccaccaggataaacaggcctaggagccatccactccagccctgcagagcagctgggagaaccctgtgaggctcgccaccttctcccattgccccagggcccctccaggggggagggtatggttttgctgacttcacattctctgcaccaaacccacagcctggcccagcgcagg

SEQ ID NO: 25485 - DNA, 201 bp, Bos taurus
ggtggggggaatggagagagaggtgggcagaagtgtcccggctggccaaagcctgggcatgggacccggtgtggggctggggacagggatcgatctgcctcggcggcagtgtgcgggccaggattgcatcttgtcacaataatttattgctctcatcccatctgatcgatggcgctgaattagcaccgtgagatgcccctg

SEQ ID NO: 25486 - DNA, 201 bp, Bos taurus
ggttgggacatcccagcacagcagtaacagtgctgggcattcttgggttgttcttgattttcagtgtaatactgccatttttctagaaaacaatgttgctgtgtcttgtttgcttgcttttttgagggagatagattaaaaaaaattttttttccagcctttttgagatacaagggacatcatgctcagttgttcagtcat

SEQ ID NO: 25487 - DNA, 201 bp, Bos taurus
tccaaacacagccaggtgtaaagggggcatttcctcggccccttgggcttatgagaccagaacttggatccccacactcacctggtagatgggaacttgtagcttggcatcaggtagggaggcctggggcacgggagagagtgggcatcagcagagagggaaggagagtcatttcttccaagcatccatctccaagcctga

SEQ ID NO: 25488 - DNA, 201 bp, Bos taurus
ggtcccacactggcaatggtggccaagatctgagaccttgctccagacctatagttacacaataacccaggaaaaccacatactgttacagatcagaggaagtgagttctggaggcctgagtcccccaaataagggagtgtggctcagattcctgggtcctgaggggcagggtgtttggaccagaatgctctcttactatg

SEQ ID NO: 25489 - DNA, 201 bp, Bos taurus
aacacagatgagtttgacagcaaagctaaaggcctttttgagagctgcctcattcctgaatctccattgcactgtcccagacacaggcaacctactcccagggttggttattttgttcaaatgaagagcttttgatgtttgtagagttgactgtttgaaatcttgggttggccaagaagaaagtccacttggttttgccat

SEQ ID NO: 25490 - DNA, 201 bp, Bos taurus
tggggtgaggagcatggtgatagaatctgaaggtccctaaagcgctgtggttaggaggtgagtgaatgtcgatggaagactggtgtggtgaatggataagcctgggaggtggggtctggggagctggaatcctaggtccccaagtcccttggcccctgagaagggcagagacttaaggagaggttcagaatcatcgattac

SEQ ID NO: 25491 - DNA, 201 bp, Bos taurus
tccgaggcggggagcgtgcaggtccgatgaccgctcggccccaggaggtggctcagggactcgcagttcggggagggggcacaacgccgactcaaggatgttgtttcccattgtcttggcctcacgtcttcgaaggttctgcatctctttctctctccccgggtctctgagtcttccccccttttttctgggcttcatttt

SEQ ID NO: 25492 - DNA, 201 bp, Bos taurus
ggcgggctaaagagtgggtaccactacctgcctcaagacaggtgagagagaaagggatgaggctggtgtccaaagatcaggggtccctggctctgtgttcaaggagttagtttgatgtagcaggcataggtcagaggtctcacgcaagtgagaaggcgctaagagaagtcacacagctgaggagttgagtcttctggaagg

SEQ ID NO: 25493 - DNA, 201 bp, Bos taurus
cagcattggtgaggactgtgacatgtgcttgtgaagggtctcagccaagctacaagatcagcttttatcctgaaggccaggaactgaagcaggaaagagccatcatcagatttgattattcacttttttttttttttttggccatgccatgtagcacatgggatcttagttccttgaccaggcatcaaactcataccccct

SEQ ID NO: 25494 - DNA, 201 bp, Bos taurus
atatatgtaaagaatgtaaaaaggccttccgttctatatcaggtctttctcaacataagagaattcatactggtgaaaaaaccttatgaatgtaaggaatgtggtaaggcctttaatcgtagcgagcgacttattcagcatcagagaattcatactggcgtgaagccacataaatgtacggaatgcggaaagcctttactc

SEQ ID NO: 25495 - DNA, 201 bp, Bos taurus
tgggccgccatctgtggggtcgcacagagtcagacacaactgaagcaacttagcagcagcagcagcggttcctcggggataatcatatggtctctattgcattaaaaaggcctgagtctgcaccattcactatggtagccattggccacgtgagactgttgttcttcaaatgttgctggtgccaactgagatgtgctgtta

SEQ ID NO: 25496 - DNA, 201 bp, Bos taurus
agaaaaaaaaaatcatttgtttcattaaaaagtcagcattttaaccatagctcaccatgtcccagtagtcagaaggccacgtaacagagatcccttataaggggtatagtaagggtttcagttcaactttgaccttattattaaatactactcagatgagaagacttagtatgattttatcaggccttgtacaaaagtatg

SEQ ID NO: 25497 - DNA, 201 bp, Bos taurus
agaccagtaaggcctcaaacctttaagcccatcaggatccacaccggggagaaaccctacaaatgtgatgtgtttgataagaacttcagctggaatttccatcttcagggccatcagagagtccacacaggagagaaaccctacaaatgtgatatgtgtggcaaggacttcagtcagatttcccatcttcaggcccatcag

SEQ ID NO: 25498 - DNA, 201 bp, Bos taurus
ggcacacctgttttgctgggatgttgaatcagtctcattgagaattaagttgaaattggattctgtttttacaatagttatcttccatacactgcttcaattttttctaacattcccttgttttagggtgggtgctggaggattttcctcaatgttcctgtccaccttcagcttctggctatgcctgtgccctgtgacaca

SEQ ID NO: 25499 - DNA, 201 bp, Bos taurus
taacttccacaatcccactgagtaagtactatataattatacgccagccattaggcttctctatccatgggattttccaggcaagagtactggagtggggtgccactgccttctccggattcagagattaacttgcccaaagttataacactagcaagtggccgtgctgattgcgaatcaaggagaggctgggggaataca

SEQ ID NO: 25500 - DNA, 201 bp, Bos taurus
gtagagcccatgggatcggatatggggagagagggaagtcggagtccaaatatgacctgagcatctgcatggatggagtttccacaaaatgagatggaaaagaaatcggtagagtgggttttgaggagagtgaagggtgcagtatgggctgcattgagctggagattcccatcagaactctaagtggaggtggaggtgtca

SEQ ID NO: 25501 - DNA, 201 bp, Bos taurus
accaccctgcctgccagtgggaaggggaaatggaaatagagggcagtcttgtaagggaaccatcacattctctcatttcccattggccagggtctagtcacacggctgccctagctgcagaggaagctgggaaatgtagtctttattctgggtggccacatgcccagtcaaaatccgtattactgtgaaaaaaggaatatt

SEQ ID NO: 25502 - DNA, 201 bp, Bos taurus
gggaagcccagagagtcatcttcttaacccaggtggcctcctcaatgatcgtatgtatctgagtttcagcttctccaaaagtgttaacccaggtacaacacgtggtgttggccacagacactgcctcactcagctaaaagataatcaagggctgtcctgttatcaggaacaactttgaccagggtctaaggatctttgttg

SEQ ID NO: 25503 - DNA, 201 bp, Bos taurus
ggctaggagggactgggttcagagtcagcgtagctctgaccactctgggtggtcctcaatatcccgcagtactggacttggcatggaggcagtgctagcaaaatagtccctgatggaaagtagggggacaggagtgaacttgaggagggggcaggagtctgggcaggtgaaggcagtggaaagaaggaaagacaggatcct

SEQ ID NO: 25504 - DNA, 201 bp, Bos taurus
actcttagggtagagaagcccttctcaaataaacacagaaacaaacaatcacaacaagtgcctgaaaggaaaaagtctcatagatttggttactttaaaatgaaaaaacttcagcaggacaaaacatgccagaaatgaacattaattcacagacaatgaaaagaggcatctttcaaaagcggtataaatgtccaataagcg

SEQ ID NO: 25505 - DNA, 201 bp, Bos taurus
aactcaccaggagcttaaaaccaggaggagagaaaacagggaggccctgaggcctcttctgccttcttcctgcaaggaactgaagaaacacaggcgcccacttttgaaagcacttctcctgggcctaagcctgatatggaaagcccatttcacagttgagtaaactgaggccagaagcgggctgatcactttgctgacaca

SEQ ID NO: 25506 - DNA, 201 bp, Bos taurus
catcctgatagcaccttggatatcttctcctgagcacttttcacagttttttgtggctttgttgtcaagaaagacacttgagaatcaggcctagttgtgcatttgattctcagtgagaagggaatgagtttcgtctggaaccaaacagatcaagggtttcagattgaggcaaaccacaccagccttcactctgcacgcgca

SEQ ID NO: 25507 - DNA, 201 bp, Bos taurus
ggaagaatgttttagagagattcgtgctcgagagcaaggccacaatcccctttgccattcatagcggcaggagactaaccctcttgctgggtgggtattgaggagaggaggcccagaccccttcagctttgggctcttctggaaatctgcccattgcaaagtctacagccatttttttgttttgttttgtcttttataagg

SEQ ID NO: 25508 - DNA, 201 bp, Bos taurus
ctgtgacgaagcgcctagagactgtgtgtgtgtgtgtgtgtgtgtgttggagacagtgtccagtgagcactgcccacaggccattctgcaatgatgaaattgccccgaactgcacctactgagtgcagcgcccctactgagcagctgaaatgcggccagctctaccaagaaagggagtccgtaatttaagctaaagttcca

SEQ ID NO: 25509 - DNA, 201 bp, Bos taurus
cccctggaatctcctggccagatagcctcaggctcactttctaggctgcttccctgtctgcctctggagtgtggaccttaccacagcgtctgaatgcctcggcctgaggattggatgttttggtggggaaggatgggcaaaaccttgtgcaaagtcaggttcaaagctccttacattgtgggtgagccagaatgagacggg

SEQ ID NO: 25510 - DNA, 201 bp, Bos taurus
tccatttgggcccatgttgacccctcctctggccttggacgtttgacctctcagggctttgccagccacggctagactgggggcttctttcatacccatgtgtattcctggccacctggtcctaagagaatgcctgtagaagagtgggcagtatctcatggtttcgtagatctttctggagcacttactaagtgccaggta

SEQ ID NO: 25511 - DNA, 201 bp, Bos taurus
tacttaatatggggtcagggagctggccaggaaggatgggagtggagtgacaacggttgctatgggactcagttccgaaggcaaccttggtgctgggctctgcgtctgtggccttggtacaaagcctcacacttgtgatcttggtataggtcctcacagttctctcatgcttggcattcacgattgtaccttcaatctcac

SEQ ID NO: 25512 - DNA, 201 bp, Bos taurus
cactagcattattcttcactgagggtagaatgggggtcttggagatacccagtccaccacccccaccagatgctggaatgcctggccttctgggggcaacagggatagcagatactctcagaagctaggtctgaacttggatgcctgcatgacagggcaggcaagggagaatatgggttgtggctaagggccagaatcacc

SEQ ID NO: 25513 - DNA, 201 bp, Bos taurus
tacgtgtgatgaagaaaatacacaagttgatatgatggagcatcccagggccctccttaggtggcagtgtgtgtgtgtataaaggaaggcctttctgatcggagacccagggaggagaagggatcccaccatcagaaactgggggtgggtgagccaggagcaatattccagacagagggaagagcaaggacatcggcactg

SEQ ID NO: 25514 - DNA, 201 bp, Bos taurus
ggttcggggcgattctgatagaggcgccgaccccgagggaagggtgtgcgctgagctgctgagagagccactttacctccagccacgaccaggtgagagatggagccggggagttctctctgcccgcaggcgcgcgcgcacacacacacacacacacactcgagacttgatcccagggatccagcggcaagtggagactcg

SEQ ID NO: 25515 - DNA, 201 bp, Bos taurus
ctcagatgaggtctgctgtgcttcagggcagttggggctcagagaggggcctacccgtggtggccaggtgaccggaagttctgggcctgtgtccgtcactttctttcttgctctgtgatactgttgacaacatctactcacagaattttttttttatcctgcacaggggaccctcacaatgatcccaatgctcagggtgat

SEQ ID NO: 25516 - DNA, 201 bp, Bos taurus
ggcaagagtactggagtggggtgccattgccttctccatctgttaagtttagccttagtatttgatgggttttgatgctaatgtaaacggttttgcttttctaaattttaatttaactgctgtttgccattcagttcagttcagttcagtcgctcagtcgtgtccaactctttgcgaccgcatgaatcgcagcatgccagg

SEQ ID NO: 25517 - DNA, 201 bp, Bos taurus
cctgccccaactggggggacaaggccccgctgggcaagctgcctaaggtgctggggctctggttgctttgggatcaagacgaggaacaacttgagaccaggagtgcaggcgcagagatggaggccgagatggaattagaggcagagacggaggaggagatagatgagtctccagaataaaggaccctgggctttctctgga

SEQ ID NO: 25518 - DNA, 201 bp, Bos taurus
caccctccatgcgcctgaaggcccgacccggcagtcccggcttctctgtgctcacctgcagcgccttctccttctacccacctgagctgaagctgcgcttcctgcggaacgggctggccattggctctggtgagatagacatgggccccaacggcgacggctccttctacgcctggtcatcactcacagtcaagagtggcg

SEQ ID NO: 25519 - DNA, 201 bp, Bos taurus
agggtatgacaggagccatcggagaaagctcttggctctgacgggtttgcggggtgtcacagcttcctggggccaagagcaacagaagtgcattctctcgcgctcctgaaagagagaaacatgatcgaaatcagggcgtcggcagggctgcgtgctctcaaggctctgggggaagacccctccttgcctcctgcgggtggc

SEQ ID NO: 25520 - DNA, 201 bp, Bos taurus
tttacctactgacagtttttaagctcggccctgcttcttccccttctgctgataaagcctggagctccctcttttgctaatggtggaaattcaaaccgcatgaagctctggcccatgtagactcctcacccccacctcacctcttaaccacaacaaaaacctgtgctgggtgcttgtccttgttcttgtagagctgttccc

SEQ ID NO: 25521 - DNA, 201 bp, Bos taurus
tttgtccaacctggccactcacaagcactttactataggctccaagttggggaacaccaatactttaaagtgctgcccttgccttgaagcttctggaatcagggaaatgaatggcctcatttcatagaggagtgctattcgttgccaggtgattccttggagttagagcccttgcattcactgctcaccatggccaggcct

SEQ ID NO: 25522 - DNA, 201 bp, Bos taurus
ggtttcctgggatgcatgatcttcgtgctaaaacagaggaagccccaggcaaaccgggttgaggtggtcaccctagtggccagtacctcgagggactccaatctggaggaggagacatacaccagcacaaagggtcacagtccagggtgagatgtgcttcagtgggggtcgtagagctgcagcgagaggccctgcagacca

SEQ ID NO: 25523 - DNA, 201 bp, Bos taurus
atggcggtgagagggacctgggggcgggcctgtgtggagagacggacaaatggacgggaggtagagacgggtcgggatggggagaggggaggagaggcagaaggaagagaggttgaagagaaaggcctcatcaagagggtgtgagcaaaggaaaccagcgtgggggagattcacgcaggaaggtgtgtgtgtcagagaaac

SEQ ID NO: 25524 - DNA, 201 bp, Bos taurus
ccacgctctcaggggccacgtcgaacaccagcgcctcgttgtacgtggggttcagcgtgttcttcttgatggaggttttccgcttcttcagacgccgcccttcgctgatcagagaggccttcacataggggtctgggggcgggtgtgaagggagggcgctgaaccgggtcttcggccctcggaccccatcacggaccccag

SEQ ID NO: 25525 - DNA, 201 bp, Bos taurus
agggctgaggggcccttctcccctctctgtcctcccagatataggacagtggccctgagatttcatcacaggcaagggcaagtaggggtgaaggcccccccaccctggaggtcaggggcgggggcaggagaggcaactcagtgaacccaggacagggggatggatgttagaagaagatgttatctcaacctgggagataat

SEQ ID NO: 25526 - DNA, 201 bp, Bos taurus
tttccatcttattttttaccccaatagattcctgagttttgtttaccctcatgttgtgaacagtgactttcacctaatggccctcaaaaattcctctggcgtggatattagatgagtaatgatgcgtttactgcctttccaggatttctagtgtccctccagagcccctgggtcaggccacatcacggagactgcaggatc

SEQ ID NO: 25527 - DNA, 201 bp, Bos taurus
ttggggggagatagttctagcagcctgtatccagtaaagaagtgaataggctcagtggtcagcagagcaccactgggcctgggagatgaaggggaagaaccgaagggaagccagctcccaggtgtctgcctgggggagcaggcaggagcaggaactactgatggacttagcctgagtctgccaaatggacatgcctggggc

SEQ ID NO: 25528 - DNA, 201 bp, Bos taurus
caggagagaagctgtggcagtttctgagggtgtgagtatgcttcactcgctggtggtgtctatgcaggagaaggaccatataaacactggccccagtcacaagtcccatgaacacagcatctgggaaagtcatgataatggtgtattttgcagcactagacatttcaggatttttcaaagaacacagcccataatcccgta

SEQ ID NO: 25529 - DNA, 201 bp, Bos taurus
atactggagagaaaccctttacatgcagtgagtgtggaaaaggtttcaccatgaaacgctatctcattgtacatcaacaaattcatatgggagagaagtcctatatatgcagtgaatgtggaaaaggttttgtcatggaaacagagctcattttacatcagcagattcatactggagagaaaccttatgcctgcagtgaat

SEQ ID NO: 25530 - DNA, 201 bp, Bos taurus
ggacggaggagcctagtgggctgtcctctctggggtcccacagagtcagacacaactgaggcgacttagcagcagcagcagcagcagcagcatgatgaggacagtgatggagacttttttctccagtaagcttctccttaaaagttggttttatactatctttcaatttactctcacttgtcattgcttcctccaggttgc

SEQ ID NO: 25531 - DNA, 201 bp, Bos taurus
tgattcctaaaatgtcttgccgtatcctgtttgaccacttgcaatttaccttgatttatggacctaacattccaagttcctatgcaaaaccgcttaaagacggcagagtagaaggatgtgcactcatcttctttgagacctccaaaattataactcactgctgaacaaccatcgataggagaatgttggatcccaccaaaa

SEQ ID NO: 25532 - DNA, 201 bp, Bos taurus
gcctgatcgcctggcccacgaatttacaaggatggcgagcgagtaagatgcccgcctacagcaagagaccatttgccatagggtaaaatttggcaccgaataacattgggtgttacagggctggccgaggtcacctccctctacgcggggtgagaggaagggctgacgggaaggttggtctgcagggcagaaggaccggtc

SEQ ID NO: 25533 - DNA, 201 bp, Bos taurus
cacatcctgttgaagcctggcttggagaattttgagcattactttgctagcgtgtgagaggagtggaattccacttcagtattctggcctggagaacttcgtggacctcttatcaaagacagagcagaaaggaaataaatctataagttgaaaagccctgaggtactaattttagcttctcatttgcatcattggacaaag

SEQ ID NO: 25534 - DNA, 201 bp, Bos taurus
aatcaggattgcaggtttgaacgttttcaagcttcaggctcatcattttgacaggttatcttttacacagtcggcctttgtgatgacaaaagcagtttgtgtttttttttttttttttactccatcatattgagagggtaacaggcaggaaggccaggggtctccaaaggaggaaacaggctgcaactgtttaatctcgcc

SEQ ID NO: 25535 - DNA, 201 bp, Bos taurus
cttccagaaagggctgacaggtatgtactgagccagatggaggtggaacaagatgagactggaaatgtagacagggccagacggccccgggactttgtaggttaggtcaagagtttagattttttttttttttgatatttaaaaatgtattttaaaatatttatggaaaaggaatcttagaaagtgaattttttctcctgt

SEQ ID NO: 25536 - DNA, 201 bp, Bos taurus
caccccgtttactgagcatttattttctaatctgtcaaaaaggccaccgtagcttagtgagaatctggaattactgcctggcctaaaattctaattccctcattgaccagtttttcaatgtattttttgtaaattagtcaccctcttagcacctcagtatccttccctgtttggatttttatttattttgggccacactgt

SEQ ID NO: 25537 - DNA, 201 bp, Bos taurus
agagcacttttcctgaaaccgacgagaggaagcatgctggcccctccccagatggcgcagggggtggctggtgagggtgttgtcgccccagtggcctgggcgtcctcagtggcttctgcttggtttgtcctcttgtgagtgatgaaggtgacaaaacacaggaagatgccgggctaagggccgtatcagtagtgaaagggg

SEQ ID NO: 25538 - DNA, 201 bp, Bos taurus
ttggagcagaagccggcctcggttcccccaggcccaattagaggctcctggagttttcaagaggccgcagaggagacctgaagagggcaggagtggccagccttggtcactcaggagctcgagcgccaggaagacggtctgccagaggggctccctgggttcccagaggccctgagatccggaccccaggagagcccttgc

SEQ ID NO: 25539 - DNA, 201 bp, Bos taurus
tccaggctcttgacaggtagttaatcataatggggagaaccttagtattctattacaggttaatcactaaagggccattgcttgtaagcttaagttacacacagtggcccatctccgggaactctgtctgccaggtaatgagcatggaggtaaaatacctttgtttaggtctctggaatcatcctgaccagggccacctgt

SEQ ID NO: 25540 - DNA, 201 bp, Bos taurus
taagaagtaacggatacatattatcctaaagtggccactaaaagagtaataaagagcctgtctgtgagaatagagaaaaaataaaacacatactgttttagaagaggcttcccaggtggccaatataggagacacgagttcagtccctgggtcgggaagatcccctggagaaggaaaaggcaacccactccagtgttcttg

SEQ ID NO: 25541 - DNA, 201 bp, Bos taurus
aataaataacaaaaagtcttgagggtctgcatggccttgcattcattaattctactttgggaacttatcctggagaagaaagggaaagatatgggtgaaattgacctattacagggccttctctggtgttccagtggataagactcaatgttcccgatgtaggcggcgtgggttcaaaccctggtcaggcaactagatccc

SEQ ID NO: 25542 - DNA, 201 bp, Bos taurus
gcccctgtggtccatgtggggcatttgggtcgctctttgaacatcttaaagtcttttacttctacttcataaaaatgcatagaaaacgaaagcaaggccttacagttaatgtaccttaaaccaagctggaactcatcaggtgttcctgccgcaagtcaggggtgggggtggaggtctttggcctcaatcaaagatcagtgg

SEQ ID NO: 25543 - DNA, 201 bp, Bos taurus
cccgcggcccctctctgtggcgtcagacggccaccttctcccagtaacctcgcacggtcttcaccgcgcgtgtccagactctgtcctcttatgagggtgccgatggttggattagggcccgccctaatgactgcaccttactttaactatctgcagactgaaaagactaaatctagactatctgaagactgagaagcctat

SEQ ID NO: 25544 - DNA, 201 bp, Bos taurus
tttctgttaatgaccaccgtgggcgtgcagttgttggcaaggctgtgcttgtcgctgctctgcggcggtgagtcagcgtatgcatgcgtgtacgtttacatgcaggccctctgttttggatttgcctcccattgaggtcgccagggagcactgagcagagctccccgtgctctgcagtctgctcatgttagtcacctgtgt

SEQ ID NO: 25545 - DNA, 201 bp, Bos taurus
tcccccagccctgtcgccggctctgtccccttcagactgggccctcacagcaggcacttcccataaggtctgctgcccctgcgcgtgggccgattgctcctgtgtgcaactggtctgcaaacgtgtgagtctgccggtgaggcaaggtgagcaccgactcctgttctgagcgccgtcagtgtagaaccctaggcagaggtc

SEQ ID NO: 25546 - DNA, 201 bp, Bos taurus
aacattatcttgctgctcttcagtcacagggagccagaagcctgagggtcattctgtgaactccaacacctgtgatggaacacagtgaaaagactccaaagacaggaagacggagatattaggcagccttgaatcatgtggccaagatgctgtctctctctccctcagaaaacacattttccctgcctctatactcactga

SEQ ID NO: 25547 - DNA, 201 bp, Bos taurus
cacagtaaggttaatgggaagagctgaaatgcaagagagagaataaaagaagacaaagaagcttaccaggaccaggagggtacgtgtggctctggcctcgctggaaggtctgggggaaagtctgctgctgtgaatgtgctaagctcattgcttgtgcctgatcaggacaatgaccatggagccaccagtccatacaaagag

SEQ ID NO: 25548 - DNA, 201 bp, Bos taurus
actgggtatctggaagggagacactgggcacgcctagtgcaggtgagcaagagggaaagcactgcttttgtacatccagaaaaggctctcttgcctgcagggtctgtgcccaactcactgagaaacaccgatgtgtaatccggccacagtgaatggctgtgctcttgctcgctgaacatcgcctgcccaaccagtccgatt

SEQ ID NO: 25549 - DNA, 201 bp, Bos taurus
gggaatgtatatgttagccaaaaagtttgtctgggttttctgtaagatattacagcaaaaccccaatgaactttttgccaacctgataagactggtacagtcactttgggaaacagtatggaggttccttacaacatgatccagcaatcccactcctgggcaagtacctggagaaaaccactgttctaaaggatacacgta

SEQ ID NO: 25550 - DNA, 201 bp, Bos taurus
gagcaaggccttataagtgcaatgaatgtgggaaatcttttcttactaactcccatctccatcgtcatcagagagttcacactgaagaaaggccttatgcatgtggtgagtgtggaaaatcttttgccagtagcactagtctccgtcttcatgaaggcactcacactgaaaggcctattgagtgcagtgaatgtgggaaat

SEQ ID NO: 25551 - DNA, 201 bp, Bos taurus
ttggtggaaaactgcacctgtgcaggaggagactttacaaggcaggcaggcaacagctcagggcaccatgacctgactgaggctcagaggcctcaaagacgtaacttactgaccagagggtaggcgtgtccctgaacacactggagcatccctggacaccctcactggcctgacctttttagcgtcagggtatctgagtgg

SEQ ID NO: 25552 - DNA, 201 bp, Bos taurus
tggccaccactggctgggcgggatgtgggggccgctgaaacagaggcacaccgcctgcccttacctggctcctcggtaacctcggactcttctttcacccacaggcccagtgttgactgctccgtagccccagggagcatctccagcccaggttctggagtctcaggtatgggctgagggagggcctggaagtcggggggc

SEQ ID NO: 25553 - DNA, 201 bp, Bos taurus
ttaagggaaagatagcaaaaactttctgagtcttctgtttcttaaaaataatcagtctaaattaatcttcatgccaagcagagtattttggggtggcaaagttttctccccaacagagtcaattataaaattttcactaacaaaacaaaacagaacagctctagactaaaagctttaagaaattgttaactctaatcttat

SEQ ID NO: 25554 - DNA, 201 bp, Bos taurus
gattgggttgcttcaggccaaaacacgggggcgggggggagcagagttctgtcaatcagcagaaaattggattaaatatttgttgagcatggccctgaaccacagccagtccctctcatcaggaaacttgcacaagtctctaacattcatccatcaaagggcagacagaagaagcaaaaaacttcaatcccatggccccca

SEQ ID NO: 25555 - DNA, 201 bp, Bos taurus
acagcttgagaatccatccaattgctcttcccttacctctgacagagctctcattgctgtagactctggcagtttggaaagaaggtggaccctaacccttaaccaagtaggcctgggtcccacttcaaatagaaaggcaatagccaagctgaggccagtaaggggctagtcatgtctcacacactcccacagcctgctcct

SEQ ID NO: 25556 - DNA, 201 bp, Bos taurus
tgcaattaaaagacatgtgtctcttggaagaaaagctatgacacaccaagacagagtactaaaaagcagagacatcacattatcaacaaaggtccattagacaaagctatggattttgcaataataacatatggatgtgagacctggaccataaagaaagtcgagtgctgaagaattgatgctttgaactatgctgttcgt

SEQ ID NO: 25557 - DNA, 201 bp, Bos taurus
ttaaagattttgatttcaccatcaaatctgaatgaagtccttgttgagtagcataatcttggttgtgggtgcttctttttcatcactttagatatatcctgtcactctcttctggcctacagagtttctgttggaaaatcagctattagcataatgtagattcctttgtatgttagtttttactttgctcttgcatctttt

SEQ ID NO: 25558 - DNA, 201 bp, Bos taurus
cttcccctttggtaactataagtttgttttctatgtctttgagtctatttttttttttttcaaaattagttcatttgaatcattttttaaagattcaatacataagtgatatcatatgacttagtatgataatctttagacccatccttgttgctgcaaatgcattatttcacaatttttaatggctgagtaatataccat

SEQ ID NO: 25559 - DNA, 201 bp, Bos taurus
agaagaagaaagaaaaaagataaattatcagactttttaagtatgtaagagaattaccaggacagtgaaatgtatagaagttttagaaaacatttctggaacctagagaacagtaaagttgcaggttaatgtcaaaatgatagaaaataaatctcaggactggcagatgaatttaataaagtgacagaagatgaatcaaca

SEQ ID NO: 25560 - DNA, 201 bp, Bos taurus
aatagaggcagaagtatataacagaaataaaagtgttataaaaaatatttcaaaaccttaaatagatttaatagtactaatacagtcaatagttacagaagaataaaaaagaaaggaaaaaaaaaattccagaagcaactacagaacaagtcaaaatataagaatgataaatgtttggattgagtctttactgtcagtgtt

SEQ ID NO: 25561 - DNA, 201 bp, Bos taurus
gtaccaaagccattcaagccttgaacaaagaacaaattcagatgaggaaggcagtaattcaaaataagatgatattagacatactcacaacagcccagggtgggacttgggccataattaaagttgaatgttgagtacacatgcctgacgtgtctgaaaatgtatcttctgccttggaagatatgcaaaatcaattgaaag

SEQ ID NO: 25562 - DNA, 201 bp, Bos taurus
atagacggcagcccaccaggcccccccgtccctgggattctccaggcaagaacactggagtgggtagaaaaaagctattacaggtggcctttgcatcaggctcttgaatgtagtcagctttggttaagataagaggtttagagtataataaacatggtgacctacaggcaaagaaggaagaaagcaatatggtggccacaa

SEQ ID NO: 25563 - DNA, 201 bp, Bos taurus
gataaaaagccctcaaaagtgctgattagtatgtcattctattaggaagattgagcttgctaagaaaatattgtgtgattgcatttttattgttgtcgggttttttttgtgtgtgtgtgtgatatggatatagttaacagtctcctgattcgttatgtattataagtttaaattttattatatcaagggttcttgaaacct

SEQ ID NO: 25564 - DNA, 201 bp, Bos taurus
tttggatttgtatcatgcaaatgtttcttctcaaagtgaaattaattaaaaatttctatccaagatgctccacataagatatttatcttggtatcattcaccactaaaaactttcccttctttttagtcttgtttaagaaacaaaattctgtcaactcttagaaccgtctttttttttttttttttgctttctgaaaggtt

SEQ ID NO: 25565 - DNA, 201 bp, Bos taurus
gttctgcacttgccaaaataccctacattttcatggtatctggcaagcaacaacaaaaaaagagtaggtctgatcaatatttatgttatagtgaaacattctgaagaaaactaataaaatcctgcaaccctgtctctgtgaggcccagggaaactaagctctgtggctcctaagacatcactcacgttgtactctgtttga

SEQ ID NO: 25566 - DNA, 201 bp, Bos taurus
tttatgccaaagaatgcattgcctatgtttttctgtaagagctttatcgtttctgactttacgtttcagtctttaaaccattttgagtttatttttgtgtatggtgtagaattgctctagtttagttgtctagtttccttgcaccacttttggaagaggttgtcttctccactgtatattcttacctcccttgtcaaagtt

SEQ ID NO: 25567 - DNA, 201 bp, Bos taurus
tagtgttttctttctgtgtcattaatgctgtgaagttggggtgctggggtggagatgtaacattacacaaacccctatcaattgaaggtctgcttgcttgcataaaggacagaacaagaggcaagcaaaacagagggaaagaaaaggcattttaggatttttaagaatatgacaatggataccttttcatgtggaggcaaa

SEQ ID NO: 25568 - DNA, 201 bp, Bos taurus
tttaacagaagtattcaagaatacattattatttcaacatctttataaatgtcaacgtgaaagaattcagacagaagctgggtgtgtgaaagtgcttggcaccttgcctgtcgtgttgtgtagttgctcagtaagtgctgaagcagaatctagacagtgtggaagaggccttggcaaatccctgaagtcacaatcttctca

SEQ ID NO: 25569 - DNA, 201 bp, Bos taurus
cgctgggtccgtctccgtgccacctgcgccactcttccgcctcttggctcccgtctgtccttctgaatcagcgtgaatagcatttcctcgggtattctgttaggccctcccagagtaggctgcactttccccaaagccttataaaacttgatgaccacttcttattttatatgaatggtatttttctgcttgattctaagt

SEQ ID NO: 25570 - DNA, 201 bp, Bos taurus
gttagtgaaaagtctgcttccaactttctcagcagggtacagtggtgaggtgttgggtcccaggtgcttctggataagaggtggagaggactctgtccccccattagctctgttctctggctttctaaggacatttgttctagagatgccctcaactcctccctcagatgtgtcacagctgtaattctagaagtgagactg

SEQ ID NO: 25571 - DNA, 201 bp, Bos taurus
gaacaggggacacagaaagatttggtaaccaggaagggctcatatagtcctgctccgttttagtctcttacacaaataacagtaaaaagcaatctgagtatgtcaccttaacttattccattttccaggaacacaatgcacccaactactagtgacgtttgtgttactgtatccacttcataaatagattgtttaagtgaa

SEQ ID NO: 25572 - DNA, 201 bp, Bos taurus
tctcctttgttaacagttgaactatgcaccctcctcctcttcacctgcaggtcaaatcctgcaggtgaagtgagctcaagtcccacctaagggctgaaaatcatgatgaaactaagccagaaatagtgatgcagccctcttgtctgcagatggcttggatgtgggcatagagcacaatcctcgccaatcatgactaacagg

SEQ ID NO: 25573 - DNA, 201 bp, Bos taurus
aaaggatggcctggaaggaagggacagctgggatggtatgagaaggaactcaaagaaagggaagaagccagtctcttctgagtgaagggaacagatgggaaatgagcaaagacaaaagaggccacgtgggtaggtgtcatcagttagaggccaagccactagaatttgatcaatcgacaagaatgtatttactggactcct

SEQ ID NO: 25574 - DNA, 201 bp, Bos taurus
gttagaaactgcacaactagatggatcaagggaagatttcataatgctctggtgctgggctgggcagtctagccaaattccattcattagctaaggcaccaggtgagtgtggccagtaaaaatgttgttttggttccatagaagcgctgatagggaataggaaataaactttaattttgggggtcctcagaggcagtatag

SEQ ID NO: 25575 - DNA, 201 bp, Bos taurus
gtagtgaacctgtgcttttggcgctctcctgggggaggaacagaggtttatcttgaagaatctagaagtaaacaaggagtaaagagacctgaattctggatctgatgttaatcggtcaactcatttctgctttctggatctgagtttcatcatttgcacaataagagtttgcctagctctcttgatgagttctggatgttt

SEQ ID NO: 25576 - DNA, 201 bp, Bos taurus
ggactgagtgcttcctgccctgggacttctgtgtttgctgcattgtatcctggggatcatcctgatcaaactgccccttggtctgggtcccttgtaaatcatcagggtcacaaggccagtcccagtggcagccctaattacatgtcccctccacgggccctactgctcatcttcaacgggagagtgtttggatgagatgtc

SEQ ID NO: 25577 - DNA, 201 bp, Bos taurus
ctgcaggtgaactgcttggcctcagggcacgggagcccctgggagcagtctggtgctgtaggaaccacccttctcccctcgagtctgactcccggggagcagctgacttgggctgattgtgcaagttcccgtcagctttggcagagaacagaatcattgcctctgtagcaacttgcaaatcatttctgcttgggaagactt

SEQ ID NO: 25578 - DNA, 201 bp, Bos taurus
ggacacacacacacatacacctctttcctggatctgtgctcgcacatcccctgcaaactccaccaccacggagagcccactggccttggaaatggcatcaggggcttagctgtttccagcatgtttggggtgaccagtgaagctgggctgcctaacaggacaggagcggtagcagggagcaggagaagcaggcccagaagc

SEQ ID NO: 25579 - DNA, 201 bp, Bos taurus
gctctgccttcagggtcaggggcagccttgtccaccctctcatccatcccacgtggccatggaggcaaccccaggaaacagagggtggtgtgggagacaatggcctttatgggttcacctgtgccctccgtccaagactctcccagtgtgggactgaagtgcagccaccctgctcctctgccatgtggctctcctccgggg

SEQ ID NO: 25580 - DNA, 201 bp, Bos taurus
aaaggaaaagctctttccagtggtatagcctccaccccaaatatattccaccgcttaaaacggggatataatgacactacacacattgagttagcagtcatttatctccattaccgaaaaaatgatccatttgcaaaaaaataaaaaattaaaaaatggtgcttgttaatgcctgtccagatgctcttgtgaacactgggg

SEQ ID NO: 25581 - DNA, 201 bp, Bos taurus
actgaaagtgatgatgagtgtcagttgcagggtgtacacaatgagaatgaggcactcctgatgaaagggacatggactggagaaatggccaggaggtgagtgatgatggagatggagaggtggtagggaaatcaggtgggcttgcaggtttctgaggtggttgatagggccaggaactgagggaagaaacacaggaaaggg

SEQ ID NO: 25582 - DNA, 201 bp, Bos taurus
tagcttatacctgcttataggtcctctccatcacatgacttttccccagatgaaaccacttatttgaattttgtgtttatcattccattacttataaaagtaatctcatcacatttttacataatcagcatattgttttattttgctattttgagcttcatacaaatattacattgtatataatattcctggatttgcttt

SEQ ID NO: 25583 - DNA, 201 bp, Bos taurus
tctagaaaggagtgacagcgggtgggtcactttggctttcttttccattaataaggtagagagagagttgctgtatgcctcttcatagctttggaaatgttgtgaagttcatcttagaactttataattttgaaactaagcaactcagatttttaggaaaaaggataatatccttattatttttgtgtgaaggttgatttg

SEQ ID NO: 25584 - DNA, 201 bp, Bos taurus
ccattcatcattccctgcctatgcagtcacctgtacatggctcaaacaggagcctctcccgaaaaagctgaacttgtctttctgctttcacaatcagctagctcagtctctctggattcaaattccaaagtcttttgttgaggttggaccatgtatcccaagtggctgaggaatgtaggggtcatgtgacataagcccacc

SEQ ID NO: 25585 - DNA, 201 bp, Bos taurus
gtccctttgaggaaattttggttctcatttgggattgttcatttcaaaaaggagatcccgtctgtaaggctctgcttggactaaggtcacaggcttagtgagacttggaagcagccactctgagctttgtgctgtctgttgttttctggaataaggcttccgtctgctggcaaattttgttttgttttcagtccactagtg

SEQ ID NO: 25586 - DNA, 201 bp, Bos taurus
attggcaggtggattcttaaccactggaccacagggaagtccaatatgtatttcaaactgtgataagaacatatttatccctgatggtccagcggttagcgcttggtattttcactgccatgccctgggttcaacccctggtcagagaactaagattctgcaagatgcaaggtatgatcaaaaaaaaaaacaaccatactt

SEQ ID NO: 25587 - DNA, 201 bp, Bos taurus
tgagtttgagcaagctccaggagatacaaagggcagggaagcctagtgtgctgcagtccatggggtcgcaaagagtcggacatagctgagtgatggaacagcaacaacaatggataggcagtgagtatagaagataatgctttcactgactttccattctaaaggaggaggctagacaataaaccaaaacaagtaagatga

SEQ ID NO: 25588 - DNA, 201 bp, Bos taurus
agttctgacaccagttatctggggttaggcccagcttcacaggttaagggcaaagtcctccacaggactgctctcacttcaaataccaagtttagggcccacactatccttcccctagctttgacaattcactagaaaaactcataaacccaggaaaatacttacaattccagttttattatagccaaatgataccaatca

SEQ ID NO: 25589 - DNA, 201 bp, Bos taurus
aagaactaagatcccacatgtgcaagaaggagggcataacttcatagtcagtcctccttatcagtaattcagcatccaaagactcaaccaactgtggattgactgaaagtaatctgtggataggaggaccatacagtgcaaacccatgctgctcagagtcaaccgtgtactaaaagattacaaaccacaaccaagtagaca

SEQ ID NO: 25590 - DNA, 201 bp, Bos taurus
tcaccctgctccaagatacctgtggctaggctaaattcaggtatatgtggccaagaggcagggattcccttcttccatccagacccaaggctctacctttgatgcagcatgtgaagaaactggggcccagatcacccttgccacaagtcactcataaagcagaagttccaggcctcagaagaccaactgaaaagagttgag

SEQ ID NO: 25591 - DNA, 201 bp, Bos taurus
tacttcagtaagtggaagcaccagttactataatgatgggagtaggaataacaatgcaataatttttagttttattgaatattcgctatttcattgaatctaatgccattagttatgatgtgtattttaaaaattaattcattttaaggatggatatttttaatgtactgtttaacgcacttaaaaatcacttaggttctt

SEQ ID NO: 25592 - DNA, 201 bp, Bos taurus
gagggccaactccttaatgcaggtggtagatggcattgatgtcaacctagctgatgctaatttaggaaaacaaccctgagataaagagttacagcaagaagactctgtaatgagcctgctggcctagctggaatgatgagttttgatctattgcaggtcagagctatttggcttctggagcttcggggacaggcctgtggg

SEQ ID NO: 25593 - DNA, 201 bp, Bos taurus
agatcatgagaaaggtgacaggatatccacatgctattaagaacaggtatgatggaagtgagctggaaaggcagttggctgaggctagagagagatgtctggggtttcgagttaggaaatagaacattaagtgatacaaagtccagagtgtagctataggaataggtatgtacagtgcagtcaaaaagctgtcattaagca

SEQ ID NO: 25594 - DNA, 201 bp, Bos taurus
taaatgctcctagagtaaaacaacaggctgctgttcatatcacaaatcatcaattttggcaacaaattaataaacagatactttcttttccatttcaccagaagtcttttgtactgcgttttaaaactagctttgtattgcttttggataaatgatccatgttcatcattattaaaaaaattcacaccattcagaaaagta

SEQ ID NO: 25595 - DNA, 201 bp, Bos taurus
tttaactgtcactggagggccctaacaggcccagggattctcaagtaggacctcgctctgaaactcgctgacagccaaggcgcagtcatccatgaccaccggagggtgccagatcgtcagcatagggagcgggcccaggcaatttggctgacctcggagactattcttggagaatgaactgagagaaggaaagagggccga

SEQ ID NO: 25596 - DNA, 201 bp, Bos taurus
agtgaatttctctttactttccttgctgtcttactccctgaaaactatttcccacccccgaggccccagctatttccttttggtatgtggtttcacatattctttgctacaggttgaaccatatgagattacaactattcaactatttttgacctctgaaaatgcagtttcatgtggttgaagctaatagaaacacacaca

SEQ ID NO: 25597 - DNA, 201 bp, Bos taurus
tgttccaggaagctgcaggctctgactccaaccagctcttcagttccttgtctgaagtagccatacagatgccaccaagaactccccacctgtgagcatactttgcccacattgcaaggttgtgggtccactactcaaaggtgacagattcttgtatactgtctccctgcccttctggggttttcatgggctctggaatcc

SEQ ID NO: 25598 - DNA, 201 bp, Bos taurus
atggcaacccactccagtattcttgcctgggaaagccctgggctacagtccgtggggtctcaaagagtcggacacaactgagtgactaagcacgcacaatacaaaaacacaaagggcatgtttgaggagcagcataactgcagtggtagaaaatgaagcttcgtagaaaggtacagtttgggaacagccttgtaaaccctg

SEQ ID NO: 25599 - DNA, 201 bp, Bos taurus
caccagagcatccccaatggaaagataaaagtcccacctatgaagaagtgacagaggaaccgaaggggagatgatggagggggagttaggatactggacatgggagggatttccttggtagcccggtgcttaagactctgcccttccactgcaggggtttgatccctggttggggaactatgatcccgcaagctgcacagt

SEQ ID NO: 25600 - DNA, 201 bp, Bos taurus
gttgatgtcattccatttcttctgaaggagtaagactacgctccactctcaccccagggttttttctcctttcttccacccagggccaagaccctggctccgagaaggctgtgggcagctaggactctggctcacttccaccatctctaggggtgtgggtccagcttggcctgggacagactggagagaggatgctttcag

SEQ ID NO: 25601 - DNA, 201 bp, Bos taurus
atgtttcaaaatattcatcaaattttccatccacaccctggcttctccatacctcatcctccttgttaccattacaggccttgttactgttaaaagcatcccctcaatttgtattctagtccctgtttgctgtcctctcaagagctctgctccaccaattatcctttcttgctcttactaaggtaggagataggtgggccc

SEQ ID NO: 25602 - DNA, 201 bp, Bos taurus
ttttctttctctgacttaattcatttagcgtgataccctttagatttatgtgttgttgcaagatttctccttttcaaaaaaattgtgattgggtagtactctatgtgtgtataaatgtatctcataccatttttatccattcatctattgatggatatttaggttgcttccatatcttggctgttataaataatgctgcag

SEQ ID NO: 25603 - DNA, 201 bp, Bos taurus
ttcctggagtgtgaattacctttcagttgggtctggaaaatgggtaggaatttccggccagaaaaagaggacagcggggcgcgccaggcagggaggccccgaagagcacgcagggctggaatagcacagaacttagtgcaggagtgacagtgagactgaaaaggcagctcctgcctggatcccagggtgggggtggggatg

SEQ ID NO: 25604 - DNA, 201 bp, Bos taurus
ttttactcacactacaacagatcacatttatataaaattagaaagaagggaataaacatacgaaaacataaaatcaagactcactttaaagggagcagaatatcaagaactctgttggggctctcatcaactttttttttttttttaaagaaatgctctgcactgatgtggtataatgtaaacatatgcatatataggttt

SEQ ID NO: 25605 - DNA, 201 bp, Bos taurus
actagagagtagcccctgctctccgcaactagagaaagcctattcaacaacgaaggctcagtgcagccaaaataaatgaataaaagggcttccctgatagctcaattggtaaagaatccgcctgtaatgcaagagaccctggttcgattcctgggttgggaagatctgctggagaagggataggctaaccacttcagtatt

SEQ ID NO: 25606 - DNA, 201 bp, Bos taurus
tgttctggcctggagaattccatggacagaatactccatggggtcacagagagtcacacacgactgagccaacgttcactcactcactcaagcaatcagtcataaacccagactcactggccttgcaggagggtggactcagcttagagaagcaaatcaactgagttcctcagcaggatttccttgcgagtctacagacta

SEQ ID NO: 25607 - DNA, 201 bp, Bos taurus
cccatagggatgaagatgcagagaccacaggtggtcaaaaccatccctactcattctctgtactatacgtctgccctctccacagcttcctcaccagaaggggcctatctgtctgtgtcaatcctgctgatagctgggtccaggaatacatcagggacctggagaagagcccctgagtggtccagaaggaacctattgaaa

SEQ ID NO: 25608 - DNA, 201 bp, Bos taurus
ggtttacaggacctgaggggggtcctgagggtggtgaacatctccaaggaagttcaggaggggctgtgtgtccatagatggcctcttccagagatggacttgattccacctggctgtcccaagagttggctcactacggggagaggggaagggtgctctgggatgcctcctgcaggcctcagaccctccttcttctgggag

SEQ ID NO: 25609 - DNA, 201 bp, Bos taurus
actgtcccaccacccactgtacagtcactgatgcaggacaagggatattctatcctctccatgccaaccgcttcacatattcatagcccagactcttctgtttggccccaaaactaaaggcttactgctctttagttataatgtaaactgccctcattccagtctgcccagcactggccttcatgacctgaatacaagtta

SEQ ID NO: 25610 - DNA, 201 bp, Bos taurus
agtctggtgggctaccatctatggggtcgcacagagtcggacatgactgaagcgacttagcagcagcagcagcagcagcaggtatttacactaagacaagaatgtattgtcactggtttttggaaatgtgcacctgtgttcacgataaccttctgggtggctttgtctcaagtgcttctttccctcagtaccaccttcctt

SEQ ID NO: 25611 - DNA, 201 bp, Bos taurus
tgccccagtgcaagggcatctcagtgggtggtggggtgggtgttcctgagagtcctggaccctttgcctccactggggtgggttcccttaagggtcatttcgtgtggggccttcagggtgggaccctctgcttctcctgcagagacaaagcctagagtgaaagaacctgctgcccaaggtcacctgggagtggaggggagc

SEQ ID NO: 25612 - DNA, 201 bp, Bos taurus
gcgccatcttgaaggccagttgtgcgattagagaacggccttaccttacttgttgttgctgcaaattcttctgccagcatatgaagacacctaaagcccaggctgaccctcttgaaagtgacgggcctcctgggagagaggcagaggcatagttgagtgcatgcctatgagtgatctgattacactgggcaggataggtct

SEQ ID NO: 25613 - DNA, 201 bp, Bos taurus
acaatagctcaataaataaataaaggtgttgagatcttgagactgctttctcctgattctgccaggctattatcacaccttgtcccctaaccaaaggcccagtagacattctgtagtaaatctcctcatttttgcgtaaggagatcagattcttgctatgggcagagacaggtcaagctggcctctgtttgcacatggtca

SEQ ID NO: 25614 - DNA, 201 bp, Bos taurus
ctataaaatcaaaattggacggaaatactcaaaatgttctgatagctgtcaggctttcttgttcttttccctaacctctgtcctgctcctttggctcatatctctcagccattccctgtggttttctcatgagctccgagatgagggggatggtgttggctgggcctgaaccatcactctttgaataacaggctgaatctc

SEQ ID NO: 25615 - DNA, 201 bp, Bos taurus
tgagcaacgcgatagccttgagtacacgtgggacagagcgggatctaggatctgggcttagtctcctctcggggggccttctctctgagcagtgctgcccgtcccagggtctcctgcagcaagaacgaagtgctgcccatcggaagccccagaggcccctcgctggccagcttggtatggcttctattcagcaaaagacat

SEQ ID NO: 25616 - DNA, 201 bp, Bos taurus
cagacacctcctggacattttattaatatactaaaatgaggaacatcagttcatttgcttcgaacaaaaggttctgtgcagaaaagaaatccaatcttgtatctaaattgctcctaataagcccacagttgcagccccagcgatgatcctctcaggctgtaattgtgtgaaaaatggatgcattctcatcaccaagaggaa

SEQ ID NO: 25617 - DNA, 201 bp, Bos taurus
gtggggggagtctgtgcacaccccacactgcttgacttgtgggcaatgactaaaggatcaggaaggtgagagggaggaggccccttccatcactggggctgaaaccaaggctgagcagagatcatcacccagcatgcctccccgtaagccctgagcgaggttgatatccagggaggccaggccagctctctattgttgatt

SEQ ID NO: 25618 - DNA, 201 bp, Bos taurus
ggacctcaaacaccttttctgccttaatttctgatgtctgtttcccagaggaactctccagaacacgtcagggtgatcttgctgtctttgccctgttctcttcctgtattaagttggccctagattcctggactggggcggattcccagttcacggtcccctggagaaggtgactttctaagtcaccaacccactatcccc

SEQ ID NO: 25619 - DNA, 201 bp, Bos taurus
tgtgggatgtgtacattggtacagaaaggtggcaatttcactcctaggtatttacctgagaaagatctttatacgtgtaccaaaaggaatgcacaaagcatttctatatgtaatggccccaaactggagacggcctagaagttcatcagcattggaatggataaatcaattattatgtaattatacattggagcactatac

SEQ ID NO: 25620 - DNA, 201 bp, Bos taurus
aaagttgctattccttgcctcaagactttgcctcccaattattggcctgtcctgcagcgggcagaccaataacaaatagataaaggggccacacagcaccccatgtctcactgcattttatctttaagctcttggagagcaaagtgaaagtgaaagtcgctcagtcgtgtcagactctttgccaccccatggactatacag

SEQ ID NO: 25621 - DNA, 201 bp, Bos taurus
aagggagtggcagaggatgagatggttagatagcatcaccgactcaatggacacgcatttgagcagagaaacaagagacagactggagctgcattccacttcagcctgaggagtccttacaccctgcttctcagggtaccccaggctctccatctgaggaactccaggttctttgctgtccctaataagttgtgattttat

SEQ ID NO: 25622 - DNA, 201 bp, Bos taurus
agtcagaggtgtggacaagctgcagtggaggccccagctaggaggagacactaactctcaccagtttaggcatcatctctggcctcaaagagcccatagtctagcaaaacaaagagagaaaggacattgcgaacgaatgtcagagagtcaccacgggcagccagagacagagactcaatgggtagcaataggtggcctgac

SEQ ID NO: 25623 - DNA, 201 bp, Bos taurus
cagtggtccttccagatgtacattatcttcggggctcagaggggcagcaagtggggtgtgcaggataaacaccttcctggatgcctgcccctgaagagacggcagctcaccctctgcagagccaggcggtgtctgtatccatatgtaaataccgagcactcagccagggccgggaaacacacagaagaataacaaacagat

SEQ ID NO: 25624 - DNA, 201 bp, Bos taurus
gaggatcaccagggtcttccagaatgtccaatcaatacaggcctctttcctgcccgggttcaaagccgtttgaaaaataagaggaaaagagtaaataagatagaggccaaaaatgtcacctttgtgaccaataaggtctagatgagggacggtttatatcttcaggaagatgacttcctgaacaaacgctgagtgctagaa

SEQ ID NO: 25625 - DNA, 201 bp, Bos taurus
ggtcctgccagcagctaattgtccacctggcagctaataggccttctgatccacctcaccactcagcccttagacagtgcttctcagccaagggtggttttactcccacaacagacacctggccatgtcatggctgtagcagcttgggaagatggagatgctactggtgcttggggcttacctggtggctcagcaataaag

SEQ ID NO: 25626 - DNA, 201 bp, Bos taurus
agggcagacacaaacgctgggatcccacaggccgcaattaggtcattggcaggctgtgtgggcacagtcggttcctatagaagcctaagcctttgccttcggcgtagattggccacatcaccaacatttggatggaatcccatcgtggctcacaactcaaaacattactctcaatctaccccaaattaaaaaagcccagat

SEQ ID NO: 25627 - DNA, 201 bp, Bos taurus
ctcttcccacctattgtttcattttgccctcagggaagccctgctcctcacagaacattagctctgttttgcagagaaggcccagagtagctaggtgacttttccgagggcacagagcaggtccctgagggtgccatgctcttcccgctgggccccagctgtgtgggcttggggacgaggaagggaacaggtctcagggat

SEQ ID NO: 25628 - DNA, 201 bp, Bos taurus
tgccatcgcaaacagccccccggtccagcagcttagtgtaacagaggagtccgtctgactcacaaaaaccctgtgggtccagaggacttagcaggcagccattgagcactcaggtcgttttgatcctgtggctctgccatcccaaacacagagctccctctgtcaccagggcggtgtggacgctgcttctctgctcttcgg

SEQ ID NO: 25629 - DNA, 201 bp, Bos taurus
tcatcaacgggaaagtcttatatgtgatcttaaaaaaataaaaacagtatactacaggtatagtatgtgcctgataaaagaaattttagccctgtgctgaagacaaggcctggctttaaaaaaaaaaaatcttgagttaaattgtcacgtaccatccttatgttgtatctgaatacaaattacagatagagctgtaagagg

SEQ ID NO: 25630 - DNA, 201 bp, Bos taurus
cggctggtgcagggcagagcagggtccagtgtggctggagtgagccagggagaggacagtgggaggggctgcgtggagattgtaccagactatgtgggtcctgtgggccacaggagggactttggctttcactccaggcaagacagagatggagcacagtggcagagtcttaggcagagaagagacaggatctgactttgg

SEQ ID NO: 25631 - DNA, 201 bp, Bos taurus
agcagcagccaggttgagtggttgcagtacagtttggcccacagagctgaaatagtcactctctggccctttagagagaaacttgactgacccctaacaaaacagtatctcaggacccatccagtttgaccactttcacaaagagagactgaggcttccaaattgaaaggctcgcattttttcactgagtaataactgcac

SEQ ID NO: 25632 - DNA, 201 bp, Bos taurus
gctcaggtcaggagcagagataggaaagcccagaaagtcagatttgtttcttagcagacttcactttctgaactaagtggaaacatttcaaaaaacttaaaattatatggccctcacactgacccagagaattgctggtgggagccctgatgaaaataccagcttctctggtgaaaatcatcacctgagaacacataagag

SEQ ID NO: 25633 - DNA, 201 bp, Bos taurus
tggcatctggaatcttcccagagcagagagagagccatggcctctgcactggcaggcaattcttaaccagtggaccaccaaggaagtctccatctcttatatctgttctcggcccctctgaggggctcctaagaatcccaaattgctccttcaagtagttttgttattgcctgtttccttctctttcttcttctctggacc

SEQ ID NO: 25634 - DNA, 201 bp, Bos taurus
cttggtacagtcatgaaggccctggtgtcagatgggctagtcccagctctgcctctatcagcctcaagtttttcatctatatggtgcggataatgcaatacgatctcctagagttgttgagagaacgaaaattaacgcacacaagcgtttaacacagggcctgatacaaagtaaagctcaacaaatatcagtagctacaag

SEQ ID NO: 25635 - DNA, 201 bp, Bos taurus
taaatactgaaatgtactactaaggaggttgtaaagtttctgaaaacttttaagaataaaatgtttatctttgtgtaacgattaagaagaaaccttgtctatgggaagaaaagttaagactgtgggtcacaaggttcatctcttccaactttatggagactgtacataggagaactgactattaacaaccatttgaaatag

SEQ ID NO: 25636 - DNA, 201 bp, Bos taurus
tctagattgttaatttccaccctagtgcttttcctacttgccagcaccatatgttgtttaacatcccactctttaggggaatctcgagcatgctgaagaagtccttacgggcgagttggcacggatcatctataagaattctacaagtgtaattaaaagtaggtatcttttgaaaatttatttatggtgggaaaatgaacc

SEQ ID NO: 25637 - DNA, 201 bp, Bos taurus
gctgtatctgctacagcctctgcttagcgagggctccctgccaagcacgttgcatggtaggaaatatgactcctattttaaagctaaggaaactgaggcctggatgaaagcaaatcccatccttaaggctgtactgggactcgaccctgggtgtgcccagtcctagacttgtattctgctgtcctggtgtgaatcaaacca

SEQ ID NO: 25638 - DNA, 201 bp, Bos taurus
gtttccaaagtggttgccaaagccacaacatggtgaagggggaggggcccttagcatctcccaaggacaggctggagcaacgcggtgggggtgcggagtgagcacgccttgcagagaccgtctttctgaaaatgtccccaaggtgtaacagggagtttctgtctgaactgatgagtccggatcctccgacggcagtcttgt

SEQ ID NO: 25639 - DNA, 201 bp, Bos taurus
catagtgattgtttgaaagggagtttatccactccctcaggctctgggctaagtgttcagagagggcaagtccctgccaaaaggacacacagctctgggagcaggtctagaactcatacccaggtctgctgcatcacgtgtggcactggtctggaggcagcctggtggagcagagagggtttgggtctgacaactggtgac

SEQ ID NO: 25640 - DNA, 201 bp, Bos taurus
agagatgagtgccagacagcctttggcctcccgaagctcagaatccagtgataaagaaaactacaacccaagcatcttatcctcatttcacaaatggagacgctggccccagagaggttaagtgatttgcccaagacgatacagcccatccatctcagaagcagaactcctctcccagggccctgcacagctggagggcac

SEQ ID NO: 25641 - DNA, 201 bp, Bos taurus
aagtatttctatattatatgctaatataggaagtcaggcattgttatagcagttacaaattacataattttatacaaggctagtctttgtggttgttgttcagtcgctaagtcgtgtccgactcgttgcaaccccatggactgtagcccactaggctcctcagtccacgggatttcccagacaagaatactggagtgagtt

SEQ ID NO: 25642 - DNA, 201 bp, Bos taurus
aaagttactttggttaaactttatttttccatatcaaaatttgaggaggagtgtgtctgagaatttaaatgcgtacaccaagttttaaacaaaactttaagttttaaattaatacctcaggtactaaataaatattccaaggttgtggggatgagagattaaaacgcatgtgtttgagaataaatttccttttagctctca

SEQ ID NO: 25643 - DNA, 201 bp, Bos taurus
ttggagaccagaagattttttttttaagttttcagaggtggggcatttgctgtgttttattaaagcaattcatgcttgaatagactaaaaacattttactcttttcatcattttctaccttcagtgtaagacgatttcaaaaagtaagactggtctagtatcacctaaacaaagaaggggctttgttttttatcattttaa

SEQ ID NO: 25644 - DNA, 201 bp, Bos taurus
gaggaataggtcagacaggccagggctggtgattccgaattaaaaggataataaaaagatgtgagaggccagctgggctgtgctaccagctaaatcagacactgagatgggtccaacacgagcacttaaagggccaaggaatgttggtctgttaactttcatttatcctactcagcgatttgctattttccatcctggaga

SEQ ID NO: 25645 - DNA, 201 bp, Bos taurus
aactaagcctgcatgccacaactactgagcccacgctggagactgcatgacataacaaaggtctcacatacctcaattaagacccaaggaaccccccccccaaaaaaagaaaagtagttcctcagactgctcacccctttggccttctggtgaagcgtgtcttggaaagtcactccgctgccccagtttttgatcctcaca

SEQ ID NO: 25646 - DNA, 201 bp, Bos taurus
taagagtcaagaatgaggcacaggtcccaagtgggccctacgacattgggctattaatttttctgggctttaatttacttattgctaaaataaaaaggacttgaatagatgactgagaaggcccaatccaactctgaaattctaaatctatgtaagtctccacatcagacctctctagagaccgaagattttatttaattt

SEQ ID NO: 25647 - DNA, 201 bp, Bos taurus
cctctgagcagatcttattgttctcatctttcacagatgaggacacggacgcttagagtggggcagtgacttatccaaggcctcacagtggtgctgtcaatattgtaacccaggcacgtctggcggctgatctcctctccttaactatcacatcaaaggcctcccatcaccctctttcattctcacaagccaatgaatgag

SEQ ID NO: 25648 - DNA, 201 bp, Bos taurus
aggatctaagtagcttgctcaaggattccaggctaatccagtgtccttcctacccttctcttaaccttcatgacaatttgtgctggcccttcccctcccacacagattctctgtcaagctacaagattatggatatctccccaaacacaacctgattataggaaggaaaggcctgagaagaggtgagagggaaaagaaagg

SEQ ID NO: 25649 - DNA, 201 bp, Bos taurus
cagggccccaagatgggtccccagtgtcgtctcttctcttctttctctaggagatcgtgactgctttgagctgtggcaagaacatcgtgcctgtcattgatggcttcaagtggccagagccccaggccctgccggaggacatgcaggctgtgctcaccttcaacggcatcaagtgaggagggggcggggcgggttacacag

SEQ ID NO: 25650 - DNA, 201 bp, Bos taurus
gtccatgctggatcccagcacgggccccataccacggtgtactggaagatttccgctggggcagaggagcacaggacgcagcctgttatacactttcacctctctctttggcctttactccagaagggcctcagctcatctcccaccccagccatcaccaccatctcagtcaaatcatctgccctcccctactcacagtgg

SEQ ID NO: 25651 - DNA, 201 bp, Bos taurus
gttgtggcagtgaaagcgaggctgtgggatggaggagaagaggcgggagacagacagagacagaggggaagggaagacagccagaggcctgaacacgcagcgcttctggtccctacagaataaggcaccagagtcagtgacgttcccgttgtccctgtggtattaaaacgggtgctgaaggtgggggcggtggctgctgaa

SEQ ID NO: 25652 - DNA, 201 bp, Bos taurus
cccaatattcggttggccaggggagaagtggggctcttggaggtgtccggaggagttctctatgccgacaaggcactcagagccctccaggtgacatggtacatcgttaggggccacacagctcctgctctgggcatcctgggtccccatcagccatcccctgacctccggccggatgagcgcctttgccctgctgcttct

SEQ ID NO: 25653 - DNA, 201 bp, Bos taurus
gtatcaggaagaaaagccaacttcccctgggaggtgggggcacttgggcacattaagcacttgtcccagggggatggatactcattctctcagggcaccaaccctgggccagagccttcccacagagagagggggaaaggaggtgggatccaagcagaggagggagatcagcaacctggcaaaattgccggttcttcaatc

SEQ ID NO: 25654 - DNA, 201 bp, Bos taurus
agtggaggctgcagcgctgtgggcagggcaaggggaattcagggcctctgcttgcttgctccccagcttcgacttagctgtaacagttctctcttcctttcgtagcccctcgtactggccgcatggggcttagcgctggagatggcgtgggtggagccggcccgggctgcccactggctgaagaggaggcagtggcggaag

SEQ ID NO: 25655 - DNA, 201 bp, Bos taurus
aaatttagtttggccaagtcaagaattaaggggaagtgacttttgtttgttgtttataccctgaagaataacatctgggggaagaaagtagaattaactacatttagctttaacagatatacctaatttcactgtggctgcagtaattaatttttcaaatcagatttaaaaggaatccttcttgttctcagaagcagaaca

SEQ ID NO: 25656 - DNA, 201 bp, Bos taurus
cagctgtaagaacacactagggaacatatataggaaaatcctgggacaaaacttctttattttgcataaagctcttctgagtacaaatctaagtagttaataagaaaatttcatcttacagaaccaaagcaagggatgatttctaagaatcattcattttccaaatgaatgacaacaggacaacttgattactatgcttaa

SEQ ID NO: 25657 - DNA, 201 bp, Bos taurus
agagttgacaaagctatttctcaatttgagtggatgtgctggtaaataccaccatacataacgtatctgtaaaacgcagacattcaggagtttgcagttattaacccaccgcctcttgtttgtcactcaaagtctcttggatcttattgcttcttgtaaattggcagagcggccttgagctccttctggctgctgtatggt

SEQ ID NO: 25658 - DNA, 201 bp, Bos taurus
gtacaacttcagaaaactgtttggcactgtttctaaggtgaatatatatataccctatgatcagcatttatacttctaggtacataccaagataaatgaacgtatatgtctaccaaaagacatgtagaggattgatcatggcagcttttttgtaataatcaaatctggaaagtattcaaatattctatcagcagtagaatg

SEQ ID NO: 25659 - DNA, 201 bp, Bos taurus
aatgcagtttccagtctccctacctagacttggaatcaaggtctttccaagatgatttctatgtccagggaaaaaagaggcccacccccctaaggccttagtgtattcaatcttgcttttatacatggcagcttctagagctattcttagtacttcttaagtatagtatttcattgagtaaaataaggccgacctctataa

SEQ ID NO: 25660 - DNA, 201 bp, Bos taurus
ccaggttgtgctgttaggccttgaacaagtaccagcaggcatgcccatcaaaggtttgtgttccagacactcctttgtgagttgctggtttggaacttgcagtgcattttcaacccacagaaggaaatgttgcaaatggtggttaacctcctaagctagtttacaaaacccttgtttaaccaaaagatactaaaacatcta

SEQ ID NO: 25661 - DNA, 201 bp, Bos taurus
taaagattgagttatatgtaaagtgcttaggatagtataacattaatgttcacaggaagtgtaactattgttatgtgatgtcactatagttcaggtaattcagagaactcaattttgagaaattctaaaagttgtgtgtgtgagtttcatttctcatcccctgtctcaattcttactgacatacagtgtgcgtgttagtca

SEQ ID NO: 25662 - DNA, 201 bp, Bos taurus
ttcctgtgatgtcccagcagactccccagaatctcaccctgcagcctcatcacatcaccatggtgtcaactcaacagcccatggtcccccagcaaccaatggtgccagtccctggccaacactccatgaatccaacccaacagcaccagccaaactttccagtgttcatgcagcagcccttctggccccagtccatccagc

SEQ ID NO: 25663 - DNA, 201 bp, Bos taurus
aaagaaaatgaaacatttttgctgtatttggaattttatattattattagttctcaggcacatgtaggtcttgtctagtttctttataatctgtatacatatatatcttaaagaatgcattgagaaccagtgtaacagacagcctttaatgtatagtcatttagctaccacacaatttgtgggaattgctagactatattc

SEQ ID NO: 25664 - DNA, 201 bp, Bos taurus
ttccttcaccaccaccccccaaatgctgaggcccccagagcattgtggcatctggcttcctgcgagaattcatttgcatcgcaattaactgcgtagaccttggaaacccaggccgcctcgcctacccggctcctccttgagctgcaggccaccaaggggtttctgatttgatgtcaattagtcatgcgtgcaagcgggggc

SEQ ID NO: 25665 - DNA, 201 bp, Bos taurus
tggggactgactcttaaccactgcatgcacctcccttttcaacactcagcagtgccctgagcacttgagagcttggaaatgcattatagggggtaagggggtatgaagagaaggacgctgtagggggagatgctctaggagaaggatgtgttgttttaatataggggccacctaagagaatcacggggcagggaggatgca

SEQ ID NO: 25666 - DNA, 201 bp, Bos taurus
cctggggcctggagtttgcaacctttgtcctagatgttgtgttgtgaaagcttttcccagctgccgccctgaaactccttcccggcaagagtaggtggatatattgatacatctctggatggggccagggggacccggggatgtgcggatgcatttagcttctggaagcatgggaagccaggggaatcaggctgggatggg

SEQ ID NO: 25667 - DNA, 201 bp, Bos taurus
taaatacccacatgtttgaaactttgtggatgagatgagtcaatacagtaagcgcgtgagccgatacgctttgaaacttaacttccacagcttcccaagcattgaaatggacagcttgaacagaggtagagagagaggtgactagaggagtgggttagaagaagaaaaagtttgcatgtgaaatttcaagagtggccagac

SEQ ID NO: 25668 - DNA, 201 bp, Bos taurus
tcctttctttccttccccgtcacatccactctctcaccaagtccccttaagtctgctctcctaaagatgccccaggtgtggccacttttttccatttccacgactctagcttctcccactctggtgtcagccccacctggcagcagcctcttcagaatctaaaactggatccttccactggcctgtttagaacccccagtg

SEQ ID NO: 25669 - DNA, 201 bp, Bos taurus
ctcaaaattctgtgagtttgctgtctgttatctaaccgatcgcacgagcaaagagccaccatgaaggagaggaggcaaatgtagcaactaggagaattggtactcaaggaactagaaataatactgagactgtgaaagaaatgtttgaatttttaatttactgttcatttttttgacggcaccatgcagcttatgggatct

SEQ ID NO: 25670 - DNA, 201 bp, Bos taurus
cagagagagtaaacaggattctgtctatggccagggctttctgggaacacacctgtataagcagcagccattcccaacagaaccgaattctcaggaaatcaggacagagccagggctgggcctttgtttggttttctgaccatgtgggaagcctgaggcctggtggccagccacgccctgcctctccgcctctgcatcctt

SEQ ID NO: 25671 - DNA, 201 bp, Bos taurus
aagcaaaatattactttcacaatcatcaaactagcatgagcaaaaaaaccaaaaaccatgtaaaagacaaagtaaattaagagcccagaacaagaggatctagaatataaattgtatggaaccaaaatgccaagtataatttagtatggcttggaggcatctctctcatgtaagagaattaggcatgagcacctacccatt

SEQ ID NO: 25672 - DNA, 201 bp, Bos taurus
gcaccgaaataaaaatgcaatatttcattcttacaatgaaatgttctaagaatgcttatttcctgttttcaggggcctaaaatgagagattttatctaacgtttatagtgttcctcggatcaagccatcaccggctatctatgcacatacagtcaaggaacacaaaaacagaagctccggtcctgaatgatttctttttag

SEQ ID NO: 25673 - DNA, 201 bp, Bos taurus
cagcctgacctcccccccagggccccacctatcttcccccatacttctagatttagagacccaagcgtctacacattcagcagtgaagctcaggtgcaagtagggccttgaatctgaggtcagacccaataggtgacggactatagatccctggagggagataagggtgggaagcctgagtagtggggggcctgcccaggg

SEQ ID NO: 25674 - DNA, 201 bp, Bos taurus
tggttcctggctctgaaagaagaacccccatgggtttagctcctgctgaactgggcagagacctgggatgagagagaaactctctggggccaaacacagtggctacatctgctatggaaactgggctgcctgacaagagaagccctgaagaatgagggcaaaggaggccaagggagcagagaacagggcagggccaactgg

SEQ ID NO: 25675 - DNA, 201 bp, Bos taurus
acaatctacgtgcccttctcctgcctattgggtactgccgcatcatgtcccctcccagcctctgcagctaccattcttcccctgggagggccccacttcctgtccctggagtcagtagtggttgttaggtgcagttttctgggtcagagccttagacctctgagtcccagtgacatataaacagagactgaattttggcca

SEQ ID NO: 25676 - DNA, 201 bp, Bos taurus
tattttcagatccttctgtaaatttttgttgactcaaggctcaaccctaggccctcttctcccaaaacaataaaattaccgtctctatgtcagttgctcaaaagttttattttttgtccagggccagctttactctgaaagacaaacctctatcatctgtgtacttgatatctcaaagacatgttccaacatgttccaaag

SEQ ID NO: 25677 - DNA, 201 bp, Bos taurus
aaacccttcaggcattctcctggaagactccccttcagtagagcaggagtccccaactcctgggctacagaccagtactgatccacagcttgttaggaactgggccacacagccagaaatgggctgctccctgttgcttgcattgctgcctgaatcatcctgtctgtggaaaactagtcttctaccagaatggtccctggt

SEQ ID NO: 25678 - DNA, 201 bp, Bos taurus
gcatccagctgactcaaaggctcagacctgggagcctgctccgtgtttggagccgagacaggcagtttccacttatcacaacttggcatctggaactctcgggcctttgccagtgcctaataaacaccatacttcacgccttgccattgtcacccacgcgtcccctgacgcctgctgacgccgcctgccaccgcacacagt

SEQ ID NO: 25679 - DNA, 201 bp, Bos taurus
ggaaaagcagtccagaagctcccagttaaggaaactctctaagtgtaactggtttcattgggctgctttccttgaatgggacagacttgtgctgggaagactggaactccacttctgtacctagatttgggctaaaaaggcttgtaactcatccctctacacagggctcttgtaattcccctctctacacttcctctagta

SEQ ID NO: 25680 - DNA, 201 bp, Bos taurus
gaaacagtttagaaaaggggaaatggagaggtcaagaaaaattgcatcagtggtggcagggctgggttgcattaatcattcccaacactgtcccttggtggtcctgcacccagtatccaacagtcagccctgaagtgggtgatggtggtggcggcggcaagtgacaggcagaatgtttttgaagaggtcattgcttacact

SEQ ID NO: 25681 - DNA, 201 bp, Bos taurus
caaaatcaatctgcagcccagtcaccctgcacttctctgagaacataaacttcatgttctcagcagtgcagctggagccctatggccaacagcaggtcacagtaacctcattccaggatttctcaagtacctctcctgtgcctccctcaacctctctctaggtcagcgccttatttgacttcagttctcctaagctacgct

SEQ ID NO: 25682 - DNA, 201 bp, Bos taurus
tttatgggccaacagagtttaccagctctggagtgtgatgtggctgaaactagagaccactcttgtccagatccctagcttacaccctttcggcaataaacggcttctatcatttcagcgacaggcctctatccctgccttccattacctttcttccccatctgtcaattagtcctctgagtagtgtataccttgaccatc

SEQ ID NO: 25683 - DNA, 201 bp, Bos taurus
ctcagaagagggtctcatttgagtcaacttctctgattgatagcaatgaccaggccttcatgctggccaccaggatggcctcgccctcccctttcccctcatgtaccaacatgaaggtgcacacacatccttggactcatcatgtgaacagagtggctggtctaggtcagaaaacagtcacttgaggcttgaagttgaatg

SEQ ID NO: 25684 - DNA, 201 bp, Bos taurus
ctgaccagggctcaaacccaggccctgtgcactgggagagtggagtcttaagagctgtctttaaactgcttaaatcttcactcttcctttaatttctagatctcagtggtgcaaccagtcagaagactttccaatcaggtgtaacctgatacaaatctgtatagcattcgcattctgctgaagctctgctgctaactacgg

SEQ ID NO: 25685 - DNA, 201 bp, Bos taurus
aggggtcgcaaaagagttggacacagctgagtgactaaacaacatctgtatttggtttcccagggagcagtcacaatgagccatcactctaaatagcacagtgataaaggccacttgaagagtacctgtgaagtgcttttcatgcattctcctttaactgattataacatccgttaacttattaaaactaacgtagttata

SEQ ID NO: 25686 - DNA, 201 bp, Bos taurus
tgcagctcatcacttggaggtcagccctcttacctggagggggctggatgggaccagaggttaccttcctgtcacagcctcctagggtgagcaactgggttaccagaagtgtgggcctcaagcgctttgcatactgcgtcttcagctggcagggtttgcactcaggttctgtcactctgggaaagaactcaagccaggttc

SEQ ID NO: 25687 - DNA, 201 bp, Bos taurus
ggacagaagagcctggtgggcttcagtccatggggtcgagactgagtgactttcacttcatataccaacatatggcatgacacaagtcaggaggtggtggacccgagacggcttcaaattctgccatgtttgcttgtgatgacacagacccccagatgtagctcgtgtcttccaaggagtcattcagcacccagaggtggg

SEQ ID NO: 25688 - DNA, 201 bp, Bos taurus
taccttcataggcctcctccgtgtactcggcattgatgaacctgtctaggatgtcattttcctcagcaaaggcgagaaggatccgcacgatctccttggtgttggggttgatgtttaacaaggccttcatcaggcaggtcttccctgtgtccaaggctgtcagcttgtgcatgaggaagtctgcaggcaggagggcaggat

SEQ ID NO: 25689 - DNA, 201 bp, Bos taurus
gtgggaacaatgctcttccactcagcagccccaattctgtagcaccctcctcctcaaaacaagcatcctacaaagctgaaaacctcaaaacaatacaaatcagcctcaggccatatgccaggcctgggtctcccaggaatgtttccccttggacaaggctggctatagaaccaggaatagacctgcttcccaactagcagc

SEQ ID NO: 25690 - DNA, 201 bp, Bos taurus
aagtaaatcaacaaactttttccatttgatccattactctttcttttagaaggaatctaatccaagaccatgtatataacaaacacaataaacctatcatgaaaattccaacacaatttcactgagaactacatcttatgaccttgaaaacgtcagtgacaggctgtcatacttgcaaatgtaaaaccagataaacttacc

SEQ ID NO: 25691 - DNA, 201 bp, Bos taurus
gagtaatccgagatgccagaagataatggagtaatgtctactgggtattaaggggaaggtaacatagctcaaaaattctataaccagccaaaatataactccatttgtgaaagccaccaacatttttaaacatacaagaatcctgagaatagagcatttaaacaaccattcctcaaacagaaaaggctatttgataaacat

SEQ ID NO: 25692 - DNA, 201 bp, Bos taurus
ggacagagtggctaagtgccagtgactccaggaccagccggtcacctcctgctgctctgtgctgcccacccacaagcccctctctctagtcctgcggctccggccttcacaccttggctcaccctgttccctgtcgggagtccctttctctgccctccttgccagttccccatttgcagggcttgaggtgagcttttcctc

SEQ ID NO: 25693 - DNA, 201 bp, Bos taurus
cctccttagaggctctggagggagggacttaccagcctcaggcctgagtcactgggtgcccagacccctccctaactcacccagaggagtcgtggggcccagaggcatccagaatgagctgctccgaaatctcctcctcttcctcctcggactccaggctcggctcccagacccgcagcttctggtagagcacaggccctg

SEQ ID NO: 25694 - DNA, 201 bp, Bos taurus
tggacccacagaattagcatcacttggaagctgtcagaaatatgaacttcagacttattgaatcagaatcagtagggctcagaatctgtgttttaactagccctttgggagattctggtgcttgctaaatttgagagccatttatgattatgatattaagttggttgaaggaacccacagatccattttcctgcactctac

SEQ ID NO: 25695 - DNA, 201 bp, Bos taurus
atagatcactccttggctcctcctttcttcagccaagctggttcctccttcagacagctgcccctgataccctatccacctccttctctcactcaggtcttttccttggtaatgacagcttcactctgcaaggagaactcagtggtaattgacaagcccaggagcttcagtatcccccgagcccctgagaaagtcacaggg

SEQ ID NO: 25696 - DNA, 201 bp, Bos taurus
gatgataaaattattctcctaaattttcttttagttctattatgatttgggtcttctttctaatttagattagttttagtccattaggagttcacttttacataaggtgtgagataagaaactaaaatatattttgctccaagctgataacaaattgcccaacaccggtttattgaatagatcatcctttttgcccttgat

SEQ ID NO: 25697 - DNA, 201 bp, Bos taurus
atgatacagcaatcctacaaatgaaaacatatttccacacaaagatttgcacacaagtgctcaccaaagctttgataatacttacaaaactactttggcttatgataaccaaaaactggaaataaaccaaaatgcccactataaatggacaaataatagtgtatctatacaatgaaatattagacagcaacaaaaaggaat

SEQ ID NO: 25698 - DNA, 201 bp, Bos taurus
atactacattttgtttacccattcatcagctgagggatatttccatacaacacttctgtaatatacatatataagttgtgtggcccatgttttcatttcacttgtctatccaactgtgagctgatggctcatatggtcactctatctctagaattttgaggaactaccaaactgttttccaaaatggccacaccgtttaat

SEQ ID NO: 25699 - DNA, 201 bp, Bos taurus
acaataacaacaatagcatcactaacacgggcccagagtgactgagcactactttatgttatgttctaagggatcactgtgcagtgtaacgacaaccttggacaggcaggcctagggggacagttatagttatcagggaagggcttcatcctcctccttccacctccttggccttgctgttccttgaaaaccactctgatg

SEQ ID NO: 25700 - DNA, 201 bp, Bos taurus
ggtgtggcccatagatttctttggggggtacatttgtctctctctattcattgtgttttgttatcagagttctactggccttgtaaaataagctggaaatttttatgttctctggaaaagttagagatcatagggattttccatgcagttttggtggaattcacctatgaaactgtctgggcctgaagacacttgtaggaa

SEQ ID NO: 25701 - DNA, 201 bp, Bos taurus
ctatccctcattgatctgcctaatatctttttggtacacttccaagtaagttgcaggctcgactatactttattcccagacatttcaccatgtatattattaaggagagttctgtattttattgttcctttgaggtaaaattttaaaacaatgaaatgagtaaataagtgtatacagccacttttgaaaaacttaatggca

SEQ ID NO: 25702 - DNA, 201 bp, Bos taurus
gcccattttgatccatgaggcctatccaggtatttacagggcccatgtggtgctggataaatttctggggagagaggaggggtggtgacctctccttagatctgccaacctcccagccgggccctaccggaaccttacctgctcctcccaggagcccaccaccaccaggtgggcattctccaactggcagtacttctcagc

SEQ ID NO: 25703 - DNA, 201 bp, Bos taurus
catctttgttccctgtttctatggaggccctgccctgtgacccatgagccagggagcatcttccagtgagaagaaagtgagctggaggcataagagaaagcgacaggataggaacaccacctccccccaagcctaataaaatcttttatattttattaaaagcaaaagttctttggttgctatttaagcaagagtcgcaag

SEQ ID NO: 25704 - DNA, 201 bp, Bos taurus
gggcccagagcccacaatacaaagggtgatgggcattgaaactagagcttggggaccctaagggacacaaaatctccaggaaggggtcagggatcggagaagggttatctatggttttctatggggccacaatcagccaaagagggattgggattgaatacaaatgtagaagactgttggagtgaaatttggggcataaga

SEQ ID NO: 25705 - DNA, 201 bp, Bos taurus
gactgccaaatgccaactcctcttcccactggaccttctctgagccccacactggcactccacatggtctcctgggccctcccctgcctcgacccacatacccatctggggaccagctcaggtgatgctagcttctgagatgctccttagtcctgccggggcctctcagtgggtccttgtcctgaaacctgagcccccttg

SEQ ID NO: 25706 - DNA, 201 bp, Bos taurus
ggtcaggtctgggccaggtaggggaagccaggtggcagtcctaagtggggactggaggtgattttctggattcaaggctctggctgggattgagagctcactggggctgcgtggccacagctgcagagaagacagtccagatgtggtggggttggaggaggagtggggttggggcgcagggggctctggcttcaggggacg

SEQ ID NO: 25707 - DNA, 201 bp, Bos taurus
ggctgagccactctgggcatgcccccttttctctctccaggtctcagggtgaatgtggtgagtggtttttgaggtcttctcaggccatatctttgactgtatgccttcccagtggagatgatatcatctccaaggaggcagaaactcctcctttgaggggtaaaaacatgttaaatattccactggttgtggtactccgaa

SEQ ID NO: 25708 - DNA, 201 bp, Bos taurus
tcctatatttgaccgccaagtggcgctgggactccagctagctggtcacctcggttacctggacatcccaggcaaaggccctaggcctgttgagtattcgcgtcgcgtaaacggctccagccgggcgcgtgctaccgcttgaacacagccgaatgtgcggactctttcgcggggcccgccagagattcagctcccgccagc

SEQ ID NO: 25709 - DNA, 201 bp, Bos taurus
gctgtaattagggttaacattcttgggaaactggtattatcatgtcaatatactcttatcgataagtttcgtattacatttctgaaaaggattgtatgaggcatttcacatgatttgctagattcccaaatgacgggtggctacacaaggaagcagactgcccggttggtcctgatggtgcacagatgcagcatttcagca

SEQ ID NO: 25710 - DNA, 201 bp, Bos taurus
gatttctatggggtgggaaggaggccatcgtttctaaggaactctgaaaactacactaggagaaagtctatttttcaaatcccatgtataagtaatgagcaaatctggcctcttgtcaatatgttctttctaatcagccagctttctgtctgaaatgctccatcatcccaagttgtgcagaggaaaacaatatctcttagg

SEQ ID NO: 25711 - DNA, 201 bp, Bos taurus
agagggggccagcctcgcatgctttgaaaattcatttcgaccgcaatttattgcatccttggtttatgccagcaactgtgttcagggctggaagagatacaaggatgaataaggcccgagcctggtccccaggagaattacagcttgtgaaggagactgtggcgacacttaatactcttactaatcctccatgatatattt

SEQ ID NO: 25712 - DNA, 201 bp, Bos taurus
ctatttacagcacaccaggctccttgacggagccaaagcaccaaagcaaaactgaaatggcagcttggggctcaagttaccctggactggggcccccttgcgtcctctgggcttccattctggggctctaggtcatttcaggtgaccatccagactcctaacagttgctcccatgcaggtcccaaaggccccaggggggag

SEQ ID NO: 25713 - DNA, 201 bp, Bos taurus
caccatcacactgggggtcaggttacaacatattaatttggagtgagaggacactttccatctatggccagcttcatccacagtgcttaaactacccccagtttttcaagtatttgcaggtataagggacaggattttttttttttttttttgaagtgtagttgatctacaatattgtgttagtttcaggtgtacagcaaa

SEQ ID NO: 25714 - DNA, 201 bp, Bos taurus
gtcgatctgctcccccagctcggccacactgtccgcgtgcttcttcctcagtgtggtcgtcgtggcctcgtgctgcagagtggcctcctccaggtcccggcgcagtttctggaactcagcctcccgcttcttgttcatctcgatctggactgaagtggccccgctggcttcttccagccgctcgctgatctcctccagttc

SEQ ID NO: 25715 - DNA, 201 bp, Bos taurus
ccactccttctccagaggagggtgtggagatggtcaaggtcattgggctgttgctgatggggcctgtgctagagcctgagtccacgaggtggagccatttcttgtcttgtcccctaagtactcccaggcaagacctcttcctgtacatctgtgctgagcacagagccctgcacagaatacctagtgctcacccaagattta

SEQ ID NO: 25716 - DNA, 201 bp, Bos taurus
agaggaaggccttcatcattctctctgagattccagagagtaactgtgtgtggaaagaggagggtgtgaaaccagacgtggggagggaattcaaatgcccagatcttggtgactgggcctcaaggaaatttttgaaaattttcaagtcatcaaattgcatttgaagcgtttcagtgcatttataggcatgttattacattg

SEQ ID NO: 25717 - DNA, 201 bp, Bos taurus
actgtagcttccatggtggtttctgtaatttccatattccttccacagagtatatgacttttctttctcagtttctttttatcttacttggtgcctagattgtctgcaggtttacatgtagacaacacacacgtgcacagatatctcgggatatcctccaccccagctctgtgtttgggcagacattgtatccccctgctt

SEQ ID NO: 25718 - DNA, 201 bp, Bos taurus
atatactttctaatttcctgtcaccccagggcccttggggaaacttgcatgcagtcagagggagtcatgtggattctggaagctttgcatgtgatactcatagagcataacagagcacatggccctctccctctgcaaggagcagggggagcagctgcaggcctggcatttggctactgagacgggtggagaacactcacg

SEQ ID NO: 25719 - DNA, 201 bp, Bos taurus
actgtttgctgtcccagggagtttggggtacagattgtcttgtttggcaggggagaaagagataaatattcacactgtaatgagtcctccctggagaaagcgagggagaaggaatgtgtactcctcaaaggtccacggaggaggtgggacgtgggctctgttccgtactccttgaaatagttcaggaaaggcatttccttt

SEQ ID NO: 25720 - DNA, 201 bp, Bos taurus
agaaactgacgagtttaacacagttcctgggttggtttccctgtgtctgtttttttcatttctggttcaatgagctctggccaggaaagtggaaaaagtcatgtgatacaaaataccccgaacaaacaaaaacaaggcttccaggtccaccctctttatcagaaaattagtgtgggtcttacgaagggatgcatggctggg

SEQ ID NO: 25721 - DNA, 201 bp, Bos taurus
agggcatacagggcaggctggagaaaggaggccatcgtctaccgcagactcattagccaaagttgagctgaccaagtgagggcctggctttgccttcctctctcccctcttcttcttcctcctcctccgtcttctctttcatttttacaagctttaccagacggtatactagagactggccagggaaaagtttgcagggaa

SEQ ID NO: 25722 - DNA, 201 bp, Bos taurus
aaaatatgaattccttgtggaacatcgtaattcctgccgaccaccctgaggcctcacagcctgcagtccagccacactggcctcctctgtattcctcgatccctttaagttcatttcaaggtacaaccttgaatatgtgtggtcccttctgtctggactgctcttccccatgctttctgctccgctgtcatcctctcatcc

SEQ ID NO: 25723 - DNA, 201 bp, Bos taurus
tggagcggctcctggcgcggcggcggcctgtcatgctggtgggaactgcgggcactggcaagtcggtgctggtgggggcgaagctggccagcctggaccccgaggcgtacctggtgaaaaacgtgcccttcaactactacaccacatcagccatgctgcagggtgagtgtcaacacctcaataaccaagtgaatcggcctg

SEQ ID NO: 25724 - DNA, 201 bp, Bos taurus
ttcttcttctcccatgagcagttggaactggatttcctgatggaccatctgtgttttatacaaatcgtatttgacccaatttccctggaaggaacaaagacaaagtatagggcaaaagagaagctgtcaaacatgcaccaggtcttctaaacatcctttctgctctcagtggatctatttataaggtacatccaccccata

SEQ ID NO: 25725 - DNA, 201 bp, Bos taurus
tggatgatgccgacgtggccacctggcagaatgagggcctccctgcagaccgcatgtccacggagaatgccgccatcctcctcagctgcgagcgctggccgctcatggtggaccctcagctacaaggcatcaaatggatcaagaacaagtatggtgaggacctccgggtcacccagatcggccagaaggggtaggtgtctg

SEQ ID NO: 25726 - DNA, 201 bp, Bos taurus
agaagaagctggaggagcatagtgagaacagccacgcagagttcagggtcttcatgagcgcggagcccgcaccctcccctgggagccacatcatcccccagggcctcctggaaaatgccatcaagatcaccagcgagccacccacgggcatgcacgccaacctgcacaaggccctggacaacttcactcaggtagggccct

SEQ ID NO: 25727 - DNA, 201 bp, Bos taurus
tttattatgataattgggttaaaccacctagaacacaaagcaccctaaaagtgtaggcacctaatatcaagtctaaagggagaactcctcaatcatcattggagattttaacactgttctctcagtaactgatagaaaaatagacaaaacaaaacaaacaaacaaacaaacaaaaatatatatatatgagtaaggaaatag

SEQ ID NO: 25728 - DNA, 201 bp, Bos taurus
tgataagctcaggccagtcaggactcagtgcttggaggtatgggtggacctacactggaggctggagatcccagtaaagccgaagtccccagagtaaggatggcctggttaggagcggatgcttgataagcagtcagctgtgtcagtgacagtaagcactcttctctggagtttttggtagatcaccttctgagttataga

SEQ ID NO: 25729 - DNA, 201 bp, Bos taurus
cagagtcggacgtgactgagcatgtgtacacacgggattggagtgggtgagagggtttgcctgcaggggcggcctggccgctgggctctggggttttctgcgccctcctgaggcggctgtgtttggcactgaccatcgacggaacttattttcagcaggtttaactgtggcgggcctgtcctgttcttcagtagcaatgaa

SEQ ID NO: 25730 - DNA, 201 bp, Bos taurus
catgcaacatcattccttaaacagtgagattgtagaccacgcgtagaaatcagtattatccgtacaatgagatggcccactagcacccagagacagtgccttggaggactgtggtccctctcttttcccttccactcctcgtcctgtgtcaggagtgggagatgctgcagatcctcagttattgcgggtccactcaacatg

SEQ ID NO: 25731 - DNA, 201 bp, Bos taurus
gatcatgtctgcttcatctttataacccctagagttctagaacacattctgtgctttatacacatttctggtattgaaactgataggaaattgagaaattgataggcagaggctgaattccttaaatgggtgattggtagtccagattcacccctcccttctggaatctagatagagacccttggaggtcagagcacagat

SEQ ID NO: 25732 - DNA, 201 bp, Bos taurus
cttaaagaggctggatgaatgtggcaccaagaccctggcggcagcagcaataaccatgctgcataggcagatggtctgcagagagcatggccagagtacctacaacttgcactctaacaacataatgcagatcacatttccataactgtatcatacacaggcccagcactgtcacattgcttgtctaaatgtgatacaaat

SEQ ID NO: 25733 - DNA, 201 bp, Bos taurus
tagccttttaacatgtttgtaacagcttttttcattttcattaaaactattgctcaaagcagaaaacttggaaattacacaggaaggcacaaagacaagacgttatccacaatcccaccatccatccccagattattttataacatttctgggtttgtctcttccatttttctacctatcgaagtataaaattttacttga

SEQ ID NO: 25734 - DNA, 201 bp, Bos taurus
tacacttccggttcttcctctcattccaacagtgatctgtgttcactgtgcaaagtgtgcaaaatccaggaagacagaaataattcaagatatgctacccgtactcctgcctcgaagaggtaaccactgttaatatgtgggtgttttttggtccagatttatttgatacacacactctgaggttcacacatgtaaatatgt

SEQ ID NO: 25735 - DNA, 201 bp, Bos taurus
gacatcctgttacatgtggcacgtaaaaagaaattatacaaatgaacctatttatgaagcatatacagactcggagaacaaacttatgatttccagggtgggtaaatgggaataaaggatagttagggagtttgggcggagaaggcaatggcaccccactccagcactcttgcctggaaaatcccatggacggaggagcct

SEQ ID NO: 25736 - DNA, 201 bp, Bos taurus
ctgcacgcccaccatacacagggatgccgctgctactcgatgcggccccgggcggcctcccatctgctcttagagggtggagtggccttttcttccctccgaacgatgataaattcagacaccccttcatctctccttccaggactgttttgactcttcttttgggaggccgatcagcacccccagcggccttatacctgc

SEQ ID NO: 25737 - DNA, 201 bp, Bos taurus
ggctttatggcctgaaactctttcatcttggcctccctatattctttctgctccttcacagtcagcagcatgaactctgtgttcactcgtaaggggtcaagggcagagtagtagcggggccgttctttcttggcagcctgggctgccgtgcctgcgggcggagccagcatgcggtttggcttgatgacctgcgtgctggtt

SEQ ID NO: 25738 - DNA, 201 bp, Bos taurus
cctgacattcctatgccagcctgacctgggaagatcatttgtcctctctcagcctcagtctcctaatctatgaagtgggcaggctggcaaagccaaggccggtaaacacattcccggtttggctctaggggcaactgtactgctgtacctgagatctgcccgaccttgtgggaaaaagccctgtggtctagtcaggacgtc

SEQ ID NO: 25739 - DNA, 201 bp, Bos taurus
taccatttactcactgtgactgtcagtgagttattcaacttctctgggcctcagtgtcttcatgtatatagggcagagatagtaataatacctagcttacaagttttttttaaattatttatttggcatcattgcgtcatgcaggaactttctgtgtggcgccagagcttagttgcttggcagcatatgggatcttagttc

SEQ ID NO: 25740 - DNA, 201 bp, Bos taurus
caggtgtatcggaggagagcgctgcccaggtggtcttgagggtggtcttatctatctcagctcctcagagtagctcactccctgtgagaaagcagcacagcgtcacaggaaacactagcttctcccatttttgccatagatgattgtgatatagagaaattttaaaatttctctgtgctttcagattccttatctgtaaaa

SEQ ID NO: 25741 - DNA, 201 bp, Bos taurus
ggttctgaggaccatgaacccttcttaaggggcctgcggcatggcacagagcagtcctgggtgagcccacttgctagtgaccaaggatgacccacacaacgccctgaaggactctgcgagagcaggaacaagtctcagagccaagactcatgccttccagcatccacagcatccccaaaccagggaagtctgaggccctgc

SEQ ID NO: 25742 - DNA, 201 bp, Bos taurus
ctcagcccgtctcactgggagtggccgtgttcccatcaaagccaacgctgagttctccccttttcccaggagatgagcgtggaactaatgggccacagcataggatccacaagtacttggtcaggtcccggctcttcctctaccacctgtgacccggcacaagccccggtcaagccatctgtgaaacgggcaaggcactgg

SEQ ID NO: 25743 - DNA, 201 bp, Bos taurus
gtgagggtcccagacaggctggggcctaaccatctgtgctctcagcttcaagctgggcaaagaatcaccctctcttggcccctttaagaaataccatctggagaggtgaccctgtgaaccatgaccccagacctttgtcccatgcacccagagtcggggagtgcatgggaccccgacctcctggccagccacagtctcccc

SEQ ID NO: 25744 - DNA, 201 bp, Bos taurus
ccagcagcagggcctgagatcctctggggtcagctcatcaccctgctccagcaggcagcaggtcttcccatcccagtaacatcatcactctgctagcccacgagccctgctctctgtggccccttagatgtctggtctccctgccgctgctcctctcgtgccaggaccacgggggcctggttaggaggaagcccacggccc

SEQ ID NO: 25745 - DNA, 201 bp, Bos taurus
aatatcaccatggtgtccatttcaccctaaatcatgtatagactgtgtcccagttggcggtgtggtgtggaaaggttgtatataccaaggaaggcaggtatagccggcctcatgtacatcaccctgtttagttcctaggcaagtatggtcatccttatggctcacatatccacaaggttccatggggaacaggaacaacac

SEQ ID NO: 25746 - DNA, 201 bp, Bos taurus
gagctgcttggggcggagcagtgctgtgctgcccatcgacccatcccccatccacttcactttggatcaaagttaaatgaattcacgtggcctgagtagaagtcctcggcagggactggggctggcggagcaaagaaggtacctcaggggaggggtgtctggccctggccccacataaggctgtggtggcgcccgtgcctc

SEQ ID NO: 25747 - DNA, 201 bp, Bos taurus
cttggtttagggcttctggcctccagaaaataaatttgggttttcttgagccaccaagtttgtggtcatttattatggcagccctaggaaacttacacacttgcctcaaactcttcaatggcccctcctggtcagggttaaatggcccagggagcctgctgagggctgattctgccacctctccagcctcgttgctcaccc

SEQ ID NO: 25748 - DNA, 201 bp, Bos taurus
aagcaaaaagggcattatgatgacacttttgatacacttactggaatttttttcttcagttcagtctcttgtacgttctatttccaaattcactccagactctaactcagctatcaaaactagctcagtaataatctccctcaagtttcaaaatatatcagataatcaaatcagctttattttcttccatgagctttccat

SEQ ID NO: 25749 - DNA, 201 bp, Bos taurus
ggggttagtcctcttccagccatccagatcaattagagattctcagaagcagtggaggtccctggctgggcggtggcctacagaggagtagctccagggcgtttcctgggcttagaaacggaggctgaggaagtcacagtgagcgatgggccctgcactgcatctttcttatagagtcctctgtggtcagctgactctgag

SEQ ID NO: 25750 - DNA, 201 bp, Bos taurus
tacacaaaccaactctgtggccagacaggcatgctggtcagctgtctgataacacctctgagttgagctcggtcactcttgggtatctggattaacccttccacaactgctgcccctgggccctctgggcaaggccccagttaaatcttatttctttgtccacagtgggggaccttagtaaagcctgggacactaagtgct

SEQ ID NO: 25751 - DNA, 201 bp, Bos taurus
gggcgggagggaaggcccaggcaccgaaccggcgcggaagtgtcttcgccgataatcccggcagcaggctggtctctgagcgccgctcggtggccgatcatgggactgcagaccgtatactcggggcttaggaggacacaggtctgtgcaaaaaactgggtggactcgtaaatcagggcctgcggggaggtaaccctctta

SEQ ID NO: 25752 - DNA, 201 bp, Bos taurus
ctgggagacaagagctctacagaccacagatgcctctgtgggatccatgctgccctgcgaacaggggagaagcacaactttcttatttgcaggctgctgcgttatatgtttacctggccccagagagggcaagttggtccaggcactgagataccagagcacatcatggtgccctggggcgactgaaagctggagcctcag

SEQ ID NO: 25753 - DNA, 201 bp, Bos taurus
ggggccattcctgactgacctgctgggggcgggggcaaggagcactgctctgaggagtcaccaaatgagggaccttctgctcgggtgacactgcctggagacggtcagtttgccccgtggcccacatccacctgaaaggtagcaagttctacactgggcgagaggggattttccagaaacccagggctacctactgacaag

SEQ ID NO: 25754 - DNA, 201 bp, Bos taurus
tttgcgtgaactctgggagttggtgatggacagggaggcctggcgtgctgcgattcatggggtcgcaaagagtcggacacgactgagcgactgaactgaattgaaaggtcttctggcccccagtctgttcgcctcctgacagtactagcgacgactgcctgggagcccaccctccgggcaccagggaacgtggctacttca

SEQ ID NO: 25755 - DNA, 201 bp, Bos taurus
aattccaagctgactatctgggaggctagagaggaagggaagaagagagggagagggaaggaccccttggaggaggcaggtagccactctagggcctcccctaaaatgcagggggaacagggtccacaccagagaccactaggagctgagcaaagggaagcctgagcctggaggcgcagagagaggatctgccccagcagc

SEQ ID NO: 25756 - DNA, 201 bp, Bos taurus
tgtctcatataaggacccaaattaaatggtttttgtaatgacattgaggttctgtggtattaagactctcttgatcataagaaaaataagcctatttaaactagctcatataaaagatttatcaaaaggaaatagctgttatagaatccaaggaaaagctgaccagggcttcagaaagggctggcactgaaacagttcagg

SEQ ID NO: 25757 - DNA, 201 bp, Bos taurus
ttcatgtaccaccagactactttgctgatgagcatgtgtttgcacatggtgcctactctgagtgaaattaattagacttgtgctgtcctagtcagtttcccttccagcaggttgtgtggctagagctccttagagtctaaaactgattctctagttctactgactgctgggttggacatttttaaacaattggaagacggg

SEQ ID NO: 25758 - DNA, 201 bp, Bos taurus
gtcagttatcattatcgggccatttttgttcatacctggattgccaggtataatcccaagagagctgggcatttcaaacaggtgaaggaggggaaggtgagaacatagccagtccttggccattcctgtttgaaatctgtcccttctgtgactccttctgcccagattcctccagacgagcccacactcccaactagtacc

SEQ ID NO: 25759 - DNA, 201 bp, Bos taurus
tctatggagaaatacctcttctaatcatttgcccaatcttaaatgggttatttgtcttttcattgttacattgtaagagctcttcatatattctggatacaagacccttatcagagctatgattagcaagtattttttcccatgctgtggcttgtcttttaactttcttgatagtgcctcaatccacacaagttttaaatt

SEQ ID NO: 25760 - DNA, 201 bp, Bos taurus
cagtcaggtgcagcctggctttggagcccctgttctcctcccctgccctctaccgcagaagcaaaggtgctgcggctgaggccagagcagagagcatgcccgcactcctcctgactcccacagaagccagggggtggtatcctctttcccaggttagcagcagtgtggcctacctaccattctggtcccctctggggccct

SEQ ID NO: 25761 - DNA, 201 bp, Bos taurus
ttcccaaataccctacccccatcatggaggctttggtccagagaactagtcgtacacagttacaccaaactatttttcctcattcttcaagtcaacagacgaggtagatactccttaacaaacacaagtatgtatacatatatgtagaaggacaagtggaatctttcctttaagcctatgatatcagaagtgtgaagtaca

SEQ ID NO: 25762 - DNA, 201 bp, Bos taurus
aatttgagcccaagtggcccacaccagaaaagctctgggactgggacatgtttatgcggatgccagaacaacgctgaggccgagagtgcattatccctgacgtgtcctgatcctaccgctttggcatcattggcctcaacatgaatggctacttccatgaggcctacttcaagaagcacaagttcagcatggttccaggtg

SEQ ID NO: 25763 - DNA, 201 bp, Bos taurus
aggccactttctccagcctcctccagcctgtgtacccctaggcaggtgacttcttcccctttgactccctctgttccccttgaattagcatcaaactgtctctatctgcaggccacacttcatctgctgacaaaggctggtgggagctaactaagaaaaaagaagtgtggggagtgtggtctgccttctaatatagacagg

SEQ ID NO: 25764 - DNA, 201 bp, Bos taurus
atagatatatgcagctatcaccaagttaattttagaacatcatcattacctcaaaaagaagccctgctcttttaactatacctctcccatccctctgtcccttatcacccacagcactaaccactactttctgtctctatagatttccctattctgaactttgatttgaatgaagttatatagtagatggtattttgtgac

SEQ ID NO: 25765 - DNA, 201 bp, Bos taurus
gacttttcaataaatcttcataaacacaggaaaggggatattcctttgtagccttttggtgtttaactctgatcccctagggccatgaacccttccatgcctcccactctgcttgggtgtttctaccgcaaaaagcgattttacccagaaattgagaatcagattacaaagacccggcctggaaggagtttgttccagaaa

SEQ ID NO: 25766 - DNA, 201 bp, Bos taurus
gggcctcccagaggttaggttgcaagttaagaataggttttctgaccagaaacttccaaattactctcctgtggccccagagaggccttgtgcctacttttgggggactccttctgaccaaccaattcatacagacacttcccgagcaaaccttgccccagactagaggccttgtggggcaggccccagtttgtgacctgg

SEQ ID NO: 25767 - DNA, 201 bp, Bos taurus
agatcccctggagaaggcataggctacccacttcagtattctggcctggaaaattccgtggtctgtacagtccatggggtcacaaagagtcggacacgaccgagcgactttcgctttcactgggcctggactgtgctagactcagagacccagagcttccgagtccacagaggtgggagagagacagaccagagaacagtg

SEQ ID NO: 25768 - DNA, 201 bp, Bos taurus
agcctgaccccccccacccataccccaagtagggcctgggtctcccccttggagtgggggctccctgaaagcagagctgtttctttgtcttaaactggggtaaggccttgaggagcttccttcccagaggcctcttgacagttaactccccactgccccacaaaggctctgagggaccctcccaatgtatggggtggtgag

SEQ ID NO: 25769 - DNA, 201 bp, Bos taurus
ggagttccctcttctgacagctgtaccgacaagatcctatcattgtgcaacacgtgtttcctcttggtcaatcccgaagcgcccccgggccttcacacacgggctgttgtttagagtcgcatcgatataccaggttgcttctcccttccagtggtaacctggaggtgtggcccaccgccttaggtgggtgttagtctcagg

SEQ ID NO: 25770 - DNA, 201 bp, Bos taurus
atgaattctcaatcgggaaacagattcaatccttatttaccaaagattcataacccttagggaacaacttccgcctctaaaattccatcagtgactgtgacaacaatgtaaagaacagtaaggaaaatcctgtttattggttcacgtattgagagcccagtgtataaaagtactggaattgaagaagtgatcagaatctga

SEQ ID NO: 25771 - DNA, 201 bp, Bos taurus
tctgagcaacatggatttagggagaaaagtttcaaacccagctcagtcacccccctctcccaggggaattttgggcaggttgcttctcactctttggcctcgcctgtagcagaagggaattgatatctatgttgcaagacttttttttttggtatgttctgcatcttcattgctgtgcgggctttctctagttgcaatgcg

SEQ ID NO: 25772 - DNA, 201 bp, Bos taurus
tgatgtggatgttggggtggaacaccttcctctgccggatcatttcttccaggacatccccaatgcccgcagaaaagatgaaaaggggaatgttgttctgtgaaagggtgttgaagaatgtcttgtatccatccctgaaaccagatgaatggttctgaaactgcatcgcctctgctactgccctttattttctatttgggt

SEQ ID NO: 25773 - DNA, 201 bp, Bos taurus
cgttgaggaggaagtttgcggtgtgggccgctgtgggcggctgattggggatgggccgatggcccagggccatgcccacgatggccgtcatgtgagtctcagtgccgaagacatggatggggatcccagtggtcttccctgtgaggaaggaaaagcactcatcacttgagtctcctaagaagtgcccgtggccgcaggact

SEQ ID NO: 25774 - DNA, 201 bp, Bos taurus
gcggaccgcgctgccctctggacggtacccggcctcaccgcagcgagggcgcagcgcgagctgcttcctacttcgggaaaagctgagatgcccggggcccctgcagaaagctcttgggaggtctggagctggcgaagaaggaggggttttgaatgtgtgaaggaattggtgcggccccctctcttccgggcaccgaggcac

SEQ ID NO: 25775 - DNA, 201 bp, Bos taurus
aggtcacacagccagtcaatgaatcggacttcaaacgctgtttattttcttcttcatctcatgtggattagttcacaggcctcccaactggcagctgtcctcactgataaccgtttgcctaaatttctgaatgtcatctgcctttgattcctcatcgtggccctgcctgttgttggaacacctgctactgggtccacgtca

SEQ ID NO: 25776 - DNA, 201 bp, Bos taurus
agttcctccttcaggcaggcagccaagacccaccacccttcataaggctctgtggatcatacagcaggggctccaaagtggctgagcaggccagaaaatcttccaggatgagcagagtggtctgaaatcctgaaggcagaaacatcagcttcactgccacccaccctccccaggccagaggcccagaagccagcagcaggg

SEQ ID NO: 25777 - DNA, 201 bp, Bos taurus
attcaccttcatgatgacatacttcatgtgggaagaaagttaatggagaggcagagacagcgcagctactagacagctgggggcccagggtcaccaactggccacctgagccagggcaaagtatttcattctctggccttccattttctctcttatgacatgagggatgttcttctgcctcaaacattcttcccttccctg

SEQ ID NO: 25778 - DNA, 201 bp, Bos taurus
cagctgcgtctgcacctgaggggagacccgcgggtctcctaattcaacgggacacttgcctttcccagagactcagacttgcgagccggtgacctgcggctaagccacctccttgtcccacctctcagatccaggcagtcccggctgggcagggactcaggggaagactaatgggagacccgcggtaccctttctgccacc

SEQ ID NO: 25779 - DNA, 201 bp, Bos taurus
actcagagaccacccagttcaaactctgcattgcggagacggggaaatcgaggccaccgagaggtcaagacctgcccgaggccgcgaagcgaattcagtgagagaagtcgacatgctcgccattgggagctgggctgtctgcagagggtagggagagggagctgcctgagcagagtgggggcgccttagtcctggggctgg

SEQ ID NO: 25780 - DNA, 201 bp, Bos taurus
aacagcaacgccttatttccagcactttacacggctaccgctgccccaggtccccgtgtccagcagagggcgctagggcctcaaaatgcaaccagcagacacttccgtttccttggaagcctgcagccagggagggagagtacctgacgggggtaggcctgactccagtcagaccctttgtcccaactagtccctttcacc

SEQ ID NO: 25781 - DNA, 201 bp, Bos taurus
atttttctccaggggctgagttcccatgcaggttgggcctgagaaagccccaagccttcagctcaggcctggccagcctccaggtatcttcagatggcccaatgtgcaggtgggagggtttccttcaactctcagattaaccaaagggaagacctttccaccaggcaggcaggcagggcagagcctgaagcagaagggcag

SEQ ID NO: 25782 - DNA, 201 bp, Bos taurus
ccattgagtgagataggaatccatgagttcataacagtaatagatagacaaataggttcataatggggatcaaggggcgggggctctttctgacaagaaaatgctgactgataaatgcggaggtaggcataaagttgaaaaatcaccatcctgaaaccatcatagattgatctgagcaagaaagaatcaacagtgggtgct

SEQ ID NO: 25783 - DNA, 201 bp, Bos taurus
tgctaagtttatctaaagatgttgtagactcaatccagtcatttttctatgcatcacctaagcagcccttgcatagcagattactctaaaaagaaggaataatttctgctaaagagtttttagttttacatacaaggaagaataaggtgttacttctaaagtactagattacagctcagttggtatgagttctggatagaa

SEQ ID NO: 25784 - DNA, 201 bp, Bos taurus
caaattagacatccatgagtttaattcaatctgtagtcaagttttataagatctgaattccctcacaatagctggcatgttttctttttggacaaggcatgtgctgtccactttactatatccagtttcactcattttttctatctccaggctcctgcaagcttttgagttaataactgctagtttacatagtcaaaatct

SEQ ID NO: 25785 - DNA, 201 bp, Bos taurus
caggaggtgggatttttttgatttggagagatgtagggcctaataagtagtcaggaaagaaaacataaacagtgaccgaggcctttcatttgtccctccgcggtgtggtcctgagccggctctcacatccagcgaggacatcccccacccggtcctgtccctgatgcctccctctcagggccagctctgagggcatggtca

SEQ ID NO: 25786 - DNA, 201 bp, Bos taurus
tgaagtggaggctccaggtaacgccttgtttcttctttctggggagaatcggggcttcttccttcgctcctctttggtgtcgcacccgctggacccccaaacccatccttctgactgtaacacgtgctcaggttgccttctgtgcagaaggtaccactgtggggccggaaaacaaacgtgcctgtgtgcctgtgggggacg

SEQ ID NO: 25787 - DNA, 201 bp, Bos taurus
aaacacggcctatagcccaggatccatcacttatatatggtgtccatggcaaccaggcaatggtatgggatcccttctcactggggaattccttttatggtgcatttccgaaaccagcatggccagtacacgagtctgcagtttcccagttgcttagcaaccagctcctatgctctagtcactaggaacagcagacagtta

SEQ ID NO: 25788 - DNA, 201 bp, Bos taurus
aataatggattttaaagtaaagcagaaatgtttgggttgagaattattaccaaactcttatttgagagtggctaacttggttttcaagggattaaattatcctatttctggcccttcatgtttccctccacctagttctaaatttagaaattgatgctgctctaaatcagattttaaattgagtccttgcttagagtgact

SEQ ID NO: 25789 - DNA, 201 bp, Bos taurus
ttctctatagactttgtaatgcctagaaaaggaagaaatagctttcttcatgccagttttgacccagtttgaaaacatcttgctgaaaagttgctctgatatgtgaagtcagtttacctaggcctgaggttggagacatactctaggtatggcaaagtttctcatttttaagtaccataaaaggtcagatgtaacttggca

SEQ ID NO: 25790 - DNA, 201 bp, Bos taurus
ggtatttacagtataatttcatatttgtgactattttattggtattaatttgatggtatgatgcctttatatatgtgcctaggtagatgccactaactacgcataatctatcagctatacatagcttcaagcaaaaatcctgataatcataaactctgtgagatacacatcatttttctagcctatcctttttcatgtgaa

SEQ ID NO: 25791 - DNA, 201 bp, Bos taurus
cctaccagatgccccagcttcccgtggccgtgccccagcctgggctccggctccagccggccaaagcccagatcgtgaggagcaaccagcccagctcggctgtgcattcaagcaccgtcatctccacgggggcgtatggccaagtggcccattcaatggccagtaaataccagtcttcccaaggagacataggagtgagtc

SEQ ID NO: 25792 - DNA, 201 bp, Bos taurus
ccccagccccgggttccccgcaaggcccaccccaagccccacaggtgcacctcatgtccggattgcgctgaaggcactgctccacaaagtggtggaagtgaggcgagaaggtgcggtggtaggggtgggagggcgagtcgccgttggaggtcctgggggtgctgggggccaggctctcgctcaagcccgagttggccgcgg

SEQ ID NO: 25793 - DNA, 201 bp, Bos taurus
cagagccctaaccaccagaccaccaggtaattccccaaagatgatttttagatctcattttaagttccccacttaccctcagctggataagcatcccctcgcagcacacccggccagaacaccacaggttgtaaatgtgctcattctcctggttcagctttcctgtgctggtggcttccttgttggttccatcatcccctg

SEQ ID NO: 25794 - DNA, 201 bp, Bos taurus
cagggcctacagagaaggaagagattactgtaactgaaatacagacatggctgtgaacagaatcactgggttcagccatctgtccacccaatcatttgtttagtgcccgccacaggccaattcctgtgccgtggacaggggatacaacgataagcaaacctatctgtcctcgtggagcttagtctatagaaaacctgctgg

SEQ ID NO: 25795 - DNA, 201 bp, Bos taurus
caaaatgtttctcagctttgccagggcattctgactcaaagaagtcacaaagcagtatcatttttgcttctcccagaagcccagggcctgtaaatctgagaaggactcatgaagaaaggggagagtgtccgttctctcaaatgtgtataaaaggacaaagctcactgtatatatttcagcaataatgatggaaagaattca

SEQ ID NO: 25796 - DNA, 201 bp, Bos taurus
acggggtgaaaggcctgaactcggtggcctcgccagaccacaggcctggatttccatgtgttgtactgagtctttaaatcagcaaggcaagatgaaatcatccctgcctgctctgcctaagggggccaggaagtgccatgtggtttttagagatttttatcaggcgcagaagatgaaaaaagatcctggtgcctaaagggg

SEQ ID NO: 25797 - DNA, 201 bp, Bos taurus
actcaaggtcacagatgtactgagtggcccggctgggatctgactgggcccagcctgcagcctgaaacaaccacagaggactgctggcttgctctgcacttaatttctccccatgagcaccacggccctgcctgagcacatccattcagaccggtgggagcagaagaaccagctctcactgcccagcccggattccagcac

SEQ ID NO: 25798 - DNA, 201 bp, Bos taurus
agtcaacacaatgcctgtgatataagggggccctgcataaatttctgctaaatgagtgaatgagctgggagcacagctgaatgcaaacagtcatcacgtatggtggccgtgcacaggccatggtgtcaaattagccccagatggccggcctccacactgagctaggctcctgaggggcagagaaggccaatgtcattccct

SEQ ID NO: 25799 - DNA, 201 bp, Bos taurus
ctaagggccttgccacttgctactcccttttgctcaacgcactgtcccacatcttcacacagctggctgcttcacatcattcagtttcagttgcaggtcatggcctcagaaacttccctgatcacccatgtaaagcacaccacccaaggcgtgatcaaacacaccatcctgtcctattttacaacactatcgctacccaga

SEQ ID NO: 25800 - DNA, 201 bp, Bos taurus
gcttaccttggagagaagagtagcagctgaacccaatgctctggtcccacgtgctgcccttttggaatgacagctgacagggtgggggctctaggcaggcaggagttccctggatagccaaattcagagcatcatgaggacagacatgcagggagctacaatatatatattgtgacagttagtgcaggtgaatggacagga

SEQ ID NO: 25801 - DNA, 201 bp, Bos taurus
ctctgaaacttgggtgttttccatcagcaagtattttagcaataaagccgtaaggtaattgacaaaagcaaagaaaaaagaatctgacaaataaaagtgatcaacgggactaacaaaagactatcaagctcaaaattctttaaacgtgccatgtctcttacctacaaaattgtcaaacactaaaaaaattgataatgtctg

SEQ ID NO: 25802 - DNA, 201 bp, Bos taurus
atgcatctttggtcagctgctggtcagctagcagatcagctggggactggctgctctaagtggcctcaggtgggatggcttggctttgttctacgtggccactcatcctccacaggctggcttgggcttgtttacagggaggatgggctgagcgccaagagggaagtggagctacacaaggcctattgagtcgtagctcag

SEQ ID NO: 25803 - DNA, 201 bp, Bos taurus
tgcagcccatggggtcaaaaagactcggacgtgacttagcctctgaacaacaacatagcccctattgtgagatctgagctgaatcattaaatgtctacctagagcttgggtgggccagtgtccaggactgggccctaggggaacccagggggcgccacaacctggatgctgcccttgggctgcccatggtagcaggatgga

SEQ ID NO: 25804 - DNA, 201 bp, Bos taurus
accctgtccctcacccccactgagctcaaccctctgcttccccagactttcccccactcttccccccgccctgcctggaagcaatctcttgaaaaccctcaggaaagcacaagccaagactatgaccatgagtttgctgggtttatcttccgggaggttgcaatcagtgtgaccgcaccgatctttcctgagacagcggtc

SEQ ID NO: 25805 - DNA, 201 bp, Bos taurus
cttcctcggaggcagagtggaaggcgtggtttgggaagggggctcaggtgttcactgaggaaatagcgtgagtcagctcatgtcccagaaaggccatgtccgcctgcccgcggtctggctaaaagtgtgtctctcagcgtgggctgggctgtgctagcctgaccctccacccccagcagctgttcatgacacagcagtgtg

SEQ ID NO: 25806 - DNA, 201 bp, Bos taurus
ggtgctgccccaggtgggggtaaagccactcagcttgggccttccagaagcctcagaaccagagcccgcaggacactgataggctgaacgcctattctcagtggggcacccaggtgcacctgcggccaggattccagggggcaggggtccccctgagtgtgggcgtttccctgcacccgggcccattgcctggggccccag

SEQ ID NO: 25807 - DNA, 201 bp, Bos taurus
acacacgacaaaagcacactggccctagggtggccaggggttcactcctcagttcacctggcacgcagctcactccctgctcatccatggttagtccagcagagttcaggccacttcatcaggaacaagtgaacacgttttcatgtatgagaaaatgagtcgttcctctctatttaaaacagatgaaaagcaggcaggcag

SEQ ID NO: 25808 - DNA, 201 bp, Bos taurus
acgggcgagagtcaggcaccaggcgccgccgggctggccgctgcccacctggtaccctaccaatgaacaccccaaagacggcctgaggaacccacctctccaattagggggcagccaaaaatctagtttctcgtccaaactatgcacccgagcaaacctgctctccagaaaccgtccccatgacagaaggcagcaggccac

SEQ ID NO: 25809 - DNA, 201 bp, Bos taurus
tctgtctgcagccaagatctgcatgtggtgttcaaagacagaaaaaagccagcctctgattctcctgcacttaggcacagccctttctctctcgaggtcctcctcacatgaggtcccacaggtgctccagggaccccaccccacatcgcaagctcgtctgctcttcccctcgttcactacccagggacccccttcgacccc

SEQ ID NO: 25810 - DNA, 201 bp, Bos taurus
acctccccacccacccccaccagtcctggggtcaggctggtgcttgctcctccctcacacctttaaccttggcagcaggagtgttgccactgcggagaaggctggcccttgaaaggatagagggacagctctgacatgggagtcctaggcagcactcccagggtgtcaactggcccaagtgtggcccagaggagtgaggga

SEQ ID NO: 25811 - DNA, 201 bp, Bos taurus
gaaaaatcctggacaccgggcatcaaggtctcaggccaccccctacacctgtctcctctccaggtggctacatctcccatgggctccctgatgggatctgtgccctgaaggctgggccttacacacacacgtgtgcgtgtgcatgtggtatgaacacactctccttacggaatgccctcctgaccccaccagcactatgct

SEQ ID NO: 25812 - DNA, 201 bp, Bos taurus
tgaaccctccaggagctgtactcggccagtctgactgcccgccctgcactgagggaagaggtcacacccctcggtagtgtagggacagctggaggagcccggctggaatctgagcctggtggcccttgtcatcagtgccagtctctgatgggccctggacttgcaacaggtgccaagcttggggctcagcaccctctagcc

SEQ ID NO: 25813 - DNA, 201 bp, Bos taurus
gtctcaggacaaccaccttaggtggccccctactctgaggtggggacccaggagggcaagtggtacagctttgctgtgagctgccgctcatccaagatcctcggggcccagatgcattgaagtgaattcaccgcagaagcttctgggagggccctcttcctccatagggtctctgctctgtgactgcatcttgtgtcccag

SEQ ID NO: 25814 - DNA, 201 bp, Bos taurus
cccagcatgtggttttgagagctgaatctaaggtggcctttcatgcagagatgctggtgtgagttattgttataggaaggactcaagaggtgctggctgttcccatggccctgcccctgtgtcctttaccacgaaatgtatgtctgtgtcctaatcccaagactttgaatggggacttgtttggaaacagggtctttgcca

SEQ ID NO: 25815 - DNA, 201 bp, Bos taurus
ccacttcctcctcactctcacctgcaggggtgggggtggggcactgcagacactgagtgcacactgcgggaggtacctcaattcagcaggagacatggtgaggtcgcaggactgggggcccccagcaccctccagacacgctggtcctcgagtcagactggccaggccgggagagccttcgtgggcatgctgccgcacctc

SEQ ID NO: 25816 - DNA, 201 bp, Bos taurus
tccagcctctaccgggcactttcggaggtaagtccggtgggtggctgcgagccctgggccggctcttccggggagggatggccctgaaacgggtctcaggagagggaggaccctggggaagaccctagagaggggtggaccctggggaaagaccctgggaggggtgcatcgtgagggagggcccttggggctgggattcta

SEQ ID NO: 25817 - DNA, 201 bp, Bos taurus
agcgcattgaggcaatgggttcacatgactcccgaagcaccgggcaccctggagtcctgtcccaaaaaggacgcagggccatttacacgccttagcctcttcttccctgtttcaggtcatttacgtttcttccaaattccgtcatttcaggtgacggtgacggtgagcacctgcaagcgtgtggcccttctccgacggaag

SEQ ID NO: 25818 - DNA, 201 bp, Bos taurus
gcctgtgctctttgtgccttattaaagaaactactgcctaacccaaggtcagaaagattttcttccagaattttcatggttccaagcttcacatttaaggagtgagttattgtacaaggtgtgagtgagtgactgaatttctacttttggcaaatgggtgtccaattaccatggtgccactccgctggaaagacacattcc

SEQ ID NO: 25819 - DNA, 201 bp, Bos taurus
tgctagtttgcagaattcattcttcggctccatgaacagaacttgggtttcacgtttcactttcacgtccttatctgggtggcctctcactccccctcagattcagtcatcctgggcacctccaggaagctgcaccacagcctcttctggctccaagccctgctcaagttcgcgaggaacttgcacccgcagcaccagagg

SEQ ID NO: 25820 - DNA, 201 bp, Bos taurus
aaaattcctaagcagcctggcaggctggaaactcaggcaggatttatgctgccgtgttgaggaagaacttcttcttctcctgaaaaccccagtgagtgctttgaaggccttcagcaggttggatgaggcccacccaccctcgttattgaagatctcctgttcatgaagtcaattggtcatggatgggagctgtaactgcac

SEQ ID NO: 25821 - DNA, 201 bp, Bos taurus
tactcagtgtctgcatttccaggccacggacaagcttgctgaactctcaatagtcatttctctgcctatgctgtgaactgcagtgtcacttcctatttccgatgaggtagcaggcattgtaggccaggaattgaggcttcatgtgatctgtttgcagaagtctttccttttctgactttgtagaagagacacaattagaag

SEQ ID NO: 25822 - DNA, 201 bp, Bos taurus
ggtactatgcttcctgggtctgtctgatggagaagtaccctgctgtctccctcaggggtgctggagattagcatagcccagcatcctcaaatctccaagttgttgcccagtagctgctgtccatccaggcagcggccgtgggttcagtggggagctctggagagtaagtttgcacggctcagggtgagaaggttggcatcc

SEQ ID NO: 25823 - DNA, 201 bp, Bos taurus
ggctgggaaagaagaagggagaggagagaggacgggacaccagtcccgagctgtggtgcctttggagctggaaacaagcacacccgggaggccaagccaagtgccagctgctgagctcgggcagcccttgcccatccaggtgctgactcagcgtctccccgagtctgcccctggaggtgccagcagcaggggaagatgtag

SEQ ID NO: 25824 - DNA, 201 bp, Bos taurus
tatgtggttgggagatctcctgacctccagaatgagaatgacacagcagagcccagcctcctctcttaattatcctgctgttctccacttggttttcagtccgcagggaacgaatctccaatcaatttactctgggggtgcccatctactggctcaaaagcatgcataaacagaaggcagccatttttaaaatttctttca

SEQ ID NO: 25825 - DNA, 201 bp, Bos taurus
tggggtggaaggcggtcagagggttgactgaggggcccctgaacccagatgtgcagccaccaagaccacagactgcagctggaagacgggctggcgtcccgactggccactcaccacagccttgggcaagatgtccttatgcggacaaggggctcatggggtcagttaggagaggactttgaaaagtgccattgttaatgg

SEQ ID NO: 25826 - DNA, 201 bp, Bos taurus
cagcgccccccaggtaagcggccaggatgtgggaccctggtggggcggagcgataactctgcggcttaggggtggtccccgccccctcccaaccccatccggttcccttgaggccaccagctagaccccctccaagttcctttgggactctgagaccactaggcactgagttccctcccgcggttcttctgtatctccctg

SEQ ID NO: 25827 - DNA, 201 bp, Bos taurus
cagccccctggatttggcacagaagcttgtggaatgcgtgttcttttctaggctccctctttctggagcagcacccacccactcactttacctttccaccatgggcacatcctgagagagctccatgtttagagacacacgcaggtgtttgggtgactgcacacactggctccataaccttgaagtggtattaagggaaca

SEQ ID NO: 25828 - DNA, 201 bp, Bos taurus
tttgattcctccagatggctttggaggggcctgccccgtggggctgggggtcaggaggaaggcatgctcatctcaagccttggctgccctgtctggcacttggccctctgacagtgtgccctctgcaggaattcagacatggctctgtctgcttgataagaatgtactggattcattgactttgagcccgtggaaggctga

SEQ ID NO: 25829 - DNA, 201 bp, Bos taurus
ctgccccaggcccactcttggcatctgtaatgaaaatggtttccgcattccgatcctcatctctggggtgtcactttgaggccatgcaccccaaggtgccgcagaggcaggacccttatggcatcaatgcctcttgtatccttgatgaccctgctcccatcttcctggggctcaaaggcctgcagaacttgaacttgtggg

SEQ ID NO: 25830 - DNA, 201 bp, Bos taurus
caactaagtaccgtgactctgtcctcttatcaagaaaaattaattcatgagtccttggcagaaaacttcatgtccaagtagattaaggggaagaacatgaggagaaattttgcagggttagcacaagaagagatgccgtttataacttgaccactaaggaagacaaaggatccggcctggatcctttggggaaaatcacaa

SEQ ID NO: 25831 - DNA, 201 bp, Bos taurus
agggtcagcttagccagcttcagcccggcgggatcccacgaccctgagccacagacctcggcccggagcccaggatgggccgagcccactcagtgcactaagaccactcagtgcagagacactcatgacaccagagcgcacgcgtgtgtgaaaacaggcacggccttgctcaggcaccaccacaggcagcaaggagagaac

SEQ ID NO: 25832 - DNA, 201 bp, Bos taurus
tgaggagcgtctgtgtccctcttacttgggatggaagccccgatgggtgctttgtataggccatttatcagatgcctttggaatggagacagaggatggccgagctctggcatccacagcaagacactctggttcctttgggtagctcagctgagtccccactaggagcctgagtctgaaactgccattcctggtggtcac

SEQ ID NO: 25833 - DNA, 201 bp, Bos taurus
agctccctggcttatggatggttcaatctcccatggccagtgcctcccctcaatccagatcagtccagccccaacctggtcgcctttccaggccagcctcgcaggaggaccctgtgctgggttagatgctctactgtcaccaacttgaaacgcttcatattttttgaatgaggagccctgcagttttattttgcaaagggg

SEQ ID NO: 25834 - DNA, 201 bp, Bos taurus
gtgggcagggacgaaggaccacagagcttggagataagacacgtgagcccacggccagtctcccctgtgctgtggccgcagcctgggccaaaggggcagaaagcatgtgtctcaaagagacaggggtcatatccagagaccccaaactgccccaccagtggagcaacacaggccgccccttgtgatgccggggagctcctg

SEQ ID NO: 25835 - DNA, 201 bp, Bos taurus
catgtggagccaccgcctatttatatcttcccatttatgtcttccagctaactggacaggaacatacaccttggtatatctgaccccagatacttcaattgcccctaacaatcagaccctccatatcccgctaactcataactgaccccagacgggcaattcatttccctgttgatcagtttaggaacagcagctggggtt

SEQ ID NO: 25836 - DNA, 201 bp, Bos taurus
gcaccgggcgctcattccgtgagtcagtctgactcggcaccgggaggctgggggttcacggtggttgcgaatgtggtaatggatgcttcttcaacctgcttggccaccacgtcaccatctccgggtgtttgggggccgaattttgggagaaaacccaccactcctattaaatcctgtgagcgaggacgtttgctatcggag

SEQ ID NO: 25837 - DNA, 201 bp, Bos taurus
tcaatgtaaaaagaggtcttgataattttgcaggtccagaaaaaactctacctccaaagctgagctgtgtctcttcccaaaggaggatgagaacaacgggactcctccaagaccctctcagactagaggaggtgactggaggctccctgcttatatttaaaaagctttgcttcctgtgcacctgagcctgctaaaaatctc

SEQ ID NO: 25838 - DNA, 201 bp, Bos taurus
gagagaaaaggtaggaattctgtcctgacacattctgaatgagaaggggaagcccgctgagtttagaattttattgcaactaatacaggacatggataacaaaggtgtgataacacgtgatcgcctctaaagacctcggcgaccagggcctacaaccctcgctcccgatggaccttcttgcgacggttccgacgtagagac

SEQ ID NO: 25839 - DNA, 201 bp, Bos taurus
ggtcagaaaaaggggaaccaaaggagcggatgcccagaatgccccagaatgccgggagatggacaagaaagatgctggagaggaccggctttgaaactgtcggcctagtgatggagtggggaccgagggtgaggatggggggcaggggacggaggctggaaaggttgcgggcccgggggatgggggtggcgctgagtgtaa

SEQ ID NO: 25840 - DNA, 201 bp, Bos taurus
ctgagcgactcaacagcgattcaacacaccaggacattgactttgtgcgtgtgtgtctgtgcgattttatcacgtatgcagatttgtaaaatgtacttgcgaggggtcgtctggcagttcccacaccggtgggtctctaaaagcttggcccccgtgggcttgcacatgggcccccagaggctgaggatgctggaggaggat

SEQ ID NO: 25841 - DNA, 201 bp, Bos taurus
cctcaacctcgtgccctgtccagctcctcagcctcatgccctgcggtgcttccctgagttccagaaagaccggctgacctcacgtcttgcccgaggggcctgctcacaccgtgggggtgtgtctgccctgctcagtggcaggattttaagatgtagtctcttatttctcattctgtaggggggcagggagccccacaagcc

SEQ ID NO: 25842 - DNA, 201 bp, Bos taurus
tgaaattcatctacagttggcattccatggccttgagtaattcatgtgtcacagcatcggatttctcctaaatatgttgtactgagattaacatgaaaatcaatctgaattcctggggccacagcagccggcgggaagaagcaggagccaagaggcttcttctggtttacagagaagccagcttgggatttcaaaggggcc

SEQ ID NO: 25843 - DNA, 201 bp, Bos taurus
tttggtgtcttcttttcaggacagaagagggcccagctgggtcctctaccttctctcttaggttctttgttcttaggtcaagaaatgggttctcctcttgcccccaggaggagagtaaagggcaagggtgctccagacaaaatcctgaagtgaagcatccagacaagaggtcaggctgctagagtgggtcctaaattccgt

SEQ ID NO: 25844 - DNA, 201 bp, Bos taurus
gctcattgtcctggccaaggagaacgggcaacctacaccacgggtggggatcagccccgtctctgcagagaatctcagcttctgtgactccaaccattccagccacatcctttagaaagagtggaatttccaaaccgcaagagccatgatgggcatggcaaggtggtcatctccccaaaacatatttcattgagtggtgct

SEQ ID NO: 25845 - DNA, 201 bp, Bos taurus
tgcactgctcttccctggctgctcttcacttgtctctgcgtccacgcccttccctgaccacccgcctctggaattttctctgtgggacccagggaagctcgtggagtgtggagtctgttccctacaaacagggaacaggggacgtggaaaggctgccgcgccccggagccccatggtgccctgctcagtttcaccaccacc

SEQ ID NO: 25846 - DNA, 201 bp, Bos taurus
ggggtcgcaaagagtcagacacgactgagcgactgaacaacaagaacagtactatttcctgggtgactcacctgccgtccaggcctggggatagttcgagtggaggtgtgctgcgaccctgggatcaggcaggggaagggggaagctgggtcatggcctccctcactctgccacctctgtgcccacagatctatttctggg

SEQ ID NO: 25847 - DNA, 201 bp, Bos taurus
aacctccaagcaccctcagcccaggttcaaacgctgcttgaactaaaggaggagacgtgagcccgtggagaggcctccacccttccagcagccacaggccaggcaggaaacattatttcaggataacgacgtccgtctgcagggctgagcaaagattctctgtcaaggaccagatagtaaatatttcaggattttgggggc

SEQ ID NO: 25848 - DNA, 201 bp, Bos taurus
agactggggtgggtggtggcgtttcaacaggtgtttggagactgactgtgccaagaaccaccggacaggcttcagtggcgacgggcctgttgcaaccctccggaagctcatggtctggtggggagaggacagtccagccacagctgtagaacgacacagccagtgcctgctggggccagggccatccgcagtgtgggggct

SEQ ID NO: 25849 - DNA, 201 bp, Bos taurus
cttcctgaggcggtctgtctctgcccccaccttcccttgctaaagaagatccgtctggcctccgttttctctttgccagcaggtccactgtgttaagtactgacatgtccgcaggacaaagtgtactaactacttaaagctggcttctgcccggaaggacccaggtaccaatttgcacagtaagtgtgagagaccaacccg

SEQ ID NO: 25850 - DNA, 201 bp, Bos taurus
tgtcatccttgcattttaaaagcagtcgctaaaaaaaaaaaaaataaaagcagtcgctgagctgaaagacaaagcaggatagatgaggccaactgacacacgtctgtccgccaccacatcctgccccttcccttcttcctttttctcatctctgattctggactctcctgaggctcggtcccctgcaccagctcctaccta

SEQ ID NO: 25851 - DNA, 201 bp, Bos taurus
ccaacccctcagtggtggagtcggaaaacggatggccatcttcccctgggctcctcccagcacgcgtgtcctcctgcacggatcctgtaggacgccctgcgggagagagcaggaggccggggcgcatacctgccccttctcttgacgatccccccaggcttgtcagtaacacccatgggtaacatttattaagggcccatt

SEQ ID NO: 25852 - DNA, 201 bp, Bos taurus
cctcatgacattgttgataatagtcttaagcccacttcctggcatttgagaagggttttacttgcttcatttatgtccttacgtccccctggaggccgtccgctcccagcggtgagatggctgactgatggtcatcaggagtccgccgtaacccggggctcatccagggaccaaacgtggccttattagccccgtgtttat

SEQ ID NO: 25853 - DNA, 201 bp, Bos taurus
tggttcccccaggctccgggaactctgccgtctgcccaggacccagggccgcctgcccctctgtgccttgggctggcccaggcctcctacagcagcgaccccaagctcgaagtgtccagggctcactgctgctagacttgtgacacatggtggacgcagagcacaggccacctcctgttcttcttcttatgcctgacaagg

SEQ ID NO: 25854 - DNA, 201 bp, Bos taurus
accaggcaagtcccaagcaagcgtccttcaaaggtggcgcctttaggacacacatctctgctgcttccccaaatcccactaaaaaatgggtgcagggccttgtgaacagcccactccttctgatagtcaaaaggatggtcaattgtaactggaccaggtgtctctcctgatatctgtgctttaaagggctgatggccagag

SEQ ID NO: 25855 - DNA, 201 bp, Bos taurus
aaccactgggccacctgggaaacctcgcccttgtggggtgagtgttacattaccctccctggtctctcgtccaggtcctagggtagttcatggaaggacatgctaagtcatctccggcccctcggtaccaccatcacacctaagtttgcaccccatcttccaccacaagaccctgtggcctctgttgccaagaggagctcc

SEQ ID NO: 25856 - DNA, 201 bp, Bos taurus
gccagcgggatgaccctagagattcttttgaaacgtcagttccctgcacctgagagccgtgactgtcatctcatacagaaggtccagggctgcagaggggtgggaagagggcccctgcggtcagtgtccagaccctgagatgaaagtttctgtttaactggacacactcaagagctgcagagggtgctcagagcatgcaag

SEQ ID NO: 25857 - DNA, 201 bp, Bos taurus
cttgttggagccctttggtgcagccgttttgtgcaggagcgaggccctctcgggaaggccatcaacgttcatttgaagtttgctcagagcccctgagtgtgcgcccaagatcagtttcacagatcccagccatcaatccagccagttgctcagttaatctgaacacggttcaggagtcgagtcagtaataaaactgtggtt

SEQ ID NO: 25858 - DNA, 201 bp, Bos taurus
acctcggtgagaccacgcggagtgagccgcgctgtctgtgccctgagtctaagtggggagggcgtgaaggtggggggtcctgtgcagacccagtgagacccggaggcctctgattcaggctgtacagaccaccgcacgcctctgttctaacagcgtgacggagaggccaacgtgaaggaagtggcccagccacccaggctg

SEQ ID NO: 25859 - DNA, 201 bp, Bos taurus
ataatattagttgatcttaaaaaggagtgataatcttagattacagtaagtcccccagatacgaatgagttctattccaagagcaagttcctaagtccagttcgctcataagtccagcagagttagcctaggtactcaactaatacctttggctctatagtactgcattgtaataggtttataatagttttcacacaaata

SEQ ID NO: 25860 - DNA, 201 bp, Bos taurus
aggtagtgaggtggtttgaattcaagaatgggtttttctttccactaatttttcatcactgtttcttctgaggagcaaacattctattatttatggaaaaaaatgcttggatttgaaatgttgagacctgactttaagaccaattttgtgtgatgacaggttttctctctagttgttcagtatctgggaaaacgtgagcag

SEQ ID NO: 25861 - DNA, 201 bp, Bos taurus
tgggatttcactaactcctctgccgctctgggtattttacaattaactgcctttcagttcactcatgctcttgggccagaagtgatcttgcccttttctccgtatcttagccacggtcagccaatcaaacatactccattcccactctagctcttggaacacgagacagggccaagttctcagcccaccgttgttttaagg

SEQ ID NO: 25862 - DNA, 201 bp, Bos taurus
ccttgtgggctacagtccatggggttgcaaagagtcagagacgacttagtgactgaacaacaatgacaacatttggaagggacaggaggagaattgtgaatttatcattgtgtaacctgctttttatgaagatgttaaataatttgaatattttaaatagagagagaaggcataagaaagaagccatgagttatctgtgga

SEQ ID NO: 25863 - DNA, 201 bp, Bos taurus
tttctgaaaagagaaagcaaacaacctgtttttatgcacatctactcaggtttcattgctgtttcagatcctcctggaacccttgagggaaaattccagagttctacagaaggactcaggcgcttatctcacctctactaacaaatattgcttcgggcggggccaaaactcggggtgtcaaagaagtggagtgctctagtc

SEQ ID NO: 25864 - DNA, 201 bp, Bos taurus
tctgtatccagtagttgagtgattcgtaaaacaaattggccactcaaagtgtttgaaatcaaacatccacaggaaaaatcatctcatcatcaagtctgaaaatttcatgaatggccaaaacgacaaacccgggttagaataccagaaacgagccctgtgaaacgagcctgtgaagcgtggtgcggatgccatcctcccccc

SEQ ID NO: 25865 - DNA, 201 bp, Bos taurus
gctggtttcttgaagaaaaaggcccttatagattaaggatgatttgtagatcaaggctaatagacccaggataactacactgttatgcttgtctcagaaccggccaaagaatgctagctcctgatgctgggtctgaggaacccctaagccctcccagacgggttgcactgtctgctggccgctctagcgctcaaggtggtg

SEQ ID NO: 25866 - DNA, 201 bp, Bos taurus
cccctccagcatggccctgccgacacctcacgtttgaacttcaggcctccaggacagtgatagaatggatttctgggattttcagccatccgtttgtggtactttgtgacactggccctagggaactagtccttcctgtggtgggcacggcttttccccttccacatcagacctcgctttccagcctcctcacatcaggtg

SEQ ID NO: 25867 - DNA, 201 bp, Bos taurus
tgtctggggaaaccctacagacatatatgaaataccttaacaacatttggccaaaataatcttttttttttttaatgaatacagagacctgaggggacacagaacagtggaaactcaaaatggggccacaagtcacacagaggctgacgccgggtcatattcttcaggctgtaacaaacagggtggaaggggattccaggc

SEQ ID NO: 25868 - DNA, 201 bp, Bos taurus
ctgctcaagcacacttttcttgcatcaccaactggacttgcttcattctgctattaagaaagactgaatcttgcctaaaagcagtcacatccatgatattgagtctggccctaggatccgagttagtgaacggcgatcatctaacataccctgacactcctccgctgactccagtctagacgtgcatcagtcagggctgcg

SEQ ID NO: 25869 - DNA, 201 bp, Bos taurus
tcttgagggggtcaccaggagggcttgtcgactcagtctagtggctgaagctgcctctgctcaaacacctctgggaacctctgggactccactctcagaatgacacacatggccagtagctcatcactccccgcctgacccctgtcagcctttgagagtgtggtgtgattgtttaggggctgcagcaaaaagacacagatg

SEQ ID NO: 25870 - DNA, 201 bp, Bos taurus
tgggcagcagcaggccagagatctcaggctgacccgggccacatgaagtgtttaaggacagcagtagacgctgcttactcaccccaccttacaccttagggttcacttgggcctgatccagcgtgagtgaagtggtgagaaagacctgaatcacacttgtattcctttaaccttcaaggtgcccagcttaaccatgtgaat

SEQ ID NO: 25871 - DNA, 201 bp, Bos taurus
gtgcccctcagcacctggaagcaaattagccacccaagccctgctgggcctgcccagctgtcctcttatgcccgtggcctctggatcgtccagtggagtcagttatctgagctctgtccccttctttcagtccatctgtccatccgctcagccatccctccttcagcaaacatgtatgaaggcccaaccctgggctccatt

SEQ ID NO: 25872 - DNA, 201 bp, Bos taurus
atgtcttacatcacaaaaacaagttttcataggactaattcttccacttaccaattccatcattctggaaatgatcattctgggtatgatggaggcttttcccctttacagaaaaacacaaatgtataataatttaaacatacctaatatgaaagaacaataaccattttcctagtcccatgcaaaagaaatgtacagaac

SEQ ID NO: 25873 - DNA, 201 bp, Bos taurus
tactaactgggctgtttgacactggagaaaccactaacctgtcaaaaccttagtttccttaaggtctctttctcttctctgggatcttaatcatcatgacggtgaatgaaaactaatttcatagttaagatacatagattacaaaatgcctaacagcaggtatttaacagttcattacgcataagttgtcaaggataagta

SEQ ID NO: 25874 - DNA, 201 bp, Bos taurus
agcttcaaagaaatcctttggctgtcttatctcaagcccatagatggcactctgacactgtctaccggaggcatggatacagcagagaaagtcaccccggaggcctgctgcccagagccagtctgcctgtcaagcttgtcaccacacccacagacccccgtggggacagaagaccagggctgccagctccctcccactcag

SEQ ID NO: 25875 - DNA, 201 bp, Bos taurus
tcttctcttttaaaatttttcctttagaattaaccctctgccatcctgaaactctttatctactaagtgcaataagggccactctcttgtcttagaataagcatgctctcatccctcccatatgaaatatgagggatttattttgacctttggtaacctcctgaggcttcccaggtggctcagtgggtaaagaacctgtct

SEQ ID NO: 25876 - DNA, 201 bp, Bos taurus
acaaatcctttcagcaagagcgaaaggagaccaagcagtcccactgtatatcatagaaaatcattaataataaataaaatagtctcccacccttgtgaaaaagtcccagttgtctccccaggggagtaaactaaacgcctttgattgaaggggaccgttgacagaggagatgaattttacccaagtgtgctgctagcaaat

SEQ ID NO: 25877 - DNA, 201 bp, Bos taurus
cagctatcatcactcgccttagggtgccttctccctccccttcctggctgcctgagaaggagaggccggggggtctcttcctttgtgtaccatactctgcactggacatcccccattgggcatgagtcaaaaatgaggctgaggtggacagatttcagtcttaccaaaagcttgtacagttccttactcctcaccgctagg

SEQ ID NO: 25878 - DNA, 201 bp, Bos taurus
acagggaagcctggcgtgctgcagtccatggggttgcgaagagttgactacaactgtgagtgaacagcaacaacaaaattcacatgttggaacctaatgtccgatgcagagacatcactttgctgacaaaggtctatatagtcaaatctatggtttttccagtagtcatgtacggatgtgagagctggaccataaagaagg

SEQ ID NO: 25879 - DNA, 201 bp, Bos taurus
ctttggtaggtggggtagtccagacccaggccgaaagcacctccatcaaggatacagcaaagaccactccctagacagtgagactgggtgaccaagggatgacggtcttggcccagtgtccttggaggaataagcatctgaacccgtgtctaaccaaagatgggaatgagccctgctgctgctgctgctaagtcgcttcag

SEQ ID NO: 25880 - DNA, 201 bp, Bos taurus
acagtgaaggcttaggtgcataagtttcattctgattgattttgactagaatcttctgctttctgactgttgatctgaaataagtgattggccttcatgacaccacatagagtggttgtgaggattacctgagataatccatataaaatgatcagttgttagcttttaacacagaaaccaactggagactctgatatcata

SEQ ID NO: 25881 - DNA, 201 bp, Bos taurus
aaactgaggccttgggagatcaagaaacgtagtcaagattacccagttaacaaacagcaagtcggggatttgaacctggccccacccaacttcagagtccatgtttttcatgtcctattgccttgtcccaggtatctcaatctggggttcagaatacatggcctccctctggatatgtaacatgcaaatatgtcacaacat

SEQ ID NO: 25882 - DNA, 201 bp, Bos taurus
gctacgatagcagactgtctttgcatgaagagcattgatagtcctgctccccaagtcccggatctaagccccctactgtgaaacgtggaaggagtcagcggtacaggaaaccttagttcagctagttaccagtaaacatatacaaggtgctgcttcttagagagctgaaaattataaactcagttaagaagagtcctggtc

SEQ ID NO: 25883 - DNA, 201 bp, Bos taurus
ctccaccatgacctgtctgtcttgggtggccctatatggcagacctccccacaaccgaccccaaatacacagggttttgtagaaccgtgaactctttgacgctattggggacagtctgtggccctcccagacctggctttcagaagcctcaagctgtcttttccactctggagggcagtccagatccctgtaggggttgtt

SEQ ID NO: 25884 - DNA, 201 bp, Bos taurus
ctccaaatgctggctctttcgtggggctccttggtgaagggctttcccccagtctgttgttggtagatgcccttgtcagctgaatttctgtagccatcctcgtgcccccagctcctggccccctgcccccaaccaggcacagcctctctctgcctgggtgctctcttccagccagaagccctcctggcaggggcgagggtg

SEQ ID NO: 25885 - DNA, 201 bp, Bos taurus
ctctccacccagaacgatcacacttgagaaggaaccataatggaggtggcctgggtgtcatttcccaccccagctcccctgtctcccaccaaccttctctctccacccagaatgtacatgaggccagctaatgaggatttcagccccagtctccagagtttctcctatagaagacagggaactggagtactatcagagtta

SEQ ID NO: 25886 - DNA, 201 bp, Bos taurus
ccctggaagtggtagcaaggttccccaggtatggatgtaatttactacacagaatgtattctttcctttagttcagtagtttggatgaacacttatgagtatatgtccaattgttttttaaagaaaaaagtgaagcttgctgctgatgaagatgaagatgatgatgacgatgacgatgatgatgatgatgaagagtaagta

SEQ ID NO: 25887 - DNA, 201 bp, Bos taurus
cacggtcactctgtttttattaacttaacctgagactcccaacccacaggtcaggggcaggtcccccagaagcgcccccagctctcgtcaagagccccctagggaggcgtcactggggccaagggttcagggttgagggcggcctgaactggggcagcactctctgcccacaaacatcccagacggatgttttggtctcat

SEQ ID NO: 25888 - DNA, 201 bp, Bos taurus
aggagatgaaaagggtagaagcagctgcagaatagaagcccaggagtgacggggagcgtgcatcagaaagcaacgccaagcctccttcctacccaccagcaggggtcaacgtgaggcttccagtccactcctctctccaagactgctgcatcttatattttatattcccctaaatgtgtaagattcaggccccaccacaac

SEQ ID NO: 25889 - DNA, 201 bp, Bos taurus
caaaaaggctgcaaaacgtttcctaaattcagccttggttgggggtgaggttcttggggcggccaatcaggtgaccaaaggtgagttcgcgaacatctcacgatctgtgggagcgggccggggaagggtcaggcctccctgagagaaagaggccacacagccagcagccaggacactgtgacacgcggggtccagagcgca

SEQ ID NO: 25890 - DNA, 201 bp, Bos taurus
taattgtagatgccaaagaaaaaaaaacctttctagaagtcagggaaccttccatggaaggcagggaaaggaagcaggcaattttaaaaatccctgtaaatcttctaaatagtaatttaagaaagagcattaaatcctccttgttacaagataaacatatattgtttctgaacaagctttcactgaaaatatctgaataac

SEQ ID NO: 25891 - DNA, 201 bp, Bos taurus
gcgggggggtggggggcaccggggccttccaggaagaggaaaaaacaggatgtcttagtcagcttcaaggtcagggcagttttctaaggagcatctggaggtggcagaggagccagagacatccaaagattaaacctggaagggccgggatatagagaactctgtaacaggactgggaagggagccactgttgattcactg

SEQ ID NO: 25892 - DNA, 201 bp, Bos taurus
aggttggtacaggctggattatatagggccttctgcaccttggggaagagtttgttgtctttaaatgcaatgggaagccattggagggattcacattggcggtgggttaggggaaacctggggccaggcttcagtaccttaggggtcaggctccctctgccctcgacttcgtccactgtctccaggaggccaccagggccc

SEQ ID NO: 25893 - DNA, 201 bp, Bos taurus
ataccatagagcccaccctaatgaccccatatatcaggaatgaccctatttccaaataaggtcacatgctgagaccctcaacatatctgtatagggacacagttcagcccattatagcgtgggcaacctttgaattaaggatatgatcccaggatgttgataagacttctgagccagaatggccatcattaagaagtctac

SEQ ID NO: 25894 - DNA, 201 bp, Bos taurus
attgggtggcagcagctggtggggtgttgggataatcttgctgatgactgggtagatatgaacctcttgtgttagtagattccagaaagcaacatgctccttgatgaaaaggccatggtcattgtcttgcgggattggcctggcctggctctgacagttctcagctgctccataaatctcgcatcagttccatctggccaa

SEQ ID NO: 25895 - DNA, 201 bp, Bos taurus
ctccagggcccacgagtgtgaaaatcgggatcacttcgggaggcctgcctggccttgccccatctgtccatgccccagcacccttccctcccacctcctgtatcagccgctgcgcaggagggggccagcttcattttaacttcagccgaatcaaagtctcggagagggagtgggtatcactgtgggtgaggtgaggctcct

SEQ ID NO: 25896 - DNA, 201 bp, Bos taurus
ggaaaccttcagtgaatccagaggctgggtcatgcaccccaaacctctgagcacagagtgcagaacatccgagctgacacccaagtggcagttcctgtcctgtaatcctgttttcagctcactgccttcagctctctgacccaccattctctcctccacccagctgggctccaccatccacagcctgccccttcttgcttc

SEQ ID NO: 25897 - DNA, 201 bp, Bos taurus
gtgttgttgagggaaggggatttgggcagctgaggaagcaagtttccatcaagtgttagaaaagagcagggacttgatctaacatgatgccaaaacgaacaggaacagctaaagccagagtttctccttggtgcttgcttggaggaaatctaacagccccaggagtcaagagggcgtcagatggggacttgggggtgaaga

SEQ ID NO: 25898 - DNA, 201 bp, Bos taurus
tatctgttcctttctccccagtagttcctgtattctagaattgaagtgtaaagacttgattagattcattcatttttgtcaagaatacggcacagggggtaatgtgcatttcagggcaatgtgaattttagcatatgaattttcatctcaagacatttattgacttcagacatacttttgtgcccttgggaaccaaagctg

SEQ ID NO: 25899 - DNA, 201 bp, Bos taurus
ccacccaagatcatatctggtgctgaaacctgggtatttggaaagtctaggcaaataccactgtgggcctcgcccagcagtggcttgaggcccctgacttttgctcttgcctcatcactttggggaaacccgctcacctgcctgggtgactagggtctacgaatttatgggagctaatgctgcttgtccccttcccctctt

SEQ ID NO: 25900 - DNA, 201 bp, Bos taurus
gcactgagggccccgaggaggggctgagtgctgccttttcctggtgcagcattcgaattctctgcagggcgaccattaatcctacaggctagatggtcagcgagggcccccctgccctcatagacctcagagtctggtggcagaacatcatagggtggctgagcagagctgagcaggccccgagtccagcagcctggatct

SEQ ID NO: 25901 - DNA, 201 bp, Bos taurus
tctgctcagagatcccgtgggttcttcctctgggactttgtctttgtcctcacacccggcccggggagcagagcacacaggcctctttaggcagggcagctactttctcattctcgccctcccagtccttttctgcacagcccaggggacatttttctggccagcagggaagagtggagcactttgctctgtgcatatctt

SEQ ID NO: 25902 - DNA, 201 bp, Bos taurus
ctggaccatatacttgcctggacttgtcttctcattacagctccccacccaggacgacaccaaggacaccgtgtccttcagttccattacagaactgggctaccaaaactaaaaagatcaactgctttacatatttccgcatgtgatgagcacatgttcatgtaatatatggtagtatctgttggccttgtgtatgtgtca

SEQ ID NO: 25903 - DNA, 201 bp, Bos taurus
gaacaggatgatggaaaattttccatctaaggccacactgaaacatacttcgctgacctgggaacgtttgtacttggagggtagattcagcttctaggagcgactaaaatgtgagaatggtgaacccttgaccaagtcagctggctgaaggggtcagcctacacacccacagctgtagactgacgagggctggaaagagtt

SEQ ID NO: 25904 - DNA, 201 bp, Bos taurus
agcacacaacacagtctctttagaaaaacaacacgcctgaaccactgagggaaaagggttggtttccatggcaacatcaaggccatgagaagcagtctggcatggcggggtgttcatctgactctgctcttttgtcagaaatgatgtgtttcagagaacccagccccagagatcacgagtccaagttgcctggagagatgg

SEQ ID NO: 25905 - DNA, 201 bp, Bos taurus
gtgactgccagctgctctgccttcctcggcatgtgcggtggccagcgctggtgcttagcagcttctggctctccttcccttccagagcacagagcgctgcatttctcagccccttgcccttggccacggccccgtgagcagtcctagaaatgaaatgtgaatggaagtgattgtgacttctggaccaggatactgaaaacc

SEQ ID NO: 25906 - DNA, 201 bp, Bos taurus
ggaagggtggcatttggggagtttgctagtgctaaattgctccatctgttgcattaataaccaatcagtccggggggctgggaaaatgggtaattggagcgtacggtacctattagggccgatctgcacatatgtaactgctcatttcatctgtacgagggactgcttacttatgcaaatagcaggtctgatgcccacgtt

SEQ ID NO: 25907 - DNA, 201 bp, Bos taurus
tcagagagactgagtaactttcccaatggcacacagctcttaagcggcaagacccatgtccttcttccccacttgctgtccttctggtggcaggtctgactgggtccttgggaacatgagtttggcacaaaacagaagcagtctttaagatgcccacagcctgtggaactggcaaacacattgagagaaaatgaaaacaaa

SEQ ID NO: 25908 - DNA, 201 bp, Bos taurus
gacccggtgggcacagggggccgtgagggcgccgggatgagggggctggtgtgcccttcaaggtggtcacgacaataataaagggggaagtaaagaacgcattgtcaagagctttgttttactcctttcctccctccagccaatgaaccagcgatgaaaagaatacagctggtgatacagagaagagaacaacaaagcacg

SEQ ID NO: 25909 - DNA, 201 bp, Bos taurus
tcttcttttgcattcatgtcatgtgtatcagtctgggctttctgatgaaaactaagggcaaaaagaatgtcatatgtcaggcccagggttggtgaatccagccctaaatccaccctctcatttcatcctcaccacagtcctgattttacagaagaataatctgaggcccagagagaggtgaagtaacctgctcgggaccac

SEQ ID NO: 25910 - DNA, 201 bp, Bos taurus
gagaatttaaaataaaaaattattcattgctggctctaaaagtttcaaattccactggggatcttagaaattaaatataagtcacccttcaaagacactctaatcagcaatgatattagacataacagaaaaaaccatgttagaatttacattgatagtttaagtcaagtgcttctgtaggctcatggaatttgtgacgtg

SEQ ID NO: 25911 - DNA, 201 bp, Bos taurus
gttagaacttttgatggcaagtgtcagaaactcaacaattaaatagaaagaggacttactggcgcatgaatccaaggaagggccgaagaaccaagcctccagaagggcagctgctctactagaccaggaacaattagaaccagggcatggaatgttccagaacattctttctgcctcatttcttggccttttctccacagg

SEQ ID NO: 25912 - DNA, 201 bp, Bos taurus
gaactacaggtgcttatgtattatgtaaggcatcctctactattttagttattttaattgagacaaaggactcagtgtggcctactggttttctccagctttttgcttcctgataggtgtgggagtaactaaagaacctgagaagtattgtcaaatatgtgggggaaaagtgagcagatggcatcctgctgtccacatgtt

SEQ ID NO: 25913 - DNA, 201 bp, Bos taurus
ctggctctataagcaaagaagagctgaccaaatattgtcctgcattagagggagcacagagaaggaaagagaaaagatctgtgtgtcccagaagttggattttcaaaaaccaaatgcctccttgaaagtgttgcaacttactttaatatactgcagagtagacagtttgaatcaagtgtgtgatttgctggttttaatcaa

SEQ ID NO: 25914 - DNA, 201 bp, Bos taurus
gaggacgtgcacacactcacaagttccacgtatgtaagtacatacatacaaactctattcaggagataatgcctgttgatggttggaaactggcacagaggagaagtgtaggacaaggttatagttctatttttgacaaagaaattgcacctgaagattgagtaaaagctttccttcttcctgttttatccctggtgtttt

SEQ ID NO: 25915 - DNA, 201 bp, Bos taurus
tggcagttagagcatgatcctcaagtgatttttttcagatggaggggaccagtgaaaggattgagaaaggtgtgctgggattatttggagaacaagcatacgttatatttggaggtttcaaaactaatacaggtttgaagaaaggggaaaagagtcttgtgttacccacaaaccctctttgggttagtactatcaacagga

SEQ ID NO: 25916 - DNA, 201 bp, Bos taurus
tggaagtgcccctggcttatgtaactgtggggactccagctcggctacaggacaaacaccaggcatctggagccccgaggtacaaggccatgtggccccatagaggtcagtttcttaaaagggaaaggaatctatacacagatactagcaagaaactcggttgagtgaggacatggcccatgttgggaaggaatggaccat

SEQ ID NO: 25917 - DNA, 201 bp, Bos taurus
atactggcctttcccaaagagataggaacgtagaacctaaaaagcctatgttgacagggagggtttgcacgcccttttgaacagaccacgtagaggcccaaggaggctacagcttctctggacaccatgaacatttattcaggttcaaggtcccaggagacaccacactggacaaggaagcaagtctccactcacagaggc

SEQ ID NO: 25918 - DNA, 201 bp, Bos taurus
gggcgtggattcgggggtagaaggggagtcggttgggaaccctaactcattagtcctagaaatcagttatagatggaaactgctgggccccacccagtcagtcagttcagtcgctcagtcgtgtctgactctttgcaaccccatgaatcacagcacaccaggcctccctgtccatcaccagctcccggagttcactcagac

SEQ ID NO: 25919 - DNA, 201 bp, Bos taurus
tgattacgtcagctgaaactacgcgtgacacacacttccgtttctgcctgagaactcatgcagttctccacaccctttactcatcagggacctcttacatttggcaactgcccactcacacactgggggaaatgcctatgaggacggaaagaaaggaaaacgcactacaatcctagaaaaaaaaatgcactgtccggctct

SEQ ID NO: 25920 - DNA, 201 bp, Bos taurus
cagggtaacgtgcatgtgaattacctgcagatttgtcagaatgcagattctgactcagtgtcagatggaggctgataccctgcatttctgaccagctccaagcggtgccactgctgctggcctgtggaccatactccgagcagccaaatgagagattcaaagtgtcccgttaggaacaaaaagagagaaatattcatattg

SEQ ID NO: 25921 - DNA, 201 bp, Bos taurus
tagcacccactggggaataacccagttgcccattttatttcgttagggccgctctccccttctccctgggctctgactggttgaggtgattctagctttacctcttttttctcaccgcctccttttctggatcgtcacccccacccccccgggccccttcttttcttatacttcaaaattatggcttaccggtcaattttg

SEQ ID NO: 25922 - DNA, 201 bp, Bos taurus
ctgccctgcccctattatgccactcttgacactactacacacacatttaccttcagccaagtaaaccttcttgctattccttaaataggccaaatatgcaaacaggagtctctgcatgtactgctccctcttgtaacatttgcacgactccctacctcacttcagatttctgctcttatgtcaccaaacctgagtggcctt

SEQ ID NO: 25923 - DNA, 201 bp, Bos taurus
tttctcagagtatgcttttggcagcaaaaaaattagaataactcaaaatgatcattatccaaaaaacagttacaagccaccccccacccccggcccccgcgcttttcaaattcttaggttctctgcaaggttgaagacatctgagtggaaataatgttcagattataaaaagcagcagcacatgagtgaaatcaggcagaa

SEQ ID NO: 25924 - DNA, 201 bp, Bos taurus
cgaagaggctgcccagccatggcaccccagcaaagacggagggtggaggagagggcgtttcccggtgctctggacttcaccagcaaggtcagtagcacaccgtatacacctctgggtcttgctctaaccagcaagtgttcagaatcagatcgcatcgccctcctcattaaaactcttcaacgacttcctagtagttctgca

SEQ ID NO: 25925 - DNA, 201 bp, Bos taurus
caattcatcactttgagcatgctgccaaacaattttgtttcttcttctagaaagtagttgtaatgaagctggtctccagcctgtgtcagatgagggaatagatgaggtaaaacttatcaataattctggacttgcagacacaatggctgtgcatttgcattgttgaagggcagttttcccttccaacctgtagcaagccca

SEQ ID NO: 25926 - DNA, 201 bp, Bos taurus
ttttgtccctaggggcatggtttcatggattaattggcagccatgggctctcatgcagcaggatgaagatgaattcaggctctaaccagccaacctggaacggcaaatagcaacctctcctaccctggtccaccaacagccttccagtcttattcccaaattctcggcctccaggccaactagccctctcttttctgcctg

SEQ ID NO: 25927 - DNA, 201 bp, Bos taurus
ggggagccccacagctatgcccctactcatccccatcccccactcctggtgccttggctacttctctgcccaggtaccaacatgtccaccatatccccttggcttggtcctcacttcaagttgtttctaattcaagttcctccctaactactcactttatatggatctggtcctcaagctaatacctccccccaggccccc

SEQ ID NO: 25928 - DNA, 201 bp, Bos taurus
ctatcccttctccagcaggtcttcccaacccaggaattgaaccagggtctcttgcattgcaggaggattctttaccaactgagctatcaggaaaggcccagcttcctcttaaaataactttattcccataaaataatgtttttgaaaccacatctggggataaaaagcataattgggtggttagttttaattttaaaatcc

SEQ ID NO: 25929 - DNA, 201 bp, Bos taurus
tctgaaattataaaatattttaaaatcctgaaatatattttattaaggtaataaatagggagggactttacaaaaaattaaacagattaagtcaatgttaggggttgattaaatgaaactaaatcaaagggttaaattaaatcaaagacaaataaccaatgatatatcttcagaataactgctgggaaaattcgagactgg

SEQ ID NO: 25930 - DNA, 201 bp, Bos taurus
accagacctgtccatggcccaaccctgtttcctttgagtccccgtaacaaagaaggatgtgctttcaagatcatagatcatctccccatctagggtctgcttggcccaatgggaagctaagaaaatacttctgggctacttcactcaggggaaactttctgtttgtggaggacagcctccttggactctgctgatatagct

SEQ ID NO: 25931 - DNA, 201 bp, Bos taurus
caatatgactagggtccttataaaaagggagaaacttggagacaaacaggcatacagaaagaatgccatgtgaacatgaagacagccatctacatactataaaggcctggaacagatccttcataatcctcagaaggagtcaatcctgctcacgaccttgatttggccttcttgcctctagacaataaatttctgtcatat

SEQ ID NO: 25932 - DNA, 201 bp, Bos taurus
atataccccttttccttgtaataaacacttatttcactactttcagtctctatgtggaaattcatttctacatagttgacaggccagggccttgtcactgattcctggtctctggtggtctggtggctagaattcagtgatctcactgccatggcctgacttcagtctctgacccagaactgaaatcctgctccaagccac

SEQ ID NO: 25933 - DNA, 201 bp, Bos taurus
aggactctgatgagtagacatcttcagtgattacagtaaatgatctttaaccaaaatgaagcaattaagttggtgataaaaatccaaacaaccagctccactgggatgaagaatagaagaaatgggaagtttcccacaagggaaacttgtatgtgtgtggtgatgaagaaaggcaagagtccagaggaagtgttcattttc

SEQ ID NO: 25934 - DNA, 201 bp, Bos taurus
ccacagaaatttgatgacagaagtcatctttttcctggttttgaaatgagaagtgtgaaattgacccgctccccagcaatggacccgggccaagtagggcagcgcgggagcgcctcccagcaaggtctgtcctgcacatctgcacaacagctgacttggcttctgtgggcttggtcaggatggcacctgcagggtggcctc

SEQ ID NO: 25935 - DNA, 201 bp, Bos taurus
tcaaggggtcacaaaaagttggacaggactgagtgactgaactgaactgaggtaaagcagtgttcaggaatctagtgctcagcgtgaagttaccatcttctacctgggcaggggccctagttcctgcagaaaactgaaagataattattatgtagattcctcaaagaggaaccgggatcctgttcaatcatcgcactattg

SEQ ID NO: 25936 - DNA, 201 bp, Bos taurus
taccgtagaacggaagtctcacatccttttcaaaaacaattactaatacaatttatagtcctgtttatggcatgcaagtaaaaaacccatggaactactcagcactgtaggaaatgaatggtttattaaactgttcactgtgctctaatcctggcttcagaatgattaactaacaaatccatcgtctgggggaaagctgac

SEQ ID NO: 25937 - DNA, 201 bp, Bos taurus
ccctcttaccagggaaggaaacatattccgcagtcttgggaattagggagtcattgtctcttggggccattattcaacatattaacaactacgcagtgaagttcatcccctttgctaaaggctacttccccccgtccccccgtgataaaactataactctctacaaatacaaaataaaatcaacacatcaaagattgtatt

SEQ ID NO: 25938 - DNA, 201 bp, Bos taurus
gtggcccaccagggtcctccgtccatgggactttctgggcaagagtactggagtggggtgccattgccttctccggacttgttgaatgaatcaataggccgttatcagacttctcaaactcattagtctctgtgaaaaagatcattatctctgtcaacaaaaactgcttaaaataccaaaccatgagtcacagggcctctc

SEQ ID NO: 25939 - DNA, 201 bp, Bos taurus
gattaattttctgttcctccaactgggcttgctgaaaaggagcttgagtaatcccagtctctcttactgctccccaaaatgataaaacttttctataaaagtatttgattccctttctactgtcacttctgaatttgatttactgtttttttgttttgcctccagacctaatttttggagtgcaactgcagaatttaaccc

SEQ ID NO: 25940 - DNA, 201 bp, Bos taurus
atatcaaaaccctgagggccctgaggagagtgtaaatgcaaaccccacctttgtgtgtggagcagacccaaattataaaccatctgggaactcaggcaaagacagatgaacctttctgtggccttcctgtgtcactgcacacagcacttcagtcctgtactttactccagaagagacttttaaagcttccagttctctcct

SEQ ID NO: 25941 - DNA, 201 bp, Bos taurus
aggcgaggccatgcatatcttgtccctggggtgacagtgccagctggcaagcatgtccctgtgtttccattcaccccagaagcatgaagccccactgtgcaccctgaaggccacagctgcagtgctatattgtttaaccatctctgctttggctaagaagcaagtcatctcaagaaggaatttcctggtttctgaagtgtc

SEQ ID NO: 25942 - DNA, 201 bp, Bos taurus
actccttgtttcctaggatgttttgaaatttaatgaccaaatgcttgttaaagctctccctggagccttttgatgaaacaaactctaactacaaagtgtggtttaaaatggaggtccagcctggaggcatggcaggctccagacaggcctagctgcttttttatgcaaattaaacatcttaatccacctggcaaattactg

SEQ ID NO: 25943 - DNA, 201 bp, Bos taurus
ataaacaaatatgaggcagtcttctgagtttgactaaacaattgaatatttgagtatatggtgtaaatgtcaacagcataaaggaaaacagaaggagcatctggttgaaggggaaaggttatgacttgcgtcctagatatgtcctgctgctgctgctactgctgctaagtcgcttcagtcgtgtccgactctctgcgaccc

SEQ ID NO: 25944 - DNA, 201 bp, Bos taurus
ttcatttatattctgaaaatgagtgattggtttactaagcatagaaagcataaagttaaagcctttgtccatcgaaatcctccttgagcatctgtgctcaatgatgaagataaaagatgaaatggatatattttctctcctctcagtgctaaaatctactggaaaagacagatacataaacagataattaaactaagtgct

SEQ ID NO: 25945 - DNA, 201 bp, Bos taurus
agttcccctaaccttggtgccagttcccaaaccatagatatagccagtgattctacatgagcggggattttcaaaggcctttcaaaaacgccttacagctttcaaattaatctgaccacccccaatttgcaaagaaaggagctgagtcatagagggtttggctgaccaactcggagggccaaaggggccagggtctgttag

SEQ ID NO: 25946 - DNA, 201 bp, Bos taurus
ctaaaatgaaactcactttaacagtgtcacctcatcattatttggttctctgtctgccagctagatgtcagcatggtcctggccctatgaagggactggggtcttccatcttcctattcagagtcttgggcaaaagactaggtgtttaataaatttggaccgtttggtctaaggagctactttgccctgggcagagctatt

SEQ ID NO: 25947 - DNA, 201 bp, Bos taurus
ttttcaaatgctgacgccaagtgacccaggccaaaagtataattccttcctctatgctccctgctgaactagctcactcattccagaaacagttcccctacgcgttggcagagctccccaggcccttttctccattctgggtgctgtggataatcgcttcaaacaccctctgcagctcacagggtcaagtgcacactctcc

SEQ ID NO: 25948 - DNA, 201 bp, Bos taurus
tctggaggccacctgctttccttggctcaggacccttcctcacacggctccaactgtcatcacatttccgactgctgtggttaaatctcctacttcccctcgtataaggacacatgatattgggcccacctggatagtcaggataatgtgtttggcttcttcgttttctggttaacaactccactgcgtccccaacacccc

SEQ ID NO: 25949 - DNA, 201 bp, Bos taurus
ttggagttggaaaatacatacacacttaattttgttgactactttcaggtggctctctaggatggctgtgtcaatttacactcctaccagcagtgcttgggggtttccacttctccactttctttttatcatctgacgtttgatcttttgccaatttgatggacattgaacattatatcatacttctttttatttgtattt

SEQ ID NO: 25950 - DNA, 201 bp, Bos taurus
tgcctggatttattctttgtgttgctcaaattgcctcttattggtctatctttatgttcacttacttctgttatctccatactaccattcagctgcttcaatgaggttattattatttttattttttggtttgaaatttcccacttggctctgcttcctgtcttatattcttgtattctatcttatatcctttgctaatac

SEQ ID NO: 25951 - DNA, 201 bp, Bos taurus
ggggccatagtaatggatttagccggacaatgctcaaagcgctctacatgtattatctctcaatctaaaaaggtgatgtgagttaacagaaaatagatgcatattgttctctggccctggttcctgacacagagctcctaaaacacttgtaaatccctaagctgctaagagcttcttttgttctaatattccatctctgac

SEQ ID NO: 25952 - DNA, 201 bp, Bos taurus
tcaccttttcattgtttctaaaggggaagaaagccatttatatagagtaaattagagaaatttacatctgccacatatgaagacaaagaagctctttttactgtgattcttgaattaaagagctgctcataagaagctcataagaaaatattcctaagaatattttcagttctgtgtatcgtcattttaaaataagaatgt

SEQ ID NO: 25953 - DNA, 201 bp, Bos taurus
ggaaaaaaccctaacttacagatgagttctcagggccttactttatgcccgtctgatgtggagattggctgtaagacattagcatttcagaggaaaaatgtgaggttcagtgactgtgggattgaaatgtggattgaggggggatagtaagaaataatagaatattggtgggacagttggaaggaataaaatattgatgac

SEQ ID NO: 25954 - DNA, 201 bp, Bos taurus
cacagagtcttagccactgaaccacaagggtcatccctgattcttctttttaacaattcctttcccctaacttcctccttgggaaaaatgtacaaaaacacaaataagtaaatggagtcaaaattagaaagaacagtttgttaacttttaaaaataatctgttcatttattagtattttattcacttaatataatcattct

SEQ ID NO: 25955 - DNA, 201 bp, Bos taurus
aatttaagactaaataatttttagctaccatgttcctgtctccaaagtttagactttttttgacagtcaaatgaatttacaacatatttgaagtcaagaaggtacagatatactttccaggcagttacggatgagggaatgaaaatgatctatactcctaaggataagtggtagatttccagagtcagagactctgtacca

SEQ ID NO: 25956 - DNA, 201 bp, Bos taurus
gcttggggccattgtattcattgaatcttaatgtagttctcagtcattcactattttgagaatccaattgattatctctttatttccagtgctataggatggaatatctatggcttatttagtggagcttgggctataattctctaaaattatttcttgtctcaatagaagatgttgtatgttaagctttgcatgtaactt

SEQ ID NO: 25957 - DNA, 201 bp, Bos taurus
cttttttgaataattttcattttgaaacttgaaaaggtagaagaatccagcctccttctgctcgtaggagacatagataagcatctcccacaaaggtacatgattatgttacccttctggaatcctggtagccaattcaagttgtttttgaagcacaatgctacccatgaggcctaaactaaaagaaccagacattccaga

SEQ ID NO: 25958 - DNA, 201 bp, Bos taurus
ggcactatatattaataactaaccatttgtgatgcctcctgttgcctgtcctcatttactgttctagacatgactgcctatatgctgtttaacaagagtgcatcattcttacatcaggattaaggacatatacagactgttttcagagaacaaattagacatttaaaagtaccttaaaaatgagatgatgcaatcaaatgt

SEQ ID NO: 25959 - DNA, 201 bp, Bos taurus
ccgaaagtatgtctgaaaagccaatttatcactccagatacaatctactcaccatacaggaactaagaagttttaaggccctcagacaaaggaacaattacattttaagaataagtgaaattaatgaagtttacctttccaagtctcttcttaaataacattccattaaatttgtatttatactttataaaatattctgac

SEQ ID NO: 25960 - DNA, 201 bp, Bos taurus
gcctgaggggaagcctaatctcctggaccttgaccttggagctgacactccaggcatctgcttcctgaccatgcctcaacccccagactcaagatgttctggggaggtggaggccaagccttccaagggtttctgactaaataggaattaactccctctgttccctggtgttggtttgctaattgctacctcctcccacct

SEQ ID NO: 25961 - DNA, 201 bp, Bos taurus
cctatggtgatggttgaaaatttggacatctatctattgaacaaattatgaaatcttttcctttgtcttccaatatatgaacttctaatctccttgtcattccttaaatcacttttattaggtttgcatacgcatcatttcagagaaggcaatggcaacccactccagtactcttgcctggaaaatcccatggacggagga

SEQ ID NO: 25962 - DNA, 201 bp, Bos taurus
caccaaagaaggtgattccagtactgtctttttgaaaagagatcctaatgtagtgcctcttctgagtgtttacctttgtcatgtcttctgaatatttggtacacatgcttggtgggcacaatgccattccgttggggctagatattcttgaaagaaaataagtactggccatccaagtcctgtagaaaaacgttcttaggt

SEQ ID NO: 25963 - DNA, 201 bp, Bos taurus
tttcctattcacactctggaactcaccaagatggacctttctgcagattaaatcatagccagagagtgacatgggccctgaagtggaaaaacacagcacatgatgttagtatcatgttgaagctaggtaggcctgatgatctctatgccatctacataaaaatgtcagacttttgcaaaatttaactgcacgagaaaagag

SEQ ID NO: 25964 - DNA, 201 bp, Bos taurus
gggctgtactgccaagaagatagccaaactgagagtaaaattaaagatgaacactgtgtataaaaaaagaaacagctatgggcttgtttttcaaaggataatgccagacataacacaatgtcagggggattcaatataggtgagcagggactaccactctgttcatgatgatagacacaactttacaactatacgtgacta

SEQ ID NO: 25965 - DNA, 201 bp, Bos taurus
cagctgaaatacagatgaccctcccgtctctgtagagaacttgagagctacatattaaagacggcaaagcctccaccaaccaggtccttggatagctacatgaaggaaggctgccaggccatcctaggcaaacacccagtactcttagcaagaagtaaatttcttttggtttgacctgctgtaaacattgggatctatttg

SEQ ID NO: 25966 - DNA, 201 bp, Bos taurus
cccttctgcttttatcatctctccttccaccaagaaaaacttctcatgaaaacagatttgaaaatcacatctactgggcccagaaacagtttcacagttatatagaagaataagttcaaataatgatgccctagccttatcatttcagttgctcagtcgtgtccgaccctatgtgaccccatgaattgcagcatgccaggc

SEQ ID NO: 25967 - DNA, 201 bp, Bos taurus
tgattttgcttatttttcagttataagattcaagtcttattcctttctacatgagacactattagctaagtcatactatgatttttttttaattttaggcgattttaacaccttctagtcttcattagaaaatgagtaaggtaagataagtgtataacaaacacaaggttttatacttgcctgttgtgaatgacttgcaat

SEQ ID NO: 25968 - DNA, 201 bp, Bos taurus
ttctaactttaaagacacttaagaaacatgaccaaatgtgatgtatcaaccatactcatttttctggctcaaacaaaccaattgtaataatgtattttttaaaatgtagaaaattggctacaaatatttaattatattatatcatctcaacaggacgaaatggccggatggcatcactgactcaatggacctgagtttgag

SEQ ID NO: 25969 - DNA, 201 bp, Bos taurus
aggacatggtcactacatggagggtaccccaccctcacctctggataagcgggaaagccactgacatgagattctgttgccaaaatggctctttcacaatcgtgttagggtgcctgtaacttccatcattagttacttttttttaaaaagccagtttcccccaagctggtgtttgaggaaatactaataagtgctcagtgc

SEQ ID NO: 25970 - DNA, 201 bp, Bos taurus
cttttctcttttgtattttttccttgtttttttaaatttatttatttaattagaacataattactttacatgaatcagccacacgtgcacatgtccccctcgtcctgaaccccccacctatctccctccccaccccatccctccgggttgtcccagagcaccagctttgccctgcttcatgcatcgaacttgcagtggcca

SEQ ID NO: 25971 - DNA, 201 bp, Bos taurus
agtcaataaggttaaatgcttttctgatttcttaagtgtgattttcagaaacatcctcagttttattcccctacggcaatgtatctgtcatacccaactttggataagtgtatccactctatgagatgagaaattgagtactgactggaaacagatgttgctgcttttagaaatgaaatggcagatagacatttggaaggg

SEQ ID NO: 25972 - DNA, 201 bp, Bos taurus
ccaagttcatacactgaaaccctaactcacaatgtgatggcatcaggaggtgggggccttggaaagtaattaggttcagatgaggtcttgaggcctccattatggaattggtgctcttctaagaagaggaagagagcaccctccctctgtacattatgcactgaggaaaggccaggtgaacacacagcaagaaggtggctt

SEQ ID NO: 25973 - DNA, 201 bp, Bos taurus
aaggcattttcaacttacaatggatttattgaagtgtaatagtaaattgaggaagacacatatttttctttggtcatcactgagtcacatggactcatctgtctaggtgggctggaaaattcagtctctggttgggcagccacttgatagttataatcaacattggaaggagaggtttggtggagagatagtggttctcag

SEQ ID NO: 25974 - DNA, 201 bp, Bos taurus
gagtcacttccaagccctcagtttctcaagggctgtggatggaaggtctcagttctccagcggatattgaccagaggcctcccctccagctcctctcactataggtctctccaatacagaaaccggcttcatcaaagtgtgccagccaagaaggccaggcaaaggtcgtagccttttgtagcttaattgcaggactgtcat

SEQ ID NO: 25975 - DNA, 201 bp, Bos taurus
tgactgaggtgtctccatttcttgctatgataggagatttcattaaggcacctttagccagagaaaaaaatgaagctgaagaaagccctgaacatacaaattttctcgtggctgtggcccatgagctgtgtgtcccctttgctgggaatcaaatgcctcccttgggtgatacctcctctaccccagagcctgagagagtcc

SEQ ID NO: 25976 - DNA, 201 bp, Bos taurus
ccctcaggttcctactgatgtatttctggtgagtatttcagggagaaaaaaaatggaacccaactttttaatctgcttctggagctcacccaccatttacgtggcatggtgactaaacccgaactctgccaggagccagtttaacgatgcagttaaatgaggaaaatgttgcctcaagtgagtagcacctgttttgcttcc

SEQ ID NO: 25977 - DNA, 201 bp, Bos taurus
atatatgtatatacatataccacatcaaaactatacctagatcacagcttcaataagccatcattacactattttaaatctgtggtatagtggctcagacggtaaagaatctgcgtgcaatgcaggagatcccggttcaatcccttagttaggaagagcctctggagaaggggatggctacccactccaatagttttgcct

SEQ ID NO: 25978 - DNA, 201 bp, Bos taurus
gcaattaccaataatttacttcatctcctaggtgctgactccttgatgcagttttatatgcaggctgtgaggttggggtgagggagtgttaaattattaatagctattggtaaacctagaatattagaattgttctttgggactatctgtacacttagttaaaagtcgtatttctagcatgtctctctctcatcagcaatt

SEQ ID NO: 25979 - DNA, 201 bp, Bos taurus
tctttactttattgaataatttatacagaaataaattctgagaacactttaatatcagattactaatgtagtccatggcctattgtgtcttacttataaaactttgcttaaaaggtcaagtgaataaaatgtcttaacttataaattagaagttttaaatcttcatctctccagatacaaaaaaaaaagaatatttttaac

SEQ ID NO: 25980 - DNA, 201 bp, Bos taurus
aacctatgaagcaggaagtaagtagggaggccatctacaggttcctacaatcattcaaatgtgccgtgatggtggcttggaccagggtcatggcaacaggatggtgagaagtggccagtaagaagtaacaccaagaagatttgctgatgaatgagatgtgagtggggagaggttccgaggactgattagtccaagagacat

SEQ ID NO: 25981 - DNA, 201 bp, Bos taurus
aggtgtgagaatacacgcaactatggcaggtcctagtacctaacttcagcggatctgtgccatcagagctgtgctggtggctgtgtgagccaactgcctgcattccagtgggtgaggaggggcccgggtcagtgcccacaagagtgcacgttgtaaatgcacacatcaggcggctggcaacaccacagagtgcatgtcttg

SEQ ID NO: 25982 - DNA, 201 bp, Bos taurus
acaatcttatgtgattgtccccacagtgaagacttctcagaaaatattgttcagatatgactggtattaatagataactgaaaaatgcttgcctttcacatatggttcatcctttacacatgattgaaaaaatcacatgacttgtcctttacattcagataaaaataccttttacctatggctcatgttttatagggctat

SEQ ID NO: 25983 - DNA, 201 bp, Bos taurus
ttacttgaaaaccactttgattttaatgtgcaaaagataaagaagaaagaaccctcaaaaagctataggattcagatacttcttatttattaaaagagatgtcatgatccttcaaataatactggactgaataagggaatatcattttcatcatttgaagcttttgtttagaaaccatgtttataagttttataaggcact

SEQ ID NO: 25984 - DNA, 201 bp, Bos taurus
gatttcttagaattggctgaacatgggacagatttttcttttccagtagtgagcttggttctgtgcatgtgcaattcatgtagtcctggcctgccttttcgtcttctgcagatggtcactcatagaacttctagtatttctctcaaatataacagtcagggatggaatattcagacagtgtggccaccctgggagacatgg

SEQ ID NO: 25985 - DNA, 201 bp, Bos taurus
tctcctacttcaactcatctcctagaatgtcataggacaaatgttgactttgctatttttttgctcaaaaactcttagtagttcctcattccctccaaaaagtatgataagcaaaatttgactcaggaatgtccacagtgggattgttaataaaggcaaaaccttagaatcagcatagattatttggcctaaaggtgttgt

SEQ ID NO: 25986 - DNA, 201 bp, Bos taurus
taaacctcactacaatcctttatttccaatcaggaatattgtcattagagataaatttagaagaagatagatttaacagtacctgtatccattttcaaggggtagtgctgaattcttcccatatcttttcactggctagggttgagttttgagctgtcttatttgtgattgcttttttaggggctatctgttagcaactga

SEQ ID NO: 25987 - DNA, 201 bp, Bos taurus
taacacttcagattaagggctcaggattgtaacgtgtttccttcttaattgtttgttgcaatgaagaataaaaatataattattcattcatataaaatttcgaaataggatattaaacaagaacagtgttgtgatcatctgcaacctttccacaatgtctagaagaaatcccttcacttattcatagtacatattaaaatt

SEQ ID NO: 25988 - DNA, 201 bp, Bos taurus
tgaccaaattaactgggtctgccctgatacagaattctgtccatggcagaaatatttggtgattagggaaatggagtgactactgcagacagccagaatcccattaagcatggcacattaattacaataaatgaaaattggtgcttaaaagaataacttttgtgaagtatccatatttaatatcagggagtggcctgagcc

SEQ ID NO: 25989 - DNA, 201 bp, Bos taurus
caatttactttccttttttaatctgcttttttggcagtgaaacttcttccataattatatctctccacattcttccaaacccactccaagatccacatcttcttgctgtatatccttatatgttgtgttaccttaatattctgaaatgtatctttagttcatattgacctctgaaaatcatcccaattcaaataatatgtg

SEQ ID NO: 25990 - DNA, 201 bp, Bos taurus
ctcaaaacatcctattaaccatttttctaatagggatgtcattttttttttaatgatcccttttcactctttaaggttcaagttaaacctgaccctgcctgggatcctaaaataatggctctctcatctcaactgatatgaggcatttaacctcattccttacatggagttaagtcatcaacaactattttcagattggga

SEQ ID NO: 25991 - DNA, 201 bp, Bos taurus
aataggttgggaataggagaatattatttttccagctaattactactcagcttgtttttaaaggctttctcctaaacccgtatctctcctacttgttctgttgggggagtgtgtaatttcctcggttctgtcttgtcacaacaaaaatttgaagcgacggaccagtattacagctccgtgttacagctcagttttatttgg

SEQ ID NO: 25992 - DNA, 201 bp, Bos taurus
cccctcatttacctgctactgacagaaataagcacaatcactctttagattcacccagcactgtctacaactcctttgaatgggccagtttatcctcctaatccacaggaaggctagctttttgcattaggactgaactaaaaatgctgtctgccatatcagttaaaagaaggatgctgcggccctcaagtcacacagtca

SEQ ID NO: 25993 - DNA, 201 bp, Bos taurus
caatattgtaaagtatttagcctctaattaaaataaataaatttatattttaaaaaatcagacaaaaaataaaagccaaagcattgcttaattatagccatcaacaatttgaaaatagttgtacacagaatattacttgcagcactgtttgttaaagaaaaatattggcagcaacatgcccaaatgaacaaggttagttga

SEQ ID NO: 25994 - DNA, 201 bp, Bos taurus
agacacaattttaaaaatattcaaaaagcatttaaaattctaactacataaacaaatgctcatgctctacaccaaaacaaaattgcaaactacacatagcgtcctcactggacagacaaatgactcttgaactggtaagaagtagctggaactgggtcctttagaacaacgccagcaacctttgcttggaggccaggggcg

SEQ ID NO: 25995 - DNA, 201 bp, Bos taurus
ctgagcgactttcacagacccaagtacgtggagccctgccctggacacccactgaggctataaccagtttccatgggataaggagtctgcgtggccaaggggagctcgcatccctcttctagaccactctctgggagctgaggatcctggaatttcttgcccaaacatccctaagcctgcttactgggcctgtgagggcct

SEQ ID NO: 25996 - DNA, 201 bp, Bos taurus
cataaataacgcactccctatccaagtatggagctgagggttggatgcaggagtcaggttgatggagatcaaagtaactcctccgaatagaactggagaacgtggcttcagagctgatgccaggccagctcacttgatactccacctctgaactagactcactcctttcctggctgggctgactacaggctacttgccacc

SEQ ID NO: 25997 - DNA, 201 bp, Bos taurus
cctcaaactttgtttgactgatgtgaattctctctctctcctgtgtttaaatgaagtcacgtttgtataccaatggcttaaaattaggaaactcctaattataggggagaaatacgggaatccaaaactgccatatttgtaagacattgctttgctctttaagctaacccgccattctattgggctattgattacatttct

SEQ ID NO: 25998 - DNA, 201 bp, Bos taurus
cagagttcctattctttcaagtctaggagatttaagatatttttctaaaatgaagattaatgctgacaccagacaatggaaattaaggccccttgaccctcaggagttccccaagcagtggtttagctgtatttttcaagtatacctgggttgaagatcagcctactgccccatcaccaagaatcagaggattaagggctg

SEQ ID NO: 25999 - DNA, 201 bp, Bos taurus
ctcaggcaaggccacaggtgagcaagaagcaaggctcgggctcgaagcaggtcctctgcaatgatcctgctccaaacactcagctctagcctcagtactgggggtgtcccctcacaggcccaggccgccaggggaacattaaaatgacatcatctttgaccaacacacatggcatagaacctgggcgcgtgctaagtcact

SEQ ID NO: 26000 - DNA, 201 bp, Bos taurus
aaaataaaaacagtgttaagccataaaacacatgcaagggagtctaatgatattctattttacttttcatgctttttaaaatacataatattcttcttctatttttaatttctcaaaattttccttctgctttgctagtattctcagcacatgcttggtctcttgctggttctcctcacaatcagaaagctctcttcacag

SEQ ID NO: 26001 - DNA, 201 bp, Bos taurus
acatccgtacatctgtatttgtttgagtacctgttttcatttcttttgagtatatacctaggagtggaatgctggtcatatggtgattctcggtttagctttttgaggaactgccaaacttttcccacagcagctgtactgtttcgcaatcccataaggaatgtacaaagattctaatttctctacatactcaccaacggt

SEQ ID NO: 26002 - DNA, 201 bp, Bos taurus
aaagtggaatcgtaaatacaaggagtggtgggactctcctgacaaactgacaatgtattctgttctttaccctgtttttaaactcagaaaatctgcttggtagtgctagtgattcttaccttacaaaattttaggtcaccaaaaagtgcaaatatgatacatccctgtaatgcacagtcttcttttttaagataatggctt

SEQ ID NO: 26003 - DNA, 201 bp, Bos taurus
tccaactcttacatccacatgtgactactggaaaatagtctgcttcattttatattatgtcctccagtggactgagaaaatgtgatcttgttcttcctttaaacttcagagactgattcagtgttgaacatgtggtaagaattcaataaattctcatcgatctagcaaataaatagatgaggatacgtgcaatgtcatagt

SEQ ID NO: 26004 - DNA, 201 bp, Bos taurus
atggtgcctatcatatttagtttctatttttcatttggacatagatttattacatagagagacatggaaccttgcacagatcatggttgccttacaataagtcttagctaaagcctgaatatcatccagagaaacccatatgttttgtagcaagcttattcctagacatgccattttctctaaatgtggccaaatttggtt

SEQ ID NO: 26005 - DNA, 201 bp, Bos taurus
acagtgtcctttggtgactctttttgtagccaaatatgccaggccctttgaattcaaaaatgcaaatacttaagttctgtggaacttccttgaatgttttcttttcttttcttttctttgttggccctcttagagtgatcttctaatttttgtcacttttatcttgtagttttcatcactttgccctttggtgctcttttc

SEQ ID NO: 26006 - DNA, 201 bp, Bos taurus
tacatattaaataatgcttaatgccgtaaatcgattgggtgctcaggaattactcagtaagctttagaaattagtagggcttttacccagagataaaccagttcacccaagggcagcttatctttgacaaaggagtcaaaaatatacagtggagaaaagacagcctcttcaataaacattactgggaaaactggacagcta

SEQ ID NO: 26007 - DNA, 201 bp, Bos taurus
actaacaaagtataattaaccacctttgaaatctatttactctggcaatcactaagatcaataactacattttgaatacttttaaccaaatccatatactgcaagaaaaaaaaaaaaaagaggcaatgaaaagggtactcaggaaaacctgaaatattagaagtattagaaaacgtagctatattacaaggaaatgaaagt

SEQ ID NO: 26008 - DNA, 201 bp, Bos taurus
atatatatgtataactgattcactttactatacacctgaaactaacacattgcaagtcaactatatgccaataaaatttttttaattaaaaataaattgttaatttcaatatttgttatgatattttctttcagatggcagtgaagtgtcttgtcctaacaaaaattagaatagtgtgatagtttaaaatatcttgaggaa

SEQ ID NO: 26009 - DNA, 201 bp, Bos taurus
ccctataagttgttgtatctgagattccagctgcaacacacttatttctggaatattgctgtgttcaactctggatacggtaactggtattaatgtcctttgtggcatccatgacatatgcaggtatgggaatggtggacaacctcaaggagacatggtaggaggtttagtctcatatatatgctcaatcccttcaagact

SEQ ID NO: 26010 - DNA, 201 bp, Bos taurus
tagcagagatgatcagagggcccttttgttagtgtgacacacagctgctcgtgctcctgagtataacacgaaggtcgcatcctcctgctttttctaaggcgaattgcttgtgccctttggccagaaactctgccctgtggaggtggaacatgtccccataaagctgaccctagattctgcattgtcctcatcagctcctta

SEQ ID NO: 26011 - DNA, 201 bp, Bos taurus
gtatatatggatacagatacagatgtatagatttattgcggggttggtggttcacaccattatggaggctgagaagagcagaccagacccaggagagccaatggtgccattccagtcccagtccaaagggctgagaagcagaagagctgatggtataatttccagtccaggggcaggagaagactgaggtctcagctgaaa

SEQ ID NO: 26012 - DNA, 201 bp, Bos taurus
atgagacaagacttaccccctgctggcccaaatatgcagagtttgcaatggaaatggagagggattctgtcctataactcttagatgctttacaaagtcagaaaacttttaaaggagggccagagaattctgtaaaaagggagaatcttggccagagtagtcatgctcttatgaagctcttgaaccatgctagggaaaaag

SEQ ID NO: 26013 - DNA, 201 bp, Bos taurus
tttataagtttatcagtgattagactgcattgttgagagtactttctaatatggctaaaacagaattttgctgaaacaaaccatactaaaattcagaaattatttactatacaaaagtaggacatgttttaagaggaatttctcatactgaccttagcatagctggaaaataaactagaccttagaactggttctgagttt

SEQ ID NO: 26014 - DNA, 201 bp, Bos taurus
ttcaacttttagatacaattcaaatcaaattagtttacacgagcagagtactttctgttgactaaattgtattttcagtttattcacatattgcatgtagattttaccaagctcaggggatgtgattacttagttatttctctaatctatttcctccatgctactcccctccactactttatgtgagggacttgcagtttc

SEQ ID NO: 26015 - DNA, 201 bp, Bos taurus
tgatggatatgtaaagatatctgggaagtcactcgtttgttagggtcctggctggccttcttaaatgtcatgaaatttaagtgtgaaaatggccataaattggacacatgaatccacatctatcagtgagatagatgccttactccactagtatccttgatctgatcgtaccccatctccaccctgtcaccgtggttctca

SEQ ID NO: 26016 - DNA, 201 bp, Bos taurus
taatacaagccttaggcctcttttgttgtatttattccaagggagtgtacaggttttgttgctattctgaataggaagtcatttttcactacatttttctattggttatttatgttatattagaacataacatttcttatataatataagaatatttggggttctgctacctatagtaaccttgtcttattagcttatata

SEQ ID NO: 26017 - DNA, 201 bp, Bos taurus
atcctttctttatcacgtaattccatttgaccttgtttgcatatggggatcttcagaacctccacttcatttgttgtaggtagagccactaggccttcgctgctgcccacatgtgtgctcctgtagttcagtaccgcctcttgacagtgacaggggtaagagtgaacatatatataatttgttgccatttacatggtgctc

SEQ ID NO: 26018 - DNA, 201 bp, Bos taurus
ctctccacggaatactctaggcaagaatactgaagggcagccgttgcctccttccagggatcaaacctgggtttcctgcattgcaggcagattctttaccgtctgaaacaccaacgaagtcttcaggggcttactaaaatgtcatggtctcagttaattttactctgatacctatctaatatactccccaacatttcatat

SEQ ID NO: 26019 - DNA, 201 bp, Bos taurus
aaggcttaatgaaaatgggtaaagtctatgggccaaattgcaaatggtgtgacataagcattttccaaagtagacattcccctaaagatacacaagtagggggagtcaagttgagaaacaggcctaaggtttcagagacagttctgaaggaagtgaaagtgtagtagtcactcagtcatgtttgattctttgcaaccccat

SEQ ID NO: 26020 - DNA, 201 bp, Bos taurus
ggagaattatcaggctatccaaaatgacaaggaccttgtggcacctcaagtctcagaggttagaagtgagccagactctccagctgaggttgaatggcactagattctgtactgaatgcacacaagatgacttctaacacaggaaaagatttcagcaagggcaagacaaacacaatgttaaattcagctcaaaaacaatag

SEQ ID NO: 26021 - DNA, 201 bp, Bos taurus
aaaataatgataaaaactatagccagtgcaataaggtaagaaaaataataaaaatgtttacagatggaaagaaagaagtaaatggtttatatttactgttacaattattatgtaaaatattacaagaggcttcccaggtggtgctagtagtaaagaacacacctgccaatgaaggagatataagagatgtgagtttgatcc

SEQ ID NO: 26022 - DNA, 201 bp, Bos taurus
gtgacaatggcattgagggacaactatttctggaaaacagacttttaagtagcatctttataatataccatgtaaagctggtccaagtgtcatcctcagggaatctgttgtttacacaggcttaagaggacttttcaattatcctcttcctgcttcctctctctaagccaggaaataaatccttttaaatatttccatcac

SEQ ID NO: 26023 - DNA, 201 bp, Bos taurus
ctctggggtactctctccacacagttaccttctggattcctgaagctgccctccctccttgccccttcacgttcatatgttcaaagggctccttgctgcttcaaggcccagacccaggtatcatctctgtgcaccagaatctttcccacatactttgaaataatccttctattaaactgttataaaaacatctgctttgga

SEQ ID NO: 26024 - DNA, 201 bp, Bos taurus
aagtgtatattagataaaaggaaagtttctcgggaattccctggcaatccagtggttaggacagggtacttccactgaagaggcctgggttcaatccctgcttaagaaactaaggttctgcaaaccatgtggcatggtcagaaagaagcaaagttttggtcaaacaattcagtgatgatggttatggttatgtctgcagca

SEQ ID NO: 26025 - DNA, 201 bp, Bos taurus
ttcctggtttttgtcattttacacccattatcttgttcctttgctatcttgacatgttcccttctcacagctttgactcagaagactgagataataaatgagtttagtctgtgtttcgaagagactagaaattctcaagaatgacttgtcctctgcaaagcttgcacagcttcactctgcccctgtttggctctacaggct

SEQ ID NO: 26026 - DNA, 201 bp, Bos taurus
accactggaccacctgggaagccccattgaaaattttaaaattgacattattgttttattttacagtggagcactgtgtactcaaagcatcacattctacggaaatgtccttttagtggtctttaaattcaaaagctgggcatctgtccagttgatatttgttatatgtttgtattgtaggttatctgtccagtctttttt

SEQ ID NO: 26027 - DNA, 201 bp, Bos taurus
ttccagagaatagcaaggagagataaaaaggccttcttaatgaacaatgaaaataaatagaggaaaataatacaatgaaaaagactcttaatctctgcaaaaaattggagaaatgcaagaatgggcccaataaaggatagaaagagtaaggacctatcagaagcagagagattaagaagaggtggcaagaatacatagaag

SEQ ID NO: 26028 - DNA, 201 bp, Bos taurus
gagattattgtacctttctttgagctttttttcactttagacagatttatttttagcagacctggacatttttgacatttcctattattaacagtattggttcctttgatgaaggaagccttttaaaaatgagaagcttatacttgttaagcttcatttatcattctttgaaagaaaatctaattgtaagtcatttggaga

SEQ ID NO: 26029 - DNA, 201 bp, Bos taurus
gacagaccatataccaattctaaacaggatacaaagattttctgggataacaaagattagagtgaattttccaaatagttgactcagttaatggcctatttcaaagtcctagacaaattcagtacaaatcagggttatttcatatgacaaagctagagaagcatttcagaataaagcatatttcccatgaactgaatgtgg

SEQ ID NO: 26030 - DNA, 201 bp, Bos taurus
tttccacctccaggggaccttcccaactgtacataaaggttgccatcatctccattacatacaagaggaacctaggtcttgagcagattaagtcaacttttccaggccatcaatcatgagcaaaagtctgtgatgtttccctggagaccacttcattcccaactggcagggaagtaacaagcacactacaagactcagttg

SEQ ID NO: 26031 - DNA, 201 bp, Bos taurus
gatctgaagacacatgtaattgagactgggaaagtatttagttcccttttgaccaaagactgtgagatgatcatgggccatagcagcagatgctacagacggaatagtacatcactaggcaagactagaaagaactgagagggtagctcatgaaacagaggcccctctcatcccactcttataattttttccttttaattc

SEQ ID NO: 26032 - DNA, 201 bp, Bos taurus
cctaatttcatgtgttaatctttaatcagcatatttgaagaaaagattttcagtaatgtggatgtggactgcttatgcaaaccacaatagaaagagttttgagactcacttcaggagtttatactttcagagtcaggccatgaaatgtttatcacaacacagttgagctgttcatcacagtcttaaaatgcattcttcctt

SEQ ID NO: 26033 - DNA, 201 bp, Bos taurus
tccttacaagaaaagaaagaaaagcaaaagtctgaaaaaaaaatcttctaagagccatttggttaaaaaatcatatgcatgtatatattacttctgagcacggccttgtctgccagaacaagaatcagattccccaacagtcagtctctcctattaggaagtttgcataagcctcttatcctcatccatcagaggtagaga

SEQ ID NO: 26034 - DNA, 201 bp, Bos taurus
aaaagccaaaccactatgtgcagctttctttggcctcaatgcaaataaacaagaatttgtctgcgccccgttggtatctgatgggccactttggaacgctctcaaaaagtgtgcagcacagagtcctacagctgctgccggttagattggttggttggagcacagtactatgaggccaagattgtgggtttgggtggtttg

SEQ ID NO: 26035 - DNA, 201 bp, Bos taurus
ggataacaaccttcttgtaatgcaagtctcagccaaaattccaccttctaaaagagaatttctacctatctcttgccaagtcatgatctcatcatctggtgttttttttttttttccagaaaactcactgtttacttgttgattgtcttccccaaacacccacacacacagagggagatctgaatgcaatccacaagagtg

SEQ ID NO: 26036 - DNA, 201 bp, Bos taurus
ttctgggaaaattgtacttccctgatatagataacaccccttttatacatttccttcttattccttcctggaatatggatttcatgatttagcagtcagtctgcaactatgaaagtaaagccagagaatcacagagaggttttagcactgacatccttgtgggctcagtcactcagttatgttcgaatctttgtgacccaa

SEQ ID NO: 26037 - DNA, 201 bp, Bos taurus
tgaaaattgatgccatactttcaggtgacacaaacttagaaggaacagtcaatgctctgaatggcagactgaaattcctgatccccgaggatagaaagtaagcccaaaaaagtcaagttttaaaaaaagaaactatagagtataagtggaagagaaattaatcatcaactgcccttgcgagaaaagagctaagaattttag

SEQ ID NO: 26038 - DNA, 201 bp, Bos taurus
gaagcttggggagacgaactgacttgggccacatgtcaattattagaggcaaaatgaaaaacagaagtaaggtgttttgacttctagaccaagtcctttacactggacttgttacctcatcttgttggaaatcacatgattttcaatgatttttttaaatatttacttttagaaagaaagatattaacatttaccaacctt

SEQ ID NO: 26039 - DNA, 201 bp, Bos taurus
ttcattcctattattggcaatacgatttttttttcacatgaagctttgaaataaaagtgtacatgtctcccccatccacttcctggcctgtttctagcctaccctgtggcacaggcagcagcagcactcccccaggagagggagggagggaagggcaggcggaggaggcagggtgatgaggaaagccctgccagatccaag

SEQ ID NO: 26040 - DNA, 201 bp, Bos taurus
agttaaatggaaactaatgtcatcaaatttttttgcccatgctgcaagttatacagtttactcttttctactctttttcattcagacaaaaaaacaacctcttaatttattaagattaaaaaaaaaacaaaacaaaaaactggccttgatccattaaattgattacacagccctctaatggattgtgatagtttagtttga

SEQ ID NO: 26041 - DNA, 201 bp, Bos taurus
atctatagttgtagtctatcccccttattaataactactgtttaatgagaatctataataaataacaagtgctcaataagtagggagacatagaatttgttattcaaatcaagacacttttgagagttgcagggggtgatagtaataaccactctgggacaggaggtgcaaaccagggcttcccatgaccacctgggacat

SEQ ID NO: 26042 - DNA, 201 bp, Bos taurus
cacttaaaaggtgctgcgttgcagattgactgatgtacagaaaaaagtactgatagagtgcccaggtgaggcacatggtttccttagtacctaaaaatccagtgaggtactgggcctcatgtctgggggaagagggaggaggtggagaagctgttgttgttgtttttaactgctggagggaattgcatgttgtgaatctgc

SEQ ID NO: 26043 - DNA, 201 bp, Bos taurus
ctttggggaccctgctgtctaattcttgacagtttctcttaattagagttcccgaacccatcagagatttgaattacgttgaacttcaaggaaaaagcaatccaatgtctctatagctttccttctgtggccttttgactctcatttaaatttatcaaccttcctgagtttttcccaaaattattttgagcttagcatatt

SEQ ID NO: 26044 - DNA, 201 bp, Bos taurus
tctccatccccacttttggtaactaaaataaatacccaagaaggcaaacaggaacatctctgtgtgagagaagtaacctggtttgtgggagagaccaaattgtatagagtctattggtgctaacatccaaccaagaagttgcctttataaacaaaccaaataaatacctgtgctttgccaaagatgacagttttttttttt

SEQ ID NO: 26045 - DNA, 201 bp, Bos taurus
gtttgccaggttagcaaatgctctcatgagaaagtggctttctcctataaggagaaacttctatgtttttttcctacaggaagaattgggcctgaaaaatccctataatcttctaaggtcttcaatgcaactaagaaggcttaaaaattactttcctgtctttttagttggtttcagttggatacttggccaaatatttta

SEQ ID NO: 26046 - DNA, 201 bp, Bos taurus
attaaattctctaagcatttaaatagttaaattatttttgtattcagttattatacttccctgtacactttcaatcttttatatggaaggcaactgggccgacctggtaacaatgagggtaatatcttaactcactggttataggttttattttcagtggttttgacatgtggccttcgattaagtagtatgatgaaggaa

SEQ ID NO: 26047 - DNA, 201 bp, Bos taurus
cttccaggcctcctgaatttgcttgcaatcatattacactcttgacttcctttcaggctcagtttcaggcactgaccgaggtaataaaatagtatttatcttttttcctggccctttgagaagctgttgatctagttggggagcatttgctgaattttaaggtcactctgcatcatggaggaagtgagaaagttctttaag

SEQ ID NO: 26048 - DNA, 201 bp, Bos taurus
aattgcctacttttctgtaacaagaatagctctatgctcttttcttacgttattggcctttgatgctcatccctctgccatgatgtgaatgttctaccggggaagagtttctctatctatgatatcagtagaaacagttacaccttctttagagatctgaggtgagcatctctcaaatcagatagtccagttacacttttt

SEQ ID NO: 26049 - DNA, 201 bp, Bos taurus
aaatagacatgctataaatctcaaatgtcctagaagcagagttctaagactagattttttctagtcctctggtgtggtaacattcaagcttaaccaaatatttcctctttttggtaatcttcagtaaagctcagtaaattttagactacattgttactctttctacaaaggcctacaactcccacaaccaacattccttag

SEQ ID NO: 26050 - DNA, 201 bp, Bos taurus
caaagctactaatctttaagatttgagaatacagatttttatgtaagattgaccaactttatgtgcaagtttaaatgattttaaatgttgctgtgatagagatttccttgttgttctgaattacacacccactgccttgacgtgtgtgaaattcctggcccctctgaggaagggcttggccatgtgacttgctccaatgag

SEQ ID NO: 26051 - DNA, 201 bp, Bos taurus
aaatttctgagctttctgtaatccctttggaaagtgtatgggatcttggagaagcatcctagaccttgagcagtttcgatcagaggccccataactccaggctaatgatgcagtcagactaatatgtataaaatacagaacaaacaagaaccctccctggccttctcccactagcattccctgtgtattattcctgtggtc

SEQ ID NO: 26052 - DNA, 201 bp, Bos taurus
ttctttcctcctcctcctacagccatgctggttttcttttcttgcctcaaaaaaaaaaaaaaaatagggtgtttaagcctcgcttggccttttcctttgtctggaatgaacctctccagattttccattggctggccgctttctgtcactcagctctcagctcagatgccttcccagagagacttttcctcacccctgtca

SEQ ID NO: 26053 - DNA, 201 bp, Bos taurus
ttttgtaaaatgaaggtaagtagtatgttggaaaagtcctactattgtgtgaggacagagtatttggagctttgataactatctttttgacctctagggagaatgttaaatatataccaaggatggctgagcagaaaatttaaaagagtctgcatccttgtgatataattaagttattgattcagtcttaggatggcctct

SEQ ID NO: 26054 - DNA, 201 bp, Bos taurus
ttcaggtcaatgattctgtgataaagatattatttagtgtcctaaatattcatggcattccccataactgaccccagctcttcacagttcttcatacttatggctaggataaaattcttttgtttccaagtgaaggatgtgggttaagcaggtttggaattctggagctggaagaacaaggagtgggtttagaacaaagga

SEQ ID NO: 26055 - DNA, 201 bp, Bos taurus
acagaaagatcaggtggcaagcaaggattgaatctttattgacagcattgttagaattgaatgtagggcattctatggggataaaccttttgttctatacatggtaactattttgagtctgatttttctcatcatgatcagacatgatatcatatcagatatcatgaaaagacatgataataatatcagtttctctctatg

SEQ ID NO: 26056 - DNA, 201 bp, Bos taurus
tctgttttacacactgtattgtatttatgtaaaacctaatcccccaattcatcccactctcctcttcacaccacacgtccattctctgtgtgtaggtttccattcctgccgttcgaataggttcatctgtaacatttttctagattccacatacatgcattaatgtataatacttgtttttctctttctgacttacctcac

SEQ ID NO: 26057 - DNA, 201 bp, Bos taurus
tatggcttagaaagctttcaacaattttaatgatttaaaattatgaatgttacagtttaataatatatccatagaagtggaatcaaaggacccatatgacatattaattagtggctctagctctgtacactaaactaaggagacaaacaattccagcaatccagtgatcacattgaagggcaagtctcgcagaaggcaagg

SEQ ID NO: 26058 - DNA, 201 bp, Bos taurus
cagatttattccattcagctcatgtattaaaatgccactcccttctggttggccaaatttctccataaaaattggctaatggcctaatgagagttcccttgatatgattttttttttgtttttcttttgctgcctttagaattctctcttgaactttggccattttaattatgatacatcttgctgtgggtctctttgttt

SEQ ID NO: 26059 - DNA, 201 bp, Bos taurus
cattattttcacaaatggggaaacatatccagaaacatgacagatacaaaattctactggtagtaagagggctataggctataggacccttggagcccaggcctctgcttttcctacttccttcctgtttttgccctttatttgattcaagaagctgtttcttgcagctctgatgaaacattgccagctatgttgctttga

SEQ ID NO: 26060 - DNA, 201 bp, Bos taurus
caatcagggaagactgatgatccaatgatcattcatcagacctcaagttttttgatgtctcagcagtatttgacacaactcatcactatcatccatttcctggattattacaatagtcttcttactgaagtctctatttcaagtacaccagttggtctaataaaatggcacagtaattggacaaaatcttgccaagggcta

SEQ ID NO: 26061 - DNA, 201 bp, Bos taurus
cactattccagtgagtttctcagtgctgatattctcaaattcctcacattcagtcctacctaccttggaaaaggcctcttgtttataaaaatagtaatcgtcttgtgatgattgtcaaagttaaattttaaaaatgtttaaaaattaattgtcattcatatatgtatttatgtgagtgctatgtcacttcagtcatgtctc

SEQ ID NO: 26062 - DNA, 201 bp, Bos taurus
cttagaatgaagtttccacaaacttatatgtttccaggagctttgagccttcaaggcaaccactgtggcatgtacttgttagaaagataagtaaccataagatggtcttttaaaaccatccaaaagcttgattttgattctcagagagtatctaggagtaagtggcatacacaaaaagagattctacaacctaggatgaac

SEQ ID NO: 26063 - DNA, 201 bp, Bos taurus
agtccctctaatctttgactccttgctttactattgtacttgtgaactatatgatcctctgaatctcaattcctttactagaaaaatagggctgtccgttgtgcttcttccacagggttaggtatcagtgcttgaaagtacttagcacagcacctagcatctactacaagctcagtgaaaggttatgccttcttataccaa

SEQ ID NO: 26064 - DNA, 201 bp, Bos taurus
cagtgtggcatagcagtaactatccagggaattaaatacttcatggggttcgtatttgaactcttaggtagacgagaaagggcaagaacaaaggacagccattaacagagctctgcctgataccagagcagactgtttaagtgaaacgatttaaagccagtatcacttgactggatttaacagatttttaaaactaaaatg

SEQ ID NO: 26065 - DNA, 201 bp, Bos taurus
tgggccaaggacaaaagggatggaatgctctgtgtctgcaggaacagagagccatcacggttgccgtctcatggagaaggcaggatctgaggtcattgccagccagctcagaatctgcagctcttttcctgataccctcttgtaaccatttcccagatttttctatgatgcctaacattcctctggttcttaaatgagttt

SEQ ID NO: 26066 - DNA, 201 bp, Bos taurus
attcctcctagctccctgcaaaatcagactatctgacatatgtgtgctgtgatcatggggactttataatggaactaggtaaaagattctgttagaatacttagaaacaagccaggaagcctggatatcatacatttgaagtgtctatttagttaacctgaagaatcatctatagataacaggaaaccccacatcccctgg

SEQ ID NO: 26067 - DNA, 201 bp, Bos taurus
gatctggaccccaagcccctcttccccaaacctgtctttggccagaagccacccatgaatacagaggatccccaggaagatgagagccccaccaagactgtggctccacagagagggcccctggtccccctggcagccaaggccaagtctggccctttgaaaccagccagggaagagccagagaataaagagcacggaggt

SEQ ID NO: 26068 - DNA, 201 bp, Bos taurus
cagagacaccggctccgcaggactcagccaggctggaagcagggggcaggggggagggtttgatggcacaatttgctgtcccttcctcaagtgcatgggcaacttcaggatgttcgtgatgaattttaagtttccccgaggacagtcagttctggagaaatggaatgactctgtcttttgttcttctgcaaaagctgatga

SEQ ID NO: 26069 - DNA, 201 bp, Bos taurus
atagtcctaatattatatgccacatatatatatatataatatatatatatatataggactattatacatattatatatctcaggtatgctgacaggtcatggctacatggctcatgaagaattgtccttggctccagagaaccacttctcctaaggttatcctctctcccagagacagctagtgaccaatgactggctgat

SEQ ID NO: 26070 - DNA, 201 bp, Bos taurus
caaagcctgggttttcaaaatgagagaaagaagtcacagacaaggcccccagctagttgggcagagaatgggtgaaagccaggccttgtgaatccccagctgcaaactctctctgctcactaaaaaggactaaattacataaaaactaaacggttctgagacggtattaattgtgcaccaatattcttgcctggagaattc

SEQ ID NO: 26071 - DNA, 201 bp, Bos taurus
ggcaacgtggaatcttccttgtggcatgcagagtctttcctggcagcgcccgggcttctctagctgcggagtgtggccttcttcctagttgtggcatgggggctctagaatgtgggctcagtaactgaggtgtttgggcttagttggcccacagcatgtgggacctaccccaaccagggatcccaaccagggatcaaactc

SEQ ID NO: 26072 - DNA, 201 bp, Bos taurus
agatgtggaggccactcaggtgggtatagatttctgggaaacatgaaggtgaaggcatttggttcttctaagaatggcaacagcaatgacaattttagatttatcaagttctgatgagggccgaggtaaccaggttctgggactcactgtggcagcctctcacagtgggtcagttctacagagtgattcttggaagcccag

SEQ ID NO: 26073 - DNA, 201 bp, Bos taurus
tactaccctggggctataactttttataggtctttggccctcctcttccctctcttgtcccaagaagctagtctaatcttataacctttcacccagatcagaatcgtgggcctgatgagcaagatcttttctaagtgaaataaaaaaataatgaccatctgtgtcatggtacacaaggtttagagattgcagaaaacacat

SEQ ID NO: 26074 - DNA, 201 bp, Bos taurus
aacacaagattagccccacacttagttcttcttcttatacttgtaaagttttaggaaccattttctatagttatctgaatgaataaatataaataaaaatgactaatgaatatattattaacgcaaaaatatcatcgtgttcctagtatatgtcagacactgtgcacacagctataagtactgaaccctctttggtgcaca

SEQ ID NO: 26075 - DNA, 201 bp, Bos taurus
gcatttcgttgtatttatttccctaatacggtattacatgaggactaaaatgtgtcatgtttttagaagtactcttaaagatgacagagctcatattcatcagtttcatgctttgaaatgaattaactataataacatgactctgtgttgagatgcttttaactaataatactttcaaataaataaaaggagttttttaaa

SEQ ID NO: 26076 - DNA, 201 bp, Bos taurus
atctgagagggaggctgggaaaaaaaaaaagtcctagcataaaatgcctagaattcactgctgagagcatagtagttattaaattaattattgcagaagattaaaaagcctaaaggactaactaatagagaaacttataaaacttaccctacatctccataaaagggttatatcaaaagtttgaaaaagtttcctagatga

SEQ ID NO: 26077 - DNA, 201 bp, Bos taurus
gggtatgtccaggagtaggacagagaggtggcttaggtgttttgtccaccggttacgtggtgttgagtgcaggaggcatgctccgtactttgtttatgctgctgacaccctctttttattccaagctcttcaaaaacaatagttgggttttttggtctctttgtatcttatgggtccaaaatttgaccccactttgcctgg

SEQ ID NO: 26078 - DNA, 201 bp, Bos taurus
tgttgcttatcaaattttgtgaaatgctttaagtaatataatttgcgtgtggtctcacattggtgtatctgaggcctctgatacgcaggaaggggcctggcattgatttactggttggctcagtttctgttgcactcatccactgggtccaagagtcgagctttgacttacagctcggcctggatctggtcattctttatc

SEQ ID NO: 26079 - DNA, 201 bp, Bos taurus
gccacgaccgagagatggcgatccaggccaagaagaagctcaccgtggccactgaccccatcgagaggcttcgcctgcagtgcctggccaggggctcagcaggcatcaaagggcttggcaggtaggacctgggctgtgggctgcagggagatgaaggagaaaggcagagtgtggccaagtgaggctgagaccagccatggg

SEQ ID NO: 26080 - DNA, 201 bp, Bos taurus
ctattgcaaaagaagaataaaggtgtgtttctctagctgattattcccataagaaaaaacattctgtaatggcaaaagtatcagctaaaggcagctctttatggacagattagccttatctctagactgacacctccatgtatgtatttaccagtctctccagtttggagtaaacaataccatgtgtgaattcagtagggt

SEQ ID NO: 26081 - DNA, 201 bp, Bos taurus
aagagttttctggaacactcttagatgcattaccttaatagaaaaaattatcacagcaggtagagagtggggcccatatttaagtttgaatatttttaaggttaaattttaacaaaaaagtatgatctttcttaatttccatttaaagtcaattccaaagaccatactaatacactgttaaaggtcagttaagatctttcc

SEQ ID NO: 26082 - DNA, 201 bp, Bos taurus
tgtgcacggagtatttggcagtatgaaaaagaacatggagaacaactaggggcgcttttaaaaattactgatgcccccaccttgttctagaattttcattaaagaatggggccatggtgccagtgctgttgttgttctttgttgtttgtgattccccagaacattctaatgtgaagtcagagttaaaagtcattgagtaaa

SEQ ID NO: 26083 - DNA, 201 bp, Bos taurus
aacagtgtttaagaaagggctgtgttaaagtgtgtgtcttcttgggaatgcaaaggcctttgtgggaggaacttaatttccagtgtagtaaaacagtgtgcgcacggcaaggggatgtatgttatgaagaaagtaactatactcaaaaacacagttacaaacctgtattgcaaatgatttctttgcatgtctgtttcccac

SEQ ID NO: 26084 - DNA, 201 bp, Bos taurus
gctctgctgggatgggctggactgagctggcttatctgggttccacctgttttctcattctgaaacccagatggaggaaggaggcaccatgtggaaaacctgagaacaagagcaggaaggcctcagtcaataaatacagtagcttgcagttgtatttaaggcttctgttcggatacaacaaaaacaatcacaacccttccc

SEQ ID NO: 26085 - DNA, 201 bp, Bos taurus
aaggtcacaacttatcttatttacggagccacaggcttagagattctagctcaactcatccattcattcatgtgttcaaaggccattaataaatccaagctacaatgaagactcttgtggaggttttaagcagaaacttaaaaatgcaaaatgatcgctcaagagttttaatctaaccagaaattctatttatagttatgg

SEQ ID NO: 26086 - DNA, 201 bp, Bos taurus
tgattaggcttgaattagatgatctgcactgttccatttttggtttatgctctgagtctttcaaaatgtacaaattagtaaggatggttcacaacccctttaaaggcagtcaaagccttaaatttgcaaattttttactatgctccttaaacacacacacacacacattttaaagggctctagagaagacatttgcagaca

SEQ ID NO: 26087 - DNA, 201 bp, Bos taurus
aacaaatgagaagactgaagggagttttctcatgggagtggcagggcaagaggtcaaggaagtcagatgaccaacgctgtcactccagccaaaggttacctggacaacttcggccaagtcacattctctgagtcttagataacttacctgaagaatgaggaagtcaagtccgcttttctccaaaaaccctttctccttaga

SEQ ID NO: 26088 - DNA, 201 bp, Bos taurus
actggaccaagaggaaagtctctttatacaattattaaaggttactttccatttacagtcattacaaaatattagccatatacccccatgttgtataatatgtctttgagcctaccttcacccaatagtttaaactcctcattcccccacaatggtgctctccactccccccagctggtacccattagtttgttgtctctc

SEQ ID NO: 26089 - DNA, 201 bp, Bos taurus
acatgtaattaattggtgcgctaacctcacaggcattagatgcttagctcttagcccacagctcttcaatagattgtttactcacattcaaccacactctttttaatctgatgcagttggaaaagaggttttcatagggctgttttttggcaccagtacccacactactattataatcagaactcttaaccaggtgttgtt

SEQ ID NO: 26090 - DNA, 201 bp, Bos taurus
tcaactcagggccgtgtttaagaaaaaaaaatcattgaacttcagggagtactgagacattctgtcctcagtgttgttactgtgttcccccaattctgaagcctatttcctggcccttcatttaactccctggagaaaatagatcatttctttaagccctagtaaaaggagtaagtccttattagaccacatttttgcctc

SEQ ID NO: 26091 - DNA, 201 bp, Bos taurus
aactggtgtggtctttttctccgtagtttggcatggggaaggggcgctgccaaatggaactccaggcctgagcctgatactaggtcttagacaaaggcctgtctagggaacagagcaggagaaattgtaggtgtagtacttcagatccagtactccagatggatacctgtaccccaattcccaaacctcatccaacacaag

SEQ ID NO: 26092 - DNA, 201 bp, Bos taurus
cttccagagcctgtctgatgtctttgtgttccttggctgtaaaatgaggataagaataacacatgattctggaatttgttgggagaatacaatgaaactagatgtatgaaactagatgcactttgcaaactctgaagggctgtaagttagtcatgtttgggaaatgaatgttctggctaattaccgtctcaggcttcatct

SEQ ID NO: 26093 - DNA, 201 bp, Bos taurus
tcaagatcatcaagggagaagaaggcctctggacacgtgttcctttgaaatgtgagacagagaaaagcactgttagattcattgccttataataaccatgtaactggaattttaggccctcaagaattacagcactgcaggaataagaagtaggtttatccctttccattcacacttattttttaaggagatcaaaccagt

SEQ ID NO: 26094 - DNA, 201 bp, Bos taurus
gtgcaggcgcgtcatcagcggccatccgtgcgctcggaaatcccaacgcttctccccggtgctccggatcctgcaatgcggaggaaggacctgcggccaacactcagtcgcttgtcacttgtcacaggcaggcacagcagcgggggaaacgaggatggacacggtcgtggagaagttggtggccggaggagcttccccagg

SEQ ID NO: 26095 - DNA, 201 bp, Bos taurus
ttccatcacctccactagctttgttcatagtgatgcttcttaaggcccacttgacttcacattccaggatgtctggttctaggtgagtgatgacaccatcgtggttatctggataaggcctataccctaggctaagaggcctagcaagtgtgagtattgcactgactctttaacacttcatccttcaccccgcagttggac

SEQ ID NO: 26096 - DNA, 201 bp, Bos taurus
actacacagaatactacaggttatgacatacatttacttgctcagagttttcaaacaagccatgttgtttatcaaactatatctcctaatacttaatacaatagaattagtgattgtagttctcatatattttacttacaagtaccttattgagataactaacattttgacagcttcagactttccaaattagcacaacat

SEQ ID NO: 26097 - DNA, 201 bp, Bos taurus
aaggatgccctcgtagccacagcaggtgcaaaagagaactggactgtttcagcgtaagagcaatgaaccgtctccagaataaatacagtaccgtgattaaccttttgaaacaatgaaccaagcagagtaacacaaatactaaattgggctgtcttccaggatgacctttctttaagaatgtaaagtaggcaaagatgtatc

SEQ ID NO: 26098 - DNA, 201 bp, Bos taurus
ctgactgtgcggagcatgaaaaaccaaccactctcagtggttatttcactggaaaaaaaaaaaagtggtttcaattgaaacaaagggtatatagctcaggggtagaacatttgacagtaatttacgtaaatccttttcttaaaggagagattctcttttctgcttctgagatgatctgacttcacagcagggaaggccctg

SEQ ID NO: 26099 - DNA, 201 bp, Bos taurus
gcagttactattaatttgacaataaactaggatttggggggtgttttgtagtttgggtttttttatttttattttcagtggccatatttgaagctgacttattcaggaacatcacatgtttgtgtatatatattatattccataaggctgcagattaactttgctttaaataatggaatatgtgtttaaagctttgtgtat

SEQ ID NO: 26100 - DNA, 201 bp, Bos taurus
ttttttccagctctgatagttgttctacagcctctaggggtgggacagcagctgactccagcctggtttctactgcatgttttatgttgtcctggagccggtgagcccagaggaggcgggtggagaaggacagggaggtcaaggctccgccgccttctctgtcatttcccttcatcaggtgccccagctccccagcagagg

SEQ ID NO: 26101 - DNA, 201 bp, Bos taurus
agaaggccctgtttgtgccttgggttccagtgtaaccaggtattgtgcaagggcttatatgggaatgtactaacaatcaggccggccatgggtaataacaaataactggttaagggtcatttatatattgaacaggaaagttatttgttagaatgatggttctgtatctctaaaaacagacaagttggtctattttgtggt

SEQ ID NO: 26102 - DNA, 201 bp, Bos taurus
tccctcctattctcatccacgagagtggacggctcgtctctgctccacatggcatcagctgggacggctcagctgaaggccaggattcactttcaggaccactcactcacatggcttgcaaactgtgctgctaactgggagctcagccagacatgtggaccagggcctctgttctttctaggggacctcggaacagtttag

SEQ ID NO: 26103 - DNA, 201 bp, Bos taurus
gcaagtaacctaaggaaaggagatacaggtcagtcttttggaaataaggtttagaggtacaacccagatacaggcacaattctgttgttaggatgcttttctctgtgtctctatgtgtatgtctgggtctgccttacactgtatgttctctcatgtctgcatgtctctcttctgttcctttctgtttatcatcattctctg

SEQ ID NO: 26104 - DNA, 201 bp, Bos taurus
agtcattatgagaaacagaagagaagaaaatccttgtggtatttctcttggaacaacatgaaaactgaggaagaacatacatatagtatcaaaatgtacccctggcatgagatgttgggataagtggtataaaaatacattaaacgtaaaatggaatcttgaccaaaaggaaaatatagtatgatgttacaactaagaaca

SEQ ID NO: 26105 - DNA, 201 bp, Bos taurus
tctggaggttgtctgtggatcagttcttccaccagcaaaggacgcacaccttggtgatggagttgaaatggcttcgttcaatagacaccaccaccacccactgaggaaggtgtacgattttaggcctaagacaaccagaaatacaccgagatgtgtatttcatgtgctccccgaatgtgaagccagcataaggtgtcaaga

SEQ ID NO: 26106 - DNA, 201 bp, Bos taurus
agcatggggtgtgttagttaaccgggctgccagaagccctgataaaatcaggattatccaagtgtgtgccgtttgtcctggggtctggcctctttacagcacattaggaataggaaactagaaccacaagtctccatgggtccctccccacttgtaatcactatggacaggtccatgcagaggaggccagaagagagggga

SEQ ID NO: 26107 - DNA, 201 bp, Bos taurus
atttattacgtctagttggccactttcaacctgcactcacgtgaccggcctcaatgcatctggttttgcacccacctgggttgcaggcacctcttgaactgatttgtagattttttacaaagggaattggtccatgttggtgagtggatgtctccctagggcaaggagagtctgagacttcctattctgccatcttgctga

SEQ ID NO: 26108 - DNA, 201 bp, Bos taurus
gcacagcgaggttcctgccagatccgaaagctgcctcttcccatcctgaaattaaaaaacaacacgccaccaaacctaagccaagcagggccctgaggacggcagcagcccgactggaagaagtgccatcccatgcggaggatgggggtggatgggggatgggggggagatgctgcccttcccagccaggccctggggggt

SEQ ID NO: 26109 - DNA, 201 bp, Bos taurus
tgacctttactatagtaccgcctctccctcaagaccgctcactgctactaaacaactaaatgaactatttaaaggtcagttaggtaaaattcaggagcaggggaagttattaagaagctggaagcgcgtcgagtttgtcactgccgcctgagggtggtggttgaaaacataagccattgcttgcctagatgtccctgtcag

SEQ ID NO: 26110 - DNA, 201 bp, Bos taurus
tttcatttctgctgaaatatgtgtccaactaaagaaaaagctttaaatgaagtttaaagacaaaaacacaaaaagcccagcttaatatttgtatgctgaatattagcccatcaccactggaaactctcagataaaacaactcaatgaaaatgcagcaagacccttaaatgtagcaattctaatgctcacctctattattat

SEQ ID NO: 26111 - DNA, 201 bp, Bos taurus
aataaggtttcaaggactttattctacaagtagactgtaattactatgagaacaagaactatttcaaaattctgagtataatctaatgttatgggttctcgatatacgtctctcaatgataatgatgtggttaaatcagcttcataaaaacacttcacctgaaagtattattgagaagtagctttggttgtcttaagagta

SEQ ID NO: 26112 - DNA, 201 bp, Bos taurus
ctgcttgcctcctttgcactaactctttatctcttctacttaggtcatttttgaagggagctctctagcctaacaaaatatattagtcccacaccaataattgggaaatgccaccacttcagaaagtaattgtatgaataggggtaataattactatgtatcaagggtcttctgtgttcacaaactgtgtagtgatcttaa

SEQ ID NO: 26113 - DNA, 201 bp, Bos taurus
taaaggcacttgcattgaatttcaagcactacattgccctctgttcttttattaaaacaaatgttggatgaaaaatattaaataatatttaatagtcttatgctacatgaaaaactatgtacacttgaatacaattaatataatctttcattttacattgggtccttgtatagtagcacgtttactcaactgaaaatagaa

SEQ ID NO: 26114 - DNA, 201 bp, Bos taurus
agacaacatttaagaaaccaggcttaacatgtcatattcctgtggccagaacaaagtcacacttaaagttaactgataatttattcttcttgtgtgactaatggaaaagtgaattgttttttagaaaataaaattatgtctgttataccacaatggctcatgtttcttctcccagtagtctacacttctcctttttttaaa

SEQ ID NO: 26115 - DNA, 201 bp, Bos taurus
atcttattaaattggctaatgataataatgatagtagtagtgaggcaggatgtagattccccacccccaccagggtaaagcaattggagattcatgccctgtggactgaaactaggtgaaaataacagcaggccaattaagggaggcggctgggccctgcctggaccacatacttctccttcccaaagtccggagacctcc

SEQ ID NO: 26116 - DNA, 201 bp, Bos taurus
tgaaggaataatatatatatatatatatatatatatatatatatataaataatgcatctccatgctataggtacattactagaattactatatacttttagatatgttcgcttttactttcatatgaaaatgatgtaacttatttaaacaaagaaaaattttcaagctttttataaacaagctttttttctcacttatttc

SEQ ID NO: 26117 - DNA, 201 bp, Bos taurus
cagtcatgctcatcaccagggctaagttaattacataataatgagtgatatcaagatgtcaaaaatcactagaactcctaaggatacttgcacataaaacggatcaaatatgttcataatggtcctctatggcacaactgggggctttcctggtggctcagatggtaaagaatccacctgcaatgcaagagatagaggttc

SEQ ID NO: 26118 - DNA, 201 bp, Bos taurus
gtatgtgtataactgagtcactttgctatccaaccaaaattaacacaacattgttaagcaactacacctcaatttaaaaaaaaggtgcaatggctcaacattgtagctgacatcatagctgatgatgatgatgaagatcagtgaccagtgatgatcatgaagactggaaggggaagaagaaatatcaagggtttacagaag

SEQ ID NO: 26119 - DNA, 201 bp, Bos taurus
ttcttgagtgttttgcatatctcctgaaaaggagaattacagtatttttgctctgggtaatcttttcaaggatgtttgtacagtaagcaaccttgaaagatagagaatgcctccctctgagcaaatataactctctaggataataagataataactctcatagggataaagattggcaggttttccagcagctccttagaa

SEQ ID NO: 26120 - DNA, 201 bp, Bos taurus
caaatagtatttctagatggaccactgcatagtggatttttactgtgccaattcagctggactgacattgtctttttccaaaattctttcctatgtaattgtagcttagctacatgaagtagttggcaagaaatttggaatacagaactatgtagcagactattatttttatactaagaagtttttttgtttttgtttctt

SEQ ID NO: 26121 - DNA, 201 bp, Bos taurus
tagcttttcctgaaaatttcctcaaaacagtaattcacccataatgtctctgactgctgtaatatcagaagtttctctttcacttctcctaaatcataaagtgatgtgcaccatttttattaactccagtgactaaaaatctttaagaggtgatggatgtgactattcccaaatgaagcagctaccagcattcagacctat

SEQ ID NO: 26122 - DNA, 201 bp, Bos taurus
gggcataaatttaggggcccctttgtgttccctttatcgatatttgggagaaaggtgaactacctaggtcttcaggtggaaagagaataggtctaactaattaaagagtttaaaagaacaaagaatgcaagaacaagctactactatcaggcaagagaaacaaccatagcatgtgtgtgtgttagttgctcagtcctgtct

SEQ ID NO: 26123 - DNA, 201 bp, Bos taurus
gttttttttaacccattcttgccagtgaaaaaaaccacagaaagattatgaatcaaccaattccaggaagtgtgccgtcttctgctgtcaaccttgtgatgatttcttgtgagtttccaatgccataaaaagatgagagtcaagaaccatcataacaaaaatgtccataactgcagtaccctcattctttgtaaatttata

SEQ ID NO: 26124 - DNA, 201 bp, Bos taurus
tagtcaaaatgatgtattacatgggtactttaattgaggagcataaatatagagttctgggaatgggtttaatttgatcacataattttaaatgatgcacattaataattaacacattatgctcaaatataacttgagttatacaaattcccacagaaattaaatgaccataattagcattaccttaataaatatcaaata

SEQ ID NO: 26125 - DNA, 201 bp, Bos taurus
ttttgctttagaagcagtgtgtaaaattttgatattaccccctttccaaaataaaatcagtaaaaacaggcagtttagtgaaacaattcactaatatcacttgatagcaataaagagaaatgctaattatttctaaaggttaattacatgatactccaaatttataaaaagaaaatccctatgcatagttatgatcaaaat

SEQ ID NO: 26126 - DNA, 201 bp, Bos taurus
attctgattctatcaaaactgtgccaccaaatgattttacattgtctactatatgttttaccagtatgtgctactgtaagaaagtgcattatacaataagctaacattaatacaatatggatgtattagtagtagatgtattatttcactaaataataaattggatatataaatttaaaacaatagctattattttgcaag

SEQ ID NO: 26127 - DNA, 201 bp, Bos taurus
ctcttagcgaccccatggaccacagcctaccaggctcctctgttcatgggattttccaggcaagagtactggagtaggtcgtcattgccttctctgaatacgttcccttaatggaccaaaaaaatattgcaaaatagcaactgaactttcataattcattcccagggtcttccctgcctataatgataggtcaattattca

SEQ ID NO: 26128 - DNA, 201 bp, Bos taurus
ggcatttgataaaaaccaggtacagagtaaagcctcatcacactatagctttagaaactgttttaataaaatgtagctattgtatgtttcagacttcccacgtagctcagtggtaaagaactgcctgtcaatgcaggaaccttaggagatgcaagttccatccctgggtctgcaagatcccctggaagaggaaatggcgat

SEQ ID NO: 26129 - DNA, 201 bp, Bos taurus
atactggagaggattgccctttcctcctccacgtgatcgtcctggctcaagattgacccatgtctccagaattgcaggcagattctttacccactgagtcctctgggaagcccttattaagatataagtgcaaatatatcaatacatcttaaaataccaagacactacatgaaggaaaatggaagagaaatttatctggac

SEQ ID NO: 26130 - DNA, 201 bp, Bos taurus
atgatctaatcataaaataatcagtctaagaaaagagtatcttaccaataatattcactctcaattatattctcctcattctatcatgcttttcatcagaaccttgtaagaaagctgagatatacatcagcaatccaatcaaaaaatgaataccctagaaatgatgtgttgctaagttacaaatggggcaaacaataccac

SEQ ID NO: 26131 - DNA, 201 bp, Bos taurus
taaaatctggctagcctggacaaagatccctgtactgagtagaaactgctgaaaatagaattgaaattatgccaggatggaaatagtggaggaagagaaatatacgcagctaaaagtgggagaaaagacagaggtagctgatctaagataaaatgccatattttgtaaaaacttcacagacaaaacagaagagggagctct

SEQ ID NO: 26132 - DNA, 201 bp, Bos taurus
gcatacatcaattacagtacagaatttatttccagtgggaatggatgctagaacataaaaaggttagggttatcaaggtgttgagggatagcgacactgcatattgctcagagatcctagataaatctcaacactaggcttttagatcttcttaccagtaaaatgagagtgttacagggactagtacagggatagtaaggc

SEQ ID NO: 26133 - DNA, 201 bp, Bos taurus
atcaaggtggatgtgctgccacctaaaacctggaaggcttccattgatagaactcttcaggacctgtctaccccagatcagctccaaactaggaggagacttaggcaggactggagcacttcttctggggaaggaactactgcttacttctcttcagaggctatccattaggtactatgattctctgacactgcccacgac

SEQ ID NO: 26134 - DNA, 201 bp, Bos taurus
gcaggaaatttttagtgttttttttaactttatattttcattaaaattctaaaagtttattaactgtatcttttaaaccctggcctaattttattctgacgtagtaatttcaaggggatagtggtccacctaactgataatcatctaacttattaaacaagtggtcagttaactagttctggccactgcatagaatcacaa

SEQ ID NO: 26135 - DNA, 201 bp, Bos taurus
ttaattcagtgcagttttaattacaaaatgacaagaagaatcgaaaggaaataccccaaaatggaagtgacagcataagtagtaattacatgttgaccatgtgctgtgttgcttgttgggtattcttcccaacatactttcctactgacctgtttaatatgctggaaacatggaaaccaaaagaaatgtgaagagtattga

SEQ ID NO: 26136 - DNA, 201 bp, Bos taurus
tgtgataatgtaacagtttatttacctattttcaggctgttttacattcgggttctcttcttatttttttttaaactttacaaacaataattccatatggtatttctgcagctattcttctcagaacatcggtggattttattaatgataatatttaacttcacatcagagtatcctattatgggttgaaatatgttccat

SEQ ID NO: 26137 - DNA, 201 bp, Bos taurus
catctaatttactgtctctactttccaggtctctcactttcctgcaaaatttgttgcaatttgggcagttcttaaaaaggatctgagtaatcctctatggtattttatcttctgttggactcagttccattacattctgttttactgtgttatgttctagtccagtctgttctttatttaagaaataatattcttatgtga

SEQ ID NO: 26138 - DNA, 201 bp, Bos taurus
ctcactatactctagttacagtcactcaacttgtgttcctggatcagggtttgtttgtattaacctgtatctgcatgaaacattccagaatcttcacaagtgtggctgtttttctgcacttgatctcaactcatatgttcataagagagccttctcctgacgcccattgtaaaaaaggtacctccactcaggctccccatt

SEQ ID NO: 26139 - DNA, 201 bp, Bos taurus
tagggtctctaagccctttcctcatccattacggcccaagctacagggaaggtggtcaatgcttccttgagtatcaactgccataccttcatatcttctcatcctatttgcttaggcctccacaacttttttttttttttaaaccaaattctctacattaaattgcctcttcaaaaatatagtttcagctttcagacttgg

SEQ ID NO: 26140 - DNA, 201 bp, Bos taurus
taataaaaataaatgttaataatttgagttattatttgttttattttaattgattgttcatctaaaattttagttacccttgactcattaaacataaaatgaaattagaatgtttccacaccataaaaatgtaagattcttagaattggtagattaatttgtatccaattatttccccatgccttttgttttattgtgtac

SEQ ID NO: 26141 - DNA, 201 bp, Bos taurus
ctacaaataagacttgaagctacctaaggaaactttctctaactttatactgcctttgtccattatagattccaagcaaacaaagtcatggtacacacattatgttcctttacttgtttaattattgaattgtatttctttttcaaagtaaatgtttccacttgagcaatggatcgatactcctctcttctcaagaaacag

SEQ ID NO: 26142 - DNA, 201 bp, Bos taurus
attttagaggcctcaggcaggagggttgctattttagactccccaaaaggcaaaagcgaggtcacagcacagaaagaattaaaggacaaactgtgtgatatctgcattttcacggctagcggtggcaaggtagatggcatgcagctatggcagtggaactaatcaaacatgtacatctgattaattttgatgtgttagagg

SEQ ID NO: 26143 - DNA, 201 bp, Bos taurus
aaatccaatggccactacccataatccatccagcccttactgaaatcagtaaccttttgaagagggccaagaacacacattcaaagaatagcttgctgtttctgctgctgctgtttaaaagagagtttgatggaaaagaaagagagagcttttcttccagtctctgtttggaaacattcaaataacactagaaatatttat

SEQ ID NO: 26144 - DNA, 201 bp, Bos taurus
tgcaatgcagtccatggggctgcaaaagattcagacatgacttaacaactaaacaacaaatacaatctctagaggattgaagtatgaaagaaacattctcttacaagactgaaaaaataactgatttttaaaagaataattagcagtcttagcatatccctagcatccatcacaagtgctgatatcataggatatttataa

SEQ ID NO: 26145 - DNA, 201 bp, Bos taurus
ctgaggtgactgttcaaaattgtatctggagttcatactaatctttttatcaaagagtggttcaaccatacccttcaacctactctcttcagtactaagctctctctctctctttttgcaatacggataggatgagaattttccaaatctttaagttgtggttacttttttgctaaataattctttttcaggccatctctc

SEQ ID NO: 26146 - DNA, 201 bp, Bos taurus
tcccattttgctgcattcctgatgtataaatgataaagcgacttagattcttagagaaaaaatgattccccataaacttgttgaagcaaatttctattcaacagttagcacatcaatagtgaaattgttggagtaggtcaaaagtgcatgactgcgtgctgacctacctgctaataataatcagaagccccttacacccct

SEQ ID NO: 26147 - DNA, 201 bp, Bos taurus
gcacacaaagtttaggcacagtgcaagaagtttctgaaggatgccctgggtagtgacagaagcttccttgagtcccaaggcatgtccacagtgaccactgcaggcacatctctaactgaggctgctatggatctctgtattgttgatcagaactcttagacctggtacccaagactctggaaacactctgataaaggtctg

SEQ ID NO: 26148 - DNA, 201 bp, Bos taurus
ccatctaccttagcttaaatatatatatatatgttgatatatattaatgcacatatggattttgaaatgtgagattataacctttcaagctattatcatgttcagtacctatgcacttcgataagattaagctgtaagttttagctaattttcttgggatttaattttctgaaaaaattatgaattttcaaatgagtagaa

SEQ ID NO: 26149 - DNA, 201 bp, Bos taurus
atcaaggccctagtgattcacagaactggcaaatcagactcaggtctctctaatccttgattttgtgtttttaaatccctaggctatttaatagttccttctcaaactggccgtacttcatatactgttgctgttgttcagtcactcagtggtgtccaacactgcaagcccatgggctgcagcatgccaggcttccctgtt

SEQ ID NO: 26150 - DNA, 201 bp, Bos taurus
ctgagatttttccccttgatttcctaggggtgcaaaaataatcaataagaagcaacaaggcaagttggttacattttagctttgctctcaaaaagagcagtctttatctttgtgaaatatagcttttctgttcaaatgcaaatttgtctcccctttaatggaatttttattagtaccctttattttgaaaatagtaccaat

SEQ ID NO: 26151 - DNA, 201 bp, Bos taurus
aaatggaagtgctgtctcctggtgttcgtaaattatgttagcgttgagctaaccatcaggtgttctcaattaactaataactagctccttaaagcttgaacgcaaagaactctccatgtttcatttaaagaaataaatatttaataatctgaatttacattaaactaaattatagcagaaaaaagaaaggaaagcaggtcc

SEQ ID NO: 26152 - DNA, 201 bp, Bos taurus
cacagacaggacttagaaacagacctcagcaacacacatagaccttttacagcaaaaacacttagatattcaaaagtatttaatagaaaagggtattatcgtaaaaataataaaaatcatccaacaacaaaatacattttgctacgccaaattctcagctgaaatgggggggaaaaaaaaaaggcattaatttcaattttg

SEQ ID NO: 26153 - DNA, 201 bp, Bos taurus
aatattaatttaaaggtaaatttaaatagtgacttcaacaatatctgtaaatgtgaagagcaaagagcaaactttattccagtctcatctctaatatgtacttacttttgtcttaattgattgatggcagagcaaatcatcccttcttatagatttagaataaaatggtatacgtttattttgctaattcacctgttagat

SEQ ID NO: 26154 - DNA, 201 bp, Bos taurus
atacaaggtgaaataaattttgatcaaattaatccaaaaatattactaaacactaaatttagaaatataattaaggtttataattcactctttctccctcctttccttcctctttgcttcctatttgtatgaatttatcaaacaaagttgacctaagtaagaaagaatgattcaatattaaaatattttaagtgattttgt

SEQ ID NO: 26155 - DNA, 201 bp, Bos taurus
ccataactgaaatgatagagttgtgtaagtgattgttaatcttcaaattatttattgttcaatacatcatggatccacctgggagtccctcaatggccaaatgtatgtaaacaattacccttgagacggaaaaaaagaaaaaagataaccacctcatgagaacagtgaagtggccctctggctggcttatctacataatat

SEQ ID NO: 26156 - DNA, 201 bp, Bos taurus
ttcattattatttaagttcccaaatctctgaaacttatcagacttccttaaattagattgtaatgaagctctcaaagtcacatggaatctctccttttatcgtcctgacttttattcgaaataaagcaacaaaacataaaataaaataaaataaaaacagtttgctttatctttacagtgtagaaaaatattttcttgcct

SEQ ID NO: 26157 - DNA, 201 bp, Bos taurus
ttataatgtatatcaaatgaatgattctgattagataaatacaaaataatcatagttactaatatttgaatctattcacaaaaatagagcaagccctcaacaatagcacgatctaaatgacaaacttttcaacaaaactaggtaggatggtatcctcacaaactccaaaagagatgttggtgggaacaaactttcaacaac

SEQ ID NO: 26158 - DNA, 201 bp, Bos taurus
ttttttatcatttttcattccaatatgctatcatattttttaatttttaatgtttttgtagaatttattatcattatgaatttttagcacattttttttaggacactgttttgtgcactttgcagtccacctgaaatatcacaacattgttaatgagttataatccaatatagaataaaaagcttaaaaaaatagttctgt

SEQ ID NO: 26159 - DNA, 201 bp, Bos taurus
ggatgggtcaaggagcttcagagaagcaccaagatcttaaaccataatgggaagtgcatcttggctggttagtgtggaaccactagaggttccacactattgtctccccaacagagccattaaagcatgttgattaagcaaagcttaatgagacagcaatatgactgtaagggagaactctgctttgacagggtgttttag

SEQ ID NO: 26160 - DNA, 201 bp, Bos taurus
attagaatagagaaaattggctgcaattttatgcagtcatgattctaacatctttaaaggttaactgaatgaaacctacagaagatggtaaattatccagttcaagtcatagggaatggtggtgagggaaaccctattacctcagttcttagggtgcaaagggagaatgcagttaatggaacctaaaggaaaagatagatg

SEQ ID NO: 26161 - DNA, 201 bp, Bos taurus
aggcagattttctaccatctgagccaccagggatcattctagaaaccctacctcaatacctgtcttttaatgtgaatacttcaccttgggggccccaagttcatgcaggagaatatttttctctacaagcttatatatataattttaaattctgaagcatcaaaactaatatattcacactttcttggaatcaaatttttt

SEQ ID NO: 26162 - DNA, 201 bp, Bos taurus
gctgtaacactttgcaaataccaccaaaatgtgatgataatgtcaccatatttatgtgactacatatctacctcccactgtaagtagattttctaagactaactggtatggctaagttccactgtattttctcctaatcatcaccagctgacaaattgggcacacttataatttgttttgctgagctgaactgaagggatc

SEQ ID NO: 26163 - DNA, 201 bp, Bos taurus
attcattttgatatttggcaaaactaatacaattatgtaaagtttaaaaataaaataaaatttaaaaaaaaaagaaagaaaaaaaaattgcagctataacgtaaactacatgtgtgaaaaaattaggcacttttgagcaaaattatgccccgaccagtaatactgaagaagctagggttgaacagttctatgaagacctac

SEQ ID NO: 26164 - DNA, 201 bp, Bos taurus
tttccttccaaatagcaagtgtcttttaattttatgactggattcaccatcctcagtgattttggagtccaagaaaatacaacatgtcattgctttcactttttatttgccatgaagtgaggggaccagatgatcttagttttgtaaatgctgagttttgaatggtatcagctgaatatctggggttgtttatatttctcc

SEQ ID NO: 26165 - DNA, 201 bp, Bos taurus
cttctaggctcccctttgtataattaccaaatcatagagactctttgttaacaaaatgttttcatttatctttcctcattattttaattgctatcacccccattaagataattgtttattcttacatttacaatgataaggttacatataataatgggtttttatacctctttctgctaattctttcttcatatacatccc

SEQ ID NO: 26166 - DNA, 201 bp, Bos taurus
taacttcaggctccaaagtatccttttactttgctttattctatttttgcaaaactgagaaaattgtgattaccaaacatggctaattgtaattaccaaaactgtcatcaaagttttaagatcatacttagcaaactcaggattcttttcaattaaatgggaatggttgaaacagctttattctgaggccagcacaaaagt

SEQ ID NO: 26167 - DNA, 201 bp, Bos taurus
cttacaagatgaagaaggaatgctgcatttgaggagttgtcttgttgatgctgggagaatgttgcttttcatttaaagtgggtattcttgctgatggggaagtttggatgatgcataaagcagacacgcaatgcagggagaggggggagaggatgccaaagggcagagatttttatgtttaaatttttcttggctttctat

SEQ ID NO: 26168 - DNA, 201 bp, Bos taurus
gagtactggagtgggtagcctttcctttttacagggagtatttaaataggcagccacctagtttaggtttagcatgtgggttttggattaattttatggaatatggttcaaatggccgtaaatgttctgtgtctttgtgatattattttggtctgcttagctcatctgaagtccctgggtccccagaattcccaaatagtc

SEQ ID NO: 26169 - DNA, 201 bp, Bos taurus
gttccagttctaactgttgcttcctgacctgcatacaggtttctcagagacaggtctgataactctccttctcagtagcaatgatatcatcatatcctatcgacatgaataaaattaataacatctgttcagatgaattgctttgtgtatagttctcttgaaaaaagtcatagattagtgttctgtgttagtcagctgaac

SEQ ID NO: 26170 - DNA, 201 bp, Bos taurus
aatggtaagactgcactttagaaatattttaaaatagtagctctaatatattgatatttatcagggttttatatgaattctatgctgttccaatttaaattattctttttatttttccccaagtatgacttgacactgcagactgcatatattgtcctataagaattttatccttgtgtaaagaactttattttctccaag

SEQ ID NO: 26171 - DNA, 201 bp, Bos taurus
ttgtggctgtttggatttgatgaagaataagtttactttgcattgattttaagatgtgatattttcaaatttgactaggagctgtgaagaaaatatcttttggggcattttctttcagatttcacagtccactggtagtgaaatgcagttatttaccttgatacatattggaaaccataagagattttatgtttatttcac

SEQ ID NO: 26172 - DNA, 201 bp, Bos taurus
gactgtaattatatcattttgagtttgggtttatgtcatttaaaataaaaagcaggacacaagtggaagcttactcttgtatctctcatgtccttctttgcacttgttagtctgagaaatagtctgtcatgatgtttttaaatacttctaactcacatgtgtagacaactataatgattttgagtgatggaggaactgatc

SEQ ID NO: 26173 - DNA, 201 bp, Bos taurus
tcactcattgccctgaggatgaagctgtattgaatatactagagtggcttattccttggatggaaacttttaggttagaattttcctcttggtaccctccgaatgaggtgatattttaatattaagtgatatttctgatactgaatgagtatccagaaagaacaatacaagtacataatactccataactttcccaggtag

SEQ ID NO: 26174 - DNA, 201 bp, Bos taurus
taagtccccatctcagaaactgcttccagagcatctgacttaacacaaatgcacttagcaaagattgtgattgcaatccactagttcaatacatagacagatgttctaattgtttgcttgggtgattagctgaaatctctacttaactgtggcctcctacatatgaagttgaaagatagaaactacttgctgagaggagaa

SEQ ID NO: 26175 - DNA, 201 bp, Bos taurus
gctggttagacaatactgaattcacactatgataactctatctgacttgcttcttacaagttttgatctctatcatccccagaaatgtcacagtccaacttaaacacaatgcgctctgctgaacttccaaaccattagaatatactgtcacttttaccaaagtatttctgaagattttcacaaaagtactgtctactgaat

SEQ ID NO: 26176 - DNA, 201 bp, Bos taurus
ttaatattccatagaaaatatgggtcaggcgtaagaaaggatatgttatatttatagttcttgccagctatcatcaggaaaatggcaagaatattacatacatagagatatatttatagatagtctgagtctttattttccatgtcatttaatgtttacttctttctagcaaggtctaaatcatatttcagaggaagatac

SEQ ID NO: 26177 - DNA, 201 bp, Bos taurus
gtaagtaaataataaatctgaaaagtttttggaaaacagcaaaaaccaaaggtgatgtagaacctactgaacacatgtatgaagcgagggttaaatagcactctattctaagagtacattcataagttcaatttgttcataggtccccaaaagttagcctaggtatccaactaactcaatcagctacatagtagtgtattg

SEQ ID NO: 26178 - DNA, 201 bp, Bos taurus
ccagtgcttggaagattttacaaaaagaaaattttatttttgtcttggaggatataaattaccacagcacatttagaaaataatttgataaggaacatatccactcttaggctcctaattacattcagaagactcttacagaaataaaagtaaaattcatgtgtgttaattaaagtactactgtaattacaataaaaagga

SEQ ID NO: 26179 - DNA, 201 bp, Bos taurus
tcactcttagacaatagatgcaattcatcaaatgctgtgcttcaaagtttgaaaggtccttaaaagccatctattttaccagcctttgaaatcctgaatcgtatttcttcatgtatatgtgtgtgtgtgtgtgtgtgtgtgtgcaagatatgtatacacatactttttcacacacatgtatatgtatttaaatttgcattt

SEQ ID NO: 26180 - DNA, 201 bp, Bos taurus
ttgagttgcccatttcatttattggtctcaaagttctttatcagtttgaaggatattattcaacagcactgcttcccaatatagcatcactggggtcttttccacagtgttaaatcttgtactgcaagattactccaatgtctataaactatctctaatctaacttaatattctgcatccctttgaaaacacctcaggatt

SEQ ID NO: 26181 - DNA, 201 bp, Bos taurus
tcagcctggtctgaacacctgccccagagaggttctccggaagaagcttgtcatcccatctcttctgtccccttgagccgctccaatgtccagcccacagctgctccctggccagaaggtggtggagaatagcctggggacccccacttctcaacgtgtttcttcgcaatccatgactgagactggacgtcctctgggcaa

SEQ ID NO: 26182 - DNA, 201 bp, Bos taurus
tgtgtatatttaactctaagatgtaatgtcagttttctagtttgacttctccaaaacaaattcccacaaattatgtatgagagagtttcttttgccacacatcttttctgacattctaatctaatgcaactaggattggctttagtatatagatgttaaagttaatttttatccatatagctattcacttggcacagaata

SEQ ID NO: 26183 - DNA, 201 bp, Bos taurus
ctaaatgttcactgactgagagaagtgccctaccaagaggctcagcatttctgtagcagaaggtgtaaagagaatcatcaggaataaagcatatatggggcggaaggaaagtgcaattgtccctgcacaattcaaagatgccaagaagaaacttgcaatcagaagctgtgtaacacaagagagaggagggagattatagtt

SEQ ID NO: 26184 - DNA, 201 bp, Bos taurus
catcatgagtgccccctggctttctggccagctttctggagtatcactggctctgcagaaggctagtgagaaactggggcttgctgccatcccatcaggggacttagacatggatcctttggccctagtcaagttctgagatgactgcagccctgaccaatacagtggctgcaactttgtaagccttcctgagccagaacc

SEQ ID NO: 26185 - DNA, 201 bp, Bos taurus
agggtgggtgaggttgatgaccaggctagaagggtgtagtggtttttcctggtagggcagcaggcaggaactcagtgcaagctggatgggacctgagaaacatccaaatgaggccgaagcagggaagaaggggctggggcatatactggctgcaagagagacttttgtctgaaagcaagaggctttaagcaacggtgggag

SEQ ID NO: 26186 - DNA, 201 bp, Bos taurus
tggtacctatctgttataaatgaatatttcagaattcatatccttctgtctttagatgtatgtttttgttatacatttaatagtcatgaaaaagtcgattgaggggagaactgctgaagaagattaaaggacagagcttttaaagctcccctacaccatgatgatattgtaaacctgaataagccatatgaataggatctt

SEQ ID NO: 26187 - DNA, 201 bp, Bos taurus
ctctggttaccgggatggcacagcccaggccttcagcccagggctgaagtccagagatgcagtggggctcagaggagaggctggagcctcagggatacattagaggcattataggggcccctgaccagcccaagtgtcacttgatacgaagcctctgaggattgcggcaaagaaaatgactaatgtgtgattaagtgataa

SEQ ID NO: 26188 - DNA, 201 bp, Bos taurus
ggagtactgatatctaaaacttcagttatagcatttcctatttctcctttctgttacattagtttatttctttgtgcattttgaatttctctgattaggtgtatacacatttattattttaatgtcttcttgatgaccatgttttttattatagcatgtccctctttatctctaaaaacatttttgtcctgaagtataatt

SEQ ID NO: 26189 - DNA, 201 bp, Bos taurus
gaatgagaaactcaatcttaaatttaattttgctgaaccttcacataaatcaccacctgtggctcatggctaccatattggacagatttctagatgatggaatggtaaatgtgtaagggtttgatcgacaagtttcacctttataacaggttatagttcctaaatgatgaagtaattctgtttcatgagacgaataaagtg

SEQ ID NO: 26190 - DNA, 201 bp, Bos taurus
ccactttcccatgtgacatggcatactctgaggtcctggggcttagaaggtcacatcttggggagactattagtttgcccactacgtagggaatgttagcgggacatttcaggccactgggtggtagtgaacatgtagtgtggcatgtagggagagcagagtggtgggaaggagccggtagcatagagatgctttaaagac

SEQ ID NO: 26191 - DNA, 201 bp, Bos taurus
caggcacaaagattggaggaaagttggccttaaaagcacaaggggagggggaacagagagaggggacctgccctaggaggggccatgatgggctccagggtgagcctcccctcaccaccctactctcctgaggggcagagttactaccacagtgatcaaatatggttccagggccagcacaggaggaacaggcgtaactta

SEQ ID NO: 26192 - DNA, 201 bp, Bos taurus
aaactagcatttgccatggtggattcaggagagcagtgtgccctcctcaatgcgggtgggccgtcatccaacccattgaggacctgaacagaacaaaaggacagaagaaagcaaaatttggcctttcctgcctcattttttgagctgggatgtagccagctgcaactcctggttctcaggtctttagacctggactgacct

SEQ ID NO: 26193 - DNA, 201 bp, Bos taurus
tggagactgaatgaagactatttcctataatcaagaaatgggggacaagaaaaccttttgtgccccaggagccccatgggggtcctgcttggtatcaataggaatcctgatgatctagtattttatcttcctggtgaaaaagtttttatctcaagacattatctgaaaatgtgggtaagacgtctcatgaaaacaaattat

SEQ ID NO: 26194 - DNA, 201 bp, Bos taurus
ggtagaggccagggaagctgctcaatgtcttacaatgtgcatgacagcaccccacagttttaaaaaaataatccagaccagagcatcagctgggctgaacgtgagaaatcctggcctaaataacctaacctcagctgacaactaactttctgctcttctaactttaaatctgaacatatgccaatacattaatactgctga

SEQ ID NO: 26195 - DNA, 201 bp, Bos taurus
aggcccaaagagattaatgaatattttttaaacagtaaacaagatagataaaactcttttaaaaaagatagacagaaaaaggacaggaattatcctgcatctgactcaggcctgaaaatcaaaggagattcaagactgaggcagacttgaccacaaatctcctgttcaaagatatcctagagatcaactttagccccgagc

SEQ ID NO: 26196 - DNA, 201 bp, Bos taurus
tcccagaaggagctcataaatcgcgtcctagaggttcatcccaaggccctctcccctctgagaacctcagatgccctctggaattgtaagtacaaaacgatagctccaaatccctattactggcccaaatctctcctccaagtcaaacacacatctcacctgccagaccatgcccactgccctgcccacccggggtgccca

SEQ ID NO: 26197 - DNA, 201 bp, Bos taurus
ttcgtacaagacttgcgaccttatgcagaaattgttagtgacttgaccttccatagattctctttgggtaatttcctttcatttaatactattttcgttcctaaagataagcaaaaatatcatgtttccaaattttaaaatctagatttattgttccagagagatcatgttttgaaggaaaaataaattcatctattttca

SEQ ID NO: 26198 - DNA, 201 bp, Bos taurus
tcactgaggtgatacacttttgtgtgctctggttgatcaactatttattgcatgcctttttactctggccagtgggcacatgaactattctcagctctgcatgaactctggaattttttctgtctatagcttttcagtgtatttttttccctctccccttggttattttcctctctttctctgttctgtgtatggagatca

SEQ ID NO: 26199 - DNA, 201 bp, Bos taurus
tgaactgcagtgcactgcatattgaatggaattcagtagagtgtaaacataaccattatatgcgctaggaaagcaaagcatcggtgtgactttctttaccacagtgtttgctgccttgtgatggtctgaaaccaaacccacaatatctccaaagatatacctatttttaggaaaaaatttgcaaaaaatatgtataattat

SEQ ID NO: 26200 - DNA, 201 bp, Bos taurus
ggaccgcagcatgccaggcctccctgggatccttaaaagtgaaggtgagaagccgaggaagagtcacagtcagagagatgccctgtgcctcaaccagctgttgctggctctgaaaatggaaggggccaccaactaaggaatgtagacacctctggaaggtggaaaggacaggaatggatgccgctccaaaacctccagaag

SEQ ID NO: 26201 - DNA, 201 bp, Bos taurus
aagcatcctgacagagaagatgggctgagttggctctcagctggaagttcaagaaagtttcatggacagcacttagactgggaggatggataggatgtccgtgtggacaaaagtctgagggtgaaatgaacagaggtaggaatgaacaggggtaggaatgtccaaggaaggggatggaggcagtcagggacaaaaagtatt

SEQ ID NO: 26202 - DNA, 201 bp, Bos taurus
tttagacctctccctgccatgcccgtacctctcccctgaaacctaagaacagtcagaagacaatgatgaagattaccatcgtggcgagaaagaatgtcaacggccaaccctcttctacttgtcacagagtttgattctgccagatacgcagacagggaggatggttggatggattgtcttcagctatggccctcaaatggc

SEQ ID NO: 26203 - DNA, 201 bp, Bos taurus
gagagcgctcctaggagaaacaaatttgaccactaggccatcatcaaattccctcttcaccaccaagtcagtcgtgaagaaagcagacgacaacaacccatgtgttcgctgtggatatcagggccaacaagcacccagttcgacaggctgcgacactgaggtggctaaggtcaacacccagaccaggcctgatggacagaa

SEQ ID NO: 26204 - DNA, 201 bp, Bos taurus
acacaagaaacgctccgtcaacagtctggatgggagcctggggttaacactcagatgattaccccgggccaaaagtgccacgcgaccttggcctttctcgagcagtgcctgtgctcctggctcctgaatgtcactcgagctgtgggggtggttttatgtgacagagagattacaatgtccggctggaccgggccgtagaca

SEQ ID NO: 26205 - DNA, 201 bp, Bos taurus
gtaaactattaagctcagtattgttcagatggccagtagtatgacttacacttctaacaaggaaaattaacctctgggtcctaagagtaaacattccacaagttattcaacaatggaaaatcttttagttgtaccaatggtctgaaactcaaactatctaataccccactggtcgaatcaacttattttttacccctccac

SEQ ID NO: 26206 - DNA, 201 bp, Bos taurus
cacctcatgttttactatcaggatgtggaggtagtggaaacaggtatttaaagttgatgtcgcataacccagaaatgtgttgttagatttacccaaggacagcatgaagcagaggccactgcgaggactttatcctgggggatgggacaggtgaggagtgggggatgaggcccagtgaaacaggtcctgtttgtacctcaa

SEQ ID NO: 26207 - DNA, 201 bp, Bos taurus
gaaattccaagctggcgtttgttctgatagtcttgtgttttaccccttacttacttattctatatttaatttgctggcatcctattattcagacactctcgtcttcaatattttaggtaagagttcctataattatgtaatctgccgactccatgcagccaattttcgttatggaacatgtacccatagattgtaatcagc

SEQ ID NO: 26208 - DNA, 201 bp, Bos taurus
tttgatccctgggttggggatggccttgacacctacaagctatgggatcctgggcatgttacttaaacttcttgggccttagtttcctcatctgtagaaggataataaccatccctatctcatagaatttttttgacattaaatgaggtcacacatgaaagaattttatcaaggcctggtacattacaagtgcaatataat

SEQ ID NO: 26209 - DNA, 201 bp, Bos taurus
ctgaagaccaggacccccatggccatctcctcgcaggggtcctcaggcgtgcacacagagcccagccctgccccacctggaggctccatgacataagctgtcaatttttgagaactggcctcaagaaatagaaacaaaccagccttgaaaccaaagattaactgtacttaaaatgatgctggtcagaccaccagtgaccaa

SEQ ID NO: 26210 - DNA, 201 bp, Bos taurus
tgtcctcactatgctgactcacattctcactgtcaggtcctctcctgccagttctgccactgcagtctgactgtctccttgccttatgcttctgcttattagtgcattctcttgcctcacttcttctatttaccacctttcccatgtatcatccctttatcttttaccccaaccaccattggattcttctgctatgtctca

SEQ ID NO: 26211 - DNA, 201 bp, Bos taurus
tcttagatggcaccactgaaagcaattcagtcagccacttggtgctgtgtccttgtctctaagttagagataaaggcactgtcttcaaacaggttaagagtgatgatgatgaagtgtttcattcttggtaggagtttgagcaatgccgtcttcttttgaaacttcctacttaattccaaactacttcataaaataatagtc

SEQ ID NO: 26212 - DNA, 201 bp, Bos taurus
gctcaaataaaattttccaatttttttcttagatccattggcgttgacattttcctgaatcaagcttcgaatcctgaaagctattcttgtctcatgtacttattgatctagatatgaaacttttaaaaataaagatgacatttattgtgatttccttggagctctcaacacgtctggtaagtaagatggtgctacttctca

SEQ ID NO: 26213 - DNA, 201 bp, Bos taurus
agccactgcattcttgaaacatttatatatgatatattccaaattagtcaatagcctgaaactttgaggtattttgatttttttgtgtcatgattagaaacaagaaataatacagtatgcacatatttccttgccctcaatacactacataacatctttcatgtaatttagttatggttccaaatttaattccatatacat

SEQ ID NO: 26214 - DNA, 201 bp, Bos taurus
acagaaaaaccatgtacaagggtaaaccaatctaagaggttttgatacttcatgcatagtgaaataagatattcaaagaaataaaaaagaaagctttatgtagtatagtttgaagcaatatggaacaggattagaaagctgaatgactcaggacttttatctgtgaatagtgacaatcttttttagattaatcctggatgt

SEQ ID NO: 26215 - DNA, 201 bp, Bos taurus
tttattgtctacattttcttttatgagttatttctataactatagtatatatctgaatcacaaacattcttacgtaaccccagtatcattctggtcaagactgattttaatttgaaactttctcaaataatttatttgtttctacaaatcttcaacaattcctacagacacttcatttaaatcagaccgttttagctatca

SEQ ID NO: 26216 - DNA, 201 bp, Bos taurus
aaattgtttttgaagttaatccatgaaataaaatagaaaagagtgtcatagatataactctaaaagctgagtggagtacagattgctacttctatacttactggttttgtttgctattctatatggtgtttcaagggctttaaaatttttaatcatcaaatttctatagcaactccagtagagaggttagtattctggatc

SEQ ID NO: 26217 - DNA, 201 bp, Bos taurus
tcattttaccttcagttacccctgcggtatccatattgtgctatcagttaaatctcaaataaaatctttcaactttttcaaatctccattttacaagtgacagagttaagagctggagaaggtagcaggcaggagtgattgttcacacattttaacacttgtgttagggttggtacaatattataactgtctggggatctg

SEQ ID NO: 26218 - DNA, 201 bp, Bos taurus
tgccgggtcttcattgctgctcaggcctttctctagctgtggtgagtggggtcttttctctagttggggtgtgtgggtttcccactgcaggtgccccattgttgtggagcaggggcctgagggtgagcaggttttagtagttgcaactcccaggctcagtagttgtggggcctgggggtccaaccactgagtggtatgtgg

SEQ ID NO: 26219 - DNA, 201 bp, Bos taurus
gtgttaaacaatatggataaactctaaaggataacatgcaatttcgttggaactgtaaaataaagtagttttagattcctaaaattgaatatgaaaaacattgcagtagggtgaggaaagaaaatattagaacatctgtttgtgaaatttctcattctgtattttataaaaaaaacaaaatgtgtgaatgcatgttattta

SEQ ID NO: 26220 - DNA, 201 bp, Bos taurus
aaggttgaaaatatcaacataaatcattggtacatatgcattcttttatatatgggatcatatagtttaattttttcaaaagtgaaaatatcaacttaatcacaaacatcataggaatgaaaaaatgttatcattaaaggttgctgttttcacatagaactaggagagagcctcagtgtatggttaatgagttcaaagttt

SEQ ID NO: 26221 - DNA, 201 bp, Bos taurus
gattccctacttagcaagtcttggaggaggcagatggcggcccatatcaacttctctctttgtagttagaatgaagctgctttgggcttctgctaaaatatccagtcagcaggaaggggtccagttctcaacccggttatgctaacacatggctggcacaagccctgttatccgagtgacacagttgacttgaccacatct

SEQ ID NO: 26222 - DNA, 201 bp, Bos taurus
gtgattccaggcaaaacaaatactcatacaatgaaaagaccaactgaatagtcacataacagacagaataagttaaactttatcagttcacttggtactccattcattaattcattcaacaaataaatattgagacaaacactgaatattgagacaaacaagtaatggttggtatcttaaccaagagattgggaccagtca

SEQ ID NO: 26223 - DNA, 201 bp, Bos taurus
gggagaggggttggagattgagttcaatcatcaatggccaatgatgtatttaataaactgtatttaataaattgtacctatgtaactgggcttcccaggtagtgctagtggtaaagaaccctcctgccagtgcaggagacataagagatgcagtttccatccctgggtcaggaagatccctgggaggagggcatggcaacc

SEQ ID NO: 26224 - DNA, 201 bp, Bos taurus
tattcttataaataccctcaacatcttttcaactaaagagtttgaaatcttttgtactttgaaatacaatatacaaagctagatgaagcttttgaatgtcgtttccttcctggtccaaagcaaatgtttgtccttcccaaactactcgagacattaggttttttcttaagatccatttatgaaggtaactatcttgctcag

SEQ ID NO: 26225 - DNA, 201 bp, Bos taurus
tgcttgcactaatagaggcatctgtgtctccccagattatacagacctctccccagtttctcatggagatacatagtgtttcatccaagtacctaacatcagtggtggaggactttgaaaaccccgactgcattttctgatggaatgcaaaatgccagcagttgggtccactggaacaaatctattttatgcgttttgggc

SEQ ID NO: 26226 - DNA, 201 bp, Bos taurus
cccaaattcagcagctgcaaaactgtaacattcttggaagttatttcaaccccaaactgcttgaaatccaaatgcagaaacttaacaaatgtgataaaagtgtaatctgttgagagactttgtgtaaatactgcacattgaaaagatgtaagttcttccacggcacgcttacaaattgaatacagttccatgtaaaaaaca

SEQ ID NO: 26227 - DNA, 201 bp, Bos taurus
agcaacaatatacaggtattatgttattttaggaattaacaatttaaggatccattcactgaaccagagcatttgggctcttttctgagtgtttatcatcagctctcgaaagctctcaacccgggaagggctctttgcgtctgacgtgttgatttttcaagttgcttttccccattcaagctggaagtcctctccttgaga

SEQ ID NO: 26228 - DNA, 201 bp, Bos taurus
cagcattctctgagatctgcagctgggctcaaagcattcaagtctcagcacaatcttctcggtaattgtagcccttgtctggaaaactgccttagtctgtcgccctagacgctccgcctcttgtcataacgctgctttccctgggcatacagagaagccttgccctgcctgctctgtggcaccggggcttgccacacttct

SEQ ID NO: 26229 - DNA, 201 bp, Bos taurus
tctccttcagcgaggagaggtaggcctcggtgtccgactcagggatgtccgagtcgagccccgacagatagcggtagacgtaggagaaggtcccgaaaggaatgcgcgcgggcccgccctcaggatccgtggtcaggatctcgcagaggtgcttcatcgcagtgttcagtgactggagacggcagagagcaggcggggaaa

SEQ ID NO: 26230 - DNA, 201 bp, Bos taurus
ggagatgctgcaggctgccctgggagctcccctcttgccggagcgtatcagcaagtagcaacaacctcagagtctcactgcgggggagaccagggccagcggctccctttggaattgcctctagggtgtgaagcaccttgtcttgcgtcccatcctggggaatctcactgcaggggtagggaggcccggctccttcacccc

SEQ ID NO: 26231 - DNA, 201 bp, Bos taurus
cagtgagaggagggagggggctgccaggggctgccaggtcagcccttggggtccttaggttcctgggaaattcttttaggctgtctgggctcattatgccgtctcctgttagaacgtattttacttctccactcactagccggtgtcccggtaggggcttggtggctggacagagccagcatggcagggtttcctgtggcc

SEQ ID NO: 26232 - DNA, 201 bp, Bos taurus
agtccccattactaaatgcatgataacaaccacatccatgcaaagcatgtcttcagactccccaggtcggtcttctagttggtccctcacttgagcctgactggaattttatctggagtatggtatctcttgtggctcagctggtaaagaaaccgcctacaatgcaggagacctgggttcaatccctgggttgggaagatc

SEQ ID NO: 26233 - DNA, 201 bp, Bos taurus
ccatttccaacctattgcagggcagctcaggcatcataagagagacttaatctctaccgattaagcattaagtgctttctaacatttaaatgttaggctcgttttatgattgtgaaagcagcagtaaagcaagagggagagaagtttactgcatcttaacgtgtgtggcaaattgaatttctatcgacaagaagagcttct

SEQ ID NO: 26234 - DNA, 201 bp, Bos taurus
agatgcagtggtttatttgcaaacatttacatgagggtttttctatttgactgaaagagaaggagggtagttggggccattagtgtatggaggggtgggaaggatggagattaggatggaaattggaacagccaggaagcatctgggtcctactcagccaacattgtgttggtcagagaggaagatgtgggcagagggcag

SEQ ID NO: 26235 - DNA, 201 bp, Bos taurus
gacgaacagttgttctggccgtggcatctgttaactgcacttgggtaccattgctgctggcaatgtgtcggcatccacaattggcagaggaagagcctgctgggccgtagccgccacccatccgtcttcattcagcctccctcctaaaggccaaggttattgatgctctaacaagtgcactgacaggctttatcaaacttc

SEQ ID NO: 26236 - DNA, 201 bp, Bos taurus
gggaatttaggcaaacaatgtagtgttcttatttctgattctcggctctcttacccttttacctttctcaaaagaaaattcatttcattatgcttgacatatatacttaccatgtataaagcagacagctagtgggaaactgctgtatatagtgcagggagctcagcttggtgttctgtgaagacctaggcgggtgggatg

SEQ ID NO: 26237 - DNA, 201 bp, Bos taurus
gcttagaagggatgtgttggcaagctccaagaagtcagtgagagatgcataagggagaaactagatctggcaagatttccctcttctgaaacagatagcacggatggggccaggcacagaccacagtctggagttacataagcaggactgcctgagttagcaaatattttagtgttagtatatcccaagcgttgcatggga

SEQ ID NO: 26238 - DNA, 201 bp, Bos taurus
atgggtgtcattgttattttcctgttttaatcacgaacttcacaaattgagtgtgttctagtaacagctgtattttaagatcaagaccataaaggggctgggaaacacagaatttatttgtcaatttctggctataggcatttgctaagggagaaggggtcttacatatttgcatatgtgtcaaatcaccttgcttttaat

SEQ ID NO: 26239 - DNA, 201 bp, Bos taurus
gtgtggtgattaagtaaaggtttgcaataatttgtcatttctaagtccataattttgatctaatcctgagatcagaaaggcagtgactccatctcaatactctctccttctctaaatgaattccccagaaataagaaagtaagaattatcacattttgtagtcaccatagtaacaggaatggctacagctgattcaggaca

SEQ ID NO: 26240 - DNA, 201 bp, Bos taurus
gaacgttagtgatagccaacaatgtggaaatataggtaagtctttcacatgcactgactcatttctctgcagccgccttatgaaactagagctgccatcctcactagacactgagagtttggttaactacttgtccaggaccacatagatgctgacaggagccacaccctacatctcaaaaaaaataaataaataaaataa

SEQ ID NO: 26241 - DNA, 201 bp, Bos taurus
aatagtgattcttttagcatccattcagtatcaagaaaggacgtacatcctgggaagttagaagtcagttgacacgatggagagacccttggtgtgcctggtcaggtgtgtgtaggtgcaggacgaaagcaatatctccagtcctgtcactgactggctgtaatgaatgggaagtcatctcagtcttctaatccattcagt

SEQ ID NO: 26242 - DNA, 201 bp, Bos taurus
gctcacggaaggaaaatgataaaaagaggtggccagcactgcatcatctctgagattattttgcaatgatcattatgcatatctcatcaatctaacttctcttcctatggggcctttaatacaagtataaatgcaatagatatttaataatgggactcaatacatattcattagtacagaggccgaagagcaaaaattacc

SEQ ID NO: 26243 - DNA, 201 bp, Bos taurus
agtcaacacacatacggtcctgggtagagacaagagtatcacaaatactaaagagacagcaggacttgttgtttgcttgtttggtataaactggaggtgagagacatgctcttcctattgcgaggagatttgtttcccctttttgaaagcagttttccaagtctgagtcctaagtgggctctcatttcctctgagaatcct

SEQ ID NO: 26244 - DNA, 201 bp, Bos taurus
tgttattgtctgttgggttcaacacaccctgaaccctccagataatagagttaaacatctctcaaagctctgggttcacacaaagacagtaactccaaggaaatattttaggctggatggccttgtccactgtctggccactttcctagcattttcctacagaagatgctagagtcacccggacttccaagaatacacatg

SEQ ID NO: 26245 - DNA, 201 bp, Bos taurus
ccaggagagaaggaaggacaggggaagcctggcgagctgcagtccatggggtcgcaaagagtcagttatgacgtagtgactgaacagcaacaatgaacaacgcaaagtcgagtatctgttaactcagatttccgatgttttggtggcagcttctactcccagaatctgtgttttaaaaacactaagtgacattctgcatct

SEQ ID NO: 26246 - DNA, 201 bp, Bos taurus
ggagaaggcatggcaacccactccagtgttcttgcctggagaatcccatggacagaggagcctgcaggctacatggccttggggtcgcaagactcggacaagactcagcaacccaagcagcactaaaccactgcccagggcctacctgccttcttggcacacctcgctgcagcggcggctgtggatgccctacgctgatgg

SEQ ID NO: 26247 - DNA, 201 bp, Bos taurus
atctggttaatggaagaggtcacggagtaacacagtagtaaccagggcagcagaagtcaccgagcactgagcagtcagctctcagcctgcggacctcggaccctaagcccagggcctgctggatgagaggaagcccatgtcctgccttacccagggacccctccagcttccatgtggttggccagggtgacgtcatgtgac

SEQ ID NO: 26248 - DNA, 201 bp, Bos taurus
ctaagtagaaaaaccacagaacaggctcacttttagtgaattttgctctgagcattcaacctttgggaaatttccataataagtatataacagtgaaatatacaaaataaccatcaccaatgaaaaaaataccctcacctttttcccccattttcacctatattttaacacagcaaaattttaattagtatcattctttca

SEQ ID NO: 26249 - DNA, 201 bp, Bos taurus
gattttacttttggaagcagagacagaggccagcctctgaggaaggcagtgctgtccagatgagaaggtgtctcaccagtggagtccagtacctggcccaactggctgctggacccctctatgaaagtgttagtcactcactcgtgtctgactctttgccaccccatagactgtagcccaccaggatcctctgtccatggg

SEQ ID NO: 26250 - DNA, 201 bp, Bos taurus
ttgtaggaagagggcatgtgtccagtactcggagcagccatgacacatgtgcattgctaagtcgctccgtcatggccgattgtttgtgacctatggattatagcccgccaggctcctctatccatgggattctcgcatatctaactgatacacaggccatttcttgtgttgtcctgccccaaaccatgccttttccacctc

SEQ ID NO: 26251 - DNA, 201 bp, Bos taurus
gaggagccaggcaactggctggaagacttggaagaacagcagagccgatgtggtcaaatccgagctcacgttccacacattcagcacgtgaaagcatcagaagacaggccactccaaccccccagacgccaccacagagtggaaaggacagtcgtgcgagacacagccacacaccgccacccctcagcctcccgaggcctg

SEQ ID NO: 26252 - DNA, 201 bp, Bos taurus
gtgggattcccatgactattaatcacaccatagctcctcgcccagcaaagactcagcaggggctgcatcagctgtcctgtctgtctctgtctccagggcccatgctcaccctccttttatcctcgctgtcctgtcggtgtctcgtggctcatttgtgtgtcttgatccagtttaggcgtgtgaaagcagtcccgtctgtct

SEQ ID NO: 26253 - DNA, 201 bp, Bos taurus
aatcacgtcctgcaagggaggaaggttggggtgtcctgaggacctgtcctgcttgggagagaggtcacagttccatcaactctaaggccgattcggcaaatgcgtggtgtagtcaggtcccctgggaaacagagcctggggggagattttcactcagggaagtttggacccaaggcccaaggaaggaagcagggctggact

SEQ ID NO: 26254 - DNA, 201 bp, Bos taurus
gagaacccttgtttgggctgctactggactgccatggtgattggacatccaagggaaggctcagaagcagcagttcaacagctaaggtattgggtttccaggtaaacgaatactagaggagttacttatctattcattcattcaataaacagtttttagcatcttcactgtgctcatcactgaagaacaagaaaattaacg

SEQ ID NO: 26255 - DNA, 201 bp, Bos taurus
cctggggcaaaattctacaaggaaagttttggagtcgttcttcttggagaagaagcactggaaagagtacctgattgatgcctatgacagggccatttccggtgacaattctaaatgcaaaacgtgatacagcaaatggcaacaaaaacagggctggataaggagaaaccgagagtcttctcttcgtgcacagaagcaaga

SEQ ID NO: 26256 - DNA, 201 bp, Bos taurus
aagcgagactggatgccagctaattaattggctggagtgggggccatccaggaccctaccttatcgggtcagttacactctatagccatccgtgcaaagattgcatctcacccaaggccagtttattgccaatgacttcagtttcagcaaagcaaaagaatgcacaaaaaaaccaacccaaattaaccacaccctcatgag

SEQ ID NO: 26257 - DNA, 201 bp, Bos taurus
tctttaccatctaagccaccagggaatccccaaagcccattcaagtgtcttctaatttttccttcatcttaaggatgtggctgtgtgccaggccttgttacataaactcaatctgaagagcaaccctaagaagtaggtactacccagacccccattttgcaggtgagaaaactgaaacaaatgggaattaagtaactggcc

SEQ ID NO: 26258 - DNA, 201 bp, Bos taurus
tggggtacaaattaattgcacggttcctcattttaaccccttgggacccagcccaaggtccttcctcaggcatttattgctgatatggaggagaaaggccagtgtgttgccatggaaaccattatgggaagaacagacaacacttctatctgagccagagaaaatgcatccaggcataaacactggtgggagttggaagtc

SEQ ID NO: 26259 - DNA, 201 bp, Bos taurus
gtggctctgggggattacaccaagacggggaggtcacaggaggattctgggtaatgagtgttttactctttccaatcaggcattgttggtaagaagggaaagtgtacacacaccaggagggcagagtctatgtgtcatcagccctttgcctccactctcactgagcagcagttctttctgcctcctggctccacttccatc

SEQ ID NO: 26260 - DNA, 201 bp, Bos taurus
ttcccctccttccatcactgaacacaattcagctggctactaatgtgaaagcatgttgactgaaggctgaacacaagcctgggttttgcttggagggtgcagagcacacagggtaggactcagaaaacccagcgtgcttgttgggaaaggtcttcacctccattatgcacgcacatgacaaacaaatctctggtctctgca

SEQ ID NO: 26261 - DNA, 201 bp, Bos taurus
agtctggggcaggcccaagggctcagaggggatgtttctccttaaggataaaacgacagaagacccggtagaacaaaggcattaagctgttctgactgacagacagctgcaagggaacacggtgtcattgcgcactgagatggattactttttaaaataacctcttcccacccacccccaattctctttcaagttctttgc

SEQ ID NO: 26262 - DNA, 201 bp, Bos taurus
tccggcccgagctggagtgctgctttcaggacgcagcctgttctgtctctttccttcttcagcgggagtcgtgtactcaacacttccgagcgtgtgcaggagtgaatgagaggccagcaatggaagagatgcagggcggcggtctggtaggtaggcagttgggtggttccccgccccttcctgcctctgcgttgctgctga

SEQ ID NO: 26263 - DNA, 201 bp, Bos taurus
agcttaactagggaatcagggaaagagacacgcaagaggggccagttaaaaccacagctctccgtggtggtaagaaacagtcatcctgtatctgtagatgcatattctgtggagcaacatcaggagctaaaggctgagagaggaaggtataactgaattagtccagccatcctctagacaaataacaggaagaaaacaaac

SEQ ID NO: 26264 - DNA, 201 bp, Bos taurus
acatgggtgctgcacacagaaaacagtactctcacagggtgctgtacacagagcacagtaccccttcagagtgctgcacacaaagcacagtgctcccacatgggtgctggacatggaaaacagtactcctacagtattctcacagggtgctacacacagaacacagtccctctgcagagtgctccacacagaacacagtac

SEQ ID NO: 26265 - DNA, 201 bp, Bos taurus
tgtggcttatatcctttggtttgccacatttttcagattcaacagttttattttttctttcctttttctagatacattttggcaaactttgcttaacttttaaaaaaaatgatcagggttgagttttattaattcttggattttttgctttaatttttgctctgtattttcttttctttatgtttacatgtaaattgggtt

SEQ ID NO: 26266 - DNA, 201 bp, Bos taurus
tatttaaacctctgcccatggaaatgggcatataatgttttcccccaggggaatttgtcttaggaggagattactatggtgaattaattttagctgctgtcctgtctggctcctaatttcagataatatgctcttttgatttatttaataggaccttaaaatgcaacaccccagagtttaagagaatatgatgataaattg

SEQ ID NO: 26267 - DNA, 201 bp, Bos taurus
tgaacataaaacatataataaacataatgaatgaaagcccaaataaaacagattagtgatgtaaaggatatgaggaagtaaataaagctgcagcctggcccttgccttgttgtttatttctgacatgcggattcaagcgttatgagaacacagagacggcagccttctctcaaagctggtgatgggctggccccttacagc

SEQ ID NO: 26268 - DNA, 201 bp, Bos taurus
tttcctttagcagacatcatcctgaaacagtgaagacagtgctttcttattggttgaggtttgccctttctctgccagggttcttgctggggtgggccctcttttttctttttggtccaaagtgtagtttgctccatatactttaaagaatgaattaaaattatcttctctttggcctacttgtgggccatgaatattatt

SEQ ID NO: 26269 - DNA, 201 bp, Bos taurus
gtctgatatgtcatttcatgacttttgtaggattatatcgtgaagccaactaggtgatcctgtcaataacctggccaactagaatgtgaattagaatatgttatgaggggaaactgtcaaacaaaccatcactccaaaggttcatatttagccctgtggccatagggtttatggggttcctataggaacatcccaggatcc

SEQ ID NO: 26270 - DNA, 201 bp, Bos taurus
gccacatccctgagaactctgcctgggggttatcttcttatggggagaaaagccagggtacaaaacacgtattactgcacagaacaccacgatggcctgggcttctctgtgtggattcagagtcaatatgagtccatcaggctgccactgaaagcagcaggtttgatgaataaggaccaactctggcactggcctacaggc

SEQ ID NO: 26271 - DNA, 201 bp, Bos taurus
gggcagcgacactcacacctctgtgcccggggcctcaaggtcacctccctcctccacgagcacctcctccaccggcagctggccccaggaggttaacacccacttccgtccatgctggtcacagaagagtgttgacatggcagcacccacttccctgggagaagcttggagccttccaaaaagtgtggcccagactgtacc

SEQ ID NO: 26272 - DNA, 201 bp, Bos taurus
tgctgtatctctgagaactccccaaagacccccctcccaggccccaggggcaggggacagccctcatgccaccaattaatgctctcttgatggactaagatgctaaaggcaagtagcaaattgcatttaatgttctcgccaccagcagaaagagggcctaccaccgcaggcttgtggaaagttaccatagaacgtgccgtg

SEQ ID NO: 26273 - DNA, 201 bp, Bos taurus
ggaaagcagcggtggggtgttaattgcgtataattactcgggatgccgaagtattttacaattgagataatttgcctgaaagtgttggtatttagcaaagagaatttatggtaattccctgattttcccccaactgcctggtaatctttgaaacgaggaagtagcagcacagtgagaattctgaactgaaacaaagccata

SEQ ID NO: 26274 - DNA, 201 bp, Bos taurus
gggccctatcccagtgacgggtgtcattacaaagagacaacagacatggatggaaggagaagggagcagaggaggatggacgctctacaagccaagggattcgagggaagctggaggaggggccccccacacaccgtgcctcagagagcgtggccctgccaatgtctgggattttcatggttctggctccagaaccatgga

SEQ ID NO: 26275 - DNA, 201 bp, Bos taurus
tgaacctgaggatgtggagagctcagaaaacagtaagagcgggtttcccctcccccacggaagtcacctcgggggccccgccctggcctgggagactgctatctttgtattcttccctgaagcccacagctctccacatatgtttaatgactttctgtggccaaaatcacagcagcagcatgaacgtctctatttcttcat

SEQ ID NO: 26276 - DNA, 201 bp, Bos taurus
ctttaccagctgagccaccagagaagcccccctttcaccatttgatgcctcaaattactttaatcctctgagataggtgaactcttgttcccatttcctggaaatgaatactcaagcaagaggctcacccacgttaccaaccaggctgatggacacccagctgcccacggcctgccaggtctccacaagtgtgcaggtgca

SEQ ID NO: 26277 - DNA, 201 bp, Bos taurus
gcccccacacgagccacacgagcgtctgcgaccacggcgaagtgagaaagggcaccaggggagtgcccagggtgctggccttccgccaaggcagaccacacgggcaagttcagggagatttctacagtgacaactttcccttctcaatgtccaagggctttgggtcgttgctttcctgaacttcagagcggcctggccaga

SEQ ID NO: 26278 - DNA, 201 bp, Bos taurus
aatgttcttttaaaataatggctctgcttgacaaagagcaaccatgtcaataccacgtggactgctgtgtaatcttttaaacgtgatgcactaggcgttccggagcttcttccgatggagactgtcgttcaaagtgtttgatagttgatggaggaacagaaggtcgagggagtgagttttagcgtctgcggatgtttcggt

SEQ ID NO: 26279 - DNA, 201 bp, Bos taurus
gggcagcccagcataaagcacagatggacaaatgaccgcaggctgctggccatgcacgcaggcgtccgggtggtttacactcacagtcgtccttccggccagcggcagagccaaaggcgccgcctttgccgtgggaacttggggtccagcgagctgcctggctagcggtccagttactgctcagatgctctgagcctgcca

SEQ ID NO: 26280 - DNA, 201 bp, Bos taurus
ccaaatgatctatttttaatttaactcttttggctccgataacagttaccgaactcgaggttctgctgttcctgatttaatgcgtttggatgatccttcaaagcatgctggcctgacaagctctgccaagcattccaaggagaggcccccttttggggttcgcttagtttgggctgcagtgtccacaggcctggcccaggt

SEQ ID NO: 26281 - DNA, 201 bp, Bos taurus
gtcacagctcaggggcttggacccacagcctcagctgctccatgcactggccgagcgagggcagtctcagaactcggggccactgtcttttctcctgtaatgtgtgggagaccatggtgtctccccaaagggtggggtggaggtggctcagagggccccagttctggcacccaggacatttttcagttgctcagtcgtgtc

SEQ ID NO: 26282 - DNA, 201 bp, Bos taurus
cgacagtgcagcctctgagcccgccaccacgtcagctcaagggccactcggctgcttctcacagtgaccccgagaggaaggctccgtttgaaggatcccacgccgcagatgaggacatggaggctcagtgggtccgagagtcacacgggactcagggccaggatgcagtggccccaggtccagactcagccaccagccaag

SEQ ID NO: 26283 - DNA, 201 bp, Bos taurus
cccttgctcttctttcagcttgatcggcatcgtgtccgccgcagcagtttgcacttggagagagtagagtgctgctcatgcttgcctggccaggggcccttccagcagctccctgaggagatcagggggcttgcagacccctgactctgccaggaccccagcatgagcactgaccctccgcaagtacagaccagggagggc

SEQ ID NO: 26284 - DNA, 201 bp, Bos taurus
agcagagaaggctagcgggacagccacgccggccacaaacgcggcattcagcagcgcagggtcccgccgccgattataattaccgccgacaacagtcaacgtcagggctgcctctacttattggccgcaatcaatgatcatctgtgggcgacacattgaaaattcatcttacaaaccagcaccctgattgggttatttgct

SEQ ID NO: 26285 - DNA, 201 bp, Bos taurus
ggaaatggccggcgtctccataaatgagtgacttgatgagattcatcgtgaagattctgcttctaaaagggacgcatttgtgaaaattgctggaaacaacccaggcctgagagaatctagttgaagcctttaaaggcatgggtgcccgtggaccccctccccctggtgccagccccgcgaggtgaaggtccagagggaatg

SEQ ID NO: 26286 - DNA, 201 bp, Bos taurus
caatctcactcttttattttatagcatttacaaagtagttaacctctctctgtttacattttctcactttataaaacaagaaccttttataaaataagacacatgggccaccccacatcccaaggtcactgtggtctggggctctctcataaaacactgtgaaaagaggaaaacaccgaatactgtagagtattgatgctt

SEQ ID NO: 26287 - DNA, 201 bp, Bos taurus
ctcgtgtcttcgctgggacccgccgggcgggaaccggagcagccgccagctttgtggcggaggtgagtctgtgtctgcggaggctccggggtagtgggggggtgtcccagggccgtttctccgtggctcagttctcttccctgtcccaggcacaagccaccttccccctctgcacccctgccgcccctgctgctgtcctac

SEQ ID NO: 26288 - DNA, 201 bp, Bos taurus
gcccggcgtcattttcaccgcaagccctctggtggccccctcacccagacctgcctgtgacctgccacccctgcctggcctcttccccactctctcctcaccttctcactccagcttcctccacgcgcgatccgtgtttctgtcaagtcttggctggaggccgcctcacccacaaaaccaccacctgggtcatcagacccc

SEQ ID NO: 26289 - DNA, 201 bp, Bos taurus
cactcttcagtgatatcatagcagtagcaatttcacttacactctcttatttgcagtattataataagtaaaatcaacatgataatagttatcttactaaattgatcttaatagttctagcttacatttctcaaatcctgcagcattctggattcatactgttacacctgggggttacctcccatttcttggtcagttctg

SEQ ID NO: 26290 - DNA, 201 bp, Bos taurus
tggtatgaaggccacatccacacatagtttcagtggaggtcacaggagggtcagtaacaagatgtccctctccttcccagctagggacgtatgagtagaaacctgctggcctctggtactcccacaaatagcctacagtaaggggtagtcatttccttaggcatcagtggaggccaggtaataaatctggatttttctcca

SEQ ID NO: 26291 - DNA, 201 bp, Bos taurus
gtcatactgcctgcccccggcccctgcaaaactgggaagagcaaaaagctacctccaaacacaaagacagtccttgtggagtcctcaccacatagtgtcacttttccccagaagtgggctgagttttcttggatggttcaggagactgactgtgctcatctcagcccaaacccatcttcagggacctcctgttgtagcttg

SEQ ID NO: 26292 - DNA, 201 bp, Bos taurus
aggccaccaaatccagaaggcaggtgtggttgcggggtctctgggtatgtccctccctcttgaaagtcctgtttgtcctccttcaggataacttgtcctctgagaggggccgaagttcaggctcccagagccacaagtcccgtcccccacctgagaacagtcccggcaggaccgtggcctctgcagattggacactgttgc

SEQ ID NO: 26293 - DNA, 201 bp, Bos taurus
acagcggattctgcctccaagtggctctgcagccaacaggcatactcttccttactcagaacctgggtgagacccgctgatgagtgcatgggccgtgccctgctgctggctctgcccctccgtggagctgcctactcaccctcttggcaatgcacaaggtgcgcaggccctccaccgcatacaagttgaggtaattctggg

SEQ ID NO: 26294 - DNA, 201 bp, Bos taurus
gcttggtagcaaaagggctgcctcggtctctggagggggaaagtccctgcagagggcggcagggtcccgcaggctcaggctgactctgggaagatgcacatgacaacatgagcccagcacactgccctcagcagctcttttttatgggctgacgtgtgttctcccccagaattcgtttgttcatgtcctaaccccagtatc

SEQ ID NO: 26295 - DNA, 201 bp, Bos taurus
attagcttctcagtctttcttcctcctcaggaccctttgtcggcttcccacagaagccacagaggcatctcaagggcctgtgtcctttcctggagaaagtgtccagaagttatgtccctgtgcagtccctgaggcaacagtacactctcagagagctgtgcggcccagagtgacagcggctgctgggagactgggtccctg

SEQ ID NO: 26296 - DNA, 201 bp, Bos taurus
ccatccatgtctgcatcagacagacgcccctaccctggctgggaggtgagctttcaggaggtaacagaaggcaggcaaaggaaaagcgctcaggagtttcaaagaagggccacctcgtgtgtgagaccaggaaaacacccattacttgtctcttcacacggtggaatcgtcacatatttcaggaagaatcgccccaaatgc

SEQ ID NO: 26297 - DNA, 201 bp, Bos taurus
ccactccatgtccaccaaagcaatgacatgacacaggacagatcccagctgtgcaccgcatcggatcactgtccctgtgggtaccaaagaccctgaacaaactccggcctgacggtggggaggacggggaggctcagacatacaatgactcacagcccaggactgaaaacagccatcccagacttttgggcctgaaggagt

SEQ ID NO: 26298 - DNA, 201 bp, Bos taurus
cagtctgccatagcaaagtgccacagactgggtggctcaagcagcagacatttctgatttttatggaggtctgatttggcaggagggctcctctgaggcccctctccctcctcgtagattgctgtcttcctgtgtcctcacgtggtttctccgtgccttgtctgtgtcctgatctcttctgtggctgccagtcagatcaca

SEQ ID NO: 26299 - DNA, 201 bp, Bos taurus
attcatcatctccaaaaacactgcagtattcaagattagtgcaaaaggggcaataaactgttgctggatttaattaaaaacaacaaatcatttggtcagtggtaatggatgctacaaacaacccatcaggtgcatggctatttaaggagccaatattttaatctcaaaacatccaattagatgagatcatgaagctgatga

SEQ ID NO: 26300 - DNA, 201 bp, Bos taurus
tacacaaaggtagactgattattttatgtaggttgggttttacagggaagttttgctaatacagctcaggcagattggcccatgggcacagaagatcgtcctgcagcagccttcagcaagctccatccagaacacatcctttcaggcaggtgcctcagaggggcctgggattgtacgtgagaactgtccgcaagtcccagg

SEQ ID NO: 26301 - DNA, 201 bp, Bos taurus
tgatgaggctgtgggctggaaggaaccaaaagtgactgtgtttgttgtcaggttgctctcctttgcctcaagagaacggtcatgggtccctgggtgatgcatggtgtggactggtcgtgttcctgcagcatcctagttgcactaggagtagttggatgtgcttgtgaaacatgtcagatacagaaataaaagcatgaggat

SEQ ID NO: 26302 - DNA, 201 bp, Bos taurus
taagtgcaggccccctcccctgcacacacagtccagcctctctagccttccggctgtggttcagaccagcatgctgtgtgcagagcttacacgccctctgggggtacatccaaatcttcaagtggcccactcttccatacatttgcatcttgactttaataacacgtgtgtagtcaggtcaccagaaaattgggagaatcc

SEQ ID NO: 26303 - DNA, 201 bp, Bos taurus
cagcagggaccatgaaggcagagactggggatgcttctgcaggccagagagcaccagccagccagcaaccatgcggagccgggggcagggcctggaacacgttctccctaatagtccccggaaggaaccaaccctcctgacaccttattcttggacttccggcctctggaactatgagacaagagagataatacactactg

SEQ ID NO: 26304 - DNA, 201 bp, Bos taurus
aactgaagaaaaagcagaagtggacggaattcccaggggcataaaccccacggaaagctgtgctctcagggctccaggagctgtcggcatactgggactcatacacttctgtccacggatgttctcccacaactctggacatggggaaggctctctccatctgcagactgtcctagtattcaggaactgcctccttcctgg

SEQ ID NO: 26305 - DNA, 201 bp, Bos taurus
ctcggccattccagcgttttcaagtgtcaggatacaggtaatgttccacactactgaacagaaaccgtaagtttatgttggttctaattagggtcagacactcccaggccttgcaacttggaaaacatatttctagtgaagtaaaagaacatttgttttaaagtgatcacagcatgtggagaaatatctaccatcaaaatt

SEQ ID NO: 26306 - DNA, 201 bp, Bos taurus
cacatatccagaaaaagtctgttaattcataaagatacaagtatacctatgttcacagcagcactattcacagtagccaagatatggaagcaacctaagcgttcacagacagataaagatgtggtatgtatgtgcaatggaatactactcggccatgaaaaagagtgaaataatgccatctgaagcaacatggagtgacct

SEQ ID NO: 26307 - DNA, 201 bp, Bos taurus
ctcatcccccggctggaaaatggacagttgtacaggcatctggaggtcattctcctcctcctcccctactctctgttttcctggtgtgagactgagcttgcggaaggacgctacagaggctgtcagtgccagagtcagagcagcgtgtgagcttgtgtgggtgtgtgggaggcggtgaggggatgagccttagtcttccag

SEQ ID NO: 26308 - DNA, 201 bp, Bos taurus
atgtggcggtgctatagcagctagctcagggagcattctggagcccagaagcagaacctccacagtgtctctccagcatccccgatgacaaaacttactgtcagttggccaaggaatcatttatagggcccagctccactttcatggatcaggcaatggagaaattcagaactgagaggcaatacattgataattggcaca

SEQ ID NO: 26309 - DNA, 201 bp, Bos taurus
ttatgtgtggaagttttcagtatatgtgcaggtgtggcactgaaatccttcttacttgatttccttgttaccttattttcacaagatcctggagcatgcaagtacagttttctgctcttcccttccattttctgagatgtcattctgcctcgacatgcctgcttttgtcagctgctactaaccaatagccactatgtaagg

SEQ ID NO: 26310 - DNA, 201 bp, Bos taurus
taaaagtttttgaaaatcattcaaggttgaaaatttattggtatgaatctgtgttagttggggagtaatacattgtctattaacaacaaatcctgagtaatggtaaggtgtagaggtttgaatctttttaggggcaatgattaatccagagtcttttaagtattgttgagctatgtcaaacatttgttgagtttctaaaac

SEQ ID NO: 26311 - DNA, 201 bp, Bos taurus
taaaagtaagactcccaaaagtagagtataaaaagaaacaaagtatttttttttaatctggagtttatttaaaaaataagtttttttttgaaaggtaaaacatggtgtaaaaaataaaaggtaaaggggtaataaagaaccatgttaaggcaccatgaaggaaaaaagaaaaagaagagagtaaagaaagaaaaaaaaaag

SEQ ID NO: 26312 - DNA, 201 bp, Bos taurus
ccactggagtggctgatggcttgttccttgtagaactggaaattttggcaaaaacctctgtttattggaatagcgggcaacagtccctgttcgtactttcataactgcttccaaactggccatttatcctctgaggtaattcatttcttgtgttaacttaccaagcatagtcaatagcagttatggcttgtatttttcacc

SEQ ID NO: 26313 - DNA, 201 bp, Bos taurus
tttgtcacttactttttcctaatttgctgtttttatttccttatatgtggtaggttagtcatattttctgacctttgagtagtggccttttatgggagaggtcccctctggacacctgaagtatgtgatctaggggttattatatatgttggctgtgtgcatccttttgttttattgtgctgactactgtgggtagattgg

SEQ ID NO: 26314 - DNA, 201 bp, Bos taurus
gcaagtgtttagctggttgaaagctgcagagcatgtgctgtttgtcaccttaaaaactagggcctgatggcaaaagcagtattttcttcctgtgaaagctgggtatgtgaagtttcaaagctgcctgaaaaaccctgtttgcatgttttctattcactgcagcaatatcactctatgacaagtgagaaagaaacatactgc

SEQ ID NO: 26315 - DNA, 201 bp, Bos taurus
ccccaggagagtgtaggacagaggttccccagtcccgttgtgtgattattcagccaaggagaagcactgtcttgctctgcagtgggtgtggtgaaatctttctcacaggtgtgttgctgtaagtacctgcaagcacccagtaatggccactcttactgcttggtttttgtaaatcagattttcagaagtgtgctcccagac

SEQ ID NO: 26316 - DNA, 201 bp, Bos taurus
tgttcctaaaaggaatgataagggtctatgatgagggctttatcccatggccttttgtaacctgaaccacttccttaaaggccccatctgcttcagttcagttcaattcagtcactcagttgtgtccgactctttgtgaccccatgaatcgcagcacgccaggcctccctgtccatcaccaactcctggagttcactcaga

SEQ ID NO: 26317 - DNA, 201 bp, Bos taurus
gtgacaggccatctcaggccaaagaaggagcatctaggggcaacggtgggctgtgctgtaacattctcccactgcctcacaatcaccccacatggaaggcatttgcctgagtccccctgaggggccttttccacccatcggtcacccaccaggctgtggccagccctgggtcactgagcagtatccacctggtactgcttg

SEQ ID NO: 26318 - DNA, 201 bp, Bos taurus
accagctacaatcagggagcacgcctgcaggaagcagacgctgcaggcagagggtgtgggggcagccaggctcacagggtgagggccccccactggggccacggggcaggagcccacctggaacagatgatttcatctgatgactgcacgctgggcagctcccccaggtggttgtctgagaggttcagcttccggaggttg

SEQ ID NO: 26319 - DNA, 201 bp, Bos taurus
atgaggacatggtgacaaggtggcgtctacaaccaggaggtgggtccttgctgagaacagaacctgccagcacctcatcctggacttcctggcccgtggagtgagaaagaaatgtctgctgtttaaggcacccagcctttggcaacttgatagcagcctgagccacctaaagtagtagtagcgttagccactcagcagtgt

SEQ ID NO: 26320 - DNA, 201 bp, Bos taurus
gagcacaccgagcttgattctggccaaccctcatccctgtgcccactccccccagttggctccttaggctccgtggatgcctttcccccagcagggctgaggaacggccagctagatttcacccccagctccgtctgaaattcctaccactgtacaccaaacagaacaccccaggtcccaggggcccgtgaggctggctga

SEQ ID NO: 26321 - DNA, 201 bp, Bos taurus
cccctgcaccacccctgcctctaggaggccccacccagcccggcttcctgccgccttgtgtgcctggaggggggcgcgagggccgggaggcctcttctttcggtctcggttctcgcattcccagagtgagtggctttcatgtcacctaggcttgtggggaggaagcaggtgtgacccagggagagatctgagcccatgatc

SEQ ID NO: 26322 - DNA, 201 bp, Bos taurus
ttttttggttctttttttttcatattctgctatactatatgttaataacatcagaaaaacagtatttgtggaaagagtcaggtgggaacattggaaaataccacaccttgaaaaaaagagtacaaaaatagaaggcaggacctccagcctctagctggcatctgcagtccttggttcctgggacttacactcaagaagaag

SEQ ID NO: 26323 - DNA, 201 bp, Bos taurus
ggggaaaccaaattagaaaattattgcagacaattcagtgagacaaatactatatatagcctgagggagcacttggccaaggcccttaatcctgacttggatatgtggtaggctccccaagactggaggtttcctccttgaaggttgagagtgggaggggaaaggctgagtatgattttagggagaatgggccaagaaaag

SEQ ID NO: 26324 - DNA, 201 bp, Bos taurus
acttaactagtttatatgcactgagaagccaaaaagtccgtgtgattccccttactgtgatacttgatttactgtgataatttggaactgagtccagagtgtctccaaggtctgcctgtgagggatttgtatactgagagtgtaactgtattctgctggtgagtctgtcattaaggcagtctaaaatgttatccttaaaac

SEQ ID NO: 26325 - DNA, 201 bp, Bos taurus
aattaataaagacaagaggtgggctatgagtttgatatgatatttagtgagcttctcagagtgttcaagagtgagtgagtcatgggtagggtcccagaataagattcattgttacaaatgcttaggacttttttttaagcagtaacttgtctggttttaaaaacagggatctttccatctcattttgtttccatctaagga

SEQ ID NO: 26326 - DNA, 201 bp, Bos taurus
cgacctttggaagactgttatctagtaaggcctccctttactgcttccctgctcaaaggcatccctggctcaccagcccctctgttcctctcttgcacactgcccaggcctgcctgtgagcccccaactctccaagccaggagtcagcgtgcaggcactttctttaccatctgagctaccagggctcctaaagtgaaagtg

SEQ ID NO: 26327 - DNA, 201 bp, Bos taurus
agttgggttgcaatggtgccttggttccctgcaagactataaaataggcttcatggttgcctaaattctctagtcaggcttactagacagttgatagaggggcctatgaattagcttacttatttggagagtagctccaaataaccttgcaggtgttcctggccaggctttctgcaggaaggggccaggagctgtactcag

SEQ ID NO: 26328 - DNA, 201 bp, Bos taurus
ctacaggtcttcctcctgccaggcctttagtgcagagtctgagttaatttaattaagaactaggctgagtttgtgtttcgttgctggtattgttaccctcgatatagttaccacaggcctcaaatgcctctggaggcagtgggagacaggtttgctagaggtttttttgcttgttttttccccaaagaaaactgctacatt

SEQ ID NO: 26329 - DNA, 201 bp, Bos taurus
tttccatgtcttcctctatattggttgctatagggcacatatcattttcataggtaatataggaagttattcttttatatataaaaaaagtttattctttctcactgtccttccattttaaaatgggcattccccaagttctgagcatttgacacacaatcatcctacaaatacaaaccacagtgcgatacagagcaactt

SEQ ID NO: 26330 - DNA, 201 bp, Bos taurus
cccgcatcctttattctctaccatatctcttacgagcagtcaggccgtgtttgttcacacgttttaaaatacctggctcccgcacaacactggaaacccccctccgccgctccaaccccgaggtggacgcagggttggcgtctggcgagtgctcagcaaacacccgcgagaatgtgtagctgcggccggaagacgcaggtc

SEQ ID NO: 26331 - DNA, 201 bp, Bos taurus
ctccgctcctgtggactcgcccatcaccccagcgcgcaggccggtcagcaaaaccgcaggcggtaacaggtgctgtgtgccttggccaggtctcttggaccgtgggtcttcaacatgggcagcagcgcccccaactgggagaaatctgatacaggacgaggggtggtggcaagtgatggttaattttgtttcaactcgatt

SEQ ID NO: 26332 - DNA, 201 bp, Bos taurus
gtgctgctctagcatcacctgcaccatgagaggagaagcttgtgcatctcttagtttgtagaaagggctatttccagacatgtttgtcttctccttttggattccttatcttgtcgtcttcaagtcacaaggtctgctgatcaaatacactcccatgttttacaagaacttactttctgattgttctgttttactttaaat

SEQ ID NO: 26333 - DNA, 201 bp, Bos taurus
tggctcagtttgacctttgaccttccacgaggccaggacgctgactctccaaggcatgtcctgggctagagtcagccttaggcagcactgggattcaggcattggccaatggtccttcagggtgctgggaggcttatggacctcctgttgtaaacttggattagcctttcccaagagcaactgagattgcactccaccagc

SEQ ID NO: 26334 - DNA, 201 bp, Bos taurus
aaaacccataatcgaagcctgaggagaaggacattcccctaaattgacatttagataaaacagcatcttctttattgggagcatcagggggtgcctggtttggagtcagaagaaatgttatcctggagacattttgcagggatttgaagagctgaaggtaagctccatggggtccagtaggagggagggggccccagaaag

SEQ ID NO: 26335 - DNA, 201 bp, Bos taurus
taggttgggacacacagctttttgagagcaggcatccaccgtgtccacctttgcctggcaaagaataaatctgtccttttctacttcacacaaaactctgtcttcgagatttgactcagcactggtgcacagaggctgaagttttggcattattactccattttaactctgggagatcccttattatacctgttttttaaa

SEQ ID NO: 26336 - DNA, 201 bp, Bos taurus
tccctgagttccccgtggtacctggagaggaatctcaagcccccagccgcaactcgagacaaaccacgagattcccccatcaatgtgagatgaggcccttctctcctgcgtcgcctagagagctgagttccctctcaaaacttgagaggatgcttgactcccttcatgcaactcaagggggcccagagatccctgtcacaa

SEQ ID NO: 26337 - DNA, 201 bp, Bos taurus
caacgctggagtttctgctgccaaaaccattgtatggaactgtgccaatcactaacggcaactcaagcatcaactttttagcaccaggaatgtgaatgtacacctaatacgccaaagaccaaaacaacaacaagagagagagaggcacaaatgtaagttaaaccttatagtgagtaacccaattattttttcataaaaaaa

SEQ ID NO: 26338 - DNA, 201 bp, Bos taurus
cacagcgggctcataagcttctgccctctctcttttgggaagcttcaagtcctgagaacaagtgcccgccaacatggtggggcatgagaggctgtgtgccatgcagaggggccatcccacatcctagccactgtgtccattaattccactgtgcctcagatagctccccagcctcagcagttcaaggcggcagtccacgat

SEQ ID NO: 26339 - DNA, 201 bp, Bos taurus
ccactgggtctcaaagccagccatgctggggccctgccctgaccagcagtttgccctcatcagtcatgagcaaataggcctctctgctaacttgctgggacgtgccttacctgccaacacatccacagcaactacataactcagggtcttgagccggcgaggccaagggtcagccttcaataccagcatgcgcacagcagt

SEQ ID NO: 26340 - DNA, 201 bp, Bos taurus
tggacagtgataggaatatggaaaaaaaaaatctgcctttggccatcagccccatttactcctaggatatcagaggggcctggggctgttcctataaggcgagggcatccaagggcattcgggaacctccatctcagcttccgtgctcgtctggccaaggctgccttcccagatcaatgcctggctgagaaatagctcttg

SEQ ID NO: 26341 - DNA, 201 bp, Bos taurus
aagcagttcatgacattggagtttaattatgggcaccattagcatgaaattttgtaaatattttcaaggatattttaaaacataattcatctttttgaaagcttctgcttttctattgcttctctaaccaattcaagatggaaaaaagatagaagactgaacctatttatatcttatttgcattatgtactgcgtaactct

SEQ ID NO: 26342 - DNA, 201 bp, Bos taurus
taacttgcaatgaacataatttaaatgtacataagaagatttggatggcaaacttcaaaaatgagggattgggtgcaaatctgcaccagtcttttactcttagcagaatctctaaggcttgacatgcgaggttatccttcgttggttttgagaatggctgatggtagtaagaatgtgatttcccttctttatcattgattc

SEQ ID NO: 26343 - DNA, 201 bp, Bos taurus
ataaagactgaaaaaaaaaatgaacagaacctcagaaacctgtgggggcaatataaaaatgtctaacagatgcacaattggattcccagaaggaaaagatgggcagaattgaacagtgaaaaatatattagaagaaatagtgaccaaaatttcccaaagtcatacaattataagttctacaagttcagtgatctatgtgta

SEQ ID NO: 26344 - DNA, 201 bp, Bos taurus
gtacggcaccaggttccttctggacagctccgcgctgctctcctgctctgaagacacatccatcaggtattgggacctgggcggcttcaccaacactgtgtagtaccagggccacacctgccccttgtgggacctggacatcggcccgcacagcctgtatttcgccagcgggtgccacgactgcacggcccacctctggtc

SEQ ID NO: 26345 - DNA, 201 bp, Bos taurus
aaccttacaatgtgtgatttttctgaaagatacatacctcctccctaaatgtacttgctccgcatgtccaaacttgaccttctaatcccctgactacatcttcaaactattagccagatcagtgagtcactagaaaatccagtgtagaggtaaaactgtgtatttttgtgaaatttatgtgaaatttatcttcaaatttgg

SEQ ID NO: 26346 - DNA, 201 bp, Bos taurus
tcaatatttcaatcatgtgtctctctctgacatgttttttcctgtccacatgaaacctgagtaaattgcaacgagctttgaatagaactctcagaaactcatctaccaacttctgcctcctggagcaagatcaggagacagaccaccaccttcattctactaccaaccattattaatcatcctctttgcaaaaggcatgga

SEQ ID NO: 26347 - DNA, 201 bp, Bos taurus
aaatttcatcttttaaaaaggatcacctgaaggaacacagtgatgtcaatggatattcaaaatgattggccatggaagtggtggtggtacatctagctacctagataacattcagatacactagtactaacccaaagctagaggatttggttttaaaaacatagtacaaatgataacataattaaggcaatcccactctcc

SEQ ID NO: 26348 - DNA, 201 bp, Bos taurus
gagttggaattctgatgtgctgtgtccataaagctttgataggcactgccttgtatatccagagagcagggtccttctggatggagataagtggatacaaggatgctaggcaaagagaacttaaaacagtacaggcactacaaccaagagtttgacaatctcagctatgaccaacggttcttttttttttccttcttcatc

SEQ ID NO: 26349 - DNA, 201 bp, Bos taurus
ttttggaaatcagatctagatcaaacccctattctaccttttgatgcttgaagatgttgacaatgtctgttgacctttggcacttcattatccataatgcagagagagtggtacctttctggttgaaaaatatgaatgcatctgaaaatattagaaatgttcaacttaattcctacgctttcctctctttactctattgta

SEQ ID NO: 26350 - DNA, 201 bp, Bos taurus
ggggggggaggtgggagtgatggtgaaaagggtagattaaaatgatatgtgtcaaatattagtagccttttaagaagccatcgcccatggcccttaaccccgtacatatggcaagtcaggtgcagagcaaacgaaattaagatgatagtgtgttgacaggagcaagcagattccagttttcatctccgcagacaacaggag

SEQ ID NO: 26351 - DNA, 201 bp, Bos taurus
ctctttcttttcagcagggtgtacgggaaagtttgagatgtgcagtttttctttatagtctcaacaattcgctgttttcagaaagggggtaggggacagaacatacagaaaagatgagaatgtgtaaaaatccatgaagttttaagcatatttgagtttgattctgaaagatgaattggtatataaccccattccagaaag

SEQ ID NO: 26352 - DNA, 201 bp, Bos taurus
aaaagcaaaacggccctttgttcagctaattaacgaaggcccaactccgaaagcagatgtgtttgcttagctaatcacaagcatgtttctttcaaggaacatcatttcgagggggccgctcaggggaatgggaaagggggacacagcaacccccccacccacgtcctctctgcctcaggggtctctcacccccagactgag

SEQ ID NO: 26353 - DNA, 201 bp, Bos taurus
agctttaaaatttccttcgagtgtgctctcactgtcatttctaagtttgcaagaaattaaaaacattattatttatatgataatgtatcttataagtgaactgagctgcagtgcattattggattaattttgacaatcactttagtttcaaaatgatcttcaactctgatatttgttcttgttgtgccatttaaagatttt

SEQ ID NO: 26354 - DNA, 201 bp, Bos taurus
tcttgatccttatggaagccagttaaaattaattggaaaaagcttttaaagacctaagacgcagaccaaatgtatcgccaacccgcggcctcatcccgcatggaacatgaaggtcaccgcgaagctgcagatttatgcagaagggttgggtgatggaaaatgagacaaaagcatttggattttattattccatttactctg

SEQ ID NO: 26355 - DNA, 201 bp, Bos taurus
tattggcctcacattaagatatcacctagaatataaaggagctgggtagctattttctaagaccagttttaaaattaaaatcccatgattcttactattatgacttcataatctacataattaggcctgtagctgatcatctatgatcatttttgagctctgatcacaaatttctatattcctattagatagatctgcttg

SEQ ID NO: 26356 - DNA, 201 bp, Bos taurus
gactgagcagacacacacacacacacacacatctcttaaattcccttcttagaagcagaacagcctcatcaaggaggcactatgttagatttctttatcttattgtaagctgcagctaaaagaagcctagggtatgcaaaaaaatagagttgaaaatgattgtctagcaaccagaagctgttcagacaaatattacatcac

SEQ ID NO: 26357 - DNA, 201 bp, Bos taurus
atcaagaactgattttccaccttttgcagttgaccataaattaaacagatattctggaaaccagaaatcaaatataaaatcttcttggaaatttgacatactcttccaacagaaatagtttaaaatataattttatcccaatgacagatttaatagcaaacaaatcaggagcaggtctcactagttcttacagttcccagg

SEQ ID NO: 26358 - DNA, 201 bp, Bos taurus
acagaaggattttgatttgaagacagcttaccaccctccctgtgaatgtttgttctggtgttaatggatcttaaaacaatttgtttacaatcataaaccacctaaaagaatgtaaggagtcaagctttccaatatgtgttgcaatatttgttaaacagattaatacacagagaaactacagaaagaatacagtataaagca

SEQ ID NO: 26359 - DNA, 201 bp, Bos taurus
taaactatgacttcagatccttgtttacttatttgatgcaatctacttacacttccatcaaagtgtgcctctaatgtataagttacatttctaacaacaaaaaaaaatgatccaaagctgtgctaattaaaacaaaataggataaataactttaagagataacagcagtatgattcagaagcatgcaaaaagtgtgcagac

SEQ ID NO: 26360 - DNA, 201 bp, Bos taurus
gtaaacaatccgtgtcaacatggaatgtccgcattttaaggctgtgtgaggataaattttactttcttcacaagggccttctgggaagaactttggcacatgcggacggggagaatgtgacctagaggagaagggtttggagccctagctcattctgtaaccccactcctgtccacttagttgaggcccagttagggccca

SEQ ID NO: 26361 - DNA, 201 bp, Bos taurus
gagaagttttaaaagagcaaacaatgggggaataaaccccaaacaagacaaaacagttggatgctggggcacattaccactgattgaggtagctgctcctgaagacctcatatttttattttctgaagctctcagcagagatttctgccagcttcttatcaatggccccatttgatatcaaatatccttcaaaggactcct

SEQ ID NO: 26362 - DNA, 201 bp, Bos taurus
attctagactacttttaatctcaatgtagataagtgtataaatttacaggacctttggaataaatagctgactgtgattaacaactgatgtttctgattgttggaaatgtatttggtgaaggactcagctctttgcagattctcacagtaaatctggtcaaacaactttcttaagatctttttaaaaattttaaaattaaa

SEQ ID NO: 26363 - DNA, 201 bp, Bos taurus
acctaatgtctttctagtgatgatttacataatcaatcagcactcatgatgaccttcagtggaagttatgataacacaggtgagtgtttcacatggagcacgtgtcacatggaagaaatactttttttcttccttctgtaaactggctgagaattatttttaagccattgacaaaatggaacaaatgtctaaaagttgttg

SEQ ID NO: 26364 - DNA, 201 bp, Bos taurus
tggcctcaagaaacaaaagtccttcttgtaggtactagcatcattcccctgtgctttgagatataattgttctaactggtcttccccaggaaccattatctaggccacttctttgctcccacttctctagggagacaattcttatcagaaggcaaaaaaaaaaaaaaaaaggtgagggggaagttatttagaatttaggga

SEQ ID NO: 26365 - DNA, 201 bp, Bos taurus
tatggtatcttcataccacagatatatttgacatatcttttgtttaatatattgatagaatccttttttgcacagcttatgctttttgaaagtatcttcaaccaagaatggtagactgaaatttgcgcaattaatttctattggaaaacagaaatttggaatgatctagtttatatattcaatctagtttctattttcagc

SEQ ID NO: 26366 - DNA, 201 bp, Bos taurus
aaattgaaaaatgctccatttataaaaaaattgtctttaagaatgtgtgtaagagtgatgttatttttacttcattagagaatttgctagggaaaccatgtgggcctgggttttgcagggaggaggtttttgtttgtttgtttgtttgtttgtttgtttaacaatattgcttctatcttatgcttcggtatgtggtatctt

SEQ ID NO: 26367 - DNA, 201 bp, Bos taurus
ttaccaaagatgactgtggaaataattcaaggtcatgtaagtctaagtcaatatcagcatatctgttatgcctggcccaggtttgaaatgttttagaagtatattaattctagcaaatctcatgaaaaccaatgcaaataaaagtaagaaaatgtataaaaaaaatgttaggccaaaaagttaacgaagcacaaatacttt

SEQ ID NO: 26368 - DNA, 201 bp, Bos taurus
gttgaattgttccatttataaggcctttgtttttccttactgtgaaactcttaaggacactccatcgcccggtgcaattcaatatgactggagctctcaggggtcttgatctccacgtacagtacaccacaggagtgatttataaaccacaatcccagagcatcccaggaacaggaatgaattgaggcttctaagtgaaca

SEQ ID NO: 26369 - DNA, 201 bp, Bos taurus
caataaatctcttcatagatgtgcctatcatacaggccctgcatctctgatggaactccatctgatacaataagcatcaaattaactttattgttaggttgtattgtggccttgaattttttatatcattcaacatcatttttgtttcttcctccctccttccattcttccactccctcctcctcctctttctcggtctct

SEQ ID NO: 26370 - DNA, 201 bp, Bos taurus
tctggtggtaaccttaaataggagagtgtttatttatttatttatttacagcttccttgaacagagcagtttactaatttaaacaagtgtgaatcacatcgaactaaacatttggttttgtctcagaaattacacattttcacaaacttttcagtcatttctacccactatgaaacttttgcacctatctcatatttaaag

SEQ ID NO: 26371 - DNA, 201 bp, Bos taurus
gtcaaaattctagaaactacaatgagagggaaagaagaagacaacaacgcagtggtaagacgccacttcgcagcacagacataaatactgctctccaggaccctctgttcctttcagagttttgatatctttatccttgccggcaacattttttctcccctcttcattccttgggccattcttcctaacctctcctgtcct

SEQ ID NO: 26372 - DNA, 201 bp, Bos taurus
tcaaaagtgctgctgatagaaatgctaaatggtattgccaccctggaataccactgtcagtggatcggaggtagggtggggagagtctgaatacagtgggggcagagcgagagaattctctgggatattagaattgttctgcatcttctctctagtacagactgatacatactgatacgtgtgtaaaaacacatgtggttc

SEQ ID NO: 26373 - DNA, 201 bp, Bos taurus
gcacaagccactttaacatgaaccagatgttgagtgcacggctgggggctttgagcggagattgcacattctggaggtttgcttaatggggtgtcccaccgttttagaaagggcagctaatttccttggggcactatgcaatacaccacggaatgctggggttctgggtggtttttctttctcggccatcctatgtccaca

SEQ ID NO: 26374 - DNA, 201 bp, Bos taurus
accccaatttaagcaagacccgatggaacatccctgttccatatttcctggttttagtcttctgagcttgaagaagttcagtatggccaacaaattttggttttggtgctttctttcacctgtatactacgaacttttgttcccttctcataatattcattgtcaaataattctgtttggtaatctagtcttaatgacatt

SEQ ID NO: 26375 - DNA, 201 bp, Bos taurus
tacccatcctgggaagtcagggagatcccaaagctcagcaagatgggtcagaagccagtagccaaggtccctgaaaataaagcatgggagacagtcaccatgtgagccaataaaccttctggccaatatttctcaatcagagcaactgcttatccatagtgtctgaaggggctccctcaactatgacattctgaaagctaa

SEQ ID NO: 26376 - DNA, 201 bp, Bos taurus
tccctgatatgtagacttctccctgtgtcttcatgttgccttcagtctatacctgtctgcctctgggtccagatttccccatttcataaagacatcagtcacactgtcttagggcctgctgctgctgctgctaagtcacttttgtcatgtccgactctgtgcgacctcatagacggcagcccaccaggctccccagtccct

SEQ ID NO: 26377 - DNA, 201 bp, Bos taurus
gaaaccagcccatgcacaactaaaaaggcacactgccattccaaaatcaaggtccccccgagcagctgaggacgggcgcgagtcaagggctgggccacaaagtgcgtcactttggggttgctgcctgcaaatctgggtccactgaccatcagatcagatcagatcagatcagtcactcagtcgtgtccgactctttgagac

SEQ ID NO: 26378 - DNA, 201 bp, Bos taurus
gttcacacctgactctgacctccagccagagatgctatggaaaggatacacatccggtccagcaccaggaggaagatctcgcgagagcaggcaggccacatggggctcctacgggaagaaggcggtgtcctcctccccttgttcctgatcagaaaccaggctagggaactgcagggatggggcagagtcatgactggccaa

SEQ ID NO: 26379 - DNA, 201 bp, Bos taurus
gtaggaacctggggcatctcagtataggcacccaaaagttgttttaaaacaagaggctactgagtgttttcaaggtgtggtttcaggtatatggtcatatcgctgggaatgattgctgaagaatttcatgctggcactaaaacatacaaatgtcacttttcaaataacatttcctacttgctcatcaacatttcgcttggg

SEQ ID NO: 26380 - DNA, 201 bp, Bos taurus
tttttttttttaagagttcataaagcacttcagtattctgtggttcatagtgtcattacagagaacagtagctatggccattcaagaaatttggaaacgcctgtaagtggagttttagctagtagaggacaggctttgattctgttagtgttcctgtttttcactgtttggaaggtctgtaattagctcagctttgggcca

SEQ ID NO: 26381 - DNA, 201 bp, Bos taurus
caaacctttatactcctgcagggaagatgcacaacctatctttactttcaccaagggaataacaccttagatttgcagtttgcaaagcaccttaacgttcgttatatttaatccatgcaacacttccgggagggaggaggcagtttggcatgactatttaaaaatttttttttattaggaaaggtagagccataggagaaa

SEQ ID NO: 26382 - DNA, 201 bp, Bos taurus
agtccgccaccgcagccctcaatcttgtgtcacttctcttagccactacccttttaaagaaaaacaacagggaaaaaaaaggactaaaagttttaaaaacaggccacatctgtctgtgtctgtctaaaactgccttctgtgtctgtccagtttgttctgaatatggtcacgtggccacacctagctgcaagggaagcatga

SEQ ID NO: 26383 - DNA, 201 bp, Bos taurus
aaccccatggactgcagcctaccaggctcctccgtccatgggattttccaggcaagagtactggagtggggtgccagtcaggcagatgtaaattcaaatccgagttctactgtttactaggtatgtccctctagctttgcgtcgctctgacctcctccccttcctttgacagtgtgtcccagttaggtattactgcctaac

SEQ ID NO: 26384 - DNA, 201 bp, Bos taurus
aataacatttgagttgagcctcaaaagatgtgcaaaatttatccatgccaagttgggaacagttccagaaatagaggcaacatataaaaaccatggcaactgtctgcctttctccacatttacatgcatacctgaggatgtaaatgagataacaatttatacattcatgtgcatgaaggtgtcttaaggatagataacttc

SEQ ID NO: 26385 - DNA, 201 bp, Bos taurus
agggggctctctcctcctgcctcgtcttatctatcatgtctgaaacccgccctgtgtccacggaagtttggggttggccaaaaagtccgtttctggttttctgtatcattgttcagaaatacccgaatgaactttctggctgacccagggtgttggctgaatgctgcacccaagcccagtggttcttatgcagggcctgag

SEQ ID NO: 26386 - DNA, 201 bp, Bos taurus
caggctgcaggaggaaggggacatgggatccacccttccttcggcccaagccctctcacctgcagtccaggtgaagttgggcccagcaccccgcttccagggacaggaagctgaggactgactcatgagccacagggcttcctgaggctggcacagcagaggagccagttggccactctggtctcagtccctgagacccac

SEQ ID NO: 26387 - DNA, 201 bp, Bos taurus
accaaaacatcaggtgggtgaaaatgtctgtggatcttaaaaaggatggttgtaagcagcagataggtcacagagggtcaaggccccaaggcttacaggatgcaatcaagcatccagggcatgttgctacagtacaagctccctgggtactgactttggggaacagtgggtggcccctagaaggcattcagtggctattta

SEQ ID NO: 26388 - DNA, 201 bp, Bos taurus
agcccccacagatctctggttgactgaaaggccacgcacaagtggagaagagagcagagaggatccactttctctcctcactcctgcctgcgagcctgtgtgcacaggtgaaggagaggccagagggcccagaggaaagtaaaggctgggaagatgaaaagctgccttaagtctgaataacagcgtagcgcttgaggcatc

SEQ ID NO: 26389 - DNA, 201 bp, Bos taurus
ggtaatttctccatgtgaagcttctctttacttcccccctgactgcccagttagagtctgaaggctgttgtttctgttgatgctttctgtggccggaagataccaagcagccagggtgggctgagctatagcaggtggcacacagggtgcagactagttctggccagaagacgtgggcttggtaacttttgctccggggat

SEQ ID NO: 26390 - DNA, 201 bp, Bos taurus
gcacagaagaagctcacacccctggtacactatcctgaattttgtgactgctaccaaggtacacctctatatcacgttgctctgtggccaggggggctttatgctcatggatcccagaggacataagcaatggagaaagagttcttaaatagtcaccacccgcagggcacagcaagaggcaacagacccagaggcctggtc

SEQ ID NO: 26391 - DNA, 201 bp, Bos taurus
gcagtctttggcctgtcttacctcgtagaacctctgccttcaccatcacatggtattttccctgtatgtgtgtgtcttaaatttaccattttaataaagacatgattcatatttgactggggcccaccctcatgaccatgtcttgacttattacatttgcaatgacactatttacaaataaagtccattttgaggtgctga

SEQ ID NO: 26392 - DNA, 201 bp, Bos taurus
taaccagttatttccctgcctctgtcccagatactcacatcctccatgtactagggcatcggccatcagccctgcaccagtcagtattttacaaggagctggagcagagctactggtccattacctgcttcccgtcatgcttctctgatgacagtttatcaactagaagaagataagcagagcagtttaaactgactctcc

SEQ ID NO: 26393 - DNA, 201 bp, Bos taurus
catcagtccttccaatgaatattcaggactgatttcctttagggttgactggttggatctccttgcagttcacaaaagcatacaaataggaaaatatcccatccatttggagtaggatatttaagcacaagccctgttatcagccagcagccttatggcccctctgccatgggcatcccatttagtcctgatcaacaagtt

SEQ ID NO: 26394 - DNA, 201 bp, Bos taurus
tgcgaagtgactggcacagagactctggcaagtgaacagagtcgtaatgcgtgctaatttctgggaaaaattcttttccttttcactcctggcttaggagataataactctgtaactaaagaccttgctagtctcctcacttgtcacacgattccttctcctcccccaataaaatggcatttaacccggcaaagttgtata

SEQ ID NO: 26395 - DNA, 201 bp, Bos taurus
ttctaaaaataattattaaacactggttgggaccaaacttttaaaaaactcttgaatatccttgagttagtttccaggcccatgtgaagtattccttgggggaaaaggaaatttgtccagtgggtctgtagctggtaccacattccatgtttctgtacatgccttgatgtttctttctgctgccactggcctgtctcccca

SEQ ID NO: 26396 - DNA, 201 bp, Bos taurus
cttgcctccagaagacctgtcctagaggttacattgtccatcaccacttttccagacgaaatctggtctggatgtctgcctttctcccctcctccttcctcttctatcatcaagctgctggtaattttagtaaaatttaacatttgtgtgcttgttccatgagacctattttcctgtgaggtgcacaggttggtgaagaga

SEQ ID NO: 26397 - DNA, 201 bp, Bos taurus
catcctgtaatacgctcctagggctggacggataatgctgctcgcgtctaggtcaggagcttcattatcatggaaaaatcatctgttgcccagatgtcagtatgattgcctgacccgaaatcagagctccagtgtccgctttgggcgtgtgcaatggccatgaacttgggcaagctccgggagatggtgagggacagggag

SEQ ID NO: 26398 - DNA, 201 bp, Bos taurus
cacccacacccaaagtcaggaagggaaagggggtcccagaggagcgggcagacacctcagggccttctccacgtgctctggccttttcacttgatgcacatgattgttatgcacacttgaagtgcagccattgagctctcatgattgatatagccaggcccagacggacacggtctctggttgtcagggctattattctga

SEQ ID NO: 26399 - DNA, 201 bp, Bos taurus
cagtgaagtattcactttagatttgtggatctgaagcatgaaatcgccagcatgtagtttttttttttaaaggcagaccactggcctaaagagcaagagtttggggagaggggaaaacccagttgagcagcctccttcaaggcactgattggggtaaatttcgcactgaagggctaaatcccatcaactcagagcctgcct

SEQ ID NO: 26400 - DNA, 201 bp, Bos taurus
tgacttacaaaatgctgagactgtgttgtaatgctctttctcttttcttaaaaataaggattgaatttaatggaataacactgatgtgaacgatattacattatccaatttgtttgtggtggtttcctactcccattctgcaaaccaagttggagggaaaaaagtagtttggtcacacaggcttttgtaaacaagaatctc

SEQ ID NO: 26401 - DNA, 201 bp, Bos taurus
ccttgaaatatatctcacaattaatgttcattcacagatattctcccatcattgtcattcatgtcagttgactactagattgacagatggcaagttgtgcgatttttttctgtgaatttgcattttctgttcaaaatgtcacctttttcttattccagatgaaagctgatactccagatttaaacaacaacaaaaacaatc

SEQ ID NO: 26402 - DNA, 201 bp, Bos taurus
gggccccatctctcctttgatcagtcacggctggatgggagatttttgaatcattttattgtctgactgcagctttatagattctctttcaggaagcagctcacttttcctctttcttcctctggcctctaattctttctttgcttcaggggtcctggtagttcagggtctatgtgtcaaggcctttggttagatcattta

SEQ ID NO: 26403 - DNA, 201 bp, Bos taurus
atattggggggccccctggggagaggaagttagcccagagttgggtgtttcggtgattttcgtctgaggtatataatgaaatctatgagctgtaaagctgtatagaaatttccatcctgagcatactgcaaatgacttttgtactttgagaagccgaatcccagttgagtcctgaggttattattctaaggtcatctttcc

SEQ ID NO: 26404 - DNA, 201 bp, Bos taurus
tgtggtatctgggtctgtatacatacctgcatacccaggtatctgtggccaggggaagcaatgatctggttcagacctcttcttcattcattaattaatcgtgaggctaatatatattgaaggccaacataagcaagaaaccatgctacgacaaagtgcagttgctcagttgtgtctgacactatgcaattccatagaccg

SEQ ID NO: 26405 - DNA, 201 bp, Bos taurus
aaaatgaattttatgtctggaaggagcaccaggcaaatagacccctgaggctgaagttttctattaactcacaggatagtgacttaactgaagaaaagcagcacgtgaacctcctctctgaatcctcccagcatccctcaaactgacttcaagagcctagttgctcggcacacctcaccccctgcacaacagagctcagca

SEQ ID NO: 26406 - DNA, 201 bp, Bos taurus
aacagctcgggccaattttatcccaagttccggaagtgtcagaaatggcacaggttatgtcagacttagtgtctaggatcccttgggaccattagccccaataactccgaggccaaatcctcatcccaggaaagcaaagcttccgctaccttaacaagaccatgtctgccttacaagtggagtagtaagttagcgacatga

SEQ ID NO: 26407 - DNA, 201 bp, Bos taurus
gggctcattattttgtttttctatccagagaggaaagaactttgaaatggcagcttctgacaagaataaaagaatagcaataatcatggtagctctgtccaagtcaattttctccatgtggcaaaatatgataggaactcacaaaatgaaaggataccaggctacccagagcatagctaccaccagggaactcatcatgaa

SEQ ID NO: 26408 - DNA, 201 bp, Bos taurus
aaagtaaatggcatcatttaattattactagaactttcctggtggcacagatagtaaagaatctgcctgcaatgtgggagacctggatttgatccctggactgagaacagtccctgcagaaaggaatgacaattctctcccagtgttcttgcctggagagaattcccatggacagaggagtctggcaggtcacagtccatg

SEQ ID NO: 26409 - DNA, 201 bp, Bos taurus
tcacctgttgtcacaagctctgcagggccctggagcccccagggaggcaggaggaggcagaggtcactgtggctgctatctgccagcctcctctctgcctgtttggagtcggttctggccattcatggcatcgctggctgtatccctgagggctgagcgctgggagagcaagatcagggttgagctgtaatcttggctctg

SEQ ID NO: 26410 - DNA, 201 bp, Bos taurus
cagcttcgctgctggttcagtgcactctgcgagagttttgtgatagagaagaataaacctgactccatactgaatctgtttattttactttaaccatcttatctattgctttcgctgaaagttaagaatgttgcctgtaccctgaaatacaagagagcccattccctaggctctgacctttgagggtataacacttctccg

SEQ ID NO: 26411 - DNA, 201 bp, Bos taurus
aacagcaggcccttgacccacttgggctttaccaggcacacatatgtagtgcagcccacccttaggagaaaagacagataaagaggtctgcgcatgtcctggaagtggactaagggccatttgggtaaggaattctggagcaggcaactgagactttacgtagaagtggcgtaagatggaggttgtggttccatagccctt

SEQ ID NO: 26412 - DNA, 201 bp, Bos taurus
agcctggcacttaaatacctgttgaatgaataaaaggaggaagaaaaatggaaggaaggtaagtagaaagaaaggaagaagcttttatccttggagagaaggtggttagctatttccaacattttctcaaagcccatcttgggaccagctttcttttttcatagagtcaacaaaatccttaataagcacctcttccatgtc

SEQ ID NO: 26413 - DNA, 201 bp, Bos taurus
cctcgggggcccttttcaaactctgcactggctcggctccctttacccctttgtttctcctatgaaggcacaacctcccccacagggctccttggctcacaagggccaaacaagcaggtatgtttaaagcatcagcagccagaggcaccaaaaaatgaggacaattcagcttttctgcactcaagaagtctaagactctat

SEQ ID NO: 26414 - DNA, 201 bp, Bos taurus
ctggccagcacagagggctggaagggaagaaataacatctcctccagggtgacgggggctgcgtgcagcagatgatgcagagcttgtgagggaggctgccgccggcccccctcccttcaccgtcctcccgttctgcctccctgccccctcccacctcctactcagaaccagtgactaattgcatcgcgtttctctttgact

SEQ ID NO: 26415 - DNA, 201 bp, Bos taurus
agctgaagtggccactaactcatggtgcggtactaagctagataacccggtcagtttccctatgccggcaggtgcatgtaaccctctattctttctgacggcttcctaaacgggaaggggccacctagggacgggcacacatgcccaagggggcgcccctggaaagaaaagcccggggcggggcctcaaagggcagagcat

SEQ ID NO: 26416 - DNA, 201 bp, Bos taurus
aagtatcaaattctgggagggcattctatcgtccctcctctaaaagcatttggaataacttggtgccaagtacaggcaggttgtcgaagaggaaagatgcgcacctgtaagtggtgagcttaggcacaagtgggacagtggttccaagtcacattctctctactgcgaaacccccttctctctcactctccccgaagtctc

SEQ ID NO: 26417 - DNA, 201 bp, Bos taurus
catctgcttcacactgggggccgtggccatgctgctgaagctggtcaaattcgagaacagactacacaccttcttccctcgtttcctgttggggcagaccatgctctctgtcctcctttatgccagtgccctgatcctctggccactctaccagttcaatcaggagttcggcgggcagccccagcggtccagtgatgtgag

SEQ ID NO: 26418 - DNA, 201 bp, Bos taurus
cttctgggagtggccacctttgcctagtgggaaggttctccttctaggaaagagtcagaaaagctctttacctttgtttgatttgttgtctctcggtctgtcccctggcctccaaagaaaggatcaccctgtgcacatgtgcacgtcctgagcacactctggaggaaataatagcttgcctatgggccagtggctcttagt

SEQ ID NO: 26419 - DNA, 201 bp, Bos taurus
cacaggctaggtcactgcccttgtcatgagggggaaggctgggagacaagaaggaccctgtgtttcattccccatctcctaacacaggcaaatacctgtcgtgatgattcgtggggaggaaggcccccctgaagtcacagaaagcccggattatggcatatttttaaaaggtgagttctgtgacattctactactttcagc

SEQ ID NO: 26420 - DNA, 201 bp, Bos taurus
gcctcacctggtaggatctcacctggctgggcctcacccagctgggcctcacccggcaggatctcacctggctggaccgaagccgcttgctctccagccctgtcttctcctgcatcagggcctccttcttggccaggatggcctcccgcttgtggagctcctcccccagctcctccagtgcccgccgctgctgcaggacct

SEQ ID NO: 26421 - DNA, 201 bp, Bos taurus
gtcggtgcctcagtgggccttgcccacaagcaaccaactgtcaatgagccacaattagtgttcctgcccagctattggtcagcactgcagtgggccctgcccactggtaactgtcaagagggaccattggagaagagattgagtcaggggttggtggtgtggtggtcatcaggtggagagtgaggtaagaggcagattcag

SEQ ID NO: 26422 - DNA, 201 bp, Bos taurus
ttccctccttctctctagagacatgcccccggggccctggtctgggcagtgtggactttccattgcagtgacctgcagccacccctattaggcctgggctaatgaccaaggagcaagagtggggaaaccaagtccccgggggagggctccagcttggtcactgtgactaagggaacagaggcccctgaggatgatcgagag

SEQ ID NO: 26423 - DNA, 201 bp, Bos taurus
aaaaaagagtttgacgttacaaacatgatgatgtcagtttgacaagcgctgtgagaaacagggaaggagagcagggaaggtctgagagcaacatttgtgcaaagactctcctgaagtgagggagtgaggaaggcctgaagacaggcagaggggatggccaggaccaaagcctgccctggcctggactctgaggcctctggg

SEQ ID NO: 26424 - DNA, 201 bp, Bos taurus
ttagaccacgagtgggagagtatggaagggatcctggggggtgtagttggaaatcacccctgctctcttccttccctcccaagacccccacaaggacaccatgtgccttccctcctctgtgtgcaacacagacctggtccccagtccttcctgcaggaaatcctgctcggaataaagcccagcgccctcagtgtggcctcc

SEQ ID NO: 26425 - DNA, 201 bp, Bos taurus
cctgccccctgcaatggaagcgtggagtcttaaccactgaacttccggggaaatcccaaggcaatcactttttaaatggcttgttttcagctcttctggtggttaccattcatggaacccacacttctgctgtcatttcaagccatctgtatactccccttttatttttatctgtttattggttttgcgaaggcgttctct

SEQ ID NO: 26426 - DNA, 201 bp, Bos taurus
gataaatagcatgtatgatctgtaggcagaggccaggagatgaaaaactatgtaaggtagctttaagaaactatcagaaaaggggaaaatagaaattacatattagaggaaacagatgacacacctcagtttggacttcactctgaagacaaataacaattgttggttttgggggcaagagagatagggagacgtttgtgt

SEQ ID NO: 26427 - DNA, 201 bp, Bos taurus
tgctgattccatcgttctttcgttgttcattgactgtctcctctcgcaagaagccaaggccggggagaaagagcaggtggcccacagtttagggtcatgaaaagactgctgtgttgatggtaccctgtaagcatcagcagagtgagaaagggctctctctttcgaggtgtcctttagtctctgtgttttgccaatggcccg

SEQ ID NO: 26428 - DNA, 201 bp, Bos taurus
gcacttcctataatatgagagagacaggagggaccaaccagtctttctgaaagagggaattcacatgagaactagaaagttaagagatggttgtgctaattcatcgatataattatgcttgttttatttgaaccatcatcccctagtatattcttctatctctgtcgccagacttctgctctacttttttcccccaaatcc

SEQ ID NO: 26429 - DNA, 201 bp, Bos taurus
aatcctaaccactaggcaatcagagaatccccagccctttatcttggtcaagctgagtactgagctatggaacaccttgccactccccacttaatcagaatagaaataaaacaaaccgatacatacacctctgtgcttcttgggtgtctttgttggactgccagattccaccttgaatttcatccaaccataacacagctg

SEQ ID NO: 26430 - DNA, 201 bp, Bos taurus
aaaaaaatgtcattaggatgcgaacactgtcatgagcctgagcaaacattttatttctacatccgttacagacccacagcagggcccccctgcaagagacggcgggatggagaactcttagggttagacaaacgctgtttcccacccagtgtgttgccccctgtacaggtgacctcaggtgacctcaaaggccctagagcc

SEQ ID NO: 26431 - DNA, 201 bp, Bos taurus
agggcctcggtgttttgggttgcccacctgggtgggtggctgagggggcatcttttgtcttattcttccttgctgctgctgctgctaagtcgcttcagtcatgtccgactcttccttgaggcctgtacaattcccttctgtgtgtattaaatcattttagtcatgtcgatctctgtgaccctatggactacagcccaccag

SEQ ID NO: 26432 - DNA, 201 bp, Bos taurus
ccagtttctctctttgtaaaatggagtttattttgaggactaaaggagaaaaaaaacaatctcttataaattcaaaagctcttggccgagcactggagaattcagaggactcagtattattagctggatcctaggaaaagcaaagcctgccttacatctgaagcccattacaggggaaaaagcctccctgggtagcgggtg

SEQ ID NO: 26433 - DNA, 201 bp, Bos taurus
atgcgcttgtacacttgagtcagtgtgtgactgtcaaaacctagacaagcacactatctgcgaaaacaaatattctgcctgagcaaaagtttgaaagtacagtatttttcactctcttctcccctttttcatgacaaaaatctttactcaaaagcccctgctttcttcaccatgctaatgaatgtacagaggcatgtagag

SEQ ID NO: 26434 - DNA, 201 bp, Bos taurus
atgcttgcttgtatttaaaatcctttggagcctttttgccactgggccatcattgatcagttatctacagttgcttttgtaaggcccaccctgggcccagtccagagagaactggatgctccgtggagcatgaaagtatcatgtgagatgaacttcgccctcaaggagtttccccactgaaagcaattagagaacaatttg

SEQ ID NO: 26435 - DNA, 201 bp, Bos taurus
tgatgctataaaagatccatttgaagtgcaaagtaagtcagtgggtcttaatgtaacagaggacaaagagttcattgatatggtttcagcatttacattgcaactcatctttaagaaactaacatttgccaagttttggtgtaatatcaaagaaagtttttcaaaactatccaaaaagactttttaaatatccctttattc

SEQ ID NO: 26436 - DNA, 201 bp, Bos taurus
agcttggggcttaaagtcttaacagatggggccatgatgccttcaaaagcaggctggggagtctgcaggtgacaggtggtgtttagccttgggaaaggactggcccatggctgggtgagccacacaagtagcccagccgctccctctggctgcatgtccatctgctggaaggcagacccattcccaaccaggcctggttag

SEQ ID NO: 26437 - DNA, 201 bp, Bos taurus
gtgtgcttgatataatactgaggccaagcttgcaaaaggactggaaattcaggctctaatcaccttgaggcaatatgtaagatggatattctgtaattaaattccacagcaaagagattaacatgttactgagtgtcctcagtttttaatgatgtagccttttggagggtggcacttaatacagatcttaaaaagaatgat

SEQ ID NO: 26438 - DNA, 201 bp, Bos taurus
agcactgggctaaccctcgaatgtccacatcaacttctcccatgtagtgggattgcaagtgtgttcttatttttgactcaaatctgttttctaattgtaatggaattacaacactctattttcttccttttgctcatttatatctcccagtttaatacaatgaacatgtatactttatgcaataaaacacccaataaaagt

SEQ ID NO: 26439 - DNA, 201 bp, Bos taurus
gattttgtatattgaaaaccctgaagatttcacttaaaaactatagagacaataaatacagtaaagctgcagggtataatatcaatataaaaaagtctgttgcagacgtagagaatgaactgaccattgttggcaggaaggatgggggaaagggatagttttattcaattcacataaaatttaaaaacagaaaaaactaac

SEQ ID NO: 26440 - DNA, 201 bp, Bos taurus
tgttaaaatttaagtccacctcagcccctcaatattccagaaccctgcaatggcttctctttccactcaacataaatgccaaagtctttgcagcaaggccgcacaggaacagtctctcatcctccctgaccatccctctctccgttgctcattctgctccaaccagtctcctgccctggtactcagacaggttcctgcccc

SEQ ID NO: 26441 - DNA, 201 bp, Bos taurus
aaacccattatatgttaacagaaatcacattttcataaaaaataacattttgggaaatctttataaggactagtttggtagaagatagctggagcctcatatgagcttctgcattcagcctgtgatttcttgttttggctgagggaaaaaaaaattaacctaaaattgtatagccagccaaactgaaattagaatatagga

SEQ ID NO: 26442 - DNA, 201 bp, Bos taurus
tttttaaaaaataactagatatttcaaggagaagtggcatagttcaagagagctttgtcttctgtcaatataggaaaatgtgactttaaccaactgtattcatatggggagagggatagatggggctgattggaattattccttcttcattcctttagaatcttttatatggaccatttttaaagttttagttgaatttgt

SEQ ID NO: 26443 - DNA, 201 bp, Bos taurus
tgggctggggtttgcttatgtgccctgcagtgttccactcctatgccatctcatctgcaccagactcttgccctaaaattttccattttagtctcaatctatattcatgctttgctccgaatacaaactgaattctaggcctttcttttaaaagccctggagtagtatgtattctctataactggacaattttttgcagct

SEQ ID NO: 26444 - DNA, 201 bp, Bos taurus
cccacatcctctgcattggaaggcaaattcttaaccactggaccaccagggaagtcccttgtgctcatctttatttggttaggaaactctcctccgtcagttgctggtgaatgcagctcttcctataaccagccccaaggaaaggggcgtggtctacttctgatgtggagctctggttttgttttgtggttgtggggagac

SEQ ID NO: 26445 - DNA, 201 bp, Bos taurus
cattattggctacctgtcttctccctgggggtctgggttttgccctttttataaagttcaaggtgggctcggacagagcagcaatacaagtgctgataccgtagtagactctggtgcaatgtccgcattccaaagggcacagcacggcccaggcgggccagggagcagggctctgcataagcaagcatcattagctgagtg

SEQ ID NO: 26446 - DNA, 201 bp, Bos taurus
cccttgaatatttagatatagaattggaattctgtgccggtgttactcagacgaaaggtgccactgagaagagaggcgtctgtctccatccccacgtcccgcactggcctcatcttgtgatgtccctgagtgagtcctttcatgtccccaagaaaagggatggcagaactggtgggctgtgctaaagagtggttttccttt

SEQ ID NO: 26447 - DNA, 201 bp, Bos taurus
ctgccccgcctccaggtcatcacagagcaccagctgagctccctgtgctgtacagcaacttcccactagctattttacacgtgatagtgtatatacgtcaacgccactttctcgattcgtcccaccattcccttccacacccccactgtgttcacaagtccactttctatgtctgcatctctattcctgtcctgcaaattg

SEQ ID NO: 26448 - DNA, 201 bp, Bos taurus
ctccaggaggtgccagctccctggtcacccatgcagacagcgccatggaggaaaggaccctcttgaccaccagggctgctattggacttctcattaaagctgcttgatgttggccccccagtcccaatcagagggctccttgctttctcacagctggaggctaccgttttgacacagtctcacttcctgtttacaccacag

SEQ ID NO: 26449 - DNA, 201 bp, Bos taurus
actcattatcatggtcccatcaaggggcaatatttctaactagagctgatgcgtccaatccaggctgcttcaccattctcagaactcacattcactctgaactcctgccttcattagccactgcagggttctctcagctctgtttagggcagctctacctctctgggtctcactgttacatacctatattgagctgaggct

SEQ ID NO: 26450 - DNA, 201 bp, Bos taurus
gtatatgatagggataaagatttctttgtatatgtgcatggagggaaaaaagaaagacaagaaggaaggaggaaggcaggaaataatccttgtgaatcacctagtaaagatttctgtcagtatgttagagatacaaatttcagtgcacatgtggaaggaaagagaactcttgtggattatgtattacagataaagatttct

SEQ ID NO: 26451 - DNA, 201 bp, Bos taurus
gtgtctaaattcacggcaagagaaatagcaaccattttgaagatgagggttgatggttgggggtatcactgaccatattctcctcttctttttctttgccatcctcattttccttggatgtctgatagaagtcatcataggtgcgaaagtccaaaaacaagatggttggggggagaagaatccccatgataacctaggtat

SEQ ID NO: 26452 - DNA, 201 bp, Bos taurus
actggaaaccttctggaaaagtttagtctttatcagaattaaaatatagtgttgtaattgcaagcatactagttatttgaaaacctaaaatattcttaaaggcttggcaccccgattttgcagtttctgttgtttctttggtttagaatttctaggtagaagcaagccattgtttcaaactactttcttctgttatttgtt

SEQ ID NO: 26453 - DNA, 201 bp, Bos taurus
gcctgtggcaggaggaccagagttccctggaggtggaggacagtggacatcccagcagcagtgactgacatccttgaggggcagagctgtgactttcggtcctggacagtaaggccaggcaccgcctgcttgcagcaggaatgaaaacgaagcctcttcagacaaagaaagagagggaatggtgaggggatgcctggggcg

SEQ ID NO: 26454 - DNA, 201 bp, Bos taurus
cctggggtgactggggcaggtggagagtaacctgaaggtaagacccccactcccaatgaaagacatgcttgtgggatggactctggattgtctggtttgcggaaggaagacatcctaggggcctcctgtaccatctccaagaactggccagcctgggagtgtgggggttcagtccctgcagggtcagcaaggcctgaagca

SEQ ID NO: 26455 - DNA, 201 bp, Bos taurus
ttggccaaaatgattggctcaagattgagagagtggccaatcagaactcagggctgagcttccggtgaagagaagctctatttccgttgggagcagttgcaaagtgaggttggcctgcgcgggtggaagcaaacgtgacgtcagcttgtggcctttgctgctaagtcacttcagtcatgtccgactctgtgtgaccccata

SEQ ID NO: 26456 - DNA, 201 bp, Bos taurus
ttatgggtgggagtggaggcaggggagggcagaggcctgtccaaaggccgaatcccccacccctcaaccataagggggcaagagtttttataggcagagggaggcagctacatacagaaacagcatactaatctctggcagtcatcttgaaatggtcatgcagtagtctgaccagtgtcatcttgactgttttaggtacag

SEQ ID NO: 26457 - DNA, 201 bp, Bos taurus
ctcccagggctacatgtggggaaagcactggcctctgcccttctgggctgcccagagcccctgcagttcctctaacacagaggtggggcagcctactttacgaatgtgaatgaggccatgaagtaaaagtgaattctccatttctaagctgtgtaacctgtgacaccctttctttccagggccatgaaaccaagggagcaa

SEQ ID NO: 26458 - DNA, 201 bp, Bos taurus
gttccatgaagaaaagtagcccaaatgaatcatagttttgctttcttaacttttctagaaagttgccatcaactttgaccaaggagacccaaacagtcaagtgtgagaagagacatcttggaagtgagcttcatatttcagtttccaacagcttaagccacacatggaggggaggtcctaatgtgatttatagaggcacag

SEQ ID NO: 26459 - DNA, 201 bp, Bos taurus
aattgatgacacagtagaaattagagggatcatgtcccttaataatctttagtagatgaaggggggtatcctacaaaggaagttaatgggaaagacattgataatcggtgagggtacagaagctaaagggttggtgatggaaagatgacaaaattatccacagaccactaaataggcagcaaaggcacaagataagactgg

SEQ ID NO: 26460 - DNA, 201 bp, Bos taurus
agatggaagcaactcaggggagcatgtgtttagtagaagtctctccttagcctaacagatggtcatgggatctacccacagggaacccacaagactgcaggtggagtatttcaaagtgggaggagcccaaaagccctctgcctggagccccaccagttgctgtggctagcccaggatactgtggctccaagaaccacccta

SEQ ID NO: 26461 - DNA, 201 bp, Bos taurus
agctcacagggaatataggagaaaagaaagaaggcctggggccagcccacctgttcgtgttgtggttggtgcccagttccacgagatttgccctgatgctcctccagtggctttggccatggcagtggctggcctgcattgtggtgatgatggttcaggcagttacccccacagggctagctggggggaggaaaagcacag

SEQ ID NO: 26462 - DNA, 201 bp, Bos taurus
accacactgactgcagctgatgcacttagactgacaaaaagacagacatgggtaagtaacacagagatcagcacactcagaatatcctgcagagaggtcagcaaactcttccaagagatgtgagcttcctggttgcaaaaagcgacaccagcaaatgcacaggtgcgggtggcaatgtttggatggcagaaggtcacagta

SEQ ID NO: 26463 - DNA, 201 bp, Bos taurus
gacagtcagcggcagtctggttccagagtccagctgcctggactacatcatgacgtggctgtgggcccctttttagggcccacgagggctgtgaaggcagaaactccagatcgaggatcaagagactcgggctgggacacagctcaggcttgggacagtcaggctggacgcaacaccaaggggccggggtttgcctcctgc

SEQ ID NO: 26464 - DNA, 201 bp, Bos taurus
tcagtattagatgataggaaagaattctttgactagtgtaaataaaggcgataaagttgctgtgatgaagaaactgtcttatattttataaatattgagcaatttagggggtgaaatgctgtgatgtcagacatttgccttcaaatacttcctactgatgggtgtgatgaaaaaacactgatgattattaaatctggatga

SEQ ID NO: 26465 - DNA, 201 bp, Bos taurus
agtctggggaggaccagcagagaataaccgcttggtgagagacaggcaggatatgttgctgagcccctaggaaatctgatttacttcatgcaatacaacccactcttgtgtccctgggcctttgcatatgctgatatctcagtctgggacaccctctccactttgtctgtctggcgaatttctactctgcctttaaaattt

SEQ ID NO: 26466 - DNA, 201 bp, Bos taurus
gtttatggtaacaatatgcccagctcctaaaggatgaatcacgactggtccaggatctcatatcaccccttactcccttggccagctgtgtattgtccttagttctttttcagccatatgacctagctatgcccaagagacattagatgttgactagaggccttggaaagataataccagctaaataaaagaccaaacttc

SEQ ID NO: 26467 - DNA, 201 bp, Bos taurus
atataaaaaaatgaatatggcaaaatactgggagtgctactcaaattaaatttgagaactccaggctacaggaaaacaatggccaagcagaaaatagagtacacacacacacacacaaaagttagtaagcagggaatgaacactaggactaactgggcccaaggtttctgaacaagttgctgcctgtgatgaactgaagtc

SEQ ID NO: 26468 - DNA, 201 bp, Bos taurus
aaacacctgtctgcatcctcagcaaagggctggtgagtgggctgtgtgtttggtcaatgttaatagaataagtggacgaacagtaagggcctccacagtcttactgccttcctgaacccaccttctccttcattttgctttagttacattcaacagatatttgttgagaagtgttctctactaggtagtctaagctgggcc

SEQ ID NO: 26469 - DNA, 201 bp, Bos taurus
gtacccaatgacaggtgggccagaagggtcatagagcaggtggggagaagccctgtggggttggagaggaggcaggcagactgaggcctagaagggtgaacggaatcccaacaggcagagtcagggtggtgagtgaagagggaaggtgtgtgctgctggggctcctggccaaccaactactgaaggattgctgaagggtgg

SEQ ID NO: 26470 - DNA, 201 bp, Bos taurus
gtacttcagagtattggagtgaatattctgaggcaaattaagtatgctctttcatctagaccagcctgagtcaggaaccatccttatttggaagggcctaggaagtggctgattgagagcaattggtgagacgctgttagaagaaccttactgtattcttctccactgttgtcaactgtcaaatgaagaaagcgagactgt

SEQ ID NO: 26471 - DNA, 201 bp, Bos taurus
caagtgtgcagtggaaaataactcgttgccaagtagaggcccatagagtgtatttctcactatggaggctctgaaatgaacctgttggttttgatgctgagaggactggagctggcctggggcggagctgagcactagtggtgccctctggtttgtaccagaacttgaagggttgggccagcccagctgtgtgagtccagt

SEQ ID NO: 26472 - DNA, 201 bp, Bos taurus
aggtcccaccctgggccgtgctctccattctggaaccagttagcagcttttgccttaaggggatgaagattgcagggactgctggccttctagctcagaggttcctttgggggaaagtcaggaagaataggtttgtgttaggtctctgtggagaagttgtagtctgaaaattggggcccaggtatggaagcagggcaggta

SEQ ID NO: 26473 - DNA, 201 bp, Bos taurus
gcaacatgctccccagtcctttcagacctagctataggcattgcctccttcagggagacccccagattgccttaaggtgctcggtcctctatacttcctcgtgcttcccctccttccacccagcagaggaacagctagctccgtgctggtggtgttactgagtccaagcccgctctgttccctgaaagacaggccaatgaa

SEQ ID NO: 26474 - DNA, 201 bp, Bos taurus
caaggcctccttctaaccctttcctcctccgctgggagatccgctcgccgcccgattactctgccctgccaaagcgctaatagccccaggaacctcgagggcccgagggttctgggtcgaagtacccttggttttctgagtgatcctaggggcggctcaacgcgtccagctagtgcgctctcagcaatgctgcacattctc

SEQ ID NO: 26475 - DNA, 201 bp, Bos taurus
ccccctgtcttgggcacaccctacattgtcttaccaggaaagtggacttcccctctcttgggtcccctacacagatctgcttttggccagtgtagaaatcgaagcgactgtgacactctccatccctctgaattgtcagctgcacctcctggagtgtgattgctctcctgtgcagtctggtgaggccccagccggccacgg

SEQ ID NO: 26476 - DNA, 201 bp, Bos taurus
tctaatggggccaggaggaaggaggacacaaaagagtaagttctgtaagggagaaagtgccagaaagtatcaggagagcaaagtagactcttgcgggggaggggtatagaatttgcaggtaaaggccacaaaccagaggggggatatacagctagatttgcaggaatggaggggcagcttcatataacttcattctcacta

SEQ ID NO: 26477 - DNA, 201 bp, Bos taurus
aaatcattttggaagctatttatttttcagtctatgttgcctttgggtcaggcttaagctgtcctcaaactggacagctgcccatcatcatcagtaagctgcttactgagtcagagattgagtgcagctcaggggagcctgtgaagtgatggtcctcccagtaaggggctgtagacagaatcatagaacagaagaatctct

SEQ ID NO: 26478 - DNA, 201 bp, Bos taurus
cttagtccctacttgtaggttccgtgagactttaccaggaggggtggggtggggagcacagagatcgagaagctgcagggagcatgtactaattactcaacagctgaaccaactcacgtatctggggttgattctgttattctaaaagtaatcacagaaaaaatcatatgattttaaagctgagtccaaatattttatttc

SEQ ID NO: 26479 - DNA, 201 bp, Bos taurus
ttaaaaagcttataaacccacaacaaatactttaattacattggatgaatgtaaatcatgaatgccgagcagctggatgctatgaaaatgtaaatgcaaactaatcagtggaagtcgaataaagctggaagcggtataaatcaaaatatccactggggaaagcagaggggctgccatcaggcatttttatataaccacgta

SEQ ID NO: 26480 - DNA, 201 bp, Bos taurus
tgactctgcagatgagtagagctgctggctgggatctctgctcaggcaccactgcaagcagagatacagtcagcaaagacccaagctctgacaatggtaagctctgcctctgttctaagtctgtatgggatccccaatggccaaactctgtaggttccttctttcagtggttcccaggtgagaaacaaatgagcctcctgg

SEQ ID NO: 26481 - DNA, 201 bp, Bos taurus
actggcaggtacattcctcaaatccccagtgaagttgtcatttatactcaagacaatatacattgaaaatctaaaagcagaccccattttaagaccactttgaatgggcccactactgtgatagagcaatgttgcctcttcttttctgtgtaaccagagtcttgatacgtacccagttgtaatgccttatagagacctttc

SEQ ID NO: 26482 - DNA, 201 bp, Bos taurus
tttgagtggaaggtagtctcagaacctaaataaatccttctaaccagagagtcttgggtaaggatttgaatggtttccctgactgtctgaatactgggttcatcattttataaatggcttgctatgtataaaaataaatactacttaccagacacaaaggattaaaaacctaaaatcatcagcgttggtgtatttgttgga

SEQ ID NO: 26483 - DNA, 201 bp, Bos taurus
gatcctcaagtcctggatgctttgacagctctgaaatccaaccttccagccccacgtggttgccaaagctttgccactcatttgttgcttggtaagaactttccccagattcttaaccgcacacctagcaccaagaatcagctgatttccagaagggatatgcaaagtagatgatactgccttcctggtttctgtaatcac

SEQ ID NO: 26484 - DNA, 201 bp, Bos taurus
caagaggatatcactcagggtgcggaaaaaaattaatatgtcaggtagacctcaaggacctacgtatttccactctcaagcttgatggtataaaacactctgggattgtccactatgaaaaatatcccattctgtcgagattgagcgttcctcaccaaactattaatgcacctccataagaaactagacaggcattgagaa

SEQ ID NO: 26485 - DNA, 201 bp, Bos taurus
gaaagaaagaacttcaacaacaacaacaaaatggccatctcttctaagaaggtgtggtctaatctgaacaatgcatgatattaatggactttcttaaaaagttatttttgaagtcatctctgtgggccatctggtgttgaaaatgggagagacagtatcttatgtatctttttattttgtttttaaataatttattttttt

SEQ ID NO: 26486 - DNA, 201 bp, Bos taurus
ggtatttggtgggttatcaagtcagatattcaggtaaaagaacttgacacatcagaagagggtttttttcagtgtgtgtccggagctttaagtcagggtcagattagctccaaggagacggtctttcagttttgaaacagagctaaagaaattcatccatattataaacatgacctggtgtgtgaatatatgtttgagatc

SEQ ID NO: 26487 - DNA, 201 bp, Bos taurus
ggagtgagaatgacagtactgagtactgtgtgtgatgttttaagttttggttgctagtgttttaatgagttggagatgtcccaatccagtcattggatccacagctcgagagagaacaaaagaagagataaatatctgagagtcactagccatgttttggtagaagcaatcttataagattatcccaggaagtgtgtacac

SEQ ID NO: 26488 - DNA, 201 bp, Bos taurus
ttcttgaactttgccagtcaatttttaaaagtcagaaatcttataaagaatctaaagaaaggtttgtcaaatgcagttatgttctagaaaaatggaaacaatacgaagtaagacaaaacaaaagacaagctgaacttcaggtcacaattagtggtaaagaggaacttgttttatgtttttggttttttactttccattttg

SEQ ID NO: 26489 - DNA, 201 bp, Bos taurus
agttcttggtgacacgaagtccttagtagttggcaaaagacttctactataaagcatctagctatatgcttaaaatgcattaaaaatcactgggtgacagattgcaatgtagtcagtctaacagttaatgcaccctcaccctttattaaacttttaaattctatgagtactatatactcactagtgtatggctccatgttg

SEQ ID NO: 26490 - DNA, 201 bp, Bos taurus
tacaaggaaacatgtctcaaaagtctttgtgtttctgttcttttgtttccccaacaaatgtaaaaccctgagttaaatatctattgactttcctgactcctcaagttgtttcaatttgcacaaatgaggaatgttttctttggagtaaagctactaatttggatgcagaacttctctgggcttagtgcagatgtactttta

SEQ ID NO: 26491 - DNA, 201 bp, Bos taurus
attcaatttaattcatcttttttggtaatgatccaatgtgtcttcctgttatggtttggatttccttataatagatatgtgttaggattgatcatttatatttttgacaaatgttttccatgttgcattatctttgtaaatgattaaattgcattctgcttttatattgactttctgagtgggtgtatccaaggcaggaga

SEQ ID NO: 26492 - DNA, 201 bp, Bos taurus
gaatagaatagttttacctttgtcctgctctccagctgcccggagagtagataacagcggtcagagatagccccattatccaaatggaggcaatagaggcactgctcaactgctattcccagcacacagaagccctctcatttgcctctctaattctccatcttcctccccaggtttatcaaaagaattgctcattattat

SEQ ID NO: 26493 - DNA, 201 bp, Bos taurus
aaattcaagttttgtttatagatgttacattcataactgactgcatgttaaaccagcctgccatccctttaggaggtaaactgcagtaataaatgaagtcaaaattctttattcctcgtctggtacaagtcattagttttactaggtaggaggtatttgcaaggttgcattccaaccttgattttcttttttttctgaagt

SEQ ID NO: 26494 - DNA, 201 bp, Bos taurus
gagtgaggaagagcaacaaccctcctccctgtaagaaggtctgaactctacctccttctcgaaagtactgcaccatccaacatcaagaattaaatttaaacgcattaaaattaaaatgctaaatttgaagtaccatatatccagtgaccataatatacttctctctaaattttaatcagcaaggggatatagatttttcaa

SEQ ID NO: 26495 - DNA, 201 bp, Bos taurus
cccagttttggtttcatctgcatggctgtaacatagcaaagcctgaaggactgtccctgttcctgctctaccctggctaatcctcttacgttaccctttgggcactgaataaattacagctaatctacaaacaacaggaggatctgtgcgatttcagcttttgagaacatttttctagggagatgacaagtaaggaataat

SEQ ID NO: 26496 - DNA, 201 bp, Bos taurus
tcagaaatgcaaactgacttctgaaatcatataggtggtatcctcttccaagactatttgaagatcaagactagagcacattttttttcttgactatagcaaattttcccataaacttgattgatgttctatttcactgtagatataaattaaataatttctcattagaaaattgactgtattctcttctcttggagagaa

SEQ ID NO: 26497 - DNA, 201 bp, Bos taurus
agcagataagtaacttttaaacgtgttaaaaataaaatattatttgtctttcagtagcatttccaaagaaatttctaaataggagggaaaaaacataaaaagttttagatctcaacaagaaaatccatcattgcagtggcttgccttgctatcattctagagtccaaacctgtcataataaatgcaaccataaatccatgg

SEQ ID NO: 26498 - DNA, 201 bp, Bos taurus
gttaaaagcatacttctatacttttctattaaaatagaaatagtcatacaaacacatgattctatgagatagaattgctgaagttgtcccagagggcccttaaaccatacgaatttaattttttttctttttgctattccagctgggtgatttccaccactctgtgcttcggatctctggtctgttctgtattatctaatc

SEQ ID NO: 26499 - DNA, 201 bp, Bos taurus
aagtgctttgggtctgtcactagtcatatatagtatttgctacatgtggtgtgtgcctgtgagctgagcacagaacactattggccccatggctggtagaggtttagcaaatctgagttagtacaaggtgtttcacatctactactgagggagagcattgacagcccccagagagggggcatgctttccatttgaatcatt

SEQ ID NO: 26500 - DNA, 201 bp, Bos taurus
tattaaatatcatatgatccaacagagatgaaataaaaatatacagggtcgattttactggctttgactattataaggcatttaaagtactttgaatttatagtgtaacttgagggttgtattaacgacttccttatgctagaattttgttcccagccgaatatcataagcttaatgcagatggcatacttttccaaggac

SEQ ID NO: 26501 - DNA, 201 bp, Bos taurus
ctgcagagcacaagaggcttgagggacatttttttttttagtggcaatttattcctgattcttttttcagaagtaagataaaattgtgaaaataaacaccggaagtctgctagttgaaacttacccattgacaaataacatacgtgcctccattgtcaaaatgtgttcaaaaaggaagagcttaacagtgtctcatcttag

SEQ ID NO: 26502 - DNA, 201 bp, Bos taurus
catgggtgtgcatcagatacacagacacagggaaagactagaagggaagcagtttttatattagcatagcaggataacagatgatcatctgcaaagaacactggtttaaacaaaagtttttttttttcttacacacttaaaagacatctagaggctggcagccctgagttggtatgaagatttcatgaagctatcaacgac

SEQ ID NO: 26503 - DNA, 201 bp, Bos taurus
atgagttccttcctttgattgtgtgcaggtttgagtacaaatgttgtgtatactaacagtatttcataattctcaatatagtattagttattgaaattctttgaggtgaatctcaccaccaaaaggttcacatttgaaaaatctagctctccttggttatagatgatgagactgattacagtggcatttccccagcctgtt

SEQ ID NO: 26504 - DNA, 201 bp, Bos taurus
agggattgaacccacaccccctggattagaaggtgaagtcttaaccactggacggccagggaagttcctaaagttactagtttccattcccatcttctgttttttgaaagtgaatcactgggttcagctcactcaaatggatgggagatggggtggggaattaagctccacctcctgcaatcagatcagatcaatcgttca

SEQ ID NO: 26505 - DNA, 201 bp, Bos taurus
tcttacgatttactctcttaacttttctaaataccatatagcagtgttagttatagatgtcatgttactatgacattcctagcacttaatttgtgttataactggatgtttgtaccttcctccaattctctctcctcttaccacccccccgccccaacaaacttttaaacacttcccctatcttacaatcaagtattttct

SEQ ID NO: 26506 - DNA, 201 bp, Bos taurus
aaagcaaataccttcctggttaactcagtaggaatgtttcagtcctgtgtcagtttggtttctgcagatccttagctggagctccaggctttatatggtgatttagcaccaccatgaggctgcatccagtcagtgcagctgattttgagcttctgaagtgtattataaggaaggtgcagttttttgtttgcagttttaaat

SEQ ID NO: 26507 - DNA, 201 bp, Bos taurus
caagggcctccatagagctgttattagacgcaaacctctctaaagtcttctattagaattagggctggctgactgattccaggaaataatttcaacctggcccactgaaaggaaacaaaaagaaggagggaataataaaaggaaggaaattttgtgcttgtttttgccttttgtttttttttaagtgaaaggatctattta

SEQ ID NO: 26508 - DNA, 201 bp, Bos taurus
taactatacaaatcctttcatatatgccaagtttcagtctggagctcatttctgtgttataaatcttggcatactgaattttgctaccttcattacaatggaattatcctttcaatattcacaggtgcctccctgtgagaggcctccttgagattaatttagccttgagtactttttattaattaaataacattttaaata

SEQ ID NO: 26509 - DNA, 201 bp, Bos taurus
aaatgacgttagctttatgctttaggtttgtacagtgtcatcaatgtcattttcagctaggtcctaataacaaattaaaaagagattaaaagagacagagatatgtctctcggcttccaaatcattaaacagtttctaggagttccagtcattcgctaactaatactttctggccactagggaatattcactacacctaat

SEQ ID NO: 26510 - DNA, 201 bp, Bos taurus
actcttaccagaaagctcgacagatcagaaataccctacagttattaaggagattgagatgttatgagtcagcaagagaaagactgaagggaagaagttctagaataaaacagtttaagggcctgtttaccatagataaatgttttactgaagtcagtaagaagtcatgtacatatttttattgtataactcttgatcata

SEQ ID NO: 26511 - DNA, 201 bp, Bos taurus
gagcacgcacgcatcctccactgagtggacttgagactggaaaagtccagttctcagctaaggaaagattgtttggcttgggaagccagagattctggcagcttgtgggtgacaaaggctctgcatccagctactaagactatgactgcagaccctcaatgagaacaaaagcaagtggaatttctgtaaggtcccgtaggc

SEQ ID NO: 26512 - DNA, 201 bp, Bos taurus
acttagatcatcaggtgggcagatagtccaagatccagaaatgtcctcaaaagtgtcaggatcctcaggtcatagcccaacctaatcccacagaattttcgcaacatctgcttaaacgttctgctgggagcaggcacgtgtttccaactccctcaccttcaatactgaaactcctctctattattagtatttttcttttta

SEQ ID NO: 26513 - DNA, 201 bp, Bos taurus
tttcatccgaatgaaatctactctgaccaaacgcggcgtgcacatcaaatcatcaggatataaggtaagctgggttccagcaggggtgagactcctgtcttgggtccatcctaggtcatttgcattgcgtgtcccagctgctttgggtccacatgatcaatacatgtgactgtgagcagcacacagggttcttagttatct

SEQ ID NO: 26514 - DNA, 201 bp, Bos taurus
cttaaagttttgaaaaataaaagattggggaaattttaagtaaggtttattcattgaaaagacaaatattggtatactaggtaaagggagaaaatccagacagatatgcagtgcataaaagctacctttaaaccaaaggatattaaaagattgaaaataaagaagattaaaaaaagaaagctcagatggctccatcagaca

SEQ ID NO: 26515 - DNA, 201 bp, Bos taurus
atttaagtctgtatataaacacattgatgatacaactgagacaatgaagatgtgctgagtccagcatgtcactggaggggcagcacgagatggagaatgacagaggaaggaagcttgagcgctaagcttgatgtggctcaagcctgatgcaatttcctaatccatcaacatgaagacagggtgaatttagctcttcacctt

SEQ ID NO: 26516 - DNA, 201 bp, Bos taurus
ggagtgtgtgaaagcctgaatgaatttcaggccactattgattacttcaaatgcagaggaaatcatccaagcatgggaagaaggtgaggaagctaaacccatggccgagggttattaatattgtaatgcctttgcttattggcgcagaaaagcaactcttggtatataagggactaaagctttaagactatcatggaggag

SEQ ID NO: 26517 - DNA, 201 bp, Bos taurus
caatacacagagagcagcagaagaaagcagatgtaaaagagtggagataagagaagacaggttgccaccagcgactgaaggaatggtttagtatactgactgactttccagataactgggtgtatgttccatacctgccctgtgtcttttcagtaaattcactttgtacttgagctagtatgtgtgagcttctgttctttg

SEQ ID NO: 26518 - DNA, 201 bp, Bos taurus
ttttctcctctaaaattctttaagtctgggcactgacgaccacgggctttgggggcttgctggtcccatttctgggacctggattgtgcttgcttctaacttcaaaaaacttgagagcaggagccaatgaattctcaaaggcatggaacagtcttattctccaaagtcagagctgaggatcagttcaaaatctggaggaag

SEQ ID NO: 26519 - DNA, 201 bp, Bos taurus
ctattgatagtccttaactattttaataatagaagtatagaaattatgaaattattattattgcacttagagataagtgtttgtgctcatatgtttatacttaatattttcttcaagccattctagaaaacctactttaggagactctgaaaattattctcttgcatttttcatagtttgcttctttctgacttcttgcta

SEQ ID NO: 26520 - DNA, 201 bp, Bos taurus
agtgaaaaaactcagaaggatgctagtgagattacacatctctgagtgtattctacaaccttattctacaaccatgtgtccaacagtatctttcagcattggttaaaagcattttcctaggagacaaagttttaggtcaaatgctttttaaaaattgtaacattattctctgtctttcctacctttatcaagatgtctgca

SEQ ID NO: 26521 - DNA, 201 bp, Bos taurus
gctctgcgggaaagctgtggcctcttgtccgtagccttcccttttggttggtcttgggggcttttccgaattccatgttgaagggtttggagaaggtctcctgcagatatttgtttgggtgggcctgtggaaaatctctagtaagctaccaaagtttacactgtgtgaatggggaaactgtcctctgccctagcaaagaag

SEQ ID NO: 26522 - DNA, 201 bp, Bos taurus
gttgaggccacactgacatgtaatctttggacttcaccaaagttggggctgagggtacaatgtgcatccttgattcttctattcctgaccttccccaggatgcacttctcagtctttgctttgtgagtccacctaaaaccctgctggggcaaacatcagagactgcttaactcgggaggaccctgttctcatttctctttc

SEQ ID NO: 26523 - DNA, 201 bp, Bos taurus
ttcttgatcagcagaatggctagttaactaacaatatgtaaagtatggaagttagaataaagatttttcagatctgaaaaggcctcagaaatcctgctgtcgaaaaataaagaagtgaaaacaagacctggggtgtaggaaatagtagattcaacccaggagaacagtgaaatgatgttccaggtgggagggctatatagc

SEQ ID NO: 26524 - DNA, 201 bp, Bos taurus
ttcttgattcctgtaatctggaaattctttccttctcttttctcttaaccatattttcacttctgatctactttgcatctttctgtataatgtttgtcttgtctctctgctttcccttactccctgaatttttaatgcttttttgtctcttttgcttctatccaaaactaggaaaaaataaaaaggattcaaggtaaaatg

SEQ ID NO: 26525 - DNA, 201 bp, Bos taurus
tcttttcttgccccctggagtaaatgtcaagcagcaatagaagtttagcttttgcagatgctctgcttcttcagatttctctctttcttggtattgtgttcttgctttttccggttcctgcatggtcagtcagtcagttcagttgctcagtcgtgtctgactctttgcgaccccatgaactgcagcacaccaggcctccct

SEQ ID NO: 26526 - DNA, 201 bp, Bos taurus
ctgttgcctctttttaaagtatggttacaccaattttgtctgcatgactgaaaatatgaacacttggtagagcttagaagccttatggtgagccacttccaatctctttgggcttgtctcaaaacagcacatcctcgctctctgtgtcagctacactgatctgccagtcccccaaatgtgtgtgctccttctgcctcaggg

SEQ ID NO: 26527 - DNA, 201 bp, Bos taurus
tgaaagtacaaacaactagaccgtgactgctaagaattagtggccacaaacccatatggaagagtaagcagccatgtgcacacgtggcacccagcaccaggactctgcctgattgtatcttggccaaagacatcacgaggtaccccgctcttctttccacctcgcctcccaccctgccagcatctgtcttcacacttctca

SEQ ID NO: 26528 - DNA, 201 bp, Bos taurus
cccagatgcttgatgcagtgttataggacatactgaactcttccataaccttaatcttgttaattctatgaacaagatatcaaaatatggtaccacacccggaattcttggagaaatatcacagcaatagaaagcatgaatttaaggcatttaccttgaaaagtacccttgaagctaagaagtttaggagagctcaacaaa

SEQ ID NO: 26529 - DNA, 201 bp, Bos taurus
taagggatctcctgtatttgagacacacttttccttacctccattttagaggagtcatcccattccttcttggttgtcaggcccagtcaccccagctggaactgtaagtcccttttcttgcctgttgattgagaggcagaaggaacccaaagtggccaggtgactgtcttaactcctactttagtgggatcattcttgtgt

SEQ ID NO: 26530 - DNA, 201 bp, Bos taurus
gaactttgaatatcttcaacatatttatttattaaagttcagaaggacatttgatgagatcgaatagcttaaaaggatagtcgtgaaaagtataataaaggttattgtagagaaatgtgattgacaatttctgctttaaaagtgcacttggagggagtaaatataagacagggtaatagaaaagcccattttgtgaaatag

SEQ ID NO: 26531 - DNA, 201 bp, Bos taurus
ttggctgacttcctcaggagctttctttagatactgtatgttcacacagtttgttcgggagattattgaggcggaagctagggaagagatctgatcattttttagttacttgactcattctactttgaatcacagaaagaacccacaagttaggcaggtattgtgagatcaaaagatttgaaaggtatgcttggccagaga

SEQ ID NO: 26532 - DNA, 201 bp, Bos taurus
gcaaaacaaaaatatggccatcaggccatcataaaattttaaaaaaattttaaatttctaaatgaactaattcttcacccaccagatctttttagttgaaccagaaggccgacagaaaaatactaggaatgtgtttcctaggatatctgttaagtttatactgacaattaagtccagagagaaggacatgtctccaaaaga

SEQ ID NO: 26533 - DNA, 201 bp, Bos taurus
taaggagaatagcaaccagaagaaaagcatgatgtaagtcttccatgatgttggcaaggttgttttttgatctgaatactggatccaaggaagtacctaggaggttaaaattaattgaaacatagatgtacattaaagaataaaaaagttgaatatagtggaaaacataaaaagtattacattgatgaaacaatgtataaa

SEQ ID NO: 26534 - DNA, 201 bp, Bos taurus
ggccttcttggttttgtggttaagcaaacctgctttcttgagtgatcattaacttacagaggtcttccatacctttttctttacttacaaacttctagtggggttaaataactactttctttgacccttaactctacctatcagtatgactttgcctagctagtatttatattgtaagcgctaaaattgttgataaccagt

SEQ ID NO: 26535 - DNA, 201 bp, Bos taurus
tgcttctggccttgacctccactactagatatgtgttttccgctgaccctcaccccacatgggtaactgcaattggtccccacagaagaatgtgtgcataccacctactctagccattactgtggcctgatatggtccctagctgccgaaactggggggcactgctgagaaagcccacagctttgcagccactaaggacct

SEQ ID NO: 26536 - DNA, 201 bp, Bos taurus
agatagaattaaacatttaaataaggaagtcagaaatggctgcataataatgataatattgcaagctgttgaggaaatgagccatgtatatacctgtggggacagatttccagccagaagaatggtaggaacaaatattctgaagctagaatgtgccaaccatatttaagtgacagccaagaggtaagtagagcagggaga

SEQ ID NO: 26537 - DNA, 201 bp, Bos taurus
gatctcacatatctttctggttgttcccgagtatcctaccccactactggggagagaccttctgggttcccttcgggccatattatggttaggagtgtaccctaaaagcaacgaaccctgccttttaggacagaggagtccctgggtaggccataaatgcccaatctgtaaaaatgacctttaatccagaagctgcctacc

SEQ ID NO: 26538 - DNA, 201 bp, Bos taurus
tagtttttttttctaagacataaaatctaacaaagtagattacacataagattaaaaaatttctatcatattgcagccaaagttattactcatcaataaaccaaagagacaaacccatcaaatttgagtgaaattttctcaattttaacacattttattgttttatttttaaatcaactcagtcactctaagcaaagcaaa

SEQ ID NO: 26539 - DNA, 201 bp, Bos taurus
ttcacaagtgtggcctaaacatgtcatccttcacatcatcccagtgttggtaggattcatctatatagaaattagacattttatttttcaggagtaaactgatgttgcttcaaagacactaaagagtgatctaaaaggacaacagatagttttactacctggttggatggtaactacatttcgtagaacagtgtgataata

SEQ ID NO: 26540 - DNA, 201 bp, Bos taurus
actttgacaggttaagtgcctttggttttgtagatctattttctctccctccctcaacaatgtaaagagtcatatttgcttaactaattggttttactagcttaaaactctgtagaatctttcattattgccatagttcatttactttaagctttagattcaggtatttattattaaaatattacatatcatgaaatgacc

SEQ ID NO: 26541 - DNA, 201 bp, Bos taurus
tccatagttgatgctgagaaacaatgaacactatttttgtttatttttttaacaagttttttactgtctatccagtagcggaaaagaaaatgatgaaaacatattttaaattgacatatattttgctattcaatttttgtgataacattttatgtttaatcttcctcttgtgttttatattacagctgtataatgcatgaa

SEQ ID NO: 26542 - DNA, 201 bp, Bos taurus
tattacagtcatggattatgtcaggaaagaaaaaaatgtatgataactatacgtgctggcagcaaatgcatgaaaaaattgcttgctaaattgttgatacttttgtacaaatgaaataatacaaacacagtgttgtagtttgtatataggttaggtacatatagtatacaaatacaagcaaaatgctgagctttaaaataa

SEQ ID NO: 26543 - DNA, 201 bp, Bos taurus
agaaagaaaatgataatgaaatagtatatctggaatgttgatttaatagaaaatatggttaaattattgaaatctaaagaatatctgtcatccattgatatattgggaaaacatacacatataaaaggggaaattgcagagaagactttattttttttgtaactacaaaatttaggtaagccaagaacacagttttagttc

SEQ ID NO: 26544 - DNA, 201 bp, Bos taurus
ttggtgaatccatctacactgaagatttcttaaaaacagatacccaaatatctagattttaatttttttgcctttctgatatctttagtatttgtagtgacatattcctttttaaattataaatactatcaattatgttttctatttttcctgataattattataggtatttacaattaatcttttgtcttcatagatttt

SEQ ID NO: 26545 - DNA, 201 bp, Bos taurus
cacagcatccaaagcaggagagctacatacactctttgccccagatggtgaggcctgctgtggtgatgttaacacagggaggggacaagtatgtggagcgtgagatgcagaggatccacagaggccttgttgacaagtgagcagtgctcattcctaactcagaccagtggaaatcaagactttctgtttctagtttgctga

SEQ ID NO: 26546 - DNA, 201 bp, Bos taurus
cttaatccatagatcttgggtttggttactatgagcaatccctgaactaagtgcgtcctgttcaaagcatcccatagatgagcactctcactacagaagtgcacttttttaacctctacaaaagagaaagtgtacacaaaacagggtccttcttccttaaaagataatgtaggtgttttagacgttttttgaatgtttatt

SEQ ID NO: 26547 - DNA, 201 bp, Bos taurus
atatcactgacatagcatcacaagttcttactatcttgtaaaggatctgggaatccagcaggctagccaaaattgccctggcagcactcttttgcagcatacattttactttcaaaatgtcaacatagcgtcactctgagatttgttcatctcacaaatggcagagtcagctccttaaattaatcaacctaacttggaaga

SEQ ID NO: 26548 - DNA, 201 bp, Bos taurus
gtattcttaccaaggaccaaggcccacaggggttggggggggggggtcctctttgatcctccccaagtctggtaacactagtaaacgggaaaactcttcccattctcctaggcctgcttctctagtagaaaaataggacagggtcacatacacattttgtttgcatatgagttgagtgaggtagacaggaatcgacagtat

SEQ ID NO: 26549 - DNA, 201 bp, Bos taurus
tggaaaggtcaacatttatgaaatctatcactctcccaatcctcttctttgctgaaaagctctcatacaatcgcccataaacattagctctatacagatctgctccctgtagattaagtttctggaggattttaatgactttcaaccaaatatcacaacatttagacagtgagaggtatgagttaacattcaacaaataat

SEQ ID NO: 26550 - DNA, 201 bp, Bos taurus
actgtaacccagggtggacttattgctgtcaagggggaagtttaggttgatgattcttctgagctgcccagctcagtggtttttctgttgacaatgtcagttctttcttgcagacttagtgttgtaacagagacttcagctatagaaggataatggggatctatttaatagattctctgttgggaaaaaaccctcaatctc

SEQ ID NO: 26551 - DNA, 201 bp, Bos taurus
aaattgaaatcttcttttctagaatttttggggccatgggatgtttcttatgataaaggtgagtacagaagacttcattgtagcagaacaggtcagagagactaggactggaaattaagctggcctccagaagtgagcacaatattctgaggactgacagcgtcagggaaacgtagaagggagaaaggtcattccagaagg

SEQ ID NO: 26552 - DNA, 201 bp, Bos taurus
gtcataatatttctcaactgtaaaatggagataataactttatctaccccacatggttgttctgagaattaaattaggataaacaacaaggtcatgaccacatccacacacagaagttgatgccacacaaatgtttcactgttgcactgacgatgcttaagtcacggtctttgagaaaacttcaaaggcaaatgcattata

SEQ ID NO: 26553 - DNA, 201 bp, Bos taurus
gtcttactataagcaacaagaaaaaaacagacagcaccttcaatactttgcttggaaatttcctaagctagatcacccagttgacaaagtacactttctacatttcacattactacaagaaatgatgtttctaagctttctgccactaaataacaaagattccccttttcttcaattttaccaccattcatcctcagtctt

SEQ ID NO: 26554 - DNA, 201 bp, Bos taurus
ccttccccggaggaccttcccaacacaggggtcaaacttgcgtcttctgcattggcaggtggattctttgccactgagccatcagggaagcccctttcatgtagttacccgctcaatatacatttttgtttagtaaaagaaaaaaatgtagcctatttacgtattaatttttgcaaaaatgtgcttagtttaatgatgtgg

SEQ ID NO: 26555 - DNA, 201 bp, Bos taurus
gtggataattattttctcttgtgggttaagtgctgtactatcattattaattttattgctcagattgttccagctgtggccattaggagctcctttaagatggctcctgtgccctttagacataggcttttttgcaaggggtcatcaggggaggccttttgtttagttgctcagtcttgtccgactctatgcgaccccatg

SEQ ID NO: 26556 - DNA, 201 bp, Bos taurus
atttatagatccctacaagtgaaaaacaagtgtttgtaatcctgttttatgtgttaattaaattcgtactttctaccaatagttgtcatgggcctctcatgtactcagtactgggatgtgccagcaaaggctgtgcatcagagtagcacatttatttagtgccttctatatggcatggtctgttctaggccccatggctac

SEQ ID NO: 26557 - DNA, 201 bp, Bos taurus
acagtgcccctgagtggatgtggaatcgcgtttcatgacagtcactgagatgaagttattcagtctcttctcggggactgatggtatcttaggccaggagtgagctgtgatgtggtaaaacctctctgggtggagatgaatggatctggatatggtctggagaagcttcctagggccctctttctgctgataagagcagca

SEQ ID NO: 26558 - DNA, 201 bp, Bos taurus
tttctctgtgtcttcccctggtatctgtttatgccacgggttccccgaggccacctctcctcgggagacagaaaggttgcaggggcaggccgaaaaaaaaagagagcaggttgggcaatgtccccctcttccacccaacggggcgacgaacggagggttccgatgaaaccgagaggcttaggggaagggtgttagggtttc

SEQ ID NO: 26559 - DNA, 201 bp, Bos taurus
tacggtcattgaatggcagtgggaaatgaggctctccattgttcatccttctttaataagaaagggctgttggtggtgttgcaatgcagagaataaaagggcagtgctttgttttttgttttggagagcagtgaagagccccacatatatctaaatggttttttaccttatttttagttgtgcttataaacacctaacagt

SEQ ID NO: 26560 - DNA, 201 bp, Bos taurus
aagtgtttgataggcaaataaatgaagagggggaggggccatgttttataattctttggcaccacccaaccacaagaccaagcatctagcaagtatgctataaaaattggcccatttgctttgttttctgagagcaggcaacatacatattgcctaagacacagtacctgctcaataaatatttccaagacaaatattttg

SEQ ID NO: 26561 - DNA, 201 bp, Bos taurus
aggcagcagcagaaggccctcctccaccgcctgtctcccaccccaggcactggaatcacacccgcgccccactgcagtctcaggatggagaagcaggaccccgcacagggaggtggggcctggcacacgctctgggcttatctcgccaggggcagcagtggctctggggtcccccagccaggcccaccaccagcctgtcac

SEQ ID NO: 26562 - DNA, 201 bp, Bos taurus
gcaccaacgaggtgctctataaacagggattgactacatgttggctgactttcaggaaaaataactcaagagaatgcttcaggccaatgccattcatcttccaaaaggatccatatgtgttcctctctgcctgctcaggcgctttgatcaatgagaaaaccctgggccagaaggaagaataaagatattgcttgtaacttc

SEQ ID NO: 26563 - DNA, 201 bp, Bos taurus
ctctcttggcgctgtcttgggtaatccttgcagtcccattttaaagatagaaaatcaagtcttagcacggccaggaaacttgtccaagatgctccaggcagcgaggagcacggctgggaagtacaccgagagctttctgactcccagcacagctctccgctgccccttggctgtacctcgtgagcgtctcagttgtttgtg

SEQ ID NO: 26564 - DNA, 201 bp, Bos taurus
gatgggtctggcacagtgactcaccctcccccagctgcagggcgggatccatgagctccatcatgtattccacgttgagaagcatctctgtgaggttgctgcgggccaggacgtacatgagcaccggcaggaagtcgtctgccccgtagggcttccctgggagaggaaggaggcggaaggtggtgagtgcgaggctctcct

SEQ ID NO: 26565 - DNA, 201 bp, Bos taurus
gccactcctgcccagctcctgggtctgagctcagcttttggcgacacagggctggggggctggctccaggaccctaccgtgacaccgctcacattctgctctaatcacagctggcctgggacaggcaagtcttcatgggctcaagcttggcccctggaagggagcagcacatcaccctgggaaggactgaggcagatggct

SEQ ID NO: 26566 - DNA, 201 bp, Bos taurus
cttaacgccctcccagctaatggagatgagtagaaaaggtgacagtccaaactcaaacctctttcccgcaagctcattcagggaaaaccccaggaagctctacctggccgagtcgcctgccccgaggaggatgatcgctcgccataatgcttctatccattctgggagggcagcagcagaaccatgccccacgcgacacct

SEQ ID NO: 26567 - DNA, 201 bp, Bos taurus
tcctccatgcagccttcttggattccctctgctaacagaaaccatccttcctctaattcccagggcatgatatttgtgcgtgtctttggctggagttccaccgggccatggtatcacctccctgtcagtccctaagtcagctctggagggccgtcccctaatacggcttctccttacctgctcctccagtaaagggggcag

SEQ ID NO: 26568 - DNA, 201 bp, Bos taurus
aagtgcctcaccttccagattatgagatgatttggcttcagaccagcctcttctcccctcgccctcccaccgggcacctacacctcccaggcctttctccttgtgccttgagtccctcatgaaaacccctgctgcgtcctcattggagcctgggctcccctcccaggggccgggctgcagttaggcccgagccagctggtc

SEQ ID NO: 26569 - DNA, 201 bp, Bos taurus
actacttaacaaatggagtagactagagaatccaggtcagacacgcctaagaagagtcacctgctatgcggcaaagagaccactgcaattcagtgggaaagaaagatcctttcaaagaacagtgctggaaggtctgaatattcacatggcagaaaaagaactttgacctcatctcactccacatacaaaactaatttaaga

SEQ ID NO: 26570 - DNA, 201 bp, Bos taurus
tggccctcggcctccactccatccttcccatgttctggagagccatacagaaggcaggctctcatcttcatccctagcgcctccctggtaccagcaagcttctctaggccttcccaagctgctgaccagcgccggctccagccgctcgcgggcttttccatttctggccccatcgggagtagacccaagacagccggcaga

SEQ ID NO: 26571 - DNA, 201 bp, Bos taurus
ggaaacaccttggtttcagacttgcagcctccaccactgtgagactgtacattcctgctgttttcagcctccgttagtggtgctttgttaaggcagccccagaaacaaccacaggcctctggctgtacagacctctgtgtgggcttgctcctaaagtcctcagcagacgaaggtgaatttctggaggacggctgtagagta

SEQ ID NO: 26572 - DNA, 201 bp, Bos taurus
ggtggggtagcctcgaatgactgctccttgctttctgccagctttccagggagaccctttgtctctgcagtgattatcagccgaaaatcaccccctttgcgccctttcaatacttccatggttaaccccacggctggagggctgcctaacgacatttttatagcctgctgcctctccgcttcattaagtccctgctgtggc

SEQ ID NO: 26573 - DNA, 201 bp, Bos taurus
tgggaggttggccccgagctgctgcattaatggggttaccagcctgacctccaggtggctttgaccttcacttgacctgcagctcaagtggcggtcatgagcgctgagcattagcgtggcctttggggattgggagaagggatgttgcaccgcctctctggactctttgtggaaccgctgagcagagcgggcctcgccgtc

SEQ ID NO: 26574 - DNA, 201 bp, Bos taurus
atgccaggcctccctgtccgtcaccaactcccggggcttgctcaaactcatgtccattgagttgatgatgccagccaaccatctcatcctctgtcattgacgcccaagaattggccctttcgaccagaaccctgagtgaccctaatgcaagttctccaaagattcagcttgccgattccccagttacaaaccccagtccct

SEQ ID NO: 26575 - DNA, 201 bp, Bos taurus
aggactcttctagcccagcacccaacagtggccaagagcatgtcccaacaaaaatggtctcagtgctatcaatggcttattgatgtcatgttaatatcacgtatggatgtgagagttgggccataatttgtaaagtaattagcctccaattaagatacattaatttaaaaaattcaaaaagaagagagagagctgagtgcc

SEQ ID NO: 26576 - DNA, 201 bp, Bos taurus
acagtgggacaaaggtcagggtctcagagacagggactttccgaatgcagaagaagaatctggagtcaatggctacggcaagagaaagagacccctggccaccttgggtcactggaaacctcaccccttcttccctccttcttgtttagtcactcagtcttgtcagactcttttgtggccccgtggactgtggcccctcca

SEQ ID NO: 26577 - DNA, 201 bp, Bos taurus
acttgtgctatatttgaggaaaccaagtctcagaggccttgtctctagcccatgtcatgacttggcattgggcagggcttggaattcaattgaactaaagttcttctccaatgcctcagcaagtaaagaatctgcagcagactagggtttgatccctgggtcaggaagatcctctggagaaagaaatggcaaactactcta

SEQ ID NO: 26578 - DNA, 201 bp, Bos taurus
ctgtttctatcttgactgattaaggctgatgctgtataaggatgactcagtgaattttccttggcttttcccaagggttcctattcatccccttggtctgcctttttcaaaattaggaaaggggactattgaccaaaaaaatatatttgagaatttggtcaactcactctctcattcctgtagtagttgggagtatggcct

SEQ ID NO: 26579 - DNA, 201 bp, Bos taurus
tcacctagagaagacacttgcagagaaagcccgaggtctaaagcctccttctagtcatctgtaactggatatctgtgacgaggagccaagctttcgtctcaagcagtgagccgtgagcccaggccttgattgagagggaaggatgtagcccatccgtggcaccatgcctgctgtcatcctgagctgttctcaggccggggg

SEQ ID NO: 26580 - DNA, 201 bp, Bos taurus
gactttccaaactccagagctcagctggccctcctccgcctagaacttcagcgccctccttttcctgaaacctctgcgtaaagtccgaactccctggaccgcgtccaaagtcttgccactctggccccgcctcggtccagccccagcctccaccagccccaccctccccgcctgcaggacaaccaggctctgtgctgcttg

SEQ ID NO: 26581 - DNA, 201 bp, Bos taurus
caaagagatgagaaagctgggtgaccactgctaaaccttccaggcagagagcagcaggttctaaggccccaaggcaggagggacagtcctggcccctcctcgtctctccacgctcatctcccaggaaccccacactccatcaccttgggtgcaccccatgcttgcctgccttcccatctgccttactcctcctttccctgg

SEQ ID NO: 26582 - DNA, 201 bp, Bos taurus
cagctatggccatgggctgccaccgacttccttctgggatgggtgcagcacagaatatcaggtttagtgatgaagggtctcaattctcacatttttaagtagggaaactgcagtgattctgggccactagcaggcaagtttactgggatatcagctcctggagcacagcactggaaggtctagggggagggtgggctcact

SEQ ID NO: 26583 - DNA, 201 bp, Bos taurus
acagccagtccctgtcctggtggcccctcccgagtctgagatgctcagcgctctcctattgggtggattttacagagttcatgtctctcagttgagtttcgtcagccccaaaggggccaccacgccgtgtgggtttctggcaccttcgttcagtgggatacagtcaccgtggtccccggggcggagtccccagggcgggtg

SEQ ID NO: 26584 - DNA, 201 bp, Bos taurus
ctactacggtttgactttggcaccagcctggagatgccacttctgggcagtgggcaatagcagtgggcagcagagctggcttctgctgtgggtgggcctgtgagcctccagggggagatgagagctgttccttgttgggtgtctgtgagttgagcagattgaaactttctccttgtctctcaggagggatttgggggtatc

SEQ ID NO: 26585 - DNA, 201 bp, Bos taurus
gagaaacatcatctcacaccgcaagtgggggaggaggccccacaggtgctattttagtgactcggggcaggtagggcctgaaagggccagctgggggccccacagcctgacttattcaccggatccctgggcacgccaggtgtcctcacgtgcacaatgtgtgttcctgcagtaagaacagaggagtgagcatacgtctct

SEQ ID NO: 26586 - DNA, 201 bp, Bos taurus
cacagcctacttgccatgacgtcaaccacctaacagccaccgcggaaagcgtctccctcctagtgggcttttccgcaggccaagtccagcttatagacccgatcaaaaaagaaactagcaaactatttaatgaggaagtaagtagcaccctgtcttagctgttaagaacccctataagaatgtatacgttcttaccgaggg

SEQ ID NO: 26587 - DNA, 201 bp, Bos taurus
ggcggggggagccgtgaggacccctcagagaagcacaggccaggtgttggggctcagaggaggggctgggagcccatcctgtaggcttcacggccccactcggcgctgtgttactccagcgcttgagagtcacgagtggcattgactctggctgccctgtggagggggcgagggcggccaccacggaggccaccagggtcc

SEQ ID NO: 26588 - DNA, 201 bp, Bos taurus
ttcccctgagacccccaagcccatgccccagccaccctgcccaaggctggatcctgacctaccagcgtccctggagacggccctggagccctcaccccctcggtcaccttgtgaaagtcgtgaggaagccccagtagcaagggcagcagctcctgagctcaggctcctcgggctggccctgtgtgctgagcaacaggaaga

SEQ ID NO: 26589 - DNA, 201 bp, Bos taurus
agcggggcgctctctcacacacagctctagacaccagtgcagatcccaacccaacaggaagaggcgtactgtgtgtccccagaggaagaaacaccactcacggccaactggcagaagaagaaccacctcctccttgcctggcaacaatgcagctaaggaaaggccaccaaacttcaaactcccagtttcctccaaaagact

SEQ ID NO: 26590 - DNA, 201 bp, Bos taurus
actactgattcagaatgacttatgatgcaataagtaaaccactgtgtttcatttcttccaaaggaaatttctctccgtgtcctctgcccttatagtaacacacaaggccctgtaagatccttacccatccacttgccaccaacaccttcctgcttcctctcctccagtctgcccctcacatgctcagctccagctacagac

SEQ ID NO: 26591 - DNA, 201 bp, Bos taurus
aatcagaagaacgcaggattttgaagacctttgagggaactccatgcccatgacgtaaatggagagaagtatgggagggcctcctggccaggctactaacagggcttttctaagccccttttactgggtcaagagtgaatcatggagccctgagtgtctgggcaaagcaggagcctgaaggccagggaccaacctccctgg

SEQ ID NO: 26592 - DNA, 201 bp, Bos taurus
atatccagtagtgtgttttggggtgtctatgggttcagtatggctttgagcagcctgtctactaatgggcaggattgtgtttctattttgctaatggtttggtgtgaggcatctgttactggaggtttctagcctttggctgggacttggtcttagtgttgagatgaaggcctttaagagagttctcattaattaatgttc

SEQ ID NO: 26593 - DNA, 201 bp, Bos taurus
ggagtcactgtggatggtgctctgtgtagtatcagcaaatgatgctattcgtgcagtgcccatccaaccctggcctagtccctggctggcctgcccccagcgtttccttttgtcttcctcgctgtgcttagcctcctctccacactgcagctggagggctcgcagccctggggccagcgatcctctcctaacactgaggcc

SEQ ID NO: 26594 - DNA, 201 bp, Bos taurus
aaataaagttagtttttgttattctatttttagctctctttcctgcccctgccgtccaccaaaataggaaagttggatttcatttcaagtttgcaatttcccactgaaagccccactgagctcttcttgttcctttgttttctggtgggaaatattttttctctctttctgagggagagtacgctgcaaaccttctctcat

SEQ ID NO: 26595 - DNA, 201 bp, Bos taurus
tgctgtttggcctcatattgtttatgataacgtatcaactcagacataagagggagacagatgttgcttgagaatcattcctctcatcaatggcatttagtgattctgcaatactctggcctggaaaatcccatggacggaggagcctggtgggctgctgtccatggagatgctaggagtcggacacgactgagagacttc

SEQ ID NO: 26596 - DNA, 201 bp, Bos taurus
ccacaaaggtactgaatcaaagcctccaaggactagagctagcaagctgcattctaccaagctcctcaggtaacctactcgaggccctaaggcaagtcagcttgggtcctgacccagtccagctaatcagggtggaccactgtgccaccagagggaagcaaagggcagcagaacagaggcaggcctgatgggagagcagaa

SEQ ID NO: 26597 - DNA, 201 bp, Bos taurus
ttactggagctctgttaatagtgaagaggccacactccatacagaggccttgagtggccttgagataaatcctgaagagacctaacataagaattcaggatttctgcaacccagcaaatgtgaaccttgagtgattgttgggttttagagagacctgagatgatagttatttgaggtagaatgacaatgtagaggaaagaa

SEQ ID NO: 26598 - DNA, 201 bp, Bos taurus
cctgctgaaagccttcagttaacggcaactttgtcccattggagaatataactggttgtttcttgccataggtaataaccactttgcactttgttttctgaaagtgtggaaggtatactggaagtttgaagtacatagtatttattttggagatctacagttctgctatgtctagaggaagttgaaagctgcatgaagatc

SEQ ID NO: 26599 - DNA, 201 bp, Bos taurus
ttttgccaaatatcaaaatgaatcccctcggatagctgattattttactcacttcacccagactgcctttcctatagattctaccgcagaatggccagcccgtttcccaagagccatcccctcccctctgatgctcttcctccccaggagcccctcagccagcacacgcaccactcctccaggatgagcgtctcgaccagc

SEQ ID NO: 26600 - DNA, 201 bp, Bos taurus
gggctgcctcaaatatacacgaatgggacgataacacttcctacaggaaagatgagtattgacgttgatgtcaagtgtagcccatgcacacgcatacacacgtcgtatgcatgccgtggtctccactgatgcatgctaacaggcttggggcggtgaagtcttccagctgcctgactgggatgcagcagcggtggaggagac

SEQ ID NO: 26601 - DNA, 201 bp, Bos taurus
aaggcccttaagcagtaactggccccacccacaggccacacaaagctagtccactggtgctcgtctattacagtgtaacagataattctctggaggccgcatggaaaatgttatcattttggctttctacaaaaatcttctcaatgatcatgatctctatcagatacctctctcggcccagtctaggtatagggtgatgac

SEQ ID NO: 26602 - DNA, 201 bp, Bos taurus
gtccaatagaaatatacctgttctgttctttaaaaaaggagaagggtctggaagtgatggcagaggagtgggagtagaggctgggcggccaacacagactgaaatccctcacaggagatggacttgaaattgatggtgggggtgggggtcacaaggatggggagatgtgctccttctgtatctgaaataaagaagaagcct

SEQ ID NO: 26603 - DNA, 201 bp, Bos taurus
ctaacctgtctgcttacagaattgtcacttgtctgcctagaactcttctgatctccccattacccttgagcaagagttcctgtttctttatatggcttacgtgagaactttctccaatctcatctcctgccatagcttccttaagcggtctccacagggttctgcttcattacaactgcctggagcccatctttggagatg

SEQ ID NO: 26604 - DNA, 201 bp, Bos taurus
ggtaaactaattaaatgatcatattatttctgcctggtattagaaagctaagaaaataacatatcacagtcagaaaaaatagaaaatgggaatctactacacagtaaaatgaaagaaaattacttggattgttcaatgccgggtcagtctcaaaaggatccagtacagacacttaacactatctcagagggggagatagtg

SEQ ID NO: 26605 - DNA, 201 bp, Bos taurus
caacttcacttcacttcatttcacttccaacctgtagtcttctgcacaatggcttgacttcctctggttgggcaggggtgtcaccagtgagtgaaagtaatttgtgtcacttacaggctagagcattaaactactgtgcaaggcctccagagctccagtccctctgctgtgagcccagcgattttgggaatgatgggtatc

SEQ ID NO: 26606 - DNA, 201 bp, Bos taurus
tcaaactgaggagactgaaattttagaggttgtttattgatcatctgtagaaacagtgttacaggtgacacctatttttttttaaaagatcttataaacattgtattgagcaaaaagggaaatcaccaaaccaaatctgtagcacaccatttatgtagattataaaccatgcacacaaacagcacaatctgttttctaagg

SEQ ID NO: 26607 - DNA, 201 bp, Bos taurus
gactcctctgtccgtggaattttccaggcaagaatattggagcgggtcaccctttccttctgcagggaatcttgatgaatacctaggaaacgctacctccgaagcgtttataaacatatacttgttacaaaatggccattttgaactgagttcagcactcttgacacaagacacttttttcaaaggtcttgtttacaggct

SEQ ID NO: 26608 - DNA, 201 bp, Bos taurus
tagtcctgcctcctgggtggacccggaatgctggcctgaggcctcctgcccgtgaccttccagcaatacccggacctggcccagactggcccctcaactgagagggctcagcctaccccccgcactgcccacggtgcttgtcatagccacgcgttccaggaaacaactcactcagaaggacaatgcagatagtggagtgca

SEQ ID NO: 26609 - DNA, 201 bp, Bos taurus
agggtcatatgaaagagtttacgagtaaaccctctgctgccctgatacaaagagcctgatttcatcatgggactaggttgaagaaaactcagtgtaatacgtacatgatgtctggcatggcctactcctctatttccaggaagcattaaaaagaattaaagacagacaaagtttttcagctgcagtggagccagctctcta

SEQ ID NO: 26610 - DNA, 201 bp, Bos taurus
tttgcttgcatctacaaaatcttccatgcaactttccacttgccactctaatgggaagccctatctatacctagactccttttgaaaaatcagctttatagagttatcatttacatacaatgaaattcactcgtttaaaaatgtatagtcttatctgtgtgtttaatgtacacagttgtataactcccaccacaatcaaga

SEQ ID NO: 26611 - DNA, 201 bp, Bos taurus
taaatattttaaaataaaatgacaaatatcccaagatactttaaatcctatgaaaggggcagatccaactgagagctgcaaccatggctcttacgatgaaatcttcacatggacgtgtgcggctgcctttccacatttctgagtctgactctcagctttatctagagaatgctagactcactggccaaaagagaataaatg

SEQ ID NO: 26612 - DNA, 201 bp, Bos taurus
catgttttttatgtttttacattggattgaagagcttgttctcactctcagcgtctttgtgaactttgttgccatgcagtggagtggtgcagagttccctgacttcagttctactgatgtcgacccacctcctttgctgcagtactgccctgtgaatggcatcctgtgaaatgccccgtgaaagcgcatcagggacccgac

SEQ ID NO: 26613 - DNA, 201 bp, Bos taurus
ttttgcagaaagtaatgcctgttgccaacaatttgttatgtaggcaaatattgaaataatcctgtcgataatgttcaggtaacaaaagatgtattaacactactctggtcaataagttgctaaataacatacttagccctctatttcttgatcttaaactttgaacagtcctactaagtaatatgaggatattgttaaagg

SEQ ID NO: 26614 - DNA, 201 bp, Bos taurus
gaggagagagcctcgagaatgaggagtatagcggccgaccgaccgattgagagtgatcatcaaagctgatcctcttacacttacagcagaagttaccaaaacactcagggccaaacaatctacagtcattcagcatttgaagcaaactggaaaggtgaaaaagctcagtgagtgtctcgtgagctgaccacaaatccaaaa

SEQ ID NO: 26615 - DNA, 201 bp, Bos taurus
atctttgtgtgcttgtgttgcacagcgaggccaaacaaatcaaaacacggcagtgtggagcagagaaaggtttactgcagggccaagcaaggggaatgggtggcttgtgttcaaaaacctggaactctcccctgggtttcagcaaagcatttgtaaaggccaggtaaggtagggggactgcaggatatgtgattagccctt

SEQ ID NO: 26616 - DNA, 201 bp, Bos taurus
tcttcctccagcccacgggccagggtagcatgagactagtgcacatgtgcagatggcatcagcaagctcactgcagagtcaaaattaggatgcaagtcagtttgagtcattacgaaggcttggggcctctaagctaatttacggtgacctgcggaggctaaaatgaggcagaatctggactgttctaccattatgagactc

SEQ ID NO: 26617 - DNA, 201 bp, Bos taurus
gtgaaccatcaccctgtgagtagtaaattcctcttacatttgcctaactcctgcaatacagggcatgctaaaatacagccgtaagactctccagcacatcgatcagcttggcattgctctctcatgccccttaatagaataaaatggagagatgcccgatgaatgctgacaaggacaatcccagatcatttttatgagagc

SEQ ID NO: 26618 - DNA, 201 bp, Bos taurus
tggaattcgtggcaagcttgccttcctctgaacaatctcattcttaatggtcttaaccattctgaactgacatgccagaaaattgagtttgatgtatcagactgtcatgacaaatttgtttgctactttgtagtggtatcaacaacatatgagtcacttactttgcatgggagccagttgttagctcttgatgtgaatgac

SEQ ID NO: 26619 - DNA, 201 bp, Bos taurus
taagttagtcaattaaggcagaaaagaaggagagaggaaattgagagaaggcggtatggcctggctctgcgcttcacgggccatgtgacactttatgtatggacagaagctttttaaaacgtctattacttctcgcattgccgacagttatgataaatcaaaaagcacattctagatgcaggcccttcctaacacctgatg

SEQ ID NO: 26620 - DNA, 201 bp, Bos taurus
aatccaaatcctggatttggaacagaagcataatgtgagggatggctataatagcaaaggccaccactacctaagctgagccttcgccatgttgcagaaacggccaggggcccccacacttgagttcacacaacttcgcccacatgctctcaggtcagtactgccatggctccattttccagatgaggcttggaaagtggg

SEQ ID NO: 26621 - DNA, 201 bp, Bos taurus
gaacaaaatataaaacaccttgggagaaggaaatagagtgaacaagggaggaagctggaaggcaccacgtttcagaagggaagaagtgggctcggaaagcgaagctgggaatggaccaaagtgacttcaacttcttcacagatttgctcaaactttcctggcgaccctgccgcagacatgagcatgttgacttcaagatca

SEQ ID NO: 26622 - DNA, 201 bp, Bos taurus
ttcgcgactccatggactgcaacccagcaggctccactgtccctgggattctccaagcaagaacactggaccctagaggcctggaaaagaaactgaggattagcactcctgtgagggtctgaaagccgctccgctcctccccacctcccccaccgtcccctgatccctgcagcctcacaaaggcagaggagactccctggc

SEQ ID NO: 26623 - DNA, 201 bp, Bos taurus
cactgtctacaatgcttactacccggctctatacagagaaagttggccaagccctaatctggcaatataggcaaagcacttttaatacagtaatctagcatggagtaagtactggtaatttatagatatttttatttttacctctgaaggccaaatctgcatcactaatgcctttgttattggcaatttgatgttagatgc

SEQ ID NO: 26624 - DNA, 201 bp, Bos taurus
agtggatgaggcctgggcttacctatttcttccttgcacgtctggtgcctaagccaagatgatgcgggtggctggggctcactggagctcctgggagtaacatcaaggcctcctcaagtgtcttctccagaatgcctcattatcatagccaccttagggtggtcagatttcctactcagcagtgcggaattccaacagcaa

SEQ ID NO: 26625 - DNA, 201 bp, Bos taurus
ctggaaagaggggcttaaggggtgacagggtcggctctggtctgtatccagtctggctcctgggagccacattatgattcttcaccgaggttctccaggcgcagggcctggaaaggcagcagtggcatcacctgagaacgtgaagaagtgtgggttccaggccccagcctggccgtggaaccggaaactctgggtgcatgt

SEQ ID NO: 26626 - DNA, 201 bp, Bos taurus
tgaactgtaggcagaaatttcgctggggggtcggggggcagcattgcaggaagaggcaggaccatatcccaagatattcaacagctggtgtaaagaggagcggtgggatctgaaaatagcccagcttccagctcccatcagggcagagacagtgcacaacagcctcaacaggactggaaggacacagcgccttggcagcca

SEQ ID NO: 26627 - DNA, 201 bp, Bos taurus
acacaccaactggggccaaacctaagggtgagtatcttaagacagtgccgaaatagtatatcacatcaatgtgttgtctttggcctcatatataagaaacatatatatgtgtacacacaggtacgtgtatgtggtatgtcaggaagatggggccacgggtgcagtgagattctagggaaaggggccaccagaactgaggta

SEQ ID NO: 26628 - DNA, 201 bp, Bos taurus
ctatccttgctgaaaccctcttaagatacaggtcaaaataatgcacatttcattcacccacaggaggtgcaagaaaggccccagtgccctcgttatcactggtctccctttgttctctgtctccctgacaccccagcctgttccgccgatacactgcgctacttccggccaaggacctctgcacatgcgctgttagcagtc

SEQ ID NO: 26629 - DNA, 201 bp, Bos taurus
aagtagctatcttcctggttaactatagtgaacgattaagtgtgatagacggggagaaatgtagcaaagcccatttgatcaaagttctctctgtgtcaccatctttggatggcccagcaaacagctgtctgccaaatattaacattttttaccttcctgtgaattatcttactttcctttggagtctgagacccttatttc

SEQ ID NO: 26630 - DNA, 201 bp, Bos taurus
aagcgtctacgatgtccacctagtatggtttaataagctttgtccaaaagttccacgccaattccacctcctggggagcactggggtggtgatggctctattcactgagacaatttgagtcagtctttttacggcttttcagctgctctcagttaaaaactgtgtttggcaacaaatgatggaaaactttacgtacaatag

SEQ ID NO: 26631 - DNA, 201 bp, Bos taurus
catttaagaatgcacagattttctcttttttagatggcctcttagaggcgtgatggccgttaacacaaagagtgaaatcaattacaaagaaccagcaccacccaatgttcagttttctggccccccaggaaaatcttaagctttcaaagcttaaaatgaaggaaacattcttgagagagaccatcaaagttcatttgtccc

SEQ ID NO: 26632 - DNA, 201 bp, Bos taurus
caggtttgggaaggtgacatacttttaaataaatccaccagcttacaaagacaaaaattaagctatggggcaaggctctctgcattaatctctggattatgagcaaaaaacgatgactcctgggaaacccagaagccacccaggaaggctctctgagaatgaacacaagtcatccagccctcctgcctcccgccactgcct

SEQ ID NO: 26633 - DNA, 201 bp, Bos taurus
tctttggtgtgccaatatggtgtattatatcaatcgatttttgaatattgaatcagccttgctattctcaggataaaccccacttggttgtgatgtattattcctttatcatattgcagaattcaagttgctaatattttgctgaagatttttgcatctgtatcatgaaggttcagttcagttcagtcgctcagtcttgtc

SEQ ID NO: 26634 - DNA, 201 bp, Bos taurus
gcctgtgggctgggccggatgtgcctgcatgctcagtcgctcagtcatgtctgactctttgcaaccccaatggacagtagcccacctggctcctctgtccagttgcaatttttacaggtggcaggccacaaatcctcccccaacccttgttcagttcaattcagtagctcagttgtgtctgactctttgcaaccccacaga

SEQ ID NO: 26635 - DNA, 201 bp, Bos taurus
aaagtgaatcagctacacatatacatatacccttccgttttggattccttccccattgaggtcaccacagagcttgagtagagtgccctgtgctatccgtgggctctcattagttatctattttatacacagcatcaatagtgtatacatgtcaatctcaacctcccagttcttcccagcctctttcccccttggtcttca

SEQ ID NO: 26636 - DNA, 201 bp, Bos taurus
agcttttcctccagcctgaaatgtgggtcaaaagggaggagaaaatggaatcattctccttttactctttcattactctttgagtatatttgctgatactttgaaaatggggtgattaaaactaggtaaactggatcactttcccccgacccctggaatgtagaatgaacttcatacctggaagagaacatagcaattatt

SEQ ID NO: 26637 - DNA, 201 bp, Bos taurus
tttcctggtcctaaatctgtctcagattactccaggtattgttcataatttatgggaaatcagaatgtccagaagatgatagaaaggaaaatgtttttagtatttgggatgtaaggagaatggtttgagagaaaatgaaagacaaggcacctactggagaaacatatacatttaatatttttttcttgatcacttttgtca

SEQ ID NO: 26638 - DNA, 201 bp, Bos taurus
ccttctctgttggctgtctcctttcccctctccattctgtgtattttctcttgattcacttctctcgtcagttataactaatctgatgttaaggctagccgtccattgagttattattttcaattttagaatttttccccatgccacatctactgtttctttttatggtttatagcctactactgacagtctttgatctag

SEQ ID NO: 26639 - DNA, 201 bp, Bos taurus
agagatgggcggcacgtacttactctctggaaaatatctgacagtgtttattgagagcctattgccagcgctagagacaggatggccacctggaggggacaccaggactggcggtgggtggatttgtcagttacagtgactgcagaacagctggtgctgagtgggagggggcgggggtgccacatgctccacaaatcaggc

SEQ ID NO: 26640 - DNA, 201 bp, Bos taurus
cactgacaccaaggccaaactgctccattcattttccaaatactttcactctcctacattaacacacgaaagatctattccttacatgtaagatctattacttacaaaaccctcttccctcctgggcctaagatcaccctccttggtaacactaacacttcccttttgggcaaggcaggcagcttaattttaaaattatgc

SEQ ID NO: 26641 - DNA, 201 bp, Bos taurus
ctgcagatctcagggccagggaaggacaggaccagcctggcaactagtctcaggcactcatgcaaaaagaggctcatgtgaccaacgggcagatcagatctggctgccgccaagggccctggaaaaacacacattcccaaagggaaatcgcacgctggctagctctacctggcatgtcattgaactaacgtgaaagggtcc

SEQ ID NO: 26642 - DNA, 201 bp, Bos taurus
cattcctcacgctgcgaagcaccgcactccatcacagacctggcgctcagcaggcaggcgagtgggtgtgtggagtgatggctgcttgtgacctgactggacttgggcagtgacagaacaaacctgaaacacacagactccaccatcgtggctgtgggaccccaactcccactgcggccacgccacgcaccgcccgcctcc

SEQ ID NO: 26643 - DNA, 201 bp, Bos taurus
aaatttacttgaggaggaaaaagtctatgtgctttgaggctctggccttctgatttcaaggcccagcagtttccttagagatggatgtttgaggagatctatgataacaatgtctaatactctactagcctgtacttttggaagtcatggctcctttaactgtgacatgaatcttgagtggtttttcttttcactcacatg

SEQ ID NO: 26644 - DNA, 201 bp, Bos taurus
cctgtcctttccctctaccttctgtttcagggtccagtcagagtcgcacgttgcatttgggggccttgcatttggtggccttgtctctttgatcgtctttaatctgggagtgtcctcagcctttccttgtcgtaggacactgacatttaggagtctaggccattttctggaatgctccacagcctggtgtgtctgcttcct

SEQ ID NO: 26645 - DNA, 201 bp, Bos taurus
ccggagttgttttgtaagcagaggccaagagggtggggaactttctgaaggaaagtctttgttttcacctggcacacgggtgatttgaaagtgagtcagggagagtgaggcatgggagaaaggcctgctttggggagtgatgtcactgaagctgggggcgcggaccacagttaactgtgcctttgaaccaaggatgtggtg

SEQ ID NO: 26646 - DNA, 201 bp, Bos taurus
ccagtggttggagctcggagcatctgactcttccaaggaaagaaaatagcctggagggagtggtgaacggccagggacaaccccccagggcccctgcaagaagtgggtgggcgtaaagccaccaagattctcaaacgagcaagtcgtttgaacaagaagtgagtcaccttccaaataaaattcctgggtaagcaggccact

SEQ ID NO: 26647 - DNA, 201 bp, Bos taurus
ttgtcttattttgtcattcccgcctcttcacaggaaggtcagtctcactgactgagagtgagaggcagggaagccttcccgtggccatgcacacaagtccgtattagagagcagattggtcgctgtctcacacggtgagggcgctgcccgtcttcctgacgtcggtggcaggcggtgcctctcgcgctcgttatgctagag

SEQ ID NO: 26648 - DNA, 201 bp, Bos taurus
gtgaagggaatagcagaaagtatttacagtttcatgaggttctaaataactatataatcatgccccatttgggcatggagtgaaaaatattacagaacagcatcctatggcatctaagcacattcacgtacccctcactgtagaatgagttagcaaggagttcctgtacctgttttcttcctttacacaaacagcacgccg

SEQ ID NO: 26649 - DNA, 201 bp, Bos taurus
ccacttctcctgcagaagagcaagtgttggggaatgaggaagaagggtctgtcttatatatatcagatgagatctgaggcctccagtggtcagtccaccccggtggttggatgtggtgttccccgtcctcaaaaatgatgagctggaaatcggggtgttacatctgtggggatgagctcccctcaaagtgtaagcagaggg

SEQ ID NO: 26650 - DNA, 201 bp, Bos taurus
gatggggagcggctacaaatacagatgaagcttcactcacctcctgttgtggcccggttcctaacagaccacagaccaatatcagtttgttgcctggcctttggggacccctgttctagtccagagaccttaatctgaatctaatcatgaagaaacagcagagaaacctcaatggaggactttttataaaataactggcct

SEQ ID NO: 26651 - DNA, 201 bp, Bos taurus
gccgtctatggggtcgcacagagtcggccacgactgaggcgacttagcggcagcaggagcagcagtattccattgtgtatgtgtaccacatcttttaaaaattgttttggccacatcttacggcatgggagacttcccccaccaggaatcaaacccatgccctcagcagtggaagctcagagtcttaaccactggaccacc

SEQ ID NO: 26652 - DNA, 201 bp, Bos taurus
acagctgacatttattgtgtacattttatgcgtgagacatttttataagcaccccatgtgtcttaagtaaccatcacaacaaccttacgcggaaaataccatttccacattttagagatgaggaaatgaggcacagagaggtagagtaactcacccagtcagatttcaaaaccaggcatcttgtctcagagccggcttatg

SEQ ID NO: 26653 - DNA, 201 bp, Bos taurus
aggctaagaatgttactggtttaccatgaattttagagcagaaatctgtgtcagtatctatataaattgttaacgtgtgaggccagatcactgtgagaaataatgataaacataatcaaaggatcctgactggaggagagttttgttatgctgtcagggtttggttgaaagcacctagcacagcctcggcctctgtcctgc

SEQ ID NO: 26654 - DNA, 201 bp, Bos taurus
aacatgatcatgacccgacagttcaccgtgagatgacccaggccaatctttaacttacaaaaggaagcaatggaagtcagacctgcccaaaggcaagcagattgtcagcagagctgggattaggcctctgtattctgtaacctgctacatacagtccagcaacaacaactctgccacagaagccagttttaatacaaaagc

SEQ ID NO: 26655 - DNA, 201 bp, Bos taurus
acacactgaggaagtggcggcaagcatcccaaccaaactgcacgccaaaaacagagaaattaaagtgacacaagctacacagagacacgccacacataaacagccctccaaggccacagtagataactttctcctaaactcacagagcaagagaatgtaagtaaaacgaagacgcatagagagtcccaaataaggtgaatc

SEQ ID NO: 26656 - DNA, 201 bp, Bos taurus
cgctgcaagtaagcacagcaaaataaataaataaaactaagttaaaaaaaaaagttgctgagagagtaaatatcaaaagttcttatcacaagaaaaaaaacgttctgcaattatgtatggtaaaagatgttaactcgacttattatgctggtcattttgcaatatatacaaatcttgaattattatgtggtagaactaaaa

SEQ ID NO: 26657 - DNA, 201 bp, Bos taurus
gaaaaggaagctgacaatgtgtcctcacaattagctcatagaagggacactacagaagggtgtccaggttctttgttactcaatctttctaacttaagaactatcctttaagtcccatctatccttaatactagccaaacagctaactaacttaagtgacgttgtgaataaaacatgttcttaaaaactaaatgtggtgga

SEQ ID NO: 26658 - DNA, 201 bp, Bos taurus
atccttggacttccctggtgggccagtggttaagactccacacttcaaatgcaggtttgatccacagtcgaggaactaagactccaaataccatatggtgcggccaaaataagaaaaaaaacaaaagcaatattctcaaaccttcatgtgaatgggttcaaatgcagactgaaaagtaaatactgtctaatactattgaat

SEQ ID NO: 26659 - DNA, 201 bp, Bos taurus
gctttcttcttggggttcagaagtgtatcctccattccttagtctcattttgaactttgttacagatatcaataagctcaaggaaattagagtggatgaaggcattggaagtggggatggagagctgggtggatctgagagaatgaaaatggactttgttgtattggatgtggcagagagtgaactttctgggctggtgcc

SEQ ID NO: 26660 - DNA, 201 bp, Bos taurus
aggggtgcgggaggacaggccgcccctgagaatagaggctactggggccgggggtggcacccaagaggctagacttccgctggcctggttttctagtgcacaggtgtttgcaattctaaataaatgtgcagtgtcagggctcagcagtttctcagctgagacttgtaatgagggctgagcagggaaataaggtgggccctc

SEQ ID NO: 26661 - DNA, 201 bp, Bos taurus
ctcagtcttttggtgatggggcagatggcctggctgggcgatagatctgttttgtccaggggacacagtcatgtgtcaggaagagtgtctgtaaacatgaatctcctctggggccttgggatactgtggtccagaggttaatcaatacactgaaatgtgtatgcgccagagaaaggggaaaatgtatgaatctgttgttgt

SEQ ID NO: 26662 - DNA, 201 bp, Bos taurus
attttatttgcccaagtcaaggccagtgttggtcttaatcagtggatctgagtttctcttgatgtttgctgcttcagtggttacccagagctaactgtctcgggccagttctgaattagtcctggagccagggctgggcttagcccgcctaaaccacataaccttttatagtggctaaaactgatgctgggagaggctatt

SEQ ID NO: 26663 - DNA, 201 bp, Bos taurus
tttaacgtgtgaaacacattttaaaatatattatttaattaaaaatgatatttgtcagcttactgctttgccaactcccttcccagagttgtgttgttgccggggcttcagtacaagagcagagtcgactttctagggagcagaggttgggtggcagggtggcagtgcaaggcagagctgcaaagcttttcagagccagca

SEQ ID NO: 26664 - DNA, 201 bp, Bos taurus
tcagttctttcatctgtaaattaaatatactaccctgagtgacaagcacatttctaagcttcatatttctccctttcacatctaaaattctctttatgaatttctcaaatagttttttggtgtgtgtgctcaattatcatgatgcaaatttccttccaagtaaacgcaacctatatttttctgacttctttctcgagacaa

SEQ ID NO: 26665 - DNA, 201 bp, Bos taurus
ttaaaacagttgttccaattttcccatgacactgacttttttaaagagcacaaaccactttgcttgtagaatgatttgactcctgaatccacatcttttactcactggcctggtggtctttgaagtggccaccttgctgataaattgcctaatgggaccctgaatccttcttccagcctgcaggaaaattatgaatgagtc

SEQ ID NO: 26666 - DNA, 201 bp, Bos taurus
gtagggtatctggccccttggatcaacacaaacactgcaggtattttttcctcctttgcttatatttagagagtaatttaaaaatagattacagaaagatggaacactctagagtggctggctttcctagctgagctcttaaaagcactccagattgttaacaattataattataccttcactcctggataccagaaataa

SEQ ID NO: 26667 - DNA, 201 bp, Bos taurus
taccgtgaaaaatgtttatagctactgtgaattctggagcttgatgactgcttgggaagactggatgggagggttaggggcaagtggctggacgatgatgcagccttcttgctgggcattaaggtatgggtagaatttaacttctcactgttaatagggaaggctattcttggtacaagaagcaatttacagaaagatgtg

SEQ ID NO: 26668 - DNA, 201 bp, Bos taurus
gtggtgcagagaaatgaatcacccagatagtaaaatatgaaattatatcctagatcacagcattcataaaagtaagtatctaaatggcaatagtaaagtctataacataacatatacacaaggaaacaatttaagcataaaagcctcccctatgcccttaaataatagactgacaaaactacaggttatggatcagaaggg

SEQ ID NO: 26669 - DNA, 201 bp, Bos taurus
cagcctccgcctggtcagttgataatgaagtccaccttcaccatcatcccctggaaaacacatggtgagtttccaaatagtttaatgtatgttgctaagaaccaaagatggccatgtatttgggaagacatttaatatggacagaaataaaattcaaaaaacagagaaaagaatgtagaagaaaaaaagaccacacttaga

SEQ ID NO: 26670 - DNA, 201 bp, Bos taurus
ctgcaagtaactaaatgcagcaacaacctaaatgagcctgggacaggattctctcgtagagaaacaggagggaagaagagggaataggacctactgactccttgacattggccttgtgaagcccagagcagagaaaattagccaagcccaccagatataggacttagaaagctgtgacaccagactgttggggtgttcgtt

SEQ ID NO: 26671 - DNA, 201 bp, Bos taurus
ttgtggaaattgataaccttggaagagggactctgttatactggcccctgacctgtcccacttggatactgtcatccacaagtttgcagggtcatgagacacaaaatgttgatgggcctctaggctgaaagaatgcaaactgactaaaagaactgctcaatctaggttccgtcttggttttgtcatggcctagctgcatga

SEQ ID NO: 26672 - DNA, 201 bp, Bos taurus
acaagggcccagtgtccgccaacatgaaaatccaaaagtggatcccccgctgctacgtggaggacacggaggccgagaagggcggggcccgcgccgagcctgagtacttccccccagccagcgcggtggagacagaatataacatcatgaagttccacagcttcagcaccaacatggcctccaacatcctcaatgacacca

SEQ ID NO: 26673 - DNA, 201 bp, Bos taurus
atattgtcctgctgctgctgccacacacatgctcttctttctgctttctctgtcctcctctctctgctgttctatttagatggctctggcttttttcagacatttactcttggaattcagtgtcactttatgaattgccatcagaaactcagacctctttgggcaggatctagcctctgagaactcgttggaaaccagcag

SEQ ID NO: 26674 - DNA, 201 bp, Bos taurus
gcagggctgagccctaagtggttgtgttctgtgctctgacctggcacccgcatatttcagtggctctcatgcagtgtggtgaggctgagagtgagcagggggcttgtcctgcccccagacaggcagtacagccagatcctgagaaatggcaccaaggtcatgcaagccagtggcagaaatggggttgacaccaggcagctt

SEQ ID NO: 26675 - DNA, 201 bp, Bos taurus
caaagaatgtgagtttttgatccaataatgtaaaaacgtaccaagaaccactgtgataggagtagcccaacactggggattgaggagagctccagattccactctctggccaggagcaagtcttgttccctcttttcttaaaaaaattatttatttttaattggaggataattgctttacttgttccctcttggggcatca

SEQ ID NO: 26676 - DNA, 201 bp, Bos taurus
tccattaagatccaatctgaaattaaaactcaggatttcaaccaataagctataaagctgttgaactctccctgggatgtagttaccttttcttaaacttcctaagttgtctcttcttagccccagagtggattccttatgaagcctttggaaggatctctgatgttttatggccattgcccatcagagtggggacagtta

SEQ ID NO: 26677 - DNA, 201 bp, Bos taurus
ctgggcccgactgcccatgtgaggcaagccataggcagtcactcctgcaagaaggttcctgtggagacggaggacacagctgctctcacacagctagatgggacctggcctggagaatgtaacagcctctccttgttgtgggcctcctgcaaggatgagccttttagcagagcccctgagtacaggcctaagacaaggcca

SEQ ID NO: 26678 - DNA, 201 bp, Bos taurus
gctctgttataatgtcttttccagatgtttatgtcatggtttaatgagtctcataaagtgaatcgggacatgccatcatttttgttctctgaaataacttatgtaagacttgtattatttctgtgttgagtttgtttaagattggttatttgttctttaaacatgtggatattttcctttagtactttgacaatattccag

SEQ ID NO: 26679 - DNA, 201 bp, Bos taurus
ctggtatgtcaaaatcagaaaattgttacctaaaagtcccagatttcttggttcttttgaaaaacgagatgagctggcttcactgggcctgcacttcctcgtgcagagatctgctcggtgtctttggtggctcacacagtagatctcacctgtggtggtctcatggctgaaggactggagaattggaagcctcagtccagg

SEQ ID NO: 26680 - DNA, 201 bp, Bos taurus
cactactctactgttttaattagtatatttcatgactagtgctaatgcttggtagggcaagaccctgttctcattcaaaattgtctgggctcataagaatcataaaatcatcttactaattccatgaaaatctgctttttattggaattgcattaagtttatacatgtattaggagatcttcagcatacttatttctattg

SEQ ID NO: 26681 - DNA, 201 bp, Bos taurus
cactgtgtgagctagagtgaggactgagagccagtctctcagacagcttccctagctgagttgtaccctctgcagggtgagaggagtcttgcataattctcctgtcctctctggcacctggtatagcaggttgtaacttcttgttacagcttcttgtagtagcttcttgagtccaagtgtgggattgccataaatagaaac

SEQ ID NO: 26682 - DNA, 201 bp, Bos taurus
caaaccatctgtagttccaaggactaaatgtcatcaattccgactattctgtgattggtgaatttcaaaggcttggctgttgacttctttaaagctttagtgttgagagaaattatcagggttagattgtgaaactgcgcaggactaagaacctttgtatgggcatccttagggacaaattgggatcattttaaaaataag

SEQ ID NO: 26683 - DNA, 201 bp, Bos taurus
cagatgaactcaaagatgcagatgattctttgtggctgaagcacgtccactccatcaaagaccttggcccagatctggactgattataactttgagtcacgaatacaaaaactggaagtgaattgtgtcggtcagaaatgtgttcaaccataaataatggaaaatctggcccacaagggttccaacaggcagggaattctt

SEQ ID NO: 26684 - DNA, 201 bp, Bos taurus
tttaggggaccaaccacgcagtgtgaagacagcagaggactgctgatggttcgtgagagagcagaaagggccatgggtcgtgaaggatggatgagaccgggccagtgaaaagaacaacgggggaacactgtgagcaaaagcaaaggtgtgagggacttccctggtggtccagtggctaaaactctgtgttcccaaagcaag

SEQ ID NO: 26685 - DNA, 201 bp, Bos taurus
gacacacagcacttgcgacttaactgggactccaaatacaacaatgaattcctattggccgtgtcctaacatgtggcctaagtatcagctgactcagctgtttagagaaagcatgaaaggagacaggcatgtggtgagagctaacacttggccaagaaagtacctgatgaactcatacacccttcctgtctcagaccacaa

SEQ ID NO: 26686 - DNA, 201 bp, Bos taurus
aaatgtgatagagaacagcaccctggaagctgggggttgatagagagtatgaagattgcatggagctgggagaacatgaattctgacaattcagagaagataggccttgtcaaacagactgagtgaatattcaactgagacctcagaaaagccacaccttactgataacttctggtaacaaaaatttaaaacaagccttga

SEQ ID NO: 26687 - DNA, 201 bp, Bos taurus
gaatggaagctgcgctcacgggagaaggagaagcctgcactgccctcccacaaagacacccaagacgatcctacggcacttgaggattatgatgaaaatcgtcaacccctcagtccagaacccagtaaggagagctgacctaatttgtgtgcccaacaccatggtgtacggacatttaatcaacagggcacttgagagttc

SEQ ID NO: 26688 - DNA, 201 bp, Bos taurus
acttcagtcaacgcttcctctccctggactagtgtttcatcagtgcggccaacactaaatcaagaaagatggacgcacagctaaggccaagtaacagatgcggtaagaaaagtaacagaaaaactctggaactggttgcaactcaaactaggaaaatggcccaaacagagccaagagacctcttccactgtgtgtgtaaac

SEQ ID NO: 26689 - DNA, 201 bp, Bos taurus
ctcagaaattccctcacaaactcagaagttgcagcaacatttgttcacaaggacgcaaagggatgcagtttgtaggctctcccaagagaaggctgtggcagggcaggggtgaggtaggggaggcgactggctttcccctggtgaatgtgcccagcgcagtctgtggtccaaggccccatccacctctgggttgactgagac

SEQ ID NO: 26690 - DNA, 201 bp, Bos taurus
aggcagagagagacgcatgcacacacacgcatatggggtgtgagggaggcagctctgttatctgttggtcctttgatagctcatcacagtcacacctcccagtacactgtggactctggccacagcaagagcaggcgaggagctactctgaagctcaagttccaaagcaggagatacggggagaacaatcagctgtctgga

SEQ ID NO: 26691 - DNA, 201 bp, Bos taurus
cgacttagcagtagcagcatgtgtgtcttataggtcttagtagttaatacacttgggcttctgggccaagtctaaattattttgaaaatagataataaagagcaacagccaagggaagggcatggctgaatctccaagaagtggctgtgacttgaggaaagtataaaagtgaaaattagaacgagtgggcattatggatgt

SEQ ID NO: 26692 - DNA, 201 bp, Bos taurus
gtccggagcagtgaaagccagactgacgtgtctgtctccaacctcaacctcgtggacaaagtcaggaggtttggcgtggccaaagtggtgaactcagggcaagcccatgtccccaccttgactgaggaccagggacctctcctctgtgggcccccaggccctgcgcaggcccttgtccccagaggcctggtacccgaaggc

SEQ ID NO: 26693 - DNA, 201 bp, Bos taurus
ttcaggctgatcccctggagcgcaggggccctctgcattcactttactgcctgggcttctaagacccactcgagaaggtgcccagggtggggcaccttccgcgatttgagtagtcgcctgcggcctacatgaacagagcaagtcccgtgctggggctttattggctttctgcgtaaaccaaggaatatcagcctcttttct

SEQ ID NO: 26694 - DNA, 201 bp, Bos taurus
ctagcataggcccccactgagataagccaagtaagttctcccatctaagtcactacatgagagagtgttcagagaccagcaatccaggccaagtcagtcaatgcacagcttctccctggctatggggccaatttagagccggcgtaagacttcagatggtgagtagagcaacacgtggactgtgactcaccatggttagag

SEQ ID NO: 26695 - DNA, 201 bp, Bos taurus
tttacacctatgggtgattgggcgcccaaggacatctgtcagtgtctgggggcatgttcagcgctcacagtgggacagacactcctggtgtctgttgggtaaaggccaggggtgtggctcagtaccctacaacgtacgttacggccacacacagcgaagaatcagctcttcctcaatgtcacgggcaccgaggttgaggaa

SEQ ID NO: 26696 - DNA, 201 bp, Bos taurus
actgtcaggtgaccgctgatgccccgagtcgtgccaggatgtgcctacgttctgctgctgagtcaggatctgaaggctcctcctctgtttgctttgctaccagcctcactgtgcctttcctcacctcttgcccaaggcctgcttgcttgttctctctctagctatcttctccagatgcctgggacattctcatcatttgct

SEQ ID NO: 26697 - DNA, 201 bp, Bos taurus
agcatcttcacatctgcctcgccttaggtgggaccccagcacatgcggcacctgagccagccaggggcataaaagcctggccatttgggccacacgtggatgctgccaggcgttccttgttgtggaaccctttgcaagataaaacaagtctttggacagcaaagacagtccttggagagacggaggccacatctaggggct

SEQ ID NO: 26698 - DNA, 201 bp, Bos taurus
agggaagtcattttctagggtcacccagctgtcctgtgaaggacatggaaatccccaatgttcattattctttggattcatagacaaggccaagccattaacagcatcactgaaaatggtcctgttcactcagcaacacacgattgccctggtaacactgaatgtggccctttgcccaaaggaggaggatccctacaaaga

SEQ ID NO: 26699 - DNA, 201 bp, Bos taurus
attcaaacataggcaatctaactccggggccagaaacagaattctcagggttctaaaatgctgagatatgccccagaaggcagtctgtctgcggttgtgatgctcttggtgctggccttgtgatgtgcctggacttggtggtttctgtatcccccagctgtgttcccaccctgctctggacaaccttctcccgctgacagc

SEQ ID NO: 26700 - DNA, 201 bp, Bos taurus
ctgattggttctactgatgtttttaaatcgggccacttgggtcattgaatagtgtaatgctggactttccttgggtcagtttactcaacatccaggcagctgtggccagagagatggggccagatggaaaaaatatggcaaatgcccaacttctcctcagtgagttatggtcagagcttcccatcaataggaagaggggca

SEQ ID NO: 26701 - DNA, 201 bp, Bos taurus
cagaggaactgtttggccagggaagctgttggtgaaacaacacaaatttgattcacggaaaatgaacttaattcttgttttgcagtctttgggggatgatgattgatcaaaaacgttattcttttatatttactatgaagttcctagactaacagacaattttgggggcgggggggaagctttcatgagttcctgctctat

SEQ ID NO: 26702 - DNA, 201 bp, Bos taurus
gagaaatccttgagggatgccaaccacatgcttgtcttgatgcagagcactaggtaccagctcgccctctcccacaagcctgccaagatcgatgtggcccaagtaactttcgacctatacaaggtgaacccacaggacttcattggctgcctgaacgtgaaggcaactctctatggcacatactccgtctcctatgatctc

SEQ ID NO: 26703 - DNA, 201 bp, Bos taurus
ctctccaagatgaaccttggggccctcccacaccaaagcatggggctgacctgctgcccaccagggttcctagaggcctcagaaaatatttatgcacagttggcaccatttccccaccagatgctaagttctcagcacaacctttaggtctttctacttctgtaaggaaaccaggaaggccactccacttacattcttaag

SEQ ID NO: 26704 - DNA, 201 bp, Bos taurus
ctccaacaccacagttcaaaagcatcaattcttcggcactcagccttcttcttttatacttctgtttatactaaagtaaaagtaaattttagctgtcatattttaaatcccaatggtattccaggcacttcacattcatcagctcatagaattctcgggagaactctgagtcagtcatcactattcccatattccaaatga

SEQ ID NO: 26705 - DNA, 201 bp, Bos taurus
gaaaagcaaactccacgcagtcctcctctggaaacagaaccccctggtggatgcaaatctttcagtgagtcatgttcagaaagctttgactttctgggccgagagcaaatcaggagagtcagagagactagcagctcctcctttcctaggctgtcagaggttggaggcgagccaggccttcagacctctgcctgaggggct

SEQ ID NO: 26706 - DNA, 201 bp, Bos taurus
gtatggttcttagcttctgaaatttatttaaaacctcctggtgtctgagtgggtgccttggactttgggattttatcataaagagtctctgtagtagagggcaaccattggcacgtgataagaaggccatggtgtttctgtctgcagttgactggtgtcccataaatgtggtaaaatcccaaagttaattctctttgcaca

SEQ ID NO: 26707 - DNA, 201 bp, Bos taurus
gtggccagcacacctccctgcagctggtggcgcggggctcccaccaggtgggcacaagtggaagcaccagctgggagctctgttctgatgtgcactgacgtggccacatggagaccgcctgttcagccctgatgcccccacgcagggaggatgtcacccaactggaggacaccaggccatgggggtgtcaccaaagattgt

SEQ ID NO: 26708 - DNA, 201 bp, Bos taurus
aagagggtgctatttttttaaataactttagaccttaaaaaaaaatagaaaaaagctctacatcccaaacacctagccccagcgtcaggcccagaaagtcaacaccttccattcttggaaaagctttgacggttcctgtatatgcttcctccaagttccagtcctgctcaggttgaactgatttaccaggctgcaggctgg

SEQ ID NO: 26709 - DNA, 201 bp, Bos taurus
ttctcacgtctgcttatacacacacatactcacaatgtgtatatgtatttaaaatttggaatcaccatggagtcaacttcttggatttgactccatttgtaatctctataggcttcatctgtaaaattggcatacggatgctatagacctcctaagactattaaactacatagttctgttgttatgtattattattgtata

SEQ ID NO: 26710 - DNA, 201 bp, Bos taurus
gggcaggcccttcgagggggtgtaaggggtactcgctttaaacctttcagcaggaggagcctaggctgtgagtccacttgagaatgtgcagggcccttgagcagagagcagtgggctggaaccacagcatgaatgtgactggctgtgcaccttttgacaagtctggcctctggacagtgactttcttgtttgcaaaaagta

SEQ ID NO: 26711 - DNA, 201 bp, Bos taurus
catggctagtactctttacacagaccattcccatcccacctctcatccggtccgcagcagtgctgaggggtgggtgggagggatgctctcggccatcactcgccagttttgcaggtgatactgaggtgaggaaagctctcagggagcaggagagcccaggactgagctccagctttctgccttctgggccagtttcctgtc

SEQ ID NO: 26712 - DNA, 201 bp, Bos taurus
tttagtctttaaaagctcaagcatttctctggtttttattctggttgggaagggtgataaagagcaagattcaggccatttccaaaatgtaatctgtcccgatcacttggtaatttaaggaaaagtcggaagggtgagtgggaggaaagtcatccaatctcagaaatgcgacttgctcaggcaggccagacacagggcaga

SEQ ID NO: 26713 - DNA, 201 bp, Bos taurus
agtaaatgtgtcagattttaacaagggtggtggaagcacagcgtggtaggctgaattgcgagtcccccaaagagatccacatcctggccctggaatctgtcgcagacagaaacggactttgcagatgtggcaaagttaaggatcttcaggtgggaagatgaccctggattgtctgggtgggccctgagtgccactccacgt

SEQ ID NO: 26714 - DNA, 201 bp, Bos taurus
ggtggcctgatcacttcatctctagacatgcaattccccacagcttttgcccacaactcttggctctaatgggctattgactcaaagttaatttggcttctaggatatggtttgtgtgtgtgatgtacagtttgcaagaaacacagggctaattttgttttaggaaatgaagattaataaccagcagctggcccattaata

SEQ ID NO: 26715 - DNA, 201 bp, Bos taurus
ctcaagagagaaggctgaggtgaggccaactgcctactggaagtttccaggcaaaagcagaggagataaaacccaaggaggcccagggtgcaggaatttttgggggcatcccattcagtctttgactgagtcctggtttttgtgtgatgagaggaaatgacccaaggccagggggcgagccgctggtgagcgggaggctag

SEQ ID NO: 26716 - DNA, 201 bp, Bos taurus
gagtttagtatatgcaggattaaccctgtgttttcactgctggagggagcatcatacactttattctccatggtgcaaaaatgaccccatcatacatgtacaggccatctgctctccatataccaggatttagaaaattatggtccatgattgtataaacctcagtcacaagagccttaatctttcccgcctgtcctcaca

SEQ ID NO: 26717 - DNA, 201 bp, Bos taurus
ttgtatccattgtatggaagtactgcatttatttaacaattcatttgtccatggacacttgggttgttttcagtgtggggctactataaataaggcccttgtgaacatcatacataagacttcataagggcatatgttcatttgattttgcatgaacacctaggagaagggcttctcaggtggccctactggtaaagaatc

SEQ ID NO: 26718 - DNA, 201 bp, Bos taurus
ataagccaaactctgtggtaagctcaccagtaggctccagcctatcctatctcacaccattcctaccaggcagttccacctctcctctccctgttctcatgaggagaaaagagagactcacagaaacatagagagcctgttgtgaatcagcagaagacaaggactgattttacttacagactctggaaaagtctgaagact

SEQ ID NO: 26719 - DNA, 201 bp, Bos taurus
agtttcaagaaatgcctgaatttcgattccagagatagacgttcagttcccatattaccaaggatgcagtccatgaacaccaagtaattttctaaagctcatacttaagtagtcatcaaaagaaatgaaaagtacacaggaatatgttagcatgttataaaagtttaggttcttcaactcttccattttcctattacatct

SEQ ID NO: 26720 - DNA, 201 bp, Bos taurus
gttctctgtacaagcctgattcaggtctgtatcctccggctccttcctttctctggatgcctcatacttcctaaacatcggagaggcctccctccataccgccatgctgtctcagccatgttacaatattatctcctaccttaggagagggtaggagatcaacgcagacatcaactgtccacctgaaatggacttggccag

SEQ ID NO: 26721 - DNA, 201 bp, Bos taurus
ttttaaacagcttttcagacattggagatatcacaggtttggttctagaccaaagtaataaagtgaatatctcaataaagccagccacacaattattttttgttccccagtgcatataaaggttgtgctgcttatactatactgtaatctattaagtaagcaatagcattatgttttaaaaatgatgtgtgtaccttaatt

SEQ ID NO: 26722 - DNA, 201 bp, Bos taurus
gaaaccacttcattgatctaaggctatcaataattcacagagaatgatcaaaaactggccaccctacttgatctgtaaatcaaagctgtaccacatagcacgacattgctcctcatcagcatttttatacattacaatgcaaattttactctgtgcttccaataataaaatctactgatatgggatctggttgcagtttct

SEQ ID NO: 26723 - DNA, 201 bp, Bos taurus
ctttgctcacatggttcactcggactggaaagccttcaatcctggcctggtgaattccattctcagttaaacctagttcaaatatcacctcctgggttacagtaacgggttctcaggcctctcaaagaggaactcacagtcctgcccctgagcttccgagtgcacccttcctccccgtgagcactctctcgctctgtgtta

SEQ ID NO: 26724 - DNA, 201 bp, Bos taurus
ctcctcattactgctttcagatgcctccctccctttgacctaaaaacatccacagattgaagcttcatccatcaaatcacaccaccaatcaccagcctttgctttatcattctacagtgttatctcctggagtttttccacttgccatactgtcattctctaaagttaccctctcacttctttgtgagttatgtatacttg

SEQ ID NO: 26725 - DNA, 201 bp, Bos taurus
tcttactctatgaaaccttccctcacagccctctggatgcgtgaaaaaatgccctaagccttcctcctctgcttcccagtagcactggtacccacacttcaaaccgggccaagcctcagctatcagtgcttctctggtttatcacctcttctgtcacctctaaaaagcaccacagatgtatctctatctttgaacttagaa

SEQ ID NO: 26726 - DNA, 201 bp, Bos taurus
agatggtgtttaaatatgacacctgtaaccatacggtgccccacactgtcatgggagagcaagcctgaatccaccattaattgggtggagagctaccagtctataatatagaggaaaaagtatctggaaaactctctattctatttttatagagaggcctgtgatggattcccttagaaattccttcctttaaaagtttct

SEQ ID NO: 26727 - DNA, 201 bp, Bos taurus
agaacacatataccaggaactccattatccaaagtcatgggacatattgatgaggtggtcaaagtagagcaaagaagtaacagaaaatggcaaccaagacgatggatgaaagagccaggtcacttttttattaaaaaaaaaaaatccaaaaggcaaagaaaacaggaggacaaaaaaggacagggtacagggaagtaattc

SEQ ID NO: 26728 - DNA, 201 bp, Bos taurus
agttttgactttgcctatcgtcggccgggccccaccccccaacacacacagagggtccgacgcagaccacacttagaactggagacgcaaagtgatctagcagtggagaaaggcctcccagtggggtggcgcttaaaagggtgctctgaatgaaagagagtcctaacgggaagacttcacactttcaacagcatagagatc

SEQ ID NO: 26729 - DNA, 201 bp, Bos taurus
ccgacagatcacctggatcaacacagatgcaaaggaagacatttcagaaggctctgtggttcacatggatacctaagttccaaagatcctggggctttcctttttgttaatagcatttgctgattgtatttctaactccaaaagtaatatgatcaggggaaatttgaattacaccaaaaagtataaagaataaactaaaaa

SEQ ID NO: 26730 - DNA, 201 bp, Bos taurus
atagagcccaatcttctggtcttactcatttacctccaactttaccatgtattcccagcaaagttaagagctgggccattcaaaccaaatcaagctgggcatagaccaggatgcccgctgatgcctgggatcaggtcacatcctgaaacataataaaatccagtggctgcttcctcactgctggacagaggcctctggttc

SEQ ID NO: 26731 - DNA, 201 bp, Bos taurus
actgaacatcaaataaacaacccaaccttatacctaaagcaacaagaaaaagaacagcaacaaaagaaacaagactgtatgatggaccgaattctcagcaaagcaaagagaatttatcatctccaacgccatgaatcagtcttcagtcccttttcacccactccatctcagaggagggaaaaaataaacaaacaaacagca

SEQ ID NO: 26732 - DNA, 201 bp, Bos taurus
acaccatcttctcttgggcatttcgcaacctgcttcgggaggcatcctgatcagggtccacctggggaagaaaagtcatcaggtcaaggattctgcacgccacgcccttgcctcactacaatcactgctctgtccacaggaatggggaagaagcagtcgtgaacatcagcagttgtcaggagaagtaccacagcttcagag

SEQ ID NO: 26733 - DNA, 201 bp, Bos taurus
ccttatctggggccttttccagttggtaacagacaaggccatttatctcaaaatttgaagaatccttagcaagaaaataacatcgcaagatgagatcaccagagaggcatggccaagagttcttcttctgccccttttcataatattccccactgtttatttactgattgaattgttgtggtgggagacacagtgtttgct

SEQ ID NO: 26734 - DNA, 201 bp, Bos taurus
actacagagatagaaagcaaacaccaagtaaagggctgatcatggtgtccttagcaaataaatgaatgaataaatagaaaaccacatgagagaagataatagattttagtattgtttgtttgtgaaagaatgaatgtaataccttttggccaatcacacaggcaaattagaaaatttgataatcaagcattgcatttgttt

SEQ ID NO: 26735 - DNA, 201 bp, Bos taurus
atcattcatttttgctaattttactaggtaatatgtaaaatattttgccctctcaactgatacctatttgatctaattcagagaagtctattacgttagcattcctgctttgtgaataagagtaaatctgaaaatggtatagtggtttaacacagtgaaaatttactgttcccccaatgttagcagggtgaagggggaggg

SEQ ID NO: 26736 - DNA, 201 bp, Bos taurus
tgaggcctagagatgttcagcaatgtgcccaaggtcttacagccagtaagtgggggacacaggcagggtgggttcatagcctatattcttaactgagaccagcttggccaccactgtggacaaacagctttcattttctggtctctgtttccatgaacacaaaacaaagggggttagagagcagaaagctcatggcccata

SEQ ID NO: 26737 - DNA, 201 bp, Bos taurus
ataactcctcttacatagagctgcttctagcattgctgagctaatacacatggtaatttttagaggtatggagggttaaataatttacgataatactatccataatttgttttacttaaaaatttaaaacgtctattctaggatataattatgtctcatgtgggcaggacagttgaattacaacatatttattattctggg

SEQ ID NO: 26738 - DNA, 201 bp, Bos taurus
tacttctgttctcaggaaagccattaagttacattaaacaacagaaaacaagaaaatgttgaattaaagttgtaataagtttcccaaattgtaatagtaacataatactgtaaccattttcaatgctgtagataaaggaacaaaccatagttccaaacacaagtatcaaatggattgtgctaaggatcctaactaacatca

SEQ ID NO: 26739 - DNA, 201 bp, Bos taurus
actgcagccctccaggctcctccgtccatgggattttccaggcaagagtactggagtggggtgccataggagatgtgctggccaatgttaaatggtctggttgcttatttaatagttacctaggacttcaatgccttagagaagattatttctctatggatttggagtgtgcctggcctgtaaaacactgattggtcttaa

SEQ ID NO: 26740 - DNA, 201 bp, Bos taurus
cttgatgacagctcttcgggggaaatataatattatttctttctttatactttacctttgcacatattgaatatgtacttctgaggtgacagaaaatatgctcagtgctactgatgatacaaagacaaaaagatgtggtccctatcattaaggttgctattattacagaaagacagtgaactggatagacactgcaggcaa

SEQ ID NO: 26741 - DNA, 201 bp, Bos taurus
ctaggcttacctttctgaatgacaggccctgaggcttttatctgctgaatctcatgccccatggtttgtggaccacactgaagaagggagttactttctcaaagctcctcttgcttgtgactttagaggaagactcaaggcagaaaaatacagagtgggaacagtctatctcttgatgtagcacccccttttcaaaagcag

SEQ ID NO: 26742 - DNA, 201 bp, Bos taurus
cacaggcctaagtctcaattgtctctgaaaagtgcacctaatgaaatgcatctttccatttgtctagaactaactcctgaccctgtgagcagatactgttcctgttaacatggaaaccctaaactctacatactcattatatactgctccttttattctaatttgatgatgttatgcctttggtcatttctttcattctca

SEQ ID NO: 26743 - DNA, 201 bp, Bos taurus
tatataactaactatccttcggggattcaattagattaagagatccagaatgactgtaactatctctattaataactcaggctaaaatctgacagtttggaaaatggacgtgttattttcatcactttcaaagattgtagtaacaccccttcctcctctgacataccaacacttagtgatccttagaaacagaaagaagag

SEQ ID NO: 26744 - DNA, 201 bp, Bos taurus
cagtaagtaaggatattttttaatattaggaagtgcttgcagggttaaacctcctacatagcattttacttagtatataagagctatgatacatagaaacaacagaaaagaaaggaaactgttgggcaccccaatgcaatcttaatgtttccacttcagtaattttaatatgtgttattaatgatattatgctgtgacaaa

SEQ ID NO: 26745 - DNA, 201 bp, Bos taurus
tctaaagctcatttattctagcagcaatgtcccgaagagactgttgaacagtagttataaataagacccatcccctcccccagttaccttctaggcctcatgctctggctgcctgatgtctttctcataaattccctttgtgctaatgtaagccagaatctatggcctgcaggtcacatacactgtagtggttgcgataga

SEQ ID NO: 26746 - DNA, 201 bp, Bos taurus
aaagtaattagcctccagttacaataaataaattaattttttttaaaaagatcattgggcagtgagaatgacatggctttgctgtactcagtttctatgctccctcatatacacattgtatttggaagatactgacatttaaattataaatttttacactatcataaatattgcatgtaatataaatatgtggatacttct

SEQ ID NO: 26747 - DNA, 201 bp, Bos taurus
agagggagagtttgaagatacatgaaaggagaacagaggaggaggaaatacctgtagttataaagcaatttccacacaaaggagttgtcagagggaaatgctgacgcatgtaaagactcgacctgcacacatatccactcttggaagcacactgaggaagtaagcgatagaaaatgagttaggccaagtgaaaagttcaat

SEQ ID NO: 26748 - DNA, 201 bp, Bos taurus
tatttaacatcttattggtcatctgtcactgtgtgaatggtagtcaataataatttgtcagccaattaacagagttaataaatagtaacagaataagctagtctgcccgccaccagtagtcactagttatgaattaatgtactgaaattctttaacatcacacctgatacccagcaagatggagagcaaacatgacataac

SEQ ID NO: 26749 - DNA, 201 bp, Bos taurus
aagaacctaggttagttttctcccaaagcagtctttcattgaactgtaatggtaggagcatcagccagggtctgtactcaaaatgggaagaatatgtccacggcatactcaaaatcagataatttgaggagcgcttataagaggatatccataaaggcatggggaagttcagttactttatcagctatctattgctataac

SEQ ID NO: 26750 - DNA, 201 bp, Bos taurus
gctgtacagcagattggcaaacattgcaaatcaactcttcttcagtttaaaaactgtgaagatctatggaattatcttttttaaaatggtgttgacttttataaatcatagcaccttatatctgtacatggctggcattatgcagtatatgccctatgcatcataggcattacacacaatacctttccattatttttcatt

SEQ ID NO: 26751 - DNA, 201 bp, Bos taurus
tcttatatatttaaagataaacatatataattaaaccttgcctgtgtgtgtgcatgcttagtggcttcagtagtgtccacactttgtgaacccttggactgtagcccattagactcctctgtccatggaatccttcaggtaagaatactgaagggggttgctatgccagcctccagggcatcatcctgatctaggaatcaa

SEQ ID NO: 26752 - DNA, 201 bp, Bos taurus
ccaccatggctggcatgtttgtgattattttcacttgttgtgaagtcacaggatggctgcatcacactttccatcacattcaaagatgcaggtgggagacggtacagggaagcatttcttcttgtttcttcctttatgaataagtgaaggaatttttcccagaatactttcagtgtatttccctttgtatatcactggaca

SEQ ID NO: 26753 - DNA, 201 bp, Bos taurus
gatgaaggatgcatgactggacccatagaaatgtacaagattttttttcaagtgtgctatctccctgtgggtggttttgaaggggccagaaataacagccatcttccccacgagtttgaaaaacaccataaactaagacccagcactcagcagagggtagccgtgacacccctcttaatccttatgaggctgctattgcag

SEQ ID NO: 26754 - DNA, 201 bp, Bos taurus
gaaattctttattttgaggtatattttaatatttccataataaagacatttttaatgtttattcaatcaatggaaatcagagattatcctgaagtattccaatagcagtaaggagattccttaaggcaaaacaaagtcttgagaactttcactagcttacttgtagaacaaaagaaaacaggaagaaaggtttctttaagg

SEQ ID NO: 26755 - DNA, 201 bp, Bos taurus
agatggcaagggcagtctgacattaattaatccataatgaaaagtgaaagcacaaagaaaaacagacaatttcttattcattatcaattcaattaatcaactagttagacagtagtgggacataaatgctgaaacagaagctagttatcagtttgtccaagtcatagagaagactgggttagatacactgaaaagcttcat

SEQ ID NO: 26756 - DNA, 201 bp, Bos taurus
gttaaacatctcagagaggttacagccacgaaactctggtccaagtttaagcttttactttaatagagacccaatctccccagaaacaaatgtctttgggaatgagacttgatttcaagactaagttttggactaagaactggtagaaagacttcctgcaaattttatatgcctgaaggcagtcacatgggaagaggactc

SEQ ID NO: 26757 - DNA, 201 bp, Bos taurus
gctggaaaccactgtttcttgtccctgtggatttttgtcttcagattcaacacttgtgtagtatggattgatttaaagatgctggtggacaagacagacaattatttagacaacagcatcatttcattagagagaaagtgaaaggtgtgaataagacatgctagctctccaggagatgttgacctgagaacaaaacaacaa

SEQ ID NO: 26758 - DNA, 201 bp, Bos taurus
aggtgaagttgacccacaaccggttttttgtaaataaagttttattggaacacatccattcctatgaatttacatattgcctttggccgctttcatgctataatgacagagttgagtagttgctgcaaagactatctgaccctcaaagttgaagatatcatctggccctttacagggaaaaaaaagattgctgactctcgg

SEQ ID NO: 26759 - DNA, 201 bp, Bos taurus
gtgcacaggcctcagagaatgttcaggaatttgataaaagtttggtcaaagaatctttgtcaaaagcagaagtagtaaccctagctcatgataagtgctgatttggccttataacaaactctgtaatacaagggacctttaaaaaactttttaattgcttttcagtaataccaatatttgtaggttatagagataatgtaa

SEQ ID NO: 26760 - DNA, 201 bp, Bos taurus
gggccagtggagagcacttctcatgtttcaaatctcccagcctcttcttgtgtcatttcttctctttgactaattttcaacctcactccttcacttgaaaggaccctcgtgattattttgggcctgtttgtatcatctaggattatctctttttttaagagcagctgattagcaattttaattcttctgcaaatttaattc

SEQ ID NO: 26761 - DNA, 201 bp, Bos taurus
tattgctgttacagtcatccctgtttatcaacagtttcacttcctacagtttcatttacccacattcaactgtggtctgaaaatattagatggaaaattccagaaataaacaactgatacattttaaatgtcatcatgctttctgagtagggcttaaataacctattctaaataagaaaaaaaatcttactaacctcgact

SEQ ID NO: 26762 - DNA, 201 bp, Bos taurus
ttccaggccaagggcacctctctggttaagtttactttcccagtttctcattgactctttcacaccttctgtgtcctcaaccccacttatgtctctcccccactgtctcccagccagggccctggctgactgtccaggaagaaagtagcagcagtaagacaagaacttcactgtgatgtccaccacctgacctgcaggcag

SEQ ID NO: 26763 - DNA, 201 bp, Bos taurus
aacagaacagtgggtgactgcctatgagcggaagctcctgctcgactgcccaagctgggacatcagtcttgtcctgctctcaggctacaactgaaacactagctctccctgggtctcaggccagctggctttgagactggagctataccatcagctctccagcatctccagtttggtgacccagatcttgggacttcccct

SEQ ID NO: 26764 - DNA, 201 bp, Bos taurus
gtatcaaacctacgtcccctataccggcaggccaatatttagccactggaccaccaggaaagtcctaaaatagtctttttttaaataacttagtcttttatttgctggccttaggccctaagacttccagaagggatgaagggaggggcggcgagccatcctgcctcccagatgctgcatgccccatcttgcttcctgcag

SEQ ID NO: 26765 - DNA, 201 bp, Bos taurus
taggaccagaagtgtgtgcaggcagtcttggggccttagaaagcaacatggaaggcctgcaggttgaattcatccagctgatgcacctaaagtgtatcgcatttctgagagaagcagctgtttagacccgtacctaaccctgtcagtttgtggtgatctctaaggaaccctgccagccccggatggagacaagccagctgt

SEQ ID NO: 26766 - DNA, 201 bp, Bos taurus
agtacagatgaacttacttgcaaaggagaaatagagacacaggtaggacagatgggataccaaggtgggcaggagatgcgcgatgaactgggagattgggactgatgcctacacactgctgtgtataaaatagatagctaatgagaacctactgaatagcacagggaactccactcagtgctctgtgttggcctaattggg

SEQ ID NO: 26767 - DNA, 201 bp, Bos taurus
taaagtatgaagagttgctgtccctcgtgtgcttgttcattccaccgctacttatggagtgcttgcccacagcatgcacaggcctggaggccagggcacctcagtaagcgacgcagagccttatgcaatggacattctaatgagacagacagcaagcatgggagcacgtagatggtaaggccgttccgaactatgataggg

SEQ ID NO: 26768 - DNA, 201 bp, Bos taurus
agctgggcgctgggggagcgtgtgcaggggccacctggccctccagcccatcaggtccctgcttgggagccctgggggcagccgtgacaagaagcaaaagacaaaagggatcctggattgtggcctggaaacggagctttttacagaggcttaggcattgatgttttaacattcaggagaattaaatgctttcgtgatgac

SEQ ID NO: 26769 - DNA, 201 bp, Bos taurus
ctcaactgaacactgtcttacagtctttggaaaaccaagggagcatcccccagccacctcgacctctcagtcctaccgtggatgctgagtgccaggtgtccacagaaatgtcaggcctacagagtcagtctcctccagggcctcctgagggccttccaaggacagcactttcaacttcttcccattcttggagacccagca

SEQ ID NO: 26770 - DNA, 201 bp, Bos taurus
tgtttttacaaatggcccccttacagggaacacagacttgactagttgtggttccaccatttcccacaagacaaacatggtgtggatgtagtcatcgcagcgctgatggactcatctgagagccttgtttatacagcaagcccacggcttttcttggggctcaaggtgccttcattcacagtacacatagtcgttagaaaa

SEQ ID NO: 26771 - DNA, 201 bp, Bos taurus
gtcttttccaatgagtcagctgttcacatcaggtggccaaagtattggagcttcggcatcaatccttccagagcattcaggcatctagggagcatgttagaagcccaaagggccagtcccattcccagggatttgactcagttggggtgggtgaggctccattgcctatcctttcgacaagcacccctgggtaattttgat

SEQ ID NO: 26772 - DNA, 201 bp, Bos taurus
ctgtgcttttgtctctcatctatcagatgggtgtgattaaagtgtttgccatcttcacagagtggttggaaggctacaaaaggataatacatgaaagtagatgctgttgtttgaggaatagttaatatttaataaacactaacttctattcaaagaaattccttaagaatagttttttcctttttaacatttcctgctcta

SEQ ID NO: 26773 - DNA, 201 bp, Bos taurus
agaagggcttttgttggggcttttcttttctgtacctattgtcatttccaggttgccagcttttccaactctaaatctgggaaatatatatggcaaaaaaacccaaaaatcccagggacctcaccattgtgttattccttgggttcctatctttacaccttctgtttatttcatatataatgtttaggatttttcactgca

SEQ ID NO: 26774 - DNA, 201 bp, Bos taurus
gagatgctaccacagaagagactctttatcagtttttttaaaaatttgtgatctgttttaactggcctactttgcatgtagaatagattaagcctaatgacagagaaatgatctgagatcagaatttcatgatcttaaatctggaatgacttgtgtcgagaaatccctggtttaagggatttaagggattaatttccacaa

SEQ ID NO: 26775 - DNA, 201 bp, Bos taurus
ggaagaaaataaataacttcgtattttaccccaattttgttatactaaaaagttagtaaaattgtatagatctcatgggcattactttgagtagttttctgtgtattaaatgaaaatgctgatcccctatttttggtatgtgcgtgaacaagaagaggtactgataaaaacatctcagttcactgcaaatataaacagtaa

SEQ ID NO: 26776 - DNA, 201 bp, Bos taurus
taaagttttacatccacatgtctaatttaaattgtgcattttgtaactgaagctatcaaagatacacaagttctgaaagaaagtggtcagtggaagaaagcacatccttcaactcaattacgctggtggaaaccagcatgtgatatgtcaagattatgtagaatttaaattccacagatggcagaaagtcatttacttctt

SEQ ID NO: 26777 - DNA, 201 bp, Bos taurus
gtcagcagaacactgcatttagcttggtagaaaacaggctgaacggaagattacaagcagaatctagggaggaggtcaaatatggaggccaacagcatgatgcagacgcagaggtaaaaggacatgggaaaatcccatgaaaaacggttcagggagaaaagatttttaagttcaaaagtctgagtcctgagtactaaaggc

SEQ ID NO: 26778 - DNA, 201 bp, Bos taurus
actcaagtctcatatcagatggtgtgggggtcagccctctgtatctgcagattcagaacccatggatagggagggatgactgtagagatctgaaagttctccaaaaccttctttatgaataacaaattaattgcttctcctatcacagtgtctcttgcctccctctgcaactccagctgaataccgtccatggttaaaata

SEQ ID NO: 26779 - DNA, 201 bp, Bos taurus
aaatgaaaacgtcagacccttcttcagctaagcaacaataccccagcatttccctacctgtttgactgcacagtagtttcaagtagacacttttgtggaagaagcattctaagatcaaggggtataacattacatcttcttggagactcatagggaatactaaagactctgagaagtcctgcagcaaaaaataccctacac

SEQ ID NO: 26780 - DNA, 201 bp, Bos taurus
gtgaaactctatttcagtagaactggtttcctttgtattgcaattagaaacattaatgtgaggtgtcctcatcatactgccaagggatctgaaatacaaaaaaggttaagaacctctgagtaacacaccaaagtgtaaaaatgagtactctgtatatacacttctcaggaaccaactattcctgagagattatatgtgatg

SEQ ID NO: 26781 - DNA, 201 bp, Bos taurus
catgcttacacacagggaaaatttgtaccctccacaggctctcaaatgttcatcatgaaaccaatggcatcaattccagccattccaacagggacaccgcatggtgccaaattcttccctggcaggttctgccaatgacatcgcctgatattttgtcctggacaatccaccaacccaaggaggctatccattgaccgttta

SEQ ID NO: 26782 - DNA, 201 bp, Bos taurus
cggcagacttcgccccatactgggagatgcgccaccaggctacacccacccttttgctcccaagctcagctttctcgtacaatgtggcaggcgctaggccgagaaacccataaagagcatcgcttctctgatgtcctttttacactaacaccccagaaggcaagttcggatccacaccccggggccccaaaccttccagga

SEQ ID NO: 26783 - DNA, 201 bp, Bos taurus
ggccattctgcctgttgaatctgaaggcagggagcaatttcattcggtgagtcggattactgtggtgagaaccagttggattgcttgctcttgggaatgtgttatctgttgagtgtcctgttggcctgtaccagttggtgccggtatgaagtgggtcatgtccttcctgctcactcttagaatctcttctgttaagttact

SEQ ID NO: 26784 - DNA, 201 bp, Bos taurus
ttgtgtaaggccttaaatctactgtacttttgaaatagtaatgagcataaatggtatttcagcatatctgcaaaaactgaaatgtgagatgaaaatattcgtgatttcttttggtgataaaacctcaggtacctctgatactattacatttcattgccttatcattgggggaactgctagattgcagttcaagattagtgg

SEQ ID NO: 26785 - DNA, 201 bp, Bos taurus
cgcctagccacatgtgattgtctagtaagttaataaaattaaataaatgtaaaaacctcttatgtcacagttgacacatttaaagtgctcaatagccatatggagcaagtggctaccgtattggacaactcagatacagaacattttcacactacagaaagttctactagacatcatgaaaggtcagacccgtgcactaat

SEQ ID NO: 26786 - DNA, 201 bp, Bos taurus
agtggctgctttcctgtacttgagatcacagcctctccatgattccttcccttcaactgaagagaggaggcaagcatctgcatgtcctgcttctgccaaatgctgagcctgacttctctccatttgcactgataaccacacttgggggcaagatttaattacacaactggggacactgagaatcagacagtgctttgcctg

SEQ ID NO: 26787 - DNA, 201 bp, Bos taurus
aaaacaggtcagatgctctggctgttactattggcatgttgttgctgttcggttgttaggtcgtgtctgactctttgtgaccccatggtctacagcatgcctctgtccttcaccatctcccagtgagcataacaaagagtattgttaaaaactgatactagatgaagggacaatttcgttttctaaaatggttatatttaa

SEQ ID NO: 26788 - DNA, 201 bp, Bos taurus
acataatggctacctttgaaatgaaatgacttttcaaagccctttattggatctcagaatcttgtcagtaaaaagaaagaaacagatggaaattggacacaaagaaaaacgaccttcactcaaaaactatttattaaaatgatagtagaatgcactttgtctgtgaggtgtagagtcacaaataagaaatatgggaaactg

SEQ ID NO: 26789 - DNA, 201 bp, Bos taurus
gggcccggcactctgttgcaggaagagaggttggttgtggtcacagcagtaggtcttgaattgtgaggtggtgcagtgaatcaggccttggccagtattctgtttgggctaagggctagggaaaggaattcttccccataagaccctctccatgaataaccatgaagtccttaccaagaaggcaacatcgactaggccaga

SEQ ID NO: 26790 - DNA, 201 bp, Bos taurus
cttcttactgagcatgtattttaaaatctttcctagctgtgtaatttttccagatctcaggagccagctgtagatgccatgggtatctcacccatattcacttgcttgtacaacttgcgtgcttacctccaggtcttcccactctttgcacctacttttcttcccctgtgggaattccctgcccaccacacagcaggctgg

SEQ ID NO: 26791 - DNA, 201 bp, Bos taurus
atttcatagagaaaggaaaggaaggttgagagctgcaaccattttgatcatttaagccaaaggtctaaaaactatggcccatgggcagtctccaccttgcgatcaaattttataaatagagctttattggaacatggagacagctattttttcttataacgacagagttgagtagtctagggagagagattgtctggcctg

SEQ ID NO: 26792 - DNA, 201 bp, Bos taurus
tttcctttctttaaaaaaaattatttgtttatttggctgtacatgtgttaccggcagcatgcgggatctttagttacagcattcaaactttcagttgcagtctgtggcatttagttccctgactaagggtcgaacccaggccccctgcacagggagcatgcagtcttagcctctggactaccagagaagtcccaacactca

SEQ ID NO: 26793 - DNA, 201 bp, Bos taurus
ttactataaggctgtaagcttgctgcctgctagccttttcagctgtggctctcccgtggctggcacttgtactttgttcacctcttgtccaggcctctctgtccctctctttctgtcaccttaggatggtgacttacacttagagacctcacctgtgaggtagagaacagtactagcgcctggttctgaacccagagtctg

SEQ ID NO: 26794 - DNA, 201 bp, Bos taurus
gtaggatcacagctactgtgcttatacttgtcaggcctagaattccctaaaaggcaaaaagagaccgtggatttgcacaagggtctttgaggtagggccatgggatgtgatcatggtagttgttagcctatgggttaaagattcattcccagatcgggctgacacttgcccccgagcccttccatgtgacagtgcgttctc

SEQ ID NO: 26795 - DNA, 201 bp, Bos taurus
gggtacgaagaagtaagtggagattgtgcgggtagaactttacaggaagagactgatcataggctgaggagtcctctggaacacacattttcctttggccgttcccctgttcctgccgggaatgcagacactgacggagttgaggcagcaaacttgggaccgcatggagaaggcagaagcagacagggtccctggtggccc

SEQ ID NO: 26796 - DNA, 201 bp, Bos taurus
caactcagctgcatgagggccagtgactttctgtttatttgtttattgcctgctctgcatcttcattgctgcgaggggactttctctagttgtgacaacttggggccactctccagttgcattatggtggcttcttttgttgtggagcactgactctagggcacaggcttcagtatttgcagaacatgggctttgttgccc

SEQ ID NO: 26797 - DNA, 201 bp, Bos taurus
tgctgtatctatccttcaaagaggtctggacacctgcttcagtgacattcattcattaacactatatactgagtgttgtgaggcagacaataagaagcctgtaagtagatggacttgataatttcagatcataagtgcttcaaagaagaagaacttgattgagtcctgaaaaatgaggctatttacataataggggatgca

SEQ ID NO: 26798 - DNA, 201 bp, Bos taurus
agtagaaaacctttgttttttgtctgacaatagatgagaaagaagtgcacacctctgtctcctggaacacagatacacatgcgagcacacacacacagacgcacacaacactccctttccacacaacaacgaataaggcatggtttgtagagtcttcccacagttggcatggttgtaaatatactacatgttgaagggtta

SEQ ID NO: 26799 - DNA, 201 bp, Bos taurus
aataagccaaaatattttttcataacctaagattgggcagtatatcctcaagtttccaaaatcagctgaactctatgcagctaatttgcctttacattttttttgaagcttatgtcaattatagcttatgtggtatggatggcaccagccatgtaatttgtgaagcttgccgcaaaataaaaatgtaggcctccttattca

SEQ ID NO: 26800 - DNA, 201 bp, Bos taurus
tttcagagcctggtttgccttatctgatggtggtactggcctccctcttacagtttctcttctgttttcttcactccttcccgtcaacacagtgaggatcatgatggactggacactgaattagggcctgggaatgctgaaaggaagtagatggtatatagatgctgccttggaagaaactcaggcatgcgggggagggga

SEQ ID NO: 26801 - DNA, 201 bp, Bos taurus
gtttcctccctccttactcctcccccctccctttcctccctctctcttgccctccttgtctttctcctcattctcactctgatattcttcctccctttctcccttcacttccccgtctcctccccctaatatttcattggagtttatgtaactgaattaattagacctatttctcaaggagttggttttccataaaattca

SEQ ID NO: 26802 - DNA, 201 bp, Bos taurus
atgcaggacggtgtccaccgccccagctgctgaaatgcgcttggtgtggcctccttagccaggagcatcttccgagtcatcagagagtctggcagagaggcgcccgtgtgaccttcatctggccttcaactcggccttttcttaaaagacaccgtgaagccggacacttgcttttaggcaaacccaccaaaccgaccgcac

SEQ ID NO: 26803 - DNA, 201 bp, Bos taurus
tcaagcagaggagtccttcttgttttttttttttaaaaaacaaaacttccatgcaggaatccccttagggaacactgtcctctgaggccagaaaggagcagcaagtccaaggtgcaagagaatgacggcaccatctgctgcagagtgccgcaccaagttgggaagccacatctttactgctgtttcccactagttttgtgg

SEQ ID NO: 26804 - DNA, 201 bp, Bos taurus
aaaaaatagcaccaagatcagagaggaacgagtattgatcaggaactatctttctgaataaatagggttggctttttaagaagtacaattactgttagctcagtatttgaaggttttcttaggtatgaaccaccctgttgagattctgctcacactgtggattgaccttaatcagctgactcatcgttaagggtgaggccc

SEQ ID NO: 26805 - DNA, 201 bp, Bos taurus
gctttatgggccaacagggaaaaccaaagatattttgtaggtactgtacacatacaatgtttaaaatgtaatcactaaaaaatataaaaaccattcttagctcatgaactaagtaaaagcaggttgtaggctggctggatttggctcaaaggcctaactctgccacccacgctctagtcttaggggttgtggtgaattcct

SEQ ID NO: 26806 - DNA, 201 bp, Bos taurus
tggagccagagaatcactaggaatatatgaagggatgaggactctgtgggctagggtattaagacattttgccccggttcacacatgggatgtttgccacgattgtgggaccacaacactgctctatctcctcacacgtggtgctgctggccttgtattcccagtgatacatgtcctcagaaagcaatcaccgtattctct

SEQ ID NO: 26807 - DNA, 201 bp, Bos taurus
atgacaattattattactgcctaggaatgtcctttaggtattctgccttcaccatggagagtgtacattttatgcttcaggagaacaagcacaataaaaatgaagacagttgaaaagaaaagcttcccacctttccccggatcaactgaatgaatctgcctttctcaagtcgaaagagttgacgtcaagcctgtgactaaa

SEQ ID NO: 26808 - DNA, 201 bp, Bos taurus
acttgtccgagtattcctcctccacgtagtccccctgatctccctgagggagttagtgactttccccttagacattattctgtatcatcacaacatgatatgattgttatctgtttgctttcctaagttgtggcaaatttattttgaatctttgtatcctctgcccagtgcagtctctggcatagaaatgtgactcaatca

SEQ ID NO: 26809 - DNA, 201 bp, Bos taurus
aacaaagcagactcattacagtttgaagggtaatgctaagcttgcttagaaatgaagacagaacttttaattcctagagcagggatcagtaactatggcccaccacctgttgttcataaaactttattagaacacagcaccgctcatttattcagatattgtctgtgtctgttttcatgcttcgttggaggaattgaatca

SEQ ID NO: 26810 - DNA, 201 bp, Bos taurus
tgtcagctgcctggctttaaaaacaggagtcagcactcgaaaatatttggagaaattaggtttagcatgggatagaggctttttcaggtaagggacagagcattttcaagcagacacttgctttcagccaggatcctgaacatcttcaatgttcagcctgactgctgactggggtctgaggagacaatgccctcagataca

SEQ ID NO: 26811 - DNA, 201 bp, Bos taurus
atttttatccttttgggcttatctatggaaaacataatcttaatttgatgtctaatatgcactccacacttcaaatgatactcattcatttcccccttttcccagaagtatttaagctagaacgtaataacactggtacctttgatttactttcacagcttataggcataattttttacatacgtctatcacatgtcaaat

SEQ ID NO: 26812 - DNA, 201 bp, Bos taurus
gtggctcctgagctcagcggcctctccttttgagtttctgggtaaagtgagaactcctgagtatccaagaaagccatagggccaagagtccttcagatgtgccctcaaacatcagtgttttctgcataaacaccgggttggcaaaaaagtttgcttgtgcattacggaaaaacccaagttaactttttggcctacccgata

SEQ ID NO: 26813 - DNA, 201 bp, Bos taurus
gaggcctggcgtgctgtggttcatggggtcgcaaattagtcggacacgcctgagtgagtgaactgaactgaactctccaacttttgtctctcttattctaagctggatttattctaagcttggccttccctttgatggaagtgactagcatttgaccaacttgagtccattgtcttcctggaattttggaccaagccaccc

SEQ ID NO: 26814 - DNA, 201 bp, Bos taurus
ataggttgtgctgaattaaactttctaccggaacctttccaagacatttcacatggattgtcaccaaattgacgccgctgatgcagtggtagttgtgcatataaaatctgttggtcttctctgtggattgatctactcataggcgtggaacatctatttgttaaacttttccctgttcaaacagaacattttctagtgccc

SEQ ID NO: 26815 - DNA, 201 bp, Bos taurus
ttgatggtgtgatcacatgtgctttcccttcctctggccttctgcagataaggtcagtttcatcctctttccctccctgctcctgtgttagacagaaagcaggggtgattggccaaaattgctccttaaattaaattttgcctcctacctccagcataatcataagcctgcaaattaaagatgcagataattttgcaatca

SEQ ID NO: 26816 - DNA, 201 bp, Bos taurus
tatcaagatgagatgagcactgttcccagcctcaagaagctcacagaaaaccggagaaaccagaacataagaatggggaacagtgtgaaaatggccataataagacataaatgaggcaagaaggaggagggaggtctgagaaggctgggttctggtttttcttaccctggctggtgggaggaatgacacaatgagcaaggg

SEQ ID NO: 26817 - DNA, 201 bp, Bos taurus
ataaattattaaaccactctgtgcctcattttcctcatctgtaaaaatgaggattatgacagtattcatgttcaccttgcagaactgttgtgaagatgaacagattccatgtaatacccttggcaacatacgggtggtgctcctttgtcctattcttggaaacttgcacaccaagctaaagtcatttttattatttgtttt

SEQ ID NO: 26818 - DNA, 201 bp, Bos taurus
actctcttatttgataaagagtttttgggtacctcctatgcagcaggcagattgctgaatacttgggacgcaaaagtacaaaaggtagaagagggccctggcactatatggaagcaagtttaaaaaaaaatcaaataaatacgaaagtgaaagtcactcagttgtgttcgactctttgtgaccccatggactatacagtcc

SEQ ID NO: 26819 - DNA, 201 bp, Bos taurus
aaggcatctgtgaggccatgttccttttctccccacagcggtctggacctcagttccagtcagagtttaacaagcaggagctcccctccaggcagttagcaaagcacgggacagacctggccatgcttggaacgggcctgctgccagttttcactgagctcggcttctccaaagccgaccaagcccagtgacccatgtggg

SEQ ID NO: 26820 - DNA, 201 bp, Bos taurus
agggtagtcacatatctatgtatttatatccacctctatcactatttatagtaagagtgagtcctgtttttgttaattggaatggcatcacactgaatacactgtttgatcatctgtttctgtcatctaacagtagaacacggacttttttcaatgtcattaaatataagccaacattttcttttatgatataccataatt

SEQ ID NO: 26821 - DNA, 201 bp, Bos taurus
atatctcacagacttctttggagagtacacaatatatgtaaagaacttagtgcttggtacagagtgagttctgtataagtatttattgttgatgctatcagtcttgatatttataagcaataatgtctattccaagtaattatggtgattattattaaacttagataatacaatagttgttatcttatttccaataagcaa

SEQ ID NO: 26822 - DNA, 201 bp, Bos taurus
acccctcttcatgcaaaaatcccactcttcatgatcaagcgcaaaattgtaagtgtcacatgaatattgcttaaaatattaaattcatttcagtaaatattaattctgggcctatgctgtatatgaagcatttgttaggttacatgattgtattaaaaatgaatagatgttttctcttccctccagttaaagagcttaaga

SEQ ID NO: 26823 - DNA, 201 bp, Bos taurus
tctaatatgtaggaagaactgagaggccagagcagaagatgggaggtgttaaggctgaactgaaactggaacatgcaagttattgcaggcaatgttaaggacttccttcttaatcctaagattggcagggaagccattgaaaagttttaagtgacaaagaggaataattcaatcagatgtttatataagaccattttggct

SEQ ID NO: 26824 - DNA, 201 bp, Bos taurus
gaaatttgtctgaatagcagaactgtgatacttagagagttatttaaattcttcaaaaagtaaataggtggagatccattcagtagaggcctgagtacagttgaaattctggatgaatactaatgaatatattactgggagtatttctacaccactgtgagttggtctagagaacctgttaggccctttgcttactaattc

SEQ ID NO: 26825 - DNA, 201 bp, Bos taurus
aaaagaaactctttgaaaagctgattaaaacataattttaaatttcttttcacacactcccatgactatatctcctaaaatgagaagaggctatgtgttctctctgagctctaagccaggcctcccctctgtggtagagcatcttttgatttttccattgtaactattctttgtcaggtggtatcagtgaattgtcagacc

SEQ ID NO: 26826 - DNA, 201 bp, Bos taurus
cctgaggaaagcatttgcctgatcagtatctatcattttggagctcctgagaggtgctggcaaagccaggccactcagttgggccttgtctgcgtgctcacctctgtgacccaggacttattagcacagtgccaagcatacttcaggctctggataaatgcatcgaaagtaactgaatgaataaactccctgtgggtggct

SEQ ID NO: 26827 - DNA, 201 bp, Bos taurus
gacgggggcagtcacacatgggacgcaaaacttcaatcagacataaacaagggcttggtgaaggggggctaatgcccctaaaacagccactaactacgcccgggagaatgtcggaagcaacagaaacacctggaatctcagtctgtgaggaacatcttaaaggagatgtcctcagtggtccaatgtggccgctctgcagca

SEQ ID NO: 26828 - DNA, 201 bp, Bos taurus
ccatcccggagtcaataacacccctgaacactcacagaggaatcaagggtgggtgggaggacagggagcagtccaaggggccatccaggttccaaaaggcgccttcagtcatgttcagtataaactccttattacctgacaggtctcatcccagcattaggaaagagttcagaaacctgtcctctgccagcatgtgcggca

SEQ ID NO: 26829 - DNA, 201 bp, Bos taurus
gaaaccacagcctccagagctccacttcaaatcctacctagtccttagggccagggttacatccaccccctctctctggacactgacagcacctggatgctgggacagtcagtatttgccaggccaccgtctcaagggctgctggttttcgagggattatatgttgggtctccacctcccctgcagtccccataaaagcac

SEQ ID NO: 26830 - DNA, 201 bp, Bos taurus
gtggaatctaaaaaaaaataaaacaaatgaacaaacaaagtaaaacaaaaacaaagtctcagatacagagaacaggtcagttgttaccagagggtaggtaggctgggcaaagtgggtaaggggttaactgtatggcgatgattgatggtaacgacttgcggtggtcatcactttctagtgtacagagatgttggattataa

SEQ ID NO: 26831 - DNA, 201 bp, Bos taurus
tgtaagacacaaagcagagagttaaatggaaagaagaattggaaaaaagaaaggcaagaacaagaggaagggacattctggacacccagaatctggacagcgttatcagtgtcagtgaaaggaaaagcagagtgctgctttaaaacaagttttctccacagattattggttgcctgaggtggggcggaacgaaataggtaa

SEQ ID NO: 26832 - DNA, 201 bp, Bos taurus
agccaccctctggcctaccttaatattaatactattgttgtttttgctgtttgccacagcatccttagattgtatatatatggctaaagcataaatccttgcaaaggcaaattctatagcttctgcttcttgactctgaaaagaatgaaactttatttctaggataattgtatatggctgtttcttttatggtcaccttga

SEQ ID NO: 26833 - DNA, 201 bp, Bos taurus
agggacccgcacaccatccctcaacatggcttacacggccagctcttactgtgttgaaactgacagctgtttctttggttacaaaggaagtagctgctcaatgttctggccgtgttgtagaaagagaatgtgtcttttaacgctagagccacacctggagtggtgaggggtgcagctcctgagactggagagggaacctct

SEQ ID NO: 26834 - DNA, 201 bp, Bos taurus
ctgaggagtcttgagggatctctttccactgtggaaggccaggctcctcccccttcaattctgctctgagagccaaactaatccaaaatattatccttacttccatgggccctttgagtttcagaatctatgaaagtctacagcaagaatccttctaatccaactcaatggacatgagtttgagaaaactctgggaaatag

SEQ ID NO: 26835 - DNA, 201 bp, Bos taurus
attttttaaaaacatcaaatcatgtgaagtgtaggcattgggcaagtcttttataacagataccaacactgaggcccaaaggtataacctgttcaagttaataccctcatcttctgacaacagccagtaatttctgccacaggttgccttgtgtccggaggtagagatagcttagagccatgttcttttggaaggaaagat

SEQ ID NO: 26836 - DNA, 201 bp, Bos taurus
ttttccccatgggggaggggtctgtagggccacatggaggttcccacctggaacctctgcctggcattccagagtcagctctgggtacatacaggcctgggacctccactgcttaagtgaacctgagtggtcgtccaaggtctgcttggatttctttgccaaagtctttccttctgaggacaaaccactgtgtacactgtt

SEQ ID NO: 26837 - DNA, 201 bp, Bos taurus
ttgaatccagagcctgttctcaatccatcagctgtggccaaaggagtcacgggatctgtgttccccttcccttgccccacccctagaagaactatggagaatctctttgagaaaggccataatgggtagattctctatcggggaacctgtgggtcaagttgtaaggaggaaaaacagctattcctgggaaatatgtttgtg

SEQ ID NO: 26838 - DNA, 201 bp, Bos taurus
gaagctaagtacatgctgtcaggcgcatggaaaatagactcacaaacagaagaccttggctggcacagacttcttcctgccgtgtagagtttgggtgttgtgagtagtgtgttgatcatgagcaactttgctctccgttttgttcctggagaaatagtcttacttaagtcttacttaatagtccttacaaaagcttgggtt

SEQ ID NO: 26839 - DNA, 201 bp, Bos taurus
cacatcagacttacattaagtcttcagatacaccctgctctttccatatgtgttctcctgtggtatgatgttcccaggctaaacatatgctctaaatcccaaggcctcagcatatgtcctccatctcaacagctgtcatgcacttctctttttttcaagcatgaagtcagggctcacacctatcagagtcactgataactt

SEQ ID NO: 26840 - DNA, 201 bp, Bos taurus
atatgggaaacacacatgacaagcttcaaataaaatctctcctctgacctccaaaatgccaagaatgccctccttagaactgggctggaccatggccaatgaggtctgaattcattacatatgttttgggaatagggtttttgcctggactcaccctaatgaatcactgggccttcatggaaatgctctaatgataacaat

SEQ ID NO: 26841 - DNA, 201 bp, Bos taurus
aaatagtatcttttccatgtaagttagccagggtatgtctctgctgctggcagatgccatgagaacatggcagcctcgggggcattccctccctcgcccactgaggaaactccaccatgtagagagcacagtgctcagggcaagggagggcaccaggcaggccaaatcagtaaggcccctgccctcagagaagtccacatg

SEQ ID NO: 26842 - DNA, 201 bp, Bos taurus
atggttggaaaatatctctagaatgttgtatttataatcctatataatcttacaaggagcattagaagaaagagattcactttccctggaagaaaaatggtttactgccagtgccgtcattgtgaaagagaagatgagaaagcacaccagagggatcgctttgagcttcacattcaaaggtttctatagacagaaactctg

SEQ ID NO: 26843 - DNA, 201 bp, Bos taurus
cagacaaggcaatttttatagaacaagagatctcataattttcctccttatattaaaatgaccctttttattcgtctggggaactcagatgaatcaggcagttcctaagaacacaggcagaatagttacataataaaggcagaggagggaaaaatgcaagctcctttctaaagtccctccaagtaccccatggctggagca

SEQ ID NO: 26844 - DNA, 201 bp, Bos taurus
acaaattacggagcacaaagagaaacagcaccaggcctcccacctcactccgcatgaaattaatgaccccactgagaggtctctgcttactcagagtcacgtcaagccaacctgagggggaggagacctttgtgactaagtacgatctgactaagtgctcctaccatgtcgctgagagaccacccctcctgagggacaccc

SEQ ID NO: 26845 - DNA, 201 bp, Bos taurus
tcagggctgtgcatttctttatttttgttgtattactgaccattctaatgcccactaaaaccacagaattaagatattaatatctcatgtgatcatagccgaagtctttttgctttgggttttgttgtaggtcaagttaccttggaagcagagcctgagattgatatttgcatgtaggagtttcaggggagtgcttttggg

SEQ ID NO: 26846 - DNA, 201 bp, Bos taurus
tgtggccctgggtgtgaggtgcgattctcatcagggctctgagggaagtgtcttagcaaagcctcctctcagggcctcatgggccatttccctaccgctccccacccccctggaaactatctttgtggtcttcccccaacctcactaagtctgcttctctttacaggtggccctgttgaatcccattgaaaacccagactt

SEQ ID NO: 26847 - DNA, 201 bp, Bos taurus
aaaaaagtgcaactcttcctttcccttgaatgcttagaggccagtgtagggttattaattgacctactttcattattcttgtgtatgagaaaatagggagagtgaggagaaaggaaaaagatgggggaatagctggttggtggagcagtcagaacacacacaacatttattaagttcactgtcttacatgggcatggatca

SEQ ID NO: 26848 - DNA, 201 bp, Bos taurus
caccaccgggtaagaacttcatcctcattcactcattaatctcatcgtcatactctctttttctccctcagccatttgttccaggaggtacctgctgcccgtgtgggcaggccttccctcactgagaaccccagggatgtcagccgcaggacctgtcctgtgtgttgagtaggtggctcagcacctttgtccttgagcact

SEQ ID NO: 26849 - DNA, 201 bp, Bos taurus
aggacccccagttcacccaagcccagcagctctgggcagccccagatgtggtccctcccttgggggcagccgagtcaggtggccaagctgtgcattaaataagccagatgaaggagcatgccagtgggcgggggcgtgaggagcagggctgggcacccccataccatagcactgggacccccagtagcccgggcagcaggc

SEQ ID NO: 26850 - DNA, 201 bp, Bos taurus
gtcaagagagccaagactgtcagccacgtgagtgcaaggtcatctggggttgggtgcctcgaggggcccacagtgttctggacctgaccctaaactgaatgccctctgcaggaacccctggacacagccctccttcaaccccgtgtggtggcccagagtgcccagaaagttcgtgcccgctgcctgcatcagtccttccgc

SEQ ID NO: 26851 - DNA, 201 bp, Bos taurus
tacacagtcctgtgagttttatcacaaatttaggatccatgtaacaaccaccacaaccaggatatgagacagtatcccccaaacaaatccttcaggctgtttcattgtggtaaagaccagcccacacccctaatccctggtaatcactgacctaatacccatccctatagttttgcttttctcagaatgtcacataaattg

SEQ ID NO: 26852 - DNA, 201 bp, Bos taurus
gacccctttctgtcccttctgagaagtccctcggtgtctctctagattactagttctctaaaccgaggccctggcactgacagatggagagggccacctccggtgagactgacttagagaaacctaggtctgatgaggaatttccctcagaatacatgcttctttgctgaggcctcagagcttctctagaggggcacgact

SEQ ID NO: 26853 - DNA, 201 bp, Bos taurus
agggcaggggttcatcggtcccccctcaccgtgctgactgtccccttcccccaggacactttggcagtggggagtgagctgcagggcctgaaggtaaagcgactccatgtgggaggcttgccccatggtgctgaagaggaggctcctcagggtctggttggctgtatccaggtgagggtcagcgtgcaaatacgaggtggg

SEQ ID NO: 26854 - DNA, 201 bp, Bos taurus
gccacactggcctctccccactcctggaaacttctccctgtgattcattacctgtgcttcctgagtcattttcccttcaacccttgcctcctgtaatggtttgtgagctcccagaggccatgagttggtctgtcgcgcccacgtctgagttttggattcaagccacccaaggcctggctggtggtggatacggggtgtgca

SEQ ID NO: 26855 - DNA, 201 bp, Bos taurus
gatacacccacagtggaagcagatgaccaaaagggtagaaatgtggaggctaattcttttgaatttggggctcttggcggaaataaaacaaacacaggcaaggattctcctattactgaaatggctaccaagatgacagacgtgagttgccaagaccaaatcccgggggcaggatttgttccttcagtcctggctgaggag

SEQ ID NO: 26856 - DNA, 201 bp, Bos taurus
taaccataaaagcaggaaaaagggaaggtggccctggcaccaatggttgacctcataaagggacatcaccatctgtgtcaaacccctctacccccacccatggcctgtcgttatgatccatctaggaacggcaagacccttggagcagaaaatgatgctaccagagctttgaacgtggccaagcggcactttaatttgcca

SEQ ID NO: 26857 - DNA, 201 bp, Bos taurus
gacttacggaggagtgaacctctgtgttatgttctgcatggtatagcagtgtagtgccttgttcagtaagacacatttgtatttagtgaatcttgctggagtggaggttttggtttctattgagtaggttcttgtggggattaagtgagactttaaagaccttgtataggtcttcctgccctgaagtagataacagatggt

SEQ ID NO: 26858 - DNA, 201 bp, Bos taurus
cacccccgccaaggtccctgagccccagagctggtggggcctcagctttgaggtggcgacgctgagccacagtctgggtaggtcatggagaaagttggtcatggagctgtgaccagtggccccaggagcccttccccagcttggctcggaagtctttctcagagtctaaacttggagaatgcgccgtgactgccacctgtg

SEQ ID NO: 26859 - DNA, 201 bp, Bos taurus
gcatcttcattgctgcacatgggctttctccagttgtgccgagtgggcttctcagtgcagtggcttcttgtggagcacggggtttaggcctcattatttttgggtttgctgaatttcaacatcaactgaattaagagattcatcagcactcttatgaaaaagttaggccatagatttgggaatgagaccctgaaaatttac

SEQ ID NO: 26860 - DNA, 201 bp, Bos taurus
cgcaaaagctctggtggtcaagaaaccatagtactggcacagacataggtaaattgaacgatggaaagactggagaggccagaaacagactcagtatctatggacacgtatatatatataaaagaggtggcactgttgatgaatgggggcatagtaggccattcagtacatagtgttaggagacatggttaagtagaaaaa

SEQ ID NO: 26861 - DNA, 201 bp, Bos taurus
tattttatgatgccttaaggtttcaaaatgactgtgggcccccctcaccttcttcctcttaagctccaccctctgccactcttggttctggagacagagtaggtcaggttatggaggcagttgccgctgacagaaaccttgcttttcaagaacctgggctcagaacaacacggcgcaggctccccaaacccctcatggcgt

SEQ ID NO: 26862 - DNA, 201 bp, Bos taurus
tgctaagctcagaggccaagctaaatctcttagcttgacaggactgtattaccagtgaagcccaaagcttaatttagtttgagagaaagagaagtggcttatttttacccacttgggtgaatggggccgaaggagtcccagaacaaggaccccacttttctgatccctttcccatcctctcagacctccagtgaagaatgc

SEQ ID NO: 26863 - DNA, 201 bp, Bos taurus
ctgggggtgcctcccacccactgatgagcggtgctctgcctggcaaagtagtgggcaagtggcagggagcacctttacctgtagcgtccatctctttgagaggttcttctgagaaaacaaagtttgcctctgtgctgaaatatcaccccctgtgaatttgtgcagcagggtgagcccttgaggatcagcagcaatggctgc

SEQ ID NO: 26864 - DNA, 201 bp, Bos taurus
cctatagtctgctcaatttggcatggtctcatcttcagcaagctggctgtcttttcctgtgggctgacagttctctagctaattgtgtcaaatttgaagatgctgtactccgcgtcctctccacactcattttagctgtcagcttcagcaagctgacatatgatcctcatcattcgtgcagccctagaaagagatgttcct

SEQ ID NO: 26865 - DNA, 201 bp, Bos taurus
gaaaggaggggggaagtgagtgaagccagcctctggcctgccctcctccagggagccccaggatggctggaagtggacgaagggcagcaggcaggggcagtggtgaactgctggccccttctttaccctgcaggtgctcgaggcagccaaggtcaggtcctctgggagcagctcatgaggtggccaaagtactggagtttc

SEQ ID NO: 26866 - DNA, 201 bp, Bos taurus
acaggagagaaactggggcttcaagcacagaaaggatcgtctcaagtgagaatgttctgggtggattgtgcccccgcccaagtcataaggcctggaaactcagggtgggaccatatagagccaccacagaggggagcagttgctcacttaggatgaggtcttgcgggtgggccctgttcgaggatgacctgtgtccttatg

SEQ ID NO: 26867 - DNA, 201 bp, Bos taurus
ttggttgcgggcctgcagtgaccttgcctcctgctattcaagtcctggtgtagcccttacccgtacaacgaggctctccctgtgattggctttaaccagtagaaggtgccaaaagccacactgggccagttccaggcctaggccttaaggaggcctggcagcttttgcacttctggaaccaggccactatactctaaaacg

SEQ ID NO: 26868 - DNA, 201 bp, Bos taurus
gcggaggaaatagcaccctaggagtagaacacagctagcaacgtaggcgatacccacggaaagacaaagggtaggtggccagtcctgagggagacggttattagacctacagcaaggattaagcttaagagtgctgttagagagacagggagaggccagtcagggcggagggaaaggccccaagttggtggtggtttgaat

SEQ ID NO: 26869 - DNA, 201 bp, Bos taurus
actttgttgtcccgtgaagggagtgggaggagaccgagacagagagagggagggagaggcaacgtgaccgatcgcagcttagtttactaacacactcctcatgttccttagaatagagcgattctggacacagactaccctgtccctccagtgaaaaggcaagcaccgaatggacagtcggcctgaatccagcatgcacgc

SEQ ID NO: 26870 - DNA, 201 bp, Bos taurus
tgtgttgctcgtgaaaatgagaactgcctcgcctgccctgtgctccccggtgagcacccccttgctgcagggcagggctggcttcaccttcccgggccagtgctctcaactgctgggttacagcctgtctagactagaaccgggtcatcctggcgcccagggaccaggggctgtgcgagggacccgttcagtgcagtgggg

SEQ ID NO: 26871 - DNA, 201 bp, Bos taurus
aattctatctgtattaaaaaaaaaaaagtcctgaggtcctacattagtgtctgtttgcacggaagtcctcaaaaggaagcaggggtttaatgcaaggtgttgttgctctgtcactaagtcgtgtccaactcttggcgaccccatggactgcagcatgccaggcttccctgtccttcagtatttccctgggtttgctccaac

SEQ ID NO: 26872 - DNA, 201 bp, Bos taurus
taaatgagcagggacaatgatccctggcttcgtaaagcatagagtactgggagtgagactagacaagcagcaaatgtacaaaatatgccgagtagcaggtggtggcaagagaaagtctgggggagggcttcactgaggaggagacattgagcaaagacccagagaggctgagtgaatgaactgagtggataatccagagaa

SEQ ID NO: 26873 - DNA, 201 bp, Bos taurus
agggtcttttccaacaagtcagctcttcacatcaggtggccagagtattggagcttcagcttcagcatcagtctctccaatgaatattcagtttgatttcgttgacattggccctctagctattcctggaacgtaccaagcactctgctccctcagtacctttgcactgtactctgctgtctccgggttcttctttctcca

SEQ ID NO: 26874 - DNA, 201 bp, Bos taurus
ctgttccctgactctgtctcagggcagtcgcagatacaggcaggcctccggtccgtgagaagcagacttttcccaaagaatcatcttcacgttaacccacatacggagagccctcacgggccccactgagacttgttactcattcactgctcacagtaatctcataagaaaggtataacttgcccatcttcccagcgtgga

SEQ ID NO: 26875 - DNA, 201 bp, Bos taurus
accaagcaaagacgggacggcgggaagagcaaacatgcaaacaacctaatttgactgaaacgtggccagtgcagggcgacagggagcaagggataaggccagagaaaagagactgcagccatatgacaaagattctcaaatgcctccaggcagcgactttattagttccagtgaccctaggaagactgtgtcagacagcac

SEQ ID NO: 26876 - DNA, 201 bp, Bos taurus
gccctggagctggggtggagaggagagaggaacatttccctccggcagggaataaagcaggagccgcttgggcgggtactctggttccacaggcctgagaaaacgggcactgttgctgagataggtgttgggcagaggcagaattttgacaagagggtgccctttaccaaacgtcagaaaaaggcacggaggcctgggctt

SEQ ID NO: 26877 - DNA, 201 bp, Bos taurus
gagactgccttatgtttggcttcactggctagtcacttgctgcagattgttaagagttagcttctaaataagagatcgtctgtgtgcattttgaaatacttactcggccgcgccaggccttggttgaggcaggcaggtctgcggttgaggcgctcgaacccttagttgcggcatgtgagctctagttccccgaccaggaat

SEQ ID NO: 26878 - DNA, 201 bp, Bos taurus
tggtctaaccagatgaggctcccccagggcggccacatacggttgtgcaggttgtggactgcacaaaggcacctggccacttgtacactgaaactcggccggagtcccgcccaccctgggcagaactgcatctgcaagaagaagggtcaccttttcttaatttgtacgaaagtgtcatatggcataagggtgccctggccc

SEQ ID NO: 26879 - DNA, 201 bp, Bos taurus
ttaaactgaaaaacgacataaagagcaataacagtagaaacttttgctcattggattttcctctgtaaaataaccagggaaaaaaattgtagaagaaaaacgaagaagtttgtggaaagtgagcaatgcagacttgggctgactcacaatcaaatgagtttcttggtcacttgctgtaaagtgatttcctaacaagtaaac

SEQ ID NO: 26880 - DNA, 201 bp, Bos taurus
agaaaggggaataagatacatggaatcacggtgataatgaatcccaggaaaacatgcagaagtcccctttgggcacagaggttacaaagagtggacttttaaaaaagtctcatgaaggggaccagtgtggctggataactggaccattcacactcagtgagccactttgccttcaacagcagcacccagatctttgcaaca

SEQ ID NO: 26881 - DNA, 201 bp, Bos taurus
ggaacagagtggggttcgagctgggagtcaaggcccttactttcttgcataggagacagttcacaaaagaatggatttttaaacaatccataagaagaatttaaaatttattatctggacaattcacccttaattacaggcttttccaatgagtccctactagtaaactggtgggttcctaggaggcatgttcacttttca

SEQ ID NO: 26882 - DNA, 201 bp, Bos taurus
cctgatctgcttatggacatcatcatcccaataaagaaaagtacagtcacattctgaccccccaccccgctgcccggacctggtctgtgatgccggcccctgaggtgcacccgcgtgaccaccgctgcttacctgaggctttgtcgccgcacaccacacagtactccaccacctggggccgctggacgtcggtcttcccca

SEQ ID NO: 26883 - DNA, 201 bp, Bos taurus
tactttcacaagcctgacaagcatcaaactttttgagcttttgttcaaggtaaaatctttaaagtcaccatattgtatgcagctaggccaccctattcacaccaaggaacttgaagagtcaacgtttctgtggttttaactgtcttcaaaggcagcaccctgctctggatttggcccgcacgctgccttcatcgggacggt

SEQ ID NO: 26884 - DNA, 201 bp, Bos taurus
gagcaaacagcaccgacggcgtgggaatgctggccagtgcgcgtgagtcggggtcgtgagcaaacagcaccgacggcgtgggaatgctggccagtgtgcatgagtcggggtgtatgttgcttcaaccacattataaatctactcggcagcttctaatgaagttaaatctacactcaccccatggcccgacaattcccccgc

SEQ ID NO: 26885 - DNA, 201 bp, Bos taurus
cccacacccaccggggttgggtcttgtcaaaccccactgataagtactaatgcagtgaccttgtctgcttttctgctcccgccctcttcaaagtgcacacgtgcccccattctccaaattaaactggatccctctaggggcactgatgcccacctctgctccaaaccaggtcacagaaagaaccaattcatagccttaccc

SEQ ID NO: 26886 - DNA, 201 bp, Bos taurus
agccaccttcacagccctctctatagcagacacccctggtttcccgggtcccacgcaggcgggcacgccttgtgcatggtattcaaaaggaagtgacgccaggccccacagcctcttgggctgcttgccccacaacctcgtggcctcgacagcatcagcttcagggcttatctccccctggaaagtaactgagttgccttc

SEQ ID NO: 26887 - DNA, 201 bp, Bos taurus
ctctctctctctctgctccctcttcttcctctcaccctgttttccacctgggccagaacctgggcccttccccacccagcaaaggccactcagccccacaataagcaaagcttagtcccacctgagacctccccagggttcacgtgtcatcggctcagccccttggagaccttcgcttccctgggaggctcctgggctgac

SEQ ID NO: 26888 - DNA, 201 bp, Bos taurus
agctgagattcaaattttttttagcattatctactgcaggctttttcctgagaatagggtcatgacacaacccaggccttgtgaatcagaagggaaaacagacttgtgggaaagttgttgttagaggaaacgtccaaaaggtggcagcacttcttcatgcccacctctggttcttagggccaccaagctagagggaaaggc

SEQ ID NO: 26889 - DNA, 201 bp, Bos taurus
tctccccgcaggggtggggggcaggctcccataagtgaaccccaaggaggcttctcctgctcagattatcgggtgctggggccacttccttggcaaagggctctggtctccagggggtgctctgacatatatgcagggagaattcctaccagctctgggggtgcctccaattgcaaacatcccctcccgcctccagctggg

SEQ ID NO: 26890 - DNA, 201 bp, Bos taurus
acgctggtccttcacagacgcctggcagcccagactccatcacagcaccggcttgtggaggacgtggactcagagcagctggaacgctcaggaagtcccgcctggcccggaatttactgccccttcagaacacggtctgacagcgtctgctgagagccaagggtgcaaaacaccctgcagccggcagactctcccctgggt

SEQ ID NO: 26891 - DNA, 201 bp, Bos taurus
gatcagggcccaggcagggtcagcttcttctgaggcccgccccgtgcttggtgtgtagatggtctccatcttcctgtgtgctcacttggtctgcaggtgctctgatgtctctgccctaatctcttctaaggacaccagtcaggttggaagatggcttagcctagtggcctcattgtaacttaaccccctctttacaggctg

SEQ ID NO: 26892 - DNA, 201 bp, Bos taurus
cagccctgctcctcctccagcctggaggcccgtcagcattttgattccagcgcccagctctccatggtttacagctccaccgtgaaacagccctgcgccccggcacctcgagtgattcacttgctcaccagttctatatttagtgccgttgaacacctcagggccaagttttcagagagaaaaaggaggaggaatttaggg

SEQ ID NO: 26893 - DNA, 201 bp, Bos taurus
tcccgtcctggctggcgtggtagccgcgcccacagatcaccggattccgctggcacgtgtaggagcccaccgtgttgatgcagctgaagccgggccgacatggctcggagagagatgtgcactcattgatgtctgtggagggggtgcaggtgacagggagccgggtgcagcccctcctggggccccaggccagcccaggtc

SEQ ID NO: 26894 - DNA, 201 bp, Bos taurus
accccgggcttctgagctgggcgtcggccgggagcgccgagccggggctcggatggagccactgcccgactcctgcacagcgggggagaggctgcacagcatccagggaggcccatgggctttaaactcagaccagacggtccaccccagaacctgtgtgaccgtgggcgagtgactcagcatctctgagccgcctcggcc

SEQ ID NO: 26895 - DNA, 201 bp, Bos taurus
agactcgcctccccatctcctgagagggcatgtaaccctggctggcccatttaacgccccctccagctctttagaaattcgagtcctccaaggcagaagcagtgagagatgtttctgaaggcccagtgctgagaaactgcctgttttggggcttggcgatgcaatgtcagccccgggcacccaactagagaaagccgcccc

SEQ ID NO: 26896 - DNA, 201 bp, Bos taurus
aggacccggaggacagaggagactgcagggcggccgctccacgaaggcgagtttggacccaggcttagggagtccccctgaccgcctggcccgcatcgccggctcagcagctgggctgggagctttgggctatttatatccactccagcaaatcttctgatctcaaggatcctttccaaagcctgcgtcgtgctggcctct

SEQ ID NO: 26897 - DNA, 201 bp, Bos taurus
tgccctcagggccccccgaggacacgcccctccccccttcatccccagcctgctgtgttccaggtttgcgcccccgccccagactggccacgtgcgctgttcttcaaggaaagcagagagcacaaacacgtctacatggagagcacgtgtcatgaagttacacggggcacaggacacactgccggcccttcaggtgggtgc

SEQ ID NO: 26898 - DNA, 201 bp, Bos taurus
ggcatcagggcgcgcccaggagctgcagcggattccagaaacacaggtggggccacgggcaccacagaaccaagctgccagaagccaggccaccgcaggaaatgcccacagtgtggggcgatcctgacctcagcccatcctctggtgaacagaggacctaaggggaccttccagccctgaacttggcgatgtgctgaccgc

SEQ ID NO: 26899 - DNA, 201 bp, Bos taurus
gtgtagccttggccagggctggagatggggccagggctggggctgctcgggagactgaggaaacatcaaggatcgctttcccaaggaaaaccaaagctgtatggccccagttgtgagagtcccaccccctgctcggtgaaaagtgcccatgggactctgggtggattgagggcccagttggcggccttgacccacgccctg

SEQ ID NO: 26900 - DNA, 201 bp, Bos taurus
gtctgggaaccggccacgtgaccccgggggcaggcggcccgtggaagctgcaggaaggacctggatgcttactctccctggagagaggctggactgggacgcacagatttgaggccagggtgggggtcgtccccgccctcctggtgcccctcagagggggcaggccgttccaagatgccccgaggacccaggcagcgtgca

SEQ ID NO: 26901 - DNA, 201 bp, Bos taurus
ccttaacgttctggtttcaatgtctggggtccgcatgcttgccatcagcggctttcatctggaggggggtctgcttcctgaaacccagcttaagaacatgtgtccgggctttatctgcgtcctttagggaaccaggagtttgatgattctgctatgtggcagaattatagtctaaattgtcacgagtttctcagcccaaca

SEQ ID NO: 26902 - DNA, 201 bp, Bos taurus
agtaggcctgccctggttcctgaatacatagcaaaacgagccctccacagaatgactttctgaggatgaccttggagaccatctgggcccaccgttacccagacccgcaggctggtgtggaggggaccggagccaggacgtgctgtcggcaggctgggggcagggccccccgtccccgacccgggatcctccgtgggtgtc

SEQ ID NO: 26903 - DNA, 201 bp, Bos taurus
gagggtcctcccagagccagaggcagcctggggtgcagacagcactcgaactggagtttagcaccttggtcctgggcagctccagccctcagctggcctcggtctagcagggagtaactgcctggaaggtttaaagccaaggctcccagcccaccccactcagagaagctgccggatctcagggccacattcgtcaggggt

SEQ ID NO: 26904 - DNA, 201 bp, Bos taurus
gtgccagaaaacttgctttttgcttctaagtctctcagcagaaggtgatgttacatatttttttgcataaaatattgaaaattagaactagcattttttagtataaaaatctttcctaatagtcataggaaatgaatcatattctgaggcattttaattgctattcgactgactttggactggattgtactcagctttgca

SEQ ID NO: 26905 - DNA, 201 bp, Bos taurus
tcaggatgggatggtggggatgaggagcggcctttccaggcagagggcacgtgtgcacatgtcctggtgagagagagccagggatgttgaagggcctgacatcagaccactgaggctgaatcaagaagctgtcttggtgcaataatgttggggaggtagacaaggctcaagttttctgttttcaggcctttaaagatttta

SEQ ID NO: 26906 - DNA, 201 bp, Bos taurus
atgggctttgggacactaggagctccacctcttcttcacacacaaggatatccttgcaatcatctggcagggatgaggaatctgaggagcgcaagggcccagaatcagcctgatctaggagcaaatcctggtcaattccttaaaatataaagtttgtgtaagactatagttattgtttgctcttttatcaaaggccatggg

SEQ ID NO: 26907 - DNA, 201 bp, Bos taurus
ggtatgggcaaggccaaggaagggtcagccacatccttgatgcgtgctgcccaaattcaagcagccaaacatgagacaaacaggaagaatctgagggcaccgagcaaaatcatctgaggcctgaaaggtatcctgagggactacctggaagttagctttcagcattcattagaaaagtgaactcggcacagatctcatctc

SEQ ID NO: 26908 - DNA, 201 bp, Bos taurus
ggcagatgctttaacccctgagccaccagggaagccaccttattgagctataattgacaaataaaaattgtgtacatttaggtgttcaacacgatgttttaatattattaaacattgtgaaaagattcccacaaactaattaacacatgtgtgtggtgagaacacttaagatccactcttagcaaatttcaagtatgcaaa

SEQ ID NO: 26909 - DNA, 201 bp, Bos taurus
cagtggtgccatccgtgaagatgccgaagcagcgctcctgcagctctgtgtcccctccattcttgagaaatcacactgggaaagacctggagcttgtccaaggcctcagtgaggaggcctcccgtggtctgatggcttggatttgtagccaatcatcccacttgagaatcaaagtgcggtttcttttctgggtcatgaatc

SEQ ID NO: 26910 - DNA, 201 bp, Bos taurus
caggactagtaagagcaaagtcacagatgaactgttctgtagtttgagtgtgtccctgggatcctagagcgtggagggcctggatggtgcggtgggtacttatgcccaaactcaacccctgtgcatccattctggatcgggtctgggagacagagttttgggtgaagagaaaagaatagttttatatctttgcctgcaaag

SEQ ID NO: 26911 - DNA, 201 bp, Bos taurus
gcagggcaggatctctgacacatggctctgggttcttggtttagtcccgtgcttccgaaagcctgcagtgtattttcgccgtgcgtgtcgtgctggccctgctgacgagcgctgtgcttctctggaggacaggacccccgccccacacatgctgtgctcctgggggaccctctcgccctggccgccctgctccttcagctg

SEQ ID NO: 26912 - DNA, 201 bp, Bos taurus
tcaccggccagctgagggaccggtgtgaccgcatcgaccaggccgttgggaaaagcacccagtatcaaagcctgctgagaagcctgtccgagaagctggccgacctggacgatcagctcagcagcagcgtggccggcagtgcacaccccgacgccatgagccagcagctggaaacggcccagaagctgaagcaggcggtgg

SEQ ID NO: 26913 - DNA, 201 bp, Bos taurus
tatttgcaaaatttcagtatgaaattcatcctgtgtcttacctcatcaattctcttcccagcatctaggctgatggtgacctgttattatgccagccctagagagtattccctgaattgtgttttggggagcaacaaattgggataaaattttcctccaaaattgaaaagacaaagtatctggcaatgaatcacactttta

SEQ ID NO: 26914 - DNA, 201 bp, Bos taurus
agagtgtatggttcaatataatgagtaggggataagactctcaatagcagtttagggtcctgccttccgtttgcttccatttacacaagcagacattgttaatcctgctttgtgctcatagcccactgttcccttgggaatcttggatttgaattctcaaaagtcatttatatctagttagtcagttactgatacaaaatt

SEQ ID NO: 26915 - DNA, 201 bp, Bos taurus
aacatccaagaattaaaacacagaaatacaattgtccatttcaatgagattcttttgaaagtatattttgtgcttccctcttaaacaaggagtacaaaatgaacatttctcaacacagtgttgtaattattaatgtaactgtagcagacaattgtaattgtcacctcttttggccttgctgttgttcccatcctcttcacg

SEQ ID NO: 26916 - DNA, 201 bp, Bos taurus
gggaaagggagggaaataaaataaaggatagagatacatttttggagagtcttcacagttatttggaatgatgagatgattcagaaagctttgtaagttattgagttttaaaatggaaaaaaaagtttaattgcagtatttcttcactgcacatacatttgtaagtcttcagggagaagttgacgaccaaagtatgataaa

SEQ ID NO: 26917 - DNA, 201 bp, Bos taurus
ttacataagcaaagtcaagggtcacccaaggcctaggtcgcaaccacctggctccagtgctgccctgcaggacggaccacttacaggcttaggtaccacagggccagaagaacttcagcccctgaagggcacctcagggcacagttagtactgtcataaatcaagagccagctcgggtcagagaagaaggggctttctccc

SEQ ID NO: 26918 - DNA, 201 bp, Bos taurus
attaactagacatcatgaaaaacattttgcaacatatgcaaacattgaatcattattttgaacacccaaaactaatataatgttatttgtcagttatatcaaaatttagaaaaatacaatactgaacatttgataagggagtgttctctagaatttgtaccaggcaaccatttcaaggcactcctgtaacgattttctaag

SEQ ID NO: 26919 - DNA, 201 bp, Bos taurus
cacatcctggggtctttgacctgtgggcttcggcacaagcaggccccattgtgtaatacatgtggcacagcgcttctcaggccacattcacagaggctaacgggtctacaaaggtcatcctttactgataattggaacattttgagtggcatccgtcttgtccagaggccttcaaaatcaactaaacactcactcacctaa

SEQ ID NO: 26920 - DNA, 201 bp, Bos taurus
agaaaatgtcttggcttccttctatacaaaaatttcatatcaaagtttttaaaagtgttttcctactttcatgtgtcatgcattaaaatatattagcacaatggattagtgtatcagtgactggttccttaagaaataagtatacacacacagagagagaaatagatatgcataattatatgaattaccaccaaaaatggt

SEQ ID NO: 26921 - DNA, 201 bp, Bos taurus
tcagtaaccctctacccttttctcactgtgataaactcactcaaaccacacactaaagtgatggaaaatcaatagaaatgtaaattgtaccaatcctctccacactccaagtcttccaattattgagaaattctttataattctttactattattataaatttggttctagtacattgcagacaaattctattatgatgtc

SEQ ID NO: 26922 - DNA, 201 bp, Bos taurus
actacttttccccctcagcaagggccagatttcctcagtttttgttcattttttagtgctaacaaacaaggctacactcagcagcaagaaataaaatgactaaatgcccagatatgatttcaaggggcaggaaatttctccgtccctggctcactggcagcaaagtaccgtttccaaagttgttctcccatgatcataact

SEQ ID NO: 26923 - DNA, 201 bp, Bos taurus
agataaaataataaaatgtttttaaatgtcttttaaaaattatcaaggactgcaccaatgtcactttcctgatcttaatattgtaccacagtcatgcgacaacgtaaccgctggggtaaacgaggtacacaagacatttctgtgcacaagcaacacttatttcaaaattaaaaaattttcacaatgaacaagtaactcagt

SEQ ID NO: 26924 - DNA, 201 bp, Bos taurus
tccgaaatcaccagggtgtctgagacccaacacacattaactccaccagcaacttcacctttatttctcccacccacacacaagctactctggccttcctcccacccacaaacaccccgaactcaaccagaacctttgcaaggacctcctcactgcgcacacagctgcctcacactccagggcaaaggtcagctcctggga

SEQ ID NO: 26925 - DNA, 201 bp, Bos taurus
tcattctatttgtatcctttagtgaagattaacttgtagagtactatacagacttctctagtatccacaagtaaggccctagataagtctctttttttccttcccaaagcttaacttttgaaggcatggttagaaatcatatgcatgtgatttgcacaattattttcctgcctgatccattttataggcctgaaggaacag

SEQ ID NO: 26926 - DNA, 201 bp, Bos taurus
taataaatgacaaatctatgcaagtagcagatagagaaaccaggaatatattttataatcttgggataaggacgtctttcttaaacaagaagtaaaactcggaagtcatgaaaatgaatagatctcactgtatagaaagggaacttgtctgtgtaccactgtcaaacaggctgaaaatacttataatgcatagtagacaaa

SEQ ID NO: 26927 - DNA, 201 bp, Bos taurus
ctaacccttccttcaggatggaactggaggaacccccgctcgttctggctgctgccaatgtggtgagaaacatcacctataaatatcgagaggacttgtccgcacatctcatggtagctggctgggaccaacgcgaagggggccaggtgagtctctcccagcgtccccccttccttggagttaccctctcccccagagagg

SEQ ID NO: 26928 - DNA, 201 bp, Bos taurus
cactttgcttcagaattccctgggaggctttccaaattgtcccatgcctgggcccatcttagacccgggacaccagaacctgggatacagaggcacaagcactttggggaaagccattctggttcttctgacagttcaacccctggctgaacttggatctgtctcctgagatgccctgaatcgaaggaaaacatttttact

SEQ ID NO: 26929 - DNA, 201 bp, Bos taurus
tggccaacggtgtcaaatgttgctgagactgcaaagagtccatttaatttagcaacacaaagatgttgaactgtttcattgtttagggttaaggattaaatggcaaatatgaaagagagatggttgcccacaactttttcaggaaacttggctctgtcaagaaatagaaaatggggcaggagtacagacagatgaagggct

SEQ ID NO: 26930 - DNA, 201 bp, Bos taurus
gctgagggcagcgccggttccccgtggtcaagatgctgcaaaacgtgactccccacaacaagtacgtccctgcgagccgcgtgtgggaagggggcgttggagggccgcggcgcgcgcgggtgaggtgccgagttcggagggagtgcggaaccgactcgggcgcgttgctgtttcgtggcgcaactgttggctgtcgaggct

SEQ ID NO: 26931 - DNA, 201 bp, Bos taurus
agttgccgtatctgccaggcaggaggggtcattcctacaggaagaggctgttgaaggaatctgaggagatctagaacctcctgggaaagaaaagggttgagtacaagtctcagattttgagagtggggccagggagccaacagaggcctgaggggtggggcagaggcttctctggacctcctctgcttgctgggggcctgg

SEQ ID NO: 26932 - DNA, 201 bp, Bos taurus
catcgaatcaggtttgaaatttgccctcttgggggtagaaaattatcacaaggaaacatagaagataaattattaaatgcttcttttcctttcccttttttattgggcaactataggaaattaaacctgtggatgagggaaggaaagattgggaatttgggatttgcagatgtaaagtattacatacaggatggataaaaa

SEQ ID NO: 26933 - DNA, 201 bp, Bos taurus
agattttaggatggaacatcaggaagcttcctgggtgtcaatcaggctttaacattgacctcaggcagctgacttggtcacttggcccagacatcctcacatgtgtagtgggattatcaagttacccatcaaagggctgatgggaggattacccaatcccttatctgcatcttgaggccagatgtacttggaggttcagat

SEQ ID NO: 26934 - DNA, 201 bp, Bos taurus
taccctccaggatgccccccaggaccttggtgcctccctgtcccgctcaggccccaggccctaggccaggctaggctgccggcctcgctgggtctctctagagtccagaataagtcacacagcatagcgggggcaaccctgcctgggatcagaaggctgggggttaggctgttcctgtggcctcatcgggggtgagaacca

SEQ ID NO: 26935 - DNA, 201 bp, Bos taurus
cagcctctcttaccctacctccaaatgcttacctccctaggctgtcatctcttccacttcataccatctgtcaccccagccgctgtctctgtgaggactgtgtgtcctgggttgagcacattgctggtattcaggccacagaacacagagcctcgtggctgcatccgcagatgctgaggtacctccttagctgggtgtcac

SEQ ID NO: 26936 - DNA, 201 bp, Bos taurus
tggtgtctgcagaacagtcttttcctttactatgcctggaaaagcagctccaagggtatgtcccgtgaatagtaataccagtatcagcactgattgaacagtcactgatactggattagtaacagtaatctggaggacattagtaagtgcttgtccttactaagattaagaaagtaaaattttttattattgtccctcctt

SEQ ID NO: 26937 - DNA, 201 bp, Bos taurus
agtggcaagactggtgaggggcctgtaatatagccatacccgtgatggtaacagtcgtattgaagcaatcctgcaagataggctgggtgagcaatcaggtctgtctccttaatttgggcctgagtcactgggtagaaggaccagttggaagcaaggccagagaatgcagagtgttatttcagccacgatgtttgaggagac

SEQ ID NO: 26938 - DNA, 201 bp, Bos taurus
taatttataaatgaagaaaatgaggcatggacaagctcacacaaccaagaagtagtggtaccaggcagaactggctatgccacttgtgggacccagcacacaaagaaaagcaaggcctcttgtccaaaaatttaataatttcaaggcggtaacagcagagctttgaagcaggtatggggtccctgcatgactacatgggtt

SEQ ID NO: 26939 - DNA, 201 bp, Bos taurus
tgaggcctggcaggtggatgagtcctccatcctggacccctggggtggggggaccaggcaggcgtgtgggaaagatactcgtcctggatcctggtggtggcggcggtggtggtgggggccaagggcaccctagtctttgacgagtttgtagacgtggtgctgggctccgtgctcgctggtggagacttcaaagacgaaagc

SEQ ID NO: 26940 - DNA, 201 bp, Bos taurus
agaagagattgatgtttgtgaatatgtgaagaaagctttcacgtaagcaagattagccaaaacaaactaaaagaaaaaatctcatttgctactgataacacaggttatattaaaactcagcttactgataatatttaaatagttcaatcttttcagcaaaaaaattaaccttacaaaacctgaatacatcacaacagtgta

SEQ ID NO: 26941 - DNA, 201 bp, Bos taurus
tctctttctggatccatggggctttggcagtgtcaggggaccccccacacacacacatggccagagagctggtgacttaggggttgtccccacaggcaaacggggctaggtgctcccaccactctgagtgtttcagtgactgctgtctcatcaacttggactctggtggcgccttctgtgcccctcgggccagaataacca

SEQ ID NO: 26942 - DNA, 201 bp, Bos taurus
ggttcttgcctccaacacagggctcagtacgcagaaggctcttagtaattgtgccctgaatgatatagggaggagaaaccagtgacccggaagactttgccggcctccgagggattggaggttccaggaggacatatagggaaccagggaagtatgggctgggctggggactgcgctccagaagtggtttggcggcaggac

SEQ ID NO: 26943 - DNA, 201 bp, Bos taurus
aaaaggaatcactgaaaccttctaataatgtatctcagaggggaataatatgctagggacattcacatatctgggaatttgggaaggtttcaggtgcttcctatttttcatgtaaaggactcactggtgtcatttaaaagcagctttttattcatgaactcactataacctttgggcggtctgactgaatttatgatctgg

SEQ ID NO: 26944 - DNA, 201 bp, Bos taurus
aaaagccttggctcggtggggtgggaaactcttgcctcctcttagatggcctcctctggccacagcatgaaggttgggggtgcgggttctctagcaatgaagaggttgcagagactggcggttctggaggcaggtggagccccttctctgctccctggaggtgtgctggcgaggcagtagggtgttacaaactgacctaag

SEQ ID NO: 26945 - DNA, 201 bp, Bos taurus
ggcctgtcctgaagaataagttcaccacaaacctcagccacccctgcggggcctgccactgggccttgtccttcttggcgtcctgcagaggcctctgctcgctgagaaggtccttggtctcctctgggctgggggcagcagctgtagtgtcctgagcctccacagactgaactggactcttgagacatctggccccatcac

SEQ ID NO: 26946 - DNA, 201 bp, Bos taurus
ttccccgcccagggactgaacccaagtgagagtgagtccaaccattggactgccaggatccaccctttcctgactaggccacacagtcccagacccgccccgggcttatcagcccagagctgacccgcttcccaggatcagtcagaaaaggcctgaccccatgtgttccccaccccccagcgggaactgcagccactgccc

SEQ ID NO: 26947 - DNA, 201 bp, Bos taurus
tatctcttccaccctcatccaactgccttctcatttccatgtctttcccactgtcccaggagagcacagggggacagcatatactatgtgataactgccagtaataaaggctggtcagaaaagaatttacttgcagctgcagttcttcagggaagccttagtataatcagctggccctgccacctggtcatttttatctta

SEQ ID NO: 26948 - DNA, 201 bp, Bos taurus
ttggacatttggtctttctcatttcttttacagtctgaaaccaaaatgtaagctccataatgtcaaggctttgtcttctttgttccctggtataactctagcgctcagaagtgtgcctggcccatagtcaggtgttcatgtagtatttttttggaatgaactaacgaataaatgtatttctcagaggagagtttccatagc

SEQ ID NO: 26949 - DNA, 201 bp, Bos taurus
gatcctggttctgctcaaaatgtcagttcccatctggccagaaccacgtgatttactcccacccacttcctcaggtaggactgaatgtcaagaattccccgttgttgacttagaattaagaagggccaatcaggattgaagtgaataagcttttatctttcctttactttactcagggtaagaaacaaccacttgtgttgg

SEQ ID NO: 26950 - DNA, 201 bp, Bos taurus
acacacacacaccatggtcaaattagagaaaaacttcaaatcagcccaaagacttggcacacatgcaaccaggtccagatccccaggccttggtaaattaatgggtccagcagccatgggtgaaataaacatcctacagacatgaagctggctggtggccatcttccagataaggaacgtacttttgaactgtgcctttta

SEQ ID NO: 26951 - DNA, 201 bp, Bos taurus
ccacattgttaattggctgtactccaatacaaaataaaaggtttaaaaaaatagcttttgaaaagatttcaggtaatttaattggtatttctatttacttcctcagtttggtcttaaatactttatattggtgtttaaagttctccattattaggaagaaaatcaggctagtataaaggccagttgtagaaatcactaatt

SEQ ID NO: 26952 - DNA, 201 bp, Bos taurus
cttcctgtttcaccctttcttacacttctcttctttccttagctatttgtaaacagacccttgatcaatcttctttgcccaaaagccacccagtacattataatgggatgcaccagccttctcaagttacttaattagggggaaaaaaaagtttgtatttctacttccaggggttggtggtggtgttcagtcaccaagtca

SEQ ID NO: 26953 - DNA, 201 bp, Bos taurus
tttgtaaatgttttaatttggaaatttcatctggagaagtgggagggctattatctggcttgaggattttctgtaaacttagattcccacttgttatatctttatgtatccttgtttgtaattgatggtgcttttcaaactcaattatgtggacagattaggtgtgtcctttctgattaaaacagttcgagaattgctggt

SEQ ID NO: 26954 - DNA, 201 bp, Bos taurus
catggggttcctttcttcaagtttctcagaaaagaggagggagagaaaaagagggatggggagaggaggggagggcggaaacaatgagatattcagtaggacagaactatcgtcaatactatgactactgcttacaatcagacctattacaatgaaaatcatcatgtactagaggatctccaaaccttgttgctccaacca

SEQ ID NO: 26955 - DNA, 201 bp, Bos taurus
agttctttattctgtatagaatggtggggaggacctggaggggagttttaactccaggctattttgagccgtgtagctttccttcacacttggtactaacttaccggggaatattgagtaaaaactcattgtactagaattacagtacttagacatggagtacttagaccttaaagctgctaaacccagggattgaggcaa

SEQ ID NO: 26956 - DNA, 201 bp, Bos taurus
aaacaccaattgtgtactcttacgtatgctctgaccactcctcttattccatcccctgttaaatttcattttcttgcctttttcattggctgggactgtcatacatccttaagtagatcttgtgatagttggcatcttattctgatcttcttttggaagaaaatccttctaacatttccccatttggtttgatgctttagt

SEQ ID NO: 26957 - DNA, 201 bp, Bos taurus
caataaatatgtaaaacatctagaaataaatgtgataaaactttacttggttaaatggcaacacattgttttccataagttaacgtatagatttaatgacgcttgaagcaagactccaaagagattttttttaaacagggtcacaaagagtaattttgaaatgcatgttggtcaaagaattaaatggggagcaaccatttg

SEQ ID NO: 26958 - DNA, 201 bp, Bos taurus
ccagagcctcccagctgcccccggtcctgagaagattctgaacagcggtccgtagccgtcctcagcttgctccctggagctgtagtgtccccatctctgctgctttgtttcggccaggcccccctgctgaaatgcccaccctctgcccttgctgggtccaatctctccccacagattccctgcttaacccccgctcacagc

SEQ ID NO: 26959 - DNA, 201 bp, Bos taurus
aggagccctggtttgttttagtggagggtggtgtttagaaactgtgatctgggggcttcctgggctgctgttactggggtgtcattacttctaggccttaagaaggagctaggacatgtttgtataaacagccacttttctttatttgcagtggttgtgttttataaagaaactacaaacaccaaatggacgatttagggg

SEQ ID NO: 26960 - DNA, 201 bp, Bos taurus
tactacagtataagaactttcctaatctcctgtctcgtccaaacatcagcaagggggttggtgggaactcaacaggactttgtcttccagcggcctccgtttgggtcctgaataaagactaagtctccctgggaggagttttgagagagggcacaagttgtggggccagccaggaaccccaatgcccaaagggatcttgtt

SEQ ID NO: 26961 - DNA, 201 bp, Bos taurus
cgccggagaggtgaggcctctcctccgtgtccttgctgtgctctgactttctggccctgggaagagggcgtgagtgctgcctggggaagtggcagagggttggtgtggctgccagtgccgtcatcgtgtcttcagattgtctgtatcatgtcttgccccctgcactggacgccaagaaagaggggctcctggggagctccc

SEQ ID NO: 26962 - DNA, 201 bp, Bos taurus
taccagcagcggctgcaggctctcttcttcaagaagaagttccaggagcggctggctgaggccaagcccaaagtggaaggtatggcccagggctggggagtaagcccggtggggtgggtgggagtcaatggacaggcacagagggaaactccttccttattcttgatgcacccccaaaaccaaggccaggatgtgaatcca

SEQ ID NO: 26963 - DNA, 201 bp, Bos taurus
gatgcagatacatccaatctggatacccctgggcacctcgatatacaaagacatctattctcacccatctctttcactcactatgcccatgctcaggccagccaagaccccacacagacatgcagatacacacagccctgcggtatgagcttggatatgttggtgaatgaagctgaccaagatccctgccctcagggaggt

SEQ ID NO: 26964 - DNA, 201 bp, Bos taurus
gcctgctgccctcaaaattggactgcagaatttttagtgttaaagcacctcccattgaaactcaatgctgtgagaggccaaccagtccctacccagccatgccctgctccaccctgcggagtgacagagcagggcatgtatgccaggaatcaaagtcacagacacagtcagccccacagcccaccagggtctctcattctg

SEQ ID NO: 26965 - DNA, 201 bp, Bos taurus
tttttgacatctcagttgattttgaccatttgggccgcttgtttttcctcttcctgtgctttagattcctgctcttaagctttaaattcaccaatagtgtgcctgcacaaccctaggcccccaccctcaaccccaaaagaagccaaacctcaggccccacgtgtgttctccacccctgcccctcccatgacctcactgtgt

SEQ ID NO: 26966 - DNA, 201 bp, Bos taurus
actgtcccgtcgggagcttgactagctctctctgcctcatccaccgccgagacgagttaggacgggtcctctcacttcttcccttccaggccatccgagccattaacccctgcagcgactcgaccatgaccgccgaggagttcaccgatacagtgttctccaagattgacgtcaatggggatggtgaggccgcgctggggc

SEQ ID NO: 26967 - DNA, 201 bp, Bos taurus
agcatggagatgcaggcaaggctcatggcttggcttgaaaaagctaggtgagaagtggcagaaggggacagatataaagagaggagggggagaggccagatgaaggacttcgcaaagggaaaagagatcaagagatccagccagggcagggatgggagccagtggtatccaaagagaccatgtgtcctggttttctaggga

SEQ ID NO: 26968 - DNA, 201 bp, Bos taurus
aggaacctgcgcctcgcctgctttctttcctcctcctcctttctaacccaccacttctggggtcgcaggactgcgcagaggccaggggctagtcttttgctgaatcagagatggggtggtggatgggggatggcaaatttcagatcagtggatccagccccactcctacgttagccagcagctaagacaggccaaagtagg

SEQ ID NO: 26969 - DNA, 201 bp, Bos taurus
caaaaataaacacatgttttatgagtaccttgaagttacagaatttgctgggtcaagcgattggaaagaccaagaggctacccttaaagtgaggtggcctgtgtcctctgaccagataggaatggaagaaggaggagttggcagagaaagtctagactctggtctaccatggagcctaggcccaggccgccagaatcccac

SEQ ID NO: 26970 - DNA, 201 bp, Bos taurus
agtttcccttgggccagaggagggctggaggaccgacctgtggccagtgggatagaagccgcgtgtgtgatttccagtgagtttcccttaaagggaaggtgaagggaaggggcaggcccttcttcactcttcttcctccttccctctggctggagctccagtgactggagtgaccttggaaatggaaatgacacccagcag

SEQ ID NO: 26971 - DNA, 201 bp, Bos taurus
actgcatatcactcttcaacgcgcttttccccactcaacgatatgtcctggggagctgcgcctgcttacagccttgccatctttccttagaactgccatgtgctattccagagcaggtagactgcttccagaaccgccctctacgtgttgttaacagttctcatgattaaatggaagactgaggggcttccctcgtggtcc

SEQ ID NO: 26972 - DNA, 201 bp, Bos taurus
tggttgtgatcacaaagcataacgatgatgaacagtatgcttgggagtcttctgctggaggttccttcactgtccgtgctgaccatggtaagttggctttcctgttaaggtgtctggattagaattctggggaaacagtaatgaagatcttgagtattgtatgtgtaaagcagttatagttctgtgtttatttagtttttt

SEQ ID NO: 26973 - DNA, 201 bp, Bos taurus
gagatctcttaattaagcggccttcccctaggagaaaggaaatgggcttccatattctcagctccgacatcagatcgcatgatttactacccgaggcctgtgtttctccccaaaccagctcctctatagcacaaacatctatcactttgaaggcggttcaaacgccactttccccttctcctccccctttcgcagtgccct

SEQ ID NO: 26974 - DNA, 201 bp, Bos taurus
cctattttctactttctggttataatttgaacttagtggctgtcggttcagtagcaatgttgtgaccagcagggaaaggccaaggaaattgctgagacctcggccttggaatccttaacccctgaactaatactaggaaattttttttctggacttcttgtttagagaggaaaaaaaattctccttagtttatgttagtca

SEQ ID NO: 26975 - DNA, 201 bp, Bos taurus
tagggctgagagagtcacagagcagtctacgttgaggtcagcttcacttgacttgactgagcaaacactggagaaactgcatccttcctgtgctgtgtggcgtggtacttggtgcattgagggctcaaggaatagaacagaaaaggtgtttcagaggggtttggatgatctgcagaagatggagtgatggccatgcttgca

SEQ ID NO: 26976 - DNA, 201 bp, Bos taurus
aaatcaaaacagatcacccacctgagattgtgagggcaatctggagcttggtaagagctgtcagtttggtacagctcccactgaggatgctaatgacacacaactttcatatgtcctcacttcctcacccccgatgtaaggggtgtgtggtgtgcttagttgctcagttatgtctgactctttgctacctcatggactgta

SEQ ID NO: 26977 - DNA, 201 bp, Bos taurus
tcagcatgagcactgtggagaaggaccgtgcagaaggaaggcgtctccatacaggcgacaggtgtttactgggcacctactatgtgctgctgctgttctcagccttgctctgggccctcttccaggcgcccttctcagcatggactgcatacccttggtggcaggaagtgtgtgggaggaagccaagctgtgagagtactg

SEQ ID NO: 26978 - DNA, 201 bp, Bos taurus
acttcattgaattacttaaaatgatagcaaggctatgacggttcacagagcccccatactaagaacgttctctttatgagctttcaagcccaaggataagtagagttaacttcttgccctacagcagttaaaagaaggcaaaagggaatgactgcattttttttcccctcagagaattacctccaacaataatgagaattt

SEQ ID NO: 26979 - DNA, 201 bp, Bos taurus
tgagtatttatttttcatcctccttacaagggtcatttcaattaaagtcttaagctaaagagagttggtcagtttatcagcctaaatctgatctaacgtatcttctgtttctttgcagggccatgaaattcttcatgcttcaggatttttgttttactgaaacctttgacacagagctttcattgagagggggaaatgcag

SEQ ID NO: 26980 - DNA, 201 bp, Bos taurus
cttgcttgctaatcaatgtggtaccatctgtgattgtcattaacaatatccaccaccacagattcagaaggaggggaaatcgcaatgccttctgtgtctcaggagaggcctgtggcttctacctgatgtgcccagagcatccatctgaaggcctggacaaacccagtctaatgaggttgttaacaagggtggtcacaaggg

SEQ ID NO: 26981 - DNA, 201 bp, Bos taurus
ctgcaacctcgcccattagatgaagggataactggacaatgtctagtcctgaattctttgtttctctccatgctcacttgttcagcagtattaattgggcgccaattataaattataattgacccttgcttgtgaagagctgtaatgcaaattctccactacgtgcctagcagaaaatgttgatagtggccatgaaaaaga

SEQ ID NO: 26982 - DNA, 201 bp, Bos taurus
catatggcaataatagggggcagggtggcctttcagaagtatccctacttcaggaccttgtgtttcttggagcagtcattggatgagagccatccctagtggagggcccttggtgaggtgactcctattgtgcgtgtttgtgtgtgtgtgtgtgtgtgtgtgtgtgtatgtgtgtgtttgcatgctcactcagttgtgtct

SEQ ID NO: 26983 - DNA, 201 bp, Bos taurus
aggctctctgctcagggccacacagtaagcagccaaggggccaaatagagaattccaaccaggatgtctgacttggagactgggcttgcttccttctcgtgtgcctccgttaacaaaggagacctctctataagtcaaaacagcgtcatcctgtctgggaaaaatgaaactgtgtggaataaaggccaacactgcataacg

SEQ ID NO: 26984 - DNA, 201 bp, Bos taurus
tttgtgatgcttccagtttgaggtcatcatggttaaaactgcagagaagttttattcatagtaaacaaagatatggaaacagttgaacagataaagaaaacgtagtggatacacacaggggcatattaaccagccttagaaaggaaggaaatactgtaatatacaacgacatgatgaaaatgaaggatattacctggtgtg

SEQ ID NO: 26985 - DNA, 201 bp, Bos taurus
gtcaataaaaacttaaccaaaaaaccctaatccattaccaggtaggaaataatagatcaaaaacatatgcttgtctcccaggcctaattgctttatatctaggtctgtgtagaggggacagagagggcaggtcaaaagtcaaagaaacaaatctctgactatgaggctcagggggtttgtagactttgtgtttgctagagg

SEQ ID NO: 26986 - DNA, 201 bp, Bos taurus
ttactgttctttagggccagggctgcctctgaactcaaacccttcctcattcctccccttgtttgtgtttctaccattgcagatcctggccgagagcgcttccctgcagagcatacctggaaggcattgaggagggtgaacacaatgtggaacacagcgttgctcccctggaacacggtggccagcccgaaaccccaggtg

SEQ ID NO: 26987 - DNA, 201 bp, Bos taurus
tgcagaatcttgaatttgcacttaacaggggcctttgataacacatgtaccactgccacatatggtggagaccacaaggttctggtcatgtccctgggttgggccaggtccctccatgaaggacaaaatcaagttgcatctcaggactaagagtgagttagaggtgactctgtagttttgaacctgaatgactgaggtgtc

SEQ ID NO: 26988 - DNA, 201 bp, Bos taurus
gtgttcactttacagttttaggagagtcataattttaccattttgaaatgctttatcattggaaaggtataaaaattattgaaagctagtcctgtactttaaagaatgagcaaaaaattagagcatgacttccttaatacatgtcagtggatagatgtactgatgataattcctatcaagtcctcccaaagaactgtaaaa

SEQ ID NO: 26989 - DNA, 201 bp, Bos taurus
acaagtctcaaaaaatggatgtgcccagtagacaccaacaatataggtaagcatccatttgcccttacattccaccaaggccaggtattaccatcttagaccttccctttttccctgtggacacagaagttcagaactctatgatgagagcagagatgagtgatgggggcaggggtatggatggacagacgtatggccgat

SEQ ID NO: 26990 - DNA, 201 bp, Bos taurus
gaactgaataaagggtagatgggagtgagagggagaaactaagatttcaaatttcactctaacagggagtgggagaggaggaaggccaagaatcaagagtcctttagtcccagattcaagctcgaaacttgaattcaagctccaggcttctaaggaaacaaattatggtggttcattcattctcatgaaggactgtggttc

SEQ ID NO: 26991 - DNA, 201 bp, Bos taurus
atgacagctttgtattcctaagaaacttactctccaaacatgttatctctatttaagtaattgtgtgtgatgcatagatcagtagaaacttaaactgagcaaagttataaaagcatattttaggatatcaattaacactagcagtatcttaattaagctgagtggtgatttgaacaaggaaaaccacagtgtcttaattat

SEQ ID NO: 26992 - DNA, 201 bp, Bos taurus
ttagaaagaaaaaaaattgatttcttttcctagagtaattagaagacaaaagccgggttggactgagagaaataaagagaatcgataccaatcactttctcagttttttcattctccaaccacgaagattgcagtgaggttacttgtattctttaatgcaacacttctttttttcaaagagtagcttaaatcaacatgcat

SEQ ID NO: 26993 - DNA, 201 bp, Bos taurus
gagaatggcgtgtttctgaggctagttgtagggaatcaccttctcccagctttcctggacctagactacgtgagggcctgttggaccctcacgagggacacaggagaagtgggtctccacagagcctccgacaaagggctgtctcctggccaatcaaggccaggattggagccttcaagattggagccttgaagagggtgt

SEQ ID NO: 26994 - DNA, 201 bp, Bos taurus
catgttgaacaataatcctgactatcatgacaactgatcgcgaaggtgagaattttaaaataaagaacagcgtggagaggcaagcctgccatttgtgacgacatggatgaaccttgagggcattatgcaaaggaaggcagtatgctatgtcagacaaagacaagtacgtaaatatggaatctaaaggagccaaagctgtaa

SEQ ID NO: 26995 - DNA, 201 bp, Bos taurus
agcagtgtgtacatgtccatccccaattccctaactatccctttcccccattctcccctctgttgactctcttttccattgttaaaacagtctttactaacttaggcatgtttgtagtcctgccacagttccatttagagataacatatatatttgtatgatgttgcctgaattttttgaaattcccagcatctgagatca

SEQ ID NO: 26996 - DNA, 201 bp, Bos taurus
ttaaaaatcttgctaattttttttgcttttttgagacatatctagtatttattatttttcaacttgaaataatacatagggcaaatgattttgggtgacactctctaaattgataacagtttttggagcaaaaattgaatttttggtggtaacattatagagatggatggatagatggaaggatggaaggataatggatgg

SEQ ID NO: 26997 - DNA, 201 bp, Bos taurus
tccgtgtgtataggccaggcacggcaagagggatgtaaatgctaaggcggaaattaatgattctgtgctattggttacaatcaggtcttattgaacatttttttgcatagcaaagaaggccatcaaaggttgacagccaaaagaaacagtttaaacaaaatgcaaagcatcatcttccctttgcctaactgtatgaggagg

SEQ ID NO: 26998 - DNA, 201 bp, Bos taurus
ttttgataatgatcaaattgtcctctataaagtttatgccaactgaaagccaccccaataattcatggaaatacttattagggtgtatttttgccaacaacagagtattcttatatactgggtattaaaagtccttcaagtatttgccaattggataaatgaaatgtggtgtcaccttgttttttgaattcagtttgacca

SEQ ID NO: 26999 - DNA, 201 bp, Bos taurus
aaaggtgaaccctggacatctctgactctcatgataggctgtctcactttcctttgtccactaaagccctcacccaggccctgttgctagtaaaccaaggctccctggagcagcgagctatcacgcctgcacctctgtaccagtggcttccaagctgggcagattctggctttgttcagcctctacaggtatacagatggc

SEQ ID NO: 27000 - DNA, 201 bp, Bos taurus
atgaaatcatctcatttgcagcaacatagatgaacctagagattatcatactaagccaagtaagtcagagagaaagacaaacaccatacggtctcacttatatgtggaatctcaaatacaacaccagtgagtatatctttgaaagagaaacagattcacagacatagagaacagacttctggttgccaagggggtagaggg

SEQ ID NO: 27001 - DNA, 201 bp, Bos taurus
aaaaatagggccagatttagcccacaggccattgtcttctgactttggattaaagacactaatgtgaaaaaaataaaaacgtaccaggaaacaaacagatgaacttttatatagtctttggataggtgagaattttctaaccaggaaatcaaaggcagaaaccacaaaagaaggtatctgtaattttgccattatagaaat

SEQ ID NO: 27002 - DNA, 201 bp, Bos taurus
cctcctctccttcctccttctggtctaagacaatccagtgtaaactgccatcacaatagtattatacatcatggaatttttgtccaagttcagatgaagcgatgcttttatcactataagtcttttacccacagtcaagttgcaaacacataaattaggaatgtaacttcaagcattacacagaaaacatgagggtaaatg

SEQ ID NO: 27003 - DNA, 201 bp, Bos taurus
cctcagagtccactgtgatctgagagtaagttcatggtgtctttaatgcagcaatatagtaatctagtagacttgggccttcagaatggctcagccacgtgttttagagtttgaagtaacaactgcgtgttttcagaattacacagccaattccagaagcatctcacgtatcaaggcccacgtgtcatagaccaaaggcac

SEQ ID NO: 27004 - DNA, 201 bp, Bos taurus
ggtgaggatgaagaggcgggtgactccaaatacggccgcccaggcgttgaacctgcccgcagggaggtgcagaaggtgtgtcagcctttgaggcccaaacaggaagagggttcaagggtggtcggggagggtgattgagaactgaggtgtccagaataagatgctccaggaaaaaaataaccccagggctccacctaaccc

SEQ ID NO: 27005 - DNA, 201 bp, Bos taurus
aagttagcttcttggccacatttaaaaaaaaaaaacaaacaaaaaccaaccagcaaagcctgcgaccagccctggagtccatgcctttcacattctcagatccacaggcctctccaatgaagggtttcacctggagctgagttagcaacgttggtttttcttccgtattttctttaatggcatccctcccaatacctgtac

SEQ ID NO: 27006 - DNA, 201 bp, Bos taurus
caggcaagagtactggagtgggtagccattcccctctccagggaagctttctgacccaggaagattgctggatcgaacccacatctgtgagaatcacacgactgaacgactaacacccttatacattgtcgtaatccacacaatcttcttggaaatttgatagtgatgatcaagacaatttgggtggtgaagtgctggagt

SEQ ID NO: 27007 - DNA, 201 bp, Bos taurus
ccatgagatttagcagataataggcagggtattctggacttgacagagaaaagaatgttccaaaagggtggaactcgtacataccccagtgttttagcagtggcttatccaggccccagtgctccactttgcagtcataaacatcatcatcagaaggaaggaaggtgaggtaactgatcttggagaaggaatgatcatcct

SEQ ID NO: 27008 - DNA, 201 bp, Bos taurus
gccgtgtccctggcaccgtcagctcccgctgcagcaggggacgtagctgcggctccagggtgcttggagatgggactccgaagcggagcaggaaggagtcaaaggcctcgggtggggcctcccagttgagcctcagtgaactcgtggtcacatcagtcaccgacaggtgagacagcctgggccctggctctccgggcgtct

SEQ ID NO: 27009 - DNA, 201 bp, Bos taurus
ctgggagcgcgggaaggaacccacgtgcccaccatcttccccgccctggcctcgccctggttttctgggagccagattggaaggctgtccctgtcaccccatctctgaacatgcaaagtgatctcagcccaggtgggatcccacaacctcgcaggctgggcgtgtcccccagccgcacccctttctcctccccacccccaa

SEQ ID NO: 27010 - DNA, 201 bp, Bos taurus
tccttgtcaggaaaatcctgtggacaaggctacagtccatgagatcacaaagagttggacaggactgagtgagtaacacttatactttctgggaaggtcccgcatgcagtgggctaacagcccatggacacaactacagagcctgtgttctggagcccatgccccgaaacaagagaagcctgtgtactgcaattagagagt

SEQ ID NO: 27011 - DNA, 201 bp, Bos taurus
gtagcacagggagaaagatgagacagagctcagctgtgggcagcctaggggatggagagagatgaggccacagtgagagaactctgagagcaggggataaactaggctgtggtagaggggaactggggatcagagagaggaaagggagaatgaagacagagggtgcatagcagaagatgggaagaccaagaccggaatttg

SEQ ID NO: 27012 - DNA, 201 bp, Bos taurus
ccgctaaccctacccgcaaggagttcacagaaagctctacttccaccttccccatgcaagtgtggtcacaaactgtcatcccagtcatcgcaatctgcaatttctctagggcccctctccccctgacggtttgcggctgcgcacataagttctttatctcctctcccttctttagaaaggtttagaggccagtttgaagtt

SEQ ID NO: 27013 - DNA, 201 bp, Bos taurus
tgctctccataggtaactccactaccctttattctttatcttctttgcatgttgagatgtgagatttcctcaggagcaactgccttctgctctccaaggtcctgaaaagatacccctgggcttcctgaaaattcctgtttcccggaatgcagatttgagttctgattggttcttcttcttcttcttctttttttttttaag

SEQ ID NO: 27014 - DNA, 201 bp, Bos taurus
taatattaagctaagtatctatttgtaccatctcaaaacacagctgacataaaatttacttcagaaccaaatgatttccaaaaactcacatacacctgaacctcacgtggcttcctctggccccttcctattgcaaaaattattggaacacagcagataaaggaattctcacaccagatacctcaaatctcatagcatatc

SEQ ID NO: 27015 - DNA, 201 bp, Bos taurus
aaggtctcaataccagagaactcaggggcccaacaaccacgttctcttcacagaagcttactccacattgtgtaggtatccatgcctgtctcctccactttcagatgtcttcccggccgccccatctccccagcactgtccgtcatgcaccccaagagctccgtcatgtctcggaggtcctctctctttcccctccacagt

SEQ ID NO: 27016 - DNA, 201 bp, Bos taurus
aacttgataaatctgtgcgggccaaacaaattaattacttatgcaggttgtatcctacagttcttctttgcctttgacttcggtgcaacagaaaaccttttattggttgtcatggcctatgatcactatgcagcagtctgccaacccctgcactacctggttatcatgcaccctcagttctgtaagacggcagcagcatca

SEQ ID NO: 27017 - DNA, 201 bp, Bos taurus
atctggaaaggcctggttggaagaatttatgaatgcactgaggaatgtatgttggagtgagacagacctggtgagaagtgtaataaggaaagtttgggtggagggaggccagggtcaagattgaacctgcaacccctttcctccaacaggccctctcctggagggaagacagagattcatgaaggagtgagaaatgcaagc

SEQ ID NO: 27018 - DNA, 201 bp, Bos taurus
cctttattttacacaagaaaattgaagcatagagagggtagtgatttatccaaggtgtacagttatgaagcaacagggccaggattcagactgaggtgaagtacatgtccacgtacatcatatcctgcctcacaatatctatggattatgcttttctgcatggaaaggtagagactgaggccttgggatgccagtctgttg

SEQ ID NO: 27019 - DNA, 201 bp, Bos taurus
cccgtctcttctatccacggagtgaatagtagctctaattaacacagcttttcacctaattgagtagcatttgatcagaaaggaagtttgagctttccaatagctggctctgtggcttagttggctaaagcgcctgtctcgtaaacaggagatcctgggttcgaatcccagcggggcctgctggtttttcatctcaaaatt

SEQ ID NO: 27020 - DNA, 201 bp, Bos taurus
acacacataccaaggagcaaatcttggagctcctggtgctcgagcagttcctgaccatcctgcctgaggagctccaggcctgggtatgtgagcaccatcctgagagtggggaggaggcagtggctgcagttgaagacctggagcgagagctcagtgaaccagagaaccaggtgagaggaggaggatggccttctggacata

SEQ ID NO: 27021 - DNA, 201 bp, Bos taurus
tactctgtgtgagcaagataaagatagcaagcagaacatttcaaaagtgagagtcagtgagaaagtgaaaatgaagggtggggggaggaggtatcagagaaagtaaaagcacatgttggggaggcagagtagaaacacgagaaacctgatcgggtgtaaaggcctttggcaagaggatgaatagcccccacggggagggag

SEQ ID NO: 27022 - DNA, 201 bp, Bos taurus
cttcctctccagattttccagcatagcaactgtctcctccccactctctggacttctgtatccagtcctgcagttcctcaggcagtatggttgagctgtgccagcaccaccaagtccaacgtctgctccttggtgggtatctcaggccttaaccactcatagcagaatacccagagctggcacaagaccgcaaagggccaa

SEQ ID NO: 27023 - DNA, 201 bp, Bos taurus
ggacatttcagtctagaccccgaaatgaaagctcacgcagcagggaaacggttcaaacggttcaaactttggatttacaggaaaccttttttccgaatccttgttttatccccccgggtgcaacgcagatacatcaagtctataagaactagaatatgacagtaacttaacttatacaacaactctttctcttgtttcctt

SEQ ID NO: 27024 - DNA, 201 bp, Bos taurus
caggagagacctaccagcgtcacatgggtcggagcacagctgggaacaaaactgaggctgaaccagagccagtgtggtgggcagaggcttgtttcacagcaagggtggaacgaacccttgcaccccaaccctgctccaagcacaccctgacccttcactcaaagcaaaacttcacgccctgacccttgtagcaacgactgt

SEQ ID NO: 27025 - DNA, 201 bp, Bos taurus
ctaaaagataaataaataaaatgaaattttagcattagagtcccaagagagtggtagtattctaataaataaaagggaatgctgaagcttgccccaaggacagacatcacaatgatttccttgcctaactgcattctgccaaaagaaacacatatttagtacacatcttctttatccattcatcacttgatgaacacttag

SEQ ID NO: 27026 - DNA, 201 bp, Bos taurus
gctggtaaatttgcacagcaccaggaaggtaattagttatggtggctgtgtggcccagctgttcatatttctggctttgggggccactgaatgtgttctgctgcccgtcatgtgctttgataggtttgtagctatttgtcggcctctccattactcagtcatcatgcaccaaaggctctgcctccagttggcagctgcatc

SEQ ID NO: 27027 - DNA, 201 bp, Bos taurus
ttttggccactgacctggaggatctttttccctgaccagggagccaatctggttgcacatggatggaagtgcagagtcccactggatgaccagggaattcccagcctgagcacttttatgtaatctggctccctaactgtgtggtggcttcagaatgatcagacatctcatacattccaaagaggagtgccccagaacacc

SEQ ID NO: 27028 - DNA, 201 bp, Bos taurus
aatgtaattaaaggcaagggacaaaatccctgtggactaagaaatttaacttgggggggggggaataaaaggaatttaagcttttttatttattcagccagagctattgtatcttcttggggatcaccagaaggtaagattggaaaaagtttagattacaaaatttctaacacctttttgatttcagtgaggtagaaatgg

SEQ ID NO: 27029 - DNA, 201 bp, Bos taurus
gctgccctggaatttgggagctaaagcccaaaagctcttaccgggtttctctgttcctggaatcagaactgcccagattggataataattgaaatttccactctgtgcctaactagagagtatttctccacgtgcagggttttcaactctggtgtgctacaccacgttaaatattgatatttggggacacttttataaaat

SEQ ID NO: 27030 - DNA, 201 bp, Bos taurus
actctgactacctgggggccaggctggtgggtcctgccgggcagagagacagaccgcaatgagtgaagaccatggggtcagacagacgatcaacgctgtcagcttctggcctccgtggagtacccttggaaaggggttgaaggattttaagggggaaacgatccacttggatctgcatttcagaaaaccatgggggcaact

SEQ ID NO: 27031 - DNA, 201 bp, Bos taurus
cacaaaaagcctaagggaagactttggaactaggattgaactagcaaattctgcttttctgagactgttgagggacagtttgttctttaatttcccccagagataattaagtacacagtccaaccaaaatgctaaaaaaatatgttaattatatttgtaagaaactctcacatatttcatgaaagtatattattcttttct

SEQ ID NO: 27032 - DNA, 201 bp, Bos taurus
ggtgtgacagaaaacaacaaaattctgtaaagtaattatccttcaataaaaaaaaaaaaaaagaatcttggacgtaagtcaggatttcctttaatgtcaatagataacatcttcaccagaaagtcacttcagaaaaattccttattacactgcatatgtttgatatcttcaaaatcaagatttacatttttcctactcctg

SEQ ID NO: 27033 - DNA, 201 bp, Bos taurus
gataacattttactttgcagaagagcagggtaaaaatgtggctcgatgattatgtggtattttcttcaagagttcagataaaagatcctaagtcatgggccagtggtccacagggccctcgccaacctgcctcattctcagaatcacccaaagactcaaagctggatactgggaaactgttcctctgtgtgagattctgtt

SEQ ID NO: 27034 - DNA, 201 bp, Bos taurus
tgctgatgagagtctagaagggataaggagtgtcgacgcacctgatgaggagcaccggtgcaagtttctgtggcgtgggagatggtctaggaaaaagaagcatctgcacctctgttaccgcgagaccgtaacctcctgtccccctcccccaggatggtggggagcgcataaagagcctcagtctaggagaaggtagctgct

SEQ ID NO: 27035 - DNA, 201 bp, Bos taurus
cataattagggagactatttaaagctccaagatgtacactcaaggtttcaccttctgaaacattttcccttaatgtaggaatagtatctccaggaataccagtgtctggtgttatttataatatgaggaccctgagacagtgtgtccatttccagaaattcagaaaagatggtttactctaggaatcagtacctaagtaaa

SEQ ID NO: 27036 - DNA, 201 bp, Bos taurus
tatggccaatcttttcttctacccacttcccatcccaaaccacattttcattgcttcagagaaagaaaggtattagtggcagacagtttgcaccagcaggtggtcttcctctgggtttttaggcctgaagcttatgggactctgaatgttcacattctctgcttcaccttatggaagcttgtgttctgatggcctctgcta

SEQ ID NO: 27037 - DNA, 201 bp, Bos taurus
gttccaactacagttatccccaagttttatcccacaaaatacagcatgaaaaaaaaccacagcataaatattattcaagtaaaatgctatctatcatagctgcatacgaataattaaagctctgggcttcaacctgcagagaaggcagtcatgtggaacagttaaagttaatgatctaagtttacaataaaacagatttat

SEQ ID NO: 27038 - DNA, 201 bp, Bos taurus
gagaaaggaaatctccctgcctcaacatcccccacagtctctccccctctgacaccccccacccccaattctctacttctgcctatgtcagttaatggatatatctccctattcaggccccaaacctggagggtggttctgggcttgtctcttcccttgcccaaagcccccgattttttcccccagttctcttcactcccc

SEQ ID NO: 27039 - DNA, 201 bp, Bos taurus
aacacagctggtatactagttaggatttttcagagaattagaaccaaaaggataaaaggagatttattatgaggaattgtcccacacaataatgaggcctaagaagtctcatgaaccgccatctgcaggctggagaccctggaaagctggggagacagttcagtctgagtctgaggcctgagaacgggggagccaatgcta

SEQ ID NO: 27040 - DNA, 201 bp, Bos taurus
ataacaccagaaatatatgttctttgaaaatttaaaaattatcagctttgaggtcatctagaccttgtgctattcttgaacatagctctttagaatatttttgtgtgtgtgtgtgtgcatgtttgttttaaagcaaattttatcatttataacttccttagatatatcctatttatccaaattttcaaaaagaagtgcatc

SEQ ID NO: 27041 - DNA, 201 bp, Bos taurus
aatggcatctcacttctcagataaatgtgtttttgaatccagctttctgatctactcagtgtctacgtgaccagttggacaattgtccagaatccccaggtgggggacagatacacaccagtatttctgccattcaattgatcagagtgtttatgatacatggggttcctgtgggtcagttagtaggcagctgactgtggg

SEQ ID NO: 27042 - DNA, 201 bp, Bos taurus
ttcacaaagagacagagttctgactgaactcaccccagtccacccaataaacctttctctagagagctggtgtaaaagctgaaggtcaagaaacagagggggtcaagaatccgcctgccaatgcaggagatggaagggatgcgggtttgatccctgggtctagaagataccgtggagtaggaaatagcaacccactccagt

SEQ ID NO: 27043 - DNA, 201 bp, Bos taurus
caagatctttgctcatataattagttaagtgaataagtgggtgagtatataaatacatagtaagctgcattgtggttcagaaagcttctttaaaattgggtttaaacagtccatttaacctgacagcaaacttccatactgtttcctcaatggctgtattattgaactttatcatcagctttgtatatttccagttgttct

SEQ ID NO: 27044 - DNA, 201 bp, Bos taurus
aaacgtatgtcaagtaagtaccaatataatcgctaaatcatttgcatgcatagacacacacagactttttctaatgttatcataaagcatgttgaacatgcaaagaaaaaaaaaagcagtcctatccttaaactgttgtgtaatctaaagatacaattatattgtacctagaagaatgacaaacacccataaaatgggtac

SEQ ID NO: 27045 - DNA, 201 bp, Bos taurus
tgactcagtcaaaagaaaaccaagttgtctacctaaaatgagctaaattgtaagatttttctctcttcagataatgccacccctaagaactcagtttctacaatgttactgccctagagacactgtaaattctgtattgaagacaaaaacagaaatatgagaagcccagacacaagtcctctcattgtcctgagtaataga

SEQ ID NO: 27046 - DNA, 201 bp, Bos taurus
cccacctcttggcccccatgatcagaatccaggctcttacagacagataatctagcaagatggctcgaggtcaactaccagtctcggtgttcaccttgaagaattctcgtatcctctgcaagtttaacaggaaataacataagctgctccaggggcaacccctctccctccttgcctctcgggttctcccctttccaaccc

SEQ ID NO: 27047 - DNA, 201 bp, Bos taurus
taaattaattctcttctgcaaatcttagaaagccactgccaccaaatgtctggtgtcaaaaaatcaagcctgtgttatgagacacagtactcaactgtgacggaagagcggctgaaactaagcaatatcccttgcacactttagaaatatagcttttccacgctatattttcattgcaggttccaagtcgcatatggaatt

SEQ ID NO: 27048 - DNA, 201 bp, Bos taurus
tcctataaaccaagaaaaattggtatttggaaatgtctttagtttgctgttatttgtgaaggatacttttgctaaatatagaaatcttggttgacagtttcgttctctgagtaccgaatgcatcactccactgtctttgacctctgttgcttctgatgagaagtcaaccattaatctttttgttctctcacacatagtatt

SEQ ID NO: 27049 - DNA, 201 bp, Bos taurus
ttaataaagctaggtccttcaggaggtagagagagtaagatccaaaacaccagtagagacacaagcccagaatgggagaggggccaagtcatcctgttcttaaatagggggttaggagggaagcatgaaaacagatgctattattcttgtagaagccagagaatactaagcaagattcccatctgttggcctcaatttcct

SEQ ID NO: 27050 - DNA, 201 bp, Bos taurus
cagctggcctgagagagaaaccctcccttaaagggcgagggagctctgtcccaggctgcagagccgtcatgggcagagatttcttctctattttcacccatgcagtcacctcctcttggccgatttctagaactcagctcggcttcccagcaggagccccaccagagcgcttgctccctgagggtagaccctgatctttca

SEQ ID NO: 27051 - DNA, 201 bp, Bos taurus
aataaacttaaaaatccaggaagtgtgttcaggaacttggaagggagtggactggaagtttggtgacaaacaggtctggatcagaggcctatggttgggcatgtgaaaatgctatacccatcagaaagtatgggtcatgggagatgcatctagccagttgacatgagcaaggcccctgtcattggccattcaggaactggg

SEQ ID NO: 27052 - DNA, 201 bp, Bos taurus
ggcctgccactgaacatcgcccctgttggtggtgcctccaggctgtacccttgggtttctgatttgaaccatctgctctccaccctagggcttgaccccagctcaggatgcatttggcaggccagaaaacgtcggtcctgcagagagccactttcatttatttctttggcctcactggttcctgcaaggccagatctcctc

SEQ ID NO: 27053 - DNA, 201 bp, Bos taurus
ggaataggaggggaagatggtggtacttgctgccatgtggacctaacccactgcagagctgcctgttattcaggatttatctagagagttcatgaagtaccgatgctgtttacttcccaggccactctgttgggcaaaaatcacaggtgttcacttactttatatgaacccactggaacagaatacagtacctcctgggat

SEQ ID NO: 27054 - DNA, 201 bp, Bos taurus
taggtaaatccaatttgggcaggaaggagctctggttctgggatagctgagaaagagatcagcagcctgtgaagctggctcaagatctggcaggaaaaggggatagggccccattctcagaagatctgactcttccctgtaccatcacacacagtcctcagatcacacacctgggtatcacctggggaagagaagtgggca

SEQ ID NO: 27055 - DNA, 201 bp, Bos taurus
caaacaactgtggattcatgatgaataattatcctctttctgattgatcctcaataattcaggtgtgccaacgttagccttcttatgtctctgcacgcttcgagtagctaatgaatacagttctggacagagatggcgataagaaatgtttctcccaagtcatcctgggttttctccctggaccaaaggaaagaaatactt

SEQ ID NO: 27056 - DNA, 201 bp, Bos taurus
ggtcagtgacagcaaaagaaacaggcagcatattggaaaaaagaaggaaaaataaaaagaaatgaaggaaagaagttctttggggacttttgaggttcacgtctcccatcactataggaatgttccaagggctataaaaacttacagataagaataaaatgttgcttcgttactcattttggttggatagaagccaagcat

SEQ ID NO: 27057 - DNA, 201 bp, Bos taurus
gccgcggttacctctacttctgtaccctgctgcattttaattagccctagtccctcgacaacttcttcagtgcttcgttattgccatcttcaaggaactcaagtaaggctttttatatttcatgtcgctaattggaaaaaatgttgaacatcctagtagtggggcttgatgaggcgcttcttagaacaatacagtcttggc

SEQ ID NO: 27058 - DNA, 201 bp, Bos taurus
aacgccagatttggtttccaatgagcagaaaggaaaaatatcttactaactgaaataaagttggcaagaaaattttgaagactcctgtaatatccctcgtatctctgtctaaatcatttttaataggaaattttttatccccagcgtatgacaagggctcccaagaatggtgatttgtctctcagactaagagtgtgaatc

SEQ ID NO: 27059 - DNA, 201 bp, Bos taurus
caaatgatcttcaaaagtcattaaacatgaaaaatactattttcctgttagcatacataactgtcagtcaacatggaaactaacagacatagatttacttcctctgagaatcagggaagttgtacaaactctcatgagctgatctcttaattcctctacttacaggccacttgctaacttcaagacatctctttctcacac

SEQ ID NO: 27060 - DNA, 201 bp, Bos taurus
aagaatggatagacagctagaaaggttagcagatcatgcagaatcttctaggccatgcttgaaagtcgaactttattccacaaacaatagcgaggcattgaaaagataatgacaagattagatttttgcttaagaaagactacttcctgcaggcaggaaaaaaaataaagaggacaagaaagataggaatgagagaaaaca

SEQ ID NO: 27061 - DNA, 201 bp, Bos taurus
tccgtggtctacagcagtgattctcaaagcttggtcctgagctaagagcatcagcatcccctggggacttgttacaagtggaagatctcaggccgaggtatggctcaggactttttggagtgaggctctccaaatgagcctaatgcactctcaagtgtgagaatccctgggctgttactgtccacacaaaatcattttttc

SEQ ID NO: 27062 - DNA, 201 bp, Bos taurus
atctttcccccacttttgtatctgttccctggacttcgtcagcggatgacctcagtgccaatgagcagctcgtgggcccccacgcatcaggcgtgaactctatcctccccaaggagcacggcagccagtttttctacctgcccatcataaagcacagtgacgaggaggtaatgggccttaaagagtctcttaaagggcttc

SEQ ID NO: 27063 - DNA, 201 bp, Bos taurus
gcagtgccgtgatagcaatgggatgacagatcttctctgggagactgatttctttcggatgagtcatccccaccctccactgccagattactatgcccacagcaggacctctcttagccaggtgtgcctggctaagttacgttttatcccatccttccctggttcactgcttccttgtacagttaggaccagagggaatga

SEQ ID NO: 27064 - DNA, 201 bp, Bos taurus
gtgaacaggtggtagtgttttatacgcctttgtatggccaggttactttgagatcctggccttgagttctggtgacagtggcctttgggaagttcaagagtagaacaagagaagtcaaacccatgtcaacagaaaggaaattaaactttcagttaggcttggaaactcatgtgggccctttacaatctatttagaccttac

SEQ ID NO: 27065 - DNA, 201 bp, Bos taurus
ctctcacggaactcctagtttggccttaaagagccatcaacttgacccatgctaaaacacaggcttttgaccctcgcaggatggccagtgaagccaagaagtaggagccatgtgtatagatatacagattgtacacctatgggcttctctaagaagcagccagccctgaacagtgagaagcagaacagagtgtctctgagt

SEQ ID NO: 27066 - DNA, 201 bp, Bos taurus
tttgtacacctctcttttatgctttatttttttagggcccactccaagatgttcagccctttcggtaacattccttctgccttctcttggtggcaaaacagcaagagagacaagggctacaccagatgagctgcagagaggttttttttcagcaactgaaagtttctgggggacatatattcaactgtaagtaatcatgtg

SEQ ID NO: 27067 - DNA, 201 bp, Bos taurus
atcattaggatatcaacatcagattaatcaagacactctgtttccctatactggttaatgaagtgtaaagtattttgtgaagttgtgttttaaaaatgtttgagatataaaaatatactcaagataatttgaaatatattttaatgttggtacattttgcttcaagaaagtttaataaaatttttaaataaatgcaaaata

SEQ ID NO: 27068 - DNA, 201 bp, Bos taurus
aggttcatgtgtcagtatgtacttgttcatataataagtgtatgcacatatgtgtacatacacaatatacacgcacatgtacagacagacacatgagagatgggagagaggccctcatgcagggtggtccagcaggaggagtcaggcactttacaagcaatggccatcattaccacagggacagagtttagactggtgagg

SEQ ID NO: 27069 - DNA, 201 bp, Bos taurus
atgaaaagcaatgcaaaagccacacaatgatcatgtctccccggaggaagaccgcaggtcctctgccagccaaaggcagggtttgcctttcacacctctgaagcgacagcccaggactgagtaagagaactcagcaacttacaggaagctaacaagcctcgaaccactctccctccccagaagaacttctcagccgcctta

SEQ ID NO: 27070 - DNA, 201 bp, Bos taurus
ggatgatctgacattcagatgatccagaagggctctatttaccccgccttgttccatgagactggacggcaggaggcctgagaaatgaagaatcaggggaaatgatacagccaaagagctccaacctctccaaaggggaataactacaagctccagaaaggccaagtgccagtccgcattacacaacggcatttgccagaa

SEQ ID NO: 27071 - DNA, 201 bp, Bos taurus
tatctctgggggtgcctcacctgttatctctggtggtgtctgctttctgagcatcactacctccagggttgctgtcttgctgtgactgccagggtcaggtcgggccacctcgggctggtcccctggaacctcagcaatctcttgctgctgctgctctcctgcgccactgtgtcataccatcgcctagaatcttcggggctt

SEQ ID NO: 27072 - DNA, 201 bp, Bos taurus
agatgcacctgtcacccaaagatgctcagttgagggtggggggatttgctggtctacaaagtcgatttgttgaaggttaggtggtggatggcctcagtatcatttggaaacagtgtctggaatgttccaagactctccactcatctcttagttgagtttttcctctcagaagactttcttcccaaagctggaactacacat

SEQ ID NO: 27073 - DNA, 201 bp, Bos taurus
ggtcgtcaacttttccagatactattgcagaagtgtcacgggccttgctccttgtctctactatcgttgtcaaagcctcggctcagattgtcctcaaatcctagtagggctgcttcagagtctgttagctggtacgctcgacactcatctctctcgacttcagtctaccgctgacacactgctcctgagagcagggctggt

SEQ ID NO: 27074 - DNA, 201 bp, Bos taurus
ggaagatacccaatcaggccgattctccatgcttaattcaaggtgacaggttaacaacaggaaacagagaacaatcatgagtcatcaccctctgggtgctggtgtaagaacaactggcctcaaaagtaggggagagaaatgtggtcctagagacctgagtagaggcatccaccctgctgtgtgacccgctaacgcctgact

SEQ ID NO: 27075 - DNA, 201 bp, Bos taurus
aactgagtctgtgaggtcaagcattaccataatccccattttacaggtgatgaaactgaggccaaaagggatcgacagggaggaaactaggatttgaatgaagggctgactctaactgacatcaggagtggagaattcaggagggctgagttgggtgaaagagcctgggagctggggatttgaggaaggagccggcagatg

SEQ ID NO: 27076 - DNA, 201 bp, Bos taurus
gtgatgagtccgtgtttcaaacgatggggcaaccttccactcatgtctcctgatgggatgcaactccaggtacatgccatcatcctaagacaaactcttgacccaaatctgaatccaatcacgcttccaagcctaactctcagtttacagaaagtagaagtgatagaagttaaatatcaccatttgtctgacagtcagtcc

SEQ ID NO: 27077 - DNA, 201 bp, Bos taurus
cttattgtcttattgaggatttagtcacttctcaactattaaaaaatggtatgaaaacatctcttctaaaggtccctggattggtacccaggttcccgaggagagactgagggggcggagggagacctccgaaggacacccacccatctctctcggctcccagcgaggaacgaaggaatggttcagttcccaaacgtccct

SEQ ID NO: 27078 - DNA, 201 bp, Bos taurus
aaattaagtatcaaaactacttttttaggtcctttttttctccttccaagatctgggagccactgtcctcgggcagcttgctaagttctttatctttaggtcactctttcaatgttcatcccatgagttgtttcttgagaggcctaaccgtcacacttctggcttctaaaggagtctgttcattaaacaagtgaaacaaac

SEQ ID NO: 27079 - DNA, 201 bp, Bos taurus
aggcctggatctctgggggtcttccctgcgcatctatcaaagatcccctcctaatagaccaggtgggctgggctccctttcagggcataactgggatggactggctttatcagacagcggggcctgtctgggaggaggtggcttttcattctctttagcaaagcaggagacaaaacactgatggatgcatgattttaacac

SEQ ID NO: 27080 - DNA, 201 bp, Bos taurus
tattgtcaaattgggacacttctgggagcaaaagggggtgccatgactagttactctggaacagaagacatggctgaggctctagcaggcctagtggggcacagtcaccctactttcaggggtctatttaggtgatgtgctgttttacatttgctgacaggctgcttttggaatctttctcaagttgcttcttgcgggccg

SEQ ID NO: 27081 - DNA, 201 bp, Bos taurus
ccatgttacacataagggaactgaagtacagagacattcattatctttccatgttaaggaacactttgattacctcctgtttatgatcatacctttgaggtcattacacctagtgggtcagttgcttcctcttgaattctgttgtgcttgagatttcattataactgactgttatcttgggtttagtatagtgtctgctgc

SEQ ID NO: 27082 - DNA, 201 bp, Bos taurus
gccccagcaaagctgatgcctttcctgggtttctttttctatagtgttatgtaaattcctgtcaaacctacgcacccactgtgtggtttcctcagtttctatcttactcactctcctggtgagcaatggttccagggtgcactgatgaggaggagaagagggcatcttggtgacgtctgctctgagatggtgagatgtcca

SEQ ID NO: 27083 - DNA, 201 bp, Bos taurus
tctctttaacaccatcaaagacccaaaaactttgtaaaagctgttctgtgttattacaacagttgcgagtcaataggcctgccgtgaaacaatcactgtttccgagaacagaaaaaaagtcacctcctcagcacttcaagtagctcattggcgaagagggctcgtggtttgaggtcagccttgaagacaagtggctaggct

SEQ ID NO: 27084 - DNA, 201 bp, Bos taurus
ctgaatgataaaacatactggagacagacgagggtagggggtggagaacagctcatggttctcaggcctggcttggttctcaggcccggcaacctctgggttggctactgccaagaaatactgagagaagatgctccggattacaacgtgggctggggccagggtggcttttgtgggggaggggaggctgcttatagaccc

SEQ ID NO: 27085 - DNA, 201 bp, Bos taurus
cccttgtagaaatgatttgatgacatagcttgatccaggccaagagtagcccctgatactagcctcactgtcttgatttctgtcttctctgatcttggtcgttcatttcttccaccttgttgattctttgatgatttttaaaactgcattttatactttctctagctttatctttagcaagagggttggtctgaatcccca

SEQ ID NO: 27086 - DNA, 201 bp, Bos taurus
gtttcgtttctcatctttgatcctggcaaaacctttgagtattaggataaattttaaaagtgtcttctcttccatgcaccatacatctgatggcaggagcacgtgccccagctggagcaggttaccccacaccctgggctggtagaaacagcgccttccagtcacgacccctcggctgtggtacagatgcagtcatttcaa

SEQ ID NO: 27087 - DNA, 201 bp, Bos taurus
atgccccctgcatgagtggcagcctactatggcagagggtgcccgctggctggcccaacaggcgtgggcatactcctcttgtaacagcactctagacttatgtggggtgctcattgttgctcagctgaaaaccttcatttcacaggctttcctttacctaattatgtttgcttagtaactaagttgtagatactggaatgg

SEQ ID NO: 27088 - DNA, 201 bp, Bos taurus
tgctgtggcaatatcccggtcaatagtcttatcatcttgctttctaaatacagcaagttctttatgtatgtaccttcaagttgagaagcttcaaagctgcaaacgtgtgtttgcatgactgatcacgtaagttagttcacatttctggtgtatatcatcgcgtgtgtgtatctctccaggtggctgtgcttttgtgtactt

SEQ ID NO: 27089 - DNA, 201 bp, Bos taurus
aaagaggtaatgaataaaggaagtattggagaaaaatagctggagacttgttgttgactagctatacactaaaggttgaatataaataggaggaaatctcgtagtataacactaatgttgttcaagcaggaggagaaagttttgttggtttttgagcttgccaaagggtttgggcagtctaggtcagaccaacatctggag

SEQ ID NO: 27090 - DNA, 201 bp, Bos taurus
ttaacaaatcaagagtgttgatgggtaaaccaaatctttgatataattcttggtagcagtttcaactttttattcagcaagattgaataaagtatctaagtatcttataaagaaataccatcacatttgaaatttgaatgactacaagagcatactgtaagcagtcaagtaaggtgtgcaaatcaaatatttttaattggg

SEQ ID NO: 27091 - DNA, 201 bp, Bos taurus
cttagctcaggaaggaatcacggcgattagaggctgtgggcgctggggagccggtgtgcgcctgttggacggctgggatgctgactcacgtgtgaaagaaccaggactgactccaagcccgcggcgtggcagcctcggtcccgcaggggttcggctccccctggccaacggcacggcctgcagtcaacagcaggccccttt

SEQ ID NO: 27092 - DNA, 201 bp, Bos taurus
ctggatgtcacttaagatatggtccttggataaacatcacatgctcctggctttcttacaaaatgggtaagcactgagtctctttttggccgctgaagccgcttttattttcctgaagccttctagttagcaggtggcttgaagagaccgtggaaagggacagacagcacgcatgtgaattactgtcttcctggccttcac

SEQ ID NO: 27093 - DNA, 201 bp, Bos taurus
actcagcaactgagtgatcactaagacagtaagggcgtgagagtgaaaacagtaggcgacaaacatggaaaggccaaggataaacgtttgtgccgtcccaatctgacaccagctccccaggtagctcacgtcgtgaaatgctgcacttgctggacacagcggccaaatggctttcctcgcctcccgctcattctgcacaag

SEQ ID NO: 27094 - DNA, 201 bp, Bos taurus
attcatcatctgttaggcaagggaatcacgttggaattgtcactgactccatgagggatcacacaagagcactataaactgtgatgctactgtttgtcaatttaaaaatattctttgaccaaaacaaccacgatttttaaaagagaagtaaagaaattgtacttttcgtaggtttcaataagaaaataataataaatacaa

SEQ ID NO: 27095 - DNA, 201 bp, Bos taurus
ctccagtattcttgcctggagaattccacggacagaggagcctgagggagccttggctcccacagttgatggggtcgcaaagagtcggacataactgagcaactaacattttcagatgttttttagatcatccactccttgctgtaggactgttgcccaagttcaccttgtctgtagctcttgaccacctgttgacatctt

SEQ ID NO: 27096 - DNA, 201 bp, Bos taurus
ttcttgtgaaatcttatcatgaaaaaagataagtcaataattgaatccaattaatgtaccacatatttattatggtagagtacccagcccatagcaaactcgcaggaatcatgggttgaatgatggaggaaataaattgatggatttattaatcaataaaaacctaaccaaggaacaaaactatcagatacgtatataaca

SEQ ID NO: 27097 - DNA, 201 bp, Bos taurus
taacaagagcttcaggctgaaattacatctatgtgattaagtccaacatgataacaggtttttatggacttgtttacacagtaccacataggcatgtgttccgagaccctatccgacctgtcctcagtggacatttctagcctcagtagattctagcaatctgttcactgctgtgttttagccaaagcgctggggagtatc

SEQ ID NO: 27098 - DNA, 201 bp, Bos taurus
cgaaactcctgaatctgtgtcccagaaaaaaaagtttcaaatcacagaaaaatctcagatcgttcaatgattcatattaactacaggtaaaaagaataaacctgcaggaaaacaaaaatgctatcatctgaagggctatttccagcccctgtaaacttctaactccactcatgccacaaagctgaaggtcttgtaatacct

SEQ ID NO: 27099 - DNA, 201 bp, Bos taurus
atgtagcagtaaacgtcattcctctaatttactattttacttaccgagactagtgacatttgcagcaaagacaactaagcctttctccttgtgtaaggaatcgtgatcccaaatcctctttgctgattcttcagcaataaatgttttggcctcttttgtgtccaccttccctgtctttctgatcaatgtgccacttgtgct

SEQ ID NO: 27100 - DNA, 201 bp, Bos taurus
gggggtcctcagagagccctcaggtagagcaggctggaggcccctcgtgtgcgttcagtgacagcatttactgtcaacagtacctttcattcagaattccgcatcgacctcagagagcaaaccgggtgcggggtccaccgtgccaggccggggggtacggcggtggtcgaggcggccgtgcccctcccgtcccctccggag

SEQ ID NO: 27101 - DNA, 201 bp, Bos taurus
ttggctggccattcccagggggagaacgtcccaccatctgcttgcatttgtctggtcccctcaagagtcatgatcacatcgtattataaatcaatacatttgatactaaccaaatgggctgtgggcctttacagctatgggacaggctcaagattcagccagaaaaagactcccctacaggtgtgattctgcgcaggcaac

SEQ ID NO: 27102 - DNA, 201 bp, Bos taurus
aatgacatagggaaaccaggtccgagcaggcggaccgagccacgcccgcagagctgtggacagccgccctgcaacgggacacacgtgaaggaccctcacaagctgtttgctcccggacctcgcggtgctcacactccattttctcgacatggcctgtgacggaaggactgtccatgtgtcagaagcaaacagctcggcaac

SEQ ID NO: 27103 - DNA, 201 bp, Bos taurus
ggctcaaggctctggagaacaggacaattaacttaccagacactgcgctctgtagggaagaaactgaggatgtgatcatggaggatgtggcccaccagtcggagttcatacccaaggagagctatttgcctgaatggatttgagaagacttgtttttcagttgcccaattgtgtccaactcgttgtgaccccatggactgc

SEQ ID NO: 27104 - DNA, 201 bp, Bos taurus
tcttctcctttggaaaccagcttagatgcttccagacccacccaatattataaccgcccccggaacaccaataaatgcccttatgtccaaggcaacacaagcccaaagcatatggaagttaaaaactccaaccaaaatgcagggcatgtaacgacctagtctgattcaagaaacagaaaacatggagcactcctgttttat

SEQ ID NO: 27105 - DNA, 201 bp, Bos taurus
atccccaatcgacggcccaaagactgtgcccgcctgaagttttgtcttcataaggtttgaatttgaaagtgtcgccagcgcttcttgctgcagcctttccatcacccccggcccttcagacatctgctttctcaccatatttgcctgattttctcttctctcagcggatgctgctgttctttctcagtcttatttgctggc

SEQ ID NO: 27106 - DNA, 201 bp, Bos taurus
gcctgcagccggtccgggctctggttggcagccacgtgcgtctgcttgtgtagggtgagcgaggagagcatggggaaggccttgtcgcacgtgtcgcagatgaagcggtgctgctcactgatgcacctgcgcaggttcgtttcacaccaggcctgcggggaagccggcagagaggagtcagcaactgctcccggctgcact

SEQ ID NO: 27107 - DNA, 201 bp, Bos taurus
acacctgtctggtccatctccagatttatcgggaggatgaaagatgaggatgtacatgagagtgcttggaaaactgtagatttctatgcaaacaggccagcaaattattatggtctgaattgtgtccctccccacttccctgttcatatgtggaagtctggacccccaatatggctgcatttgaagacacggcctttgagg

SEQ ID NO: 27108 - DNA, 201 bp, Bos taurus
ccattccccagggataaccggagcctgacttccacgagcttaggaggacgtggttttttatattataaacatttgaggccaaaaagagattaaaaagcaatggagatgagctttcatcgaaaacaccttgccaaatatctcaagggaaaaaacgacccattcgaagctcttacaattgatcttttgcacttcaaacactaa

SEQ ID NO: 27109 - DNA, 201 bp, Bos taurus
ttcatttttaatatcgtttcctcaaaccatgaagaatatctacagggtcttcagtcagcttcctgttctgatgtaaccatttcgtgtttctttaattttcacattttccgtggcaagagcaacttttaaagtgatcagcttttttgattttcgtaaatgtttttttttttttccctgtgggtaagcaggggatgtttttct

SEQ ID NO: 27110 - DNA, 201 bp, Bos taurus
aaaatcactaaattaaaaataataaaatcattaaattttaaatgtcaacaaatagcaagacattataaaatttgtaaaaataacattttaactaactcttgatatctgctttccctctacaagtgcttgttcctcctagatttttgggaatgtcactctcttcagatggcaactttgtcatagttttctataaggagacta

SEQ ID NO: 27111 - DNA, 201 bp, Bos taurus
aagacaaccagtgtcactcagttgcttctctgcctggtgctctgcacatgtgattatctgaaaccctcaaaactgccctgtgataaagtttggcctgtgtactgttttatagatgagcaaaacagattgtaacaatatgtgtgcataagaatctcctgagaagtttgctgctgatgaaggtgacttgaccagccaatggtg

SEQ ID NO: 27112 - DNA, 201 bp, Bos taurus
cctgggtcctcactgtggcgcacaggccttctctgatgatggcgagcgggagctgctccccaggtgcagtgcacaggcctcttgctgtgctgtcctctcacgctgcgggctcgaggtgcacaggtgtcagcagtcacagcgcacgcacttagcggccctgcagcgtgcaggttcttcatccccagaccagggatcgaaccc

SEQ ID NO: 27113 - DNA, 201 bp, Bos taurus
gggtcaccatggtccaagcagaccccaggccaactcagggttggttttatgagggcatctaatgccttgttggatattatatctctgtttgttgttgttcagtcgctcagtcatgtccagctctttgcaatcccatggactgcaacacgccaggcttccctgtgtttcactatttcccggagtttgctcagactcatgtcc

SEQ ID NO: 27114 - DNA, 201 bp, Bos taurus
cattgggtgctctgggcccctctgccttgattgccaccaccaccaccatcacccaactggtggggaaggtccagctaaactttctgtcctcctccctctagcaagggcagagtcaggcctaattgttcctggaaaccgctgactatctcgctaatctaataggcacacctcctggagccgagggtgtggatcctgctgtcc

SEQ ID NO: 27115 - DNA, 201 bp, Bos taurus
gacggtcccgtcaagagagcttcagagatgagcgacagggaggttcgagggcacacaagtggctattgggcaagacgctggatcgctgaggaactgccctcgggttcccaagaggctgcagtgtagctgggagtgtctgcagggctcagacgactagacccggccgagagggcggcgaactcgggattccactcgtatctg

SEQ ID NO: 27116 - DNA, 201 bp, Bos taurus
tctccagcgctgctgcccgggggccctccccggccccgcccccagccacagtcctcccgtcacacagaggagctggagctgactccaccttcaaatgcccggaacacgggccgtggtggggcggagggctggctaggctgtgctctgtggtgccccgagggcctgggagagtggctggcacccagtaggggcacgatagat

SEQ ID NO: 27117 - DNA, 201 bp, Bos taurus
acgtccaagagccacggttcttggaagtgtcctgggcttccgtgaggcggctgacccaccgctgtgcgtcggggttcccgggaggggcctgctgcgtgtccgggaaggaagggcgcagtccacgtgtgcctcgtcccgactactgcacacgcggtcgctggagccggccacttggtctctagcgtctgcagggcccatggc

SEQ ID NO: 27118 - DNA, 201 bp, Bos taurus
cattcaggcctaaaatcctcaccaacagtcttatgtagaaaccaaaacccctcctgccctggtgctatgtactctcccagctgtatgtctcagcctctacttccgggccttttccaaacaccactttctttcttagaaagaatggaggcttgagaacaggagatcttttttcccccccttttaggaccctaaatggggctt

SEQ ID NO: 27119 - DNA, 201 bp, Bos taurus
agcctgcctggccctgggatccctgatccgtccaagggagaaaatgaaaccgccgatctcgtgggctgttgggaggactacagagttgatgggtgttcactgcgggtgctggcgaggcctggcgatggtgcagagttggaagcttgggggcagggaaacattatgctaatgagatgtttctcctcagtgtcaacaaagaga

SEQ ID NO: 27120 - DNA, 201 bp, Bos taurus
aatgaggagcattcttcctgctcctgcctttgaaaaaggaccgcaaaggagtgaggaccaagactcctggttaggacaaagtcgtgcaggccaaccctgtggtccaggtggtgagagcaagtttccccgcggctggggaggacacgggtgctctggagccctggggcacccaaagtgggtgtctccagcagtctcccgggt

SEQ ID NO: 27121 - DNA, 201 bp, Bos taurus
tcatgtaagtggaatcattctctgtcctcatgggggtggggggtgagctgatttagttctcggatgcagaggacggaaccgcaggtcagctcaggcccgatgtccagtttccaggagctgctgaggaccatgacgagccctgtgatgcatctgaaccagcggctcatcacgctgggccccatcctgggccccgggccccat

SEQ ID NO: 27122 - DNA, 201 bp, Bos taurus
gccctccagggctgcatggagcaaggggtccccgtccacgggaagcccccagggcccccaggtcactcatctctcccacatgagacagtctcgggacaccagtctcttcagcactgtccagacggccaacaacggttaataacaccttccgctgcggggtcctgaccccagctccagaggacgacggagcagggcgtcaca

SEQ ID NO: 27123 - DNA, 201 bp, Bos taurus
ccagcccccaccttgaatgaaacaacaaaggccgagaggcagccgtctccagaaaccctctgtgaaccgagcgatcgcagaagctacggggagcaggcccatcctctgcacagcttctggaaaggtctccctggttgtgaagagcccagggcacggaagctggggcagcgctcgtgagaaggtggaggccacgccctcagc

SEQ ID NO: 27124 - DNA, 201 bp, Bos taurus
gcatgaagattatgggataatatgaaagaaaaaaatgatcttttcaactctctccttttcagagcccaattaggcttcttgttgggttgggccttggccatgaataggtcgtcctgcatagcgggtggtttgctgtcgggtcccttttccatcctccagctgtgaaaggcaggaagtgatttttacgcagacacagcaccc

SEQ ID NO: 27125 - DNA, 201 bp, Bos taurus
aatgtgctgtctgctgcccactgctctgtctttcagaaggaccaggacttgagcacgtttcacaactgaatctttgggtgtggctgctgcagtttctctggaagtactgctgggccatgagatctgaaaagcttgtaaatactgtggatcgctaaccagatatgctctgtgtcacctggattacttctgttgtttgtggga

SEQ ID NO: 27126 - DNA, 201 bp, Bos taurus
aagagcagtgtgttgatagaacaaacggtggtcagccccacggaaggtagggtttacagcggtcgcatccccagccaccgctttctgtagatctaggagccgttgcagtttaaggccatactgaaggattactgaagggactctttaaaatgacggtttagaagctgcttccccagtggtgaatttcttgccattattttt

SEQ ID NO: 27127 - DNA, 201 bp, Bos taurus
aagcaaaatttaaagtaataaaaacatctggacccctctaactgttatccatcactcctaacgtggccctcccccacctcccttcccctgcagccttgactcttcattgctgtccctcaggccctccatctgacacgggggcctcctgggaagcctgtctggctccggctgtcacacactagagtcattgtcctggcactc

SEQ ID NO: 27128 - DNA, 201 bp, Bos taurus
cttcccaacccagggatcaaacccatgtctcctgcctgtcctgcactgcaggcggattctacaccactgagccacagaccaagcctggttctctgggccaacatttcccagagtgtgcctattccctagaccacgagctagctctatttagcaacgcacatttggctaccacttggagtttcacagtgttggtttctgcat

SEQ ID NO: 27129 - DNA, 201 bp, Bos taurus
ttttcatctataaatctaactcttatatcccatggtggtctcctgcagctctgacgaattctgtccgagtttggagcctgcatcctggcccctctgtagaacagactctcacttcccaggttttctatttttctgcccaggagcccgggttctgcacccaaggccagtcccaaggaaagacaagcttgtgtgcagcagggc

SEQ ID NO: 27130 - DNA, 201 bp, Bos taurus
cgggacggggttcccatctccggccccgcgccgacacccccagtgtgaggagaagagtccatgtcgctggaggtgaagccactgcttcatggttttcacgagctctctgatatcacgtgttcttatttacagtaaaaattaatgacttatttcccatctgagtgaagggctattttattcactggttttttcctttgtcat

SEQ ID NO: 27131 - DNA, 201 bp, Bos taurus
acacttgactttgatctctcgtgtcctgtgaacttggctgtggcgctgaagggatggtctttcaaaaagcagatctaatcttggccttgccctgctggcccgccaggcgtgcccagccccgctgggcagggagatccctgaagtagcccctgttagctcccccgtcgcctccctgtctggtccttggacagaccaggctct

SEQ ID NO: 27132 - DNA, 201 bp, Bos taurus
ggaatccagcgccctggccgctgggtgctggccgcccagccctgcccgctgccccagggcccgcacggcggcccgtttatcttccaggtgttacagtcgcgggccgggccactgctccatcacgctaaacgggcaattatctaccttgtcacttctgcctctgctcttttgacccaggggtcacaggggcccggctgtaac

SEQ ID NO: 27133 - DNA, 201 bp, Bos taurus
cgtccagcacgatctcgggcctcgtttttacttcagattcccccaggcagcagcgccgcgcttcagcattcttgttgttcccgtttgattttgagctaacaccagctcctcaaggcccagaactgccctccttgctttgtttttatcagcttgatgaaaggttgctaaactccttatgcttaaaagaattccctttgtctg

SEQ ID NO: 27134 - DNA, 201 bp, Bos taurus
ccttttttgaagaagagactatcagtgttttattgtctggaattatatacttgggaaatattactatttatattaatagctgatataaaaattcattagactatcttgctgccatagggagttacaagaatttttgcttcttaggttttgccttttatgtcttctctacaaagaccagtgattttcacattgtgttttaaa

SEQ ID NO: 27135 - DNA, 201 bp, Bos taurus
gccccgcagcaacctcggggatcctcgtcacattcgtattatggtgcatcaaggcgtgtctcgtgggcatctcacactgtgccttctgtatgtttgtgtcgttggccagctccatcgcagcctgcttgtttccctttagcatccattcctgcctaagatccatcgctgttacctgcccactcagggagcccttagaagtga

SEQ ID NO: 27136 - DNA, 201 bp, Bos taurus
cgctgatccagacctgtatcatttaatctgctgttgattccttctagtgtattttcattttagttattgtatgtctctgatcattctttatattttcttgctttttgtttaaaattaataacttttcaatctgctcatccattcttctcccaagttctttgattaccttgatgatattaccatgagctatttaccaggtaa

SEQ ID NO: 27137 - DNA, 201 bp, Bos taurus
acaatcacacacacatcagtttcacgattgcctcaaaaatgtacgttacagcaatgacatgcaagaattattaaaaatccacgtggtagactgtcgcatcttccaagcacgcggcacaggcgcctctgccgtgcatcaccaacactgcggctcaaggtcaaacaggctggtctccataactgcttctggtgctttaagtta

SEQ ID NO: 27138 - DNA, 201 bp, Bos taurus
acttatttcattgcactcacctcactacgttgtaattatttccttatatacctattttcccttttgaactaaacatcttcagggcaggaatcatgtttctttgaacatctgggcctatcacagaggttcaaaatggacaggctgtagaggattattgagttggagttcaagacattctaagtaaataaatcagcatcaaaa

SEQ ID NO: 27139 - DNA, 201 bp, Bos taurus
acagtctcacctatggagcagctctctgccttttccatggggatgaaatcacaattgtttgttctctgtcctctacagagccctgattctgctccaaagaggctcagaaaaacagactggggggaaaaaaaaagatctctgtaacgaagagtaggggatgccatgtttagcccctctgctttttaaaatcatccttatgct

SEQ ID NO: 27140 - DNA, 201 bp, Bos taurus
gtaacagaagaggtgcctaggaatagcaaggcacccatttccgctttatggccatgaagtgtcttcaggaactgaggacccgagtccaaatatcccatcattcttactgcagacagttccaaaggtttgggcagtattgagccaggaactgtggataaaaccaaatacataggagactatatcttttgagtgaccacatat

SEQ ID NO: 27141 - DNA, 201 bp, Bos taurus
ttaaattcaggaggataagtggagggaactattttgggaacttttagaaaatgaccctaattcatcataatttgacacatctggcctatttggccaaaattgggtcagcagtaaatctacacacccaaggtccttccctcccctacgtctccatcatctccaagcgcccccagagcagcgccagcctgccccacccagccg

SEQ ID NO: 27142 - DNA, 201 bp, Bos taurus
tcatccagaagttttccaagttgctcatttttcatctcactacatctttcagaccgtatttctcacccacactgaaaggccttcatcagaaatgctcctgggagtaagttttgcgagcttatataaattaagatggaaatgtcatgataaagcagtcatcacaagtcccacttatttctaacagttttcatggccccagga

SEQ ID NO: 27143 - DNA, 201 bp, Bos taurus
tgagggccacccgccttccagcccagaagccctgcccttccaagtccacttgggtcgggcagacttctttgctgctggtgaccacagagtaagcatggaagtcaaagcagagaaccaaggccaaggtgaacattaatgtggctgctgcctggtgagatgttggttcatggggggccagaccccaacatgcaggtgacccct

SEQ ID NO: 27144 - DNA, 201 bp, Bos taurus
caatagttgaattgcttgggctgcgtagacacagcccgactccaggtgggaagatccacattcagaatttggataatttcaaagagactcggccattctgcccctttgaggaaatgccttccccaaccacttatggaattaattgaccaattagaaaatattcaggaagagagagtggctgatctgaaactttctgataag

SEQ ID NO: 27145 - DNA, 201 bp, Bos taurus
acacaaaaaatatacagcaacttcataagtatgttaaatatcttcttacattcctactatttttcttgctttcttttgtcccctgcaaacaacatctgtttactgcatttttggtgttttttgcaaatggaaatgaataattcagcttgacagtacagtagtcaaatgacacctttaggcactatttacatccagtaaata

SEQ ID NO: 27146 - DNA, 201 bp, Bos taurus
ctggctgtacctctgtgagcggaggatggacgggctttcatgcctccctgacctgctgaggatgaagcggggaagagcaagagggtctaagatggaggcatgagccagggagggaagagtcctgagtcagaggggacagaggagggtgtgcgggcagggggcagccaggcctcctaggaagcaggccagtgtcccgcggcc

SEQ ID NO: 27147 - DNA, 201 bp, Bos taurus
gtggaaaggcacatgattcaccctggcctcctctgtgcacctttcacacgttgcacacgtgtccctgaaggctagcatttccggccacatgcagggcacatgtctcagcctaacggtgcctggacgctcagtagtgcctccctctcaggagtctggggaggggccagctcgccgcccctgcccagccatgtgagtggccac

SEQ ID NO: 27148 - DNA, 201 bp, Bos taurus
cctgcaatgctttaggtgttagtagcaaaaagtcaaattagagtcagtaatgacacagacatattcttcaagcggactgcctcctggcctgatggggcacatgtatagctttaccaccgattaatgatactgagtcttactctacaccggcactctcaaagtccaagcaacttaggggaataaaccttcatctctcaagaa

SEQ ID NO: 27149 - DNA, 201 bp, Bos taurus
gcccttggtgactcctggtgattgagctccttacgcttctattcgtttcatgaaaaggtagcccaggtgtgcctgccctgaggcccagtaccttcctcccaaccccgtggcaccagagtctcagcccctcgccgtgacacctggcagcctcacccttgtacctgctgggctggcacccacgtggtcagctcctctcaccac

SEQ ID NO: 27150 - DNA, 201 bp, Bos taurus
gaccagctgtcccctctcacactgaggacagagaaagaggaaatgggcttacgcttcaatagggaggatttagatgagatataaagagcttccttccagtgagggccgtcagcaaagagaccagttaccagtgaagatgctccttaccctgggggagggggggtttcttccctagaggagaagggctggttgtggggcggt

SEQ ID NO: 27151 - DNA, 201 bp, Bos taurus
aaaaccctaggagctaaatgcttaacatcggaatctctcaacgtctaaacgcacctattgttcattgtactaactttacaatgtcacttccagagtcaccgtcatggaggctagacttcagctcgctttgaaaagcatcagagtgctttggggcagctcatccactgttgtcattatgatagtgcttcgtaaatactgtga

SEQ ID NO: 27152 - DNA, 201 bp, Bos taurus
tggctccactggtgccggagagggaaccacagtgcgttcccgctctggatgctatagagccaggactccacgcaccagggaaagccacgtgccggtgctgttctcattctgcagagtactagactcagaatagtcagtgatacgctcacttttcctttatgaaggagacctgggtcttcaacgctcactcccagttcctag

SEQ ID NO: 27153 - DNA, 201 bp, Bos taurus
tcttgagtccacagaaacaccataagtaacttctccatcatcagtaaattgcaggtatagtcaatatatgtgtgaattttaggatatcctctgatacattataagttcacagtcttggaaaagtaaattaaggccacccagtttgtgactgtggttcgatttttctggaagcacactaaaacctaaaagtgactgtttcag

SEQ ID NO: 27154 - DNA, 201 bp, Bos taurus
tattttagcaagaactttgctttcaccctgagactatactgtaccgagttatacgtttgggctattgtcactcagtcctgtaaacactggagtgaggaccgataaaccacacactcgggaccctccccgcaagacgcgggccactcaccctcctgagacccagccctgcggggccttccgccccgcccgctgccctctctc

SEQ ID NO: 27155 - DNA, 201 bp, Bos taurus
ggaaaaaacagttgattttcaacttcttgctaaacaaaatttagtccttaatcaactaaatctgaagacatagggcaagtgacccaagaaggcctgttgaaaagagaccccagaaagcccagatgggacctttacttgagactcaaattgtccctgaattttgtaattaggacatggccaccacatgaatgcttagagaaa

SEQ ID NO: 27156 - DNA, 201 bp, Bos taurus
ctgtgaccttttcctctgatcctcctcatggcctggccctcctgtacaaaggtcccgcggggccacctcctcccggcctgccctccgcagggtggcctcgcggatgtttatccctgatcttctgggtatctcgtcaaacccgccagtgatgactcctgagtccaggtccctacccagaccctccccctgaactccaggcct

SEQ ID NO: 27157 - DNA, 201 bp, Bos taurus
tggggccagcgttctgtgattttagctcccgagtgtccggaggctctccagacaaagggctggtgtgctacaggaaggaggctcaagtgtgtccattcccacaaacgaaagtgcattggccctgggcgtccagcagggagccctgcccgagcctgggcaggggtcagggcagcgtcacacagactaacacccaggtcatag

SEQ ID NO: 27158 - DNA, 201 bp, Bos taurus
ctccccctgtctctcaggatggacaccacgcggccagaaccacccactatggctccctgccccagaaggcgcagcacggccggccccaagacgaaaaccccgtagtgcacttcttcaagaacatcgtgagtgttggcgtgggggtggggagtggaggggtgcagggcgagggtgggggagcggagaggtgaggggtgcctg

SEQ ID NO: 27159 - DNA, 201 bp, Bos taurus
cagtggagtgcaaccgtcacatctgtctggaacccaaacctgttcaccaccccacacccgacagcatcccctccccttttctcccaaggcccccacccctggaaatccctcttccactttctatggatttgcctatcttagacgttttgtgagagtggaatcgtacactatgtggcttttggtgcctggcctcccccaagc

SEQ ID NO: 27160 - DNA, 201 bp, Bos taurus
gccgcggggttgagctccctgtgctatacagcgccttcccactaactgtttcacatgtgtaatgtgtgtttcagtgctactcttcttgtttttaaggtcccgtatggctgcagagctgcccgtcaaagctcctgggtctctagacagtttcttgctgagtcagcctcctcagctttaatcatgctgttccccgttttaagg

SEQ ID NO: 27161 - DNA, 201 bp, Bos taurus
ttcagcctgaaggccctagaatcggtgcttggcaacaggggaagccaccgcgctgagaagcgaattcattggaatcagcagcccccgtgcacagcagcagaggagcccgggccatgacaaaggcacagcaaagcaaaaccaaaaacatacgtaaaaaaaattggaaaaagatcattctagtagctcttcagcagtcggaac

SEQ ID NO: 27162 - DNA, 201 bp, Bos taurus
cccctggaagggagtggggcagcagtagggcgatcggttgctgggtgaaaagtaaaaaatgatggatacagatgagagctgaaagatacatagatggatgaatgtccatcacataggttttaaagaagcttcccaatagcatactaaagtatactgtgccagaatggcatacttttaattactgtacaccttcaatatgct

SEQ ID NO: 27163 - DNA, 201 bp, Bos taurus
ccacatggttacgttatcagcacattaaagcaggagtgcttagagacaggaagaaacagataaggactacggtcttcacagaactcattctaataccttccacatcttggaaggtgagaaaccagcagaggttgcaagtgtcctgccatggcatctcctgtcctttgtccctaggtcaggagaacacgctcctcacgtcca

SEQ ID NO: 27164 - DNA, 201 bp, Bos taurus
gtggccggccctggaggctttctgtgcctacgcaggtcctcacgggaaggagagagaggcttgggctccgacttgtcaaccacgaggcagaagccaggtgctttggaggaagcgacggccagcccagagctgctggggcatgagataaaaagggggcagaggaggcaacgaggtgcaccacctcccttccctgagccccgg

SEQ ID NO: 27165 - DNA, 201 bp, Bos taurus
aaaataggaaatgtctttatgcctctctctcagagtttagtgagtgtgataaacctcacacccgccccttccttcaccaagtgctcagcgagggctggccgtgtgccaggtgcttttctaggaaaagggatacatctgtgaagaaaggatacagaaactgcccttgcaggccttgtattctttaaatgattctatgttata

SEQ ID NO: 27166 - DNA, 201 bp, Bos taurus
caggcattagacagtttggggttttgtttttgataacgaggctctttctgttgactaaggggatggtcagcaggtcttgacctagagtgaccccggagcccgtggtcagaaatcaccgggtctccatcccagcagggtgagtctggagaccacgcgtcccttttctcctctttccactacgtgtgcggctgtggtccccgg

SEQ ID NO: 27167 - DNA, 201 bp, Bos taurus
gcatggtctaattagcctatgtctcttaaacaaatccaaaacaaagctaggtgagagagttttatgcaaacaaacaatgaaacctaatcactccccgcattcaggagcctccattattatagttgttcaaccctttttaactctccattgcttggaataataataacctgttagaactttgaaatgaaaatctttctacct

SEQ ID NO: 27168 - DNA, 201 bp, Bos taurus
cggaggcccggttcacactttcacgtttgtccggggtgaacgggaggtcaggaggggaaacagagttcacccagaagttgacagatagcgcgggctgtgcaggaggggacgtctagacccggcccggggccgcgagggcgtccggccggccgaaagctgctggctgaggggccctggtgatggatgggccgggccggctcc

SEQ ID NO: 27169 - DNA, 201 bp, Bos taurus
agtttagaatcatccctggatgatctcaaaggagagatggtgacaggttttgtctcagccacgatctggccaccgctcctcaaggctctgctaggcctgttgtcttggggtgaattaagtacccaaatctcacatcacactctttgtccaccaaggcagccctccatgcccgccacaaaccccctgcctgcaggccctgct

SEQ ID NO: 27170 - DNA, 201 bp, Bos taurus
caatatgtgagctcacaggcaaggtccggcctgctaatgttaatggtttgccaggtgtcttggacatgggggaacctcaaaaatgactgtggggagaatgagctggaaggaatcaggccacatcacttgtgggtgaagactgtcccatccagaggtgacataaagccacagaagagtcaatggggtctggcagttacaccc

SEQ ID NO: 27171 - DNA, 201 bp, Bos taurus
aattgaaaaaatagaaataaaaaacagctgagtggttggttttctgtctcggctttattgcacagttcaaagccaggattacggaggtcattaagcagcattgtctctgtgacatgattagtcaggtagcaaagtccatttgtcacctgcagcagcaaattgagttaatactgcactacaggctatggggactgtataata

SEQ ID NO: 27172 - DNA, 201 bp, Bos taurus
gcacagtaggctctggcagtcaccattcaattggtcatcggtggcctgagcagcagcatcttggttgttctaagtacagttaatctttcaattcagggtctgtttgttcccattgcttttgcggccagttctcagaactctggcagtttatgtcctgggtacagtctggtcatcatgtggtcaacttcttccacctgggtt

SEQ ID NO: 27173 - DNA, 201 bp, Bos taurus
cttgtttttacagacattcttaacctaaagccaaaacgtgcactggcgctaccaagcggccgcgtcttattccactcaagggctctgatgtctacaaggcatgctgatagggacgcttgctcatatacacgctgcatccccactgcctgctcgttctcaggttttctttctcttcttccccttctttctttcagaatgttt

SEQ ID NO: 27174 - DNA, 201 bp, Bos taurus
ttgagtgactaagcacagcacacacacagcagctagaatcaccctaacaagaagctaacgccctacttccataatcgcggtaagaagtggatttgcacacagctcaaatccaggttcacatctcactcctgtaactccccaggccagtgctccaggtaagcaggttggcaggcaggcagatcctggcgctttccatccgga

SEQ ID NO: 27175 - DNA, 201 bp, Bos taurus
gattggctcagggcagggtggatttgatctaagaaggttttttccccctgcagaagacgttcaggatgacgtgagcaagcacctcctcttctttgtctgaaagccctcttccccaacccgagagtccgtgtctgtgaccagctgcccccgccagtcctcggtccctgcgtggcggccgtcctgggttgcaccagttaaagc

SEQ ID NO: 27176 - DNA, 201 bp, Bos taurus
cttgagcacgtggcacatcacctttggaactatggaatcgtcagtctctagaaagcgtgatgactgaccagcaccttctcctcattggcgctttcatctactgagcatgtatttttcaagtgctgctccctgttggaaccactcgtttccagagacctggagctgtgagcacttagcacaggtggtgggcaggtgcaggca

SEQ ID NO: 27177 - DNA, 201 bp, Bos taurus
ctccatatgtacagaatctatggcctctcacgcgtctgtttgctgatgaatttctcatcacatgaatatgtaacaatagtaatgtgatttttatagcctcgctgtcagggcctttccatttggaaaagatattcatcatttctgtttatggccaaattacttctctcaattttgtggccagcctgacatgataagtcatgt

SEQ ID NO: 27178 - DNA, 201 bp, Bos taurus
ccatactccccacaaggaggcctttcccacctttgtggatgtcagcctctgctgtacttgaactcccagcagccaccacctgtggctctatgaaggatgatggccacatatataaagttctagaagactctgagagtataattacttccttctcaccagcatgatgggtgtggacccgtcttctggtggcaccagcccggg

SEQ ID NO: 27179 - DNA, 201 bp, Bos taurus
ccttgctgtggtgtcccggcgttttccttactgatgactcttagccattctgcaaataccaccaggcatctggaagtggtggcgagatactgaagccgacatgtccccatgggcagaaaagaaaggcaagtggagaacttcctcagccgtcactcggccattaaacaaatggcctggtagagacacaactgcgttgacctt

SEQ ID NO: 27180 - DNA, 201 bp, Bos taurus
cattgtcatagattcttcatcctcacttttctccactgaactgatgattacaaagttgtgctgtatcttcatcctgcatatttctgagcaccgcaccctcctcttcagcttctttactcttggctgagaccagttcttctctcattaggctcttccatatgacacccctgtgctaatatcctatattcataatcattaaca

SEQ ID NO: 27181 - DNA, 201 bp, Bos taurus
tttgttaatctgaattcatagtctgtgatttctcctgtgtaatcgcaattttgctcattcttgggtgtacgcccttgactgaggtttatccctcacaccccgagtgaggggggcagatgatctcagatggctcagaaatgattcctaatttggttcagattttcctggtaaatatagctaagacaggcctggcacagagaa

SEQ ID NO: 27182 - DNA, 201 bp, Bos taurus
tacatacacatgcatgcatgcatgcacatatatgtaacatcatttataaagtgtactgtgtgcatgcatgtgtaccattaaacttgttatgtaataaatccgtttaaaaatcacatgctggcattatctttgcctcttgttttctttttaattctttttcttagaggtcacttaactaaatcttaaaggaatcctaaacac

SEQ ID NO: 27183 - DNA, 201 bp, Bos taurus
agtagaagattcgttggtgaaataaacaatgaccacgatgatgccctcatttcaaaaaccatattacctaagaattgttcttatgttaaacagacatggtaagtgagagccagagaggggatttaatggaaatgctctatggccatcttgctacagacaaatttgatccaccccctgcccccgccctcgaagtacttcacg

SEQ ID NO: 27184 - DNA, 201 bp, Bos taurus
tcttcaccaactgagccatcaggatagcctgtcaagcagcacctgaagcctccccacccaccaccaggttagctctctctgcatcagtccccaaattcctccaggacaggaaccttgctttgtgtatccctgagtatctagtttgctttaataagcatgttccaaacagtgtgttggccacctggtgagaagagctgactc

SEQ ID NO: 27185 - DNA, 201 bp, Bos taurus
aggagtatgatgattctacctgagcaacttctctattaatccaaatttactgagatataaaaattttattttaaaaatcatagtacctcaatcatgtattgatatttctatgtctctatagtgaaaactgctattatctgtgttgataatgtgccttgcttttttataatttttaaaagataacattaaatacaattgaaa

SEQ ID NO: 27186 - DNA, 201 bp, Bos taurus
ttttcaatttctatatgaagttaatttatttttgttactaacttctaatttaagttgtattgtgattagaaaatgtgggatgttccttattaccattttttcctttattttctgatctttcctacatttgaaactgttctgggatcatatttctttgagaattacagcctcaaattttcctttagaaccagtctcttggag

SEQ ID NO: 27187 - DNA, 201 bp, Bos taurus
gcaggctgaatggagcgggccacttcagtcctcttgaaccatcatgagggaaggcttggcacttgaccttgagactcttgagtcctgaggccagagtgccgcccaagtcccaattaatggcatttgtagcgagccgttttatgagacttgtcatggttttgacactctttggcccaatgtcgcgtctgtctacagattagg

SEQ ID NO: 27188 - DNA, 201 bp, Bos taurus
ttttctaaatgccattttattggcatgcaactaagcttccaaaatcttgtaagacattttgtattattttcctcattaagcagctaccaaaaaaatatgagttgacccaggtcagacactaattgagactggtgtctttatttgaatagatctgcctttggatagcctcagctagaataaaatgtaggacatttttaaacc

SEQ ID NO: 27189 - DNA, 201 bp, Bos taurus
atcatttaacctgtagatccacagagatgtgtactatggaatttgtaaggccctcgtaagctccaaaattctgattctaaagttagtctcagcgcaagtcatcagcgcagaacaaaggaaagaggccctcagccctcactcggaggcagacatgagttcatcaagcagaaaactctctagtgagttgtcagtctttgaagt

SEQ ID NO: 27190 - DNA, 201 bp, Bos taurus
tagtggttgtactgatgtccattctcaccaacagtgtaagagggtttcccttttctccacaccttctcaagcatttattttttatagactttgatggtggcgactctgaccagatggagatgatactcattgtacttttgacacgactgagtgactgaactgaactgaactgaataatgagctacattgagcatctttccc

SEQ ID NO: 27191 - DNA, 201 bp, Bos taurus
agtgagattaatattttccagcttgctgacagcatctattctgcagcccatggatcaaaggagtaatttttacttttgagaattatattttgtaaggttattgcggtcataaatggttattctactgatggatctgatcaaagcaaattaaaaaccttctggaaaggattgatcattctaaatgccatgaaaagctttcat

SEQ ID NO: 27192 - DNA, 201 bp, Bos taurus
aagccagctcaagatctcagtcaactcttcccattagaaataaaaatgcccacatatatactgctttcagtgttcctattgatattgtatccctcaagctcttgacttaaatctttcctattcttccgaccttatgtcagtactacagactacaacagccttacctgagtgtctggtcattgtaccgtatctgatggggtg

SEQ ID NO: 27193 - DNA, 201 bp, Bos taurus
catcccctggtccactgagctctccccttcctcgccgagcacgtcttgtcttccctcagacctcctacatctcccctaccttcaatctcagctgaaggccaggctccctacttaccggagacaatcgagaccttcagaagcaaacgtgacaccgcagcgccgcggcagcccacgcccacccggctaccataaacccaccga

SEQ ID NO: 27194 - DNA, 201 bp, Bos taurus
acccagggctggacgcaccttggttcttcacggatgatgtgcagtactagggtcttgccctcttccttccaggtccctagagcatccctcagaggaagttgcaacacccttggccttgggcggggggcagctggcccaggggcaggagagatgtcgcctctgcttccaagcaatgaaggcaaggcgtaatggtttgatgcc

SEQ ID NO: 27195 - DNA, 201 bp, Bos taurus
ctcacttctgtgtcacgtcatgtattcgtttcccttagttaactgtaaagcgacacttggcggaaaaatcatgaaacctcgatgagacactataggactcgatcattggccatttcttttcacttctgagatttctctcttttttattcttatttattttgggctgcgctgggtcttcgttgctcagtgggctttctctag

SEQ ID NO: 27196 - DNA, 201 bp, Bos taurus
ggatgggggagcctggtgggctgccgtctatggggtcgcacagagttggacatgactgaagcgacttagcagcagcagcagcagtagaggcctcaggcacaagggcgacctgctcgaggagcagacttcaggctggagtgagtgaggtggttaaccgggcgcaggtgcaggaggggaaggcgggaggtggcctggggcagc

SEQ ID NO: 27197 - DNA, 201 bp, Bos taurus
agtggcctggatgctatgctctggacatgtgcatccatgtcccccgcttggctgtggtcattcctgcccctgcatgtcctttggcctagagcctggtccctacagctggctgtgccttcaaggtgagacttcagggctccgtgattctgaccaagggttgggaggccttggcattgacgggggcttgcttgaaagatggcg

SEQ ID NO: 27198 - DNA, 201 bp, Bos taurus
agaggcactgagtatcattatgatgttcccattcagactggatattaacaggactgccgtgttgttgttttcaggctgtaacaccaaaagatttgcatgaaatactcatgaggccaactcccatcttccagcaccaaagagattttagattcttctctgtgattctctgaggagtttcggtagaaaataaatgtctcaaga

SEQ ID NO: 27199 - DNA, 201 bp, Bos taurus
ttcatccgtgctgtgtgtgtcatggtaggtagaatcctgttgcataactatcttaatttgtctactcagtcacatggtgacttcataattaccttataagaccaccgattcatttttagaacgtgatcaatcatatccccaagtgtgaatacattaaacacttcttatatagaatccccaaacctaagtcttatcttggat

SEQ ID NO: 27200 - DNA, 201 bp, Bos taurus
aggtttggagttgccccaaaactctcagaacagctgccgggttaatttggcaggaaccataatcctcaaactggcagaccctcaacattccctctgattagctaggagaccctaaaatatttcagcctttgtgaataaattagcagttgttttcctactataggatcatttttttccagccaaggaataggtgccctctgg

SEQ ID NO: 27201 - DNA, 201 bp, Bos taurus
actagaaaaacaaaaataaggaaggaaggaaagggaagagagggagagagagacagagggagggaaatccactttccatagaaagtcaactgaatgatatatgaaattctagcaggtcaactgctattaattatatgacagttacaacttcccagtgctctgagttagtcttttgctcagctctccatggcctagtatgtg

SEQ ID NO: 27202 - DNA, 201 bp, Bos taurus
acactcatttttatctgtaacttaatttagcaaaaagctagtatctcataaaatataagaattcatatcactaattcaaagattgttttcattaatatttcagtgtttcaaaaatacttctactggccatttgactgtaaaaagcagaggtcattaaggatgagaggaagcagtgtatatggctatcatttacatttatat

SEQ ID NO: 27203 - DNA, 201 bp, Bos taurus
ttatttgaatcctgcaaaatatgcttatgggaaagtttgagttctaaaagcaattatcctgttattatttgttctcagtatcttgtatttttttcaaacataaagaacgcttctctagttaaatccatttagtcaattcagttgccaaataaagtaaaggacatgggaagaaacagacttgtcattattcaaacaaggtgg

SEQ ID NO: 27204 - DNA, 201 bp, Bos taurus
aatatcttcatattcaccttagtttacctaaatggaaatttcataaagttggaatgatttagatgttaaattagagagcacaacctgtaacatcagatttattgagtcctttaatttattgcatatagaattaaaaaagaaataaagactaatggttaaaaatgaacatactgatgaggtaacatgtacaagcacatttac

SEQ ID NO: 27205 - DNA, 201 bp, Bos taurus
ggctttacaaaggtgtcctacatgaacaaaaaatacagccaggttattaactgaatgtaattgcctggtgataacagactctttgagtctctatttgacattatttcacttgaaaaaggctatcaattaggaccccacatttaaagcaagtggggaaattatgcacagacacttttaacaaaacggtgatgcttgcataaa

SEQ ID NO: 27206 - DNA, 201 bp, Bos taurus
agctcttattaatatttttcccagttcaaggtaactcagtaagttccaggttgaaactttagattctcttggttgatatccaaatgtgttatggccacatgtctgcacagcccaaagctcgtgctccccggacaccaccccgcctcattctgtggagcaagtggtcccatcggcccccgttttacaagctggccccatgga

SEQ ID NO: 27207 - DNA, 201 bp, Bos taurus
acctggaaaaggcagggaatagattatccccctggagcttctagagggggcacgtctaggagacatgttgattctggcccaattgatactgattttggacttcaggtgtacagaacaattaaacaataaatctctgttatttgaaggctccaagattgtggtgcttcgttacagaagccttaggaaactgacctaggcccc

SEQ ID NO: 27208 - DNA, 201 bp, Bos taurus
gctgatgaattaatgtatcttaaatcattggcagtgtgttagccaaatatacccacagtggatttcactagaaaatcacacacgaaataaatccaaaagcagtgcattatggtcagcaatcttctgcgtacttaggaacttgtcactttctaatgtgctgtgcttagtcactcagtcatgtccaactttttgcgaccccat

SEQ ID NO: 27209 - DNA, 201 bp, Bos taurus
gaagtacatataattaataccactctttcaattatgatgtatttcttgctaatctcagtattccttgtttccagtatcatttcattgttttcttcaactttctatttgaacttccacaggtcatttttctgctattttgactctagtttgaccttttctctgtcttgatctctcactgcctcagtcactctagagcttcct

SEQ ID NO: 27210 - DNA, 201 bp, Bos taurus
ctgtagggaaccaggaaatgccagagtttattctatttagttttctccaacacctcagtgacgttatttccacacatttttgaaagggggcctcatttttatttctcctgatacattcaggggagcacatcattatcttacattttctgcagctcctccatacgtgatgtttctaaagcccatcctctcacctgcaggcct

SEQ ID NO: 27211 - DNA, 201 bp, Bos taurus
gctcagtgaggtttattggataataaataaatcaaattattttttagcaggagaattacctattgactatttctcctgactgatttccagagcaccatatgtatcagtgatgacatgcaataattatataagacccccatattctgtataggactagtcctaaggacagaagtggaaacccaaagtttacataaagggaaa

SEQ ID NO: 27212 - DNA, 201 bp, Bos taurus
tctaactgcttaataattagattggcatgagacagtaataggagaaaaataaatttaattatgtatgtattagaactccagaagagcaaaggacagtcaggcaattgaggtttatatgctcttctgagccgaagacaagcagataggggtctaggatatgaaaagggaggaagataattcacatcagtcagataaaaacaa

SEQ ID NO: 27213 - DNA, 201 bp, Bos taurus
aaatatgagcaaatgctttctcagtgaagtcaatgttcaccagttccccattatttatttcctgtcctacaggctgtaagctctattgatccctactcttagccagcatctaatctcataacctttaagactccgaaagtggagacactcaaaatctatattgaatttcaattctttccaaaggcttttctaaggagaata

SEQ ID NO: 27214 - DNA, 201 bp, Bos taurus
ggactcttaatttcactggaacccatgtcctaggccttctgcttcaaatataggagatttcagttgataaacaagtttattccctaggtacatgatgatacagctctcgacttttcaggggataccaaactaattttatttttttctttcgtatcaactatgtcttgtccttcttttttgtgatcactgcccatttttcca

SEQ ID NO: 27215 - DNA, 201 bp, Bos taurus
tccagtctttttgtctccaagtagaatctcccttgcattagatagaacaataaattagaatttaactgaaataatgctcatttctccttctatctggttagataactatgactttgtcttcctatatcaaaaatcatgtttcttgtgtttctttgtaagaacaatctaatgcacataactcttttgcatcctaaaaatgtc

SEQ ID NO: 27216 - DNA, 201 bp, Bos taurus
ttatcatacataattactttaagtatttattgatggccccatttatcttcacggttgaaagaactgcagttgagggaggttaaataactcacaccaggtcgtatgtggccaatttcttccccatgcactgcaaaatactgtgatgtttgcatcttttaattatgtgcttttgttttccctgtgaggtttaatttttttttt

SEQ ID NO: 27217 - DNA, 201 bp, Bos taurus
gagggacaaggatgaggagtgagcttgcatcatgcaatgaacgtgtaggtgtttttgaacatatgccaacctcccggcccaccttccactgccccaccctcacctcgacctcccccaccttgactacccaccctcaagtccattccttcgacaggcctctaagaggtagtgtggccctcttgtgagtcatttcctaacagg

SEQ ID NO: 27218 - DNA, 201 bp, Bos taurus
aggatacagtccatggagttgcaagtcagacaaaacttggccattaaaccaccaccatcacaatttcagacaagatatgaccttaaccatgatgtggttccatcacctaccttagaggccagaaaactaagagactttagaatttaataaggagccccattaatgagcatttttagtccataacatttgaggtatcgtaat

SEQ ID NO: 27219 - DNA, 201 bp, Bos taurus
gcatgactacccattccatggattccccattgcctggagaattccactggacagaggagcctggtaggctacagtccacagggccgccaagagtcggtcacgactaaagcaacctggcatgcacgcacaatggagacaatatttaaagactggacagtgaacagtacttaaggaaggaatctgccagaaggttagggccca

SEQ ID NO: 27220 - DNA, 201 bp, Bos taurus
attctgagaatgtaaacaacttgtttagaaaagaaagaaagaaagaaaaggcatatgccaaaatattaaaaggctcagaagcatagacagattaattggattcacagagaaaaaagaatcacagagctgtcatattcagtcaagagataaaatgttgtttggatctatgatagggagaaaggcattaaagcgatagaaagg

SEQ ID NO: 27221 - DNA, 201 bp, Bos taurus
aattaatatatccagacaaaattatttctacaaaaagacttttactgagaaacaattgctctctgcctcaaacaaagagtagcgttatatacagtgatccacataagtgaaaatggtagatatctttttggtctaactgaaataaggattccttcgatggtctcatgaatcacatcacatctaatttccagtacaataatt

SEQ ID NO: 27222 - DNA, 201 bp, Bos taurus
gggtattttgtgaaaacttgccaaagcagcaaaagcatcaagatttattttgggactgacagaaagacacagtgatctggtttagagagcactgtttattatccatgtatttattcattcagcagtagttattgttgtgcatcttttatttggaaagcatttgatcagatgcagtgaggaatacaggttaagaagacaagt

SEQ ID NO: 27223 - DNA, 201 bp, Bos taurus
caagagagagccatgcagctccagttctcataatctcaaagcggtccccaggaggggatagggcagagagatgtggtaagaaaactttctctaagcaggtaatatttgaactgggcttgaaaaagataaggaggtggttgtttatatgatgtttgcggatcatgtgaacacacgtacctacaacacagtggaatttcttca

SEQ ID NO: 27224 - DNA, 201 bp, Bos taurus
actaagcataagttttcaaggctcatgcatgtttaggatgtatcagtacaaaattcatattatatggttgactaatattccattgtatagaggtgctgtgcgcgcagtccaatctgatcctttgccaccccatggactgtagcccgccatgctcctctgtccatggggctttccaggcaagaatcttggagtaggttgtca

SEQ ID NO: 27225 - DNA, 201 bp, Bos taurus
gctcgataaaggacagaaatggtatgatatagtttactctctcccaaatgtccattttgtaaactgactctggagtttgacataattactgtggatttcctgaaccactcttatgttatatgcctatatgatacatgtcctcttctctatgtgaccagcagatagattatcttgtcagttaagaataggaagtgtaatcaa

SEQ ID NO: 27226 - DNA, 201 bp, Bos taurus
agctaggtgatcgtgaaaaggagttgaacaaagcaaaattaataggcctgcttggcacccctcctacctgcaatggtgctgcctcttgaatttcagacaacgtctgatgcttaaggaagatttcctttactgacctagggtagaataaatgttaatctcagttatactcaatagcagcccacccccaggggctttttgtag

SEQ ID NO: 27227 - DNA, 201 bp, Bos taurus
tctggttgttttactcaatttgcccaggaccccagcttgtgcttattctgcttatgctactggtaccccactgactgttcttaaggacctactagcactgcgtaagccacagccctttgtaaaactttaaatgtttgtttcagcccagccttcatttatagtctggcatctttctgtcccttgggaataaggatcaacaga

SEQ ID NO: 27228 - DNA, 201 bp, Bos taurus
actcagcctacaagctgttcccctggtgatgtgaacagctgttctctcttcttggctttaaagcttagagctgctgctttattagtgtggccccttgtggcctcccctggcctgcacagttgaatgctgaagggtttggcatcttttatgctcagaattgtgcactcacagcagctcctctgggattcttccagccaagtt

SEQ ID NO: 27229 - DNA, 201 bp, Bos taurus
ttgacttgccaaccattttctgcagcccatatgaagcgggtcccctcctttctacctgtagctctaaggatctgatactaggaagtcacgactacatgaatctgtatttagtactagaacagggcacatattgctctcatgtcatcatttgatattctattcattcatactgtatttacaactagatttccttttataaag

SEQ ID NO: 27230 - DNA, 201 bp, Bos taurus
tggatgttgaaaggtgggaggaaaggaggaaaaaaatgtggaaaatcttcaaatttattaaaaaataagttatttaaaactatgttcacaaatctactgtcacacacatcccaagggctctctgcttattcatgtgtattttcaaagtttatttacaatgtagaaacagctatgtttttcctgagtgtaatccaacttaaa

SEQ ID NO: 27231 - DNA, 201 bp, Bos taurus
caaaataagagtagacaatgcaagttatcattgaaatggcaagatagatttataataacgatatcacagcaatgtaagggtgaaggtaccctactatttgcaccatgggtaatacaaaccaaggagaaataaatagtttaatgccacttttctcacctaatttttcaagaaaagattcttgtattctccaaatatcttaac

SEQ ID NO: 27232 - DNA, 201 bp, Bos taurus
caggaaaggctaggaagaaagagataaaaatccatgcagttacttttcttttaaaaaggccatttagaaatgcctgaatattagtaaacctggattgcagtgtttcattgtgattttaaagtctacaaactcaaactgtcttgcaaaacatctattttctaaaaattaatctatttccaaaatagctatcaagtatctatt

SEQ ID NO: 27233 - DNA, 201 bp, Bos taurus
caaatgctacagggatgacaatactgctgtttggaactgagaaatataattagcagatacatacaaaatattttaacgacagcccccttctgaatgcctatacctgccggacaccataataatgaggcttgtctgccacttgaacattgatcagatgtcccactggggctcaaaaaatgtgtgcttcagttgtcatcatag

SEQ ID NO: 27234 - DNA, 201 bp, Bos taurus
ccctggcagccttttgggtcatattctgccctcacccttctaacacagcaggcaaaggacctggttcctgccatgcagggaactgatgtgttaatgggactggccggaaaccaaaagaagcacacgttgaagataaatatgagaccgtgggtctggaacagagaaagctatttctacaccaggtaataagcccagttcaga

SEQ ID NO: 27235 - DNA, 201 bp, Bos taurus
actaaagtcatttgtttgtggctgctgatagaaaatggtaaagcatataactaattatataataaatataaataatatctcctagggcctttttagtttatagagtacttgcatgtgccttgtttcatttaattattataatagtattgacaggtaatattacagcttaattacagaatagaaactaatgcctcacgtgtc

SEQ ID NO: 27236 - DNA, 201 bp, Bos taurus
tatggacaatcttggtatacaaatgagcataaggaaagttgcttatcttttggaaagaaagaggaggcaggtgcagtgcagaggggccatcagcctgctacaggggtcactgctaccccttactgatgagaggaactaaggggaagggtaaatcaagcaaggttaaatccttctctgctgcttgttggatatatgatttcc

SEQ ID NO: 27237 - DNA, 201 bp, Bos taurus
cttaaaatgatgaaaggaaaaaaacctacaaccaagactacccaacaaggatcatactaaaggagcttctctagacaggaaacactggaaaggcctataaacaatgaagtagatggtaatgtgtcatcagttcagttcagtctctcagtcatgtccgactctttgcgaccccatggactgcagcatgccaggcctccctgt

SEQ ID NO: 27238 - DNA, 201 bp, Bos taurus
ccaccagggaagccacgtccttctgggaggactaaagagtctatgattctgctacatggctgatctgttgttttcattgttcccagttctcttggcccagctggtatattttgttattaatgctcacattcttcaaatcattaattcttaagctagtcttttgtaactcagaggaggcctgggagactaaagcaaagtaca

SEQ ID NO: 27239 - DNA, 201 bp, Bos taurus
ataatgttcataatagcctcattttaaataaccaaaaaccaggaagtaatccaactgtcaatcaacaaaaaaatggacaaatggtaacatttccatagaactgaatactatttaacaattaaaaaaaaaaaagccctaactgacacattcaacaacatgaataaattttatagatagtgtgctgagagaaggtagatagaa

SEQ ID NO: 27240 - DNA, 201 bp, Bos taurus
ccaccaggctcctctgttcatgggaattcttcaggcaagaatactggagtgggttgccatgccctcctccagggaatcttcccaacccagggatcaaatccgggtttcatgtattgtaggcaaattatttaccaactgagcccccagggaagccccacagagaactagtgcccttataaaagaggtaccaggaaaaggaga

SEQ ID NO: 27241 - DNA, 201 bp, Bos taurus
cccatttcggtgggagtaagaaaagtgcctactccgacctgaattgtttcttaccaccttctttcatcatataatgaagatgtttcctcacagagccccaaagttacatgttaaatagctgggaatgttgttaattaaaaataaaattttctcccaacccagaaaacctctccagaatagttacagagaaagaaaatagct

SEQ ID NO: 27242 - DNA, 201 bp, Bos taurus
tggaaccataagcagcccataatcaatggtttcctaatgagaacagccagccaagcagccacaataatcaccttttggacaatcaatacagaaggaaatgtgaaaagagtttgatatcagttatttttctaattatgcctaaccaattctaattataaggatgtggcatgcattccagagacctttgatgagtagatgtat

SEQ ID NO: 27243 - DNA, 201 bp, Bos taurus
gcaagtcctgcaggccctctcagagggaagcttgcgttgggtttgtggtgtctgaagagatgccggcacgtgccgggttctggcgtctggctcagcatggctaatttatgaggccccagcaagtcagtgagaggaggagagatccaggcaggggaccctgctaattggccctttcagttcctggcaggcactactggtgag

SEQ ID NO: 27244 - DNA, 201 bp, Bos taurus
ctgaaaatgcatttgccttgcatacttactcatccctttgtgatatcaaactgtcttagtcacctttaaaataaagcagagatcattttaaaggcattaaagtgaaaggccaggtacacttatttctcagattcatttaaactgccccatcgacagacagttagcacctatcagagtggcacaagttaccagagaaacagt

SEQ ID NO: 27245 - DNA, 201 bp, Bos taurus
acttctgattacagaattgtgatatgtattctgaaatgacaataaaattgttttccagtgaacagtgtttttcgcaaattcaacaataagtgcatgactacttctgttaacatagcagtgtttacctgcttttttttttaaccttcccagatactgacttcaggctttcctaacttctacaaccatttcccttttcttatt

SEQ ID NO: 27246 - DNA, 201 bp, Bos taurus
aggaagacatttggatgctaaagtgtaagtcaagaaatagagtgttcagagtcatcagcacacttataattctcaaatatatggaaattggttagattttctaagaggataaagagggaggggatgtggtggttaaattgctctggttttataaaaaagattcagggagaaaaaaatgggctacaatttttagagttctgg

SEQ ID NO: 27247 - DNA, 201 bp, Bos taurus
aagaatctgataattcagttccaccccaggcctatgctaatattcagccaattgtggaatgccttgacctctgtggaagatgcattcgggttctgtgcagcatcagattgggagtttgggcccagatacaatttttattagaaattgagagtcaggcataataaggaggggggattttgatcacaaaagaaatgtatagga

SEQ ID NO: 27248 - DNA, 201 bp, Bos taurus
actcttgagtaaagacctaagagtagaacagtctgaatcatatgtttatatgttttgttaagaaactatcaactatttttagagtgtttatagtagtcatcattttacgttccaccagcagaatgtgacagtaccattttgtcaacattctcttcaatagttgattttaagcatttattttagcctttaattttagttatt

SEQ ID NO: 27249 - DNA, 201 bp, Bos taurus
ggtggttgtacaatttaaaaaccagagacttttacctctaaacttcgattatctacaccccggccccattgttgactttgtcatcacctgaaaattctgtatgtcaggaatccttatcactggctacaagcagaagcccagtagctatgtcactggtgggtcccagaattcagtgagaaatgtagaggctgccctgctgag

SEQ ID NO: 27250 - DNA, 201 bp, Bos taurus
aactaaagacaaagctatgaaatgttcacctgaaaaatgtttgcattttcatagaaaggtctgttctgaattcagtgactgatctgtggggggtcacagcgacacgagtgaaatggcattctttgttcatttgtcctgccacccaaacaacctgaattttaaatctttttctttttgaaatacatttcttctctctttctc

SEQ ID NO: 27251 - DNA, 201 bp, Bos taurus
ttatggttctttctgggcaaatatacatatattcactcctctaagctctattcttttccaaattttccatcatcttttgggcactattttatactctggacaaaattctctcattgttgtaaagggagggttttctattaggactaatgctaaaaggaaaaacatcttgtcaaaaatagaacttaatgagctctgcatttt

SEQ ID NO: 27252 - DNA, 201 bp, Bos taurus
aagtaagagagccccaggcatctaagaaaggtctcgttttttttgctatttccttttcacttaaaaaaaaaacaaaacactttttttagacaataaggtaacaataaagcagactgtatctgcatggcctaaaatagtgaggcactgccttgcaggtgaaggtggcagaagcccctccctgcagacaggatcatccatcta

SEQ ID NO: 27253 - DNA, 201 bp, Bos taurus
aaaacaaagagtatccttatgttttatgtaataaaatcactgatcaccaatagagagcaaaccatgtttacttggggccctgagctctcaaaggatttatccatagcaataatacttacctacaggaaatgagcagcttctctgctttgccaactctggccagtaatgccctgtgcaaatgaatttagagattttctcagc

SEQ ID NO: 27254 - DNA, 201 bp, Bos taurus
tctttactgacattctctaaatcagagttgcaaaaactttttctgtaaagggacacatagtaaatattttaaaagtatagggaaaatgtctctgtggcagctactcaactcttgttttagtacaaaagcaaccatagacaatatataaatgcatgggtgtgcttgtgtttcagcaaaactttataaaagcatgtaagtgga

SEQ ID NO: 27255 - DNA, 201 bp, Bos taurus
ccgtcaatctagggtaataaaacaattcaaggttttacttaatcccaggcatccaaagttaccagtgactgttggctcaacaaaaacaagttatttggagctgggacagatgagaaggaatctgtgttgagggtagcatttctcagagtgctcagctttcaaatccttgagaatatcctctctaaatctcccttgcttttt

SEQ ID NO: 27256 - DNA, 201 bp, Bos taurus
agaggaaagaaatatataggatagctcatacaaagatattaatagagaatattttatgtgtcataaaatagacaatttattttcactacaaataagttcttaattcattggcatatggtttttgaaatctatagtgaatattacctcatccttaaaatttgcttttaacataaagctagaagaacaaggtatcttagacaa

SEQ ID NO: 27257 - DNA, 201 bp, Bos taurus
caggctgaagctggtactgtgagacccagcagtgtccctggacaaagctcataaacgttacaataaatgaataaatagagctgaaggcagggaaaaaatggctccaaggccttatggctaaggcttggggacaccttgtcattactgtggcaggaaacaggaaattgctgagaaaaaaacccaactgagcttcagtcctga

SEQ ID NO: 27258 - DNA, 201 bp, Bos taurus
agcaaaaggcagggccttgaaagcataagactggagtgtaggctgcactgaggtgagaaatgttaagagtcagggattaagagtcaaggttgaagcccagggagtaatgaggccactaagacgagagtcaagtatgaagaggttgagatgcaactcctaagaacactcaatttttaaatcaagcagaaaaagaaaaaagtc

SEQ ID NO: 27259 - DNA, 201 bp, Bos taurus
ctcttttttcctccaaatcttgttcttctccaccaacctagttgctcagggttgccccaaacctgctgctatgcttgactcctacctctgggcctgtgtacgcactgaattctctccttcggacactcttcgctcagattttgcttatttgcttttctcttttaacagtgatgagaataaggtcattattctgtttatgtt

SEQ ID NO: 27260 - DNA, 201 bp, Bos taurus
atgctaaaaaaattagaatgattcagtagaaagaaaggaaaagaaggggagtcaatagaggagaaaacaagggtggccaaatagggtgaaaatatttcagctgtaaacacatggaacggaaaaagcagaaattaatggggaagaaactggagtttcgacagcatcaccaagaccggggaggccactggttctggcaataac

SEQ ID NO: 27261 - DNA, 201 bp, Bos taurus
aaaccagaatgccacaacccagagtttgcaggctgcaacaaagagttcacatgctgcaactaaggatgtctcacgtcacaacaaagatggaagatctcctgtgccacaactaaagagccagtgcaaccaaccaaataaataaataacacatattaaaaaacagatgaggacatagtaataatctaatcgggaaaataattg

SEQ ID NO: 27262 - DNA, 201 bp, Bos taurus
ttaaaaatacaaaatgacagaagtaaaggagtaaacttggaactctgacaagtctccagactcctaaaactgccatgtgatagcagtactatggaccaagcgaaagcataaagtgtctcttaagagatttcctctggaaaatacatgcaatttagcattcaaaggtctttaattttccatggcattattaaatagcagcct

SEQ ID NO: 27263 - DNA, 201 bp, Bos taurus
taacagatttttacctttcaaatgaaatatttcaggaaaatgcctacagtgattggaagttgttgcactgtttaatcttggccagcctggggaccagctgggatgtgaaggaattaaatgcagggctttagattgagaaaacctgagtatggccagtcagttaacctctctgagcctcagtttacctgcttgtaaaatgga

SEQ ID NO: 27264 - DNA, 201 bp, Bos taurus
gagtcctttgcactctccagaagatagaagagagtaacagaaagagatggacattttgaggtcaaaaggatgcagtttacaatctccactagtaacaaaactttgatgccaattctcaatgaaaagtaacttcttggtcttcaaacaggaatgactcattcatgaaggccgccacgtgcagctgctgtgaccatggacctc

SEQ ID NO: 27265 - DNA, 201 bp, Bos taurus
aggacgtgcctgttctgaattgatggcctgaggcagagctcaactttaatgtgtgtgtgagtcacctggagatctagttaaaatccaggttctaatccattcactctggggtgtggcctgagatcatgcatttctaaatagctcccaggggatgcagtgctgttttcatgagaacagattatactgtgtgacctgagggac

SEQ ID NO: 27266 - DNA, 201 bp, Bos taurus
tgtggatagacatatatgtagactcagagagagtctcttagtcacctcgtggcagtttgaattacttttatagggcatttcttctgggtttcctttggccgatcatttttgacttgcctggttcacaatctggtatatctcgggatcctcccgtgtgtgtacacgcacctcttaggcaggatggattctactgaagaggcc

SEQ ID NO: 27267 - DNA, 201 bp, Bos taurus
tctgagccccaggttccttatcgatgaaatggggagacatacttctcaaggtgtgaagaaacattaagacagtgtgcagagagcacggccagctcagagttgctcgctgtcggaacgttccacagcgttctgagcagctgtggacggtctggcagccctgagagccgaaggtccccacacataccactgctcccaaggcct

SEQ ID NO: 27268 - DNA, 201 bp, Bos taurus
ggggaattggtctgagttaggaaaaggcaaaaggatatttcaggtggacaaaacaatatgagttaaaatagggagacagaaaaatcaagggacttctggggacaatgaacagaaaaatggggagatgtggttgtgtgtttggaaaagggaaatctcattctacttcatgtctcaagtagaatgagtataagaaagagactt

SEQ ID NO: 27269 - DNA, 201 bp, Bos taurus
ccgtggggggaagcatgatctccagagttcagggctgtgaaatacagggccaagttatgaggaaatagccaggggatcagggtggcctgtgaagctaacaaacaactgctgacctggctcaggtctccacaggtgcagtcctgggtcaggggagaggcctggcctgacctgggggtcaggaggagggtggtctgggagggg

SEQ ID NO: 27270 - DNA, 201 bp, Bos taurus
ttttaagtcaacactttgcaggcctccagagagggggttgaccaggcgacaggtgtgagaccagggcgaagaaggacggcaatcttggcattgaggaggacgggccaggagaggggaggaggtgagagaggccagggagcagaccatcgagaagcagaagcgggaaggcctaaaagaaagcaccaggctctaagggactga

SEQ ID NO: 27271 - DNA, 201 bp, Bos taurus
tgtcatcaatttaggctggcatgaaagtcagaccattttaagcaggtaccatggaagaaataataagaattctaggtcatatgtgattcactacatttactgtgttccccagataatatcaagctgttatcaattgtatttttgccaagagaagcctaaaacgtttgttgggtatggggcacacacagacagcagctaagc

SEQ ID NO: 27272 - DNA, 201 bp, Bos taurus
gcctttcaaaaggcagagaaatgtatcagaatccttaacaattcaacttgaacaaaaagtaatgctatcgaagaatgaaataaatgctgaaataactccccccacaactgatcaaatacgatcataagtatttggggaaaagctgtatgacagtgtgagtcctagtagacatttaattcttatactctgtaaaactacatc

SEQ ID NO: 27273 - DNA, 201 bp, Bos taurus
ggaggggcatggcaactcactccagtattcctgcctggagaatcccatggatagtgggctacaattcatggcactgcaaagtgtcagacactattgaagcgactcagcacacatgcacacatctgattaattgctgttctttgggaggggatggaggccaccattttggtgacttcactctgcctaattcttcccaaagtc

SEQ ID NO: 27274 - DNA, 201 bp, Bos taurus
gggccttgctgctctagttctcctttgcctgtgtttctccccactgcactgcaaatgagaaaaagaatcagtaattctcttttcagcatgttctgggtggctgggactctgccccaaaggccttgagactgcttgcaggtctgctttcccaggtggacctacttctgctatgcacaatgtaaagccttaggggtggctggt

SEQ ID NO: 27275 - DNA, 201 bp, Bos taurus
gtatatttttaatactaagttgacattgactgacatgcaaggaaataagcatacacatcattgcttggggacaaacccaacttggtaaagactcattttggattgtttggcaatgtctgtgcttagatcccatagttaatttctaggaattttgtctaagcaaattatgaggaatatgttgaaggatttttgtataaggct

SEQ ID NO: 27276 - DNA, 201 bp, Bos taurus
ctgctctgttctctatagtgctggtgaatgtgacttgttacatcttcatgatttttcctttgttagggtaccaatgagtgggcatgttattaaaagaaacgtaggtagttgtagccctcaaggtagaagattcggccacataagcgtggtggcaatgtttcattttgttgtgaatgtatttggggaatatctgaaacaaca

SEQ ID NO: 27277 - DNA, 201 bp, Bos taurus
agatgttgtcttgcaggaagtgcatgttgatccactggtaataggttgagttggttttgtatagaaatacaggtttcaaaatttcatgggactcttccctgcttttcaaagaaatgcaattgttttactcttgcatcttcagacttctagcctattttattataatgtctcatatactggcttctcaggtggcagagtggt

SEQ ID NO: 27278 - DNA, 201 bp, Bos taurus
ttgtgaagccataaaagtagataaactttgaggaagttaatgaagagaaaattggaggaacaaaggcaagtggaaaaatctaaatgaacttcttagcccactcaaaatcttaccaaatgcctaggtttgcctggagagaagcataccatccttccaaggagaaggagggaagaggacaagagttaggaggaaaaataagga

SEQ ID NO: 27279 - DNA, 201 bp, Bos taurus
gcgccggtggtttgcacggggtttgcccttcctgtcccgggcgccccacgcttggcagaatcctctgccatcactgtttcagaattcttgataatttagggacaagaggccccacattctcattttgccctgggctctgcaaattatgtagccagacccgcttctaatagatacattgttcgaattctgtcctattgaggt

SEQ ID NO: 27280 - DNA, 201 bp, Bos taurus
cccccacccaactgggtaattctaatagtctcaagagatgcttgatgtttgggaattatttgtgggtaccagtcttgggaaagagctaagatcatgagaccaggggcaagaggacagacataaaaaccaccaagaccacggctgatgttacgtcatttttgtacaaattttacaaagaaacctctttgggactgggtggcg

SEQ ID NO: 27281 - DNA, 201 bp, Bos taurus
ctcatgaactggtcttctgcctgaattagtcttctgaattataggtcaattttagagaagttgaaacattttaaaagcttcactgggatttgtcctggttgaataagttggttgttaaagtgttcattagaagttcgttcaactgaacagaagtattaagcatctttaggttactgtatttgtgtaagtgagtgcttataa

SEQ ID NO: 27282 - DNA, 201 bp, Bos taurus
cattcttcctccaggggatccttctgactcaggaattgtacccgactctcatgcttggcaggcagattcttgaccactgagccacctgggaaggcccccgaaagggaacgtacagcttttaaaatacttacgtagcaagagcagaagggcaagaattatgagtgcaattgctgcaggccccaagccaacgtaggagtcagc

SEQ ID NO: 27283 - DNA, 201 bp, Bos taurus
tttctctggtggctctattaccagggccctgcttccttactctgttgtctttaatcactcatgactcacccaggcagccagaaggcttcacgccgctggcggggtgactggcccagagcagctgagtctatttcacttgagcaaacacagaattgcacatctctgggacacggaggatggtattgggaaagggacagacct

SEQ ID NO: 27284 - DNA, 201 bp, Bos taurus
tttgcagttatagcatcaaataaaatgttagcaaagacaagaggaaataatctattttagggagctggcaccttgaacattgacagagtctcaaaggttacttctttcatcagaataggctataactatatatagacaataaattctatttctatttcagcactatacatagtactaaaatcttttttttttcctcctggt

SEQ ID NO: 27285 - DNA, 201 bp, Bos taurus
tacagtagttccagaataaacatttctaaattttttgtatgtatttgatctatttccagaatcttaaagtagttgtctttgacaattatgtccatttatcattgtttttcaaggacagttatattgagctccttactcagccatttcagaagtttcccctgctcattcttttgtactgtaccttgcatctctcaattccct

SEQ ID NO: 27286 - DNA, 201 bp, Bos taurus
atttctgtctttagactatgaggacattcataaacaatgactttaatcattaataaaaatacattcaacctgtgcatacatttttcacataccaaattacatgatcattctgggcttaaatgttcaaattatctataatgtgacacattttggggcaaagctatactatttaattttttcctactctaaaattctctccct

SEQ ID NO: 27287 - DNA, 201 bp, Bos taurus
tcctttaaggttcagcagacgtctcttctctgttctccctcaccaacgacacagccttagcaggaacttctctcttaattagccttgagtaagaatttcttaacagagtgctggaaccactttgtcccaaatagcattatgattttcttctaatcagttcagttcagtcactcagttgtgtctgactcttgtgactccatg

SEQ ID NO: 27288 - DNA, 201 bp, Bos taurus
tccatagttaatgcttaatacacgtttaataataatcgtattttagagtaaatgcttttcttgttgcttggagccattcctcttcaatcaggtgactccctgaaacataataccatgacctcttgatgttgcttaaaaatctctctctctctcgtttctctctcccctcagttatttaggactgtaccttgatgaatggga

SEQ ID NO: 27289 - DNA, 201 bp, Bos taurus
aaacttatattaccataatgctctcaatatttattacagcaatgaaatccttcaagttcttacatgacactgctagatgacatggccaatacattgtctttaccattttcttactgatgatgagctttttaaccaccactattcttgagatcgagtgaactccgggagttggtgatggacagggaggcctggcgtgctgca

SEQ ID NO: 27290 - DNA, 201 bp, Bos taurus
tggctgaatataggttgttttcccaagtgagatcttaaattgtagcttcttgttaaagtaagttgacttttctgttttattttttattttatttgtagttcatttggccttttctctacccttaaaaatgagaatccagtcttactttcctctctatgtgggctgcaaaatatctggatataacctttaattaccctgtca

SEQ ID NO: 27291 - DNA, 201 bp, Bos taurus
caacttgcctctcataaaatccagtcctccagcaatccccaatttatgtcaaggagacttgaagcaagttattaactttctcacagttttgtggtttttgtttggttttggttttttgtttgtttgtttagatagatagatcactctagattttaaaagaccaagtgagttaggtctggaaggttgaaggaaggaagtgtc

SEQ ID NO: 27292 - DNA, 201 bp, Bos taurus
ttaaaggtagtatgttgtgaaaaacacggtcatttccttatataaaagtcactactatttttctttttccctgattaaaaaagtttggatagtaagttaaaggagatgtttatctgaaagaatatctatctataccagtcatgacctgatcatgggtctctgcactggcattgttcttgacctataatggctttaaacttg

SEQ ID NO: 27293 - DNA, 201 bp, Bos taurus
tctttattttttatttggctctgtttgggtcttagttgtggcatgtgggatcttagttccctgacctgggttcaaacacaggcctcctgcatcttagccaaggaagtccctggtcttaattcatatatttaaataggatgatttccagccattagccaatgcctgaggatgcttcctgatggggtgtgtgttaggccggga

SEQ ID NO: 27294 - DNA, 201 bp, Bos taurus
ttgaggtgggagtcagccagtgatggaaggagaattaggcaattatgggttctggagaggaccatatggatgaagcagacttgaaaagctgtaaacagtaagtgaataaagctgagcaaatcagttgtgtagttggcatcatggcggcctttcctgagattcattccttgattactgtacagttcatagatttagaggctt

SEQ ID NO: 27295 - DNA, 201 bp, Bos taurus
agatttttctggaaagctacattttcaagagacaattctgttgtttatcgatgtgttggattatttgcctttcatatttaatgtggtcatcttattcttttattcctttagttaaaccaattccagtgacagaaatagaaggatttcctttggctacattgacgaaacactctaacagtcatattaagtgtatatactgaa

SEQ ID NO: 27296 - DNA, 201 bp, Bos taurus
tatgacaaaacttacacattacagacaaatagataatcttatctaagtatgtaggattaaatagtcaaatatctacatatatgaaaaatagatgagacaagtttcattcaaagtcaatgctagatactgcctttgtcacattatggtcttcagtgtatttaaaatctacatgtgagtgcattccacagtcacaactggatt

SEQ ID NO: 27297 - DNA, 201 bp, Bos taurus
gtggtgatgagcttttaaaatgataatagttattaaaagtccaatagaaagaaaaatttaaatgtcgtgttctgctgttcaaggagcatttcacaaagtacgcactcaggtttgttaaaataaattgtattctcgttcccttgtatcaggtaatattgacaagtgaggcttcagaaaatcctgaaactcgtgtaatacagt

SEQ ID NO: 27298 - DNA, 201 bp, Bos taurus
tgaggttaggaattcttgttttttagaagacaacaacaaaaacacaaagaagaattcttgcagagaaaaatgcttcataaattattatttagaaaaagagatattacaaggcttactaagctagactatcaagagacaccatcggttaaacagatactattccaatttttccaaaaaggagaacactttcaaattcagcta

SEQ ID NO: 27299 - DNA, 201 bp, Bos taurus
tattatgttctcccaagtgaaaagtaactccagttctttcagatggaatgacagccagattgagaggatggagactggggagtggccaaaatcttcagccacccggagaaagctccatcgatgccctgggcaacacaccccatccgcttagggaacgagcatggcctaagaagtcctccctgtatatttccacatggtatc

SEQ ID NO: 27300 - DNA, 201 bp, Bos taurus
ttctgaaggcttttttttttttctagaatttgaacattttcatttcaaccactgagagaacagaaactcctgttggtggttagattggcaggcatgccaaattttagctctggagttgatccaaactaccccatttacagctcaaaagcaaggcttccgaaccattcttagaaataatcttaatgcgaagaaaatcagtcc

SEQ ID NO: 27301 - DNA, 201 bp, Bos taurus
acacggtcagtttgctgtgtgctcgcttggtgtatgtacacagaacagactgcagaaatacgtacctactctcaacgcagcatgcaagctgttagcaatcgtctttacattacctgaggcccactccatcacccctttcacttaatatgatagattgcaggacgtaatatagaaaaatgtagtgtgtgtggcatataaact

SEQ ID NO: 27302 - DNA, 201 bp, Bos taurus
tcagtcaacagcttgacttaaccttgggcctttctgggttcttaagcatgtccttgccaagaggttgttctagttcagtagtgctaggcccaagcataggttcggacatcagatgttagagcttacacattttcagtcaatcatccactaactcggtgactatggacaaggtcctgagctactgaaggcctctggtcctct

SEQ ID NO: 27303 - DNA, 201 bp, Bos taurus
gtaatctatttcatttggtttcatctccatgaagatgaaaaaggccgtgcaaagcaatgtttctttgcttgtttctgcccattttctgtagaataaaagacaacaacattcaaacaatatggaggccaaaaaagaggataaaaatcctgcatggaaaagagtacacaaatcctgcatggaaaagagtacaaattattcaga

SEQ ID NO: 27304 - DNA, 201 bp, Bos taurus
tatttctactgatgcccatcatttcaatctagcacttgtcgaacatcccaatcttttttctctccgtgtttgttactgccttctcgagtagtgagccacccagcttcccttatcttcaatatatatactcagttgctgagtctagaacacacagtaagtagtttaaaaattacatactcatatcatcaggataagcagacc

SEQ ID NO: 27305 - DNA, 201 bp, Bos taurus
gggaggcctaccaaaacacagaacccgtttctgggcttttttttaagggagagaagagcttattttcgtctgtgctgccacgtggggggcactcgggctgtggcccataaaaaggtagagaggatgtgaacccggtcaaaagaaagagtgttggctctgcggggaggagctgggacaagtttacagagaaggcaggagccg

SEQ ID NO: 27306 - DNA, 201 bp, Bos taurus
agaagcctgagccctgcaataaagagaggctgccactcactgcaactagagaaagccacagaaaacaacaaagacccagtgcagccaaaaaaagaaaaaaccaacacttttcccttatctcctgcttatgagaacctggagtaatgttctacttttcttccacaaagagatgaatattcttagactttcaagagtgtttta

SEQ ID NO: 27307 - DNA, 201 bp, Bos taurus
gttcatagggtcccacagagtcagacatgactgaagtgacttagcaaacatggagagtaacattacatgagcaatctgagcacaagacaatccagataaccacatcaaagcaagtctttgatttctctacaaacaaatagggcgtgcatgtgcacaaatgcaggtgtgcatgtgtatgagcatatgtggtttttagtgaca

SEQ ID NO: 27308 - DNA, 201 bp, Bos taurus
ttgtctgtacaaaggccagcccttgcgaggatgcacatgtctggggtgctgctctgccccgggcagtaacctgcatgatatcagagtcacatcgttatacgcagtgtctgacggcccgacgacttgaaggctaacggatatatcacttaattcaaggctctgtatctgcccccgagccaatggttttctcttcctgtgccc

SEQ ID NO: 27309 - DNA, 201 bp, Bos taurus
gaaatcaaggtaatatttaggacagaccagaaggaagaacaaccacaggacatcagtttgaggcgatagtgctgatccacaaaaatcattctttcaaaccgatttctagcttcattctccccagatcaccagcaacagaccactctcacccacacagcatatcctttattttctccagagatacagctccttttctgagca

SEQ ID NO: 27310 - DNA, 201 bp, Bos taurus
gtgtgtctgtgtacacgggcactctgcctgcctcccatcctgggaaggaaggaaggctccttccttgtgcttaggcagcagaatgccaaatgtgggggcagggctggaagagcagggcacacaggtaagaaaagaggccagtgcccctcaagtctcatagcgtccgcgctcctggtgtcacatgccacagcgtccagcacg

SEQ ID NO: 27311 - DNA, 201 bp, Bos taurus
ggattctttaccactagcgccacctggggagccccatatcatgcacagaatgctctgatgtctctcctagcaggcatctgcctcttcaaagcttcttttctattttcatattagtctcagtcacagctacactagagggcacttgaacaccacactcaatgcagacccaaccactggcacaggtactggtggcactttggg

SEQ ID NO: 27312 - DNA, 201 bp, Bos taurus
aggcagtagacaggaacagagtgtagcagagctttagagagagtaaaattttccttctggaaagtttcctttgctgagatcagggccctaataggtgaagcgctggaccttgagacttggagtgggtgtatctgagtgatgcatatgagaatttttagctcccagattctcctgaaccctctttgcctatagtagaggccc

SEQ ID NO: 27313 - DNA, 201 bp, Bos taurus
atctacttaaataaaagaggaaactgaagagctacagagctgggcaatttcacagcaggacaggagtgggaggagctattggaaagaggctatttagaactatctagtaagctcagagtagtaattaacatcagcatcccaagaagaaatgaaggtcaagctggtgtagaggatcagacaactgacaaaaatgacctggga

SEQ ID NO: 27314 - DNA, 201 bp, Bos taurus
atgtattgctgtttgcttggtgtaggcagctttgtgctgtcgctgaatggatggttggtttcatctcctccagtgacattgtggacactctggatagccttgcctgtaactccaaatgcatgttttttaaaaaatcaatcacctcccatcccagacatattatcacaagaagggcaggatgacatggctcatcagactcaa

SEQ ID NO: 27315 - DNA, 201 bp, Bos taurus
tatctttaatttaaaactttagtaagtatttataaaccacctatactgggaagtggaggctagtaattactcatactagaattgaaagtttcattttatgataagtttcacctgaggatatcttgaggccgttagatcaaagtttagatatacaaacatgtttctagaaaatggattatgtcgttctttttttagaaacat

SEQ ID NO: 27316 - DNA, 201 bp, Bos taurus
ccttgtagccaaaggaaatcagcaaagattattgagtatgtgggggaagagtatctgacacgtggtcagatcttccagaaaagcagttggcaagaggcacagatgaaactggaggtagggaagactgagttagagacggggggagaccaatttggatcagaaataatgcagttttgtgtttctcagactcagattcctgat

SEQ ID NO: 27317 - DNA, 201 bp, Bos taurus
gggtggacacagaagacttgcaaggagggacatgggtacccacagctgatcaggcagcagaacacagacaagcagaagcgtgactagcacaaagcccagatagtccaaggatggttaagatccaagccaggcacacacttaactcctaagtattttactctttacccactgccttctggccttcagagtttctcacagaaa

SEQ ID NO: 27318 - DNA, 201 bp, Bos taurus
cgaaatttggaaggcaaaaatgctggctgaggcctacacgctgctgaaaaggccagccaattatgtaattcagtgaacataggccttcaggagggttctcgtccgaggaattcagcaggctaaccaacagagtctgctctgggcacatgccagggtcaggcactcaacgtgctatagtgcagaatcccgcattcccactct

SEQ ID NO: 27319 - DNA, 201 bp, Bos taurus
gatgacctagaatgacaatgaataacaggaaatcacccgaagtgacttcgagaaaaggtttatctcactgcatttctgtagacaaatctcatgggtaaatttactttatcttatgactgttgccaagccctgactgcagctcataagcctacaggggtgcctaaggctcatgaacagggccgggccctccctctgctcagg

SEQ ID NO: 27320 - DNA, 201 bp, Bos taurus
aggcattcaaatccacagtggtctgacctcagaacccttgttcttcatattttctgtacaagaggtttccaccctctggaggcccaggttcctcaggaaatctacaagggggcagggaggaggggtctgcaggaaagaatgacaggaactgaaactaagggctgttctaggctcttagcgtctgggaacccaccaagggag

SEQ ID NO: 27321 - DNA, 201 bp, Bos taurus
acatttactcaatcaaactattttaaaccagcatctgaaagtgttggaagaaacaacccctgattattacgtttccctctttttggccctattatctaggaataagaagtaggggattcaatgaaaaggaacccgttagcttgactatcaagtgagaatggccatctaggtaacaccctggacctagagatcacctgagca

SEQ ID NO: 27322 - DNA, 201 bp, Bos taurus
attcactcagctgggacctccaggatgtggtgacacagatcctgaatcagaaagagtacactgcatccttccaccctcccaggctccgaggccctagtgtgcccccttcatctcaccagagctcctgggacttcacgtgcttagaaccagccacgcgaagatggcaagaggctcctgggccagggcgatagtgagaggcaa

SEQ ID NO: 27323 - DNA, 201 bp, Bos taurus
cagctgggtgccgtggggtgagggtggtggatgtggtgcccgtggggacagaccaggtggagggaggtggtgaggtagacagaggaggcctgtgggctcctaggggagggttcagagagggcaagggtgagggagacggcaccagggaggcttcccagaggctggtgggagaggacccggagctttaaaccctactgaaga

SEQ ID NO: 27324 - DNA, 201 bp, Bos taurus
gcaggcaggttctttacctctgagccacctgggaaatcaggaacccaggtggatccccaagtagcaaaaccattacaaagatgtgcaaagacaaaccactgcaccagcagcttctgctgggtttcctaggtgccaagatgctctctaagctgagccccctctagctcatcacgcccagcaaatctgattaaaatggattag

SEQ ID NO: 27325 - DNA, 201 bp, Bos taurus
tgtggggtgactcaatgccttaatccagagcgggctgggctcccggctcccgcgcctgcagagacagacctgtgcaaactttgcaggctgttaggccaaacgggctggattgtacacagaggaaacctaatccccatctctggttctgccccaagaatgtgagctcatcaaatctaatgaagtgaaggcgcgcatttctgt

SEQ ID NO: 27326 - DNA, 201 bp, Bos taurus
tctttagcacagaagttggcaaataccacaaacctgcacattttttttttttcccctggagggtctgtcgtcgaggtttttgaaggaggagaagtaggaagagaaagcgtggatgaacttctgggtagacttttcctgggctgaatccaggggagggggtgggctgcagaaaaatgttcagacaggcctggagctaggagg

SEQ ID NO: 27327 - DNA, 201 bp, Bos taurus
ctttacccactaaactgaattgctgttttttaattaaatgcagatatctgaatatacttcgatttgttctatagtctggtccactgatctactctcctgtgctattcctgtaccataattgtttgtttacacaaactttaccgtgggtaacaactggcaggtttgtcctatagtcactattctttttcagaattttcttac

SEQ ID NO: 27328 - DNA, 201 bp, Bos taurus
tgttctgcttaccttcacagcttgggacagactcagagagaagctgtcctcaagatgcaattgacatgatgttccagctggtcctccttaatccagcatcacggcatgtaattcagacaagatcaacaacgatgggtcaaacctatgtgttttgatgtccccactgcagaccagaaaacatttgcagctagttttggaatc

SEQ ID NO: 27329 - DNA, 201 bp, Bos taurus
cacaaaataaaaatgggtggatgaatgcaagcctcctgttcttaggaaacagaaaaatgcttgcaattttatttggcacaatttgcagaaagggaccctcgttatattagagtgactgaaaatggaaaattgcctaactgttaagtcacactggattattaaatgtattatagtctagacatgctctagagacaattaaaa

SEQ ID NO: 27330 - DNA, 201 bp, Bos taurus
gtttggaaggtgatctgctgatcactttttctgtctgtcttactgggcctcctccctggtctcctgtgtctggactccagccctccactccgagccttcttttgtcccctgagtgccaacaaggccttgctgatggtattccttgtttgcagaagataatgactctctcatctcttcctttctcatcctacctcttggcct

SEQ ID NO: 27331 - DNA, 201 bp, Bos taurus
gccagcccccaccgggggccaatgtctgggtaggtttttgcctgagaaaacctcctcctcagtgtccagggtagcaaagggacagtcagcggcagaccagagctcctctagtctcctgtctcacacatcacacaggacgggcacatagtaggtgctggcacacagtaggtgctccacgcctgccttcttcagggagatgtg

SEQ ID NO: 27332 - DNA, 201 bp, Bos taurus
cctgacaatttctctacagaatttttattttaattgattatatactcttgtgatatctaacactgtcttgtcaaatgaagactaacatgtattgagtccttacctatagtcaaggcattatgggagacacacaaatatttgtgcccaaaattttaacagaaagaaacataaaaatgcacatactaagggacagcacaaaga

SEQ ID NO: 27333 - DNA, 201 bp, Bos taurus
tgaactgatacataccaacagattaaataatgtgtaaaattatcttgtaaactaagatttttaaacctctgaaaaatacctgtttttacataagataatgcaactatttataggacagatatatcccatactataaagcatgcagggaacaggaatatcccttcaaaacctgctgcagtagaggatttgttacactttacc

SEQ ID NO: 27334 - DNA, 201 bp, Bos taurus
acaagcaaacgcgggagcattctccagctctgtgaagaaattgctggtgaaattgagtcagatactgtagaggtaaaaaaggaatcttcacaaatggaaaatgtaaaggaggagaagcctacagaaataaaattggaagagacagagactgaaagacaaatacttcatcagaaggaagcgaatcaggacgttcagtgtaat

SEQ ID NO: 27335 - DNA, 201 bp, Bos taurus
aaggcagtgttgtgtcctccttgacccgtccaatcctgtgttaggatcttcagggttagcaggcattgagagcagaaaagttactacggcctgggattccagtggctacaactccactcagcaaatcaggtttcccccaaaaggtagccaccagtcctaagggacatcgtagagtgaaaacactttttaaagacaatggcc

SEQ ID NO: 27336 - DNA, 201 bp, Bos taurus
gggaagggtagccttatggagggggctttttggctagggatgtggttttaagtagagaaagaaccagggaaatatatcccctcccaccctatagtctcctcctgtgggctccctttacctgaaaagctggtatacaaaagaacccattgctccaggcaataaaaaagtcaagtgttagttgctcagttgtgtccaactctt

SEQ ID NO: 27337 - DNA, 201 bp, Bos taurus
gggagtgatggaggggccggggatgggaggttagcttccgacgtttttgggatttccctgggcttactccttgaggccaccgccccttttgtataaatttcagttttatcccgaggcagatggcgagcttacgttttgcttcgtttttgtttcgtgaaacattgttttgggcttccacggccgaagcacattgttagcttt

SEQ ID NO: 27338 - DNA, 201 bp, Bos taurus
catggtaggattcgtgcccttataaaaagaggaagtgacatgaattctatctgtcatgtaaggaaacagcaagaaggcagccatctgcaaactaggaagatgggcctcatcagacacaaactgtactggcaccttgatcttggactttccagcctctagaaccattatgaatgtctgttgtttaagccacacagtctatgg

SEQ ID NO: 27339 - DNA, 201 bp, Bos taurus
tcttctttagctgttgcacacttttaattatgacctaagaaacagcataaatcccaactgcatctttaggagaagtacaaattcaaaaccagtgctactcttttataatagaagcagctgatgtatatctatatgtgaatatctgtccatcatgtatctatcatacatcaatttattccccccacacccgccacccccctc

SEQ ID NO: 27340 - DNA, 201 bp, Bos taurus
agaggacacaatgtgctcaaatctatcatctcaccagtggtataaatattgaaactaaggccaggaacatatggccctaaaactcaataaagcaagcaataaggcaaaatatccatgtatctatgtgccgccccaaattagaagttagatttcctatccctccccgaggagaacatatttctaatgccttttaccaaattt

SEQ ID NO: 27341 - DNA, 201 bp, Bos taurus
aatcacatcaaaacaagcatggagaggggctctgagcagacaagtggacagtggtattgaagctgcatagatttatggcctgacaactctcttgttagatatgtaggtcctaggtatgactatcagttcggttcagttcagtcgctcagtcgtgtctgactctttgtgacccatgaattgcagcacgccaggcctccctgt

SEQ ID NO: 27342 - DNA, 201 bp, Bos taurus
agcaaacctctgatttttagtatctcctaagaaacagaatagccctgagcttctcaagcatatgccatagtgaaagttagaaaatgaacaatctggccagtgaaataataaaggagggacattgtggctggcagaataatgcctttccccattcccgccaatgtccatgccctaatggcctagcaactaaggttgaaccag

SEQ ID NO: 27343 - DNA, 201 bp, Bos taurus
aggaataggtggccccctcttctccttccttcttccgctctgcttcagccacaccggctccttgctctctgcgaatgtgtcaggcacattcctgacttaatggctttgcatggcctgaagctacctggaagtacttctcccaggaagccacctcacctccttccgctacttcagtgttttgagcctcctcttggtgaggtc

SEQ ID NO: 27344 - DNA, 201 bp, Bos taurus
ccttaaaagagatgcacagtctcaaatcctcatgaaaacgacagtaccaactactctgaactattcatatgtgtgagaatgaatcttgggtatctgcctctaagctgatatcatttaaacaacattctgattggtacccatcctgcggatcaaaactctgtggtaccaaaccacttacaaaaagtaaaatatttttaccca

SEQ ID NO: 27345 - DNA, 201 bp, Bos taurus
gtcctaattcatagaaattggtctccaggaactcaaagcaaaacaaggagcaaagacctgatgcacagacattctttgatttatagaagtctctgtatgtcatagagtcaaaaccagctcttttcttcaattagtttccaacttcatctttaaataccttattcactcagagatcatataatatttttcttaatcttttag

SEQ ID NO: 27346 - DNA, 201 bp, Bos taurus
caggccaaggtcacagagagaagaagaagcagagccatgacgtagacccaggtccatttccgctcttcccctttcactctatttgttctacagcactaacaaaattcatgctaagactgaaggggcccctaaccttcagatatcatgcctttagtctgagtcacaaatacagcaggaaaagaaagtagcgcctgtgtattt

SEQ ID NO: 27347 - DNA, 201 bp, Bos taurus
ctgtattatttctacagttaaatattccttgttcaatatattcataactactgaacactgtatttgttgggaaaatggcatctcatctatacattggctagatagctataatctacactaacagaagcttttttttaagcacatgctcatttgaatgacaaatatttaaatcagtttaaccttgatcatgttgctggttag

SEQ ID NO: 27348 - DNA, 201 bp, Bos taurus
tttttatagcttttctaaatctagttcattaacttaagatatgtagaacctgaaattatggtaacttgttggattgttatatttagatatgaaagaccagctatattatgtacctggagttaataaattgcctcagtgcagtgtgttttttcccctgatttctctgcctaacttgacatggttagaaaaataagtatttcg

SEQ ID NO: 27349 - DNA, 201 bp, Bos taurus
ttttctaattaaccgttttgttttgtttttagctcactccttcaaaccaacagcataaaactgatgaaaggggcagggctaattttggagtgttcagtgttttggcccctaggtaagaactgaaagtattgatagttattggtattatagagattgatttttattattacttgaagttaagagtaatacatagctgctatt

SEQ ID NO: 27350 - DNA, 201 bp, Bos taurus
cgcctgccagccaggcagcagggcccccggcacttcagatcttatgattccccaagacctgcttcccagaggcctgcatgccaggggcacctgtctccacggctccagagcaggagcaagatgcttaggaagcagcaatgagtatcctgactctaagctcatgatgcgtatatacaaacatagatgtacttttggccatac

SEQ ID NO: 27351 - DNA, 201 bp, Bos taurus
gggctgaactgtggtccagggtaagtcgatgttcaaaccctcaacacatcacaccaccaccttatctggaagcaggatctttacagaggttaactgagcttaaatgcggtcgtcaggatgggccctaaatgaatgactggctcccttatgccaaggggagccctggacaaagagagacacacacagacacgcacacccggg

SEQ ID NO: 27352 - DNA, 201 bp, Bos taurus
aaggaatggggaagagggcccagaagtgaggacgctcgccaggatgcgaatccgagagtaattgagtgacctggaccaagacggtggtgtgttgatctgaaacgtgccagacagatggcctggagtttggggaagaaataaggcatttgatttttggatgtgccgaagtagaaggaccgcttgtaccccagagtggaaact

SEQ ID NO: 27353 - DNA, 201 bp, Bos taurus
cccggcccagccctcctctgcggggatcaccctcctccgcggatacgggcagcatagtctccctcagggtggggaggattttccttctacgagatgcctccggcaggcggtcctgaggccagagagctgagcactacaggcccgatttcctgtcctcttcacggggcgcacctcggcaccagtaagagtagggggcgaggt

SEQ ID NO: 27354 - DNA, 201 bp, Bos taurus
gaaaatgaagatgtagctagaagggatacaagattaaagatatgttttgatttttttttaaatgagagccttttgagcatgtacttacagtgactgtactggtctctttgcatatatctcatttaattctcacttctgttagagcagttattgtgttttgctctaaaacagaatttagtgagcttttctaaattttcaagc

SEQ ID NO: 27355 - DNA, 201 bp, Bos taurus
atgaataggtactggttgctaacatttactgaaccagctaattcccactaagctgcaattggagaatagtgtagtatatcaagtgggaaatgcaaagaacgtgtgtttagaatacattgcacttctctcttgaacttactcgtttccaaagactatttctgattacacggattttttttttttttttgattacacagattt

SEQ ID NO: 27356 - DNA, 201 bp, Bos taurus
ggggcatcttgccagctttagtgactgcttcgatgtgattcgctcgaggaaaaaggtgagcattgcccggatcaagccgtacttacagcgagagaggaaaatttgactttttcctcctcctcgcagtttaaaagagactgttaatcctctgcgccgctccccacttcccctgcaaagttggttttctagctgtgaactccg

SEQ ID NO: 27357 - DNA, 201 bp, Bos taurus
tcctctgtccatgggatttcctaggcaagattgttcctcgtggttttctgtttataatactagttgtgctgactctggctggaagagccaggccatttggaataaagtggaacatgcctctggatgaattaagcctccttattgtcaacttttgacttctttctactcacttggcctcccgccacgatggtttagacttta

SEQ ID NO: 27358 - DNA, 201 bp, Bos taurus
cggtgctttagctcaggaatctgtgcccttaaccatcattgaggggaacaagcaagttgggccagtgggggaaggagaaatgtgttttcttaccatgagacctttcatatctcctaagtttacattttcttttgaatttttttttttttttggccatgccttgtggcatgccatctagttcccagatcagggattgaaccc

SEQ ID NO: 27359 - DNA, 201 bp, Bos taurus
agcaggaatctggtctttcttgcttgctgctgtaactccgttaactagaacagtgcctggcatacagtaattacttgaaatatttatcaaatgaataagcgatcgttcccaagtatttccaggtgtcagaaaagaaaatttgatctggcctagcaagtataattcaatagtggatgtcactgagcagaatactagatttta

SEQ ID NO: 27360 - DNA, 201 bp, Bos taurus
gcattaaatttattgtgcactttacttctcttattattacatcagctctacctcagatcacaggcactagatcctagaaattgggggccctgacctaacccgctctgtatccacctgcattttatcccaggagccccagccgcacggcttccccgcccttggatcctcacttgtctgcccggcagtggcctcctgccctac

SEQ ID NO: 27361 - DNA, 201 bp, Bos taurus
gataaagcagcgttgcttcttcaccattttgtggtgcccttaccaatgattgttatcgattttttcggggaaccagaacacctgcatgatggccacatttcggggaatcagaacacctccaggatggccacactctcaagggtgttatgggggcctccaagcactccggtagcttttcagcatttgtaagaagacttcgcc

SEQ ID NO: 27362 - DNA, 201 bp, Bos taurus
aataatattggcaagtttgaataatatttgtcattgtaggtagagcaacagaactttgtttttcagagcaggacgaagcaaatatatcacaaaagtgaaactgccgaatttaagatgagttgaatcctactgtactcaagcaatttatccctcccttatttcatataaaaatgtgatttcattaactgatcacagatttca

SEQ ID NO: 27363 - DNA, 201 bp, Bos taurus
cctctattttattctttatttgatctgcattctttccatcctgttttcacatctcaacttattttgtgacagctttgcagcttcaagaatttggctaaacagccctctgtgctgagatgtccgggcactgcccccgcccccaactcacttctctacacagaataatttggggctcactggtaaacccatggtaggtaatga

SEQ ID NO: 27364 - DNA, 201 bp, Bos taurus
cagcctctgccccttctttcttttgggttcatctgccagggagaaggccacctgctggtctgcatgctgccttgcaatcggggcctctgctgggggcgctggaactcacagcttcacaagtgtccatgcggattaagaggggagtctggtaaggcccaccggctgcagtcctgagtggattccactcactgaggctagtgg

SEQ ID NO: 27365 - DNA, 201 bp, Bos taurus
atatgtgcacttgtagctgattcatatggatgtatggcaaaaaccactacaatatcgtaaatagccaccaattaaaataaattaattaatttgttaaaaggcaaaaaaagaagggttgggaggaaaggtttagaattcttttagaattccagaatgagttagctaattgcccccatagagtaggggaggaaccacagggga

SEQ ID NO: 27366 - DNA, 201 bp, Bos taurus
acacacacacagtaaaagaaaatatttttgtatctatagcatatgaaaattttaaaaaactatctaaaaccatacatttctgcttcagtttattctccttctgaataaagtctaagtattataactagtcatttatcaaaatattagcatttcatgatgaataacttagatttgatgcacaaatatgatagaatcctgaat

SEQ ID NO: 27367 - DNA, 201 bp, Bos taurus
atttgtaatctatcatatcaggtacaattatatgtgcatataaatatgtataagagtgtactgcatgaatactgagagtataattccttaacttttattaggcatgaacctagggcatgcctaaattaaatccatattatgaaataatatgcagcagttaagtacagtgacatagagacacaggcactgaacatggaaaga

SEQ ID NO: 27368 - DNA, 201 bp, Bos taurus
tgcaggcagattctttatcatctgagccacaagggaagccctggtatctctattcctgccttgcaaatatgtccacctgcacccttttaatagattccatgaatacgtgttaatatacaatatttatttctctccttctgactttagaaaagtacaaccttctaagactaaaccaggaagaaatgaaaaatatactccttt

SEQ ID NO: 27369 - DNA, 201 bp, Bos taurus
ttttactcctactggccaagcgtctgccatgaagactccccaggcgtttatcaaccccctgaaccctgcacacaccagactctactgaatcagtttacacgcaggtgctgggaggccatcagcctgtgcagaggccctggcctagaagcatggggttcgaagtgcacctctggtcctttctgagctcttaggaacaagcct

SEQ ID NO: 27370 - DNA, 201 bp, Bos taurus
aaaagttcagaactttcaaagtcaatcaaggtcatctgaattaccatggctctatgggtgaaagagacagtaaaaaggcccaataatatcattacaaactgtaatcatgatgcttcaatgaccaaacacagacataatcactgagaagcaaaggccacaaagaaacgatggctaacggataaccaaaatagtaagaaaatt

SEQ ID NO: 27371 - DNA, 201 bp, Bos taurus
ggaacagctggctccccctctagaggaaaggggacttgcactggtaaaggattttaacagaattcagtgacaccactaacgggaggagaggccaagttcccgagaccattaagctgctggcaagttaggtctataaagcgagtggcagaacaacaatctcagttttgctttagtacacctgcattacaaccactgggttaa

SEQ ID NO: 27372 - DNA, 201 bp, Bos taurus
tgggcccgctagccctgcagaggtgaccttgcagagaccttggccccaagcggtgactccagagcatcacacaaagctcgctcacaagctcctcatggggtagttaccaaggatgtgacagatgaagagtggatggcacaagaccattttcaggatgtggataaaaatgaatgctggttaccatgtgggaagccagggctt

SEQ ID NO: 27373 - DNA, 201 bp, Bos taurus
tgatggctgtcttgacttttgagaagtgagggggcctagctttatagagtattggatttctttcatttctatgattaacctcaaactgatcaccgaagccaatgtctggccctcatgggccaagagctctgtttctgaaagtcacatgtggaaagacatctctacctcaggagcagttcatgctctacttatttccttgga

SEQ ID NO: 27374 - DNA, 201 bp, Bos taurus
ctattatcatcttgtactcaccacgttttcatcttcttagtcccaagcagctgatgtggtccctgcttctctataattcccttgtcctgataaaaataacaggccatgctctgtcaaaccctgggggatggacagtctggaccaggagagtgtaactaagctgtcaccacacacctaattggaagattcccaagtgctggg

SEQ ID NO: 27375 - DNA, 201 bp, Bos taurus
tgcactgcagtgggtgaacgcgtctgtgccctgtactcgacactgctctgtgatgtaactcgtctcccagccaggctgtaaggtcccgtccctggcccccagctcccagaatggtcccttctacccgactgagctcagtgaatcaaagatgccaattacatggaaggaagggccggcctcttctgttgttagtatcttaac

SEQ ID NO: 27376 - DNA, 201 bp, Bos taurus
aagaaatttggtgtgtgagtgttgtgagcatgagtgtccagaccctaacctaaccactgactaaattatagtctcagaaatggaaagaaagcacagatcagagtgggtgaaataccgcagaatttaagcagctccagattaacagagatctttatgaacaaagaaaaagaacccacacagaacaaaataaagagctgcaca

SEQ ID NO: 27377 - DNA, 201 bp, Bos taurus
ctacacttctgtatagctctaggctctgtgatttcacgtggtattaaaacccttgtctggctattgcttggggagtgggctgtgctctttatgggaagaatagggcccccttctctctctctttccccctctcccatcaccctttctccattttttttttttttttttttcagtaaagactgactcctaagctaatctgga

SEQ ID NO: 27378 - DNA, 201 bp, Bos taurus
aatgctccaactgtgagattaaaaaataaagtatattttatataacaagtatttcagcgcataaacgttgggacacaactcaagcagatgggactgtgaaggagttggatggctgctcttatgggcagagtcagcatggatggggaccctgcacatggaaatcaggctgcctgggcttcctgctgccttgctgcataggac

SEQ ID NO: 27379 - DNA, 201 bp, Bos taurus
cctggctgtaactccacctttgttctcgctaacaaacccccagttaacctgggtttcagatggtctgtgtttgagggaaggtgggttcgtccctatcctgagcatgaatcttgataagtctagatccattagggaattctattccgttctccaggggctggcttagataaggctcatgactcagttcttttcttaatcagt

SEQ ID NO: 27380 - DNA, 201 bp, Bos taurus
aaacaatattgtaacaaatttaataaagagtttaaaaatgaaaaagatttccaagacccaaggatccccaagaaggactggtgggcagggggcccttgaaaagaccttgtggttttgaacatggttaagatgacctagagccagacatcctggaatgtgaaatcaagtgggccttagaaagcatcactacgaacaaagcta

SEQ ID NO: 27381 - DNA, 201 bp, Bos taurus
gggctatctgaggtcaatccgtgggccccagttgtttccaggtggtgctcctctaaagcacaggtctctagaatgtgtacccttgaagtgtggaaagatggtgcattgggatgcaaaaagaggggacataattaaaatatgaaaaaaaatcaatcctaagggcatcagtagcaatatatggagaatcccctgaaagcagat

SEQ ID NO: 27382 - DNA, 201 bp, Bos taurus
tgttgcaggggccccaagcccaggtgacttcctgggggaacaagtgacacgagtgggtgaagcctcagagaagaggcctctgctcagctccaggtaggaacatgcacccagttttgccagatctgctgagttttcataaaagccccatgtctggaattttcaaagtgaaaatatcctgatccatgtggccaagccattcag

SEQ ID NO: 27383 - DNA, 201 bp, Bos taurus
acacacacagacacacacatatttctcgtgtatcacaaaatcttcttttgagttcctgctaccagtgaaaactgtaaacaccatccatggtttgtgggccagacagaaacaagagattaggggcagatttggtccatttgctatagtttgctgacccttgtcttgaagttcgtgttgttaaaactgtgtcataaagtttgg

SEQ ID NO: 27384 - DNA, 201 bp, Bos taurus
cccaaggcagggtaacaaagttgtggaacagatatgtctcaattaagaaagtccctctgataatcaaggtaactgtgctatagacaaagcctcaagtcaggaatcctcaggaacacaggtggggccacctgagttcataacgacacaaacagaagagtttcatgctcagcacccctcccccacccaggctggctttagcct

SEQ ID NO: 27385 - DNA, 201 bp, Bos taurus
ttgtctatttccctgtgttctctcctgtgctgaccggcccctggcagcgaggcgtccacgaaatccgagagatcagacagttccacttcacgggctggccggaccatggggtcccctaccacgccaccgggctgctgggctttgtccggcaggtgaagtccaagagcccacccaacgcaggccctttggtggtgcactgca

SEQ ID NO: 27386 - DNA, 201 bp, Bos taurus
agactgatccaggtgacatggacctggcttcagcagccgtgggacaagcgccccaggtgacctgatgtgcaaccgaggataagaaagttcatgggtggtcgagaaaggccctcggcccgtccacacgttggatcagctggggcacttcacagatacaggagccaggctgcgcccccgaagatgggggtagacagagcctgt

SEQ ID NO: 27387 - DNA, 201 bp, Bos taurus
taatgaagagggtaatggggaatattttcttggcaatttgacaataaacatggacatctgtattgaatataaagttccatttgttggaactctgctcaaccttatgtgccagcctaaatgggaggagggtttaggggagaatggatacaagtatatgtatggctgagttccttcgctgttcgcctgaaactatcacaacat

SEQ ID NO: 27388 - DNA, 201 bp, Bos taurus
tggctttgatttctattaaacatataacaagtagacaagggctaaagccattgtaccaagtaaagtgctgaggatattacagtgttaatgcttcctctatcaactcgatgtatttctttcatcatacaaacctgccagatgagttcatgggggtcagtagggtctggccacgcctccagatccactcaaaagatggttgac

SEQ ID NO: 27389 - DNA, 201 bp, Bos taurus
aactgtgggagaggagctgctcccagagcagtgatcccagtgcctgtgggtgtgtacagccaaccagaagaccttgtagggctcgtgaaccactaggcccatttgtggaattctgcaccaagggacctgcaaatggtaaggagtgaagaaccaccaggtgatggagtccattcccctggaggccggctgatcttagggagc

SEQ ID NO: 27390 - DNA, 201 bp, Bos taurus
cttaactccctttcttcattctccttcaagccatagtccagtgccttataaataataattcccaaagattctataacctaggaacattattaaggaaggcggttaatagagacaactgaacagctttatagaactgtaaggcataaaatattcagtacgatatttaagctacgtctaatctattccatttcagaaatgtga

SEQ ID NO: 27391 - DNA, 201 bp, Bos taurus
aaattttattttcatatttaaactactgactacttataagcaaagtagtatttattaaaataagataaacacttaatttatactaacatcctctcagatttatacaagtttttcatccttaatttttatacacacatcatgatacttttcaaacattattagtgaggcttatacaaaagttaaatatgacatcgaagccag

SEQ ID NO: 27392 - DNA, 201 bp, Bos taurus
ggcctgggggcatgactgctgtcccctggggctccccactgtccagctccacccccagggctttgtggttgctaccgagacccctctccccagggctgtgtgtccatcactcacttcactcaggcctcgtttgggtgtcctgcctgtccagatttcctccacggcccaggacagcgagcataggacccagggagcacaggc

SEQ ID NO: 27393 - DNA, 201 bp, Bos taurus
gctttgtgtgccaaggtataaagtgaagtcagatgaatgcaaggagttaaatctgtgttgtgatgctgtgtttttaaaaattgcactatcttcattgtttgacatgaggaagctttatgtgaagtcctgtatgttgttttctcacctatgcatcattaggccccataataatgttccccccataattgtgcaggaaagggt

SEQ ID NO: 27394 - DNA, 201 bp, Bos taurus
cctttcctagaaatttttaacaaaaatttaaaccaaaaaaaaaaaaaaccacacaaaaaccctgttgaaattaatcaatgaatttagtaaagttgcagtacacaatttaacatataaatatcagtagtgcctccatacactaaaaggaaattttctgaaaaagaaatagagaaataaatctcatttacaacagcatcaaaa

SEQ ID NO: 27395 - DNA, 201 bp, Bos taurus
aagaaaaaaattgcttctttaattaagatttatgggcctcagtagggcccagccagaggagaaaagtggttcaagagagtaaaaactaatggttaaaaatgagacaatatgattacaggcctttaattcctcctgcttcttttgcagagcttccagtggccccaggcaaaagcaggaacttattgtctttaaaatagcatt

SEQ ID NO: 27396 - DNA, 201 bp, Bos taurus
tcaggattgtcatgaagatattctttcacctacccattcttaaaaatgcctaaacttttatatctaagggataatatttgtcctttcagatgcagaaatcaggcataatgcaagtccccctgcaggggagataaattatgacttcaatttctcttaagagttaggttcctggtataaggaactctgatgactacaggtttg

SEQ ID NO: 27397 - DNA, 201 bp, Bos taurus
tctggcctatgactctcttgatgtggtgaattaggtgagtgtcaggagctccgtgttgcccagcaaggttcccaggggatattatggtctatgagggaagattcagttagcctcagctggccttgcattgtgataattgcacaaagaacatccttttctccacttcttactgctccacaaagacagcctatgacttcaatc

SEQ ID NO: 27398 - DNA, 201 bp, Bos taurus
tactcacttaaagatcttgctatcttttgtggtcctcaattaaggctcacaagaacctcttgagggtaaattggtgccaatctaagcattgagagtagaagaaaaagtaatgaaaacccaaagcttgtacgaactttcaaaagtcatctctaaggactcgagggagcagctaaaattgattgtaacctgaacatctagaat

SEQ ID NO: 27399 - DNA, 201 bp, Bos taurus
gaaccctagtgctagcatggccagaacttcatgatttgttttgaacccactttacagcctgtgtccaccaatgcagcctctggcactggccatgacgccaactcaaactctttaccttccttcaagcacagaggtgttcccacatcgttgttcacgtcacttcctccacatggtggtctctctagcttctccactcaaaat

SEQ ID NO: 27400 - DNA, 201 bp, Bos taurus
cagccaggcctgctggagcagggccaggcagccccatagatcccagaccagacccagagcctttgaaatacagctgcctcttcctgggcctgctccccgcacccctgtggtgtcatttccaaatccattacattccaatggctttgggatcttttaattacatgtgacgaagcctcgccattgctggaattagacggcctg

SEQ ID NO: 27401 - DNA, 201 bp, Bos taurus
tgtgttcctggtggccctgttcatctgctcaccactcatttgcttgcatgcagccattggctcaatcgtggggctgctggcaggtaggccagggcgcccccggctcagcaggggtcattttcctgaggtcatttctcccagcacacagtaaagagtctaggcttactatcttctctgaagtttttagacactgtcagggct

SEQ ID NO: 27402 - DNA, 201 bp, Bos taurus
gcatttctacaagcatcacccagtgacttgagaaggccgatcctccagagtatatgaaggactgagggaggggcataggagagggggctctgggtggggtaagagcagtatatgctgctgggcctcacatagaggcccagaacaaagctacagcagagggcctgagccactgcaacttacaggttcccatgtggtgctgat

SEQ ID NO: 27403 - DNA, 201 bp, Bos taurus
ggtagatccccatgaggttttctcatgcttctgctgtgtgcaggacaaacaaccagatattcagtggagctgaataattgcacaacagcattgtttaagagcaaaaatgtaggcacctcggtgcctccagccatcacccatccccaagcttccctggccaggacaggcagtgcagcgggtagaaattgtgcactttacgcc

SEQ ID NO: 27404 - DNA, 201 bp, Bos taurus
actgaaaaagaagcaatcctagcacactaatacagaaagaaaaggatactatgttaattcaagtaagatttgactatcatgatcaactcgtcttcgaaatcagagctgaaacagctaaagaaaatggcctagtcatttcccaatactgaatggaaaaagcaaaactcttgattccaactgaactacttactagctgtgtga

SEQ ID NO: 27405 - DNA, 201 bp, Bos taurus
atgcggagagaggctcaaaatattcacaagttaaaaaggtgaaagtcaatcaaagctgagcctaggaagacaaaatttgcttcccaaccgaaatccagacgtagatgcgggaagtcaagaacgcagcagaaaaccaagcacctagagagatcacaggaggaaaaagaaaaaaataggctcctggcaaagtctggcaggagg

SEQ ID NO: 27406 - DNA, 201 bp, Bos taurus
aagggctggtggctgaggccttaaaatcaagacaccaggaacgactgcttgattaaatgtctttcccacattcagctggagagtctagaagaaaagccacattgaggcctggaggctggaagcacagaacccaccctccctccagctcattagcatcattgccccctcccccgattccagtgacactacccaaccttctcc

SEQ ID NO: 27407 - DNA, 201 bp, Bos taurus
tctgaatgctcccagtaccatcagtgatcagccctctccaagcagctgagtccatcactgggcagtttggatggcatggtgcagaaggctctgtggctttccaccaagcatccatgcttcccttccgtgatgtacagagcttgcccggggcaactgtccagccaggtactacaatcccaggtgcccttgcatctaggtaga

SEQ ID NO: 27408 - DNA, 201 bp, Bos taurus
attttgatcacggacagagtatttactagaagtttcccagtaccatcagttcccctaaagaatgttcaaaagtagggaatgtatattttaaatagggaaaatgaaatgcttaaccatccaaagtgagtagctaacagtgaaatttccaggaagcatcagcagatagagaatataggccaatggatggacaagactcaagag

SEQ ID NO: 27409 - DNA, 201 bp, Bos taurus
catcaggtttggtggccaaaggcacacaggcctctgatctctccccttttgctgcaagggagagaaggcgctgttttccccttttaacagatggaataaccgaggccagggacactagccaaggttgtttagctaagaagcagccaagctgaactcacctgtgctggctgcagttctcagcccttttgactccacagcctc

SEQ ID NO: 27410 - DNA, 201 bp, Bos taurus
gctttcttccacaagcccaggggcccccaagtcatgctgtggtttagggttcagattgtagcagtgcagatagcccaggatccgtccacaacgaaagctcgcatggaggtcctgagattggtgttgaagccctagtgggtgtgagtgcttagctctgttaaatctccagtaaagcaggagcctctggcctccatcagatat

SEQ ID NO: 27411 - DNA, 201 bp, Bos taurus
acatgatcagattttaccaaaaatatcccaacagcactgtactgctctaaccaaatagtttcagtgacaatctaatctatgttttatattattttattctcaggaaatttaaaagaccataaaattttcagtaataggttttgtcattaacttcacaagtttcagatcagatctgatctgagaataaaataatataaaaca

SEQ ID NO: 27412 - DNA, 201 bp, Bos taurus
agatgtccactggacttaagctggtggacaaacagcagctcagctgcaaatgaaaagaacaaaagagcattataatctcctgaactgctaagcaaataaaagaagaggacagtctgtcaacacacagaaccatcaactacccaccctcacggacggctccttcagtgagacaaccatcgtgataaagtggccatgactgag

SEQ ID NO: 27413 - DNA, 201 bp, Bos taurus
tcttgtctctctggtgatggcccttcctggtttcttcctcccttttgctgctgaaatgcatctgtgctttggaccaagaggcggagagtcgcaccctagaaatggcggaaggctcagaggaaaggccttgagtcccaccagcccgagaacacccatctgtggactttctatttccttgtgagatatttagttgcagctgaa

SEQ ID NO: 27414 - DNA, 201 bp, Bos taurus
gaagtgtctcaagagaagtcgggaaaatccaggaagctctggaagccgcccttctcatggagaagaactggaaccagcccttttgggcctggatgttctgggttctgcccacacagacccccacctctgtgactcacagacagccacgtcctagaagacgggagaccgcctgaccaacaacgtctgcaggctggctggccc

SEQ ID NO: 27415 - DNA, 201 bp, Bos taurus
gcccaagtcagatgcccaaccctggctgcttccctgggctggagcaagactacagtcagccctaactgtcagccctaactgcagggctagagtggccccaactgggtcctgggagaaaggtcctggaagcaggggtggagcaatgtgcctgggtttgcaatgtggggagaagtgtgtggccacgtgcacacacggagcaga

SEQ ID NO: 27416 - DNA, 201 bp, Bos taurus
ccaaagagtctgcaaacagtataacatccttcaattccttaactcagttgtactggataatacaattcccttccattttcttttcatttttgatgtctttatttatttggccatgctgctttcaagaccttagttcccagagcagggatcaaacccatgcccctgtattggaagctcagagtcctaaccactggaccacca

SEQ ID NO: 27417 - DNA, 201 bp, Bos taurus
ttgtttgttttctcctttctcctcagttgagttgtgagctgaaacagttagaagtgtcatagaaaccttcctttcttgtttcccaggcctaacacttaaaaattttctccacttacttccttttcctgaagtttgtttattaagggaaatctctggggccagaagatgctattcagagcaaaaatgaagtatgtatttgaa

SEQ ID NO: 27418 - DNA, 201 bp, Bos taurus
aacgagggccctgaacagagcctaccctggaggagcagtggcagggagctgggaatggtggcatggagctagttatttgggttcaattttggattcatcaattgctttggcctcttgatggatttacttcatttttctcattgtagaactgatgttgagacttaacacctcctgatgattagggaataacattcattagtt

SEQ ID NO: 27419 - DNA, 201 bp, Bos taurus
cctggaggtttgggccccagtccacagagctgggcaggtactgtggccatgttggtttgtgaggtttggggacagacgtgaatgggtttctgccagctgctggggcatctctctgctgtggccttgtcattactgtcttgcccccatccccccaaattttgaaccacaaaagcggccttaattacagctagtacccccttc

SEQ ID NO: 27420 - DNA, 201 bp, Bos taurus
aatacacagtaaagaaaataaacacatcatttatttagtcaccttatttcctctttgaagcattttcttaatttgggtaatagctaggatgtccagtcatttacatttcagaagtgtgtgtgtgtgtgtgtgtgtgtttaattggtcttaaataggatgtgaattttgttaagaaaaaattatattttagtgtacttggtt

SEQ ID NO: 27421 - DNA, 201 bp, Bos taurus
aagaggtcctattttggttaaaattaaggtggcataatactttcagaaagagaaagtttttcatgtagtccataaacttcggcataattaatttcaaaaaggaagctcagatatgtcatgataagttggtagagttatttgactaagttgtgttttctgaggagggaaatcttacctacctgtattaatttagtaactttt

SEQ ID NO: 27422 - DNA, 201 bp, Bos taurus
attgcaggcagactctttaccgtctgagccaccaggaaatagatttccctattctggaagtatgaacaaaatggtagaagacattgtgttttgtgactgactttttagacttagcataatattttcaaggctcatccttgccatatgcatcagtactccatttcttcagtggtcaaatagtattccacttgtatagataga

SEQ ID NO: 27423 - DNA, 201 bp, Bos taurus
tctgagggaatttttgaggcccagatttaaagtacattctcctgggaagatttgctttcccaaaatgagtccatattaaaccaagtttttgttaagatgcgtttggtccatgcaggcctcatgtgcttagtccctaaccccatggactgtagcccgccaggctcctctgtccatgggattctccaggcaagaatactggcg

SEQ ID NO: 27424 - DNA, 201 bp, Bos taurus
ttgagatcagtctgactgactgacctccagatcctgagatcttaaaaagcaccagtgccccttgctggtgggctcagtctggccctgtgcatttggggtgtgtacttttcctaagagaaaattccaccttgagtgctgcacggggagagtcttactttgaccttccattattctctctctctcccatcttggcctctggaa

SEQ ID NO: 27425 - DNA, 201 bp, Bos taurus
ctggccatgccctccagtaaggacatctggcttattgatttcaatccttttgccaaaaaatgcctcctcatgtcacttttctttccagacaaatacccgaggaggggtgaagggcccctgttctgtgcgtaggtgaagggagcagtgactgcgactccccagctttgcctgaatccttttatccaaagcttccctgtgagc

SEQ ID NO: 27426 - DNA, 201 bp, Bos taurus
acgggggcgctgctgcggttcccataatcaagccacagcgagggagggaactgctcttcttcacgagcttttgcctgcggtggtccagcgctctaacaggcagcatccatctctggaccagtttcttcattacgacgccctcgtcggttcccatccagtcacaccagagggccgtcccagtatgactgttcctaaggtgat

SEQ ID NO: 27427 - DNA, 201 bp, Bos taurus
tatcattgcattttgcaagaaggcgtgactgttgggatgttgtaaccaggatataaagtgttagtgagaggagaagcaggcccagaatccagagtctgacctcttttccccaaacaggaagccagtcacttatttcctgctccaggctaaggacccaaagaggtgccatttctcaaccacttagtttcagagcttttccac

SEQ ID NO: 27428 - DNA, 201 bp, Bos taurus
gcagacttttctgtcactcctcttggcttcgtggaaacagagcacgagttaatggtgatggcagattttcatttatttgtatatatcagtcaatagaaaggaaaatgatattggctgtgtgtttataagcaacattagaaatttgaacaatagcagacccttactgaaacaaaaataaaatatgagtcaacaagattcttg

SEQ ID NO: 27429 - DNA, 201 bp, Bos taurus
taatgaccactatcaataaaagcatagaatagtgattgctatcaatgaaagctctcaaactgatgtactatcactgaaaaagtctgatgtgcatttttttaaatccaatttaataaaagcctagtcacaatagaaatagtggataagtgaaagaaaggacatcatttaagttggatatgtggcccagataaaatgatttga

SEQ ID NO: 27430 - DNA, 201 bp, Bos taurus
aggcacaggtccagtcctgggtcttctcagttggctccatttactggcaggttgttgatacatgtttggccatgtggcaggaaaaactacctccctactctacagccttgccaaaagtgagacacttcctttctttcctactcaaaaggtaagtcctatgaccatagaatatagttattataagagagttgcacaagggtt

SEQ ID NO: 27431 - DNA, 201 bp, Bos taurus
ggagcacagactctaggcacaggggcttcagtagccgctgcacctgggcccagcagttgcagcttgtgggctctagagctctggctcagtatttgtgacgcaagggcttaattagatccccccagaccaaggatcaagccaccagagaagcctctgtgtattgtttttaaatgcataggtatgtgactctattctcattaa

SEQ ID NO: 27432 - DNA, 201 bp, Bos taurus
attaccagagacaagggataaggaggaggaagaatgggagcaagctggtcaaaaggcacacatttccaagcataagatagataagccctgaggacgtacagcatgatcactgtagctaattccactgcaaattgtacaggaaagttgttaagagagtagatcctgagagtctcatcacaaggagaaatttttttgttttct

SEQ ID NO: 27433 - DNA, 201 bp, Bos taurus
tgggttatggtattttgttttggaaacctgagcaaattaagacaccataaaagccaactatcctgcaaacactgccctacacatagtaagtgttcaataagtgtaaataattatgtttactcatagtaaaccttttcttcctaattgattggagaacaattcagtggctacatattttcacttcagtaagcagttaagaaa

SEQ ID NO: 27434 - DNA, 201 bp, Bos taurus
tactttaaagcagggcttattagtaaagggatttatgatgttgatggtacatactggcttcttgcccatgtgcttaattctgcttccttggtttttctttgcattcaacagttatttttgctcaccttctaggttttgaatactcactagttgttgagtatagggtgaagtttgtactccaaagggcaagactgatggctg

SEQ ID NO: 27435 - DNA, 201 bp, Bos taurus
ccgtctccatgacactcgtaataaaacatagtaccttattgcccctcagccctgagagccgactgactcagcccaagaacgctgtgatgtttctggagaatgtttattgtatatggggtaaagtgtggcgattttaggattctgccttgtgtagtttaataggtatatctacagcaagattttacacacactattatattt

SEQ ID NO: 27436 - DNA, 201 bp, Bos taurus
ggggagagggggttgggggcgggagggactctggggaacacgctaggtggaagggcaggggtcaagaagtggggtcaaagggctgagactctggggaaaatgggagattaaatatcctctttttcaaatcaagaggttgggataattaattggtccccaaacatgaaagtgtccgatgactgttctgggcagtggccattc

SEQ ID NO: 27437 - DNA, 201 bp, Bos taurus
tgactgagctactgaactgatgtcatggctccagtctggtcatcatgtagtttacttctccacctggggtttccaatatctataattcagctcataggatgtggctcagagtattacctatagcccctgagaaggaactaaaggtccttggctatgcttaatgagtatattattatttggtctcctctgattgggcttccc

SEQ ID NO: 27438 - DNA, 201 bp, Bos taurus
ttcatggagagtatcttctggttgggggcagaccttaagggaaaaaggcagatggggttacaaaataacacagggctgtcaaggcaaatctctctgcgggagtatgctgggcgctcgcacgctgggttttgctttgtgtttggcaggggatgtgttgggaaagacctccgtgaggaagtgactcttcagctgagacccaga

SEQ ID NO: 27439 - DNA, 201 bp, Bos taurus
tagggaaaaacatggacagcttttacagataaggcctgagacagatatcatcaggttatacataggtcataaatgcattgcttagaaaagccatctcctcccctatgctgctggcctgtcttagagatggattgggatgagggtggtggagagtttagaaaagacctctggccttcatacggttttaagagtcatgggtaa

SEQ ID NO: 27440 - DNA, 201 bp, Bos taurus
tcctggcgttcaggaggacttcctgcagattggctgcgaaggtgcaacagggggagggctgaagggtgcgtcccccgcctggaggtgcgtcccccgcctggaggcgcgtctcagggtggggatggcgctccgtgtggacattccaaacctggaggttgagtggatgttctaagagttcacttaaaaaaaaaaatcttttgt

SEQ ID NO: 27441 - DNA, 201 bp, Bos taurus
tcccagcaatgctttcttaagcaattctgatcacaacatcctgtattaaaaaacccgcgaagactcgtcagtggttgacctacagaaagaagtcctcatctgtcctattttagtccccttgtctttatttccttacacagatgtcctgtgtggacagattctcgtgccacgcaccttcccactttgggtctctgctccaat

SEQ ID NO: 27442 - DNA, 201 bp, Bos taurus
tagaagttctgtagaggccccttaaaacaccatgcatctgttagtgaagtgttcactagaactttcctcatcacacacacaaacagctgtctccagtttcggtacagagaagccctctccaggccagctcatggaatgctcctcaggttttcactgcttggtttcctgctttgtcagaacccagctccctcccattccctg

SEQ ID NO: 27443 - DNA, 201 bp, Bos taurus
atacatggaataagatcttggagaccaacatttaggtatatggtctttaaatatgcctaaactcagttgagaaacaaggaaagaaaatgaaataagcaacttgtctaatatccccgggcctcatttgttcatttctaaactggagggttgtctgttaaaatccctttcagccgttcttttggataatccaaattctctcct

SEQ ID NO: 27444 - DNA, 201 bp, Bos taurus
ttgtaaggtttccaagcatctcaaaaaaagattctttagattacaagtgatgcctaagtctagagcgcttctgacaggcaaagtttcgttacattcggtatcctgtttccttgatttttgttgctgggagggattgaggcaggagaaaaaggggacgacagaggatgagatggctggatggcatcaccaactcgatggacg

SEQ ID NO: 27445 - DNA, 201 bp, Bos taurus
tttttctccatcaagcattcaaacatggcaaccacgtgctggagagaacacctagctgtctgctcactagctaatgggtttatgaagcaagcctgtttccgattttaaatcagcaagggataatctttagagggggaactcaagagtcacccatgtgttacaaaagcaaagagatgacaaacaatcccagctccaactggc

SEQ ID NO: 27446 - DNA, 201 bp, Bos taurus
ccttgctggcctttccgtggaaactgcaatgacagctcgtgccctcatttcctccccctcgcccctgacgctttctcacgtggcctgccatgccctcttctctcaggaactgtgagtcacagactctcttttcagtggcaactgtctcttgatctgtgagcctcatcatacctgaacagtaatagaacccattctttatct

SEQ ID NO: 27447 - DNA, 201 bp, Bos taurus
aacagaccggtaaaagaatcaacctcactttcttcccctcaaagaaaagaaatttaacagactgtggccatccttgatgttcaaatcacaataaggaggagactgactttttgttcagattatacttgaagtaatgatgttacagggatcccgtgttaaaatgtccccacactgaagattccaggaggcgtatggtgacca

SEQ ID NO: 27448 - DNA, 201 bp, Bos taurus
acatggagcgtgggatcagagtgagaccagcacaaaaaagcgagttttacgtgctgtgtgagccccagggatccacaaatcctctactaagaaggcccatcctagtgctgcaagtggaggaaaagaaacagcttcttggaggcaaagagcaaagaacaagggttaagtcagttcagtggctcagtcgtgtccgactcagtg

SEQ ID NO: 27449 - DNA, 201 bp, Bos taurus
tagtgttgtgtctcataattctgtgggccaggaattcagacagggagctaacagcaagagtgacttgtgtctgctgcagaatgtctgggcacacagctggtggctgtgggcctctctcgcctttcctctctgtgcatgtctatggcgcggcgtctccggggaaccactgttcctataggcctggggtcccagagcaagtgt

SEQ ID NO: 27450 - DNA, 201 bp, Bos taurus
ttgcaggggaaggtaaacaggccgtcagcacagaccgaggatccgagagacagacgtgtggggacttggtgtgtgaaaggtggtgtttcagagaaccatcgaagtgtgtgtgagcagtggtaccggctggctttccagttgggaaaaattatataattagatccctacttctgtcgcgcacagaacgtttcaagtgaatag

SEQ ID NO: 27451 - DNA, 201 bp, Bos taurus
aactggtttaaattgaggatttgaaactgaaatcctatgctaatttcaaatgaattgagtcagagacagtgtcagaggtgttaaatctagatggctgaccgcacgatttatttccaggcccccaggcaagacagtaatgtgtgcctaatggactgccttatgtattgataatcggagaaaggtagttggaagcaaactaag

SEQ ID NO: 27452 - DNA, 201 bp, Bos taurus
tgccctcctagttccagtttctccacaaacctattttaatattattttgttaattgattcactttattgagtttctccaaagcattcagtttagttatacatatttgtgaagtgaagtgaaagtcgctcagtcgtgtccaactgtttgagaccccatggtctatatagtccatgaaattctccagaatgctggagtgggta

SEQ ID NO: 27453 - DNA, 201 bp, Bos taurus
tctgtcattatttgtttaagtctgaaagctgttttaaataaacacatgctcattttatgtattaaaagcaacaaagagggaagaagaaaacctgggccattgtcatgtgatctggacaaaccccccgcctatatgttcagggtgcactcagcccctggttgtgtcgggactggccagggctctgcccgacctcagggatgg

SEQ ID NO: 27454 - DNA, 201 bp, Bos taurus
gatcctctccttgccgtcaagggagtctctgcttcaggtttcaagggccttatttgtggcaggaagagaaaggcccctcctgtcctctgaaggccctttccggtcctaaagttcgtaacttgaagattctggggctccattttaagtgtctgtgcaccaaaagcaggcagaaaaaaggttacataattgggagactgggcg

SEQ ID NO: 27455 - DNA, 201 bp, Bos taurus
caagtgtgtgtgcacatatatatatatataacatgtttatatagagaccatttgcacttcaacaaacctgggacctgacctaccatcttacctccaccccccaccagctctttcttctgaattccttctcaatgagttgaatcttgggcttccaacaaccccagtcagaagtttgggaatcatcccggttgcatcttctcc

SEQ ID NO: 27456 - DNA, 201 bp, Bos taurus
ctgtctagcgcaacagtaccagggggaaaaaaaaacagctcacagatgttcttcaaaaatacaagcatcaatcacttcaactaaagtcacagcatgagaatccacagctaagaatcaattcttctatctttataaagatactctggacgcaagtttgcccagcagagcatcccaccaaacggtgtgcattgtaggttaggg

SEQ ID NO: 27457 - DNA, 201 bp, Bos taurus
aacactaacataatcacaacatcatgatcacatccaagacaataacaattccaaagtatctggtatctggtttgtagtcagatttctgcaattacctccagtgtctaataaagctgttttcccctcaaaccaggattcaaatcaatgttcttaccatgcattaggttctgggttgtcctcagtttcttttaacctggggct

SEQ ID NO: 27458 - DNA, 201 bp, Bos taurus
cttttggtgttgcttcttgtatctttccagacatccaaataacaagctaaggtgacttttttgttttgcttttagagactgtctgtggccttcctttcacagaaggacaatggactccttggacgtccagttccccatcccgtccccttccacctcctcctaatacccctaaggtatcgatacacccgcaatctccttcag

SEQ ID NO: 27459 - DNA, 201 bp, Bos taurus
tagatttttaaaaatggtgactagaaccttaactataaacactctaaataaaaaataaataaatatttggaagtttccattttgtacaaagtcctgagatgggtgctagcagatgcacaaagcagaataagaaaattttgctctcagggaacttgttctagagatgaaaagatacgaacatatgaaaacagaactagcagt

SEQ ID NO: 27460 - DNA, 201 bp, Bos taurus
caccatgcccctggcgcccccagggggatgggccccactgcagcctcagcttgcctcagggcagggggagggaggctgggcacacaggaaggccggaaggaggggcattgttagggcagaaaggctgcagcgggtgaggagggaagaagggtgggagtcacatccaggcctgcctcacaagttcccactgacgacacactg

SEQ ID NO: 27461 - DNA, 201 bp, Bos taurus
ttacactaaatgcagaatggattccccagaaaacatcctcccagtcattttactgtaagcctctgaaaagtcactgcagcaaacaggtcctgccggcccttctcccagactgttccaagagctctttctgagtcttcagtgggctgagcctcacatccgcagagcttgaaggaaggcaggcaggtggccagccctgctctg

SEQ ID NO: 27462 - DNA, 201 bp, Bos taurus
atggttggcttgtattctaggtaggttcgttatttgggagacagtgaaggctaaaaatgttcacttccttaccttctgtgccaagggagagggatgaaccttagagcactgcggtgaatacagactccacagaactccatcagatccacctccactcttgtaggacaggtgaggtgctgggcaggtgagggaatgcacagg

SEQ ID NO: 27463 - DNA, 201 bp, Bos taurus
cctgcaggcttatcgccaggacccagagtccatcggccaggggtgccaacctgtctccctgctgcaggactctgcctgccaccccaagaccaaggttgcacggaagccaggccctgtcctcgctacctaccctgggctctggctgtgggtgggccgcccccagccatcctctgtgctctcagtgggcacgggccgagctcc

SEQ ID NO: 27464 - DNA, 201 bp, Bos taurus
tgagtgtgtgcctcctttgaacctggggtgtgggggagggaaggaaagagatggaggggccggaggggcgagctggtttgaggggtggcctgcccggggtttgccctgatggttatttctctgtttctgcgacccagtgtggtgccgcgtccctggacaggcccagctgttcctggggctggaggttggtttccatcctca

SEQ ID NO: 27465 - DNA, 201 bp, Bos taurus
ggctcttgaggccgggttggtaggcctgagcacgttctctgacgctctggctgtgtgtgggcacccctgtccctgaacccgagctggtgcagagctcgtcctctgctctggccatgcccacaggacctgctttgtccaaacctgatcatcgagcgtctggtggttggacaggagcaggtggggtttctcccaaggcatgtg

SEQ ID NO: 27466 - DNA, 201 bp, Bos taurus
gtggttgggctctgtctgggcagcacatgttctcccagctcggttccctggatccagtgggcaaacagcctgctctgtctctgccgggcttggcctcaggcgagctagtaggattgtgagttcaggctgctatctcttcagaacaccccctttagcttttctgggagttctcgctctggcctcagggccttgagctactgc

SEQ ID NO: 27467 - DNA, 201 bp, Bos taurus
ggccctgggcagtgaaagcgaggagtcctaaccactggaccaccagggaatttcctgcaaagacttgtttctaaataaggtcacattcccagggtcagaaacagacagtgcagggctgaggcaggcctttaatttaaccatcagtaactgggaccacccatcctcaccaggctgttctctgtgcccaacagcacctcctgc

SEQ ID NO: 27468 - DNA, 201 bp, Bos taurus
ctgatatttgttaaattgtctcagtcctttccccagatttcctgaatcaaaggcaccgtcctacggactctgtaacacgggctacacgtggtaaacttgattagacttggctgacaattgaaagcggacaacctgagatactcagattcctataaatgactcagtacatatttatggaatgcctacattacccaggaaact

SEQ ID NO: 27469 - DNA, 201 bp, Bos taurus
ttcctgattgtttttttaaaggcaaagtgatttattggaatttgtcttcagtaagctgtgctgtattaagttgaataatagaaagtagaaaaacatggccctggcagttgatttttaaagttcatctttctcattataactagcagatagtaaagttcatgtgacagcatcttactgacatgcacttttttctgccctgaa

SEQ ID NO: 27470 - DNA, 201 bp, Bos taurus
ccatgttcctttctttaacaaatccacacttttatttatttacttttcaataagtttaaatcctccaagggtacagtgtcacatggattctgtgtccagtattcttagcaggaaggttgcttcagaatttggcagaaaccatgccactcatgtttccatgagcgtgatttgtctttccccagattactctggtttgtgagg

SEQ ID NO: 27471 - DNA, 201 bp, Bos taurus
ctcacaaactggaactcgatttgggattctcaggggaaattcagactgcaggccagggtcctcctaatttaaaaaatttaatcaagatggccatcgttccattgtgtcctctggaacatgacttggagctcagggaataggagggagaccagtttgggcactgggacaggagtctctgctttactggtggcctggacaatg

SEQ ID NO: 27472 - DNA, 201 bp, Bos taurus
gcactgtaatcgactacaaccctctaaccaccaataaaatccaataaatacttgtttaatgcacctgtgcctgaatgcttttggctgcggcccaggcatcggggacctggctggggagggaccatgcatggctgtcctgtgggtctgggtgtaattgcacgtggccagctccgcaccgtccatggctgacttgctttgtcc

SEQ ID NO: 27473 - DNA, 201 bp, Bos taurus
acaggggccctgtgcttggtttagtgttctgcgctgacatcttgagattcacaataattctgaacagaggcttttgcacgttattttgcattcagtcctgcaaattatgcagctggccttgcttgagccaggaggtgaatggtggccccgtttatgaagatagagggggccggaagagggacatctgggggaggatatgga

SEQ ID NO: 27474 - DNA, 201 bp, Bos taurus
aacgtgggatcttagctccccaaccagggattgaatccgggcccttggcggtgagagtgtggagtcctaaccactagaccgctggggaactcgccagaccgacagcttagaaagcccatggccaagtgcctggtgtgcagcaggatttgtggcaacatgcatgtcatgatgcatcaacactgagggctttaaaataagaat

SEQ ID NO: 27475 - DNA, 201 bp, Bos taurus
gtgaagattgtcacttactgatactaaatgaagggtgacttcatttaacacggattctgaaatatctatatgcgggttgccaagcagtgctatgtagatcatcttctgaagaggaagaggctcctggaggaacccagcatttgaggattaatttgaacgcatttgcttcctcctctgtcttcacatcttgggtgggctgtc

SEQ ID NO: 27476 - DNA, 201 bp, Bos taurus
gctaaaagtctggaatatatatatatatatatatatatatatacagactggatttgagagagggtcagttctctctgaaagaagaatatgtgagatgagcggcttgagagcttccagcgtttcaaataaacaagtctgtcatgattgagaacagaccctcactttcacgtagaagaatatatgagagccagagagagggca

SEQ ID NO: 27477 - DNA, 201 bp, Bos taurus
agcggtcctcactgtgaggaccataaggaagcaaactcaggggcctcggctgtgcgagccacatgtgtgcgccgcggagccggcatcctctccccttgcctagggaagctggtggaggcacgtctccatctaagccaggcatatgtcaccttcgggcaaaaaacgagctaatagaattgagatgaatgtaattggcagaag

SEQ ID NO: 27478 - DNA, 201 bp, Bos taurus
aggatctcaggatggtgcccaggatatgaatatgtattacagacaactcttgtctacaccacagtttgatgctcacaggatatttggactcttggtcagtgaagagtcatagatgttgagagatgcagaggtttttcatttctccaggatgcattgctgactgcttctgggaagccaacatttccccttctttcttcatga

SEQ ID NO: 27479 - DNA, 201 bp, Bos taurus
atgttttgctgcaagtggggtagattgagctgaagactgtgaaccacaggtaatgtaccttaaagccatcagatgattgtgaataaggctgtttagttccatctcagaagttcaatgaggttcagcctgttagtcaatagtgactgaaataatggcagctcttacccacctccacatgccttggggcttcctttgattttc

SEQ ID NO: 27480 - DNA, 201 bp, Bos taurus
tgttcttaggcttgaagctttaaaaaagtaaataaattattacatacttacaaatggggacaggcatgatgaaaggatcaaatagggcatcccacaaaagagataatgatgggggtgggtggaagaaaaatctactgagataaggtggtcctggagggcttctctgaggaagtgatgagtaagctaataaataacagatgg

SEQ ID NO: 27481 - DNA, 201 bp, Bos taurus
ttgttcaagttcagcaaaggcgaggaaccagcctgaccgtcctcggtggaatttctggctcttggcttagatcaggctttgcacccaagaggccaagggaacagcttctggcagagtgagctgaaaggagaggatagaaagatgcaggagcaacccgtttcggttggaagatcttcatttctgaaatgcagacattgtgaa

SEQ ID NO: 27482 - DNA, 201 bp, Bos taurus
aatttcttgccagagaagtagaacagaccaggctgagaaactcaagtcgaccaaactgtcagcaggacggagaactgcaggcagctgagaagggacagtctcctttctctagtcagagttggtgggaggggtgggtcccagggcaggagacaccgcttttctaggtggtgtggagaggtataatcagttggtttaggagga

SEQ ID NO: 27483 - DNA, 201 bp, Bos taurus
taagaattgtgaaatttcctgggtttagggggaaacaaagattcaatttcccacatttatttttaaaggaattcttgtatgtaatgatttccatacaaattgttttcaatcactcatgcctgagttcagctgatgggtacaagcaagtcattgacctaagtctgggtcagagagagcaaggttagggtttattaaagggat

SEQ ID NO: 27484 - DNA, 201 bp, Bos taurus
atagcaatcctattatattaccattacacagcatctagtggggaaagctgagaacatgttattagtgctgaaagggacaatttactggatttcgctaaatgccatcgcttcccaaaaaatgaatcaaaatgacttgatgatgcatgtctcactttaatgcctcactcagagaatgatgggaaagccgtcacgatcatctga

SEQ ID NO: 27485 - DNA, 201 bp, Bos taurus
acacagcatcccccacgccaggcagcgctaacatgaccgccaggccccgagttcagcccacagtggctctctggtggtggcctcagaccaaggggaagccgcagcccaccaggatggtgtccctgagcaccagcacctccagtctaagccgctcccgccaccctcgagctggagcccgcccgcgttcagatggcctggtcc

SEQ ID NO: 27486 - DNA, 201 bp, Bos taurus
aggtttggagggccaacgggcagttagaaatatggatgggcccttgagctcaggaaaaaggtctgttcctgtggcaatgatgtggaaaatcactcctgtaggtaagcttcaggggccaaggcgcgtagctggctgatgtcagacagacggaagagaaggccactgaggaaggagtgggcaggctgagaacaggaaagagtt

SEQ ID NO: 27487 - DNA, 201 bp, Bos taurus
ttggtctgggttattacagtgggctcctcctttgcacccattcactctattctccacaagctgccagagggaccatacaggaacataagcaggccatgtggttcctaggctcaaactcttccgatagctctcaactcagagtaaatcccacatccttataatgatccagcgggcctcgcagagccctgtcccctgttttct

SEQ ID NO: 27488 - DNA, 201 bp, Bos taurus
aacgtggggcgacggcccaggggtaccaccacttcctccctctgagttccccaagttcttaagcagcccctcccttcaagcaggggaaggaagcagccagtagacccgcttctttgtttcctttctttccctcttccgacagccatacttcatgtctgaccgtggaggtgacgcttctcaacagtgacaaatttatgagtt

SEQ ID NO: 27489 - DNA, 201 bp, Bos taurus
tgctgcgattcatggggtcacaaagagtcggacacaactgagtgactgaactgaactgaaacctcactgtgtcacttccatcttctgctgccccacctcctagggcctctgcttctacacatttctctgctggaacttccctcccctcccacttccatcaaattccccttcctctgcattttctccaaattatctcctatt

SEQ ID NO: 27490 - DNA, 201 bp, Bos taurus
caatggacccaggaaaaactttcggcaaaatccaacacccatgtatgataaaaaaactctccagaaagtgggcatagagggaaactaccttaacataataaaagccatatgacgaacccacagcaaatttcattctcaatggtgaaaacctgaaagcatttcttccaagattaggaacaagacaagggtgcccactcttgg

SEQ ID NO: 27491 - DNA, 201 bp, Bos taurus
ttcaggtaaaaaggacttgaaacacccagacacacgtggggccttccttgggtaatggagccaccatgatcctattatctctctccaaagctctcccaggggagcaggggcttttctaggccaagcagtaaagtctgcccccatctagacctgaaaatcagcagatacagaaggctttttctggtgaatcctagaaatcca

SEQ ID NO: 27492 - DNA, 201 bp, Bos taurus
cagtccatgaggcagagtgcagcaactctgagcaggctcccagctgaaaactaagacaattctgaatgaatgagaaatttctttgagtggcaattaaaaaaataaaaaataaaaatttatttttaagacaattttcaaataagttgaagcaattattttcagagccaaccaatagcaccaactaggactgggaagggaaga

SEQ ID NO: 27493 - DNA, 201 bp, Bos taurus
aggagacctggggtctactctgtgcctgagcctattgacttaatgtttcttgattgagtcatatgtcaaatgaaggctcataacattttccctacatggcgggaagggtaaacggtgacactattaaatagcaatgcccttcatcaggaaaaagccttattaaaatacagaaggcattgctgtcttaaaacctatggaaac

SEQ ID NO: 27494 - DNA, 201 bp, Bos taurus
ggggatttctgcctatggatgggttctgctgtcagtggcgggggcggggggggggttgtctgcagtcccctggggacagctgaatctctttctgtttgacgagatggaccagctcaggcagagtgtaactctggaaccaagggcactggcacacctggccggggaggaatcctctcctttgcttcccattggagttgattt

SEQ ID NO: 27495 - DNA, 201 bp, Bos taurus
ttgttaataatacatatactatctatggtattttgtatcttataggacaaatattgatgtaggtactgacagacaattcatcttgtaaacagactatgtaaatttacagtatcagtaaatacagaagagtactataactgtattttccttatgattttcttaatattttctataacttgctttattgaaagaatacagtat

SEQ ID NO: 27496 - DNA, 201 bp, Bos taurus
aagtgaaatgcttcatggaaggcctcgcgcagcaggtgacacggccaggaatcaagcccaggtctctctgttggggccgaaggtttgaactcttcgctgctgttctttgccactacttgctgtgtttaactccttgactatattttgtcttgtatactctgatctaccttttatctgtgaaaatgggccccccactcccat

SEQ ID NO: 27497 - DNA, 201 bp, Bos taurus
gtcaggtaatctgctcacctgaagtttggccacaccccatccctcctctgggctggggagccaaactcaccccagcacccgctcctcctggtccccactcccttcctgtctgcagaggccagcagttggtcaacaaaggattcgctgttcctggaacgtgcctggctgtgtttggagcttccctgcctgtccctggctctc

SEQ ID NO: 27498 - DNA, 201 bp, Bos taurus
agctacaaaacctgtacacatcactctcaggccatttacaggaaggcttgccgcccccgaggggcagataacctggtcactgtctccccaggcagccaggagagggccagaacctgtcccactcaccactgcgtctgcagcatctaaaaccccacctgctcagagagagcgcttgtaaaatatctgcagaatgaagaacag

SEQ ID NO: 27499 - DNA, 201 bp, Bos taurus
ggtgacccacctgacttcatggcgccccagaaggttcccagactgaagagccatactagttattactattcgaggcctgggatgcatttagcttgggagagtaagaactcctcattcgtatcccgagccccagaggtcaaagatgttttattagttgtgtgacctcgggcaagtcatttggcctctctgagcctcccttgc

SEQ ID NO: 27500 - DNA, 201 bp, Bos taurus
tattgctttccaactttgtgttggcttttgccatactccagtgtgaatcagccgtgggtatacacatgccccctctctcttgaacctccctcccactccccgtggaaaactttaaaagatgtttgaaacgactcagtatgtgaaagaattgggggtggggatttgagctaatttttattaaatgatggaatcgtcattctc

SEQ ID NO: 27501 - DNA, 201 bp, Bos taurus
ggttctccccgggatcgccttcatgggcatgggcttgttcatcctggggaatggccactgcaggcatccacaggttcagtaacgggggcgagggaaaaagggttgcccattactcatatcagtggtatttgatggaaagagacaggtgggtctctcaagtaaaccgtgactatgagtcaaagggtttggagaacattgatt

SEQ ID NO: 27502 - DNA, 201 bp, Bos taurus
tgctactgagggatccttagaaggtggccgggctttagagcaggggagaggctgcctttggtccctacccggggatggctaagtgtgagacaagaccagcggaggccggacacagtgtgggctgcaggcgggtgtcaggttctaaaggggttaactggaaggtcaaggaggtgtgctttctaacggaggacataaaactgg

SEQ ID NO: 27503 - DNA, 201 bp, Bos taurus
tattctcatcaagggcccaacaatgcccatgtccatcccctggcagagctcacagataccttcttcctggtcgttctacttggatgtccagacgccacccgctgtccagaaagcaggcctttaaaataccatgagagtgaaaaggaatgtcgtcttcccagcccgatcattcagccacttgtgtgccctctgagggcaatc

SEQ ID NO: 27504 - DNA, 201 bp, Bos taurus
atgtttctcgttataggtacacttatgaaacggtctccaagtccttctgtgtccacagctcagtgcttggtgggtggcccaactgtttaatttggtcaaggacttactctttaattctcacctgtgctccttgccggctgtgtgccttcaggcaagtctcttgacctctctgggccttgttgccagtgaacaccaagcctg

SEQ ID NO: 27505 - DNA, 201 bp, Bos taurus
gccaccaggaggagggcacttctcccacgcggtgccgaggaccatcctcgcagacccatcgaggaatcaccgtctcagtgacagtaaagaaccgacagccctcacaggctttcgaccataaacaacttgacccctgggtttatgaggtatggttagtatttcccaacatgcagaacagaggagaatcctagagaattcctg

SEQ ID NO: 27506 - DNA, 201 bp, Bos taurus
aggttctaacctgctgcttggtgaagttttaacaccatgcttgtgattgctttctgctcattgacagaatctgttcctttgggggctggtattaggattaatgaaatggcacatttactttgactgtaattagtgggaaatataatgacaatttataggacaacatatagctgagccaaactccccaagcaccgacaggct

SEQ ID NO: 27507 - DNA, 201 bp, Bos taurus
ctttgcatccccatggactgtagcccgccaggctcctccgtccatgggattctccaggcaagaatactggagtgggttaccatgccctccactgggggccgacccatccctagaacttccctgaagttctgaatcctgttctctgcaagtgaaaggggagccttttccctgtgtagagcatgggaacacttttaggccaca

SEQ ID NO: 27508 - DNA, 201 bp, Bos taurus
ctcaagaatacccttcccttctactacccagacacttccttcatcatcttcgcttgtagaaatctaagcagcctttcaggccaagttcaaattccacttcttgcatggatacctctagggtctccaagacaaatttttattttgacaccactctgctttgtaatcagggttatgcctgtagcattgtccatggcttgaatg

SEQ ID NO: 27509 - DNA, 201 bp, Bos taurus
tagttcctttcaatactcagattgccccataacaaagtcaatccatagttttctgttcctgagcagcttgagcaatggtacatataggccattcatgtacgtatagactgttatggcaattgccatccatattggtagaagagctctttatcccttatccatttgagacacagtctggctcatgggggttcaccctgttct

SEQ ID NO: 27510 - DNA, 201 bp, Bos taurus
taactttggggtctgcaaccatattgagtcactgcaagtccccgaggagcaagagaaggagaaggcaaaagccttcctccaaaagaggaaaagcaagttgggtgggggtgggggtaatagtaaacaaagtttccatggcttttcactggctgagtccttgccggcaaagaaaaggagtccttctttcctttgggctgtgct

SEQ ID NO: 27511 - DNA, 201 bp, Bos taurus
catttgggcagagttccagatgaagatagggagtgaatcatgtaattattggtcagtgtccaaggcaaggggaaagagcaggtggaaaggccccaaggtcgggatatttgtatgatggaggatctgcagtgaagccaatatggctgggggactgttacagggggcaagtggtgagaaaaggggccaggagccaaatggtga

SEQ ID NO: 27512 - DNA, 201 bp, Bos taurus
gacatagaaataaaaaattcctgatggctcactctcacaccaagttattaacacctatggctcaaccattcatcacagacctcctttcccattttaggcaagacatcctcaaaatgtcctggcctctgccaacaacatcccagacacttccaagcactcagaactagagaagaaatgccaggttttggttaaatgagttac

SEQ ID NO: 27513 - DNA, 201 bp, Bos taurus
gagggcaaaggagggcccagtggagagtggggaactatgttttgtgtctcctttcctgaatctaataacaaatatagagaaagcagattggtttgtttccatgcctctcagagaagagtgtgcagagcaaatacgcgagacgtggaaacaggtcaacgagatactgagcacctcttctctgcagacctgggtattgtctag

SEQ ID NO: 27514 - DNA, 201 bp, Bos taurus
gtgcctcgcccaagccaccccactcctctgtggccaggcccctgtgtgtgctcctgacagcagtggggagagcaaactgcggcggacagctagtgagaacactcaggaagccggcctcaatctgtgggccggggacggacggcaagcttggcggtgctaaagctaaagccccatctttgggaaaacaggagaaactgtcag

SEQ ID NO: 27515 - DNA, 201 bp, Bos taurus
cagatcagtcaaaggagataggaatcaccctcgtctcagatggctgaaaactcagggcagctggaggttataaagaacaaaggcaatgacccttcatccacactgagctcctggaagataggaactaataaaaccagtaggaaataggaatgcctcagatataaaaaggctgaagatcatggattggcttacttcaccaga

SEQ ID NO: 27516 - DNA, 201 bp, Bos taurus
ggagtcgtttgtgttgagtggaacctttgccaggcagctcggtctagagcatgcaggtgaaggaaaggactggcccagacccggtttttatggccctcatgccaagaacggtttatacatttttaaaggatagtttaataatttttaaaaaaagacaaaaatgtgacagagaccatttctgggcctttatagaaaaagttg

SEQ ID NO: 27517 - DNA, 201 bp, Bos taurus
gggccccagacttcttcccccactgccctggatcttctcaagtcagagaggaaacatgagtggctaccataatgggaatccacaaacaccaataaaggaatcgacaaatcagaactttaaagggccctgcgcacagtaggcctcagccatgacctaccgggaaaggctcgtctctatccctgccttctccaagtatgcttc

SEQ ID NO: 27518 - DNA, 201 bp, Bos taurus
gggattctccaggcaagaacactggagtgggtggccatttccttctccagttcatgaatgtgaaaagtgaaagtgaagtcggtcagtcgtgtccgactcttagtggtttttaataaggcctttattgagatataattcacacatcatatgattcagtgagttttagaaatactccagtattttatttgtgcagccatcacc

SEQ ID NO: 27519 - DNA, 201 bp, Bos taurus
tttattggaacacagccacacccatttgtttgtgtgtcatctgtggctgcttgtgtgctgcagaggccgagttgagtagttgagacttgtgtggcctgcaaaggtgaaaatatttactctctggtcccttagagagcaagtttgccagtgtctgaatatcttacctatagcctggtcttaagctcagttggatttccttgt

SEQ ID NO: 27520 - DNA, 201 bp, Bos taurus
cataaagtttgggagtggagaatcagttgacccttaaagacacttgtatgtatttcagaagttttctcatgccaagctaagagcagtttcacgtagtatatttcagggtcaggaaggccgcccataaagggcattgtttgtgatcctttgaggacgttgaggtgctgttatggtgttttctttctccctctctgatttaca

SEQ ID NO: 27521 - DNA, 201 bp, Bos taurus
gtatatgttttctttatttctttttttaaagtggtaagcctacttacaaccatactaggaatatagttttgtatcctgctacttttttcacttagcaaaatgagatttttccaagtttaattacatagctttaaaaataaccatcaccatttttttctttttcctgccttttaaattttttatcaaagtaatatatgcaca

SEQ ID NO: 27522 - DNA, 201 bp, Bos taurus
tggaaaaaccatagctatggctgtacacacctttgtcagcaaaatgatgtctctgctttttattttcagtgataaaagtcatttttcttgcatcccatttcttgcataatctggcaatggtcttggcttccaaaatatataggtaccatgaactcattcatgccccctgtaaaacacccacctccccattgctgcaggcac

SEQ ID NO: 27523 - DNA, 201 bp, Bos taurus
tctcagtggggagatcagagttagccaattaaaacgtttatttatttattttttgcattttcctgttttttgttcccataatttcatttcatcccaactgcccttagacatggatgaagaagcctgccagacgagagcaggactcctaggtctgacagcccttctcccttttacatggtcagaaaacatgctcatgacatg

SEQ ID NO: 27524 - DNA, 201 bp, Bos taurus
agaattaggttcaggtgggacccgactcaggtgttcaaatcatgtcatcataatgaagtctccctccgtcagaaggcttcctttcattttggcctcctaggcaggctccatggggcgacaaaacggcttccagcattcccaagcttaactccaatttcaagtctaggtataaagagccagggcctctaatctttaccttca

SEQ ID NO: 27525 - DNA, 201 bp, Bos taurus
ggcttctctttggaaaaatgcctgctacaaccatctgctcctctttaaaaagcaggcagtgtctagagtgagaactaagtgaaagagggccatggagtctgaaccaaaggactgtctctccccacaacccccaggtacacaggatctggtccaagtcagaagtacttggccctcaaacccatcactgttgagagcatctga

SEQ ID NO: 27526 - DNA, 201 bp, Bos taurus
cagtgggaggttcttggcaggatgcccaggccagaccagctgagcttggctggagcctgcaggaccctgccacggggccgtcaatctgctcagcgacgagtgctgcctaatggcacggaacgtgtttaaaatgcaacccaggtgccagaccctattctacatgcagtaccattagggaggctccatcctcggccgaacagg

SEQ ID NO: 27527 - DNA, 201 bp, Bos taurus
ttggttatatgatgaagtaaactcttaattttaaagacataataaatgttttattacttgtaaccaaaatagtcccaggtgataaatagatggccaaagacttgtgtgaccataggagcttgcctcagttctatctcactcctggttagatgggctgagcccaaggcgggcagcctctatgcttggctacatgcccagcca

SEQ ID NO: 27528 - DNA, 201 bp, Bos taurus
atggtccacaaggtcgaaaagagtcagacatgactgaagtgactgagcacacacgctcagaagtgacagcccatcactttggccatattcaattcattagtagaaagtaagtccagcccatcctaaagcagaggatattatacaaggacatgaataccatgataaaaggatagctagaggcctgccacatggtgtattcag

SEQ ID NO: 27529 - DNA, 201 bp, Bos taurus
gctgaactaacttcacagccaccaggaaagggagagggcagaagtgtctccacagcatcaccagcaccgagtattaacatgtgacggtagggtgtgggatcagtgtggccgccaaaacaatttttgcttgcgtttctttgattgactatctggccacatactgaattacatctcctcctctgtgtggaaacactgactttc

SEQ ID NO: 27530 - DNA, 201 bp, Bos taurus
cagttccctttgggcctattgaggacaaatccccccaccgcctctcagtcacaggtacctcttaatgaacaactctctaagcaatacttgatagctcatgctctccaagggcctccttgcctacacttgtctctctttttcttatcttcagctatacctcaaagatttaggtaaattcaaggaaagtcaattgctaagtgg

SEQ ID NO: 27531 - DNA, 201 bp, Bos taurus
ataaaagtatgtatcttcagtatctaatgtgagagtgggataatacagtgtccacagtgcacccagaatgatgcacaggatacggaaaaatgttagctgtcactacgttattcatggcaataaatatgtaagtgattgagcttgagggcccaggtcaggatctctgtgtatgagatgcatctttgagcacaaaaagttgac

SEQ ID NO: 27532 - DNA, 201 bp, Bos taurus
gtgcctctgtgatcatctactctcctggctgcatcctggcagcttccctggagatcaacaggccctgggtgggaacccaagggggcctaatggctatggttgtgaggctaatctgacaaccctgattccaaaaaaatgagaccactggttttttaccagaaccaagtgagcattctcaagactcccagtgtcagacgagca

SEQ ID NO: 27533 - DNA, 201 bp, Bos taurus
cacaaaggcctgcattctgctgaagtaaaacctggaagtcttcgcatttcctgggttcaggaacaaggtacagtgaagagaaacgcttggcaggaggtgtaagctgccctaggcctttactgattaatcctaaagggggcagggccggaaatggggatttgtacacttaggaagaaagcctgagattctaactatctgcta

SEQ ID NO: 27534 - DNA, 201 bp, Bos taurus
ttcaaataattcactttcctcctcttctacttccctgatttcatctaaaagcaagaataagaacctcagaaaaaactgcacagtgcaatagatatgaattaggtagttctatacttgaagggcctggggaagggactgatactgaatgagtggcctgatccttctacatatattaaaataaatttttttattgtagcaaga

SEQ ID NO: 27535 - DNA, 201 bp, Bos taurus
gcctgattcctccttcagtctggcgaggcttctgtccagacactaaattaattctatcataaaatgcatcctttccctccattttcctatcagtagagaacggtgagcatttacaggaatcaagtacgtcagccttcaaggtcctatgtgggacctggcgcacaggggttcctggaccttccttctatcccagactgaaaa

SEQ ID NO: 27536 - DNA, 201 bp, Bos taurus
gactaaaggaaatgcacagcatgccagggcctgaaggggaaggggagctgtggaacacagacatggtgaagggtggtggagcgggaaagctggagaggtcattggacagtggccagagcctgtgagcctcaaatgccatcgttatgatcttaatctttattctagaaataaagggaagactttaaacagttttaatcaaga

SEQ ID NO: 27537 - DNA, 201 bp, Bos taurus
aggcctgggcccagatggaggaataacttgctggaaaaaaccactgccagccagccccaagttacagggctaggagaagggggaagaaaaagacttcttattgagggttgtttgggggctggagcgggcagatgtttttagtaaatcaacttttgtatgctattttttaactcttgaaaatgtctttgctaccactggaga

SEQ ID NO: 27538 - DNA, 201 bp, Bos taurus
agaatcaggggttggggagaggtgactgctggggccacagtaccacatctgtgtgaaagcttgaatacagacattttttaaggaaaaaaaaaatcttacagaagacattagtggagtgttatttatagatttggagaatctcaaagatctttggatttttttcagaatgtcaatgatctcttttaattgtttaatcatctt

SEQ ID NO: 27539 - DNA, 201 bp, Bos taurus
tctttcaggtctggtatggactaaatgtccgtgtccagcactcatccccccacattcgtatgtattaggaggtagggcctttgggaggtaactagaaataaatgaaggcaggagggtggagccctcatgaatggcattagtgcccttatgagggtcacaagaaagcttgcactctatccccgctctctgccatgtgaagac

SEQ ID NO: 27540 - DNA, 201 bp, Bos taurus
ttcattgtggctgtaacttttgcagtttgaggtgcgacagcaaaagcagccctggtttctttttctttctcacagtctcatggatagaaaatctgttcttaccataggcaaacttagcatatgggtttttctttttcccttattaagtcaagaactttaacctcttcacttaaagggagcactttaagggttctcttaggc

SEQ ID NO: 27541 - DNA, 201 bp, Bos taurus
tggggctaaaaggggactgggaggggccttgcacatatcagtagtgatgctaccggttggaaaggaaaaaaaaaaagcatgaaaaaaaagaaattctgtcgactagccaaggccactttgtggtgtttcttccacagagtaatgtctggggactcaacaacttacctgttggttcaaggtgaatccagggagtaacacaga

SEQ ID NO: 27542 - DNA, 201 bp, Bos taurus
ccctttggcctcgcaagggctttctaagtgcttgaaaggtgtaacagggacactttgcactgggcggtgtttctaagccagcagccaggatatagaattcaaaatactggtgggcccctcagatggaagctatctaggttcacagagggcagccagtcatagcagactgcccactcccccactgcactgtcagggatgaca

SEQ ID NO: 27543 - DNA, 201 bp, Bos taurus
catgcaatgactgggctcaaccaagcagctcttacacagcttttctcatgcagttgtggtcagatgtcagctggggccattaccatctgagggttctcccggggtgcatgtccaagaggggtcactcacaatgctggaaggtgatgctggctgttggccatgagctcagctggggtgtcaaccagagggatgatgtgtgac

SEQ ID NO: 27544 - DNA, 201 bp, Bos taurus
gtttccagagagttctaacattgactgtgcttctgcccacatctatcaccccgcctgggtccctggtgcctccagttccagagctctgggaagattccactctcttctccttagtgatgcccccttctccctgcagccacttcagctttctcttccaaaaccaacacccctcgccagtcagcctcccttcttccacaagcg

SEQ ID NO: 27545 - DNA, 201 bp, Bos taurus
gtaaatcaaagttccatcagaagaacagaagccactctgagtgttttgattgggaagtggaaatgtagcagttgccccaccaatgtaaggctggggaacataggacaggcaagccattgtcatcaacctcaccccttggcacaaaagtgagtgaatctctggaacaatctgacagctctgtgcatcccaaaggcagggccg

SEQ ID NO: 27546 - DNA, 201 bp, Bos taurus
gggtggtggcctctgcccccaggaagtggcataattgatctaaacaaaccacgttttcctattccctctacttaatgatgggcttagaggtggagacatgaggcatttctggccaatgagacatgagtggcgactgtactggggctcccagtagaggttttccttgttgatcaagaggagacaaacagggaagaaacaatc

SEQ ID NO: 27547 - DNA, 201 bp, Bos taurus
gcagaaatgttggacttgacctagagactaaacaacaagaataatgcctacaatacatgacacacaggtccagccatcttaagccacatgaatgatggcctccggatgggtcccagcatcacctccatttcacagatgagggcattgaagccatacataatagctcgtacatttcagggccaggattggaagccaggcagc

SEQ ID NO: 27548 - DNA, 201 bp, Bos taurus
aacttgtacagtgtagaacattgctcaaaaaaaggagatctaaagaaaaggagagacatcctatattcacagatcagaagacttgatatagttaagatggcaatattcaccaaactgatctatggatttggcagaatccgtatcaaaatcccagcagtctttttgcagaaattgtcagaatgaccttaaaattcatataga

SEQ ID NO: 27549 - DNA, 201 bp, Bos taurus
tgaaatactttggtccagggcactggactggtagtgagagaacaggtttacattagcagcaactcagttcatttccttgatattatttccaaagtgtaccgtatttacagtcttgtatgctgctgttggtactcggttttaggtggtatacaaacatacgtgaggatgttttctaatgcagcatttaatacgtaaggaaaa

SEQ ID NO: 27550 - DNA, 201 bp, Bos taurus
agttttgacaactactgagagccaagcactaagtttcagagattctgaataaagtaatgtagggtctagtcttgaatatcctacagaaacagttagtgactttctgccctcctgctccaaatgttggttgaaatatctattcaatctaacagcattccagcaacacatatatagatcaaattaaactaattaatatactat

SEQ ID NO: 27551 - DNA, 201 bp, Bos taurus
gattttggagcccaagaaaatgaagtcatctgggggcaggactgtgctcaaacaccttcccaggcttccttgaagctagcggtggccatgtgaaagcacttttgccgatgagaggtaagcagagttctgtcagagctttgtggggtagtttttgcttttgtgttaaagaggtaggctcagaactggccctctgagacttcc

SEQ ID NO: 27552 - DNA, 201 bp, Bos taurus
ggtaccctagccaggctctttcttctgacgatgtttctgcttgaccttggtcaggagcccagagtatctgtcctgcctgccttgcctttgtctgtaatcacttggctgtgccacgtttgcaggatatttattaaggaacattggacaggattgaaaacattagattaacggcatacgtttttctagaaaatgaaagttgtg

SEQ ID NO: 27553 - DNA, 201 bp, Bos taurus
taaaatgttgagtaaataccagtgcaggtgtagtggacatagagatggctacaaaagaagtactcagtgactgaattttttctttactgaaattgttgcagtattgcttctgttttatgttttgggtttttggccatgaggcatgtgggatcttagcttcccacatcctgtgcattggaaggtgaagtcttaaccactgga

SEQ ID NO: 27554 - DNA, 201 bp, Bos taurus
agatataaggagagaggacctattatggaagggagagatggggttggttcttgaggagtgggaaccagggagcagggccttggtgaaatgatgctaaatgtaacattacagtaaacccactagaaaaggcgtcacaaaggcagctttgatgttgatgctggtgaagcgcagtagattgcaaagaatggccctaaagacttc

SEQ ID NO: 27555 - DNA, 201 bp, Bos taurus
acacagagggaaggccattcaaaagaggtggcacttgagtggtacaatgctgtgatttgtaataagaaatatgtatttggtcttcgtccacaatcctgctagcagttctcaaaaccctaggaatttcctagtttggagagtgataaagtgtctatttttatgttaatgaggtgacttctggactacacctaagactgtggc

SEQ ID NO: 27556 - DNA, 201 bp, Bos taurus
tggctagaaatgactattacaagtcatatcaccatcctgtgtgatataatcacaacttcttgaagaatattgaaatttttgtgtgtgtttgttttaattatcagcttgataaacattgcggccagtatctgaatctgatattggaccagctatgaaaagattaatcagatgccccctaatgacaaacatataactattttt

SEQ ID NO: 27557 - DNA, 201 bp, Bos taurus
aggatgaactgtattttgtacactgccctaaaaattctctctgctccacctattcatcccttcttcccactcaatctctggccactactgatctttttgtcttcacggtttgcctttttcagaatgtcatattgttggaattatgcaatatatagtcttttcaatatgacttctttcacttattaacatgtatttaagctt

SEQ ID NO: 27558 - DNA, 201 bp, Bos taurus
atctgatggcttagggctcctgaggaggccctaagtggaatctggtgcatcgtcctgacccagagtgacatagcatcaggccctctgcaatcaaagagtttaagtatttgacaagacctgtgcagattcagagtgggaaggagctgcccaagactgtggcttgtgggtcatgggagatgggctccactgggggccatcttt

SEQ ID NO: 27559 - DNA, 201 bp, Bos taurus
gaggcgagaagtgaaagccggccaagcagcccagtgaacggctgagcctgcctttacctttcttggtcttgcaaggtccacgttcagggtggatctctttcaagggaagaggcaccaccttggccagccccgcgttcagcatgtactggtacaggcgcttgaatgtcctctcgcacagtccctgcaacatgtaaatgcggc

SEQ ID NO: 27560 - DNA, 201 bp, Bos taurus
gcatgggccataggtgaatgggacccacgtattaacctcagagcatctgctggacccattttggatgctccctgggaactgagaaaccggagggagccatttttgcaatttcaggccactttgctgatcccagtgcctgtgggtgtcactttggaattctccctctagtctgagcaccagtaagcacaccccacttagaac

SEQ ID NO: 27561 - DNA, 201 bp, Bos taurus
tttaattaaatgttttattttaagatcatcataaattcacatgcaattgtaagaaataatcagagagagccttgtgcactctaccgtgtttcccccaatggcaaaactgaaaaagtgaaagtgttagttgctcagtcatgtccaactctttgtggctccatggcctgtagcctccaggctcctctgaccacgggattctcc

SEQ ID NO: 27562 - DNA, 201 bp, Bos taurus
ggtactagggattcgggaaccaccagacagatcaaatcctgccttaaagcaagagagtgcctagcacattggtgacaatatggaaactcctgggagcagaagggcctggctcttgtgtggatcagtcatggacagtgcagattagtgcaccccgccaaagagctgtgactggagtccctcagagtccccttccctctggtg

SEQ ID NO: 27563 - DNA, 201 bp, Bos taurus
caaatgagattccctggagtcctgcagtgcacagcctgtatggctgtacacagcagccatggatatttttagagtaacaaatacccccaaacataggacagaagagaattaatctgctattcagctagactgaaattggcaaagttcctcactccaaattatggcactctttgatcttcccaccatgtacccgccccccca

SEQ ID NO: 27564 - DNA, 201 bp, Bos taurus
gacaccacaatggagacgggatcagggaaatccagtgtagactggtgactttcaatcacagtgaagactgagtcccagccattttatgacagtggtcacgagattcttaccccatcatctgcctctaggctgggccatggcaacagggccggtgaggggtgggtaggagacataatgaagcagggggagaggactggtcgg

SEQ ID NO: 27565 - DNA, 201 bp, Bos taurus
gttggaagccaggccccctctgggcctctccccacatcccctccctgtggcaaaatcctcctcaggcttcgttcctctcaccaatgatgtcagccacgccgagctttagggccctgggggtggcggtaggggacagctcggtctctcccaacagcaagaggatcctgcttggggacaccccaaggcgggcggccatgtggt

SEQ ID NO: 27566 - DNA, 201 bp, Bos taurus
acctgagacttcatctctctttggggtgtggctacccaaatggcttggccttttcttctcacacagctctggttactggagttgccggccaggtctgggacgggagccctagggaattcaatcccatcccaacaaaaggatcacagattccggcagcttggggcagggcagaggattctgggagggggctgggcaggctgg

SEQ ID NO: 27567 - DNA, 201 bp, Bos taurus
gagaaaactaaaggtgtgcctgccacgccaccctgtggagaagaaactcactttcttcccccaaggtggagacccgaaggccattcttaatccagaactttcccagcctccaatgtctgctttagctgcctcctcccctgggggagctcccaggcccagtctggcttgcaacttggcgcttatgttctccctgcctggaac

SEQ ID NO: 27568 - DNA, 201 bp, Bos taurus
ccagtccgaggtcaaaggcccaaggaccagaagctgtagtatcagagcagaaggtgggcatccagctcacgaagacagtgaatttgccctcctttcacctgtttgttccatttgggcccccaatggatggggtgatatccacccacactggggagagcagtgcactttaccgtctatgggatctcctgctaatcccttcca

SEQ ID NO: 27569 - DNA, 201 bp, Bos taurus
actgaagctacctggaaggctaatttttttctctgtgccctccctagaagacagagctagattatatgaccttaaccttgcccccagaatgcttgtgccaggggatatgccctccactcctcagcttacatgggtttcaatcccctgcttagactacagaacaaattcagcttccgccagcacttcgcaacccccactgta

SEQ ID NO: 27570 - DNA, 201 bp, Bos taurus
tatagaaacaagcagttagtttgaaatacagcattaatggtttgttatatgtagaccagtgcacgctgggaatggttggccatggtgaagagcgcccatcagctctgacacggaggagcatgaagccagccccagggagcagctggctcataggttaccagcaagacacagaacacaggacatccagtggccatgaaacat

SEQ ID NO: 27571 - DNA, 201 bp, Bos taurus
tttcttaggtcagggtctaaactcaggaagacttagaggagatttaagtcttcattgtgtgatatatgtagaaggtagtagaattaacacagtgggccgtcttctttccttcctaaaggttcatcttaaatgggttctagtcataacaggaaggagatggtcaagccattggcttttagaaatctccttgtctgttaggcc

SEQ ID NO: 27572 - DNA, 201 bp, Bos taurus
aaaaatttgttttcagacagacagtgaggcagactcttaaggagggagctggtgtgaggagagagcagacagtgaagcccagagctttcagtaattgcacttcggccccttctctctccctcctcagtgcagagcatcacagcactcagttatttagagtccacacactaaagacagggagcgactggttcacgcaaatgc

SEQ ID NO: 27573 - DNA, 201 bp, Bos taurus
catttgtccacttcacaggggtcccggggaggccgagggagccctggatactccggcccggcgtctcaccattgtttatgctcaggaggcctgggttcttccccatctttaatcctgggatggaatggaaagctgctgcctgtgggcttctaccacattctctcctgccatatccttaggcattttttgagaacctaatca

SEQ ID NO: 27574 - DNA, 201 bp, Bos taurus
tcagtccccttggggtccaccccatctccatttagttctttgtaccagttaacttgggagtgctctgtagcgccctgccactcctctctccaccatgaacggtcttcccttgtcacactttcagcccttccttactctgctcatttggcttccctggtggctcagatggcaaggagtctgcctgcagtgtgagagaccagg

SEQ ID NO: 27575 - DNA, 201 bp, Bos taurus
ttatccagtgctgggaacctgagtgcttactatggccaagttttgttctctgtacttcccgtgttttaaaataagagggaggcactcaagatttctgatctacagacaggaaggaggccctgagaggtttagatacttaaccgcggttgcacagctcataggtgcaactccaggactcaccccaggcagtcagctccaaaa

SEQ ID NO: 27576 - DNA, 201 bp, Bos taurus
taaacatcgaggtagttacatctacttcacaagatccttagaaatggattacttttatgctatggtctctgaacacactggccaaaaaaaataaaagccacgctcatgagaaaaactttgatgaaccccaccaagtagttacagaagaaatagcttctcctagggccaaaaatgagatcatgagaggtcatttcttttagg

SEQ ID NO: 27577 - DNA, 201 bp, Bos taurus
ttttgtggaggatgaaggatcccacaagggctctttgagtacctcatgaggatttaggctcaatgcctcagctcatggtaaaatggagtatttgccctttgagtttctaccttgaggcccgtggcgggtaggggggagaccagctcagtcaggacaggaccccccacacacaaagcgccaccttggaatactacccgaaga

SEQ ID NO: 27578 - DNA, 201 bp, Bos taurus
caagagagcaggtgttgctcagagacagtcagggttctcaggaacccctggatgaactggatgtgaaggaaaataaagaggtggagacacatgttcaaaagctgtgtggccactggtcaggggaaatattttttaagctgctctacaaggcatgtggggtcttagttccctgactagggattgaacccatgccccctgcag

SEQ ID NO: 27579 - DNA, 201 bp, Bos taurus
ctggcatccaagcccagaaaggcaatcatctgaaagatctgggttccttcagtggcacgacactgtggtttggggactcttctgttttgttttcaccatgcggcatgcggggccttggtctgtcaccagaggctgaacccttgtcctctgcagtggaagcggagccctaaccactggaccaccagggagttcccgacactg

SEQ ID NO: 27580 - DNA, 201 bp, Bos taurus
ctggctgtggggtgagggtgtgaagaagaggccaagagactgggtcttcgtgtcatggaccacacagatgttgtgtgatgttgacatggatcagcaggaccttggcctgagtgggccaggcagctcagaaagaacaagaatgaccaagggctggaaccatccatgagactgtgtttgtgctcactcagtcatgtccaactc

SEQ ID NO: 27581 - DNA, 201 bp, Bos taurus
gtagacattctttagtctctattccagcctgtgtcggtgtaagcactgcccaaggttctggggcccatccagtcttggcagagaagaaagcgttctcagtcggctgttggcttctcagcctcacatctgctgccccttgggaggtgtgcgctgtgagcctcctgtgggctctctctctccctttggggattttctgatgtt

SEQ ID NO: 27582 - DNA, 201 bp, Bos taurus
aagatcctccggagaaggcaatggcaacccactccagtattcttgcctgagaatcccatggacagaggagtctggggggctactgtccacgggtggcaaagagtagaacacagctgaacaagtgagagcaacatcaaccaacatggagaggcttctgccaacaaatgcagggaaaggactgaagcagtgccacagcctagc

SEQ ID NO: 27583 - DNA, 201 bp, Bos taurus
tagagactagacactggacacccgtcccagccttggaggagcctgcctgtaggccgcttacacttgaaaccagagggcagccagaaggggtccttccaagaccagaaagaacatgatgggtgccgcctgctgaccttcagtctccagagatggatggtgtccatctgcacttgacctttccacgaggcgcgatcacgtttg

SEQ ID NO: 27584 - DNA, 201 bp, Bos taurus
cccccggctccgagctctccgggctgcagggagacagcagggtccttgcgcctctccaccagctcttctttgacctccacctgctcgtgaccactaaacataagctttctctctgggtccctttattctctctgcagtgtcagctgtctcctctgacctccttggggtggcctttctcaagtgcatctgtaggggagctcc

SEQ ID NO: 27585 - DNA, 201 bp, Bos taurus
gacttctcagctaaaagactgtgatttggaaatttagatttctgtctcctgtatatagagaccgaacacaatcaggaactcacattctgtaactttggctgttttgtaaaagcttaagaatgctcttaacttgtggagtaacagtaaatacttaaggacctaagatatgacccactatctaggtattatacccacaccaga

SEQ ID NO: 27586 - DNA, 201 bp, Bos taurus
ggaataaaagcacctccttcctattcgatgctgctgtatgctgtcctcacacattcttcatcttctagtctaaacaccccaggtcactccctcatcctgggagctctgggtacttttgggttctttccttggctccttgatgagaaggggaaccaggctgctaggtgcaaattcccatcaggttttacaactgcttctgct

SEQ ID NO: 27587 - DNA, 201 bp, Bos taurus
aagcacaattggcattggaagtgaggacagccttatagaggactaagccttaactagtgggtctgtactcactgcaggtggtaacactagaatcgaattgcgggaaccagttaagagttggaacagaatatctgcaccaccagtgagtgaatacacgagtatcaagggttgaattccagacctgatgtcacagaaaaatga

SEQ ID NO: 27588 - DNA, 201 bp, Bos taurus
cagctcacaagatgaagtaatgggcttgtctctgtctaggtagggaattctgccaagctctgtgttttaaataaaacgaggcttttgtggttcttggcacaggcccaccagtgcaggctaaccttggcatctgtgtgctgggctttctctagaatgtggctgagaatggacaagagctcatgggtgacccaagggaaggga

SEQ ID NO: 27589 - DNA, 201 bp, Bos taurus
tttgcaaactgggcacaggctgtcttattctgcattgtgttcccgtcagcacttaactcattaccttggcactcagtaaagactcagtgatggctgctttcctggggtgaccagtggggacaaatattctcagccctatttcctctaaggcaggaggaatggctgcagcctgcctagacattagaatcattgggaaagagc

SEQ ID NO: 27590 - DNA, 201 bp, Bos taurus
ctgaaggacttcgtagcaagaatttctctgaacttttcagacctatcactgagccagacggggcattatgctaaattttttaaggcaggaatttagtggtaacccgtacggagctaaaagggcaaaactggaaggcagtgagagaataaccttttacatcaggcaaaattgatggcccgattccacagcccagaggcttgt

SEQ ID NO: 27591 - DNA, 201 bp, Bos taurus
tgtcgtatgtgtgtgtgtgagtacacacgcacatgcgtgaaccaggtgcttcctgctctcttcaatgcaagcttcagtgagtttctgttctgacagtccagagccacctgttcttgactcttccaggtttcctaggaaaaaagcaaatagctgagggaagggaccgtgagatgggaattgcagttcaccgtgaaagccctg

SEQ ID NO: 27592 - DNA, 201 bp, Bos taurus
caagacaaagggacttggcgtgcatgcatgtgaccttctcctgtagagcaaggagctttcaacacccttctgtatagttatgaaagcacttattatgctgtgctaattgcttgtttataagtttggtgcctagttacacatgcctggcacctagagaggccctcaacgaatactgagggaatgaagatgggtcaagttcag

SEQ ID NO: 27593 - DNA, 201 bp, Bos taurus
gaagcatgtcatgctcactggaaagagcagttctttgagatctgaactggtgaatttttgtttctgtgattatttttgacttgaggctgaagctatagaacggaagctatgagctgtctgtgtgtctgtgattcagaaaaggctcattttacacataggaagtgttttcttatctccaggttagattattctgtcttaaaa

SEQ ID NO: 27594 - DNA, 201 bp, Bos taurus
accccacaaatcttttgttgggaagctgtctggtggaggagagtggtggcttgaggagcatcagaccaaggccctttgtgacccttacattcccttctcagcacctccctgggatccctccatggcagcacgtgagaaatgtgctgctgaatttcaaggggagatacagagtttggatctcaaatcccgcactgagatatt

SEQ ID NO: 27595 - DNA, 201 bp, Bos taurus
ctcgccagccacccctggagcacatggctttgaaactggtggagctatcaagcaggcgctcaactcactgtcccgaaccctgtggtttggactcctgcttcggccatgacgttagtgagaatgtagcctgtctgtcctacaactggtagagtccctaagtcttcgggtcccctgaattgtcacttcactctttagtaggga

SEQ ID NO: 27596 - DNA, 201 bp, Bos taurus
ttttcaggaggtaatttttacggttgaaaggcccactttcacatcatgctggtggtctgaaggcagaaccagagtatcaaagagagagaaagatgaatgcgtcttcttcaaatccacttcttggggcccgagcctccagaacagctttgtcaatcaggaagacgagcattcaggcaacgctttttcccttcaaggagccac

SEQ ID NO: 27597 - DNA, 201 bp, Bos taurus
agttgcaaactttcatagacatgaacacgtagcttactaatgaagacctgatggaatcagagacccagagaaaggacagagagacaagagggagaagtaatggaaaaaccaaagagattcatgctacaggaaatggcgaggggattttcttcatttgaggagacactgtcagtttctgagacacaagatccaaacacagaa

SEQ ID NO: 27598 - DNA, 201 bp, Bos taurus
agtgactaaacaacaacacatttccaaagaacttgttctatcctccttactgtttccttctgggctgtgttttagacaaagtgtttcctgcaattaggtcactggatctgtgccttatttcctttacctttaatcttttataaactatgacatttacaaacctccccatgaccaatctgtgaaacccaccatctctcgctg

SEQ ID NO: 27599 - DNA, 201 bp, Bos taurus
gtttgctataatcacattatcttccacatcccttgtttccccccacgctcaaattgagtaaatcacacctgcaatttaactcttaatcaagaggccctcgagtctgacttcggagactgactttcctgcttctcttgtgtcaggtgtgaaaatgaagaatgtcttatttgctccgcggtgatgctcagaggctgtaaatca

SEQ ID NO: 27600 - DNA, 201 bp, Bos taurus
ttcctcaccctggtgggctcaggccctctgctgttaatctgagaccacccatggccccatgtaggactcagatcttgtcggggggatctctatgctccccgctttcctccccagacagttctgggctcccaactgttcctggacagctagccacagacatctcaggacaaggaaagagccagtaaaccctcttactccact

SEQ ID NO: 27601 - DNA, 201 bp, Bos taurus
ccaaaggctggggaccgcaacagtgccatggtggtgtgggggaggggaggaagagtgctctaccgggagcacggggtgggggctgggagcacagaccccaccctgccaagtcgaccaaacagctgaggatttagagtgcttaaagtggggcgggggttggggggggtatccagagactgaaagggacacttggctggcggg

SEQ ID NO: 27602 - DNA, 201 bp, Bos taurus
gtgctcaccccactgccccctcatattcccagcctggcccacctctccaacccagccagtactgtgcatctgcaggccttgagggaccagtggcctgtcccaggcaaggtcacaggatccccttcccctgcaggttcagccctgttctctaagccctcctacctacgcaggctgggaggaggcatcaccacctgctggggg

SEQ ID NO: 27603 - DNA, 201 bp, Bos taurus
tacactgggaatcaattccctgagggtccagtgattaggactcagcacttccactgccatggcccaggttcaaactctggttggcaaactaagattcctgcgcgtgatcaacaacaacaacaacaaaatcatgccaaatgaaagataaaattctagaacaggcagacccaactcatggtgatagaagacagtgaagagtat

SEQ ID NO: 27604 - DNA, 201 bp, Bos taurus
ctcagaagatcagagttagtcttagcattccgggagaatccagaaccttgaccacagcctttcctacaatgctttcctgtctgggtcccagcaggtgccccgagatgctccaaggatgaggctctcaagccatttataaatttttttaaaagcgcgccctctggtggcccgtgagtgcagggcacagttgcagtctcactc

SEQ ID NO: 27605 - DNA, 201 bp, Bos taurus
ttgtcactcccacctgctcccccacaggtggggccccagcctgtgtttctaatcagggaaacaaaggaagttccttctctgtgctcctccgctggtaggggaagaggccacagggtgatgtccccggatgaagccaggaaagtctgatcccaggagagagtgggcaggggggtgaccaaaccagggcaggtatctggtgtg

SEQ ID NO: 27606 - DNA, 201 bp, Bos taurus
gttattagcatttgtagatagtaattgaagttaatgggagtggatgaggccacccagaaggagaatgctgtactgataaagattttcaaaggcgggtggggaagacttgtatcagggtagaagggactgtcattactgtatttgaaaaaccataatcaatcagtatttgctatttgaatatatattgtttgaaactagttt

SEQ ID NO: 27607 - DNA, 201 bp, Bos taurus
acgtccggaaagaaacagggctttggggtggtaggaataccttcgcctcttcgtttgggaccactgcagtaaaagaggccaggggccgcagtctgcagtttttacgtgtgaatccttttaatgctgagtccgtcttcagagtcctctctctctgcctctttctagaacaatgctaaagtagccgtgctgggggcctctgga

SEQ ID NO: 27608 - DNA, 201 bp, Bos taurus
cccctgagagggcctgccagagggtcacgggtcctgctccatgtaggctcctgtaagtgaccgcactgtcagcctccctgctcccaagaggggccctgaaaggggtggggtgggttgggggtctctggttctgcaccagccctgcccaactcgggttccctctccaccctccagccgggatgatgtcattgggaaggtctg

SEQ ID NO: 27609 - DNA, 201 bp, Bos taurus
agactggtctctgtgtccctgaggaagattatcttttggtctagaaagaccaggtcccagaagcaaatctggttttcagacaagtcatgcaaggctgacaaaatgctgtggcttttagggcttggaagagcttctgctgggtggacctgttctccaggagggcaggtgtcctgcctgggctatgttgttctggtgttcctg

SEQ ID NO: 27610 - DNA, 201 bp, Bos taurus
ccagcttcttcacccatgccaggccccagtaggtctagttgctttgggtcagatgctcactcctaggtggctgtaggggagggggagtcacatggtacaacacaagggggcccaggacccctgcagcaggtactctggggaactgtggcctttagaacagactgcgagacaggccggcccaagctgacctcttatagatga

SEQ ID NO: 27611 - DNA, 201 bp, Bos taurus
gactcagcaagtgactcagaactggaccccatgccccagctctttccactgtcccgtgtaactgggcagatgagttccacaagtggacctggccaagagctccaccctttgagactgaacttggtaaagcaacaagtacagcaacaacagcagggcaaataaccacttttgaagctaaaccacccagaaaatggtttgcac

SEQ ID NO: 27612 - DNA, 201 bp, Bos taurus
tgaaccacaaggaaagcccactcactcaaaggtgggtttatctaaactctttcaagcatttcgaaggcaagcgcctttaagtcgactggccactctgagagcaagccaggacctcccattcagggggacttcagagccagtggggagggaaaggggtcctggggaaagcaggcccattttctagtgggatcaggtaatggt

SEQ ID NO: 27613 - DNA, 201 bp, Bos taurus
gccaaactccatcatcacagtctgaaagcttgcctgggagagagaagcttgggggctgataaggcggtgtgataagcagctgtgatggaagcgcgggagcggagcaggaggcagggaaacagctcacctctctgcgtttctccagcaggctctcgaggcgctcaggcgctctctgtcccgggcccttgttccgttcagcct

SEQ ID NO: 27614 - DNA, 201 bp, Bos taurus
gtttaaggacaaaggctgagaaaatgcaatgggaagagagaggccagggagttgactaacaggagaggaaacctctccttcaggtcattacacacaggtaatgtttctgcttgtccctctgacagggcctagaggttcccctgattgctgtggttcagtggtctacgccgaagttgcccttcacccagagcatctataccc

SEQ ID NO: 27615 - DNA, 201 bp, Bos taurus
aaggcacaagcccctgcgggatcacaggcaggctcccttggtctcctcctgcccctgctccagccttccagcacctgcgtgaggctcccttctcctgcccgggccccttttgctttcagaaccaacaaccttcacccacacacctgtctcaccctccttcctaactctttgcaaagcccgtgtgccttgcctctcagaaac

SEQ ID NO: 27616 - DNA, 201 bp, Bos taurus
acaggagtcagtgtctcttaggtcactttgtccctgaccccctcaacagagtcctgggctcaccagtccgggctcccattacacaatcccaacctgcgggtggccgggaggaggaaatgcgtcaaaggtgaggagcactttgagatgagcacacagggtatttggtaaactttagctccttcctggctctgggcagacact

SEQ ID NO: 27617 - DNA, 201 bp, Bos taurus
cgagttttgcccaataaaagaagaaaagaatttgttttttggtttgttttttagaatttccatctccttcctctggtgtccaagtaaaactcttgggattacatcaaggcttgaatgacctataggctgatacccagcagcggaaatggtcaaggccgtctggggtctaggtgctcccttcaggcccctgccccacgtggg

SEQ ID NO: 27618 - DNA, 201 bp, Bos taurus
gcccattgcttattcaatgagttcttttgttaaaaacaaaacaaaataaaagtctgcagctttggtttgtttagctcctaaaaggccaggttatcaaagcacctgctgcttaaagaaaaagagggtgaagggaaggagtgggagaaggagagagttgggggggtggggagacccactgggcggtggccactcgggatgaaa

SEQ ID NO: 27619 - DNA, 201 bp, Bos taurus
tgctgctcatattcttaggcattcagggcaagtctaatgtgtggtcagggctgataacccttcatttatacttcaccaaatatcaggttaaaaacaggccacagtccagctctcagaaacttgaatatttggatcttgctggctttgtgtagatccagcttgaatctgagacaacacctgggagttttgactgtttctttg

SEQ ID NO: 27620 - DNA, 201 bp, Bos taurus
ggtgccctgggtgccatccggtgggggggtcctccacctggcagagctctcgagcaccacccctgccctctcagccatactcgccttggccacaagggactcaggtgtttggaaggaaacctgtatcgcttcctcctttctgtgtgtaagtgactattctgtgtgccaccttccctctctagctatgatcctggcaggaag

SEQ ID NO: 27621 - DNA, 201 bp, Bos taurus
accctcctgtcggaaacaacagcaacaatggacacagctgtgcaccctgccaggtagctttcaacaccaaggcgaaacagccgtcttgaggcagtaaaaccttaaggaatttatcacgaggtgacctgaggatgtggtggtggtgtagttgctcagtcgtgtccagctcttggagactccatggactgtagcccgccaggc

SEQ ID NO: 27622 - DNA, 201 bp, Bos taurus
ttggattttctatgagataaggctttctactatcccaaggtttaaaagtttagacattgtagaaaagaggactttgtgaggccccagatggtagaagggcgtagtgatgcccttaggattctcccttgcaggtcgagtctggtagggttccaggtgactctatccaaggccgtgacatcagccaccatgcaggtatctccc

SEQ ID NO: 27623 - DNA, 201 bp, Bos taurus
tcagagccccctgcgggggcaggaacccactttcagaggccgctacccccatatttattagaggaaaatcagaaaggacagataatgccagtaaaaaaggaaaaaaaccctcagccggccacaaagcatccctccgccccgatgcactgcagccccagcgtctgcgtatgctcttccagactcttttcttgggtgagaaaa

SEQ ID NO: 27624 - DNA, 201 bp, Bos taurus
tcgggttcctcgcagcgtcgtcgcctgtgtgttctgcccgcgacagtgtggcttcgcttgttttgagttgtgcgggtggatttaggtctcgtccgtcatgttgctcccggccatggcctgtccccccgcgaacgagtctgggagccacgctgctgcgagcatcctggtccccacatgtgcggcccctctgcggtgcgcgcc

SEQ ID NO: 27625 - DNA, 201 bp, Bos taurus
tggctgccagcccatttccccaaagaaccgaaaccccaggaggcacctggggaggtatcagagtctacagaggtggatgaacccctgctgcacgtggacgcgttcgggccaggtggtgggggccaccctgtccacccccatgccctggccaccccaccccggctctcacctctgctcaggcggcagggagaaagaccctcc

SEQ ID NO: 27626 - DNA, 201 bp, Bos taurus
atccagaaatggtttctgtaggcctgtcatctgttaatattttataaaactcagtgggaagaagactcaagtctggcccttcagcacatgtagaactcacggaagactgttttgtatatgacgtcagctctaccttacacccggttttagagaactaccagttttctcatggccgttgggaaactaccatacatgggtagg

SEQ ID NO: 27627 - DNA, 201 bp, Bos taurus
tcctcctcttgctctttgcagaccccgccctcctctcaggtcccgtttctgaaggagttctgggcactgcgcattcgttcctaggccctcggattccccctctgtcataaactcacacaaccatctgtaagccttgacgtgaccccttcaagcagcaccaagggaggtgccagctgtacgcggagagccaagtcttcttgg

SEQ ID NO: 27628 - DNA, 201 bp, Bos taurus
caccattctggtaagagctgcctgccactgactattacatacagtgcacgggactccatccaacccaacttattccctaaaagtgggggatgggggtcagagcaggttaagactcccagtgtttcctcactagctgactttggagaagggcaaatggggtttgggttttgtttgttttttagagttttttttctcaatagt

SEQ ID NO: 27629 - DNA, 201 bp, Bos taurus
cctctcaccaggccgggcacaaacgccctggccccgcactcgggatccctgctgtttccctctggtttgttctccagactccactagcagtgtgctctgcgagtctctccccggccactctgcagcccctcacccgtgacccgtctggcccaggcagctgaggctgtgaggaggcactgtctcaccttcccagtgacagcg

SEQ ID NO: 27630 - DNA, 201 bp, Bos taurus
ctcctgcattggcaagtgggttcttgaccactgtgccccctggcaagccctgaggctccgcccccccacataaacccacaaactgaaatggtctgggaaagaatagtctcttcagagcgtgggtggaaattgccgttatgagttgagagtgtaccccggaaggaaacgtacgctgcagagctgagtgttacaagccgcgtt

SEQ ID NO: 27631 - DNA, 201 bp, Bos taurus
accactatgccagtgccattgagtgcgggccagggcaccaggctgtggacacttccttcctgcctggggatccggattccacaggcccagtgactggggtgcctggtcacccagagcatgtctgagttcctctttggtgatgaatgcagagccctagggtgagtagggggagcggctttgctcgcaagacggcccaggcgt

SEQ ID NO: 27632 - DNA, 201 bp, Bos taurus
ccaagggcgctgtctaaatggcctcctcagtgccgtgacctcccagcacgcagaagcggcagcaggtggctgtgggagctgggggtctgcgcctgtgctggggccagtcacgcaggtccacttctggatctcagtttcctcagctggaaaatgggcttgatgaacgaacttctttacaaaaccgaaactgagtcagaaact

SEQ ID NO: 27633 - DNA, 201 bp, Bos taurus
tcatttataactcatttcttaacttttctttactgtgggaatcatttgctttaacccaagacagaaatctcaccctgcttcttttcctttagccccttttcggccccaaactgttctctcctaaccagtgtcaactgccatggaatcagaatgtaccctccacctcaggagagggggaggggagctgtgcttaagtctctg

SEQ ID NO: 27634 - DNA, 201 bp, Bos taurus
gctgcaaggtcgtcaaaagaccatacattctggcagctggctggggtcaagtactacattttgccttcacaccaacaccaaggactgaccctgcagccaccgcaaacagcaggtatctttcctttagaaatgttcctgtagcaccctctactggaaatgttttaaaacggcactcactgtaaaagagaaatgcattaagaa

SEQ ID NO: 27635 - DNA, 201 bp, Bos taurus
tattttaatgtcacacccaaaattaagcatgaatgaaaatgaacttatcagaagcaacatctatgctgacacccaatataaaaatgtttttttgatgaacccttaatatcaatgtgaaatgagcaacaatttttctttgtaatatttgttaaaaaacaaagatcaatagtattgatagggcagttaatgcctcgtatgctt

SEQ ID NO: 27636 - DNA, 201 bp, Bos taurus
aaattctccagggagaaaggaaggactcctctctctagattgactgccttcagattcaagactgcaaaatcaactcttccttggttctccaagctgtctttgactgcctgcaagggtttgaattttctggccccttacatttatgggagccagttttaaaaattaatgaatctctctctgtaggtctacttctgggttttc

SEQ ID NO: 27637 - DNA, 201 bp, Bos taurus
tgggttttactctaattcaggttcccacagaggacttaatgaacctttatggtaatgaacacccagtaaagttaaggtgtaatctatatgtgaaaagggcatgagaaagaaactatccccagagataagactggcttttcattgagtacttcagaactaacagatctgtctcagcagttctattaaactggttggctacaa

SEQ ID NO: 27638 - DNA, 201 bp, Bos taurus
ctggcgtgctgtgattcatagggtcgcaaagagtcgggcacaactgagcgactgaactgaactgaactgatgctgactaaatatactaccagttctttgattgtcattcttcactggccttgaatctgagggtataaggaggaggcttttgtttggttcatataatttaaatttggtatcttcaaagagaatttcttccta

SEQ ID NO: 27639 - DNA, 201 bp, Bos taurus
ccaaccatactgaatcatctgccccatgggtcaagtaactagttgtatgtatgtaaaactgcgtgtaaagaaaaacacattaaagtatttggccagttagtgtgaaagaatttttaaagaaatgaaatcctaaatgcatgatgaattgctatatattagacagcatgaatgaattggcccatgtgatgctttaatgtttat

SEQ ID NO: 27640 - DNA, 201 bp, Bos taurus
tctgtttccgaggacaggttaagaaatcctggtctgagctattctgtgactaagaaatggaggaatgtggcaacaccagtgaaagtcactcaggaaatatgaatgacttgggcagagaagtggtgcaaatggttgacttatgaatatatttatatgtgaacatatgaattatagagacactctcattattttatcagttca

SEQ ID NO: 27641 - DNA, 201 bp, Bos taurus
tcccatttttccttatctccaataatattttaaaaaacttatgttttcacttatgtgtacgttttggtcagttgctattatattttactttttactaaagggcaccatggaaaattcaatttcaagactattctttattccttaatagttacaagttagattttatttcatgtgtattataaagcacattcaaagattatt

SEQ ID NO: 27642 - DNA, 201 bp, Bos taurus
tgtccttctttgtttctgcatctattagcttttctaaagatagctgttacagcttgtttctttctttctttactcatggaaagtctcagaagtcatagtacatggccacagttttttttttttttttctgtaattaccagcaagcaggggactcactggagatcctttcaccaggaaggcctctacataagtctgctaggt

SEQ ID NO: 27643 - DNA, 201 bp, Bos taurus
gtgttctctgagtgacaatcataaatattggaatgtcagatgagtacataaattcttttctgggagtcatcagttaactagggccaggcagagggagagcgccaagatggatttcattgcccatgctccttgagagtggctccatcagccactagataagcaaagaggcctcttcagagaatgactgggtaaatgtgcact

SEQ ID NO: 27644 - DNA, 201 bp, Bos taurus
gcaaaacgtgattatggacttagaaatttatgggaaaaagttcatacaaagtatataaaaaacaaaaaacagaaagcactccattaaactctaaaatcagtgaggaactagaaacgataaagcttaatgcctgtggtttgaacaccatatatttaaatgactaatgatgaacagcacaggagaacaaatgagtctcagagt

SEQ ID NO: 27645 - DNA, 201 bp, Bos taurus
agggacacgtgaatgtaatttcatggtgtatggatggcatgatacaagtttggtgcaaataaaaaatatattttaggtgagaaataaggggagatgaacccagataaatgaggagttagtgaattgactatatagcagaaaatgttactcactaactgtcatgtacctctgtacatattatctgctcttccaggccaaggt

SEQ ID NO: 27646 - DNA, 201 bp, Bos taurus
gggttgaggatgaagtaaatacacagcaaaagtttgactatgtaagagagtcccttcattaaaaaaaaaaatagtgacaggagataatagtaaacaactcagcacatggagttagtagaaaagtgttgacttcaaaaaaatcaacattatccattacactaagtttgtgagtgtgtgtgtgtgaataacgaggtggtatct

SEQ ID NO: 27647 - DNA, 201 bp, Bos taurus
cccattaggcccaatataatcataaagtcctcataaagaaaatagggtgactagagagttagagaagatgtgataacaaaaacggaggttgttggagtaataccattgctggaagaaggccaggtgtcaaggaatgagggcaacttccagaagctaaaataggcaaggactggtttctgccctagagcctccagaaagaca

SEQ ID NO: 27648 - DNA, 201 bp, Bos taurus
tttcacccttgttgaacttctaacctacagaatctcaagataaaaatttatgttgttctaagtcaaaataaagtttaattttaaatttaaaaatatctttcctttctttttctaagtgtaattgtattatgtgcaatatttggggcatatttatactaagttttatgagttttttttaaattttcaattcaaatttaatta

SEQ ID NO: 27649 - DNA, 201 bp, Bos taurus
ctggtgttcatccactttgagaataaaataatgggatctattagttggaaaaaacaggatcaggagtctcactgagtaaattatgtatattacatatggattgtgtttctcaaataagatcccctctaacaggcctccttcacatttatgaattagttgccatgttagcttaagaaaggaagaaacagacaggacattata

SEQ ID NO: 27650 - DNA, 201 bp, Bos taurus
catttcagctcctcttacgtgtcttgggttctgcctctggcaatctaagaccaccgtggctgctcaggttgctgaatggccagttcttatgtgtgacccccaaacatgcaagtattttaattaatgagtgggtttccctatgggaccattgcacagtataaggaactaggcctccaccactcccataaatttctcagtcac

SEQ ID NO: 27651 - DNA, 201 bp, Bos taurus
ctggagaaggtgtgccatctaaaaataaaatcataggcacacacatgtgcatgcacatatacagagacacacaaacatatatataagcatatgcattaataaaatacagaataaacattctgaaacaattttacagctaaaacagaactaattcttcttctttataaaagtatgtgatatatgtctgtaaaagctataaga

SEQ ID NO: 27652 - DNA, 201 bp, Bos taurus
attttcctctgcacctagaactacaatacttttttcaaactaatttttcttttgacaacttttgttatagacacgaaaagtcaaatataagtaaaacataaaaagaattaaaattggaaattataataagaactaaattaattttaccttcaaaatcttgacattttaaatctacatcatatgcaagcaaacaggtgtcaa

SEQ ID NO: 27653 - DNA, 201 bp, Bos taurus
atcatattaaaagttgtaatgtagatgcctttaaaaaggcaagattatactaatttttgtaaaaaggagattatagtatgattaaacattaacattcaaacgctgatttaaattgtgcatatatttttctcatttcttattgaatttatgatcattgatgagtcacttaagtaaatgtaagccacaccctaaaatttatgt

SEQ ID NO: 27654 - DNA, 201 bp, Bos taurus
aaaataagtcattcaatcaaaatcttgcagactagcaattatcttaccatggacctattttttagactagtaggttgaaattcatattataatggatttgcaaatgaaatatgaagagctaaagtaaagagtgggtttttagatggtgctagtgcattggagaaggaaatggcaacccactccagtgttcttgcctggaga

SEQ ID NO: 27655 - DNA, 201 bp, Bos taurus
gttctttccgggataaatcatgaacagaagaccctggagggctacagtccatagggtcacaaagagtcagacactactgtgcacagattggccataaatctcagcaaagggagcaaaattttacagaagaggtttgcaattaatctttcttataaatatttgatatgaggtgattaaaagatcatctgctttttatatccc

SEQ ID NO: 27656 - DNA, 201 bp, Bos taurus
ataatcaatgataagaattcaaaccatggctcagaaaagatgaaatgattcaggattgaaacattagtgcttttaaggcactaggttagccccaaattagtaggatgatttataagattaagcacaataatgagtaagaacaggagatcacaaatgatatataatgagttaggtaagaattttagtaccaaatccattaag

SEQ ID NO: 27657 - DNA, 201 bp, Bos taurus
gggacatttaccttagggccacaggacattgatataattctcatagacttttttcagcagatggcagtactattttttaccgactgttttcagcagatggtagtattatgctatggggaatgaacccattttttgatttacacaaaattgacccttgcacttcttggagctcgatattacttgcttttgactttagttctg

SEQ ID NO: 27658 - DNA, 201 bp, Bos taurus
ccatagggccacaaagagttggaggcgactgagcatgcatgccctatgcttacattagcatgcatgcatactatgtcacttcagtcatattagcattaagtatattaatttaataacaaactactattaatgccaaatgtaataaaactttgaaatttataaagtgatttttctttcattataccttataatgatcttatg

SEQ ID NO: 27659 - DNA, 201 bp, Bos taurus
ttacatttggccttttgaaagaaatgtgtctgacatgacttgtgtagtatggttgttgttgttcaaccagtaagccatgtctcacttttttccaccccagaaacttcagcatgccaggcttccctgtccttctgtatctccctgagtttgatcaaactcatgttcattgagtcactgatgccttacaaccatcacattctc

SEQ ID NO: 27660 - DNA, 201 bp, Bos taurus
agatctctataagactggaactccatctttgagggtacagagagtccctaagaggagagaggtttgccaatatataattaaactccagggacttggagtgacatgtgaaaaatgttatgagatccagcagatagagcactgactggcaaaaagcctgaagaagcctcccagtggagagaaagaaacattcagcgtggacaa

SEQ ID NO: 27661 - DNA, 201 bp, Bos taurus
gagtcagacacgacttaaacaacaacaacaaagggcatggatggcactttaattttcttaactgaagacaaataggtttttcagagaaaatagagcatgtagatctgctgctatttctgaaaatagagataggatgctattagggtgagggctacagggaaatgaggaagattagtcttctaaatggatcttaaattttgt

SEQ ID NO: 27662 - DNA, 201 bp, Bos taurus
tttttttgttaaaagcaggccaagaattttctatttttgttatttactatttttgagatccctataagaaccaggaactcttctagttgctagacacagaagcataggtaagaaaacaaaggccctactctcttggggtttaaaggacagtggtgaaacagctaataacaaatgaacagatataacaagtaatcttttgaa

SEQ ID NO: 27663 - DNA, 201 bp, Bos taurus
ttcctttcttatgtggcatacttcacagaacttgctgtcaactttcttctccccttttatacaggacacgaggagatggtagggagttgtagacatgtttggtaggagatgaacctttttataatttatagtcaaatttgtcctccagaagatttttatatatataccaaaacatcatcttcttacctgaaatcagtccag

SEQ ID NO: 27664 - DNA, 201 bp, Bos taurus
agagatggaggttttgtttccctagtacacatggagagctgcttctgctggccttgaagaagcaaacagccatgttataaagtgactaaaaggagggccatgaggcagaggaaacagtgagcagcctctagcacctgaatacagccaccagccagtggtcagtaagaggtaaagccagggcctgggccctcagtcatatat

SEQ ID NO: 27665 - DNA, 201 bp, Bos taurus
aaagtgaaaacaaaagtttattaaaaaatgaacataatttcatgtcacaatggaaattttacttatagaaattagtgattaaattaaaaacaactttattgggaatagggatctttgcaatttgttggaaatattcacagaacaaacatttgtaagcaaacacaaatgtgtttactgaagtatgggattattcatttcctg

SEQ ID NO: 27666 - DNA, 201 bp, Bos taurus
agttgttgttgactcactgtctctcatgttcaatacccagtttatgaggaaataccattatatatagaacatacccacattggccctttgtgctttactacctttattgttatcaacttgttctcagttcagttcagttcagttgttcagtcgtgtctgactctttgtgaccccatgaatcgtagcacgccaggcctccct

SEQ ID NO: 27667 - DNA, 201 bp, Bos taurus
gatatgtaaatggttgtacaatgttctattatatgaatatactattgtttttttctttttttgtttaataacttgttgttggataattagtctgtttccaatttttgttacaatgatatttactgttgtaaaactccttgttcagatataatttgccacttgatatttcttttcctcaaatcagtacctagaggcaattgc

SEQ ID NO: 27668 - DNA, 201 bp, Bos taurus
catcagattatatatagtatgtctttgaaattaaaggcattaaatggttttcagtgattattcatcactaaataagtaagttgtttaaaaatagcagtgcagttatttgagtttttaaaatctttaactggaggcaattgcatttttagaaaatatagagaatgcctcaaattgtaattgaattgactaaatcaggagttg

SEQ ID NO: 27669 - DNA, 201 bp, Bos taurus
tgtttttgaatatgaatgtgacagcattgtcttaagcactggttttctgtttggtctgaagatctcatttttaatataaagttggccggagctacttacaagttttaaatgcttcacagagttgtgctgtagaaattaaaatgtatgaaactttcattactatttaaattacttttaggccttttgtaattaaggaaacaa

SEQ ID NO: 27670 - DNA, 201 bp, Bos taurus
tttattccccttccagcaagaatttcaacctttactaacactaatatattgacaaatatgataccttctctttcttctcaaggagcagagactgtatatatcagggtgatagaggtctgtgtgtcacagagcttaggatcaacatctatccctttctttgggaatttacaaatttcagggatggctatatggcaataataa

SEQ ID NO: 27671 - DNA, 201 bp, Bos taurus
gcacatgatattgggccgttgatatagcaaatgtatggctgtcacaaaacaaaccagaaacagtgtgcactcacttgggataaatgaaagtatacatctacggtcatttcccaggcctttgttacttttccactctctatgataatagagactaacagaacatatgctatttggccatgcaacataatatcataattggtt

SEQ ID NO: 27672 - DNA, 201 bp, Bos taurus
aaaaaaaaagtttcagggaaaaaaataatatttaaaaagcagtacagtgtcttaaactacagtaaatagtttagttcaatcataaatactgtggcctgatcaagtaatttatacaactatgactcagtttcagttcagttcagtcactcagtcacatccaactccctgcgaccccatgaatcatagcataccaggcctccc

SEQ ID NO: 27673 - DNA, 201 bp, Bos taurus
tcttcaaattatctggtaacatttgcttacctgtttcactcccttgcttaaaagctttcaatggtaactacagaaataataagcaacccttattgtgggattactatgaaccagattaaatgctttttatgtaataacttgcttattcctgcaacaattcactgagaattgcttttcctagttgcattgttttcagagaac

SEQ ID NO: 27674 - DNA, 201 bp, Bos taurus
tatgtaatgcacttacggccatagaactagtaagtggcagaaaccgaattcaaattcaggcagtttggaatgaacacctgggttcttaaccaccatgccacgccacgttactatattgaaaagcaattataaggaaacaacatgaagtgctcaataatttacagtctggatgtatgtctaccctctttaaaaaactcccca

SEQ ID NO: 27675 - DNA, 201 bp, Bos taurus
ataaacacaccttttcacctacatattgtctctggttggtttcaagcttcagatgtagagttgaattattgttacagagatcttatggcctgaaaagcctaaattattgatagactctctaaccttttacagacagtttttaacctttgtactaaagtgatggccagtgtgaccaaaggcacgtgaaatagcagtaagaaa

SEQ ID NO: 27676 - DNA, 201 bp, Bos taurus
ccaactaattttcacaaaattaaccacccctggatggtgtcctgtggacctttccttcttccaaccaggccaggtaaatcaagaatccacctgggagctacggattgatcattcaggcctcctttattgtttttacacaggtgctgcaattgcagcagcactctacccaaatcattagggctggtggccaatcaggacatt

SEQ ID NO: 27677 - DNA, 201 bp, Bos taurus
aatactttctgtctgtcctttctacgactgtcttgtcaattcttaaaatgagaattacttggattcagtatttcttaatgatggccttatgcttgtgatcgccacaccaggcaaaaggcactgactctgatcagtcagttcagttcagtcgctcagttgtgtccgactcttagtgaccccatggactgcagcatgccaggc

SEQ ID NO: 27678 - DNA, 201 bp, Bos taurus
gtgcatttcaaatgtctaccttctgcatttgaggatgtacagatgccagcaccttgtagactgacatggctatgtctctctatttctggctctttcattagtcggcagggagtcaaattgaccagtatttggctcttgaaagcacttgggatagtaatcatgtcagtgggcagaaggaggacaatatagcattgtgttggc

SEQ ID NO: 27679 - DNA, 201 bp, Bos taurus
taatgttaagtgacattggtattgcttttgttcttccaaatttgcttcactctatctgatacataatttaatctaatttctcattgtgcttgtttattcagcttgaacacttctgtgcattgggtagtatattcatacgtctaacttcatattttggctgtttacttcatttgtatgtcttcagagcaaatgtgtgggcac

SEQ ID NO: 27680 - DNA, 201 bp, Bos taurus
acagttctctcttcacccttctctccccttttatgatgagccctaaagttcatgtatctgagggttgggcatgcattgtgaaatttagtgtatcaatgtccctgctcaaattactagaaatgctagaccaaggtcctgattactagtccttaataaacttggaatttattgcatacaatttctttgctataaagaaaagat

SEQ ID NO: 27681 - DNA, 201 bp, Bos taurus
gtcacccagggagaaagtgcagtatgagagatctgagattggccttaaccaggggaaatgagctgctgttctgtgaaaaagaagggatacaaggagacttgccactgtttctccaggaaggcccggacacacacagacatttttattaaggactgtaattatgatacagattagtttgtaagaagggactgatttggagag

SEQ ID NO: 27682 - DNA, 201 bp, Bos taurus
ttactccagccctactgttatacttctgtggaagagaggactatagtaatctaggtgactgccaaaggccatatcctctgtctgtctttgtgaacagagacggggagtcagcacataatttaggcttggtacaaaggagtgctttcttgcaagaggtgacatttgatccaattgttaaagattgaaagaaatagttggtta

SEQ ID NO: 27683 - DNA, 201 bp, Bos taurus
tcaaggctttcagtatatgccaggctgatttgcacatccctctgaaagttgaaagctccataataatatacatgtcatacttcatctgattagataaagtaccaaattccagatctgctgtacagaaaataataataaaaaaactttcccccgctaaaattatcatctttattatcttaatcaagcttatttataaagtac

SEQ ID NO: 27684 - DNA, 201 bp, Bos taurus
ctattgggaattgctgcactgtttagactttcatcaacttgacatgaatgctatatctttagttataatgttggtaaagctgtcagacagagcagggccaggtacaaaaccttgttacttaaccctacaggacaactctccaacttcactgggttgacagtgattcaagaagaggccacacagtatggtaatatgtacttg

SEQ ID NO: 27685 - DNA, 201 bp, Bos taurus
gtaaatccatttaaaaagtgtcctaaaagttcttctttactcatgttgatcatcataaatttagtcatgggtactgtgcagggaaaggcatgtcctgaggaactgtctatgttgtagctggacctttagctgttacaaaagaagagtagagtggagtcaaatactgctgtatcactgtgattctgaaaaagatcagaaatt

SEQ ID NO: 27686 - DNA, 201 bp, Bos taurus
aaagagcttcttatccataaagtaaccattaaggattttacagctgaaaatcaatgagtcccctcacttgaaagcctgtcattgacactgagctgactgacggctacagaggtttggccataaggtttctgagaatgtgtgcagtcctttgggttgctgtcccatgtttataggtcagggttaccactgaggagagagttt

SEQ ID NO: 27687 - DNA, 201 bp, Bos taurus
caataaaaacaggaggtcccctacatttgaatcttcaagcagcaaactctcacagatgggaactgtgttccatcggcgttaggcatgagtgaaattgcagcttgcccttcatctcctattactgacggtcctttagctccactatcccctccttcctctctctcctcccatcaataactcttctttgcctgtgccctcaat

SEQ ID NO: 27688 - DNA, 201 bp, Bos taurus
actcaaatgccatggggcagcgggaagattacaagactttaggccttgtcaattacaataacctttatttgaattaaattaaaagagtaggtatatggccaactacagagttcagagagatgagacaaaatagtaaaggaaaaataacatttatgaaaggctgtctatgtgccaggccttatagttaaaactctgacatga

SEQ ID NO: 27689 - DNA, 201 bp, Bos taurus
ataatttgaaaaggccaaccacacagatcccatgtgctctcaatttgccaggataaagccactttcaaaaagtctgttttgtactcacattatgtgcctcggggtttgtttatttggagagtatatcccagtatttataccaactattacatcagcataatgattactacttgaaatcaggacatgggagtggggtagaaa

SEQ ID NO: 27690 - DNA, 201 bp, Bos taurus
ggaatgatctaagagtcttcactttccttgtggtaatccttgtgcctctgctgcgattatcatctaacacagtgtcagagtcaaacagtgtcctgggccagagagcctctgactaagtcacctcattgatatttggaccaagtctcctcatctatggagagcatatggaatcggtcctgtctggcagcaccataagaaaac

SEQ ID NO: 27691 - DNA, 201 bp, Bos taurus
gtcaggactattttgcagtaataatgatctgtgggccagattaatgtgcttaactttcccaagagtctggctagtcttatctttccaaaagagattgtgtgtggttcctgatttttaattattaaaacaaaagttgaagatacatgccttctcatcacccaaatgttcataatgctctaatttagtccaggtgtaagtata

SEQ ID NO: 27692 - DNA, 201 bp, Bos taurus
attggatagagcggtgggaaagaaggatgagtcattttaggttttcaatacagagaaccaggataatgatgttagggaagtcaggcagggaaacctatttggacagaaaggtgatgaactgagctttgcacgtgattattcatttattctacaaatacctgtgaatgtctacaatgaggaagaaatctcgctgggcttggg

SEQ ID NO: 27693 - DNA, 201 bp, Bos taurus
tccagcaagacactgggctccaatagtcagcaataagactatctctgggtgaggggaaaatgtaatcactgtgaatattttgtacatgtgttttatttccgtctgaatggccacacagccatgatcacatagtagctagtattctgccttgtgaatggccagacaaatcctgtttggataaggatggctatccttttcaat

SEQ ID NO: 27694 - DNA, 201 bp, Bos taurus
tttgttaaaatattgctttcgttttatgctttttttttggccatgaggcatacgagatcttaagtttcctggccaggaatcaaacacacacgccctgcactggaaggtagattcttaaccactggaccaccagggaagtccccaaagactactttttaaaaaaatcattttattttattttggttgtgctgggtcttcact

SEQ ID NO: 27695 - DNA, 201 bp, Bos taurus
tctgcaatgagggagataaaatccagcactttgctggacagagtatatataataatacaggtcgactatttgacacagtggcatgtagactaggcagtcaaacaatgttgtctgtccctctgagttgggactcaaaatctccaaacttgtggacaaactggtccgtaatttttctgtttaaattctggttaagttaaaata

SEQ ID NO: 27696 - DNA, 201 bp, Bos taurus
aatgatctggaagcattcacagctgtacttggcactgctaattgggcattgggacagttttacagttaacctaggatatgagggtacaggcttggatataagatgcatatttctaagtcaagactaacagatagggtaactagtctcctggacactggaaatatatcagtggaagtttttattgtttggggactaacagag

SEQ ID NO: 27697 - DNA, 201 bp, Bos taurus
cagccactacagcatttttgggtcatttccctcttctgggtgtggggctgcaggagctggggttctgctacccttcattattagagaagcccttcagaaatgtactagcagtcacttgtaggtatcttattttcacattgacttagaccgttcttaccttcaaatagctcaataaataatttatttctgaattctgaagga

SEQ ID NO: 27698 - DNA, 201 bp, Bos taurus
ccaaaccagagggttcagtgaactctaaattgaattgttgctcatgggtctcctttggaccaatgcatacggcttacgtgcaaaatgatcaagccacttatttcccgaatctataggctgacgattctggtttgacacaggggaggacctgataagtgacatttcccatttttgcacacagcggcctgaggctgtggtcat

SEQ ID NO: 27699 - DNA, 201 bp, Bos taurus
gatggggaagtctgaggagagagcattttaggtgaaggaaatagtaagtgcaaagtcccaaaggcgggagagtgcctggagtgttcagtaaaaagcaaagaggctagtgtggtaggagatggggttggggagcgagccagaggctcaaagggctctgccctcacagttagaccttaggcttttcccctgagtaacatgaaa

SEQ ID NO: 27700 - DNA, 201 bp, Bos taurus
tctgagaggcaaagaaaatgctggaagactttctgtcaaattttcctttggtttaaaaatctgaaactcattttctcctctgacccgtccccagctgcctagggaaggaaaacacctggatacacaatgccaggagccactgtctgagcactcttacttttatacaattaaaaaaatttttattttatttatttttgcctg

SEQ ID NO: 27701 - DNA, 201 bp, Bos taurus
aaaataattttgcactcaacgcctggagaaacttgggtggaggcctccaccgagcttcttaaagattttgactcctgatattgagcagaggtcatgaactcgagggctggaaaggcctggtgtgtgtatgaaagtcaggcagttataggggagaggaggggttagggggctttggacagcatttttctgtctaaagaggct

SEQ ID NO: 27702 - DNA, 201 bp, Bos taurus
cgctaactccactggagacagtaagtggggccatatgcctcacttgcaacactgtgattaagaagattatacaacttattccagcagttatgtcacacaacgtttcagagctgaatgaactcatctgctcttgggaggtctgtatttccttagaagtacattttttttgaaataactttgggcataactgtttagaaattc

SEQ ID NO: 27703 - DNA, 201 bp, Bos taurus
tttcaccacagatatttcagtccaacccggtcctacattatcaggcaaacagcaccagacttcttgttaaattatttcagcattcccacaaagttaagagatattttgagatggtaggatcttcacattctcaatttgcacaactctgcttcagctttcaatgttttgatctacctatagtgtagtgcagttcaattcaat

SEQ ID NO: 27704 - DNA, 201 bp, Bos taurus
aactcactccagtattcttgcctcgagaaaccccgtggacagaggagcctggcaggctacagtccatggggtctaaaagagtcagacacaaccgagcaactaagcacaggacaggtttgtggtaatttgttacagcagcaataggaaactaatacagagactaattctcatatgaagtgatataacattatttaaaaccat

SEQ ID NO: 27705 - DNA, 201 bp, Bos taurus
atccccgtaccacgggtgtccccagagtgaatggtctgcagacccatagtccaagactgagacacaatccaggccttttactacttcttcatatgagatcgcaaagactatgatgctttccttagcattaattcaatctgggaaaattttaatctctgtgcaatatccagggaagtctcaccatcctgagaagaaaaagaa

SEQ ID NO: 27706 - DNA, 201 bp, Bos taurus
acagctttgttttccttcacaagcagttgggtatagtatagaagaactctgcctaaactcctaggtaatctgaattgtagactcagttgtatacttactcgtggtgtatcctagttccagtgagtcagtgataagatggtcataaacccttggcctgccttttatatttgtggatcattgatcatcaggtccatgaaggca

SEQ ID NO: 27707 - DNA, 201 bp, Bos taurus
accctatgcaaaatgggttctggtccaataagcttgagaaatattgcaaactaaatcacccccttgaacactgacatttcatgtgagtacattgaggctcttccttcagtcattatacttgacacacagtggctttcattcagttctttaatcacaccaatatattttaggatgttaaaggagtgattctttttgcctaga

SEQ ID NO: 27708 - DNA, 201 bp, Bos taurus
ttcttacagcagcatcaccttctggttttcttccctcctcactggccactccttacctcttctgcagtttttcatcctctatccaatttctctgactgtcactgtgtaccaagtcttcatctgggccagccctctcctctgcctctagtctttctataggtaatggcttgcagacccaaggctttcagaactacctacacg

SEQ ID NO: 27709 - DNA, 201 bp, Bos taurus
acgaattccaaagacatctcactcccctgcaaagagaggttggctctctaattaatttatcttggcatctgcttattgcctgaacatttattagaatacagtttattcagaaatttttatttgtgtagaactttctaaccagttcaggatgacatggcagatgagctgggtgggagggattaagcaggaagggtttagatt

SEQ ID NO: 27710 - DNA, 201 bp, Bos taurus
tttatgattaaaacagccattatcagcaggaattagtttgacaagattttaaaagataacaatctatttcaacctattcagtcttcatttgaaatcttttaggatatgtaaaaaagcaatagataagatgtagcctccatgttacatgggtaagaacttctatagttgtatatttatgcctttgatgatcttctctcaaga

SEQ ID NO: 27711 - DNA, 201 bp, Bos taurus
agtgaggagaggggtggtgaatcccagtgactatgcctggatttggctggtctacatgtctgcgtccagccctaggcccactaccactgggtaaagttaaactgaaagaagaaatagtgttgtgtcacgtcctgacgctagaacaaaattggattctggccattctgtgttacagactctagcctcagggccctcagcaac

SEQ ID NO: 27712 - DNA, 201 bp, Bos taurus
taaacaggcttgtgggtttgtagccatctagagctggcagctctagatcatcatgaggttccaattctagttcagagtgtaagtaaagttatggttataacctctgtcacagaaaaaataaatatatcttggcaacacattagtagttttgctgatgagaatgaacagagtgaagaggggaaatctcattaaacttgaaag

SEQ ID NO: 27713 - DNA, 201 bp, Bos taurus
caatgaatgtgagctgtattaatagctgctataatcacacacacaaacacacacacacacaatggccaaagtgtggaccttggccaaggtcagcatctcatgctcaatgagtgcgataacatatttgacaaagatcaactctttgttttgttgacaaacattctgatcagctacttggccatggggacagaaatctgatgc

SEQ ID NO: 27714 - DNA, 201 bp, Bos taurus
ccctgccctattttacctcctcagtacctctaaaacctatccacttctgtctgtctccactgcccccactcttgaatcactctctctccactgattactgtaacgacctctaaatttgccctccacatctcttctccttcctaatccattctcttcatgcatccagggcaatcttttctttttaaaatttttaatgttaat

SEQ ID NO: 27715 - DNA, 201 bp, Bos taurus
aggacagaatccatactccctgtcctgaaggcttcatagtattgtccctgcctatctttccaatctcacctcactggaccattctccctttctgattctgcactgcaactacactgctctttaaatcctctaagttgctcaatcttagataacatcagtgacagttatcagtgaaaaaacctttggtatattaattcattg

SEQ ID NO: 27716 - DNA, 201 bp, Bos taurus
aacagactgaaaactgcttctgcctggtgttagtcctttagttgctggatttggggaagttgtggaggaaccagagcctgtgagaaaaagagcacttgggattggggccagcagctagttacccgtgggtacagaaggatgctgagagcaactagtagagttccactggtggtggagaatgtctcttgcttcattgagaaa

SEQ ID NO: 27717 - DNA, 201 bp, Bos taurus
ttgccacatctatgacataaagttaagaaacacatgagcttttcctggcaactggaagaatagggaagaaggaagaagagagtgaaattatggtacagctataacagcagaatagcataaatctgtcaaagaagaatgtaatcagtttgtttatagtgaaacttatagactttagtcctcttctgaggctgagactgtggg

SEQ ID NO: 27718 - DNA, 201 bp, Bos taurus
caaatagacatttttccaaagaaacacagatggccaaaaagcatatgaaaagatgctcgacatcactaataattagagaaatgcaatgagacacagcttcccatcagtgagaagggccatcattgaaaagtctacaaataacaaatgctggagaggatgtgaagaaaagggaagcctcttacattgtggtccagttcagtt

SEQ ID NO: 27719 - DNA, 201 bp, Bos taurus
tgctgactgactgatacccctgtcttatggggtcaaacaacttgaatgtcttagtgaggtaaatactttaaaaaatggtggctgtcttttttccattaataatctcatgaataacctctatactcaaatatgggaaggaaagaagaacatttaatcactctaaacagttatattaaaaatgatcacaattccatggtagaa

SEQ ID NO: 27720 - DNA, 201 bp, Bos taurus
atccaaaaacaatttatcctgatgtcttcatctattctttcctttgtgcttttaaatttaatcatcttactctcttatagtcatactttaccagaaagaggaatgactgggttttttctttctctcaggtgaaaattgaatgagaccatatgtgaaatcatttgtgtaatacttttgttctccaagttcaagaggttaaga

SEQ ID NO: 27721 - DNA, 201 bp, Bos taurus
aagtatctttagtgcaaagacattaatttacacttctttgcattttctaatgcactttacatgtagaagacctttacaaaattacttgtcaacagagaaatagagaatctgagcgtatgtataataccgtactcagatttctataatcctttgtggtatgtgctacaaagcataactgtcacgtaacaattaagacagaaa

SEQ ID NO: 27722 - DNA, 201 bp, Bos taurus
tcacttgtctcgcttggacttagcttttcgttttccactttctacttgggtttctctgttttggccaataggtgtgacatggatagggggattacaggcctgaggcacgtgaaagctcctgctatttactcagaacggtgtggctgtcacgtcctacattttgcatgtatccgaaggccactcggtgccctgtccacttgg

SEQ ID NO: 27723 - DNA, 201 bp, Bos taurus
tggccaccacgtagcaggttcttcaggcaaaaaagaagggggagaagagaaaggagggtgagacaaggaggtagggtgtttgtcactctggcattggcggatggggtgggttagggggccaaaggggtggcaagagggactgtcacttctccgttctctcccatccctggtcgtctagtggtctgggacagcacaggtgct

SEQ ID NO: 27724 - DNA, 201 bp, Bos taurus
ctctccagctaaagctttaagtaattgaaaagttctgaatttctgtttggaaagcatgatgatactcagtaagaccagaacaatccaaataatcctaaacgtacagagactagattcataaaaccccagagtaattttttttatccccatctagaaaaatcgtatttcatagcagttcttacaatgccctgactctggatg

SEQ ID NO: 27725 - DNA, 201 bp, Bos taurus
cattgggagtgcagagttttagccataggaccaccacagaatttccaccacagtcaattttagaacatgctcattgcccacaaaagaaaccccctacccattggcaatcactccctattcctctctaaccctagttcctggaaaccactcatctatctcctctttgtctctatgaatttgcatatttgggacatttcacac

SEQ ID NO: 27726 - DNA, 201 bp, Bos taurus
ctgaaatgggggagcctgtgggagaggccgctttggggatatactgaggaatttagtcctggacatacttgaagtttccgacacccatgcagtatttcagcggaggggtggataggaatcaggccatgggagagccccaggcaagagatgagcatatagaggactttttaaagacacaagagtggatgaggacaccgggga

SEQ ID NO: 27727 - DNA, 201 bp, Bos taurus
gcaaccaacattacccatttcttctgtgctccaaagacacggcgtgcatgtacaagcaaataaacatgctctcctctttttgcacaaacggcagcacaccatatatgctgctccatacactgcctttttcacttaaacatattctaaggcttccctggtggcacagtggataagagtctgcctgccaatgcaggggacatg

SEQ ID NO: 27728 - DNA, 201 bp, Bos taurus
cccaacaagggcagaggcccagagagcagaagccacaaacccaaagcccagagcagatccatgaccagatcaaagccagaggtcctgcttctggcccagaggactttcactaaagctttttgagaccatccgtttcctttttcaaagagacagattaaaccccaaattaccagtgaggtctctgtacaacaaatctatttc

SEQ ID NO: 27729 - DNA, 201 bp, Bos taurus
agttatcacatgctaggtacccaagtagtagctaacattgatatagtgttgagtttcaaagtatttttatttgtttgatctcatttgatcttcctaaaaggtacatgaagtaggcaatatatgaacactaagaactaactactggattttatcattaaaatgtccttttaaatattacagagagcaatttcttaatttaaa

SEQ ID NO: 27730 - DNA, 201 bp, Bos taurus
atccctccccccaaaatctggcagtcctaattagattgcctaactttttccatttcaccttaaattatatttagttgattatacactggccctgtactcacacactatacatatacatcccaagtttaatctccttgaatgaaaaggcaaatttgcacttatctagaatgtttagaggctggatttgaggccgaaaaggat

SEQ ID NO: 27731 - DNA, 201 bp, Bos taurus
tgtaaatgtagtgaagccattagccagcatttcctgcctctgcccctccccctcagtgcacagtgtggctgagactcggcaaaggtgaggtcgggaggtggaagggctctgagaggtcaggaatactagtaagtccagagatcagagattcgaggacaataaatgttgattggtttgataggaaggtaagagaagatgaac

SEQ ID NO: 27732 - DNA, 201 bp, Bos taurus
atacagcagcacttaccaacatgcccttaaagggaccgactgcagccatgctgcctcctgattctagaccagcagttcgtttcaaactatcatttaccaagggcctaccaggtatataacccatattataactgtcaaggactgtcccttggccattcccaggctaactgcccttaaattctgtctcaacaaccttaattc

SEQ ID NO: 27733 - DNA, 201 bp, Bos taurus
tctgcagagctgaccccagcaaagaagccaagtcctgagatgaggggaacatgcctccttcccaccccagactctctcagggtggggaacaagggagggtgggaacatacggacaaaaagtgatgttgaaaccagagtgatgccagagactcggagacgaagattttcaggtgacaaaaaccacccggggcagattgttcc

SEQ ID NO: 27734 - DNA, 201 bp, Bos taurus
actgccagcagtgctgtcattaatgggatagttggtgctccagccactgcaaggctgctgggcaaggcccagaaccagggccctggcctgacctcttcagagctcagatggcttcctggactctgggacttcccacttggatcagaacactgggggatgaccttcttctctccaatgggcacaccctgctctcttcaccct

SEQ ID NO: 27735 - DNA, 201 bp, Bos taurus
atcaactacgtttggcgttgcccctgtgcacagcattgtgctccctaattaggaagactagcgagagagcaggattttgttcctctttttaagatgtacagtctggtagagatatctgccttgagtaagaaagaaaatatgaacctgatattttaagcagttttttcttctcttcacttccgaagattttaagattaaaag

SEQ ID NO: 27736 - DNA, 201 bp, Bos taurus
tattttagatttttcttcaaacagcatttagttgaacttcatttcttcttatctgaaaatttttgtcttttaattgaagcatttgtcctattgacaataacattacaaataattttgtgtttaaattcatcattttacagtttgctttctattagttccaccagttctttgttgtctttttcttctttcttgattttagat

SEQ ID NO: 27737 - DNA, 201 bp, Bos taurus
atgcttctcttgccccacatgtatctcccctactgcttgcctcccagtggctgttttctaacttaattcatacagagtcctttctgccacagatcactttatgtagcaatcataccatgactcatgtaaaagaagagagtaaacaccatttgttatttatctactatgtattgggcaggaaactgaccacatgggtcacaa

SEQ ID NO: 27738 - DNA, 201 bp, Bos taurus
attttggcacatgtcagccctatggagcgagggagcatcaacctagaattcaaacaagttttaccagtcatttcacccgatctgtaaaatgggtacaattacatctacttcacaaggctgtgtgcatgtatgtgtgtgtgtgtgagataataaatatggaatccctttgtaactccaaagcttgctaaaggtgtcagctgg

SEQ ID NO: 27739 - DNA, 201 bp, Bos taurus
tggcagcgcactccagtattgttgcctggagaattccatggacagagaagcctggagagctacagtccatggggtctcaaaagagtggaacacaatgtagtgactaaaagtaacagacttaatagataatggcatattccctgggatataacatcctagttttttcggtttttatgatactaaggttgatcagtggattca

SEQ ID NO: 27740 - DNA, 201 bp, Bos taurus
ttccaccccctgatctccactgacagactgactaccgggaacatgttgccccaggagactgaaatgctgatctttcaaaaatgttttgcctccatccactaagtagaaaagatggtagagatcagctgtggggagccaggaagagccaggtgaaggaccactcactgcgcctggaagaggagccagccaccccttcctctc

SEQ ID NO: 27741 - DNA, 201 bp, Bos taurus
cccattaacctaagctctgagacatacattatgaaagagaaagatgctgatatgatcaacgaatgcaataattcaaagcagaaatacagacattgccaccgaacaataatcaaattcctccaactcagtgttacacaaagtgcagtcaccttaatacaataccacaaaacatcaagtaacaaaccttaagccaactgccag

SEQ ID NO: 27742 - DNA, 201 bp, Bos taurus
gaggggatggccatgcctgatagagcccttagttgctttcagaaactgccactcaggacccctgtctgttctctttctatctctctgtctctctttttttaaatttttttggccacacagcttcaagctctgtcttgatttgtctcccagatcagggctgtcttcatgtttgccctgactattaataggggctcttgacca

SEQ ID NO: 27743 - DNA, 201 bp, Bos taurus
cctctatatcagctttcatctctcctctttatttttatttttaattgtttaaaaaaaaaaaacacatttatttgcctatgccagttcttagttgcagcattcgggatttcttagttgtggcctgcaaactcttagttccggtatgtgggatctagctccctgacgagggatggaacctgggccccctgcgttgggagctca

SEQ ID NO: 27744 - DNA, 201 bp, Bos taurus
tgtgtgtcaggggtggtggtggggagggtagtaagtttgcctatggagataaaacttcttgctggtctttttaattttgaggacctatgaggctcggggtattgagcataagactgaggtggtcttgaagctcagtataagcacctgtattaactatggaactgttgtcgctgcttggaccttttctttctgagattcact

SEQ ID NO: 27745 - DNA, 201 bp, Bos taurus
gtgtctggggttgcaaggagcccaagagagatcacatacctggttcaggagtccagtgtcagcaggtcctcggaataatgtggccaggtgctcagagggttcccccagcccattggggagagaggagtaaagaccatctgctccaacctgcggttgagttggtggcccctgtaaaaggccctgggtcccaggccgagctga

SEQ ID NO: 27746 - DNA, 201 bp, Bos taurus
ctgtcggctccagccctaggtgggtccagagctggacttcgtgggtttgcagcacatcctcctcagtattctacagcagctgtctggagttttttctgccatgcctgaactgatgtcatttcccccttggcagacagcttcagctttgctgcgtctgagatatgtcacgagaaggtgggggtgggtcagagccaggcgggg

SEQ ID NO: 27747 - DNA, 201 bp, Bos taurus
tcttcacataactaacttcctaccctcatactccttgccaggattctaacacacattgggttatatattagttctttaggttgttttggaagcatttgtcttagaattgccaacagtaactatagaactgtagcagcctgttgctctgaatcttcccttcacaaattaacctaaaaattatcttttttcctatgtttaaat

SEQ ID NO: 27748 - DNA, 201 bp, Bos taurus
ttgtaacttttctcgaagttggtgccaataggagctgaaataataaaatcagtacagttaaattaaataggaaatgagagtcttctatgtcccaggccttggattaggtaacaatagttggtcactcttctgggaaatcgtagctaaaattacaatcaaccggcagtcactgattggccccatttactgtattgtgtccca

SEQ ID NO: 27749 - DNA, 201 bp, Bos taurus
gctgggaagggaatcttgaaacatgagcagcgatgacactgggaaaaggagagtggttctaacgtgagtcaccagtgttctctgtaggtcccacccacactgctgaccttggattttcgttgctgccctttggttctttgggtgacctcagcagagtcatggtgtgtggaatctgcagaggccccaaacccaaggattctt

SEQ ID NO: 27750 - DNA, 201 bp, Bos taurus
aggtctggctgaccccactgctccagggcctttttgatccccagggccctgcactccctctagcctaggttttggctggggtggcccaagacacatacagacatcctcaggctgggaaagaccccaagcctagttggtgccgcacaaggtaactcacgggcaggccaagcccggcagaacatccctggaagctgcaggctt

SEQ ID NO: 27751 - DNA, 201 bp, Bos taurus
aactgcatattctcagttaccttagaagaagacagatatttcttaaattaaaaattcatcaagttctcctcctaccctacttcatttcattgcttgaatctctctgcacttgttgcattaaaaaaaatactaataagcattttgcctgctcaagatgtaatgcttaattttattccttccaatctgtccttatatcagcca

SEQ ID NO: 27752 - DNA, 201 bp, Bos taurus
tgttgtttcaagccaccacgtttgtgatctttagttacaacagcccttaggtggccgatgcaatctcacagcgcatcccagcttggccacccagcttcccgtttctgctggtcaccagcagcaaaccagccatcacccgggattccaagtgtagggtgccacactactgggcatgccacactctccctcctggccgggtat

SEQ ID NO: 27753 - DNA, 201 bp, Bos taurus
agaagcgatggccaaatatatctaggaaggtatgtaggaagcatataccaaagtgtataatatgcttaattatgtgcttaattagaaacagaaacaaaattaacagtacttaaaagtagtacatattccatgtctcatattaataccttagttcagctcccttaaagagtcacgagatgacccttcatgccttccacaagt

SEQ ID NO: 27754 - DNA, 201 bp, Bos taurus
agccactgcagtaagaagccctcacacctcaactagagaaagcctgcatgtagaaatgaagaccagtccagcctaaaagaaaataaatgaataattttttaaaaaaagtgtcatagtcattagaagcctatttgggaatctcaagttatatgataaatatctgctttcagtttcatcacagaatctttattcagcctcatt

SEQ ID NO: 27755 - DNA, 201 bp, Bos taurus
tgtgcatcttaacaacttgactgtcccctttcattttttaagaaggaggaaataatgcaaaggcttcaagagaaataagtaatgtatgcccataaaggtagtcatttctcttgtcttagattcttcacatcatcctggacctagcaaagtcctctagctggaaaaacttctaaatgtcaactcttatgaaggtgacagctc

SEQ ID NO: 27756 - DNA, 201 bp, Bos taurus
accctctaacggtttgatcatcttaccttctaatggaaacagtgggagcatttctcaggccatcctgaagtcagggcccaggagccctgggaacaggacaccaaagaaagcggagggtgagggactctcgcaaggcaaatatttagtgctagtcaacacaggcagaattcttttgtcttcagaaccattgagtccttataa

SEQ ID NO: 27757 - DNA, 201 bp, Bos taurus
ggatgggttgataaaagacaattagatttatgggaccccaaggacaattttctgtttgtatcctttgtgctgtggacttttaatttcttagtataggctatgatgcttttacatttctagtggtattgtgcactgggacattaggtaaggaggttagttaataagatgcccctttggtacattagagtcttgaagctccct

SEQ ID NO: 27758 - DNA, 201 bp, Bos taurus
ctaatgtggaaaaatgagaatgagaatgagaccctcttcaaagtgttaattaacaatctacttagcttatctgatttccaccaacctcattaataattataatatcctctctgcattcacacatcatacagctaactctaccccaattgcttctcattgatacctgagcctttgtcagaccatttgcattaagtagattca

SEQ ID NO: 27759 - DNA, 201 bp, Bos taurus
gtaaatttgttagaatgactgtgaggaaggaaagcaagagttcaaataataacaataataatagtggtaatgatagagttgactatgggaagttactgttttaagagtattatattttaaatcatttaatgcccagaaaaactcactgaaggaggtagtgttttagctttctctcctagaggaggaaacagaagcccagag

SEQ ID NO: 27760 - DNA, 201 bp, Bos taurus
aagggctacacaaatttattagcagttacgcatctctacagacactttgcaagtaaaacgtcttgactgttctctaaaccattattgtattgctagtagtgtttggcaactagtcaactacagcaatttcatgaattaatgccccatgtaagcaatatttctatctagcttcagaactgataatgaaaagcatgcctgatc

SEQ ID NO: 27761 - DNA, 201 bp, Bos taurus
ggagagaacagtcatatattctaataaaacattccagtttgctggatatagatgtaacatgttagaccatccaagctgagattagattattttaaaaaattggtaaacagtattgacccaaagccagcaagtgatgagaaaatttaaagatgtaagtgggagaatgatcagtttcacattaagatgatgaagaaagctaaa

SEQ ID NO: 27762 - DNA, 201 bp, Bos taurus
gatactgagaaaaatcctacactgacaatttcaagagatttgagttttatggctcttctgtcaccaattacccttgaaaaaggtcttcaaaacaaggaacgaaaggcccaaggaattaaactttcccccaaatcatgaagtaggtattttggtaatacatagaattaacatggtgacctggaaagaacgcaggtcttaaaa

SEQ ID NO: 27763 - DNA, 201 bp, Bos taurus
tgtaacgaggatgtaaccacatatttacatctagctataagcatttcttttaaaagaggaagaagtggaaccttactacttttagaagcataaacactttcgtgcatgaaatgaataaaaccattcttctatagtgatttcctcagatccatggcaacgtgaacctacatcagtacttcacacttttatctataatctgga

SEQ ID NO: 27764 - DNA, 201 bp, Bos taurus
taccgactgctcatcagtagatggtgtcttattacttcaacaaccccaatttcagctattctcttccttcttttcttgatactcctctgtcaccctttccattttactctatcctctttgattttgcttctgcgctgcctgtcagtctttaaaaagatgaaggtcgtagcttttctttgtgagagtaaaattggaaaaagc

SEQ ID NO: 27765 - DNA, 201 bp, Bos taurus
cacaggtaactcaccatggagaccattgctatagactgaggattcctggggcatccttaacatttaaaatgttaaatctttaacactttcctccacaggaggccagagagcagattcttaattaaatttttaatgaatgaatgagttcaacaaatatttattgaatgccaataatgtgccaggggtagttctaggtgatga

SEQ ID NO: 27766 - DNA, 201 bp, Bos taurus
acattttgaaatattaattgagtcactgagaaatgtactaaaatatacacatgtaaaaaacgactgaaaagtattactatctcataatatatacaaaaatgttttctaaccaaaatatttttaacatgctgagggatctgcttttcaacttttttaaattgggattttacttattgaagaatgcaaataattattaaatga

SEQ ID NO: 27767 - DNA, 201 bp, Bos taurus
tctccctcccctgacttccattccatatctttgatgggctattccttctcatgcctgtaagctgccacatgtgtcaatccttacatagggatttctacatgtctacatagcacattttctactttttttttttcacctgaaaactcttatctatccctttttgtttactaaggacacaatatgctacctcttcttggaagt

SEQ ID NO: 27768 - DNA, 201 bp, Bos taurus
tgcacacaactaataaattctacacacacatatgcatccatagttgtttgacaaattactcaagagcagggcttttcatacgtggcctccactggcattcagtgtacgtatatgagtgcttgattctgatatgtaggttgtgctcctttaccatgttcctcacggtgataatatagaatgagggccactataaatatactt

SEQ ID NO: 27769 - DNA, 201 bp, Bos taurus
gaaatgaaataagctggcaaatgcccaaatggcacataatcatttccagacagattaagaaaacctcagaaggtgttatttttaaaactaagatgctcttttgtggcaacagaccatgctgctctggggatgtcttccaataaagaatatttccatcagaaaaggaatttcaaccaatgtgattttgtccccagaaaaagg

SEQ ID NO: 27770 - DNA, 201 bp, Bos taurus
acaatgagtttggaagtgttccttcctctgcaaatttttggcagagtttgaggacaggcattaattcttctctaaatgtttgatagaattcaccagtgaaaccatctctggccctgtgcttctgtttttggggagagacttttgatcacagtttcaatttcagtccttgtgattggcttattcataatttctatttcttcc

SEQ ID NO: 27771 - DNA, 201 bp, Bos taurus
tttacggggtttaaaatttttttttatcaaatagttcaattaatagcaattatattgtcattcataggctttttttccttgtatattgccactttggtgggtttttttgttttttttttcttagtcccaaacatgcccccttattctgaatatagtcttcccctcatttggtctttctggagaatcagttaaatgcttgaa

SEQ ID NO: 27772 - DNA, 201 bp, Bos taurus
ctctgtgaaaattattccacagttggaaagccagattaaaaatcaaaatgtgagcagattcctatacaaatacagagaactggataaagcaaaggagaaaaaaaagagggcctaaatgactttgaagggtaaggaataaagtagattttgaagtagtgtccttaatattctacccccagatatttgtcatcctgctagcat

SEQ ID NO: 27773 - DNA, 201 bp, Bos taurus
atcaatgtttcatgtttccaggtcatttcactgcttatgaagggactgccctcagctaggagacaatggtggatatgagcatataggatagtcaattgggtgattgtgacacctctgcactcatgtgctgctacctgaaagctcagtccttgtgacttagaccatcacaggactctgcaagtttagatgttcacagggctt

SEQ ID NO: 27774 - DNA, 201 bp, Bos taurus
catatgactattcaacaagcgaattaagggatgttcaacatcaaaaatcactagagagaaatacaaatcaaaatctcatacccactaggatggccactaacgaaaacacaagcaaacaaaccaattaacaaacaaccctagaaagtgactagtgttgtggaggatgggagaggaagtagaagcctggtgcattgctagtag

SEQ ID NO: 27775 - DNA, 201 bp, Bos taurus
tcacataataactgtatgtctctcatcatactttaacttttaattccaggtcaatacatttagctgcttaattcatatttccccatggatactgctcaggaaggtctaacttaatacaaacaaaatagagctcttgatgtcttcctctaaatatatccctccaagatatcaaccctttatttcaaacttgaacgttcaagt

SEQ ID NO: 27776 - DNA, 201 bp, Bos taurus
catgtgtagaggccatccaagtgtcaagcacatttggtggtgaggagcggggagtgagaagatgctgagttcccctgtggccatgtggcctaacaaagaacatcagcagaaaatgtccttgctcttgttatgcaattacagataccattagaagagtaagtgaaagcaaaagcacctacggtaacttaaatatctgttgtc

SEQ ID NO: 27777 - DNA, 201 bp, Bos taurus
ttctgtattaacctttatactgcattttactgtttcttgctattacagggcactgatatcacatgcagtcatgaacacatgctctatctggcctctaggcgcctacctctctgttatttttcttatctaatactttcaaaagggcattttcatgacccaagatgtttataagtcccattctatcagcagtaccttttggag

SEQ ID NO: 27778 - DNA, 201 bp, Bos taurus
atagcagagttttgtctaggcctctcagctttcatacatacaaggcttaattctccaatgccttgtaatagttgagacatatcttatgtgtcctgagcatgggccccagggcctagcagaaaacaagcatgttttaaaatcattcaataaataatatgaaacacaaatgaacatttggggagcccaactaaatacctattg

SEQ ID NO: 27779 - DNA, 201 bp, Bos taurus
tttctgatactctgatttatgacagagggaaaatacacctgttaaactagaatttaggtagattcagcaaggcttgaatgtatcttttccttactatacataaaagactttagaaatgtgactgtttcataatcttctttaatttttagtgcatgtcagtgattagtcaattttccagtctttggcgatgttttcatttgt

SEQ ID NO: 27780 - DNA, 201 bp, Bos taurus
ccagattccttacagcatggataagggagaatcgtcaggtgcttctcatcgccagcctagcatgatgacatagctgcgccaaaagccactttctggaagcaggagacagaagcatcaccagcagttttcctttaaaaatgtgacctggaggctttgtgctgccaagcagtctgtagcgtcctcatcttttccagtgatcat

SEQ ID NO: 27781 - DNA, 201 bp, Bos taurus
gaaagaatgataaaaagtgagtgttttccttcctgcagacctgcatgagaagactgattattctgtagagacttctccagaatcacagtatctcacatgtaggagggaacctgcaatagttgaaagctgtgtgttccagtcactccatcagagaactgtcagggaagtgtcaagtcctcttggccagagactctcatcagg

SEQ ID NO: 27782 - DNA, 201 bp, Bos taurus
agcatggtgggctgccgtctatggggtcgcacagagtcggacacaactgaagtgacttagcagcagcagcagcagactttcaaaatagctctggatatccaattcccaactgaggtggaacattactaaatggatatttctctttcactagaagtaaaacaagggacagctcttgggtatttgcaaagtttccaatgttca

SEQ ID NO: 27783 - DNA, 201 bp, Bos taurus
cagaaaagatagtgtgagtaataacaccccacagaaactgattatttcagctgtaaaatacaagttccatgcagagtgatgattttgagaataagatggtgttttcaaagataaaaagtctgtatttttggtctaactttttccactgtgcaacaaaggaaaacctcattatctaaaccatgtttttagcaagttactttt

SEQ ID NO: 27784 - DNA, 201 bp, Bos taurus
aacaaaacagctatgaattcacaagggtaattatcaccctatttcaggtatgtgacaaataatattttatttgtgttaagtgaatagttcctggaaggatgcaaatatgcatttactaatttaaagttacatgtatgcacacaagtagataatttttgaaaaattatgtgctgggaatttttggtcatacataccatgcaa

SEQ ID NO: 27785 - DNA, 201 bp, Bos taurus
acaaatcttgttagaaagcatcttcacacttcacagactataacatccccactgcatggagaatgcctgttcctgcaacactgagaacctagttggccacggtcgctttatttcttcagtcatgtccaactctctgtgatcccatggactctagcccaccaggctctctgtccttggggattccccaggcaagaatactgg

SEQ ID NO: 27786 - DNA, 201 bp, Bos taurus
aatgcgatgttctcttaagttccgatttgggcttgctgtgcataaagtgtgtcaaacttcagctacagaccagggggtgaagtcggtcaatttaattccccaagatctaaagaaggccggtatcatttcatatagccctggcagagcagatcattaccaggcacgaatctgttcgttacgtgctgagggtttatagcaaaa

SEQ ID NO: 27787 - DNA, 201 bp, Bos taurus
gggcactgcaaaatcccatggcctttcaaatctgtaaggagaaggaagtaagagcagtcaacacaagtggtaactggtcggtgggtgacaggtaagcacagtgtcctggccagggacccagtctgtgcgctttacgatttgtatttattacacaaatagtgttgccagagccaaagagaacagtttttaaaaaaaagtgct

SEQ ID NO: 27788 - DNA, 201 bp, Bos taurus
aggatgttcattgcaacgttgaaatagcagaaatttagaagcagcataaatttagattcatcagtgggaggggggtggtcaatacaacagaatacagtaattaaattacataaatgaatcatacacacacgtgctcacatatgcatccatgaactattatgttgagtcaaaagatgattttcaaaatgctgcttagagagt

SEQ ID NO: 27789 - DNA, 201 bp, Bos taurus
ttataggaagactcaaagcacagcacagggtgaaaaataagcctatagcagtcaaaactgttgtctgaaatgtcttcagactggaaggctgaatttattgaacaaaacaagtactagcgaggcggaggtgtgcagtcctgctcattatcactggaaaggagaaccaaaaagccgagtaaaaaattaaattttaataatgcc

SEQ ID NO: 27790 - DNA, 201 bp, Bos taurus
tttagaagtatttctagactagggtaacctcactggctaaaatgcgtgtctgaacaagagccccgttgttcgttcaagccctgctgcactggcgggatgcaggcagcttggcctggggtggggcgggccccgattccctccaggacgccccatgccaagcccaggagagcgcttcccatccgtcgcctcgggtggtgggat

SEQ ID NO: 27791 - DNA, 201 bp, Bos taurus
gggaaaaaagaaagcagtttccatgctttgctcctgtggtcatggggaattttgaacatgaacttgaggcattttcatgaaattcctgttttcatattttcagtttcacaagattttctcttctgactcctacttgacagaatcatctttgccctaaagtgctcttatttctggtctttgggataattaaggaacagccag

SEQ ID NO: 27792 - DNA, 201 bp, Bos taurus
tatcatggccagtagctgtcactctgggtcactccacaaagggcgtggtctttcctcctcccacctcagccagttttgccaatctgactggccagcagctgggacagatctttctctgctgcatacagatgggcaccaacctgatcctgaaagctgggcatgggcacactgccaggccatcagcatcagctttctcaacag

SEQ ID NO: 27793 - DNA, 201 bp, Bos taurus
gccaggggccagtgaccttcctactagatgccaaattctatggtaagtgctttacctgtgttatcttatttgatttctagaataatcttttgcggaagatgttgcaggtcctcaggcccttagccaaaaattctcggggtctgttgtgttcaaaattaagccttttcctctcagattttagaaaaagaataatacggtata

SEQ ID NO: 27794 - DNA, 201 bp, Bos taurus
tttggccctgggtttgcagcgggcaagcagacccacatgctagtgtggtctctgcctcagacattcacactctgaccaccactctcagtcgccgcctttatgtgccaggtcctgtgtttggccctgggtttgcagccggcaagcagaccaacatgatcagtgtggtctctgcctcagacactcacactctggtagggaaac

SEQ ID NO: 27795 - DNA, 201 bp, Bos taurus
ctattaaaccctaaggccccgtttcccctcccctcagcccctggtaaccaccattctgctttctgccttgtgaacctgattaccctaggaacctcatatatgtgaaatcatagggcctcttttctttagtcagagtcttgtttcacttagtgtgttttattttctttaacaaatacttgcttgatactcatgtggtctgct

SEQ ID NO: 27796 - DNA, 201 bp, Bos taurus
cggaatcctaaccactgggccagcagggaagtccccggcgtccacactcttgaaaacatcccatgtggttctgatgtgcaggtgaagctgagaatcattgcgtacagagaatctgaccctagaacaaatgatcgcatggtctatggcctggaaggtgccattgcagatccaccaccagtaggtagcactagagggaaatca

SEQ ID NO: 27797 - DNA, 201 bp, Bos taurus
tggtcttttggccaagaaagagagcgagcaggctttttgctggggcttttattgtctgtgcctttgggtgtttctggcttctccagtaccccatttgggtccttctttgggccccagggtagctcttctgtcttctgccttccttcagagttgctgtgtgtttttccatttaagcccaaggtgttcagttataattaatgg

SEQ ID NO: 27798 - DNA, 201 bp, Bos taurus
aaaagagaccctcccttggggattccagtgaccacccaggtttggggaatcacttttatctaatccacagcctctcatcttacagacaagacaactgccatggaaaagttagctcacagaggtctcaaaccagctcagaaaagaggaccagaaacagggcttcctgaatgccagcccagagttctcaaccagactgtgggc

SEQ ID NO: 27799 - DNA, 201 bp, Bos taurus
atcactccccactccttaagctcaggctgtgcttggtgacttcattccagagtggacagtatggaagaggggtgggagagaacctttacagtgaacaaatctgaaaagcactacctcacctgggtgatcgaggtcaacatcaacaatcaacatcatgttgagagtgtgtacttctgatatgatgtcatgacaactggcact

SEQ ID NO: 27800 - DNA, 201 bp, Bos taurus
ggaggatctacacagcattaagtgaaaggattaacatgcaattatttggtcaatttggatttcgcagacaattaaactggttaattcagatcaaaatttcctcttcagattctgacttatcaggattggcacctacattaatttaattagtggaccaatggttaggcatattttttatttgagcttcagatttcaagctca

SEQ ID NO: 27801 - DNA, 201 bp, Bos taurus
atgcagtgaatgatacagtcgggaaatatttattcctctaccctaagctgcctttcagctttcgggttctataaaagaaacaagatgacataaagcttatcctaatttgtggtagcattgtttatttgtttcctttttaaggaggaggtggaattggattgtttgtttggtttcttcttcaataaacaacatcttaatata

SEQ ID NO: 27802 - DNA, 201 bp, Bos taurus
catccttgctcaaaatccacgtgctttcagcagtagtgttactgtttcagaatgtcagctgctgagcaatagttttgtcatgctttgccttcaacattgtgttatttttagtatgaattatatgcagtggatttatgttatctttttgtgctatatgtttctagttattcaccaaacctttgacagtagtaagtcttcaca

SEQ ID NO: 27803 - DNA, 201 bp, Bos taurus
gatttattttgtacattcttagcaagatgtgtcccatgctaatatcccctttgttttacaccatttcaatttaggaaaggtttcatagactgttctgctttagggtgtcctaggaaacctgtctggcctatttttgcatgtctctagatggtgactgcagccatgaaattaaaagacgcttactccttggaaggaaagtta

SEQ ID NO: 27804 - DNA, 201 bp, Bos taurus
catttactgcggtagtcacagtattacttcttagagtccagcatattttccttgaccttaaatatattttatagggctttagttatagtaccatatattcagtaatgccttaacatgagaggatgaagtaaaatttcaagaaaagttctatagttttctatatcagttggaaattttgtgtgaccttttttagtaataata

SEQ ID NO: 27805 - DNA, 201 bp, Bos taurus
acagcctatctgtgtttaaatctcagccctgctactttctggttttgtaaatttaagcaagtttttttaatctcttgcttcagtgttcttagcttatccatttgtaagatttaaataaattaatatatagagagcactttgtacactaatccataggaagtacttaataaaagtactagcatcacgtgtaatcatttttat

SEQ ID NO: 27806 - DNA, 201 bp, Bos taurus
aagaaacatgcatggccccagagaagcctgctttcctcccagcttgctgcaccctggtgaaccagggcagccttgctgacactcccaattagcaagcaccggttcagaatgccaagaggccatggaaaatggaataggagatagaagatggcaccttcttccttataaggttgataattcatattttaaataatctaaatg

SEQ ID NO: 27807 - DNA, 201 bp, Bos taurus
gcacctgcgaggggcagacctctcttttgatcccgctgattgttagtagcacatttccatttcactaattgcaggaagtgtccccgagtgagtggccagcagtgtccccagttctctgccgcttttgcttagtgaagacattccccacaccctctgcccaaggtttggacccgacctgaatctgtggccagggggtcaagt

SEQ ID NO: 27808 - DNA, 201 bp, Bos taurus
tatcactcagaggggctgaggcctcagaggaggtccgaaggccgcagtcacctgcgggtccctgaatgatgagaagcaggtcaaatacttctgttaacactgcttaggactctatcacgggcctcactctgaggcgagtgtggccttgggggagttaagcgtcacaaattgggcatgtggtggtcacaagagccccttttc

SEQ ID NO: 27809 - DNA, 201 bp, Bos taurus
ctaaacagtatatatataggttcattttagctgtgagctttctgcctctctcacatcacatgactgatgagcctcattcatgtcatcagaaggtcctactgagggatgtcagagattttgtctgttttcttcactgctatgttcccagtgcccacaacagtgcctgctcagcctaagtgcacaataaacatttgttgaatg

SEQ ID NO: 27810 - DNA, 201 bp, Bos taurus
acagaggagcctgacaggctatagctcatgggatcacaaagagtcagacgcaaccgaagtgactgagcacagcacaatggcaagggcctatatggcacggctctacactttatcaaatttattacacttactattcagaggggggctttcctgaaggctcagtgggtaaagaatacacttgcaacgcagaagacacaggag

SEQ ID NO: 27811 - DNA, 201 bp, Bos taurus
gtggacatggagacaatgctgcctctgtttgtggcccgctgggctctgaccttgctggaggcaaagtggtgtcacagctgcacttgcaggacggtcagtgatggtggaaaaggggccaacgtggtcccctctcaccctgtctgcctgtctgcaggtgtggcgacctctatttgtatattttactgtatttgtttatttgcc

SEQ ID NO: 27812 - DNA, 201 bp, Bos taurus
gggcagctccctctcatatctggtcaacagtatgtgtttatgaaaactgcaggggttttgccatattgttttataaaaatgagtagaaaatggaatactgaatggactggtgtgtgtgtgtgcgcacacgcgcgctcagtcatgtgcaactttttcgacactgatctgtagccctccaggcccctatgtccatggtatttt

SEQ ID NO: 27813 - DNA, 201 bp, Bos taurus
aatacatatgatcataattgtagagaagaggagcaaaggacttagccattttaagtagttgtttcatcccaaatggcactgtaaggttgggcaggtcgtgcactgcacaagggcacctgactaagggggcaaataaggactaaaatccagcgatctgccttagtgcaaggttgcatctatccaggaaaaaaaaaggtgtcc

SEQ ID NO: 27814 - DNA, 201 bp, Bos taurus
caaaggagctcaggactcaccgtcctttctgggcgagggagcgcagaggcacgtattaactgggcatctcaagtctccaggcacaagcagccccaggggatttggtggctttgccagcccagggcctctagagggccctttgagcatggccgtccagccccaggttgcctccggccttcccctgctgccttcacaagatga

SEQ ID NO: 27815 - DNA, 201 bp, Bos taurus
gcactgagtaatctgcattcccttgccgcccaaccctgccccccgaccccaatgaaggacggaagcagctggcatcaggggtcagagccaagggccctggttttcaagaggaccaaaccttatgagcccagctggcacatagtcaccattgaaattaaactggttccctcagggcctaaccccagccagtccctcccaact

SEQ ID NO: 27816 - DNA, 201 bp, Bos taurus
tgaaatcctgttttattccccaccacgtccaagcctttcatcctacccctcaagaccaccaacggtgccagccgtgtctacttcagagttggcctgccttcaaggtccccagcccccgaccacgctgttccaaagaagtcagcaggctgcctccaggtccccttgtgcaaacacactttcgagtccggctcttttgctggc

SEQ ID NO: 27817 - DNA, 201 bp, Bos taurus
tttgtatagggtgtgtgtgtgtgtgtgtgtgtgtgtgtttatggccagggctgtctccccaacactaatgttaactcaagaatattaggccggaacttccgtggaggtccagtggttagactctgctctttcagttcagggggtgcaggttcgatccctagtcagggagctagatctcacatgctgtgtggccaaaaaaaa

SEQ ID NO: 27818 - DNA, 201 bp, Bos taurus
tctcgattgtattttggcaactttcctttctcagcagatgtaattcaacctgctcaaagagccatcattctgaggcttcttccagctctgaggtgtctggagacaaagatctgcaaacctgacatctttctcgaacttcagagggaaggtattttagaaatctggagggcagtttcagcctcccagcagtagtaatttcag

SEQ ID NO: 27819 - DNA, 201 bp, Bos taurus
acaggacacatgacctacgacactggacaggtgagacagtgattagtcacatgcagtcccagtcccaggaaggaggacacagcatggcatgcatggccatttgagggttgcactcaggaatcgcatgggcaagaggggtgaaccctggtttccatggaaagatgtgataggcctgtttgaataattttgcaggccagaaac

SEQ ID NO: 27820 - DNA, 201 bp, Bos taurus
ttgcttccttgatctgccttttgaaatgtggttaaataggggaaagagtttccttgcttgggcagtgggtctcagccaccacttctacaatggccacaggacacctagctctgcctgacttcctgctattacccaaattctctccctaccccatgtcctgcaccccaggcctggcctaaaatacaagcagtttgatgaaag

SEQ ID NO: 27821 - DNA, 201 bp, Bos taurus
atatttatcatctggggcctcaactcaggtggctttctgagactatttgagttccacttaactactgtacattgatcatttgcaggagaccttttgcccgttggccccttgctctttattctactgagcaattgggaatacacttgactttcaaaggctcaacttgcgccattcaaaggaaaaatgtccacctcattttta

SEQ ID NO: 27822 - DNA, 201 bp, Bos taurus
tcttttcagatgtggatgtagacagtcccggagtttgtggccttgtttgcaatgaggataagctcctgcaggccctgcctgcttccttatccgcagctccgtgtcctgcatctccccatcctcaccaggcacactggtctccaattgtgtgtgtttctcactcagtcatgtctgactccttgcaactgtggactgtagccc

SEQ ID NO: 27823 - DNA, 201 bp, Bos taurus
tgttttcatgtggatgacggagcttcataaatttgtcactgctgggccatgtgcagtctttgatcctttcagtggggccttgtttggagccgggagctgcatgggtgtgacacatgtgtctctgcagccatccctcctgcgtgttgaacttggccgttctcatcagaaggaaagatgggaccagcttttgagaaagggcca

SEQ ID NO: 27824 - DNA, 201 bp, Bos taurus
gaaagactatttgctctgggttttctgttcaatccaaaccaaaaagcaatggaaacacatcagaagcaaggctatatgtttcatcccaattttcactgtggtcgggtacttttatgcaggcagagacctttaaagttttggggtgtacttctccaaataaagttagacttcttaggctcttccctcgctaaccggtatgat

SEQ ID NO: 27825 - DNA, 201 bp, Bos taurus
gtgttgtacaccctatgggcttgggcaaatgtgtgatgacctgtatctaccattatcgaatcatgcagaataattttactgccctaaaaacccccctcggttccacctatccctcctttcccacaaaattaacaggaatatatttttttttttttgctacttacatcgccctagggctttcctggtggctcagatggtaaa

SEQ ID NO: 27826 - DNA, 201 bp, Bos taurus
ggcaggtgggcggctgccacccagacgcagttcttatttgccttctaagtccttgtctaaatctgcatggagacgatggaggcgaattcagaagaggatcgtgaacacgtttccgggatgctaatccttggtcacgtcttgaattgttgttacagcctcctttttgtgccatcctgtccctctctaccatccccttaggct

SEQ ID NO: 27827 - DNA, 201 bp, Bos taurus
gggaggctgcctgccggagggaccacgattcccaaggctgatgcctgcccttccctctgttccaacagcctcaactgtaatgaagagtatgtggaaatcatagacgggctgccagacagtactacatttgggaagttctgttcagggggacacctggtgtttcgatcttcttccaatgtcatgactgtgaagtactacaga

SEQ ID NO: 27828 - DNA, 201 bp, Bos taurus
ccaggctgcacagtgtagccaaaaaaataaaaataatctataagaagatggacagggaagcctggtgtgctgcagtccatggggtagcaaagaactgtacctcaccgagcgactgaaatggtaagattatatctcaataaaactgaaaaacacacctcaaaatatacagggatggggagaaacataaaaatatacataaaa

SEQ ID NO: 27829 - DNA, 201 bp, Bos taurus
taaagtgattgggcaaaacaataaatataagaatggacaagacgcttggagagctctgcccggtaagggaggcccaggccattctctctcctccagcctctctgcaagtttagatttcgtgaagctgcttcagagcacataggttttgtgaatctcggccctggctaatattttgtcatgtaatgcctgttctctcagctg

SEQ ID NO: 27830 - DNA, 201 bp, Bos taurus
ggcctctccgttcttggctgaggcttgtgcaagtcatcacctgcaggagcgcctgcctaattcacacagaggctccagaggcggcacagggttaacctggctgcattggcctttggaggcccatgtggtcagggagcaggtggggacgtgggctgcaaggctaggggacctttgagactgcctctcacctctgccacccca

SEQ ID NO: 27831 - DNA, 201 bp, Bos taurus
gatcagagttgctggccagcctcagaagaggagagaatcaggacaaactgctctgaatgatggaatgaggcagcgcatggcagggtgtaccttcgggcaggggggacagcaggggcaaaggccctgaggtaggagcatgctggcttatctgcagaacaaagacaaggctcctgggctagaaatgaaggagcaaagggaagg

SEQ ID NO: 27832 - DNA, 201 bp, Bos taurus
ggagcccacacaggagcaccccacacccaggctacactgtggtgaaggctgtttctacaccaggtccctggggcgggggcgcagatggcctgcctgcacaaaggtgcggacgctgacgccaagcagctcacaaatgggaaatgaagcattctgcggtgtgtgttccggccagcacacactcaggacaggacttgtgaaacc

SEQ ID NO: 27833 - DNA, 201 bp, Bos taurus
aggctgctgcatctccagccagcgcaaactttccaggggtttgtcccgagtgacgaaaaccccttgcatcctgagttgtgtcctagcagcttgggcagaatggcctcacccgaaattcttcgagggatgatgagaacagagccgggggagggggtgaaagcaggaggaagtgaaccaggctccccggccgcagagacagga

SEQ ID NO: 27834 - DNA, 201 bp, Bos taurus
accggacttctccccaaaccgcagtccaggcctctgcctccttccagagcccccaacccttccacctgttgacagatatgatgaccttcactcttgtgtttcgtaaacctcgctgaggccctgttcctctgctttgtgaaaagccaggccagtcctttccttgcactgctgcccataccagttggattcagcgttctgggt

SEQ ID NO: 27835 - DNA, 201 bp, Bos taurus
tcaataaaaagcatcagacgggcatgtcagaaagagctgagatcctgctgtaaggacttcgtcttcaccctcttttctcagctgcttaaatcgctgtcacagcctacctgtaggaatcttagacaagggggttttctctgatataattatgctggtagtaaaaatcttggcgccttttctccactttccttcttagccact

SEQ ID NO: 27836 - DNA, 201 bp, Bos taurus
catagggtctcaaagagttggacatgaccaaagtgacttagcatgcacgcgcaaatgtttgtataaaataaatgaagaaatggataaacaagtgaacatacaaaatcttgtaagaaaaactcagctgacttctccctactctgttccccatcattctaaccagcttacttttggagatcccctgaatcagcacacactctt

SEQ ID NO: 27837 - DNA, 201 bp, Bos taurus
tgactctaaaggacacacacccaagctgtgatgcaatctccactagcttgtaatctgattatgtggtctttccttcccacttggccaggtcatctactcaatgtgaaaggaaatgaagaagtggcatgccttagtaaagaaagaaggcaaagtcctaaccttagctcttgctacatggccaggatacatcatttaatccct

SEQ ID NO: 27838 - DNA, 201 bp, Bos taurus
gagaagcgagccctgaaatgagcacacggccccacgagtcattcacaaccgaagctacacaccaggatcaccggagatgcttcgaaactcctgacaatcgggtcacaccgagggccagtgacttcagaacctcaaagacgggctcttcatctcgtgaagcagaatcacctggagggcttgctaaaattcaggtggctggcc

SEQ ID NO: 27839 - DNA, 201 bp, Bos taurus
caccactgggtctcttggggcttctgcctttgcaaactctgtcttcattcagctctcctccaggtgggcctccaccctctccatcaggtcctcctggccaatgtgccaatgcatcactgcctattagagcccaggcaggactcttgtctttatcacaacaacctcaggggcacacccactatatggcagggggcgaggggc

SEQ ID NO: 27840 - DNA, 201 bp, Bos taurus
gggtgtgtcttgtttggagctggttggttgaggcctggttggaagaagggagtcagcttgttaattcaacgagccatgcatctccctgctcctggcttcattgtgcctggcctgtcccccccagagcagcagccaggtcatcctctcatgtccccctgctgccctccatgaagcctttgaggggttgtcctctgtccttga

SEQ ID NO: 27841 - DNA, 201 bp, Bos taurus
cctaaggagaaggattaaattagatttcagtttaattaagaagagacattaagtgctaagaaggaggatggggcctgtgtggagggccaagggccagtgtcatgtctaaaatgttctacatccaccccgagaacccattttcacgcccaaagggagacagtgccccgtggagaatgcacggcctggttggtaatgagatgt

SEQ ID NO: 27842 - DNA, 201 bp, Bos taurus
gtgaatctcgaccagctttgccttcctcgcgtgttttctcatcttgaggcctctgcacagaggttctgtcctcagttccaggcctgaaagtctgatgagaaccgctccagcggtccccggaatcatggctggaacactgccctgaattcagggcttcctgtgcagtctgagtccaggggagggaaaggtcgcaggggccgg

SEQ ID NO: 27843 - DNA, 201 bp, Bos taurus
gacattcaccccggagacctggacacacaggctcaaacagacagtgcgacttctacccttaaaaatgattaaagtggcaaattttaaataaaggccagagtaaaagcaaccagccagccagtcaggagagcgaccattccatcagaggctaccttctcacgcctcgattcaaccgcaaggcctccttatcaattgacaccc

SEQ ID NO: 27844 - DNA, 201 bp, Bos taurus
agcgaagttctgtgggggatgtgcgccccaccccaggcccagagcaccatagtgggtgtgggtgcagggttccttttcctcccatctgcttccctctttacgacacttagatcatctgggaagtggcctctgtagggtgcaagaggggacttacggctcaatgatagtaatctatgagccagagaaagtgcagtggagcaa

SEQ ID NO: 27845 - DNA, 201 bp, Bos taurus
tattttgtgtgtgtggccatacacatttcgtaggaaatgtatgacttagatattcacaccattggtcatagccataaggagcaggccacactttcagaaatcagtagccaaggattaaaggatccaacagatggaagatgacagaccctctcttccaacctggccatttacagatgaagctcagacggggactctgcccac

SEQ ID NO: 27846 - DNA, 201 bp, Bos taurus
aagttgaatccagtcctagctaatacaacaagtcactgaatttgtcggcctctctgcttctgggtaaaggtagagggggccacagggagcactgctagattctggtggtctctgcaggtgtgcccagccagtggcaggaatgacagcctgacagctgtgcaaagagatcaggagcccagatcaggaggccggagatcagaa

SEQ ID NO: 27847 - DNA, 201 bp, Bos taurus
ccaaccatccttctctccaacttggttccagtttttaattatatggagcccaacagatgtctcttcttacagccaaagagcattttatcttcattcatatgttttatgcttttgatatatttcttggccgcccattccctaggctggaggatcctggggtcggggtagtagggtgggggcgagtggccctgagcaggagcc

SEQ ID NO: 27848 - DNA, 201 bp, Bos taurus
ctagacttccggcctccagactgttagagaataaattcttgctctgttaagccacccagttcatgataatctgttgtagcaggcacaggaggctcttacgaaggccacgatataaacagttttacaaaaaggtagaactcagtgccctgcaggctgttgccaagaatggagagaatgctccaggtctgcccactttgagtt

SEQ ID NO: 27849 - DNA, 201 bp, Bos taurus
gggaatggaagacccacgaaggaaaggccgtttagttttgtgtcttcaaacctgaaacatttctaggtttgaccggagtcctgtcaaactgagcacaatcgggtgtgaggcccgctccttgggctttaacaaactgttatctgcaatctgctgcacaatctgaaaaggcaagaaatgcggctttccctgtttagaaaatct

SEQ ID NO: 27850 - DNA, 201 bp, Bos taurus
acccggggcctcctgccccctagggagccgtctggccagggtgtgcccactggtccccatctgtcccttctgcaggggctgcactgggcttccctgggcatgcgcaccctggactttgtggccccttcctcggcagaaacatattaaaattatattttaccactatggcaacccattccactgtgcttgcctgggaaattc

SEQ ID NO: 27851 - DNA, 201 bp, Bos taurus
gagggtcaggtggttcatgttccatgtccttggagcgaaggagaccctgcacgtgcgcagaaaggctccctgggggtcaaaaggcagggcatgccaggccgtaataagtcttgcttctttcttcccagatgcctttgtgttgaaatctaccttggctgaggggtgtgtgcacacctgggggagggtcctgagacagattgg

SEQ ID NO: 27852 - DNA, 201 bp, Bos taurus
aaacaaagtggataagcaacgtgtggacggagtgccaagtcacaggttctccagagtggggctgacttgggggacgacatcgggacaagaggggatgaggttagagaagcagccaggccatgaggctgctgtggaggcaaaccaagcaagtgacagaagcttttttaaaaactgggagatacaccaaacctacccatgcac

SEQ ID NO: 27853 - DNA, 201 bp, Bos taurus
gtcggatgcctccctgcatagctggccgcaggcgggcgagggggagccagctccttgggcacaggctggagcccggcctctcccaggcctcaggggtttctttccatccctgggaaaatcaggaatactgacaacgcttctgtacacacactcttaaaggtggctcattatacagaaacctaacataacctagcatggcca

SEQ ID NO: 27854 - DNA, 201 bp, Bos taurus
gtgggggagtcctcatccccagctctgcctgcagggctcccaggcagcttgcctggggactcagatctccctaatgagaggatcggcctttgcaggcagatggcagctgagagagaatttacaatgacacttggtaattgaacccccaggggttgattccactcctgttagaagcccggggagcctcctctgttggtaaca

SEQ ID NO: 27855 - DNA, 201 bp, Bos taurus
gctgagtgccctagacagcccttgtaagtatggacccttggcacaagtgctttgagaaagatgaagtctagaaattggggtgaatggaacccaggaggcccgaaaacacacatgagtcatcccaggaggagactgaagggagcagggtggcgcatgtggtgggaggctggggacccgagcatatgcacagtggtgcccttc

SEQ ID NO: 27856 - DNA, 201 bp, Bos taurus
gaggcccaggtgataacggggaggtggggctgaggaatctgatcagatatccagcgtgggggatttgtgctaaagctgaaccaaaggtgcaaagacagacccgaggtcgggccttgaggatggagggcagcctggctcgagctggggggaccccgatcgccagcatagccagaatccagagtctgtgcttgtttctgacct

SEQ ID NO: 27857 - DNA, 201 bp, Bos taurus
gaaacagatagccaaagggaatttgcttatgtcttaggaaactcaaatagggctctgtatcaacctagaggtgggatgggaagggagataaagaaaagcgtcagctctggttacttgtaagcaagagacactattttaagtgctttatatgtattgtccctttccttcttgcatcaatcttgtgacttaagtaatcgtatt

SEQ ID NO: 27858 - DNA, 201 bp, Bos taurus
aaccacagcacatctgtgaacaggcccagattcagtggcaggacagcagcttgtggatgacaaaggcatacagaaggggctttctggggggtcaggctaacggcccacagaacaagagtctgttcttagtgtccccagggctggaggcgatgtgtggctgcaaagtaaatccgttgtgatagagttagggtccctcgacct

SEQ ID NO: 27859 - DNA, 201 bp, Bos taurus
gctgatgctcaggcctgagttggtgttaacgttggctcagctgtgggaggggcggggggttacaaacagccctgcacgtagcgacctggaagagacctgatgcatggccgcaggtgatcccagtgatccctgcggggctggggaaaggaacacgcacagcaaacttaggggaatgtgaactttaattaaaggtggaggtac

SEQ ID NO: 27860 - DNA, 201 bp, Bos taurus
caatggcaggtggggaagtccatgtcacatatctacacacacctatgtatgtgtttttacaagcagattctagttctcgtttttactgctctatttaccagctgaagacctgactcaggccttccacacctgcagccctcacctcccctccatccactccctgaagtcaaggcttttaataaagcctccacttagatattc

SEQ ID NO: 27861 - DNA, 201 bp, Bos taurus
agctttaagccaactttttcactctcctctttcactttcatcaagaggctctttagttcttcttctctttctgctgtaagggttttcaggtaagatcatgcaactgagacctgggtcacatggctagaaaatttcaggtttagtgattaaatcaaaattacttctgtctaatcacactgtctttccatcaataatgatggt

SEQ ID NO: 27862 - DNA, 201 bp, Bos taurus
tcctaacctcaactatctattctggacccttaatttaacccatacccttctcaatgcttcttacccacaattgactaaagactgctggatacgtctatccataactcccctgggagattcagccctccctacatccatccttgactggaccacaggtaacatgtccctacaccactcatactgtagggagcctttattcat

SEQ ID NO: 27863 - DNA, 201 bp, Bos taurus
tcacccagtgagacagctgccttccatgctggccatgaccccagcttggaaaccgtctgcagagcagagcctggggctcacccagcctgcccgcttcattcgcaggccagcggttccgttcgtatttgtccaggtttcgtagttattcatttcaagaggccgggtctgatcctggctacttcactgtgggcaggaacagac

SEQ ID NO: 27864 - DNA, 201 bp, Bos taurus
atagctctgcaccggacctgggagccttgtaggagaaccagaccagacacttctgcatgcccagcacgcctgcccattctcctggaggcatgctgaggagcagtccaggcccccaagtcagaaacctgagaagtgttctcatgagctcaccctcagctcccaccctcggtcactgcgttcctttctcacaggcaccttccc

SEQ ID NO: 27865 - DNA, 201 bp, Bos taurus
aaagggaataaaattccttgtgctttatatttgttttttttgttttattgtactaatatagcattatattgcctggcaactcagaccaacaatctcatactcatgtcataaaatttatcttctgtctgagagcagaggttttaaagtcagacgtctgaatcagctccagcctctggcattcagcagctccatgacctgagt

SEQ ID NO: 27866 - DNA, 201 bp, Bos taurus
ttaagaatctgagaaaatggagcagagaaacctagaatcttgaagcatcagaagtgcctgtggcatctgtggggaaattccagccacgctgatcagctgccccctttcagcccatccgctaggcatgtcctcacctggagatttcaggccataccacagagaaatttcatgccagtagcaattattctagtagtcatgtat

SEQ ID NO: 27867 - DNA, 201 bp, Bos taurus
tcctgtaaaggtgttatcatattttcacaatttaaaaaataagaaaagagagagaaaatacactttgcaatgcacagtgtcacaagctttaatacatgtggacagagcaccggatgaacaaagtgtcagatatgtttattctgttcaagttgcctgggaagggtcttgtcaggcagagagaaatagcaatgataatccaat

SEQ ID NO: 27868 - DNA, 201 bp, Bos taurus
tagcattttcagtgagaagggcagcgtttcaaaagcactctgggaagctgagtaaggatcttgcttctacagtgggtttaatttcaaggtaatcatggtgatatctcaggccctgagttcacaaaaatctgcaagccgagctatattactgacatcaggacgtagcaggccatcctctgtgataagaagcgctgtatcacg

SEQ ID NO: 27869 - DNA, 201 bp, Bos taurus
gttggcagaacagcagaaacgaggagaggatctttcaacagtgaaaggtctgcgctgggggcaggggagagaagggggaggccagagcactcaggatgggattcaccagctgaggatcccttttgacccttcagcttcttccacgccagttggcagaagcccccggggcctttttctgcactgctctcccatcaaccacag

SEQ ID NO: 27870 - DNA, 201 bp, Bos taurus
aggtttatggctctaagggagatgaaagggaaaactttgtaacaggaaaaagtgaatgtttggatttctagtggtgaactggtaagggactctttgggaataaaccttgctcggtagcatttgctggtttcctgtgtcaccctggggggatggcaagcggggtgagaggaacacaggtcttgggagatgcacacaactggc

SEQ ID NO: 27871 - DNA, 201 bp, Bos taurus
ccagggtccgtgtttttgatgatacatttgatgaagcgcatggagcgtcgaatgtacaaccactgggttgctgcccatgtggctcaaacctacatgaggagggcaggctgcccgatccacagtggcctggactgtgaacagaaatcaccttttatggccatcccaccctggagtaccaagtgttttgttttttttttttgt

SEQ ID NO: 27872 - DNA, 201 bp, Bos taurus
cacccaaagcacatcacctgccctgcaggtccattgtcttgctcactttgttgcgtgcagctgaagagaagattaaaggtgtgcccagtcagtcctcagcgcccccaggtttggaactttgcttctaaatgtccctataagctccagctgtaacagcaattactgtcttctctctaacaaaggaaggaacttagtttaaaa

SEQ ID NO: 27873 - DNA, 201 bp, Bos taurus
agaagtgggcctcagggtggattcttgtgactagcctcctgtatacatcccctgagacaagagacaggtgggctccagttaaagtgtttataatcagcctgcttttggccctccaaaatggaagtagcaacagaaacagggtaaataacaagactttgtctcttgcaaacaccttaagataatacttgtgacaatagtcag

SEQ ID NO: 27874 - DNA, 201 bp, Bos taurus
ccaactcaaagcagatcccttcagatttgcatatgtttactttttgagtctactatggtgcctagtttctttgtctttggccaaatattctgaatattgcatatttttatgagtgactcaatggatctgaattttagcaaactcccggagatagtgaaggacagggaagcctggcgggctgcaatccatgggcctgaaaag

SEQ ID NO: 27875 - DNA, 201 bp, Bos taurus
tgcagccaggccctgccctcactgaaccccacagggaggcctcaccacacatgcctttacaactcatttaatccatttccagccccacaggcttggcagtagttgctgctggccaagaccgtgtgtctggtctaccacaggccttttgcagatcagagttccagcttcctacttctcctgactgtcattaatcttgggaag

SEQ ID NO: 27876 - DNA, 201 bp, Bos taurus
gtatttgggccacatttttatgccttttagtgagagttcattctttgtcccagtttaggagaggctgaagtcaaagttgaagatgttcgtagcaagatcatgtcatgcagtcctcaggcccacacgtttatccaggtctgcacactgcagggaacagttaagagccggaaagctgtgtcatgaaggacagctggaggggcg

SEQ ID NO: 27877 - DNA, 201 bp, Bos taurus
tagatcgtaaatactgtaggttttgtgggccacctgggctctgctgccactagtcaattcttcacttttgtagcttgaaggaggccactgacaaataagcgaaggacacagctgtcttccaacaagacgttctttacagaatcatgtggcagaagcactggcctgtggacaactgcctgtcgatttctattttaaagtact

SEQ ID NO: 27878 - DNA, 201 bp, Bos taurus
tgtctctccaccaactgtctttccaccttctccctgtcacagccttgcttcctctccattaaaatttcctcatttccatattcccactcaattttcaacccaaccagtcttgtttctgtgtttgccatcttttatgaagatggacaacatacagcttgcattccgtgtgaagttttagagtgatcacctccactgagcact

SEQ ID NO: 27879 - DNA, 201 bp, Bos taurus
ctgctaagtcacgtcagtcgtgtccgactctgtgcgaccccatagatggcagcacaccaggctcccccgtccctgggattctccaggcaagaacactggaatgggttgatattggcccataacgtagaataattacatgttttatactttgcttctcagatcatagcaaacaccctcttccaacaacatgagatgactcta

SEQ ID NO: 27880 - DNA, 201 bp, Bos taurus
caagcaatggggccagaataactgccaatactaaaatatcttacatgccaggcaaattcttagcatttttaaaatcacaacatagaaaatacttctaaaaatcaatacaaaaaaattaacatggatggaaaaaaattggcaaaacaaatgaacaagcatttctcagaaagagaatcatgtccattgaacatgacagaagga

SEQ ID NO: 27881 - DNA, 201 bp, Bos taurus
gctggataaattttcatgtggagggaagaactggagagagcagcagaaagtaaaaattcagagatttaagaacatttaacatacttctcctgccccactgcacaaatccatctgtagaggctggaaaacttatcacctcaagaagactgaacacaattttttccccaaatcactggctgaccagtatgttattaagtctta

SEQ ID NO: 27882 - DNA, 201 bp, Bos taurus
acacccccactgcatgcataagaaatggcctttccatgtaggacctgtcagcttctgcaatccacttctgtgttgatccatatacaatgcttcttctgacactggctgggatccaggcctggagaaccgcctagcgagaagcgctcctgagcaggcacatggctatatacagtgcatctgtcacgccaatgggtgcaaact

SEQ ID NO: 27883 - DNA, 201 bp, Bos taurus
ataaaatgcactctacagtgatcaaagctattatagtctactaaaatttatcttgaatataatagaaggaaagggccacatactaggtgaatgtctttatcttcaattttatagacgttcttgaatggattctgcctttgatcattcaataatggcctctcctgagaaccaagtatcttgaaagtgaaatttaagaacctt

SEQ ID NO: 27884 - DNA, 201 bp, Bos taurus
gctctgtcgtgtccgactcttagccaccccatggactgcagcccaccaggctcctctgtccatggattttccaggcaagagtactggagtggggtgtcgtaggattcactaaattaaggaggagagtcatcggacttgtgggtccattgtccctccttttgttgtgccagaagctttttttctccagcgtatgccctgatg

SEQ ID NO: 27885 - DNA, 201 bp, Bos taurus
ttaattaaaaaacatttattcggcttaagttgcattagtatttcaggccacgtaaacttgtagctaatcttcaatccgcttgggttttaggtgtgaaaagcggaccaacaaggcacagtgttgtggccagctcacggaaaggctgccaggacctcctcagactgcgggaggaatccgggaagaagggcagaggccaggagg

SEQ ID NO: 27886 - DNA, 201 bp, Bos taurus
tctagggactaggggctaacggtgcacccagagtgcacctaggcctgccccttcactgggcgcacttgtctgccagcctgttgtgagccagccgagagcagcagctggagcccagcgccagatcgcccgtccccctctctctgccacctttccaggctctccccagcaccgtcactcggcccatgttgccttcctggtgat

SEQ ID NO: 27887 - DNA, 201 bp, Bos taurus
tccgtcagctccagaagtctccctctctgccctcctcgggttccggcagactggacatcagggaggcagggtcctgcagcacaggccttctgggtggttgataaacaaacctgctcgcagccaccagaataaccatgtggacccacgccacggaggatcattcgggcacttcctacctataactcatttgttctggcctat

SEQ ID NO: 27888 - DNA, 201 bp, Bos taurus
tgtcagacagcccccttcaatgcgtggaggccacctgcccatgggaaatggatgttatgtctatactgtatgtaatgcaaactacccatacagtgagcgcgtgtttttttgtaatacataacgggtaagcacacattgtactctgcatcacacagtaaacacgatactaggcttgccttttcctgccttaaatctgttgta

SEQ ID NO: 27889 - DNA, 201 bp, Bos taurus
aacgtaaattgtccttaatatacacagagcttctataaagcaataaggaaagtataatcaaaggatttaaatggataataccatgaaaagaaaaatcaagcggctctttcacttatggaaatagactcaacctccatcattcagttcatttcagtcactcagtcatgtccaactttttgcgaccccatgaactgcagcacg

SEQ ID NO: 27890 - DNA, 201 bp, Bos taurus
aacatttgcatgtttaatgtcacgtgagccttcgtgcattcctctctccctggacactcagggcatccctccacattcctgaacctgggctggccgagaccgctttgccgggcaaaattcagccaaagtcgtgctgatccaggtctgggctagatttaagaggactggccactcccactcccttgctcttggaattctcag

SEQ ID NO: 27891 - DNA, 201 bp, Bos taurus
tgcatgcgtgtgtgaaatctccaggggacagagatgtgggacttggaatggcaggactcttggcagagtatctgtcggcctgccctgaagcatggagagcgtcatgtttcacttgggagcaagacctaagcctgagtgagatccctccccaagaagacagtccttgcctatctggaactggccctcagtcctttgagggga

SEQ ID NO: 27892 - DNA, 201 bp, Bos taurus
aaaactctatgctttcaatgcaggagacgcaggtctgatccctggtccaggaactaagatctcacatgcagtgcaacatggccagaagaattttaaaaagcagcatttactggtgagcactcacgcagcatgaaggcaggtgctagggacaaccctagtggcctggagacagtgctcaggatgggaaggtgggggaaagac

SEQ ID NO: 27893 - DNA, 201 bp, Bos taurus
ggctggtttctcaggcacgtgaccctggccgaccttgtgcacagtgtcatagacactgagtgtaaaccgctgggcagtccccagcctgtctctgccctggggcagctacatggggccagagagacagccagctctgccgttgcaggccaagaacactccttagtaggatttttctgtgaagcctctgaaaaatcagagttc

SEQ ID NO: 27894 - DNA, 201 bp, Bos taurus
atatgaatgaggacagatgactgtaaatattgggatgcgtttatcatacacccacttcaaggcaattaactaatttattcttaaaaaaaaaaggtgtcgttgtgttctataccataaaataaaaaagtgagcacacagagattcagtatcttggaactaggatttggacccaggcaacgctccaaagcctgtgcttttaat

SEQ ID NO: 27895 - DNA, 201 bp, Bos taurus
gttatgatgaaaccattttatttttcagaaagtctttgccttctccccatcctagtcccatcagcagatgtggaagcaggactcatcagagagcaaatttgggagtggtacagggggctctctgggtttgggtcacaccggattttcctcaatggtcccaaacaggaatgtcaggacggtcacctcaaacaggagatgaca

SEQ ID NO: 27896 - DNA, 201 bp, Bos taurus
ccacatccatcaccctggatggaaggtggaaatcaccctgcttgctggccagcagcattcagcatccccatggcttgtgctggcccaggcttctggggacgaacagagagcatgggaacacccaagcttcttgtccgtctctggcaggtcactgggctggggccatagggatgccagggccattggggccactcacctgga

SEQ ID NO: 27897 - DNA, 201 bp, Bos taurus
gataatgtggtatatatacaatgaaatattacttagacataaaaaatatggaaatatttccatgagtgtaccttgagggccttatgccaactgaaataagctcacttcagttcagttcagtcactcagtcatgtctgactctttgcgaccccatgaatcgcagcacgccaggcctccctgtccatcaccaactcccggagt

SEQ ID NO: 27898 - DNA, 201 bp, Bos taurus
ctagctaaatgaagcttattcgtttaaatctagaaagaggttttttttaacttgtatataacatgtataatagtatttgcttacattcttccatggatccaggtaatggtttcatcttaataactcaggatcattgctaccagcgttcagcattacatggagtcatagagcaagagtgaacagagaacggttaaggaagct

SEQ ID NO: 27899 - DNA, 201 bp, Bos taurus
tctcctctttcttcctttcctgtctgttccttgtctcagacgaatggtggcgagagttacatataattaccaaccaacataagaggacttttcatgaattcttcacccaaaggccttggactgaactttctgtcaatgtcttgcgtatattggaggagcagggcaggcagagcagagtttgttaaaaataatgatagaaag

SEQ ID NO: 27900 - DNA, 201 bp, Bos taurus
cacttccttcctgacatacagactgtctggctggactccgcagtgttggatactcccggattgggagtcttggctccattcctctctgttgaaggcgtgggatccacctctcctcttaggagatgctacgggtgggaaaccctgctcttatactgaaggtgtcaacacgctttgtctttattcacgtgtccccctttcacc

SEQ ID NO: 27901 - DNA, 201 bp, Bos taurus
tacaaattaaatagtctccttaacatgaacactgagagcaactttgtagggagggctgccttgctgaagtccaccagaggcctcttcacgggcagggagacgcctgtggctgcacttccttcacattctttcgtgctgtccatctaccctaccctttccctccaaagtcttccttaggcccctcatcagcagctaacatcg

SEQ ID NO: 27902 - DNA, 201 bp, Bos taurus
ccagtaaattagcatgttgaatgtctcatccaaatacaaatcaaattcaagcaagatgtccttacaaggagaaagcaacaaagcacggatccttaactaattttgtaggacaagagattgaatgaggtcccagtttttagacacagtgtaattcacctttcaaataacttttttgttgttgttatttcctggtagaattta

SEQ ID NO: 27903 - DNA, 201 bp, Bos taurus
accgccagccctttgaggatgctcaggggccggccctggtccccgggtttccctgagcatctaggaccgtgtgtcccaccaccttccggccctgtagcttcagagggatagggagtctctctgcggttaaactggcagaataacaatcttgtcacctctaactgctcgtgtgttaaatgtgtcctgttggttacaagggtc

SEQ ID NO: 27904 - DNA, 201 bp, Bos taurus
tagaaatccctataatgctcttaacatactaataatgtcatcccacagatagatagtaaaatattcccaatcaataacaaaggcgaaaacttgacacatgtgatctgataattatgggagaacgtgtatctgcacacctagccaatttccagtgtctaacttagcactaaaagaagacaaatttggaagtttccaaactgg

SEQ ID NO: 27905 - DNA, 201 bp, Bos taurus
taagaaataatctgtagtggaggattttttggtcattatttctattttaattttgtccttccaattcttgtttaggggaaacttttaaattccctgctgtgtagagtttcttttctttacttttcctacttaaaaaaatcatctttatatcatgatcaaagaaaatggtacttataacacaatacttgtaattttgatctt

SEQ ID NO: 27906 - DNA, 201 bp, Bos taurus
aaatgtaaagagaaataaacaaaatagacatcagaaataataaaaagaaaataattcataaatacaaagacaatggaaatttttaattcattaaaactcactaaagcagataatgtgcaagaggctaaagattttgtaaaaatagtcagctgcattcttacatttagagcagatggttttacctgaagtttcttttatgtt

SEQ ID NO: 27907 - DNA, 201 bp, Bos taurus
gattttcgaggtgagaatactgttgccatttcctcctccagggatcttcccaacccaggggtcgaaccagcgtctcctgcactgataggaggattctaaagcactgagacactataaccaaaacaaggctattcaggggccattctaatactttagtagaaagttatgggagatgacatctgtcttcctgctaaagatgct

SEQ ID NO: 27908 - DNA, 201 bp, Bos taurus
aatcctatggacagaggagcctggtgggcttcagtccatggggtcacaaagagttggataggaccgaatcaactgagagcaggcaattgacactttaaacaaaaagcaatctgcttggaggtggttaacctgtccattatatgtggccacacatgcactctcaatttagtgttagtttttacacaacaaattcatgtaata

SEQ ID NO: 27909 - DNA, 201 bp, Bos taurus
ttgaatattactatgcagaatgtgatatacattatattttttatgccagctttggatcttggaataatattttaaatatttcttcacatagatcacactctttttgtattatgtttgtatttaacatagctctttaagaacagactttagcacagttctggccattgtaagtggaactttcttgatatattttctatctga

SEQ ID NO: 27910 - DNA, 201 bp, Bos taurus
ataactttaaactattttgtaacaaccattgtgatagacattaatttccattagccgaccttcaaaacttgccatttttaccatgacaacctgctcaatctgtcattcttctttagtatttatacatatcctcatcattaatcattcttctttaatgaccaaattacatatactataagaacattttacaatttctatgtg

SEQ ID NO: 27911 - DNA, 201 bp, Bos taurus
tatttatgcatttcctccttcatggacttgtaaataggagattacattttgtagtttagctattaataatatatattactaagttatacagttttgtttcgaattctggctccaccacttactatgtgcctatcactagctagattgatccaattatgtgaaagtttttagtataactggtattaattttcttttttttta

SEQ ID NO: 27912 - DNA, 201 bp, Bos taurus
attatctcctttaaaattcacactaatgtgaggaagataattgttattatgtttacagttagaaaaagcattttatcacaggtctctacataattgtgtttgtatagaaacatttaagacacggataaaatggtaaagatcaaaacaggattaatattttaagaaaaaattatccagaggagttacatgagaagtaacata

SEQ ID NO: 27913 - DNA, 201 bp, Bos taurus
agtcaaaaattagtcaataaatgaataagagtatttaaaatactagtccctcaactctggaaaaaaaaaaaaaggttgttctatgtcccttttgaagttcatatattggaataaactttaaagaccagaatattttgatcagggaaaatttatttaagccacaaggtagcctatatcaattccagcatctatcaattagtt

SEQ ID NO: 27914 - DNA, 201 bp, Bos taurus
tcttctgcccacctcattctctctcttttttaattatcaaaaatctgtttattattaaaattcattgtacaaacatttctatcccccaaaatattaattcctctagcctattttctcttctaaaattgctacttagactataaataagagaataaatcatgtaaagcatctgatttccagcattctgttatgggtcacaaa

SEQ ID NO: 27915 - DNA, 201 bp, Bos taurus
gtacgactccctcttttggatgtcagatttacacagaggaaacaatgtaatctcaaacagaatattaaaagagcattagttttggtgatgttttactcaacagacatgatgtttattataaacatagttctaaatcctttggaaaattgactcatcaaaattaggaaagggccttagcacagatatatagaaaaaattccc

SEQ ID NO: 27916 - DNA, 201 bp, Bos taurus
aaataagggcttttaaaatatgtttcccttttcaactggtaccaaaggtttctcagtggagactgctagagaaaccctgtgggaagaacatgttatgctaccttggtagatgccttcaatgtgtgtggcttccccaggtacagctcctgcactgggaataacttatcccacattaggctcttgaaggatgacatttcccca

SEQ ID NO: 27917 - DNA, 201 bp, Bos taurus
caaaaaattattagctaatgtctcttaattcctttattattttaacatccactgatattatatgccagtcttttactagctcactatttattaacatctactgattttagttgaagcaagggcttgttcttggttgcccttgtagaaaaatgtaggtataattcttttgcctccttatttaacagtaaatttatatattta

SEQ ID NO: 27918 - DNA, 201 bp, Bos taurus
catttcgctgccaacagtatttcatccagaatgaatttccttacctaaagctattatagctttgccaaggttgttgtaaatacgtacataatgatgaatcggtacaggttgatatcaaattgttttttcttttacttttaacttttaatgttttactgaagtatagttgagatatcaagttattgtattatcactctgtct

SEQ ID NO: 27919 - DNA, 201 bp, Bos taurus
caccggatgctgtgtcagactattcattattccttcccaatccctcacacctcatggccgccttgggccgctaatggccttggccacagaaaccaccaaatgtgcgcctgatgtttcactgccaatgaactgtatgaaccagcatagctacacaggatcagtgactaaccataggtgacacttgttaatttgtttttagat

SEQ ID NO: 27920 - DNA, 201 bp, Bos taurus
ttgagatgctccctggggggtctgttttataagggcactaatcccagagtattccacctaatcatttcacaaaggccacagttgctaattccatcacgagaggcagtcaggatttcaacatattaattttggtgtaatattcattccatagtacgccagaagcctttttgagcacaagggccattgctttgctcccatcta

SEQ ID NO: 27921 - DNA, 201 bp, Bos taurus
gaaattcctcaataccctcctccctcattattgaagaggccagggttgtggttccagagagtatctaccatttataggccaattttcaatgaggtaattcgagtcataaatcttagtgggaaatgctactgttgaacactcttggtgttccattaattgagagggatggtgggcctgtgatgatgctgtactaacccaagg

SEQ ID NO: 27922 - DNA, 201 bp, Bos taurus
ataatgagggggtacgaacagatttttatgcaagaaccaacggtgtaggggaaaatagacttcctagaattgtgctcaattccaggtacaataagtgaagatggggatttatagccaaagatggggagtctgattaaatcgatgtgataggattcttgctgaaggcaggagtgaccagatatcacctgagaggcagtgatg

SEQ ID NO: 27923 - DNA, 201 bp, Bos taurus
ccttgggatttctaatcaggaaatgaggatgataattattacttgggcaaagaaatgagctaatgtgctaagaacacagtaatccacggtcagcactgtatgtgttgcctgtcattttctttatcctctactagtggagaaaagctgtctttagtttaactttcaggttgaacttaacaatgtatttcgacatactttaaa

SEQ ID NO: 27924 - DNA, 201 bp, Bos taurus
ttttaaatttattatagtaagcattatttatggacaagagcaggttatagcacttcatagtgtgtagtgggagcatttttaatagtagaaatggttttgcctgggcaactttacattcttggtgtgtaattttaatctccataaaaatatgtcactgttgtgtaataccaaatgtaggattccagttgaaagcaactttca

SEQ ID NO: 27925 - DNA, 201 bp, Bos taurus
ctaacaaccacccccattctttatatcaaataaaagtgtaagaaagcaagatgactttataaagtaagatcattgaaaatgttacttagaattaagatctaatttcaagaggacaaaattggatgtgaggactagggtttatagttttccagcagcaatgctaagaactggtttttggccaagattataccatagcaaagt

SEQ ID NO: 27926 - DNA, 201 bp, Bos taurus
aatcaaattttatggttaagcaataacttgccttcatggacaattttttaaggaattaaaatacaataaaatacaatttatgaaaaaaatagtctaaccatgacttaagagttgatcattcaaagcatttggggaacttacaaagtgttagggatataatgatgaatcttgattatcattttactgaaactgtgcaggcta

SEQ ID NO: 27927 - DNA, 201 bp, Bos taurus
gctccatatcatttttacaactttggtttataaactactttagggctagtcatagcagatattgtcacatcccttatgttttatgtttaatgttattgctcataaccgatttttttagggaacattgcatgctatgtgtagtgtacaaactttatggacatgagcaagtttttaaagcaattgtgatcatcaaagtatagt

SEQ ID NO: 27928 - DNA, 201 bp, Bos taurus
acatttagaagagttctctgtgttttccaaatttcttgcttttgttaatgtatgattaccagaaaccatattgaaatttacaataggggctcgttacatgcgttgcatagtcatcaaatttccccaaattaccattgcatattttttcactcaaaaactgaattaagaacagattctgtatctttaacactgccccataaa

SEQ ID NO: 27929 - DNA, 201 bp, Bos taurus
aaatggaaagtatggttaatctaagttaaaaatgggttctttaaatagctctaattacattctgtttatatttgtatgtataagacacttaagatttaattggtagcagttctaacaaaccataatgtttattagctggttttaaattattgttatcgatggcaatggaacgaaaaaataaatgacttgtctactataaaa

SEQ ID NO: 27930 - DNA, 201 bp, Bos taurus
aagctacattaagggaaatccaatttctattaaaagctattggaaggattggtaaagagaaaaatggagtaatgaatcagcaggggtcagtgaaaaacatgcgtctttttaaatcagaaggggtcagtgaaaaaattcatctttttaaaataggattcatcaaaaagaagacaaaggtagggatttcaagatacatttcaa

SEQ ID NO: 27931 - DNA, 201 bp, Bos taurus
catcagtttcatgccaaatgatcttcagtttagtaccgtgatgaagccaaggtagtgactgttctccccgttttaacagataaagaaatgaagtcattcacacaaatgagaagtatctttgatcttggacaagtaagaaaaatgggagacaagcatgtaatgagcatcttcagcatgtaaggcatatgctggagaggaaac

SEQ ID NO: 27932 - DNA, 201 bp, Bos taurus
tatttattcgtttggctgcagtgcttgtggtgcagttaccctactgagcgtgctacgtacgttttcatatttattcttcacacaagagtaggagaaagccctttcctccattttccttggaggaaatgatggcctcgtagagatttttggactttggtcaaggtaacgcatctaataagtgttagatccaggagctttcta

SEQ ID NO: 27933 - DNA, 201 bp, Bos taurus
gccacaatctggctgtcagctcttggcacgtgatgcaaaggtaaagcctgacctgctaaattattcatcgtgtccttaagattaaaaacacggggaggtagaggaggaaaaagacacctgctcagaagcaagttcttcttctcagaagaaccgtaatactcctagtagtgggagagaaatttctcttgggctgtcttaaag

SEQ ID NO: 27934 - DNA, 201 bp, Bos taurus
aaaacaagacttaataaagatcatttctgaaggggatcccagagctcctgccagcgtctttctggctccagggttttccctcaaactggccctctgaatacgtttgccaagtgtggggtatactgtatgcgttcaggaacccctaaatgctgctacattccatcagtgatcaaggccttaaggtctttagcaaatacttct

SEQ ID NO: 27935 - DNA, 201 bp, Bos taurus
taagctctctaagctcaacaaaggggacaattgtttttcaaacccctgtttacatcatgtttgctgctgttccattggccaaagcataaccatgtcaaaaatccacatgagaaaaaactacccaaggacatggatacagggaggggaaccatgatggccattttgcaatacacacatatcagataattatgttgtacatct

SEQ ID NO: 27936 - DNA, 201 bp, Bos taurus
gcaacagttgttagccctgctttgctgagtaggctgccgtagtgtggtgcttcttagtccaaggttgtagtttggtgttgtgccagacctgtcagctcacgtggaccaaaggcctcagattcactagctgtggttacctgactctagcacatgatctaaccaaagcaacagcaagaaaaacatgggaataatgaatcaata

SEQ ID NO: 27937 - DNA, 201 bp, Bos taurus
aaaagctgaaaaaaagaaaaactgtaggtttcatcagttgctaagtagaaaatgaaagcttattagaattctcctgggtagcgaagtttgctaacctggatgcaaattctggaactcatcgcccctgacttggtgtcaggactcaggttgaatgacatggtgagatttatgttttgtgctgctgtgaagacgtcacgactg

SEQ ID NO: 27938 - DNA, 201 bp, Bos taurus
agtggtgcttatttttggaagacaccaggacaactgagtcacccatcgtattttagggaaaaggatgaaacaagaaaccccaaaggaacaggtgaagattcgctaggcagatttctgccttgtactgaaagtcttttgggtcaagatatatgtacgtgcatgagctcagatggaactttcctgagccatggcggggctgaa

SEQ ID NO: 27939 - DNA, 201 bp, Bos taurus
ctttcaggaggccacattttctggatttcctcctcccttagcagacactgcctttagtctcctgagttggttcctcctcttactatcgggacgcccttggtctcagtccttgggcctgctcctctctttgcagccatgctctggtcatctcattcagtctcatggctgcaaaagcatctataaggcgatggcttatatctc

SEQ ID NO: 27940 - DNA, 201 bp, Bos taurus
aatgtgattgtatcaatataaaaatgagcagtggttatagaaatcaaggaagattatgatctcacttttacactcacgttggcacctcatggcctcaatttaaaaaaaaaaaatgttgttcttttggttttgtccatgagccagcctgctgcagatgtgagtatctccccagattttagagggtagccctgaatgctgaag

SEQ ID NO: 27941 - DNA, 201 bp, Bos taurus
cttcaagggcccccttgacatgatgcaggggtccaggtgatgatgttctgatgaccgaggtcctaccatgtggagtatgggaagggtatggcaggactcacgcatcccaagggccccagcctggggagaagctgattttcctccaaccaggaaaagtggctgccagtagtggtagtcaaattcattactcatcaagtccat

SEQ ID NO: 27942 - DNA, 201 bp, Bos taurus
ccaaaatagatacgtcttcaagtattctctttctagtctgaaattccatgatcctgggactgggttgtttttattaacaaccttgatctttttacaacaagcttgatctaatctttgccaaagttgcaacatccagctataagcaaagaaacacaagaaacacaaagattagaaaaccggactacagtgtccctttttctc

SEQ ID NO: 27943 - DNA, 201 bp, Bos taurus
ggaaatgtgatgtattctgtttctgataactaaactgtgatttttaaaatttagactctcaatggcccatatgcctaccttccaaaggagatagaaatgtaatgtatactgaatgctgggtgaccggatggggatacagaaaattaagaggtaagaaaccacatttctctgtctgctacagtggaagatacagagcacagt

SEQ ID NO: 27944 - DNA, 201 bp, Bos taurus
tgtccccagcgagggtgcgatccgcccgcgccgcccaggtggccgcatctccggaggcttaccgtcctgggggaaaaaacttgagcagcgaaaaaggaggtgagtgcgcgagggccggggagaaaccaagtttgtcaggacttgtccgggcagccgagccgcggagtttgggagttgcggccgggaactgcggcggattgc

SEQ ID NO: 27945 - DNA, 201 bp, Bos taurus
ctggcctcattttggttcacagaactgaggacattcaattagcatttgaccaaaagaaatcattgcaaggctgttttgctgctggctctggtatttcctcactctgtctcatggagtttcccatttgtgacttctctgggatagctgtgtctgtgttatttctcagtctgtcctatgtaaaccctacctggttttttggag

SEQ ID NO: 27946 - DNA, 201 bp, Bos taurus
ttctggacagattggggccacagtccagacgtgctggtcattcccatatgatgctgctattttggtgttgcttcagaaccaataacctgtctgtcacgaatagggccaggttcgatatactgaaattttatttcagtttccatttggcaagaattgtgaaggtcttaactgaaacagtactattaaacaaggctccaactc

SEQ ID NO: 27947 - DNA, 201 bp, Bos taurus
agcagcaataacagtaaggcattattagtgtcgtacttgcaactttttagtattttctcttgtgtgactttttattctgccaacaactgtgtgaattaggtgggcatatgctgaacatcagaatgtttaaatgccttaggtagcacacatatgtagtcattgggaagatggcatttctagatctgatgagaatatgcactt

SEQ ID NO: 27948 - DNA, 201 bp, Bos taurus
cgatgcacattattaactacaatgtattaatctttaaaaaataaatctttttttctatacctctactcatctgtttgctcaagcactctattgagatggcgggtctattctgaagagttctttcttctgaccctaaggtctgactgcgtctgtagctaagagtggacttcccagaccactaacttgcagatttcagttttc

SEQ ID NO: 27949 - DNA, 201 bp, Bos taurus
tggcccatgtgggtttaaaaaagaagggctttttcctgccctctccccacataaagcacacactaacacacaagcgcacacgcacaggcaggcacacaacacagcagtggcgacagtccgcacagggacagattccagtagctcttgctctgctcctcaagaaggattttctggagtatttttgaaggatcttccagagct

SEQ ID NO: 27950 - DNA, 201 bp, Bos taurus
cctaagttattgccacatcttatctgaatagaaagaaatatttttattccaagatatggcaaggcctcctgccaatcatgatttataattttaagtattcgatatttattgtttaggaactgagaagatcgcttttatatttaacttccttttgttgttaaactatttgacttaaaatttggcttttgactaaagattgca

SEQ ID NO: 27951 - DNA, 201 bp, Bos taurus
tctagaatttcatatacatgcaatcatataatattacttttgtgtgtgtgtcttgcttccttcatttagaaaaatgtttttgagaatcatccctgaagttctgtatattagctgtctgtttctattctttggagagtaccttttaactgcatgaatatacttgttaaaaaatccacttatctattaataaacatctgggct

SEQ ID NO: 27952 - DNA, 201 bp, Bos taurus
gtgattgctttctcagacagtttacatttattccaagagctaggaaaagctgatgaaaggttttaaaaagtagatagtatgaattattttattttttatacagataatctaagcaaaaatgaatttggttgtgtaagaatagagaataggagtgtagttaggatgctatgctggtagcctacatggcttttatatggtcat

SEQ ID NO: 27953 - DNA, 201 bp, Bos taurus
gttatttcctactaaatacatacagttcaacacaataaccctcacattctgccctgagtcactcatatacttaaaggcaagtcttaattttaggtaacatccctcagactggttagtcatgcctaaggggttcttctttggactgagcagagtgagatgaccatggttggcatttccatattttctaattaaaatttaaaa

SEQ ID NO: 27954 - DNA, 201 bp, Bos taurus
tgggattctccaagcaaaaatactgcagtgagtagccatttccttctccaggggatcttcctgacccaggattgaacccagaactcctgctctggaggtagattctcaccgtctgagccacccggaaagcccttatacagctctgagatagagaaaaacactggggcttggatagagtggtcagaggaggtctctctgagt

SEQ ID NO: 27955 - DNA, 201 bp, Bos taurus
aagtgacagaatagttcatttcagatacaagggtctttggttcaagtgccaaaatggaaggatttgtcataaaaccgcaaaaagaagtttgattaaagaacctttaatgaagatctgacatttaatctggtcttttattggataagatctttaaatattctctccttatgaattcgtttcatattcactggaatggtactt

SEQ ID NO: 27956 - DNA, 201 bp, Bos taurus
gaatgagtcaaataaacaactcacaggaaacgtagctcattttgctctactgagcatttaggacacttcaggccatgtgtaagttgcttatagaataaagaattgtttcagaacactacagccatgatctcattaaggtctcagtaacctttatttttacccagcattagcccagcatgaataaaagctgatttcaatgtc

SEQ ID NO: 27957 - DNA, 201 bp, Bos taurus
aggatcaaattcaagaacaatagaagagaaatatggccttccaccacccgctttgttatcgcttctgtgaatccacaattttctttgcagtttcctggaaagcagctttgaaagttacactggcctcatgccacatcgataagcatttactaagaactggttttgtgagtggcattatgttaaaaacgtcttggcatagat

SEQ ID NO: 27958 - DNA, 201 bp, Bos taurus
agaagagtctaaaatgacttcatgaattgttctgttgttatcactgggattgccagaggttggaagatactgatgacttctgggcattgttttcttaatggggactatttttaaagtttttattgaatgtattacaatattgtttctgttttatgttttggtgttttggctgagaagcatgtgggatcttagcttcccaac

SEQ ID NO: 27959 - DNA, 201 bp, Bos taurus
aggagaaggggacgacagaggatgagatggttcgactcaatggacatgagtttgagcaagctctgggagtcagtgatggacagggaggcctttgcagtccattggaaggcaaagagtcaggactgagcatctgaacaacaaatccctcattagaaatgtctcttttactgaaaggaagacagttgcagcacagctcaatgg

SEQ ID NO: 27960 - DNA, 201 bp, Bos taurus
gaatcttggtacatcagtgttttgtgagagcggttttggaaaattaaaatgccaagtcatttggagataatcatatgctaaaacacaggagtcttaatttattactgtataggcagccaaagtttttgattactgtttgttttgatccattatgctgcttttctttccaaataaagaaatctatattatagattaagactt

SEQ ID NO: 27961 - DNA, 201 bp, Bos taurus
gtatccaccttgtttcctgagaatgctgggtgtccttgtgcttctaataaaggctttttttgttgcttctgttatcaatacataagctggccaaatgaccggatgtcttcctcagtgtccagttatcacaggggttccctgggagcctggaggactaaggggaccctgccctgcttgggcccctgtggtcttaccatccca

SEQ ID NO: 27962 - DNA, 201 bp, Bos taurus
tctataatgacaacacccaacagcacagaatgatattgaatcacctaaagccagtatttaaaccataaatagagggaagctgagaaaaacacatgcatttggggaattataattaaactgaaaaaaattcaaataatgcagcttcccaggtggtgctggtggtaaagaacccacctgccaatgcaggacacataagagaca

SEQ ID NO: 27963 - DNA, 201 bp, Bos taurus
gaacaatatttaaatgtctcgagggtttggaaataatttgtgtaacttctttcaaaatgcttatgcctacaaagctattactggcctattcctcatatcctgtggcttttactaggtgtgctaattataagtgaacagagaagccttgctggaggccactcacttctgggggcttagaacatctgatgagagcactgctca

SEQ ID NO: 27964 - DNA, 201 bp, Bos taurus
ttattttagctaaaggattctgttttgtctttccagattttctgtcagatattgatgataaaactagcctccagccagttatttgattcacatctgtcatctgtcaggaacacaactttctctgactagctgttccttttcttcttttaaggttccttttactttatagaatcaatcaaatattgctggaactcagtggga

SEQ ID NO: 27965 - DNA, 201 bp, Bos taurus
gccttttccttacatttgtatactccaccaattcttgcccttcaaaactcagcatacttgattttaattccggaggcatttggttctaattccagaagccctccatgaaacttgcactgctggcactccaccaactccctagtcaaaactaaccatttgtttgtttctcagcagttttatgattctcgattgtcacatgtg

SEQ ID NO: 27966 - DNA, 201 bp, Bos taurus
tttggggttttgcagtgtacattgaagcttggaaattttgttgagtttggtgctgagctcatctgaatctaaccgattctgtgactaacttttctaagacatgaatctgagttaggtggtaaattatctttgcccatcagttctgtggctttggctcccaggattcccattagcaaaagatttttttttttctttcaggag

SEQ ID NO: 27967 - DNA, 201 bp, Bos taurus
ccttgagggctgcttaacatgtacagttgctcagaccattgtgtaacactcttcctcccctgcagcctccttgctctgatggattgcagggaccagctagcaggaacttattttccaccctatggaaagctaacaagacatcaggaaatatgtccactcactgtatctattaatctgggatatgatatacttgtttgcatt

SEQ ID NO: 27968 - DNA, 201 bp, Bos taurus
attccttgactcatggccgccacctctgtttttaaactggcagcacagcttcttcaaatctccgactctgagtgtcctcttgcctcctttatctgttaaacgtccctgttaccacaggggcccacctaaccagttcagtgtaattgctctatctcaagatccttaatttagtcatacctcagaattccttatgccatgcca

SEQ ID NO: 27969 - DNA, 201 bp, Bos taurus
tccacctggggcacgaaactgtccctccatttgttggcggttctatttgtccactcagatccaccctcccttcttctccctcggccaatatggacaccattaaaagattgcttaccctctgacttcttatgaatggggaacgttagcaagagaagaaaaggagggaggagaatgggaacacggcctcctcggaggagcact

SEQ ID NO: 27970 - DNA, 201 bp, Bos taurus
tctgttcccacttgccagcatttgagactgtagttaataacgctgtattgcatatttgaaagttgttgactaagtaaatcttgaaagttcttatcacacacaagtttgttttaattatgtgtggtgacagatgttaactaattatggtgatcatttcacaatttatacaaatatgaaatcattctgttgtgcaacggaaac

SEQ ID NO: 27971 - DNA, 201 bp, Bos taurus
ctgcatcttgctcccttaaaagatcttttgaaaggagtcctgcaaaggtattttgattacattgtgtgtatacactgaatacagtggaaaagttgtagagaaaggaaagaactatgttttctatctttttttttttttttccataagcagtgtgggatagaaaaaggctttacggctttatgactctccagctaatcacct

SEQ ID NO: 27972 - DNA, 201 bp, Bos taurus
ttcaggcctgaataatattacacacacacacaaccacacacacacatgcacaccacatcttctttatccattcatccatcagtaggcacttaggctgttaacgtaccttggccattgtggataatgttgctgtgcagctgggagtgcagatacctctttgatatcctctttccttttctttagacatatatacccagacat

SEQ ID NO: 27973 - DNA, 201 bp, Bos taurus
ggacatgacagtctaatgtgatacttgaacctggattggatcttgcactaagaaatatggaaattattgggatgattgtcagaattaaagtatggactctttatattatatcaatgctgcagttcctgaatttgatcattgtactgtggttatgtagaagaatatacttatataaatatgtgtatatctatatataggtag

SEQ ID NO: 27974 - DNA, 201 bp, Bos taurus
ccacagtgacattcgtagagcaatatcaggtaatttttcattgttttactattacagttggtcttatagtatgtaaacttttgaaaacctctggttggaatgggaaatgtttcttgccccatgtattcctagacgagagggtaaactgcactgatttcagtgtctcaagcaaaatcaaatccaaaagctgctcagagcacc

SEQ ID NO: 27975 - DNA, 201 bp, Bos taurus
cctcttagtgccctgtcagtctcctggaataccgctattccgccacttgctgagccaaatggggattgtacatgtccttagagcagtcaataatgctgtgttctctatgcattcccctttgtggccaattattgtaatactcgatgggagatgctaaatggtttactgtgttcgacctcaagggtgccttcttttctatct

SEQ ID NO: 27976 - DNA, 201 bp, Bos taurus
ctgtttgagttatactgaagacttcactctccttttcttttttaatttccttgctatttgtcctcagtgctttcatgttcatagccactttctgtctgaggccacctcggagtcttctttttatccaaattgtgcctttgacttaaaaaaagatcattctacgtgtacagctctgtcttaatttcaaggcaacattcatca

SEQ ID NO: 27977 - DNA, 201 bp, Bos taurus
ggtgatggacagggaagcctggtgtgctgtggttcatgggatcacaaagagtcggacacgactgagcgactgaactgaactttcaaaatatttccagaattgtccttttctcaccatatctactactgccactctgttccagccaccctcatctctcaccagcattattgctgcagccccctactaggtctccatttcgat

SEQ ID NO: 27978 - DNA, 201 bp, Bos taurus
ttactatgattgtttaaatgatgtgtgttgtatcttcctttttctgggtaggattttacaaaatttatttcactatttaactaaaaatatttattgagtatctcctatgagctaggtaccattccagctgctgagatatagccagcagggtaccaagcacttatttgtaacttaacaatgcaatggtataaaaagaatata

SEQ ID NO: 27979 - DNA, 201 bp, Bos taurus
atcccacctgtctgtctatcccaggaacgcacggttaggacactgacattactaactagctgtaggcggcctcacagaaccgcgtgaacttcaccttgactccttcacagcggtgggcaggaaggcgagcccgctttctcttccgcacactcagcacacacgctcacctgctgtgcacagtcacctcattaatacactaga

SEQ ID NO: 27980 - DNA, 201 bp, Bos taurus
acttcacataaatggacttctatcacacattctttctttaatggagtccttctggttttggctcccacgcagtcccattttctaaacagtctcatggccctttggagggtgggtctgtgtgcccacaagagaccccgtggtctccccaggctcactcttgaagcagggtcctccgattcaggggtgccctctggcaggcct

SEQ ID NO: 27981 - DNA, 201 bp, Bos taurus
ggacttccctcgtggtccagtggtaaagaatccaccttgcaatgcaggggactcaggtttgatccttggtcggggaactaagatcccacatacaggaagcaactacacctgcatgccacgattaccgaagcccgagagctctggagcctgtgtgccgcgaccagagagtctgtgccccgcaacaaaaaacagatcctgtgt

SEQ ID NO: 27982 - DNA, 201 bp, Bos taurus
actgggaaaaaccttttatggcttttctggttggcctcctcacagcaaggcgcccatgggtaacaacggaaatgctgtgataatatcctgccagttctgacgaggcctgatctcatctgttctttgaagtccttcatggagaagctgatgggtgcagagtagctgttacatgtttcctggtaccagtccttcagagaacta

SEQ ID NO: 27983 - DNA, 201 bp, Bos taurus
aatccattcatccctgctttgtgacagttgttcaagctgagtggctacattggcagttagagatctgctggcccctccggctttgtcacaacctggggcatggggctgcagtgggtgaaagagttgtcacaatggggtctgtggttcgtggttgggagaggaggctcctggttattgaccctcatcctctcagctctgggc

SEQ ID NO: 27984 - DNA, 201 bp, Bos taurus
acctctgtgctgaaggtgaccaggtaggcgctcacgctggaagctccacacacttccatcacctgtcagctccatgcagacagaaggggctggtcccatctaagatggcagacgtctcacagtggcagcctgaaggctgaacatagccctcaaatgtattttgtctggtttttacagtgttttaaaaagtggagccaacct

SEQ ID NO: 27985 - DNA, 201 bp, Bos taurus
gggacttggtgatggacagggaggcctggtgtgctgcgattcatggggtcacaaagagtcggacatgactaagcgactgatctgatctgatctgattcttctccagccaggccaactttaaatgtgttcctgaattgctccttttaactgcagccatcctggtttaagtggactggagggaatatattaagctgatttgca

SEQ ID NO: 27986 - DNA, 201 bp, Bos taurus
ggagatactttctgtttaaaatgtgtaatagtacctttagtgaaaacatgttatctctttctagcatataaacgttggtttatcactgcaaagaaaatacgactaaataaatatacctacttttgtgtctcataaaaatgtacgtaaactcaaaatatggaaaatttattattttacctctttaggaggactactatcagt

SEQ ID NO: 27987 - DNA, 201 bp, Bos taurus
ttttaattaaaataatgttatttctgattttttttaaaggtaagaagtttgattatttttcattttcatattatatgtgagcagagaaccttttgataacaggtcaaattaaaatgtgacaaatttgttgaagagaaactttattttcctcttgtatttatactgcatataaattaaataccgtcttggcatatttcattg

SEQ ID NO: 27988 - DNA, 201 bp, Bos taurus
tgagcttaatctactgtaccagaggtaaacttctaacttctttttaaacaattacattttcagtcattaactctacttccgaagtaactcagtggcaccagtatctgagctttttggaggtcctttgtccaagtgacagtaccgttgctactatattcaccctgaaaagctcttttagcgagcatgaaatgacacatgaat

SEQ ID NO: 27989 - DNA, 201 bp, Bos taurus
cttcaagtcaattatccaagaaggtgcacagggctccatagggcccaataccagccctccaaggccaggtgggcccaggatccccgagatgggccagtccgtcagcctgttgctggctctgagaactctatgtctggccatgtccctcacccctctcccagctgccgtgactggcccctccaatgttgccaagaggtgtgg

SEQ ID NO: 27990 - DNA, 201 bp, Bos taurus
cccagcacatcctataaacatttatgtgcaggcctttcctcacctgttaaagacataattcttcataaactttcccacaatgttttccagttcctaaacatagggaagcaaggttatgggtgaagacaatccatgcattccctgacagaggtttattgccctcagtcccagggcaaacagagctggctcctagcagtacaa

SEQ ID NO: 27991 - DNA, 201 bp, Bos taurus
catgattgagaaacgtaagcctcattccagtaagtccctctttgtaggtttgttcacagtattataaaccacttgtccgtgtttagagcgtctcttcttgctgtttgtctgtcttggttactgtctgtctcagttatgagtactaagtcttttccccaaatgacttgaagtgatttttaaatccatttattttttttttcc

SEQ ID NO: 27992 - DNA, 201 bp, Bos taurus
ttaaagataataggtaaatgaaatgaacatccaataaaaaccagtttgtgtatttaaacagaactaaaaggctaaacttagaatgtaagagagaataggagtaaagctgttcatgaaagcagtcaattcagttgatattttgtcattttcctgactttctctaacttaaaggaaaaaaaaaatgtatcatacccccacatc

SEQ ID NO: 27993 - DNA, 201 bp, Bos taurus
atattcaaaatttctttgagaagaatgctctcagtgaagttctatctcctcattctttttactacttgctaaagaaaattcactgacactagttctggatttttatcatcattcagagctgtgtagttaaagaactgagtgaattactaccttcaggagctgaaactcaagggggcagtttgactattgactagcgaaatt

SEQ ID NO: 27994 - DNA, 201 bp, Bos taurus
gcttctgctctgtcttcattcctctcttttcattaattcatttattcctgttagaatgacctaggctcatttttcttctcatgatgtccaagattttttttaaatttatttaattggaggctaattactttgcaataaacctgtatgcgagatagcaaaaaagacacagatgtatagaacaagatttttatttattgaaat

SEQ ID NO: 27995 - DNA, 201 bp, Bos taurus
tcgtttcccatcgctgagctccttcctttcttctcccgtctctgtattcagctgagggttcgtgagccttcattactgttcgtcccttgtccacctctttttccactgcacctacttctaaaactgcccactgctaataaatgcacccactagtcctcagagctcagaaaacctttacagaagtaaagaaagctgagataa

SEQ ID NO: 27996 - DNA, 201 bp, Bos taurus
gtgaacccaggctacctagatttgaacccagccttcgttagctgcatgtccttgaataagttaccttacttctctgtgcctccatttccttttgtgtaaagtgagaggaaatggtttacttacattttttgagattgagtggattaaacgatttcatatgtacagtgctaggtggcgctagtggtaaagaagctgcctgcc

SEQ ID NO: 27997 - DNA, 201 bp, Bos taurus
attttttattgaaataatactggtttataacactatacaagtttcaactgcacaatgttatttttctacttctgtgtacaaaaacagcgtactcctcaccaaaaatttcatttccatctgttggttacagttttgaatattttcccagcattgttctttcctgcttgtctgtcttattatgttcaggtcatggcaggagaa

SEQ ID NO: 27998 - DNA, 201 bp, Bos taurus
gccatctatcaagcccaggagtgcatactagcagcccagtttgatcttggaaggataaagcagagaactgcccagtgcaaggtctggaagtgggctccaccttggccttgggggcaaggaactctgggattctggtgtgtgcagtgtgatgcctcagccaggaagcatgggctctgtgggcacaggtgagcaagtgacctt

SEQ ID NO: 27999 - DNA, 201 bp, Bos taurus
gactggcctttggccctctagaaagctcagcgattcacactgagtcacttccttccagttcagctggcatcaaggacttgttcctaatgacggaaggaaatgttctgtgtccagtggggcctttcagagcatagtcgagcaggagtaaataaagggatgcagggtttgaatacaggttccaattcgaagggcttttcctgc

SEQ ID NO: 28000 - DNA, 201 bp, Bos taurus
ggggccccagagataccttgtttaaagctcagagcacacaattttattttaagtgcataaccgacattataggatttctctctcatatattccaagttagggagcaaatggttatttaccagggccaaatagtgagtggtaatatgcgaataatatccatctctgagcttaggaaaacaaattcagagattactcagcacc

SEQ ID NO: 28001 - DNA, 201 bp, Bos taurus
ggtataaatggtaagacaaaatggccagagagaaatcaggagccgggggacaaggacgcagacacagatgcggtgacctctgatcatccaaagttgtttactgaacacatttttgtgctaaggccgcctgctgttcccactctgcatgcagccttcactcctaattaaagccagtgggctaggatggaaaaaaacaatttc

SEQ ID NO: 28002 - DNA, 201 bp, Bos taurus
cttatggtacccgcagtcagacttaatcagcggcaaacacggtcatccacaccccctcttccttgttctgggtcatcctgaagaggccaccagctggtatttgggggactgagccgatgagatattattatctgccagtcttcattttcaaaaataaaaagagattcagatggatgcaggggacccttgttagctttcagc

SEQ ID NO: 28003 - DNA, 201 bp, Bos taurus
ggtgtcagaatgcatccacaggaaaaagctcgaaacagtggagtctccaaggggcaggctgcgctgctttggaatgcaatccccttgcgtgactcacacctactcttacccctcaataccagccatgctggtattgacccattttgggtttcaagaaactttggttccagtagacaacattgcccagatagaaaactgtgc

SEQ ID NO: 28004 - DNA, 201 bp, Bos taurus
cttaatgattaagacagtctccacgtgatgtttgaagcgccggctcataattaaaagtcaggtgaataaaatcattggtgttccagaggattcattcctatgattctttttttatgttttctttatattggtttgaaattctttgcaaattaagtatttagtgttggaaccacagagaaaaacagggggctgatagataca

SEQ ID NO: 28005 - DNA, 201 bp, Bos taurus
ggatatcttgctggtttttgagaattctcctgtcttactcaggttcttgaggccttgacctctggttctactgcactgccaacctcagctctgccttctccgtctgcctgccctgtcacttgtttcttactgaatggcactgatcagtaccatgcagtgtgagcagaaaaatgtatgggagaatgtttgggagaatgatgg

SEQ ID NO: 28006 - DNA, 201 bp, Bos taurus
ggtccatgccaaatggatttggataggaccaaatgtcaaagactttggtgtagaccaaatgtcttatggatgttttggacaggaccagatgtctacaaaatcttgcacattgctccaattcagacaatggctgtgtaatggccatgacacaggagccatgagaatgggtggcattgcccctgcaaagtgagctgagtgaga

SEQ ID NO: 28007 - DNA, 201 bp, Bos taurus
aaaatgataatgttaaaacctctaagtacaactgtggactcccctatttctttagctatgtcacttttgctttttcgtttttaaagctctattatttggcatcaataattatgatctctgtgtcatcttgatgaatattccccttagcattagagaaagtccctctttctgtctggtagtattttccgtcttgattatttg

SEQ ID NO: 28008 - DNA, 201 bp, Bos taurus
tggccataagcaagagggaggagtcagaaatgaccccaaagtttctgatggggagactgggaagaaaatgcttatttcctaagagtggaaatacacaggtatacagagagggccagacttagggaaaacaatcatttcaaatttgtcttatcaaacctgagtttccagatggagatgtcaaatatccagagtccaggatag

SEQ ID NO: 28009 - DNA, 201 bp, Bos taurus
ttaagtgggtggagttacaaagggctgggaactgtaaaatggcataactcacagtccaaagatttgaacttgagccgcttggctggactggtattaaagcgcagactgacacgccacacagagtgccttcctcacgcagagaggcagttctgaaaaggacagtttgctggggatgaggagggggaggtgaggccaagtcat

SEQ ID NO: 28010 - DNA, 201 bp, Bos taurus
ccgggagatggtgagggacagggaggcctggcgtgctgcagtccattgggtcacaaagagtcagacatgattggatgactgaacaacagcaataaccatagagaatcattggaaccatggcccaagagaaaccaggcaaaaaggactgcgaggccctttagggatgtgattttggtcattccactaggcaggttaccagaa

SEQ ID NO: 28011 - DNA, 201 bp, Bos taurus
attattagaaactgtcatgaacagttcaaagtaatgagattgtcttataagggaaataagataatcacaatgtagaatgaaaaaaaaaaaagctttatttacatgtgagtttagaccatctctaccaccttgaaacatgagaggaatcaaagctctgaaagtttgctttgtgggcaggactgagtacttagcacagagtat

SEQ ID NO: 28012 - DNA, 201 bp, Bos taurus
gttccttcctgtctgtcatgcacaactagttagatgtttgttctaactcccagatctagtcatctagaaatagaacctgactctgactacactgagagccgcagaaaactctttggagaggaaggcaagtatgcagtctacagagatagttttacagctcacgtgcgggtcttgctggatttcttttcagcatagaaaatg

SEQ ID NO: 28013 - DNA, 201 bp, Bos taurus
atgtcctcacgaggtgggcctaagacagtgacaccaaactccatgtcttggaacccaccctccatctgaacccaaagattaaaaaggcagtaagcttcatatttaggccagagatgcaaaagttcctccccctcaatccctaatactgagtttggcaaggggtatttttttttccaaaaagttaaatgagaaactatatca

SEQ ID NO: 28014 - DNA, 201 bp, Bos taurus
ctccctctgtgtatatatttcctgagacttaccatttgcccccaaggtaaagtgtattgagaatcttgtcctttggtcaatttttttctatgagactttagtagtcttctcaggttgtttagaattaatgaggcaaatgtcctcaatcaagaagcaatttaagaacatgctgctaatttcaatgagttctgtaaatgaact

SEQ ID NO: 28015 - DNA, 201 bp, Bos taurus
gaagtcgtgtctgactctttgcgaccccaagaactgtagcatgccaggcttgcagcacacccacattttgccaacagattaagaatgtaggaagaaggaggaaggaaatgagggaaggagagggaaagagaatatgaatgagaacgagttctgagcaaccagaaggatagagttgccatgaaatggggaagattgggaaaa

SEQ ID NO: 28016 - DNA, 201 bp, Bos taurus
atctaaagttataaattcatcccatggtggcaaacacaccaaaatacattgtctctgcaggaagagtgaagttagtatgccctcggtcttctaaatacacccattacataagtgagtcctcttctttgaggaagacggtgataaaaagctcttgtcatattttctcttgtggagagtagagtagaaatctctttcatctgc

SEQ ID NO: 28017 - DNA, 201 bp, Bos taurus
tcctggctgagtggcaccaaaaagaaaaaaaaatgtaaaagcatgttcctccattgagaattaattgtaaaatgataatatgggtcttgacttaaatttcatttattcagagtagattgttgatgtagtgatttttttctggaccactcagatgcttcaggagaggagtttgaaagttgaattctaatggtgtgatggtta

SEQ ID NO: 28018 - DNA, 201 bp, Bos taurus
ccagaaaaactgatggtctagttccagtctggaggccggcgggctcaaaacccagggggagctgatctttctatttaagcaaaggcaagaaaaatgctgaggtcctagtctgaaggccatcagacagaaaagatatttctcttgcttacaggaggatttcccatttttgttctattcaggacttcagctaattggatgttg

SEQ ID NO: 28019 - DNA, 201 bp, Bos taurus
atcaagacataggcggtaacgtccaagtcaaggctgcctgcctcagagtgatgtgggactctatggaagctgggaatcgttcttctgtctggaggggtacactggtggagcttagtccttctcaggatcatgagaatgataacagggcctggagctccctttcatttttcctctgttccactgtgtccacagggaaggtta

SEQ ID NO: 28020 - DNA, 201 bp, Bos taurus
tacacacagagggaagaagcttttgaaggtgtatctttgccgtcatcgctctgtcttgtaacaagccctgcagtccttgccagtaggtgggcttcctctgtgtggtacctgcttcggcttagcaacatcctcatctcttacaaggatgctgttgaaaatggctgaacctgaggagacacctggtggagacaggaagcattc

SEQ ID NO: 28021 - DNA, 201 bp, Bos taurus
ttttttttaattaatcccaaagctgatggtcaaataagttattcatttcttagaagagcatatggcattttctagagaagaatttatttacacaaccaagattataaatcccacacctacactctttcacagacatcatatggtagcatgattttttttttaaggtgcaaaatgtaaaaacagattctacaaagcaaaact

SEQ ID NO: 28022 - DNA, 201 bp, Bos taurus
ggtagcagatctgggagtggaatccatgtctgtctggctcaaagcttcaacttttaaccacggttctcctttctttagaagttatttttcggtctgatgtcagaacccagctgccttaccatagtagaaaaggaacagtaatgtcccattttttgaagatttatttaaagcaaagtttctcaaccttagcaaaatgagcac

SEQ ID NO: 28023 - DNA, 201 bp, Bos taurus
ttttgggtacaacacagacacgttctacggtccttcaccccaggaacataccagggggtgtccatgcccctctttctccacacacctcctgataccggccctagttccctacctgcctgccttctttctttaattcttacaaaatctgactcatcaccagaggaattcagggtcaccctgaaatctgtaagatcaccgtgg

SEQ ID NO: 28024 - DNA, 201 bp, Bos taurus
aatttggtgaattcacagagaggtcagggccctttcatttgaaaggtgttgtgtgtttgctgtgaagatgtaactggattttcattttgaattaaagaaaatcactcgggctgccacgtgggccagctgttgttactgttgttcagttgctaagtcgtgtctgactctttgtgaccccatggactatagacctctaggctc

SEQ ID NO: 28025 - DNA, 201 bp, Bos taurus
tttctgtgtgtgcatgtatgagtacactgtgtgcatatgtgtgatgtgtgtgtgcaccaacatacctgtgagtcttcctctgtcctggtccctcccctactccccatcctatcacacaggtgacgtccccaggcatctcctgggaggtctggccacactggctgccttcttatcaggattatttttaccatcattcacagc

SEQ ID NO: 28026 - DNA, 201 bp, Bos taurus
agagtcagacatgacttagcgcctgaacaacaacgagctaaagggaagagtgatagaaagggctagagagcagggcctgtgagcagatgtcagactccagggttatttcatccagagtggaaaagtctagaaggaagaggatgagagggcctgggttgatttaacaacgcgctttaagcccacgagaggctcttactctca

SEQ ID NO: 28027 - DNA, 201 bp, Bos taurus
tgctcaatggtttcttctaaagtcaaaattacacgtatcctatgatccagcaatgccactcctacgtatttgtccaagagaaatgaaagcatataccccccaaaatatgtgtactaatatgtctccagagctttattcataattgccaaaaaccagaactgcaaattctcttcaaaaagagaagggatctattggaataca

SEQ ID NO: 28028 - DNA, 201 bp, Bos taurus
cccagcagccagcccccagcctcacctctcctgcagggtcctgttcccaggcctgccctcccctcatggcctgggctttcccctccctgccacaccccctctcctcactccagccccccaaagacgtgcaggttagtgtttgtaaagtgctctgagggggaaaagagccaagtgctttccctccactgaaaggaaacaatt

SEQ ID NO: 28029 - DNA, 201 bp, Bos taurus
ttgaagcgtcttagaatcgttttccatgtgacagaagagtttgtttctttcagaaacataactttttattatgctttccacagtctccaaacaccctgtcctacctccttaaaaaagagtgataaattgtaatgcattaattaatgtttattttacagtaatgactcccagggttcctgacctgaatgatcccaggctgtt

SEQ ID NO: 28030 - DNA, 201 bp, Bos taurus
gtccactgaagtactttctgacaccgggagaaagacttgcagtctttacaagctgcttggtcacagcctaaggagacggagagcctgggtgggaccagagttcctcttcctgcaaagagaaaatcacaggcagcaatgccctgtgaaactgacaggcagtgtgtcccaacgtcccactggagcataagaaccctggaaaga

SEQ ID NO: 28031 - DNA, 201 bp, Bos taurus
caggcttcatcttttatcattttcccctccagacttttaggggggaacagttctaaacagttctaaggaaaagattacaactcccagtggttggccagaggaaagagccagctcctcaaacacaggtgagagcattgtatttcccttccctaaacccgaggggaaaggagccatctgtacaaacttccctgttctcccgcg

SEQ ID NO: 28032 - DNA, 201 bp, Bos taurus
ggtggcagactttttccccttaggatatggtggagcgcgggacagatggcaggcctgaacacccgatgcagtaggtcacagaaggagctcgcggggccgtgaaataagctgtcgtgtgtagggtctcggtggcacaaggacctccaaaccagtccacgtctaattctttaatgcgttcttagtttctgaagaggccagcaa

SEQ ID NO: 28033 - DNA, 201 bp, Bos taurus
gggaacaggtcagccgatctgaaggccgcagggactgccacgccaggaaagtggcggcagtgatgacaggcaaggggtgccgcccggtcaccagccacgtttcatcggccagctccaccaactgcagcgttcgcgacagcatcttctccttgtcttccacgtacttggctggcacagatggggaggcttcaaacagcttga

SEQ ID NO: 28034 - DNA, 201 bp, Bos taurus
agtactgtaaacttctctgaaagtaacatccagaggatgaatagaagttaaacggatgaagaatggtccaagcagagaaagcaatatgtgcaaaggccccgtggcaggagagagcagcaacgggaggcattgtaaaaaggggctaattgactggatctaaagaacaagaacaatcgtagcctgcaaggaggctggaagagt

SEQ ID NO: 28035 - DNA, 201 bp, Bos taurus
gaaaatatacaattcttgtattcggtgcatacctggagtgtaaagtcccagatgacactggttaccgaacaagccacagctcatggtgctgcttgaagcccgtttctttgtggatgaaaacaggagggagaatgcccttaccctcccccccaaccccacccccttctctccaagtctcttttcagggttcttacctcccct

SEQ ID NO: 28036 - DNA, 201 bp, Bos taurus
gtttccaggtgaatcaggcctggggaagccagctccaggcacacaggtagcatggtcctccttccttccaaactcaacgttggctcctaagccacaagagccctcctggtccaaatagctgtggtgggcgaggaagagcttgggctgacagatggcaaccctgggttcaagtctctgtgcttttactgagagtgagaattg

SEQ ID NO: 28037 - DNA, 201 bp, Bos taurus
ccatgacgctgcagcagaggccagatgggccatgttttctcaagcgacgctgccagctctccaaatgtcataactggcgaggcatttcacttgggggcatgctttggggtcgagggtggccgggaagcattgacaagcctatttttattctctttagtctcacaatacatttcgttcttctttattgaagttataaaacta

SEQ ID NO: 28038 - DNA, 201 bp, Bos taurus
cacctcccctcttctctcccgggggcaggccatcctggcctcccgcactccagggcagacaggactgtgccgagctgcccacagctctggcaggagtgccggagacagctcagctaagtggcctgaactaatgacttcaagacctgcggggctggcccggagagagagctgggcttcggcttgcagggaaaaaaaaaaaaa

SEQ ID NO: 28039 - DNA, 201 bp, Bos taurus
tttggatagcagttctcaggcctatttcctgagaactgcttccaactccttccaggacctcctcccaagtgaaccagtgcatgcggtggtactttctcactgtgtgccattttcatggcccttccaggagcaatacaaggctgcctcagcctctgagtgacacttgcatcctttcagcgagctttgcctcccaggcatcca

SEQ ID NO: 28040 - DNA, 201 bp, Bos taurus
cctccgctaagggtgctcgtccttgtgggctggtgttgggaacatccatcttcagagaggctaacacagaggaagcttctgcagttgatgtcgcagcagcggggccagttctcaggccaactagaaaaagatggatgctggcctttgactccacccacctccctgctttgtttgcgggtcctcctcttccacacagccagc

SEQ ID NO: 28041 - DNA, 201 bp, Bos taurus
ggcaccgagaatcaggggaagaatgactgtggccctgtgaccagctagatggtgtccttgtcccctgggtgtgagccttgggcagagcagagagtccccgctgagagctaggggtgggccagagctagttcactgtgcttcctaacctcctggggaaactcttgtctctcttcctagtctgcttcaagaaatgaaaaggca

SEQ ID NO: 28042 - DNA, 201 bp, Bos taurus
tcaagttgggacaaaagaacttaactcttaagtgcaggatggaaggaaaagcaggcttaatagcagcatgtgcaaaaagcaaatagaggttttagctaaggataaattcaaggacatcagtaatataatgtagtttccataagagctactgtcatcctgggtttcatagaagtataatatctcagtgaagtaaatgacagt

SEQ ID NO: 28043 - DNA, 201 bp, Bos taurus
ccctgccagggagatggtaccctagcaaatatcccaggctttgtgttgggacccaggggcaagggtgaatcagaccctcgacttatttcctacaggtttgattgttttctttcactgtttgcctccaatttaaaatagcataattggtaaagaatcctgcagtgcaggagacgctggtttgattcctgggtcatgaagatc

SEQ ID NO: 28044 - DNA, 201 bp, Bos taurus
gtgctctgtcagttaatttctcccctccccacctgcaaccatggatcttctatttttttcccccagaatgtcatatagttggaatcatacagtatatagtgtctgcaggttggcttctttaatttagtagtatgcacttaaatttcttccttgtcttttcatgaccttgcagctcatttctttttagggctgaataatatt

SEQ ID NO: 28045 - DNA, 201 bp, Bos taurus
aaacaaaataacacgttaaactccttaggttttgctatttaattagccacattttaaggttaagactgagtacaactgcctcagaaaggcatgtgttcaaccaggataggactcagttctatgtaaatcactgaatgtgattttgccaaaagtcattaaacaccagtaattctaggacatgtttcccatcaatttaaagac

SEQ ID NO: 28046 - DNA, 201 bp, Bos taurus
gtgaaccagaaaaaaatggaaaatatgaacagaataatgacaagtactgaaattgaaactgtgattaaaacttccaaacaaaaggccagggacggaaaacgtagcaggtgaattatttcaagcatttagagaagagttaacacctattcttcccaaatcattccaaaaaattgcagaagaaggaacactccaaagctcatt

SEQ ID NO: 28047 - DNA, 201 bp, Bos taurus
ttcgaagctggaccttcaagctgcaactgagaatgtgagtagtccaaccccttataggaagaaagtgagagctgggtgctttggcctgctccatctataatgcacctgggaataaccatgagatgtgctcatagacacatgaaaaatctgcttctttgtttaatgggagactcatggaggccaagtcccagtggctttctg

SEQ ID NO: 28048 - DNA, 201 bp, Bos taurus
agtgttcccctgttgaaaatgaatgattttatacaagaccaacacctgtaatcaaaatggatgaaggaaaaagagaaaagcactctttaagcaaggccctccactttatttctgagaagggtaaaacctgaaaattgtccaagttacaatagtgaccaaacacccccttttcctggccaatgagtaattcctgcttcttta

SEQ ID NO: 28049 - DNA, 201 bp, Bos taurus
gccatgatgcttgaaacatgatgtaaaagaggttcaaggtgatagtagaattttgcacagctagagggtatttagaggtcaggtgaaggacatccttgaacgccaggccaagggcatttgaactttgacttacagtgaggagttcttaatgattttgtggcagaacctgagatgttcagtgacctacaggttccatgggcc

SEQ ID NO: 28050 - DNA, 201 bp, Bos taurus
catagcacagggcagtggccagcagaactgaactggaaccctggctcagtccctcctggttctgtaaccttgggtgaatatcttaccctcgctgatactcagttctggcctacgggtcttgggagaaaacaggataccaacctgagtgagaagcttttagcatcaaggcttggacagtttagtatctgccttagcataagt

SEQ ID NO: 28051 - DNA, 201 bp, Bos taurus
tttttacacaggccggggagatgctagcaatgaggagtggccataaatacaggtgaagcttcactggatcatctgccacttacctcctactatggagcccggttcctaagaggccactgacttgcacctgtggcccaggggttggggaccctgcattaatgtgctccccattcatatctttatattgctgggtattcctct

SEQ ID NO: 28052 - DNA, 201 bp, Bos taurus
aagatgcccttgtgattcagtcatccttcccttcctgatgcagagaaggagacacccttacaaatggaggttttatcaatttaaaattctttgcaaaaggatagcttctactgtggtttgcagagcttctcctgggtctgctgtttcttgaaatagtcaactcaaaataatccttctattagaaaaggatattttggtgca

SEQ ID NO: 28053 - DNA, 201 bp, Bos taurus
taattagagatagtgagtgcttcagctgtgaagtccttgatgccttgagaccctatggcagaggggctggtccagtctagaggccaggaagggcctccccgtggaagtgattctcaagatgaaggttgagaggagcttattgagagagaggcaggggcaggaatactggtgttccaagcagaggaaacacaaggagccagc

SEQ ID NO: 28054 - DNA, 201 bp, Bos taurus
cttcttgagcactgcctttttacattcccactgttcactgttatgaagtgaacctcccaccctaatggccccacctcacttagggcccctacagcagtgttgcatgaaagctcacactggcaatgaagcttctcaagtcatcttctcccctaataatgttgaattggcccgaagataatttctccttatctccaaaataag

SEQ ID NO: 28055 - DNA, 201 bp, Bos taurus
tgatgcttaccagtggcctggtgcccaccgaagcaagacctgccttgtccacgtgccatggcttctgagcaccatggctaagctgactgcaccccagaaatgggctggtgcagaaatctggccatttactctgttcccagcagctgtgggcagagggccttgatatcctcggagcagaactgagcaggaacatgtagagca

SEQ ID NO: 28056 - DNA, 201 bp, Bos taurus
ggggagcaaggaggaggtgagcgggtctggagctgagggaagtgggtgagaagcaagggaggggacaagagagctggaggcaggacagtgaggtgggtgcagggcctcacgactttcatggtgagaaagatggaaacccatccttgtgctctggacctaggagtgaccttgtccttgaggatttagtgaatttaaagaaga

SEQ ID NO: 28057 - DNA, 201 bp, Bos taurus
ccaaaggccaacaatccatagctggtcagtgggtgagaaaagaggagtttcaggggtgtgtggggggaggggctacatgcagaacatcaccatcagctttaatggccatctagaaatcagttatcagtggtctgaccagcatcatcttgattgttttaagtacagttactcttcagttccaggatcagttcactcccattt

SEQ ID NO: 28058 - DNA, 201 bp, Bos taurus
tggccccatctcatagggcaacacccctgtgcttaaaaatgagaagactacggtcagagaactggccttgcatttgaggataggggccactgctgggttcggggcatggggagaggagcgaaggggattttgcccatcttgagcttctgtggactgttttacaattgaagggggggatttgccatttcatgcggccctcag

SEQ ID NO: 28059 - DNA, 201 bp, Bos taurus
tttacactacttcttcccatcattaaatattctttgagaaaatcatttttaatgaatggactgttttccattcttaagctgggccatcaattatttaaccgatcccctattcgggatttttaggtagtttctaatattttttctattatgctaatgactgagatgaatattcttggccataaatcttgtacataaatttta

SEQ ID NO: 28060 - DNA, 201 bp, Bos taurus
ggagttggtgatagacagggaggcctggcctgctgcgattcatggggtcgcaaagagtcggacacaactgagcgactgatctgatctgatctgatctacattggctcagggccccaggtgaacagagatatctgagatcaggtacctgagatcagatctctgagatcaggattttccaagggtttagagtttatctcccag

SEQ ID NO: 28061 - DNA, 201 bp, Bos taurus
tctaaaacagagctcctaagcccaagacatccacacacttacggcacagcaactgggtacttggagtctgctgaaaaagacagattctaggtttgcacaagggtctctgtcatttacagacaagatgccttagggagcccttggtgctaattcacagccacccaaagccaagggtgacacaggatgctctacaaataaaat

SEQ ID NO: 28062 - DNA, 201 bp, Bos taurus
ctgaaagcagaggatttccagggaagccaaaggcaaggcacgatcaggataccttgacaagcatcctctgtgagcatcccgtgtatgaggctccagcgccgaggccagtgccaaaccgcagggctgaaggaggcaggcgggagatcacagcacagccgccaacacgcagatatagggtctggagttggggaggcaggcgag

SEQ ID NO: 28063 - DNA, 201 bp, Bos taurus
atattagaagcattggcctgatctcagggatttttaaaaacacacacacagacagatgtagaagtcgatatagatgcgtgtacatacgtgaaagcagcagtaatgggcaccctgagtggccagattttggtgtctacaaaccaggctccactcaaaggaaacagaggccttggaaaagtgagtgattcaggactggggcag

SEQ ID NO: 28064 - DNA, 201 bp, Bos taurus
aggcggggatttattcagaaagtaaatgaatggaggaaaatggaaatcagcttcctcattgtcagaaaagggagttacaaaatgtgaagggagaaaattggatgaattggaggtattgatgagaactcaagttggataataaaatgaatgtagatatggatatatatctatgtatacggtcagacacacacgtgtgtacat

SEQ ID NO: 28065 - DNA, 201 bp, Bos taurus
ggactgcagcccaccaggctcctctgtccatgagattttccagacaagagtactgtacaagtacaagtacaagtacaagtgggttgccattgcctcctccaactctctctgctcatttccccttattcttcccaagtctaaatttttacttatttaactgcaccagtcttagtttggcattgggatctttttattttagtt

SEQ ID NO: 28066 - DNA, 201 bp, Bos taurus
cacacacacacccccgccccctcagcgtcctggcccagcggctggagaagtggctgcagttgatgctgatgtggcacccgcgccagaggggcaccgaccctgtctacgggcccaacggctgcttcaaggccctggacgacatcttgaacttgaaggtgagcctgcgcccagtctgccccaggccatgggccccctgacccc

SEQ ID NO: 28067 - DNA, 201 bp, Bos taurus
cccagaccagcagcctctgcattgcctgggaacttgttagaaatgcagtctgttgcattagaaactctagggcaggacatggcatgctgtgttttaacacgttccccaggtggtgctggggtatgcagaagcttgagaaagcttcctctgttccaaaggaagtccacaacagcattgttataatatcagaaattggaacca

SEQ ID NO: 28068 - DNA, 201 bp, Bos taurus
ggcgagtggaacttccacaagaggcgggcacagatagcggattccagcatacctggtcatcccacaaacattcactgcacaccttccacaggctgagatatggccatgaaggacctagaaaaggccccagcgccgcaggacctaaaagggcactcactccccctgacagctgagttctgaaggaaggaagaaggggtgttc

SEQ ID NO: 28069 - DNA, 201 bp, Bos taurus
tcccctctgccccggcccccagcagcagcctccatctgcaaagcctggcaccttctattccggagcccccacagcagaactcctgcctcttcgtcaccccaaaaaggcagaggccccagtgcccgtctgtggctgggaaagctggggcagagggaggctgccaagagacgcatgtccagaggcatgagcgggaggaggagg

SEQ ID NO: 28070 - DNA, 201 bp, Bos taurus
aagaggagctggccaccctcagctcctcccatttctctggccagggttgtctccagctcattcaatgagcactgaggccgtctttccccttctgctcagaatgctcactgttggctcctccctgtttagagagggctgcagcctgcctccctcctgttcggaggtcctgggcccggcgggtgggctcctctccagtcctca

SEQ ID NO: 28071 - DNA, 201 bp, Bos taurus
taagaaaatgtggcccatccacgcaatggactattattcagcctcaaaaaaagaaggaaattctgacacctggtacagcgtggataaacctggaagccgttacacaaactgaaagaggccaggtatgaaaggacaaatacgacacgattccacttctgtggggatgtagagcagccacagtcacagagagagcgcggagca

SEQ ID NO: 28072 - DNA, 201 bp, Bos taurus
cttctctcttaagcgtagtgtttgttttctaggaaccctcttttaaaaagactatcaaactggtacatatccagaggagaataatcaaaacactgagggacttctgagctggaaattttacaaaatgaaaaaggacaaaaaaataaattgcaagctattcccacttaccttgatgctgattctctatctgagtcgatctag

SEQ ID NO: 28073 - DNA, 201 bp, Bos taurus
agcgtgtttggtattctcaggcctcctgaacttggagaacctctgtttcagccattgaacataaagatcaggagcaatactcaagactgtgaatgaatccgttcccgaagacatctctcctgcccttttatgatcctcccctcccacaatggcaacccactccagtactcttgcctggcaaaccccatggatggaggagcc

SEQ ID NO: 28074 - DNA, 201 bp, Bos taurus
cacctggccttctctcgaggtttgctttactcgctgttggagcagagggtctgaagtggaaggccttaaccccctcgtggcccatggctctgtcccaagcccacttacagacttaatctgggtagctcttaattcaggctgtacttctgaaacactcggggggctggaggactccacgacacacccaggtggccacatccc

SEQ ID NO: 28075 - DNA, 201 bp, Bos taurus
ggtaaggcccctgtcccctgaggagtgaagccagcggctctcctgctctgagatagattgcctgagcctcagcatcctcctagcagacggtctttctgtgcgcagggggccagtgctgggttccgcttttgggcttaaatgcttcctatcaggaaagaggaagtggaatagcgggaggctttcttgtgaggaggatatctg

SEQ ID NO: 28076 - DNA, 201 bp, Bos taurus
tactaacaggatggtcaattccaaagcgttagctcagaagggcagtttggggtacaaatgctcctgagtgaccaggccgggccctggtttctctggattcctctgtgtccctgtgttttcctcttcttgatgtgaggtttgagcctactgaacttacttcttcatgtcgcttggcctcctggcaatgctgatgggcagaca

SEQ ID NO: 28077 - DNA, 201 bp, Bos taurus
tgatgtcaaactcatgaccattcagtgtcttttaagaggggcccatacttggagagggtttactttggtaagattttggtgggccatatattttcttatagaaattaacgcttattggtctataataaagactattattcctaatatttaatgtgctagttaagcttaaattacaggccagatttttgactttcagaatgt

SEQ ID NO: 28078 - DNA, 201 bp, Bos taurus
actgctgccagcatgagtgccagtcattagtacagcagagctgggtggttaagagagagtattggggtaggttatatcattttagcaccccagatttagcagtactgtcctttaggccaacttgaagtttcagccgcatcacctgcattgtcagactgtgaaatcttgcccggcaatgagatccaattccagtactgaatg

SEQ ID NO: 28079 - DNA, 201 bp, Bos taurus
tggtaattataatggaatgcagggcctgtctcatactgttgtgactgttagggataattgttctgattggaatgtttgggaacctagaggtaaatggaaccagtggaaaactggtctttacccaaaatgttatctctactggttcgtcttggagcctgaatgtttcacttgttactccctttctgaccaaaccattgcctc

SEQ ID NO: 28080 - DNA, 201 bp, Bos taurus
gggccgggacagtggtgggaggactggaccctgaaatgggaggaagtttcagaagaagaactgagatgcagtagagagtggggtaggcggaagcataggcattggccggtttctcagctaaaagtcggaagcgatccacaagacggtgctgcccaggccaggccgtggtcagaggcaggagccagggcattgttgtcaatc

SEQ ID NO: 28081 - DNA, 201 bp, Bos taurus
agcctacaccaggcagatgctccgagcctctccaacccccactcagccaggctgcccctcctcccgtcccagcacaaacaggctcatcatgaaggttttccgtgactccttaggaaaccgaagacttaacaaagatctcatgcctctaaggtgcatatccctgcctgtttgcttacaactctctctgttgcatgccccctg

SEQ ID NO: 28082 - DNA, 201 bp, Bos taurus
ggccaactaggccctcctcacgctgacgccacagtgatgtactcagctcctcccccttcacactccagggagccctaacaccttgccatgagtgttccacggtgcaaggcctagtggaagctttgtcatgcacatggaacaactcagttcagtcgctcagtcgtgtccaactctttgagaccccgtggactgcagcacgcc

SEQ ID NO: 28083 - DNA, 201 bp, Bos taurus
taagctttttctccaaggaaatattaaatatgttttttagattttcttctatttctttctcattcagtgtcttaaactctaccaaatctgtattgtccttataattgaatctcctgtaggtgagcgtgaaacccactaagcaatgaacaccttctggggtctgcaaggagcaaaatgacttgcttgtaaacacagatgctg

SEQ ID NO: 28084 - DNA, 201 bp, Bos taurus
tgaaatgctcttagaaacattaacacacacattcagttatttccctttttttttatgcgcagactgcaaacagaatggtgatcagtaactcgacacagaccgtgtcttctgtatttttaacatgatcctttcagattatgacaccgttctcatctttattagtatcattgcttcttgaaaacctgtctttgaatagtaata

SEQ ID NO: 28085 - DNA, 201 bp, Bos taurus
ttctcttggccagacaccaggcacaggttccacctgcacccaaggggagttgacaaaaggatgtaaatcattgagaatcaccttagaattcttccttccacggaggagaaagttcagagatgatggaaatctccgacgtggtgtaaagctcagggtgacaaaatatccacccagtgtgaactcaggaacaacacggcctta

SEQ ID NO: 28086 - DNA, 201 bp, Bos taurus
atcatggccctcatcgggacaccggcattgctagggagtttccccaccctgaaacactgcacttggactcttgatgtcattcactttaattcaatgcaacataacactctttgacggccgacggcacccaaagcggtatcaagggaaatctcagtgaaacctgagtagtacctccaaggctaacaaaatgtcatattagta

SEQ ID NO: 28087 - DNA, 201 bp, Bos taurus
agagcttggtcttcaatgggagacaacattttatgtcctaactctacagtgtctgggaggagaaggaaattttagggcctccaaatgccctcatttgatttattcagattgggaaagtatttgtgaaacatagacttttacatagatctcatttcagtttcagcatttgactattcacacgtcaacaatgcgcataaatct

SEQ ID NO: 28088 - DNA, 201 bp, Bos taurus
aaatgcatcagagacataaacagagaacaggaatgaagttagaacacacatcacagcgtgaacttgtgacccgcaatgtggccggcagcccatgggaagcagtcagccaggtcagctccacaattcagaatgtccaccggaagggaagcaggccaaccgctcgggaagaattgtgtaacttacagcgtttccttttcccca

SEQ ID NO: 28089 - DNA, 201 bp, Bos taurus
tgtaggacaatggattttaaattttatttgcaaatttgtgtttgctttcatgaactagaatctcataaactcaactttatgaatgtgaaaggcctactccaattagcaaaaacacgtatactttaaagatttttaaatgaggacccaagtatatgtagtaactacaaccagaataacaatgagctgtcttttagaaggcca

SEQ ID NO: 28090 - DNA, 201 bp, Bos taurus
atttctcccagcaatctggattccagtttgtgactcattcagcttggctctcgcataaatgtactctgcatacaagttaaataagcagggccctcaaaacggtgtgtcccatcccaacccagggggagttgtgaggagttttatagtcaagggtagggttgctgatacggaatgggtgtgtgcagggccctcacgccttca

SEQ ID NO: 28091 - DNA, 201 bp, Bos taurus
gagacgagacgtggacggtgcggggagtgggccaactgcttcacgctgtgctgccgagccctgggctttgaagcccgctacgtctgggattacacaggtgtgtagtgtggtggggggccccgaggctggggtgcacactcctgccttgtagtctgaggctccgcttgctttctgtaagataacaggtttttttatggggag

SEQ ID NO: 28092 - DNA, 201 bp, Bos taurus
ataacattgtaagatgatgccttttaagaatatgggctacaaaatcataccacctggtttcataactcagctttttccatactaactttgttagcttaaagtcttcaaacctcagtttccttgctataaaaaggaaatcattattagtagtgtctacttcctggaacttctttgaggcttgagagtattcatttaattcct

SEQ ID NO: 28093 - DNA, 201 bp, Bos taurus
ctttctctatgctttggggcttgccttggagctgctggtcaaggagggtctctcgcagctcttccagctggaaaccactgttacaattggaggcctgctaacctgggtatagcttgtgggagacccccatgtctgattagtctcaggctttggactgctcagggcctgtgtctcggggtttagccttctcaggagtgtcta

SEQ ID NO: 28094 - DNA, 201 bp, Bos taurus
tccagtgatcagccggtttccttcatcaagctgttcactcctgtgaaacctaacaagttaagagttcagtgttaacttaaggccagcacagccaacacccacctgccccgaggctccggctcaggaggatcaggagtgacctactctcaccctcactcactcactttaatggcccttgtttaaaacatcacttgaattatc

SEQ ID NO: 28095 - DNA, 201 bp, Bos taurus
ccttgaaagtgaactctaaatgtcctggagagtaaagcctctctttgcaaaatacttaatcacattccccgggaggaattccctcatcttttgtggctcaatgccttggccacttgccaccaggaatgaaggtaaattctcactctggagacagttatgggaagcctcttcgggctccagccatttggaccatgttcttaa

SEQ ID NO: 28096 - DNA, 201 bp, Bos taurus
ctactaccttgctgacacaggagctcaggaagggtgcagtgtggaggctgccaggggcagctctgggtagacagggagagctgggtggggagtggaggcccgagaagcaaaggacaaatactgcagaatctagagcacgtcacggttttcctgggagggcttgagaacagggcttgcgagtcaggcaaccagtggcaacgg

SEQ ID NO: 28097 - DNA, 201 bp, Bos taurus
gcctgtgtccttcaacatagtgtaagtcagctcaggctgctaacaaaatgcgcagactgggtggctcaaacagctgggagtccaagatcgaggtgctggcatgccatttctaaggcccatccccttgttcatcgatggcctcttctctgggtatactgacgtggcctcctccgtgagtgtgtgtgagtgtgcatgtgtgtt

SEQ ID NO: 28098 - DNA, 201 bp, Bos taurus
aacggcatgtgggaaatttgctatgcaatgtttttctactccactcgattatacgctgtatgaaggtagtgagtcatgagtcagtctccacctctggccatgctcatgctatcagctagcccacagcaagtgcactggaagtatttgcgaaatgaacatcaaaatacaaatcccataaattaaagtcagtgttcatgcttc

SEQ ID NO: 28099 - DNA, 201 bp, Bos taurus
aggaaaatacaattaaggagcattttttttccttaactctattgctcactttatttcaaacttaagaattcggtttagcatgaaataaaggcaattaactcaacaaagtactaggatagctctttgttaaaaacattttttttaatgaaagcaaaatcagcctgttgatagtaccatttccaaaggtcaggcacagattct

SEQ ID NO: 28100 - DNA, 201 bp, Bos taurus
atccctatggtaagggaagcctggcatactgcagtccatggggttgcagagtcaggcaggacttagttactgaacaacaacaataaaaacaaatcatgtacgtacatttattattatcttttgcttcatttgttcaatatttctcacccctatctgccccatgcatagtaatgtagctatgtgataatttcccaccattta

SEQ ID NO: 28101 - DNA, 201 bp, Bos taurus
tactggcccaccacacaacttcactagtgaattttatcccagacaaattcaactttaaaatgggaaataaatctctaacagaaatgaggggcatcagaaaattagcctatagctaacatcctggccagattcatataaatatatatatatagatggagctcttttttgcaagtacccacttcattgggaattaaaggaaac

SEQ ID NO: 28102 - DNA, 201 bp, Bos taurus
atctctgattaaggatgctcactctccaccttaagggcctaaagtgttagttacttgtgacatttaggccagtgcgggcgagggggaatgtgcacattaccgagtcacaaatagtatttccacgtcttctcaggaatctgcccaactgacagctagaatcgtgatctacatttaatgctcatgttatttggtcctgctgct

SEQ ID NO: 28103 - DNA, 201 bp, Bos taurus
ccatgttgcgcaaatggccttatttccttctttttagcgggtgaggaatattccattgtatacacgtaccgcatctttatccattccttcgtcaatgggcgtgtagatggttccatgccttggccactgtaaacagtgcttcagtaaacattgggagcatgtatctcttcaggccatgtttctctcaggatacacaccctg

SEQ ID NO: 28104 - DNA, 201 bp, Bos taurus
attcttatgcctaactccagaagttctcggagttgttacagtttccaacacataagaatgcagagtttgatcagtgatcaaacaaaatcatccctctttttgaatgattcagaaaagctgaaaacaacacagaatggtctgttttctttctgctctgttagggctccttccatagggttgttctgtgattgtgttgtaagt

SEQ ID NO: 28105 - DNA, 201 bp, Bos taurus
cacttgctccctccctccgtggttcgtgcactttgcttccacggttcttgctccctaaacatccttttctgtctattcaggcccttcctaaccttcaagcgcagtgtctgctctgactctcagatattcctgcagatggagctctctgtgccagtgaatgccttgtgtagtgtcctgtccatcacaggggggcccaggtgt

SEQ ID NO: 28106 - DNA, 201 bp, Bos taurus
ccacattggtttaaatgacagaaacaacacctacttcttgattattattatatgatgtaaatgagataatgtgtggaaaacacttaggatgctgcctggcacacagtaggtgctcagttaatcgtaatttatatttgtggtgcccagtctggcatagagtaagtgctcagtatatttttagtgttactgaacttaggtctg

SEQ ID NO: 28107 - DNA, 201 bp, Bos taurus
gaatcaatacagccaacctgaatatttcactgaagaaaagcctactttttctcaagtgcagtcgccatcgtactctcagaaaaaaggtagggaccatttttcttccgtttgatccaagtttccgtgtttgtctctggggtgttttaaagggaccctttgcatccgctttgtcaaatctttgactttgaacgcggaacgttt

SEQ ID NO: 28108 - DNA, 201 bp, Bos taurus
aactgttgaagaagggacagtgtccttccattgtctatgctataagcttcactacatcaagaaatacctgccaggctgtagttggctccccttaactccactgtttttaaatactgtatggatgcagatggtggccattttaaataagagaagacataacgcaaagtgtagaaacagtggaaataaaaaggcactaataca

SEQ ID NO: 28109 - DNA, 201 bp, Bos taurus
ggtattttgtgtttcgttgatgcttgaattagactgttccctggggaaataaatcatgacatggaagggcccctcctctgtaggggagtgccttcccaacaaccagtccagagggacactagctcgcatttgtgtcctagtctttcttatctctaaccctgattagcgctttatggttcaggaatgacctgcctgccaagg

SEQ ID NO: 28110 - DNA, 201 bp, Bos taurus
gaaacgcccgcctgcagactcagaactgaatggccagtcgaagctctgttctctgctttagtgaatttcacaccccgcccctggatggcccgtttctctcttccttcctcttccttcttgcctttcaagccctctgtgagtggttgcagtgactagaaggtcagacgagtgggggcccagactctgacctggggcgttcct

SEQ ID NO: 28111 - DNA, 201 bp, Bos taurus
aagatagatgagtcacaggtatgagacgcacagagcgggaaatacagccagtaatcgcagaatagtttcgtacggtgacagatgaaacgacgccaaaaagacatgcaccttaaccaatttgggattattctggaaatgcaaggacagtttaataacagcagattattaatgtaatgtacttaacaacacattaaagtagaa

SEQ ID NO: 28112 - DNA, 201 bp, Bos taurus
ccctcgcctcctgtccgaacaatttctgttaaacctgctgaaaggaggctccttttctgaatgttgaagatgaaaaagacgagggtctggccaattctcctggcagacagacggacaccgagagaccgagcacgagctgaggtcccactgctgctgctgtactcgcgtgtcgcggccgtggccgggggctcctcttcgggg

SEQ ID NO: 28113 - DNA, 201 bp, Bos taurus
tatgctgtgtaacaaatgatatcccaacttcagtgtttaaacagcaaaggtttacttctccctccacacagcaacggtgcacctgagtgactcccctgggttctgactccaacgtcagcagcgtagtcacccaggctgctcagagcctcctgccagcagcagaaacggagagagtggtccgtctcaaatgggccattaaac

SEQ ID NO: 28114 - DNA, 201 bp, Bos taurus
cctcactcccaccccgggcgtaactcggcagggcctcacttccgtcctttctctgggtaacagtcggcatctgctaatccagggcttccgctccatcccccacccccacggcctctggcaaccaaagtctgctctctctgtgagtctgtctctatttatagacagcttcatctgtgtcatttcagattccgcatataaatg

SEQ ID NO: 28115 - DNA, 201 bp, Bos taurus
tggattgtttccatgtcttggctatcgcacaatagtcacctttcagctgcacctgtatctcccttactaacatgtaagctcctcaagggtaaggtttatgctttccgtatcttttagtgcctagagtagtaccctgcagagaatgtcataaagcctatgttaagtgcacagaaaataatatggcacctggctacaaaactg

SEQ ID NO: 28116 - DNA, 201 bp, Bos taurus
atgcacagaagaaaaaaaacagaagaggaagctaaaagggagacagtcatgtctggtcgctagctcgggtcattctttgttgtggggctgttctgagtattgtgggatgtttacagcatcctggtctctacccactagatgcgagaagcactccccactcttatctctggttttgacaatagcaatggtctccagacattg

SEQ ID NO: 28117 - DNA, 201 bp, Bos taurus
cagtccatggaatcgcaaagagctggacctgactaagtgagtttcacttcagttcatcccttttctgcttcctaaatggcagtgacggtggcctctgatcgtcattctaaaaatctggttgctttatgtcactgctttatgctggcttgaaaaacaccgcggcccttgagtcaaagcatttttgtgatttccttttttaaa

SEQ ID NO: 28118 - DNA, 201 bp, Bos taurus
cacagcattcatggcacgaacagctgttgttattccgaatctctgtggtttaccctgttgtatatctcaaggagtttgtgtagtaacaaagctgtaatgacaaagttgaaatctgtcatcaaagtgtcctctaaattttctaagtctcttttaaactaaagccaaacagattttagtcttcatcaccttttccgaaaagct

SEQ ID NO: 28119 - DNA, 201 bp, Bos taurus
gactcaatgtgtagaatccatggtaaatcattagaacacaatggaggtgacctactaaatattacagactatattctagtttataatgttccttgtaagagatggcacatatttttgtaagtcagaaattcgaaagagtctaaaatgcccctgttcccttttttggcaaagatgagatgtctaagtgaattgtagcaattg

SEQ ID NO: 28120 - DNA, 201 bp, Bos taurus
tctctaagtggcccctgaatcattaagggctccaggcttgatcgattagcccaggaggctacagtggtgggtcttgataccagttcttgctgcctgcttccatgctaataaacatttatgttcaaagcaggttatgggttttccttgtggcatttaaagcttactgagagcagatgctgttagtgaagagattagctagaa

SEQ ID NO: 28121 - DNA, 201 bp, Bos taurus
attgtccgttcagcgttggccacaatccgatgaagtaaatctcacaaactctattttgcaaggaagacactgaactttaaagtggccgtgcgaatttcccgggttcatacgatatccaagcgacagacgtggacctgaagatggtacccgtggaagctcagcccaaactctgaggcattgttctgttcactttcctgtaga

SEQ ID NO: 28122 - DNA, 201 bp, Bos taurus
tctcattctggacgggtgaggaggagccatagagctccaggagcaggccgtggtcagcttgcggacgtccttctgattggttgttaatgaggtcatgggcgtcagcgtcatcaaccttccagttctaactggtttcgaggcttcctgcttggggacagcacacagtttctcccacctggtggaggtttcaggatctgcaaa

SEQ ID NO: 28123 - DNA, 201 bp, Bos taurus
tatacataacatacgtgtgtgtgtgtgtgtgtgtgtgttcagtgttttgaaaagatcctggcctggagtaagtgtacacagtgagtgtaagataaaggcccgccattgcttttatcacttattattactcttgacttcaatctaattctctttcaggaactagaaagttttccagctacccatgaagagaagaatgagagt

SEQ ID NO: 28124 - DNA, 201 bp, Bos taurus
aagcgactgagcacacagcacgttttaaaacaagtagtatatgagctgttacaaagtttcctgagggcatactgaaacagtcatatcacatttggccccacaatttggttttaaaaaaatgtgtgctaaggattgaatcatagacatttacagaaggactgctcagggatactcaaacatgtttcgttaggagggtcaaat

SEQ ID NO: 28125 - DNA, 201 bp, Bos taurus
aggaactgagatcctgcgtgttgtgcggcatggccaaaaaacacataaataaaaacagattgaaaacagaatcacgcggtgcagttttggaggctgactttcacacatgaagaaggaggccacgtgacttgtatttcttcatcagagccaccacggaggaaaatcactggtgatttccttttctagttctccatgcctatc

SEQ ID NO: 28126 - DNA, 201 bp, Bos taurus
gaccaggtgtgtggggccatggatcacctgtactgcaccagctgtccacagagagggcagcctatggattaccttctgccctcaaatacgatgggcaggccggtgaagtcattcttcattccgcctgcagtctgcctaccctgaatatggatcctaacgatctttgtttgttgtttaggggacaaaaggcctggctgaggc

SEQ ID NO: 28127 - DNA, 201 bp, Bos taurus
gatacaggcaggaatgttagaatgattaagctgagtaaggacagaaaagcgtgacctgggtgaagaattgaacctgtggaagctgcagattctggccttgcgggctggaggcttcgaggcttgctgtagtcaggaggacctgtcaggacggagggtggcgtttgcagtgcagaatgtttgaacctgagattatggtggcct

SEQ ID NO: 28128 - DNA, 201 bp, Bos taurus
gtcttccacttctgccagtgtgtttctgttttgtaaataagtcacttgtatcattatttcagattccacgtacagttcaatgtcgtcccaatagagcacactccctgcccgcggatgcatctacacacgcacctttctgaaatgtgccacatttccctgagcacacggaacgctagagtcctcaccatcagttccccagat

SEQ ID NO: 28129 - DNA, 201 bp, Bos taurus
gaaagagaaatcagctgagatcacaacattcaaagtttgaaggaaaatttcaaaggaaaaccagatacaagtgttatcatggattcagaaaggagcagaagcatttccaaaggtgtggacagcaaaaccataccccatccttccatgcgggtcgagggccgcaaagctaggcgggcagcagttcccttgggaagagtggtt

SEQ ID NO: 28130 - DNA, 201 bp, Bos taurus
aagctccgcctaaagctgagtgcccctgctgagtttgtgattaatctctccatccgaaacttcactctccttctcggcccatccttgatcccctcggggttgaggactgccaaagaagcaatgggactgaacctgagcagagccttcagggccctccctggggccaaatccccccacgtcccctgttcctcatgtgtagaa

SEQ ID NO: 28131 - DNA, 201 bp, Bos taurus
ggagttccatggtctcgtctccactcccccagaccccacaccgaccccctaaagtgcagggggtgcagtctcatcacccctcagactccagctgccccacctcatctcctcccttcaagggtcaccttccccaggacagaactggctccttgagtataaatactgtgagttcccatctgtctcctctgtagagccgtgacc

SEQ ID NO: 28132 - DNA, 201 bp, Bos taurus
ttgtttttatcttctgattttagagtaagacaagtatagaacaatggctgggtggtctgaaatgtctttgcagcatctagcacaccaggtgcaggcaatatacattaagccataaaacgaatcagaattccaaacacaagaatatgttatagtcagctgcttttgcagcagggtgaattttagaaaaagactcaattggct

SEQ ID NO: 28133 - DNA, 201 bp, Bos taurus
gctgtggctttaatccaccaggttataaagaacttcagtaggagacctggcttagttagaaatttgttaccatctgtacctgagttctttcccttgagtcatgtgcacacacttgaaatttttctagataggcctgtatggcttctaggaaagataaacactatactgatttcctgttgcattgttatcttggtcaaatgg

SEQ ID NO: 28134 - DNA, 201 bp, Bos taurus
agttggacacgactgagtgactgaactgaactgaactgatggcagcatgtactctctccgtctgcactgctcaggtttcagattgctcagcagggccaccgtccaaagctgacattgtgttttgtgcccttcccaggtccaagcagctcaggcaaccagctgcttggctagcgcactgttccaggtgggccgtgcatctta

SEQ ID NO: 28135 - DNA, 201 bp, Bos taurus
ggagaatcagtgccgccaaagtttaaacccagaggtggttaaattttaacctcagccaaattttaacctcagctaaacgtggagggcctctcgggatgctagggatggagcaatgctgtcaggaattctgtccacaggacactgcacgaacaatcacatctcgacccctcctgcaaacccaccctggggatggcactgccc

SEQ ID NO: 28136 - DNA, 201 bp, Bos taurus
gaaggtaaatgacatcatggccagattcagacaggggtatctgttccgacctccccaaacttcatgctctgtatgacccacttgccaaggcaggcatcatcgtgtcacatttataaatagctccaaacacctaggggcttggggcccctggacacaaaaggaatgtctgtctttcttcagcggttgctttgcatgaaataa

SEQ ID NO: 28137 - DNA, 201 bp, Bos taurus
attagtgctgggcttcagggctccaggcagctctgcctcccagttggtgccctgtcatccttggcagttttcatacccagtgcatttttaggccctggggaaaaaaaataacagctttaaaataaggcaacagaatttggggcagaatttcttaagcctgtgtgtgagatttgagctgcatttcaggggtggccaaagcca

SEQ ID NO: 28138 - DNA, 201 bp, Bos taurus
atctttcaatgaaataagctctcaatatttaaggaaatataaaggcgtaggcagagtgggatttttagatctggacagacattcctttgcaacagacactgctgccagcagctgtgcgactccacaagggtctgagcccagggaggctgtgacaagggcggccgcaccagctccagctccactgtccccgccctccaagaa

SEQ ID NO: 28139 - DNA, 201 bp, Bos taurus
caagctggggctgcagtgttcacagctcagtcaatgatggaagatggggtgtggagcgctagcctgtgtttgggctgaagtacttactggcattggcctcgtgctcagaggcgaagctcctggcactcctgctggacacttgctcttgggcacaaagtcccttgctggccctgagctggttggggctcctgaagcctattc

SEQ ID NO: 28140 - DNA, 201 bp, Bos taurus
aggatttctgccagcctttaattgctaccttgaaaaattctgcatccctctcagcattagaccaaagtgcagtgtggtttcttgggcatagtgaactaaacgtgcatgtttgtcagatgaaaggcatttcatggaagcagtgaaagaagaactccaaactgctcctggctctatagcctgcaattggaactctaacttctc

SEQ ID NO: 28141 - DNA, 201 bp, Bos taurus
acatttaataatatgttaatgatatcttaataaagctattttttaaaaaaagcaagtaaatagaatttctcacattagccactaggcctaatggtgggccccaattgaacatcccacctgtcctcagcaatctgttcaggctggtcacagttttgaaattgtatgttggttactttccttcctgcctggtccactcctggc

SEQ ID NO: 28142 - DNA, 201 bp, Bos taurus
ctaaggaaatggtagaggatcagatcacttctgagaacatccagatcaaagaaagatatgaaccatcttgttacatgcttgaaaacatgtaacaagtgctgtgtaatataaatcaatcaacttgcacctagagaagtcaaagcaaacctccaaccgagcaaagacaaaatttcaaaactcagaaagaacatgccatctact

SEQ ID NO: 28143 - DNA, 201 bp, Bos taurus
attaagttttaactgctggggtgtttattatgatacatcaacattgaaaaaagggtttggaaaatatacttaagattcacattatgttttatgattatctatgggaaactaaaactcatctatgcctaagtaagactttttgatcagatgatgggagagtgttttatcaggtgtggagaacacaggaacctgaagggaagc

SEQ ID NO: 28144 - DNA, 201 bp, Bos taurus
aactgatcatcactaccctaaataggatttcttgtcccataaaagatgaatgaaaacaacaattattcttgaagctaagacaaaacagaaacatgtattatcatttgactcatttaacaaagaccagtggctgagctagacattaattcaatattatttacttacctaatttctctcttcagttcagttcatttcaatcat

SEQ ID NO: 28145 - DNA, 201 bp, Bos taurus
cagaatcaggcctgccgcttcagctggatgacttgttccccgaggtcacctcctacctcttgggtctgtttcactcacagcctcatcttgaagacccaaccaagttctggccccttctcccacaaagcattttctgttttcttccacatcttccaaattagatcaactttctcctctgaacctctgatcaactgttaccgc

SEQ ID NO: 28146 - DNA, 201 bp, Bos taurus
gcctagaaacagtgagtgaagaataaagcagaaatacagagacagcaaagagagagggggcctctgagggtcccacagtctggcatgtttctgagacccatctatattcctgtccttgggttccataaaacatccctctaatctaatgatattatgacactctattttcctttcagaaaggataggggctcaaacatgtac

SEQ ID NO: 28147 - DNA, 201 bp, Bos taurus
aatgatatgtataaagggcctggcctcatgagctgggaagagttttacaagtagaaaacacttaaatataaaccaggtcataagacacagagggcctgaacagctgcaggcagcttcttatcaaatggatcatttctgagctctgaacaggtgttatagacgttactggataagaagttactggatgaggtctatatttat

SEQ ID NO: 28148 - DNA, 201 bp, Bos taurus
atcctgtcccttctaggtcagcactgtcctttgtgcccatccattcctccccatccccgacgcccctcattgcatcttcagctgctgccggaatatcaccacttggttgtctaagaaaccattcaaaccaatgaagttcaaagctgttctcaactccccctcaaccgtacactctcacctgtgtttcccacctcagctgct

SEQ ID NO: 28149 - DNA, 201 bp, Bos taurus
tggccaatcattttgatgaaacagcatccagaaatgccaaaaaatgaattctcctttctccactgcactgtgacttgtcaagggtatgaacaacaatataaaattctcttttttattcaaaaggccaccgtggtatctagcaatgtgatttgtgcattacaacaaacttctgaactgaaatgaacttctggaactctgatt

SEQ ID NO: 28150 - DNA, 201 bp, Bos taurus
cagaggctgggctcatagccttactcttaggaccacagctgattctcagaacagcatgaagtggggttgctgtgcagccctaggggaagcccccacctgcatgttagtgggcccagcaggagtgctccactccggccactgcaaacagcgtcctttcatttatttgttttctgttcaagttactacctcccacaaaggagg

SEQ ID NO: 28151 - DNA, 201 bp, Bos taurus
ggcaggaaatctagcaatatgtgcttttcacaagtgcccaatcacttaattagcataataaccccaatgcagcatctacaagaacttcagagattgaaggaaggctttccaagaggcagaaattttcaaagggcaaaaataaacagacaggaaataacaggaaaagtacaaaggggtcatgaagcaataagaaaaatgtca

SEQ ID NO: 28152 - DNA, 201 bp, Bos taurus
agtccatccaggaggaaggactctcctctgagatcagtgggacagtgtctggagactcatatcctgagagagggactcgtgaaggcaaaccagccagcagtgtggcctcagactgtgcttccctgtccaggtctgacccttgataatggccccgatactttgggataggaggattatggaggtggatcaagaaagtaggta

SEQ ID NO: 28153 - DNA, 201 bp, Bos taurus
cacctctgttgtgcctctagataggcctgttctgacctggtcttagttcagccaatgactccactcccatctccatgaccaagccccatcttgggactcgggcaagtgggtctctctcacttttttcctattcccgagcttctttcttgatgatctgcttctgcctttgtttcccaaagctgggagtttatcttcctgtct

SEQ ID NO: 28154 - DNA, 201 bp, Bos taurus
tggcaacctgctccagtattcttgcctggaaattcccatggtgagagaaacctagcggctacagtctacagggtcgcaaagagttggacacgactgaagcgactgacgcacatacacagcacacgcagtctggtgccagaagccgtgtggtatggcccctcagaagagacctgtgctgaaggaacccagaggagaacatat

SEQ ID NO: 28155 - DNA, 201 bp, Bos taurus
tggccattacataccacacactttactagtgataaccatggtgaatgcttctgtgcaattttagaagtcaactactcaggtttagttgttggtttgaatacgtcaggcctcaatgttgagaaaggcagatctcaggattatccattccgaatatcatggtgtctgcttcctctggctgagaatgcagtgttaatttgctag

SEQ ID NO: 28156 - DNA, 201 bp, Bos taurus
ccaaaagcaagggtcagacggaacttaagctggctttgtggctctcatttactgccccctaatgaaagacatccttctgggatcctacccggccatgtgtactcagcctggtgtctcccacggcttttgatgttttgacatgacacacagagagtcgatgtgcactaaaatcatcctattggtatataggctgttgtttaa

SEQ ID NO: 28157 - DNA, 201 bp, Bos taurus
tttgcttgagcagtaacaacaagcagatgacttctcctttgtggcttaagaagcatagaaggaagatactatcagagacatatggcaacatttaattgtaggtctcctgatggaaacattgaccctacagcataaaagataatatccacttcaaggtgaacttgccagagttgaatgaaacaatgtatatgagtgtgtctt

SEQ ID NO: 28158 - DNA, 201 bp, Bos taurus
ccatccaccccatgcagaggcagctcatgtttgggtaacaagatggtctggtgcgccaggctttcccagctcctgactaatcattgcctgtgagacccaccgtgtcctgactccactctcttgtctactcgtgtctttaatccaccttctttgatgccaacagagttattttcctagagagcagctctgtcacttcccttt

SEQ ID NO: 28159 - DNA, 201 bp, Bos taurus
ttgcccaccccccgccttccccgccccccgccccaaccctgctctgcttcctgccgcagccactgggcaccttgtcctttcctcaagcagcctgattttctagccaccaaaaataccaacatttgataccaggcctctgaaagctttggctggggtcatgtttccaaattcttgactcgagaattgttaaatgagaactcc

SEQ ID NO: 28160 - DNA, 201 bp, Bos taurus
tgtgtgtgtttctcacgacatggccaggagggagccggtctcatcacccacaggcaggttatctcactcgtccaaggtcaccagagtgtgtcgcagcctgggtttaaacccaggtcaggtggccctaatccattctctcagcaacggcaccattctataatttctctcttacacactttttacttcacagatttttttcct

SEQ ID NO: 28161 - DNA, 201 bp, Bos taurus
gccctggggcctgtgctctgcaacaagagaagccaccaccgtgagaagcctgtgccccgcaactagagtagaccccgctgaccacagctagagagagcccatgtacaacaatgaagagcctgtgcagccgaaaaaatttaaaaataaacttaaaaagataaaacaaaaataaaagcatagtattgaaaaaataaaattcta

SEQ ID NO: 28162 - DNA, 201 bp, Bos taurus
ccgggtttgaagaaagagaccatgtatcagaaccagagtcagctgtggcagatgctggaattataggacagggactttagagtaactggcaggcatcagcgcaatttctcttaatacttcagcatacaaatattgcctttttagttttcaaactaaaaaccatatcacttgcccagaaatctgaaactgaaaaagcaactg

SEQ ID NO: 28163 - DNA, 201 bp, Bos taurus
cccatgcaatggaaaatccatgtataacttcagactccccccacatttaaccactaatagttcgatgttaaccaaaagccttaccaataacatacaaagtcgataaacatattttgtatatgtattttacactgtattcttacaataaagtaagccagagaaaagaaaatattattaagatcataagaaaaaggacataca

SEQ ID NO: 28164 - DNA, 201 bp, Bos taurus
ggaaaaaagttgctctaaggcttcgcttaactctgggtttccctcttctctcagattttggccttataattcttcagtgcctttttagctctctggtggtttaaaagatatatatatatatatgtgtgtgtgtgtgtatgtattttaaattgtgttaagttttacataactgaacttaacattttagtcacctttaattgt

SEQ ID NO: 28165 - DNA, 201 bp, Bos taurus
tgtgcatgtgtaggtaaattgatcatttgaggcatcaacctatggaataccctttctctctaccctctaacccactgggtctacaccactgggactacattggccccaggaaggctgtagttggaattatggtgaacaaggtttgagacagaaaagactggcagggccatgcctgtgggcagagaagtcctcaccctcatc

SEQ ID NO: 28166 - DNA, 201 bp, Bos taurus
ctgcctatattcttttgcgactatttttttaataggtaagaagtaaatttatcgagagagagagacacagagtgtgggccatctcgaaaagtgagagctttctatgactacattttttgcccaatagactgttgagatttattcattaactctacttcattcatttaattaattaattttgggggccacactgtatggctt

SEQ ID NO: 28167 - DNA, 201 bp, Bos taurus
aaaaaaaaaaaaaatccgaacattatgcttcagaacaagatgtgtagctttataaggagcaaagatcaagttccagcttccaggcccctccctggagctatgtgttggcagcctgctctctcctaagcctctaccaactaagattaacttaacctggaagccggagtaggagccagggagggatggaggcaggggctggcc

SEQ ID NO: 28168 - DNA, 201 bp, Bos taurus
gcttcagcatcagtccttccagcaaatattcagggttgatttcctttaggattgactggtttgatctcattgcggtccaagggactcacaagaatcttctctagcaccatagttctgtgactagcctggcctaaaataacatgcttaaaaatatgactgaatgaaaacatgtgcatgcacgtgtactcagttgctcagtca

SEQ ID NO: 28169 - DNA, 201 bp, Bos taurus
agacctgtttcttgagggcaggcatctcacttgattttagtcaccatcatctgaactttacacagagctcagtaatatttgtcaaatgaatgaagcaacacataagcaataaactcagtctctaggcaggcttgtacatagcaaatgcttatcatagaaacagggtgccttctgttctctctgtggctttgtgccagtctg

SEQ ID NO: 28170 - DNA, 201 bp, Bos taurus
accttgttgtttatatatatacaacaagataatgtatgtttttctatatagaagcaaatccttgaatgtaatggagtttgggaggttagggtgaggatgtgcataggcacaacaaatcctgatgataatgttttgaagaggcagagttacctttcaggaagtttaagttagctatacaaggcaggataaagtacagggaaa

SEQ ID NO: 28171 - DNA, 201 bp, Bos taurus
ctaaagctcacagaatccagtgaaggtgtccatagatgtcatgacttcagcagcgattgttcttgagcacaaagatgaagaagtgtgaagcagttaatgcgccttgatgcagactccatggggctggcttttggggcaaccacaagcttccaagaaattttcattaagcagtctgtgtgcactcccaggaagacgagatgg

SEQ ID NO: 28172 - DNA, 201 bp, Bos taurus
ttcctgaccaggaatggaacccgggccccttgcattgggagcatggagtcttagccactggatcaccaggcaagtcccttatgttgtatattcttgacaccctggcatctggggcctcactgactggtaagaaactgcccctaacagggctagccaattcttagagatggtggacaactcctctgtgaaaatgactcttgt

SEQ ID NO: 28173 - DNA, 201 bp, Bos taurus
tactcagatcatgcaggttatcttcttgtgaatcattttggttagggatggttgtcaggaactcttcgagactcagggggataaatgagggttagatttaatttttttgtagcagatagcatgaaggccagaatgcggtagttgaagatgtattttcttaatgtaaaataaatattttatctgaagtattttatattcatt

SEQ ID NO: 28174 - DNA, 201 bp, Bos taurus
gttgttttgccaggcaaagggggccacagtaggcaaatgcccttgaaactatgtcccaacctagaggaggtagtgaggagtttttatactaatgatcagcgtgtggacattcttctgactgtttattggtgaggtaagtagaagtcagcaacatcaatcttctggttccaaccagtctgggatctgcatgcttgagttcag

SEQ ID NO: 28175 - DNA, 201 bp, Bos taurus
ccagaagtcttgcctagtacacaattctacctcctaagtgtaagtggaaggacttcagaattagtcacaccaaaaaaagaatatgtgaaatatagtagaggaaatttatgctttgcacatgcatctctaatgtcagggatgatgacaacccgaggcacagacatgatattcaagtgcatgtcttatgtgttggaggaaggt

SEQ ID NO: 28176 - DNA, 201 bp, Bos taurus
cgaaaaactcacacttacagtatgtatcttgattttgaagctcttgatcctttgaaagaaagcatgtaacaggttggatatatgttaaactgactagttagtgctctttggtttaagtgcatttggtatttgtggttttttttttcatttctttttataattaccttctgtttttacttggaaaatttttattaagaaata

SEQ ID NO: 28177 - DNA, 201 bp, Bos taurus
agcattttactctctgggtgctggaagcacaggtgtgggaactagagtagaagccaaaaatctaatgattttgaatttccacagaacagggctctgggctctaaaaccctgagctgaagacacagtgggaataatgagaagcagttgcgttgttttctatcatttttaggttttagaggggtgcagggaaaagggggtcac

SEQ ID NO: 28178 - DNA, 201 bp, Bos taurus
ggggtgtccatcttatgtcctgccccacttcatttctatttgaaaaacaggtcttgaaataaacattaaaaatgttaccaactttctctcttggctagaaagtgtgtacataattatatttcttttttacttttctatttttaaaaaatgttctcaagacaaaaatgataagtaattaaagatctagcacctgagaactaa

SEQ ID NO: 28179 - DNA, 201 bp, Bos taurus
gagcagcagacgaagcttcacgcttgctcactcacctcctgctgtgtggcctgggttcctaacaggccaggaacccaatctgtggcccagaggttttgggaactcctgctttatttgggttcattgtcctgaacccactggcagccatttgttatgggtcatgtgattctgtaggactggccacttccccctgggggtgtt

SEQ ID NO: 28180 - DNA, 201 bp, Bos taurus
acaaacatgaaatgcaatgtcagctggagaagctgacaggccttgctggagcaatatgaccatgggctctgaagaataggaattaaggcaggagggaaagctggggacatactagaagggccaagatgagagaaagagggagaagacagagaagggaagggatacagagacagggaggactcgactggaagagtgtgtgtt

SEQ ID NO: 28181 - DNA, 201 bp, Bos taurus
cctggccaacacacctacaatacatgaaacccctgcctctactcacacacacagactcacactttcatttaatatgccttggaacacattccatctcagactataattatcaaatggccacactgtgattcactgcttcaacagaatataacgcaattaccaacttcttagacactgaggctaattccagctttgctcttg

SEQ ID NO: 28182 - DNA, 201 bp, Bos taurus
tactgtaaagactctatatgataagtaactctatatgataactctatatctaactcctaactatatctaatttcctcttatgcaactataaattatgtgattatatctgaactcagacatcaaaattagtactatatcttgtctctatcgtctcttttttgtaggctgaacatagaattcattgatgttacaatttttcaa

SEQ ID NO: 28183 - DNA, 201 bp, Bos taurus
atattatcttacagcatctcactgaaagtataaaaaaaaacctaaattcaaattacagtttcattggctatgtgaacctgaacaagtattttgaacccctgtaggctcggattccttaatgcaagtgagggctaataaaacttaagattagggctttgaattaggactaaatgtaaactaggagtaagaatagttccaaaa

SEQ ID NO: 28184 - DNA, 201 bp, Bos taurus
attttgaactaaatttaaacagcttactaaattgggacatttatttttctaaagacaacaaataccatatcattgtgaaaaccaaactatatagtaaagcccaaggttaaaatagcaaatcattctaggagttaggactacaaaactagaccaaaattttgattgcatctcaatgaaaaggagatgacaggtgatatttca

SEQ ID NO: 28185 - DNA, 201 bp, Bos taurus
tttggagcttcataataaaaataaacgcttttctatcagaagacgtttttattgtaatagtaataggtggggcagaaaatataaaaagttaaacttttgtatgcttgctcctgatattaaccatcctgggcttctgaggaatattcacaacatttcctatccttattttcagcaagctgaagaggatagccagctaaaaaa

SEQ ID NO: 28186 - DNA, 201 bp, Bos taurus
accccacctgcccccgggtgacctgggtcagcctggccggtcagtgccatgtgagacgtagcagctgcttgctgttttttttgttggaatccaaggtgccgcaaggacaagaactccacacagggctgtccccaagtgatggccttctctttgtcccacctttgccacttccttttgtgccactgaagctgactccttctc

SEQ ID NO: 28187 - DNA, 201 bp, Bos taurus
aggatttaaatggagtcttacagctatttggagtagaaagaataagaattcgagaatgctgaggcaaaagaacacaggagacaaaactcaagctccagaacttgaatactgagaagagtaggaagaggtttggattttttttttttttttgactgagctaagtggtcttattcttttaaagaaagtcaagattacaaagga

SEQ ID NO: 28188 - DNA, 201 bp, Bos taurus
ggcgtgctgcagtccatggggtcgcaaacagtaggataggactgagcgactgaactgaatgatactgaacctcctctcatgtgccattatatcttttttgtggaaatatctgttcatctctttggcctactttataaatggattttttaaactactgaattctgagaggttttttttttcccccaaaagtatattctggga

SEQ ID NO: 28189 - DNA, 201 bp, Bos taurus
aggcctgactgtcagttcaagagggaaatggtgtcaggacatctttcagagctttcccacttgcctctgtatagctttctgctcacacctagtgaaaaggatctttgggagaagatggcccagttctcatgctttgccatttcactgtttcttagcaagccaggcctcccactcttagttcctgaaactgttccggctctg

SEQ ID NO: 28190 - DNA, 201 bp, Bos taurus
cctcctttctggctctccagtcaccatcctggaggacgaaagaacctgggacttgggcaaaataagattgtgtgttctaatgcttcttgggtgcttatccatgtgttcattgagcgctgactgtggaaagcagaactccaaatgttgttgggattttggcctatcttctcaaggccctgagaaatgaagttggttgagata

SEQ ID NO: 28191 - DNA, 201 bp, Bos taurus
cttccaagaatcattttcttggtagagactggcctcctctacagcagctggagctggtgtgattctggagttataggatttgggttctctcagtaagtctacggcccttagctatcaagcagaggggcaggtgtaagttggtccagggcagctgagaggaggtgggctgtttctttaataaaagagtcaaaggccagagca

SEQ ID NO: 28192 - DNA, 201 bp, Bos taurus
gcgtgggtcaacgatggcctactgcagggtcgggggcactgagtgcagcagtgggtgcatgggacctttagaatagtgggtcaccattaccttcattaccgccaccattggcctcaggtcaaacaactgggaaggaacacagccccacccaacaacagaaaattggattaaagatttactgagcatggccctgcccatcag

SEQ ID NO: 28193 - DNA, 201 bp, Bos taurus
gcagttaattgcagtgactgggggaaatactgttgttccatgttaatacgttataggatttagatggttcaataaactggtgatagtcataaatctaccactgcacactttattacatccatatcacataccacctaaataacatgtctgaaacaactcaaatgcaatttctcctcagggcagaacgcagtaacctcttta

SEQ ID NO: 28194 - DNA, 201 bp, Bos taurus
catccgcctcggaaaagtcctttcacagcatggtcctcaatactttttctaaggctacttctcagacatcactgaattctttctttggggatcattatttttgcaagcatgagctcttgacaaattcttcatggcaatcagttttctcttaagccctcctccctaaatagaaacagttgatcataaccccggggggaatta

SEQ ID NO: 28195 - DNA, 201 bp, Bos taurus
gtatttccttgtacagcaaaatctacagtttattattactgccttgaaatgtgtacactaccaattttttcccaactgttttagcaaaattgggctcccgtggaagcccttgcttgcaaagggatttttagttattcacaattaatagtctcaatggtaaaagtgactcaccatctcatcattcccattgaacagagggaa

SEQ ID NO: 28196 - DNA, 201 bp, Bos taurus
aaaataattttattgtcatattgattatttcccaggcttttatagcatgcaatgcccttctatgaataacttgaactattttacattcaagttgccactgaaaaaaaaattaaattttaattgaaaaacaactacatatggaacctttgggatctctcaagtatatgatgcttaaactagttttgttattggtttttcata

SEQ ID NO: 28197 - DNA, 201 bp, Bos taurus
ctaaaattattgattattgagaaaaccttatctacttaactttcttattgagttttgttttaagaagcacatgactctatgtgctatattttctgatttataaattccaatttaaagatcaaatttaaccagatcacaaaagggaaggtgctcaaaccattctcacagtttcttcacggctctcataagcaccctcaccaa

SEQ ID NO: 28198 - DNA, 201 bp, Bos taurus
ttattatgattgaaagatgcccttcttaataaccatcatggaagtttgaaaaaataaaagtttattactttgaagatctgaaaattacagagcacacccagggccacactatgaggtcatgaagagagggagagacagggagacatggagagagagaaagagagagaatgggcctcagctcagtcactcagttgtgtccga

SEQ ID NO: 28199 - DNA, 201 bp, Bos taurus
gggtgagattagtatttaaagaggtggtctgaatagagatgttctcatcaatgtgtgtgggcatcagccaatccaccaagggccttagtagacaaaaaggcagagagagagggaatttgttttctgtgcttgagctaggacatccatcacctgctctcaaataccagttctcttggttctgaggccttcagatttgaactg

SEQ ID NO: 28200 - DNA, 201 bp, Bos taurus
ggaataggcaggatgcccttctcctgcctacagctgcccctgtctccttacttgttgcctcaatgggcccttatctttctggcccctgagtatatatataaaagccttgttcttgctaattcaacccctgctcatgtgtctttgctccttgactcaactttggaggaagagttggtgtgtatgaatgctgatatgtttggc

SEQ ID NO: 28201 - DNA, 201 bp, Bos taurus
ttgcttttattcttgtcatggttgaggacagttgatgataatgcaggtagaactatcattaacttgttaattttgattattttcagtctgaattcttgatgttgtaccaccaggctctgtcctctgctttatcctgtttaggtgaaaggaaggcagcattggccagtttagggtggtacatcagggtgatgtaggaagatt

SEQ ID NO: 28202 - DNA, 201 bp, Bos taurus
tctatttctgctctcctcttgttttccttcatctaccaaaaaatggctcttcattacagcacttgatacttcttaagagtttccctcaaaaacccaggctcataagagattccaatccaacaggacttctattacctgtggcttctgcacttgccctgtagtcctcctttccttccccacactgtgctgtgtggaacttgt

SEQ ID NO: 28203 - DNA, 201 bp, Bos taurus
tatcttagactatatagagaaccctttctctatatagtctctataaaattgtgctaagtgttttttctctccataaagtttcgataagtactaagtggccatggacttgagatcatacttcctggcaagaaccaggaatgtggctatcatcagacctatataccttaaaagacatcaaagcttaggacagaacaggtgaaa

SEQ ID NO: 28204 - DNA, 201 bp, Bos taurus
gatcttcatatgtcaagtaattctggtatgtgaagtggacatttgaattttattttgtggagatggtggattttgttacattgttctaagactaccagtgttttagccagtggtctgagttatgttctcctcaaattcatatgttgcagtcctaattctcattaactgagaatgtgatgcatacattggtgatatagtctt

SEQ ID NO: 28205 - DNA, 201 bp, Bos taurus
cagccattgctgtggactcatgccaactaaacccacagtggtttcccagaggggtctatggatgccctttcttatcagaagacttcagtgactcctttgttcaagcaggaaagagttccctcctcatttcttgtgagtagttctctatcccgaatagaactgtgagggtctttggcatgccacaggagacaccttcccatg

SEQ ID NO: 28206 - DNA, 201 bp, Bos taurus
gcaaatcatctggaatttaagtcatactaggatttttgcaaggcctatagtgctatggggaatacaaagaggccagatgatccaggggatactaccaggccatagcaagtggacagaatccagatcactgaaactggtgaagcaacagggtagtagtcaccacatggacagaagaaactgtcctcaagatcagagaggtca

SEQ ID NO: 28207 - DNA, 201 bp, Bos taurus
aacaataatgtttaatgggaatattaatgtttttcttgtaccttctgcctaggagagcacttgtttccaggcttcctacaacaaaacattaagagtttagttcacatcatgctgaaactataaagttgagtaaaaactgaagggaaatacatcttcagtgagattccatcatcccttattaatgccataattgagggctat

SEQ ID NO: 28208 - DNA, 201 bp, Bos taurus
tgaaaaccagcagtggccataggactggaaaatgtcagttttcatggagaatgcagcacttcttaatcatgggttttgtttgttaatttgataaaataattattgtattctaaatctttctatttctgagctaatctgatttgtcatttcttaacattttctgtccatttatattcctgttgttgttcagtggcccagtcc

SEQ ID NO: 28209 - DNA, 201 bp, Bos taurus
tgttcttcctctcttttatttgtggaggatggaaagttaatgtgataagaattaaagagacattcttgggtaagcacaaagaatagctctttccccaaaatgtagggaactgttggagtttatttcaaaaataaatgttaacatgtttttactcctttcaataatattgactccataaaatttatattcagtcccagagat

SEQ ID NO: 28210 - DNA, 201 bp, Bos taurus
atgttcacagattgtagaaagtgatttggcatggggctagaggctaaattcttctttactaagttaacattatttctcatgatttcactaagcaatttttaaaattttccattcagatacagtttgttttacttatttactggaataatacctgtcattcagagagcatttaattcactttttatgaaatgcactatctct

SEQ ID NO: 28211 - DNA, 201 bp, Bos taurus
aagccacttatcaattattctcctaagatagctttctacttgaaaagcatatgtagggagtaaagtaaataaatataacatatctgtttcattgcctagactttaataggccctcaaattataaaccatttttatttataaaaataagaatcacagaaaaatgttcatctacatacattaagtattcaatcacaaaataaa

SEQ ID NO: 28212 - DNA, 201 bp, Bos taurus
attctaatataaaaaagatgaagaagagatactggaggaagtgccaaggttggaccataactacatattgggttataattcttgccaactctatgatgaacctatttacaatatcactgctttacttaccaaagtccaagaatacatttttatttctgaaatgaaagaaatctgtttattctcttcaaattctcaagatga

SEQ ID NO: 28213 - DNA, 201 bp, Bos taurus
ctttaacaaattcaaaaattcagaacaagaggaaacaactgctgatgtcccaaattgaagtcatattgtattagtatattgatttcagataatcaacactgttctaatatgatataaaataccctaaatactaaatccaggcctccatttcaattttgcaatgaaaagtttgatggaatataagataagatagtgttaata

SEQ ID NO: 28214 - DNA, 201 bp, Bos taurus
catgatgagcagctgccgtgtcaggttaaagcaaacttcaccatctgatattcaacttgtattatacatagcactattattaaatggcaaattatagcatgggttaattagggttaccaaactcttgcataacttttggaaataaagtgctaaaatattgagataactgtttcaaaccaatatatcaaaaaactttaagat

SEQ ID NO: 28215 - DNA, 201 bp, Bos taurus
agaacatgttttccaagtcatgatttaaaaccatcttattttcttatagaaaatatcacagtacatgatgataaagtacagaatatttttagcattaagataattcagaaatcctaactactcttacagtgatcccactggcatattttcagtgctttacccaacttataaagattatacatttactaaaaaacctaggtt

SEQ ID NO: 28216 - DNA, 201 bp, Bos taurus
gtgtgccccaactactgaagcccacattccctaaatactgtactctgtagtaacagaagcttctgcaaagagaagcccacactctcaagcagcttgagaacagcatctgctcaccacagctagagaaatgcccatgtagcaatcaagaccagcactaacaaacaaaaaaaaattatagtcttggcaatttgctagcaatcc

SEQ ID NO: 28217 - DNA, 201 bp, Bos taurus
tatttaggaaggaaaaatagtaaatgaggaagtcaatggccatgatagttcagttactctgaataaaatccaaatttgcagctctcaagaggaagctcacagaatgtatttctgtggtttagactctggtgctgaataccttttttctcctccctcaatggggaaaaagtgacatttttctcagaggctaaaatcatgaag

SEQ ID NO: 28218 - DNA, 201 bp, Bos taurus
taacttctttttttaaattcaagttcaaatggttataaagcagtggacacaattcacatcatctgcaatacatttggcccgtgaattgctcataaacatacagtgcagtggtggctcaagaagttttgcaaaggagacaagagccttgaagacaaggatcacagtggccggcaaccagaagttgacaacagactgagagca

SEQ ID NO: 28219 - DNA, 201 bp, Bos taurus
tcagacctgtcagatactacggacgtccacccatagctcctcagcacatgcagttccatctcatagccatactaacagttaaggccagaggcatcaaatcaaactctactcatgcttacaaattgcactcaccacttctaccaactcatcttacccagaccctgcctgagagtggctttttttggccacaggagcttgatt

SEQ ID NO: 28220 - DNA, 201 bp, Bos taurus
ggtgcctgcagagaccatttgcaagaaagtagcatcagcaacagtcaccaagagaagacagaagtcagattgcatagcagccagaaggaatcaaaaacaggctcagctgacccaaaggctacaaggccacaaatgtcaagttcttccctcagtgcctgctgctgtcaactacaaaacagtctttcctggcaaggacagcag

SEQ ID NO: 28221 - DNA, 201 bp, Bos taurus
tctgtgggaactggatgtaacaagaaacagcaccagagctcaggctaaactatcacaaggtaaatttatgaagacacagaaacttaagaaacaagtgggttccactaagtcatccactaagtttggggcaaacacattttttttttctctacttaacagccacttcccatttgttcctgctgataaaatctctaattttgt

SEQ ID NO: 28222 - DNA, 201 bp, Bos taurus
cagtaaataggatccaatgaaagagcgtacacgtgttagtcagaaaagtgatgcttcaccaaacattctttctaaacaaaagaaaagctgggacccaaaactgatcttctgtatcgaactggtccctaagtaatggttgacagtgcttcacttaaaaccagagactaacctggcaatagatagagtcactccagcagacct

SEQ ID NO: 28223 - DNA, 201 bp, Bos taurus
tttcacaaattgaacataacagaagctgtccatatggccatatgaaaaaaacaaactgggaaattaccaagtgtgaactccctcaggtggtaaaagcttattgtgttctagaaacagaaaggccaaagtgcagagatctaacaaatgcaaaggaaaataatatgaagtagagttgacagttaggcagtagaaatttcatgt

SEQ ID NO: 28224 - DNA, 201 bp, Bos taurus
gcgtgctgcaattcatgggctcgcaaagagtcggacacgactgagcgactgaactgaacagaaacttactaaataataaaatagacatgacttcactagagaatgagaatgtttaggcctaattcattggtcactctgcttctcattcctatttctttatccaatgctctgaatatttttttgttttctacatatttccca

SEQ ID NO: 28225 - DNA, 201 bp, Bos taurus
ataggaaaagcatgaatattagcattttcttcatactcaggatctcaaatgccccctgcagttacatatgtcctttcaccttcctagctattcagctttcggtgtgtgtgtgtgtaactgttagtcacttggtcgtgtccaactctttgagaccacatggactgtgtactcttgtcttcccctaaacccccacctctaact

SEQ ID NO: 28226 - DNA, 201 bp, Bos taurus
tttaaaatctcttaggtctccagcaaatttttgtttaattagacattgtttcggaaacaaaaatagaaccaatgaaatatatgctttttttatccaaatctagatttctattatctttctctacctggtggcttggggatttaattcttaatgctgatatatttgtcaggaaggcaaattttaaaatatactagtgtaact

SEQ ID NO: 28227 - DNA, 201 bp, Bos taurus
agacactgcatggtgaacctgtcacatcacagctcagaaacttctaacatctcctcaggactggtctcatttggggctcaacctactctttcagtttctcgtgtgtaattacccttatcccactatgctccaacaaaaccacaacttaccattctttcaacatctccctcaaagtctaccactgatttgcttacattttcc

SEQ ID NO: 28228 - DNA, 201 bp, Bos taurus
ttctggagtgtggatgagaaattactaaatttaaagggttttcaatttaacttaattgtgtctatatctgctcatttcacatttgaagatctgtcaagggaaaaaaaatgtgattaaatttcaaaatatccttagtgattacatgagtcaacaagaaatgtaaactcttacagttgatgaaaagagtagagcacccaacag

SEQ ID NO: 28229 - DNA, 201 bp, Bos taurus
ataaccctaaagattatttaaaagaccaccagaaaggaaaagaaaactttatatattaccataacctctgcacaacatttaccaatgtaaacacagccttgcagtgaaaaatgaaagtaaaactggaatccagttggttccccatgatttagtttaaaacagtaagcacactcactgtaatatacaagtgacttgtcaaat

SEQ ID NO: 28230 - DNA, 201 bp, Bos taurus
tgcccccacatggtatgcaaggttcttcataagtagttatccacttgtctctaggctcaacttttgcccttcattctccagccacacggaatcacttgaatgcaggttcttaaatgaggttgttttctctgctttcaagtcagcgctgctccaattccatctcccccttcctctgctatctttgcccctaccttcattttt

SEQ ID NO: 28231 - DNA, 201 bp, Bos taurus
tacaggaaaatctcctataataagtaagtgaaggccgttacaagaacccttgattactgccactaatggaacttcttctgaagtttcagccactgatgaacaggtaggaggccagggaatcagctgacaaaggaagacaagcatcagggctatacggtagatgctcaaggaaaccggaaactgtgaggccccacagaggct

SEQ ID NO: 28232 - DNA, 201 bp, Bos taurus
ttactgaggagaaaaatattcagttgaccaaaaagttcattcatatttttccatcacattttatgaaaacccaaacaaattctttggccaactcactaaatcatctgtatataatggtttgcccaatgtttctgaattagtaaatggcagctccaagaccaaaagccacatccgtgattcccaagaaggaactaacaatgg

SEQ ID NO: 28233 - DNA, 201 bp, Bos taurus
gttccccaaccagggatcaaacccacaccctctgcattggaagcatggagtcttaaccactggaccactagggaagtcccaactggacaaattgtaaaccatgaagcagcacattatagcagaaagataaatgaatgttaaatgactgctattagaaaaaagaccctacccggtttcctcttcagcctccatccaatagtg

SEQ ID NO: 28234 - DNA, 201 bp, Bos taurus
cagtacacaaaatttcacatagcattaaatacatttttgtgcctcagatttgggaaaagggaatggtatgtttctatcactgaataaccttaattaaactatctctttgcacatgatattatctgtctatctattacctattatctagcaatctgtctttgctgagtggaaaagaacatgtttctaggactcaattaccta

SEQ ID NO: 28235 - DNA, 201 bp, Bos taurus
aaaagctagggtggtcctggccccaggcagagttctagaccatttctgaactgctgccgccacaagtgctagtgatgtctgccctcacctggctcaggttcttcttaggcctgagccagctctgcccctacaactgcatgctcttcttgtctgtggcagtctttgtcctggagaagagctgtattgtggaaccaatggggc

SEQ ID NO: 28236 - DNA, 201 bp, Bos taurus
attgttgtattaaaaataatttatttagtggatttatgttcttaactacaaaacttgagagttgtactgctaccatttagcagaatccaacaagttaacagggtccaacatattttcagattttcaaatatagcaaaaggctatatatacactggcaaagcaaaaccaggaataaaaaaatacatggatatttacaactgt

SEQ ID NO: 28237 - DNA, 201 bp, Bos taurus
ctttgggaatatagtggacattggccactggattttgcaacaggtagctctagaagtgttggctcaaggagccagttttatcgttagttgttaaaatacccaacagctattggccacttaccatgtgccaggcactgtgctcattatgttttgtgtttaacatgcattgtgtttacataacctatgaggtattatccatat

SEQ ID NO: 28238 - DNA, 201 bp, Bos taurus
tacaaatacataaagtactcacatagcacaatcaaatgtgaccgtatataaaacgaaaaggatattaatttttctgagttgagatgattaagtagcttccccaaaggagggtaacggcttagtgagggcacacatcccaggagaatcagcttatgtttggctctggttatagcgacattaagacgtcgccaatctttcaac

SEQ ID NO: 28239 - DNA, 201 bp, Bos taurus
aatataatctgaggtccacttgggagttgtggcccatgacagaagtggagtgactctacgttttgatactaacagtcaagccattgagacagatcctgcctttgggccttgagaagctggaatcactgggtcagaaactcaaattaagatccagtaacatgttggacttccctggtggtccagtggttaagactccacact

SEQ ID NO: 28240 - DNA, 201 bp, Bos taurus
atggtttgagtttctacataaagaacttacattttatttaaaaagtaataaaacatactaaatcaaagtgatgtaatttgcatttagaaagtttagaagaggcagtgcagtggttagaactaatgctttcactgcgaagggcacagtttcaatccctggttccaggaactaagatcctgcaggccatgcagcaaaaaagaa

SEQ ID NO: 28241 - DNA, 201 bp, Bos taurus
tttgctggttgagagtcctgataataaaaagaacatttttttttttagtatagtactctaagtggatcaaagtgctatagaggttagtggctacttgtgcccttcataaagaaagctgaaatcagtcttctcaagaggaagcctgattctccaactcagggcactttacaaggacagtgccttctgtttttggtctttcat

SEQ ID NO: 28242 - DNA, 201 bp, Bos taurus
gctgactcgcaaggaaaatgtgatcttttgtaacaggagggagatcagaccaaagaaagttttgtttcctgccaggaaggccgttctggagtgggtcccggggctctggggagcttataaaaatagaagaagccactgactgcttttacaaagagggctagggtcaattctgctcagaatgcaggcctacaacagcttggt

SEQ ID NO: 28243 - DNA, 201 bp, Bos taurus
tgagcaggcaaagccaagagctggcctggtgccccagcacacggaggtgtagctgggctctgacccagctcctcaaacaggttccatatggtcctccggctgcccctcatccctcttccccaccttgactgtttccgagattaaaaccctttcctggttgtcagcaaacagccttgctgcttctgcggctgagctggtgtg

SEQ ID NO: 28244 - DNA, 201 bp, Bos taurus
tgtcccaggccgggccatgcccttggctctggcctctgtgtgccgtgtgtggtgggtgcaccgggggtggtttgtggctcagagtatggaaattgttttccccagtttggaacgctggccttgtgtgggggccgctcagatttttccagacacagtgtactgcaaagagctctggtgtctctgttttgcaaaagcagggtt

SEQ ID NO: 28245 - DNA, 201 bp, Bos taurus
atcagaggaggctgggattatgatctctgttttatgagaccaagagaggttctgtaatttactcaaggctcatgtcatatccctaagggatctgggattccggacaccaagattccctcaaacccatgctggtgactctgtgccctctctgtagcctagaggctacttggggttggggactgtgtttgtgcttttctgaat

SEQ ID NO: 28246 - DNA, 201 bp, Bos taurus
gtgaccctgggccattcatgttctctctctggattcattaagttagggatggtgagaggcaggaggaagtcaggtcagggctcccaggctccctcacccccgttttcaccaccagcaatggcctgtatttagattgtatgtgtagaacatttagcccctggctcataacatgcacttagtaaacaatagccatttagtctt

SEQ ID NO: 28247 - DNA, 201 bp, Bos taurus
agttttgctgtgaactgaaaaagtgctctaaaaataaagtcattttaaaaaaatatgaaaaatacttaaatttgacacctgtttcgatcttaaattcatgcaacatgaccctgatcatatttccactgactggtcatttggattctgttcttactgttaagttgcttattactattattactaaaggtcactggggggctt

SEQ ID NO: 28248 - DNA, 201 bp, Bos taurus
ctagggaccagaacagccagtataaactcatttcgctgctgaagggctgtcacaggaatgtaatgtagtaatttagagcgtcctactctaggtgtggcctcggaaccaggcttcactgggagcgtgttagtgatgcagtctcaagcccccgggctggctgagtcaggagttgctaacatgccaccctggtgactggcaggc

SEQ ID NO: 28249 - DNA, 201 bp, Bos taurus
ctcctgacggttggcctcttccaagcaccatgctgcaggctccaggtgtgagagggtagccacttccttcctggggctacttgcagactggagggtctgatgagcaaggtggcctcctgttgccggtgtcagaagctgctttgagagtagagggggacatctaaatgtccccactccaaccctttctttctgagtggtcca

SEQ ID NO: 28250 - DNA, 201 bp, Bos taurus
gagtgagtgctgtggctgtgtaaacacggagtctggtgcacacatgtgggtcctagtcttgagtggtcagacagccgttggagcattgtgtacacacacacgtgggcagactgggccgggggtgcatacctagacagggccccacacggggaggggacgtcagggagcccccagaccctcccgtggtggccagcctcaaag

SEQ ID NO: 28251 - DNA, 201 bp, Bos taurus
ccaaggtgggtatcccattgccaggcctgtaataagagtcacacagtcttttgtgctcttcaactgactccccacccccatgagcattctcatcacccagcaaactggcctcttgccttcccttctgtaggcatctctgaatagcatcccaccggcccacaagccctcattgcctaagccagccctggagagagactccaa

SEQ ID NO: 28252 - DNA, 201 bp, Bos taurus
ctatcaccacattcccattccctcagaggggagagggtaatctaggcatgaggacagagtagtagagttgattcgggctggcacatctcggaggacaggagagggacctgggccccaggagagaaaggcttgaggcctggagaacctgcccccaaccaattctcagcctccaaaaattgtgacttttaccatcattaattc

SEQ ID NO: 28253 - DNA, 201 bp, Bos taurus
ttttccacattaggctagagcaaaggagtagaaaaacctgcaagattagatttcaaaaaagttgccctctctcaattctcctgaattcttcaaggtatgacggctaggtgcagtctggaagaatctttctgccgtttttttttttttttttttttaacatagactggaagcactgtagttgtattgtagtatttccctggg

SEQ ID NO: 28254 - DNA, 201 bp, Bos taurus
tttaaatttctgacctccagaactgtaggagaatatctgttgtttaaaaatacgaattttatggtaatttattacagagacaataggaaactaataaaacgaggaggaagcgacttgccgtaactgtgtggtgaaggtagtctaatgctaaggaaatctttgtgttccctgagttctttgatttttgtttcaggaacaagc

SEQ ID NO: 28255 - DNA, 201 bp, Bos taurus
ggcagtagggcctgatcttatcaactgtatttttcatttctacaggttctgtgtgtatggtttcaattctgctttgtcttcctacacattcttttatttggttactggcctcgtatctgtttagtcattttttaaatccctgtattatgtattttcttgggttattctgttctctatagttcagcgattaccagttgttac

SEQ ID NO: 28256 - DNA, 201 bp, Bos taurus
agatcccctggagaggggaatgggaacagtttcagaaaaaaacaaaacatacgtcaacagatgaatggataaataaatgtgacatattcactgcacagaatagtattcagtcattatatgaataaagtattaacacatgctaccacatgtaaatattgaaaacagtaagtgaaaaggccagtaataaggatctcctgttgt

SEQ ID NO: 28257 - DNA, 201 bp, Bos taurus
aacgcagggggtgccgtggtggcctaaacgttagttttctggctttcactgccacagcctggcttcaagggtttaatctctggtctgagaactgaggagagaaaaagaagagaattcaaatcaggccttgagatacggagggcctggcagacgtttgggcgactgtgtggtcaggggagggcatgaaaaggagaggaatgg

SEQ ID NO: 28258 - DNA, 201 bp, Bos taurus
tcaggtatgccaatggtttttaattactccaatgtgtattccaagatggcatggaaagatttgtatgctaagatgttatgcacaaaacagcagacagatatgtttagaatgatcccattttgtattattttatatatggaagagcatatactaaaatgtggtgggattgagtcgtgggatttcaggttaaaattttttgtt

SEQ ID NO: 28259 - DNA, 201 bp, Bos taurus
ggaaaaaaaagtcttgatttgcagtatttttcagttttatgttacaactaatttcaaactaccaatgtgaagtcagtgagcatgaatttgggaagagatacgtacagtttgctcccacaagtcatttccagggtactgctgccaactctgtacatggctgtaaaaagtaaagctcaattcatggaatttgacatgtctcta

SEQ ID NO: 28260 - DNA, 201 bp, Bos taurus
ccacttacctggccttagcatgttctgctttctgttgttgcttgactggtaagctacagaagagggactggattttggcctttttttgtgagtctccccttaacacacacacacacgcatgcgcgccccacatagcacaaggctgagaacactgagaatgctcaataaagaaacatttttggcctgaatgaatggcctgaa

SEQ ID NO: 28261 - DNA, 201 bp, Bos taurus
aactatggcaaggctggaaagtccaagggcttggccccaattcctctccccgagctcctttttttttttgtttttttgcagaatttccactcaagctcctttttctggcccctcaataggcgatacacatgggatgaatggggaacatatataggctgaggatacagagacgagaatgactgcctagccatggatctcagc

SEQ ID NO: 28262 - DNA, 201 bp, Bos taurus
tgccacagctaacagaaagcttcaatctgagccgttaagaatttactagttttgtctctcaacccctaccgcgggagacccctgaacctttattttccttcgaggctgtcctgggttttcttctttaacattgtccctgatttatggtatgtccacatttccctggatagtaccatcttttgagttatacatcatcagggt

SEQ ID NO: 28263 - DNA, 201 bp, Bos taurus
gtgccttcttgtccttgctgtccccaaaactagagcccaggtcttctggctcctgctctgagcacttttctcagttgtttggtaaggtgtgggcgggccccgggtgccagtttttctgcagagcccagcacagccctggataaacaaaaatgctgcgttggaccctgtcacttgatcaggtgtttgatgagggcctctgca

SEQ ID NO: 28264 - DNA, 201 bp, Bos taurus
tgaatgacacatgaactctgcccaaggcgacgcggcccacaccaatccattccacagatcactgctgacagagaacagggagtagaccttgaggtttcagccaaggtctgctcaaggtcttcagcataaagggtggccaggctgaacacacaccagcagagaagaggatgacatgggcttcataaactggcccatgagagc

SEQ ID NO: 28265 - DNA, 201 bp, Bos taurus
ccttcacccaggaaaggtcaattaaggtcatgtcattctgcacctctcaggagcccctggaatcacagcttctatccttccagctggcttttggcacatgcacgccttctctggccacccccaggggacaacagacactgggagagtctggcctcagggcaggctatgtacccatgggaattttctaagacttggggataa

SEQ ID NO: 28266 - DNA, 201 bp, Bos taurus
ggcaggacagagtggaggcccagaaagatgcacccagatggagctcatccccagcccaccacctctggcctccaccaccctatcaggcctcactgctccttctgtccctgtgacctgtcttcctcgttgtccctggaatcagtgactcacaggtcagcgctgactgcctttctcttgggcttacttgagtgcatgtctggc

SEQ ID NO: 28267 - DNA, 201 bp, Bos taurus
gttcagttatccctggtcctgagtgacagggacctcatatcgctgggcacagggcccccagggacctgggctctcagggacagcagcctgcctcccagcattgtgacctacccccaggtctcttgctctttgtgttttctagattgtgctctggggaccggccttggtttctggaaccccagcctcctgtttgcttttggc

SEQ ID NO: 28268 - DNA, 201 bp, Bos taurus
ctcagggccatgagactcagtggctgagatggggtcctcttcatttcactgcatccctcagccacctcagagtctctaaatggacgacagaagcacagagggggtggaggtttggccaaggccgcacagccactgagcagtagctaccaaatgggatgcctgaggtcttttgtaccaatgagttgcacccacgagtcacct

SEQ ID NO: 28269 - DNA, 201 bp, Bos taurus
gcgcctccccttgttccccctccttggccacagcaggcccaccctgctccccaggttgctgcatgccagctctcagcaatttggcaggcagtgctgaaatgtcaacctccctggctccgagaggcccacgtctgctggctatgagggcaccgggctccaggcagtcgccatgtccaaggtccccaagagccctccgtgtgc

SEQ ID NO: 28270 - DNA, 201 bp, Bos taurus
tagcaagaccacttgggaggattctcctggggggcaggagacacccgaagtcatccaccggctgtgccttcccggcggcccccttgggcggcagcgttccgggagacccactcgtacaagtgttgcttccaattaattgcctaggcgggggagggaaggggcctgtcgccgcccccgcccggaggctggagcgccgctcgt

SEQ ID NO: 28271 - DNA, 201 bp, Bos taurus
aatgtctgtgtagatactttcacaggaggtgcccaagaactgacggtcatagttccctctttactcattttctcaaatttagcaaacattggtcagtgcctgtggggctggcaaacagacagataaactgtctgctgtaactgcagtgtgaagagctttttgtaaaatatatttaaaaaaaaaaagtgctgaaggaatagg

SEQ ID NO: 28272 - DNA, 201 bp, Bos taurus
ttccccaccccccacctgtaaagtggaaactttagctccctggcaggtggtgatggggtccagacgagtccatacatgggacacaggtagcaggctctaacgtcctatgccaactcttggttcactgtggccccagcaggcaagatctggccatcctatcctggaagaagggctgtcccaagagtgtgtttatctcacccg

SEQ ID NO: 28273 - DNA, 201 bp, Bos taurus
cccttcctgggaggatggaatccctctcaagcttctcatctctttcttttcatccttaccatagctaggaaaggactcataggcccgcctggataatctacagtatgttccccatctcagggtttgtagccttgatcacatctgcaaattcctttgtcgtttagggcaacatagtcacagattctgggggtcaggatgctg

SEQ ID NO: 28274 - DNA, 201 bp, Bos taurus
aactgaggggaatacactcacctgacatgtatggtgccacgactcggatttaacctggctgaaacaacctcggtgcgggccccccacaaggaggaggccacgaacagcaggatcccaactcaatgaaagctcctgtggttgaagcggaacatgaagaaaacccagcgcaagggaactaacaataggcccattgtgctggag

SEQ ID NO: 28275 - DNA, 201 bp, Bos taurus
gctttcggagccctgctgctcttgtctccagaggatgggagaggagatgagggaagggcttctcctgatctcaaggagctgggccagccctaatcctcatctttggaccaagagcagcccctctttgtattcctctgcctaggacatgcttcccctccctctctccatattgctcctgctcacacagtcccagagtttcct

SEQ ID NO: 28276 - DNA, 201 bp, Bos taurus
cctggcagggtacagtccatagggttgcaaaaagtcacacatgactgagtgactaagcacagcacgttgccaaaagcacctacacgtggcctccacatgtagcttgctccacatgtagcatctccaccatggtgcttggtttctagagggaccattggaggccaagtctccctaagccccaaagcaggagctgcaagattt

SEQ ID NO: 28277 - DNA, 201 bp, Bos taurus
gtctgtaactgagaaagttagaaattttgattaaatggctctacatttccatttaagaaatgtgtatgttaacaggtattggagcaattctctgcacctacgtaagagatccctctttcttatcttttcctatctaagttgttttcttcctgatttggtatgattaatagtgggagttgggcccacactcaaaacagcata

SEQ ID NO: 28278 - DNA, 201 bp, Bos taurus
attattagtttcttttgtattatcaaccatgtttgttttgattgaaataaactctaatgaaacagaattatacttctgaaattttctccaggggccaattatatacttatttattttatgaatatctaaggagtactgactagatcctatgctttgtgtaaggcactcatgatactataacaagcaagacagaccaggtac

SEQ ID NO: 28279 - DNA, 201 bp, Bos taurus
cttgaagtcctaaaaattcccaccaaataaaacataactctcaactttcaggttgtgactattttttaatttgacacacagcatagccaagttgcctaaactctgtgataaaagaaaatctttaggatatccagagaataaggacacattatacacagaggaacaaagataagcatggtatgatacagaagaaaacaatgg

SEQ ID NO: 28280 - DNA, 201 bp, Bos taurus
gaacctaccttttgagagattctagcaatacccagttggacccatgggatatggcatggatgttaagaccattactggcaactgatccgtatactgcttgcgttttacttttcaaataaaacaaatgtatttcttacttattgttttttattatattttcctattgttgatgtggggatggaatatgtgctgtactccttg

SEQ ID NO: 28281 - DNA, 201 bp, Bos taurus
tgagactcttcacatagcaccccagatcttttgtatagggatacccacttttgaactcacagtattcaccagtaatcatgcatatacaaacattttgacccctgtttacagagacatcactgatttatttctatgaatgttcttccaagtggctctgtaggatggtggctgcagacttcattagctcagccttcagaactg

SEQ ID NO: 28282 - DNA, 201 bp, Bos taurus
aaccagaatcccaacactcagagagaacaggaccctaaggctataggcacaactttagttttctgactccagcatgcactgtgagctacaaagccgctccttctccttttctaatggtccctgtctcacgctgacagttacaaagggctccaggattctggtattacgttgatgatacagctggattttaatagttgtgag

SEQ ID NO: 28283 - DNA, 201 bp, Bos taurus
gaatatgagtaaattttcttcctgtgtaataactctcccctgtatttggatgatgggcagaaagaggctcattgtgacctccggttagcaagctggtacagtggcccttgctgctgttgaacgttattattaatctatatctatgtaaaggaaggcttcccaggtggctcagtggtaaaggatctgcttgccaatgcagga

SEQ ID NO: 28284 - DNA, 201 bp, Bos taurus
gactagtaagtgctctgagtagtatcatcatcaaagtttttagcattcctttctgtgctacaccctctccttcatgcactttcatcctgtacatcagttcccttagtactagataattaaaaaaaatcctgccaataaatctgctaaccagtgaaacattggagagacacactccccaagttgtcttttcatcagtggtgg

SEQ ID NO: 28285 - DNA, 201 bp, Bos taurus
tggatctggagagtgggtctttaggaggtaattaagattaaatgcaacaatataggtagggtcctcttctgataggattggtggccttagaagaagaggaggagagagattgatgtgggagaactattgataggtcaatctctccactatgtgaggtagcagaagacagccatctgcaacccaagaaaagagccctcacca

SEQ ID NO: 28286 - DNA, 201 bp, Bos taurus
ttatgctcactttttcctgcccaagatttcctggcccactgtccttaaaagaatcactgaaatatgattgaatctttctgtgctgaggtagtattaagggtatgacagaaattgttcactagccatgaggcatttttgattcagtgtctcactgtgagtctccctaggcctgcagctacccagaaactagaaccctgggaa

SEQ ID NO: 28287 - DNA, 201 bp, Bos taurus
tgtccaaggaggtacgagggctgacacagcaagactttcctgggtagggcactggggtggggagcaacagagtaaggggacccaggagaactcctgtgccatgtggcttttatgtgaacgtctcaggttttatgtgaacggggttagtttccagtttgtctttggccaatcattctgactcagtccttcctggtggcgcat

SEQ ID NO: 28288 - DNA, 201 bp, Bos taurus
ttattaggagaggacaaattcaaacatacacaaaagcattttgcctttttctcactttggtccaagatgaaggcaggtgataaaacagtgtgagctaaatccattttgaaagaggagtcttattgagtgatcctagacagacaaagggatcaagacctgttcatattaaataaatgctatttataaccaagccctttgaac

SEQ ID NO: 28289 - DNA, 201 bp, Bos taurus
agacagctctcccagcagctggcagactgagtaccttggtcctgaagggtggccctgggtggtgtaccacagcacagcacccactctcaggctcctatatatcaaagatgtcaaagatggagaaggcctgtttaacaagctgctccagaaacaagcacttgtgactttatgttgatctgtttcatgctgtagtttgcctct

SEQ ID NO: 28290 - DNA, 201 bp, Bos taurus
gaccgggaaccagaccttcaaggcaacgatatggagccacagccccagcaccattccgaagagtgtcctcaggattcacacttcctgagcccaagacttcacatgccagagaagcagtgtcttccctctttgccttctatgatcctgactgccctcacccctactggagagctctttcagtgcaataacatccaaataatg

SEQ ID NO: 28291 - DNA, 201 bp, Bos taurus
tgtactttccgcattgagttcccattgctcttttgtcagaaccagttgagtgtatgtatgtgtgtgggcctcctttgagctcactgttctgttttgttgacctgtgtgtctgttcttttgccagtaacatactgtgttaattattgccttgttatgtcttatactaagtcttgtgttgtataataaagaattcagctgact

SEQ ID NO: 28292 - DNA, 201 bp, Bos taurus
gtcagtctaaatctagtggattttgaaatctgcagtggattttattctttctttgcttatagaactaaataagagccctttttgtgttcacagaaaattcctttttggcagcttctgaaagtccttttccaacttcttctgatttcaactgcagttgttgtagtttatgacacacgatccccaaatatggcatcttggcat

SEQ ID NO: 28293 - DNA, 201 bp, Bos taurus
agtggagctatggagaaagactgcccaaagaggccttctgattgccagctacgagaggctcgaaaaaagactctgatagcagttgaggcagtctgtgtccctgtatgcttggtaccatcagagtccccacaagccaagcagctgcgccaccttcatgctcaactgtcactggggcagaactgccacaggaaagaaaaggct

SEQ ID NO: 28294 - DNA, 201 bp, Bos taurus
ccctcattccttttgttggtaaggttactggagaaaacaagcggtaaggaatgaccttagtaattgttgccagaggtcaagttcatgggctgattaccaggagaatatagctgtgactctctaagctccagaggtgtttcctcacttcatttgacccttggccccttattgtaactctgcttaggttctcaactttagact

SEQ ID NO: 28295 - DNA, 201 bp, Bos taurus
atgcactcacctggggagcaggttgtgacttcctcattctgtctgggccctgccacctgcctgctgggtaaccacctgtgatctgcttacctgcttcgccgtcactggcagttcacttggcctctgagctttaccttcaacctgtcaattgaaaaactgaactaaatagtcttctggggtgtcattccacatcctatttgt

SEQ ID NO: 28296 - DNA, 201 bp, Bos taurus
ttacagaaagggtcacaatgaagctgtacactaagcagcggggacagcaccatcaaatcttgagatagaaacaattatctgaacctggccacccctctcagagcacattttgttttaataataagcttcctgcatgcattcattgaaagggaaagtttacttaagttgaacctgggtggaattaggaagggagggatgggc

SEQ ID NO: 28297 - DNA, 201 bp, Bos taurus
atttgcattactatagttggaagggtttattaaaagttatacattataataacctagttttttaaatgaatatgggtcttaagatattgatgtgccagttacacagctaattaagagttcagagaatcaaaaataccagatttaaggcttttgatgttttaaatgatttttagaactgagaaggtataggtttggttatga

SEQ ID NO: 28298 - DNA, 201 bp, Bos taurus
catatgaactcatctttaggccctcagttaagcaaagtggtggatagcaagcaaatcaagtccttgcatcttccatgtttacatcaaaacacaagcttatatggcagcggtgtgttcgtcagccagtgtcgaccccgtcagcatgccacacctcaactgtagggcctcagcccacaacatacttgggtgctgacggagtgc

SEQ ID NO: 28299 - DNA, 201 bp, Bos taurus
tcatccgtcagcgctgcatactccaccacggccacatcccacagaaaggcgtagttccccttctttgcctgaaagagcaaaatcaccttgcggttaggcaaacctggcctcccgtaatagttttgagcagcgagaaatctcaatggctggatttggggaccctcctgaacggtcctcctgcccaatcagctggcacagcaa

SEQ ID NO: 28300 - DNA, 201 bp, Bos taurus
ccctctgttagttagctggcctctctgagcctcagtttccaagtccttaaataaaaaacaaaacacaacacacacaaacacaggattagaagtagagcccgtagcagaggttgctgtgaagatgaaatgaggtgacgtgtgttcagtccttagagcagggactgatgcaaactcagtggccgtcaccaggagcaggtgttc

SEQ ID NO: 28301 - DNA, 201 bp, Bos taurus
ctcaggaacacagagctttgatgagctgtcaggtaatggtaagcaaggctcttaatatcccagatcctctatttccacttcagtgaagtgggaataaattagtacccacctcctagaaagctgggatgataatgagattatgaaccataatagcattatatttataatacatttactagcgagtttagcacatagtagttt

SEQ ID NO: 28302 - DNA, 201 bp, Bos taurus
gtgtacacgcagctgtagggggcccggctggttgggtgagccaccttagagatgcacgctggggtcctcttctgtgtcacacagcagagctctcactctaccactgtgcagcttggcctggggcctggcttgacctggcccagctctgcccactgctgaacccccagtggggacagcagcccatagacatagcatgtgctt

SEQ ID NO: 28303 - DNA, 201 bp, Bos taurus
agagtccatgttcacacggcagctgactcaggctcaacccttggtcaggggactctatctcacgtgcctcagctcagagctcacacgctgcaacaaaaaccgggtgcggccgaataaacgaatgagcatctttaaaaataatgtatctcttggtgttggaaagacctggtcatataacaaaagatgaacacattcacacaa

SEQ ID NO: 28304 - DNA, 201 bp, Bos taurus
tcaacaagtggcctggatgggggctgattaccctccaaacacagttctgcaaaggaatttctaagtcagcctcagtctccctgatggaggctgaatgctccggacagcaggggcaagggcctcctgcgagtggctggggctccgcaccattgatgagttaatcaactgtttttctctggggcttattcagcggctcaacca

SEQ ID NO: 28305 - DNA, 201 bp, Bos taurus
aggatggaagttgctaaaatgatcctggtggggggtgctgaggccaggctcaccacttttcagacacatctcaacagagcaggggcccgaggtggcccccggcagtcagagacgcatcaaccatcatgtcctcagtgggcatcttagggaagcccaagagtcactgatctgcagaggagtgaagcccttgtccccctggcc

SEQ ID NO: 28306 - DNA, 201 bp, Bos taurus
ggctgccatctctggggtcacacagagtcggacatgactgaagtgacttagcagcagcagcattctatatgtaatatctagctcttcccactgaaaagacctagaaacaatggccaaactagaagcaaggagcatccctaacatttcagtgttcagtatttaatattcaggattatttcctactaaaagaaaccaaggctt

SEQ ID NO: 28307 - DNA, 201 bp, Bos taurus
tttgaagatcattaaaaagggatcacctaccaacatcaatgtacccaaatataaggctctatttgcttttaaacatcactacccctaagaagcatactgtctggtaaaaaggctaagtatcataaaagccctagctctacatccaactgaaagacaaaaataaaactataaatgctgctgggattcaattaagtaaattat

SEQ ID NO: 28308 - DNA, 201 bp, Bos taurus
aaattaactcgagacattacgaagagtaatttacttttcctgccttgacttcctgaccatctattcatttctttaacccttggtatctgaatttcacctttgcaaaggtcacctgtaacctaataaacacttttgggcctcctttctaagtcaacttgaactttttgtagctttcagcctcaacccatcattcttggaatg

SEQ ID NO: 28309 - DNA, 201 bp, Bos taurus
gctgttggattatatgcattatattgagatcattgcttctgattttctgtctgaaagttcaaaacctgctgttgcttctttttaaaatcttgattgcccttgttgttgcttatcctgcttataacccccttccttaggtatgtgactcatgatttaaaagacagtgttgtctggtaattagctctgtacctctcatcacat

SEQ ID NO: 28310 - DNA, 201 bp, Bos taurus
cttgactgaattctaaaaattgaaacaaggtaaataagagggatgcgtgtggggggtcagagtgaaaggtcaggcggaagagttaggcaagggccaggccgtgtggggtcctacatacagactgagctgaacgtttctaactgtcattttggattttgtgacatgataaaccaccccacacgccagtgacttgaaacaact

SEQ ID NO: 28311 - DNA, 201 bp, Bos taurus
atgaacacaggatattttccacttctttttatcttcaatttccttcaataacatcttaggtcttttatctccttggttaagctaaaaaattgcttaaatactaaaatgtgtttatacaaattaatgaataggcattacttaggcatgttactggggcttccctggtggctcagcagtagtctgtctgcaatgcaggagccc

SEQ ID NO: 28312 - DNA, 201 bp, Bos taurus
gattggaagtatacccctttgcctcgcctgttcgtccctggctccaaagttcatctgatcagctctattgcttcctgggaggcctctcttcttggtaggcggggtgtgaaaaaccttctttccctggcataactcgaaacaacttcccttgaagctcttccctccatcagcctgggaaggccggctggggttcagctgtgg

SEQ ID NO: 28313 - DNA, 201 bp, Bos taurus
ccctacccatcaaagcccatcaaggtctcacaccctccacagggccaaccccaagcaaaggtctctctctgactgatgtctcgaggtcttctctgagacacaccaggagcgctgtccacctggccctcccgtacataaatgacaggaaccaagataacacaggctgaagagagtcctgactcttggtctgaactgagcata

SEQ ID NO: 28314 - DNA, 201 bp, Bos taurus
tcagcataatgatgagaaattcaggctgagagaggtgagtgatcagttcaaggtcactcagtgcagtgatgtgtctgactttgtctctcttcaaggaacattggccaacgctaaccttagatgtcagtggcatccccttggaggaatcaggtttgaaatgacattaggagaggctcagatgctgacagtggcacagtttgg

SEQ ID NO: 28315 - DNA, 201 bp, Bos taurus
ctggaccagcactaaagggagtagtcaagcttctctcttagagtctagggctcttggccttcatctgttcctgaagaaacagaccataagctggaaaagcgacctgagggctgtccatgaaagggagagtagtgactccaggctgccatgacaatgagatgtcatcctctgctaaagcagattgcaggggatgggactggg

SEQ ID NO: 28316 - DNA, 201 bp, Bos taurus
attctgccctcctccttaccccctatcccctgtggatcatgaaatcaaagaggacctcacgcctggccagctcttatctccattggtaccccaggatgcctggctttgcattttctattttcagaaggcttaggttaatctgaaagtcctgccagagaccacccaccacccttaaacaaacagctcacctttcagcccaga

SEQ ID NO: 28317 - DNA, 201 bp, Bos taurus
agcacctggccctgaacctttcaaaagtctagttctttttttaatcccttgctgccaagcgccgactggctgctgggcccctgtggctggttcctgcacactctgtgtgtttcattttcatgatgagaggcagattacaggtctgctgcatgcccaggttcggcccggtgggcactgcataggcacactcatagagagtgc

SEQ ID NO: 28318 - DNA, 201 bp, Bos taurus
cacgagtgtgactctggtggaacagtgggggcaaactcctgactggagtgactctaagggaggacagggggcgaggaagggccggtggggagtagagaccgcttcctactctttcaaggaattgtgctggcacgtgaaagcccacatgtgcagctgctcctggaacacctcatgaaccatctgaaatcaagctgtggacca

SEQ ID NO: 28319 - DNA, 201 bp, Bos taurus
ccagccatctgtgattgcatttcaactggacctgcagaacagtcagaaagaccccctgagcagcatgtacagcatctctttggagcctccaagaacactttgcagcatgtagcactggcccattacacaaggagggaactgaggccctgggaggaagtcagtgattctccactggcagaggtctgtaagtcccggagctaa

SEQ ID NO: 28320 - DNA, 201 bp, Bos taurus
tacccgggcccagttctcctgtccttggtcacctgatcgtggggaacctgccatgaagccgcaggtgcaggctgggaaagagaaggtcatgcagcagaagtgggggattttggccacttcgtgtaacttatttgtgccttcagagcttttagggggattatttcagtagctactgtgagtagatgggagtagaggcagtga

SEQ ID NO: 28321 - DNA, 201 bp, Bos taurus
gggtccctgctgatcgcacctgtaatcaccctatgatccaaagaccaaagtgtccagtcactgggagcagctttgcactaactgatggtggactcctttctggtgaagactgggccactgattgccttttaccccatgtcttacccgtgagctgacatacagcagaggaaagaacctgaagaaccaataggcaaaaccctg

SEQ ID NO: 28322 - DNA, 201 bp, Bos taurus
ctgatctgggcaagcagactcagagggcggcccctctgggctgcagaccttgtggccgaccctgaaacttccggcatccctgcccaaagccccatcccgattcctcctggctgcccggggttacagtgctcctggtcccgggagctcggctcagccctgactgccccatctttccaccctccccataaattcacttcctct

SEQ ID NO: 28323 - DNA, 201 bp, Bos taurus
agagtctttagccactgaaccaccagggaagtccctgtccattttaaaaatcggttgttcatttttcattattgagttttgagagttctttacatcttatgtatgcttatcagatatacgctatgtaaatatctctcccagtctgcgccttttcttttcattctattaacagtgtgtttgtaagagcagaagtgttcagtt

SEQ ID NO: 28324 - DNA, 201 bp, Bos taurus
ggggatgcaggcccccgcaggtctaaggcatgtccatagatgagacttatggtgaaaaaaatagcccttggggagtgctggagggcatcagagggcatccgtcagtaaggccgtgcgaggctcactgctgtgttagcttctcagagtagtgtctgttccctggtggcttccctgatagctcagttggtaaagaatctgcct

SEQ ID NO: 28325 - DNA, 201 bp, Bos taurus
aaaggtcaggtcagggtgggacagagaccatctagcaggagagggaaggatacagggctggaacgtctcaggttgacatcagtgtcacagaaggaggtcctgtggccagtgacaacgtcttgagcaatcacgaaagcctatgagtaatgcagcctggaccacttcctccaaaccagaggaaggaaaaatgccccaaaggct

SEQ ID NO: 28326 - DNA, 201 bp, Bos taurus
gtaccgtgtgctgcacgttaaatcttgctgagcccctggtagccgagcttgtgcacagtggacagtaagagtatccccatgctcctcctgccttcccagcgttggccactgcaagcccaggttgaagtcttgggtctttgggcaatgtgcagcccacagagtggacatagttcctctcatggagctgatggtctggttcag

SEQ ID NO: 28327 - DNA, 201 bp, Bos taurus
catgaggtcttctaaaggctgccctgtgggtgagcccctgcctacctagacgcaccagagtttcctgcaaaacgagcagtgcccatgcctggggccttgacggtctccgagactggtcgcttgtgtgggtaggatgaccatggtcctgctgctagctacttccctgaatgtgtgcccagatccactacatcctacccccgg

SEQ ID NO: 28328 - DNA, 201 bp, Bos taurus
gcagactgcgtgactcccaggcacttgccaagactggccatgtatctgcagccctgcctgggctgggctgagggaaaggtctgaagttcatagtcacagttggtgctgataccagcctggcctgtgcagcgggtacttgccttcagcatttttgctaattgtctcatgctgcagcacttcattccagggtcttgttggggg

SEQ ID NO: 28329 - DNA, 201 bp, Bos taurus
ccttcatttttacacgggctgtgagcagagtctggccatgggaaggctctctgtcacagccccatcttctgctccaagtagctactcatcggaggccacccatacagggttcctgccctccctgggcagggggagtgggggagtgcaaggggaggatggtaacagatcaggcccacccagccccctaacgtctcagccccc

SEQ ID NO: 28330 - DNA, 201 bp, Bos taurus
atgacagctggcttagccctcagggaaggggccatgaagctgcagaggaaacagccacacccagtcaatgaaagtccagggagcttggcaactccgagccatctgtggccatcattgggccgtactgtgtgccaaggtctgtgtcaggcatttccaccatagttatctttttaaaggctgcttctaacatttgcagaaacc

SEQ ID NO: 28331 - DNA, 201 bp, Bos taurus
gcatctttctcttcctctccaagcccgctcagaaggaaaaggaaactcacccttacagcgcccactgtggccccttgtcatcattctggccgccctgagcggagggcatcattcagccccacgttccaagttaggaaacaaggctccaggaattgcccaggtccacacagtttattacagaagggggccttctcctgcagg

SEQ ID NO: 28332 - DNA, 201 bp, Bos taurus
aaagaagtttggcatccatgcaggagtgagtaggccgggttaggagggaagggacaggttagtgggtagctggctgccccagtgcaggagaagatatggtatctgggccaggagaaggggtgatcttgatggaggagggagataaccctgagaaactcattggattggggtgagaagtgagtggaaggggcagagacaaag

SEQ ID NO: 28333 - DNA, 201 bp, Bos taurus
accaacctccacatggactgcagcccagtttcaggccatctggatggctaagcaaatctcaaaccctgaaattgtattaagatgatcctgggttgctggtactaccaggccctggcaagaagtgaaaaataaagtcttccatagaggaaaataacatcatgcttggcctcaaattatttctacaaataagttttctaatac

SEQ ID NO: 28334 - DNA, 201 bp, Bos taurus
gattcaaatcaaagaacaaactaagaaggccaggccatttctgtttaaaaaaagaatgctcttaagcagagagagagatgtcaggaactgtcagtgacaatgccggtggggccccaggcaaaggccagccgtcctctcactcctctgggcgactccacattttcgtgctctcagccacaaccagcaacacctcaaaaacca

SEQ ID NO: 28335 - DNA, 201 bp, Bos taurus
ttctgctgaggtctctctgggtcactggggaggtcacagatggcatgcactgtttggatctgagtcctgcctgccccacactgtctgctgctcactcaccatcagctttggcctgcccctctcttgctctgtttcctgagattctaaattgcacattgccgcctgcagcactctcctctcctggcccagctgtgtttgctc

SEQ ID NO: 28336 - DNA, 201 bp, Bos taurus
tctctctgttattcctcattccagttcttgatactggtgttcggtaaactttccctcttctcatcggaaacctgacgctctttgactgtaggagggccggcgtccccgctctgcccgctggtgcgcgcgcgcttccctgcgtcggtctcctcttccctagctgtgcgctcctcatcggaacgctgcttcaggcgctgctgt

SEQ ID NO: 28337 - DNA, 201 bp, Bos taurus
ctgccacggcccaccgcgtcccgctcccagccacagccctgcccatttgccgccttaactgggctgaacccctggccctgctctcagtccattctgttgtcagggattatctcctgtaccattttttcataaaaccaaaatcactaccatcaaatggcctttgtacctttaaaaaggtctgcttaaaattctgtttttaaa

SEQ ID NO: 28338 - DNA, 201 bp, Bos taurus
tgcatttcactcatttaaagcatatgtgtcaatggtgtttagtaatgtaatgttcagagagttctgagactttcaccacagtcaatttcagaatattttcttcactccattagccgtcacttcccattggtggtggtggtttagtcgctaagttgtgtctgactcttgcgatcccgtggactgtagcctgtcaggctcctc

SEQ ID NO: 28339 - DNA, 201 bp, Bos taurus
gtgttgttaaatttttggttagtgggcagatcttatgttgtgttctaaactacaaaagcaaacaaaactaaagggattgggagaaacttttggaggtgatatatagatttatggccttgattgtgatgatggtttcatgagtgcatacttatctccaatgtcatcaaattgtacacattaagtatgcacagattttaatat

SEQ ID NO: 28340 - DNA, 201 bp, Bos taurus
gcggcatgaggcgagggtggacagggtccagtggtccacgtgtttcatggggataatggctggtggttctgcagtaactctgggccaggcactgggaaagtagatggagcccacaccctagaagcaagaccatgttctgctcccctgatttggagaggtgtggcatgaacaggactggccatgccatctagctccttaact

SEQ ID NO: 28341 - DNA, 201 bp, Bos taurus
tagctgctggcgtgtggccctttgtctctgctgcactgggggcggcttccctgggcactggtgcgtcttccctccgctggtggattccctgtgtaagctcacatgcttgggccacctgagctctcgatccactgcagaattctgacttttgacacgcagggttcagtctctcagccgctagccctccacccctcacttcgc

SEQ ID NO: 28342 - DNA, 201 bp, Bos taurus
tgtgtaggagaacagaatcgataaaagcttggtaacaacttccagatctcaaaaaaaggcatcctttttcctattgcgctgggaagcctccttccctagaatggggtgtggacactttatcagggacaggtcagagctccatggagtttatatctcactaatggagtgtggtgcccttgggggtcaaaagaaactgatcac

SEQ ID NO: 28343 - DNA, 201 bp, Bos taurus
catcctgccatctctgacacctttcaagtctgcatctggcgttgtttacgcctttcttcccagatcagcccctctgcacacactcttcagggtgaaggccgtggttcaagtgtggcttgtgggtcattaacctgggaggaagtccccttcctgaatattccaggctccctcccctaaggcctgagggctgccgtgacaaag

SEQ ID NO: 28344 - DNA, 201 bp, Bos taurus
gcgcttcaggactgcctgagagacgccaggcagtctgcacctctctgctctctgatgctgggggatgtgttggggacttggggaggggggacagaggagaagactgggttcactaatccacagggcagacacagatgccaggtggattggtcactgcccagctgctcccaaaccccagtgtaccctgtgtgctcctgcccg

SEQ ID NO: 28345 - DNA, 201 bp, Bos taurus
cccccaaggccagagattcgggactccagaggcttgtccccaccgagcaagcgccccttggatggacgccgggacagaatccactccactgtcagattacgagggaaagaacagacggaggtggccggggaggcttgtgatcactagagaggatcaaaagggcacttttctcacccccgcgccttccagaccgcctgcttg

SEQ ID NO: 28346 - DNA, 201 bp, Bos taurus
gaatcatacgagatgagactatcctggcccgttccttcaaatgccccctcgtgaagccacattccatctacagtcactccacgcgttaggatcatggctccgcaggccaccaacaatgatccttcagccgggacctgtcttccaaactccattcacgtgtcaacagctggttgcacgtccccttggcgagttgaagaggca

SEQ ID NO: 28347 - DNA, 201 bp, Bos taurus
atacagcaggatccatatggtatcacacagcatgtgtgtctgtgggagcttcacccccgctctcggtccagttggtcagcatttcaggagaaaatctgactctccctgtggccattcctctctcctcctccctgcactgaaattttcaccaggcaaatttgcaggatcttttttctatgattgttttcttgataaacagtc

SEQ ID NO: 28348 - DNA, 201 bp, Bos taurus
aatccataccaagggagttgagagctgtccaagtggagaagctgcagcggaggaccggggtctgggacagaggatggaggtcacgccaggagaagaggcctgctttgagtagcacagctcttcaaaaactatcgagaaatatctcaaatgtgagtttcccagcatgcgaggtatgcacacacaggctggatggccgtgggg

SEQ ID NO: 28349 - DNA, 201 bp, Bos taurus
cagggaggaatcccctcctggaggggctttgaggccaggcagggctgaagagggtggaaggacagaacagaacacagtagcacagacagaagacagacgtaggtgggtccacctgcggccggctgaggggtcagaaaacaaggaagccacagggacagccagaaggtggtgggcagggtagaaaggagtcaggaactcgct

SEQ ID NO: 28350 - DNA, 201 bp, Bos taurus
aaaggttgccagcactctggctacaaatgctccgcagagcagcttccccgggacagcgtgctttcactctctcggcccctcacactgaagtgggtgagaaggtgacactcttgcatcccccatggcagaggctgggcacgtagaagactccagaattcagaatattcctctcctcaggaacaggtggccagaaggagattg

SEQ ID NO: 28351 - DNA, 201 bp, Bos taurus
aactggaccacttcatctcaggcttcgcctgaggccgcccccgataccttccctcccggggagcccccgaagcactcacatcaccgcgacatctgtgaggtagctcaggctgggcctgctccttggcctcaggttttcattttgtgtatttgtttgtttgtttattgctgaaaaataaagaataaatgaggaataaacagt

SEQ ID NO: 28352 - DNA, 201 bp, Bos taurus
tcatatcagtcctcaaaagagagacacaggaagaatcagccccgaagatactgtgttgacagaagcagagactggagtcatgtgctttgaagacggaggaagaggccacaagccaaggaataggaatcctgaaagaggcaaggaaacagatcctccgtcttgacgtgggtcttgactttagctcagtgaaactcatttcag

SEQ ID NO: 28353 - DNA, 201 bp, Bos taurus
tagaaatttataaaacgatgggggttttaatggcaatttggtttacagtcaataacgaacccaactttcattcataagcagggctcctctgatttacatacggaggtcactctctcagccctgagcccctcgggagaggaggcatctccccttctgtttctagagccactgctagctatttcttccaggtgcttcacttgc

SEQ ID NO: 28354 - DNA, 201 bp, Bos taurus
ctttctggcttggtgggccatgcggcctgtgctgcaactactcagcttcgggctgaagagcaaatgcagccacgacgctgtatggatgaaagagcaggacagtggccaggccgactccgcttacccggcagaaggctaactttcgtccacccggagctgggtggctctgaccctggtgtgggtccgcttgcaggtgacatc

SEQ ID NO: 28355 - DNA, 201 bp, Bos taurus
gactcatagctgttaagaataaacatgactgagaaaaaaggtgtgcagtacatgtgtaaatacactgacaggtaggaagtgtggatttcaagtttaccaggttagttgacaggttgacaaagtctgcgtagtccttgttgatgagctcaaccatggctgttttaagcagcttgtagtagagctccaggtcatctctgagtg

SEQ ID NO: 28356 - DNA, 201 bp, Bos taurus
gtcaggatatgttctttccatggaaacagtagagatacaagatctaagccttgcttccattatatatccaaaatccgcaagtactatggccaaacccaaacgtcaaagatggaagaggacttatattcagcctttttagttgcagaagctgaagacttgcaaagaaaagggtgtggataatgggaggaacagggccaacaa

SEQ ID NO: 28357 - DNA, 201 bp, Bos taurus
aataaggatgttcgtacttgcctaaagtgaaagaaaagagttttttcccagtaacaaagttttaattaaaacataacctatgaggataaatagtcaagtattgaaatccacttcaacttctctgaatgaacgttaaaccgcattcaaggtggtagaaagagaaaacttgcaggcttaagccaccctgaaaggaatttaaga

SEQ ID NO: 28358 - DNA, 201 bp, Bos taurus
cccgcctggaggctaaggcgtgcgccttaagaaggtgcttctgctaggagagcattaagcaggctggtcctaccattatgtgcaggatgtgcttgtcttgtgcctcgtggtccagcctctcggccgtgtagaggacgccggtgctggggtctatgcggaacttcctcatgctgatggagtcgatgctgccgtggacagtgt

SEQ ID NO: 28359 - DNA, 201 bp, Bos taurus
gcagcaactttgtgcgagcctttaaaaatgttatgtgcctcagtttcttcctctgtaacatagtagcgatttaatgaggaagcaattaactttttccatgctacaggtaatatatgctatttttttcctttaaaaatataagtggaaataaacgatgaattagaatcctttctaactccttgaggaaaaaaaaatgcctta

SEQ ID NO: 28360 - DNA, 201 bp, Bos taurus
agaatttcaaccatggttggattccagaaacgtttaagtgctttttgctacaaaaggagttcagaaatccctatgcaatattaacaaatgacacatattatgcaaagcatgtacgtctttttcttctttccacatttccttagagttctgctgtgtgtaaagcactgttctccgaatggaaaacaactccccattgcccac

SEQ ID NO: 28361 - DNA, 201 bp, Bos taurus
tgtggttgctttttcccgaatgtgattgaaaacttataactacgtttattatgacaagtttataaaagcttatctaggagaaaaacagcctccagaacttgtgtcttctttcatcctttcaggttaaatctcactagattgctttttcctttaaccagttttgctgaaactacacagacaatgccatacttaggtaattaa

SEQ ID NO: 28362 - DNA, 201 bp, Bos taurus
aagagtatggagttatagcagcaaaattggttttacatgctgtgctcagacaaaagcaaggcagggaagcaggtgccagggcttggtgagaaatggcctcgtacccaggcagcttgtccttctgtgttcatgtctctactgctcaggaacattctcaaaaatctgaatgttctggaagtaaatcatgattagtcggttagg

SEQ ID NO: 28363 - DNA, 201 bp, Bos taurus
gggacacgccgctgggacgcagccagggcagaggtgctcttgatgaagagtcagtcacacatgataagaaaggccaaggccaaggggacagaaaggtgtatcacagagtgatcaagtcacaggcacagctcaaagctccgttctgctgccctggctgggggcccgacaaaggccacctccctatctcaagttcaggacctg

SEQ ID NO: 28364 - DNA, 201 bp, Bos taurus
tatttctcgcctctctcctcctaatcgtcttcctggctgtaacatttccagtctctttcctcaaactccctcccctgttgactacggcttatatcaggctgttggaacattctggccagcccactattcctcttccctgaggtgaggggagaggcctggggcagctggagaggggccagttctccttgctcatctgggata

SEQ ID NO: 28365 - DNA, 201 bp, Bos taurus
agagtcggaaagggtgcttctgctgcaggaggagaaaggaagctgaggaggttagaagggggagatcgcactcttctaaggcaggaggccattctgcctctggagatgaaggaacgggagcaccagcaaggacgtcagaggcagtggacaagggttgggaaggccgtgagagcacttggtacaagggtatttaggaaaaag

SEQ ID NO: 28366 - DNA, 201 bp, Bos taurus
gtctggaacctaatagattctcacatttttggtggcactaacgttggctgcattggaatggctggccagactgtgtgggcatgggttgcagtgttttcctgtctctgcatttttcacctagcatctggcattggacttgcactgtaggtagggcttcaaatttcttggacacttgttcaatgaaatcaataagacttatga

SEQ ID NO: 28367 - DNA, 201 bp, Bos taurus
tcagatttttaaattaaggatgaaagatagttggaaatttaaaagggtgtataagacatttcatggcgatagtaacaaactgatggagaatatttaggttgtatactgcaatgtcccatgactggaacttgtgtatagttattttcagctttacctggattaatacaaaatgtatcagttgtgatcagaattggttacata

SEQ ID NO: 28368 - DNA, 201 bp, Bos taurus
gctggacaccaaaatctgttgggaacagtgaagtggtaattttaatgaagtgctgaaggctgagtgcagactaacacgagaatgggagactctagggaacgtcaagcccaagggacccctgcactgccatttgcttccgctctagtgaaacccaccagctgtagccgggaaacagagtgggttagcagagaacagcagcag

SEQ ID NO: 28369 - DNA, 201 bp, Bos taurus
ttgtcgacaaagtaatgtctctgcttttcaatatgctatctagattggtcataacttttcttccaaggagtaagcatcttttaattttaatttcattttgattggtacttaatcaaaggaagaaaaacaaacaacagggacagcatgaagtaaatttgagataggaaatcttccagaccatctaattactcatcttcttga

SEQ ID NO: 28370 - DNA, 201 bp, Bos taurus
cctttgaaccaacctcttcccaatttctgcaaacttgtttttcactttgcatttctatgtgaaccaagttcctacccacatcccagattgtcaaaaccagaacttgagctatcataaatatcctcttccctcactatttccaatttataatcatcatccggtattatctaattttacctctccatatatttcttcacctaa

SEQ ID NO: 28371 - DNA, 201 bp, Bos taurus
ctctttggcaaggtcactcatagtctccaagaggaaacagggcatgtagcatattcatctgttaacatatggccccatacattttaattttttgcatatgtaattctgttgcaaatagcagaaatatagttaacttcaaaagaaaggggtgcatttcccaaagatgacacagtctatagtgtgaagcaaacacgctcatga

SEQ ID NO: 28372 - DNA, 201 bp, Bos taurus
tttcttgaattctttctatattactttcagatctgtcttctttccaatcagttccttttgtttctttctgatttgcttacaaatcttttggccttcttttctaataaaccctttgtagtaattttctccctcctgaagaattagagttaccatctgataatcatgtctccatatccattaacgtcaaacagttgggagagg

SEQ ID NO: 28373 - DNA, 201 bp, Bos taurus
ataattattccatcattggagaaggctttttttaggagtgtgagaatatgataggtgttattttccaaaagataatcccaggatatggcttatgaatagatgaagtcagacgcatatggaagaacagtatctctaatgaaaattacactattgaggactatggcagtgtgaatgatgaaaaggcaatagaccatgccctcc

SEQ ID NO: 28374 - DNA, 201 bp, Bos taurus
cctggccacttgccctgtctgctctgccttatttctctctgttccttgggatgcacactttgtgcaggctacgccaccctctttctgttggagaagcatgtgtaactccctgttttgctaggcctttgcttatcccctctctggcttccctttctaaatattgtccaggcaccagcttgaaagcccacctcctgctccaca

SEQ ID NO: 28375 - DNA, 201 bp, Bos taurus
ttatacaagtagagtttgtatattccaagttcctatggagtctggcagttggatactagttaacagaagctactgtctcccaaatttccctgataataaaattttcttacagtattggttttaaaaacacaatttttggttacatcccagattggatgaatcagaaactccaagccttgggagccaagaaattgtattttt

SEQ ID NO: 28376 - DNA, 201 bp, Bos taurus
tgtttttagaagtaaaaccactctttaataatcactgagaagttaaggtttaacaggcagtatttccttttttatttttcttttctcaacattagcttttgtaacttttcttcacagaactgtatagttgtatattagttagcaggtttggaattagtgttaggtgttagtttagtatgaggttttagatttggtatagga

SEQ ID NO: 28377 - DNA, 201 bp, Bos taurus
gtcttaagagtcagactggaaggagccggggccgagcaaggaggctaggcggtgtcctgacctcccctgcacggtttccgggtgcggatacacagcagtgaacccgaaggcagcgcgcacggccggcgggcggaccaggccagttcactccagtgcagccgcagcgccccccgtttccaaggcgaccggcgcgcgcgggcc

SEQ ID NO: 28378 - DNA, 201 bp, Bos taurus
cgcttgggaaggggccggagagaaatttgcccctccactcccctagaagaccccccttgccagccgatgtttcgaggtgggggtgaagggggcgctgcgcgaaggcctggccccttttgtgcacgttcagtgcccggcagtgtctcccagaccagcaacccccgaccctcctgtctccgcgtcttagagaagccagaatcg

SEQ ID NO: 28379 - DNA, 201 bp, Bos taurus
agcagaattttaattactatttggttataaagtttccagtgttatttttgaggcaaggacattgtacacttaatactcaatagcagccaagatactgtgagttagtgggactccttccctcaaaactggatagtttaaggtgatcttccagcttttggaacaaccatttctgacttcagccattcacttttatattccttc

SEQ ID NO: 28380 - DNA, 201 bp, Bos taurus
tgtgtgtgtgcgtggtaatgcatattattactgttgagatgtgtgcatcttacagacaggtgtgatgtaccttttctttttgaatgtggagtgcatgtgtagagtgctactttagcttaattgaattgtttatctttagacagctagatcataagagctactatgtcttcatgacaactaatatttggtattattgtttct

SEQ ID NO: 28381 - DNA, 201 bp, Bos taurus
cctggctctttcaaaaaatcttcaaaaggggagagttatcttggtgaactcatccaggatcaagttttgttttgtgagccccagaattctaacttggcaggattatagccaatcaaccccagaattcctgattcatattaagaaagctaataagttactgttggagatgaatagatcgttattggagtctgttcatttcaa

SEQ ID NO: 28382 - DNA, 201 bp, Bos taurus
tggcgaggtttaatgttgctctcatagactaggtcttaacagatatcctcaacgtgagccaagttctcttaatggatgtgctggaaagagctcagtgttacagagtcaagaatgtaatttgagctgtgcagaaaggaaacaaattgatcattttggcccgcatacctgaatctgaagcagcccttccccattagggaagac

SEQ ID NO: 28383 - DNA, 201 bp, Bos taurus
cagtatcaggggctatacatcagtgagtataaggaatatggttcttctgctctgacagcctatattctacctaagattacctattgctttcacatcaactatttctcaagtaagtttctcagatgagccatgctatctccccactctgggtgtttgaatgcatgtttccttctgtaaggatggtcactccccactctcttt

SEQ ID NO: 28384 - DNA, 201 bp, Bos taurus
agtctctgagttatgttttgccctgcgctacacgcccacttgctgcagtgtggagcctggcactataatgtctctcctgaagcaaaggatagtaatgagacggagtgaatggggcaagacaggtaagacaaatggaggatgactcagctagtgggcgcctccagggaaattttctctttgttggtggtggctccacataat

SEQ ID NO: 28385 - DNA, 201 bp, Bos taurus
ggtcagtttgcttctgggtctccttgttcacacttgacaaactgcagaggaagcaggtatatggcagagcttcctctcatgtgtggcaaggggcgttcacacccttgcccttgctccatccaagtgtccatcagtagctcaaagccttgcgatgataccgatggacaagatcactgatgttcctgaaaaaggcagcagcct

SEQ ID NO: 28386 - DNA, 201 bp, Bos taurus
gaagcatactttctcctgtgctttgattttgatcagcatcaccttcctggtcatattcctttagataaattttaacatactaacattctcccttatctcttggtctggctgtggtcagatccagaaaattctcttatctctcatcgttaaggctaaatgtcttctcagtgggttgaagattatttatgttagataagtcat

SEQ ID NO: 28387 - DNA, 201 bp, Bos taurus
tgtagacgttccttcaagccttgactggttaatgctgagcaaatccaataatttctccattcttcaagcaagatcaccttccaggattagtgaaactgactagattatatgtgtaagtgaataagaaaagtatcttagagaatacattggacttctaggcttggagaagaattaaacatttaaagtgattggaacaacata

SEQ ID NO: 28388 - DNA, 201 bp, Bos taurus
atttttagaagcactgacaaacttgagatgaaagttttcagagtggaacaaagcagcctttggttgccatcatatatttgttttagaactagcagtgccttcatagatgtattagtccaatcccacccagtgaaatttccaattgatctgaagtcacatagagcgtgttcaaactagacaccaagtctgtgtttttctttt

SEQ ID NO: 28389 - DNA, 201 bp, Bos taurus
tgaccttactattgtcacaaatttaccaagaacaacaatttttaaaagggtattaaaaaattagaaagtattttaaagtgtccagttggtaacatgcttcacattttggattcctatgaacactttcagaaacagtgaaattgggttgaaattgccctgtcattgtatattatttatatatagaaagagaaccccacatat

SEQ ID NO: 28390 - DNA, 201 bp, Bos taurus
tattcttacaacttgatgaatcattgacagttcctcacatgtaagtcagccagtcaggaatgaaaacactccagtaaaaagtcttttatgtgccaaccaatcaaaaatttctccattaaagtatttaaatattcataatatgattcactgaaaatccaaccgaccaatttggtctaatacaggtgcctgaaaatccaccaa

SEQ ID NO: 28391 - DNA, 201 bp, Bos taurus
atttatatttcaggtacgatttcattcaaaagacatttccctctcctcatctggattagttactgcttcttcgaacttttattgcatcacatgcattaccgaaatcacagaactttcagactgtttgaatctctcccaaataatagagcttcatttttgtgttttgaaaatttgacataatatctggaattattaattcaa

SEQ ID NO: 28392 - DNA, 201 bp, Bos taurus
taccccttcaccttcatccttgtttttccaaatagggcctcttggagcacgggctgctcgtaatgatttgccttttcaggcgtggttcactggacagcacagggatcagtttcatcattactttttaggaaactctctgcagatcagtacagtaacatgctattctacactccttgttaagtattttttttttcctgttct

SEQ ID NO: 28393 - DNA, 201 bp, Bos taurus
ttgcaggccgatgctgggagacgagaaccctctggggtgcacggtcatgaaagtctttcctaggaagggtgcatgccctgtggtgtggtgggcatacagcgggggagggagagaaggccagaggtgggacaggaggggtgaacaggtagacacaccagatgtggaagagccttcgttgccaagtgtctaggagcctggact

SEQ ID NO: 28394 - DNA, 201 bp, Bos taurus
caggggcaaatttaagggccagaggactttaattaggactctgttacttaacctccttctttctcttactatatctgagtcatctgtgtggaaattcggagtgtcaagcatttggcagtaaaactccaaaagtcatgaaatgcctggagagataactgttgcattttgtttctttgtttgttttttttttttcattgctac

SEQ ID NO: 28395 - DNA, 201 bp, Bos taurus
ttccaggtcctggttgcctgaggttctggaatttggaggctccagcctggtggttaatggtgacctaaagcctctcagcacccctttccccgtcatggacaagtcggccgtggtcggccgtggtcctcaccatcaattaggctgacactcggcagggtctgcccggctccagactctctctcttttctctttctggactcg

SEQ ID NO: 28396 - DNA, 201 bp, Bos taurus
cccatgaatccaaagttatttgacttgagaagccatcctggaaaaaaaagataggtggggaactccattccataagaattattctagacactttatgattctggatcatatttcagagtcacctggttaaggatgtcaatcaagtttatggcaaaatagttgactatgtgtcctttcattttcacttcagccatgtcttcc

SEQ ID NO: 28397 - DNA, 201 bp, Bos taurus
caacaaacaattaaataacttgaggaaactaaaatcatttttaatttttttatctagaggttaaaattacacatatagagaggtgctgagaaatatgctggaaagtttaaatgttttcattatgttttgatttatttaatgtgtttaaagtgcaaatacaacattcttaggagatacacaactaaaaaaggtgaaaatatc

SEQ ID NO: 28398 - DNA, 201 bp, Bos taurus
aaacatgtatccactgatttcaacattaatgagtttttattccaagaagattacagttttcaccaggtaattcagtcccttgggcagacaatattattaactatgttttacaaagcatccttgtccctagactagaaactatgaaaaataaatatatgatcattaaaaaggattagtaatttcatcagtactaatgttagt

SEQ ID NO: 28399 - DNA, 201 bp, Bos taurus
acaataattctcaagttaagtatcattgaatcagaccagtgcataactttggatctggaatatattaaatgtcaagtcagagttcgagtaatctgcataccttttgtcaaagattaaaagcaattttggaataactgggaacaaaagtataacaaggacttgacctagaaatgtgaaatcgtcttcacctcctagggcgtg

SEQ ID NO: 28400 - DNA, 201 bp, Bos taurus
ggaggcctggcgtgctgcagtccatgtggtcataaagagttagacatgactgagtgactgaatgaactgaattcagaaaaacgtgtaatgatgaactggtggaatggccttctaaaatttctgttaaataccaactggaagaaaatgctacacaagataggagcatagtccaagagggcatggtatgcaccttatatgtgc

SEQ ID NO: 28401 - DNA, 201 bp, Bos taurus
tatctctgaatcctaaaaggtcatttgacagttttatttctctgttctatatactttggcccttctatgtaggatgaatagcatgtatgttaatttacgaagttagatcttcatctacctgtttaatcagtaacaatttattatgttcttgccatgtgccagatacactgtagcaagaagagttcttgttcttttactatt

SEQ ID NO: 28402 - DNA, 201 bp, Bos taurus
tagtcttctgtaatctaatacttgttgatctggctactcaaatactagtgtcaatgtttatgcctatctatcccctgtttgagtcccctgtttcattgttctttcatttgccttgtgatctgcatgtagggtaaaaaaaaatgtgcataaaacaaatgatttactgcaagtcaacttgttattattttagccatccatttt

SEQ ID NO: 28403 - DNA, 201 bp, Bos taurus
ttttacttgattatttatcttttgatttctccccttgaatcaagttctagatgggtgaaaacctacgtctgtctttccttttgtagccagtcttccttatacatagcagaagctcacaaacggtaatttaataggaataaaaggagtgtatctttgaaccggtatttcacaatacatacttacggtttatagaagtataaa

SEQ ID NO: 28404 - DNA, 201 bp, Bos taurus
atgctcaatcattttttatggctgacttcaaagcagtatactagtaatatagatatctcttttctagagagactacaaaagctctagaaggattatacagagtgaaattgggttcagagtcccaatgtctgcaggctcagctaatataaatgcttcagtattatagatggtggggagttgtttgctttttcctctcaattt

SEQ ID NO: 28405 - DNA, 201 bp, Bos taurus
gagggggattgttattagtttagttcttagtaagctacatgttcaagcacatctgaatttattcttatttatttcatttgccatttagaagtgacaccgcaatgtactcaaagatctgttgaaatgtgtcactggcaaagaacaaggaaataaaaataagttacaaggtcattaacagttctttcttcaccgtggatccta

SEQ ID NO: 28406 - DNA, 201 bp, Bos taurus
cttctctttctccttcaccccactctgctaatgtcatcatttcttttcctgttgactttgtagatttcagatgcgcccccatgttttgagccagatctattctccttggcttatgagcaaggaaattgtgctactttgttacttttgtatttatcttggtatttacagatttctgtggtctgagataatagccattaccaa

SEQ ID NO: 28407 - DNA, 201 bp, Bos taurus
aactttaaactttataagtataacacaacagtagcacagatatccgttccctactgggcaaaacccatatttttgcaaaatgtgtgttatatatgagcatctgtcttctaatttttacacaggggatagactgaaatcatttcatgaaatatatcatgtatcttgtctagtttaaaaatatcctatgcaatatatacagtt

SEQ ID NO: 28408 - DNA, 201 bp, Bos taurus
gcgtgtccgaacacattcttgacatgcagttcaagcccgatgccgtgcccaggaatcatagtcacggagtgccatccgccatacatggctgctgggagagcgctgtgtttaaaagagaagctcctcagtgaggtctcattgccaaggaaaatctcccaagaatggcctagaatagctggtgggaacatggccttcacagag

SEQ ID NO: 28409 - DNA, 201 bp, Bos taurus
aaaaaaagttatagtgaccttgctgggatatgctgaacaggtcttataagtcatatttcacagatgaaattggactttggagcatctatacatatatagagagtaagttgtatgtcaaagactcgaaccccaatatcctcgttctttctccttcattctttccaaaccccagagtattatgaagctattcaaatatctaca

SEQ ID NO: 28410 - DNA, 201 bp, Bos taurus
atataagtccagaaacaagggttaccaaaagcctcaacttctgctgtagcttataaaaaagccacgtactgacctatataaacccttgtcgaatggactctatcaggacaaattggagacattacagtgttttctcccatggagtctcaagaagacttctcctatggtgcctccaatgacttcaaaaaggtaagaaaatgt

SEQ ID NO: 28411 - DNA, 201 bp, Bos taurus
taactacataatactaaatttggacctgtttttcaaggtcccagaccaatttctgcatctttcattatgcccttcctgactccttcaaccctcactcaagcctcctgcttccaaaatcctaatacaatattcagtactgaattatacactgtttgcagtcctttagagtttctcctttcatcctccataatacctttccag

SEQ ID NO: 28412 - DNA, 201 bp, Bos taurus
taatagcatgttggctaaaatactcagaaataataagcaagcaaaaacttcaagggacttacattagaggctcatgaggcctcttacttatgggagaggtagtcattctcagcatcatttggatttaatcaatgactaaaaatcaactttgattatcaacccctgccccccaccctaaaacagtctgatgaggttatgacc

SEQ ID NO: 28413 - DNA, 201 bp, Bos taurus
gaggcccacccacagggcagctgggggccaacagtactccccatgttcttcttatctttacagaaaatgggcacccagaacacaacagcccgcgagacacagagccaaactgcagcaaaggccttggagagggcaaagagccagctgcgtggggagaaggggcagaggggagacaaaggtgagggccaagccgcgtggtgg

SEQ ID NO: 28414 - DNA, 201 bp, Bos taurus
gagctgaccaccaccccagatgttctctaagacccctctaagcaggaacacttatgcaagtctacacccctagatctcctgctgaaatccctctgcaagaaaaaattcattcgccttgtggatttgagctccctctgtgtcctgctggggacagcccctgaatggactgtagactttctaggtgtcaggtgttatcctcaa

SEQ ID NO: 28415 - DNA, 201 bp, Bos taurus
ttagaactttacggcccttctaaaatattatcacttggttgtggacttgcaagcctaagtccaactgtggaagcccagacagggaagggacaggagagaatgcagaggaccggggccatctgcggaaggctcagcaggggcatcataactagatgccctgaccctgaaacagccttctgcttgctcaagagaacctgtctg

SEQ ID NO: 28416 - DNA, 201 bp, Bos taurus
catcatggagggagaaagagcaaaggctaggagtggccaaggccaagcctgagttgaacttctcacccctgctcggtgaggcctctcaaaggtatcccccgctcccggttctgctgttcagattccaggtgaccctggaaaagccatggatccctttcaggcctccgttttctcagctgcaaaataagggcctctcattct

SEQ ID NO: 28417 - DNA, 201 bp, Bos taurus
agaggcttataagctgtaggaagccatgcgcaggggtgtgaggcaagcaccgccccatgcccaacaatgccccacctgcttctcagcctcaggaatagcatcagctgcaaaggcctgaaagcagtgaggggtaacagtgagatgggaggaaaagaggaccctgactagtcgtcagcagcccacagagtccaggagccacag

SEQ ID NO: 28418 - DNA, 201 bp, Bos taurus
ttatgtgcattatctcatttaatactcacagcacctttgaaaggtaggcaccattatcatgcccttaacataagagaaaacttaggcccagcacttaagtaatttgccaaagcatacacaccacaagagatggagcccggctttgaacgcacacagctgccccttgagcctgaacaattttccaccacgaggtacagacga

SEQ ID NO: 28419 - DNA, 201 bp, Bos taurus
caacactatttcaagctaaagcaataggactgttccgtgggaaccccatcatagcactactgttccaggctagctcatgaaagggcccaactccaggatagtctttaaaaatagtactagtatcagcctagtcccataaaaccaaaattactttagtttcattaagggccaaacaggatttttgcagattggccgagaaag

SEQ ID NO: 28420 - DNA, 201 bp, Bos taurus
agggagctgttactcttgctgggcctgatggggaaaaggaagaagctaccagaacccagggggggctctggctggagctgtagttgtcactctggttttaggaaagggccaccagacaggggctatgtcctcaagtagcataacactgccaacttccatctcacagcctggcggggaggcagccagggagctcaaaacccc

SEQ ID NO: 28421 - DNA, 201 bp, Bos taurus
agaatcaaacaacttccccaccaccggggtgccctgtaattctttcttagcaggagggtcggaggaggaggaggaagtagggggctagcaccccaaagccgagtttctcaatcaaacacctcatccggtaactcatccatcttgtgggcagaaatgggcaagagccaggagcatttggagagagtccttcctgggagaagc

SEQ ID NO: 28422 - DNA, 201 bp, Bos taurus
tttgtaaagtcaaagccatagtcatctcccaaaaggggagatacaaaatcccatataccattctattcatctcgatagtgttcatttcttttctagctcaatcattctctctcttgggtatcttgaaacttaaagatctaaactgcaatctctagtgaccccattaacattaaataataagggaaccagagagaaagatga

SEQ ID NO: 28423 - DNA, 201 bp, Bos taurus
ggtggaggacagctctttgtctgctgcattttcctggctggggcttggggtgtcactgtctgccctcttgtcactgtgagtcaaaaatatcagcagtgtcatcctggccgatgaggcctgtacgtgtatgaacagagccttcagctctcaaaagaaaatgttgcttgtgcttcatccttaccagaaacattctctaaagag

SEQ ID NO: 28424 - DNA, 201 bp, Bos taurus
ttggctgaatcacctgcccggctctgtagccagggtacaggatgcaatgggatagagactgaaaattctcaaaagtataggggagataaaagcctgttgtcaggagagaagtggtaggaaacatgctgataagtcaaaagaacttttagctataacttgaagtgtgtgtcttttagtacttgatatctgttcaaatgtcta

SEQ ID NO: 28425 - DNA, 201 bp, Bos taurus
tgtaatttcaagcagttagttttacttcagtctcttgatggtatatacaatgacaccaatatgtcttaagtaaagcaatattttgggccatgagttaactatcctatgctacatgaatttttgcttcactccaaaactatcttcagtttttttcagacattctaaaatgacagatttctagatcatttttctgaaactgtc

SEQ ID NO: 28426 - DNA, 201 bp, Bos taurus
aggttctgaagtttggttccattgattttaagagaatgcagccaacatgtattatctgatttgacttcaaaatcttttagaaatatagatcacaatttctttttatgcctttcagtccacccaagcagcagagaaaaacaaacattcttcattattattattttcatcacttggtaagtcacagaagacttagtgtaatat

SEQ ID NO: 28427 - DNA, 201 bp, Bos taurus
aatcagtgtcaggacttgcacctgcctctcagaacctggaccctagcttcacccagtaaaggacaggagaagaaggtagaaatgcaatatcacacatctggcttgtactttctaagcatttgccttaattaaatacaaacaagacagtgatgaagagataatgggtacagttccatcaatgaccaactcaccagtcttttt

SEQ ID NO: 28428 - DNA, 201 bp, Bos taurus
acagctgaattgcgctaagaagtttaaaacccagggaaaaactaaaaataaatccaaacgtcaaactaattaaatcaaaagttttaagatgggcctcgcccgcagcagtattttttaaagttcttcaggtggtcctgaagggcagccaaggttgaggaacacggttgcaggcagctaaaactccaggtcctgggcctcatt

SEQ ID NO: 28429 - DNA, 201 bp, Bos taurus
ttgtatcaaaaataaaacttccagtaacatcctgaaggtaaaatgaagccaataatgtaaaagctattaatacgtattccattctatagtgtagaagcaccgccatattggccaccaggatcatgtgaccgtggtgttggcttctaggagttgtgtgatatacttgttcaagacttcatggttcaatcaggacttgtggaa

SEQ ID NO: 28430 - DNA, 201 bp, Bos taurus
gggtgtctgctgcacggggcaaagaagggggcggctggcgcaggtccagaaccctctccaccagccagcaactatactccttgcttcccagcggccagtcggggtcccgccacaacctctaccaaaggatccgtcatccccggggtcctaccttggctgctcctctccctgctctgcagtcttcgtgcagttggtggagga

SEQ ID NO: 28431 - DNA, 201 bp, Bos taurus
tcacaccagccctgaaaatcctagatcagtcctttgacctttcagactcccgaataatccaggtttattgtaaagaaaaccctctttaatggaatagatacaattatacacattcatacttagggttttacagtcacagctagatccccagtgctgcttagcgtttttcttagttgctacttgttagctccctcacacatg

SEQ ID NO: 28432 - DNA, 201 bp, Bos taurus
tgactaacaacacatctcttcctgtcactattgagacttatagcctacacataaaacctgactgtcacacagctcagtctctaagggttcagcctcatgagtcttttttacgtaagttaactgtttgttcttttcttaccagtaacttgggtcagggatggtagacaagggcctttctgcctgtgacccctgctctgtaaa

SEQ ID NO: 28433 - DNA, 201 bp, Bos taurus
gtaaacggtgccgattcagtcatgacttctgtttctcagccttctgctttctcttctgtgctcattccctgctttccttcatacactcctgccttttcttgtatgctgtgtttctccatttaattattcttttctctgttttcagtctttcctgtttgctttgcctctcttcctccaaccctctttttttctatgtgtttc

SEQ ID NO: 28434 - DNA, 201 bp, Bos taurus
accgagaaccagggtaggattcacagccaagctccattcgcttgttcctcacgctgcttattaaacacgtactgcatcagacccaaggcctcctgagcctatttctttgtcaaggggtgcagggatgaggatccaccacagagggatctgctggtgatcatacacgcagcaggccaaagtggcatgattgcaatggaatcc

SEQ ID NO: 28435 - DNA, 201 bp, Bos taurus
ggaaggaaaatgaaataattgcattcggactcgcttgaaacaattcatctgtgtgtccacgaagatcctgagggcctgtggacactgcaaagtaacacgcaggtttgttctgtggtttctgcctccctgtgtgcctggcaggaacggggaaagggagtatctcggagcaggtggatttctactccccattgtgcaaagctg

SEQ ID NO: 28436 - DNA, 201 bp, Bos taurus
gctcccttggggccatgagagccgcgtgggcaggtggctccagcaaacaggccagggacacaccagcagctatagagcggcccagggcctctcctccgcctggaaggtgggctggcaaaggtcttggcagcccattctctttatctgatcccactactttccatctaccattcttttataaagcacaacttttcaggaatt

SEQ ID NO: 28437 - DNA, 201 bp, Bos taurus
aacataggccatcctatcagataggacaaacgtttttgtatccgagaaagagattcattctgaaacattcaaatgtaatgcagttgtggatacagataggtatcgggtcttcagtgaaggttcactccgtcctcagagaacaagggaaacactagctgggcttctctggagactgttgtagatggcgtgttcgtggagcca

SEQ ID NO: 28438 - DNA, 201 bp, Bos taurus
gcagacaagatcactgcttctctgtgcctttatatctgcaagacaaaggtattttgcatgcctctcaagttatctagcctacactaggtattaaaataaataaacttcctcaagcaattctacatgactcttctttgcacatttgaaaagcttcctgcatgtgtagcaccagaggagagtctcgctgaaaatccccagaga

SEQ ID NO: 28439 - DNA, 201 bp, Bos taurus
tgcaaaggaataaaaaaatactcatttagattatatttttcatttgcaatttctgatattactaaaggcacaattagacctacgtgagaacttagaatcatgtagtaaagttggaatggagcagacgctccctgctcttgtttctttcagagctggcatcaagagctgaaaggttctttatttgtgtgtgtgaatgtccta

SEQ ID NO: 28440 - DNA, 201 bp, Bos taurus
ccaaagagcacaggccaaggccaaagcctaagtggttgccatggaaatgggttaattacccaatcagacttttttctgagaatgttactataaatatcctcggccttttccactggccttgaagttgagatgtaagatctagagcctccgtatctacaagagccttgtataaactgtgcatggtatgtaggcaacagaagc

SEQ ID NO: 28441 - DNA, 201 bp, Bos taurus
agaagaaactgctaataaactccttaaaactgactcctaaggaatccccttagcctctctattttgcagaggcattataaaatttaaagaggaaagagacaacagctgaggatcccaaactcagtatccaaaaagagctccgctccaaatatattctgactctgagtcctctaccccatgcattcctcagtttatttaccc

SEQ ID NO: 28442 - DNA, 201 bp, Bos taurus
aagactgtaagggaagccagtcatacactgcagtgctccagggaagcgaggtaggactgtgttccctgggaagaaggtctaaaaacagtctgtaggaacttggttgtctgtgttgttagggccacgctgtgacaactggagctgtctctccaagctcctaccattaaacaacatgcccctatcattaaacaacacgcccca

SEQ ID NO: 28443 - DNA, 201 bp, Bos taurus
atggaaaaaatgccatacatccatgcaatggaatattatttggtcataaaatgagtgaagtatggatacattcttttagatacatgagcttcaaaaacatcatactgagtgaaagaagccagacacaaacgactgtataaggtttgattccatttataaaaactcttcgggatctgaaagtctatggatgtgtgtagctgc

SEQ ID NO: 28444 - DNA, 201 bp, Bos taurus
tcacacaggggcctgaatggagatcggagcagtgcctgcctgctgggagtcatagcctcggctcattttacttccactcatgctgggaacttttgctggcatgggcccctggcacgctggtgtgccggtaacaaccagctttctgcaggagaaaaaacaaacccttatttaaagtctccaaaacgtggaggcaaccaagtt

SEQ ID NO: 28445 - DNA, 201 bp, Bos taurus
tatgatgtatttgcatcatgtattcttcaaaaggtttgactttttattttttggttttctggctttttttttacaatcaaattgtgtattgtatcttctttgtttttgttcttacattatcagttatcacttcaatgttagatactcacctatattgttttataaatgcgttcacattttattttacattgaattctctaa

SEQ ID NO: 28446 - DNA, 201 bp, Bos taurus
ggtgccacatgacaactcagttccgcataaggacagagggtgagctgctttctccccaccctcttctgagtcccctcagcactcgggccctctcgcagccatctccctgatgggaatatggctttgtctggtgcagtgcagcctggctggggaggggagtgagcagaggccctggtggaggtgggacagagcatggatgca

SEQ ID NO: 28447 - DNA, 201 bp, Bos taurus
ggggtagggtgggatctactggcgggcttcctgcctggaggttgattggaactagctcttaaacactggtgatttttttctttagagaccacatgtgtgcgttcctaaatccatgatggtcattttgttcacaccacgggtggggcagccctgaaacaggagagatttcttttcggatcaccatctgagattcagggctag

SEQ ID NO: 28448 - DNA, 201 bp, Bos taurus
caattaccggcgcagtgggtcaaagaggtgtgagcaaagctgtgatgggggcctggagcggggaacctgctaagccccaggtgtgggagttaggggccacaaagcaggtgactttcaaagtgtcttttgaagagtgaaaatgacttttccaggtgggaagggtggagtaaatacacaaggacctgaaataggagcagggcc

SEQ ID NO: 28449 - DNA, 201 bp, Bos taurus
gaaatccaagttggttccgggggaagtgaagagactagaggtctttgctgggaaagagaggagcccggggtgagggccccaaagtggccaaaaagatgctgcttggatgacacctggcaggagagggggtcgtttgataagagtaggggtatctgagctagtgatttgggggagatggagagattctgtttcttgacaagg

SEQ ID NO: 28450 - DNA, 201 bp, Bos taurus
ctgccatcaggcctggctaggaggcagacacaggagaaagctgagtccaagtaccaggatggacaagtttaagatgttgcaggtggatggtgggataattttaggagtttcaggcagggaggccaaagcatctaaaccaagtaacaaggggcaactttagtgacttctggaaaactccagctggaattcatagatggacaa

SEQ ID NO: 28451 - DNA, 201 bp, Bos taurus
cttgacgaagcattcttcaatccaaagagaagggcacagtttgagactgcctgaggccagatgacctctggattgaaggaatccaggtcctgcaaataccctgattctcatcagcaagactgctcgtgaagcgctgctatcaaactcctcaccaaatcccttcccccaacccagggttgggacacccagtttggagggcat

SEQ ID NO: 28452 - DNA, 201 bp, Bos taurus
tagtgaaggatagggaagcctggcgtgctgcagtccatggggccgcaaatagtcagacgtgatttagtgactggcaaccacagtagcattttctgatatccactagggcaaatcagtctccctactctttttttcacgtattttctaggcaggttaccagcatttattcttctaaaattacgagatcgttttaaaaatgta

SEQ ID NO: 28453 - DNA, 201 bp, Bos taurus
tattcacctccaatgcctgggcagccagacagactggcttgtggagtcctcacagactcatgtttccattgaaatgtgttcaatgtgaactctctgtgagagagcccaagactgctaatatctgaagcaaaaggctggtggaagaacctggaataaaattcttactctgaacaatctatggagattttatgattctctgat

SEQ ID NO: 28454 - DNA, 201 bp, Bos taurus
aagaaggctgctgagccgtgttgcagaacacagaggggagcatctcaaaagcacaaaggctgcctgctagctccccctgcaccaggcaccagacacagaatgcacgttccctgttcctcccagaccctggagcttgtactccagctgtggtgtgaacagtttgcaactcagcaagggactctgggtacacaagcaattggg

SEQ ID NO: 28455 - DNA, 201 bp, Bos taurus
tatacatgtattatatatattgtaatatcttgttattatatatataaaacatgcttgtttttcaaagaattttctgtttcatcttggttgtcaaatttatcggcatacagattttattatacacccttatcatccatttgatgtctgtggaagctgtagtaatacccccattttctctctcttttggtaattgtcttttct

SEQ ID NO: 28456 - DNA, 201 bp, Bos taurus
gttgacacacagggctcatctcagatctgcagttgcacagtggtccccctcagtgggagagcctgggctgcttcctgcaacttgagatttccggctcctgcgacacgatggccatgtggccacagcctggagggtccacagccctcctgtccacgggctctgctgggtgctcattgagtcatggagaagcagctactctgg

SEQ ID NO: 28457 - DNA, 201 bp, Bos taurus
aactagaggaatcaaatcccacaaacttctctcaaacacgcatatgaagacagccttatttaattatatttttaacatatttatttggccacatcaggtcaaagttgcagcatatggaattgttagttgcagcatgtgggatctagttccctgaccagggatcgaacccaggccccctgcattgggagcatggagtcttag

SEQ ID NO: 28458 - DNA, 201 bp, Bos taurus
cttgatttcagccttctctctcattctgagaattttaccttccaggaaccagccagaaagaagcactggatatctctaccccctgctctctccccatttcccaggaaacagggccttttcatggttagacgccaaccccagccttgacttagggaatccattaatatttcaggtattatcagagctttgagatgataaaat

SEQ ID NO: 28459 - DNA, 201 bp, Bos taurus
ctggacattagacaactcacaatgtgatccctgagaaacgagagaaaacaaggtgacgtctctaagcactttgctcatgaatggcctaaagagggtttccggatcacactgtaggcaaggacgggtggtctgatttgagaggctgtaactggacatcttaaggccaagatggctagagcttgcagggcagcgtgctggaga

SEQ ID NO: 28460 - DNA, 201 bp, Bos taurus
aaaacaaggctgagcttcaaaacagggaagtgcttgcatctgttatataaaaactctgttccttgtgaaattgctttttcagtctaatgaaatggccccaaattaaaacatacttccccaaaacaatggcagtgtttcatactgaaagttgctctttgcaaccctatggaatagttcatggaattctttaggccagaatac

SEQ ID NO: 28461 - DNA, 201 bp, Bos taurus
ggaacattttagagttttatgggacaaaatgtttggaagaaatacaggactttgattacatcattttgtagcagcgtaggtaaagttcgttgttggccaagtaaaatattatcatgttaaatattactgagactaaggtgtggctttgtgatgttatgtgggttactattagtcttatgtatgtttggaaatatttgaaac

SEQ ID NO: 28462 - DNA, 201 bp, Bos taurus
ccctaaatatctggtgaagagataacagaggagttaacaaaaggggggtagttctatggaggagattccaagccaagggaatttgtcttctgatggccatctgcttagcccagcaaaagaggtcctcacagctgtgttggagagagcagaggaggatccaaggagctgaagctggcccgggaggcagaggccagctggtgg

SEQ ID NO: 28463 - DNA, 201 bp, Bos taurus
atcttgacctgagtttgccttgagatgacttagccactcatgctatggaacaaaagtggtcctggtgagaaagccaggagcgactgactatgaaaacttgcccagttccacctctgttgctggcttacatgctggtggactccagggactaaactcctctcatgcttcctactattcccatttttgctgttgtttagttgg

SEQ ID NO: 28464 - DNA, 201 bp, Bos taurus
ggcagaccattaaggcctccaggttggggcagggaatttaaggaactgagacctgggggttggaagagctgggcaaagaagggactgagttgcttctgccgtggagagctgcactgctggcctggggaaaagccttgctgcacggccttcctcagtccagcagtaaggggaccggggatgctgagcctgtgggtggagcct

SEQ ID NO: 28465 - DNA, 201 bp, Bos taurus
taatctgagccgggcatggtgccctagaatggcctcatttctgagtctagaaatgatgagtcgagcataattctgctttgaatttttatcacatagcttccttggaaggtaaatatagatacattaagggtatatttagaagtagccgaaatagctcagttgggagagcgttagactgaagatctaaaggtccctggttca

SEQ ID NO: 28466 - DNA, 201 bp, Bos taurus
ccaaaaggccttcaagggacacggagcttccgcttcctgccctttgggacattttcttttggcatgcttcctttctttcctagcccaaacaccttgctgctcgggggtgaggccacacaaaggggaaccaaggtgcgcttgctgactgtcaacatcaacgtcaactgccaaccaggaatgtgagctgtcttggatgttcta

SEQ ID NO: 28467 - DNA, 201 bp, Bos taurus
ctgacccctgcatggggagcttagtgtcttaaccactggaccaccagggaagtcccaagcaagcaaatctttttttcttatgttaatggccagcagagaagggctacacagagagagatctaacaagcaagggggcatgctggcttttcctgagggtctttcctgcatctccttcggccacactggtgctggtgcagtggg

SEQ ID NO: 28468 - DNA, 201 bp, Bos taurus
aacatttgtttcgcacagttctgaggctaagaagtccaagatcaaggtgccagcagcttcagtgtctggtaagggtcctcttcctggtttgcagacggccaccttcttgctatactctcacaggataaagagatcttaggtctctcgcttttttttccccatcatgagggccccacactcataacctcatctcacccaagt

SEQ ID NO: 28469 - DNA, 201 bp, Bos taurus
ttccaagctcctcaaactccccagggcctcagacaaagcctgagaagtctctttgtcaaccaaaaggaagggactgctggggctcagagtcagatctgcttggcccagcacacttctgaggcgctgaatttagactgttgcttgaaatgagtgggttgtcgactggcgtgtgagaagccactggtgatgcagagagaggcg

SEQ ID NO: 28470 - DNA, 201 bp, Bos taurus
ggctggccaggcctccaggggcccagaaaattccaggaaatttcttctcttatataaggtgctacttgacatactggtagcaatttgtgtacctgcaagtgggcatgtaatccaggcccaattcaggcaaagttagatctgtcagaggcagctcctctacttctgaaacctaaacaagactacctcctcaatttaacttcc

SEQ ID NO: 28471 - DNA, 201 bp, Bos taurus
tttcaatgagtctaccctttccttgaagccacttggagtagggctcctctcaattttgattcagacttagttctagatccttcacacccagacacaagcagaggcaacatttgtttcagcaccattaaaagtaaaaccctttattctttactgagaatagcgtgcacagaacaccaaatacagttcaccagcatcctgggc

SEQ ID NO: 28472 - DNA, 201 bp, Bos taurus
gtggccacagtgctggaaagggtcagttttcattccaatccaaaagaaaggcaattccaaagaatgttcaacctattgaaatgttgttgtatcatacaaagatgccaggattcttggccccaaaggagaagaattcaatctggagccagagacaaggcttgaaccctcagagcttttgtgtaataaagttttattaaagta

SEQ ID NO: 28473 - DNA, 201 bp, Bos taurus
aaatcctgatgtgatggtattagggggtagggcctttgcaaggtaattaagttgacatggggttatgatagtagggtcttcgtgatggcattcagttcagttcagttcaatcgctcggcctctccctttttttctctcttattctccctcttcttccgtcccctctcctaccacatatgagaacacagccagacgagaact

SEQ ID NO: 28474 - DNA, 201 bp, Bos taurus
ctaagacttacttgttcaagtagaaggcaaacacgggctcagaaatgactttttgtagcatcaggctgtcaaagacagggatgatcctggaggtggcgaggctggggtagcccaaacccaggactccctcaaaaggtacaaacggcaggatcttgctaatctgcctgtaggtcagggcaaaagtctggttcatgatgacaa

SEQ ID NO: 28475 - DNA, 201 bp, Bos taurus
gtaataaaaatagcttctatccatcctccgcatctcagaggaacattggcagtgaatttctgccctagggggatctctgtgaggcccttcaagttgaggtaattcctgttttccttccaccccaatcaccagctctctgccacccacaccaactgtgtcctttccagtcccatttgccaagttttgggccgtgtggatccc

SEQ ID NO: 28476 - DNA, 201 bp, Bos taurus
tggtcaattacatatgctatcttgctgtctccacacaagcctggcaaggcatgtcccccattgtacagatggaagaagtctcctccgatcttcttcatccatactggagacaggcacataataatcccacaagtaatacatgttgactaaatgaatgggtgcatttacagatacttccaatagaacacattggtgcatcca

SEQ ID NO: 28477 - DNA, 201 bp, Bos taurus
tctcgacccagaaatcgaaccaatgtctcttaagtctccggcattgcaagctgattctttaccactgagccaccagggaagccctagaaggttttagcacagtataaataaccagttgtgggcactgctatatttaaaatggataaccaaaaacaacttactgtgtagcacagggaactctgcttggtattatgtggcagc

SEQ ID NO: 28478 - DNA, 201 bp, Bos taurus
tgtgacctcgaggcttcgaaaactttggacctggagagctgctcacttaaaatcattcatcctcaaggatgagtttgggcccatatggttcctcagtattgcctcaccggttctgtggcttgtggctgctcagtaacaaaagggaccctccacggagggtggaggattcaagttgttgttggctgtagaaaggaggcctct

SEQ ID NO: 28479 - DNA, 201 bp, Bos taurus
aatctggggtttagacctcacagcagcccactgggtggtgaacaagttcactggttggccaaggcagagctggttcacagttgccaggcaagaaacaaccctctagggcacagatgagccaaggctgttgggcaggtgcacacagcatgccccacgtgcacaaggcctgcagcacacgatgtccatgccaggcatggaggg

SEQ ID NO: 28480 - DNA, 201 bp, Bos taurus
aacctggaagtcttttaatgtatctttgtctttatattgaagttgagcttcttatagatagcttatattgtcattctttttaatctgatcttatgtctttgcattggtgtgttttggccatttgcatataactaccagtgtgattgaattaaaacttaccatctttttgttgttgttgttttctatttctactgttttttg

SEQ ID NO: 28481 - DNA, 201 bp, Bos taurus
gtccagggcctgtctgtggaggtcaagtagagacacagtcccttcctcagcaggtcattcactctgggtgaatgcagcaagggcatctcctgggcaagggcagccgcccttcccacggccccacttcattcacatcccactgtcccctaagagcaggggtgccctggaaccaactaatacagctcctgagagcgaaagggg

SEQ ID NO: 28482 - DNA, 201 bp, Bos taurus
acagggtgtgctgggagctcagaaaacagaggggcagcaatgaagaagggattctaggagactctgcccggaagagatgggaggatcctggaatgattgcctgggccaagggttagggctgggggtgggagggctggcttagtgacccaagaatgggttactttgtctcagacttggggctgcacccaggagtggactggc

SEQ ID NO: 28483 - DNA, 201 bp, Bos taurus
atcctggggaggcccctcaggagcctagaccagctccctaaggacccacctgtctcctccgcctggactcatgttcagctgcctcccccggtcactcctgctggacactcttgtgctcctgtggcctcagcttagccctcttcctgtgttaactcagggaggagccctttgttggtctcattttgcaggtgaagaatctgg

SEQ ID NO: 28484 - DNA, 201 bp, Bos taurus
aggccctggatctaaacttcagttcactgtgtgactgaacatgcgtgtcttgccctctctctctgagcctcagatgctacatctgtacaaccaccaagtcagaggagacaaatcagggccctccctggtggctgaccttgtagaaggctcctgaaattcctcctagttctatgctagtggtaaagatcccacctgtcaatg

SEQ ID NO: 28485 - DNA, 201 bp, Bos taurus
accagaggtggggtggggtcgagatctggtaggcggggacctgaattgggcggggcggagtaaggggtctgaaagtgggtagaggccaggaaccaactcgaagaggacaggggtttgagacagggctaaggactcatggagggatgaagcttcgaagagtgagggttgaggcccccagcggggcttcgggaactagtgagg

SEQ ID NO: 28486 - DNA, 201 bp, Bos taurus
tgtgttcatggggttctccaggcaagaatactgcagtggtttggattcctttctcccgtgaaccacattttgtcagaccctgactaggcctgacaggccacgccatgtagcagaatgacatgtccagtgccctggttaatacacatgtatgaaatatgtaaatatatatatatatatattgtttgtttgtttgtttatagg

SEQ ID NO: 28487 - DNA, 201 bp, Bos taurus
ccccagggtccctggcagcctggcctacagcctgaagaagcgctgagccagcccgcgggccgctcgaccatctcggcctctgtctgtgtctgtctgtccagctctctgttgacctactgccctcctgcctggtatcctgtcactgagggtttggtcaggtgtatataaacgtcctctgtgtcatgggtgaagagtggccca

SEQ ID NO: 28488 - DNA, 201 bp, Bos taurus
cctggggcggggtgggggtgttgtcttctgcccagacctcagggaattgttgagttaactctctctctcaactgtttagcccatccagtttcccttctggtagatggtgcaacttccattcatcttgagaggttactgagaggaagaataaataggtggttgagcccactcaaagagtgggtcttttgttggggggaaggt

SEQ ID NO: 28489 - DNA, 201 bp, Bos taurus
tggttgcagctctcagtctggacgctcagtgtgcagccgcccctgggagatgcaactcttatactgtgtccctcaggcaggtcctgaggctacagagccacgaggtatacccgggcagggctgtctaagggcaaccagaacccacttctcatcagtcccccaacccaggggcatggggcagaagggagagcaaagggccca

SEQ ID NO: 28490 - DNA, 201 bp, Bos taurus
cacatcaatgccaggcctgtctcccttagaaccggatacagagaactggggggccttcaccttgggcacattcactttgcccccaggcccatgaatgtcaatgtcaggagcttgaacttccaccctggagccagagatgctgccctcagtttggggcacagagatgtccacccctaaactcccctgtggcttggcaccttt

SEQ ID NO: 28491 - DNA, 201 bp, Bos taurus
tccatgggattttccaggcaagagtactggggtggggtgccattgccttctgtacctgcttccttttccggaaattacgatgattaatagtacacttactgcaggggcttgttgtgaaaattgaaaccaggaaatagtactactgtataacacttggtgtctgcaatggtaggtaaacgttatacatgcaattgctgtttt

SEQ ID NO: 28492 - DNA, 201 bp, Bos taurus
atgctcccttacattactacccttctttctcccaggtcacacccagtggtctacttttagctccgcccctcggcctaaccgtagcagcaggccccgccccttccacaaagcccctccccggaagtcccgccccttaggcagcctccgcttcctcgatgcccacccggtagcttccagcacctcgtccaactagagtctcga

SEQ ID NO: 28493 - DNA, 201 bp, Bos taurus
accgcattggagaccttcgggccttcctgggccaagaggcaggcaacctagcgggtgagtccgggcgcccccatctccctccccgcgcgtcctcacctcccaccccatgggcccttggtttaaatggtcgccaacttcgagctctgttcccagattgactcagacggttctctaccctactcggtactggcgaccgctccc

SEQ ID NO: 28494 - DNA, 201 bp, Bos taurus
aagattgatcctgagaaaggtaccagggtgggccagagtccatgagcttcctgagcttagggataaaggtgaagaaaggtagagtgatggtcggtgggagttggccccagcggggaggatgtaggcctgggaggaggatctgattcgcaaggttacttagttttcagggcaccaggatgttggagtcaagttgggggccca

SEQ ID NO: 28495 - DNA, 201 bp, Bos taurus
ctgaagctgaattaagaaataattgtgactataacctggatgtttggttttgcttaaaaacctcattagaggtaatacttccagatgagttaactaatctgtaaacctcaggtgatataatttgtgttgtgagacgtttgggttatcttgtacctggcagtggtcatccaaaagtaagagaacaactgtggcagccacaca

SEQ ID NO: 28496 - DNA, 201 bp, Bos taurus
tccagtgaaaattggaataatagatgtgactttaaatatctagcagcagagtataatcagcaggatgaagggctaggatgggccaacacttgtctctcccttaaaaacaataaaaacaataattaaacagcttgttgttgtttagccactaagttgtgtacaagtcttttgcaaccccatggactatagcccaccaggccc

SEQ ID NO: 28497 - DNA, 201 bp, Bos taurus
catgttgccagaagccctgctggagtttgacggtcccttggtgcaaaagtctggatgcatttgttctgtggctcgagttccactgttctcacaggcccacggtcttacctagagagaaggagagagaggagaatctttctagagaaacagtgtgatgaaaaggaaggggtgagggagagaaagaaaggcaagttagtgagt

SEQ ID NO: 28498 - DNA, 201 bp, Bos taurus
ctgtcccccaagaaccagaacagtgcccacagagacgagacatccaggaaacatttgcataataaacaagtaaaccccacctcttagtcacaatgtgactgtgggtaaacatccaaccatttgtagttccatttatttataaaactaataccatctcaaagcaacagtgtctgacacaaactccgagcgtgctcagtcaca

SEQ ID NO: 28499 - DNA, 201 bp, Bos taurus
tgagttcccctctcattggaaatttctctggggaagccccatgaaggaaatatattttctaaaagtttctcagctacagttatggcatcagcctttctgcataggaaggcttcaatccatcctgagaacatacaagcaattacaagaacatattgataaccgtccatatagtcaaagctatgatctttccagtagtcaggc

SEQ ID NO: 28500 - DNA, 201 bp, Bos taurus
ctctgtcacttccccaaatcagtagctcttcgagtggcttcagctgccttacactgtcacagcaagacaccgtggttttgattgaatgtggagaggcagagagccgtgtgaagtgcgagtgcctgggggttgtggggcagcaggaagttcaaggagagggagcccctctgggatgaaaggagccggggatgggagtagggg

SEQ ID NO: 28501 - DNA, 201 bp, Bos taurus
cttcatcctcccaggggcaggcagctggggcctgggcctcccagctctgtgttcttaggctgtgtcccttgggctgtggtgggggaggtgcttagaagcatgtgtcctgggctgtttgccagggcccaggccaggacaagggcatggggcctggtggctgggggaaggctggactgagactgctgggcattaacaataacc

SEQ ID NO: 28502 - DNA, 201 bp, Bos taurus
cagcagggcagccttgcagacctgctctcctcatcctcctgcctccccgatctcttctgcctccttccccacctcctcagacgctgctgtccgcgggccctgtctgtcccttttctgttccagccctgactctccacccaggtccaggtacgtcccccagagaagccctgccccccctgcctggaagcccaccccagcttc

SEQ ID NO: 28503 - DNA, 201 bp, Bos taurus
agggcccaggtaagagcaggcagaggccagcggccgggaggggactggatcttctgcctaggacgcccactgcccgcatccacggagggccctgcccagccgaaagctcacagtgggacatggtcaggaaacacacaggcactgttctgcccgaagagcaggccagtttcctgagaaaggcctggccttaactgttgcacc

SEQ ID NO: 28504 - DNA, 201 bp, Bos taurus
ggttcctggaaaattccaggtttgtttcagcctcagggcctttgcagttcctattgccctgtcttgaactctgtccctggcttggggcttttactaagcaacaactgctgggccctccttccctgcctccctggtaactactctttatctttactttttgttttctttatgtagcattcaccactccagaattatcttcat

SEQ ID NO: 28505 - DNA, 201 bp, Bos taurus
ctgggaaccccctgggtggtgctggtgggtgaggggcttcagagggttgtgtgggaggagctgggtgtgaagcatgacctccttgaggctggagactgtacggcctggggattatgggctcaggcacgggcctgccccgtgtatggccttaggtggggcagctgcctctcgagtcttgctctgtcatctgtcaagtgggca

SEQ ID NO: 28506 - DNA, 201 bp, Bos taurus
cactctacccattgaaacccctgacgccatcttcagtagcatgcactctgggggcgttttcctcctcatgtctcactgcacaaccatgctacctgcccagcgagacctgggcctgggcctgcctgtgttcacctcccatgaacctcccatggtatgttcactccggcagggatggggcctccctggatgcttacaaggcag

SEQ ID NO: 28507 - DNA, 201 bp, Bos taurus
gtggccatctcagaggtggggtgctcttgacacagaagtcatctgaacagaggtggagagcctcccgtcggcagggcgaggcatggcagatacacacatgtgggccggctgaaggaggtgacttctaagggcccctccagcttggagattcttcagttacaattcacccttcgtgtcagcctcactggcaactgcgacagc

SEQ ID NO: 28508 - DNA, 201 bp, Bos taurus
cccgtttcttgctctgagaagcagggcagcatgccagcagcccggccacctctccctgtgacccagggcccatctgcaccctctgctgggacgtggggcctgccgaggaagccagcacctctctccctgcgtttgctcctctctcccctgttccttccactctcttcccagttggccttcagatgggacagaggcagattt

SEQ ID NO: 28509 - DNA, 201 bp, Bos taurus
cctcacccaaggcccccgagccccctgcctcccccaggccaccccgagattcaggcaagaccaccgaatgagccaggtggcagtgtgaactcagcgctccaaggggatctggccgtactcaaaactcagtgccaccgtcaccattcccatcacggtctgccggcacagggtggggggtgggggggaaccccaagcgggacc

SEQ ID NO: 28510 - DNA, 201 bp, Bos taurus
ttgggaagcttgggtcccagcactcgagccgccactatctgcgtgactctgggcaagtccccttgttcctcacctgctggccagaagctacccctcctagaatacctcctaggaaccactgtgtccttcccagagtacagtcacgcccctgagaaggtgccagagaaagcactcctgtacagaagggcctgggacactgcc

SEQ ID NO: 28511 - DNA, 201 bp, Bos taurus
tagatgagaagaatttatctacgaagagactgtattttggggccaaatggggtgaactgacaagacatgatttcttgaggggcagcagggctcaggacacagacattctctaacccggccaggagagttgaagatttgaggtcaggtacaggctccacctacccaaagtgttctgttaacaactggatccctgtatcttga

SEQ ID NO: 28512 - DNA, 201 bp, Bos taurus
agcagatataggtggggagggttatgtcagccagagtcagaggcccagcttgagccctatttcccaatgccccagggtcctcaatttaggaggaaagatactcctgccacctcaatgccctttggctgctctctggccagacattcatgaccaccagctcagacctgtctgctctgtctccccagtgccaggtccctgagc

SEQ ID NO: 28513 - DNA, 201 bp, Bos taurus
cctcttttttcctttttattgcaacaagcaggcaggcctttaacttaggttcgtaagatgtcagagctagaatgggccttccaaggtcctctacagaattattttacagaaagagaaagggagtccctgggaagctatgtgaactgctgatcgtcccagtggcagaacagtaagtggacttccaaggggcccctgggtccc

SEQ ID NO: 28514 - DNA, 201 bp, Bos taurus
tcttagccttttacaggtagcagtggccctcaagtcaagacaagaacctgctcaattaagtggtctgcccatggtctaagcagtcagtgcctgctgacccaagggccccgttctgttctctgtggtggccacagggtccagtctcttccccataccctgccaggaccataggaggaagaaccgcattccctaaatagtagg

SEQ ID NO: 28515 - DNA, 201 bp, Bos taurus
gggtggaccatgaagactgggccaataacaaccgttctggggaaacattcgcaggagcatgaaaggagggtgagcaagatggagcagggccttgaatgccgggttcagaagggcggcggtggtcctgacccctcccacccaggctgaccccttctagcctgtctcctgtgattctggcctgagccactcagggtgggccag

SEQ ID NO: 28516 - DNA, 201 bp, Bos taurus
tgggtctgtctctcgctccggccttgcctcacacctgggttcttcgaaatgtccgtttctcatcccttatgctgattgccttccctgagagagggtctctctcccccactctctggggccttctcccctgcctgtctcccttccatcactgcagaactgtcagtcagcctccagcttcttttttgggacccctgcccccct

SEQ ID NO: 28517 - DNA, 201 bp, Bos taurus
gcttgtcttggcaggacctgtacatccgctggaagggaccctcctttgacgtgcaggtggggctgcacgagctgctgggccatggcagcggcaagctctttatgcaggtaagaactcgagaccaggggcttccccagcggtccagtggctaagactccacgctcccagtgcaggggcctgggttcaatccctggtcaggga

SEQ ID NO: 28518 - DNA, 201 bp, Bos taurus
ctgtcttcaggattgaggacgagcagctgaaggtgaggtggaggagaaggcagggacctttcctaacagatccaatgtctgaggctgttgtctcccctcagaggtgtgggatgtgattggccgaagcctggtcatcgatgagggagaagatgacctgggccggggcgggcatcccttgtccaggatcacaggaaactcagg

SEQ ID NO: 28519 - DNA, 201 bp, Bos taurus
gggggatggaatcatgagagatagaccatttgcatcacatagtattacattctggtgcaaattcctaacggttacttaatactagaattctccgtgtggtattgtgctaggagttcccagcactgcttttctacttgggtttggagaacggtactctaggttgaaacaggagaaggttgagttctagaatggaatgactca

SEQ ID NO: 28520 - DNA, 201 bp, Bos taurus
ctgcaggaactgtcctttctacaagggctactcagtaaattagtcatgaaagccagctgagggccagtgaaaccggccagtcacaaaaagacaaatactgcgtgattccacttagatgaggttcccagagtcaccacattcacagaggcagacagcgggagggtgggggccaggggcgggcggtgggggagttagtgttta

SEQ ID NO: 28521 - DNA, 201 bp, Bos taurus
gagctcagttacagtctggtttgcagacagtgagatgaccaccctgcagcacacacaggtccctcccccatagaaaagcagcagcctgccctctgctagtccccgagagcagcagagaggctgacccggtaagtgcagagggtcttgaagaaaggagacactgacacggcgtttgcgggcctgttttgcagaagcggaaaa

SEQ ID NO: 28522 - DNA, 201 bp, Bos taurus
ctgagaggaggagggggcagatggcgggaagacgaaagagcccaggactgaggcttggcttggccctgagcacggggctcctgagcaggcgggccatgccttggtctgctccttttcatccgctcagagcagcagaggagacacagggaggacaggtgagcaggagcacaaccttgggacaaggctatctggtgggctcca

SEQ ID NO: 28523 - DNA, 201 bp, Bos taurus
tccgaccctcagcgaccccatggaccgcagcccaccaggctcctccgtccatgggattctccagacaagagtactggagtgggtgccataagggctaggcacagtgagacaactgagtgttgatgtacagggagatggcagtccggctacagatgcacaataggctgatggaaagctgaagacaatgctgtcctagggcag

SEQ ID NO: 28524 - DNA, 201 bp, Bos taurus
gtgtgggcctccatgacaagacggtgggtcagttctcatccacatagggagcatctgggttcctgtttgacccctggagtcacgggccacagtgtccatcaggtgattaacagttaaacaccaccgcatccaactgctcaccctgatgtaagactaaatcctttatccttatcttatccagagtactgaaaaaatacgcct

SEQ ID NO: 28525 - DNA, 201 bp, Bos taurus
caggagatgattgcgggagccagggtcacccccaggaccggagggaagaaaggacatcagaggggctccacaaagaccctcgcgggcatggccagcattctcgcacgagaccccaggcgccacacaccttgaaggaaaagtatcaaccaaaggcttctccaggccaaatctcacgatattaaaaaaaaaaaaaaggcaagc

SEQ ID NO: 28526 - DNA, 201 bp, Bos taurus
gcagccagggggcagaggccttactcccttctcagctctgctccccagactgcagctccctggggactgcagttccctgtagcgaacagagcatctaggttcctggggagctctggcctgattgaaccctgagtttcctcagggccaaaaataggctagagtctgcctcagaaagtaatctttctccttctctgttttccc

SEQ ID NO: 28527 - DNA, 201 bp, Bos taurus
gcagcaccctgctgagcacggctcccaggggctccctcaggctcaagcggcccccactgcccaccaggaaatagatcatcggtttggtgctgctgctcacagacagagagaagcaggtgaaatggccgaagagagtcttcgcgctctggggcaggtccagccagtagagcaggaacccagagatgccgaggggcagggcgc

SEQ ID NO: 28528 - DNA, 201 bp, Bos taurus
attacagcaatgactctgacggacagagcccatcctcacagaaggcacagtctatcggcagaggggaaaatacacaatcagacgattgcccccggccgccgggcatggtggtggaacgggggtgactaacgagatggggactcggagcgtgggtggggctgggagggtctgaggtccggggggcagctgggagaggccagg

SEQ ID NO: 28529 - DNA, 201 bp, Bos taurus
gagctatcagagaagactgatagcccagcaggtaagtcaggacatttagaccacgggcagggtccacacccagtcgggaccccagccctggccaggagcccgagagtacttgacagcagcctgtgtctgaaccagccacttcttcagcacccagcacctcccctagaagctctaggggccagagaggcccacctgggggac

SEQ ID NO: 28530 - DNA, 201 bp, Bos taurus
agcgctccggccatgggggcggtggtggccgctgtgagaggcccgcagaagtccactcgcagtggctgctccccaggcagggcgagatagcatctggtctacaaaatcaagcatgaagggtttgtgtgacagccgtgatcgagaaagagggtggcatcctcaccaagctccctggtggctctgggcctcctggcggacagc

SEQ ID NO: 28531 - DNA, 201 bp, Bos taurus
ctgaggtcactcaggcccgtggctcacttaggccagatctgatgaccacagcgcctcacacagacctctgggttccaaaaggaatcaggcagcagagcacgagaaggtgggcaggggggcctccattaaccagacatcctgggagcggccaggatccgttggacgatggtgtagggcacggcaggcaggcatccgggcgct

SEQ ID NO: 28532 - DNA, 201 bp, Bos taurus
tctgtgactgattgaaatcagacatattggaccctgaggccactgacacccgtctgcaggagacataccaccaggagacccctgacagctgattggcacacgtcatgggcactaaggaagcctggccattgtaccataagcatcccaggcttcagagtgactcactggcccaggggtacgattctcactttgggtgtgaga

SEQ ID NO: 28533 - DNA, 201 bp, Bos taurus
ccgccccttcacagatgctctgagatgattggctgtttgagaggcgagagagttttcccctggttgctgtagaaacctccatgttggtgcctgctcatcgagtggccctgagatggccttcgatgtgtcccaggggacagtggggactccctgtccctgcctgtgtcacagtgacagagggcccccctcacacccacttcc

SEQ ID NO: 28534 - DNA, 201 bp, Bos taurus
atgatgcccagctctgccctcccctcccacctggtgcccccacggggctcttcatgctgctctgctctcgtttctgaaataacaaggctgcatctttggggacagtggtcgggccatggacccacgacatgcactgtcttcctgagtccacagcctcactgagcttttcctgttcatccttgacacatgcccgcctcactt

SEQ ID NO: 28535 - DNA, 201 bp, Bos taurus
acccaggctcctgactcccctattttggcttcaagtggcttgggaaaggctgaggcaggatgtgggggagacaggggctttctggctccccaaggcctccgtgtaacttgaacagcgcacaccagtgagggttagtggagatggctcgctgcaggagcgggaagacacacatggaaaagccagggtgcctgaggccatgtg

SEQ ID NO: 28536 - DNA, 201 bp, Bos taurus
ccatggactgcagcccaccaggctcttctgtccatgggattttccaggtgtgcggtgccattggcttcaatcagagacttaagagagcccccgcaaaaaaaaatacaaaatagcagcaagcaactgagggagtagacacaaacttcctgaggagctaggacggaggattcaaagtgttcacaatcccccaccttccgcact

SEQ ID NO: 28537 - DNA, 201 bp, Bos taurus
tctttagcgtctgggccaccaggggagccttggccaagggctgcgttccctgtaaatgtcttcagtggggattccatgtcattcctgtgtttgagccagcgcaggggtcacgggtccttgcctggccccaatcctcctggggttcggagcccccagcccctgctacggtgagtcccagtagtgctcggccccaccctgcac

SEQ ID NO: 28538 - DNA, 201 bp, Bos taurus
ggactccaggcgggacccaggcccgaagcaggggctgtgtgcatctttgaaggcccaggagtctgctgttttttccaggttgtgactcagggctttgggttaaatacatgattttgatggatttacagtgtttttttccccctcttatgatttataacagtaagacacccaaatgaagctacttcttagaaggtaaagagt

SEQ ID NO: 28539 - DNA, 201 bp, Bos taurus
gcagctgcccatctctgctctgggcaccctgggatctggtgggtaggtttctagggcccctgctgccttctgcccctgggcctctggttgatgcccagctcgggggtggtcaggtctcacacgcattttgcgaatgggaatgctagctacgagggatgacctgggcctctctctctgcccctgccaccctgggactcagcc

SEQ ID NO: 28540 - DNA, 201 bp, Bos taurus
ccagcgaggggctggcgtggctggagggtggcagcgggcggggcagaggcgaggctgggcgggcaaggggaggaccccggggcgctccctggagaggccctctttgacccacacacaagggctccggtgagttcatgtctggtcccactggggtttcccaggcacacgcctcctcttctccttggaaacagctctgcaagg

SEQ ID NO: 28541 - DNA, 201 bp, Bos taurus
atagtaaaatggaactttaaaaaagaagtggggaattgtgctaccagctcccatcagatgggcagcgcccacaggagccctggctggcttctatacctggcacaaatcccgtccttgccaggccttgtctggccctaaaatggcctggatggggactctggatatttcaaaatggattttttttttttttttttgcactta

SEQ ID NO: 28542 - DNA, 201 bp, Bos taurus
aggcccccgtcccatctgctgcagagctcaactgtccagtccacgtccctttaagaccgagagcctgcgggaacctcgggggcgagtcctggcaggctctggtttggagccctggggcctcaccccattccctggagaaccaggatgtgttccttgtcatccggtcgtcctgaccaaatgcaccaggacactgggcacctg

SEQ ID NO: 28543 - DNA, 201 bp, Bos taurus
actgctgtgggttggggactggccgccgccagtggtggctttaggggtggaggtgggccgccagccaagtaatgggggcccccagcagctgaaagtgccaaaatccaggttttctcttggagtccccggagggagcttggtcctgtgacccctggattcaggcccagtgaaacccgattcagacctctggcctccagatcc

SEQ ID NO: 28544 - DNA, 201 bp, Bos taurus
tcaatatcgaaaaacgcccaaagaatgcaatcaacagacgggcagaagactcgaatagaaatctctgtcccaaagaaggcataccggtggccagcaggcacgaaatcgtcctcaacactgtgagttactaaagagaaaggcaaattgaaaccgcagtgagacgtcacttcacacctgtcagaacggccgtcgtcaaaagtc

SEQ ID NO: 28545 - DNA, 201 bp, Bos taurus
ccgcccgagcagtgcccgctgccggcctggccctacccgcgtccagggccgcctctctttccctgtttccccacggggctgcctttattttcctgcactgcgtgtctctgcgaggtgcccggccctgcgggatgaggcgagctctgaccgtgacggtccgaaccacccgccagtgacttcacacgaggcagacaaggcccc

SEQ ID NO: 28546 - DNA, 201 bp, Bos taurus
agggaggtagccaggaggagaccaacggcgtccgcaggtgctggcgcccaggtcagccgcggaggggctggacacgggccttcaaactattcttttaacatacttgttccttcctgataaccacgcgggaattccaaggagtcttgaggccctggctgtcacagggcagtgctgagctcaagttcatcaaaactcagcttc

SEQ ID NO: 28547 - DNA, 201 bp, Bos taurus
gtataaaagattaacggcccgattgaaaaactgacacaaggcatggacagggagtctacagggaaatagacatggaggaaccctttggttagaaaattatatgccggggacgcccctggcaggccactggttaggactctgagctctgaccgccgaggacccagtccctggtctgggaacttagagcccacaagccacatg

SEQ ID NO: 28548 - DNA, 201 bp, Bos taurus
cgcctctgctccccggtctgggccgctactgtgggcctcaggggtcccttgttttagccacttgacgcaaggcctctcgaggcctcctttgcctcacttttagtcttcatggggctggaggaggctttgagatagccccccaggggacacaggaaggagcacccgaaggtcttcttggccaggtgtgaaggtggggctcca

SEQ ID NO: 28549 - DNA, 201 bp, Bos taurus
agcaggcacatttctaaattagaaggcataattcttatgccaacaaatgttggagaaccactggtctagggaatctttaaaccctaattatacatgaccartgacccttatttcatgttcagtcacctgggaaaacaggctgcatgtggtccagccgaggagctgtcagctgctcaccagctgttaaggggtctgtgttaa

SEQ ID NO: 28550 - DNA, 201 bp, Bos taurus
tattcttatcaccttgaatgacaaatgagcaaagcaagaaacagagttcaagtgcttcacttcaggttgagtgaacggatggttacctgtgagcctgtgcmtcacattttatcaatactttctatcactcttgctaccaagagaaggagaacactgaacaatcacggcattcattaaagacaactcccctgaccgatttct

SEQ ID NO: 28551 - DNA, 201 bp, Bos taurus
tttaacttgccgaggtggttttgagacgtgctctggcctcggagcaccaagcacacacgctggcccttgctgacgcggcctctggtaccagctgccgcccygtcaccaactactcgcttcagcctctgcccatgctacaaacccttcactacgtctcagcacacgctgagcccggcccccatcgccccacatgctttaatc

SEQ ID NO: 28552 - DNA, 201 bp, Bos taurus
aagtgaactatgtgacttccccacgagacccttaaatggcatcctactgcctggctcaagaaacaaccaagaggtatcttagatcatgcaaagggagccargcaataagacagaaggatcatgggttcccagatactgagggctgctaggctgcttatactggggagattttgcgagaaagaacattcgatcaagttgaaa

SEQ ID NO: 28553 - DNA, 201 bp, Bos taurus
taggagatgggctcccatacgccaggaggcccgtgccactatttcattaattctgtatcatctcaggacgacattttatgcaactgaatttttagggcccmattaacaacagttgggagccacttccaatttgtaagcattgaaaataaactgagtctctgctcaatctctgatcaggagataccaaggcctggccaaagg

SEQ ID NO: 28554 - DNA, 201 bp, Bos taurus
aggttaccactaagggttcattcattcattccttctctgcacagcttcttagtcccgggtgcagtgatgggcactaaggaatgtggatgaaagcctctagrgcaacaagaaactctcagtctggtgagtgatcctgtactattatcccactcattgcattgttgaatttgttattttttaaatctatctttttcctaacca

SEQ ID NO: 28555 - DNA, 201 bp, Bos taurus
tctatttctgggtggtcacagggttcctgtaaattggggccctttctcttccatcttgtttttcttgctctcttcaccacaggcagtaggatagtaacttyctgctcaagaaaccagaaatgagaggaatgctgtgaatctctctggcataggtacagtgtaatggtcacaaaatgggttttggaatcagatgtgagcttc

SEQ ID NO: 28556 - DNA, 201 bp, Bos taurus
tattgtgtttctatgtgattttacctcacaatttattttaatatctttccagcactctgatctacaaatttggaagaactgaagagctgtggacctgagaycacttctcaaatcacgttttccttttgttatattctatctgtagataattttttatttcagtatagtttacacattgccaaatggaatagattgtacatt

SEQ ID NO: 28557 - DNA, 201 bp, Bos taurus
tgaaaaccattcagatcagagatgtcacatagcttaaccttgcagactgcaggagtaaaaataggcccatgagtagaaacaggcccatgagaccttcccamtgctggagtgtggcaaagacttcctgggcaccagctgaatccagactcagaccacggggactgtgtgataggaggcagagagggccctgcagatgggtct

SEQ ID NO: 28558 - DNA, 201 bp, Bos taurus
gagagccaggccatgtctgtggacctcactgcgactgtcgtcctaccctttggcacctctgcaggcagttgcttcaggaaccaagcctcctccaacacttracttgaataacggccaaaccaaggccacacagaactgaacccgatcctgccccagaaataaatcatttccactttagcctcctgaagtggaagttacctg

SEQ ID NO: 28559 - DNA, 201 bp, Bos taurus
cattcagctttaaaaacaaattaaagggggaggccttcttggtaatgatgacacttttacttttgtttccattttatttgtttagactgaaagaaaggatycgggcccagaaaggccaactctctaaaatggatttgattttgaacagtcaacaaaagcaaaaaatgttcttaggtgctatttacatccgcacccaaatta

SEQ ID NO: 28560 - DNA, 201 bp, Bos taurus
tctgcagccccagctgacatcttgctgcaatcaggtgagaaactctgagcccgacccatcctgctaagctgctccggaattcctggcccactggcactgcraggtgagaagcgtttgtcgttgtgtgaagcagttaagttttagggtgttttgttacaaaggcgtgggccactaatacagttacttacaatgccataagac

SEQ ID NO: 28561 - DNA, 201 bp, Bos taurus
attaaaaagaacctgggggtgagcaaggtcaaagctgctccaagctccatgcaaagattgaagaaaaatgaatttagggctgccttagtgctgatgagaayaagttgctggcagaagttttttctaatagcaagtggtaagtattaaaatacaaagctttcctgttctaaaaaggagacctggtgctaaagaaagctgcat

SEQ ID NO: 28562 - DNA, 201 bp, Bos taurus
tggaaacttagggctgaataagaacatcagggtccgagagggaagtcacaaaagccaagtgcatttgggatttttgttgcttagaaagaggcctaaatccrgggaatgctctctccctctagcccttctctccctctcttgccttgccacctcctacctttggcccagctacacagcttccccactgttcctcccctcctc

SEQ ID NO: 28563 - DNA, 201 bp, Bos taurus
gtgggcctgggcccctcctggggaggcccgatacatgtgatgggggtttctgacttggaaacaatttcataagccatcctgggagtaggtaaggcaagagrggcccccagaacctcaggcccgatcctcccgggtttctgagaacctggccgctgttttctttcccccaacagacatgactaccttggtgcccccagtggc

SEQ ID NO: 28564 - DNA, 201 bp, Bos taurus
ggcttccatttgctcctctgcctctcgggctctggaagaagccggctgccatgttgcaaggacgctcaagagacccaagttgagagaaccaaggccacccrtgaacaatcagcaccaacctgtgcatcacataagggagcctccttggatgctcagccctcagatgaccgcaccccaagccgatagcctggctgcaactcc

SEQ ID NO: 28565 - DNA, 201 bp, Bos taurus
agtacatgatgtccggctggcctacattcagttcgccctttcctttctgattgccggtgatgacagcacgatcacgcaagtgctggagttgaaaggtaggrgggcctcgttgtcttggggcccagcctccctgtgattgttctgagcgtttaatgggttaacaaaggtcagccgcctctgtggctgctttgcacacaggaa

SEQ ID NO: 28566 - DNA, 201 bp, Bos taurus
aagttacttgttccccagggcccacttccctttccctcccctctccagatggattttataaacaagataaaatcagaacttaaaaagctaaacagactccrcgtggcctctttcactggctagatcagcccaggactgtttttccagacgttttcccagcctgtttgtaggagaggccagaggtaaggagtgtcaagaggg

SEQ ID NO: 28567 - DNA, 201 bp, Bos taurus
gtttctttctagcattctaagatacaataactgttgctagtagttaatattaagaatctatggaaattactgcttgttattctatctatatgatttatgartgactactgattaaaagaaggttggattaaaatttttgagtacaaaagaagtacatgcttttagggggaagaaatgcagataatacagaaagttctgaag

SEQ ID NO: 28568 - DNA, 201 bp, Bos taurus
tattctcctgagagtgaaatcagaggatctacaatatccacgatggcaacaccgtttttgtcagctgtcacattgcccaggtctccaacatgcctaacatygaaaaagcagagggattaggactgatttctgtctatctaactttagttcataagctaaattaaaaatggatgagtcagatatataagggtgacttgagag

SEQ ID NO: 28569 - DNA, 201 bp, Bos taurus
gatgtggcacaggctggtaactgggaggttagacttttccttttttaaatatttatttatgtgcctgttccaggtctttgctgcagcagattcttgtgaayaaggccttagttgcggcaagtgtgatctagttccctgaccagggatcaaacccggacccccagcattgggagcatggagtcttagccactggatcacaag

SEQ ID NO: 28570 - DNA, 201 bp, Bos taurus
gaattcgctaatgagaagatccaagcagatccacttgtgatctgagtgttcattgctgcaccgcctctccaagctcccaagggcatctctctacgtaataktaatgcctggccaggtcccatccattctgacagacaaaggacaggcgctactttacatttatgtgcagcctctttatttcattatactgagtgccttctg

SEQ ID NO: 28571 - DNA, 201 bp, Bos taurus
caacaaggagcttagggctgaagttggaggtatcaacactgcctgggggctttcctggtggtccagtggttaaacatatgccggccagtgctggagctgcrggcttgatcgttggtctgggaagatcccacatgctgtacaggaactaagcccacgtaccttagagcatgtgcgccgcgacaaaggagctgccgcaatggg

SEQ ID NO: 28572 - DNA, 201 bp, Bos taurus
gaattcagatgctttccagaaatagagacgcagatgcagagaataaatgtgagaataccaaggcaggaaggggagtggggtgagttgggagattgatactrtataaaatatgtaactgatgagaacccactgcagagcacagggagctctgctcagtgctgtggtgaccctgagaaagaagggcacgtgtattcgtatggc

SEQ ID NO: 28573 - DNA, 201 bp, Bos taurus
tatggccttgacttaatacagtgccgctcctgttcagggctgtgcaggctctcccagtgtctcaattacaggtttttaagttggagtctgttgggccatgyggggtcatgtttgcacctctggtctacctggctcttgctgggaagttggggtcatttgtgctttgggtggccccagacacgcccaggcaggctctcaaga

SEQ ID NO: 28574 - DNA, 201 bp, Bos taurus
atatttgcgtctctgttttggtatccttcctgatctaagcattttgggaggatatttttcttactttcttttatggctgagttggtgtgttccaaacttgkttcttttggcttgaggccttgtgtggaatggacaccgaatttccagtgggaccgctggcagggactttcggcctctcaagtgtgcagcttttgaattgga

SEQ ID NO: 28575 - DNA, 201 bp, Bos taurus
acagcaaacttgtgacagcaagggaaaaagccaaagaacataaaaaacagataagcagactgacattttatgcaatggtcccaaggacaaaatggccttcrtgaatcagtgggtcccggggcacttctgcatttcatcagagctcaggaaggaacagctgcgccaattactggccttggcacactgagataaagtcaactc

SEQ ID NO: 28576 - DNA, 201 bp, Bos taurus
tcttgtgttagttcttctggtaggttcgtgtggttgggacttttgctgtagcatattctgggaaccttctaaggaaagtcatgctgggaaaactgtgccaygtgacagagtattctcatagtctatctatcttcactgtcgcctgggtcctgggcaacgtgtacatttcacttactactgtgctcgtggtaagatgttggg

SEQ ID NO: 28577 - DNA, 201 bp, Bos taurus
caaacggacgaagtctgaaatcgtaaatgattctcgtttttatacttttgggattccatcgaaaatgcttttgtttgagttaactgtgctgtaggcagaaygctgtggtctgaggaaatgcagtctgattgagaggaaaggaaatagaagacctctagatccaatcattttattaaaaggcaagctgaactgttcctttaa

SEQ ID NO: 28578 - DNA, 201 bp, Bos taurus
actcaaatttgccttcttattcccaattttattgccacaagcatcactcagaggctcagttttttttttaattgacaattctaatagaatactaatagctytatatccttcacagttctcttccacaatccattattcacactaagccagttctaatcacactatttcctcaattaaatcctttagtaagcagcactttat

SEQ ID NO: 28579 - DNA, 201 bp, Bos taurus
aagcttcccttttagttcagccctgggatattatttaattccaatatggaaatttgaattttcctgtgggaaatctatgggaagacaaatgtgaagtgaaytccttcttattgcacaatgaaaaggagctttgaggacagtccttttttaacttctctgtttctggatggtgatgtgtatgaatctgaagcattgaccttc

SEQ ID NO: 28580 - DNA, 201 bp, Bos taurus
ttctgctgtctggctttcacactctaggccactatccacctcttcaaaccaccctaggaccacataccagataaccagggatagtcccaaggccccagagyctgctgaaattattcacactagccagtcctaagcctgtttaccctgcatctctgttccttcctgtggaaactataagaaagtctcttatccacattttta

SEQ ID NO: 28581 - DNA, 201 bp, Bos taurus
aaaatgactctgtagcatgatgctttgtaaaatggtctgtagatgccatgtaaatgcttcataacccataacttcagaacaggcaaatgtcatgagcctgygatttcagtctaagaggtggcatgagagtgcctgtcccattacaaagaccatgggaagatgctgcggagtaatgagattattttgttttagttgatctct

SEQ ID NO: 28582 - DNA, 201 bp, Bos taurus
aatccctgagtgggaaagatcctctggagggcaaagcaacccactccagtattcttgcctggagaatttcatgaacagaggagcctggtgggccacagagwgtcaggcactactgaagcaacttagtacgcacacacacactctttacagaaaagatttgcctggccttcagttttcattccaatcccaaagaaaggcaat

SEQ ID NO: 28583 - DNA, 201 bp, Bos taurus
agatatggtcacattcagaggaacttgaacataggttagatttactatcttcacggagtgaaccaagaaaaaccagaagactggccaactgcatcaaatamctgttcctgtctcagtcatttcatcactacattcatttttggcaatattcaaggcatcaggattttaagaagctgtgttagaaatattgtataattttta

SEQ ID NO: 28584 - DNA, 201 bp, Bos taurus
ctctgcacaggctttgacttcctggcatttgcagagctgcagtttcctgcctatatgtgaagatttttttccacttctcttttcttctgcagggtgtatamatctctctctttttctcctctttctgttctcaccctaccatttttccttcctccttttaatgtatttaacctagattttctctcttttctgttttccaaa

SEQ ID NO: 28585 - DNA, 201 bp, Bos taurus
aagcttctatgtcctttgcatacagtaatacttttatattgtggaaaatagtgaccttttccaaatgggcgagtgccctttatgtgacatctggacctccrggatgtcgtgagaaggcagtttactgcccacgaggaatgcacataatgtgtcacatgtgaaaacaaaacaaaacaaaaaagctgctagtgagaggctgta

SEQ ID NO: 28586 - DNA, 201 bp, Bos taurus
taaaaggagataggcttgaagattgactatagaggtagaaaatatgcagaatatgagtgggaaaatagagataagaatgatgaagacattatattaaataygagagaggatatagaagtagatttaagatcttgaacttaaaagatgctatatgaaatactgctcctagaggaaaatggtgtaaaggttagggtaattttt

SEQ ID NO: 28587 - DNA, 201 bp, Bos taurus
aaattagaatttattttcaaaagatgtgccacttggagatttaccatgcaaacatgtttaacaaggatttcacatcaactactctgacaaaaaatagaacyctaataaaataattatatattaatttcctaagcttaaaatccaattcttatccagaccaataaaatgctgtgttgaaaagcaggcaattcttcaacactt

SEQ ID NO: 28588 - DNA, 201 bp, Bos taurus
tctctgtatatttaaagaaagagttttatgcatttgatgaaactatttttattgtgtaggattgcagtatcataaccctacatgtttaatttgtcctgtckgctccattatccttctccacctctccagcaaggtacgtgcaaagaaaatgcacattacttcaaccacacaatcttgccaagcaaagtaaatacaagagat

SEQ ID NO: 28589 - DNA, 201 bp, Bos taurus
aaacagagtcacctgaaatatttctgtggttgagatgtgcaatgaatttagctggctgtttgaaaactctcctgattctgttagctgtttcccctgtcttyctgctggttctcatcattcctctctaattttgaatgtggttaaggggaagaaaggcaaaataaaagtctattttgaagcaaatgacaccacccatgacta

SEQ ID NO: 28590 - DNA, 201 bp, Bos taurus
taacttgcatctaaaagaaatgaagacagttgcaaaatggctgctcttaatatcctgtttcttttgaataaaataactctttaatgagctactattttccytaaaatgtctctggatggaatattggggccaccaattcttctactagtttaaagtttccaaaaaaaaaaaaaagaaagaaaatcagcactagctcagaaa

SEQ ID NO: 28591 - DNA, 201 bp, Bos taurus
gagcaagctacaagagttggtgatggacagggaagtctggagtgctgcagtccatggggtcccaaagagttggacacaactgaactgaactgaactgaaayatttgcaagaggaagaatgtagcattcaagcttcaggtctccctttgagatagcttcctctcttagccctttggatccatcaccttagcaggatatgatc

SEQ ID NO: 28592 - DNA, 201 bp, Bos taurus
gtcttaaccactgggccaccagggaaatcttagacctatgatttagatgtttatttctcttttacacaaaaagactgtaaagcaagacaattagagctgcygaagtttacagcgggccctgcccagtggctcagcaataaagaacccacctgcaatccaggagacgagggttctattcctgggtcaggaagcttcccttga

SEQ ID NO: 28593 - DNA, 201 bp, Bos taurus
gctttaataaaacagttaaaatatttacaaattcaaaatagatgtttcataactgaaaaaaaagttcacctgagaattcattataacattgccattttttwattttttttctccaagttgttaatgtggctgagtgtccacatgcaacctgtatcgtctactgtgtcaaatatatttgattccttattttaaattagttaa

SEQ ID NO: 28594 - DNA, 201 bp, Bos taurus
ttactacctgtatgtgtctagcagacatctcacattgaacatgtccacaaaccttggttcctcgacctccagctaggatatacatcaaaatattaacaatrgttacatttaggtaatttttccttgtttctgccttcaaattcttaactataaacacatattactttagaatcagaaaaatgttcaaacagacaacaaact

SEQ ID NO: 28595 - DNA, 201 bp, Bos taurus
gataaaaactgtgaatcataccagttcctgctttgaacacagtccacaggcactgtgagcagatgggctttttggcctccaaaccattctttgctgtctaycacaggtgagtagtagataccctcttaaattagcccaactgctaagccaagaactagccagttataaacacgatagacaacttatgacagcattctgtat

SEQ ID NO: 28596 - DNA, 201 bp, Bos taurus
aattggatcttgctctggtgggcaggacagtaaaactttaatccaattgtctgctggtgggtggggctgtactccctccttgttagttgtttggcctcagrtgacccaggctatatgggaaggttaatggcgacctctaagtggacttactcaaacatgcgcctccaaggactgctgctgccagtgcccctgctcctgagg

SEQ ID NO: 28597 - DNA, 201 bp, Bos taurus
gaacaccacgtggctccaggcggtattttagcatctttgatttcctgaattaaagaatgctcgttaaaagttaagttttgagtaggacacactgccctggytcctctggccggtctctttcatccagcacagttcctctttatcactcctagaatcacagatgaaggcacagaaccctgaaccacaaaaagttctcctgcc

SEQ ID NO: 28598 - DNA, 201 bp, Bos taurus
ttctttcagaaaagatggagtcatcaaaaagatggaaatccaaggtactaatgccttattaaggatcagtaaaaataagatactacacacatattgctaartttcccaagtgtgagatataactagtaaagtgtcttttttcgttaaacctgaaattaaggttagagtaagatgcgaatataataaaggacacagacggta

SEQ ID NO: 28599 - DNA, 201 bp, Bos taurus
acttgacacggaagaagcagcaacccactatagtctgctggtgtcatattttaccagtgtcagtaaaatacagaaatcttgtcacttttaattcaatgatrtaataatcttaaatttttcttctacatacatttagaacaacagtcttataatctgtgattcagccatcagatatgtagtgccaatattaataaaccctga

SEQ ID NO: 28600 - DNA, 201 bp, Bos taurus
ctagcataataccatcatgtctaagggctagttattctctggttgtgcaaaccctgttttagagagttgaaatgcaaaacaatttagaagatttgattttmagtcttttgtgttttaagttatataataatcatcttgttccttcaaaaatatatagtacatctatccttttgtgaataattgtgcttagcttttaggact

SEQ ID NO: 28601 - DNA, 201 bp, Bos taurus
taactgtaccaaagttgcccactagtgaccctgagatttataccaaaatcatccacctctgaagtctgtgttcttagccaccatgctctgttgcccctgcrtgttatgcttccttagggctaaagactctccttctgtgattttttagaaccaaaatcaaggagtgttgattttgaggaggggagagggataaatcaggac

SEQ ID NO: 28602 - DNA, 201 bp, Bos taurus
tggccactcctggatattttaaaagcatggtctaggactggacacggtgtgaataacctcttactgagtcccagatccctggcagacagagagtgggcacrcctgggcctctctggaggggaagagggagagatacgtgacctggcagcttgagaaggttcaaatgtgctgtctcgatttcttcccttgtgttctatttca

SEQ ID NO: 28603 - DNA, 201 bp, Bos taurus
tctaataaggccaccctttgagggctttcattcttctagaagtgattgggttgttcaacataggtcaaatctctgatatgctttaccatctgagccaccaragaagttcctaaaaatcttagggccagataaattttggaattcagaaattttacaactttttgtaattttgataggtgttatggtataaatacctttaac

SEQ ID NO: 28604 - DNA, 201 bp, Bos taurus
gacaagggaggggctgtcaaaagaaacactagtccagccttgggccaacgttctggttccccctccagggatacatataactatctttgagcagttttgcrgatactgtaatccccaccagatgggagaaattaacagcctggtgcccacaagtccataggccccagacccaggaacaagaaggctgaagatgctgaatct

SEQ ID NO: 28605 - DNA, 201 bp, Bos taurus
tagtacaatatgccaggtaaaaagtttagcagttttacaaatataaatagttctaaatggctcttctagccaaaattatcaccactcagtgagtacaattyctccatctctcataggtgcactaaattttcatgttttattggcaagagtgacagtactctaattcctgtgcactcattatcagcttagtgcaaatcaatc

SEQ ID NO: 28606 - DNA, 201 bp, Bos taurus
aaatttttggccccacattcatttggaagagagtctgagtgttgtgttggtgaagtatgaaattgaagtgccctgttggctactcttagactcctctgctrcgttcctgctataaacttgaatggccagctaagcaaaacaaagaactccagacctatttttctaaggtcctttactgaggtctgttcttgcctaatcatg

SEQ ID NO: 28607 - DNA, 201 bp, Bos taurus
attaagaaggcttcaaaagaaaataaaaatatgttataaatccctcactggtctacttttcattaagttactgcaaaatattttgccaaatatggagcacygatagcactcttcatgtcaagtttctgttaaaaatattctgaggagttaaaaatgtatataatttggattttttggatatgtagtaaggtatctaaaaat

SEQ ID NO: 28608 - DNA, 201 bp, Bos taurus
ttcctactccctcaaaataagatattatggccttgttgtgcctacagattcttcataacctgccttcactcgtttttctgccctcaacttgtgctgctctytaagtggtggcctcctggttgatcactgaatatactaagcatgattttactcacaacctttgcaaaatctgttcattctgcctggaattttcttctccaa

SEQ ID NO: 28609 - DNA, 201 bp, Bos taurus
agttggacacgactgagtgacttttactttcactttcttttaaaaacatgtattaaattgcttaaagcattataaatgaatatctaaggaaactgatggcygcttacttcctagattactgatgtctcaattaactcaagataacaaatcattgtgctcagttttatttttataaaaattgattccgaaaggcaattgaat

SEQ ID NO: 28610 - DNA, 201 bp, Bos taurus
caaaatccactagagccatatgttacctcttccaaattgaaaacacttcatcatgccagatacaaattgagtgtattgtgcttcccaagtttgcttttatrttttctgaaagtcaagttcatctggtggttatattctgacagcagagcttcttgtattcccatgtggcattgtatagacatcatagatttacagtgtgtt

SEQ ID NO: 28611 - DNA, 201 bp, Bos taurus
taatcagaaccgaaaaaactatcagctttggctggccgagatcaatgtaaagctgctactatcatctgagaaacctttgcttttgggctatgtatattacratatcataaatcaatcattaatcaaagctacttgggaaaaatacctaattaaataagtaatttatgtcattttatagtgcttagtagctcagctgtgtct

SEQ ID NO: 28612 - DNA, 201 bp, Bos taurus
tctccagaggatcttcccaagtggttattaaccaattttgcattcctgtgataaactgatcagttattgtgttagctttttaattgttgtaccaaacctargctaacacagaataactgattggtttatcacaggaatgcaagactgcttaataattcaatagcaatccaggttactcatcatactaaaataaaaagggga

SEQ ID NO: 28613 - DNA, 201 bp, Bos taurus
tgtatcacggaggttgagaaatgaaatgcaggaggaaggtgagatttttgctttaagacatggcttactttacctcactatcaatggagggagaaaggaaygcacatgggatctttgaccatcactttacccgctgctatggtttcagagaatgtttatgccgtcttagagttaagaattcaggactgcccagcacgagaa

SEQ ID NO: 28614 - DNA, 201 bp, Bos taurus
gtaggatgcatacgtagcaaatgttatgagccggttcatttaactcctgtttctaactttcattcctacttaaccaaattttaagataaaatctgcattckcatttgcttttggaacgtgactttctgaatgagactcacaaaattcttttcaagtgagaatgacaaactttgtgagaagaaaggtttgttcttttatact

SEQ ID NO: 28615 - DNA, 201 bp, Bos taurus
tgtgccagctaataatcttaccctcaccaggtggaaagaaggctactttctctctctggaaataaacactcacctggcccaggagccctgctcatgttcartcatgagccctgtacactagaaagtcttcctttaacaatggctcgagtcttggccattctgtagggtagggaatggatgaaattccaaatcaaagtgctt

SEQ ID NO: 28616 - DNA, 201 bp, Bos taurus
ttgtcatcccactggaccttaacggtgcaaaaacagttaagagaaatttgaggaatagttaagaatgactaaaggaaattaacatacacatttccattaakagtcccttacatccaccaggtaattgatctttcttgctgaacgtgggttaggtcagcaatagaacagtacattggatgaatagggatctgtacaaattgg

SEQ ID NO: 28617 - DNA, 201 bp, Bos taurus
agacagaatcacaaactttcacagtcaagctaagccagttcaagactttaaactctgagtggtcttcaaaatgcattgaaaaaaactgtttccaaagataygtgtcaaataaagatgtagggtacaggtaaactcgtaccctattagaatgtaaattggacagatcttcccggaaagcagtctggcaacatacaccaaaaa

SEQ ID NO: 28618 - DNA, 201 bp, Bos taurus
agtaattgccgtgcgagggcttggttgccccacagcatgcagatctcagttccttgaccagggatcaaactcatgtcccactggaccaccagggacgttcycatgctgacagattaaacgcaagttattaaagagaaacatgagtctccctaacgtaggtattttggattatgtatctgagagaaaaagagctgtctttac

SEQ ID NO: 28619 - DNA, 201 bp, Bos taurus
gattctctaggccagagtactggaatgggttgccattgccttctccagccctctgtcttagagaaggtaaaaagagatgagagaaacatgcaactcaagaytgacttctgggccacaaagaggaatcagcatgaacttttagaaaggaagatgggttgagaagcatgtgaaactctcaaatacatcacagtatctgtcata

SEQ ID NO: 28620 - DNA, 201 bp, Bos taurus
tttgtaagtgatgctcagtgacattaccttaattcgaaaggggaaacatctaataggattgaagtggttctggagaataatagatatgaagcttgatgaaratagcacatgatattcccatcttagaaaagtgttagtttctgcagttaaccagcagtgacattgctggcaaagctcatcaagaagagacctcaggccaag

SEQ ID NO: 28621 - DNA, 201 bp, Bos taurus
tatggaagaataagccattgcacaagactagaatatttcactctcacccagtaattggttggctctttctaattaaattatcagatgtttttattgagcaractactgaaagcagtgaccactaatgagacacagttccccagaacagatggcagttcagctgtcttgagtgttgcaaaatgcccaagaatcgggccacac

SEQ ID NO: 28622 - DNA, 201 bp, Bos taurus
ggtgcattgctggagatgaacttcaggatgggttttgaaaggtttggagcacatccatttgcaaagaggagaatagttctatatggatgagagaatgaccrgggccagtcttcctttcttacactgttgtaaaacttgagttccgccaggagagggccatagatgggaaagaattctcagaaagtgagggagactctaact

SEQ ID NO: 28623 - DNA, 201 bp, Bos taurus
gagatggtgagggacagggaagcctggtgtgctgcagtccttggggccgcaatcgggcatgacttggcaactgaacaacaacaacaaagctagggccaagyaaaactacagaggctcaaaagtattcgctcttttccaatatcagatgcgataagtgaaagacttgaaaaaaggttctgtagtcaaggcctatgtaaattc

SEQ ID NO: 28624 - DNA, 201 bp, Bos taurus
cttatttattttggacgtgctgtgcagcttgtgggatctcagtcccccaactggggattgaacccaggccacagcagtcaaagtgccgaatcctaaccacyagaccaccaggaaacgcccacttttcttccttttaaaatgaccagcttgacttcattacagtggctgcttagagaaggaagcccgaagattcagttcttg

SEQ ID NO: 28625 - DNA, 201 bp, Bos taurus
agaccccacaagaagatgttatggttactgaacaagaatgcccagggaaaccatctttggtttagagataaagatcactttatcaggccctgtcctctcakctctcttcagaaacatttgggacctctctggtggtccagtggctaagactctgagctctcaatgcagggggcccaggttcgatccctggttgaggaacta

SEQ ID NO: 28626 - DNA, 201 bp, Bos taurus
tcctcttcactttctgccataagggtggtgtcatctgcatatatgaggttattgatatagaatcagttagcccatggcaaaaccataaacaactttacagytcagatgaagagactgtaaaatgatctggtctttaccaaaattttcagaatttttctactctagaatcacaagctcatcaaatttcattcttttataaat

SEQ ID NO: 28627 - DNA, 201 bp, Bos taurus
tatatgtgctaaattttaatctttatatccctgatgaaccatgcatgtcatacttttagctttcaaaattgaattaaaccccatatcataagaaaatttcwatgacatattgttcacagctttctttctctttatctttagctcctaaaacacaagggttttaatgtttacttttttcactaacaattaatcttgatggaa

SEQ ID NO: 28628 - DNA, 201 bp, Bos taurus
ttgttgtaaagagcaaggtttgggtgcatgtaacccatttagttatcgggtcataagcaatcgtttcctgaccagttagtgcctgtctttcccccatgatkagtgccttataaatgctgcactcggtgttttatggctttactgcctacccatttagagaatactgtcattcattcaaatgcacactgcaaacattgtaga

SEQ ID NO: 28629 - DNA, 201 bp, Bos taurus
caaaaattcacattaaagattctatattcaataaaactttaaaagttaaatagtcctgacaatgattcgaataactattagaaacaaaggattggctaagrattatgctagaattagctcaatgctcatagctttagttcaaaaggggagtaggaatcagaggccataaaaagatctcatggaacaggaaaacatgaagct

SEQ ID NO: 28630 - DNA, 201 bp, Bos taurus
cctggcgtgccacagtccatggagtcgcaaacagtcggacacgactgaccgactgaactgaactgaactgaatttaacagaagcatgtttttaaaagttaytgaaaactgtattatctggccaaagcagttcttcggccctggggtaataaataagttatgacttcctagtgtctcactgaactaccaaagtgtaatcgtg

SEQ ID NO: 28631 - DNA, 201 bp, Bos taurus
ttcacatcagagatttcaagaggaataagactggccctaaagctgtggacccagaaaagttcattcagtgtgatagatgtcaggaatatgttgagatgaayaggtactttttctgggccttaaattttcaaaattttatcctaactaccactctaaaattactgagtttcttagttaaaaaacaaaacaaaacaaaaacaa

SEQ ID NO: 28632 - DNA, 201 bp, Bos taurus
ctgatcttaaatagctattctcaaggtacaatccctaaaccacaggatcactgccatcatacagtccttcagatatctctgatgtcgcagtgtttgagaaytactgtaaaggttagggaaagagctcgtgtttgttgcctgattttcttgttttcctttatatcttgtacagtggttgggaaaccaaggtctaaatgtgaa

SEQ ID NO: 28633 - DNA, 201 bp, Bos taurus
atattatgttaattaacatcataaaatatagagcttgcaaaatatcactgcttcaatattactttttcttcctggagaccttctaacttaaaaaaattctrgtatttatatctcattgatttacctgatttagtctgtcaaaggtatgtgaaatagctggtctcacttttgcccacagaaaactgtgtagcatccataaat

SEQ ID NO: 28634 - DNA, 201 bp, Bos taurus
tgaaattgaacctgaagaagatcatcaaattcttgtgtgagaggaataagagcaattgatcctgagaatgaacacccagaaaaaaaggagaatcaaagtaraagatgcttcaggaactaaaaattaagaggcatcaaataatatgagaatacaaagtcactgagtttagccctgtatacttgaactcagccttaaaataca

SEQ ID NO: 28635 - DNA, 201 bp, Bos taurus
aataacagtttggcacaaaatcttaaagattccaactcatttctttagaaaatcagcacagactggaaaggtgactttaaaaactttaaaaaatcttttgygttaaatttcattatgttaaatttttttagttcctactttacataatgattaacagaaatagtctcagcaaaattaatcagaagacttccttcctataaa

SEQ ID NO: 28636 - DNA, 201 bp, Bos taurus
ctgtcttttattattaaagatgatgctataaatatgtcaccatatttcagtttttcatttcactgcaggttttataataaagtgcagatatttgaaaaackgctctctttcttaaatcagtaattgtggatttggcagtctcattttgtaaattctatttaaagagacaaaagaagttgaaaatcttaagttgttttctat

SEQ ID NO: 28637 - DNA, 201 bp, Bos taurus
ctgtgtgtgtttgggagtctctggtggaggcctgggtctacagtgtcctgccatggggtcaggggcactgatacagcagttctggaaggcctggcatgctkggattaagtccttttgaaggagatcagcattactactattacccctcccataggggaacacagccccacccatcagcataaaattggattaaagacttac

SEQ ID NO: 28638 - DNA, 201 bp, Bos taurus
aaggaatagctgggaaagaagaaatatcacagaataatatttttatttttaggatcaaaagacattgtgattcagtggctcttaaatatctttaggtttcyggcttgatttcatgatctagtagacagctcagctggtaaagaatccgcctgcaatgcaggagaccccggtttgattcccaggtcaggaaggtccgctgga

SEQ ID NO: 28639 - DNA, 201 bp, Bos taurus
caagacataagtcattataaagtcatgcgtgctagaaattaactcatttattcattcatgagtctatttagttatctacaattttaggttgagattttaaytgagattgttaaagacccacatgaagattataaagagtaatacagagacatcccatgtacaccctacctaatattctccaatgataccatttaaaaaaaa

SEQ ID NO: 28640 - DNA, 201 bp, Bos taurus
ttaataatttaacagatacaaagagtttaattttggtcttagtacattaccagaactcagcaattctgattttaaatggtgctacatgtatacatcccgtrcacacatttattaacacatacaaaaagtcactccagcctggaatgcttttctaataaagaagtaacacacaatatagtatgtataagaaaaccaggcttg

SEQ ID NO: 28641 - DNA, 201 bp, Bos taurus
ctcatctccaagccttaatgtaatgcttagagcccacaatctggtccttcctctctttctggtacatttctgaatgtctgcctagccaaactcatccaaargtcgtatttcaatctctttcccttgctgtgtttaatttacttggtgagaaaaagcatagagtaagtaacaaatttgttaaaatcaactgtgaaaaactca

SEQ ID NO: 28642 - DNA, 201 bp, Bos taurus
tttgctttcaaggaccatggactcaaggctgtgtatatgccagacttcagtgaacattcagggcagtcaaagaatttcacagaagtttggcaaagcaacartctaatgctaaatatttaagaatgtgttcttaaaagtacctcaaacatttcttcctccaaaaagttctccctgatcgtcactttaactcaagtcacaact

SEQ ID NO: 28643 - DNA, 201 bp, Bos taurus
ataccttgcttcccacaaaatattggagagagtctaaacagtttgattcagaagcaggaggaataagtagttattttgtttcctgaggttctaaaattaayagcttctatgttgatttttatccaggaaagagcacttgcaggcataagttcatttgatagtgtttgttcagctactggggctacaaaggaaaagggactg

SEQ ID NO: 28644 - DNA, 201 bp, Bos taurus
ctggggcctcagcattgctctttatttctagcagactggacttttgacagtaacagtaactgggccagccgtggtaaacaaaggtctattctgtcaggccyatgcctattttcttgccattgctatagtgaacactcctgtctggtgcctactgtattggcactggggtggccagtggtagatgtcatcctacctggtagg

SEQ ID NO: 28645 - DNA, 201 bp, Bos taurus
attcaggtttatctcatcaactcatttgggtataacaatacatagcaaattagcaatacagtatggaattagctattcaatactgaccatgattgaatacmatcttggagaacacagaaatattgaatgttttgtgctgtttacattgaaagtatagtcaagtaagccctgctgctggataagatgtctggttaatgagaa

SEQ ID NO: 28646 - DNA, 201 bp, Bos taurus
tacaccacacttagactgcagacttaattttaatatgccatgtcccacctctatacaatcatataatgttaatacatatcttaccaaaattcagttgtagrgcttgatttttcaaaatgaaaaaggagagtaatgtgtgcctatctactgaggttttgaataggaaacactatttttgggaggaaaggggtgacccatgta

SEQ ID NO: 28647 - DNA, 201 bp, Bos taurus
ctgaaaatgtcaaatggcccattgattctcagaattgactaaacctgttcatcttcattttttttccctctttataattaaggaaagaacataaaaggtcrtgttggcaggcccataacaaaaagagatccatgtcagtcttcttgcaaattagataaaatttactgagaggctcaggtgaacatattttggggggggggg

SEQ ID NO: 28648 - DNA, 201 bp, Bos taurus
caatggcgttttctagaaactggcatgtcaaaggtagctcatggcctgaggacacagaacaaagagctctgcttcatttgggcccaatagagttcacctgkctgctgaggaaatcaatgtctttactcacctttaacacactcactaccattatcaatttttcttgggccaagaatctctcttctacaaactatttatgta

SEQ ID NO: 28649 - DNA, 201 bp, Bos taurus
cttcatagtctcaaagtgaattttattttgaatgaaaatgctcaaaatgaaaacttctctgagtttagtatatattagaatttctggattcagttcaatcmtagtcaaccgctttcagtagcaaatagagaagaaagcaacttgtttgctctttcttgttgagtgagaatgttgtcattcaatggaaaaaatgcaaaagcc

SEQ ID NO: 28650 - DNA, 201 bp, Bos taurus
tactcagatatctagattatattttattgtgatatctgattgtaacatatttgctgatttatgaatatttttgaattatgcagtgtcctggttttttttgktcacatcatgtacttattatgtttattagcttctttgttaataaacctattttccttcttcacttagactctcatctgagtgaattgcactttcaatatt

SEQ ID NO: 28651 - DNA, 201 bp, Bos taurus
tttgtttgtttgtttgttttggttctacttgctatatagttgctttgtcagtttccacgagataatttatgggattaaaagacaattccatcataatcatytaattacacacagaatctaaccattgttttattcttattttatttttgtaaaacaaaaatttaatatattgatttagttgggaattgtttattgctgtga

SEQ ID NO: 28652 - DNA, 201 bp, Bos taurus
atgtgatcattccatttggcctcctttaagaagtccccagatggagcagtcagttgtgttttcaagaaccatgactgactgggtaacatacattatggtayttgctctctttattagctctttctaaaacggagcaggacctgtagtccttgcccctcccatgtcttccacctgccttttatctgtggaaaaactttagcc

SEQ ID NO: 28653 - DNA, 201 bp, Bos taurus
agtcagactcaaactgctatttgcaagtaaacctgtttcaatctaattaatgtgattgttttcatgaaattattgattctgtacaaagaactgaataattyatgaaatatttctgtggtataatttaacattatgtaggagagaatttttaaaagtttattagcctacgcatctgccattttatcctctggtttatatttt

SEQ ID NO: 28654 - DNA, 201 bp, Bos taurus
tgtttaggatcaccatgtgtctataacagttccactaaccttcatgttgtgttctttctaaatgatactcctggatttgtaaaatgtggtggccttgatcyacattaactacagaaacttaaattcagactgaaattactgggttcctaattcatgcttaaggttgtttatctctctaccagccctgactaaaatctattc

SEQ ID NO: 28655 - DNA, 201 bp, Bos taurus
tcaattattttatcatcacttcatacattatacactaagatctaccgatacacatttgctcccatccaatataattatttcttagcttttaagcagaagcrtaccttccttgtgtattgaaaattgaagaaaatatgtcatcttcaacatttagaaaaatttctcaacctgtaaaatgcatctttacatttaagtattcgt

SEQ ID NO: 28656 - DNA, 201 bp, Bos taurus
aaaaagccctccctgtgttactctggttctagtgtccagtctcaccattctgccacttgaaataagagaaggtttcatccttttccaggccaaggctgatrtcagttcagttcagctcagtcactcagacatgtccaactctttgtgatcccatgaactgcagcacgccaggcctccctatccatcaacgattcccagaat

SEQ ID NO: 28657 - DNA, 201 bp, Bos taurus
tatccacattgaaattctcagaacctatgaatgaggctttatttggagaaaacaaaaattttttggtagatgcatttaagttaagatctcaggatgagatyatcctggcctatccactaaacccaagtatccttgtaagagacatacaaagaaagatatacacaaaggagaaggtcatgtcaagaagaaggtcaatttgga

SEQ ID NO: 28658 - DNA, 201 bp, Bos taurus
aatatttatatcccaggcctatatttaactgggtttcacctgacagatgtaataacttccagcgttttatatgaaaaggctggaatttatatatacacatrataatcaaacccctgaggctcaggccagaggatgccaggagaatactgacatttaaggctgctgtggattttttttcccagcagaaggagcatttaagtg

SEQ ID NO: 28659 - DNA, 201 bp, Bos taurus
ccaattaatctcacctttataaatgcctgtgttttattgcaagtaatttgagttttctgaatcagaagtagaacacagtatgcactcatttctctcctccrccttcagttatctattttgaaaaaagtaaagggctttggaacacagtttcttagggagcttttcttgatcccttagtttcaaggcttaaaaacaacatca

SEQ ID NO: 28660 - DNA, 201 bp, Bos taurus
aacactaccattaaaatcaactgtgtcatcatgtttagaatggcttaaagtgcctttgccaatttcttacagtcatttatataccagaagtaactgatacrcatcttataaggccaatgaacagagatacttattgatcagttatatgatataaaattacatttgaaatgtatttcaaaaagtacttcttaaggattttat

SEQ ID NO: 28661 - DNA, 201 bp, Bos taurus
aatgtctattgcaacgctataattagcatcacaagaaacttcaataagtgtagctatgctcaattttcctgtaaggccccattcattcatcctaggctttygagaatcttggcttttttttttttttttttcagaaaccttccccaaaagtaagggagagtgaatgtggtatgaattgctcaacaacaggacagtaaaagt

SEQ ID NO: 28662 - DNA, 201 bp, Bos taurus
gcattgccacactgaatggttgggtttgttcctatcaaataaaaagatgcaaaactgaaaaattagcagcctgaaccatagccaacacagtattctgaatkcttgtgtagtagtaatactcgtaatagagacttcaacacaaaagtctcggtcttttagaaagcttaaacttgttatcacaaaccactattttcattcaga

SEQ ID NO: 28663 - DNA, 201 bp, Bos taurus
atgtccctcccctaaagatttcaaagccaaagtagagaacccacttgtatgagcctatgacacaggccacctcactgattttagggatcagtcaaaaggayttgatgtcccacccagttctctataaaataagcaaagtgagcctcctactcattttctgatgcctttcaaatgtattagagctcacagcttgcactaccc

SEQ ID NO: 28664 - DNA, 201 bp, Bos taurus
actccatccctaggtagctgcacaaagcaatgaaagtttataggacaaacttgatcaaagtgatttaaatcttcctggaaagcatttccaaggactatccyatggaagtcaggcctgaggtcatgattcccaacaactcagataaaagaagaggatattcttataatttcaagtttacattgatctttgtacagtctgaat

SEQ ID NO: 28665 - DNA, 201 bp, Bos taurus
atttcccaggtaagaatactggagtgggtggccattcccttctctgagggatcttcccgacccagggattgaacccagatagatacatagatagacaagayagatggcctggggaaggggttgaatgatttaaggaaactggcttacacaattgtaggggctacaggctggaaattcatgttgcagtcttgggcctgaaag

SEQ ID NO: 28666 - DNA, 201 bp, Bos taurus
ctgagccaccagggaagcccacatcctggcatcctgacatcctgacaagagccgcatcagactttcaggccttccagcaggagcaaactttggctccacgktacaggtctggtaactgaagcttggaaatgttccatcactagctcaaggtcaaatgactaataacgggcagggcctgaatctgttgttgttggctgtgct

SEQ ID NO: 28667 - DNA, 201 bp, Bos taurus
tataacatttttctcattttgcttcatgttgttctggaggtagttgcaagacagacaagcaactttttcttcatccctagttgtgattttagtgaagtgaragtcactcagtcatgtccgactctttgtgaccccatggactatacagtccatgaaattctctaggccagaatactggagtgggtagcctttcccttctct

SEQ ID NO: 28668 - DNA, 201 bp, Bos taurus
ttttttctgatttatgtttctagttaaatcttgaaataaaaaagaaaaacaaatcacccatcaggtctgatatttttgtgaaaaaatgagagaatagaagyattgatgttttcaatatctgcatatacaagagatccaagatagggaaaattcctgagatttagatcagcatagattaggtactgtgctgccctctaacag

SEQ ID NO: 28669 - DNA, 201 bp, Bos taurus
aatgggcctgcagcttcttatagtgccaaaaagtaagtaccagaaataaaaataaaaaataaacaatggtgaagatacattaaagggatacaggagccaaytgaaagaggtctcaagggccaaatttgaagcaatttaaacaacaaaatacataaagtagtattggactacaacccaaagtatcaatactaaataaatatc

SEQ ID NO: 28670 - DNA, 201 bp, Bos taurus
acaggttttgatgctattaggatatagcttgataggatggtgttccatagggtgcaaagtgatcaatcatctagcagctaagatcactgggtcccatcaastgatcagaccctcaagggaatggattgcttgtgtctaagaattcaaagtttatatcatacaaataataaaagagcacagatatcaaacacagtaacatgc

SEQ ID NO: 28671 - DNA, 201 bp, Bos taurus
gagatgagatggttggagagcataactgactcaatggatatgaatatgagcaaactccaggaaacagtgaagacaaagatgcttagcgtgcttaccgtccrtggggggcacaaagagtcacaaatgacttagtgacagagcaatattacagcaaaaaggatacaaatcaggaccttcacagagaagaaacacaagcagaag

SEQ ID NO: 28672 - DNA, 201 bp, Bos taurus
ttcagtccatgaatttctggctaaacaggtcactgctaatccatggttcttcctatccaaaaagtttcttcagacatgcaacctctcatatttttttttcrggtatgtaggattattatactgttcctcatcacacacatcacaaagacttacagcataagaagctgcctaggacctcttgttacttccttgcttctccta

SEQ ID NO: 28673 - DNA, 201 bp, Bos taurus
aaatatacagaatccaatctgatgaagcaaactggtggagggactacagaagcaaataacaattaaaatcaagtccatgtaacttgaatcttggagacaarggcagaattagcaaccaatctgcctgtatctctgacatgtattgtgtgtccattttttttgtggctatgttcccagattttctattttgccttataattc

SEQ ID NO: 28674 - DNA, 201 bp, Bos taurus
tgcaatcttggaatcttgctcatttctttaaaaaaaaaaacctattctgatcatattaaagatcagaagtgggcaaactatggctcacgggccaaatctarctggctgtctacatttttgtaaatcaagatttactggaacacaactgtactcattaaattatgtactaccagtggctgcttttacactgtaacgctagag

SEQ ID NO: 28675 - DNA, 201 bp, Bos taurus
accctgtctatagtgcttcgtttcagcagccagaactaacataatgatgtcttcatagcaggagtaacacaaaaattgtgtttcaaaatggatatgagtgmtccctagataaatgaacaacacagcacaagcaaaggcagaagcactgtgtgcctttggggaaccccaagagtgctgcctgacagcgctggggctgggcag

SEQ ID NO: 28676 - DNA, 201 bp, Bos taurus
tcgcctgggccacgccagccattctgcggcagtgtttgattgctaagttttagctaaaaggatagataaggaggagtatggggcaaattgttcagccagartttggcctgaggaaagacttcaaaacttgcccctgcaacgctttatacagttttaagctctatcggaagctttgcataaagcgaaatctggggcccattc

SEQ ID NO: 28677 - DNA, 201 bp, Bos taurus
cacacgaaaaatagagatataagtatgggtagggaaaaatattacttaacagatgatgtatcaactacacagaaaacccccaaagaatcaataaactatamaaccaagtgacaaattaagtaagaggtcagacgaaggaacagctttcaaaattcagtaacatttttctaaactagaaataaccagctgagaaaatataaa

SEQ ID NO: 28678 - DNA, 201 bp, Bos taurus
agatttcatttagcatgtcatatgttttatactacaatgtattctgaaataaatcaccaatgtttttataaatataaagcataggaaaagttttctaggcrtgaagtaagtaaaaatggagctatggacactgtaagctgtagacaaagcagccatgatccctgaagtagagagagaaattctcatgaggggaaaagtgat

SEQ ID NO: 28679 - DNA, 201 bp, Bos taurus
gcaagggcagaggccttcacttcaacaatctatagaaaacaatgctgtcaacaatcgctgagagagcttggaggaggattctcttcccagctaagccttcrgatgagacctcagacttttgggccaatagcttgaatgcaaacctgaatcagaggatccccataagccatgctcatattcctgacacaaagaacttgtgaa

SEQ ID NO: 28680 - DNA, 201 bp, Bos taurus
ttattgaccatcctgctggcaattggcttgtcctaggtcttcctcttagcatatttccctcaccagggcttgactggcctaataactggtgctgtcttggkttgatgccccctgtgtgcccatagcatggaagctaagctcctacgggtgccctcactggctgccagccatgtctgttgactctctttacactgggcctgg

SEQ ID NO: 28681 - DNA, 201 bp, Bos taurus
taatcacatttaagtatctctattttaaagaaaggaaaaataattttatcaattttctttatactgcattcttcccacaattaaggaaagaatatccttcrggcgcaaatgtagacagtctagatatggatattaaatttaattaaaattaaaaatttacttccttgctcttacttgccaagttttcagtttcaacagtca

SEQ ID NO: 28682 - DNA, 201 bp, Bos taurus
ccaaacctgcatctcctgtgtctcttgcactgacagacgaattctttaccactgagacacctgggaatcccacatacgtgaaaggctgactataaattacrtgcagattttttagtttgaggagatttggcacctttaacctctgttattcaagggtcaactatattttaacaaattgctatatatccttacactgttgtt

SEQ ID NO: 28683 - DNA, 201 bp, Bos taurus
attgacagttttggtcagagtaccttggacaaacactttccggaaatattttagatggccctgatctccttcctgtattgaaactgatattgagtacttcktatatactaatctctttaaattacttatgtggattaattttggaatgctcctaaatccccatgaaataagtaaacattttcatcacctttttgctgacgg

SEQ ID NO: 28684 - DNA, 201 bp, Bos taurus
cattcatttaaagggctgctatgtgctaatttttgttattaccttactatccaatgaggaaataaatagttaagcagcaggcatgaattacattcttttcycttcttggaatttgttcacaggaaaagaaagtgacccaatcaaacatacttgtaaacatgctactgatagatatcctagcaaactgattgcattctctag

SEQ ID NO: 28685 - DNA, 201 bp, Bos taurus
tccatttctgattgtaaatggccagaaaagagaacatggtcctgtataaagtatgcttgatgtcaactggaataaaatctcaagtgctttgtggaaagttracataaaaatcttaaaattcctcaagatggcactgtaaatttctcattacttaaattaaaaagtggagtttctattgagcattgttgttttttttttttt

SEQ ID NO: 28686 - DNA, 201 bp, Bos taurus
cagcttatggacattcttctggttggttggtggtgagataattgggagtgagcatcatccatcttctggttccaaccactttagggtccatgttcttgccrtcaacagctttcatcatggggggtctgcattttgtagaaacaacttaggaatgtgtatcaggcctttatcactatcttttaagaactgtctttagtgttc

SEQ ID NO: 28687 - DNA, 201 bp, Bos taurus
tgcaatgcaatgcatgagggatcaagtaattaaaatatagcttggatttctccagcattattctgcatgcaaacttccccttctcttgtctgcacacacamaaaaagtaagaaacacaattcaatagccaggagactaaaagaataacataaatctttattgcagcattccttaaaagaacaaataagtgggggttatata

SEQ ID NO: 28688 - DNA, 201 bp, Bos taurus
aaaaaaaaagctacatagagaaaaatcacagaatagtcaaataacacttctttactatatcctggcaaccatcttacttaaagctcttttaaatacagtgrttttaagaatatatagatgaaaattacagaaacaattgaaagcttttcatctcatatattttaattttattacttgaaatagttggaaactagttagact

SEQ ID NO: 28689 - DNA, 201 bp, Bos taurus
ctatctcttaaaaaagaaaaagaaaaagaaaaaagcagatacaaaagcaaaattcctggtcctaatcacaatgatgtatagtaagccctgtctctgaattygtggtcttatatctggagcacagtcctctggtcactgagaagtatgggatgtcaatactttctctttgtacttctatacaatgcataaggataagtgtta

SEQ ID NO: 28690 - DNA, 201 bp, Bos taurus
ttcatagtaatttaaaatgaacattaagttctatacaatgagaaattgcccaagaagaaaaaatattgtattaacacaaaaggaaaagatcctatctcctrtatttctacacatatatttagggcacacacacatccctgaaagcataaagtttatgttgcaactgtaatctctggtgtattatgtaatgcctccaatctt

SEQ ID NO: 28691 - DNA, 201 bp, Bos taurus
aatgttgccggttttatggaaggactgaatcgaatgcaccttctcacatgcactgcagaacgatttgccaagtatactgagggtgtaagtctgatagtacrgaacatttttatttgtttaataaaatagtttttaaaggaacttaataaacatctatttattgaaacggtcccggcaagacttcaacttgtacgtatttca

SEQ ID NO: 28692 - DNA, 201 bp, Bos taurus
aattccatgatattattgtaagggacaataagcaacttcttttgaatttgaacaattcattagtaaatagtctaaaagacaactcagtgagccaatataaytaaaaatttgggaatggtaggtatgacgaatcttttcctaaatctttgacaattcttaagaacaacaaaaattctgttttggattaaaaaaaaaaaccac

SEQ ID NO: 28693 - DNA, 201 bp, Bos taurus
gactcctatgaaaatagtatttgggtactctctagtgtgttgcttagtcttaaattctgttattgcaaatcatttaattaaatgctctatcacttgcattrtgtttgagtatcattaaaggggaaaatttagcctggaaaaaagttatactaagtcataaatgtccatctttgaaaataatcacgacttactgttcaatct

SEQ ID NO: 28694 - DNA, 201 bp, Bos taurus
gtaagattatatctttatacagataaataattctgcatatttcccatgtttatattgatggcagttcaattgatggcaattaaactgatagcagttgccartttagttgcaccccaaatgacaactgcctttgtattcactgcctggttgaattttaagtgtactcatgtacctatggcatagggaaattattattagttg

SEQ ID NO: 28695 - DNA, 201 bp, Bos taurus
gatagaggaggtaattgatagcctgaaaagttccctagttttcctagtgttctccccaaatatatagttttttattaagtttttacatatctctaataackttatgaaatgttgatatttctaaggaagatgggagaatgagagctaaatggctgtgtcaagggaacctatataacctaatttacatagcagctcaagcct

SEQ ID NO: 28696 - DNA, 201 bp, Bos taurus
gcatctctccagtctccacctctcatcagaaccatgtccagcttgcagatacgtgaacacatgtttcccttcctccccagtactttctggatgtgttccaktccctctggattccaagtctgccttcactttagacactcttctgagttctgagtctcatagttttgagtctgctgtgtccaccctaaaggatttagttcc

SEQ ID NO: 28697 - DNA, 201 bp, Bos taurus
cagcaaacaggtagttcagaaagcacacaaaaattttgcgaagaggaccacagaaaaaaacttgtgaggggttgtatcaagagacaaaactcactgcagargaggtaaaaatgagagaataagataacaggaaaatatggaaacttggatggagaccaaggatatcaggctgtgaatttcacaagtgtccacaggtttgcc

SEQ ID NO: 28698 - DNA, 201 bp, Bos taurus
cattatgttaatttaaagaaaaagtatcattaatatatctatttcagaaacaaattgtggattttcctccttttgtctccccatgcagattattaattctrtataatagaaatataagtgtacacagaattttttacaacacattttacaagcagattttcacatcccaaaagaaaatatgactttaaatttaattcttac

SEQ ID NO: 28699 - DNA, 201 bp, Bos taurus
tccaaccctattctagttaaggttacctccctttcctttattttgcattattaaataagcttctctattgtaatcctcatcacattgcattctaattgctygtctatatctttctgcagttggtagctattgtatgaggtttgttgagtgtgaaacaaatgcacagagtagaagataatctgagaagctgacatgaggcca

SEQ ID NO: 28700 - DNA, 201 bp, Bos taurus
tgatggacagggaggcctggcgtgctgtggttcatgggatcgcaaagagttggacacgactgagtgactgaactgaactgaaggttatacagcaagaagcrgcaaaactgaaacctcaaccagggccttctggcccaagaattcacgttctcacctaatacacagtgctgttctcttggtacactaccaccaccctgcaaa

SEQ ID NO: 28701 - DNA, 201 bp, Bos taurus
acaaataaaatgcaatcactcatgccttccattgactttttagaaaatcatgaacattaatgtgacaagaggcaaaacaattctatctggcttcatctcayagttttctagtctatatgaagtagaatatgagaaacaaatcactatcttttgtaatctgtccacttttccagcttaatgtataatattagctatgaattt

SEQ ID NO: 28702 - DNA, 201 bp, Bos taurus
ccttcctcatgttctgtacacttagatataatgggatattgctgttacctacccaagtctttcagagaaggcaaatgaatcttccatttggaactgggtcycatctagcagtttgattatatttgaaagagaggactaatcttaaaatgttagttcatttgtaagtcaagctgtgtgtgtgtgtgtgctcagtcatgtccg

SEQ ID NO: 28703 - DNA, 201 bp, Bos taurus
ggctcatactaccacctgagctccacctcctgacaggaggggcataataaatataatgcacttgaatcatcctaaaaccatcctccctgcctccccactcmcaccagtccatggaaatattgtcttccatgaaaccggtccctgcagccaaaaagtttggagaccacagtcttagagaacccagtggaggaaatcagtaaa

SEQ ID NO: 28704 - DNA, 201 bp, Bos taurus
tcttagtagacacacacacacatttattgggccagacctctctgttgcctccctactatgggattctgtgagcctataatttcttcatttgattaccacasgaagggcctgcccttaaacatctttcttcataatgtttttgctacacttgttgccagaaagtctttctgaatacatatagcatgatcatgaaccaacgct

SEQ ID NO: 28705 - DNA, 201 bp, Bos taurus
gatgaaataaaaattcacattttaaggcaagaaagaaaaatttaagcataaaatatttttctccctatttgggcctcctccctccctgccagtgtgcatcrtgaatctgcactaagcattaaccagacctccccaatggcagaaatacctgctcaaccataaagatcattttttcttcttctggcgccagccctgtaactc

SEQ ID NO: 28706 - DNA, 201 bp, Bos taurus
atatttaagttttgtggatctgtgacttttacatcaattagaccactcaggttaaccacataataaatttagctaaaaaatgccattcttgataaattatrgtttctttccatccattaaaatcaaagtattttatgatataccacaaaagtgaatcaaattttgtttcaataattaaacttctccagaattgacatggac

SEQ ID NO: 28707 - DNA, 201 bp, Bos taurus
cactcctttaaataaatactcctttaaatagaaatctccttcataaaatagaggaactctagctgtgagactaaaaaaatatcatagagacttcctgaaamaaatatgaatctctaacaaaatttatatgggagtctatttttttctaaattcttcctttgaacatatggaaatgggataatttataaaagcctgacctca

SEQ ID NO: 28708 - DNA, 201 bp, Bos taurus
gggttgcaatttccttctctacctgtattatatttttctaaagattacctaatacctgtgtttctcaaagtatgtcatgttacatagaaagcaatgttgargacttccatggtggtacaatggataagaattcacctactaatgcagggagcacaggtttgatctctggtctgggaagattccatatgtcacagggcaact

SEQ ID NO: 28709 - DNA, 201 bp, Bos taurus
atatagacacgcacagagagaagactatgcgaatacagaagcaaagatcctagtgaggcagctataagccaaggaatgccaatggccacaagaaactagargaagtgaggaaggattctcccctggagcctttagagggagtgtgaccctctcaacaccttggttcaagacctctgtctggcctctataactgtgatggaa

SEQ ID NO: 28710 - DNA, 201 bp, Bos taurus
cataacagatttcaattttatcttttgattttcttcctcttgtggtacttctatatttttcaatcatactatctcttatattggcttcatctttttttgtstcttttcagtttcacatattcttactttgtcttcatatgcttttgctaaaatttttgccagtgtctattcctcatctgcattcttgagtctctcagtaat

SEQ ID NO: 28711 - DNA, 201 bp, Bos taurus
gagtaaacaaataccttgggtcttcaaagagaggaaaagaggccaggttgaaagagaaggaatggggagagaaaagaggtctaagagcaggggagagaaaragaaaaaagaatggccttacacatgtctcctgccacctgcagatacccagatgttacaggacttttccctggcttccagaggaggactagaacttggccc

SEQ ID NO: 28712 - DNA, 201 bp, Bos taurus
gaaaccaactggatctaaagctatgctgtttttccttaaaggtgcttttgagtttcataaaaatgtctcaggtttgagaatttcctgtgtcaacattttaygaaatgtttagaaaatgatgatttcagcaacagtccccaaagaaccaaagcaacaatattaggaagggattgaatttgacatgtttgtctttaatcctaa

SEQ ID NO: 28713 - DNA, 201 bp, Bos taurus
taaattgttaaatacagagttcttgcaaatgttccaaccaacgttgtgttcaataagtgttagatattattttatgataaaacaacatattttagattaaygtatttgcttgccagtgtccaaaatacaagaattgtttgtgatattgaatgtaatactgacaacaagtatttatcctctctgctttatttttaattttac

SEQ ID NO: 28714 - DNA, 201 bp, Bos taurus
ttaccttctccaggggatctttctgacccagggatccaacctgggtctgccgcattgcatgcagattctttactgtctgaaccactaagggatatcacatyttttaatgcagaaacatccctgtcattttgatggtttgttcttttattatcaaagatttagattgtatccttagctcatgttagtataagaagaactgat

SEQ ID NO: 28715 - DNA, 201 bp, Bos taurus
aacatgtactctctcctctaaaattttagtgtcacaaaggactgtatattatgttttgtgaaatgagtgtttcacttccatgcacatatatgccaataaaycatactttaacatggttgtaattcttattagcatataaaaatttaccagcagtatgtatgcagagatgcccataagtacacagtagattacatgaccaaa

SEQ ID NO: 28716 - DNA, 201 bp, Bos taurus
gttatagcaaaactccaaatgtcttttatagtgcattttctcatttttgcttccattttgacttagaagtatacttggtgtactttaatgattgagttctrgctgagagatttagttctctaattttgaggtaggagatagatgggcccctgggctgaacacctggtatatgtccagtgtagtaaaattcaagccttgttg

SEQ ID NO: 28717 - DNA, 201 bp, Bos taurus
gcctgcgtatacttacctgagtagaaaaagatctttcacctattttatttaggctttcatttctcaaattttaactaggagctaagtgtaatttgaaactrggatgcactagttttgctccaaagaagtataattattcaaattatctgcattaaaagtgtaaaccttttaaagcaaagcgttacttaatttaaaagagag

SEQ ID NO: 28718 - DNA, 201 bp, Bos taurus
gctgtttaaaattgaacatatttgtctgtatcatgtagaatgctcaccacctcttcttgacaaaataaagcattaatcatggcagcaaccataacattccygtctcttttattgccaaaaccagcaccctgtgacacagtgagaactggaattttctaaccttcagttcagtggattggaaagttttcattagaagtaggt

SEQ ID NO: 28719 - DNA, 201 bp, Bos taurus
tatttttggaaccaagtagttaacgcctcactatcatttgcttcaaaaaaaaatgataatagattgatttatgccacacattaatatcaggagtgccacamaaatttgcacaaagttctcatttataaaactggagttctttgtactgctttacattaaaaactattcttaggagtcctccaaactatatgaaaagaaaaa

SEQ ID NO: 28720 - DNA, 201 bp, Bos taurus
gataataacacttaatgtctccaaaatatttcttcgagtagatattttaaatcttattccccacttctctttggttgaccatttatattgtttgtaacaayactgtaatgaaagcttcaggtctagggatgttttggaatacaaataatgaaagaaaggtcacaaataacaaatctaaacaaatccaaataacaaatctac

SEQ ID NO: 28721 - DNA, 201 bp, Bos taurus
ttctaattcaaaaccatttgtggactgttgtatttatttctggtcctgagtaacttctaggattttcaaaatcagcaacttattccactagatgttactarttgtactagtattgtatagtaacaagtaagagacattgttaagtttggccaaatattaaaaaaatgaagaaaaattatatattcctcttagctattacac

SEQ ID NO: 28722 - DNA, 201 bp, Bos taurus
tttctgcaggatgttaataaatccttcacgaagagtggataaaaggaccaagcctccctgtgacttattcccagtttctctgaatttcctagctttatgcwcaaatgactgcaaaggtttacatttcttaaggcaaacttctagctacaaccagttttttttttttctaaatactgaaataatcagcacagcagggaaata

SEQ ID NO: 28723 - DNA, 201 bp, Bos taurus
atatgtaaatgaatgggtgtggctgtgttccaataacactttatttacaaaaacaggtggcagggccaaatttggcctatgggttatagtttgcctagtcytgccctacagcaactaaccatggaaagaacattcatcacctcaaactatgaaagccagcggccatgagaagaaactaaagattcctttccaagcaggatc

SEQ ID NO: 28724 - DNA, 201 bp, Bos taurus
tggacaaatttgcctcttttacctatagaattatttattttatgctgttatttgttggtttactaaacataaagaagattttgcttgtttaagagtattargtataatctagtataatacatttaaggataggaatatccagatttatttctaaagttttctaaactaactttaacactcactttaacatataagtcatta

SEQ ID NO: 28725 - DNA, 201 bp, Bos taurus
aaataaaacttatgagctaggcctggaggctactttgagtaatcacctttttcctaactcagagtgattttttttaatttttattttattttcctcctgcyctctctctcaacactggccatcctccatttttttgagtatctttgattttgctacatagagcaaggattctgatacttagctgcatactatatgggagct

SEQ ID NO: 28726 - DNA, 201 bp, Bos taurus
cagatgatagaagctgccattttgtttatttcatgataccaaggaaattttttttaaagttcttattagagtatatgggtaggccacaatagttggcatamttttaatattacgtacatgattagggtagacacacaacacccttcccttggctaccttctggctagctaggtttggccttgtgacacagttctcattagt

SEQ ID NO: 28727 - DNA, 201 bp, Bos taurus
cacaagtgtgggcatttttgcctaataaggggtcaggaagctggctggtaagtatcagggggcctcttggcaatggctccaaaggggcttagcttcagagrtgaccttggttctgggctttgtatcagtgggcttggtgcaaggcctcccacctgtggccttgggatacgaatccacctagacttaggaagctgtccagat

SEQ ID NO: 28728 - DNA, 201 bp, Bos taurus
ggtttcaagcatgaattatgttatctgatgagtcttggttagaagtgaaattgcttccaaaattttttttttttttttgtctttaacactcacccaacttratttgaaaaaattcaaactcaaacaaaagaataatttggagttcactttcaggctaatagttaattagcaattttaataaagaagtggtttattgagtgt

SEQ ID NO: 28729 - DNA, 201 bp, Bos taurus
ctcttctttttaacatcaaatcttaaattattttttaatcttttattatgcttcatatttgaatgataagacacctgtaattttaatttcaggactatttrttggataccaagactaaattcttccattgagtgtttctcaattatgaaggcacagactaagtacttggaaacatggttaaaaatgaagattctcattcca

SEQ ID NO: 28730 - DNA, 201 bp, Bos taurus
agccactaaaccaccaccaccacccgccctcactccacatctacccagatcccattagcgggtgtttacctctcctttggtagttgtgaatgctggccacyagcaactcacaggtactctcttctcgagacagtcattttcatgcagaggtgggctacctttccagggagcctccattctgaggcccccatggcccctgtg

SEQ ID NO: 28731 - DNA, 201 bp, Bos taurus
taaataaatgagaggtatttataatctttcagtaaacctcacaactaaaaacaatattcagtaaattaattagatatgcatgatattcaaaaggacagaayagaaagaaaaaataagcctgtgtttgggaatcacagaaaagaatgtttaagttgaactttgacaagtaaatgacttgaacatgttcaagttattagagct

SEQ ID NO: 28732 - DNA, 201 bp, Bos taurus
ccaccaattcttcagaatgctttgctgtgtttagcagaagatgtactttacacagatttgatgtaacactgacagcagaagttcttattccaatactgatrctagtataattttttataaataatgtcttgcctgctgtgcctcaaaattttcatttgacactgcttccttctggaatattcacaatgtgattgagaaatt

SEQ ID NO: 28733 - DNA, 201 bp, Bos taurus
atagtttatctgctgaagttcagcactggacagtagatatgaatttttagcaaaaagaagtgcagttgatcttactgtgtaaggtgcttaaaaaatatggygaaataggaaatactcatctatcaaattatatatatatgaattaaaagaagtaattttcataaatagatttctaattataaagaataatgttaaatataa

SEQ ID NO: 28734 - DNA, 201 bp, Bos taurus
aagactccttggagaagggaaaggctgcccactccagtattctggcctggagaattccatggactgtatagtccatggggttacaaagagttggacatgaytgagcaactatcactttagaaatgaaaattacaactttaagtttttttttcccattaaaaatatattataacttaaaaaaaattaagaccaatagtgagc

SEQ ID NO: 28735 - DNA, 201 bp, Bos taurus
gtgtcatagcaatcagagctatttctaactacttacatgctaaattcaaagtcatataaacatttaaacaattaaatagttttatcctttggatcataagmatttaggataaaagaaaatgtactgttcataaagtagatcatgcctttgaaacaattaaaagtgattaaatatttcactcagttatgaataccataaaac

SEQ ID NO: 28736 - DNA, 201 bp, Bos taurus
ggtgataattgttgggtgtacagcaactctgcaggtagttaacagacttaccgatccttacaaagaattttgcttgaccatgaaataattttacctcccaytttaacaaaatgtgttatttcaataatctaattcagtgtgttttttagaagcaaaaccatggatttactgggatagaaagaaaaagacaaatcaactaaa

SEQ ID NO: 28737 - DNA, 201 bp, Bos taurus
aaaattcatggatactgcacaatgagagtattcatgatggttaagtaagatgaccatacaatttattaaccaaatacgggtgatgctgagaataaaagaayagttagaaaaaagtatataaatacaagtataaaccaggagaatcaaactggcaagtatgctcacattataattaggaaatattttctttgacttttaaat

SEQ ID NO: 28738 - DNA, 201 bp, Bos taurus
atcttacattatctatatctaattgtgtatctaaatgcccactttggattcaatatgtcctaaacaatgtttatgactttctctctccttcactccacatytgatatcctcccaatatttacaacatcaatgaactacaacaccaacctttcttcctgctttcagaaactttaaacctgcaaggtatttgattcctagttt

SEQ ID NO: 28739 - DNA, 201 bp, Bos taurus
tgaggcacagccaacctctgcctccccaagaggccctctcatacctctaggtatgtctctgtttctgctgtgggcacggtgggtccagctcagaccctgaygtggcccaattcccatgtatacttgcctctaaagtccagtactactgaagctaggctggtttcatttgtgataacactaatctattcagatattccacag

SEQ ID NO: 28740 - DNA, 201 bp, Bos taurus
ggatgcccaggttgatgataagtcaccctctgaggatgcaggtcccaactagatcccttctcctcccctcctagtagattctgcatagttttttgtttatrggcttggctgtagaagagccattatgctagtcttctggtgattcttagcaagaattactctatatgaagttatagttttgatatgtttgcaagtaggggt

SEQ ID NO: 28741 - DNA, 201 bp, Bos taurus
aatggcaaaccacttcagtattctagccttgagaaccccatgatgtagtcctacttgtttacattttgtttcccttgcctgaggcaacatacccacccccmaaaaaccctgattgatggcaaagatcttaatgcctgtgtttccttctagaattttttatggtttcaggtcttacgtttaaatctttagtcaattttgaat

SEQ ID NO: 28742 - DNA, 201 bp, Bos taurus
catttcatcagcatgcacttatagcattatcagatgactcacacttgtttcaagtcattcttatatatcttataataaataacactaagtattaaatttcracataaattgaatggataagttctaggaattttttaaaagctttaatggattatgatgtgttctattttattttctcctgagattcctattgaaatcacc

SEQ ID NO: 28743 - DNA, 201 bp, Bos taurus
attttaagcttatttttcctcccaggatacagaaagtgtgcagattatttcatttcttaaatgtcaaaaatacaaaaccctatattgtaactctgtaatcrcttactgctttagaggtaaattggaaagaagagactaaaacacatctctggcaatatactattttcttggacttaggctccagaattagcaccaaaaata

SEQ ID NO: 28744 - DNA, 201 bp, Bos taurus
gttaataatattttattatatgtatatataatataaatattttaattggtatcaatttaccacaaaatattctgtaggatattcatggacaagatgatgcyaataaaatgactaagagaagaatcaaaagaatatatctgttttttgcatataaatatgttaatatcattacttacattaaacaatttttcaagtaaatat

SEQ ID NO: 28745 - DNA, 201 bp, Bos taurus
ttacaaatatatgttattttgcataccatcccataatggtaaaattctttaatttcttgatataattctacagacatttccctttccctcctcttttgctktctttgcctctgtaacaatatctcattatttttttggtgggtaattagtgatataagagggtatagtggacttttgaaagtcgatcctgtaggcaatcat

SEQ ID NO: 28746 - DNA, 201 bp, Bos taurus
caacatcagcagcaagtgaagataattcccacattaaaatacatacatacagataaggttgaaactttacttcacatggaattttggcctctcaggaaaastttgtgtattccttcagttcagttcagttccatcgctcagtcatctctgactctttgcgaccccatgaatcacagcacgccaggcctccctgtccatcac

SEQ ID NO: 28747 - DNA, 201 bp, Bos taurus
ctgacaatacttccatctcagaagttaaaatactgttagacagagaagaccttatgccctccaaagtaaagatttcagcatgtatccttcagataatagamaacacacacaaaaaaatcacatacaagtatgtatacaatagagaaaggttatggaacagggtcccatacattttaaaagtggtcttaaattgctactgct

SEQ ID NO: 28748 - DNA, 201 bp, Bos taurus
ttcatgttagactggaggctatttaaaacatattaactctaaaataggttagaaatgacaaatatgatcatgcatacagtcattctcaactttatgccagyggaaacaggatcaacatctgcagcacagtaatttctgagtctagacctggcttcagagtactactctgtacatcaaacagaggttagtccaaacaagtat

SEQ ID NO: 28749 - DNA, 201 bp, Bos taurus
agaagtcacactaaggagctgtaggggcaattctctggggaacttaaaaaaaggaagcagaattccaaggtttgagtcaaggtctttggttacatatggarccacagatttgttcccagaatatcttaacaatatcgtcccctaaattcctttagcaacattggatttgttcaaagctgttaactgaatctttcatataaa

SEQ ID NO: 28750 - DNA, 201 bp, Bos taurus
tgctgacaatggaaaatcttacaagtattgaacatgacatttatgacagtcttgctgtcatcttggcttcttttattgaatatgcagagaattataattgrgctaacaagcctggtagcctggcctctttccaattatattaaccagcctagtctagtattagctgcctgaacacacacagaaacagacattgaacttttg

SEQ ID NO: 28751 - DNA, 201 bp, Bos taurus
gtggttaagattaccaatcatcttggaatagtgcctatcaagtagtaggcatttaattcaaaagaactattaaatcacattataccatatactctattttraacacatctaaagttgcaaaaaagtctatctgaacttaaaaacgtggacggtcttacagagaaatgtatttgtctatctatacctatgtatctatatgta

SEQ ID NO: 28752 - DNA, 201 bp, Bos taurus
acataattattgttcacaagtgataagaacataaattggatgactctggtgagcctgggcagtactgaaatgctttgctggccttatcttaacgtgtattrtcttacgttagggcatcagcataacagcctgatgaacagtcactactctctttactcagtttatgaataaaatcactgaagattatagtgattgaatcac

SEQ ID NO: 28753 - DNA, 201 bp, Bos taurus
taaaataaaataaaaaaaaaacaaaaccagaaacatgttgttgttaacagtgactgacacaacatctgtgaaattttcaaccaaaaatttgcttagcccamtgcttttactatgctactgccgttgtttgctaaatatccagacttcattcatttatcaaaatttcagcatcttataatgcaaccaaatatttatctagtg

SEQ ID NO: 28754 - DNA, 201 bp, Bos taurus
cagaaataatcagtcaatgataatcagagataatttccagtgatcaaggtttttaattagaagcagcagttatgctatcaaaagtggtggtgtccttttgyagaggaaagatctggaagacaattctatagtttcatttttattgtagtattttagaataattttaggacctggggaatctaaggagtttatagtatctgc

SEQ ID NO: 28755 - DNA, 201 bp, Bos taurus
catcatgccgatgtctatgcactttatttgttcaaagatattatcaaattatcaagacaaacttttaaattacagaaaaccaaaacactttcatattttgycccacactgtaaaaccatcaaaagaaaattcttctgattctatgtaggcatattaagacaatatgatattgtcatctcaacacaaatatttattttaagt

SEQ ID NO: 28756 - DNA, 201 bp, Bos taurus
aggtctctgttctctgctggtcctctaagattagatttatttttcttaaatcctatcttgctagttgagagtggttttcccaactttcaatgcttgactcrctaatcttcttcaattatattcatcccggtagtgtgtacactcaagtggattttattaccatcaatatgctgatgactctctgatttctatccccattgc

SEQ ID NO: 28757 - DNA, 201 bp, Bos taurus
ctaaaattgcatattacttttttgcaactgtagcctacaaaaagtatttttaacattaaatgtggaactagccctagagcgtaccatgattgataaatttrccactgtaattcaataaatatcccttggaaaaagaaatactttgcttagagggaacattttatttctgtttttcattaatttattgttatttcctattat

SEQ ID NO: 28758 - DNA, 201 bp, Bos taurus
caggggtatcttattgtgaaaatcctgtgattgatagctgttgggaaacaggacaaggagattttttacatctgtttactgccttgaagtttctccattcyatcccacactgactgttgtctttcatagaagagctagaatttctacccttccgatgcagatgccacagagccacaaagttgtagggcaaaatgaaatgat

SEQ ID NO: 28759 - DNA, 201 bp, Bos taurus
tccctatttgaagagtgactacaaagagtcatgaattgatacatagctcaagtgtgtccagtagaagtggacaaggggatttaaaagtccacttagaattyttgaaccctgataacctgacagtgatgcagcggtgcagttttacttgcacaaaatcatttgtccaagtggtacatctttttgtaattcatctccccaatt

SEQ ID NO: 28760 - DNA, 201 bp, Bos taurus
ggtttttaataccacagcacctagagtcttgtcaaatatcatcttgttaatttttctataaagattttttctaacggtaggaatgttactgtttagctgtrcacactgcttgttcatgtataataattattaaaaggcaacttgaatcaggaatctatgcaatttttaaaaatgtgtatttcaaaaacttgtatcagtgca

SEQ ID NO: 28761 - DNA, 201 bp, Bos taurus
tcactcatgggtggcagagagctaaaagaagggccagtgtttcaaatactgtcccataaattgacagtggactctatgatactattaaaatttgcttcacrtcaaggccaaatactctttctcttagactggtcacacttcaactaaataggaagtatatgacagagaaatccaattgaggagagagagagagattgggtg

SEQ ID NO: 28762 - DNA, 201 bp, Bos taurus
tcatgacaccaaggattcaagcaatggggtaatggagatcttggacatttatttcctcactggtgaaaattaaatgaagactcaggagtcaccccaactayagtgatgagaagcaagtttcagcaggcagagtgtgttggtgagttcttgctacatagccgcttatatctttgaagacatgttaaagtctttctgtgctgc

SEQ ID NO: 28763 - DNA, 201 bp, Bos taurus
aataccaaggtagtaattttgcctctcctttagtaaaacattttgaaattttatagaatatgacagtcaaaggaaaaagatcctctcaaactgttggccamagtgtaacatcttgaggaaactatttgtaaatttatgttgagtaacatatcctaagagaattagaaagatcagtaaaaatatacctatgaagattttttt

SEQ ID NO: 28764 - DNA, 201 bp, Bos taurus
ttaactatcttaattttactcattgcagaagctgcaatcttgagaagttaagtaattatcattcatttattctacatacatgcttgtgggaaatttgctarttgttgcaaaagaacaaagaatacatgtactaaagttttgtaataaacactcaaaatattttcacataacagacaccttcttttaaatgaaaatagtctt

SEQ ID NO: 28765 - DNA, 201 bp, Bos taurus
gttatttagggaaatgcacagtctgtcctcatttttgatagacattaaaatacaaattagctaataatcagtaaccatttatactccctttggagtctttrtgtgaaagtattagtcactcagtcatgtctacctctttgagatcctgcggactgtagccctccaggctcctctgtccatggaattctccagggaagaata

SEQ ID NO: 28766 - DNA, 201 bp, Bos taurus
ggcgtgagtctgagtgaactccgggagttggtgatgcacagggaggcctggcatgctgcaattcatggggtcacaaagagtaggacacaactgagcggccraactgaacagaactgaagatagcctgctgcaactatttgaccatatgtgctgaacaagtcagatcactggctaaggtgctccttttcctctttagtgttt

SEQ ID NO: 28767 - DNA, 201 bp, Bos taurus
attgtttcatcttttgcatgttttaaaaaaacttaattttacctttgtatttggaagatttttttttctttaagtatttgaaagaatttgcttaagtgtcktctcacattcattgtttctgatgagcattgtgctgtcatctttttttatagataatgtgtcacttttctctggctacttttaagacttttcttcatcatt

SEQ ID NO: 28768 - DNA, 201 bp, Bos taurus
aggcagtgtggtaatggcactaatggccacctctttcaaaggacttatgcgaggatgctgggcatctcaggactattgtagtcaatgtccttgaccatgtrgtaggccactgtggacccacacctccaccagcagctcccaagcacacacagacaagtctggctcaatattttgtggggtcactgctcctttttcctgggt

SEQ ID NO: 28769 - DNA, 201 bp, Bos taurus
aaaaacatgagtatctctcacacagatcatcacagaccatcaaattgggttttccaagtttccatttgccactagggacatacattgtaataaatatcatyggaaaacttaaaaagtgtttaccaatttgttaatcatgactgatctcaaatagcagcccctatatccctgcagaaatcctagtatcactaatcttcttag

SEQ ID NO: 28770 - DNA, 201 bp, Bos taurus
gttagtattctgtgagaattgttctgcctgcagacgtatttttgacgtgtttgtgcagggaggtgagctgcatatcctcctattctgcaatctagattccytctcttcacaagaaattcttaaatactttaaatctgaaaatcaaacttgtatgtactccaggaatagaggcaagaatattctctgttatgattttttgag

SEQ ID NO: 28771 - DNA, 201 bp, Bos taurus
aaaatgggagacattagaatgggccagtggctctgggagggatctaagaagtagggagtgtccacactggtagttccttgctctgcagaaaccctctcacycccagcttgctgggatgtctaggcccttgactctgtttttgaggtgtgttcacctgccaacttgctagcaatgagcgtggagagagaccaacactgacag

SEQ ID NO: 28772 - DNA, 201 bp, Bos taurus
tggtcactcattggatcaaagcagcccaaagacctatcactttccatttctctgtgccaggttattatagaaaataacccagatgtagttggattgtaagrcaaatagtcaattttgtttccttaaaaaggaggccaaaaaatatttgttcttgtttataaattcaggtgaaaggaaaatggtgtacatctctgaggctca

SEQ ID NO: 28773 - DNA, 201 bp, Bos taurus
ttcttataaccagatagcagttgaattgtgtaccgaatgctgaggttagaggcagaatttgtattccagtcatagaaatttatacgtatattccatctttrtaattttaaaagaagattgacattaacttccgtatatagttcacatcctacacagctgagtctgtatgaagccctgtgtaaatttaagaactaagaatat

SEQ ID NO: 28774 - DNA, 201 bp, Bos taurus
agtcaacaacaacaagaatataagaatatgatgaaagccaaaattgacattctacatgtgacaaattctacctgtacatatcatgagaaattaagctttgrggatcatttttctttaagtattataattagtatgtctaagtacaatcagtcaaattctcctaggatttgatttcctatgatttcctactggagagaggga

SEQ ID NO: 28775 - DNA, 201 bp, Bos taurus
tgccctctctgaggtcacacagagttggacatgactgaagtaacttagcagcagcagcatatataaaggagtgtatgtgtgtgtatgtgaatgtgtgtgtrtgcatgtatatattttactaaaaacctacaggttaatatactgaagaaaaattttaaagtatcattctggattcttctttcatcaaaacaaggcccctct

SEQ ID NO: 28776 - DNA, 201 bp, Bos taurus
gtgaagttaaagtgctgggtgagtacacatttaacattgagagacagaataagaaagagccagcagattattagctcattcttctggcccagatggatgtkctgacctctcaccatggatgacaaatgtgaccaagaaaacagcaaactttcttatgaggccaggataaatttagcttggcagctcttttcatttgctttc

SEQ ID NO: 28777 - DNA, 201 bp, Bos taurus
tccacatacaatagctagagtatatcattcccagatgttgacccttcatcaaggatctggcattttcaaaatgctgctttcagagctttcctagtttatcyttttcattattgccatagatctaaaataagctgtactctcccatgtgagaaatctgagcttgcaactagagattatcgtactaagtaaggcaagtcagaa

SEQ ID NO: 28778 - DNA, 201 bp, Bos taurus
tgcagttcactcactgtgacagtgctaccaatccagacctcagtcctcttttctcttggtgtctgtatatatttatgaaacctgacaaatactacttgtcrtatatagctttctaggaagtgtgcatttcctttcactctactgattttcttgagagaataagatatctctatcttcataatcttcccattaaccacaagg

SEQ ID NO: 28779 - DNA, 201 bp, Bos taurus
tcctgaaaactcagtggaggagtcagatatgtggataaaaacagtctttctgcactttaatgatttaataagccatctgaaaaaaaaaaaaaaaaagaacrtataaagtattatggcagcaaaaaaagggggatgggatttaatctgcctgtttgaaaatggaaaagcttctgagattataatatttaactgtatgttgaa

SEQ ID NO: 28780 - DNA, 201 bp, Bos taurus
aaaagggtggcctcagaaccagtaatttatcaatctacccctcatacctcaaaagccagatacatccaattattccacaagctacacaaaggaaaaattaracaaagccaaaaaacgggccatcaacagaaatctagaaggccatagatggctagttaatgaacatggacaatatttctttcttcaaatacagctttgtca

SEQ ID NO: 28781 - DNA, 201 bp, Bos taurus
agtatgtcatttttcttccctcagtgcaatgatggcatttaacagtaaccgttgtccttataattacctacaggaatgcaacacttataaaatcctggttyagcacaggtaagaatgttagtaattgagatactttagaatgccaggggattatcactacttactcactaccagcactgaattcttgttgccatttggcta

SEQ ID NO: 28782 - DNA, 201 bp, Bos taurus
ctggaagaacatggacatggggaaaccttaaagagtaaaacagattaaaattaaggagtggttatagaacaagaagtctgtacagttaatacatatcaaakcagaacattaagaaggaaacacattgagcattgtgcaatgcaatgcagaattgagaaacgcaacagctaactggttcacaagtggcaacctgaaagggta

SEQ ID NO: 28783 - DNA, 201 bp, Bos taurus
gaaaaataatgagaaaagagagcagatgctcatccaccacccatgaccaatatggtttatgcagactcttgatgacaaataagaggatcttgaaagtctcyttataagctttcaaggatgcatttacttatgcttagtaaagtttatataaataaaatctaggtaccatatctcacctatatcccctttgatcgcttccaa

SEQ ID NO: 28784 - DNA, 201 bp, Bos taurus
ctggttacatacaagagaactctcataagactatcaactgacttagcagcagaaactttgcaggccagtaaagtttattgctggcaaggtatattaaagtkcatgtagtcatctccaactccttgcaacccctttccaggctcttctgtccatggaattttcgaggcaagaatactggagtgggttaccatttccttctcc

SEQ ID NO: 28785 - DNA, 201 bp, Bos taurus
tcaaggccccattgatctggcacttgcctcctttctaggatcagttttgctaattgctatgcacacttcagttctaatcaaccacttaacctctccagagmaactccttctgcctggaatgttcctctctctcagaggccaatactttctgtttttaggttcaaattaagacttccctcctccacatagtattataactcc

SEQ ID NO: 28786 - DNA, 201 bp, Bos taurus
cccattaggtcgagttattttcatttcataaatgagattgaaatacagaaagtttaaggtcatagtttgttatcttttacataaattcttaatgatatctratttctaacataaagttatttcagagagattgctgttatatcaaattaaaatgggatttgtttcattgagtttgtgctaaatatattttattatgattct

SEQ ID NO: 28787 - DNA, 201 bp, Bos taurus
gcccttcttaattcaaatgttactaaaatcttacaatctggttagtatcttactttggaaaccacagtctaaattaaacatctttggtagtaactaacttkcattgtcaataaggcacttctagttaaagagacatctttttggtcatatgtaatttccagtggaaagaaagaaagtactgaatattactgaagttaattg

SEQ ID NO: 28788 - DNA, 201 bp, Bos taurus
ataattgaaaagccaaagaacaggtcgggtagtaaacataacaccaggtagttggaggggggaaataatctcatattcatggccaacaaagatgaatccgyttgctaaaatgaaagtgaaagattctcagtcgtttccgactctttgcgaccccaatggatccatggaattcttcaggccagaatactggagtgggtagcc

SEQ ID NO: 28789 - DNA, 201 bp, Bos taurus
ttttttttgtaattgggaagagagattgggatcaactccaaacataacaactgggaatttatagcaaaggaacaaggaggccaggatggggggtgtgcaartcagtggatggaaaattactaagaggaaacataaggggtcgggggaacctggctaaatggacctaacagaattcttgctgaaggagggccaggtggtcag

SEQ ID NO: 28790 - DNA, 201 bp, Bos taurus
aactgccccggggaagacagaaagtgtttaaacgggacaagacttcataacatcgtagatctgagtgtggaagccaagtctggaagggaagtgtgggagayggtttttgatttctaagagcagagcaggaatcaggactctagcgaccactcctccccactcccccacagtgcttttgtttttggtcattaaacctgaggc

SEQ ID NO: 28791 - DNA, 201 bp, Bos taurus
gtaagtccacatactatttttatcaagaatattgcctgtagcataatatagcatgatattcaataacttataagtttaggaatatttgagtgtaacaaaamgcaatctcagagatcagccttggttgcattactattcctatcagtttttagtagaaggaagtagtaaaggaagtttttagtaggaggaaggcaaggagcc

SEQ ID NO: 28792 - DNA, 201 bp, Bos taurus
gtaaagaacaaagttacccaaccagcctctagatactctgtgatcactcacactggcctcctttgtctactttgtctccactttgcctctctctttgcacrcatgctccatttgctatttttctttgtttctgtattgtttctgtaatgatccaactctctgagaagctaggcgtgcaaatgaaggaagtctctgaggatc

SEQ ID NO: 28793 - DNA, 201 bp, Bos taurus
ttataataagccctgtgttatacccaaaatgagttgtagaaaacttcctgaacaccttttattctctcaagtacatgcttttgctaatgaaagtctctccrcagagaatctccccactatcaacaaccccatctttatttacaactgaaatggtggtctttctttcagatctttctcaaatgttatagctatcatgatgga

SEQ ID NO: 28794 - DNA, 201 bp, Bos taurus
atatttgccctgtgctgtcactgttgatttctcaggactcaagttcctcattattcttcaaagcacagcgtgtgcagggtggctatatatatatttttttycccataaatgtcagtaattgaagatattttaagggaattacatcacaaagaagcaatacttagaatgtgcccatgtaatgaggtcctgacccttcctggc

SEQ ID NO: 28795 - DNA, 201 bp, Bos taurus
ctagtctactatggatatacttgatcagagctgggatttattatagtaaaagtccacgcagtgctgaaagtccagattatgctcgaatgaatgtaactcaygtgaccttgctcccaaatgccctgggggctcaaaagcgctcctaggaggaaaacatgaattcaaaacagaaggctttataaggagagttacgaagacaac

SEQ ID NO: 28796 - DNA, 201 bp, Bos taurus
tcttggagctttggcagtgggatctgttggcagctctgttatcctaggccgtctttgcctgtgtccttgagttcctagacaacctggaaaactgacatgcrtatacccacagtctttgctgggcctttaatggggatattttctctgttaccattttttcccctccttccggttgacaaggtcttcccctgcctgtgactt

SEQ ID NO: 28797 - DNA, 201 bp, Bos taurus
cgaatagctgtgaatataagctttctggaattcagagacctacacctttatagatgtgagatatctagagaaatgtgacagtgtaattttatggatttccwatttttctctaaggaagttataggaaaggaggagagactgatagtatctagaaggatttctccatattagtgcatcaataatgatgagcatggggttttt

SEQ ID NO: 28798 - DNA, 201 bp, Bos taurus
aaaattcaagtccacctgtacaatgcagggactccattgtgctgtcatctcacagggagagtttagtggagatacatgagtccccagaggggcccccattraaacacatggctctcttacaagtaaacagtctgaatcatctatatcattttaatgaaactgtgaggaccaataatgcatagcctatcccaatgccatttc

SEQ ID NO: 28799 - DNA, 201 bp, Bos taurus
ggaccataacgtactgtaaaatttgaggtatgctcaaacaccatggtgtctttaataacaagaaagcacgctgaactatagagccatatgttttatcacarcacattaatgaccacatgctagagaagaaattggaaaaaaaccatcagctatggcaatgactcaaacattctctattccagtcttcagaataccagtatg

SEQ ID NO: 28800 - DNA, 201 bp, Bos taurus
cgtcttaaataatgacttgaatcttggctgcaattataagataagatttttctcataaccttttcacaatggattttcatcagctcctttataaaggaaaktaaaatttgcatttaactttaagctcatgtatccgaaactggacccaccattggcacattcagacatggtattttaaaaagaataaaatttgctttatag

SEQ ID NO: 28801 - DNA, 201 bp, Bos taurus
ataactgctgagtttgctgatttttgaatctactccaagccttactcctcgagcatctgctgatggttggggtatctgaacgacgaaccagaaagattcayaattaatcttagttctagaaccaaaataggggctctatattttaaagtaatgaggaaaaaaaccctagacctttaaaggatttttaaatcttcatttata

SEQ ID NO: 28802 - DNA, 201 bp, Bos taurus
ccctactgactcagaatcttttctaggctggggccagaaatctgcattttcaaccagcaccccaagggatacttatgtacattaaggtcctgggccagaartacagataatcacaatagctggttgagtagggagaacaagagtgggaagcaaatacccttccttggtggtgtctagctcgatactgtgagccccagttgc

SEQ ID NO: 28803 - DNA, 201 bp, Bos taurus
caaaccctgaccaaaagcaggttaatccaaaacacacagcatcctcagccaactcaagatcaacaaaacaaaattaggcctagggattagaggatgttaaytgtgaaacataatcccatgatatttatggctccagagactgaacacagctactcttgagcacagtgcagtactacttccactggggccattgcttatatt

SEQ ID NO: 28804 - DNA, 201 bp, Bos taurus
tattaataaaaaataagaaatccagtttttttctcctacccctttggattaccttgatcacttcagggagatcattactctggcctataggaataatggarggttgttaatatagagtagatacatttaaaacacttaaatattatgtaccactttgtttatataaatgttctcacatgaaggacaaggccttcagtttct

SEQ ID NO: 28805 - DNA, 201 bp, Bos taurus
ccttcagctctctacctaagtgtcagcttttctgtgggcctcctcccttaccctgtggcttaggacatttaccgtaatctgaaaataacttatgtatttayggatttttttgtttatcatctggccctgttgctaagttatgaacttcttgagatatttattggcatctactgttagaagagagtcacagctggccttcga

SEQ ID NO: 28806 - DNA, 201 bp, Bos taurus
cccagccaagttatgaaatcctcgaagatcctgatgacctttcacccaactgaccatctgaattttcctgtactgtgagagaccctgatgaaaacagcatrtttggggtggccagctccctgcagggtgctgcgataagtcgtctgcatgcgctctctcactcacacctcagagtaatcccatgcaattgtactattttta

SEQ ID NO: 28807 - DNA, 201 bp, Bos taurus
ttaaaggaagcatgtagattcttaactgactcaccctggaagtgacaaatgccacagtctactgctcagaactggaaatgtgattctgatcaaatggtgargtggctgggaaaagtgtggaagagtacacagatatttgataagtactaatgatcttttccacactcttgatgtttgatactttgaaattacctatttaaa

SEQ ID NO: 28808 - DNA, 201 bp, Bos taurus
ttgttgcatctgttgttttaaatatggccaagagttctatgaagtgtcaggaggcatttcaaaggtggttctgtttgaccattgccatggccagcagcccygctgcagaaccccctgttgcagccatgctcctgcaggctctcttaggaaaagctgaccagtttttccagtgtcctgaagggatgtgtcccagtcattttc

SEQ ID NO: 28809 - DNA, 201 bp, Bos taurus
tttctttgatcttgcatttctgtagggggacacacatttcagatctgggttgctctctaatactgaagtgttgctaagagtatcttgcaccccctccctaratactatggaatttgaagtacaaagtaataaaaataatacagtgatgtgaaaagaagaattgctgtctttatagactagtggagttccatgctctttgcc

SEQ ID NO: 28810 - DNA, 201 bp, Bos taurus
attaatgaagaaaacctggtcttctcactggggccatgtccccagaccttgattcaagcaggtaccaccagcatggatgataggctgattcctcctttagytgatgggaaaacaacccagaggccactgtcccctagtacatcatggaaacttctccaccacatcctcctttcatcctgtgaaaacagtgacatccatgcc

SEQ ID NO: 28811 - DNA, 201 bp, Bos taurus
aagaggccactgtaaatctataaaccattcaccacacttaaattttattttcctgatcacaaagcatcaacacctccacttattcctatgttttctcttcyctagggtttaatccagttgggtgggccagatttacgctcatcaacacctcacaggcagacaataaggtgcaaatagagttcagcctctcttcaaccactg

SEQ ID NO: 28812 - DNA, 201 bp, Bos taurus
tgattgaatcactttgctgtatacctgaaactattaatagcacagcattgtaaatcaataataatccaataacatttaaaaaaaagacagatagtagacaytagatttaaccttgataaaaacaggattcttgcttctcaatatgaagaaaatagcccaattatcatctgttttttgtacatggatctcaagtgatacaac

SEQ ID NO: 28813 - DNA, 201 bp, Bos taurus
tttttttttttttctgtatgacttaagaaatttcacaaaggcctaatctgaagatataattacatcaagaatgctacagcataaacttcagcatgaaatcmaaggtaaggaaatgagagcctggcctgatccaggtttgtcccaggaggcccatttgctccgggggaatttagggatatattgggttggccaaaaagttca

SEQ ID NO: 28814 - DNA, 201 bp, Bos taurus
gaagtagtcggaataaagagggcattgagtaagaatacagttggaattcaatgccagccaaaaagaggaataaaagagccaaaggatacttcttgttattraaaagcctcattagatcatttgcttcaaagtaaagttcagttttgcacagtaagttggttcatgtggtgctcatgttcctccctctatactgatgaagga

SEQ ID NO: 28815 - DNA, 201 bp, Bos taurus
agtccttagcagccttgcctgaatttctcatctggcctcttatcaacttctattgattaaaaagtctgagaactctggttagtagtatcaccacccagggyagtaactactgaaggcccattaaccaaggtctgagaaaccccatagagagagcaacttcttacctgggaatcaatattttgtctcatcttgactaatgag

SEQ ID NO: 28816 - DNA, 201 bp, Bos taurus
ggaattatataggcatgaattgataagagtcctgctccaatttttcttttcttccatgatgtcaataaagtttgtaactgaaacccatctcacagaccttygactgccattttctcagcacaaatgttcctgctctattactctgctcttgcagaagagatgacgtgccactcacaggacaacttttacactgctatacct

SEQ ID NO: 28817 - DNA, 201 bp, Bos taurus
cataagtaagtatatcaagttttcttttttagaaactaaagaaaatcttgaaagacttctgtattttatttaactttgccactgattagttctgtcatagktcattatgaaatcagggcaagaactcttatgataggcagccaaggatgtcaactgactaaaaggtaaggtactgcttttattttagaagataattttaat

SEQ ID NO: 28818 - DNA, 201 bp, Bos taurus
tgtcccactctttgcaaccccatggactgcagcataccaactgccctgtccatcaccaactcctgaaccttgctcaaactcgaataaatcgaattagtgaygccctccagtcatctcatcctctgttgtccccttctcctcctgccttcaatctttcccagcatcagggcctttaccattgagtcagctcttcgcattgga

SEQ ID NO: 28819 - DNA, 201 bp, Bos taurus
actgcatgcaggctttctctacttgcagagagtggggggccactctctagctgcagtacatgggcttttcattgtggtggatcctcttgtggagcttgggytttaggtgagtggccttcagtagctgctgcacatgagcttagtgattgtggcgcatgggcttcgctgccctgagccatgcgggatcttcctggaccaagg

SEQ ID NO: 28820 - DNA, 201 bp, Bos taurus
cagcagacgagcaggaaagctttgtagtggaaaaaaagggaaggctgctggcatgtcctgattggaccatatcggcatgaggaagctgtctacaagctaaytaaaagggagccatcctgtgtcactggttaggggtgcctatgtggctttctctggtgggtcctaagttggaagcaggtataaaaattacggaagctataa

SEQ ID NO: 28821 - DNA, 201 bp, Bos taurus
gattgtgtttattttgtatttttgtattgtatatgaattcttttttaatgtgacagttaaacacatcttttaaagcatagacacacatagaaaaaacatayggtataatgatttccttgaagactacaatgttagatttggaggcagcttcagactgattggtggtaactacttgctgagctctttaaataagtaataact

SEQ ID NO: 28822 - DNA, 201 bp, Bos taurus
tgccatctatagggtcgcacagagtcggacatgactaactcgacttagcagctgcagccctttataaacagtaatactgtggctcatactaatgacacccyactctatgaacatgagccctgaccatgccttggtcagtggaatatgaacggacatgatgaatgtcatgtgttatcagaagctttaattccctgtcccctc

SEQ ID NO: 28823 - DNA, 201 bp, Bos taurus
tgtgacccaggtagatggccactgctcttaggtcacagagacgggttggggagaggttcaccgctgcctgaaggcccaggccaaagccagtgggtggccawggaaggggttctggagtcctgcaggacagagccccaagcctattccctgagtcccccagtttatccactggcctaaggcgagggagagggctgggatctg

SEQ ID NO: 28824 - DNA, 201 bp, Bos taurus
tacagagggtagggagagcatctattttggaattacataagtctgggttcatgtcatggttttactacttaatccctttttggccttgagcaaattacttragctcttagaatcttggtatccttatttataaaatggggaaaataacatcgcctccatggccagttgagagcatttgaaaagagctgcacattttctact

SEQ ID NO: 28825 - DNA, 201 bp, Bos taurus
ctaggacttctctaacggttgtgctctcacctccgacctccagtggatgatcctgtaagttattcaggtggcagaatcaaggccttatgaccctcaggggygaccactttccactctaattttggtatttccaccttctctgtctcactatccctggccccctattcctgtccctgaatcactttccaaataaactgtggc

SEQ ID NO: 28826 - DNA, 201 bp, Bos taurus
tatatattttagacattaatctcttaccagatatatggttttctcccattccacaagttgctttttcactctgttgattgtttcctttgctgtgcagaagmtttttagtttgatgtttcccttgtctatttttacttttgttacctgggcttttagtgtcataccgatgaaatcactgcatttgttacccatgattttaat

SEQ ID NO: 28827 - DNA, 201 bp, Bos taurus
ttctccactggctctttctagccttgtcagtctccgtttgatatccctccagtttgtccctttgcttgtatcccaggttctaattgctttgggcagatttmtcaaatgcaatgtgttcctttatttgtcgtgcattttcatcttgttctttctgctttactttgttttttttcttaatctacatgtcatcctcctaatgac

SEQ ID NO: 28828 - DNA, 201 bp, Bos taurus
caagcctgtggtgggggcagcactggcactagaaaggttgattgaccagatggccagggaatccctggtattaaaagataaaaactataaaagatgtggakctgtactacatatctgttagtcactcagtcatgttcgactctgcaatcccatgggctgtagcccagtaaactcctctgtccatagagttctccatgcaaa

SEQ ID NO: 28829 - DNA, 201 bp, Bos taurus
ggcaaattgagtttcaggcaaattgaaaggtatctaaattctttcagatcaccttggtaccgattagtgtcctggtgtgttaatttgccaaatggacaccyagggaaaagaaataattaagtcaataaagaaagtaagtaaacgcttacttatacataagaacatcctatactggtatgagctctttgatttgttgtatgg

SEQ ID NO: 28830 - DNA, 201 bp, Bos taurus
cttgctgcactcctcagagtcataacacactggctgcctcaaatagaaacccatgctctagtttggctccatggaaccaaatcattgcaacaggcagggayagccacttccctgaaagaagggaggatggaagctacaaaacaagagaaatgatttgggagacagcactaattggcacaattcaaatatctacccacctag

SEQ ID NO: 28831 - DNA, 201 bp, Bos taurus
tcattgaattgtgtaatcattggttcttgtgtaggaagtgttaagaatcagggtatctctattttccaaagtcttctgtaggctgtatccctatgagagtkagttggaaaatgaagatacccagaatatctgttacaaagactgtcctcatgcttgctctatttggcaaggttctgtacaggaaacctcccttaatggcgt

SEQ ID NO: 28832 - DNA, 201 bp, Bos taurus
atattatacatttatatatatttacctgacatatatatttatcagggtccttaagatcaaagtgtcatctgtctatgtagacaaacagacaaataggtcarattagagtaacttcagaaatacatagggaataaatcacattggtgcccaggttatagtgaaacagaaacaattgtatactacttgtttctgtgtgggcag

SEQ ID NO: 28833 - DNA, 201 bp, Bos taurus
aacactgaagtggacttaaatccccactgagggccaacagtctgaccatttaccagcagatttattagagctgtggagacagtttagcctggcaaattctrggcttgctataagtaccacatgtttcttggaagttttcgtgaattgatactgtgactgaacctcttagccataatttcagtgtccagtctcctcttcaca

SEQ ID NO: 28834 - DNA, 201 bp, Bos taurus
accattctgagtctgctttcgttaccttgtttagtctgagttttacccataaggtgactgtcatccttcaatgtataattatgtttctttgagacagaagytgtgtgagtttatcttgatctttcaagagctagtttacttttcatggttcacaccgtgcttcctggctgaccatcccaatagtgggtattagatgatagc

SEQ ID NO: 28835 - DNA, 201 bp, Bos taurus
ctcgtgaataatatatcttcaaagagatatttgtcagaagcagaatacatacttacttaccaagagtaggttaaacagaaatggtagctttggcctatccygtgccatataatcagatcagaacagatcagatcagtcgctcagttgtgtccgactctttgcgaccccatgaatcacagcacgccaggcctccctgtccat

SEQ ID NO: 28836 - DNA, 201 bp, Bos taurus
ggtgaaataaagttatgtgatgttgcttgatatatggatgagtgggaagctctaaaagatgggtttggaaagagggtatatggccatattttgtaagtgaygatttgagggcatgaaaagtcataaggagcttatttctccaggttaaatcacaattttacaattggccatttggcagtagacattgctacctagtcataa

SEQ ID NO: 28837 - DNA, 201 bp, Bos taurus
tttttttatgattcccactcactggttttagaatttaaaaaatatctttcccaaatgattgccattcaagcatctgtccaagcttatcaagttcttctcayggtatatatattcacattttttcttcactgcatggcttagtttcaagatactattctcacagacatcctaattttttaagggcttgtgccaagcttgagc

SEQ ID NO: 28838 - DNA, 201 bp, Bos taurus
ataactgagcctttgacattttcatactttctcttaaaatcacaaacacttccctgggacaaaggaagatcacaatatgtgggtaaaaaaaacattggaaygtgtacaaaaccactaaagagattacttttaagctcttgactctttaaggtactgcttatgattttgttattttgtttttcttggtttcatggaagacat

SEQ ID NO: 28839 - DNA, 201 bp, Bos taurus
atttgactgagttactgaacagcaacaacaatgtgtggtcaaattatagtaagaaatcatataagctagttccagaatggtttgagcgtatttactttcayaccttcattgataaaacatgtgaaagatcagaaccaagaggacctataatttatggagggctcacatataaaaataaattgatcacaggttaaaaaatgg

SEQ ID NO: 28840 - DNA, 201 bp, Bos taurus
ctcttattctttctctgactctttttgtccttttcattgtcattcccttttatgtaccaaccaacatcatatatctggctttctatctttcagcttatttrtagttaagatcaagaggcatatgtagtattgagttttgcttgcctgtttccaatcaatttatattatgataatttttcaacatattatttgttataaaca

SEQ ID NO: 28841 - DNA, 201 bp, Bos taurus
aattttgtcgatctgtaatgattcatttatgtttaagtcatccaaagttttaagcaaatatatcaaagtaattttagtagcagtaaagtattttggatagrtatgtttgtcctgtgtttcaaacagtatactaatccctacaaaaaggttccatgatataatacattcagctgattttcaaagagcagtttatgaaactac

SEQ ID NO: 28842 - DNA, 201 bp, Bos taurus
cctgggcctctctgtcagcctaatatgctttcgaaaatgctttggtttctactgtaccactgagtattggcatttctggcattataattcaagaaaagatraagtaaacaattcaagataaagttcagcataatgtatacgcctatgagagtgaacagagtcaatttatcccaccaagaaatatgtaaggcagcaacagaa

SEQ ID NO: 28843 - DNA, 201 bp, Bos taurus
ttaacccagtgatcagagaaggcctccataaggtgacatttgcgtaaagagagttacaggagagagtcataagtaattacgggaagaaattgctaaaaagraaaaaagcaaatgaaaaggccttgaggtggggtgcttgcctggaattttgagtggctaaggttggtaaaagaaagagtagtccatgaggtccaagaagca

SEQ ID NO: 28844 - DNA, 201 bp, Bos taurus
tgtattttattttgtcttcatatgacctcacttgggaggagatccctagattttcttctgagagatgggaaatccttgttgttcaatcgctaagttgtatycgactctttgcgaccccacggactgcaacacaccaggcttccctgtccttcactatctcttggagtttgctcaaactcacgagtcagtgatgccatccaa

SEQ ID NO: 28845 - DNA, 201 bp, Bos taurus
aaaaatcctaataaatcagagaaaaataattgattttctgctatagtatctgcattttaatgtttcatgatccaaaataaatcacacatttttaattactkgatgtgaccttagcattttaatttcttcagtcagtataaaaaggtatgctagctgttatcacactagctttgttgaaatatatttctgcctagaagaatg

SEQ ID NO: 28846 - DNA, 201 bp, Bos taurus
tgttttgaagaggccagtagactgagatggggactgttttgggggcagcccttgacaaatgatgactgagaacccaaccagatgtttcagcagacgcctaygtggccagatgacagcaagcacaagatgcctcagcctgatgtctggggactgtatgaagcctctaataaactggatgcttttcctagagaactcaaaata

SEQ ID NO: 28847 - DNA, 201 bp, Bos taurus
gtattcctggtgcaggatctttgggctgggagtccaaagtggagctcagacctgttgcttcttggagagaacctctatagttgtgcctatcctcccatttktggattgcttatgcccactggtgagagtcttgactatactgtgtccttctcctggttttgttgtggcttcttctttatgtctttagtcgtggaaagtctt

SEQ ID NO: 28848 - DNA, 201 bp, Bos taurus
taaataaatttatattaaagttaaaataaatttatattaaaaattaaaaaaattaaaaataaataaataaagctagtacatgttaaactttcttagtaaargatgctggtgtgaacttgcaggagaaagaggcttttcctcttggcatttctggtagatactggacacatttggtggagactggatacagggttgaggaca

SEQ ID NO: 28849 - DNA, 201 bp, Bos taurus
tttcagataattttggaaagcatgccaggttttgtgtctagaaaatacagaatgtccttagggtattaatctagagagactaagtcagggcatgtagatayggccctgatgacagatgatggcagaaagtctcctgacatctctacagattgctgtcacttttttagtttctgttgtttgctaggtgggttattgttaatc

SEQ ID NO: 28850 - DNA, 201 bp, Bos taurus
tactactattgttttaaaatgtctggatgtttgtggatgattaaaaatggcagaaaagttttgacacatttcccatcagacagtagaatctgttcccctcyactagaagttgtgctgccctgtgattgctttgaccagtggagtatgactccagatctcgactttttagatatctagtagtttccagtcaggctctaggaa

SEQ ID NO: 28851 - DNA, 201 bp, Bos taurus
tatacatttgtgggctttctgcatcactcatgctagcctaaatttcatcagagatgaaatcctagtagatccataggaaaattactcagataaggcactartgaattgtctaaaacatttagtttctggatataaactaatctacgaccacttttcttgtgatgaaaaggaggcctgtcctgtaagagtggatccaggtac

SEQ ID NO: 28852 - DNA, 201 bp, Bos taurus
tagcattaggatacttagctgagcattgattataattacttctctagaatctgctttgtttctagctttcctcttaggttaagttttatcctgaattcatygtgatacagaaattactattttgtaaaacaggggtaaatacaattagcattcacatatcaaatttgtggaatcatataactctctgccagagacctggac

SEQ ID NO: 28853 - DNA, 201 bp, Bos taurus
ggagcctggcagggtacagtccatgggattgcaagagtcagacatgacttagcgactaaaccaccagtattcctcgccttgttggcctgataattggcacrgcagtacacatggaatttgggttaggctgttcttcacactgtatatctggtcatgtgcttcagtgtttccactccacttactgaataaagttccaagtcc

SEQ ID NO: 28854 - DNA, 201 bp, Bos taurus
tctgaagagacaacaagacttaaagttctgaagctgacagaaatgttaatagaattggtttgttgcaatccattaatgttcaggaacaagggcccagagtytactctctgccccaaacatacctggctctgtagctctgaagcctcaccttcagaaagaagacatacagatggccaaaaggtacatgaaaattgcttaacc

SEQ ID NO: 28855 - DNA, 201 bp, Bos taurus
atttgctcagctttttcaaaaatgtttctgataagtttccttctaacagattgctaagggaagaagtcactagaggatagagggcagaatactgccaagcrttgctgtgaaaagctgtagaagcaatcttagtgaacagctgtgcttgagagtgaagttaataattagacacccaggagtctagcattggttctggcactg

SEQ ID NO: 28856 - DNA, 201 bp, Bos taurus
tagtgtttttgacctcctcgtttatttatcctcaagtcaattctctgaggcaggcactagtattttcttcaatttatagatgagaaacctgagtcttaaaraaattaaatacttggtcccaaggccagaagctgatcagtaatagtagcctggagattcagacccaagctgtgaggctccagaacctgatgtgcttgtgtg

SEQ ID NO: 28857 - DNA, 201 bp, Bos taurus
tttttcttgtttctagccttagaggaaatgctttctgtgtttcactgttgagtatgatgttagctataggcttgttgtatatggcctaatttattatgtcraggtatgcagagacattactttgctaacaaaggttcgtctagtcaaggctatggtttttcctgtcgtcatgtatggatgtgagagcaggactgtgaagaa

SEQ ID NO: 28858 - DNA, 201 bp, Bos taurus
tctctcaccactacgaaatatattctcataaaattatcaactttaaagataagaaaataagacattgaccactgaaagctagttatctgttatgggaaaayacaaaatttatttcagatgtttccaaaccaactttaaaatctaagtgctataaaatcctcaagggaagaaattgtgatccaaactagtgcacaattgcac

SEQ ID NO: 28859 - DNA, 201 bp, Bos taurus
attggtagatttggaggaacaaataaaagcaattggaatgattacagtttaggacttggaggagggggtctgtggaatgaaattcaggcctctgaggaggrggtcctgcctagctggtgttcatgtctatgatttcggaagttcattaacttgggacccaggcctttgaggggagggtgccagacagctgagctggtatct

SEQ ID NO: 28860 - DNA, 201 bp, Bos taurus
tttttttatcagttatctcttgcttcctgcaattctgtgttacttaatatttactaggaaggacagctaattccagtggtaccatgcattgaggcactcakattggggtgataaccaccaaattatctctccagtcactgtgcaacttcccccctgccctggttccctccatctgtggcacttttacaccctcccagtttt

SEQ ID NO: 28861 - DNA, 201 bp, Bos taurus
taatgcataaacataagtctctttattagagaaattgtacatattggtgaatatggtcaatggtcacatctatgggttaattccttaaaaatcagaaccartaattaggatagattctatactctctgttacatcgtgaagtgtcttgtgtagtcatattctattgttggaatgacagcttgtacaaatttcaagaaaatt

SEQ ID NO: 28862 - DNA, 201 bp, Bos taurus
tatcaccaggccagagctcaactgttcatgtccctgagcaccaccgtttggagtttcatagttatgcatggcttacatattagcagggaaaatactggtcrttaaggggcccaggaaagacaaaaagcaagtgatgctatggagggtttgtttttccctattccaaatttgtttagtcaaattagactgaagagtttaacg

SEQ ID NO: 28863 - DNA, 201 bp, Bos taurus
tgatgtgcccgtccacgtgccctgcaaatggccatgacatggaactctgtacgtgacaagtagtctgcatactatcgagctgttctccagccccacactgyatttctaacctcctgggatcttttattaatatatgtatttaatagggttttttttttcccacactgtgtaatacttctgatttagcatttttaagttttt

SEQ ID NO: 28864 - DNA, 201 bp, Bos taurus
cattgtaaatcaatcatactccaataaaagctttaaaaaaatcagatactcattaggatataatatataatataatttgataatatctactaaagtagaakatgtgcagatctttctactaataatttctcttttaggtttatatcctagaaaaaattcagcacatatgctcagggatatatgtataaaaatattcattat

SEQ ID NO: 28865 - DNA, 201 bp, Bos taurus
ctttgctcccaactttacattcagtcagcctcacagaaatccactaaacttaataaacgctgcctacaggctctatgttatctttgagtgatatgatttgygcaaatttttacgtaagagaattccctttccttccaatttctattaggtctgttaatgtgtctaaaacatttcattagatgactgtttctatttttcctt

SEQ ID NO: 28866 - DNA, 201 bp, Bos taurus
aaagttacaaaaacataaacacgcactctctcacaaactcacatgtgcacgtccttaaattaatgcaaagaagagatatattcttttgttctagtggagtrcaaattatgaagactaataaatgaataagcaaagcgccgggcaaccaaatcaatgtctgctcaattctggtcaaggaggtgaagtgaggtttccctttga

SEQ ID NO: 28867 - DNA, 201 bp, Bos taurus
attgatggggtctccactcctgagatatatattttgagtttcaggcaaattatgagtcaatggtctctcagacacaacactcactactctctggggagaayacttcagaccccaacagaggattataactttaaataaactcagcctctggaaggatttaatggagcacatgtctctggtcccttgctccttgtaaggagg

SEQ ID NO: 28868 - DNA, 201 bp, Bos taurus
agaaattacaggatggcaaagtctccttcaataatgaaagtagataaatctagaggaggagaataagtaatttgtaggcaataggttcttaagaaaggagrgggaaattaaaaaaaaaaaatctccagctaagtcagatgattagtttctttatgtaaaataaaagatggtagaaaaactgaacatcaagaataaaagcta

SEQ ID NO: 28869 - DNA, 201 bp, Bos taurus
atttagaggttctttttcacatagtaagaggtgacacaggcagatttcttcaaaatatgtttgtagatgtagtagctttaaccagaacggggttgtgggcrtgacaggcacccaaagtaccacagaccttcctccagcaaggaggaagcccaagacaaagagaccacaaacaagtcaaaaattgatcaaacaaaataataa

SEQ ID NO: 28870 - DNA, 201 bp, Bos taurus
aatggagtatacagttttaggagttgatgagcctttcctaccagccacaaaatctttgccttaatatgacaaagtcaacttctctgaagaaatctttatcrtttgttaaagaaatttatgcacttgaatctaggtagtatgcaaatgatgaattctcccaagtaacttttaagcaatcaccctcccaaatgggcgtacgcc

SEQ ID NO: 28871 - DNA, 201 bp, Bos taurus
gcaccattcaccttgctgctgcccacagtccagccctcggtcgccgcggctgtccatcggttcccgtgagcttccgaagcaggaccaaagaggtgtccccrtggtcggtacaggctctcagcgacatgaggcgaaggagtcaaaagagaaaccgaggcggctgcaaccgctcctgctgcggatgccaatgattccccgggc

SEQ ID NO: 28872 - DNA, 201 bp, Bos taurus
cccatgtttcttaatgtccagcccaggactccttcaccatattataggccttttccattgcttttgaaaaaaaaaagtctctctttttttttatgttctamaataaaatgcctgtttacaatttaaaacaaaaaattggggggagcaataagactggaacatgaatacaaaaagtatgtgaagtgcaccttaaaaacaact

SEQ ID NO: 28873 - DNA, 201 bp, Bos taurus
accccctccccccaattagggccgatctggttgaggatggtagagggaaacggtgatggcaggagagatccagagcccctcttctgcttctgttccttccmtctaaatggaccttctctggcctctgaagtatagtttgaaaaatacaaatttaaggaatttctctggtattaactttctacacatggacagcaaaatggt

SEQ ID NO: 28874 - DNA, 201 bp, Bos taurus
gggaccggatgccgggttggctgccgtctacggcgttgcacagagtcggacacaactgaagcgatgcagcagcagcagcaaggcctgagatggagctgaayataagcatcaggcatcccctgcatatgccccactgtcagaatctgataaaatacaacaggattagggtccaaaagagggccatgagagtgaaacaaaact

SEQ ID NO: 28875 - DNA, 201 bp, Bos taurus
gtaatttctgcttatttcttattatccctttaagggaggaaaagaaaaactttcagaaactctctttgctgagatgaagacaattattgtaaataccacaktcccttcggtgacagaaaagacacagatagagggccttcaagtgattcttcagtgtctggtctaccccttcctttacatatttttcattatcattggctt

SEQ ID NO: 28876 - DNA, 201 bp, Bos taurus
gaacttgtggttttgtttcagtggtgatactctgatttttgcataagtttatatttaatagtaagggaatgatgttcaaattttccacgggagaaacttcracttggttctcctaagtgggctccctctttggcatacttactgaaaaggacgaggctggcgttggtcatccccagattgttggcagccacgcatgtatag

SEQ ID NO: 28877 - DNA, 201 bp, Bos taurus
tgtgaactctggccccgaagggagggtaattaacataaagtcaccagaaataccttgggaagacagctgtgtttccagtcattgtcatttgacagagaaakaatgaaatatgggtttgaggccttgtttttactttacagatgaatgaagcacatcctaaatgtagaatattaaggcttaaggtccgcaccaatcatccag

SEQ ID NO: 28878 - DNA, 201 bp, Bos taurus
ctcacaaggcagaagcgtgcggagcagtaagattcttgtgtcccttgtcagttccaaacagttccagatggactgagaaccaggctttttggccaccagcrtgattcttgagtctcagcccacatcttttcctgttcaatccacggggaaagggcaagtgctccttctgcctgttgctttacccattcttcctctggcctc

SEQ ID NO: 28879 - DNA, 201 bp, Bos taurus
ttagaatacagaaaagtgggaaaaagaaatacaacttttcttgaaaaaatataggaaagaggtaatgagggtctaaattagaaaaggtaagaaagcatgaytcacacagggtgcaactgattgaatgaaagagacagatggggatgggtcagtaataaataaccctgctttcagggagatcaattacgccatcatcagata

SEQ ID NO: 28880 - DNA, 201 bp, Bos taurus
atgtgtccaatagaagtacaaaattttctggtagcccaaatgaagaaattaactcagccagggtaatgacaggggtttggactgttttatggagtaagacrtaaaatcatgcctgaataaagtatattaaatgttgccaaaaatacaaaatcttaatctaagtgggttctttattgtggtcagtagacataaaagcaaaca

SEQ ID NO: 28881 - DNA, 201 bp, Bos taurus
caatctggtcttatggtctttgcttttcaccctcctcctcctgaaacaatctgaacacttggagttttgtcaaattgagttttaacgacttcatagtgccrtgaaaagatgttgcatttcagtaagggtttcagatcatcaagttttaaaactttcttaaacaattgcctcttgacagcagtggcttcttcccattttctg

SEQ ID NO: 28882 - DNA, 201 bp, Bos taurus
gagatggagggtcatgggggctcagccctgtaaccctaaggcctggaaacttttaaagctatttgtgtccaggctgaaagctcagaggtattttgatacaratttttaaatggcctaaattattgtcgaaaaagccatggcatacacacccctttaaatcaatgtagaacctcagtttccctctctacttactgtcctgtg

SEQ ID NO: 28883 - DNA, 201 bp, Bos taurus
acaccaagaaagtagagctattagggtaaatgaacctagctgggccttgatggatgtcaaatgggctcagagaagctgctgaactacccaaactagagagrggcctgtaccaatcagaagcatccttttgctacactagtcagaaattagcaagcaggggaaatgtatttaaccctgccccctctctgtgacgggctgcga

SEQ ID NO: 28884 - DNA, 201 bp, Bos taurus
gcccaaatgactcagaatttctggaagtaggacctcagcatctgtgtttgcttatttgtgttaggctcacaagatgagtctgatgcacagtcagggttggkagtgactgcattttcaaatatatatttagattcattaacctggaggaacaggtgacatgggatatacagagggataaagttaacaaatcagctggatgat

SEQ ID NO: 28885 - DNA, 201 bp, Bos taurus
gtctcctagtagcctattctctgaatcctgctaatacttggccagactgaaaacccatcctccactgatagtgcttgttcacagatcagtagagggttctrtatattggttcacattctgaatggcctgcagcggcttatccagagacagcatcagaaatagagctgtcaatcacagaggaaccttctagagtagaagatg

SEQ ID NO: 28886 - DNA, 201 bp, Bos taurus
agatgacctactgacaaatgagctataaaaatcataatggcatacctggaaagggatttagggattattcctggtttgctgaaggcccagagaatgttccrtgatacactcatacatttgcatttggaaaataacatgattatgaccgaggtccttgcacacttcagataattctaaccttcatcaaatgtccgcaattgg

SEQ ID NO: 28887 - DNA, 201 bp, Bos taurus
cccagctatccagctcaaatagccttcttctcactgtggccacccatactatcaaagctgaagaccatttgcctcccagaaatcaagtgcacatttagccyccaaggggagggcctctggctctgttgtcagtgatatcttgcccagcacttaaatcaggcttcaggtacatcatttaatatattcaataattaccttttt

SEQ ID NO: 28888 - DNA, 201 bp, Bos taurus
ggaatcagtgaactagaatggaccggaatgggggaatttatttcagatgaccattatatctactactgtgggcaagaatctcttagaagaaatggagtcayagtcaacaaaaggcattagtatcccaactttacagataagacaattaaggcttaagccatataaacttttctgaagccaagtggtttctacatggtagaa

SEQ ID NO: 28889 - DNA, 201 bp, Bos taurus
ggcctggagaaagaaacaaataaccaacaatgatttttgtctgttgaggttgttgaagtataattgcaattttttaccagagagtctacagaagtgctgtrgaaaggcagaatttggcctatattatctacaggaaagggctatactgcctatgtgaatacagttagcctgaatgataacacaactatagcaactctgctc

SEQ ID NO: 28890 - DNA, 201 bp, Bos taurus
ctggcctgcaaaactgattgagaagcctagactgagcagggcaccctgtctgggactccagggaagaattcttccctgccttttccagcttctggtggagraggctggcattgctgggcttggggccccaccactcccctctgtctctgtcttcacactgccttctccgcatgtgtctgttacagctctttgcctttgtct

SEQ ID NO: 28891 - DNA, 201 bp, Bos taurus
gctgtggcaccaaataaacaacaaaaggaaaggaacagcagccgagattatatcagtgcccctggttaccgtggcggggatggcccactccaaagtcttargaataaaggagagtgacattcaaaaaatctgtaaccaaacagaataattcctgcaagttttttgaggacacgctgggaaatgttgaggaaggccaggata

SEQ ID NO: 28892 - DNA, 201 bp, Bos taurus
tggcacaggcagtacattgctagccaaggagaggatggatcaatggaaaacatctaaatcaggtcagttcagcccactggcagcaaggcaagccagtccaygcagagccaaaggcagaatcagtctatccagaggaacacgagatgggcaatatccacagcatgggtttaacagaagcccaccaactggcaaaggcagcac

SEQ ID NO: 28893 - DNA, 201 bp, Bos taurus
gaagtattaaatatgaattcacaatttaaaagtatatttatacacacacaactgttcaatttggtcatcaaaagaataatgaccataactgattatatgayactaattagaaagtttccattttaatcctagagataaagggataacataaaattaacacacataaaatatatgctctacttagaggtgacttttacatca

SEQ ID NO: 28894 - DNA, 201 bp, Bos taurus
tgtcttgttttatccacaacagcttgtgctcagctgagaaaaaccgaacagaagagaatgccacactagcccaaaacaaaagcaagatatgccctacaccrgtaagtaaacattgtcacaaatgatggagcgaggttaaactggctgttctgacactattattctgagcctcagctctctctccagttagtaaaccagaga

SEQ ID NO: 28895 - DNA, 201 bp, Bos taurus
gaatgtgaactgtaacaactgcgagtgctggtagcttttcactgtccatggcctccccatctctgtagcctagagatagatcaattgaaacagctagaccrtggtcgagatttcttcatagggcctcctgtctatggaaggatttgttctgtgttcatgaacttgatatatggctgtggaatccaaggcacacattcatca

SEQ ID NO: 28896 - DNA, 201 bp, Bos taurus
ctctcctgcctccagtttttacaaaagtagactaagacttccataactccagcagtgtgtccaaaaatatgccttagtccttctgattactaacatagtgytctatcttagcacataactaaaggtaagttttcccaccaaccttcttatataaaataaaactttctctcctgtagatggtatgattttcaaattatttat

SEQ ID NO: 28897 - DNA, 201 bp, Bos taurus
ttcatccattccttgacctttgcatttggttagttttcccttaccacatgctgtagctggtctgtattaaaaaagtcacagaatacactgtttaccaagaygtctccaaacccagtgattccagatccactgttggtgctcagcctgctggctcctgggttgtgactctgctctggcatttagcatctgctgttggcactg

SEQ ID NO: 28898 - DNA, 201 bp, Bos taurus
atgggttactctcaccaccaaaagctatcatgcatcattcattcatttatttgttcatcattctgacagatttgatgatagttttactattaaataggccstatggcatgaaagaaatgatatctaaaattgaaccatttaggagggtaggaaggagtgttccagattgaggaaactgcatacaaaggcctgcctatgaga

SEQ ID NO: 28899 - DNA, 201 bp, Bos taurus
tctgggtagtcacatactataattgacatacacaaacagtccacaaatgaagttttatagactttcttctaagggaaatgaataatcatagtttagaacaytggaagaagaagaaaaaaaaaagtctacagaatcaaggactattctcttaaattttcctgtagaggtttattattttagttaagaaacactaaaatttga

SEQ ID NO: 28900 - DNA, 201 bp, Bos taurus
agtgttggttcaaaatagttttgccttttcaagagtacaagtgtttgtttgttaataacaaagagtcaccactctcttgtggcagcaaacccatcaaacarcttcattcacatcactaccaatgatagcagacctgaggacaacctggcaaaagtacatgcagatgactaatcatgctcttcttattggacaggctatgtg

SEQ ID NO: 28901 - DNA, 201 bp, Bos taurus
ccttggctgaggtaactgttgcttcagtttaaagttcttaattttggtgatttaggatcaagtaagcagggacatggggtgtcatcagagttactgagaayagggagaagtgaaaggggttcacctgcttccatgaggcagaagcaacacaatattccagatatggaagactggagttgggcatgaggagtggcctgcata

SEQ ID NO: 28902 - DNA, 201 bp, Bos taurus
cccagaccaggatcaaacccaggtctcctgcattgcaggcagactaccgactgagccaccggcttaaaggatcactaaaattaactatctactacctagtrttttgaaactgttcctatttcctggccagtaataccagttcaaggaatctatctcaaggaaacaatcaaagatgcaaagatttacaaagaattgtatcac

SEQ ID NO: 28903 - DNA, 201 bp, Bos taurus
cagcacagaagaatcctttgtgatctggcagaagaaggtatggagaactctggactgaagaaaggatcacaggaaactggagattattaggaagctagtgmaacagtccaggggaaaatggccaatacttaaaatcagcactagtaatggcgaaagggcagaaaagagtccagaaagctctcaagaggtacagaactgaca

SEQ ID NO: 28904 - DNA, 201 bp, Bos taurus
gagatgtttgggtggcaggggacagaggaggaagtggttagagtctcagggctataatggcagcatgggctggggttgtgatctggtttggggggtaaggyggccttccagaagagatgggagctgatgccacgacatccaccaatgtgcattccctcactgccccaaagtctttgagaccttgatctcccaccagagatc

SEQ ID NO: 28905 - DNA, 201 bp, Bos taurus
ggcttagccacacacaggtaataacagtgaatgctgtaggaagtggagagggagagtgcaatctggggaggctccataagatatgttattaggttactatyttgaaatggggaaggtttgagtctcaggaaggaccagagcagggaagtataaggccggtcaggggtactgggtctgctcactgtctaccccagggagtgg

SEQ ID NO: 28906 - DNA, 201 bp, Bos taurus
gccacaggcagaggagcctgggggcctgtactgtcagagtgggcttcactgcaggggtgtccgagatctggctggtgagaagggagatgcaaggggactckgggaccaggcctggggctgagatgcagaggtgaggaaactactggtggcatgctataagggtggggcgcccacattctgctcacagtaccaatgcgcagt

SEQ ID NO: 28907 - DNA, 201 bp, Bos taurus
gctcatcacgagggcttgttgtgcatgcctgtgattgcctctcctgtcctgcttttccattttctgtctagacatccttgcaaacagctgctatgtggccmccccttgggcttaagggtgaacaaacagcagcatgtagtctgccctcgggagtctgaatcctgcgaagtggcccatgtagattttggaagtgggtttggg

SEQ ID NO: 28908 - DNA, 201 bp, Bos taurus
ttcattaaacaattaccatgaattatttttgacagatgccccagggaaaaggctatatatactgaatggggtctgggccagatcaaataaagacctgtgakttggggcttccaaggagatatcaaacaagtaatacaatgataattctctcatataggagtattccaaatcaattttgaattttttaccattggccattag

SEQ ID NO: 28909 - DNA, 201 bp, Bos taurus
gtaagggaaaactgaagataaagtgtcatcaatgataatggagaatttaggaaggtacaacattttgaaggtgatactttctggcctgttaagtcttaccrtcattaaaataggtatctctggaagtagctgaagatttaggactaaaaagaagacagggctaatgtttgcatcttccttcctcttggcctgattgtttct

SEQ ID NO: 28910 - DNA, 201 bp, Bos taurus
ggcctgaaacgaggagttagccatttaacaaaatggagaacaagtatccccattaaaggagtgagtatgtgcagagaacctgaggtgacgaggagcttggrttattagaagacctggaaggaggccactgtggctaaagtatatttcatgagctaaggctggatggtaggcaagggctagatcaggcaggatgttgcaggc

SEQ ID NO: 28911 - DNA, 201 bp, Bos taurus
cacaaatatttattggatgcttctatggcctcagtataacaagaacttggtgaggaaatggatgaagtatgaaaccgatctctgatatcaaattgcagatmatctggccacaaaaggaagataattatgacttaagcttaaaacatattacaccttaattaagtgcagagttatgagtcagagtttaaataatgtgctaat

SEQ ID NO: 28912 - DNA, 201 bp, Bos taurus
gttaagaatccacctgccaatgcagcagacatgggttcagtccctggtcagggaatgtcccacatgccatgaggcaattaagtctgtgggccaaaactacygaaggctgtgtgcctgagagcccatgctcctcagcaagagaagccaccgtgatcagaagcctgcattctgtatgaagagtagaccccactcgccacagtt

SEQ ID NO: 28913 - DNA, 201 bp, Bos taurus
tacacttgaaattggtttatatccggaataactaaatccctagaaacagaaagtagactgatggtcaccagtggctagggaagagtagaatgggcagtgamtgcttaatgtgttagtgctgtttttagtggtgatgaaaatgttctggagctatatagttgtggctgttgcacaatattgtgagtgtactaactaccactg

SEQ ID NO: 28914 - DNA, 201 bp, Bos taurus
tactgtttagcagtttcttataacaggatatagctgaacatctgatgggagatgcatagggcaaggaatgtagggaggtacatgaagctacctcttccatrccttctccaggagtgtcactctccccacactgctacctgctccttaacccggaagctcttcaaaccaccaccaccccacctttgggtttttaatatggtt

SEQ ID NO: 28915 - DNA, 201 bp, Bos taurus
gaggtggacacaactgagtacataggtcttcagtctctcaggccccccttgcgtctcaaaaggctggctgaagagttaatgattagtaaacgtgaagacayagaaacaaagaataactgttggcctaggaaactgctaacaatttagagtataaataagctacaaagcagagtcactgaactctcagttccttgaaaggta

SEQ ID NO: 28916 - DNA, 201 bp, Bos taurus
ctaataaatatcagacagtatagaaaaaggatcttcttgcatgctctttcatttgtctgtttttaacccaaatatttggcccagtgttactctgatttccrtagaaatattgtaaaaactagggagtttcccccaaatatagctcagtactatacaatcagccctgtgactcttgctggagaggcctttccagacccatag

SEQ ID NO: 28917 - DNA, 201 bp, Bos taurus
tcacagaacaaaggattagagcagatcagtgtgtccaccagttctctctcctctttgggtagtgagagcaggcaggggacatgtgcaaaaggagaaaatarccaatcggtaaggattggggctggggaataggcacaaacggaattcaaacctggctgtcattctcaggcttggatttaaatattttgtcttctctatagt

SEQ ID NO: 28918 - DNA, 201 bp, Bos taurus
cttccctgcttggaatgagatgtgttcagtctcttttgtgtggctgtccccttttcatcattcaggtaaccagtgatcagagaggcctaccctgaccactyggacactactttctccttcccccagacacatgtgcagtagcctgttctattttcatcctagtatttatcactctctgaaattttcttatgtatatacatg

SEQ ID NO: 28919 - DNA, 201 bp, Bos taurus
agagccagagaaattgtggaaaaaagaaaattgtccaggctgtatgagggcatggatgtgtctaatttcttcaccagtgaatctcaggcccctaagatagyacctcaaaattatttgtataaggactgaacaggacattagcatatcctggtgaaagcatctcctcttgtgtattaaattctctaggccttccgtgttcca

SEQ ID NO: 28920 - DNA, 201 bp, Bos taurus
taaacgtctctttcaccagagtagcccttggggtagtgagtccactgccaagaggacatttcttttacttgccttaactctcccagagatttgaagaaagragctttggggaagggtccctgaagaattttatactaccagttatcttccttaaactggactttccaaatgcaatttaagtagtctggtagaatgaaaatt

SEQ ID NO: 28921 - DNA, 201 bp, Bos taurus
cagagcaacaataaaaacagcaaaaatctccagtataccggtgaagtcttctgggaacaattcactctaggtttaaattctttctctatcatttgttacartgtgacttggccaagttgcttcccctttctaagtctcacaaaatttgtcctatgagtgagaaaaacatttgtggaaattgttaagaggatttaatgaaca

SEQ ID NO: 28922 - DNA, 201 bp, Bos taurus
tcattattttaataaactttaaattattcaaggacaaaaatcatcacaagttagcttatttagtacatcacaaatattttaattccatataacatattttsgacagtttgacaaaatatctaaattaagataaaactgttttaagaattcttttataatgtagattttatttagctatctatcatgcttttctaaatgagt

SEQ ID NO: 28923 - DNA, 201 bp, Bos taurus
gtacactgcctgggggcacgctgcccgagtgcacgccgaagagctaacctccccgaatgccctggtgcttctcaagagctctgggaagcagccagaccacwctctgcctttgtcaggtgttctggtaaacagaggcttttaggagaacagtcttggataggtcctggcaaggtgatgatggcattctggccacaagtttct

SEQ ID NO: 28924 - DNA, 201 bp, Bos taurus
gtgtctgaacatcatctcctgtgacaatgtttccaacagcccgcaaggcaggagaaaccactttataatcattatgcctgcaaccataaaaagaaaagatrtcttatatccaacagtaacatctgcaaattcctttccttagagctaaaaccagaaaggtacaaggaaccctatcaggatgaggaaatgtttttggtgtat

SEQ ID NO: 28925 - DNA, 201 bp, Bos taurus
tgagacaggctggggacattcaagaggaggcccccatcttcacggcaaccacaggaataaatgatggagagcaagatggctgtgttcagactacaaacacmtgtgtgggtcacagaggccaagacgggctctaggaagtggtgaggtttgtgtggggaggtgcaagtttcagacagaagtgacagtcctggaaaaatcctg

SEQ ID NO: 28926 - DNA, 201 bp, Bos taurus
aggcaagtttggccttggagtacagaatgaagcatggcaaaggctaatagagttttgccaagagaacacactaatcatagcaaacacccttttgcaacaayacaagactgtactatatggccaacatcactagatggccaacaccgaaatcagattgattatattgtttgtagccaaagatggagaagtgctatacagtca

SEQ ID NO: 28927 - DNA, 201 bp, Bos taurus
gccgaatgctgcgcttcatagtcccgggcgcgcaaccagaacctctcttcgacccaccgcacggcgccttgggtttgcgcaatagacccctcccggccccrgctcgtcacactcggctgcagggtgagagaagtccacagaacgccggcgaacgctgcgggactggggcggggcggggccgagaggggcggggcggaggag

SEQ ID NO: 28928 - DNA, 201 bp, Bos taurus
caatccaccttgataatttcatagtagggcccagaaaaaatgaagctgatataggctgagcaggatcacattatggctttcgtgaatctcaggtaaatttkcttctgtgggccctcttccaccattaaaaaaaaaaaaaaaaaaaagtatgtttacaactctgttggtatatgacagatacagtaatatattaaaatattt

SEQ ID NO: 28929 - DNA, 201 bp, Bos taurus
tcctagctgtccttagcagttgttttcattattaagtgaatgtgatggcacagaggctgagggactctcctgaagggggaccacgcagggcctttgacatraagtgaaggggtgctggagaggcatcacagtggtgtgcaggagcctgggtggaatcagaaggctagagtctgggccttggctctttttctttcattcatt

SEQ ID NO: 28930 - DNA, 201 bp, Bos taurus
tgtttcatcgttattattactattattattaaaaagaaaccatttcaacaagtagagatgttaaacttagactggaactgagaaagaacataagttctccrgaggccaaaggaaatcccaccccttgtaacaacgtgaatgaaccttgagggcattgggctaagtgaaatcagtcaactagagaaagacaaatactgcgtg

SEQ ID NO: 28931 - DNA, 201 bp, Bos taurus
aagaaaaaggaagtatgactgacgtatgattctcagtagttagcccccaggctcctgtatcttctgtttgcctgcaggttaacagacaatatccttatggytcttccttctgaaacttcttgtaaagtttagcttcttattcctattcccaacttgctcaggaaagagcttggctctgggaataagaggcctttgctggtc

SEQ ID NO: 28932 - DNA, 201 bp, Bos taurus
aaattgtggtaagtcaagtaaaaatgcactctcctgatttttttttgctgaaatatcaccataagtaactcaaaagaaaagtaggctcttctttattctgrgaaagggatatttaaagttcctttcagtgctgcctttcagtgtttgcaaaaggtaaaaattcagttcacttactattgcaatttctttctgcagatatgc

SEQ ID NO: 28933 - DNA, 201 bp, Bos taurus
tgtaattgtgtagactttgatgagacagcttccataaatgttgcccatggagtaacactctcgggcagtgagttcccatttcccctaaggccatatttttmtaaagtagcagcaggggtatgactttcacatagaccccccataggaagtgctgtcatttcctgtgctgatttatccaacccctggcccacacctccagtt

SEQ ID NO: 28934 - DNA, 201 bp, Bos taurus
gtcaaggttgatccaaagccaggcctgggtagcctgctcctatctaatcagggtctcatgaagccctcccagacaacccagggaggtctgtggctgccacrgtattctggggaccttactcaaagtttcctggactggtcatctctgactcccccagaactggaggataattggagatcacagccagtgaacaaagtggac

SEQ ID NO: 28935 - DNA, 201 bp, Bos taurus
atcttccccacccagggatagaacctgggactcccgcattacaggcagattctttaccgtctgacccaccagggactaggcctcaagaaggaaagcctccycactgaactcctgtccccaggtggcacgtcacagtagttcactgggctcatggtggcactgctgggcccttgactgaaaatcctccatctttagggagga

SEQ ID NO: 28936 - DNA, 201 bp, Bos taurus
ctaaactgtgttgctatgttgaaattaactctgagcacagaagcaggtgctgagggaaagcaggcatcatggcactgctagcgttttcagacacagatgaygaataagatatacaaagttaacctattcaatatgaattttctgaagggataagtataggtagcactttattgcaatgtcccttgcagaagaaaatggctt

SEQ ID NO: 28937 - DNA, 201 bp, Bos taurus
tggtgctactgtgacagttatatggtccatggtgctactgtgacttcggcacccagtgctgaagttatgacattgacagatgctttgtctagtggccccaraccaaagaatccagaggacaggggtgcaggcttgtttctccctaccagaaccagaccagtggctcttatcagaaatacttaagcaatttattggccaaca

SEQ ID NO: 28938 - DNA, 201 bp, Bos taurus
ggcccagaatgcccagtgcctgcagctgctgcatgtaactatatctgggtttgacctgaacatctgcttctgtatccacagaaaacattatttggccccaygtgagttatgagcttttaggaagaacaaagatagaacagagtgaggaaacagaaaacatgacaaaaaccaggcaagagcaggaggtgggaagacacttga

SEQ ID NO: 28939 - DNA, 201 bp, Bos taurus
cccaaacccttggaattttccgagctataagaatcatgagagcatcttttgttgtaatattcggtttttcgtcctcagtttctgaaattgcttcagagccrtaacggtgaagtgggtatcttgttatgtgtaagtccctttcaaccacaactgattttatgttaataaggcaacttttggaaagcacctaaagatgggggg

SEQ ID NO: 28940 - DNA, 201 bp, Bos taurus
actgaatcacatagtcttaactgaatttcaaccactccctaagacataacctgaaatctccattttttaaaatgggatagtagcaagttacaggtaagcayagttgcatttatggctctaaagttccagaggggggctggtgaggccatggaagagaatgagacagaaaacagaaaacatgagcttaagagaagatgataa

SEQ ID NO: 28941 - DNA, 201 bp, Bos taurus
tgaattagtttggtaaaatatatgaataaggtttcatgctaagtataaaatttgaaataaattaaaaaggtccaattattcccatgggaaaattagtcacraatgttgcattgtgtatgttgattgggattattccttgcacaatatgtgacaaatagtggcctttgctgagtttcatttcaaattgttctctataatctg

SEQ ID NO: 28942 - DNA, 201 bp, Bos taurus
ttaatcaccacctcaggacccaaaccaagtctttcaagtcttggaagcatagttgacttggcagtactgttactcctctttgtcttttctacacaaagccraaagcctgttttctgaggtcactaaataaaaattggccacctattttccttagaagcaaatgcatgactctatttttggatgtgctagagggaaaagggc

SEQ ID NO: 28943 - DNA, 201 bp, Bos taurus
gggtaggctgaagtggggttaaccgttcttggattaagaccagcgttattttcgagtctagacctctgaccgagtttggccccaaaggtgaagtgtgacargcgtgtgtaagggtccactccagtaggaactctggagactacggcagctttacttttgaggcccctactgcccgtgaggtgcactagggaaagctagcag

SEQ ID NO: 28944 - DNA, 201 bp, Bos taurus
cccaaggtaccttgtctggcctctggttatggccataacagcctacgtcctgggccctttgaggggataagattcttcactggggcatttgaaatatattytgcagcctcattccccttcttgtggccaaatccctaaacttccctcatttattaccctcagtgtcccccttcctaggcctggggacaggacttaccgtta

SEQ ID NO: 28945 - DNA, 201 bp, Bos taurus
gggtcaacaatttgatgccaaagtttctaccctgaacccctgtacgaactctgggatctcttcacaccttggaagagcctgctacagagctggtttttcarctccaacacagaggccttcatcattttcagtctgcctggatttcagtgtcttctaattggctcttgtaccaagccaatcttggttttccaacaacttggt

SEQ ID NO: 28946 - DNA, 201 bp, Bos taurus
caggcagattctttaacatctgagccactagttaaaataaaatatcaaacataccgtttgggaacatggttcttcatgacatatacatcttgaatactttrcagtattgtatatatgcaggcctacacatatgttttaatgagtatgtactattccatcacatgacccaatcactattgggtcattcccaatacagttgga

SEQ ID NO: 28947 - DNA, 201 bp, Bos taurus
actccaggttttactcgatgtgcttttacctgctgatgcaggccatggtggaaggctttggtgggaaggaggcggtgttgaggacactgaaggacaccccrgtgatgatccatacaggcccctgctgctgctgttgcccctgctgcccccgaatcaagatcaccaggtgaggcgggagggagaggctgcctggagagcaga

SEQ ID NO: 28948 - DNA, 201 bp, Bos taurus
tctcaaaactgtcaaaggtcatcaaaaccaaagaatatctgagaaactgtcatagccaagaaaagactaagaagagacatgtaatatggtaccctatataygatcctagactggaaaaatgacattaggtaaaaactaaagaaactggaataatatatgcacttcagttaataaagcataaatattggttcattgattgtg

SEQ ID NO: 28949 - DNA, 201 bp, Bos taurus
tttaaaactgtattcctaaagatgaacagcaaatagtttggaactgtaattttaaaaatatcccattcatgatagtgactaaaaatataaaatatatttamgtatagatttaacaaaaatgcaaaaggtcttgtaaagaaaatgataaactttattgataggcaataaatgaagaaatctactatatttgtgtgtaggaag

SEQ ID NO: 28950 - DNA, 201 bp, Bos taurus
gagggaggagcaagctgtctggcttcctgagctccttgcctctccagggacatcattttcagattagattaccaattacctctgttcaaaggcctctggckctctcttacacatcgtcctgtcccattcacttgtgatcctctgcctggaaaggatgagaacagaggcaccacccttgcagtctggcctgtaatggcctac

SEQ ID NO: 28951 - DNA, 201 bp, Bos taurus
gctatatgtatacatatatctattcttttttagatgcttttcccatataggttattacagaatattgagtagagttccttgtgctctacagtaggcccttrttggttatctgctgtatgtagtagtatgcatatgttagtccccacctcctagtttatccctccccctctacttttccccttcagtaaccataaatttgtt

SEQ ID NO: 28952 - DNA, 201 bp, Bos taurus
aagtacttcatgaactttcataagtctaataatttaaacaggtaaatataaggaatctcagattccaacactttattaatagagacaaaatgtcataactytccacttaaaataaaacattgattaaacattttaaattggaatcatgaagctaatctgtcagattctctattttgtcaaattctcttaatcaaagtgtaa

SEQ ID NO: 28953 - DNA, 201 bp, Bos taurus
tcaagagcacacagaggctctctgctgggactcacctcagagatgtggtggccccttgcctttgttcccttgggaaataaaaacttgtgctaaggaagcakggtagtagtcattctggaagggcctaaatttatcttccaactggtcttggagaaaacaaacacaatcattctcaccctcctttaaaggtccctttactga

SEQ ID NO: 28954 - DNA, 201 bp, Bos taurus
tttgccttcaaaagatcatctatttttaagccattaattagtatataaacagatggcacaacaactaagagatcttttttagagtcagaggttttggtgtrtattcaattagaaccccaaatggtatgcttctttgttcacacattaacaaaagttattgcatccaaaatttagttacaataattaaaatatctactgaca

SEQ ID NO: 28955 - DNA, 201 bp, Bos taurus
tcctgaaggacctgaatcaaaagtgtgatcagtgtcattcagagtctccctccccacatgactatctaagcgggcttacaagtgggtctctagggcctaarggggagaatgtctgaagaaggttgtattggactcaaaacagagaatcatttcattctaggtattggcaggcctgtctgcttctgggagcaaaactgcccc

SEQ ID NO: 28956 - DNA, 201 bp, Bos taurus
ctgtctgcaggctggcgtcaatatttgccaggcgtgctgcaggcagagctgaagcagcgtgctctttagaggctgctctagcaaatggtgaccaaatgatrccatctgggaaaggctttgcttaaccaagtccagagcagcttctgctgtgagcagatcctctgaccaccgataggcgcctgtctcccgccacctccccct

SEQ ID NO: 28957 - DNA, 201 bp, Bos taurus
ctccttctcagcaccttcccctaactggtgcccctctccctccagccactcacaacccagccagtctggaaggagctggaagtcaagcaaacagctggacytgatcagctgcagtggccccagaccagctgatcctcactctctgagctgttgagcgcgtttaggctgcagcgggtggaggtgcggtggaaaaggcctcac

SEQ ID NO: 28958 - DNA, 201 bp, Bos taurus
cacacacactcatgtaggaacttcaacaagggttggccagagtcgtttatctctgctccagagtatctgagaccttatctgaaaagacgtgaagatggggrtgggaggtgttactcagcagttggaagtatccagagtcatcttcaccaatatgtctagtgatggatgctggccatcagtgagcccttcagctgggtggtt

SEQ ID NO: 28959 - DNA, 201 bp, Bos taurus
ctgatccttcatttcctcagatgtaaaattagattattaacatctaccctagttacctcctagagtagaagcatccacacaagtaagtcatgcttcttggygcagtcataaaatttttcccagctctctcggtcctctgcccacagttcctgggtggccaggagacagcctggactggcatattccatgggtccaaagaga

SEQ ID NO: 28960 - DNA, 201 bp, Bos taurus
gtggccaaagtactggagtttcagctttagcatcattccttccaaagaaacccccaaaaggttaactttcccaggtcaataactagtcagtggtcacagtrgacttggtccaggcctccaggtcatcaagctgatggccctctggtaggagcacagggaggtgagcaggagagatgtgatctctagtgtctgggtctcaca

SEQ ID NO: 28961 - DNA, 201 bp, Bos taurus
gaccgttaaactttgggcgggtcactgccctgtctgagctgctgtttcctaaactgccatctgggtcagtgttttagattggaggctctcaaagttggccragggctgatcccgctcctggagatttccttttaatgaatctggaggcagcctggattctaacatgtagccagtgttgagagccatgcttgcagatcttaa

SEQ ID NO: 28962 - DNA, 201 bp, Bos taurus
agaggccaccctgaggacattgcaaagcaggtgaccacctctgccctgactgcacacgcacagtattccagtggtgtctgccagacccaggcctttacttyagctaacctaccacggaccttcaagcaacaacttatggacaccaactctgcccttcttgctggcctcatttctcttaaaccaagaccaaaatctgggtcc

SEQ ID NO: 28963 - DNA, 201 bp, Bos taurus
ttgggattaagtaataaaacatgagacaaagggactcagaattctgagacgaagggctaggttttctcttccttctgaacaaaatgttatcaatgaggagkattcacttctatggagaacctttgggatttccattccaggcaattcagtggtaagaaaagtaagccaagactctctaagtaaaaatctatctatatcctc

SEQ ID NO: 28964 - DNA, 201 bp, Bos taurus
tcaatgagttttaatggatttatacagttgtgcaaccacgaccacactcaagctttaaaacgctttcattactgcaaaaatgagcaatccctgatcccacygccagcccctgacaaccacagataagcttgtgtcatcacaattttgccatttctagaaatttcatagaaatagagtcatggagtcttctgtgtctggttt

SEQ ID NO: 28965 - DNA, 201 bp, Bos taurus
cttcctaataaacacacacaaaaatgaaaacgctttggtgaattgggtgggccagtgattagacatcacaggtgacctagaaagcaggtgttttgttaggratgaaagctagatcacaaaatgtgagcaaaggaatgtgtggatacagagctaaatgcaggacatgtgagctgttccacaagagaaatgagatggcagttt

SEQ ID NO: 28966 - DNA, 201 bp, Bos taurus
caggacaagattcccgtctgatgctggccgctgccacttattctcacaaacagattcttcccttccccattattgtccatcctccctactttgacacaggytgtgattggcctagagtccatttctttcatattttctttagactgctgacccttgcttcctcattagtattcccttcattctgcctagttctaattccct

SEQ ID NO: 28967 - DNA, 201 bp, Bos taurus
tttagaacaaccaatgccaggcagcccacccatggtactgcctttgtgtaagataaaaacatgctagaaggtgtcttctgcatcacccaaaggcagagagkaaaacagagtaaaaaacagagagtaagggtcacatttcatccccattagtaccaaggcattctgctcatgcatagaccaaatggcttttttctccccaat

SEQ ID NO: 28968 - DNA, 201 bp, Bos taurus
taagaggggcaataggtgaaggcatacgtcctgctgcagatcaactttgggagacaaaatttcctgggaattaaggaagaagagcaattaataagtatgtytctcatgtatgtgtagattgcacatcattggtaggtttccttgaaggatgatagaggattaagaatacagactctggatacaaaaagcttgagttcaaac

SEQ ID NO: 28969 - DNA, 201 bp, Bos taurus
caagttttatcctcaacatgttttgtttctttacagttgctttaggtttccttatcactttaacatttgcatcaaatagaatcaagacctacatagaaaakgctgtcataatatctgagaaatgagttcttaaaatttttagtcaaggaaagtatgtctccatctacaatatattcagactttcagaactccgtgggcagc

SEQ ID NO: 28970 - DNA, 201 bp, Bos taurus
accagggaagtcaagattagagttgttatctctaccaaatactggtagagcaggcagcaagctgttgaatgaggactgaccatacattcaatagtgacttracaggattgatttcagaggagctgtgggaatgtctaattggagttgatagaagttataacaagagttaaaggaaagaagaaagtaatattaaatgactct

SEQ ID NO: 28971 - DNA, 201 bp, Bos taurus
tagactagatggcatattaataatagatatcaaagttctagggactgggaagttcaagatcaagatgccaaatgattcagtgtctagtgagagtattcttyctggctcatagacactgtcttctagctctacctttacatggaggaaaaggcaaaagagctctgtaggtctcttttacttagggcattaatcctatcgatg

SEQ ID NO: 28972 - DNA, 201 bp, Bos taurus
gcctggggacagggatttttaaaactccctaagtaatttgtgtcagccagggttgagaaacactaacttaagacataacctagagcagttctcctcaataytggccgcacattagaatgtccagggggacttttaaaaatactgttgccaaggccctgtccaagacccaattaaatcagaagctctgtttgaaatcagaag

SEQ ID NO: 28973 - DNA, 201 bp, Bos taurus
gtctctagccattgccaattttcccctggaggaaatatctgctcccagttgagaaccatacatatatagtgtggaactataaagtctatggtcaagaaatrgatttggaaatcacctttgaggtaattgttaaatcttaaataatggtggaaattctgcagaagcatgtttaaggtaaaaataaataaataagaagccaaa

SEQ ID NO: 28974 - DNA, 201 bp, Bos taurus
cttcattgatgaagactgtctcaggaactttactagatataatttgaaagccatcagttaagtctcttttctacaatagatccttcaccaagttggccctmaacaagtatgtcttatcttattctatgtcttagttcagttcagttcagtcactcagtcgagtctgactctttgcaaccccatgaactgtgacacgccagg

SEQ ID NO: 28975 - DNA, 201 bp, Bos taurus
tttggggttaaaaaatatgaattttggagggtttttgtttgtttgtttagaattccatgatttgctatgacatacatagtgcacaatcatttatacaagtygaatgagaaatttacattaacaattttcatgaaagtgaaggtttctcagttatgtctgactctttgtgaccccatgtactatacagtccttggaattctc

SEQ ID NO: 28976 - DNA, 201 bp, Bos taurus
gcaggagatgcaagagatgcaggtttgatccctgggtcaggaagatcccctgaagttggaaatggcaacccactgcagtattcttgcctggaaaattctayggacagggatatagtccacagggtcagaaaaagttggacatgactgaacacaaacacacataatccccaatatagaaaaaccatatactccctggaaagg

SEQ ID NO: 28977 - DNA, 201 bp, Bos taurus
tttgcagtaatggtagaatgctttggattatattcttagattcccagagatctggtgttcatttgctttatatggaaattttagtgaaaagtttgaaaagyattgttttaagtgcatttgatgcttctcaaatattctttcatctatatggcatgctgaggcttttgctcagttgtgtctgattctttgtgaccccatgga

SEQ ID NO: 28978 - DNA, 201 bp, Bos taurus
tttattatcacctctataactgttacattataattatattatcactactaaaatcattcaagctttaattccttaaaagagagcaaatactgattcttgaytatttgcttttattactatcagaaatgaaatgttgaccccacactccccagtgaagatggaaatcacagtactgctatagaaagactgttttctagtcag

SEQ ID NO: 28979 - DNA, 201 bp, Bos taurus
aaaaaatcagtcaactttacttatagtacattcctcttatcttcactctaacaacttggttatctgagactttaggccaaagcacagaagagtagcaaatkggatggaaggcaaatctttttctaagtaggcatgttaatggcagtgggaaacttgaggtattaaaaacaaaggaggaattccctggccgtccagtggtta

SEQ ID NO: 28980 - DNA, 201 bp, Bos taurus
aactttgtttacccctttctcaagcacctttgatatcttgtgcttggtttataacacaatcctgtaccatactgtccagaagaaaacatatatttttccartattattatattctatataaaaatgttctgtatccaattcccagactagctttcaaggcccaactttattttttaatctaaaaagttagtataatttaaa

SEQ ID NO: 28981 - DNA, 201 bp, Bos taurus
agtagcatggtttcctgtttgaaaaatgcatttgtatattcatcaaatttataggataaaaaagacaaaatctcttttcttagaatagataaaaggagacratgtgtggttatttccatagtttccaaaaaagtattagacaaacatttaacaaccagcctcaacttaaacaaacaaaaataagaaaacattctcagaata

SEQ ID NO: 28982 - DNA, 201 bp, Bos taurus
tcatcaaccttaaagacccctatgtcctcttttgctgagatcatcatgcctcacccctgggaaatacgtataaagaccctggcacagggcctcgcacacarcaggcactaattaaaggctcactccttctaccaacacatcctctcccagccaaggcaagatggcagctgtgaaacaaactgtgttggccaaccagatgag

SEQ ID NO: 28983 - DNA, 201 bp, Bos taurus
cccctgggctgtgagcggctgtgagccggggctctcaatgggccacttctgcatgctcagcattccctctcagccccagtaggccagcggcccccaccccytgaacgccctccccctccccggtgccccgggctgattggaggaaaggaaaaaaacaaaacaaaacaaagacttggccagatttcaggcctcgatgatgtt

SEQ ID NO: 28984 - DNA, 201 bp, Bos taurus
gaagcccattcaccttttgtttgaggccaataagaactcctcttgggatactgtggaagagcacctagcaccaagagttccagaccaactggttcactctyaacttggccacctatgatttgcgtacactaacaagttgctaaacctgttagagctttagtttcctcacctgtgaaatgaagacaatgacaaaggcctcct

SEQ ID NO: 28985 - DNA, 201 bp, Bos taurus
actggcactgggtaaatattgtttatgcatgtgtctaagacatggctggctcctctgccccacctcttccagtgtagtgaggccccctcttccttctcttrgacacctcttctgtagccaagcacactgcccaccttcctccactgccctgactccgacccctccacgccttgtttgagcacccttcctgacggacatggt

SEQ ID NO: 28986 - DNA, 201 bp, Bos taurus
aggggcctaagactactagcctacttatctattggtatgtgcccaggggcaaaggagaacaaataggtattatttggttggagctgagaatgaatggacayggccagaaatgaacctgtatgtgaaaaatggttttaggaattgttgtttaccttagatcacataaattatgtacattattccataatatatccatgttta

SEQ ID NO: 28987 - DNA, 201 bp, Bos taurus
ttttgaccaacccagtacttcaggtctgtatctcttcccgcactgatggggagtggggtagcagagagcataccccctctagttacccccatttccaaggyagaagaatttactaattgtccagagccaggacattcaataatcccagtttacttgtggcctggcttaccctgccttatacagcagcatgttgtgatgtgt

SEQ ID NO: 28988 - DNA, 201 bp, Bos taurus
ccttccagtcctgattctcctttcacaagcctcgctgggtcagtctacaccctgctgtataattgagagataagtccctctcatggccctgctccaagackgactcctctgacccccagctcctaatttctgtgcagtgctctgtgtttactctgaacatgccctcgaccttcaactactgatacagctctgctcattctc

SEQ ID NO: 28989 - DNA, 201 bp, Bos taurus
atacttcccttctcccagcccaggtttccccctatgtaaccgagagtcctgaacctaagctttctaaaatcacagaggtaggaggaggcctgactacaacyctcagagtccaagtttcagtccaacggtctgctgcgccccctggtgtccaattctctgaactacatgtcagtcgtagggagagggagggccctctggatt

SEQ ID NO: 28990 - DNA, 201 bp, Bos taurus
cccagctttcctcttccctccccatgccaacttcctctggtgaccagattcctgctggcactgaagtgtccacatccctagaagtccagcctcaacctcaygggctcccctctgtacccccttacacacacccatgggcacctcccctagactccagaccacatttaagaacaaaatttaaaccagacacctgtacagaaa

SEQ ID NO: 28991 - DNA, 201 bp, Bos taurus
gagggctttctccgtgtttaactgcaggcctctctacgccccttccacctatgtgagaatacagacatcaagcatttggctgttccacacagctgagggcrtatgtgcatcctataaaagcagccagcaatattaatcatctccagcaccggtgaacaagtctggcacacttagcagagaaaaatggagcctcaggaacgg

SEQ ID NO: 28992 - DNA, 201 bp, Bos taurus
caccttaaaagggtgaattttatggtatgtgaattatatcttaataaaacttttattatagctaagtgaataatggggggaaacagcttgcattttgcctrgttgtgctataatccactgtgccaattgacattcctaccaggtgtgccttagatggtttcaaggtggcacatttgccatcttggctgctttctttgaaat

SEQ ID NO: 28993 - DNA, 201 bp, Bos taurus
ctgtgcactgaggttggtggctcatgtctagggtacctgggagtcagtgagagccaagtgcaatcccctggagcctgcatgtctctgactcgaaatcctcrccaaagcagagctgctggaggtggctgtgcagagatgggaagactctcagggctaagccagcagtgccccacaaaggcaccaatgctgtgccccttccca

SEQ ID NO: 28994 - DNA, 201 bp, Bos taurus
cattcatattcttgatacacaaaaaacactaattttgaattatgaatcttgtattccatgttaccctttagacaaggactttttagttccatactatcccyaccggtatttattacatcctcagcactggaattgactactggttgcctgttattatcattcttctattgtcaaacaattgtaaatgctattttttatgaa

SEQ ID NO: 28995 - DNA, 201 bp, Bos taurus
agactcatctagactccacccctggccactgggacttaggtcggggggagggtacactcttcatcagacagcatttcccagcttgtgatgcaaccacttayaccccaggcctgcaaccgcttccatttcatagcctggtttacagcggcctagtctgtgatcagagcacacagcaccataccacatgcaaagacgtgagaa

SEQ ID NO: 28996 - DNA, 201 bp, Bos taurus
ccacacctgcgagagggcagggccactctaggaggagattgaagaagagcatccttagacagaagagtcccagagagaaagctggtcttcactgacagggygaaaggaagtgaggccatggattcacatcagggtaggctgcccctcaccccagaatttagaccccaaaaacaagatcttcagctaggctctaggtggagg

SEQ ID NO: 28997 - DNA, 201 bp, Bos taurus
gagttggttaccaggaaggccccataggctcctttcaaggcagcctccaccgatgctttgtcattcaggtcccctttaaccacctcggccccaaggtcccrgagcacctgcgcctttggttgggtcacatctcgggtcagcgctctcaccacatactttttgccctccaacatggcccggccacagagctgccctgagctc

SEQ ID NO: 28998 - DNA, 201 bp, Bos taurus
ataagaacttgagttctgcctataagccaacatctgatataagacatgtagttttaaaagcatagagcgtacttggtaggaaaatttggtggtgaaaaaamtttgtttttaaatatgtttgagaaatgttttggtgactcttgcactttctggtatttaagttgaggaaattgaaggccatatggattctgtttctgggct

SEQ ID NO: 28999 - DNA, 201 bp, Bos taurus
ctgttttcagtaagaatccaaatgttccgaacctatatatgtgaagggcacacttaatttttattgctgttcatggagcaagaaggtccactcttagtttrttataagtatcttatgtatctcaaatctgaatcaaatgtataataacctttaacctgatcattgttcttttatgcataaaccttcataaatggcctagtt

SEQ ID NO: 29000 - DNA, 201 bp, Bos taurus
ggcctggcaccctctaggcctttaatccacggttcataattcctcagcaaagagaagccactggccctccctctctgcctgaggttaggttagaaagtgtragtgcatgctccctaccctggtgggttcctgggaagcccagagcttggctccgccagggaaagcagcagagatctgagctgcagagggatgtgccttcag

SEQ ID NO: 29001 - DNA, 201 bp, Bos taurus
tctcaaaaaaaaaaaaaaaagtattaattagcatatgttcttgtgtgggttgatagtccagggctctgagcaggcacagccttataaacagggttccaagyagcccgctgcacaccaagtcaggaccagggtgcagagagaggccttcatgcacttctgacagctcagtacctgtgagagaacagaggtgatgcagggact

SEQ ID NO: 29002 - DNA, 201 bp, Bos taurus
gtgcagtacttttcttgttaaactagtaaaagcattactttaaaaagtgagattaatgctgctgttttaaaaattaatgatatataggtttgtgctaagtyactttagccgtgtctgaatctgtgtgcccctatggactgtgtgctcctaggctcctctgtccatgggattctccaggcaagaatactggagtgagttgcc

SEQ ID NO: 29003 - DNA, 201 bp, Bos taurus
agaagggagtcacaggtcatggcgaggtcggcggcggggaggaggaacggaggaagctgactggaagtcaggaagtcactgctgcaggtgggggtggattrggggaatattgaagaatgatggactgactcattcttgtacaggagaggctgggctggcaaaccatgaggtcctccaggttgctaggggctggaatctggc

SEQ ID NO: 29004 - DNA, 201 bp, Bos taurus
gagaaaagaatagcttctttctaccttagaatgggcttagaaatagaaagtagcttacctgttcatagttaaaggtatccaacattcccagaataaggccytggatttctccaagttttccttttccataaactgggtcctaattagaaaaaagttgctaaagattataatttcattcttgttattttaaatgtattttaa

SEQ ID NO: 29005 - DNA, 201 bp, Bos taurus
attttatgattaaatattacaatttaacacttaaaacagtagatttgtggccatttgtgcatgtattttactcatcctaatgggctaaagatcaccttttycaaaagtatagtcctcttgagtgaaataagctatgtcttctctgcttaggcatccatgcttaagcaagtgtgccttatttgaaaactgatccaaagttac

SEQ ID NO: 29006 - DNA, 201 bp, Bos taurus
ctggtccaaccacttgcgttctggtaccttccggcagctgagctaataaacctgctgggctggaaggtggcaggtgggcaatgttgtgggtgacatggccrggcaggcagattttctgcgaaaggaaggcgtggctttcaggtggggcatctctcaggcagatgccctctgaagaggcttgggggaaaagaggaggggcct

SEQ ID NO: 29007 - DNA, 201 bp, Bos taurus
acagatttatttttaaaaaccctctaattattttgccatataagagcaaaattcaaataatataaataacattttggtataaaattaataatatggaaaayagatgtaagccaaccaagaggtaaaaagtttttagcaataatactgtatataaccatcaattgaccatccaggctgaaagtttattttccctttattgat

SEQ ID NO: 29008 - DNA, 201 bp, Bos taurus
acaattggcactagccttcccacagttatctaaactgaggaaaagctatttgggtcctgtggtgagatggtacagaggaaaagaagaaaatcacagtccayggagatgttcagaaaataggtattgactatgatatgggggctgcgtgcttgactcagatgcaatcatttgtgatagaaattttgcacttaaatttggttg

SEQ ID NO: 29009 - DNA, 201 bp, Bos taurus
gctccatttcggcctctgagtctccacctaccatgtgttctcacctgatcccaattcacagaggacgtaggactgagcttcctgccgcagaacccactcaytgcatctggatctgtcctcttcccattcaaggccagttgtcttcctgtgctctggaatccttctgtctcctaccaagaatcttccaatttctccttttct

SEQ ID NO: 29010 - DNA, 201 bp, Bos taurus
cggaatttgaagctgggaacgtgcacactgatttcatcgctcaacaccgcaaagaactgttgcccgaccggaagaccacagccaaggagtttttatgtcaygcagctctggccctcatcctcaaggagaaagctgtgtctgatgtcttcaaaattcagacacaaggtatggaatatttttctatttcttctgctttgcaaa

SEQ ID NO: 29011 - DNA, 201 bp, Bos taurus
gttaatttctctgtcttgtatctgtggccacctgttaactggattgttttttctagtctccttttctcttcccacaaataaaaatcgattgaagcatttgmatttacatgtatgtactgaaataattatttctgttgtgtttaaaaatgtagcacaatattttgatacgaatagagaaaatattgtgactatcagatgttg

SEQ ID NO: 29012 - DNA, 201 bp, Bos taurus
gtgtgggcttcagaattcaagagctcagtggttgtgcacgggcttacttgctctgcggtctgtgagatcttcccataccagggactgaacccaaagccccygcatgccagattcttaaccactagactgccacagaagtctcatatccactctcttttagatgattttcccaaataagtcattacagagaaatgagtagag

SEQ ID NO: 29013 - DNA, 201 bp, Bos taurus
gacaattaccttctatagagttaatcagttgttcagttctccagtacaaactatctctttattattcattttaaacattgaccaattgttggatgataccrtaagaagcaatgtatatttttctgttctctgtatatgaataatttcctattgattggagtattaatagtgctttaaatattctcatgaataagagaatat

SEQ ID NO: 29014 - DNA, 201 bp, Bos taurus
gttagctttaccaaaagaaaagtttatctcaggactatagtttgtatttccagcctccaaaatagggcaggagaaagcagataactcagtgaaatcaccarcatgaccataaattcaattcatataatggcagatcaataataccatttcttttttgaagtcagatcatcattgtaaagggaaattactgttagatgtatc

SEQ ID NO: 29015 - DNA, 201 bp, Bos taurus
ctgataggagacactcccactaagagcagtgtctcactattgggtgtgagtttgagtctggaggagggggttaagaacagtccaaaaacttggctctcacycattttccactgtgattctgaccacagagtaacatgatcaaccttgaagatactggggctttaaagatgggtggatgttcagaacttccagggacttcat

SEQ ID NO: 29016 - DNA, 201 bp, Bos taurus
caaaaaaagatgttaaatgtatttacagctggtgatgctgaatagaaggtccctgaagatgtcaaatatcaggagtccctaccctacagcatgtattataytagatactgaggatgaaaaggtaaataataagcctccccagcccctgggaaactccaccttgcggtgaagatagactcatatacattagtatagatttaa

SEQ ID NO: 29017 - DNA, 201 bp, Bos taurus
ctcagtcccaggttgctgaaatgacttgtaggcccaagaacacacattgtgtgtgcatgtatgtgtgtgtgtgtgtgtgtgagagagagagagagagagaragatgaggccattttgtgagggacctgggggaaaggggagagctctgtaggagaaggaaccagttttctctcctggatccccatgacttgtatgctggag

SEQ ID NO: 29018 - DNA, 201 bp, Bos taurus
ttctaaagtaagttagagttcataagatcatagaacaaagccctctggaattctcccctttataactcagcttgtcctgaaggggccagaaaatcaggccrcagcccagacagagaaaattgtgctacatggaaaatgcagagctgagtctcatctcacacctgcagaatctgctgtcagctgttcaattctaagttctgt

SEQ ID NO: 29019 - DNA, 201 bp, Bos taurus
ccccttacacagatcagactctctctgaggtcttcagggccttgtctcatttcctttttcctaattccttttcttttgcccaaggtttttggatagaaccrtatcgaaagtctagtctatggtaattttagaatttgagctgctggcctgctgatggggtaagtcaaatgggcgttcatgctaataacctaggtgagagca

SEQ ID NO: 29020 - DNA, 201 bp, Bos taurus
catccaatgactttcatcatatatagggtaatacagacaaaaatactgatgaagatgcctttgtaatgtaagctctatgttccattcacaaagttacatgytcctcttaagaaaaatacgacactgaagatcaaactaatggattcttttagttaaaaaatattaagtgggcccacatttcccttccaaaaatatgcataa

SEQ ID NO: 29021 - DNA, 201 bp, Bos taurus
aggaggacagaaatccctatggacactgtagtgccattgggcagttttatcatgggtagatgtaggccaggaatgacttttactcagaataggcataaatrtgtagtttcctccagagtgaagttctttgggaatcaagattaatgtcaatcatatttaacacatttataaatgttcaaaaagaccgaatttattcagtgt

SEQ ID NO: 29022 - DNA, 201 bp, Bos taurus
acactgcctgaagtaagtgataaagactgaattaaccaaaagaagagggtggaggacctagcagacatccaagttgagctaatggtatcttgtctcaagtrttttcctaacacaggtatttcctttgcactaaaattgtgtaatggcacacatgtggaggatactgcttcctcaaattcctttaataagcctctctcagat

SEQ ID NO: 29023 - DNA, 201 bp, Bos taurus
gaaacaagaatggtggatttggggaagaggaaataggaaaacaagtgggatgttggatggagcctagggagggcaagtccaaatgagaagctcacggtgaytgaggacatcctggggaaaccaggggtcctggagggtaggccttaagaagaaaccctcaaagtcaaaatggcttagtcataatttagtccgatactgctc

SEQ ID NO: 29024 - DNA, 201 bp, Bos taurus
ctcatgcataaatttcaataggccataataaatttgtaaacgaattaaggctttcctgtttatccttggcattgctaaaaccacatacttcccttagctasactgacaaaccttttatgataggccagccaatttagagtgtcagtgtcaactgtatattaaacactgtagcgtttcttttattcctttttaaagataaag

SEQ ID NO: 29025 - DNA, 201 bp, Bos taurus
acaacattatgtgtataagggtggtcaactgactatgcatatgcataggaacccctgtcttcttctccttttaccatttctttctggcctggagtattttmtttttgtggatattttagagttaacttcattttggattctagcaaacctgatcattgaaaacaggtgaggccctgtctcaggtgcctgttctgtttacag

SEQ ID NO: 29026 - DNA, 201 bp, Bos taurus
cacctgagcctaatcactcagagcaggtggaagtctctgtctctgggaaccgggctttgcatctcaactctgaagaatctaaagtgagtattttcttggtrataaaggccatggactcccagtaacccagtgagtggctcagggctccacatggctgctcatatttcaaagaacacatgttcattgttatccatttacaac

SEQ ID NO: 29027 - DNA, 201 bp, Bos taurus
tatagatttcaccaagtagctgcaagcctaccgccaccaagaattatttataagctctctttaagccctccaaccatgcacaatattcctgtttaaaatcygtctaggggttaaaattgtagtgtaatgtgatttttccattagacctgcttctctctagttctgtggagaaagaatgagtctcaaatgggccatttcttt

SEQ ID NO: 29028 - DNA, 201 bp, Bos taurus
cccaagcttctacatcaaatcgcttggagactgaagaccagaatctgagtcttcacatttttactctctttcttgagcccacatagtaaattcaggccacrtctccatatcagtaactcaactattgcagaatgactcaactaacagggaacaaaaggatttcacaagttttctggagcattgcatggccttagagggtag

SEQ ID NO: 29029 - DNA, 201 bp, Bos taurus
tctcactgctctaggggctagaaagtccaagataaacatgctgatatgttttgtttctggcgaaggttgtctttctggcttatagaaagagagtcttcccygctgtatcctcacatcatcacctggcagagagagggagcaagctctggtgtctcatcctcttattagggtcccattcttaaggcaccatttaaccattgt

SEQ ID NO: 29030 - DNA, 201 bp, Bos taurus
ataaaagtatacacctcaaaggatcgttgtgacctaggcgctgttgaaatatatgtaaggttttcagcacagtacctggtacattttacatgcccagtaaktgattgttattactactagtagtattactaggtacctgtctttgggcaagttattctttctgggtttcaagtacctctcttctaaaatgaggatataatt

SEQ ID NO: 29031 - DNA, 201 bp, Bos taurus
actctctgttagaggatgcctgcgtgtgagcggggcgcgcgctttggcaccgtccccgtttaagaagcgttctgtttgcaaagtactccaaaagtgacgtyagtcacaggtacttcttaaagtctaggatacaatgagaaaaggaaaaatgtttgtattttatattacgtgattccaaaattatgtttggtttatttcagg

SEQ ID NO: 29032 - DNA, 201 bp, Bos taurus
ttgttactcaaaatgtttacagtgaaatgagactgaattgagagttgaaattctgaatcaaaatattggaatttttagatcaatcaatttagaaaagaaartcattgcattaataagaaactacaaccccttcaacaaaataatgccctcatacatttctaaatgctgtgtgttttcatacataatatgtcatttgtcaca

SEQ ID NO: 29033 - DNA, 201 bp, Bos taurus
ttacctatgcagcacttcagggttcacaaaggactgatatattttttccttaccacctgctggtgatcagcttaaggaatcagaacttcaggcatcaatarttaatttgggtattttgccctgtggaagtaaactactgattctcagtaggcactctgctcaagtttgctcactgagctcaggagggtggagtccagaagg

SEQ ID NO: 29034 - DNA, 201 bp, Bos taurus
tttttttcctatcggccaactcatgtctttaacaactttgaacagaacattacaagaagaaaaatataagactggttaagctaaggtttgggaaggctacraatgcctgctaacagtgctacctctatttcctgtcatcccagagaaggaggagtcacatgggcacagtaaaacctccttgtgatgaaccccactacgaca

SEQ ID NO: 29035 - DNA, 201 bp, Bos taurus
gaatgaaatgagcgaggaaaaatctggaggcaaggctaatgccataattcagggaaaaaatgctgaatccctgaaccaagggcagtggcagaaaagatgtrggaagaaaactggcttgacagacttgaaggagacagaactgataggactggcaaatggatggtgactcaaggacactctcagacttcaggctttgacagc

SEQ ID NO: 29036 - DNA, 201 bp, Bos taurus
ataattaagccaatgcagaaagccaaaaattttaacataaatttgctagcaattttatataattgtattttggtaatgagacaagtaaatgttcatattaytgagaagaaaagggtcaaataccttaagagctttgaattgttttgtattttctccaattgatctatttctttggataatctagcaatttcttcttccaga

SEQ ID NO: 29037 - DNA, 201 bp, Bos taurus
atatatacttaatttcagcttcctcggtgatacagtgaatatatgaattagaaaatataagaaaatggaattaaattttagataatcagaatttttaagtrgaaaagttggagaaggacagcctgttctagaaacaatttaagcagccaagaactgaggaaaagtagagtagagaagaagcaaactggtacctagagagtg

SEQ ID NO: 29038 - DNA, 201 bp, Bos taurus
agcacttaatttcactctcagacgaccttacaaggtggatgcttttattatctccattttataggcaactgaatctcagaggtattaaataatttgcctgygatcgcaaaatccgtagtggcaaagccaggatttgaactcaagtaatctgattctaggatctaggcctgtaaccactatattatgcaatcaattttgatt

SEQ ID NO: 29039 - DNA, 201 bp, Bos taurus
gtgactccacccagtcctgtatttctctaaagcccaggcccattgtgtggtactgcactgctcccccacagtggaaaagaggctattatacgagcttagcrgattcctatccgtgtcctgagacgtcttagttagaaagattaaacaaacaaatgaagaaaaccccttgagctgcccattggtcagattttcattctaaac

SEQ ID NO: 29040 - DNA, 201 bp, Bos taurus
attgactccaaagagtcaacctgagcaggaggtagcgtgggggctttcagttgcagcgagtgaggacgctctaatatgccagctcctatagtctgtaggtycaccctttatatcatctctcttttcatcctaaagcattgtctttgagaaatccaggttaaagtaacatggactttgggcttggtcatgtattcttatcag

SEQ ID NO: 29041 - DNA, 201 bp, Bos taurus
ttgataaagcaatcatcatagaaagaatcagaccagagattagatatctaggtatgtagaaagcccagaaacacattttcattgctgaaattttatctcarccttaaagaacaggtcattataaagctgtttctaatccagatcataggagaatgagtatatcatttgatttgattttataaggttaatataatttaatac

SEQ ID NO: 29042 - DNA, 201 bp, Bos taurus
gcctctgtctcctatgtaccaatacaaagcaaacaacttcctagtctccttctcctccagccgttagtagaacctggctgcttgatgacagcacacagatycactcccctggagtggccccaaagcgctgagcacactcccagtgggcctccagagttaaccacattaaccactacagtcagacagcattaaacccacgta

SEQ ID NO: 29043 - DNA, 201 bp, Bos taurus
cactgcccctgcataagcaaggcaatatagctcctttgtctcaggccccccgccgcccctgcttaagcaaggcaacatagctcctttgtctcaggctcccytttttttatcttaatacagaggcctctcctttcacaatcaactaaggtcaataatcagagtgtcatcctaaagaaaagtaattttttttcctttttttct

SEQ ID NO: 29044 - DNA, 201 bp, Bos taurus
aaaaagaaccatacaggccaaggaaaacccagagagcaatttcagggactaatagcccacttcccattcagatctgggcctagagtgcggcctggggcagktcccaccttgcctcccagtgccctgtctttgttctgtgctggtaaaatcagaatgaatgaaagtcaagggcagccagaggactgcgggggctagggggga

SEQ ID NO: 29045 - DNA, 201 bp, Bos taurus
tcccatggctttccgtttcactcagagtgaaagtcgaagtcccaacggtgtcatttaagactccatcgggtcccaccacctaccggccaaccagtttaacyctcttgctttctcattgccattccagcacaccagccttttcactgcttctccaaagcaacagccattctctgtgtcacaacctttgagatggccccagcc

SEQ ID NO: 29046 - DNA, 201 bp, Bos taurus
tggaaccccagcccctggcccaccggggaagtcccaggagttgcctttcaagtgaggaagagtgatggctaagctcagaagccaggaaataaggtgggctwaagaaataatggccaatatagaactctgggtgttactgatacatcaatcaaaccagaataaaaaagatcagaaatctgtcttttattgaagcaaacttta

SEQ ID NO: 29047 - DNA, 201 bp, Bos taurus
actagaagcaaggagaacctacagcaataatccaggtgagaaaggagcctcacttggcagtggcagtgagagagagaagactcgggtcaaattctgtgtgrgtctggaaggtagagaaagactggatacaggagtgagtgtgtgagaaagggaggagtcaggggtgactccaaagattttggcttgagcaaccaaagagat

SEQ ID NO: 29048 - DNA, 201 bp, Bos taurus
agggggtagtgtttttgagacaaattttatttgaaatttgtatttgaattaagctttggtcctcctggcaatcaaaactaagagaaggatagtgaatggtraaagtctattactgcttcttttttttgaacaattagtgtatgctaaactgcatattaataaatttaaaccctagtgtaatattataatatgttgatcact

SEQ ID NO: 29049 - DNA, 201 bp, Bos taurus
tagtcagggggcaagtgaaaaggagagtcaaataatggtcgctcaagtgtttgccgtttcgatctctgatatgtgttcaaaatctcaaaggaaatctgagkaaatttcctgttcatcggaaagcaattattctaagggcagagacaaatgcttggttagtatgtggaggtgccctaagcacgaacggtgttctaagtgcct

SEQ ID NO: 29050 - DNA, 201 bp, Bos taurus
aaggggtcagagtgaattcaagtaggccagttagaaggctattaatatagaattaaatattttgcttccattttaactagagaccattggatctttaaatsaagtaattacttcccaaactgaacttgtgttgcaaacctctgcccttgtcatctcccaaatatttgtccttctttattgactgggtatagcaacagctcc

SEQ ID NO: 29051 - DNA, 201 bp, Bos taurus
aggctttagcatagtcagtgaagcagaagtagatgtttctatggaactctgttggttgtgtccctagccacagcctatttggttagagcttagcatttttwatcatatatgaacaagaatacttgaatcgtgtttgtttgtatatttttttagtgacccgagagatggtcaaatactggaaacccagtagttgaaccttgg

SEQ ID NO: 29052 - DNA, 201 bp, Bos taurus
ccaaacctaaaacatccttttatcacccctctctatcaaaatctttttatcttttttatggaagtttagaagtaacagtaacactatgacttctttcataygcatccttttaaaaggcttaaaaaatatacttagggatacatgagagaggacaaaagagaaggaaacatagggaaatatagctgatacaatcatacaata

SEQ ID NO: 29053 - DNA, 201 bp, Bos taurus
ggccagcaaagtaatttttcaaaaatgtaaataaggtcattttgctctcccgtttaaattctccagtggcttggtgctgaacttgggataaatttaatacyccttatcatgacttatgaggccttacatgatctaaccttgcatgcctagagattttgcttctcattgtaccatcctctccttcatccattaaaatctaca

SEQ ID NO: 29054 - DNA, 201 bp, Bos taurus
ttgcaggtggattctttatagactgactcaccagggaagctgaatgatttgcagatgctagtaaaaattaaaactgagtcacactattttcaatttgcagrggggatcctataactggcagctaagttaaaacaagaaagtctctaggttctatttttatttctctctaggtctgtatcttgctactaaacctgtgatgtt

SEQ ID NO: 29055 - DNA, 201 bp, Bos taurus
gctcctgggcaggatagaatccgtcagtgagaccagtgggccacctccttaaaagaatatctcaagttcatcatttagccctggccaacatacttttccartttgacctccccttccttatttttctcctttatatccattacagtctagtgaaactacccatttttgtggcccacaaacccatcctgtgtatccacatct

SEQ ID NO: 29056 - DNA, 201 bp, Bos taurus
catttgagttttatttttgaaagtaaaaattttaaagaagtgtatgtatatgctctatttcagctgaccctctgtacctgtggatgtactttgccatttcrtataagggattcaagcatcctcagattttggtttgggatgaggatggggaggctgtcatggaacacatccctgcagatacttagggacaactacatatgc

SEQ ID NO: 29057 - DNA, 201 bp, Bos taurus
ccattttctttggttcatcctttttccaggtcacttaaagaacaggacatttgagggcattttgataacacaactgaatggaactgccttaccaaaatatyccagagttaataaatattgaattttacaggattttctttagacttagtacactctgactatatacatttgggaatatagttgaaattctgtgtgaatgta

SEQ ID NO: 29058 - DNA, 201 bp, Bos taurus
gatttttaaagctacatatattttcaaatattggagttttgtgcttatgtttctatgtctctcacctctcttctaaatctctgccaactgctctgcctcaytgagtttttctattcatgctagatagtaaaaaaatcgacagcaaagaagcaaagacaccaatcagaaaggacttcagtcacagccctgaagggatctctg

SEQ ID NO: 29059 - DNA, 201 bp, Bos taurus
attcagaattgaaggagagatcaaggctgtaccagctaagcaaaaactaaaggatttcatcaccactaaactggtcctgcaagaaatattaaagggatttmtttaagttcaaaggaaatgacattagttaatatgaaaatatatgaaagaaaaaaaataccttattggaaaaggtaaatatatagcaaagttcataaaata

SEQ ID NO: 29060 - DNA, 201 bp, Bos taurus
tttcaaatattttctcacatcattggccatcatgtttttatcaaacctgttttccccccttagaatatattgattggaatggaattattgggtcaaaatgwgattactttaaggccttcaatacatactgacaaatcatcctacaaaacactagtatcaatgttatcaatgtatattttcaagactatcttaaaattctgg

SEQ ID NO: 29061 - DNA, 201 bp, Bos taurus
ctgataatgagattccaggtagcaagactcctgcatgagtttgtaaatctggagcattcttcagtctcaaagtagagaagattaagaaatacaagacaaaratgccatgagagcacagactaagtgatgcatcaagactggagttttattagaagaaatagacataatattaacttgggagaaatgcaaacatattgatga

SEQ ID NO: 29062 - DNA, 201 bp, Bos taurus
agtgtgtgtctgtgtgtgagtatgtgtctgctgtgtgtatacatgaaaatagattatgaaagattaccacatgcaattatggaggcccaggagtcccaagmtctgcagtcagtgagttgaagacccaggagagttgattacatatccccagtctgggtccaaaggcctaagaaccatgagagctgatgctgcaaattccaa

SEQ ID NO: 29063 - DNA, 201 bp, Bos taurus
ttgtactttaatatgccctaccgatggttgaggcagcaaacgtttcagtgctgctccagaaaaatttagcacaagctaaagttcatcatcagattgtttcyttatattagaaaaataccataaaaatgttgaattttggcttacctttttaacaagatatggacatttaaggataaaataaagcatttattttaaaacaac

SEQ ID NO: 29064 - DNA, 201 bp, Bos taurus
cacatgctaaatattgttctgatgaaagatccatttattatactggacatgctttcataaacatcctactttcttttttcacatgaaatcaaaggttacawggtaataattatgcatcagaatagatgctttcaaaataggcctctttctacttatttgtcaagtggtaaatttttcttttattatgtgtatttaatatgg

SEQ ID NO: 29065 - DNA, 201 bp, Bos taurus
attctaaaaataagactgctgttgaccccattctttaagaattcagttttatgagatcattttctttctttcaaatgaacattgtaaaaatatgaactagktttcaacttaaattgaaaacaaaatttaggaacatgcaatatattcatattggaaaattcataaaaaagttctttgctttttatgtttaatataaattta

SEQ ID NO: 29066 - DNA, 201 bp, Bos taurus
ccatgaaattcaagatggataaaagtcaatgtttcaggctcatctacttccagctttctttctataatgaggtaaaaacaagctttaagtgtgtttaaagrctcttctagtttaaaaaagaaagaaaaagaaaaatagctttatcagtttctgtatcaagttctaaaagatagtttctattccaatatgctaaagattatt

SEQ ID NO: 29067 - DNA, 201 bp, Bos taurus
atcacacggaaaaacagaaacttggtatttctttggcaagctagactcagaccactatgacaagaaggagaaggaggattaagatggccaggagagaggasactcagaggacagtgaggacatgggtgagatgaatgattacaatgagtagcctgatgatggagaatcattgagacggacacgaaagcaacagaaagaatt

SEQ ID NO: 29068 - DNA, 201 bp, Bos taurus
tgcagatgtagaaaatggacttgtggacacagtgggggagagagagagtgggatgaagggagaaagtagcctcagcgtatttacaccatcaggcatgagaygcatagctggtgagaagttgctgtagagcacatggagcccagtgtggcactctctgatgacctagagggatgggaaggggcatggcttgggaggcttggg

SEQ ID NO: 29069 - DNA, 201 bp, Bos taurus
acaatctacctcttttaattgctactttcttttgaatgaacttcctcttggctcaatgatctaaataaagttttagtagaagaacattaggatgtgtataraaaaggaagaatgggcagtcatatcaagaaagtatggagaatacatgtatacatcttatatcaaagtgtattttgcctcactggaaaacctcctaattga

SEQ ID NO: 29070 - DNA, 201 bp, Bos taurus
gggagagactgactgggggaaactgcctcttgttctgatgggtgggccatgctcagtaattctttaatccaattttctgttgatgggctgggctgagttcrcgccctgttgtttggatgaggccaaactgttgacccacacctcaccagacactcctggacactcacaggcaagtctggctcagtcttccactggcctcca

SEQ ID NO: 29071 - DNA, 201 bp, Bos taurus
ttggcctctctctagagccctaaaggattcttctggtaagcacctggcatgaacagaagcttcatctcactggcaatggtcctaatttaaactgattttcyaggcctcactctcttgttctttatgggtttgcatggtacagacagggccccaggaggagaggtggttctgtgaagcctcatactcctttagagtttaaga

SEQ ID NO: 29072 - DNA, 201 bp, Bos taurus
gatccatttttcactgtgagggaatttggcatccttcaagttttactaccactgaatggaagatcaagttaagcttccaccctgtaccttaagcaccctaytgatttgtaacagcatttatatgaaagtgaagagaagtttatcatgcagaatggactttaaaatttttagatttggaaacatactgatggtagtccagac

SEQ ID NO: 29073 - DNA, 201 bp, Bos taurus
gggcagagggggcaggtggcagggggaggtcaggggtaaagtagacagggaaagcacaagaaaacagacagtaaattaattataaggtcatgtcaacagaraagtaatgcacaagacaaacagctctttatgtaaatattaagtcagatttatttcttatcacttgggaaaggataagttttattctagaaatgactgtat

SEQ ID NO: 29074 - DNA, 201 bp, Bos taurus
aattttgcatgagctcaataataattgttgtttgaagccataacaatttctctcacttgtataatggaagaaaagtttttttttttctcttaatggaaacratatagcctggaccctgtaaaggtgcacacaaatattgtgaatactacccacatgctgacagattaacagttcttttaaaagttaccattaaggatccaa

SEQ ID NO: 29075 - DNA, 201 bp, Bos taurus
taagtgtttctccctatctcatctatattatttccaaaatcacttgcttctatcttggaatatgcatatttttgacattagcaaaaactgctttagaggtrgattgctactaatatcatatattttaatactgtcaatgtgcttgcttatttttcatgtaccatctgtaaacctatttttgtccaactctgtatttatgct

SEQ ID NO: 29076 - DNA, 201 bp, Bos taurus
agttggctgtgtcagactaacaagccagaaccaaggagaaagcatgtctgctggagagacaagcaggacatagggacaggggaggaggaccagacaccaayaggtaatagtaactaccctcactgtttcatcaaccacagcagtagagtctttagagagtaggcaacagtttggtgagaaattagcaccaaggaattccaa

SEQ ID NO: 29077 - DNA, 201 bp, Bos taurus
gaaatgaatttctcatctaattattcatttctgtttatatattctttaatgatatgtttctatggttaccagcgttgttaaacgctgcctgtgtttcattytgctttgatgctatttgaggtagcatgccagcagaagaggttcacttgtaaatgaaagatgtgatttaggcatgtatttgacccaaggttgcgtgttctc

SEQ ID NO: 29078 - DNA, 201 bp, Bos taurus
tagagaaggcaatcttgaattttaaatttcgtaaggactggttgggttctttgctctggatgatgggtactttgggttaacagactattacattgatgacrtgcattatttgcctctgttgcactgattaaagggtctctccaaagctattgctggaatgacggtgaatccactattactaactgtatgtgcgagtcttag

SEQ ID NO: 29079 - DNA, 201 bp, Bos taurus
aatgttcatccccactaggtatggtgtcagaggaggcctagtagatggtcaggattttcaccagcccccaacaatcatgagcttcccatctcaatgtgacrtcagtgaaggccacatgaggagtagtgatgaggtactgctagagagttatcagtgcaaacatagtgaggagcttgaatgtttgaatgctcatccctatcc

SEQ ID NO: 29080 - DNA, 201 bp, Bos taurus
gtgtaggccagatgttcctctatggcttgtcatttgcaagccctgcccttggcagctctgtcccagggctttcacacattgcaaagaaaatcagtcacaayaaaaactgcctgatgagagactgttgcacactttgaatagagtgtgtgtgcatggtaaatcacttcagttatgtctgtctctttgcgactttatggactg

SEQ ID NO: 29081 - DNA, 201 bp, Bos taurus
gggtctcctaaggttgcactgagatgttggcctgatctgccatcatctgaaaggttgaggttggaccagatatgagagccagatggaggctctcgcctggragcttggccatgttcaggggatgctccagcatcgtggcccttgggatggcaaacttcttagctggtggtcgtcctttgccagaccaagtgttccaatgga

SEQ ID NO: 29082 - DNA, 201 bp, Bos taurus
acagggaggcccggcgtgctgcgattcatggggtcgcaaagagtccgacacgtctgagtgactgaactgatctaatctgacccattggccttttttttttwaattgagcttgcatgagctgttaatgtattttgaagattaatcccttgtcagttgtttcatttgcaaatatattttctcccattctacaggcctttagtt

SEQ ID NO: 29083 - DNA, 201 bp, Bos taurus
gatccgaacaaggaagccacatataattgaggaaaaggactgtaggcttaagaagtaaagttggactggatagtgacagactagtatcaggcattcttacrtatgtctagccaggagggggatttttttttttttttttaagtgatgctttctcctcacaactgaataacaaaaagacattctgcttcttgacaagtcgaa

SEQ ID NO: 29084 - DNA, 201 bp, Bos taurus
gtgccgttttcttctatcctggatgaatggaagaatcgtggagacatttctagggcacagaggacaacatggggtgaattaataaatttgcttctgaaaaygccgagtttaacataatgcaaggacattgctatagagtgcatgtttgtgtcctcccctcaaatttatatgttgaaattctaatgcccactatgatggtct

SEQ ID NO: 29085 - DNA, 201 bp, Bos taurus
ctatacagtaaaattttttacaccctgatttcctagtgccggtggctcaggaaggctatgaaatcttccataacttaaaaggaccatatgttcattgagarggaattactagaaatgatgaacgtaatttttcttctttgtcatgactcaaaaaccaagttgggtctggggcagggaggtgaggcctggcttcagataagg

SEQ ID NO: 29086 - DNA, 201 bp, Bos taurus
ttctaaaaataaaccatctcatgaaaaatactatgagagtcatggttcaaagattaataaatatttacattgcgtgtgtgtgtgtgcattttagacacacrtttagaagacaaaatgtcaaagaagagcctcgagagatgccagctttgccccgcacatctgaaaacatgatccaacaagaagaacagttcttcagtagaa

SEQ ID NO: 29087 - DNA, 201 bp, Bos taurus
gacagtgttacatacccacaagagagttttacaaatgaggtgagactgtgtaaccaacaatggaaattaatatgcttttatggtggccggagatgaaaaartggcttcattctatagccatcacaagtaagacgtttgctatttatgaagtttagattggcatttaaagtgttgagtgtatgtggaatacctaaggatttc

SEQ ID NO: 29088 - DNA, 201 bp, Bos taurus
tcagaagtgcaaaataagagaatgcaataattagaactgtcattatattctcttcctctgatgctgatattagctggttttaaatgtatttttaacctttrgtggtcgttattaaatttttaacataaaattcaaactgacttcatttttttatacttaaaaatgatttgaaagaacagattcagtttaaattagctgatg

SEQ ID NO: 29089 - DNA, 201 bp, Bos taurus
ttaccatctgtcctcatcgttaaattggctggcctgtcctctctattcagaactaattcaagggcgccaaggtttcaggagccatggcattcctgggggcrcatctctgcagatatcacgagggaaattttctagacttcgtaattcccctgtgcttctcggccaggctcctagtgtaaagaaaagttagataatgggtgt

SEQ ID NO: 29090 - DNA, 201 bp, Bos taurus
ctgtccagtgctgaggctctggactgttggagaagcgtgactgtggttgtgctgtctgcctaacgccttacaacaaagagttctttccactcctggggccrtgacacagcatatgctgcagccaaaccgacctcctcgtttccaaatgccttgcccttccccagtggaatggccacattctcacatcctgccttgctttgg

SEQ ID NO: 29091 - DNA, 201 bp, Bos taurus
tggaggggccagcactttggggcttctggccacaggtgggcaaggacttcactgtgcccttctccatctcctggctcactaagtcctggaggtaaagctgygcaggccagcatggctgtgggtgactgcgtgctgagtgttgatggtgagaacgcctcatccagcatggccgtgggtgactgggtgctgagtattgatggt

SEQ ID NO: 29092 - DNA, 201 bp, Bos taurus
ctgcatccctcgggtgtgtgtagctggagcggtctcccagcaagtaagcgcagacaccactgcggtcaaccagcatttgcagtcaccagcgcagtatcgtraatggtttcgcctacccgcgggccggcgctccctagtaaactgactgcctccagccctccgaaccaacccccggtttcctgggttactggcctctgcgct

SEQ ID NO: 29093 - DNA, 201 bp, Bos taurus
ctgaaaggccagagagatcaactccttctagagaagtatttttctctgtgtttataatcacttgtgtagtgccccctgagggaggaactggagctccacayggttaattaacttgatcccaatatggctagcaagaggccaacctggaactcaaacccagaccctaaattgtatggtatctctacaacaccatgttgccat

SEQ ID NO: 29094 - DNA, 201 bp, Bos taurus
gtttattgtgagggtactttgtgggcataggtggattggaccatcagccctatggccaagccctgtgggaccccaggaatagttgctcaatcaggcctcaragggagaggagggataagggtttgtgagttgtcagtcccagctgaggtgttctgcagttggagggcctcagctctttgaatctgttatttatccttcaat

SEQ ID NO: 29095 - DNA, 201 bp, Bos taurus
gactcagaaaatcattctgttctccaaagagaacctataatttatacgactgtgattatcccactggtcagggcctaggtaacattcagcattccattccrtggcactctgacaacactggagacaggagctgtgctcagtttttttaaatacatgtgtttaaagcagatagtgactcaaaaatgaaacagggtaaaaaaa

SEQ ID NO: 29096 - DNA, 201 bp, Bos taurus
tgtcaccccgactcctggtccctcccctgggggatgacagtgattttagtctgattctctttgtctcttctcctcaactccctatcaagcttttggctggrgtttagctcccagatgttagcctccactaactggcaactgattgctccagtgtttttgataatgccttggccacctcattcgaagagttgactcattgga

SEQ ID NO: 29097 - DNA, 201 bp, Bos taurus
gattgaacctgcaccctttgcagtgaaatgtggatttttaaccattgggcctccaggagagtcccatcacaggactcctttaaactgtcatcatgccttaraaagtgaaagtggtagttgcttggccatgtctgactcactgcaaccctgtggactatagcctgccagggtcctctgtccgtgggattctccaggcaagaa

SEQ ID NO: 29098 - DNA, 201 bp, Bos taurus
agtattttaaattgcagtattttgttggacaaaagtcctttgataggttacctgtccccagtattcccttgactactaggattcagatttattaagatackatcctttcctgcatgatgttttagactacttatgaatcaagtcatgctcttatacaacttaggaagttaatgtgcaagtccttttcaaggcatctttggg

SEQ ID NO: 29099 - DNA, 201 bp, Bos taurus
cagagttcctcatttgttccttcattactgtcttgataaaggataactatcaaaacacaacctagacgctaggtctcactgccaccagctgggcctgttamtggtacctatccacctttctacctccactggtgcctgctccaacgcatcacacacttgctaactagacacttccttcctggccaaataccacttatttct

SEQ ID NO: 29100 - DNA, 201 bp, Bos taurus
tgtaatattatttattacaagagtggttattataaactgcatatgactgtgaatcacttactgattaaaaatagcgagttcaaacagattcagtccatcaraagtcagcaatgtaacattcgttatacaagggatttcatgtttccggctatcagaattttgtaactccattgtaccagtggttgatgtggcacttgataa

SEQ ID NO: 29101 - DNA, 201 bp, Bos taurus
ttcttattttgcctctgctactgatatgctaagtatctcctttcttgctttgatttgccactttttaaagtgaagatagatgttgggtgagatgatgttcrttttctttcacctccaaaatcctcctaatgattccaaaaatcatcttagacatccagatatattttattgtacccttttttctaagttgccatcactcct

SEQ ID NO: 29102 - DNA, 201 bp, Bos taurus
aaatgtgttgttgaaacgctattcttgcaatgcatctgtttagaaagcaaacatatttaaaatgagataagtgaaaataaaatattgcatcacacagagcytttcagtttaaaacaggtgggatcttgaattaaaagcagcatgagtggaaggcattataaaatatacccacctgtggtttggagctagaaagtttggggc

SEQ ID NO: 29103 - DNA, 201 bp, Bos taurus
ccatggggccacaaagattcagacatgactgagcgactttcactttcaggggactttcattgtcttaaaaaggaatgatgtggtaagaggatttgagtatrtgccttttctcttcaaataagaagtattaaagatgggaaataatttaagagagccgtgcatcagcttatcatggtcaggttaccattttgtttataattt

SEQ ID NO: 29104 - DNA, 201 bp, Bos taurus
tggccaacccaatattagtacattagcatagagaaaactatgtaaataaatacacatgtacattgggcaatgcatgctgaaaaatgttttactgacagggwctgtgacagtaaacatttgaggactgttgttctggattatattctttatgagagcagagaacctctgcatcttgttcagccctttgctgtgagtggcagt

SEQ ID NO: 29105 - DNA, 201 bp, Bos taurus
tatttcctgcttctcccagaactccttggcttctgaaaattttccctccaagactctgctcctcctccatcaatttgtgtgccttctcctcccccaccagycatccagggcaatccttttgggtttaaaataccagccagtttctcttgcttggaaccaagaatcctaactgacaaaaagttattagaatttctaaaattc

SEQ ID NO: 29106 - DNA, 201 bp, Bos taurus
gccttcttttaaaatttttctatttggacttcagagaaggcagaaagagaaagtaaaggaggcagttctagctgtgaatatgacacttcattctgattccwagtaacctaaatctaaagcccattttactaactggccaaacgatgctgttccaagagtggacctgatacaattggatggtcagattctctctctagagaa

SEQ ID NO: 29107 - DNA, 201 bp, Bos taurus
aaatactgattttttctggcattcctttaatccaactcttcctcatcttgtaagtctaaatttacttaccatttgcactataataacaaataaatcacacmaacagaaacttaaccagcatattttctgaagttaggccatgttgaaggaaaatttctgctagtgcacatccaaactggtagaactactgagacccatgaa

SEQ ID NO: 29108 - DNA, 201 bp, Bos taurus
caggggattttaccatggagggatcaggctgtagctgtctgagctcactgaccaactttagcttcactaaaagtagagcagacagtatatgcttcctgatrtaatggaaatatgaagtctacagcatcatctctgaaaaatctttactttgcaaattgaatctgaattcattcaagcctttaagctaactaacttcctttt

SEQ ID NO: 29109 - DNA, 201 bp, Bos taurus
gtcctgctacattagttactggtttgttttcccttcacacaggcatgtttgtaccctgacataaactgcatcctgtttccaagcagatgagatccaaatgyatgtgagtgattcagaacaattagtctgcaagtctgaataagcagctccagtttcagactgtaggttaatagtgtaatttttgtagaaggataaaacttt

SEQ ID NO: 29110 - DNA, 201 bp, Bos taurus
ttggaaggtttccagctctttcaaccaccagaggagatcgaatcaattactttttttgtattcacttaattagtggtgcccttgtggcccaaagatatgamaataaaaccagagaataaacagtttataagatggtcacttgggccttgatgagaacctacatttagaaattttataaaagacatctgctgaatatcatga

SEQ ID NO: 29111 - DNA, 201 bp, Bos taurus
gctgcagaatatttcactgtgttaactactgagaaaagtttgtgtgtttacaaaggcatagattaaagaaaacatttcaagagccttctttcagtagaaaygcactttagtccccaacagattgatctagaatcttcagaaaaacaagtgcatattttcctatgagagtgtgaagaataactgataggcaaataagggaaa

SEQ ID NO: 29112 - DNA, 201 bp, Bos taurus
agtttaatgttgctcattgttaagaaaataagttctctgagacatcttccctagctttccttgtctgctcacataaaaatttaacttgagctatatacggrgaataactggctactagtcatttaattcaggaatgtaaccttgggaaaggagtctattggatagattcttaatttcaagagccctttgaatctgaaagta

SEQ ID NO: 29113 - DNA, 201 bp, Bos taurus
tttttgacaggtaacctgtttaagaattcttacaggaagaattttaatagtaatcttttattaaagtgtgttttttaaagtatgacggcaggaataatatmtttggccagataagacttaaatctatccatctcagatgctttctttcccacatacactgtaaataattaacacatattagttggatgtgttaatgtttca

SEQ ID NO: 29114 - DNA, 201 bp, Bos taurus
acagttattcaaaaataaaacatttggtaaggatagtaaccttctgaaaggcattgtatatcagcatcctcaaaatctgaagaaaattgggaagagagagmtcagaaaagcaacaatatctatatgaacactgaatagatatacaaactgaatagatagaagagggaatttctactatgtgttaaatgcattttatacctt

SEQ ID NO: 29115 - DNA, 201 bp, Bos taurus
cactattttggaaccatcgaagttaactcacttatcatctctctgacaagtactataaagacagaccagcaatgtgtgaacaaaagataaatagcagcagrtctgtggatggggaaattcaattcccaatgaactgaatagagtagagatgaccttggctgtcctttctggaatatgtggcatatgattactctccagtga

SEQ ID NO: 29116 - DNA, 201 bp, Bos taurus
gttaatttctactgtacaataaagtgaatcagctatatgtgtgtatatgtatatcccctccctatggagcctccttccccaccatcccactcctctaggtyatcgcggatcatccagttaaattccctgtgctatacagcagcttctaactatctatttcacacatgatagtgtatatatgtcaatgctactcaatttgtc

SEQ ID NO: 29117 - DNA, 201 bp, Bos taurus
ggtcaggtactttgtctccccaggacttaagtcaacagctatttctcaagtggagtgtatgtttttattgcacagagaatgactgtgctccaaaaccacayggaccatcctctgtgaaaatgattctcctgttggggtttgccacaagatcaatacggtatctggagctttcactgacgctgtgcatatttcctcttttgt

SEQ ID NO: 29118 - DNA, 201 bp, Bos taurus
ttgatttcagtgcattccaaaataagaaactgttcttctctaaattaggatacaatgtgaatagctttatctgtttaggctacagggttgtcagactttamgttgttacaagtatcactggtgggaaatgattcagcatggaatccatggccagactcagtggaagaatcacaatctgagccactggacatatggaacaaa

SEQ ID NO: 29119 - DNA, 201 bp, Bos taurus
aatctctgaagtgataggctattacttttgccatatttgactcaaagtgagtcactaggtccagcccacactgaaggacaatatttaaataagggcatgartattagaaagtgtgaatcctcagagactattttatatactgctttctatgcttctttatgcatttcatccaatctcagaggtaaccactaccctgaaatt

SEQ ID NO: 29120 - DNA, 201 bp, Bos taurus
gccttagaaagtagaatcataagttagccgtaattttcatggaacttaacaaccttagaaaacactcttttaatgtcttttctcgtttccccctattcttytctatagcttctgtatttttatactagaattctaattttgtcctttttgaataaccattttataataattatatctccctcttcccatttgtaaaatctc

SEQ ID NO: 29121 - DNA, 201 bp, Bos taurus
tcaacagaataggaattatattacagaataaataaatattttttaaaatatcaataaatatctagtcatcaataaaatatgaaaggcatagaaaatttcaragtgacatcagtaaaataatggaataggaggttctagtcctcaactctccacaaaaatactgatttcgataattactcacaaacaagagttactttatgg

SEQ ID NO: 29122 - DNA, 201 bp, Bos taurus
gataagagaaagattggagctaacctataccatgctttctgtttcaacttgtaagtttttaaatctgtattcatgatagtttaatagtctgtaaacatatrtcacatcataaatttgtgttggaatgcacagggtaaatactttacttgaaaatacgttatttgaatttaatgcacgtctttcaatttcagggagtagaaa

SEQ ID NO: 29123 - DNA, 201 bp, Bos taurus
ccttcactgtgctacttactgtgtcatcaaatcaaaagtggctttaaaggtattaaataattggcttattttaacattcaaaaacaaaagttagtgagccrtcaacaattggtctaagattttattgacactttggatgtgatgaatttgattattaaatatcagacccattcttctattcaagctgagagcaaaaataaa

SEQ ID NO: 29124 - DNA, 201 bp, Bos taurus
tttacagccgacagaattacatgaagctcattgttgctgcagatgataatcagatggcacaaggatctctgttttgggatgatggagagactattggtaartcttccatttaggagtgttgggggagtgtgtaatttcctcagttctgtctcaccacagcaaaaatttgaagcaatggacagaccagtgttacagcctggt

SEQ ID NO: 29125 - DNA, 201 bp, Bos taurus
acacacacacacacacaagctgaaagtatttaattattgcttaaaaggttagataaaaaggatcaggaatgtgagtcatagatttaggcctggttcaccarttcactgcttggtttgagtcaatttcacataattaactttttggaaaaataagctgggaaaatggaataatatgggtactgaaggcccacatatagaaat

SEQ ID NO: 29126 - DNA, 201 bp, Bos taurus
taagttgtcagttttgtccaccaaataaaacataattctcaacttttatgttgcacattttttttcagttgacatgtataaccctaaagtgtgggaaagtkaatgcctttgagattctgaatcagtgggaaatgggacctaagggataaatgcttctccctttaatcttttgtataaacaccttgaaatgaatttcataaa

SEQ ID NO: 29127 - DNA, 201 bp, Bos taurus
ggttatttttttcaaataaattgaaacagtaatttacacacctttgttagagtattcattgttaattttctattcagagaagtattctgattctttctaaytctctagtggcatattcagcacagagggaaaaatgacaagagtatagactcattctctgtacagttatcttttcctgcaatttctcagtgtagctttgac

SEQ ID NO: 29128 - DNA, 201 bp, Bos taurus
gcctttgagaattattttaaaaactatttctggtatctttctaaaaaaatgtcagcgatatcaccattggctggcagaatgtgttgtcatccacatatcaytggggagtaatagcttctcactcaaagacttcaacctaagtgcatattcagaaagactcagggtcccaactttacagtattttttccagttgacaatttt

SEQ ID NO: 29129 - DNA, 201 bp, Bos taurus
tgatcaactcaatatccaattttttcagtctcaaattccaccctttgcattagttaaagtaaatttgtaaaactgaagcatcagtacatacatagagatgyatacaaattataagcatacagctcaaaaatatttttacaaaataaatttcacaagatggaataattcacaaatttgtgtgtcagcctgaaagagaagcat

SEQ ID NO: 29130 - DNA, 201 bp, Bos taurus
taaattctttataaatattttgacgaacataatgcttgtttaaataatagcaaaaatactctgtaatacttaaatgtttcaatgtctttttacaagatcayacagcttgataagtgcccactgccaagatgagtgcccattgccatgctatgatgatacatataaattaatttattgaagagctaacctctgacttagtac

SEQ ID NO: 29131 - DNA, 201 bp, Bos taurus
taaagtgagtacctaagtcaacacaattctacctgcatacagtgacctctgcagcctgattgctgagtagaagttaaataacttcctccagcttaagttamatatctttgagataccgaagttaaatgtgcagctaatttcaggaggttgagtggtagattaggaatatttaaatgaggaagtcttctagaaataaaagac

SEQ ID NO: 29132 - DNA, 201 bp, Bos taurus
tgggtttaaaccatgcaatcttcattcctgaattgaaatgaaaatggagcactgcaatctgcagggaagtgaaggaatgctcatagttcattaaataatgygagtagtaatgaggtttacacaaatcaaacagtgtgttaggtaattgtaatgttgctttgtggtgaaccacctgtcaggaagcacttctagccgaaggct

SEQ ID NO: 29133 - DNA, 201 bp, Bos taurus
tgaaaaatattaagaaagagaactggagagaaaaaggaagaaagactaaaattggggcagcagggactaaaggaaccagggaagcagtcaatactatgacygttttatcaaatgattacacactttgacacttattggagaaacttacctattttaaaacacaatgtgtatagagaaccaactctgccaggcactaaacta

SEQ ID NO: 29134 - DNA, 201 bp, Bos taurus
tgtctcctcccactgaagccagggtgaacctggaacctagtggatggctgcaggcacaaaggtcactgtctgtcctacctttgatgctgaaatattatttmtgaatttcctgagttggtccccaataaagaccctcctgcccaggatcgtttgaggctgtaaaacaagaccaagtttggttcagaagcaaagaaagcttgg

SEQ ID NO: 29135 - DNA, 201 bp, Bos taurus
catttctaaaacctcccatttggaattaagcttctctcttaaacattttattaccactttgtattatagaacttactacagtattgtttcacattctgaayatacagtgacttgtgtgtctcttttattgtgtgtgtgtgtgtttgtcacttatttgtgtctgactctttgtgaccccatggactgtagcccgccagactc

SEQ ID NO: 29136 - DNA, 201 bp, Bos taurus
ataaattcttcagtcatatttccaaaaattaatcactctggttaaggttctatccattcttacagccctcattctcaatgcaaagagaaaaaaatgccttmtacttcaagtaaaaacaaagcctatcaagtaagaatgattcagcattctaattacctcttaaacacaattttatataaatcaatctttgttttaatcatt

SEQ ID NO: 29137 - DNA, 201 bp, Bos taurus
gtcagaatcacaagacctaactccttcattctgggacagttcctgtgggatcaggagagggggttggggctgtgccttcattttctcagtaatgcctaacrcggctcccaatatctcccccttattttttggagcataagtatgaaactcagtacataaagcagaaacacttcagttgagtattctgaaaaggcacggggc

SEQ ID NO: 29138 - DNA, 201 bp, Bos taurus
actatgtaaagaaggtgcatggattttatgtactttgaactttacaaactgaaattatcaaatacttataatttatgagaatgaattactcccttaaaagrcattctccatgtgttaagtttgaaagcttatactcatcctttaagtactaaggcaaatacttttttttttcctaaaaaccattcccaaaatttctatggc

SEQ ID NO: 29139 - DNA, 201 bp, Bos taurus
atgcccatcatgccttgcaaaccattgtatagtaatgttccaaaattcctcttatcatagttcattaatattcctcagtcactacaaattatgaaatatarcattcatttctacatatgaattctccagcagggtcatggctattgtttaattgtctccaattagtagggatgaaaatacttactatacaagaattatagc

SEQ ID NO: 29140 - DNA, 201 bp, Bos taurus
cttttttctaacctgatagaattgaaacagcaacctgattattgacattagtgatgaatttgagcatatgtttcttggcccctttactgatcactgccttrttgtggcaaaagggcacataactcaatgaagctatgaaccatgccatgtagggccacccaagatagatgggtcttagaggggagttctgaaaaaatgtga

SEQ ID NO: 29141 - DNA, 201 bp, Bos taurus
ttctctgacaccttagcacaggctgcatcactgtgagtacatttcttgtgaactgtgtcaaaggcagcaagtattactatgatacccacattctaggtgcygataaatataaccagtatgatgactatcacagatgagaatcaagctctagaaaaggaagatcattaggttatactctcacctctcttttcctcatatatt

SEQ ID NO: 29142 - DNA, 201 bp, Bos taurus
ttccagatttcaaatctatttttcatgctgcttgtcatatagggctgacatgtgtcacaggatgctgctacatgctgaagtgatgcataaccagacaaaaytttcaaagaataatacattttaaatgcctgtttagtttgatgtactcagaaaattgccccaaaaatcaacatttatgatagtaatataaagagaacaaag

SEQ ID NO: 29143 - DNA, 201 bp, Bos taurus
cctcaaagtcctacctcaaatattcattcatccttttaaagagtttttcaggagcgaaatccagtagctcgtctctggctgaggagaaaatagaaaatgakttgacttgttttactcatactactatctctgtacacttcatcacttaaatcaaaaacttcccatgtgtatttctcaggctaaaatataaaagttgtaggt

SEQ ID NO: 29144 - DNA, 201 bp, Bos taurus
gaaaaaaataggcttcaagcaaaaaaaaaaaaaaaaggcagaaagagcatacgtatgtactcctcttatatccctaagtctacctcacctacatacatgartctaataagaaatacagccttaataagaaatgatggggggggggggaagagatttaaaaagatttatttagcatagtgcttagaaaacaagaatccagaa

SEQ ID NO: 29145 - DNA, 201 bp, Bos taurus
ctctgctttttctgcttcagactagaaagtggtctgtggcctcacaaaggaaaattatttcagcctcccatactttaagacttctgaagtacatgcgtgtrtctacttccatagtttcctgcctacaggtaaatatatgacattaaagagtggctttctatttttatccaagtgatctgtttgagtgtttaaaggtttcct

SEQ ID NO: 29146 - DNA, 201 bp, Bos taurus
tactggagtagggtgccactgccttctccaacaggcctccctggccctcacccatctcccaaagtttgctcaagttcatgttcattgcatcagtgatgccrtctagctatcttgtcctttgatggcctcttctccttctgtcctcaatctttcccagcatcaggaacttttccaatgagttgtctcttcgcaacagatgac

SEQ ID NO: 29147 - DNA, 201 bp, Bos taurus
tttaaatatacaaaactagttcaaaggaaaacgtgatacttttcaagccagtgaaaatatgtcttcaggtggaatgtagcaggaatgccagtttggtccaygtgtttttcactctgtcctttcacacttgcagctgaactgtgtcctctacagtcaacattccaagcctcccctgtactgttccttctgaaagcctagatt

SEQ ID NO: 29148 - DNA, 201 bp, Bos taurus
cttcatctgggctcaggttgtctacactctgaagccctcaaaagcctggaatttctgtttttgctgtaacattcctaacaaaagccatggatgtctgttgrtcagatagaaaggaagaatacgtgaattcatagctcaaacattcccatcctaacattaggttcattggccttaccctgagtatacctgggtgagtttatc

SEQ ID NO: 29149 - DNA, 201 bp, Bos taurus
actttttaaaatctacagttattacttatatcacagtagatgatacaaatgtgatatatgtaatgtatgtgtgttcatgtgaccaagaactaacagataaygaaaaaaataaatagttgggtttgagcagatttactttcatcttcaagtttgtttaatgttgtttttatacaacattaaacattacacattactacaatg

SEQ ID NO: 29150 - DNA, 201 bp, Bos taurus
taccccaaaagaccaaggacaaagaatggcattgtataagcactgtaactcaagcaattagccaggtaatggtctgtggggttcattatagcagaatgtcrattaaaacactcggaaggagattatacaaagcccttagatttcaatcttataagcgatccagcaagactaaattatagtaaatgtcatatcactacagta

SEQ ID NO: 29151 - DNA, 201 bp, Bos taurus
atccctaaatcagcttctccaaggaacctgatggaatctgagccagtgccggccaccacccaggccactgcagtgacagccacagacagctcgataacttyactgacggtctatggcaacattctttccactgctgatgggtgggagacggcttgtcacatatggatcatctaccagaaggacatttatctggactctacc

SEQ ID NO: 29152 - DNA, 201 bp, Bos taurus
tgagcgactgaactgaactgaggactaagtcttcagttcttttatcttccaccccactctaccccaccatagatgtcatcaaggcccatgattttagatgmtatctattcactgaagacaatcatattttcattttcagccctgacttctctaactaagctctgggccataaatactattatttaaccaacattcacattt

SEQ ID NO: 29153 - DNA, 201 bp, Bos taurus
tgagaaagagtatatttgtcaataaagagtgacccttttttttttttcccccaaaataggaaacaacagatttccttgacagaatgacaacttggttattygaatttatagaacaaaacaacttagaagtaattaaaatcaataaaattcattcaggaagaacatatgaatgagaacatagtttattacataagtgaatta

SEQ ID NO: 29154 - DNA, 201 bp, Bos taurus
cttttcagatatttactggccttgtagatttcctcttctgtaaattacttcctcatatcctttgtgaatttttctacaagtctaaacagggctatttgcaygggcctggaaactgcatagtcacacagggccctgcacttaaaagggcactgtattttgtataatgttctgctgttattgttttgaaattcttagtaattt

SEQ ID NO: 29155 - DNA, 201 bp, Bos taurus
gtttgagtgggcagtcccttggcagaccctgtgcccatgggaagaggcaactcatgggtcttataaagtcaaaggagggcccaacaagaacgggtaccatygctctgtatttaaggtaaatgacaggcacagaacttgcactcggatagtctcccctcacatctaacctttcttccacgtttgcaagtccttacccctcct

SEQ ID NO: 29156 - DNA, 201 bp, Bos taurus
cccaaaagcagacacccttattacaacataagaaaaggtcaacaataaacaccagaaccagaactctgccatcacattgtaactgcttgctgctttgattytgaaaaatatggatgggttttctattttaaaaggggcataaattatttgggtcaataataaggtgaacgacctcaatatagtcctaggagcagtgcactg

SEQ ID NO: 29157 - DNA, 201 bp, Bos taurus
catataaaaacctttcatggaactttatttaaaagtcagattcccaggttctaaccccaaggtttaatttattaaatctagtgagcctggacatatttttmagttcctcagatgatttgttatagctaaggttaagaaccattcactactttagatcagcattttccaacctagttgaattaagtattttctgagcatatt

SEQ ID NO: 29158 - DNA, 201 bp, Bos taurus
gaagaatattttctgaaaaatttatcttccttgttatttacattcatgtgaatgaatgccaagtaagccatatttttcaactttatagaacagaagaaagkaaaaagaacacaagcagactggctgctgttgcacgtgcttctggaagtgtcctgacagcttgagaaagacagggtggcccatcatgcaactttctgttgt

SEQ ID NO: 29159 - DNA, 201 bp, Bos taurus
cattgatcaccaaagagtctcttggtttccaaacttatttagaatccggacttccccagaactggtccatgcaagtccatctgcatcaagaggcactctcstgtcaaagtccagggcctgggtggactccaaaccccacttgagatgtggtgttagaggtgagaaaatgtgcttccagggggcaatatttatttcacatac

SEQ ID NO: 29160 - DNA, 201 bp, Bos taurus
ttgcaagatcattggccttttttctttgtttcatcgccattcccatctctgtcccagaagagaacctggcatctagactctgacaagatgattactttgaracattaggctgccatcttctcagacagcaggctctccaaataatgtcttattccttacctcaacaccttgtctctcagattcattggcctattgtgtggc

SEQ ID NO: 29161 - DNA, 201 bp, Bos taurus
ttgcccttggactggcattcaggaactggtgacttagaaacagcacgtgcaggcttagattccccaggtgtggggagatgctcgctctctgctgatgtgcrggcggcgattctaatgaggataaataaccacctttctaaaggtagctgctgcccagtgaatttcctaaatgccagtgctgctctgtttattttgagaaga

SEQ ID NO: 29162 - DNA, 201 bp, Bos taurus
tcagctagggtctgaaaagcaaaaggagttggacaagtaaatggaggaattaagggaagaggctgtgatctgggacaggcagagaaaagagaagacaagaragcagtgggaattaagcattcctgtagcaaagacagaatgtgtccagaaaggacagtatcttggtttaaaagttactctctctcaattcactggaatcca

SEQ ID NO: 29163 - DNA, 201 bp, Bos taurus
aaataccatacaattagtttccagagcttcactcactatctctgtcagttttaggaactgcctgtcactatatccctccagtaccagtggatgaggctatrtgcagcataaaaccatgaaagagccagaatttgctagaataatcctggtcttaaatgttccagggctaaagctcacagctgactattagcaaactatgaa

SEQ ID NO: 29164 - DNA, 201 bp, Bos taurus
caaagcaggactggctcatctcacagccagtcccctcaacagcatcagcactctttagctatgctctgcatccatccacctttctgaggctttgcacatgyccagaatgaaaaaaataaaaggcccgttttctgtctctacgaaggattttactgccagtatccactcaccttctgactcttcttgcccactccagtcctt

SEQ ID NO: 29165 - DNA, 201 bp, Bos taurus
caaacgatcttccccactcattcagcacgagctctgtcccaaagtaccacaaccgtgccacccacagttgagttgtttcagcttccccagggccccagacragagtgtgcatggctgtggatcaggtcccaggtctgttatcatgctggagagacttcacaccaattaagagaactgatggcccctagagcagagggaggg

SEQ ID NO: 29166 - DNA, 201 bp, Bos taurus
atatcttccaaattccagccaagttgctggaattcccctaaacaccccaaatcacctcattctgcctcttccataatgaaatagtttctcaactctacaarttcctacgcatccttcaaccctaaaatcaaatacaacctttctatatatacaaatcaacacttctgctattccttagctggagtactgaaattcctccag

SEQ ID NO: 29167 - DNA, 201 bp, Bos taurus
ttgaatgatagagtgaatgtgagtagtaaccctgatgttttcttgtgctaagctgtgactacagacatttacatatatatagaaacattcaagcttaaaaktgtggccttgcactgtgcagataaaaaaacaaaaaccaacatgggcttctgtgtccctgctgggatgagtgactgagatctggggcaggtgctctgagcc

SEQ ID NO: 29168 - DNA, 201 bp, Bos taurus
gaatttgatcaaaggcaacaattctcccttttgctacagactattaacaaacaccttacagggaggtataaactccctgactgctttccaagttctcacayatactctcatttgctcatcacaacagcacacacaggacaagatcctcattttaagaaagtggaaataaaaacacaaatgggatgaatgacgttactatgt

SEQ ID NO: 29169 - DNA, 201 bp, Bos taurus
cagtgcaaggggcctgggtttgctccctggccagaggactgatcccatgtgctgcaactaaaagttgcaagccacaacaaagaccaaagatcctgagtgcyggaactaagacccggccgtcacagcgacagtgtagtgacttcacaacctaagtgtaagagtgagcgaggaggaaggcagaatagaaaatcgactgtgtat

SEQ ID NO: 29170 - DNA, 201 bp, Bos taurus
ctgaaaaaaaaaaaggggtggggaagggagaagcaaatcgcaaacagtcagaaaataattcttattatcctaaagaatggctcttcacagccttcagaatytaatttcttccttcctggcaaggtccctggttgtctttcatttcggaaacttcctttcaaaatatacatacccagtggtctagggctgggaaaaggcgca

SEQ ID NO: 29171 - DNA, 201 bp, Bos taurus
gtggtaaatcatgattgtgactagttagttcaactgcataagagctgttgtgtccaaatgcttgtttgtgcagcagtgctggttaaaaatcagaagcactygggaaacttgaagaaaatatataggctctcggtttgacttcctcaaaattcagaaaaaatataaagtgcttggagttgaaatattttaaaaattgctctc

SEQ ID NO: 29172 - DNA, 201 bp, Bos taurus
taaaagatgcatgcaataaaatctgtgctagttattttgttcatatcctgagagagatgttactcagacttgctgattggtatatgtttggaggtttgaartattcacttacctgctttttgtcattagctggtttttttttttctagatgcattttatggttctccatctttaccatatgttaaatggatataatgcttg

SEQ ID NO: 29173 - DNA, 201 bp, Bos taurus
tgaagacacagttaaaactattggataagttcatataaagaatattaatgaattcaatataggattaatggtgagttcttttttcttcaagaatacctagyaacctgataattcaaggcctctcagcactttcttgtcttcatctgccaagatgtgcaggttgttgaaagtggatgtgtgcttatcttgatgtgaatgtgt

SEQ ID NO: 29174 - DNA, 201 bp, Bos taurus
tctaatttgtagcatttctccccttcctgattatacaagatgggttcattcattattaatctggtttgtcaaacagcacggccctccaagtgtcaggcttycttgtttttagccagtgagtttgtgtagaagcagtgaaatttcagaatgtacagatcagcaagctcttgtctgcacctgattaaagttagatagactaac

SEQ ID NO: 29175 - DNA, 201 bp, Bos taurus
ttccccttgttccacctttccttttcctcacgcataagctggttctgtgtttgctcagcagccttcacctacagaggtccatctggagctctgacatatcrtttctttcctgaaagagtaccacagaataagggggaagagttttgcatatattttcagaaacatactcatcaactgttccagaaagtgcagaagagagag

SEQ ID NO: 29176 - DNA, 201 bp, Bos taurus
aaggaaggaatattgagagcaggaaacctgatcaagaatgttcagaacaaaaggccagaggggagagcctgatctggtttcctgagcctctgggcctcccrgggctccaggctcatgtcacagatgcctctgatcacaagagcaaggatgtaggaagggagggaaggagagattttaatgggccccgagaagccaggattc

SEQ ID NO: 29177 - DNA, 201 bp, Bos taurus
agccactaagatcaaatggcttcttaagcagtgatagataaatgacaaagatgcttgtttcttggttatgagataataataaaacctaatgtttattggtkccggcaacagatgacaaacttacagtactttctcatttaacccttaaaatgagcccttgaagtaggtattacttatgaatcccattttgttgatgaacaa

SEQ ID NO: 29178 - DNA, 201 bp, Bos taurus
gggtgccaggaagatgaagcgggctgcagccgagcaggggccacaccggcagccattccctctggaactcacactcttggcctatacgccaccatctgccrgagcctacatccagtacaagctgccggctgcgcagcgccctgctctggaagcagcgagctgaggccgcacttgacctccgggacaaggcccagcaccagc

SEQ ID NO: 29179 - DNA, 201 bp, Bos taurus
accaaagatatgcttaaaaattctttgtccaaatgcttacaagtactatgtaagccctaacagaaaatctttaaggaagagtgaattcttccaaggggccrgatggaggacatatttccactaatacacacttagaagcagactttcaaacttgaggggtgggagctcccacctctgtccatctccaggtcacatggcctg

SEQ ID NO: 29180 - DNA, 201 bp, Bos taurus
tgaatcaaagtttccaggaaaggggcctccccagcctctaccagtgtaattcttgttttggttgtgcagcacgtgggatcttagttccaatcctatatacmtgtatctatatatctatatttttggcctgccagggtaattctgatacaccttttcttggatcagtatttgagatcccttggcataatatatttaaagcaa

SEQ ID NO: 29181 - DNA, 201 bp, Bos taurus
aatatttcacttacagttagattggcggcctttatttcaataggaaaagaaaagtttaggatgttattatgcaacataaaagattgagaatacgcagagayggccacaaagaaagaaattagatctcaaactcagcattaaaaaagaggcaaaatggttaattatttgcttgcaatacgtgcatgctatttttcaaaacat

SEQ ID NO: 29182 - DNA, 201 bp, Bos taurus
attttctgaaaatagactcatttccgcagatggatgaaatgagttctcaccagcaaacaatgaaatgtgtcatgtgaaatttcaaggtcccttctaaagaycctgtgattccatgaaaacaaagtggggaaagaaagcaagttgcatgtatgaaattaggtagatggttaaaactaattcattacccttattatttctgaa

SEQ ID NO: 29183 - DNA, 201 bp, Bos taurus
ccagagtggggacgtttggaatcaagaatggagagggcttgcaggaggacctgtgcccaaagattggaacatgtgagcatttgaatcagaaaggccagaaygctggaggtcaacgaagagcctggaaagagtgttgtcagtgtccttggtgtgtttggaccaaggccaggctggagctgactgaagactgggcatgaggaa

SEQ ID NO: 29184 - DNA, 201 bp, Bos taurus
taatcaagacccggcagactcggaaaaactcttctctcttacctatctaaaaaaacttagatagggggcctggcccagaaaaagagttagtaccagagatwtttttttacctggaagacttacctgcatgacaggacaaacatttgcttttcttatcttcctttgaattactctcctccctcttgaagcccaagcccctat

SEQ ID NO: 29185 - DNA, 201 bp, Bos taurus
agtttgtaccaccagttaaaccctaaatgaggattaaaaagtaaaaggaaactaggggtcagtgaacaatagtgctaaattagagataaactggggtttcrttaacatgggggacagggacactggaagatggtgggacagagagcctgcatcggttcctacctcttcccaggaagcccacgctctctgtgatgtaggact

SEQ ID NO: 29186 - DNA, 201 bp, Bos taurus
ccaatcccacagagggaagctaagggaccaaggaaaagataaatattattttacagttaagtttcctaccaaacttggttgtgaaaatttagaaaaaaaamaactaatcataaaatccagggtgaaactagtcttcccagaggaagtcacaaatcatagggaccactgtgttgtgtgtttttttttttttaaacctaagga

SEQ ID NO: 29187 - DNA, 201 bp, Bos taurus
aattgtcttgctccttgttaaacagggtttcaaacctgtcaaagagactgcatccaggactgagcctcccaagccttccttccacagaagagtgggagagygctgtggggtacagccagggccctctccctgaactccctgctaatgtagcaccatctcagcatagtctcaactgcctgcagagcttcaagcacgcagcag

SEQ ID NO: 29188 - DNA, 201 bp, Bos taurus
ttgtgataacaatgtactagtaaaaggttttattggcaaccattccatctgaaccaatctaccttttcattgtcttcttctaggcacttgtgcatgagtgytcagtcactaaatcatgtccaactctgtgactccatggattgtagcctgccaggcttctctgtccatggaattttccaggtaagaatactggagtaggtt

SEQ ID NO: 29189 - DNA, 201 bp, Bos taurus
atatgagacaaggctgtgccaaagaggccactggggagagtacaaaagtagatggagctgagtgtacacctacagaatgatttcatagacatgaacaggarcccctaacaaaataatacctctagtactcttgcttcctgccagcaaccttagctggggtaaaagcatgtgtcctgtagtatgaaggtaaccagtctgagc

SEQ ID NO: 29190 - DNA, 201 bp, Bos taurus
gaaaatatttaaaaagtaccttaacaaaagtatccccaatgatttttcttttctcctcaggacttgtagtcatatttaacgttttgctaattctctttcgkggagttctgtcttcatctgatattggtagagttgttgttccattgtagaaagaatgagcagcatttatcactggggaacaggagagaagcatattttaaa

SEQ ID NO: 29191 - DNA, 201 bp, Bos taurus
ggggtagtgtcaggatgattctcatacattacatttggtgcagactttattctaatctaatgccaccactgatctgacaggtgccggaccttggcccagargttggggacccctgctataaaacataaaatattcaaatgataaattcttaaactctgcaaataaaattaacataatcttctcctttaattttaatttctt

SEQ ID NO: 29192 - DNA, 201 bp, Bos taurus
acagaaggttagttcatctttacattctatacatcataataacttaacttctaaagggatcatagtagtgtttgttgaaccaacagatgtagtagatgtgrgatggttttcagcctgaggttcatatgccctgaagagccctcctcccagtctaaagggaaataaaagactgtgtggacttgctgctgggactttcctggg

SEQ ID NO: 29193 - DNA, 201 bp, Bos taurus
atgcaactccaacatatgcaaacaatgcttcccatgtccaattctaaaataattttaacttcttagttgacttactatttccatagacttttcatcaatayaatgttaatgtaatcagataataggtactcactcaaattgagaaccttaaattatttagtgatttggtaggcatagaaaatgacacataattgctttgaa

SEQ ID NO: 29194 - DNA, 201 bp, Bos taurus
ccccctttaacatctccagaaaaagagttaaattgcacattttcatctgccacaggtttcttttaggtccagaacgtccaaaagctaatctggaaagcaaygtcgtatagtagacttcttgcactttttcgggagagtgtttgtctttactgaaatctcacatagatctctagtacaaaataaagaacaagtggaactatt

SEQ ID NO: 29195 - DNA, 201 bp, Bos taurus
taaataggtccaatatacaagattttgattttgaaatcctatactagttgaatttcaagctcctctcaggaacacacagaagaagacaaataaagggctcrtgatttttgaatatttcagtcactcctcactggattatgttagcactttttctgcatatggtaagctacattctgccatgcttgcagtcattcatgtttt

SEQ ID NO: 29196 - DNA, 201 bp, Bos taurus
aaaatggactcctcaccagaacccctgcagtttgactatggttggaatgatgtagaccagcagttggtaacttgttctgcagaaaaagaaaaggggcaaayagtaaatattttcagctttacagaccatatggtctctgctgtaactattcagatctgctattatagcatgaaagcgaccagagacaacacagaaatgaat

SEQ ID NO: 29197 - DNA, 201 bp, Bos taurus
aagggaccagggtttcatgccatatccattaacagtggtggccaggctcacaaaagttccctattcagcccctatagcttcttctgggtcctgaataaagycaaaaggttaatttggggggcctctggcatctgtcactgcaggtctggggcttcagagtaggagaagggtgattatacgctcataatttattaaaagcag

SEQ ID NO: 29198 - DNA, 201 bp, Bos taurus
ctttctcctgctgtcattatacctaggctaaccactgaaacatatgggtccacgtcctcccagacatatacattggtgtggtaaaggacctgcgggccaaygcaggagatgtaagaaacatatgggtccacatcctcccagacatatacattggtgtggtaaaggacctgcaggccaacgcaggagatgtaagagatgtgg

SEQ ID NO: 29199 - DNA, 201 bp, Bos taurus
tcaaacatgcacaggagagagtatagttcatgaacttttatttacacatcacagactatcaagatttttgcatacgtgctttattgatggttttctgtgamgtatttcaagcaccacacgtcacacacaccatagtgtaccctaaaagtatgggtatattgctgcataattaaaatgcattatcacacctaacaacactaa

SEQ ID NO: 29200 - DNA, 201 bp, Bos taurus
ctgatgtttactcttttaggttttactctgtcttttattgcaactccttagccctagtctgtacagtttggtctttcttaaagggcaaatggagtaataayaataagaggaagactgttcagaaacaccctgataattggccaacttccagtctatatgcttgtcagagcataaatatactgcacgaccaatagcttaaat

SEQ ID NO: 29201 - DNA, 201 bp, Bos taurus
aatcatcaccctgtacatctaaatttacatatattataagttagtaatatctcaaaaaagctaaaggagataagagagacttcgttggttgggaccgatcrctaagcgctcaaatgtgttaagcaggtaataaatgtggtagtgggtctctctcacatctagtgtactctgccttacatgcaggttgtggttaggatacca

SEQ ID NO: 29202 - DNA, 201 bp, Bos taurus
caagcaaaggcctaagcatgaggactggccagctggacaaagggatatggccaggcagcaacctggtgggaaccaaggatgaaggcctctgtgacagatayaggttctaaaatcagcaaatctcaagtgacccctgttggcagatgaggtctaggcatagtcaggatggctttgagactggcagaggccaagcctgtaggt

SEQ ID NO: 29203 - DNA, 201 bp, Bos taurus
accaggtagaaaagttattactagaagggtcctagggaccaaaagctggaactttgactgggatactacaccataactccattggctcagaaaggccaagmgagcatagagtctgaattcctcagcttttatggactcccatctagacatgagagaagagttttgactgtctattaaaaaactcaagatagcaagtccaaa

SEQ ID NO: 29204 - DNA, 201 bp, Bos taurus
ctttccatggttatatttactgtcctgctaagtatgaagcttatggacttctgtactctgtctcttcctctaagttactggttattaaattgatttatatmtgattagtaagatcatatccttaccataagtcttccaataaattctagactattttggactgcatggaagtgtccaggagtataaaaaaaaggtaaatga

SEQ ID NO: 29205 - DNA, 201 bp, Bos taurus
atggggactttgaagtgtgtgctttctgaagtgccgtgtaaggtgagctgatgcctgtccctcacccgccccttttgtttggtacccagcaccatttctgygctgtgagagttctagggcattgacggtggtactttttaaagtttttattttatattggagtagatccagttaacaatgttgtgatagttccaggtggac

SEQ ID NO: 29206 - DNA, 201 bp, Bos taurus
atgcaggtaggtgcccagaagagagaaaagaatagcttggataggaaacaatgagaactatgacaaaacctagcaatttaccacttctgtacactaacttrcacatcagtgcttaaaatgacaattacagtttccacaaactcaccatgcatttccaaggggaattctatataagcagattattcaatgcctatctgccta

SEQ ID NO: 29207 - DNA, 201 bp, Bos taurus
cacatcatttattatgatacaggtatctcaacactcagtctcatctcctagctgataaatcaggtactggaatgcctctcctttctcagaatgataaaaayatgtaaactatggttaaaatgcactttaaagatatgaagcctttggtactttaacaataaaattccctcaggaaaataaaatgctgttttcttcacagta

SEQ ID NO: 29208 - DNA, 201 bp, Bos taurus
tatattgaaggaagttttcttaaagaagtgtcttaaagaagaaacagaaaaaataaaaacttttatggaactgggttgttaggttaaagtgtcataatttmttttccttaaaaacctaggattccttgaaaatgtgctgagactcatggatgtattaaaaagggttgcctctagatagtttagtgacagtttagatttctt

SEQ ID NO: 29209 - DNA, 201 bp, Bos taurus
ggagcccacctatctcttgtctcaggaaatgcaaacagaaggctagctgtaaatgtctaacctggaaactatctcctacatcaaaattagaagttgaaatygctaccttaaaaagctgcactatttttttttcactcagaagtctagactttagtgatttcacccatcaaatgggaataaagctgctcttcctgtgaaaag

SEQ ID NO: 29210 - DNA, 201 bp, Bos taurus
tcccttcagcagaatataggtgttctaagagtcaaatttatcttttcatgttaccaggggtatatataaattgtatgacatttgaattgtatgtgcaaatrctcagttcactgtttgcagtagtgaatatctattttgaatcataagaagtaagactgaatatagaaagcattgttctgatgtcctatagctttctgataa

SEQ ID NO: 29211 - DNA, 201 bp, Bos taurus
tcctcatcacctcatgaaacccatgtgtctctaaacccacatatgtcatagtccagctgattagaatacttggcccataagctctatctaccttgcaccaragttaacagagttaaccgttaggatttccatctgtaatacttctgaactcagtttttgtatatagacttcatcaacacttgattttatctcatctgtctt

SEQ ID NO: 29212 - DNA, 201 bp, Bos taurus
taaagacatacacagtgcaatttaaaaattattttccgtggacacagactatctaaataaattaagtgataagtatttataaatggaatctttttcttggmaactcttgatttcatgagaatttctctatgtatattaaatacagtcattgctctgacatgctcaacttaaactcttaagccacttacttgtaaaaagcac

SEQ ID NO: 29213 - DNA, 201 bp, Bos taurus
ttttccaagtcagtgaagctgttaacattactgcttcttcaagatgtgggaaacagtagtcaaatcatggactgggcagtcgaaatctcaattgtctaacyttgactacagtttgatgatgctgtttttggtgccagctacaatttgtaagcgcttactcattccccacaatgaaatccctttcaatggactttctccttt

SEQ ID NO: 29214 - DNA, 201 bp, Bos taurus
caattaataatttctattacttatcagaaaaagagaaatagttataatgaaggtataatatatgatagaattatccaggaatataagacagagatttatcmatactgcctaacttcatggcacagatgagatttgagttggacccaaatgaatgatcggagaaggcaatggtaccccactccagtactcttgcctggaaaa

SEQ ID NO: 29215 - DNA, 201 bp, Bos taurus
gtggttctgccataggaaaacataagtttgttttgatgtgtttcctgaaaaaccagttgtcatatatgccttaatttaaaaataattagtctttttttttkggggggggtaattggaaacatgaggaggaacattgtaaaacaccccaaagtaaacaaacccagttggcagagtaaattagttttgatttacatgcaattt

SEQ ID NO: 29216 - DNA, 201 bp, Bos taurus
acagaaccaacaagccatcaccaaccagaagaatttgggaaaggtcaaaaggagacaccagtccatatggcctaccaacctcccagaatcctcctcactgkaatccatcttgactgagaaatatatgtgctaccaggaaggaccctgagtcagaatgattggccaaagacaatccagaaactaatcccatcaccattaaac

SEQ ID NO: 29217 - DNA, 201 bp, Bos taurus
cttacagttcatcaaggctaaaatatttaactggctcaacagagaaaaaaaattctgctgactctggtcacagagaaaaaactgaagaaagaggccagaakaggagagacaaacttgaaggaaagattaagaagatattaaatgaggtgtcttcaaataataagatagtatttgctaggtgaggagggctgcaaatagaga

SEQ ID NO: 29218 - DNA, 201 bp, Bos taurus
tatgagtaggctttgagacaataacctcacagaaaaggtcagattatggtcaacactgatggggaggtagagactcccaagacagggaaagaggagaagamgggagatcattcaagagcaggaatcagtatgaagaaaggcacggggttaaaggaaaggcatgcccctgtgaggcaacagttagcataaagaattcctgat

SEQ ID NO: 29219 - DNA, 201 bp, Bos taurus
aagttcctggttttcatctgttcctgaagacaagcaagaactctgtgtctaacagtctcaacttggagcgtccactgagacattctgaaatggttgttgcrtgactcacaggtgaaaaactacaaacaggtaaggaaacagcctttccatgaaataacttcagtgtgtgtgaaaggggcatgagaatggaaaaggagattt

SEQ ID NO: 29220 - DNA, 201 bp, Bos taurus
atataaaggctgactgggggaaaggcatatgcacacaaataccccccaggctggcaacatacattattctctaagagtagaaagaaagagttttcgtagaragcaactggactttataaaaaagaaaatctaaaatttatgagtgataaattacacatgaaatgaaaattaacatatcacattttatgaaaaacaaatttc

SEQ ID NO: 29221 - DNA, 201 bp, Bos taurus
gatgattttatttgcaaagcagaaatagagacacaaacctagagaacaaatacatggacaccaaggggattggatcaattgagaagctaccattgacttgyacatatagtactgatattatgtataaaatagattaactaatgagaatctactcaaagcacagagaaatctatgcaaagtaatgttctctggtgactgaaa

SEQ ID NO: 29222 - DNA, 201 bp, Bos taurus
agaggaacatacctctgtgcaatcctgagtaaaagggggcccctcctgaggacatgtgcggaggaggaacagaggagcagggctggcagaaggtcccctgyggccccactggacgcaccaaagctgctgcagttagtcgatcagacacacagtcaccctcactcttcaggaggcagcagaaaacccccatcattcgcagcg

SEQ ID NO: 29223 - DNA, 201 bp, Bos taurus
aatatacactcatccctatgttcatagcagcactgttcacaagaaacaagacatggaagcaacctaacgtccaatgacagaggaatggataaagaagatayggtacgtatatacaaagaactatcactcacccataaaaaagaatgaaataatgccatctgcagcaacatggatgaacctagagattatcatactaagtga

SEQ ID NO: 29224 - DNA, 201 bp, Bos taurus
tgaagaaaaccacagagcaaaaaattattagaggcgccagggtggagctggcctccagggctcctctgaggtccctcaggattcacaacctggaacctaaygaaactgtgagctgagaaaattattttagaatcatataaattgggagtgtctaatgtactattaagaaaaacaagaaaaatgagatccagcctgaatatc

SEQ ID NO: 29225 - DNA, 201 bp, Bos taurus
accattgctaacatcattgtcagaggctgccttcgttttgagagcttcacggatggtgtcacctgcaatttacatctggccagatgaagacagatagggtygatgagacctaaatcattagatcagtggtctgtaaccctgctgtgctttagaatcacccagggagtcctgaaaactaccgatgccaaggccccatccctg

SEQ ID NO: 29226 - DNA, 201 bp, Bos taurus
atcggatttatccttgaacttattgcaaaagcaggtgctcaatgaagttttgtggatgagagaaggaagagggggagaaaggaatgaaccagctacagacyggcctctggcagaggataaacgccctgtgttgccagattatctgttttcttaaagtcccaaattcttgtttttcaatgggatttatctatttatttacat

SEQ ID NO: 29227 - DNA, 201 bp, Bos taurus
ttcctaattgcttgtccctgataatttgggaattcatcttagaatttgatgtatataataacaaggaaaactaagccaaaaataggggacttatagatttmattatccatagttttctttcaactgcacaaggtcacttcatgtccttggttaagcactctgtatctattagaacccaggaataggacaagactcagtctg

SEQ ID NO: 29228 - DNA, 201 bp, Bos taurus
tcttctcaagatagaatctgacttgctttcttagtctgatttttccatgcaagcatatctgaaaaatactcagggtttggcccagttgttcatatctttakaaaacccaagtgtatctgagctctcaacagggctctggttgcagggtgctccggtggggactttctctgaaatttctccacctgatactgcatggcccag

SEQ ID NO: 29229 - DNA, 201 bp, Bos taurus
aaatttcactttgcctggcagggccttcctctgtcacagctgaaagagaactaagacaggctttctctcaagagtgagacagaatgagccatgtggggtastattggttttttcctgcactaatcattctattggtttttaaacacttgctttttaaaggaaatataatccttatgtttaataaaaaattttaattgaaag

SEQ ID NO: 29230 - DNA, 201 bp, Bos taurus
tgatggacagatgttctctggtggagatgagcctcaagaagaggtaatcattctttccactctattcccctagcactttgtctctttctctatgattgcaygtgcagcccagatttatgtaactctattactgcttataagtctactcattttgtagcctcaggccatgttatttttcatataatagacaggtatattctt

SEQ ID NO: 29231 - DNA, 201 bp, Bos taurus
gcagtggctgtcttccacaggccaaggttgactgtaggagatgctccattagacttgggctccatgctcatcctcaagtactgaaggccagctggaggcayctaatcatcagaggcaagctgggagtagttgtcatagtgagacacaggcagaagcacaatctgggggctttgacctgcaggggcctctggtggtgacaga

SEQ ID NO: 29232 - DNA, 201 bp, Bos taurus
cacaatgcaaaagtgtcagacacaactgagcgtgcacgcacacacacaccccccagcagctctgggtttttttggtaccattttcttgccagaaaacaggrtatgtttgttcacctaataagcccatcagaatgcctttagtcctgttttgtaacaacactagatggagctccttctttttgttgcccttgactctggcag

SEQ ID NO: 29233 - DNA, 201 bp, Bos taurus
gaattcacaacaaagtgaagacagagtttacctctaacataacatgcagccaaaggaactgtaggtacacgatggagaaccaattacaagagacacgttcyatcatgaagggtggagtgggagatgcttgtcaaaagggtttgaacattaagctaatgatgggatgaaaattgctgccaaaatagatttccccatttccgc

SEQ ID NO: 29234 - DNA, 201 bp, Bos taurus
gccatataccaggaaggggaggctgagcaggtggaaaaggcaatgggttcaggaatggatgtgtgagggttaggaatatggaaagttgttccattgatggygaatttgaatttgaggtttcagagggtgactggggctgagaagcctcttgtccagatttcctcaggtgagttctagtcttttgagatacaatttccttca

SEQ ID NO: 29235 - DNA, 201 bp, Bos taurus
ggaactcttttttgtctcctttaaaccacagaactgctaattcaaatgaaatgacatttccggaagaatagaaattcctggtttaagtgaggcccttttgygttcagatggatttgtgataaataagagaaagagactcttgttcccaaaccggctactcactgctgccccaagctgtagattaatggaactggcccagga

SEQ ID NO: 29236 - DNA, 201 bp, Bos taurus
actggttcagcatctaccaggaaaaatcactgcactgctcttatgtgcccgttcagggcactgtgtggagaggggagaaatcgggcaggttttcagacccyaggcagctgacagtctagctggagaatcatgaagaatacagacacaatcaggctgaaagcccctttctgacctgtgtgcagctgctctcccagcttggaa

SEQ ID NO: 29237 - DNA, 201 bp, Bos taurus
ttcagctaatcccactgggagccctcggagtagaatggcccttcaaagttgtctttatcgaagcaagggtatattcctcctcctcagtcatcagaagtggrttgccctcaggcagggcctttcctgagctgaggcagcttcgttaggctgggagcaatgcccacagacatcctcagctgggaatggctgatgcgcccagca

SEQ ID NO: 29238 - DNA, 201 bp, Bos taurus
tccattatatgcttttaaaagttagtaacactttcctcagacttgtgccaaattggccactaaagtaataacataagaatggatgaaattattttaatackttctgaaatactcctcaatgtaactcagttcagcatttcattcttgcagcagttaactggctatatcaggtactgcttcttttattagtatttatgtttt

SEQ ID NO: 29239 - DNA, 201 bp, Bos taurus
ttacaaagcaaaaaaaaaaaaaagtttcactgaaagtcttgggaaattctagttcaaggaaacccccaagtacagcatccagagattcacaataatattgrgatcttgatctcatattctccaaaatttgtctgtgtaacccagatctagtcctatagttctctccatgttgcttcagatatttgagctctggtggtagta

SEQ ID NO: 29240 - DNA, 201 bp, Bos taurus
cttaagcatttcttcccaatgagatccaagctgaacaatgacacgagctgatgttcagtggtggagatgcccgtgtatcctcgcctaacagctgtcacggkaggtccacactgctcctgaaagctagataattaactgccgtttgctttgaagtccagggaaagctgcttcctactgcggtgcatttacaacttctacaat

SEQ ID NO: 29241 - DNA, 201 bp, Bos taurus
attacaaaatattattactaaataatgagcttctattccaggagattaaaacaatgcctcttaatgtaacagggactgcattacagctccaaagtacagargcatgtacactattttatacttttgtatgtttcttttgtagcgctatccaacttcttttttttttttttttaagtaggcatgcaaattagataacagact

SEQ ID NO: 29242 - DNA, 201 bp, Bos taurus
tgtttttatgcagtttaacaatgttgatgcgatagagctactcttgaataacaaggtccaattacaatggatgttgggaatgttcagtgaaataggtcccyggtgagtctcaggtcttttaaaaactgtgcattatataatctataagaactgcttgcacaaaatcaagtacctggttggcatatattttgctacataaaa

SEQ ID NO: 29243 - DNA, 201 bp, Bos taurus
agaatgcaagagagatgttgactttttcctctgttaactctaacctctcgagtagctatataatacaggctggtttcagacacttaacaatatcctgattmgcaattacaactggaataaagcaaaatgccatcatagaatgatctccttcattacacagagaatcctgtaagaactcaattaggcacatatcgtttagtg

SEQ ID NO: 29244 - DNA, 201 bp, Bos taurus
tgttcaacagtggaaggtttgccaaagaggatggtgacagaagagcaagagtgagatgagctccaacagcagccctccttggttccacctgacttgacacrctcagtcgcctctctaagtaaatatttccaatatttacacaacatctgttaaaagaggaaccagattgttagcctacatgatttagtctagatctgctta

SEQ ID NO: 29245 - DNA, 201 bp, Bos taurus
ctgcctatatgttataactttgtttctactttgccttaatagtaatgatgattggtttttaatgcctttactctgtcatgaaatgaactagaaataatatrctatgtgagaactctggactataaggtacagttttatattattcctcaaactgagctgctaatatttaaatttatatcaagatttttgtttttgtttgcc

SEQ ID NO: 29246 - DNA, 201 bp, Bos taurus
aaaataacatttcttaaggcaacatatttcagcattaagtgcttgacaactgcgcatttgactggacctaaaactaaacctatcagtttaaacattttacrgtacaaaacaaaaatatccccatttaagcaacactttcttaaaataatggaagataaatggtttagtcacaaaagctctctaaagagatgcatttatttt

SEQ ID NO: 29247 - DNA, 201 bp, Bos taurus
tatagttctgtaagtaaaaatgtatgcccttttgcatactgacagtgaaaattaatcagaatctatctttcccaaaataattttgagtaacatgattaatytctcacagataacttctgagcacagtgttatgagttcattagaaacatttgttacaataatggcaccaaatgttgaaggagtggaaactaaagtaacata

SEQ ID NO: 29248 - DNA, 201 bp, Bos taurus
cttcctattcacttcaaacactgagtttgtatgtaatttagcacttgtcacagcaattattggtcttatctttattctccaactgagataaaaatattttkagaggaaagactataaagatcacttcttgatctttgtcagagtttattttacaaaaatatttgtatataagttttagtgaatttatgctgatttttggga

SEQ ID NO: 29249 - DNA, 201 bp, Bos taurus
gaacaagtgcctaataaatggagtttgcaatccaaagtttacttggccaagccaagtcctctggctacaataccctcttctctctactctatgtatgttgyaaacattttttgtcttctactttagggaaattatgaggacactgttcagttcagttcagttcagtcgctcagtcgtgtccaacactttgcgaccccatga

SEQ ID NO: 29250 - DNA, 201 bp, Bos taurus
ttatttgctacgtgatatttgctaaaaattgggataaattccttttttatagagagaaaacaacatctttcaaaaaataaccttgactctctacaccttgwggagattaggcagagactgagagggagaaagaataaatcagaacaggatttgcactttaatttggaagaaagctggaaatgccaaataaactttttaatg

SEQ ID NO: 29251 - DNA, 201 bp, Bos taurus
gagggtgggggccggggccccagcggcctagaaaagcgaccgccgaagctgagcagggactgaggccggggcccgggcgtcccagtcccatcctggccagyctcagagtctttccaaggtcaaggtatttccttcttgaaaccgccttgtaggttcgaattagcttagtccatctcttaacattggccacctcatgcgaag

SEQ ID NO: 29252 - DNA, 201 bp, Bos taurus
ggtcactatatgaaatctagtaactatacaaaaatattgctgtattattggctatattctttatgctgtatacctcatctatttctttattttatacctgraagtttatacttctcaattccctttatccaattcaccagcctcatgctgcttaccctctgccaaccagcagcttgttctctgtatctaaaagtctttttc

SEQ ID NO: 29253 - DNA, 201 bp, Bos taurus
atctatattcatcagtgatacctgtaattttgtgtgtgtgtgtgcgatatctttggtatcagggtgattgtggccttttagagtggtttcaaaagtgttcrtttctctgcagtttttttgaattaatttcagaattagttaaattttctctaaatgtttggtataattcacctgtgaagccatctggtcttgaagtttgtt

SEQ ID NO: 29254 - DNA, 201 bp, Bos taurus
tcggaagtggaatggtatgttatcagcaatgagcgatgctgaccactttgaaattcacttcccattagacctggatgtgaccatgaaagccatgatttttrgagcttgcttcctcattgtaagtctgtcacttttgagttatcttgaaagtgttattctttctgatgaggaataatagtacagagtgctgggaagggaata

SEQ ID NO: 29255 - DNA, 201 bp, Bos taurus
tttcctttttcacctttcaggagctccaatcccatcccaaagtctttttcttttttatcctgcccagctacatgaggatctttcttgcagctttggttgtrtaagaggccttataccagttcacagttgcttttgtgtgagaattgttccacatataaatatatttttgatgtgtttgtaaagagaggtgagttccaaatc

SEQ ID NO: 29256 - DNA, 201 bp, Bos taurus
ttcctttctgaaatgtagtcatgcaaattaaacttccatggcaagttccagcatcacatgtgaattgcacacatagatttcagtccagtgaatgtacaaayaactgagtgcattataaatactatgagaatctgtgactttaaaatcttgctattagtgttagaacaagaactatattaattaaacaatcttttgtttttc

SEQ ID NO: 29257 - DNA, 201 bp, Bos taurus
aagactgtttttttttttctttctttcctggactccaaaatctctgtctggaagccctgcctcacaggttcaagaaagtgcctttcggattacaggccgcygtcgacttgctcttatctctatcctcacctcacaggagaacggagacaactaatatcttcctcattttttgcgcctggtctttttacttgctaacaggct

SEQ ID NO: 29258 - DNA, 201 bp, Bos taurus
tcatttgataaatggttctcatcaatcacactctattgatgcattacatgtttcttgctcatggtaactgcattactccactttctgacagagtcagaccrtggctctagaggttatatttggccagagttgggcttatctttatcacattcttagactggttttgttagtggctgatgggtgcccatttttcaagctcat

SEQ ID NO: 29259 - DNA, 201 bp, Bos taurus
tcttatcagatatgcataaggtatgataaattttctaaacagcaaaatgataagtattggtcttttgttgaggactgccattgtatgctccaaggatgtaygtatgctaagttgcttcagttgtgtctgactctgcgaccccagggactgtagcctgctgggctcctctgtcaatgggattctacaagcatgaatacagga

SEQ ID NO: 29260 - DNA, 201 bp, Bos taurus
tccacatgaaaatcatgtcttctttatagcatgtattatcaagaaaataggaagtcctgcctcatgatataatcctattgttcatcattcttgaacttttrtccattgatgaactctacactcaaaactttccttctactctgtttgctcataccctttcaaaatgaacatgccacccaataccagaccttcaaagtgctg

SEQ ID NO: 29261 - DNA, 201 bp, Bos taurus
ggaaacactgagactttttcttttttttttctttaactgtcattgtctgttataaggtgattgttaatgtgccttgttaatgaagtttaatcagttcttarcaactcaattctataaaatggtccaagtagaaacagctttggggagctggtaaggtaaggaatagtaaaggtcattctaatttcccccattctttgttca

SEQ ID NO: 29262 - DNA, 201 bp, Bos taurus
tgaataattttttaaagtgtttcagagaattgtggcgcacagactctgacatgacctccatatatctctgcctcctggtattcacatctttgtgtgatccsctcctgttttgtgtgggtggaacctgtgactcacttctaaccaacggagcacagcaaaggtgctgcgattatgctgcagaagatttcaacatctgtctta

SEQ ID NO: 29263 - DNA, 201 bp, Bos taurus
atcagaaaataactaggatagtgaaacatttaaaatgtttcataataaaggaaaaaggataacttatgactgaacattttcccttcataagcagggtggcraaatcagaactaatgatatgaaaagttgcttttatttagtgaatgactagcacatgactccctgctagttcccttaataatgataaggtaaagaatacta

SEQ ID NO: 29264 - DNA, 201 bp, Bos taurus
acactttgtgatgaacttcacctttccagctgactttatgtagcaccatgttcattatccagaataatagtcatctttaatatgtcacaaatctgaacagygatgacatctgttcccaaagttcagcaaaatatattaacaaggcttagactttatgaagaaagaggttgtctaggtgattctgagagatttcttttccat

SEQ ID NO: 29265 - DNA, 201 bp, Bos taurus
caggtctttaataataaaagaacacaaatcttgagcctattggcttgagctaattaccaagcactccttcctttggttcttgctcagaagagagcaaaaaytgggacaaagagcattagcttgtccttggcagccacgaccaggtatgccaactactaactgacaagctaagtctagtagggggaggattttacatgtaac

SEQ ID NO: 29266 - DNA, 201 bp, Bos taurus
aaaaagccaaccgccatatcacctgcatgaagcaaaaacccctggagtgaagacaacttcagtcttctatatccactttcaatttattttaactgctgatmaatctttctttgttactgaagttcttaaaagcatgctttgtatgatttatctagcagagaaggttacgttcaggtgtaaggtcagtcatggtgtctgatt

SEQ ID NO: 29267 - DNA, 201 bp, Bos taurus
aaagattttactttgttatgagatattggctatgttgtataatacatccttatatgtagcttattttatataaaatagtttaactcttaaccctctaccaytataccgttaagcttttaacttgatcaagtccttctttatagttactgcttggctttttgtcattctttttgtggttgcttataaattcattttctcaca

SEQ ID NO: 29268 - DNA, 201 bp, Bos taurus
tttgggagatgttgtttctccactggccttcagtctcagagcaaatgcctggacatgcagggacagcacattgtcatgctgatcaccagagacttgccaaytcttggccaaaaaggaggctactaagactggaaaatcaacttggtgggaggcacctggtaggcagcaaactctcttacaccaagcagtgaaaacaagtaa

SEQ ID NO: 29269 - DNA, 201 bp, Bos taurus
ttcttgaagtcgtcttcaccttgttcgcccatcctggaaggcatcaaggaagcttggttaagttctaggagccacagactgtaaagcagccaaaggctgtrattcatttgcagttctctctccctcacctcttgcccatcctcctttgccccaccccggtctcaccagttgtggttggagaaaacctttttgttgctcccc

SEQ ID NO: 29270 - DNA, 201 bp, Bos taurus
cttctggaggacatttatttgaacataattctggtcactgtaggcccccagcccttgcagatattctagactagaggccccatgtgccaactacaagcttytagcaaaatgtttactttcaagacaaataagacagtagaatgaaaagtggccgttgctgtctaaactctaagattttacctaaactgcaactcttctgat

SEQ ID NO: 29271 - DNA, 201 bp, Bos taurus
cctgactgagccacattgtgagtctgcaaaacttgacctcagtggccagaaccagctctccccgaccccaggtgcctgccacccatccctcttcaccttckttccaaatctgttcttcctagaggctctgacaaggtcattaaccctgaagtgtaaatgactcataagacagaaaatatcccctcccctaggtgtgttctc

SEQ ID NO: 29272 - DNA, 201 bp, Bos taurus
gctttgcccttggccatgatattacttattatttggtgaaggaaactgacaacagtcatctgaaaagttttctggagattgtatgcaatggcctttctcaygatttttctcttgttttctaaaagctagtgttttccttttcattttatccaaaggttttaataaaaataatataatacaaaaaggccacagagtactaag

SEQ ID NO: 29273 - DNA, 201 bp, Bos taurus
aaattttaaagtaaaaataaattcacatataaaaaattggattgtgatgatgactgcccaactctaaatatttactaaaaatcattgagatgaatcagttktatggtttgcaagttttacctcatgtatccttaagaggaatcagttgtatgatttgtaagttttacctcagtgaagtttctttttttcttttcttttttt

SEQ ID NO: 29274 - DNA, 201 bp, Bos taurus
tgtaggaaataaaagcagtcttcgggcaatgaatttcccattctttttattatattcatcaatagagagatgaacgcttaagtgaagagacgttattatgkccataaaactgatcgatttccagattaaagaaaaagaagaaacacattaaatatattccaaatctttgccctgtaattattttgttcgttgctgtttggt

SEQ ID NO: 29275 - DNA, 201 bp, Bos taurus
gcggctctcaaattggcctgttctttctagcaaagtcttgttagttccattaaatgccgctccgttgagtatttatttttctaccaatacagacacgactstgtaagcctttggccccggtctgtaatctggggttggttgaagatgccttgtcagctagttttgttgtaaacgttgtcaggggttcaggctttgctgctt

SEQ ID NO: 29276 - DNA, 201 bp, Bos taurus
cggagggcctttgggttagcatcagctctctgtcacaccaagtgctgaacagctaaggagcaggagtgggactttgctcatgagggctcagggtgaggctytggcgtcatctctgggccttcctcggcttggaagacccaggctgagacagccaaaactcagaagaaacccattcctccctgggcagaggccctcacgcaa

SEQ ID NO: 29277 - DNA, 201 bp, Bos taurus
atctggggcaaaatggggactgcagcctgggatagagcacctcagataccttttagaaactgctccaaagaggcaggggaaggtcaagatataggtgatayggcgaagatggagtatgtacaatcaagcacgtactttttgcagaaggtttccgctagtcacaaagagcagtcatcaccaggaaggattttagtgttcttc

SEQ ID NO: 29278 - DNA, 201 bp, Bos taurus
taaagaaagaaatgataatatgactcatttctattaaactgggtatcaaaaatcaaattaaaaaaatttctgaaactaactgatgaaaagtacaggtcaakacaacaattctggttattaatgtcaggcttgggtatagtcaaattttcccactgtacatactgtttgaaatgtatacttcttaggctcaatctcaaaatg

SEQ ID NO: 29279 - DNA, 201 bp, Bos taurus
gctggcctttttctttttgataagttacaatggtgaaaggtgaagcaatacctttaacattcagaatattttgcagaatattcaaaacgttcttttaacartttacctcaagatcaaacagggccatgacagggatgtgttaaaaaacacatgccaattttatcccaaagcctctagctcctccattaaaaatattctcgt

SEQ ID NO: 29280 - DNA, 201 bp, Bos taurus
actccaaggtctgaggactcctggcccagtgctcactgcaccatgtctcaactgtttcttaaactaaacaacagcaggaagggagactgtagatagcagaytggccagggctcaaatctcagtttatctgctgtgtggcctcaaacaggtgtcctcacctctctgggcctctgtcctctcaactgtgaaatggatggttct

SEQ ID NO: 29281 - DNA, 201 bp, Bos taurus
tgagcaaacatttaattcagattttaatttggcccctatttcctagacagaccctgggtcaattttctgcagagggatttttttctcttccttgtcattcycagcatctttggagattagggacagaaataaactccaagtgatctgcaatagttcagtaagacaccactcctgaacaactgagcttttgacaatacaatg

SEQ ID NO: 29282 - DNA, 201 bp, Bos taurus
gagaaacagtgggctactgcccctagcctgaaaggattgactaggggaaaacaagaagtctaggacagggtatgaggtaacaatgataccagggaggcccstaggcacctgggtgaggtggttgattgtcatcaggttctaagttccaaaggtctgtgcggcccacagcctgccttacgacagaattacacatccgtgcaa

SEQ ID NO: 29283 - DNA, 201 bp, Bos taurus
ttgtctaatcccttccttcttgtgatggagaaacagaggctcagagaggggaggtgacttgcccaaggtcacacagctggctgccaagctggagtggctamgctaggttttctggctcccagtcccccctccctcttttccaagcacctcccaacaaccagtacccgtatacctggggcattactgcttagccacccacac

SEQ ID NO: 29284 - DNA, 201 bp, Bos taurus
tgagagaaagccaggtcaagccatcactgaggctggctggccttgagcacatggggattgaataactgagaatatattccacccacacaactaaaagttamccgcttcacactacctgatccattgccactggagactttttatcagctattacctgtgtggtagtcaagcagttcatctttttcattgaaccatctcatt

SEQ ID NO: 29285 - DNA, 201 bp, Bos taurus
gaagctcaggttcttgatgtctcctcacagaaaaaattcaacgagagccaaagtgataggtaagaaggctgggattcaaacctggccaaaatccagtgtgsgactctaacccatttggacccatttgatcctactcagcttatgttgtgtcctttgttgcactcaacatgccaggaaacttggaaaactcagcagcaaaac

SEQ ID NO: 29286 - DNA, 201 bp, Bos taurus
gctttggtgacagtttttttccctggatttaaaagcactgtgtggtaccccacaatcacaggttggtgattctcagatgtgcacttggaaatctagtaaaytgtttctgtgagccagaagtaccagagttttatctgctgctctatgaatatgctcttcagtgtgtaccgctttaaactgaaaggatcaattccattttct

SEQ ID NO: 29287 - DNA, 201 bp, Bos taurus
cacccttagcagtggagtggagcagggctgaggctcaagggcaaaggctttaggttcagagaggccagttcaaggctggtgctgccatctgtcatctgatygactttaagagtgtcatgtgaacccttgaaacccggctgcagaaaatgcagctaagagtgcaggctgctgtcaacatgaaatgaactaagggctgcgatg

SEQ ID NO: 29288 - DNA, 201 bp, Bos taurus
atgcatagttttgtatgcctttaaaaaatttttatatttattgggttagaaatcttattctactattgttttttttttttttttttctgcccttatcactrttcttacatgatatgttcttacatgttgctatgcatgttgggttggatttcccagaaaacactatgagatagaagattagcctgaaagaagtttacttag

SEQ ID NO: 29289 - DNA, 201 bp, Bos taurus
ggccatgccacatggcatgtgggatcttatttccctgactagggatcaaacccatgccccttgcactggaccaccagggcagtccccaggcttctgtattygagcacagtggacccaggcctgcaaaagaagagagggcctcagaacaggagaatgcatggagtcctttaatcatgtcagaaaaaaaagccacttcaagtc

SEQ ID NO: 29290 - DNA, 201 bp, Bos taurus
ctcttgaaccaggttgtctgtactgcgttctctagttccttggtcctgtggtcacccaaggactgggatggaggtagatcgaaggaaccaacctcagaagrcagggcctgtttctattcccactttgagctgctcttgccattcccaaactggaagaggcaacttcccaaagggctgacgaccttaccgaggaagcagctg

SEQ ID NO: 29291 - DNA, 201 bp, Bos taurus
taatggccaggtacacatgtttcgttcattcatcctggcaggtctctggagaacaactttggagaccatcagattcacctgcagtgcttgtcagccatctrtccaaagctcagccaggcccactgaccatatctctgggaaggccagcttcaggcaagtgtggggactctgggatggaaaagatgtcagtgtgtccccatt

SEQ ID NO: 29292 - DNA, 201 bp, Bos taurus
tgcacccagccagccagctcagaagactgaggctaggtgaacaggaagtgtctaaagtggctggaggaggtaggagtggccagatctcggttcttgggaakgaacagcagaggacctactggaaggggaggagaggggcagacctctgcctggagcatgaggggaccactctgggcatgcaaagagccagcagtgacttgg

SEQ ID NO: 29293 - DNA, 201 bp, Bos taurus
agtgagggaatgggagctaagggataggaagaaccactgggaagggagaaactcactcatgaccctcaacatcaagctagcccaggctgggccctgccccytgggaggagcactgtgttaggagtcagatgagctgagttggaatgccagtaccaccactcacagggccaccatacctctctggacctcacttctgtagtc

SEQ ID NO: 29294 - DNA, 201 bp, Bos taurus
agaggtgcacaggtgtgagttctcatttcttggcttcaccagccaggccacaaatgctgctgcacagccgagagactccagctgtctgaagcctgggacckgtgacctgttgtacatgaggggtgagcactgggtatttgctggacagtgttctgtatgggtccaggggttctgtgggagcccaaccagacaaaaatgagg

SEQ ID NO: 29295 - DNA, 201 bp, Bos taurus
gctgcgacaggaagagtatctggcgggtgattgcagactatccagtgtcagctcattgttccgggaggaagctgtcaggaccagacctcccgggagtgccyggggcctctggttcttatttttccctttgtaggtgggaagatgctagaggtggcagtggggcagccatcatcctttctcccacccaactggacactccca

SEQ ID NO: 29296 - DNA, 201 bp, Bos taurus
cttaatctttcaaatggccacgcaggcatattgtgcctatgtgattcctaccagttgtaggtcagtcaggatgacttctaggccacttactgaagcaagarttaaggcagccctgcctgtttaaggtgagtgtgcccaggattgccctgacaaggaagcttgcttgttatctgagtcatggatgggctggttctgactgca

SEQ ID NO: 29297 - DNA, 201 bp, Bos taurus
ccactcatctcacgggccaggactgatccacatgcttgttcctatttgctgacaaaaagatgagagcactatgtcagctaactgtggtctgcccaggagtrgggccagggtctcagcagtatctgagttacctgcatcactgaagaaaattaggattctctgaagaaggaagagagggagagatggctgttagaggggcag

SEQ ID NO: 29298 - DNA, 201 bp, Bos taurus
tttgctcagactcatgtccagtgagtcattgatgccatccaaccatctcatcctctgtcacccccttctccttcttaactggttcctataagttggtctcyagctcatagactggcagagcgccatttcagttccaaacactcagaactttccccctcgatatcttgaagtccatgaactttaaatgaagtgaggcagatc

SEQ ID NO: 29299 - DNA, 201 bp, Bos taurus
aactagtcgttacaagttccactactacaagacactcactgggatcgagggtggtcatgaatactgattgggtgtggggcccagctgagaggtgcctcacygcacccacagtgtgctgtaagttcagctggtggtgaagaatcccctgtgccctctgggccaaactgtgccaggtgatcgcttcctcttctgactggtctc

SEQ ID NO: 29300 - DNA, 201 bp, Bos taurus
ctagctcagttattagtaaatgattaatatgaaaatatcaaggtaggaatttatatacctgaacgtaacttttcactagggttcaccttcagtgtctgcaraggtttgattccaggagcctcacaagtaccaaaatctgccaatgttcaaggccctcatactatattcaatattgtatggtaaaccataaaggcaaagcat

SEQ ID NO: 29301 - DNA, 201 bp, Bos taurus
attaaacttgataagcaaaggactgattaaagagctgaaacttttaagtattttggaaagattttctagctttgagagacaattctgggtttgcatactamctggacatcaggactggacagaatatagttttatcttttatttccttactaaagtacaaaagaatgtgcgaaaaatctgttatgagagaaatagtttgga

SEQ ID NO: 29302 - DNA, 201 bp, Bos taurus
tggccacaacgtgtgtggcagtttgggcttgctgcagagccttctcttgttctggacttcattcaaaacctgcaccttttcaggtgctggatcactcaatrcataggccaaggtacaagaggaatatgttgtctccaaaatccaaagaggttcactaggttgtgccttattttgcttgtaaagagggtcctgagcaccaga

SEQ ID NO: 29303 - DNA, 201 bp, Bos taurus
ttcagtggtttttgtctgagagtactcctgacaataagaattattctgcctttgaagccagaatcagaattgatgctagacagtgatagagttggacaccyagctaaatgttttagcacagctgggagaggaaggataagtggaaagaagaccccagtgaaggcacctggtggtgaccatctatgtccagtagcagttaat

SEQ ID NO: 29304 - DNA, 201 bp, Bos taurus
tgtaattttggggttttgatggccccaccctagccctttcaatcctgagagcacagaggctctgttccaccacagagtgagcacatgtttcttgggtgctkgggccaggctatgcatgctagccttagccctgcccactgctccagatggtactctgggtacattatgaagagcacagaaagcagagcccatggtgcacaa

SEQ ID NO: 29305 - DNA, 201 bp, Bos taurus
cgaggctggcacgctggggaaaaggcctgtgctggaagaggtgggagaaagaggagacggggaggtcaacggatgggccctcggattctaaactaagatgkcagaacttggtggtactggggagctattgaagattctgagggaagagatatagtcagaggagagtgagtgaaggaagcgctggtgaagaggtggaggagg

SEQ ID NO: 29306 - DNA, 201 bp, Bos taurus
cagagaacggagggtggtaagtggccaggccagcaggtccctcccctgccccgccagtgtcctccctgttcctgaaaagcttcagtaaatgcccacctcargggaggtgcaaggcccactgggaagtctttgaggaagtcatcctcttcatccagaacacttcagtgtctcacctatttctcgctcatccccacttcatct

SEQ ID NO: 29307 - DNA, 201 bp, Bos taurus
ttgtgcagccctgccaatctcctttcctacttacaaactaaagctttttgaaagaataatctataataatatctatagtttagaataatctataataatayctatagtttaatttatccaggcctaagtggcactgcacaaagtgggcactcaaagaacgcttatgaattaagagaaataatgattttccaaaattatact

SEQ ID NO: 29308 - DNA, 201 bp, Bos taurus
gttgctttctgccagttcactttttaaaaagagctttattggatttttatttccatatcaaaaaattcacctgttttaagtgtagaattcagtgattcttrgtaaatttctggagttgtgcaaacatcatatataatccaattttagaacatttccatcaccccaaaagatcctgtgtgcctctttgatgtcagtctgtgt

SEQ ID NO: 29309 - DNA, 201 bp, Bos taurus
catggagacctcaggaagctgaaaagaacccatgggggtttaagaatggcctttggatctactccttaagagggctctagcatgttacctctgttttccartgccttgctcaatggctttgttggcctcacacatactgggaacaaacaccccatacattccctcactggcaaatgcaagcatgtgtcatctcctcatgta

SEQ ID NO: 29310 - DNA, 201 bp, Bos taurus
gagggagcaccagaaaggggagttagcctctcaccatggccagagggtcctcatcccaggatacatagggtgatgaggtcagggaaggctgaccatttttrttcagtgaactatcacttccagctctgtgaacccatttctttcaaggaccaaaggctacagtagctaaaatgctattgcattttctgatgcagctaatga

SEQ ID NO: 29311 - DNA, 201 bp, Bos taurus
gctgaggtcttctttctgcatttgaagcaagttctggttcaagagaagtgtggcctcttgggggtgtcagcttcacgattactctgtcattgacattacaygcttaaccttattcttactctgggccccgctaaactttcccacatcagagttccactagaatgctgtgcccaggggacgacctgaatattaataagcaat

SEQ ID NO: 29312 - DNA, 201 bp, Bos taurus
gtagctcactcttggccttcgcttgaattcttttcaccttcttggatggttcctggtgtcccttcctcccaggctctgccatagatgatccagtgttcacrtctgtttctccttggatgggcccattggtatctggatttgtggatactttttgccctgggatctcaattctctgttgcgttaaataaaagctatgatctt

SEQ ID NO: 29313 - DNA, 201 bp, Bos taurus
gaggacgatatgggcaaatggcatgaacctcaatgaagaggactcttaactgtcagctccgccactgggtagctctaaacaaattacctaatccctgtgtkcctgtgcttcttcatgtttcaagcagaaactgcaattctgcctttctggccaaggattgttgtaggaatcaaacatggtggtaagtgaaaaagcagactg

SEQ ID NO: 29314 - DNA, 201 bp, Bos taurus
gatttgcatttctaaaaagttcccaggtgattctggtaatggtggtatagggatcacatttggcaaattgctggtttaaaatttttccatgactgacccaratcggccaccacaatgtcaatgtcacctgccacgctttcagcagacttcctgcaaatatagtatgtctgtgtctctgtgttcagtcctgcctgcacgtaa

SEQ ID NO: 29315 - DNA, 201 bp, Bos taurus
acatttttataaacaccagaaccactcagggtgtgggctcttttatcagaaaaggttattgagcctccaaagagttctttggcccacagacatagggtccrtcactgggagcctgagaagtcattgctgggacctccccactgcccccttctttggttgcttgctctcaaccaacgtgaggctggaacagcccccttcttt

SEQ ID NO: 29316 - DNA, 201 bp, Bos taurus
gacttcagcctgtttagccactactttccatcatcccatgggttgctctttcagactgaccctgaagtttgttcttttataaatgaggaggtgttcttacracaaagaatatgaggccaactggccataaggaaggaattgacttggggcggtgctgtgacagatgagacagtgatgtccgtaaggtgatgctgacacagg

SEQ ID NO: 29317 - DNA, 201 bp, Bos taurus
aaaaaagtttttttattattacatcatttgtggttgaggtataattatcacaaatgataacacacagatgttaagtttaagtccaactgaaattggcctayatcggttccattcagttcagtcactcagttgtgtccaactctttgcaaccccatgaattgcagtacgccaggcctccctatccctcaccaactcctggcg

SEQ ID NO: 29318 - DNA, 201 bp, Bos taurus
ctttgaaataagcatcagggtcaccagttgttgctaaaaacacctcttcatcatttttacttcgccacggcctttcctttccctttagtgaagtctcgttrttttatgttgcagcatttgtccaaggcttccgtttttcatctctggtgcctgcagccacctctttcccaccttgaactgcagaatccaggggtaaacagc

SEQ ID NO: 29319 - DNA, 201 bp, Bos taurus
acccatcagtgggactctctcaagctcttcttttaggagtaaatagcaacagcagaaaaaatacaaaaggaacaggttttgaaggccaagctgaagagcargaagaaaatgaggtaaggtagctattgtaagcaagctcattaaggtaatgtgtgtataggagcataaaagctgctggagggttttcactccatgcccctc

SEQ ID NO: 29320 - DNA, 201 bp, Bos taurus
tgaagctctaacaaccaagtagggtaagagcagaaaggagaggggtgtgagcgctgcccactggggtaggtgggaagtccagacccacgccctgcatgttygcggccacctccaacaccatactcatctctacggcctgggattttggcttttaggcaacacatttagaaccacacctcagacccaaacttcttatcagtt

SEQ ID NO: 29321 - DNA, 201 bp, Bos taurus
ttacagctgtcatcttttcacagcaaatcagaccattttagagtcctcaagtcttttcaagctctctatacagaaccaagatcacagattactctctacarcaatttctccttctttaatttccccaagagtttgttgttttccccactgacctgtttaactattcttgtgttcctctgtctgggctcctgtaaaccttgt

SEQ ID NO: 29322 - DNA, 201 bp, Bos taurus
agaacaagttgactctggctcacttatttattttctcttttcagatttaattttgagattgaaagaatatttatttgtatttgagatgctaacaccatcastgaactttttattgaaatttaagcacacagtgtacacgtaggacaatattttataaaccactgtcctcaagtgaaaaaagatgttagcaaaatattttaa

SEQ ID NO: 29323 - DNA, 201 bp, Bos taurus
gaagggtgcaaacaaaaacctgtgttcctcaggaccagggaaaggagctgtgatctccacaagaggctgagccagacctgcctgtctgtgtttgaatgtcytttgtggaagtgtgcatcagaagtgaccagctgctgggataattctgggaggtgtggctagtggcataagtcctctcggaggaggtcgccattatcccca

SEQ ID NO: 29324 - DNA, 201 bp, Bos taurus
cattttatggttatttgtgtttgtgtgatgttttataacttcctacactgttttttctgccctcattcactcaataagtgtcattaaatagtctcgaagarcatatctttattggcttctgactaatttattttaaggataaactataagtattatgattcctttagtgtgtgtttacatttttagaatattttaaaactt

SEQ ID NO: 29325 - DNA, 201 bp, Bos taurus
ttgcccaattcagaagtatgatattacgagagattaggtattagaagaaaccagaggttgtcctttttttctttactttgtgtatctctttcttatttgayttatgacagatacatattattgaaaagataaaaaggacaaagaatagaacttaaccttagtctttaagtaatagtgtgcaggtttttttttatattgtgt

SEQ ID NO: 29326 - DNA, 201 bp, Bos taurus
atttctcgtcctgttcaacagaatgatgacgctttcttttttttttttttttttaaaccaagagctgagaatttgctgtttaggataatttgttaaaacarcagcaaatcactgttatcaatgaggctttacttttttaagcaagtagaattttaggactagctcatcaattttctttcatccattggatttccttggaga

SEQ ID NO: 29327 - DNA, 201 bp, Bos taurus
tgtcaccagaaaactgtgcacagcaggatgctgttcacttgttacatataactctgttcctggcacccctgaaggcactagcaataaaactatgaataagmcaccaacacccctggcctcatggagctcacagttcagtaagttagtcatagcataaacagatggacagaaggcagacctctgaagaagcaaagagcttaa

SEQ ID NO: 29328 - DNA, 201 bp, Bos taurus
ttattccatagaataagtaatgaataaaatatcttaaaaggggtccatgtaatgtgaagagcaaaagacctagtttttatctacaaaaaagatttgtagckctgaggaaaggaaaagctttcatgcagaattaacctccaaagtcagaggttatcagagggtctatggaggtcaaacaggcatttctattactaggatata

SEQ ID NO: 29329 - DNA, 201 bp, Bos taurus
atggggaaggtgacttccactgaataaatgtgtaaaggaaacagagagagacaaagccaagttgaatttcattgccaggtgtcgtgcttgttccacatacyatatggaaagcatttcgctaaatctaagatgccactgatactaaggaaaactatacttttagatgctgcttagaacaaaaaaaaaatttctatccataat

SEQ ID NO: 29330 - DNA, 201 bp, Bos taurus
aatttctgaaggttgagtttctaggtcaaagaccatggacatttttaagggtttcagtacatactgcagcctgtcctacaggaaggccgtgccctttcacrctcccccagtgagcaagccagtgcgcatctcttgtcaacttctattagatttgtagtttctgtctgagaggccttcctgctttgtgcaatcccatcgcac

SEQ ID NO: 29331 - DNA, 201 bp, Bos taurus
agcctggtattgaccaagtttcacacaagattaacttggactctgctctgagttacagttggagacgacccaggcatacctctacacctctattaacaaayagagcaattttatgaacacaggccatggtggaaattcttagccctttgtgtattccactgatcaacctttgtaaagttataaacatagacctaggtccaa

SEQ ID NO: 29332 - DNA, 201 bp, Bos taurus
ttagaattctctaatctcaactgtccctctcacttcttgtttttcgaaatctttatttattcatcaaacatttattgacaacattgactatactggccagrttcttgtgggaaaagagatgaggtaaacaaagatacattcttagaaaggtttatatctgagagacagagaaacagtcacccaaatgcatggtaacttcac

SEQ ID NO: 29333 - DNA, 201 bp, Bos taurus
taactcacttcagtcaggggaactcccggcaaggaaggccaccccacagtgcttccctcatcagggaaatggagtcctacagttacagtttgggcaacacrccacaagtcctttataagaggccaagggaaaggaaggaagacaggggtgtctactaggtgccaggcactacacctgtgcttcacacaggtattcccagtg

SEQ ID NO: 29334 - DNA, 201 bp, Bos taurus
tcacagcagtctgtgaggcccatatccatgccctcatcttgttgataaggctcctgagaccagctctgtgtatggctggggttttctggggcacaatgcarctgatgtcaggccgtctggggcagcattaaatgttgccaatctctgccaagatctggaatccagtgggacgcaacatttttgtgacctggatccctgtgc

SEQ ID NO: 29335 - DNA, 201 bp, Bos taurus
tacaatccttccacccttcctcataactgaacttcttcaaagtgtaatctacttattgtcgccactttctcatccccacagggccatgacaatcgtatctrtctttattgatttattaaacctgcttgtttaaaagcccccaatgatttcttcatcctttctgaccattgcaggtatgtttagagactagaatctccttga

SEQ ID NO: 29336 - DNA, 201 bp, Bos taurus
tcaggccgactacaggataaggtcagccagacctgctcctgctcctttgctattgcaacactggcctggtattcagtaagctgaatgataggatgaggccyaggagtccaggtggggaccctatgggcacacacctcctcacaggtgaacatcccagcagtgggaaaggaggaacgcattatgctcacgtctgacacctga

SEQ ID NO: 29337 - DNA, 201 bp, Bos taurus
gacttagttcccccatcagggagcaaacctgggcccttggcagtgaaagggcagagtcctaaccattagagggcaggaaattctccttcaagttttcattkaaatccttaggcctgtttattacaactgttcaaagttcattgtccgaataccatcatctctgtggtttctaggtgtgtttccattggttgattttttgat

SEQ ID NO: 29338 - DNA, 201 bp, Bos taurus
ttcagtcatttgccctaaaaagatgagttaagtgtgcatctttctttgatcttctgagcattggaatatggctctctgtttaaaaaatgcattcacaaatkaaggtttaattcagccttctcagatagttttctttcattccccaaagataattttcttcactactcctttagtagttcttggcctttcaaatagctgtgc

SEQ ID NO: 29339 - DNA, 201 bp, Bos taurus
tctccttagaattactgtagtattttaatctatgacatttaaattagcatttcttatatttccctgtgactcttcatgtgcattactctggcctcatcacrattcactgattcaacaaatatgactcctcagcatgtaaggtagtttgtggacttcaggagcaaaccgcttagcatacatgctccctcggagttagaggta

SEQ ID NO: 29340 - DNA, 201 bp, Bos taurus
tgtaaagccttttgtaattacagggctttaaacaatccataagccttgacaagactgtttttcacagaagcaaattatctcttcaatctctcctaaaagaytcgactctgaatatctgattccccatcttcatgattaatggatggcaagaaggagacaagatgcataaaaacaacaacaacaacaacaacaaaaacagcc

SEQ ID NO: 29341 - DNA, 201 bp, Bos taurus
catgaacaggacctcaacctacacagacactgcatgaaatggcaaagatttatcttcactgaaaggcggaagagagatggagggcaagagagtggccacargtaggccagcgagggagctggaaggaacactccagaccaaaaagtgctatggctgagcacaagctgtatctcagcccagggccagcatgagaagctgtga

SEQ ID NO: 29342 - DNA, 201 bp, Bos taurus
taccttgaaaaatgcttaaatgctcaccacgtcactggcctatgaatattacaaaccaaccttcagagtgtattaaggataaggtattgctacttgcatgyggtacctggaggccaaaaatgctgtgaagggcaggataggagaatcccacaagaaagacctgtcctgcccggaatgccatgaactaccctgctgagaaac

SEQ ID NO: 29343 - DNA, 201 bp, Bos taurus
gggttaggctattgtattaggatcagatgtcctgttctacaacaggtcaaatccagctgagaagaggcatcactgaaaagtcaacaccttttaacaccaakgaaaaaatttgagcagtgtcataaacttgtcaattgcaatacatattaatcaacagggcataatcagcctgcaaattacattgtattaactttaatagtg

SEQ ID NO: 29344 - DNA, 201 bp, Bos taurus
aaaaagagaggaggagaaaaagacccagggaaatggtacccacctctgttttattccaccactgctgctattgatggcctcctgcagattctccctctgtygttccttcaacagagggtctcagttgcccaccaagcacaaacaggttgttgccctgaaaccacaagcatggccatcccagaaacctcctttcttccattc

SEQ ID NO: 29345 - DNA, 201 bp, Bos taurus
ctatataatagtttgcttctgctaactccaaacttccaatccattcctccctgctggcaaccacaagtctattttttgtttctgggcccacatgtacttcraattgttaaatgcaattcaattccatttggtttatgaacgtgtcactccttcccatgaactgacatatccttgcagaggatgtttggcctctcttgaggt

SEQ ID NO: 29346 - DNA, 201 bp, Bos taurus
gaatgaatctccaattgctttaccagttggggagagcagaaggcatctgctgcctgtctcaggctgtccttagcatgctctaccctgatgacttcatgcartgatggtgagacatgagaactaggaccaagcttgggttagatgtcttggaaaatgaaaggaaacactagagctgggagaaaggaagtttcaccggaaaca

SEQ ID NO: 29347 - DNA, 201 bp, Bos taurus
accacactgtctccaatattgtgtatcatttaaaaaattcttctatgattgaattagttgttgaattattaattggaagccaaaaagagtaacttgttgcrtttgagggtttattacccttttctgactctttccctgggaaagatgaagcgactgagcaggtatccgcagtgtcatcataacttttgtgttctgtgatgt

SEQ ID NO: 29348 - DNA, 201 bp, Bos taurus
ggcttttttgaccctcagtttctaagtctcctcaaacactgagtcaccatcctgtgaccctgtcttatgacccttggccatttcacaaaggaccagatatyggctaaaagttgatggtctgcctattgtttttcttttaataagaggaccaagagttaatggttgtcctgtcctggatctggtggttttgtgatctaacag

SEQ ID NO: 29349 - DNA, 201 bp, Bos taurus
tctgatcacatgatctgcatgcactcaagagtgccctctaagggcactgcacaggctcttctgttgtgacatacctgattactgtgggtgtattggtaagyagagctggcattggcctggttgacttccaggagctgcctcatgtgttagttgtcagcctgctttgggccattcattgctgggtctctgcaaggctggctg

SEQ ID NO: 29350 - DNA, 201 bp, Bos taurus
tatgaggccctttctcttgtattttgtccatttctgccttcacacaatgctgatccaagactggggcatagggtctggaccttgcttatcatccaccatgytagaaacagctggcctgtgctgtcagtctcctgttggagacagcaatattgaatgagatgaccgagagttaaccatgtgttatagcctttatgaagccca

SEQ ID NO: 29351 - DNA, 201 bp, Bos taurus
atatatatatatatatatatatgggtttctgtctgttcttctttatattcttgggggagaatggatacacttatatgcatgattgagtcccctcactgctyacgcaaaaccatcacaacagtgtcaatcagctacactccaatacacaacaatgagtccaaagaaaaaataataccttccctcagacttgcaaggctatag

SEQ ID NO: 29352 - DNA, 201 bp, Bos taurus
ttcaggataccgaagacttgtggttatctcgggaagagtgtgaactaccacatgggctgaggacttgagccagaacttccgaggccctcaaggggcaggamaagctggctgacatgtgggttacagctatgaggctgaaccgtgccttcacagagaagggaaagtcattcctggtgcaggcaacagatgtaacaggcccac

SEQ ID NO: 29353 - DNA, 201 bp, Bos taurus
gtcaatggagtgagtgactgagagacaaaacaacaaaagaccctcaaaacagtcaacaggtactccctgaaaagcacagggggccaatctaagaacagcakctaaaactcataggggttctgcccaatccaaaatcagagggaatgcgagaaaccccagggtaaggcctaaagggactgcagcaggaagatcacagggcag

SEQ ID NO: 29354 - DNA, 201 bp, Bos taurus
tatcacttgggggaaacatggaatggcagggaaaactgcaaacacctgaagccatgaatcacaagtcagttaacatgaagacttttcatagggagaatgarctgtattcccacttccaagtttccactggggaaaatgaaccacagagctagaatccaggactccagcagtatccctctgctctgcccaggcctctgttat

SEQ ID NO: 29355 - DNA, 201 bp, Bos taurus
actaccttaaactgaactaaagattctttaaacatctgaaagccatgatatattcagaggtaaacctgagatctatgctgttctagaatgcaggtgtgggyctggtggacaacagtcacaggaagacatcacttcattatgtggttgactaagcttggcattacgctggtctatttgctatgaaagttgcagaagagagtc

SEQ ID NO: 29356 - DNA, 201 bp, Bos taurus
ctgtgtcagaagctttctctatcccttttttactgtaataaatcttttaccccaccaagttttgagtgactgaagccaagtctctggtcccgaagcaaaaytgtctccttcagatcatgaatctgaactgttcaccataagctatcaattcccatcccttttgtcggatccccagggtcagaagcctgatgtggggttcag

SEQ ID NO: 29357 - DNA, 201 bp, Bos taurus
aagtaaaggacaattcagggcaatgcctatgaaaattctgtcttttttacaggaatggacaaactgattctaaaattcatatgggaatgcaaggggctaargctaaaggaaacaatctcaaaaaagcagcacaggacttccctagtagtccagtggttaagaatctgctgccaatgtaagggactggttccacccctggtc

SEQ ID NO: 29358 - DNA, 201 bp, Bos taurus
aagcaccatgcttttgagccaccagaatgctcagggcatgtgtgttgtgccctcccagcctgctctggccctgggaagaggggtggccctcagggcactgrgcacaggcataggtccatttatacacatgttccaggaagccagaagctgccctttggcttctctttttgaaactatcaaaagcttcacagaggcctctta

SEQ ID NO: 29359 - DNA, 201 bp, Bos taurus
caatttgaaaagttttcatcaaaaatacttgatctgtactgagatttcatgaaacttctagttgaaaaactaattcacatactcaagttgtttaaaatacrcttaaaagttctataagtactgaatcatatccattaaaaacttaataattcgattcctcaattgcaccagccacaaccaaagtgctcaatagagatgtgt

SEQ ID NO: 29360 - DNA, 201 bp, Bos taurus
tggccagggaaatccttgtaccaaagattttaaaaccaaattctccattgaccaaactttacaaattgtgcccagtgtttcgttcccgcaaaggatgttgyaatgaataaccacgtacatacacatcatgtgcatactgtataaaacaaatgtccttacaagccccagtacgggctgaaatgactattataaagtccactt

SEQ ID NO: 29361 - DNA, 201 bp, Bos taurus
ccaacaccaggaggatttacttaactagtcccgcatgaccaaactgtgaactagcagagctataattcagcccaagcctgcctctgcagtccaaggccaayatcatggtctgatacctgttttttgaaacaccactcttaattcccagattcagtggctccttttgaattcatactatgcttagtccctcagcagcatttc

SEQ ID NO: 29362 - DNA, 201 bp, Bos taurus
tggtacaatctggaaaaataataaaactgaatatgggccactcccgattaccagttcattaaataataatgtcattataacccgaaatttggtcttggttrggagattttgcttcttacctttaagttgggagattttagaaacattatacttcttcttctcctttttttcttttactgtgggcttctctaagtagttgtt

SEQ ID NO: 29363 - DNA, 201 bp, Bos taurus
ccaggcctgcagctggtctgtgtggccacgtcgcccactctgctgggggtggggaccctcctcagaacttcttaggccacagagcaaggacagtacactgkgatttctttccttgtaacttttctccctgtgcagtgacccctgctccctggagggcccaggacaggcagctgagagtcagagccccgtcccttgtccttc

SEQ ID NO: 29364 - DNA, 201 bp, Bos taurus
gattgaactgtgagttggaaagtgctttgggatttagacctcaggagagaaggctgagtgagtgtttttagtctcttgcaaagatttgtcctcttgcggtrtgtgggtcttcacatatcttccttggtgggtaccttttagaatgtgagcaggctggccatctggtgaaagtcagccttggaagagaagcaagggaaggat

SEQ ID NO: 29365 - DNA, 201 bp, Bos taurus
aatggggccccaaggaacagagactggtacagaaagtatccacgacgctgagactgtgtttctgactttcctcattcctccctggcaggggtaggactagrgagtcagaagatggctgcttctgagctccaaggaagcccaggacatgctccactggcttgtactttgcaaattaggtcttgtgctgggggaggtgctacg

SEQ ID NO: 29366 - DNA, 201 bp, Bos taurus
gccaggaagtcagtaatttaggaaaaataatgcaaaaataatacaatttctctttgaacaaaaagtgtctttgtcctgcatttagtgagtagagcagggayacagaacaccaggcccctctgctgtctgctaaggccaataatatcattcctccaacttataaacactggttttggctggagccccaggtctgcaaatgct

SEQ ID NO: 29367 - DNA, 201 bp, Bos taurus
gtaaatatttgttgcaccatttacatagatgattaactaaaagttgaaacaaagaaggtttatgcataaaaacttcctccagttggaatgatttttctctrtacattaggatggaaaacaggagtcgagctactttggggttcctgctgggtatttgggaaaattggttacataggtgttgtcactacgctgccctgagga

SEQ ID NO: 29368 - DNA, 201 bp, Bos taurus
caagagagctgtgtttctgtgaaagcatattgacactaacgtgtgtccttgcagaggaaactcgtttctgggcttgttgaaccaaagaggatattaaagayagcagggcactggctccctactgccctctttttggtagtttctacagggaaggagaaagttctccaagttgtcccagagcaaaacaatgggactagaaag

SEQ ID NO: 29369 - DNA, 201 bp, Bos taurus
ttccactttagcttggtggcattacaacaattctattctattatttactttactaatctctatctcccagtttttcaaaaatggtcatgtactacatatawattacatttttaaatgaataaaatacaacttaaaatccttgagttatttttgattaatgtctagactcccccaatggcatacatactctttgatgtaaga

SEQ ID NO: 29370 - DNA, 201 bp, Bos taurus
gggatgctgggtatctatgtctggatgagccatgtggccagtgaggcttgtatcacctgagagtttcctagcatcttgggccattagatgagaaggcactraaactggagaacagaacaaagagaaggttctacccttctgaagagaaacagaagtggtctgtaggtacatgataaacactctcagtggtcagagcagggt

SEQ ID NO: 29371 - DNA, 201 bp, Bos taurus
tcttatcatttgttactgaaggccctcaatcctggttatttcaagatgcttcacctcctctccaaaggagctcttaggatttcaagctgattattgcaggygcttaaagacaaagcctcatttggcctattattgaacaggtgggatatgcatgtggtctttgcaactttctatttgtctcagtagctaaaatttgtattg

SEQ ID NO: 29372 - DNA, 201 bp, Bos taurus
cgcccgccccccccgcatgccccttttttctcgtgttttttattcactgcatcaggtaatcctctagatgcaccttccaaacagactcagagtcacctatytgtcatctcttctgccacctccctggtccgaggcaccatcctctctcccctggattgctgtgatgcttccccaaggagctctccacctccaccaccgccc

SEQ ID NO: 29373 - DNA, 201 bp, Bos taurus
cagaccatggaggccttggctgcaggccattggtggagttaaaaattgtcacttacagacactcaaagccatcagcaggatcactgctttgccacaggccrgtgcccaggaagtcactgcagctggcatttggctgcagaggttccctgcgacccactccatccccactggccagtgcttggcctggctgccttgcctggt

SEQ ID NO: 29374 - DNA, 201 bp, Bos taurus
agaacttacagcttcactacaggaggtactgaatctccataatcccaggaaaaatggaagcacaatcacaggcccccagaacctaagacagcttttaccarattgctccatttcttctatttcattttgagtttgaatcactggttactgtctcaacttgccctagagctaggaacattaagtaaatttctggcaatagct

SEQ ID NO: 29375 - DNA, 201 bp, Bos taurus
tgttttgcaaacattcctttagaggcacattggaaaatggcctcagggtctcaagaaggacacaggaagacctttagggaattagcctgagtccagagggyaaatgagtaagacctggtttggccttgggatgaagacatttgtatggtataatataaggaaatatttaaaaggtgagatgatcagtcagaaatcctacta

SEQ ID NO: 29376 - DNA, 201 bp, Bos taurus
acatttttgttcacgcgagatatttcccctccagcaattactgttgggtaacactttttacttgaaataagaataaggctccagcgttttattaaaattcytttcccaagccaacgataagccagaggctttcacccgggctgggttctcagtgtctcagtgggaactgggaagagagaacagggaaagctggagttgggg

SEQ ID NO: 29377 - DNA, 201 bp, Bos taurus
aactgttgccatcctcagtttgcctgcaaaaatacagctctggtttttctttaacttttacaatgctgttagtttcacctggtgagtcataagaccctggmagggctgaccaggcctccaggggctcaagaaaattccaagacccactccctctcttatctaaaatgccacttgacttgctggtaacaattggtgtgtttt

SEQ ID NO: 29378 - DNA, 201 bp, Bos taurus
ctccctcctccctccccataccatccctcttcatctgttttttaattgtgctttgagattcaattccattagaacaaaggccttgcaaagtgtgaaaacaygctttaggccaagggtgtgcagggtgtgaggagttgggggcgggtagttaaatatgtggaggagagtttctgagttagaaagggaagttaaactcagggt

SEQ ID NO: 29379 - DNA, 201 bp, Bos taurus
gggggtgggcctcatgtttgctctgctgcctagcagagggtgataccagttcctaccttgtctgatgaaaggacctcagagaagcacagcctgacctcctyttaggcctggaaaagaacacctgtcccttttgccactgggacccctgacagtaaggacggtagcaggtttagggaaggggcttccagtggtgtctgtccc

SEQ ID NO: 29380 - DNA, 201 bp, Bos taurus
ttaacttacatgcagagtaacagtctaagtgatgatgctgtaaatgtgataagggtgctcttggctcatggaagtggcctgatcttgctccttcttttctraatcctcatccctgctccctagcctctcccctgagctggtggaagaggggtgagggcctggattcccttctgagggctttctgtttctctcctgcagcct

SEQ ID NO: 29381 - DNA, 201 bp, Bos taurus
aaaggcatcactcaagcttcttcacctgcctctttgtctccctggctggacagccagaggactggctgctggccgccacctcggtggccctgagcctcacycaccacccctgaaatgggtgcacacgtgtgagctgtcactcagcacattcattcattcattcggggcgctgatgcttctattactcagctaatgaccttt

SEQ ID NO: 29382 - DNA, 201 bp, Bos taurus
gcagctgatggagaggcaatgacttgaagatgtgtttatactccccacccaggagacagagccaatgctcacatgcatgcatacacacacacacacacacmccctaagtgggcccatagagagggagggaggaccagagagagaccatgaagaggtgccacgtggaaaggaccacgggaatgacaagaccagaagagggtt

SEQ ID NO: 29383 - DNA, 201 bp, Bos taurus
tccgtgcatataaacaatccatggtgaagggacggaccgcgctgaccctttaccgggtggtgctgtgttccatgcacatcaccttactaattaccacaatyacctccaagaggagactcacacccagctggggacctactggcggaggtgagaaacggggcccccagtcctggccaaatgggtcccgggcagcccctccca

SEQ ID NO: 29384 - DNA, 201 bp, Bos taurus
ctccggcagggccacacatggggctgggggtgaccagggggcccagaagaggggaggggagggggcagcgggagaaggaggagggggcatgctcctgatgrgttttccctaaagctggccctgggtgagaaaggacgggaagctttggggggatttacagggctgggggcagtgggtatttacagggctcacttaacagcc

SEQ ID NO: 29385 - DNA, 201 bp, Bos taurus
tgccctgcatttaaggctacactttcctgcctcacattccagtgtcagcagcttggctatgcttaatgatggaagagtggacctgatttggttttggtcayagtgatgggatgcaggcttgttactgggagggcaatgtggtgacagcctcccatagtggaaagccagcagacagaaagcaaagccatggacagagcttgg

SEQ ID NO: 29386 - DNA, 201 bp, Bos taurus
caatccaggaggcctctccaggagaagagaggaggaaatcagctccagcagtttcctcggctcctggcagaagccctcctatttagaagagggaggcaacrgacagtttctgtggccaactacagcattcatgctgttgaccacttttctaatactgtttgcaagctttgtataatatcactaggttttctgcaattctca

SEQ ID NO: 29387 - DNA, 201 bp, Bos taurus
atgtttctaaatactgttaaaccctgctgcctgggcccttcccatccagacgagagcctcgggtggggacagagtgagtcagctagggttgagtcaagagkttggcagcttgcagcaccccaaggcctggccttctttttctttatttatctttgtctttgctgggtcttcgttactgctcagactttctctagctgcgga

SEQ ID NO: 29388 - DNA, 201 bp, Bos taurus
agggtccccttcgccctgtgtgtctaacgcacttcttcagtgctcagcaggcccacagggtttcttctcatgaccatttaaacctctgcctcctgacagcrctgtctgtctatgttttttatgtatcgtcaacatcagagagatacttgtgagctttgcagtatgtggttcataagacaaaatgtccatgtgttcaagggg

SEQ ID NO: 29389 - DNA, 201 bp, Bos taurus
gtctgtcccacatgcccaaaatatagcagcaaaaggaggaaggctaaccaggataaatgcttccatttgacaaggggaggaaagggatgcacagagcaatygctggtccgcagcagttctgaaatcaccagggaaatgaccacagggcacacagggacaggaagtgttccctgagtcagcaagttccacttactgggagtg

SEQ ID NO: 29390 - DNA, 201 bp, Bos taurus
ggtcccttccctggggagtcccgccaggcccccaagtgctgccacgatgaacgtgcacagacttccaaaggcatctaggagacccaagctggggacaagcyggccaagaacgcgtgaactccagggacacggagcggggccgcagaccccaggctccctgggccctgccgtaggatctgggggaatggccgggagcagaga

SEQ ID NO: 29391 - DNA, 201 bp, Bos taurus
cagccggtccaggaactggaactgccagtaacctctgtttgcccctgcttgttcccgcctcgactgcttcctcctcctcatgaggtaaacacgattctgcmctcggtgttcattttttgtttcgtttctgggacttgatcttccccactccacattgcattcctgaggtttgtttacattctgtgagcagctgtcgatacg

SEQ ID NO: 29392 - DNA, 201 bp, Bos taurus
tgtggcctggaccagctgctttcaccagcaccctggggacagttgtgctggccacatctgcacaggcttcctgaggctccacaggcctgagaggagcaggmtgagccaagggactgcgcaaggcagccttgggaaagagggtgacattcaagcctggctaagggtgtctagaaagatcagagctgtatggtctcctgtcca

SEQ ID NO: 29393 - DNA, 201 bp, Bos taurus
aagagcctgagcgcctccactagctggacagctgctgcagaggaggacgaccctgcagagcagactgagaagacggacgggaaaggaggtgacgacacagkggggaggccgagggccgtgaggcaagacctcctagagtctgcctgtgatctcgtcaccacggatgcagttacggacctcgcttttgtaaccactagtttg

SEQ ID NO: 29394 - DNA, 201 bp, Bos taurus
gctgccagacctggggctgggctcggcctttctgctccccggcgctgccccctcccggcacacgcctccacgcttgcttttgttctaacttagcacagtcrtgtagaacaaaacacagctggccgtctctgctcgctaacaaagaggaactggaatgtaaggagaggtggaaacttttccatctccagtctcactgggatg

SEQ ID NO: 29395 - DNA, 201 bp, Bos taurus
ctgtggccggctgcgtggcggaagtccctccgcacatcatcttggcggcaagcggggcgggagcgtgcggacaccgggcggcggtcacgcgggagcggcartcacgcggaagcagcggacactcgccggagcagcggacactcgcgggagtggtcgagcggagtcgagcgcccagacctggcgcggcggtcatgtgccatg

SEQ ID NO: 29396 - DNA, 201 bp, Bos taurus
gcttggcctctaaacatgtcccccttttaacaactgccttctagcttcactgactccaagctccagttcagggactccccagtcctgcagcgacattgcaytcagcacaagggctcccggccagctgggagctgaggaggtgggcagggtgccagggaacatagctggcaggagtgcctgccccgcccacccagtgccatg

SEQ ID NO: 29397 - DNA, 201 bp, Bos taurus
ttacagatgaggaaactgaggctgcagccttgcaggagtcactcagatgcccaaggccaggccagtgcctctgcatccagaggcctcaaggttatggcctrttcagacagcacagtcgcagtctcttgggtgacactcaccctggattccttctcagtggggcactgagggcgctggcctagagctccaacagaaccctgg

SEQ ID NO: 29398 - DNA, 201 bp, Bos taurus
ctttatttgttaataggcagaccccttacctaggtcaggacaaaatccatgaccaacaaggatggagagccgcatgctggctgacactcagggcctggagygaaccaggagccagcccacgctgctgacagtaaattcaggggcagaaggagaccccagacttggctctaggccacagaaatttcatatgaaagccagcgt

SEQ ID NO: 29399 - DNA, 201 bp, Bos taurus
attgaaattgtgacagattgttctccagcttctccacaccaccttcacccacgcctgtctcaggattaaatcctgatccaagacctgcctctcaggacaaytgaccatgggctctgggggacgtggtttagcactcaaagttcagtccttggatctggtcactctaatgcactagggagccccagtatcacgggaacagtc

SEQ ID NO: 29400 - DNA, 201 bp, Bos taurus
caataaagctttttgggagaatcttttgggtgggaaaataaaatccaataataaaaaaaggtttacagctcaatgctatttggtgtgggtcaggtcagacygcatcctgggccccgagatgcaggggaaacgataggggttggggaagtcccaggacggactgcaccgctctgcttcctgcacgtggacctcgtgggcctg

SEQ ID NO: 29401 - DNA, 201 bp, Bos taurus
gcactccagtgggggacagtgcactccactggggggtacattctagtgggagtgcactctggtgggggtgcactctgctggggggaagtgcactccagtgkggcctcctacccatggaagagccagcatcctcctcacatggatgaaccagaatagcaccccaaccctcacccaggggactgctggcccctaattgccatt

SEQ ID NO: 29402 - DNA, 201 bp, Bos taurus
ggaagaacagccacctgagagacaggagatggaccaggggtcctgggctgcagtaggggagcagaaatgtggggacccaagggtggctgacctgggccatytctgcaagcctttgggacggaaacactcagcatctcagaaatagagcctgtttgtctgcctctcccaacacctgctgatggggagcgcagattgggggcc

SEQ ID NO: 29403 - DNA, 201 bp, Bos taurus
cacacacaaacatttcacagggacgacaaagtggcttccaaagaacaattaaatgtggtccttccccaccatcaagtgaccgaaaccaacactccctgagrtgcagcaaggcctgagtgaactgtggctgtggcgggtggcggtctcagcaggaccagcctggaccatgctcggccagcgggggacagggactgggtcact

SEQ ID NO: 29404 - DNA, 201 bp, Bos taurus
cctcaaggtcactgagggtcaacgggcccctccccagaggccactgcttcttcaggactcaccctccacagtttcctctgggttcctgcagatgtacctcrctgtccctggtgttatcacccagagtgccctgcgtcctgtattgggttccttacacactccccacatccctgtaaataatctcttcttagaattatctac

SEQ ID NO: 29405 - DNA, 201 bp, Bos taurus
ttgtttagtaaatgctatgcactaaattgttcttccctcaaattcccctgctgaagctcaaaccccagattcatggtactgggagatggggccttcaggakgtgattaggtttaaaagagtgtgaggtccttatgaagggattagtgccttataggaagagaccagagacccccttctctctttccttgccatgtgaagtc

SEQ ID NO: 29406 - DNA, 201 bp, Bos taurus
tacctttttaaaaaaggtcaaatagtaatatcactaaatttttacatcgcaaggtcatggagggagattttaccttcacctgtttcttgcaggctcccttraggcctaagtgcacaagtaacacctgccaatgtctgttgagaaggcagccgccattctctttgtctgtctgtcagaggcagggcagcccaccgcctgccc

SEQ ID NO: 29407 - DNA, 201 bp, Bos taurus
atggctagggacatgcctctccagctcctgtgtccactcaaacatccctccagcccgagagtgcagcctagaggggccagcgtggcctcaggcccacagargacactgagccaggtgaggggtctccatgactgcaggctcttcatttgatgggacttcctagagttgaggcctcgaggctcccattctccagcaggagtg

SEQ ID NO: 29408 - DNA, 201 bp, Bos taurus
ttttaagagcacagctcagccgtgtgaaacatgttcacccagctgtggaccacctccagagccttttcatctcctgaactgaagctctgcccccgaaacayggactccctggcccctccccagccccggcccccaggcccaccatctaccttcggtctctatggatctgactcccccagggacctcgggtaagggaattgt

SEQ ID NO: 29409 - DNA, 201 bp, Bos taurus
cagggacggccgggcatctcattggtcaaggaaaactacgccgagcttctggacgatggcttcctgaagaacatcactgcccagatctgcataggtgagtrtggcaggcgggccccgtggctctgctctccgctctccgcttgctgtgacctccggctgtggcagcagatgcccatggccagcagcgtgtctgctccccac

SEQ ID NO: 29410 - DNA, 201 bp, Bos taurus
tctgccctcagagcctctgcctggggagaagagcaacccctcctttcacaagaaggcaaggacccagcctttgcccacagagatgtggccgctccagcccyggcaggggtccagcttgggttggggagagtgtgggatggggaggctggagcctgggagacctgcggctgtgtcacctgagcaggtgagagagtgggccgt

SEQ ID NO: 29411 - DNA, 201 bp, Bos taurus
ctgcactccattttacagagaagccccgcttcagctgacatattgtgtgtagtcaccagccatataacacataggacacagccctctggctgaagtggggraggccccgggcccctaaattcctgccccaggttggagaggcccagtgtgccctgtggaggtggcctggaagaccctggggcccggtggtgctccggaggg

SEQ ID NO: 29412 - DNA, 201 bp, Bos taurus
tgggacctgctaccaaccaagaaaccctaggcctggattcagcactcctcctgacaccccctcctggggctgagcagacacccacagaccactcagctggyggtggaaggccaacagctcccgctccagaagaccccaaatcgtcctgacatctgaacccaaaggcaagtgcgggtggaagccatggggggccaggggcac

SEQ ID NO: 29413 - DNA, 201 bp, Bos taurus
gtttgaggtcagaagtggtcagacattgggaattcacatgaatcagtgatagttccttcccttgaggaaatcgcagggccactgtattagagaccattcaraacacacggtgagggtgtgagacgctgatggggagggcagggtggcaggcggaggacagaggggcctctgcaagcttcccatgcaggtcagacttctgac

SEQ ID NO: 29414 - DNA, 201 bp, Bos taurus
gatcaaatatggaataaataaatatccatgtacatcagtgttaagctaatgagggagggagtgggctcataaccaccatcacaccaacttgttaccatggsggttgataatttaaaagaacacaggtcacacctgctgatgagggaaattcttcacagtaaagcaccagcttattaatatagagggagcaatagatacagt

SEQ ID NO: 29415 - DNA, 201 bp, Bos taurus
acagctccgctgaggaaagggccttctctgaaccgtgactgactgcatcgtggttttcaagaaaaaaacaaaacttttatagatctcagtatgttttagtrtagcctggagtgtgagcgtgctcctctcagcagctgcgtatagacgtctcagaagaaagcaaaatcttcctcaccatgaaaatcatttctgtaaatgtct

SEQ ID NO: 29416 - DNA, 201 bp, Bos taurus
ccaccaccatgagactaatgggttgattgaggtgaaggggtacagcgtctgggcctggcgccaggcatcttccacactgggtgcctgacggccttccgctyagctctcgtgtccactctgtctcatgcagggtccatatcctcctgtgatgcgttcctcaacgtcttccaggccagagggctgaggccagaggtcatctgc

SEQ ID NO: 29417 - DNA, 201 bp, Bos taurus
ctcactcaggtcccctcgtgttccagaggttgggcctgcctccatgatcgttgggaacctggtcgccgggaagagaatcgctcaggcctcagggagggagytgtcgcacctagaggacagtgagcaggctaggaaggtaagggggttggaggggagggtgaagaggtccctgggaagccatcaggcccgaccctccccaac

SEQ ID NO: 29418 - DNA, 201 bp, Bos taurus
tgaagctcgaatctaagacagagtatttttgtatcactaataaaaaatgtgttacgaactgtcagggactgcaggtcagaaagtttacgaatcacatgctycctagaaacagccaggtttttctggaattaacctgaatcagtgcctaacagttgttaattctttaccatttaaaattctccgccaaaaaggcctggctga

SEQ ID NO: 29419 - DNA, 201 bp, Bos taurus
attggtggctacaaaagcataaaggtcataaaattccctggcttcaccaacagctggaagcagaccctgtctgcacagacagatcaagaatgaccttcacygcacatcagacacatccatcataaccttcattctacagacagaacaggaggtgcaggtgcttgggtatggccatctccagggcagagctgtgacctgccc

SEQ ID NO: 29420 - DNA, 201 bp, Bos taurus
tttgaatccctggttgctgttcttgagccctatgtggggtgcctcatctatgaagtgacctcaatggtggcgaaaaatcgggagaaatagaggggctgtgkcaggcaaaaggtgtcaggagtatgaagaccctgaagaggggccgagctggtaaggctcctgtctttttccccactcatgcggcagtttgctgttttcttt

SEQ ID NO: 29421 - DNA, 201 bp, Bos taurus
cttcctgtgcctggggggctgctctccaaggacaggaaggggcttagctgcagggcctggggaccggcatctttcaggtggccgcccaggtgctgggcacytggtgttccttctctcacttgctcgcagtgttcctgggtctgcagccccatttgcacccactgatgctgcctggtgcccgggcctaggtctgccctgtaa

SEQ ID NO: 29422 - DNA, 201 bp, Bos taurus
ttctaaagtcttcgggaacgtggcaaagacgcactagcaagctcattgaaagtcctcaggaagagggctttccttttgtcacatggacttggccacagtaygccaacacaacagcttctggacatcagagcaacacggactgatacaaactcagtccatggtctgtatagaatggagctgtgtacctcatggggccgtgtt

SEQ ID NO: 29423 - DNA, 201 bp, Bos taurus
actcagacaattgattctcaatgatatcagagtattgactcactcaatctgaccacaacgtaaaaacattagtctcagaacggtgccggtgcccatactcycgggactggtggtttcctcctgttagtgttgtgatagtcgtgccattatgggaatgtttcaatatgcaggaaggcctgcattttcctggcacacagatat

SEQ ID NO: 29424 - DNA, 201 bp, Bos taurus
tatctgcattgttcatttttgagatatttctttataaattaatctgtaacctcctgcagatgcaggccaatctgggataagaaggccaggctaaataaatraaacagctcaattccagatcagttttccagtgtctcgcattaacttctaggagagctctgcagggaaggcctgctcttgaggctaaggtcagcaggaggg

SEQ ID NO: 29425 - DNA, 201 bp, Bos taurus
tccaagggcacatccagccctggcctcactgccaacaacctccagagacacagccgcgggggttccctcccgcctctgctattcctgaaggcacagaggayccatgtggtcaccgaaccaggggccaccgtcctggatagtaccagagagtgctctgagactacttagccagcttaggtgaaaatgtactctgtaccctct

SEQ ID NO: 29426 - DNA, 201 bp, Bos taurus
actgggcaagtaagttggcttccctacttcactatcacgcccaagaacaagtgaagacagtgctcaaccagaggatggtgtcggccctcgggacatctggyagcatctggtcatttttggttgtcatgactgggggcaggggggtactgctggcatctagaggccagagacactgatgaaggcccggcatcacacagcact

SEQ ID NO: 29427 - DNA, 201 bp, Bos taurus
cagcaattacaggccgcagctaagagcgtgtcacgagtcaagtcagataaagttcagaccagaacccagaagttttgacccggttcttatcaccctgtccrttgtagaattggccacttaatttttctgaatggaccagggattctttgaaatggagcctgacatggtcccaccccacctccaatttatcctattgcttct

SEQ ID NO: 29428 - DNA, 201 bp, Bos taurus
gaagaaaacaagatattttccccgctcgcttggagctgcagttggggagggcacacacgctataaattacaggcgacaagaaatgaccacagtgcggggcrctgctcatggccaggctcggggaacagggtaccagctgcgaggagaatacggactttaatagagagtagggcaattcttctagcgtcgcgctctaaggca

SEQ ID NO: 29429 - DNA, 201 bp, Bos taurus
gcagggttttcttcctctcctagccccgtggcccactgccccacaccctatccctgttgattgatcgagccttccttccagcgctcagctctgtctcattyccaggcacacaggccctgtaagcacagcggactgaggatccccaggacccagctgcacaaaagacccgggcctgtgagaaggctcagagcaacatctgcc

SEQ ID NO: 29430 - DNA, 201 bp, Bos taurus
cagaaaaatctccagtgtcagcatgtcacaagtgatcctagcgcacaggacatactcagcgccccgtaactagaccatgtccaaagtcaatggaacttcamttgcaaagcggaagctgtgaatgccaaactgggcagcacagagtgccagtctcaacttccttgaagtttgtttgtgcaggtttggaaatcacagagaggt

SEQ ID NO: 29431 - DNA, 201 bp, Bos taurus
ctgtcgggcccgcctggggtggatcactgctgtaccattgactagaattaattaatctcagggttcagaagatcactgaagggctacattcaaccacaccraacacatggcctcctggtatcctacccctcttcagaaagtagaagtaactcagcaacctggccaggaatttagttcaaaccaggactgggtgatgataat

SEQ ID NO: 29432 - DNA, 201 bp, Bos taurus
ggctgtgcatcagcccccagaaggaacagagtccacacatggcctgatgatagggggtggggagggaagtttgcatcacctgaggtctaattcaagagacmtcatagattgtattggctccaatttttaaactagggcttcacaattttttcacagaagaaaaagcacaagcaactcattagatcaaaacattattctaga

SEQ ID NO: 29433 - DNA, 201 bp, Bos taurus
tggtctctggagctagaccagagaataggcctcaacagcttttcctttctccatgcaaatcttctcataggtctccacatctagggactacaggaccatcygtagcaagtcttaattacaaggaggcctagccttgacctcctatgggagagacatagagttagcctgagtataaagatccatccctttaagacagcaacg

SEQ ID NO: 29434 - DNA, 201 bp, Bos taurus
tactggagtgggttgccatttctttctccaggggatctttctgacccagggatcaaaccaaggtctcccacattgcaggcagacacttttccaactgagcygcctgggaagcctcatataggccattacaaagtatcaagcagagttccctgtgctgtacagcaggtccttatcagttacctatgatatatatagtagtgt

SEQ ID NO: 29435 - DNA, 201 bp, Bos taurus
gagcagacttacagagaattgacttatccatcaccagaggggttccaacaggagtcagtattgtgactggagattctgcattaggtgagggaccaagtgarcttaaaaaacccctataagatccacagattcaagggcggtaaatgaatcaactccatcacagagaactcagagatttttccttgctgagggagctgtgtg

SEQ ID NO: 29436 - DNA, 201 bp, Bos taurus
aaaagacactccacttgaacagaaggaacgtcagcacttccagatatcaagtgcctctagggcgggtatcctaagtctagactgcatctcaagaaaactgragttgacctccagagaggatccccgcggtacacaccgcagtttaaagcccattcctcctggccatttctggcagacctctgatttccacttcttgtctga

SEQ ID NO: 29437 - DNA, 201 bp, Bos taurus
ggctgtctgcaggaggaggaagtggcctgccacagaggagtgtgtgctgatgggaggctgtctgcaggaggaggaagtggcctgccacaccgtcctcctgkgagcggaatgaggaagcagagtccactcgcgttgatgatttgaaagtcagttgtgttggccttatcacagggggcccggagcaatcagaaagcgaagagg

SEQ ID NO: 29438 - DNA, 201 bp, Bos taurus
tgagggggagctattttgctaattaaagggtaagaaactctcactcttgaggggctggagcaagtccctgggtcccttcaggactgttaaaaaagaggccytttgctctctggtcaagaaagagtgttcagtttaatccaaggcatggacgtcactcaggagttcatggcccttgcagctcaagaccggtctggcaagggc

SEQ ID NO: 29439 - DNA, 201 bp, Bos taurus
tgttccaaagaaatgtattccacttgagaatggccagggtaatttttcagcaatggaatcagacatttttgaggggggaaacctaataaatggcctcgctstcagtggtcagaggaggtcttttggaggatggaaaacagaatccaaaggcaggcattgattccccagaggagaaaggataaagctgagatgaaaatcagg

SEQ ID NO: 29440 - DNA, 201 bp, Bos taurus
acagcaggtcacaggcccgcagttcaggaagggaacgtcagacctaggtggagagggggtgtttgagggtgagcaaggccaggtctcccaaggatagactkggaagccccccagcatgggggcagtggtcccgagagcaggacctcagccttggctcctggccaggatgagagaaaggaaccgtgtctctgaaaataagag

SEQ ID NO: 29441 - DNA, 201 bp, Bos taurus
gccaggtgcagtgtcctggcacttctggcctgaaggctggtggggcgggtgagccctcaggcagaaggaagtcagacagagcacacagagggacaacgacraggccctgacaacacctgtcacactctcatatcatacaagtcacactgatagtgcccaaagagaatttgtgtgtgtgtgagtctgtgtgctcagctgtgt

SEQ ID NO: 29442 - DNA, 201 bp, Bos taurus
cctgtttaccttgaagaaaccaaacctagccctcagggcaccagaattttaaatgtgccgcatggtcaactttccttaaattgcttagcatatggccagcygagtgcaaatgtggaaaataaagaccctgtagccacggcagtaacggtgtcacaggctctgtgagtgcatgagggtgtttgtgatgcgggagatggtggc

SEQ ID NO: 29443 - DNA, 201 bp, Bos taurus
cccatttaacaagcagttttgcctggtgggccctgtcaagattactgacacctgaattaaagcaacgccagtctacattttctgcagtgactttgacacamatggccagttggcttgtgtggggaaccagagtctaaagttttcaaaacttacccttgctggtaataacttaccctgagctgtgcagcagcaccctgctgt

SEQ ID NO: 29444 - DNA, 201 bp, Bos taurus
gtttgctggagacagaccagctcaggggcagctcggccctgctggctaactcggccagctctttggcactgagagatggggtgctggtctcgtaggtctcrtggaagctgttgtagtcgacttcgtagaacccatcctccagcgtcaggacaggtgtgaatcggtacccccagaggatctcactggtgatgtaggagcttc

SEQ ID NO: 29445 - DNA, 201 bp, Bos taurus
taatctctggagcctgtgaatatgttacgttgcatggcaagggggaattaaggctgcagatggtattatggctgttaatcagatgactttgaattagagcrattatcctagattatccacgtggtccagtgtaattacaagggcccttgtgactggtggagggagacagaagggggagaacctgagagatggcagcagaag

SEQ ID NO: 29446 - DNA, 201 bp, Bos taurus
gaagtattcaccttagggattagctggtccctttttggtttctgtgagccttattctgaccctaatcaacacaccctgggctacctttacgatctaaacaygttgactcatttctacttgccaacttttgggtgggctgctcttctgaccacacagaagcctttgacactaattcttgtatctttagcttgtgtcttacct

SEQ ID NO: 29447 - DNA, 201 bp, Bos taurus
acagagaagcctggtgggctacagtccatggggtcgcaaagagtcggacacaactgagagacttaactttcactttcttttcacttaactttccaatactytggccacctgatacaaagaactgactcattggaaaagaccctgatgctgggaaagattgagggcaggaggagaaggggatgacagaggatgagatggctg

SEQ ID NO: 29448 - DNA, 201 bp, Bos taurus
cttttattgtagctgagcagatgtttcttctttattacacatttgcttatgccttcagttgtagggtctgtggtctttcttggaggaggggctacttctcrtttccaattgcctgatcagtcactggaggagtgatgggaaaacttcagataagatccacaggatgtgtgtggatgctggaggcaggggcttgggttcaca

SEQ ID NO: 29449 - DNA, 201 bp, Bos taurus
gcaacattgtagaattagacacgtcttgtgattgaagacaacatggcaacatcattgatttcatgattgtgactggttacttgagtatatttgagcacccrtttttctttgaatgggaatcataactcttatagagttacgactgaggacaggaggagaagggggcgacagaggatgagatggatggatggcaccacctac

SEQ ID NO: 29450 - DNA, 201 bp, Bos taurus
aggcagacacttctggactataaattcaagaattttcatggagctcagtctctcaaaatgcccatctcccaaaaaagattttcaacaggtggtgccagccrtgagtgctctgcttaggataaaaattgcacatgtgtattattagtgctgctgaatttaataaatgcacccaggtctgttaatttattcaaattttggata

SEQ ID NO: 29451 - DNA, 201 bp, Bos taurus
ttaccatctgaaccatctaggaagagagtggcaaaaagaaggcattcatcttagctattaatcaaattaaattgatgtgacatccatcacagtgggttctrttagtaacagaaggctatgctgtggacttcccggcactttgaacaactgaccatcagcacagcaaggctatgtgcatctaaatcaaattccagagttagt

SEQ ID NO: 29452 - DNA, 201 bp, Bos taurus
tttctgttgcagtgactcccaaacttcaacatgcttccaaatcacctgtaaggtgtgtgagacctaatggctgagcctcactaccagagtttcctattcarcatgtctgtggtgggacctgaaaatttgtttttctaacaagttccaggtgaggctcctacagccccctgggaccccacttagagcactgctgctctatgc

SEQ ID NO: 29453 - DNA, 201 bp, Bos taurus
ggctccaccccagtgggtcttcctttgtctccataccatgtcagctggaactctgcagccagtctgcagaatcttggaactagaggcctggcatggatgcrgccttcaagcctaaggagctaccaaagcagaagggcactctctgggtggggcaggactgagatgcaatggagaaagtcattctggacccaagagttgtgg

SEQ ID NO: 29454 - DNA, 201 bp, Bos taurus
acgttacaatcccaccttacaggggaggaagcagagctcagggccctggcgcagggtcacgggactgggagggactcaaaggcaggggtgtctgtggccayaaagcatcagaaacctcaggggcaatctgacagagtccccagtgaagagaagagctgttccccatgcatttggggtccccgatgcatttgaggccgtccc

SEQ ID NO: 29455 - DNA, 201 bp, Bos taurus
tggacttgttggatctcctttctgtccaagggactctcaagagtcttctccaacaccacaattcgaaagcatccattcttcagcacacagccttctttacrattaagtaatagtgccaggcttcaaacctagaccatctggccccaacccacttctaaaaaatgggccaaaaaatatataaacgttaaaggggaaaggaac

SEQ ID NO: 29456 - DNA, 201 bp, Bos taurus
agggggagctccacggagaggctgaagaaggaaggaagcgcctcacaagagggagagaagcttccgtgtaagatggcccaaagaaaaagctcctcacaccrttccccgtggatggaggagcctggcgggctatagtccacggggtcacagagtcagacacggccgaagaaacttagcatgcaaacacaccccgttccccac

SEQ ID NO: 29457 - DNA, 201 bp, Bos taurus
aattggtctgtgatgggacctgggcatctgtatccggcagccaacatagagaactctgggttcataataaagaaaactggaaacaggctaaacactcagarcggcctgagtgagtcctctttgtgtgcgttagtcgctcagtcctgtccgactctttgtgaccccatggggttttgcccaccaggctcctccatccatgtg

SEQ ID NO: 29458 - DNA, 201 bp, Bos taurus
aaggcccaggtggtatggcctgcaggaggctctagaacccaggatgagctagaacgagacctcggtggagaagtagacctggagagatttggggacttgcygtcttgcagtgggactggcaaggcagctagtggcaaagaagctgatggctctgcctctgtctaaaaatgccccaagcttcctgttctccaggaaaaactc

SEQ ID NO: 29459 - DNA, 201 bp, Bos taurus
agcagagctttgacatctccagatcaaacgtgttattgcttacctggacattcattcagcacacctgcataaaaacgcctttccagaaaggttgctggccytcctgcttctgttcagagcaccaaatacccatcacgtgtgattttaggaatcagtgaggatcaacaataaaaaataaagggacccaaatgctcctctggg

SEQ ID NO: 29460 - DNA, 201 bp, Bos taurus
agataaataggtagattaattttgagaaattggctcacactattatggaagctagcaagtccaaaatctgcatgataaactagcaagttggagacccagaraagaactggggttttagttagagtctgaaggttcttctctggaggaagcctgtcttttttctattaaggaactagttggatgaatcctaccgactttatg

SEQ ID NO: 29461 - DNA, 201 bp, Bos taurus
cattctgtcggcccaggaagaagcttggggcccccggcctagccctgggcaggctgtacggtgacaggatcggtcaggctgttgggtcttctcaaaggagsgagcgtgtcacagacgcacacttcttggatttttcttttgcctttttgcagccaggaatcgcacaagagctctctttggttctgagggggaggagggggc

SEQ ID NO: 29462 - DNA, 201 bp, Bos taurus
gcatatctccccaccccctaggagaaccggactagaatcttccttggcttccacacagatttcttgtctcctcaagggcttacccaaggtggcccaggaargtaggaaaggctgacacatgacccaggacacctccacaggaggggctgccggtgggagggtcttgtatagggccaccccagtgagcctgcagagagtggc

SEQ ID NO: 29463 - DNA, 201 bp, Bos taurus
gacaagctcttgtgctgattaggccaaggcgataagacacgtgtgggtcagttcttgcagaatcctcgaaatgtccgaaacagccttcatctgatggacgygttagcatgggccaggcacgcaggcaggcagaggcggcacttccagtcttgaaggaggaagaatagataaggggctcttgcagataaaatctaactggca

SEQ ID NO: 29464 - DNA, 201 bp, Bos taurus
agtgtgtctttgagggtatggtcacatattaagcatgggagtcagaggggaagggcagaggcaggaatacacaagaatgggaggaggaggaaagcgtaagyccagagcaggtagagttagcttcaggtgagacagcaacgctaaggagcaggcgttctcacagtggccaagagtgggaaatagtcttagacgtctcatcag

SEQ ID NO: 29465 - DNA, 201 bp, Bos taurus
ctgtctatatgcacaaaccatggccccgcgatagtgaggggacattctctcaggcctgggacacacggctgagtttaccttgcctgcactgctttctctcrtccagcctcacgctctccctttgtattcgatcctttttgcagcaaatttagctgtctttgtcttcctcctccctctttgttaagaaaaagttaaattcct

SEQ ID NO: 29466 - DNA, 201 bp, Bos taurus
ctttgccagctctgccctgagtcagtttcctcagggtagtaagtcctggggaaccgccccacatcagccatttcatcaccccacttcagctcctccagagygggccacttggcctctgtgggtccttactgtcgtccttctggagccgggagttccagggggccctggctggcctcttcttccctgtcaaaggaacagaca

SEQ ID NO: 29467 - DNA, 201 bp, Bos taurus
tgctcactttcctcaagggacagatgcctctgacaaatgtgcagaaggggaagtctttgaagcagtcatgagtaggcccagtttacacaagggttgctgakaaaatggagttctgaaaagtaccatcaagtgaagaactttcctgatcctctttggcccatctcccttggccagcccatgctggagaggttggacaccatg

SEQ ID NO: 29468 - DNA, 201 bp, Bos taurus
ataaacagctcatacaactcaatattaaaaaacaactcagtgaaaaaataagcagaagacaaggagaactttgtacaaagatgacatacagatggccaacrggcactggaaagatgctaaacattgctaatcatcagagaaatatagatcaaaaccacagtgggatatcacttcacacctgtcagaatggccatcatcaaa

SEQ ID NO: 29469 - DNA, 201 bp, Bos taurus
ggcccccagggttcagaatgccctgcctgcctcacctgtctcctctctccagtggctttccttttgtgtgtgtgttggggggaggggtgcgttggtattcwctggccttccttggcactgcccaccagacttgtgctgtcaaacatggcccacctcagcagtcccccaagagatgtgataagaaccaggaacacaatccag

SEQ ID NO: 29470 - DNA, 201 bp, Bos taurus
gaatgctctcaggtaaaaaatgctcattttttaaactgagttttctatttctactaagcttgtttgttcattcagtctttaaggttttcttcttcctttcytcttaccattttaacattaatcttcatttttaaagtctcccaaagatttgcaccaatgaaataattcattgaattcacatgagtctgcctaagtcaggtt

SEQ ID NO: 29471 - DNA, 201 bp, Bos taurus
cagtggctaagattccacgctcccaacgcagggggccagggttggatccccggttagggacctagatcccacatgcagtaaagatcccacatggcacaacraagacacggcccagccgagtaaaataaacacacaaaatacgacaggaaggagcttacctacacagagaaacagactcaaaggcacggagaacagaggcat

SEQ ID NO: 29472 - DNA, 201 bp, Bos taurus
ggtaatgaaatgaatgagaaactttggaaatgaaagaattcctaaactccttgagctcttccaaaaaggtttccccttgcatttcaagtcctaactcccaytctaagcaaaggaatgagaatggctgcatctttgggtatggggacccagcctaatgtagcccatctaagagggagatttctttaaagttttagagttcat

SEQ ID NO: 29473 - DNA, 201 bp, Bos taurus
cagaccaagatgaaagggatgagactgagatataagttaagagctgaggccccagaggtgccaatggactcaaaaaaggagactgaggtggaaaaacagaratgaaagctgagtaggtatgactaatacaaaagggtgcaacggaagagctgggagacccctaaagaggccataggaaaagctgtcccgtgattcagaaaa

SEQ ID NO: 29474 - DNA, 201 bp, Bos taurus
cagccagtaaccattacttgccctccacccagatataaatgaaacagttcttttatttgttttatatattgggcttcccaagaacattgtcttaggccaarcttcctggaagcagaacctgagacagttttagatgcgtacaggttattgaggggttccctggaaagaagcctgtgagggagtaaggggagcaggccgtga

SEQ ID NO: 29475 - DNA, 201 bp, Bos taurus
tatataaacatatgtgtgcacatacttgaatgcaatgggtatcagtatataatctcccttcccctctaatgtgttatgtacagtctttccaagttggtgcrtacagaccgacgcaactccctctgaaagctgcggttccaaagtacggaagttgctttattgactcggctgtctccctcttgatcgacatggacattactc

SEQ ID NO: 29476 - DNA, 201 bp, Bos taurus
gcctggcaggctatggtccatggactcgcacagagtcggacatggctgctcctggcaggtatctgttctctgctatttctggctcagctctggagcatagyggccttctgtggtcctgggaaagcagttcctcaggcccaggatgtggattcccttctgaaaagtcacaggagccccctggaaagctcaaggaatatcagg

SEQ ID NO: 29477 - DNA, 201 bp, Bos taurus
gttcctctgagtgggtcaggggtcaggctggctcacagaacctcaggaaacttgagtgactttttgacgcttcaccatgtcaagaaggcattacaagcccygttgagagagtgtctaacacaagggaactctgctcccactccatgcccaccccttcccctcaccatggcagcacacggcctgggccgttgaccagtgagc

SEQ ID NO: 29478 - DNA, 201 bp, Bos taurus
caaaacagccacttgccccagaactctctgggctgctgctttaagatgcaagtcctgagcctcatttgtgtactggaagcaggatctctcaggccagcacyatggagaattctggtgctaatatttgggaatcattgtttaaaaatcttcgtcagagcattaggtcaccaatccaggctacaacagggcccaggacacaaa

SEQ ID NO: 29479 - DNA, 201 bp, Bos taurus
ttctgggagggtggcccgatggggctgccaaggtgccactcttgattgtcccagactgtagttctgtacaccttgtcagtgacgggtagaagacagggcaygtgacacaattctggccaacaagaagtcagccagaaagacttctaggaaggtctccctcatttcttaaagaagaagaaatcaacgaggccttctgttttt

SEQ ID NO: 29480 - DNA, 201 bp, Bos taurus
tctctccactcatgcattcaatggaggccataaaagagggaagttccaatgttattccggatcactctgggcagaattgttaaaggtcttatttgttcaaycaggcagaagccagggagggcccagccccaggggtcattctcacgcctgagggtttctggctcagccctcgtctgttcctgcttctttgactcttgggct

SEQ ID NO: 29481 - DNA, 201 bp, Bos taurus
ctaattgatttgctaatgtacacaaaagataataatttctgtctttgatcttgtatttggcatccatgctggctagcatcttcatagatctcatagtttgytggttggttctcttgcctctccatgcagacatttaaaagatctgcagataaagactgttgtgtgtcttttttcactggtgtatatcttacatgggggctc

SEQ ID NO: 29482 - DNA, 201 bp, Bos taurus
cttttcttttttttaagatgcagctatatgctgtctatacttctgattcaaatataaaaatagtttgaaagcaacaggatgggagaaaatgtattatgcargcagcaactgtaagaaagtggagagctacgctgatactgagcaagcttccctttctcgatcttaacctctcaggagcgtcattgactgttcttatacaga

SEQ ID NO: 29483 - DNA, 201 bp, Bos taurus
tcctgggacctgataacacgcccctggtggttctgaacctcagcgagcagtaccccaccatggagttgcaggggatcgtgcccgaggttctgaagaagatygtgacgacgtacgacatggtgagtggctcttcggactttcagggtgccgcgggggagagaggcgtcttgggccggtgcccctggtgtgctcggggctctg

SEQ ID NO: 29484 - DNA, 201 bp, Bos taurus
tgccacggggctgtagacttcctgcagacagcggctgagtcctttcggttaccggccccagtggcgttcaagggctgcctggagggaacctcacagataaygaatgaaggcctgagcgagcacctgctttgaccttcaaacttcacagtgtttactggcattttcttagaacagtggacgttgataaatgctgtgtgactc

SEQ ID NO: 29485 - DNA, 201 bp, Bos taurus
actcaccctacctgattgtcactggctatccactaacatctttgactgtggacaccgttgctgggtattgttgtcacctttgcttgacatggaaaggacartatttgcgtccccccttcatcagcttgcaacataattcaggtatctagaacactctcctcatattcttctttcccagaccctattacaggcatcattttt

SEQ ID NO: 29486 - DNA, 201 bp, Bos taurus
ctcaagagtgccaagtcttcaagaagtatgacctcgttccctggtgcgctcgcgggactcctggaggtggggtacaggggcgccggccttgtgcagccccrttttacagagagagaaagcaagaccagagcccaagcactttgcctgagggggtcaacgagtccctggccagcaggagaccacaacgtggggttcctgatt

SEQ ID NO: 29487 - DNA, 201 bp, Bos taurus
aatttggaactttccaactgattaaaatttttttcttgctttagttgctgggagatttacactaaacctgatgttcatttaaatttttggtaagctgattkccattcttatatatgattttaaggttcttatttgtatctcacacttctatgataagactttccaaacattttgcttgttttaatatagctggtacagaca

SEQ ID NO: 29488 - DNA, 201 bp, Bos taurus
gccagtccagccctggcctcagccctagctgtgcacacgctcccatcgtccacccctgatagtctcgcctccagggttttctcagtgacaagaatcctgamtgatctttgaaaggggccacttgctcaacctctgcactcacgcttctttttttttttttttttaagtagatttacaatgtgttaattttggatgtatagc

SEQ ID NO: 29489 - DNA, 201 bp, Bos taurus
tgtccatcttagtttgtgtcaagaaggccctctttctactctggaatgtgtccttcacgggtcatctcaagactcactttggaaaagggtgaagctgaagrgttacttcacaggccccacaatccgccccttttcttgggcatcccagggctcatctttctgagtttgcttctgaggctgccgcgccatgggcgtcacaca

SEQ ID NO: 29490 - DNA, 201 bp, Bos taurus
cagagcagctgagcctgtgcaccacatttaagcctgtgatctagcgcctgggagtggcaactaccgagcactgaggcctaggtgcctggatcccacgctcyacacaagagaacccactgcagcttgacgcctcttcttcctggactgtgtgagcctgtaatccacctcccaggatccacagtccctccttccttgacggcc

SEQ ID NO: 29491 - DNA, 201 bp, Bos taurus
gaaggacagggaggcctggcatgctgcagtccatggggtcgcaaagagtcagacaggacttagcgactgaacaacagcaaagttaatgaaaaggctgcagkgctcaatgggaggcccttttgtattgcaggtggaatatcccaaggctgtcgcagcaatgcaagaagagccatcatatcttgggacattttagtgtcctct

SEQ ID NO: 29492 - DNA, 201 bp, Bos taurus
acctaaaacaacggggttccttggaaactagctggataggaatgccaagaagacaggttagtatttgatttttagaattggccaaggggcctttttacatragttaggatgagatcagagcatggcatgactttcttttccaacgtgaaccactagagaaattctcctctcactgtaatacacagtgggaataagcaaggt

SEQ ID NO: 29493 - DNA, 201 bp, Bos taurus
caggcacccctccctacaccccagccccaaccaggcatgaagaagctcgggttccgagaaccctccgatggcgagaacccataatccgtgaatacgtcaaygaagacaggaaggcccccagtgttttgaccactgattagctcagcgtcccgaattcctctttcctggaagaggggagctagctttggtcctgctgctacc

SEQ ID NO: 29494 - DNA, 201 bp, Bos taurus
taagccaagcaaatgttgagctgccagttaaaaatgtaccacctgccttccccttctctttaatatattctttaaagtagcatggtggaaggtatccagcragactcagagcatgctttttaatttgaaattttgagcatccagattctagaagcaatcctcgttttggacatgtaaacaatgaaggtatttgaaggcttg

SEQ ID NO: 29495 - DNA, 201 bp, Bos taurus
accttaggggttaagtaggagtttgctagatatacatgtgggtgggtatctttggcagtattcacagcataaccaaaggcaggggggagcttttgtgctcmggaagtgctgttgtactcacggaacttagctcccctgctgtgatcatggtattgaaatatgtgtgtgttagggtcagggtgtgttggtgtcagctcacac

SEQ ID NO: 29496 - DNA, 201 bp, Bos taurus
gtccatctgagacaaagccagacgcggggtcacaggaagagcttcaccccgctgacaccttctcgcagaggtccccacaggctgaacccagcctgatcacrggacccgagggcccagttgaggtactccatactcgtttgccatgaaaccaaagacgtttaaacttcaacactcccaattacatcattccttttaaggcct

SEQ ID NO: 29497 - DNA, 201 bp, Bos taurus
tcttttctcaatcttgatcctaagaattaactaaaaaagaatatttaaaaggtcatgttgtcccttcctgtgcaaatctgggagataaggctgttactaaygcattttctaatttttaaagtaaatgttaaggggaacatttggttctcttatgaaaagcttttcacaaacaggtcaaatatgttacaggtggtggaaaca

SEQ ID NO: 29498 - DNA, 201 bp, Bos taurus
gagtgaggggtaaacctcaatcagagcttttatctgggtttctgtgggaacggcgaggcagcacagcatgaatattttaggattggctagcttgggcttckccagtggcccagtggtaaagaatccgcctgcgatgtagaagacacaggaggcatgggttcaatccctgggtcgggaagatcccctggagaaggacacggc

SEQ ID NO: 29499 - DNA, 201 bp, Bos taurus
ggaaaagagagtgaaagttacaggccaggctttacaaataagagtgaaaggaaaagaaagccaggggcttttatttcagggcgaaaatgagaacagcacgrgatatgggccttctggttcagcaaagcctccaagatgccttccagttgaaccttttcctgagcattgtaaggatacttcataaatggctgttcttaagct

SEQ ID NO: 29500 - DNA, 201 bp, Bos taurus
accatcatctcctgaatttttcactttcctaaactggctctctgtcaccattaaacactaactccccaacctcccaaaccaacacccgccttggccctggygtctacagatatattttctgacactatgaatttgactattctaggttcagttcagttcagtcactcagtcgtgtccgactctttgcgaccccatgaattg

SEQ ID NO: 29501 - DNA, 201 bp, Bos taurus
ggtcaggaaatgctttgttaagaggtgggattgtccacctacttaaaaaaggtaaaaaaagagtagaaggccatttcagggtagtaaagcattatgaggaragccatcataactgaaagtgatggtaaaattaatgacgtgatgtgttttcaggcaaaataccggtcatttctataatcaaatgttttccctgagcctcac

SEQ ID NO: 29502 - DNA, 201 bp, Bos taurus
cgtctggaatgacgaggaacttggcaagaagacaacgctgcataagctctgctgtggccactcaccggagggaagcaaagccggccaccctgaaggtgttyattggcacgtgggagggacggaagactcaggaagttatttttgtcgcctctcccttagctgcctaaaaggatttagacagagggcctattccaggaaaaa

SEQ ID NO: 29503 - DNA, 201 bp, Bos taurus
gtcagcaacagacttgctattcgtcatttttgcatatgtacattttacttcctcttttgaaagaatatgtatatttccaggtgtttccatcagaaaggctygcacgtaaggtaagttcataatcttgccagaaccacagtcttcatttctgcccaaaaataacataacctaaattccaatgtgatgtttttgtatattacc

SEQ ID NO: 29504 - DNA, 201 bp, Bos taurus
tgaggcctcaccatcctctggagctcacagtcctccactggaggcttggcacctcacccaccaatccgttgagaccaagagaatgtggaggctttctctgyaccactcaggggccagatctagaaacagcctagatctctgctcccctgccccggcacagccagtcagacgagtgggcccaagtgccagcagtctgggacc

SEQ ID NO: 29505 - DNA, 201 bp, Bos taurus
actcagagttttaaatatcaattcactttgtactaataatacagtaagtcccctacatatgaaccttcacgtcacaagctttcaaagatgcaaatgtgaaygctagcctctgtctagcagctgttgtactgtactcctgtgctttccaaggtactgtgctgttcgtgtttgcttgtttcttctgtgtcatgtgtgtgaagt

SEQ ID NO: 29506 - DNA, 201 bp, Bos taurus
cgtgtatcgatattattatgaaaataactccaacatcacgaacctcctgaaagacttttgagtaccccagacccctgtgggccatattttgagaactgttrttctagagaattccagtcctgttcagtgggaccagcttttaaaagcctgttaagaagggcctgatgtcttcagtttcagctaacctttcatgagctagct

SEQ ID NO: 29507 - DNA, 201 bp, Bos taurus
tgataaaactagcttattccctaagagtaaaaggtgagagagaataagaggaagcaacctgccctggagtcactgccgctgaaggtcactgcctttctaayggcctccccttggtgctttgagaaagacttctgtctttgtgagcgcctgtcactcacgcgccaacctggatccacaccttggaaagaggcaaagccggaa

SEQ ID NO: 29508 - DNA, 201 bp, Bos taurus
aactaataaggacctactgtatggcatagggagctctactcagtactcggtcatgaactacgggaaaagaattaaaatgaagagtgaatacatgtatgtgyataacagagtcaccatgctgtacacccaaaacgaacacaacagtgtaaagttattaaaaaaattttaactcttgtgttagacttgaataaatcacattct

SEQ ID NO: 29509 - DNA, 201 bp, Bos taurus
ctgccactcctggagccattgctagagaagtggcccacgggattctaaagatggttagtgctgttgtgaaatgttacaacaaagggtgaaaggcccaggayacacctaggcatttacatttccaagtagagcctgtttggcttttgtgtgacccaagccatggctcaggctgagctggattcttgccaaggtgggccatcc

SEQ ID NO: 29510 - DNA, 201 bp, Bos taurus
tattaaactaaaaacgtttgctgtcacttgtgggcagtgatgattttttagctcagtacctaccaaccttccccatttctttttttttttttttttggccraatgtcttgtggaagcaacagtgagagcacagagccctaatcactgaaccatcaaggaattccctccaccggactacacagtccacgggattctccaggc

SEQ ID NO: 29511 - DNA, 201 bp, Bos taurus
ccggcccagagtttgaccctcccactgagaaccacctggaaggcggcgcttcccgaagcgggggagggggggggggtgcggtgccgcctggagagcagccytgcacatcgcctatgatcaggccggaggccgtgatacacgtttcagtaaacagactggattgtccagagggtgtatgttgagttgctgctgacagtggtt

SEQ ID NO: 29512 - DNA, 201 bp, Bos taurus
taaatacgtattttacatttgttaggatgaaagaaaagagagcgtttgcatcttctttgtccacccctcccctgccacgcttaaacattttactggttacrttattctctgttgatgcaacttttctctgttggtggacatcaaactctgcacatactcttgattaagtgtatttttttctaaaatgggaatttattttta

SEQ ID NO: 29513 - DNA, 201 bp, Bos taurus
ctcctacccagcatcaagccacagtcactttccttgagtggacctctccactggactcctgatgtgtgttcacccctgcctcttacagctaatttctgttmaaagcttctttcacttcttgtcactctttctctcaaaactctctaaattgagtgtttctcaaattttacagtgaccaacgctggagaggtggaaatttcc

SEQ ID NO: 29514 - DNA, 201 bp, Bos taurus
gctagagaaaaaccacgagattcccccgtcatcgagagatgaggcccttcttttcctgtaggacctagagagcaatcccttctcaaaactgttttgagtcycttctcaaaactccaaaggaggcctgactccctttaggctactcaatgggcaccaagagatactcgtcgcaactcgagaggagagcagagttctttgctt

SEQ ID NO: 29515 - DNA, 201 bp, Bos taurus
tgttttctgggcttcaattctggaaaaacaattattcccaacatctagattgcttcagaaatgttgatttggacttatttatgttacttattagtaagcartggcttctaatgtttatgattgcaaacagaaaatatttccatgagagggagctctgatggtagtgtcataacagagagtgactgtgaaggtgataacagg

SEQ ID NO: 29516 - DNA, 201 bp, Bos taurus
tcattgctgtgtatgatgagtataagcagctggagatgagttatttccacagtaaaaccaggttacactttgtgaagaagggacccactgagcagtggctrtgatttatcaagtagcatcctgttattgtcagtgggatcaaacaatagaaatatttgagtaacagaacaaattaatctgaaattaaacttgtagctgcaa

SEQ ID NO: 29517 - DNA, 201 bp, Bos taurus
tcaataacagaataaccgaggcagaagaatagataaatgacctggaggacagaacagtgggaatcactgctgcagaacataataaagaaaaaggaatgcaragaaattaagacagcctaagagacatttgggacaacattaaatgcaacaacattcgcattatacaggtcccagaaacagaagagagagagaaaggacctg

SEQ ID NO: 29518 - DNA, 201 bp, Bos taurus
ccctgatgctctgtcccacaggcataaaggtttgtgtgtcctgattcctgtaggcacttctgcaaccactgctactgccatcacagctgtgcagtcagagytacagtcccagtggatgttcaggtcagacccaatcatgtgggaggagggcaaggtcagacccgatcatgtgggaggaaggcagccagcacaagggcacat

SEQ ID NO: 29519 - DNA, 201 bp, Bos taurus
gtagggaatacaacccatatgatggcaagagttcacactgtggaattttcagagcaccttatacaccctcagaaactaaattaaagtgatgatgagataamagattacagaggttcaaaacaaattcctcaaactctgttttggttgtgtccacaaaacaccaatatttcaattaccagaagagtgaagaccagacacaga

SEQ ID NO: 29520 - DNA, 201 bp, Bos taurus
aggttagttcctcatctcctctctcccaactaacctgaagacttgatcttcttccaggagcaagtttacagttgaagatgagagcgctgaatgacgatggwggtagtcccgggaggcaggcgagctcccagctgctccacggtcctcctgccggcctggccacacccacagacgtcacgacgggcatcccctccgccccca

SEQ ID NO: 29521 - DNA, 201 bp, Bos taurus
tctgagtatcagaatgtgtctgaaaaagcattgttctcaaatgatgttctctagagacaatccttttttttttttaaggtttcactaatttggaccaagarattacttatgtttaaatgacgactcaatacatggcccatttctattaacattgtattattgtagagttattttaaattttccttcaccaaaatctaaatg

SEQ ID NO: 29522 - DNA, 201 bp, Bos taurus
ttcagtgtgtggaggctggcaggtgagccgggcacatgccaggcgtccgcctcccccgagtgcaggccctcgcccccggccttctgtttttctactgtacrcctgcaactgtccctgtttctgggtctgaccccaccagactacaagtacctgagggcagggacatatctgcttggcctggagctaacaggagcgtttggt

SEQ ID NO: 29523 - DNA, 201 bp, Bos taurus
aataaagggagtcacacaatgttttcggtttcccagagcatctaaagttatgtttacactatactgtagcctattaagtgtgtgatagcattatttttttwaaaataatgtatgtgggtgctcagttgtgtccaactctttttaagaccccatggactatagcccaccaggcacctctgtccatgggattatcctggcaag

SEQ ID NO: 29524 - DNA, 201 bp, Bos taurus
agtgaaaaattctaaatcttcatgagatcaataacaaaacagtaacagactgagttaccggaaaatataaaagcaataatattttaacataatactcacartggggaaaggatcctctacagacagctttgtttaaaatggttacaagaaacatatggcagtttttaaaatcagactccattttctctatagattccatcc

SEQ ID NO: 29525 - DNA, 201 bp, Bos taurus
tgttttgggttcaaatctaatggcctatttttaatatacatgtgaataccctcaaacacctttctttaaaaaaccaaaattctgcttctcattaataaagyctttagactatgaaattaggttaatggatcttaccatagggtttcccgaataacctgtgtttcagtaacaaaaactctgtcatctggaacatataacggg

SEQ ID NO: 29526 - DNA, 201 bp, Bos taurus
aaccatccttctggaagcatcttattatataggatgaagggattcttgagtccatggtgtctgaagccctgcatcataagaaggcctgagtgtctttgctrgcacttcagaatttacaaagcaatttttccactggttttctccaaatgcagatcttattaagtccagtcacaggaacatgaaaggtgctgacagcgtaat

SEQ ID NO: 29527 - DNA, 201 bp, Bos taurus
aacaatgaacacaaactggtttttatcatggtgtaaaggaagcagaacaaaacatttctataactggtgggaatcacatgagtaaatgacagagaacatgragatacaataaatggcatttcctcataatttttgaataaagttgtgcttggattggagaagattaatgaaatccaaaaagaaagtccatgtttttttgtc

SEQ ID NO: 29528 - DNA, 201 bp, Bos taurus
gtgaaaaaagtgaaaacacaacacttcctaacactatacaaagaataaacttaaaatgaattaaagatctaaatatgaaggcagaaacctcaaaactcttrgagcaaaatataaacagagcactctctgacataaatcacagcaaaatcctcattgacccatctccaagagtaatgaaaagaaaaaaataaacaagttatt

SEQ ID NO: 29529 - DNA, 201 bp, Bos taurus
attccaatgggctactgtgaggtggacgcatggggaggctccatttatgacctggcatgccttccacttctcataggccacgagttcatgttagaacggarccagtgctcactaacttctgacatgcccaggtgtttctctgtatggagccttcagaagattcatagtactgtttgcttaggatgttattgcaggtgactg

SEQ ID NO: 29530 - DNA, 201 bp, Bos taurus
aaaatcattataccacggataatgatttgagtacaatgcaattaggaaaagtggatatttctgcaacatatatactttagtataatcactagaattatgaytgataatactatatcaggacatagcttcccaggtggtgctagtggtaaagaacctacctgccagtgtaggagatggaagagacacagatttgatccttgg

SEQ ID NO: 29531 - DNA, 201 bp, Bos taurus
gcagtcaccatctgcagtgattttggagcccaaaaaaataaagtctgacactgtttccactgttagcaccaaagacaatgacacacacaaaaaggtgccastacctgctgactttctaaaagacacatgtacttcaaaacactcttggcatcaaattccattacagagacaaaatacaaaaacacaccacttcaaatttct

SEQ ID NO: 29532 - DNA, 201 bp, Bos taurus
taaaaatggagagcagattacgttagcagatttaaggcttaatttaaattcattaacttctggatggggatccttggccctcccagtctctaggctttatrtgtctcctgtgttcctggtctgcctgccatcctgatgaacactatggggcctaaagcggacactgtgggctggggtttgcaacttcattaggattctgct

SEQ ID NO: 29533 - DNA, 201 bp, Bos taurus
ggaagcttatctcaggaaactcggcagagggattggggcctggacagagggctagcttccaggaccatttccctggagatgaaggcccagagaatgggtcrtctgggttggggaggaaatgtggagccactgtgagcagtgcggatattcacttggaaattggccttgctgagactcacgtgttaggggtgcagatccctg

SEQ ID NO: 29534 - DNA, 201 bp, Bos taurus
gcaatgttcatccatgttgagatgttatcaggggagtcctagtggacagtcaggattttcacagtcacccgatagcaacaaggccaacccctacctttttrgtttcagggagaaacaaggcacctctaccaccttgagaaggtgtggtacagcagaggccaagtggggtgcctgaactcacaacatttatcaacagagtca

SEQ ID NO: 29535 - DNA, 201 bp, Bos taurus
tctaggtccagatcattcaccatgttggggccagctgggtgggggacctcacctggaactgctcctgcacagggtcgggaagaggatagcaggtgcctaargggccttcatgcagactgataagatgcagtgggtacacagggtggtcattcagctctactggcaaagccaatgacacccttttgatggctggtatattcc

SEQ ID NO: 29536 - DNA, 201 bp, Bos taurus
aaaaaagaaggaaaaactggcatttgtagaaacataggtggacttgaaggacattatactaaattaaataagtcatacagaaaaagacatacagcatgatrtcatttatatatggaatctgaaacatacaacaaactagtgaatgtaacaaaaagaatcagacctacagaaatagagaacaaactaatggttaccagtggg

SEQ ID NO: 29537 - DNA, 201 bp, Bos taurus
tgtagggtcttatccaggactggttggatcatgtgacttagacttgtgtggggtttcttgcttccagtatccaagtctgttctctggtgggccctaatccyaagagatgactgatggttccacagtgcttcaggtgggaggaagtaaactgaaggcacaatggccagccttgttccaaggaaaaagacacagaaccgggtc

SEQ ID NO: 29538 - DNA, 201 bp, Bos taurus
tggccttgaattcaaagctgtgaccctgaacttgaaagcacaaagatagatgggagagaaacctccatgggctttgagggaggcaaaagaaaaatcctttktttctgtttaaatccagctctggccctgtttgtgctacattctgcccttgcagcagttcttggcccacaccccggggtggtctcccctggcaccttccat

SEQ ID NO: 29539 - DNA, 201 bp, Bos taurus
taccatctctgcagacagcatgggtctgactggagatctcagggcaaccattgggaaatagaagaacagccttctctgtggcctttctttaagcttttaargaatatttgtttcagttcagttcagttcagttgctcaatcatgtctgactctttgcagcctcatgaattgcagcacgccaggcctccctgtccatcacca

SEQ ID NO: 29540 - DNA, 201 bp, Bos taurus
ggatatctggtctgtgagcatgaaaaagtaacccaagatttgactgatggctgactgaaagacaaggattccatccaaggagcagtgagctcaggccagartcaccaaccacatacggtcatgtgaatgtaattttaatgtaaaataaaataaaataaatttccttagtcacctcagccatgtttcaaattacaaaagcca

SEQ ID NO: 29541 - DNA, 201 bp, Bos taurus
agcaacactacagattggtgcaccacatgccccaagccatgagtcagttgttgcacatttatcagaacagcctgcaccatgggcctgtagaggaggagagytcccttgttagtgagaatggggaaggaggactccaggatgcagggagcatctgagcaaaggctgccctgaggtgagaggggccagaccatatggctgcag

SEQ ID NO: 29542 - DNA, 201 bp, Bos taurus
cccctaattctttcaagaacagactcatccaatagccaccagtcacaaaccctatctgtattttcagcgatgtgtggccacatgacccctgtgacaccacrgagtgtaagcagggtgcacgtgtgcaacttccagagcaatcccttgaaaggaagtcgcttggcctctgttcctcttccccttctctttagggcaggaatg

SEQ ID NO: 29543 - DNA, 201 bp, Bos taurus
cccagacataccctccccactgtatcctgtctggattcctgacccacagaatcatgagtcttactgatgggggtcatatgccactcagtttgggaggcctrtgatacaacacggtgactgcctcaggtacagaggtgggagagatgccactcttacacaagaacagccaggggcccaagcctggaaggaccacaacagaaa

SEQ ID NO: 29544 - DNA, 201 bp, Bos taurus
gccacagtctctccaaggtccaacccctatgagccttggccacctcaaggtgacctatcatcatcagtccttggggcgcccactctgggtggggaagggaytgggaaacatggccttaccaggctaatgattccatcaaaggagctgaagagacagggggaggggccacatctggtgggaatggtgaagggagtcagacca

SEQ ID NO: 29545 - DNA, 201 bp, Bos taurus
acctggggctctgtgcatggacctctttgagtccttaaattcatttaggaagttttgactgagtgctcactccatgcagtctccagaagggtgccggtgtrgaatcctggcccccagccgtccccggcagggctgcccagctgtgtctgacaggcatccagaagtaggaggccccaggcttcacggcatccagcaccaccg

SEQ ID NO: 29546 - DNA, 201 bp, Bos taurus
gccaacagccagccccacacttccagccatatgagggcaccatgtgcaatggggatcctccagcctgggtagcctgcagatgactgaggccccagctgtcygctgacatcaggtggaaactaccccgttgagccttccccagataactgatgcacagagtctgtgagcatgagatacagttgttttacaccacttacatca

SEQ ID NO: 29547 - DNA, 201 bp, Bos taurus
aacttatatgttaaaggcctaacccctagcatgatggtagttggagatagggcttttgagagataattaggtttagatgaggtcataagggtgagaacctygtgatgagattagggcccttataagaagagaaagacacaggagcgctctctctgtcatatggggacacaacaagaaggcggctgtctgcccagccaggga

SEQ ID NO: 29548 - DNA, 201 bp, Bos taurus
ttttaattgagagtttagatcttgaacgtggaaaaattgttttgatttgagtgtttttctccttaggtcgatcagagctaacattcttgtcactttctgcrtcatttgtagtttcagctcaggctccaaactctgctatcacagctcagactggagtaggggtggcatccacagtccacctgaaccccatgcagttgatga

SEQ ID NO: 29549 - DNA, 201 bp, Bos taurus
cttactgtactgtatcttagtcattgggagaaatgattttataacccagacagacctgataccagtttacacaggtgattcaaggtgggttttttgcctgmgtttgatgaagaaaagtatttctgagatcatgattccctcctcttgtttgttgcagacaaatctagaacatgatgtttacgaaagactcaccaacctgca

SEQ ID NO: 29550 - DNA, 201 bp, Bos taurus
caaaaaaacaactaggcccaacatggtggaagacttgacttccagtagacatggagcctcattatgtgctcattgtaatacatcagctaaacgacacaccygcagagctcccccatgagctctgaggtcctgaaaggccaaaggtgggtggtggcacaattcctggaaatcctcgacccttcccccaaataactggaataa

SEQ ID NO: 29551 - DNA, 201 bp, Bos taurus
ttttgagaatgaattcatttagagaaaacggaaaactcaacatttttattacttaatgtatatatctgcattttaaatcatcactgtcaaaatacatacamtatattgtgctttgaattttataaaaacagatttcctgacagtgaattcttgggaaaatgctggaaaaacaatttttaaaaatagcatcaatataaaaat

SEQ ID NO: 29552 - DNA, 201 bp, Bos taurus
aacaggtgcctttcccaagcttgctctgcaggtataatgctgcacgttactatcagttcatcgctctgaattccactgtttatttgtgagttgctacttcrcatggccatttctagatagtttttgtctgtttccaagaagtaaggcaatgttcagttggtttaacagaccaggctgctcagttttattccagccttggta

SEQ ID NO: 29553 - DNA, 201 bp, Bos taurus
atcaaatggcacctctggccttttgctggctaaacagtgtgcatgtagaacatttttgtgtgtgcacttttgttaacagctttcttagacttgatgaatayaggcccaacgtctgcactatcaaaaggtaatttttaaagatttaaaccaatttgacaactaagtaataaaggagcttgtttttggttagaataagagcat

SEQ ID NO: 29554 - DNA, 201 bp, Bos taurus
tcaccagccgtttcccagtgtgctccttgaaggataaagcagaaccagagtgatcgtcaggagaatgtactggggtgtttggccagttaccacatgtgttkccaagatcctgtggtcttgtgtaaacctctgagttgggctggagacgccaagtagtgaggctcctctgctccctgacggggctttaccgacacgaggaag

SEQ ID NO: 29555 - DNA, 201 bp, Bos taurus
tttccccctgtaaacttaatattgaaaattttcaagcctgcagaagagctgaaaaaatagtacaatgaacacccatttctacattatttaacatttggccrcagctgctccatctctttctcacatatgcatgtgtgtgtgtgtgtgtgtgaaccatgtgaaagtcagttgtagacaggacactctctacccccatcaatt

SEQ ID NO: 29556 - DNA, 201 bp, Bos taurus
cgatggcccttgctgatgggaacaaggcctgccgttccaggagctggcagagctccgggggtctgggacagctgagaagacagcttgaaacgagctcctcygaccagttccaatcaggccacctcaggatgactcagaatgtcaggccttctaaaattaatctgtgtccacatctaaaatcagcacctcacttagagtcac

SEQ ID NO: 29557 - DNA, 201 bp, Bos taurus
cttagaaaggtgggtggacattagaggccaggtggaggggatgtaggggagaagatatgcagacagcccaggatgtgccctatgaccctaggagagggggygaggggaaggaggggcccaatggcacaggtataggaaaccagctgctctttgctttcaaagcctgatttagaagagagcatgattcagcaggggcttccc

SEQ ID NO: 29558 - DNA, 201 bp, Bos taurus
aacatcagaggagctttcacaacaaattctttaaacaaattcacagctgtcagccatgatacgagatttaattaggccaccctgagttgtgctgcatacartctttactgtaatcaggttctttgttgtacccactgtgtggccactgaggaaaggtccttaagaggcacactctcccatgggtaatcacacccggagccc

SEQ ID NO: 29559 - DNA, 201 bp, Bos taurus
taattaaataattaagcatgagtattcaattggggatcacagataaaaggactacttctaaacctaaatttggaatgctggaataaaatgacaaaaatgakttatttgtacttcaagtttgttaaaattatctaatgagttttggattgtttttgactaaaaaacgttggatcttaaattaccatgagaaactataatggt

SEQ ID NO: 29560 - DNA, 201 bp, Bos taurus
aatgactaaacgaattatagattagatgtatgatagaatattacatagttgctaaaagggctgttcacagacactaggaaaccagtaggacatcaagagaktgcatgtaacatgcattcgcaaatgacagaaatttgaaacaaatactgtgttaaaaattattatatcagggtttattaaatgaaatcattttctttgtac

SEQ ID NO: 29561 - DNA, 201 bp, Bos taurus
tgttcagggaagaatatggtaattctattgtaatacaaagggtaaagcgattgagtatgtatgagagaagataataaggtggtggccttgttagtgcaccrtaaaatagtttaagggatcatctgtgtgggaatgaattaggtttatttcttgcaactccaacaggccgcggtagctccatatggtagaaagtagaggtag

SEQ ID NO: 29562 - DNA, 201 bp, Bos taurus
atgtttataagtaatgtcttacctcagatcctctttcacctctgttacctcggggccccggtggtccaatgggaccagggtgtccacttgctccgtccttkccagggggcccgctaggtccaacaggtccctaagaaatgaacatgatatcacaatgctagaatacttccctgcagtgcaaaaatgttaaaacatggaact

SEQ ID NO: 29563 - DNA, 201 bp, Bos taurus
ctccacagttgagcatgttcaggtgcagagctagatgggccagctgaaggttagtgcagtggtgcaggccagtgagagaagatagggcctgatccaggccyaccaatagctgctttgtgtgtctgcatgctttcccatggctgttgccttcccctgggcatttacaaggcactggagaccagtgctcagctggagggacta

SEQ ID NO: 29564 - DNA, 201 bp, Bos taurus
tgcatacatttttgaaaaggcactttaaaggtttaataaagatgtgaaaattacattttacttttacatctcaaaaagtacataaaactgttaaaagaccrtatttaatcatggtttttcttgcagcattaaaatttgtctgttctacatgacaaagatatttacaggccttagagaagttagcctattaggaaatcctca

SEQ ID NO: 29565 - DNA, 201 bp, Bos taurus
ataattgttttcttgtaattacacattgaaatcttaatgctccttatttggctgaggtctgtctagtctgttcatcttaaattaagtaatatttaaacagrtagaaattaaaataagcttaaataacaatttaaatcagattaaagttttataaaaccaggataacaatccttgtggtcactgaactcgtctcctgtttat

SEQ ID NO: 29566 - DNA, 201 bp, Bos taurus
ggctcatccacatgttaaaggctgctgttctgcttatgttttctccccattgtgaaacctcatgagagatttttactaagttacagatcaaactgtccaaytcagcagccctcgcttgtattctgtggtggctcagacggtaaactgtctgcccacaatgtgggagacccaggttcgatccctgggttgggaagatcccct

SEQ ID NO: 29567 - DNA, 201 bp, Bos taurus
ggcaaaaaagaaccaggcaaaagactgaagcctcaacaatggctgttagatctgctctgaaacagcctgaagaaaatacccagaggtacccaggtgaaaasagagggacttgttatactgtgttaaggaggggtatctcaagcgggattgccttcaggcatctaagccacccctggctccaggtccggacttcaaaggagt

SEQ ID NO: 29568 - DNA, 201 bp, Bos taurus
tctccattccccctggcatccatctctctcctctttgtcaggatttaaagatactcgaatcttgactttgttaaaacaaaccaaccaaaaagctctttacycagcgcttctttactcctctagaccctcatttctctttctcttctctattgaagctgagctctttgaaggaggtattatatttcttgcctgtttacttca

SEQ ID NO: 29569 - DNA, 201 bp, Bos taurus
gttgtatgcatcaataagaagagtattgattctttggttacagcttcccagattccccaaagttggtaaaattaagaagacaaaacaacaggacagaagarcaaacggctgttttacttgtgaacgctgaagaattcatgtttatggagaatttattaacaaataatttatttgctgattctagcagtgcctcccaggcca

SEQ ID NO: 29570 - DNA, 201 bp, Bos taurus
tactggagtgggtagcctatcccttctccagtggatcttcctgacccatgccaacatcaaaatcaagaattattgaatttcacatttttacatgtaatttyttgggtttagttgtacgaacaatcacatatacggattcatatagctgccatcacaaattgagtactgaagggttccataatctcaaagaaattcttttgt

SEQ ID NO: 29571 - DNA, 201 bp, Bos taurus
gccacaacatgaagctgccattggatgagctctcaagttcagaagagaaataaagctacataagctgtatataaaattcatggggccaaccttgtatgcartcccatttaatttctcattcagttcagttcagtcgctcagtcgtgtccgactctttgtgaccccatgaattgcagcacgccaggcctccctgtccatcat

SEQ ID NO: 29572 - DNA, 201 bp, Bos taurus
tatatagtgatgtataccaattatttttcaataaaactggaaaaaatcttaaattgaaatagcatgctatataggaacatattcaatagtgaaagataaamgaccattatttttttaaaaataagattactgaatcaattatttttcttttgtagccctatctccttgacctcatttcatatcatatttacaaagttttca

SEQ ID NO: 29573 - DNA, 201 bp, Bos taurus
gaaatttctagatgtctagtttgaagcctcttcagagggagtgagtgcaggcagttgaaatctgaaagatgttcttggttttcagcttaaatgtctgtggyagtctttctgagtggccacgtagcaacaggcacaaagattgtccatgagctattgtggtgatttctctgaagtttatattgttacactacttcagcttgc

SEQ ID NO: 29574 - DNA, 201 bp, Bos taurus
acttgtgcaagttttgtttttttgtttttaatgtacagttttatatctttaagcttttgttttatctccaatatctagatcaaaacacctttgagaaatgygtcttattcaaatgcattatgccatcagctgatgcttgcttgttcataattctaggctttattttcttattggttgtacaacaactactttgccagaata

SEQ ID NO: 29575 - DNA, 201 bp, Bos taurus
aattataaggagattaagaaagatcctttgcaactggagcttttacttctacatataataatttatatttgtagtttaggataaatagcttacatttattkattgataatgaagaatattatgcatttccaaaaacgaaagagcttgtcattagatgtggaaaaccctagtctttttcaagatgcaataatccataaaaaa

SEQ ID NO: 29576 - DNA, 201 bp, Bos taurus
ctgaaaagaaaacattatttggaagattgctacaatataaagaaaagtttcttttaggtaagtcattgatgaggtcaagcagtggcatggattctgtgtgyttgttaatggtgcactctcatcgcatgcaataatacaaatgataggtaaaatgaagaaaagatttttataattcttattctaacatttgccctgtaatag

SEQ ID NO: 29577 - DNA, 201 bp, Bos taurus
tcaaaggtggcatatattgtgggcaaatcctttgaaataacaagggacttttatccttgtaggacttaaccttataaactcactaacaggaaatacaagtrttgttagatggcatttctgtgcacaagtctatgaaaaagagaattctcaattccaccaaagaacaagacctcaaaatacttgtcactgaatttaacaatt

SEQ ID NO: 29578 - DNA, 201 bp, Bos taurus
gatcaggaccttttcagtctccatttcctcaaatttgttccacatccaacttccagactcatattcccaaattgcctaattcttcactgcctggccaatargacagcctcctcagactgctgatcacatcctcttcaaacagcacttcccaccaagtctccatagggccctacattttagctccacctgcttagttctaag

SEQ ID NO: 29579 - DNA, 201 bp, Bos taurus
ggtctctgtggaagtggtgatccaactgacctctcaggcttagcgataagacatccttccgcgcacacacagaactttcttggctggcctccctcatgtcrtcagacctccaagagagcgcccctctccacctgctgttattgtctggggatgatggctgtatccacatggtgctgaggggagtctgtgtcacaaagggtg

SEQ ID NO: 29580 - DNA, 201 bp, Bos taurus
gtcagtgtgagtcatccaacacgtctgactaattgtagggtattgacaagattgagtctctgaatctgttatgctgaaccaggatgaaatcaccaatgttktctactttgtgtaacattttggcctcttgaaatgtgaccaactggctttcccaacctcaatacttccaaatctctacaatagacttctttgtttataaga

SEQ ID NO: 29581 - DNA, 201 bp, Bos taurus
cagacttaggatataatgtaggcctgaccaaaactgtctttctaagctcaaataggaaaaaaattagtatttgtgtaacacacacacacacacctcttccmccaggcccagtactagaaactttatatacgttgtccaatttcatctcaatacaaacccgcaagacttcccccgttttaaggcaagaaaactgaggcaaac

SEQ ID NO: 29582 - DNA, 201 bp, Bos taurus
atatgattaacattatggcatttttttaagacccacagagctatacaacacaaagaatacactttaatgtagtttggactttaataacaatgcatctataytgattcattgattgtaacaaatacatccccctaatgcatgatgttaataacagagaaaactacatgagagtgagggagtaagttggaactctgtactgtc

SEQ ID NO: 29583 - DNA, 201 bp, Bos taurus
caaatgagagttattaaactgtattagataatcatttaataatagagaaaaagtgttaatgtcagcagttaacatcagccaagtcaaccagcattataackcaattctaacttaggctagatatgaaacagaagagacataaaaggaaaagtcatgtgctatgttgttgtttgggaagtcttgcccttaatttgaactctt

SEQ ID NO: 29584 - DNA, 201 bp, Bos taurus
atgatatcataaacctgaaaagctcctatgttaagaagattgagtcagacccatgatgtaacacccgagtatctattcattcactaatttattcactcatygttttttgaccatctgatatatgctaccacgatggcattccactccagtactcttgcctggaaaatcccatggaaggaggagcctggtaggctgcagtcc

SEQ ID NO: 29585 - DNA, 201 bp, Bos taurus
taaacactatgttcaatgaattctgcaaattttaaattgtattctcatttaaatttagttcagaaattttgtaaaagtttctcatgagacttcttcattgrcatatattttgcttagaagtgtgttgtttaatatccaaattattggagaattttccatcttttattggttgttattggtttctaattcattttcattgtc

SEQ ID NO: 29586 - DNA, 201 bp, Bos taurus
attaattttaagaaacaaaggaagaggatgaaaagaaacctctaagccttttaaactatgagatgtagtgttaaggcctgtggtggcctctcacctatttkaatggtgggagcccatctgtggagctcacaaaaggagccctacacagtaggatgcaaagctaagtaagtaggagaagagaggcctgaattcattttctct

SEQ ID NO: 29587 - DNA, 201 bp, Bos taurus
attagttaatggcttctatttcttcaatggttgcttttatttaagttcagggaatttaatttttttttttttttttaacattttctgttttaggccttacrttcagccaggtatgaacaattcactggggacctttctgatttttcctgagcaggctcaaccttatgcctctgtatatccttccaaaccaccaaggaccag

SEQ ID NO: 29588 - DNA, 201 bp, Bos taurus
ggtgccaatgcttatctccaactctactttgcaggagctctatccctagtaaatgtggctaagatgactgtggttcccttaacccaccttaaagcgctcayagggccagtgaaagtgaagtcgctcagtcatttctgactcttcgtgacccgatggactgtagcctaccaggctcctctgtccatgggattttccaggtaa

SEQ ID NO: 29589 - DNA, 201 bp, Bos taurus
ggcctacagaatgccatttccatcattatggtactccacgtttatgatcattgctctcactaagaaactctcttcacagcaaagaaagaaaaagtgtggargtgggcccatgctcatagaattcagtggtcttatcatgttccccactgttttgaagtagcttgtttgaaagaagggaggaatgacctttagaaggctcag

SEQ ID NO: 29590 - DNA, 201 bp, Bos taurus
gtgtgagggccaggctcagtaaatctttaattttctggagatggatggggctgtgttctctccctgtagttttgcctgaggccactatagtaggggttatkggggtaatggtgtcctccttcaaaaggacttatgctagcacactgtggctcccaatactgttacagtcagcacccctgatcctatggcaggccactgttg

SEQ ID NO: 29591 - DNA, 201 bp, Bos taurus
tttgttactcatgcttttgagcataaataatattcttcaaaggattctgcttcattttataaattcttcagtttctaaacagctgtcatcgcatgtgttarattaagggtttttattttattttttcatcagttattcaaaagtgctctaatattaatcacagaaatatcagcaaggcttacattaagatagagtatgttt

SEQ ID NO: 29592 - DNA, 201 bp, Bos taurus
tcttcaaacagaactattctagattttattaaacattattttaaatttggcatttccctccataagataaatgcacacctggtctctctacattgtaccaytcattcaaaatatacagctcctgtctggaagcaattcttctactaatgcatttgtatttggtgatatgttgtttatggctgtgtttattttaattgagac

SEQ ID NO: 29593 - DNA, 201 bp, Bos taurus
ttaaatatagttaattaagtgatgttagggtcttactgtcacagttttaatgctccctatctgttacccactccctttaatgtcataagcattttgttttmaattcagtgtaaagccttttccccaactatttcaccaattaaacatttaaacacacacacagatgaatgtataaagaaatcatggtacatatatacaatg

SEQ ID NO: 29594 - DNA, 201 bp, Bos taurus
aactcatagatcagtatgactatatatttgatattttctgtgatgcatttcagcctacaaatctgtttgtttctagttgcatttatgatatatttcaacartttttcaaaaatttgattagctaaaacaaaggataaaaatcacgtgataagctcagatgctgaaaagttacttaacagaatatctgtacataataaaaac

SEQ ID NO: 29595 - DNA, 201 bp, Bos taurus
caatctattcatttctttggcaaaggtctttctcttctattgcctacatgtttctcaaactattttttctcttctttatgccttaacttgtgctttgttawattctctgcatcttttttcctgatacaatgaaatagcctccagttaatcttcctgtaatatcctggccatgactaattcatcatccaccactgtcatatt

SEQ ID NO: 29596 - DNA, 201 bp, Bos taurus
actgtacatggacaatggcagcagcctagacctgattagagtctggtatggttcagaaatttgaggaaagaggatatggattagggctctggatgacactragatgagcagagtactagctgagggtgagggaagcttagaaggggagagagctttacttgcatccctgagaccagctttagtggtaagggctgttgttga

SEQ ID NO: 29597 - DNA, 201 bp, Bos taurus
tatcaccaacttaatggatatgagtttgagcaggctacaggagttggtgatggacggtgaagcctggcatgctgcagaccattgggccacatgcttggacrtgaccaagaaactgaaatgaactgagagttaattgaaaatatttagctaaaaaataatattagctgcaactttttcattgtaaatttggagttgctttag

SEQ ID NO: 29598 - DNA, 201 bp, Bos taurus
aagtaattttggaaaaaaataatttagaagtaataagagtgagctgagaatgggagacagagctactcttgatatgagatactgagactctactgattagygtagagattgcagggatggggagaaagaaacctatacaaagttcagtaatgttcatattgatcgatccaacaggtactattattttctcatcaacttttc

SEQ ID NO: 29599 - DNA, 201 bp, Bos taurus
cacctaggacaagccttccaaaagtccatgaacctgaagcttcagggcacacacagcaggagagagaccatcgcaggtctaaagcagatctagctagcttrgaataaatcctctgacaaagcagactattgaaagagccgttcagcattctaccagctctagaaagctcagcaggaaaagaaaaaagtgctgaaaaaggta

SEQ ID NO: 29600 - DNA, 201 bp, Bos taurus
taggagttggtgatggacagggaagcctggcatgctccagtccatggggtcacaaagagtcagacatgactgagtgactgaactgaactgaactgaggttyttctaggctccatctaggatcctaggttcttattcttcctatttacagagttgtgcctatttggaactagtggttatttttcttaagttgaatggcaaat

SEQ ID NO: 29601 - DNA, 201 bp, Bos taurus
cctgggtatattgttaaatggcagattctgatttgcggtgaggctgagatcctcctcttctaacaagtttctacatgatgtggacatttctattctgtagrctacattcagaatatcagatagttctagatgattgtgttgaagtttggcagacttacggtttactgcatacatgtccagtatggctggattctatcagaa

SEQ ID NO: 29602 - DNA, 201 bp, Bos taurus
tcatgtcaccaccaccagtcaagataaagaacatttccaacatttaaaaattttcttgtgcacgtttgcagttgattccctctctagatcctcaacaaccygttgtctgcttttttgtcacttttgccttgaaaaaaaatttttttttcatgtgaatgaaatcatccttgtttttcatttgttttagttagcatgtttttg

SEQ ID NO: 29603 - DNA, 201 bp, Bos taurus
gactggtgtgaggtgatacctcattgtcgttttgatttgtattctctaaaaatgagtcacgttgagcatctgttaatcttagtatatacaagacatacagrtggtttattggccatctgtatgtcagagaaaagtctgttaaggtcttctgcccattttttgattgggctgtttgtttttctgatattgagctgtatgagc

SEQ ID NO: 29604 - DNA, 201 bp, Bos taurus
ttaccccttgcaacttttgttttaatatgtggcaccattgttttcccagatcctcaacacttacacttcatcgtccatctaccaataaactctttagtccrtccgccccaaccattcatcacaaatgtgatgaccacccttgtactggcatactcaatgccatgaacagggagggagtgaaggagtgaacagctgattgca

SEQ ID NO: 29605 - DNA, 201 bp, Bos taurus
atatcaaatatgaatttctataatgaatacatgtcatctatgtcaatatcaaaaaaagaaaaagaaaaacagaaaactacaggtagtttgtcttatattaraatctttttttgtgggtgggttctctagagacctgtctgatatcccagtatttgtttcagctccttgacagctacttgaacctcagcttcttcatttata

SEQ ID NO: 29606 - DNA, 201 bp, Bos taurus
ctcttctaaaaatgtctcccacagttttatcagtaagattttccaagactgaaaagctgaaggtgccatttccctgactatagcccaccagtgactacccrttacttgttggatatagtctgagctccctatatggcacatacaatttgacatttgttgattttccagctttatttcctgctactctccctcacacctata

SEQ ID NO: 29607 - DNA, 201 bp, Bos taurus
caagattgatagcatacccaccctcctaattatacccatgttcatatattctgccttcaatcctgttaatggaggtaagcgtgcccatgagagccatcacytctatttataccttaattgtattccttctctccttctcaaagattttatccatcactccctcttttccctacatcatttgtccttttggaccagtgcttt

SEQ ID NO: 29608 - DNA, 201 bp, Bos taurus
aagaattatattttctcaagaaattggcctgtttaatcaccatattagagatgctttgtgaagaaattctaatcttccagaaagatcaagatctagaagtyatcacggcctcttgttcagacacagagaaaatagatttgacataggtctagtgctgtggattgattgacattaaatagactaactaagggttgaaaactc

SEQ ID NO: 29609 - DNA, 201 bp, Bos taurus
cctttggaagaccagaattataaagttctaagaggtggcattcacaaaagccacttaaccctcgaaaagcttaaggaacagttcacacagtgagtatgtgyttttttgttactcattcattcactcactcatttattgtcaagacatgactcagttgttttcaaccctggcagcatattagcatcattaggactactttgt

SEQ ID NO: 29610 - DNA, 201 bp, Bos taurus
ttaatctagcccctataaaaccattatcatgtaagtacaaatagggccctaaggatatgaatatgttttaaaaggtgggagagtggaaggaggaagagaayacaggaaattgaggttttggccatgggtaatgtgaactaatataaaggaagaagaaagagccagcaaccatgtacatggaaaacctctaacacatgccct

SEQ ID NO: 29611 - DNA, 201 bp, Bos taurus
actggaattccagactaccccacccaaaaggccccagcctgcttagtttcttccccagtccccaggcatgggttgttccatttgcatgaaacatccctaascctgagggaggcccaagaggcagctgtctacaggggctatgatatgcatatgtgagtagatgtggccacctgctactcttgagacctctcatcttataag

SEQ ID NO: 29612 - DNA, 201 bp, Bos taurus
gcggtctgtgccctagggtagtgtgaaatcctgaagaaatggaagaggggtcaggtgaggattttcgggtcaaatgagaaaggtcaggcatgtttgggtcrcaagaccctataggcggagcaggctgcagtgttagcccccagcatggtgcctgggaccaggcgtaaggtgtcaaaaattgagagctcagaaagggaatgt

SEQ ID NO: 29613 - DNA, 201 bp, Bos taurus
ttatcaccaagatcatctttagtctttgtcaaaaccattgtttgccattcgtggcgtagaattgatgaagaacttgcattgtgagtggagcacataagccytttcaggatgaatacaaattgaacttgatagatttcccacaatatttgtgcctagaattagagtagtagtgacatgtgagtcagctgctggtaatttttt

SEQ ID NO: 29614 - DNA, 201 bp, Bos taurus
ccctgagagttggtcattcttatccacacaaccaaaggggaaaccataagtttgggtttgatagttctcacttcagagggaagtaagactcaaactctctyattttctcctttgcacctgcaaagtcacatgcctactccccctactcacagagaatgaagttaaaaacaaaggctactaaaagtggcaggagtaacagag

SEQ ID NO: 29615 - DNA, 201 bp, Bos taurus
tcacagagagtcagacacgactgagcacgcatgcaaacatgcgatcaagctgcatgtttactttctccctaagtctgggagtgacatcaactggccactgyggcaacaagcattaggaggcttccatcctgactttcaaactcacctcatagtatttctattaatagctggcagagctcggctgagagctgtcataatccc

SEQ ID NO: 29616 - DNA, 201 bp, Bos taurus
tatggccgtgagacccacaaggctatactgaaatgaaaatcagggtttaaacagactcaccaaggctattccacagggcccagcacagagcagctgactgraataacctgcctttccatagaagaggtcatctgcttatcttgaaagcttctacctgagggcaagcctctaatttaaggcacatctaagggcctacagaag

SEQ ID NO: 29617 - DNA, 201 bp, Bos taurus
ttaggttctgtccatcctctgggcatatctcttacacgtactcacttcttcccacccacactgccactactattatctccctcctggaagtgatgtcaccratctctcagtgtcctctcctcctctcccttctgcagcagactgtatttttcaaaaatgactccatcggtgctgtagtccaaatactttttccagaaccct

SEQ ID NO: 29618 - DNA, 201 bp, Bos taurus
ttgggctacagtccatagggtcacaaggcatgggacatgactgaagcgacttagcacagcacatttactttactaaggcctccagtccacctgcgaatctytccagatacattctcatagacaaacccagaaacaagagttaatcagccatctgggcctccctcagctcagtgaacatatagtaataaccatcacaggtat

SEQ ID NO: 29619 - DNA, 201 bp, Bos taurus
aaagaaggacttagttactgccacattagcaaaataaaatgccaggtgaaaccccaaatctcatttttacagccaccaagaatttacagttcagaatttaygctgggaagcaagctgtgaacatataaaattcagggcccacatcacaggagagcaccaccgatacgtctcagccccctgctgcacttgggacagtgagag

SEQ ID NO: 29620 - DNA, 201 bp, Bos taurus
cttcctgagtctagtgtcctcgccttgccgtgctccttcagtgagcacacttctggtgtctgactcctgccatgtgcagcagctcacaggaccagtggccrgaatcttcccccaagacccctgagacttatcttcacagccaagcacgatggtggaagcatctccctagggatgacttcccctggtaccttctccggcccc

SEQ ID NO: 29621 - DNA, 201 bp, Bos taurus
aggaagaggactgggcagagagaactttgaagattttgcccagatatggcaaaatcttggtcagcacactagggcactgcagagcaaacactgcttgtgaraggagccctgcattggcagaaatggccaggctccagtacccctgcagagctagatcactaggtgctacctgggaaagacatggccttccttataagcgca

SEQ ID NO: 29622 - DNA, 201 bp, Bos taurus
tttttaaattaaatatttcagacacagagaagaaaagcataataaatgcctgtttacccatcatccagatttatcaaactagtaacatgtgcagcattttratgcaccattccttaagtcattacccagatatttcaagcctcctttgtaaccacccctaattccattcctttctcttttccccatgtttgtcacttcttc

SEQ ID NO: 29623 - DNA, 201 bp, Bos taurus
cccaccatatccaacgtctttacctcctcttcattacctcttttatctccctttggaagaaaagttccttgaaaccaactgaaatactactatttcattcraatttatattcacttgctaaattcacattatatccatacccaactatgtgcagttctattgcttgatcagtgccacattcattgatgatcttaaattatt

SEQ ID NO: 29624 - DNA, 201 bp, Bos taurus
acagctgtttgacaggtcttccgtctcttcacgttttgtctgtaccaagtaaacccaccgtgtatgctagcataggttggcaaaccctcaaattgagatcmccgctcaaaaatacccccatattgggaaatattaacctgtatggtttactttggcttgatgaaccttattttcttagttgtgagaaactttttttttttt

SEQ ID NO: 29625 - DNA, 201 bp, Bos taurus
aggccattaggcaagaagaaatgatgttgcaagttaagtccaaaggcagtctaattggagaattctttcatgttaggagagagtcagtctctgttctgttkaggccttcagctggttgtatgaggcccactggtgatatgaagggcagtctgctttacattattgattgaaatgttcatcacatctaaaaacatccttgca

SEQ ID NO: 29626 - DNA, 201 bp, Bos taurus
atccattgattgttcttcaaaactgccactgatcaaagtccagttcatacagcaagtcccaaacagctcactggtgaaacagttgaatggaagaacccaakgttgtaattaatgggtttctaacaatttgtacagagaagagtttgtctccagggtttagaatttaaaagcactgggaatatatttaacagaaagagttac

SEQ ID NO: 29627 - DNA, 201 bp, Bos taurus
atttaaattaaaaatacttgaggaactttgggaggggtaaaccaattagaatgaaagcttgaaaggtttttgattattttaaaatttcatctcaacttccrttcataggttgtgaattggcttgaagggcctggatcagagcagctgagagcccagtggggaattggagactccatccgggcttcccaagccctacagcag

SEQ ID NO: 29628 - DNA, 201 bp, Bos taurus
cccttctgaaatttataatctagtagaggaagactggtaacatacaagtaacattaaaaatcaaatatggagcaacaatatagacccagatgccttggagrgtctagtatatgcttgctgtcatcaagttccatacaattttacatatttataaatttttatttttgtgtattttcaattttaaccagtttgagaaataat

SEQ ID NO: 29629 - DNA, 201 bp, Bos taurus
tctagctgagcctacattgggtaaacagggtcacccaaaattactcttaggctggaaagtgaatcgaatattggccactgagatgggttctgtggcctcarttcaatctttatcctacgaacatgatcataatgcagcaattgtacctctggaaacctgacactgatggatgcttttggtgaagtgctttggtactaaggc

SEQ ID NO: 29630 - DNA, 201 bp, Bos taurus
agcaactcttcaaaactcaagtttcgaaactaaaaatgtaagtttgtctttcacgacattggatattggtgtctggcttccttctgaaatcaaagaagttwaaggtaaatcaggagcttattttctttattgtcatttatgagtttcacaatgcaggtaaatagcatgttgttctcattgccgttttgcccattcccttca

SEQ ID NO: 29631 - DNA, 201 bp, Bos taurus
aaaggaatataagagagtgaagcagtcacaaaatggaaatattcagtctcttaccacatgtaatgttcagctggtagaccaaggattgtacagctgcattrtacacaatgagtatggagagaagacaatgtcagcaagatggctattggatttttagctctgacttggttcatttcatcctcatcacttcacacagctttt

SEQ ID NO: 29632 - DNA, 201 bp, Bos taurus
atgaactcccagccagcgataaatacagaatggctttcatcgattcggtggccgtcttacagatgaattatcttggtactgaggacactggggatttcatytgtgaggctcagaatcctgctggcagcacgagctgtagcaccaaggtcattgtaaaaggtagaaccctctttcttctcttcctcattacccgaagcccac

SEQ ID NO: 29633 - DNA, 201 bp, Bos taurus
cacgaatactaggagccataatcaagttatgatctggggccaggatcaaggtatatgttagcattaacaaaagaaaattaccacgatatagcgtaggtggractttaatgttactaattcacttgttattcttattcctgacaaatttaaagcagtcttacctaagtgaaacaaagatgaaatagtgtaccttttctatac

SEQ ID NO: 29634 - DNA, 201 bp, Bos taurus
atggtgtggtgacatttgtgacaaaggatgaacttaggttctttccaggtcagcattttaaggaacttggaacacacagagaaggtgaaagtactcacccrtcctttgttcgcccagctcagagaaaaccgatgcacacttagcttaaaacctggagttgagtgcatatttcactgccgctctttcaattggtaaaactta

SEQ ID NO: 29635 - DNA, 201 bp, Bos taurus
agatgacagattttgctgaatatctaggccttacagctgttttccagggaaaacaaagaaaggatacaggcagacccaacactcccacatatatttcatcratcagaggaatgtcacacggccacccaacatgataacccctagtggcagggagcctgccaattgggtttttgattttcaaactctatcagtaagttatga

SEQ ID NO: 29636 - DNA, 201 bp, Bos taurus
ggtcagctgtagctctgtggctcctcccacacatcttcttcattctaggattcaagcagaagagctgtcaaaaccacaccacggccttacagatttgctgygtgtgtgtgtgtagggtgggatggtacagtcaccaccactcaccttccttggaccaaagctggtcatggccaagcctgaagtcaatgtgcagagaagtag

SEQ ID NO: 29637 - DNA, 201 bp, Bos taurus
tacttagcagttactaaagggatattctgaaagaggttttcttgtaaccacctgtatctggtttaatacacaaactgatagacgctcatccttcattgtakttttggtttccaaaaatacatcaacacagctatgtataccagaaggcttccagcttcataattagcttttaggtaagagtactatttaggaagaaaactc

SEQ ID NO: 29638 - DNA, 201 bp, Bos taurus
aaaatataaatatgaaaaaggttgtagtgttttattagcatgtcaattttataaatatagtatctaaaaattctataaattctgactttacaaaacaataytgaagttaaattctgctttattctgtgagagcttaaggcagataaataaaacctgcttaaccttaatatctttaggagttaatgtgcattacaaatttat

SEQ ID NO: 29639 - DNA, 201 bp, Bos taurus
ccctagacagaatatatcactctttctttcctctgtgctacatctgtatctacactggctctactcaaaatgtgctggaatgtacacctcccttgctagaktgaattttttgaggccaaggactattatctctttacttccagtacctaagacaacatctatcataaagcaactactctataaatgttaagtaaattgata

SEQ ID NO: 29640 - DNA, 201 bp, Bos taurus
tggctaagaactatggacctggaagctgtagatatttacaaaaatggcaaaatcttaccaaaaacaagctaggattccagtggccataatggggaatgttmtagttagataagatcattcatttaagaagtacacttgaaagctaggattcccaaattaaataaaatgagatacctgttttaattggtatgcaggggcctc

SEQ ID NO: 29641 - DNA, 201 bp, Bos taurus
ctgcatcagccagagggaataaaacatgtctgcagttcctacaactcctcgtattttctttcagcttcccagctcatgcgttgcctaccctgggttcagcratcagtgagacactggtttattttaaaaacatggcatgatacaagctaaacaataatcactttctatctttttaattggattgtaagtttttttcctcca

SEQ ID NO: 29642 - DNA, 201 bp, Bos taurus
taattgtacaatttttcctttagaacattggctttacaaagggtctataagcagccactggctttccacaagttcagtgttactacatcagaaatggatcytacttttcattggcttatttgctcctaagacctactcagagatgtggagtccagttattattgactcacttcctttcctatgcttagggagataaacctg

SEQ ID NO: 29643 - DNA, 201 bp, Bos taurus
atttagccataaaaaggaatgaagagctgacacatgctacaacgtgaatgactcttaaaaacattgtgctaactgaaggaagtcagatatagaaggccacrtattctatgcttctgtatataggaaatgttcagaataggcaaatagtaacataggaacagaaaagagattagtgatttccagggccttgtgggagaacgg

SEQ ID NO: 29644 - DNA, 201 bp, Bos taurus
gaggggagtagcagagcatacaggggatgtctggcttgcggtaccttaggagaagtcttcaaactgttatccatcatcattactactagtagtggagtacragtcctaatatcactactactactgcagtagtagtaatgcctggagaaatataaacatcctttaaaggcttccctgatagctcagttggtaaggagtcta

SEQ ID NO: 29645 - DNA, 201 bp, Bos taurus
ttatcctgggtgggcctaacttactaacaaacaaagctcaggctctgcaagcagctgcgcctgctctcttctcctggagccccttcagggctatctacatygtggccttagcatctggttggccaacctccacaagaacatatgcctgtgtgtgtgtctatgtgtctgtctgtctgtgtgtgtttgtatgtgtgtctccct

SEQ ID NO: 29646 - DNA, 201 bp, Bos taurus
cagttactgaacggccctgtgccaaaagaaaagcttcacggagcgctccttcccgcaattttctcaacccctggcattcggggcacgctcaatgcaattckcctggtttaataatgcctggggccgcgtgttccccataagacccaaaccgccgtccacggggaccgctgcagcgcaccctcggctcagttccgctgggca

SEQ ID NO: 29647 - DNA, 201 bp, Bos taurus
ttgttttaataattggaaaatttcaactcaggaggaaaactggccaagggaaaaagcctacatctaaactcagtttgggaagctctggattttccttgatytggagaccgcagggcagctttctgtcggcctctaaccttcctttgactggctctggaattttgtttaaaatatttcaagattcgaaagacagcaacaact

SEQ ID NO: 29648 - DNA, 201 bp, Bos taurus
ttcaacaataaaagcataattgttttagacaagaatggatcagatttttcagcatgcatattatcaggtattgctctgatattatggcctcctatgcagtyggtttgatgtgtttgagttttaaaatatatattgtgttaagcaggatctagaaatagcttggtaaatattatttatggagttatctttttaattaactgt

SEQ ID NO: 29649 - DNA, 201 bp, Bos taurus
gggaagaaaacaagtattgactaaaaggaaatttgaagggtctgcatggattgtctctccatgtattttgttagcacatataattgatagcaatattaagkcattaaaaatattatttacttcctggtttgcattattagctcacatgtatttcattaacacacatgagcaagagtgatacatagcaacaagtgagctttc

SEQ ID NO: 29650 - DNA, 201 bp, Bos taurus
gaactcatctttaccatgtagttcttcatcactacccttttattattaacacttcgccctccaaacatgaatctgattatttttagtgaaattcattcaamattagtaccagtaaactattttctctattatcaaaatattttatttttgactttaaaaaaaacatattttatgtttctttcatctctctatcaggattgt

SEQ ID NO: 29651 - DNA, 201 bp, Bos taurus
tggctgaaatgcataaaaactaggtcattgacttaggcatgtattttttttttcagttttgcattctgacatttttttcatacacagacacatacatacaygtgcagactgtacacatttatacatagtgtgtatgcatatgtatatattttccacttgaactctcctttgtttaaatgtaaaatgtctctacttgcagaa

SEQ ID NO: 29652 - DNA, 201 bp, Bos taurus
atgaagggatgaggagggtgaagaaggagggcattccttcttaagtttttttattgggggtataccctgtcttccaccgaggctaactcagtgcacacttyaggtgttgggagttcaaatgtcaagcagccaacaaagaccagagtctatgatataggggtgtgaactgcatgggtttctagagtagagctcagacccaat

SEQ ID NO: 29653 - DNA, 201 bp, Bos taurus
tttaaaacttatgtattcatttgctcactgtttactcagcaaataggtattatttgcctaatatgtgttagactctggatatacaatagttcaaaaagtcrcatggagttttcagacaataattttagtctaccgctaatatgaattcagttcattttatcatttttttctttcttttcctagaacaatcttcatagaaga

SEQ ID NO: 29654 - DNA, 201 bp, Bos taurus
gtctgggcttgaaattggctttcctcgtatccattagcaactctattctagcatttcttatacagctttatgattttttaaactttctttagacataaacratggaattctcaaatacagggacagtgtcttactcctatttatttctataaagtatagaccaaggtcccatcagtagttggtacttgatacatgtttggt

SEQ ID NO: 29655 - DNA, 201 bp, Bos taurus
caccgtgattcagatagatatatatgttcacgttagtgtgtgtagagcgtgggggcggactctgacagtgagcgtgtcctttgccatcccagctggcctcrtcctgggctccgaacatgagactcgtctggtggcaaagctctttgaagactacaacagcgtggtacggcccgtggaagaccaccgccaggccgtggaggt

SEQ ID NO: 29656 - DNA, 201 bp, Bos taurus
gttcttttcggaaactgaaagtaaaaggtaactttatatttgcaggaaaaaaatttggtttctttttcactgcatggttactctgatgtaactgatataayagagtggacattagtatataagatgatcaaatgagtcatgcgatggaacatctgcctcagaaagccctttcagacatcatatgctatgccgttgaagtgt

SEQ ID NO: 29657 - DNA, 201 bp, Bos taurus
ctttgaatgaattaacgagtaatcagtcttcaatccacttatatttgaaaatagccaagtcatttatgacatattataccaagaaataaatataatgtgcrgtgtccaataccatgtggatagtcaagtgtatctcaccaagtcaaatattttgtgtttttgtctggctcttagtaaagaggtacacaatttttaaaagtc

SEQ ID NO: 29658 - DNA, 201 bp, Bos taurus
tgaaaactgaagcacctctcccttgctttgctatcttcctccttaatgcagagctggccataactaacactgcaggcctttctgttcaatatttgacattrtggattttcttacgtttcctttgtccatagacgcttttctagagctctatcgcctgcagggccacctggaaagtgaagaggaaggagggaccctccatcc

SEQ ID NO: 29659 - DNA, 201 bp, Bos taurus
ccctgaagaaggaagctgagatgaaactttgtgtattttcacttgttcatctttgttaaaaattgatttcacaaagagtttcttattttaatcttatagarccagtacttggcctcgttgatcgtctctctattttgtgtttgttttcatttcattcacttctgggcacttatatttttaacaacttcttgtttttttttt

SEQ ID NO: 29660 - DNA, 201 bp, Bos taurus
tttttgagttgctcgatagccgcctggccacatgcttttggtcctctgagatatattcttctccttctggggaaggtcaagaaccctgccctagacttccrtaactctctgccttccaggcagagaagacaaagttagcacattaacaaggaagcagtgatcagggtgggagctaggctccttacagcaattctcaaggag

SEQ ID NO: 29661 - DNA, 201 bp, Bos taurus
taggaaagattctagtagataagacagcagatgctagttaaatcaggccccagacagggggaaaaaaaaatgctaagcaagactgctatagggggtcctgraactagggaagcttcttcagggccttttctctgtgggtgataatcttttcacttccccacattctttcctccttagcatttattgaggataggaggagga

SEQ ID NO: 29662 - DNA, 201 bp, Bos taurus
agtccttggccagaacagaatttcctacacactatttttgaaatctgacatttttactctaaaatatttaaataatttattttgaaaccaataaataatayctataatgttgttttaagtggccacatagtattccaccatttggacagaccagaactttctaaaccagtcttatattattgaacatttatattttctcca

SEQ ID NO: 29663 - DNA, 201 bp, Bos taurus
gggtaaactcttgataaatagtcattaagacttccgtttccactgtccacacatacccattcattttccaagctctgtatattctggctctcccccgccaygaaagatgtcctaacttccacctcctaactctccctgcttactgctgctgcgttcattaaagttcagttctggtggaatcacattctttctcttaaaaaa

SEQ ID NO: 29664 - DNA, 201 bp, Bos taurus
tggtactctgtctccccacaactagtcctggagaaccagaatcttgttcttggtgtccacaagagtgtctaagcactgctgtcacacctggcacctaggarctcagtgattgaataaatggtttgtgattttcaatctttcaaaaggcttctagctattattattataacataatcaaattgttttctaactcccaacttt

SEQ ID NO: 29665 - DNA, 201 bp, Bos taurus
ggccctggtttacccatagtgggaaattacacatctgataatgtagaacatttctcatacacctcttagctttgacattgaagaattatgagactatactrtaagtgtaaatacgataagtgagtttgctgtgattctctctgcaatgtaagaaaaaaaagtcagtggctgactttgggaaaagtttgagagaagtcctat

SEQ ID NO: 29666 - DNA, 201 bp, Bos taurus
ggaaacttagacaaggatttgaatagatgatttaagaataatatactaagtgacttgaaagacataaaagtgaaatatgagcaatttggggcttgcatggractgttctataataaagacaagacatctgaacttgtagccaagggaagaatgccttgtagttaactgcatgcactcaaaatgtgctcagcgttataaaag

SEQ ID NO: 29667 - DNA, 201 bp, Bos taurus
catttatcagaagtggaatttaaaaggttatactgattcttacaaaatttaataaagtattaggataaaaacatcttagagaaccaaagatagaacttctyagaatggctgtattctcaacaaccttttacattaaagttacaaaaactggttctaacaatggcactggactgaaggccttaagcctttaaattctctaac

SEQ ID NO: 29668 - DNA, 201 bp, Bos taurus
gccgtttctgaagaagaaaaaaataatcacttgttgggacttaggaaagtagatctttaagagaaatatccacaagcatagtaataaggtcaaatcaccayaacaaaataagatacgatgtaatatcctgattttgttctttcacaactgtcagactgcataggaaccatacttattttcaatcaattattcataataggc

SEQ ID NO: 29669 - DNA, 201 bp, Bos taurus
actaagtcagagccctgggctgatctcagcagactatctggtcttaacaagttatttgattctcttagtttcctcatatgcaaaactgataaccttgtatktcatggtttctaagatgcacgtttatttcttcaatatcactgcaatcgaggttgtatcacaactggtgtcattttaggattttcatcagtagccatttct

SEQ ID NO: 29670 - DNA, 201 bp, Bos taurus
gtttatccccataacaatctatccagatgtttagaacattaatgtgatttttagattttatttaactcctacaaaaaacaagtggagagagaaaaaactayattcccttcagacagtaatcagaagaataaagaacatctcaccagggcccttgtctcaatatgatgtcagaaatgcaccctaacgagtaacatttcaaat

SEQ ID NO: 29671 - DNA, 201 bp, Bos taurus
tttctgtgttcctcctatggcaggaggcatttctgtccactgcttttctataatatcctaatcatgtaaacgttcagagtcagatacaggcattgggccaytttctaccagcaagtgttgctcttatgccctaaaatacctgaaccaatgcgctttggcaccttctgcttcttttctcaatttggcagcaaacctgggtgg

SEQ ID NO: 29672 - DNA, 201 bp, Bos taurus
aggatgaatacagaaaagctatggttcaaactccactttcctggaagccagggaacagggctcctgctgggtccactccaaaggcaggtaagtggtttacrtaacgtgcttccgaaaaagcttttgtactgaagaagctaattggcatatacaagccaataccaacacatattctgtccattactccccccccccacttca

SEQ ID NO: 29673 - DNA, 201 bp, Bos taurus
gaattcaaggaattaaatagaattcacttctatttccttaattctctcttagtctctttaaatttttcttctttttcggcccccacccacctttcatttgygtatgagaagcaagaagaatgtgaaattgggagtgtgtctgatagaaattcaaatcttaatttagccatgtacatttgtgtggccctgcagcttccctgg

SEQ ID NO: 29674 - DNA, 201 bp, Bos taurus
cttacctgcggcttcagccaggtgaatactcctgccacactggcctggctcctgtcatttgaacacacccacctggtttccatctcagggtctctgcagcygcttccttcagctgagaacgttcttgccgcagacctttgtggattgcaccctttatatcccttagggctcaactgaaaagtcaccttctcaactcaccct

SEQ ID NO: 29675 - DNA, 201 bp, Bos taurus
gatgttgataatccgcccacggcccttcatctcagcgcctgtccttggaagtttggactcaggcaaaccagggtaatcaccttcagctccagattgtgccrgggggccagactgcatcgagtcttggggagcagcgagtccaggcggctgcagctgcatttccccccagtgccaggaaaggttctaattcaaaaacaaatg

SEQ ID NO: 29676 - DNA, 201 bp, Bos taurus
tgtcatgaattgaattttgagttcccccaaattcatatgttgaaattctaacccccatttgagggtattatgaggcggggccttgagagatgaagccctcmtgaatgggcttataccattataagaaacacgagagatgatttttctcttggccatgtgagggtataataagaagatgctcctctgcaaaccaagaagagt

SEQ ID NO: 29677 - DNA, 201 bp, Bos taurus
tgtctgggtaagcagttttccagacaaagggaatggccaagctaaggaactgccactggatttcccttccccacattctggaacgtcaccccatgagcacrtcaaaggccaggaggaaccagaggcagggaggccagagcaggccaaccttagggtgatggcaagagagaaacctaatagacccagaggttttgcttcttt

SEQ ID NO: 29678 - DNA, 201 bp, Bos taurus
ctgccttaacacatcagaacaaatatttgttagactcggggccagtttcctcctcagaggcagacacaaaccgtctaaataatgaaatgcattagagtaaygggaaaagttcattgtctatgctatttttcacatagttttgtgagtgcagttgttgggactgatctggttttcaaagcagcctgtacatgcagattcatt

SEQ ID NO: 29679 - DNA, 201 bp, Bos taurus
aagcagttggaggtggtggcagcttaactcccctgggggccagtacagagaactgtcctggatgttgtccctgcatgctcaggggtagtagagagggtcartaaatccctttgatgaagctaaggcctcaagtacaagcaggacttagccagataagaactgggaaggagcagttcctgtgcaaaggtcctgaggaagaaa

SEQ ID NO: 29680 - DNA, 201 bp, Bos taurus
gaaacatcaaatcttagaatacttagttagagctcaatccttttaatgcctccatggtcctgataattttacttttaaggagagtgaatttgggtagttcrtaagaggacacacctatacttcttggagacccagttttgtatgctttcgggtcaccttgaaagataaagggaaaaaaatgttttccactgaggtagataa

SEQ ID NO: 29681 - DNA, 201 bp, Bos taurus
ttttagacttccttgtattgatccctctttccagctgcagtagtcttgccaacattgtgcctttctccactcctgcctgtcttttaccctcgtggttttcrtatcttggtaaatgtgtcagattatgttatacattgaagaattttgagaagaagaagcaattgattagaattagtacaatccactcaatatcatacagtt

SEQ ID NO: 29682 - DNA, 201 bp, Bos taurus
aagacatgaagagttttgctgtacattcaaagatgtgtattactcatttttaaagtaaatgcatgtacaggaaggatgtccctgcttttctaaaacacacwttggggtatgcttccatcagcctgaggccctgtttctgacttctccctccaggaactacagttggaacatgcaaggcaagcctttgctctcaaagacaaa

SEQ ID NO: 29683 - DNA, 201 bp, Bos taurus
ctaactggtcaagccagaaagccctttgtggtaaagcagaggtggtggtagagatctctgatttctaaaagcttgtttttaacctctaacagccaagagakagaacctacaaacctgtgggagctattgaagagcaggtagtaaaactgttggaagttatcatcacctcccattataacatgcctcttatttgtacagtgc

SEQ ID NO: 29684 - DNA, 201 bp, Bos taurus
tattattctatctttaacagtaggtttccggtggcctacagttaggtgagtgcattcacctaactttctgcctccctcatccacatttaaggagtcatgtraattcattgggcccactcaaatcacatcatcataatcttcttttaagatcagctgattagcaaccttaatttcatctgcaaccttcatttccttttgcca

SEQ ID NO: 29685 - DNA, 201 bp, Bos taurus
actcactcactgatctgtctagtggctaacactggctgtctgctgggagctcattgttaaccgttgctggaatacctacacttgacaacgtgtgacctgcrtgtgaactttccctgcaacagcttggctttgtcactaaatggtgaagatatccaagaacaagcattccaagagagggaggcagaggaaaactccgaagtc

SEQ ID NO: 29686 - DNA, 201 bp, Bos taurus
gagttgatgcttccttcactcactcgtgaggccacccgctgacgggcctccccttcgctcagggctttagagaaaattagagaagatgagacaagaggccrattctccccactccattcgcccccgccccaccaccgttgccttcctctcctaacccgcagtctcaaagcaagttcaacgacaggcctagactaaagagat

SEQ ID NO: 29687 - DNA, 201 bp, Bos taurus
ctgtttcattgtggcttcttcattttccttggatgtggggtatcttcttttggtgggtttcagtgtcttcatgttgatggttgttcgccagccagttgcgrttttggtgctctggcagcggaagatatgtgcatgtccttttactactctgccatctcaaataagtcttggctcattttgttgatggatgtacttgctgtt

SEQ ID NO: 29688 - DNA, 201 bp, Bos taurus
tcagaactcttgttttcttcactttagaaatgctgtttggatctcaagactgtttctgttcaggccaccctgagtattaaataaagtcattggtggttgcwggactgatttaaaaaaatattttactgttactttctgacaatttaaacttcagtaggaatattttagaatttcatccctgtgggcttcttttcccagaga

SEQ ID NO: 29689 - DNA, 201 bp, Bos taurus
atggcgccaggcggccagagaccgagaggccctgtgctggccgggtctttccttgcgccccagggtcaacacctggaggggctggcgtggctgtttttctyccgccttttcaagccaaccctcaggcaccctcctctctaatttatggtgtcctctttcctccaccccagtttctttttctttagggcaaaactgagttga

SEQ ID NO: 29690 - DNA, 201 bp, Bos taurus
tttctttttaccgtcaaggtgatgaaggtgtcttagtaaggtggaataaagaagcaaagctttatcagaataacaactagcagcagaggggttcatttgcyttaaaggaagaacctgaaaggttcaggcttcttcccctaagcatgaaacattatcctggcctcagagaccttgactgtatccttctgggatgggggcact

SEQ ID NO: 29691 - DNA, 201 bp, Bos taurus
agttaagaacaaaacgtgggtgaagcctggaagtcaatgtccgtatcccccagccaggaccagccatcatgcttgggatgcccatctgccctctgtgcagyggggaggccctttgggacatgggaagcagacgatgctgctcattggatcatgctccactgtgcttggcccagccaaggtagacatgtgggtcttctggga

SEQ ID NO: 29692 - DNA, 201 bp, Bos taurus
tggcggagggcagagggggctgttctgggtttgaggccagcacacaacaccaatttttgtgctgaaatcccccaaagccctggaaacatatcacttttgtkgttgtttttttgttatggactgtagcctaccagacttccctgttcatgggatttcccaggcaaggatactggagtgggttgtcatttccttctccaggac

SEQ ID NO: 29693 - DNA, 201 bp, Bos taurus
ccatcgatgtgggtagaattactttatactcaccaggacaggccctgtttctccacttgcatctgggctcagcgccactgacagaggtactgagccaaaaygcctgcacgatccaggccctgccctgcccagccccaagatctgcctagcaacgcatctctctgggcctcagtttcctcactggcatggtggggctgcttc

SEQ ID NO: 29694 - DNA, 201 bp, Bos taurus
agcaacagaggcagaagctacattgcaggagtgaagaacagacgagctgtaaaccacttccccccaaaactctaaaagggaaaaacagggtaaagagaaakggggtgcgatatggccaactgaaactttttctcaagataggaaaaaaacctagggctattttccagcaaagaataaagaaatataatatgaaaccaaagt

SEQ ID NO: 29695 - DNA, 201 bp, Bos taurus
cacacaatagaatttaataatgaagactattatttacttctttgttttgcagagagctgaatgaaaacctgacctccctgggccctggtagaatttctccrtgaatggttagacggttttgcgtttccagcacgttggcatccacttggtcctggaatggctgtgcatagctgggggccaaatgagttcaaatgactcctc

SEQ ID NO: 29696 - DNA, 201 bp, Bos taurus
gcaaattaaaacacacagatataaagaagcagtaaaactttaaataaatcacacccactctaaatatcaatgaaaagcagatatgcactgttgggagaatyattttaaaatgattttgtcaacaagttgtgcttcttatcaattgtggacttaaacaaaaaaaggaccactaaagaatggtttaacttgttacttgttatg

SEQ ID NO: 29697 - DNA, 201 bp, Bos taurus
acaaaagactgtatattctgcttaaaatgtagaagtgaggaactataagcatttgctcacaatgcaaataacataatagttttagaaatgctgacgatacyataattcttcacacttctagatgcaagagagaagataaacatgtgtgccatagtttcaaattggatttaagattacttacagtattaaataatctaaaag

SEQ ID NO: 29698 - DNA, 201 bp, Bos taurus
tatttttatgcagtatacattttattactttgtactaatacattctcatattacaaaggcaacttaatggaagaatgtttcttttgatagttgaataatcmgaaagaacacaaacagaactgcacattaaaaaacgtatttcgataacaaaagacaagttcaacaacaacaacaaaaaaatcttcttttcttacaggtaga

SEQ ID NO: 29699 - DNA, 201 bp, Bos taurus
tagctccaggggattactgccattatgtctaaaagaaagctcagagagcttaaataacttgcttgaggtcacacagaggggcaggggccgaattggaaccstcctgggactccagactggaagaactggctcccacttcctctgccactaactgtgccacttagagtacgtactaacatcaccaggcctcaatttcttttt

SEQ ID NO: 29700 - DNA, 201 bp, Bos taurus
actgaccaatcacagcacacggcctgggttacagccagggctcatagcaacacagctgcataactgaccaatcacagcacacggcctgggttacagccagygctcatagcaacacagctgctattactctgctgggaatatccccctccagcctgctgcttccagatcagaacgtgtgccagacactcctgtgcacactca

SEQ ID NO: 29701 - DNA, 201 bp, Bos taurus
aactgtgggtctcaactgagatgacaaataggtatggaaggaggaaggaggtgagaaaacaagatgcatgggtattcccaaagagccaatggagtagagcrgttccaggtgaaaataagacctaaggtgtattcgtgggtagataacttaggtgaattagacctctttggcattagaaagttcaagaatgggttaagtaca

SEQ ID NO: 29702 - DNA, 201 bp, Bos taurus
acatatacagaacattttactataagagtatgatgagtgctttgaaaaaagttaagtacttagtaaattcataaaaggaaaaactaattgagttaagagayaaagaaaaaaaggagaatgaatactagaaaaacaggtctatgtccagtgcaggtaacctgcattcacagaccagagtgagacagagtgtgactctcatcc

SEQ ID NO: 29703 - DNA, 201 bp, Bos taurus
gatttggggccacaaagatatgagggagattttgctaccaccagttcagagagccgatataccaatgtgggtgataacccagtacctaaactgaatcatcrgtattaaatggtcaaggtgcccaggaaatgactagagttcactgaccactggcttaaatggcaatcagttcatgttatttctctgttatcatttcctggg

SEQ ID NO: 29704 - DNA, 201 bp, Bos taurus
gcaatacagaagtggtttgctgaatataagataaagctttcctttagatgaataaagagagcttttaaaaatcaatgaagtgaaaaggccggatgattaaygaaatcggcatgatactgaaaatgaaatcttgaactatctgttgttgtttagttgctaagttgtgtccaactcttttgcaacccatggtctgtggcccgc

SEQ ID NO: 29705 - DNA, 201 bp, Bos taurus
ctgtttgagaataaaggactggtgaataaggaagggaagtgggaaacaatttcccagcctggaaccttgtaaattaggtcaaccaatcccaaatcaaatcrtatccacagtatttagtaatttcatttttacatggcccctttatcataattcacatgaaatcaagataattagcaaagcaccactatctcaatttcttta

SEQ ID NO: 29706 - DNA, 201 bp, Bos taurus
ggacatgaatttgagcaaactccaggagatagtggaggacagagaaacctggcgtgctgcagtccatggggtggcaaagagtaggacacgacttagtgacygaacagcaacaacaaagaaaagacaatctcaggccctcatcttacaggagtccatatggagcaaactgcaacccaattcaatttaggagaaacttgttgg

SEQ ID NO: 29707 - DNA, 201 bp, Bos taurus
agcatcttgtggtatatgggccatcctggattactatattgagtattaatcacaaactttcacttttcctataggctactaaatcacttttatttggatcwagggcctgcaagaaactcaccaagtctctacatatcaatatgaggacatctgctgtgactaacagttgaaggcagctgacccccttgtgtaaactgtaag

SEQ ID NO: 29708 - DNA, 201 bp, Bos taurus
tgttccagggcctagctggaggaagacagcatcctggccaccggcctgtgcgtagctgtgttagacttgttgctgcctgatttcccgttgcattgctctcrtggggacgtgctctgctggccctctttgatgtcatctgctgttctccgcaacacttgccagctgtcctgagacccacaggtcacaatgtcctgcccgcca

SEQ ID NO: 29709 - DNA, 201 bp, Bos taurus
ggtggccaaagtgttattcagcctgctctaacctgagtgtgggctgtatgcctttgcaatcgtgctatgcagatgctgcaaaactctgctccactggtgcrgcgtggactaaaactgtttggcctgtgcagtattattgttttataatggtgaaatatttcaaatgtatggaacagtaggatcactaatataatagtgata

SEQ ID NO: 29710 - DNA, 201 bp, Bos taurus
cagagcttttgcattgagaggggagtgctagcttgctaccgaccactcagagaaaagatgagggatgggctagataagttttcttctgtagctgagggtayctttctgccagacattgggtttagacagtggaagacagaggcctacaaacaactctgtgatgtgagagggagggaagtaaaaggagccataggaaaagcc

SEQ ID NO: 29711 - DNA, 201 bp, Bos taurus
atcacactgcccagaatggctcagaatttaaaactcccaaattgtttatttctggaattttccatttaatattttctgacaatgattgaccttgggtaaakaccatcacagagagggaaaccacaaaaaaggggggaatggctgtaacggatttttttttttaagtggcaagcagtcatatttacagagtgattcttttat

SEQ ID NO: 29712 - DNA, 201 bp, Bos taurus
caaagccttttcgtctcagtcaaaatcctaatggtggcccttacaagagctagctcctcattatcttgttgacctcatttcctacttctccgtctccctcmctctcctgcagtcagaagggccttcttgccattgtgcctctgcctcagggcctttgcgtgggctgttcctcttcctgggatgctcttctcaggacctcac

SEQ ID NO: 29713 - DNA, 201 bp, Bos taurus
tgagtttggagggaggaagtgggcatgtgtggcccagccccttgccctccctttctgagggagctggactgctcatagagaggtgctgttggtcagtcacygtggccctgcctgggggaggtcggaatgcgctggacgtgcttgctggggacaggataggtaagtcttgtctaaatccaggggtcgttcatcaaggaaggc

SEQ ID NO: 29714 - DNA, 201 bp, Bos taurus
ttatatgtcagattcatagacgtacaattagtagatcaaggggtatgactactttgaaattttggaaacattgccaaacaaccctgtcaagagagagtgtrttcccaatagcagagaaagtcgaaggcactgtatccttgtgagcatttcgtgtttcctatgatcattttgtagtctttgctaatttaatttgggagatta

SEQ ID NO: 29715 - DNA, 201 bp, Bos taurus
gccttcccttctggtccagcttcctaggttgttgccactttggactctatttgagcactgtagctagtaatacctggtaaagtgaagtttctgggaaacgytggccattcagtggctctgttgagagagcatactcatcacttgatcaagcgtcacgcacacaggattttttcactctgctttattgactggcgtatcctt

SEQ ID NO: 29716 - DNA, 201 bp, Bos taurus
ctgtgtttaggtggcaattctgttctgttccctattgcttgtcatcttgaattgcaggcctctgaaactggcactggttgcctgtctcccattcagcaccrtgagcactctgcttatatgtaaccccctttcatcctaaaggctgcacatggtgttccttccaggaggtcctgctgtactcttttctccatcctactgggc

SEQ ID NO: 29717 - DNA, 201 bp, Bos taurus
gccattctacacaaggcacgtaactgagacatggaaccagatgcagatggacctgcaactctgcccagattaagaatgttcaaaaaagcccatcttgaggraaattgcagggcccccatctttaagtaaaaagaagcgcctaaattaatgccttagcttgcaggactgaaagagaaggaatcatagggtaataaacactcg

SEQ ID NO: 29718 - DNA, 201 bp, Bos taurus
taaagctaagaagaatcttttttaaagatctctttactctctcttcattttcattcttaatattaaagatggattctctctggggtttgaaattccacaawtaatatccttagaagattcattgtgtattcaaagataagcagagaaaaatacagctctattgaatagaccccagttcttgtctttgaccatgttatgggc

SEQ ID NO: 29719 - DNA, 201 bp, Bos taurus
ggtatgatcaccccaatttctccatagacaacttcaacatttttctttctcttgcctctatcattctcagagatagaagcatgaagctgcaagtcatgcartgcatctatacggccaggaatgccaataaatggacaatgatgtaaccatggatgtcatggattttgattcaatcccaatctgtatgtcacttacaaatgt

SEQ ID NO: 29720 - DNA, 201 bp, Bos taurus
tcagcaaaaatgaataatcctgttttaaagtaagttcagaatttcacgcaaacagaacatgactaatgcttttatttggagttgttttaataattgatttrtaagtgccaagactgaagactgatcatttcaatgacttaatattaacatccattgctgccatttggttggtagtcttgtttgaatgaagacacttcctat

SEQ ID NO: 29721 - DNA, 201 bp, Bos taurus
aagtaaaactaggtttatgcactttagaaataacagacacatgtcaggtaaaacacacttgtccactgaatagagctaatgacataaaaacaagaaaaaamccacaaaaatcagatagtgataccaactgatattaatctaacctaagacataacagaatacaaagaactatacaaaaaagatcttcatgacccagataac

SEQ ID NO: 29722 - DNA, 201 bp, Bos taurus
gaagagggaagtagacacacagagagacaccaagattgtgcacatggagagaaaagaccatttgagaacacagggagacagtggccgtctgaaagccaagragagatgccccacatgacaccaacctgccaccgctttgatcttggacttctggccaccaaaactgagaaaatagattgtggtttaaactactcagtttgg

SEQ ID NO: 29723 - DNA, 201 bp, Bos taurus
agtaacctcagagttcagaaataaaaaaggctataaaacaagcattaattcctttatgtccatttcttgcacaatttcactatagatatgtcatccatagrgcatagagaataataacatagggtgtccaacccagagaagctggcatgcaaccactaaaaagattgctttggctgggatgaccatatgcaagggacaagt

SEQ ID NO: 29724 - DNA, 201 bp, Bos taurus
atttgcactgatggcttcttgcttcaagccccagtgactatgaaaactctctggtatatgttgtaagtggtcttatttacattttatagatgaaacattgytaatgagattgggctgataattattttaaagaaaaaccaagaaaatttgaatacttttaactatgagtattttttaatgtaaaatgtatgtatttttaaa

SEQ ID NO: 29725 - DNA, 201 bp, Bos taurus
ttgtttgatttgttttgttttatctcgttctcttgcgtttcaggcttaccttcactattctttctcagcaagactggtaatggtggtggggcagtagagamaatttttgggcagagaaaaatattctttcacttgagtagacgtcttcaagaatacagtcattcctgcccacttcctaaataaatcctttcttatgttttt

SEQ ID NO: 29726 - DNA, 201 bp, Bos taurus
gggatggtgaatcgaatagagattcaggaagaggaagaagagttgggaggaccttgaagctcctgccccttcctacacgcctggccctacatttctcttcmcagggctgatcttcattcaacatgctctagggctcaccttctctcagaataacttctttctggaacaggcatggcctccttccctccaactgtgcgccgg

SEQ ID NO: 29727 - DNA, 201 bp, Bos taurus
taatctggaacagactgagttctgagtttgttttgttttctctttataaatcaacccctattaccaaacaaacttggcccatagaaagataagttgcttcrcttttataccacacggacaaatttcttatcgctaccaccaaattgactactatggggttattggaattgcaacattggccaaaacttagccactgcttct

SEQ ID NO: 29728 - DNA, 201 bp, Bos taurus
gcctggacaggcacagctataaattattatcatatccatagaaacaaggaaacaagggaccctgctagtgaaccatgaggttgccatagagaagctcaagrgggcctacttaaaacccaggcaactttccttcatgttcctggaactcttctctgcctccactgccagttctaactcttaaccctggtgggagttcatttc

SEQ ID NO: 29729 - DNA, 201 bp, Bos taurus
tcttttagcttaactaatgctgttcacttatatcagctgaaaatctaactcatatgcaactttttttcactgggaattgtttgggagaaaaccacgccccrtgaaagagggggccctttattattcatgggtagatattctgtatttgtgatttaaccttgatctgaaagtcacctaagagtaagcagtttttcttttctt

SEQ ID NO: 29730 - DNA, 201 bp, Bos taurus
taatgttgactttgctgcaccctattcctctcagaacaatgagtctgatcctgccgtccaagatttgcatattaaatcaagatgataaataattgttgagycttagtagatagtaattaatgtagtctacttaaagtattcaaattgtctttttatttctaggctataaaacagattttagtactatcttggaaaatcttg

SEQ ID NO: 29731 - DNA, 201 bp, Bos taurus
ttctttgctttaaaagtctcattaagttgcaagttggcacaattcttggacagaatattttattacaggaactctgaaagcattatatgttccacttattkcaataagtgaagtttatcttctgggaaaagtaaacgcagatcttggcttaagttaccttcagcacaacagacactagtcacaattttcttgttctacttg

SEQ ID NO: 29732 - DNA, 201 bp, Bos taurus
tggtaggcttgcatagctcacatcatctggatctgcctagataactcagctgacttcattgtttcattctcattcccttctttgtcattaatggtttttayttcctttggcccacttatcacactgtattgtaattccagaaggcctagagttcttgatagactttaaacacagctcagaagcataaggaattgcctcatc

SEQ ID NO: 29733 - DNA, 201 bp, Bos taurus
tcattggaagaaggggaattgataaaagcaaagatttttttaacatataaatactaatttactaatgtacatgtcatgtattatgctatttttattcttartgtattttaagattatactgaatacttttgttttaggctgccacccagctggaaaacttaggaaatgcgttggatgccgtggaaccacagaatgctcaac

SEQ ID NO: 29734 - DNA, 201 bp, Bos taurus
attaaaaaatagcagttatcttaattgcatgtaccaaataccctatcttgtctctgaataacttcgataaacggaaatgcttacacacttaatgaaaattkaaattcttactgtgttgttgtattgttctatgtctaagaagagtctccagttattctacagttctttaacctttctttaggccactttttaatcataaat

SEQ ID NO: 29735 - DNA, 201 bp, Bos taurus
ctaaaagatttaacttatttaaaataagggggcacatccatatttctaaagtaataaggttttaattacaatgaacatcctttacataaaggcttggtaaytaagattcttacaaatagaaaatgctaatttgtttctatattttactgtttgggataagattcttctagtgatatcatcattgtttaggatcttgaatgg

SEQ ID NO: 29736 - DNA, 201 bp, Bos taurus
cacttctcatcttcctccagaaatcatttggtgatctttcaaaaagatttgaaataaagcaccgccttcagtgtaaaaattttacgtggtatctgaacaayatttatccagaagtgtatgtgccagaccttaatcctgttatatctggatatgtgagtattttcctgttcctttttatttggtatactctttgccaccaat

SEQ ID NO: 29737 - DNA, 201 bp, Bos taurus
catattctaaataccaaatcacacagattctgcttcctgcaaagcaaaacacaaatactgctaaacatgtgaattgcaggatactacttacaaaagactgyatttgtcttggtaaaagtatcctccccaatttcactggaataggaagttcctttctggccctcatatttgtttacatgtcattacttgatgaaagggttg

SEQ ID NO: 29738 - DNA, 201 bp, Bos taurus
caactcatagaaaagtctgaataattaaaattcatttcatccaataaatgcctaggatatgaatgcacttttaagaccccagtggggcatgcggggtgagkacttcttcttcctacagaagagatgctacagttacactagtttttgttaaaatttttcaaattttactctctctgactcagtttcttcatccttaaaatg

SEQ ID NO: 29739 - DNA, 201 bp, Bos taurus
tttatactcccggatatatcataagtgctcagtacatacattgagttaaattcctcagtcttcttagcgatccatttcagtaacatacactgaatacttamaattactgatttatttattaagatgactgaaaactctttttttttttttgatcaactcttgatcaatgtctttcaaataaatatttttgtttatacagat

SEQ ID NO: 29740 - DNA, 201 bp, Bos taurus
cccttgaacaatattgggtctaaaccacaagggtccacttagaaatggatttttttcaacaaatgtgtactgcagactgcataggccctgcttggttgaayccacaaatgcagaattgggaacatggaaggcaggaggaccgaacgtagagttatgtgggaatttttgactgcagggaggatcggtacccctacccgccct

SEQ ID NO: 29741 - DNA, 201 bp, Bos taurus
aataagaatggtatccattgaataaaacaacataaaaatcaagaataaaacatgtttttttccccatttgacgtaatttttgagtgacttccaataatacrtagatttgttcttaatgccatattttttaaaaattggttgtgattatggtagaagtatagggtacacaatagctatagtagctattaataataaactacc

SEQ ID NO: 29742 - DNA, 201 bp, Bos taurus
acttccctggtggtccagtggttaagacttcatcttccaacgcagaggcaagggtgtgatccctgggcaagatccagtgtcgtggggtgtggccaaaaatkttttaaaaataaataaaaacacaacatttcaccttgactgtagccccattaatgaagaagcctccttggcctcaaagattttatatgacaaaggtgaaga

SEQ ID NO: 29743 - DNA, 201 bp, Bos taurus
cttacaggtcactggcttctcctgatacccctacaccagatccccgattccactcctacccacagcagggtagggccccatgcagagctttgtcctagcayagggtgccttcacctagcttcagggtcagagtccagcccgtactttctctaaggccctctctaccccatccagtttctgctgtggtgacggaggagggtg

SEQ ID NO: 29744 - DNA, 201 bp, Bos taurus
aacattaaaataccctgagatacacaaggagctttaagccatctaatctgaaagagaattttccagtgactgcttttactgcattgtttgttgattatacrtctttatatgtaacagcacagttacaaagtcaccagtcctaagagacagcagttatctaaactataagtcaccttctgatgctgtttgttcttcttgtta

SEQ ID NO: 29745 - DNA, 201 bp, Bos taurus
tttatatgaatgttattaaacatacctaccacagtattaaaatatataagctgcatatatttctcagctttgtggtttctacagaaatgtggtaatagatkgctgaagattaattgttttcttgaaattcatcatataaattttcttcagatccaatgaattggattgaattgaatcattctatccaattgaatgatctta

SEQ ID NO: 29746 - DNA, 201 bp, Bos taurus
atggttttcagcttgaccctgtcactttcactagtcaattctgtttatgcactaatttttttttcacagacaataaaattcagtgatgtacgttgctgttrgaagtgtagtttttgctgaaggcaatcagacttactgactctaactaaaataaataattggagatttctaatcactaaccaaagcatttttcccatagta

SEQ ID NO: 29747 - DNA, 201 bp, Bos taurus
gtaatatgcaaaatctcatagctaagtgacaaagctagggtttgaacgtaatccatttagttccagagtccattcttataaactgctaggtggcaagccckgtacttgcccagccttaagactaaagaaaaagcccagagtaagcgacagagacatcagtggtttaagggatagagggatcttatccaaggttgtacaccc

SEQ ID NO: 29748 - DNA, 201 bp, Bos taurus
ccagttacttttttaacccacaattgcgcttccaaatggtagatttacaccatcctctgcaccagcttttaataccgtttccatagaaggatgtagggccrtatgatgtaattgaaagatactggactgggaatccacaaacctagtttttaatagggtcctgctgctgagtgatgtgatattagcctattgcccactttc

SEQ ID NO: 29749 - DNA, 201 bp, Bos taurus
acaattatatctgtggataaacattatgggtgaataaaaatagcaattgtaaaatgatttaaaataggttaaatgattaagaaactgaggttctggactcrtaggggtaggtatgggcatttaaagatgttgatggtataatttgttttctatttcttcatatgtcagggtttttgtttgtccaagattttgataacacta

SEQ ID NO: 29750 - DNA, 201 bp, Bos taurus
ggtgggcagagccagctttcaaaagcaatagaagcctagatcttactgtttcccaactgtcattctcctgccaaggcccttttaaatagggtttggggtcygcctttgtattacatatgcataacttccattagtgttaatcacatgctccattttagagctgttttggcccctccggttaaatgggcgtttaaacagttt

SEQ ID NO: 29751 - DNA, 201 bp, Bos taurus
aactgactgatgggggccctgtttgttactaagtttgcattttttcaattactctgcattctctaggtaggggagttcatcaaccccattgatttagacgwcagcaacttcatctgctccttttgctcattctctgaaatcttaagactaatgtctaaatatggcttcttgatccctgagcccatcacctttcttatatgc

SEQ ID NO: 29752 - DNA, 201 bp, Bos taurus
aaatggcataaggaaatttatttgttattttagcaacttccacagttatctgaaatctacctaagactggttaacttttttatgtgactaataaagagatrtcaagtatttgacttttaaatatttttaaagggttcatgagttctatcataatccattgatcaggattgatcacaatcttcttggtcaagaaggaatgga

SEQ ID NO: 29753 - DNA, 201 bp, Bos taurus
aatcaggtagatgtctgtcttctctagctttagcagcagccatgttcttttgcgtctactagagctaacattctctgggctaaggtggttttcaagtaagygaatgtccattcgtatatattgtggcttttaatttcatctcatgatttagttcacattcaactatctagttgaattgatagcatttttctctgtgaattt

SEQ ID NO: 29754 - DNA, 201 bp, Bos taurus
cactcagatagtacttattattaatgttttcttgatataaagggttgtatctagtagggggcttgtatgccaaaaacaaatgaatggacaaggaaacaaayggacacatgaatgaaagagagaggcaaaatggtggttctctggtcacagaatttacaggtgatttgaaagagaatcttgtcgagtaaaacagcattttat

SEQ ID NO: 29755 - DNA, 201 bp, Bos taurus
ataattctgatgagtgtttggatgcagtaaggcaacatttacagtctgagaagacccaacaaagaagagtgggcaagtgctaagcaaaagatttatttctygaaacagaggtgatgacagcactgttcttggcttatttcctctattagctgctagtccttaatacaatcatgatgtttttaccccaagtttgttctctta

SEQ ID NO: 29756 - DNA, 201 bp, Bos taurus
aaattcagtttccctttcttagtgtgatccattccatgagaacatgctaggagtttcccatccctttgacttttctgtggcaccaggacacacatggcccrgtcgctgacagccacattgccactggcatcttccttgtactgcacactctgcatgtgtcaagaagccatgcctcctgtcttctttgccaggatattatgt

SEQ ID NO: 29757 - DNA, 201 bp, Bos taurus
gtagaaattttccttaacattagtctgatactaacactctagattcacatcagcgatttatatcttatggaacccaatatattttgaaagctttaactccytttccccctccttcacagaatcatttcaacaggggcatgaagtatcatttctattgtaagagaggtcacatcgcaccagggagtttttagagaagctggc

SEQ ID NO: 29758 - DNA, 201 bp, Bos taurus
gagaaaaaacaagtcaactaatatagactgagtggatgtgagtaattttaaagaaaagaacaaacatggaaaaactgagtgccatctttaagactttgttyagaaaatgttggaaagcagagaagacaggaaaggctacagtgggacatgaggtcatctcacatggattctatggtttttagcagtgagttcattcttgtg

SEQ ID NO: 29759 - DNA, 201 bp, Bos taurus
gccctgtggctgagggacttagatttttcataccttgaaaaacacttgaagatcctcttccctccagacccacttaagaagaatcagtgccccaaaacaaytttgggggaaaaaaaaaagaaagagaagaaaaaataccccaagagggattttaataacttgttgagcaggttttgaatttggaaggcacgtgtcagaact

SEQ ID NO: 29760 - DNA, 201 bp, Bos taurus
gctttcttttactacatatttgatgtaatgaatagccactaaactagcatgagtaattttatataatactgtttttatccacggccttgattataaagttmctttataacttgctttcgtttcttactttgaattggcttgccctcaataacaacataaggttctaggtgttcactgcatttggaaatcagaataccatca

SEQ ID NO: 29761 - DNA, 201 bp, Bos taurus
tgtccttcctatttttcctccaggctctttattctaaagtctcaaaatgccacagagcacaataattataccatctggagccccctgacatgaacaatacmaagcttaagacaagcatctggtattttcagattacaaatggtatatgttaaattatggttcacaaatgatgacggtcatttcaggctggtctccaaccat

SEQ ID NO: 29762 - DNA, 201 bp, Bos taurus
gacactggactgagaagtgaggcaactatatatatagcctatatgcctaatttttgtggatttaaattatttgacaattttaaggatctctttttctgtgrtaaaataacagaactctaagaagatatgtgaacatgaactacactgccatgtaaacctagggcatatgctaaggcaaaaagcacaaagcaagaacagtgt

SEQ ID NO: 29763 - DNA, 201 bp, Bos taurus
tgctgaaagagctggtggctaaaagcttacagctgggcccgctgcacccaagccagagatcacttgtctctcaggccaaaaccaagaatcactccattctkggagataaaaggcaaactagttggttccattcaagacagcgccaaaggccagccagctccagagctcccagtgaggttggctgaggtctctgttgtgact

SEQ ID NO: 29764 - DNA, 201 bp, Bos taurus
attaatgcaggtgaaatcctatcacagagaactccacaggaaaccagtattaatgaaaactcccaatggatcaaagtggagacttctcagaagctctaaartataactccttctttaaaaatcttaaactgcagcatccagagggaatatctctaataaagaaggcctcaagtattttaaggtgtttatctttgaaggggc

SEQ ID NO: 29765 - DNA, 201 bp, Bos taurus
aaatttatacaaatagacatatctcaagcagtgcagcctcctccaacacatacctttaagaatttttggaattacattttgagtgatagtgagatgcatgraattcataatttacctttctgctagcctccctaaatatttgctttggataatttatgttatttcatttgcttcccacacctttgtgtgattttgtatgac

SEQ ID NO: 29766 - DNA, 201 bp, Bos taurus
atgttgcaatggttgcagatcccaaattgaaattctttgcaagtcctgaataaattctttattttgctagagaaataactggtagtctatttgttgtaggycaacaatttaatggcccttaagaggatccccagaaatcccccaagagctctgaagctggtgagccaacaggtgtggtaccaacattgaacctattgcttc

SEQ ID NO: 29767 - DNA, 201 bp, Bos taurus
tcttaataggaatataatgtggcaatctaagaatcacttcagaaatgactgttctcttgagaagcaaattcctatctgccttgaaaagcgtacctcttcaraataactgaaattctattatttttaattgccctgatatagacacaataataacatattaatagctatcttattattatttgagtaatcaaatcattacgt

SEQ ID NO: 29768 - DNA, 201 bp, Bos taurus
gattaactgaagaaccaacacaaacagtaaattctgtgagcatgattttcagctaaagacagcatgtagactggggctttgggatctctgccgatacttcygtatggggatgaagtaggggggcggagaagacttctaatccctaggtgaaagagctgtgaaaacaacatgctctgcacatcacctgaagttgttcccttc

SEQ ID NO: 29769 - DNA, 201 bp, Bos taurus
tagtatcatttttcaaagacaacttatgataatatttcagaatattaatttctagtcttttttcttttaaattaataatgtttatcattatcttatgaatkaaatagataacaactgtagaaactttagaaaatttagaaagtagaaagagaaaaattacacccaaccatactagagatggccaccacgaatgggtatatt

SEQ ID NO: 29770 - DNA, 201 bp, Bos taurus
tacctgaatgcagtggcctgaggacttgaaaaaaaattttttttttctttagctctttttttttgttggtggctatttttaaaatggtctttaaaaagtcyggagtcctaaaaattctacacagaaatgtaggcaaacagaatggcaaagtaacataaggcagtgtttcaggcaaatttatgataacataaggacagctta

SEQ ID NO: 29771 - DNA, 201 bp, Bos taurus
caatcagtgcctccctgctctcttggtctggacaccagtgcattgaattgcatggtcaggcagatataacagctcaggaaccacaagtaccaattcctgamgtgttctgaattctagcttaggattgtgtgaagatagaaggacttaatgaaaatgactaaaccacatgtagtgtgagaattatgttccttttacttccca

SEQ ID NO: 29772 - DNA, 201 bp, Bos taurus
gaaggacctcagctagtgtcctgggcatttgtgtgctgtggccagccccacccaccctcctcctctctcaggaggaggctgaccccagagcaaatgtcccygtctttctacttctgatgggcccagcacagaaaacaaatgtggggaagcatttttgctcacaagcactgggtctcctgtcaaaacacaaagaaacccttg

SEQ ID NO: 29773 - DNA, 201 bp, Bos taurus
cactttttaataactggcctctggagaagttgctaccgcagaggttactcagcctgtgtttcgctttgctgtccctgtgggtccgggcagggctgccactyggacaggctggtcccaaaggcccctgactgaacacaagtagcgctctgaccccccccccccccggaaagccaggggacacccgctcctccaccttctaca

SEQ ID NO: 29774 - DNA, 201 bp, Bos taurus
tggaagctcggctcgcagaatgtaaactctgacaaaaacaaaagcagctcttctgctatgcagcctctacagctgtctttggtatatgtcacggaagtgaytttgacatgttcggacctgggcggctcgtggtgaaggatttttttaacttggaatttgtctctaactgggaccaagacgatcaggttgcctggtacctcc

SEQ ID NO: 29775 - DNA, 201 bp, Bos taurus
gcacaaacaggctaagatttttcagtgtgaaaggaagaaacgtggaatggtaatcacaaaaaaaaaattatgaaaaggtgcaaattatgcaaattaaaacrtgattattttaagcagtctgctaggatgttcctttcttattttagggaaaacacgtgggactcaccccatctctctttgttcctttctgggtatcatgga

SEQ ID NO: 29776 - DNA, 201 bp, Bos taurus
aacaatgttcactgtctggcccatctgaaaggcagggtgctgaaaatcattaatatactgtaatttcacatgagcccggcatgggtcacagaggatggtayggcctgttgtgaaagactccattacttcacagggagttttggcttggagaccctggctctgagaaaaataacccactggttggcagctctagcctaacag

SEQ ID NO: 29777 - DNA, 201 bp, Bos taurus
tttttcttttagactcagcatgtaagcaataccatatgatattggtccttctctaatttacctcccttagaagaataacctccaggtctaaccatgttgcygcagatggtattatctcattctttttaatggctgagtaatattccattgtatatataccacatcttctttacccattcatctgttgatacacatttacaa

SEQ ID NO: 29778 - DNA, 201 bp, Bos taurus
gcagagtcctttactcctgactccatgggggagggcctttaagccagatgcatggaaagcaggttcagcgaagacagtgattcaaaactcacacagacacrtctccaaagtcctgaggccagctccctggaggaaatccggcagcctctgccatcgaaagagtgtggtttccagggcacgtgaggctgggagcagctgggc

SEQ ID NO: 29779 - DNA, 201 bp, Bos taurus
tagacatttcttcaaagaatacatacagatggccaacaggcacatgaaaagaagctcaaattgcgaattattagagaaacgcaaatcaaaatcacaatgargtatcaccataaggccatcattttaaaaatctacaaataaatgctggagagggtgtgaagagaaccctcatatatctgctgttgggaacggaaatggtgc

SEQ ID NO: 29780 - DNA, 201 bp, Bos taurus
agatttgaagttctcctaaaataaatttcaggcaaatatgacctcattatttttaacttcagagttctctatctggttcatagaggtggcagtaagctgaycagaacactagaggaagagaaaataagagcaagaactgtccccctatcctgttctctgaccatggcagccagccctttccatctctgggtcactgtttcc

SEQ ID NO: 29781 - DNA, 201 bp, Bos taurus
agtggcctcagcagccagcactgtgcccagggatagcaggatctgagggttgctggaagatctgccctttgaggaaaatctcaagttgctcctgtgactgrcagatggcccagaaacagttgctgcagaagaatataatgctccaagccccagtgatgatcctaagctattcgaggactgggagggtggtttggatattgc

SEQ ID NO: 29782 - DNA, 201 bp, Bos taurus
caccgacttaaaacttggaagaagggcaagtttaaacttatgttgaagttaggcgagtgagtaaaccagcagccacctccatctcctaacagcccccaggycctcatgtgacttttccattggctcagcagccctgcattcatgcttcggtgtggatcacctggcatggttccccttaaatgaacctcaacacccccgctg

SEQ ID NO: 29783 - DNA, 201 bp, Bos taurus
tccgtccatgggattttccaggcaagagtactggagtggggtgccattgctaatagaggaatcgtgagcctcgattcttagctgctgtgtaatgctgtttmttcctttggcctggagggtccagcctccctgatgcttatggttgcctgatacctgaacagaatcggggatctatgagctagaaataagtgagaaatgctt

SEQ ID NO: 29784 - DNA, 201 bp, Bos taurus
ggacataacaatgccggattctgaatttgtgtgtttataactgtcttttttttttttaatggcaatgataaggcagcatgtgattaattgggcccatgtarctttcatttgtggagtgctttgcagtttactaaaataccaccacatcttatatgagcctttagataacctttgtatagaaggcatggccaaaattaatat

SEQ ID NO: 29785 - DNA, 201 bp, Bos taurus
aaaaatgcactgttgaactttaagtttactgcattctggaggcaatacctattctcattcaagtacaacatgtatctcatctacccacaaagtgggtatcrgagcagcatctctcaaatccactaaatcgacctcttcacaccttcacaactggaagtcttacttcacagaggacacatctggaaattattctcggaaagc

SEQ ID NO: 29786 - DNA, 201 bp, Bos taurus
gtattcttgtctggaaaactccatagacagaagagcctggcagcctagagtcacagggtcacaaagagtcaaacacaaccaagtaactgagcacccacagyctatggacaaatagcttgaaaaatcatactcttaagcttatcaaatgatctcatagacagtcacttatttgtgcaagcttggtgaaaagaactatttacc

SEQ ID NO: 29787 - DNA, 201 bp, Bos taurus
gcaatagatagaggtcttcatggcgccttgaggctaggctagacggaaagaagggggtatttacttctagggctcctataaggtccttgtttgaagactgygtgtttgtttattttttatggaaaactgattaatttttgtgatcttcaaactatccactgaaaatatgtcaaaatatagcataaaaacgttatgatttgc

SEQ ID NO: 29788 - DNA, 201 bp, Bos taurus
acaaactgtttaaaaggtgtccctctgtaggcatatcagttaccaaaaggtatttgtgtcttagtttgagtcaaagttagctaagaggggcctgggctagrtttcctactgatacggtgccctcttgggtaatgatgccttatgtagcgtgaaacagtcctactgtgcaaatgtatggtaaggaattcctgataattgggg

SEQ ID NO: 29789 - DNA, 201 bp, Bos taurus
ggaggggaggggatttcagaagtggttgaaaattgcctattttttatgtcctttagatcacaacaactaatattttcattacatagattttcacactgttyttcaagtctctaagtgaagctctcatccagactgatattttctatctatactttcagttgaaacctactataatctcccctttaaaaaactaacttccaa

SEQ ID NO: 29790 - DNA, 201 bp, Bos taurus
cttcaaaaagcatgagtcacaagattatagaggaaggccccaggaccacattgcaggtaggacagttcacactctctagctcttgtctttagaatataccyaacagtggccttaagtggaaactgacatttaaagactctaactttaaagatgaggcaattttgattttgacttggatagtttggtaatttttttccagac

SEQ ID NO: 29791 - DNA, 201 bp, Bos taurus
taaggtgaatttgctctgggggatgttaataccacataatataggtaaagggacatgtggatgttttccagatcctgctaaagacaattctgagcttcaayaggtgaacatatttcagcatctggtttagggggccctctgtgatttttatttgggggaaaacctagacatgagatctaagtaatttaattcactgttcct

SEQ ID NO: 29792 - DNA, 201 bp, Bos taurus
ttctgaataaatacaagaaaatgcctctgcctgaaactttggtttaattaaaaatcatgacgatctgtttattacaagaggccctgggctgtatatgtggrcatctgagcatcagtggctttctttttttaaatttggatataaagtttcaaatgacacaaatcaataagcatttgtggtcaggccataaaacaacgattt

SEQ ID NO: 29793 - DNA, 201 bp, Bos taurus
aacaataactacagccaaggtggatttttttttttttaattgtgtcaggggagggatcttggagaaagactgagtctagaggggaggacatgttcaaatgrgtggagggaggtggaagggagttatcatcagcagagatcagcttaagcaaaagagtgcagatgactgaaacagcccaatttatgtagggtctgcttctca

SEQ ID NO: 29794 - DNA, 201 bp, Bos taurus
ggttcttcactgcttaaagataatccagcagcttccaaacaggcaggcttttagattttgttagacatcaaattgtatttttgagggcctggtattttgcrtcagactctaatttagagttactaatcagtcactcactatgacagcattttgaactcaatctatagaaacaattttaaaagatacctggcctgatgaaaa

SEQ ID NO: 29795 - DNA, 201 bp, Bos taurus
ctttccgtttcctgagcacggctggagacgacagctggggctcgaaggatctttgctccgactttaatttggctcttctttagggaaattcccgcttccgyccgaggacgcttcgcggagcatgacagaggggccccaccccacgccagaggcgtaaggaagtggctgcacccctatctcctagccgcgatgtgcgttccc

SEQ ID NO: 29796 - DNA, 201 bp, Bos taurus
cataaagatggggccccaattcaatgattggtatccttataagaagagatgtaggaaatctttctctctctcttactctgtgtgtgtgtgtgtgtgtcttrggaagacacagtgaggaggaggcctttgcaagtcaggaaaagagctctcatctctcaaatagtgaggaaaactaatactggatttctagcctctagaact

SEQ ID NO: 29797 - DNA, 201 bp, Bos taurus
ttatttaatagtagtgaaaatgctgcctcttagctgagccatattctttgcatgcattgattagtggtgaatatgatcatttccatttcccagaaaaatayctagacacataaaaataatacttgatgccacagtgaaacaggaatccgagttcttgtttgtggagccaaagaatgaacttcacgaacacacaaacactca

SEQ ID NO: 29798 - DNA, 201 bp, Bos taurus
atagggcctttaagaaaataattaagattaaataaaatcataaggatgtgacccttaggaataggaatagtgtccttgtaagaaaaggaagagactccagwgatatgtgtacacagtaaaaaggccatgtgaagacacagggaaaaactgctaccaaaaaaaaaggagagaagcattaaaagataccaaatgtgctgccac

SEQ ID NO: 29799 - DNA, 201 bp, Bos taurus
gagaatagaatcaaagcttattcagcagcatcttttcccccttagagacaacacattcacatcttatagcaagtaatctaatgagagattatcatctgctyctgggctcttcatgtcatacatatttacttttacagcagccatttttaattattttctattcccattcaacacccataaaataatgttatgtaatttttt

SEQ ID NO: 29800 - DNA, 201 bp, Bos taurus
atctagcgatgagattctaaactgaccttcccgcagtttacttcccgcagtaaggttagaaggcaagtgtttggctatttcatagcacttcaacttgctartcaatgaaataatagagtacttctgatatccattttagtgttaaataaattatccatacaaggtaacacaaaacataaaatgaacatccatttttttgtt

SEQ ID NO: 29801 - DNA, 201 bp, Bos taurus
attcatattagttgaaatacaagaaaaaaaatcttatcctggtgagattcattatatttgaaatattggtgtgactatgaaatatgaattctatatctgcyattgcaacccattttatccctaattttaactttttgtctaactgggaaaattagagtgtctattgctttttaaaaatttttctagcagttttctatcaaa

SEQ ID NO: 29802 - DNA, 201 bp, Bos taurus
gtgctgagatcctaacctatggtaacatttttcatttcaaagatggagtcaacaatactaatctggagaaaattaaagagatggggacagaaaaaatggcraacaggtgtaatgaaagtgaagtataaatgagagtaaactgggaggcaaagaaattaagtgacacaaagtgtaagaaatggaagattgaaaaataatgaa

SEQ ID NO: 29803 - DNA, 201 bp, Bos taurus
atgcatacaaatatgatgaaaataaaaaaactgcatggtattgatacacatcatttcagaacagtaatttccttgggggaataaggaagtggaaagaagtrcagttagatcttagcaacttatatttttaaaacaaaatttcaaacatttcaacttgcaaacaaatgttaagactgagaagtggacacacaaatgtttctt

SEQ ID NO: 29804 - DNA, 201 bp, Bos taurus
aagttttgccttctgctagtcagtcttttctctcaattaaaatctctatgaattttactctatataatggaagtatctctttcccttcctcccacctcttytaatgcagatgtcactcagaaggtagaccctagaaatagatatctcacttgactgctgatgggtttcctcctcattacatagaatgcagtggctactcca

SEQ ID NO: 29805 - DNA, 201 bp, Bos taurus
gtatagttaggagcataacaggcatgtgaaagctttaaatttgcattacaaagcactacagaaatgtagggaagtaatatccttgttaataactctcatgmacattctcctaagtgtagattttaaagagggcagagagctgctaattctgctttaaagaaaccacagcctcaggacatatacatgttaagaatgagcaaa

SEQ ID NO: 29806 - DNA, 201 bp, Bos taurus
aattgactacctcaagaagcctgagaatgagcttttctgtgtgtttaataggagaactttgggctctgagcatccctctttagctccagattgctgcatgkgtatgcaggatgaggaaagtatacttagatctatacagatgttaatccttcttccctcctctagttctggagcccttgtcagggggaaaagttcagcctg

SEQ ID NO: 29807 - DNA, 201 bp, Bos taurus
cgcaaatttagacaaactatttaaaacacattgctggtgttcattcagtagcttaaattcataccttatacctagtagtagcttgaacatagtgtgtgtcrcaccagatgtgtttgtgtgctttacagaatcagttcagttcagtcagttcagtcgctcagtcatgtccgactctttgcagtcccatgaatcgtagcacgc

SEQ ID NO: 29808 - DNA, 201 bp, Bos taurus
atatggttattagaaaaagtagatttctggatgagtgagagtgaaaactttcttagaagtgaaaatatttattaaaaaaataaagattatattttgaaaargtatggaacagatcaggggttctccatgtgtgtacaaagtcagtatgattttgataatagtactatgataatatctttcacccttacttctcatgaatgt

SEQ ID NO: 29809 - DNA, 201 bp, Bos taurus
agctaaaatgttaatgaattatggatgagatgagacagtgaattgggttggtgttacacaaaatgccatctggttttattttttaggaacacttagggggrggaaattgtttttctttggctactaccaagggtgagtcatttctttatttcataattattttctgggacaaacatcctctgagatggccctgactgtcca

SEQ ID NO: 29810 - DNA, 201 bp, Bos taurus
agagatcttttatatattatgtgctcatatgaatgataatacactaagaccctgataaataggcaaaaggagagattacaaaagaggaaatataactattwaaaacataaagcaaaatattcaaaatttttattaatcaaaggatataaactaaaatattgagataggattaatcacctgttatttaaaatttaataatga

SEQ ID NO: 29811 - DNA, 201 bp, Bos taurus
ttcaacacatatttttcaaggactataaagtgacaggaaggtttctaagcactgtaacactggtctctgaactactttggctatagagataggtaataaawataaaacaatatagcacacagtaagaattgattggccattgtatcaaaactgcaagaaatacacttttggcagagaaagagtacccatttagttcaagac

SEQ ID NO: 29812 - DNA, 201 bp, Bos taurus
tggcaagcatcaaatacttatactattaaaatagaggacaaaaaataaatcagctaaaaatgactaaatgatggagttttaggggtattactgtgaagagragcgagaacagtgaaagggaagagttgatggtgttggtgtcaggccatgttgataaacttacttggctctgcaaagggagctctatctatgggtatcaga

SEQ ID NO: 29813 - DNA, 201 bp, Bos taurus
agatataatccaaccaatttaggactaataagcaggtatataaataaatatacagtatgtccaagggcattaccttctgtgggaaaaggtcctctctgttytttcttatttctctttctcaacctattcctccccctgcctacaggtatacacagcctcttcattctaaaccaaacaaaaggaagcccccccccccccgaa

SEQ ID NO: 29814 - DNA, 201 bp, Bos taurus
tagacattgaaccatcagtattcatttgttggtgggggggagtagggtgggagtgggatgagggtaggggtagggtggcaggggccgtggtttgagctgcwttgcctgatccatacttctaacttggagaaattaccttgctaactgtaactagctgctttgcaagtatcttccccccaccatgagacttgtagaagtggg

SEQ ID NO: 29815 - DNA, 201 bp, Bos taurus
actacttggggtagtaaagcaattataattggccatgtctttaaaacactctccttcttcccaaggaaaacaccgccctctccttaccagggctctggaamctggttggcctaaaatattttaaaacatacagtttgatttgtaaagatcaacagttggtctgaggaaaacgccatacattttaatctttcaaagtttata

SEQ ID NO: 29816 - DNA, 201 bp, Bos taurus
gaataagaataatttgctaatttcctatctttgaaagcaaagtgtccactttgtataaatttgggggcaaactattcatgtgttacatgtgagtatacccyctaagaaattccagaagtcactttgtaccctattttatcctgagagtcatttcttttcaagaaaaaagcaaacaaacaattgaaacacattaaacgcctc

SEQ ID NO: 29817 - DNA, 201 bp, Bos taurus
atctttacatatgtaaaaccctcttttaatcactactcttataatcacactggagactaggctatctccagcacaacagaaggttctctttggcccctccrggtcaatattccccttcaaggataatcactattctaatctttatccccatgcatccatcatgtttgtctttgaacttttaaaaatatggaaccatgaaga

SEQ ID NO: 29818 - DNA, 201 bp, Bos taurus
tctataggcttctacagactacctaagggatccatggcatgaaaatggttatgtgattagagactaattagaagatagcaaagcagaaaggtacataaatmtagtccaggacaatcagtcacttccgtggaactggatcaagttattagggctatttacactagaaacacttgaattgcataaaagctcttaagaacactt

SEQ ID NO: 29819 - DNA, 201 bp, Bos taurus
cctgccaagttttccagcacagtcctccatgcatcagcatgcctaccttgcacaactcatttgttcgcttccatgcactgttaggaagcaaattgcttcaytggaaaaggccatagaaaactctgctgtcttgctgattctttattgagaaagcccttgttcctccctgctaggaataattcatttagtgcatccttccat

SEQ ID NO: 29820 - DNA, 201 bp, Bos taurus
gctttccggaggtttccccacatctcaagtctgaagccacaggaactgaggacattcctctcgctgttcccttcagctgccccagggtccgaggaaccccmtcctggccctagggcttgacaaatcaagccctaattacatctgctggtgagctcatccctgcctgacccccatcagtcagatcttaggattttttttttt

SEQ ID NO: 29821 - DNA, 201 bp, Bos taurus
tttagactctccactattctccaagttctcaaactgcctaatagtttttgttatgatttacggttgcaccatcccttaatttgtttctacacatacctaartaattcaccagtgtattagtacaattaatctatccaattattaaactagacttacctctattttctggacttgcacataaaacctgagacaacattaaac

SEQ ID NO: 29822 - DNA, 201 bp, Bos taurus
agggagaggtggggattgggagggaaaggtcatcatctaagtattacttatagttggcctcctctgttatttgcctgttgtcattaacaacaacaaaaackctataattcaagtgatagagtcatatgatggtacgaggcatctgaattcccacatgacgacgccctgttttccagccctgtttctctctttttctggctg

SEQ ID NO: 29823 - DNA, 201 bp, Bos taurus
taagctcaagactttctgagatagagaccagatatggtcttagtgtgatggagatcagtgaatatatgtggctaaagcaagtaatgtgggcaaggtattcygagactcaaatctctagaatattgcacacacacacacacacacacagagggctgaaaaattacagagccaaacattcataaaatctctcttagaaatata

SEQ ID NO: 29824 - DNA, 201 bp, Bos taurus
tgacaattcatctctggggtcctgttgcagagaaccggaagtattgatgcagagtctgtatgctcactactttctaactgtggccaatggcatcattattyctaatgtcctctgggggaacccttgaaagtgaaagttgctcagtcgtgtccgactctttgtgaccccatgaactattcagttcatggaattctccaggcc

SEQ ID NO: 29825 - DNA, 201 bp, Bos taurus
tggctacatctgtttctggggaaaaaagtgagaaacagatgtggaagcaatggtgaaactgagacaggaagcttgtcaaatgtgaaaactgagcaagagayctgaacccagaaatcagagcaacaaaagggagataaatccagaggagctgttgataaagccatgcagtcatctgagagctgcattcagtccaaagagata

SEQ ID NO: 29826 - DNA, 201 bp, Bos taurus
ttgtttcagaatctacgcttcaggcacagaaatttgccttaggtctagtgtttatgatggtggagaccatgtttgtttcaagttgaatcagaatggggccrgtagagatggccaagtgggagtcagccttctggggaacggcaagtcacccgtgtagagcgagtgtgaatcctgtaacagaaggaagggagggaggcccct

SEQ ID NO: 29827 - DNA, 201 bp, Bos taurus
agaaattgactgggtcacataaacgaaaaggctgaggatgtttgcttcaggaatagcttgatctagaggctcacatagggttgctgggcttgttctctctstctgtctctcgctatggggcggcaaatggttagatagcatgactgactcaatgaacaagaatttgaacaaactctgggagatagggaaggacagggaagc

SEQ ID NO: 29828 - DNA, 201 bp, Bos taurus
ggagccgtgggcggtgctggcatttcttcctaatgcagcttctagaggggagtttccaggcagggtgaagccagcactcacctgaacagggtgactccagrggcctggcttcaatttgtgtccttcctgtgcttgtcccagcaccgaccgtcaggctttgtaaatgcctgctttcttctgcctctcagagtttggggaaag

SEQ ID NO: 29829 - DNA, 201 bp, Bos taurus
ttggataagctccaaagaagagccatcaacaatgttcctcaagagatagcttcaatttacatcccactgaatttgggccaggggagtgaaatgctatctayggaaaaacaagggacattctctactctgaactgatctgccgtttgcagggccctggcctctgaatgaggccattcatttgcagaagacaccacacgctga

SEQ ID NO: 29830 - DNA, 201 bp, Bos taurus
atgagagggagagaggtaaacagtgagtttctaggtgtgagcaggaaaggtgtgctaggtgacggactgtgagagagagcacgtgagtgtaaagaagatayggaaatactgacctccggctggtgggaatataggaacattttaatggtcaatatttttctgaattgttataaactatctatgattgtgagtatcacttct

SEQ ID NO: 29831 - DNA, 201 bp, Bos taurus
cgcaagcacacaagtggcgggaagtgaagaggggcgtgtgtgtgtgtgtgtagctgcttctcttccctttatttcctcaagtgcctgcagctgtgacctcyggcctgaaagccgattggcaaaggagccctggaggccctggtctccagtgttacacatttgtgtgtccacagttacatgcacccttgggaacccatctct

SEQ ID NO: 29832 - DNA, 201 bp, Bos taurus
cacaatacctaggacagggcctagaatacagaagttgttcaaaacgatctcttgcatgagtactgaagatgaatagtgaggctagcagcatatcagctagktgatcaacaataaaggcctgaactagggtaaaagcagtgagaatgaagaggacagacaggagagtaatataggtgctgtaacccataaaatttgctgagt

SEQ ID NO: 29833 - DNA, 201 bp, Bos taurus
gtaaataaaaggaaatattaagcatactggccatgtggaagattaagtgatttacctactaaattaatgtaatcactttcaaaatgagtagttactgataytttatatggcctgtgtgctaaaatacctgaaattaccccacaaagttctgagtgacagttcagtacgcaatgtgtagaagaaacagaaggattaaagcta

SEQ ID NO: 29834 - DNA, 201 bp, Bos taurus
cctgcgcggtgcatgccgggagtcttggtgaattcgttggcagctgcaggtgaagcagagcagagaacgctgcgagaggaacctgtgaagcgattcccacygtctccggaatctcgctctgccctggtaagagataacttttccatgagaggtaacatggagtggactagcctcaaaacgaaagccttgggcgcctgtggc

SEQ ID NO: 29835 - DNA, 201 bp, Bos taurus
gttctccttttgcttcagtcttttgcttccactgtctcccagagtttgctcacattcgtgtctgttgagtcggtgatgctatctggccatctcatgttctrctgtccctttctccttttgcttcagtcagcatcagtgtcttttccattgagtcagctctttgcatcaggtggccagagttttgaagcttcagcttcagta

SEQ ID NO: 29836 - DNA, 201 bp, Bos taurus
aactaacctaaaggatcttcctctggagatcactgacaaccttttggtcaagaatcagagaaataaaagagccacttttttctgacaatgatgaaactgaytggcaaaaataacccaatttcctacttcattaatgtatactttcatactaactctgaaagtagaaaaattgaggaaaaatagcaaatgtgttttggtggt

SEQ ID NO: 29837 - DNA, 201 bp, Bos taurus
acaataaatagtgatatttgttgttttggatttaaagaactttaagattcatgtcaaagcaatgttgctggagagcatgccatggggacaagactaaagcrgttggctgtgtgagtgtctgcacaaagcaataagggaacacatgtgcatgccataggattctggagtgggttgcaacgacctcctccaggggttcttccc

SEQ ID NO: 29838 - DNA, 201 bp, Bos taurus
ttcaccaagtttaccagggggaagggggttttatatataaatacattgtatttataaatacattgtaaatacatcgtattcagtgtttggccaaatatttyctctagcttatgtgaaaacaaaattcatctctattaagtgcaagttttgtctgtgctgtgatttctgtcatcttcctccctattctctaacacaaggcct

SEQ ID NO: 29839 - DNA, 201 bp, Bos taurus
atagagcacaaagagatcaacaaaggttcagatcccaaatctcaatacatggatacacccaatcttttgctcaaaacatctgaaaccagagataaactgcrtctaaataaactgcagcaaaactcagcttcacttcaactacagactaaaggtggtcagcactcaacacaggcctgactgagaaaaggacatgctttatag

SEQ ID NO: 29840 - DNA, 201 bp, Bos taurus
caagggtgcttggcatatgtagaaaagtacttttagtatttggcatacaaatactgtcttcagtgcagtagccattgaaacacatatatctcatctgttarttcactttaggcctcttaataacaatggggaaattattcatatcacaaacattaatttctagctatactaattgagagtatttgtgtcaaattggtaaga

SEQ ID NO: 29841 - DNA, 201 bp, Bos taurus
aggtcatttcttcacagctgaaacacagtgtagctagaaacactgattggttctgttctgatctggtcttctcagctctcctgtctttctctgggctgatytgggtaatttcaaaactatatttttccactgatttccacgaaaaattctaacacagacagtaactaattagtttgacctaattttatgattgacccattc

SEQ ID NO: 29842 - DNA, 201 bp, Bos taurus
atggtggctgccagaggccggggaaggggtgagtgaggagttgttgatcagtgagtataaagtttcagttattcaggatgaataagttctagagatctaayggcaacattgggcccagagatgacaacactattgtactgaactatctgctgtggtttcatatattaactgttctcataaaattaaaaaaaatatattaat

SEQ ID NO: 29843 - DNA, 201 bp, Bos taurus
tttttacacattgggtcttccattccaatctatactcattatatggggcttcatttttacaatttttctttaaaaatttgatctaaataatgttttgtatmtttagtatacaggaataaaacacaacttttggtaggttgcaatggttttgattctaatatagttgttattattttaaagaattttatttaatttgcttgt

SEQ ID NO: 29844 - DNA, 201 bp, Bos taurus
accactgcagtacagatactgtcctagtgtatcacaggagaaggcaagggaaagatgggcaggatatagaaatgcatattgtacacattatagtctaggtrtacagatgaactaaacatatttggaaatcttactaaatgccaacattacatattaactcaacagtacaagaatggctgcagagcaattcaaaataaaatt

SEQ ID NO: 29845 - DNA, 201 bp, Bos taurus
ctaatttatgatcacgagggagctgtgtcaaccacaaattggcacttgccatctacaaggattaaatcatgtgctgctacagttgctgctgattttaaacmacctccttgaaaggagtataaggtggagagcagaaatgagacactctgtcgttggggtgggagaactggcacaacaggtcttcaggtagatattttcagg

SEQ ID NO: 29846 - DNA, 201 bp, Bos taurus
cttctccactgcacaatttctcaggccatcagatacttttacttcattactccatgtcagttcttttcccttttaaatcaagttttatgttgctgccagayatatgcctataattatcctgggtctttataatgagaggccaaggaataaaaatcttcagttagttgtccaagtctaaataattcaacctaaacttcaact

SEQ ID NO: 29847 - DNA, 201 bp, Bos taurus
acacacttgcttacttaggtgttcccagcgcattgcacccttgcaatgtatgcactgtttggacatgatacgttcctgctttcagttaattaatacatcayaaggaaatttctaaatgacaaagcccctggatctcacaaacaagcctaggatattatccccaaatcctgttttcactggattttttttttctcataatgt

SEQ ID NO: 29848 - DNA, 201 bp, Bos taurus
tctgggccatccctacatttgcttcattgttttaaaaacttattattttttattttggttaaggtaaagaatccctctcaaaagagatcaaatgacagggrgcagacagccacttaaagttacagaaagatattatggatactgaagaaaggggaacccagaccttgttatagacccagattcttgaactctttaatcaat

SEQ ID NO: 29849 - DNA, 201 bp, Bos taurus
tccatactgtcgccaaagtcaactggcaaaaacacagacctgatccctgctatataaaaattcttccattggctgggaaaggccctaaggggaaagacacrttcttaaacataacgtaattattttttattattagactagtggtgtctacttttaaatctaattctcacaatcctgctagtccattatttgccctttaac

SEQ ID NO: 29850 - DNA, 201 bp, Bos taurus
tgaggatgcaattcatactttggaggaatcatgatttccaaatccatttttcaactaatgagcccttgatggctaatgatccccagatgtactcattgccraggtgaagccacactcaaatatggacatgtattcccacaaatataaaaacagcggtgctttacaatttttttttttttgccttgaaatgaagagtctttc

SEQ ID NO: 29851 - DNA, 201 bp, Bos taurus
tataaaactcatctgcatgttgttgcaccaaaaggttgtccatatgtattttcactgtgtaagaataacagaaatatttccttgaaaacttggggataatyactaagcaaacaacaattagtattaatcagttatgtaatttattcttcctttgaggttccaaggttttctgtcttgatatttagaaaaaatgcaaatgca

SEQ ID NO: 29852 - DNA, 201 bp, Bos taurus
aaactttcctggtggaagaaaagagaaattataaatgtatgagaagtgaagatcaatagttcttaaactatcatgtctagactggacagtgtaaagaaaayatgtcttgacatctctccctaaatgatgcagagtctcaaacacctttttaaagtgttaatctggacgcagagctgacgtgacggcgtcaggcgccgcggg

SEQ ID NO: 29853 - DNA, 201 bp, Bos taurus
tggaaaataaagagagatctataattttagtttacacagcttacagtaaagcttaaggttaaagcaacaaaacatagcaaaacccaacttgcatcaacagmggcaattgctttaaggtttcataaatgaagaagaagaaataatagagctaggttttaaagtgatcccagaacatgcctgaatctatttgttggtagacta

SEQ ID NO: 29854 - DNA, 201 bp, Bos taurus
cttgccacctggtcaagctctggcccctgcctttccccacctctggctccttggtgtttactgtccagccccaagtctggttgctcagagaggggccagcrgtgctttgcagtctcctgccccactgtgccagttactcgggacactgatcactaccctgtgaccgcctcctccatgatctctgcgaatctgcttcctgtg

SEQ ID NO: 29855 - DNA, 201 bp, Bos taurus
ttgtggggttagcaatgtttgcatccctatgatgggaaatacacagggccatggtcagggatgggaggaaaagtaattatttttacacacaaaaggcaacrttggaaattgagaatataacacatcaacaaacctcaaatcatgctctaatatgagcagcaaagagctgaggtgaagaaggtgaccaaaatgaaattataa

SEQ ID NO: 29856 - DNA, 201 bp, Bos taurus
cccattctcttggcactctctgtaggggtcactctgtccttaaaaaacggttggttgttagggtggcagcctcccatgcctttttcaggacatcagagatsaggaaatgtcaggccagagtcagtctctcacaaaatagttttactgggatgagattctctatgagaagcatcgttttgacataagcttccagttatttgc

SEQ ID NO: 29857 - DNA, 201 bp, Bos taurus
ttaaagcagcacttgcttcctaacagctgggctctaggtcatttaacactgtttctatcactgtaaagtgacaaattcccattcccagggccagataggamacaattccagcctctagaagactgaggatgaacaatgacactaggactcaagcttgcagcattttgactcatcaaattcttcccttatgaactcttggta

SEQ ID NO: 29858 - DNA, 201 bp, Bos taurus
tacttcaactgcggagattttgcagaatcacaattagggtgaagatacctttaggttcctaagaaggaaactagtgggtttggaccccagtctatagatgygttagaggtgtgaggctatgtggagggaatacccttgtccggagctaggtctccagtatgtggtggatgggggttgggggagaagtatgtgcaggcaggg

SEQ ID NO: 29859 - DNA, 201 bp, Bos taurus
ttatttaaggagaaaaaaattcaaaaactgcctgttatatatctcttctacttcttcaatgcctaactcaaatttgatatgcttctctgagacttttcctrgactattaacaaaattgattgctctttcatcatgtcatttcatgtcactctaataattctgttatatgtttatgagagatagaaaataatttttgaaatt

SEQ ID NO: 29860 - DNA, 201 bp, Bos taurus
taattggaattttagattatttccaacatctgccaatgtaaatgttaccatacaaagagcatatttatttatataattgatctcccactccttatgaattwtatatatatgttttaagaatcagttctcaagaatgagatgactgggtttaaaatatgtagcttttttggagcttacaatttggcttatcgatttactttc

SEQ ID NO: 29861 - DNA, 201 bp, Bos taurus
tactagttaggataaaacaatcaaaatgatatgatagcacctttgaatagaaaatttttgtgtctttgctgactatgacaagctcagcatgtgtcaacacrctgatcatacctctgaaaatattagcatgacatggtaatacattatgtttatcaaagactcatgtccagataaataaaattatccattgtgtttttcaaa

SEQ ID NO: 29862 - DNA, 201 bp, Bos taurus
tcttcctataagtattaatagttgatgagaagtaaaaagtgtctcaaatagttagcagtttgattatcactctttcgaatgcaatccttttaccttaactrtgtaatcccctaaaatatattcacaatggtttgattgctataaatataagctatttcaaatatcatagcttaacttttaaatatttaaactgtgaattat

SEQ ID NO: 29863 - DNA, 201 bp, Bos taurus
tttattgtggatggagttggtttctttccaggaatcaattcccatttttaaaaggaggcctagagtgtctgggcttcagccagatgttcctgagaagaggrtgattaaaatggtttctaatcccatggtgaatatttttctcataattctcgcattccaccttgaaggattgagacaaaccacccttctggattatagatt

SEQ ID NO: 29864 - DNA, 201 bp, Bos taurus
aaacatcccagttaatgtacatagaagtaagaaagcatatgggagtaatttaaagcacatttggagagtttcatgaagtccaggatatctagagagaagaygaaataaatgtgcagagataagagcagggtgtttccccttctctctgagttgagttggtattttattctcaaggataatccattcactaattctaagcac

SEQ ID NO: 29865 - DNA, 201 bp, Bos taurus
ttatgaacataaccatttaggaatactttctagagtttacactttcctctattaaaaaaaaagaccagagataaaattccagccaagatgagtgaagaaargaagggaactcttgaacaccagtggtgtaaatgtaaagtggtacagacattacagaaaacaatatggaggtccctcaataatataaagatatagagctat

SEQ ID NO: 29866 - DNA, 201 bp, Bos taurus
cttgtggaactaaaagggaaaatatttgtgttgttttgagcctctatgttcatggcaattttttatagcagcaatagaaaactaattaaatataattattwtataactatctcctatgcttctcctgggtttcccagatatacctagtggtaaagaacctgcctaccagtgcaggagatgtaagagatgagagttggatcc

SEQ ID NO: 29867 - DNA, 201 bp, Bos taurus
tgtaacttttctctctacccctaactacatcattcccaaactagtccacctacttcctttttgctgcctgttatcttactaaggacaaagctggtatcacytttcatttcaaataccagctgagtcataaagacaaaaaaaaatgctctagattagaaaatgatataacttttatctccagatttgttgttgttttgacat

SEQ ID NO: 29868 - DNA, 201 bp, Bos taurus
ttcaagggacatttgtgacgaaaagatagttgagctcatgacagtagatgaacttgtcaaaaagtgatactgagcttaccagttcctatgatgaaaactgyattcagggatgtgaatgagaaaaagctaaaataaactaccagacacttcttattcagaatttttatccactttaggaatttttacattttattttaaaag

SEQ ID NO: 29869 - DNA, 201 bp, Bos taurus
gaatagattttaacataaatttgcctttctcttggttaaatttctaggagtggaattccttggtcatttaagcaaatgaaccaatttctaagaaactgcckatctgttttccaaagtaactatcattttgcattcctcttagaaacatgtgagtgttccgattgctttgcttccttaccagaacttgatatggtccctcgt

SEQ ID NO: 29870 - DNA, 201 bp, Bos taurus
gtaatgatgatgccagcaaggatgtgtctgacattctgtgcccagaccctggttctcactcagccaattacaagcctctcccatctggagtacagactccytgttccacgtcttctcacagcgtggtgtctgagactgaggttgggctcctcaggcttcagattctgctaggaaagcccagactagccaagccacatgatg

SEQ ID NO: 29871 - DNA, 201 bp, Bos taurus
tcggtttagagtcaaatagaaatgcagttcagtctctacttttccaattatcatatatagatgcttcatttctttcatgttttacttatttttggccatgkcaggtctttgctgtggtgcgtgggacttttcttctctctagttgtagcacataggctctatattatagcatgtaggcttggttgccccagggcctgtgga

SEQ ID NO: 29872 - DNA, 201 bp, Bos taurus
tgaattgctgaatctactgttagttctagctccagaggagctttgaatcacattggtacaaaattagagaaatacaaaattgaaatataaaatgtgagccrtgatccatcaagaatactcagagggagagtttcataacctagctagcaatccatttcctcattattaaatgaaggctttaacctagatctagtctaagat

SEQ ID NO: 29873 - DNA, 201 bp, Bos taurus
tatatttcagatcaacaattttttctctttcacaggatttttttaatcacattttccatgtctttttcaataatttgacccttatgtttgtcttttgactrtgagattaacattgttctcgccttatcctttaattgtattagcgatcactgcttttaatgcatggtttatttagcctttatttggcttgcactgaagttg

SEQ ID NO: 29874 - DNA, 201 bp, Bos taurus
atttaaaacttctcttagaactagtccattacttggaaaatacttggtgaaaatactgcagtaaaactatagattttgttttctctttatgtgttttagayatacttaagaaggctaaccaaataggaaaacaggatgactccaatgtagaatttacacattgacaaaatggaaacctctctctatcatgtcccatattaa

SEQ ID NO: 29875 - DNA, 201 bp, Bos taurus
tgataagcaccattgaaatctagagagcaattctttctctttatctgtaaaacttcagtgactttagtataaaccacaaatgccttattttcaaaactcaktgatgtttgcctggcagtgaggttttgtgctttgaacagtctgttgtgttcagggttgatgtttagaaaatccttaataggagaagtttgcctcttttgt

SEQ ID NO: 29876 - DNA, 201 bp, Bos taurus
agctaaagacctgggacatggttatgttgacaaaatgaatcatcagttacttttgtgctagaaaaagatccagacattcagacaattgttttaaaaggctrtcttaccttgcagtgtgcaaagaatgaattaaagcaggttgggagaccaatagcaggctactgtagaagtttatgtaaaaatatatatataaattgagag

SEQ ID NO: 29877 - DNA, 201 bp, Bos taurus
tctagggcaatagcagggtggaaaaagtgggcagtttaattgctatctttttaaggtatgatcaaagaacagggtagaaaacaggagtttgggaaagtaawtcaatgtgtgaatattagaaaagaagttaagagaaatgaattggtagaaaacagcttatactgaaaaattctggaaggctcagaaagacaagagaaagaa

SEQ ID NO: 29878 - DNA, 201 bp, Bos taurus
caaggaattgctgttaagagtgacaatagccatgcctcagtgtgcatagaggttggctcggaaacaatgtataacacatgtgaggaatgaaagattgaaargctttcagctgtcccgacatgtggatgagccagttggctgttcccactcactgtccctttgtcatagtaagatcgccttcctctggagggtgtgtagaac

SEQ ID NO: 29879 - DNA, 201 bp, Bos taurus
ttagtgtgggttattttggaacttaaactgtccatctcttctccaagtaaaaataatatttttcaaagttgcgtttctaaaacgatactactagttcactkagagtatgaacttaaatcactgtattgatgcaaattttctgaaattcaagtttgcagattttattctgtatgagaaatgcacagatgggttaatatttca

SEQ ID NO: 29880 - DNA, 201 bp, Bos taurus
tgccagaggaaaaaaagtagaattctaggtatgatgcctttttcagattttatagagtatatttcatgataagttaggttatgataggctcatttcacagrgggaaaattcagattcagaaaagtaaattaacttaacaaactgtcaaagtttgtcttaggaaattgctatacatagttgaatctgtaaagtgagttttgt

SEQ ID NO: 29881 - DNA, 201 bp, Bos taurus
atggtggctacatatacaggattggacataggtattattgtccatatataccaattggacattggtttataggtatttacataaacaaaacaaatgagggragaaatctctaaaagtaataacttgtgacatctgcttaccaacttctaataacctttctctactgatacttttacttggaggcaggttagcaaaatttat

SEQ ID NO: 29882 - DNA, 201 bp, Bos taurus
aacaaaaacaggaagattaacagatgaatggacgatcagtattcttcagtccttccacagtgagtttcaaattatcttatatgccatcctttaaggatttkatttacagatcagttgacaggattcgcagatttctcagaatagctactggcttctagaggactacctatgcaaatatgaatgcacttaaataagtgtatc

SEQ ID NO: 29883 - DNA, 201 bp, Bos taurus
gagaaatagtggaacaggaaggtggagagacgttcaaaagctctgtcatctcctgtccattcttcctaacaaaaataacaacatccaagacccatgaagakaactgataccagctcaccatcccatatcagaagtacctactttgtcttttttcatagacatatatacagattgcatgtagaactttgtgactattcctat

SEQ ID NO: 29884 - DNA, 201 bp, Bos taurus
gggtgattgagcactgtacacaatgcagtgcaatgaaaacctccttagtcttataaatttgtattaattatttcaaaagttttaccaatgcattttcttayctatttcaatgaaattcaagtggatatctatatagcactagctgtatttctttttatctatctataagctgccggaatccagctctagcagccagggaat

SEQ ID NO: 29885 - DNA, 201 bp, Bos taurus
ctgtcaccaactttttctgtgtttcagcactttgtctataagagagcataattcgtctttgttatgtacttaaaactgagataaaatgacaggtttataaytctggtgaatacttgctaagcaatgtaatttatatatttttcttcctgctttatgatttcacctttgatgtcatatggcacaaagctacactaaaatttc

SEQ ID NO: 29886 - DNA, 201 bp, Bos taurus
aaaccccttagagatacatgcaaatgctgttatgatctggtatctacaggtaggtagaaattaatattgagatttcattaaaactgaaaattggccagatwcaggaataccagatcttaccatgatctactatcactactcccttactatgatctaatatcactacaagttctctaaagagaattatgtacaaaagagggc

SEQ ID NO: 29887 - DNA, 201 bp, Bos taurus
tagaaaaattcagtttctccattagatgaataccagcagaagcagccaaatatggtctcattttcacattccaaactcaagttagtatatcttgtactaaytcaacttggatttaggtacttaaataaaaattagagccatggctatattagtgtctgaggagtgtaatttttagttttcaattgtttataatagaagaaa

SEQ ID NO: 29888 - DNA, 201 bp, Bos taurus
gcttagtgttataataattgaatttatgccaagatatccacacattttttccatttccctctatttaacttttctaattgacctagacagtaagcatcagrgacttgaagtctggtctctttgttattaaatttttcattaaatcccttatgttaatacatggtttagatagtcccatccaaattcttatccagataatct

SEQ ID NO: 29889 - DNA, 201 bp, Bos taurus
tttagcccaaaatgccaggtcaagtatttttgtgtattgtttattctatttccatagcctcactgaattaataataataacaaatatatgaggtacaatgyataatttacctaaataaatatctgtagtcagtaaaggacaaactaatccattctggattataattctaaatcagactatagatgtagaaaacaatatata

SEQ ID NO: 29890 - DNA, 201 bp, Bos taurus
attatagtttgtccatattatgaattcatcaaaagctatttattttgaaggcaatgttgtgtatgtttgaggaggagagctataaaaataaattagcaagrgcctatcttcaagaagtatatgtgaaagtagtagtatgttcacatataattatcatgttacatagaaaaggattgaccagatatagtcttattgagttag

SEQ ID NO: 29891 - DNA, 201 bp, Bos taurus
tatgttcacaccactaagggaatatataatcctataactgattacactgttactcaaaatgaagggaaacagatttttttcagacatgaaatcagtaacartatatatacatatgctcactgaaaaaaaaacaaaagtacataaaaattatgccctcaaacctgacaataatccacactaagaactaaaatttgtgtttta

SEQ ID NO: 29892 - DNA, 201 bp, Bos taurus
catgcttgcctattctacacaaaaacttttcatttaaaaaaattgactcccaagtttattttgcaaatttctaccaatttcatgcttatatgaatatttayctcaaaaatgatcaaatattgaatgctgatatcagaacacaaatgcccaggtctcgatgcaactcatacttttgttagtataatggcaagatatgcattc

SEQ ID NO: 29893 - DNA, 201 bp, Bos taurus
gactggcacagtcttgattatctttagttttctttatctaaaacagaagtttgctttgcaaaaacattggtcctgtcgaataattttatgtattaatgaartgataatgaagtattatgaagttatattacccagggcttaatcatgttcatattctttgccagcctcttagtttctctatcttcaccatttaataaggtt

SEQ ID NO: 29894 - DNA, 201 bp, Bos taurus
cattttgagaacttatgagcaaatatagcattaatttagaaaccaagaactaagttagaagcaaactgcaaatgtttcagtttatgctttagaaggtaccrgttggaacaaacatttaaaacctgaaacattatttcagatgctggagtgtattaaatagcaaaacataaaaaatcaaaaccaaaaatagtgtgttgaaaa

SEQ ID NO: 29895 - DNA, 201 bp, Bos taurus
tgttatgatttgtcagcttcctctcctggaatataattacatatgatttctaaagaacacatttttaggctaaagtttacaaggccatgtttacttctatyaaaaatatcctcactcaccttaaatctgtattctctacctctcttgactgtaacccctctgccactactacctgtattatttctctttttctcaggcagc

SEQ ID NO: 29896 - DNA, 201 bp, Bos taurus
agttgcaggtttagtgggattatgtgactcacccttaagacagcccatcactgtatgttttgtttgggcatgaaaaataagaaccatgcaaacctttgcaygcagacagataaagggttcccatcaatgagcattaagtctgagtaatggggttttaaagagacaacttgtagtgttactctttaggaacctcaacatcga

SEQ ID NO: 29897 - DNA, 201 bp, Bos taurus
taagaacacttagggcaggaatccagctgacctaaagtgagacacaaggggtataactcacccagaaatggaaaatcacaatctcaaaacctaaatctgaycccatctcttaattatttaaatttagacatcatcaatatttaataaatcagaaaagtatgtgtgcttcaatatgatgagaccctacctaggctaacaaag

SEQ ID NO: 29898 - DNA, 201 bp, Bos taurus
gggcaggcctgggagccgaaacaagtgcacacaagccagcaacacaaaggatgagcttaggcggctgacgatgagcttagcggggctgagggaagcaaacrtaagtcgaggccacagcagaaggatccacacaggcacctacctagcaagtttcagccagtagcgcagagcaggatggggaacagaagcacaggcaacgat

SEQ ID NO: 29899 - DNA, 201 bp, Bos taurus
tatcaatacaatgaccagcaaagaatatgggctggtggagtggtggaaactcaggcaaggcagaggaatcagagtccactctgtgtcctcttgtctcattytgaatggcccaaatatttgtttaccagagatttgctttccatctccacgtgaactgccttcctcccatttgaactgccaaacccctacctctcttcctca

SEQ ID NO: 29900 - DNA, 201 bp, Bos taurus
gtgccatattccagagagaatccatcaatactacgatggtctcacggccatggcagaggaaagatcataatctggggcccagtataccatgtggggtccgmagcagcctttgtgattatattaaagagtttcagttggaccttcagtgttccttaagagtgatccatccagatgttgtcagagcacagccctgataaacca

SEQ ID NO: 29901 - DNA, 201 bp, Bos taurus
tcagtcaccatctaaggagtctgaattttattctcagcgcaatgaaattctctgacaagtttgagcatggcctgattgcctaaaggtcattctttaggcamacacagagagccatggaaggggcaagattggacacaaggttcctaagatgtccaggagagagatctcattgttgatggaagagacagtggaagtggagac

SEQ ID NO: 29902 - DNA, 201 bp, Bos taurus
aatttcaaacattttcaggaaaaaaaaagtaaaacctttgttcagtgtttccgttttctaagtggtttctaagtgcttttaaaatggagggccataactcrggcttttttttaatcgtacacagctaattaccagacgtacccgtcctgcaaccatttaatgcctacataaaacatggggccataatgaagataattgaaa

SEQ ID NO: 29903 - DNA, 201 bp, Bos taurus
cctaagatcccatataaggccattgcgctcgctacagtgctgtttttgattggcgcctttctcattatcataggctccctcctgctggcaggctatatcarcaaaggtgggggcagaccgggccgttcctgtcctgatcattggcatcctagtgttcctgccaggattttaccacctgcgcatcacatactatgcatccaa

SEQ ID NO: 29904 - DNA, 201 bp, Bos taurus
gtcaaatggcactttctgggtgacagaacccataagtggagctcctctcagatatggtaaaagcaccatgcccaaataagctttctttaaaaagaccttcyaactgaatttaaatttaaaggtgatggccttcttaaatcagcctaattgacatcatttggagctaaaattgaaaagttaccaataatcccaattctttca

SEQ ID NO: 29905 - DNA, 201 bp, Bos taurus
tctttccattttaaaaccattatatcacttccatagtacttaacaaaatgaatcttgtgtttttgatactgaaatttttatcttctcctttgataatggamgttttcctaagggcaaagagtatttttcctcaagtatgtacccttcagagagggattgaatggctcttgtacctactaggtacttgataaatgtatgtgg

SEQ ID NO: 29906 - DNA, 201 bp, Bos taurus
gttagatacaaatttgtgttatgggttgtgtcatactaacatgggttttaatgtttggagatttcacattagtattcagtttaggacttccctgatggctyagatggtaaagaatctgcccgcaatgccagagacccaggttcgatccctgggtggggaagatcccttggagaagggaatagctacccactccagtattct

SEQ ID NO: 29907 - DNA, 201 bp, Bos taurus
ttatgatacattctgggccttgttttgtgtgaatgcatttcttttcatcatcaccttttcattataggagaaagaagtgcttgtgatgagacattgaattwcacctttaattcaggccagtgaaggggaatacattaagaatctacttcaaaacaattcttcccacttactgaacttattcacaaaagtttgacacaaata

SEQ ID NO: 29908 - DNA, 201 bp, Bos taurus
cagacatgtacaaggggctgcctgggtatgatgaggattataacaataaataagaacaacactttttttccacgtctcaggagaagaacacttaatggatracagagaaagatacataataaatataatgctttgaactggcaggtactaaaagtgaagaataaaaattaccatcagaccagggctttggcaccaactgat

SEQ ID NO: 29909 - DNA, 201 bp, Bos taurus
tgtgttaaaatggtactgatctaaatcaaaattgtaaaatgggaaagccctgattaatgatttgcctcgtatacctgtgatattatatgaaagccaaatayaaaaatgttatttcaaatgaggacaataaagataatactctcccacttaaactatttagcaattctaatgttggtgattatttgtgagtttaagggtcct

SEQ ID NO: 29910 - DNA, 201 bp, Bos taurus
tcaaacataaattctctctattcgtaccttctataaaatccctaacttctttagtttttgtttgtttaagggtaattaaaaaccaaaaagtagagcaggamctagataagctccactgctatcaatagtcaagcctcccccatcaatgtttacaccaactgtatttaaccatcattcttttctctgtttacccatatcttt

SEQ ID NO: 29911 - DNA, 201 bp, Bos taurus
ttctcctagtattttttctcttcctgtgcagagcacagtgggtgaaagcatggtatttggaaatcccattcttcaaaaactatatttgaataaaatgtgtrcttattattacatgctgaatgacatatatgcaacttttgagtggaacagcatgagttgtggaaattgaattaaacaataaacgtgtaattgcttgttagg

SEQ ID NO: 29912 - DNA, 201 bp, Bos taurus
ggacatcctaggccaggtatggcactgagatgtgcacatgtgtgagaaataaaagtattgagtataaagatatgcaaaattggtaacccaccacagtgctytcttggccagaattcatcccaagggttgtgaaacagtctttacactaagaaccctggtggccaggtgacagtcagcaaggatgaaccacaggaccaccac

SEQ ID NO: 29913 - DNA, 201 bp, Bos taurus
aacagcaaatcatataaaataatggcttagtaattaaaataaaaactagaatacttttcttgatagctggtacctgaataagtgttcaaagacaggaatakagttcaactcaggcccagattcatagaatctgcctaaacagaaattgtggtaaattctataagctaacatctatatgttcaaaaaagttacatggaaacc

SEQ ID NO: 29914 - DNA, 201 bp, Bos taurus
gtggccaacttaatggaaatggcctctaacttcattctgagaccatgaataatgcctacctacctgttgcacagtttagagtaatgagcccactttcttgrgaggccagagaaaatcagaagcaggagtagatcctctactgtgggctgccttcaatttgagttatggaatgaggtttacctgggaagagtagaggtataa

SEQ ID NO: 29915 - DNA, 201 bp, Bos taurus
accatgcgtgtcctctcaaagggactggaggatgagtcctctttttcatcccccctcaacttaaagccgttttcacctttcaagtatcttagatgttttayactaatgttcaggcctcatcagaaacacaatgccaactttaattttggggttgttgagcccagcaccaggagttaagacaagagggtggctttgaatcat

SEQ ID NO: 29916 - DNA, 201 bp, Bos taurus
ctctgaccacttgtcaacccaggatagctcttagaggggcaatttttgagcacctggtgtgtgctggcattaatgaggcccttcacctactatggtccatwgaagaggcaaatatattgacttggagtgtgggctggtagttggctgattgggttcaaatattgggccccatgcctcacaagctgtctgctcttggatatg

SEQ ID NO: 29917 - DNA, 201 bp, Bos taurus
actgagcattcactgagagagggcaggggaaaaagaagatcaagagacgtttctctaagttcaccctctattaggcctggccttagaagagtgcagacttycaaagaagctggaggctgcatgtactgacctcggaaaaatctctcaggccccactgttgtcagcagtgatttaaattcaagtgcccaactgataaaagtt

SEQ ID NO: 29918 - DNA, 201 bp, Bos taurus
caaagcttcaccttctaccctctaacccactaaaccagttctgccagtctccttctctttccctggattctacacctcaggcccccttgctttctcccctmctctgtatctcaggagaaacaatccctcctttctggggctaacagcctaataaccacactatgcctatcccggcctcctctgtactcccttcccatcttc

SEQ ID NO: 29919 - DNA, 201 bp, Bos taurus
tagataattctctaataaatatctgtattgtttatttgtacataacgagtggcttattttgttaacaaatcctttgaacaaactgtcatggcccctttggrtgtgtcatttagcttgctgattgaggatcaagtgaagtgaagtcactcagtcgtgtccgactctttgcaggcccgtggactgtagcctaccaggctcctc

SEQ ID NO: 29920 - DNA, 201 bp, Bos taurus
tgtgaggcaaggtggcctgaggaaaaaagaactctcctgtctttctgagttttttgtggaatgcccttagtttgtttcttagaattaggtttggctacaartaaatgtaaatccaaattaacaatgacttaaatacacaaaatttcactcttggatacagacagtccaaggctgtttaccactcttagcaggtatctcatc

SEQ ID NO: 29921 - DNA, 201 bp, Bos taurus
tacaggtatctactccaagggcatgctctagaataggccctgtccttctggaattgtgccgtgttaagcacctcaggtacatatcagcatttatccacagytctgggaaagtcccatggccccagtacatccctatacaaaaagggaaagggaaccatacctattttagagtgactacgtatttccttaaatatgttatct

SEQ ID NO: 29922 - DNA, 201 bp, Bos taurus
cagtgcaatctcaaaagtgtttgttaaaagagaggcaggagtttcagaggcagagagggcaacttgaagatggaagcagagaaagagagagtttaagatgytatgctgcaggccttgaaggtggaggaaggggccatgaaagcaggcagtttctagaagctggaaaaggcaaggaagcagattcttgcctaaaatctccag

SEQ ID NO: 29923 - DNA, 201 bp, Bos taurus
ccacaaaggttgaactcaggaatcggaattgacccaatcaatacttgacattccccaggcctcagtggtgtgttcataaataagcatgtggccagatttgrtcagatcagaatgaagcctgtgacgttcactccatggttgttgagtttctctatgtcttgctttcctttccctcccttctcccctctctgaagaagcacg

SEQ ID NO: 29924 - DNA, 201 bp, Bos taurus
acctggcctttgcaccccaccttgctcagacatcccaacttcccaggactggagctggcatctttcagcaaaactcatcttctggtagaccttcatgcggytgaatcttttgagggcctcaccagccataaggactcatttcccagagtagttttattcgttcttcggtgtatgccagttttcccctttgtgtccctcctg

SEQ ID NO: 29925 - DNA, 201 bp, Bos taurus
ctgttggagggtctgtgggccattcaagtacaaggtgagagagagttggaaatgaaggttcttcagaggcagaccagcaagggctggtgtgaacctgtgaygtgggccttgaccttccgatcagggcttcttatcctaggttaatggaaggacaccagaagtctctcgtaccacctgacctgtgtgtgaaagttgaggtgt

SEQ ID NO: 29926 - DNA, 201 bp, Bos taurus
tcaattcagtacataaatctattcacattagattttctgacacaactaacattcaaatgcagaaactggaggacacaatttcatattaaagtgtgttttcrcctcattttcttggtgagaggcaccagattcttttttttgttgttttttttttttttttgcactctgattctatttttgctccacatcttatgcatactg

SEQ ID NO: 29927 - DNA, 201 bp, Bos taurus
tagtgggagcatgaacttgaccttccttgttcctggggcacatgcctaaccaagtgctcatggaccactaagctgtggggtcagggtgttctttctgaggyagggaaatgtggtccaggtctaaaaagcccacagacagcctcttaagggctaccgtactagcacatcctgaaggagtttaaacatccattgtagcccccg

SEQ ID NO: 29928 - DNA, 201 bp, Bos taurus
ggccttgttccaagcacttcatatgtactagctcatttccacattagccgcttgaggttctagtatcatcctcattttgcaggggaggaaactaacacatycgactacggccagaaggcctcagcggaggggctggaacgccagtggatggctgcactgtagtctctctttccattaacaaacgttcagaacatcaggcct

SEQ ID NO: 29929 - DNA, 201 bp, Bos taurus
cctatctaatgaactcattaaagaacatgctttaaaaaaaaatttaaaagaaagatctctttaccccactccacgctcctcccaggcctactctccttttytaaaaatgcaaaaaggaaatgcacatggtaaaagatgtctccacatgtgagcgtttctactacctggctccatcctctccatcaaatacctgagctgatg

SEQ ID NO: 29930 - DNA, 201 bp, Bos taurus
tgaaaaccatgttaaattaatcccctggtgccctcagatgacaggtcagcacgcccagccaggggcaggcactcatcatgggcttccctggccaactcagmtgctgctaatggccttctgcctttagagaacaacatcctccctgcatggcagagccatgcgccaacagccaccttcctaatcctcacagcgtgcctggga

SEQ ID NO: 29931 - DNA, 201 bp, Bos taurus
cacaggctccctggcaaagccccaagccccagagaggcctgttttcaggttccaagcttttaaagcagagccctttcttgaatcataccagccatatcackgtagagtaaccagggcctcctcagacaaccaaatggcccatctctctctctctcttttttttttaaccccatacctggttcactccaagaagaatgtatt

SEQ ID NO: 29932 - DNA, 201 bp, Bos taurus
ttttgctcaaatcagagctaatgcctacaacacgcctgcaaaggaaccacaacctccctttccaggagaaggaaaagatgttcataatggtgtaaggacaktttatctgggaggcatgacatgtatggtatcaagggcccgatagcatacataaaaggaagcttttaggggccatgaaaatgctttcatgttttgtttgtt

SEQ ID NO: 29933 - DNA, 201 bp, Bos taurus
ggaggaggtgatgataaactaacacgtccctttcttagagcctatgaaagtcatctctaaactcccaactcaatcacaagtaaggccgacttctgcctctmctgtcggcattactcacctttgcttaaggagcacagcccactgaatcactaactctaaggagaggcccagcattaaccctttcctccccagtagctcaca

SEQ ID NO: 29934 - DNA, 201 bp, Bos taurus
gtgctgagccttgcatatgccaggtttttgacaagtgatttttgcacatataggattaaattatttcacaggggagaaaaaagaacaaggaatgggaacaytgaaggctccagaaaaggggagagcaaggtcacagtagctcttttttctcagatcctacaggaatctctgtaagttttctggcttagggaaatgactctg

SEQ ID NO: 29935 - DNA, 201 bp, Bos taurus
agcttcttatgcttgagtggtcttgcttttacttgtgaatggtggattttaatctgtaacaaggtattaaaagctattaagatgatacaaatgaatggcarctatgggctacagggaatggaatttttagtcaagagtggcagattctttaaggaataactttgcagtggagggacatttggggcaactctcataacctct

SEQ ID NO: 29936 - DNA, 201 bp, Bos taurus
gggctgggtgcaggggtgaatatggcagccagtggagaaaccataacttcaattaggggaatggagggcagtcccaatcctgtgaccctggggaagtaagmacggccagtgcaggtcattgccttggggcatatttcccttgggcttcccaggtggcactactactacaactaagtcatttcatttgtgtctaactctttg

SEQ ID NO: 29937 - DNA, 201 bp, Bos taurus
tttgggtggactccaggagttggtgatggacagggaggcctggcatgctgcggttcatgaggtcgcaaagagtcagactgagccactgaactgaactgagraatgatgtcagtgtggcaatgtggcctcttacatttctgacatagttattaaatatggtgatgttaggcaaggcatgtcatctctctgagatcaactgaa

SEQ ID NO: 29938 - DNA, 201 bp, Bos taurus
gccaacatctggacaactcattttgagccagtttctcagcatatgttctggaaattcaatttcagttgacaatgggaagtgaatttggctagtctaaaaayggcctcgttttggcccccaagccagcgggatttctggccagagtcttctgctgcaggcatgtccctaagttttggcagtccatgtcagtcactggcaggt

SEQ ID NO: 29939 - DNA, 201 bp, Bos taurus
caactgtgcctccaagggagtgactcacaatgctgtgcaccttgggctttttgtatctcactggagaaaccacaggccccgggggcctctcagtgtgctgytgtgcttccggggaaggggtgacgggatcagtatatagccattactcttacccttctaatgagggccttatcaatctctgtggtctagaggggagcttcc

SEQ ID NO: 29940 - DNA, 201 bp, Bos taurus
cattcatttatatatctcctctagctgctttggcctacaacagcaaaaggagtacttggtttagacacacacctacagccttcaaagactcaaatattaaytatctggccctttgcagaaaaaaatttctgacccttgacgtagagtaggagttctcaaactgtagcatgcatcagagccatcagtttgataaatttccca

SEQ ID NO: 29941 - DNA, 201 bp, Bos taurus
tgattgaagtcatatggttctcaattgaaataagagtgagcaaaaataatttttggcctctaatgactgttctttttcttttacaactctgggcaaccatkcacattgtacatacacatgactcttgctgtcaataatggccagccttgtaacttcgtattatgttatgagaatatgtctgtgttctaataaatgtctgtt

SEQ ID NO: 29942 - DNA, 201 bp, Bos taurus
ctgaggccacccagtactggagtctaaaggttctatggtagggctattgttgacctccaagaggatttatgctgacacacatctcccaggactgctgctcycagtgctcctctccttgtggtgggccactgccaacccatgcccctgcaggagatgctcaaacactcacaggtaagtctggctcaatctcctgtggggtca

SEQ ID NO: 29943 - DNA, 201 bp, Bos taurus
caatattagtagctgaaataagattcttggccactgtgatatcgtgattaaaaaaaaatatctgttgggcttcattcccagttcctggcacagagctcttrgaatttcctgagtgtatgggtgagcagagtgtcttttttcccccctaataagctcctttcaactatatcagagtttatgctaatgagctagctttctgag

SEQ ID NO: 29944 - DNA, 201 bp, Bos taurus
tccccaccacagctagctcctcctggcctgtgtgtcctacaggagcctcttgcaataaaaccaatggttctcagaattctctgggaagttgtcataaaggyaaattcttgggcctcaatccagacttgatgatttagaaatttagttcagtttagtcgctcagtcacgtccgactctttgcgaccccaggaatcgcagcac

SEQ ID NO: 29945 - DNA, 201 bp, Bos taurus
aagactttgagataattcctcaagttcacaccctttgtgtaggtaacagaggaagttcattggctaaagatgatccaagtcagtggcccagcaaggatgaraacaaaagtctctcaagtcctcaaccagaattctgtaatatgacaaagtcacctttttatgaggacctccttcatgccagacactgcatggaggcctcca

SEQ ID NO: 29946 - DNA, 201 bp, Bos taurus
tttctaagagctcagcatttaaaacccatttgtggattttcatcccaacgtgttaaattccagtattcctagtctgatatgtgggggtggcctcatcaatmtcgctcattcttccagcaacctttcatacattccatactccaccctgtgtgctcctgcacaagcttgccttgctggtcaccaatgtgtattttattttat

SEQ ID NO: 29947 - DNA, 201 bp, Bos taurus
cttcccccgaaaccctccaagaccagcaggtaggtctggctcaggtttgtatcaaattactgctgttgtccctgttctagtgtgcctgcggttttgtgtayacctttaagggtaaagcctctctttcccccagtcctgtaggcgcctacggtcttatggaaaaacctgaatgaactttctggccaatccaatatcttaacc

SEQ ID NO: 29948 - DNA, 201 bp, Bos taurus
aaagagttcccctgagaagccgtgcacattttttcctcaagagttggtgtcacttgccattagtgtcgacagtgcgtggccacgggctttcgcttctcctracttccccggtgtcaaggctacccaggctcttctccaggtgatagttcagactggcagttctgatgttctctttgattcctcccggccccacggacttaa

SEQ ID NO: 29949 - DNA, 201 bp, Bos taurus
cccagaaatcccaaggggacactgccctgcagagcacagtttgaaaaacagccacctagtggcatctgcaggactaaaggagcctctgcaacattgtttcrttaagcagatccttcctgaagctcagtccagctctgatccacatacctccatagccttgtgctctttgtcaaggcaggtttagcagatggtaaatcatgg

SEQ ID NO: 29950 - DNA, 201 bp, Bos taurus
cgcattgtggccctgtcgaggctcaccaggctggagctgagagacgacttcctgcacaggctgcgaatgctgcaggccccgaagaacaagcacgtgatcaygctgctgggctactgcgagaacgataacatcatcctcacagagtaccatccctcaggctccctgggcaacctggaggccatgctgaatctctccaagtac

SEQ ID NO: 29951 - DNA, 201 bp, Bos taurus
cccagcagtggttttcaaacatgagcatgcattcaaactattatacctggcaggtttgttaaaactcaggctgctgtatcctacttccagaatttgtgatycagtagtctggggtagggccagggatttacctttttaaaacattcccaaaggttgctaatgtttgggatgcacaggtggaaaccagtaccttagcctgtg

SEQ ID NO: 29952 - DNA, 201 bp, Bos taurus
tccaaatgaagcagagctctgcatgcaagtaatcctttctcacatgctgatcctataggctttatattaaaattcttttaatagtccttatggtttccctmtaaacatttagcaccattggagtttttggttgccttcacaaatagaagagcaagtttacctgtttattcattcctaaataataatgacaggtcaagttgt

SEQ ID NO: 29953 - DNA, 201 bp, Bos taurus
attctttaaaatttgcacactgaactattgcatttcagcatttcccatttttagtatttcccattcccatgcctcctgagtctgcatcttaacttgtcatygaagtctttttctactttaaagtctgagaaggattgatgtgatctctatgatttctgaagccaatcttgtgatataggtatgttatgtgaccaaagagtg

SEQ ID NO: 29954 - DNA, 201 bp, Bos taurus
tgagcctttttctgttcttatctaacaagaccattttaaagcatctaagaatcttgattattttaaaatgtgtactctcttgatttctgtgacaccataamctcttgcttctactagaacttctatactgtcctttcttcatttctttgatgaattttattatttttgttgttctgtttttgttttttcctacaagtgtta

SEQ ID NO: 29955 - DNA, 201 bp, Bos taurus
aagaagagcattaactgttctctatcacacagcctgtgtacttctgcaatcaataagaatgagtgggctcagactgggcctcattgttttaccatgaaatytggaattgagcaatagagtcaatctcccattttctacatggtgttagaccgaagctcagttgacacagcatttaacaatatgcaaatgagtcaatggcct

SEQ ID NO: 29956 - DNA, 201 bp, Bos taurus
tgagtctgtttctgttttgtaagtaagttcacttgtatcctttctttttcgattccctttataagcagtatcatgtgatattcctttgtctgatttgcttmattgagtatgacaatctctaggttcatccatatagttgcaaatgacattattgcagtcttcttagtggctgagtaatatcacattgcatatatgtgccac

SEQ ID NO: 29957 - DNA, 201 bp, Bos taurus
tagcagtaaagagggtgatttacctcgctccagggaagtcttctcttcacacacatcaagaactggccacgagtcagacattggcctcagcatttgtggartaaaaacaaagcctctagccccttagagccgacaggagcaataggtatggtgaggactgcgtagatccagtgtgtaattgcagcaaattctatgatagta

SEQ ID NO: 29958 - DNA, 201 bp, Bos taurus
taaaaaacttgtacacatcaaatgttcaggtagaatggattctctgtgaatggattttgaatttactctgcatcttaccatatctttggtctgctgccggratctccaaagtgatgtgtagcaaaatttggggagcatagtcttagtggattacagatataatatatttttggttattgttttaccaaaagattgtttact

SEQ ID NO: 29959 - DNA, 201 bp, Bos taurus
gaatattaatcctatcattttactatgcctgttatactttgatctactttagcagaatcatattattaaattatgattttaaaccagaagaatttgaagtyactcagaccattaccagctatatcattttccttggagctagaataggaatttcacctcatacgtttatgatacattcctgtttacatttactcttccact

SEQ ID NO: 29960 - DNA, 201 bp, Bos taurus
tagagaggattgttcaaagcaaggaactacatcaggttgggggatggtggagtgggggtcttcactcgtgtaactgcttcctggtaacatcctactggtamttttatcttagatcatttcagatacttgttctgtaatatttatacaggcagcaaattctgttgttgtcactcatgcttgctatataagactgataaaatc

SEQ ID NO: 29961 - DNA, 201 bp, Bos taurus
agcgatggagattatagctcttttattgattattgctggccaagtcttttaaagaacatcttaactgtgttatttcatttaattcttacaacaaatcttgrttcagttattcatagattattgttgtgggaattatagcttagagagatttgagggccttgctcaaggtcacccacttaataaaaatagctttaatttagg

SEQ ID NO: 29962 - DNA, 201 bp, Bos taurus
aatcatcaaaataaatgagttccaccaaaaaagagagtgaaagaaagagtgagggctgagaaagagccagacaaagtgagggaaaaaagttaaaatgtgcrgactctggagcagaaaaatgcaggatgcagaaggaaggaagaagagatgagagagagtggaggatcaggtcatttaacagtgcttgagccattctgaaga

SEQ ID NO: 29963 - DNA, 201 bp, Bos taurus
aactacacaaaaaatgtgagcgtttttgattctctagtcaagttggaagtcagtgttgttaaatgcaatcctatctgccagatttatttttgcttaccatrgtcctaatccaagtagcctggccatgtaaaaaacaacctttaagactctcctgcagcttcacccagaaagatgcttacacagacacatttgcacagacac

SEQ ID NO: 29964 - DNA, 201 bp, Bos taurus
tcagtcactgtgatgagaggcaatggccttgacttctgtatgagcccaaagacctatgccagggaaaacatcaagaaaaacacattaaagaggctgtggastttaacttctgaaaactggattctggtttaggaagcaaaaaggacataaactcagatatagttttcagttctggttctaaaattactgcgtggtaaaccc

SEQ ID NO: 29965 - DNA, 201 bp, Bos taurus
caagtgacagttttccatacccctccattctattatgacatccgagtttatataaatctaaaaatatcatactttatgaatgtgagttccctttattattytacaccaatctcatatgcagttgtctctcactcatgaaagtgaagtcaaatttagaagagctctgaaagctcatgtagcacttccagtatggtctgtgca

SEQ ID NO: 29966 - DNA, 201 bp, Bos taurus
tttaataaatgacagtttgtgcaaaataataatagcaacaatgcatttgattatatatgcttattacatgtatcttatgtgtatgtatatatatacacatrtactgattatatgtatgcttatctataagtgaaatgaatgacatcaaaaatacagaaaaaagggaaaaaatagaactatttagttcttatattgtattca

SEQ ID NO: 29967 - DNA, 201 bp, Bos taurus
catttatcagtagtttcctcttgtattctattttcttcctctaagaattattaaaaaaaagatattcccaggtgtgtggccttcaatcctgcctcgttcakccagaggaagcataattgagctttcagtaaactgtaagatgatagattttcacccgtcaagatgtgttggagaccaaaaataaacaattatagatacttc

SEQ ID NO: 29968 - DNA, 201 bp, Bos taurus
ccaggaagacttggttagcaactggaagcctgcttgcagtttggtagaggatgctgtctttggagccgagattgcccctcgccttccagctctggttatcrcctacctgcctctctgcctccagcagggaatgggcccgtccacagccagctagctctcctctggtattcactcagtccttaggtttgtgagcaggctggc

SEQ ID NO: 29969 - DNA, 201 bp, Bos taurus
tttagtgtggacacttgaaagggtagcagtgtggtaatctaatcagaaagtgtggagaatacaaacatgttgagagtgataacaatatttaaggatgaaayaccatgaaaccaggtgcagaagaacatttttattcacaagaaaattttgaatgtttccattctctcttatttctatgaaatatgttcatcttaaagtttg

SEQ ID NO: 29970 - DNA, 201 bp, Bos taurus
ttactctaacagagaatacatagacacccaaatcagtgcatcagcactgacataaaaatagctacaacaatccttttaattagacatcttctgattttacrgatgagaataggcaaatttaattcagaagaccattatatctactactgtgggcaagaatcccatagaagaaatggagtagccctcctaatcaacaaaaga

SEQ ID NO: 29971 - DNA, 201 bp, Bos taurus
tttcatccttagtgaaattctttaaaacataggcacacatgcacacgtatgtacacgcacacacacacacacgtcatatcatgttagtaacaaagggcctwtagagacctttaacttacaaatggggaaacatccattatttttcaaatcaaatagttttattcacttacagtcacacacataataagaattattcagttt

SEQ ID NO: 29972 - DNA, 201 bp, Bos taurus
aaagagggatgacctacaaaatagaagcaaaacaaatggatgaggaagaggaagttgacaaagaagacagacttttgaataagtccaagagagtttgtaayactagctcaaggaaatttaaatcaaacacagtccattctaacaaaatgttagaatctatattggagataaacaaaggcaagggaaataaataattgctat

SEQ ID NO: 29973 - DNA, 201 bp, Bos taurus
aaattcaacaggaaggatagagtcataccccaaagtgtgactggtaacaaataatcggtcacttaattagactagtgaaaagtgtatgagcaccaaagatmcagaacctaagaatgtgaagcctttaaaatctttgaaaattatataaaagttgtagttaacatggactctgcaatctgaaggctatatcttgaaataagg

SEQ ID NO: 29974 - DNA, 201 bp, Bos taurus
gggtctactacgggtatggcctaaggaccaggcccttcacgcattccaatacaaaacaccttgagatgttcatgcagtatcattatggcaaggaaagtgcyaattacctggaattaaatagcccataagctaagagcctagttctctagtttctaaaatcaaggtccagaaaagcaattctatggtttaataggcccagtg

SEQ ID NO: 29975 - DNA, 201 bp, Bos taurus
gatacccatgatgcttaaataccagtggactttaatttttcaaagtcaaaatttcctcaactcgtccatagaaataatactgccagtttcataggattacrgtaaactataaatatgctaatggttctatagtacctagcaagtacaagagaggagcagacacttagatgataggtagtggtaacaatacctggaatgatg

SEQ ID NO: 29976 - DNA, 201 bp, Bos taurus
cataggctggtgaaaatgtaaagaaactaaacatagggaagatccaggatcaaagccaagctatggatcttgtcagccactgtgccctgtgcactttcaayatgcacatgattatctggaatatgcatttacatcattatttgcttgatatacctatgttctagtgagtaagtgtggtagatggaatatagtcccccaaag

SEQ ID NO: 29977 - DNA, 201 bp, Bos taurus
tacactcttagggaatccaggccctactttattgcatcaagatctgattatgagaggtgtacccacttttcccaacatattagacatgcccccttactgtrgtaggccttggcacaaacatttacagagctgatgtgttttacctggtgagtaaaagcaggagtgagttactagaagaaaaataagcacagaagttgagaa

SEQ ID NO: 29978 - DNA, 201 bp, Bos taurus
tccccaaggcctctgatcatcctatttaagacagcccccgttcccctaataaagacctctagaaacatgggaaagtctgggctgcacatgaatcatacacrtgtcagtaatgccaatgccatggccagcctgggcaagagcacagacagataacagagcaacctcatccccagggtcttgtggaaatgccagggctgttat

SEQ ID NO: 29979 - DNA, 201 bp, Bos taurus
tctctggggatgacctcaatgcctccatcccttgatcctttcatctcattaccatttcctccctaatatctttcctccttccagtcagaaactgtcatacrtaagtaatgggccatgtacacagatcctgttccttcaacgagcagggactctttcctctcccacccccatgtctccacagggtgctcaatgcctgtgtgt

SEQ ID NO: 29980 - DNA, 201 bp, Bos taurus
gagtctgagtgagctccaggagttggtgatggacagggaggccaggcgtgctgcgattcatggggtcgcaaagagttgcacaccactgagtgactgatctratctgatctgaaggaaaccaatagtactcattgaggaaaggagagtctcatcaataaacggtattgggaaaactagatatccataggtaaaagaatgaat

SEQ ID NO: 29981 - DNA, 201 bp, Bos taurus
cagctatgccctctcaccgagtggtgcagacattgctaatcgatctcagcatatcttcccactgagctggaactcagcctcagaatcctttctggacagtkcattcggcagttattgctaattggccagaattcatacaagactggcatcccaggtggggctagtggtaaagaagctgcctgccaatgcaggaaatgtaac

SEQ ID NO: 29982 - DNA, 201 bp, Bos taurus
tgttcaaacactgatcaaatgtttgttatgtgtctatcactgtgcaaggccatggatacagagaaaacagaacccaacccctcctcaaggagtgcctcttrgaggagagagattgatctggtttgactgacaaaaataggtagtcaatagggaactcaaactggggctatggaacaacctagaggggtgggatggagtggg

SEQ ID NO: 29983 - DNA, 201 bp, Bos taurus
agaattagggccaacagcccgcttgcaatgatgtgtggctgcaggagctaatctccattcagcgccttgggtgccagctgcttcccacctggtcctgcatycatccctgcaaacaactttctgaggatccccacacatgtttttgccagtgagagacacagctgtgatatccgcaagaacttgagtctggttaaaaaccat

SEQ ID NO: 29984 - DNA, 201 bp, Bos taurus
ctaccatccctggcctctacgcactagatgccataacatctccccaatacagttataactactaaaaatatctccagaagttgtaaaatgttcctgaggayacaactggccttggttgagaaccactgtttaaaataaagtcaagaggtcaaaggacagaaccctgaagttcaccaatatttaaaagtaaggtagaaaaag

SEQ ID NO: 29985 - DNA, 201 bp, Bos taurus
tgtaagacctctttctttctttactctctctgtttagctgcttttagatacatatttatatttgcatgatgcatacatgattaaggagaggtaatctttaygacccagataatcacgatggtgtgatcactcacctagagccagacatcttggaatgtgaagtcaagtgggctttagaaagcatcactatgaacaaagcta

SEQ ID NO: 29986 - DNA, 201 bp, Bos taurus
acagcaatgaaattacactgattggttagacctgggtcacatgctcatccctgaaccagtccctgtgactgaaggaatgcaaagaactggctggtccattrtgagtgatgttctttttatctggaatcaggcgtcacaccagacctacatggactgagccaggtatagacaaaggaactttgaggtgttattcccagaagc

SEQ ID NO: 29987 - DNA, 201 bp, Bos taurus
ggtaagcacagttcacatagaaacaaacgccttttaatcacctagtcctggtggccagaagggcttatgttcctgggccccacaggactgaataattaaaracagtgctgagtaggctgttgcacccagaacattgcagagacagcagactgaaatgcactgccagcctgcctgtgaaaaaggcccatttatttgtcttgg

SEQ ID NO: 29988 - DNA, 201 bp, Bos taurus
tctccgttcctttttcattttttacctttcataactagtattactcaaaacacaagatctttaaagatgcttctatccttaaaatcttttgatttacaaayagaaagtgcttttcccttatgaatgagggggaggaaatggccaggtcagagaactcccagcttccagtttcttaagtgatttaacacataaataaaggtg

SEQ ID NO: 29989 - DNA, 201 bp, Bos taurus
aagctcaagaacctgcaagccaggcctgggatggccacatgcacccttccctggctgcagggcgacaccacacttccatcagggatgcctgggtcctggaraaagattctttgcaagttgaagagcagagccttttaattgccatgtccccagtgacataaaatctcacaaacaacctccataaatcacaccctgacagct

SEQ ID NO: 29990 - DNA, 201 bp, Bos taurus
tttctggtagaaaatggccctaccccaggagcactgtgctggtggctcctcagcaaagtagaaaatgtcacttacgcatgagccgtgacaacagcatgtayaggcccgcacgtacgctttcctctgccgagcagctgctacagctgcaaactgcagggcaagatcaagaggactaaggaggccaacgaccccacatccaca

SEQ ID NO: 29991 - DNA, 201 bp, Bos taurus
ggcttcctggaagcttccttgcaagtctctctagtgccacagtcggttttccaaaaagttcaaccactttcctttcaggccccttctggaaagctttattrtcactccaggtgacagcttcctgcttgactgtcacctcggcaaacttcaccatccagtgggccaagcccccaccctctccagcaagatctgaatctcagg

SEQ ID NO: 29992 - DNA, 201 bp, Bos taurus
acatgtatccattaggagattgattttcatcagggctggcctggtggtctggggcaggggtcggggtgtaggtatggggtgagggcctctctcagttgttktccatcagcctcccctctccagacaagggagagaaggtgggtagcctgcctctcgcccttactcctccttttggttctccccctagagacgttccgcttt

SEQ ID NO: 29993 - DNA, 201 bp, Bos taurus
ctacccacagcaggccgagtccaattttgcagagtgaacccccctagcatctagtcaggagtgcctggagggctaagaccgtatctaagtcatctctaccrtcatctgtatccccagtggcctccagaggggccagcttggagcaggtgcttttgttaccgagtacaagttcactcttctctccacacaacatgccaatta

SEQ ID NO: 29994 - DNA, 201 bp, Bos taurus
caggccctaaggccacaggaagaaataggacagtctcatcctccccttagctggcatggggtggcgtgcaggcctgcaggccagaactctggactcttgtyctctagcatcactgatgagaacaaagagcttgaccttgagcaagtcatggcccctccttggttctcagcaccctgatgtagatggaggtcttacccagtg

SEQ ID NO: 29995 - DNA, 201 bp, Bos taurus
aaggaccagtaaagaaaatcaggatgagtggccaggggagcaccagaaagccgaatgaacacaagcaggagggtgccaagtgaatctgtaccaaatgcttstgataggcccagtaatttgaagccaaagcatcatactcctttggcaagagggaatccactggtgatcctgaccagacccaagtcagtacagtgatgggga

SEQ ID NO: 29996 - DNA, 201 bp, Bos taurus
aatacacaagtattaaaaacaaaatacctgtaatgctaataagataaaagaagatgtccaacctcaccagtaatcagagaaattcaaaataacaatgagckatatattactcatcaaactgacaaacgaaaaagcctgacaatacctactgttggcaagagtgcagaacaatgagagtttaatcagttaagatgggcatcc

SEQ ID NO: 29997 - DNA, 201 bp, Bos taurus
agcattgaaaaatcagaagatttcacatgaaatttagatttccacattttgggtttttttttttttttttaaaggaagctccggaagtaccaggcccagaytcctttctgatcacaatcagctcagcagggatggcatggacactgccccttcagagggtcgtgcctctgccaggcgccaccgtccccacctctccctgct

SEQ ID NO: 29998 - DNA, 201 bp, Bos taurus
gctttgcaggcggattctttaccatctgaaccaccagggaagcccagcaagacccatatgggatttctgacgtagggaaggcctgaagcagggagctgggraacctaaaggcagttctaggggcaggaagacacaggaccaattggactgaattcttcacgggccaccaggacctcggggcagggaggaggcataaggcac

SEQ ID NO: 29999 - DNA, 201 bp, Bos taurus
cacttctgaacaggcacctgacacttcatgtatactcatctgcctctaccatatagttaagtgaaactgcatttaaaaaagatggacactcaaatatcaascgcaaaagaaagataagtaactcagtgagttgaagtttaaggcattttagtttacacaacactcagtgcaaatggaaatggaggtgtttgatccaaagtt

SEQ ID NO: 30000 - DNA, 201 bp, Bos taurus
ggcctccccatctaagcccttataggacactcaggagtgctgactcagcagttgggttgtggaatccaaagcccaattgatgtggggcttgaggggaagtygtcttcccagcggtatggccagacctttgtgctcttgtgagatggaaggtgcagggtgtatgctgtggctattgcttgggatcggctgctgccaagcggg

SEQ ID NO: 30001 - DNA, 201 bp, Bos taurus
gggtgacaggcattcaggaagtccaccaatatagaccctgagtctgcagaagtgaggcctctgttggccctgcgttttctcatctaggccacccctgatascaggggaaagttaccaaagctcgaggctgagcccccaaaccactgtcaacgttggtagaggaggccttcaaggcctagaatgccaactgaaaattgtcac

SEQ ID NO: 30002 - DNA, 201 bp, Bos taurus
tgtgggcctgcaggcatgatcctccctgtcctgggctcctgcagcctgaacaaggagaaggctgggcatatgatttctaaggccccttcagctcaagagayatgagattgactgtcatctctgtccctcaggaagctgcatagactccggcaagacctttgaccttcagaggcctcagtttgcccagctataaaatgggag

SEQ ID NO: 30003 - DNA, 201 bp, Bos taurus
gggggcttgtgaatcagactggatgcctcaccctctgggccaatgctgtctggtatggagcacagggctccacaagcattttgtcaaaggagtgcccacargagagaataaacgctggcctcgactcagaaacgggcctctgcctctccagaggcaccagcccaagcagctgtgggcctctcccatgcccccaggaaagac

SEQ ID NO: 30004 - DNA, 201 bp, Bos taurus
agaccattgccaagttgctgcttgaaccctggcaccatgaatggagaagaaacacgtgaagtacactgaagctcctggtgggactcagggccgtgcagttrgctcagcacacttttacatgcatttttagattaacttgaaaatgaacacatgccgttttttaatcctcaagaagctcctgaccccagtctgagggccaac

SEQ ID NO: 30005 - DNA, 201 bp, Bos taurus
aaggacaagtgggcctcagggcaaggcccaggggatcctgtatggtcatccacacactcccttgggcaggagatgatggagtttgtggcagctgagccctrtgggggtgaaggggacagggccaaagctgcaggagaagtgaggggctttcttctctatgcatacctcgcaaggcccaccatctttgcccaaagggaagga

SEQ ID NO: 30006 - DNA, 201 bp, Bos taurus
ctcaaggcccagagcgctccgtgagatgagccgcagctgtcgggggtccagtgttgcagctgtcttctcccagcccactctgcagcctctctgccctcccrtggccctaggtcccaggacgctctctataaacagcctgctgggtaaacacagccccaggggagcccagctggcaacacccatccatggatgaagagggtg

SEQ ID NO: 30007 - DNA, 201 bp, Bos taurus
gagtcctcccagctgtggggctgggcactccaggcgggtacaggaggccacctcaaggactgtgaccatgtataagtgagtagagttggatctcattattsgcagtagttgtggcctagacttggagaaggaaatggcaaccctctccagtattcttgcctggagaatcccagggacggaagtctagactaggggtcccca

SEQ ID NO: 30008 - DNA, 201 bp, Bos taurus
caggaccgtgctggccacaatgcagaggcagaagggaagacagacgagataggaggttagcaccacagtgggacatccaggtgggtggtctaggatgccargctgagccccggagagaggcctgggctgaacaactatctgggcatcagcaatggtggccaggagcagcccctgactgacttgggcacagggacaaagaag

SEQ ID NO: 30009 - DNA, 201 bp, Bos taurus
aatgggttatgccagcatctccctggtgcccacttgaggccttgatagtggtcttgtacagagaagatgccctggaagacagaccaggggtgcggatagtratgagtgtcagggccacatggggtagggggtggatgagaggctgctccattatcctgtccattctggcctctgtgcctccttctgcagatcgagggctca

SEQ ID NO: 30010 - DNA, 201 bp, Bos taurus
caaggagcacagtggggaagaagaggaaaccctgccaaggaagtttatataaaacacaaaggcaaagccctctaagtggtgcccagcccaggcaagggccyagcaaaccgaacttcctccctcctcccacgtataacccccagtaaccaacatctcccagctcaggcatcagcaaactttatccaggaagggctgggcagt

SEQ ID NO: 30011 - DNA, 201 bp, Bos taurus
tagcattcaacaactattactgtagggtaaggaaaaaaaaacttgcatacctattgcttttcatttctatcatctattttgatgtatgccaattcagataytacaaagtgttatctctataaaaagatattataaaaactatactaatattatcaaagagtacagcttagaataaaacagactgacagctgacataattct

SEQ ID NO: 30012 - DNA, 201 bp, Bos taurus
ccaaaggtgctggggcaaccaggaatagtgtttatttatagtggaaaagcgtcagccatgcacgcaagagaactgggagagtcgtgcacggtggctgccakgcggaaatggccccttcagcagaatgatcctggggctgctgctgctgctgctggtaagtcgtttcagtcgtgtccgactctgtgcgacgccatagacggc

SEQ ID NO: 30013 - DNA, 201 bp, Bos taurus
actgattggccttgggcaaaacttgagtgaatatgcaaatatctgtttcttctgctataaaatattggcactgcctgtttatctctgctgatttctcagcrtggccattgtatttgtgaatacaaattcaaaagcttcatcatctgtgctgtgttctactaggttaagctgatcatctaaataataaaagaagaatcccaa

SEQ ID NO: 30014 - DNA, 201 bp, Bos taurus
tgtgttttctctacagtattaataatatgagtcatagcaggtaagatggattctgggagggagtttaatttgaatttggccttgagggatgtggtacaaaraagtgggggcacattccaggctttgaaaaaaaaaaaagatgatcagaataaaggtatgggaatggccacctaggtagaccagggctatatgttggaaaac

SEQ ID NO: 30015 - DNA, 201 bp, Bos taurus
actgacctgggcccttcattggagaaagttcatcaacgcgtgacccaagcccgagccgagcctattggctctaaagtgcatattctttaacacctgtgttwgtaccttctatgtgggatggcctcacataacactctctgtggttctcaatcatgagaatgtcaaggcactgaaggattttctgctcttgacccaaactgc

SEQ ID NO: 30016 - DNA, 201 bp, Bos taurus
gtatttatatacttataagtaaacgtgtgtatgcacatattcatatatcttactgacagtataaccattgctccagtggtttttaccacaccagagaacarataaatcatctgatcaggaatctatttgccaagtatctgaatctgcattacacatggattttgttatttcataccacctgtaattcacattcacatggag

SEQ ID NO: 30017 - DNA, 201 bp, Bos taurus
ttggtgacatcatcttgcacattatattttctaacatagatgatttaaagattgaaatcatggccctactctgtttatattcataaataaagtcatggaamatcatcaaaatggagtttatattaccagtcatttataaatgattgctgtgaaactttaagataacctgtcttctgagttatattaagaacttctcctgta

SEQ ID NO: 30018 - DNA, 201 bp, Bos taurus
tgaatacttttcatgggatcttgaaagtaaacatggattataaaaattattcatatggtatataggactcaaaccaagtttggactctggttagcttcacrgtttgcagttgttgtatattattctaacctcagcagatgagctgtcccagtaaagcatatagtagatttaaggaacagtggtatcttagtgaattatctc

SEQ ID NO: 30019 - DNA, 201 bp, Bos taurus
tcatgggacagattttcttgattatcctggagcatctacagagaaaaatttacaagatctcaggtcattaaactttctattcatgtcacagagaaccagakttcttctaaggaaaccttaaacactctcttctttttttccttatagccccagagataaatatttctgaaaattaaaacaaaatttaatggcttggactat

SEQ ID NO: 30020 - DNA, 201 bp, Bos taurus
tgaactgatttgtccatggccatatataattatagtccaattggttcaggcagggaccatccaactgcccagacattcattttattataagccttgatttkagctttaattaaataataatttattcagtaccttcttcaaagaagtctgctgcgattaatacccatatatctctccaaatgtctatatatactgtggaaa

SEQ ID NO: 30021 - DNA, 201 bp, Bos taurus
acgggtctttgtgagacatgatttacatatatatatatatataaatcatatatataaataaatcaagaccaacaagtgctggccttatgttcactatctgktctcatggcttctttatcttttcctctctgcttcttccttctgccccaatgaccttcctgtgcttccactgggacgttagcacactcccacctttgcact

SEQ ID NO: 30022 - DNA, 201 bp, Bos taurus
gaccttttggacccagggatcaaactcgcgtctcccacttgacaggcaaattcttagccactgagccacgtgggaacccccattagctttgtcttggagtyggccaaatctggattcatattaaaagattacctgcctgctgagttgttgtgaaaagtaactgcaaattgtcacaaatcgatagcacagaatctcttaatt

SEQ ID NO: 30023 - DNA, 201 bp, Bos taurus
gcataaatatggcctgattttaacttaattccttctttaaatgccttatctccaaatacagtcctatttgaagtatgggatttaggggtccaatagaagarttctatagaaatgggcctccctgatggctcagacagtaaagagtccacctgcaatgcaggaaggagatatgggtttgatttctgggtcaggaagatcccc

SEQ ID NO: 30024 - DNA, 201 bp, Bos taurus
ctctttgatgatgccactgattttaaagcaaaggaaaagaaaaataacccaccaaaggtatataagaagtaaaggctcagcaaagtagtgcaataaatcayggccaagtatgttgtatggaagtcataaagtgtgtggtccatgcgggctggtggaggaacggcagtggctggaataggttccccacccccccgcagcctg

SEQ ID NO: 30025 - DNA, 201 bp, Bos taurus
gtttttctgtcctttatcttaagaaatcttcattttattctacagaaatctttagaaatggcagttctccccagacttgaattatcaaaaagccagtattmtatggagacagatactaaataatatactccaggaaatcactatccaattctatttagatgcctacctcccccacaggacactctgctctcccatctatac

SEQ ID NO: 30026 - DNA, 201 bp, Bos taurus
ttttgcagtcaagattattttttgaagtattatttcttaaaaaaaaaaaacaaagaaaactttcttttattttcatgtataatagtgacttttttgatgartcttttttatcatcttatccatttttaagtttacaatataagagtgtggactgtatccatttacttttggggagacataccaattttactctcattaata

SEQ ID NO: 30027 - DNA, 201 bp, Bos taurus
tctgttttttttttttttttctcttaaacacacacacacacattttctagaaagtagaactgtcttgaagatgaagtatggccgtatgtcttttattacckaattttaagaattttcatattaataatagtgtcactagtgtgctgtgctgtgtgctgtgctggccttagtcgctcagttgtatccgactcattgcgaccc

SEQ ID NO: 30028 - DNA, 201 bp, Bos taurus
agtgccctgagttttgtccctccccttccatggaagaagaataaaaatacagaggagtggcatgtgccaacagcatcactgataccctgtgtgttttattyactcacatttatcagagtccctctacacttaactcttggccaaagctgtcccagcctgatttcagtatgctacctgcatttactgacagagtatagcatt

SEQ ID NO: 30029 - DNA, 201 bp, Bos taurus
aaatatttgttcatcccagcaatgaagaagtgctcaggtgaatcttttgtaattatttgccctaaagtacccaaaatggtacaagtttggcaggagaactytggagtaggaggtcaggacaaaataggtagtccctgtgtcaatcaagcaattctcacagctacctcccacatccagctgtacccttggcctcggccccat

SEQ ID NO: 30030 - DNA, 201 bp, Bos taurus
acctagtggatagcttctagtttcaggggaagagaaaggccattagaaaagaaagtcagaaggaattacagagactggctgtcatgtgaccttatttaacycccagtaagccatggtccctaaagagatggtactgtggtataaaggccagatgcagctcaaggtactattaggatattgcaatgattcaaaggcttttcc

SEQ ID NO: 30031 - DNA, 201 bp, Bos taurus
aattactatagaccatatctcatctgagaggctgcctccaccaagtaattgactttatttagctgtggttctttgctgtggaaagtaattatatgtaatargcattccctcatcttcaagtcacccaagatatgaagccaatagcaagaagtgattgcatataatgggagtagttgtttctaacagttgatgtacagtttc

SEQ ID NO: 30032 - DNA, 201 bp, Bos taurus
tcatgacttttgtcctctcttgttcaagtagggccatgtgactccagagtcaccttcctgtgtagtatatttgggtttcttccacaggtgcaataatagcrttctccttacaggcatccttgctgcagtgccctgagcatggtatttctcatttactgcctcccctcctccacagagctccactgttactgcagtctgctg

SEQ ID NO: 30033 - DNA, 201 bp, Bos taurus
acagaggacttgtcaagtctcatgctgttctctctgtatgctagaaaattctcatattttcctgaagatggcaaagacatgcgatttccctgtaataaaaytgtgacctggttacaactcctctaaaacacgtaaatatactatgagaataaagctctcactattctaaatctgtgatgtgatcaacttttattttgaaga

SEQ ID NO: 30034 - DNA, 201 bp, Bos taurus
gtttatcatactaaataaagtcaggcaaagacaaaaaccatatgatatcacttaacatgtgaaatttagaatgtgacacaaatgtactagaatatagagartggataaacaacaaaatcctactgtatagcccagggaactatattcaattccctgtgataataatggaaaagaaaaacaatgaatgcatatatatgcagg

SEQ ID NO: 30035 - DNA, 201 bp, Bos taurus
cttctcatcatgatcaaataagtcatatttataccatatgacaaatataaggatattgatattaccaataaaatcttggacctcagcttagctacagaaaycttatagttttacactgggctctcaattagtttactcagcactttcccctcctgaatagtaaaaagcctccccttgactcagtgtatgcatgctcagtca

SEQ ID NO: 30036 - DNA, 201 bp, Bos taurus
ttattctcccttcaaattttaagataaataatatttgaaggaagaataagataaataatatttcttcagaaaagtctcctataattcatcagaatgagtgmattctctcattataagtcccacagcatcattttattctcctttggagccccataattatacttggttaattacttgcatacttatcatagtctatttctc

SEQ ID NO: 30037 - DNA, 201 bp, Bos taurus
aaatgctattatagacaaaggaatgaggtagtcaattgattgatttttaactgaaacaacaagcctgggggaggggaaaagtaagtcaatgtatagatacygtcctatttgacattatttaattttgcattaaatagaataccaatattatattttatcagcatatgctatgttcttttatattaacaattaaactcatga

SEQ ID NO: 30038 - DNA, 201 bp, Bos taurus
tacaagagaaagaacttgggagtataagacagagtttggggaccaaggcctgtattgcctttaaataaaatggccttaagtgtagtgaatggtggactacrgaaattccatgccttgaaactggaaacaaactaaaacaaattttaatgactagtttatcttaaattgtactgtagatgagagggaaatgtctcctctgct

SEQ ID NO: 30039 - DNA, 201 bp, Bos taurus
actgggtttacttagtgatgcattttccaaaatgttatccatggagcaatccttctttagaatgttatgtatttcatggggaaaaaattagttccatattmaaagtgattttaatgctacatttttaataactttatttgtttatgtttggctgtgctgggtcttcagtgcttcaggggcttttttgctggtcgtggtgag

SEQ ID NO: 30040 - DNA, 201 bp, Bos taurus
gactgtggagtaaggctctgccatcacctatggataactactctccttttgagtaatggcttttggaccactactgagtcttagtggagattgaatgcttractgggccaccaaactaccatctgacctaagctgccaatcacagcctaggtgttgtcagacccaccaaaatgtgaagtagggtgtatacagtaggattcc

SEQ ID NO: 30041 - DNA, 201 bp, Bos taurus
tcctctctgtgcacctacaccgccggttttgcagcgtgaaagaaatcctggctctcttagagcaaaagttatgcagccaggcacaaggaccactggcctgytgagggctgttctgtgaggcactgccttgacaactcccagatcctgacactccaggtcaggaagcggcccctcctttgccacctgggacatgcccaccag

SEQ ID NO: 30042 - DNA, 201 bp, Bos taurus
ttttgctaatttgacatctattccccctctgatagccttgtgcagttgcttttccaatcactttaaatcttgccacctcattaagaagaggcccaatgttyccggtgggaacttgatctggttagaggagcacatcagggcaaaagatgcagggctagcataccactgtcatcaccctccctgccagctaagaggcctggg

SEQ ID NO: 30043 - DNA, 201 bp, Bos taurus
ggctcaaacacatctttattaatcaaagtaggaaccattacaatcaacacattttttgccaatgaaaaataaatttattcctgtagtgtaaaaatccatgytttgggatttgataaacatttggagagcattttctgcttcctgctggttgtggaagtgttttccctgcaaaaagttaatgagatgcttgaagaagtggta

SEQ ID NO: 30044 - DNA, 201 bp, Bos taurus
agtcgagaagggtgactaaaatgggggagaaagaaacaggaaatgttgacatctaaattgtggaagcagtaccaccagcttggccatttcatctctggccygtgtcatcacttcagttttttatttcaagagaagtatgtgcacttgtaagatacatttgaaaaagcaaggatctcaagaggttcatgtccccagcccggc

SEQ ID NO: 30045 - DNA, 201 bp, Bos taurus
tgtgagagtacagtaagtaaaaaatacaaagctcatcaattctcagcttcttttgtaagaaaggaaaacagccttgcctgacttttaacagctttctaatyattacttcttctttctttttttctccccaggcatagaggtgaaattggtgccactcctactttagaagggagaaaaatgaaactgttggtggctgagaag

SEQ ID NO: 30046 - DNA, 201 bp, Bos taurus
accacgcggggcgccctctcctcatccccatcaatcactccagccactccctgtggcccgagggtgtcaggaagaagagggtgggtgggggccacactctmtttttcttccggtttccccagaccgagagcccctgcagacttaacttgtgccgcgcttagtcgctcagtcctgtccgactctttgcgaccccatccatgg

SEQ ID NO: 30047 - DNA, 201 bp, Bos taurus
aagtccctgcagagggcccattgtcaggcttgggggttgcagaaatttgcatatcatcaattattatctaaattatacagtattcaaagtaaccatttttkgtgacaacttctggcctatgttgaacagctatgtattaatgtgttagaagtatgtttgtgtgtgtgtgtgtgtgtgtattgggatgaatattaaaaaaaa

SEQ ID NO: 30048 - DNA, 201 bp, Bos taurus
aacacaacttgatgcagctctagggaatgagtctagtgtgctcatgaggagtagagaactgctgaaggccctcggacagccccccggccccccctcccccmgcgacatgcagggtcctcaaggagagcttatgtagcaaggacagtcactgaccttaaggggccctttggagaggaacaaggcccaaccaagtagccatct

SEQ ID NO: 30049 - DNA, 201 bp, Bos taurus
tctgaccagcgccagctctggaggataaatggagctcctgaggggttgtagaatccatgaatgtttagtgggcatagaatctggatcatattgagaaaaaycttactagtactgagatctgaaaggaaagccagtggacctaatcaaagagttcaagtatatattaaaaaataaattttattatttttaggctgagagcta

SEQ ID NO: 30050 - DNA, 201 bp, Bos taurus
aaatgcctctacatgtggtttctgtttgaaaagagaaaactgacatttgaacaggacttttaatttgttcacatctcttatcattgcttttaaaacagtargaaagagtaattcttattttagaaaaagtaacagaagcagtccagcaaagttatatattcctttttctgataagcatcatatatgatcctagatatgcta

SEQ ID NO: 30051 - DNA, 201 bp, Bos taurus
tttgaaaggcagaagagaggccatggctgtcactttctgagggtctttttggagtcccgtgtagtgaaggatgggcaaagcttatcctcactctgctctgyatccagacaactggccatgctgaccagcagccccgagccccttgccagataccaggctacagacccacagcagaaacaaaggccagagctccctgaaaac

SEQ ID NO: 30052 - DNA, 201 bp, Bos taurus
gtgtacttcctcatgtggtatcacatgaaatacatagaaccacctgtgaagtatccacgtcaaaaatgttagctctgtatttaatcaagtctttataactraattctagttacagaaagatagatgatagaaaacaaattggaaaaaaaatcagcaagttatgaactgttatggaacaactgacccaggtcactgcttgag

SEQ ID NO: 30053 - DNA, 201 bp, Bos taurus
tagcaaccgtatttatgcctgcagaaattcttcacttttgccacataatgtcactcagtcagggaagtgatagttcatcacattcactggagctgcccccmctcaagggcagctgccacaatgcagcttataattctgcctatcatacttttgtagccccaagacctctagggcatctgacactgaataggagtttagtac

SEQ ID NO: 30054 - DNA, 201 bp, Bos taurus
agaaagcaaccacttcaagaaagagggttcaagagtacataaatctcaaatatttggcatgcaagggcttcggggatgggggaaagaggggagaagagaayttcagagtttctgacttagacaccaaggtggattgtaatattattcacagcatgggaaatgctataaaaggagcatatttggactgtgggagaaggcagg

SEQ ID NO: 30055 - DNA, 201 bp, Bos taurus
tcagaaacaatggagtacatgagcacagaatacatagtattaagaaagaaatttaaaaggtggactgcaagtcatattcatgagtatttgaagtaaagtayaagggataaccttgcatctctacttataatttgatgatataatatttgataacagaaacttttagtactatataaattattgaattatttctcctccagg

SEQ ID NO: 30056 - DNA, 201 bp, Bos taurus
acactctggcagatgatgaaggacagggaaacctggcatgctgcagtccatgggtttgcagagctggacacagcgactgatcaacaacaacagattagtaycaacgtattttttttccactgtcagtcaagaaaacttaaaagcaaccacatctcagttgcaacaagaatacctgcatccatatcttggtttctaattcca

SEQ ID NO: 30057 - DNA, 201 bp, Bos taurus
aaaaacagaggattgtgctttgtcttacaatgtcctcctattgaagagaagaatatacctgctggttctactagctgtcattctgccagcacagcagagaygcacagtatatacaacataaatttctgtctgtatgtctatatttatactccacatcattccatgaaagattccagtatggtttacaggaaaatatgcttt

SEQ ID NO: 30058 - DNA, 201 bp, Bos taurus
tcactaaactctaatctctatttttcaatagattttgccttacaaaaacagctgaggttttagcaagagaatctaaatctattacaaaggtatgaaattayctcactgaaggaagggggtaaatgtcaccgaccaaagtaatttaggaaatgagtgaagtctgctaagagaaaagtaaaaggaactatatataagcactga

SEQ ID NO: 30059 - DNA, 201 bp, Bos taurus
cagctggtgttttactttctatatctgtctcattgacttttgtattgttgttgtcttttccttcctttttttttttcttcatctcatgttaaaactgctgwttcttttcttctctttagggtgtctccatattactttcttttgaacattttctgtttcctcagtttctattacctactgctttgaagcagaacaacccca

SEQ ID NO: 30060 - DNA, 201 bp, Bos taurus
gctcacactaaacatatgatagctagtaatattgtcaaaatgcgacagatgagaaaactgaggcacaaagaatataggtgcccaagatcacacaagtgttrgtcgctcagtcatgtccgactctttgctcccccatggactgcagcccgccaggctcctgtgcccacataattctctaggcaaaaacactggagtgggtgg

SEQ ID NO: 30061 - DNA, 201 bp, Bos taurus
tattcaagacaaacaagctaaatatctccacccttccctgtgatgcagctaaaatacaaattataaaactaaaccagtaaacattttctacaagatcacarttgaagagcctgaaaaagaaagctactggattctcactgcagctgatgagtgtgaagtgttttgactttcaaaattcatggattataaaaagcatcagtg

SEQ ID NO: 30062 - DNA, 201 bp, Bos taurus
tactattacacagaaactgaaaaggaaagtggcttaaataagagccatatcggtggcttaacatttaacagtccagaggtaaccaggccaggcaggaagarcttctgcttctaattccaaatggttaatttcgattctcagcttatcccagtcagcaagaaggagaaaaagaaatggagagacaccctttctccattggcc

SEQ ID NO: 30063 - DNA, 201 bp, Bos taurus
tctcagcttcctctgggcccagcgttgctctctggctgattgagcctcctcccagctgctgctgctgctgctatagacacctctaaatgtctgatacatgygctgcctactccacggcctaggccatgccttccttgagctctgccatggaatcatctcatctttcatcacccctggcccaagacagtcacttcattctca

SEQ ID NO: 30064 - DNA, 201 bp, Bos taurus
tttcagtgtaacactctgcctttggctatgcccggttttcccgaatcccatgatcctcattcagcagctccagaaaattaaccactggtgttctgcagggmatgggtgaagtgggaacctactctaggtgaacatggcaactaggaaaatctagcagcttaacagatttacaactgcttcaccaatttttagccccacctc

SEQ ID NO: 30065 - DNA, 201 bp, Bos taurus
aaaaagccttgggtggtggtagagctttgaccaacaatgtggtaaaaaaaaaattttaaatcaaggttcctgatcatggccccactttctccactgaccaragctatgactttggacaacccagtaaatccccccgtgatttggtttgctcacctgtaagataagagattgccccttggccacttaagattctactctaaa

SEQ ID NO: 30066 - DNA, 201 bp, Bos taurus
acagagagagtggcacagatagagagtcattctaccccttttcttttaggccaagagtgccagcacaactccaaacccaataaaacttccaaaggtttccrttcaaagcataagctttccttaggccaaagagaccatgactaaaaataaagtaatgactattaaatattccttgagcctattttagtgtgaaatgagtac

SEQ ID NO: 30067 - DNA, 201 bp, Bos taurus
gataatagtttggcaatttctttaaaagttaaatacagacttaaatgattcaggtatttaggagtttacccaaatgaacagaaagcatctgtccacacaargacctatacatgaatgcctgtaacagctttctttattttattgagtacagttgatttacaatgttctgttagtttctgctgtacagcaaagtgattcagt

SEQ ID NO: 30068 - DNA, 201 bp, Bos taurus
acatttttcacacacgtcagcccccacacacaagccaactgcctgtctgatgttcaaagaaagtgcaatgtgttccaactctgcaggcaaaataggctgtrttggcctccatgacagacagagcatgggcctccaacgtggggctttccaaagagactctcaaagttaatttttgactcaatgtgacttctgcctcatata

SEQ ID NO: 30069 - DNA, 201 bp, Bos taurus
ctcactaagactgtgattatccagcaggtgatagcatgtttggtttgaaaaacccctcaggagatttttaagcatttttactgagaaccgtattgtatacyatgttgggtttaaaaaaaaaaaaaaaattaatcccaaatgaataaaatctggaaactgggagaaaaaagtttccatagctaattcttaaaaatcacatta

SEQ ID NO: 30070 - DNA, 201 bp, Bos taurus
gcttcctcaagaacaagaccatggatcagaagttggtggaccctgagtaactggacatctgaaggctatcagtgaaccacacattttgtagctggaaagtragtcctttattgaagaagaatctgagtgtggcatctctgtttgacatctaacttacacactgagaagaaaaaggcattcaatccaatagaaaattaggca

SEQ ID NO: 30071 - DNA, 201 bp, Bos taurus
ccagaaagagtggtcagacatgactaatattctgggagactgttttcctgagcattagtatgggtcgggcatttgtttttcaaaggtcatatattatagaycacatggatttaaatgggtaaggttttacgacatcaagtaaaattaaaaaatcatttagcatgagaggaagaaggcaataaaagattcattctcagtcat

SEQ ID NO: 30072 - DNA, 201 bp, Bos taurus
ttgaacaaatgggtttgttttccatattggagaaattggttggagggtgcatttttgaatggatttcaacacagagactgagtttcagttttaggaacagmaatttgttttaatggaaacatcatcaggcatgtgataagtgtctcctttatggaagacttcctgctacataatactgtatgttaaagaggaaagagagtc

SEQ ID NO: 30073 - DNA, 201 bp, Bos taurus
gatgtttatttctgcttgtttgtagggccagggagacctgttgaagaatgccaagaatgaagccatagaaaacatgaagcagatccagctggcatgtttgwcttgcggccttagtaaagcccccagcagtggtgctgaggtgaagagtaagcgcagcctggaggccatagaggagaaggagagctgtgaggacaatgggaa

SEQ ID NO: 30074 - DNA, 201 bp, Bos taurus
ttgttacatccgtgtttattgacatggtaggagatattctatttcacaggatgaacctttgttagatgcaggctatcagggggttgggggggagttggccrgtgatgccccactctttcaggaacaaagctgtagcttggtgatggtctttcacacagtgtccatgggttgctaatcagggccacttttaccttgacttct

SEQ ID NO: 30075 - DNA, 201 bp, Bos taurus
caccagtttctctatcctcaggttgagctgaggccaccctcacctccactggagaccctccatgaccaccaggtaggtctggcccaggtttctgtcagatractgcttttgtcctgcatctagatttgcatcaagttttgtttgtgccctttaaaagtgaagtctctatctcccaggctcctgaaattaggactcactggc

SEQ ID NO: 30076 - DNA, 201 bp, Bos taurus
ctccagggaagagtactggagtggggggccattgcctttctcctctatggggagaaaacttctgtcattaaagcaggtgattgaaaaattaaaaaaaaaamaaaactgtacaattacaaggatgaatgcctctttaccttaagtctcccagtgaaatcctaaaaatataggtgaatattaaatttttaaaaaaaagtaaat

SEQ ID NO: 30077 - DNA, 201 bp, Bos taurus
tgacatgttgcagtccatggggttgcaaatagttggacacgacggagcaactgaactgaacagaatggtctctgatgttgaattctgttcatgtgattgtyggccatttatactaatctttggagaaatatcttattcaagtcctttactcatttttcagttgtattatttgggtttacattgttgagttataggagttct

SEQ ID NO: 30078 - DNA, 201 bp, Bos taurus
aaattttccgtattgccttccagcacctggaatgagctagggccaggaataccatctagatgtgatggcctgaggccagacttggatgtgcatggggcttyttccctgtcgttttcccttcagggcactctcccacccactgtctgacaggtgggattgaccacatcccccaagttactctggagggccccatggctatgt

SEQ ID NO: 30079 - DNA, 201 bp, Bos taurus
aactgtcacaaaaaacttatgaaataagtactattactgttcctattttacagatgagaataccaaagcacagaaaggtaatgaggacaaggtttgagatmtaataaatagcacagctaggatatatggaaagctatagttctcatatatctaacattcttttataagaaaataatttagtgattacatattaatgttttc

SEQ ID NO: 30080 - DNA, 201 bp, Bos taurus
aataagttaatatttgcaaagtaataatttggaataatgcctggcactttgtacagagacagtaaccacagagtaatttgaatgctttataaatttatatrgggaagctttatcgagagaaatatgtatgtatatatgaagttataaatagtaatgggagtagctactaaagaaaacaggaatagcagacactgggatggt

SEQ ID NO: 30081 - DNA, 201 bp, Bos taurus
aggagactggcaagcaggtggcctggtgaaattcacatgatggacatcatccctcgaaactttagtggcagatgacaagtcagttctgctctttcagaaaraggcttaggccagactgcctgggtttaaattccagctgcactactgactaaattttacagaagttacttatatattctgtgcctcagtttcctcaaccat

SEQ ID NO: 30082 - DNA, 201 bp, Bos taurus
aaggtgtccattgcactcacatggcctctggacctactctcctgtgacttcccatgctccagatctttcctatggactttcttcccatcagggtgtatctrtcctggattccagtctctcagggccactctgtctcttgctgtacagatatttactttgcttttgagcagatctcagactgagggccaggcaagaatgggt

SEQ ID NO: 30083 - DNA, 201 bp, Bos taurus
cacagggtagtcacctcctgactatcttctctttctgtggtaagactggaattttgtctcactcatgttagaagatataggccagagaattaactgaatcrttttataccctagtctaaagttattgaggggtgagtttgtgaggagttattaaaaaaactaagatcatggcatctggccccatctcttcagcaaatagat

SEQ ID NO: 30084 - DNA, 201 bp, Bos taurus
ttcatattttgcattgtttttctagtaaggattcaatttaattcaaataagtcaaaaagttttgagcacctactatctgccaggcattgtgttatatgctkggcctgcatagatgaatttggcacattcttggatctctaagaggttgggtttgtagtcactcaaccacagtctttcaccagctcagcttatgagagggtg

SEQ ID NO: 30085 - DNA, 201 bp, Bos taurus
tgggattgtttctgttaaggcgaagagcagaagtctcagtgttaccaccgagaagctccagggttcagatcccagattccggccttcttgagttttcagcrctcactacacaaatggggatttccttcatttacttagcaaccatttgctgatcccttgctaattgccaggccctccatgactggataagacacactcttt

SEQ ID NO: 30086 - DNA, 201 bp, Bos taurus
agtatggatagaggagaaagaagatattaagtatcaattgtggccctcggaaaaaccacagaggctaatttccaagttttttctcaggaagagagtaaggygggtacatagaaaaaaggcccagtaaagcccaattatcgttgtaattctcatcccaaactccccactaggttggtttaggagttatgggggctgcatcat

SEQ ID NO: 30087 - DNA, 201 bp, Bos taurus
catttccaaccagctcccaggtgaagctgatgatgctgatgggaacttcacatttgcagaaccactgatccagaaaacagaagattgttttacttagcaamtttctttgctatgctacaggaaacaggaattggagacttgagatttaggttctgactgttagattttagttctggtacctaaaaacagtttgtattattt

SEQ ID NO: 30088 - DNA, 201 bp, Bos taurus
aaatcaaagacaccaagtgatttatgactttagataattttggaaagtcttggttgcaaagttgactctcagtgcttcagtggcctctttttcaagtgatwgtaatttacttgggatttagtcttcactttgctcaccatctgctcagtgataccaggtagatcatccaatgtttctaggcctcatatagtcactactaaa

SEQ ID NO: 30089 - DNA, 201 bp, Bos taurus
gaggggcctcagctgagaaaagaaacaagggcaggcacatcacatagctcgtacgtgtctgtgtggcccctttggtcctttattgtcttatttcaggccaygcaggtttgggcaatgatgacctagttaaccggatagactttgtcctttttagaagtaactaagacgctggccatatcaagcacaggcagagtcagaaag

SEQ ID NO: 30090 - DNA, 201 bp, Bos taurus
tgtgactcagtgcagccccatcctgactatgggactgggagtcagctgggggtgctcagctccatggttgctcattctgggatacaggccgcttctcatgscatgttcctcctatggcgatagcagcatcatagagagttagtcccatggtgtagagtatttcaggacttttgctcatgtaactcctgctaacatcccatt

SEQ ID NO: 30091 - DNA, 201 bp, Bos taurus
accttatctagttcttagagagggtatgaagctcaaatgagatagcaaatatgaaaaacctttgaaaagtgtgccccctgaccacagcgatatcattcatrtgagatgatggcctggagaaatcccagatttatacaagtcacagatgctgttgggcataagggccatgctgggaagctcagacataaaatgagaggctgt

SEQ ID NO: 30092 - DNA, 201 bp, Bos taurus
caactgtgaacttgaggaagctcttgaactctctggggcttggtttccatcagtataagggggcgttcatgggattgttgtgaggataaggtgagcaaacrtatttaaaatgaagggcctgatgatatgaaagatgttataattaaggtcatcaatttagagaagttcagaaaaatctctccaaggttccatctccctgct

SEQ ID NO: 30093 - DNA, 201 bp, Bos taurus
gatcagttaatttcccccatagccagctccctcctccttccctgctgggagcttctagcatgctgtgctgtgtagccagggccaggttacttatgataaasctgattaaccaaattaaccaagtgctttgctgtgcacatttacctcccactgtttactctttggccattttagtgcttgtaaacatacatatatcaaagg

SEQ ID NO: 30094 - DNA, 201 bp, Bos taurus
gcaggtgtagaccctctttatttcttcagatgacctctgaatacccacagcagaatctgtcttggcttcttcaaaagtataaagcaaggatccccaccccstgggccacaggccagtactggtccttggcctttcaggaaccgggctgtacagcaggaggtgagtgacagagagcaggaggtgagtgacagagagcaggag

SEQ ID NO: 30095 - DNA, 201 bp, Bos taurus
gggtttggggggactccgggtgttggtgatggacagggaggcctgtagagctgcggttcacggggttgcaaagagtcggacacgactgagcgactgaactsaactgaactgaacatcccaaggcctcattcaacagtccagtctgtgtgtggggaggggtgggaggtgggggggcctgtttggtccctggcccagtggtaa

SEQ ID NO: 30096 - DNA, 201 bp, Bos taurus
aaaaattgggcatgatctctgagatatctgggtagagaggtaaggaggtaaagaaacatgttaagtgggaacatgaatgtaaatgaagcctgtttcttccrgagccctgaataatttagatgggagaaaggcagatttcaagattgaggagagagttggggtttctacagtttgaagggtacatgaagcccaaggaggaca

SEQ ID NO: 30097 - DNA, 201 bp, Bos taurus
aaggccctggtatagaggctttctgataaacccattgaatcctcacagccatctcttagggttggtattgtactttagagacaggaaaatcgagacccagygaggcccagtgtcctgtccacaggcacagggctctcgtaggccccacgcaggccttgggcagagtccatgttgattttgaggtagagcagttccctgtgt

SEQ ID NO: 30098 - DNA, 201 bp, Bos taurus
tgaaaatctgtcaaaaggaattccaagtattttaaaaaatgcatgttaaatgggctttgctacagttttgaaatagattaaaattatatgcaaattaatgyaaatcatgtggcttgaagattaagttttgaagtgctatcttcattccctggagtaaatggcttttgaagaatggatgtatataaatatctggctggctgg

SEQ ID NO: 30099 - DNA, 201 bp, Bos taurus
tagcaccttctgggccaatcttaaaaattggattagtacatgaagtactttcttctttatattttgcacctcagttgaggctctacatctcagatactaarcattttaaataaggccaaatataaacctttctttcccacttgcttttgttttctaaaccattgttcatatttaaatgaaattctgtgttcctttttaaaa

SEQ ID NO: 30100 - DNA, 201 bp, Bos taurus
aatgacatggtttctgaatttcattacaactttaaaactctgtccagctttaaagtgttataagaaaagcctgttttactatacatctgcttttaaaggcraaggcagcataatttacaagaaatcactacaatataaatctgttttgttatactgcttgagttaatttaaaataaaatttcagcacattgaaagtgcagg

SEQ ID NO: 30101 - DNA, 201 bp, Bos taurus
aaatcctctgtcctaggaattacccatgaggaagggcatgccaactttaaccttggagcttcctgtgggtgttaaaaagcaggagagaaatgtgaacctgrgaaggtgtttttcgcttgatttagaacctttctgagttctttggggaaaaggcaaatattgctgagaggcactgacccattgaagggaagagacatctgg

SEQ ID NO: 30102 - DNA, 201 bp, Bos taurus
ttgagaggcggaagcggtcccagctgactggccaccgaatgctcttttcagaatctccaacccggcgtggcagctgtcccttcctgcctggacattagtgyaggcccctcatgtccacaccccagtgctttttgcacagtagtgacgagcttgcccctggagccaggaagaagctctgagctctgtaacctgaagctccaa

SEQ ID NO: 30103 - DNA, 201 bp, Bos taurus
accaaagtaacgtggaagaaaaataagcagtggattggtataatggctaattaattattagagttttgaagtccagaatacatggaaacaacccagaggartggttgcaaagctacagaaactcattttaccacttttcaattctgcctgcctctctttagaagtagtgacctgataataaacctcaaactaatttgttaa

SEQ ID NO: 30104 - DNA, 201 bp, Bos taurus
gagagtgctgcggtcatgtcctctttctgtcattgaatccagtgctggtaatgggctcttgtttagggtcctgtcctcctaggacctcaccacagcctcargggccgctgaacttctcatcgttattccccaatcttcagcgtctttaggggactccattgccttccctggaaaaggccatactccatatgttcataaaaa

SEQ ID NO: 30105 - DNA, 201 bp, Bos taurus
tctccccagaaatcccggagggaccacagccctactgacaccttgatttcagactttgggccccgagaattgtgagaataaatttctgatgctttaagttrcaattctgtggttgttacagaagctctaggagactaatgcaccaggttcataatttcttttttaatgtaatttttagttgagatttaattcacatgccat

SEQ ID NO: 30106 - DNA, 201 bp, Bos taurus
gttgatattctaggataacttttctttttctgcccaaatttgctttccttggacttaataattgtctttttatatttgtctatttatatttatatttatawttgtctatttatatttattttctatgtacaacatatagcactaactcaaggccacattcctctagttgtctgtctctttttattatattcatctgtatta

SEQ ID NO: 30107 - DNA, 201 bp, Bos taurus
ttccaggacagtccttcctggtttatgtctgttgtcctggaataattattaatatgcctctttctgtatcctgatttggatgataaatcatatggccagcyagtgcttcagccttggtgcttgctactgttcttctagacttttcctctagctctgctggtgaaggaatgctgtatgggcctcaggtccctccaaaagaga

SEQ ID NO: 30108 - DNA, 201 bp, Bos taurus
aggttcctagaagttatggccagtgctctaactggtagtcttcaccatatatcttctgaaaacctgttaaatgcagtgtgttcattttgctggatgaactrttttcccctggccctcattaatcagcttcttcaaaaggacatcattgatgatctgctgacgtcaggtaggatgtcagtgcgcagtgtgactgaaataagg

SEQ ID NO: 30109 - DNA, 201 bp, Bos taurus
gctggctcttgctggccagtaactttgcccattcctgtggagcctgggttctccagcccaccattgccccagacttcccacactcacatccacaacttgtrtttatttagacaacttgcctggcccttagggacgtgggaatttgtaattcaaaaaagacaggaaagatgaagaaagagagaagaaggataaatcccgtaa

SEQ ID NO: 30110 - DNA, 201 bp, Bos taurus
tctgagaggcagaactcagggtgcagccggcattatttatgttgtcacaactgcagtctagtgtccacagatgcagagtcgtggtgccactgaagaaagcygcagagggccatttacaaaggtccacgtctccaggcagcactataccagtacgggtaccacgggcacatctcctctctcttaaaccctctctgttaagca

SEQ ID NO: 30111 - DNA, 201 bp, Bos taurus
actcatctttctttaggttggtaaagacaggaagggccagtgcaaagaacagagcgtgatgcatgctgctcacaaactcctgtttctcagacactcccatsagtcttcaaggcccgtccaggggccttctggttcatgaccagttctccagacatgactcaactagcttacttcttaggtgtctgcttggatagcagttcc

SEQ ID NO: 30112 - DNA, 201 bp, Bos taurus
caagggccttggttcagaagagcaccagcatttctgtaagttatacacacgacatccataattactagttttgatgtcaatacccactcagacagcgattytgttcacctatgggccccctaaacaaaattgaggttcaacaaagtatttgttgaataaatgaatgacaggaaaggagcagggcacaacatttgaagaatg

SEQ ID NO: 30113 - DNA, 201 bp, Bos taurus
ataatgtagtgaagactaaaaagttaaataaaaaaacctcattggtgatacggaaatgagaaaagaagaaaaattctactgttagccaaatcaggcctaartcacctgctagatctgaaatgcacacacacaccagcacatacagtattgtcacaggtgatgatgcccttggcttctgcagtctgccaaccgcactgaggt

SEQ ID NO: 30114 - DNA, 201 bp, Bos taurus
actgctgaccccatcagactttgggactggtcaagccaccacgatcacatgagccagttcaataaactaattctctccctatattgtttctgtttctctgkagaaccctggctaatacacatctaagaaaattgttaacatttgttgactctggaattataggcctatggatagtcattatattaccttctctacttttga

SEQ ID NO: 30115 - DNA, 201 bp, Bos taurus
aatgcaaagtctatgttccttagtttttagttgtcagattttagcttggtaattacaaaaattattctaaagagaggacatgcaaggtcgtggggaggcayctatgtccgatcctgatgagattcagaatttgttctatgggagctgtaaatcaaccaaaacttgctatctcataacaagcactgtttgattcttggcagg

SEQ ID NO: 30116 - DNA, 201 bp, Bos taurus
atcacagagttgggccacctagttctcctatctaggatattcaacagggtacagagctgactaacaacatccattagccatgcctttagagccattaaaayggtcacatcaaggccacactttcccccaggctgttgtcagcaacaactgagcatggccagggtatcggaacaggggcatttctccccgatgcacaggcca

SEQ ID NO: 30117 - DNA, 201 bp, Bos taurus
tttcttcagtggacccagtaagcacttattattactaaaattgctatctgggttaatacaagtgtttaaattttatttagtaaattgtgagcatgctggamagaatctattaaattatgtacttttatagaattttgcagtgtagaagctatcatatttttcctagaaaatatgtaaaatcaagcttatagaatattcagt

SEQ ID NO: 30118 - DNA, 201 bp, Bos taurus
catggagttacaaagagttggacatgacttagcagcaacatgctaaaaagcagcaacgacatcgtgataaggcattgtacttgttcctagcacaaattcamatccatgcatagtttgacccctcaacttcttttttgggactccattagcttcattgacataagagacaaaatacctttgcatttgatgaaaactagcatt

SEQ ID NO: 30119 - DNA, 201 bp, Bos taurus
aaaatggttcttaagtttcctgcgaatcagttctggaaggttgagtcacctttgacaggaaatgtatttttcgttaggacctagaaataagaaaggataarggatattcagcatcttagtcccctttgaaggactactaattatatttttaaaaataaattttcattttcaaagacactttgtatttataaactaaaatta

SEQ ID NO: 30120 - DNA, 201 bp, Bos taurus
tcttcttcctgacaaaagctgttttttctccctccaggaataaggctgggggaataaacaaaaataagggaataggagatatcttacttgattggagactrggcagcctgtgatttgcaggtggtttaagcagatttcttctctttttctgtgggcttccaatggtatacctccagcctctttctgctaattcttctgtcc

SEQ ID NO: 30121 - DNA, 201 bp, Bos taurus
gttacataatgtcataatgcaattcagcaagagtcaactgtgtggagccagtgtaaggtcattctagggcaccattatttcatggcctgaatctagagaartgtaagcaaaacttttctagcagggaatatttagactaaatgccctctgttcatgcaatatctcataacaaactttcaacaaacttccttgttctctggc

SEQ ID NO: 30122 - DNA, 201 bp, Bos taurus
gagtatatgagtcacttttacctgcaagcttgtcagcactgggtattatgacttttcatttggactatcttttgtactcaaaatgatatatctctagatakaatttaatttgcatttgattggtagaaagggtaaactttttcatttaaaaagctatttgcatttcttttttgatgaattgatagttcaaatcttttcccc

SEQ ID NO: 30123 - DNA, 201 bp, Bos taurus
cgttttgcaccccacgttcgcactcttgggatttcaagcaactgctcgtgcaaggtcccaaagccctgtacggcctctggccactcaccccgccgcctccrgacaaaaactgaagcaacgctttcactgcccacttcctgccagctggaccaatcagagccttcgccaatccggaggcccgcccctgtctcattttcagtg

SEQ ID NO: 30124 - DNA, 201 bp, Bos taurus
ggctcagactaaggtaggtgagtgagatgtctactgtccaacactgaaggaagttctcactacaaggctgacagtgtggcctctttgatgttgtgccctcrgcatctcactcgcctcccctggtcccagccctggatcagaagctaagaatactgggtgaggaaatgccaaaagaactggtgctggtcttggcctcatgca

SEQ ID NO: 30125 - DNA, 201 bp, Bos taurus
tccataattaaggggattggatggtcctatgagtgaatcagagttggtcaaacatgggatatacagagagccagacaacaggcatctcgaatggcctaccygtacttgtggcaacaagaaatgttgttcacatccggtccatcctagaggaaatcagtcctgaatattcactggaaggactgatgttgaagctgaaactcc

SEQ ID NO: 30126 - DNA, 201 bp, Bos taurus
aaggaacattagggtcaaccattaatgtcaaaggcaagcgaagacagttccaagtattccagctaatatgcactaatagtgggctgtagctggattcaggmtggtgcaggtcatgttagcagctgcaaacaaaacacacatacacacatattcacacagagacaagtacccagagcataatataagctagctttcttgaaa

SEQ ID NO: 30127 - DNA, 201 bp, Bos taurus
gactgagtgacttccactattggtaaaaataaaagtgatgaaactttggcaagcctcataaggaaaaaaaaaaaaaaaaagagctcaactaataaaatcakaaatgaacaacaaaaaattgcaaagaacatcatggaaatatagaggatgatattggattactatcaataaagttaacaaactggacaacctagaataaag

SEQ ID NO: 30128 - DNA, 201 bp, Bos taurus
ttactgtctggttgatcattggagtggagaactcttcagtgttgccttatttaaaatcttttttaaaaaatgtagatacattctagaggccaggaattacmtctgttttgtacactggtatatctctaatacttcagtttatctctgggctcaaaccctggcctgcaataaaggagatgtttaataaatataatcaactca

SEQ ID NO: 30129 - DNA, 201 bp, Bos taurus
ttcaaatagggaaatactttaaaaaagtaaacacataagcataactttcgacttctgcataaacgcctccttttcccctcctgcgtgatgaccacctcagyggccgttgaaaacgaaatacatcattctggaaacctgaaaacatctatgtatcttcaacctggaacaaatgtgtcaagatggacttgctaatgtggaaaa

SEQ ID NO: 30130 - DNA, 201 bp, Bos taurus
acagtgcctgcagtaatcagaaacccaggagaagcagtcaccacctggctgtatgaagtctgcagaaaagcttttccacgggtcgccctcgagtgtgcttkgctgaaaacaagcaaatccacacagctcagccgggtctttgctggtctttgctctcccggtcctactgtgtgaccatgggtttcacttcttaatagaccc

SEQ ID NO: 30131 - DNA, 201 bp, Bos taurus
gccccctctgatgtccaggaggctcatgtcatgcccaatgctgctgcccatctcaaacacgcgccggcagtcgacgatggccttcatgaagttacggggtrtctggcatcttgagcccacatggaagctgaacacacatcaagtgacatgtagagaaacacccgtgaaaaagcaaaggtcagtaggaggacagacatggcc

SEQ ID NO: 30132 - DNA, 201 bp, Bos taurus
accctgggctccctcagcccaggctgggtggagtgggcgcaggggcctcaaatgtcctgacctctcaatggcgatgtggtttctgggccgggaatgggcaycctgaagtgaagaaaaataaaacaaacgtaaacaaccccaatgtcacccttctgtgaggcctccccagagtgtgacggggcatgcgatacagcctgagac

SEQ ID NO: 30133 - DNA, 201 bp, Bos taurus
atgtccccgttaatgatggaacagtccagaaagggttagaaacctgcccaggatctcccagctggggagcaccagggcctgggtttggctccagagtctgrgctcttagcatgcagctgtgctcaccttctcagggaccacgacctcctctcctgccccctccctcggagttgccctccccgagctggggcggcctgtccc

SEQ ID NO: 30134 - DNA, 201 bp, Bos taurus
ctcaactcccagactctggtaagaggttgaaaactgggtgctggcccccgaaatcagtggcagagccaaggcttaaatccaggcccatccccttggcattmcaatgttgcgcgtttatttatgtccaacgactttaactgatcatttcactttaatatagtctgatgtaacattcaatggcagcctctgggactatgaaat

SEQ ID NO: 30135 - DNA, 201 bp, Bos taurus
aaccatgccatccatgtctgtgactccagcgcccacctcagctgtcggtaagtgacagtgaatcagaaacccagacaggaacagattttggaggagggccrtggggtttggtgtcaggatgcctgaacctcagttcccccacctgtcaggtggaaacaataacccccaccctggggaatcatgaagtgaaggggcccagca

SEQ ID NO: 30136 - DNA, 201 bp, Bos taurus
cagctcagacttttccatgccaaccccttggctgggctgcttcttttaagctaacttgatgtctgtcctgatcacggggccccatcctggccctctgtccmagcccccctctcatgccacaattcaacacactgacaacctctttgacttccagttcatcccaccctccactctgccctgctgctgctaagtcgtgtcagt

SEQ ID NO: 30137 - DNA, 201 bp, Bos taurus
gctgcacttacagtgggaaccagccaggccgctgctgactggcacagggctgtgtcttttggactgtggtcctcatgtccacagttcctaatcaggccagygtctgttctttctcatctcgtgcagagatactgtcatgccagaatgtgtgccctttccccatgaaggtctgaccgaggcctccctgcccagaatcatcta

SEQ ID NO: 30138 - DNA, 201 bp, Bos taurus
gaatttgagaaacatcatttcattttccgagcctcacatgataggatatttgtctgactgagtgagtagtcattcacagtcaggctgagccagtaaattcrtctttcccattactctaacatttgtacccattgttttgcaattgttcatgggataatgattcactcataattctccatttaagtctcttcttgattgatc

SEQ ID NO: 30139 - DNA, 201 bp, Bos taurus
gccaggtcacacagaagcagggtggggtggacctgggagagccaccaaataaaagcaggaatccccccgtatgggggacatggcactgggttcacatgcakggcccataactgagcccagaggctgtggccagaccagaccacttcccttccctccctggcactgtgcccactgtcacatatgagaggcctggggggcaag

SEQ ID NO: 30140 - DNA, 201 bp, Bos taurus
atctgcacctgaagcctcgcagaggcctccaaaatgatgtcttcgctgccagagtccctctccctgtttcatcagcacccaggtacctttcccaaacgcayggccctgttgaaacaagaaaaggcactgaggtcctgtggtccacatgttgaaatgaaaactctgtccccagcattccagacccctcctactctgaatcct

SEQ ID NO: 30141 - DNA, 201 bp, Bos taurus
ctggggagggcgggcaggcagcagccagggccagacccacggagggagccaggatgcctggctgatgactctgaggatgtctgccaaggccggacagccaygtggagaatgcccaccatcctgggtgggtagacgctccaataactgcaagttccaatgccagtttcccagtttcatctcaggagagatgtgtcgagttgg

SEQ ID NO: 30142 - DNA, 201 bp, Bos taurus
gggagatggggcctccgatgacctggaagagatgagattggaagaaagcaggggtaggtgggggaacagttggagactgaaccattcccaaatctgggacrtgggtggattagggacacagctggcctgaagccccagtgatagggctcatggaaagcatttgttggttatgggggtagcaagagatgaagaaggctttga

SEQ ID NO: 30143 - DNA, 201 bp, Bos taurus
agcttctcataaccaccctgtgagggttgggatctcacaggggtctatttctactcccattttacagatgagaaaactgaggccaagaaaggtcatgcatscatctcccaagctccctctcttagtaaatgcgattcccagatcagtctggctctgacatccaggctctcaagtgctgttacctcatgcagaggcctaaga

SEQ ID NO: 30144 - DNA, 201 bp, Bos taurus
agaattccatggactgtatagtccatggggttgtaaagagttggacacaactgagtgactttcattttcattttcactttcctcaacaatagggacaagargctcaccctacagtaaggcccaaaggcaactagcctatgcacttagagctattaaagctcactgaccactcttaatcataagctcagctattattactag

SEQ ID NO: 30145 - DNA, 201 bp, Bos taurus
gcccagctggtgcaacaacacttagttccacgagataggacagtgacaaggcctcagtgttgtccgtgttccctggcaccaggatgcggaagatcttgtayaccacgatcttcatgatgcctttccggaacaagtgtcccctggcaacaaactcgtggtccatgcgaaatcccatttccatgaggaagtcagtgaggttct

SEQ ID NO: 30146 - DNA, 201 bp, Bos taurus
ctcattggcccagcttgggttatatgtccatctttgtaccagtcactgttgtgctctgattggttagatagaccagacctccttgtgtgctctcatctagmgaaataaagatggagttgggccccccagggctttatagaatgagaataggacaagtgaatctgtaaattactacaggagcatgcagtttccaaaaggtgt

SEQ ID NO: 30147 - DNA, 201 bp, Bos taurus
attcaaatgtagacaggaatgactccaaagcagaaactccactgcatcactgatgaaagacctgaatatgtaagaagcaggctggcacaaggaactgatgygtaaagcagaattccaatatattaattgggagtgagaaacgtaattgttaagtggcccatgattgataggccagaacctctttataccgtgaaaagccaa

SEQ ID NO: 30148 - DNA, 201 bp, Bos taurus
gtttcccaaggtcactgaaagtgatacagggtctcagttgtagttacacagtatgagggagggaattccagctgtgacagacgtcgctgccgtattcactkccatattcatctatactctggctcctcccctcctgagagacagaaggcccatgcctagaactgtttctctcggaaatgtagggttggaaggaaatgcctg

SEQ ID NO: 30149 - DNA, 201 bp, Bos taurus
cccctggtttcggcatttttcgccatggtgccatgatgccacatgttttgtcctttaatgtcttcagtaggtaaactgaaattacacaggggcctcagtgrgaacccgcatggctaaccccacttcaactcctgggctatttttcagaagagatgatctgggtctgtgtggggcccattcccgtataaaatctcagaatga

SEQ ID NO: 30150 - DNA, 201 bp, Bos taurus
aggagatctcacagacagttttcattacggagtgcaatgtttttactatatacaccaaagaaaaataactgcactcaacaatagggccttgaacttaaaaygttatctgagcaagcaaacctaaaattggttgaagacatggagactcacaactggatggccacagtgggcttaatccccatttcttggtaaataaatggc

SEQ ID NO: 30151 - DNA, 201 bp, Bos taurus
tgtggtataataaaaagtatatttggtctttttcctcaggtcctggcaaagagttcctaaaagccttagaatttcctgagtgataggagtgtcttttgttrttcataaagggctcctttggagcatacagagtttacctattgaggtgacctaagccctgatggccttagggtgggcagggtttgtcaccggaaagaccaa

SEQ ID NO: 30152 - DNA, 201 bp, Bos taurus
ggcgggggcagcgggaagacagcctgagccatacccccagcggtgggagaggaagggtgtgggcaagccgagcagcagtgctgtgctgtgagatggccgtyctctcacatgtcacaggattgtgacaggttgtcctgtcacacatggcgggggaagcttgacatatctcacttgcaaaccaccagcacccactgaggcctc

SEQ ID NO: 30153 - DNA, 201 bp, Bos taurus
tcccatgatcattgtaaaatagggagggaaggaaggcgttgcaagtcttggctgctctctgtggatcatttcttgggttgagggggtggtaaaactgtgcrcccccgttccctgcaaagcctcgctgtgaagcaaagaggccttctcggaagtggtggcattcggaaacacgggagggacctgggctcccttcggaatgcc

SEQ ID NO: 30154 - DNA, 201 bp, Bos taurus
cgaggcactctgggaagctactacaaaggtatggccccactggggtcacacagggttcccagacacttgaactgagacttaagaacaaacagcacatggcrtggaagaccaggacgtgtcccggccgcgatcccaggaggaaaaacacagggtttgggagccgaggctccggggccatgggaccctctgcctcagtttccg

SEQ ID NO: 30155 - DNA, 201 bp, Bos taurus
ggaagtgaccaggcagcaaaccaaaggagccagatttagtacccaaggaccagcaagaacgtgatcagagagggatgggccgggggctgccacaaaatgcrtccatcagcaagcagaagtcttgactgccactcgacctgtcaccctaaatgccaactagttggggccagcagaaacctagaatatcatttcttactcctt

SEQ ID NO: 30156 - DNA, 201 bp, Bos taurus
tcacagccctgtccacagaccagtgagtcggatccacatgcctgtctcttttcttcctctctctccttctaggcttaggcctcagcttcaccccttgaagrgctgtggcataggagaacgcctgaaagtagggagaggggtgggagctctgagggcatcgtgcccgttttactgatgaagaaacaaaggccctgaaattca

SEQ ID NO: 30157 - DNA, 201 bp, Bos taurus
aacttgtctgtcttccttctccttcctgcccgttcccaggaggcgggggataaaaatctacggaaatggtaagtgtgggctctggcccacgggccctcctygcctccttgtgtttgggcggatggagagaaagagcacggtgaactgccttgtcagtcggggtggctggcctgcgacagtgctgcccgcagccctcgggtt

SEQ ID NO: 30158 - DNA, 201 bp, Bos taurus
gtcctcctctagtcactgcctgccaatgcatctctcatcagcttcaggaaccctgtctgctaaaatggaaaaggcagggccttagtcaagtctctggagcrggctgcttggtttgcgagccagctggagaaggacccgagcacctgcagacacaggtagctgtgttctgacacgcaggcctgcagaggaatggctgcctct

SEQ ID NO: 30159 - DNA, 201 bp, Bos taurus
aaaaaaatggaattagtggccaagggatggagggacgggctagccctggttggggacatctcagggtctttagcaacgtgctgtgctcgggggtaggcctyacctggggagttgcccaggactccagaggaggggatggatttattttggtcagtgagagggcactggttgttaaccccacacatcccagtggccccctca

SEQ ID NO: 30160 - DNA, 201 bp, Bos taurus
cacggacatgggtggcatctttggagaggacgacgtggccggtgaactggccgggggagaaccagaaggggaagtcggggggctcgctgagctggaactcrgcatggatgctggagggaaaagacctggctgggagtgggtcccctggcggagcagagcttgcctgcccacccccttctgccccaaagcctggaacccacg

SEQ ID NO: 30161 - DNA, 201 bp, Bos taurus
ggcctagaggatcctctttggcctcttacacagtgattattcaacgtgcaaatgtattcacatctctactccaccccccacacacacttcaagatttccarcactccctgtgaggcccacaggtggagcaagagtgggtgagacacttccctacgcacatgtacgctcttggtgcagggtctgcaggcagacaaaagatgc

SEQ ID NO: 30162 - DNA, 201 bp, Bos taurus
actatgctccagtataaaataaaaattaaaaaatcaaatagattcaataaaactaaattaaggggaaaagataaacttaagcagcctagtttgaatttccrtgcacttaaccatgatgcttcacagccccattttacagtcaggttgagtctcttgtcatataatcagtaggcataggagccaatatttcaactttgtagt

SEQ ID NO: 30163 - DNA, 201 bp, Bos taurus
aatatgtatattttttattgaagtatagttgacttataatgtttcagatgcacagcaagatgattgagttatacacattttttggagattattttccagtrtaggttggttcagttcagtcgctcagttgtgtccaactctttgcaaccccatgaatcacagcatgccaggcctccctgtccgtcaccaactcccggagct

SEQ ID NO: 30164 - DNA, 201 bp, Bos taurus
cagattttttggcaagtgggtcaggctgggggcgggtggctgtctctggaatgcatcgggggctacctccaagcagacgcgggagagacaggcatcttccrtgaggccgtcccaccaggctgggctgagggagcccagggacagcaggacgcaggggtcttgcagggctgtctggctgaaagggggcagccgagcccccca

SEQ ID NO: 30165 - DNA, 201 bp, Bos taurus
ctcctccggctggctcaggaaggcctgtccttgaatctgtagctgccagttctaactgttaaaccaatgcgacgtgagtgagagcgggacaaagagttgaygtgtctctgaaaactaagaaagggcctcagaaagatccaacagaggagaactgtccaaagaagaagagaaatgccgaattgagtgtgggcaagaccatga

SEQ ID NO: 30166 - DNA, 201 bp, Bos taurus
gctctgtgcacctggaggcggccatctgtgacctacctgcttggtctttgggctccctgacccccctgctgggttcagccagagggaggcgctgctggagrggctccttgctcacctggcctgccatggtttgggcagtgtctgcattccttctgtgaggcacctcccttcccagagctattggcttcccgaaccatctcc

SEQ ID NO: 30167 - DNA, 201 bp, Bos taurus
gcccctctctgccccagttcgagtcacacctcaatttaaacggctacccttaccctgctccttcccacacacacacactctcccaggctcagaagcccccrttggtgtggccccagcagcctgactggttttcttttttctttttttatccaagtatctttgcttttaggggcttccctggttgtgactcgtggagtcgca

SEQ ID NO: 30168 - DNA, 201 bp, Bos taurus
tcctttttactgtagacattctgacagttgtgatttttcaaggtagttttgatttgcatttccctgatgattagatatagaacatttttcatgctcttctyggccatctgtgtgtcttccttggaaaaatgtctgcccatttttcaactgagttgtttggattttttctgttgagttgtacgagctgtttatatattttag

SEQ ID NO: 30169 - DNA, 201 bp, Bos taurus
agaatcagttattgaaactgccgtcctcattaagcagaaaagtgggcgcccgtgctcaaggttcgcggtccggctgggcgtggagagaagctaggccaggyggacaggaggtgttggcgacgtggtgggcaagcagagcagcaggtattaatttgctgtaaagtaaggaaatttgcgggcctggaggaactctcccagtgc

SEQ ID NO: 30170 - DNA, 201 bp, Bos taurus
gtgctgggcctatgctgctgcacgtggactttctctagctgtggcatggggtgggagggcgctccctggcggtagtgcccagcttctcattgcagtggctyctcttctcccagcacgcaggccctgggacacacaggctcaatagtggcggggtcccagcttagttgcctcacggcgtgtgagatcttcctggaccagcga

SEQ ID NO: 30171 - DNA, 201 bp, Bos taurus
tttaccaacttttattcacttccttttccgaggaccaagccagggatggaatgcaatggaaaatagtcaaagtgcagagcccagtatcagataaatacttktagggtgaagcaatgaatgatctaataattggtctcctagcctccaggctcttcccactccatttttatgctaccggctatatatatatatatatatatg

SEQ ID NO: 30172 - DNA, 201 bp, Bos taurus
cagaagaaagaacagcaatggaacaggggaaattattgagtctgaggaacagaaacaaaaaagatagaaaaaaaaataccatctatttggccatgaattartctcaatagattttttaaatatatatttttcagagtatcttctatgaccatgactaaatgaagttgtgaggcttcccaggtggctcagtgataaagaatc

SEQ ID NO: 30173 - DNA, 201 bp, Bos taurus
caggtagagaatgacaatgactggatataccgggggcccaggaagccatggctgtcgctgccatcattgttattagttttagagtcacagacaagagccarcctagaggatgctgagggcccggcccagctctgaaaatctaaatcctgtggttgcagctgggggagtgactccaggaggcacctggtaagaggtggctcc

SEQ ID NO: 30174 - DNA, 201 bp, Bos taurus
gaatggcaaaaagctaagacttgagagtcgctcagcttggtgaccttgagccaatgtgcttaccctctttgagcctcagttttccagtctgtaaaacagargtgataatgataccaattttatggactgttacgaagattaatgagttaaggtaagtaaggcacttggaacaacacaaaatcagtgtccaaaaatgactct

SEQ ID NO: 30175 - DNA, 201 bp, Bos taurus
tgtatcatcccgggagggggtggagagacggatgcagaagtgaccttggggcttcttattaaggaaccctgcattagaacccacactggctttgtagcctygagggcctgggcctcggaagatgggagcgtggtgggcccctcagcaataggacttccttcccctgaaagcttacttttcaagtcactgatatttccttac

SEQ ID NO: 30176 - DNA, 201 bp, Bos taurus
aataggcctgtctagggactggaagcagatgagtagctgcttaaggctttgaaggaagggagaagaggagggactgctaatgggaacagggctttattgaragggggccatggaaatattctaaaattggtgtggtaatggctgtacaactccatgaatatcctaaatagtatacttcaagtagttgaattgtgtgctata

SEQ ID NO: 30177 - DNA, 201 bp, Bos taurus
agaacttacttgctctttctccaccatgtgagggcttagcaagaaggtggctgtataaagcctagaagagagctctggccagaaaccagattaacggacamcttgatcttagacttcccagtctccagaattgtgagaaatgaattgctgctaagtaacgtagtctatagtattttattatggcagcctgagctgactagg

SEQ ID NO: 30178 - DNA, 201 bp, Bos taurus
tcctcaaggtgcatctgtgttgcatgctgtagcatgtgtcagaattttcttcatttttaagactgaataacccttcatggtatgtatgtacgtttgtgtaygcattcatccactggtacacacttaggttgcttccaccttttggcttttgtgaaaaatgctgctatgatcacaggtatggggaattcccttgtggtccag

SEQ ID NO: 30179 - DNA, 201 bp, Bos taurus
ccatggcctgtggcctgtccctgcccctcttctcccctctacttctccatctgtgcaatgggtgagttaggctaattagttcgtccagcactcaggtcacygagtccagtacagggcccccagcacagcccagtgattcttccctcccttcacccagcaccttctctcaccgcaggtgtgcgccaggttactacggcaacc

SEQ ID NO: 30180 - DNA, 201 bp, Bos taurus
ggccgagaagggcccttccccctgatcctgctgccccagtttgggggctactggattgaaggcaccaatcacgaaatcaccagcatcccagagacagagcygctgcagtcgcccacgaccaaggtgaagctggagtgcaaccacactgcccgcctctaccggaagcactttctcggcaaggtggggtggccctctgggctg

SEQ ID NO: 30181 - DNA, 201 bp, Bos taurus
cctcaagctgaacctacgaggggctacgttttcaagcacaaacaaatagactcagggaaatgagttgggagcaaacccacacagagcaatcccctaaaccrcgagactttgctgtcatgcaagagagtcccggaagagtttgcggagtcccagaacatgggagctggaagggccctggcgagcctctttttctgctctctc

SEQ ID NO: 30182 - DNA, 201 bp, Bos taurus
taaggaggagtcagtacggagactaagcagggaggggagacagctaagggttgcatggacgggcaaaccccaatctcagcaactccactggttcaccagcygaggaaacgcaggcatggtgtttcacttttgagtcatttccctcccttgaaaagtgggctgttagaaggattaaaagcacgaatgtatagaagcatttag

SEQ ID NO: 30183 - DNA, 201 bp, Bos taurus
ccagatggagtgctcccccagcatcctgggccgcccgtcctttacactcatcagagcctgagaggaaagcggtattctcctcctgtcacaggcaggcgtgyggattccggcccactgagagcctgtggctcacccaaagaggcttctctctctctcctctttctgtcacaacaaactgcagcccacacatttttgctgggt

SEQ ID NO: 30184 - DNA, 201 bp, Bos taurus
gcccggcctgccatctggtggcaggttcgttacactggatccctttcatcacagaagtagcatagacttgctctcagtacaatagacatttattccagctmaggttttacattctctgctggccgtgcttctgctagcaacttcattggtagatttactgaatgtcttactaataaccatggtactatcatgcagagtgaa

SEQ ID NO: 30185 - DNA, 201 bp, Bos taurus
cccggaaggcagtctgtgcgagaatgtgtctagggcctgggatggggtttgtatcacatcccctggtgagtgcggagagatacttatttaatctgaccctkgtcccctacctgcagggccttgggagaggcagatgtggcgtcagacgagtcccctgcccaagccgctgtgccgtcaggttccttgctcgaggtgccaatc

SEQ ID NO: 30186 - DNA, 201 bp, Bos taurus
tttaagataactcatgtatgtggttactatggtgcctggccaggccaggcggtttcagtcagtggttcccctaacactcccacacccatgtctatggcccrtccacttcggttgggtgcctcctccaatgaactatgttcttccttcatttcagagctcacttttcaagaaaatcgaaaagtcatcactgtcatatggacg

SEQ ID NO: 30187 - DNA, 201 bp, Bos taurus
attcactgtgcagcctgatggcgatacatttgctgctgtggctagctcggatatgtggacccaggactctaatggagcacggccccgaccctccagcaagrtgttcacacttggctgagaagacaagtcgcacagccataaggagttacaaatcagatccttctcagcacagtctgagtcaaggctggaagagcagtgcag

SEQ ID NO: 30188 - DNA, 201 bp, Bos taurus
gggaaaccgacacccctcacaggcaaggggtcaagccaggacccaggacctggcaccctgctgggctctcagtcacttgtcccactggccccagcggcccragtcctcgttaagaaggtgcaaagaggtgacatgaaaagtcagaggctgaggattcagagcccagcaccatcactaatggcctggctgactttgggcaag

SEQ ID NO: 30189 - DNA, 201 bp, Bos taurus
cctggatttggtgatggacagggaggcctggagtgctgcagtccatggcgtcgcaaagagtcagacatgactgagcaactgaactgaactgaactgtcccmaaaatccctggccgcgaagcatctggcactaactctcacacaacagtaatcctgctgctaagtcacttcagtcgtgtccgactctgtgcaaccccataga

SEQ ID NO: 30190 - DNA, 201 bp, Bos taurus
tgaattcatagggaaaatcctgaaagatgaaaaaggagaggcagtctgtgacatcaccagagtccttgaatgcggggacctggacatgataccaggggccmccaggatacacgggggtggggcagtttgcctgccatagagacaacagtattcccaagttgaagtgcttagtaaaaggcgaaggcctagcccatcacctct

SEQ ID NO: 30191 - DNA, 201 bp, Bos taurus
ctgtggccttagaggccccattaatgggtgttgagtggaatggacaagtgcaggaagtgaatgagtaaggaccgctcttctagaaaatttagcctggattyctctgctgggtacccaaggcagagcgcaccgctgataagaaggatctcgtgtctgggagaggtggacatcaagactgcacgtttcatggtaatgtcacat

SEQ ID NO: 30192 - DNA, 201 bp, Bos taurus
tcccttgggagagtaactgcccgctggacttgccagccaaagccagaacggctgtcttgggtcaagaactgtgcttttggacaatagactcacccctgccrtggatatagcatagctattaataaactctttggggctggggaacgaactacttgaacgggacaaaggaagggggtctcctgttccttttagtccaatgcc

SEQ ID NO: 30193 - DNA, 201 bp, Bos taurus
gctgggtgggtagagggcgtccctgaactgaccttagagtctggaaagctagctgtgtaatctcgagtgcgtcattctacctctcttggcctcttttctcrtcataaggtgggagtcacgatacttcacagcgttggtggtgctgtgctgaaaggcttcggaaatcgggagcagggtccaggctgtggctcacatcagagg

SEQ ID NO: 30194 - DNA, 201 bp, Bos taurus
acaaagagcccacaggctgcacagtgaggccaaaaaaaaaaaaaaaaaggcaacgggggggctcataggattagaacaccacacacaggtgaccttaaccraggccccagttgggaaaaatcggcctcccatcagagtgggggcccccaggttctgttcctctctgctcctgcactcgccttcccccaccaccctgtcttt

SEQ ID NO: 30195 - DNA, 201 bp, Bos taurus
agtcattagggcagagtgagacggggagatgaccttggatggtgaatgaacacccagcaaaataactgagtcacagagtaagaacagaggcctttagagcrccctcccagctcctctggttatgtcaagagaaagtctcatgctgatgctactgtatctttaacgtccctccaacatctaacaaggagaaagcaggccttg

SEQ ID NO: 30196 - DNA, 201 bp, Bos taurus
cttttgaaatgggcaaggggatgacaatccaggagatagctcaagagagtgtgttccgaggccacttctcagaacaaagacagacttctgtacaaggccamtgcagcctgataaaggttcccccagtgggtccccaaacaccaaagacattcacgtaaatgagttcaaaatacatattgctctgggccaaatcacacagtg

SEQ ID NO: 30197 - DNA, 201 bp, Bos taurus
ccactgctgggaaacgaggggtgcccagggagtgtgggtcagggctgggggcgagcgcctcaggcctcgtgtgcagtccctggggccttcagtccatctcygtgccatctcccacctgcggctgctccgtgtgcccagctgaaatctgatcacattacagtgtggccttggagagaggtcgctcagtcgtgtctgactctg

SEQ ID NO: 30198 - DNA, 201 bp, Bos taurus
aaagacacacatcggacttggtgtcagacttggagagatctatataaaactcttagaagaaaagataagggtgagtcttttttaccaggattaggccgtcmttttttagaaactagaccaaaagcaccgtggcgctaatggatgcgaatccgcctgagcgcaggaaacagaagaggtgtgggtccagtcctgggtggggga

SEQ ID NO: 30199 - DNA, 201 bp, Bos taurus
aatggattggccttggtagcaatttttactttgggatgagaaaaatagaagttcaggtcaacttaccaatcattggagaggatctagggttaatggttaaraggcaggcctgggttcatacctcagctctgccaataccagctctatgaccttgaccaaattattcaacctctctgagccccacgccagtattcttgcccg

SEQ ID NO: 30200 - DNA, 201 bp, Bos taurus
agagggtgcctcagggtcaacgccaacgtggtcccctggccccccacttgcaggacgtctccaggaagagtgagcgcagcgccctgaacgaggtgcacttrgtgctgatgcggctcctgagcgtcttcatgtccaggaccaagtccggatccaaggcttccgtatgcgaggtgtgttgctctgggctaatggctgtgggga

SEQ ID NO: 30201 - DNA, 201 bp, Bos taurus
tgggggccccagatgcagcacgcagcacagcccctgtcggtatcgggggccagccctcctcggtgcggtcactgagttcaccactgaggccttatcaggcrccgcttctctggagcgtctgacctgagccccgttcacgttcactgtgctgggtgctctacctgattcagtcatcacagcgaccctggcctgcccccgttt

SEQ ID NO: 30202 - DNA, 201 bp, Bos taurus
actgcagcctctatgtaaccgagcactcagcatgcatcaggcatgtgttccagacgctttataggcatgactgtctctggtgtctctgcctggcaatatgytgggtttctcttttaaccctcacacgagccctgtggggtatattgccctccaatttaaaggtgagacagcggagacctggagagagaatagctgctgttg

SEQ ID NO: 30203 - DNA, 201 bp, Bos taurus
agagatgcttcatttctcccccaacacgcacttttcagaggcttagtcacttgctgaaggttatacccagcgttggtggcagacttgggactcgggccacrtctgtgtaccccagtcccatgttcttgcatctctgctgggctgacaggcagctgcactcctggctggcagccctctggccctgtccttccctccttggtt

SEQ ID NO: 30204 - DNA, 201 bp, Bos taurus
ggagttatcaggcctgcttcggtaggaaaaagaggctcagagaggttgagtaacctgcccacagtcgcacagtgcacagagcagatgtcccgtccaggccrgctggagtcaggttacctcgaggttcccggagtgtagacttatgcttcagcaggagctggtcaaggacataggtctgctcctgggggcccagcgctggtc

SEQ ID NO: 30205 - DNA, 201 bp, Bos taurus
ggttaaggtggctgtgtggacccctggcggcccggaagccagagcagacctagaatccaccaccttctgagtctgaaccgcttctggggtagacgtgtgtrgggtaggggcccccgcgcgttgcccctggggcactggttactcctgggtagccagggtgcctcaggcctggagacggggaggtgggagacagtggaggtg

SEQ ID NO: 30206 - DNA, 201 bp, Bos taurus
tctttggagagctctgttcaagtctctcggccatttttatatgggtttctctatttcttatttattggtagaaaaagttaaccttctggacatgggtcctytgtcaaatattaatatgtgcaagtaccttctccctttctgtcggttgcttttcaccttcttaatgtgtcgtttgatgaacagaagttcttgatttaacat

SEQ ID NO: 30207 - DNA, 201 bp, Bos taurus
gccccggggtgggttgcagccttgattctcgctctgagcctcagtttcctgtctgtaaagtcagaggtttgccttcccctgagggaagggcctgtgcttcycggcaccagggtaattaagagtctggttgctgggatttccttgatggtccagtcagtggttaagaatcaacgcgggttcgatctccggtctgggaaataa

SEQ ID NO: 30208 - DNA, 201 bp, Bos taurus
cacatggctggtctgtaatgatgtgaagttcaaagttcagtcagtctgactttctagaactctctggtctggatttgcaacaagttccctgggatgggccrgtgaaatatgagaatgagtgtgcaaaacggggctccagagagaaggtgcttctccacctttggactttgcacatgctgttccctccatctcaaacactct

SEQ ID NO: 30209 - DNA, 201 bp, Bos taurus
gccagatatgacatttattgccaagccacactgtagccagagggacagcgtggacacaaaaacgagaaacagttcaaagtggctttggccctgagcctaakgtctgtgttcaaaccccgactctgccgttttccagctgtgtggctttcctcgctggtagaggcctgtctgccccagggagctgtccagataggtgactag

SEQ ID NO: 30210 - DNA, 201 bp, Bos taurus
agcagaggggatgaggctggaggccaggaggctgttaggaggctggggcgcaatcccaccccagagaagacaggcccgagggagggccacagaggggaggyggaagagagggtgagggcaagccgccccagttccttgcccacctctaagtgctgttaagtgccctgtcctgtgggactcagagaaaagccatcccaattg

SEQ ID NO: 30211 - DNA, 201 bp, Bos taurus
tagaaaccagttcaggaaaagtgaagagaaaggacacgtattggaagggttgactggtagagataggctgggctgggggctgaagggggctggccaggggrgcaagctggtggtgtattgtcgtcagtcagtcagttccgtcgctcagtcatgcctgattctttgagaccccctggactgcagcacgccaggcctccctgt

SEQ ID NO: 30212 - DNA, 201 bp, Bos taurus
ggcctcagttttaccatctgtaaaatgggtggggaattggaaatttcagccctgtggtgcaagacacttgttctacccatggaacagtgggtggagaatcygatcctgtcggtctgggggccaggtcagaggtctctccatggtgccagaggctgctgtgaatgtctctggttggggagccccatcctctgcttcctccct

SEQ ID NO: 30213 - DNA, 201 bp, Bos taurus
tggaatggtttagccatatgataacatttccaagaattaagtccagtgagtacaccattcagtgtaaccatatagtgacaaagagggtaccagctttaagyatcacctctgcccatctttgttggcaaggcgggtggtaggatggaactcaggaacctcatcatggcagtcctcccacaacaccttctttctctggatccc

SEQ ID NO: 30214 - DNA, 201 bp, Bos taurus
cccttcttcctgtgtttcccatgacctgtcctctgccctacggtcccacctgccagatctgtgtcctgaaagactgccagactctcatcttggggctctcygacatatcaaagaaagttgcgtgtcctccgagggcgagtcacccactcatcttggggctctcagacaaatcaaagaaagttgcgtgtcctcctagggcga

SEQ ID NO: 30215 - DNA, 201 bp, Bos taurus
ggccacctcaaaccttcccatccaagacaaaagatatcacctccagccccacatgtggagggcatacaataagccaagcaccagaacgaagccgtatattrtaagagaacaaggctgggcccacattctcaaacacctttattctcggtgttcctctgggacggactcttggtaattaatcgtcccatttcagagatgaag

SEQ ID NO: 30216 - DNA, 201 bp, Bos taurus
tattcccaccacggccctgctaggaagcctgccttatttcagaaaaggatactgatgctcaaacaagtcacatgactcaccccaagttacccaaaatgacmccccaaatgtgggccaccaacaccctcatcgcttccctggtggctcagatggtaaagaatccacctgcaacgcaggagatcctggttggatccctgggtc

SEQ ID NO: 30217 - DNA, 201 bp, Bos taurus
ccttggggcccggaactaccacctccttctatcagacaaacgagaccaacggagccccaagtcaggcagtgagcaggaagggggctccatccacccaccgygctgccttccacagaggccatgctcacaatccccaggctcgttgagaaacactgtctccagtggagacagagtcaccaaatccctgagtcttcaggggcc

SEQ ID NO: 30218 - DNA, 201 bp, Bos taurus
gcagacggtgatggtccacgggactccagcgagcccctctctgcgagttactcaccacctgcttccacccttgagactctggctgtttcacttgaggaacyagtacctgccacgctgtgtggcctcaggccagttgcttaacctctctgcgtctcaggaacctcttcagtcaagagaaatgagcagagtttgggaagcacg

SEQ ID NO: 30219 - DNA, 201 bp, Bos taurus
tctgatgcttccaaactctccaacccaatgggaaacccacctctcacgtcctctgctgccatccctggccccttagagtcctagacagcttccttggcccrcctgcacgtgctccagtctgttccccaacgaacagagcatgctcttcctgtgctcagaagcgctggtcccagccacacgcagcatcgtctcggacggcac

SEQ ID NO: 30220 - DNA, 201 bp, Bos taurus
ccacacacctccctcttttcttggtagcctttcggttctgcttagtaactgaaacagagcatcacaacctcactgactgaagccaggccacctggaattcrggtaggatcagagctggacgtcacgccgtgtgactcatgacagttctgagatccgcattcctgcctggtttccagctgtggagtctcagctgcctgggcc

SEQ ID NO: 30221 - DNA, 201 bp, Bos taurus
gctgggacaccctgcacccatccttatcttctctgagtctctttagcttattagaaccctgctttggtttgcaaactatgaagtcctagacattgtgaacrgggattgatgccaaaatcttggttccctgttcaccgacgctgaaaagaaataaggagacagattggagggaaaataaaaaaggaagagtggtttcattct

SEQ ID NO: 30222 - DNA, 201 bp, Bos taurus
gcgatgatttcttagatatgacaccaaaagcatggacaagaaaagcaaaaatagacaaactatttcaaactttaaaacttctgcacagcaaaagaaacaaytaacagagtgaaagggaaatctataggatggaagagaatattggcaaactataaaactataaaagggcttagcatctagaatatgtaaagatctcttata

SEQ ID NO: 30223 - DNA, 201 bp, Bos taurus
ttaacctcatgtctcacaaagtccaagtccagcctctgaaacaggtacagaggggtcagccacagagaccctgtggctgtctgtagcctccagagatcctrtggctgtctgtggcctccaggctagttgaagctcacagtgagaccaggttagtttcacattagctttaaagagaagaaacaatgaagactcctgacttcc

SEQ ID NO: 30224 - DNA, 201 bp, Bos taurus
acctttaataagcttgacaagaaaagccacaggtaaatattctctgtatagggaaaaggacagccaaagtttgaataaattacagagaaagtttcaaaagkttgaccaaaaagttcaatctaggggacttccctggtggtccagtcattaagaatccatcttgcaatgaagggtcacaaattggaaccatggttggggaac

SEQ ID NO: 30225 - DNA, 201 bp, Bos taurus
ttggttttctcatactgttagccccaaactgaaaaggtgtgtcagtttaggttttccctgggtgccagctctcaccaggccactgcaatactttctgcctrtgaaggctcgttagcagattaccatggcgttccctgaggaattgagatctctggcctccctgagggttggcaggcagggccacctcatggtgggtaggtc

SEQ ID NO: 30226 - DNA, 201 bp, Bos taurus
ccttggaaatagaaagtctcacaaacaaaaatcatatgcttattcttaagctggtgaatgattcttttcatgttcttaagaagtaaaatttcttaaacttyctatctttagaacaaaaaagtcaacatactcattcctccaaattctggaagtaagataaatggccagggatgaagagcccttagaaaggtacagaaataa

SEQ ID NO: 30227 - DNA, 201 bp, Bos taurus
tagataagcaaaaattcaaaagcttgacaacatactgtataagtgagtgtggtggggagagggacaccaggctctttaaacaattctggtgggatgctaartggtgcgagaccaatagaaaggaaattagcaatccctcacaaaactacgtatgcattaactctttgatcagacaagtctatttctaagaatttactctga

SEQ ID NO: 30228 - DNA, 201 bp, Bos taurus
attttgtgttggaagggccagttttggcttgatgcagtgcttctcaaaatgtcatccccagacctgcaaccttggcatcatccaggaacatgttagaaacrcaaattttcaggccccattgcagatttactaaatttggaactatgggggtggagcccagtaatttgtgttttaataataggctctacaggtgattctgat

SEQ ID NO: 30229 - DNA, 201 bp, Bos taurus
cgctgcaacaagccacagcagtgagaggcctgagcgccacagctgcagaggagccccggctcaccacaactgagaaagcccttgcacgacaacgaagatcyggtgcaaccagaaataagtaaaaggactgcaaaataataataaagttgaaagggtaagctgagaggctggcacctcatcctgtgagcaaatgggcaacac

SEQ ID NO: 30230 - DNA, 201 bp, Bos taurus
aagatggattggatatcagacatacctgatcgtcacaaagaaacatcttttcccatagctcttctgtgggagacaaaaatcataagttggcctccaagatytccatactttggtgtatatgcctctcattagctccttgatgatgtaaaggacatgtgactatgatgagatagcactcctgtgattatattattttatcct

SEQ ID NO: 30231 - DNA, 201 bp, Bos taurus
catcaagggcaagcagctctttcgtgaggtccagaacagaaaactggccacagacaggcagacagacgtacacacacacacacctttcaaaggtctccacrttctatttttcttttatatcactgttcatagtgctggaagtttcatccatggaatttatgttgactgctgctagaagcctggacaactcaaaactgatac

SEQ ID NO: 30232 - DNA, 201 bp, Bos taurus
gaatactggaagaggttgccatatcctcctccagaggatcctcccaacctagggattgatcccactcattagcctatgaaattacccagcccattaaaaastacctacctcatattttggggcctctgaccttctgagatgcccatgctctgtgcagtgtttttctaagtaaatttacttcttatctattgctttgtcctt

SEQ ID NO: 30233 - DNA, 201 bp, Bos taurus
cccgtgccctgacctctgtacatgctcttctctccttctctcacctcttccctttttttcttgtggttccctcctgcccatcctccaatgtcagctcaaakggcctttcctcaggacaacctctcctcatccccaaatcctctgttatatcctgtcattgactgtgtaccactggttacgatgatggttttacatttatct

SEQ ID NO: 30234 - DNA, 201 bp, Bos taurus
gaatcgggcggcctaccgggagccaccagagcagctgacagagctttccagaagacaagaagaggagggtgaggatgactacaggcatgaagaccagaggmacgccggccgagagacccctgaccaggctggccgatgatccgggcctgctgcaggctggggccagtgggaggattaggggtcatccccctgcctccaggc

SEQ ID NO: 30235 - DNA, 201 bp, Bos taurus
aatatgcaactgatatctctagtcaaagtgggaacaaaagggaacttctttatcctgataaacagtatataccaaaactaaaaaagagagagaaaaacgayagcaaacagaacactcactggtgaaagattagaaactagagttcacagccaacacactaggacaaacaggttttaaacgttttaaataaaagatacagac

SEQ ID NO: 30236 - DNA, 201 bp, Bos taurus
catgcatttgggtgttctcttctaaaacagtggtctcattaatgaattgttctggtgtatggaaacacttctgccaaattctcattaaccacagtggagtmtatagcatagcagaaatgagtttaagcagataagtcttcatcagttttcaattttatgtcggctaaagttacaaaatatgacaagatcacagaaaacact

SEQ ID NO: 30237 - DNA, 201 bp, Bos taurus
tacctatggccaattcatgctgatatatgccccaaaccatcacaatattataatgtaattatcctccaattaaattaaattatttttaaaaagaaccaagrcatgtgatatctgagagagaattccaagcagagagtctgagacaggcacttggactttttgaagaaggaaggaaagccttatgactaataccaaaaagat

SEQ ID NO: 30238 - DNA, 201 bp, Bos taurus
gacaggaagacagggtggtaggcaaatctaagaaggagataatggatttagtttgtatttcatgacatttgtaatgcccatggtaaattcagattttgatrtccaatgtgctgttggaatgtggagcccaggagagggatcaaactgaaaggttgcggcctcgagctgtgtgctctgctgggactcgacctccagaggaga

SEQ ID NO: 30239 - DNA, 201 bp, Bos taurus
tctgcaagcctgcaattaagcaatctcccatctcaaagttagactggggaaagagccccttccaagttcacatggtggttgacaggattcaggcccttcakgctagaggattgagggcttctgtttcttgccagcagttgacccaaatcttctcccaattcctagatggttttgtccagaagccattcacagctccttgac

SEQ ID NO: 30240 - DNA, 201 bp, Bos taurus
actgggccagcccagattcaatgagtaggggaaccacagaagaatatgaacaagagatgtgattcactggggcattttcatagactagccaccccagtttrccttcactttgggcccttaacttccaaagagataggaaacaggtttagagttatgcagctacaaacatagcccattttaatgaaaatggaagaatgactc

SEQ ID NO: 30241 - DNA, 201 bp, Bos taurus
aaataaataaatttaaattaaaaaaaaaaaaaagcctcaaagacataactttctaataaagctcccagtgccaggttttgggcctattttaagatgtaatmaattgtgcttcaaacattttggggagagagcatggcattctccacccagctccatgaggtgtttatgaaataaaatgcgtgacctacttgatacttgtct

SEQ ID NO: 30242 - DNA, 201 bp, Bos taurus
tgacaatttgtttttcttcccctgtaatcatcaacttgttatataactctagatttctgaagttaatttgcctaaaagttgtaactgtatttagtgaaatyttgctgataaatagcactagacttgtggatgaacaaatttcatttccttctaatcttggttgtaccccatatccgtaggataattaaaaatcttatcttc

SEQ ID NO: 30243 - DNA, 201 bp, Bos taurus
gctcagtgggcatgattacaaatattttcacaattagacattttctcagctcacaccttaagtaaagatcctctggcagggtagaaggggtgcttaatacytgtggcccctcactcatgtagtaggaacaggatacttatagtttagataaagactcaaaaagaattaaatgatagagtcagggttaggtatgaggctcac

SEQ ID NO: 30244 - DNA, 201 bp, Bos taurus
gggtgttttagtaatttgtcgtattcacgtacctcgaagtattttgagaccccatggactcatgtccatcgagtcagtgatgccatccaaccattcatgarggtgggccctgcacaaatgggataaatgtccctgtaaaagagaccccagagcgctcccttggcccttctgttgtgggaggacacagccaagacagccgtc

SEQ ID NO: 30245 - DNA, 201 bp, Bos taurus
cagagcatgggctttgggccaggcagtctgggctcagcagctgtgctgtttcttgtcatcttgtgagctggttacttagcctctctgagcatcacgaaaaygaggtaccaatggccaaccgactgagttgctatgaggattactcccattagatgtgtcatgatgctcggcacacggtaaggcctcaggagcggtggctgc

SEQ ID NO: 30246 - DNA, 201 bp, Bos taurus
aataacattacaaataaacattacaataacattacaaataagcttcattggctaaaaggactttgagagatgaagaagggccacagaagcaggttggaaakgtggcttgattgagggacgtgtcggaatgaggctaattcttcacacactagtctctctccctttgttgagccctgcaactaaaggtctttaattatagaa

SEQ ID NO: 30247 - DNA, 201 bp, Bos taurus
aagtgttgctcactttttttgcttaggttctggctgctttctgaatgcttactcatttgaggaatgaaaaccatttaaattaagtttctccagataacatygctttcttttctcccctaacttaacaaaaacattccgaatcaagccagtttgacaatctgctttaagcagctgcctaaatcagaagttagcgagaggtgc

SEQ ID NO: 30248 - DNA, 201 bp, Bos taurus
tctaagtcaatgctatctgacttactatttgcagtcccagattccttggttaatcctgctcctatacaggggaacttgaaggtggctgagtcctgtagctkgataggcttgatctctttcatggaccttgatctggcttaccaagctctgaattcccatgtagtgtacacagtgaccagctcttctgttaatacctgagaa

SEQ ID NO: 30249 - DNA, 201 bp, Bos taurus
tgaagaccagtataatccaggctgccttcatgattccatttccattaggatttcttctgattctaaaagaaattaccatgccagctttctcgtgggccccyccaaaagcaggcactatgtcaaatgtcccagtgggcgagcggtcgcggaggagcccagcactttgctgaacgccctggactggagacaaaggggcgggcc

SEQ ID NO: 30250 - DNA, 201 bp, Bos taurus
ttaggatgtattgggaagtgatgatctgtgtaaattttcttcaaagaaccagataatcagtttgactttgtgggtctggccataggcatctatacaactaytcagtctgccattgtagtgcaaaaatagccacatagataacttatgagtgtagctgtgtttcaataaaactttatttacaaaacaggtgatgggttgtgt

SEQ ID NO: 30251 - DNA, 201 bp, Bos taurus
ggtcactaattaaaatcaattttatgtccagaagagacttctatccaggtgtgtgttatgacaacttggcgctccaaatatcaactcattaaaatgtctcyatattgctcctcttacttcactgtttccatgccttacctccccttcaaagcacacacacgtgcacacacacacatacacacacacacagaggtgagctca

SEQ ID NO: 30252 - DNA, 201 bp, Bos taurus
agaaatggtatgtaaaaaagtatcaatatattgtaatatagtaaatgtaatatgtgcactttaattttagtgtaccctagcatgtggatgtgaatactttkctgaagctggtagttgaatgaagccctcctttagaagtttaataataataagattagcaatgataaaatttaacatttaatagactcttagtgagataaa

SEQ ID NO: 30253 - DNA, 201 bp, Bos taurus
acttctcatcttggaattaacttatggggattttgagattgaaattagagtcaaagaagctcttcctgaaaagcctctgtggtttcaaatataagatggtktaggccagggtcatatgaaataccatcattagtgatcttaagcttcagattcaactattatacttttcaaatgcaagggtaattgagggagtttaaaact

SEQ ID NO: 30254 - DNA, 201 bp, Bos taurus
gctcatagcatctatactcctaccaaactaagataattaactaaagtagggttttgtaagcccaaggaaagagacagccattccttataataacatacttygtttttgccacagagggtgctctgggaaggggcctatttttggttcttcttccaccctacatcctgcacaggatctgaggctccctcacgtcctgtcagc

SEQ ID NO: 30255 - DNA, 201 bp, Bos taurus
ctaggacactggtaggaatttactttggcaggatacattctactcctaagaatctacagttaccaccctgagggcaatcctgaaatgatgagaaatggacraaaattctcccacctctcatgcttcaggtagacaattctgaaaggtattctgtaagttcgttaggttgtcccagtgaaggccagacctcacacaaaggtg

SEQ ID NO: 30256 - DNA, 201 bp, Bos taurus
cagtagcaaagagttggacacgattgggcaactgaacaacaacaattccagctgcaccctctgctgaatcagggggagggtgggggagggagtgccactaygtaccagcctcacaagatgtcagtggtaaactacttttcataaatataaggtcattggtaggacttcgagagaacagttttatctttcagggtaaagaga

SEQ ID NO: 30257 - DNA, 201 bp, Bos taurus
agctcattgtcataggtgctatcattaataatccttatgaccatgattacaatgccatctactcagtgtgctggggagagagaagcataggcagcagacartaggaaccagatcctgtgggatgcaaggaatattcactgtattgtactatcgctcacactggctttcagacagagtcccagcgaggtgatactggaattc

SEQ ID NO: 30258 - DNA, 201 bp, Bos taurus
taagtttctaggtcagtaacaaagcactattactgacacgtgtctaagcacatataattaggcttcctaattgttaaatacccttgaacaaagacaacatrccataattttactaaaccactcattgaagtaccttccaaaggttattcgtaatgatctcaaaagagttcatttctgctaatactcaaactactcccaact

SEQ ID NO: 30259 - DNA, 201 bp, Bos taurus
gtacaccctgagcagtgattgggaaaatctcctgttaagactgaggctcatctggaccctaggctggtacagtaagtaggaacacgtacctgtcacattakggaactgcaaccctgaggccgctgaacacagtttatccagtcctggtttgttactggtaaatagtacattcctagaaaaagaggttttttatttaatact

SEQ ID NO: 30260 - DNA, 201 bp, Bos taurus
acacatgggggttgcggccagggaagtgccctttctacaccgtgccaaccccagactccgaacctctaatgcataatgttcccaccagagacaggagtgaygaggggagtggccagtgatctgtgtttgacagcaaacacacgtgggcacctctttcctaagccttgggttctttcaggctgaggatgttgagttattgag

SEQ ID NO: 30261 - DNA, 201 bp, Bos taurus
tatatcatatttattctttgggagagaaatggatgcagagtgagagttagcagtttgaagtttctttatttcttcccccgccccttggttaatctggaacygtattataacatgaaacacattgatgagatattggcaaagaaatctaattggtgtctagtgggaaaagatagattctattctattaatatctacacccat

SEQ ID NO: 30262 - DNA, 201 bp, Bos taurus
gtcaaaacaatattgtttgtgaaaaaggatgatgctaatttttccttttttaatcttctccctcccactccgtctattactctggttggaatcactagtayaatattacatattttcctttttccaattattatttcttccatacataggttatttaaaattctatttcttgtttcaaaatactataagatttttcaaaat

SEQ ID NO: 30263 - DNA, 201 bp, Bos taurus
gcgtcatccctgtccaccacctctgtggtggcctctggctgggaagcatcagctgggctgggttgggcggaagacgagacctggggctgcccagatgacakctctgtcccatactccagactgcttaggacaggctgtgacgaaatcagcatgtcctgggtggtcttcagggcccgaggggttcgcttcctggtggcagga

SEQ ID NO: 30264 - DNA, 201 bp, Bos taurus
agtatccagtcatccaatcaaaaactaatccaggtgttgctgtaaacacattctgtagatatgattaagatccataatcagttgactttaagattatcctmagtaatctaaatgggcctgagaattccatgaagaaaaattctgccaggggacagcagctttagtccatgcccaagagctcgtctgagagctcgccctaaa

SEQ ID NO: 30265 - DNA, 201 bp, Bos taurus
tgcatccaagtgagatttaaagtctacaatggatttaccagacccacagctggccctctccccagaatgtgttggcataagcattgctgagggcttcgccyccagacgtaaggatgtggtggcctttgtgtttctggtctggaaggcaagatcaaaagatcattcctgacactgggggatacatctctttaccaactaatg

SEQ ID NO: 30266 - DNA, 201 bp, Bos taurus
atgctgcctgggccctcctaaacccaatgaattatcaataaatgtttgtcagttatgtccttaatggaacttaagatctatgacagttatggagatacacrtgaaatgtactttaaggcctccaaattaaaatgttgaacaaaaatgtaaatggtgacaacaacattattctgtctgtgttcgtgagtagaaggtggacac

SEQ ID NO: 30267 - DNA, 201 bp, Bos taurus
gcctcgcttggcagagcattttcttacccacgcccccgccttctgtcatccgaactccctgctccgccgcttggcgccgccctaggactagatccacaggrtgttgcattcagtaagggcgatttgaagcgaaagggccgagggagagcagccaacaagggagtccactctggtgtggctaggtctccggagaaaaggagc

SEQ ID NO: 30268 - DNA, 201 bp, Bos taurus
atttgtgtggcctctgaggctatctagacgtgaggggttagaggtaggcaggttagcaaagccccaagaatcctttacatagtacacctttaccagcagtracttgtatctttaaggacctcctcctccttcatttttctttccctcctgaaccttcccatttccctgcctgtggccccttgaacctcttccatgtctgcc

SEQ ID NO: 30269 - DNA, 201 bp, Bos taurus
cacagacacagcagtgatggtgctcagggcacgggccagaggtgtggcctcagcagggagcagcttgctgagcactggaggagagagcagcctgcctcagkaggcgttcccagtgcagttttggccaccctccttaggataagatccccacagggatgagcagttcaagggcatggtatggtcctgttggcccaggaagaa

SEQ ID NO: 30270 - DNA, 201 bp, Bos taurus
gtgtggttgtatcaaattgaagtaaattacataaaaatcctctctaactgtttaagccagaaaagaaagaaagaaagaaagagggactttcttggtggtayaatggataagaatcttcctgccaagagaggggacatggatttgatccctgatctggaaagattccaaatatggtggagcaactgagcccgtgtgccccac

SEQ ID NO: 30271 - DNA, 201 bp, Bos taurus
ggtagatttgaaaacagaggggaataacactaatgctttattcttgtcaagatcagggtttacaaaccattgcccatgacctgttttttatggccagtgarctgagcatgggtttacatatttaaaggttgggaattctctgtggtccagtggttaggacttcaagttttcactgtcaagggcccgagttggagaactaag

SEQ ID NO: 30272 - DNA, 201 bp, Bos taurus
agggggtctctgggctcattccctctgcagatggcctgtatcacctccgcactgagaatggtgtcgtctaccagaccttctgtgacatgacctcttggggyggtggctggaccctggtggccagtgtccatgaaaacaacatgcttgggaaatgcacgttgggcgatcgctggtccagtcagcagggcaacagggctgact

SEQ ID NO: 30273 - DNA, 201 bp, Bos taurus
tcttggtgacagctacccttcatcagaccacttcaggggtcccatagaaatctgcactgttattttgggctagtcattagcttgcagtggatgagggccayagtgataagtaaggtatttatctattaatttgctaaatataattcaacccctccagctcttttgtctgtgacacattgctgcttatggggagctggtagg

SEQ ID NO: 30274 - DNA, 201 bp, Bos taurus
ggaggccacggcgctttcagcccctggggccacgttccagaaaaaagaacggctgtccagctggatgcagcagacaaggcagagggggtgcactttgaaawtggaaactcgggccagatcctagtccccccttcccctgctctggccaagaaaacatccatatcctggggcaatggctagacacccacagtccagatcctg

SEQ ID NO: 30275 - DNA, 201 bp, Bos taurus
tggtagccgtggcccacggggacctgctggagctgggccccccggccaaccacaccccctgtgtggtacaggtgcacacactcaccggggccttcctcttytcccttgagtcccagaccaccattggctatggcttccgctacatcagtgaggagtgcccactggccattgtgcttcttattgcccagctggtgctcacca

SEQ ID NO: 30276 - DNA, 201 bp, Bos taurus
tgcaggccttgatggttaatgtagagaacattttgctgtgggcaagagaggaaggttgtttacagctttctctccccagacagtgacactgtggtctggcrcgctacgccctatggcctgaccttctgggggtggccccggtaccctctgggctggcaatccacagatggggtcttcaagggatttcccccaggaagggtg

SEQ ID NO: 30277 - DNA, 201 bp, Bos taurus
ccgctgctcctgcgctgtcacagcctggcactctcagtcgctgcccctgaccttgggtgtgtggtagctcctctaggccccatggtccattgcagccaccrtgcttctggggacgtttcgaaagaagttgccattatgttcatcacctccaccatagtttggcctcagatcaaacaccaaggagggaacacagccccaccc

SEQ ID NO: 30278 - DNA, 201 bp, Bos taurus
attcaccatacggccaagaaagtccttatgtatttcttaattgaccatttcttcctctttactcaggcaaaagctagtcatttaatgtctcttagtgagayagaggcctgatacagtgactggcacatagtgaaaccagatataaatgaataagtgaatgactgaataaattaatgactgaataaatgaatggatgaagat

SEQ ID NO: 30279 - DNA, 201 bp, Bos taurus
aaatgcctttccccaaggtgctccgtccaaatgggaggtcttactatggctgagggttaggataccttgtaatatatgaggacagggaaaggaaaaccccrgagggcccacatgatgactgagtgaggaaatctttacgctggtggtggaaaattataatctagtctactcctgggtttggctggatgtcctgtttaaaaa

SEQ ID NO: 30280 - DNA, 201 bp, Bos taurus
caactcagatgttcttttttgccatgttggccattaataattgcttcttgttcacagtaatgggctatgaccgttatgtggccatctgcaagcccctgagrtacacagtcctcatgaacaaaggcgtgtgtgctaggttagtctgtgggtcctttggcactggccttgttatggcagttctccacgtaatggccatgttca

SEQ ID NO: 30281 - DNA, 201 bp, Bos taurus
tttggaaaatcccacacaccaaggcactctttgacttcagggtcattctcagctgggttctccttcttccttacaggaggccccaaggactcagcctcttkaaagcttctctgaaccacagagccctacactccttcagaaggatacttttgtccctaaaagtgacatgattttctttaataatgataataatcatggcca

SEQ ID NO: 30282 - DNA, 201 bp, Bos taurus
agctctccccggctgtctgaggcccacagcttctcggtgtccacggcagatttgtcgcaaaggaaagcctgcatcgttcctccaacatggctggggagctrtggcaaagacaccctcagctccagccacccgaaaggtggcccagaaaacaggtttccggaaaccatgtgctgacggccctctgaactcttcggcccccaa

SEQ ID NO: 30283 - DNA, 201 bp, Bos taurus
tccaagtagcctaggcaattttggaaacgaatatcaaatttggtggtctcccacttcctgattttaatcaaagcagtgtggtattggtataaaggcatacmtggaacagaccaatggaataaaacagacagcacaaaaataaaccctcacatatatggtcaaattatttttgacacagttatcaagatcatttaattaaga

SEQ ID NO: 30284 - DNA, 201 bp, Bos taurus
aacacagcaaggtgtgcagcacaggtagagaaagctttgtggcggccttcagctgagggcatttgcagaatcaccacaatgatccggaggtaggatagggygatgaccaggaaggaggccaggatctccactgcatggatggcatccataatgaccaccagggatgtatctgtgcaggccaagctcagcacaggggtgaag

SEQ ID NO: 30285 - DNA, 201 bp, Bos taurus
tacagatgaagaaaccaggatctgaattgtgtagtgagttgcccaaggttaaccgattatttagatctgtttaacatagagttagacacatgaattctctygggggaaagtaaacactgggcttgaattcattccctgtcctgttttagtttgtgtgactctgaaaaattcctgaattatctttgagtcacacataagttt

SEQ ID NO: 30286 - DNA, 201 bp, Bos taurus
ctacagtttaaaaagtttgatgtaaaaataaatgatgagattgtcactgctcttctcaataagaaaataaaagtccctaaataaaatgttcatattgtttyaaatgagaatttaatgcccagtgacatgctgatgtctttagtctcagacacatcgtggaatcttctattaaactttctggtgaaatttgccaaaattacc

SEQ ID NO: 30287 - DNA, 201 bp, Bos taurus
caaagacaggaaacccagaatttaggggaaaagcaagatacctcagcaaacatttggcagccccacagacccatacatagtagacaaccttcaaaagagcygtggacctggagtcagtgatactggaatgaaactaggctgatattctcgatctctaggttggggaaaccactctatacacacatgcataccacacattca

SEQ ID NO: 30288 - DNA, 201 bp, Bos taurus
cattacttgtaatggctaagaaaaggaaatggtctatcaatttataaataaatttatggataaacaaaatcaggtagggccataaaagtgtgtcagatcaratcagatcagtcgctcagtcgtgtctgactctttgcgaccccatgaattgcagcacgccaggcctccctgtccatcaccagttcacccagactcacgtcc

SEQ ID NO: 30289 - DNA, 201 bp, Bos taurus
cccatctctgggcctcagtttccttcacctgtaaaaggagaggaccaagctagatagacagtgctccagcttccctccagctctgatagtctgaggctctyaactaaacataactttggccttgcctttaaccaccccacagccagccccacaggaacccacccaccggctctggagacccatccacagacccttataaat

SEQ ID NO: 30290 - DNA, 201 bp, Bos taurus
agctcaaaaagatcttagaaaaagtggagtccagaatcaggtctttcctaaaaatggacattgagacttggaataaagaaaggcctagaataggtcaattragttactcagttttcttttgctccactctgttgctgacttcaccagtcacaggccatattctctgtagaggaaaaggatgaagacatcacatgcactggt

SEQ ID NO: 30291 - DNA, 201 bp, Bos taurus
aaaggaaggtctgactacaagagtcttgtagtcccattgaatcacacttgtgtaacaattcagtattaattttaacccctctctaggccacagtctccttrtctctacctcatggggctgcagtcagaatagagaagtgggagtaggggtagcacttggcctagagttaaacagtaagttgtctgtcttctgctacttaat

SEQ ID NO: 30292 - DNA, 201 bp, Bos taurus
ggagtataattcaaaaacttcttggcaaaactgcagcctcacccagttttgctcagtgttgcattttatgcgctgggactttatttgccaaaaactttgtrgaaaatttgagattcacatcacgtctctctcctcctggccaatcactttggggcctagtctttttccttttctttaagaatttgattcattgccttcact

SEQ ID NO: 30293 - DNA, 201 bp, Bos taurus
ttagaagagggccagccttttttgttctttccagctttcaattgattgatgaggtccacccatattaagaaggacagtctgctttactcagttggccaatkcaaatgctaatctcattcaaaaacaccttcacagacatacctagaacagtatttgtacaactgtctaggcaccacatggcccaatcaagttgtatgtaaa

SEQ ID NO: 30294 - DNA, 201 bp, Bos taurus
agatcttattataaattctcctgctatgccatggtctagtgagcaatgccctcatcactttcatcatcttactaagtaaatctctctaatctcaacacatrtgtagaggcctcttcttcctcttgagcgatatgtggtcagaaacctaataggcaagtctttctgactgtcaacattaccaaacatctgtgaaaatccttt

SEQ ID NO: 30295 - DNA, 201 bp, Bos taurus
ctgggcctgatgggggaggatggactctagactgtgtggccctgatggggctctgtccactgatcatggctctgcagcgtagtgactgaggcccatttcayctctcagggactggctagggaagtgctgacttggtagcagagacagcagagctcactaaatgatcacttgcttcccacgtattctattccctagcagtta

SEQ ID NO: 30296 - DNA, 201 bp, Bos taurus
ttttggcccttgaaatagtgctgatccatattctaaaactaccctcactaaaaccccaaaaatgcaagcagagctgtttagagagcacctctggtgggcargggccaagtagtgtgtcacctttggggctctcctctccctgcaacctagagcgggcaccacagtgagcccttcaggcggtcaccggggtctgggcactgg

SEQ ID NO: 30297 - DNA, 201 bp, Bos taurus
agagaaaacagagggccacgctgggttcccaagaggggcttgaagaggagcaccccctcactccttgaaaggctgagaagtgaccacagggccgctggggrtcttctctttgaaggtgccctaaacaggctcacctgttcacagtccctgtcaggacgcaggaataggacaggacaggatgaagagccagagcagaggcct

SEQ ID NO: 30298 - DNA, 201 bp, Bos taurus
tacccacagctgaatgtgatgtggtttccggctgtcagggtcacaccaaggccattcaagcatcctctttctgcaccctctccactctcaagctccatcgytgatgctaagggcacatttgcaaggccacagcccaaggctaacctgaagatccaggacaactctggcccttccagagaaaggccccaggacagatcttat

SEQ ID NO: 30299 - DNA, 201 bp, Bos taurus
ggcaggatgagaggaaaatgcaatcatcccggggagaaacagcagcctggatcaaggctgaggcaggggctgaaaaccggcacagggaggccacccttgcyggctttctccacctgactttccccttttgtaagatcttctcttggatcctagagaagactcctaaaaggggaggggccggtccctgcctagggtggggag

SEQ ID NO: 30300 - DNA, 201 bp, Bos taurus
ccgagcctggggagaccagagggccgggagagaagtaagggcagatggggagtgagaggtgctttgagcaggggcagcctggcaccgccgctggatctagrctgactggggattgagggccatttctgtcacctcccagtctgaattgagcaagtcacttaaccttgctaaacctgtttcctcatcagttacgtaggaata

SEQ ID NO: 30301 - DNA, 201 bp, Bos taurus
ctggaggaaagtgtccaccatggtgtcgaaaagcttcaccctcgaaatgttagtgccggggcgcgcaggttcctgagacaattcctcgggccctttttctkcacagccgctgcctacgttgacgctgctcgcttcagccatgttgaaatagaaccgccaaaaccgactgacccggccgccccgcccaccgaagcctccgat

SEQ ID NO: 30302 - DNA, 201 bp, Bos taurus
tctcctcggctccctctttggttttaaggcagatacggagtttctcggaagcagggagaaaagggggggaattgagatagatgcgcgcgtttttttttggyttatgtttttccttcggtataaaaccactgtagaaaataacttctcttagaaaaacaaaaaacaaaacatagaagaaaaaacaaagggctatttttcttt

SEQ ID NO: 30303 - DNA, 201 bp, Bos taurus
atcccactcttcaccacctaattctagccccgcctgcctcccacgtgcctcttgctgcctccctgcattggagctcttcctgtgccctgcagccaggcctytctccacacccagcccacagttcagtcagtcgctcagtcgagtctgactctttgtgaccccatgaatggcagcacgccaggcctccctgtccatcaccaa

SEQ ID NO: 30304 - DNA, 201 bp, Bos taurus
agcaaacagccaagacatgagacagcagttgaagtttattcttgggaagaacaaagtccccccactccaatctcctgcaacagtccaggaaggtttccccrgggagccgtgccccaccacatggtcatctcactcttctgaatcccaggttccaccaacgcccattatgatgctgctacttgggtgagaggctcctccaaa

SEQ ID NO: 30305 - DNA, 201 bp, Bos taurus
catatggtagcctcatgtctgttgaaggcccagcaagctcccagctcccagggaaagaaagcctactttcgggaggaggaagagaaccgtagccctgccaygttcccagaggcccagaattgagccacagtaggtagcagctatcctttcgtgatcagaaagttttgagaagcaggcatcaatcggcagagtggagtaagt

SEQ ID NO: 30306 - DNA, 201 bp, Bos taurus
ggatcaaacccctgtcccctgcattggcaggcagattctttaccactgggccatcagggaaggttccttcctgagtgttttgatttagattatttttttcycttgtgagttatagtatatttagattttctgacaaggttaagtgttctctttgtattgtttttgttttgtattttcaagaatttccttctgttacaggca

SEQ ID NO: 30307 - DNA, 201 bp, Bos taurus
tatatctgctcaaggagacgggaccatgggagtctggtctgccagcccccacagggcagagcaggccttggggtggggcctccatcttgtaggagactgartagccatgatgccgaggcttggaatgagactgtgtcagtgttgccactagcacacggcctaagcttgtgtcagtgacttccatgtctccgcctcagtttt

SEQ ID NO: 30308 - DNA, 201 bp, Bos taurus
caggggtatatgactctgagtctggggctgggctggaaatgagaacacagagaatcagactgtggggaaagactggccccctaagccgggtcatggccccytcaggcttccttcttctccagcagcaccaggcttcctccttgtcatcttgctgccttcctcactaactcagaatccccagacatgcagcaacctcttttt

SEQ ID NO: 30309 - DNA, 201 bp, Bos taurus
agtaactcaagagtgcctgttcttttttttaattctgctgtatatgcagggtctgaattcagaatttcccagagagggccacattaaggaaatcctaagayagccgtatgtctcctttttattttgcacctcttctcttctagtaattcatcaatatatcagcatgctaccagaaaaggccagagtgatgtgcctaaaact

SEQ ID NO: 30310 - DNA, 201 bp, Bos taurus
tgagtgtaaagaggaagtgaggccaatctcaaggaatttgatctgatctggggaatttattcaaattctcaaccacagaatactctggctctcaaggcagycagccttctagggcccttgtaagtcaacagaagcagtggtggaagggtgaggtgtgcccgccagctttgaccatgtcttcagtgtgacttagggagggct

SEQ ID NO: 30311 - DNA, 201 bp, Bos taurus
acaaaattagaattcagaaaacagagcctctcagaggcccaccagatcctgattccttgaatactctattacagtggctttgaccaactagcttttttttyccagctttttcagctggttgctgaaggctggatctgatgctgagctgattgttaagatactagctgtcctgaggatgaagatgaggcctgtagatgaagg

SEQ ID NO: 30312 - DNA, 201 bp, Bos taurus
gatcaaagggtctggggttaagatggaggtacaagataaatcattattatgctgagttgtttattttacctaattctcttaaggccccctgatggaacctrtggtatcctcattttcagaaagcaaaggttaagctatctgctcaaagcaacacagccagtaagagacaaggcttggatctgaatccaagtaaaagggatc

SEQ ID NO: 30313 - DNA, 201 bp, Bos taurus
gcctccaaaccctccagaacacaaacttgaaacccacacccttggggcgccaggacagtctccgcctcttgagagagaggaacgtcttacctcagcgacakgggcctcaacaagttccccctccccagggccggcgcgccgggtagctggagcagcgggcttcccctctgggaatcccatttctcccgcgtccgccggccg

SEQ ID NO: 30314 - DNA, 201 bp, Bos taurus
aagcgtatttttcatataatttatatttctagtcaattcacttgattcccactaagattatttttgcctcttaacacaaaccttccatatgtgttgtgggyaaggtctattcaaaagaggatgaatagattctgaagcttagagtttctgccctggactcagaatttttgtgattttctgtgatgagaatgtattattgat

SEQ ID NO: 30315 - DNA, 201 bp, Bos taurus
agtaaagctgggcatgctgctgaggccatgcccttcaaggtcttgaggacaataattactagaacaaaagttaaagcagtactttattcagtgctggcacyatgcaggcctccatatgctgtatttcttgtcctccaagagccctgcaagtcaggtgtggtcaccttctattttactcagtgtttttctcctcaatttcaa

SEQ ID NO: 30316 - DNA, 201 bp, Bos taurus
ctgctcaagggcctcctccccaacccccatgacagtcatcttcccctggtcaggtggtcacagtctctacttcctgacattccttctgatcccaggcccckttcacctatcttcctgccacacttcgtggtctgattacttgtgcacccagtaggtcctcactgaacacctgggttttctgtgttcaagggtgggaactag

SEQ ID NO: 30317 - DNA, 201 bp, Bos taurus
ggtcatgtacaaactgctatatttaaaatgaataaccgacaaggacctaatgtgtagcacatggaactctgctcagtgtcatgggccagcatggatgggamgtggggggttggaggagaatgtatatatgtatttgtatggctgagtcccttatcagaatactaccacaactttgttacttggctacatcccaatacaaaa

SEQ ID NO: 30318 - DNA, 201 bp, Bos taurus
cgcggatgccctccggtggctcttccaggtaatgacaacacaaaactgcccagagagtagagggtaggctctttattgggaggtgattgctgtaccacagraagataggagtcagaggagacacaagcagtgtcagccccagaaatgtggatctcctctcccagggaatatgtttcttcagaaaatcccacgaggctagga

SEQ ID NO: 30319 - DNA, 201 bp, Bos taurus
ggggagttctaggcagcagggaaagcagaacaagtcaaggaactggcccaccagtatttcaataacacttactgtgtgccaggcatgcgataaccatgctraacaagtcatgtgaggccactgccctcagggaactcacagccagtgagtgagcacatgtgctgtgtgtttcatctgtactggacagtgaggaaagcctct

SEQ ID NO: 30320 - DNA, 201 bp, Bos taurus
gaagtttgcattctcttagttaaaaattgctgtgtcaaaggacatgacaatttcaaaattctgaaagatatttcaaaatgttatttcccatccagaaatgrgattcctccaaggcttcatttatatttgctaatggcttagtatgtttcctcattcttaaatcatatctgtcaaaagtgtataccaatgcatcatgtgaat

SEQ ID NO: 30321 - DNA, 201 bp, Bos taurus
aggagtattttggcttcaggcataatcaacaatagcataaggatttgcttgtgatagtattccgccccccccacacatcttttctcagttctgcttcttcygttagcttatcccttgcacagcaacagaatctatcctgttggtacatgttgatcttgtatccaccatgatctgccactctctaaaccacaatgactaagg

SEQ ID NO: 30322 - DNA, 201 bp, Bos taurus
ttgacacaaggaaattccttgaaactgagaatggagagtggaagggagggagaatgtctcctgatgtgggtggccaggaaaccgggggccaggaaagcatsagaggagagagggagagaaagagagagagagacagagaggggaaaaaaacacaggattgaattctaatcaaaatgctatgaggcgttcacaccaggcctt

SEQ ID NO: 30323 - DNA, 201 bp, Bos taurus
gatgccgtgaagcgaatattctcgggcattcagcctacaggaatcccccacctcggcaactatctgggagccattgagagctgggtgaggttacaggacgrgcatgactccgtgctgtacagtattgttgacctgcattccatcactgtcccccaggacccaaccatcctccggcagagcatcttggacatgactgctgct

SEQ ID NO: 30324 - DNA, 201 bp, Bos taurus
gaaggaccaacaattaattgactaaaccacaagaggtccctaggtagatgttgactttcatcacttcaccttcctcctctatcagtggggttgaagacaayggctgcaatgaaaaacaggcctgtcctagagcagagaaaggaaagtaaaactatttctccaagggagagagaaaaataggaagctagcatttacaatctc

SEQ ID NO: 30325 - DNA, 201 bp, Bos taurus
ggatggaagccctctagatctggctggtgaggcccccgcccaccttggtggcatgctgccagactccaagcaggggcagtggtttgggggtggggagcccyggggaagcacaggcccaccctgtgtttagtgctttaagagaaacacaaacaaactggagcacattctgggtagaacctcagccctcatgataggaggggc

SEQ ID NO: 30326 - DNA, 201 bp, Bos taurus
ttttgattactacttcagttactacaagtgaggcaagaaagggaagcttttctcaaacgttactcgagaaactgcaccaccttttaaaatctacacatatktttttcttccttcaaagatgtacccttcagacaaagatttctgaggattggtttttcatctaagatccagttcctggtgggtggaagtgtgaactgtggg

SEQ ID NO: 30327 - DNA, 201 bp, Bos taurus
gaggaagtcagcgaggacagagggagagcttcagagcctcagaggagaatacagcaactggtttgcagcagctagaacagagagaggcctgcagacagtcygtgccacccctctacactcccagcccgagacgtgtgtccactggtgcatgtgagggctagatgtggaagctcgggcctcagggtgggctgtgcaaaaaca

SEQ ID NO: 30328 - DNA, 201 bp, Bos taurus
gccaagtcaaatggggactggttatgtcaatcctcagtaatcctgaattcttatgtcaggacaagtctcgccatcttcagcatgatagtgctggcctcagraaacatctccaagagcattcccaatttagttcttactcctccacaccaatttctttataagtctgacagcagctcagaattagtagattcttctctgctg

SEQ ID NO: 30329 - DNA, 201 bp, Bos taurus
agcaccagaagatccatcaggaagagataggtggagacagcagaaaacaggcatggccagggaaggaggtcacagcaacgctcaggacctagggcctcctygctgttgtgtggtgttccctccaatccctatgagcagtcactgctcagctgggctcagatcagaggagtcacttgccagggcattggccacagtggtctt

SEQ ID NO: 30330 - DNA, 201 bp, Bos taurus
tccccctggttcaagccaccttccctctcacctgaattactgcaacagtctcccaattggctgcccacctgccctctactctcaacatggccaagccatcrtttaacaactcaagttgtctgacatctttactctgtttaaagcttcagataaaaggcaagacctcacaggacagggccctctttgcttctccaccctcct

SEQ ID NO: 30331 - DNA, 201 bp, Bos taurus
tatcctgggtggtgactgaaaaaagcttaacccaagatctcgcagagccgcatgtcacatcctgtctagaagagggctttcccaggcaggccggaggctcyctcagcattccgtagttattgccattaggtcatagtctcaggttctttgacagacaggtaacatacagagaagtacaggttacggcatgcagtgctccaa

SEQ ID NO: 30332 - DNA, 201 bp, Bos taurus
ctggggaactaagagtgccacattcttgtgccccccgtgagaccgtgtgagagaggacggcgcggagcaggaaggccagtcgggggcccgtgcggctcagygttaacctttgtgctccagatttccttttgtgctgttttcagtgtgctgggaagaatagccccacggggcagaggcacaaccctccttgggtggtggcct

SEQ ID NO: 30333 - DNA, 201 bp, Bos taurus
cccctcatcttcatgtttctgcactgtttatccagcttcatctctggttgccctcctacatcatgattgctttttcctcactctcatgaccaggcactttycaaagacaggatccatgtttcatgtgtccagcccagctgctgctgctgctgctgctaagtcgcttcagtcatgtccgactctgtgcaaccccatagacgg

SEQ ID NO: 30334 - DNA, 201 bp, Bos taurus
ctcagcggctcacagctcaggcctggcaccttgaagtattgttcctgcacttgcctggctggtgctgctggctgttgattgtgagctctgctgggactctkcactggagtaccctcctcgtggcctcttcctgggccttggactccctcacagcatggcagcctcaggacttcttccatgatggcctcaggttgcagagtg

SEQ ID NO: 30335 - DNA, 201 bp, Bos taurus
atagagagaatacacgtgttaaataagcttcgtttaagtatcaattatggtccttctggcatttcagcactgtttttgagggccagtttagacagtgaaayaagcaacaaaaaagcacaaaatgtggaacacgtgggcactaaagagatcacaaataggattgtgtctacagtacaacggccaaaacatgagggcagagtt

SEQ ID NO: 30336 - DNA, 201 bp, Bos taurus
cgcagttaggggagcctcattcaaatgccaggcagacgcaaatagcacgctctgctctcctatgaatagcctgcccagctgttctgcaggaggccaagccrgttctcatccaaagtacatgtgttcttatttatgagctgcatcagatgccgtcggcagcctacctttggcccttcaaggccagcttcgtgcgtgttcttt

SEQ ID NO: 30337 - DNA, 201 bp, Bos taurus
gcagcttaacactgcttggctgtccccagggctgttatgctgtccacttatttcagaagtgaccgtcatactgtgaccaggtcacagaggggccagagttmagccaagtgagagtggtgccctcaaagaagaaggggagaaggtccaagaggagcttgaaagcccactctcaggagcaatgtggagtgagaaggaaacagt

SEQ ID NO: 30338 - DNA, 201 bp, Bos taurus
cccagccagctcatggagcacctgcaggcctgggtgggctccagtcacaggagtctgcagaaagaaaaggcaggaaggggaatcaagaggctggcctgaayagggacaaagccatgactctgtgggggtgtgggatcacattgggcttcacagccctctaggtaaggggcctaaggcagtgccattaacacaataggcttt

SEQ ID NO: 30339 - DNA, 201 bp, Bos taurus
gtgctggagagaggcataggcagcgcctgcgggctccagtgggttaaataaggctcacattggggctccattgggccatggttactctttcctttccatcrcctcaattctcaggctccgctttttgcctggggccagctgtgaccacactgacagctacctaaattaattatgagagaatgcaccttttccatcctcaaa

SEQ ID NO: 30340 - DNA, 201 bp, Bos taurus
ttctctgtatagtactgtacgataaggtacacaaaagcataaccactggtagaggatgcacgcaagtgacaatgtaagccagatacatgaaccaacttacrtgactggacatgcaaacacatgcgtacatctttgaaagtccacagcttgaaggttcatactataatggggtataaaatagatactggttaaattagtgag

SEQ ID NO: 30341 - DNA, 201 bp, Bos taurus
agatgccagcacagcttattaaatgaactgaaaaaaagttcacagaggctggagctgtaggaaagaaaaggaaactgcaggagggggagatgaagaggcgygagaggccggatgacacagggctttaaggaacagaggatttatgttactgcaatggatgataatgaagagactctgaagctcctagtgggccaaatgctt

SEQ ID NO: 30342 - DNA, 201 bp, Bos taurus
agtaattccagggtcctggcgcagatctcgtgagtcagtgaggaagtccagaggggagtcctatgcacccatcagtagagggactgcaggcatgcaggttktgtcctgtatcacagcagcccccaaccttttgggcaccaggaagtggtttcgtggaagacaattttttccatggacttagtgagggtggatggtttgggg

SEQ ID NO: 30343 - DNA, 201 bp, Bos taurus
attacataatgtttggggataattggccagaaaatatgtgaaagtacttagagaaggtgactcaggcaagacctatagttcctacatacacacttgacttracactgtggccaatcatacgagattgacctgaaaaatttgtcttgggttcatagctgtctgtctcaatttaaggaaggaggaaacagattaaatgtcatt

SEQ ID NO: 30344 - DNA, 201 bp, Bos taurus
ccatcaggacacaactgtttgctttttccacatcctcactacttgttatcttttttttgtttttttccgaccagggacaggtcatgatagaaaaaaatcaraataagagcaaatattctattttgagaacagctgagaaagcatttttgactattacaattatttaacaaaaaagttcagtaagaaaatgtacacaaccca

SEQ ID NO: 30345 - DNA, 201 bp, Bos taurus
atgaggcccacctgcattgtggaaggtagcctgctttactcaaagtccacttatttaaatgttgatctcatccaaaaacacccccatagaaataatctttractaaatgtctgggcactaaggccagtcaagttgacacataacactaactatcacaaccactttcaactctattaggcgtttaatctggtactcacgtcc

SEQ ID NO: 30346 - DNA, 201 bp, Bos taurus
aatgaaactcagagagtcctcctcagtttttccctagaggaagtctctgctcagtgagacatagttatcccccacacacagataggcctgacctaccccaracttgggacattgctgttctaaccaaactcacatatgtaaacattttccggatttttaattacttccaacgcagagaatacatttggaggcccttgccag

SEQ ID NO: 30347 - DNA, 201 bp, Bos taurus
gaaactagtgcttttatttgtctaaatattgtggttagtgaaattaaaatatctcactttaatacagtgttcagaaaactattgtaatgtttttcaaaatkctgtgttttgttaagccttatgaatttctgttaaaaataaagcgaagtaaattttttattaccttagagatacagttaatggaagttatttatagtttaa

SEQ ID NO: 30348 - DNA, 201 bp, Bos taurus
aagtcagataatcgatactctgtttagaaccacctaatgacttcttgctactcttagaatataattcagacttctaaacagggcctagcaagccctacatrttccagctctgaccatctcggacccaaactcacccacccttccccctctcaaactatgttctgcccacaagtccatctttctcatctctaataggccaaa

SEQ ID NO: 30349 - DNA, 201 bp, Bos taurus
gtatgactaaagcaaagtaagtgaggaagaaacaatggaagactagtcatggagctggaaggagccagggcatggaaggcactacaaacaaaggtatcccrctcagcactggccgcacacttttatctgtcttcaagcccagaaaaccatcagtcattgtctctgcaaacacgtctcatctgcccccgctccttctctttt

SEQ ID NO: 30350 - DNA, 201 bp, Bos taurus
tagttaatgtgggcaggttcctggggggagccaggcctgttgacttgtggtccctatttcattcggggatgatcagacctgagtgtgtgcctatctaagayataagccttaaagataaggccattacctctgtctctgtttcttacagaggagacactgaataagcattgattgaatactttacatcactatctcattgaa

SEQ ID NO: 30351 - DNA, 201 bp, Bos taurus
cctggcagaccccaggctgtcaggcctgaccaccacttcttgctctttcttgggcaaggtgctgagtgtgggaagttctttactcagccaaggcctccttrgcttcagggacggtcggtcagtcttccactgtccgttagcactgctggctctggagagcctggccaccagggaagcctggccagggccccaaacccctac

SEQ ID NO: 30352 - DNA, 201 bp, Bos taurus
tcagggccgagagatgatgtggaccactgggccgtgcagtgcccagatacactgcagagctggtaaggagatgtagtgtttgcacagaaaacaccagaaamcatttgccaagtgtacagagaagtgttttcacaattgctcattgctgggggaataagcattctccttctcacaggaagttcctctacctgaaatgtgatg

SEQ ID NO: 30353 - DNA, 201 bp, Bos taurus
agtgggaggcttgtctttaattattagctctgtaggcattacctgctggttcacagtctcactgaggcagcagaatcacccgggctctgactgggcttccrgtcatatgtcctctggacagtgtggtagggcacaagattgggagagcgagagtgggaaggtgtatatagttattttccactcactcagttacagagggct

SEQ ID NO: 30354 - DNA, 201 bp, Bos taurus
atgtgaaagagattttgataaacttttaatgaccacccccacccccaaaggaaaaactttcacaccttaactttgacagcccaagttgaacatgtctacakctttgtagcatatggtctccagctcagggctgggtacccaaaccacactcaatgctttcttgattataataacctagttttccctgcattctaagccttt

SEQ ID NO: 30355 - DNA, 201 bp, Bos taurus
ttacttgaagtaaggccagctttgttgttgttgtccagtggctaagtcatgtgcaactcttttgccaccccatggagttgctggcttccctgtgcttcatratgaaaaggccagcatgctgctgctgctgctgctaagtcgcttcagtcatgtccgactctgtgcgaccccatagatggcagcccatgaggcttccctgcc

SEQ ID NO: 30356 - DNA, 201 bp, Bos taurus
tcctatgagccagtgatttcctttatgttagagtcatcactgtactggaaatattaagaatctgtgtgcttcttgttggcctgtttggaatttctgcctgygagatgctgtggaaggttttgttcaacctgttcttgaaggtaaaaagattttgactcacagtcctttcatcatttttgtgtctttcaggccaatgagagc

SEQ ID NO: 30357 - DNA, 201 bp, Bos taurus
cactttcagatcctgtgcagcccttttccctgttcacctatcctgagtgtggaccacaaggctggtgtgaacacccttgccagaggatctgtgtatgcgcrtgcgtgtgtgtgtgcacgcgcactggggtggagtgaagacaaactttggatgcaaaagccgagatgtctgtgttgcaggaagggggagcccttccagggc

SEQ ID NO: 30358 - DNA, 201 bp, Bos taurus
tgaaataatcactagacaggtcacctccaagagatgcattgaaagaatatcatcctttgcccacaaatctgatggccaaggaaaccactggcccacccaaratgtgtgcagccaatacccaaatctctgaaattgggaatttctgcaaactcttccaaagggatttggccattcctgggccttgtcacatcaccttggggc

SEQ ID NO: 30359 - DNA, 201 bp, Bos taurus
agaccaccctggaggcccattctgtctaatatctctgcatttgtttcagtgttctgcacctgatgtggcagctgggtcctggaccttcctgaagccaggtrtccaacctctaggcccagggtgatctgctcacactgaacgctcacgtggtacacaggaagtactgtgtgctgactaattcaggaaagtaaacgaaaccac

SEQ ID NO: 30360 - DNA, 201 bp, Bos taurus
tgggctcatttcaccatctctggagcccattgctccaaacaaaaattacctgagagcagacttgattaagcaggataaggaactcagaacaatcagaaagrgggttgctgaccagggaaccccaggtaacagtatagaaatgtggactataacgaaagcattaagacatggtcctgggttctggcccatggggaactgcag

SEQ ID NO: 30361 - DNA, 201 bp, Bos taurus
gtctagttcagcaaatccaggaaatttggcaaccagggatatgctctataagtaaatccaggcaagtataaaggtctgattaatggacaaagtgctgtgtrggcaattattattcattgactcaaattgaattaaactgacccaggccaactgttgatacacagctgtctctgtccagtggccagctcttccactcaagtg

SEQ ID NO: 30362 - DNA, 201 bp, Bos taurus
tctagccctatcctatacctgtgttcctcccctcattctattgtattccaacaaccctgatcttccagttatagaataagctctcgttttaccttaagcartagggatctttgcaaatgttcccactgctagccccttccttccctcctcaccccattcacttctatctttacttcaatacttcctccaagttatctctca

SEQ ID NO: 30363 - DNA, 201 bp, Bos taurus
atcacacaacttgtaattgtgagtcactggctgatccatcttataaagtcgttaaacccctcgtcttataacacgggcctctaatccctccactggtaatkcaggtgtgagcttgcagctgttatatgtcaccactgctcttagttgttaaaaacatgtcaagagttttgttttgaggtgttgggggttttttgtttgttt

SEQ ID NO: 30364 - DNA, 201 bp, Bos taurus
caccctgagaaggggcagtgggaaagataggcaagaccatgtgcagccatgcctgggaaatagtgtgcataccatcagaaagacggtccaccgagcccagygggccaaatgaccacacgaggacctgcagtgaggggagtgaacagtgggttctcagcatgctgcacgggccccggaaatggtgaggtgacctctaagatg

SEQ ID NO: 30365 - DNA, 201 bp, Bos taurus
gcatcccggatgccttctggtgggcagtcgtctccatgacaactgtaggctatggagacatggttccgactaccattgggggaaagatcgtgggttccctrtgtgcaattgcaggtgttttaaccattgccttaccggtccctgtcatagtgtccaatttcaactacttctaccaccgggagacagagggagaggagcagg

SEQ ID NO: 30366 - DNA, 201 bp, Bos taurus
ctctttgcaatccaagggactctcaaaagtcttctccagcaccacaatatgaaaatttcccagtcctgcagggcaccaaatccagcctgtggagtggcccygaagggcagacctcttttgcttacaagcatctctactgggctgcagcacaacctttgcagaacttgccctaggaaaaaggcctgtgggtgaccactccct

SEQ ID NO: 30367 - DNA, 201 bp, Bos taurus
gctaatctgcaaaatgggataacaaaaatatttacctcataataatccactcattggattacataaaaagatgcttgcaaccagtactctgtgtggcctayagtgaattcccaataatagttatcaatatgctatcctcacttcccacagtaaaatagttattttcaacatttaagaaaatcgtttctatcagggtgagta

SEQ ID NO: 30368 - DNA, 201 bp, Bos taurus
ggaggcctagaagtaacctcccctcgctctcaggctccagggctgaaccttttagggagctgggtgctgtggacgggaggctcgggggcctcaattctccygtatcctgtttgattcccgaagacacaggagggacgaggctggaggcatgtgtgtgcctgtttgtgtgcgggtgcccagggtcagggagagctgagggtg

SEQ ID NO: 30369 - DNA, 201 bp, Bos taurus
taagaaattggcagcttccacctcctgtctcttgaaatggtctctctgggtaacctgagccatcgcatacaagtctggccacccagatgtgaactgagctrtggagtctagttgtctggggagtgcgtgagcttagcttgccaactgttctcactgaggtgccggtcatttgaatgaatgtgagtaagcctgccttgggcc

SEQ ID NO: 30370 - DNA, 201 bp, Bos taurus
actctatccctaggaagcagcagggccagttggacaattcagatggtcaggaggaaaaaagataagacatagcaggtgtggttaaagcttaattggtgatyggcaatgctgggcagggcccacgctgggagagcaaggcctgcacactaggcctattctggtcttcagggcagtgctgggggctcaggcttgagctctcca

SEQ ID NO: 30371 - DNA, 201 bp, Bos taurus
gacaaagcagtaaactaaagtgttttcagtcccactctttttgtgtgtttacttcagaaaagagggtgagcactgtagctcagggcccaggaagaagtgasggacgtgtgactggctgtcacctgctgcccacagtgcttgctaaggaaaccaacagtcctccgcctctgtgagctgcccagggtgtcctgcggaggcctg

SEQ ID NO: 30372 - DNA, 201 bp, Bos taurus
tcaaagagtttcatgctttcatgcattcggttctgagaaagaaacaaaggatgatataggtcagtagcaaaaactaaaagtagattaactattaatgaaaragagaccaaaaagagtttatttcttttcttttctttgactatgccacacagcatgcaggatcttagttcctcgaccagggattgaacccatgcctcctgc

SEQ ID NO: 30373 - DNA, 201 bp, Bos taurus
ggcagcaccacccactgccctgatgttgtggggttctgggggccagagatggaaaagcctgggtagctctccaccctgagccccagacagagccccactgrgctgacatctcctttgggcctagacttccagctactcatcacccacttggctcatggcattaaatccagtgcctgccacacccccgggccacacactcac

SEQ ID NO: 30374 - DNA, 201 bp, Bos taurus
cagggaatagatgtcagcatggtgagcactttgctgttcatccctattaggggatgactgagctgtttcctcagggccaggtgaggtgctggctgcgtttrctcaaagtgttcactcggagggtgatttgtgagctattgctgagcacataatggttaggatagctgcaaaagcagccatggccccacacaggttcacctg

SEQ ID NO: 30375 - DNA, 201 bp, Bos taurus
agctggatggttcaggctcaaagtgtctcatgaggctgcagtcaagatgttggccagtactaccatcatctgaaggctttattggggctagagaatctgcrtctaaggttgttctcacacatggccattggccagggaactcagttcctcgccaggggggccagtaggctgtttgaatgtcattatgatctggtagcctcc

SEQ ID NO: 30376 - DNA, 201 bp, Bos taurus
ctcttagctcatccgtgtgcacaaggaaagcaacccaactccagatgatagttcaattgtgattagtctaagctgaccatggccatccattcctactgccyatgactagtttgggagggggcatatgatccagctgtcgccaatcagaggtacagggaaatcctctggcggccatctaggaagttttctcacttaaaaaag

SEQ ID NO: 30377 - DNA, 201 bp, Bos taurus
ccagttcctatgctcagttattccttctctttgtcatttttttatagtatgctatgttgatattaactgaaataatagcctgacagatgacagcaccctcratgtgatttttgtagataagttctttaggacaatgtcattaccagcttctgtgctggtaactttccctacttggaaactccacatttcttgactgttgag

SEQ ID NO: 30378 - DNA, 201 bp, Bos taurus
gcctgtgatgagagagaggcatttttggcttcttgttttttcccatctaggattcattttctctagcttgccaactccatcagagtcccagtagaatagaraggcaaggaaagggccagcaggccagttcttacctaagaccacggtgagcagcacttgagttttctgccctgacatcttgtgaagctctttctttctctt

SEQ ID NO: 30379 - DNA, 201 bp, Bos taurus
ctgataaatatctcaatgtttttataatacatacaataagtgtgaaagtctgtcttcagggtgtttgtacttttgagtaacgcataaatgacaatattaakgtactagattaactcttttttcactcataaaattatgggatgagtaaaatttcaggctactgaaaaaattcattgttcattatgaatttaaattgttttc

SEQ ID NO: 30380 - DNA, 201 bp, Bos taurus
tgattatggtcatgtgatcatattcagacgatggctaaggtggtctagaggttcagagacagctttgctcacaaggctggttcaacagtaaacacagttgrgaagctggtatcagctggtcccctctccctctccatgtagtctcagggcctttccacaaggtcacttacatagtagtttgtcttttttcatgggggcctc

SEQ ID NO: 30381 - DNA, 201 bp, Bos taurus
aggcctgacgtgctgcaattcatggagtcgcaaagagtaggacacgactgagcgactgaactgaactgagggcaggggatgcagctcagaatgaaggcctygcattttaattgcagattcatctcttccaagatctctgatcttaagctggtttattttggcttctgtagaaaatggagataatgttaatacttacctgag

SEQ ID NO: 30382 - DNA, 201 bp, Bos taurus
ccattctggggagagaactggaaggccataaaacagtacataaggtagaacaagctaggacgagtactcttaattcatctggcattaccaatacgtgatcygaagacctggcctgtggcacggatatcaacaactctgggcatgggtattctttttctcagtcaaactacacaggcaacccatcaaactgctgaccagaag

SEQ ID NO: 30383 - DNA, 201 bp, Bos taurus
cctgcttgcagtagggcttaagcagagatcccagccagcagttctgcaaaattgcagaaccaagccaatgacccaatcaggtcagggagctcagcttgccrtttggcctgatttggatcgccaccaccaggccatgctggccatggagcacatactattccctggtaggagagcagattcacagcccaacttctgattata

SEQ ID NO: 30384 - DNA, 201 bp, Bos taurus
ggcagctgcctttgcttataacacctttctaaaaggacaggccacgtaaggtttgctgctcccagaaacttctttgtcatcgatgtttgtcaacttctttkatttcatagatgtttgcctggcctactggataaaagatattcaaaatttgctttaagaaatttaaaaatttgaggtgaaatatggtcataagttagactg

SEQ ID NO: 30385 - DNA, 201 bp, Bos taurus
aatgaagactacaaaacggtttattaaatatgtttcatttgcttcagttttcttttcaaaaagtaaaacccagttgtctgctttgtattgattaaggaaartaaatttcctgtcaaatgttaaatatgtttatataaattaactcttcctataagataatattcagaaaagtttacaaggaaccaaacttctatattcaga

SEQ ID NO: 30386 - DNA, 201 bp, Bos taurus
tcctctcatatcccttttctcctccttccccttaaggaaattatcctaaaaatgtttggtaactgtttcctcctcacaactcagtcaccctggtttagtcyttggagaagaggacatgttattgaacatatgattacaaaatcttaacacagaagctgaaagaattcaatctgattcacagtttccaaattaaatattgca

SEQ ID NO: 30387 - DNA, 201 bp, Bos taurus
acaatgtgttcaatccctggccaaccctactctttgaaaagcagttacattaacagttactgcagggcatctaagtggatgctgtgcagtaaatagaagasggatggaccacagcaaacatggccttaaagtgaaactggatcagaacactttgacaagtcacttctaagaatgatgcatcactgtttttataagtctgga

SEQ ID NO: 30388 - DNA, 201 bp, Bos taurus
catgtgttttatacctggtctaactagaataactatgttatccttaataattgagttttgtcatagtgtaggaaaatctattctctacctcatagtcctaraatttttaatcttggttacattttgaaaattttctgacgatatttttgtacaaatattgattgttagtttcctccttcagaatattgttatgcttacatt

SEQ ID NO: 30389 - DNA, 201 bp, Bos taurus
tgtttttacgtcctcactgaaactagagaaatatttctgaaacaaaagtataattatatagtatttcatgcttgaaagagttcagtgacttcccatttcarttcagttcagttgctcagtcaagtcccagtctttgcaaccccatgaactgcagcatgccaggcctttctgtccataaccaactgccagagtctacccaaa

SEQ ID NO: 30390 - DNA, 201 bp, Bos taurus
aataaaataaaatatttgagccactctaagaaaaacatgacagaagtaaactgtagcaagttcatagaaaatgagaacaaagaatatggaaagaaatgcartatagaagctataggtatgagagaactgtcagaggttcaaaaaattataattttgtgctcttacagtacctaaaaataaaaataaaacctttaattcatc

SEQ ID NO: 30391 - DNA, 201 bp, Bos taurus
ctggctggaaaccttttagaaaagcagaatattgaaggaactgtgtatgctgacatttccactgtgtatctggacacatatgcatcttttgaaacaaatayaataacccatttactagctagtatgtacaccttgatgatgggaaaagaccctgatgatgggaaagattgaaggcaaaaggagaaggggatagcagaggat

SEQ ID NO: 30392 - DNA, 201 bp, Bos taurus
ttcttcaaaatgcatatgtgcctacattggctattatctttctaacatcaatttattcttctaggcatgtattaacatggaataaatctttggtatgaggraatgagccctgatagaaaaactagcacaggagatagagagcatgacattaattaaccttgtgatgtgatattgatcccactcatgtaacttcactgaatc

SEQ ID NO: 30393 - DNA, 201 bp, Bos taurus
catgtaagtatatgtatattccctcctggctctgcttccgtgactcaattactcccaggttggagatgaacacaactaattacgtctcttagaagaatcayatctttcttttaacaagtactcagcaaacaatagaatggtaagtcgcaccttcaagttagccaaaaattgtcaattataaactataattatcagttttag

SEQ ID NO: 30394 - DNA, 201 bp, Bos taurus
tcttttaatttaagtttgtaaggtttatactcttttaaagcatggaacccattaatgccaaccatgattgcttttcaatcccttttctccttctagctttrtgatgtgctttgttttctttaattacggcatgatgattcattatttgcactgtttctgttatgaactgagttagccttttggcctttcccaactaataat

SEQ ID NO: 30395 - DNA, 201 bp, Bos taurus
aagtgacagcaatgctctggcagatgcaggagattatgaggcattagtcaacagtttgggggagatgtactggtccagtgaaggacatcttggaagcacayggacagcaccctctatgccatttctgagacagaatttcaagccatgcttgcaaagcataatgccatctactaatttggggccttttcctccatttgcatg

SEQ ID NO: 30396 - DNA, 201 bp, Bos taurus
actttgtttcaaactttcttatcattgaatcaagttattcataatttccaatgcatagaaatctctccatttgtcccagggccactgtaatcatcttaaawttttcaattttatgattcaactggaaaagacaaatctgcatttcacttttggccttatatatatgcccaccatttcacaactaaatgcaagaaaaaacag

SEQ ID NO: 30397 - DNA, 201 bp, Bos taurus
gtggaaataacagtatgtctcagatatgctttaaaatactatagcacaaaaaatggggggcagcaatatataaaaaaaaaaaaacaatgactgttaaagcrgagacatgactaaatgaacttcattatacaatttgctcttttttgtgcatgctggaaaaatttcattttataaaatcataagaaaaagtatactataatt

SEQ ID NO: 30398 - DNA, 201 bp, Bos taurus
ttgtttccatgtacagattgatcagtccttttcatattgttcattattcatgtatagaaatgcaactgatttttgtatgttgattttgtgtgtgtgtgtgkggggatcttcagggttttctaaataagatcgtatctacaattcaatagaaaaaaagaaacaatttcaaaataggcaaaggactggaacagattttttttt

SEQ ID NO: 30399 - DNA, 201 bp, Bos taurus
ataaggaaaataagtaaaattatacgcaatgagtatgtgaattaatttcttctactgtcattaactacatggaaaatattcagtttggtaaacaggcaaaktcaaacactgtcttatgtttatctttaaacaagcctatcattacacattttaactagcttttcatgagacactgatcacttattactttctcattcaata

SEQ ID NO: 30400 - DNA, 201 bp, Bos taurus
acagtttgcaggctggggcctgttggatttgaatctggagtctattaattactaattgtatatcttgctgctcagatgtctagagcacctgtttccatatstgtaaaactgagttgggagctgagactgtgactgaggagggaaggcaggagactattgctgctccgttcctccctacctctgacagctgctgggctccct

SEQ ID NO: 30401 - DNA, 201 bp, Bos taurus
ctgagttgggagctgagactgtgactgaggagggaaggcaggagactattgctgctccgttcctccctacctctgacagctgctgggctccctccagtgcyctgagaagctatgagagatcagcagaattcatggttcccagagagatttgaattttttaaagatgtatattttttggatagctaaacttctatctctagc

SEQ ID NO: 30402 - DNA, 201 bp, Bos taurus
aaatttggttaaatatatttacccttttggggagcacttagtatattctttttgtaatattacttatctgaatatttctttccttgctaattagttcatgrattttctcaggacaggaattatgtcttctatcgttttgaatttcctccctcccctgtacaaaaatgcttgcaattatctttgtatgtaggagcagataat

SEQ ID NO: 30403 - DNA, 201 bp, Bos taurus
atattgtttcactgtacaacatagtgattggatattttatgcattataatcatcacaataagtttagctacaatctgcacaccaaaatatgactcaactckttaacactaagaaatatttgaagcttatgcttctctggagaagtactcttgcaaaaatagtatgaaattcaaaagatacacttaagtttcaatgcctata

SEQ ID NO: 30404 - DNA, 201 bp, Bos taurus
atttggtatacagtgactagatatgaattaagttattaagtaaaatataaagtaaaatcttggcaatacaaaattcttcattaataacagactcacttgaracactgaggtgaaagcattgttaaatccactatacatttcctttccttcctaaaatgagtccaaataacatgagatagcttttactttatgattcaatat

SEQ ID NO: 30405 - DNA, 201 bp, Bos taurus
acagtaaaatacgagtctcagcagaccctaataaactgatcgttcaaataggttgcttgtcttttcacctagtgtgcatttgtttaggccacagagctcckcaataagagacttaaattgtattcagtgcttaaatgggagtaataaaaataagtgggtgggccagggattgaagccatgtatttaaatgaattttaaacc

SEQ ID NO: 30406 - DNA, 201 bp, Bos taurus
tccaatgaatcaaggagacagtatagggttaggggagatgtagcctccttcaactgactttcaagttatcagtctatgaaaaatgtctctcatttgtttaratgccttcatgtatctgccacatctgagtcattaagttctctctagtttcagaaaagataatcaatattctcagccagggatgtgcccaattgtttctca

SEQ ID NO: 30407 - DNA, 201 bp, Bos taurus
ggcatgtgggggtaggggcattccctgctcacacttggccgtgaaccctgcaaagggctgcagaaacaatgccaaaccgaaatggctgtgcagcagcagayacaacgcctttgaggccaggccgggagcttcccggcgctaaaacctaatgtgtaggggcggtggaggggggaacaaaagaaagtcagaaatctcacgtgt

SEQ ID NO: 30408 - DNA, 201 bp, Bos taurus
aaagcaccatatatagaaagcaaacctgttgctttttgtcggtgctggcacagccccagctggccactaggtggcagtagtgtcctagcaacagtaaaacygcaagcctagcacttagtgaaaccctgagcatcccacaattgacccacctggctacacacagctttgaggaacagacagaattattagtacaaataattc

SEQ ID NO: 30409 - DNA, 201 bp, Bos taurus
caaatgagatcaatctaatttgatctaattagttgtccacagaaaacatttttccagaagagaatggagcaaccagtataaaaaaataataataattgaasactatactgagattatagaaactcattattgcaaatactatgggtatgggtaaataatagttcctaatcagagattaatgtttttaaaccagtgactatt

SEQ ID NO: 30410 - DNA, 201 bp, Bos taurus
ttaacccctgctctctgcaactagagaaggcctgtgtgcagcaacgaagacccagtgcagccattaattaattaattaatcaattaaaaaactgccaaaaracacttccatttgtatgctgctggccacgcctgcttgcaagctggaaataaaatgtccattgcaaatggtcacaaatctgaccttctacaactctgggaa

SEQ ID NO: 30411 - DNA, 201 bp, Bos taurus
tccagagagcacaggaaaagcagggcagggcatccctggcaggtgcttcagctctaggaggtcaaagtccactatgcaaaagggccagcagaaggtagtcmggaaaccaggataggggaaatgtttgaaaagaacttaggcgtctgattcagcagaaattccgtgtacttcctggctaaggccagaattgtttttgtggtg

SEQ ID NO: 30412 - DNA, 201 bp, Bos taurus
tccataacacactgaatacctaagacaaatgtcttttttaaggttgctttcaatctgtccttcaaagatatctaagcctgtagttgtctatttcatgtgcrtgaattaacagtaacacggtatagagagtaacagtgccaattctagaatcagatcaagcatagtctgattccatagctctatcaattactaaatttaggg

SEQ ID NO: 30413 - DNA, 201 bp, Bos taurus
aataaaatcccatgtgatttgattctagacaggagggctcttcagggaggctttcctcaaggtggtaactcaggctatttctccctggggccctgccttcycgtggttttaaagttgccagcaggtgtttagaggatcagttcagaagtgacatatcacttcctcccacattgttgacaataactagtcatgaggcccact

SEQ ID NO: 30414 - DNA, 201 bp, Bos taurus
agttttcaagtattgttgatttcctttgcaggttgtatatatatgttctgtctttttcattatatttgtcaatgtcttggttctccctttattatctcttrcctggactcttcaagtagtcttacaaatgtcttcagcttctctccaaccccttcaattagcttccaaaatctccagtttgcctactgaatagattctaaa

SEQ ID NO: 30415 - DNA, 201 bp, Bos taurus
gtctttccagcaaaaagagtcaccctggaaagctgtacacatccatatgggttgatattaaaggagaaccacagttactatatttacaaaacagtgtacaragtaagacgtaatttttggtaaattatagagctaagtataactgtcctgatatgccaaaatattctggaaagataaatacactatagtgctaacactact

SEQ ID NO: 30416 - DNA, 201 bp, Bos taurus
atgccagctgggggaaatgccagagggaaaggggttgggggtatcttactttctggctggtccttagctggtgggtagcagaggaagggaggccagcaaayacctcctcagcagcagcatctgcggtcctgcaatcaacaggagaaactcagctgggatcagcgccaggggcaagtgcctccttcccagtgcagcatccac

SEQ ID NO: 30417 - DNA, 201 bp, Bos taurus
gaagaaaaatcgatctttattgttgaggaggtatttgtctggttaacccataatacaaatgcacagtgcacactagaggtgagataggtggccaaaagggrcagagaaaaagtttatgtttaaatgttccttgtctggcaactcactccagtattcttgcctggagaattccatggacagaggggcctggcaggctactgt

SEQ ID NO: 30418 - DNA, 201 bp, Bos taurus
gagaggctggccctgggtcatggcattctcaccagttccagtaaaaaaaattcccaaggtctcatgtgtagcacagaacagatgaaggccatgtgacacamtgtaggaaggaaaaaatgggcttttctgcaataaccaatgtgcactgaaggctggataggcctttgcagtgccttgggacagaataagacaccccactta

SEQ ID NO: 30419 - DNA, 201 bp, Bos taurus
ttccaataagcaaatcttaggagacactggcttcaaaatggccacctgggtttaagtagtttagcaccagccattcctgtcaggtactcatcgaaagactytcattctacagtaagcaaaaaggcccaaaagaagcctgctgccaacaatacaatgaaaaatcaacccactgaaagaagatatttgcaaatgatagatccc

SEQ ID NO: 30420 - DNA, 201 bp, Bos taurus
atgaattccagcctgataagaaactcaggcctccttttaactgttttcctctcctacatccaaaacaaacatactgcaaatcctcagtgccagctggcacyctggccacatcacattgtagatcatatttctacctctatcatccgcacctcagtttatttaaaacacaaaatatcataaagtaaacacccaaagcagcct

SEQ ID NO: 30421 - DNA, 201 bp, Bos taurus
tgagagatcaaataggtctgtgcataaaagcacacagtaaactagagaaatgtatattaaactagttaggcaaatattaggcattccttatgaacaagtgygtatagaattagtgtagaacacttagttcaaaaggtcttctgatccataacaatatttcatttgcctttggtcccaccaaaggctttactgcaattatat

SEQ ID NO: 30422 - DNA, 201 bp, Bos taurus
caccttggaagccccatcaaacaaggtcagattgagtcaacggatatccagggtgcagttccacaagggaaggacagaagtgagacaggccagggcaggarcagcaaagcccagagagctgaagtgcttagaggaggggcttgtctgagttgtcgttcatgacacagcagccaggggagagaggagatcctgatccttctt

SEQ ID NO: 30423 - DNA, 201 bp, Bos taurus
aagaatgaaacttgcaatcccaagctctgatttcctaggataggaggggggctgaaggatgcatcgattgccaatggccaaagatctaaccaaccatgccratgttatgagggggcttctccgacggctcagtgggtgaagaattcacctgccactgcaagaggcctgggttccatccctgggtcaggaagatcccctgga

SEQ ID NO: 30424 - DNA, 201 bp, Bos taurus
ttgatatttttttttctcttattcatagagaaatttaccgagcacttctaattttcctagtactaaagcacataaggataaatgagtcagatggcttcctrtcaaggaaattacaatccaatagaaaagagtcactagtaagtcaacaataatgatagattacattaaagtgatgacagaaacaaataagggatgcaaaga

SEQ ID NO: 30425 - DNA, 201 bp, Bos taurus
aaacagaaacagaaatgcctttataaagcttataagcaagtcagggactcaggtggaagtatagttcggagtccttaccattaacatttcactataaagcrcatactcatgtacaacaggaagcagggcctctgagaatccagacatccgtttttcagtggccttacagcatttgtcaatgcagctggcaacacttttcag

SEQ ID NO: 30426 - DNA, 201 bp, Bos taurus
caggcaagagtaagggagtggggtgccattgccttctctgaaggaaatatcagatagtgacaactcacacaaaggaaaccacttgaatatgagacccagcrtcacttgaccaccagtataggatgcctcatctaaacaacaaacaaaacaaaaatacaaacccaatcatcagcagacaggattaccacctcactcagcctt

SEQ ID NO: 30427 - DNA, 201 bp, Bos taurus
ctttaaaactaatgtaatctttgcatcgatgacataacatttttgaggtaaatgttcaaaggtgctcataagttctgtttcagtatgttagaatgctgttrttgatggagagccaaagataaggcaacaccaagaaaaatatgaaaagaaaggtttaagatgggaatattttggaacatttgttgacagagcacagaatat

SEQ ID NO: 30428 - DNA, 201 bp, Bos taurus
atctgtatttttagtctgtaaagtctctattggatgttactgttacttaagcaacaatccttgttctctctcaatctctctctttttttctctctctcaayatgaattaaatgccaaaattttcaaataaggaagaactgatttaacttccacttaagagagggtaaagcatctgcctacaatgcgggagacccgggtttg

SEQ ID NO: 30429 - DNA, 201 bp, Bos taurus
tcactcattttgacaagtgtgccaaaactaccagttttttagaaaccacttatcgtcccagttcacacctgtgtagcttcataaaatggcaaatatcctgmagggaaaacttgccatgtaatgtgcaagttttctaccccttgtttctcagtaggctccttgccccataagtcccaaattccatcttttaaccagcttgct

SEQ ID NO: 30430 - DNA, 201 bp, Bos taurus
atgtggctttatgcatccctgtgattctccatcttgctcgcctgtattgtttttaaatcttgacccaaaaatagttcaaataatgtattctttaatgcctytttttccccctcttaaaaatatagggactttccctatatttccttcatcacttcagagttacagttactggcacataggtctcaaagaaatactgattgt

SEQ ID NO: 30431 - DNA, 201 bp, Bos taurus
agatgctgaattataattttctttataaattatcagcttagttgagagaagctcaccattagaactcttctcatttaaatcatgcttatttgaatatattyatgtacaggttgacaaagaatctccttttgcattatattgctttttctgaagccagagtttctcactgtttggccttcgttggtctatgcaggagatcag

SEQ ID NO: 30432 - DNA, 201 bp, Bos taurus
aaataaatggattggcctcagctgactcaattggaaaatgagacgcctcaattccagttttgactttctaatgacttagcatgctacctttgcaaatgatrtaagctctttgggccttggtttcctaatctctgaaatgaaggaactggactctatcgaaatcctttccagcttaaagaatggtgatcctggatatattct

SEQ ID NO: 30433 - DNA, 201 bp, Bos taurus
gtccatttcagaatccaacagaaattgcatcactaataaggcaaatgaggtttttaaacagttgcttctcatctccgcacaagagggcagcctttcaccaraaccaaggaaacagttgggcagaactttgtgttaatttgtatagagacccctccaatcatagaacttccaaagagaagacctctcttgctataaagaatg

SEQ ID NO: 30434 - DNA, 201 bp, Bos taurus
ggagagctttatgcctgctgctaaatgtctacaaatcaatatttaatattttgaaacatgaagtcttaattatccatctcccctttaagcgtgaaaccctyactgagtgaaaataaaaccatttgttggctgatggattgattgccacttattagcacttttttgatctgcaggtcagattgcagggctccattccaaaca

SEQ ID NO: 30435 - DNA, 201 bp, Bos taurus
tgtaggaactgtacacattactctgtccttaggacctaaatctgacaggaagaatttcccatcaactagtaaaaaggaagagttcctggagacatactccycatgtaaataaacaaacatgaaatatagagagctttctctctacttaaggaagagcaaaaagcaacacctgagaacaaggaggagcatgtagaaaactca

SEQ ID NO: 30436 - DNA, 201 bp, Bos taurus
aattgactccaagactgtcaaggcttttcatttgttgtcttgactcaagccaactgacagtaaaagctctccagccaaacaagacaactggcttcactctkcagatgatgaactctgtctgccatactcctgtgtgagcactgttaggctatgtaacttccaggtgttctggccagtccttttgatcaggcagggctagga

SEQ ID NO: 30437 - DNA, 201 bp, Bos taurus
tgttagatccccccaccccctcaggtaagaatgtatatgaatactgttggaagaaaaacctaaattcataagtataattaaagttgtgtcacattgctttkacctatctcatcttctctcccaaaatagaagaggaaaagctctaatgaaaaaatactgttgagttcttaataaaacatttacactttaaagtcatgctat

SEQ ID NO: 30438 - DNA, 201 bp, Bos taurus
gtgaaatggcatgattagaggtttccttccaactcaaagagtctatgatcaggttattttacttgagaatatacatttttcaattcctttttatgtgaggygaaatatccagttcaaacaaaaataagtttccgttctagaagttaccattcatgttgttgttggtgagccaaagttatttaactaatgcaagtttaaata

SEQ ID NO: 30439 - DNA, 201 bp, Bos taurus
tgattacattagagtccacactctaagatccaccacagaaaataggtgtgtaataaggagttcacccaaatctccagccatatcaagttagttgcagtttmctacgggtcccatttcttcagatctacatggctttgcttatcctgctttctctttccataaagctctttccttttaatgttcttaaaattccttgttttt

SEQ ID NO: 30440 - DNA, 201 bp, Bos taurus
aagtaagctacacagagaaccaaaaacaggtcattggcttctgccctgcaattcacagtaactgccagcaatatttctacataggggaacgcgctttgcaygacagctctccttgcaggaaatctccatcctggggagttgaaattgcattaggattacttctctgcaagcacactgacaccaatatgcaatatgtggtat

SEQ ID NO: 30441 - DNA, 201 bp, Bos taurus
aagttaatgagagttatatattgctttgtagttaagagatgccattttgcttttcttatgtcgctgaatacaaatttctaattttaatgagccttcaggtygatggaattaaccttacatttccattgtcaaaaatcatattcagactgtaaggtccaacttaggtgacctttctaaagagaatttccccaaaatcttatg

SEQ ID NO: 30442 - DNA, 201 bp, Bos taurus
ttccatcaggtgtgagtacccgaagacaggactgctctcagcctgaacaatttaaactgagtctggttgattaaaagaaaaggctcaagcccaaatggcaytggaggcagcagatgataaaccagcctgtaacttttgggtggtgttaaaatggtcatacatttagtattatttaaatattttgttatcaagctcagccct

SEQ ID NO: 30443 - DNA, 201 bp, Bos taurus
taaagacagactagaagagatgtttagaaatgaatcaagaagtggaggaaagtgtgggaaggttaatgtcattgttgtaaaagtttagaatgaagagttaytgctatgggttaagaaaaggaggttaaaaatatggtttgaaattacaaggatgaccagtagaggaactgagaataaaattttaaatgttttgcaagattg

SEQ ID NO: 30444 - DNA, 201 bp, Bos taurus
caattgtattatcatcttactttgtcttgagtttcaacatgaaagaagagaatcataactaaggtagagagagggcatgtgaacaaatgataaatgcaccrgattatttcagatgacctgaaatatctcagagtttgaatgttaatcctgacaatgaacagaaaacagattccaataacaagggattttccgctgctttat

SEQ ID NO: 30445 - DNA, 201 bp, Bos taurus
ttagaggtaagcactgtacaatggattaaaaagtaatgaattctaattcagaatttacctccaataaggtgtgaatgcgggaaggtcctaccagctcatgraagtttagtttcttcttccataattcaaggaaatggaggagaacagaaaatttctaaattctagaaaatccatgatttttatgtcactcatcaattactt

SEQ ID NO: 30446 - DNA, 201 bp, Bos taurus
tctaagtgatatcaaggtgtttgtttttaatctgtccaaaatcttcctatggacaaatgcattattgaagaattatattttaatttatcttcacgccgtgyttttgatgggcatttgcattaacacaatatgattatgcttctttacactggtatctattcaaattagaaattacctgcacatacagtctcaggtggtggt

SEQ ID NO: 30447 - DNA, 201 bp, Bos taurus
agcagactcacctttacttgtagtatatccagtcatgtacttgtctaagtcatactgctagattatcagtgctttatggagaggaaatgtattttaatcayatttgtatcccctgcagcactttgcaaaatgtttagtatcaaaagagaattcaagaatgtttatgaaattggatcataaaaattgttaaacctggacagg

SEQ ID NO: 30448 - DNA, 201 bp, Bos taurus
atgttgttaagttttaaaaaaacagaagagaatatataatgtaaacatatagctgcatacttgcatatgaagaaaagatatatgaaagtggcttttaacayagaacaaaattattttattcccctatatccacttggctaaatcttatctggcttaaattgacaattctccaagaaatcttcctgggcctccattcaaaga

SEQ ID NO: 30449 - DNA, 201 bp, Bos taurus
gagggagtggatctaggcaaacaaaagcgtggccaaaatgacttctactgtcaatttccatggagcatccagagaggcttttgctcactgtcagaattgayaaccagaaagttatggcctagggtgagatgaaagtgaagtgaaagtgttagtcactcagtcaagtccaactctgtgaccccatggactatagcccaccag

SEQ ID NO: 30450 - DNA, 201 bp, Bos taurus
gcaatgagcaattggtacagaactcagtagcctgtaagaaaccataaaggaatgctttacagaccttctgtttgccttaaatcctgaaaatacatctacaytagagttattgagttttttgaagacatttgggacttcttaggaccaatcctgtttttctgtctttaggagacattgtgctcccttcgtcattgtgcttct

SEQ ID NO: 30451 - DNA, 201 bp, Bos taurus
ttcattgctgtattaataataataaaggcatgctaaaggaatgaaaaagcatcattataaaggggatttgtgtgtgcattgaaacagtatgggtaccttgyggttcccacaatgaagatgtaactattttcatatacaagttattagcttaagttgttctttattacaccataactttgctcctatagtaacatggtcgaa

SEQ ID NO: 30452 - DNA, 201 bp, Bos taurus
caggaccaaagttctgcatacaaaggtcctcacaaagaagaatgcacattctctttccaaagaattcttttctaagggaaagtcttctttctatcctcagygccccatactaggttagttcactggttctcacattcaaagagcaaaaaatctctacagcctcattcaaggtgtggtcacagacagttgctcactgccacc

SEQ ID NO: 30453 - DNA, 201 bp, Bos taurus
ccctcttaaggccaccagtcaaaaaatgggactgcagggtagcatgaaatcctgtctccaaaactaatggcagaaacctctttagaagacgggttacattrgaggccacgtgtgaataaaatgttcccgaggatagataagcttggcaagcaatttggcagctgtctcctggacaagtgtccttcactggaggtaacaatc

SEQ ID NO: 30454 - DNA, 201 bp, Bos taurus
aaatgagggaggaaaatactggaaggtaataattcaaataaatgtataggatgtaaataatggtaatcgccaagctataatctacatggaggaactcaggraaaaaaggattactcagcagtgaacttgtatactggcctcatgttctatatgctatttgttctatctctaattttctgcgatctataatgttgataattg

SEQ ID NO: 30455 - DNA, 201 bp, Bos taurus
atagattgtgctttgttttacttgttatctctaccccaattcccaccagttttcttcacccttgagtatatttatatatatcaacatcaaacaagtagatyactacccatgtctttacctgtgaatcacattcagaggaataaagaaagcacaaaaggacaaaggaaacagtggattactcctaatgaagtcccacagttt

SEQ ID NO: 30456 - DNA, 201 bp, Bos taurus
tgctagtctgctctacccagggctaaactctaaccctgattctaattaccattattacagaatgatgaaatctgaatttgaaatttgaaaaggggccttcrattcacccagtttaactcctcactttacagataaaaaaacaaacaccagcaaggtgaatgcacttggctgagatggttccgtttggtggcccttatacat

SEQ ID NO: 30457 - DNA, 201 bp, Bos taurus
ccttttcccatttctcagtcaggaatccagagctcccttaccatctctctggtcacctggttggggggaaggggggggccttccagccccctcccaaatcrtcccttcctcctcccctactcctagctgaagaagctctgaatcaatctagtcctgaattagatttctgatggctccctgcccgaggcctctgtttatctt

SEQ ID NO: 30458 - DNA, 201 bp, Bos taurus
cctaagctccccatcctccttaaatccctgatccccgcctcttgccctctccagtccttcgccttagtgttatgagcatccgttaggccttcagcatcatyctcctggtatatttgtttctcccaaatgctttcccttctctggttgagacccctcagcagggcccctctatccactctcttcatacgctcctttttagca

SEQ ID NO: 30459 - DNA, 201 bp, Bos taurus
gcaatttccatgggcccaaatccttctcctgaggcctgtgcctttgccaaaatgggcaaaggatcctgtggctggagggataattggagatgcgtgggccrggcagatgtccacatctgacaagaccagcactttaaatagcctggagagaatttcagtcaggcaggaagacttctgtaccgacatcccactgttccctgg

SEQ ID NO: 30460 - DNA, 201 bp, Bos taurus
ggcagactccttccccagcccttccttcctgccagagtttgggctgacctcccccaatgctaatgaacagctcagaaatactaacaagtgccttggcaccyggaatccaggcagcatcacttccaatgtgaagctgggccaagtcccggccccagtgcagtctcaggggtttcctaggccccgtggagcctggtggcgtgg

SEQ ID NO: 30461 - DNA, 201 bp, Bos taurus
acaacacatacattgctcctcactggaaggagcacgtgccacttttccacgaccacttttgattttaagacttggctaattcacaaggcctcaaaatccartctgctttgctcttggattaactgtgctatttgaactaaaggcttaacttgttcttaatcatcttttggaaatgctgacttagagaattagtgcctggcc

SEQ ID NO: 30462 - DNA, 201 bp, Bos taurus
ccctggctggccattaaaacccactcacatcagatatttagaaactagaaaggtagaagtagcaaggcacgtttttaagcagcactagactagaatctcaygttaccatagaagttggcctttttgatacacatgaaaagatagttgttttgggtaagactgctttgttatctgaagttttctgtttttccaaccagcttc

SEQ ID NO: 30463 - DNA, 201 bp, Bos taurus
attgaaagcatacaaagaactcatacaactcaacatcaaagaaaaaacaaataacctgatttaaaaataggcagaggacctgaatagacatttttccaaaraaggtggccaacataaaaagatgccaacatcactaatcgtcagagaaatgcaaatcaaaacagtgagatatcacctcataccggtcagaatagctatcat

SEQ ID NO: 30464 - DNA, 201 bp, Bos taurus
tccctgatttgcactggcctttaatttctaggcatctggataaaatgtttattgttgactcattgcctaggttataaagtgatccttgtctcttgctgagwaatggatctagtagaatagcccaggccttaaaatcaggcagatctgagtttggattccgtactgccaaattaccagctgtgtgaatttggttaacaaaga

SEQ ID NO: 30465 - DNA, 201 bp, Bos taurus
gggtatgaagtgatagttcgttgtgattttgatttgcatttctctgatgtttagtgatagtaccttttcaggtacctgttggccatttgtttcctgctggyaccctgattctttccttttgtctcactcagttcagttcagttcagtccagtcgctcagtcttgtccgactctttgcaatgccatgaattgcagcattagg

SEQ ID NO: 30466 - DNA, 201 bp, Bos taurus
agtcatagcttgttgactagatgaaaccttctaatctagaaggattagaaatccttctagaagcaggagagaagcccttgaagctaaacaaggccgtctcrggacgaatctggtaagtccagcaccattttattagatggtcagttaatatttgaaagtcaaaaaacttaaatgattcagtagtatttaggtgtttttctg

SEQ ID NO: 30467 - DNA, 201 bp, Bos taurus
gttcgtatttctttataagcatatagaaattgaaaatggcccaaatctgggactgcagattcctgctcatttatgacactgtgctttactaaattaatgtrtaaacaggggcaaaattctcttgtaaagctcaggaggcatttgcacagtgatatatacaccagtacatgtatattatatgtcatttggcactttggttct

SEQ ID NO: 30468 - DNA, 201 bp, Bos taurus
agtaaatggccgcagttcaaccacgatgaggaaattcagctttctctgtggggacggctcccattagccagatacagaaaagttggatgaccaatgatacyaactcatgcacgcctaaggcccaaggtggggggtggagggtgagatctgaagaagggctgtccccatttaccaggagcaccactgccccagctttctccc

SEQ ID NO: 30469 - DNA, 201 bp, Bos taurus
gaccgttgaaattggaatttttctcttttaaagtctgctttgcatttcacctgctgcagcttcaccactgcacatggatattgtctctccctcctctaaasttctcagtcatggtccaattgtaccttgacctaaattgaagagcaaagactatcttgttttcccttatatcttccagagtttttaatttcagaggctcag

SEQ ID NO: 30470 - DNA, 201 bp, Bos taurus
ggtaacaatggtagacagcacacagtgggagctggaggccagcatgaaagaaatataatctgaccaaggtcactgtgcctatgggctgggatatgtgaatrttagcttagcaggaggccatggaaattttcacagaccaaattggcatttggagctgagatggaaagctgtgaacacaggatgttactgcaaacagggctg

SEQ ID NO: 30471 - DNA, 201 bp, Bos taurus
attgatttccttattgaaaggggaaatttggacccagacacagacacacataaaggcaagatgatgcaaagaaacacaaggagaaggtccaagtccaggakggaggcctggaacagacagtccaggagagaggcctggaacagacagaggctttcctcacagccctcagaaggacccatcttgattttgaacctgtagcct

SEQ ID NO: 30472 - DNA, 201 bp, Bos taurus
ggatcctatatgttgtgtggtgctggccaagaaaattaaaaacacagggcacttgttgacacttgtgagttttagaagtctcctctaagagcagcagctayccaggggccagttctcattttgcagttttgtcctgaatttaccacaggcactagaattttaggtccctataacatattatatactcgaacatactaagta

SEQ ID NO: 30473 - DNA, 201 bp, Bos taurus
tgtgggcctttacacgtctccactcttcattcctactgctgcagctcaatgatttagtggttcctgggagcaatggtatctgtactgcagccagtgtttargattggtacttaccacacttgtattcaggattaattcagtgccaggaagggatcagccatgactgtgggcctaaggttgacagaagatgagccccacaac

SEQ ID NO: 30474 - DNA, 201 bp, Bos taurus
tccttgaggcttgattaaaaaattaaatggctaaactttgcctcaatattttgcattgggattttgagtgacttgatgattcttttcagggtgcactttcyttttcttctcttggcttgaaattaagaggtaggagaaaaggaggatgctcccgctgtgcagttgttcttgagttgggctttaaatgaagcatgtagaatt

SEQ ID NO: 30475 - DNA, 201 bp, Bos taurus
tctttctaaaagctcctattccagcagaagaaacagatgagttaaatacgtactgtccataatacataatcaaaacttgtcaagaaatgcatatgtgtaaytagaatttgaaaataagctgaaagagagagtgaaaaaactacttttaaaaatgacgaaatcattttttcttaagtttgatgaaaatcatcaacccacaga

SEQ ID NO: 30476 - DNA, 201 bp, Bos taurus
atcttcctgacatggggatcaagcccatatcttttgcatctcctgcataggcaggtggattctttactactgcaccacctgagatttaagagaaaatgacyactcatcagctatgccttgatgaaacattatttctaaatttgtagcattatagaaggtgtagaggagacaaataagatatattatgtgaccccataagag

SEQ ID NO: 30477 - DNA, 201 bp, Bos taurus
gaatctgattcctgatggagtgtgacaagtcagtgtgaactctgggcagaggcaaaggagcaccagttaaacacttggccaggtgatgtaaaaggtcaggmaggaagaagcacaagagaggcagactccctgagataatgaatctgccagagcctcaggccttccttctccttgtccttatgggggttcgctgtccttccc

SEQ ID NO: 30478 - DNA, 201 bp, Bos taurus
ggcgacctagaagattagtggcaacacgtgtgagctacaaaatgaccactgctttgcttctccccttcaaatctcctgcaagaatatctgctatggccackctaatgggacacgtgcaggggagggaactctgggaaaggcagttcatcctcaccaagttgacactatcaagccaccctgccaggtcagctgcttccatgg

SEQ ID NO: 30479 - DNA, 201 bp, Bos taurus
ttgctgcatatgataaatcagcagtcatcattccagtatgctaatgtgtcactcaggtatattctttagatagtggcctgttcttttaaaagatgatgctktaacttggttatggcaagttggacatggacaggtagactggagtcatgaagcgacaggtgggccaacaggaagatgattaactttatcccttactttccc

SEQ ID NO: 30480 - DNA, 201 bp, Bos taurus
tctctgggaagattctcttactagatatttctttactttgcttttagtggtattactgtaaatcatgtcctatatattgaatctcaggatgctgcaaatgwgaggaaccataatatgaaaaatcttaggatgctacaactgtgagcaaccataatacaaaccaacatttcatacagaagactcagggggcttagaaagttg

SEQ ID NO: 30481 - DNA, 201 bp, Bos taurus
ccgaggtaggtataacggaagagtttataaaggctgaagcacaaaggctgatggaaagtctaatgcagcatcagcaaatgatggagtcgaggaagatattycatcaggaacaagtgagactaatggagacaaacagagtataccaggaggcactgcaacagagggccatggaacgtcagctccaggtactcatcaattatt

SEQ ID NO: 30482 - DNA, 201 bp, Bos taurus
gtgtcataacaaaagaatttcaaacagaatggggaataaagaaaagtttcttttacttatactgtttattatttctcagtagtatgtccacctcagtgtaytgctgctgtgtacacacaattttatttaaaaatatgtttaaaataagaataaaaaaaaaaaaagactggaaggggagagattaaaatattatgtctgagc

SEQ ID NO: 30483 - DNA, 201 bp, Bos taurus
aaatatgggtactactaaagaagcaaggattatcagttctgtggagcaagaattctcttagctattctagccggataatgcactggctgatgtggcttcamccaaacgtcgtctcttttagatgtaggaagcccactctaaccattcaaactttcaactttaggaggaaaccaagtggaacagtgagagaacaactcccag

SEQ ID NO: 30484 - DNA, 201 bp, Bos taurus
tttattaattgtggctctactttttaatgtttccttttttcatctttgtctggctttattcttgtgttttttctaactttttgagtttaataataattcartaacattcagtctttcttcttttataagaattcaagactgcaatttttcctctatatatcactttagcttcactcctggctggatgaatcacaagctgga

SEQ ID NO: 30485 - DNA, 201 bp, Bos taurus
aaacaataaatctaccctcctctcctgccctgcaaaccatcactccaaacagaaaatgtggaaaaccttgcaagaaagttggattctgttatatttccacrccttcaaagttcagataatttgggaattcttcaaaatttggatgtagtttcaaaccaaatctaaacattttttttgtttttccacaacaaataaaattca

SEQ ID NO: 30486 - DNA, 201 bp, Bos taurus
aaacacagatagtacatagaagtgattgcaaagttgaataaacaccagattagttttaaaaagtctgcaacttcctggtggagcctttcaaactgaactgmgctattgtctgacaaagtcgatggtggccaaaatgttgcattaccttccactagtgttcacgtgagagggtatctgacactggcgtgaagaagaggtagt

SEQ ID NO: 30487 - DNA, 201 bp, Bos taurus
gcatagctggggcaaaggcaaaggatgttgagcatctgtacagacacagtgttttgcaaacccaaatattgcccactctcttcatatactaatcacatccyatctgtcaccaagtgctgggtcctctgtccctgagatccatctgcttctccccaatgttatcaccacttccttggacaactgcagtaacctcctcagagg

SEQ ID NO: 30488 - DNA, 201 bp, Bos taurus
ttggccacctggctagtctccagatagcagtggggccactaaataggcaccctgattgggtaggtatgctggctcggttccatgtcagatggggccattarctggcttctgaagttacctctggtagggtatgatctcaggctattttccctggaaggacagtagcacttgttggattctgcaattaggcaaggcctcatg

SEQ ID NO: 30489 - DNA, 201 bp, Bos taurus
ataacctcttgaaagactctatttctaaatatagtcacattatgaggtactgtggttaggacttcaacatacgaatttttgagaggatacaattcaggccrtaagactaagtgtagctctttcttcaaattcctcatggatgtagcagagggaggaaaacccatttctttactcttcaagcataaactctggatcccaagt

SEQ ID NO: 30490 - DNA, 201 bp, Bos taurus
cacagttcctgacttacagctccccaaaccctttgaattttctaagtgttgagactgacaaagctgtctcatgataatgaagtggctctcgggcctcactraggttgggggcagtttacctggagaaccaaccttgtgattgaagacttccagagaggggaaagggcctggaggttgaatcaatcaacaagggccaatgat

SEQ ID NO: 30491 - DNA, 201 bp, Bos taurus
tatggcttaacccctatttcttttaggtaatctttgttatgctagagcgttgatcaaatggaatcgaactcacttggcctgtctgttgaattaagctgaaragaactgctcgcatctctgctctcagaataatacgaagtggcagctgtgtagaactgatagagaatctagtgcccctgcctaaaaaatagaaggcctcat

SEQ ID NO: 30492 - DNA, 201 bp, Bos taurus
caaaatagggcgtgtatgagctaaaaagtaacttgggccagagtataacagcatgagggaactcctctcaaagcaggcaacatttgagctgagcctaaatyataagaaggaaggggccagctgtgtgaagttctagagagaagtttaggcaaactgtgtggatcacaataaactggaaaattctgaaagagatgggaatac

SEQ ID NO: 30493 - DNA, 201 bp, Bos taurus
gcataatctacagtaggcactttttctttctgtctacctttcactagcagtgaagataagtgaagcacctagggctgcgtaactggtaaagacataggccygggaatagaagttggggcttttgatgctgtctgaaataaaaagttctgaaaagccagcattgataccagtggaatcatagtggtggccaggttaaatacg

SEQ ID NO: 30494 - DNA, 201 bp, Bos taurus
ttgtcatataaataagggtttttgaaatagctttcatgtcttctctcatttgccttcaggccctttgcttgcactggattactatggtaaatgtatcattyataagtccctttgagtaagcatgcttatctactgctagttatgctaccaaataatttcacttattagtatataagcatgataaaaaataaatggttctaa

SEQ ID NO: 30495 - DNA, 201 bp, Bos taurus
tctgctgaccctagtgggcaataaaaccccatcggccgtcctagagcttcgagctagtctgatattccatgaaccaccctgacattagtgccttctcatgycaggttttgagcttcctcttgttttctagcactgtgctctttcccttatttatttatttattttttttgaaactgtctgtagctttacacttctgagctt

SEQ ID NO: 30496 - DNA, 201 bp, Bos taurus
tagagcatgcagcacagagaaaatgaaaagagctttcttttgttttaaaaagaaaagcctctagaagcaaagcttaactgttcagtgcaagagatcactartaaacatcagattaatgccaaagatgtgtataactagatttgatttctttcaagctattctagcctccttcatataccgctagaacaactcaaaatggca

SEQ ID NO: 30497 - DNA, 201 bp, Bos taurus
gctgttacttaaaagtctatttaaatgttacttcctctattctagctcctaaaatgtattaacacccacattattgtactcacacattgtacaataattawatgcttatacttctctttttgagcttcttccataattttctacttctagaatctaacacaatagtaaccacataaaaaacatttaagaaatggttttgaa

SEQ ID NO: 30498 - DNA, 201 bp, Bos taurus
agctctagatgacatacaagctcctgggcctcaggacgccaatgcggcttggtagtctggggcagagagatgaacaaccgtttccccaaatttgtattgtrtgctgtcacctgggccttcagaacaaccccaagtcttatcaagctgcgctcatggaaaaaagtagcttcaccccaacagtcctctccctaacctcatttg

SEQ ID NO: 30499 - DNA, 201 bp, Bos taurus
agcctctggaagaatggataaatggtggcaaagatgttcaaacaaaatgcagtggtagtttgacaatgatcattctaggcttgatctcagaaaatatttamattaactatttccattttaaaataaaatatttaagttcacaagtagcagcaaaaaaaaaaaaaaaatcccagaaatgcatataaaaactgaacaggatgt

SEQ ID NO: 30500 - DNA, 201 bp, Bos taurus
aacttctgcacagactctatcgactgagtatgattctctttcttggtcaggagagaacaagatagtgcctcttccatacaggagcttttgaaatattcgaraaaaaagcaatcatagattcttcaagtccctccctcattagggtaacatttcatgtttcttcagctgttacttacaggaaatggctttcaattcccccca

SEQ ID NO: 30501 - DNA, 201 bp, Bos taurus
caattcaaaacccttcaaaacatggacagagtaatggtaactaatgcagtggtagaggattttcctgaattgtccacatttatttcatcagaaagatagtrtaatatataaagttcaaatgagtttaggatcttttagtcctgacttccgtgtggtaccttaatttacccttttatatccctatgagtatatccctttgct

SEQ ID NO: 30502 - DNA, 201 bp, Bos taurus
tttgacattgttctgtgtgtagaaaaacagaaagagcctcatttcccagtatgcctttaggaatccttaacatgaagggtaggaaacacccattctgcctycttctttattgctggtagtcagtgagatcactaggtaagggacaagtagtcaagctttaaatgatgcaataagtaattgcatgtagactgtgataacact

SEQ ID NO: 30503 - DNA, 201 bp, Bos taurus
aagatgtagatgctcttatactactttttctgtgccagcctttttgaacaacataaaagagtgtagagcgggcagcatgaggtctgacagtctctgaatgyggaatgtgggaagtgaaacagaggggcaagtgctgaaggaagctcttggaactgagaaggatatccaatggtactctcttgttatgacttttctggtgac

SEQ ID NO: 30504 - DNA, 201 bp, Bos taurus
ttagagttaaaacaactcaatgttgtgggaaatgaagtagactcagatttctggtgtgtcagtgcttagaaaagagctatttcttgagctaggacacattrattcctccatttagttaaaattcaccgtgtacccggcactagtctgagtgttagggacagagcaataagaacaaggtctttagctcatgaatcttcagca

SEQ ID NO: 30505 - DNA, 201 bp, Bos taurus
tattatccacattatatatgttatctgctggcccacatggctgtccagcaagtccatagtgaggtcatatgggtccatgtgcaagctgctgaagggtgatmttccggccccgcttctcagccactgtcctgttgggctccgtctggtacatgtgtttgatgaagcacagcaggcacttctggtttatgcaggcagctgcat

SEQ ID NO: 30506 - DNA, 201 bp, Bos taurus
aaaattcatattcaaacatttgaatggaaggattctaaacagtatcctctctctttctcttaattctattcccttccatgtatcttcattttcaataataytctcttcaagtggtagcaaaaaacgaccaatggcaaactaaagtcacatttttccttttgctcatgatctcagaaaaaaatgttttctttctgattagcg

SEQ ID NO: 30507 - DNA, 201 bp, Bos taurus
gataatacaataatcctacgcctatttaaaataatctgtcaataattaataaccttccaaaagagaaagcaccaggcccagaaattttcatgggtgaactytactacacatttaagggatcagttcagttcagtcactcagtcgtgtctgactctttgcgaccccatgaattgcagtacgccaggcctccctgttcatcac

SEQ ID NO: 30508 - DNA, 201 bp, Bos taurus
agcacctaatattgctagtgcctagaacagtgtttattgaatatttgttgaaagaaaaacttaaagaatatgttcacaggaagaacagaatttcatgaaayattatttatagctctaaggtaattttccatattccaagtctttccatgtatagaaggtcaaatgacatttttcattgctgttttttactggaattatacc

SEQ ID NO: 30509 - DNA, 201 bp, Bos taurus
gagagcgtttatccattgacaattcccactgagagctgttcagcctgactcaggaggcaccgcataaaggttttaacatgccctggcctgccactgtccawttgcaaggacagagacagagcctctgtgtggcatttctcagtccatttgtgagggcgcattcatttgacagaggaagggcctggatctaaactgggagta

SEQ ID NO: 30510 - DNA, 201 bp, Bos taurus
ttgatatggattcaattttcttgtattcattgaaaggttttgtgaactagcatatgttctttcttggagaatggtccatacatgtttgagaaaaatgtgtrctatgaggctgttggacgaaatgttctataactgcttgttaggttcatttgatctaagatacagtttaatccaatgtgtccttatccattgtttaaagta

SEQ ID NO: 30511 - DNA, 201 bp, Bos taurus
caacaagtcatcagagaccacagaaccacataattctactctgccacagcagtctttatttcaaaaggagtggtttccagcacaaggaaacatgcttcctyagatgctacacttcaacagtgtgctgagacaggtaactctaagaaaaaagtagtgaaattaaaatgagaccatgtctttcatataattttcttctcctat

SEQ ID NO: 30512 - DNA, 201 bp, Bos taurus
gacattctgacttccgtcccttttgattactctggggaaagtcagctgacatgccatgaggacacttgagtagccctgcagaaagatacccacagggaggmactgaggcctcccaccaatacctggtgaggcatggagttttcctgccagcagttctgtcactgggctacctttaaggcagatcctccagtctcagcaaag

SEQ ID NO: 30513 - DNA, 201 bp, Bos taurus
agaaaacactgtcagatcagaatctcttttctgaattttgataatgctaattgctcactttctatcctagttattttatcagtaaaattgttggaactctygacattgcattttatttgatagaaacgtcagtggaactccctgaacaatgtagactttgctatttcctttaatgaaacagtctcaatgctaaaaatatgg

SEQ ID NO: 30514 - DNA, 201 bp, Bos taurus
caaggcaggaacaatgtaggtatctggcccactgccacaatcattatgtcacttctgatgaagctcgactttccacgattcaggaccttcacagcacatayagattccagaatataccctggaactaaaaacatttatggtttgctcagtgtgccctgatgtatgccaatgtcttagtcttccattcttccttaaaatagt

SEQ ID NO: 30515 - DNA, 201 bp, Bos taurus
caatagaaaaaccaggtttctccccacagcatattgttgatatttttaacatttagcaagatacatactttctaatatctctaccatgattaagctgattyattctgcactaaacaattttatcttaacacctatccctgttatccagcatacaatgccttagagtttagcatacctgattttaaattctgactttgctat

SEQ ID NO: 30516 - DNA, 201 bp, Bos taurus
ggaggttaagcagtttgtttaaggtcacttgtccataatgctcttaaatgttatgatcttacttttctagacaaaagattttaatagactctgagaaagtrtgacaccccacaagcaatatgtccttattttggagcatttaactgacactgtgctctgtgtaaatctctaaaagaagaaaaaatgtgggaatataaggta

SEQ ID NO: 30517 - DNA, 201 bp, Bos taurus
atttttaaaagatatttttaatattaaagaaatatatggcttatgattatggatatctgacattctggaatgattgagaagttctcccatgaccatagttkaagaagactgctttttatattaatcataaatatcaatattttatttcaattttttgtatttattgattttaatgaaagattttaatggaaaattttagac

SEQ ID NO: 30518 - DNA, 201 bp, Bos taurus
caggaaagttcctaataacctatttttaataacctaaaaacagatttcccaatatagggcctatatagatctgtctcatttttaagggttgcataacatgmcactgtatgagtatactctaatttttctactcaatttccaactgataggcatcttgaaagtttttaattgttttctgtgataaaaaagctacactctata

SEQ ID NO: 30519 - DNA, 201 bp, Bos taurus
aagataaaataaaaacataaaaataggcctatgtaagaaacaaatcacagttttctacaaggcaaatagcccagctgataaatcatttttgttctgtctgycctgtgtgaagaggctgaagagatgacacatctcttaaataaatctggaagcttttctcatttaaactatctttgctgctatatttattccagaaactaa

SEQ ID NO: 30520 - DNA, 201 bp, Bos taurus
ccaggcccagctcaagtaagtgatctgaatctggcttcaggaaaaaaagaaagcatttatgctctgagtgcacagaatgaaacactgataaacagttcttkgtaaaactttgaattcagatggcattatttttcttcttaagccataagttgtcttttaaagaaaaaaatacatgtagcaaataaaataaaagaaaaggaa

SEQ ID NO: 30521 - DNA, 201 bp, Bos taurus
tgatatttgataaaagcaaagtaattttgcaaatgttatagagatctcaaaccactgacttttagttaatcacaatggaaattatcttgggtgggccttamctaatcaggtgaaaccttaagtggagctggaccttcctgaagctgggttcaaggcatgagagagtctccttctggctttgaagaagcagaaagccatgct

SEQ ID NO: 30522 - DNA, 201 bp, Bos taurus
tcattcctcctgtaccaataaagcaatgctccatgaaatgttttgttgaaacatgagaactactaatcaaatggaaaggtttgttccttgctacttttgcyggcagtagtgagaatttgggcaacgtttctcactcaaattgaatttactcttctttaatttggtctggaggaaacagtagtgatggaagttctacagaga

SEQ ID NO: 30523 - DNA, 201 bp, Bos taurus
ttacatatggcatacatttctcatggtgatcaaatactaaatagattcctgatattacaaaatgacagttcatttatggataattggaaaggaaatgcaaraataaatgaggtcctgtgaatatactaactaataactagtaactaatagtcagaaaaataaatcagtatgtagatagatgccataatgcaatttcctttt

SEQ ID NO: 30524 - DNA, 201 bp, Bos taurus
gcctattaattgtgagactgtacctggtctcagcaataactcaggagtccaactagaaccccattgcctttctggaacatctaaaagaggccctacaaaartttgccagtgttcacttagattcttatgagggatcagatcagatcagatcagatcagtcgctcagtcgtgtcctactatttgcaaccccatgaatcgcag

SEQ ID NO: 30525 - DNA, 201 bp, Bos taurus
ggaaggtaagttggaatttacagaaagggaagagaaagctaaggaagaacagatcataacttttagctaaaatgaagttgtcaatggaaagagagtgaggkccagtttacacaggcacagtaagcaatgtgagaaagtttctagcaacttaattcacatagtgtctttattcagtttgatgaaaattggactatggttaga

SEQ ID NO: 30526 - DNA, 201 bp, Bos taurus
tttaaatgaaaagctacattctctactggtaataagatttaattcatctaattataactctgggccagagtccaccaataccttgactgatgccatctgtrcactactgcccataccatccctcaccctttcaattgcttcaaacataattcaagaatgtagttctaaagccatactgtgattttgtacttaaagtggttg

SEQ ID NO: 30527 - DNA, 201 bp, Bos taurus
ctcagtcatcataaaatgagaaacctatttgctttctcaactaactctattatatagtaaaattcatagcaaataggtactcattgaacttctaaggaagmtatcatcatgatgatttgcttatgtactttttgttcatatatgcatatgtacacatgtgtgaggctatttgcattttcattgctaaattaatagaattat

SEQ ID NO: 30528 - DNA, 201 bp, Bos taurus
taatgaagctgctttgttgacaaatctatcatataattacatcactaatgtagcttttttgttatcaaaaatcagtccagaaaggccaaatactaacaatrttttgagttgcttgaataatcatacattgatatgaactttattaatgatcaaaatttatataaaaatcattgcactttcaattcatgcaaaaactctatt

SEQ ID NO: 30529 - DNA, 201 bp, Bos taurus
tatgtaatgaaagacagggaagcatggtgtgctgcagttcatagtgtcacaaagagttggacatgacttggggactgaacaacaagaacataaatgttggktctggtacatagcaaatatgagggaattaaatgagattagaagagaggaaaagaagagagaaggaggaaatatccttttcattaaacattttttttaact

SEQ ID NO: 30530 - DNA, 201 bp, Bos taurus
aaagactgttttactatatttgttaagtattcctttgttttgatgttatcatgaaatcaaatttttctactatcccagttgcagtatggtaaactacactrttttggcgattacttttcctttcttctaactgattacaaaccaaattataaaatgctggaagcattcaggcttaaataagttttcaactttaaagcatga

SEQ ID NO: 30531 - DNA, 201 bp, Bos taurus
cataaagatggggtattgtatgatcccaggtatattctgttgacattttaatgttttaaacgacaaattatatcaacagaaatcccatatgtaaaaggatrttctttaaccatttagtccattgtaattatcaaatctttggttgaaatcaagtacattttacagtcttgtttcatagtgtgcattttcgtatccttgctc

SEQ ID NO: 30532 - DNA, 201 bp, Bos taurus
cagttgggcgttaacaacctttatagagagaacacaatacatactgaatattaattatattctatgaatgcagatatatatgaaatacagatatattttckcaatcacagcacttttgccaacatatatttcttaaaaattcaaccattttcaagctaaacttatcaattaaaaaaccctagttttatttcaactcataaa

SEQ ID NO: 30533 - DNA, 201 bp, Bos taurus
ctctgtgagttagtgaagcacagggaggcctggcgtgctgcagtccatggggttgcaaagagttggacacaactgagtacctgaactgaactaatggtgtkcaaggccagtagaatctgtacttacagctttagtcctataaagaatagaggtggtaatgccattttaatatatcgatattttcacaacaaagattccttc

SEQ ID NO: 30534 - DNA, 201 bp, Bos taurus
tacactactactatctcactagtccccttttctcagtcccttttccaacataattcttatctcctatttttctcttaagtgggttacgtcctacaggttcrattctctaccattttattagagtaggtagtacatttacagttattataatgtttatatcattatatcatgagtttgagtaagctccaggaattggtgatg

SEQ ID NO: 30535 - DNA, 201 bp, Bos taurus
ggagtttcatttatttttgtgaaagtttcctttgagtaaagtctttggaatttcttttactcccttgatttttttttttccccagagactcattttgtcartattctggaccttttttttaacctatctttaatacttgccccttattttcaagcctatcaaattcttctttcatttattttccttttgattgtttttatt

SEQ ID NO: 30536 - DNA, 201 bp, Bos taurus
ttgccattctttggctatgaggtcagttcttcttgcctgtgaagactatccaggattcaatgctgcctcactgggtaatatgagaagatgattctaatgawgacttcactaatggctctcaccagttatattttttaaggaaaatcaatggcttaagtagaaaacatgaccatgacttacaatgctgaataaagaagagtg

SEQ ID NO: 30537 - DNA, 201 bp, Bos taurus
ttttctccccagctccccaaaccctgtccctctccatgtccattcccctaatcaatttcatatctctggcaactaatttccccaggaaatgatgctatagyagaaccagagaacagcatattggaacaatacaacacatctaagatttagtgaataaagattctatgggttgagaggagtaaagaaaatttaatcagtaag

SEQ ID NO: 30538 - DNA, 201 bp, Bos taurus
gagtctctctcatactttgactctctgctggctcttctgtcatcagatctttgaccattctgccttcctcttcagttttgggaacacatatcattgggccyatccagaataatctccctactttaagtcttaattccatctataagatctcttttgtcttgtaaaatatcatatttaaaggttccagggattagggcaatt

SEQ ID NO: 30539 - DNA, 201 bp, Bos taurus
aatattttattgtatctggctctgtatctatcttccagctgcttgggactgatgtgatacttgaaatgataaacacaagattgaatttgtaacaggtataytttttatagtttttcacatcatcttcaaggtattttgggcacttgtagctttatagaattagtagcaataaaaataagtaggatggataaggacagtccc

SEQ ID NO: 30540 - DNA, 201 bp, Bos taurus
acttaatgggatatatgcaaattttccaaacacagcctgaaactgtcatacagctgttgttattttaagatacgcatgatctcctctttctgttctacccyctttgttttcactaagtggtggcagcatgtttgcaagcctagtctggcctatgagaaatggcaatagcatttgctgggttccactgagaaggatcattac

SEQ ID NO: 30541 - DNA, 201 bp, Bos taurus
aaatgggaagttttagtgcaaaataattcagtttaagtaatgacaaacctggaagtggtgctgaaatgggattccaaaaggaagtagaatccacactctamaaagagtttgtattaagctgttaaatggggaaaacaactcaaaagttaaatttcttaaaaatctcaaggaaatctcaaagacctaccggcctctgaacta

SEQ ID NO: 30542 - DNA, 201 bp, Bos taurus
cagactgcacagatttgaaagctgatggccattatatgggggggaaaagcatttgaaaacatttgagtttagtactgagacaagagaaatataaactgagrgtggtttctgttgggaacttgaaaatgcttctgctgggtaaggctgctaatgtcaaagagaaaggaaagaaaagagcaaagatatgtatttctttagctt

SEQ ID NO: 30543 - DNA, 201 bp, Bos taurus
atcagatggtggcgtgtttatttcagtctgtcacagaagaggaacaagaaaacactgctgggccatgcaatttggggtataaaaatactaagggccaaaasaaaaactaaagacgttctgcctacttgactaaactcctaaatacaagggttgggggagaattcaggaggggttaagagaagcatgatggctcagtagtga

SEQ ID NO: 30544 - DNA, 201 bp, Bos taurus
tgggcacagaccatgtactctaatcgatcataatccctcctatgattcctgcttttgagttgatggccaatattccaaaatatgtagcatctcagagagtrtgagtttcatgtcacacagaaagacttttagaaattggagactctgagactcaattagtaaacatatggaattaccaacagtgctgacaagtacaattgc

SEQ ID NO: 30545 - DNA, 201 bp, Bos taurus
gccagaattatctaaagaaaggaatcagttcacttctttgtatatacattgctttatagaatgaaagaactattgaagtgaaagagacaccttagatgccrtctggccaagcctctcattttatagatgaggcaactggggttcacagaggttaagtgctttgctgacagtcacttattcttgcagaaaccaaggtcctga

SEQ ID NO: 30546 - DNA, 201 bp, Bos taurus
tgactaagcgactgaactgaactgaactgaaacatagtgtgatggttaattttatgtgtcggcttgtccggactaagggatgcctaaatagggaacagtgmaatattatttactggtgtgtctgtgatgtatttctggaagagattagtatttgaatctggagactaagtgaagactacccttaccagtgtaggtgaggat

SEQ ID NO: 30547 - DNA, 201 bp, Bos taurus
caaattaaatatttttaagttggataatcactctaataagagtaaatttagaggtagtcaggaaatttgggctaaaaagaaacttttcccaagttcacccrtggctccatctcccatcacagtgttcaatctatggctgtatttccacaaatcattttgcttttatatcagagagagaaatgctaaaggtaatcagtggga

SEQ ID NO: 30548 - DNA, 201 bp, Bos taurus
aagatgctaagattgtgtcagggaattataaaaagtccagtacaactagattaggaagagtgaaaagatgctgttagaaggtgagcccaacaaaactgatrgtttcagagacttagtgaagtaaaaatgttagtcactcagtcgtgtccaactctttctgaccccatggactgtagcccaccaggcttctctgtccattca

SEQ ID NO: 30549 - DNA, 201 bp, Bos taurus
ctttgcaacccctatggtgtaacaggcctcacatagttcattaggaccacaaatttatatggtcaggaaacaaggtttcaatgatctttacaggaaaaaawttccagtgctgtctttagatgtggcaaaaagatgctctggaaaaggagacatccaagtgataagggctaaaagctgtagagaataaaagaatgaggaacc

SEQ ID NO: 30550 - DNA, 201 bp, Bos taurus
caggaatatggtttcatttcctattgggctgcaatttgccatgtatcagcatccaagggccaggctgctcaacctgaaaatgattattttctttcttttcmttaatgtatcggaagtggatctaaaagaacctgcactatacaggggggttaattatcctggcagtcagttaagctttgtaagttttaggtgataagaaca

SEQ ID NO: 30551 - DNA, 201 bp, Bos taurus
atggttgctctggagtataaaactttacctccaatatactgccaaaaatactgaatgattccatacaacatgttatttgagcttttacagaaagcagtttyctgagattttctttctttatgcccttgtgttttcttgactttttttacccagttccagtttccttagatatgttcagaggataacatttttaggacacat

SEQ ID NO: 30552 - DNA, 201 bp, Bos taurus
tgccatttccttttccagaggatcttcctgacctagggatccaacccaagtctccttcatcccctgtattaacaggcagatactttatcactgatccaccyggaagccatttctatattacaaattgatatattgacatataactagctaaaggctaaaaggcagcatagtattattctagagtccggggcagtatctgac

SEQ ID NO: 30553 - DNA, 201 bp, Bos taurus
aatttggatatatgcatatttttggttttccaagatgaataagttgtagagatctgctatacaacacagttaacatacaactggttaacaaaccagtatcraacactgcaaaatactattcacttgtacattatatgttgagacaggagaaactaggatgaatagaaacaatcaactttatccagattttttaatatcata

SEQ ID NO: 30554 - DNA, 201 bp, Bos taurus
gtttactacactggccttaaaaatcccatgaccacatgagaaatgtttgcaaagcagcacaagagaaaagtaatctacaaaacagtacacagttattaccrcaactttgcacttagggcctcacttgttctcttttttcaggccccttttaagcaggaagtaaccaaaacagccacatagggataccctacagatcaaaat

SEQ ID NO: 30555 - DNA, 201 bp, Bos taurus
cctttcacaagttaaaagcagcaaggcttattgtaaagactaaagtgagtttagttatgtcacattccagtacttgcctttcttttggaatctctttaggragaaagaagggccagcatttaagaatactggtcctcataaagacatgaatgggcttgtcttcctcttttctcctaccctttcaataactgttattgttca

SEQ ID NO: 30556 - DNA, 201 bp, Bos taurus
tagaggtccaatggagaagcactgtctagaacatagcaaacctcaggcacacaggatccacactaatattatacatggaagagagacctggggattccttrgaagcctgggaaccctgatgtgtatttctttgggttcattatttggaaaagcttaacttaatcaaaccacaggtctactaaatttactctttagttcata

SEQ ID NO: 30557 - DNA, 201 bp, Bos taurus
caagaatacaatagcatcttactaatgaggcatatttttctgtaatctatatgtggaaacttggttttgggaaatactttgactcatcagctctttttccycttagtaattttttgcaaaagaaacgctacacatacatcatgactaatcaaaattttgttctggccctgccagatatcagtatgcttcaaattaacagag

SEQ ID NO: 30558 - DNA, 201 bp, Bos taurus
ccaggaactgcaggccctgaggctgcctaacctcccaaagtgcctttgcaaccagatggacaggagaaggaccttgccttcattctggagatccatatctrgagattcatacccagacaaatgccatgtctaaaggatatgctgaaaatccaaactccagaaaagtgtgaaatttctcttggaactgggcctctaaataat

SEQ ID NO: 30559 - DNA, 201 bp, Bos taurus
ctgactattctttctagtccttaaatgcagggttcccccacagctctggtcttgtcatttttctcttattactctgagtaactggattttatttccatggmttcaaagtactcagaaatcccattctgtaggtcccaattctaaatgctcacctacctcttacagatagccagctgaattgccccacagatttcaaactct

SEQ ID NO: 30560 - DNA, 201 bp, Bos taurus
tctctggtggtgccattatatattccataagtatgccttgtgaatacatttaaataaatcatttgccattagtgtttcaaaagatattctggcccacagaycacaaatctctccagaaacacatcagattcatttttaaaactccaggaagtccatttccaactttttgtttaatgccttccttaaacaggaactgagttg

SEQ ID NO: 30561 - DNA, 201 bp, Bos taurus
agacttacaagatttatcttctgcccacctttctagattcctttcccaccactctcttacttacactgtgttcccaagatgtatcaaacaacttacagttycctaaacaggccccactttccaccttgacccatgttgttccctccactgggaaaaaccttttttcctattcctgatggaccttctgcaagcacacttctg

SEQ ID NO: 30562 - DNA, 201 bp, Bos taurus
tatacaacgtagaaaaatatgtgtatacattgtaagaccacaatgctaaggagggagggtgtacaaatctctcaagaggccagaaatggtaggatgaagcrgacttccaaccgcggcgctacatagggacacctttcctccttgggtaggaccaagttagacaacagcaggggttggtccgggggccgcccttagaagacg

SEQ ID NO: 30563 - DNA, 201 bp, Bos taurus
tttattactctttgctatcaacactgtactcatatctgatttttacatccagtcatccttgttgtttttacttctttgctactttaggataaagatacagyattcactaagttatttaataaatgactagagtagatctaagattcaacatgatgagagtcattagcataatatgctagtcatacatttgattaaacctgg

SEQ ID NO: 30564 - DNA, 201 bp, Bos taurus
ttgaacgtctgtatgaggtgtttaattttgaaatacctgacccatgacagtgttagggattggtgatatacggttaatatgcatggagagcacttctttawggccttggacttctcatgactgaaagtttgaatatgaagacagggagaaggaatctcatctgagctttggtactttcctcgatggaaaaaacaactcagc

SEQ ID NO: 30565 - DNA, 201 bp, Bos taurus
attgtaatggcctctattcaaatgttcttgtgttgaaataacagactccacggatgggccagccgtggctttgagttgcttcggtcttaaaagctaggagraagctgatgacaaagctggggagagagggaaaaggtatgtaacataatgagtatgactcaggcttcaaatataatcggatattgaaatcactgaggtctg

SEQ ID NO: 30566 - DNA, 201 bp, Bos taurus
aatcatattttcctaatgtacccttattcaattataaagttattttcaagtacagttactttctaatatcaaagaataccacttggccatctatgtcattygtcatgcttcttaattgcagattgtttctgagccacttttttcttcacttttaagtagggtgaaacttccataaatcagaatctactgaattatcccatt

SEQ ID NO: 30567 - DNA, 201 bp, Bos taurus
aaaatataaattaaacactagaattctcttcaaagcacacacacctgtcatcattacatggatcataaagagacgtcacagtttaaaaaacagaaacagaytcaaagacatataagacaaattatcaaaggcatagtaaggttaaattaggagtttgggatgtgatgaggacacagcaggaagacaaatctgctgggctgg

SEQ ID NO: 30568 - DNA, 201 bp, Bos taurus
acagaggctttaaaggtgatggaatagcccctcaaagcctattttgagcaggactcctgcagagggccctgggagagaaggaggtagaagttgctcatgaraatataaaatgttaatgaagaatttggaacataagcaagtgtctaacgatgtgacagtgcataaagcttttccaaggaatctgatgaacagccagttttg

SEQ ID NO: 30569 - DNA, 201 bp, Bos taurus
ctcccagcaccagaatcttttccaataagtcaactcttcgcatgaggtggtcaaagtactggagtttcagctttagcgtcctacattatttagtgatttaytaaaattcagcttctgtcctacctcactaagataaaaaaaaaaattcgcttcctaattcctcaatccaattaactccagtttcaattcacgtttcttttc

SEQ ID NO: 30570 - DNA, 201 bp, Bos taurus
tttttgcgcggcgccccgagagggcgaaccgcggagggagggaccggccaacggcggccgggaggtggcggacgcgctggccaagccccggaaaaaactgyagaagtcttgagaagaacaagggagtggaaaaattagactagtttgagtcttggttgggaaggtgagtactaggtagtatcatcagaaagaaagtgtatt

SEQ ID NO: 30571 - DNA, 201 bp, Bos taurus
attttcattttgaatggattttccgttccaagatagttagtcatttatgccctcaaagcacttttcaaattctgttattgtaccaaacatattcatttatrtatttattgttcatccttgcttctagaccataaattttccagaacgggaactgtgtcttattactgtttataccctacaagcccagcacattaagtgagg

SEQ ID NO: 30572 - DNA, 201 bp, Bos taurus
actgctgcctgaggccacagagctgtgtctcactttggcagcacatataccaaccctggaatgagttcagaaatattagcatgactcctgtgcaaggataytcagtgttttatttgaggttttggccactggagtaaggcaagaaaatgaaataaaagctgccatgagtggaaagaaataagcaaaactgagtattcagag

SEQ ID NO: 30573 - DNA, 201 bp, Bos taurus
aacaataatctagacaaagggtcaggcactgaaatgcagttaaagtataagaaaagtgtcctacctaagtgcatttgacagaatggagagaaggctcagcycttcaagacccagacacctgcctggagacagattttggattcttgtaacaaggtgtcttttctgctattttcaaggtagattgaaggaatacaaaataga

SEQ ID NO: 30574 - DNA, 201 bp, Bos taurus
tgcagggaggaggtaagagcctttaatgttcagttgcagtccaccattcctgaggactttattctttgaagttcagtttctccttgggaattcacaagggrgatggcttaagtccgaatatgcagcagtgttttttttaccagagagtctttaggttgcagaatcagtaaagagctaaattagccatggtgatggaaatga

SEQ ID NO: 30575 - DNA, 201 bp, Bos taurus
gatattatatctatgaaattttaatgcttcaatttggcccacatggcatgaattagtgagccaagattctatcaggtccccttttcacaagaagaaattaycactaaaagattaagaggccacagctctcactaaaggttaccttcccagctgaaggatgcaatggctatggaaacctagcatggccttcctacaaaacaa

SEQ ID NO: 30576 - DNA, 201 bp, Bos taurus
ataaagtgaggagaatgagaggaggccatggggtatgctcacatagaagcctggggtccagctcagcccctgactggtgcctgctgtgaaacccttctccytccctttctagggcctcctctacatgccttgctcagcaaaacttgctttagtggcagatttctggatatcatgcttcagcatactgggactcaagcaaca

SEQ ID NO: 30577 - DNA, 201 bp, Bos taurus
agacagcaatgatctaaaggcaaaacatagggcctctaccccacttcccaccctcgctgctccctctctgatagggaccgccaatgtgttaatatacattragaaaggggcccaaatgccagaaatgtcaggtcacagagcaagctgaatgagagctgtggctgaagactcaaagcacaaccactcttcagtgtccaagag

SEQ ID NO: 30578 - DNA, 201 bp, Bos taurus
acagctgctgtaaaatgcaggtcagagctggttccctgctaggaataagcaaatacagctttttaatacacagtacatgaagtactgcatgtcaccatccrgggacatgctacattatgcaaggtcaggtgtgggggactgcacccaacccctccctggtcagtcaatgtcatctaaccagatttccagctggagcttctc

SEQ ID NO: 30579 - DNA, 201 bp, Bos taurus
tgaaaacttatgactgcctaggctaaatgaagatttcagcagcttcatctgccaataatattttagttttattatcactttcaaatgaactggtgtatttrcttatccaaagtttaaagatttcccagatgtcacactgccgttaaagcatgaacacacaaaatggatccagtacaagatcctggtctagctccttgactt

SEQ ID NO: 30580 - DNA, 201 bp, Bos taurus
tcttcactcttgagaggtttaggattagtttaggtaggctcataaaaaaaattgaatctcaggaaagctttgaggtaaatgagatcatgcctatgaaaatwatgtgtaacctgaaaagtttgtgaatgtatcagggttcggttcaaaaagcaaagtattgtgaatattatgggataaaggatttagttgagcacttaaact

SEQ ID NO: 30581 - DNA, 201 bp, Bos taurus
gctagaagtagaatgttttaaggtagttatttgaagacagtaaagcttttttcttttccagtttttttacatttgaataattccttagtatgaaaaataayaccttcagtattgttttggaagccaaattttaattgcatgaaatttcaaaagtttgtctctcaaatgttactttactacctataaagctttatctatatt

SEQ ID NO: 30582 - DNA, 201 bp, Bos taurus
cttcctctctctctgttttttttttttttttgcaggactgtacatatttgctcctaatactgtctcaaattaaaggccataaacaggctttggaaagacaratgaacagaattattttgaaagatgcatgatatctaacacacaaaaaaaggacttaatggaaaaagggccataaaatatgccactattcaactaaagagt

SEQ ID NO: 30583 - DNA, 201 bp, Bos taurus
atcttgagcagcctctggcctggatcttctgtcccctttgctccttgaatttgctaagttgctaagtatccttggggttatcatgactttagctgtattckcctctctcagggttctcgctttcactttgatttgagcctggcatttcttcattgttttgtcagctctccagtgctctaaaaatattctttaaactttata

SEQ ID NO: 30584 - DNA, 201 bp, Bos taurus
aaagtagggtccaaatttcttctctgccattcccatggttgtctgccttgggggagtccctgcagttcttggatgaattgtaagagatgaaagaagataaygtacaggaaattatctggcaaggacttggtaaacaaagacctccacaaatattattccctttctatttaattagtatctatattttccagatgagattgt

SEQ ID NO: 30585 - DNA, 201 bp, Bos taurus
tagagaaaagaaccaaaagagagcagggctgtgagaatcaaacagttaaagagaatggaacaaaatgaaaccaaaatctaatctgcctaaagggactcagsatacaagattcatttattcaagattcaagaatacatactcatttattcccattctaacagtatgtctcagggctggagatgctacataggacagttctgt

SEQ ID NO: 30586 - DNA, 201 bp, Bos taurus
gaatgtttttggagatttgttatgcaaatgaaatctaacaaaatcctctctcagtcttactctttcccttcctcgtctttctctcctttcttctttttccygcccgccatttggcttctttgatgtattgatgtatcgctcataggacccactgcctcttccttctctattggacctaactgtttttgttttcatacctaa

SEQ ID NO: 30587 - DNA, 201 bp, Bos taurus
agtaaataaataataaaaccattgtgcagtttttgcatacatgtatgaatggcaagtaaacaatttggtcactggcaaagatttcacttttcctcttgaakgacatatttggaggaaagactcttttcagttatccttggaatagctagagaaagtaggccatttctatgatagtcagctgtgcaaaaagttttgacagaa

SEQ ID NO: 30588 - DNA, 201 bp, Bos taurus
agggggaaacagtgctgagttttgtcttgcttctatttgtactttctgtcctcatttaaatcacattcctttgggattatgttgtgtatttaaaactgtgkagaatttgtgaacacagccaacatcctgatatgttggtggggagtgctctgttttattgttagcaaaataaatagaagaaaaaatagttgacacataata

SEQ ID NO: 30589 - DNA, 201 bp, Bos taurus
atgaatattcaggactgattccctttaggattgacaccctttgggatgtgactgtgcacaaaaccacacacagttttttgcatggttctgtgtgtatattkcataaaatatgttgatttttaaaaataaaatatgtattattaagtaggaagctaatcacactcatacatttcaagcataatatttgctcccaggattcag

SEQ ID NO: 30590 - DNA, 201 bp, Bos taurus
tctgacttggagcagtaggtgttggctcggtaactgaaaaacgcagcaacaggagtcttcagtcaccagatgaaccaaaacaaggggctcaccatgcacayacttctcaacgtttactactcagatgctaacatttctcatttgcttgcttaccgttttatagccactattttatttctgcatcgtcctttatacactttc

SEQ ID NO: 30591 - DNA, 201 bp, Bos taurus
attttcctgaagaatcaggaatataatatcactctacaaataagtctattgggcacctgacccctaacctttttctccttgtttttcattttccacccatyccctaggtctcttagctccatccacacacattatggtcttgttgctgtacttcctatagtcagataggtttaatatatatgatttcctcttcctagaaag

SEQ ID NO: 30592 - DNA, 201 bp, Bos taurus
ttgtactaagatctgtatttaacttaaacaatgaagatcatacagtgttactcgcctccttcttgtctatcattgggccgtatccatgtagcgagggtgaycatatatttttttccaaactacgtcacttctgaagctaaccttcactaggatggtaggcataaagtgggactatccatggcaaaccagggtgcatacata

SEQ ID NO: 30593 - DNA, 201 bp, Bos taurus
gatcaggatttcaaaaagagccttgtcctccatctgcttatgaagggaatatggtttccagaggagaatgaagggctgggaatcatcatttatatctagayacataatgagatttttcatgtaataatcctaacaaattttgcaggacaaatgggttctgataaagatctacaacaaaattttttagatttaagatacttt

SEQ ID NO: 30594 - DNA, 201 bp, Bos taurus
actttgctttaaagcttgtatttatattttttcctgacttttctccaaactcatttatgtcagggcctatattgtcttcatgtttgattttatagtggccracaaagtgctgacacatggtaggtatccagaaaatattttgtcaagtgaattgtgtcataaggtatccaaagcttaattaataataatggccttctcaga

SEQ ID NO: 30595 - DNA, 201 bp, Bos taurus
atggactacattgctgaagaggatctgataattagtctgttgcattggacaaatggacactcctttgtatatcaaattttatacttgaagaataagacatrttacagtaggattatatgacaagtgagttctagaacaaaacaactcatttgaggtgacatttttatttctggtacctgatggaacctcaggatcatgtta

SEQ ID NO: 30596 - DNA, 201 bp, Bos taurus
gtttagtagtaggaagttagtagtttagtacaaaaacagatgtttaaatgaatgtgtgcaacatcatgtgataaatgctatctatgatatagatagataaygtgagctgacaaagtatgctttgaaaatcaaagtaccacttaggttggactgtgttctgcttcatgccaggagtgaggtttggggatctgaactgctaac

SEQ ID NO: 30597 - DNA, 201 bp, Bos taurus
tatccagaggattttcccaacccagggatcaaacctgggtctcccgcattgtaggcagacgctttgctgtctgagctaccagggaaatcctccaagaatgytaatcactatagtatttcttagtatatccaaaaatctcaaaattgtaaatacaagagggaaaatagcatgttttgcaagaaagctaaatttggccttaca

SEQ ID NO: 30598 - DNA, 201 bp, Bos taurus
ttctgtgctgtttttcatatggttccatctgtctgaaatatctaccaccctccttggccatctgtcaaactcctgttcatacattctatcttaaaaattarctatcagatgaaaatttccctgatatggcgaagaggttgtaaaaatcgactcttctgttctcccatgccctttgtgtgtacctgacatcatacattatag

SEQ ID NO: 30599 - DNA, 201 bp, Bos taurus
tctaaaattgaatgcattgaacttgaatcactctggggttaagaaataataaagcatgtgcttgattactggaaaggcttgttcttgtccgtatctcaaakttttaaaatttattcaagaatcatcattgttattttcatcactttttgtcttcctttggtattccagacactggaaggtcagcacagtggctgtggaaag

SEQ ID NO: 30600 - DNA, 201 bp, Bos taurus
attcttctcaccacattttcacaatttagctgaaactccagcagagtcatgtatgcattcatctttgcacataaattattttcctggaagacaacaatacrttccttattgcaacaattctaccacatttttaccttcactgaaatattaactaagaaagaatttactgaagagaaaaaatattgaagcagtactttgtaa

SEQ ID NO: 30601 - DNA, 201 bp, Bos taurus
ctttatccctgttggttttggaccaaggcttggccccaatcatgttgcttcttggtgacacagtaaccaaaactctaatatagaaccaattttctagccargaaaagtgaaaagatggcccctgcatggcaaggaatgtgggtaaaactctgagagagatagcaagctgaaaaagatcttttaaatatgtatataaatcta

SEQ ID NO: 30602 - DNA, 201 bp, Bos taurus
gtagttttaattcaaaattttccattttaagggaagataatattatacaataagcaggacctgtatttgactaatggaatggtagtcattcttctggacaytcatataccacatttcaggagtccattaagtagaagagaactgtcactcatcatagtctttcaggtttccaagtttgataacattattaaaagcgtccat

SEQ ID NO: 30603 - DNA, 201 bp, Bos taurus
cagacagaatttctttttcattattggaatagtatctccttgttttaaacaattgcttcccacctcaagccagcagctagcaatattttctgagtggtagwggccataagtttataaaatctcagccctgtaccctcaggggctttctaagacgttagggtctaacctagggttggtcaggcatagcacttaatcattttt

SEQ ID NO: 30604 - DNA, 201 bp, Bos taurus
cccttgaatagtaggtgctctgtaagtattgttggataaaagaatgctttctggaaaaactgttgatcggtttattgaaaagatggcaagaatttactacyagaagtattatattagccttgctacatttaattacagcaccaaaattattagtaaaaagcagtttatagttttggtgtacaggtctactgctctgcaaat

SEQ ID NO: 30605 - DNA, 201 bp, Bos taurus
acaaggtggaggaagaggcagatggacagccatcttgctatgctggttactgagggcctcctccactgtagatgcactcaggtggcatggaagggaggtayaaggtccctgtgctctgtgcccactgtgagaagagcatcacacaccttgctctcacacctccttcctaacagactccagctctggccgtaaaccatctgc

SEQ ID NO: 30606 - DNA, 201 bp, Bos taurus
cctaggttggccatgactaaagtgacttagaacacaggcaccatagttgatttacattacattagtttcagctgtatgcaaagtgattcagttctacataygtgtgtgtgtctacatacatatattcctcagtttcttttccatacttttttattcttggtttgcaatttaatacagtttccaaagagaattcctttagat

SEQ ID NO: 30607 - DNA, 201 bp, Bos taurus
ttaaataaccaaacttgtcataatttgttatagttccacaatcagaattaattttggaattctgaagtgggttggaacaaatacttaaaaatgcagatgtrgctttggaactgggtagtgaacagagctggaaaaattctagctaaaaattcattattgagaaagcctagactgccttgaacatagtgctaatagaaatat

SEQ ID NO: 30608 - DNA, 201 bp, Bos taurus
ggaaatattttaagaaattattgaggttagagtttcctgaagttttcctaaggacttatgtgttgcatgatttttaaaaaattcagatggccagtacattytggcaaatcttgcttcagtttagttcagttcagttcagtcactcagttgtgtccgactctttgcgaccccataaattgcagcacgccaggcctccctgtc

SEQ ID NO: 30609 - DNA, 201 bp, Bos taurus
ttaccactgaaccagcaaggaaggccttacacactgctaagagccattaaaaattgacttctcttcatgaaatgtcaataagatgtcgaaaggcaattcartatgttgctcacatgatggcccaggttcccaggagggatacttatcttacaatgtgggaaggggttctgctgtacaatacttggtatcctagacaatggg

SEQ ID NO: 30610 - DNA, 201 bp, Bos taurus
ttaagatctagtttcttagaaatcttaaaatatgcaacataatattgttgactatattgtgtattggatctccagaattattcatcttttaactgcaaacytgtaccatatgaccaacatccccccaatttctccaccttccagtccccggtaattaccgttgtactctgcttttgtagttcacctatattagattccaca

SEQ ID NO: 30611 - DNA, 201 bp, Bos taurus
ttttctgtttatctgcttttattttattatttgttcataaagtattataaacctattatagtgcagtactacatagctgattgtgttagtcgggtacctargctaactttgttggacttactgtatataaacatgtacaatatatttattcagataaatacactaaaggcaagaaaacagtacctcctacaagtggcatca

SEQ ID NO: 30612 - DNA, 201 bp, Bos taurus
atatacaaattataatgaaccctgatgtatgaattgtacatctcttttaagaagaaaaatatgattgattaacactgaagcttcctctgaattcctttacytcttcttccctcacccctcagaggcaacctcattcctaaatttttgtatttatttgtacattaataaatttcatgcactttcactaagaatatgtttatg

SEQ ID NO: 30613 - DNA, 201 bp, Bos taurus
tttcattcaagaagcaatgtatctggccacatagaagaatcaacatgtgttaaagcctaccataagttgaccaattcctttcgtcctagtcagttactgtkttggccaatggaatgcaatcatctgtgaggagacttctggaaaatatttttcattctagtaaagacacataaaagggagatagagaaaatccacccctct

SEQ ID NO: 30614 - DNA, 201 bp, Bos taurus
tactgcaagaaaacagatggaaggtgaactttacctttccatttcctctaaaacatagtcagaatatcacttgttgggcctgaaaacacaataagaagaaytgtaagaaaatgaaaataatgtcgtgtccatgtgacaatgagatagaaaccagaagtactatgaggtcctttatggaggttcctccagggtggccagtgt

SEQ ID NO: 30615 - DNA, 201 bp, Bos taurus
gacttaaaaacaaaaagtacatttccagatatcagtgatgtgatgcatatggaatgaaagtatcactgccatctataatcttagttctttgaagggaaccrtggaaaatctattccttatctgtattatcagtttccaataagagggaagcttagactgcagtgataaaataaaatccttcccaaaagttttgccatcagc

SEQ ID NO: 30616 - DNA, 201 bp, Bos taurus
tccacttgagaagcacctctgaaaagagggtattgcatctaggagaaaaaaaaaagttgaaactttttgctaaagaatgacttcaggctttaaagaaaagrtgtggtagtaaccaatacttctttataaagtgtttgtttcaaacttatccttaaaaactcacaccaagtaactggtagaggatattagatcagaaacaat

SEQ ID NO: 30617 - DNA, 201 bp, Bos taurus
ataattctgaaataacttctccggcttttgagctccctctagggtcaactgacacctttggtgagacttgtttaaagcccatcttctccctctattcaacrctgcttccttttcttcccttgtagaagtagaagcccaagctttccctaataaacctcctgaagagtattctctgcactacaaactaaactgtgccccctg

SEQ ID NO: 30618 - DNA, 201 bp, Bos taurus
taaaccctttgttgggaggagacaagaaccaagggagagaaataaaccaacctgacatcttgaaaggcgttaagaatatcagtagatattctgggcccatytcttccttttacagggtaaacttgatataatcaggagtcttgatatttttgcttgatggatttacaggcccacttctgactgttaattctagagactgat

SEQ ID NO: 30619 - DNA, 201 bp, Bos taurus
atatcttttcctggaatctctacacagaagaaaaatatatttaatctgaaaattttttctcaggtggtagtaattctcttacaggttctctgtccctactmcagtttagctaaatgagtctctcccatatattttaacattactctcatttttattcacaatttcaataaagaatgatttatataacatagcatcacctgt

SEQ ID NO: 30620 - DNA, 201 bp, Bos taurus
taaactcccggagttagtgatggacagggaagcctggcatgctacagtccatgaggccacaaagacttgtcagacacaactgagtgactgaactgaactgmactgatacagtttagtaatattactatcaaaatcacttaattctctttcaatacttaagtcattaaacctgagaagaatgggaaacaatatcatgaatta

SEQ ID NO: 30621 - DNA, 201 bp, Bos taurus
aacaatatcatgaattatacttcacatgacttcctaaataaaaacagttcatagttcaaagttttaaaagcactttaccagtgaagctaaaactaatcatytgtcttagctaatcaagcatttcaaagctagttttaaatttacaggtcattttttgataatttccattttatttctgttctattatctaaaccaagagta

SEQ ID NO: 30622 - DNA, 201 bp, Bos taurus
gaaacaaaggcttatgattacatggctagttcatgactgatcagagatttgacccaatatgtaactctaggtcctatggtattaccattataccaaacctrtataagttctatggaagagaataatgagatactgattctgttctagagagctctggcaatcataaacacatataaaagaaacaaaaggtcttaaaattat

SEQ ID NO: 30623 - DNA, 201 bp, Bos taurus
attgtaggtgctattgctttcttcagtctcttgtcacaaatggttagctatgctcattttagagcctgaaagaatattgctgcccagtgggcagaaagccrtgaaaacaagaatctatgatcttgttcctgtgagactgcaatatagagggtctaacagcaatgccagggctgagacttgatagagatattacagagtgat

SEQ ID NO: 30624 - DNA, 201 bp, Bos taurus
gtgtatttatttatagtataataatagtaatatggaataaaatacatataaagaattatctataataaaaataacaactacatttattttgaaagctttgkaaaaaccccatatctttggggatgtggtgcctttactctgctttgggtcagcagtcacgaaattaaatcatgagaacttgcttggtaaggtgataaaagt

SEQ ID NO: 30625 - DNA, 201 bp, Bos taurus
actctccctggttttataaatactctcaagcaaaagctattttaaataattcttacctttctagattcctgccttcaccttgtttttcacccaaatagccrtatgttttgttagcttatggataaatttgagttagataaacttctcatctagcactataagttgatttaaacaagatgatctgtcctggcccctagtaca

SEQ ID NO: 30626 - DNA, 201 bp, Bos taurus
gtcccagccaaggttaaggtctgtccctcctggctgagtctgggatgagccccattccaggtgtcttctgagtggagctcctgaaataaaacaagactctmttgtggatcctgaccacctctcttagaatagcttttatttatcaatataatgatgttgaaaggtctgtccctaccatggatgggacagattaaagggaca

SEQ ID NO: 30627 - DNA, 201 bp, Bos taurus
acaccctcaactccgtgagacaacttaaaagccaaccactacaccctcaactctgtgctgcaacccccttgccagggggcctttaccttcatcttccgtcraaactgcacttgggttgatggctacaaagtctttagtgtcagccacagccacactgggaaggagaggaggagaacaagagaagcccccagaatcccaggc

SEQ ID NO: 30628 - DNA, 201 bp, Bos taurus
tcactcttatctagttatcacccagactttcctccttgggctccccaagcacaatctcagaatcctcatgcatcaaagagccctaaacagaaagagactcmcagatacaaaaagctaacagatggttgacagaggggagatgggttgaggtatgggtgaaacaggcgaaaggggttaagagattcaagcttccaggtataa

SEQ ID NO: 30629 - DNA, 201 bp, Bos taurus
gtaaagatgttgccacaataacatcgaaaggagtcacaatagcaaactcagcacaatatttgccattggcatcttttaaataaaaaccatcaatgaaccaygagaattcattgttacatggaggaattccttatagatcatcacaaagagtcagaggtgatccatcagcattaagcagtcatgaaggacttcatcagtggt

SEQ ID NO: 30630 - DNA, 201 bp, Bos taurus
gttaataatgggtgttgtcagcctgggctgggaggctttgcagcgagaaggaaggaaactcagaccagaccagaaaatgggccaattgcagtcccagtcarcacagcgccggctcggctcagccgtgcggtgggtggctttggagcctgtgcagttacaagtggcgctgttttgcttttcctttcccacgccttccctccg

SEQ ID NO: 30631 - DNA, 201 bp, Bos taurus
aataactcacccatggatacaaaaaacaactgcgaatttgaatgattcagtaaagtatttttctctgaaaacaaacaacaaaaaaacaattgataaaaagmgctactcagcttatgaatgaatgtaactccaataaaaatttacttttatgtttaataatgatgtatcataatgaatttgtaatacatgcctgttgtttgt

SEQ ID NO: 30632 - DNA, 201 bp, Bos taurus
tgtagcgaagagcttaaaaaatgaacttgctaaaggacagaatcattgagagctgtaattacaaagacccatcctgaagtcaaattcaggttgggccaaayccataaatacaaggatagccctgagagccagtagcccagcgaaccaagccctctccctgtcatcttctctccctggcctgggacataagaataactggcc

SEQ ID NO: 30633 - DNA, 201 bp, Bos taurus
gacaagcaggcaggaaggggagaagagaaagaaggacagagagggggcacatgtcctagcacataccatgggcaggccccatgtgggcccattcagtgacrtctcatgtcctcctcagccgcatgacatactagctttggtgcagtggttaaagtgtgagctccagagccaggccctctatgggcaaatccaggctctgtg

SEQ ID NO: 30634 - DNA, 201 bp, Bos taurus
tgtgacataagtggtacagctgagagaagttggggccagaatgcaaaagaccagcaacttccaggtctgtttatgagcactatctggctctgggcaagtcytgtctgctctcttggcctgttctgtcacgtggtaactgagtaggttggatctactaagttgatgggttctgtaggtagggccttttcagggctgagacag

SEQ ID NO: 30635 - DNA, 201 bp, Bos taurus
agggttttttaaattttcttgaaattgaactatccgtgtgttcctacaaaacatgaaagttccattctccaagtgataggatttttaaggaaactaaaatrtccacttgcaattattaagaaacgatcagtgactcaatcactaatgaatacaatcatctttaattctaaaagaaataaaatgttaaaatgatttacatat

SEQ ID NO: 30636 - DNA, 201 bp, Bos taurus
aacagtaaagaacatatcatttacagagaaataaaccaatagcattattagagatagagtcacttcataaggataagggaggtataattctaaacatgaarcttctaataaaataacctcttaatatatgaggcaaaaattggaaacttggtaagtattaaaatagatataaacatgcctctcaattactgatgtcaatca

SEQ ID NO: 30637 - DNA, 201 bp, Bos taurus
tgcgcaggtcagtgcttgctggttcacaccgccagttcactgccaagttcagaggcgtggactgaatgccctgggctgacaccttgccaaagacagaaaaragaacatttaaggcttgaccattaatctgaaacaaaaccagaagctatgattatgtcttatgggaatattcatagttattaaaagatccttgtgctgctc

SEQ ID NO: 30638 - DNA, 201 bp, Bos taurus
gctagcctggatcctcagagccttttatatattaacaggtggaattctcacaattattaaccctattttaaagaccgggaaacaaagacatagaaaagtamgtaccctttccttggtgtcagagctgacaggtccgggatatatatccaaatttccagactccaaagcctgagggcttaatctaagccatcctatagacct

SEQ ID NO: 30639 - DNA, 201 bp, Bos taurus
aaccattagcaatcatggacaatctacttcagcaatttgttcttgcaacaaaaaagattcttgtggacatgttttctcttcttcaaaggttaagatgccayctttcatatctgccactggcaggtaatgcagatagtaacccgccgtctttgccttgagctcctcagaggaaaatgtgttatgtgaatgcactgtgctacc

SEQ ID NO: 30640 - DNA, 201 bp, Bos taurus
ctccttttataggggcaataattttaagagacagctgggaatatctgtgatagcattgtgttccctaatagcaataggatctggaaatggcagaggccagktggcagcacataaccagtagaagggaggtagaagggaggtaaaaaaagtagcaggttcagaatatcagcaaggcctaacccacatgaatatatggaaata

SEQ ID NO: 30641 - DNA, 201 bp, Bos taurus
accaagggcccaaacagaacaaaaaggcaaaggaaggaagaattttctttgtcgtcttaagctgggacctccatcttctgttcttggacatcggaactctyggtttttgagccaacaccagtggcctcctcggttttcgggtctttggacatagactaaatgttactactccctttcttgatccaccatcttccagcaggt

SEQ ID NO: 30642 - DNA, 201 bp, Bos taurus
agttccatgagctgcggccttgtctatttggttctctcccggccctgacacactggagagctcaataaacattttggaatgaatgaaagcagtaagtcagkgattgaatacatgtgagtgaaggcctagttgaggacaaggtagaatgtgtttgggaaataggtaatcgttactagagtgtacatgataacaggttggaaa

SEQ ID NO: 30643 - DNA, 201 bp, Bos taurus
gggggctaatttttgtgagttaaatatttagagtctggagaaattaacataactggagaagcataggtaaggtactgatagccaagaaactccaaaagctrggaaggcaatcatagagaaccccaggtctatagtgcctaacatcagtcaacactcctgtcaattttttttccctcatcaaggcaatctttcaggaatgat

SEQ ID NO: 30644 - DNA, 201 bp, Bos taurus
aggaacttcagaggactgacagttgtagatgcagcttcattaagatgacagataatcaagctaaacagacacctacaacttctagaagaggagaccaaagracatgctaaaagagaaatggcactcaattactacagcattctaactgcttaatagctggctctggttttgctgctagaggtaacctcaactctcagaaat

SEQ ID NO: 30645 - DNA, 201 bp, Bos taurus
gcaggctacagtccatggggttgcaaagagtcaggcatgacagaatcataggggtcaacaggtaactgatggtctgctacaggcctgtataaaatgcaccyggtagtaatggggtaatccaaccatcaatatttactacaagttggcactgtcctaggtgtacaggatacatcgatggccaaaaataaaaatctctgcccc

SEQ ID NO: 30646 - DNA, 201 bp, Bos taurus
ttgcaaaatcacatgcgaatgtgggcccagtaggtaatgattgttaggggaatgggttgggtgtgaagcaatagggagtagtggagactgtggtgaagggragaatacaggccctgtcttcaaagggagctgctctacacaggagctgactattgccagggcaggaggagaatgggacgacagaggatgagatggcatcac

SEQ ID NO: 30647 - DNA, 201 bp, Bos taurus
taaggccaccattcttccaagccaggttcctgcttgtaggttcctagagtccagagtcatgcctgagaaggtgaaggctgtctagcagaggccttagcagraccagaacctggatttggtgctctcttcactttacagcaaaaccttctgttttacttgttcacggtattgtattaaaaacgcaagctttccctggcccat

SEQ ID NO: 30648 - DNA, 201 bp, Bos taurus
attataaaatttagcaacaaggaaaataagtgaccaccacactgattcaattaaataatcattatttatgcatttacatagtcaatataaaacaagatgcmacacattatgagggcataaagatggataaatgcttctaggatctcacagtaaagacaaatgtatacacaaataacattgatatatagaattgcttgaaag

SEQ ID NO: 30649 - DNA, 201 bp, Bos taurus
agtatctgttttagtttgtgaatcaggagaagtttgaactagaatgagaaacacaagaaacagaaatttaatagacatggcaggaaaaacagtaagagaamgtgtccctgcatttgtaccataatgcctaagatcatctaagtgaatgcaagtaacctttttaaagtttctaaattttacaattgcaatgaacttattttt

SEQ ID NO: 30650 - DNA, 201 bp, Bos taurus
tctgttttaaattcccagctctggaggaagaagcaaattttcagttacaataggttattaacattaatttttataggtaaatcataggtgcttaagttttygactcaattttgaaagtaatagggcaatacctgaatgtactaattcattcatttatttaaataataattatggacatctaaaatttaaggctaacatttt

SEQ ID NO: 30651 - DNA, 201 bp, Bos taurus
ttgactactctaggtttctcatatgagggcttccctggtagctcagctggtaaagaatatacctgcaatgcaggtatctcatataagtggaaaaatacaaratattgctttttcaataaatcccgtatttattttcttacttttcccatctttgtctttaaaggttgagtgcagaatacaatgtcagttaattgcagattt

SEQ ID NO: 30652 - DNA, 201 bp, Bos taurus
acacaacattcttggccttgattccttcctcccaccagcacctcagtggagaagcccacagccaggtgtgtcagctccaccaaagcaaagtcacactctgytctccttagatgggcaggcaggccacatctcccaacagctccggggttagtcagcctgagcattactccagccctcagttcacaatcatcccacatctag

SEQ ID NO: 30653 - DNA, 201 bp, Bos taurus
aaattcatctatgttaattatacttcaataggaatgataaaagtaaacaataaaaactctaccttatgtatacaaagctttggttccctgtcatggcctcmagcctactctcctcttcctccttttgcgtattagttacagaagaaaggaaagcacctcagagtggacaggtatggcctgccaccttctccactctcacac

SEQ ID NO: 30654 - DNA, 201 bp, Bos taurus
tcctgccaccacacctaactccccctctcactgcaaaaagaaaacaaagtgcctgggtgaggtgggagtgggagcttcctttagttgcccagagcttaaamcacaggttctataagaaaaacgaaacgtctacatggagatatattgatacttatttttgaaagcatatgtgaataacataatgatgtgtgtggaggaggg

SEQ ID NO: 30655 - DNA, 201 bp, Bos taurus
aaaaaatgaaggaggggtggaagctagctgtagtctcagagccctcccttccagctctgccattctagtctgtgtctccctggcttctgatccagttaggygcactttgtttgcattctgtgctgtgccaagctgattgtttgctttttgacctctctaccctgttcttctatctagatccagtgatattttttgttttat

SEQ ID NO: 30656 - DNA, 201 bp, Bos taurus
cgacccctggactgcagcatgccaggcttccctgtccatcaccaactcccggagcttgctcaaactcatgtccatcgagctggtgatgccatccaatcatytcattcctacattgacccatcatcatcagccaaagtccatggtttacattagggttcactcttggtgtacattctattggtttggacaaatatactgacg

SEQ ID NO: 30657 - DNA, 201 bp, Bos taurus
aactgggaccaaaaaaaaaaaaaaggtggcatggcatgataggcaagatctagaataccatgaacattgttggtggcccacccagcattcctcctccccayctgtcttcctttccagcagaacctgattttgttcaggaatccatctctctatgcactcccaagcacctcaggagaatctggcccatctgcttctaagatg

SEQ ID NO: 30658 - DNA, 201 bp, Bos taurus
ctaaataaagattcagaagataggggatccaacgcagaaaggcagcatcagggagttccaaacagacaattctgcatcaagtctagagaagaaagaagackgcagccaagagaaaactgagagagaaaagtctccagaaaaaagaaggaaagaagaaaatgatgtattttcttacatttatattcatgaaaaatttgctgc

SEQ ID NO: 30659 - DNA, 201 bp, Bos taurus
catatatgtattaagcttaaatgcacacatctcggtgctaagaaaaatggatttggtaaattctatttctgtgaatatttaaaaaacaaaaacatactttwtgttttattttcttattttacaggggcctttggaagttgcccaggttttcctatcggaaatacccagtgacccaaagctcttcagacatcataataaact

SEQ ID NO: 30660 - DNA, 201 bp, Bos taurus
gggcagtacagatgtgtagcagaaggacattttagcagtaatggctgacttttttaagagattgttttcatttatcatttgtgaaattttaactagataartaataaaggccatcacctctctcttcctcagaaaaggattactagccctgtgggcccaagcaagtgactccttcagcttcctcatctgtatttgctgttg

SEQ ID NO: 30661 - DNA, 201 bp, Bos taurus
taggggctattatttccttcccttattctgctgagttttttttttttttcagtctgatgagaggcctggcacctgttggaaaggagaggtgctttcttggyacctaagggagtatctgaagaggtcacctgagtttatagccattggtatggtggataagttcagtttgacaacctttatggaatgtcgagctcatgatgc

SEQ ID NO: 30662 - DNA, 201 bp, Bos taurus
tttttcttgaagtgcacctgtgggtcaagagaccaaaagcaagcaaatacatctatttgctccctaacaccatcatggcccacagagattaaacatttaargattaatttctgcttgaatcaagaggtactgatatagacgcattttcccatgtcgtgagggccacggataagacccaatatgtaacagtatgtaagcatt

SEQ ID NO: 30663 - DNA, 201 bp, Bos taurus
tgaagaaacaccaggcctgatttgtctagatttgtattgggaggggtacatggggcgggtagaaggtgggtggtggttgtagataactaatattgattgarggcctgcaagctatttttatacacatcacatcatggaaaactcagcatatccacaatctttgaaatcaaataatattttagtactcttacaaatctctgt

SEQ ID NO: 30664 - DNA, 201 bp, Bos taurus
gagtcggacacgactgagcaactttcaccttcactttcacttttcatgaaggccaggctgcaccatgcagagaactctcaaaagcagaaaggccattgttyggaaatgtattaccaaagtttgcctgtcttcttcttgaggcaacctgcagactccaggctgattaggcctcattacgcatccatatacagcaaccacaat

SEQ ID NO: 30665 - DNA, 201 bp, Bos taurus
agcaaccatgctggccgctgtccaatctgatcactcactacagttcaactacagtttagagtcccctccaaagccccccgtggcttcccactgccgtaagyggagagaccatctcatcagagtggcctggttcttgtcatccgctccggtttagttcccacctcaccagttctggcaaccgtgaatgttgagaatgtcagt

SEQ ID NO: 30666 - DNA, 201 bp, Bos taurus
tatgaataactattatatcctgtaggctgtaaaaataaaagtgaaataagaacagaatcaatagaaagagtatagaagataacaccatcagcagagataaycaagaaaggtttccctgcaagaagaaaagacggcagggttggagctttggtatgaaagtctgcttgctgtctaactaaacagaggctgctatgttcatat

SEQ ID NO: 30667 - DNA, 201 bp, Bos taurus
aaagtagaggctatatgagaaccacatcctcttcaataataatcagcttttttcccctgacagagattatacagtgttaaatgggaatcactaaagctgakaagtgagaaaaaagttagaattctgtcatattacaacagaaaaataatcttagtctttctcaactttaaaattataacctaaaaaatgtctatgtacata

SEQ ID NO: 30668 - DNA, 201 bp, Bos taurus
gtaatggcaccatccgtgaacaccaataaccctttcctagaaaaatcaaagttggctgaacaatctgagggtatatggctgagctgttggagaaaaaaagrgagaattatcaacagaaacctacagacaagaagtatttctatttactaaatattatattttatctctcacatgtataatggcatgctaaatatatacctg

SEQ ID NO: 30669 - DNA, 201 bp, Bos taurus
attctccttgttttccctttttgtaattaaaaaaaagaaaaccctccagaatttcaggtggtcatatggctatccagccctgatttggctgtggccctctyccttatgaaaagaatagtatataaaagggggaaggagagaggagtaaagtgtcagagggaaagatgaaagcctggatctagacctaggggctccagcggc

SEQ ID NO: 30670 - DNA, 201 bp, Bos taurus
gggccagtccagacttgatagcaatgaccccagaactgaggagcattagtgaattccataaggagtgtcattctgcagttcttgttttacaaaggtcattktgatacaaggcccaggggaacagccaagcaaatagccttcctggaagatggtggggtgagggaaaggggaggggtgatgttactaggagggaggggtgaa

SEQ ID NO: 30671 - DNA, 201 bp, Bos taurus
tagggaaaaggaattaaccgtctcttcacattcaagcctgatggagcccctctatatggactgcctggtcctggcttccacatgattatcataacgtaccragtgtcagaaattcagatgaaagcagaaaaggtctcgtaaggaaaatcagaggaaagaggataaagatggggaaactctacaaggtattcactaagagaa

SEQ ID NO: 30672 - DNA, 201 bp, Bos taurus
aaaaaatcacattataactttgtaactacaaggaatcttaaacacttacagacctagcaggcaggttaaagcaggctgctgatacagggtaatacaacagrgaacagtggagattatggcaaattagaaacaccagatttcacctaaagtcattcagattcaagtgtctgaaaactgggctggcaccattcaactcacaga

SEQ ID NO: 30673 - DNA, 201 bp, Bos taurus
gcaaaatccagtccaatcagaacgagagcggtgggcaggggccaccatctggggtatcaggaaagtagcagctcttttgcatgtgggaaaaagtgcaaggkggcaagtgaggcctgctcttcccttaaaatgtattcaagatgcacccccccccttttttaaattatttggctacactgtgggatcttagttccctgatca

SEQ ID NO: 30674 - DNA, 201 bp, Bos taurus
atattgcctccccacagcctcctccatagccaacaattgattaaaatattccttcttgccacatatttcactctttgtgaaagaggttctggaaagtacayttttctcttacctcatttcaccttcattaatgttttgatgtagtatcatggctatctgcctagagggattaagagattttacctggctctgggtgtagtc

SEQ ID NO: 30675 - DNA, 201 bp, Bos taurus
cacacagcaccgttgcaatgaagcactgtgtctggatgaaagatggaagtttcagagcaggtcagatctgagttcaaatcttgaatgtaaactccaagtgrtcaggcatgttttgcccacccttatagccctggtacctatgacagtatctgattcaaagtaggtatcttataaatctctgcaaaaatcaaaatcaaaaga

SEQ ID NO: 30676 - DNA, 201 bp, Bos taurus
agaacctttaagagcgtgatttatcctttcccttttcacttctgttatggtccataataggacttatctagatgaactttcagtcagtgtggatccctgcmtgactgggtgattaatatccctgctgacctacactttccatgtggcatgagcaagccatacactttcataataatgtaaagccactgagatttcggtggg

SEQ ID NO: 30677 - DNA, 201 bp, Bos taurus
catataaaccacatattatatccaagacgttgcactgccaatgtttcagggccctgaatagggtctggccataaaggctatcaaataaatattaataaacraaaaatggtcacaaaaccacatattaaccatacagttgttgattacctaccaaataagaccaactatagcttggctaaaatattgctagaaataaacatt

SEQ ID NO: 30678 - DNA, 201 bp, Bos taurus
tatgaagatgagcagattgtgatctcaggaattccacagggctggatggaaaaaggacagtcttggagggcacacacaagactgtggactgtgtgcacacragcacacaggcaaataaagcagtgacctcgtaagaggctggaccagacctactgctagtattggagggtcacctgcagaggcagggggcagcacagctca

SEQ ID NO: 30679 - DNA, 201 bp, Bos taurus
cagtttagcctaggcctgcacatagtaggtgatcaataaagggtaacagaaaagagccaaccatggagagagaaaagaattgggacagtgtgctattggtraagcagaagaacagggagtggccactggttctttgagagattttttattacctagatagaatgctaagtgcagtctatcactggttagacagtgacatat

SEQ ID NO: 30680 - DNA, 201 bp, Bos taurus
ccctgtggctcaagtttataaagttaaattctgactccaagcaattcaatgttaatttccaccaagccctggtgtcccagaaagccagtgcaccacaggcrcagcttaggaatctgtcctagtctcttttacccagtgcctgccccaataaaaatgacttcaagtaagatagagaagacagcttggagagaaggatggctg

SEQ ID NO: 30681 - DNA, 201 bp, Bos taurus
atattgggttgtttaagaggaatgggtcttggaagacatgatctgtcacttagagaagactttgtgttcagaagagacagctgtgaagataccaaggactmatgttttctgaagacataggatgtgttaggaactatacctgcaatatttcctttaatcttcataatataccaattaaggctcagaaaaatcaagcacttc

SEQ ID NO: 30682 - DNA, 201 bp, Bos taurus
gcatgataatcttgttctcccctttccctgcctctcttatagctacaagtgatgatgcaacctaattctacccagtgatacctaagcagaagtcaagtagragagctcttggaaaagcttttactctgctcattaaaaaaaaaaaagaagaaaaaaaaaggagacactgctttcttcatttcttccccattcttctaccat

SEQ ID NO: 30683 - DNA, 201 bp, Bos taurus
taaggtggtagagggccctgaggggatgaggggaaagcgaagaaattaacataattaactggatagtgactgcagaggacccagggttccacacatcttargcagcatgggggaatgcagaaaaggcccacccgtctcttgagtggccggacacctcacccagaacacagggggactcaacaagatctccgaggccaaggg

SEQ ID NO: 30684 - DNA, 201 bp, Bos taurus
gccaaacaatcagcagacgagacgtctgagggtctgaggctgcagagcaagctaaagagcataaagagtcaagggcaaccagaaactctacccctggccaytctgctcctacccatggattgcagaggaagcccagccccttcccccattctcccccacctcctccaccctggcttccgctgcccagccaacattattttc

SEQ ID NO: 30685 - DNA, 201 bp, Bos taurus
ggagcccctgctttgctccacaccaactgaatgatcttggggagatggccccaacttcctgaatctgtctcctgggccacacagggcaccaatggaggccyctggcagggtttgtgggagtccaatgatatcacagatgtaaagtgcccagtaccatgcctagcccataaatgttaagtgttagttgctcagtcatgtcca

SEQ ID NO: 30686 - DNA, 201 bp, Bos taurus
accgtctgtgactcattgtggttaactggtttctagcaaatatttgctgaattgatggataaaatccaatcattcaagacccagactagatgctacatctrctaaggagtcatgtctaatgtgtaccagtctccagaagtaatctctctgttccctatatgttcagagcatttcatcattcccctctgatgatagttttta

SEQ ID NO: 30687 - DNA, 201 bp, Bos taurus
cactttctctgcaatggcattcaaatgaataaaaagataaaaagaacagtgaccaccctaccacatgctctccatgacctcccagcttaggctcaacggtrcttatttttatatctatctcaagaaagaatttgggttggtttagcccatcatgactcagttcctttgggacttatgtcccctgctgttccaatcagctct

SEQ ID NO: 30688 - DNA, 201 bp, Bos taurus
ggcccccgcgacctcaacttgcgcgtgggcggacagcccctggtcctggagcagatgctcatctactacctggacgagaagcccccccagttctccatgargcgcctcaccagcggcctcatcgccgtcgtcgtggtggtcgtggtggcggtggtcgccggcgcggccgtcctggtgatcaccaatcgcagaaagtcggga

SEQ ID NO: 30689 - DNA, 201 bp, Bos taurus
gggcgggtgtgttgactgcccggtgtgggcggagcaaaaggcgtcccggtccttgccgagggcaggaagtgaagaggccgggcttctctggcgaggtgtgsgcgtgcgcataggtcgagtcggcggactcttcgcttttgctactgctggggtctgtcctggtggggacgcctttgctatagagtgggccgggccccgggg

SEQ ID NO: 30690 - DNA, 201 bp, Bos taurus
ttctttgaggacgaatgatacactatactgagcacagtgcctgtgacacacagtagggtctgaacaagaacaatcacagagaagagggaggattaaatgargcaacccatgtgacaatgcttggtgcataattcaatgagtacttactgcatgaatgaatgagctcacagaatggttgtgaaaacaagacataaatcccca

SEQ ID NO: 30691 - DNA, 201 bp, Bos taurus
aaagggattgccatgacaggaggagctgattaatttgtttaatcacagccagaggcccagattgttctctggacatggcacagtcagttggccctcactcyggaaccatctgaacaggagctcatctctgcccgtgggcagtgtcatgcacaggtcccatggccactgaaccaactgacctcaaggcttgacagcagtagg

SEQ ID NO: 30692 - DNA, 201 bp, Bos taurus
tctttttcagagtgttggctcagaataaacccttgaaattaattgttttgaagatgatgagatttgtaactttgagagctgctgacatttgtgcaccttcrcagaaaggcaagactaggtttctggaagaagaaatctggcctttggaccagagcatgtggtcgtggtttctgctcttttaaccacgaaaagggctaatgt

SEQ ID NO: 30693 - DNA, 201 bp, Bos taurus
ctgtagaacagaggagctgcagggtctgcagacactgggaaaacgcctcgctctatgttctgaaaactgctctccctaacttgcttcactgggccaaggaytttccattcattcagtctcatcttatccttacaaagacccaatgaggaaaatgtttcttcactttgtagtcaaggaagctccttaacagagaggttacat

SEQ ID NO: 30694 - DNA, 201 bp, Bos taurus
atcctctcaaggcttcattattttcaccctggtgttatctgattgaatatttcagtcacaaaaaaacttgggagatttgagtcatttcctactcaaaactrtatggaactacagctgggaatgttggtactattttgaaggttttttgttttttgtttttttttctgctaagaaataactgtaagtttaataaccctattg

SEQ ID NO: 30695 - DNA, 201 bp, Bos taurus
gttgactgtaggcgacagcctggtgaacatgctggagagttcaaagggtgacctagaaagtttgagactgcacagcaggaggccaggatatgttacctgayagtgagttaagaataagtgctttctcatggctactgttttaacatctgaaaaaaagaagggagctgggccagttgatctcttaggttctctccacctctg

SEQ ID NO: 30696 - DNA, 201 bp, Bos taurus
caggcaggtttagtaagacaagtcttgggaacatgctggaactggagaatacagatccagcctcagtgcattcgaatcctgatttctaataagcctgcctmtgggcctcgcttactaccctgtgtcatccttaccccaaccttgagggatggagatagagttggcccgaatctgctattcaatttacaagatggcaacatc

SEQ ID NO: 30697 - DNA, 201 bp, Bos taurus
atattatagtagtgttggaaatatagtgaacaatagaaagaaattgtcttgactttagttgggggaggtggggaagaaaggcaagcaaggaaaagaaataycattttaggcataatgataaatattataaagaaaaataaaagacttcaagggatagagagtgattaaggagcaggtcattttattgaacatcttggtttc

SEQ ID NO: 30698 - DNA, 201 bp, Bos taurus
gggtggggtttccgggagaggcttccgtgcagattccgtctgggccctgctcctgcggcgggtgtctggactgcaggctctggatgtcgtggttgtcggakgcttatgggaagtaggttgtggaacgggctgctggagtctggtgccattcagtggcacccgttgtttcaatccctttcagtggacactgtattgacctga

SEQ ID NO: 30699 - DNA, 201 bp, Bos taurus
cacagttgtttgcaactcagcaaagcagtagtaaaccatcaggttctattcacccagcacttagaaaaaacagaattgatcacacccatttaaaaacaaayctcatgctatttcccaatgtatagtttcaatctaagttctgacaatgaaatatatggatatatatctatatatctcatcttgattttcaaaggaggcaaa

SEQ ID NO: 30700 - DNA, 201 bp, Bos taurus
ggactgacaaatgacgatggactcctgatggattcaagtactgagaatactgtactcaaaactgataagcctcaatttatagtccatggttgaagatttaygttatttttcctactttagtgtcttgttttggaacatccaaggtatttccaatatgatgtcatttgtataaatacaactaaattcaacaaaggctatttc

SEQ ID NO: 30701 - DNA, 201 bp, Bos taurus
gtacagggctctatgggacagtcaggagaatcagaacttctcctagaagatctgaattgatcttttaaaaaatgcaaacaagggggtggtcctaagatggyggaggaataggacagggagaccactttctcccccacaaattcatcaaaagaacatttaaacgcccagtaaattccacaacttctgaatgctggtagagga

SEQ ID NO: 30702 - DNA, 201 bp, Bos taurus
acctggccgctttctgatgtcgcactgttctgctcagagtgttgtggcagcaaggcaggggcaagctatagcaaccccgctcagccatcagttggcacaaygtgggcccctctcctgaagcgagcaactgtcaacatgcaaccattagtgatcctgctcagccactggtcagtgccaagtgagcccctctcccctcctgta

SEQ ID NO: 30703 - DNA, 201 bp, Bos taurus
ccgagggcctcagttccatccctggtcagaaactaagatctcatgaagggcagaacacagaccaaaaaaaaaaaaaaaaaatctgttttaaaaacctcaamtataggcctgactcaaaaagacaacaaaaatctaaacacactaggacccatgatgtttagcttacaataaaatataagaaatggtaagaagcaggaaaga

SEQ ID NO: 30704 - DNA, 201 bp, Bos taurus
ggtataattttggggttccaagtagcagctgagttctaactgtagaatgcccaggttcagagaatagaacctgaagtttcaatagtaggtacaggaattcrgtactcgagtctcagactttgaaccaggagcctggagttctaatagtaaaatctctggaaaaaaataaaactccagttatgagagtaaaatctagaggtc

SEQ ID NO: 30705 - DNA, 201 bp, Bos taurus
aagaaccaaaattaagtaataccaagagggagccatatatacaaacagaaaatagaattgagattcaaaattacttattcgaagatccctccttaaaagtrtaattcggtactctggtactcaataaaacctaaccaattctaaaatctctgtagttacaccagtttcttccccaaagattttaacagaagagagctatta

SEQ ID NO: 30706 - DNA, 201 bp, Bos taurus
tcctaccttgggcacctttgagaggacagtgatgacagctctttggcatgacatacatactctctgtgtttggttgcttacggcctcttatctcaccaatytgagctttctgctctaatgataaactgctctgggcattctgggataataaaggctgttttctgcccccttatatgtgtttatgctgtttcctgggcctag

SEQ ID NO: 30707 - DNA, 201 bp, Bos taurus
ccatcatgctacaaccattctccttccaaaacctgcagttccccaagaggctgcatgcagtctgcttcctggcctgaacccgcctaacacagcacctaccmcagccggcactattgtgactggtatcctggtgtacaaagacctagctgcccaggtgacagaacagggttctctgggtgagagcaccctggctcccctgcc

SEQ ID NO: 30708 - DNA, 201 bp, Bos taurus
ttacaatatagtaaatgagaagaaaaagactcagctggccatttgtttttctctataagcagtaaaaggaaataggtccttaatctaactctcttgagcaytgttctagctagctttgactgacattatacaactagttgaaaatctaatcctataacaactgccacatataacagtggcatatttaagaatatgctctgc

SEQ ID NO: 30709 - DNA, 201 bp, Bos taurus
tggtggtggattatgctgaggccggagttaatatttatttgtcttctcccagcttctacttccttcctgtctctgtctttttagcaagaacatcaggaagkaaaagctacatcctgtcaggccagtttgttatcctgatcttgggccagtaaacaggatagatgattacaatagtggttattaagaattgtgctatgcctg

SEQ ID NO: 30710 - DNA, 201 bp, Bos taurus
ctctaaaatgctctttttagagaggcaagtttattcctaagagattctgtttgaaatgacagacataaaaaagtattttaaatgtattttgtaatcttatytttgtgatgctatatcttggaatctttctgggctacagatcataaccattgtgggttgtgagatcagttttagagggtcaaagctaggactttttagaaa

SEQ ID NO: 30711 - DNA, 201 bp, Bos taurus
ttcttaagattcagcaaaccttaattttggaataagtcagcaacacatattattttataccctgaaattttacacttcatttcaattacagcccctgcaamagtaaggtcatacacaaaggagaggttattgatcattacttcaattagcacgtgctaggaaattagtttcttgccagagtgttcaggcacacatcagtca

SEQ ID NO: 30712 - DNA, 201 bp, Bos taurus
agtgcaaaggcaggttcccttcattatcctcgatgttaacatcagcttgaaactccagcaaagtctgtaaagtgtccaggaaacctgctctggccgcatcrtgaatgacagcgaaaccagttcggtctttcaaatcgggattagcacctctaagtagtagtctcctggcaatctccggatttccaagtttcataacctaga

SEQ ID NO: 30713 - DNA, 201 bp, Bos taurus
ccctaataattttatggtttgcaagtgggaaaaaaacaaatatttgaagagagtattctttcctaccaagttatagagctatgtttttcctttggtaaatmtataagtagcagctttgctttagctggaaatttcattatgatttagttacatgacacaaaagaattagcaaaatgaataaaatattcaagattgagagag

SEQ ID NO: 30714 - DNA, 201 bp, Bos taurus
gggaagtcagagagggtgacttgaattcactgtgtatctgtatttcagtaaggcttttgatagtctctcacaatattcaggagaaaagtagatataaattracagttaagtagattctttactgattaaatagatgtgtccagaaactgctggctaagagactgtcctctccctggaaggaaacaaaaggctctatattta

SEQ ID NO: 30715 - DNA, 201 bp, Bos taurus
atctcgaccccactttgaagaggcagcgaactcaaaatgatgaagtgacttggctgagctctagaactagtgcagagcgaagtctgggacccagatcttcracgccaaagcttctgtgtttatgacagttcagtgccaccttcagataaagtatgacacaactaaagcatttcaaataatagttacaatcataacatcttt

SEQ ID NO: 30716 - DNA, 201 bp, Bos taurus
gtttgttccagacagcgacggtgggcccatctgacagacttcccaacgctgtccagcgctgacctttcaagcccttcaagcaagcagcttgagagcaaaayatgctgctggccactgccaagcccctgccaaggcatggcatcaggctggctccgctagacagtggaaccgaattttagcccctgggctgagcaggcactt

SEQ ID NO: 30717 - DNA, 201 bp, Bos taurus
gttggcgcctcttgagcgatgagcggctgccaagagcggaacacagctcggctgggtgcgcgaaggacccttggaggtcatgcgcccttcgaggccccccrggaggaggaggtcccgcccaaggtcacccaggggtgcgtgttaacagtgcgggaacccaaatcccttcgtccttggctcttccctaaagcccaagaggcc

SEQ ID NO: 30718 - DNA, 201 bp, Bos taurus
caggtgaaagaatttgcctgaggcccctggtgagcagctgagctggaatttgaattgccttctctctggcctcttcgtttaaactctttctctcactcttyttgccacatcccagctgcctctggccagacccgaaaaacaaatcctgtaattgagttggaatgtgggtgctggggcccaggagacaatgtttcctgcttt

SEQ ID NO: 30719 - DNA, 201 bp, Bos taurus
gaacatcctcacctgaaattgaaaggtaaatatttcagttgtgagtctctctgtcatgactcaaataattttaaaattgcttagatgtctttgcctaacartgttcagattgttctaatgcaggggaaaacggtagtttcagacacagtaatattgatagcagctagtaatttccatgtatttctcatggttactggcgct

SEQ ID NO: 30720 - DNA, 201 bp, Bos taurus
tataaaaccaatattctttagtggctcacactgaagtatcaagtagcatcaattatttacaattccagttagtataggggccttttgaccaatgaaaacamacatttttaagtactcaaacttaaaagtagaactgaacttaggatttcagattccaaagcccttttaccaagtacctttcttctcagagcctcaggcctc

SEQ ID NO: 30721 - DNA, 201 bp, Bos taurus
tattgcatttccaatagtaccattcatctttcagagtgaggggctgaccgctacatcagtggtatgacatttgtaaagcaacagattctcaatatattatygcaagaatcaggcaggcgagtctcccagtcatgcatgattttttttttttccaccacaagccaccaccaccacgggaagaaacttgtctcactccagcag

SEQ ID NO: 30722 - DNA, 201 bp, Bos taurus
acttgcattcatttctgtttctagactccatattcctactatgctcaagggacttcccatgcttaataagtgcaaacggggagcagaaaacaatccaacartttgtttaaagtttgtttaaattcaagaaaagctagtcattaacaccagacatccaaatctttacaaatgtttcaaatcacttttaagtgttttaataat

SEQ ID NO: 30723 - DNA, 201 bp, Bos taurus
agcagcatggtggaaaaatctaaaagaagaaatgaatgcatgagttttctttttaaagaaggtgcagataaaaaagtagaagaaagaaggaaaggcagaaytgtatgaagaggacaggcccccttaagcattgaatggcaaatttaacaaagaaaactttttttctttaagataaaaattatcttgaagtaaaaatgggaa

SEQ ID NO: 30724 - DNA, 201 bp, Bos taurus
atggatggagaagcctggagggctgcagtttgtggggtcgcagagagtcggacacaactgagtgactaacacacatacacacacacacacacccactcacrcacaacttccttatctctatcaccatgtctaatttattcttggtcctgttatggaaagttggtttatgtccagtgggtgaattattccatccacctgctt

SEQ ID NO: 30725 - DNA, 201 bp, Bos taurus
tgtctatgggatagcacagtgtcagacatgactgacatgacttagcagcagcagcagtagcagcagttgtaattataaatgagcaggtttttttcctagcrtaaatgtataagtgctattgctaatgtataaacatggctccactgaagccattccttctgctgaacgaattctctccagctatgctcttgctatttataa

SEQ ID NO: 30726 - DNA, 201 bp, Bos taurus
gaaccgtttaacttgttttatataaaaaaaataatccaatatttaaagggcaagaacatatgctttttaagttgacagacttcttgaaataaccttcaatrgacaaatacagaaaaataaaataaattttgcaatcttaaagatctgtttttagagagtcttaaggcttttccttttgaccagttgatttctggttatgtt

SEQ ID NO: 30727 - DNA, 201 bp, Bos taurus
ggcatgcaggtcagttgcaagaaagagaacaacttgattatgtcaggtacacagaaaagggagagagacggcttcttgtggaggtgccaggaaatgcttcycaaagagttaacagttaaacttggtctgacatgatgcatagtaggtgttttccaaataaagtaggaaagggtagtctatgcagatgggatagtaaaaggc

SEQ ID NO: 30728 - DNA, 201 bp, Bos taurus
tttagctgtttgagaaggaatttgacaagtctcaaaacggccctttcctgacataaagaacaaaacagggaaagaggatggcacccctagaaaaagtaagragtaattcgtgaggcaatggggcccattggttaagaacacaaactctggatcaagctacaagcgttcgatatcagtttagacccagagggatggtatggg

SEQ ID NO: 30729 - DNA, 201 bp, Bos taurus
tgctgatgctgccggtccaagaaccacacttgaatagcaaggttttcataggaaggccttgtatcacccatgcatggcccctatctccttctaagcctggrccctgtggggtgggcttgttattccccattccacctcttgcttcaatgatagaatttaaagctacgttatttttctgagtaaccatttttggttcataga

SEQ ID NO: 30730 - DNA, 201 bp, Bos taurus
aacccttccaggtctgtctcacatgtttaatctcttgatttcacaatattcctaatgtgaggcagaaggttagagttatgaatacatttctgagctgggtkcttgtcattaaagatttctgcctcagggcccagaaatgagctatggaattacagatgaatcctggcactgtatgtgctgagcctcagagcctttccccac

SEQ ID NO: 30731 - DNA, 201 bp, Bos taurus
tcaaagaatgcatagtctgagagctataacctagatgtcaagtctttaagtaagtaagataagctgtgtgaagtgtctatcacatggcctagtgcacagtrcttacatagaattagttctcctttgaagtttcccagcctcctacctactcctacctactttggccttttgtatcacttaccctttccagaatacatcctg

SEQ ID NO: 30732 - DNA, 201 bp, Bos taurus
atatggtgcatcctaccaataggagctatccaacaatggagggctgtcagcatatgaagagtgctggagctgcttcagttaaaggagaatggccccctgtyagggagacatggagaaggagggtagaccctatcagtatgtgttcccaattaaattatagggaatgatggccaggtgttatagttactggtattgttttaa

SEQ ID NO: 30733 - DNA, 201 bp, Bos taurus
tttgcagcagtacaagaacttctttggtattattgttctacagtttgtgggttgcctactcttcaggtattggattttattttaatgtgattttgcccctyctgccatctcgttgtggccttgaatgtgggatatctttttttagtagcttccaacgtcctcctgttgatggttgttcaacagcaagtttccattttggtg

SEQ ID NO: 30734 - DNA, 201 bp, Bos taurus
tggtgagagagttgctgctgagaaaatgacatgttcatgattgtgtcccaaagagcagtaattccagtaattgctgacttctacatttttatttttgtttytccacttcactccccatgtgttaatgtatgtagatggttaggactgactccttcctgagaagatctttgagttactgtttttctttcaaatgtaaggctt

SEQ ID NO: 30735 - DNA, 201 bp, Bos taurus
tttctactttcatttcctagtggctaatgatggtgagcatttttcatgagtttattgtgcatttgtttatgttctttggttaaaaatctatccagatcttktgggcattttctgatttttttttgtttattaattgtctgagctacttacattttctgaatacaggttgtcatattcatggtttataggtaatttctcttt

SEQ ID NO: 30736 - DNA, 201 bp, Bos taurus
tatatatatattttacaaaatatgtgctaggttttttgtttgactctgaagaagcaacattcagtcaatagatatttactgattacgtatatactatgagrttctgttctaagtcctggggatacaacttgaagtctttttactcatgaaaatggcattctagtgggtgagacacacagcaaaacaacatatactatgata

SEQ ID NO: 30737 - DNA, 201 bp, Bos taurus
cttctctgggtcttggtatccccatctgtaaaataggaataataatagtacctaccttgtagagctccagtgaagaaaaatcacttaatatttataaatawcttagtacttggtatctgtggtgtgtgctcagtccttaagttgtgtcccactctctgccaccccatcagtgtagcccatcaggttcctctgtccatgggg

SEQ ID NO: 30738 - DNA, 201 bp, Bos taurus
aaatagaaacgctgctcactcaaagtcgtgtcctagagaggttgcatgcttatttcagtgatactattattgctttcttaatttccgttgaacaaatttayctttagtatcgacctttggaatcaattttcaggccatgtaatagaaagaactgggttttggaattagacaaaaacctcgcttcgagcctagattccccca

SEQ ID NO: 30739 - DNA, 201 bp, Bos taurus
agagaagttatcctcctaggttatgaggctagcactatgacctaaggccttgtgttatgttagaaaataaagctgtattccatacctttggggcttgactraagcatctcagaaaagaaccattccctgatggcaacctggggtttctccacacctgctcctccatcccccaccctcaggagccaaactcccaggagtgaa

SEQ ID NO: 30740 - DNA, 201 bp, Bos taurus
tcatcccccatttttgccttcccctaggccctgcaaccactaatttactttttatctctatggatttgcctattctagatatctcatataaatgaaattgyacagtatgtggccttttgtgaccagattctttttttacttaacatgttttcaaggtccatccatactctagcatgtatcagtacttcactcctttgtatt

SEQ ID NO: 30741 - DNA, 201 bp, Bos taurus
atgtctgtggagactgctccccatctctgtcccttcaagtagcctttcaaagttagagttgatagtgagttgattttaataattgattctacagtgaagayaggcctctgtgggacagttacccagaattaggggctggggagtccggaggagcaaaacattgtgatggaatcaagaacttcatggctcccagtcttagtt

SEQ ID NO: 30742 - DNA, 201 bp, Bos taurus
atgtccagggctgtgtccgaacccagcctggagacaccctgaagtgaggggtgagaatttgcttgactgtttcacatatgctggcccgcaccatgacccckgatggagtagtggccgagatggtcccagtgaagtgatgactaaatggaggtgtctggaggctgagaaggtgtgttggccctgtcaggcctgtgggcaaag

SEQ ID NO: 30743 - DNA, 201 bp, Bos taurus
gttcacctagaaacttcctccaccctctgagtcatccctgtggagccctgaccccgtgtcacttgggtcttcctttgcctcaaaaatcatgaatgccctcycactccagccacacagagttctgatccccacccctcagctcccctaacttcctctcagcttccagttagagtttcttcacatcctttctaaaccactttt

SEQ ID NO: 30744 - DNA, 201 bp, Bos taurus
gagacatttcaagccagaatcacctagttcagcctctttcagattgctgacccttagaaactatgtgacataataaacgtgtaatgatgttttaaactgcyaagtaacatgctttgcaacaatagataactaataaataagcatagtggatatcatcaataaaagtatgtttgctgaaaaagtcatccacttaattcatag

SEQ ID NO: 30745 - DNA, 201 bp, Bos taurus
tgaggactagcattctgttctgtttggcctcatagctagactattatcagttcatgtgtatttgtcctttgctttatatatccatccctacctttaccccrttcctactcaaaaggccttggaattgataaagttctatagattttcagttcagtcactcagttgtgtctgactctttgtgaccccatggactgcagcatg

SEQ ID NO: 30746 - DNA, 201 bp, Bos taurus
gtaggcatgcaggctgcctctgggacccggcgctgagcgtggaactgtcgcagtgctgaccccacttcccgaagcgccaggccccattgctgccagctccrtgctcatctgctagtcagtcacaaccagactggactttgaggtgctcctggcttcattcctttcctgtaatgattaaacaggcccgagcgccattggccg

SEQ ID NO: 30747 - DNA, 201 bp, Bos taurus
tgtgtttctgtcattttttcaccatatatcaggtaatctcccaaagtctcctgatccatctcttcctcctttcagaaaagtctagaatgtatgatggcctytttctctcagaaagtctaaagtatttgatgtcataagcagtcacttctgttactcatcttgcatggtctgaagttcctaaggccaaagtcattctccaac

SEQ ID NO: 30748 - DNA, 201 bp, Bos taurus
ggagcagcagtttagcaaaaatatgccctcactggcactcaacaaatgggttcccaagcacaattctggaagtgtatgaaagtgagtgtatatatgtctaygtattttaagttgtatgtgtgctcaatcatgtgcaactttttgtgattccctggacagtagcctaccaagttcctctgtccaagaaattttcccagaaag

SEQ ID NO: 30749 - DNA, 201 bp, Bos taurus
gatggccattaaactccccacctctgctatgcccttctttataaacaagatcccgttcttcaagaggagaccaatgccaagaaaaggaggccaagagaggmacataaaaggggcagacaagcttacattgaatctgagtaattaggaaagtcaccttgccaactacccagcaagggccctaaggtccggctcaggagtgcc

SEQ ID NO: 30750 - DNA, 201 bp, Bos taurus
tgcctccggcccccaggtgactcattctccctgaacaaagcaggccctatcttcgttccccagcgtagccttcaaggaccggatcatcagcgcctcctttytgaagccgcccccgggcccctgagggagaatgaatcactggctccactcggctcccacagctctgaacttactctgctttgtgctgtgggtccagctcca

SEQ ID NO: 30751 - DNA, 201 bp, Bos taurus
cagggcaagaggggagccaacagacatcaataagctcagagggagaggtttttgaatctttaggcagagtgttcattcatttgggggaagttatgtattaytagatcccaacctggtctagatcaactacaagatgcccgtgaaatgccttaagtttcctgtcccaaacctgtcgccatcctcccaccctcttgccttctg

SEQ ID NO: 30752 - DNA, 201 bp, Bos taurus
tgctgagccagaggagaaggactctcagctttctaggaacatgggtgtgttgtctcttagaaacaggaccgtaaaagtggtctggctgccgagtgagactmgtgtgtaaagatcagctctttgtgaggagcctgagaccctgatcaccatttctaaaatagttaccatagcataacatggccttgcatttcgtatggccca

SEQ ID NO: 30753 - DNA, 201 bp, Bos taurus
catccactaaccattccctgagcactgactctatgcctggcctgggtggcagagatatggagacaccccaggctgatgaggtgagaaatcagtagagaacmcaaggattaggtgctgttaagagcaaaaaagacacactgatagacttcttaggggtcagaggagggacatttgggcagggccttgaaggatgagtagaag

SEQ ID NO: 30754 - DNA, 201 bp, Bos taurus
gttctgatcaatcaaaccagccacactttgccagaatctcgtagggactctccattgcctatgagacaaaattcaatcttcttagcatggtgagctgaatrtgttcagttttgagatgtcccacctctctgttgggtaagatctcctgtattccatgtggtgctcctgatggggctgttcagtctctttcctccttacact

SEQ ID NO: 30755 - DNA, 201 bp, Bos taurus
ttctcccattctcctttaggcccttacaagccaggttcttctgcctggagggcctgtcctcctctctccacatccacccctctctgaaaaactcagctcaygccacctcctccaggaagccttctaaatggggatacgtctcctctgacttccccacagtgtttgtgcttccctttcccaaagccattacctcactcagta

SEQ ID NO: 30756 - DNA, 201 bp, Bos taurus
aatttcttgtgtagttttaagaggatcagcttcaatgatggctctcaattggtcgctgtcaacttttgatggccagccactgtgctcctcatcttcaaggytctcgtctctttgtgaaacttcttgaaccaccactgtactatatgttcattatcagttcctgcgccaaatgcgttgttgatgttgtgagttgtctccact

SEQ ID NO: 30757 - DNA, 201 bp, Bos taurus
ctttttacataaattaggaaagagacaaaaagataatcattctagctcccatgatagagaccaccagaactaaggattccacataggaaggagtctgggtrcaaaacttcattgtatacttatagcaatttgtagtaacttttctttgactccctggagaatttgactacaagggctcagtacttagtgtcttgcactgtg

SEQ ID NO: 30758 - DNA, 201 bp, Bos taurus
tgcctcactccatgttaagcaagagttctacagggtatggtatcctataatattccaaatggaaactcagatacagggttatctatattcagaattccttrtaaatatctaaggtttttatatacccttatcaatttacccattccctagacagtgtaataagagactataagatgatgcagttactttctgttaatcata

SEQ ID NO: 30759 - DNA, 201 bp, Bos taurus
gagtgggatgccatggccttctctgtaaatgttaaatggcttcagtttgatggagaaacaattccctaggctatccctggaaagccacttcaggctccacrtattcacagggtttggggccgcagacctgaccggtgtgtgactgtgcagaaaacattgctcctccctccccactgctcctcacacgcctgtgccctcaag

SEQ ID NO: 30760 - DNA, 201 bp, Bos taurus
actgccctgaaatgcccttcaccgggtccactggagactcattctctgagctgggggcagggagatgggaggggtcttcggcctttggccagggagatcgygatgcgccagggagggagagaaggatttgtctcaggggcttggtttgtgctgagttctcgggaccccctcctgtccctgcccccaaggcttggctggagc

SEQ ID NO: 30761 - DNA, 201 bp, Bos taurus
agagtcaggtcaggagacggtggcccgaagcagggctcccagagctcagagccattactcagccccagacacagctttgaggctgctgcctagatccccaraaactgacctccagggaggccagcccctgttgtatctgaccccttcacaaaacaccttcccagtgactctgcaggtggacagagcaagaagaaggattcc

SEQ ID NO: 30762 - DNA, 201 bp, Bos taurus
gggagggactaggtatacgtggaagagggtctgtcggggggaacagaatagagctcttttggcgagattccacctgtgatttatttcgaaactcacacacrcgctgtaattgcaaggcttttctctttttttcctggctagagccctcgagttgaggggcctgctgtggtgctccactgtttatttcaggtgtggcgagtt

SEQ ID NO: 30763 - DNA, 201 bp, Bos taurus
tttggaagcactggagaagagttcattttcttcttttcccactttctggaagatgtctgtattcttggctcctggtcccttattctgtttcaaagtcagtrgcattgcatcttcaaaactctctctctctctgacctctgcttctgttgtcatatcaccttctctaactctgatattcttgccttcctcttatgaacacct

SEQ ID NO: 30764 - DNA, 201 bp, Bos taurus
ttcctacttaagatttaagatatgtttagaacttattttgtgactactattccttaatatcttgttgcatgtgtttgttaactttatgatacaggatactyggggctggtgcactgggataacccagagggagggtatggggagggaggtgggaggggggcgttcaggatggggaacatgagtacacccatggtggattca

SEQ ID NO: 30765 - DNA, 201 bp, Bos taurus
ggaccttgctgtcaatgttctttgcatctggggagagtcaggggttagagtaccaagcctgggtgcacacccacatgactagccatttgggatagattcaracatgctgtgtctgccttcatttatcttgagacccaagtgggagaccctaaacaagggactcgaagagtgggcatacttgtcaggcttgaggtcacggtg

SEQ ID NO: 30766 - DNA, 201 bp, Bos taurus
tctttcccttacacaggagtgggggtggtggacaggaatgaaacaccttaagctcgtctcaatgggcttttcccactgccaagaaatggcccaaaagagamtgtagttcggtttactcatttactcatgagtaaatttttactcattttactccgtgtcctggtgtgccccagagggccagttttagctacaataattagt

SEQ ID NO: 30767 - DNA, 201 bp, Bos taurus
cctaaaatgcaattgttcaaaatattaatagaacgagaagtcaaaagttaaaatggaatgaattctgttcaaattgttgcaggaagagggacccttcccakggcccgaaactgggctcttgtctaacacttggaaatgaattgtctgaggagacacatgtgctgacaaagcaagagattttattgggaaaggtaacccggg

SEQ ID NO: 30768 - DNA, 201 bp, Bos taurus
tgtgtaagttaaatgtaatatattgacatttatgttggtgctgatgtgaagttttagcagctaccttggaacttttcagtcaagtttctcaagaagttaaktcctaagtaatcataataatcagcttagttatttttactttgataagttttactgaatgctgaaaacttagctgctcccaccatttctgttagtcgacta

SEQ ID NO: 30769 - DNA, 201 bp, Bos taurus
aactggcttttgaagtctgtagggtacttaaatggtcctttcctttctagtccaggtttcccagccaacaaaatctgcacagcagagttcgggaatgtagrgtgcaattacggagtgatggtggtataagaaggtaggagattcggagtccaggtcaagtatgacttggccaaattgcttgctatctctggaactcatttt

SEQ ID NO: 30770 - DNA, 201 bp, Bos taurus
aacaactttgacttttcatatgtatactacattttgtctgttaacaggttttttccaccttttggctattgtgaataatgttggtaaaatactggtgaatrtatctgaatcctcgtttctagttactttgaatatatacataggagtagaatttctgggtcctatggtacttgtgtgtttagattcttgaggaattttcag

SEQ ID NO: 30771 - DNA, 201 bp, Bos taurus
aaaatggaggctctggattccagatcaagctgcctgaattcaaatcctggatcttgggaaagttatttaacctctgagatccttagttttcccatgtatartgaggataatgaccgtaaatccctcgtagagttgttattgaggattaatttaatccatataaagcaccctggaatagtacttggttttgttaagtgtcca

SEQ ID NO: 30772 - DNA, 201 bp, Bos taurus
gaatggttgcaattaatgatatagccaattgcctctctttctcagagatatttgtaaggctgttttatttttgcccgggtggtcatttaggaattgagctrcttttgaataaataacaagagttggttgtgtggaagtatgagcagaggcctgactggttgtgtggaggaatgggcagaggcctgactaggctagacagtg

SEQ ID NO: 30773 - DNA, 201 bp, Bos taurus
tgtattagataaagggtaggcaaactacatacagcccataggccaagttcggtctgctgggtttttgtaaatacaggtttattggaacacaatcatgcttrtttgtttgagtgttttctatggccaccctttttcagtactggcagagttaagcagttgcagcaggaatcccatggttcacaaagctacaatatttactgt

SEQ ID NO: 30774 - DNA, 201 bp, Bos taurus
taacttttttcattttcccaaagtacttatcactttttaatatatggcactgtttactgatttattatttaaacttcttttttatttatgctgcctctccyggctaggatgaaggctggatccttttttgttcactaatatagcctaggagcccaaaactattctcggcacatagtagtcattcaacaaatagctgttaaa

SEQ ID NO: 30775 - DNA, 201 bp, Bos taurus
taaaacaaggtctaacccagaacactgttggtacccacattacagtacttaccatacagtactttaatttgggttacatgactcccttccccactggattrtgagcttctggtgggtagggttggcatcttgctcacctctcttctttcagagaaaggtatctaatgaaagtaggaaagcaatacacctggccacattagg

SEQ ID NO: 30776 - DNA, 201 bp, Bos taurus
ggccagggcacactctgctttattcacaaaggtctccaggtcgtagtctggctgctcagccatctcggagagctccagccagcctggcccttgctgcagcracacaagacggaccttgtcaggtcaataatgaccaaaccaatttagcaaatcattcccagggctctaccatctgcaatgcggatgcctgttcctctagcc

SEQ ID NO: 30777 - DNA, 201 bp, Bos taurus
ttccttttgtgccaaaaatcaatagagtaatcagagcaacaaggggaactgatcaagaagagtcccatggtatgagaataatgaaacctctagaactttaraggttaaaaccattaaattggagatgcttacatatgccagggtctccaacatattaccgtagacataccaccactatagaaaaagaagccgtcccttaaa

SEQ ID NO: 30778 - DNA, 201 bp, Bos taurus
tatttttgtaagaaggaggaaccagagggagacagagctggatggtaatgcggtggtacaccggataaacacggtgggtggggtggggtgtgtcggagctygcggccgtggaagacagaaatgcgctctccctcagcttgagagtcagtgccaccagtctctctcttcacttactccgagggacaaagttgtttccctgat

SEQ ID NO: 30779 - DNA, 201 bp, Bos taurus
accacaggtgcgaccacctctgggtccattttcagggctactagatacccaccgataaaagaaagtcaaggtcccatggggtgggaatgccaaggacaccrtgagcccggtaggccactgagactccagaatctctctagaacagaactcacctgcttacagctgataagaagacgccaatggacctgagcagcttatcta

SEQ ID NO: 30780 - DNA, 201 bp, Bos taurus
cggaagcttcatctcattcattcactgatcactttgtgaggccaccaaggtcaagggctgtgctgcttacttctgggtgcacagcatctaacacagaacaytgcagagattagggcctcagtaaatgtgtttcagaggaataaatgaatcttcctgtgaacgtatatatctgctcctagttgcaaaactcctcaaaagaga

SEQ ID NO: 30781 - DNA, 201 bp, Bos taurus
ggggtggggagctctgcccggggaggctttctccaggggacagcgatggggcagctttggcacacttccctgtacaggcccagtcttcctgacaaagcacrtcaccctcttgccttcacagttggcaaatgaacagagccagagtgcttcagaaactgggcccctgggcaaagagagtgacacttgatgcagagaaacagg

SEQ ID NO: 30782 - DNA, 201 bp, Bos taurus
aatattgctcagcatccctaaaactttagggaacatcagaaactactacagaacttgttaaaacacaaacagctaggccctgcatatggagtttccagttyagtgggtctggggtgggtcctgcgtgtttgtgtttctaaattcccaggtgatgatgacactactagcccagggcccaggctttgagaacactggcctaga

SEQ ID NO: 30783 - DNA, 201 bp, Bos taurus
aaatagaattctgcaggcctgtgatcctcttcccccttcttcccttcgactctgcctccattctagagtcagccaaatggcaaaggaagaaggaatctgtyccaggggcctgggctcagagagactccggaattaagaagctaggtaaggttaaaactcaagccccatgagtatatcagaaaggagtggtcatcagctcct

SEQ ID NO: 30784 - DNA, 201 bp, Bos taurus
gcagacagagggcttggtgactgaaattgggctcagaagacggttcctggttgagtgggaggctgtcaaagccatcagtggcttggccaaggctgggattscacagctcagaacctggtactcttgaattcccagagaggcataaccaagatgaagaaatacatctctggctttggccagagtttcttgcagttgactgaa

SEQ ID NO: 30785 - DNA, 201 bp, Bos taurus
ggcagccctggagatggccagcacctggtcactttctgggtgtggacctctgctcagggccttcctggctgagaatgaaggtgtacaggcctaggcctccrtggctgtctctgtaacagcctgagtcactctactgagaaactgaagactggaggaaggggctctcctggcccagaagttagaactcacccctcccagcga

SEQ ID NO: 30786 - DNA, 201 bp, Bos taurus
cggaacatcagaagacttggactatttttaagattattatattaataagattaggattataaggtgctctccaataggaactcctcttataagtgttctcrgatacctagtatggcgctaggcacatgggctttcagtaagtacataacaactgatatccaaagacatgtcaaaatagttatttttcgttggtaactctct

SEQ ID NO: 30787 - DNA, 201 bp, Bos taurus
tccttacctggaaacttctccctggaacagataaaaacctttcccatgtgtctgtattttgttctgaagataaccttggattagaaaggccttttcagtaygaggcaggaaagctggagcttgtaccttgacctctgaggtaaatctaatgaagccaagccaattccccaggctaaagaccaagttgactcaaatggttta

SEQ ID NO: 30788 - DNA, 201 bp, Bos taurus
ctcttaggggaaattttgttttctatttccgtctgcttggtgaagttttttggtaggtcaactatcctgttcaaagtttgacttttgttttaaataaagcyatcttaaggggaaatcttaacagagagaactccaaaccactcaggagacaacagactgccttctttgattgatatgcagaagtttctaaaagacaatttg

SEQ ID NO: 30789 - DNA, 201 bp, Bos taurus
caccagggtcttgtggcctttttcctcacactgaagaggtcagcaataatctgtcactgtggacccaggctccccacttctccaccccacaatgaagtagragcttcttggccaaaggtcagggtgggtgaggggcctgggaatacagcctgtggaggctgctcactcctttatgtctttattaaaagtgacagaggaaag

SEQ ID NO: 30790 - DNA, 201 bp, Bos taurus
ttttccatctcccacatcaagccttgactctggacttgataatactagaagctgcagagctatcaccgtgaactgacacagatcctgccctttccaaactraagaggttaacaggtgatttatgatgtgtgcataataattaactgtgcaaggtagaaaattatggagcatgattaaatgggctgtaggagcaaagagaga

SEQ ID NO: 30791 - DNA, 201 bp, Bos taurus
tgaaaatagcttcccaggtgctggccactcagttagaaccacaaatgcacagcctggactctgcctctcctccttcctggccacacagagttgtccccagktcttggtcaactcacctcttaaggacttctccaacctaccctcctcccaagccctgatgaaggccccaccacccactcccacaacagtgaagccatcctc

SEQ ID NO: 30792 - DNA, 201 bp, Bos taurus
ggaaacatggagtcttaactattgtacctccagggaagtcctatactagaggtttcaattagagctgaaagtaaagcttctgaggcttaacaatttatggraatggctatatatcttttcagtagttaaaactactaagtagtttcttaagacacatgttctgagtgccaccgaagtgccaatatttatactgtctaaatt

SEQ ID NO: 30793 - DNA, 201 bp, Bos taurus
tgggtactggggtctctactcagagcttggcagtacaagctggtacagaattaggtagttccagaagctagcagcaaccagcccagaggcggtttctatayggggacaaccctaacagggccgaactgtgtaagaagtggtgtttgttggtcttgttaaagagctcttctccacaggcatcagggaactgggctccacagg

SEQ ID NO: 30794 - DNA, 201 bp, Bos taurus
taaagcagtgggaaaaagcactccagagagtagccacaggaaggtagggtgaggggcagaaagagccaggggtgttttctggccctgtgtggtcagagggygatgctggatcagggctcagcttacccatgctgcccagcattgagctctgggggccttgcacctgtttataatgtgttgtaaaaacttagggctggctgc

SEQ ID NO: 30795 - DNA, 201 bp, Bos taurus
aaaagaaaagccaggcctcttcccttggcccagagtcttatgtggatgaacatacctcagcttccactgctttctctgagctctccaagtcccattaacaytggccaagatcattgctgcctcagggattttgtgcttactgttccttctgcctgcaactttctttcacctgatttttatagggtttgcttcttcttcatt

SEQ ID NO: 30796 - DNA, 201 bp, Bos taurus
agggggaaggggagccagttccactgccttacttctcaccgaggacagactgaggtcttcatggccagttcagggccctgtttcctcagcaaacatgccaycttgtgaagtccttgatttctaaccccaaaatggtgttgatgagaggttggtgtgaaaaataactggataatggatgtgaggagattagcagaggcccag

SEQ ID NO: 30797 - DNA, 201 bp, Bos taurus
agtcaaataaggatgggggcgactgaggagggagcagcccagggctgccctgcgtgggactcatcactgccatctggcccggggagagacttatcacctcrtcactttgtagaggaggaaggctggggcttggacaggtgatgctgctcataaggccacagtggtcaggggcagagcagagacttaaaaccaggcccacac

SEQ ID NO: 30798 - DNA, 201 bp, Bos taurus
ttgacatacatgaagagccccaagaaagcccaggccctacgggagctctgaaggttttagccatcccgaacctctgtccctgagggttcctcagggctgcmcagggccggggtgcagcctagcccctcaagggtccacatctctgtgaggaggcggaaacataggcaaaaagacaggatggccggctaggcaggacccagg

SEQ ID NO: 30799 - DNA, 201 bp, Bos taurus
tccctttatctttaacctatatgtgtctttatatttaaagttggttttttttaaacaacatgaagttgggtctcatttcttgatccactttgagaatctckttcttttaactgatgtacttagatcagttcagttcagttgctcagttgtgtctgactctttgcaaccccatgaattgcagcacaccaggcctccctgtcc

SEQ ID NO: 30800 - DNA, 201 bp, Bos taurus
catatttgttccaagtcccttgaaactgagcacagatggaaccatgcaaacttagtgacagagtcttggccccaaatggccttcactgggcactgcacacycctttagtgttggacctgactcagccacactcctgctgggtcccaggacaggactctcctcttctaggagcactgctctcctctctacctgccgtggtct

SEQ ID NO: 30801 - DNA, 201 bp, Bos taurus
gcctttccagagagaccgtcggtctatacctgtcaggccatctgatgacaactgcccaggcctcctgaaaaggcctgggagtccccagcacaggcccagayacccacacagtggctggagacaggtccaagagaggatgagacagagaatggaagaggaggaggagaagcaagaggaggtggcagccccggggggccccta

SEQ ID NO: 30802 - DNA, 201 bp, Bos taurus
gccagggtcttggatttgtgaggttagaggctgaggaaatatgaaaagaaccaaaataagaacactgtccaagaaattcaagcttggttgaagagactggkcctctttaactctgctgagtacattagatgcaggaaacatccaagttcttgaaggcacatcttctgttcatttggcctttttgacttgtggctctagcgt

SEQ ID NO: 30803 - DNA, 201 bp, Bos taurus
aggccttgcctcttatgggtcaggtcctagggtagagacagtcccccttctttatcagcactagctccggaggatgagcatccttgtccaaagaatgattrggcttgtcatcaagataggtgggatcctctttcactaagtggaatcatttggttgtgtcttacccactgtcaaatctccatggatctagttactcccaca

SEQ ID NO: 30804 - DNA, 201 bp, Bos taurus
tttttggcctcgctgtaagacatgcaggatcctagttcctcaaccagggattggatccatgcccctcctccccacaacagcagtttgaagtcttaaccacyggaatgtcagggaaggcctaatcctagactattttagattcctggaattcagtcttccccagggtagctacgtcatctgccttcatggttaccactctgg

SEQ ID NO: 30805 - DNA, 201 bp, Bos taurus
gtaagagatttctgtgagtctctgaggtttttttgatagtgtatttattgtgttggcgctttgcttttcaggattcaaaagccaaataaaccctcatggarttcagctcaaggtttgaagacttcctagcttgtcctatggacctcaacaccaagaaccacaattgcaaatttaataggtcattttgtatcaaaaggtcaa

SEQ ID NO: 30806 - DNA, 201 bp, Bos taurus
aagcaactgttagtggtcccagtaagccattggttggcactgcagtagtcccctccccctcctctgcataaaaggggcccaaattgggactgggacaagayggtttttttgagacgctagtctgccatcttctcggcctgctagctttcttattaaagtcattcttccttgcccctaaaagttgtctccggattggttgat

SEQ ID NO: 30807 - DNA, 201 bp, Bos taurus
cgggagttggtgatggacagggaggcctggcgtgctgcgattcatggggtcgcaaagagtcggacacgactgagcgactgaactgaactgatacaagggasacagagcaacccgaccctcttatacaattgctgagttcaaggaacctcagtgtgctgcataagtaattggaatgtacacccacctgcatttcttctaccc

SEQ ID NO: 30808 - DNA, 201 bp, Bos taurus
agtatttaataaacacttgaaagctggaaagctaattttgtcagattctgatttttcaagaacttatcttctaggaaaaccataaatcctaacaggtactrtaaaacaggcttggacaaaaccaagagataagaaattctactattagtatctgcatatgtaacctcaaagagtcagttgatctctgtgtttcagcttcct

SEQ ID NO: 30809 - DNA, 201 bp, Bos taurus
aggtcaagtccaatgaggactggtctggggagttaggtcatggtgatgggttaggtcagggatgagaacagcccctgatcctattaatcaggcagggagargggcctgccagtcagtgtaggctggtgcaggtaattgggtatccaccacatactcctctgctaagatcacaatttccatgacacagccgctctctaatgg

SEQ ID NO: 30810 - DNA, 201 bp, Bos taurus
cctttgccctcctctgaaccatccccctggccccctggaagttggctttattctcatgtcacagccgaggaagacaggtcaggagaggagaggcaagtgaycttcctaggaccctgcactcagaaagcggcaggcctggaagctgggcccacgctctctgacaaagagactgacatgctgcctactgcgctcagagggcag

SEQ ID NO: 30811 - DNA, 201 bp, Bos taurus
atttgctttttctaatttgtcctaatgagcccacattttttctttatcagacccattttctctggcaaaaggtcatcacgggcaatcatgcatgtctgctyggtataaattgttttcataacaattttcatttgccttggaaagtgcgccacgctgaaaacatggccactttatatctgtgacagcacgcatcatatttcc

SEQ ID NO: 30812 - DNA, 201 bp, Bos taurus
ttaagaatcttaagcaatgacagttccactagggactagactcacagatcagagcaaagcttttccagacattttgtctggaagtgacggttagttttgcrctggtcttagttggcaaagtcatcagcattgtcagtctcagaaagcagagacacccaggaaaaaggagagctgtggagtcagaagacctgagttccactc

SEQ ID NO: 30813 - DNA, 201 bp, Bos taurus
gttcctacctccctccattccagcctcttgattgggttgcagggcagaggcaaaaactgctgagcagtgttcttggtcaacggattatttattggcagaartgaaagtcccttatcttcccaagcaggagaatgccttaatgctacttttaccttttagattatgcacaggttcaatccaattaattgcagaatgtgaatt

SEQ ID NO: 30814 - DNA, 201 bp, Bos taurus
caaggccagcatttgatgccaaacccagcctctgtaccctgacaccgaattaagtcttgaagacaagagttttgagtgaagtagaaataaatgaatggctktcttgctttgccaggcaaagcgggccacagggggctaatgccctcaaatctgtgtgtcccgacctggtgggagtagtgaggcatttgatagtaatggttc

SEQ ID NO: 30815 - DNA, 201 bp, Bos taurus
cttttgcaacacatcacttaatggccattaatgtaatatatatactgcatcctggaaaacagaatcttaaccttgcagggtgctatttttcaagctgccaygttgctgagtttttaaggggctattacaacattctatcagccagaatcttccaggtgatatgatatacaatagggccaatgaatcccaatgtcaagtatc

SEQ ID NO: 30816 - DNA, 201 bp, Bos taurus
ctgaggttccaacaggcaagaaaacgtcaaagcccttggcctgttttcgggactcatgaagctgaagcctcttgggttcatcagaggggcagccaatcttmccccttagaatcctcgggcctcaaagacagccttcagtttaagagcagctccggacccctaggcttcccaggtggcactagctagcggtaaggaacccac

SEQ ID NO: 30817 - DNA, 201 bp, Bos taurus
cgatgtctctcctcaggaggagagagaatggggcctcagcacaggcgctgcatatgaacacggtcacacccttgacaacgcgcgttggcctcctttttccycacacagccccatgaggcaggcaggatgggctggtcccgtcacacacccctgctgaggctaagggaggaaatgcggccgtgggtggcagtgtccgcggca

SEQ ID NO: 30818 - DNA, 201 bp, Bos taurus
agactcttccaggtacttcaggctcattatgaagatgaaaagggccactgcttgagaaagtacctggtgagttcctgggcctttagtcctttgtctctgaktgtttgttttcttcctctttgagggtcctgcagtttagctagaaaggtaggccttacacagcttcaccaatctgagaatgtgcccatctcgcacgttacc

SEQ ID NO: 30819 - DNA, 201 bp, Bos taurus
tgacttccagcgtttgattggttttttcccctcttggtgtgtgtgccattttttacagaggaggcgagaagcacggcagcagcgatctagaaaagtcggcrtacgctactatgaaacacacaatgtgaagaataggaacaggaacaaaaagaagaccaccgactcagaagggcagaaacacagacacaagaaagccaaaca

SEQ ID NO: 30820 - DNA, 201 bp, Bos taurus
gccccctcccggtaacggccggggggcggtgcacggaagacgtcattgccacattttaatcaaaggaagtcctttctggggtccagcctcgacttctcccrcgggggccgtttgcaggaagaaaggtcatagggagctcaatagtcctgttgccggctaggctggacaccaccttgaggcccaaatggaaggaaccacctg

SEQ ID NO: 30821 - DNA, 201 bp, Bos taurus
ccccaaggtaaggcgttcagagcgggtggcagcgtgtatgtccatgaacgtgcacaagcatccctgtgtgtgtgcaggccccttctgtgtgaagcgtcgcrtacctgcgtgcttggaggtgtctctcccctgggcagctgccggtacctctgggcctgttctgcctgcgcggacatgcgtgctcttgcttttgtgctacat

SEQ ID NO: 30822 - DNA, 201 bp, Bos taurus
atagtgtcggtggggcccttccagctggcggtcctgaggacctgcttgagaagggctgcctctgggagatgcacaagcttctggaggagatctgcatgtcmctgagccctggccacaggctccttggctggaagaacgctctgggagtgtatccatcccaatctttcgacaagttcatgaagtcattagatataaagtcgg

SEQ ID NO: 30823 - DNA, 201 bp, Bos taurus
ggagactgggatgagggcgaggattttaattaatgtagggaagacagagacaaacagttctgttgtggaaagaagctggtgggaccaatgatgcagcccartggagcccaaggaggcagatagccctctgcactgtaattccattttacttcccctaaggcttcagcaaaattttgttaaatgttgcaatctggtttacaa

SEQ ID NO: 30824 - DNA, 201 bp, Bos taurus
tcaaaaactacaattgaaaactattaataacaaaaaagcaaacagctctattcaaaagtgagcagaagacctaatagacatttttcccaaagaatacacayagatggccaataggcacatgaaaagatgctcatcgttgctaattagagaagtgcacatcaaaactacaatgaggtaccaccttacaccaatcagaatggt

SEQ ID NO: 30825 - DNA, 201 bp, Bos taurus
ctatgagagctcggcctccctttttggccatgtaccggaaattgcatagacaggctgatggaaagtgtggtggggagtgctttccggaaggaatctggtgrgcaggcttgggcccaggctcctattctcttttcacttttttttgcctacccctgcactgtaagtaggattgaccatggtgatttggaggaagacatagag

SEQ ID NO: 30826 - DNA, 201 bp, Bos taurus
gacccaggatgacaaaagggtgcccatccctgaagcaaaaggcaggtcacagcatcttgagaagcactgaggcctggccctggaagttggtacaggtggaytttgccgaggggaggatgctgttaagtgagaagtggggatgcgggaggcctcccctcctcctgcctcccattcaggaaggtgacaaagatcaggcgaggg

SEQ ID NO: 30827 - DNA, 201 bp, Bos taurus
tttaatccttcactggggaataagaccctgaaggccgtgtggagggaccaaaaacaagacagacaaacagattcctttttaaggctgagtaaacgaagatygtggcatctggccctgtcacttcatgggaaatagatggggaaacagtggaaacagtgtcagactttattttggggggctccaaaatcactgcagatggtg

SEQ ID NO: 30828 - DNA, 201 bp, Bos taurus
aatccagtccccagtaagctcaggtttaatacagtaagcacagtgagtgttctggagaaaacctctgcttctgtccacaagcagggccctgaacgtccctkaagattgacccctgaccgtggtcacagaggttatctctgtctagcacagggtgcatcatatatgttgacctggggtttaaatgcctttgaggcctggctc

SEQ ID NO: 30829 - DNA, 201 bp, Bos taurus
tccctttgggacaggcctagtggctttcatgcagattcagagccctcaaagattcccggtcacacaaaagcaggcgaatggcccactcttcatgcaacaarttcaatgaatatctgcaggatggacatttgccactcatcccaactctgcactctgcccccctccttccacagtaagcacggggtcccaccaggccaggca

SEQ ID NO: 30830 - DNA, 201 bp, Bos taurus
cactgaaaacttgactcaacaaatttgtcattattgtctgagcaagctatagcctttgattgaatttgtcaaacatgataattttattgagcaagccaaaktacataaggttgcatttgcactcctaaattaagagagtgactttagatatgaaaagggtgctacaaaaataagaattgcatatgtttcgaattttcccga

SEQ ID NO: 30831 - DNA, 201 bp, Bos taurus
ctgttggtttctaacagggaacaaaccaaaatccaagttatatcgctctgccctccctaccccagcccccaccccacacaccaacaataaatgagaaacaygtagctaaagcccaacatggtgtgttctgctcaagagctgggcctgaccccaggccagctgcctctgtctggtggaacgccaggatgctcttcggcagtt

SEQ ID NO: 30832 - DNA, 201 bp, Bos taurus
ggggagggcctgaagggggctgagctcaccaggctgcggccccgagcggcgaagtcttctccgagcgcgatgctccgggagcctggggccgctgctcacgycgcgtagcccactccaggctccgggctgctgcagctccacccccacccccgcagcgctctcgaccaatccgcggcggcctcactccaggctccagccaat

SEQ ID NO: 30833 - DNA, 201 bp, Bos taurus
aactccaaggagagtttgtttttgattagaatggtctttgggaaaaatggaaacgttccagttaagggaaaggagtcagaatatagacacaaagcctattrattcttctttagcagtagtttagttccagcaaatcacctaaaccatgacatttaacaaactgtgctcttaacaaagctaggcacacagcaaaggcaatga

SEQ ID NO: 30834 - DNA, 201 bp, Bos taurus
tttcccctggtaggattttttttagggacagtggtagtttttgtttaaatatagttgtgtctgaactaaaaatgtgttgcgggctgaatttttgtgaatcrgtctttaatatttagcagacgttagtgtaacatgtgtcttatgaaggagagctcctacctggactgtggtgacactacctggataagtatcaacaggcca

SEQ ID NO: 30835 - DNA, 201 bp, Bos taurus
tttttctgacttatttaaacagtgtctaatgaccaccctgcaaaattagttcatattcctcaaatgatcctgtcataattttttgttgttaaacactgaaytataacctctgagatacttcagaaatactgagaaggtaaaaataaatatacttgaatctaattaaagttaatatgaaaagtattaaatgaattccaacta

SEQ ID NO: 30836 - DNA, 201 bp, Bos taurus
gatctaaagttttctaaacctaagactatcaacgataaacttcaattgctcagtatactacagtgaaatgcaaataagaactgataaagtgatagatgttrataaatatttgataacacaagtacagtaaaatgtcaatgacagaatctaaatgttggtcattatggacacatcctgcattttttttttcagttttgctga

SEQ ID NO: 30837 - DNA, 201 bp, Bos taurus
tatataggactgcaggataacaactgcattgttgtgtactgtggaatggggagggcactcttggaggaggactgctgaaggtggtcagtctacctgagaayggaagacatacttggtggggagcagggtatgtgcttttatatgaaaagagccgatgttaaaactcatttggttaggtaaacgttgtcacataccttcaca

SEQ ID NO: 30838 - DNA, 201 bp, Bos taurus
atagtttcaggtggacagcaaagggactcagcaaaaggcccagtttataatgtaatagctaacacacttggatgttgaaactgcttggcctttagaaacayatgggacatttcagtcttcagccagccggttgtgggtagatagaaaaccagatccaagcagcttggctaacaggaaatggaagcagcaggagaatttgag

SEQ ID NO: 30839 - DNA, 201 bp, Bos taurus
cccccggtgttggtggctactgcggagagaggatgatggtcatttcccacgtttagagagcactccctctcctggtttatagaaccgggtcattaactttratcctcatggccatggcagagctgggctctatcctcgtcccctttacagacgggggaaccaaggttcagaggggttatgcagggtcacagctgatcaggt

SEQ ID NO: 30840 - DNA, 201 bp, Bos taurus
ttggaaaaccaggccaaagcattcaggttaaatacagtgggcatggctaaccatgtgtggttttcaagcagaaatgtaatgcaatgatagtatgctttctrtttgtctttagatggctctgatcagacaaagcaactaatttcctgaacttccacagctaaaacatatgtacacattcacacttaccatttgtttttgaac

SEQ ID NO: 30841 - DNA, 201 bp, Bos taurus
ccaacccttcaccagaaatcttcagagatgtctgggcctctgaggtctgacccagatgccataggacttggtgagtgacaggaatttcttttccctctctygggctcccctgccctggccttgcttgctttcctgggatcatcgttttttcccagccatggccaacagcatgcatgagctgggtggggggaccctacctaa

SEQ ID NO: 30842 - DNA, 201 bp, Bos taurus
ttgttgcatgttgcttggaatgaaaggccattagatagggggctagaaattcccttggttgtacagagatttcttgtttccagagggcctgacctagcagrctttctggcaatcctattgaaccctgtctgtctgaagctagccctcaaggagcaggggagggtgcctggggaggagggtcaacagggaacatcagagagc

SEQ ID NO: 30843 - DNA, 201 bp, Bos taurus
tcagaattcagaaaggggaagctcagagaaaaagaagagaaggagttttcctccccctgactcctcatttaaagggaaaattccctccaatggaggtgggygggttaagaaactccacagcctctcctgcttcattgtgaatcagtcgtgttcaactcttttgaactcaacattcaaaaaatgaagatcatggtatcctgt

SEQ ID NO: 30844 - DNA, 201 bp, Bos taurus
tggctcagagccctgtgttttggaaggtgccagttaaagtacaaattgattacttgatgtgtaccacacttagagaatgtgaagcttcactcagtccttcmgggggtgtctatgaagcatgtgtgctggcctcagcttttgaatgcattgggggctacagacaagtttcaaagataagggaacataagagggacaactatc

SEQ ID NO: 30845 - DNA, 201 bp, Bos taurus
ccctgaggccaccagctctgcctgaatcagctacttggcagcctctgatagtgaccgcatagcagtcctgaggatgtgagcttaaggtgcatgactccagscttggtaacgtcaaggccacccccacccctgctgtgtgtatacggcttggagtgctggttctgtgagaagccaggacagcacagaggagtccaaatgtga

SEQ ID NO: 30846 - DNA, 201 bp, Bos taurus
gcgtgggcctgatgtaatcacatgggtccttgtaagaggaaagcaggagtttcagagttagagactgagatgtgataacagacgtagagggtcagagagayttgaagaggccacactggtggctttgaaggtatggaaagagaccgcagggggagaaacgaaggtgacttactaaaagttggcaaaggcaagccaacagat

SEQ ID NO: 30847 - DNA, 201 bp, Bos taurus
aagcaacagaaaagagccgaagtcaatgctgagccccaacgaggtgctcaaagaataatggttccatctaaccttgtcttccgtgggccgccctttcccakgaaagcagcaataacagacagcatgtttactgcattcttgccacgtgccaggaccgtgcaaagggctgtgtgcgtgtatcatcctatcagagtctcacaa

SEQ ID NO: 30848 - DNA, 201 bp, Bos taurus
gttctgtgatccatctccattgagcctatagatcaggccctcctggttgccatcccaactttgctgcccattttagtaatcaccccagcctttctcctgaytgctcagtgcttccacctggcctctgcatttagactcctctccttcccatcaatactgggaagcccagctctgagacagcatctcctcccatcagtttct

SEQ ID NO: 30849 - DNA, 201 bp, Bos taurus
cttgtaaaagaggttgatgggggctggggggcaggtggcaggcaacaggtatgcctcgcgtgcttctcacatgacacctggggatgactcgtgcctgtgcrcaggcctggctgtgtctgagcagcttgacctcatggagaaggccccgcagtgacagggattgacagaccgggctcccagtccaagtgctgcatttgcctg

SEQ ID NO: 30850 - DNA, 201 bp, Bos taurus
agcctccgcagaggtacagggccctcttattttgggatgcttggaagcgtgagggactctctcgtggttgctatggccatgtggatgtgtgaagagtctcraactcgccacctgtttggtgaaccacctgatgtgtgtggtttacctgctgcaggcccagcaggaccctgggtcgggaggggccttgctgctggggcccgt

SEQ ID NO: 30851 - DNA, 201 bp, Bos taurus
gttcatgacgcacacacagacgagaggagggtttctgacggcggttctgacgccgtctgggggggagggcagaggaaggaaaggcggcatttcactcctcygtcccgtcagcgtctggaagagcagctggggcgcagcgacagcccctcaattcctcaggccgggggcgcaggcgaagaccccagtccacacgtgtcattt

SEQ ID NO: 30852 - DNA, 201 bp, Bos taurus
gttaaaatgaggccttaagggtgggcccttatccaatcaagcatccttataagaaaggaaatttggacccacagagacaccagggatgcacatgaacacargaaaggccatatgaggacacagcaagagccaagcagagaagcctcagaagaaaccagatctgcagacaccttgtccagcctgagaactatgagaaagcaa

SEQ ID NO: 30853 - DNA, 201 bp, Bos taurus
gaagagggtgctcagtgagaaagctgggcagcccagaaagtcctaccccatcttccccagggcagattagacgtggagatgtcaccttctgttgagcacaygtgaccatcagtctctgtagtaggatcacctcatgggtctgagacacaatcattgcacaggccccacctcagaagggtctcacaaattctggagctactc

SEQ ID NO: 30854 - DNA, 201 bp, Bos taurus
gacatataagacaacctcaagaggaacccattttgcaaagcaggaaactggactcctagagcccagctctcctgacccctggcatccagggccaggacctrgaggcacagatgactgttgggaaacagtcatccagtcagggactacgtttcccaggattccttgcagctaggtggagccatgtgaccaagttctggccaa

SEQ ID NO: 30855 - DNA, 201 bp, Bos taurus
ctttcccctcttatgtggtggtcagggatgctggatcccaccccccagacaagagggcgcacccagaggggccctgcccacaagggaagggccagggaaarcatacggagggactgaactcaggctgggtcctggaggagagatgaagcgaggagagcagaggcggggggacaactaccccgttaggggggccagggtggg

SEQ ID NO: 30856 - DNA, 201 bp, Bos taurus
ttgtgaatgaaccttagttttaaattctcatgtgtgaactttgcttcctgagaatcccatccaggtggaattacctgacaaagactgtgcggagttgaacygcctgattaatatctgtaaggtatgcagagcagcgcaaggcacctcggaagtgcatttttagcattaactatttattagaaacattcttgtcgtacttgt

SEQ ID NO: 30857 - DNA, 201 bp, Bos taurus
gtgaaggggtgatgacagcttggtggccacgagcctgccacctctcacgacaacaggcagctctgcacttagtgggcaccatggggaagctttctgtgaartcctggccccatcaaagagccaaggatgaagctctgagtaaagggtcacccccagctttcaggccctgagctgactggtaatgtccaatttttcctcatc

SEQ ID NO: 30858 - DNA, 201 bp, Bos taurus
agtgacctatgtcaggatctctccttacatggccactctcccatgggggcagttactggaagttactctggagatgcagagtaaagtaaggttaggcatcygggctgtgaagtcggccaggctgggctcaaattccaggtcttctgtcaatgctgtgtggccttaggctggctctaaccctcttcttcaccctcatctata

SEQ ID NO: 30859 - DNA, 201 bp, Bos taurus
agtttccatggttcttcctccagttctctggtagcatccatacctgaacgtgacctactttgtttctcgtcatagagagaggcctgacagataccagctcyggagctgctgccaagatgaagcgaaataaaagcacaaagtgtttagtgagttcctgacataataaggccataataagaggtggctgttgttactacccca

SEQ ID NO: 30860 - DNA, 201 bp, Bos taurus
accccttggagccatacttagctgctgggggaccacagtggtggttacccatagatggcagggacacagcagactctgctcctaagggcccatgagagagytggagatgcttgggtccctgcctgcatctgggaagtagcaccttgttcctcctctgcaaggttgatgctctcttgttctcagaggtaggccactgggctc

SEQ ID NO: 30861 - DNA, 201 bp, Bos taurus
gtatttaatgggttgtctttctgctcttgctaaaatataggctctttgagaccaaggaaagattattttccccccactgatggactcaagaacacttgatyggggcctgggaccaagaggaaagctgataaatatttggtgatttatggataggagtggcggcaggccaggaaatgttagttttcatgaacttccactccc

SEQ ID NO: 30862 - DNA, 201 bp, Bos taurus
ttgacttcactgcttaatggtttcggaagcgactcaattctaaaagcatgcccacccactgttacgacaaataaatgagaggccatccttagagcaactcrtataaagcccaaccaggaaagactcatgtcggtttcaccctcgcagtacattccaccctgctctgccctctctggggacttgaatctagaccctacttgt

SEQ ID NO: 30863 - DNA, 201 bp, Bos taurus
tagctagttctgtttggcaaggcgccttttctaaaattcatactgtcatgtatgtctttgatcactggatgctgagaaaattgcacacctttgtgccctgkgacagcaggtccaccacgaaaggaccatccctctgagacctgggcaggatatggctgaatttcccacttggtttccatggaaggaagcccaggagaggct

SEQ ID NO: 30864 - DNA, 201 bp, Bos taurus
gctattctgcatataatgattcatgtcaagctctgggccaggcctgtgagccaggcctctcaccgcagcaggtggtgaaggcaatggtagtagaaacagtyagctgctacggtctgctcgcactttccctccctgtcaccctgacccaaataaccctctggcagaagtggtttttttcgcccttgtggcttcagaaatcag

SEQ ID NO: 30865 - DNA, 201 bp, Bos taurus
tctctagctgcagcaggcggggctactctctagctgcggtgcgtggttttctcattgtggtggcttcacgggccctaggatgcgcgggcttcagtggctcyggttcccgggccccagaacacaggctgtagagttgtggcacacgggcttaattgccctgcggcatgtgcgatcttcctggatcaggggttgaacccacat

SEQ ID NO: 30866 - DNA, 201 bp, Bos taurus
tggggctcctggcaagcaggtatgctcagcagagccaaacaactcctatgtccttgtcctgagagacagtggagagctgagggcatcagaggctgcactgyggccccagatcccagctcagggctccagtccagtttttccagtacaaaaggctgattcattacatccggatgtccaaattctatgtgtgactttcaactg

SEQ ID NO: 30867 - DNA, 201 bp, Bos taurus
ttgttggtgtggaggaaactcacacgtttggtgtcagaactgttgtagatggagaatgtctcagtcagtgatgccgaagggcccggagcagaaggagccayagactctgaaatctgcacagcaggtttgtgcgccttgtctgacccccgggtactgtgaaactctcccatcagggccgcgggcccctgggggtgactcact

SEQ ID NO: 30868 - DNA, 201 bp, Bos taurus
gcttggttccagtcccatggactagggggcttaaaaagagtcattcattttctcacagtcctgaagcctggagagccaaggtcaaggtgatgccttcctcygaggcctctctccctggtttgtggctggccctcttctcccgtatcttcacaccagtttcagtctgtgtatctccgtgtcccagtctcctcccgttagggc

SEQ ID NO: 30869 - DNA, 201 bp, Bos taurus
tcagcatgagaaatcatttctcctgtgtatcaaggctttcaggcccatggaatgacaccaccacaacagaataaaaaatttcaaggaatatctacaactaytgttggcaggagggaccactggaaaactcacaccttttacacaaatagaaaaatgttagattctttatcaaagtctgctccaaggaattcctcatttatt

SEQ ID NO: 30870 - DNA, 201 bp, Bos taurus
ccagccaacctggttttccctcccatgctcggagcgggccagggcatagccgtaggtttgcatggtaacattgaactcttgagtctttttaataagatttkaagccacacaggaataaaaaaaaggcctccaagagcagtctgtatttcaaagggtgagacctccgagggaaagagtgagtgcctatcaatctttttcctg

SEQ ID NO: 30871 - DNA, 201 bp, Bos taurus
cattaatacattcatgtgcccatgaagtcctgaaaatattgagggctttaaagcattttcaagtgctaagaaaatgagagttaaaaactagataatgatckcggttttgttgtgaatgacagcctttcaaagcctccacacgaaacgagtccttggcaaggacagtggtcttggtgaaggagatgagtgataatgaaagct

SEQ ID NO: 30872 - DNA, 201 bp, Bos taurus
agggtatctctgtcatgagcctagaccccgaatgtgacatcttctctaaggctctgtccacaccagaaggctgggacccccgtcacatcctgggtccccayggcctccctgggatgatgccttggctctgctatgagatgaggtgtctgggcgatcaaggccactgtatccatgatacagacatggatagtggcagcagcc

SEQ ID NO: 30873 - DNA, 201 bp, Bos taurus
atattgtcctatggaggctccaagggccctgggagtgtaggatgttagaagacacgatgctctgagatttcccaaagtctttgcttcccacgctctgggakaggtggtggtaggccctgggatcatgagacttgcagcccagggtgtctgacccaccaggactgtggaggacacactctggtctctgatggccccagtgtc

SEQ ID NO: 30874 - DNA, 201 bp, Bos taurus
acttcctgcttccagagaagagaatcgtgtggtcagcttgcatcatgttgaataaatgcctttcgggtcactgaccagtgtgccactgaaggccatttcgyactaaattccttacaagggtcttgaccgtgaagcttgggagtgctcagaaggtgaccaaggatccaaagagggtccccaaagtccctgcgggaaactccc

SEQ ID NO: 30875 - DNA, 201 bp, Bos taurus
cccgttgtaccccgtgggaaacccaacactggggccgcagctcgaggaaaaccgcgaggagccccggtcatcgggagatgagggcctttgtttcctgcatrggctggagagccatcccaagtcttctctccaaaatccacaggaggcttgactcccttttcggccactcagtgggttccaagagatacccatcgagactcg

SEQ ID NO: 30876 - DNA, 201 bp, Bos taurus
ccccaatagttgggatgatcttcccactcattaacatatgaattcacccagcttgcaaaaactagccacaccacattccatggcctaagcacttgccctckgtaatggcccatatcctttagagtgtgcttctctctgaatcctaacaaatccacctcttacctatcgctgtgtctctaactgaatttttgcagtgagaca

SEQ ID NO: 30877 - DNA, 201 bp, Bos taurus
catagatattttattggaagtatgaattagaatcttcctttatggatatattgtgatagcaaaaatatcagaataacttttataaatattaataggaaaaytgttaataaagctttagtgtatctgtattgggggacataatgatttaagagcaacatacagctagtagttataacatgaaaggagcccttattccaggag

SEQ ID NO: 30878 - DNA, 201 bp, Bos taurus
gggctggacctcggcagagcactgtgccctgtgagcccttgacctggcccttcttctccacatctccccatttagggcaactgtgaaggcaggggcaggargaaaagggcagagtgtgggcccgctgtatggttaggtggtttgtgggaagctgctactcattgtcattcacatctcattggctgatatgacttacatgag

SEQ ID NO: 30879 - DNA, 201 bp, Bos taurus
ttcatagcatacagtatttttttggattctaccttttggcatatgtctgctacacattatgtgtatgatatctctatatttttttccttagaaagacataytgtacttctttaatttatctatggaagacatttagaaatcaacccctcctctgtgttttacttatttccttccctttgtccttctttccctctgcacttc

SEQ ID NO: 30880 - DNA, 201 bp, Bos taurus
tattagaaagacataaattcttcctccctttagtcaattcagagataatctcaaaaacaaagaagttgttacctgactgcatgaattcttatgtggccaakagcaggttcttttaaatctccttatgaattggcatctcaacactgatatttcaaagtgcatcttctccaaacatagagtgaagttatctgccatagaact

SEQ ID NO: 30881 - DNA, 201 bp, Bos taurus
attggtgacacatgctgatacttctttcatttcagtcaaatttgatcacaaccaaccaagctgcaagattattggtgactatgtttaaatttttatgattygtaactactctgaagcatagttcaggtagtacagtagcacagcttgtaaacactttggagtatgtcaaaatatgaacccaaagtgttttacatactgtta

SEQ ID NO: 30882 - DNA, 201 bp, Bos taurus
aactaaactacagtctttacaagggcctcccttccccatactggacagtaagtcattgtccaactttgaggtttcagcctaaagtgaagagttcagaaacyctttatggccttcacgtttgggcaggttctagattccagtctctttcctcctggtctatacagattgtcattctttgtatccaatctcttactcttgcag

SEQ ID NO: 30883 - DNA, 201 bp, Bos taurus
aaaaaccaaaactattttggggagggggatactaaataattattataagttatttcttcaaaattgacaaaccacccagggaagatagctaggaaaacgtygaggatggaaaaatattgacagacggagagaaagagaaagggggatatatattgagaatttaaatcatgacagaaccttactaacaactactgatgctaa

SEQ ID NO: 30884 - DNA, 201 bp, Bos taurus
atccactgccaacttccaataaaattctcttttctcaaattgtatagcatttcaaaaattatggaaacctatgttcttgtgtttccagaaaattagtcaaygtgtgatctttctgatccaagaatatgactttttgacgtgagtttcctttaagagctctttaagatatagaataaacttatttcaaccccagacctccca

SEQ ID NO: 30885 - DNA, 201 bp, Bos taurus
tggctacccactttagtattcttgtctggagaatcctctggacagatgagaccagtaggctacagtctatggggggtgacaaacagctgaacatgactgcrtgactaaacacacacactggttgcatagttcaattatatcagagtgctataacataaactcagacatatttgtttcaaaagcttatattcttaaccatta

SEQ ID NO: 30886 - DNA, 201 bp, Bos taurus
tgtgtggcctctctaaactctggaaatccacacactccatgatctttatgccttgaacactctactgaatacacaatgcccaagttctaacctgccaattyccattcatccaccaggcctcagcttagattcttccatatgaacacagagagccttacttcactctcaaatgttaggtattttcctacatcagctacattt

SEQ ID NO: 30887 - DNA, 201 bp, Bos taurus
tccagtctttagctggctgtggggaatcccatccatggtgatggattattctcttttcactttccttcacatttagcaacatcacttatcaagtggggccrcattcacactgaaacaaaagtaaagatgtattgaatgtgcatacccaaagcacttatacaaatgtgataataattttgaaaactatatcctaacccaaaa

SEQ ID NO: 30888 - DNA, 201 bp, Bos taurus
aaggaaataagtgatggagccacacccttttaggtatatggctgcaaacttagtgttaataagtaggaaacatgcagctcaatacttgggcaggccccttycttaatccacgtcagatcgtccagaagcctctccccctggagtctctggtgcacgcgtcttgaggggccacgccccttcaggaataaaaaaaaaaaaaaa

SEQ ID NO: 30889 - DNA, 201 bp, Bos taurus
cctctggcatcatgaaatatgccagaattttcattgttcaaaaataatatgtgatccaaattcaccctggggattcttgataagaatattttcaaaatccraaggagaaatgtcttccaaatcccatccatatcctagtgttcctggaataaacaggatgcttagtattattttccacactcagagggttgcatttttcag

SEQ ID NO: 30890 - DNA, 201 bp, Bos taurus
aattaattctccccaaaggcaatcataagaaggcaatatataatgctttttttggtagacaaaataagtatctgtttgtgcagatggccagtgaaaaatamactctttcagtccagagactctcactgtgggatctcaaggcaaccatgtcacaattcaattaagggcctggaaatgcagatttaaaccaacaggctacgg

SEQ ID NO: 30891 - DNA, 201 bp, Bos taurus
ggttagagaactggatgtggccatctgtgactcttttggtcctggtgtaactcagcccaagctgcaaacctgtgaaagagggctcttcactcaccagtaaygggtcaggtcctccctgttggccagaaaccctagatggaaaattttaccaagaatatgttgagcggtggaggcaaaagtaagaagatttatactttctag

SEQ ID NO: 30892 - DNA, 201 bp, Bos taurus
gcaagaatactggagtgggctgtagtaccctcctccaggggatcttcctgacccagcgatcaaacctatgtctcttaggtctcctgcattggcaggagggytcaccatgtgtcacagcaacttaactgctgggtatacatctgagaaaaagaaaactgctactttgaaaagatgaatgcaccccaatattcatagcagcac

SEQ ID NO: 30893 - DNA, 201 bp, Bos taurus
atgtgcttcagaacagctacttttcccacactccatccccaccctcaccctgcccccagcaaaaggatgaagggagttttcttggcctcttacttggaaarcctgattgagttcctgagataaaacctcaccaaattgtggaggctctcctcacactgggcctctgggttttcagcccaaactttcccatgcagccctcca

SEQ ID NO: 30894 - DNA, 201 bp, Bos taurus
tgctatcagcaggtgtgaggggagcagggctgaagcatttggagagtctcatcagggcttctttgctggaagcaagacccagacagatcctcgtgctgagrgagggccaaagtgcaccagagcggggaccagccaattctagctccatgctcaccggagctgagcctgactccatgatcctctcttctgacttccctccta

SEQ ID NO: 30895 - DNA, 201 bp, Bos taurus
tgaaatgttttccagatctacttttcaacaaccgccagtgactacttgaagaggacagtggttcacgcctacgtgtgtttaaagaagcagaaaacattgtrtgcatgtgtgtctggtgtgcaagcgaaaagcctgcccagatggaaggggctggaactcatgcttgaagctgcaatcctttcaagtcagcacacatggagg

SEQ ID NO: 30896 - DNA, 201 bp, Bos taurus
tcatagcatgtcacagccccccttggcctggggtgctgactcagctcactgtgtcttgtgtgcgtgcatttaaggagaccccagtgctctgctctgcccarcaggcaggccgccctcagggtggaaggtatgcaggcccaggctcacagggctggggtcgggctttctggtgggcgaccttggctggactacaggctgagc

SEQ ID NO: 30897 - DNA, 201 bp, Bos taurus
cctcctggtgtggcctcagagctgggtcgcccctttcctctgcccgtttgcgctccggttgtgccattgtcatcttgagctgaacccatcgaaagtctgtytctggccatctccaatggcgagtcctctgctggcccatgtagagctccatgctggagtctggttgccgagcagtgcccccaccccagagcccgctgcctc

SEQ ID NO: 30898 - DNA, 201 bp, Bos taurus
tctcctgcatctcagcagagctgggttcccactctgttcttccaagcctgtgccttctgtgaaagcaataagtacagtgtttcatgtgtggttgtgtttgkgagtgtgtgtttatgcagctatgcacagcatgcatgaacatgcacagaagtacctccctagagactgacaactgccagcatcttaaatagaaagaaatgt

SEQ ID NO: 30899 - DNA, 201 bp, Bos taurus
gctgcagaagtgaagtggtcacaggcctcgccttgccccaccccagcagccttgggagaagcaccagtcgaggacctgggttccctccctccagagcactyccaaggccagtggcttctgtcggtgtccactctctcctcctggacaaacaatgccccagggaatcaggtccacactaaggtgtcaggagcaagagtgggc

SEQ ID NO: 30900 - DNA, 201 bp, Bos taurus
agccgaaacctgcttccagcggaggccagagacccacttgtcctgctgcccctgtcaccaagctgttacccagtccaagcctactctgctcgctgcactayaggccaattaactgagagacctgctgttgaggcaaggaatgtatctttattgggaaagctggctggccaagaagatggaagaataatgtctcagccttct

SEQ ID NO: 30901 - DNA, 201 bp, Bos taurus
ggtttcaggagctgggtgccagaaccagggacaaaggctaactacttattttttttattataccatgcctcccccactgcaggggcccagggctctggagrttaatgtgtgttgcaggctagggaaggggcatgcacattctgggtgggggtgttaggaagggtgtcagggagcagtaggccccaactgagctgggaggag

SEQ ID NO: 30902 - DNA, 201 bp, Bos taurus
gagaccttgggcgacactcctacccggaggcccagggaggagacaagccttcaccctacttttcccacttcttcctgttctccacccaaaagcactggcakcggaggccaggatgggggaggacccggcagaaagtaggaggcaacctgggtctggggacgggcagggctgaggttggaggccgggatacacatgcagggg

SEQ ID NO: 30903 - DNA, 201 bp, Bos taurus
gctcgcattcatgagctgtatacatttagaggcgcacaggaaatgaagtgtgaaagagagtaattgagccactgtaaaatcagattagaaaaatgtaccayctttgccttacctctcttttttcctctctcccaagcgtctcactcatataatcctctatattgaccgctacagcatctatccatgatattaaggagctgc

SEQ ID NO: 30904 - DNA, 201 bp, Bos taurus
attttctatgtttttcactttcccataaaagtaaacaatttggtattttccatctttttataaatttgtgcatcaagagtagtttcctctcttttatctaytgttctccagttctctaaccatgtctgattcactacaggatccatttatgttctctgttttattttccagttctgaaactacattttcctcaatttttga

SEQ ID NO: 30905 - DNA, 201 bp, Bos taurus
gagcatttcctgacctaaacacacaaaagtaggtgatccagggagtgtcattcatatcctgggtcaaacgggaggtccactgctacaggccagtctggctycacgttgggaaggaagatggatcatgagccctgccaggaggaagcaaagtgaaaatttcctttttccttggggccccaggcccccagcagcagagcagta

SEQ ID NO: 30906 - DNA, 201 bp, Bos taurus
gtaaataaaagcacacaggtaaaggaatataagatttacttgatttttcaaaatatatcaacttactttccagacttggagaaatcacgatgtcattgccragctgagaggggaaaagtcccatttgttactgcttcaaggttaagagatcccctctgtggctagcgctgaacagaacgcaccactcagtagttcaccaag

SEQ ID NO: 30907 - DNA, 201 bp, Bos taurus
atcctccttcactgattagacaacagaggatgctgttcccagttgatgtgatcaggaagaaggattttcctcccagagctttaggtgtcttagcaacagakgctgaggttcactccatagaaaggtattttgaggactgagatttacgtaggggctaggttgggaaaaaattaaaacagaacacaataagaaaagaaacaa

SEQ ID NO: 30908 - DNA, 201 bp, Bos taurus
cctggaggtgagctcttgatgccattttactccaagtcaccattgcctgtgcctctcacctctcagagggagctgcaaagaactggacccagaagtcagayggttgtggctgcaggcctggatctttggaaaagccagcctgtctctccttcttgccctcctgctttgcactgatattgtcaggaatttgcatttgctaag

SEQ ID NO: 30909 - DNA, 201 bp, Bos taurus
aggctcactttggcctgaaaacacagatcccaagggaagctccacagcctggagattgccagccacacagcccagagaacccccatgcctccgtcttgtarcgatgctgggccccagtctctcctccaagtggaacttctctggatgctcaagcaaggtggacataaagggtgaggaaagatgggaccgtgtagctaaact

SEQ ID NO: 30910 - DNA, 201 bp, Bos taurus
taataatttaaaatttgatagtagcaataaagatatctttactttccttgtgaatctgtcacagctccttgtcactctggtaagccatccaaagaggtgcytttcttaagctatttatttatttttccttattaagttattgggcctcttgcaaaatccaggtgctgttagctgtggtgaaggcatagctcctggccagta

SEQ ID NO: 30911 - DNA, 201 bp, Bos taurus
tggttaaggtttaaaaagaaaaagaagaaggatctggtgttagcacagtacaaattgagagtttcttaaaagcagttgggtacataattgaaaactaattkaatgttctaatccatatgcatgaaaaacaatttgcattgcttcattacttaaaagcagtgtgaagatgaggatgtgctgggaatctacaggaggagcagt

SEQ ID NO: 30912 - DNA, 201 bp, Bos taurus
ggtgtccaagcaagcgggagacagtgaggcaggaagaggaggggtgttcagaggatgtgggggaccccaacctgccatcttcacagtgtcctccaggcccrctggcaccggggtaccatttctcacatctgagctggaccagactgaggctggaaggagaggaagatgctcttctcactagatcctggaacttatgcaaaa

SEQ ID NO: 30913 - DNA, 201 bp, Bos taurus
gtgttccttatattaagaaaaatgagttttccccagcttcccataatcattaattgtacataaatggaaaaaataaagggctaagatactgaagctaagayagctgatgtcatgaatcaacaccaatcaaatattcatggctaaactcataaaagtattcatatgaataatttaacagacaaaactgaaatactgggccaa

SEQ ID NO: 30914 - DNA, 201 bp, Bos taurus
ataaaccagctttcggaccatgctggccacagacaccatccacgtgagcatcattatcagggggaagaagaagccgacgttgtttaagaacctgtggggaygggccagtcagcatccaggctgccccaagatgctctcagtgagttcagctcccacacttcatcctgcagtccttacagccctggggttcacccaggaaca

SEQ ID NO: 30915 - DNA, 201 bp, Bos taurus
gggctgaaacaggcattgtgcggagaccaatttcctccttcccaagtccaactctttctttggtctttttatcaggtgacattggaccctgccaggtatcrgaggagccgtgaatggaagagcggacaaaggagatctgattcaggaagacaagaaaaggccaccttgcaggtggccctcagaccagtaggaaaccaccct

SEQ ID NO: 30916 - DNA, 201 bp, Bos taurus
tgacaatctgcaaacatggatgctacctatcaatctgtctatgtagtggaaagaaaatgagactatgtatcaagaagatttagggcctacagaagccccaktcacagcaaggaaacctaaattttcaaattaccgtaaatccaggggaagtcaggcctaggcagttaaaaaacaatgcagaggccaggcctcccagcagct

SEQ ID NO: 30917 - DNA, 201 bp, Bos taurus
ctagcagtgtgtggtggtcccagttttcccacatcctcaccaacacttgccattcttttttcacaactgtagccatcctggtagatgtgaagtgctgtctyactgggattttgtattttttattctgtactttatatttccctaatgactgctatctcgagaaggacatagcaacccactccagtattcttgccagggaaa

SEQ ID NO: 30918 - DNA, 201 bp, Bos taurus
attttaccatatgtttgcttcagatttttttttaagtaataaagtaccagtgaatgtttctccaattccattctttacctgcacctcccagaagtaaccarcaacctaaaatttttatattaacccataaatgtttatatagtactttagcatgtaaatttttaataccagttttgtacttatataaaaagataaatttat

SEQ ID NO: 30919 - DNA, 201 bp, Bos taurus
cctaatagaacagggaaaaggaggggggaccaggcgtgagtggtcagagaagatgagggaggttctctgtctgattcttctgttttctttctggtgttcarggcctaggacagagtaatatagttacatcatccccagtaattccaacatcttatcgtaatattatgttagctgtaaatcaaaatatgatttaatttataa

SEQ ID NO: 30920 - DNA, 201 bp, Bos taurus
aggggcaggaatagagacgcagatataggtaatgcacttctagataaagaaggggaaggagaggtggggacacattgagagagtagcattgacgtgtataygttatcatgtgcaaaaccgatagctagtgagaagctggtgtgtaacacggagccagcctcgtgccctgtgatgacctacaggcgtgggatggggtgggga

SEQ ID NO: 30921 - DNA, 201 bp, Bos taurus
tttttttttttctccattcctgccttgggagtgactgtgaagatcatttgctggaatgattggcaggttagaggattcgatcagatgagttcctcttagcrcaggtcaaaaaggctagttagcaggagctgtcgaaaaatgccagcagcattcgaaatgggaaatgtcatgacttcgaggcagggggtgccacctggaaca

SEQ ID NO: 30922 - DNA, 201 bp, Bos taurus
cttgctgtgtgacctcagtcagagaaactcatctctgtgccttgatttcttcctatgtaaagagttctaatcatatgaagcaattaaggcagtgctgggcrcatcacagctggcattattgagttgccgttagcattattatggtaatcagttaggtttgaagtgctaagagtctagatcgaattgaaaggaaaactacag

SEQ ID NO: 30923 - DNA, 201 bp, Bos taurus
gactcactttagaggcccagaaagcctcctctaattgaagcaccaagactcacttgaacagtaagtgctctgtttctagggatgcatcagctaacttgggragaagagaggccaccctcatctacctcattaagagatatgtttccaataaaagtttaatgttcaatacttactttctgttttgtagtattttgacccttt

SEQ ID NO: 30924 - DNA, 201 bp, Bos taurus
ctgtgttgtggcataaaagtgtatattacagcttaagaaggaatttcaatgatgattggtggcaaattactagcaactcccaagaaagcctcctttggccwtggttcagacttgttagaaaactagttctgatgatattatcatagctatagttaagttgagatggaaaatgtctttgaagagacttgtttgttatttcca

SEQ ID NO: 30925 - DNA, 201 bp, Bos taurus
cgatgccaggacgctcacgtaacccgtcacaaaaactcacgtgaaggagggtagatgtaacacaactgcaaattgctagactggctttcagattgtaaatmaattttgaataagattacaatgtagggtttccctcttttttctttttttctcccctctctttttgaagttcagtttacattacttcgcattcatgaaaga

SEQ ID NO: 30926 - DNA, 201 bp, Bos taurus
atgacttttcaagtgcttccaagggccgctagggtgcagcactgccctttctctacgccaaagtgaagaaagccttcggaggaaactgaacagcatgaccygacacaaggccagaagtcaagaaggaaaacctaaaggcacaaaacgtatcgcgcgtcacggcttcttttctgcggacaacctagatctcaggccctggcc

SEQ ID NO: 30927 - DNA, 201 bp, Bos taurus
ttttttgtacagttcttctgtgtattcttgccacctcttcttaatatcttctgcttctgttaggtccataccatttctgtcctttattgagccctctttgygagaaatgttcagtacttgttaactacaaatgtaaataaaataccagggaactctaaaatattccacttctacatcacttaccttttttcaaataccgct

SEQ ID NO: 30928 - DNA, 201 bp, Bos taurus
gtaagttgagaatgcatgacctagatgtgcatgtactgtttgcctggattcctccttacttcacccaccctgttggttcagtcctgctattgcatatgaayttcttgggccaactgtttcctcaagcagtcctgtagaaaacggaaccagttatgtctgtccacctgagggggtagactctgccagtgaattctgatgttt

SEQ ID NO: 30929 - DNA, 201 bp, Bos taurus
gttcttcacacacaccatacagctggtgcatatggtgattcctttctttggatcagaaccctgactcttctgtctttcagaggtctcagctgaaatattayctctgcaggtaggcctcctctgaccaccctgttatcctttatcctattgctctcctctactgtatttattatatgcttacatattccttgcccagtagct

SEQ ID NO: 30930 - DNA, 201 bp, Bos taurus
cagtgaggcagcatcagagacttcgtgggtcccacagggcaccctggccccataagcttaagcctatagccccactatgtcctctgacctcacacttccakacccactaagtcaaggtctgggccttttgacttcttttgaaattctataggaagcaaatctgtgacacaaactattactacttgtgttatttggagtatg

SEQ ID NO: 30931 - DNA, 201 bp, Bos taurus
cctaccttgttgagtttctttttacagtgaattgacattgaattttatcaaatgccttttgtgcatcttttaaaatgatcacgtgctttgtcatttatttygctaatgtgatcaattacaatgattgattgccttatgttacaactgttgcacaccgccagtaggatatacgtcagttactcatgatgtgttgtatattac

SEQ ID NO: 30932 - DNA, 201 bp, Bos taurus
cagacatgccatgacccctgcctcttacacttctctctctagccctcttcatgagaaatctcatttgtgatccaataatacacttcttcttttcagaaacsctcaatggccttatactgtctgctgatagaggtagaaacttctcagcttggcttcgtggttccacctgaaaccaccatgttggatattgttcccattgta

SEQ ID NO: 30933 - DNA, 201 bp, Bos taurus
gctcagctgttacactgttaacctggagccttactggtggcagctgaaaaagccctgggtggaccacatgcactcctgtgcccaaaccctacagcctgatygctgcgctcaccggaggggcagggctctgcctgtcaggcatggcgttcacctaagtgagaaggtggtaaggtgttcttttgattttatgcccagccaagg

SEQ ID NO: 30934 - DNA, 201 bp, Bos taurus
gaaagcttcccacagtaaaatttctagatagaagttaaagtttctgtagactgagctgctcagattaaaagagtatagcaattcttttatactccttataraagaaagtacaaacacatggtgaaactatttttcttgccatgtcagcattcctttgagaggaaagaaagaaaatgttttgttgggagttcttcagtttag

SEQ ID NO: 30935 - DNA, 201 bp, Bos taurus
ccgtactgtcctgctatgaaaagtgtggaccgtggaccagcagcatcaactgtcagattattagaaattcggaatctcaggcccaatcccagacccacagyatctgaattttagcaaaactcccaggtgatgtacattcacattaaagtagatcactgaaagagctgactgtcctccgaatatattctagtcatagacggg

SEQ ID NO: 30936 - DNA, 201 bp, Bos taurus
aattttaatggtgtgctcacagactgccctctgccaagcgtggactctaggagtgagggtttgatggcccacgttggcttggccagaagccacagggtgcyttgatgactttgtggaatttaatgatttcattctgaaagataaattgggattggaggaggggagtaaatccgtgaggtggccatcttgacaggtgaagct

SEQ ID NO: 30937 - DNA, 201 bp, Bos taurus
tgaggcaatgagaggttaggtgcctgaccatggccactaagcaagctgagagcaggacagaagcttcctgtgcaaatctaaggttcgtgttacccactccrtaaggccaaattgctacctcagaaactgcctttgccttagtttcctcagctgtaaatatatggtcatctcctttaaaaggcatttactcttagagctaag

SEQ ID NO: 30938 - DNA, 201 bp, Bos taurus
cacccatcatcttcatctctcctgggtgactaaggaagttgtagagaaaacctggtttggattcatgaaaagccccacagaaggcccctctacaggggaargagagcctgccggggtcttctgcccacaggaagccaggctgcttcccctgctctagggctcggaacagccacaccttgctcacccgcctgagatctgcag

SEQ ID NO: 30939 - DNA, 201 bp, Bos taurus
caacagttcggacttcatggactccttataaaaggcctcagagacccccaaggggtctaccgaccacactctgagaacagctatcctaaatgaactttccrtgttatccaaagaggccaccgccctctcagaacgtaccagaatttcccttttctctctgacattgtcaatactccactcactgtagtcatttccatcagc

SEQ ID NO: 30940 - DNA, 201 bp, Bos taurus
acatatgtcccctacttcctggccctccccctcacctctgatcccatcccacccctctaggttgtcacagagcaccagcttgagctccctgagtcgcacakcgaactcccccggctacctgttttccatatggtagtgtacatgcttccatgctacgatattacttagtagcactcagtttcatttgttgaccattttatt

SEQ ID NO: 30941 - DNA, 201 bp, Bos taurus
agaaagatgatgaagccactgcctttgtccagaagaggtcgtaggaaagaattcaaagtgtatacctagacgaatctcaaaagaataagaattcactaggyggggaggagggaaagacatgttaaactcagcagaatatgttagaaaagaaatgaaaatgtgtgaaagagctcttgccaacacccaaatggggagactgga

SEQ ID NO: 30942 - DNA, 201 bp, Bos taurus
ccacctttgtgtcctcctggggcaaacaagtcactcagatgactgatcaaatcataatggcctgtaagctgtgatgtactaaagcttaatagctacttatyttaaatcttcagatatcctctctaaacttgtagttgctaaaatgtcagataaataggtgcctaatctcccttcactctggttctcagtagcttctttttc

SEQ ID NO: 30943 - DNA, 201 bp, Bos taurus
ctcctgttttaagtctcccactgtctgactgcaagattttatttattaatatattaaaaaaaaatttggccttgcagccaagatgtaggctattagtttcscaaccagagattgaacccacaccctcagcagtggaagtgtggagtcgtaaccactggacatcagagaattttcatctaagattttaaattaccccatgga

SEQ ID NO: 30944 - DNA, 201 bp, Bos taurus
tcacctccccagcctcatcccaagctcctctcattgcaggtgacaagtcaatgattctgaatatatttaagcctttggaatgcaccatggatcattctcamctccagatctttgcacattgtccctaacgcctggagcactcttctccctgacctcctaacctctccttttaggtagtctagataacagtacactattttc

SEQ ID NO: 30945 - DNA, 201 bp, Bos taurus
ttacattgaatgggtaaagactagcaagaatcttttttttttttttttcctactaatgtctcccgttgagaagggggtttcttagcatggccatgtaaatkaataccgagttatttctttgaattcaaaggctatttatccaggtctaatttctttagaattaacgtgataactgagcccaacttagcaaccaaaaccagt

SEQ ID NO: 30946 - DNA, 201 bp, Bos taurus
atctcataagtttgttcttaaggtatttcatagaaagtgcataagtagctctgtgcaaagcacacgttgcaatgtgtttaataagcattattgatgttatwattatttctgtatgatcaaccgttgtagcagaaattcatgtttctgtctccaatatctattatcctattcttatttttaaatgagccccacttttgtgta

SEQ ID NO: 30947 - DNA, 201 bp, Bos taurus
aatggaactatacttctatattctgcagtttgctttttgacttctaaattttttctgaaatgtttatgttgatgcatatagctgtagttcatttttactayagcacagtatttcactgtatgattatataatgattttatccattctaactttaatggacaattgagctgtttctagtgtttgctgctattatggacagtg

SEQ ID NO: 30948 - DNA, 201 bp, Bos taurus
atggctctaacagaaatgtatagaacatcccggcccatccctcagaagctgggtgcatgttctgaagtacatgtgaacactcttaagtacactttaataartttaatcctataaataatgttgagcaaagcagaataaatatcataccattccacttcaacaaaattaaaatcaggatagggttacctttggtgggaaggt

SEQ ID NO: 30949 - DNA, 201 bp, Bos taurus
tgacatttgccacgatagtaaatcttaagcgttttcaccacacacatacatcaaaggctatgaggtggtggatatctcagctaacatgactgtagatgtcrtttcacaaaggaaacataaatcaaatcatcgcattacacagtttaaatatatacacttttatttgtcaattataccccaacaaaggtaattcttccattt

SEQ ID NO: 30950 - DNA, 201 bp, Bos taurus
tgccttggttggcatggtctttctcccctcacccccactgagtgccttgccctgtctccttcctgttccctctggaagtggcctcatcaatcattttcctrtttttctttaccttcaatgtctcctctctaccaacccctccccttgtctacagacctgttggctttcctctcaacctaatgtcctacccctgacccagtg

SEQ ID NO: 30951 - DNA, 201 bp, Bos taurus
tcattttaatgtggtttgaagggagaaatatgttttgaatatgtaaatgacacaagtaaatatgataatccagaacagatttataaatactagactgacarccctagcaagatatgatataaagtactaaaattaaaaaaacaaacaaacactgaaagtctaggattttagggactttattatgaatttcaccgactttct

SEQ ID NO: 30952 - DNA, 201 bp, Bos taurus
cctcaagtctgtggctcctccttgagggccatgacctggatgtaatatgtcattgtaatcgcagtgcctgggatagagtcagtgtttcttttctttaaaaraaaaaaaacatatttatttacttggccacactggcccttggttgcagcatgcaggatctagttgcctgaccagggatcgaacccaggccacctgcattgg

SEQ ID NO: 30953 - DNA, 201 bp, Bos taurus
acgatttgagctgctgttagtcaggatatttgttactagatagcagaagcagttcagttaatacggtctacgaggtggcaggcccatcatggagcttgggygttatacaactgaacgtgaccacggcactcaaactcctgcttttcaccagtgaggaaacggagtcccagagggattatctggcctgcacaaactcacacc

SEQ ID NO: 30954 - DNA, 201 bp, Bos taurus
tgtggctgatccaagggaggagggaacctcagttccgcgaactggcctaggacagactaacggagcagttttgccctccttcatacatggcttcccttccwagtccatgtttcttttggccattttccagggagcaagaaagaagacaaactagacagtaagaagcttctcttttgagggacatgatccagttctactcac

SEQ ID NO: 30955 - DNA, 201 bp, Bos taurus
cggagttgtgctttcaaagttggacttcttttgaagtgtctcattgaatttataagtatacatatttagttatgcttacaaattatgaactaatatttagyattaaaaattataaacattatctatttaacagtgttttagtgcctgttttttctaagtactagaaatgttacagtaaacaaaacagacaaaaatccctgc

SEQ ID NO: 30956 - DNA, 201 bp, Bos taurus
gcctagtcactccgaggtcccttggcattggcagaggctctgtgtgtcttgacaagtggaagacggctttttgggtttgcaggttatgttgaacttttagrttaggccttctaagagccaggctcacaccatacctctgaccccacacattcagaatgggtggctggatctctgccttttcagcacttctcttcagaacct

SEQ ID NO: 30957 - DNA, 201 bp, Bos taurus
aaaactgaacgtaaagtgcttcttttctacttttctaaactactttttctagggacttttatttctgagagcattaagcaagtcttcaatttactggactmatttaaaattctaaccccccccctttttctctcctcacacacatccgtatttttctctctgttccccgctttgctctctgagcttcgtacttgtgtaaga

SEQ ID NO: 30958 - DNA, 201 bp, Bos taurus
aattcattctgagaaatatcaccctccgtcccttccttttcagtacctgaggcaaaaataattgactagtattttgaggcttagagtttagggtttttttktgtgtgttttttttttaatgtgttaacaatatgggagaactatcaggacaaaaattacaaataaacaagggtgatatgaccaggtttccaaaaatgtaca

SEQ ID NO: 30959 - DNA, 201 bp, Bos taurus
tggcaacccactccagtactcttgcctggagaattccatggactgaggagcctggtaggctacagtccctgggatcgcagagagtcggacacgactgagcracttcactttcactctgtataaaacagataagcaatgtcttactgtacagcacagggaacggtaatatcttttaataaactataatggaaaagaattata

SEQ ID NO: 30960 - DNA, 201 bp, Bos taurus
tttaaaagtgcaccattagctcatgaaaggaagcaacccagcagttctctgtaggacactgaggaagacagggagaagggaaagtttatgagaaaagacayagctgtgaggaagcagtcagatccctagccagctacacatacatgggtaagtataggaggggcttcccaggaagctcagctggtaaacaatttgcctgcc

SEQ ID NO: 30961 - DNA, 201 bp, Bos taurus
gttgttgtcttctcatcagagagtagaagacgtgcaaacacttttaaaggcaaagctggttttttcagcagagaattaaaattaaaagcagacacaggccyggataataagtagcaataaaagctttcgctgacatagcttcaatttacaaatcactggcttttcctggcagcgcttggggaaggagggtgaggaagtatc

SEQ ID NO: 30962 - DNA, 201 bp, Bos taurus
agtcattgttagtcagtagacagttacctggggcagatactaacatgctatgctttctggaagaggaggcaagttgccaaaccccaggaatgacagacttkccatttagttaacttctcagacctacttgactagtctgtgtgtatctacccccaaagagcagaggttttcagcttgggcagaatgccatttcccctttat

SEQ ID NO: 30963 - DNA, 201 bp, Bos taurus
caatggactctggcctttatgtgagtgtcatgttgattgggagccaatcctatgtattaatctaggaagggtcttattttctgtaaaatagaccaattctmttaaggaattgacttatatgaaacagaatcaaaatgtcaaggccttctggcaaaatcttgtggttgaatctcaacagcagcctcaaaacagatgcacatt

SEQ ID NO: 30964 - DNA, 201 bp, Bos taurus
ctgacttagtgactcgacaaaaaacaaacaacaaaaacacaacattctatcacaaccagggaagatggtgtagagatcattcacagagtggttgcctataygattttgtagatcagaatggatattcatgaataagttagaagttaacctgcctgcaatgtgggagacctaggttcaatcgctggttcaggaagatccttt

SEQ ID NO: 30965 - DNA, 201 bp, Bos taurus
atataagtacaaaatactggcaaactgaatgcaatagcacattaaaaagatgacatagtatgaccaagtgggatttatcccagaattaaagtgattcaacrtaagaaaatcacatcaatgtaatatatcacattactagtatgaagaaaaaaaaaacacattatctcaattgatgaaaaagaaaaaaggcacttaagatag

SEQ ID NO: 30966 - DNA, 201 bp, Bos taurus
aattattttgttaactagcattttcacttatttatacttactattaaataaagcaaccccatcagcattgtagtgatataaatctcgctattccccaatgygtgcagaaagttcactgcttgcaatagcatgactctccaagtccaattatccaggctgtttgatgcaacattcatctgactagtattaaagacaatgatt

SEQ ID NO: 30967 - DNA, 201 bp, Bos taurus
ctactgcatcttgtagtaggtttgagctactttcatttatttattcactcaacaaaattactgaggatttgctgtgtattgattagcctacaacacaatayttctgaaaaataaccaaaaaaataaaaataaaaaatgaagagacagagccaaagccaaaaaataacacccaactgtggatgtgactggccatagaagaaa

SEQ ID NO: 30968 - DNA, 201 bp, Bos taurus
tccaaaagattaatgaaaatttaacaatgaatatttcaaaacaggccaaaagaaattaagaaaatggaaaagcctatgaaagaaccaggaacattgccatmagaaaactgaggcaaatatgcaaaatatttgaaaagagaggttatgaaactgagaaagatattttaaaattaaaaagtcatttaaaaaatgaagtataaa

SEQ ID NO: 30969 - DNA, 201 bp, Bos taurus
agggagattcttgctaaagtgacctgacagagttcttgccaaagagaggccaaggacttctatatcacaggtggggcctgaggaatttgatcagatattartgtgatcagtcatcaatggtgggggaatcctctctacactgactttgccagattcctgctaaaactaggccatacatgtctgacaaagatagaatgatac

SEQ ID NO: 30970 - DNA, 201 bp, Bos taurus
ctaatatgatctattattttagaaaaatgcagcatcttaagttcagtaaaacttttgtcagtttatatatagttcattgttcatgttcatatttcgtcacrtttgactctttgtgatccattggactgtagccctctacagtcaggctcctctgtccgtgggattttccaggcaagaatactggagtgggttgccatttcc

SEQ ID NO: 30971 - DNA, 201 bp, Bos taurus
gacatatttagagttcctatcctttaaaagaacttagaagttaatggagtatactgaacatcagaggacttaaatatataatgtacatgctcaattgctcrgttgtgtctgattgtctgtgatccagggactgtagcccaccaggattctctgttcatggaattttccaggcaagaatactggagtaggttgccatttcct

SEQ ID NO: 30972 - DNA, 201 bp, Bos taurus
gtattgatacctggggcaatgtatgttatgcaaaatattcactttagcagctgaaatgagaatcctcactttaatatagtttccagaggcttagaccatgrtttgaactgtaattacctgcagggaaaaatttaaagatcaaaaatgtccatttgcttccttaacccaaatctactattttctctgttggaaactgacttt

SEQ ID NO: 30973 - DNA, 201 bp, Bos taurus
tcattggatctaaatccaagcataaggaaggaaggaaggtgtctactatatctattctctttaccaaggcagtgaaagatttctgagataaatccctaagrggcttctttttatatgcaattaaccagaactgtatcacttggccattcatcacgtaaagagagactgtgaaaggaatcatgcaactttctcagcccatgt

SEQ ID NO: 30974 - DNA, 201 bp, Bos taurus
agcacaatttagagcaatcgaggaaaaaagtatttgactagaagagaagatgtgtttttatcttggttttatttctttactagtttaccttgggtaagtcmcttaacctctctgagcctcaattatcttacatgtaaaatttggagataatcacacttgatctgccaatatcacagggtagttatgggagaatcatttggc

SEQ ID NO: 30975 - DNA, 201 bp, Bos taurus
tgtaaatgatgttttcagaatatttgatatccctagaaaatagtatacattgtttaaaacacttgagattcaaacactaattattagggcaatttttattmttttatctctagatgagtagataagacatgtagagtcaagttatttacattctggtgaaagacaaaagcatacacagtttacaaatgcagtaaacttggg

SEQ ID NO: 30976 - DNA, 201 bp, Bos taurus
gttaaaagtgactaactcaatgaactgttgagtttattgagttaaagacttaatgttacaatggttagagtggtgggcctcagttttttaattggattctrtgcctcaatttcttctggtattgactacaaaactttgtgtttctgtctggctttaagaataaatattgaaatttctgaaaactgactacccttgcagata

SEQ ID NO: 30977 - DNA, 201 bp, Bos taurus
tgttaatgatatagctggatttctactattcattcagtgagcatatgaagttaagggttcagggaagaaacatctgttattttcctatgtacaaggccatkacagagattatagatactacttcacaacactgtgttcaattatctgatgcaccaagaaacacaaattccacttctcccaaggccaagatacttgtgctat

SEQ ID NO: 30978 - DNA, 201 bp, Bos taurus
cagatgaaggcctctgaaactaaagaaaggatggaggcccctcagattctttagctgtcccgccaaagtaaattaggatgttattctggggaagagagaayactgggccctgaaggcacttactcaattcccaaggtctaagttggcaactgtttttttttcccctagcagaaacattgcttgtctctgatgagatttcaa

SEQ ID NO: 30979 - DNA, 201 bp, Bos taurus
catgttcctttgtgaaagctatagtatccagtcagataaatcctatcaataaaactgataaacagcaagagatagcaagacacagcaatctttgttttctrgcaaatgacataaataacacacaaatgttttcatgacatgatgtcaaaatttagtcacgagaagtctcaaagatgcagatcaaactgaccatctgcacag

SEQ ID NO: 30980 - DNA, 201 bp, Bos taurus
atcaccttatactgcatttaaaaatattccatccatccctaagctttgtttgttcacattttgaagcttttgttttccacaggccgaactttaaagcaaaytggttttacacacaccttgcattatagcttcagaggttagagatgataaaattaagctggggttaaggatgtgcaggagaattagacaagcctctcacgg

SEQ ID NO: 30981 - DNA, 201 bp, Bos taurus
ctgcccagcttccttccagttgagatttaaaatgaactaaattatttgacaaactgtttttactatcttagtgagaaatacagaaaattgaagttttaatraagctaacttctatataagcacttcacaattaaaaagaacaacatgcctaataaatttagtccataagaaaaggtagggggaggagctaagatggcggag

SEQ ID NO: 30982 - DNA, 201 bp, Bos taurus
tctgtataccatctagagtaccagtttttacattttgtggagtcatgatattcctcacgagggtgatgaaatccataggcacataaatttcctccagtatyggtggaattcattgcctttgctctcagcaaatgctatactgggataaaacagaaagcacaccataatatttaaggaaaagtagaaagaatattaaaatgg

SEQ ID NO: 30983 - DNA, 201 bp, Bos taurus
aagggaggatagatgttatttactaaagcaattactgagacactatcaggcttttatcattgatctagacaacatgaggataccactgggccacacatgayaaaggaagtaatgctgagtgtctacattgcctctttcagattgcattacataaacatgctgttctatattattttctattagtttatgattccaattgta

SEQ ID NO: 30984 - DNA, 201 bp, Bos taurus
caaaggagatatgccaaaacagactgaatcaacttctttagtcatagtggttaaagatcatcatcactttctaagtggtaaattcagaatgaaatcagaayacatcacgtattttaatttcacatagataatatagtgcattaatttaatgtcagtttggttagtacttttgaagttgtctatgtttccatatgtactaga

SEQ ID NO: 30985 - DNA, 201 bp, Bos taurus
agcacagcatttagatgcttttaaaagttgactaaaaagtgacctataaaacagtattggattgatagttgttgggcattatattctaagtgatttcatcyaattctacataccaaatagcatctatggttcatgacaattttatcagttatctactactgcataataagttaccacaaacctagtagcttagcagtttct

SEQ ID NO: 30986 - DNA, 201 bp, Bos taurus
gtcagtcatgaagatatgtggaagaatgtgtcagtgagagggagtgataagtccaaaggtcctgagggagaagcaggctggcctttattaggaacagtaamgcttccactagagaacactggaaagtaatgacctatggaggaatggtggatgagttcagtgagagaggagtctcagattatacacagtcttctaagctat

SEQ ID NO: 30987 - DNA, 201 bp, Bos taurus
tgaagaggttccaggagagttcacccaggatgatttagcagaagatgatgtcatgctgttagatgcttgggaacaggtaaaactgtattttgttcatggcragagagtgtgcttatacttgagagctgatacaaccttctttgagaaatggcaagtttaataataaatagacccatggatttaggctatatttataagaaa

SEQ ID NO: 30988 - DNA, 201 bp, Bos taurus
cataggcactaaacacagagttcagagtccattggaaaggtggctgagcatgatcagcatgaacaagcctaagatggagtccaggccctatgaattccttmttcagtttagccttcctaatacaggtgttcttgttacctagtccaaactcactctgctggctgcacggtaggccaataaatccaagagaaaaggggttaa

SEQ ID NO: 30989 - DNA, 201 bp, Bos taurus
ttatgttaaaagtatcaggatacatttcatggaattgaaaagggtaatttctgcctgtccctgactcatgataataatggttctcatttcttatccaagcrgaacagtgtgataatataaccatgtacactctgataataattgccccatcacaccccaccacaggatcaccaccactataataaaacaaagaagaaaata

SEQ ID NO: 30990 - DNA, 201 bp, Bos taurus
ttcctccagatttatagcaggccaaatgatttgtccacagctatacctttcatcattctttctacttactccaccttttttaaatcccctcatttgttccrcacactgaaataagtgacagagtaactcattaaaacccacatttttaattagttgtgttctcttaaagctccagttaggactctgaactcccatgccagc

SEQ ID NO: 30991 - DNA, 201 bp, Bos taurus
tgtgtataaaatgtacaagtagctcagaagagaagtggttaaccgtgttttcaggggtagggtatagagtatggggtttctcttaggcaataatggttatkcagagttttgaaaatgaacatgaatttccaggtattgtgggaagctgggtagaaaggtcattccaggaagagactatagcaaatggaaaggaacagagca

SEQ ID NO: 30992 - DNA, 201 bp, Bos taurus
gaagcttaaaacccatccactgggactcactgacctacttcccacacagttgtctgatcaaagctctctggcttgttcctctgtggctgaatgtctgtctygataaactttcaaactccacattccttctgggtcaggtttttaccttgcttatccagctccccttctagtctttgcttttgagtagagttctgactggca

SEQ ID NO: 30993 - DNA, 201 bp, Bos taurus
tcttctgcttctttgtaagagcatagagcattaagcaactaactctgccacaggcaatcaaaaaagatttcagttagatggtgactacaaagtgtattaargcaaactatagtatattagatacttagaaatacttattaagaaagagtggtgaaactaattttagaaagttaataatttactcaggaaaacaagtaaatg

SEQ ID NO: 30994 - DNA, 201 bp, Bos taurus
gaaattttcctggagctaaacatccattctcccccagtccttatagtctgaggaaatctgaatgcttgaactggaaagttgggtgagtcaggccactgatycaacttttttcttctacattccacctctattctatgggtttctccggtggctcagtggtaaagaataggcctgcaatgcaggagatgtaggtttgatccc

SEQ ID NO: 30995 - DNA, 201 bp, Bos taurus
ctgggaagcagccttgcagagatcacaatgaagatggaggcgggagcagtgtagtaaccagcacccccaattcccagtgcagagtcagaggagaggaaagrctggggccaaagcttggcaatggcagtggaatggccccaaggcgaccagaaccagcagggagtcggggtgcctttcactcctgggcatcctacaacattg

SEQ ID NO: 30996 - DNA, 201 bp, Bos taurus
ttagccatggtaaagtagccacccaacaacctagttatgaaatttgttgttagttgtttctagactccttagtcacagattattactttagttcagttatytatatggctgactgagctcagttgttttgtgataactgtctaatttcattctcagagggaaatcttaattctaagagctcaagttacctagcactacctc

SEQ ID NO: 30997 - DNA, 201 bp, Bos taurus
tcttgttttatgtctcctaaattaaaaacattttaagtttctatgattagcattattatgacatttatataaaatttatattaaaataatcactaaaaacrgttaaaccacaactaatttaagagtttctatgaaatatatctttttcattaaatagggatttaacacagttaaatggttgaatataaaccaggaatctac

SEQ ID NO: 30998 - DNA, 201 bp, Bos taurus
ggacacaacttggcgactgaacaacaacaaaaaaacagtattctagaacaagagttggcaaatcacacagcccatgggtcaatccagtttcccacctgttytggtaaataaagttttattgggacacttttccacccattcatttatgtagtctaggactacattgagtaacaatgtgacagaaaccctttgacccaccaa

SEQ ID NO: 30999 - DNA, 201 bp, Bos taurus
caatcttacctgaatcctttttacactgtccccttattttccactcgtggccctgcttctatggctttcagtgcccatgttccatgaccatttatttctgyaactgctcagactttgtcaactctatttctatggttctagctgctctggccactccaacacctttattatctagtctgcttaaaatcctgtctttgaccc

SEQ ID NO: 31000 - DNA, 201 bp, Bos taurus
ccctccttagggcagggtagggagtgacagggaatttgacttacagaaagtgagtctttcaatgtcatttattttttaacttatggagtctattattaacrttctttccatgacaatctccctagatttccaaggagggaaaattctaagtctttgagaatggaatctgttgcattatgtgtactgactgaagtggctcta

SEQ ID NO: 31001 - DNA, 201 bp, Bos taurus
tgggtgggtggcaatttcaatgtgtgcaactcaccatagtgaaggttccagaataggaaaaggagtcaggttaaatatatgctaagtttaagttttcatcyggctgcaatcttcctttgacttgggaaattcttgtttagaaatagaatccagtatgtctttcacattgtaaaatattggcaaggtatcttaatttccccc

SEQ ID NO: 31002 - DNA, 201 bp, Bos taurus
ttgagtatttttttcagatgtttgtatttaaacttttatctaaatgataatgtcactttgcatgagaacagcagagtgcaaaagcagatgaattttcaagrgttaaaaagaatggatgagatcaagtttaattctaggacttaaatttgaagattagatttattcatctagttggcctgaaatctaagtgatatttttttt

SEQ ID NO: 31003 - DNA, 201 bp, Bos taurus
ttccttgcatatggcctgatttcatatgtctgagtagatagaaatagatgataactagttagaaaaaacaatgacaaacatttaacagtaagacctgtggrtctaggcctacatgtatgtttatgttaaattaatgaaaacagtctactttatagaataaatgtagttttacaattttatacattggttgaagtttaggaa

SEQ ID NO: 31004 - DNA, 201 bp, Bos taurus
aaaaatactgcctatcccttatataagaagatgggaaacagacaaaagttgtatactactgatcaagaccacacttaaaggccctatctggctgactcccrgaaagatggctctgtatggaaaatggaaataaattttgatggtgaccttgatttctttagaaggaaaacaagcttaagggtgcatagaactggcccactt

SEQ ID NO: 31005 - DNA, 201 bp, Bos taurus
atcttcctgacccaggaattgaacctgggtctcctgcatttcaggaagattctctaccaactgagctgtaagggaagccccttattaatacggtagtatcwaattattagtccggaacactaatttttcagttttgtttcttctcacatatttagaaggcaaggctctctgtcatatcttatatcattacctagattctta

SEQ ID NO: 31006 - DNA, 201 bp, Bos taurus
acaaaacaggaaaggattattaggaagaacaaaaggaaattaaaagaggaattgagtttgatataaggatgcagggacagttttgtgatataaaatgagcktacagtggcctattttataataaaactgataggtaaaactgataaatatatgtgaaaattacaatagacctccctttcccttcccaatttttattttaag

SEQ ID NO: 31007 - DNA, 201 bp, Bos taurus
aattttaaagttacaaactctaaatgatactgatattactacttccctattctgttttattctttctcctatttatactgagggaggaaaggaacaggccraaggaaaagaaggaaactccatcttgcactttcagtgagctttggactatgcgcctggtagccatggggataacataccatggccgaactggcctcccag

SEQ ID NO: 31008 - DNA, 201 bp, Bos taurus
aaaggggacacaataacatcctccccactgcttacctctacatgtcagagatcttccaaactgagcaaaggattttggaaaaggggacagatggagagacygattaaatccacccttacctgcaagacaggcagcctctccccagagaagagctctctgtaattctgccaggggatatggagggtcaggtgcaacccacct

SEQ ID NO: 31009 - DNA, 201 bp, Bos taurus
ttatctagccaatgctaaaagagattcaaaatttcctctgtcattaaatttttcaccaaaatatcatcctcagggtaacctgggagaatctggatctattwaaggatgccttgacccttttcttccagacataagggtgtagtgatcaattgtgttaataatagcaattgtcagagtgctttttagaatttccacagtata

SEQ ID NO: 31010 - DNA, 201 bp, Bos taurus
aggctgttatgggatttgttaaataaatctacatttgaattcactgtcatattcataattctataattttaaggaaatataattagagatgaatctctttmatttagaggagcggttttatatgttcatgctttatgaacatgctcattgttcgctatagtgcagtcctgagatgccggtaaggcatctgtcctattcctg

SEQ ID NO: 31011 - DNA, 201 bp, Bos taurus
aaaatatcatcttggaaaatttgtataggtcatcattagcttaacagcataattcagtgacagttactttccaaattaccactgtatattcttccaaaatmatacaaggataaaagattcattccaagtgcaacctggatcaaagtattttcaaacaactttttcaaggttataattaacatacaacaaactgtacatatt

SEQ ID NO: 31012 - DNA, 201 bp, Bos taurus
atgtgatccaactaggtaggatttttccatttatcttggcagcagaatcattaattcagtctgtttattctggtcagttagcttacaaatctgcaatatcrcacctttgattagctttgtaaaatgattttgtgacatggaaggagctctcattctttctatatctggcagtcttgactctataaatatgtccatttttga

SEQ ID NO: 31013 - DNA, 201 bp, Bos taurus
aacaaggcctctgactataaataactcactttcttaaactatgtaatatacagctatgtctaatatgaaatgctttattttgaactcatcattttatactktttatatggcctcataataaatgatgtaggtggtttccagttaatattgtctatggatcactatatacagatctatgaaaaacacagctttctaagctaa

SEQ ID NO: 31014 - DNA, 201 bp, Bos taurus
gaagtcgttcatgtctaatagccaagaaggaaagaattgggaaaaaattaaataattataacattgaattttaaaccataaaataaatatttatgtccccrtactaatataagtacaaattttataaatgtgtatggagggacaaaagctcttccatttggatttgcaagtaaatatagaaaggatgagggaaaattctgt

SEQ ID NO: 31015 - DNA, 201 bp, Bos taurus
attcttagaaaaggaaaggacagtgctgggcacgttgacattcagttctgtatttattttcttggtggcacgtatcctgacctttccaacttgatacctckggttgataggctgtgtgcagttttcttttattttcctttactttggcaagtcttccagggaagaaaggatgacttcttccagtatccagtgaggcttttt

SEQ ID NO: 31016 - DNA, 201 bp, Bos taurus
gcagtcctgtaaatcagcagttctacttctggaaacttgccttaaagaaacactcagatgttatcagtgttaatgtagtgtgctcataataataaagagakagaaacaaacagaacaagcacccatccagagttggttgaagaaattagcagttcatccatgtaatgaaacagtagttacaaataatgatatgacttcatt

SEQ ID NO: 31017 - DNA, 201 bp, Bos taurus
tctttaattccaggtcaagacctgccttctccaaaaaaaatgctgcatatcctattgtacagaccagtggcttctcttgtgtgaaaactcccaggttttckttccagtagccattctttatttccttgagtatattcccacttagacttgttggtgctcttcttggatttttaaatcattcatattatgaatgaagtttca

SEQ ID NO: 31018 - DNA, 201 bp, Bos taurus
tcatttctaatgagtcacttctagtggggagcgggacacaattcaacccccagcaccacatgtgaaatgactcagcaagggaatgaagagaagcacttggraaggccagcttccactcagcgcactgacatttgtcgcacatacaacggaagcaagctccaaggtgtgaggactaaaaccgtgctctgtgttgctggtgga

SEQ ID NO: 31019 - DNA, 201 bp, Bos taurus
agcacctaattagttaaacatttctcgtttgtcaagatacaaaccacctttttttctttttttttctgaaagtataaggcacagagctaaaaatctgcccsctggacacacttaaataatgcagctttgatctgcatgaactgctgcgctcctaggtaaattattgccaggggttctgtgtggagagtaatgagcatagct

SEQ ID NO: 31020 - DNA, 201 bp, Bos taurus
actttgcttcacaccaatgttgggtggttcttttagtttgggctgactggcaatcagatgcatctgtctagtttctgctggaaagtcattgataaaactgragaaaaacttcctaagggttggagacatgagaggacagtgcctgggacccaaagttagcctaagatagtggcagccagactggagcaatttttgagagaa

SEQ ID NO: 31021 - DNA, 201 bp, Bos taurus
aatgctggaaatgagatgaacaaaatagtccctgactgcctggatttcagagtatagaagaaaatccaaaattataatcacaatgtgtctgtgtattcatycactcagtcatgtctgattctttgcgacgccatggactgtagcctggcaggctccactgcctatggtattttctaggcaagaatactgcagtgggttgcc

SEQ ID NO: 31022 - DNA, 201 bp, Bos taurus
agacccttaacttagtgacatcttttgccatacgatataatattcattcttttgcttcatatggtagtattcagttggggtcattttttttttggcctacyatctgctgccttactctttctttgcaatctttggcttattctatctatctggatttttttgttgtttgttgattattctatattctggcccaccttgtaa

SEQ ID NO: 31023 - DNA, 201 bp, Bos taurus
ttgataaatgtagaaagaacacgtacaaaaatatgttcacacagatctcagctctgagagttaaatccttcccagttaagtataataggaggccaatgagmatgtgactcctacctctggagagggtctggggcagtttgagttgagagtccttcgtgtccttcttagctcctggtttgactgtggtgtctttggccagag

SEQ ID NO: 31024 - DNA, 201 bp, Bos taurus
gctctaaactgaaggactcaggagcctaaggaaatccactttcctttctcttctgtctttgatttttttcatacaccaaacaagatagaagcggatgctcrggggtgaggtcacgaaaaccctatccactcctcttggcaggaacaattgttaaaatcagtgtctgcatccacacagtgaagacagccaacactggcttct

SEQ ID NO: 31025 - DNA, 201 bp, Bos taurus
taatgatagggagacagtaatccaaaaagacacatgcagtccatgttcactgcggcactgttagaaaagccagcgtatgggaacaacgtacattacccatygacagataaatggataaagaagatgtaatacacatacgtgcacatacttatcacagcaaaatagttgtgatactactcagctataaaaagatgaagtttg

SEQ ID NO: 31026 - DNA, 201 bp, Bos taurus
atgacatgttggccgttagccttttttttaataaaagagtcgagaagttactctcctgtggcttttgctggtactttttatagccgaagtgtggtaggaartaggccccaagttcccttggcaacaagtagagtagaagcgatacacagaaatctgaatcatcggtgaatcatctgaggatttctgtttctaatccttgga

SEQ ID NO: 31027 - DNA, 201 bp, Bos taurus
gtcttaacatattttatcactgtgtctttttaagaaagcaaattaatcagaccactaataactttaccatccttgggtgacttaaaagtgccaccatctgmctttcttttacttaaataggacagctgaaaggcatagacatgttttgcatgtattatataaaaacaatgaaatcccaaactgaaatgtagtattaaaata

SEQ ID NO: 31028 - DNA, 201 bp, Bos taurus
agaagaaacaaagttcataaccagtaggggttatatctttatgcagttaccacttcagtgaattagaagccaaacatgtcgagaagaaacaaaagcacacrtgaagcaatatacttgcaatcagatctcaaatcatctattaaatttaggatcatgacttcaaagtcaaaaatcacaatgcatgcaaagaaataggacagc

SEQ ID NO: 31029 - DNA, 201 bp, Bos taurus
tacctggtagatacccaccccaaatgggtgtatgaagcagaggagcagaaagagactctggagtgggattataactgaactacatttctgaagtaggcacraaatgattctctgacccccaagattctgtgtcctcccactccagagacccccaagaacttccactctcactctgctccagactacagccctgacttaaca

SEQ ID NO: 31030 - DNA, 201 bp, Bos taurus
gcagatacatattttccaaaattcaaatttctgtcctcatcagtgtgactgatgtccccaggtgaaaaggggaacaatgatgtatgaatataaggccaacrctttctcttcaagtaagtgaccaaaaatgtcaacccgaatatcccattagtgagctctcagctccatggccttaacctagcttcaggggagggggaaaag

SEQ ID NO: 31031 - DNA, 201 bp, Bos taurus
taaactctcagctccagagttgccttgcaatgcatctctattccagttagccagaaaagggaaaggaaaaagatgagcattcataggattaggccgcatayggaacattactttccactgtaaatgcattcaatacactcagtcatacagagggtctgggcaacacagtccacctgcatccttaaaaaaggacaatgtggc

SEQ ID NO: 31032 - DNA, 201 bp, Bos taurus
aaggtttacttaagtagtaaataaaaattttaaaacattaataagtataagagtaacaaggtggaggtgatgagggcagacacactgctgcaagccactgygaagaggcagctggaccacagtcagaaataatcctcaagataatcatgactgagctgcgactcctggacatggagtgctgctcaaagaataagccagcct

SEQ ID NO: 31033 - DNA, 201 bp, Bos taurus
aatgaggataatgatttggggctggaaaagtgggtggggaaaagaagaatgaggaaatactggaataggaaaaattaggacattatatgaggcagaaaggrgtttacagcttattttccatgcaccgagagacttagagataaatcatggtcagggttgaaaggtgagtgtattcaggtgataaaaatacaatcagagaat

SEQ ID NO: 31034 - DNA, 201 bp, Bos taurus
ccagcctgctgcgtgggttcagtgaaaaccccaggcaacaaaatagcagtgttggcagatggaagcctgtgggcatacagttgagtagtaagggccagggsaaagtgggtgggcattagtagagtccgctatatatggagatagtacaccactctgtgaggagtgctcaagtgtgaaaaatatcagaatttaagttggcct

SEQ ID NO: 31035 - DNA, 201 bp, Bos taurus
ccgtgggatcacaaagagttgaacatgactgagcaactgaactgaactgaactgaagcaacttaacacgcatgcatgtggatatacaactgctgacatacrgactcagtttttgcattttatttctggtattaaaacgtgtaatatttcttctgaataagtcaggcataattaagaacctcatgtgactatatcaggtagg

SEQ ID NO: 31036 - DNA, 201 bp, Bos taurus
tgtgaaggtagttttaatttggcttttttttcccctcagcccgaaatgaaacttcttaaggatgaaataaaattattattagcagatggttattttaatcktcttcaaagcttttggggagtctagcattgtcaggcagatgcagtggcataacacacatataaaggtgttatgtgcaggtgcaacattttaaagaataac

SEQ ID NO: 31037 - DNA, 201 bp, Bos taurus
aacatacattttccaaaataacagtcctactaccctcaatgtcttggaaagagttacttgatacccagagagtgaagttcaactagcctagagccttggtyggacaccaagcactagggggtttatgaaagaagatagcccggatagctggagccctgctctgctgtgttgacatgtctagagctcagaataaaattgagt

SEQ ID NO: 31038 - DNA, 201 bp, Bos taurus
acttacagaccttcttccatccattttccaagacctctccaatttcaagaaggctcacagtgaaaattgtattttaatacttgagttagctgaccaagtgrtcaatagaattgtgtatgtgcatacaaagagtttaagacacagtaaaccagataacttcctaattggcagtgggtgtcagtgttattccttattaatttt

SEQ ID NO: 31039 - DNA, 201 bp, Bos taurus
ttccttatagtttgtaggataaaatccagatatctttgcaggggcccacaaggctcttgccccctcattgaccctatctcccaactcccttcctgtacccrctgagctcccaccacattggcctcctgtctggtgtgtgggcagtcagtctccttccatctcatgaaacgaactgctagtcacagttctggtggaatgttc

SEQ ID NO: 31040 - DNA, 201 bp, Bos taurus
gttttgccaagtatttagaaacatacaatcattataaagtgaatattttgacttctatcataatagatttgtcttattcatacttaacctcaagtgcaatrccagagctgaaattctggacagctctagtttattgagtgaatatttcagtgcatttccaaggattaagaagatattatttcattattccaaaatggaagc

SEQ ID NO: 31041 - DNA, 201 bp, Bos taurus
tttatttattgatgataaaaacaatgtaattaaataagctactaaaggtcacatggttcatgaattgcagacccagaatatagacccagagtctttctggscccagagcgtgtgtgttttcccatagcatcatgttagtaagcaaaatgacatttatataaaaaattcagagtaagacatgtctatttatgatgtacacct

SEQ ID NO: 31042 - DNA, 201 bp, Bos taurus
ccagagtacattattacatacactaaaaatactccaaatgaaatcaggcactctgaggacatctatatgatgagaaaatactttttcccttgatttttcartttaacctggtgacttttcttttagctgaatgacatgaaaacaagtgttggaaaaagcgatattataaggttagtatgttaaaaaaaattaacaatagag

SEQ ID NO: 31043 - DNA, 201 bp, Bos taurus
taggagagaagtaaactagtatcttggtctttacaatctgcttctggttcagttttaatgattatgggaatgtactgatatccaaacttacccttcattcytactatctagtcttgaggaagatgaatataattcattagttttagctatgtcacttaggcagctgacttagcaaaaggccttatataatgaaattttgaa

SEQ ID NO: 31044 - DNA, 201 bp, Bos taurus
tgatcagccaggtttttttttccctcattttttccatgcattagcatttgccagtctctcagaaaagaaggtttacaatcactgtggattcgtcccttatytacattctttctatggttactcttggctatattacttaaaaattagtatacttcattccctttttgaaaatcacacattgtcacacagttgtcaaattca

SEQ ID NO: 31045 - DNA, 201 bp, Bos taurus
tatatttttatcttgtatttaagattctctcatggtttaaattctttccattctccttccaaatatattatctggttgcagaatgaagctgacatgtctgyacaaatggaggtggaacatccaaacctccaggtgatatatcacatcctgcttggtctctgagttgccctctggttgtcactgcttctatagtattgtaac

SEQ ID NO: 31046 - DNA, 201 bp, Bos taurus
gctagtgaaatacaagacataaaaggtaaaatacttaatacttaaaagatactgtgcttcatgggagaaaggggaaagggttcaacaatggccattaatcyacaactctcttgttaacaatggtttatttaaacatctgttaagcatttgtaactttaacaaattggcctcaaggtacttaaaattttcttttaaaacagt

SEQ ID NO: 31047 - DNA, 201 bp, Bos taurus
ctatacatattttatcaaaagatagtcagtctttgtttcctgaaacaacctgcttctcagcttatgttttggagtagtaaaaacagttttaacgcaatgcmgtgaaaggcatcacaatgattcattcctttggatttgtagatcacggtggatggtaatgacattagaactttaaatgtgcgacattatcgagaacatttt

SEQ ID NO: 31048 - DNA, 201 bp, Bos taurus
agctcccaatctgtggccactgtgcagggacctcgcgcgcggactccttggctactaaataaagcgtgaagaagggtggggagcgagccgagcgcagccakcggctgcaaggagaagcagtctggcccaggttggggatatctcctcgcccggagctctttgatcaaagtttctttcctgttgaaaagaaaacctggccag

SEQ ID NO: 31049 - DNA, 201 bp, Bos taurus
cctgttgtgtgacaactaccttggtatcttgtaagaaagatcactggctcagaactcagcaagtgttcaccatgggcctactgggttgccgttactaaatyatgctttaaataatcttttgaacaggtattatgtttacagaattgtgacataggccttagatggaaaatataggtaagggcatacagaaatggtagagat

SEQ ID NO: 31050 - DNA, 201 bp, Bos taurus
cttatatctgcttgtgaatccatcttcataatttttgcttcctgccattgtactaaaacccagatgctcactcacaagctgaactccacatctgctaattrctttgttggttctgagagggaaatttacttatttttgcactgtcttgattctcatagtttgtgccagccagtgagagagtgggcatattttctttctgtg

SEQ ID NO: 31051 - DNA, 201 bp, Bos taurus
tcccactgacatggcaaaccctcggccaattgtccttattatagcccctgtgtatttctccccagcgcacttgcacagggggaagacgtgagcgtggagcrtacttaactgccaagctgaatggctctgtaatgtagcttcagtatggcataaattaagctgtcatttttttggcagcaagtgcagagaggcgattttcct

SEQ ID NO: 31052 - DNA, 201 bp, Bos taurus
tgttccaccagggaagcccaaacgttcatgtagtatttcttaaatcttagaaaaaagcgaaagtcatccacaggcccttcgacatcttttggaatttctarcagcttggtgttcatactgattcagtttcatatccaggtgctattaactatctttccttcttaaagtttgtgaaaaaaaaaatagaggtgaatgaaaatg

SEQ ID NO: 31053 - DNA, 201 bp, Bos taurus
atctggcctgcctacctttccgctttgagtccctgtcttaccactgaactatttgttcccagccacaccggcttcttgactgtgcccaacatgacctaacwtgtccctgcatctgggcctttgcactttgctttgctgtgcctggagagctcttccccctgtggcctccctcatcttcttccaatctctgcttaaccttcc

SEQ ID NO: 31054 - DNA, 201 bp, Bos taurus
tgtttctcaagccagaatgaaaagtatgatttggtacttgcaatcagtatctggaccacattcctatatatttcaatttaagaagtctagcagaggcctaracttctgtattttgaaattgttgaccaggtaatactctctactgatttaagaactgttgttaaaaagaagatgccatgtttcaaaaaaggacaaagtgag

SEQ ID NO: 31055 - DNA, 201 bp, Bos taurus
ctattagatgaaaagagggaatacattcttttctgattcaggtgaactattaactagtcacattcttttcatattcagctcactgaattataaactttgamtatcacactaatgaataatgacattgaccttggacaaggtcagttttaggacatctgactgttgatctttgcttcaattcattgttctttcattaccttt

SEQ ID NO: 31056 - DNA, 201 bp, Bos taurus
tgatgaaagactaagatgtgagaaggtatcaagcgagcacctcatcagggcttagttctcagcttatattgagctgagttgctgttggtggcatagtctckaaacatgggctgatgtgtcactgtgcttgtaagtttggtcttcccagatggactgcagagttctgaaggacaggtggccatattgagggcgtggatccca

SEQ ID NO: 31057 - DNA, 201 bp, Bos taurus
cggcattagtcagtcacatatatgatggcattttcccaagtatattctgtgtattcacactttcctttctaccagtcactttgaatttggggcccactctkcttgtatcagtgtgcttaagacaccctaacaaactgccatagaatgagtggcttaaacgtcagagatgcatttttctcaggctaagatttggttttccct

SEQ ID NO: 31058 - DNA, 201 bp, Bos taurus
tctgagcaacaggatagaccttggccaaggtcagtggcagggacaaagtcccaaattgattcttcacaacatgctggagaatacaggtgtgatttttaacytctggccactacaaaagtccacagctgcttctcctgagaaagatatggttttcccaccccaacatcaaccttactttcgggtaaggccactccgacatag

SEQ ID NO: 31059 - DNA, 201 bp, Bos taurus
agatggaaaaaaaaaaaaggatagtgagaaagacaagaacttcacagttaaaaatgaacctaagctttttcttttttccataaaataaatgagaatactckactgtaccacaccacatcccctgaacatctgcagtcagggaggacggacaagtgttatgtgcggtggcatgtagaacagcttccacatttctgcccccga

SEQ ID NO: 31060 - DNA, 201 bp, Bos taurus
tactttctttcacttaatacctagagcttccacaagagggcaccacaactctagccagacacattttctaggcaagaataaaggaggggcatgggggcagrggaaggacacgaccaaggagaccagcagtgaccacctggctcgaggacagccagtctcttgaccactgactcacctcaagtcctgagacggaagtcctgc

SEQ ID NO: 31061 - DNA, 201 bp, Bos taurus
tttcttacaggctctcaagtgagatcagtgctgcagagccagagcactctgcatagcaagagtttagactgaagtgggaggtcttccaaagctaactctgytgtttctttggcctgcattcaaggttacttcaatagctgaaggcctgaggccaagaccttggcttggagaaaggagactgtgagaaatagttgtgccata

SEQ ID NO: 31062 - DNA, 201 bp, Bos taurus
gtatgcaggaaggctagaggaggaggaatatttgaaattcaagattcctatatgttgtgaatacttagcagggaggtgagctcccttccttctccatgagrctttagattgtttgttgggaattaaagttttaaaaggatcataggatagaatagcaaactcttctctaaaaaggaagaatggttgcccaccaggtgacat

SEQ ID NO: 31063 - DNA, 201 bp, Bos taurus
tctccatcactgcatcactgcttcccatcatgccaggtgaggctgtatgtggcactccatctaggggcataaagtctctaagctatgcttatgtgttgcakataaggttatcaggagacaggttgagataagatttattgcatgcagaagtttattgagaaggttccccagaatctattcttggaggcagggaatgacaac

SEQ ID NO: 31064 - DNA, 201 bp, Bos taurus
tatatacatatatattcttttttcaggttcttttccattatatgttattgcaggttattgtatatagttccctgtgctatacaatagatcattgttgtttyatctgttttatgtacagtagggtgtgtctgttaaccccagattgctcattaatccctcccctccactttcccttttggtaactgtaagtttgtttgctac

SEQ ID NO: 31065 - DNA, 201 bp, Bos taurus
aaatcagtttgtgtggtgtaactgactggatgaacatgtgactgagagctccttctatgacctattggggatttgggtccacgtgtgatccagaaggaacmcacagatacgctagggcaagtgaccttggtcagaagggacactcatgatacttcttcagatcaaggattgtgatcagtcttgaagagatctgaatttctt

SEQ ID NO: 31066 - DNA, 201 bp, Bos taurus
gtattttctggcatatttttctcattgctggtaatgtgctggcatgttcagtgatatgttttaaaaagtttagaaagatccagaaaatttaagatctgcartaaagtgaaaacaatggtattttcttgaacatttagggttctgtttgatgctctcataaaaattcctgaaactaaagcaggaattgcagttactactttg

SEQ ID NO: 31067 - DNA, 201 bp, Bos taurus
cctgacgcgccaaataacagagaaggatcccaggcaattgagccctttaagtgcctgaacaggtggagctacagagaaagactggtcaaaaagaccttccratcgccagctataagaggcttgaaaaaagactctgatggggccataactcctgtggcagaggcagtccatgtccctgccgcttccagggtccccgcaagc

SEQ ID NO: 31068 - DNA, 201 bp, Bos taurus
ttcatataagcatggaaaatgtattaaataattcctaaaatctttgtcattactcacagtcctttcagtgatccactaagtcattcagaaacaacataccrtctcttctgagagggcatcatgctgtctagtaaagtgagatggtgtatttcaagagtaaagcatcttgattttaatcagggccgctagccgctgactgtg

SEQ ID NO: 31069 - DNA, 201 bp, Bos taurus
agaatactggagtgtatagcctttcccttctccaggggatcttcccaacccagggatcgaaccagggtctcctgcattgcaggcggattctttaacaactragctatcagggaagcctggccactagatgacttatctgtaaaaaagtaaattttctataaaatccatatattatttcttgttttttttttcccccccaaa

SEQ ID NO: 31070 - DNA, 201 bp, Bos taurus
ctgggtcctggtgtgtacaaggtttgtttgagtcctctgagtgtctctggcggatatgggatttgattctaaatgcaattttgtccctcctactgctttgytggggcttctcctttggccttggacatggggtatatcctcacagtcgctccagtgccttgtagccaccactccagcactgcacagccactgctccatatg

SEQ ID NO: 31071 - DNA, 201 bp, Bos taurus
tgtgtcaacagtgaagacttacactaatcttaactggacaactgtatacagatgtgtcatccaaaatggttagcccaggggggtaaaaatgtatcttggtytcactattcatccagcaacagctgacaatttggcagcaatctatgttatgctaagatttcctaatactcctgcttgtattgtttcataggaggctgcttg

SEQ ID NO: 31072 - DNA, 201 bp, Bos taurus
gacaaaaagtaaattaaaaaaataaaagtactgcttttattattaaaattggaagcaaacaaatatatttgagggggagtttattgataatttcctaatgrcatagtagataacacatctaaaccttgatgatttgaaattacctgttgacaaaattgggataatattgatgaaaaattttatgagccagttgtgggggac

SEQ ID NO: 31073 - DNA, 201 bp, Bos taurus
cctttcattttggtcattctggtggatgtgtaatggaatcacattgtggttttaatttgtatttccgtggtagctgccgacattattggccctttaaatamcctcttttacgaaaagtctgctcaagtctttagaccattttatattactttgccatctggcctttggttagatttagtcaagacaaaagtttgcagatga

SEQ ID NO: 31074 - DNA, 201 bp, Bos taurus
cagacatgctacttttcactaatgcgacagatgatttagaaaaatttaatgcatgctgtgagaaatgttgacacttatacccaggcaaagtgatggctgcwagtaacataatgatgaccatttctgaaataatacattatttttctcatctgataatcaaaaactctgctctggttatgatcatcgatgctacacagctgc

SEQ ID NO: 31075 - DNA, 201 bp, Bos taurus
atttgccctattgtatccgattctttgcaaccaacatccatcaactctactcagtcatgaattcacttacttcatacagtaaaatacagactccagccatygtgaagaagaaaagtttatctcaatgtgaatattctcctttctttaataatcctaccactttaagcttcagtgcctgattttccttttctgtatttgata

SEQ ID NO: 31076 - DNA, 201 bp, Bos taurus
accttcaccaaacaaggactgttgttgaagttctgtgaccccattgccatggaagtctggaaactgacccagtattacttcagtgagggtgttgggtaatrtgtattggacaataacaagtaaagaaaataattaacattgacattttaaatatgttatttttccatttaggtatatgttttctgaaagtaaacctgtggg

SEQ ID NO: 31077 - DNA, 201 bp, Bos taurus
tgtgagtcagggttcaggcctacagtttaaatcagaatggcacatgattctatgaatgtttctgaaggcctcactaccttgggtttattcatatatgttcyttatgtaaataaataaaaatttcatatgtatatgttatgtaatctgctttcgtcattttattatgcattgtggtattttcaatgccaattataaaattta

SEQ ID NO: 31078 - DNA, 201 bp, Bos taurus
tatctactttattattttatggagttgtaaataattgaaaataaattaaatacctcaatatttctaaagggcctccatagcataaggacttagctaaggtrtaaaatgattatactgagctcagggacagctttcagtcttgtttgcatggttctttgcagttaatttacatttaaaaatctcaactgtaaatttctaaga

SEQ ID NO: 31079 - DNA, 201 bp, Bos taurus
cttctgattgtgaatcttgacctttataatcctgtgtgtctaccacacaaagaaacatttttgaccctgccatggagatcctctgtagtccccatgcaaaygtatctgtaaccatctctggttcttttttttttttttttttgcaaacatgtacagatttgctcaagtcttttctgttttattttctaggaaacatttgat

SEQ ID NO: 31080 - DNA, 201 bp, Bos taurus
actgtacctaatttataaattaaagcttatcatatgcatgtataggaaaatacataggatatataagtttcactactatccactccttcaagcatcccctrggggtcttggagtatatcccctgaaaataaaggggaactactgcatttcattttttataagaatagaggatgtttttaaaacaaacacttcataataaat

SEQ ID NO: 31081 - DNA, 201 bp, Bos taurus
cctccgaagcagggaaagttatatactatacagtgaaatcatttcacacatcacttcaaaccacctatttcatgagcttgccaactactttttatagtttmgtggagtaaaaaccttcagtgattggctttccctgtgtattggacctgggactctcagagtcccatgagtatgctcggtatgatgtgttctgtacgccgt

SEQ ID NO: 31082 - DNA, 201 bp, Bos taurus
aattgattctctaattaggtaaataaatgtttcctacaaaacaaacgaactaattccaactaggatacccattcccacaagaactacttccccaatagaayggctccaaccaaaccaaattccaaataaatttaccctacaaaataaatgagctaattccaactagggtgggcttgccccacaagaactagttccccaatg

SEQ ID NO: 31083 - DNA, 201 bp, Bos taurus
cagagtgtatgatcacactgaggaatgaggattttgaaagcccactagcaaaaaaccccaaaaacatgaaacagagtttatcccccaaatattttgtgcayagaaataattggcttaagcaatatccattttgtaagattgttcaagatgttaagtaagtttgttgtttaattaatgaaccagtcctaacaggaaacatga

SEQ ID NO: 31084 - DNA, 201 bp, Bos taurus
tgattgacaaactttatgaaggactattaaggaatatctctttggtagaattgttgcaggttgttgtaggggctttaattttaggtaaaagaaactatgtmttataaaaggatttattacacaagagctctcaactaaggacagtgaaaaatcttgatggaccttaacagaaaagcctaggaaggttaaaatacccattta

SEQ ID NO: 31085 - DNA, 201 bp, Bos taurus
tacttagagggtgtaatcactgtgcctgccctgcctttattctgtaaacaaaccctttaacttcccacccttccctacagaacagttctctgaccatggtmctgaaaccactcctgctttatggtaacctaacaattttcattaaagatactggaaatatgaaaaatcttgatgtaggtgtaggcttttatcccctacttc

SEQ ID NO: 31086 - DNA, 201 bp, Bos taurus
agccctatacgtgaagtagtatagttttaatgtagatgctgtcttagattcaatgaaataaaccattacagtggtattgtagcttagggaatgcttattakattgaaaagaacagttattgaaaactcagaatgactgggtaggtttaaaaggaattcccagacttaaatattcagaaaactctaaaacttagctcaatgt

SEQ ID NO: 31087 - DNA, 201 bp, Bos taurus
caatcgtaaaggaaatcaaccgtgaatattcattgggtggaatgatactgaagctgaagccctaatattttggccttctgatgcgaaatgtcaactgattrgaaaagaacctgatgttgggaaagattgagggcaaaaggagaaggggcaacagaggatgagatggttggatggcatcaccaactcaatggacgtgagttg

SEQ ID NO: 31088 - DNA, 201 bp, Bos taurus
aaaaatacaactgaaaaaaaatgagcagtaatgaggtattaggtcatttaggatgactgttattttgttaggtatagaattaatagcatatttatttagarttgactatctgagaggtatggaaaagtatgagcaatagggaatgatgtttgagatttgttttgaaatttgtcagagaaaaaaaaacgggggtggggggag

SEQ ID NO: 31089 - DNA, 201 bp, Bos taurus
tggaaaccgtgtcccctgcactggcagctgattcttcactgctgagccactggggaagccccttggcttcagttacttagaagcagttaagttctgctacrtggaaacaacacactgttaaaagtcatcaaattctcatatcttaccatacagtcttaaagtttatgcccatttttggttatttattattcatttctattt

SEQ ID NO: 31090 - DNA, 201 bp, Bos taurus
gttgctttctttggtattcccatctcctgaaaacattccccaaggacacaaatagcggaagctttctttccatttgtctttaactttgctttcctcagcayacatctgtgcaaggcagcgtgacaggacctcaaatcagaagtatttctgatgtgattcttccacatatattgatcttagaaccaggtcttttactctatt

SEQ ID NO: 31091 - DNA, 201 bp, Bos taurus
ttatttgaattcctctttgtaacttaaatcagtgaagaaaatggcttccttggagtcaatttttctgatatacaattggttagtgtagagattaaattatragtgtcacatttaatttaaaaccaaagagagaaatagcattatcacggagagtgtgctcttttgtgaatgtcaagtgcaacttgttgaaggtcttttgaa

SEQ ID NO: 31092 - DNA, 201 bp, Bos taurus
tccatatataattcttcaggataaagaggtccagttatttgaaggccacaatgtaatatctcttaatgctgaggacagcgcatactggaaaatgaagaggyacagttttataattaaatagtatggccaaggaatctgtgataaagtaaaaaaaataatgtattaagcaaaaaaaaaaaaaaaccctcaatttgaggtaaa

SEQ ID NO: 31093 - DNA, 201 bp, Bos taurus
gtacattcaaactgtttttctttcatcttaggcgtgctacagttaattctgtgatccaaaaatttcattgtagtcttacgtattcttgaaatcctgctaamttcatcaggtttgctggagatgggccatttcatgtaaaatttttaagaatttgtaaacaattgtaagataatacattttaaaattcattataactttgtt

SEQ ID NO: 31094 - DNA, 201 bp, Bos taurus
atctttctaacgccttattgacatcaaatatcaggatgcatattctgattcttatctaaccctataatattgtattttcagattcagaaactctgaaaccrgataattttgaagagtctggctatacgttcatagcaccaaggtaggttttgtttggttttcttttttaaggctcattgtggatgtataggccttcaagaa

SEQ ID NO: 31095 - DNA, 201 bp, Bos taurus
ttcactaaataaatgtccttacataatttaactgagactatgctgatatgctgtagtagttactacattcaaatcaatagctaaaactgaagatacttctygattgagtttgagagcatcctctaatctacaagaagccatataatttttattaaggaaggacttatgaactaaatgaggcttgtatgggaaccaccacca

SEQ ID NO: 31096 - DNA, 201 bp, Bos taurus
agcattgtgttttggttttatcctatgtaattcataatacaaaaatacttcttacaactttaacaggcaattttactgagaattcaattagaggcacagtrtatccaatctcactatttgatatttgttatagacctgagacacagaatggtttatttgatatttctgttatagacctgagacacagaatggtttatttga

SEQ ID NO: 31097 - DNA, 201 bp, Bos taurus
agctccgccctttcaggcacttagagggctcccttgcctggggttcttctctgttgttcagcgcaccaggcacataaagggccccgggcccagcccccccmactccccctgctgtctggggtcctattctgtagattggcacatcaggctcttaaaggggcaccttgggtggggtcctgctctgtagttcagtgcttcaag

SEQ ID NO: 31098 - DNA, 201 bp, Bos taurus
agtcagacataaggggtggagccatcaccatagcctccctctccccacatgcctgcatcagcagctgaacaatacagaggctggcccatcaaacgcacaayagccgactacagagcaggaccccaatccagggtgcccctggatgggcgaagctacgagaaggactggccaaagaggccttctgatcgccagctacaagag

SEQ ID NO: 31099 - DNA, 201 bp, Bos taurus
gttaatagcctccttatctagctcctgtatctattttcaaattgttacagaatctaaacgcaagaactgatgagaaataaggatatttcaagctattatgygttatttatgtagggtttgatactctttccttgtgggattatgaaaggtatttatttaactggattcttgtttggttaaacaaagaattgaaaattgaca

SEQ ID NO: 31100 - DNA, 201 bp, Bos taurus
tcaagattgtgatgcaataaacataatcaataaatgtgagaaaatggagagaatttaatttttctttcattaaaaaataatgttaaaccaaacaggtcaayaatgtagttgcttacaggttcaacatctaagtacgtgctatgttcttcttcatttggacttacgccttcaataggttctgcaatttctggacttgcatat

SEQ ID NO: 31101 - DNA, 201 bp, Bos taurus
atcggcaataaaaaggaccacaccatatttaggcagggagcaactggggttgaacttttccaaccaaaacacagctgattcccagggagtgtgaaactgarcagagatacgctccatggcccaatatggcaggcgagaaaacgatcaagaccacggctctacaaagacccaggagagagactctgagggctgcacgaagag

SEQ ID NO: 31102 - DNA, 201 bp, Bos taurus
tagcatgtaaactcacacattgttattttattctagtgtttgggggaaaagtgctaataaaaacaggctttcccttaccatatgaataacaaaccatcagyttaaaccctttcctctcaagcattgtatgctataacaagcaaacatttggagacccattagagttgagcatactaatttagtttccttaatatattctgt

SEQ ID NO: 31103 - DNA, 201 bp, Bos taurus
ataacaatcataatagctttgccacccatatatttttgttgcatagatacctctaaaacgccatgaaaattaaaactagtacatacaaaatggcttcagtycccactagtggtaggaaagttaaaatatgcttaaccttttctggttttagtgtcttagtatctcccctggaatttcaatagaaacacttcttttcctttc

SEQ ID NO: 31104 - DNA, 201 bp, Bos taurus
aagtattcacagtaaaataccaaggtaaggtaaattcatccactccatattcccaaacaaggtgaggttaagtttttgcctttggaaggacaggtggaaayggaagagaggacgagatgtaagtctacacatagggcgttgacaggcaaccctaaaacacaaaatgtttgtcctccaacctgttctccttggaccatccca

SEQ ID NO: 31105 - DNA, 201 bp, Bos taurus
tgcagagaaaatgtctcttattacttcattctgttctaacatttttcccttgaataccgcaatagtctaacacagaggaaagaacatgcttccaaaggagmagggtgaaagttattaacatatgtacatatatataaacataactgagtaaatatatacacacagagaaagagaggtacaactctttatgagcctaatgca

SEQ ID NO: 31106 - DNA, 201 bp, Bos taurus
ttacttggtagaagccagtgactggtacccagtaggttctggatagggaagttgtgtagattgttcagccagcatcattccacacacaaatgtgatcagasgaattgccagtcctgttgattttttttttaatcattagaaactaaagcatcctaacaaggtgccaccatggcaggaggaagtggcacacttccagagggc

SEQ ID NO: 31107 - DNA, 201 bp, Bos taurus
gtgatatgtagaggatgtgtcaagtatccaatagttctggtacagaacagggaaagtggagaattgggaacagaagactggcctcatctggaaagcccacrgttagtcctctcctctcaccttgcatcactggatcttttcactagcattctgggtattgcataggcttttctatcaaacagggggaggttcaaatctgag

SEQ ID NO: 31108 - DNA, 201 bp, Bos taurus
tcaaatgtattatcagagaggagtcatcaatggagaggatctggtgcagtatggataaaagtaaaaatgtaaacagaacatacagattctatgttctcctyctttgttaatataacactggtttaggcaataatataattgctgagtaacaggtaatgtcaaatgttagttttttaaacattaagtccagatctttcttcc

SEQ ID NO: 31109 - DNA, 201 bp, Bos taurus
tgttgaaagaaaatcatgagggttggccatatttggggttacagctattgtatccttggaagttaggctagcataaagacatagaatatcagcatggattkatggaggccttttcttttcccattactccgaatgaccaaacaattttcaatcagtaattgaaaatgatggggaagaaattgttttatgtttagttttttc

SEQ ID NO: 31110 - DNA, 201 bp, Bos taurus
ctctgaaaggatattttaaatttcagattgcatggaagagaatagctatgaaatcttgagttttactcagataaacaattaaatcatggattggagtcttytatagtatgcacgactattccaaaatggttattgctatagtttgtagtatctgtaattggcctaaaaacaataaatttgttccagcaaagtaactccaaa

SEQ ID NO: 31111 - DNA, 201 bp, Bos taurus
ttttaaacagcactagcaatatttctcagagaagcagagggctgtgtgtgcaattgcataatacacttccttgacagttcaaaaaatcataggccttctcrgataacttagaagctgtctgcatctgtgtatcatattacgttggggaagagcaattagtcaaggggaggcccaggcccagggcaccactgacattcctct

SEQ ID NO: 31112 - DNA, 201 bp, Bos taurus
caaagcaatttatcttataattctacaattaaacagacccttctcttttaaaccagttaactacttagactcagctaatcacagacgaactaaagaaaaakcattttaattaagcaggttgctaactgattcccacgtctatatcagcaggtcacctttctggttcataaagaaaaagtagccctttcacttcactaatac

SEQ ID NO: 31113 - DNA, 201 bp, Bos taurus
actctaaaagtggctattttcagagttagcgaagggagaggccaatgccatggcattaagggagggagttgaggggtgcaaaagaccttagtgtgcttacygaccccctctccaaggccaaacatactgtcttggcccaaggctggctctggtttgaactactttgcagcttgaagctccacgaagtgagaaatgggcctg

SEQ ID NO: 31114 - DNA, 201 bp, Bos taurus
ccagtgggttcctgtgtagatttcccgccccccccccccccacccccgtccctccaatggctaatgggcttgagggaaaagcgcaggccttccgagttccktccaacacctgccctacttagcatcctgcacattgccttctgggaaatgtagtttcttagttgcccgagcccttcaacatctggccaccattggaactac

SEQ ID NO: 31115 - DNA, 201 bp, Bos taurus
cactttaccaacaaaacttagtctttcaaagggaataaatgtgagattagttaaaaggcatatttataccttattgagatggatggatttggcaaaaacaygtgaaagtaggttttaaaaactgctttttagcttcacacttaccagaataatttgctatttttaaggattcattttcctcctaagattagggctggggag

SEQ ID NO: 31116 - DNA, 201 bp, Bos taurus
ctgttgagcagcagcatcttgccagtccactgtgcgatagatcatcaaagtagggagtaaatgcctttagctccaggatgcttttaccacttatttgattycctgggtcttattcactaaactgtagtatttctaagttattgctagatcatgcatcaacaaacattttctaaaaaggggcaaaaaagtatatattttgac

SEQ ID NO: 31117 - DNA, 201 bp, Bos taurus
agtagggctgactagcaaccttccaaaaggacttatgccgacacgcacctccgtggactgctgccaccagtgaccctatccctggcggaggctacttccamctgaggccacttctgagccacgcctctgcaggagaccctcagacactcacaggcaggtctgacacagtctcttgtggggtcaccacttctttctggcgtg

SEQ ID NO: 31118 - DNA, 201 bp, Bos taurus
aggagcctggtggcctacagtccatttggtcacaaagagtcggacacgactgaagcgacttagcatacagcatgcacaatgcttagcataaaatccaaaayttctctattgctctatgaggccctaacataatctagttccttgcctgcctcgggacctttgatcttgctgttctttctacctgtcatggtttgcttgcac

SEQ ID NO: 31119 - DNA, 201 bp, Bos taurus
aaataagatgaataaaattaattaaaatggcattgttggcagagacataaattagccactgtctggttggaaacaaaatatactggtataaaagtttctgrattaaagggagatgtgtgactgagtgaccagaaatggactgacctatagcattacatatcattgtgttttctaagcctgtcaccatgctatagccattat

SEQ ID NO: 31120 - DNA, 201 bp, Bos taurus
cacaccctgcaaccttctccctcatcctgtctttaaaaacctaatcactggggagttcaaatctcttgagcactagctacatggactccttccttggtgcyttgtgataaacattgtacttcctttcaccacaagatgctgtccattgattgattttactgtacacaggcgggtagatccaagtttggtttgataatacat

SEQ ID NO: 31121 - DNA, 201 bp, Bos taurus
ctaaatgaagttccctgaatgcattatattgtatactattcctcagtcttccatatataatttcttctttaaaaaaatgtttctttctcctctctcttctrtcctttatatttgtcattcaaaactcagttcaagtatcaccttatgctccagcccttgcagttaaggcaacatgtttgtgaatgaaaaagtcaacttgga

SEQ ID NO: 31122 - DNA, 201 bp, Bos taurus
ttccaaaagaggaaagaatagcttaaggcttaaggcttataacatctggaaatcagaattctagcacagggattaagacacatatgttaaaatggcctcaycctaagaggctcaaaaccacaggttatttgtccatactatataaaacacagcacaatctgccagtctcaatagtctctgctcagtaacaaggcccagaat

SEQ ID NO: 31123 - DNA, 201 bp, Bos taurus
aaacattaatttccaaaagtctataaaaaaaggagacatgtgtaagcatcatttcatttttaaacagttcttctacctgtagaaaatttcacaagaaaaamttactgaaggcctatagctacagccagtttcaaaatctaaatatttgacaaaacaggtaacaggaatttaaaatcctacaaaaaccattcacaaagttta

SEQ ID NO: 31124 - DNA, 201 bp, Bos taurus
ttaaaaaatcttaatcagaacaataattccatttgaatttttctttcaaaataaatccagccaagttctaatatatagcaaattatttgcatattaataarccatatttagaaaacctaatcaaggagttcatctttatatgcaaattttcctacgtaattacttaaaatttccataaaactttcaggttaattgacaatt

SEQ ID NO: 31125 - DNA, 201 bp, Bos taurus
tccaggatgcttcagtcacgtctggatccttcactatttatcaatgtctttcttaaaatgtgccactaaaaaatactccataagttaagaaatcactagtytaatggtcttgacacttctttttttaagatagaatgatgttctatgagatgttttcatgaaaaacaacctgtctccaaaccacactttttttgatgaaaa

SEQ ID NO: 31126 - DNA, 201 bp, Bos taurus
atggtgaggaagctactttctcacatatactttaacttttaggatttcgtccttttctggccagggagcctgtgaaaggaaattcaagggttgtaggttcygaatatatgatgtctatgtgggcccaacaggagtagtaaatttggtacttgaatctgagtattagcatagttcttgattcatcattggcttcaatgtttc

SEQ ID NO: 31127 - DNA, 201 bp, Bos taurus
cctgaaataataataaactgccgacatttctcccacaaaacagagtttatttgggatcagcagagaagtgcagtcaggctctgcaattatgatgagccacrtgcaagtctcccaagggcaagggaaggagcctctcttttagaggggaaaagaaagttgggagggctcagtaaacaaagagcccatggtttttcattggtg

SEQ ID NO: 31128 - DNA, 201 bp, Bos taurus
ttgctgattggtgcttttttatgttaggctcctgcactcccgcagagactgggagatgggggtggtatctttcctgatgatacatattgaagggatggctyccaggcccttgagaaagacgttcctgcattgtagaagacttaacatctcaaaggggcagaaaaaaaaattcacaattacaggttttctagagtagatgcc

SEQ ID NO: 31129 - DNA, 201 bp, Bos taurus
actatcctctgcaattatcctctaactctcctgtgttcaaatcagtatgtcagatggaaatgaaattagaaagagacagaaagaaaaagagcaagaaaggyagagaatataaaggctaaaaagtaggagaagggaaaaaaagacgagggaaaatgaactgggcctgtctcagaaattttgcatttcctagatacctctgta

SEQ ID NO: 31130 - DNA, 201 bp, Bos taurus
aaatagtggcaatggtcatgaagaggaggtgaacctccccttcatcaaggggaggtgaaccaaaagataacggacatacttatggacataacagacaccarctgttgaaatgagatggttcctgggttttgacaaggtgtagatcatactgtttgcatcatatttttaaagataaaatacaagcattttgccttgtcacta

SEQ ID NO: 31131 - DNA, 201 bp, Bos taurus
aaagaaccctgggttttaccactaagagcaatccagagctttattacagcttggtgtcacgaatttaatacactgctatgtatttaaactttaacagaagkggggtgggtgacgactgcctcactttcaccagtttctctacggagaacaagactggacctctcagtcatgacctccagggacgaatgggatgggaatgaa

SEQ ID NO: 31132 - DNA, 201 bp, Bos taurus
tctcacccgcgtcatcccgctgctgcttcttggacctggggaggcatcgcgctcgcatcttttggcctcgcctggagctcactgtggtcctttcactctargagcgcacaggctgccgcgcttggactttggtggggctataaacccagagagaaattgcagtgtcatatggtaattatgtccatgggggccatggggccg

SEQ ID NO: 31133 - DNA, 201 bp, Bos taurus
accattgccagattgtgccaagcctgacatatccagcccattcagaattaggagtttttcagtcataggtggcaagaacccagattaatgctggcctgatktggggagtggggtggcatgaggtgaggaacttgtttgtgtaactggaaggattaggcatggctgctctcaagttattcatttctggcttcactcataggc

SEQ ID NO: 31134 - DNA, 201 bp, Bos taurus
cttgttaaaatgcacactcctgtgctctaggccgagtgcttctgattcagtgtcactgcaacctgggatgctaagttaagtacctaggtggtttcaacacwgggtccccgaaatggccacactggaaaactgaaactgactcagccttgaaaactcatagccaggaacatgggtccaactcttcttgtgtttattcctggc

SEQ ID NO: 31135 - DNA, 201 bp, Bos taurus
ggcaaagtcattctgagaaagtgttttctggagacatggtatttaaacacaatttaaaaaaaaaccacaggatctatcagaaagggactgtttcagaacaygtatttttgtgccttagataaaaatacataccaaggactgaaattatttaaataatatatattagaaggtaaacttgataagcagatgaaaatagggaac

SEQ ID NO: 31136 - DNA, 201 bp, Bos taurus
cttccttttctattccttcttccttctagaaactatcctgtcttcctttttatccacaaggttgatttcagagtggccatgttggttcaagtgcagggttkttttttttttttttttttgaaccattttgaaagtctttattgaatttgttacaatgttgcttctgcttcatgttttcattttttggccacaaggcaagtg

SEQ ID NO: 31137 - DNA, 201 bp, Bos taurus
agattttttttttttttttcatgtggatcatttttaaagtctttattaaacttgctacaatatcgtttctgttgtttctattctgggttttgggccctgargcacatgagatcttaactctccaaccagggatttaaccgccccctacttcccccaaatatgaaggcaaagtcttaaccactggactgccaagaaagttcc

SEQ ID NO: 31138 - DNA, 201 bp, Bos taurus
ccaatggctgccctcaatttccatattttatataagtcagattgtggatgcccagacacaggtttgccagatgaaacagggcagcctttgacagctatatmtggtatcctccataggaattatcaagtctccagaaacctacttaagcagttaaagatcattctagaactcccaatacaatgtggccttacagctccattg

SEQ ID NO: 31139 - DNA, 201 bp, Bos taurus
taaaatctgcagtttgagggtcaggcttctaatttaacacaaatctgggggctgactacatctctcctgagattggaaagcaccaccttcatgccaccccycaacaagtcaccagtatttccctaaaaaatcttgtgtaagtatctggtgccatggcctctgcagctgttacccagggtacaatagcccttgactgcctgg

SEQ ID NO: 31140 - DNA, 201 bp, Bos taurus
attggttcatggcacttgtggaaaagaggctttgagttcaaggctctgttgggactgagaggccatgggaaggaggtggttgcccgtgggcctgatggctrttggaaaaagcaagatcaagaacaatagtataagagacatcagaacatctcaagaacccctcaactatagggataatttgagggctgaggttgcagctgc

SEQ ID NO: 31141 - DNA, 201 bp, Bos taurus
aaagtaaagccaggggcctttagtttcttccttcagtgctatagatagtatcctgagccatatccttgtactggttttatagaaaccagcccccaccccartcagatgaaccaccaacatgtaggccccagaccagttgcaattaagaaggttgatgattgggattcctgaaatagcatgctgttacttcaccaccgacaa

SEQ ID NO: 31142 - DNA, 201 bp, Bos taurus
taaatagaattaaaatgcattattcttgctgaaattgcaaatttaaagataaataatatacaatgttctgtctatcaaattcagaaaggtgaaaataaatrttaagatggcattctgttactacttggaggctttaaattgtatgtactcagcagcatgacattatatgccagaaaccttaaggttgctaacatttttgat

SEQ ID NO: 31143 - DNA, 201 bp, Bos taurus
gtgaagagtttggccttgctcaaagagaggtttggcctttccttcagcttctgacaggaaagtctttgtttgggtgagccctggctgtttctgaccatttyagctgggggatggccatgtcagaaatatcaaccatgtgatttgtgtgaacattgggccatgcagttattagttgtcctggggactgaattcatccatttg

SEQ ID NO: 31144 - DNA, 201 bp, Bos taurus
gcatctgtagattttttttcctgtctttgtccaacataaataattttctcttactgatagtctgagagtactacaatataagttttaagtaatcctagttytacttcctatatccatgattctgtggcataacaattgtattttattaaaaaaatcagctttctgggaaactgaaaacacttatgaatgataatacacttt

SEQ ID NO: 31145 - DNA, 201 bp, Bos taurus
taagcatactattaaaaagtagagtaggacagagtggaagatcaagttcaaagtttagaaagttttacttagaatgttttataatggaatacattattaartgataaaaccacatgctatactgactcatgattttctaaaaatctattacatttgtctaaaaattaggaaaatgtcatttgcaaggtgactctcagctca

SEQ ID NO: 31146 - DNA, 201 bp, Bos taurus
tttagcatcagtgcttccaatgaatattcagggttgatttcctttaggattgactggtttgacctccttgctatccatccagtcttacatttagatctttrgtcagtactgaatctgagttttggttatctaaacaagtaaaactattgaagccattttcagctgcataaactaacccattaaattcagaatacagataaa

SEQ ID NO: 31147 - DNA, 201 bp, Bos taurus
attacttgtcagttctatgggtgtgtgtgtctgtgtgaagagcagcggtgtggtaaaaatgacttttggagaaatacattatagcccccaaagaagaataygtatttttcaagcaccatttgacattgggtatttcctacccttatgtgagtgtgcatgttaagtcacttcaatcgtatccaactctttgcgaccctatgg

SEQ ID NO: 31148 - DNA, 201 bp, Bos taurus
gttcctattatcagagaatcttgaaaatacagtttgcaatgctcaactctggagtcaaagagcaaagtatataaagttgcctttcagtatataatcagtcygccataaaattttttatttttttcagataattctgtttcccagtcatatagataaagaggctatatttaaaaactctgtatctctgatcatttataataa

SEQ ID NO: 31149 - DNA, 201 bp, Bos taurus
tgcttttggaattataaatttagtgagttagtgtattcaaaaatatggagtctgaataatgaggctttcgtatatgttaggcagaacccctaataatataytatctactttctgagagttattttgcctacctccaaaatattctactagaattataaatacatgttttaaaagtgcttaatattttttattcaacatagg

SEQ ID NO: 31150 - DNA, 201 bp, Bos taurus
ctatactgttctctagagcctttcttgatgtgttagtatacattctgtcacagacttagtgtacgaggactgtcttaagttacacatgaaagacacaggaraactaatttggtcacaaaacatccccatatggggggcttccctggtggctccaaggccaaatttgcctgttactccaggtgtttcttgacttcctacttt

SEQ ID NO: 31151 - DNA, 201 bp, Bos taurus
atttctaggctagctatgctattgtacaattttttactgtgaaattttcacataaagtatttctggatgaataattcttatatgtcaaattagcattatcrctcattttctggaaaagtaaggtataagggagtcaattgataaataataaataagaaagggaactttggatcactttggtttgttttgtaatccttacaa

SEQ ID NO: 31152 - DNA, 201 bp, Bos taurus
cccataatgcttatcaacaggtgtgtgacaggagaatacccaaagccagaaaaagaatcacccagtagactagaagtaagctgtgttagcactgacatggygctgaaaatagtggcctaactggaaaacctcatgattcatggagcactaggtagagtatgcagcaatcttgcctcagctgtggggaataattggtaataa

SEQ ID NO: 31153 - DNA, 201 bp, Bos taurus
cagaaacatgtacacaatgctcatgataaagtgaaatggcatgctttaactgagattattatacaactccatcagctgaaaataaaggatattaaatgacraacaggattgcttttcttacaaaactgcccagtcatcttggtaacaggtacattacctgttattattgttgcttagcatccatgcttataattctcttat

SEQ ID NO: 31154 - DNA, 201 bp, Bos taurus
tgtagcacaagtgacttagctgaggtcattaacgcatacacgtcagtgtcagagaggtattaatagaaaagcccgggcctgagccagaatttagctgacaygcccagcccaactacattctctgacaggcgtgtgacattggtactatttccaaactcttctgggcctcatttttcatacttacaaaatatggataatacc

SEQ ID NO: 31155 - DNA, 201 bp, Bos taurus
aattatgaactccaagccataatgattttaaatggcttggcatatggttaagatatgaaaaatggaaaacaggcacttttgccaccaagagcatatattcragtgtattttgagcagatatactctgctgagtatatttttagtttttctagcataggtgtgtttgaagaaaaaacttcacatctcttttccacctaatca

SEQ ID NO: 31156 - DNA, 201 bp, Bos taurus
tactgaagatatgaaaagagtcatttttcagaatactattacagatttgcttcttagcttgagccaagttataaagggaccaggtaagcaatgggagaagraagggtatataagcaggaagggagaggaaaactctcggaagatgttctgcagctttctaagatagacaaagaatttagggggattctagatgacagaaca

SEQ ID NO: 31157 - DNA, 201 bp, Bos taurus
tcttgagctcaagcactggaagacatccatataaattctgcaagatgatagctatgatgtcacccaaaagtgttccttctcatgtctccccacttcatctrgctcatcggaagctttgaggcctcagtagtcttgtgatgctgttttgaggagggtgaaaaattcttttctggttggaataaagaagcatccgggttgggg

SEQ ID NO: 31158 - DNA, 201 bp, Bos taurus
tactgagaactcatagtcaggttaaagagccacccttaatagggccttttagataccatggtttaaatggacaatttctcccctcaaaagtatataatacrtgaagtatttaggccaccttaaaccatcaaggaattctccataggatatatcacaaactaaaaaatacatctctattggtggaagaccagtagcaagaaa

SEQ ID NO: 31159 - DNA, 201 bp, Bos taurus
cctgcctttcccatggttcccaattaaaaaaaaaaaaaagcagtgtgtgaataatatggggtagtataagaacacgtctttagattctgaccagtcttgaktcttcttttttgaagttatatgatttggtggaagtttttctataaaattcatgtaatcatacttatagtttaccaggtatctacaaggtactgaactgta

SEQ ID NO: 31160 - DNA, 201 bp, Bos taurus
accgaatctgcacctctgaggatttcctgagtgcccgaacctgagcagcttagaactgggaggtgcatgcagcccaggtctggcctcagatggttctgagyagagcaacatagagcctgagcagtgtgggcagggagggcacacacgccgtgagtgagggcaggcccagtgtggctgagacactgcgagcacatgccagtg

SEQ ID NO: 31161 - DNA, 201 bp, Bos taurus
gccaagttaaaggggatacaaagggcttctgcccttgaaagctatttcccagctaaggaggatatgaggaagaattttatagcaataatttaagggcaagkttgcagataagattagggtgtgagtagggccagccctcctataatctggcttcagttaatcttattaatgagcttctgtggttccattagtctggcctca

SEQ ID NO: 31162 - DNA, 201 bp, Bos taurus
gggtagagatttctaggaattgggccactgcccactgcttggtcttttgacagtgccttggaactgtcatggaacctttggtgctttagtaactaagtcaygtctgactcttgtgactccatggccctagcctgctggtctcctctgtctgtggaattctccaggcaagaatactggagtgggttgccatttgcttctcca

SEQ ID NO: 31163 - DNA, 201 bp, Bos taurus
tgttcatttctgtctaaaacattgtaatttcttaagctgttatcaagccttcaatatagtttacgggccagcaaactatagcccatgggccagccatgttygtaaagtttttatctgatcacagcaatgcttatttatttatatatcttctctgactgtttttacactactcctggagaacgaagtagttacaacagagat

SEQ ID NO: 31164 - DNA, 201 bp, Bos taurus
gctgcagacctgcagggagccccagtcagcgggtcatggccttcaaagcaaccagaactctgtcaatactggaatgactttccagggcaggggtatcatcwccacccttttgctatttcattcaggcccaaaggtatgatcataactcaccttaccagatttgggacactatgggataaatgtcaccttaattttggtaga

SEQ ID NO: 31165 - DNA, 201 bp, Bos taurus
ggtctgaatgcctttctggaagggtagaggcagaactggagctcagaacgcttgctatgcctttcagaaggttgagacagagaatcagttgcagctggccrggggctacgctgatgaagccaaaggtcatgctgatggagctaaagatacagtcactgttctcaaggttgacagcttcatcaacagagcagaaattagtgg

SEQ ID NO: 31166 - DNA, 201 bp, Bos taurus
gtgtggtctgggcagggcccagcctcctcccttaattaaaaatatcatcttggagtttccggtcaatagagaatgaatttccaattgctttaccctgctgrggccagtctgcctcctggctcaaaacttctaacagcagtgaatgagactctaatagtaactgatagcagctaacctttttttaagtcttattatgtgcca

SEQ ID NO: 31167 - DNA, 201 bp, Bos taurus
gtttttataccaaatcaatgatgtaatctgtgtgcaaattgtggctgttgctgctgttccttctcctcatttctttttccccacagaatgaatcttccatrtccttaagagagaggagagtagcatcactctactatctatgggctcttgtctacaggtcagccaagtgtctacactgaggataggtaatcctgatctcac

SEQ ID NO: 31168 - DNA, 201 bp, Bos taurus
cttaattatttaagactgacataacaatagaaagattcctgtgataaaaaaaaaaaagcgctagctgaaactggagttcactggtacagtacacaaggtartgaaggaaggtaaatacacatacacaaactcacaaactctagtgattgttttccatttgaaagacaaagaaaaccatatatctgcattttatatacattt

SEQ ID NO: 31169 - DNA, 201 bp, Bos taurus
acctgcatgaagttctatgcactttgtgtaagttatcaatccgcaaaaaagtcaaaagaaaatcacgtctgaaatccatcgggccaccaggtagtgatgaytgtgtgtccaggaaacatcaggcacagtgcgctctggtactctgccttgcctttagtcctccgcccagggggcctccaggcgctgctcagggtggagctg

SEQ ID NO: 31170 - DNA, 201 bp, Bos taurus
ttgctgtgtcttgtccaggagctggccatatgtgccaggacccatcagcctggcatcttgggcaccgcatttgtacggagccagcaactcatcacctactsagcagctccagggaatggcccagctgcccaccgctgcttttagatctcccagtgggtactcaccagacaatgtgtgagatctttttccttctgctgagtc

SEQ ID NO: 31171 - DNA, 201 bp, Bos taurus
acagctgtgaggatccagactccctctatgatcgtattagcacccgcctgttctcaatgttatttaagaacagacgagtgttgatgcgatcatagaggtcrtcttgcacatactgcttgaagagcatggctgccttctcagatgctttttctgctgctttctagaaagacagacagttctgtgcagaacgaagccagattt

SEQ ID NO: 31172 - DNA, 201 bp, Bos taurus
tccacttacttgtctatattctttccacaccaccctaattaagagtcttacagtgaatctgtataggctaagtaccccatcaccaccaatccagcatcacytacttctttagattgtcttgactattcttgaccctttgctcttttgtccatatatatgtaagaaacaacttgtcaagttatatgaaaaaactagttgaga

SEQ ID NO: 31173 - DNA, 201 bp, Bos taurus
aagcctggcatgctgcagtccatggggttacaaagattcagacacagcttagcaactgaacagggagctctctgaggcctcttttataagggcactaatcycgttcataagtgtaccaccttcatgatctaattgcttttcagaggccccgcctcagaataccatcaccttgagggttattatttaaacacatgaatttcg

SEQ ID NO: 31174 - DNA, 201 bp, Bos taurus
tgttcacaagttcctatgttctgttcttttataaagaagttttcttttcaccagatctcaatcggtctaacggttgggtaggcctgcagtgtggctctacrtttaaaattcatgcagaatccaatctcttctcaccatcgaagtttgactcaaaaaaatgaaaccctcatctcttatctggatcactgaagtggcctccta

SEQ ID NO: 31175 - DNA, 201 bp, Bos taurus
aaaaaccaaaaggtctatctgtgagagtgctcaaccaacagcaacaagggaattctcttgtaagaaaggctttgtctggggaagaccacatcgctgccacyaagtgaggtctgcaagcttgcacactgcccaccactcagtacactctctaacagccatgttaaaatgaagaagcacaaatcaagacctacccgaaacaca

SEQ ID NO: 31176 - DNA, 201 bp, Bos taurus
tctctttggtggctctgaaagagaaacacagattttatggtggcaaaatggttgtcttaatattattttcttttccctttctgatcatgattatagtcctrcctttattttgtttgtctgctgaggcttattaggacctagttgtattagctcattctctagcaaggtgtcccaagagcattactggagaactcctacaag

SEQ ID NO: 31177 - DNA, 201 bp, Bos taurus
ggatagtctaaaaagaagagtagaatttaagagagataaagaataaagtatcttacataaaacttcaattgacaggtggcatttaattccttttactgtgygactttgcttcactctgcctggttgctgaagctgtgagagatggtcaggtccagatctcaaccaggccaagtgaggtctgtagacctgagatgtgtactg

SEQ ID NO: 31178 - DNA, 201 bp, Bos taurus
cacagcagggagaccacctgggaatggtcaggtgggacagatggggatcttttccccatggtcctggcatgaggggtttaatcagaatcatgtctgtggakgagtgcagaggccctcctgcacacactgcagaaggcaccaaagtcagtgtggggtgcaaacgagcagaacagtaggggagtaagttagaaactgcaagag

SEQ ID NO: 31179 - DNA, 201 bp, Bos taurus
acaagcaaatgtcctttacatagtctatatcatgttattcaaatacgtgtgctgtttattggtgatttcgctggttcaaacggcctccaaatgtattcttragcatagaaggctatgatgtgcgttttggagaaaatacttgttagatgtgtattaagtcattcaggcatgacgtatactgttgttggccatgagttcatc

SEQ ID NO: 31180 - DNA, 201 bp, Bos taurus
tattttacaggccaggaagctgaggagaataatgtgtccaagaccacggagccaggtaggtgctgaaaacaaggtaaatccccaggttttctgatttgctmtccattccttcccacccatggccccagccaaccaccttcttacacattcagagtgttcttttatatcaacatttaaaaatatttcatgaattggggataa

SEQ ID NO: 31181 - DNA, 201 bp, Bos taurus
tagagctacatgggcagcagaggcagacagtggaaaaagtggggccctccccctgttttttcttgcttgtcgttccagaggccacacccatgccaccacgygtaagaatcaccatgtcaaacttctggcatctttaatagggtactaacaactcagaaaactgtggccaggaggggtagcaatttaagggaagagtttcac

SEQ ID NO: 31182 - DNA, 201 bp, Bos taurus
tccccacacgcctcacttcatttcccttagtggaagtgtcaggccctttgctctcaccatcagaagagtatggagaactcaggcctgccccaggctgagakatcattcactgtgttatttcccttgcacccctcacccccaccgtttggaattaggcgactttatcctgccctggcttccaggtggcccaatgtgacacct

SEQ ID NO: 31183 - DNA, 201 bp, Bos taurus
ccgataaaatacacactcttctatctctgaaaaaggcaaatgaggggttttattgccaggtcttataacaagacaacttgagtgataacatcactggaagktatacttttttagcatttgtactaatttccaatagagaaaaaaaatgtttagaaatgtcagacgagtcattcatttatcagatgtctttttatgtaccta

SEQ ID NO: 31184 - DNA, 201 bp, Bos taurus
cctaaattcccaacagaggtaccatcaaaaaaaaaaaaaaaaagaccagatgtagagacatagaggtagcatgcttggaaaagatcacgaaaggaggtcartagagatgggtcctgaaccaccagagggcagcatgtggtggccgtcccagggaatgaaatgtattttagggtcccccattttccccaacagctgcctgga

SEQ ID NO: 31185 - DNA, 201 bp, Bos taurus
ctatctccttggcctggggagccgcctgtccgcgggccccagcaacccacctcaggggaagatctctttttatcagaccttctcttttctcccttttgtayatttgccagaagggccaaagaagacagatagcagctaaatccgcaccaccccccaaatcccgaggcttgctcatgaagtaaatggttggtgttggtggtc

SEQ ID NO: 31186 - DNA, 201 bp, Bos taurus
tgatgtaggaaatacacaaacactagacacattgtaaacaaaaattcttttcaaggtaacattactagaagtcaccttgaatacattttggaagagaacartcagacagcaaatgtttcaaaatgcatgaaagaaatcaaaagtggcctgcagttctgctagggaaattaagaaaaaaaacacacacaggacttctgcagg

SEQ ID NO: 31187 - DNA, 201 bp, Bos taurus
agatcatgactgagggaacagacctaacaaaataaaatttcacaaacaccagagatgaaaaagcttctcagaagaaaccattttcacctaaattttccccygctttagtttagatttctctgcatgtccttggccttcttcttttccttatgtcctgcaatataccttgctctccatttactgttgttctgagacataaag

SEQ ID NO: 31188 - DNA, 201 bp, Bos taurus
aagatttctctggaagcaaaccacttaaaacaatccacattgaaacttacacaaaaaggagctcatccgtggttcaaagaattatcttctaaaaccttcaygttttaatttgtattaatgacatcttcttaaacatgttttgcagcgtgcagcagcacaccaataaaaaccacttgctgccctttgaactctgaatgttcc

SEQ ID NO: 31189 - DNA, 201 bp, Bos taurus
cttaaaagcaaaacaaatctcctggctaattgggaaccaagacaatgcctaaaaagaaaatgacaggccttggttaaccactagaactcctaggccttgtyccatctgctaggaaggaccagcattgatacccaagaaccactaaagatcctgccgcttgccatgcatcatcactggcctcctcagctgctaaaggccatg

SEQ ID NO: 31190 - DNA, 201 bp, Bos taurus
aatttctaacttattacacaaagcctctaaggcagcaacatcaatatcacctggaagtttcttagaaatgcaggatctcaggcccagcccagattataagrggattatttcccaacaggctttggtcaattctgaattttgctctcatacaccctagactagagtgagctgattcctcccctcatacactttaaaggaaat

SEQ ID NO: 31191 - DNA, 201 bp, Bos taurus
cctcactggtgttcccagggtgaagggggccttgatgggcctggtgtggctccaggctgaggctagagcagagtggcactgtggtagcacagagaccctayaaaagccacaggactctccagggaaagctgccaggagcagacattgatactggtgggaatggaagatgttctagggctctcagcgatcccctgtctcagt

SEQ ID NO: 31192 - DNA, 201 bp, Bos taurus
ctgcctattctgcatatttcatgtaagttgaatcccgtatctggtctttgtgactggctcctttcacttaacataatgttctcaaaggttcattcatgtckctgcatgtatcagaactttattcctttttatggcagagtcatgctccattgtataagtaaatcacattttgtttactcatctgtcagtggatatctgggt

SEQ ID NO: 31193 - DNA, 201 bp, Bos taurus
tagatgcacaggttggcttctttacccacgtgcctgggctcctggtgggatagctggagcggcaaggggttggtctctcttaatgggtcggattctgcacrgtcactgctctctccacaccctaccacggcaatctcctagttgctggcatgcctctagaaggcaaagtgaagggcttcctcaccctgcatgcaggaacta

SEQ ID NO: 31194 - DNA, 201 bp, Bos taurus
aaatgaacataaaaaagaatgacagatgaagaaaactaacaagtggttgctggctgggggatgagagaaacaggtgaggaagattaacaggtacacggttrtaaaaacagaatcagtcacaggtatgaaatatatagcatgttgaatatagtcaataatcatgcaatacctttgtatggtgacaggtggtagctagactta

SEQ ID NO: 31195 - DNA, 201 bp, Bos taurus
agccggggctaccagaagctaggagaggcagaggaggctcttcctgtggagatagcatggtggtgcctacaccttgatttcgtccttctggcctccagagytgtgagaataaggttctgtgttttaagccaccacgcttatgggaacttgttgcggcagccacaggaaaccaatactgcaagagttttgggaacctggaac

SEQ ID NO: 31196 - DNA, 201 bp, Bos taurus
taagagctcaatagaagaccgagtggaagcagcggcattgcatttgcgttaggttaactatgatctgcatgaactttttcctgaaagattcttccttggcrgatcaagtttattttcctttgggttataaatgatgcagtttgttagacacttgcagagtgtggaacttttacacaattttcttagtcaaaaggttagctt

SEQ ID NO: 31197 - DNA, 201 bp, Bos taurus
agcatagaacattgtaagtctcttacatgctactgtttcttggtacctggcatgtaatgtgcatttatttcacagctgaccaaaaggctcgtgtacaaaakctgatgaaaatgctagtcctcctcctaaggaggcggtactagtgataaagaacctgcctgccaatgcaggagacataagagacacgggttcgattcctgg

SEQ ID NO: 31198 - DNA, 201 bp, Bos taurus
gggggtgggtgggaggaatcgggaactaataacgagcaccactttcgactacctgaaatgtggaccccaaaaacattggccagggttagggtggtggatcrttaagtgtaattcgttgactagaagtcgcttcgggtatttccggaaggggccagtcggttctccgcgcagacggggtaggataggagaaggtgggggagg

SEQ ID NO: 31199 - DNA, 201 bp, Bos taurus
agatgaattgtttcttagaagggtaccccactgttgtctctgcatccaagccactgataccttttgtgtaagattgatgctgggcctttaaattttttttwaatttaaataacattaaatttaccatttcaaccatttgtaagtgtatacttcagtgtgttaaatgcattcacactgttgggccactatcaccgtcatcca

SEQ ID NO: 31200 - DNA, 201 bp, Bos taurus
tctatctgcaacccaaccatttctcccacctcctctgctaccactcgagactaggttacttttgtctcttaactagttacttcagttagtgaggattctgrgccaagttccaatgtgtgtgtgtcagggctggggcagtgcatgggaggggtgatgagtttctccacagattccacaaaaactctgcttcatcagttatgt

SEQ ID NO: 31201 - DNA, 201 bp, Bos taurus
cccttctccctacccttccggagccagatgcgtgttcctctcttttgaacactagttgctctttgattctctaactgtcttacggaatttatctttctctracttgcactcagatcaatcccattccacaagtgtgtgtgtgctcagtcactcagttgtgtctgattctttgctaccccatggactgtagcctgccagtct

SEQ ID NO: 31202 - DNA, 201 bp, Bos taurus
ggctcgtacaggactgcctagcccccctcccctgcccaagctgctccctctttcaaacatcacacatggcaggcaccagaaacagagagcttctttctttycctggctgggaaaaatagtctcaaattttgtgatgtatatgaagcgcgaggtgggggggggtacttttaatttttatttttttaccctctttaaatattt

SEQ ID NO: 31203 - DNA, 201 bp, Bos taurus
ccattgcagcagaagaaatgtggtctcagaggccatcaaaggtaaagggaggtctgtgctcaaaatgttgagaagagaggaaaggaaagtatggttagagrctagagtgctattggcctgaagacaatgctttgtcagcttgaagacattgctgtcaggcaaatactagaaagcccgtgttgagagaaaccactgtattat

SEQ ID NO: 31204 - DNA, 201 bp, Bos taurus
gccccactgaaaaacacagatcagaaatagcaatacgggagtcataactgatttctgggtgaatagctttatcaagccaaaggccttaatcaaataaaaamccattctgaataactgcatttggcacaggaaaacaggcaaagaacccaaaagatgaggccaacccatctcctattcccttccacagacacaccaccaacc

SEQ ID NO: 31205 - DNA, 201 bp, Bos taurus
ggcatggtaaaagtttagagtcaatgtagtagaaaaatacatcatgtttgaggtaatatcattatgtaatatctgtagagtaattcttttttggccgtgcygcaaggcatgtgagatctcagttccccaatcaggggtcaaacccgtgccccctgcagtagaagtctgtagtctcaaccactggcccaccagggaagtccc

SEQ ID NO: 31206 - DNA, 201 bp, Bos taurus
tcaggccagttgctggagttgcctcacaggccggcaattcatcctgatcatccttcccatgggaagaaatgatcaaataagcttgtggtcagtccattttraatgtgaaaagccaactgaggcctatcaagggaatggaatttatgtattcagtcattggtttaacaatccaaaaaaatcagtaactattatgaggtaggt

SEQ ID NO: 31207 - DNA, 201 bp, Bos taurus
tggagggagacttcttttgttcccaacctcagccccttgattcttagtcccatcttcctcctctctccaagtacctccccaggccctgttatgttgacttmtgcaggctaagttgcttcaggcgtgtccaactctttgcaacctagtagggtagcctgccaggctcctctgcccagggaaatctccatgcaagaatactgg

SEQ ID NO: 31208 - DNA, 201 bp, Bos taurus
ggagtagggttttagatgaagaaatagaagatggcccaactcaacccctcatgtccttgagaaggtaacagagacctcagaaaggatgtgtgttgtccacrtgtttcaggtaatacgatgacagagtcatcacagagtcaggcactggcccagggccctgcctctctttccagtcacctcccacagggtcaccctctcacc

SEQ ID NO: 31209 - DNA, 201 bp, Bos taurus
aaggctcacggccttttgtgaagtttgcatcagcgcaagactctttttattttataaaactgcattagtgcacagaacagggcatgtcacccagggagacrtaagttgaggccacttccatacccacagaaaagtctcatgttgaggtgaaatgcatgtattttaaaacaactgtaatttacacagctattaatcttccaa

SEQ ID NO: 31210 - DNA, 201 bp, Bos taurus
gagggaagtgggtgcataacccatgcacaggaaaaccatgggcagaggcctagaggcaagagaaagctcatctctttggaagaatagaaagaagtctgtcrtaagacagagttactaggaacttaatgagagatagtgctggagaaataagcaggaaacagatcctaaaaaatggacttagggattccaagggaatcccta

SEQ ID NO: 31211 - DNA, 201 bp, Bos taurus
gaatggaaaaattgtgttcagcagagttggggttagtaagcagtcccaaagctttttgtaagtaaaactattggcacatggccactagattcacttgtctyatctagggctgcttttgtgccgcaacatcagagttgagtagttgcaagagataccgaatggcccacaaagcccaaaatactgactggtgcttcacaggaa

SEQ ID NO: 31212 - DNA, 201 bp, Bos taurus
ctgagtaggttgaatttatagctatattctctgcttaaaaaatctaaaaataaggacgttggcatcaaagttggtgttctgagtcatattttaaactctgkaagcctgtggctttgcaaaatgctattcagaaaactctaaactgcatatccagtatatcttcgtcttgccaactcctccgccagcttctttcagtgattt

SEQ ID NO: 31213 - DNA, 201 bp, Bos taurus
taacacttctgccacagaaaatatttctgacctctgggatcctgtgtctttagtagttaatgtaaatatggtctcccatgatcagcctctaaccattgctstgtgtgtgctggatcattagactgctgtaaaggactattttattgtcctctgagtgggtctaaacagtcatttaagaaatttagtgcctgatttggtccc

SEQ ID NO: 31214 - DNA, 201 bp, Bos taurus
ttaaaggataaaaatcatcctagaaaaattaatcttttgttctctacttagtatcggttctaatcaagtaatggggcttccaataaaggggcctccaagamtttctcatccttcccctgccttgtggggacagaggacaggggtaccttggtgataagactgtggccaactcaaccctttctgtgactgtggctatttgct

SEQ ID NO: 31215 - DNA, 201 bp, Bos taurus
cacacagtttgcactagaattaaatgaaatggatccattgttaaagtctttattaccacctaccgatactcgattcaggccagatcaaaggtaaggatatytttcaggtctttatcctccagagatgtgaaactataaaaaggcttagtaacatcttctaggccaccaatggagcctaaaagagagagattctgtcatcaa

SEQ ID NO: 31216 - DNA, 201 bp, Bos taurus
ttctgatgtcagatttggatggtggtagactagctgtagcactgacattaaaattctgcttctgtaagaaattgaatatattaggaaagaaggccaataarccattattttttcctaataagagtagctgacccttcactaaatactgaactaaatgacagctttacaaaactatttcaagtattcattatcacagtgaaa

SEQ ID NO: 31217 - DNA, 201 bp, Bos taurus
ttaatttcatgactgcagtcaccatctgcagtgattttggaggccccccccaacccagaattaagtttctcactgtttccccatgtgtttgggtgctagasaaatctatttccttctgggcccagaaacagggaaattttaggagccgctggaggccatatcttctattaagaggactaggaagtggtcctccacagcatt

SEQ ID NO: 31218 - DNA, 201 bp, Bos taurus
gactctgcctttaaaatatatccagagcctgaccacttcacaaccattgtctctgctccctcctgatgtgggcagcttcatcaccctttttcagagttgtrgaaattttctcattggtttccttccttccacacttgccacccacagtctagttcgtaattctcattaacacaggaagcaagaataatccatttcaaacat

SEQ ID NO: 31219 - DNA, 201 bp, Bos taurus
cacataagtagaattaagatgtagaaaagggaatgacttttggcccagggtacagtatgaacttagagttgctttaagtaaagtcccatccagagccatgwcagagggcactaaactgtggccccaggtttggcaatacctggatcggagtcagactctccccagtcccagccaaattcagcctgtgtcctgtttcgggtt

SEQ ID NO: 31220 - DNA, 201 bp, Bos taurus
gggttgtttcacttgggaacactgcttcagcatgaccatccattgtctgcagtactgctttcctggagaaaaagggctcctaggaattagaaatattttgygagtataggacaaacatctttttttcccttaatgtgcatttgttaaacctaaatagctcagtattgataaaactatgcaaccagtcaaaaatttgttcca

SEQ ID NO: 31221 - DNA, 201 bp, Bos taurus
catctatgttgttgaaaatgcaaaatttcatcctgtgtatatggtgaatcagttacttttcccagtgttggagaattggccttttgtagtattctagtagytctggtcatcacagctatgtgctataggggttctccctatgtgggctgtgtgggtgcttctgatgtagtgggctgactactgtgggcatgctgcttgaca

SEQ ID NO: 31222 - DNA, 201 bp, Bos taurus
ggagtagcctggtgagttacagtccatggggtcacaaagagttggacacaactgagcaactaacagtttcattttcataattaacaaagtgccttcccatraattagatcatttatgcctcacaggaagcctgtaaaataagaattacagaagttcctctgcttacaaacttccagttatgaacttttcctaatccaaatg

SEQ ID NO: 31223 - DNA, 201 bp, Bos taurus
acgtgggttatctttcagaacaatgtgggttatcttctttcactttcatccaaattttctatccttcccactctttcacggtcttcacagttattgctggrtaatgtgaactaacttgcttattaatgctctattatattgtacatatagacaatgttttattttttgcagatctttttttgttttgttgatttaaaattt

SEQ ID NO: 31224 - DNA, 201 bp, Bos taurus
atttacatttttatatttgatcagtattgctcactgccaatccactatatgcttgtaaattcctccagggctggttttgttcaccactgggaacattatgygtaagcttagcatatggtaagtaaatgaactcagtcagttgttgaaggaaatgagggagagatgaaggaaaataggtcatcagaggatcaagatttgagc

SEQ ID NO: 31225 - DNA, 201 bp, Bos taurus
agagagatgaaggaaacccaagaaggtgctgggaactctgagaggatttgagtactgaggcttgggctaagtatggtgttttcccctataggcatcagaaytgcatttagctttaccgtgtctgcagagactggcagcaagagaatctttttcctgtcttgcagtttctatagcgggaaaaaaaaaatgtggccaaggaat

SEQ ID NO: 31226 - DNA, 201 bp, Bos taurus
ctgaaaactatacaaatgaaatctatcagttcttttagcagtttatatcagtttatattaactaatcttaaataataatatgagtgagatttatcagctcrtttatattcagatggcccatttgtaaatgtctttctacatgactgtgagtactaggtgagggttaacacagtgagtgatatttcaaagatcaatgaagat

SEQ ID NO: 31227 - DNA, 201 bp, Bos taurus
ctacaaattatcttcctatttttacagtgaaaataattcttgtggattaaaaagtagaatcatctgatctcatacaagctttatacatcttttctagtatratatagaagtttccttgtacaattaacacatgatgtaggtttaattcagtcatgaagaatcaaacacctgtgtttccatatgttctcacttatttcacta

SEQ ID NO: 31228 - DNA, 201 bp, Bos taurus
gtcattagtcttcaaattgtagatggtgattactttcactaaatttctattgacgttaaaattatgccaaaaattaaaaaaaaaattatgccaataatgcyaaactctaggcaagcatgctatgtgcttccatatttactggtcagtctagaactaattagaaggttattgggatacacttttgaatgaaactgccaatat

SEQ ID NO: 31229 - DNA, 201 bp, Bos taurus
atatatcaagactggcttgtcctgttagaacacaccaaaagtaagttatataatgtggagaaaaatatttagatagccaaaagcatctcactgaacaaaartgaagaccgaggaagaaaatgtatgtagatttctcaatgccatttcagaataagtgatatttaaaaaataaagtagccaaaactctatacctaagggagt

SEQ ID NO: 31230 - DNA, 201 bp, Bos taurus
agattctgaactgtcctgacttgccaatcactattttgagttaagaattcccattgttctttcattgtggaccctgatctgtattcggccatgaaaacagragggctcttaaccatcacttcacccagagctttgagctgggaaagttcttgacccttactgacctctctcagcttttctgttctcccttaaggccaagac

SEQ ID NO: 31231 - DNA, 201 bp, Bos taurus
ctctccctctctctatgagattcctaactgcagagtattaagtttatccctctgattttcttactatagtaagactgagctgattacccctttactacttyagctacgccatctattatcaggcctacatttccttccctagtcaatcagaggtcctttacacctgccttcaggcaactccattctctatctgtgaaagtg

SEQ ID NO: 31232 - DNA, 201 bp, Bos taurus
ttaactatacttcaacttttttaaaaagctgtaaatcttaataataacgctgcattagtaaggagaattatatgtcccactctctaccccagggataagtrgggagttgagaagaaagaggttaaagctgagaaaaaataataattaaagggatacataaatgccaccccaatgtttacctgattgaatgccacatactat

SEQ ID NO: 31233 - DNA, 201 bp, Bos taurus
ctatgtagagccttactactcaacctgagattcaaggaccagcagcacttgtatcctctgggagcttgtcagaaatatagaatctcaggcctcgttcctgrtgtacagaatcagaacctgcatcctcataagatctccaggtgcttcctctgcacatgcgtggcatagtgctaagtgtgtcataagcagtataggccactg

SEQ ID NO: 31234 - DNA, 201 bp, Bos taurus
gagtcagacatgactgaggaacttacactctattgtatttaaaagctgctagagagtagattttaaaagttcttatcacaagaaaaagttcataaccatayttggtgacaaatgttaactagacttgtgatcatttttcaatatatacaaatatcaaataattatgttgtacacctaaaactaatataatgttttatgaca

SEQ ID NO: 31235 - DNA, 201 bp, Bos taurus
gaggatgtgatggggccaggcctactgcaaagtgactttaaagctgtgaagatcatcacaggagtgcactccaagtccaggagattgggtttggacaaagmaacccttctgtgggccctgacgaggctggggatggacagtgttcacagctgtagcttcagcatctttcccagggcctggaaaccagaaagagatgggaac

SEQ ID NO: 31236 - DNA, 201 bp, Bos taurus
agatgtggctcccagcccattccccaaatgagtggccatgctgtttactcccaaactgagaaaccctagacagtaagcggggccttgagagttcatgccaygacagctggcatccacagagattctgcctgtcccaggcaaaccaggattgtggcctctgaacacttggagccctgctttagaattgcctgttcaaatgta

SEQ ID NO: 31237 - DNA, 201 bp, Bos taurus
ctgctggtccctggaccagagtgaggcctgcagcacagcccatggttgggcatgaagccttgctttgcccctcctctcctctattcctggctttaaccaaygagtgcgtttctggccacagggaaagctcgtggatccagggttgcatagacaggggccgctgtcccccaggttagggctctgatacttcaggtcactgcc

SEQ ID NO: 31238 - DNA, 201 bp, Bos taurus
gaaggagaaggtaagaataaaataaattcagataagcaaaaaggaactcaaactcggcaccagcctctgctgatggtgtctaaacgggcaggagtcatgcrgggggccagtagtggtcttgccttttggttgctgtgctactttttacatctgtgctgtaaattacaagcttactctgggtaaaacatgagcatattgctg

SEQ ID NO: 31239 - DNA, 201 bp, Bos taurus
ccagagcccctggggcttctgcctgaaggaaggaagcagtttttctgagaatctaagacttctaacccagcagggagtcatgggtgcaacatcttcaccarcatagatggggcctcatttctgccttctgctgacagcttacctattcctgggtaaatctagtggcttgttaggatgactccctctctgtcatcctcacta

SEQ ID NO: 31240 - DNA, 201 bp, Bos taurus
tataaaatgcttggactcagagaccttgcaaggtcattcacatttcatttttgtaattctacaaaatcagaaaaatgttgatattgttgactttgggtgcyagatgaactattctgtttacctttgtgtttgtttcaaactatccatgggaaaagaatttttaaaaatagcacccacagcatatgatcagacatatccctg

SEQ ID NO: 31241 - DNA, 201 bp, Bos taurus
tatatataaacacgagcagagtagttactgggcctgcttgagatgtcaactagcacctgttccccctgagcggacacgaaggaaaaagaaagacaaaagcraggccacttgtgccatgactctgtgagtcctgccttctccacttctgttttaccttggtgggcaggtgacaggcaggaatatgtgtctatcccagcaggt

SEQ ID NO: 31242 - DNA, 201 bp, Bos taurus
ttagctgtgtattatgtggtgctgccaagattggagacttacatctgcaaaatgtgagcaacaatcctacattagacaggagttttaagttcaacttctgmgataagaccaggaatattaatagtatgcttgtatagaatataactttgaacttccccatcaaaagtatagactaactttatttttcaccttggtggcata

SEQ ID NO: 31243 - DNA, 201 bp, Bos taurus
gggagagtctgatggctcttaaagtagccctggaacagcagtgtgagcatcattagggcctgagaggaatgcaatgcatattcccagggccaacctagccytctgtctggggaagctctgctctccttcccccagccctgcatgtcataagaatccacatggtgcttggaaactagctggcataggaagagccaccttggg

SEQ ID NO: 31244 - DNA, 201 bp, Bos taurus
cctcctgattcagcaaatggcctttccatctgcccctttcccgcttgccgagaatctgggtaggtcaagggcacctctcctcactcactgcatgcaatcartcttaccatttctggccctaaactatcgcactctcttctccttctctccccagtagaaccccaacagccccctaagttgacctgcatcctctgctcacag

SEQ ID NO: 31245 - DNA, 201 bp, Bos taurus
aggaaaggaagatctgggtttttaagtctctgccttcttcctccagagatgcctctaggcatcagctttctcactgaagatcaacctctctctgaggcccrgtcaccccttcttccctgagcccagggttggggagggctttgctgctactaaggcgctggagactgcactgacccaggttctcctaggcctgctcccttg

SEQ ID NO: 31246 - DNA, 201 bp, Bos taurus
tataattagaatataaaatctttaaagttataaaaagataaacagtacaatataaacaaagttaaaagacaagtataggccaattttcacacacatacagmacacatgagtacacacatatgccagttcagttcagttcagtcactcagtcatgtccgactctttgcgaccccatgaatcatagcacgccaggccttcctg

SEQ ID NO: 31247 - DNA, 201 bp, Bos taurus
cagcaagcacctttctgcagatccagagtggctctgagcagctcaaactgtcctgcatctgcactcgaagaccaacacccagagccctttctgcagcctcrctgccttgcagtccctgcctgctcagcctctgacctttctgtctatttcaatatccttctttcttttcattttaatattgtttttattgtttttaaaaat

SEQ ID NO: 31248 - DNA, 201 bp, Bos taurus
ctacagtccaagggattgcaaagagtcagacacaactaagcaactgagtgcacacacacagagctaagtttcaaaccaaagacttatcaacactttttttycccagtccacaagcatttcacatggaaagaaagctaattaatgcatgttctctccggtctctgagccaccattgtgtgtaggcatttttataagtgattt

SEQ ID NO: 31249 - DNA, 201 bp, Bos taurus
agtactggagtggggtgccattgccttctccaaaaaggaacactatttccaattaaatgagcaggatggatgctatctgtcacatagaggaatttattacrggaacacttttccattttgcagagcagaaggtgtgagtgggctgtattctggtgataatttaagggaatatgtaggagttgtacttaagctttcaaagtt

SEQ ID NO: 31250 - DNA, 201 bp, Bos taurus
tgagagagggcaggcccgccaggactttagttgtcaaagaagacatttcaaggtcactagaatccattgttctgctccgataacatccttcctccttgctkagaaagcctttctctgtctgaggccagcagatccttgttcataagagcccctcggctccttagtgagtccccgggggtcatgctcaccactccagcctgg

SEQ ID NO: 31251 - DNA, 201 bp, Bos taurus
tcaagctgctctaactttatggattcattttctttctgttgagaacaaaataagacatgttgttctatcatcaagcatgtgggtagggtggggtttaatarcttctcttctgttcaatattttttatactttctaactggaacattctgtctctttacaacagaatgtgaggctggggcagcagtaagttacttctctctc

SEQ ID NO: 31252 - DNA, 201 bp, Bos taurus
ctgttttgtttacagcagatgctagaaaaatatagccaagaaagaaaaaagcagtcatcacttatctgcatagcctcccaccagtttctcaaggagatttkaaaaatactgcatcagccatacaaatagcaccgaaatgcaaaggggtcatcctttcttaaagatgcacaatccttgggtcatatttttttaatcttttca

SEQ ID NO: 31253 - DNA, 201 bp, Bos taurus
tgactcaggctgagagcctcgtccacagagaaacccaggaactcactagtgtacgggcccaggtgaagacagggagcaaccccagctcaacaagtttctartcagcagactggaacacagggccccaggcagacgctggcaatgcctggccagcggctctggcgggagcagcgtacctaccccatggccttcgtgtacccg

SEQ ID NO: 31254 - DNA, 201 bp, Bos taurus
ttatcatttaccattttttaaagaggtggtggctaccctcatcttctctcaccccagagtgagcaaaacggtgatgggggcccaataaggagcaaagaacyaacaaaagaacgaggactggcaggggcgccctcggcgctgagctccaggaagcccctctggccgcagcacaaagggctgggaggcagagatgctgagaca

SEQ ID NO: 31255 - DNA, 201 bp, Bos taurus
ttggttctcccttgagctggcccactgttctaatcgcgtttcccactctaatacactttatttatttctaaaaaaaaaaaaaagaggcaggacctggctgygggccctagagaaagaggacgacctgggtagagtatggcagccttgctggggctagaagactagagaaagtttcaggaagaaaggcagaatgcaggaaaa

SEQ ID NO: 31256 - DNA, 201 bp, Bos taurus
tggagacctacaagtggccctttactctcttccagttgacattcactatggctcccacgcgcctccttcacataagtccctggtctggaccttcagttccyacctttgctctggcctgagggcctatcttcacctgacactgcaggtggtggtgccaggaggctctttctcaacaccaagaagtggaacttactacctatg

SEQ ID NO: 31257 - DNA, 201 bp, Bos taurus
gatgggggaaacgaactaaagcagagagggcgtgcgtggccgtggcaccatcctgctgaccctgcaggatctggagtgggaaatcagggtctgactcttcrgcagtgatgctatactgggccccgggcaggtggttctccaccaggggtccctgccgcctcagcctatcctgacgggctggcagtggagccctcagccctc

SEQ ID NO: 31258 - DNA, 201 bp, Bos taurus
gcagctgtctccctgcagcgcggaagcaggagatcatcaagatcacggagcagctcatcgaggctgtcaacaatggcgacttcgaggcctacgcgtgagtyggggcgcctggcctgttctggggtgtggggggtggacctggagggcttccccacagggagggggctggatggaagcacccggttctgaggggcccctcct

SEQ ID NO: 31259 - DNA, 201 bp, Bos taurus
tgagggggctggtgactgctgtctgtgccaggcctgtatctcccctcagggagcagggctgggactccactcagctttcagacctgcactcaggaagtcgygcagacctgggcccatgaggagacgcctgtctgctgaggagccctgtcatctaagccaaactccccaagggcagcagcccaggccaggaagaggcaggcc

SEQ ID NO: 31260 - DNA, 201 bp, Bos taurus
ggcctggattctgtatttttatattatagcaagaagatttttgatttgcatatgctttaatagccatattagaacattttgtatatccaatctcttcctgytccttaatttggcacttgttctataaaacaattttgaaaatgcaaattactttacattaaaaatataaattcttatggcatattttatacagtcttaatg

SEQ ID NO: 31261 - DNA, 201 bp, Bos taurus
agaacaaataatcctaaaatttatatggagctgtaagagacccagaattgtcaaagcaatccttagaaagaagaacatagtggatggcagacttcagacamtactacaaagctacagtaatcaaaacagcatggaattggcacaaaacacatatatatcaatgaaacagaatagagagtatagaaataaatccacacacct

SEQ ID NO: 31262 - DNA, 201 bp, Bos taurus
ctctgtcttccgagtatgtacctctctaaataaacctgctttcactttactatgtttcactcttgaattcttttcctgcccaaagccaaagactctcacgyggtgggccgtcccagggactcactcgagacctcaccatcctctcatatgtcatttttcctagaacaacataagtgagctaaaattggcaactctgaagtt

SEQ ID NO: 31263 - DNA, 201 bp, Bos taurus
caccagactcctctgtccatagaattctctaggcaagaggactgaggttgggtagccgttcccttctcccagggatcttctcgacccaaggatggaacccrtgtcatctgcatccgttatcaagacttccttcatgtaccttaaaaaagattcacccatctagaatccagctcgggtacagtggctcaaagtatagagact

SEQ ID NO: 31264 - DNA, 201 bp, Bos taurus
cttgagtcttaaagctgaggtattaactgtgctgagtgtaggaacccgtgttaagaacctgattttgtgattccacagcctggccttttctattgtgccarcccctattttgtgagtaaacatttccagccacagtgttaagtaggtgaaatttgattgtcggggcctgtgacaatggaaatgaaatgcaaaattaagagt

SEQ ID NO: 31265 - DNA, 201 bp, Bos taurus
cagccaaaaaaaaaaaaaaaaaatacgtagtgagcatctcctagatgtcaggtacagttcagaggacgcagtgtgaacacagtcagtaactggcccctcayagagcttaccttctagtgtggaagaagaggtagctttataatggtgtccaaataaaaacagaaacacggggacttcccaggcagtccaataggttgagac

SEQ ID NO: 31266 - DNA, 201 bp, Bos taurus
tgatggtaggttttttgaagtttcttagacaggagagatggagacttgtggtacagtggatggcacccagctcatgaaacaacctctggctccttccttaktatacactgtggccttggctggtcctcagaagggaccgtgctaggtcctctgtgggcagagagtgaagctgacctttttatactcactttctttcccttg

SEQ ID NO: 31267 - DNA, 201 bp, Bos taurus
acaatgtcatattcacatgtactttttatataaaacttgagatgaatgaactcaagctatgtgtaataacatgcattgtcatagtcttttatatccatctraatttagaatataataatgggaatagttcaaatgacagggaaaggagttatttgaacaataaattgtttaaaattggttttaaatttaaaaaaaaagaaa

SEQ ID NO: 31268 - DNA, 201 bp, Bos taurus
gccaggatactggagtgggtagccattcccttctccaggggatcttcccagcccagggatcgaacccaggtctcccatattgcaggtggtttctttaccarctccaggggacatcagtcaggccctacccattgacttgtgcaccatggcaaccttcagaaaagaaggcctatagtctttcactattgtgatctgttgggc

SEQ ID NO: 31269 - DNA, 201 bp, Bos taurus
ggagaaaagatctacgtatgtatatattttcccagagtattttttttttaaaggaagaaattttcacgaatgcaattacagtgtttggtgctttttttttraagtcatcagcaaattcctcaagagcacttcattctcttaagaggactggattcctaaactatgctggtgcagaaaacaatctggcactgcccacttgtc

SEQ ID NO: 31270 - DNA, 201 bp, Bos taurus
aaagggaaaattcccaagatgctaacctttttgaaactgaggttgcttccacggtcccaaggaacttctcctctgttcctctccagatgagagaaggccgkgtattgtggttactgatgggcactggattcccaccactgggatttttcagacattgtccagaggtcaaggctgatgcaacttggccaggtattaatctga

SEQ ID NO: 31271 - DNA, 201 bp, Bos taurus
aacattgcaaacataaaacagcaaaaatctgtaatgtaaagaacgaagactctaaccctgatctaaaccagactgttttccccttggctccctttcttttycccttaattaagctaactggaaaggagaggttttcatccagacaaaagggcatctccctaccctaatccctaggacaaaacagagaatctggtctggaat

SEQ ID NO: 31272 - DNA, 201 bp, Bos taurus
ggtgagtttgagactatctccctaaccaaacacgaagtgcgggtattttatgtgcccagtgcagtgcaaagccgtatattctttgttcccagtggcctacrtaatacaaacaatgaaataaggtcaaaggagaattcagaaaaaagtctaaacagtcaaaaaataaacgcaggttcttgtagtgttggtggccacataaat

SEQ ID NO: 31273 - DNA, 201 bp, Bos taurus
attgaaagtaaaattcttaaagtcctccatgcctctctagtttgtctggctatctgcatgtgtgcatttatataaccacactcccatgaaccctcaaaatygtaatctgcaaacaggcctgatccaacatctcctctggaagcccactctccctgaccttgacccatctggggactgacatgctgaacagaagtcctactg

SEQ ID NO: 31274 - DNA, 201 bp, Bos taurus
accctgtagaatcaagtggttgatttcttcatgtgctgctgtattatttcagttgggcagcagtgggcccacatgcctcacactagaccacctcagatcakgtatgccttttcctttgggaactaagcaagaatcatgccggaagagcttgaaaacacaagctgtagctttatttgaagtgccactgtccagagagaagta

SEQ ID NO: 31275 - DNA, 201 bp, Bos taurus
tctcatgacacctaagaaggagacagtgagggcagagaaaccatcaacaccaccaagcagatcaaccaaactaactcttacagaagcttactatgagctgrgaactctactaagcacttttttaagttgcctttgaatatttatgaaaaaaaacaaaaaacaaaaaacatagccaatgtttactgaatgcatgctgtatgt

SEQ ID NO: 31276 - DNA, 201 bp, Bos taurus
aaaaatctttcttctaaggtagaatgatgacagctgaagctgtgatgaacacgaggggttctttcaatttttatgtatatttgaaaatttgcataacacamaggtgaacaaattagaagaatacaatagtaaaatatcctttgaatatatcatattttgttttatttttttaaatatccagtttatgctgaagatttctaa

SEQ ID NO: 31277 - DNA, 201 bp, Bos taurus
ataccgggcttcctcacttgttagtaaggataattgcaaggattgtagaagtattgtaaggattaaataatacaagacagcaaagcctcccatctactgartgcaaagtcacctgtcactgtggcataatgctgacaaactgatactgctcacagtcaggggtggagtcagacctggcaccttcctagcctagtccatgct

SEQ ID NO: 31278 - DNA, 201 bp, Bos taurus
aaaaacatcaggcttgaagaaactccccccggaatgattttttccaacatttgtgtttgcttctaattattttcaacacttctgaaaacgctaggaagggwgaagaaacaccttgctgacaatgtgctctttgccaaaataatcaatcctccagcttctctcgccttctaaaattctaatattcaatacaagctttttggg

SEQ ID NO: 31279 - DNA, 201 bp, Bos taurus
ggccagaggggcaggatcagattggtttttttcaatctccaagtgtgtgggaggaattttcccagaaaaacgagagattagaacaacaaaagaggtaagtratatagaagaatgtaaggccaattaggtgctgtattcatagtatttcttattaatttcaaagggagtagctgtcagaaacaaaccaatttattaaagtag

SEQ ID NO: 31280 - DNA, 201 bp, Bos taurus
ccagtagttaggactcagtgctttcactgacatggttctgggttcaatccctggctcctggtcaggtaactaagatcatgtaagccacgcagtgtggccaragagcaacaacaacaacaaaaaggtcataatagttctctctttctctctctctttttttttttggatgcacagcatgtgggatcctagttccctggccag

SEQ ID NO: 31281 - DNA, 201 bp, Bos taurus
tccaaagtccagcaaaagagcaattgtggttatgttgcatatgtcagtgtttcctaaactaatataaaacagtaaaggtttttaacagagcaaatattaayatcctctaaactgccatcatacaaaacagactgagaaagtaggttgtagtcacgtggaaacttgtcttcttgaatgttgaactcaacaaaatgaagggaa

SEQ ID NO: 31282 - DNA, 201 bp, Bos taurus
tatagaataaactcttaagcaactcagcgttgggctgctacccacccatagtgggaactccacatataacaacattataatcggccctccatacttggggytccacatccacaggttcaaccagctatggattgtgtagtaccacagtacatatttattaaaaaaaactttacacacgttgacttgtgtagttcaaacctg

SEQ ID NO: 31283 - DNA, 201 bp, Bos taurus
tgccaaagttaaacacctttataaaggaagagagcgtcagatcctgagctcctagaagcacttgcctttctttctccataaaactgctagagccacagatsctaagatttgaccaaattcactgctgaaggaatagaaattccttttgtccttgaaaaataattctccaactaccaaaaacattcaactgagtccttcaaa

SEQ ID NO: 31284 - DNA, 201 bp, Bos taurus
aacaaaaaatattaaagaattcaggaaaaaaaatattaaattgagttaaaaagaataatttaaaaaagaaaaagaaaaaattggagaatatcattatatakcccaagaaatgaattagaattaactagaaataatgaagcattttggtgacattgccaattatgagccatatataacataaggagttaccattggggaaac

SEQ ID NO: 31285 - DNA, 201 bp, Bos taurus
ttacgttcccttataaaattttgaaaatgacattctgattcactttgagacaacttagtctaacctttgtttagtatataatgttcaacatcatgcccccrattggtgttaagaatgggtccatacagcaagattaaaattatgccaattataaatgtgctcactgcttatgaattaagaaattaaagtgaatcggatctt

SEQ ID NO: 31286 - DNA, 201 bp, Bos taurus
taaattaaacatgaccttattcatgaatattattgaatattttctaaggcactgctatctgttaattttaaaaacaggtaaaaatggggactgtcctgacygcaatgatggaaggtccatcaataacatgaaaaaaggagattttgtggatcatactgtcatgagtttgttaactaaggatgcttgaaaaatagaggagaa

SEQ ID NO: 31287 - DNA, 201 bp, Bos taurus
tccaggttctgtaggatgattgatgtgtctgtgctgaggaaacagggaacactcaatggaggggaaagaaataaacaagtctggccagcacactgtgattyggcagaaaactagtagaaagctctctgaagggatgcatttaagttttattttaaaatttactgataaaattttcaggcccagagctgaggggaaaaactt

SEQ ID NO: 31288 - DNA, 201 bp, Bos taurus
ccacaagggaggagaacaatccttctctcctctgtgtggctgtgcagtccttagggctatgcctggcagagcagagggagagatacgggcagggctgcagkatgccccgcagctttgggagggaagtgctgagtccactgaagatggagaggcacaggctggcagtgggaaaaacggattgctctcaacatggacggtgag

SEQ ID NO: 31289 - DNA, 201 bp, Bos taurus
ccccttttgcgttatctgggagctatttattgccaagttcatgcctaaatggttcctgagcaggaaacaggtgaccagtgccagagcaggtggggccacargctccctgtcccatcattacattggttgtggtttgcctgtggttatttttttttaatgtattcatgcctgaaaagtgaatttgatatgacacatgataat

SEQ ID NO: 31290 - DNA, 201 bp, Bos taurus
ggagctaaatatttttggaggataaattgtctctggttctttatttcaaaaactgctttgtattcatataatatactttttttttttttttaagcaaggamacttttagatgaagcaggatttggtaatcacagagtctttagcatcagacaaagccaaatccgaactctagttctttccttgactgtgtgaccttcgagc

SEQ ID NO: 31291 - DNA, 201 bp, Bos taurus
tgagaaagctaaaaacgcaagatatatttccccttaatttcaaaacatgaatagatgtcatgtaacttctgtgacattctctcttataacttagattttcrttaattcatcaagaagaagagagaaagtttacttaacagagttaatttttttgcttcaaatttattcatacatgtagacaccccatatgtacttttaaaa

SEQ ID NO: 31292 - DNA, 201 bp, Bos taurus
agaagcaatattgtttaaaaaaatttcaataaggacttaaaaagagataggaggggaataacacaagggtttgaatcccaggaggtagcttgtctcagagkatgtccatcacagctcatttgcccctcacaaacttctcatccaaaaagtaatcactgttaatagtttcttatgagtctttacagaggaaaaaaattggat

SEQ ID NO: 31293 - DNA, 201 bp, Bos taurus
tcacctaaatggtgaaagaatggtggagaagaagaggaaaagctgagacagctttggcttacacttggcaaagctgggtcatgaaccagataccccctccycagttatttgagcctggattttgttgaattattcgtgcagggcagtttttgaggctgttgtatggatcccagtaacctgagctgcacctggcagaagtta

SEQ ID NO: 31294 - DNA, 201 bp, Bos taurus
agagattgtttaaaaatgtgttcatgaatgttggaagccttgatatggggcacttaaaagtcacacctcactttaacatgtggagaaagaatgaaggccarcgtgtaatctatcctttgttacttaatagctgggacttttttcaagttacatgatggcttgaatttctcttcccattgaaaataagaacagcagtggcca

SEQ ID NO: 31295 - DNA, 201 bp, Bos taurus
cttttagagggagaaggatacttaacacagagagatgggaatatttctcagagattgggaggggcagatgtctgtgggtttgggaatggttcatttttccrtgtggggattgcagagaggcatcaggtccttatgactagggttcccatcatccctgaaggttcccaaatcccaaatgtggtgtggatgaagcagaggcca

SEQ ID NO: 31296 - DNA, 201 bp, Bos taurus
tagaaagactcagaagaggcagatgcatgcaggatctaaagaaactaaaccaagggcaacagagttcccaggtttgtcaaatgtcctgcactcatgagcaygatcttgaagctgcaaaatcactcactgagagattgctttaggcagctttgatggcagaatctagcctttgtagataaagtaacagagtttaagccgagc

SEQ ID NO: 31297 - DNA, 201 bp, Bos taurus
ttaaagcaatgacttaattttatctatttctccatgaacatataaaaataactgaacatttcccctaactttctatttctatttgttatctaatgcttgaytaggaagaaagccaaaggggatagtctgtcctcttatcatgatatatttttgcttgtgtgtgtataaatatatatatggaattccttacatatattattt

SEQ ID NO: 31298 - DNA, 201 bp, Bos taurus
ttacactagatttcctacctactagagtctttttctgggatattgtgagtcagagtataatacattcttttgcaggctagtgcaagactattttaatcatytaaaataaggtagaaaaaaattcctttttctctttaaaaaagaaaaaaatgatacttattttagctttatctacctatgagttcctccaaattcgttttt

SEQ ID NO: 31299 - DNA, 201 bp, Bos taurus
atgttaggatatcttgttaatcactcatctatccccatgaaagaatagtttaagatgatctttattgctatactcaaagaacaagaggtgcattttcagtmcatgataattgccctgtaacttccctaggcacagagcaggcctaacgacagtatctatttcctcatgttggcctcatctcacagcagttagcctgataat

SEQ ID NO: 31300 - DNA, 201 bp, Bos taurus
aaacttaaatcccctcaaaccctaaaactggcccttgggaaaacactagtaggaaatgaattaatgctttgcagttgtaactttaaactctcttttaatayttctcatacagtactggatatctatagtggagttaatagtctgtaatactatgttttatgggctctcctaggggttttttgtcttgcttttcatttacta

SEQ ID NO: 31301 - DNA, 201 bp, Bos taurus
tgcattccatggggtcacaaagagtccatcatggctgagagagtgaaccctagactgacatattaaaatagcactgcttgtattttcagtgtatcagatayacacaaaaatctagcaccaccttctgctggccagactctgttattattgtcacatatttggtataatctgctggtgacaatttggcaatatctatcacaa

SEQ ID NO: 31302 - DNA, 201 bp, Bos taurus
taaaaactttctgagcagaggaccagtaaatagatgcacagtgcaggtaggtaaaaaaaaagaaaaaaagatgtttacacaaaccgcaaaggggaggtgamgggacaaatcatgagagaatgaggctaaacagatgtattttttccccctcagtgataggcaatagcacagttcagtttcattgtaggttaatgtaatggt

SEQ ID NO: 31303 - DNA, 201 bp, Bos taurus
cctagcaggctacagttcatagggtcacaccgagttggacatgactgaagcgactcagtaagtagcacacaggcccttcttggccagtttgtagatctatscttcacattgtcagaggtcagctttagccaggtggagatgctgtggctgtcgggcagagtccactgggacaggcccttcctgggagtgtgcacaggaccc

SEQ ID NO: 31304 - DNA, 201 bp, Bos taurus
tcctctaaaaagacaaaataaaatatgattcacgttcaatgcagttgtcagctgctgagcttgaggctagaatgcctttaaccttgagaagtgagccatcyttgtacttgtgtgagtccatagagtctcatctcaggaagcagaaccttgcttagtgaatgtgtaaggttgatagtctgagctcaagtctttgatatgtgt

SEQ ID NO: 31305 - DNA, 201 bp, Bos taurus
tgcctggaaaatcccatggacagaggaccttggtgggctacagtccttggggttttaagagttggacagaatttagcgactaaaccatcaccaccagcacyagtgttgagagtacctgaaattccatccactcttgtataattttggttgttttagtacgtagacaagaggctcagtggtaaataatctccccaacaatgc

SEQ ID NO: 31306 - DNA, 201 bp, Bos taurus
tcctactttgatattctgaattaacagttccagtaggattttccaagttctttcttggatgaaaatttgtacttgttataatgtttgctcatataggtagktagtgaactaggccaagattagtcaaaattatttgcaaagtggacaggcttaaagatgtgcctgaaagagatttatatgttaagtaaaagtaaacaatgc

SEQ ID NO: 31307 - DNA, 201 bp, Bos taurus
cccccaagatgtcgtgtgggctgagtgcccacatgcaacctggatgggtctcactggccctccaagtccatagcgggggcctgatggtaccagagaactcrgcaaaccaaagagaatttagcactggacaaactgcagtcttcacaggaaatgccgtggggccttgtgacaggaaaggaagtagagtccgaatctcaatga

SEQ ID NO: 31308 - DNA, 201 bp, Bos taurus
ttggtgtttatggcccaaccctcacatccatacatgactactggaaaagccaaatcccattattcaagagtgctagttatttacctatttttaaatctccyggccccctctccctttcccaggggaagttggtagatggcctaaagttccaactctcatcacttgttttttcaggtgaccagccccatctggagcctatct

SEQ ID NO: 31309 - DNA, 201 bp, Bos taurus
ggctcagaaacattatattcttacctgtctcagagtaaaatacagtaacactttctttggttttttaccagtgtgaatctgatttccattacatctcagcrtcataggtaataacttttggtcaactggaaagaaggacttttggaaggcaagactttgaaagaccaataaagccactatcatagaaaaattgtaatgggt

SEQ ID NO: 31310 - DNA, 201 bp, Bos taurus
tttgttttacctttatttcaaaatcattgacctaatatcatgatatgttgacctgttctgctagcactattaaaattttacctcattagcattttatgatrattaatagtattgaggcaggatatagaagagccccaagttaagcagccagaattagtcccctgtggacaggtatccccaaaataacaggagcgagagagg

SEQ ID NO: 31311 - DNA, 201 bp, Bos taurus
tagttatattttttaaaatttactcattggtttaagtgggaccacctaaaaaaatctgagagaatgcacacacacacacacaaaatccaagattatgatcrtcaaggactctttctaggtgcccagcagtgttggcaacaagcaaacacaaagtatactgtaaagaaaaattgacaatgtgatttcatgtttttatttatt

SEQ ID NO: 31312 - DNA, 201 bp, Bos taurus
atttctaagataaaaaaggataatataacctttgtgtgaagctacgatgttgatttttttctttctgtaaagcttgtttggtcagaccatgcttgaaaatkaatgtttcagcagagagcaaagaaggaaatttcaatgtattaagacaaaaacctgggaagttgggacatttatgttttcttagtaaggaaactctgcttt

SEQ ID NO: 31313 - DNA, 201 bp, Bos taurus
aaaagatagcaagttcttattagttttacttttttccttttctccttttgtgcagtaggtaaaactaccaaaaggaaaaaaagaaggagtgtccatgcctsgaattcatctctttcagtgctatcagtgtagagttttcactgaagcccagggaggctgacaaatcacactcctgagccgcggttgttagccctttctctt

SEQ ID NO: 31314 - DNA, 201 bp, Bos taurus
tactggagtgggctgccattgccttctctgaatttagtgtttaaaacaatgcaaatttactttcttacagttttcaaggcctaaagtctgaaatgagcaayatgcggttaaaatcaatgtgctgtgctcttctgaaggctctagggcacaatttgttcccttgtcttttccagcttccagagtaggcctacatctcttggc

SEQ ID NO: 31315 - DNA, 201 bp, Bos taurus
atctaagtttcaattaagtctcttgcccctgaccctgtgtcagcgcacatcctctccagctatgaccgttcctccaccaggtcaacctaaacccagggagytgtttgcatgatgtatgaacagccagcagagtggtaagcattctggactcagtcagtgtaatagataaatgagaaaagcatactgatgaagcagggtcgt

SEQ ID NO: 31316 - DNA, 201 bp, Bos taurus
agaccaggtcaaatggttaatttgataggaaagccacttcctagccacaaatatcctcaatgatagtagccaggtatgaaaaattcatccaaacaatttcrtcagctaggaacttacctaccacaggacctattactgatgttctatgaccagagatctattaaatcacaaaatggaaggacattgttatatatatatata

SEQ ID NO: 31317 - DNA, 201 bp, Bos taurus
atctctttgactgaatcctgtagaatctattttctcccttcttttaggtgcagcctttctgatagcatgattacccccaccccatcaccaccatcagctgycaactgagtttactaatccccactcttcttaacatcttactgagctttgggttcagccagccctttattttttctaataatcacaagtatgctggccctg

SEQ ID NO: 31318 - DNA, 201 bp, Bos taurus
agaggataagattggcgcagggtaaaataggcagtgatgaccctctattgtgtttgactaaaatggtacaggcatagacatcagagcttgctggtcctctkctggttaagggtccacagtcctgtagctgattgatgtgtaaagttctctggtgacatctcatggcagtgtatctctgtgcttatctctctttttttggtt

SEQ ID NO: 31319 - DNA, 201 bp, Bos taurus
ggagtgggacctggcccactttaacaatccaactgaaaagacatatgggaaaaagatggctttggggcagtcttgatttttttttttccccaggcttctcrgagaaagaagactctaagaggccacacttaagcccctgccaactttagcatgaacaaccaaatgtctttggaattgaagtgaccttactcaaccttgtgg

SEQ ID NO: 31320 - DNA, 201 bp, Bos taurus
ccttctccgccatccgtgtttatgtctctgaacgcttgtaaatctcctgggctctgagcacttgcctactggaataaaagctgtctctggagacagctccrgtaaaagtcggagttattagcagagctcaacagacatacctggaaagagcatatggcagggctacagatttgtcagaaagatttaagagtatccgtttat

SEQ ID NO: 31321 - DNA, 201 bp, Bos taurus
atcaccatttcacctctgtttctctgagtttatcttttttccacatgtaagtgatatcatatagtatttcaaagttccctttatatggccttattaaaaaktgttgctgctgtatggtgttgtatacatatgcatatgaagtcctggataatatacatgaatctatctcagaggttaggctgagagatttggtgggaagat

SEQ ID NO: 31322 - DNA, 201 bp, Bos taurus
taaatcttagttcattttccttaaggtagctatgttggcaagtttcatgccatcctaaaacaaagctagtgccacaggacaaaggccctggaaaacttccyatccctcccccctcttcttaaggcagtttcagtttcagagtaaccctaggcggaggagtatggactatagtggttgacctcatagtctttgaagtccaga

SEQ ID NO: 31323 - DNA, 201 bp, Bos taurus
tctttcgtacaaactctgacctccaagatagtgactaagtcttctccatctttataagcccactattgctcattgaattctgtcttaaagatactcattaraagtcttctgaatcaaattcccagatatcaatacaaaaccatggaaatggtttggtgccagagacttaagcagaaggctctgttgctggaatcttttagg

SEQ ID NO: 31324 - DNA, 201 bp, Bos taurus
ttgaatgtggagattcttacaaataatatcatcctgagaatccgtggttgagcaactaatcacacactatgtgtctgacatctccaacaagcaccaccagmtccatatatacaacttagcaagaaatactggactcttctccttcctggatatacacaaacacacatacactccccccacaagatacagctgactcctttc

SEQ ID NO: 31325 - DNA, 201 bp, Bos taurus
tcaacagcaatggtggtgaagatgacatgataataacaaacatacattgagcatctatgcatacgctcaggctccatggtctatggcccatttttatcaartgttcttaatgtcattggaggtagatatttttattaccctttcttaaggaaaaggacactgagctcctaggaactgccaagggaagcgatagggccacaa

SEQ ID NO: 31326 - DNA, 201 bp, Bos taurus
aagagttggacacaacttagtgactaagcacaatcaatattgatatgagcttccctcttagcttggttggtaaagaatgtgcctgcaatgggcttccctcrtgcctcagttggtaaagaatctggctgcagtgcatgagacctaggttcaattcctgggtcgggaatatcccctggagaaggaaatggcaatccactccag

SEQ ID NO: 31327 - DNA, 201 bp, Bos taurus
ctttcaccctctaccctttgctctttcattcctggcccatgtcttctttatccttccaaccccccactactcctttgttcctttacaacagatcacacacyacaatggctgttacattttaggccctaaggaatgttttggaagaggtcatttggtaggcatttttcttagtaagtagaaataaaaactagaggaagcttg

SEQ ID NO: 31328 - DNA, 201 bp, Bos taurus
ctttctcatcaatagttgctctgtaaataattgtaattttggtgtgctcataggaggaggtgagctcagggtcttctaactcggacatcttggccaccccycctcccttacctgtttattttgaagattaaaaagagagagagatgtcatggctaaagtgaggaagtctctggctggccagtgctgatttcaggggcccct

SEQ ID NO: 31329 - DNA, 201 bp, Bos taurus
catgtctccttgctctaaaaaacaacccaagatccttgtgcccttcatcttttcagattcctagattccttaagcgaggctgtctccactggagcatagcraacacagatctgcatgccttacatcagcaatcatgccctggtggacttgacattggttgtggcagtttgataggtttagagtcactctactgtaatatcc

SEQ ID NO: 31330 - DNA, 201 bp, Bos taurus
cagaacgagaaaaaaatactgtatattaacacacatatgtggattctagaaaaattgttcagatgaacctattttcaggccagaaatagagacgtagatgragggaacaagagaccaaacatatggacacaaggaagggtgggataaattggggtattaggattgacatataaaatagatagctagtgggaagctgctctg

SEQ ID NO: 31331 - DNA, 201 bp, Bos taurus
cttagagtctgcctacttccttagcttgtggcccctttttcatcttcaaagtcagcaatgttacatcatcaaacctctcagattctggactccttctgccmcatataagggcctttctgattatattggagccacttagataatacaagataactttccatttcaagatccttaatcacatctgcaaattctgttatctga

SEQ ID NO: 31332 - DNA, 201 bp, Bos taurus
tcttcttgagcttgtgtacctctatagttaatttttcactatgaatgcttagaggcagtataagtgcctctaacagatggaaagaaaaaagtcctaagaaygagactaagaataaggagcctcctggttttgctcccacctcatcctgggtatttcaaaacatcacatttgtaaggtgagcaagttgaattaccaacatat

SEQ ID NO: 31333 - DNA, 201 bp, Bos taurus
tacctaaattgtattatttacttctcacaagaactcaatgtgctaaaaaattatttccattcgatagactagaataataaaactgggaaacattaaaaaawttttttaagttatccttggtcacaaagctaggaagaggatttcattcagtactcatgttctctttatttcaacattatgttctgatggcacagaggagat

SEQ ID NO: 31334 - DNA, 201 bp, Bos taurus
tgaatagttatacataggcgcacactctatttttttttttttttccttttctggttaactctttggagttatcagccaaatatttctcttgcatgggaatrtgaaaattattataaaggattaataggaagtcatacaatatttgttaagtaccattctcattcagtgtgtttattttccctgagaacattattagtaact

SEQ ID NO: 31335 - DNA, 201 bp, Bos taurus
atcttggttcctttgtgtctgatgacacagtggtcagaggagtgaatcccggctgccatttcggaatatactttggccaagctactgaactgcttggactyccccatagttagaaagcccactaactcaattggagcatcacctctcttggccacaccaaaacctggctcacaccaccaccaccttttggagaaacgagtt

SEQ ID NO: 31336 - DNA, 201 bp, Bos taurus
attgatttaaaatttatactatcaagcaaaaggcaatttttgtattatccccaggcagttacacattggtgagaaacacagccacataccaaatcctctcyattatacatactaactttcaatttgttagttcatttcatcatcggtcatctactctttcattcaggaaacgtaagctagcagtgcagttcgtttatggaa

SEQ ID NO: 31337 - DNA, 201 bp, Bos taurus
ggtttataatgccttgtatttcattctttcaccacttcagttactttagctatatgcatagggtaaagaatctgaaaactgccaaggcccaaagcaagggytgagtgaggttgggactgtaaatagtaaagccatagagaaaataaatgaatcgaaatttaaaggaaggcaaggccatggatatggactagatttcaaatt

SEQ ID NO: 31338 - DNA, 201 bp, Bos taurus
ttccccacaatagaaatttccagctgcactctcatggtatggttcactgttttcctgtgtcatctgtacgacccacaaattggcaggtggatcagaaagcytgaacatactcagattcaataccgtaaatttggacttggagccctcagaacagtgagaccaaaaaaagaaaaaagtatgttgtcttaagttacccaattt

SEQ ID NO: 31339 - DNA, 201 bp, Bos taurus
taatgtttgtctctctctagatgagtccataagatccatgatgtcagggatcatgcatatttatttctcctctcatctcaccatgtatcaaattccctggmagttatcaagtacttaataatatttgtctgaatgagtaagtggaataggtttaatggaatttgatgaatgtgggaatatgaggatgtgattttgaggatg

SEQ ID NO: 31340 - DNA, 201 bp, Bos taurus
gccacgggtgtacacgtgttccccatcctgaacccgcctcccacctccctccccataccatccctctgggtcatcccagtgcaccggccccatttgaacaktttttaatagcttattaaactctttctaagttctacatctgagattcctcagaaacagctttctttgcttttttccccccttatataaaggccacacttt

SEQ ID NO: 31341 - DNA, 201 bp, Bos taurus
ccctataaggaaaatgcccaccccacctccccccttctgtttcacctctcctttgatgacatattcacatcagcatttctttggtgcttttgctcttatartaggtaaaggcccaagaccttggaaagtttataatccttttcagaattagacattcaagtactcataaaatatactggcagacacaatctttctcaggtt

SEQ ID NO: 31342 - DNA, 201 bp, Bos taurus
aagctactacagctgcaatagccaatttcattgtatgaatataaaataaactgtaaattataaattcaaagtatctcctatatgaaagcaatccacccackgacaaggactagaaatctctaaagaagtttttgtaagtggtaacaatgaataatttagtttagattcctattcctatcacccatatattgggaagttgaa

SEQ ID NO: 31343 - DNA, 201 bp, Bos taurus
catgaatgaaagaggctggtcaccttataagtttttctaggtccagaaagagttctaaaaatatacaagtgaagtcagaaactggctacctgtctctagamggtgggcctcaataagcttgacctaccagaggcttttcttttcttcctgtgacctgaggcctcttaaagttaagtgcaaatcaggcagctagaattttgt

SEQ ID NO: 31344 - DNA, 201 bp, Bos taurus
tttggagatctttaaagacatcaaaggattttaaagagattaaagggtctcttagttaaaatgaggtcattagggtgggccttaatcctgtagacctagtrtcctcataggaagaagacacagacacagaaggaagcagaaggaggaccacgtgaagatataagaagaagaaggcatctcccagccaaggagagaggcctc

SEQ ID NO: 31345 - DNA, 201 bp, Bos taurus
cactgggatgggagacactgcccagaatcaagttgcttttaaggacctaagtggaagaggtgggaaatggaatgctggccgtcagtctcttacattctcaycagataaggttcaagcttaagctggttgcccagctacagactgtgggcccctaatatgagaaactgtgggcaaccaatattgtcttccacagtaaaatgc

SEQ ID NO: 31346 - DNA, 201 bp, Bos taurus
tcaacatctgtatccagaccttttgtaggtctagagagtcctcctccatttttggtggccagtgaagtgacactgaacatcctaaggtgtaaaagcctccytacccagaagactgtgcttggagctctccagggtgctggagaacttgtttggcttctgagtaacctgtatctatctatatcacctacaacaatgatttac

SEQ ID NO: 31347 - DNA, 201 bp, Bos taurus
caagcaagatttaatgggcaactttcactttcaatgacaaagcaagatttaaagaaagtgcaaaagaatgatgcagtcttctgtcgctattgaccatattyagcgaatctaatgtagcaccttagattagacgataagccattcttttatgccgttatgggggaaaaaatactaccaagtcaactggaacttggttccttc

SEQ ID NO: 31348 - DNA, 201 bp, Bos taurus
gtgcttgatgtatggtaaatactacaagtttagctttatagtaattattattgtaaataggaattcatgtgctactattgatcatttagggatttttctakattgtttagttatatcacaatagcatctctaaggatatgggatttgagaatggttgtttcgttagttgcttttacttccacaggtttacttccttagaac

SEQ ID NO: 31349 - DNA, 201 bp, Bos taurus
cccctcggccccagccataggtctgtgtgggtctaattctagtcctcaggcccaagggaaggaaccctcttcccttccaggcccctgggtttcaggccacktgacaataacctcacagttaccttcttctctcttgctgaagttctccatgggtcataggctaggaagcccaggtcataactatgacctccagagaagtac

SEQ ID NO: 31350 - DNA, 201 bp, Bos taurus
ttcaaggacatggttcacagaattttcagactctctttgatgtccgccaatgggtgttttagtcaaaacccaggggaaagaatttcagtccaagaccctgygtctcatcaagtgtgctttctccaggaactagctgactattcagaacaccacaccaaaggaagcaggaacacatgctaataaacttaattaactcattta

SEQ ID NO: 31351 - DNA, 201 bp, Bos taurus
gaacgctgtgcagagtctctggaaagccttggcggaaagttagcacaaaacacgagggttgtgaagcaaggccagatcttccgtggccaaggactattctycatttgaaaaacagctcctggtaccactgagacctcatagaacttgactgatcttgggccatcaactgactgtacaagtgactatgagaactgcccacta

SEQ ID NO: 31352 - DNA, 201 bp, Bos taurus
tttctttgtatatatgtattttaatatgggattccatatgcattcatcttgtatcttttctgttcctcttccattgcagaggcagctgtattaactggaayggtgcccttctgtagcccactattggagtgtgcattgcttaatcctctcctgcttatttaaacttgaagcctctaatgaatgaaatagtttttgactctt

SEQ ID NO: 31353 - DNA, 201 bp, Bos taurus
ttcccctgggttttgtgtgttcaggttattcttaactggcttactcttgggaggaaactgaggcaagccgggagctgctggtgcagagtcattgttgagarcctgggcttctattcattctctgggtgacagcgagctgcccacttaactcttgatcatttgttgccatcagatgctggagggatgtttgatttcaagtcc

SEQ ID NO: 31354 - DNA, 201 bp, Bos taurus
tcacggccatcttcctagcctgttggcattttccaccagccctatagtagtgatggtggccagcagcagtgcccaggactgggctgcccaccactctcccygccctgagagggagcgttctctatttggccagcctaagagtaggaaatgacaggaccttggatgcaggagagggagtgtaaatggtgtggtaatttgaaa

SEQ ID NO: 31355 - DNA, 201 bp, Bos taurus
gagtagtgccaagttggcactgccttctctctgccaggcttcttgatctgttgtttagtttcttcgtggatcagcatctttggccatcaggctgcctcacrcaactcattaattgtttccagttttatgctgtcagcttcagctatagctcggcttctcttccttgcagctggtatggcctcggctcatcatccagtactg

SEQ ID NO: 31356 - DNA, 201 bp, Bos taurus
ctcttgctttcctccccttcccttcctccctcccctcgcactcactcagcccaggtcatttttccagactgactcccagatcaccagccttctccagctcyctggggcctgcccagccccctcttcctcctcagcctcaagtcagggcactgctcttagatctgtagtttcttagatctgtgggtggatgttttttcacca

SEQ ID NO: 31357 - DNA, 201 bp, Bos taurus
tgggtctcagcccctcggttctgacttcctgctgtacccattagggcaacatggcagtgacagtgacctatggtggcgaccctgtccccaagagccccttygtggtgaacgtggcaccgcctctggacctcagcaaggtcaaggttcaaggcctcaacagcagtaagtggggaggagctgcccatgcagtgaggagggttg

SEQ ID NO: 31358 - DNA, 201 bp, Bos taurus
atgtcatagtctctgtgccgctggcaccacgctgactcctccaccgatggggaggactcaggctggccggagaggcgaacacactgcaaggcagggccccrggaggcagcccccctcccagcccagctgttccctcagactgggctgagcaagaggtaaggtcccacctggctgtccccaaacccttagcaccccaactta

SEQ ID NO: 31359 - DNA, 201 bp, Bos taurus
ctgggcactgctctggggagaggcccacagacaagaatccttagcagcgtggaggtggcacttagccgccacaacccagaaagattctgggcagggaattycaggggacattctgaagcaggcctggatgatggtgtgtgtgtgtgtgtatcccagtgcaggccaggaagcccaccaagacttgtgtactcccagaagcct

SEQ ID NO: 31360 - DNA, 201 bp, Bos taurus
aaggaaccaagggttctagatctggggcaaagcagtaactagatgattactagttacctttttctgtgaggaaataaagatgtgctccagtggccaaagtygtaacatttaaagcatcaaaaggataacttaagcaaagaccctgaatcaatgaaactcatgggcccataatacaccataaagagaaagtcaaggagaaaa

SEQ ID NO: 31361 - DNA, 201 bp, Bos taurus
gtaaaagccctgttgcttgtttattaagttatgcaacaaatggctaagactgttagatataaagtatgaggtaagaattccatccaggtcttttgagattkcaagattcagaacaagggatccaaggggttggggaaaaagagatctggactgaggcaggagaggaaagaggctgacattgggactggagagagaagagga

SEQ ID NO: 31362 - DNA, 201 bp, Bos taurus
agacttcctgctgctgccctttctggtggccctttttgcccaatgcttttgaaaagttctgtgtcattgtcagacctctgtatagcaaattgcctgttgcraatggatgctgaacaggccacaggggcttcatctttgtggaaagaaggaagtggctggagggtagacttaagaggctacccttccaggcactgcagccta

SEQ ID NO: 31363 - DNA, 201 bp, Bos taurus
agcttaaaactcatttcaagtctcctccgtgtaaccctgttacaacttgtccccacagaagcagtcagtagggctccaatagccagcagtggccaggatgrtaagattgcatctcctacactgctgtcattcccttgggattctctgcacactccctctgacagcaggccccctggggaaacaccaacacgcccccacctg

SEQ ID NO: 31364 - DNA, 201 bp, Bos taurus
ttttcatgtcatcacgtttcccacaatgattttttacaaacatcaaaggaagttcctcttgttagccagaatttaagtttacattaaaggaaggggacccmaaaaaaaaaaccccacgttaaatgaaaagttaatctacagcaccactgtctacacctccttcttctcaaccacatcaagtacaggaagaggaacagacaa

SEQ ID NO: 31365 - DNA, 201 bp, Bos taurus
gacattattactcagataaaagattaagctagacgctttacagtaagtcttaaattttataaaaaggataacttggaaagctctgtcagtctgtccctgcragggcgaacagagctttaagaatggagcttctgctactgtagcttctcccggactctataatggagacaaacaatcctagtttcagatatgttatcaagt

SEQ ID NO: 31366 - DNA, 201 bp, Bos taurus
caaatctatatagtagtatcaaactgggcttcactggagtcagagggttgataaacactagaaaatcaagagcagctctctgcttaaggacatgtgatgtyattacgtatttttttaaatgagttaaaaaaatatatatttaaaacattttactggggcgggggccagtgggtaggttgtagagcttttaaagtaaatatg

SEQ ID NO: 31367 - DNA, 201 bp, Bos taurus
ttctgttatttcctttgtttgaagtggtgtttttttttaaatttttattgaaactgagttttcctctgctctctttttgagatgtggcaaatttataaacycaggcctcagaattagaagaaaaaaatcataaagcaatagtacctaaactttagtgagtgtcagggtctagagaatttgttaggccaaggactactgggc

SEQ ID NO: 31368 - DNA, 201 bp, Bos taurus
attttctcaggttctagaggctggaagtctgagaacagagtgccagcatggtcaggctctggtgacctctcttgctggcttgtggatggccaacttctcaytgcatcctctcatgttggagagagagatagaaaggaaggggcaagctctctggttttctggtttctctttttaagggtactaatcccattatgagggccc

SEQ ID NO: 31369 - DNA, 201 bp, Bos taurus
tctgatctgatctctccttcacacttcctcctgacctaggcaaaagctgtgcccttgttcctctcatctttctcagcaatacagaaaaagttctctttgtyggccacttatctgcagccccaaacaagtcatcttgccccttatccacacagagcataatacgataatatgaacagaatcctagcagctatgctgcccctc

SEQ ID NO: 31370 - DNA, 201 bp, Bos taurus
tgttccttgagctctcttactgtacaaggtcaaacagaatcttaagccaacattttcaaaacctcttcattccattcttaaagatatccatcaatggatamtttgcgtctgttcaattaaaactaccacagcccctgtaactgttgagaaaaaccctttgtgctttgccaaagacaccagccagaaacgaccatcaggaca

SEQ ID NO: 31371 - DNA, 201 bp, Bos taurus
actactaaaaagaccctccaaatatcatgccgttactatgacaacttcaaaaatgctttgagaaaatgtcagggattttaagattcatgataaaacaagcrtcatctagtctgccagaaattactttcatttatatcaggcagcaaaaaggctaaatggctatttacaactgtgaactatcaaatcattaccttttgagag

SEQ ID NO: 31372 - DNA, 201 bp, Bos taurus
atcccaatatattgtttgtaaaactctgaaaggaccaactggaatcactggttctattaaggaaacaaactactaaccaacacctattaagaaggacaaargtacacagagcctgcgacaagatttaaaggagcaaaacacccctcgcacagcaaggcagatggcagagcaagggcaggctcattcaagctgctcctgcag

SEQ ID NO: 31373 - DNA, 201 bp, Bos taurus
aaagttaaaaaaaatgcagttagtaatatttaagaactttatgaaaaaacaaaacagaaacagacctgatatggagtcaaacttgttcttccctattatartatcagcccatgatgaaaatttggtagaagctccaagaccaagggttcagtcactgcacctcacagtccccctgttggcagttatcccagctttgttcgt

SEQ ID NO: 31374 - DNA, 201 bp, Bos taurus
gctctccaaggccagtaccacgtgttgagaattcagctggcagcacctctaaactacacgtggccaaagaggtaacctataaattcccatcaacactttamgttgcacgatatttcctttggattgatagcactcctcaagtgaggccactcccccactattgattcaaccttctagtctgtttctctgtccttgttgcct

SEQ ID NO: 31375 - DNA, 201 bp, Bos taurus
cttctccaggccaagttcaaacccacgtggggactatggaaagacggaaggtggggtaacagcatagaagcacccccatccatggctcctcattcgtatcygggccctgctgctgctgctcagggtcagctgggaaagagggcccctctgctgtcttcaggtcaggccccttggcggggtgaggacaggccatcctggact

SEQ ID NO: 31376 - DNA, 201 bp, Bos taurus
gcacctcatttcaccccctaaggctctgcagccaccaaactctgcctgccccggcccctagtccaatctttgcatcagcctctctcctcagacccatcacrggaagctttaggagggggtgagctagagggatgaaggaggtgcccaccaggctggttagaactggctgagtcaacccttctgatccacagggaaccaact

SEQ ID NO: 31377 - DNA, 201 bp, Bos taurus
tggaagacagtcttggcctgggccggagtgaggcccagggtcaggtgtgttttccatgcctagattcctcccagtgtgatactcttttggggcaggccctmcagacagatggctctgggcaggtcaatggtcaaagcaaggctcacacatccttcataaggatgctgcctcatgggctcactgcagactctcagatcccca

SEQ ID NO: 31378 - DNA, 201 bp, Bos taurus
cccagacccaaggggccagcgatgcccattcctccagcaaagtggaccgtgccacacgtcacaggctcacctccctgccttgaatcccagggcttcgaatkcgagcagggcccctgcttctgcattcaccctgcttaagccgccccagaatagcacagtgagggtgctttgttttgatttcctgattctagccaggagaaa

SEQ ID NO: 31379 - DNA, 201 bp, Bos taurus
cttggtgatagtaccatgagtgcatggtattggtggaggccatgaagggactcccaatcaaaatcagctcttaagcttctcaggagacaacttacaccatyctgggagcaaagccagcccttcccctgaattaacagtgctgtgggaaacaaagcctaccaaacactactggtatggtgtggttcattctcatggtcaatg

SEQ ID NO: 31380 - DNA, 201 bp, Bos taurus
tgtgctacagcttaatttttaaaatagtctacctgggaaatgctttcccgaaacaaacaagcaaacaatcccccaaactacaggtgtgggccatcattacrttttctgacttttgtgcctttaatgtgtttcaagtctctctgaggtgcatgatacgtgtgatttgtttgagtttcagccattatggcctttacatataat

SEQ ID NO: 31381 - DNA, 201 bp, Bos taurus
tgttatattggtcaattaaaacatttgttctgtttgaaaaatcaggaactgagctcctgtaaatgcctcttattattttgctggccctgaaaataggggcrtgtgtgtataaaatcccttactggaaggagttaatgatctggtaggcatacatactgatatacagatgataagcagcatatgatagctaatagaactgtg

SEQ ID NO: 31382 - DNA, 201 bp, Bos taurus
agaggccaaaacaaacagggccttcgccaagacagtagtcctcaggtctacttccccacctcccataacacacatgatgaatgaggttcacacattgaacscttgcgagggccacaaaaaagaataatgtcatttgcagcaacatggatggaccaagaggtcaccatactaagcgaagttaagtcagaaagagacagacag

SEQ ID NO: 31383 - DNA, 201 bp, Bos taurus
ccaggcaagaatactggagtgggttggaacgacagcattaggtaccaattacatggggaactgcctatggatgctgtgttcctggaggcagggcccaggtragacagaagagtcctgttctcagggtgtggggacaccagagcggggaccccactctggctgggcagagactaaacaggcctggaaagcacttctgttact

SEQ ID NO: 31384 - DNA, 201 bp, Bos taurus
tcttagaaacgagacatgcttcaggatacctgctgaatcaaattcccaacttgagaggagctgaaaaaccactttccccgaaaaggcctattatctgtatratgcagcgattcgacctgttctaccaaaagaggtgcaaatccttctgaaaggaggaatcagctaagtgtgggggcccaaaaggcctctctgaaaagaggc

SEQ ID NO: 31385 - DNA, 201 bp, Bos taurus
tcttttaatttggctgcattgggtcttagttgccaaatgtgagactcagttccctggccaaggattgaacccaggccccctgcgttgggagcactgagccrtacccactgaactgctaggaagttcctacaagtcagttttggtaactttccttcatactgcgtgccaatcaggaaccagttctgactctaccaacagctc

SEQ ID NO: 31386 - DNA, 201 bp, Bos taurus
ggaggagtgctggctggctgccaggcagccaccaactcggggtcagaagggcactgagtctatggagccccgcacctgctttggccacggggacctgcggraatgaggcaggagtgcagaaaccatgctgggatagctggtggtgtggggggtgccaggtggccccaacagcacacaaccagggttccagggacccagggc

SEQ ID NO: 31387 - DNA, 201 bp, Bos taurus
ttgtgtcttatataaatttcaggtctccgtgatatcagggagtgtatgccccgatgggatggtgtgttgtggagctgcgctctgccacccgcacagcattrtcagtcttcttggtttaatttgctgctgtttatgctggtttaaaatgacctcctcctaggtctctctggctccagtaaattacgcacaggttgccgaggc

SEQ ID NO: 31388 - DNA, 201 bp, Bos taurus
atttgtctttctctttttgatttacttcacttagtatgacaatctttaggcccatccatgttgctgcaaatggcatactttcattcctttttatgactcargagtattccaccgtaatatatgcaccacatctttattcatctgttggtggacatttcggctgtttccatgtcttggctactgtaaacagtgaacagaggg

SEQ ID NO: 31389 - DNA, 201 bp, Bos taurus
agctgattctcatatctgcttccacattcaatttattttgacatactcttttggctgaaatatatgaagaaaaatttggcctcctgaagatatgtagtttyaacaagtaaaaaaaattttaagtctttttagttgattatggatattcttcttgacattataataaatatccatgcagcatgattctgtaatctcctgaac

SEQ ID NO: 31390 - DNA, 201 bp, Bos taurus
aactctgccttgacacacaggtaaaaagatgaacacatggctggtttctgactaacaaaattcaaaggacaaatcacgtaagttgtgaggggctagtgtgraatttgaacacttgtcgatactgatttgctggccttaagctggactattctgagtaactactgattcgctcaatcataaagagcccgaggacaatggatt

SEQ ID NO: 31391 - DNA, 201 bp, Bos taurus
agggccccaaacagcaaggtgacatgaacgcaggccgtaacaagtggccagggcgcaggaaaacagaacagacaaatcccaggctcttaattggcactgtragcagggggctcacttcacaacgcagcacaccctatgccgtgtttaatcatttgttcagctggctgtggaggtggcctgtatccagcacagcacccatga

SEQ ID NO: 31392 - DNA, 201 bp, Bos taurus
cccaaaatgaatttttaaaaggcccctcgtgatctctcaacctggtttcatcctctcattcaagctttcttcattccacatctaccggctaagtttctctsttgtgtacaggccatgctctatcctcaggtttttgaccaagactaaacaactctctccaggttttcctttgttaatttctatttatctgttgaataaatc

SEQ ID NO: 31393 - DNA, 201 bp, Bos taurus
gtagaaataccagcatcaacttacaaaaacagtttggcatccattcttggtattactgctagttcccatatctaccgtgcaattgcgatatatgaatactyaagtctatttgtagaacaatcacatttggcttttttttttttccttgaaattaaccagtggatttttttaaggggtttaagataacattcatttcatcta

SEQ ID NO: 31394 - DNA, 201 bp, Bos taurus
ggctacgtctgttttcaattagtttcaaactggtttttacttttgtgtttaggccctagaatcatatgaatcatcatggccgttcaaacaggcagagtaarctgaagccagaagtagagtttagtcagcttaccagagacagagttagatcttggccagtatcaagttattctaaataccaacctatatgccatgtgtcaa

SEQ ID NO: 31395 - DNA, 201 bp, Bos taurus
aagtgtcttctagaaaacttaaaattaaagactgcagcttacataatagttctcctgaacaccaatggtctctactaatacagtgctacagctgtgaagamccttagggatccaaatgtgtctgttttcagacttagaacatctcagaaggggttaaggaacttgccaaaaccacagcaacggtggcacaagcatctcttc

SEQ ID NO: 31396 - DNA, 201 bp, Bos taurus
ttccaaagaagagcttggtgaccaacggctgcagcatattttctttccaggcactgggcaaacaacaaaattaatcaaacttttttcccggtctcaccctycacacaacctaggtggccaaaacttccctgcctccctctattgtcaaaaatgcatactggtcagctcatcccagtgcttgacccaaaggagtcacatgaa

SEQ ID NO: 31397 - DNA, 201 bp, Bos taurus
tgttctctttgagtcatctgcattcatgagctccccagcatcctcgtggtgggaggcgtctctggcagagagcggaggcctcagaggctccacagagatgrcatcttcgcatcagcacccaaacagcttgcaaggctggcttgggcttctgagcctcgctaccacactcccagctctctctctgtgagcgcgcacccgccc

SEQ ID NO: 31398 - DNA, 201 bp, Bos taurus
catatttgggtaaatctactttggactttctactttgtttcattgatttatgtatcttttccttcactgacacgacattgtctagatacttttaactttayaaaaggccttaaaatcatatggtgtaatttctccaaccttattcttttccaaaagtgccttagttattcttatttatttaattcctaccataaatgttag

SEQ ID NO: 31399 - DNA, 201 bp, Bos taurus
gctactcttgctgttcccacagacccatccaaacctttcaagggtgatgtgtgtatctaacttagagggcttaatgggatctataacctgaaatgcttcarcctgctgcagtgtccacttagtagctcagaatgcttgttctatggtatccaaccattcggggccacccactttcttgtaagtgagtatataaggggcaca

SEQ ID NO: 31400 - DNA, 201 bp, Bos taurus
ataatgtcttttatatgcttaaacattaaaaagaaatgtcttactggcctgaaatttcaagcttagcttgagattcttagttcttttttttttttttgcartaggagttatactcagtaaaaggccaaacccattggaataggagaatcctttcagaagtccagttttaaatatatttgaaaacattttcacagtatttcc

SEQ ID NO: 31401 - DNA, 201 bp, Bos taurus
gggcaagccagctctctaaggttctttttaaaggggcattaatcccatgcaggagaaccccaatctcatgaactaatcacctcccaaaggccccatctccyaataccatcatccagggcattaggtttttgtggggttttgttgcctttttttcttttttgctgcactgggccttcgttgtagcacacaggctttttattg

SEQ ID NO: 31402 - DNA, 201 bp, Bos taurus
tggaagagtaagcaaatatttctgttttcactggttgagcaactagcttttttctcaaattttgtactgttataagcaatatatgcaatatagggaataawtatactttggagatgatgaaatcaaatattcttttaaaaactgacaagttatcaagtcatgcaaagacatagaggaaccttaaatgcacattagcaagtg

SEQ ID NO: 31403 - DNA, 201 bp, Bos taurus
aatgtctgtatccttaaataagagacacctccttccccatttgggagaagcaaccagaatggatcctagaactcaacagctaccaagacgcccagacctcwgccgtttgtgcagcacatgcaacatatatccaagtacacagaagccaaaggactgctttccttctttatggcttgatacacttaaaaagtttcaagctag

SEQ ID NO: 31404 - DNA, 201 bp, Bos taurus
ttgcagcccatctagattctctgagatctggagttgaacagtggacactgcacccaacgctggcctccagattctcgctctcatcagcagctgaccccagkaaaatgctgaaactattttgagggccattttcagcatctttgagcagctcagctgctctcttaactttgaaagctgactagggcctcactgttctttttg

SEQ ID NO: 31405 - DNA, 201 bp, Bos taurus
aacagttatggctttatatgaggctcagtccacattcatgttccaaccaagctatatacactccactaaaaaaaaccctttgacttcctggtaaccgtaawacttgctcttactatctgttgagctttaattgtgtactgggcaacatgaagagtactttgtatcagagaattgtgtgtcatattaagaaacattgtaaga

SEQ ID NO: 31406 - DNA, 201 bp, Bos taurus
ctttgccacaagaaagtggcagagctggaatgtgaacccaggtgaagtggtttacaatgcggactgagaggtgtttatggacggaaaaagaaggattcacmcagcgtacttgccatgggcgccaccatgcagctcaagggcatcaaccttacaacacgcagcccctggggacggcagagctgacccagatggggttcagcc

SEQ ID NO: 31407 - DNA, 201 bp, Bos taurus
cagtaattattaatcacctccctttggaggtggtgtgggagggagtgtgtttattctgtggcgctatggagaactggggacacagcctcatattttgcatrtttgattcccttttattcccacacctttctctctggtcccttcctgttcccaaaagacaaccattccattgtgcttaatgtgtgttttgggaggggggtg

SEQ ID NO: 31408 - DNA, 201 bp, Bos taurus
acagcctagcccggcagaagggcgtggaccctgtccctcaggagcaggcccgcgcatgctcagtgcctcctttccgcgccagggcctgatatgggagggcktgtagagctggagtgggtatgcagtcatgtcacctggggaactctgcaagctattgctgtctgggccccacatggagacgaaattggtttggtttggaat

SEQ ID NO: 31409 - DNA, 201 bp, Bos taurus
gccctgggaccagggttagagtctcagatgttgcccaggcaacaggaaggaagctggggaaagtcagcccttgtggatgctgtttgggaagcagattgagyagggccagggtggaaagaggggggcaagggccatcctctcagccaatcctatgcaagcaggctggcagtatgtggggctttgcctccctgagtctcaaga

SEQ ID NO: 31410 - DNA, 201 bp, Bos taurus
atccaatcttgccataaatacagaggaatgtgctgaggctgtgagtagttactcacactgctgggcaggcaaggtcaccattaaaacagagaggaacccakaggcccctagcatggtcaacaccgtcagaatggctgagcctgatgggatccagttcctggatggcaccgtcattggcaacaggacatcagtatgagaact

SEQ ID NO: 31411 - DNA, 201 bp, Bos taurus
ctcgccctgatgttctcagagagagcaatcgtcagagtggggtgtagcttaggaagagccaacaggtcaagttcaaaaacaaagacctggctaggcctgaytgttggggaaaacaatgggagtgttggtcacgaaatagggaaggagaaccacagagctccttggatctactttaagcccgctaaatcctaatgacaaata

SEQ ID NO: 31412 - DNA, 201 bp, Bos taurus
ctctaagtacgattcctcggccaagttcccatcatctgggaacttgccaataacacaaattaccaggctccattccacttcaactgaatcaaaaactctgsggctgggcccagacatctgtctgcactgcacccctacaagtgattctgatacacattcaaatcttacaaccatgggtctagggtaactgcttagcagttg

SEQ ID NO: 31413 - DNA, 201 bp, Bos taurus
cagtatctatttccaagtctctggtgcacctggccccattgtggttggtgagcaacattgctcatagaaagcatgcatcctctacagaacagtttggggayggaaagacatcacggccaaccaacccatctttgcttgtgaagaccaccgcgtcccagctcgacaatggatgagagacacgtttactctccacgtcactgg

SEQ ID NO: 31414 - DNA, 201 bp, Bos taurus
gttggtgtgcctgggagtctgagtgggctgagaacaatgaatctagtcctgtccacagagaccccagaccaacttcagggcctcatgcacacacctgagcrggcattagcccctgatgctgctttgctggtggctcccaggtgtgcctacagggaggaggccagcatgaacttgaagccaactacttacttcatcatgtag

SEQ ID NO: 31415 - DNA, 201 bp, Bos taurus
cgttggtggggttcgtatggcctcagtagagtcttacctgaagacagggacttttcacttcccaaccccttccccagtgagggtcactagttgtccacttrggcctgcccaacctcagggagaatcatgcttgttgctggtcccgtgagtgaacagactcgcagtcttcttagagctgaactttggctggaccagcataga

SEQ ID NO: 31416 - DNA, 201 bp, Bos taurus
tgcccgtggtcacatggttgaactccagagagaggaagaaatagcaacactgcagaggctgccaaacctaattcaggcaccacttggccttgatgcctttwgtactgaaggatattaacataaagagactggctgactagcaagtgaggctgagcctgggcctcagcttggcaaatccagaaatttgatgtaacggctcac

SEQ ID NO: 31417 - DNA, 201 bp, Bos taurus
acatctgtggttacagagagaatgtcacagaggagctttgcagacggtggatgcagctgggagcattttatccactgtcgaggaatcacaacgggcctggrttcagggtaaggttccaagagaaatgatggagacttcttgaattttatgatctacttatactcaaagagagattgaagaaaatcctacagggtggcccta

SEQ ID NO: 31418 - DNA, 201 bp, Bos taurus
gaaaccacagcaaacaagtcaaaccaagataggtgatgacactggacagtcagtatatagaatgagagaagtaagcaagctctatatttttagaagttacrtaatagaaactgagctttgcatcatcccatagaggtcttaagaattggagccaaggctaaacctcgttttcttaactctgaatacagtgcattctcttca

SEQ ID NO: 31419 - DNA, 201 bp, Bos taurus
cccaggatcatgtattggaagagttaatattattgagaaggaaaaactgaattccaaaattccagctacctttcttggcctggaaattgacagttcagttyaattcagttgctcagttgtgtccgactctttgcaaccccatggactgcagcataccaggcctccctgtccatcaccaactccaggagtttactcaaactc

SEQ ID NO: 31420 - DNA, 201 bp, Bos taurus
cagaaagaccgctgtgtttgcttggaagggcacacagacttcctcgatgtggggtgtgggttccttagaggttgtttctatgctgtgtgagccccagtctraacttagggccaccttgggtcagtgtccccaggccatggggtgactcctaaaccccagcctagactgatcctacctcccctgcctactgaacctcttttt

SEQ ID NO: 31421 - DNA, 201 bp, Bos taurus
aggattcagaagaatgaaaaatctgcctagccatgtggactgccatggagaagagcactacagaacgtgagtttaggcaatgtaaggccactagaaatgarccaagtcattctaacaggggacagaggctcttacctctctacctgagcagatggtggcccaaaacatgagccggccccctctgccccctaccttcacccc

SEQ ID NO: 31422 - DNA, 201 bp, Bos taurus
agcacattcttctaaagagggcagattaggaggctttgcccaagtggtgaccaagagcatgcggtcgctcacaaaacctctgggtgatcctagagcaggtrctcctgaaggccagggcagaacccacagcaacagactggggacaccttgaatcctcagcatgtatattccttagcactgctaagaaccacacacctgatg

SEQ ID NO: 31423 - DNA, 201 bp, Bos taurus
ttgatccctggtctgggaagatcccacacgctgtggagcaactaagtccttgggccacaactattaagcctgtgctctagagcctgcgagtgatgacttcygaagcccatgtacccttgagcttgtgctctgaaacaagagaagcccctcacaaagagaaacacgtgcactgcagctagagagaagcccagcccaacacaa

SEQ ID NO: 31424 - DNA, 201 bp, Bos taurus
ttatcctttctctgccctcctccagttagcttctagtttttgttgttgttgctttgttttgctactagttctgtgccctgtttggccaagggttaatggcraagctagaaatgggtccaaaggggcttctaacccgagtgcagtccactccctgcttcctaggacataagtggggaggccagtcagtggcagccccaaaga

SEQ ID NO: 31425 - DNA, 201 bp, Bos taurus
agtgatccctgcattaccattcagattcatggaaaatgagccatcccatccaaactaatatcttttccttttacagaggaaagccatagaccaattattcraatttaaataaaatgattaaatagaatttctgtgatcttggggatgaaatgataactgctgatgttgagggaatctgcagtgaaaaatacacccatatcc

SEQ ID NO: 31426 - DNA, 201 bp, Bos taurus
tagaagacctgctgtacagcacctggagttagagtgaggcccctcctgattcataggcaatagtggatcagctacaaatgaagagatgaaagcaaccttcyctggtcttaaggcctcaaggcctctcagagtcctgcttagctgcaacactctagttctctgggatactctacagaggtaaaagtgcagcactctcagctg

SEQ ID NO: 31427 - DNA, 201 bp, Bos taurus
agtagttaaggctttgctcttccagtgcagaaggcatgagtttgagccctagttggagaactaagatctcacatgccacgcagggggaaaaaaaaaaaaamacaaagaattccaagatgggcttagtactttcactttaccttctgccaaggtcttctttggtagaatatgagatgtcccactgaaaacctggctggcttt

SEQ ID NO: 31428 - DNA, 201 bp, Bos taurus
aagaagagctccagggcttagactgtcttcctcccgagtgtgaagggagaaaggcagagtggggcaagggttggagggctgaacctttggccaaagtcaayggcaggaagagcagtcccagagacactgagcagcctctcactcggtagggaccatcaggtgtagaaatggaggggccggtggacaagagaggagcttggc

SEQ ID NO: 31429 - DNA, 201 bp, Bos taurus
tccttgttctttatactctgtctttcatgtccctgatcatcgatggtgaagggttctgctcctcagagagtgactggtactggccatggcaaattttaccyactcgtgcacatccatccatccctttatcctcatccttggcaacctcaggcttcggggggcatttgggcagctgattttgttggccaggggcttctaggt

SEQ ID NO: 31430 - DNA, 201 bp, Bos taurus
ggaagcagtatcttcctgcgttgggatcttttccatgccccagttaaggaaaccaagtctctcactcaaaaggagcagagaaaagttctggccggatgttycctgctactcttagatacaactggctgctgggctgctagatgaggaagctgaaatgcctttttctctagagtcttctcacctccaggcctcaacatttgc

SEQ ID NO: 31431 - DNA, 201 bp, Bos taurus
gagtctggggtatgaaaccgcagggacaggtgcgctttgatcagcttccctgtgatctcacggctgtgtcctcacggacgtggccttgtgagtcctcctgytcatctctattaatacatcaccacaccgaacatattattacacatataacattatgaaacatctgcagtgtgtcaggtactgcgctaggccaaaatgatt

SEQ ID NO: 31432 - DNA, 201 bp, Bos taurus
taaactttgcaatcagagttacataaaattctgtagaaatggaaataatgcatgacaccctgtgttcactgatcctatttatgggagcctttctgctttaytgtggattaaaagacttgacatgatgaatctgaaaatgattgttagctgactcagaacacagcgcacaccacaacttccctctttctgttaatggctaat

SEQ ID NO: 31433 - DNA, 201 bp, Bos taurus
caagagagttatgagaattgtttgttttgaactgatgggtaaaatacaaactttggtaggtctcaaacattatatttagtatcaataaggttatactgtayagcgaaaggaattgtattcaatccccagggataaaccataatgaaaaataacatttaaataaaggatttatgtgtgtgtaactgagtcacttttctgtac

SEQ ID NO: 31434 - DNA, 201 bp, Bos taurus
agctcatggtctggcccagaaagtagacactatatgcataactccaagtgtgaaagtagtagtcaggtgtcctctgggcaggagaagaggactccaggtcscagagccacacccgtgaaggcctccaggtgacaggaaggggagctgaaggctctggaagccagtgggatgggggaagtggtgaccgacaaggatgctgct

SEQ ID NO: 31435 - DNA, 201 bp, Bos taurus
tcaccattttagcttctgtgggctctaatgtctgtgtcgcaactatttaactctgtcatgatacaagaaagtggctgcagaaaatagggaagcagtagtayggcactgctacgttccagtaagtgtcacttacacgcggcgggcctgcagcctgcagtctgccaactcccgctctgggccgaaagtaagactcaacagatt

SEQ ID NO: 31436 - DNA, 201 bp, Bos taurus
acacctgctgatccatgaacccattcacacacctagcttaaggtcctactgaaagaaaatgaacaacaggctgagaagattcctaagaggccttttaaacrtcagcgtcacctgtactggtcttagcatactggagggaactctgtgccttctgcgccattagggcccaatcaggagacaccgtgcagggattcaaacaga

SEQ ID NO: 31437 - DNA, 201 bp, Bos taurus
gtgctgttacttttagtatttattgtgttagaaaagaagtatttgatttttctctagcttctaaagggaataaaatggatatttgtcattgtttaggaaartcccatggatggaggagcctggtaggctgcagtccatgaggtcgctaagagtcagacatgactgagtgacttcactttaacttttcacttttcatgcatt

SEQ ID NO: 31438 - DNA, 201 bp, Bos taurus
ctcacacacacacacaaacacaaatttacttaagacgcacaaattcaaagtgttttccccaaaatttatttaatctattaggcaggccatactcttgaaascagtgaaaacagcactttataaaatgccgcacaaacctaaaactcagtattggagattctagcaggcctttattccttacttctgctttgttcaccttcc

SEQ ID NO: 31439 - DNA, 201 bp, Bos taurus
atatctccaattttcataaatagatctctaatctttcccactctattgttttcctgtttctttgcattgttcacttaagaaggccttcttagcgttccttracattctctgtaactctgcactcagattaggtatatctttccttttctccttgcctttcacttctcttctttcctcagctatttgtcaggccttctcaga

SEQ ID NO: 31440 - DNA, 201 bp, Bos taurus
ttttttttcctacagcctaccacacagatgaggatcctaagacagcacctagctttcaacgtgagtaaactcaacgactgggccagtatctgtgctgtgarataaataatattacctgcttcactcaacattttctttccaattcttagccatcagctagctaactctgatgtgtgagttttggtaggacttcagctggcc

SEQ ID NO: 31441 - DNA, 201 bp, Bos taurus
aagaagttggcagatgcttaatttggagaaattgcttacttttgcataaaactaatttttgtaagagccaggaaaatattagaagaaattatttatgtgcytaaaaattcaaacattttggttttgaacagaggcataaagagaatacatctcatatactttggaagaaagcctcagatgtatgaaactcaaaaggaatga

SEQ ID NO: 31442 - DNA, 201 bp, Bos taurus
ctagggtgataatgaagaagcttttgaggttattagatatcagcatagttgaaccattataataaccacatgccaaatgctaccaacctatggggtgtgcytgctatgttgacagatgttctctgtcacacaaaactaacaaaaatggatatgaaattctatttttagaaacataacaaatcaagaacatctttctaattc

SEQ ID NO: 31443 - DNA, 201 bp, Bos taurus
gaattcgcctacaaaggaataatttattctcaatatacccccaaaagctgggatgctgctggggactccaacctgcaaaataactgtttcttaatagctgmaatgccatactcacaatacgtaccttatgagctacatgttaaatgatgagaagttatttatcttccatacactagataggaaatgggtgaatcatttctc

SEQ ID NO: 31444 - DNA, 201 bp, Bos taurus
gtgaggatcagtgagtacactgagtgtgtgtagtctgaagaagcagcagcagctaaggggaaacgtgatctcgaataacacaaaaaatatgcaaccttccrtttacaatcaaatgctaggtgtcatcctcatgactgatggagtgaggaggtaaggcgtgaacaaagaaatctgtaccacggtgctgaatatggtgttata

SEQ ID NO: 31445 - DNA, 201 bp, Bos taurus
ttacattctggtggacagctctgttttctacaagagagaggaatatgtaatcattacatccaagagtctgaattgcagcaatgctatgcctgcttcatagrtgtattgttttatggccagatgcgttttaatatttcttatcattggcttataaaggattcccattttgaaaagtgttgatacctagcctaattaaatgac

SEQ ID NO: 31446 - DNA, 201 bp, Bos taurus
gagcactcaagatgtccttcagtaggtaaatggataaactgtgatacatccagacaatgaaatatcatttagcactaaaaagaagtgagctctcaagctgkgaaaagacatgaaggaaatgtcaccacatgctgccaagtgaaagaggtcaatccaaaatgacttcatgccatgtaatcccaactatatgacattctggaa

SEQ ID NO: 31447 - DNA, 201 bp, Bos taurus
attccatgaggacttggtgccattaatgcctcctgctgctgcttgggtgctctctccaacctctgatccattcctcagttctccattgcccaggcctggcygtcagtatccaccagatcaggtagtgtactcaatctatatgagaaagctcttcccttagactacagcatccaggcttagtatgaggtagactaaagtttc

SEQ ID NO: 31448 - DNA, 201 bp, Bos taurus
aagtccaacaatatatgtttcatggaaatgctcaattgtctacagccagtgaaggattttctttttaagaaattaaagttttttattgtcaaagttatatrtgtgggaatatagagaattttcaagctaagatgggctgttcagttggcctaaaaagttgcttgggcccagtaatacattggggtgaagctaaatgccaga

SEQ ID NO: 31449 - DNA, 201 bp, Bos taurus
tgtgtttatttaccaagcctctgacattaattgaaggtagtaatacattaagtgctcagaacagctggctcttgtggttggccttttgattcaaattcttrgttgctaactaagcaatctttcagcatactcaattgttaaataaccaacaatggactcttgtatttctgattaggccatttcaagctgtatattaaaatt

SEQ ID NO: 31450 - DNA, 201 bp, Bos taurus
gagctaaatgtagtgctttgaaatgcaagcagaatactttttaagtaggcatttaattttagtggaatttgcatttggcagtcccaattcatctgtttcarcatctgagtgaaatagccctctttgaattctaatggaatgaatacagtgaaattaaccttttaccacaaaaacatactactattctaggcgaaagctttc

SEQ ID NO: 31451 - DNA, 201 bp, Bos taurus
aggggtataatcacaggcataatgaagttattacaattgagtgaagggaatgaaaagcatagtatattatgaggcaccctgcagaatggcgggtaattgargatcagaggatgtattgtactgactgtcagaaagtgctatgtaagctgagttctgcaggattggtagtacagcctgatcaagatgacggcaagagcattc

SEQ ID NO: 31452 - DNA, 201 bp, Bos taurus
attgggagatatggagagaactctgagcagagaagcagtaaagtacatacaatgccccaagcccttagctttgactgggcatagatggttggctgacaccrtagccaagtttccagtagagcggagcctgcacttttaagctttatgtcatgatgtggttggctgacaccatagccaagtttccagtagagcagagcctgc

SEQ ID NO: 31453 - DNA, 201 bp, Bos taurus
actatatttttctctttaagcagaaaatgttgatgcatagttatcacttaatcatgaatcagtaaatatcatatacattaagtgttgccattacacactaytctttctcttgttgaatgctacaaattaccattctttcagtctacttagctatttttccattatcgtgttgactgctaggttagatgaacccatacaccc

SEQ ID NO: 31454 - DNA, 201 bp, Bos taurus
ctgtaccttggtcttggggatttgttagcaggtatgaatatttagtacagttactaaagactggctttagctattagagtgtgatctgtatttatagtacrtaatatgaatacaggataccctgtgtatactgtatgtataaacagtataatctatataaattaattataagccacatggtatttttcctcaagtcatcct

SEQ ID NO: 31455 - DNA, 201 bp, Bos taurus
gacaaagcctccattggttcacattctaccttatatacattaatatattcagtcacaatattccactctaattgataggagaggactcactgagaaaagaytaaggatgtcctaactgtggagaaggcaatggcaatgcagtccagtactcttgcctggaaaaccccatggacagaggagcctggtaggctgccgtctatg

SEQ ID NO: 31456 - DNA, 201 bp, Bos taurus
ttaatgctagtggagggaggtcattgatcagaccttatgctgtcctaagactacgttcctctcttttgctctcaaagacagagctctttcaaccccaattyacaaaattgaatccacaaaattgaatctgctagtttttgtttttgctttttcccctattccagtgtccagaggtaacttttcctagcccggcctctttgt

SEQ ID NO: 31457 - DNA, 201 bp, Bos taurus
ctcctatttctgcaagatgtcgaggttgttgaacaccccaggtaggctgaaaatggagtgttacttttaattactatctcggctggtgtttggaattacckaaacaatccaacaggtgtggcttattatctgaacagtccagtcttcaaagtgcaggcagctgtgaaagaataaacccacttggtttgttttctggagaag

SEQ ID NO: 31458 - DNA, 201 bp, Bos taurus
gtagtatcaccagatatgaaatctccatcattaatatttaaccatagcagaaaagtggcatagggtggcttgatttactggcagcatcctccctaatttcrcctgtgttttcgaaattgactttgagttaagtaatatcccatttcctggatccagaaaccacattcatgggagaaaagtcaaattgaaatggaaaatctg

SEQ ID NO: 31459 - DNA, 201 bp, Bos taurus
atgaaaatcatttgcagtctttgcatgtatctgtttttcagtttccaagtgcaggaatctttaaaatctatagcaatagatgtgtaaataagaatgacatrttattcaaaagatttccctttcatgggatgtaatccatacaagttgttttatgcaaagaaaaccataataaagaaagtgcccctattccctggggataga

SEQ ID NO: 31460 - DNA, 201 bp, Bos taurus
ctgtctctgtagcttgtcctggggccccatacagggtgacagctgagacccaggagagcgagagcaagaactggcagagctcatgacgtaacacagcatarcatcacatcacagctgggacccccacaggcacagcatcacatctgcaggactgtgctgctcaaagaaagttacaggccaggggattcggggcaggagact

SEQ ID NO: 31461 - DNA, 201 bp, Bos taurus
catagattgtgtaatcagaaggaacctgatagcttttaggactaaatgactgagtagggctgattttgtaagagccagaattggtcagacaacaaatgacygagaacttgacactgtgggtagaagttctgctcttgttggtgcctactattaattaagagcagggatcttaaggattaacatggatatttgcctctaaga

SEQ ID NO: 31462 - DNA, 201 bp, Bos taurus
acaggcttcttaactcctggagcttgaatgtaaaatctttcagagggagaggtacttaccctggtgggaaagcttgagcttaccattccctctgaagtttyttattgcatttccctattattgaaaggccctgacttctaagagggctgagtggtgttcagggtatcagagagccgcggctcctggcttggggggatgtga

SEQ ID NO: 31463 - DNA, 201 bp, Bos taurus
tcacatatgacacaaattttaaaatcaataaaaagatgttaacacaaaatataatcatataattaaatatgtatcaggaaccagaaaaagtgaagagggaraaatcagataatattttacttgtgtttaactaaaaagccatgtacttaaagtctatgagataaaaacagtcataaatctatctgaatcctctagcaacta

SEQ ID NO: 31464 - DNA, 201 bp, Bos taurus
gcatctcactaaagtttaaattagctattctcatatcaggcccgagtgatgacgagcacccccctcccagtaaaatgtacaaattgctgattttcacaatratgaaagcgggaaagcatagattcaattcaggagaagcttgtaaaatgtaatttcgcttttccaacctccaccccaacatgctgacaatagaaactcaag

SEQ ID NO: 31465 - DNA, 201 bp, Bos taurus
cctctctaacaatctttaatgagctcccattttactggccccaaagtttgactcttggttccttcccatcatttgctttggtttagttcatgagcttatgrcaggcacacggtggcccagcaaaggatgttggccaagctccttgctccaggagctactgggactactgaatcccaatcccttagcgaccctccccttgac

SEQ ID NO: 31466 - DNA, 201 bp, Bos taurus
cgtgtgctgattggctgaagcatggctgtaccccttacatcagcagaggaaaggcctagagattcagggacccttagctgagcaggccagtgctgccgggrtatcctggaccttccttctctgggcgagctgagcccagaagctcagttaagtgctggtttgctgacctaggggttagcaagagtgactccatcttgggcc

SEQ ID NO: 31467 - DNA, 201 bp, Bos taurus
gctaaatattagtaactgttaaaacaggccatctcatctagaatgtaagaatgtcctggagacttccagtattggatgtttggcctagatgatttaacaarcatttatgaaagatctatcttctgctagctacgtagagctaaagaccttttgtggcctcagagtctagtgaaggacacagccacccagggaaacagtcac

SEQ ID NO: 31468 - DNA, 201 bp, Bos taurus
agagttctctggcccccagagcatgtccactaggtgctcctggattttacttgggttcaccttaaagggcacaagcaagagattacatatgaaaaagcagrgacatcatttttatgacaatggtctgtatagtcaaggctatggtttttctagtagtcatatatgcatgtgatagttggaccataaaaaaaattgagtgct

SEQ ID NO: 31469 - DNA, 201 bp, Bos taurus
aagctacccaagtggcccctgaacgaagagttgggaagagagatacaggagcacccaggacataatatttccaccctacagagaaaataaatgtaagtgayctcaaggccatcaataataacaacatgtagtaaaataatcaggaagtgacgtgtcttgagtgtacatgacctttgtttttaatagaatgtatttaatcag

SEQ ID NO: 31470 - DNA, 201 bp, Bos taurus
ttgctctttctggacatttcctttgccttttttcctttgagtttgtctaactgttacgtaggtcaagtaatgtagaccttttgaagaccagcgaaacagcrtgttagttgtgcttgtgtataagttttaccagctcttctccgcgcactctaataagcaaaatgattttgaactaagcgtctacatacgcatattacacag

SEQ ID NO: 31471 - DNA, 201 bp, Bos taurus
aagtagtctggttgttcccgtcacgtttctgagggctgtatctagtgggacttagagctacatccgttcgcaggaaatctcctgtcattttggcaggcctyggcaccagggacgcgccccgtgcaccctggtctcggacgcgagcagtgaccactactgtgtcccgtctcctgggccagtatgtgcggtatatggtaacat

SEQ ID NO: 31472 - DNA, 201 bp, Bos taurus
gatctgattccccaggccagaattgaggtccagaaatctgtgtattatacaaacacagacacacgccctccatctcgggtttatcagtgtctgaacaattrccaggtcaatggctccatcctggcccatcagaacaggtgggagagggacttctctggcaatccagtggttaagactctgcacctccaaggcagtggacac

SEQ ID NO: 31473 - DNA, 201 bp, Bos taurus
taaatgagagaatcttcgtggtttctcctattcctaactcgcattccattcttgctctcttaccagatgtggggttcggctgtggcttcccaggcaacacygattctgctgactgctttgggtgccctcaactccagtcggcctcgatcatctcaaacagctggctgagccttttcttaacgtcaggctctctgcggacac

SEQ ID NO: 31474 - DNA, 201 bp, Bos taurus
caggcttccctgtccttcaccatctcccggagcttgctcaaactcatgtccattgagtctgtgatgccgtccacctgtctcatcctctgtcgtcccctcgwccttagactgttagtaacgggtggtcttggtcaatcagtgaggctggaggaaccagaagtggctctgtgtctgtctatctgggaagcattccatgttcaa

SEQ ID NO: 31475 - DNA, 201 bp, Bos taurus
aagggccaagtttccagcccttctcctcagggcgtgctgagtgtgcacatgtgcacgcacgtgtgtgtgtgtgtgctgaacccatctcaggtcctcccggygggaccagcaatgggccgcacttgctgactgatggaaaccagccctcggtcatctgtggctcacaggtggccaatgcctgctcggactttcatgacaaag

SEQ ID NO: 31476 - DNA, 201 bp, Bos taurus
ctagagaggctgaagcccttgccccgagggcctgtgaccgtgaccttatctgaaaactgggtctctgcagatgcaattgagttcagatgaggatgttgggyggccctaatccactaggactgggtccttagaagaagaggagaagagacacacacactgacagacacacagacagagagaaagaaggccatgcaagaacag

SEQ ID NO: 31477 - DNA, 201 bp, Bos taurus
ctcgtggtgctgccctcctgctgagcccctggccgccagcccagggctctcctcccagccctgctgcactgatgagacctccagactccacttctcacctyaggcctgtttatcaaatgcaacaggtttagtttctgattctttggaaaattgccctgcaaggaagctgtgttaattgaggtctctgagtagccagatcca

SEQ ID NO: 31478 - DNA, 201 bp, Bos taurus
tttccaatggacttcaaaaccatacaaacacacttacttgcacatacacacaatgaagaataagattcctgaaaattctttgcagatattttggggcaagkgttggggggacttaaagtacttcccactggagatggacagagaaatgactgcattatcaagtctcttggaacaattttttgtgtggttcattcatcacac

SEQ ID NO: 31479 - DNA, 201 bp, Bos taurus
atggtccaccaataccttttataacagagaacaggagaaggaggccaagacccaggagagggagagaaggaaagagacaaggcatgcccagatgctggccrccctacacggaagccctatttcaaaccctgagtccttaaaggacaaggcacgaagcaaatgcctagtctgtaggcagatggggcattaggccaaagagtg

SEQ ID NO: 31480 - DNA, 201 bp, Bos taurus
tcaactttgtggctcaaagttacatttacttcttagaattttaaggtttaccttattttcctatattctggagtaatgtaagtaaaattgggattctcagraataaagtccccatgattcttgagggtttcatggaattctcctgtgaaaccatgtgagagctgatgctatcttccgaggagcttttccactactttctct

SEQ ID NO: 31481 - DNA, 201 bp, Bos taurus
agaaataatatagatcatcagtgtcatgacttaggaacaaaagagcatcaaaaaggaatagaaagatttgaaaaagaaggaaacaccatacctagaaactytttattgaaacttcaaatttaatagaatagggaaagcagattgtacacaactgagacagaaactgggtaaccagttggataattatgttggataattatg

SEQ ID NO: 31482 - DNA, 201 bp, Bos taurus
cctcatagaattagttttccttctcaaacttgatgctccagcagaatctaattacttgcgtttctgaggtaagccatgccatttcacacctcttggccttkaagcatgccttttcctagactaactcaccaacgtgtgactcatagctggatactagagttgcagtggtggtacgtctttccctggtctcacggagctcac

SEQ ID NO: 31483 - DNA, 201 bp, Bos taurus
ggcacccacgtccccagagccccctgacctgccctcctgtgacctgcccggcccttaatggtctgggtcttcctgtgaaccccggtttggccagggcagaygtggctctgtctccttcaaagcagctccctggtacccagcacttagtaggggcttgttgagaggacgaatgagagaggccgattgaacgggaacatcgcc

SEQ ID NO: 31484 - DNA, 201 bp, Bos taurus
gaatggaaggaccaacagtctcatccgagcgagaagtttctggggtctgccgtgggctctatcttgtcttcccattcttcggtccggtcttaccaaacacrgatctaagcatctctggaagctatgctatgacctgtgctcaaccagcgggctctgcgctccattcgttctagacacccctgtcttatgtcctcacctaga

SEQ ID NO: 31485 - DNA, 201 bp, Bos taurus
tgcatacttcatcctgcccagtggggtcccggcctgggtgcctggagataggggttctgtttgggacaattagtgccgttgtcccctgcgagctttacttytgcatcatcagcagggaagatagaaacagtttagtcacgccatttgcccctgtagagaggaagggaattataaatgtattatagacctataatgaaaaat

SEQ ID NO: 31486 - DNA, 201 bp, Bos taurus
tccagtattcttgccttgagagtcctatggacagaggagcagggtggcctaaggtccacggggtcagagtcagacacaagtgagcacacacacacactacrtagcacagggacctatgttcaacggcctgtgacaaaacccagtggaaaagaggatgaatacacaggtgcgtgtaactcagtgtttgctgcacaccagaaa

SEQ ID NO: 31487 - DNA, 201 bp, Bos taurus
aaggagacggacggctaggggactgacaacccggggtgggctccgtgtcagggggaagaggccagggaagcactgagtcagatgcaacaagaccaagcgtyggggaggtcagatctcgaaatggtgactgtggggacagagggggccactgggagaagaataaaaaggtttagagaagaatgaaggaggggagatagagac

SEQ ID NO: 31488 - DNA, 201 bp, Bos taurus
cgtgggtgctgcggggatggggggcagccaggagcaggggccgcccttgcaggctctgtgacatgaaccacgaagcccagtctggcctccgtctgcaatcrcctcccccaccatgtgccaggtgcatggtgaacacagacccctccacgtagacaggaaagcagagcccaaggcgacggagcctcagcctccagaccatca

SEQ ID NO: 31489 - DNA, 201 bp, Bos taurus
cacccgagagtggcccacggcacccaaggccatgaccgcagacccctgatcccacctcacccggggatgagctgggggagcccagccccccgaccccaccygaagcccaaagggccccgaaggccctccacacactctggaatcaaaacacaaaatccccgggcgagcctcagcggcgtgcccaaggagataaggacagac

SEQ ID NO: 31490 - DNA, 201 bp, Bos taurus
gcccagaactgtggccctgcaggaagagggtctccaggctgagtggtcccactttccgttaccagccacaagcttaagagacccttacaggcgctacctgrggccacaggacccttccagagagccttctctctccaccccactgggtgacgtttcaagctctctaaccctcctcaagcctccagcatgccccgctccctg

SEQ ID NO: 31491 - DNA, 201 bp, Bos taurus
aatgaagtagaagaagctacagctgagtaaacacactgggggaggccaagtcgcttgaggtgcatcgttcccaggttcagaccctgcaaaagacttctcayggcagacaggatacatccaaacgccttcccttgttcacaaggcctgcgtccagctgcatgtgctctgcaccatgcacctggcagacaccgagctccagca

SEQ ID NO: 31492 - DNA, 201 bp, Bos taurus
tatgtatagcctcaatattacaaataaaaagcagaagattgtcaggttagatttttttttgttgtgctactgcaagaaacatgctctaaatattaaaatamgaatagggtaaaataaaaggatggaattacatataccgtatttacattagtcaaaagaaagctgggatgggtatgttaacatcaaagtagctttcagagt

SEQ ID NO: 31493 - DNA, 201 bp, Bos taurus
actggagtggggtgccattgccttctcaatcacaattcagtatctgcctactcagcagcatttctacgttaacacgtcaaaaacacgtgactctgcacccyacccttggaaagttgcttttccaacgcgccccgcctcgtcagcagtggcatccggggctgaggaacctagccccacgactcagggccttgtctcattccc

SEQ ID NO: 31494 - DNA, 201 bp, Bos taurus
acgttgaggccccacctccagacggcacagcgtgactgtattgggagatacggcctttaacaaggtgaccgggttacaatcaggtgtcagggcgggccctsatccagcatggtggatgtcatttcgggagaaggagccaagacacagaccacacacgggacgacccggtgaggacgcagtgagaaggcggccagccacaag

SEQ ID NO: 31495 - DNA, 201 bp, Bos taurus
ctgctaacccatcagttaattaattaatgagcaatcggcaaatggcctccagtgggggaagcgtgacttggcttccaaatgctaactattagcccccttamggagctgagacagggagggccgatcactccaggctcccagacgagctggcacacacacaccgcaaggaggctgattctcatctgcaccagcatgcttgcc

SEQ ID NO: 31496 - DNA, 201 bp, Bos taurus
taaccagtttctttaaatgaggaaaggtctgaatctctaaacatcataaccacttcaaaaaaatgtctctctaaattaaatgcaaaaacctaaatgtgatycaaataattcagtgtatgagattattattttcagtacagagggataggaattaaacagatggataaacagagaagtaaacatggacacataattagatta

SEQ ID NO: 31497 - DNA, 201 bp, Bos taurus
ataaaggggtctgagtcattggtgctcttgccagtgtttgttttaataaaggttttggttttgccaggaaggtgaggagggaaggcctcatagtggttagyacctacacctgttaatggtctcttcgtgttggttgtggggatcattgcttgcagcatattactgccgcccggtacccacgtgactctgtgacagaggcct

SEQ ID NO: 31498 - DNA, 201 bp, Bos taurus
atgccctgtctattctgtctcaggtaatctctgtgatgatcaattgtgtccttttgctgtctgaccagctgccttccatccatggctgagggcccctaacrggagctgcgtgagtcagccatgggtcacagtgatccgtcaccagcacagcactgggatgatatgttggcgcctggcctcaggaggtgttggcagtgccag

SEQ ID NO: 31499 - DNA, 201 bp, Bos taurus
catgacagtgcctgcctggggactgacagcattcctcggggtgggggggcgggggacagactggttcttcaggtcattaacatgaagctgacattggtgcyctttgcaaccgttgacaaccaatgccgctgtgcacagggagccagactgcacttactgtgtgaggtctgatttgcggtttaaaaccatagacttaaaata

SEQ ID NO: 31500 - DNA, 201 bp, Bos taurus
gaatcccccatccttcagacccctctggttctgtccccagcgtgagcccttccccaggtactccatcagctctaagtccatagtcacttcccttagcattyggtgaccgtctccggtgtgagctttggctccgtgcctatgttctaggcttcttgagagcaggggtgatgtttatgccactctgcatctccacggtgttgt

SEQ ID NO: 31501 - DNA, 201 bp, Bos taurus
gtaccaatggtgtgacaggtactatgcccccaggagagagacggagaccgaggcttacagtatccacccagcggggagacagggctgttactgcacgtgtrtgttatgtgcgagtcagcccgccttctgagaaccggtggttctgtgtaactgtaactcttcctgcactagagaaactgaagaagtagagctggtggtggt

SEQ ID NO: 31502 - DNA, 201 bp, Bos taurus
gatcagatccccttaagtaacttgcttaaggtgtcactgccgagccggatttgaacctgggcagtctagccccagggcctggactctgatctgctgccccytgatgtatgatcaccgtaagctaacaataataacaagctagacaagggtcatgacatcacatgggcaaacgcaggtcacgacggcatacgggaaccggcc

SEQ ID NO: 31503 - DNA, 201 bp, Bos taurus
tgattttccctactttcttcaatttaagtctgagttaatgacaagtatatctcttacttcccacacagatttttctgtgtatttatctttcctttgactckgtcaggacctcaggtaccattacacagcagtatttctggtgaggattgctcagtattttagcatgatgaagatatgtactggtgccatttactgagagag

SEQ ID NO: 31504 - DNA, 201 bp, Bos taurus
ggggaccttcccaacccaggaatctaacctaggtctcctgcactggcaggcagattctttacccctgagtctcaggggtaactccaaagtgtatgggatgyttaaatgtatttattctagagtttacagttccttggatttccttccaatcacctccagcatgtggtgcagttatatggatatgttgtgattgtgcattta

SEQ ID NO: 31505 - DNA, 201 bp, Bos taurus
tatgtagtcgctccaggaattcaaggcaactctctgcctggaagagccaaagtgtgatttttatatggagacagcacacgctttctgatccttgaatccayttttcattaactgttcacattaagcggccctacctccttggaaaacaaagcaggagtatgttagagaaagggctattttgtaatctagataaatacttgc

SEQ ID NO: 31506 - DNA, 201 bp, Bos taurus
tggtcttatacagagaagaaactatacacccactgagaccccaggaatgtacacatacagagaaaagaccgtgtgaaggccagtgaggaggtggctgcctrcaaggtggggagaggagcctcgggagaaaccaaaccttccagcacttcggtcttggacttccacctccaatagccatggcaaaagaaatttattttgctt

SEQ ID NO: 31507 - DNA, 201 bp, Bos taurus
agatgagccgtggggcccgggtgtctccctcagggccgctctgatgtccggtcaacagcaccttttgggtgagtgctcgtgctcctggcatggcttctccyttgagcctcagcaagcggggccgtggttccagcatccccatcttgccaatgtccacgccctcgaaaggacagacgcgccattgaatctgtgggagcctcc

SEQ ID NO: 31508 - DNA, 201 bp, Bos taurus
gctttccccacgcgggcagccttcccaggcgcccacctggctccgccctgcacacccttcagctctcaaatgtctcttcctcggagagcccttgcctgccrcctggccctgcctcccgtcattaggccactcatagcccttggctttctgtccgtcgtctgtgtccccagggtcatttccttggcctgatgtcccttccta

SEQ ID NO: 31509 - DNA, 201 bp, Bos taurus
ctcaggccagggctctggttcaaggcgggaatcattacatggctgggtggactgctattgtttctacctttcgatgtctggaatctttagtaaagtacccmgtctgtggccatctgctggcccttctggaacattttcccgtttgggacttaaacaactgacttttaaagataaggaaacttatggatctgccactttacg

SEQ ID NO: 31510 - DNA, 201 bp, Bos taurus
cagccatccttctgcagagcaaacgccccgagaaggagctgggaggcctcagtaccgtttacagcctgtgcagaagtatcgggccatcatttctgaccccrtcggggtcactgagttaggacccagccctcctcctctcctcgtgcctccaccactgcgccatcctccacgccccttgcagggcctcactttcccatttga

SEQ ID NO: 31511 - DNA, 201 bp, Bos taurus
ccatctccatggaataaccatgactttttctttctctaaaccactgtgatattgtcagccccacttagcgtagcagttaatcagcctcctcctttcattgytcatctgtttcacttttgagtaactttatttcccagaccaaacataagctgttcaaggacagagtgtttttcatctcactttgattttccccggcccacg

SEQ ID NO: 31512 - DNA, 201 bp, Bos taurus
ttagctccacttccctctgggtgtttgtttcactctctctcaccgtgaaaagacatattctatgggaccaggtagatcagtaatccctgggccttccagcrccagaacccagtggcaggaaaccattaacttcataactctgtcagggagacgctgagggatgacctggaccgaacccacaccgagtgtcgccgaggccag

SEQ ID NO: 31513 - DNA, 201 bp, Bos taurus
gcatcacccacctggccaagggaccctggggagcccgatgccaacctcagcccacggaagagctgctttttaattggcctcgagtcacttcatctgtttgycttctggggctgtctgccttacagcacggatatttgcatttcaccccatcagctggccctaaaatcacaggctttccgaaggctgcagacctgcagttgt

SEQ ID NO: 31514 - DNA, 201 bp, Bos taurus
gcagcactttttagaaatgacattctcacatgtctaactcaacagaactgctatcactgttaaatttttagaggtaactgttaagttagcactggactcaygcacacagatgagatttaacacagcacgtttgcactgggaaccatgagggaattccagcagggcatcgtctcatctgtgttgtgccccttttgagtggaa

SEQ ID NO: 31515 - DNA, 201 bp, Bos taurus
attaggaggtgcccccctggggcctcaaggcctgtcctgcggtcaggctggccttccccgcagttccggggaattagccaagggctggagggccagaactyggcatctgcatgcagagttcaactctgattccttcgaggtggtcagaggtcagccagacacggccctttggggcactgagagtgccctcgaatttttttt

SEQ ID NO: 31516 - DNA, 201 bp, Bos taurus
ctgtttaaaatcaccgcagagattcttacactcggcagacccctgactgagacgtgatgggtgcaaggaccgtctgcagacctgagctggccggcctcacmcagttagaggcgctgagaccgggtcacgtgtaaaatgggaccctgccagtctcaggcctgcagtggcgtccgtctggggcctcccgggacctcagtgtct

SEQ ID NO: 31517 - DNA, 201 bp, Bos taurus
cggcccctggagatgctcacaggtacaagtgttcactggttctggaatcattcagagacgcaagacagcacagggggatccagactgcagaacccagctcygtggatgggcctggcactgcccctcaccggctgaatgacctcggaagaacttcagctttgctagttgcctcgtctgtcaaatgtgggcgataattcgatc

SEQ ID NO: 31518 - DNA, 201 bp, Bos taurus
agcctgaaatctgatttgttttttttccttttcatttctgagctggttctctttgctggacttcctgtctggtctcactcctgctgctgagagtctgggcyccatcagccaggcctcctgcacaccccttcctcccctcggggttccctgctaagcccacccccaccgtccccacaagcatgcccttctctcacttgcgtt

SEQ ID NO: 31519 - DNA, 201 bp, Bos taurus
ccatgtcccgcgagatgccagggagggcagtctcccagcatcctctcagcctccggcattgtatcttatgggttgttgacgcttcacacctggccagctcytccccacgcgtctgtgcgtctctcctcttagaaccacgccagtctctggcttagggctcaccccatgccagtgtggcctcatcttccctaattccacctg

SEQ ID NO: 31520 - DNA, 201 bp, Bos taurus
caccagcgttcccacccttctgttggtgcttcctgtcctctgcaggctcaccacagacgtccggtggatctaagaatgtccgaccactaagagagcgtgcygctccccagagagtctgatctcactcgtgtcttcctgggcttgacttcacgcttggtgtgcaggtcacatggccagtagtcacacccctgtaacacgacc

SEQ ID NO: 31521 - DNA, 201 bp, Bos taurus
taatgtatggaaccaagttctgccccatttgagtttaaaatgatgggctcaaaaaaaggcatctcagaataaaacggaagacctattacatgaacatttcrttctttttttggtttgatctccacacagttagaaagactttctgttcatctggtcccacaagcagacaagagcagttcttcaggattctttcttttgggt

SEQ ID NO: 31522 - DNA, 201 bp, Bos taurus
tctgagcgctcgagctgctgagctgggaaagtccgtctcgtgcggtctccactgaaacagcgggcttgctctccctgtttcagggaaaaggccagcaggaycatctccttggctctgaaaccgctctgtgacttgccccctttcttccctctatgcccggcaccttccttgcctcctggatttctgtcctgtggggccctt

SEQ ID NO: 31523 - DNA, 201 bp, Bos taurus
cttgtccgtcatcagcatctttgagctgagtacctcatctgtatcgagcacagtgacgggtactggctgcagagcggtgaactgggaggcaagtggccacrttccctgattcccgcacaggactgagttgctctggttatggaaacaggagcagaagatccgtgtgaatttctggccggggacatgaaagccggtgaacat

SEQ ID NO: 31524 - DNA, 201 bp, Bos taurus
aaaatatgaagacttcgatctctcaggtgagatgatgttctccattggagcccctctctccccaaagccaggaaataagtcaaaagatgtttatagatgcmaagtctagtataagtgaacagactgagtatcctacattatggaggcccacctgcccccgtggaacccgagaggatgcgaccgtttctaacacttcttgtt

SEQ ID NO: 31525 - DNA, 201 bp, Bos taurus
gcaaagcagaaaagctaagtgtgccccaaaccaggcacaccagatgtccccatctccagcttccctgtgcccacggcctcccgcagggcacactgagcctktcccctttcactcctgcccgtcttcgaggctctgctgaacaggagtgctggtggccaaggcccccttgatagaaaacccttaatcaatagcacgtcttcc

SEQ ID NO: 31526 - DNA, 201 bp, Bos taurus
tgaacacggactgtgtctgagctggcacgaggcagctccggttcccctgcgagctcggtacccgctgaggtgtgcagtctggcggtggcctgctttctggrcgtcgcctccctgctgtgtttcgcttctctctctctgtgagctgactgcgctcagggcagccttcctcccggccttccacagcctgtctccccttctctg

SEQ ID NO: 31527 - DNA, 201 bp, Bos taurus
cccagtgtctcgagaactgagcctcgcacatggatacttcgcagccactgaggacagcggctcgcaggtgctcagctttgcccctggccgactctcctctkgcttcgtgggcaggagtctggtgttttactggtgggtttgtgctgctggggggtgtccatggtgcagcagggcccgctcgcggccacccgtctccctggc

SEQ ID NO: 31528 - DNA, 201 bp, Bos taurus
ctggaggaaaaccgttcggtccctcggacctcccacagccctcccctcgggtccctccttgtccatcctaagagcggtgactgatgggtgctgaggagctyaagttcttcagttaaatcaagccccactgcttggaaaagaaagtacactgccccagtgaagacttcatagtagaatatactttcagaaagtgggaaatag

SEQ ID NO: 31529 - DNA, 201 bp, Bos taurus
aaacacaaagcccgaacttcctggactcctgcagctgacagctccctgggtcctgaatgtcagagacgcctcatagctcacattcgactcggcctctgagrgcaaaggcagtctggagtggctccactgtgtgcaggggcgtttcaggttcatatttaatattcagacaataaaaaacggccacgtcaagtggaaacaaac

SEQ ID NO: 31530 - DNA, 201 bp, Bos taurus
ctgctgaatgcctcggggctgcagggaatgaccctgagtggacattcgccacagccgctcaggctctgtgaagctccgcggaagacacagcacacgtcccrcaggccggcccccactcaaggactgagaactgctttcaagacctggcccattctggccaaccatcagcatttctctgcgagaaagaaaacacaagcatat

SEQ ID NO: 31531 - DNA, 201 bp, Bos taurus
ccccagtgtgaccacaaaaggcaggcagcaatcctgggaagctgcctggaggaagggaccttgttctcgtgggttttcttgctctttgctctcctgagaayctgcatggggcctcggccacagtcagcactggcaacggtgtccgctgaacaaatgagcttggaaacaggtggtaggctcaggtgacgccgagttagcgca

SEQ ID NO: 31532 - DNA, 201 bp, Bos taurus
catggtctcactgcagggacgcagcagaggagagcctttcacatgcagcccgtttaattatcaggagcacgttgccgggccgggctggtgggcaattgccrgtcgggcactacacgtgcttacgccgagatgccccactggagcggcagaaagtcatctcaagtattgcaagcgtctcctggatttctggggcctctgcca

SEQ ID NO: 31533 - DNA, 201 bp, Bos taurus
caatggcaacgttgaagtaaacacatgagcgccgggaaggcacgggggtggggactgcccacgccttcctcctggagggcccctccctgttcacactgccrcaccgtgcagtaagaggagtagaaacaggaacggttgcacgctaaccacacgcatagcagaggctgctcggaggtcggtaatgggccgccagtcttcagt

SEQ ID NO: 31534 - DNA, 201 bp, Bos taurus
gtggccccggctcacactcgtgagctgttggccagggaccagggacagactcgagtctttggaacgagaagcacgaaaggacaagccttcacactgcttayggccacactccatccacctgggccgaccagaggtgaagagtctccttatgaaagagagccgactgaggaccgtgcctcctgccccacagtggacgcgctc

SEQ ID NO: 31535 - DNA, 201 bp, Bos taurus
ttgacccatgcctccactggagacttgtggatacttacaggcaagtctgactcagtcccttgtggggacactgctcctttctcctggatcctggcacataygaggttttgtttgtgctcacctagtctgtttccccagacctgtgaaagttctgcagtcaatcccactggccccctaagtcaaattttctgggagttctca

SEQ ID NO: 31536 - DNA, 201 bp, Bos taurus
tatctatcattcatcttctatgctgcaaattattgtaattttcaagcattataatcatttcatcttatgtattatgactgtttgtcttccctgtggcttartgatactgaatttgcctaccaaggcaaaagacatgagttaagtccctgaattgagaagattccctggagaaggaaataacaaccgaccccagtattcctg

SEQ ID NO: 31537 - DNA, 201 bp, Bos taurus
caaggtgagaccggcctccttttgaggggcaatggcagggtggggattcctttcccgaagaagcaggggaaccgaccctcatcttgaatagaggagggggraaacggggcccttcttgagttgtggcatgaaactcggcattcctctctagtggggacgtgtatctcggggaccttcctgagttgcataaagggtgtcaag

SEQ ID NO: 31538 - DNA, 201 bp, Bos taurus
ttaatctgtgccagcgcccactccacattgaactggacccaccaagtatgagcctgagtatccccagcctgggacagaccgtagcatgttcaaattaaatmtttttagtcttggtcttgtggtttgccattttgtgggatttttgcttcatgtactaaatccttggtaatagtacattgatgtcaagagatcagatattga

SEQ ID NO: 31539 - DNA, 201 bp, Bos taurus
agaaaaggacaagttatcaagaatgtcaatgatagtaagaatctactttgaagatactctttgggaggtagtgttttagctgatgtgaagaaataaggagycagtcatacaaagagttgacggggggattattcaggaaaaggaaaggtattttacttctttcacaagatagctacatataaagcactcagcacaagactg

SEQ ID NO: 31540 - DNA, 201 bp, Bos taurus
atttaagagatatttcagcaacagcacctccaacatgcggttgtcattctaattaggttaggattgagaggaaaggaataggcccatgaggaaaaccacaytgattgtaagcattattcagacttagaactgggggaggggaaaagtgaatgaccttcctgagcacattctccaaaagtaactctcatgcaagggcaggta

SEQ ID NO: 31541 - DNA, 201 bp, Bos taurus
tttacaactttctaacattattattaaatggtagaaactttttgagacctcttgttgacactttaatttttcattcaagggtgttttcatcaagtctgaaytcacatatggcattttcttcctaaataattttgaaaatgacatgtttaccttctcttttgacttgtagtaaaggcctaaaatgtccataaatgagggata

SEQ ID NO: 31542 - DNA, 201 bp, Bos taurus
ggataaagaaacaatgtcagcagtcatctgcaaaaaggttgaaatagtatatagtttgaactatagacacaagttctgtatcactggacataaggtgtgtractagtggaaccacttaatagtattaaatagtgcaactattaaatactgaactattagttcagtataatatactattaaatattaagtttgaatattcac

SEQ ID NO: 31543 - DNA, 201 bp, Bos taurus
gaggttgagcgaatagctaactacatttagagtaagttctactgtaaagaactaaaaggattaatcttttatccaaaattaccagaattactaagctgtayacctaaggtcacattacatagtgcaaaattgaaatttaatcatgattgctagagtattaccctaattgcccaaataaacagaattaaaatcacttggatg

SEQ ID NO: 31544 - DNA, 201 bp, Bos taurus
ataagctttctattcttactagaacagagtagtatacaaagaacccaggttacgttcttcgttcgtttgctgaaaagcagtcaaaattctttaattctgtyaaatcagaacactggaaagcacgttgaatactacatgaaataatgactcggtgaacatttgccttctctgcaagtgcgtgccatatgcttgaagaaaaga

SEQ ID NO: 31545 - DNA, 201 bp, Bos taurus
ttttgttataaaggcagaaagaaaagatttagcgagtaccatgttataatgtgctttcctggtgcatcagatatttgagttaaaataatttggtttataargaaacttttcgaaacatatcttttacgtaaattgagttctagcaggcacactgtagatgaatttatccacagtaacaacatttgcaagtctgctgtgggc

SEQ ID NO: 31546 - DNA, 201 bp, Bos taurus
actggttctactgagtaaatttgatgaaatagtttaccacaaggattgccttttacattccaaaacaaaagcattaaacgataggtgagtttaacagaaayggatattgcactaattcttcctcaagtgcctgtattttttattttgtaatgatttgtattccctgatgtgctttatctcatgcatggctgattacaaatg

SEQ ID NO: 31547 - DNA, 201 bp, Bos taurus
gcgtagataagttactttagcctttctggactttctttcaagtgatacttgttaaaggtatcacttgaccacatgtccgtgaaagagtgatggtgtctgcrttccctgcaagtagaggtttctgtaaggtgtagattcctctgggtcagttgaggagatctttttggaggtgatggagctgtaatgttcctgactgtatag

SEQ ID NO: 31548 - DNA, 201 bp, Bos taurus
tacctgagttgctgtccccattagatggggtacatgatcctgagttgagaaatgaaatttcatttccagtcacctgcctgtccatcctttactggtcaggrgaatggagagagaagagaaagattgatattctaggcagcagcaaacatgccagttctcttggtagccagagccaaaggataagtttggttcaatagcttg

SEQ ID NO: 31549 - DNA, 201 bp, Bos taurus
agttccaagggctggacttctgaccaaggctttgatgagttgttgtgtctccctgccctaaatgacttgtgtaaggctgggctgtgttctgagctgggccraagaaggtcagcacctggactttccttgaaccactgaggagagaggtgtgctttcttctgtggttggaaagtggtagcgtgtaagtctggagctgtcagg

SEQ ID NO: 31550 - DNA, 201 bp, Bos taurus
ttcctcttccaggggatcttcccgacccaggggtcaaacctatgtctcttacatctcttgcactggcattctttactgctgagccaccaggggaggcccgmtgtgttgttaccttgcattaaactctcgcattgtcatatgagttttcttattctatctctgtgtcgtgctctgtattttctccctttttctcttctggcc

SEQ ID NO: 31551 - DNA, 201 bp, Bos taurus
caggtaaatttaagatttcagtgcacagggagagaccctggtgtgtaatctgggttttaccttgtccagtttcctctgcttcaggtgtcgccacacctggmtccatccagaggccagcccagcacctttgtatgtaattacctagcccacagggtgaggaagaggagaggaggggatattcagtggccagtcctgctaggt

SEQ ID NO: 31552 - DNA, 201 bp, Bos taurus
ccacatgtggccctaaccatgccagaatggctgagcatagttatctcaggggctagaagtggtgtgatggcagaaatttttagtggtgacttactgatcaycctaggggccctacaaatgaaataaataggcagctcactagaaactcagaggctgagaacagagatctgacctgagacatcatgatcatcatggcctccc

SEQ ID NO: 31553 - DNA, 201 bp, Bos taurus
aatagtgtgaagaattcttttttagaaaagttaaatttcttcaatttaaacattctgagattataggactttggagggttattttttctcttgtatattayagtagatgatattcttaaaatttacttacttagaaaaaaataatggcaagtttatatcagctttcaaaattgtttttgtattttattgttctgtaaaaat

SEQ ID NO: 31554 - DNA, 201 bp, Bos taurus
ctttaagattcctggcattcagagcaacttgaacccacaattcctacttctctcattcctttatgaaatatgtgccttgcatataaaaagcctgctttttmatggacaatgcaggatccattttagtgatatttttgtaagcttgacaatttacgttgattgatttgttgtgtcatgaaacaaatatcgtttctatatttt

SEQ ID NO: 31555 - DNA, 201 bp, Bos taurus
agaaaatatttaagtattgagtaaagcttgtaatttttatgttcatagatttgtcaaaaagatgttatcttcccagcagcattgtgttatcaaagatgcamaccttaaatcaacagctgttacacctccagcaagttatgaatttttcctgatttatagcaatcattctttttatttcttttctcagtcaagcagggaaat

SEQ ID NO: 31556 - DNA, 201 bp, Bos taurus
ccctgtaattataactctctttggatcattgtccaaataaattaattacgttactttctgcacatctttttttttttttttttttacttgtgagattgcamgactgtgagggtaagaattgttgccagcgaaaaatacattcatatactatattattcatataatcatacaacacacacacatatcctggggcagcttaca

SEQ ID NO: 31557 - DNA, 201 bp, Bos taurus
tcatgggtagaagtgcataaacaacaattttatatggagggtaacttcctcctgaaagagtacatgttttcccctgtgagtctctgcagaccttcatttayatctctgagatttttgtatttgaaggaggcctctttcttacatgatcatcaatattattttacaaaactccttaatgggtcatgctatttaagtgatatt

SEQ ID NO: 31558 - DNA, 201 bp, Bos taurus
tgggagagcaggttgatgtttttcattaacaccaggtactatgccataataaggaatgccaactctcagctgacaacaaaattatgtttaaaatagagacstaactgtatctttccacaaacttgttggcatgtaagcaaaggcatttagctcaggtttacttagagtcctatgactatacagttctatgagggggtcaaa

SEQ ID NO: 31559 - DNA, 201 bp, Bos taurus
atctgtaacatgaacataaccaaaaaggaaaactgggaaccaagaggacaaccaaagactaattcattaattttccaattattaatcatccttaaccaggycactatatgcattaaaagacattagaacacaacttatttctaaaccaggaatgactgtttcagtccataacactttatgggactttttttttttttttcc

SEQ ID NO: 31560 - DNA, 201 bp, Bos taurus
tctgcaagcttccccagctcttcctcttttaaatagatccctcttttcagcctccactttctctgtttactgtctactacatacaggctatcaaatgaatrtagcattgctattttgtcctcttcggcacatttgtgcatactggatggtttctggtgtgggatatgtattgattcactagcacttgcagtcatttctgta

SEQ ID NO: 31561 - DNA, 201 bp, Bos taurus
ttaattcaccactttaacccagagccctggagcctctcttcagttgccttcagcgcactgtgttctgaggatcttagttcacctcatgctcagcctctatkactgcaagaatcactgaatctttctgaaatgctcacatctttaagttcctagttttcttaaagtttaagtacacatagtaatttgtacccatttgtacaa

SEQ ID NO: 31562 - DNA, 201 bp, Bos taurus
aagaggccttcactattttggatgtgagcaaacatcagattaggaaacttgacttgttgtaactgtgccaaagcctctttaatgttctttaaagatatgastacaggccaactcagaagctaagaagtagcaccgggccctgtggaatcagaccacatttgaatcacagattgcgttctgccttcctagactgaatggcct

SEQ ID NO: 31563 - DNA, 201 bp, Bos taurus
aggcagggttaggtaacagactgggtcaaggtgttattttagactagagagagagaaagatcgcacaccagctgtattctccctgaggggaatagagaaakactgtatttctttaccaagttttctagtgtcaatcaacctgagcccatacttcccccagtaattgtagatttgctttgattctgaaaataaaaggcatct

SEQ ID NO: 31564 - DNA, 201 bp, Bos taurus
ctgtagccttcaagtctctgctgttttaaaaattatctggagagattaaaaaatacagatgttaagatgcgatggagtctaagatacagatgttaatgagrtcaagtaattgtgcattctcgcccattgccatgtagctagcggtgctcctgccagaataatgcatatgctccctcccagtgaaggtggatttgtcccggt

SEQ ID NO: 31565 - DNA, 201 bp, Bos taurus
ttaacattttataggtaatttttcttctactttttaattttggttgatccacttaaacctctgtacacattccacaataagtaggaacaaaagaaaacatygttgttgtggattaaaacagataattattctaaatgtgttttccctgcaatttgaacattcatgagcaacaagactactgaaatccagctaagcattatg

SEQ ID NO: 31566 - DNA, 201 bp, Bos taurus
tgaattatttgaagtgaggtgaacatgagtatgcaaatagagttatttatgtgaggagagagtgtgttgtatatttgggaagaaaagtgctgacagttacytagctctccaaaatgttggactgcgcagacggactgacaaaaagaatataaagcggtatgcagcttctgggaacttcccttaagagacagtaaggacaag

SEQ ID NO: 31567 - DNA, 201 bp, Bos taurus
atcattgttagtaaggtattgaaatagacactactcctgtaaacagtgttcaaacctgacgccatgctctggaatgcagctcctgccacgtaaatcatagrtgccataaaaatcaatagacaggagaggtgacattgataggtgattactattgaaagagtgattgacagtaagacaatacaaaacatctctgacggggaa

SEQ ID NO: 31568 - DNA, 201 bp, Bos taurus
gggtcacacaatttgggaacatggtaatagtgagctggaattacaggggatagcttatacctggcaagtgaggaagggttagctagatttcaaggcctccmgaccctttagctaatctgaataactttttaggctctgagccatagagtctgtccctatttgtctgatactgggcccactggcaactggaaatggtgtatg

SEQ ID NO: 31569 - DNA, 201 bp, Bos taurus
aatcaactttctataatttaaagggctatgcaaatgcaaaataaaattatagcaataatattgtcattgatctcatagagttctaaaatcataagcataaytgtatattcaaaatatacttgtcagtgacataaccatttatatacaaagtacatttaataagattttttgtagcactttcttatatctcccatccctgca

SEQ ID NO: 31570 - DNA, 201 bp, Bos taurus
ttcctgccttatttctaaaagatataagggatttggctttatttttacttttgtgagatattcatagcttcaggattgcaataatgtaatcagaataaaartgtaaaaatcacaatttaagaaaaattattgtttggattattgtttctttcacttttaaaattcattagtctcatcaagaccgtaaaagcaaaacagata

SEQ ID NO: 31571 - DNA, 201 bp, Bos taurus
aaaccttcctgaataaacttataaacaacctcaaactgtgaaagaatatacatgaagactagacaagtcaatgatttcaaagggcatatactaacctaatrtcatcttatttttatatatccgaggaaattattccttatttgattagaaatgcaatttcttttatgtatgaacatagtggagagaatgtagaaagaattc

SEQ ID NO: 31572 - DNA, 201 bp, Bos taurus
gctgtttagaaagctctcaggttactaagtttctattttggggggcataaactaatttataaattaaaatataatgatgctatataatgcacatttgaaartatgtggttttcattttcttttggccaacgcgtctccacttacaaattaacttcctattaaatctgcttttgctaatggtttattttattaatcagtatt

SEQ ID NO: 31573 - DNA, 201 bp, Bos taurus
atatttgacccatgatatgttaaataatacagacattgaactttgtttaaactgtgttattttttattgtaattcctgatgaattttgattttacatttaytttgttcttctttaaaatgaagtttggcaggattactcaagtcaatgagcaattgctctcaagtatatactgacctgatttttagctttgtattcattct

SEQ ID NO: 31574 - DNA, 201 bp, Bos taurus
gttccttaggtagtgtataaaatggtcctaatatgtctttttgcatttatccatccttttttcaagtatccttgagacatcacagtgtaatgcaagttttmtttaacttacatttatatgctatcaccccccaaaaaaaatcacaaaaaatcatattctattatctttaattatgatgacaatccaaaagaaaatgtttta

SEQ ID NO: 31575 - DNA, 201 bp, Bos taurus
aatttctagtgagactgaggcaacccctcctcgaagggtgtcctgatcctcagtgtgttcatttggaagccccatacaggggaaagtacaagagggagctrtagttttcacacccaaatctgcacccttaggacataagtctggcatgtgtctcagacagataaagagcaacacatatgaaacatcaacccatttcccttg

SEQ ID NO: 31576 - DNA, 201 bp, Bos taurus
tgcaatatgccatctttgctttaaaacaactttttttttttttcctgaagagtatgattcagagaatggtactcagtgccagaaatcatttgaggggatayttattattaatattggcaggtactattgcccagttaaaaaaatttcttacaaactactcattaattaaaacttatacagaatttccttttcataaaaagt

SEQ ID NO: 31577 - DNA, 201 bp, Bos taurus
ctgctccttttgttccatatctgcttgctcagtaatcctttctaaaaatatgacctatgccaaggtaactgatcctgagagtcttccaatcctagccattsctccaatgtatctgggccttccccgtacatactaacatatttgttggggttttagtatccccctctcctcaagatcatttcgtttagtagataccttgat

SEQ ID NO: 31578 - DNA, 201 bp, Bos taurus
gcactagtaaaaaaaaaaaaaaataggctttctataggatatgatacaatgttttacttgtctataaacattcagaagcaaatgaactttgaaaagtgaaraccaattgctccttagaaaaaaagatcatttatcatttttattgatctcagttttctttttcctattttggttaaaatatagaagaaatctaactaatta

SEQ ID NO: 31579 - DNA, 201 bp, Bos taurus
tggagtggtacgcccgatggtttcctttgacgcagacgggcatttggaagatgtgtctgtgtgagttctggctgctactgctgggttccggtttgaaaggkcatcttttgcctgacgaggaggacgtaacgtttatcaatgagtacgtgaacctccacaatgagctccggggcaacgtcttgccccgaggggctaacttgc

SEQ ID NO: 31580 - DNA, 201 bp, Bos taurus
tgagacgagaaggaagcaggcctgagaagaactggggaagaatgtactgaggtctgttataggaagttgtaaaggacgcagttcagatatttcactgtaaygaaaggtgaatccattgagggccagtgatgagtactacccaggcttctgcagagatcttcttgctccccaaccccactcctcccccacccccagtagaat

SEQ ID NO: 31581 - DNA, 201 bp, Bos taurus
cagcattctagacaatatcccaggaatcagtagaaaagagctggattccaggacctgcttgggagtgtggtgaggtgctagtgatctaatcgacacattcygggttagggtcttgaagggttggcccttaggaataacagtgaaccagaagtggtccttcattggaatgagattcaagctttcaattccctcagtctcaga

SEQ ID NO: 31582 - DNA, 201 bp, Bos taurus
ttaatagggttgtgaaaattaattaagatgctccatattaattattgaggaaaagaaattgatttttttggaatcaaaatacccgccacctagagagtagmactcaacatattaaaatttcccaatttgaagattgcattcataagacacactaaacaccccaggatgatattttgatcagtcctttttcaccagtcatgt

SEQ ID NO: 31583 - DNA, 201 bp, Bos taurus
catttaaaatgttcacctgatcctgtttgatttccccagtgttctaaattgcttcttttgtcttcaaatttccatctttctcctaaagcctttcctctttytgggtttccctgtgtgaatttcccctacctttataaaactccatgcccctaacccagttattggcactgtgtatcccctcccaacaggacctcttcactt

SEQ ID NO: 31584 - DNA, 201 bp, Bos taurus
ttttggaatacttgtagatgatgtagtatatttttatatagtatctttcatgatatttgatgacaattattgacacttaaactgataactgaattaacgayatggcaggcttatccttactttatgaacttgtgactaagaagcaatttgtatgacattactttgatactacagagatgtctatttcctcttcaaacatga

SEQ ID NO: 31585 - DNA, 201 bp, Bos taurus
gcaaagagtcggacacaactgagcgacttcacttcactttgcactcatttgttaaaattataacatgcctttggtgagtagtaagttggatgatagagttrctatatatgctaaagtgggttttttatttaaaagaataggaatacaatgaaattctaaagttggaaagtatatagaataaaattctaattcttgatgaat

SEQ ID NO: 31586 - DNA, 201 bp, Bos taurus
caaaaagatacagtgctgtcttcctactagtcagccagcctatccaagtacagggcaacatacagtacttcagtactgcagaatttcacagtagtttagtrttagattatctgtgcctagattgtgtagagattctcagtgtgtgatctttcttggttctgggtttgcacctctactgagcatgaacaagggcccctgctc

SEQ ID NO: 31587 - DNA, 201 bp, Bos taurus
ccacctgagtactaatggtctaagaaatatcacttgggaaagattcacctacatggtttctatggagtttattacctggatttaccagataaaagggcacraacaggtttgtagttcttgtacatgtcttccaatggattcaaacaacactatataaggaccttgactgcatttctgtgactgacaggttttgtcttgatt

SEQ ID NO: 31588 - DNA, 201 bp, Bos taurus
tgttatcaaattaataaaaggtctcatccatgtgtgcagcccctctattgtacacatttttattaggaacgaaaatttcttttctctagcttggatttgcktgtgttctggccttaaccaagagttttctaaataggaacttcatgcgcatgaaattaatgacagatctgattaaggtgatttgcataaattagacatttt

SEQ ID NO: 31589 - DNA, 201 bp, Bos taurus
tgcggttaagactgttgactatctgctttataaaactctcagtctttctgagctagcactttttctctcttggttctctttctgtttgtgactgttccttmtcagcctccttcataggctcctcattttctgctcttagaaacctcagctctccacacttccctgtttgctctccggagcagctcacccactcatagcttt

SEQ ID NO: 31590 - DNA, 201 bp, Bos taurus
gcatttcatttcagttctgctgagaattttcaagtccctgctatttgcagtgtgctgatcctggaactgggaaaataaaagtgataactggacccgtcctyacagtgagagagacacgcacagaagtagtttgataaaatgcggttccctgtcatagaagtgcatttaaaaggctgggagaaccagtggaaagaacaattg

SEQ ID NO: 31591 - DNA, 201 bp, Bos taurus
ccatttaatgtattataaaattcaatttgataatgttttgttgataatttttgtatcaatgttcatcagtgatattggcctgtaattttcttctttttttkgtcttcatatgttttttctatcagggtgattctggcctcatagtttgagaaggataggtgtagctcttctttaaatgtttggcagagttcacctgtgatg

SEQ ID NO: 31592 - DNA, 201 bp, Bos taurus
gtgggttcctgcttccttgcagaatgacagtggcctgagcctggatctggatttttaagtccttatttccatggtggattggcagtgactctggaattttkcagaacacagcttcaacagggccaaacacatagcagaaagaagtggtgcacagatgacagcgttcttcctgattgaatatgtgggtggggctctgtgaac

SEQ ID NO: 31593 - DNA, 201 bp, Bos taurus
tactctttctaccaataaaacaaaataagatttagtattaaataagtctttgattaggtcagttttgatttatggggaacccattaatgtactgcacagamaggaattgcacagatttgatgaatcaacaaagcaggaaatggaaaataccttctcacctctgggttttatgagtcaggaagaacacgtccctggctacgg

SEQ ID NO: 31594 - DNA, 201 bp, Bos taurus
ctgaggcttgatcccacctttgcgtatgtcgagcctccttcctcataacctttgccgtgggtggagtgcctcacgctggcccccaacagtacagggtgttwtgagtgttagaaaggagaactaatatgtctgagattgagtagtgatcagctaaatgaaacaggtgggatgggctgagcattccaggcctaacgtgcagat

SEQ ID NO: 31595 - DNA, 201 bp, Bos taurus
tgtagtttatgcatgccatgctcacttaactgtcagatttatttttaaactttcaatttcctctcctatctccaggaagcatgtatttttatttttccacrcagtgtgttgtcctatttattattctggacatgggaataaaggcattcttggaaatgtctcgattatctttgccattctcttgttacatcctgtgatatc

SEQ ID NO: 31596 - DNA, 201 bp, Bos taurus
ttttttgtaccttgataaaatcaagacccagtgaattgaaatggcctatcttaaagccatatcatcttaaaaagtgaatatacaaatctttgacctgagtrccccagttgttgttaacgtttatttaggttgccctaagaatcctgcttgagaaaaatgaatatgactctaacatcaaatccaagactcattgtttcatag

SEQ ID NO: 31597 - DNA, 201 bp, Bos taurus
actgtcagctttcagaagttgttttgtggaatttgctcagcattcaaatgatctttcaataaatttgtgggggagaaagtggtctcccccttctattcctyggccatcttaggaccactcctctctttaaaaagacaaccagtatcttgttaataagttagcaaataacctcacatgacattttttcaataaatttcattg

SEQ ID NO: 31598 - DNA, 201 bp, Bos taurus
acatttaccccatgactctaaaatgttatcacaaagaaaatgggtccaaaacttataactgtctctgacctattctttaagcctggcctcatttacctacygcttttgatgtctagcaggcatctcagaaaagaagccttagtcacatcctccccgttcctctccaggttgtttctgtctcagtggatgactctgcattta

SEQ ID NO: 31599 - DNA, 201 bp, Bos taurus
cctggccttgtcctgggttatacggaaaattagcactggctgaatccaggtggtcctagtgccaggggttggtggcggacgacatgggtgacagggtgagyggggaggccctgcagttggattccaccagctcgccctggatgcgcacgtgagctgaggcactggtctgcctcaaggccgccttgagaggagcaatttggt

SEQ ID NO: 31600 - DNA, 201 bp, Bos taurus
cttataaaagtacatggcacatctcatgttcagtaagtattaataaccactgctgtgatggtggtcagcgttgttactactgagtcatgctgccatctctyggaccagtttctcatgatgcataaagttacacttagcagctttaagaatgtgtaagtaactgttagacaatctattttgacagatggacatctgaaataa

SEQ ID NO: 31601 - DNA, 201 bp, Bos taurus
atggtcactcagtcaggtctgtgtcaaaggcctgcaccatgaatcagagcctccagttatttgatgtgctcacttccctttattatatgtgaaatcttacrtacaaaaagaggggccacaactgtccaggaatggacagttaaatataaacatagaaaaatggttatcaatttgaacatacacctaattcttccaggaatt

SEQ ID NO: 31602 - DNA, 201 bp, Bos taurus
cataatatgtgtcttgtagctcaccaatttacactgtagcagcagcttgcacatttatgtccaaatactcaagattgctttgtatgtttgactaaaccccyaatgagccatttcaagtagtaaacaatacattttatactactttattttgaaaaaaactaaataagaatttatgaattaaatgatgttttgttatttatt

SEQ ID NO: 31603 - DNA, 201 bp, Bos taurus
aacatcaattgtacacactttaattttttactacagcccctctcttatgaaaaaatatctaacttattactttagaaacaggatagagaagttaatttccyaaagtttaggtcaattcaagctttactggttctttgctacctgttctcaaagcagtccacagtctttctctagtcaatttctaagtcttctgacctattt

SEQ ID NO: 31604 - DNA, 201 bp, Bos taurus
ggactgtgcagtgtgttctcaggacttataagataaatacattggaaaaacgtgcttgagagaaaagagatgtgaaaacacatggtaagcaactagggaartgcctcagggtaaagagcagcattttagtttcattttttgttgaacaaataagaaaacgtggtcaatggaacaagtgtaaatctcctgggaaaacagatt

SEQ ID NO: 31605 - DNA, 201 bp, Bos taurus
aagcaaagtcaataacacctgttaacaaggataatccatccaacagcggacataaaatactacctcagtgatacagagaacagagatatggggcccagacmccagtctcttccctgacattccttaatgagaccctccctgttaggcaagagagcctgccttaacaatcttatcaggccacattgagatgagggaagcagg

SEQ ID NO: 31606 - DNA, 201 bp, Bos taurus
tagccatctaggcctagcatctatgacctagcatagccatctaggtcatctttttagaccaaaatttcattaaattttatttttgtgatgccctattaacrattcagtaacagcacaaatagtcctaaatcctgggtgatagcatgttcttcttctagttttagaaatccaactgaagcaacacaggtataaaaataccta

SEQ ID NO: 31607 - DNA, 201 bp, Bos taurus
ccccattctcactgttcaaatactatgtcatctctgctaatcccgattctcttcaaaactgaacttaagctgatctaacatgcaaaacttagaaatgcatycagagcctactcatgacacctactcaggaaaagtcatgaagaatcacaagcaaattcacctattgtacctatttatatgttttactccctcatgccagga

SEQ ID NO: 31608 - DNA, 201 bp, Bos taurus
tctgactgcaaagcctcaaggttacagggcccgtacagggaagatgtttcagtctgcacacacaacccactctgcagacacttttcactttctcttattcrtatgctctcaactccaaggccaccactacacgattcaaagagagggctgccacagcctgcctgggttcgacacccatccctatgctcaaccctcttagcc

SEQ ID NO: 31609 - DNA, 201 bp, Bos taurus
ctcctgagagaccgcaggatgcagcagaaaaggaacagcaactgacattggaaaacctggatctgaagcctttaacctttctgattctgatcatttatacygctgcagtattaatagcacggctgtggtattagcaaatgaaggaacgccaggtggaaaccagtttgacagcactatgcaagtgttggttattctaaagcc

SEQ ID NO: 31610 - DNA, 201 bp, Bos taurus
gccctcacttggcttaagggagtaaggaggtcctccttgcagacttcacaaagtgtcaaatgagacaagatccagggaaatcttgtaaactatggcacgcragaatcatacaaggaaagcatttttgttggtttgtccctgtaccttcaaatgttctagaccacttttttccccctttgttattttctttttctcatccag

SEQ ID NO: 31611 - DNA, 201 bp, Bos taurus
aacttttgttcaaaacacagtttaagataaggagattgctctgtggaaaacagaaaaatagtgatcctccattttacttttggctctgccagttaattgayaaatgggtaaaatgaaggagctgaaaatgatattagcttttaaacttttttcccccttaaacaatgcagtgacttccccagccatccagtatttaagact

SEQ ID NO: 31612 - DNA, 201 bp, Bos taurus
actaggtaagcagagaaaacacaactcagctgcaaagaaactcacaaaatacacacaccacaaacttccgccatgcagctaagttcactgcatgtgttatragccacactcctctgaatctggtgttacactttcaatccaacttcagatgacccttcttccatcacttcacaaattgcaaccctttggagacccacttct

SEQ ID NO: 31613 - DNA, 201 bp, Bos taurus
taatgacaaagtgaaggacaacctacaaggctgttatttcttacggggaatacagtgtactagtttggaaacaatttgacctctggatatttgattcttamactattcactgagtgctgacactgggagtcatgattgtttcagatttgccaggaaagactaagtggtaataaactcttaggaggagaaggggacgacaga

SEQ ID NO: 31614 - DNA, 201 bp, Bos taurus
aagtaaatatgaaaacaattctaagtcaacctctgtgaaagtttctaaagttctctaatcagaaataatttttgccccctcagtgctcctgtaacacctgrtttaaacatgcctgtgtctcccattagacacactcttgaaaatcaagaattttaattacttcatttttctagtgcttaaaacaaaaattttgcttaaaag

SEQ ID NO: 31615 - DNA, 201 bp, Bos taurus
atcacaaaaacgttaccataggaatgaaaacatttcacagtttggctctacttttcctgtttcacttcatatatgtatcctgtaaattaatcaaatttgamaactcatttttcctgaaaaaatactctacattatccctactttgatcacatcgtttctcttctgtttcaacaaactatacaaactctcttctctgttagg

SEQ ID NO: 31616 - DNA, 201 bp, Bos taurus
tatatttaggaggctccttttataaattgttcaactctactgatagatagagagagatgcccctatcttttttcctttggaataaagttatattatataartcatgtattcccatttattattcccatgaataaatgaacatcaggaaatatttctaggagacattcctaacagagtgcagtgtggtactgtgatgaagag

SEQ ID NO: 31617 - DNA, 201 bp, Bos taurus
aattttctcactacttttttcttcagtttctaaaaggggtttgtgatgactgggaaattacaattccccatccaattgcaaacatgacattttcactaaayccatcttggtctttcctcatttgttgctcacaggtaactctgttatatttggcaccaacaccaacacaaatgcaaatgtcttcaactgaaaccaagaacc

SEQ ID NO: 31618 - DNA, 201 bp, Bos taurus
gggcaaaacatataaattccaagtaaaatctcgaagacacaatctgaacaatataatttcatgagtaagatatacatagtataatatctaccattatcacragaaattgaaagtatactattcatcatcagacaactaggaaaatcaactttaggaatgtgcatgtgtattcacacagtggacctaatattcattatccca

SEQ ID NO: 31619 - DNA, 201 bp, Bos taurus
tagagatcaaaataatgaacatagcccgcaagggcttctgaagtttggctcctatctatgtctttagcttaacctcactctattccttttcttgatccctrtattccaggggcactgactgactgattttccagtgggttcacaagaatctcacagtactgttccctcttctagtaatattcttctccagttcccctgctt

SEQ ID NO: 31620 - DNA, 201 bp, Bos taurus
agcagaaagctcaggcgagtctgaggacaaacgagagtaggtattacggcatgtgttcaaaggaaagagccaatcaatggactgtgttgaaccaagtttcrttcttatactgctagagatgatgcagatgaaggggcagtggtcaaactgagttctatagtttctgctgggatttttttttttttttcacttaatatgtca

SEQ ID NO: 31621 - DNA, 201 bp, Bos taurus
cttatacatgaattttacaacgccagtgctgatgatccgccttctccagagaacccagggagttgtctaacagactgctctgttttccagcattggcgctygtttccttggaatctgccgaaaggcccaactactttctctgtgtccacgatgacgacactcttagtttgaaactgtgggaagcgaattcagcctttcatc

SEQ ID NO: 31622 - DNA, 201 bp, Bos taurus
aggtacagttccagacagacattttatgtcacaagaagctctctaaatcttgactagacttttgattcagtaagataggaaacattctacttatgaaatayggcagattttaagaagcaaacagaatctttctcttttatttttaggaggggagcacctggcactataattgtacaacatttgaatgtgttaagactgatg

SEQ ID NO: 31623 - DNA, 201 bp, Bos taurus
cacacatattctactttttaatcaaatttgaagttagctttgttatttttctcttaacccacttatatttccatgtaattgtaattttggataatggtttraaggtttctgaagaaccagtttctcaaagaacaaggaattcaaattggttccattcaacaaatacttcctggatgcgtatgacctcttttatgtttacaa

SEQ ID NO: 31624 - DNA, 201 bp, Bos taurus
actaggcagaggccgatgtcttcctcagctgtcttctccacaaattcttccagcagctttggcaggtactaatgtgtttacttaggtgtgcctggttcccrgaactaatagtgatttgaaattgttcagcacattgttatgtcaaatataatgagcaaaatttcaagaacaacttccattatccaggagttgataaggtct

SEQ ID NO: 31625 - DNA, 201 bp, Bos taurus
gaggttgatacaactgcaaactaatcaaatatgaggcccttccagagtgcctagttcccccagttaacatataggtcttctgtccagactaggaagcacaytgactccctgaggcctccagaatgtgcagagccacctacaaattaccacatgcagaccatcaggtgagccttgcaataagaccaggagacaaatctgctg

SEQ ID NO: 31626 - DNA, 201 bp, Bos taurus
agaaaaccagaaccttctagctgtaaaggcccttagaaaccacctcatttgtctccttgcatcttaatacatatgaaaataaagacttaagagtggccgtkacctggtccattttataaatttgttagttgcaatgctggattagaactcattatctttgatgacagctcttttaacaatctcattctgcttttcaagatt

SEQ ID NO: 31627 - DNA, 201 bp, Bos taurus
gaagatgggcttctgggtcatatggtagtttatttctaattttttgaggaagctccatattgtctttcatagcaggtgcaccattttgcattcttagttayacactaacactgtataggaattccaagttcttattaaaaagcctagacctgaaaatgaactgaacttcacttaacttttgggagaacacttcaaaatgct

SEQ ID NO: 31628 - DNA, 201 bp, Bos taurus
gtctaagcagttaaaaccagaaagcttaagatgcagttacattcttaactagttcaactgtttgtgtggaaaagacatgctttctattcagaaggcatagmgcagaatatagttataaaaatattagtcccatacctctcgaatagcagtacaaaactcactctgaagcacttttttgagggattgtagcttgtgcactgg

SEQ ID NO: 31629 - DNA, 201 bp, Bos taurus
cccaacttcagtgaaatcctccctttgaacagttctgtcatctctactccttttatcagaaaaaatgcttttgtgttgggccatttttggggctgatgacygtgggagatgttgactccatttccctttcagcatttcagtaccatttttatatccagttataagaaagagttaaagctttgaggcctcatggaatttcag

SEQ ID NO: 31630 - DNA, 201 bp, Bos taurus
ctaagagtacctaagtgcaaagtggggtgacaagcagagaagcttgaaaggtgagaagaggtcagccagttgggaaaggatctcctatgacgtgccaaggrtgcgttgtgtgatcacttgaaagatcagccacccacttcaccctgagctctgagaagaaccacagtaatctcttagtcactaatgaacaacaaacatcaa

SEQ ID NO: 31631 - DNA, 201 bp, Bos taurus
tttaatgttaatagatgttgttaaaacttcacattttatatatttatcaattttttatcttctgaagaagataaattatatccaggactgcttgactttgwaacataaaatttacactataggttgttatcaatatgtaaagaaaacagcaagaattgattttttcagtggttctcattccaaccaaacataatcagagaa

SEQ ID NO: 31632 - DNA, 201 bp, Bos taurus
aaaatgtaataaggaaatgaagtggaactctgttgtgttttaccagctaaggattattataactttttaaaaagtgagagagaattagaatatttactttyctttaaataataacaatattaattcatgactcctatagccttagttaggaattatgaggttggtcattaaactaatgttacaataggtactatgatttat

SEQ ID NO: 31633 - DNA, 201 bp, Bos taurus
tataagaaaagaaagataaatattgctatagtgcaataatcctggtgggtatgattatctgaattgaggtttttggataaaagataaggcatgaatatgtrgcctacaagtcacctgaatgttggttcccagaataagactcaagtttttttaactgacccattaatagtttgccattgctgtatatgaagacagagaggc

SEQ ID NO: 31634 - DNA, 201 bp, Bos taurus
ttagggacaactgcagctctttcttatcagttgtatggctttggttccagggttactaatcatgatcttttcaaaagaagctagaattgtagatttttaartaaaatctctcgggatgttaacgtttgcagcttttaatttttaaaccagccccctctccttccaaataaaaaaagaaaaaagaaaacaaacagtctgctc

SEQ ID NO: 31635 - DNA, 201 bp, Bos taurus
agggtgtgatagttatgttttagaagaatttcactatagtctaaactttcttttcccaaactacagcatttttgttgttgctacctagctttgagccatarggctctgaaaataaatatccagggcaagtaaaatagtgtgaatttcaatatctttgttattgaatctagattttctcttcaaagatgaacaagaaacaaa

SEQ ID NO: 31636 - DNA, 201 bp, Bos taurus
acacagaagctactgtttcaaacagaagacaattataggaaaatctcttaagactctgagataatttaaatattttggtttgtattatcgaaaactgaatrttaaaattatattgggattaaaactgggagtttgtttttctaatatgggaaaatgtaatttaatttaatttctccattaactgtaagaaaagactctatt

SEQ ID NO: 31637 - DNA, 201 bp, Bos taurus
ggtccaacagatcttattgctatctccagctcctttggtttcattattgtccttcttagtgtgtggaacatgaatcactgggaactggcacctttggcctratcttcttttcattgcctatgttagtaataaatagtctaaatctacaagtgactcattgtatctttatgaattggatcaatcaagccttgggcttggcct

SEQ ID NO: 31638 - DNA, 201 bp, Bos taurus
ttaaccgtctgagccaccaatcaaagagtttagtttactcaaaatctgcacccctcttgttataagaaacagaaataatggccaggtaaataggagatacygttattctctctactgtacagctctagagtacagttagctacttggcatttcactttttccttcattcacaggtctgtgccatgcctaccctctactcaa

SEQ ID NO: 31639 - DNA, 201 bp, Bos taurus
tcttaaacagtgtcagttatgtgttgaagatgtgaataagatacatccatgctctgttaagagctcagattctccagcctctttgcaagtgggtgtggccrcaagatttcatcctgcccaatgggatgtaaccagaggagaggtatgtaacttgatagtcgtttcttttcccgtttcctgctggctggaatgtgggtgtga

SEQ ID NO: 31640 - DNA, 201 bp, Bos taurus
gaaaagtttcttagtagggttacagctctcatttttgttacaaaaacaactttctattttagaaagtagggctagaataatgaatgaataatgaatgtacwttttattttgagttttctgagcttctgtttctttttgtgttatcttggaaaaattttgtctttggaattacaaatattttctgaccttaaataacttgat

SEQ ID NO: 31641 - DNA, 201 bp, Bos taurus
ctgcccttcacatgggccttcactgcatgccataccttgctatatcattaccagcaactgttagagaccactaatgatatactcagccattggtcagggaygcagtgggccccttccccgagtgaggggctgttaatgagtgaccgttggtggtcctgcccagccattagtcagggccccgtgtgcccctcccccaagtga

SEQ ID NO: 31642 - DNA, 201 bp, Bos taurus
taacttttccttttttcttaggtttggccttgtgggcttaatgagggcatttggataatagattttatagatttgtgagaaacctggagatggtctatgcytggccccttgtctccagctgaggtgtagagaaccagagatgtgaaggtcacccagaaaatggaatccctagaactagaagacatatttgtgactgtcgag

SEQ ID NO: 31643 - DNA, 201 bp, Bos taurus
ccttaaaattgaatattgaacatcctggttttctgcatttctctagccgcccctggcgaggggagttcctcactggccgcttctctccgtgggtttcagcygcctttcaggcagtcctctttgctgtgctcactccaatctcaaaactcctgccatctgcttaggcaaaggcctccagacctattctactggaaggaaagc

SEQ ID NO: 31644 - DNA, 201 bp, Bos taurus
cttcccctggttcatttcaacattcctgacccatgtgatgccttcagagtttgcacttccattccagaccatgtgaactacattcttctactcataacatygacagaccatagatttttatatcatctgaaattcaaaacttctccagtcttttccataataaaatatttcaaatacctcatcagaatcctatctctctca

SEQ ID NO: 31645 - DNA, 201 bp, Bos taurus
agttccaaagagagctaaatgaaaaatcaaattgatttggtcttataaaatactattgactttgatttttgtgtccaatttatgcttctgtgcattttcarggacatcatttctaacaagattgcatgatttggacatgtgcaagctgaagtacttaattaccccctggaatgaaccaattagatttttgactagacttct

SEQ ID NO: 31646 - DNA, 201 bp, Bos taurus
ctttcaaatacatgtaggccaatattagaacttttgatttgaaatgcaatgggtaaatgttaaaggatttttacaaagaggcctgacctgatctggttcaygtgtaaccttggcggctgtgtaacaataggatggacgaagaccacaggcaaagccgagacaccagtaatgaggctatttcagtggccctggaaggagttt

SEQ ID NO: 31647 - DNA, 201 bp, Bos taurus
taaaacattttaagcctgttggactagatacacaatttatccccaatatattagagcttgatgtggggtggagagaggccttcctaggcaatggttcttcratgctctgccctatgactttgaattgcctagccagcttcaaaggaatggcctacacttgctctcattctctttgtattaatttaaatttcccctatggtt

SEQ ID NO: 31648 - DNA, 201 bp, Bos taurus
tatcagcaatgttcctgcagtagcttcttagtgaatattctgtgcttcatgttgacatgaatatggtcatactaaagtacagatttgtacatcctaaagtmgaggccctgatgctgggaaagatttaaggcaggagaagaaggagacaacagaggacaagatggttggatggcatcaccaactcgatggatgagtttgagc

SEQ ID NO: 31649 - DNA, 201 bp, Bos taurus
tttttgaataaaagtatctttgtagaaattaaattcacctcagtaaccgcttattgaatcctactgtattcagacagagtgctgtggatacttagcagaamgaaatataacctgatctcaaagtattcaaaatcaagcatagaaaacacatagaagtgatcaacagtttcttcttctgcaccctctcatcctcttcatttt

SEQ ID NO: 31650 - DNA, 201 bp, Bos taurus
aaatcaaaagaaggggagtcacttttataagatacctgaaaaactaggagatcttttcatttgggtgaaagaacttataacaggcataacttcatggtttygctgaagaaatatatacttaaagacttctaatcatgtttataaggaaattgatgtctccaaaagaattatggggatagaatgtggcagagacttgactgg

SEQ ID NO: 31651 - DNA, 201 bp, Bos taurus
gcctccaatggaaattttttattaacacagatgctatccccttacccttagtggttggagcctttcctgttggtcataactgggtcaagatgaaagatctrtatatagatgctggggtcagttacaaagaagatattaaagattatggcattaaacgtgctagactatatattatttaagattgcattggcagagaattca

SEQ ID NO: 31652 - DNA, 201 bp, Bos taurus
aaagtttgaagtccttttctcctacacaaattttagattttggcttttcttgccttttctttgtgtccttctgactgcatatgctttctatcgtcaaagamttcctcaattccccaatttcaagtacagtcttaatattagagtatcagcttactaaattgatagaagttcctaaatattttaaaaaatcagtatgccctt

SEQ ID NO: 31653 - DNA, 201 bp, Bos taurus
gttcctaattctaactaagctataattattacactagttaatatgtgatataagttctaattaatctttttattagaaaatattgtacagttttatttgaytttatttgcatttagtgaatcaaaatagtaactctgttattctctttaaggcagttcatttgaaatcatttgttggtaaatattttccattctagttgaa

SEQ ID NO: 31654 - DNA, 201 bp, Bos taurus
cccaagtttgggtcctcacttctcgaaacccatataatgagtgaagttatgtctgaaggactgtttgacaggtgatattatttattataaagatgtctaawgggttgtttctagagagatatttttattttcccaagtaactatagagaataagttatagaattggcatacaatgacaaatcagaatggcagttgtgtaca

SEQ ID NO: 31655 - DNA, 201 bp, Bos taurus
gatactaagtctctaatagggccatttataaatgttgaagttttctttaatgcgtgttagtttattttatacataatcatttgaaaattaacggaattggytttcctctgtatctctttcttcttaatttagaatgggtcctggagggattgtcagataattgattggttgacctacatgtgcagttgagggagttttaaa

SEQ ID NO: 31656 - DNA, 201 bp, Bos taurus
ataatttcattggaattagatgaaagtattatttgaattttttctataatataaaatattttataaaacatctgattttgtaaaaaaaaaatgtaaaaatrtgtatgtacttttcaatattacctatgtggggttttcgtgattcatgttataaattttactaaaatgctttgattatttttgttgcctttatctagaggt

SEQ ID NO: 31657 - DNA, 201 bp, Bos taurus
atcccaccttcccattcttgggcagggccctatgccattcacaaattttagctttcttcaatatgcctgtcatctgaccccatcaaatcctcccgtccctyggcctcagcatgttttctctgatgctcccttccatatctacatttttcctctccaactaacacatcacagcccattctttcactactccttggccaatcc

SEQ ID NO: 31658 - DNA, 201 bp, Bos taurus
tatacagaaggagagtttgggctgtgctggttgcctagagaaactggaatatttttaccttttgagtctagagatgaagtgatgagaaaataatgtgctgytaaatgtaaaattcccaagttgcttgggtaggtataaatacaaaagtgtcagacacgcagaataagtaacagtggccacctgcagcttaaagagaatgct

SEQ ID NO: 31659 - DNA, 201 bp, Bos taurus
catttttcaactagtcttacacaagttcaggcaaggtgctaaggaggcacaagaagggtcaggagtctattcttataagaaaggcctaagaaaatgacctyggatgctgacagtaagggattttgtggtaagtttgccattatgtttatattctatttcccttcccattcccccaaagcaagggactctaagagacaaact

SEQ ID NO: 31660 - DNA, 201 bp, Bos taurus
aatgtatttttgcttttgttgattgttggttcatttattgacttgatcactcattcattagtaaccattttcagcactgtaaaactatcaagagtagacarttttactttgaaatatttaaggttgtatttttagcatctaccaacatatttgttgttgagtcactaagttgcatccgactcaaattttgagacccccatg

SEQ ID NO: 31661 - DNA, 201 bp, Bos taurus
atatataaaaacaaggtcctgatgtgcccccaggcaggcagaagtcaagaaagctgcctgcaaattgcctgtatcatcacaatgatacaacaatgccccaytgggtaccttggttatcaaggaggaacagccggtcctgcacagagctcagccagccggtgcattcaaacacggtgaattcaaaaactccccatgctactg

SEQ ID NO: 31662 - DNA, 201 bp, Bos taurus
cttgactaagctggccttacaattccccttggcttcactaaactttacacaagtttcttcctgacctcccttttctcagagcatttactttaagcttgcarttgtgaattattgctctggccctttgagatcttttcccaatgtctcaccagttttaacaacccaggaatgtctttctcaaagactcaggagccattcttt

SEQ ID NO: 31663 - DNA, 201 bp, Bos taurus
gggggtaaatggggagaggcgataataaggttgcaggcatataaatacatacacatgtagcatattttaagaagtgaaggaacatgagtttggagtggtasacaagctgcatagtatttaatatcttgatagcaatctaagtttagagtttgttaccagtagacaatgatgagttcataataaccgaagattttagtagcc

SEQ ID NO: 31664 - DNA, 201 bp, Bos taurus
caagaactgattacattaatatgtggcacaagaaatatctgaagattttctagtttcaaactacctcagagtaaatgtcaataaattaatattttgtcatytttaaggtaacttgacttttatggcagttgaaagtacaaatacagttacaaacaaaacaacaaagaaaatcaagatttctgtattattttaaatatcatc

SEQ ID NO: 31665 - DNA, 201 bp, Bos taurus
ctgaatcaaaacatcattgtggtaatatttatgtcatcgatctctgctgattgccagatgtcttattcctactgtgaaatattcatgataaaattatttcytccagaaagtttgtgtgtttatatgcctggtggaatttattaacacatgaccacaaattaatttattggcctaataaaatattacctaataaaaaaatag

SEQ ID NO: 31666 - DNA, 201 bp, Bos taurus
ctcaatttgggaaaatctgctctcaagatcattcatgttattggcagaatttatttccttgtggctgtttaactgagggccctaaactttagctttcgtgktggctgaggaagtcctcaaatttgaaggctaactgcaggttggcgaggacaccagtggttaggaggcagcctgcagatcccggtcatgggcttcctcaac

SEQ ID NO: 31667 - DNA, 201 bp, Bos taurus
gttaatattttacagagtcttattgggtaatcacacttgccctgactcattacttccacaagttaatgtcctactgtttaaaatagaactttctccctgtrtaagttctctatcttctgttttcatgatgaacatctggcatcaatagtatgatagtttaggaaaaaattttaatcataagggtttttttgaggatttagt

SEQ ID NO: 31668 - DNA, 201 bp, Bos taurus
aggggtgaggtcattggaaaaaagtacaatagtatgcactggttatttgaattaaggaaagagtgaagcaggagatagatggtccctgggccgaacagttyctcccctgtggacggaaattccttaagagcagaaactccattaaagcaggatgatgaggggaggctgggccctgcccagataagagataaaagaccacac

SEQ ID NO: 31669 - DNA, 201 bp, Bos taurus
aaggtcttatcatagctttccttatctattcagtctattaaataatgcaaatttgaggaaagaggatgttaaaagactcagggtcttcagggatattcctrttggtccagacatggactctggctaacctacaagctagttaatcatggattatttattcattttatgttgattgaaaattaatgcactgtattcagttga

SEQ ID NO: 31670 - DNA, 201 bp, Bos taurus
aaacaaaaactattgccagtttttccctcattacagtgtcgtggccagccttctctgctgaagtttttcttctgtggcggcctcataggaaggtgtcatcytcatcttaccataagccacaccaacttcagtatttgcagtggaccctgcattcttgcagcaaagatctggctcctcccccatctggaaagcttcccacca

SEQ ID NO: 31671 - DNA, 201 bp, Bos taurus
aaaatggatttttccatctccagtcaatccaagtgttatgagctgaatggtttcctcccaaagatgttgaggtcctaacatccaatacctgtgaatgtaaycttatttggaaacatgagtctgcagatgatcatgttaaggtgaggtcatgaggtggggccctactccaacataactgtgccctcgttaaagaggagaaat

SEQ ID NO: 31672 - DNA, 201 bp, Bos taurus
gtagaagaaattttggtggccagcacatgagtggagggtggggtggggttgtggaaccaagggtacaggaggatttcccaacagggctgcgacccacccgmggtgtacctccatggagctggcctgtagcatcaggggagagaggggtgagcaaacgcctccctgtccaattatgcatgctctactttcccagtgaatcag

SEQ ID NO: 31673 - DNA, 201 bp, Bos taurus
aacatttgtccagtttagcaaatgtgagcatggcagcatgaagaacagaaaatcgagtgccattttcatgaagcaaagttactgggccaacagcagatgcrtctgttggcaccaggcaaggtccattatgtaagcagtggtaataccagagatcaagagcagacaaagcccaggctttcaggcctggtaaaaagacccatc

SEQ ID NO: 31674 - DNA, 201 bp, Bos taurus
actgaactgaactgaataaacatattcaagtatctctggtttttaaggaagaaacatttcctagatgaagttccactccagtttctgcccagtctttatgkaattcacatttgaatttcattccttctctttacaaattcctctttatcagtgtcaccaatggcctcatgttgccaaatccaaaggattcccagtcttcat

SEQ ID NO: 31675 - DNA, 201 bp, Bos taurus
catcttctcttatgatttgatagaaactcattgatagaagattccacagaccacctaattcagtgtgttgcttaagtccatagatggcttagaatagtctraaaatctaaagtagagtattacagtcagggctcaaataaatggtcctttgtaaaatactaatctgaaaatgtcttgccaccacaggtagcatgaatgaga

SEQ ID NO: 31676 - DNA, 201 bp, Bos taurus
gaaagtccatggtgaagagaacacaggacatcttagtgactctaatccagaccagcaagacagggcagttccacactttctgccctcacctccaggcctcmagggagcagatggggagaaacccttgagggcttatctagtcagataaagcagtgaagccacagcctgtggcctctgacagatttctgtatgggtgataag

SEQ ID NO: 31677 - DNA, 201 bp, Bos taurus
tgtatatgttattcccttctcctgatttatcacttccccccacatttctcctttgataaccataagtctgatttcaagatctgtgagggaattccctggtrgtccaggggttaagaattcaccttccagtgctgagggtgggagttagattccttgatcagggaggtaagattccacaggcggcatggccagaaaaccaaa

SEQ ID NO: 31678 - DNA, 201 bp, Bos taurus
ctaggacaagcggtctcacctgagctcatttcgcccctggagattcacagtcaggttttaggttgtcaataaccactcccacccaccaatctgcgtctccmtccagaacattttttttctttttggctgttctgggtcttcattgctttgtgtgggctttctctagttgtggtgtgtgggcttctcattgcagtggcttct

SEQ ID NO: 31679 - DNA, 201 bp, Bos taurus
actaagggatggattgaaagtgctgaacacagtgactgacaggtggcacctaattcctttttccctttagggatgctcttcaacccatttcccttcccacrccttcccaatccagggctttgcagatgggcttcccctgcctggaacccaatgtctccttttcatcttggctgcactctctcaggtactgtgctcctctcc

SEQ ID NO: 31680 - DNA, 201 bp, Bos taurus
aaggctaccactagccttgtaaagtctttgtaaaaagaaaaagccatctcttccttgagggtgagcagaggtgagctggatttcagttcctcttgcccccygttggccagatgccctggtgcagggctcacccttcacagtgacgcactctacagcccaagcacttaatcattatgctgggcttcccaaggggctggggcg

SEQ ID NO: 31681 - DNA, 201 bp, Bos taurus
ttttacttttgtttccctctattttttgtcaggcctgcaaagcattttcctccttatggttagtgatttctgctaaagcacagacattacccaacacaggkaagccaggagcatgcaggccaacagctgcccttgctgagggaccagctcctcccttcctgcagtttcccaggactcagccttgatgccctgaaggacaca

SEQ ID NO: 31682 - DNA, 201 bp, Bos taurus
tgtgcagggaaagagacatcgagggaagcacaagttcaaagtaaaagaaatgtatctgacaaagctgctgtcgaccaaggtacacttaccattctgggagygctttacggctaccttgggggtgtatgatgtgtttgacttaatttccactgaagtgtgaaaatgttacaaatcccttgtgccttctagcaaagcaaaatg

SEQ ID NO: 31683 - DNA, 201 bp, Bos taurus
tgagttctaaacactattccgccactatcatttccaccttcccacatccatgtgttcactttgggtctcagactgaaggggcaggagcacataggggaagytcttcttacggtgaaaggagaaaagcaagagagcaaatctgaaaccacagtatgcttagatctctgcttgcaggacacatttgttaatactccattggcc

SEQ ID NO: 31684 - DNA, 201 bp, Bos taurus
cagagaggctctgttggcctcccagcgtaaagctgcaatgcaaccatatccccaatgtgccctgtctcttcactgctttattttccttctttgcatgtatygatttctaacatatagtgtgcctacttgttgggtttattgactgtttcctccagtcaatattcacagagctggaatataaactctgcaagagcaagacat

SEQ ID NO: 31685 - DNA, 201 bp, Bos taurus
catctacagagaaggaaaagctcttggttctgaggttataaaactgataaaatagaaacctagggccacccctagggtgacctcttaagagaaggcctgcygggcaacaaagcaaacccctggaaaacagggctaagaggtggagaaagaccaagttcccaggacttcaattgtgcccccaagcacagggccactaattcc

SEQ ID NO: 31686 - DNA, 201 bp, Bos taurus
atggaagaggtaggatgactgccaacatttcacctgtgaactacaaggggagacaggagtctgatccccagaatcacactgcattaaacacccaaatcccrccaggccagtccatgggcacatcagacctccaaggacaaaaggaggggtcccgaagggggaccagccaccacacactgtgctggctgggctttgcctgat

SEQ ID NO: 31687 - DNA, 201 bp, Bos taurus
ttctggaatcttggggaatgaacagaatgtgttgctatttacttttaataacaaaaccgcctagcacctgtctacacttgtctctcagtcaaagaaaatgrttattgctgttacaggggaacggctggctctaagggctgccagacacacgtgcgcaggggaactcaggtggaccctccgtggagttaggagacacttgat

SEQ ID NO: 31688 - DNA, 201 bp, Bos taurus
acaaagtaaaatgtaggcttccctagcattcttattcgtaaaacactcaattaccctcccctcagggatgatcatagctaccagtatcctatatatataayaagtgcaagcatttgtatatcacatgtgtacacttgggcagacacacacacatacacactgttccttttaaaaactaataaatggtactatactaaaaat

SEQ ID NO: 31689 - DNA, 201 bp, Bos taurus
agctctcctgctttcatcctggccaataagaaggaaaaacaaagaagggcgtacgcattcttccctctaaggacgatgctcaagcaggtgcaccagcctcyttcactgtacatgctctcctggccagaacatagccctgtggccataacagcatcagtggcagttggaaagtcatttataagtccagcagccaagtctcca

SEQ ID NO: 31690 - DNA, 201 bp, Bos taurus
aaagatactaaactgtaaattacatataaagataacccactctaggccctggaatactaagacagaatcacatgatttggggctggtgcatgaaagtttcktccttacaagaaactgaaatagggttgaacacacgatagatactctacaaatttgtgttgattagttattgctggacccaaatctgtatacagaccaaaa

SEQ ID NO: 31691 - DNA, 201 bp, Bos taurus
gagaaaaagttgacatgagccagagcatttagccggcagtgggctaagagaagacagcattggatttagagtcgaaacacttaggttctagactcacaackaactcactggctagccacatgaccttggacaagtctcttcatttctctacacccatttcctcttctgaaggagagggttgggctgatgacccctaggaaa

SEQ ID NO: 31692 - DNA, 201 bp, Bos taurus
cggtctgtttccccttccgaatctcccagcccctccaaagcatgtctgcctctcatcttgagacttgagtgatgcagagagacaagagagcagggggaagrccagagtcctagccctgtctgtgtcagtggagatggaaaggaggcctgggacgggaacagcagctgggggtgcgtaagggggagggggcttaggagaggc

SEQ ID NO: 31693 - DNA, 201 bp, Bos taurus
cccagggaccacacctgaaacctaaggttagacgggtcagagagacagagggcccgggaggaggctgggagactcccgccgccgtgggcagagcgcggggragcggaaagacaacgtggaggaggccaaaaccggtgcagatgagctgaaggacaacggcgcggaggaagcgggctacgttgtctgcgaagcgaagcagag

SEQ ID NO: 31694 - DNA, 201 bp, Bos taurus
taacaaatttcatatttaacaccaaaactaaaacaaatttaaaataatgttatattgactgcatgttgaagggatataatattttgaatagattgggttarataaaatacattattaaaggtagtttcacctagttctttttcaaatgtggctattagaagattttgggcttcccaagtggcactagtggtaaagaaccca

SEQ ID NO: 31695 - DNA, 201 bp, Bos taurus
gcatatactaggctgcttgctggctggccaggcacggtccagagagcagcttaccaaggcagaacccagggtctccagatcttaccaaagaccctagcccratagagaggccacagaaccacattcccacccgacctctgggtcctgaactcacaccatcctgcagctgctggatgagggaacagtggctgccaagaaaag

SEQ ID NO: 31696 - DNA, 201 bp, Bos taurus
gtctgattatgtaatcgagatactgagatacgaaaattcactcactcctttcgtacctaaggctagctcttacaaaatctttcctcttccagaatttgttmgggtctttggctgggccctgggatgcacaccaaagggggtaggttctagaggtaccaaaggagagactggggctcagagaaaacatccttgattggatcc

SEQ ID NO: 31697 - DNA, 201 bp, Bos taurus
ttccaactagtgacttggcccctctgcgcacttgggtttgggcaggggaagggatagggagggattttggaggcttctgactgtaaatcttgggggccccygactcactcgcccatctcaccccaagtctgtaaagctctcagcctcgaagtgttccaggtgtttagctgtgggaggggagttcctccctccgggtcaccc

SEQ ID NO: 31698 - DNA, 201 bp, Bos taurus
ccagagtcatccacatcacaagctctgttttctgcttcagacatgacagtcactgttcttaggttgtccttcttaagactctgatcccagctactgagccyctcctggccagggcccaggcttgatccagacacacaggtatgcaggtatgcacagactcccctgggcagccagaggttatgtggacacacagacagacct

SEQ ID NO: 31699 - DNA, 201 bp, Bos taurus
gccccccatgacagggtcctatcttattggttacttgtaaggacagggctacataatctgatcaacattccttggcagaagcagggatagaacatttagcrtgctggcggaggccctgtggctgctctggtggaccacaagctacgggtcaaaattcctgtataattgtttttcctgcagattctgatataaaccattggg

SEQ ID NO: 31700 - DNA, 201 bp, Bos taurus
tggtcgctactggctggacaccattctgcttaagtttgtattcacgaccacccatatgaagatgtgggcccccacacggcctctgacacctatgggaacakgtctatgagctggtgagcagtgcttacaattcacaccataagcccggagactggggccaaggagcagagagcatcgtccagcctcagggggacctgttag

SEQ ID NO: 31701 - DNA, 201 bp, Bos taurus
tgggaaaacatcaagtccatgtttagaaagttctagctgcaagctcagtccctctgcaaaatacttagccttcagccagagtaacaagctcagtgtccttkgcatggcctggtgaaaagagcagttgtgtaatccttgctttgggggaccctcctccccaatacactccaagtacatgacatggactttttgatggattcc

SEQ ID NO: 31702 - DNA, 201 bp, Bos taurus
acactgccggtcgcagccgggcggaggctgagtcctggtaccgcagcaaggtgagtggtccagcactcccttcccagaacagggatgctaaaatctgaaarcattagcagagtggggagggatgctgaaaaagcattgacctttgtctgggtgggcaagggaagggcgggcagctctcgggatggggtgcagatgtgcaag

SEQ ID NO: 31703 - DNA, 201 bp, Bos taurus
ccctagggtgtgagcatctctcacctcagctcacccaactgctcccctggggtctagagaaagctgggacccctgagacagagctggaatttcttgttgcyggaatccttcctgccaaccacaggcctattgcctcctgctcagggctctgtgaagtaagaagtcgagctgtaaaaacgccaagatttggagacttttgga

SEQ ID NO: 31704 - DNA, 201 bp, Bos taurus
ggacagaaaccaatgagccccaactggtctctctgtcctccccacatatatgcactcccttgccttctcttgacctaacaggggtctcctaggccgttttmtgaaataaccagggacactgccactcctggaaccagggcagcccctgaaaaaaagagggagatgataacggcccctctgagcatcccagagaagggtcag

SEQ ID NO: 31705 - DNA, 201 bp, Bos taurus
agtgactaacactttcactttttttcaagattaaaaggtgggtactaacccagtgattaaaaaggccattcattcatctgggcctcagacctagaagacartaaggactggtgggactgtggctctcatgtgagccccagggattcccttctgaagaccatagttgctactcacctctggccagttgttgccatgccggct

SEQ ID NO: 31706 - DNA, 201 bp, Bos taurus
ccccatagatgaaaggcaaactcttccctgcctccaggtcactgtttggcttgggcttgctgtcctcatcgtcctcccgatgactgccatcggccttgggyggcttcttgagcttgctctcggcgatgcgcctctcgatgtttgccagtgactcaggggtgaaaggcttgaaactatcagggcctggtggtgcgagcagcc

SEQ ID NO: 31707 - DNA, 201 bp, Bos taurus
tggtgcttcgcaggcatcccgaagagcttcaggcggtcgaagaactgaaaagggagtcagcgctcatctttcggtggttgttctggggcttgttgggcccrctcacgtcgttatatcacaggctctgaaaggtagctaataccatgtctacctgacagaagtagaaactgagtctcaaagagaacaggtcatttggccaag

SEQ ID NO: 31708 - DNA, 201 bp, Bos taurus
gccttgctggggggatccccctgaagcacactgtgaaaagcgaaacttcagaataccccaaaacagaatctaaattggccaaagaataagaatttgagggraaaaaaaagagagagagaagatattcacagggcttgttgaggcatgggaaatccaggcctgtctggcagaagagctcaatgatgggacgtttccgtcatg

SEQ ID NO: 31709 - DNA, 201 bp, Bos taurus
atgtattattggactttgttatatctatcttgtgatttaacatttttattttgaattacataaaggccttaatttggccctggcatggtctgtcataatartatcaattcaaaaagaactaaggtcaagtcccagcggaagaagctctgtttagactggcatcactccattccttgatggccaattactactccacttagt

SEQ ID NO: 31710 - DNA, 201 bp, Bos taurus
gcctggggagaatcagggagggtcaacagttagagctggaagaacttaaaatagacctctatctacaggcaccttggtcctggcccattgctcccatcttrtttgtcttggagacaggaatgatgaaggtcttaagggtacacaggctttttgtcaaatgtcctgatccctcactactcaccagggctaggccaatgggcg

SEQ ID NO: 31711 - DNA, 201 bp, Bos taurus
ttcagggattgaactgaatcccaggccacagcaatgaaaggctagaatcctcatcgctatgccaccagggaactcccaataataatactctttttgggggsagtgggatgaggggcctgtgctttgtggcttgtgggatcttggttccctgaccagtgattaaacttgccctttgcagggaaagcatggagtcctaaccac

SEQ ID NO: 31712 - DNA, 201 bp, Bos taurus
caattttaaaaggattctctgacagtgtatacccagagtttcagaaaaatgcagttcaatactgagcagctgctcagtattgaattgaacagctgctgctrcatactacattattgagcagctgctgctacataactgtgtgctggcctaataaaaaaggcattcagagcatacccaatagtttaactagtcagtgaggca

SEQ ID NO: 31713 - DNA, 201 bp, Bos taurus
ttagtggccctgacatataagcaggcaaggaggtttggaagctggcaaagcctcagagggctgagcagagaaagtgaagagccctatttaatgggtattartttggccattctaattctaaagtctctggctgatgagtgattatttttgtctaaaaactcagtacttcttgacagcctggccacatttctccccactgtt

SEQ ID NO: 31714 - DNA, 201 bp, Bos taurus
tgtgctgcagtctatggggccgcagagtcttagcgactgaacaatgagtgagtgtgttagtggaatctcactttttaaaaattaggtcttggctgcactgrgtcttctttgctgcctatggccgtgctctggttgtggagaacagggctacgttttgttgtggtgcgcaggctctaggtgtgtggtcttcagtagttgtgg

SEQ ID NO: 31715 - DNA, 201 bp, Bos taurus
gaacagtacgagaccacagttgaccgtggcctcaactgggactggctccctgtgaatgggatgcagtctgcttacatgctggctgatctgaaacctgtgtrcatggaggccccagggttgttgggggccccaacctgaggatcctcttcatccatcactctccttgactctttccctcccccaggccttaactggaagcaa

SEQ ID NO: 31716 - DNA, 201 bp, Bos taurus
cctgggagatgtggcaggactgagaccgacgtcctctcactgtcttctcttaaatccccagcctgctctcacaggcctgaggctgagtaagggcttgagcrctggaagactgggtgttctgggaaaaggagacttattctgactgctgagccagcagcacccaccccgaccccctgacccaggaggaaattgggccctgcc

SEQ ID NO: 31717 - DNA, 201 bp, Bos taurus
tctaataagtgcggtggatgattcctgcaggagagtgagcctgcagagcagagtctggaccgagagcagctggagcctaagagggcaaaagccaccaggamatcgggtttctgtcattgactcgtgggaaagctaacaggatagcactgggggcattttctaaggcagaagcactccaaggagttctttaagagcctcatg

SEQ ID NO: 31718 - DNA, 201 bp, Bos taurus
gaatgaatgaatgaatgagttagacagggagcgggcactgatgcctgccagtctagacctaactggaaccaagcctgcaagatgctggtgctgccattgtyctctcgacagggactgagggaagacagggtggcccagcagcatcaaagaaggctggtgctcggctgtgatcctactctgaagtggtcctgagagtcccag

SEQ ID NO: 31719 - DNA, 201 bp, Bos taurus
tagaaccaagactacgcttccccttagcttgcctgttggcgggtgtttgcgttgaaactatactgaaagcctgaccttaaaggggaggaagcagaggggamccggggccctttaaaacgaggccagctggtgcctgcccctttaagggcggggcgctcagacgacagaatctgagccccagattactccgagtttccgtca

SEQ ID NO: 31720 - DNA, 201 bp, Bos taurus
acatctataaatggaatttggcctcttttaatcaggtcatcatcttttaaagttctgtctggagcaccctttgtatgagtccttggcatcctctctgttgytgttgtggtccaggccctcatctttctcctcctggatatcagcttccaaattgtgctgctgcctccagcctcagtctctcctggtacacccttctccaca

SEQ ID NO: 31721 - DNA, 201 bp, Bos taurus
agggccccatggccagcattagaacctgaacctaagtcttctcactccagaacatgcctggagcttgagttgctctggctctcatgtaagatgcatggacygtgttgcatatcctgggccctgggttcatgtttctgtgtcacaaggctctctgatgcccctccagggtgggaaacctcctggcttgttgagggagactga

SEQ ID NO: 31722 - DNA, 201 bp, Bos taurus
ccatcgggacccaggcagtctgggctcttcaccactgagtgaggctacctctggaaaggaaggcagttgcaagagctaagaattgagcctgggcctcccayacgagagctgagaattctaccagtccacctcccaagacactgatacagcacttggagacttgctctgcaggaggtcctagggcagtgggaggaacacagg

SEQ ID NO: 31723 - DNA, 201 bp, Bos taurus
catttagcctgcagtacacacctcctgtggtggcctgtgtctgcattcatctggcttgcaagtggtccaactgggagatcccagtctcaactgatgggaarcactggtgggagtatgttgacgccactgtgaccttggaacttttagatggtaagttttagaggaagggaccttgaaaagcacttgctcttgatctgtcac

SEQ ID NO: 31724 - DNA, 201 bp, Bos taurus
gaaagaggactcttgctttgagctcctccacagagctgttggacactttgaattaaggaaaaatggcaccatgccacgagaagtggccaaagaccagcagytgtgtgaaaagctgactgttctatgctcagccccagggactctaaaaacactttctcgctatgctgtgcgccggagcctgggactccagtatctgccaga

SEQ ID NO: 31725 - DNA, 201 bp, Bos taurus
cagagcccaatccagagaggttgagactaagaagcactaggctgctttgcatgataaaataaaaggatgtcctcaccaggtagggaatggtatgaccttgratttcttaagaatctttggaaatagtgggagtcactaggattgggggtctactatcccaggggatgaaggcttggatctttctatttggatatcacagga

SEQ ID NO: 31726 - DNA, 201 bp, Bos taurus
tttgtgaacctctgctgaggagtagtaccccgactccacccgccccacccccattcccagatgacaccccagaacctatgaaggcaggctggggtccaaayttgtgtggggaggaaatgacaagtaaactgaagaaaatgttctcgacctcaatagaaatccaagaaataagagttatactaatcattagtacaataaaat

SEQ ID NO: 31727 - DNA, 201 bp, Bos taurus
cctggcacattgaccaaccctccccacaccggccactggtcttgggatgaacaggagcacaggaaggctcagcttcaggaaaatctttcactctggctgcyctgggccatctcaggcacgcagggctttcctcaaaatttttaatgtttctggggagtcctgggacccaccaggactggcagtgccacttgggtggaacat

SEQ ID NO: 31728 - DNA, 201 bp, Bos taurus
aaactccgatcaccagtaaaggccaggagattccatgtaactcaaggtgtctgcatcgtcaagcccatgttttggaccccagtaccatccagaacctcccygtgggctacttaccaggcagagggagcagctacatccttcttgtgctcagatgtccgtgtctaacttagatattagatttaatgaaattccagggcagaa

SEQ ID NO: 31729 - DNA, 201 bp, Bos taurus
ctgtagagatcaaatgacaagaagcaagtgagattttgaataaaacaaaactaatgttatttgaacagatacccatgccaaatgcttggcaagtgttaccmgatttgtgagataagaaggatcttcatgtgatggaagtgaaagtcactctgtttagtcgctgagttgtgtccaactctttttgaccccctggactgtagc

SEQ ID NO: 31730 - DNA, 201 bp, Bos taurus
acacactgtgcacaaggatcgtgtagctctaccctttcctgggtgagcagaaaacccatctcagagccttttcttatctctcctatcccagagagttggaytgataattagccaaaatattttaagtgaatttccttagtacggtatccaaaagatagtaggatctcaacaaatgttatttttttttttgttttgattgta

SEQ ID NO: 31731 - DNA, 201 bp, Bos taurus
gctatttataggtctacctacacagacttcctctcatcaaaactgatgtaggttctgccgttgtttatcttttgccattgtcagcggcagagaacaatgcrggagaccagcaagccgcatggtggcaaggtgattacatccaacctttccaacatgaaaagtgagtgttggttgctcagtcgtgtctgactcttcacgtag

SEQ ID NO: 31732 - DNA, 201 bp, Bos taurus
ttctcacttttatgttctttcaattgtagttctggggttcccccaaacctccaaaagacttatgtgcctaaggccggagccagatgtgcttgtgactgttyactgaagctgtgtcaccgtgtggaatatcacccctggagttgtcacatgatcacgtgaccaacaaatgggaaaacatgattgattccaccacagaatttg

SEQ ID NO: 31733 - DNA, 201 bp, Bos taurus
gatcgctggatcctgtgtgagcccaagtcttttaaactgcaaaatggacaaaagggtagtatttgcttaaacaaattgctgagaatgagcccaggccaggraacagctcctggactcgtgtacctatgagaggaggggcagagaggtggaccttcacagacagcacatgtgcgcatgggacagaggccagcaagtggcacc

SEQ ID NO: 31734 - DNA, 201 bp, Bos taurus
gcttttcctttttctctagtctatatgttccaagggttacccacccaccagtgggttggcagcagtcccaggacttctcaggccaaacagccacccatgtsggggatcaggctcatctataaggaagataaagcagtcgaccctaccacaacagaagggcccaagcagcccacataaggaataagggacacccctagagca

SEQ ID NO: 31735 - DNA, 201 bp, Bos taurus
ttgattcaaagatgagcctaaaaaaaaaaatgagcctgactgctgacatttggctatagaaatcactagcatgaaccgtgtataaataaaagttctggagrcttctgtttctagtaatggcagactggataatttcaatgaaccttctgtaaaggacataaagttctggataaacagattttaaaactctgtttgaaaaca

SEQ ID NO: 31736 - DNA, 201 bp, Bos taurus
ggcacagcagttgctcaatgtttgtgagatggatggatggatgaatgaatgaataagtgattaagagatgagaggcctacaaataggttccattttggaaygtttatcctgcaaagatgaggaagcatcagggcaggtggtaggcagaaacagagcagagacgggggagtgggggaagacaggcctggctctggagagtgt

SEQ ID NO: 31737 - DNA, 201 bp, Bos taurus
atctttttccatcccccaactttcaatctatgcgtgtctttcagcctaaaatgagtccttcataggtagtatattgtaggttcttgttttttttttttttwaatccaatatgtaactctatgtcttttgttcagagcatttcatccaaagacatttgaagtaattcttgataaatatataattgccattttaaaccttatt

SEQ ID NO: 31738 - DNA, 201 bp, Bos taurus
gaggccgacccctccctccgggccccgtcccaacccgcgcccgccgcctgggctctgcgtgtgggaatgatgtgcgcattggagggtctaagttcttcacrtgcttggggggtcctcccttttttttcttagcaaccaaatcgtactaatcttactaatcagtaaatccaagtcagcggcaggaaagacaagcgatatttt

SEQ ID NO: 31739 - DNA, 201 bp, Bos taurus
catgtaaaacaaattcaagcagcatagtccctctttccaggtgatccctgccactcccctctgccacctccacttttgaggaaactgtgatctccataacyattgctcagtttttttgttctcttttctgtgtctagattctttttttcggcataatgtttaagagattcattcatgtagtacatctgaaatttgtctttt

SEQ ID NO: 31740 - DNA, 201 bp, Bos taurus
gtctaggtcatttatttttagatttaaactaaactgttagtgcacagagacaaaggtaaatatcaaatgtatgggtatatactcaagtcaaaggagatgartcaaatttgcaaatgacatagattgagaaaggtagctaatatggcaaaaaacagaaccaagattcaaaactactcagactgtaggaacaagaggattgaa

SEQ ID NO: 31741 - DNA, 201 bp, Bos taurus
atcccaaggctgtgcactgtgaacccagtgttattagcaattaggccagtcactttttgggatcagtctcttcagtgtacacccagagatgcttacacatrtgacctgtgtttcccagggcccttccagtttgtgtgtccaggatagcttatcttactttgacaggattctggtaggcaatgttacaggaaggtgtttgtc

SEQ ID NO: 31742 - DNA, 201 bp, Bos taurus
ctgccctccatcctgttcttatccagaaacagagcccatatcttagcccaatgcccactgacatggaggagatggccatggtatcttaacaaactacagtmagtgtataagggcaagtcattccacatgactctgggaaaatgtggaggcccctccaaaggacaaaaggatttcttgaagagggctacatgatattcttct

SEQ ID NO: 31743 - DNA, 201 bp, Bos taurus
gcccatgggtaggacagaatcccaaggcctccccaaaccaaacctgccagcaaagtgtgactgatgggagctcttctaaacttctaaacattctgaagggrgatatgctcatggcccaggtcgtgtctgggccagggagggctctaaggcatagtggacaggagtgtgtgtaatgatgtgggtgcaagcttcaaatgacat

SEQ ID NO: 31744 - DNA, 201 bp, Bos taurus
tattggctaaactagccaacttggcccaggacgatttgatacctaagccaagcaggctcaatcatatgctcccctaggaatctgaaacttagaaacaactrtttaatctctgcatgtggctagaactgtgactgtcaattgggaagggcaaggtggtcatactctatcattgagtacatagagagatcccattaggaaaga

SEQ ID NO: 31745 - DNA, 201 bp, Bos taurus
gaggctttcatatttttgtatatcttgtgagcagagacactgattggcctttgtttaatacgattggcctttgtttaattttgaaggatgcttttacaccrgaggtggcccatggatcaatttggctcgccatctgttgttgtaaataaagttttattataactcagcacatcaatttacttacatattgtctatttctgc

SEQ ID NO: 31746 - DNA, 201 bp, Bos taurus
gggagagactccccttttggccagcagtagccctggtgatccccaggactctttcgctgccttgtagctgctgtggttgctattcgtgagggactcttccygacccttggcctctagtcccacaagagctaatcaatcactgttgctaacaactcagccttggcttgccaccaagtctgaaattatataagattcactaaa

SEQ ID NO: 31747 - DNA, 201 bp, Bos taurus
tcgcatttaagttttattgtagactatttgtttacttaattaagaatttcttcctcaatcaaagattttgcgcatgaaggtatttcctgagatctgatacrtggtgtgaatgaaactctgacttatgaaacccaaatgtacttatggaaatgaacacatattttcatttcctagtaaagttaaacaagattaggggtttac

SEQ ID NO: 31748 - DNA, 201 bp, Bos taurus
gagcactttaagagaagagatgacctttcacattttcctagtaccctcctagtacttcatttagtgtggtcagtgttagcttttcaataaatacttgctamttgattccatttaggacctttgtgttaaattgaaaataattctctggaaaaacacagatatttacttaaataatgtgaattgcaatctactataattctt

SEQ ID NO: 31749 - DNA, 201 bp, Bos taurus
atgtctctagtctttccaaccctgttgttttcctctatttctttggattgttcacttaagaaggcattctcatttctccttattattctctggaactctcyattcagttatgtatctttcactgtcttctttgcctttttcttcttttttcagttccttttctcagaccttttgtaagatctcatcagacaaccctttgtc

SEQ ID NO: 31750 - DNA, 201 bp, Bos taurus
tggttgtcacacagctactgctagagctgtgcaaatgtggcagccatcttagagctgaatgagcatctccaggaaggttttagcatcttcaaggcccctcyccaagaatcatggggcatccccttcaagaagccaggggctgaatacattctgtgagtctttgggctcctgcccctttgtagctcctctggccctcaaacc

SEQ ID NO: 31751 - DNA, 201 bp, Bos taurus
tccctagaaacttcagttattgaggacagacatacatcaacagatactcattaagctataaattggttgcactggttgagtagattttgaatgctactggrccaagggagaaagatccttatcacatgagggagagaatggagacacaggagactgagaagtgatacctaagataaggcataataataaatcattaagctg

SEQ ID NO: 31752 - DNA, 201 bp, Bos taurus
cacacatacatgcacacagtcaaagaatacctaggaatcaaatttagaacagaaaaaacattctctgagtagcattttaaggagaagcatatgttttaggkgtgtgacatacattgaccacacaaatgatataactaaacgttttgttaattctggaaatttttgcctcaaatgacattatggggcatttgggattagcag

SEQ ID NO: 31753 - DNA, 201 bp, Bos taurus
agagaaaaaacaggacatattatacacagagggacctagataaggagttcagaagatttctcactggcaacaatgcaaagaagaaaacagttgataaataycttgaaagaactaagagcaagcaactgccaacctagcattgtgtatcttgtgaaaatgtctttcaaacatgaaggttaaataatgtctctgtcagacatc

SEQ ID NO: 31754 - DNA, 201 bp, Bos taurus
gcattaatggctccacaacctaattcaagcagcatatgcgtccccacacgcccccccatacatgcgcacgtgctgagggtgtttgttgcaacagtggaacmatcccagaaatgggccattataaacatcttgttcatggctttccagctaagaagtttccatcaaaatgatacatggtactggctatgcaagaatttccag

SEQ ID NO: 31755 - DNA, 201 bp, Bos taurus
tcagctcctgctgtgataggctcttccttcacctcttgcaatccaagcctccctctccttggtgcctctctcctccagctctgccaggcttgactcatttrccacttccctccattccatggctcttgcagatggcaggggggagtgggaccattggccatgagtagcaagtgatatgttatgatggaaaattcttctcta

SEQ ID NO: 31756 - DNA, 201 bp, Bos taurus
ccttcaaagctgatatacattgttcatttccattgcactcgagaaaagactgtatagtattgagagagttaattagattgtattcactttaagactgtgtrttattggaaaacaatctggaaacttaatgtacttgatttttgaggcctgaatatcttaggagataattggttgattttttttcagaaatgcttgaattta

SEQ ID NO: 31757 - DNA, 201 bp, Bos taurus
tgtagagtttatactctagatgaagaaagagacggtgaaattaaaattgcaattccttccttaaaactccctgagttccttacctttttttcttccatagyatttatccacatctaagactttattttttgttaaatttcatccacagaatactggttacatgagaacaagcaagaatttctgtacgttttgctaagggac

SEQ ID NO: 31758 - DNA, 201 bp, Bos taurus
gactactgtgagatgatacctccttgaagttttaatttacattcctttggtaattaaagactgagcatcttcttctatggtttttggccatctaattaatyttgacactgaaaatccctgtttgctgtagcatcatgagtcccacattacactgtataccttaggcacattggaaatagaaggagacatttgaggtgctat

SEQ ID NO: 31759 - DNA, 201 bp, Bos taurus
cctggaggaaaaggcacagtcatgcagaccacatggactgctttcactgtaaattcattcccacaaaactcaaatgggccatcaacactggtagacaatcycatatgcttcccttgtgaagctgctcttctttcttcataatttttccaataaaatatgcccactcgcagctgatggcctcccatcatacttcacaggata

SEQ ID NO: 31760 - DNA, 201 bp, Bos taurus
tattgtgacactcaatgtgttgacgctagcaagagggtccacaaataatttgcagtcaaataaattgcttcaaaatggcccagactgtgaggttatttaayctgtttcttgatgtgtgcctcaagtacataaggtggctcaagctcttcctagttaccatgtcagttctcccttggcctcagaatacaggtgagcaacaca

SEQ ID NO: 31761 - DNA, 201 bp, Bos taurus
tacttctctagaggatattttttttagtgaacatagtaaaggtctagaatttaagctagggacaacttaggtattttctaggccagaatatataaaattartatttttgagaattgatccattcaatatgtatgtagagtgtgtttggccttgaagtacaaaatgaagcagggaaaaggttaacagagctttgccaagaga

SEQ ID NO: 31762 - DNA, 201 bp, Bos taurus
agattgtaaaggaagaagtaaaactatctctatttctctatttgcaaatgacataatcttatatgtagaaaatctttagaaattcactaaaaaactagaaytaataaatgagcttatcaaggttgcaagatacaagataaatatacaaatgtgaattaaacttcatgaaaatgaaatttaaacaattacatttataataaa

SEQ ID NO: 31763 - DNA, 201 bp, Bos taurus
tatctgtattttatttgccagatgatcaggttaagaaggtctgatacttggaagttgcttataaaatagcttagaaattatatagcaaattcttgaactaraggaattttgtggtggctaaatgattgggtctatatataaagcttctttaaatactatactctgaaaatataactaacctcaattttaaatcaaagtgac

SEQ ID NO: 31764 - DNA, 201 bp, Bos taurus
acttgacagcagaagccgggccttttagagcggttattggagcggcaaggaaagtggggcgggcactagagagaaagccgcgtgtctgattgggcaaacgkgatgtcactcatcccaggaccagggcttgctgcggaacagggtagctgctgctagacccaaccgcaagggtctctgcagtccctggaaccaaaccctgca

SEQ ID NO: 31765 - DNA, 201 bp, Bos taurus
agatttactaccaattcactttgaaccaattagacatgacccaatttcctcaagccagatggcaaaagcacttccggtgaggcagatgggcctattgactytcagtcccatgaaaacatcaggcttggaagacaccctgggattcagataatgcaccaagaagacagaggaatgcctttgatattggcctgggtatcatgg

SEQ ID NO: 31766 - DNA, 201 bp, Bos taurus
tttcactgaggaattcttgcgacctaaaagaatgtttggaatcaagctgtaaagttagttcttacattttcagtttcagacacaatgttttttgatggacrtgctgctctagtacagacgtcctcttgaaagcctataaacatgatcttacatttatagaatgagaactttccttttacccaaaacaacacagtgacattt

SEQ ID NO: 31767 - DNA, 201 bp, Bos taurus
tgatgacctagaatgtgtgtatcatttaacttcatcaatagaagattccttctcttccaggatgtagttagaacatttgacattaggcctattcctttcartagacatatttttggctgaaagtaagagagatatactaatgaagctgaccttaacaataagtaataggcttaaaagaaaaatttactgagggcttactga

SEQ ID NO: 31768 - DNA, 201 bp, Bos taurus
ttaacaaatagtctgtacttactataagaagctagatttttatgcagtggtggacaatttgaaaaaaagttcaaagttatttggactctaacataaaaacrtcagatatgaaaggtagacataagagagtagcaagaataacagtggaaaattcagcattatgatggtaaagaacatgtagttttatcaaaagtcctctaa

SEQ ID NO: 31769 - DNA, 201 bp, Bos taurus
aaagggagcaagactagctccagggtagagactgccatcgccagagcacctgtcgttgcacacactcagaagggaacaagcctaagtgtagggtgaagaaygcttagtacatgaagaatgaataatgatgctgcacataaggaaccactttcaagaacaaaatactaaccatttcacccaattttacaaagacaaagttaa

SEQ ID NO: 31770 - DNA, 201 bp, Bos taurus
ctgcctaattgctgtgactagaaatcccaataatattttgaatgaaattggagagaggaatcatgcttgtgttatttgtgatcttagactcctttacgttyaacaagttgtctttctcttgctgcttctaagattttctctgtctttaactttcaacatttaagttatattagtaatatgcactgttttgtgcttgtttgg

SEQ ID NO: 31771 - DNA, 201 bp, Bos taurus
tcagtgtttgtttcctataatataacatgtccgctctgtaattagatacatcaaaatagctagctagatccttatttggcaattcattgttctaacttggrctgattcctggtttattgtatccattcagcagatatttttctcaaagctgcactctgatacaacacccagcctgttttcccagccacccacctctcttcc

SEQ ID NO: 31772 - DNA, 201 bp, Bos taurus
atgtacaatatatatacttggcaaagtcttagtatttagagttgtgctacctaatagggtagccacaagccattgtggctttggcacttgaaatgtgtctygtcttaactgagatgtgctataaatgtaaaatgcaaaccaaatttcaaagacttagtcaaaaaaaaagaagtataatatcttcttaaaaattttatattg

SEQ ID NO: 31773 - DNA, 201 bp, Bos taurus
gttgttgctttgtaaatgaaaaaatacctactggatgaccaggtgacagttctttttggaattatgtatggcattctccattaccattctccccctctgtmgcttttattggtaagcattatattattgtttgatctgtgtagccattagacttacctctccgtagttagggtgtgccatcttgagtccaactgtagaaca

SEQ ID NO: 31774 - DNA, 201 bp, Bos taurus
tttttctgagattttatcttgtaccttcatctgagacataactttctgctttttcattctgattaactttctgtaatgtggtttttgttttagctgctgtkggactgttggtcttcttgcttcttctgtctgctctctggtgaataaggctaagaggctgtgtaagcttcctgatgggagggcctggcagtgggaaaaact

SEQ ID NO: 31775 - DNA, 201 bp, Bos taurus
ttcctctaatacttccttgaaacccagaccatatcagatattgtcttacacattctcatagcactatataggttctcggttataacacttaccatcctttyttgttcgtgattaactctatttccctcactatattttttaaatttatagaagcagaatctttgtgtttctttatagaaaaagtctctgtttcgtctgttc

SEQ ID NO: 31776 - DNA, 201 bp, Bos taurus
tgtaatgtctctgcttttgaatatgctatctaggttggtcataactttccttccaaggagtggaagaagtcagtaacaaaaagctgtttcatatgagtctrtatgtatgaaatatccagaatagacaaatctgcagagaggagcttggtagtaggcagggactgagcagcagaagaaatggagatggactgctaatgggta

SEQ ID NO: 31777 - DNA, 201 bp, Bos taurus
aagaaattgaagatctcaggtatagtttatattctgcaatatataatgcacatatttgggttttgcagtaaagtattattgctactatttatttgttgggyttattttatgtagggcttcccaggtggtgctagtaataacccacctgccactgcaggagacatgaaatgtgggtttgatccctggatcgggaagatcctt

SEQ ID NO: 31778 - DNA, 201 bp, Bos taurus
gatagctgggcccccgactgagcagttgaaatttactcctgtagacacttcaagataaagataaggcaggagcagagaggagctggaccctgtttcagtayaaggaggccacataattatcatccttggggttaaggagacctctcagatcatacatacacagaaaggatcttgaggggtcagagaatggaggggatgcca

SEQ ID NO: 31779 - DNA, 201 bp, Bos taurus
catctggatgtcctggtgccttgataactaaccagtacacagctttgatggtgggcaggtcgagggtgccctctggtggccattcaacatcaaaggatggktattcgagctcacgtaagttatggcgcttccagggagtcatcttgactctgtaatctcctatgaagcccttttcaaagttaccatgcaatctaaaatcgc

SEQ ID NO: 31780 - DNA, 201 bp, Bos taurus
atgctgcctggagtccctgggcatggtgataaatttctaatctcctgtagggaatatgggaatcaaatggggggaaaggaagttttccgcatttgaaaaakctgggtacaataacatggttgataggtggttgatggattcagatattttcattttcatagggaagaactacaaatattggtcctggggccatattagtta

SEQ ID NO: 31781 - DNA, 201 bp, Bos taurus
ccccaataagtactccccaggtgagcgctgaggagctcagaggcatgcaagaaagcacaggagggtacagagagagtacggagagatataggacctggagyctttgcctttactaggtctacaggtagagtgcttcagtgttcctgggctagggttgaactgatctattcaaactaaaataacaaggctttgataaaccca

SEQ ID NO: 31782 - DNA, 201 bp, Bos taurus
aaagagcccattcaggagaaagctcccaaatataactgctgccagtgtccatgtccctagagagagcaccaagaccagcaggtaggtatggcccaggctcmtattgaattactgcttttgctgggtcttggtgctcatgagattttgtgtgtgtcctttaagagtgaagtttgtgtttcacccagtcctttggaattctct

SEQ ID NO: 31783 - DNA, 201 bp, Bos taurus
ttctgtattctctttgaaggcttcgaaacttccaatgtcaataattatagtaggtgttggaccagcagaatttgatggtgagtaacaaaatttctatagcrttaattgggaatttattaactgtaactcatcatgtacttacatatctatcactcttttgtttgcatatagggatatgagtgtgcatgtggatttgtatac

SEQ ID NO: 31784 - DNA, 201 bp, Bos taurus
ctccccctggcaaccctgctcagcggaagacacctgtactctgttcccatgggcagcctggagaggttggcacttggaggcccagagaacgtcagctcccrtctatgagctatgtccacgtgtaaaccaagatttggggaagggacagggtgagttgggaggctgacactttcttaggccgtctcctctggttcctcaggt

SEQ ID NO: 31785 - DNA, 201 bp, Bos taurus
tatattatgtgacttttaatgaaataaatttttttaaaaaaatgggttgctaggtcttatccgccttttaatggataaaactacagagggcttgaaatcamtggagactgttttggagcttgggtgccacaatcttcaaagcaaaactggagtatctttttattacgctattgcttattatgtacttctacctgtaaactt

SEQ ID NO: 31786 - DNA, 201 bp, Bos taurus
agtttgtgctttcctaatacttccataccgaaaattggatacctttaaaattggggttggttcaggcaattgagtcaccacagaattggtaagcctgcccrttgcgagttcactccccttcctaaccctcccacttcaatgtcttccaactcccctcccaaagattactttcctgatgcattagcaggaggagtttcgatc

SEQ ID NO: 31787 - DNA, 201 bp, Bos taurus
caaagttgccaatggaattaagctgttaatcagctaaccttgagatggagagactgtcttggattctttgggttggcccaactacaagagttcttataaaytgaagacggaggcaagagaaagagaaccagagacagcagtgtgagaagttggcctaatatttctgattttgaagatgaaagaaaagggccatgagccaag

SEQ ID NO: 31788 - DNA, 201 bp, Bos taurus
acttcagatgagttatcaaaaatttttccccaggggatttggacttagaattcagctttccgtaattccataatagtgagactaaagggaaacattggggrgaaaaaaaaagaatcattcttttcagcatttgcaaactagataaatggcttgatgagatctgaatattatgtattaaaatcagcatggtgatgaggatat

SEQ ID NO: 31789 - DNA, 201 bp, Bos taurus
cttcttccaggggccttctaggaaacacaacacaccaatgccacttaaatctcaaccctcaactacagaagatttagactccagacccttgtgaagatagyataatggccaacattttgtggagagacttcttttttaacttccgcccagagccaattctgagactgcatctactttactattaacacagtcaagtttctt

SEQ ID NO: 31790 - DNA, 201 bp, Bos taurus
aatccctagtctgaacactcacttccatttctactgctagaacagtttcaactcattttaacatccttttcgctaaccatccatcaccaaacagcacagtrcctactaggttccaggcccaatactaaagctatatgttggggtaagatgcattaaaggcctgccctcaaagcatgtgttcactagaagagaccttactgt

SEQ ID NO: 31791 - DNA, 201 bp, Bos taurus
tgatccgtattcctgaataaaaaataaccagaggtcaaatgacagagatttcagccaagtatacacatgcggtcatttttgaaaactgcagtataaatccyaagactgtaactgttagacaattgatatgaaatgtctgagaataggcttccagggaaagggtgaaaggttgcggtaggtctttaagcacagagccaagac

SEQ ID NO: 31792 - DNA, 201 bp, Bos taurus
gctatttcctccctcatccatcttggccatgctatgtcccctctccttcttgctaacagctcttacactcaattactgggcaagcaccaatactcagaaakaaaacattttatcagattgtagcctgtggcaagtaagaaaaatagccacaaagtgaaaaatgaaaaaaaatcattcaattagttgaaaatagataaaatt

SEQ ID NO: 31793 - DNA, 201 bp, Bos taurus
gtcatcaacatacaaagcaacaaaaggaatttgcatgacagtcactgattcaagattggcacaagcctggtaccactgacttttttgacctcgaggcctgmgggaccttagtcccccaaccagtgtttaagtctgtgtcccctgcattggaagattggagtcttaaccatggggccctgggccacaagggaagtcccccat

SEQ ID NO: 31794 - DNA, 201 bp, Bos taurus
accccctcctccaccaaatgagcagttgtcagtgaacaaccattagaggtcctgctcagccattggtcagtgctgcagtgggcccctcccccagcaagcakctgtcaaggagaaactgttactgggcacattcagccagcagtgggggagtggtggtcctcaggtggagagtgaggtaagaggtggatcctggccttctcc

SEQ ID NO: 31795 - DNA, 201 bp, Bos taurus
caagataattatacagtctgaagcagaaaagttggctctgggagattttctgaccttgaagtgttcagtggcagcgatccatgtaatcttggatctgctcyggcagacagctcagggcttgaacatacggtgttgtttccttggacatattgagccaaagctgcagctataggtacaaggtggcattgttaaagctatgat

SEQ ID NO: 31796 - DNA, 201 bp, Bos taurus
aactagtacatttcattaggaaggcaacacgacaatctctcaaactttgtcccaatgatttcacttccagaaatataggaaatcctcaaatatgtaggtgygaatgttcattgcattgattactataagaaaaatactggaacaatttaagtatgtccagcagaatgtctgaaaaaaattatggtacatttatacttaagc

SEQ ID NO: 31797 - DNA, 201 bp, Bos taurus
tccactttcattaacagcctcggtttttattattactctgtgagacaggcattattgcatctatttaacagatgagtaaatgcataaccagtgaagtctartaactgaccccaagtctcagaactttgctctgagttggatttgtgcttcaactatctagttccaaagcctatgcatctcactgcactttctccctctgct

SEQ ID NO: 31798 - DNA, 201 bp, Bos taurus
acctttcttaagacagcccttggcctgtagcctgggctctttgacccttgtatgtcttccatctcttccattcctagggaccttccatgagagtccacaawgtttcacctagggccttaagttttttttaataaatgagtttgaaggaggcattcattcatttgttgattgattgacttattcatttaacagacattcact

SEQ ID NO: 31799 - DNA, 201 bp, Bos taurus
ccttgttgggtttttggggccatgttttatcatggtcctccccttgcttttctcttttatactttattagtgtttttaaaaattataaaaataggggctgraagaaattgctgctgcaggagacctggatttagaaacaccagctttaagtacatattggatattttatcccataaaacaaaaaccttggtctgagttcat

SEQ ID NO: 31800 - DNA, 201 bp, Bos taurus
aaacatagcatctcatctcaccttatacctggcgcttcaggatatcactgacaattgtgattacacccaaatggaaagtaatatgtttgtttagtttatcwatatttaatatatatgaataaagtataatttcataactatgtatgttgtgtcagactttttctaaaatgggggctgggttaaatgaaacacagactaata

SEQ ID NO: 31801 - DNA, 201 bp, Bos taurus
aaaatcccatgtaatctttcactctaaaaagagaagaaatgagcaataaaagaacatttcacaagatatatgttctaattgtatttttaattgaatctttmattaggacattgggggaagagactggaggaggcagtatgcatgaatatcaaattactaaagtaaccaagagggtaaatggatcaaatcccagaaaaatta

SEQ ID NO: 31802 - DNA, 201 bp, Bos taurus
taccccatggactgcggcatgctagagatagagagctgaagcagtgccaagagttttgggtagaccagaacccctgagacttggatatttgctctttcacrtgagattccatcatggaggggagcgccaaggatggaggtcctctgtctatatagccactgctctcagcaccatcctgcacatgttcctgccccttccagc

SEQ ID NO: 31803 - DNA, 201 bp, Bos taurus
ggttaggaccctttgttttatcgttctctagaatggtggaaagtacagaaaggcaatatgatgagcaacgggagagaaacgttattacttttgatgattcrtaactacttgttcagggaggatccagtgttctccaaatgcagatcttctcaaaagggcttttcgcttgcttcaagaatctgaaagttgagaaatggctgt

SEQ ID NO: 31804 - DNA, 201 bp, Bos taurus
agccactgagcaagtgctgaaaaaactagaagtctaagcaccagcctttctagaacctgacacacttattctgtgctaggccaaaaagatacgtttttacraaaaggaatctgttttaaaatttgaattataggcaaatgtatagctagtgttcaccatcatttcaaaataatacatcaaaaaggccactactcaattatt

SEQ ID NO: 31805 - DNA, 201 bp, Bos taurus
agaaatggggccatgctgggtgagctaacaaagcaagtttctagaccttcaagacagaggggctgaaggagaaccagggttaagttgccaaggagttgaaygctacctcagagggcctcgtgggagacaggagacttactgcccctgtgcaatacttcatgtcattttccatgttgactttctccaggaaagacgacctac

SEQ ID NO: 31806 - DNA, 201 bp, Bos taurus
caataatctggcctagttctagaaacataaaggaggacagtatggctggaacagagtaagcatgaagagaagtgggggaggtggtaagaagtgtaaaggayagcgcatccatgtaggccaacggagggaccttaagtgttgctctgaatgatgaaggaaagcattgtatggtttgggcagaggagtgtcatgatctgatta

SEQ ID NO: 31807 - DNA, 201 bp, Bos taurus
gtctacgtcagggatgttacacacttggtgtttatttaaaattcagcagcattgtcaggtgttactgccagattttctttaagttggaggttagaggccartgctaagtatttgttaatgtattttgagactgataatctccagtttgactcccaaaggagtagctttttttccatccagggcctttgagtgatgttaggc

SEQ ID NO: 31808 - DNA, 201 bp, Bos taurus
ccataacatcgcagaaaatttcagaggtgagagaaaaagctattattttcctaataatcataattctgttgctagctatggaattgttgactttggagcaytcctcaattaaattaacccgtgagtcaaaaagtatcatcttggtagctatgtggtattcttcaaatctcaaatcccttgcttaaggttgcttttctgaaa

SEQ ID NO: 31809 - DNA, 201 bp, Bos taurus
gcttcctggtctctagtctgtaaaaggtaaatgaagggctatgtcccctctaagtgattccacacaatcccatgagattgttacagaggaggttgcctgaytttccaggccaaccttgaatatgatccagtaaaagaacgaattaaaaaataaataaaagtgaagagaatggtattcacaaacatttgtcattgttctctt

SEQ ID NO: 31810 - DNA, 201 bp, Bos taurus
aaattctagaatgcttcattctcactgaaataaattataagcataggaaaatacatacaaagctcttttaaaaggtgcaaatgagagaacaaatgtattayacttaaaagatttttacatcttgaaaatgaacaatggaaaacttaagttttaaagtggtaatacaaatcagaggaccactttccccaccacttttgaaac

SEQ ID NO: 31811 - DNA, 201 bp, Bos taurus
agtaccatttatgaactttttgtatactatacaatttatttactttttatgtctgttggttctcccctcattaggaatgttaacttcataaagatgggcayctctgttttgggctctgatgaagatgtgtaagagtaacactgttttcatacctactaacacagtatccattctgcagtccatggattcagttggataatt

SEQ ID NO: 31812 - DNA, 201 bp, Bos taurus
cattggtgagagacatcctctccaggtttacggtgggtgggctccacgcctgatggctgggctttaccccttgtcctccttcaggacttcagacaggcagraaagaacaccggggccacagccactgtcttcctgaacaacagcgtcagctccccacctctgccgttaaggctccctgtggagagactcaatggaagcagc

SEQ ID NO: 31813 - DNA, 201 bp, Bos taurus
aagaaacaccaaactaacctctgcccccaaaagtcaaaggccattttctgatcgacctcttcaactgaagtttccagcagttaaatgctatgataacgacwttgctctagggccctccactaacccaccacccaagggggaaaaaaatccaccctagtgagcttcttgaaatcaggcgttttaagcaatggatttcacacg

SEQ ID NO: 31814 - DNA, 201 bp, Bos taurus
cttatcttattcagatgtatggcaaggtctgggttatggctgagagccatctgagagggagagtagcctactggaaagagtgtagtttgttggttagaccktttggatttgaactctgcctctgcctcttacttactgtaaagctctaaacaaattattagcccactctgaagctcaagtgaccctctgcgagcagagggc

SEQ ID NO: 31815 - DNA, 201 bp, Bos taurus
tcaaactacagtatgatacagtatgctgtagtatgtattgactctgaaatatcacctaattgtatgaaaatatgtaagtcttccaaatacctacctttaartagtttttaaaaactttagcatcaggctgctgaagcgcttgacaaaactcctgaggggccaggaggggaggagagagaaaagaatgagtcatttgtatta

SEQ ID NO: 31816 - DNA, 201 bp, Bos taurus
cttccctgccaagactctatgctcccaaggctggggtacaggttcagtccccagtcagggaactaagatgccacatgatacaaggccaaaaagaaataaayacagattaaaaataaaagaaacaacctaaacctataactaattctgaagctttttagtctagtgaattttagaacctggccatttatgttttccagctaa

SEQ ID NO: 31817 - DNA, 201 bp, Bos taurus
gccctccttcagacctgaagaagctgtcccttcatggccaaagagcccgtggacccttacctaacccctccagaagttgtcagctcacatcagccagtagmaaagctagtgggccattttgtataacagacacaaaagaaccccaggggctttcagatcacaaagactctctaagtgaaatccctttcaagtgcaatggga

SEQ ID NO: 31818 - DNA, 201 bp, Bos taurus
caaggcaactgaacaactggtatcaagagatgtagagctgagctttgggatagaaagaaagatatgaaggatcacctttaccttgcactgcaaatgaaccyaggctggacttggctcggttaagctcagtttgaagtggatattgaagttgcagctaaacatgatggacattcaagattaaatggtgaaatgtgtttgatt

SEQ ID NO: 31819 - DNA, 201 bp, Bos taurus
ttatatatatatatatatttttaattctttatttgttttggttggtgcacacggctttctctagctgtggtgaacaggggcttctcattgcaggagcatcycttgttgtggcgcacaggctctatggtgcatgggcttcaggagttagcagcacccaggctcagcagttgctcagaggctctagggcaggcggcttcgtaa

SEQ ID NO: 31820 - DNA, 201 bp, Bos taurus
aggattcaattttctgacggaactgaaaaggaacattttctaacatgtttctgtttatcaacccacacccattctgttggccagatttctacttgagtagygggcaggacaacttccgcttaaaacaactcgaatctccacactttgggggccagcagaaagcacctgaagaaactttggcaccctacacatagggcaggt

SEQ ID NO: 31821 - DNA, 201 bp, Bos taurus
acaaggccctactgtatagcacatggaactacgttcactatcttgtaataacctgtaataaaagagaatctgaaaaaaaaaaaaaaaaagacctcacagargagatggcctttgagacaaggtcttaaaagatatgagggagtttgtaatggggaatctgggggaagaatattctttgcagagggaataagcaggtatgga

SEQ ID NO: 31822 - DNA, 201 bp, Bos taurus
tagcacatgattgtgtgtttggaaaaaactattataagtaggaagggtcatatgggagggagagtgttaagagggcccatgagagttctaccttctggagkacatcttgatataatcccctctctttaaatgtgagcctgcactaggcccatgatgaagttttaagaaagagagattttccttggtgagcctgaatccatc

SEQ ID NO: 31823 - DNA, 201 bp, Bos taurus
agtgcaaaaggaatgatttcactttgattgcattgcccctctccccacactggcacagcaccaaactgagaggagcctcccttggccttcagtttctccaytgggcaaaagaaagcccaacctacgtagacattcttcttcacaccattgtcagatgctccccaaaagggccacttggatcttgcctctaaggcatcactg

SEQ ID NO: 31824 - DNA, 201 bp, Bos taurus
tcagcatgatgtgtctctcctggagtttcctctgctggcctggaccccagcttttgctcttcctcctgtaagactaagatcgtgataggtggtgctgtgcyccttccctgttagtcatttggcctgaggcatccagccagtcctgatgtctacagtgtctatggtaggactaaaggtgactcccaaaagggcttaggccaa

SEQ ID NO: 31825 - DNA, 201 bp, Bos taurus
gctccctgtagaatctgtcaaaatatgatgaactactatatattccaccaactcaagaatcacactggccctaccctattatgtacacagcatgacaaaartgcttaacacaaggagcaaggatgtgggaaaagtgagcacacacatactggtggttagaatttacatccattacgttttttgaaaggtatgtttgcagta

SEQ ID NO: 31826 - DNA, 201 bp, Bos taurus
ccctgaaagtacaatagggaagaaccttttgtattctattacaagttaatcactaaaggaatgctgcctataaaatgaaattacacataaatggcccatcyctgggaaccttgattcccgagtaaaagcattaagttaaaatacatttatttagctcacaggaagcattctgaccaggccctactgtgaatgactgcaggg

SEQ ID NO: 31827 - DNA, 201 bp, Bos taurus
tggctgtctcctgtgcttttcctcacaagagaacacgatgagactgttctcccaacacaatctgtaaaattcatcctatcctggccaagatgggagggacratcagcaagcagtgatcattaatgaaaagtaaaaaatatagatgagaatctatcatacagttggccttactgcacatacactccatttcgcctctcttga

SEQ ID NO: 31828 - DNA, 201 bp, Bos taurus
caggtaagattctcagaggtacagggaacatagaatattaaaggtgaaaggacaaggaaaggaattgtaggcaaggaacaggtaggtaagaaaacagcacrggccaaggcacagagaataggaatgttttataattgtcacttactctgcttttttgtttggggatttacttgttatactactaatgaagagacagtgtgg

SEQ ID NO: 31829 - DNA, 201 bp, Bos taurus
ggctgtcccctgttatgcagtgccatgacacttcctttggcatgccatcaaaagtcctcatggtttaaggatgtcactagcatacaattttacaacatttkgggggagctaacttgtagtgatcaggatagactattgaactatagatttacagctcaactcagagagtagcaatctatgagtttcaagtttggagtttgg

SEQ ID NO: 31830 - DNA, 201 bp, Bos taurus
attttggtagaccccgggagttggtgatggacagggaggcctgtcatgctgcagttcatggggttgcaaagagtcagacatgactgagcaactgaactgayctgaacgtaaggttggcccgttggtttgtgtaagcttctcatagggtgagatttgtgctgtttttgtttgtttgtttgtttgtttgtttgtttgttttcc

SEQ ID NO: 31831 - DNA, 201 bp, Bos taurus
ccaccctctttttttgccaccaaaataactctaattgatgaaataaatccatattttatagcaagacaagaataatttaaacataaattttttctctgccrgatcgggccttttccctcccccttagagtgtgttgtgcatctgcattaaccagagcttatagtccttctcaatcttgtatagtgtcaggatgatccacta

SEQ ID NO: 31832 - DNA, 201 bp, Bos taurus
ctaatggatgccacctgcttctggcttgaggatgagaagcataaaaatcagctcatcagcagagtagtgctctctgtcctcggctgagtgaaggaacaacrctccgggccagcgggggaggactcagtgttaggaggagctcaggaatgaggctgcgactgagaaccctgcctttgtttttgttaggatcagagaaaatac

SEQ ID NO: 31833 - DNA, 201 bp, Bos taurus
ccagggcctcccccacctacctgccttctcattaggttttattcatcccattttgagacttgggactcattattgtacatgcagtggtccagatttagccrggagtctgtaccgcatcaaccagactacggcgtgttgacatatggagttcctcacccccttaggaacctgagccaaagaggagggaggtcagagctgggc

SEQ ID NO: 31834 - DNA, 201 bp, Bos taurus
acttgtgcagccagagcttcaagtcagaggctgcctatcgctaccatgtcagccagcacaagtgcaacagtggccttgacacacggcctggttttggactycagaacccagctctccagaagcggaagctgccggcagaggagttcctgagtgaggaactggcgctgcagggccaacccgggaacagcaagtatagctgca

SEQ ID NO: 31835 - DNA, 201 bp, Bos taurus
gtgcagagacccccggccccactcctaggctgcctcagaccccaggctggtggtggggctgcagctggtccccactgaggactgagtccctccccttctckcaggcgcggcatccacgacatgtttcccctgcacttagctgttctctttggattctctgactgttgtcgtaagcttctttcctcaggtatgagctgactg

SEQ ID NO: 31836 - DNA, 201 bp, Bos taurus
atgtaaaaacaaaataataggggaaaaaattgtagaaaaaagttactggagaaaacatatattgaatgtcacagtgcttgtgttaggatgatttctttatrtttttgaaacgttttataatcatttttattactatatagtgaaaagaatcccaatattaattggaaaaaacaatcatacccaacaaaccatacaaaaatt

SEQ ID NO: 31837 - DNA, 201 bp, Bos taurus
aggagttaatcaaggaggatgtggggttgttttcctctccctaagaagaagttagaaatggaccacaacttggttaccctcctcttccccgcccccactcyaactgggcacttctctacccccatcctgcctctctaggtcctggaataaatatctctttggggcagcacacagcccctattgtgtctagggagggtggga

SEQ ID NO: 31838 - DNA, 201 bp, Bos taurus
agttggtgcagcgaataggctgcacatggccgcggccctttttggcacgaccgttgttccttcttttcttggtctgcgtcaggatgaagattccattaagraggagcaacttacccggccttagcccccatccggccacattccttgccgaccacccccaagaaagcgcgactcacatctccagtccctccgcagatccct

SEQ ID NO: 31839 - DNA, 201 bp, Bos taurus
gtgtcccagaaatagactcgagtgtatgtgggaatttagtatatgatgacatttcaaagaaatggaaaaagaaagattattcagtaaatggtgctggatgmagaagtaacaacccctgatactaagataaattcaagatgggtcaaagaatttaaaagtaagcaaaatttgtactagcagaaaacatgaatgaatgtttta

SEQ ID NO: 31840 - DNA, 201 bp, Bos taurus
aggcgggtgtccagcaaggtcaggctgatgatggccaggtttccagacacggtcatgaggtaggcaagcagcaggagcaggaaaactgccacctgaagccyttggtgtctgcaggccttggaggaagaactcagtcaccaaggtctgattggccattgtagatttcatgtccttgccagaaacatgcaagcccgggcagat

SEQ ID NO: 31841 - DNA, 201 bp, Bos taurus
tgtcttatttcatcagttaggagaattaatatttgcttatttcattctactgatcatatagttcatccactggtcctacttaaaggtgaagtgaagcaaartgaaagttacttagttatgtctgactctttgtgaccccatggactatatatatagtccatggaattctctaggctagaatattggaatgggtagcctttc

SEQ ID NO: 31842 - DNA, 201 bp, Bos taurus
tgtgaagtgatgtcttatcagtgtctcaggataagaaatggcaatcattccatcaggtgctggaaactggttagcctcgagacaagggtttctagggccayaggtcaggatgtgtatttagttacagggtcccagaaacccgtctcctggctaccacaagcaatggcttcttttctgggctaaggagccagacctggactg

SEQ ID NO: 31843 - DNA, 201 bp, Bos taurus
tttattttctctagatataaatcaccctgtgtttctcctccctttcatggccaaatgtttccaacatgttgtttcttgtttttttttcatgtctcaacttmtctctatccatatataacttgaatctggttttccctcttatctctctctcaaaaacttttttctgaagtttccaatggccactgtgtagctgaaaattaa

SEQ ID NO: 31844 - DNA, 201 bp, Bos taurus
acccttccaatttaacctatgatatactcactggaaaaagagccatggcctatatgattgcacaattagctaatattacgcctcagatgttacatttcatwaaaaaaactgcctacaaggcgtggccaaggttgatagcatgaactctgatggttcatttgttaagattattcaaggaaatgaggaggaatattctcaatt

SEQ ID NO: 31845 - DNA, 201 bp, Bos taurus
gttcctgcaaaattcaaaatggcccctcccatgttctaccttaaactttctgtacttataaatgctatttactcacagaaatattgcctactaaacttgargaataagggccttaaatccaaagttaatacaaaattattatgaaaatagtcctaactctgatgaagtctaagcactttttcatgaatgcagttagtttct

SEQ ID NO: 31846 - DNA, 201 bp, Bos taurus
agcactgaggcagaaagtacattgagggggccaggatcgagtgtgcccaggtgttccctataaaggagcagcatgtgctctgggccccagattggcaaacyctggtgctttccatcatctcccatgaacgcgagggttttccaggtgcagccagcattgcagcatcccatggaccccgagcctcttgtaagactgacatct

SEQ ID NO: 31847 - DNA, 201 bp, Bos taurus
agcctgggggtcctggcacctgtgggccctgctgctgacctctctctgcaggggctctgattcctccctcccctggtttctgtctgtgtcccttcattgcyggccgcttataaacaccatgttcctgtgtttatctggaattactcaactgtaaaatgctctccacaccaggaagtgtggcaatcctcatccatttgttta

SEQ ID NO: 31848 - DNA, 201 bp, Bos taurus
ttacaaggtacctcttaagcatttcacaaaaattaacatataagaaggcaactgtgctttcctctttgttttgtcctttcttcttgaattaaaaaatttcrttttaaattgcttttttgaaatcactcctggcatatttgagagacacaaaataatccagcaatgaaaggatgctaaaggttttagaatcccagaagctgg

SEQ ID NO: 31849 - DNA, 201 bp, Bos taurus
tgtttggtatctgtgactcggtttcccctttttcacatggcccaggcattgggacggaggactgtgggatttcagcccaaagagagatcagaggattaagrtgacttcctcaagagacaggccaagtcatgcagttcagtctacatctgatctcccttgggcagatttttaaatctctggggaaagcaatttcagattcta

SEQ ID NO: 31850 - DNA, 201 bp, Bos taurus
catactaatcataaatgtgtatataccaaataacagagattcagaatatactttggatacccaaagcttgaaaaacattctgcttggtggacacattgatrtactaagcagatctcaggccctgagtccataggaaaggtcacagaaatgccttatcttagacccatccagacctggcccgtcttgcatttggctattctt

SEQ ID NO: 31851 - DNA, 201 bp, Bos taurus
agatcactgccatggcagtcggggccacggagagacagtccctcacccctcatgggtagtggctgctccttacgtgtccagcctctcctgaaactctcttrtggccgcagaccaccctcaggtagagaggtccaggtggttgaagtaggataccatccacatatgagtgacctattcatggaagatgctggtgacttccag

SEQ ID NO: 31852 - DNA, 201 bp, Bos taurus
ctgtccatcaccatctcccagagttcactcaaactcatgtccatcgagttgttgatgcaaatgcaaatcaaaaccacaacacatggtcctttgcatccatyaggatggccataatttaaaaaaaatgaaaataacaagtgttgaccaagatgtggagaaattaggaccctcatatattgctcatgaaaatataaattggtg

SEQ ID NO: 31853 - DNA, 201 bp, Bos taurus
tcacctttgtttccctggggaagagctgtgctttttttcccctccaccccactccatgtctagtggtgcctaggactaacagtttggtttccttaggaagmacatgacctatttaccccatcttttaaaaagaactttgcttctttaaagtggtctggtttgttctgagaatttccttcctattcattctagacttgtgaa

SEQ ID NO: 31854 - DNA, 201 bp, Bos taurus
actctggcagcatagctgcattctctcaggacattctctctctttaaatgtctatctccaaattttcccttttcataaagactccagtcctactgaattakggcccagccttatgtcatcactttaatgatagaccctgtctgcaaaagaggttgcatctgaggtactgggggttagcatctcaacatgtgaacttggggg

SEQ ID NO: 31855 - DNA, 201 bp, Bos taurus
ctgtgtacattttctacctagggattttagatgagcattgtcagaatttagtaaaaagccccatcaaatctgtaggattttgttgaacttaaagcaattcrtttagaaggttacatttttattgtctatttttcagagctacagaaagttctttttttcccatttctactttgatagatgttccacacttaaacttttatg

SEQ ID NO: 31856 - DNA, 201 bp, Bos taurus
gaactgaacagaacccaacaattatgaaatgatcagtagaaacttagaacaagaaataccttggcctttctgaaagactcaggaaagattacctcttttaraaataacaatatttttgtgtcacatccaccatataaagagactgttaaaagccttctgtagcaaaaagtacaaaaccctcagtttggcttgctgctgctg

SEQ ID NO: 31857 - DNA, 201 bp, Bos taurus
cttagaacagtgcttgacatatcattgtaataggcacagtataagagggtgttttcataaccatgggcagagccctatgctggccccaaggatataacacygaaagagaagagtgtagtccctgcctcttagtaacctgatgcttattgggtgggtactccattacccaccaaaccatctaggccaggaacctggaagtta

SEQ ID NO: 31858 - DNA, 201 bp, Bos taurus
tttcatggcactgtctttcatctttctccttctttgaggtagactgaaagatgggttccgattctccacccttcccttgccaaggcctcacaatggcctgrtatatttcctgcccttcatgttgggctctactatgtggcttgctttcctcactggcagaggaagggagagcccaaagcctagacatgaatttttctgatg

SEQ ID NO: 31859 - DNA, 201 bp, Bos taurus
cacaattcatggcccaaaaacagaagtgtattttttttctgataagcatcagcagtccagcaccgagctggtagctccatattcataaaggatccagtctycatcctttaatgaggcccatacctcagaacccagataactattccacacaaatacagccatcaacatcaacattccagcaagcagaggaggaagggaagg

SEQ ID NO: 31860 - DNA, 201 bp, Bos taurus
tcctgaagattgtgttagtctgctagaggactggacacggcccatctgctcccatggtagggtctggactgatgggggtgggaagctgtgttccagcccarttagttgtttggcctgaggcatctctgcactggcacctacaggctgttgggtgaggccaggtcttagtgctaatgagccaagatgtcagctgccaacaca

SEQ ID NO: 31861 - DNA, 201 bp, Bos taurus
taataaaaatgttctataatcagttaatagctcatgttactggcctttaatcatcctaattggcagttgaaaaatatgcttataaatgaattcatactgakggactggctggggaggtatcttgaacagaacttcctgataggttggtggtgctggaatgtggacaggacctgggatctcacaactgatgtaaccgagcag

SEQ ID NO: 31862 - DNA, 201 bp, Bos taurus
ggtgctggaatgtggacaggacctgggatctcacaactgatgtaaccgagcaggactcactgctgatgtaaccgagtgaggccttttcaggacagaccccrctcccacatgctctcagaagtacccagataatagtagctcatgcctgagtttttcagatgctaaaaaaccaccaccatgcatgcatgcttagttgcttca

SEQ ID NO: 31863 - DNA, 201 bp, Bos taurus
taaatgacataaattcattttctcatatttctggaacttagaagtctgatatcacggtgtcagcagagtaagtttcttctgaggcctctccccgtggtttrtagatggctgtcttctctctgtgtctccacatacgtcttctctctgtgtgttttctgtgtcctaatttcctcttcttagaaggacattggccgtattgga

SEQ ID NO: 31864 - DNA, 201 bp, Bos taurus
cccagggacgggggagcctggtgggctgccgtctatggggtcacacagagtcggacacgactgaagtgacttagcggcagcagcagcagtctccatctttrtgtatactgggtttaatcttaaaaagctcttgggatcagccaaagtggcatcggtcatttttaatatgtgaaatatttatattttagccatcaattgtaa

SEQ ID NO: 31865 - DNA, 201 bp, Bos taurus
atggagaattgccccagaaccttgggtggacagatggcagacacacagacttagagggtccaccttaccagcgagagatgaactcagctgagccagccaawaagagctagccctggccagaatgatcttggcttaaattcatcacttgaaggccacaggtataccagaaaggatgctcaagcctactagcctactatctct

SEQ ID NO: 31866 - DNA, 201 bp, Bos taurus
agtagtattccatttaatgcagacttttcatggatcccttccatcacaattattcctggttgtttgctcaaaataatgtatttccttttctcatctcaaayttactaagtcagaatttttaagtatagggtctaagaatatacattttacaaagcttccttagtttgttatgtactctataaagtatgagaaccactgatc

SEQ ID NO: 31867 - DNA, 201 bp, Bos taurus
tgaaaacttaagtgcttcaaaaacacatttcaaaaaaatcattagttaacagtgcagttattagaaatcatacagattaaaaaagtaatcctctatatgcmtaactgactcactatgttgtatacctgaaactgctgctgctgctgctgctaagtcacttcagtcatgtccgactctgtgcgaccccatagacggcagccc

SEQ ID NO: 31868 - DNA, 201 bp, Bos taurus
gcttaggcagagttagaggaaaggatatgtaggttttaaatcggattttaatgtctcttgcaccttcccatcaaaatcagtagcagatgttcatagaaaayaacttggcatggcaataaatgttttcataattccagtagcaacattttccaactgctttcagaaatgcagtattaaatagaaaaaggaaagtgaattttt

SEQ ID NO: 31869 - DNA, 201 bp, Bos taurus
actaagcacagcagcacaggaacaggcccccacattaactaggggtttctggaagatctcatttgttctcagagagccaactttaagagcttgtcatgtgycaagccctgtattaatactggaaatagagatgcacatggccagtccctgctctaaagaagctcatatagaaaagtcatgtaagcagaaaagttctatata

SEQ ID NO: 31870 - DNA, 201 bp, Bos taurus
aaaggcttttaccttgttttcaataccaattaagaatgcattaaaatctatggttaagggtgaatgactcctataggagcttattttaaaaatagattcaycaggtttttagatgcctaaatcgaaagactaaaaattgtagaaaactaagaattatattgccattataactcataaaatgaattctgaacatttcactct

SEQ ID NO: 31871 - DNA, 201 bp, Bos taurus
gactggccaattctttcctctcaagcgccctaaatatatctcttaaaaaaaaaaaactttgaaaaaacaagttgtatctttgtttctcatccagtaagttkgacgaagtctcccctaggccttgcaaagagcaggggtaaaggagttcctgagatgaacaaaagttaggctctctggttattctggaccccaagagaaagg

SEQ ID NO: 31872 - DNA, 201 bp, Bos taurus
gttccctgggacaaggatgtcaggaaacccaggtagaagggagaattttctcttataaggactaatgtcagatatggacattcttcatctatatgttctgygtactgccaagagtgaatttgataagaataaattaaaggtatatatgtagattcggggaaaaaagcaatacttcaataagtaaacaaagggaaagttgac

SEQ ID NO: 31873 - DNA, 201 bp, Bos taurus
cccatggacagaggagcctggcgggctagtccatagggtcacaaagagtcggacacaactgagagccgaagagaagagttgtaggcagaaaggaagagggyagagagagctttttctgcttttgcgccttcttaattggattcagctcaaaccaatatgttagagagacatatttgggggtgacatattctggtttccttc

SEQ ID NO: 31874 - DNA, 201 bp, Bos taurus
tttgcttttatagacatcaatcatcaatcaccatattccctttcctctttctggcaagctgactcattacagaacctcgggggaattcacaggcttttggycctccctgaccttataggagaaggcgatggcacccactccagtactcttgcctggcaaatcttgcccggcaaatcccatggacggaggagcctggtgggc

SEQ ID NO: 31875 - DNA, 201 bp, Bos taurus
catgagctccatggggatgcccaccagtccctcggcaaaggcgtgcatgggtactgctccagggccgggcactggtcggcctcctggctcaccaccagggygcaagcgatctcggtagcacccctgcaatataccatgcggttgtcccaatgaggttgcagattacacacagagcgtcatgacgggaacgcttggcctcct

SEQ ID NO: 31876 - DNA, 201 bp, Bos taurus
gagagtgaaaggaggcattgttaatgattacgccccaatgacagatgcaaaccaggactatcataggcaaacctagaggtaaggtcactctgtgtcctgcygtttcagatgcccttcttggatgatctacaactttgtgaaaagggcactgatattatagccagtagaaatccagtttaattgagtcaaagcatggaaaaa

SEQ ID NO: 31877 - DNA, 201 bp, Bos taurus
cttcctcactttggatagccaggtttaatttcattaaaatagactttattttttagatcaactttaaatttacaaaaaagtaagaagctagtagagagaaytcccatatattctgcagccaatttcccctaatattagtgtcatgtataagtactgaagatgtgttaaaattaatgaactgatgttgatacactttcacaa

SEQ ID NO: 31878 - DNA, 201 bp, Bos taurus
tctgatatctgatacagaatgacagaaagcagactcccaggaaatagtacaaggtcaggactagataggattgtaggccttgaaccactgaaagtcccttrctctaaagagaatttaaagagcagtgagtctgaactcctccttctacacaggaggaaagtgaagcccagggaggggaagtgacttagggcccagagacac

SEQ ID NO: 31879 - DNA, 201 bp, Bos taurus
tctaaaattcagattttctcaaccctgtaattcattgtaattcccactatttctgtggtcacctttgccactgcatacagcaaggtcttctggggccaacrctgtagcactttaaactgagttgagagagaaattttcatcccacataacaccaactgtgtgctctgccagaaagaggccagatattcccaaagctatgtg

SEQ ID NO: 31880 - DNA, 201 bp, Bos taurus
gatgtactaaggtcgaggtcaagatagcatccacacttggcctttgttcggaggttgaggaggctggtgcacctgggtaggaagctgtggtcagaaaagayggaccgcagctggcctcctgcttcaggccaagtgcctccgggccacagagccccctcctctttatctgcccacacacagggaaggcctcagccccccaac

SEQ ID NO: 31881 - DNA, 201 bp, Bos taurus
ggtttttctctccttcctatctctcatccacttagcaaaatgcctgacccagtggaagaggtggtgaataaggaggttcagagagtatgagaacaaagcayccaagaaggggactcagaaacaaaataatgatcatgttggttcatagaccctgcttgttgatcatactaacttccatatggagccaaatctctctatcat

SEQ ID NO: 31882 - DNA, 201 bp, Bos taurus
actggggagctggatggttaggccctcaatatatgaatttggggaggacacgattccgtatattacattcagtaaagaatcaaaccttgcttttgcatttmgaaggcctaaccttgtcattgagcagctacactggaataatcttttcctgggaagagaagttggaggtgccccagtgttccagaaaatggggtgaatttc

SEQ ID NO: 31883 - DNA, 201 bp, Bos taurus
agttattataattttagctcttatatttaaatctatatttatttagaggtaattttgtacatgatacgagataagggccatagttaagatcatacgtataycccatttttcgagctgttttttgaaggaactatattcctctcaccttggtgcctttgtcaaaaaccaagtggccatatatgtatgggtaactttctggcc

SEQ ID NO: 31884 - DNA, 201 bp, Bos taurus
caatgaatgcatgtgtttaagaaggtaagaaggaaagaaaaataacttaaaaattattgaagtgtagtttatgtacaatgtaatgttaatttcatatgtayggcaaaaccactcagttatacagatatgtatacatgtatactagaaaagaaccattcttaaagcctggagaattgcaacaaacatccagggttttggttt

SEQ ID NO: 31885 - DNA, 201 bp, Bos taurus
tatgtgatggcaagtacctgacagagcttggttctatcacagttcttttgactccccagtccagccttgtaactgctacgtcacacgacttctctccgacrccaagcatctgtgcatgtgaatgttatgtgatgtcctttgccgacataaaaaagaaaaagtgaaagagagtgttagtcgctcagtcgtgtcaaactcttt

SEQ ID NO: 31886 - DNA, 201 bp, Bos taurus
ataggagggcatcttctgtgtactttgttatggacacaacatagcacccagcaaagagctggttcaatgatcatgattggaataagcatctgttggtgctkttgggccttccgtgagaaaacaggaaaagtgaaggctgtcctggtgttttagggggccatgtgcaacacagaacctcaacagctggactcctcactgtcc

SEQ ID NO: 31887 - DNA, 201 bp, Bos taurus
cccatgagaagtaaaatattggcaaagagagaaagccagagggaagggcaagcactccattttgggacttggggattggtggaattgaaaagattagagtrgaccattttcttcttcctctagccccagccacacccacacgtccttctatcagatgggagttaaagcgcaaggctagtttgcctggggtaaagtaggtaa

SEQ ID NO: 31888 - DNA, 201 bp, Bos taurus
cagggtagggagtcttcctgtctgactcacattctcacctgctctgatgtgactccagtcagagctggagccctgctgcccattgacaggctggccagagyctcaggtgttctctgtgcccttgctttagatcagggaactactggcagcgccagagagagagggggaagctgggggccaggagatgccccagcctgagga

SEQ ID NO: 31889 - DNA, 201 bp, Bos taurus
gacaattagaatcccttttaaataacttcttcccctaatcctttttctctctggttcaaaaaattgttgtgtgttttatgagaaggcccaagacttctackatacatggttataaaagaacaacttgtcattgtactgaatttataattctgactatttgaaaaggcccttttcttttcccacaccaaaatgacctctgaa

SEQ ID NO: 31890 - DNA, 201 bp, Bos taurus
aatctttgactgtttttctatttggtagttgctgtttttctcattgatttttaagagcattttattttttagggatattaaccatgtgtctgtaataagasttgcaaatattttctcattttgttcttttatttttgccatacagaaaatgtatttgcatagttgaatttatcagcccttgtttttatggcttctggattt

SEQ ID NO: 31891 - DNA, 201 bp, Bos taurus
ctagctttcaacactttcttcattgtctccccaagccccagttcctatcccaaacctctcttgtcatctttctccaacaagcttcctaagaaatgtgcagkaattccaatgactatatgctgctgctgctgctaagtcacttcagtcgtgtccgactctgtgcgaccccagagacggcagcccaccaagctcccctatccc

SEQ ID NO: 31892 - DNA, 201 bp, Bos taurus
ttgtcccctgatcctgttgaaaggagccaagctccaggtggaactgcagctcgggcttgctgatatagcacgagtggagttttccataggaaattaaccargtaacactcacattctttcccttctctcctttccactcttctcttccctctttaatgaaacagcttaagctcagcacttgaactctctcacaggggtgaa

SEQ ID NO: 31893 - DNA, 201 bp, Bos taurus
gcccaaaccagtgacggctatgtgagcacagcaggtgggctgatgtccagttacacttcctgcattagaggatctaagaggtacattctcatggccaccayatttaccaaggagaacaagaacccacagctggcatagaccaataaagtgtcatccccggggcagggaagggcccagtctgtacagggacttggccattca

SEQ ID NO: 31894 - DNA, 201 bp, Bos taurus
ctgaccaaaataagcacactttcctgatggctcagatggtaaagaatctgcctgcaatgcaggagacccaggttcagtctctgggttgggatccaaaatgrtgattcttgaaatgtagtctctgaaccaccccagatccactgaattagaaactctgggagtagggtccacaatatttgtttaaacaaaccctccagaggg

SEQ ID NO: 31895 - DNA, 201 bp, Bos taurus
gttagagatggagtgcctttgtttctttgtttgcatttttttcctttttgtgtgaaccagtaaaaatcaataaacggccagcaaatgaaagccctgcccayaccagagcttgctgtgtgttgctgtaggaccaagtgggcttccttctaggttggggaacagtggttggttcaggcggagggaacccgagcctgggtctct

SEQ ID NO: 31896 - DNA, 201 bp, Bos taurus
cccagggagtggaggtggaggagatgggggagagggtgggccagggctgagagctcagcctagtggagtctgagattggaccctgctctcttcaaggctcrgacttgtgctaaggggatagaggccaatgactgatgaggcaatgactcaggaagaaagaagacaagaggggcctgggtccagcacttaggaagtcaatga

SEQ ID NO: 31897 - DNA, 201 bp, Bos taurus
gtaaaagcaactctaatcccaatatttttcaaactgcaggttacagcccattaatgagccattaaatcaacgcagtgcagagattggcaaacgataccccrcaggccaagcttggccaactgcctgtttttataaagttttattggaacacagccaaactcacttgtttacatattatttatagcttctttggcacttgtg

SEQ ID NO: 31898 - DNA, 201 bp, Bos taurus
aacagactctagcaatgagccgagatggctccagaccctaccaccaggttcggccacctcagctatgttaccacagggcctcgtgggagggcaaagccccytcatttacattgtagtctccaaggggatttctgaggtttagcttcttccaatcctggtatcttggcatagatggaggcctctgggaggtcaagagaaatc

SEQ ID NO: 31899 - DNA, 201 bp, Bos taurus
gggccttgattagttgaggacatcttctccctctgggaactagtagtgattcctaaaagaacccggggtctgctcttcactgtccaatttaggatagcatrctgggtgggagtggccttgcaaagcctccccgctgtttctgttgtgttctgaaaggctcaacgtgtcacatggtctgaatgcattctctggtcctcaaga

SEQ ID NO: 31900 - DNA, 201 bp, Bos taurus
cacccaacaggtcgtaaacagcttggtagacctcctctctgctctctgtgtgtcctcgccccggagacagcaagcctcctcccaccaaggccgagaccacyctttgttctaggtcccctaaggctctgactgcttgctgttccctccttcctcgtaacaggacccttaagttttctctggggatttggcctctcagctaaa

SEQ ID NO: 31901 - DNA, 201 bp, Bos taurus
tgtggttagtggtccaggtggctggcaccatggttttgcaacccagctgggactgattgtctacccaccgcagactggccagactggccctgggagacagygtgcatcaccctctagcacgcattgactccatgtgtttggctcccttagcacactgcactgaccctttccagattcagtgctggggccagcagaggtggg

SEQ ID NO: 31902 - DNA, 201 bp, Bos taurus
gctctcgcctctcaggccagtgctccatctggccagcactgggagactcctgtgctttttacccttgcacagccccagacacataatggcaatcaggctayagcccatgagcaccatttttcatacaaaaaaatgaaggttcttgagcaattaaaaaaaatgacttattggaacagctgtctcagagaaaccgtggtcccc

SEQ ID NO: 31903 - DNA, 201 bp, Bos taurus
gtgtgttgggaggagcagaccatgtagacagtagagattagggtggcctggcagagcagcagttcgtgcaatactctgaactggtgtctgaggatgggccragcctcagaggggagcactgccttcttcatgaatctggaaaagcaggactgtgctcctgagcttcactggacgtccctaggcccagaggacggcagggat

SEQ ID NO: 31904 - DNA, 201 bp, Bos taurus
gtaagcgtgtcctggaagggtggccaggacaaatcagaccaagaagtcagtatctcccaatcatagtgaaaggtgtcacaactttgcatcataaagttccycaggccctctccttagcccacttgctaactctgggccaaagcagagggttttggaaagagctagggttggaagtcagacagacctgggtctgaacctggt

SEQ ID NO: 31905 - DNA, 201 bp, Bos taurus
aactagaggcattttttgacttctcttttgtgatcgtcattgttcgtgaagtctaggttttctgcttgaagcactgacactagctacataggcaggactckaggaaatttggccaacggctcccctacctgccgccctactggcctctcccccgccccactgaagcctttaacttctgtggcactagtctctgggctgttt

SEQ ID NO: 31906 - DNA, 201 bp, Bos taurus
ttcctttgaagtcagcttccaggccagccatcaccttaagatctgacgcctgaggactctgaataattccctcccgtgggttttataaaactcttcttcgygtaagcctgggcctttggaactcagcttggtttcctcactcccctgagaatttgcctgaactgaagcttggcagtcaccggcccatgccgcagagtcgtg

SEQ ID NO: 31907 - DNA, 201 bp, Bos taurus
tgggctgcaaattacatcccaagcatatgcaaatattcatgtattaactagaaaaccagtctctaaactgttcttgcctgggggaagggagaaggcctcayttattaacccaggtgtctaagagtcatctttaaatacccctctctcaaatccaaatccaatctcttggccaacactcctcctaagtatctactccatttg

SEQ ID NO: 31908 - DNA, 201 bp, Bos taurus
agacatggaaagtgagagttgtcctaagaaagtgcttgaggccagagagagtattaaaaaaaagaatttctactcagttggaaagaacaagaaaggagtgrtgagaaatgggacagtaaacagaggccaaaccttgtgagccttatacatcatgtctacaaatttggatgtagtcctaaaagcaaagggaagtccttgaaa

SEQ ID NO: 31909 - DNA, 201 bp, Bos taurus
ccctttctctgtggccagaggtcagccctgccaccggctggctgcctagccgtctcctcagctggagtccctgccagcttccaggccgcactttaaaccgwgttctgccacttactagtgtccttaagcatctttcctaagctgtggtaaccatgatgaccatcttcccctgagtctgcatcttctctgggcccccacact

SEQ ID NO: 31910 - DNA, 201 bp, Bos taurus
tgacggcggcccacctctttccaaattcctcttccctcccttttaaaaactaccaaagcccaggtcttggctactcagctctccagggaggaggccattcrgtctgcttctcctgcgaggacagtggaagcagagaaagtgaacactgaccctaactcccagaccgcagtcgggccccctagactacctaaaatcaaacac

SEQ ID NO: 31911 - DNA, 201 bp, Bos taurus
cctagacctctgttggtcaatcaagacattgggccttcattgtctctggcatctgctcaggtgtcttcttccaggtccttgtctgcctgtggataccatgmcagctggcctctgctgagctgtcctgtctggtcctccgtggttgatccacagaaagagcagtttatccagggcctctccaggcaaggctctgtcttgtca

SEQ ID NO: 31912 - DNA, 201 bp, Bos taurus
tagtggctgggagccaaggaaaggtttggaaaggaggggaggtgtgttgggctcggaggcctggggattagggtcaggggccctcgtgtgttgccaactgyggacccatctctgggtccacactgccttcccacctctgcccaggcaagtagcttcctgccaggttgggaaattgctttggcctggaaattttctgctggg

SEQ ID NO: 31913 - DNA, 201 bp, Bos taurus
tgacactgggaagtttgccactaacctggccctcccccctcacttttctataaaagggctttgttgagaggttttggggagtttgggggttttaacacatragccgcctgtctgcttgcatggccctgcaataaaactcttctgctccaaactctgacgttcttgtattgcttgactgcactgtgcgtcaggcatatggac

SEQ ID NO: 31914 - DNA, 201 bp, Bos taurus
tctcccaccctgtgggcttcttcccagcccctccctctctccccctttcccatgtgatacctgcctgacttgctgatgttgctctggccaatggggtaaargttgctgtccaggtctttgatctagaagaggagagctggatgcttaccccataccacaccccactccccgcagcagtacccaccactgagctctggagca

SEQ ID NO: 31915 - DNA, 201 bp, Bos taurus
ccgtcatgtggatggaagagaattcacaaaggcaggccctccttcaagtacatggaagaggagagctggctggtgccctgtctcctcctctgcccaaaagyggcagggcctcaggaggcaggtcagcctattgaaatcatgaaacatgagaacagagtcaagtagaaagaagaggagggctcagacagaaaggccggctcc

SEQ ID NO: 31916 - DNA, 201 bp, Bos taurus
ccagattgtttcctctacaaagaaactctaccaatccatgaaaggcattgggaagaatgtccaaaacttcaagctggccaaagctgaccctcacttagcarccagttctcagtgcttcatgaccaagtctcagtccaaattggcaaagtcaggaaagcttttggaagcatagctcttgcaatgtccaaaggagcccagatg

SEQ ID NO: 31917 - DNA, 201 bp, Bos taurus
gcccactggtgaatggagccaggtcttggccctccggtgagcagggctctgtcaagaggtggctgtgggctcagaaagtctgggaaacctgtgtgctgatkggtgggcctgtgttcccaacctgttgactgtctggcctgaggatttctagtagcagggtgagatcaggtctcagtgccaaggacccaggatacctgcctg

SEQ ID NO: 31918 - DNA, 201 bp, Bos taurus
atatttcacactttacacaaaaattaactaacagttcctagaacaggtcgtggtagcatctgtgtctcaaagtctggctggtacgagcaggcagctggccrcagggatgagcccaccacatccgtccccagaaacctaggcgctgcttattttaccgcttgccgagaatcactgctttgcctgggccacaagctgggccta

SEQ ID NO: 31919 - DNA, 201 bp, Bos taurus
agctgatctccttgtagtaactcagtgatccagactgagggagatttcagaagtctgtggctataccatctagaacatggcctctgattgggtagtatatyaggtgaacgcagacatggtgaacaccacatcggctcttaaattctttccagtagaagggcacaccatacttcctgttacacttctttggccaaagctagt

SEQ ID NO: 31920 - DNA, 201 bp, Bos taurus
tagaaataggagttggtcaagcagagaagctgtggacacgactggggaccaacctgcaacataaactggagttaggtgaggaggggaatgaggcctgactygggctggatggagcctggcttgaatggaagccatccgggctcagtgtcctgagagccagaaggattggaaggctgagagtcagatgtatttagggaaggc

SEQ ID NO: 31921 - DNA, 201 bp, Bos taurus
aaaaaagcacaggtgatcttccccaaggtgattgaagccgagataacatcactgagcaccattgacccgttctgtgcagaggaaggtccatggaagttccygaacctttgtcgttgttcagttgctcagtcatatctgactgtttgtgagcccatgggctgctgcagaccaggcctctctgtccctcactatctcctggag

SEQ ID NO: 31922 - DNA, 201 bp, Bos taurus
cctctgagttgggtgaggccaggtggagggcttggagttgagaagcacagggttctgagtagggaagtgtcctccaggtgtctcccttccccccataaggrgaccttcacccaaggcctcagctaagaggcctagtaatgcaaggatgtgaaagagcatgaccgaccatggagagcctgaatccttgacctcaactctgcc

SEQ ID NO: 31923 - DNA, 201 bp, Bos taurus
ttggcagcgccccagctcaggcaggccactctgaacccagccctccacacccacctctcctgccttttgcctcctgcctcctccatcagcaccaccactgmccactggccctgcattagtggcagctctgagccttgggctacactcgcaggatttgtccatccaggtctctctgtgcccagtggtgggtcctcctctccc

SEQ ID NO: 31924 - DNA, 201 bp, Bos taurus
accctgaggcagtgttgctggcaggcccaagagatgggatatcaaacctatcattttacagatgaggaaactgaggcctgtaagggcacatgacaagctgmggtcacagagatccgaccgctaaggagagccttcagttcaagcctgggccgacccccacagtcacgcccaccccgcactcctctggccctaaccctgcct

SEQ ID NO: 31925 - DNA, 201 bp, Bos taurus
tcatgcttgacttgcagggggtcaggggaggctgtgcagggctctcggcctgcagaccctcaatttcgtgaatttcaatctaggggggacttgccctggtytcctagcaagccagacacggcctgtcacccagatcagtctctcacacccagtgctttcctggctgcgggaacaactcggccctccctccctccgtcctgg

SEQ ID NO: 31926 - DNA, 201 bp, Bos taurus
cacaggggccatcaggaaacggatctgaagaaatcccagaaaacagctgcttcctgtgagctgaggggcagctgccctcggggctggtgagggtccaggtrccacactgggcccagggagcccttccttgaatgcatgcaaatgaatggcataaatttctacttacttaacttcacaaatgctaacaagctcataaaaaat

SEQ ID NO: 31927 - DNA, 201 bp, Bos taurus
tggggttcaatcccagtatagcacatgcttgtgattctaggcaagtcacaatctaacttttctctacgcttcatctgaggggccttaatgcacatgctcarttgaattcatctaacaatgactcttcctctcccactgtccaggatccccctagggtcgctctgtgcagaaggccagaggggccctgcttccctgagacct

SEQ ID NO: 31928 - DNA, 201 bp, Bos taurus
tttccagtgacacctaggacatttcttgaaggcaggtattttttaccttcagccccttgatccttgtgcatattaaatacccaggagtactgcttttcatkgtgttgttacattagatggccacaagggagcagcagttcttcatgtcccactcctttttttcccctgtaatttccttgttattttatgttggaatattgt

SEQ ID NO: 31929 - DNA, 201 bp, Bos taurus
tgacattgttacctaatcccattaggagacccacccaacaacccctttttgtctgtcaatatctccttggtaggaagtggccgcagcagatggtacagatyggctactctgcttttaccctactttgaacagttctcattgacagatatccctgagctgggcccccaggctggcagagggccaggtcaccttgagggcagc

SEQ ID NO: 31930 - DNA, 201 bp, Bos taurus
tgagctataattaataatttatgcacatttccacaatgtaagcatgttatgattaaacatgaacttaagtgttattaacccttactgtctatattggaacrtcctgcctacctcctgggatacatgaatgtgaaatttaaaacataactttagaaaatatttgaagcagtattaacttcccctactgaaagaaaaagaaac

SEQ ID NO: 31931 - DNA, 201 bp, Bos taurus
agactctacaccagcatggaccttttaaattgtagtaattaccataaaacagttctttaattgccagtattattgctgttagttaaatgaatagttgggamtgtgataaaatgttccatggcattagaagtccagaatattcagttcctttccattaaaaaaaaaaaaatcctgcctgaaaagttgattgtaagacttaaa

SEQ ID NO: 31932 - DNA, 201 bp, Bos taurus
agatttgtcctttagtttgctagggcttccataaccaagtactacaatgggtcacttaaacaacagaaacttactcctcagagttttgaaaactagaagtyttagataagttgtcaggagggtagatttcttccgagtcctctccccattggcttcttgatagctaccttctccctgggtccttacatggtcttccttcta

SEQ ID NO: 31933 - DNA, 201 bp, Bos taurus
acagaaatatctccaatgtaggaaaaaaatcacattgaaggacagtgtatatactatacctctacttctaaaatgggaaagaaaaatatatattcgcattsagttatatatgcaataaaggtctttataaggagacataaaattttagtactagcaggaggagaaggggacgacagaggatgagatggctggatggcatca

SEQ ID NO: 31934 - DNA, 201 bp, Bos taurus
ctatatttccttagtatggtaattttttttcacctaaaacctacttaaggatttttattcatgcttttctttgcctcctatgtagaaatagtcagtgtttrcagtaaaaaacacaaacaaccagccaactaggagactttaatgtggccattgtggactaaaagtttaagataatttttttttaaattattgtttcctagg

SEQ ID NO: 31935 - DNA, 201 bp, Bos taurus
acctatggaaaattactccaaaggacaaagaaatgactgcttgaaagaccatgtttgttcatataaaagtaaccacatatagaagtccaccagcattaatrgaaggactctgtaatatattcatgcaaatgacctaaaagattatcaattttaagcacaatcagactcaagggggataaagccatcttacaataatactgg

SEQ ID NO: 31936 - DNA, 201 bp, Bos taurus
ggtaactatataaagtccctgaatactagcaaagaagtctcaagatattatggggacccaaacatctcacattagtctttatctgtctaaattctccgctyaaggtagggtagcactccttcctaaccagttgccttagcataagggacttagcaagttaataggttttgcgattctgcacatctacaatcagatctgggg

SEQ ID NO: 31937 - DNA, 201 bp, Bos taurus
ttcatggggtcacaaagagttgttggacacgactgagcgactgaactgaatttcccaaacccttcgaagaaagaacaggagggaataattcaaaattcatkttataaggccagcattacctgataccaaaaccaaggcaggaccaccacaagagaagaaaattgcaggcctttatcccacaaaatcagagatgcaaaaatc

SEQ ID NO: 31938 - DNA, 201 bp, Bos taurus
tatgggggtgccaatggaaaatacaaccattcagtaaattttttgccaatgtaataaaagaatatttattttgtatatttttttgactgccagttatataraactttttttcccatatatcaggcatttgtgtttcctcctttttgaagtatctgttcatgttagatatttagttagcttagtagcacagttgtgtccgat

SEQ ID NO: 31939 - DNA, 201 bp, Bos taurus
tgaactcttagaatttatccatctattacactcaaggccacagctctggagtgtgatggggcattcacaacttagcatataagaatagcaccccaacaacyatttacataggctcacgggccctgatgagacttgctactacttaataaatacatctctgcatttactgtgcaaaacttgtcagaacttccccttactgat

SEQ ID NO: 31940 - DNA, 201 bp, Bos taurus
ttcatatctaccatatgaatgtgaagtcattcacattgtgaagtcaggtgaaggcccacttcctggttcagagttggccatcttcttgctgcgtcctcacrtagtagaagggataagggagcttctctgcagtatttatagagtctaattcatgagggctccactctcatgacctaatcatccccaaaggccctacctcca

SEQ ID NO: 31941 - DNA, 201 bp, Bos taurus
aggaggctcccattggccaaaggtgagatgatttgatgattcaaaaacactattgttccaagtgattaaaatgaatgaaaaatataaaatgagaaaggaaraatataagccttcatggccataattaaaggttgttgggcaccaactcattatttttaaaactgctaactaaagcgaaagaactgagattttatattgttt

SEQ ID NO: 31942 - DNA, 201 bp, Bos taurus
tgtctctgggcattggctgccactgtggtcctggtcagagaagcagataagcttatactgggacaaaatataaatgtaaaagttccccatgctgttactgkgctgatgaacagccaagggcacaagtaactgaccaataccaggatgactcactgtcagggactgctttgtgaaaacccacaggtccacctcgagactgtg

SEQ ID NO: 31943 - DNA, 201 bp, Bos taurus
tcccagccacgtgagtttgagtcacaagcaatgttttggctgggttcaaatcccagaacatgggttcaagtcccaatctgaggtaaatggtttcacaatgrcataacagatctgtaaagcaatctcaacagcctacttaacattggtccattatcaagagatggacttgctttttaaaaaagtaaacgaacaaaaagaaac

SEQ ID NO: 31944 - DNA, 201 bp, Bos taurus
attttaaactactttgtttagaaaagagtggttagggttttgtagcacttcctttgttcatttttgcctcactaataacacctagactcatactttggccycagcagtacagaggatacaggtattgttttctttaaaaaaaaaaacaaaaaacaaaaaacagtcccatttgaaagagaaacaatggtggtattgctcttt

SEQ ID NO: 31945 - DNA, 201 bp, Bos taurus
gtatgtgtagttggccagtggcttcttgattagtttaaaaagtcagtttaaagtgaagaatcacaaaataaataatgcacactaaaatgttttattgtacyctaaagtttcacagatacccccatttaccaattctcttaatgtcataccaagtctttttctttgagtaagagtctgctgattagaattggcaaaaaacac

SEQ ID NO: 31946 - DNA, 201 bp, Bos taurus
ggatatcacttctggaagaacttcattctttaacctctttctttttctttaacttcttccttttgctggctcttgtcagttcagttctattttaaaacacrgatactggtggccaccatgaagatcacttggaaaaaacctttcctttattccttttcatgcggtagctactactgcatctgtttatgtccttcacagcca

SEQ ID NO: 31947 - DNA, 201 bp, Bos taurus
agaacatggggtgggctgagaaggacagaagtacggggcaggaatgagaggtgtagagtttggttcacagttccattccctttattaacaatgccaagcakgatctcttcagcctgcacaatcgggaaagttcctggcaaaaaagtgcacaccctcttttatttcccagaactgtaattcccattaaattgcttctctgga

SEQ ID NO: 31948 - DNA, 201 bp, Bos taurus
tgaccgccagcttctcactgccctccatcttggactctgccctaaggccaagacctcagccagggtaaggatctaatttgctcactgctgtagccttggamtatttttcaaagtaggcctccaggcttcttgcccctgtgccatcttaaagcaagcggaggccaaaaaagagatcaagaaggttcccgtttattctcagac

SEQ ID NO: 31949 - DNA, 201 bp, Bos taurus
aaacatgtattgtattaactttaaaaaaaaaaaaagttaaggtagcctatgacttagaattgaaaaaagagagactaggaaaatgcacttttctcatataytcagaaagataatgcctttactaacatattgacttaaattcgatttacccttaaagaaaagtagagaaatcaaagattatttagggaaaaactaccaaaa

SEQ ID NO: 31950 - DNA, 201 bp, Bos taurus
ttcatgttatttactaaatagaaagagagtatatatatctaaatgggcatctgccaaacaatattagacagtgactactttgcacaagacaaagtgagtgyatccacacacacacacacacacacaaatccaggaatcagaactcaagacagcatctaaaaatagggtccacgtgaccagattctacaaatagtaggcaga

SEQ ID NO: 31951 - DNA, 201 bp, Bos taurus
tagtaactgacagaggattttcaaaagtaataaagtttatatgaccagatataaaatatgggagtaaaagaataaacacttaaaaaacaaaagcaaaagaraagagaaatggaccgagacagtgccagatcatgaaagccaaatttaaggaagctttgaaaaaaagtcataagcaagttttaggaaaaaagtgaaagtgaa

SEQ ID NO: 31952 - DNA, 201 bp, Bos taurus
ccttaacgcctgatttgtcttgttatttcctgcatctcagctcttgtggggggacatctccacttgtccagacacactcatgataagattgatccaaaatrtgacacaaaggaatgttaccaacaatgcttatatacactcttctgctatgatcattacctttcatgcagagattctttcttccccaagttccaagaaaag

SEQ ID NO: 31953 - DNA, 201 bp, Bos taurus
taaaaattactatttgaatccaggccacacagtagagatacaaagtatcactcaaaaagaattctgtccttgtctacagatactgccttatccatttctgygtggagaagtggcccagcaccagttattaatatcatcactataaaacaaattatcataaaacttagtggtataaaacaaccattgatcatgcttataaat

SEQ ID NO: 31954 - DNA, 201 bp, Bos taurus
ggtttggggtaggtatagtgggtgcaaggtgggagtaacctttctgagggacaaattttggaatatctgtttagcctacaatgatccccttaactacctcytttctccactccaaactcagggatatattactatagcttgatgaggtacaaccacagttgattggaccatgatagcaccaatcagtgtttctccctcagg

SEQ ID NO: 31955 - DNA, 201 bp, Bos taurus
aagaaactgataaccactcccattaaaaaggagtgtagtacatttatcattccactaacatttttaccagtcttctcatctcaagataagtgagcagggayttctccggtggcccagtggttaagactctgtgctctcaattcagggagcctggaatcgatccctgtttagggaactagatcccacatgctgcaactaaga

SEQ ID NO: 31956 - DNA, 201 bp, Bos taurus
tagcactcagccttctttatgatccaactctcacatccgtggatgactactgaaaaaaacattgctttgactatccggccttttatcagcaaaatgatgtygctgctttttaatacgctgtctaggtttgtcatagctttccttccaaggagcaagtgtctaaatttcatggatgcaggccctgtctacagtgattctgga

SEQ ID NO: 31957 - DNA, 201 bp, Bos taurus
ccctgtacttcaagacactccccctaaagaaaaaaaaaaaaagaacctccaggaagtctgcaggtgcaagtgtgttttcagagaaattaatgaaggattgyccttttatgctgtgtattcaaatacgtttgcactggtgtagtgctgaccttaagtacacagaacatgaacatagccttttcttggtacttgtgatggcgt

SEQ ID NO: 31958 - DNA, 201 bp, Bos taurus
tgcctcctattagactgggggaggaaaaaaaggcagactgcctggggtgaactcactcagctcttatctcttccaatcacatttctttcctcaatttcccrcaacctttctttcattctctcaagaagcattcttacagatttcaaagctaacccgcattctccacctaatttcagtctatccctttcctttccccttctt

SEQ ID NO: 31959 - DNA, 201 bp, Bos taurus
tttaattaatcatcccataatagacttgcagggtatgttgaaaagcagagccttaactgaaaaaagagtgtcctgtgattcaaggaggtgccatttatggraactaatccttaaaaattacttgcaaaagcaagaaaatatatggatttttgaggtatagtttataattgattataaaaccacaaatatctaacaaaataa

SEQ ID NO: 31960 - DNA, 201 bp, Bos taurus
gaaacaccctgagagtcctacagcaaatcaaagggtttaccgaaatgcagggttaagagcaccagtctgggcagatcaggcctagatccaactccacagcytatgagcagagtgacattgttgagctatttaactctgagactcagtttcctcatgtataaaatggggccatatcagcatttatcttcagggttgttaggc

SEQ ID NO: 31961 - DNA, 201 bp, Bos taurus
agggaatgtattaaaccagagacttttaccaaaagttgtaatagtgttacacagacataggccaaacaaactgatgttcaatatagctcatcaaaagaaaytgtttacctatattgcctgattcagttgataaactttatcataatgcctacataacatacactactcagagattcttgtgtgctacaaggacttaaatcc

SEQ ID NO: 31962 - DNA, 201 bp, Bos taurus
ctcatgcctttggcacagagctctggagtgttaagtgaaatacttggtcaggcacttgagcagattaaaaagtcctttatgaaaaggtgtttgactctgaytgcaggcttctgtgtggcctagcctggcaggggaatgaacgtccgtgtgtgggcagggagacattcctagagcaggagccaagcccctggctgtgtgtct

SEQ ID NO: 31963 - DNA, 201 bp, Bos taurus
gggaaaaaaagcttccgcttcctctctcctcccggcaaaaaaaaaaaaaaaaaaaaggaaagatccatacgcaccactgacaagaaaataaaaccggcccyagagaacaaggcaagccggtgaaccctgacagtccacgcagtgagagcctccacttggcaggcgaagaggccgctggctcccgcccggccccgcagccgc

SEQ ID NO: 31964 - DNA, 201 bp, Bos taurus
gatgatgccatccaaccatctcatcctctttcattctcttctcctcctgcctttgatctttcccagcatcagggtcttttccaatgagtgctgggtcgacygcatcttttttttttgtttgttggtggatatgcttcatggaaaaacacatcatcaaaatgaaagcattcagaagtaagcatctgtggtactaaagggatc

SEQ ID NO: 31965 - DNA, 201 bp, Bos taurus
atgccttttaacctcttggaattcaaatgaggaaaactatctaatcagagagactatcattaaacagaaaggttaggagagcaccagttagactaataccragtttaatgttaaaataaaactatgcagagggtacagaaacatacaatcactttcttgtagatcttatccaagctgattagaagctaattgttagtcctg

SEQ ID NO: 31966 - DNA, 201 bp, Bos taurus
gggagcatcatcatcaaagggtctaagactcaggccttcttgtttctaaatcaatgctccttccctgggtatattagatgccagataaatatatgtgcctkggaaggcaatctgtgggcctaatcctatcccaccactgcaagttctctcttatcccatcatattaaatgaaactgcccagggatgtcatgttaagggctt

SEQ ID NO: 31967 - DNA, 201 bp, Bos taurus
atagatgaaccaggatttgtatttcctgcaccttgtcctgaacttataattccccaaagaccacagttgttaagtctcactggaattgggatcattgatcygagtaagataggtgagactcaatccttgggggctgtggctaggtgggtaatagattccatctttgtgataagtcataagtcacgaatgggttattttgag

SEQ ID NO: 31968 - DNA, 201 bp, Bos taurus
tgaaactctgccatgacattagttataaagaaagccaaagaaagaaatcttggccacaagatgggaattgacgcaattcttatgtctgccacattcagackatgccttttgcagacgtttctgcgtttatttatagcaaggttgactttagtaacaagaccatgttccactaatgatactttttaaaaatataccaaaaca

SEQ ID NO: 31969 - DNA, 201 bp, Bos taurus
cccctgacgattgtgactgtgtggcttactccagtaaagggacactccatttccttattctgctcctcccctccactgtcagtcagctttcccaacatcayagtcagtcctctgggccactactctagactgaatacttaactctttacaactccatggactgtagcctgccaggctcctctgtccttgggattttctagg

SEQ ID NO: 31970 - DNA, 201 bp, Bos taurus
gaccaaggttacctgaagacagggagtcattttcacagacagagctgaaatattgaaactcgttgctctatacctctccattccctgcattcccaactcargtaaagatctatttttgtctgggaggtctaagaaaggcatcgtgttggtgacaggatgagtggctctcatggggaacccgaactccaacttctcagtgac

SEQ ID NO: 31971 - DNA, 201 bp, Bos taurus
tatgtgggcatgccattgcattatgtgtttttttttttttagaagataaatttaacagtaaaagctaagagggaaacattgatgttggtaacaatccaaaygtaaggcaataagagattagccgacagtgagggaaggtgggaaactggagatgccagtttgttaaaagggacttacaggaatgagttttcctaccaccat

SEQ ID NO: 31972 - DNA, 201 bp, Bos taurus
atctttggttgagttttcatcagtgagaacttgcaagcatttttgttccacagtggaaacactacattgaatgtgatgggagtcctgatccttcaatagcycaagaaattaatacttttattaccttgtggaaagaggaaaccaatgagactttagaggaagtgattgagaagagtaaactagtgctaaatgtaagtattt

SEQ ID NO: 31973 - DNA, 201 bp, Bos taurus
ttaggcaagttacacaataaaaattccatgataaaggtgttacaatctgaggatatgaaaatctaactgattaaaagggtaggcaacggaaagaggccacyccccgaaaagcagaataagtacagtctgcccttttagcttacctgtgtctttcagtcacagccaaagcaccatcctctatttcttcatatctgggccttt

SEQ ID NO: 31974 - DNA, 201 bp, Bos taurus
gacgcaagcaccctagtgatcctgtctgtccttaagagatcaggaggccggttcagaccctgaaaataggatcagggccatttgggcagggaatccctagmactgagtatttggagtctgtctagaaaagggtccagtcaactgcttgctccaaggaggtcacagctgggggaagatagaggtgagaggccctcgaaagtg

SEQ ID NO: 31975 - DNA, 201 bp, Bos taurus
tccttacttcacagttgtggccattcactttggctggatgaaacactagccatctcttgcttggatggggccttccttacttcacagttgtggccattcayagggtggagtttctgaatgacagtcttgtctatggcatcacggtatcaaaggtcgcaaaaacaaggcctctctttttgccactgtctcaatcagtcatga

SEQ ID NO: 31976 - DNA, 201 bp, Bos taurus
gatgcagttgtgatctgtcatgatattattaaattattcctctcatattaagtgaccacaatttcaacataggtttctcttgacagatgtacaattcatakagacgatgggaactatattcagggcgtgctgtgatttcatttgctgtgccactcatagtggaaaaaatatgccacacttttttaagcaaacaggcttctt

SEQ ID NO: 31977 - DNA, 201 bp, Bos taurus
tacttttttgcacagaatattctaacagttctgaggatgagtcactatcaacgaagacttgaggagtttagggtatcaaaaacatatggggttattaagckgtggacttgaaaatgtccaatggtcttgtcagtaaaaaaaaaagagaagaaacaatggatgaagtgttaaaatggtggaagtgtaacagggaaaccttgt

SEQ ID NO: 31978 - DNA, 201 bp, Bos taurus
tttatacacacaggcagagaattttttcacacagttggtgagaccacattgatccagcaatttgaatattattattatccgtggtctctctcattaaatasttaagaaaacatagtaaaattgttaaggatacacatttagaatgctatatagctctagctctattcaagttggcaagtgattaacactgcttaaaaattc

SEQ ID NO: 31979 - DNA, 201 bp, Bos taurus
tttcctcatgtctagcaattcctcataattaactagaaggttggggccacactgacaccattacccctctgaatatctggctctaatttatgagccatatyctgcctaatatgccagaatgcttttgaatgttctctcattgcttattttttcttggagtcatagatttgtaaatcagttacatgcaacaatgaaaagatg

SEQ ID NO: 31980 - DNA, 201 bp, Bos taurus
gcaggttcattcatttctaaaatgagaaagagaatattctatcattgagttattgtgaagattagtaaggtaacatggaaagctcctagcatggtgctggyagctggctcgctcactcagtcacttcagttgtgtccaactctttgcaaccctacagagtagcccaccaggctcctctatccatggggttctccaggcaag

SEQ ID NO: 31981 - DNA, 201 bp, Bos taurus
ataatcagtggaggaaatggttcggttattaaaagcaaatgaaagatatttctacccctgacagctcaatattagtaccagtccttatagttctgcagatyttctcaacaaggctgggttacacctaggtattactaataataataaccagcattttcgattgtttagtatgtactgctgctgctgctgctgctaagtcac

SEQ ID NO: 31982 - DNA, 201 bp, Bos taurus
ggctctagttccctgaccgaggattgaactcgaggccccagcattgagggtgtggagtcttagccactgaatcacaaggcaggtccttgataaaccattcrgacatttttctggccttgagcctaaccactgtcttatggaaaagacctgatactctctctgtccctgtctctgtccatcgccaaccaccctctttccctc

SEQ ID NO: 31983 - DNA, 201 bp, Bos taurus
gtgccattgccttctcccacccttgatatataaccaggtatgaaccactgtcagtctctttaaatctactgaaaagttattttaacttgtgaatggccaarttaggtcccagcagtattaaaagttctggtttatttatttgtgcaagcccaatgtatatcagatcctgtaagacttgaggcctctttatatttctgtaat

SEQ ID NO: 31984 - DNA, 201 bp, Bos taurus
caaggatcccagcatacatccttgcggcttagcagacccaaatgccaagactgtataaggggattctgcgaatcagagttccttcaaaattcctactgatygttggcttcggttacctcagtataacgtgctaagtgtgcaaaggtgaataaatcaacgtctcatcccttcctgaagcaaatgtacccaaagggggggaaa

SEQ ID NO: 31985 - DNA, 201 bp, Bos taurus
cttccctgaattccaaagagcagatttaaacagttgctaatcagggaagggaagacttgcagagataagggaggatcagccaagaaacaatggtagagccytggggcagggtcctggttccacctcaagggacaaaccctttttaagaactaaaacccagtaaatggaaactacaggcatactctataccagagaagacca

SEQ ID NO: 31986 - DNA, 201 bp, Bos taurus
ttgcttttggacctgtgaagtatgagctcctcattggccatctaagtagatatgcaaaatagttattcaagcccagatatgcaaatttgtgattcaccagmataaagatgctatttaaggccaagacatgggatgaggttgtttagggagtagcacagatggaatggagaggagggataaggccaatgccctggggaaggt

SEQ ID NO: 31987 - DNA, 201 bp, Bos taurus
ttattgttttacatgctgggtcatgaatgtggttggttattgtactgcatatggtggagagaaacaatagatacactcatttacattaagaagaggcccarctagagctatctgtagacatccactcatattggcataaacaccctaaactgtctgggtgcaatgacagggccccagtagcaatagcctcatagagaccag

SEQ ID NO: 31988 - DNA, 201 bp, Bos taurus
aggagcagaaatgatcacagcagaaagcacaaagtgccgagtacctctggagcatgacaaatatataagcaggtccacggtgacttttctggatagaaagygtccctaacattttaagactcagattcagggacaccacagatcatgttgaaagcaggtcaataaaatgtcaataaaaatctacaattatgcaaaaaaggt

SEQ ID NO: 31989 - DNA, 201 bp, Bos taurus
ccaggcccatatgtcaccactactgagcccatgccctagaacctgtgctccgcaacaagagaagctaccagtaaagctcaccacaactagagagaaagctyacacacaagaaggcccaggacagccaaaaataaatattttttaaaaactgaaactttttatattaaaaaaaaaaaaaagctaacaatcaatgaaaagacc

SEQ ID NO: 31990 - DNA, 201 bp, Bos taurus
ctgaaacaagtaaatttccagaacacactgtgtaatagtaagggaagactgctaattgaagatgagatgcagacctaaaaaataatctgagagaatggaasagcaaatacccttaaatcctgacatttttgaacatttttatgtgtttgcttttttttctatttgggcttgagattactacttcaagaagcttatactggc

SEQ ID NO: 31991 - DNA, 201 bp, Bos taurus
aattaatatgtttaattaataactgatggccggaacataacttatttaaataaatgtaaaaaaccagaataagttaataaataataaactaaagaagtgtrgagtttcaacttggaagtttcaattaaactaattttccttaaagaaaatacgctgttattgttcagtcactaagttgtgttggactctgcaacccatgga

SEQ ID NO: 31992 - DNA, 201 bp, Bos taurus
aggtgaattatcacttgctgtatctttactttattattatccaagactgtttttacctgcccacttttcaaggatcctgcaagtcaaacaaagatcttggkttcaagtcagtgggaaggtgcctccttccttctctctctgcctaacatctcttattcatcccaatggcttagttttagaattggttttatttttttcttt

SEQ ID NO: 31993 - DNA, 201 bp, Bos taurus
aggtgataaggaagggtacagcatagttcatataagtgtcagaagtccaaaggcccatacaaactaaaacttagggggaatatcacaggaggatagaaatrtacatggacaggatgcatgttgcaatattgcttataacaatgaaaaccttggatgcacttaaatggcacttaatatataatttaaatctattaagttaca

SEQ ID NO: 31994 - DNA, 201 bp, Bos taurus
gacttgtagatgccttgaccttagcccagtgaaactgattttggacttttgacccctagaacagtaagccaatacattttagttgtttgaaggcactaaayttaaagtaatttgttacagtgtgtgtgttggtcactcaattgtgtccgactctttgtgaccccatggactgtagcccatcaggctcctctgtccatggga

SEQ ID NO: 31995 - DNA, 201 bp, Bos taurus
gaatgctagctgtcctggtatctatcatagggaaatggcatcgaatacttgacttgactgagttttcccttgcagaacctgtagtttaaaagacagtgatygcaactagaataacacaatcagttctaagcggactgtgaaaatcttgttcagtagtataaatcagattgttcaaaaataggagattccagttgaattcat

SEQ ID NO: 31996 - DNA, 201 bp, Bos taurus
gtaaaattatctaacgaagggttcacccttcaacttgctgatgtagaactttagctttaacaaattaccataaatttggttaacctgatgctgagaactcygtaaggtccttgaaattgctccaaataccaattcctcttctgggattttgttggctatgtgacaaagtggtatttaaaaggctgttaatctatatggtgt

SEQ ID NO: 31997 - DNA, 201 bp, Bos taurus
ctcagttactcctgccacctaattctcaagtccaagtgcctttgtgggttcagagtgtatgtaatttgtgctcagatagttgtctacaaggttttgacatyactttgctcttaagttgttggtcgtcgcattttaggtgacagtgattagtggcctcaaagggacctgaaaatcaaggtgtaatttgtcctttgaatgtga

SEQ ID NO: 31998 - DNA, 201 bp, Bos taurus
aactccccactcattggccaatgtttttaccatcctttacttaagctttgaagctcaagaatctctttcccaaaaccatataaatacaaaacaagtggaayggtctaggagaggacatggaagggccagctgttttggcctagtcaaatagaggtgaccttttaacaggtcttggtaaaggtaaggccatggaaaagtatc

SEQ ID NO: 31999 - DNA, 201 bp, Bos taurus
acagaatgagctttggcatcctctcttcttccttttatgcaagccaaatagaaatttgaagattttctgtaaatgtcaatattgttgggccagttgaaggrgaccaatctttctcatggtcacccgtttccacaggaaaggaattcactagaacatgtctgacctttggccctacactcactcctttgatcactggtggga

SEQ ID NO: 32000 - DNA, 201 bp, Bos taurus
acaatatatatatgtataaaacactactttataatagaaacacatacatccactggtgtgtatacatagaaacaaagctacagaaagtttatagagaacakattagggaaagaaaagatggcagaggagtaggtagacaacagtacacctcttttcattaatgcatcaggaatacaccttcagatgcagatcttgcacagc

SEQ ID NO: 32001 - DNA, 201 bp, Bos taurus
gacacgactgagcgactgatctgatctgaaaatctctagatatttttcacaaactgaagttttcatattcaattctcactttgggccagcaaccacttacyccaataacaggcagagaattcatatgtgtagctgcctaagagaaggataaatatctggataatccattatgttttgttataaagcttctttcagtggcca

SEQ ID NO: 32002 - DNA, 201 bp, Bos taurus
tagcaattattagagtacagaaaagaaagtattctcccagtgttcaagaagaacataaaaataatttccctgaatacaggccattaagctttaattttgaycctctttaaaatattaatatggattataaattgttttctagctctcataaaggtaatgcctcgaatccagcatagattcacttagagtaggccatgccac

SEQ ID NO: 32003 - DNA, 201 bp, Bos taurus
agctttttctaagacctcgaccacttcattcttctttaattgtatagaattgacacttggaggcatctaactgggatgtcagtaaccttacacaactcagmactaaatagttttcttccttataaagtctagaaatcaagaaaagctgaggatatagctaaattatttaggcaatagcacctatgaaaactcaggtaaaaa

SEQ ID NO: 32004 - DNA, 201 bp, Bos taurus
aaggaatcctaattcttatgacagttgcacactatagccctttctcagagctctgcaatgaacaatcatcacagtttctttggagccaggaaatggccttmttccctaacttgccagattcaatagataccttaagacaaatagatgagatcatgtcttgacacctctaaatcagatgaggcccttcagatgtctaaggag

SEQ ID NO: 32005 - DNA, 201 bp, Bos taurus
aatgtagtagtctgatttttccccccctagaaaagtcatcattaaatcactggtgaatctttcaaagtgtctcagaaggccacgtgaaactcaactctackactggtcaacagaggcagccaactcattactgtcattcgaaaaactggagactgggtgggtcaaggccagaatgtgctggaggccctcccagggctggac

SEQ ID NO: 32006 - DNA, 201 bp, Bos taurus
ctgatctgaaattctgaaaagtcttttaatctctttctttgtttgtagtgtttttaaaaaatttttaaagataagcttggaaatttttgttatattttctkaaaatctttcttttctttggaatttaatatagcttctacttcacattatgtgtcaattttaaggattttttttttttgatgtgggccatttctaaagttt

SEQ ID NO: 32007 - DNA, 201 bp, Bos taurus
aggaaccaaccctgtggacactttgaactcaaactggtagccttcatatctgtgagacgaagcttctgtgctgttctaagcaccaccccccttttctgatrcttatggccactttagcaaactaatacaagcactaaggaccaccaccatctctaaccctctcctattttccctttaaaatactaactttctcttcttaga

SEQ ID NO: 32008 - DNA, 201 bp, Bos taurus
ctctcttcctgggctccctgcctgctctctcatggctgcagaagcgccatctgtgtgagagctcctgagagacaaattgcttcctatcctgggcctccatygcttgcctggagtagtgcttaagaaataattgcttcagggatctcagagtactctgacctgaggagttcttctggcagcttctcgaggagtcacaggact

SEQ ID NO: 32009 - DNA, 201 bp, Bos taurus
ggacctttcctcaggcatctctctttgagaattttagagatacagacatataagtcagcaattatgttatggaggtatgaagaaacttaaatcttccatcygtatatttatgatttgtcattttccgtatgcagatgtttcagtttctaagaactattgttttctttcactgatgaaagatctgatgtccaggcagtttaa

SEQ ID NO: 32010 - DNA, 201 bp, Bos taurus
aggcctggtgtgctgtgattcatggggtcgcaaagagtcggacacgactgagcgactgacctgaactgaactgagctggtaaataaacagccaaaaaaaamaaaaaaaaacaaaacaaaacaaaaaacacccagaaaaccaacaaacagaagttaattaataatgattttatatatggagttcaacatatcattactatgg

SEQ ID NO: 32011 - DNA, 201 bp, Bos taurus
ctgtactacccaatgacccctcattattaagattgttccttctaaagcccagagttcagagaacaaactccaggctgttctctgtgaaggggtggcccatrgtgagaacaagaatggacaaccgaatccatgatggctttgcatgaaggaccctgtccagtagcaataaaggccactagttaagtcaattagacaaaactc

SEQ ID NO: 32012 - DNA, 201 bp, Bos taurus
tgtattataaaatgaaccacccacttgacagatttggaatctaactaataatcagcatattgtgcccagactcttatcttcttgttcactagtgctttgcmagacaggcttaataaaaactagattaacaacagaagatagtcaccaaatattccaacatttgtattgtcttagagatgaaagtagtgcgtccatattcca

SEQ ID NO: 32013 - DNA, 201 bp, Bos taurus
ctggactggcaactcctttttcccttttctttgcttttgttttcatttgtttgtattgcctttagaatatggagcatatatattttttaatctctccaatrttagccctgaggatgctctgggggcaaatctaattaatgaaaataaacaaaggagacaagtctggtgaaatagatgggtgatcaatttgagtacacaatt

SEQ ID NO: 32014 - DNA, 201 bp, Bos taurus
aacaactcatattggactgacctgtgccaaacaaacacttcaacaaactcagaaatcgaaccaaggtctgcaggtggattctttaccaactgacctatcakggaagccctatataattatttatggggatctatattacaaattttaaggcttgtctgagatgtagttatatattaaaaaaaaaaaaagactagctgaggg

SEQ ID NO: 32015 - DNA, 201 bp, Bos taurus
atatattaaggacttaaagtactgggcttggtgaaatatgggaaaatgtttattgcacctgattttgcaatgagaaaagacttgtagtaacaggaaataarcaatgacaatatataggtgattaaaatgccttaattaggatgttttgtttgcatttttatggaaataagggagtaagagtacatgactttattctagtgt

SEQ ID NO: 32016 - DNA, 201 bp, Bos taurus
ggtcgcaaagaatcggacatgactgagcaactgaattgaactgaactgaaacatgaagcccgattccaccaagatggtggaaacaatctcagttaggaccrtggcctgggttcatgaatacccccttttccagggtttttttctatgttccaggaggatttatgtggtagcaaaatactgttgggagtggaggtaagaagg

SEQ ID NO: 32017 - DNA, 201 bp, Bos taurus
ggtattaatttataagtgattttttatttgaaacttttcattcattttaatgagtcctaatgcacagattctgactataacctttgcaattgaatcagtgwttctcaacctatgttctcaagaacactggagtttggtgagaggtataatgaagttctgtaacacaaaagtttaacaataaaacatttttgggaaatggca

SEQ ID NO: 32018 - DNA, 201 bp, Bos taurus
ataccttttgcctctgtgcagaaatgtaactgagttcttaccaatggactatcaataggattgatgttcaccacttccaggccttgtctatgtaactgttmatatccattcttccattctaaaaatttcatagaatttgttcaatgaatttcaattccaagtgaccttgtgaaacgcaggccaaagttgttaagacctcag

SEQ ID NO: 32019 - DNA, 201 bp, Bos taurus
aaatgtgtagtcagagctggttggcctgaaatcactttgttcatttcatttttgtgtgtgtagtttataaatatatttgagattgtcaggttagtagcacycacaattactacaatttaaaatgtaagctattgtccaagtctccttatgggcatagtttgatagttaaatgcattggatttgtaacagggccttttgaga

SEQ ID NO: 32020 - DNA, 201 bp, Bos taurus
tctctcatttctgcactcactcatcttttccaagccaattttgtgatcccttccatcagggcatgtttggaaaaggatggacagtgtcttccttctctttygaaaatgcttaaactttggaaagtgatcctgctaagagcagtggacagggagagaagagagtgacttgccttcacaagtcacaagtggctagaggaagga

SEQ ID NO: 32021 - DNA, 201 bp, Bos taurus
gccttccagagcactgatgtcccttgactccagcatcctcactggctgaagctagcatcagtctgctttctaccatggtccttttagcacccagcaagccrgcaggcctgtaaaggaggcttcccaggaagcttgtagaaactaggaacttaacctttcaattcaccctggctattccccttatgctgcagctgtgcttaa

SEQ ID NO: 32022 - DNA, 201 bp, Bos taurus
ctcaatatcatcattaaaaaatgccgtattacaaggacttatcatgggaatattacacacagacaaggaacaccaccaaatacaaaaccacaggccattayagctgggaacacccatagaaaacccttatgtcttatcccctcactagtaacttaatttattagttgattttttggccccactgcacagcatgtggtatct

SEQ ID NO: 32023 - DNA, 201 bp, Bos taurus
tagaggggttggcgtgatgggccatcgagaggacctagaaaaatcagaaactagcctaggaggtaatctgtacacagcattgtggtttctgtatttacacractcagccggagaattactctggcctcttgaaaaccattagtgtcaaaggagtgctttgggaggctgaaggaaaataattgtttactcagctgtttttat

SEQ ID NO: 32024 - DNA, 201 bp, Bos taurus
ggaagaagaaaaatcatatctgagagcagtcaagttctagtcacgttctggggcacaacacattttctatcaatgtgaagagtcagtcgtgctgggtacaytcagggaaggaagctaataaactgcacagtgggctgtgatgaccagttaatctgtttagcgtgtttactctttaattcaagccgagagggtagcctcatc

SEQ ID NO: 32025 - DNA, 201 bp, Bos taurus
gttgtaaatgaaagaggaccaagggcccaggggtcgagcagccagaccaagagacagcctcatagacgaaatgacaagtgagcttcaagcatctctgcttycagtgggccctgggtgatcaggtcatgttgaagacagagacctaaacagctgatgataggggatgaaagactcaggctccttgacacaggagctcccttt

SEQ ID NO: 32026 - DNA, 201 bp, Bos taurus
tgggccatgcgaggagagaatggtttatgccccacaaactccgaactccctaaagggctccagcaaagcctttttgaagcccagataaggaaggcaccccrgggtatgtgatgggcccatgtacagttttctgattggttgatggtgaggtaacagggcagttaacattatcaatccttaggcgcctgtaggtctggggtc

SEQ ID NO: 32027 - DNA, 201 bp, Bos taurus
aatctggaaaacagacctagccagctatcgcgtcggtttcttcatctgtaaaatgataatgaaagagtgcctgtgtcatggggtttttgggaagattttaygaaacaacacatgggctttgtataaggcctgacaagcaagtactcaatatatatatactgacttattatttttattattaaattctttctacactgagtt

SEQ ID NO: 32028 - DNA, 201 bp, Bos taurus
tgccatttactgatcataatttttttcttcctttatggctcagtttgactgttcttattagtctgggttcgtttgcagtgcattcaggcatgttctacccrgaatactcttagatccatgtaaaagagaaagtgttagctgcttattccaactctttgcaaccccacggactatagcccaccaggctccttggtccatgga

SEQ ID NO: 32029 - DNA, 201 bp, Bos taurus
gttctgttgggcagtgctgccagcatctcgggggttgccgaaagtgaggtttatctgtcaggctagtcagctagctctgaattttccgtatagaggtggaratcaggaagctcaggcccccagctcccgtggaggtaacagtgagtgacaggagtagagtctcccatgagatagcgtcactcgcttcagggagctcctggt

SEQ ID NO: 32030 - DNA, 201 bp, Bos taurus
ttccagcctttctgctttgttcttaaaaatagaaaagaaaaaaatcagagaggaggttttgtatttaagttcacccttgtcctttcttccttcactcttcyacccacagatgtcgtttgcctctttgccttcggtcctctctggttttcttattccggtccttctcatcaccgattcttttcttgtactccagcttctgag

SEQ ID NO: 32031 - DNA, 201 bp, Bos taurus
gagggtgggaggtagtgtaatagcacagccagtatagcctgccttgggctgaggattcctggcacaccccaagacctcatggctggccaccgtgtgtcctrgatgcattctgctgccttgagaacatgtggtccggtgttgtagagagcaacagccttcaggccttcagcgtcgtgttgccatgacaacagacaactatag

SEQ ID NO: 32032 - DNA, 201 bp, Bos taurus
acttcatttacagtctcagaggggaattaaggccgaggagacaaaccaggctccgagagtgtttattagaatcttgagttttaaaaattcattcccatttrtataaggccatagtgatttttttaaaaaaacatctttgaacagaaagcggcttatatattggccttcatggacagcaagaagtgaaggattggagagact

SEQ ID NO: 32033 - DNA, 201 bp, Bos taurus
ggctcatccccacatgtgggtctggcagaggtacgggggaccgtgtcctcacatcagggagtggcagaggtgtggccggtcctgtccccatgcagagggcrgtggaaccatgtccctttgcagtacacaacgtgcttgaggtcagggcactctgggccattcggtgggggagccaccacttttatcacattgttttcttcc

SEQ ID NO: 32034 - DNA, 201 bp, Bos taurus
catttctcagtctggaattgactgagctgatcaatggccaggagagcagaggtgtgtctgtctccctgccatgcctctcccaggattcccagccctgcccyggcacagacctcaacttggccgtccccaactttgtgactctaaagctgttttcactgtgataggaacctcaggttgtcatgctaatatctggcatgcccc

SEQ ID NO: 32035 - DNA, 201 bp, Bos taurus
acctgtccccaggctatgatgctcactggggccccagtagactctggaatgttctggaacaatggaagcctctgattctggccacccaccagtggcccttygccctcacatgcaagcctggagcacccatgctgctgggtacccatctcctggctcccagtcatcttcctttggccaccaagtgtgagggcagagaccatc

SEQ ID NO: 32036 - DNA, 201 bp, Bos taurus
acaaagtcagaggaattcctctcctctagaagcctcccccgcccaaattcccaagatccttggcctgccaggaaacaattttctttgtgtatgagcctggyaccctatatgtcatacaccatgtcagtttcctttgaggactttgtaaatattgactccacccatatttctctattgtgagcttgtcatgactgattaaat

SEQ ID NO: 32037 - DNA, 201 bp, Bos taurus
aaataacaacaaccatcaccaaactctcatttgtcacagtggactcaaaccttagacgaggaattcctttcacggggaaggtgaagtatttttcaattcaygtgtcaaaccatagtctcccccaatacacacaacatattctgctaaaaccacatttggctggtattatccattgattagtataatcaaaagcatgtgcgt

SEQ ID NO: 32038 - DNA, 201 bp, Bos taurus
catcactatgatatacattaggtctcaagaacttactcatcttataactgaaagtttatacccttgatcaatatttcccattttcctccacccaccaatcyctggtaacctttctaccctgtgtaactatgagttcaacctttttagtttcaaatagtgagatcatgtgagattggtctttctgcagacagttttacttag

SEQ ID NO: 32039 - DNA, 201 bp, Bos taurus
tctggtttgttacaataagagctctgcatcagtggatctggggtgtggcccacagtctgcagctccaacaagcttccaggagtcactgatactggtctagygtgttaggcagcctctaaggggccctgacaacccctgcatcctgatatttacactgctctgtcatcttctccccttgcttgtgggctggatttagtgatt

SEQ ID NO: 32040 - DNA, 201 bp, Bos taurus
agggaggctctccctagcccaaggtctcagaggacatacgtttgttggctctgaaggcctccgcggagtccatctcttagtttggccattaccgctttatkgcttcattctgctacacagagcactcccccacccctcatccccacctcatataaccctcctcctttcctctcctcccttttatgggatctgtgtgtgttt

SEQ ID NO: 32041 - DNA, 201 bp, Bos taurus
tgggaattgcctggcagtccagcagttaggcctctgagcttccactctcccactgcagggcacacggattcaacccctggttggagaactaagatcccacraaccgagcagcgaggccaaaagaaagtaaaaaagccagaaaagtgaaaaatcttggctctcagccccagagaaccaaaacaaatgagtctttctaaaaaa

SEQ ID NO: 32042 - DNA, 201 bp, Bos taurus
agcagcctggatccagggtggatgcctcctaagactggtgaggacaggcttcgatacatgaagcactggtggagagggagaaagagcccacagggagcttwgggaccaggtgggccagtgggggcgaggaacactgaccatggacggggtggggggggaacacggggtggggccaggtaccaccagagagagtgcagtaat

SEQ ID NO: 32043 - DNA, 201 bp, Bos taurus
tggagtcgcacagagtaggacacgactgagcgactggacaacaacaacccatctgctaaggctggtccctccaccacagaactggactccttttcctctcrccttactcaagaatttcgtcttaaacacatttcccttatatcttcacatttccctttctactagatcaataccatcatatcccttaacaacactctcctt

SEQ ID NO: 32044 - DNA, 201 bp, Bos taurus
ctctacattgtctgggtcaccctggacttttgatctcttagagttgtccacgctgtgcttccagcaattccacaattacaattctggtttctctaccctgrgactggctcccaaagaggtttctgctccaatatattgcctttgtgtctctccagatctgggagcgatagtttgctcggtgtatgaaaagttgctggtttt

SEQ ID NO: 32045 - DNA, 201 bp, Bos taurus
atgaatgagcaactaacacacacacacacacacacacacacacacacacacacacacacacatttggttgtaacaggtcttagttgtggccctcaagatckttgattttcatagcattcaggatctagttgcagcatgtgagatctagttccctgcacagggatccaacctgggccccctgcattgggagggcagaacctt

SEQ ID NO: 32046 - DNA, 201 bp, Bos taurus
gcagaatatcatgtccaagctggtttcagttaccaggtcaacaggcatctccatcactctgagagtatagcaaattctgaagaatcttcattctgttttcmaaagtggctgcaccaatttacaatcccaccaacaacgtatgagggttgtcttttctccacatccttaccaatgcttgctacttcttgcatttttgatcaa

SEQ ID NO: 32047 - DNA, 201 bp, Bos taurus
acagaggaacctgacatagtgaaagctcagatttttcctttacagttctgtttgctaggagtctgaagagagtctccatgggccaacatcccagtggtcayagggctgtgttcttcctgcagtctctggggaggactcctttcccagccttttgtggtttctgtgtggcctcatttcttggctcaggaccctctttattct

SEQ ID NO: 32048 - DNA, 201 bp, Bos taurus
tggccctggagaggtccaagtccactcccacattcaccacagcctctgtgtcacattcattccttcctgacttcttttttttatctttatgcgggagttgyttttgagctctgtggaagttctggcctttcaaggttgcactttacactgtaagaaatttttataatatggaatctatatctttagtaaatacagggctat

SEQ ID NO: 32049 - DNA, 201 bp, Bos taurus
agggcaacccgagacagtggccccaacggagctgcggggactcggggttgggtctgcactgactcactgcacactgcaggcctcggctgaggtggcatcaygaagacgccctgccgagatgctccgagcctcggagagattcaagatgtggagcgagttgctgggtatggtggaaggtactgagtgaccagggcccagatg

SEQ ID NO: 32050 - DNA, 201 bp, Bos taurus
gaaccctggttgttcctgaaacagagctgctggctgactaaggacaagaagaacagggttaacggagaagagaaggccaggaaacaacccccctcagctgmgatttccagtgtctttagggtaggaaccctgaacacacagccacagttcccaggaaggccctgaggaaggggggattcccatgagatttagaaagggaca

SEQ ID NO: 32051 - DNA, 201 bp, Bos taurus
cctgaccaccaagattcagcaaaccttcaagactagaggagaagagatactagcatctgaacatgacatctaacccttgggcttgccagcaagatcagacmtttcctttacctcactctaccaggtgatcaaaccctggcccacactggtttcatctcctctttcctgctaaaggctggctccaagggacccatgtgctgc

SEQ ID NO: 32052 - DNA, 201 bp, Bos taurus
ggaacaattagaggctggtttctctactgtcagattctgcaggtgcctgggggaggctggggggtgaccagctcccgagggggcccaggttggggacttcwcgaatgggtgagaccctctctccttctggggtcgccagctgggaccgcagtcagaaacggcgcaggccctcggggcagcaaggggccctgaggcaagagg

SEQ ID NO: 32053 - DNA, 201 bp, Bos taurus
tatctctatgcagccccctgagaggtcttggtgtgctccagcaatctccgcactgaataaatggccccggcgtagctgccagtctgacttttgggatcctrgtgcttgctgccctatgggtgctgcttcctttagctggtgcctcctgaggtttcatctgaagtggtttctagtgtctgtggacagaagcagaggtcaaga

SEQ ID NO: 32054 - DNA, 201 bp, Bos taurus
aggcagcgctggtaccggcacaggctgaaatggccttatcactgtggaaatatcgaaggacttccatgctggtgagcaaacggttcctgcccgagcctcamgccttccttcgccaagggccagcagctgagagagaacatctggcacatcagggggccgctaagaccacacccccaagctctactctgattggttgattcc

SEQ ID NO: 32055 - DNA, 201 bp, Bos taurus
gtttgggggggctgatctcaggtggcctcagcctgcagtggcttgaaatagggtttcagttcccagccagatatggacaccaggtcacagtggtggccatktgtctatccacgcatactgtactcttctcctcctaataagtgtttcacttgtttcactactctctgtctttgtggtaattcttttctgcaaagctgagga

SEQ ID NO: 32056 - DNA, 201 bp, Bos taurus
ttggagcacaaagaggaaggtctggaatggtgctgtgggccattttgaaaaaaaagaatagagtgtgtgtgcctgtgtaggaatcccgcctctcgcccccrgggcccccatcaggagtcagacctgttgttgataaccactggagggcaaagtggagggggtaaaagccatcaggagccaggcagggagaagtcctatttt

SEQ ID NO: 32057 - DNA, 201 bp, Bos taurus
acatgagggaccagcgggagtggatggggacgggtcttcttaacgcatatgatgtccagggctcagtgggttattgatcagagtcgagtgtggcctgcagygggaaggtgtgttcagggtgagtcagaaaggggtcaagacagaggctgcagtcggggcactctgctcctcctctgaaaagagaagaaagggaaccgggcc

SEQ ID NO: 32058 - DNA, 201 bp, Bos taurus
gaccctgcggccccagtctgagctgtagggcatctctgttcactatatgtttttcctctacccacctggagagcctacggacagaagaggagagagaaagmtgggccccaagaatgctggtcacagtggaaacacggcatcatgtttccctcgggaaggacttaggttcaaataaggaggaggaataagggtgagccttgt

SEQ ID NO: 32059 - DNA, 201 bp, Bos taurus
gatctgacttggacgtcgaatcttgacagagatgatcaagttaaaacaagggtgagtcccaatcctgtatgagtggtgtccttacgaaaaggggaaatgtrggccaagacagacaggcgtagagggaagacgatgtgaaagcacttggggagggcgctatgtgaaggttatagagatttgttacaaggttataacaggtta

SEQ ID NO: 32060 - DNA, 201 bp, Bos taurus
ttgtgctcagatgggaggatttcctctgatggaattcacagcttgactgccgagcagggaggtgccataggtgagtcccaggtgagaggatcccgggacayggtctcccacacctctcttggaacaaccctcagctttggcctgcctacccctgtgggaccccagagcccctgacctggtactccgggaatctctatctgc

SEQ ID NO: 32061 - DNA, 201 bp, Bos taurus
gaagacacagagccatgccttatgtacctctgtgtcagagaatctcatgatggcccttgcatggttgatggatggcaaatatatacagacacagagtcgcrgaagcagtcacggtagacccaggcctcctgtgggtccacagctccaccctggtgttctgctggagtgcagagggtccacctaagtctgaggtgtgaggac

SEQ ID NO: 32062 - DNA, 201 bp, Bos taurus
cattgcctggagcctggaccctgtgaacccatccctgcctccctccctctcccagtggggaggtgctgcccccacaaaaacctgctcaaaagacccctggrcttccctggactgacctctgtgaccgttctttcagtcgtcctaggaatttttggctgtcactggtgtcgattcctaatccagcccaccttgccctgcagg

SEQ ID NO: 32063 - DNA, 201 bp, Bos taurus
ctcccaaaatgttcttcttcaaaaagcttagggatctccagatactccaatagaggtaacagaggggtccttgggtaactcatccccagggcccgccccartccagactttctgacttgacttgtgtcccaggatcttccagctcagccacacacatcatttttattcatgtgtaaacaacaaaacaggcctctcacccag

SEQ ID NO: 32064 - DNA, 201 bp, Bos taurus
ctggtgagtgaggcagaagatggctgaaaaataccagttgtcaaaggatgttggtgggtgcctgaatacaggaaggtttcctgggaggaaaaggaggatcragggagtatcttgagcaattgcttggcgttgatgcagaaaacataagcttaggagtctgacagggcttgaatctgagctctcgccctttacagctgtgtg

SEQ ID NO: 32065 - DNA, 201 bp, Bos taurus
gtggccagtaggaagaagctgtggctgtaaggaattagtaatgagatatgaagttgctcacctccaggtcactagttcaaaaccagatcagcagggagtcraagttcctgaccaaggaggccacggaggtttgtttgaatggctggaaggcaagaaattcgttttctcagaagtcagtgccggccggtcagccagggccac

SEQ ID NO: 32066 - DNA, 201 bp, Bos taurus
aatcggcttatagactcctgaagctgaaggccagtggagaaccagccgttccatccccactgccaaaggtggtcatgaccgaatcatctccctcgtttgtrgaggccaagaaaaagattctggaatttctggcgagtttctctgaagttctaggtctatacttgtcaacacatcttccctcatatttgctttgaatctatc

SEQ ID NO: 32067 - DNA, 201 bp, Bos taurus
gggaggaaccatcaagagagacactgctctgcacacgaacctcgtgatcttgctctgctgctgtggcctctggtggccttgggttttcaagcgttcgggarcttgggttccgtgggcattctgaggaaagtcagctccacgccatggaggtctagacttgccgggccttggatgcgggggtctggcgcccccgcaacatcc

SEQ ID NO: 32068 - DNA, 201 bp, Bos taurus
aaatctctctgatccaaaatctgtcgtcttaactgcaacaggagaccactgtctttgtccgcctgaacacaagctcacagggcgtctcactgctgggaacmaaggttgccgcgaaggccagtatttatccaaacgacacatgcagggccttcaacgccacgtgatacaccacattctgatcaatatccacaaaacacaagc

SEQ ID NO: 32069 - DNA, 201 bp, Bos taurus
cagtagccacagaggtaacatggagctcatatgagctaccccaccagtgtaatcagccttttcccaaagcaggggatttctaagagcgaagcagaggtcaytgcaaattagaattgctttggaggccttaactcttcattgaaaactgccaccatatttgtggtccctgggattaggaactggaggtggggtggcaagtaa

SEQ ID NO: 32070 - DNA, 201 bp, Bos taurus
attgtatgttaggtatatgtttaattttttgaaatattgtcaagccattttttttaagtgttattttacatttctgcctgcaggatataggaattcagttkatatatcattctccctaatacatggtatggtcagtctttaattgtaggtatttttataggtgtgtagtggtatgtcatggtttttatttgtgtttcccta

SEQ ID NO: 32071 - DNA, 201 bp, Bos taurus
gtcactttggtttaatgatgttgaggtctcttcactcacatggaaagtaagaactggttttacttactgttgatttttttcccctcctgtggatgaaatarctgaaacctagaggaatgaaccagtgctactgaactgtttaaattattttcgtgttaatagtacactttgagtatctttttccacattaaaaaaatcttt

SEQ ID NO: 32072 - DNA, 201 bp, Bos taurus
gaatggccagtgaggtaagaagggaagcctagaagctacttgtgaactgatttgtgttgtgccaaaattcccattgaagcttgtgccccagtacctcagaytgtgactgtaactagagataaggcctgtaaagaggtgaaagttgaaagttaagtcgctcagtcatgtccgactctttgtgaccccatggactgtagccta

SEQ ID NO: 32073 - DNA, 201 bp, Bos taurus
ggtgttttagggccgtagtcctggaatctcaaattatccaccacaatgggagaaccaaggtagaaggacctcctccctggcctgcaggaggaagaggcccygtgcagggcggtggctcaaccagctcttctggtggtcctccgggccctgctgggtccaccttccccaccagataatggtccctgctgcctgcctgtggat

SEQ ID NO: 32074 - DNA, 201 bp, Bos taurus
ctggcctgatgtggaaatgtctcgttttcctctctttcctggtctctcggctcccagttgccttagggagtggtcctgagcagggctcccctgctccgccygcccccggccaggggcaaccctcgggtgagaaggccagggtggaaaagagcctgcggggaggcaggccttccgggggagcagggtctcctggtccatccc

SEQ ID NO: 32075 - DNA, 201 bp, Bos taurus
gcacttcccaggagtttgactttggattttgagcccctttccatcccatcagggaaacagagtgtgtgtctctttgggagttggggcatacatgtgttgayggggccttgaagtctgtttcttcccaggcccgcaccccatttctccagatcagctttgtgagggtccctgggtcctgctaagcaccctttcatttctggt

SEQ ID NO: 32076 - DNA, 201 bp, Bos taurus
aaaaatttgtttattataaagtaatacttgcttacagtaaaagattagaaaagcagaacactgaataaacagagctaggcaacctctctggtgggccagtrgttaggactctacactgttactgagggggcatgggtttgatccctggttggggaacaaagatcccatctgcattgcagtgtggccaaaaaataaaataaa

SEQ ID NO: 32077 - DNA, 201 bp, Bos taurus
agtagaagactggttgctgaaagtaggggaaattgagagaggctggagaaagggcataaactcacagttataagaggaatgagatctgaggatggtgactrtagttggcaacagtattgtatgagattttctagaaagtagaatttaaatttcttcccaccccccaagaggggtgtaagtacatggggtgacagatgtgtt

SEQ ID NO: 32078 - DNA, 201 bp, Bos taurus
agcctgtcttcgttaccgggcggccagcatgttgtgggcatctccaggggctttgttttgggggagaaaaccgcaatcagtggttttctgaaagggtgacktcgactcggaaaaggtgggcctagtgccaggcactgctgtccaagtctggaccggaagcctggaggaagagacagacgggtccttggatgccgggagtaa

SEQ ID NO: 32079 - DNA, 201 bp, Bos taurus
ctggagcaaggcttctgagggtccacggtccagaggcagtgtcccagaaccccagcacagcactcggtccgggatcaggacccaggccctctccctgcaayaggcaaaaaacagcagcaatatcgctcaccacctccagcgctgccaggaccctggccctgggaggccggtcaccctcatcgttcctcctccgtgctgggg

SEQ ID NO: 32080 - DNA, 201 bp, Bos taurus
cctgcattcaggacgctcttagacctcactctacaggtctctcttcaactggctgctcgtcggtatcctttatcacattctttcatagactggttaaaacktatttccctgactttggtgagccaaattaatcgaatctgaagagggaaatctcagatttatagccaactgatcaggagcacaggtagcaacctggactcg

SEQ ID NO: 32081 - DNA, 201 bp, Bos taurus
gccctgaatctttactttcggaagactcaggatcttggggaagagtcccaaggagaggacaggggaggctcagagcccctatggagacaaatagtcggccrctgactccctgtgtagccttgagtatatctcttcacctccccaagtctcagctgtatgtgtactcagtcattcagtaatgtccgactctgtgcaaccccg

SEQ ID NO: 32082 - DNA, 201 bp, Bos taurus
ccgactgagtgactttaaaaaaaaaaaattatgttcagaacaggctgtggacagagctgttacattacaaatattggttaacaaactaacaaaacaggccrgtggagcagctgtgtgagattactgtcagcctctaccagccagaccagtcaccacagtgggtggaaaccaaggctctgggacgaggccaaggtgaaaaaa

SEQ ID NO: 32083 - DNA, 201 bp, Bos taurus
cactgggccattctgaggctcgaaggacagacacagcttggagagtgctcggcaacagcagagtcctcacaagtatctgctgtcaggacagtccttcccasctcaggatggaaagacagcgtctggtcccggctgtttgggatcctcagtcactggacgtgtgtgtggtcaccctgtgtctcatgccgtgaccctgcagag

SEQ ID NO: 32084 - DNA, 201 bp, Bos taurus
acattgtaggcagacactttaatctctgagccaccagggacgctcaaatgacccagaggtcatttgagccagaaacatagggagaggccacagaaaggaayattttaagggaaaggacggtgcgcccccgccctgccacacacacacagggagatctgtggaagggaaatgaaaacaccagtttctgtcccggcccctcct

SEQ ID NO: 32085 - DNA, 201 bp, Bos taurus
acagatgctgcagacagtgcaggcgccaggggctgactcaggtctgaaggccatcctgccaggaaacaggctgcctgctgaggagtgggctccccgtgacrggttacagctgtacaacgaacggatgctccctcctcccgaccaagccttcccccagcccgttctccccaacccggtctccctgtccttgagtctgtggac

SEQ ID NO: 32086 - DNA, 201 bp, Bos taurus
cacagcaccccagggtgggccccactctcatttccctcttcattagctcaccaggcacaggctccattcaatttacttaaatgcggcccctggggctgccrccacactctgctcggagctgcccgtttgccagccattccagcttaattacgagggtctctggggagggccagtggggaggctttctgcaagggtaaagtt

SEQ ID NO: 32087 - DNA, 201 bp, Bos taurus
gtggagagaaactgaggcccagcggacacagcaagcatcagttacccgacaagtgagtggatgagccatcagatgattcctgtccccagcctctgtgttckcgagctgaggcccagacatacgtcatggagcagagaccagtcgcccccgctgtgccctgtcctaatttccgacccagagaatccgtgagcagaataaatg

SEQ ID NO: 32088 - DNA, 201 bp, Bos taurus
aagaactggctagaacttgagagatcctctgagtcatttccctactgcacagcacctaactcatttcagaaaggtggcctactcttcaactgtaacatttkcaaagaaagattgctttaaaaattttttttatttggctgtgatgggtcttagttgtggcactcaggatcttcgtggcatcatgcgagatctttcgttttg

SEQ ID NO: 32089 - DNA, 201 bp, Bos taurus
tccgtagttgtaggtggctgcacagaaagaaagcctacctccaccctctgtaatgctgtgaaactgacagggacagagcagagcccaggaggcctgggatkggggcactctgacagcaaagtctcgccagtgtgcggcaccccacccctcgggaggaaatgactcagtttaacatgacatagccccacacagagaagcccc

SEQ ID NO: 32090 - DNA, 201 bp, Bos taurus
gccatgtgccttgaagactcttagttccccaaccaggaattgaaccgtggacccccagcagtgaatgcttggagtcctaaccactggaccccacagggaaytcccagggccacagttttcctagaggtgtgtttcctgctcggtgaggtaaggcagtctcccagcatcgctcaaaggattgtgcactgtacagactcactc

SEQ ID NO: 32091 - DNA, 201 bp, Bos taurus
gagaccaccaaaagatagctcccaaagttgccaagtgtccctgggggttaaaatcgttccagttgaaaaagagctctttgagctcagttgaaaaggccacrtgctcctccctgggctgctttcctgggcatacctcctgcaaaaccattccttttgtttgacaggacactttggcccagagagactggttgacttgccaaa

SEQ ID NO: 32092 - DNA, 201 bp, Bos taurus
gtgataaataagacctggtttcacgtatgttaagcgttatggctctggtgagtttcagaagctcagctgccattttggatctaagttcctgcagagcccakccttatggcacaccaaactctggtaattcaggagcaaataaaaatgagttatacatcaagcgtgcaggtggatagtccttaatttgtgccttttgttgaa

SEQ ID NO: 32093 - DNA, 201 bp, Bos taurus
actgcgggccctccatgtccgcgggttccctgtcccaggttggttgagttcacgggtgcggaacccgcggatacggagggccgactggactccatcgtttygtataaaggaattgaacttcaaaaggtttgaactttcaaaaggtttggtatccatgggtggggggccaggggcgcgtcctggaaccagtcatctgcagat

SEQ ID NO: 32094 - DNA, 201 bp, Bos taurus
atagagacaagccctgttcatgaggcttcctttggtagccgtcaggacaggcccagcccagacagagaaaggcctcctggcccttccttcctggcccctcrtcaccagctgcaaagggaagtgcgagggggtgtttgtgtcgggcacttcagcagctgagtctcgccaggcctggacgtagacgtgggtccagcatgagtc

SEQ ID NO: 32095 - DNA, 201 bp, Bos taurus
gcgtcaatgtgtgcaacagttataggagcacgtcgcactttctgggaaggctaagctgtttaggtaggacactgggctgtcacaggggtgggcggggccargtcatgaaggtcctgtgtgccatactaaaagaccggagattcaagttcttttgaaaagaaccggaatctcacgcaagtgttgagaatggacgtgtagaca

SEQ ID NO: 32096 - DNA, 201 bp, Bos taurus
cccattattgctggctttaagatgcacaaaggatgcttgctttggcagcacatatactaaaattggaattatacagagattagtatggcccctgcgcaggratggcacacaaacttgtgaagcattccatatttttttttttaagatggacaaaggggccactagccaagaaatgtgggcagcgtctagaagccaaaaaaa

SEQ ID NO: 32097 - DNA, 201 bp, Bos taurus
actagtaatcatcctcagggtgatggcctctgtgtctagactgttaattctgttacgtgcacggtaaccatgtaaaaagtgggtatgagtaagcatacacrtacaagttcatatgttcacatatactatggggagagaggaatgcacgtcctaatcgttatcctcctggacagtaaggattggtgtaagtgagaagggata

SEQ ID NO: 32098 - DNA, 201 bp, Bos taurus
agagcagatattcatttatacagaaattgagctctcctgcaactgccaggagagcctgcgcaataattcaggtttgtgattattagacctaaaacaggcayttaaacatcattcctgatctgtttacattgacatggccacctaaactgtaggtaaaaattaaaagatgacattcatttctgtgttcatatactcaactgt

SEQ ID NO: 32099 - DNA, 201 bp, Bos taurus
ttagggctaatggccaaaaactgaggctcctgtcctcatgtctttgacaccctctgcaaagcaccagagacgagagatgccggtgtgagtggctttccctkggcttgcagtgggctgggacgggccatgccttcctgagcgccccctttcacctcagttgcagcctccgaacagacaaatcatgaatgagatggaatgttg

SEQ ID NO: 32100 - DNA, 201 bp, Bos taurus
ccaaggctcgctctaggtggttcctctggtgggtccagtagtgtttgtcttcatggagaaccagagaagtttgaggaggagagagaggctgcaggcacctrtgtaggaaaatgggcctggaagaaggggcccccacagaggctagcgtccctcagagggcagaattcagccacaggctactacctcacctctcagaaatgc

SEQ ID NO: 32101 - DNA, 201 bp, Bos taurus
tcttaacccctaagtcatccaaacagagattcaaggtctcccggcttccctatttaggaagcaaaagtgaaaaggtttggagtcaggcccctgcgggcacrcaggaggcgcccgggaagcctgtgtgtccagcgaggacctctttccttccaggaggcctgcaccaccaggcgccactctccccgaatggcccgaggccct

SEQ ID NO: 32102 - DNA, 201 bp, Bos taurus
gacatggggcatgggcctgaattcgggagcctgtgcagaccttgttgatatcaaccaggtcccctggggatgggtggctgttcaccacgcttttatcaggygacacctggccaggatgtgcgggtggctggggacccactcatctgtgaggggcctggcaagtggcagcctctgcagacgtcagagccgggagagggggct

SEQ ID NO: 32103 - DNA, 201 bp, Bos taurus
tcgtatgtgccaggcctgcccctgtcccccagcctgcctcctttgcatcatttggtcccaacctatagtgagtgagtgatatctagactcagctggggagrtcaggtgggcccccacatagtcatggccctgggagtccctcagagatccttgacaggagagagaagctcaccatcagcccttatgctgtccatcggtgtg

SEQ ID NO: 32104 - DNA, 201 bp, Bos taurus
ctctgcagatgtccttcggccttctccgcgtgttctccattgtgatcccctttctctatgttgggacgctcattagcaagaactttgctgctctacttgargaacatgacatttttgttccagaggacgacgatgatgacgactaacaggtaagatttgcctctcccccacacatggaccaggagccggaagtagggtgga

SEQ ID NO: 32105 - DNA, 201 bp, Bos taurus
acagccccgcctcctgggggaaaagtctccgccctgccccgcccacacaggcctcgccctcctgtcctaaatgcctcccactttcacacccccttcagtcyggagactgctcccgttctctgtgggcccgcactgctcccgaggctcccctataggcgcccgtcttggctccactttgtattttactcactgagaccctgt

SEQ ID NO: 32106 - DNA, 201 bp, Bos taurus
cctgacctatctggtgacgtcctgcaactccctgaaggccccaggctcagctgcgttcttatgaattcactcagctgtttgctgtgctgtccactcccccmacaaatagggcccgacctgggactctggttgggacagaaaggctgagcctccgaggaggaggcagcagcttacccagcagagaagtgagcagggtcagcc

SEQ ID NO: 32107 - DNA, 201 bp, Bos taurus
ggggggtggggcttgtgagcctgagtctctcaaagtggcaatctccctcgcagggatgctggggggtggggggtggcagtcagaggcacagaagggccagyggctactgcaactgtcagccttgagattaacccacttggtgcccagctggtgatgtcataggacatcagtcatggtgcatcacccagcctcccttgaggg

SEQ ID NO: 32108 - DNA, 201 bp, Bos taurus
ttggtggattttttttttttttccttttgacacttgaaatatttcattccactctttccgtgtttgcatggtttctgaagacaagtatgtgtaggccatayttttttttgtggttgcaagtgtcataaaatttttgttgaaaactgggcaattctcaaatcatcttggccctcctttccattttgtttgtttagaggctct

SEQ ID NO: 32109 - DNA, 201 bp, Bos taurus
acaccaggcccaaaggggtgacaagcccatcacctggtgaatgaatctgtaaagtgtgtctctctgagcaacggactgtgactcagccgtaagaaggagcraggccccggcatgtgccacaatgtgggtgaaccttgaaaacatcatgctaagggagagaagaaggaaatggcagcccacccccgtgttcttgcatggaga

SEQ ID NO: 32110 - DNA, 201 bp, Bos taurus
ccacaagttttaaactttcaccaaagaggagaagccagtggccctgtgtaggcacacaccaggactcagcaagtctctgaggtctcttcatttactgaaaytctgacggagggggccccgggcagcctttctgtctcagtcttttgtagttcaaggctacagctagcctatgttgaagcaattaagtatctccccctgagt

SEQ ID NO: 32111 - DNA, 201 bp, Bos taurus
atctgatctggccgtcccagggggcctcctccctgagtgccctcgtgcccctgaacctgttcaccgagctgctgattgagtactacgagaaggtcttcagyggccgcggggagcgcggggcagaggccagcgagcagggcgctcccggtgccagaggctccgtccccaacgaaggcgccgctgcaggagacagacccgcct

SEQ ID NO: 32112 - DNA, 201 bp, Bos taurus
gtctctggcaccaacccagccaacctgagccacttgggctgtatctctgtgctgggtaccagctttcatctggtcacacctgagcccctgcgggcaaccayctggcctctctggggccattcaggtctccacatgacctgagcagcaaaaccacgacccacaaaaccatccctgcaccaacagcaacatctttccatcgac

SEQ ID NO: 32113 - DNA, 201 bp, Bos taurus
tgtgaggaaagcttcattccagggcagcctgcccgccacaaaaaagaggatgcaaattgatccccgccctcatcccggcctccagggtgtggcctgctgarggggtctggaagccttgtgacctcaggtgggttgggggtgggggatatatcggctctttgggacccaatttccccaacggtgaatgaaggcggggccgta

SEQ ID NO: 32114 - DNA, 201 bp, Bos taurus
ttctatgcctcagtgtcttcttctggaaaagggagatcctgatccatattgtctgccctgtggagttgcaagggataagagaaatagtccctctactatayggcctgttgagcactcaggcggttgtcgttcagtcgctcagttgtgtccgactctttgcgaccccatggactgcagcacgccaggcttccctgtccttca

SEQ ID NO: 32115 - DNA, 201 bp, Bos taurus
catggagttcaaggggccattgagaggtgtcgagtctgcagactggcagtcacagtgtgggggaacctcgtgggaacgagggtgtggagaaagagggccargtcctcactgcggtggatgggactccaagatgagactccggacggggatggtattggcaacgacagggtgagagcaggggttcccaaagcaggccgtctg

SEQ ID NO: 32116 - DNA, 201 bp, Bos taurus
tgtaaatggaccactgccctttccaaatggctgatgccctggttgctcccaaccagcggtcagttcctaggtcatcaccttcttggccacccacagaatgytccagcttgtcagcgaactcatgataaacgcctgcggttttcctctgggaggacagtggtggggggtggccccccacagaggaggctgtcccagggtgtc

SEQ ID NO: 32117 - DNA, 201 bp, Bos taurus
cttatggttgggctttaattagggagtcagtttaatcacaaaataatgcagtctgttacaatgacacttggcaccgaggccttgggtgggggaagggagarcagagagccccaaaaagacccgtaatcctccctggggggcgtaggggggatcttcctggaggaggggggcggatagttggtttgcagtgggccaggatgg

SEQ ID NO: 32118 - DNA, 201 bp, Bos taurus
ttcctgcatccaggaaggagcctggaaggcttcgtgtggagctgacgtttcttttcctctttctgcccgagggagaggcgggcccccgggggttggctccrgttccctgctgcttccccacgtagaccctcaggtttggttgtgagagacccgggaggaagtgtgtttatgagagccgagaagtcgggaggatggttctgc

SEQ ID NO: 32119 - DNA, 201 bp, Bos taurus
ccagctttacttccacttaacttacaatgtacaactaaaatgtaattacagagatgagcgagaaaattgccctgcgctgttcttgttcttttacacgttaygctctgctcccagaactgagcacctttcctctttggttttatggaatctactttttattaaaagttttacttgaggggaagtcagaagccatagagcatg

SEQ ID NO: 32120 - DNA, 201 bp, Bos taurus
ttcagatgagggactgcactggagatttctggggcacttgtgtctcagttggggacacacaacaggtctactgaggaatgcccaggctgtggcctcaagcwgctgagctagagaatccagtcgggttgggggctgttagattaaaaaccactgggggctcagtcagtgaagcaggcctggtgttcattaagaccctgctcg

SEQ ID NO: 32121 - DNA, 201 bp, Bos taurus
tgagtccaactgggccacgccctgctgtggctgagggcaccaccattgccgctcaccagagctgggctttggtccagtcaacaccactgagctccagaccygtagtggcaggtgctggggaccacacagtctcagtcgtggccctcagggagcctctctgcttgtgggcaaggtgaggggtgcccgagagactggggctgg

SEQ ID NO: 32122 - DNA, 201 bp, Bos taurus
aaaaggccaggccttgccctccccatccctgcgccatgggaagctgtctccccttccccagcagtgagtcacaaaggctcatcgagccctggctgtgtgtrctccctggcccgggtggagccggccctgcaggggtcgggggcagcagtggcttggtgggcagagccgagctgctgctcctgggactgacactgagatcag

SEQ ID NO: 32123 - DNA, 201 bp, Bos taurus
actgtaagcatgagagaattcaacaggattttacaaaactcaaggctctgagtggtgtttcaaaccttcctgggcatgtgaggcctctttaattcaggaaytatcttttcccaaagactccgccgtccactgtccatacagcaggctgcgctgcggcccggcatcctccacgcgttccctgcgctctcccacctcccggcc

SEQ ID NO: 32124 - DNA, 201 bp, Bos taurus
gtgcccatggcccccagcgtttaacagggagcagaaacgccagaggaactcagagctcctctgggtgtgctgctgcctccctccagcggcttcagcgtggygctcaaggtgcctttcctctgggcccgagccaagttcacccagtactttggccaaaccgtggggaaccggccgcaggcagccctggcttcagagagccag

SEQ ID NO: 32125 - DNA, 201 bp, Bos taurus
gtaaactccgagagttggtgatggacagggaggcctggaatgctgtggtccatgggattgcaaagaatcagacacaactgagcaactgaactgaaatgagrtaatcaagaagctgggggccaagataggggacgggccgtgtccacagtgacgtggagagcctggtgcacaggcctgggagtttccgtggacccggaggag

SEQ ID NO: 32126 - DNA, 201 bp, Bos taurus
ccggtgccctggcctctggcttccacctgcttgagccacattgcaccccagagtcggaggctctctgacacccagtcttgatccccccacagctttctgcrgggcccccgtggcctccacaaagctgagctctgttccccgtttgcgggcaggccctccactcaggcctgggagtctccccggtccagaagctgcctggga

SEQ ID NO: 32127 - DNA, 201 bp, Bos taurus
tgagtcagtttcgttccagcagcaggagacccggccccctcgttcgccatcctttgacgtaacccctcagttccagcatatctgcagagccgggtcagccktgtcccgggccctggggagtggcttcaagggctggagtgctgtgtgcatgcagctcccgctcgtcccggtccttgctgttcggcacggaacacttgccgc

SEQ ID NO: 32128 - DNA, 201 bp, Bos taurus
atggcacagccctttacaatgaacagttccttgacagtagtggctgatgttcatcttgcagtcagcgtttgccaggccctcttcctaccaccctgcacacrtttgtctccctggtggtttatttcatttttaaaagtctttgttgaatttgttacaatattgctcctgttttatgttttttggccaagaggcatgtggggt

SEQ ID NO: 32129 - DNA, 201 bp, Bos taurus
ggagctgtgggcgtcatttcatcagggatctgagctctggccacaaggtggcgtcgtggtcctgctcgaggcagagggccggcgccagggcgtctgggctyttctctggaaggcagtgtgatcagagctgggtcacgtgccccccagctggggcgtggagaagtagggaccctgcgggctcggcctgcggcactttgcagt

SEQ ID NO: 32130 - DNA, 201 bp, Bos taurus
cagacccaggcacaggcacacacatgtctgtgtgtgcctgtgtgtgtgtgtcatggacgcatgtgtaagcacacacgtgtgcagctgtagggcctgcagaygcctgacctctccgtgccgtatgaggcatgtccagatggggtttcggctcttggtcctgctgtgggagctcggtggacgccagcccactgctgggtgccc

SEQ ID NO: 32131 - DNA, 201 bp, Bos taurus
tagcaggttaagctgggtaacctgtccgtaactgttcttccagccagacccgaaagaatctctgtgacagcctcagaagaagagttgctgggcctttcagrcagaaagtgtcggaactgggagggtttggctctcaccagcagcccctgggagaggcgaccccggcccccttcgctcactgtcctcctgaaggacgactct

SEQ ID NO: 32132 - DNA, 201 bp, Bos taurus
gccaggatctgatagaaagattacagttgtaatggagagctttaattctcacttatcagtgtgccagttaccaaacagaaaaaaataatggccaaggatcygaacggtataatttttaccgttgagttaatctttacttaccaggaacccagagaagggagaatagctggactctgtttagaggaagtcacacggccgtgt

SEQ ID NO: 32133 - DNA, 201 bp, Bos taurus
atcctcgtgagtgggaatttgtcacttccccgcagtccctggcacacaccaggacttcttagccgcggtagatgaattcctggccgtgaaatgacctcaaygtgaaatctgaaaaatcctttcatgtctgcgtatggaaaggtatatttaatgtgaggcttggccgcgttgtaattgttcgtcacgcggcatctctgaaag

SEQ ID NO: 32134 - DNA, 201 bp, Bos taurus
tctgcttttctccttttgttccagtccctcctccccagctgccccaccccaccccttctctttcaagcgacaattaaatttaaatccattttctctacagraaaaaaactaatcacagtctcaggcccaggagtgacccagagtcaaggggtcacgtgggataggacagcagactctgccctttccggggggtgtgagtcc

SEQ ID NO: 32135 - DNA, 201 bp, Bos taurus
agaagagctggtagtattaggaacatgagaccctcggggcctccagaattgtggagtgtggtctcgctttctctagagatgggcaggccaagaggctctcygagaggacacagaggctctgtgtgtgtgttggtgccacagccaggcttccttcccactccggtgggccctccttgccttgccgtctgagtcctgtgtttg

SEQ ID NO: 32136 - DNA, 201 bp, Bos taurus
atcgtggtcagatcgggagaagcacgcgtgtccctgctcactttctccctggtctccacgtgcacctctttctgcagttgtgtccctgcccccctggcctyttgcagcccccgacctgatggtacaagtccagctcctggaagacacagattgttcttgggctcaattccacgttccccgggaagggtccggggggcccgc

SEQ ID NO: 32137 - DNA, 201 bp, Bos taurus
actttgttaaggacactgagatattcagccagagcctacctgcgcaagcaggcagaggctaatcctcacctcagactcagtatgaaaggaagcgtggctgycatggccacctgtatctctgcccttgatagacgtcagggtcagccaggttcctgccccccgggaggggtccatgctctgagcatctttcctgatgctggg

SEQ ID NO: 32138 - DNA, 201 bp, Bos taurus
tcctgcaccaggtcatttttcactcagggaatttgagttctggtccgtgagctggttggtcaggtggaggtcacgtggccacctgcatgcctgacatcagkgtgggtgggtataaggagaggttgggtcagcatcttttaagtgggatggacgggcagggccagaggtcaaggctgggatgcagcatcacggtactgctgg

SEQ ID NO: 32139 - DNA, 201 bp, Bos taurus
ctggtttgagattgcaaagccccaagggcctgggtgggaaagtcaagggttctcacaggaaaaagcccactgctgtcagaggtcactcagagctttacctyctctggcctcctgcgccacatgtcctgcagataatcttgcgagtgtccccaaggggctttctgccgcccctaagtgccctaaaatcttcctcgtctttct

SEQ ID NO: 32140 - DNA, 201 bp, Bos taurus
tcccgtccccgtggacttggagtccagctgcgcctctactcagctgctccccatctccggatctttgctcttgttgccggcctctctgtctgcagcacttygtccactccctgcccgctgagtaccctcggaccatctcctgaggctgggtcctctccttggctctgagttcccatctccacccctccccgacctccctcc

SEQ ID NO: 32141 - DNA, 201 bp, Bos taurus
atccaagaaaccagctctctgggccaaggaagcagagacaggcctcctgaaccacccctgagccgggggaggagaagggagtccccgggagagagggtgargcgacgcgcaaggccatgcgaggggcagagcacgaggccagggtcggggtgcagggcaggggtgcccgagtccctgtgctccatccgggcaggtggcctc

SEQ ID NO: 32142 - DNA, 201 bp, Bos taurus
tcttggcacagcccccagttctgaccagttacctgccctgccctccccaagcacagagcctgcacatccagctggtcatctcttgactggcccacggcackcgaggctggttcagtacccagggtctgtagagcttcccttttcaactgacgaggagctttcaaaactgcaggcatcccttgccttcttcttctgcccaag

SEQ ID NO: 32143 - DNA, 201 bp, Bos taurus
catgttggccatggtcacagacattgtgctgcgggctttgctctgtgtccacctcgggctggaaagaggcagaaagagtgaagatgaacgtttggagacakaaaggcctggctgcggtgccctgcttgctctcccatcaggaccacgtggtctcagctcaggctctgtgccccgtttgcaggcagatgtctgtctccctgc

SEQ ID NO: 32144 - DNA, 201 bp, Bos taurus
gaggggaggtctggctgtcatgggacactcagccgtgggagcaaggggagcagggtcgaccccaaaaagggaagggaattggagttggtggatggggactyggggccatcatgtgggggggatggagaggcgtttactaaagttcctcggtggttccactggtgtgggagcggctgcacgtgggaggaagatgggaggcag

SEQ ID NO: 32145 - DNA, 201 bp, Bos taurus
ggcgcattttaataaggaaaggccctcttgccggagtgtctgcgtttaatagacagtcatttacggacaggggagaagctgtcctgctagtgggtttttayggccgtgactcaggccgcccttttgtggataaatggctaagagctatttttccataaattaacaagagaggaaaacccataaaatgtgttaggaggcttc

SEQ ID NO: 32146 - DNA, 201 bp, Bos taurus
tggcccacatgctcctgccaaaccggaaaccagctcttgagtaacactgggtgctgagtgtggagctgagtgactgagcagaaatcggcatccggcctccrgtgacctcggatcctggtgtagccccgccctaggcaggctgcctggtattcttcgaggtctccctcgggcccccttactgattcaggatgccaatgagga

SEQ ID NO: 32147 - DNA, 201 bp, Bos taurus
ccttctgtgtccccagaaaaggaagagccaggtccaccacagtccagccctttagctgcctgctacccggacccacgtgtcttctccgtgaaagagggccrcctttccataacagagtccctcccggatgtctcctggagacattccctgcagctcccctacatcccactcggttcaggcgctctgggacctcctggccag

SEQ ID NO: 32148 - DNA, 201 bp, Bos taurus
tggaccagcttagctggcggttgcatttaccagatgacactgcggagtttgaaagggattgttcttgcaagaggccgacttcagggcccagagaagctgcygggggtgagcagggggtcagggcagcccccaagagacagcaagtaggggcttgaggagggaggtggaggcggggatgaagggaggagaggggccctgact

SEQ ID NO: 32149 - DNA, 201 bp, Bos taurus
gcctccccgtcgtctgtagccccctcgtctctcgtacggagtgggtctcattcccgggcaggtgaccacacaccgctgaaacagaaggccagggcactctkaacagagctcagtttcccgagggtctccctgctccctcccttctgcatctctccccgcctctcccctctgaccccctccactcccccgcctctctctggt

SEQ ID NO: 32150 - DNA, 201 bp, Bos taurus
ggggcagccggtgcagcggcaggcatggccgcagggagctctgagacgagagaaaagatctgggggctcaggcggttttctggggtgaggggtggcctccrttgttgggacagagagggaaggggataaaggaaagggcattttctactctcaaaacagaggctgggcgcacatctgcttgtaggggcccacacctgctgg

SEQ ID NO: 32151 - DNA, 201 bp, Bos taurus
tttcccccacagaagctcctgggtatcctggctgcccctttatctctttgaaagagtccctgagagctacccaagaggccatctcctgggccatggtcccyagtgatgccctggataaaacggttctcagcttttaggttaggttttttttttttttttggttcagttgacggtggccacatgtaaacacaccaccctcct

SEQ ID NO: 32152 - DNA, 201 bp, Bos taurus
cacctggccccccgagcaggacactcaagggcagccctgttcccagattcaagtgcacctgtgtctgatgcctgaggccacgctcccctgctccccggacrcggatctgccctccgtgttcccctaaatgagagcatcctttgcaccaaccccactggccaatcaccaagcagctgggatggggcagacaggctttccggc

SEQ ID NO: 32153 - DNA, 201 bp, Bos taurus
tgcctgccatgggacctgcccactgggcacaggccgaggctggggctggctggctgaacagtctcccggggtctcacataaggactaaggagggaaagtgrgagactgtggactcctctccgagtctcaccctctgccggcccccacatcctgccacgttctgcctgattcaggccaaccagcaggcgtctggagggtcag

SEQ ID NO: 32154 - DNA, 201 bp, Bos taurus
ggaggcgggaggtgcagctgcggactcagccggacacctgcgtaccgcgcgcgagagctgatgggaaccgacagcggccctccgcgaagacgcggcccaaygagcttaaactcggatacgtcccttccaggggttgctgggctcttgtttaaataagacacagagagagagaaaaacgtttgccctgacaggccccgtaga

SEQ ID NO: 32155 - DNA, 201 bp, Bos taurus
caacaactgacactcagaaccactctggacccagacagccatctgtattccacttacagtgagaattaaattcactacgtgagctactcagcatgttatcrtaagacaggctttgtggccatggcttcacccaccttccaggggcgtgagtgtccaggcccatgggaaacggccccggcaatggcgaggctgtggcgctgg

SEQ ID NO: 32156 - DNA, 201 bp, Bos taurus
caaacagagcccagtcctgggcccccgagcctggctggcaccgctgcccagcgtcctcgaggaagccaggagacaaaaccttgtctctcacccctcccccrgtctgtccagggcaccagatcaaattcaagaaccaccctcgtcctcagacccgcgcttcctcatggacattctgatctgctggcatccagtctgaaagtc

SEQ ID NO: 32157 - DNA, 201 bp, Bos taurus
cggcagcagaagcggccgccccggcagacaggccccgctggacacggcgcttctcggacccgcatcctctccccggcagtcgggctgggcaggcctggagygagccctatgtcaatgtgctcatcttacaccacgttgctgtgaaaagccctcctgctagagtaaggcctcctgagacgctcgcctgcccacaaaggctct

SEQ ID NO: 32158 - DNA, 201 bp, Bos taurus
gcccacagtgggaggaggacacgctgaggagggaaggcccccaaggctgtaaaggtgaagctgagttcagaccacacaggtcccagcggatgccccatctygaaggttgtaaaggccggtgcccatcagtggtgctcactaggtctgcaggcactgggtagcatgagccacttgaagctgggaagctttgggacccatctg

SEQ ID NO: 32159 - DNA, 201 bp, Bos taurus
tgtgcacatgcgcacgtgcacgcacgcacacaggaaggtgtgtgttggctgtagctgctctgcacttgcagcctgtggcctctggagttgtgtgtgcaccracgtgaggttcacatgccgggtccttggcacgcttgtgccccgtgtgttctgccccatctgtgtgccagctgctctgctgtggatgcccactccctcctc

SEQ ID NO: 32160 - DNA, 201 bp, Bos taurus
ccccgccgagacgcctgaacttctgcgtcacgggcgcgggccggcctaggttgagacgggcggtatgcactgtgcaacttgtcttgaccgtatattcggckgaagcagctgtgcgcgaggccgggagaagaaagacgggctaatcccgccttgcgcgctcctgctgagggaaacagtccagaggagccccagggtggcgcc

SEQ ID NO: 32161 - DNA, 201 bp, Bos taurus
gtactgaagacggcgtacagcaccccgccggagcctggccggtccagcgaggctgccaggcaggtgccgaaggcgggggcctgggcatcgccggggtccargcagctcaggtccacctccaggtaggagtagtagaaggggtcctgtttgcacatgcgcgccagcagcgtgcggttccgggccgggtgtttgtcctgctgg

SEQ ID NO: 32162 - DNA, 201 bp, Bos taurus
tctcactctgtgccaaactcccaggcagaggagcacgtgggctttggctgaaactaggcttcttctgggctgtgccctgaaccccagatgctgagtgctgrgccctgggactcccgctggcgcaatcgtgtagctcctgcctccgtgtgctctgggcctactgtctcctctgcggccaccgagtgtcccgaggcctgggac

SEQ ID NO: 32163 - DNA, 201 bp, Bos taurus
ggatagtggtggggctctgcagcatccctgggggcaggaaatttctgggcttgacctctgtgtcgtggggtggccacccctccccacacacggatttgtgygccctgagtgcctagtccaggacagtacacgagaagcctttatgtctccttgcttcaggtggatcagccccggcagctgcttggcctctggctcccccct

SEQ ID NO: 32164 - DNA, 201 bp, Bos taurus
cacccggagaccctccaccccaacaaaacccaggagcctgtagcccgggatctaactccctggagaccctaaagggccaggacacgttcagactctcaggkggagatctgaccatcttctgctaaaggtcccgcctaggctcgtggtcagggggcagaagtcccagaacactgacccgcgggggcccacgaagcgggacaa

SEQ ID NO: 32165 - DNA, 201 bp, Bos taurus
gggcccagcctcctgcccacagtactgtggggcccagcctcctgcctcagcaaatcactgagattatctccccttcaggaagattaccctttccctttaaragctgtcatggccaagtagaatctttggatttggtcttgggacatgagtctactccacagatcttctccgcaattgctggcttttctaattagaacacct

SEQ ID NO: 32166 - DNA, 201 bp, Bos taurus
gctaaaacaagagttacaacatagaggagaccccagcagcctgcacagactttagagaggaataaaatatagggtacatttttctcaacaaattgtcacgytcatgtcacaaagaaaatgaatgaaaactacagaaaaaaaaaaaaaaaggcactttttttttcccatcttgagcatttaattaagatagtaggttgcttt

SEQ ID NO: 32167 - DNA, 201 bp, Bos taurus
ttattgtatggaattttaaaagtcctaatttctttctttcttttttttttttgtaacatgtagctatccaatttttcagcacaatttattgaagatactgycttcccccactgtgtaatattacctcattagttgcagattaattgaccatgctgctgctgcgtcgctttagtcatgtccgactctgtgcaaccccactga

SEQ ID NO: 32168 - DNA, 201 bp, Bos taurus
aggaaactggaacccaccaaaaaatataccccatatccaaagacaaagaaaaagccacaagatggttggcagggtaccatcataagaaaataaaatcccayacccaccaagtgggcaacccacaaactagagaacaataatacctaagaagttctctcactgttgtgaaggttatagaccacacatcaggcttcataactt

SEQ ID NO: 32169 - DNA, 201 bp, Bos taurus
tacaatgcccaaaatcctacaacatccagtccttacttgcttttctgacataatctcccaacttttaacctcacacactctgtttcagccacttgtacaargaaatgcttttgccaacacatctacatcctttttcttctctatcattcaaatctttctcaaaaaccatattctttataaagaacttcccacaccaaacta

SEQ ID NO: 32170 - DNA, 201 bp, Bos taurus
aaagcagtaagttaataagtctcaaaaatttatattacattttttgtaattctgtatgttttgtttgttttaattgatgaaacttcaaataatgtaagaaraaatggataggtctccttgatttttatgtagaaacatcattgttcagccatccatcaaacttgtactgagtgactggccaaccccaaggacaagtgatgt

SEQ ID NO: 32171 - DNA, 201 bp, Bos taurus
ctgttttttttattttattttatttttaaactttacataattgtattagttttgccaaatatcaaaatgaatcaataattacatgctttttaaaggttttrtacctgttagaagttaattttctttcttgggagggcatattctattttagagttaaacaaatgtgttttatgtcttatcatttattgtttaccactttct

SEQ ID NO: 32172 - DNA, 201 bp, Bos taurus
aattcagaaatgtgaatcagacactttaatctgagtacttcagagaggagataaagcaaaggatataagggatgggtctgtcccaggaaggccccatagartcctactcagttacactatcggcatacaggaaggaaataataaataagtcagtcagttcagtcgctcagtcgcatctgactctttgcgaccccataaatc

SEQ ID NO: 32173 - DNA, 201 bp, Bos taurus
tcctggatatgaagaggattgttaaaacccatgagtactactttgctttactacttcatgctactcaactttgaagatgacttccaaattggccatgttgracctgacgacttttccagggaaaaaacgatgtggaacatttctgcactacagatatttcaaaaaatcaggccattattcatgatcattgtaatataatgc

SEQ ID NO: 32174 - DNA, 201 bp, Bos taurus
gatttatacagagagctgccagagaactggtacctgttagctttgcaataatacagctgtaaaagcccaaagtgcctcttccatctacccgggattttctytgttctcctttttctttctcttggaccaggatgaaattgtatgttaaagagaaaaagacaatgttaatggcaacactatacaatgctgagaaatagttct

SEQ ID NO: 32175 - DNA, 201 bp, Bos taurus
tgtttcctgaatacataactccatgaagttctgggttttaactccttgtgaatgtgtctcacttacattgaactgcatctacagcatgaccctgacttacraacaaattatatggagtacaagaaaatcattaaaagcactcaagattatgtagatccaatattctactgcctagcccttgacattctaccccttagtaaa

SEQ ID NO: 32176 - DNA, 201 bp, Bos taurus
tgtgcccctttctgctgaattttagtatttgatactcaggggacctgtacggactgttgttgcagcagccagagccatccaagagctcatgaatataaacrtcctatttcatttgtcactattttaacacagcaggcattttgaaaatgcccataggcttgtgtggtgggtgaaaggaaagatgaaagtgtcaagaagcta

SEQ ID NO: 32177 - DNA, 201 bp, Bos taurus
taaaatctatgatgtgttcattttatatttatattttaccttttaaactgtattcttcaatataatttaataataatttgatcattgtgcattatatatayacttatttgtagaagccaggattcaaagatttctgtgtattccaattttgatttaagataaatttttagtcattttaataattagagttcttcatcaaca

SEQ ID NO: 32178 - DNA, 201 bp, Bos taurus
atgaaccaataaaatgttgcccacttaggagtggagaaaaatacagcaaaggattggggaagagatcttaaatctgaaaagattttgtactcagtttgacrcaaaagtccctttgaactctaactgtgtttcagttggaaacttgaaatacaggtgaagcattaggagtgttgtttttgcagaagatatcgtgagtagtaa

SEQ ID NO: 32179 - DNA, 201 bp, Bos taurus
ttgcagtttacaagagtgaattcctgatcaattggccaaaaaggaatatctgactgcattagtttagagactgccataacaaaataccacagactgggtgscttaaacagatgtttatttttttccacagttctggaagctgaatatgcaatactttgggccacctgatgtgaagagctgactcatttgaaaagaccctga

SEQ ID NO: 32180 - DNA, 201 bp, Bos taurus
ccataatcacaatctatcatctggtgcatgtagacattaatatcaacacagggtatgggaaacaattgtctataattttctattggtcttataggatataratattattaacatattttacaggtgcaaaatgaaagaaaaaaactaaaaaagactaacaggaaggaatcactgacttattaacagatgattacttctgtc

SEQ ID NO: 32181 - DNA, 201 bp, Bos taurus
cataagttatgaatggtgaaaacatgctattaatttcatttgctagcaggatgacatacaaggaaagaagaagaaaggcactgtggaagagagatcacctracatggattttcaggatgcaaagataaatattatgaagttgcttgtgagtagatagagataataggaagggtagcactctaaatataaataaaatcacta

SEQ ID NO: 32182 - DNA, 201 bp, Bos taurus
atttctttccagataaatctataatctctccccagttgccctattggtagctgagaacagtctcatttttctttctacagactttgactattaatcactcytccattacctcctttcactttgtctaacttcagtctctctgttattattagaatacttctgtctgtatttaaacttgctggctatcccactttcattcca

SEQ ID NO: 32183 - DNA, 201 bp, Bos taurus
aagaatcttgcactgttataaagtggaggtccactatcactggagaacaggacacttgctccaatccaggagctcctccccaaaatagtccagggacccgraacagcattcagggccacgggggaagggtcaggagtgctaagccctgttctccttatgagagcccgtgtggcctgagcccacagctggagcaagagaact

SEQ ID NO: 32184 - DNA, 201 bp, Bos taurus
gggcccaaaggggagtcttgggaaaacagtcaaagcagagacttggagggcaataagcagagaacgctacactttttagccggttcacagctcatgcactrtggccccaaacatgtcgggctcgcgggaccaagagtggtgagcgtagaaacccagccactgcacacaacccttgcagcacagagggcgggcccaggtggc

SEQ ID NO: 32185 - DNA, 201 bp, Bos taurus
gtgggatgttagttccctgaccaaggattgaactcagacccttggcagtgaaagtgcaatgtcctaaccactcggagcaccaaagaattccgaaagtgackttcacactctctctcacacacacatacacacacacccaggacccataaaataaagttcaaatgtaaatgacaaaaatataatataagtttaaatgtaaat

SEQ ID NO: 32186 - DNA, 201 bp, Bos taurus
atgcctttattccttccaatgtaccagtaaaaacatatttagaaaagtattaatccagaccaacacctgaaataccaatagttcacctttctatgagtcayttgacgacagtaaaatatatactccaactgaacagaaccacccttatgtttagtactaagatttccctaactcccaagactaacatatttttattgtctc

SEQ ID NO: 32187 - DNA, 201 bp, Bos taurus
tcatctttcattttgcatcctggcctttcatatttgctttgattaatattttgattattttttgaacaaatggagtcttgaaaaaacaaggctttctttcyggccttcagcagtgctctttcatccattcctgctgctgctgctgctaagtcgcttcagtcgtgtccgactctgtgggaccccatagatggcagcccacca

SEQ ID NO: 32188 - DNA, 201 bp, Bos taurus
atgaataataaacatatctgtcttcctgaatttctcatgggtgtatgtctagaaaacttacttgatttacgtattgaacaagaatatatttttttcaggcyaatcagttgacagtgttatcagttgacaactgaattgtcaaaagttattaaaagttgacttttggttgaaaagcatgaaataacaacactgcagaatgaa

SEQ ID NO: 32189 - DNA, 201 bp, Bos taurus
ttcaatattaaaaacattcaagcaaaaaatgtgtagaagacataaatagaaatttttccaaagaagacatacagatggccaacagacacatgagaagatgygcaacactgctaattgttgttgatcagtcagtcagtcatgtctgactttttgagaccccatggcctgcagcacgtcatgcttccctgtccttcactatct

SEQ ID NO: 32190 - DNA, 201 bp, Bos taurus
atggtccaattgaggtcagaaaaagagagagatctttatttctatcagtaaaccacagtggtgtgtgtgtttacatctatgctattgtgatgatgaattarcatcatttttatcacctggccacttcacaatacacaagaatttaggggtgagttggtcaatatcaccatgacttccattccagagttcatggctgtgtgt

SEQ ID NO: 32191 - DNA, 201 bp, Bos taurus
gagcccagcttttccaggaagcctgggccacggctgtctctgggagcaggcaaggacaggaggcaggctactgggccctggggcgcagctgagcaggcagrgcaggtccgcagtcactccctcactcatggagggtgactttttgagagacaggaagtaaggagcgtgggtgggcagggccttcgacagaattttgaggag

SEQ ID NO: 32192 - DNA, 201 bp, Bos taurus
gtcctggatattctgtttccatcccaggagggcctgcatcgcccagttttagccagcatcctgataggtcagtttagcaggaatccctcattctagaatcrgaagactcaggccaaacttctcagccttttaattagtcagtccctcagtcatgtccagctctttgcgatcccaaggcctgtagcctctgtactccggctc

SEQ ID NO: 32193 - DNA, 201 bp, Bos taurus
tttcttataaatccctctcaaggtagctactgtaactttaagcatgtggaagacttctcagtgaacgctcactggacggaatgacggggcctcaggggccygtcctgacgggtgcagcagcccggctccctggcgcctcggttgttggagacccaggtgtcgtgcgtctgcctaggccgactgagcacggttggctgtgtg

SEQ ID NO: 32194 - DNA, 201 bp, Bos taurus
actgttcaccatgtaacaagagaaggctttgaaagaggccaaaagctcgaaataccaaaaagtatttggccctcatatattctatacgacataacgtttgyaatcctatagctgggcccattctgatcctaggataagctagatatctttggaactgatttattactccaaataaggagaaatgttttatttccaacacat

SEQ ID NO: 32195 - DNA, 201 bp, Bos taurus
cattctaaataggctcctcctagaaaatcttctgtaggtacaactggaagatttccagaagcactttggaagaggaagaatctgtttccctgattctgagwagaatttgagcctcagagaagcctcagtcttgatcataataccttttgttttatatataaattcaggtatctgaatcatcacaaactccttcaaacttac

SEQ ID NO: 32196 - DNA, 201 bp, Bos taurus
cataatcttacaaccacaagaaaacatgtataaaaataaagtcacccaagaaataaaaatttcacatatgaatgattattagtaaatacatattctgtctwtatttggagtgttgtgtcaacaaaaacaaacagtcggtttctagtttgttagtactacagcataatgcaggaggttttaactggacagcagtactttaaa

SEQ ID NO: 32197 - DNA, 201 bp, Bos taurus
caaacaccattctacttttcatatcagatgaatgaaattgactacaactgactaaactttaaagactgttcctttaaaacaatgtttcccaactctgtgtrtatataaattaccaacttactacactggatgatctttaagaactaatgtgctatatccaaaaaatcaaggaagtttagtaacatgatgaaattgatgagc

SEQ ID NO: 32198 - DNA, 201 bp, Bos taurus
ggctttaataccattccttgtttggtgacagagtatgctattcattgacaggcaatatcacagtgaacagaggctgattctcagagtttcaggccatcttmtctggatactagtacaatcattattgggcaatgagaagcaatgaaagagctggcttcctttccccttcctttctcactttcacagtttattttaacctgt

SEQ ID NO: 32199 - DNA, 201 bp, Bos taurus
atgcattcctcttgaaaccgagaaggaccctgcaaggccctcctgggtccaagagcccctccatgccttccatttattgtttgcagaaaaaggcttcaacygcataggccttccctgagttccaaggtgcagattcaagcagttactaattatgtaagtgagagaatgcagaaacaaaggaaaagcagacaagaaaaaata

SEQ ID NO: 32200 - DNA, 201 bp, Bos taurus
caattactctaaacaggccatgttgctgaccctttgtcctgagacagggttggggaggagggataagaacagctgtctgctgcaccttcggaggcaggcasattctgtcagagcctcaactgctgcaggcctgaactgggtggcttcagggattgggatgccactttctgtgtggtagacctaactgagcttcagctatcc

SEQ ID NO: 32201 - DNA, 201 bp, Bos taurus
agagttgctggccaaaatccctctcagtaagggactggtctctgctgcccacggtggctcagcccagttctaaccctagcccactcatatactgaacacartagaagtggccacatgtgcctgctatctcctctcaaacctgggacaggccagcagtgtttcccttacacacctttgatacaattaatgccagttgagatc

SEQ ID NO: 32202 - DNA, 201 bp, Bos taurus
tctgtttggagacccctcagccttccaccatgcccatacagaaatgctctgtcatacacaccgggaccagcacgatggcccggccaagtgcctaagaaggygggcaggaatgcacgggggcaggagaagaaatgcccgcaggcacaactcatccagcaccgagcaaggtcttggcctttttctctgaatcccctgttggct

SEQ ID NO: 32203 - DNA, 201 bp, Bos taurus
gccacacaggaccagagccaagaagagccaaatgagggttttagagtgaggctccccatcccttcacttttttccatttaagaaaagaacagaaaagaaaragcaggcaggaatatactagaggccaaaagagtaaaaaacacacttataaacaaaattgcaaaatctgaaaatatttctgaggtaagtgtaatataatgt

SEQ ID NO: 32204 - DNA, 201 bp, Bos taurus
aaacaaaaaaagttccgaatatgataaacataagggacctaaaataaactgagataataaatgtctttctcactctcattcatcccttcaaactatgtgtyctagatgctgtgttatttattcaacgcgatttggcttacatttggaattcatgagataaggctactcagaagaatacattttagctactaataatggaca

SEQ ID NO: 32205 - DNA, 201 bp, Bos taurus
tttctctacaggaataaagataacataaggggagtctctcaagaggattggagacttcagtactggccaaccacttggtaactttttaattatcttttttytcttctctgtatttagaccatttaattcatttagaatccccattgaaactctaacacctcctccaccatgaaccaattatggaaagacttcctccataca

SEQ ID NO: 32206 - DNA, 201 bp, Bos taurus
tcatatgatgaaactagttgtgaggctttaactgaagttcaacttctttccccaaaatattgtctaaacttttggccattgcttccttatttgttaggttrtgcttagaacaaagaatgtttattaatgttcaaaggaaataattcctgtgcaggatatggcaatgaagtttgtggaatacagacagaaaaccaatattat

SEQ ID NO: 32207 - DNA, 201 bp, Bos taurus
actttttagcttatgagaacctgtgaggcctctggctctgggagtggtcctgtagcagttgctgtaactcggggagggaagtaagaaatggaattgatggkggcccaatatatgtgaagttactatttaaaggaatcgtatttccttcttcgtctagaaccaaactaggcaagtcaggatttatctttaggttagggaatt

SEQ ID NO: 32208 - DNA, 201 bp, Bos taurus
cattacgagggctgattagttagatgtagatgaaattagagttaaaatgatcatatgatttatcatcaatattcagatacctttgagagtaaaatggggcrctattaatacttaagccaagtaacaagtataattggggtgaactgggaaaactgggacctatgatccatctagatggggagactagccttactgaatgaa

SEQ ID NO: 32209 - DNA, 201 bp, Bos taurus
aaccaccaaggaaaaggtattgttgctttgtttttctggtacaaattcagatttcccttttgaaggtatgtccttcatttctacatcttaatttgatacayacaagtagtacttaaaatgtatttgtgaacaaattccagacttcctttgtttaactgtggatgatttataagctttgaacatatatattcttagtttact

SEQ ID NO: 32210 - DNA, 201 bp, Bos taurus
ataattttattttttatttttatacaattttgaaaagttactttgcatttacagttattacaatatattggctgtattccccatgttgtacaaggcaaccygagtctatcatacacccaacagttagttcttcccactccacccaattatatgcccccatcttctttgataaccactaattttgtccctatgtttgtgagt

SEQ ID NO: 32211 - DNA, 201 bp, Bos taurus
ttgagttcctggtgcccatgctctaaataacagtggcgtgcctcttgtacacacacacacacacacacacacacacacttcccagattttccagacaactrttgtaggaaacatgtctcacccttgaattttaaagatctttccaaacttctcattttttagaggaaggcaatgcagttaccattgattaagggatgcttg

SEQ ID NO: 32212 - DNA, 201 bp, Bos taurus
ggatttgatttcacagaacagaatatatccattagagaataaaaacagcagtgtatacaactgtaaattatgtgttgtatatatgttgtcctctgttttgkacaacaaaatgaggtgaaataattttagggcagggattctcctattctttctttttgcttaattaattagaagtgatgttacttattatttctcttcaaa

SEQ ID NO: 32213 - DNA, 201 bp, Bos taurus
aaggatctgtgaggatggtaacagagagcatcaatacagtaaagaatgtgaaaaaaataagttaccaatggctttgagctgcttcctgttaccctattaayatgtggacaattttaagacagaaatccaaaatttagtggccggggaaatctttatgaatgaccgtgttaggatctcttctatctcaaggattttggaaga

SEQ ID NO: 32214 - DNA, 201 bp, Bos taurus
ccctttgtgttatagccacagtacatttgtactacctttggtacaaaataccaatatttttctgcataacatacttgattttatggtttaaattgccacaractagatatcattcttctcaaaacatacacattcatttaactatctatataaatgattttatttagaaaaccctatgaaattaatatgaatttaaaataa

SEQ ID NO: 32215 - DNA, 201 bp, Bos taurus
agtctcttattttttccccttttctcacaatttgcatcaacaacaacaaagatgacatgctaagaactgtgtaaaatcatatttgttgagtgaaatggaarcaattgaggaaaacagaaatcttctccttagttattttaccttgcaacatatattatagagattctgaaaagattttcacaatattatatattccataaa

SEQ ID NO: 32216 - DNA, 201 bp, Bos taurus
attctaaacaaaagcaacatagcacagtaaaagaaaaacaaaattttaagttaattcaactcacttatttaaatggtagcctttgagattttagaagacakaaaattttaactttgtctattatttaatgctaattcattatataacattttaacaatgagtttcatctaaaagcaaagtttcttttagtgttttctcttt

SEQ ID NO: 32217 - DNA, 201 bp, Bos taurus
gggtgttatagtgccccagataatttagattgtaatagaacccaacattgagctttggtaaaattgtttctcctgagggttggcctaataaagaggaacakaatgctccagaatatttcaaaatggttccttttcgcctctgcctgccagatgcatgagatttgtctccagtatttgctacaagggcctgtaaaactcctg

SEQ ID NO: 32218 - DNA, 201 bp, Bos taurus
attgttaagtaatctgtaaagaatcttatacaaatagatggtcagaattgtcagcctgatcagataaattgtggagtcctcagaactatctttgacatttrtccttttctcactcctcactataaacacgttaagccttatatttctatgatcctctttcctaagagatcttttaaaaggattttttatgtatatgtgaga

SEQ ID NO: 32219 - DNA, 201 bp, Bos taurus
ttaatgaactctgggaattggtgatggacagggaggccttctgtgctgcgatccatggagtcacaaagagtcagacatgactgagcgactgaactgaactracacttcatagggtgtggcccattgcagagggaaagtgcccaggccatagaatgtggtgtggttagttttcatgatctgggtgatttcatatgctaatga

SEQ ID NO: 32220 - DNA, 201 bp, Bos taurus
gtgcacaaatttcatggtctacaggtattgaagtcttacagagtctgttctcttattcttatggagttagttccactgttctacttagtctgtactttgaycagtaccacactgtcttgattactgtatgtttataatcttcaagcgagatagtgctacctccaaccatcttccttcacttatttattgtgatggttattc

SEQ ID NO: 32221 - DNA, 201 bp, Bos taurus
acaggttaaaaatggtataggccaaaatatagacttttggaatttttgctgcctcaatagatttagtatattttttaccagctttataaaggaaggaaatrattaattacctgtaggccacttagttaatcattgtcatcattcaaaacacagtgaaacaaaagaatacctaaattaacaaacttactaaatatatgagtt

SEQ ID NO: 32222 - DNA, 201 bp, Bos taurus
taaaattgagtaaagacacaatcatttccagtattacaactgaaattatttttgaaagtcagtttgtcatctttccaaatgaattctttctcacaactcayacaattttttaatcaaataatcagtctatttaaaattttctcttacaaaataagatgcatacaagcatcactttttgataccgattttacaagacacaaa

SEQ ID NO: 32223 - DNA, 201 bp, Bos taurus
ccacacaggaacaacaaaattgataaataccttgagaaataaagcacatgaaaagaattttagggaattgttggaaaatacagatattttaaaaatatatyaatgtttactatttgctactgtcagaaaacactgtaaaaactctgaaattgacaaatatacagagcattgtattaaaccctcaggttatttctgcctttt

SEQ ID NO: 32224 - DNA, 201 bp, Bos taurus
cttcaaaatgatttttttgttttttgacttgtggtcagcttatgaggcacccacttattgagttttttcacctctccaattcacttcaaatgtcacatgaycataggatggtctacattgagttcttggataatttctcatgcagttgtaagaggatcagctttgatgatcctctcagttggtcgttgtcaacttcgatgg

SEQ ID NO: 32225 - DNA, 201 bp, Bos taurus
tgaataaccataaagtcagactaagtcatatataagtactttgcttcaaaacacattggtaagctgaccaaacctctttgcttatttcatgaggttgtaartcaatctttttataataaagacaattatattttatccacaaccctaataaacatttttatgcaagtactttattttatatttttctttaataatgaatac

SEQ ID NO: 32226 - DNA, 201 bp, Bos taurus
caatcagattgtgacgtgtgctgaaaagtgggttctatagacaactagcgaagaccagctcagtggttggaccaacaagaaactcccagttcagttcagtyactcagtcgtgtcctcctctttgcgaccccgtgaattgcagcacaccaggcctcccttgtccatcaccaactctgggagttcactcaaactcatgtccat

SEQ ID NO: 32227 - DNA, 201 bp, Bos taurus
aacagattttgtggacaagtctgggcatagtgttattggccacagatacggcgtatgtctctggattacctggctctagtgcccagggtgagagcattcayggcttccacaggactgtagtagactaaagtggttccttatatgtacacaattttattttgggacatttattgaacagtcacagctgcctgatacagttgt

SEQ ID NO: 32228 - DNA, 201 bp, Bos taurus
tctggtgggatacaggccatagcgtctcaaagaatcagacatgacttcaacaacttagcaagcaagtttgtgagtaggtcttctgctcgttatagttctgytagtcatagttcagaacacaagattatagcatgcctacattaattaaaggtactatttaataatgcaatatattttttccagttttctagaaacagtcta

SEQ ID NO: 32229 - DNA, 201 bp, Bos taurus
attactgactttatcctgaaaaaaattcctataccttatcttaaaattgaaacttatttgaaacaaaaatctgcttttttttttgttgttgttcattaatrccttcatttaccttcacttttgtgctctttttgtatgtacagaattttaggttggtaagtgcacaggtgttgttgctacagttattgtcattttcagtac

SEQ ID NO: 32230 - DNA, 201 bp, Bos taurus
aggatggagttcaagcagctagatatttagagatctgggagagaaatattccataagaggaaaaagcaaatgccaaagacctaaaatggacattttttttwaatatgaatgagaaaaaaactgcaagggagtggctgaaaccaagaatagaagaaaataaagccagaagggtaagtatttgattctagaggcaactgattt

SEQ ID NO: 32231 - DNA, 201 bp, Bos taurus
gcctgagaatcgttccaccgaggaattgagaagtgctccttctaggtccctaaccagttaatcaaatgtatttcccactgtccacaagttaatgtgcggcktgccaggtgagtcagtcataaagaatccacctgccaatgcaggagatgtgggtccaatcccagggtaaggaagagcccctggaggaggaaatggcaaccc

SEQ ID NO: 32232 - DNA, 201 bp, Bos taurus
tataacccagtttacttatctaattccagttggcatttgagtttgtgtaactaagacttcacaacctaaaactctggcccctatttacctttaatttaatytttgaaatgtcaaatcttctcttggaacaaaggaaactctaagacttcacaacctaaaactctggcccctatttacctttcttaggcttgatggtagatg

SEQ ID NO: 32233 - DNA, 201 bp, Bos taurus
taaactctggagttggtgatggacagggaggcctggcgtgctgcgatttaccgggtcggaaagagttggaaccgactgagcgactgaactgaactgaatckttcaaataaacgcaggccaggcaaatagacttaaattagtaagcaaatgttggcaactaaagccattcagatattaaaatattgtaattaccaaacagaa

SEQ ID NO: 32234 - DNA, 201 bp, Bos taurus
aaacctttgaagagtttggaggataggaatgatgccagtgtgctgtggagaaataaatgccacggctaatttaaaaagaggaaggaaatagaatccttcayctatttatcatttatatgtttattttttgtcctactaatttcatatagggtttgaggggatttatacaaaagtgtaggttagatggtaaagaatctgcct

SEQ ID NO: 32235 - DNA, 201 bp, Bos taurus
tctatagcaatgaagtttattctataattacaatgtcaatgaaagaagaaaattaaatagccaatcttagagcaaaccttccaggcctttattctcctgtrttgtctctccaaatgtgtctctctggtgtagccttctaccagtggtggtgggggtttagttgctaagtcatgtccaactcttgtgacccatggactgtag

SEQ ID NO: 32236 - DNA, 201 bp, Bos taurus
acattgcccagatgggcataagaggagtcaactcctttatagtagatgaaatcaatgtctgctttgatgttaaccatttaaataatatttattcctgcctyttgttaacatacataaaagtcattacccaataagccaacctgcttttaacatatgccttattgccatataacttgtttctcagttcagttcagttcagtc

SEQ ID NO: 32237 - DNA, 201 bp, Bos taurus
aagtctaagatgtacttctggaaaatgcataggtgaggacattgcagagcacacaaggaaatattttactggtttcatcccatgacctgttatgtttcaartatccaagatactatgatgtttcttcataaacttgaggatatatatttcttacaatcgttattaaatatttctaggattatccttacaattctatgttct

SEQ ID NO: 32238 - DNA, 201 bp, Bos taurus
tatttccattccaacttgaagtccattatatatatctatatatacatataccacatttaaaaaatggtagactaaagttgacaatttttcccaattcaagkataatataaattttatacaagattacaagtaaatctttattgttatagttcaagagtagttagactcagtgaaatagcaaagtcaatgaaaagcatcctt

SEQ ID NO: 32239 - DNA, 201 bp, Bos taurus
gaaatagttacactggttggtaaaatgtttgctttaagttcctgttgtaaactgtatgtaaaatctgaaggagctattttgataatacttgtcatttacayttgaaaacctgtttatttctcccatgaataaagtcatacttttctgttctttctctcctgattacaaactccttcaagctgactaaactttgcacattca

SEQ ID NO: 32240 - DNA, 201 bp, Bos taurus
ttcaagagcaagaatggagaggattcatgctggcttcctgacatctgaatttctttatgcctggataacaaattctgataacaacccacacttcctttgtyacttgtactttttttttttttaagaaaagaaaacatgaaaaggaatagaaaaacattgtttccttgattttatcctggaatttggcagcactgacagacg

SEQ ID NO: 32241 - DNA, 201 bp, Bos taurus
attttattttattgggtaaagagaaaatcatgtaagcaagaacattccatgatcttcttagttcgatcatgacagtcaatcaaagaattctcaaagtctcyaaaagcaatcaaaattttttcatgtcactatgtaaattaaaattttcccaaaacactgtaagtgaactgctaagattttaggcaaaaactgtggtttttg

SEQ ID NO: 32242 - DNA, 201 bp, Bos taurus
tacagttagccttcactaatttgatgactcaaattagtcattgtgagatataattaaatagtatggatgattcagaatctaaaggacagagatttatacaytggtccatcagctatttcctagaacatgtgtacagtaaaaaggtttacaaagaaatcaaagaactgaaagaaaatgtagttgaacatatgtattattggt

SEQ ID NO: 32243 - DNA, 201 bp, Bos taurus
tcttctccaactaactgtgacaccttgtgagccattccctaaggttatgctccaattagagaggactaattagaaaaactgcaccagaaaactgtgcaaaygtctgctgcttcacatattttttgaactgttgaactatacaaagaaacaaagataaacgtttgttttttggtaagtgttcaagtttcattttagatactc

SEQ ID NO: 32244 - DNA, 201 bp, Bos taurus
aagatatcactgcacacaaattagaatgaccaaaatccagaacacagacaacatcaagtgacggtgagaatgtggacaacagtaattctctctatgtattyttagtgggattgcaaaatgatacagccactttggaagagtttgatggtttcttacaaaacacactctttccatacaattcagtgttccttctcctcagac

SEQ ID NO: 32245 - DNA, 201 bp, Bos taurus
gcagagggaaggggttccatacctggttggggaactaagatcctgcatgccatgtggcatggtcaaaaaataaaggagtcaaatgatatctctgtttcccrggtacattctcttgttcttcctataataagagaatgcaggatttctagggcacagacaagttgctgctgctgctaagtagacaccagctaaactgaagaa

SEQ ID NO: 32246 - DNA, 201 bp, Bos taurus
tcatagaagttaaacactctgtctcccttgagactgtgaaattgttcacaggttcacaaaagtccctgatgttctaatagctgagtgtcctgaggaacttkattactctgactcacgtttggccagaatgattcagcattaggaaatttattcgctgggtcaggactgttctgtgcatttgaaacattaaacagaagattt

SEQ ID NO: 32247 - DNA, 201 bp, Bos taurus
actgctaataagctgattgcccttgaaaacagcagacacctctttagtgctcttgggactattataggagtagtttgtcaagaatttggcccaagagatcwaacatgccctaaaaaatatttaccatatgactttcatgtgtatttgtggaaaagaatgagtggttgacttaacgttaaagttaactacataaaattagat

SEQ ID NO: 32248 - DNA, 201 bp, Bos taurus
cccacaaacaagattttagaccatgttcaatttcccaacttccaatgatcagatattttttcatgacatttaattcttactatcagatattattcaatgcyctggcctcagttctcccaaagctcatgaagaatgtttctcctccgaggctattgctttgtcctagatcttaaactcaataagctacgtatcttgagtctt

SEQ ID NO: 32249 - DNA, 201 bp, Bos taurus
ctgagtaaagaaagagggttggttgtctgtcttactcttgcttctgtaataggcttgtcctgtcctcagtgattcttttgagggcctctgggagcccttcyctggagcaaggattgccaaactttttctatgaagcacccaataggaaatattttagactttgctggccatgccttcttttgtcctaactgttctgacttt

SEQ ID NO: 32250 - DNA, 201 bp, Bos taurus
tatgtttgatctacagtgatgttgatgagaaaggcctgcaggccaggatgggacccagaaaaccagcagcagacagtgactcagcctgtggctccatcttycatagggacctgtgagtagtgaataaggccgtcactggtttcagtggctcattatgcaaaaatggataaagacctaaacaacaaattttttttttttaag

SEQ ID NO: 32251 - DNA, 201 bp, Bos taurus
agacaggcaaacatctgaccctggtgattcttcgctaacgtgactcctgctggctctgttcacagccttgggtttcgggtctggtggcctctgctcgttgrgtttgttcttcaactctgtacttagagttccatagggaattactcctttttttccttagacactcctggccctgcctcggagacactgcctcctcaccgt

SEQ ID NO: 32252 - DNA, 201 bp, Bos taurus
tcctctaaagcaaacagaggagaggacaggcaatgaaaaagggggtaaaagtgaaatccaaaatcctttgcctcaaaatgtaattttgttgtaaccgtgtygttacatatatgcttgtttctaagtacagatttgttttggaggcggggaaaagctcctttcttgcatgctttgcgtcccagtagatacacaatgtgcttc

SEQ ID NO: 32253 - DNA, 201 bp, Bos taurus
ccgtttcttttcttcacagccaggtaccttcaaaggcctacgtgtgcttgctgtctgccacctctctctctcatgccccttaagcccactccagtttcctycacaaatccacgaagcagtctacccaaagttaccagtgtcattaattcgaggggctaatgtctagtcttcatcttacccgatctctcagcagcatttaac

SEQ ID NO: 32254 - DNA, 201 bp, Bos taurus
gtgccacactggtttccagtggccctggtgacaactgacagctgcagacaccctctagttttcacagcttagggctccacggagctcatcagtgtcaagcycagtggcctgctccagcagcttttgccactgacgcgatgacagccatcactgcggtggatccctggagagggggacattgctgcatgctcacccactccc

SEQ ID NO: 32255 - DNA, 201 bp, Bos taurus
catcaaagtgaatttaatgcaaaataaggtagagctacttttttccttacttaaatggaacatcacaaattggacagggtatcaaaaatgactattatacrtggttgcattcagtgtctttgcctgtatctattctaaaggatttggaaatcaaatcctctacagcctgaattgcactacagcagattataataccttcgt

SEQ ID NO: 32256 - DNA, 201 bp, Bos taurus
cagtggcacattatgtatatgaggagacgtatgaaaaatactgaggccaaaagcctcacctaagacttcttaaatcaaagtatctggggagtgagaaccargcatcagattctaacatgtggccacagttgagaatcactatcttagatgggaggctctccaaagggtcgcactaggtcttaggcataaatattcataaca

SEQ ID NO: 32257 - DNA, 201 bp, Bos taurus
ccttctctccccactgctgtcggggttgctcactcctgagacccaggccacttcctcatctaatggcagccccctctcaccgcctctcactctcgccaccrtctttctgcttgagcaaacccgtcccacatgattcctcagatcccacagacaggatagaggcaacagaacgctttttcctaaatgaaatcctacaggaac

SEQ ID NO: 32258 - DNA, 201 bp, Bos taurus
aaagcttctttaagcgcatgtgtgccttatgggagaaaaggccaaagcaagggaagtgtgatttaataggaagagcctggctttgggatcttattggtccrgtctcaaggtctgacttggccacttgctaacaataggccctttgcaaatggcttaactctgagcctgagttctcctcctgaaatgaggttagctgggggc

SEQ ID NO: 32259 - DNA, 201 bp, Bos taurus
ggcatattagaacacttaacagtctttaactgacagttgagctataaacagttaggaacatatgaaggacccaagtacgaaagggttagtgatgttccaaygacatggagcccatagactggtgtccctggaccaattgcagaatcactgaacagaatcactaaaggctttttttaaaatcacagagccttgagtctcact

SEQ ID NO: 32260 - DNA, 201 bp, Bos taurus
catacactggaatctaaggtttttagaagaatgatgtgtctgtgtgatgtggtgaaggaagatactgtcacctgggattgaggcctcaatctatcaacaamcagctgtgtggttcacctctcagaacccaatctcagttcagctcagttcagttcagtcgctcagtcgtgtctgactctttgcgaccccatgaactgcagc

SEQ ID NO: 32261 - DNA, 201 bp, Bos taurus
cactgtgaggctgcaatttttttgtagaaagcactgtaaggagagaacacttctttgggggtattcagtagtagcaatgcagagttcaaggccatgacctytacagcctgactgctgcacctaaaatttctactctgctacttattacctgagtgaccatgggccacagaccttaacgtcccttaatctgtaaaatgggaa

SEQ ID NO: 32262 - DNA, 201 bp, Bos taurus
actacatgttagaactgacctgcttgtcttcaattttatttcctatcttttctctacataaatctttgtagagctgaaccactcattaaataaatccccayatttattttggcctgctagcaaaagtattattggatttccctaaacttctgtaactgcctcatcctctgataatttattaccacttactgtctgtagcaa

SEQ ID NO: 32263 - DNA, 201 bp, Bos taurus
gacagggaggcctggcttgctgcagtccatggggtcgcaaagagtcagacatgactgagcaactcaacagcgagcagcatggctagagagctagagagacrcaggagaaggccagaaaatgatcatcaccttagtttcctttttctcctatatgctgcacattcagtaggttttactttgtatgcctcaaacaattgtctt

SEQ ID NO: 32264 - DNA, 201 bp, Bos taurus
ttctttgtgtgtgtgttttcagaattcctttctatctgtgcaggattagtggtttcccagctttgtaagattttatcatcctttttgtcccgttccctttktgacttcctaaagcatctctgaaataagtctggctttccctgccccactgctggctgtttgccagtactgtactggatttggatttcatatttcttctgt

SEQ ID NO: 32265 - DNA, 201 bp, Bos taurus
tgcagacaataatgtcagcctcataataaatgacagggcagaggcaccttagaagtctgaagatgtccctccacctgaccaacaagctgagcggccctttmgggacagtgaccctgttttataaggcagcacgtggtcatcagtccatcatgctgggggagttgctgagcttttttcacaactgaaagaaccagcagaaca

SEQ ID NO: 32266 - DNA, 201 bp, Bos taurus
gtatctaataaagtctaattctctaaccgttttctttggaactccttctgaaggaagaactgttgttgatgtctgtaagggaggaatgcagggggccacgmaaaggctgtgaattcagacgcatcctgctgtgtgcatgctggctccattctccctttgttcctacctccacacggcggcaggtggccaacagtagctccc

SEQ ID NO: 32267 - DNA, 201 bp, Bos taurus
ttaaaagagatgtggttatgacttacacagactgtagagttagcaagtatagaaccaagtcttaaagtcaggtctaacagaaagagatcattcggaaagtytgtacattgttctgatatatttttctataaccaaagggggaaatcatgcctaaacagtgttatagttttagtatataactggcttggggccactgcgttg

SEQ ID NO: 32268 - DNA, 201 bp, Bos taurus
acttgctttaacccctaaaatgtggtcaaaaggacactgctgtttgagaagaagcctagctaccctgctggagagagcatgtgaaaggaccacttttgttktttagtccctaagacatgcccagctgttttgtgaccccatggactgcagcccacccagctcctctgtccataggatttcccaggcaagaattctgggtgg

SEQ ID NO: 32269 - DNA, 201 bp, Bos taurus
ctgtgcatagttatttaatgttctagatttccactatttctgaggatacagtcctgaatattgctttggttctgcaatcaagttctgtgtaaggaatgctrtgtgttggtagtaaaaatttatgttattaatgccagttttagaatgctaaaaagttaattttagaaaaacttaaaaaattttaaatctatttatggctgt

SEQ ID NO: 32270 - DNA, 201 bp, Bos taurus
gattatgaaacagtaatgaaatagcagtgtttagaatatataggctctacaaaataactaatcaattcctattatatccatctctttcatattttttccargaagaaattgaatcagctgatcagataatttcaagatccattttttaaaaaatttccattgtacacactcattaagtttgttaatatcacacatgacttt

SEQ ID NO: 32271 - DNA, 201 bp, Bos taurus
cttcaaaggcttttcagaagagcagctgattttcacagtctgggaagctttggcttaggatccttcaagcttccccaagagaagcatgagctgctcacgckttgtctctgtatgatctcttggtatgaagcctttgggcctggacatattggctgcgcatgtgctgcagtccagttgtgtgctcttgagaagataagtcag

SEQ ID NO: 32272 - DNA, 201 bp, Bos taurus
acattttgcattagagttgcagcttgtggactttcttctggtgggttggtggtgaggtatcagggtgatgctttgggaatctttatcatcagcttggttcyagccagtctggggtctagtgcatgtgctgtcaccatcttccatgggaagggggtcttggtttctacagagcaactcaaagattcatgtcagattgctatg

SEQ ID NO: 32273 - DNA, 201 bp, Bos taurus
cacacccagacaacttctacttcagagcgctttgagatttagggcttagcacacctccattttctgcccctgagcacccaaatgtattatttgcgtgtagyctcacttcctttctcctcttctcagagtgatgtctcttctccttgccctgattctctgacaccacctctttttgtgttctcttatattgatatattgtgc

SEQ ID NO: 32274 - DNA, 201 bp, Bos taurus
gtgggcaatcttgacatttatgggctttgtcaaccctccttctcaaagctctggtttatttagttttggtttagcccagggtaactcatttccaggcctcygatgactggctcagcagtttcccttcccatagctcagctttcttctttctgatggaaagaaatgccctcaaggccaatatgtatttcaactcatgttact

SEQ ID NO: 32275 - DNA, 201 bp, Bos taurus
attgaaatataaattgtaaataacagaatttttattaagctacccctttatatatagaataacaattaaatgacatgcaataatattaaaagatatacttyagtcctttaattatatatgtttaaaagtagaaacagtacgacacttaaggcttactctttgaaggcattcttttgatggaaaaatgcagcccctaattac

SEQ ID NO: 32276 - DNA, 201 bp, Bos taurus
gccctccgggcccaccgggcccaagagggccgcctggggacacagggaaggatggcccccgcggaatgccaggcatgcccgtgagttgcttttttggatcygttgttctcactggttttgtttcctttgaagtgctgagaattgggatggagttggggacgaggggctggtggaggtcaggtgagtggagtcggttgaggg

SEQ ID NO: 32277 - DNA, 201 bp, Bos taurus
actgtatttttaatagactttattttttagagaagttttggatttctaattactattttaatcttttccattattcttaaaaaaatttaataccacacacytactaggaaaaatctattttatagtgctaaacaaaaaataagcaccttctatttaaaaaatgatttctccagagcctcaaaggaagatgtgtggaggaaa

SEQ ID NO: 32278 - DNA, 201 bp, Bos taurus
tggccaaagtctttgaaagtattgcatgtgcctgctaatccaagacctctcctccagttcatcacaaatgcccagccatgccatccacactgcacttctcyaggtcaccagggccctccaggttgctaaacctgctgaccatttttcagtcctcatctcctgggacctagtgggggctgatgacctaacggatcactctct

SEQ ID NO: 32279 - DNA, 201 bp, Bos taurus
aacttagactttatgcctactactcaatttagagtgagtagtgatgatctcttgttttaagagcaatgatgagattatattcccattagcaagttcttgcygaagttatacagactgtgctgtttgctatatgttcaccaaaatccatttcttacctactttgcagacagacagcctacatctgccagcctcccccgtact

SEQ ID NO: 32280 - DNA, 201 bp, Bos taurus
gtccttcaagcgactattctagactttcccctgaaatcattaatacacaagcctgatgaactgtaactttcaactcatcctgggtgcaaatagggataacragctcccttctgccttcctacggtgtatttcaatgcctaggcacaaccaggtggatttatttctggagaatgattgtcttcaatttaagtttcatagcct

SEQ ID NO: 32281 - DNA, 201 bp, Bos taurus
cagagcctggaagtggcacccagaagggcccacggttgcccttagtggaagctccttaatggctccccagacacagagcagtaagccagagactcacccaragccaggccagtgagctaggccccagtcgggccgccggcctctcggcagtgcccgtccgagcagacactcccacgctgcagccacacaccgagccgcctg

SEQ ID NO: 32282 - DNA, 201 bp, Bos taurus
tttaaaagaattatcctcctgcctggagatcatgcttacatgtggccatctctctctttctgaaggtctgttccctcttccacttcctaacttgacatctrgtaagaaagaattttgcttagcaactgaaataaaacccccaaaacccagaagtgacacttagttaaaattaaaagtttaataaaaacatcaaaaattatg

SEQ ID NO: 32283 - DNA, 201 bp, Bos taurus
ggagtggagagttggaaggaaataactcactcctggcccttagtcactaatgtcaagttttcccagcagaattataggcaggatttggttagagtgggatrgaaaaggaaaagaagggaagtggccctagtggtatgttttaatatagcaaagcaaaacttaattaaatggacacttgatgattccttctggtgaaccatt

SEQ ID NO: 32284 - DNA, 201 bp, Bos taurus
tggtgtgctgagtggagaggagcaactgcagaggattcactgaaagaggtcatattttttcagggaggatggtggggaggggcccaccgtaggtgttaagmgatggggaagggagggtacctttgccatcttcccaaataaatcctggcgctcagaactctgtctgacctgttctctggtggccacataggctttaatgtc

SEQ ID NO: 32285 - DNA, 201 bp, Bos taurus
ctcctttggaaataatgtctatttaggtcttctgcccatttttgattttttttttaatattgagctgaatgagctattggtacattttggagattagtccyttattagttgcctcttttgcaagtattttctctcattctgagggttgtctttttgtcttatttatggtttccttttctgtgcaaaaactttatagtttaa

SEQ ID NO: 32286 - DNA, 201 bp, Bos taurus
gaccgaggaaagaagatagaactctgtgaagtctgaacatctgttaagagtcatgaatggcttcggggatgagctcatcagcaggtaggtcaactaactaytcaacccagctatcatcagccaggttcacaactgttgccccgttgagaatccctaatgtgtcccaggggacatgagattagatagtcatccaaagaactg

SEQ ID NO: 32287 - DNA, 201 bp, Bos taurus
gaaaggcttggcaaaagcaagccacctagagggaaaagggtaatgcaaatgaattgtttggggaaaacatggggaagggaaagactggctccctcagtctragttgtgaaaggttcgtcattattcttgtctctgaagtctcctccgccaaccctgcttcattcttctgaatctggggctagaggttactcttcaaagcaa

SEQ ID NO: 32288 - DNA, 201 bp, Bos taurus
aaacttcctatgcttcctctcaactcaatgatttcttttcaaaatcacatgtaatttattattagccagagttaactcagagttaaccttggcctacagamaaaggctaaactggtgtcaggcacttttcagagaagcagggaagcctactagctgtgttcctgtcacaactgccgcagaaagcagaggcctaatcttgag

SEQ ID NO: 32289 - DNA, 201 bp, Bos taurus
cagctatgttcttcacctactgttagagactgttagttgaagtattgctgccttcgtgtaaaactggtcaagttagaagtctgccacagtgcgggcctctytgaggctgcttttgctctcagcatattcagagcattaccagtgcttatctgaggacaggtttagctgggggatgtggcctccagtctcctgcaagctggc

SEQ ID NO: 32290 - DNA, 201 bp, Bos taurus
ttctggcatgctgtgaccacaaagtagctttggacacaaggagagactagtagaattgaagacttgggccatggagtacttaaagcacaccctgagccctycctcgtatcggttgattctgccattttcattccaacaggatgggttcatgacagtctgaattaactgtaagccaacttgttgtcagtgtgatccatgcct

SEQ ID NO: 32291 - DNA, 201 bp, Bos taurus
tttcaagctcaggatgtccagaagcaagtgtaaaagcagcagtgatgtagccagtactactgtatttttcaaggtgctgtactgcatgattaaaaatatcrtctttactttttgtgctgtttcttatacattatttgtgtgaaaagtattataaacctattacagtacagtactgtatagctgattgttttagctgggtac

SEQ ID NO: 32292 - DNA, 201 bp, Bos taurus
agacaaagtacttggaagaatttaggagggattttcatcttcataggttcctgatgccaaaaaatggaactttgaataatttctttagcacagcataaccrtgaccctcagatatcagatttaatattctcatttcgcatttcatagcttctacaaggttccaaaggagaaaaagtacattttttcctccagattaatatt

SEQ ID NO: 32293 - DNA, 201 bp, Bos taurus
agtgagcggtctaagagatgagaggaaacaaagtggaacctgcaatgccttttatgacctcgcctcaggagcgaggtcttattggatagaaaggtcggccrttaactctattcatttgggagtagacaacacaagaatgtgaaccccaggaatccaggggcattgggggtcatcttagaggccggctatcacagaagtctt

SEQ ID NO: 32294 - DNA, 201 bp, Bos taurus
agtatgaaaatattttatgtgatttttttcttcctttgtcattgtagggacatgttaaattggctaaatttggactttatcacatgacagcatatggtgaygatgttgatttcccaattgggtaagaatatgttttgggttttttttttcttgagttctatcttaaactttctaatcttttattaagggtttatttgttaa

SEQ ID NO: 32295 - DNA, 201 bp, Bos taurus
agaaggtaataaaactaaatctcaggacataaaattttaacatatcattgacaactctctgtctggttcatctttcagggggagaacaaagacaaaacatrtgtgtactaattctagttcactgctctgtgtgttgtgctgtaactctgtggtgtgatcatcaggcctaaagtaaccatccttaatatccagtggaatttg

SEQ ID NO: 32296 - DNA, 201 bp, Bos taurus
ccagcagctggactgatctgagccacggcacacttccccacagacatcagggtgagactttgacatggcattagcatatctacattgcagttgacaggaargttatgctggtgacagtttttgttcctttgcagtttgatttagttcagtatggatttgagacagttcctaaagcagtgttttttcactagttaagtctat

SEQ ID NO: 32297 - DNA, 201 bp, Bos taurus
ctttgtggcacatttaaatgaaaaacgtggcaaggtctcactcttgtcttcttgcagaaataatcatgtctttgaaactcacatgagaaactgcatcttcrattgttaaactagaattagattccctgggtatacaaggaaacatgctgaattaatctcagagagcaagtatataaatctgagaattaaggcaatagcttt

SEQ ID NO: 32298 - DNA, 201 bp, Bos taurus
taccctggttaagaaaataagtcgtcctatccattccttcagcctttgatgacttatttgactgcataatcagtgtagcactgatgattgtttgggagaartgcttcggagtcttaactttgccttcctggaaaagcagagaaagatggaggagcagagatgtgaactgaatagggtggtaggtagtgagagagggtgaag

SEQ ID NO: 32299 - DNA, 201 bp, Bos taurus
tgagatccaggagtttatgcttctcaggccctccctgagaagccctgtcctccttgagggctgcccctgtactcggggcaaatgtgaatttcctgcaagayctgctccaggcctcccttcataggagttggctcatctatctctaagccacaaagatgtgagagtggaaattagtgtcactgccccaggaatatatgtctt

SEQ ID NO: 32300 - DNA, 201 bp, Bos taurus
acaggcagactcagaaagagtcacagagtcatatacttatggtagtttgagttacttttatgggatatttcttccaggtttcccttggccaatcattttamtttgctgattcagagtccatagttagtatatctcaggatccacccatgtgtatgcacacatctcttagccaacatagattctacaaaagaggcctgtggg

SEQ ID NO: 32301 - DNA, 201 bp, Bos taurus
caccagggaagcccctagttggcttactttccctaattctgagaactttgctgttctcaataaagtatgtgctgctttccaaacttatactgggctatctrttattctcagataattgagcaagctatattttatgcaaaggaggagccgtcatacaaggaaaatagtctgtgggactcccaggctgtgcatattcttctc

SEQ ID NO: 32302 - DNA, 201 bp, Bos taurus
aaggcagtgggttgccttaattttcaaagaagaaagaaagaaaatgtgttgcaggaacattaatatggcaactgtcttgatgtcaaggagaataaccagaktattactgtagtacaaaaagcaagtgaaaacctgaatctgagtaatagccttggaaatgaaaagcaggaacagatgtgagaaatgttgcagactcagaat

SEQ ID NO: 32303 - DNA, 201 bp, Bos taurus
ctaaaatcctcttaaggagaagtgggtgtctaagagctgagctgggtggggattagggaggaggttcagacagaactaaggtaatctcagggcttccttgrtggctaagttgctaaagaatctgcctgcaatgcaggagacctgggatcgatacctgcagaagaaaatagctacccactccagtattcttacctggagaat

SEQ ID NO: 32304 - DNA, 201 bp, Bos taurus
tttcactttctgtcttgccatggaataaatcattcagcctctctgactcagtttcttgacctttcaaggctgagattcaggacaggctctgcattttcagkatctgtattactattccttcagaggatattattaaattcaaaattacagtatccatggcaaccataactaggtcagtctgcacttgaagtaacaaataac

SEQ ID NO: 32305 - DNA, 201 bp, Bos taurus
aaagaaatagttgcagggtgagtgatcagttcattcacattcttggttgatgggaggtaacccagccagtagttcaggggtcaacatcatcagtcttatgygttccaactggcctggggtctatgtgagggtgtttagcatccagttaacttcttccacctggtgagggttttaatctctgcaaaacaactcaaggatagg

SEQ ID NO: 32306 - DNA, 201 bp, Bos taurus
cttcactactgcatattaacttattttggtctgctaatatttgtatgatttgtatgattttccatgtagaatatccatgtggagaaaaaggtcgaagtcgygtgtgtgcatgatacaagagaactgtgttattctttctatcaggaaaagacttagttttgccctccttatgctccctccatctcccttagtctgggacta

SEQ ID NO: 32307 - DNA, 201 bp, Bos taurus
gaagaccccactgacaaggctttctttatttgatctgacctggagctcacctattatatacagccttttccccactggaggtatttgttggcaatagtgasaggcagttgttgaacactgtagctgtctgaggtcttggtagacaaaactagctagactgaccaagaaaaagagagaagacccaaattactaaattagaaa

SEQ ID NO: 32308 - DNA, 201 bp, Bos taurus
aactagtattggtgtacaaggaagagagagttggagaaaaacaagatccagacgtatagagattaacgagagaaaaaaactatctttgccatcgcatattycttcagctggcttatttgttcatgcactttatttattcattccatgaataatattctcaagtttacagatgtattgtgtcctcctagagctacagtaatt

SEQ ID NO: 32309 - DNA, 201 bp, Bos taurus
ctttcatttttatcattttttcccaatttttaataaagctgattattatttctgatgtttggtcacttacaatgtgagcttctttccagtaggaattatgraaatgctaccaatttacttaacattacctgtttaaacagggaacatgtgacagtgacttcctggacaaattgatgaatttgtgccatttgttcatcctcc

SEQ ID NO: 32310 - DNA, 201 bp, Bos taurus
gggaacagattagaagcccctcaggcccatagtcagccatagtcttcatagggtcgaggaacgttaggcttggaggagatctcagacagcatcctgtgcarcggttctccaaggtgttctgaggcctaaatgtctgcaagagtcccctgcagaccttgttaaaaattcaaactctttggtcttactccgtgagctgaccca

SEQ ID NO: 32311 - DNA, 201 bp, Bos taurus
caggtaatacttgagagcagcttttaagaatagtgtaggaataaagggttaaaatcacttttttatttaataagatacaatatgtagaatgcatgagaatrtctggtacaccacacacacttaatacatatcaatcctgtttccttacttgagctcctgctaaccaagttagttccagattaatccaggactctcgctgtt

SEQ ID NO: 32312 - DNA, 201 bp, Bos taurus
aaatacctggctaatatatgtattctagttaacttaaatattctcatagaggatacagatttttttgttgttgttcattttaggtatttttaaagtaaagsagacaaaattttggaaagcatctcttcatattgcagttgcatacttaatgtgcaaagaaaaatatgagttcagtgattcttgataaaaccaaagtttcct

SEQ ID NO: 32313 - DNA, 201 bp, Bos taurus
ttggaagtggcagaagtacaagcaaggccctacttaaatttatgagcactcattttcactgtccaaagcaagaagtatgaccaagtcaaaggtcaggaagrataaaactctttttcatcattaggccattaaaaggatgaagatgcattatatactgtaatgatgtgaaaaattaaggccataaatttaatattccacaat

SEQ ID NO: 32314 - DNA, 201 bp, Bos taurus
gtctagaaaggttagaacactgactcagcaagtggtacagcctagggcagagagcagttctgcttgactcctgggcagcttatgatattaactgattgttycaatcccatctcttttgatcatttctaacattccaaagctagggaccctcaaatttcacctatgcttcacatgactttgagatgatgagaacagaaatct

SEQ ID NO: 32315 - DNA, 201 bp, Bos taurus
aggagatattcagagtaccttccctttgttgcaaaacttctatataacctggctcttccctttgctcctcagagcagttctctcactgttgcttgagttgytgtctcctgggcttgaagtcctaaaaatcccagtgaataaaacataattcttataaaaaaccctccaaattctaggtgggttatattatgaatatactta

SEQ ID NO: 32316 - DNA, 201 bp, Bos taurus
gcctctgggaagaaaggccatgacttttctgtaatagataagacaaatttcattatagcagccaagagagaagctgagattaatcagtgtcagaaaaactrtcaaagagaggccagtgagtatatcccttgccccacgtcacaaaaatacataaaccatccaagaaattagccctggataattagagcaggagatgtggaa

SEQ ID NO: 32317 - DNA, 201 bp, Bos taurus
tcaaaagctcacactttcatgaatgaaatctgattctttcagccatgaaagcaacgtagaccagctgaagagctggccaagtgtttaggaaatctgattgyatggttatgagttggtggtggagcagagagatgcaggtgtgataaatgtcaattatggcctaagacccgttgccataataaaaagtataacttacctaac

SEQ ID NO: 32318 - DNA, 201 bp, Bos taurus
tgaatagattatgaaagagctctgatagtaaaactgttcatactcttggagtggaattacccaaagtgtgctcctcatcttggataagttacttgcagggrtgaaatggggggagagggcagcagaaacatttagtgggtcaagaaggctgagaaacacgatgcaaaaccagtgtctcaaagtcttaaaagtgctaaaatt

SEQ ID NO: 32319 - DNA, 201 bp, Bos taurus
ctcttggcgtagtcttaatcaaagctttacccttgtagtcaggagaaaaaaatctgttaccaaaaggagaattgggatagggagaagtagacatgttagtrtgtactaactccacacttccagcagatgtaaaccagacatgaaccattcactgcaatcttcagcattatttaagacctgggtaaagacccataagggcaa

SEQ ID NO: 32320 - DNA, 201 bp, Bos taurus
tactttggttcaaggcctctgaggggtgtgtgtgacgaggaaggtttctaagccatgagtgccacgttgcttgcattttaagcagatcgtgtgcgcagtcrttatggacaacaaaatggagcataaaaccttcatgcagatgaaccactgcaatcagatcatcgtaaaagtgaaacctagatgttataagaatccaagcaa

SEQ ID NO: 32321 - DNA, 201 bp, Bos taurus
aaggataaaatagtacttgacgaatggttatagatcttaaggcagaaatgaaagaggacatgaaaaggccgtactttaaagatggaaagctttaaaatcayttgaggtagaagtaactcatttttattgtctcagaggagtagtggtaaaagaggaggtcaaattgctggttaataagcatatggtggataaccttaaatg

SEQ ID NO: 32322 - DNA, 201 bp, Bos taurus
cactactacaaccaaatctactatgtaaaattcaaattttcttggcagttattttcgtccttatagtttatctcactaaaggttcacagttagagacaaayacttcaaatctttattgatattgtttcaaagttattggagttatgcaaggggaaaatcaagagtatattaataatggcagcaaaatctggaacaactaga

SEQ ID NO: 32323 - DNA, 201 bp, Bos taurus
catatgcataaataaagatacatttttaattactaaacttaactaaaatagcatcacattattgtgtcattttaaatttaccattcacagagttatcaaartatatttattctgtgcttagcccttactgtgtccttacgtctgtcataccagctggcacatggtaagcacacaatccagactactgaataaaataatcat

SEQ ID NO: 32324 - DNA, 201 bp, Bos taurus
gcaacctaaaacaatgttgtccatatacagaccgatatattaaaacctcatgggaacagcaaatcccaaaaccaagacagatacacaacaaaagaaaaagyaactaaaacacaacactgaagacagtcatcaagccaaaagagtagaggacaaaagaggaagggatgaaaaaagacctaccaaaaattaaatcaatctttt

SEQ ID NO: 32325 - DNA, 201 bp, Bos taurus
agtcatgtctctccataaagactgtcccactgttaattatctcaagcttcagtgggtctaaagccaaattaatttattcctatcatagtgaatattccttktaccagtagtacttatatcttaatttcatgctgctttccttaccactgtccccctttgttatgcccctacctaggtcatttgtgaagtgaagtcgctcag

SEQ ID NO: 32326 - DNA, 201 bp, Bos taurus
agtttgaaaataattgatgctattcatgaaaatttaaatgttataacctttcagggagacagtttgacaatagtattttaaaatctatcaacagagacatytgctacagcagtttcacttgtaggaatttatcctaccagtatatccacatatacgggcagaaatacaaccgcattcactgcagcaccatatgtgatgaac

SEQ ID NO: 32327 - DNA, 201 bp, Bos taurus
ttttaagtgattattattaaatttttattatattgtctttaagtaaatgaaggacattacttttgaaacttttcagaatatatttctatatgaataatctrtgtagttttgtgtaacagatgggaactgcttcctaccattttgggagcaagtgatatcacgtgctttagttgactaaaattaaatacggcctgaatcctc

SEQ ID NO: 32328 - DNA, 201 bp, Bos taurus
ttcacaaaatgtgatggtataagctttaacattatgtagaacacttttctgtttactcacagtattggtatcatgtttttcgtacctgacagttttacaaratggatgttaatatcagaattttcatttcgtagcttagtgcttaagagcacgtgactccaagtcctggctgggccacatactgtccatagtaaacttgga

SEQ ID NO: 32329 - DNA, 201 bp, Bos taurus
gttctttgctgtgcatcctcctttcatcatgcgtgtcccctctggctgcagaattctgccccttttcttttctttctcctttgaggccaattccactgctyagctagacccatctcccctcctgttcaggctcctaacatcatgtacctctctttcttagccttcatgactgttcaaagtttccatatagttgtgtgattc

SEQ ID NO: 32330 - DNA, 201 bp, Bos taurus
gcccctgcctttcacagcacagtctgggtaacgctggctttccctcagcccctttcagggtcaggatggaggtgacactggctcagggcacctggttctcycacagctcaccttgtgccagcaaatcatcagacgtaaactctggctcatagggtttcccatttaatatgtcaaatacctgttgagaagaaaaacacgggg

SEQ ID NO: 32331 - DNA, 201 bp, Bos taurus
gtactcgacacatggcccatgggtttgttcctctcattttggcttctcagagacctttcttacaaaaggaagtcttcaaatgctttattatgccaataaamtcttccttctgaggacctgtgatgggaccttaaggctgatactgctccgaattctacaaggaattcagttcaaccttaggatcccctgtcatgggactca

SEQ ID NO: 32332 - DNA, 201 bp, Bos taurus
acaaaaacatttcttccttagaataagcatctctccttcagcttttttttccaggaaaacacagacctgaatgagctgttgaattctctgaagtaccgatrtgaaagtctcagcttttaattctccagtacatatcctttcatgagcgtcaccagagcctagctctgtaggatgtgcagcaaacatctctcattttgggga

SEQ ID NO: 32333 - DNA, 201 bp, Bos taurus
gtcagaggaaaagcagaacccaatgatgttgctgcatggcccccattaccatcagaaatcaacaagttccttgtagtgggacctggaaaagagaggccaaytcctggaatttgatagctctttcatgtctttgtttctcatagataagtcctgtacaggtgactttctctgaattgagcacataaaactactttggaggcc

SEQ ID NO: 32334 - DNA, 201 bp, Bos taurus
ctggccaacaggaagatcatgttctatctgatctgcaggtatttctttttaattaagccaatatttaaaaataagaagatctattataaaaatgaaacacyaacccacactctctaagccagagttgactacagtatgtgcctttattacacctcagactatattacacttcagtctttattacacttcagaccccactgc

SEQ ID NO: 32335 - DNA, 201 bp, Bos taurus
aaatccaaaaaggaaaaagaagattcacttggagacatacgtgctgttcctctgagaaactattcctttggttcttcacataggacttgacaaggttcaayatggcctctcatccatatttctctggagactcaggtgactgtttctgtgatggttgttttgaatggagacatattctaaacttatgtctagtgtattatt

SEQ ID NO: 32336 - DNA, 201 bp, Bos taurus
ttagtatgtgagaggtttaaattgtacctctttttagccatggactagatttgttgtaaatcatagaaattttagagctggaataatttgtgttgtaaatytgagatggaaagaaatccgtgaagctgtgttagatcttggatactcatttctgcgtcaaggacagaactgaaaaaacattaacactgaaactttgcttct

SEQ ID NO: 32337 - DNA, 201 bp, Bos taurus
gaaaacccaaagttgccacttgcaaatcagatgttgttttgctgcatctgaaacaacaaggcttctcaacatctttttgtaggaatttcatgaaaatctcrttttcccaggccctggttttataacctaaatatccaagagaaaaaatatattagtcaaaagagctatatatttgtcttctcttttttattaatataagat

SEQ ID NO: 32338 - DNA, 201 bp, Bos taurus
acacgctcctcctcagctttgtgagatactgttccgcaaggcaagtctgcaggtggagcctgccagtggctcctaccagtgctgcagaaaggcatctcttraaaatgaagacattcacaaaccagaagactcataactcaaaccaagtagtacaaaggcaacatgggcatcatgtccttagatattctagacacctggttt

SEQ ID NO: 32339 - DNA, 201 bp, Bos taurus
cccaacaggccttaaataacagtaatcaggctatgagcttactgaattatgagatctatatgatgaaaaaaaagcagtattataaaacacatggccctcartatctttccagcatctcaaagaggcaggccgtaattcaaactgagtgctgcatccttataccagatgaatcctccaatactatccacttaatgactcaca

SEQ ID NO: 32340 - DNA, 201 bp, Bos taurus
cccatctttcagctctgtaccttccttccgtgggtgacaactccttcaagtcttccaggccaggcttcacgttcagtagcttcttatagagagccagcggraagtgcaggtccaccacagtggagttgtaaatggcgagtccgcaggttatgccaatcaagtgaaaccagttgtgctctacgaaacactttaagcacatgc

SEQ ID NO: 32341 - DNA, 201 bp, Bos taurus
aaatatgagtggatcacattgcttgagtaaaggctggtctgcttctaggttgctcatatttccaggtcatagccctactggtacgatctcaaaaacttggkgttttcaactggtaaactcacagctccaaactttgtctccctgttaatgagctgctactgctgctaagtcacgtcagttgtgtctgactctgcgacccca

SEQ ID NO: 32342 - DNA, 201 bp, Bos taurus
taatagtacaagaaatttttaactccggtgaagtctgcttatgcatctaacggatggtagtacttctgataaccacaggagggcgtatgtcagccagttcycgaagagagcagcttgtttcgtccgtctctaaatcggttttccttgatgatgagtatcaaacagctctctccccccagagtgtatcaattttactatcaa

SEQ ID NO: 32343 - DNA, 201 bp, Bos taurus
gaatagaagatgcaactctcttgcatagaagatcctactcagaataggagtagtttgtaagcagtcacggggtttcagccttgcaaagatctcagttccayatagatttctcacaggtaaaggaaagcaatggtgaaatcctatcctaattttattttgtttgataaaaatcctaatttaataaaagttgaacaaactttg

SEQ ID NO: 32344 - DNA, 201 bp, Bos taurus
cccagatgtaggaatggagaatctcaacagtaaactggatgtagcactggcaggatatacaatgaatgtggtaaaagcaaatggacgcaaggacattacarctatggaaagaaagaatgtcaactaatgaaagcaaaactatattaggaagttgaaagggacaaaaactttaggaaaaagaggaaagttcagggacctggg

SEQ ID NO: 32345 - DNA, 201 bp, Bos taurus
gagaaagaaaatataacgtctcagcccgatacactgcgggatgttgactcactttgcaacaatagtccttcatgaatgtagaaaggaagctagtcttttaygcaatgagttcagttcaaacaaatctctcctaaccctgcgttgctacaggaatagatgtcgccaatgttaatatctgtattggacactctgtgtaattat

SEQ ID NO: 32346 - DNA, 201 bp, Bos taurus
gtgggaaagacaacaatcgctgctaccctacttctttctagccgccatttcccaggctaatatctcatttctgcaggctgatcaggcttggtctctagacygggatgtcctagggctcagggagccagggaggtgtccccagaacacaagccccctttgtacctgttctgcccagtccaatctgcctgggaccacagtgtc

SEQ ID NO: 32347 - DNA, 201 bp, Bos taurus
ataattcagatacctgctctgccttttttgttgttcgtaattaaacaataggtgaattcagtaggctgtttattatgataatcacagaatactcagctcaytataggaaaaatgaggagaaaaatatggtagccatgagggctgaactaaaaaatttgaattactaaatgaatagagaggataaaaggggagaagagaaca

SEQ ID NO: 32348 - DNA, 201 bp, Bos taurus
cactgtaaattagttataagaattagtaagtatagtacttttaaaactagttgattgtttaaaaattaaatagtgaaattacatatttttcttaaaactgmctcctaaatactgaatttaaaattctctactcgtcctgcttcttagtttgtattccatgattaagttggtagttcattttagtaacatgaactaaagttt

SEQ ID NO: 32349 - DNA, 201 bp, Bos taurus
aatgtcatcaaggattttttctttctcaacttttcatatcaagacatttcagtcataaagaaaaaattaacactaaaatgacacagagagcctcaaccaayattcaagaattgtcagtatgctgccatattcacattctttttactttctggtttgtagaactactgaaaagtaaattgcaaaattatggcatttcactcc

SEQ ID NO: 32350 - DNA, 201 bp, Bos taurus
aaagtgtagaaggggtccagagtggatgcagagaaaccattaggaggttacagtagttgtccaagcaagaaatgctgttgctttgggcctagggaagtgtycatggagatggggagaggggatgccctgagtatggtaggatagggagagagaggttaaggatagtgcataagttttctggtacaggccactgagtgaaag

SEQ ID NO: 32351 - DNA, 201 bp, Bos taurus
acccagctggctaacctggagagctgcttgggaggtgggtaatctgccgctttaagatcgttaagcctttaaagttgctgacagagtagaaggggttaagrttcttgtgaagggcgtgtctgtgtaaataatggttatcactaggcagccggggcaactcctgatacccaaggcaggtcatattctcactactgctctgtt

SEQ ID NO: 32352 - DNA, 201 bp, Bos taurus
tattttagtgaaaaatctcattttctctttcggatgtgtgaaattaccttagcatgactgatctagtaacgtctatgtcagtcaagatcagaaaatactcrgaagaagtattggcagctatcagtctactttaaattagttaggattttgactgacttatgaagtattaagatggctatttttctatgatattgctaagct

SEQ ID NO: 32353 - DNA, 201 bp, Bos taurus
aggtggcaggataaggctggttctaccagtgggagggagaaccccaaagtggtttcagctgccactccaggaaggcattgcctgaggtgaagaagcatttstaatgtgctgttcacctaggaatagggaacagacaggatattaacaggaaggaaataatgagcaattgccacctccctccttcagtcttgcattgtccct

SEQ ID NO: 32354 - DNA, 201 bp, Bos taurus
gttgtgggcaagtttggagctctaagagaccttatttgtttgggaggattttggaaggcttcttggagatggtggacttagaacaaggtaacaaaataagrgcaagtccttgtcagaggcagaagaacagaaagagataggagggtatctcatgcaggggaaatggtaagaaccaaagaaagactttgtggggtagtgtct

SEQ ID NO: 32355 - DNA, 201 bp, Bos taurus
ttcttgctttttcagaatggccattagcttatttcactgtcatttaattctttctcttaatgctgaggttcagggaaaacaaattcgctttagttgagggytcttattatgaggatttacattatttcttctttcttacaaacagtatatttcagaaactggtgattaacatgatgggaaggagtgtacatgctatatgag

SEQ ID NO: 32356 - DNA, 201 bp, Bos taurus
aaaatgactctttctaaagtctttaaatgacttagaatgtctttggcataagtatatcttgtgatttcagttaggaatgaagaatattgtttccattattygagtaaccttctttccaccctgttttctgtctatcactacaaatggctcctgatgacagtagctaatatcaaagccatctgcaaaagtgtatgttattaa

SEQ ID NO: 32357 - DNA, 201 bp, Bos taurus
tggagtgagacttactgtgagaaatgattctcaggggaagcagggggagttggtctttccctcttttctttagtctaccttcaagggcttgaagttagaaygcttgatagttcagagccagtttcagatactctgcattaaattttagctctaagacctgaggtggggtgaacactataaatgcgggaaaagatttgggtt

SEQ ID NO: 32358 - DNA, 201 bp, Bos taurus
agctgcctcactgtgaatactgcatcatttattgttagccataggcagagttcattgttgaggagaggtaaattgaaatcaaatttgtaagtcagccctgrgtaaaatattcaatgatccaagttttgtgattagtgacccaacctttcctcctttggccccccacagtgatgagacaatgatataattttaagaagaaaa

SEQ ID NO: 32359 - DNA, 201 bp, Bos taurus
gttttcatatcccttgctcttaatgaaagcaaatgaaacttgtgtggaagttaaaaaactcagagactaaagttgggacttaactgtcctctttcaaactraaagtcaaattttcatcttaaagacaggcccattttacatttttcaagtttttattactgttgtgttttgcccattactaactgcagaaatctatgatct

SEQ ID NO: 32360 - DNA, 201 bp, Bos taurus
attgatgtcttagtaagcttgccattttttggtttattttttctcctttttgtttgtgtttctttttctttgttttttaagggttacttggaacagatttkagagtttgtcttgatttgcctatagtatttttgagtatctctttgtataactttaatggatactctaggtatcatatacacataatttatcacaggcaag

SEQ ID NO: 32361 - DNA, 201 bp, Bos taurus
acgctgagaaggggatttaataggagtggggatgctttcttcattttaacaggaaaggaggcagatccaggtagaaataatgaagcaaaaaattaaggtayttgtttgttagtgtctgtctattctataaaaatttttaagttcgggcttccctggtggtccagcaattgtgactctgcacttccactgcagggggcatgg

SEQ ID NO: 32362 - DNA, 201 bp, Bos taurus
gtttttcatgattacttttactgtagagatgtcttttcattcactgcatgtaaactgagaaagcttttctctatcacaagatccttgagatccttaaagcrttatctatcagttctgtttatatatttaatacttaacagataaattatctgcacattggtttattttatgatgtgtagtaaaaaaatcaaagaaaatttt

SEQ ID NO: 32363 - DNA, 201 bp, Bos taurus
tctacagttgtactgatttcctagagaaaccgctgtgattatttagatagtacagttatctcagtcttgcagagggagaataaatttccttggttttggarctagctgctaattctcccaatagcgtgactgtagttttaaaccgctgatttctgctctgggaagtaagggtgaaaatctctttactgccttattgcatga

SEQ ID NO: 32364 - DNA, 201 bp, Bos taurus
aatgctggctgggaaccctacgagccaggccagaaatctccctgtgggtaatctggtccaagtgagttaaagtgttagaacagacaagtattgctataagrtcctttaaaggccagctgaactttgtaagcacagcacaaagcaactgttgatggcctggcttgtggaatgtagggtgtgtgtgagcccaaggcccgggcg

SEQ ID NO: 32365 - DNA, 201 bp, Bos taurus
gttttatataaaaattgactgaacttaaagatatggcctgggaaaccactaaaaggttttgaaactaaggcatgcgagtctaattgataatgatcaggaarttgactctattttaatagctgctgaattccactaatctattcatctgaagtgaggtgattagaaagaaataattagaattttcagtttgtaaacaattct

SEQ ID NO: 32366 - DNA, 201 bp, Bos taurus
agttggagccatttcccaggagagacagagttattaataagacattgcaggctcatatactttctcctacctgtttttgattttccctctttctaatgcartttcactgatctcttggaaatgagacatacatggaatgttcttccttgctcatgcattccaaatgtgcttcccaaactaaaatgctgtaccgtatgtaaa

SEQ ID NO: 32367 - DNA, 201 bp, Bos taurus
aggtcgtcaagaacatgttcttcaactaaaacataatctctctataactcacactaactaggcttcaccccaaatacagtgggactaaaattttaatcctraaaatccttaacatcactcatttcaatgtcataaatgtctgttgatgctttagtttgatccttgatgccttctcttcccagggatcttagagttttattg

SEQ ID NO: 32368 - DNA, 201 bp, Bos taurus
aggtgggttatagtccatgggatcacaaagagtcaaacaccactgagcgactaacacagacctaggtacttcagatatataatttagatatataatacatraaacacaataattctgagggttaagtaatgttattatcccattttatatatagaaactgaaactcagggacataaaaatggtaaatataaatgtaaatat

SEQ ID NO: 32369 - DNA, 201 bp, Bos taurus
agagtgactgaactgagctgaactggaccataattctcctctcatatagtctttcaattctttgaataaactaagattattcccagctaaaggctttggtrtttcaggaccctcagtgtggagtactcactcctccaaggctgtctccttatttcttgctctttctcatcactcatttctaggctcaaatgctgttttctc

SEQ ID NO: 32370 - DNA, 201 bp, Bos taurus
tgtttaaaggaaaacaagggttgatagctcatcaaggcacatgagactcccctaagagttgacaacctccacttggagaatgcattagccaaacacttccrttttcactggaggctgttattagatgcacttaagcaaagaaagctactaagagcaaaaaacacccagagtttttttttttcctcctgtaaaggcattgtt

SEQ ID NO: 32371 - DNA, 201 bp, Bos taurus
gactatatcctcctctggtttactgattcattcctttactccccaattcaacaaatcatgccagttaatatgcttaactcactatctctagcttctctctytccattttctcatttctaaagagaaataactccatgactcaaaattcaagaaaggtagaaagctatgtatctacaatctaacatttctcaccactagcct

SEQ ID NO: 32372 - DNA, 201 bp, Bos taurus
tacagcttaatgatggaaggtggacacaggtcttctagagctttttaaagtatcaggaaaccatgtactgggggctggcataggctgatttgtttcactgrtgccatataatctctgagcactctgggagatgttctctagtgctaaaagatggtggttgcatgtgtgataacaggatgctagttaactaggaaatgaaga

SEQ ID NO: 32373 - DNA, 201 bp, Bos taurus
agtaaaagcaggccagtctgcttacaagacttgtcaacacttctaatacatccaagtatgttctgagtctccaaactgaccgacagcagtgtttccaaaaytccatggtcattgaggccttttcttacctgacctttgactctactgaaaacacttccttggcagctcagacagtaacaaatctgcctgcgatggaggaga

SEQ ID NO: 32374 - DNA, 201 bp, Bos taurus
cagtgactcagacacactttgaagctgtattttagtgcatccttacaggactgaagataaatgggaagaactgtaaatagtagcaatattatccaggactkgcaagagagaacagaaaactgttatacatatatattaactggcagtgcttaaagtttagactgcatcagaattaccttgagatcttcttcaaagtgaatc

SEQ ID NO: 32375 - DNA, 201 bp, Bos taurus
ataggagggttcaaacttgtttgataagcagaagtagctacagaacttgctgggcccatgacagaatgaaattgcagggaaccatgtttaaaaagcacttrtaatttccagacagcaacaacagtacattaaaacaagtactagcctcttctaagcttggacaaggactgcatatccatgaggctggccctgttgacaaac

SEQ ID NO: 32376 - DNA, 201 bp, Bos taurus
tatttatcttcatacacctataattcagtataaaatctaccttaaacacacagtaggtatttgtagactgcagaaatgaacttaagagaaaaagttaacarttcaatagaaaccatgttttatttggattactggtacttttaacaacaaaaaccccacaagcacggatgatgatgccatttccataggttattataattc

SEQ ID NO: 32377 - DNA, 201 bp, Bos taurus
ggtcaggcagctagcccaagttagggagcaggagtgttggaatttaaacctagaaaatattgtcccagtaatgttaaactaatcatgaacatcacttttcraactgcagctaacccttagattctcacattctttaacagcactatattctctgtacaatagcttcaaagcttcagcaaattagattccaagatgctgtgc

SEQ ID NO: 32378 - DNA, 201 bp, Bos taurus
cacaactactgaagcctgcacagcctagagcccatgttctgcaacaagaggagccactgcaatgacaagccagagcaccgcaactagagagtagcctccaytcgctgtaagcagataaaagcccactcagcaaagaagatgcagcatagccacaagtaaaaaaccaatctttttttaaaagtgactgtaacagaaaccagc

SEQ ID NO: 32379 - DNA, 201 bp, Bos taurus
gataaataagagaataatggacataggcgaggaatcttcctaaggataataaaaagagaaatgtaccagcttgcttaacaatgtttgtctttagggtggcrgcaccagaagtcgttgcttttcctctcagcctatatatattagtgacttcttacaggaagcatgtattacttttattgtggaggagaaaacactgtatct

SEQ ID NO: 32380 - DNA, 201 bp, Bos taurus
cattaacaatggaaaagagttttaaaactccccaatacctgtcagttgctgttattaataagaaaagcatttccttaatccttcaccccaagggcagtttyattatagtttcaaagtgaagatcgagaattctgcttgagatgtaataacttcataagaaaaatggattttaaaagaaatggaaattaagtgtagcattat

SEQ ID NO: 32381 - DNA, 201 bp, Bos taurus
gggagcagtttgcctgtgggatgggaaggacaggtgtccacaacagatggcgtgctcactgggagtcgtctccagatgaagggccttttctttccctccarctccgcggactcccaatctcttcctccagttctttccctctagtcaccattatggcctttccccagccccaagccctcaagcttctcactgacaatataa

SEQ ID NO: 32382 - DNA, 201 bp, Bos taurus
tataatctttaaaacttggaaaccatttctagctttccagcatttagaacatcaaacaaacaaatgagagctgactggaacaggcctgtggatcaaatatytgccagggtttgcagactccattactggtgtaaaggagacaaatcaagttaataaaaacttgatcttgtatcttgatgacaaaatgtaagagaatttaag

SEQ ID NO: 32383 - DNA, 201 bp, Bos taurus
taggaagtctaagaagtcacttattacccaaagaatttttgagatgcctgaaaaaaattggagcttccttctctttgagaaacaacccaaaatagctaatytgcacatcttgtcacatcttaaattgttcttgtcaccctaaaccaagacatttgaaataaaaagtcaacataaaacagctctaagttcagtgtaagaata

SEQ ID NO: 32384 - DNA, 201 bp, Bos taurus
ttttatgtatgaaatttcttcccttatacttggtaatgttcttgctctgaaatctatagttattcataaagctactttggttttctttgattagtgttagyatggtatctcttttccattctgtcacttttaagcttctttgtctttatattttaaaagggtttcttttaggtactatatagctgagtctggtgtttttac

SEQ ID NO: 32385 - DNA, 201 bp, Bos taurus
ggagttcagaatcagaagggtcacctcagattcaagtttaacaaagttactgtggagggtataaaatctcagagaggaaattgaatgagcaaatcagttcmaagcattagagtaaaattcccaactgaacagctccacggcagttacaatcacgagcagtgaaatcacctttcaaaacacgatcatggcaagcaccaccta

SEQ ID NO: 32386 - DNA, 201 bp, Bos taurus
ttgacttgtattgggctgaaggtaccaagctgtgaacctcccactggggctggtgctacaagtgtcaatacattgcaatgcattcatttaaagtccctttkgttctcactaggtagctttgcctggagaggaaaacagccccacaacaggcagtgtgatgtcccctctgttattgatgggagtttagtaggggaggaattc

SEQ ID NO: 32387 - DNA, 201 bp, Bos taurus
aatgatttcaacaatgtatgtattaataaattacctctaagtttctttccttgggatttttatggaaaaaataatacagactaaagtaaatatgaatcatrtattgcacaaaccaataattttgtgtttgcctctaccatccatgtttacatattttgtataattgtactgattatgtgttatttaattatgtgccttata

SEQ ID NO: 32388 - DNA, 201 bp, Bos taurus
tgtgtcagtttcaaatgattgaattttctcattatcacaagtcatgtttatctgattctttgcttgccttctaatttttgattgtggccacacattatggrttttattttaatgggtgttggatttttatgtgtttatttctataagtatttttgagctctgttctaggatacaatttgtatcctacattggaagcaatgt

SEQ ID NO: 32389 - DNA, 201 bp, Bos taurus
tttttattatttgcaacagaaggcgagcaaacaaaataaatacccttaaaggatatatcattcagaaaccctttctaggacaagttaggatagaaataaaygtaataattaagtataaaaacaagctctgggcataatacatttcttcacatactgaggttgttattaattctagacatccgtttgtagggatgctatgaa

SEQ ID NO: 32390 - DNA, 201 bp, Bos taurus
cctagaaacctcaactatttcatccagtcaacaatctttatgcttcctctgatatagcttctttctccttttttttaaaggcctttcttataagcatattmcaatatgagttttaaataaaaaccaacatcttacatgcccagtattctaggtacaatgaatgggccaaagctagacaacaccactttctttgctagactg

SEQ ID NO: 32391 - DNA, 201 bp, Bos taurus
taggcatttattgctctgaaaattactcaagtgtccttgacctaggtcccagagtagtgccatatacacatatgtacctggtgattgtcagttcccttcartcttttggctgttgtgctgctcctcatcatttgaaatccttcctattggcaattagaccctctcatccagtctgtcaaaagggccatggtgagaggctga

SEQ ID NO: 32392 - DNA, 201 bp, Bos taurus
cggggcatccccgatgtacctatgaatgaccgcccaaccttcacccgataaggagcataggaagggaaaatagggccttttagatgtgaagatagagtgtraccatggtagatccatgcaggaagatgtgtgtctcttcctcatcaattccactggagccagaaatgatgtcaccccaccctctgaccctcttccgccctc

SEQ ID NO: 32393 - DNA, 201 bp, Bos taurus
ttgtctcaaaccaaagtgtttgaccttctctttatttttattacttccttaccagttgccctttcaactccacgttatcctttttaaggctttgattagcrttctcctaatgtgacatttccttagaaaatatttggcttggtcccaggacccccatatcactgaacacacttctgcactgctctaaccgggtagccagaa

SEQ ID NO: 32394 - DNA, 201 bp, Bos taurus
catgagtcatttgactaaagggtatagcaatcaagctgaaaacctgctacatggttaaattaggaacaagcacagcttcattttcttttcagtcctttttwaagtacactgtgaagctctggtaggagtaagagatcgggttggaaatgaagtgtgatagcattgatatgaataattttcaacaacaccaaagtgaatcaa

SEQ ID NO: 32395 - DNA, 201 bp, Bos taurus
tcacagaacaccttagcacaatagcagtaaaggaaactaattttttaaaaattagaaaaatgggtattacactaccaattgtgaaagtattactgtttgcyacatttaaaacttagctgtgtctaccttaatttttctttagataaaacaaggcaaaagaatcttcctaaaaagattccaaatacctatgaggtgagaaaa

SEQ ID NO: 32396 - DNA, 201 bp, Bos taurus
tagaggagagccactgggtggtgagagtcctgctgtttatttgggagcaagaacctcattctattcattaatgtcaaggactttatgctgacaagaccctycaaccacctttaggatcctacagctttcatgtgttgttttttgacttccctgtatgtttgtggcagcaccacaatttccttttacaaaacaatcccttct

SEQ ID NO: 32397 - DNA, 201 bp, Bos taurus
gtacatgggaagtctgagttgcagtgctttagtaaacatgtggacgggtatcataaggtcttatggtttgtgtgtaacacaaacagactctaagttaccarccctctccagaaaatcagaaccagaggtgaagaaccataagaaaagtgcaatggaaatgctgcacttatgaagtcattgtaccaattatctcagggaaag

SEQ ID NO: 32398 - DNA, 201 bp, Bos taurus
aaacatgcatctgctttcccaggtttagccacttgaagaaaatggccttggctaggccaaaactgaaaatgcatggagtcttacggtatcaggccctgaayatcttacagaattacatccaagactgcattagctgctgaacattctaaagtacacctgaggtatgagatacatcaatgaatcaagtcttttttcactgac

SEQ ID NO: 32399 - DNA, 201 bp, Bos taurus
ttgtcccacccagcaccactgagtagatggacgagggaccaggttagctggcccccagccactaccacaaaccaggaccaagcagatgaatccagggcctragccaaatagaactgccccctgggaaaccaaaccaagaggcaaagaaggaacatcaactgggatggggcactggggctgagcgctgatcatgtatcagga

SEQ ID NO: 32400 - DNA, 201 bp, Bos taurus
gacagcagagctgaagggcccagccctgcttctccatgcggcctcaggaggcctatctggaaccaacctatctacaaatggggttgtgaaattacccaggsagggtctgctgcaaacatgaatggagtaacatggggggcgcaggacgctggagctgctgttgaccttgaccccgaatgtctggctggcctggcccattga

SEQ ID NO: 32401 - DNA, 201 bp, Bos taurus
gcagatgttttgatatccatctcctcattcctggctctctcatttgattgagaattggagagagtggagagcagtgtagttaattagttccctcggcccamgcagaagggaccggaccagtacctccaggaagatgtcgtggcaacaacctgcttggacatgttggaagaaagcctagcctggcagggaaaggaggtagct

SEQ ID NO: 32402 - DNA, 201 bp, Bos taurus
caactgagcgactgaactgaactgaactgaactgaatctagtttggcccataactgctttgaccaatggaatttggaggaaagatgttgcaggaatctgarcccaggcattcagaaggcctgaaccttttgccatgccctgagctctcaagtataatgtctgagttgttgtttagtcactaagttgtgtccgactctttgt

SEQ ID NO: 32403 - DNA, 201 bp, Bos taurus
tactcaagtcatgatcagaagactaagaaaagttactgaaaataccacaacgcttgagctaataatgagggcctctggttattcgctgtgggaacaaaatygtccttaactctgtggttctggaatgttgatcttaagctgtgggagttttatttttcctttgagaacagacacatggcatgcccatttccataaaagaaa

SEQ ID NO: 32404 - DNA, 201 bp, Bos taurus
tctctctgtgtccctccgtgatggaaagggaacaaaagagctctctggcatctctttcataaggttctaatctcattcacgagagctctgcactcatgatytaatcacctcccaaaggccctaaatcctaatactatcacgttggggaagaggtttcagcacatgaattttaggaggacagactctatctatagcagagag

SEQ ID NO: 32405 - DNA, 201 bp, Bos taurus
gttctgcaacaaatccaataaaaaaacaatatttatgctacatatatgcaattatggtttatggaggacatccacgtttttcaagaaaaagactttcctaytgaatgaagttgttaaaaagcaaacttttattctcttacaatgatagagttctcaaatgagcatttttatactctgaagattactactatagatagtctc

SEQ ID NO: 32406 - DNA, 201 bp, Bos taurus
ctttattttgtacttctaggccaaatttgcctgttactccaggtatctcttgacttcctacttttgcattccagtcccctatgatgaaaaggacatctttkggggaattagtactagaaggtcttttagatcttcatagaaccattcaatttcagtttcttcagcattactggttggagcatagacttggattactgtgat

SEQ ID NO: 32407 - DNA, 201 bp, Bos taurus
catgtctgtggatccaagaagtgtgctccttcttggcccagatgccttctctgtgcctttgagagcccccgttgtattattatttacacctcttcttgccmttgcttcttaccctcaacaaacctagttctccctggagagtaagtgagcttcaactaagcctgggaaaggggatcgatgcagccgtgtgctcccagaccc

SEQ ID NO: 32408 - DNA, 201 bp, Bos taurus
ccctgatgcaagaggactgctgtccttgtaagaggaggagattagggcacagacacacacagaaggaagactataaagagataccgttagaagacctgccrcctacatgccatggagaggcctcagaagaaaccaccctgctgacatcttgatcttggatttccagtctccctacagcaagaaaataagctctgttgttta

SEQ ID NO: 32409 - DNA, 201 bp, Bos taurus
ggtgatggacagcgaggcctggtgtgccgtgattcatggcgtcgcagagttggacacgactgagcgactgaactgaactgaactgaagaaatgcactcccyggttaggtacccaagtgttcggccaaaactcagagcgttttatatcaccaaaatgcagaaaaagaataaacaccaaagggaaaatgagcagtttcttatt

SEQ ID NO: 32410 - DNA, 201 bp, Bos taurus
agccctcaacgtatttcttctcatgcctcataggtcaggcctgggttattggacaatggaaataggatttcctttgtttagaacaatcaggattcattgtycctgggctaggcgagtggcccaccttcctgagcacattgctggcccatatttgaacaaaatggaggttgtcttaggaaggaagaagagagggagtgacac

SEQ ID NO: 32411 - DNA, 201 bp, Bos taurus
ctcctgggtagcttggcagtaagccctgagaggtcctcctgagaagcaggcttggggactctgccactgttacacaggatggggatgaggcttaggaaaaygaagttataggaccaggccagtaagtgcaggggctaaggactctcatcaagaggcatttggctccagtagctcaatgaataattgggtagctgaaatttt

SEQ ID NO: 32412 - DNA, 201 bp, Bos taurus
cttcttatttttccatcacagtgacaactaatatcgactgaaatctgacaggacatttaaatgctaagtacattcatttcatgttaaatttccataacgtyttggttgctgaattatgtactatatttgtactgattttctgaaagctaagcattgctggcctacccaagataatttgcaggccgttggtcaattaaagag

SEQ ID NO: 32413 - DNA, 201 bp, Bos taurus
taaaacagctgctaaatgccatcgacatgtgctgccacaagctgcacaagagctgcagtcctggaaggtcaaggaccccggcccacgtggatttacccatrtggtattgtgttttacataacaccaacccattgctggctctttcaagattcctggccagtgtgccaatatattgatatgtaagggtcctaatatataaca

SEQ ID NO: 32414 - DNA, 201 bp, Bos taurus
gacagagagagtgggagagagttttgataacctctggagggcagcatgggttgtgatgcaactatcaaagtcactgcagtatcaaaaatatttaaacattycaatttttaaccaggatggcactgacagaagtgttctttatatttaatattagatatgctgtaagtaattaataatttttaattacttacagcatatcta

SEQ ID NO: 32415 - DNA, 201 bp, Bos taurus
tctgaaaatttattcatcaactaaagtttctctacagagaaaaggcaaacagaagacatggggagagccctgttctgggaaggtcctgtagggtcctgatmagttgcaattagatgattaaaagtgtggttgaaaactttcttacctgtgggttttggcctttgactctgcaaagtatagtggttcttctcttctcattaa

SEQ ID NO: 32416 - DNA, 201 bp, Bos taurus
ttcataaatatggtaatttcaggatgtttctagatgtagtaataaaggtttaatgccactttattattaaatataagcaaatgccaagttcacaattcacrgtgaataagaaatgccttcacattgggttcctacagcttctgcctctgagtgatcttttattagtgatggattatgcaaatctcaaatgaagctttgtcc

SEQ ID NO: 32417 - DNA, 201 bp, Bos taurus
ctcttgcttgaattttcaaaccataccatttagcgcaatgtcctctaaggaaaggtactattttctgatccacaaaacatgtaataggtaaggagaggccmtacaagtagatgaaagttacttcttttccttgaatagtgagaaaaacatcttctaagaaatgtttttcagggtttagtcgaggattgcaacctctggccc

SEQ ID NO: 32418 - DNA, 201 bp, Bos taurus
tacaattaagtgttgcttttagagttgttatttggatatgatgcttgttaaacaatgtagaaagatattaaaagaagtgatgtgaaggtaggcctctgagrtggacccattttgcttctattctgaggatgacagctttttaaatatttcactttcttcaacccaagaatcccacattcttctacattaccttagaaactt

SEQ ID NO: 32419 - DNA, 201 bp, Bos taurus
ggttattcattatctaaagaaagaatatatatacctaaaaataaattcaatgattagcagttatgggttaatatactttgaagcactgattgaaaaaataytgcaaattttatcacaaaaagaatagctagtattgctgagctttgaaatgaggagttgtccatctttattgatgtgtgagttacctatgctacgaaattt

SEQ ID NO: 32420 - DNA, 201 bp, Bos taurus
atacatgaacaagtgacttataatggaaaataagtgtaatggagatggtccacatctgggtcatgttaatgccaaggaggttatgcaagaaataggaaagraataggctgacatcattcccattgaatgaacaggaattctgttgactggaagacatatggctccttgaataaaaggagtactgaataaatgagttactta

SEQ ID NO: 32421 - DNA, 201 bp, Bos taurus
acttgtaggattagtagtcctgaaatcctataatacaaacattagaatagtcatataaagatagtaattatatggaaatttcttatttcaggcctttttakctcctttctttcttatccttccagacactgcagagattcaaatctattctgtaaagcatctcctttccataagtttagtaaactattcttgattttcctt

SEQ ID NO: 32422 - DNA, 201 bp, Bos taurus
aatgaatcatcctttatacatcttgagtaaaattgtttctatcattcttcacaattgttatattattgtctgagtctagtggttgtgattcctctttgctratagtgaggtcatcacccaagaatgcctgtgcttatgagaaattcagctattacccaggaaaatcacaaagctgctgcttttatattgctctatttctgg

SEQ ID NO: 32423 - DNA, 201 bp, Bos taurus
gaatgttttaccatggaccatggacagggattatctttgctgagttatatataggcaagctgcttatacaaataagaactcctgcaaggaaggcaggtagrtagatgatgataacaaccaacggtgtaggctgtacattttttgcatatttatatcaacaatatctgaaagcatacaaagcatagttgaaaatactagtaa

SEQ ID NO: 32424 - DNA, 201 bp, Bos taurus
cctagtgatttagttttaatatttacaaactttttttttttgtgtatgtgtttgttggatgttagattttctttgttttccttaaaaatcaagcatttcamtaagatattcacagtgtggttttgatttcattatttaattagtcatgtaaatcaaggaatgatttcatccatagagtcattgctttcaactcagaaaata

SEQ ID NO: 32425 - DNA, 201 bp, Bos taurus
cgcttctctttgcatcttttgggtcggcccaccctcatgccttgaggatatattttcctttgtttgccaaacaaaactgagctataacactggtccatccrttgcttcaaatttttcctgtggccagaaagaaccgagtaaatcacacattctgtagacatatatggtgccatgactcggatttaacctgcctgaaataac

SEQ ID NO: 32426 - DNA, 201 bp, Bos taurus
atattcttgagagatcatatcaccaaccttggaatttaatgttaagtatgacaatgagtttttaatcttatttgaattatttcaatttgatgtttctttcrgccaaagttatcctcattgattccaaaggaaaatgagatggatacaacattaaaattgtaaaattatgaatgtttctgggaatagattttgtgatcttag

SEQ ID NO: 32427 - DNA, 201 bp, Bos taurus
tatataaataatacaaataaatataaatgagccaactgattatagtgtgactcttgggatgattctttagtacttttcagtattataattttggcaaatayaaattcttctcaatgaagtctggtgctctttccctctaagtgagaaggatgacagtcctttatactttgtcctaaggctggtgtattccacaggttatac

SEQ ID NO: 32428 - DNA, 201 bp, Bos taurus
gagccatcgccaccaggtaagccccaaattgggttgtactggccaataatctcaggggtggagatttcaaccaatgtgggataacctttgtgttgtgatawggtctacatgtaagcgaaggccaggcttctcccaaaaagggtccaacttgcttttctttattgtttttccttttttcactattctctattatgtgggatg

SEQ ID NO: 32429 - DNA, 201 bp, Bos taurus
gtactcctttgtgtgagccctcccaggggttgctattagctctgcttaacaatctgtaggttccagtgctgggatgcctcaggccaaacaaccaacaaaayggaaatagccccacccattagcagagaggctgcttgaagttttcctaagcatagctctgcccagcagagggacaagacctagatccacccaccagagaag

SEQ ID NO: 32430 - DNA, 201 bp, Bos taurus
ttgtgtgtattattaaactctcatggtgtattggctacctattacaacataccaaattactgcaaacagtgacttatagcaacaaagataattctaacatrtattattacaattaaacttcttatctagacagtatatttaagacaactaaaccttttatctagacagtgcatttaagtccaataataaagttattggatt

SEQ ID NO: 32431 - DNA, 201 bp, Bos taurus
ctttctgtttaatattctcccaagccttagttctgctctgtaaagcaacacaaaacatatttttgatttatctcttactaaagcttatgtagttcaaatgkgtcaaaatgtagacttctgagtcttgtgtcttattttctctctagtgcaattgcaaacttttcaagatcctctccaggtctcttatagtatgcatttaag

SEQ ID NO: 32432 - DNA, 201 bp, Bos taurus
ttttaaacctttccattttacaagaacctttttttctatcaatttcctaaagcagccctatagatatgttcttggcaatgatgaaaaattactatagcttytgtgaaaaaatatgaacgtataatgggtatgcatgtgcataaaatttgaagttcattttttagctcattatgtctgtctaactttttacgcacatcattg

SEQ ID NO: 32433 - DNA, 201 bp, Bos taurus
tccttatttcttattgcattgaaatatataacagcagaagggaaaattcaagccctggtacactaaaaccattaaagtagctggcaaaattataatctagrtaacttaccttccatcctacgttgctataattttatcagttgaaaatgatatccacttcattggagaagattgtttaacaagcttttaatcatcattgta

SEQ ID NO: 32434 - DNA, 201 bp, Bos taurus
atctttatgtatatagctaatttcacaaattaaactccttttggagttggtattattattcttattttactaagtaaagaatgaaaataaggaaacaacamaatatctttccacagttgtataccttagaaattggttacatctgacaccaaatgctatcaggttagctctcttttggaaaattgagaggagaccaataac

SEQ ID NO: 32435 - DNA, 201 bp, Bos taurus
gctgagaactaaactaaaggtaaaaatgtcaagaaattgaaatatctctactactgagaaagtgtcttgataatgcactttaggtctataggcaaatgggyctatgttaaatatacttgattcccttgtcacagcagcattggtcaactgcagaccttcacctgcaggagcagaagctgttctgactattttgatgaaagc

SEQ ID NO: 32436 - DNA, 201 bp, Bos taurus
ttcattttatactcaggcagttgaatagtttatgtggcattttctaagtagtcatattcttctataaatctgtatattatgatttatttatcataaaaatmctaaaccagaaatatcctaataaaagtattcctttggtgaagacttatatcaaagattattagtctatttatcaagagctcagttttttagtatacatac

SEQ ID NO: 32437 - DNA, 201 bp, Bos taurus
cctatttaattgttgtggcaccattggtgaaaatcaattgaccatagtttgtttctggagtcaattctattctattgacatatagtcctagccttatgccrgtagctttttgtgtattgccttgtagctttttgcaaatcttgaaatcaagaactttatgtccaacttggttcttttttcaaggttcttttagctattctg

SEQ ID NO: 32438 - DNA, 201 bp, Bos taurus
agaaggttatttgtgaaggatggaggaggacacagtattttgtgtagcagagaaatttaaatattttaaaatataagtaactttttatcacaccatagtgktgtttggatacatggtctcttctttcacatttcattccaaacctcagaatggtcttggaatggtaccccattcctcagaagtaaaccccccaaattctcc

SEQ ID NO: 32439 - DNA, 201 bp, Bos taurus
taaatcaggaatatatacacaacattcaacattaattatagcacaggtccctctttgtgctgaaactatggttagtttcaagatgatactggcaagtcttygtagcagcagttaattgtagagcttcacctcttcttctttaagatgatcttggtttcatggggatcagtgcggtccttttgtatagtccactcagcgtct

SEQ ID NO: 32440 - DNA, 201 bp, Bos taurus
tgattgttagcacatggaaattagccgaggatataagatggaattttattatttttgtagaaatgagaaccccctccaacataattaaacactaccaatgrcaataaaacctgataagcaaataaagcaactagtgcctccaaactcctttcaaaaataatgtttttgtgaaatatggtcacctcaaggacaggcatcctc

SEQ ID NO: 32441 - DNA, 201 bp, Bos taurus
attttctggcaccaaaagtaaagcaaagttccctttccaccaacctggcttctttaatggcttttgagtggctagcagctgcaccctgttttctttaacaygtcacagcaaagtgaagactccaaaagaaatactattaaagtatatgcttgttgcagtgccttttagaatcctaagggccaaattagttttgatttggaa

SEQ ID NO: 32442 - DNA, 201 bp, Bos taurus
cgtggagattgtaggtgattaaatttttggaaaactttatattactgtttgtgaaaggctttcttgcttttggaaatgatagcaggctaggccctgtcttrtaaattttacaaaagaaactgtgaagtctaatcatctaaaaaaaattttttttaagccattctatatctaaatgcaaaagtctcaaactgagatgttaag

SEQ ID NO: 32443 - DNA, 201 bp, Bos taurus
catcacatcacttcctgtgtagaataaataattacttaccttattaagggtacatcctgtaccacagtgaaaaggaattggactgagcagccaaaaaatgmtatgacttaaaagaataagaaaatattttcattcagcatattttcgttctgaatttacatattaacctcacaacattaattcttgccaaagacaattata

SEQ ID NO: 32444 - DNA, 201 bp, Bos taurus
aaaaatagttatcattttcctttgccttgttgctttaatttggctatcccttccgaacttagccctctatgaagtccccaaactattcatgagctgtttcycttcccatgattctcctaaaagtaagcttgacggtaaggcaggtgttcttgcacctcattcccagtttcataccattttgttctttatttcactaaaaat

SEQ ID NO: 32445 - DNA, 201 bp, Bos taurus
tttgcagaagatgtatctaaaactggtctatatttgtcatactatctctacctactcatccctaccaagagacctgtgaaatttcactgttaattatgaayggagagtggggtttggggatgaaatggagagagagagaaaagagatgagaagagagatgagaagggagacagaattggtaatcttcatggaacaaagtga

SEQ ID NO: 32446 - DNA, 201 bp, Bos taurus
caatatttttaagtcccttgcaagttttaaacttgcaagtgagacctttctgaatttacatggaagatatgtctcttggtgtagaaagtaattcatttgtrttattcacaagagaattataattataaagatttatggaaagtacaaatgactttcctttaattcttaccaggatttcagatggctttgttgtagagaaat

SEQ ID NO: 32447 - DNA, 201 bp, Bos taurus
ttatctttattaggtaaaagcattgaatatcatgttgcttattcaaagcaattattgagcgaggcaggaaaaacaaaatctgcacatagtattctagagaytgataaatgaataaggcaaagagaaaagctattttaaaagtaagttttatttttgtatattttggaattaaggtttttcaaataatagattttaaatatg

SEQ ID NO: 32448 - DNA, 201 bp, Bos taurus
acagggagacctggcgtaccgcagtccatggggtcacaaagagtcggttatgactgagcaactgaactgaagcaacatctccccagttcccccacccccasgtctctagttccactctttgattttatgagtttaggttttttgtattccacatataactgatataatacagtgtttatctttctctttctgactcaattc

SEQ ID NO: 32449 - DNA, 201 bp, Bos taurus
tccaccctgttctcaaccctcttttcttatcatcagtcctctcctgccctgtacacacacacacacacacatacatgataaaaaaatatgatccattctaytagagatttcacttaacattgattgtactggaaatgggtgaacttagatctgacaaaattgtaaaattcctggataatttgcctaataagagtgatttta

SEQ ID NO: 32450 - DNA, 201 bp, Bos taurus
ttctttgtttatattcacatttctcatttcaaatatagtgcaccaaaaaataatgtgtcagtcttcttccttttgctctcaaataaattattttcatttckccttccctcctagcctgccttcttcccttccttgatcttttctttctctcttactttgaaaatgtgtgcccacacttttcttattatttgttaaagttat

SEQ ID NO: 32451 - DNA, 201 bp, Bos taurus
catatatttttagtgtatgctttcttatagaaggggcatgactagaaatattgtatttccattagtagcaaatatcagtgagaattatctattccatcaayactttgcattaagctaggaaaaacagaagaacttcttaaagacacaaatatatgtgtgtgtgtgtgtgtgtgtgtgtgtgtgagagagagagagagaaaa

SEQ ID NO: 32452 - DNA, 201 bp, Bos taurus
tcccagctgttattaacactatttttcattctaactaaatctactttttatcagagcccccacagaaacttgctcgtacttcctgctgctccttggttcaratccttgacttcctatatatataatcccattcttcagaaagcatagtcctccaacatgagcataatgagagagaaaatggtaaatgacagttgcctcgtt

SEQ ID NO: 32453 - DNA, 201 bp, Bos taurus
acacattcaagaatcacaagttttaaaccaattaaagaaacaattgctttatgcttagctaccctgttacctgaaaacaaaccttccacacaatcactgarataaattttttcagaatacatttagtgttttctccccttgtaaagatttatggtaggatggaggaaaaaatatattaccatattatctgaattaaaatta

SEQ ID NO: 32454 - DNA, 201 bp, Bos taurus
gatgttggcatctctgtgttgcatgcaattttaacaacctggggtgaggacctcaaagtcttgctcaacatattcttctccttccagccttttagtaactyatcactataacttcaacatttcatcagtgattaaaagaagcataaactcacctttcttttcttactgtactccacttttttacttatcatcgatttgtga

SEQ ID NO: 32455 - DNA, 201 bp, Bos taurus
gagaaaattacaattgtcagttatgatagaggcagacagttggtcctggcctgaataatataaccctactagaaagaagcctaaggcaaaccttgtagtgrgaaagtaaaaacaaaaggaatacactgaaaaattcactttatttgtccttgtgatcagtcaccaaaaggtttttgtcaagattggtggcattattagtgt

SEQ ID NO: 32456 - DNA, 201 bp, Bos taurus
tgggacacttggacatcagccccttagatttttaagccaggcattttgggagctcatctctctggtgtcaaatccatgggccagggtgtctgatgtggggytccatgccctttgtcttccaggagataaatccttctaagaacatcttgtggccaggccaggaatggggttttgagtgagaacttttctctgtctctctta

SEQ ID NO: 32457 - DNA, 201 bp, Bos taurus
taaaagctgtagtatgtgttgtcatggcaatagtgttttgtttacagaacttgccttttttagaacttgtcctttaaatggtaggaaagattcactttagkcttaacgttgtattatactcttagctttcattagtgaaatattatttgttcttttttcagtaagaagcacaaaatattccattgctcagtttgtgcattt

SEQ ID NO: 32458 - DNA, 201 bp, Bos taurus
actttattgactctattttctcaatatgagatgaaaattaacactgacatttctagcagagatcacaaagagaaggaaatgggatcaattacatgtgatamaatggttgtacaattagaataaccaacacaaccaaggtgggttgtggcctcaaataagctcaactgttctccttccaaggctttaaaggaactcgcattt

SEQ ID NO: 32459 - DNA, 201 bp, Bos taurus
aggccgagtctgctccctagttgttggagtaggtgcccccagctctgtttcttggctgtgattctgatctatagtgtgaggtagaggggactgtagcactrccactggccagaagtcattgcattttactcctttggagctgttcacctacaaatatgttccatggctccccttctgtctgtagagtgggctcacaaagta

SEQ ID NO: 32460 - DNA, 201 bp, Bos taurus
aaatcttagactcttctcatattattccattcactgtttacataaagttgtacattttgtgagagaactttcactagggaactatttctctaaaatttctmtaaagacaaaaaagtacacacacacagacacacagacacttctcaatggagcttacccacacacacacacacacacacactactcaatggagcttaccca

SEQ ID NO: 32461 - DNA, 201 bp, Bos taurus
gtgttttttaaccacttgtgaaaagaaaatttgcaacttgtatttcaaacgaaaaatgtataacctaaatttgaatttcaaaaattcctatgtcctttagmtcaaacagcagtgtctagatgattagaggttactctcatctctgtgactgtatttataacacctttgaaaaaacactcatccaatcttgtggaaacaatc

SEQ ID NO: 32462 - DNA, 201 bp, Bos taurus
tacatggcaaactcactgtcagtaaagcaggtgaatatgaagctcctaaaaaaaagaaaataaaaactttggaaccatagtacaatttatcacagtcccawgacttaatcctatgaaagaaaatttgaagtcagaacaagagaaaaatatggggaaaaactagcatgtctatcttaaatttggaaaatatttggggaaata

SEQ ID NO: 32463 - DNA, 201 bp, Bos taurus
tcacagaggaattaagtgacctaaatacaaggtgtcaagctacaatttaaagacaacttttttcccagcccctacacttgcaggccacttttctttgattrctattgttttgaaaattaatgataagatgagcatgaatcctaaaagatggtgccgtaaaagtgctgctctcaatgtgtcagcaaatttggaaaactctgc

SEQ ID NO: 32464 - DNA, 201 bp, Bos taurus
tggttttgaaaataaagattaaatcagccatactcaacccaaaataaaagttatgtctttttagctatggtatatattccaggacctgaattatactttaygaattacaatgaattttaaaagcaatatatgtcccatggatataacaagtaaggggattttcaatatttccaatttatgcttttatttgttacttatttt

SEQ ID NO: 32465 - DNA, 201 bp, Bos taurus
tctttcttaaaatgagctgtgcttagattctctttcctaattcagttagcatttttcttaaattcttgtctgggagacagattatccctgtttcattgtcyggcccccctccaccccacccaggggttctctcttgctcttttaattgagagtagttcctctgccttttgatcttaaactttctctgtctctatgaatcta

SEQ ID NO: 32466 - DNA, 201 bp, Bos taurus
acttaattaattttagaagtcacttcctccaggaagccttccttgcttggaggaggtattctcatacaacttttaaacgaacctcttgaaagcaagacagytcatttaatgggaagtcaccaaatgcaccaatctgccaacattttgtttttgttttagaagcaattttcttgactatatccattgactgactttagactg

SEQ ID NO: 32467 - DNA, 201 bp, Bos taurus
agctccaagcttgaaggcaaagaggtggttgccttggtggctatgggtttgaagggcttccaagtaaaggttagaaaggatttctcaatttgtggcccatrtgcaatctacatcagaatcactaagattatttaaaatgcagatttctggttccacttcagaatgacttaatgaatatatctagaattgcagcccagaaat

SEQ ID NO: 32468 - DNA, 201 bp, Bos taurus
tcctcccttgtgttacgacttaagcacaaaatctgggtcttcctttgctctaattatggcttcagttatccctactgtataaacaataattcccatagacytcatctctttctctaatttggctttcatcagctcctggatttccaaatgtatctaaggcatttctgggacaaccttccaaacctataatatcctgaatta

SEQ ID NO: 32469 - DNA, 201 bp, Bos taurus
agttttaagctctggaaaatgtcatttctttaagcatggataaaaagaaacactggaaaatagaagtaaaatatttcatcatttttgaggttttgcacttytactctctgcttcttggaccctacttattattggctcatctttctctttgaaccatgtttatctgctttgttactaacctccactaacataaaaaggcga

SEQ ID NO: 32470 - DNA, 201 bp, Bos taurus
atttgcagcaacatatatgagcctagagattatcatactaagtgaagtaaatcagacaaagacaaatatcatgatatcacttatatgtgaaatattggggraaaaatatacaaatgaacttatttccaaaataggaagagattcacagacataaaaaacaaaaatgccaaagggaaaaggaggatggggaagggataattg

SEQ ID NO: 32471 - DNA, 201 bp, Bos taurus
agatgtaaaattaatattaaatcatgcatgtttatttttcctttgctctatggagtccttaactaggaggtgttttccagttattaaacacaagggctccrtctagtggccaaactgtatatagtgtttttcaacctatgggtcttagggaaaacaatgtttctgatggaataaaattgaatataaagtaccagagtgatg

SEQ ID NO: 32472 - DNA, 201 bp, Bos taurus
ttaaagtccctaggaaggcccatttaccgtttctcaatctgccacacccagccgctggttttccttctggtgttagggtatgagccctttcttcaactgaracggcaggcttatatttaggggccacgttgtgtcaaaataggtgtgtgcatgtgcatgtgtgtgaccatctgcctgtgcctgcatactgctttgtaggtg

SEQ ID NO: 32473 - DNA, 201 bp, Bos taurus
aacagaagtttcccattagcaaacattcaaaggaaggcccacaaacagcagtaggtacccaaacccagtgcaggggaactggccctccactgcattttcaycagactcgatcacattccacactcccatgtcctgtcaaggggtggagctgacacaccctcacaaaggcactgccctctttccacaggggcctgatctcca

SEQ ID NO: 32474 - DNA, 201 bp, Bos taurus
tcaactcttgactgctagggacaaatgggtagtttagtatgttttcatggcttcagagtccatgtatggcaggtatagagccaggagtaggagccccgccrggagtggggccccttggcaacagtggcacccattccagcagggtatcctggtcgttcgttcctgtgctgactgtctcatctcccttgatgcccatctgtt

SEQ ID NO: 32475 - DNA, 201 bp, Bos taurus
ttgaggtttttgggccaggttgtgctaattgctttatataatttatctcaatctatacaacaactctcttgagaggatagtcttttatttcagttttacargagaggaatctgggcctttgaaaggtcaagtcactcgcccaagggcacagagctagtaagtaatagagccagaattactgtctgtaataaaatggattgt

SEQ ID NO: 32476 - DNA, 201 bp, Bos taurus
aggatcttcccaacccagggatggaacccacatctcctgtgcgtcctgctttggcagatgtgtcctttactactagtaccacatcagaagctcagacagaygtgtgtcttatgtcagtttcactgctctttggtgtgtctcggcactagaaaccaacctcctgattttcactgcacgactcttaactgcagagtgggaata

SEQ ID NO: 32477 - DNA, 201 bp, Bos taurus
ccatgacactgggtgacgcttttatccctcacaaccattaaagtaataaattatatcaccattttagaaaggaggaaatttacctcatcacaagaaggtartaataaaaggagagagtggagattccaaaagagcttttctgactccaaaccctgttgtgcttttaccctacaccactttttcataaaagttctgaacaga

SEQ ID NO: 32478 - DNA, 201 bp, Bos taurus
ggttgtgagaggggagttgtcttctaagtgttttgcaagagaacattttttcaacctttgatttaaatcagaacaggtttgcagtattttctttaattttytgttataaaaatgtttattattataaattttagaaaactttcaggaaatacaaagatgaatggcaatcacaccaaacccagaacctgccaatctcttact

SEQ ID NO: 32479 - DNA, 201 bp, Bos taurus
ccggttagatgaaggagacaaaggaaggattggtctgatacccacccaaggtggaccggagtgagaagagctgggcctggttaggagggaatagcagaacygtaggaaagagggcttgttctgggcagtacatgaagccctgccaggaaacgcacggacacctctagcacacagggagcccctccttgctctgggcctggc

SEQ ID NO: 32480 - DNA, 201 bp, Bos taurus
cactctctattagaggttttgttcccccattaaaccacctacatgcaaatctctgtcttggagtgtatttcccaggagcctaaacccagctatgtgccatyggcctgatggcagaaagaaacattggtcctctgtctccactttcagaccgtgatgtagtgagacaagcaaatggtgagcctgctggtagatatcgttaaa

SEQ ID NO: 32481 - DNA, 201 bp, Bos taurus
catggtacctcagtgactgttcattattattttcaaatgaccaaaatgctggtcccttggcaatagtcttaaacccctacacatgtggaactcaagcctgrtaatttcctgcatatgtttttgcttctaaaaagaggtagggtgagaattagattaaattgtgactgtgagtcatggaagaatactaagggaaatttctac

SEQ ID NO: 32482 - DNA, 201 bp, Bos taurus
gtattctataaatcagttgtccccatcctttttggcacagggatgggtttcatgaaaggcagtttttccacagatggggcagcgtgcgggggggcggggtrgggggtgttgtcttaggataagtcaggcacattacatttattgtgcactttatttctattatcactatatcaaccctgcctcagatcgtcaggcgttaga

SEQ ID NO: 32483 - DNA, 201 bp, Bos taurus
cttatagtctttaatgcctgaatcagcatacatttattgagatgccactatatgttgtgaccaaaagtccatgttgtgagtgtgggtttattagagatatytcaaccagaatttctagaggcatttcaaatttcctgtttccaaaacagaactcagtaccttacctgcaacacctgtgtaagacaccatcctctcacttag

SEQ ID NO: 32484 - DNA, 201 bp, Bos taurus
gggagagcaagacaccactgttccaacctgctggaggatcgcatggaacagagctgtgccagacccagccccagggctcgtgcacatgggggcctccagarcagagaactctgcccatagagcttgggcagaggtggtgtcattccctaggcattaccattcctcctttcacaggaccctatgacaccaaagcacgagacc

SEQ ID NO: 32485 - DNA, 201 bp, Bos taurus
cagtaaaaatgcctaattttattactgtagttttgacccataaaatataaacttataacactaaccactggaccaccagggaaaaaaatcacaatgaacayaactctgtggaccccaagtacacttagctgagtttttcaatgtagcttggtaatacttttacttgtcctctcattctgagattactgctccaacctacac

SEQ ID NO: 32486 - DNA, 201 bp, Bos taurus
cagttttactccaattggtcacaaaaggccaaagtcatacaaaataagaacagtgttctgaagaagttcaaaataatctaggacaggagagaagtaaatayggcacagaagaaatagaagtggccatgagttgataattactgaagttgagtgatagatacaagagagcttttatacatttctactttcttctattttagg

SEQ ID NO: 32487 - DNA, 201 bp, Bos taurus
tttacgtactaccaactaatttacaactttcaagacagtggtgggtcaacactctgtgggccaaacacatcatgtctgagttggatgtggtttgtcggccrtttgcaacctctaggtaaataatttgctgtttccacagtacttggctgagaaggagatttgaaccagggctgtctggactccaggcccatattcattcag

SEQ ID NO: 32488 - DNA, 201 bp, Bos taurus
ggttatgctgtctttactttttatttttaacttcagatcagtattatagcagtcagtttaaattaagcaggaggttcaaaatttcaagggcaagacaatgraggaaatagagaagggacactgctatatcctaccagagtggtaggtggcttctagatcacacaattattctccttcagcagtgcagttaacaaagcatac

SEQ ID NO: 32489 - DNA, 201 bp, Bos taurus
gtatcgcaacagcaaatcatctgatctcttcctttagataagcagggccagagttaagacaaagaatcttgttcgtcatggaataacaaaatgctagaacyagagatgcctcccaggtcatctgggccacaagacacaaataagaaaactaagacccagaaagaagaaataaccttgccaaggtcacatgggcagtagtaa

SEQ ID NO: 32490 - DNA, 201 bp, Bos taurus
aattatccctattaagacaactattattattaacatcttccattacagataaaacaggctcaaaaagaatgaatgaatttatttacaagaggtgaagccaractgggacctaactcatttctccaaaatttctgctctcatcacaaataaataaaatgtaataaaatatggacttcccatgtaagtggtaaagaatccgcc

SEQ ID NO: 32491 - DNA, 201 bp, Bos taurus
cagccaagacggacagaccaaaaggacttcttgtggcccctcctcacaagcgggtaacatgccagtgtctcaagtaactcagattatgtcctgtgagtgtkgggacacaagggaagagggggccttaaggagccctgtaacttcagaaactggaaaccactctaggattcaccctggtgatcacacaaaataaccatgggg

SEQ ID NO: 32492 - DNA, 201 bp, Bos taurus
ggtggagtgcacaatcggttttggcccctgttttaggatgatccttcttggtctctgggctggatgatacggtggctatgtggccctcctcggggctagaytggggcttgtttggtttctgcagcagcacatcaccgttcccgacagtgggggaggcctggcctggctgggccttctctcccacagccccaagctggttgc

SEQ ID NO: 32493 - DNA, 201 bp, Bos taurus
caccctgaattaaatccaggttctaacagtgaaaatggagcaggatacaggtactgagtgagtgagcaattaattgcatctccattttgagtctccatccmagaaacaagaaagtcattcatggactagaaaaggtaattaattacaatatttccaaagtgtcttctgctccccacaccaaaagcgtctactacatataaa

SEQ ID NO: 32494 - DNA, 201 bp, Bos taurus
catgaatatgaaaatgcaaaccaaggcatgcaaagatttatactcaacggtagaaacatcaatattgctgaaaagctacatccatcagctcagcctgctgyagcatatttagtcccaagactgagaaggctgaaccctaggcaatttatctgcatgtgtgtcgggctaaccacacaaattttgcagatgaagctagaagtt

SEQ ID NO: 32495 - DNA, 201 bp, Bos taurus
ctagaaaattgatctccacttttatcattatcacatactgaggaaattattttaagagagagtgacagtgggaaaatggagataaacagtcttggtcttcrggtcctactcacttcatctgctgtcccgggtacactgtgttctggagaagtgcttctgaattttaacatatataaaatatcactcaatacaaattacaac

SEQ ID NO: 32496 - DNA, 201 bp, Bos taurus
tgtaagggcaatacctcctggagttgtacaactcagagcttctgtttcttcagtgagattatgcccagttggcttattccttaaaatgttactaatctttrgcaatgaaggtgactttggtcttttttttaaattgaagtatatagttgctgtataatattatgtaagttaagggtgtataatatgctggacaagggaatg

SEQ ID NO: 32497 - DNA, 201 bp, Bos taurus
agtccttcctttgcacacctcctccccaaggcctacccccaacaatctacttctgctgcagacctgggcatttacttctcacattaccacccctctgcccyccatggccttcaagggcccctttgatcagcccctgactccaaagcctcctcttcctttggtaccagcctcagatttgatgcttgatttcctcatgtctgc

SEQ ID NO: 32498 - DNA, 201 bp, Bos taurus
taatagaagcccttattttgatgttaccttattttggcaaagtacccttgctcagtctactttctgagccatcccaaattcgccatcacctctaggcctcrggtctcaagttaaactctgattggtagacaggtgagggggtctctgggtttggtgcctgctgtccatcctggcctttgagcctggaggtgctaacgtggc

SEQ ID NO: 32499 - DNA, 201 bp, Bos taurus
agtgaagccagtggagaaaagtgatgttctctgaatcgatatttccctcttgccctttgtaataaaatttctaaaacaggagtgtgttttaggtcctgtcytctatcagggcattcaaaagaggcgctgactccttctttccacttaagatcttatcaggtgagaaaaccccttccattgcatcaccccagagaagagcct

SEQ ID NO: 32500 - DNA, 201 bp, Bos taurus
caatttctagccaaaaggagtaatggcctcttggtggccaactgcttcagctacagagtttgtgttacagtggaattttctttttttcaattaaagtaagytgggtaacgcttagacttgaccctcatcccacggaaaactcttatcaagtagaaactgattaaaagggatttgaaaaaaatatatatgtgtgtacataaa

SEQ ID NO: 32501 - DNA, 201 bp, Bos taurus
tttgatagccataaaataatactaattgtgcttgcctacatactgggttgctagatgtgaacccctgatattaagatatgtttgtcaatatctttttcctyaagaaatcaagatatctaggaatatcagtccttagaatgttctttgcttgaataaatttatttcttaatcctgaaaacataaaagcctagtctatagtat

SEQ ID NO: 32502 - DNA, 201 bp, Bos taurus
tccagtgccatgaatctctaggtgtctgacatgggccagggtagcctggggaggcaagctggtgaaatggatgaagcacatgctccaggattagaggcacrccagcccaggccttcgtgtgtgtgtgtttgcaaggcttagaattgcctcgataatgatcacaagcacgtcctgatgtttgcaacctgtgagcagatgcca

SEQ ID NO: 32503 - DNA, 201 bp, Bos taurus
tttgggcacctcccgaattctcctggacaggactcctgttgggagacaactcatgcaagtggtcatcaatgtgcctggccaaggtggctggttttgatcartggttcactaacattcagttcagttcagttcagtctctcagtcgtgtccgattctttgcaaccccatgcatcgcagcctgccaggccttcctgtccatca

SEQ ID NO: 32504 - DNA, 201 bp, Bos taurus
ctgagagagcagctggagacccctgagtctgaaatctgacagaaatctggcagaaatgcctgagatgtgtaccacaagtcacggggcctggctctaacatrcttctgcagatagccttggagactctctgagacaacgatctatcagagattcctctggccacatggagtttagattatgaaagtattagggaaatactag

SEQ ID NO: 32505 - DNA, 201 bp, Bos taurus
atagcattatatgtaaatgagaccctcagaaatagtaggttgaaaacaatgataaagaaaacagtgaggactcactttgctggcatatttttcagcaatcrcaccatcaccttacttcttaggtactgattattttttaaaccagatttataaatattcattggcagggggaaaccttagttgacctacctagttttaaaa

SEQ ID NO: 32506 - DNA, 201 bp, Bos taurus
gtcagctgtactctccagtttacccctgaggaccagcagcatgaagatatagccaggttcctgaagcatacactcagtcaggcccacactttcaatcttgktttctctggcaatatgaaatcaagtggatcagatctggcaaatgccagatttaggactgggccaagttgtgtccccctccaggctaacttctcatcaatc

SEQ ID NO: 32507 - DNA, 201 bp, Bos taurus
agcttccctttctgttagatgtgtttgtgtggctgtcttctggtcagtgaagtgtgagctggcacggtgtatacctgatgcagtccaggccctttgaaatytcctgttctccatccaccagtttaaaacaggggaatccaggggcttggatagaaagaccctgggcctctgctgtatgcatctgtcatcctaaactggact

SEQ ID NO: 32508 - DNA, 201 bp, Bos taurus
gaaactctctttcccagtccttcctcatcatatcatttagccatcaaccatcaactgaaaatacaagaactgcatggcatctactttctcacagaagtgtytgtcttcctggagaaggagaagtgagactctggtgtctgtcctgcttcagtgtgggaaactgcaacatctgcccctagacacaggagttgggtccccccg

SEQ ID NO: 32509 - DNA, 201 bp, Bos taurus
ttccttatatcatttcaatttcttggttcagcatcacatctcctccactttaatcctcctgcctcccttttacaataaccttagtgattacacgggattayccagataatataggatacactttcatccccaaatccttaacatttgcacatttctttttacaatataacgtaacactcacaggttaaggagattagaatg

SEQ ID NO: 32510 - DNA, 201 bp, Bos taurus
actgcaggaatggtttccagaaatcccccctgctacctctgtgtcagttcaccagtcttcaaaacaggaggtgcaggatcagaggctgtattacataggartgagtctaagacatctgaggcaggaagtatggaggtaaagaagaaccaacatttaaaaggagcatcaaacttaaaatattgaaatctagttttaaaaaaa

SEQ ID NO: 32511 - DNA, 201 bp, Bos taurus
tagcaaaaacaaaccaaaaaaagcttattgcattgtaattccgactactgttttaatattggagatttactcttttcccagaattaactctccctcaataytgacacatgacttaagagtattctcaatgaaaacggtgccatacagtctgtagtttggcttaacttataacacctttgccctttatttcataagacatca

SEQ ID NO: 32512 - DNA, 201 bp, Bos taurus
gtctactgatttttagtgaaccacattgaacttatttcataaacttgtcacacagctatttaacttatttaacatgaaagaagaaacatttaatatatctycttaattaacatgaagaaactatcaagatggtaaaccttattcaaatattatttgttgaaatgagtaattcataagcaataaaaataaacatgagaataa

SEQ ID NO: 32513 - DNA, 201 bp, Bos taurus
agaattgtaaataagttcatttgcaacattttttttagattccacacataagcaatatgccccacataatatgatatctatcacacacaaacattgtaatrtatttgtctttctctgtctgactttgcctgatttgcttcacttaattgccaggtccatctatgatgctgcatatggcattatttcattctttttatggct

SEQ ID NO: 32514 - DNA, 201 bp, Bos taurus
catttataatccacctccttccaaaaaaaatgtcttgagttaatcaatgccttagtcaagagcaccaatgtctgtgcacatcattgtccaaattccctacrtaaaagtggttaatgcccctgagcaatttcagacagattttagtagaataactactctaatttttattgttattagaaactgctgacctaagattcagac

SEQ ID NO: 32515 - DNA, 201 bp, Bos taurus
aggacagagatgatagatagacacatacatagattcctttccccttttatagcacaactgtatttggatttactagttctatataatttttctgggcttcmaaatcactgcagatggtgactgcagccatgaaattaaaagacgcttactccttggaaggaaagttatgaccaacctagatagcatattcaaaagcagaaa

SEQ ID NO: 32516 - DNA, 201 bp, Bos taurus
tctggttaaaaaattatgtgtcagggtctttagttttttgcaaaacacaaagttaaataattctagaaaaggaaagtaactgtgtaaaactcggaaggaayactgttgtactaaaatattcaaaacagtcattctttctgaaataaatacaattactttctccctttgtgcacaaccatgacaagtccacagaagaggcga

SEQ ID NO: 32517 - DNA, 201 bp, Bos taurus
tcagctcaatgttattcatgtctttggagtataagcatcaggagattgggagctctaaagaaaaactgattgtaatatagattcaggtcatgaaaaaaatmccctctatacatgggatggcacaagcatgcttatatccccagactgatatttttattatagattgcctgttggggtactaggcataggtgaggatatatt

SEQ ID NO: 32518 - DNA, 201 bp, Bos taurus
tctgcacagggctactcgagtgtcctcagcatggagctggattattccagagtaaataatcaaagaggccagtgaaaaagttccaatgacttttatggccrtggcttggaagtcaaaagtcttctttagttttgctgtattcttctgatctcagagatcacctctgatcaacatgcagtgactgtacaaaggcatgaggtt

SEQ ID NO: 32519 - DNA, 201 bp, Bos taurus
gagtcagatgtgacttagtgactgaacaaggattcaaatagactgggtggcctactgggaagacagatggatgatctatttattggggtttctttgatctmgcaaaccctattatttgaatggccatccatgatactctctcaacgttatagagaaacaaatattagcattagccatcaaaagacttctttatcctgagat

SEQ ID NO: 32520 - DNA, 201 bp, Bos taurus
aagaatattacttttgagttcctcttaaaacaatggaaagccataagtggtgccacagaatgccttactctcaaatgtgtgtgcagtgctctaacttctgmctcttaaatacacaaaagaattctgaaaacttctgaccttaaggttcagaaatggattattttgaattacactttggttttcttgtgtcttaagtcatgt

SEQ ID NO: 32521 - DNA, 201 bp, Bos taurus
agatttaattatgtaaaatacatgaggctttaaataaaaatatcacagtaaaactactgtgagaatgtttttcacattcaaaaggagaaatttcaaaaatyattaccaagtattgatttgatatctagtccatgttcaacaccaggctagaaaaaaagagatgtgctctaatctctcagagaacttatcaacaaatatgag

SEQ ID NO: 32522 - DNA, 201 bp, Bos taurus
aaatcaaatgcaaccacaagtatgccttgcataagggacccttagcaataagttgctggttttaggtcattatacacttttcgaagggaagtgggagagarctaaatggccagtcagagaagaggcattgacctgtctagggagctccttgacaagtacaggcacttagggaggttccctttgaggaaaccataaaaaagt

SEQ ID NO: 32523 - DNA, 201 bp, Bos taurus
cataaattgtctagtagatagcgtcagcagcagaaaaataaagattaagtcaggatttcatatgtgcccttcaaacctaattactaaaagctgaataaacrtaatgctatgggaaggggcagggaccctaaatacaaaaccttacctaaatattttaatatttttgtggtggtttcagttatgcttttgctatgcaaagta

SEQ ID NO: 32524 - DNA, 201 bp, Bos taurus
agtaagaagagacaaaaatggctatcaggaagtttgaaacttaaggttagacctcatggaagagataatgaatggactggaagtgaaaaaaaacaatcaakgctatagtttctgtagagcaaaagaatatagaagcaagaaaaaaagaaaaggagaagcaaacaaatgtgggagcaaaggtgagtaagagaacctgaatgc

SEQ ID NO: 32525 - DNA, 201 bp, Bos taurus
tttaatggtttcagaattatcatactctattatgctgaagaggcaaaaggaactgccactctgtagaagtttgatctactattagagagaactcttattcytccctgttccccacagtttcctgggaacaataatgaaataacacttccagccccattccctatacagtcatgcctccctgaaagagaattgtgacaagtg

SEQ ID NO: 32526 - DNA, 201 bp, Bos taurus
aaacaatgacatgtatcaactttattgaggaaaaaattatgttttctaacatgaaatttaaactagagagtgaaatgtatagattccctcacaaaagatcrtttgtactcacatgaaatattttaaagctcaatatctttaagatggaaatacttccttgtaaggacttaagtcagatgttctagtggcattccattattt

SEQ ID NO: 32527 - DNA, 201 bp, Bos taurus
taaggtcaaagaaaaaaatgtttttgtggaaatgattaaatgaatagcctggaaaggcaaacagtaggggctggaaaaggggaagtgtcaatgaatacttytttggaaaggagtgagttggggtaactgctaggcctacaggtgatggtatgagagtaggattaaatggatgagtgatactgaagaagatatcatttgcat

SEQ ID NO: 32528 - DNA, 201 bp, Bos taurus
agtttatgtgtatccctttacactgatactgtaccaatgaaatacaccagccaggaagcataatggaaacaagagaccttctagtaatggaaacaagagaycttccacctcaaaacctccatcccttgcagatactgaactaaaatttctagcaagatacagtttgtttttgttttactttagattgcacagatagctaaa

SEQ ID NO: 32529 - DNA, 201 bp, Bos taurus
gcagggactgttggtattactgttacaggttagaatataggctaaaaagaaaagacaagcagtatcacatgcggtattggacttaagtgatacttttcatratgttactgggagaagtctgttggaaatgtcacatataggtaaacagtataggtgagcatctttgaaatcactgtcatgttacctttatttctatagttc

SEQ ID NO: 32530 - DNA, 201 bp, Bos taurus
agagactgaacaaccactcacacaaatctaaatattaaaaatttaatagaaatattctcccaagagtaaagaattgccttagtcagattaggcagccatawcagaataacatagattgtgtaaagaatctgcatacaatgcaggagacccgggtttcatctctggatcccctggagaagggaatagcttacccactccaga

SEQ ID NO: 32531 - DNA, 201 bp, Bos taurus
gtaggccagttcctaaccactgaaccaccacggaagtccataccttgttttttaaccaaatccacagaatgtcactataaaaataaatgacatagtctttkggaatgtgtttttaataagatatgcaggttaaaatccagaatcagtttacatctttgaatgtatatttgctgccatatcatccagttgttttgttttttt

SEQ ID NO: 32532 - DNA, 201 bp, Bos taurus
gttacagatttccacttctatgtattatcctaccttcagcctcctaacagatattaaatatagttagtaattggacaggtcatatgcaaaccgtctaaagyggcctgataaaatatgtagaacatctttttcctccagacaacatttctacattttgagaacagaaagttctccaaaacacataccaagtgatgtgtagcc

SEQ ID NO: 32533 - DNA, 201 bp, Bos taurus
tggttagaaaataagtgaaaaggcctttctgtttaaaatgtaaacaacagttacattgtcatttcatataatctttaaaatggtagtaaatggggaaaaartactactatgactataaaaagaataagatgaggatgcataaccaggaaacaagaagttttaacaaagttttgtaaaacacaaaggaaaagggctgactga

SEQ ID NO: 32534 - DNA, 201 bp, Bos taurus
tcaccatcactatctattttcagaacatttttttcaccccagttagaacccttgtaagtcattggcagtcactgcctattctcctcacttcccaggccctrgcaactactattctactttctgcctctgtggatttacctattctgggcatttcataaaaacagaatcatacaatatgtggcctgttatgtctggtctctt

SEQ ID NO: 32535 - DNA, 201 bp, Bos taurus
cacctggaaccaggccatgttcctcaggagacaaggaggtgcctcgctatctcctcttcatcactccccaggcaccacccctggcccaagcctactacctycccttttcccatctagagtatttcctgcgatttgggggttgcttcctagccacatggtgctcctggccctcagaagccaccacttcatttcagttttctc

SEQ ID NO: 32536 - DNA, 201 bp, Bos taurus
gaactactataccttatatgtaataatttgatgactactaagaatgaaaccaatgaccagaaggagttatcttttaactacatataaggcctcacatgcartcatatacatttcatgtttttactatcatgaaaggttgtgcatttttcaagttaaataggccacatttttaatttgtcattgaaccacaaatcaacctca

SEQ ID NO: 32537 - DNA, 201 bp, Bos taurus
aaattataaatacatacctgcttgcttggtggtggcaaatggggacctttttcttggttttcatgtgtggacactgaagccatgatgaccttgtcttcgcytctcttctagttgagtggactcagcttccttgttgacccactatctaaggaaagtataagagtcactgtgcagtgatagaacatttatgtcaaccataaa

SEQ ID NO: 32538 - DNA, 201 bp, Bos taurus
cagaagttgctagtcctattaaggcccaggcttggtgtccagaatattactttcactgcatcctattaatcaaatccattcacagtttctcaaagagtatwaatttctggggccatctttggagatgagcaaccacacattttaataacatttattgaagtgtgttcatgaaaatttaagctccataacattttatttttt

SEQ ID NO: 32539 - DNA, 201 bp, Bos taurus
tttgtttctgcagagctttcaattctgcttatttttatcctagctttggagttggttacttgcttcactgtctgtctaatttagagactttctctcttgtyccactgttaattcagtgacatatcatttgaaattgatttgtcagtcttacaaattttcattcaacatcattcacattttgcttatttttatagagaccct

SEQ ID NO: 32540 - DNA, 201 bp, Bos taurus
ctgagcatcagctctgttctgtgagtttacccagggactcagggtccttctatgcttcaccatcccctagggtgttttgttcatccatagcataacaggtytgtagggtcatatccacatacagcccattagaataggtgaagagcagggaaaacaaatacccaactattttaaagacaaaagtcagaagttgtatatgct

SEQ ID NO: 32541 - DNA, 201 bp, Bos taurus
tgcattgcaggcagattttttactaactgagctatgaaggaaattgtgaccaaacaaattaatcccacatatttcagacatgctttttaattaatttgacytgtttttattgatattttgtggtaggttttggacaagtaaaatataaacaaagctgtcccaagccaaatagattttttttttggcatttatgcaatatgc

SEQ ID NO: 32542 - DNA, 201 bp, Bos taurus
tctgatataaaaaccacagaaaatgcattattctttgataaaaaaaaaagctacagaataatattctttgtcaaagcgtatgtaaaaatcccaaacaaaaytttggcaaaccaaactcaaggatgcataaaagaaaaattctcagtgaccaaattaggccaatcccaggaatgtaagaacattcaaatatcaacaaatgta

SEQ ID NO: 32543 - DNA, 201 bp, Bos taurus
atggcttattttgcataaattgacaagctaaatctaaaatttataaggaaatgtaagaaacccagaaaaaccccaaaaattgagacaaaaaaataaggttrgagatttctattttctgatttcaaaacttactggaaagctatagtaaacaataccttgtgaagttagcatatgcatatacataaataaaataaaactgac

SEQ ID NO: 32544 - DNA, 201 bp, Bos taurus
atggcctcttttcagtttatacttactagagcaggtcagtctctggtttcaacatttccttctgtcatagtctgaattgatcggaatacttaaggtcaatrgagcagaataatttgtccttggccctttctttaattccttaaaagtaaaaatataaaggctagtttcattttataaaaataggagtatagagatctcctt

SEQ ID NO: 32545 - DNA, 201 bp, Bos taurus
catgactgagcgactggaaaacaacaaaaacaaaaacaatgtgagagtggcattttcagtcaatgtttcatttcctagatgagtttatcaaggaaatgagyatagagaggaaggaatctagggctgagacccaggacactgtcatatgatgaggtctgggagaggaagagtaaccagccgcagagaaggaggaggacctga

SEQ ID NO: 32546 - DNA, 201 bp, Bos taurus
cataaaaaataaagacttcccctccagaagaatgagaatttcagaaacagacataagaaaattaatatatggtcagctgaaacttgtagtaccttagaaamtatgacagagtaaggtccaactgccttttttaccaagcttgtgtagaccagcatttagtaaaataacacaaaaaataagaaaatgaaagcacttatggaa

SEQ ID NO: 32547 - DNA, 201 bp, Bos taurus
caataccatgaaataactcttcataagagagtgagaaggattgttgcagatgcagtggttaagggctattaactgggataagagagaactctgagaatccwagaaggggaagtgcctcctgaggtgaaatgagaggataaaaactgtgaaagtcacagtagtgcctagggtgaagaatttctaagaatagagatatataat

SEQ ID NO: 32548 - DNA, 201 bp, Bos taurus
aagtggttgggccaagaattttccgattatatggcatttaagcacagaataaaaggcaaaaagagagtaagtaagtaaacatttttggaaggacattcaargcagagggccactataagttaaaaaaacagtgaggtggaggtaatttgcacacacacacatattccttcattttgccagaaaatggaaaagattcaaaat

SEQ ID NO: 32549 - DNA, 201 bp, Bos taurus
atagattctcttcagaaatgactgtgattatagataatgcaaagtacctggaggttacaagaggttttcccaagaaaattttaacgtgccctgttttggcyaaattcaacaggatgcatttacaattagacaatttaactaatttgttaactgcatggattattcttttcttagagttcccttatattgtcaattttggat

SEQ ID NO: 32550 - DNA, 201 bp, Bos taurus
ttctgttttcctttctctgtaggccagcatttttttgcttatttgtccaaaagaatggaaattggtgcattaatggcttctaggtttatatcctctttttyaataggccagttcatggtaagctattttcaacttaaattccaagcttgcaaaagatagaatgaaaatattccagtttaggtgttgttcagtagcctgcag

SEQ ID NO: 32551 - DNA, 201 bp, Bos taurus
gattttaagaagatgcaaatgttcagactatggcagccattaaaagttaacacctgaactttctaatatgaatattttaagagagtcagaatttctaagcmaaatctgtgaaatctgaaagatatttaacagattttcatcaaaggataactccatatgggatattgttataaggaaataatttagaacataaatttaact

SEQ ID NO: 32552 - DNA, 201 bp, Bos taurus
agaaacgaatgtctaatgtatccttttaagaaatatacttcttttacctaaagaagttggcaatgatattgcatggcctcatctgtccatccacagggctkgttatatgactctggttggctaaccaggccctttattccaagttacagcattgttatatagatactgtcatatgacaaactctttccactcaagttgacc

SEQ ID NO: 32553 - DNA, 201 bp, Bos taurus
gattggtatgatagtggcagcattctgctgtgtcctgtcaagaaggaaaaaagcttaatcaaatattcttggataattttacaaggagcccatccaattayctaaagctatatctccattcactgtcaaagcaaatggacaacaacaacaacaacaaatcactacctaataatataaaacattttatttgatgtcccttat

SEQ ID NO: 32554 - DNA, 201 bp, Bos taurus
acataaaggtaggaaaaaagaaaaaattcagcactttctaaatgcatccccaaaagagtataacagtgttgcttttattttcctttcaatattatctttcmttcaatattgtttattgataaagagcccagttagaagactaagggaaggggctaaaaactatttcactaaatattccttcaatttagttcaaatttcaat

SEQ ID NO: 32555 - DNA, 201 bp, Bos taurus
cttactacagtccttccctctaatagacttagggagatcagtatgttccaaagtctaaaaataaaatgcaattttcttctggcttacaatactaaaatgaraccattttcattaacattcctacctacattatgctttttaaagtgtgcttttctaagaaagttattaaatcttataagaattaattccccactaggtaaa

SEQ ID NO: 32556 - DNA, 201 bp, Bos taurus
ccaatacattagcttatttaatctatccaaataaataaataaatgactattctcctttatctacttttttgtgtttttttttttttttgaatatttgtttrtttgggggctgtggtaagttgttgctacacacaggctttctctagttgtggcaagtggaggctaccttcctgtggtgcacgggcctcttattctggtggc

SEQ ID NO: 32557 - DNA, 201 bp, Bos taurus
tagagacatgagggtgaaaatcactgatgttctccaagagagacttcaagatacaagcaaaaacaatgattacaaatgttaatgaataaatagagaatatkcagcaaagggtcttttataatttttcatacattaaagaagaagaagtgaaataggcaaaagtatatatttgtgtgcacatgcatatatataatttatagt

SEQ ID NO: 32558 - DNA, 201 bp, Bos taurus
attggttttctgtatgcttaaattttgtgcagtttaattaatacctaaaaatgcaagccctgtgtcttaaaaatctcaataataggaaatttaaatgtagyagggaaataattaggagctcaacattttctcattactttaaaatgaatttcatgtcaaagtttagacacatatcagaaaagacacaataacatctcattt

SEQ ID NO: 32559 - DNA, 201 bp, Bos taurus
ggcaaaataactcaatgcactgtaagaacatagatctcacctacagagtaagaatggaaagctaactgaggagtgacagaagacatccctgaggaaatgasgatccttctaaaaccaaaagattacttagtgacgtttggtaaatgacagtgggtcattaagcaggtagaggaaaagatacattttgcttgttttaaattt

SEQ ID NO: 32560 - DNA, 201 bp, Bos taurus
ttatgatcctacacacacacagacacacacacattcctatacacacacaactgcagctagaatttgtatgtgtgtttctgttgaagagtacatacaaaaamcacctttcatcatttatattggatttaaatatatctgaaggggtaaaacagggttttttttttgcattaaaagcttttattcatcttaccccctaccaaa

SEQ ID NO: 32561 - DNA, 201 bp, Bos taurus
atgccctaagcacatacaggcacaaaggatggactctagcatgcaaaagaaggtcataaaattattttttggaggaagtgttcctcacactgaaccacatmattagtgtaattgtactttgaaaatgatttttaccaaaataaagtagctggtccaaaagtatgggttctttgtagattcctacttcttatctcctttaat

SEQ ID NO: 32562 - DNA, 201 bp, Bos taurus
gagatattaaactaaggtgttttctgtaaagtcaaattttcttacttgtattttttccagatggcattctgaaggccatcatttttcagctgtttgtgaarcaaatgctaggccatctttttgggaattacttctccagaatcattaaacccatgttgagggtagcaatgtgagaattccacaagaagtttaagccctaag

SEQ ID NO: 32563 - DNA, 201 bp, Bos taurus
ttaaacatttttgttattgtgtataagacaaacttcatatttgtcaattataccaatagactttataaaattcataaagtcagtcttcagaactctccaaytctaattaatttaaatcacattctgctttaaaaacattaaaaaatctagtttatagttattctgagcccctcatagaaaaattggtattagtctatttag

SEQ ID NO: 32564 - DNA, 201 bp, Bos taurus
tattacactaatactgggaggagaaaacttgcctgtatacttggaaagagggagaagtggcttggtaacaatatacatagatgcaaggtagtggaacagaracctggaagggcaatctggaaagttagaggcaagtacatctaaagaagtctaatgtagatttaggagtatatgaggatgagcaccggagaaggcaatgga

SEQ ID NO: 32565 - DNA, 201 bp, Bos taurus
caagcttattattcaaaataaacttacaaatgtttagattcctaaactaatagcatattatggcactcaaagccagagctcatggtttttaaatattattycacaggatatccaggagttctatttttccaaaatatgcatttgacatatataataattcagatatgtttgacagataacaatgttaattattaaaaaaaa

SEQ ID NO: 32566 - DNA, 201 bp, Bos taurus
gtccttcctctcacatagaatatagccccgttcaagttctgatttcattttactggccctgtgacactctcccttagatcacattctaacttaaaatattyctccccattcatcacaggacatgatttttgtaaaatcttttattttattccttccaaaaaaattattttatttgcctctcatttgcctcttgcccctgcc

SEQ ID NO: 32567 - DNA, 201 bp, Bos taurus
gataagttcacctccatgataacaaattttaagtcaccaaagctaataacaactatacttcctgttttgtttttttacaatctctctgatcttggccctaycaatatttttggacattcatatgtttcccctttgaggcttgtcacctctccattgattctttcaaccagaattgactgattctctgacaaccttcttaca

SEQ ID NO: 32568 - DNA, 201 bp, Bos taurus
taagtgtggcttcccttcccttttgggatctgcttctcagcattatatcagcaatcttttctactcctacttcgataggacatatacttatgggccagggyctccaacccacctcttagagtctggtttgaatactcatctatttttatccttgttctattagaactcaaactgttctaaatagtgcatgtcattcagatc

SEQ ID NO: 32569 - DNA, 201 bp, Bos taurus
tttatagttgggccatttaaaaatatccaaacagactatcaaggaagttatctaaagtctatgaacacataataatgctgtgtgtgaaacataggcacttyaatgggcctttgagcttgttttacttcttcaggacttgtatccagtaaaatgagggatttggagatgatcttcaagttctcttctcttcctttgtccttt

SEQ ID NO: 32570 - DNA, 201 bp, Bos taurus
ttatgagattagtattttagccagatattcgttttcctacgtgtactgaatgtgtcattagcacatcatctaatgaaatcatctgctgacagagaccactrgagctgtttgccatttctgctgactctgtgttcccagttgatttggctaaagagcagttctagggtggcagcaggacatttctgaggcagtttacagcat

SEQ ID NO: 32571 - DNA, 201 bp, Bos taurus
aatgacagaatttaataaattgtatcagaaagagaaacagaattatggcacttaaatcatgcctcacatttgaagaaacacagtctttcactttaacatcytaggaattgatacactacttaaatgcattttgtgcagacagactttttggtttacatatctttgttttcaggtgtagaaactaaagatagttattaaaaa

SEQ ID NO: 32572 - DNA, 201 bp, Bos taurus
ctcttcaaatctcatattgaatttttcagtttagctgttatattaatcagttccatgatttctgttttgtactctttaatattttttcttctttaaaattytcacttaatttgtgtgttcctcttctaaccttgtgaacatctttgtgaccattaattttaagttgtgttgtttaattcacatagtctctcttacattaga

SEQ ID NO: 32573 - DNA, 201 bp, Bos taurus
actaaactaaaccaggcttgctacttgttatctctcaattagcatacaaaaccactataatgatgctacagcaataattctgcatttcagcaggccaagtytcaaaggcacaacatttagattttggacttgaatatttaagtacttaaggaatctccccttatctgcatctgtagcttaatataaaaacttatagcttat

SEQ ID NO: 32574 - DNA, 201 bp, Bos taurus
ccagccctctttcctagcttctggtagtgcccaggattgtaacagcataactctaatcttcacagggtattctatcagtgtacatatctgtttctatgttytaatttccctttaagaagacaccagtcatattggattagggccaacactgatgacctcaccttaacttgaacatctgtgaagactgcatttctaaataaa

SEQ ID NO: 32575 - DNA, 201 bp, Bos taurus
accagtctggagagttctgcctctttctttggtctctcgttgccttccatgtataggggctagtttgcaaactaagtgacacaggccttctatacttcccrtgtctgtcttcatacttgttcctctgcttaaaaaggctgcctcagatctttgtaagcctggcctctccttttcattcatgtcacagctaaatgatacttc

SEQ ID NO: 32576 - DNA, 201 bp, Bos taurus
catgtgaaggtatttaaaacaagtcttaattcactccacacaagattctttcaaatttttcccttctgaaacaccatttcgaggcccaaaaaccttcagtmttttcctatgtggaaaagtttccactccctctcactagttctgttcttgccctctgaacatgttacagtttgtctacatctcctctttaggccccttgga

SEQ ID NO: 32577 - DNA, 201 bp, Bos taurus
agctgatagaatggaccacagtggagacagagacccaatttcctatctgcaataacagactactctccagaggaaagcctaagcaatttagcagctgcttrgcaccttttgaagtcgctgtagtagtacccaagacatccacccatgataaaatgtcacccctcccctgccatcactgttaatctcccagccctgattaac

SEQ ID NO: 32578 - DNA, 201 bp, Bos taurus
ctccccagcttacaataccagcaaggaaccaagtgcctttataatcttcaccaaccagaggtccaccagagtcaccctagagagaaaaggatatatataaygactacaatttaagtatgaatattgcttatttttttctcctgtagtaaagacagaagaaacagaaggaaaatagctaaatatttcaatattaaaatgatt

SEQ ID NO: 32579 - DNA, 201 bp, Bos taurus
ttcaatttttttcctgacttgctcagcactatcagtagatgggaatcgaaacacaagcaccatatgaatgttcataccattttgatctggactaaagaggraaaagcagatagaggtaatcataataaagtcagttctctaaccaggaactatttttacacgttatgattcacactagatttaatagtgagtggcatgtgt

SEQ ID NO: 32580 - DNA, 201 bp, Bos taurus
gataagtacattgtaagctttgataacatggcactgataatatagcaaagaaataagatgtgatgtttaagagacactgatggaacctggtgcttatttamtttcatggctgcagtctatccacagtgattttggagccccccatctatttgccatggttcttctagtgaaagctatgattcttccagtaatcaagcatgg

SEQ ID NO: 32581 - DNA, 201 bp, Bos taurus
tttcattaaattatcgtgtttaagtgtttagtcaatttatttgttaaatttctgaccatgtgctctcctttttcccacaggttttcaggaaggcatccaaratgacagtgtctttggcttttctcttatgtcttctcaggaggacttctagttttcctaagaatggctctgtgtgccctacaggttcatcatattacttgt

SEQ ID NO: 32582 - DNA, 201 bp, Bos taurus
ggtttgagttcgggttccatccctgtcaccgaactaaaaccccataattcatgtaccacagtccaaagaaaaaaatggctaggaaatcgtttgtttataamgtgtttgatgtggtctttttgatgctttgcagttataatttgttgtgctcttgatctatgagttgcagatttcctaacatttggacattatttgttcact

SEQ ID NO: 32583 - DNA, 201 bp, Bos taurus
aaacatctcacctctaacaggaactgagttgtacagtatttgactgtacagaatttgtagtaaattttattctaaatagttttaacatgtgtagtaatctygttttcatattatctttcctttcctagttgcttctgaatcttaataatgctcagcttcgaccactacagcttcaggtatccctaccccaataattatttc

SEQ ID NO: 32584 - DNA, 201 bp, Bos taurus
gcaggtggattctttatcatctgagccacactttagttaaacatacaatgaaaatttataggctttagatttggatagaactgaattaaagttttgctcamaatcgcttgcttaactgtgtggctctgggtaataaataaggtggaaagtacattttttgatttactgatatatgtgtcaggctctctataaaagatttta

SEQ ID NO: 32585 - DNA, 201 bp, Bos taurus
tttccaggcaagagtactggagtggggtgccattgccttctccggtttccatcttacttgtctttattcctgttacagtggcccagccaaagatcaaatcmtctatttgtgctctagatacaaaacaccctgccttcccagcacctttactcctttatttcttcaccaagtcacagctaaagtcttcaaaaggccaagtta

SEQ ID NO: 32586 - DNA, 201 bp, Bos taurus
agcacctactaggccctggtactgcgctagcccactagagacacaatgataccaagatgagtaggtcactcagatgctgctgtaaatgctgctacttagamaaggactcaaaggaaaagctgactctgcagggagtgaaggaggaagtggcacaaataagggtatttttgagctggctctgaaaaaatacagagctttcta

SEQ ID NO: 32587 - DNA, 201 bp, Bos taurus
ttacaatgagaggactctaggtgagcttctggatgggaacgggtcaccagaaagaccaagccatgattaaaagcttgtagttttcagccccagaccttcayattgcagagaggggagaggggctagctgctgctgctaagtcacttcagtcatgtccaactctgtgtgaccctatagactgcagcccaccaggctcccctg

SEQ ID NO: 32588 - DNA, 201 bp, Bos taurus
ggaaggatttaacttctaggttgttttattttttcctgcacttttgtccaatctgaaaaattaagtctttgtattttggagaaggaaattatgaatgcctraaagtgtatttaaatcaaaaatttgctttagtttttcttaaaacaccacctttagcagagcaaagaattttgatagctaagtatataaggataaaagaag

SEQ ID NO: 32589 - DNA, 201 bp, Bos taurus
gttcttgacatgttaggaggagtcagtgaagcaggagtaggggggtttctgttctttgaggtttgcagacgcaggagagcgctgctgcccagctggtgggyttgacggcaggggccacgtttgctaccacacaggctcatcttagcatgcagggctgagtttccatcgcacatcaattgctctttaaaaacagtcatttct

SEQ ID NO: 32590 - DNA, 201 bp, Bos taurus
gcagttttctacatcatgtccaaagttgtttccatggatgtcttctcaccccgcttgagtgctgacatcccatcctggcctgccttcctgtgtggacactyatctcactctgatcttactgtttattgctctgggctcccgtggctctcctgtgctgaggtggacacccaccacgctaggccacacctgtttgtctgggac

SEQ ID NO: 32591 - DNA, 201 bp, Bos taurus
cctatgaaatgatctgatcactgtaagcaggtacacgtattagctttgactaaaaattaaaactaaaaagagctaatgacatttaaatccctttcattttyttccttgatatataaggataggtcaaataaatgcttacagtggatgtgtgcactcctgaatattgcacattcttctaataggttttggctttttgttgac

SEQ ID NO: 32592 - DNA, 201 bp, Bos taurus
acaggccttgtcttcagattagctttcagaatggctgcaccaattccccatcacaaccaggtatcacaaattctatctttttgcatgtctttcttaaaagyaggcaaaaatctttcctagaggccctctggtacatttaacgacatgtttcagtggttggcattgaatcacagggccatgtaaaaattattcaaagataag

SEQ ID NO: 32593 - DNA, 201 bp, Bos taurus
agcttaattctccacaaggccagtcaactccttgggggtgtggaggcgggaatcacttgcctgcttaaaaactgccatgaatatcagtttcctggaaaagmgagtttgaacctcttttcttggcatagtatacgatgttcacccaataccccaagcaccatatcttttgccaattcatttctccagcaagtagaccttgag

SEQ ID NO: 32594 - DNA, 201 bp, Bos taurus
agctttgctacctttctcaaccaggcgtcatctttccctgtgccagagggctgcatggagaaaatactccttaactgctttcatctgtgcttataatgagygatatttttgaaacgaatctctaaatgacctcttcttttcctcactaccgatttgatatgggttgtttttcaatcctcgctgtgagcttagtcaggcaac

SEQ ID NO: 32595 - DNA, 201 bp, Bos taurus
aacaacactggcagtacaaattttgaaaagcaaagtttaaattctgcatactcagaatattttacagataatggtctatctacttactgtttcaaccacaygcctctgtttattcaaagtgccattaaaaatgttcagtgttcattcctgaaaccaaccctggacttctggatccaacagtagagtcaattaaatgattgc

SEQ ID NO: 32596 - DNA, 201 bp, Bos taurus
gaacttatcatacctatgcttttttttttaattcagaaaatttaaatgcatctttctcatttttccaactctaatttttcttgaggttcagtccaagtaamcattttttaaggctttaaggaactcttttctcagcaaactcagactattttgcacataggaaaagaagtgaaattcaaaacactgggtttcatctttcct

SEQ ID NO: 32597 - DNA, 201 bp, Bos taurus
ctccattggcagccctggaccaccagtttgtttgcagcatttggaacagctggggaatttaatcgcaatgtagactatacttctttttgaaatagagcacrtataaaaagaatgagaaaaacaaagaaataatcagttacctccttacaacctctttccatccttcttccctcttctgtccacgcttgggacttgctactg

SEQ ID NO: 32598 - DNA, 201 bp, Bos taurus
atcccattgctgattttaaacacatgaataattgagacctactcccctagaatggtagtgggatctcacatgtatttcttgggttcacatttacctggtcrcttcacaatggcaaataatactgctttttcccatttatactctcttctgcaaggccagatattttcaagtcccactgaacatcaaatttagaagtaaata

SEQ ID NO: 32599 - DNA, 201 bp, Bos taurus
atgaagaagcaatagtaccagggtggtaagcggccttgaacaaatctctctacagatggccttgtgtcacagggtggttgagtcattgggaagattttcaygtttgaacttttctagcacccttttagtttactcccctacactgcatgcaaaagattatgaatgggaatcagtggtgattggggcttggatttggatagg

SEQ ID NO: 32600 - DNA, 201 bp, Bos taurus
atagccttttctccttcgttgaatagacgtaaatcagtgattagttccatgataaaagtactttttaatgtatgctcattaaaggttctggatcagatcaratcagatcagatcagtcgctcagtcgtgtccgactctttgcgaccccatgaatcgcagcacgccaggcctccctgtccatcaccaactcccggagttcac

SEQ ID NO: 32601 - DNA, 201 bp, Bos taurus
ggacacagctgagtgacttccacacatacaatgaagcatcaaacaaatctcctttgaggatgtcttctatccaagatcactcaggaaaataaaactccttrcttctgaaatgttagtgacttgacatccaaatctgagaaagaaggagaaaatgaatgttttcttcttattcctctctatttttttctctttatcttcttt

SEQ ID NO: 32602 - DNA, 201 bp, Bos taurus
gatgattccgtaacggtcagtgatattagaaaccacacagagcccagcatggagcacttgctgaataaatgtttattaatacatttagatatttaatagakttttcattgtgttagtcctaggatgtcttgtttcaaaacattagctgaaagatttttccagtgtttactttagccttcaaatcctaacaataataaaatt

SEQ ID NO: 32603 - DNA, 201 bp, Bos taurus
gtggtccccacaatgtgatctgtatccagggccaaggtaaacacttagatgaactgtgagatttctgatggagaggacatttgaaacggctcctgagtgaygggtgtctgggccatgcttgtcctcctgctctctatgtatcccggccttgatgacaaactccaggttacaacaaagacctagcccaacaaaataaataaa

SEQ ID NO: 32604 - DNA, 201 bp, Bos taurus
gttctttctgctaaatacctgaataattaaagatcagatgacatttaaaatcaaaggaggtggaaagctttgagggctgtgccatccaggccatgatgagrtttctcagagaccatctccttgtgaccaacctcagttgagttcagtctctcagtcgtgtccaactctttgcgacccattgaactgcaggcctccctgtcc

SEQ ID NO: 32605 - DNA, 201 bp, Bos taurus
tctgaaatccagagaatccacagaaccatgctctcttggcctgttgttgctggcaatccttggcttttttttggcttacaactgtatgactccaattttgygtctatagccatgtggccatcttgcctctgtcttcacgtgatgtctagtctgtcttttataaggacaaaagtcatattgtatttatggtcactgaactcc

SEQ ID NO: 32606 - DNA, 201 bp, Bos taurus
aaggataggagaggagcgaagagatgaagagaggaaaagaaaggaaaagaaactgttaagtgggagagggaaggaaaaaataaacttaagggggaggggcrggaagagaaggcacttccagagttgcttatgactagagagagatgacagagaaggtgatggcaccccactccagtactcttgcctggaaaatcccatgga

SEQ ID NO: 32607 - DNA, 201 bp, Bos taurus
ctttcttgcctcttccccatccctcactccacgccctctgatgccagttgactcattcattctccatgacccaccatctcctctggaacacgtccatgttygccccgccttcccgtttcctctgcctggagctctaagacagagaagtgctttcctaaagagatgagtgatatcacaccctttcccaaactgtttatctta

SEQ ID NO: 32608 - DNA, 201 bp, Bos taurus
tctgcataacattttctagcaccccattggccaaagcaagtcccataggtaaatctacattcaagggtggtgaaaaaattccacatctttataaaagaaaytgctaaatgttgtggccactttgtttccatctaccacagtccattcccaatgcaaactacactgacctccccataatttttcccaaaatctgatccattt

SEQ ID NO: 32609 - DNA, 201 bp, Bos taurus
acctttattccttttcttcttcaaaactcgttctcctcaagattgaggaatatataagaaaaggggggaattgtaactgagccagaccctatggggacttyctgagacctgccttcacccgtatcctctgctttatgtactctctcaagtacctaattaatagtatttgatgcaaatttcctgacttattttgccaatggg

SEQ ID NO: 32610 - DNA, 201 bp, Bos taurus
gaatcctcaagccagggatttattgaaaggtgtctttcctctgccagctttaagctggtctaaccagccctccagaatcttagctgggtgcctttgaattyctttaagcatcaatttttctcttcccacacagagtggcctccagtggggacactcctctctctcctctggacagtacaaaataagcttgtagctattttg

SEQ ID NO: 32611 - DNA, 201 bp, Bos taurus
tcagatgtatagcaaccaaaatttgctatgtatgtaattccattgggtgaatgtgaaggccatgatagataattcagaaatcaaacaatcttgggccctcrgaggtaggatttttatgatagatttgaatggattcttttgttattctagtgtatttgcttttttatttttttattttttatttttttgcaaattcttaaa

SEQ ID NO: 32612 - DNA, 201 bp, Bos taurus
tcatgaccttttgcaccgatattctataggaatgtgtttactgaacaaagtttcagaagagatatcttaaaggacttgttactttgaaaaaagtcgaataygctactatacatatacccatatttgcatatttatgatgttgggattttttttttgccttctacttccaaaaatattaacatattcaagtctttgaaagga

SEQ ID NO: 32613 - DNA, 201 bp, Bos taurus
atggctgttttctaccaaggatgacaagtggatgccaagaacaaaatctgagtattaaactgtgaataaatagctgaggaatacaaagagtgcaagcaaargattcaaaccaggtgctgacttaccatgttggcatgaatctgacaggccatgagcaataagcacaggcctctatggataccacaccaagctgaaggctgg

SEQ ID NO: 32614 - DNA, 201 bp, Bos taurus
caaaaaatcaaaatacgaaaagccaaagcggtattgtaacagattcattaaagactttaaaaatggtccacatcaaaacaatctaaagagaaataaaacayattcttcacctatgagcatcttgcctttctaatgaacctatctttagagtttaagacaggagccaaatctcaaatttcaggtcattaaaatgcacagtgc

SEQ ID NO: 32615 - DNA, 201 bp, Bos taurus
aagtaactaacacagacattgactttctctcttctccatttgtgaaacgcatcatgcatatctcaggaaactgggaaagtagagagaaacccatcagaccrtagaaggttgtaagacttaatcctcaagaccattagagtcatatgatttaggacagagagtaattgcaaaagaaaacaaagtaaaattagctatataata

SEQ ID NO: 32616 - DNA, 201 bp, Bos taurus
tcctatctgcccatcactgttcacaactccatggaaaagctgtcagtctgctaaattggacccacttcttacaaactgattattgacctttccattgtgaygaacccagcttatctgtctctgcaagaaagaaggagctgttgagtcacaactgcaattatgagtcagaacattccagccccagggggagagacaagagaa

SEQ ID NO: 32617 - DNA, 201 bp, Bos taurus
tcctcctcgcaagttaacacatctccacagaaggtagaaacgaatgttctcttttttccccctacagccacgaaatgcacgtttctctgaaggagacacartggggaagaaaaagtcctgttttcccagacttggcagctggcaggaagaaaaagaaattcttcaaccctccaggctgccttgccgcagttccgtgtttcc

SEQ ID NO: 32618 - DNA, 201 bp, Bos taurus
caatgtgcttcagtcagtttcttgcaagaaaactttaaaaaacctctcacttaggtctcatgagatactgaatgatcatgggattttgggatcacttcagytgagttaccaagtgaacggaagggccataaaatcttcagactaaaaaagtaaggttatcttcagtattttatggctcatgcagctatgaatgcattctat

SEQ ID NO: 32619 - DNA, 201 bp, Bos taurus
aagcagctaaaagggtgaaatcccaggagatatcaggattacagccctgtcctagatcagacttggccccggggacatagctgagaaaacactagacaccractctcatgaccttgattcatggaaaaagccaaatctgcttacagtcaaggaagccactttgcaccttagttctggcaatgtttctcagggactatcaag

SEQ ID NO: 32620 - DNA, 201 bp, Bos taurus
tatctaaacctgggaagacttccgcatctttccccaagacaaactcatgtatgttaagaatgaaatttattcctggaattctactattgttctctaccacygttctctttttatccccgccattgtccttttttcctctgtcttgcccttctgaaattgcctcttgatacaggaccctcctcctgcatactctgaaaccca

SEQ ID NO: 32621 - DNA, 201 bp, Bos taurus
tctgtattgtaactcttttgatcaataatggcagcaaaatgttacctgaaaaggagcaaggtagcattaaaatccgtgggatttaaacttgtaattccttkgtaggtaagagtgtcaactaggataacagcctttgactagtaaattcatgcatttttctttaaattactaagtggcctcattggtcagtttctgagagag

SEQ ID NO: 32622 - DNA, 201 bp, Bos taurus
accttcagctagaccccaaaggacatacttttcaaaattgaacctaattccatttttgtttactcagacatcagtcagtgatttgatagaatgcccttgtktatacaatgtcagtatgtttggtgcctacaaatggtattcccataataaattttattttcagtttacctggataacatgaagatatactgtggacacaat

SEQ ID NO: 32623 - DNA, 201 bp, Bos taurus
gtgcagaggtctctctgttcccctccaaggtcttgggctggacggagggtgtgaggacagggccgctcacagctgtgctcccagacgaggaaggggcccargtggacgcacttggtctggaaatgacgggcactggctgaagctggacgcgtgccaccgtgctgactctgggcctaattccatctggcgctccaaaaatac

SEQ ID NO: 32624 - DNA, 201 bp, Bos taurus
tgtcaagatgcatgtaacatatcctttattagccaagtaaatatttgctttactaagtccttcctctgttcattctcagtgctcatgaaactgtaatttamagcccttagggtatctgctataccatcaaatatatttcattatatttaatagcaccctcccagcgatggcaaatactgcttcaaagcagtgagaatcaga

SEQ ID NO: 32625 - DNA, 201 bp, Bos taurus
tcaccagcagaattgaaacttaggaggctaactggacctgtctttaaaaggcagaccctgagccctgtttagggcttgtgaaattagaaattaagaatatracagcacaaaaaattaaaggctagagaggtgagcatggttagccatctgtccaacaggatgttgctcactgaggagcaattctcatttgttaaatcacta

SEQ ID NO: 32626 - DNA, 201 bp, Bos taurus
ggagagacgtcgtgtttgaaagtgttgatgagggataagatttcatctttgtaaccccagagcagttcatccacagtgtgggtcacaaagagcttctgcckgtaggccttcagcagggcctcgatgatatcccgaagtaagggcagctgggtccattccatggcggtctgaggagcacaggcaaattcagagagctgtgtc

SEQ ID NO: 32627 - DNA, 201 bp, Bos taurus
ttcaggtgtggccaagtgacttgacttgattaactgaatgtggatggaatgggaatgccccagcttcaagctgaggccttaaaggcatggcaagtttccaycagccaccctctgctaccctgtttcaggcagttggtgacccttcagccaaggccctaaaatggtcatgtgtagaccagccatggtgccaggagtccagcc

SEQ ID NO: 32628 - DNA, 201 bp, Bos taurus
actaccatggttgtagtgaggttgaacctctttttgggtggccattgggcatttgttttcatttccctgtgaatgacctcttcacctccttgccttctcckcctctgcccccccacttgggctatttctctctgtcctgttgacattcatcctttttatatgtggaaataatctcctctcagtctgccttgtatctttact

SEQ ID NO: 32629 - DNA, 201 bp, Bos taurus
tagtctgattcactattcacaactagtattcaacgtgttaaaaagatgactaaactttctactaatgctataaaagaaagacataaatttcattggttaartataagctatgaatacttacagaatataatcggaaacatttctgaagacttaaagcaataatagaagacatcatgtcttcttacagatatatatcttatc

SEQ ID NO: 32630 - DNA, 201 bp, Bos taurus
tggtctctcctattaaccttgatggcaaacactctccagagttcagcactgtgctaaataaataatagtaatagtttacacttattaagtgcttagctaaraaatagttaagtgcttatcacttggccaggtattgttcaaaatactgccatattaactcctcaaactcaaagaacggtattagtttggtggtgggggttt

SEQ ID NO: 32631 - DNA, 201 bp, Bos taurus
tcttctctctctttcttcccagagtcatcccagatcctcttctttgcacctgagtctcaaataaggggaacaaaatagcaaatcacagcaaacattcctcyctatttcatcttttctccaagaacctcctccttgcattcctgaaaatacacagggcactgtcactagagaaaaactggtggcccgtgagtccacagttcc

SEQ ID NO: 32632 - DNA, 201 bp, Bos taurus
agattttgcacagcaaaggaaaccataaacaaaccaaaagacaacctacaaactgggagaaaacatttgcaaacaatgtaaccaacaagaacttaattttyagaatatacagacagttcatatagtttaatatccaaaaagggggggctgggtggcagaagacctaaatagacatttctgcaaagaagacatataaatgac

SEQ ID NO: 32633 - DNA, 201 bp, Bos taurus
ttgtttctttgttatattctacataaaagtgaaatcatatggtgtttatctttctcttgtagctttaagtctaatgtcatgactacaaaagcagactgatrtagagttgtgttgatttgtcataggggtgacactgtcatgagtcacatgattttaccaagatggtgaactaaccttggtaaaattccaaacaaaatacct

SEQ ID NO: 32634 - DNA, 201 bp, Bos taurus
aggccaggcagagtttatgttgtacaagaacataatactctagcaaaacacaaacagtgcatttatgaccattgcagaaggcaagagccttaaggcccaarttggaaagaagctaattcacttgatgtaaagaacatattaaatgaactaaacagtttctagtacagaactgtatgctaatgtagaaagttctgagcattt

SEQ ID NO: 32635 - DNA, 201 bp, Bos taurus
tgggccccatgctggaataaagtgattcgaagagactggagacaagtgcagattcctgcactggacatagaaattgggaggggtcagagtggcagctctcrtcagagttcctgaggacaaatgttaagtcagtgatagaaagtgaatcgtgaacttccagatgttcaagctggtttagaaaaggcaatggaaccagagatc

SEQ ID NO: 32636 - DNA, 201 bp, Bos taurus
cctcacctctcaagatgtaattattgaagacatttaagggccatttgattgattttcagcaaccaatgttagtatctgaactgatttctgttatcattacyatgtagttttattaatctggccctggattttacatgattaaaattttttttttacccgcagttcatagagcactctatatggaaaaagagaagacccttt

SEQ ID NO: 32637 - DNA, 201 bp, Bos taurus
ccggacctggaatcaaacccaggttccctgcactggcagggcagattcccaacctggactaccagagaagtccctcaatggtttttgaagctctgtggctrgaattcaggacaaacatcagttatatctttaccaaaccatatatatatatacatcaaggatgagtaaagtgtctaaaacatcatattcctgtaaacatat

SEQ ID NO: 32638 - DNA, 201 bp, Bos taurus
ccactgaagagtattcgttgtagtggccaggtagacaagatgacttgtgctatagtggtgggtcggcttctttccccagctgttctactgtttgtataatrggcccatgggagttttgcctcctgttcctgaaactttgagctatgcttctttgtaaatcttaatcaccatgatatcagaggtagaggttgtgcaagggct

SEQ ID NO: 32639 - DNA, 201 bp, Bos taurus
actctctctcaaatagacagatagatattgcttctatggcctttatgtttgtgttccaccaaaaaattcatatgttgaaatcctaatgcccaatgtgctgrtattaggaggcagggcctatgggaccttatattgctgttgttcagttgctcattcgtgtctgactctttgcaactccatggactgccgcatgccaggctt

SEQ ID NO: 32640 - DNA, 201 bp, Bos taurus
acctgtttctgtttgtagcttccctcttctttctcctccatctagagagcagtgatcagttcgacaataaagaaaggctggcacgaggtgtgtgcggtgcrtgggtgtaatgtgtgggtctgtcagtatgtggcttcacagcaggaatgggactggatctacattagagatgagtaccctttctcaagtctccagaatgga

SEQ ID NO: 32641 - DNA, 201 bp, Bos taurus
tacttttctttttcaaggatgctaattatcttctcttttgaagttatagcctaataaccagttaattttgttctaaaatttcaggaatgtgttgttcttgraatagtcttgggtttgtgcaaagcacaggtggataaagtgtagacctcatgctgctgctgcttctgttactgcactttaaacagaaatactaaatacagc

SEQ ID NO: 32642 - DNA, 201 bp, Bos taurus
agcagcagcagcagcagcagggattcatatgaatgaaacacatgatatacactcttttgtgtttgcattattgcattttgcttgtttttgagattcatccrtgttgttgtgtatattattagttcattcttttgtattgcttagcaatgttccattatgttatatatatacaccacaatttgtttatccactcacctatta

SEQ ID NO: 32643 - DNA, 201 bp, Bos taurus
ttatattcaataaaaaagaaaacacaggagtatttcttccatagaggcagtgacagaaaaacatttggatcttttaatcaaaaggatatgaagcacttaakcttggacattcattatctctgcagaagttctggtgggcttgagacccaaggatggtgggcttgggagacatgcatggggctgaggctaaaaacccagcag

SEQ ID NO: 32644 - DNA, 201 bp, Bos taurus
tcttatcagtgtagatctctaagccccactctgcatccttcacattagaatctctggggacatgacccaggaatctatagtgtcaatcatatacaccctgkgtgacacttccacgtatgaatactcaagaaccatggattaaacaaccgaatcctagtaaagataatctagacattccacttattccctgaatatcaactg

SEQ ID NO: 32645 - DNA, 201 bp, Bos taurus
gtcatatattatggccactaatattcttcagagggtttagagaataacagcccatccttcccctgaaagctcactctcttcttcaggggtacagacaggarttagagagggaaaaagagggcctctgcctggtaggacaaaacagcagccttaaccttggctactcaagtggtatgagatgccacattctcaaacccttcc

SEQ ID NO: 32646 - DNA, 201 bp, Bos taurus
ttttttttgacagctgaagcagactgcctaacattcaaattcccaagggaatgaagagtgattacacatttcttctgcgttgccttcaatttccatagtcyggcatttaagactctcccagatcagctcatctacctttattttctttttgtccttctattactctgtactacagacagacagaactgtttttattgttca

SEQ ID NO: 32647 - DNA, 201 bp, Bos taurus
tgttctattttatatctttgtggttataccttaactgtttattgtagttatagttgcttttataattttttgtcttttaatctttatactggcttattttrttgtttgattgttagtccttattatatatttgccttttctgtgagacttttctttcccatatatttttattttttttctatttagagaagactctttaac

SEQ ID NO: 32648 - DNA, 201 bp, Bos taurus
tcactctgacaaaaatcactgtctgaagtataaatatagatatgaagcgaaacttgatgtagccaaaaatttggcataatttcttacccagaataaaaaakaaaatttgaaggagtatttgaaaaatcctcaacttattgtaaaatcaatttagcccatttgtctgaagttattgttattgctaagtaagaatagactgca

SEQ ID NO: 32649 - DNA, 201 bp, Bos taurus
ctttattttgggtgccagacatcagggggaagggcaaactcctatccaaagaccgaatcctcctccctaacaagtagacaatgggttttataggcagagamagggggttacatgggaaaacagcatagtcagctctgatagtcatcttgaaattggtcattggctttatcagcatcaccttgactgttttaaatagttaat

SEQ ID NO: 32650 - DNA, 201 bp, Bos taurus
gaggagatcaccaaagcagatttttttcttcattaggtatcctccctgggtaggttataaagatgtgagaaacactgaaggcaggccaagaaagagcagasagctcacagaactgagagagagcaaaaagcaggggagagaaccaaagattcacagggaaaaaccaaaaagggagcaaatttccagggcctattgaatttt

SEQ ID NO: 32651 - DNA, 201 bp, Bos taurus
cattcacagacacggcagcttggatttttctgatttctagcccttacagccaatctgttcccccagggagagaccctggcattctgccatgagatgaaaamtacccatatagctgtagccaagtcttaggccttggcctcccctcaccaccaaagcagagatggaaaacagagatttcaaatgaaagtgattgagccattg

SEQ ID NO: 32652 - DNA, 201 bp, Bos taurus
gcattttgcagtcattgggtggttgtgatgtgcggcctacaggctctgcaaggcagatgaagggtctggaggtatcacagaagtggtgaggggtccccggrggctccaccaatgggaactcaggacagatgttaagaaacgcctcaccagggaagctgggagcttagttagaatgacagaaacatgcctaacaatggcact

SEQ ID NO: 32653 - DNA, 201 bp, Bos taurus
atgtgggtttattgaatgaatgggtcattgtgaaaaggccatttcctttgcttcagtgatgctgctgatgaatttccccagaagaggcatactgtcagtaygtctgctttgacacgggccttgcactggccctggtaacccatgaagatggaggctgtagggataggtcagtgtcacgtggaagaaggggagaatttgttt

SEQ ID NO: 32654 - DNA, 201 bp, Bos taurus
ttgcccaaaggcagaaacccagaggaagcagaggagatgccagtgtacaagtcagcaccacttcccaactaaggccctgcctggaaatccaaatgactctrctcaatttaggttaccaacctcctcgccactggctattcggtgagccagatcttttaagtttctcatcattctttcatcccgaaaatcataaggaaatgt

SEQ ID NO: 32655 - DNA, 201 bp, Bos taurus
aataaatcattcttttgagaggagattcaactatatttaacatgaatttatttagataaatgttcttcatcttgtaaaatctttatagtgaatggcagacrtactatttctctagttcaaatttctctttatagtggtttggtctggtttcttgtggaggagttgatcttataatgaatgaagaaaaagttttatgtttca

SEQ ID NO: 32656 - DNA, 201 bp, Bos taurus
aagtgaggagtggatgttgatgaaaaggcaagtctctgctctctgggacaagttcatatttttaagagatttacccggaatgagaaacaaaatcaggcttycctgactaacacacagaacaatctgcatcgtgtcttcttctgatcgtatcaaaatttttcccagacactcgctggccagggccacttttgcgcggtggat

SEQ ID NO: 32657 - DNA, 201 bp, Bos taurus
caccaaccacaaactttaaaaagaacatgtctttaaaataatgtgttgggcccataactctctcatctgtgacaagatgtcacagaatgtcccagtgcagygttcttcctgattagctgtcttgtcataagagaagtctgtcaggactgatcttggccaaagcagaggaagggccaacaggtctgcgtaacctgactccct

SEQ ID NO: 32658 - DNA, 201 bp, Bos taurus
acaggacaaaaaaaggtagagagtaacttaaaattgactgtagaaaactctttaactcccaaaattcatagcaatcatcatcacctggccacagctaaagytcctgtggtttggtttagttgctcggttgtgtctgaatctttgtgaccccacagtctatggcccaccaggctcctctgttcatgggatttcccaggtaag

SEQ ID NO: 32659 - DNA, 201 bp, Bos taurus
gcgctctcactgccagggcccaggttccatccctgatttgggaagtaagatccccacatgcaagctgcatcacgtggccaaaacaaaagaaatctagttaragatttttaaaagacaagtgatgagagtaggtggcaagcgatggttctggcctggtgctcggcctctgcagcctggctggcatctggcccaggaatcaag

SEQ ID NO: 32660 - DNA, 201 bp, Bos taurus
tagatatgtaacaaatatttgtttaagtgaatatttttatcccaattgatttatggtgagaaaccacccaaatgtatcgaaatatgggaacaattacatamgttacattggggttggccaaaaagttcgttcaggtttttactgtaagccgttaaaccggaacaaagtttttggccaacccaatagtatagccatgtgtta

SEQ ID NO: 32661 - DNA, 201 bp, Bos taurus
taacatttttggttggtgccaaattagggggtgctgcagacatcattgagggacagagaaataacacagatggatctaaagaggttagaaataggaagagmaattatcacaatgagatttgatttaggcaaaatgcaaatgaaggcagctgggagagaaatcatccaaaatgcaaaataatcagtgggttgggaaacctag

SEQ ID NO: 32662 - DNA, 201 bp, Bos taurus
gaaaaaatcttcagtgaaattagatttaaaccactgatagaaccctggttgatgtttttctagttcgagtcaatttagaactgtcaaggaagaggagagtrataagaaaataagttgtgctaaaaaaaacacacaaaaaaacctgtttcttgcctcccaaaagcactaaactgcaacaagcagacaaacagatggcggtgg

SEQ ID NO: 32663 - DNA, 201 bp, Bos taurus
ttggagcaatgtttctcaacagaagagcaagttacatttgggcaggacagctctctactgtgcagggctgtccaatgcatcaagagatgtttaatgtaccyggcccttactctgtctacatcttagcattttgtatcttatcttgccttgatctcaatgccagtgggacgtgaacatgtgagtgattagtttgctaaccat

SEQ ID NO: 32664 - DNA, 201 bp, Bos taurus
cattttccctcgatttcctcagaaacttagttctcagtggagatgtgggattctgtaatacgccctgttcaacagctcagttcagatatataacaaacacrtgataaacagaatagattgtgccagtactggggctacaagatgaatacgattggtcttttgcctccagaggtatgtccaacacaggggggatgtcaataa

SEQ ID NO: 32665 - DNA, 201 bp, Bos taurus
ggaacattttcagcaacgttctgatgctgaaagctgggcctgtttgtccccccttcgcccactggattccatctttcctttctctctgtcttctttactcrtagttatggacagatactgtggccaaacagctcattgtcactttctttgccaatcacttcctgtttgtttttttttttaacttgagatacctctaccgtg

SEQ ID NO: 32666 - DNA, 201 bp, Bos taurus
taaaaaattcagagctataaaaaaattaccatttcttccaggcaaatgtacataactgattttaataatacaataaaaaaactttgtagttgaggaacaayagaagattgtttttattggctttgcagggaccacaattttgttaacctattgtatacaacaaaaccaaccagaaaacctagttcatctatcttcacctca

SEQ ID NO: 32667 - DNA, 201 bp, Bos taurus
tgtcccctgtgggtttcagggactccaatttgagaagcactggggagatgatggtctccacctgactgttgactgacttacgaacaaggttgggttaccarttttctttgtgtttatgttgaggttctgctcaatgtgttgttagacttctaacaaggaaaaaagaatatatatgatggacttaaatgtaagtaaaacaaa

SEQ ID NO: 32668 - DNA, 201 bp, Bos taurus
catctctagcattctgttttaagacaaagtccggaatcctagattttcatatttctcaggtacggagtttttagacaaataatttgtactgaagtaaaaayggagcttcttggttccatccggccccacctggcccccttccgacattttcaaggcacgtcttgcttttattacccttgcattaacagatctacttcaagg

SEQ ID NO: 32669 - DNA, 201 bp, Bos taurus
gatcatcaagtggtgataagtgctttggaaacaaatgaattgaatgcccagaacctgtttgctgctcctctgcagattgggcaggtgagggccggacaagygtccaacgagggggcaaagctggtaatttgttgttgctgctgcatgccctctgggtgagaagaaaatctgtccctgaatgcttagtgagttggcttggcc

SEQ ID NO: 32670 - DNA, 201 bp, Bos taurus
cctctgtaagggaaggtggaagtgggagacagcagtcagcaattaagagtcccaacctttttcttttttttaaatcttagaatcggccttataataatttyaaaaaaatcaagtgtctactttgaattaaggcctatgtggagaggaaaaaaaaaaaaaaaactgccccaagatgctgctcagggatgaagattttttaat

SEQ ID NO: 32671 - DNA, 201 bp, Bos taurus
ccagagttctcctgtcgatggttgttcaacagccagttgtgattttggtgctcttgcaggaggaggtgaatgcatgaccttctactctgctatcttgaacyggaaaacctgataatcatggactgatttccctggcttcctcatcagcaagcttctgttctctttggccagtgggaggtactggcagaagactggaaagcc

SEQ ID NO: 32672 - DNA, 201 bp, Bos taurus
tctgatgcagtgacttccttctagttctgtcaaatttaaagtacgcctaccatttttactttgcctatcattatcatcatgccaaaccaaaacgaaacatmattactgttgttaattgaaataacatacttcctaagtctgacagctattataaacctaaatgagcaaaaacattcgagaccttatggtgatcgatataaa

SEQ ID NO: 32673 - DNA, 201 bp, Bos taurus
ctgtgctacccatctaaatttattttgggacaaaatatactttcattcatgcacactttaatataaatttaagtcattatgtcatcacctccaggaatgcrtatatcaaaaccttgagtcctaattgagcaatatggtttccctggtgactcagggctaaagagtctggaattcaatgctggagacatgggttcagtctct

SEQ ID NO: 32674 - DNA, 201 bp, Bos taurus
aagctttgctgaaacctatctttcaggaaggaggggagctggagctaccaagtcctgtcacccggagccccaccgattgatttgggccttactgctggccrgtggccagctgaggggaagtcgcctttctccttagtgtcataagttaagggacagagggcaggaacatggagaatgaaaagtcataatcctcctgaggtt

SEQ ID NO: 32675 - DNA, 201 bp, Bos taurus
cgtgaatttaaggtttcacaatgtacaatagcatatgaaagactgtgagaatctctggagttaaaaaaaaaaaaaactcttaatcacatttcccaactatrttgactctggaacatttaaaacaaacaaaattctattgctttctcacagaatacaatgtttcatgtaacagctttgaaaagtttcacaaaaagtataaat

SEQ ID NO: 32676 - DNA, 201 bp, Bos taurus
cactccgaggcagccgggaagggcgggcccgaggagcggggagggtggggtgcaagccgggggcgtaaccaccgtctccaatagcgctctgcctggggcckcgcgtctcctccgggtcacgcccactcggaagcgccgcgccttccgattggctgaagggggctagccgtaggaccgcgcccgcctggttcccgccccctc

SEQ ID NO: 32677 - DNA, 201 bp, Bos taurus
atacattcacaattgatatgaaagttttccattgaaaatacaaaatcttactgaaatatatatttcttctaatggttgatttggctttgtgcagtgaaatrtagcccatctatttttccaacctaacatagccagctttaacattcttcagctcagatcagtccttagaaactagtattctcttacccttcaaaaagaccc

SEQ ID NO: 32678 - DNA, 201 bp, Bos taurus
ttcttcaggggatcttcctgacctaggaattgaacccaggtctcctgtactgcaggaagattctttactgtctgagcccccagggaaaagccccagggaakgtagctaaggtatccacttagtgatattgccccctcgcttaccacatggatgggaaaccctaaaccctgctttggcgttcatcacgtggtgtcagaggga

SEQ ID NO: 32679 - DNA, 201 bp, Bos taurus
gaagggaggatattattatggaatgattcatgaaactttcccaaaattaaaggatatgtattcccaggtccagggtactcagcataatgttcaaaaataartccactccaaggcatgttatcatgaaattttagaacaggagggtcaatggtaggattttaaatgtttctataaaaaagaatcaaaacaaaaacaaaaaaa

SEQ ID NO: 32680 - DNA, 201 bp, Bos taurus
acaactgagccactttcacttcacttcttcttatacctcagggcctatcggataaattttgaactttgaatacaaggcactttatcctctgaccattgccygcctactttgtggcctcatttgtagcaagtactcatttgtggtcatgaaaatgcagcactcaggtttccttctgcaggaagtataactgactgatggccc

SEQ ID NO: 32681 - DNA, 201 bp, Bos taurus
cagatatcacctttctcagttgctccactggtcatgctgcaaaatatcaaactgtgtatctaatctccatttcttattctataacctaaagaaagcaaatrtttttcccactaatcttgtaatgtgagaacactgtcattttttcctcattgcttcaccttttgcctccctttcatctccataaatgtatcagctctgctt

SEQ ID NO: 32682 - DNA, 201 bp, Bos taurus
gatatttctgatacattcagttcctctctaggctaaagaaacgtctttaattatgaagttcacgtttctacagagaaatttagctcttttattcccatcayttctggcattatcaggacctctgtctgctgcttttattgatacatgcattcttagttctgataaatatatttgtaattcctcttgctgctcattctattg

SEQ ID NO: 32683 - DNA, 201 bp, Bos taurus
ttccagaaataaaaagaatttaatataattggctttactcaagaccactctaatccataacctaatttttgcttaaatgggaattagcctcttgactgatrtggtggggctccttacccaagtaagtgctctttttcctgtgtgcactagattgtacttcctagcttcttttgtgattggaagtaatcatatgaagagtta

SEQ ID NO: 32684 - DNA, 201 bp, Bos taurus
gtcagagtactgtgtaagtgactgactaagaaggattgatgtggcaaatatttgtaatcctcacttttgataggtatagagagtggacccatgaatttccygtgatgcctttcatgtgatgtggttcttagagtgatgttctctgtatagggccctcggtttagctattgcctgcagtcatgacacctgtcagcagacact

SEQ ID NO: 32685 - DNA, 201 bp, Bos taurus
aatacttgatacctacatctattcctcagtggtacattgggtttccaggtccctctaatggtggaactttccttctacttccttgccaccctcaccatttrcatctattttaaaattccttggctttgtttcagttttccttgtcaagtaaagttcctttaactatgcaagttccaactctttgctgattttttgtagaag

SEQ ID NO: 32686 - DNA, 201 bp, Bos taurus
cttatattttgttttcaactctgttccaaatactcattgttcaaagtatctatctaatcataatagattgctaatttggtgctttaactagttaacagaakatatggggcctttggatcacaaaggagatttaatgttcagatgccaaaagttttaggtattttgccaaataaataagtggtcaatctatgacaagcaata

SEQ ID NO: 32687 - DNA, 201 bp, Bos taurus
ttctcttgagggaaacctgggagaagaatggctgagtaatttgcaaagtgcatttttaactgtataagaaattgaccaactcttttccaaatgatttgtaycattttatattctcattagtatatatgagagtttcagttgcttcacagtttggctactgtttggtaatgtcagtcattttttcttttttaaattttggtt

SEQ ID NO: 32688 - DNA, 201 bp, Bos taurus
ataatctacatataaagaaagaacctcacaaatcctgaagctatttagattttctatattttttttttcctctctgtgtctccctccagctgaaacagccrcccaaagatataataaaatcacctgtgtaatttattttctcagtctagtggaaagtcaagtcctgaatgacgctgtatgacaccatcagtgtatttccag

SEQ ID NO: 32689 - DNA, 201 bp, Bos taurus
atcagggagagtcttgattcattttcgtcataccataaaaccaattggatacatcgtcaaaaactctatgaataacaccttagactaacacaatgttacaygtcaagtatatctccataaaaataaactaaacaaatatgttttcagttacaaaattaatcaacatggatattaaaatgaattaatatggccctggtgaag

SEQ ID NO: 32690 - DNA, 201 bp, Bos taurus
agccaatgcactcctcatcttcaaggctttcatctcttttgcaaaagttcttaaagtaccactgcactgtactttcattagcagttcctgggccaaatgcyttatggatgctgtgagttgcctttgctgctgtatgacccattttgaatccgaataagaaaatcacttgaatttgcttttggcctaacatcattcccttag

SEQ ID NO: 32691 - DNA, 201 bp, Bos taurus
tgacttcttagtgcataatatatcactccaaagtcaactgaatgagtctgtccttgtaagtaactcaatgggagacatttcaaagcttgccttaatcacgyccattcgaaaaaactgagtaaaaacctgacatgcgtgttgttctcctcacttatgcatatctaccgggttggccaaaaagtttttctgtgttacagaaaa

SEQ ID NO: 32692 - DNA, 201 bp, Bos taurus
attatatctgcttcctcaatgtaatcataatcagactgtaataagaatcatgatgtgaaataagtacaaggttaatttcatcaatcctccacagttatggkttatgcattgattcatagcgcagcctatatacccagagttatataagccaataaacaaatgaaagagagatatcgatcactcgttcaaaacagcttcttt

SEQ ID NO: 32693 - DNA, 201 bp, Bos taurus
ggcagaagaggcctttcaaagatgtcgtgtaactgggaaaaacaacttttaaaaaatatgatatggctgtgaactgctcagcagtagctaatagaacaccyggagttcctctgtaaggaaggtgaccggctttttatccagcaaaagttttaggcaaatccacacgttatcagaagtgatgccagtgccacactggtcaga

SEQ ID NO: 32694 - DNA, 201 bp, Bos taurus
taaaactcccagcagcaattgctctgtactgcactgcccatgcccagaatataaagaacatgctgcatcctcagcacatcagcggggccaggaactcacaracaacatttacagaaggcaggatgcagcccgaaaggactggagggtaacacaaggaccggatacccatcccctacccagcaggacagtaccatgagtttc

SEQ ID NO: 32695 - DNA, 201 bp, Bos taurus
gaaatgtttttaggcactcttcgggcagagggacctgcagagtaattgctgactcagtcactggaggtgaaaacagtttacttctgtcaactaaaagagaragtacgtaacagacccagggaaaggagaaatacttttgcttcacagactacagaactgtgaacacagaaagagctagattctgggcaaagcaaaaatagg

SEQ ID NO: 32696 - DNA, 201 bp, Bos taurus
acatatgcttgtttcaaataaaagaatacagaaaggagatcagctccatgccttaaaacagagaaagaaaaaatgtcaacatatataaaacaattaaaggmaattaaacatgtactgaatcactactataagcaaagaaagcatttgccccttacaacttcccagaggttaaaaaaataagtcctatcaaaaatatgacaa

SEQ ID NO: 32697 - DNA, 201 bp, Bos taurus
agccccaaactcttggtgactgctaacaaagtttctttcttctcctttgaattgactctttcagtaggcttgcatgccttgtatgtggtgctgtagaaggragataagagaactccaaaatttctaaattttagtttatcatacagttttaaaattcatttgcaatataaattgattgacatttgctttatttggagaagt

SEQ ID NO: 32698 - DNA, 201 bp, Bos taurus
atgttatgcaaagtactttaaaaaattgtataattctgaatctcatatttaagtttcctttgatgttaaatatcttgttggttgacattaaaatatttagytcttttcatggtttcatttttacaataacatgagatggatttacaatatcttaactgtatatttttaaaagtatatttgtgatccttaagtcaactggct

SEQ ID NO: 32699 - DNA, 201 bp, Bos taurus
caggatgccggtgctgcctcatttgctacctgatatcacatttacgtgcaacagagaggagttgggtaatggcaaattcaagctttgggtagtgtgacttytcttggatagattaaaagtacatactgttaagcctaaggaaacaaatatttttctatttcctgaaggtttttccttatctggaggtcgtgacagccttca

SEQ ID NO: 32700 - DNA, 201 bp, Bos taurus
atgggtatactattttgcaatgggtttaaattattcaatggtttttagcttgaaaccaataaactctggaacgttgacactcaaaactgtgaaaaaatacrtttgctctcccactgaaaaaaaaaaacaaacacataaaattatctagctagccagatggacatggaatatactataagatcagatcaatagacttggccc

SEQ ID NO: 32701 - DNA, 201 bp, Bos taurus
gattacatgatatactttatgctcatcacagatgtggctggagaattggtattgagctggtagcatcagcagaacagaaagtgagatgtattttatatatrtcaataaaggaatgacctgtttttatcctacagacagtgcaaattggaagtcaaataccctttgtattccaaaataggacctcaaacatcttgtaatttt

SEQ ID NO: 32702 - DNA, 201 bp, Bos taurus
ggtgagaagcgtgttctttggtgttgacttcacatttggggctaacgcaggattatgaatctaagcacgttatggaattttagggctattgttacacctckctaaggaccttttggatgtatttttagcggccactggtatcacccaggcttttgtgcttctgtcagttctgggtagagacttgagagtgttaggtcagcc

SEQ ID NO: 32703 - DNA, 201 bp, Bos taurus
cctagtggctaagactctgtgctcccaacgaaggtggtctgggttccatcgctggtcagggaactagattccgcatgctacaactaagagttaacatgccrcaattaaagatcctacaggccgaaactaagatccaatgcagccaaacatgtaaataaatatttaaattgactactcttctgagggaatccatttgcaact

SEQ ID NO: 32704 - DNA, 201 bp, Bos taurus
gtataaccagagtgaaacagagacgataataggagttattaaatatgaaaagatgactgtgagcctttctgataatcaaaaatatacaatcacatagaagygctgtcttttcctatcatagtggccaagactaacagcgctggatcactgaaaaagcaagagggttccagaaaaacatctacttctgctttattgactatg

SEQ ID NO: 32705 - DNA, 201 bp, Bos taurus
agtatgttgaatcatctcagacttccatataatgagggcctcctactttgaaatgtcacctttccctcaaatttctgtccttggtcctcaggattgttacyttgctgaacttggccagcagaactcaggcttcattttttttaaattaatttattctttattgaaggataattgcttcacaatcaggcttcatttttttct

SEQ ID NO: 32706 - DNA, 201 bp, Bos taurus
cagacatttagcaggcacctggtcacacttacttcaaaatcaaggcttctgtttagggtttgaaaaacagctattgggtctcactgaaggaaaatctataygcttgagctgtcaagtaagaggggggaaaggtaagaaaattaaggatacggacagctttctttactctaccagcagacatagcacaaagactcttttatc

SEQ ID NO: 32707 - DNA, 201 bp, Bos taurus
aaacaagagaacatcaactgatagcccttgaagttgatctctgaactccccctggttcaggatcccatctccaccagacctacagggcaccaggccctctmctcagcatcaatccctctcccgctgaattggtttctgcctgagctcatctccccctgtgcaggtcagctcaccccggggcagggatgacagctgcactga

SEQ ID NO: 32708 - DNA, 201 bp, Bos taurus
ctttcttggtgaggtcttcctgacgtccctatctattcccctattccatttccccagtccttccgttgagaacattgagagcattttctaggcccaatatrtaagcactctcttgcctgggaggtcacatcagtaaaccgaatcttgggtagctttcttgtccctgtaaatgttccagaaagtctgtggagcagtgaaatc

SEQ ID NO: 32709 - DNA, 201 bp, Bos taurus
gggatcgccggcctggaagttcacttcttgcatcccttactttaatcgcgtgcagtttcccacctgcttaggatgttttcgtctgcgcgttcatttttcaygccagcggtttcctttcctgggggcctcgggagccctggagtggtgtgtctcgcgcgcctcactagccccagttcagggctccggggacagataatgaag

SEQ ID NO: 32710 - DNA, 201 bp, Bos taurus
tagcttggaggagctcagcagcgggaccccagctcctcctgggcacaagtcgccgggtccactgcgcaaactccggcctcctcgaaactctcctcctggcrgaacagctcccggcaacgtccccgggctggggcggggcaagcgtccggccctaccctctgactggcaggaggacgggccaaccggaggggcgccccgggt

SEQ ID NO: 32711 - DNA, 201 bp, Bos taurus
tttacagtactggccaaccttggcattgtttttctgggagggtccaagtccagttcacggtgtggctctgtagctgtcagttctgagaagcagccgtgccytgggtgctcagaacctgggcctacccaggcccggtgcagacaggtaggcgcagcaactttgtgagttacgccctcttggagccagtgggtcgctgggcgt

SEQ ID NO: 32712 - DNA, 201 bp, Bos taurus
ggtacggaagagcatagcaggaccaggagttgagacaggagggtcccaaggaggacaagttgtcagaaccatggcgtgaaccaaagtctggaagccaaggrggagcaggactttgagcaggagaggctcaagtcagggtttcggggatatcactctaatcaaatgggaaagagagatggtgtagggaggtggcaagttaga

SEQ ID NO: 32713 - DNA, 201 bp, Bos taurus
ctcatcctctttagaatgtcctgtggacgctctctcaggatgctggggatgaaacccaagtcactgcagagcagggaggcagcgaagacaccaaacttccyagaaaggccaagttgttttgcaagtcttagattttacagagccattcggagcacccatctgttcttgagggggcccagtctgtgaatctcaggcccacgc

SEQ ID NO: 32714 - DNA, 201 bp, Bos taurus
gcagaagtctgcatgatgcaagtttccttcccacccctgtttcgggctcccctcccaagaggcaaacgcgacccagcttcttaagactccttccagagacrctctgtatatcctgcacggtcacctcccacgtgtgctcacccctcttccaccccgaggagcattattacacactctggcctgtgctttgcttatttcagt

SEQ ID NO: 32715 - DNA, 201 bp, Bos taurus
cgtaaaatatccttttgttgggtgctctgtaatcttggcctgtgggactttatcagtgtgaagaatcctgtgtgtctccacttcagccataagaatgttayaggctcagcaatatcaggcccaggaatttcaggaatatcactggcctgtgggtgttaggatatcaggcgtatcataaccagagtttcactggctcaggaa

SEQ ID NO: 32716 - DNA, 201 bp, Bos taurus
cacagaggtctacgactctgccaccaactggtcgtgcaagctttaacagaatacttcgcctcttgcagtctcaatgtcctccacagaaacatcaaggaagrtgtgggccttaatgagttagcacaggtttcctaaagcattcagcacagattagtgctctgtggatgttgagaaccttccctcaacatattgaacctaact

SEQ ID NO: 32717 - DNA, 201 bp, Bos taurus
ccctctgctggcttctcactgaggggcgggggaggtagccacactatcatgctggcccccagggaggaccagtgtttgtgctctgggccgagcctgaaccytgatacggtcctgccatccccttggcagagcagagacaagcaaatgctcatgcagagaaataggcaggccatggctgtccctagcttggtctggttgagt

SEQ ID NO: 32718 - DNA, 201 bp, Bos taurus
aagttaaatagacggcctaaagtcacagagctagaaagcagtagacccaggattcacatcacaaagtctagactaatagctttcacaccacagctgcctcygcagggctcaggctccagcctggccttttaccaggagccctgcattaaactgtcaggggcttgcaccattgtgaacattctgatactctctgagcaccca

SEQ ID NO: 32719 - DNA, 201 bp, Bos taurus
tttcaaacatctgcagcattgatcttccctatcctattgggcaggactacatcataagtccatgctaaactgttcacctgctaggaggctgaaaaggccaygattgtcttagactagagggcagcacttcttctttaggcttcgagggctacatggtttctgtagcagctattcaactctggccgcagcgtgaaagcagct

SEQ ID NO: 32720 - DNA, 201 bp, Bos taurus
gcaggatctagcaagccctccctcctcctcctctccaagcctcactgccctggtgttcctgcacagcttcaccctgtcctgcccagcactggccttgctgrgtctgtatcactctatctctcctgcagccctggatacaccttagaaccacctggtaactttaaaaatcccactttctcctgcaagatgagtcaaatagga

SEQ ID NO: 32721 - DNA, 201 bp, Bos taurus
gtgtgcatgctgtaccaccaggacctagaacacaagctaccacaaagaacacactgggtaaacaattgtttggatacttgagtgggtgaaggcccagcatycaggactgcctgtcctgtgattcctcttcttctatttctcaaggttggtccacagtctacagagttcctctgagcaaggcagctactcgggacacaccct

SEQ ID NO: 32722 - DNA, 201 bp, Bos taurus
agctttcatctgtacaacttggccccaagatgtttttcatggactagcgtacgtgactaacaggagagaagtacagcaaaggacagaaggcgggacaagcrttcagtgaactgaacagaggccaggtctctccctgtaaaggcaaagttgccccccacttcccaggccccttcaccaccctcccgtcaccccactctcggt

SEQ ID NO: 32723 - DNA, 201 bp, Bos taurus
cttttactgaaagctgccccacgcaacaccctgttatcctcagggccttgtgcaatgggatacagaagcgccctcttgtgtagcacctgagaactacaagygcagcacagccatcactggacaaacctctgttttgcaaaggataagcattcctaaggccctttcttttgttgccaaccactaaaatctcagactccacgc

SEQ ID NO: 32724 - DNA, 201 bp, Bos taurus
caagccagcgctgatgacgacagtatttggaggtgtccttacgagccctagtcctttgtgcgagcagctctagaggccagtgacttccactgtccacatgygtaactacagtttcacgcacttgctctcactcggaagctccctagacagcactacaaggcaactcaccctgcgggggccagcgcggctctgccgggcggc

SEQ ID NO: 32725 - DNA, 201 bp, Bos taurus
cacgcctcccaagccagggccggatgagcttccggggtcctggcaatggggtcctctttcacccatccactgcccagggacccccccccccaccccgagtrcaaggccacatctggacgaccagcactcacacttgacaggactttaagtggcaatgatatccaagaaaaaaaaaaaaaacctagcctaagccctttgaca

SEQ ID NO: 32726 - DNA, 201 bp, Bos taurus
ggtctctttcacctccctcaaggtataaagagggccatgtcaagagaggtgcacggcttgactgggattctgagagtaaaggggttcctatcctagtcatmcatttgggccattaatcccaccattttggagatgatccccaagatttgctcactttgtaggttgaaaagtattttgtaaaggtaatggatttgatgatta

SEQ ID NO: 32727 - DNA, 201 bp, Bos taurus
tctttctctccagtagaggaagagcagggaccctgtggggcagtgagagggagatgcaggtgatggtttcatgggatgaccttggcaggcacactggcacygttttgatagactagatgacattgtactaccctgccagctaggcccgttcatacctttaattcttgggcagagctgcttttatttttctcttcgcctcct

SEQ ID NO: 32728 - DNA, 201 bp, Bos taurus
tactctcaagacccttgcctggcttgcagggccttcactttagtgcccaatcctgtttttgcatgacaaagctcacatatcgctttgccttgttccttctytttgcattctgtctgggacaagctctcatttttgcctccaagcaagtgtatgctagtgaggacaaagttcatgcacaaaggcaaaagaataaaaattctg

SEQ ID NO: 32729 - DNA, 201 bp, Bos taurus
tggccccattacaaaattccccagagactattggatgaggggttgtaaataacttgtgaacatgcctagaactgatatttatgtcccttttgcacaaattmtatatgtgttggctttctaggccaaaaacttggagaaaaggaaggataaagggtttgatacctgaagcccaaacagttactctaagacatccacccgagc

SEQ ID NO: 32730 - DNA, 201 bp, Bos taurus
taagtaacacagaaccaaaataacgatgtgctcccaataccaaattcaatcagcaattattgacttctggatctaaagggactcagagatgatccatttaycacaacaggttcagtggtttgccccaaagtcccatagttcacttttgaatctttttcagctctataaattactaaattacataaatcctgcattcaatat

SEQ ID NO: 32731 - DNA, 201 bp, Bos taurus
gtctagagttatagcatctttaataatgtagagtctgaccaggggatccatttcataacaaaggagctgtgggagtggccccatgaccaaggacctgacaytgatgacacacaagataccattctgagtctgccatccaatcacacatggacatgacctcctgcaggctcagctgaggccagctcagaggcagtctgctga

SEQ ID NO: 32732 - DNA, 201 bp, Bos taurus
ggattaaaaaaaaagttcccaaatcatgtataatatccgtgataaatcactttcaactgagacataaaaggaatgtagagttcgaagaaaagaagaaagcrggttttgcgttgttttgttgttgtttaaagaggtatccacaaggccctggcttcagcacgggcttcagaaggctttcatgttctctagtacagccctggg

SEQ ID NO: 32733 - DNA, 201 bp, Bos taurus
gttcagtccctggccaccaaagctttaggtacattcacagcaaagatcaattctcctctttgaatctcttgtctctgtgtttacatgtttgtggcttattwatttcatttacacataaggcctaatatcagtttcccatcttttcctgtagatgatactcaagaaatatgcttggatttgtattgcttcccgcctctagga

SEQ ID NO: 32734 - DNA, 201 bp, Bos taurus
ccaaccaccataaaacaatgacacccgacaccaacaatagcagttttttttgccaatattaataaaaacacatcatgtcttaggctccatgatttacatgyattttattattttatgcaacaactcaatgatgtgattgactaaacaagctgttttagagaaatgggattcctttctcaagatcatacaactaacggatga

SEQ ID NO: 32735 - DNA, 201 bp, Bos taurus
atcctgctttcgacttcagttctgtttaatacagtggctggcccaagagcaatacataaatgtgggaacaaacaacagataaggaagctgaggcccagtcrtatatgagaagtgtggcttccagccccatgtgctttcacttgagaaagtatttgggtcatccttaatgctgggggatgaccatacttcctcccaaacgag

SEQ ID NO: 32736 - DNA, 201 bp, Bos taurus
ccatctctaagggattttccccacccaggaactgaaccaggtttcttgcatttcaggcagatttattaccatctgagtaagaattcctgtatcccaatatyaaaacacagggcaaactcactattgtacatctctgaagcctagaagaagtgacggcctattctgaacaaaataggatgtcctgagttactgcgaccaaca

SEQ ID NO: 32737 - DNA, 201 bp, Bos taurus
tagacgtgcagttgcaaggtcagaaagtgggcatagcttcaactccactagaaaggaaggccaagtgttttctgaagagtttatcccaatatatacacttytttcagtgaatgaaactttcttcatggtaactttttttagtcattttaacaggcatataaagatatttctttctggtttcagtttgcattttcttcagta

SEQ ID NO: 32738 - DNA, 201 bp, Bos taurus
cattgctgggcacaagctctgggacgtcatgggaatgaaagcaaaatcacattcctgaggagggttcacacagtctgtgcactagatatgggatactcacrcaacttactctctaaattaacccagcgaaggaggtgttttcatgaagatgattataggaatggtgggaatttttcctttacaaatgaaggaacaggtcca

SEQ ID NO: 32739 - DNA, 201 bp, Bos taurus
cctggaaatggcaacccaccctagtattcctgcctggaaaatcccacgaacagaggagcctggagggctacagtccatggggtcaccgagagtcggacatractgagagactgatcacacagagtatgcgtgaaaaccgcaattccagactcatacttcaaggtccatttgttatgttggataaacaactatagaaaacat

SEQ ID NO: 32740 - DNA, 201 bp, Bos taurus
ttcagcctttacctgcccactgacctatggataggttcctatccttttaagcactcctatgaagtttaaaaaaggctgaacaaacagtatggtgaacacayaatggcttgtttacgaggacacactgtctaagttggagatgtgcatttgaccctttaaacatggtccagaaacactaagactatttgtcaaagaagttag

SEQ ID NO: 32741 - DNA, 201 bp, Bos taurus
atgatacttgataggttaacatagaaattgcttaattaaatgcaatcctaggccaggcaggaaaatataaatacacttatatggccgggtgtgtagacaaragtggaggggtcatgaccttgtggagatgagtgaacacccagttgagtgttaacatgcagaaatagaggcccaattttctgcaaatttttaagagtctag

SEQ ID NO: 32742 - DNA, 201 bp, Bos taurus
gatccattaatcagcatgaaatatgttagaaataagttttcattggtgaaatgagtagtgttcaaaatataaaactgcctagaaaagcgttaaagtcttcrcatcagtgagggatagaactccagcaatttcatggccaatcatcttcatagtgtctatatctagatttgcctttattttattgggctccgaaatcactac

SEQ ID NO: 32743 - DNA, 201 bp, Bos taurus
atatattttcatgaattttgataaaatttggccagttaatattttcttcatatgtttcatcaaaacaaataatcaaaacaaacaaaaatctgacctcgttrtcaaagcagcatccctgtactctttcttgaggaggatggcaacaacgatggtaaaactagtaacagcaagagaaaaaattttgcccatgcccacaactca

SEQ ID NO: 32744 - DNA, 201 bp, Bos taurus
tatctcttcttgctattctttggaagtctgcattcagatgttactgaatatatataaggcaagtgaattactgtatgcagtaaatatcaaaaagcaaagcraaactaacttatctaaggcttccctggtggcccagtagtaaagaatttacttgccaatgtaggagaaatgagtttgatccattatctgggaagatcccac

SEQ ID NO: 32745 - DNA, 201 bp, Bos taurus
tgctgcgtgtactgtggtaatatattcttagggctcagggactggtatttccaaatccttcctctatagctcaaccactaaggcctctactcagttctcayggcctcagtgctggggccccatgtccagaatcatccagttgtcatatcagcccaatctggatctactatgcttcactgtagttagctcaccaccacccct

SEQ ID NO: 32746 - DNA, 201 bp, Bos taurus
cattttgagatggcttgttatgagcattattgtggcaagactaattgagtcttttctaaattaattagaatatctactctattctctctccactccttgtyccaaccatccttcctttttcaattcacaaagagcagagtatttggggctaaaactatgtgcagctatataaaatttagtagaatgacagtacctaagaaa

SEQ ID NO: 32747 - DNA, 201 bp, Bos taurus
tttaccacctgctagattagtggttcctcttccttcacatgttcacttaaccagtctcctatagggttttctttagctcttaactgaactaatagcatttkatattttgtgtcaagtgttgccagagtctttattatcagtttgtcaccactttggtcaggaggggagattttaggggcacccacaacatcatccattaca

SEQ ID NO: 32748 - DNA, 201 bp, Bos taurus
tagtccatggggttacaaagagttggatacgactgagcgactttcacttcacacattgtttaaatactgcatctttgttatgtatattgaaattggaaccygtaatgcctccagctctgatcttctttcttagcattgctttggctattctgagtcttttgtgttccatataaattttagaattgtcttttctatttcctt

SEQ ID NO: 32749 - DNA, 201 bp, Bos taurus
cattgtagggggacgttttcataatgctcggaagtggcaaagtcagccaacagaggcagatggaaaattctccacttgggctgttagaactgcttcgtgcraacaagctactgcagcagatgatttcttatgtagatatatgcagtgatgtaagaagtaagatggttttagggcatttatttcaaaccttatttcctgggg

SEQ ID NO: 32750 - DNA, 201 bp, Bos taurus
atatctctcacattcagtcagaagatagaagtggttaaatttagtgaagaaggcattttgaaagcaaagataggccaaaagctaggcctcttgcactaaamaattaaccaatttttgaacacaaatgtaaagttcttcagttcagtttagttcattcactcagtcatgtccaactctttgtgaccccacagactgcagcac

SEQ ID NO: 32751 - DNA, 201 bp, Bos taurus
tccaaagtacataaattatttactgaacaattagttggataatagccatttgattaatctgaagatagatgcaataaatgttacaagttctaaatcctttygcatccaagtctgactactacaactcttctaatctggggaaataatatatcttgtgcccatactcctttacaccttggctcaccacaaatcatcccacaa

SEQ ID NO: 32752 - DNA, 201 bp, Bos taurus
tttttccattcttgattggtcatttcaccagtgcgtttttcagtctttgggaactgctgaggggaccaagtatccctatgttttgctataataaaaatacyataactagagaacagtggaaattactttctgaatgtcaacttattgtttacaataattacttaatcaaatgaatgatattgactatgccttacatgccag

SEQ ID NO: 32753 - DNA, 201 bp, Bos taurus
aacatagtacaaagaatgaggtaatacccacatcaactgagaatcagtgcctgattgttaattagatcaaattgttaaaacttccaaaggcccctcacacyagtttaagcatttccagtgaaagtaagagttgctcagttgtgtccagctctttgtgacctcatggactgtacagtccatggaattctctaggccagaata

SEQ ID NO: 32754 - DNA, 201 bp, Bos taurus
aggttgaacgtggcccataagataaagacaaaagtcaaaaaggacaccaaagtgtctgaccttaaaaactggaagaatggagttacctttgactgaaatgragtgatagtagatgggccaattttggtgaaaatacaagtagatcagttttatacatgttagtttcagatgccaacaagcctacacacctgtccttgtcca

SEQ ID NO: 32755 - DNA, 201 bp, Bos taurus
actcctggccttcacttcctgtctgatcttctttccccaacctcagatagttccttaatctacatgtgctaaaaaaaaaaaaaaaaaaaatctacatgtgytggcctgctgaatgctcagagataactaactacattcagatgttcagagatgtttctctcagtatttcagaatttgaactctagccttctgtgtttccaa

SEQ ID NO: 32756 - DNA, 201 bp, Bos taurus
acaggttcttggggccgagtgttgggaagaacaatatgaggaaacaggacaaggaagtgatgactggagctaaaacacaaggcatctaatttggctcagaracaagcttcacttagtagctgtaagtcaaagacaggattgatgttgagcctttaagcctaagtcaagcttatttaacaagcctcctaatcagaggcaaag

SEQ ID NO: 32757 - DNA, 201 bp, Bos taurus
tttctttgtgcaaccctctgcctctgcccgttgccggttaggatttcagcatgcaaatttaggggacaccgacattcagaccatagcaccttcccttagcktctgtgaggccacttttacttcagatgtctctgctcatttcttcttaatatctttgtgggctctatttcttctaccctactcttatctgtccatcagaac

SEQ ID NO: 32758 - DNA, 201 bp, Bos taurus
ctgattgacccgtagaaaagagtcacaaacccatgtaaaccatgaaggacacatagactaatgggtagagaaataaaagcaatcacaaattatcaacatgyttgttcaaaatcttactatttctttcaccaatgaaacactgttaaacagtataccatggacatttccccaaaccttccatatttaaaacctacatcattt

SEQ ID NO: 32759 - DNA, 201 bp, Bos taurus
attggataatgggccccagaaataaatatccatctggaatttgaaaatgtaaccttatttggaattaacacccttcagatataattaagaatctctggacragatcattctggattattgtggccctaaattcagtgttgactatcctttaagagctggaaaaaagagaagagacagagacacagaggctgtgtgaaggca

SEQ ID NO: 32760 - DNA, 201 bp, Bos taurus
gaactcaatttccattgatggagcagccacagcatgctggcagtatctttggcattggtggagaaaggtcaagagagagggagatgacaagttcactgccrctggagctcttgagtctactagaagcttgacaaatgacagccaggcaaaccagttaagtgcattctctaaagccaagtcttagaataaataggaaagctg

SEQ ID NO: 32761 - DNA, 201 bp, Bos taurus
ccctcccccatcccttccccttggcaaccacaagtctgttctctgtatctgtcaatctgtttctgtttcatgtgtgtatgtgactctttgcgacactatgractatagactgccaggctcctctgtccatgggattccccaggcaagaataccggagtggattgccatgccctcctccaggggatcctcctgacccaggta

SEQ ID NO: 32762 - DNA, 201 bp, Bos taurus
tactcatagtcatagatttggggggataaataaaatggccaaggggacatagtccgcttcccaagtgtcccagagccagttcaagataggacaccaattcraagaagcagaaagagaggaggccaggaggaaggaaagtgagaatctgtgcaaattccgaggactttggattcttaccaccaaaatcctgggggttcaaag

SEQ ID NO: 32763 - DNA, 201 bp, Bos taurus
gtatatgacaacttctcttttttagtcctatttgtttcctggcatccgggcatccatgttcagaatctccactgcagctacttacaggatcgttgatgcartgaacagaacagcctcccaagatacagtcccaaatgtaataaatagcctaaaaactatgtatcaaatatataataatcagagctactaatcaaactaaat

SEQ ID NO: 32764 - DNA, 201 bp, Bos taurus
tttcagtctaagtgtgatgagaaggcactagaggattctaagcagaaaagtcatataacatgatttgccgtttgggagctgaattgtaggagaacaaagcraggagcaggaagaacagttaggaagctagtgccatagttcacatgaaagatggtcaggtccacttgtaacaagcctgtagtaagtggagataaactaaaa

SEQ ID NO: 32765 - DNA, 201 bp, Bos taurus
gcccacaacatatggccgagtttaaaaaagaattctagagaatgtaactcaggcaccgaaactgaatcacaagtctcagcacttcgcccacgaatgacagyacaaggtatcttcctagaggccaagggtgggaaagcgattacttctgctggggattaagagagaaggtaagaaattgggcctttgaaagatgtctctgct

SEQ ID NO: 32766 - DNA, 201 bp, Bos taurus
cacgctatgcagtgtggccaaaaagaggaaagactttggttcttcacttttgtattctccacaccctcaatggtccttggcctatagcatgctatattcaktcattcaatcttgtccgactcattgtgactccattaacggtagccttcaggctcctctctgggattttccaggccagaatcctggagtgggttgccattt

SEQ ID NO: 32767 - DNA, 201 bp, Bos taurus
ggatgtccacactggcccttgttcacttttccagaggagggtatgccagtttgaatccactccgttaggactcttggtacacacaaatgaatgtgacattmcccctggccatttccctcgcagagtcctgtgtattggttgcattggagcctctagagggagctcaaggcctgtttccatctcccacagctacagccttag

SEQ ID NO: 32768 - DNA, 201 bp, Bos taurus
aaggcagaaaagggaggggacctaacgtgtattcagtagcttcagtgagccgaaattgctctaggtgctttgccgtggttttctattttcacaataacacyagaaggttggtatgactcgttccatttcaaaatgatgaaacagactcaagtgggtttggtcagggctccagggtcgctcagcagataagtaatttgtgct

SEQ ID NO: 32769 - DNA, 201 bp, Bos taurus
tcctgtaaaaggaataccagatatggggatgaaagcaaggcttagggggtctgtcaaaaaacatgtctgcctagtgcctgtcctttggtgttaaagcaacygaaattaatggttttacactgtggtaggttgagttctctgaaagcagcttctgaggtgtatcaaatgtttagtatgtgttcactgtgacaagaagaagga

SEQ ID NO: 32770 - DNA, 201 bp, Bos taurus
cctactcatcctcaaggttcacagaattctcaattatcacacctaccccactggttagtataaaatactcaggaaggatgtgattctgaagacctcaaacrgtccaaatacaacttaattcaagactattcttaaccaaggatggcaaatgttaagaagtcagtgaatattcttttttgaatactggtgttaccagctagt

SEQ ID NO: 32771 - DNA, 201 bp, Bos taurus
gaccctccctttacaatggctgatgtgcttaatgtgttaatttactgatatttgcaaattatttcttgagacagtatcagaaatatcctgcttctaaaatrttattaacataacccaatctatagcaggtaataaataatttagactgaaattggctggagcaaacatttgtcctttcccactttctgttggcttaaaagg

SEQ ID NO: 32772 - DNA, 201 bp, Bos taurus
agtgatctcaaggactcagtttctacagggtatttacagacgggattcctctctcaccattaagaatccagttctaaaataatggtgtgaaaccggacgcwtccgaggctctacactagtctaacaatttttcctttgtaattcatttccgcactagtaatgagagaatggatgaataaaatatattgaagatgtcttgga

SEQ ID NO: 32773 - DNA, 201 bp, Bos taurus
tgaccagttttggctaatgtgatattcccagaaataatgtgtgccacctctgggttgaggttttaacatgcccttcataccttacacttggtcacttcctrttggatcatatgtactaaagatggggaattcaaagaaggaaagagtctggattcccctgccactgtgctccagaaaactacttgagacagaagcactgtc

SEQ ID NO: 32774 - DNA, 201 bp, Bos taurus
acccccacgtccgaggtcaggggcagcggccgagagtgtcaggctgtgactgtggaggaacagctgaaaggagctaccccaagttcaaaatcaggggtggyggccgggagaagctacccaccgcctgagaccaggagcggctgccgggaggagctaacccacgcccaagtcagagtggcggccaggaggagcaaccccatg

SEQ ID NO: 32775 - DNA, 201 bp, Bos taurus
aaaatgtgctgagtgtgcttccaaagagaaaaggcgccagagggcctttggtggggcgtgctgagccttgtaatcacaaacagatgacggagattcctggytctgcttccagctagcgagggccctgagcaccaactcacaatcagcctggtataatcgtcgtggtttaccttacaaaaatgtcaaactgtcatggattct

SEQ ID NO: 32776 - DNA, 201 bp, Bos taurus
acaaagtttttgcagtatttttctgcatgtgaaaactgggcaaaaactgcacatgaaaactaccattcttccacaagattctctttcaacaggcagcctaraatgttcaatctagtctcctttatcctgagaagaaaactgactttgttgacgaactagtccattttcttctttttaatcttgtagcaaccttaatcaggg

SEQ ID NO: 32777 - DNA, 201 bp, Bos taurus
taagacacaccctgacctcattaaaaatcaacaagacatcagagggcaattgtgcccactgatgaagtccctaatagtcagcctcttgagccccaaagcarggcagaggaaggctaaaagtgaatctgaaaaaatagataactaatcagagcctactgtatagctcagggaaccctactcaatgctctgcagagacctaag

SEQ ID NO: 32778 - DNA, 201 bp, Bos taurus
tcaacttcacacagtctctgtcttccctcttaaggttcacagtatgatagcatccagtcccgagccctgtgtctggtagcacttcacagctgctcgaaaamgggtaaaagcacgtatgcacacctcaagcttgcttcataactctgaacacattctcacaacataaccttccaaaggttttacccgtatgtggtttcatct

SEQ ID NO: 32779 - DNA, 201 bp, Bos taurus
ttccgtgacattcaaggccagggtcgttgggaggctctgcttgccctgctcgctgtgccgtgtgctgcttggtcccggcatgcaacttcaggctgttagcrctctaatgtgctcccgtggaatggcctgattacccaggcctttgatgtggaaatgtcatcctgacagtgagtggattccaggaactcttccagcagagat

SEQ ID NO: 32780 - DNA, 201 bp, Bos taurus
ctgtgtattccctctggtgtctcctcttagaaggacactaacccttttgcattggggccccatcacataacctcttcatgacctctttagaggccctatcyccaaatacagtcacactgagggtcagggcttcaacttataaatgtggggacagttcagtccatagcacaactatggaatatttaattacctattttaagc

SEQ ID NO: 32781 - DNA, 201 bp, Bos taurus
aacactgttgtttaaatttaaatgcttaacaagtcctcagcagcatgatcttggtccaagcatgttggttaaggtgagttccagtcttaggcacatgcctracacagcgggcctctccatcacaggaccttggcttggaacccgacattccacttcctcattccgagttctccactggaagcctaacctcagacaacatca

SEQ ID NO: 32782 - DNA, 201 bp, Bos taurus
tggggatccactctgtctgccttggttagcccagggccagcctttgatcctggagacggctccctggaagccctgaggccacctgggtctggtttagggcrggctcattgcaactagaaactgatggggtcctgtgcatgacagcagcaaccaagtgccacagcagctctggaaagcccacgagtgtgtgccaggggaagg

SEQ ID NO: 32783 - DNA, 201 bp, Bos taurus
acacacacacacacacacatatacatatacacacacacatatataatgcttcgtgaattttcatgtcatcctttcacagtggccatgctagtcttcttagygtggtttcaattttagtacacatgctgctgaagtgaacacttcaacttcttcaatgaacttaaactagggtgaacacgtatcaccttgtggcctctttgt

SEQ ID NO: 32784 - DNA, 201 bp, Bos taurus
tgtacggtccacgagcccttggagattccatgtgagctctctgttggggtcggtgttgccgcagtggagcaaggattctcttttctcctatgaatgaagaygcagaagcaaggttttcaaggcagagaagaccacaagaatggaactggtctcccaattgtttgaaatattggccaaaaacattgagattttcatagatta

SEQ ID NO: 32785 - DNA, 201 bp, Bos taurus
aatgagttaagttcacggacacaaaatgttgaataagtgttaagtgttatttttgcaaacatttcaacttcctgatgggtggtctggaaattttctttccycttcgtctagaccagggtttctgaaagcctagccatgtggctaccagagtcagagccagagccatccacaactggctttgagcacagtatttagaaacaa

SEQ ID NO: 32786 - DNA, 201 bp, Bos taurus
tgctccaaggtctcagtagccctgagctcttccgaggagtgggccatggggtcaagagtgtgcacttggagccacctggcctgaacttgaatcccagctcygctgctgtgtgacctcgggcaagtgactcagtcaccctgaactcaggttccttatttgtcagataaggatgcggacagggccagccccacagggatgctg

SEQ ID NO: 32787 - DNA, 201 bp, Bos taurus
cgccaggcctgctggtaaattccgtacttttttcacagctgcgctgaagtgtaattgacttacaacaaactggacacgttactgacttggagggattcttmaccccatgtggccatcaagtgtcgaattgatgtgcctcaaatgtatagtgtgtgacatgcaatgttgggtactggtagggtttcaggggggttcaggggg

SEQ ID NO: 32788 - DNA, 201 bp, Bos taurus
aaataggaaaaaaagtgcccccgggggaggaagagcagaagtcctattccacagagagaaagaaactgccctggcaatttccaaaccaagaagctggcgtmccggggtgatacagatagaaagccaggccagaggctgtctccgtccatggagcccgcatgcaggtcagcacgcgcgccacgtccccctccacgaacgtgg

SEQ ID NO: 32789 - DNA, 201 bp, Bos taurus
ttcattacactgccccaaagctttggcttattagccactgaggccaaagtcctctgagtctagaaacaccattccgactctcttccagaactggaacacamattttgggtgtctctgtgtatatccaggcttctctggaggttcagtgacaaaaaacctgcctgccaatgcagaagatgtgggttcgatccctgggtcagg

SEQ ID NO: 32790 - DNA, 201 bp, Bos taurus
gccctaatgagggctctggctcttcctcggagaagcctcgagtgttggagagctgggagcagaggagggatgccacttgactcacctgccagcagcgtgcygttggccgttacgtggagtgcaccggccgggagaggctggggaggtcgccaggtcacctgccagcagcgtgccgttggccgttacgtggagtgcaccggc

SEQ ID NO: 32791 - DNA, 201 bp, Bos taurus
gggtggtcagtgcggcaggggccgtgtgtccgcggagacgggcggtgtcccaggagcgcgccctccactgtgtccagggcttctctcgtccatcacctccyggcacagatgtgtgccttacggccacaccagccatcagctccaccttttcacaaagtatcgtgagcttcacaagggcacccacctgccaaagcagggttg

SEQ ID NO: 32792 - DNA, 201 bp, Bos taurus
ttctggtagcatacgcttctccttttcaaaagtctcacagagcagaggtctgcgcatgctgccgggcgctgtgccgctggccttcggagggagcgttttgyagcgtggtgtctgtgctcagcgcgccgagtcactcgctcagtgctggcagcactcaggcccggttgtatcgggtcaggtatcccgcatctagaaccccca

SEQ ID NO: 32793 - DNA, 201 bp, Bos taurus
ttgtggcatgattccacgctcctggtgggaaatcccctctccatcttggaaagttgttttcctaccttcggatggcctgttcatctgtcagctgtcctccyggtcttgcccctgcagatcacacctgaaatgggatttctcaggctgccaggcctccctcctcgggcctccacacaggtccccctcacccctccagagatc

SEQ ID NO: 32794 - DNA, 201 bp, Bos taurus
gattcttgttcctaattgcacttggccggctcacctcccattcggctgggtgtcacctcctatttgcgctgcgtaaatggattctaatagctttcttctcytccatcactcaaagaatggccttggtagccaaaaaggaaattagtttcaggtgaaagcctatttttgccctggggaagaccaaactgttaattacctaga

SEQ ID NO: 32795 - DNA, 201 bp, Bos taurus
gcacagagcagaagtgctaaagcctaccttgtacattaaaaaaaacccaacacagtcaatgcctattaaactcctccctctgacaggaccacgtgacgccyggggggtggtggacgctccccagcagctctcatcccagtcagcgataacggagcccccagagccctgtccaccctcccaggcaacggtgagccctttcca

SEQ ID NO: 32796 - DNA, 201 bp, Bos taurus
cctctgatttggaactttttttcctcttaactgtgaagaaaaaagataatgacaaaaaggcatgtttcaatggtagactttaatggggaaaaaaaaaaacrtcacaataaagcatgcattgtggccaactttctttccccaaattttcactcatcgagtacctgctttgtgtctgtgattctagagtctagagaacacagc

SEQ ID NO: 32797 - DNA, 201 bp, Bos taurus
atgaaaaataagattgcccctcatttatgagtatatacatgtgtaagtaaaaagtattcctaaaacatatctagataataataataaagaccaaattctarataaaagttatcttggaagagggagagagaattaataggggaggcatgtttcaggtataccggtggctttgggggtcttaaaaaggttgacgacataaac

SEQ ID NO: 32798 - DNA, 201 bp, Bos taurus
ttgagcgcccgctgtgtttagtgtcacagtcctgccctcctttggcgtgctacggatgatgtcctgggatgcaggcgggcctgccctgctgtgtgcaaacygctttgttcagtaatgactgtaaactaaactggtgtcgatggactcacgacagggggccacttgcattttctcaatgcaacttgagaatagaaggtggat

SEQ ID NO: 32799 - DNA, 201 bp, Bos taurus
ccccaccaggtaactaacaggtcttctcacaggccagcaagaggggcactcagaactctcgacggctattagttaggaggcttgtgcgtgtgcaggcctgrttttgctttttaacaacatcctgccatcttctcctcaagctacagagtaaaaaaattgatggttctccccttctcgggcacaggctggggcctcacctgt

SEQ ID NO: 32800 - DNA, 201 bp, Bos taurus
tgggaaaatgctacgaacgattggcataagggccttagacttaagaaaggacgaggttgtgctcttgtcatttcagatgacagacaccaccacggggtacygggaaggcccgtcaaagaaaggaaagaagaggacatgggccgacatcaaccatcccggagagccgccggtgacgggggcaacaagactgccgatcagcaa

SEQ ID NO: 32801 - DNA, 201 bp, Bos taurus
cccaggctgctgccccaggggagacagcaggtcagggtgtgggtcccagctccgggctttgttcacacgcagttctcctgggatctcctgcaaggtcagtycatctgtccaggctgaccgtctcctcaggccgttctgtttgtgaggcgttgtcggaagaggtagacgttctccacaaaccggggggctgtggactgctgt

SEQ ID NO: 32802 - DNA, 201 bp, Bos taurus
aagggcggggtggaggctggcagtcctgggcggccctggaggagggaggggcagccttcagggacagagcagcccccaagctgagttgccattcccacccrgagtcccggcctcctctgacgtgaggaggatcgacctctggttgtttcctgccgatggagctagggtgctcagcttgtgccttgcacgtcattttaggag

SEQ ID NO: 32803 - DNA, 201 bp, Bos taurus
tgcctggggcggacctgccggcagtgtggtgcagagaggtggactcgtccctggcaccagctcccgggcggcaggggagcagaggcccctgtaggatggtyccccttttgcaggacaagcctcctctgctcactcttgcaggttggaagccctggcagcagtaggtgagactcctctgtatctggaagttgacttggcttc

SEQ ID NO: 32804 - DNA, 201 bp, Bos taurus
agggtggtggcgcggggcgggggggcggggagatgcccaccccaaggtccgagactcgaggcgaaccgccgtctccacctgcgcacggccgcccgcagcgyctctcctccttgggggtttaatactgcctcctccgagaagccttcggggacccgggagggctcaggcacctccctccttcccggccccagccccgggccg

SEQ ID NO: 32805 - DNA, 201 bp, Bos taurus
gctcccgctgccctgggcccgctgcacagggcccccgatgctcgataatcatgttaactgcggctcttggcggggctgggaggcggggtcattggattacyggccctctgaaaaggtcagcaggccgagcaaattctctgtcttgtccaattcagggccgattgatgcagcctcttcctggacctgaccaccctccacagc

SEQ ID NO: 32806 - DNA, 201 bp, Bos taurus
cagccctggtcccctggcctctcctgacgagcgcatcctcccatggacatctccaaagtgggaaaccctgtaagaagccctgctgggctaccccagctctractgcaccccgaggtgggggtgaagagcctgaggtcacccacctgcccaccttctcagacgtccctcggcatgggccctggatggcctgtccatgcacgg

SEQ ID NO: 32807 - DNA, 201 bp, Bos taurus
ccagggttctgagccacgcggtgaccagtgaactgtatttaaccagggatgtcaaatcaccaccttctgaaatgttccagaatcactgtgcacctcccacraggctacctactgggccctccttggaggcctcctccccacccccgccccaggacaatgggcgtctggggaccctggtccaggaaggcttcccggagcact

SEQ ID NO: 32808 - DNA, 201 bp, Bos taurus
agagagaggccttgtttaccccggaggcagggagccaccccacagggagagaaggggcagcacagagtgacaggagggcagagggcagcccgatgcccccrgagctgtgggccctccgtgagccccagtcccctgctcccagaccccggatccggtccccaggccggcaggctgtgtaggtgctgaggacggcggagacag

SEQ ID NO: 32809 - DNA, 201 bp, Bos taurus
tgcacagcccagtggggccatgggacccccctcactccgcaaggagccagtcaaggaactcactgcccagggcgaccccttggtgggctctactatgactygggggccacaggagcagggctgggggggttcctggatgcagggcccacaagcctgcctctggcagagcaaagctagtgagacagggtcctgcacgtctgg

SEQ ID NO: 32810 - DNA, 201 bp, Bos taurus
aaggaagtcagtccgcaacacctgagcaggagccattcacacacacgtgtcagggatcaaccggagggcaggcgacagcacccaggccagaaaatgaagtyacaggcagcacctgatcagtatctaaacacccatcgaggatgagcaaggaacaaggaatgggaagacagagaggagagagagagagacaagagggagatt

SEQ ID NO: 32811 - DNA, 201 bp, Bos taurus
cattggtcacctaaggcggccttcttctctctccttgttattctctggaactctgccttctgtcgagtgtgtctttcccttcctcccttgcctttagcttytcttctctgctctctgtaaggcctcctcagacggccactttgtcttcttgcatttccttttcttggggatggttttggccaccacctcctgtacagtgtt

SEQ ID NO: 32812 - DNA, 201 bp, Bos taurus
ttttatggtatgaatctttcttttttacacaactgtgtgtcataaagtacaaacccatagcacgggaagaacaataatcaggtcaggtatttaaatacatrttttgcacattctatttcgtcctcatagcagtcctgtatgatgatcagggatgacgttgctgtccccattttacagatagagtaaccgagacttcagaag

SEQ ID NO: 32813 - DNA, 201 bp, Bos taurus
cagggtgtctcctggttcgcctccctcccctgcacctgtccacgcagggctcccggtccggtgatctggatccttctccaccactctcctacagggccccrtctggcggggctggctctttgggacacaaagaccaggtccccctgtggctggtggctcaggggagctcggcctgactccaaccctggccccagtgtacgt

SEQ ID NO: 32814 - DNA, 201 bp, Bos taurus
tcataaatttaagcatttcaggcaacttcagctctttcaccagtctttccaacgtcctcctagggatgggggctctgaggagctccaggggcccatctcaycctccctggtaaccagctcaggaaagccactctcccgatctgggagcaatgcctctatgagctgagtgacaccaaagctactctccaggtgcccaggccc

SEQ ID NO: 32815 - DNA, 201 bp, Bos taurus
gctcctgcctggagaatcccagggacgggggagcctggtgggctgccatctgtggggtcacacagagtcggacacgattgaagtgacttagcagcagcagyggctgcttatggcttacagtttccttcttggcacggcctggatcctaacactttgaactgtaccttgtcatgcaggacagttttgtttaagtctgtcggg

SEQ ID NO: 32816 - DNA, 201 bp, Bos taurus
gcagagttctcactccacagattcacggggcaactcctgcactcgtctgcaacaagcggcatcacacagcatctcctcttgtcgggcctctctcacagtaycatcacttggagatgatccctcgtgtggctcacgagactgctcctttcactcctgagcagtggcccttggagataagtcacaactcgcttaccattctgc

SEQ ID NO: 32817 - DNA, 201 bp, Bos taurus
gaacccaggtctcccgcactgcaggcgggtcctccaccagctgagcccccggggtgcggctccactctaaggagcccctgaacgacgtcaaggcaagtcaygacagtgcgccggccctaaaactttaggggcgaacatacgagccctgtgactatccagaaatctgtgtcatctttgactgcctttagttcagtttagtcg

SEQ ID NO: 32818 - DNA, 201 bp, Bos taurus
tagtcggacacaactgagtgactgaactgaactgaactgatgcatttgattaaacgtgtatttattagagtacatctctattttgtctaaatatctatagraatcaaataatgttttctaatacatacttatccaaaatcttttttaacttaatagagcttagaggtgaatatgtttttttttctggtaaaataagaatag

SEQ ID NO: 32819 - DNA, 201 bp, Bos taurus
atggagctgaggcttgagctgcagggtctgcgctcactgctgggagtttgtggacacgcagctgcgtctgcagagaacggcaggcgtgtggggggacacarcagacaacacttggcccagttccaacagctgtcaactctgtccagtctttgttccccactagttccaaacctctgtcccctgggttattttgtagcacgt

SEQ ID NO: 32820 - DNA, 201 bp, Bos taurus
cgaaacccctgccctcgtggagcttgggggtggagggcccgagaccgacagcaaacaggctcaactagtcgcggtgtggcaggtgatgagcactggagaayacaactcaggggcggggcgggccgagagcacggaaaggccgcattccggggcagcgctgacggggaggcgacaaccgaaggaagccggccctggaggcgc

SEQ ID NO: 32821 - DNA, 201 bp, Bos taurus
ggtgggccctggtggccagagcagggacacaggacaccagcgtggggaccaggcttttattggtgagggcacgtgctcgtgtgggtccttagtgcccagcmggccagcaggcacacagggcccggcgctcggcctgcagcaggaggctctccgtctgcaaagcaatgaggggtgtgagagctccatcaggcggcacccaga

SEQ ID NO: 32822 - DNA, 201 bp, Bos taurus
ccttgacgagctgtgtgcccctctgacctgacgagctgtgtgctcctctggagcgggcagacagcgtctctgtccacctgagcttcctcttctcagctccrcaggtccacggggccgggggcagcccgcctttgtggctagtctgggaactgggctggctcagagtctgcaaggccaaaggtggcccttggccaggtgatg

SEQ ID NO: 32823 - DNA, 201 bp, Bos taurus
cacgagctccacgctgggcaggcatcaaggaaccagaaacacatgtccggccaactcagtgtccccgtactcctatgtcctgcatccaatcctcgggctgmtctcccctctgctccgtgagggccccgccgtgggccggcctgggggtccaggcttcctagaggagcgggtgtgccgggagggggcctctctcctgaaggc

SEQ ID NO: 32824 - DNA, 201 bp, Bos taurus
tgcattgggagctcagtcttaaccactggaccaccggggaagtccccaagattcttccctttcttaaaaaaatactgtttcatggatgcgtttatttcctygctgctcaggccctgctctagttgcactgagcaggcggtgcgcaggcttctcattgcggggctcctcctgttgctgagcacgggcgccggccgggtcttg

SEQ ID NO: 32825 - DNA, 201 bp, Bos taurus
accttggccctcttcaccccgagataccgggtgccccaaaggaggacgccctcgccttgccgccacctgcatccctgctcccacctggacgcaggtgaccygcactcctgggaaggctggcccagaccttcacaggggtgtcagttgactgatgggaaaaatagatgcttggggaggttgacagatggctggacggccggt

SEQ ID NO: 32826 - DNA, 201 bp, Bos taurus
tctgcaggcacttgggcagagctgtcagtggggtgatgggttccttgctgccatccatacccagggcgggggacagtggggggtctctgctggccttgccygcatctcggtctgctttcttgctctttgctttctatggaagtaggtcttacgagcacatggaggagatggattttggccacgtgtctggtgcgcatggcc

SEQ ID NO: 32827 - DNA, 201 bp, Bos taurus
cagcgctgccgcaggctcttcctggacacggggtgtcttgacgtgttctcaggtccccacagatccccagaaagttttaacatctgttttcccactttggygatctaagcatttattatagcgtgttcttgattggcacttcttaaccgagtaggatctgacctgcgctcttatgacccagtgtcgctgagcggaagtcgg

SEQ ID NO: 32828 - DNA, 201 bp, Bos taurus
ggggtctgtgtcctttgatctaaccacgcctgattgaaacaagtcccgaagacagagtttagggcagtcttcaggaggctttctcttctgaagtccccacrgggcctctgtcatgtcaaatctccccccgacaaggacattagggcccagtcagataatccaggatcatctccttactgtaagacccttaactcaatcgca

SEQ ID NO: 32829 - DNA, 201 bp, Bos taurus
tctgggccccaccccaggctgccccccgaggggtccccacctcaaggcgctccttcctgtctggtacagcgacctaagtcctgctggaactggctggagcycggggccgctggccctctccacaggggctccctccgcaaccatgtgctgtcctcgctgggccagcttcccaggagccacactcacctgccttggtaccct

SEQ ID NO: 32830 - DNA, 201 bp, Bos taurus
ccccgctacggcccgccacgtaagccctgggactgggaccccgcttctcagcatcccccactcccgtcagctctgcaaggatgctgacgcccaccaggccygtcgggaacctgcaggggctcgttcacgtgaaacacagccactcaccgttccggtgggggtctaggtgctgctttgcagaacacgtctcccccttgatgt

SEQ ID NO: 32831 - DNA, 201 bp, Bos taurus
gacatccagtccccggggtggccactgaatgaacacagagatgaattagcagaggctgaattgacagccctggtgaccggcataggggcggggcccctcartggagaacaagaagaggctgagttttggcaaaagtctgagtttagggtcctaagggaccctgaggagggcagtgagcaggccgttcgctgaaagcacaga

SEQ ID NO: 32832 - DNA, 201 bp, Bos taurus
cagtttcctgttctagacttcttgcagcttttggcctctgacgccttctttcatcagctggttgtggtggcgggctggtgagagagacacgggcagtcctsgttggttcacagtgcccagggcctgagggacccagggcaatgactctaggccccagagggcagctcctggtcatggggccatagacacccacccctcctc

SEQ ID NO: 32833 - DNA, 201 bp, Bos taurus
acttttcttgtattgagctcaacaacatccttagtttaaccgttgaattttctgaaagaaacagcctgtttggaactccattttaggaggtcttctcagartacatttttacttaaccaggttagttataagtatattaataactagtcacaaaactctctgctcaaactattgttcacaaagaaggatgccgagtatcct

SEQ ID NO: 32834 - DNA, 201 bp, Bos taurus
tagcctcaactacagtttacaatcccagaagaggaaacaagccacagctattgtcaaagccatggaaagtgcctgaaacagtagacaaaatgccacagatrcagtcaggaccccagaggtaacaactacctccaggctgtgagcagacacaggttactgcccatatcttgcctggagtctaaccagcttcactcttcctag

SEQ ID NO: 32835 - DNA, 201 bp, Bos taurus
cctgcacacttggagcccctaggtccctgtgatccaagcagctgtgccagctccatgcttgatccacactgtggcagagctaccagaggctaggaaaaaarccctaacagcctcatatctcctaagcctgtgctgccagccccactgtgtacttggcactcttagggtccctgagatccaagcagggactataaaagtctt

SEQ ID NO: 32836 - DNA, 201 bp, Bos taurus
aaaaaaaaaaaaaaatcccacggcagtggagttgcccctgtggagatgttcctgcaatttcacatggacagacagtagactgaacttggccatggaagatraaggcactgtgcctgtggtgggtggctcttctagccccatgagtgcaaggactggaacacgagtcccaggtgatacctggcattgggttttgcaatgtac

SEQ ID NO: 32837 - DNA, 201 bp, Bos taurus
agcaagtaaccctgcccaggccttctccatctagaagtcagaccccaggcagactgagaagtcagttgcaatctgctgtgggaagagcggaagagggcagrcagaggccctagcaggagagaagacttataaccagggagaaacccagtgtcttctgaggaggtattcttggtgtacctgtggagctaccctatgggaagg

SEQ ID NO: 32838 - DNA, 201 bp, Bos taurus
acgcagtgggtggcctgctgacaaaagccctgttctgaagacaagcagagccagaggggaggaagggaggggctgggccctgggttgtgcggggggctggygctgggaatggcacctcattactaagcaccatgttcagggaaagcttctctgggagagtgacaggagaccaaacacccaaggaggtgacagaggcccccg

SEQ ID NO: 32839 - DNA, 201 bp, Bos taurus
acattccactgcctcaacgaacatgacatgaagccacatatgggtcaagaggagctccaggaacgcttgggtgcacagccccccaccccccagtagaactyacctttatggaggatgccctccattgtccttcagggtagcccacccagaagcacaccctctccactagatggagaaggaaagcagagggttctggacccc

SEQ ID NO: 32840 - DNA, 201 bp, Bos taurus
gcagattctttaccatgtgagccaccaggggtatttattgtgttggccaaaaaatttgttctgtaacatcttaggggaaaaccccaaacgaactttttggyccactcaattctattaactaaacacttgacaagcctcacttactattagttgttgtggaagtcaggccacaggagatagcacctccctcgtgcttttgcc

SEQ ID NO: 32841 - DNA, 201 bp, Bos taurus
cattattgttaagctttattaattttgcacaagcaaaccgtttgtcttgcttgtgtctccccccttgggcccagacatacatggggaagcagtgtcctctygtttcaggggtgccttgtaagagctgtagcatacatgtgcctgtgttaggtgatgtttggtccttgcagtgtaggcccacacctgcagaccagaaagtcg

SEQ ID NO: 32842 - DNA, 201 bp, Bos taurus
tgcagtctagcaaaatgaccgggttgtgtgatgctgcggttaatcctgatgctgtcactcctcgtaagcattctgtccgccagcttgtgacatccatcagytttatgagcatgaacaggccttctgaaaatttatccacaaggtgactgactgccttgagtggcaggaccgagccttgaggcagacctagcagtcacagtg

SEQ ID NO: 32843 - DNA, 201 bp, Bos taurus
tgtggccagtgcccttgtccccatgatgagccactgctgacccccacctccataggagaccctccaacagtagtggtcggcctggttcagtctcctgtggrgtcattgctcctttcccctggatcttggagtacgcatgattttgtctgtgccctccatcagtggggtctctgtttcccagtcctgtgggagtcctgtaat

SEQ ID NO: 32844 - DNA, 201 bp, Bos taurus
cactcttgcggcagggtggagtggacagaagctggcgggaatgcacggggcccactgaggtggctgcaactgcagccaccagggaaacaactgtggcctaraccacatacactgtggtggaaaacacgggaatggaagcaagcaaaatcaagagggctgctgatggtctggagcggcctaagggaaaaggtggtttgagga

SEQ ID NO: 32845 - DNA, 201 bp, Bos taurus
gcgtgggcagcgtgtctatccagggctgcccgcctctgccctctcagggggagacaggctttaccaccgggagcttgtcttgacaaagtctggtgagtccyacttttgaagaaaggcctggcctagaggagtgtcacgacacacttccctgaacaccctgatgtagactgctgcaccaatctgaagctgacagcccaactt

SEQ ID NO: 32846 - DNA, 201 bp, Bos taurus
caaccccaatctcagaggcactagccatgcacacagggcccagggtctcagacctctctgtaccccaagactccctcaagtcggcctgcctgcctcaagcrtactccacatgaaaagccggctctgcctggaccagccaccttcatctctgtccctcatgaacttctcctgcattgggagccacactgctgaggcctgccc

SEQ ID NO: 32847 - DNA, 201 bp, Bos taurus
aggtcaccttgaagtccttgaaggtcagtgtcccagtggccatggagcacatgctggattttttttattgttttttggactattaaaagacttataccctycccctggccccagagtccaacttcccatgtgtcttgttatgtcttaagccaactcccttctctggcctgcactgtttccctgctgttactgatgtgaact

SEQ ID NO: 32848 - DNA, 201 bp, Bos taurus
agctgcactgcttattccttctgagtcagtcttggggactgggaggagccaaataccaaatgagccctccctgcttctgatgacagggttgctctgtcatmcccattatgctccctcaagtatttattgcccacaaaataaaacaagtgctcaaataatcacctatgagatccttgccctttctccctcttacctgatgcc

SEQ ID NO: 32849 - DNA, 201 bp, Bos taurus
tgaagctgaggctatgtgccgactactggctgttgccagggaagcaggactgggccctctgagcctttattttgccatccatggaaagggaacagtaacaytgacttgggagttggtgctatacttcagaaagctaaaggttatgaagtctccagcactgggctggggccagaggacccaaccagcctttcagcagggaag

SEQ ID NO: 32850 - DNA, 201 bp, Bos taurus
agctgccctctgccacgtgggagtgaaggccacctgcgggctgtgccctgtgtgtttccctgctaaggtttgtgaagaggaggcctagtgttgctgcagcygctgcagtgcacactgcgtttatccccccttccaatcgtgttgagaaaggactcgaagcagctgcagcaggcacattctcccagaggggtttacggtgcg

SEQ ID NO: 32851 - DNA, 201 bp, Bos taurus
gagtgctggagacatgcagggaaaatacagagaactcaggaagtaatggaccctgatgcttcctgggaagcagatgagatctggaggctgggcctccagargagtcaagtttggtcaggaagtgaatgaatgaaggggctggtagtgagagcattgttccaggtaagatcctgagagtgtgagggtgcgatcagtgggaaa

SEQ ID NO: 32852 - DNA, 201 bp, Bos taurus
gccacctgctttctctctcagaaacacttctgtgtggtcttcatgactcagtggcatcaacccttcatcacgtttcctttatctttcacactccttttttyggccgcaccatacagcttgtgggatctcaattccctgaccaggggctgaacccaggccacagaaatgaaagcaccaaatcctaaccagggaacttccact

SEQ ID NO: 32853 - DNA, 201 bp, Bos taurus
gaagccactcttgggatggctcagaagcaacacctaggctcctgtaaatcaatctggactgaaagggaaagaagtgaaagtgacagggaagaaggctgaaraggaagatgccttacaatcctattggggaggcggtggccaggggacaatggtctctgttttccttcaatcactacgtgcctgacacggcacatggaaatt

SEQ ID NO: 32854 - DNA, 201 bp, Bos taurus
cgcagcgcgtttctgtgcgaatctgagcaaggctgggcttgtgggaaatcgaataccagagacatgatttgggtgcgtataggggctcagtaggctgtgtkttggtttgcagcagggaatgtctgacattttctcttgaatctcgcccccaaggtcatggagttttaatcccactcatcttttaagaatttgttattaccg

SEQ ID NO: 32855 - DNA, 201 bp, Bos taurus
cttgggaacatgcagagattctgacactgcctattctgaatgagtggtggctttgaggagattaaccaatgtgttccagtcagatgaagagtctgtccctrgtcagacccacatcatgcacaacagggcttgcttaggatggtccctctggtccttctgcctctctcctggccaatcacacctgacttgagggtggcagga

SEQ ID NO: 32856 - DNA, 201 bp, Bos taurus
tatattgcaatataattacaaccataacactaattaacacctcttaattaacactacttattaatatcacataatcagcattgcttatttgtagaaggaamaattaagatctaatctcttagcaactttaggtttataatacagaactggtgaccataatcattatactgtgcaatagatctctaggacttatttatctac

SEQ ID NO: 32857 - DNA, 201 bp, Bos taurus
tccactccacaggggctgccttgctcagctcacaatgcagggtggctgtggccccttctgtggcttttttgttcctcaggtgttttgtgaaactggtgggmaggactggtcacaaagatagacaggccatcacatggggtgaacacacagagaagacacgaggtgaagagaggagcgggaacacaacacccaagaggacac

SEQ ID NO: 32858 - DNA, 201 bp, Bos taurus
tcaaaattgtagctttgtgacatcaggtcccagtgaatgctcccaccatgctttccttcaagaaaacagtgtattgatggcacctggcctttggaatctgyctgttattcttccatcagaccacccaaacagaaatttggtttcaattctgattgctaatctttgatttttttctctctgattcctttctctctattccaa

SEQ ID NO: 32859 - DNA, 201 bp, Bos taurus
caaccacttgattctgtattcatggaaatgatgacatctttttcattcaatctcttaatgtcaagctttctgtctattaccatggccaaagttaaacccawaatgcaaccctggactaggatcgctgatctctaccctcagattcaatactgaatccattttgatgacatttaatttatgatttgggccagaatagtcaca

SEQ ID NO: 32860 - DNA, 201 bp, Bos taurus
cccacgccaccgtggggccaaagctgcggagatgtggtataaaacggtactggggctcccccagctggtgccactgagcacagaggtatgcttgggaggaytctggtgggtgtgaggaatgcctgtgcctctactcaaagacactgtgttccacctggtgccacaagattcccaccttgacacatgcccccagtcaacatg

SEQ ID NO: 32861 - DNA, 201 bp, Bos taurus
ggccaggcaacatttcacagtaccagaggctgaggaggaaaagtcttggcacggcagtacatggtgggcagttcctatgggcattagttgaggggtccatyggccttgctcattcccagacaggatgaatgagtcagatgtgatgagggccaagccaagtagcccaccggagacttcacaatggccagtggcaggtaggtc

SEQ ID NO: 32862 - DNA, 201 bp, Bos taurus
tccaaggacaaaggagaagccacaataagacagtagagagggtgcaatcatgtttaaaatcaaacctcatacccgccaaagactcttggagggcccagacraaaccttgtgtgcaccaggacccagggaaagaagcagtgatcgcacaggagactaagccagacctgcctgttagtgtctgagggtcccctgtggaagcac

SEQ ID NO: 32863 - DNA, 201 bp, Bos taurus
gcgactccttcagggcctggggtccaggggtctccgagtagggccggttctgctttgcacagaccccacccttaccctaagggtacatgcagctatgcccytctccatgaggcacggcagggcctgctgaggtgtgtgtgcaactaccccaggctgtccccagaggagcctcagcctgcagcgtgagtactggtgtctgct

SEQ ID NO: 32864 - DNA, 201 bp, Bos taurus
tctccactaaggccatactgggcaagaccacaaacaaatgcaaaggctaaagctttttgacagtccctcaacaacacagaaagctgtaccagcactgaaakccagtggtgtacaggcctagatggcaaagcaacaggagcaggaccccacaaatttatacatctcaaacttcccattgtcgatggatgagcaaacactgga

SEQ ID NO: 32865 - DNA, 201 bp, Bos taurus
aggagcctggtggactagagctccatggggtcgtaaagagtcagacatgactgagcacagcacagcttttttgtagcccagtttctggggccactggcttytgactggagtaatgttgacctaaaacaaatagactgccagctatttctccagcaaagatgggtttatttgggatcaacagagaattgaaattcagggtct

SEQ ID NO: 32866 - DNA, 201 bp, Bos taurus
gcactcaaagagaagatgagccaggcttaggaaaggagggtgggcagcagcctcgctttcttcagtggaaacctggcccaaaggcttcctttggctgtgaraaagctctgcatggctgcagcgaggaactggagaggagctgacagcactcggggaggacggggtctgagggacgagggtgtgagtgtcctgctgccccct

SEQ ID NO: 32867 - DNA, 201 bp, Bos taurus
aatgccttgtctgaggtctccctgcgggccaggtagggcccagaggccagctggagcctgggtctcttccacacctcatacaccatccagcttcaactcaytgcacacccactattggccatctaaagtcactttgcaaactgattcaacagccactctttgtgcactcattctgccctgtccagaatttatcattacact

SEQ ID NO: 32868 - DNA, 201 bp, Bos taurus
aaggccagcagacagcagagatggcagactggcctaagaaccatctcatctccctcgggaatcagggtgcttttatacacaagacagagagtgggaaggcrctttctgaggccgggaccagtggcagaacagggccgttaattggttggggctgacagttgctgacttgggcggaggggcccacagggggctgacaaatgg

SEQ ID NO: 32869 - DNA, 201 bp, Bos taurus
tgatcggtagtttcagccttctggttgggtctgtcccaaagactgccctttgggcaagtgtgtgacttctttcggaatccgggccccttctgtgatcggcrggacctgaggagtagttcactgtggctgcgcagggagcagatctcctagagctgggggttatttttcaggttgcttggagtatcctttcttggccccaca

SEQ ID NO: 32870 - DNA, 201 bp, Bos taurus
gaagcacccccagcctcctactcagacagccctctggcccagaagccgctcattaaagctgctcattaaagccactcagcagagaataacgtgggatatgrgagatggggcaatcgtgctgagggccagggggagcttgtgtgtcccatgagctggggttccccctcacgaggaccccaggggcaaagacacgaccctggg

SEQ ID NO: 32871 - DNA, 201 bp, Bos taurus
gaagaacgtgggagtgagatgggccggcgcgcacaaaggctaggagcgtgaggacaggtggggcctgcacacggcgcagccgctgtcctcagggacatgcrgagagaaggggctgagcttgtgcagcgactgccacggagctgagtgacaacagggtccagatgccagccgcactgggcagcggccaagctccacaccctc

SEQ ID NO: 32872 - DNA, 201 bp, Bos taurus
tgggcccatcaaatgtcttctcatgtagagcctttgtgtggtcagcgtctattcagcagacactcaggctggactccactgacagctctcttctccggccrgatgtgtctgtcagggatcagtttctgtctgtgccagttctctcttttctgacctaagggttggagaaagagcatcacacccctctggggccttgagtgg

SEQ ID NO: 32873 - DNA, 201 bp, Bos taurus
ccacacgtgaggcagcgtgagctagacacggaacactgaagggcgtctggagggactgccatgcaggagtgatgcggcagagatggcggaggtgcaaggcragtgtcagtgcagatgggccgcggagccgggcagggctcagtcccagagggctcaggctcattgagagcctttggagggtctgcacagggagtcagggtc

SEQ ID NO: 32874 - DNA, 201 bp, Bos taurus
aaaatgagccactgggaagagctgggaggatgggaagggtttggaagcccagtctctcctgccctgtgggcccttggccatggccatcacagtctttgggyttgatttctgcatctatgtcatggagatcatcacactgaacttgggaggttcaaataccccggaggtggggagggtctggtcaggtgttggggagtgcgg

SEQ ID NO: 32875 - DNA, 201 bp, Bos taurus
tcccagataacccagcatggtctccccatgttcagggccataatcttaatcacacctgtgacgtcccttttgtgacgtaaggaaagctgtcccgagggctygtggacatctctcggggccttactgccatcagcgtcacagttgttaacgtgcctccctgctgggtaaagcagaccacaggaaggtttagacaggcctggc

SEQ ID NO: 32876 - DNA, 201 bp, Bos taurus
acacccaactcatcaccccacccccgaggccccacatcagtttcccaccaactcacctcctcgaactccattcccgcctcccctcactgtccatctaaccraccagcttgatcctacctcagggcctgtgcatgttctgttccctctgcctggcatgctacttccctagctctcccatggccagctccttttcctctttcc

SEQ ID NO: 32877 - DNA, 201 bp, Bos taurus
gccctgggaggggccgtgtctcataactttttttttttttttttaatctctttagtctttctttatcagcttcagcgtgttcctgggtgaggcaagacccrgtggctggggcctcaccggcagcgcagaagttcatctggggctgctgccctcttcaaggaccggatggggcaatgggggttcaggctggttgccctcctt

SEQ ID NO: 32878 - DNA, 201 bp, Bos taurus
gagcaaccagtatatatcatctcacggtttctctgggtcagggatatgcctcttcctcaaagtctcacacaggccacaatcaagatgttggccagacctgyggtttcatgtgaaagctcaactgtgggaggagctacttcccaattcactcatgtggttgttggctggttgatggctccttgctggccattaactgggggt

SEQ ID NO: 32879 - DNA, 201 bp, Bos taurus
ggccccaagggctgccacacaccagctgggcctcacaccagcgacacagccctgggcatgacacgccccccaccacggcggtttcctcatctgtaacacarggggtgaggactgggcccacttccctgagttgcagaggggactattttacaagatcattttggaaaaacacattagacatgatgccagtattctagggca

SEQ ID NO: 32880 - DNA, 201 bp, Bos taurus
agggctgacccacaaagacttgagggtgtaggtggtccaggcttgctttccgagttcacctcccttctcaaaacacagggcctgcttgggcagcattcccrgagcagaagacagtccctggagaggaggagaaccaactgaggttgatgctaaagttgagataaggctcagtggccattgcatctgaatagtgtagccata

SEQ ID NO: 32881 - DNA, 201 bp, Bos taurus
ggaggcatgtttagagaattcacatagaaaagaagcgtagcgcagagtgaatttcttacccacccttattcccagaggccacggttaattgtatctccttycggagagattcgaagtcaatgacaaatcttccttactacggacaatactatagaaaaaagattcaagggcacatttctttggccaattgtgcaggcttat

SEQ ID NO: 32882 - DNA, 201 bp, Bos taurus
gcccacatccccccaaacagatgatgcacaaggttggcctctctgtgtgcagaaatgcggccaccagatgccgctgcgtctgggtgtttctgattcaagcrgttgccgggttccttattcaggtcaaccctgacctgggttcagggtgtcgggtttctggcgccattttaaacaacgccgctgcctacaggctccagctgg

SEQ ID NO: 32883 - DNA, 201 bp, Bos taurus
tctgacatacaagatgcgcacgagagggcctgagttgcctaagctgactggtttcctcgcaaagatgtggcaaggacacagagaagtgggaccaggaagcrcggagggcagaaggggccagcggagtcacaggctcagaggggctgcgtgggagggacagaaaagcgagctccttgaggatgggcgtggatggggtgggag

SEQ ID NO: 32884 - DNA, 201 bp, Bos taurus
catcagctcactgaggcgctcagctgacttctctggcttttacgcatgccttccgcacagagtccaaacacagcctaaaacctggaagccagtcacactgyagcttaaggtcttgttccaagtgcctgtgaaacctgcaccccaggaagccccagactgtgtctggaatgaaaggaagcaggtctggggctgaggaactgg

SEQ ID NO: 32885 - DNA, 201 bp, Bos taurus
ttccacagtggttgcaacaatattcccaccaacagcgtgtatgtgcatccacccaatttctgcctgtgtcttgacatggccttctcatctgtgtgtctccrcattttcccttttttgggggggtttcaaatctcattctgccttcttataaggacatttgtgattgcattttgggcctgcttggaggatccaagataaact

SEQ ID NO: 32886 - DNA, 201 bp, Bos taurus
cagcagccaggtgagttaggtgtgtcctggtgctgtgctccacagtggaagggagaaagctcaggttggagacacatcatctgggcctgctactcaccatrtttccaagaatcaaaggctacagcagacagttcccagacatatccagacctgctgccaacagctcaactgtagccaggtatggatttccagactctgaag

SEQ ID NO: 32887 - DNA, 201 bp, Bos taurus
tggttggccctccagaggctcggtagctttgttacctgggaagggaagagtagactgggggacagcaggcaaggatgctcggagtcaagagaaccccttgkggagggactgtttgttcaggcccaggcgagggtggaagcgggtggctttgggcttctgggctaatggaccgtgggcaaggccagatggtgttagctggag

SEQ ID NO: 32888 - DNA, 201 bp, Bos taurus
ctggccagcgtcctgtagggagactcctctgaaggggccattgactcagatgctgtgggactgggagatttttcaaaatcttctgagtaagtcgagttcaycgcgctggccataggttccggagacgttggccccaggcaacaaatgccctggggcccaggggatgaggccgacggctcactcaggcgctcggagatctcg

SEQ ID NO: 32889 - DNA, 201 bp, Bos taurus
tcagatccctcaccttccacgtctccttttcccttttctgtcctaaaagcagtgtgtgttaactggagaactcagaaagccaggggaggcccccgttcacrgggaaggatcattgcacacgtgtgtgtccgtcccaccaggtgcagatcccgtgcacgtggctgctgtgtgctcgccagctgggtcatcaccggccttctg

SEQ ID NO: 32890 - DNA, 201 bp, Bos taurus
caggaccctggtggtcctggtggggggctgctggcttccagacagtgttacttagtcccctgttgtggctggagttcactgccgtggccctgagtcctggygtgtgtggtttctggctcactcggactaatgagggcgtctctgtgctgctgcgggagccagggggacacagctggtctctagtttccttgtgcgctgccc

SEQ ID NO: 32891 - DNA, 201 bp, Bos taurus
atgcccacttcccagacagaagcaggccagctgggcctgaggccctgggcctggtctgggtctcagaactcaaggggacagaggcagaagtccttagggamccctgggaaccctgagaaatgtggccttaggaagcagcgtcagagagtgtggttttggagctgggcctggaggtggacgtgtgggcaggtggcgtggcag

SEQ ID NO: 32892 - DNA, 201 bp, Bos taurus
gccttaaacagggaagaaattctgaactatgtgacagcatggaaaaacctcgaggacatgatgctgagtgagataggccagcctcaaaaggacatatgtgrtgtggctccactcacacgaggtccctaaagtagtcagattcatagagatagaaggtagagagaagggtgccagggcctggggttggagctggggcgtttg

SEQ ID NO: 32893 - DNA, 201 bp, Bos taurus
caggaaaatattgaaaaacattgactgtggcttcggattcagccaagtgtgactttgctgggctaagtcgcctcccctctctgtgcctcggccttcctttyctgtaaaatgggaaagcccttgggaactcccaagggcactatgagcagtacggagacgctgctagtgggctttgtgctccagcggctaagactccacagc

SEQ ID NO: 32894 - DNA, 201 bp, Bos taurus
ttcgatagtctgtgccaggctaaatgctgccagctgcctagacgctcggcttgaggctctaaacacaggttcttttttattcctgttttaaggtctatccractatttctgtgcaaaaacagatttaaaatctcgatggctcagaagccgctggcagctgccaaggccgccctgttctctcaactcccctcaaggggaatc

SEQ ID NO: 32895 - DNA, 201 bp, Bos taurus
tggtgggctggagtccgtagggtagcaaagaactggacacgactaaagcaacggagcacgcactgtttcctgggacaggaccggggagggttatggggackgaaacaccaaggcccggagaggtgaagctgtttgccctgggtcgctcagccagccagtggtgcactgagattgaatggggcgggggagtcgcacacgggc

SEQ ID NO: 32896 - DNA, 201 bp, Bos taurus
caaccaccacaacatatgtttacatataatgaatttaaatataataatgcattatatatttacatataaatatcatgtgtagttacatgattataggcagytataaaaaccgggacattgacactgacactaataattaactaaagaccttatttggaatccaccaattttaatattcacgcaactgctgtgaaatgcact

SEQ ID NO: 32897 - DNA, 201 bp, Bos taurus
tgtctgagactatgtgatctacgtgatccagactttgcaaggagcaagctgagttacagaggcagaacgagcaggaggttatgtaaaatttcaacttttcytcttcaatatattgatgttgcaatatgattagcactgcatgttaactcacacctctggtgtgtgtgtgtgtgaacaattatgatgtagtgtcttatcagc

SEQ ID NO: 32898 - DNA, 201 bp, Bos taurus
ctgtgaccaaatgaaggctctggtttcatgttaatgctgtttgttttgttgtgtaaaacttgggatgctgccaagcctggggcttggttggccaggccctytccaagggctcaacaaccttgagatttcttcctcgccttatctaaggtgtgcaagtcttgcactcacagcaggctcatcatcatcatcatcatcaccatc

SEQ ID NO: 32899 - DNA, 201 bp, Bos taurus
acaggctcacaaagagttggacgtactgagcacacatgcacagggacggtgtattcagtaaataacttcaatttaatgagatttcaatgtgcctttataamtaacaactatttttgagtgattttttttaaaggcattttcaagtttaaactgcagtgaaccactaatctgctttctgtttctatagatttgcctgtgcct

SEQ ID NO: 32900 - DNA, 201 bp, Bos taurus
cccagagaaggagtgtgacctggctctgtggcacttggaggaactcacagaggggccagtccccacccaaaactcaggggtcaaaccctcctatggccaartcctatctacacatatcatggcagcagagttttccaactttagcatcagggactttcagttcagtcactcagtcgtgtctgactctttgcaaccccatgg

SEQ ID NO: 32901 - DNA, 201 bp, Bos taurus
aaaatcaggaagctcagaactatgaagcctctggtctccagggcacacagcctggcaggagctcaagtcctatttccaagcaacccagggcctggggtgaracatgacttttgggaacagaatagaatccagcctggctgtggattaccttcatcagattcagagggtaaagggcccagttagaagaggacatctagaggc

SEQ ID NO: 32902 - DNA, 201 bp, Bos taurus
tgtacccaggacatcacgcttccagatggccgggtcatccccaaaggtgctcacaatgactacaggatgaggctcctggtcagaaagggggcccatcaggmaggttgaacctaattctgactggtcctcctctcccacaggtgttatctgcctcatcagcattttcgggacccaccacaacccatatgtgtggccagaccc

SEQ ID NO: 32903 - DNA, 201 bp, Bos taurus
gtaggactcagactgagcccgggacctacctgtccgtccctccccacctcccgctgctcataacacggagcacctccagggccccatctgacacaccattycttcattctgacctctctccatgctctgaacgctaaaactcggactcaacaggcctctcaggctcctttctccaaaaaaatagaccatgaaaactcactt

SEQ ID NO: 32904 - DNA, 201 bp, Bos taurus
cgtgaagtgggggagcagttgggcaccaagggcacccactatactggactcatttctgcgcggttttacctggggtataggtgcccacagggtctggaggyggggttttcaggccctgtgtgcgcggagtggggactcgggagatgttcacccaagagtggcggcctgcctgctccagaaccttgtccagtggctggttca

SEQ ID NO: 32905 - DNA, 201 bp, Bos taurus
ttaaagatgttcagtgtgtggagtgacatgagcaggagggagaatgaggagatatggcgtcagaggatactgaaaaacaagttggcctccctgttgctgcygaaacttcaagtcacagggttctctaatccacacaaattgttgcaaagatgtcctgtatgtgtaaatgaatctcttctgttgattgagctctggcctctg

SEQ ID NO: 32906 - DNA, 201 bp, Bos taurus
ggaggtgccccaggagctgccccttggcctccccaccacccacacccacctggacaacggcctgctcccgcatgggccgcaggttgcgaccgcggagatcrgtcaccacgaagggcagggagatcttgtcatcctcgaactctaagggggcaggacaaggtggtagggatggcggtgggaggcctggaggctctcaaggcc

SEQ ID NO: 32907 - DNA, 201 bp, Bos taurus
gcctccactctggatgcccagcccgacgccacctctctctctcctgtcagcaagttgcaccgcctggagtacctggacctgtcccacaaccagctggctgmggtgcccgctggcctgcctcgcaccctggctgtgctgcatttgggccgcaatcgcatccgctgggtggaggcagcccggctgggcggcctgcggggcctg

SEQ ID NO: 32908 - DNA, 201 bp, Bos taurus
gcccaagttgtcagggacccagtggcaagcaacatagatcaagatccttgtatgcataacactgacatcctacaggggacaccaaaaggccacgaggaagmcctcattggaggatgtgatgaggagtgcctacatccgaccgcagcctgaataatgagagggagccgacccgtcacagacgaggggaagagcattctagga

SEQ ID NO: 32909 - DNA, 201 bp, Bos taurus
agcaaactcgtcctcatcatggttgtgcccccatgtccttacatggtttcacacagatccctactccatcctctgttgctgctgacatctctgaaagatgygtaagactctttgttattgtcattgttgtttagtcacaaagtcatgtctgactcttttgcaaccccatagactgtagcctgctaggctcctctgttcgtg

SEQ ID NO: 32910 - DNA, 201 bp, Bos taurus
ccccccagcagaggatcagtcagtcacccctggtaccagaaagattccccactgtggcacaaatgctttttatcgttcagagagttttgtcgttgagagcrcatcgatctttttagtgttcagagcatttggttgtcatgatatttgctgaaccatgttccatcaagaatcgcttcacttcctagcagcaggagcttgttt

SEQ ID NO: 32911 - DNA, 201 bp, Bos taurus
agggggcagctgggctctgtttcacacggtcatgcagggacccagggtccatgcttcctgtggctctgccaccctcaagtcctccactgggccaattacamtttgatgctggacagaagaagagaatgagcgtggaggatcttgcaggaagttttaggaacctggccctggagtggcttatgtcgtttcctctcccatccc

SEQ ID NO: 32912 - DNA, 201 bp, Bos taurus
gacggagtttgacctaaggacgctgagggcagttcgagtgctgcggccgctcaagctggtgtctggaatcccaagtgcgtgagtttctaaccctggcaagrggtctgctcaggggtcctgggagccctccatttcccttctgcaagaaggtctcataggtgccctcagatgcttccctagcctgggtcagggcagccttat

SEQ ID NO: 32913 - DNA, 201 bp, Bos taurus
gccgtttgccagtgagcccaggcttgagggcccttgggaggctggggggagggtaggagatcctcgcagaggaagcaaaagggcaaagaatgtcagagccragggccaggggtagtatcaaccttgtcataataacaacaaaaataaataataggtgacaagaatcatgcactcactgcatgccaggctctgtgccaagcg

SEQ ID NO: 32914 - DNA, 201 bp, Bos taurus
taggctggcgacgtagagtcaggaggcatgacatgctgacaggtgttaagccaggagactggaggagctctccaaggggacaagagaaccaagaggccccygaagactgagcctggggccaccccagcatctaaggtggccgagaaggagtggaaaggagaggccagggaggtgggtggagagcagggcaacactgactcc

SEQ ID NO: 32915 - DNA, 201 bp, Bos taurus
gccgcagatatgaggatgactgctatcaggaaacaaaacagaaacaagtgttgatgaggacatggagaaactggagctcctgtgcattgttgacaggaacrtgaagagtatagccactgtggaaaactctacggaggtttctcaaaaacttaaaaatggaattaccacacaacctagcaattccagccaaaagaactgaaa

SEQ ID NO: 32916 - DNA, 201 bp, Bos taurus
agcagttacaagaatgcagactggagtagggctgcccagttcacctcccagctctgccatgggttagctgtgtaaccttgactgagttacctgatctttcyaggcctctgtttacgcgtatgtgaaatggccccttttcacacatagttatggggtgacttgatagaacagagcctagtgtagaataagctctctaaactt

SEQ ID NO: 32917 - DNA, 201 bp, Bos taurus
caagccaacaatgcttcccagagttggagtggaagcccccaccccaacgttgacattgggggggcatggcggggtggcggcttcccaagggtctcagcccrtaactttctcgaaggccctggagggcgcggtcactgggccggagcgacctctgacagtcaaagtgagctatttcgaagtctacttcttggtgttccccag

SEQ ID NO: 32918 - DNA, 201 bp, Bos taurus
ctatttcctcctccaggggatcttccagacgcagagactgaacccaggtctcccacattgtaggaggattctctaccaactgagctaccaggaagtccgaytgttaaactatagtgcttatgtgtagctaacaggtatataatctcactctgcccacctgtgaatggctgcaacaaaaagaaaaaattaacacaccccttc

SEQ ID NO: 32919 - DNA, 201 bp, Bos taurus
aagtgaggtatacacaaatatttactgaacagtttattagtatagaaaatgttaaaaggctcttgtactcttcactccaacaaaagagcttggtaagaaarataaatagatatactggactagagatattcgagaactgccacagctgttatgaaaatccaaataccaaactgtcatttctcagtggccccttaacacaga

SEQ ID NO: 32920 - DNA, 201 bp, Bos taurus
accaaagtgtagaagcccagctgggtgacaccatgggtcagttggctcagctcccagtaaagctgctctatgtccagcctgtggcccatggggtcagggtrgtaggtgcagacgacatacacgctggtggctgcactatccttctcaggtctagggagagggaggtgggaactcaaaagagaagtcttgaaacctctgggt

SEQ ID NO: 32921 - DNA, 201 bp, Bos taurus
caggttccaagcttgtgcccaaaacttctgtggtttttcccaagtcagaggtaagaactgaggttgcgggtacaggagagaaggtattgttcccttccggyatagacaaatgtcctggatctgcagcagctgtggtggaaagctgggtagaactcttctctgcttccttgctagcaagatctggcctcctcaataaagtga

SEQ ID NO: 32922 - DNA, 201 bp, Bos taurus
acagagaaacagaggccaagccagagagtccagtgggagattacagggttcggttccccctgcctcacagcggggaaaattgggtaccagaaaaacaccarggccaacaagatctgtgacagaggaggaccagaccccagacctcgagattcttcaaactcttcctgatttagcaaattatttatttatttatttttggct

SEQ ID NO: 32923 - DNA, 201 bp, Bos taurus
tgccacaacgaagatcaaagatcccacatgccccaacaaagacccagcacagccaaataaatgaacaaatattttttaaaagactgtactctagaatacartttgggaaaatacagtctgtggacaaaattctgcttgctgtttgaaagtgaaagtgaatgttgctcagtggtgtccgactctttgtgaccctgtggacta

SEQ ID NO: 32924 - DNA, 201 bp, Bos taurus
ataataatctgcctgccaatgcaggagacatgggttcgatccctagcccaggaagatcccatatgctgcggagcaactgggcctctgcaccacaacaactraagcccgtgcacctagagcctgttttccacaagagaagccagcacaataagaggcctgtgcatcataagagaaagcagcccctgctcaccccagctaccg

SEQ ID NO: 32925 - DNA, 201 bp, Bos taurus
tccagtgattaagactttaccttccagttcaggagggcaggtttgatccctggtcgggtcgggcagctaagatctcacatacctcctggccaaaacccaamaacagagaagcaacacttgtaacaaattcaataaagactttaaaaatggtccacatcaaaaaatgtcttaaaaaaacactgacaatattcacttgaggcc

SEQ ID NO: 32926 - DNA, 201 bp, Bos taurus
gcccattggctgaggttggattcctgaaatcgatgcggcggtgcgtgaaaaaggtcgtcatgggggaaattgatcttccgtggctggctcaggaatttcaygctaggagccagggacgccctggcacaaaatggaggcattcgctatgaggctcctgggcgagggatgaagggagggaggccttgaaggctggacagtgca

SEQ ID NO: 32927 - DNA, 201 bp, Bos taurus
actgtcccttcccataagggatccagaggaccacgaagctgggagtactcaccggggagccggggtgtcccaccagaccccgtatccctgttggtccaggygggccctggaggcgggaacagagtcaagaaaccctcaggtttaagattaaggtcgcaggtggggaacttccctggtcgtccagtgactaagactctgcac

SEQ ID NO: 32928 - DNA, 201 bp, Bos taurus
attctcaaaaaacatcagaggtatatagggcaccctcaggcctgtggaggcgaaggagtgctggctggatgaggacagccagcagggggagccctcttgtrtggaggatggtcggggctggccagggctgggaggcacagcaggactggatccaaagcccagtggtcaaggtcaatgtccagcactcagggccagactccc

SEQ ID NO: 32929 - DNA, 201 bp, Bos taurus
cccctcctctaccgtccctccagattgggcctcggatgacgctggagctcatcaagatccaagagggggtcggagagggcaacgtgctgttccacaggctyggtgaggacggggccaggggcacagtggggcctgcagcctggtcatgggcgggctaacctggaccttggggatgaagagctcagtggccacctcttcctg

SEQ ID NO: 32930 - DNA, 201 bp, Bos taurus
tccaccacggcctcctcatcgctccagtaaagcaggttgatgtctgcgtggtaactggctggggtagacttgtgtgtgttctccggcctgggagtgcaagrgtctttgttagttcgtttgtcgcaagttgaaaatgaattaaatggcatattcctggggatgtgctcataggatcagtgggtaaagactaggccccatgcc

SEQ ID NO: 32931 - DNA, 201 bp, Bos taurus
cttggggacaggggcccagccccagctcctcgctctgggtgggtccctctcctcaccctggctcccccacccaggtgctggccagtctccggagcgttcgyagcaacttctccctcctgaccaatgtgcccattcccagcaacaagtaagtggaggctgggccccagggcctgtgatcatgaggctcaacacacctgggtc

SEQ ID NO: 32932 - DNA, 201 bp, Bos taurus
atggagaaggaaaggggaaagtgggaggggctgagggcagggaggggacaggacagagtgggcacagccttgtgggccatggggaggacttgggctttggytcagagtgaggtgggacccatagagggttcagggcagaggagggacataccctgaatcaggtgatcactgcctccactgggccctaccggggaaatagac

SEQ ID NO: 32933 - DNA, 201 bp, Bos taurus
gtattcaggaccagagcagctggcttctgataggctgatttggatgacagatctgggttcacacagagacaagcgaggcccgttcagcaaaaacgcattgrctccagtttttcatttttatttatttaaatatttttgccacgccttgtggtttatgagatcttagttccccgaccaggccttgaaccctggccctcggtg

SEQ ID NO: 32934 - DNA, 201 bp, Bos taurus
caagattattcattgcagccttgtttgtagaagcaaaagattttactcacaacccaagttaaaaacaacccgataagcaagaggtggactattcatactckaggatactgggcaactttttaaaaaatgtaagaatggaaattcccagtcagtccaatgtttagaactccatgctttcactctgagggcccaggttcaatc

SEQ ID NO: 32935 - DNA, 201 bp, Bos taurus
tgacatgggcacgtcagagcatcgggcagggacacctgaccagtaacagggcaggtggtgcgaggagagagggtggcccagagaagtctcagaaggtgccrgtctttccaagccctcagggagccttgaggttccttggagagcagacccagcctccagcctgagatgcagcacccagaggggagcctgtgggtgcgtggg

SEQ ID NO: 32936 - DNA, 201 bp, Bos taurus
tggggttttatggaggcttcattgtataggtacggttaatttaaccattggtctttggcggctgaggagggcggactgaaagttgcaacggtctaattgcyaagctggtcccgacatggctttctaaagtcatataccccagggtgcttgaagggggcgtcacgtgaatcacagaagacacctttattgctctttaattta

SEQ ID NO: 32937 - DNA, 201 bp, Bos taurus
tcagcgtcagccgcttggggcagacgcagaaacctcaagggtctgtcgtggaaggcgtcctttttccttgtagctaacgttaggcctgtgtacccccttcrgtatttgtagatgctcctcccgcccctcctactctgatggcattctggtcccaccccagcctgggaaggggccttgcagggacctctccaaaaaaaaagg

SEQ ID NO: 32938 - DNA, 201 bp, Bos taurus
agcctagggatgtaggcacccctctggggactggattcatttcctacatgtccaggtctaaaggattttctaggaaaatgaatatttgccagggccccccygcgtggaggagattctggggaatcgcaagaaaggcacaactcgcacccctcggctgctggctccagagccccacacctgaatggggcggaggcgggcggg

SEQ ID NO: 32939 - DNA, 201 bp, Bos taurus
aagccctgcccccaaagccaagattccatttttcctcccatatttacatctttatttcttagtataagcaaagtccactccaagcacggctctgggcctgkactccaatcctgaccacttgggggctgtgggaccttgagcacattccttctgggttttgtgcctcagtttccccatctgtaaaatgggccccatggcaac

SEQ ID NO: 32940 - DNA, 201 bp, Bos taurus
ggccactgttctaaatacagtagctcgagtccctttggctgtcaaagttctttacaccttagctccctactttgaaatccagctcatcatccttcaagatmtagttcagaggccacctcctccaggaaggctcctctgatttcctttcctccatatacttatttagatctttccctcctcctgtgttccttatactggagt

SEQ ID NO: 32941 - DNA, 201 bp, Bos taurus
gggcccgtgtgctccaactactgagcctgtgcgctagagcccacaagccgcatctactgaagtctaagcgccctagggcctgtgttctacagcaagagaarccactgtagcgagaggcccaagcgctgcaagtaagaaaagccctcacagcaatgaagacccagcaaagccaaaaataactaaataagcaaataaaaatat

SEQ ID NO: 32942 - DNA, 201 bp, Bos taurus
ccaagagccctttcaactaggtctccaggtctgcctcctgcctagtcccccagaacccctggcctcagtcccatgggcccattggaattgcttttcctagycccccagtccccaggaactctgagctgacccctcctcaagctcccttcagttccccaccctctgatcctagctgtagacctgggggctccgaggggccgg

SEQ ID NO: 32943 - DNA, 201 bp, Bos taurus
cagcccgtggactgctgggtgaggcccccagggggcaagtggggcggcttggggtatatacacagggctgcggtgtggggattcaaggcttccagaaggaygtgggggccacagcagggtaaagggtactggctcagagttctctccacagcttaataggtcaggcactgcttccctacagcctggcttaggggggacggg

SEQ ID NO: 32944 - DNA, 201 bp, Bos taurus
tacattgcaggtggattcttcacgcactgagccacctgggaagccccttttctctatcacatcttgagagcctgtcggaaatgcagacactcgggcccacmccagactaaccatcagagtctgcattttagcgaggtccccaggggattcctgcatgcacactggggtggccaccccctccctccactccccagagtttcc

SEQ ID NO: 32945 - DNA, 201 bp, Bos taurus
gacactgtgcccccaattcagggggcatgggtttgatccctggtcaggaaactaagatcccacaggcggagcagtgaggccaaaataaaagaaagtaaggraattcttttttttaaaaaggatatgtactatcaactttatttatgtgtgttgatattggccttcatcacctggctaacttagtatttgttaggtttttcc

SEQ ID NO: 32946 - DNA, 201 bp, Bos taurus
ggttctcttgttgctctgcataggctttctctgcttgtggtgagtggagggagggctgctctctagatcggcatgcaggcctctcattttgacttctcttrttgcacggagcatgggcttcagggcgctcgggcttttggcacacgggtctggtggccctgaggcatgtgcagtcttcctggaccagggattgaacctgtg

SEQ ID NO: 32947 - DNA, 201 bp, Bos taurus
tggtagaaccgcaagacttgcctgacctatagctaaactgaggatggaggtcttttaaatataatttttaataagcagctgtaccttttggggaagagagraccctttaagcagagttattggtagagaggattgaagttggattcgtgctgtctctagaatgttaagtagacaaagtcctaatttctaaacctggctttt

SEQ ID NO: 32948 - DNA, 201 bp, Bos taurus
cgtagtcgcaataggagttacgagaagagagctctgtgtcgaggtggagggtcccccaccatcgcctacagagtggtcctaggccgggggtcccgggatcrgagagaactgggttctagggagcctctagaacagcgtccggatcttaccttaatttaggggccggcttgagtggagtgttgcatgtaaagggatcgaatg

SEQ ID NO: 32949 - DNA, 201 bp, Bos taurus
ctttcccctgtctctctctccctctccctctgtatgattaagtttgttgctctgagcgtgtgccttttgctacatctcagtgatggggagtctggcttcckcggccagcagtgggggaagggggactctgtgtgtccatgtgtgtgtgtgactaattgtgtgggatttatgtcagtgtgaggatgaagctcagcgtgagga

SEQ ID NO: 32950 - DNA, 201 bp, Bos taurus
aattcccagctcgtgggccatgaatataagtcatttggcttgcggatcggattctgctgcgggtccagactgtaccaggacaccggcaataaggcgtctgrgtccccaaaactcggccttccgggagctgcgccaccagcaccgagcccgcgcgcgcctccggccttccaaccctccttcgcagcgcgcgcctcccgccaa

SEQ ID NO: 32951 - DNA, 201 bp, Bos taurus
ttttctattctcttacaagttctatataaattttagatcagtttatctatatttacaaaaaattcctagtgagattttgattaaatagccttaaagctctrtatcagtttggagagaattgacatctttaagtatcttttgggtttggagctattgtaagtggtattgatttttaatttccaactcttcattgctaatgta

SEQ ID NO: 32952 - DNA, 201 bp, Bos taurus
ggcagccccagcttccccaaggccgcccggcagttcctgctgaaatggtccttttacaggtgagtgtgcacgtcatctcccagagagctggggaggtggarggagctgaggcccacagacgcaggccagccttcaggactcattcctgggggctcccagggacaggccctcctgggacctcaaactgggttacagaggttt

SEQ ID NO: 32953 - DNA, 201 bp, Bos taurus
tcctcaccaacatcagcgcttgattttactacccccattcctacctcctccgcaacgggctcatctgtacctcaccccacatcaggccaagtcctacacayttactgcagggactatgtgctcacagagagcccgcccaactaaaggaagggacttgcaacgtgtggtcactggcccctgtgttctctctgttcaagggac

SEQ ID NO: 32954 - DNA, 201 bp, Bos taurus
tttaatcatggccggacttggtttccgatgtgttagtcacatgggttagatcataccagaggttaagaccaccaaggctttcttattacccagtttgtcamcaggccacagattaatttggcattggcttcgtgggttggatctctacttttgagacccctgtgagggactttagttcagtaaaaccttcctccccacttt

SEQ ID NO: 32955 - DNA, 201 bp, Bos taurus
gagcagactcggatgctccttaaacatccagtgtctgcctggcctgttttcagaactttaagtaactgggatatgggtgcaagtattacatacgaggctgmgtgtgaagatcggtggccctggggaggagtggtggtcttcactgcagcctgggacagctcctgcctccggtcttgcagccctgacctctcctgacttttc

SEQ ID NO: 32956 - DNA, 201 bp, Bos taurus
aggccactagggccccgctccccaccccggtcagcctagacctgcctgcacctgcccccccaaagcttgtccaccagccttctgactgcccttccttccakggggcctggtctgggggtctagacgtgcagaggagcccgtttctccagaacgatgctgccccttggtctccagctcagcttgggctcaggccaccagtga

SEQ ID NO: 32957 - DNA, 201 bp, Bos taurus
cctggtgtgccagtggttaagattccatgcttccaatgcaggggaacaagttccatccctggtctgggaactaaaatgctacacagcatggccaaaaaaamccccaaaaaacaacaaaagaagccctgaccaccttgaacctctgggaagggaggggcggggggactctggcaagatggccccagaagctcagaggagcac

SEQ ID NO: 32958 - DNA, 201 bp, Bos taurus
accacagatccaccggaccggtctcggccaccagagattgcgatgccaaagcctcggcgggggtcctgagaggggatgagaaacagaacgcgattctgctyttcactgggacaaaggccatcctacggggaccggcccactgtttttgttggcgcccatgcagggagagggaggccccaccttgctgatcgtggcagtgta

SEQ ID NO: 32959 - DNA, 201 bp, Bos taurus
agcctccatggggcagggacgtggctgcagtgttgctgggctccttgctcaggttgtcatctggggctgggctgtggcctcaagtggactctactgcatcrggtcccttccagacccctggcgtcatcagccaggctccgtccttgctggccaggacttccattccttccagacactgcggtctcctgtgtgattatcaca

SEQ ID NO: 32960 - DNA, 201 bp, Bos taurus
gagtttgagtgaactccgggagatggtgatggacagggaggcctggcgtgctgcaattcatagggttgcaaaaagtcggacacgactgagcgactgaactkaattcccatctaattggccacgcccctgagacttgaccacgccccaggagcaagctgcgtcgcttgccggcctcacctctcggctgaatcgggacaaacc

SEQ ID NO: 32961 - DNA, 201 bp, Bos taurus
ggctctgtgggccacagcctatacccactgcggccccctcgacccctggaacctatgacctctgtcccagacttgtgtaacctgctaggtgaccctgggcragtgattgggcccctaagcagagctgctggataaaactcaggaagttcagttacacctgaatcctagataagccttttagtgtaagtatatcccatgcaa

SEQ ID NO: 32962 - DNA, 201 bp, Bos taurus
acctcagtgttcacagcagcactatttacaacagccagtacagggaaaccgccgaagtgtccacagacagatgagtgggtaaagaccatgtcgggtatatrcacaaggcaataccatctggccatgaaaagaatgaagcaaatgccacgtgcagcagcctggatggacctagagatcatcacaccaagtgaagtcagacac

SEQ ID NO: 32963 - DNA, 201 bp, Bos taurus
ctcacctggggccaggggagcaggcactcagcagccattctgtcctccctcctgggcaaaagcaggttcctgggcaggcagggctgggagaggaaaaatgyagagtgaagactggatctggcctgtcccagaccccagagtcctctccaccacttgaggtcacacatacaacacagaggagagtcatggaagccagtgatg

SEQ ID NO: 32964 - DNA, 201 bp, Bos taurus
ctaaagcaccagtgcccaccccgcccccggggtcctctcacagggacttcctttctttccgggtgacctctcagcctggggcggccagcttcagatccctyagcttcctgcccccatatacctgtcacctcttccaccccgaggttaattgctttgcccccagattgcattttccacctctccctttttttcaccctggca

SEQ ID NO: 32965 - DNA, 201 bp, Bos taurus
agcaggaacagtttcagaagcctcctttgtctgtgagctgagtgtccataaatcctgccgtgtcctgcgggcgtgtgccgtgtgaggtctcccgccaccaytctgggccgctcctgactcaggtggacggtggaacatggttcattggttggggggggcttcctcccaggggtcactgtgcctcgaaaaggcgtgtccgcg

SEQ ID NO: 32966 - DNA, 201 bp, Bos taurus
tcctacggccaccatgtgcgtcgtctgtcggtccgtctgtccgtcggtggctctggctcccgacctggggcagcgccgggccgtgtgggcaaggggctaaygctgtgctgccttttttcccacgcgtgtccgcaggtaactaggatttctacctcaaccgcgagactatgcaagggtgggctgggccggcggcgcggggcc

SEQ ID NO: 32967 - DNA, 201 bp, Bos taurus
tttggttcatttctgtaactcgcccaccttcccttctttggctacatctaggttttgcatcgtgttagacactctggccagttccgctggtcacaacagtrgtgaactcttggtctgatctttagtttctctttgaaagagtagctggtcggcctgcatttcggaccccagggcatggcaaagcaaatatgtgaaaggagt

SEQ ID NO: 32968 - DNA, 201 bp, Bos taurus
cccacctgtttggggtcactgtcctccttcataagtggtccccttaggatttcaaggagaggctgagagctagcttctcagaagtgtttccaccttggacrctggctgatttaggccaagtagaagcaagaagcatcagctaacagctgacctcgtggtatgggcaaggaaaatgttttcctctaccttttttttttttta

SEQ ID NO: 32969 - DNA, 201 bp, Bos taurus
agatagtttctaaggtcatatgtcgaaaagtggcaaatgtgtagattcacgttgaggtctttctactctgggacctttgttcttttgctgtaactatactrccttctccaatttaatgtccgcattaagtaattaacaaacataaatttcttaggattagctaaaatgttcgattttacatttatctcattggctctagaa

SEQ ID NO: 32970 - DNA, 201 bp, Bos taurus
ctctttggaatgctggcagctctgatgtgggtctggccacatggttcttctttttttatgaacctggaagagggaatatgtctcggccgggtcaggcctgrtgtgtcctctcattctcctgtaggacagagtcatggagcctggatggtgtgtcttaagcttgagcccaatccaactcagataaacctgtcttcagcctct

SEQ ID NO: 32971 - DNA, 201 bp, Bos taurus
agttataatactttacaagagaacaaaaccatcctgaataaatacattacaggactccaatgggagattcaatattaaaaacattttccctcaagtaatcygtaaattaaatgcaatccaaacaaaactcccaacaagattaaataattttttaaataaaacccacaagatgactctaaaattcatatatgagagataatg

SEQ ID NO: 32972 - DNA, 201 bp, Bos taurus
ttggtttgcctgtgtgtaatttaggcagttccctgcacggaggccttcatctgtgactgatgttgtggctttttatgtgtcctggcagtgtttccctcaasagcatgtggggaagtggggcaggccaaatgatgaccttagaaaaacatacatctgcctccagaagatgatgcttttggtgtgtgctgctgctaagtcact

SEQ ID NO: 32973 - DNA, 201 bp, Bos taurus
gtgtctctgacttggggagtggttcgtgtttcttgcttgaaaagaaaagtaggtatagaggctgtgtcttgggctgtagaaggcttcaccaggccttgtcrataacaaatttgtgaacaagaaagaggaataaaagtaagtgaccagcctgtaacacaatgcagccaaggaggaggcctaagctgattgctctctctgagc

SEQ ID NO: 32974 - DNA, 201 bp, Bos taurus
gtgtttggtggttgttaatatacaagtggtatttaaaactgtaagactggttttttagaaaaggaagaagaccaaagactaagttctgggcgcaataatgsttagcagtagaggagatgagaaaggaccagtgaaggaaatggtgaaggaacagtcaacaaagcaagaggaaaaccaagcaaatgtgatatccagaaaacg

SEQ ID NO: 32975 - DNA, 201 bp, Bos taurus
cactgccagcaggtgtcacaaactccatgtgttctgctggcagtgagagaggtgactggtgacttctggctctgctcactaggggctccttgtcctgaccractttaccccttaggtgtttgctcctagaacaaagcctgcttggtcttgatctggttgggcctctgagtatcacttgtgagtgagacgctgacttctaag

SEQ ID NO: 32976 - DNA, 201 bp, Bos taurus
acaaagccgtgggagtgtcatgtggctgttcttgctggtgtttcagcctgccttctcgctgtggccagggcgtgatgtgctcatcagtaacggagcagatrgactctagggcacggatgaagctagcacacagccaagttgggaggaggaggcagaactctggactgcttctctggacctgtgtcctcaggatttccaggg

SEQ ID NO: 32977 - DNA, 201 bp, Bos taurus
tggtccctctgcctgaaaagttcctccccaacgtggtcagagagtttctatcctcattccgttcagtctgaccaagccccatcttagacacctcatcataytggcctttcaaaacttccttgaacatctgcatcctcattcccgccccctgctctgctttcttcctagcacacaccgccactgtaacatgacattcttatt

SEQ ID NO: 32978 - DNA, 201 bp, Bos taurus
catggccaccccccaaaaaagaaattgagactttttttttctactccagaatggctctgctgttttggagtcccttcatgctagctgtgtgaagggtttcrtgatacatgttataggccaggcctgtaagtggcatccattacttctgtccacattctcttgtcagagctatcatggcccccatctcatttcaagggaggc

SEQ ID NO: 32979 - DNA, 201 bp, Bos taurus
aggacccactccccctgccccctgccaccagaggccgagaggcaggcaagtgacagccggagctgaaaggcaagggattgttgcaatcttgacctgagacyggcatcctccaccaaactgtgagcaggctcccagttgctaaccatgtcttcctgggatcctaaacagttgacatctgccaggagggtcggagcctgagac

SEQ ID NO: 32980 - DNA, 201 bp, Bos taurus
gatgtggggaactatccaaaaataggagagtggtcaaaaatcttggagagctcgaataacagagggtccatcactgtcggagaagcatggcccgggtgtcytaagtgtggaaaacctgggtccagagtaactgagtccatccttgactggctgtcagggtcactagaaggctggacgtagaatggacatgagggacagaag

SEQ ID NO: 32981 - DNA, 201 bp, Bos taurus
cccttgctgccttcctcaggcctgggcgaagtgcagacccctgagcccagctagccatgtgcgtgtcttgccagcattacttcacttagcagttaacaggrgggcctggtagcacttgggggcttccgtttttgaaccaaattaagcccccagtgcttgtcacagaaaagcccccactggccaccctagggcatcctcctt

SEQ ID NO: 32982 - DNA, 201 bp, Bos taurus
tcaaagaagaagcagaatcacgaagatctcaaacttctttcaagctcatttctgaagagtctctccacagagtcttatacccattaacaggctaccagaayggcaggagttgagtgagcaaggacaggatcaacctccagtgatttatgtgagacagtatttgggaaataatcaaagcaatgatatacaaaaaaggatgtc

SEQ ID NO: 32983 - DNA, 201 bp, Bos taurus
catgtaaaacctttcaatacatcctaattgaaagcatgcaaaatgttttcacatagtattaataacagagtttgtagaggcataatagcttaaataaatayattgaaacaatgtatatcagtaggttgggattttgagagtggttctaaaagtgtatttggaaaacctgctcaataacttggacaaagaaatggaagtcag

SEQ ID NO: 32984 - DNA, 201 bp, Bos taurus
ccatctttattcacgtcactgaatgttttgtgcccttcgatggcttaaatgaatactacttactctgcattttctgctgaagtggcccctcagccttctayactctatttacattgagggtcaggttgggacaagacgggtagtcttctcgtttaacattgtcatttcttgccagatcacggcccatgcctcatgttaaaa

SEQ ID NO: 32985 - DNA, 201 bp, Bos taurus
tgtggagggatactctgcaaacaaagattttcaccttttaacttctctggatctcagctgcattatatgaaaaaggggcaaatggtattatcattaggtarcaatatgtgaaaaactttggaggttttgggaagatttttctgtgttctgaagtactattactttatataaaaagtcgttaaaactgccattagcaaatat

SEQ ID NO: 32986 - DNA, 201 bp, Bos taurus
tccaggggatcttcacaactcaggggttgaaccccggtctcctgcattgcaggcagattctttaccagctgagccacaagggaagtccacggtggcagtasttactgggaatttcaccttagaaaaggacccacctctccttctacacaaatacacacagagtcaaatcagacctgcagatagtcactctacaatcacatg

SEQ ID NO: 32987 - DNA, 201 bp, Bos taurus
tcaagtataggcaacatggtaccaatttatgaactgatttcctcaaggaatggtgccaaaatgagggttaaatgttggtctctggtgttggccatttggaygtttgacattggttttagattatctagcaggagcaaatgctgttgggcacatacattacctcaacctcagtcatcagggccaccttattcatgtgccatt

SEQ ID NO: 32988 - DNA, 201 bp, Bos taurus
tcagacatgacttagggactgagcatgcaatacaaattactgtaaataggcatccttgcatgtgctgccatcttgtggccaaatagaaatgtgtttctaartgactctgctactacttttcaagaaaaagaaatgcaaaaggcaaaacggttgtctggggaggccttacaaacagttatgaaaagaagaaaagcgaaaggc

SEQ ID NO: 32989 - DNA, 201 bp, Bos taurus
gctgaaggcacagaacttccaggcttcaagttatcagcaagtacatatgatcagtttagaccacacagaatatctgctctccgcatgaggagcgagactgrgacataaaacactcatttagcgatggtgtgactataaactggtactgtaactctaaaagtagtcaaatgctcacacgtgttctgggtaataagttatttc

SEQ ID NO: 32990 - DNA, 201 bp, Bos taurus
tgtggagaaccacattatgccactaataaaatatatacatggctccaaagttagaactataaaacaaggcatactggaaagatctaggttccaccattatktaatccttcgtatcctcttccttctctaagataactaattttattagatttggtgtttacttctagtttataaaaaatgcacacatacatacatgcacat

SEQ ID NO: 32991 - DNA, 201 bp, Bos taurus
ggaatatttttccttaatttaccatgatagaaaaaaagaattttttttataattaactaacaaagaaaagcaggaagtatagcattccagcctttgtttgyaacttgattttacattttaaaatattccctgtagcttcaagatggaagatgggatattttgatgggtttgttttttttccccaaaagaatataatgttgc

SEQ ID NO: 32992 - DNA, 201 bp, Bos taurus
gcccccgcaggggtggacacggctagtgcctcggaactagcatggcccttgggttgtgcatgagactccgtctgtgtggccactgcttcctcgtttgccasccgccttgttcctctcatagcacagctgcctgtttcatccttctgttaccatttcgaaaccataaagagaaatccacaatttcagagttcttaaaggcca

SEQ ID NO: 32993 - DNA, 201 bp, Bos taurus
tttgtccttctgagagttaagcttgatgactgaatggggaacagaacagaagggagataagggattaaagctactgaaatggccaaggcagagacggggargtctgagctcaaaggcagcaggtttccaagtctaagttctacccggagagaacttccaccttcatagattttctttcttcaaaccggtcgttctgaaaat

SEQ ID NO: 32994 - DNA, 201 bp, Bos taurus
aagagctgttaagttacatgaccaggggaaatgagtggggcttagactgttagtatgtcttgagtatttccctcctccaaataatcatccgtcctgggaargggccacaagagccatgtgtctgagagttgaataagctgtgagatgtgtacagtcaacgtgtatgtaagttgaggtattcaacgtgtgactcttctacag

SEQ ID NO: 32995 - DNA, 201 bp, Bos taurus
ttcctcaccttgtgtgggtagacaaaacttaatgccctgaaacagacacgcaaatagctttgatccaatctcctgccagagctggcctgatgcctaggtakagtaggtggctgccttcctggaaagatatgagggtactttaaagcctgacctgttgcttcccatggaatctctgttttgggcctgccagagcatagcttc

SEQ ID NO: 32996 - DNA, 201 bp, Bos taurus
gaagaaactgcctttgaatataacataattggccaagtacagtaaaaagtgagaacataggaagttgctattattaattttattttgagctttcataaaartctctctcatcgggtaagggaaaaattaactggcatgttagctattactaagtatgaaaaaggatcccatgtgctttatttaaaaaattgagaaataaaa

SEQ ID NO: 32997 - DNA, 201 bp, Bos taurus
gggggacatagaatattgaaaattcatggcccagtgatgtcactcaatacatgtctttttcctttctcctttctcatctctgtaatattggagtccacttrtctgagtatctgtcctccctttctcaacttttttcacattatgagctcctggagggtagaaaatttgatgaattcagctttatctccaggctttagctct

SEQ ID NO: 32998 - DNA, 201 bp, Bos taurus
caatggcctgacatcccagttagggtggatgacatgttctttttttcaccccttctctgtaccacccagcacctccaagcttgaattcagttccctgaacyctaaggggccagaggtttgtctcaacctctatttagagaggcaatgatcccagagcagcaaggaattcctcaaggagcctgttgtttaaaaaggggatgg

SEQ ID NO: 32999 - DNA, 201 bp, Bos taurus
ctgaattatgtttcaaagtgagtgcagatgttcagagcactgggatcccaccacgactggggggatctatccctaccaccttcccttatctgaagctggarggaagcacctctctctggagaaactatcttataatttaggttaaaagaatgatgtattcattgttttcacaatgtaatcaaagagatcttaatgaagtcc

SEQ ID NO: 33000 - DNA, 201 bp, Bos taurus
tggaaaacctgagatacctatccaaaagacaggcaccatcaaaaggtagtttgtgcccctggatcaatgcaacaggacaggcacaagttaatattaaggarataaacgcctgcacagagtggcttcacaattttggcagaggcaatattgcctccactggtgcaccaagacggacttccctggtggctcaggtggtaaagc

SEQ ID NO: 33001 - DNA, 201 bp, Bos taurus
gggttaagctatgaaatcaagacatcagagtggagagatacaaaaatacccttaaagagaccaaatagctcccaggcctcggagaccagacagtgagctgrttaaatgtattaacatatctaaaggaaaactgcaagaaaaggaaaattttagtgacaaatgctagagatggccatccaagcattcaggagtcatattggc

SEQ ID NO: 33002 - DNA, 201 bp, Bos taurus
tccaaaagcttgctcaaaagtgggtgactgacaaaggcagtattctccaggggctcttggacctcagctaagaggaactgaattggttcacgggccacttyacagtcggcagcccagagcaaggttggtatgcctagtacccgatgcacaggtgggcgagactcctcccagatcctttggtgtttgatgctagctcccaca

SEQ ID NO: 33003 - DNA, 201 bp, Bos taurus
cagcccagggcttaggactccatactttcaccgctatgggtccaggttcaatccctggtcagggaactaagatccctcaagccgcatggcatggccaaagraaaacaaagataaaataaatggaaaaacaggctggcaaagctcagtgccccccagtcaaaacagattttaagatattctggcaatatcagccaggcctag

SEQ ID NO: 33004 - DNA, 201 bp, Bos taurus
actggcaaccagtgaggagatagcatgtgcttcagagtttggccaggagatgctgaccagagttagaggagggagatggagtggggagggtcaggctgackgggaagatccaggcccagctggcctttgtcagggattttggaattcaagctctggggaatcaaagtcttcagtatggtctgcgggggaaaagatggtctt

SEQ ID NO: 33005 - DNA, 201 bp, Bos taurus
gcagtccctgctgggcctccactctgccaagaggaactcaaaggagacaattgtttgatgtttgtgtgtttggttggttggttgatttgttgtttggggtktggaagtttctgcactggggccatacactgagccactcccaaacccttcctcaagcctgtgggtcgaagaacatccagagccatgtaatcacatcgccct

SEQ ID NO: 33006 - DNA, 201 bp, Bos taurus
ctagagagcaagctcctaactcctgactctggaggctgaatacataacaggatgtttatttggagcaggactggggctaattaaggccaatgaacagattyataaatctagagacatggtgataaagtcttataaggataagagtaggaattttgattaatgatcagacttgaacagcttgagaatataaactgaaggctt

SEQ ID NO: 33007 - DNA, 201 bp, Bos taurus
ggcaagcgaggctgcccgcccgctagctcctctggccagcagggagcactccaccagaacaccctgggagcacctacttgaagggaagtacgaggtactgmgtggctcgagcttcagtcaccattctcaagcagcttttgtaagttgttttgtatcttgaaataatagagagaaaagctcctgttagtccatagagtggag

SEQ ID NO: 33008 - DNA, 201 bp, Bos taurus
agagggtcaggacaataagtcaataagtgacatagtattagtggtattatttctccatgttaatattaagttttagtttctagtcctgtaactttcttctkcataatataaggacatgggtccagaaattggggaatttatgagtgcatgtgcatgcatgtataatttttttctaggactgagcaggcttttttttttttt

SEQ ID NO: 33009 - DNA, 201 bp, Bos taurus
cttgtttatcatcctggccttagcaattctgtaatagaaaatagtattcaaaattttcaagatttttgccaagtgctttttgtgacagtgacactcttgaycagttaacagtagtctcaggctattcaggagattttcaggagcagtggtatatttcagtggtcagtataacctgtgcctgaagaaaacatttataagata

SEQ ID NO: 33010 - DNA, 201 bp, Bos taurus
acactgctttcccctcttcagcttgtcatttatgcttctgactgtctcacaaggacacttctcaaggcatttaaggcccattttgataaccagaaaaatcycttcatttcaacatccttaacataatcacatctgcaaaaactttaccagctaacattcattggtgccaggaattagaatctgatatcattgatggccatt

SEQ ID NO: 33011 - DNA, 201 bp, Bos taurus
ggtacaggcagtggccttggatatcaaagaccaatcttattaagatattttttttctatacatgtacatttgcatatcaagattaggcacctcagggactyagcacacaattcaggccatgatgaacttgaagcaatgtaagataacacacgagttttctagcccaaaagaatgtaaactttcagccctctgtgaagggga

SEQ ID NO: 33012 - DNA, 201 bp, Bos taurus
gcccgtggacatggggtgccattcccaaaggccaggaagacaatcattcaattcccaccctgtcactgggctgaacacagcctcatgaaacttctcaattyagccaagattcaggccaatactgccaacttttaaacaggacataagctgagaaagatattaaatgaagcctctatagccatttttctcaacttttaattt

SEQ ID NO: 33013 - DNA, 201 bp, Bos taurus
gagtacaagtctctaaactacttaggcaggaacttctctcccagacaaatgtgtttatcagagagcagttggattgcatgtacggaagcctcaacaaagargatgttccatctcaaatttatggcctcttggcaacccaagtatgcatatgactctcaagatgccacagcgtgtcagcaaccacagtcgctgatgggaaca

SEQ ID NO: 33014 - DNA, 201 bp, Bos taurus
cctccttgcagatgtagtagcttttttctttcacttttaatataaaaatttccaaatatatatatatgtgtgtgtattacattaagaataatattatgatyccaatgtttacatcaccagtctcaaaaatgaccagtcttatgtcatttttaacttcactctgctacccattgtaatttttctttttaatgtttagaacat

SEQ ID NO: 33015 - DNA, 201 bp, Bos taurus
ttgcttcccaagtcaatgtattcatttacctctgaaggaagtcactgtagcacttgactcccaagttttagagacgtatatatgtacaaatttggccaagstttctctcactttctggtccatcaaggagagcaatgctcagtttctctgtgaatcacccactcctggcgctggattctgggcggtccaagatagcagctg

SEQ ID NO: 33016 - DNA, 201 bp, Bos taurus
aaaaaaagtgaccatacagttggccataaggaaatttccattatattctccaaatggttaaccttccttccttccttataaattcagttactttcttaagyaacttttgagtgaaagagctggccagaattgccattgaagactatttacaaataaataaatatgaaacactacttactaaattctgggatataaccaaat

SEQ ID NO: 33017 - DNA, 201 bp, Bos taurus
gagagagtggaatgtgggtgtggccatggaagaatctctaaaagggatggctggaaagttgtccagtctttcaagcaatgggttaaatcttgccggtagcyctgtaaaatgtgtttacaggtggcagaaattaattcctgtgaacagcaatctgtaaataagcagctctgaagagtaagggtaatgaagcaagtgaaaaat

SEQ ID NO: 33018 - DNA, 201 bp, Bos taurus
atgtggcggatcttttcctcagggcaccaggtcctctttgtaccacaggcaaatcttgttcccctgcatgagctgaatgtttcctaaccaaattattactmaagtctgattatcaaagtcatctcaggcaaagtcaagtaggcagttctcttcctgctaaggcccaggtactgcctgacagtgatgtgatcctgagtctga

SEQ ID NO: 33019 - DNA, 201 bp, Bos taurus
tcattctagtgatgggccggtagaggaacaggctctaacctgaagcccctgggttgttttcttagtgagaatgcagctttctatagtcgacagatcagagytctggcatttaggccaccatggattctaaatcagggttaacttcttaattaggtacgtggttctgagcttcaatttcctgtcttacaaaatggcgatagt

SEQ ID NO: 33020 - DNA, 201 bp, Bos taurus
gacacaaagccaagctgtgttattcacctaatgccccgatttacagttcccaagacaaaagaacatacagatagagtttcagggctctgtttgccttcacrtttattgaaaggttagtttcaggtcaagctcaagaaacctgacaaatggtggtgaataaacctaaaaataaagtaagtgcaagtaggaaacttaagcatt

SEQ ID NO: 33021 - DNA, 201 bp, Bos taurus
aaaatttgtaagtggggaatgaggtggtgatggactttttaggaaggctcagttatccagtagtttgcaggatggaagtctacaaaaagcatttgaagacragataaacatttagctgtagtatcaagaagccctgcctctcacgttggttatagggaacctttcaaaatctattctctgtcttccaaggatttctgaaat

SEQ ID NO: 33022 - DNA, 201 bp, Bos taurus
ttggagggcacaaacgaaaccttgctcacaccagaggaaaggagcagtgaccccacaagagactgaaccaaatctacctgctggtgttcgagggcctcttrtggagatgtgggtcagcaggggctcaccacagggatggggcactgccagaaaagtcccctttggcataaaccctcttggagttcaatatcaaccctgcca

SEQ ID NO: 33023 - DNA, 201 bp, Bos taurus
aattgtgtctcagcctcactagcctgtaggtacagatgtggtcacatttacagtaataattcaaatttctctgctttgtactttcaccaatttctggaagycccccgagagagactcacaggctcataaataattctgactctactggtacttctgctgttgcatcaggtgtcaaggcaccaaatggtcacagcttctgtc

SEQ ID NO: 33024 - DNA, 201 bp, Bos taurus
aatcaatccataaattaagttgagggcccggggtgtggagggcggactattataggatttctttttaagctaaaaataataataataaattttaaggactrggccaaaaagtaaacacgcaaatatagctgaccaacctctgatcttaatataaaagctatggtaatttaaaaagatgaataggttagcttattgacagaa

SEQ ID NO: 33025 - DNA, 201 bp, Bos taurus
taagatgggggtggatacttggcccaggttgggggtgggtaatgagggatagtgaaatgggcctattttccacggaaactgacaggtggccaagccccttrgaattcctttgtcaccatgcatctggaaagcaagctaacggtgtacagcagtgggaagagagggaagagagaggccgtgctcaggaggtcctgaggccag

SEQ ID NO: 33026 - DNA, 201 bp, Bos taurus
tacgggcctgagggtagcactttctagtccccattcagggacagtgatttctgattccaggatttatgggaggggtccaatctcagctgcccactgtgcaygagggcctggaactggacttgtcccaactgcattaacaccgagcctaccggcctggtggctcagagagtggagaatctgcctgcaatgcaagagacctag

SEQ ID NO: 33027 - DNA, 201 bp, Bos taurus
gtattatgtatatataatacatgttacagcattctaggccaaacaatacataatatgtccacttgtattcataaagaagaggcaaacaaatgttcctactrtctcttaggatcgtgagagatagtatactctccaagcaagatatttggaaatgccactatagcactggggaatatgagatcatggtctctatcttgaaca

SEQ ID NO: 33028 - DNA, 201 bp, Bos taurus
agtgtttgttccatttgttcgcttttgcctagtagcatttgttttcaaaatgtggtgtcttcttttaactctctgaggatattaatgaccttttagtattytgttcattgttttcttttctttgcattgcttctgatttccccaagctgcattttaacctgttggatcattttagcttctatcttcaaagttcataacatc

SEQ ID NO: 33029 - DNA, 201 bp, Bos taurus
tcttggccagagatacacatttgggaatcatctaattgtgaatgtgatctaatgtcaggagacaggatctgattatctaggaagagaagtttattctgcartcttgaggccatatcagtgcttatggttttccattctagtatgagaaaacttagctgcattttaaagtcttccccttccagattgaaacttctctagctc

SEQ ID NO: 33030 - DNA, 201 bp, Bos taurus
agactccaagctcgtttcaattgctggtgcaagggtgtaatatattttagtaatttggcatttgtttattattattgtcactgaatctgcacatgtgaaayttatttttggttaatgaatgctgttgtacataagtgggtctctcagacaccaacagggtacatcaagacccctgtgtcaattaaaagttgagtaatggtt

SEQ ID NO: 33031 - DNA, 201 bp, Bos taurus
ttaacagcgtgttcctgctgcaaggccagtgaggcccagctataaatgatcctgttggagacagtttggaggaggtccatgttggcatgaggaatgtttgyaggcaggcagcagggcccaaagcaacagctcagctttaaggtcaagcttccatcctttctggatggaagaattgggcagtacttgatcctgaagggactg

SEQ ID NO: 33032 - DNA, 201 bp, Bos taurus
ggcaagcgaggcatgggcagcatcagtcagtgagtggggaaggcatgcggcccaaagagccagtctccttctttgctccttctccttggcccttcttcccrcctgtattcagaaatagccttcaaagtcattctatttcatgaccatccaccaccttcttgaccctggagaaggtaaagacttggggaaactggaccttgg

SEQ ID NO: 33033 - DNA, 201 bp, Bos taurus
acagcagccaagagtcagactggaagcagcagggagttcgtgagtgcagaggacactaagaagttcatcagtccacaggagtacaggatgaatcagggcckcagaggtcagcctgtcctgtccttagcaatacatgactcttcctcgatattcccaacaagtgtccaacccatgttttgaaagctccagttactgaaagat

SEQ ID NO: 33034 - DNA, 201 bp, Bos taurus
tgttgtactagaataaatacagaagctgatttaaatgtaaattagaaggctggtgagaaagagaggaacataaaagatgatagaagagaaaatataaagaygtagttgttatggtttaaatctataaatgggcatgttcttttttaagtgtgacacccaaacctagaatacacagaaaagaagatgagtgtatctaacaaa

SEQ ID NO: 33035 - DNA, 201 bp, Bos taurus
tgaagccttaactctcaaggagatggcatttgaagatggggcctttgggagatgattggtttagatgagaccatgagggtggggccctcacaatggaatcwttactacacctataagaacaggaagagacactggagttctctctcttcaccagatgaagacagtgaaaaggccaccacctccaagccaggaagagagcat

SEQ ID NO: 33036 - DNA, 201 bp, Bos taurus
aatagaggctggcctctttcattccctctctttttaggggtgagaatcagtgtctttgcatgagtatgtcttcatgccaaaatgtttttctttgtggcaamcagatgtggccgtcttgatcttcttcctcctcctcctgtttttcccttttctgttccgctttcgctttagccaagccaaggcaagatggaaagcatagca

SEQ ID NO: 33037 - DNA, 201 bp, Bos taurus
actgatgtccaacagtcccaaagtgctataggaaactgagactccttcaaggggtgaatgtggtctcactcatgccaagaccaagaaaatcacagcaataygaaacgtgccaagactatgtaggaaaggaggtcatttgcaaacctaaaagcattggctagagaggaaagcactagtgaggatgcttatccatgctcctca

SEQ ID NO: 33038 - DNA, 201 bp, Bos taurus
ttctttatttaatgatcttcttgtatctaacacaaagtgctgtttagaagactgacaaaaatgaagtatgtgagaagagcactgtaaactcaataatgttsccagatattatctttatgatgtgtctatggattgctgaggttgccaactggttcaattgttttctttcactcacatctgattccctctttcgcagcataa

SEQ ID NO: 33039 - DNA, 201 bp, Bos taurus
aaaacaaaaagctaaatggtgttactttgttcattcacccaacttaaaacctgtgaactcctaccctctgcaattaactgtaatgaagctactgtatattytttcatcaatagcaataggaattgtggttaaaaagagagtaatacttgttctacttgaacaagtagataatactacataatgcttgttcttacatagaac

SEQ ID NO: 33040 - DNA, 201 bp, Bos taurus
cagggtcattatttaacatgtcttcttaaaatgaccaatgaaattgcagtgcaggcatccattttctcacctgaagactatgtataaagcacattgttggkattataaaggcaactccgtgatgccctctgctttcaaggaatttatattctacatggccagataagtcatgtatataaatatataaaactacaaagttag

SEQ ID NO: 33041 - DNA, 201 bp, Bos taurus
cccatgctgctcagcggtggagctcctcctccacgtgccagctggaggaaaggagaaagttaacacagggagaagagccatcctgggtgtgcttgtgcctrgggctgtctgttttatctgtgggcctcttgttcatgaagcccaaataagtgctgctaaaggtgtattaaaatgtaaagcctttttttaatggtctttctc

SEQ ID NO: 33042 - DNA, 201 bp, Bos taurus
caacaaagatttgcattttggagtttacaaccatggtgagctacacacgagtcccaatacagcaaggagaagagaactttttcaaagaggggaaaagaacrctgggagggctgtagtaaacaatgctatggaggaattgagagtttaaagtatagtgggttttcattggctgagttgtgacagtctctcgttggctaagct

SEQ ID NO: 33043 - DNA, 201 bp, Bos taurus
acgtaacatttgcaaatatcttttgctgtttagtaggttgcctgttcaatttgttaatagttttctttgtcattaaaaagctttttattttgttgtagtcycatttgtttgtttttgttacccttgcttaaagagatggatccaaaacagtattgctaagactgatgccaaaaagctttactgcctatgttttcttctagg

SEQ ID NO: 33044 - DNA, 201 bp, Bos taurus
gattgtctgtttgaccgcaaaagaatatatgcttttaaagcagggaattatgggttggaccatccgtcttcttcatggccttatccctagcgcttaaagcwgtcccttgtgcgtgataggcagtggaaggtgctaaggcagcttctccagggcctgccttttgggacagtgctcacctcaaggtggcaggtgaaccactga

SEQ ID NO: 33045 - DNA, 201 bp, Bos taurus
acgcgcccctcaccaatgcccaactgcacctgtctcggaagaagagcagcgactccaaacccccatcctgcagcgagaggcccttgacgctcttccacacmgtgcagtcgacagagaaacgtgagtcactgcatagggtgccctggggacaccttggcctcatccctgctgcccagagaactcacctctgcctttgtgtgt

SEQ ID NO: 33046 - DNA, 201 bp, Bos taurus
acaactgagtgcatgcacgcatacacccacacacccacacatattactttattctcctccaggcacttccatacctatcatttcattgtatcttcatgtgmgactgagagaagaaatggcctgaaccctattacagagaaagaaaactaaggcacagagaagtggcttatacatagtcacatgactcctgaggtccaatcc

SEQ ID NO: 33047 - DNA, 201 bp, Bos taurus
aggctgaggtaaagcagggacattcataattagaaaacagcgagatgcctggggcaagtttatttaaacaaagcaagccaaaggggccactgaggcaagtkgaaagtgaaagtgaaagggggaaagtggctcagtcgtgtctgactctttgcaactccatggactatacagtccacggaattctctaggccagaatactgg

SEQ ID NO: 33048 - DNA, 201 bp, Bos taurus
ttattttattatatgttatttacttctctggacctgctaacctggctatggatttgtatacaggcaggagttttgttcaggttgtcttttaatttctagarcttagcacagataccctattgatacaataaacatttgagaaagggaagagaaataaaggagtacttagatgacttttatattaactagataaaaagacat

SEQ ID NO: 33049 - DNA, 201 bp, Bos taurus
gcctgctggaggtggctcatgcactggcgtttcacaggagaattaaccccaggtaaaactgtgtgtggcaggaagtttgctttggtggtgccctacctctrtgccaggggcttttaggaagacaggcagtgcttcccagaagttttccctgaaagagactgtcaccagctttgatgaagactcatgggaggccaagccctc

SEQ ID NO: 33050 - DNA, 201 bp, Bos taurus
tgtgtggtaaggaagtatgtggaatctaagtttcacatgagtttcatcagggaaaaatatttggcatacactagggaaaagggatcaagttcctcttattmtttataatcactgattattctacctcaggactcaggataggaaagggatttaaggcagaagagcaacttgattagttttgcttggcatttcattgccaca

SEQ ID NO: 33051 - DNA, 201 bp, Bos taurus
aatccaactataacattaaagtggccggtctaggtcactgtgttttagttaatgctaatatttaaacagatattcacattccatgcctacaataaggtagmctgtgaactacctgtattgctgaattttagccaaaattccatgagataatttagaggaacgtcaaatttctgaagtgcaaactcataaaactttacattg

SEQ ID NO: 33052 - DNA, 201 bp, Bos taurus
tttatgactataaagtcattcttagcattcccctataattatttagtatctgtggaatctgtagtgatatgttctgatattgatagtttgtgctttcctgyttttttctttgtcaatatgaacagaagtctatcaattttgttgattttttgaaagaagctgcttttggtttattgattttttttctgttttctattttcc

SEQ ID NO: 33053 - DNA, 201 bp, Bos taurus
ggcacgcagagcgagaggaaatgatgtctcgtgtttgtcagcttggctgtggcagatgcattttatccggagccaaaggaccagctactatgccaggctayggcacctatctgctgtgtggcctcaggcaagttatttcacttctctggatctcaaactgctcatctctaaaatgagagagatttaattaaatcagggatg

SEQ ID NO: 33054 - DNA, 201 bp, Bos taurus
gccagtgtgtgatactgctagatgttgggctctgtcccttgaccgtttctttgctttgcctgtctgcttggcttcttcatgcatgaactcccctccagctrgtaaggaaaatggccagtgaactcacatcttcctactttggcacatccctaatcataagggatagtacttgtaagttcccgcagaacagtcccagtgtgg

SEQ ID NO: 33055 - DNA, 201 bp, Bos taurus
atgaaactttgacaatgttatatataaatgttacctcaataaataattaaataaaatgatgcaggctactttgggagaaaaaattttgagtcagacatgtrtttgatccaagctccgcaactcactaggtctatgagtactggaaaaccactatatcactctgagcctctattccctgagccaccaaatgggagcagtaat

SEQ ID NO: 33056 - DNA, 201 bp, Bos taurus
aggtcctgttgtgtccagttggaataaaataatccatgtctatgaaagttgttcacttgttcagtgacagggaacttcaaacttccatcatgtaaatgaakgaactaggccctgatcttgctactcgattcatttcaacctcacatattgaatcctcactatatcttcttacctacctcttagacacaatcaacttctcac

SEQ ID NO: 33057 - DNA, 201 bp, Bos taurus
tcccaaagtatgttgtgagtcaaagacattatcatgaagataataagatgaaaggcacataaaagacaccaagtttagacatttgttggttactgagaaaygaaaatgaagcagtcttaaacagtataaaggaagacaggggagaatgttttcccagactttattggctccattccttctcccaaagcagaactgagaaca

SEQ ID NO: 33058 - DNA, 201 bp, Bos taurus
ggaaaactccatggacagagagcctggtggggtcacaaagagtcagacacaactgtgcaaccaacacaacacacactgactaacccctccttgccacttcyactgcctgctctctggccatccctactttttatctggatctcctaacttgccttccatccttcagtccccctctccaaattcacccttcgtatgccacca

SEQ ID NO: 33059 - DNA, 201 bp, Bos taurus
agaatagcaaggagagacacgaaggccttcttcagtgaacaggacttaaaaatagaggaaaacaacagaagggacagtctacagatctcttcaggaaaatkggaaatattgaggacacatttggcccaaagatgggcacactaaaggacacaaatggtagagacctagtagatgcagaagagatcaagaatacatggaaga

SEQ ID NO: 33060 - DNA, 201 bp, Bos taurus
tgatgacacatctaatgtcaaatatgattagacttaatttgagcagtctttttctcaccctctctggaggagaccatttttaaaatcattgtacaggccayacaaaacacatctctgaaaaggagacactgaggaccacctgtttgctacttctgcttcccagcctctacctttattcttccaggaccagggaggtggaca

SEQ ID NO: 33061 - DNA, 201 bp, Bos taurus
aaaataactagatccctggcaatatctcatttttattacatggttagaattttagaaaataagagaaatctccaataagaggggaaaagtatgtggatagyagagtgatgaagagtaagtacatccaaaaaacatgggttgcttggaagaaagaatttatatcatagctatgatgggtagactaagctttgaagcaagatg

SEQ ID NO: 33062 - DNA, 201 bp, Bos taurus
gagaagtgcaaagttggagagggctataatctatgagcactggtagaatacatttcttctacatcttgttaaaaccccccgtgccaaactccttgagaacygtcttaagcattcagagccaaaagattcgtcattgtaataactgttttgggatcatggggaccataccctagatccactgaggttacaaatatagcacct

SEQ ID NO: 33063 - DNA, 201 bp, Bos taurus
aattcctattttcccactgtctctgaactcaccacaacagagtctgagaacagactcagaaaagtaatagattggttggaaaatccaaccagaacagtgargagagcaacacttcaaaatctccaaagattctggttgggtgtgagcataaaagagcaacagaaaaacaagtgccacagcgtacagtttaaggtttaagtt

SEQ ID NO: 33064 - DNA, 201 bp, Bos taurus
tttctttaatgtccctccccacgccctgccaagattatccagtcattcagaatgtctgcctaaaacaccattctaaatccacatcaagacctaagaaaacktaagtttcccagagcctggatcacagctgtcatcacaccattccctgctcagaaacctttgtgtgaccacttgttgccaaaggaacaaaacccattctcc

SEQ ID NO: 33065 - DNA, 201 bp, Bos taurus
aataacaatagcaattagtgacatgcattttaaaagaatccatttaagatatctcctgtctgggaagaccagttttaaaacgctgatctcacaccagacaraagaccagaaattatggaagggcatctgtgtcataacaaagagaacaataatagtaaaacgaaagacatacagagagaatttcaaaagaagtgtaactta

SEQ ID NO: 33066 - DNA, 201 bp, Bos taurus
gataggccttgaggctaagttatgtgtgggaaaaggggccatgaaggtgttattctacccaacagattagtaaaagcagagagtgaactagaaaagaaagraggaatcagaagtggggttgtaagtgactggcacagtcagcaaaatcagtcttgctcatttaggttgtctcattactataatacaataccagcccccttt

SEQ ID NO: 33067 - DNA, 201 bp, Bos taurus
ccctcctgaccccaggaacagttttctgagcctgttgtgttagatttctgcccggagcacttggccataacaaagtggagagggaaaaatcaatacaacckgaaccgaatgcacacttaaaacatcagccttcaactgtgcaatcatgtccttgtcactaacatccaagtgcttttgctccatgatctgctcagagtctta

SEQ ID NO: 33068 - DNA, 201 bp, Bos taurus
tacaagaaatttatagtctttctccccacccccatacacacacttaaatctgatgatagctggtgattcagagattgtttgctttgacatgaataaaatgrggtttccattttgatggaattaatcagttaaatttgacataaaaaacagttcaagaaagttctcatggtggtggtgttctgtctgcccaaggtacggtct

SEQ ID NO: 33069 - DNA, 201 bp, Bos taurus
gggtgaaactcaggaaaggtggtggtgtaattcaatcagaaggtttgagaatcaaggggcccattgggtaagagaggtatgcatctgaaggcccaaggacygggggcattgatgtctgagggtagatgaagttggatgtctcagttcaagcagaaaagcaaactggcccctcctctgccttttcattcttccccaggaaga

SEQ ID NO: 33070 - DNA, 201 bp, Bos taurus
tatctttagatgattttctttttcttctacttttttgtatttttatgataaaagtttattagttttatataaagatattcttcattatgagcaagaaatcraagctcagaaatgtccagtaaatttcctaattccatttatcttgtaaatggtggagcaaggattccagtgcaagtctttctgactcaaataattttttat

SEQ ID NO: 33071 - DNA, 201 bp, Bos taurus
ataaccccggaagcttgagtgtgtcaacctgccctagctctaatggtaaacttgcagtggatcacaggtagtgacccacagtgcccctggcttgcaaacartcaatgaacattgatgatgttgataaggcacactctttttctggtattgagttccaagggttatttccactctgtcattactgaagcagatgaattaatt

SEQ ID NO: 33072 - DNA, 201 bp, Bos taurus
ctgaaatcacaaactgattttcttcgagttactgagagtccatgtggttcgggtggctctggagaccgtgtgttaccagatgtggccaatcccaggatctygcacaccatgccaactacaatggagtatgtgaccaagccggaccaatcaaaatcagcctccttggccaggaactatccaaggagcctctccaccccactc

SEQ ID NO: 33073 - DNA, 201 bp, Bos taurus
cagtctaatgcatgggactgagctatttagtcagcaaccactgaaaccaccttcagtgaagtaccttcttgggagcctgcaacagcttctagatcatcctkgacaaaaatgacttaggtaattgctaaaaggaaagaagcataagtcatttcattttaaggtagctatctttatatgtaatttaagttagtctttggttta

SEQ ID NO: 33074 - DNA, 201 bp, Bos taurus
tcttttgttaattgtcggaatctcagctcagattcttcagctgccaaactcttgaggttataaaaaaaagccaaaaaataattatgttacgttcacttccygtgtccatgtaaattgtttaaagagaaataaaagtttgcatgattttggattctatgtaattttattcttaattttaaaggatgttacaggcacaaacac

SEQ ID NO: 33075 - DNA, 201 bp, Bos taurus
actggaggaccaagcaacaggcatgaggtggcttacgctcaaaaaccccaactctctgatgccatttagggagaaatttttataggtaaaatttggggtgrgggctatagtgtgtgtgattctcttctgattgtttggtgggtgagataacagagtggttccaggaactttgtgctcagcctgaagttaccatcctccacc

SEQ ID NO: 33076 - DNA, 201 bp, Bos taurus
gtgagaaacaaataagtactccgaagtctatcttataattctagaaaatgtaagctaatctgtagtatcaaaaagcaaatcagcagttcaccgtggccagmataaggggtagtgaaagggaggaatgaattacaaatggattcatgttgatatatggcaaaaccaatacaatattgtaaagtaattggcctccaattaaaa

SEQ ID NO: 33077 - DNA, 201 bp, Bos taurus
tctactgaattggaatacctaggtttggggccaaaatttttgaatttttaataagctgcctaagtgactcttccatattcagttcaagggactaaccattraaaaccaatgggccacatgacttttgacagataaggtctgtttccatgataccaataaacaatatggcaaagtaggtaactgggaatgctgcagaggtgg

SEQ ID NO: 33078 - DNA, 201 bp, Bos taurus
aatgatgaaattgaatatatttgaatttcagtttacatgaagacattatgtgttaaataaggaaatggacaaccaaagcagagaagaagatgcccaagatyctatttcaatcatcagccactctccaggactttagtgttctggaactaatgcctccaatgggtaaagaccgggtgaaatgatcaaataaactgagaaatg

SEQ ID NO: 33079 - DNA, 201 bp, Bos taurus
tagaacaaatattctcataatattctgggttttcttgtcctggacaagtgaggtaagagttgctcttgtccagacatttgtattgatcacagcctgaggtrtcttttaaagcatgctatatggcacccagtaagttgaatcaaaaaaaggacaacaagcagactagaagacttcagcgtcctttgaaatactggcaaatgg

SEQ ID NO: 33080 - DNA, 201 bp, Bos taurus
gaaaaatgtggaatgtatatctgagtttaccattgcataagtaaatcccttcctattagattaaggggtacatctatcacataaggttctaatgttgtagrctggccttttggtctctcacaaggataaatttgaatactttgataggcttcttgtattttggtttgagaaactcctgtaatttggcaagaaattttttgt

SEQ ID NO: 33081 - DNA, 201 bp, Bos taurus
gtgggagacccacagcgagatggaaaatggccagcctgagaagagttagggatgagaggtacttggtggtgccgtgagaacatgtcataggggatggggcygaggtgagtgtgtcagggtagcatgactgaggaggtgagggagatgagagctgaaagatgggtaagggttaaacaggcaaagaggaggaagatgttggct

SEQ ID NO: 33082 - DNA, 201 bp, Bos taurus
gattttcctttgtggaacccctcccctgcctcaagcccactgatgagcacatgaccaggactggccaatcagaacagttcattctctggcccccaaggatkcattaattcactggctagactgtaaagccagccctgagatatttgctagagtctgtctgtctttctcctggtgttgctaaactttcaatttaaagctgct

SEQ ID NO: 33083 - DNA, 201 bp, Bos taurus
atgctgcagtccatgggatcgcaaagaatcagaaatgactgggtgactgagtaattacaacaatagaaataaggggaaagatcctttagagaatgaagtcygcatggccttgtacctgattgagttatagggtgaaaaagaagaggagtctatcttagggtcctggcagggaacagatgtgtgatttgaggggatttaagc

SEQ ID NO: 33084 - DNA, 201 bp, Bos taurus
tatgtccacttgatgccaacccatatatccacaccttcagatatatttctttgaaggaccctggccttggtttcttcattgggccagactgtgagatttakattcagttcagttcagtcgctcagtcgtgtccaactctttgtgaccccatgaaccacagcatgccaggccttccttgtccatcaccaactcccggagtcc

SEQ ID NO: 33085 - DNA, 201 bp, Bos taurus
agaagtccaaggtcatggtgccatctgggtagatttctggtgaagcctctcatccaggcctgtatatggcagccttcccactctgtcctcacatggcctcytccctgtgcacagacagacagagacagagattgctggtatcacttcctcttcctagaaggtcatcagtcctattggattagggcccacctttatgacctc

SEQ ID NO: 33086 - DNA, 201 bp, Bos taurus
gtgaacagtcacaggccctgtctccatgcagggcccacagtcgggatgggcggggaggtctctttggggtaggctgagtttcagtctcctccctccactcyccactccaggaggccctcaccccttctcttcctgtccagtgttacaaaagctccaaggaccggcagccgcacctgaggctagcgctggatgtctgcagtg

SEQ ID NO: 33087 - DNA, 201 bp, Bos taurus
tctgtgctccgaaggcaggggggccctggttcaatccctggtcaggaaactggatcccacaagctgcaactaagagttcgcatgctacaactaaagatccrcaggcctcaacgaagactgaagatcctcagtgctgcaactaggatctggtgcagccaagtacataaataaacaaatatttaaaaagagagagagagagag

SEQ ID NO: 33088 - DNA, 201 bp, Bos taurus
aaactgatggtgaaaggtacaaattatggggacccaatcaattttttagagggaagctttagggaaaacctttcaatgaacaagtaaagttgattcttgargcataaacagaagatggacaggtaaagaggtgggtaggggttaggactacacactaagctttgttattcacaagaaactgcaaacagccagcattgttgg

SEQ ID NO: 33089 - DNA, 201 bp, Bos taurus
cttgtccttacagccacagaaagctttgccttagggagaccagtctaatggcacagctttcagtggggaggagaggtggatcagtctaacacaaagcaccygcagttccacaacaacttaggcagagtgttgggagaagacacataatctgttttcctttattggcattttttgtttaagtatgaaaataacatacttatt

SEQ ID NO: 33090 - DNA, 201 bp, Bos taurus
gctggggagagtgaagacaagtggctgaggaaggtggagtcaagagtcaagctaacttgacttgtgatgttaacttgtgcagttaaaagtaaagaatgcaygctttctagaactgtgtgttcctagaagttgtgggctacatctagggactcactgcagcagttggtgcagaatgtggcccacaatgggcgctgagccacc

SEQ ID NO: 33091 - DNA, 201 bp, Bos taurus
gcactaccctcgaagctcccaagctctggaggggctctggggaagggggaatcactctctgtgatgtgtctttcatgtactaagccgaatgaccttggccygaatcgctgagggttatgtaagattaggtagccacttagtcaaaaatagctttcatgctgactccagcccgcagaacatcatccaagcaaagggggcaca

SEQ ID NO: 33092 - DNA, 201 bp, Bos taurus
tcatgttaagattttttgattgctggtatttaaaggaatcaagcctgaaaccaaagccaaaggaatctgctttcttgctcaaaggtttggttgatttagtygattaggtgatattttatacactttattgacacaaaatgtcttgtttactctgaactttagagtctaactgaggcatatttgtattgcttattgatgaat

SEQ ID NO: 33093 - DNA, 201 bp, Bos taurus
gaagagaccttagtgaacggctcatcagacctcaccactggaagcctgactgtgccccacccccaggtgggggagagtatgtctgtagtaacagtcatgarggtaagtgacaggtactgtgattgtgctttacctgagagagttaaaaaggcagctagacccatgcagtgtgattctggagtagtggtaattaggaattgg

SEQ ID NO: 33094 - DNA, 201 bp, Bos taurus
attctttccctctctgggcttctgtttttcaggtgacttccagacaaataaacaggtaatatggccctctggaggtgacagtggaagtgtggcatgggcarcaagctggtggattgggaagaaccagaatggggactgggacccaacctcctgggccatcttggatgactccttgacacctccagttgtctacccaatgcc

SEQ ID NO: 33095 - DNA, 201 bp, Bos taurus
gacctctccatgctttctgcttcctttcctcatccagcaaatgaggccagtttgtcccaccagtccccagggctcaggaaagaacaggtccaagaaggggkgacagaaagatgggtagaggcctctccaggagatgtctgtggaggggtaggcacctcctgcctccaccctgggagaggatggcaatgaagggggccacgg

SEQ ID NO: 33096 - DNA, 201 bp, Bos taurus
caatccttgtaactttcaaatagagaaaatgaagtcctgagagtcaaaggaacatgccccagggtttctcactcctggtaaagtagtattctgtgttctgrttccacaaatgcagttccttgcacactatgtcagttcattcatatttacagttgagtaggaaaccagttgctgtcctaaaaagagaagaaagagaaaaaa

SEQ ID NO: 33097 - DNA, 201 bp, Bos taurus
actgaggagatgaagttcagggtcatagagtgaaatgcttccagagcaggcggtagggggcggggtaggggcaggggaatcgtgcctccttggccagcttytcagaaccctcagggacacaacaggaccaggggctgacattcccagaggatgaaacacagaaccttcccgagacccagagctgccctgtgtccccaaagc

SEQ ID NO: 33098 - DNA, 201 bp, Bos taurus
tcacagacccacttttctcattgtttcattcctcattataaaaataatgggtgtgcattatagataatcaaaagatgaaaaaaaattaaagccatgatttyacaatccaaagatagcttacagcatcacatcattctttatcataacacaatattattactgtattataatagcaataatagcaacatttacggagaactt

SEQ ID NO: 33099 - DNA, 201 bp, Bos taurus
ccttgaaaacaggaaatctagccattgatgagggaaactgcgaaacaggcctggtgatgtcactctggtgagtccagcaggctctgggtctcacctaaggyggggatccaccctctccgggcctctgttacctaatacattaaatcaggataatagtaatacctacctcatagggctattgagatgattaagtcagaaaac

SEQ ID NO: 33100 - DNA, 201 bp, Bos taurus
aatgtgtatttaaggtagtctgcaaattcaggtgctttcagggcaaagcacggggcatccgtgagtgatgagggccacaagaagcatgttgtttccaggcrtatcttgcctttgtacaacagcactgatctaaggcagctgctgccccatctcgagctggggctctaatcagggatgtgaaatctgggctgaattagaaag

SEQ ID NO: 33101 - DNA, 201 bp, Bos taurus
atgatgatgaatgttccaatgcatgagccatcaccattcctctgcttgcatcacattccctaatgtcccattggccaaagcaagttacaaggccataacakgattcaaagggcagagatacagattttacttcttgatgggaggagctgcaacatgacattgtcaagaggaatttgaggccatttttgcaatctattacaa

SEQ ID NO: 33102 - DNA, 201 bp, Bos taurus
cccctccctgccggaactgcgagtggtagtagctgatggccgtgtactcgttgagacagggagccggcaggtgctcccggggactggggggccgcgggggratcagatcttccaggttctggttgctgtaacggggtgggagaggtgctcgcttgttttccagctccagtgggaaggggaaacccccgtagaggccactgg

SEQ ID NO: 33103 - DNA, 201 bp, Bos taurus
ctaccaacatgagagcccaggcccaagccacttattatattagcttcctacaaggaaaatgttctcatccccattttacagatgatggaacaaaggctccyaggcataatgacgtgtccaaggccacacagctgtaaaatgtcagtgctaagattggaacccaggtttatcttgatttcaatgcctctgcccctctcaaca

SEQ ID NO: 33104 - DNA, 201 bp, Bos taurus
gccagggtcaaatatcactttctagatgaagtttcctctatgccggtgaacttgtgcatctcttcttctgtgagcctctccacagtagctatgagacaacrgaggaaaccagggggcttcaggaaactatgggaggggccctgtgctttacatagtaagtcacatgcatgcatgctaagttgttttggttgtgtctgactc

SEQ ID NO: 33105 - DNA, 201 bp, Bos taurus
gtgggtaatgaagggccattgagataatgaatgagaaaaacgctgtggtgtatgagagccggctgtaattatttgatacctggggactcactggctctccrgacccatgggccctgcatcctccagtgaggagggctgaccatggccttgagcatccccggatattggtaatttggggggcctggaacccagttcctttgg

SEQ ID NO: 33106 - DNA, 201 bp, Bos taurus
gatagagataggaagggtctggaggactttctaaatgaggggcaagggcagagatgagagattgtttttatcctggagaagacaagcgtcagggtgatcartttaatccctcaagggctgccttggggaagagggagatgcttgcttctgtgggacaccagagtcacggggttgggagtgggggaggagacggaatcagtg

SEQ ID NO: 33107 - DNA, 201 bp, Bos taurus
atttcccacctgccacacatcctctttgccccaggcttaagtttagaacttgggtggtatgtttgatggaggtttgaggacatagttagtcccaaaaatayagtccatttgttattattagtctgtgagacctgactgtgtttcttctccaccacccactgctttgagggtcttactttccattgggacccatttctgtta

SEQ ID NO: 33108 - DNA, 201 bp, Bos taurus
ttctgggccttcacagccagatgcagaagaaacaaggaaatgcatcaggatgggtggagataagtacaagctgggagtggaagaagttactcccagggttmcaaggcaaaacactggtatagcatactcaagcatttaaagtctagctcagaaatgtagactgcagagcaacccaccacatctgtttacacatctgtgctg

SEQ ID NO: 33109 - DNA, 201 bp, Bos taurus
gtaaagcaccaaatgcagccttgattttaacctcccttttcctcacttgctctcctgcaatggccaagtaagatcacagccggttaagtacatctttgctycaggaggtctgcttgtcgcttttgaaaaaggtaaactatagtccttgaggctgctttattgctcagagactgactacaagtttgcttgatggcgaagcag

SEQ ID NO: 33110 - DNA, 201 bp, Bos taurus
tgtatataaccccagttccaccatctcagggatgtttagcgtaatgggtccttggccaagttattttatatatgtgtacttccatgtccttatgcagaaamatatggattattcttatatcacctattcacaaagcttttgtagttctcacaatactttgggaaaatactttgtagctcccaagatatttttgcagtttat

SEQ ID NO: 33111 - DNA, 201 bp, Bos taurus
tcatttaattaaaaacttttatggataacctcctgaataccaattaccgtattttgaacaagagtgattcaatccttcacctgatggcctttagagtctartggagtttctcatcctcatttcaacttttacttcttatggtgttacggaacacaggtttgtgtgcccgacacacagtgaggccaaacaaacctccatgtt

SEQ ID NO: 33112 - DNA, 201 bp, Bos taurus
tttatggagatggatgctgtggtttgtaaaagttaaagttactcagagtctcaatcagtgcacagcagtgagataggcctctgtttagtccagtgtcagargctttaagcctaacctcttccaaagttcagtgtccttctaacctgaccctgccctccatggtaagggccctgaaggaagcaaacttggcattctctttag

SEQ ID NO: 33113 - DNA, 201 bp, Bos taurus
tcccatggacagaggagtctggtgggctacagtccatggggtcacaaagagtcagacacgactgagtgacttagcgtgcacgataaggccaaatgataggrtatgagattattttattgtcaggtatgctacataggaaatttggaaaactcagcagtggccacaggactgcaaaaggtcagttttcattccaatcccaaa

SEQ ID NO: 33114 - DNA, 201 bp, Bos taurus
gcagcctcatttttcctgttcagtgaactcaatctctatggctggttaattctgtcacttgagagtgtgattcaaatgaaggcaggctgaatgccaggccrtcctgcagtcatagtccacagctctctttcctgcccatcacgtctatagacccttggttataagagaaattgagacatgctttatttgtccaattgcctc

SEQ ID NO: 33115 - DNA, 201 bp, Bos taurus
cagtaacacattagtagtacaggacttttacatcaatggatagatcatccagacagaaaatcaataaggaaacagtggccttcaaaaacatatgcaacccratagacttaatagatatatatacaatacaccccaaatcagtagaacatacattcttttcaagtgcacatagaattttctccaggatagagcacatgctag

SEQ ID NO: 33116 - DNA, 201 bp, Bos taurus
actgggtgaaactggagcattgtgtggatctgaagcagagatgtgtcacttacataacccaccatgcgctcttggattcgagttactttccttagaccccrctatgcccctacaagactgatgggaaaaacactgtagttgacacatttagaaatggaggcttagaagattggcaagtttacaaggctcataatagccagg

SEQ ID NO: 33117 - DNA, 201 bp, Bos taurus
actgtttcccataaaaaaataaaataaaataaagatgtatacaaagcaatgcatagcacgagcatctactactctttctttgtgactaatacccctgtatytcactctgtctgcctttagccactcattcaagagcttcgctttgtttgttttggccacattgcacagcatgtgggatctcagttccccgaccagggattg

SEQ ID NO: 33118 - DNA, 201 bp, Bos taurus
ttatgtacctacttattattcatttgacttctctgctcattcatttgttcctgatgtcatgcattcactgtcacacacacacattccttcactcaatgcaratgaaaattcaagagttaatgacatcatttgtagaagttatcctaccattgggttgctcatagattggaggggatgactacacagacatacacgcagggt

SEQ ID NO: 33119 - DNA, 201 bp, Bos taurus
agatgctatgttacaagagttggagcacagcatctctggagcaacacagtagaacctgctgtctaagttattcagaggaggttttacattttaagtctcaraagtggatgagtgggaaactccatgtggcaaacaaggacacgtgcagcctcctcactctcacagacattagctctgggccgtctgccacacacacgtcac

SEQ ID NO: 33120 - DNA, 201 bp, Bos taurus
caccaaaggtgactgtaattctttttactagaaatgcttctctttctttcattggtaacactaacactttgagatactgatataatcattatcgattttgytatcattcatcatgacggccttaagagaggtcagttccctatttctttacaatagcaaagtcaagaaaaacaacactgcagattatcatcctttttatac

SEQ ID NO: 33121 - DNA, 201 bp, Bos taurus
gcaatttgcctgtcactgtgctgctttactcatgtcactgcttatctctgagcctcagacgctctcatctccaaagaggtgaaacagtcctgaatgaagcrattttctaaggtctttcctggtatctcccaagactaagagatcattacggagtgatacctgtccccagcccacgatgactacttcatgacttttactgga

SEQ ID NO: 33122 - DNA, 201 bp, Bos taurus
tgaattcaaactctctgataaatgaaaagcaaaatattttttaaaagagccccaaattaaaccattgaggattatttaccataagttacacaacacattcygcaatctactcttgaataagatacactgcatcacaaaatactgtaaacagtgaaacagtaatagctgggtgtcttaatttgtgaccttaagttaatttct

SEQ ID NO: 33123 - DNA, 201 bp, Bos taurus
atctcttccagctcacactgactcctggacatgcccagagtgaagtggagagtcacatttgcatttaaatctcctgttgcatttcatttagtctttctggygcagcacataaacataattcaattcagtaagtgaaattcctgcctgtgagtccatcaaacatgttgctctgattgcccattttttagtctgataaaatac

SEQ ID NO: 33124 - DNA, 201 bp, Bos taurus
tgtcaaatgcatcaaaggcggtatgtcaaagccaaaacaataggcagccatcaagtgagagactcttgccattttacagatgagcaaacagaggcccagaraggagatgaacttgttccccaagttggcactggggctggtggctgccttccacttaactagaactgacacttggtaggtagcctgtgggccagatcaagc

SEQ ID NO: 33125 - DNA, 201 bp, Bos taurus
agtcacttgctcttttcttatctccccgtcttcttcttccctcccctccctccccacttctttactttctacttttcccagaaactgcctctttttttagyagtaattataaaatctcatattcttcaatgtcaaagaggtttgagaagctttcttatacaatcctctcactagttttgagaaatctgtgtgctggaaggg

SEQ ID NO: 33126 - DNA, 201 bp, Bos taurus
ctggaatgaatagacctctagctttgctcccgaggagcaccatggagagacagggacagatgtaccaacaactagaccatggggccagtgggaaccaacaygaggcactcagggtcagctggcagcctagtggaacacggacacacacagccgtggccagcctgccccattccaatcctggctccacagctctcctgcagc

SEQ ID NO: 33127 - DNA, 201 bp, Bos taurus
ggattaatcaatcaaatgttttagttgaggaccattaggatatcaactttgccttaggcacagtggtaggcattatggctggtgtgaaaaaggaagaaacyagagtacagatttcggactttgcaaaaatcaagatacacaaggaaaaaaaaatagataataaagcaaaatgttcatctgaataatttccaaatgcaggat

SEQ ID NO: 33128 - DNA, 201 bp, Bos taurus
caagtctgtgcgaccccaagactgagggactaacacacacatacacacacataggtagggctagttaagtgtgtctggataaaccacaatctgagcaaggyaggtttttgttttgttttgttttttggttttggattaaggcagctaaaactaagactagtctcaaatctgaataaagcaggcaaatgcctagatggtggg

SEQ ID NO: 33129 - DNA, 201 bp, Bos taurus
agcccactttggcctcctttgcatggcaaagcaataaatcttttctatttcatccaaaaccctgtctctaagaattaaatcactctagggtacagaggccygatttggcttcattaggaagttactgaatctttctgagtctcagtttcctcatctaccaagagcacataatgatagtacccacctcaaagggttgtcaga

SEQ ID NO: 33130 - DNA, 201 bp, Bos taurus
taagatcttttatcaatttacttatttatgttacataaataaatagcacagtcagctctgacagtcatcttgcaattggtcatgcagtggcctgatcagcrtcatcttgattgccttaagtatagtcagtctttagttccagggttggtttgttcccacttctttgaggccaattcttgaaattgtggcagcttatgtcat

SEQ ID NO: 33131 - DNA, 201 bp, Bos taurus
tcaatgagcagacaaaattgttgtcatttaactgtggaacctattttcaccctcaccccctagaaggagaaaaatctctctaggtgcttttgagagttacyggccagtcctcaggaaggcaggactacctgtgacttcccggtgctgatgctgaacctggggaaacaacacagaccctcaggagtcctagtcactcataca

SEQ ID NO: 33132 - DNA, 201 bp, Bos taurus
gactgccatgaccccggcccctggtgtgcctcctgccacagagtgcatgccaaatggttgagtcaagagtcgacttagaatgtgaccattggatgagaaakctggaggaacaggatcccctggccacttgtccggctccatcttcctgacccactccagcccagatgtggaatttctgtgggtgtgccagaaatctgcatg

SEQ ID NO: 33133 - DNA, 201 bp, Bos taurus
caaaggctgtccgggtgtctaagaaagtaaagggtggaggctttttgggttaaaggcagggtttatgcttactgttttttgggtgatttaaaagagcatgyattcctttatttattcactcatcgacaaatacgtatctactatgcaccaggcattgcagtaagtactgggattatggatcaaggcagacttggctgctaa

SEQ ID NO: 33134 - DNA, 201 bp, Bos taurus
tttcacacattctgaatgatttctgtaaaaaatgtctctcatcctagctcctagggcttcccagaaaaaaaggaattcttcgaaggcctgagagctccacytgtagccaagaggacttaatctcctctggggcagtgattgctagcattgtagctaaatgcatctgaggctggcctctgaccaccctgagtaagctggatg

SEQ ID NO: 33135 - DNA, 201 bp, Bos taurus
ttcacagatttgagtaatctatgtggattattgcaaccaagtacagactccttttgaggatgctgcctggaggcagacaaaccaagtaaaaatggagtgaraatacctacagatatagttattcactttgcttgacttctctgatagtgtcacatcccatgccagtctccctacctcaggagtttcatactgtctggtcca

SEQ ID NO: 33136 - DNA, 201 bp, Bos taurus
gaaggtttagtgaatgcttgattctctttccatcttattatgtgcattcaatattaagacagtgttttgtctcctaatttaggagttagatctcaactcaycttgtgatctgagaagtggactgattgaacccttgtctgcaaaagagaaaactaagattggtgacatcttaggtgagtggtctgtgcacctcacaaagtt

SEQ ID NO: 33137 - DNA, 201 bp, Bos taurus
caagcctgagcttagggtctctgtggtactgaaacaccaaggtagctacagacagtcggctataggagatcgtgcagggttttatattctcaatactcacragtagactgaaatctgggcctcgtatttacatttttctcatctttgaaaggtattccggcaagcttgaatttcaaggggcatgcttagaaatattacatg

SEQ ID NO: 33138 - DNA, 201 bp, Bos taurus
actctcttctgagcctctgatacttcctttctgtcctggctgatctcccagctagtgaaggggcttctagggtgaaggaacctttcctctttcacagctcyctcccagaggtgcaggtcccatcccaattccattattttccctttttgttctacccggttatatggcgatctttcttgcacctttgattgtatgaaattt

SEQ ID NO: 33139 - DNA, 201 bp, Bos taurus
atattctcatagcataactataccctttagcagacatggccatctttcaatcttgccagcccatttccagtcaataagtgaccggatctctgttgtaagarcaggacacttctaggtttgatagccaggttgtctgcaggttcctgcactttgtctctgaatttgccctcagaattctttcctattttgaaatcaaagcaa

SEQ ID NO: 33140 - DNA, 201 bp, Bos taurus
taattaagttcccaagtgtggtgaagtatgcttatagtagatttattctgctacagatagtaactataaactctggacaaaatgtaaaacacaactgcttraagaatctaataaacaaaagcaggagaatccagagagtgatagaaatttgggaaatgggactgctgctgctgctgctgctaagtcgcttcagttgtgtcc

SEQ ID NO: 33141 - DNA, 201 bp, Bos taurus
gagaagaaaggaagaaggaagatggaaaaaggggcccagcatatccaggagggataaacatgtggagcataaacaaggtgttgaagaaatgaatgaaaaakttgggccttgaataaatatcatgtgtgcatacataggtaataatgattatttcatgaaagcattaccctgaaatgctttaattcctaaagactttatatg

SEQ ID NO: 33142 - DNA, 201 bp, Bos taurus
attaaagtcagacaccaagtgagagtttgaacttatttctttataattcttaagaatgcattggttgggatacactgcatctccctggtccctgcattcarttatttttctcactggcttattcttcagtttcttatgagctttgtttctataactcatcaatggacacatgcagataaatctaggaattaggaagcatca

SEQ ID NO: 33143 - DNA, 201 bp, Bos taurus
atgcaaagatcgtttcattaggaaaatctcctttgtaaaaagagtgataaagggagagagctttgattgcaaaaaacaggaaacgagggccaagagcttayccatcagaacacatggcaattagacatttgaagacagaaagtggaggggactaagggcagcaaaggacaagaataaatcaggaaaataagtgaggcccag

SEQ ID NO: 33144 - DNA, 201 bp, Bos taurus
aagtaatttttttttttttttttttttaccactgagccaccagggaagccacccattaaggctggctgaaagaaaaattgccatagatttgctggcctctmttttttcagatggcaatggtttaatagattttactcacatcacattttgagcctggatggaacaatgttaaggccaaaagtttatattcaacaaaactta

SEQ ID NO: 33145 - DNA, 201 bp, Bos taurus
acttgcagctttttgcctctcagactctcttgtgatttgaaatgtgttattcataagtgtgctgagttccaagtatttgaaagaacagatgtggatctagrggaataataagtccttgctaatatcgctctaaaaggcagtgaatttgtacatattcgtgtttatacattttgctgcatgaaggtgagggcctgcatttgg

SEQ ID NO: 33146 - DNA, 201 bp, Bos taurus
gaaggacacagatgtcaatggatcattgtactgctgtgggtaaatgctgtgatggaggtgctcacgaagtgtgcacatcagagaagggcccctagacccaraaaagacatctgaccaaaaccaaaggactggagagagaggcagaagggttaggaagagccttgttggccaagggagggacattagtgaaaactgaaaagg

SEQ ID NO: 33147 - DNA, 201 bp, Bos taurus
tcctgaaaagtcgccacttgaggacatgaaggaggtaaagaaattagctatgagaacatttgctggaaaaaatttccaacctgaggtacaatggccctgargcagtgaccaagaacagggacagcagtagagatgagatcagacaggtaatggggtccagacccatggaggattttgcaggcccttgtaaaggctttggca

SEQ ID NO: 33148 - DNA, 201 bp, Bos taurus
ctgaaaaacaaaataacttaattgtcttgtgttctctgttggctgtcatctcttcagtacatgcacttgcatctcacacaccgttaataggttcagagaaractcagcttacacacaggccagtgttcttgactccttgggagtatgtctcgtggtcttgcccaagtccttgaaaacacagtccaggcgtttgtgttccca

SEQ ID NO: 33149 - DNA, 201 bp, Bos taurus
gtggcatcaagaaaatatgaacaagcatactaatttttggtccattaagatcgtatctgatattttcattttcctggcccatgtggtcaatgaaagtatgycaactctcaactttcatgtcgtacagagagtcaaggaatctttgctgatgctctgggcctctgtgcagggagtcatgtcttcatgacacagctgaggagc

SEQ ID NO: 33150 - DNA, 201 bp, Bos taurus
atggttcttgtagatgaaggcgagttttcagaacatccactggtcatggccatcctcacaaggtcttcaggggggagagtggccctgaagtggaagcaagyttggtgtgtttagcaaacagcaaggtaactgatgtggctaagacagagtgaccaaagacagcactgtccagcaaggagggtacagaggcagcaggtggcc

SEQ ID NO: 33151 - DNA, 201 bp, Bos taurus
atcttcccacatcaaacccatgtctcccacattggcagatggattctttaccactgagccaccagggaagcccagatatagcttttactttctgctacacrtacctgtctggcaggtagaaagaatctcataatttagtatatttgtttcttttttaaatccagcataatctgactatgtaacaatacaacagtcacttac

SEQ ID NO: 33152 - DNA, 201 bp, Bos taurus
aactgatggaagcagaataggaagggggagaaaactggggtgacagccctgagaaacagaaatgtggatggagcagagctcactgcctgcttcaaggccaytgggctttgtcttgcattttaaggtttttgccctaatgagctactctattttaaacaagtcaacaaacctctttggggccttactcagttcctcactgca

SEQ ID NO: 33153 - DNA, 201 bp, Bos taurus
tcacccctggcaacacaggaagaagctgagtgaaacggcaaatacagcgataagccctgtagcctcaccagcatgttttcctttgctgtaaacagagaagygggtaggccttctccagagacccaagttggggctgacctggacttctctgctctgagctcaggtcccctgtgtgagagaagctgcaggggatggggcttc

SEQ ID NO: 33154 - DNA, 201 bp, Bos taurus
ttacagcttttaaaagtcttacagggcccacaagccccaggctgggagctcttgcttcacacaacccttatgtcttatccctaaagtcctgagtccttgartcacctgagatgagccatgtaaggcccaccctgacccttttcgctgtgtgtgtgtctgtgtctgggttcggggatggggcagggatgggaccagggtgag

SEQ ID NO: 33155 - DNA, 201 bp, Bos taurus
aggactcaataaataactactttaagaagctatttcctccaggaggccagtgacctaacagaactgaccacaacatggcagtcccatgtcctcactactcrggagcacaagattattttggcctaaaatgccaggcttggtgtggctgctaggagcatgcatttcatttgggctcttgcacttcctagctgggaccccagg

SEQ ID NO: 33156 - DNA, 201 bp, Bos taurus
tgttggcaatctctccacgtgtgaattccattaaaggctggctcacagctattttgggccacgcattagcacttggactttgattaaatgagagaaggccmgacacctcgggatgatgagaaagaaatgagaaatgtcctctccctgccctcacagttccaggagtccttgtccactgctcctgggaggcctgagaatcta

SEQ ID NO: 33157 - DNA, 201 bp, Bos taurus
aggtggtgaagttgggttcatgcgcactctttaaaccacaatgctgtactgccctaaaaacacttccttttggtaaaagcattaggtagttatcaggcccyaggcaaaatgtatgttcatccaaatgttaaaacctaaaatatttgaaatatgtttaaataaattgtaatacaatgtttttgaagaatgcttaatgatctg

SEQ ID NO: 33158 - DNA, 201 bp, Bos taurus
aatggccctccatcattaggaggtttttgttttctcataccccagtgagctagagcagagcttctcagactttaatatgcatgcctatcacctgtgtgatrtgattcattaggtctaggtaaggcccgagaatctgcatttctagcaagctctcagatgatgccattcctgttactgtggtccacacagtagcatggcaag

SEQ ID NO: 33159 - DNA, 201 bp, Bos taurus
cgatttcttttcagttttactgaaattatcctttgataaaaatggggtggtagaggaacaatccactctgctcaaaatcaatggcttactttacttaagarcagactgttttcagaatggaaaatagttcttcaaatatttgttcattttcagaggagccatgataacagtctccatttattccatcctcacgtcctacct

SEQ ID NO: 33160 - DNA, 201 bp, Bos taurus
tcaccccaaacattgtttatccagaacactaagaccaacatttatgttcttagaatttataagtctttccttcccgatagcccttgtggttgtcattttgrtaacaggccattctgatttcaagaaaacctcattttctgttctgaattgtggtgccttcttctgcagtagtttgctaagcaagcatatgggctgtttgct

SEQ ID NO: 33161 - DNA, 201 bp, Bos taurus
actgtgcaccagtaaactcacaagcttctctcttactcctttgtagcacaactgattatattagaaaaaaacatccctcccaccaaaaatgagataaagargacccaaaggaaggaagagatcagagaatccattctgccaccaaagatgtgtagaacttgctgttttattacacactagaagagaattaaaagagagagg

SEQ ID NO: 33162 - DNA, 201 bp, Bos taurus
ctatgtacctgggccgctcttggaccatgtcaccctctcaacacgtgtgagagggaggttattcttatctccataacacagaaggaagtggaggcttggaraggaggccatggatctaaagcctcattgctggcaagggacagagctaggagccaaatgcaagtctaccttaatccaatccctgtggttgcaaacactggc

SEQ ID NO: 33163 - DNA, 201 bp, Bos taurus
ttcagaaaccttgataaagccatgccaggcacattgcgggcacgacgtacatgttaccgattccttgggcctcaccgcagacatgcgaatgccggccaagygcgatgcctcggtactgatgctcacggatcactcaggaagacagctggcaaactgaaacgggacagggacacctctggccttcaaaacagagacggccag

SEQ ID NO: 33164 - DNA, 201 bp, Bos taurus
gatgacgttatcttccccttgagggaaacatgggtgaaaacaaacagtaaaagattgtatccggcaaaattatctggctttgacttgaaaggataagtgtrtacccatatatgccatatacactcccaagaggacataagtttaaaaagggaaactttccaaaatggatcacacctaagccccaaaccattttctatgagg

SEQ ID NO: 33165 - DNA, 201 bp, Bos taurus
atctaggaaaatcaccatattcaaagttgctaatcatgaagtaagcttgaggcatagtggggagactgggattagaggaggcgagaaagcaccggacccaragggcacagtgaaatgtggatgacaagcccaggggtttggactatatcttacatatagggagcaaggaaaagtttctctgcacagaaatggtacagaagt

SEQ ID NO: 33166 - DNA, 201 bp, Bos taurus
actctcctggggctgatgggccagtgggtggaaggcattccaacagaaagtgatgtctcttggtaaacccaacccatctttcccagtttccagagttctgyagactggagctggcccacccagacaggcaccacaaaattctatacactctattagaaattcaagtgtagacagtatccttaagtagaccaagctattaga

SEQ ID NO: 33167 - DNA, 201 bp, Bos taurus
ggaaccttaaagtattagaatggaaaacctcgaatacaatcatgtctttaaacagattgcttggttggacttactgaatgtctgtacactggaggtggggsaaggagtcaggggtattcattagtggtagagttggggccacagacttcctcagacattattccacagcaatgcaccaaattcatccttttataactgaac

SEQ ID NO: 33168 - DNA, 201 bp, Bos taurus
gtggccttatcgtttgtaaatgatgtgccaagcataagagctggcattgttttgtggaggcagggagaggggactgcctagaattcttcactttgtggtcygcttagggggcctggaatgcaaaagtaggaagtcaagaaacacctggagtaacaggcaaatttggccttggaatatggaatgaagcagggcaaagactaa

SEQ ID NO: 33169 - DNA, 201 bp, Bos taurus
ttattacctgagggccatgtgaacacatttggctggggcgccgtgacacacagttgacacagtcacctcataaaatgttcatagctgattaaggggcataygctccttcagaggcctgggtgtcccgaagagagaaagaacagctgtttcctatgctctcattaagggcttaaagccttcttcacattaaagagcttccat

SEQ ID NO: 33170 - DNA, 201 bp, Bos taurus
cattgctaccggcgagggtattaagtttctcagtgtgggttttcttttgttggtcattcatagttgtgaatccagctacaatttatttctttttatgctarcaatggacagcaaagggataaaactgtgtaaaagaactctttaattcctaatctcttttttcctactgctacaacttttttgtctttttcttttaaacgg

SEQ ID NO: 33171 - DNA, 201 bp, Bos taurus
gtgttcagggctttgatgaccagccctataccccacatcagcccctgccacagctcgaccttccaaccaggaaggagactatcagagatgttgaaggcagrggccatcttgctgctgttcatccctctgcccatgagccaggagggttctgcagccagcagactgggaatcaagacacactcaggaaaaggtctaagcctc

SEQ ID NO: 33172 - DNA, 201 bp, Bos taurus
acccactctgtcctaacctcctggcagaaccccatccctgaataaatccaatttccttccaccctaagcagcacactgtggccagaaaagaaggcttaacrgggctgtcagttcttactttaacttctgggctgcagatcttagattccactgatcatcctactaaggccaacacctccatctgtgcatttcttctttcct

SEQ ID NO: 33173 - DNA, 201 bp, Bos taurus
tggttgagtcaggccaattgaccagtggctgagcagttgctgatagctgattgaacagacaggaaaaatggtctatgccatctgctcagcaagcagccttyattgtggccaaaagccaagcgtaaattaaaaagaagaaaaatcaatttaattatgcatgtgactaagctgtgtttcatgatgagagaactaaaaagaaat

SEQ ID NO: 33174 - DNA, 201 bp, Bos taurus
tgtgtggtcttaaaacatttgccaaaatgtttacagagatgctttctctggatagtggaataagaagttgatttctcttttgttttctatcttttccagargtttaccataagcacatagtttgataattttttaaaagctgttttcatttagtggttaaataatgcaaataatatacagttatattagatatgttgaatt

SEQ ID NO: 33175 - DNA, 201 bp, Bos taurus
ctctgtatcgttccaattttagtatatgtgctgccgaagcgagcactgcttttactgttgtttgagttacaaatgtttctctcagttcttataactttgtyttcaaagtttgtgactttatagaaatgtccaggcaaatacagcaatactttacagatcctgaactcctgtcatatgtaaaaaggtctttcctatttcaaa

SEQ ID NO: 33176 - DNA, 201 bp, Bos taurus
ttatgatgcattggtgatgcgctgagatggtaaacatgcagtgtaatgatgggcgggggaatgtagcaggaagtgaggagaagcatcttaggcacttttcrttatcaaatcttttggttttaacatgcatgtgttagcttttgtgctagtgtgtgccactagaggagaacgataaagggcaaaaatgagccaaggtcataa

SEQ ID NO: 33177 - DNA, 201 bp, Bos taurus
tcagtttatagaggagaaaggactcacccacaatttctcatcatcaagggtgtgcagggcccatgttctcatcctaaattttctaacttcttggccttttktgccaagcactggggtcccacttcctgggactgtcactaaaggttaccaaatttatggtaatcagattgtgatgagcccctggtgaaaggccagtactag

SEQ ID NO: 33178 - DNA, 201 bp, Bos taurus
ttggggatttcctgggttcaagaaccccaaacatctcagcaacccagtgggctggaaacacaagcatcatcgtgacacttgggggtatttttcatagccayctatgtcacagtttcctagtaccaaatcacagggtctgagggccaaagaacttaggtagagatgtccccaaagcagtcaggggcacgtttgaggtcatct

SEQ ID NO: 33179 - DNA, 201 bp, Bos taurus
ccctctgcttcaagcacttgaaaaagggaaatactttcttcataatgatggtagtagctgactcctttccccggagcaacaaaaatcaccagtgactaccrggatacctggtctagagatgcattaggtggattaatagtgcttaatggtgagtgaaaggaacaagttctctgttttaaaacatgcagtgctctgagaaag

SEQ ID NO: 33180 - DNA, 201 bp, Bos taurus
ccaggtagaactggttctagaaacaaaattcacaggactctcccatagaggtagcaaaaggagagcgtgtagagatgacaagggccaggtggcctattaargctatttatgatgctgaggggaagaagccctggagactgtcaggcagggacccaaggaccagagctgtgggccccaggccgtgctctgctggaagcgcaa

SEQ ID NO: 33181 - DNA, 201 bp, Bos taurus
tgcagaaaacaaaatagagaccaaaaaacagaagaatatagagaaatatgttccaaaataaaggaacaagataaaactccaaaaacagatcttaatgaatraaatggaaatgtgtgatttacctgataaagagttcaagataacagtcataaagatgctcactgaggtcaagaagcaagaacaaagtgagaatatcagcaa

SEQ ID NO: 33182 - DNA, 201 bp, Bos taurus
gaagaatggtaaatgtaatgtggtaaggaaaaaggcagtcctggtgggaaagctggcttgggcaaagaataggtggccctcaagaccagtgttctagtgcrtgtgatgagattagagacaaagtctgagctggtgagtgtgactgagagggctcacccaggggccagaagctgcaggaacagctgcacagaattcaggcat

SEQ ID NO: 33183 - DNA, 201 bp, Bos taurus
ggaagtttttatattggtcttttcaaatttctcctgtgtaaaaaaaattaagttacttttgcttgttagtctcatcatccttgaagatcaatctgtgtctrgaatctcctggtaagttttttatctataatctcagtgatagctaaagcttagtatcatgaagttctcaacagagctaaaaaatcataaggctagttataa

SEQ ID NO: 33184 - DNA, 201 bp, Bos taurus
cctacaattctgcagtaaatcaatcaacaacgagtctgaaaaacaggcaaaaaacttaaatagacatttctccaaaaatgaaatacaaatggccaattagyatataagaaaattctaaacatcactaatcattaaagaatgctaatcaaaattacagtgaatataacctcatatctattagaatggccataaaagaaagag

SEQ ID NO: 33185 - DNA, 201 bp, Bos taurus
caagtttgatcaaaagtaaatatgaaacataaagaaacagcaagtattattccataacaaaatattatagaagaaaagaaacactgatttacatagtagamtaatttgaaaacaaatcaatactttaatgccgttagaccttttctttaaaaaaaaaaaaaaaaagaagctcgtttcactcagtttaaagattttgctttt

SEQ ID NO: 33186 - DNA, 201 bp, Bos taurus
ggaagtagatataagcataaagagaagctcagagaaaagagggctgtaaatacagtagcactgatgtgcaatgcacgggagtttcacacataaatgaaggygacaccaccaacagtcttaggaattatagtcagatgttggtttcagaagccaggtaatcctgaatctgcctcctttgattcctgaattttacattatagt

SEQ ID NO: 33187 - DNA, 201 bp, Bos taurus
tacaggtggaatggtcctcactgaagtctacccggagactgtcagaaggactcctgaaaaaccaaagctatattaaaaatatactgggtaggaaaggaagraaagtgattggatcaagacctgtgcccttgtgaggggtctcaggggtaaaaatagatattacacaggaggacaccctgcctgggtagtgagcagttagag

SEQ ID NO: 33188 - DNA, 201 bp, Bos taurus
ggctgtcactcactctggggacattcaattacgggaaagcggcaatggccatattgactcattagcatcaacaccacacctggtcctgccgagcagtctaygcgctggtgctgggactcaagccaaacaacttaaagggccaaacacagccccgcccatcagcagacacgcccctagacacatgagggctccatgtgtggg

SEQ ID NO: 33189 - DNA, 201 bp, Bos taurus
atagaatatataaattatatatgtaaatatgtagcatgagattgtacatttttttacttttttaaaagttgtgttcttaaaatattgtgtaggactcaccrctcttagctgttagaatgttgttaaatgctatggaaatacttttacagcctgcatttaagaccagaacagtctgaaggaatcagatggaatttacaatat

SEQ ID NO: 33190 - DNA, 201 bp, Bos taurus
aacgacattgcaggcaacataaagtaaaaatactgtaccttgggacatccccagccttttcttctgctcattccccgaaaggctggcatccaggcatggartggcaccctcaggttccacttccagccaattcattctaggttggattgaataagttttctctagagatatacccatacttgaatgaacatttccagagac

SEQ ID NO: 33191 - DNA, 201 bp, Bos taurus
caaattatatataatagggccaattagtagagaaggagcctgaacatctttagagaagatgtgagaaggtatggttggcttaagattaaaactaattgtcktacttcatttgttctcatttctttttctctgcaactttaaataaagtacccgtaaatttcagattaaaacaaagaaaaagccaaggtaaagttatgacaa

SEQ ID NO: 33192 - DNA, 201 bp, Bos taurus
taatttactacaaaggatatatgaaaagttacaaatgaacagctagatgaggatacacatagagcaaggttcagaagggtccaaacacaggagcttctttycccatagagtttggagtataccaccttccagacacttggaaattcttgttcactaactcagaagttcttcaaatccctttggttagggtttttatgaagg

SEQ ID NO: 33193 - DNA, 201 bp, Bos taurus
gatagagcctgtggagtattacagactatcctcagacaagctgcatcagattcaacttataaaaatgatgatgatggaacaaacttctctgtactggatcygactcaaaccaactaggtgaaactccaggcctaatgatcagctatcttatttcatagatagaaaattgctgtggatgttgtgttaaataagtgaattaaa

SEQ ID NO: 33194 - DNA, 201 bp, Bos taurus
tgaataagtagataaatattccacaccaagggctaaatgactgaaagacagaatcttatcaacagtcacttttgtcaaaccaccccaacttcacactctgkcatgattcctattgtggaaggggaaagataccaacttggaacaatgatcaagagaaatatagactgaaatgaaactggttttcataatctgtcatcaaga

SEQ ID NO: 33195 - DNA, 201 bp, Bos taurus
cagagatgagtcttggtcttggctccctgcaagagctatacagaaccacctgatacacagtccctgagtgcttccacaggaactaaggcccccagtcaggyggagcaaaaccggctgggaccagaggctgataactgagatagctgaaacaccacctggttacctcatcaccagcaaatcagaggaaggtcacacaccctg

SEQ ID NO: 33196 - DNA, 201 bp, Bos taurus
ccttagtattgacccacataaaataccttataattccttagtcagtgatttcaaggactatgtggtgaacactcatatacactttatacagatttcaccarttgttaacgttttgccatatgttttacacgtacactgttttttttcctgaactcatagagaattagttgaatttcaccccaaagtacttcaccatgtatc

SEQ ID NO: 33197 - DNA, 201 bp, Bos taurus
gttattttctaagatggatatactattttacatttttgtcagcagtccatgggcatttcagttgctctatatccttgcctttacatcttgatatgattatytttgaaatgcatctattctaatatatgtgtcatgataggtcattatgatttttaattggcatttccctgatgactgatgagttttccttttcatgaactt

SEQ ID NO: 33198 - DNA, 201 bp, Bos taurus
atttaaccaagtattaaaaaaatccataccatacattgtaagttcttcgaaaatcttttatttccattgattttcattaaagaggtaattggcagctgatyagtaggcatgattctgatgagctggtttggctgaaccttctgtgtgacagagcagcaggaagagagaacccagaggtttgctgacactccaatctatctt

SEQ ID NO: 33199 - DNA, 201 bp, Bos taurus
aaacaggccttcactagctgtggtcagcagagccctccttctgaagggtttggaatctgtgagaagattctcccactactttccaggccaagtgtgagagytgaagaaagaagcacaaacaacctattcaagtaaacaggcagacagattacagcccatcctgagtatgtaatcttttaaagttactaaaattcataggca

SEQ ID NO: 33200 - DNA, 201 bp, Bos taurus
aacccaggttggtacagtgaagagtggtgtctatggcaaattggagaatgccctctctgtttaaagttgtttaaattcaaataaaaaataaaaatccattktactggctaaatagaagatctaactagccactgcatctactatggtaggcctgttcccatacaggatttttattttatgattaaactcagcactacatta

SEQ ID NO: 33201 - DNA, 201 bp, Bos taurus
tttcggtgaagttaatattattcttccataaatagtatgcttgattacgagaagatcacaaatctacaaaggagaaaactaaccgcccttagtcatttccyaaggtccttagtctaaacattgtgatattttgtcaaaagattgagtcacataaaataaaaacgtatgtagaccaagcagttgactaccagtttgcatcct

SEQ ID NO: 33202 - DNA, 201 bp, Bos taurus
tgtctgccacagtgaataaattgaataacacacctcatagagctcatccttccatttcattcttggaaaaaacatgcttaagctatgaagatgtgtggggraaatagacatttcatctagcctcatattttctgtacttactagaaagaattattaaggtactactagaacaatgctcacttaaattctacaacccacagc

SEQ ID NO: 33203 - DNA, 201 bp, Bos taurus
taatgtgaaattctgttgtaaagggtatagtataaaataaacattaagagccagagactgtttttatctgttccccttcttctaccacctgtctatggaaytaaaataaaaattttttttcaaacaggtaagaacactttacctgtgtttacccatttccatatctattttctgtagcccatggagaacatttcatgagaa

SEQ ID NO: 33204 - DNA, 201 bp, Bos taurus
caaaatcacatgatcatcttaaaagattcagaaaaagcatttgataaaattcaacctccattcacaataaaaactttcaaagtgagtatggagggaacacrtcaacctaataaaggccacaaactacaactaacgtactctgtggtgaaaagaagaaagcttttccttttaaatcaacaataagacaaggatgcccgctat

SEQ ID NO: 33205 - DNA, 201 bp, Bos taurus
aggagagagctccagagtgggcctcccaggctgacttcccaacaatcctgtggagctggtcttctcagcgtgtttctcctgctacactaaggataccaggracacgtaaaactgctggcccatgttagctatgacccggaactaggtaactgtttccacatttgttgaattcagagtcacgccttgccagccactcttcac

SEQ ID NO: 33206 - DNA, 201 bp, Bos taurus
ccttcagagaggacaggttcactaaccaaaacaaataaaacatttttcctatatcaagaaaaattagactagataaagagaaatcaaaataagccagactrttattacaaatattttcttaagtaaacaatatatataaaactatatatatatatatatataaatgaggaaatatttccattttgatccctttttccaaat

SEQ ID NO: 33207 - DNA, 201 bp, Bos taurus
gtagaagtcagtaaagtaacattgtgaacagacaagtgagaaaagatcttatactcattattagttctaagaaaaatttctacttgttcagagtatggccrtagctcattcctcacatgtaaaagatgagatcagagagaagcaaacatggacagaagacttaaacagacatttctccaaagaagacacatagggccaaca

SEQ ID NO: 33208 - DNA, 201 bp, Bos taurus
gcaagagtcaaacatgacttagcagtctaaacaaccaccaccacaagcctctccttcctggctcacagggccattctcactatgtttttccatagtagaarggtcagtggcgtcctctgggtctctgttgttgtttaggctgctaagtcatgtctgactcttttgtgaccccatggactgtagccttcaaagttcctcatt

SEQ ID NO: 33209 - DNA, 201 bp, Bos taurus
gatcacagtaactactttttaaaaatactaacttcagcctatttttggtataaagtttggttttacttgtgtttagaagtccaacatagtcacagtttggygctttattgaatctttgaacaggaatttttcatggaaaatgtggtttctactacctggttttactggagaaacagaattgtcctggacttaaatactaca

SEQ ID NO: 33210 - DNA, 201 bp, Bos taurus
tttatgcagtcattgaatgcattcaaggccatattatcccttcattagaggttgagtgttcagttctatttagaaggaggaaagcaacagaatacaatcayaatcaaagggcccaatcagcataaatttaacttaaagagtagtttgcctttttataacatgaggtcaggcagcatactatactttccatactataagttt

SEQ ID NO: 33211 - DNA, 201 bp, Bos taurus
gtggagaaggagatctagcctcaggcacacgatagctttccagtatgactctgcctcctaagtactgtgataaaggtagagatttctttatgccttttatyagtttctgatgagcaccttaatttcccatgtggcttcagaactgagccggtttcaattagggaaaactgaccatgctttaggaactttgctagatttcaa

SEQ ID NO: 33212 - DNA, 201 bp, Bos taurus
tggagaatttgactgagttgtcccacatcagagcaggtccacagtccttgggcagaggctggctgggtgctagagaaatgctctgggtagtacctgctggrggagctgctgaactaacaggaagcagtagcccacagaccaccaggaagcaagctggggagccacaggatctagactttctttctgatgaatttccatcag

SEQ ID NO: 33213 - DNA, 201 bp, Bos taurus
tttataaagcatagaaatccatcccagagaaaatgggtgtggcccaaggcataggacaaataaaatatagagtcagaaagagagctgaactgtatgtattraaaccttagtcaagagttatctttttgtccacatgcttttatctgtctttccagtaaactctctcaaggatttttaagataggtcttgctttccctactg

SEQ ID NO: 33214 - DNA, 201 bp, Bos taurus
ttcttggtataaatattctattactgataacaagtggttggcaagattcctggagattttacaatcgtaaggtgggcagaaaggataaggaaaaaatctgkcaggattactcctcaggaaatttccagtgcaaagtacaggcagctgtggaggagaatgctcccaaagaatgcataaaggggaggacaactagtgtgatcc

SEQ ID NO: 33215 - DNA, 201 bp, Bos taurus
aaaaaaataaatgttgtctttatgggctgttacaccttattgccataattaccttcctactcctgtcttatttctgcatccttgactccaaaacaactttkttaaagacatcaatgatttccacactggaaatccaaagaacacttttaagcaaaattatcttattggagtatagttgatttacaatggtgtgttaatttg

SEQ ID NO: 33216 - DNA, 201 bp, Bos taurus
ctgaaactagtctattaattatttcctagggtctgagcagtagattttaaaatggattattcagagaactagatttttttttcttttccctcatgtgcctygctacttttaatttttcttggctggtggggttggaggcactaaaccaccactgttgtcttaaccaaagcaataatatttatacccatttttaatacggag

SEQ ID NO: 33217 - DNA, 201 bp, Bos taurus
agcatatgtaaaacttctgaagtaagatcagtacttggttggtcctgatggcaagacttacattttaaccaaaagcgtgatgtaggccaacactcctcaaygtgtggtctgggaccagaaatatcatcacctgtgaacttgagagaaatgcaaatcatcaggccccacgtaggacctactaaatcagaaactttggagctg

SEQ ID NO: 33218 - DNA, 201 bp, Bos taurus
aggttaagagactccagtgctgacaaggtgataatgaggatttatggagagagggaggtaagggtgggtggaccctcccaggctcccacatgtggtggctmcaggccctctgcagacagagtacctcaacggaagtgaaggttaccttctggattgcagaagcaaccaagcctggctacattgtgattaaatgcacacaca

SEQ ID NO: 33219 - DNA, 201 bp, Bos taurus
aatttggtgttgctgtattttaattcagcaatttggctactcaaagtctacgctgccatctattagtaaatgaattggactaatctctctgttagttgtgytgaaatggtttgccaataggtatggagagtaagaatatccaagacacagatttttaaagccccaattttatcatagattagccctttcccccctctggag

SEQ ID NO: 33220 - DNA, 201 bp, Bos taurus
ggagacactgtccgcttattcctcctgttcacttattagagctcagctgcagtttacctctatagcctccttgagccccacttttgaaaatgattcctgtratgcaagccttttattctgtgcttcagttttccttactaatgctcgtcatgatttgtagtcacgaatctgtgatgtgtctactttttaatgtcttttcat

SEQ ID NO: 33221 - DNA, 201 bp, Bos taurus
agcatgagaggagggggcagctcagtaagaggagctggtgacttgcattagcatttgatatctttcttttctgagcgggtatctttgttttttaccctgartctcttagaccatccaataaggatatcagtccccaccccttttatgaagaaggaaattcagggataaaattgggatccagaactggcttgatcaattgct

SEQ ID NO: 33222 - DNA, 201 bp, Bos taurus
cgtgcaaaggccctgaggctgggatgagcttggcctattccaggaacagagaggagagcggtatggctgaaacacaagagagagaagttaggaggtggacrgaggagattatgggccgggtatagtcattgcccagcaaaggcatgccaggcctctcttggcatcttttttcatcatctccagtgggacatcttcctgtcc

SEQ ID NO: 33223 - DNA, 201 bp, Bos taurus
cacaagctgttgcctccaaaatctccttataaatgagccacaaagcctccataggtctttctcctagtgagtggaaataaataacgcagaatatagcgaaygcatgccgtgagcagcaggctgagggaaacggtctcctgtccatctctaaaggagcgttgtattcagtttttaaatgattcatctcttccctctccatca

SEQ ID NO: 33224 - DNA, 201 bp, Bos taurus
tggagtgggttgccattgccttctccgaaagagtagccttagctcactgcaattagagaagacctgtgcaacaataaaggcccagagcagccaaagataayaaataaaaattaaaatacagactcctggacccctctctcaccatatctggatggcccagagacctacttttatccacattcccacgtcagtcttatgcac

SEQ ID NO: 33225 - DNA, 201 bp, Bos taurus
gaccctgcccctagcgaggtagtgacaactacagggcaaagagaaggccccgctccacaaccagggcagggtctgctcaccacaacacagtcacacctccygtcaaggggattaacagctggcccacactaagaggtggcagccatccataccaaaacagccctcacacccaaaagattaaacctacgcaggctacacagg

SEQ ID NO: 33226 - DNA, 201 bp, Bos taurus
gtgatgagccaagtaatgactagtctaaggaataaattaaccaaatatgttagaactaggatgatggcttttccggagtccatttagttataaactagacyctttaggtgaaaatatttcagtaattattactcaactttttccagggactgtttttccttaatattttttctggcattgcatttgatgtgtagatttctt

SEQ ID NO: 33227 - DNA, 201 bp, Bos taurus
gtttcaatgttattcatcctaaattgtttgaacttctctgatgacctgggagcttctgtgggcacggggactctgcctttttgactcttccccgtggcccrtcaaggttctttggggactagagttgggctctgccgaggggtgcattctaccaggtcagtcattctggcatctgcactgggctgtgtagcctgaaacctg

SEQ ID NO: 33228 - DNA, 201 bp, Bos taurus
tgttgttaaattctggactgaaaaccaagagaaaatatcacattagcaaaataacaagccttcagtgcgtaaccctgaaagaaaaggttactatggtttcraagcatttcatacactcttccagttagttttttgaaaacagtggagctttttggagctttttttttggtttatttttaactttgagacattttcctctgg

SEQ ID NO: 33229 - DNA, 201 bp, Bos taurus
aactaagtaaaatcagtttcgtggcatggcattcaaggctttctgttacccaccccacactactgctagggcatcatcttagcacaccaggcctttcctamgcacacccacttcttcccaattcagtgcttaggctcttacatgtacctcatcttgtgaagtccttttcctattcactagtgaaaatctatacctcattta

SEQ ID NO: 33230 - DNA, 201 bp, Bos taurus
tcctggtcatcagtagaccctcataccaataggataaggaccagatacctaaacgtggcaaacgcaccctgcacagatttggcaatggcttcatcatacartaaaaagctgaacaaatgcaaaatcaactaaccttacatctgtaagagaggtgaggtcactgagcaaaccactgccctcaacactggagaggcagatagg

SEQ ID NO: 33231 - DNA, 201 bp, Bos taurus
tatcaacgcagaaactacctcttctagacatcctgttatataagaactattcttaagccctgaccaattaagccattttctatgtcttgttttgatacccrccaccaaaagcttccctggtggctcagaggttaaagtgtctgcctccaatgcgggagacctgggttcaatccctgggtcgggaagatcccctggagaagg

SEQ ID NO: 33232 - DNA, 201 bp, Bos taurus
ttggccactgccatcatgtcaccacaactgggcgacccagagttggagagaagggaaaatgaccagcacactgcaaagagacacagagggagaaaaaagcrgtggcctctgggaactaggcagcgagagaggtgggggagtcactgagtgcatgactggctggggtggcgtctggggcgtaaggtgggggagacatgggac

SEQ ID NO: 33233 - DNA, 201 bp, Bos taurus
ttatttaaacgttaaatactttctgtgtttaaggtgctgactgggcaacatacagcaggaaatgtaaactgaggaaaatctagtgcctcctcccaaagacmattggaggcaaagtaaaaaatgatagtagatgacacagaatatgttcagtaaccaaaaggttcaaaggagagagagaagaccatgggttagataaatcaa

SEQ ID NO: 33234 - DNA, 201 bp, Bos taurus
aggttctcttaaacatgtgttactgtatttcccaattgggattttaatggttgctgttttaaatttaaaatattggagtgaaattacgtatctgcaacatygtctttccttttagaaacagaatagatgctcactttaaagattgattctgctggatatattttgcaactagttacctaaatgaactgtcttactacatct

SEQ ID NO: 33235 - DNA, 201 bp, Bos taurus
tgctgatgactggggtgggttgttcagtcttatcatcacgcctgacctagttgtgcagctgctcctgtttaattaatagacatttacataagctcttttcycccagcaagctttataatggtcgtgttggttatctcctttcgctctgtgaagtatcagcagtgctatttccatttccatatcaaaatacagagagattaa

SEQ ID NO: 33236 - DNA, 201 bp, Bos taurus
tgtctgtcttctgcaaggaggggttcagttacaatctattttgctccttcactaagcttgtcctccagtctggcctttcatagtaataaaggtggtatttraccctatacttgtctaacatcttgtttttgtggtttagtcactaagtggtgtctgactcttgtgaccccgtggacttggggacatagccagccaagctcc

SEQ ID NO: 33237 - DNA, 201 bp, Bos taurus
tattaaaaccagctgtctctggctttccagattctaggcttcatgtcttgcaaccatccaagtccatagtttagctttgtgagcccatgcctcgaatttgrtcctccatgtcctatgactctatatatgacaggaggaagccagtagggaaatggaaaatagcctttattccagggtcttcgagcagagatggactgagaa

SEQ ID NO: 33238 - DNA, 201 bp, Bos taurus
tggtaaacattagcaaagagaagccttgcaaggagtttattttttctgagacagatcagtttaagaaacaacagtgaaggcttctttaccttgggcccacrttgacttcaacctgtaggaacctgagagaaattcaggtttactcacattttatctggtcaaaaggcagtcttttcttagaactcatcttgagtgcaatca

SEQ ID NO: 33239 - DNA, 201 bp, Bos taurus
aactgcaagtggaagtagtcattaagacaagctcaatcaccaccaaaatagaccacttttcaacttaaatgtgtttcattattggacactataataaacckgccctgagtaacaataagatcacttgcatttagcaggcagttcactttctgagaaactccttacctttccctctagtctgttaatgctacaatacctgat

SEQ ID NO: 33240 - DNA, 201 bp, Bos taurus
gtggacacagaatcttgaaaagatgtgaatagtgcttggtctatgccggacttattctaaatcatgaattggggaaaacacacttaaagagctcagaccakagctgtgagtgagatgtgtatttctcagacaatatcactggggtttgaaaggcatgggatgcccctgtggaaataacttggagaaatgtgctagagattt

SEQ ID NO: 33241 - DNA, 201 bp, Bos taurus
ggcctaagatgtgaattctattagcttggtagactctgtggcgatgatccactcactacctgtgcttggatgtggcagcctggcagcattagtggtctccratcttcaccctcccttaggccccggtcctttgccgtgtgactttgcatgtggaggtgaagtatatatccttgcttcttgattaaggccttcggctggcag

SEQ ID NO: 33242 - DNA, 201 bp, Bos taurus
ggtttttcctaaacagcacatcatccaaaaggaacttagttttgtatatcgctagcattgtacctttgctgacatttaagtataaagtctccatagtaagyccacctatcaagcaaaaataaggaacatacctttttagggatggactctgtggaagatgaaagaatacagtgtctttattctgtcctcctgcttggctga

SEQ ID NO: 33243 - DNA, 201 bp, Bos taurus
gcctttgctctagcagacctcgccacctggaacatctttttctcaggttttctaaaaactgactcttcttcactcaggactttactcaaaaatcatctccwaaacagggccgtcctatctaaaagagcactgcacagccctttcactgtattttcttacactgctttacttttctaatgatcccttctgcttgatattatg

SEQ ID NO: 33244 - DNA, 201 bp, Bos taurus
cacccccctcaaaactatggggccaaaaacttgtgacactatttttttcatgtataagccactaacgtggatatgtattcctcggaggcgggcagataccygtgactggccgaggtttaggagagtttgcacgtcaaggagtttcctggttccctgtctagtaatctgctctgctgcccgggagagtaaaccacagttaat

SEQ ID NO: 33245 - DNA, 201 bp, Bos taurus
tgttctgaatcagcctttcagcagtcccatttagtagttgtgtagctgcaatattttaggtgattggtgggttgtaaatcacgtgtgtgtgtgcacattcrtggcaaatacatgcacacccctaggttaagttcatgatttaattatccatggttgcaccatgttatcatagtccatgtggctacacagagcaggaaatga

SEQ ID NO: 33246 - DNA, 201 bp, Bos taurus
atggccccacccatcaaaacaaaatccagtcctccttcccccccactcaccaccaccagtcagtctatcctataaggaagcttccataaggtctcttatayttctccagacaaatgaaaacaatcattgaaaactaagcaaactgatcacatggaccatagccttgtctaactcaatgaaactatgagccatgacgtgtag

SEQ ID NO: 33247 - DNA, 201 bp, Bos taurus
ttataataatttgcaggcccagtgcaaaatgaaaacgcagagcccctttgttcagaattattaagaatttgaagatagtgacaacagaacatgaaagcagrgatgaagcccctctaagcttgtggccttgtgtgactgacagcatagtcatacacccatgaaggtggcattgtctgtggttctttaacaacctcactcatt

SEQ ID NO: 33248 - DNA, 201 bp, Bos taurus
aacaccctgggctctttgctcttaattttttttatcatttactttgattagtcttggattgttttttctactgatatatctcttcctctttttgtgtaatstaacattatatatatataaataaaatatataaacttagatacgcattatacgtatattatatatatatattaaatcccagaagtttaacaacttcttaaa

SEQ ID NO: 33249 - DNA, 201 bp, Bos taurus
actcctaaccatcttacttttggaaaggagttttcccaagtttcagctgtccaggggcattactgaaagtgagcaaaataaatatggatacgattagagcratttgtacctacttactttaacaagttccatcttattttaaagtatttactatctttaatggattgtaagattgttgaatgaaaggaaccatgttttaga

SEQ ID NO: 33250 - DNA, 201 bp, Bos taurus
tttttgttgataaaacaaaaatgcaaaaaagcaagagaaagcaaatacaaggcgtagcttttttctctctcagattccccagagagaatcccaccagcgaygccacatttaccggtcaccgccctgtagtaacactgtctcctagagtctcgtacgaaaatgatttctcgagaactttccatgaggctaagcgctggcctt

SEQ ID NO: 33251 - DNA, 201 bp, Bos taurus
tggccagtaaatgatatgcatgtaacttagaaaacaataacataactttcaagtaagaattaaaatagttttttatccagtgctttttgaaagtgcaatgmaaggacagcctatgtacaaacctgcatctttttataaaggtaaagatttaatgaactggcatgtacttcagtagtcagaatttgattggttgttgactta

SEQ ID NO: 33252 - DNA, 201 bp, Bos taurus
aagcccgagggaaaggagtagggcccagctgggcttggagtcaagaactgacaccagcaacacgtacccaaccttgttatctggttagaggacaatagctrgtgctcaggcaggaagaagaccctgacccaggtttgctgtgttaccagacaggtgtgatggaggtcaacaaaagagtgacacctgactgctttggatttt

SEQ ID NO: 33253 - DNA, 201 bp, Bos taurus
gataattataaatatctataataatgtgatgtgagcaaactctaaaagagcataaagttcccttttgaaattgctttcatgtattgtactataatatactmaagtacctaaacggtagtttgggggtaaattaaggttatatacattttctagaagtaaaacatcttttgatatcaaacctagtaaactagttaaagctga

SEQ ID NO: 33254 - DNA, 201 bp, Bos taurus
aaagaggaaactggaggaaaagggatataaaaaatggagtattcattcttccaccatcctccttgggatgttagtttaggcccttgactaaaagtcactgytcctttcaggacatctggattcctgtaagtattctatcctcccatccttaaaattgagtggtgacagtttagccatggttccccccaactctgctctcaa

SEQ ID NO: 33255 - DNA, 201 bp, Bos taurus
tgaaatcaagttgtcagccaggcctgtgatctcatctaaagtttcaggttctctttcaagctcactggctgttggcagaacacagttccttgaagctacargactgaggccctcagctcctacccaagtttgactgttccctgtctccacaacttggcattttacttcttcaagaccaaggggaaaaagacacttatttta

SEQ ID NO: 33256 - DNA, 201 bp, Bos taurus
cctctgtccctgggattctccaggcaagaatactggagtgggttgccatttccttctccaaatgctgttctgaacatggccaaatccaatggtcagttctyacttctcatcttacttgtccagttcagttcagtcactcagtcatgttcgactccctgcgaccccatgaatcgcagcacgccaggcctccctgtccatcac

SEQ ID NO: 33257 - DNA, 201 bp, Bos taurus
aggcggccactggcatggcaaggacaccattaagccaaactatagatgccaccagggcatcctggactcctggtgaaaaaaggagccaccatctcggccaragtaatagatgcacctaagcatgaggtggaagagctgcttttatacagctggggcaggtaaaatatttatgaatcctgggtgatctatatgtgcttcttg

SEQ ID NO: 33258 - DNA, 201 bp, Bos taurus
gaacttagtttctctatttcaatagaatctcaatttcctgacttttcaatgtttatgctgcttaacacctgctgtatttttaaagaaatggccactaacayattttactaagacataacttagggcgagtctgtctcctagttaaagaaaataacttgacactacctaactgaataaacagaacaatatggccgctcccat

SEQ ID NO: 33259 - DNA, 201 bp, Bos taurus
tttaatcttagcttaatacattaaatgtggattttaagattatttcaaatattatttcatccagagtcctcagtgcctaagtccaaatgaacatctcaaayaagaatatcagatacacaggcatatctttgtagagtaggaaggcaatttttttcaaacatactctgcttacagagagacgggaatcccaaaatctttgaa

SEQ ID NO: 33260 - DNA, 201 bp, Bos taurus
aggtaaaaacttttttacatatcagttgggttgatgtttgcataattcagaacatggactcagtttaatcatatcccaacatataactgtgcaagaagctmtaagaactcaattcatatgtgagataatatctatgcccaagctacaaagagctgaaatgactgaaatgtcaatttacctatgtctaataacttgttttta

SEQ ID NO: 33261 - DNA, 201 bp, Bos taurus
ttttcccattgttttccttataacaggtcaccagttaaaaaataactacttgttagttattttctgtcttctctcttacgagaatatcttggccaaaatayaaagaacttgcctctttgaaatgctacagcctttttacagatagtaggcacttaaatcctcagggccactaaagctgttggtataaagatggtgcttaat

SEQ ID NO: 33262 - DNA, 201 bp, Bos taurus
ccttccccacattttttttttttttgatttggtaaaaaaatatatcagtggtatatatcacactgggcagtaggtttaacagactgattataagtcatcayatttattcaccactttttaaccataaggattaatgtgttataatgatgccaggagtgtttgggtctacaaatcacttgatatgagtagatttcatagtaa

SEQ ID NO: 33263 - DNA, 201 bp, Bos taurus
ggccccagctttccctactccaaagcactgcgcctgctctcgcagtagacaccagggatttattgtctagctggactggagtaagggacagggtctgggtrgggccacagtaaaatccagcctttttctacagaggctccaggagaccaccctgcttccaaaagttaattctggcctccaacccagctaggcttaaccctg

SEQ ID NO: 33264 - DNA, 201 bp, Bos taurus
ttcatagaaatatatctctaaatatacagtaagctgtccaagatttcagattttacttcttctctttgaatggccacatcaaattctgtctaaattgtttktttttttttttaagacaaacccctaggtttcaattttcagtgttctatattcagattaatcatgaaattgtgtgatattataagaaacaaataagataaa

SEQ ID NO: 33265 - DNA, 201 bp, Bos taurus
tttaccatgttagtcaatatatgttgatagtatctcactaaaatatactttataaaagctgagttaatcatataaccaaatagttttccatacatggcccyttgctaatatgctctaatatagcatacattttatcttactgagtacataaactactctgtgttcttcctctaatcatcatttgcccaagggccctctcag

SEQ ID NO: 33266 - DNA, 201 bp, Bos taurus
tgccatcaaatttggaaaactcagcaatggccacaggactgggaaaggtcagttttcattccatatcaaagaaggcaataccaaagaacaggaaaactgcyatacaattgaacttatttcacatgctagcaagttttaatgttcaaaaaccttcaaatatgtgaaccaagaatttccaaatgtacaagttaggtgtagaaa

SEQ ID NO: 33267 - DNA, 201 bp, Bos taurus
agggcccctggcaatgaatgtgggtgattctaagacctgaaggccacccctgactatagccaaaggaaatagccaaagcttgtcctacaaccgcaattctrcaaccataagtaactgaattgggccatcacttgaatgaggttggaaatggattcttactcagagtctctagaaaggagtacaatcaaaaccttttttcaa

SEQ ID NO: 33268 - DNA, 201 bp, Bos taurus
cccagttatggttttgaatataaagaataagagaaaatgctaattttctattcagtccatacaaatcattaagtatgtttcctagtatggataaatatttrttttccggtcctagatttggcagaaatgctgccactctgaaaccatctctgttttagtaacattcttctttcataaagttctcttagttctaacactatc

SEQ ID NO: 33269 - DNA, 201 bp, Bos taurus
gacatttgagctttacaaaaccaacaaaaatttataggccaaatgagtcttctatttttgatacttaaagatagattcaagagatatattgcctaaccaayatttttactgggccatcacatttttattagcctcatccactctttctaatatcacaacagttgctcgagtggcaggaaaaatcatccagatatcaccaga

SEQ ID NO: 33270 - DNA, 201 bp, Bos taurus
ctcctgcctcctttctctaaccatcttctagagcaaaaaccaccaaattaacttcttaaaaacatcatctctatcatgtctcaaattcaaacaaactaacmactggtgcctttcactttacttacagggtcaagtttagatttctcactctggcattcaaatccacctaatattggattctctaccatctctaccaggagt

SEQ ID NO: 33271 - DNA, 201 bp, Bos taurus
acatctgtatgctcacaaaagccctcactggccctctctggccacagctttcatgaccacagaaggcacgtttcctttgtcttacccttctctattcctcmtcagcttctgtttccctggccatccacatcagagaactctgttgggattccctcaccgtgcggcaggagcctatctgactctattcaagataattttaat

SEQ ID NO: 33272 - DNA, 201 bp, Bos taurus
caagattactcccgggcctgcggccaccgactcgctcgcacttcaagctcccccctccccagacaatgtaagggcctggccgtaccgagacagccttctckgagccacaacaccaccaccccgcccccttaagatgggcgtcactcgaactccagccccggagcgctggcctagatggctccgaagataagtcccggaggt

SEQ ID NO: 33273 - DNA, 201 bp, Bos taurus
ccgtgaccggcagaggtgcagaggcagctgatgcaacctgagctgaaccggaagtccctgtttcctccaccgtctctgactggagaatcggagaaaccacycaggccaattcaacaacccttgctggaaacccagacagctgttttctggggctctctaaaggagacagtcaaacctcatcgttgctgtcatcattatcat

SEQ ID NO: 33274 - DNA, 201 bp, Bos taurus
gccagttttagaaaggtatgctggcaataatttgactccacttcacacaaatcagaattctactacagattgaaaggagccatggcagctagaaattattytttaataggattttaaaaaatcacgttgctaatggttgaaaatgtaactggtaattaaagaatggttttaacaattttttttttaccatattttacaaga

SEQ ID NO: 33275 - DNA, 201 bp, Bos taurus
ggcgccaggcctgggctcgggcaccaggccactgaggctgagaggccactgaggctgagaggcgcgctccggcgggccgggcggccggcttcatgacgctmttccacttccggaactgctttgccctggtctactccccctactccaccacctacaagtacagtggcctgtctgagtccagtgccttctggaagtgtgtcc

SEQ ID NO: 33276 - DNA, 201 bp, Bos taurus
ggaagacataagagaatttatagtatgctttaactggggattgggggtggggggaacacctcctcccagtctaataaaatttggtagctcggggtcacttyctaataggtgctatttcctctattttaataaaggtattttaacacctgaattctatgccagataccattgtcattttttccactgactgactcaactcaa

SEQ ID NO: 33277 - DNA, 201 bp, Bos taurus
tagcaccttgttcttggacttctcagtctccagaactgtgagaaaataattctcagttgtttaagccatccagtctatgatatttccttatggcagcccargcagactaatacagttattaaaaccaaaccttgctcaagcactgcattaccctgcagagtagaaagagaatagccatagtcaaacaggtgggtgagtcaa

SEQ ID NO: 33278 - DNA, 201 bp, Bos taurus
taagggcatatcatagtttaattaacagcatttttcttttactggtacatcataaaattgatgacatcttaaatcgagtgtaatatggtagttcatttagkgagagttactggcagaataactctgcgtgtctaaaagtatcattatttcaccctcactcatgaattctgatcatggaagtttaatttgacaatcatcttc

SEQ ID NO: 33279 - DNA, 201 bp, Bos taurus
gtgttctcaggggaacaaaccacttgtagttgaaagaataacaggggtgcatctctatacagaacaatgaggaaaggcctcagaaagaaggaacagctacrtcaccagcaaagaaacaagaatagagaggaaagcaggcacaaatgccctgaggccggtaatatatgccgctaatgatgaaccactgacaaggtctgtagg

SEQ ID NO: 33280 - DNA, 201 bp, Bos taurus
gtcagctggatgcattttgaatgctttttaaatactctttaatttgttgttctttttaatgacctgattgagaattttcagggtctgctaaaggagcattktatctgtttcttcacactatctcttttcttctcatttccttctctcctctgttttctgcctcctcttctattacataaataggtaggcccatgccatatg

SEQ ID NO: 33281 - DNA, 201 bp, Bos taurus
tttgtcaaagcattcaccactttgtaatggattcactgctataactattgctgaaatcttcctttggacatccaagcgaaagagtttgcagcgtatatgtrttctgttggacttacattagccaagtttatagaaacctctctctctctaatatatacatgctaaagtgtgtactaccagatggaatttcaggtgcctaca

SEQ ID NO: 33282 - DNA, 201 bp, Bos taurus
gttttaacctacaagtataagctatatggcagagtagaaaaagaatataaaaagaaatttggagtcacgagctatggctctaaaagggacagtaaagcatktaaccctgagactaatccagatacttaatttctttggcacaggtgtcaaatcgcttcagtcgtgtctgactctttgcgacattatggactgtagcccacg

SEQ ID NO: 33283 - DNA, 201 bp, Bos taurus
taaaaggataaaaatgagtgaataagcaaataaataaagctactattaatatcagtttcagattctttgctgaaagctgactttgtgaggactaaggcctyattttttatagttgaataatactccactgtgtgtatatggatatggatatacatatatatttatatcacaacttctttggccatcaatgaaggacactta

SEQ ID NO: 33284 - DNA, 201 bp, Bos taurus
cagggaaccctggcatgctgcaggacatgggtctcaaacagtcagacacaactgagcaactgaactgaactgatgtacatcctcccatatgctttctatcrcctccagattacttataattcagatcacctaatgcaatataaatgctatgtaaatagttctctgttccaaggaaattcaagtttcgcctttggaactttc

SEQ ID NO: 33285 - DNA, 201 bp, Bos taurus
ctaaaacccctgctgctggaagtaggaaaggcaaagcacatgatattaactaaggaagtcgataaatatctttattttagaaatgttatttggattatacracctaccatcttgaagatttttatcactctataaaatatggtttaaataaaaataattcctatagtaatcagctagtttaaaagtctcaaggcagcaata

SEQ ID NO: 33286 - DNA, 201 bp, Bos taurus
cctctgaaagaatctgccttataagaatgtttttgtatgcctgaagcctcatgccactctctatcagtctgacctggggccagggagaagagtttgagtasatgagatcagccataggaatgtactacaagacaaacccctaacaaaatctggccaccaaggcttgtctgagccttcctagttggcaacattcaaacatca

SEQ ID NO: 33287 - DNA, 201 bp, Bos taurus
ggcatttggggaatatgatcctctgaagcagtaaagagcttgccttgttaaggagttgaaacaagaccaggatggctgaggcctagcagacaggccatgawaaaacgtgagggtttttcctagagcattgagaagcaattgaagatagttagagaaatgatttacatggcctagttacatctggtatatttttcttagttc

SEQ ID NO: 33288 - DNA, 201 bp, Bos taurus
ttcttgcctgcagaatcccagggacaggggagcctggtgggctgccgtctatggggtctcacagagtcggacacgactgaaatgacttagcagcagcagtrccgtataatgcacaaggacttttggactctttttttttggctgaaagatctcattgctgaatgtgctgatacagggaactttcccatggctacaggaaga

SEQ ID NO: 33289 - DNA, 201 bp, Bos taurus
ggcatccatattttttcacactcctacatgatttaaatgtacattatattataaatatcatattttattatatattatataatatacattatattatagcytgagaattgtgattcctttcacctttagacagagatattaaagtattttcctatctcccaaatatctctggattttttttctttttcttttttaaattat

SEQ ID NO: 33290 - DNA, 201 bp, Bos taurus
tgtttctctgactggtttaaggaactggctcccagcccccgggagagaagctgaaggaagagccatggtaccttgggcagaagcaaggctgatgggccccygggaaagaagtgtgccacacacctctgaggacagagttatcctgtcctttgctgagctgttgttgttcagttgctcagtcgtgtccgactctttgcgacc

SEQ ID NO: 33291 - DNA, 201 bp, Bos taurus
cctgtagagttctcagcaactatatctgagtgactctgaatactcttaaaggcttttcttgatttttctagagtgagattcatgccactgttttctatttmttcctgtctttcttgttgcttcacctctgggattgaatctagtatagaatttttatatagcattagtatttaaattcttgaatgttcttagttcacaaga

SEQ ID NO: 33292 - DNA, 201 bp, Bos taurus
cctccctgtagtttggcctaaggacaaactaaggtaggggtaatgggggtgatggcaacctccttcaaaaggactcatgccaggactattatatttggtgyccctcatctcatggagggccactgtcaacccacacctctgccagagacttctgaacactcctggacacttacaggcaagtctagctcagtctcttgtggg

SEQ ID NO: 33293 - DNA, 201 bp, Bos taurus
actttatgctcacagaagcagctagctaatatgagtcagacaccagtttaagtatcctcagaactcgaggagatacacagaaagttctctatgtagatcarttaaacccaggtttgattcctaggtcgagaagatcccctggagaagggcctggaaacctactctagcattcttgcctggagaattccatggacagaggag

SEQ ID NO: 33294 - DNA, 201 bp, Bos taurus
tcatgtaactgaataaacagaatgacgctgagtcgatgctgccatgtctaccagcacactgtgcaaaagagacgaatgcaaacttggtaggcagacgagtrtgggatagagttgagttatctaggtttacttggataaccaggaccaaattcctggctttgtgtttttgcataatacttgcatttatttttaagatctatg

SEQ ID NO: 33295 - DNA, 201 bp, Bos taurus
acaggaactatagtctactgtgacctggagaggttgtagaaacttcatgaaagaattggaacttgggcagcatatttaagaatggacaggattaagctttyaggtaagggtagcgaggaagaaaggcataggaagtgattttgagcatgagagcgagttgtgatgttcaagatagatgactctcccaatatgataaaggac

SEQ ID NO: 33296 - DNA, 201 bp, Bos taurus
ttactattaaagacaattgagattaaagggaagaaggaaaggagacagctgggtataattgtctatattgatcaaggtggtttgttcctgattctcacttmcacctattatgcagagcactggttcaggaaaacactcctctccagagtttgcatattcttttccagtcaaaactagaacattattcgttactcactaaac

SEQ ID NO: 33297 - DNA, 201 bp, Bos taurus
aactgtctacctacaaggaggccaggaatactggttgcacttccttctctgatctgcagtaggagagcatttggacacacacatctttagctcatttctcrtgccttacaggcctctctataatgcatctttcctacatcaaagtggaattttccaccctttcctgcctggtttcctgatttaacaaagtttgtaaaaata

SEQ ID NO: 33298 - DNA, 201 bp, Bos taurus
ctgtggggtgtagcccaacaccccagtggacaagcctgccaggaggctgggggagactcctgtgagctccaggatgtcaggaaataaggatggagaatggraagttacaggggtaattccaaggcggctgcccgctagcttgtggggccctgtgacagctatatctgctatgagaaatgtctttctcttccattatgttgg

SEQ ID NO: 33299 - DNA, 201 bp, Bos taurus
cacaccctgagcacgttgtctgagtttcgtctggactgggttgatggttttttactcatactatgattttgccctttggtaagctgagttcgttaactgartctattttgcctccttcactataaactctaactagttgcctcagggtgtctgtgttgtgcaagtaattcaagggctggaggttgtgcgtttttatttttt

SEQ ID NO: 33300 - DNA, 201 bp, Bos taurus
attcctctgtaactcactttccaaaatatctttcaaatctaagcattttctccacttccatggcccccaggtcatccacaatatccttctggctgacctcmcagctcccctgggcccacccctgcactcttcacgtcatagccaacagacacgtctcgaggatgaactcaatcaggccatgtccccagttacattttctca

SEQ ID NO: 33301 - DNA, 201 bp, Bos taurus
tgggggtgataagggcaggtgcattgtggcctggagtgtgtgaactctatttgggaggtggttggggtgtgggcttgaggcactggacaagaaagggacastagcagctcctaataagggcctcagaactggccaaattaatgtgttacaaactatactacactcaccacggccacagctgctgtggcgggctgcacagtc

SEQ ID NO: 33302 - DNA, 201 bp, Bos taurus
tcctgtggaagtggacagagtgcatgagagcctctcgactatgtctgagacgtcttcccacgactccttctatgactcgctctcggacctgctggaagatrgcgagaatgcggccttcttccccgggctgtcggccttcctcagccaggaggagatccacaagagcctggatctggcccgcagggccatcgccagctccga

SEQ ID NO: 33303 - DNA, 201 bp, Bos taurus
catagagactgaaagttgaggggacgattcatgcagggcaatgtcaaatgcactcgcctgacacgggctagagaggagtcctcagcatgcccagctatgaygaggccaattagaagacttcagatcaagcaatgcttaagccacagtcagtcctcaggagtgaggacctggattgtgactgtggagagagcaaagaggaag

SEQ ID NO: 33304 - DNA, 201 bp, Bos taurus
atgagctagatgccacccagatgtagaccaggcctcagacctagagctggatttgggtggaactctgtgtctgagggcgtccaggcagacaacaggcatcrcggacaggccccatctgggtgtatttggggaagccatcccaccaggctggctctgtgtggtgggtttgggtgggagattggcctgagctgaatggccttt

SEQ ID NO: 33305 - DNA, 201 bp, Bos taurus
atgaggcaatgtcctttgccaggttctggccacactcctgggtggacagtcctggtggctggtccacgctgaccctgcgggcctctgagggaggggtctcygctctccagggagggcgctatgattatgaaactccgcacctgaagccagcctggggtctcttctgtctgaggtttttatgaggccatgatcactgaggcc

SEQ ID NO: 33306 - DNA, 201 bp, Bos taurus
aatgacgggtacatgggatcaactgtcccccaggatcttgcccttccatttgttcccaaatcctcagcagacagcttctcctgaagtcacgtctggccctyccgccccagggatgaggcactgcagcagatatccaccccacagcacagagtcaccgcctcccaacctgctggccagttccggccaacacgccctccccta

SEQ ID NO: 33307 - DNA, 201 bp, Bos taurus
tttcttctctctccatggccacatgcccagagaggagggtgtaatataagaagcagagaaaaagatttgagatgggaagaaatcgcgtgaagggagcatcyggccaagatgcgggtccagacagcaagggaaatgggtgccagtgttcacggtgggggcacctgctgcaatctctcctgtggtcgggctgcaggttctctg

SEQ ID NO: 33308 - DNA, 201 bp, Bos taurus
aagtaatttaactacaaatgtgtttaattaaagtacttcctccctccccccctcaactactgatcagtctcgattcctggcctcctgggcgctcagtctgrctcaccctaacccaggctgaatccacttccttctccagtcactgatcagagccgccaggtgtgcacgcttacgacaggcccctctgcttcccgcagaggc

SEQ ID NO: 33309 - DNA, 201 bp, Bos taurus
acggcgaaggccaccaggcacaccaccatgtagtacacacccatgtcacccgacgtgaagaccacccgcagcgtcaccgtgttgttcacagaaccgtgcasgttggaggccatgcacgtgtatctccctcggtctgagaaggacaccttggtgatgttcaggaggccgtcatgcatctgccactttcctgtgggagaagga

SEQ ID NO: 33310 - DNA, 201 bp, Bos taurus
agaaatcttccttggggagaaatcttccttgggtgtggcagaatgggtgtgccccattcctgtcagtctggttccatgatgtactacaggtacacctgtgmgttttgacagcgaggttttaaatttaggaaatccacagtcatcactttgacactttgaggagtggctgcttgtcacaatgagttaaaacatgcttatgag

SEQ ID NO: 33311 - DNA, 201 bp, Bos taurus
gctcaataaatctttaatccaattttctattaatgggtggggctgtgttccctcactgttgtttgacctgggaccaaactatggtggaggtaatgaagacygtggcctccctcaaaaggttccctgcaagcactgccatactccttggccccgacactgcagcaggccaccacaaacccacacctctgctgaagactcctg

SEQ ID NO: 33312 - DNA, 201 bp, Bos taurus
agggtcttctccagtttaatcccctttaggctaggttttgagaaccagaggttctctaattctctgatctcctagcctcaagcatcctaccagggcctatraaatcctcttcctcctcaggcacactcatctgcgcgccgtccatgcagcaggcatgtacacctttgggccgtggcattggcttcggacagagctctgcaa

SEQ ID NO: 33313 - DNA, 201 bp, Bos taurus
agaagagaggagagactcaattttggctcctccttttatttgttgtttctcctccccctgaacccgccctgtgtaaaaaaatgggaggctgtttgcttcayctcaggcactgcctccagtcctcaaccttcttttattttatttttgcaggcttttcccttctctctcttttgctgctgctgctactaaatcgtgtcagtc

SEQ ID NO: 33314 - DNA, 201 bp, Bos taurus
aagacttaatgtctttcgttattgttaagataaaatattctggctatatctggacactgcccgacactctggggccctcaggggcagctgcaggggccacyaacatttatctttaagaataaaggtaggaatgcagttatctgaaatgaacattgtgttttaggagacttgcacagctggaggagtcaggccatgagagac

SEQ ID NO: 33315 - DNA, 201 bp, Bos taurus
tgtgtttctctgagtcatcccacagtggaattgagttccttttcataaactgagttctgctagatgacctgctttagatgtggagaaggccctcaaggaasgtgtgagatgcagggaatttctcctttctctgatcctcctctacatagagtccaaaccagacagtgaacatttgcatttgaaagtaaaggaagtatgtgg

SEQ ID NO: 33316 - DNA, 201 bp, Bos taurus
ggacagaagagcctggtaggctacagtccatggggtctcaaagagtcgggcacgactgaacgatttcacttttcactttcagacatggccatgaggataaytgcacaataaaaattcaaccatggggcaaagcttatgcaatagacagactgaacaagaaagttgtattcacaacacagagtactaaccactatactatca

SEQ ID NO: 33317 - DNA, 201 bp, Bos taurus
ccattaacttacaggagtctcccacatttttttctacttacagtcccagagtgggattacctgtttgatcacttactttgtcctttgctctgtccctgtckaaaccagccttcttgcatgaccattcactatcttatcttgcaaaacatatactgggagtgctgaaacattatggaaattatgtagttgttaatgaaactc

SEQ ID NO: 33318 - DNA, 201 bp, Bos taurus
tctcttcatgtggtgttgatttctcagtgtgtaactcggccctcaaggaatagaaaatattttataaactgtatcattaagtcagtctaagctcccaaaaraggattatctaaaagggtctctgggggtaaatgttttattattttacgtaattggaatttaaggtggctcaaatggtaaagaatttgcctgcaatgcagg

SEQ ID NO: 33319 - DNA, 201 bp, Bos taurus
gactagtagataacccagttttaaagaagatagaaaatcagcaataggatctcatgataaaatattctattaatttatgcaggctttcaccttgaaatgtratctgtgaaagatcaccttacttgtgttttcatgacttcatctaatccaaaaagtaaatatgatgagtttacttgctaagcttttgcacatgagattata

SEQ ID NO: 33320 - DNA, 201 bp, Bos taurus
tatgccactaaagatgctatgtggtttgtctgtttcctcatttggaattcagataattcaatgataataataatgatgatcgtaataataatacctcttgyacttagtaagttgaagcagatggaaatggaaagcccaagctgctattcagcagagaatcactatgcaaatattccaacagcttgtgtgatttttcaaact

SEQ ID NO: 33321 - DNA, 201 bp, Bos taurus
ttattcaattttacaccttactttgtggctaccttaaagatcaatacttttcaaattgcatataaaaaataatatttaaaaaaaaattagatcatttgaaytgtaaaaattccttcttttcccagagtttatgagatccaaatattagtaccttttgtgtctatggcaggctcccctggtggctcagctataaaaaaaaat

SEQ ID NO: 33322 - DNA, 201 bp, Bos taurus
aaatgaaattgaaattgagcgatgcccccttttcctccttttttgtaggcaagaccctagcctccatgaccttccctgagtccccaaaggcagatgcaaayagttgcttaaacaagggccaagaaaccacctgaggcgagattaaagggaccagagaatctcaagattaggagaccacattaagccttggagataccataa

SEQ ID NO: 33323 - DNA, 201 bp, Bos taurus
gtgggtacaggccttcaaagccctacttgatctagaaatcttttagacccactgtaatagaagggataaggtaccattggcctgctatggggagagccacrgtcttcccctcagcccttcctgtgacgacagccctcccctcacaggtctgagggccagtgtggagatctgaccagctgcctattctggttgggcaagcct

SEQ ID NO: 33324 - DNA, 201 bp, Bos taurus
cagtatctcattgtgcttaactcaactgggtaacttccctagaaacagttgcagaaagtaaaggggagtatttctgtcagttgccagcatccttctcttakattgtaaccttcttttcactgaaaataaatagtaagatctctcttttttttttttttaagtttgtttccctttgtcctctgtcttcaacaataaaagtta

SEQ ID NO: 33325 - DNA, 201 bp, Bos taurus
tgctcgtaacagtacaaatacacattcctattttcctaataataaaaaaccgcgtcctctgactgtgaaaaggagaggacagatgaaaggttttgttacamctggtggaccttggctgctggtttcaaatgcacttattccctcctgtgactggagttaagaccccttgaaggtcacctccgccaagcccagactctgtct

SEQ ID NO: 33326 - DNA, 201 bp, Bos taurus
gcctggatttctgttgatcttttttgacaaagaatcattaactgtgatgtatagtattttatatggaatttgtagtaatttctttgtagatgaatgataayccagaattcaacaaagtagaaaaaaggaattacttctcaatttgttggcatttagttaatagggctaacgatcgagtagtacgtttgctttaactataat

SEQ ID NO: 33327 - DNA, 201 bp, Bos taurus
ggaaatggccctgagctgggctgggtgtggggctctgtgaccgggatctgagggcagtggctttgggagggaggggctgcccaaggctgagctgtgatggrggctatagaagtcccaggcccaccccagagagcccggatcgcaggtgttctcctggggagagggaggctgaatctgggacctccgcctggacagtcactc

SEQ ID NO: 33328 - DNA, 201 bp, Bos taurus
ataattgttttcagagcataaatctaattttaatggagggaatgtaattccgtctctacctcttacaccttgcaggttattttggcagccagaagcttttycccatagaatagaaatccacccaccactcttcccctttgtcgtgggcggtccagagtggcagacttcacggctggccactgtcactgtcctcattgctga

SEQ ID NO: 33329 - DNA, 201 bp, Bos taurus
ccctatggtggccaagttatcttacctagaaatagatttaaagaacagaaacaggtttctgacaataacaatttattttagatttatttagataacatacrtgaaaatacctaatgcaatccagaagggctttaggaaaaaaccaacttacagctgtattgaactaaaaaaaaaaaaaaggtaaagtaagagctttaaaaa

SEQ ID NO: 33330 - DNA, 201 bp, Bos taurus
atggggccgatgcttcacaaacctgcccgtgtcctgaggagtatgtggaagttacacttactctccgtggacagatggagtcaggttctgctcatcccgtrtgtcctgtcggccctctgtcctgcccctcagcatcctctcgtctccctgaaggaattcttgtgccctgagtgaaagcgtatctcctgtataaggtctgtg

SEQ ID NO: 33331 - DNA, 201 bp, Bos taurus
gaaactgatgaataacttctttattataaaattcagcccccttcaatggaacccaaattttacttaaagttcatttgaacttgtatcatagtcattagaaytttcttttcttcctgttgtttctccagtcatatagacagacttcaagactgaaactcagcacctagataggttgaaggtatgttatagcgaacctgaaca

SEQ ID NO: 33332 - DNA, 201 bp, Bos taurus
ctgacccatcaccacctctcagcccgatgagccattcaagatgggtacctctgaaaagagttcaggctttttataagcaagtcagtctgtcttttgaaagycttccttttctttcatttttgctatgaacgtacgaaagctggcttctgctctgtaaggaggaaaaccagagcccatgggaagcgacaatgatctcaacgt

SEQ ID NO: 33333 - DNA, 201 bp, Bos taurus
aagagaaacttgaggacaattgtaatgagtatatttaaagcattgaaagatgtgaaatttctcttcaatcaaagtgtctctttgattttaatttcctaacygtgacttaacattatggcagttcagtttttacatctttctatgaatatatttttagtgctttactcagaaaggaataacagtatttcagaatgtctaagg

SEQ ID NO: 33334 - DNA, 201 bp, Bos taurus
gcctcactgcctccacttcagggtttggaggctgtttggtggcctctttccctaaaatataactctctccctgttctcagatttgatttcttaagatgaayatttgaggggaaaaaaaggcaattttactcccagtgtgaaaacacattaattttcaaaaaataggagctgcaattcactatttgcaggcaagccaggaga

SEQ ID NO: 33335 - DNA, 201 bp, Bos taurus
ccagcctgaacaagaaaccaaagttcatgggaaaatgctgaaggagagcaacaagtctgtgttccagagattgggatccagtatgacaaagagagaggatragtgtctggacagaatgggagagcaggccagagaggaaagaaactgtttcaggtatggttcctctggactccatcacccacacatctaataacaatagca

SEQ ID NO: 33336 - DNA, 201 bp, Bos taurus
ctcctgggcctgcaaacggccaccttctccctgtgtcctgacatcgtctttctctgtgcgttacctgatgttaccctgtgtgtcccaatctctggttcttrtacagataataattagattagggccccataattatggcctttactttaacttaatccctcctttaaaaaaccctatctctaaatacaatcacattttgag

SEQ ID NO: 33337 - DNA, 201 bp, Bos taurus
gatcacacacaaaacacactctttgactttttagataagcttgtgggctagtgaagtttgagaaataagatgacagagtttagttcctctgaggacttctyacacttcaaattatttaagaaatgggaaacataacttactttgtttaaccttagaatacccataaaaagacccagatatgctgagactgagctatagacc

SEQ ID NO: 33338 - DNA, 201 bp, Bos taurus
gctggtggactcacaggcgtttccttgaactggcagtgttggtagaccacggtcggtatctttatcaccaaagtaattcctcaagtgtgcagtctgaagtrtgcatggttgtcaatggaatagataactttttacattcactggatgttaatgtggttttgattggaatcgagatctggtctgaagacaacctccttccaa

SEQ ID NO: 33339 - DNA, 201 bp, Bos taurus
gactataaagtcttgactgttaccttcatttgttgacttacttttaattggctactctggcacctggcagctcacctctccagctcagcagagctcctgayaacattaggctccaacttttttgtaatccttcccaaatctgttatttaagtattagagaatatctgggaaaagcaaaactttgaaaaagaattaatcctg

SEQ ID NO: 33340 - DNA, 201 bp, Bos taurus
gtcatatttcttgctctcatcagagcctcctgcctaagagtgtgactctagaactcgcctgtctctcgacctgcaggccagtccaggatctaaggccgtartggtaatgggatgacttagcttcttggaagccccgtctctgaagcacagtcctcgtctgactggaaaaaccacagaaagtcccaggagacctgtgccacc

SEQ ID NO: 33341 - DNA, 201 bp, Bos taurus
cagtgcagggggcctgggtgcgatccctagctggggaactaagatcccgcatgccttgcaacaaaaagatttttttaaataccaggtactctcatgtgttragtggccttcctgtgccagatactgagccagacaccccacaaacactgtcgtgtttgagacagaccacagagcgccaaagacaaggttgcagaggtctga

SEQ ID NO: 33342 - DNA, 201 bp, Bos taurus
gtgaagtcaagtgggccttaggaagcatcactccgaacaaagctagtggaggtgatggaattctagctgagctacgtcaaatcctaaaagataatgctgtkaaagtgccgcggtccatggggcctgtcttagggacttctgaacaacagtaaccacgcgaacagtagacggcaatagagttcaacagtaatgagagaggct

SEQ ID NO: 33343 - DNA, 201 bp, Bos taurus
tgaggcccagactggacataaggaggaaagacttggggaggggagcctctgctttcagtcgaccttgaaccgatttcccgacctcctccatcttgctaacmaagcagcgactgtgtatcaaacaagtcagctctatatctggagagcaagcctccaaaaggacaggtgatgctgtgactgtctcatgggagatggaggagg

SEQ ID NO: 33344 - DNA, 201 bp, Bos taurus
tgtacaccagaaactaacacaatattgtaaatcaactatccttcaattaaaaggaaagggcctgcctcaaagtcaacctggactggagttgatcaaagagmgtctgagaaccacctgcatcagaacgctctctcagcgggtaaattatgcagatccacagagggggccaggacaagacctagatcctctgattccaagagc

SEQ ID NO: 33345 - DNA, 201 bp, Bos taurus
gggcctctctgatgagacaatttacagagagctaactgaagcaaggtggggagccctgtaagctcctgggggtgcattccaggcaagagaaacagtgagtrcaaaggccctaaggcagaaaggaatgggaattaccactggggctggccaatgagaagacgtgacatagctatggtttctcatgaaaaggaagtgaaagtg

SEQ ID NO: 33346 - DNA, 201 bp, Bos taurus
ctatgtgacagaaatggcagcagcttacctcacactgcccctacacacctcatctcttgctaacaaaacactggttttgtctggatatccatttggccacrcactttaagggaagactgagcctatctccagtagcactggcatcacccacaaacttgtgaagaaagcaaattctcagtccccaattcaaagtactaaatc

SEQ ID NO: 33347 - DNA, 201 bp, Bos taurus
atcactggactcagccccttggcaattgcccagctgggtgctgtgacacccatcctctgtccctaccctgccgaattgctctatcgccaagaggccccttyccatcagcctttattcatcaagggtccagctaatgaacctgccctgagcatcatcaaactaacacagagatgacccacagagaatgatctgaaggttgcc

SEQ ID NO: 33348 - DNA, 201 bp, Bos taurus
gactatgatatgcccacgaggatatgaccacacgggatggtgcaaaagaaatcttcatttgtaggaaggaccaaagtcaggaaaggagtagaattacggasaggagacttggaccatacttaagacacatgttttaaggactagctggtgtgtgcgcccatgcatatgtgacaacatgcctcagaacaaaacacaggtgcc

SEQ ID NO: 33349 - DNA, 201 bp, Bos taurus
agctctagctccgcgtccaactctaagagcaatcgatgctgaaacagtcccccaaaggcagcacggaaggggcagaactgagagtggccttgaaaggcccrggaaggttgaaatgggctgtgatgaagaaagtcaacttcctggaggaagttactaagagcaggagtcaggctcaggggccaaagcagaaatgaagaacac

SEQ ID NO: 33350 - DNA, 201 bp, Bos taurus
ccatgccatcgttcacacacaccaccattattatggtcctcgttgtgaaaagcatcattatggtcctcatcgtgatggccgctcataggtttctcaaggartcagtatcagatgctttaagatggatttagaaatgtatcaaaggaaaaattggtaacactcttctttcccctgccagagaccgcccaggcccagaactct

SEQ ID NO: 33351 - DNA, 201 bp, Bos taurus
aaaagcaggtgaaaggaatgtggtggcccagggtgaagaatggaagaagaataattttgactgaatgaatgaattcctgttggtgtgttggtagtgggccragaaatcagtgtgtgtgctcatatggaggcagtgagcatacgtgagttttctttcaagaaatgccatatagaaagccatggtaaagaatggtcttctgga

SEQ ID NO: 33352 - DNA, 201 bp, Bos taurus
aaccctggcccccctgcattgggagccgagtcccaggccctggaccatcatttcagctctcttttgctgcttctctttcctcttgatattcccagaagccygcccctcctctccaatgccgcatcgttggcctctgcacctctgcccaacccagctcccctgcagagacctccgtcaggtcttcccctgtcccctagccta

SEQ ID NO: 33353 - DNA, 201 bp, Bos taurus
tgccagtgaagctctatacatgacaaccattggttccagcccttaccagggggcaaaggttcagtgggtctgaggacagtcatctttgctcagacccaatraacttccttcagtggcccagtctctactgcttcctgtgcagaggccagagcgggggtgctttgagcctggaggcctcagagatggttccagttcaattcc

SEQ ID NO: 33354 - DNA, 201 bp, Bos taurus
gactgaacaacaacagcaaagaaataggcgtgggtgccaaggtgatgagggacgcacttgtgatggttcattttagggtcaagctacctgggccgtgggayacccaggtatttagccaaacattattctgggtgtgtgcacagggtgtttgtggacgaaattaacatttaaatcagtaccaagtaaagcggattgtcctcc

SEQ ID NO: 33355 - DNA, 201 bp, Bos taurus
gcaactgtaaccaggaacccggggccagccacagttctctacccctgggccaattgttctgtgtaatcccaggaggcctccacagttacctggagggcagkggttatttcccccacagcaggaaatctgccaggggtagctttcatcagaaaagtgccctgtgaccaagaaggcctagaggggagaagaccacatcctagt

SEQ ID NO: 33356 - DNA, 201 bp, Bos taurus
tctccaacaatactcaactgcttgaaacacctgaatttcaaatccctgcaaggcagcagctgggcctggtttactcactctgagaggccctggttcccatmatagcatctccagttcagggaggcatcagtctcagtgatcaaagtgggggctcccatggtggtccacctggcaatgtgggggacataggttccatccctg

SEQ ID NO: 33357 - DNA, 201 bp, Bos taurus
tatcgagaataagctagtggttaccagtgaggaacgaggagtgagggaggggcaatataggtaggagattaaaaaaaggtattaatagattatatgaaatmatgtgtgtgaaagtttaaagcactaaataatttaaataatctttcattctattaaaaaacaaaataaagtgaatgtacctcaaaaggagggaagcttatt

SEQ ID NO: 33358 - DNA, 201 bp, Bos taurus
cgtcttttttttggtccttgaactaggacattagaaggacagtatctaacagttcctttgcccattcaattaaagacagaggaattagacaaaggaattaragaccaaaacaccaacccattactaataggtgtttggaaaatacgacttagttgtatgagaaccgtgatctttttaatgccgcatcccagaagtagatag

SEQ ID NO: 33359 - DNA, 201 bp, Bos taurus
atgaaagaataaatgggttactagcagagcctttactatttcagaccctgtgttatatgctgggatgttttggcaagtcagacaaggtctgtacctttcakaagtttggagtctaatggaatcagactcattcatgatcatacacatatataaactgtgatttgaactgtgaaggaaaattatctcttcgagaaagttttc

SEQ ID NO: 33360 - DNA, 201 bp, Bos taurus
aaacctagggcctgttatacagagtgaaataagttagaaagagaaaaaaactcatatactaatgcctatttatggaatctggaaaaatggtagtgatgaayaaggccagctttgaattgagaactcttggtctccttgtatttccaagatgtgactcatatcccagctcccttctcttcgcaccctaggctatgtcttgtg

SEQ ID NO: 33361 - DNA, 201 bp, Bos taurus
agttttcaacgtttagctatgctgtaacatgtatcagtgtgtcttccttttttgttgctaattaatattttttataagaacaaatgcattttgtttatccrttaatcaattgagggtcatttattttctccccattcactatctattatgaatagtcattctgtggacatttgcatgaagctttttgtgtcactatttttc

SEQ ID NO: 33362 - DNA, 201 bp, Bos taurus
tgcaggcagcatcagaaaatccacagaggagtctggctttgggggccattggtagcattggagacttgactgtataatgcccagcgtcagccctgtgaacygcagagcagtgtccaacataagggccaggagttcattgttggagcagcctcagacctaactgtgatcctactgatcacagtctgagagcatttatgtatc

SEQ ID NO: 33363 - DNA, 201 bp, Bos taurus
ttgctgtggctgagtttaagattttgtgtgtgtgtgtttggttttcagtactttagctatcattattcattatgtgtttaatttttatcttaattcttctytggggctctctgaatttactagatctataattcgttttcttccagttatattcaaaattcccagtcatctcctcaaatttttttctgcttcatttggtat

SEQ ID NO: 33364 - DNA, 201 bp, Bos taurus
tccaaagatcatagtgtcagtgccaacatgaatatccatgcactcaggtaaataggaaatgtgcagtttttttttttttccttctaggtcagaatgtcctrtgtaattgatggtgaattgaaataggttgctgattttcaaaacagcttagatacaagcttcccgtttattatggtaatgagattgagacgttgtgaaact

SEQ ID NO: 33365 - DNA, 201 bp, Bos taurus
ctgcagtttctagattctttcctcctttccttataatttgctgcatttatattactttctagaatttctatactttctgcatttatataaccacctagaaktgaggttttgttcactttaaattagagcatgtaaattacatcacttattatgcatatgctataattatattatgaatacagtcttgcaaatgatataaaa

SEQ ID NO: 33366 - DNA, 201 bp, Bos taurus
ttgagtatagaatatcattataaactgattagaacaaaagttgcttagagaactttgagtattctaacaaaaatcaagtgaatgaaataatgggcgaatcmgtatgggaaaatgcaaatggcatgtgagaaaaagatattttgaaacagtaatgagattcattttgcctactaagttaatgaatatatagattatactatt

SEQ ID NO: 33367 - DNA, 201 bp, Bos taurus
atataatacctggaaattctagagtttcctgtctactagtcagaggacaaaatcaggacatggagggaagagccaagagaagctgagctataacctccacmttccatatcatgattccatgttgcacctagacttcctcttacatgaaataaaagtaagactgttcacactaaagttttcatttcaggagattttaaattc

SEQ ID NO: 33368 - DNA, 201 bp, Bos taurus
aaaatacctgtatagccattgtaatatcaccccattgttatttacagttaattcgaaaagacgagtcaacgtatcctagtctctatgcatagagtaagatrtcattttaaggctggcatattattttcgttcacttgatgaatgtttactgtcatggctaaataagagatgagctacactctgctagttttggcagtgtct

SEQ ID NO: 33369 - DNA, 201 bp, Bos taurus
ggacttatccagaaggaggaatgtgtctcattcctgtttgacaggagagaatttgacagcgcagagcaaggcaccaactggagttaggcccctcccctccyccagaagctggacgacaggggtgctgtctcccttggcatttacatctcaaacaaatgcctctctggtctttgaggaaagcatccctgccttataaagctg

SEQ ID NO: 33370 - DNA, 201 bp, Bos taurus
tgcatgcagtaaagactctccaggggattttagaaagacagaacatgatttgtatttactagtttaaaattttaacctggaaattgtttccttactatacrttataggaatgatcttagaaatgcaactagtctgaaacactaaatctttaaaacatcaccaggattatgggagacgatggagaggacaaacatcagaatc

SEQ ID NO: 33371 - DNA, 201 bp, Bos taurus
accaaagactcaaggcagttacaacatctctgtgtttcaggagtctcacttcacagatttactttaagaatgaaattgctcacagtggtgaagatctttgmagtttgcaaagcacgtctgcattatgcatttgcagaaatgaatctgaaaaggtcaaagatagttgaagtctttgagcccagacttaggagtttgaaatag

SEQ ID NO: 33372 - DNA, 201 bp, Bos taurus
ccttggcatttctttatttctctcacactatttgttctgagctaagcaagttgccagctgtgagaagccctatagagaggttcactgttatggtggagaamcagggccctcggtccaataaccgaaactaaggcttgacaacaaccatatgagttgcttgggagtgaactttcagcttccgttaagtctggcaatgacagt

SEQ ID NO: 33373 - DNA, 201 bp, Bos taurus
tgccttctccgaccactagtgctacttccccataatttctggccttacctgcagcttcagtgacagccagatatggcctgaagtataaggaagattttaayaggtcagaacactgtctccttagagatcagctttatgtctgtcttctgctctgtggtggccttgagtcatcctctctgatttctgggattccagattcat

SEQ ID NO: 33374 - DNA, 201 bp, Bos taurus
atatttattagcatggcatttatttatacatagaagaaaccaaaaataacttagtaatcattgttacttgcacttagcaaaaacagaatcaggattcataygagaaagaagaaagggagaagggaaacccatagacagtttaaaaacagtaaattttggataaagggataattagctaaacaggggggctaatcaaggtgt

SEQ ID NO: 33375 - DNA, 201 bp, Bos taurus
ctaggataagttagtttgccgacattctggagacactagagcataagcaggatgctggagagaatgttccattctattggttggtcaagtagacaatgccrttccatcccctctgagacatggaggctgcagagacccgttccctggaggatggccaggcccacaagccctgaagctagaggtgtactttcctgttctatt

SEQ ID NO: 33376 - DNA, 201 bp, Bos taurus
ttgcagcctagagaagtaggtgtatccagcttccaacctcattttaaagcaaagcatctcccctttcatcaggctaatgcacaacatggtgcttcagaacrgttcccaggactggtgcagtttgacaatcactgattcagagttacatttgtgtattttctctgggtttgacttattcacgatatcccatcactcataaat

SEQ ID NO: 33377 - DNA, 201 bp, Bos taurus
ttccagggtggttcttgtattgttaatggctgagttaagttttcatgaactgaggtatatggtccctgtcactgtatgtctcagagtcccaggctagcccytcactaaggtgtggatgtagtttactggctggtcccctggtgagcccaatgcctggatgtgagtgcctgcagacaaagccccaggtgtgtgggatcctga

SEQ ID NO: 33378 - DNA, 201 bp, Bos taurus
ttctggggcaaaggggctgccccaagctgttcacctggccctagggtgatgagagaaaaggaattttagccctaagtgtgagcagccatagaggaggtggyttggggagtgggccctggattggttagtttgtattgactggtgagtaaacagctcaaggatgagttggttactatctctagaaattggtgagtcctgatc

SEQ ID NO: 33379 - DNA, 201 bp, Bos taurus
tttattaaaatgaaaattcagtttgtttcatgtttatttaccctatcaacataatactttgtgtccactgaaagaatgagattgctaagaaactataaacrtcctcaattacaggccaactgaggaagaaaagtctctgtatgttttcatcagacacacgatagaggtctaattatgtgatgacaagctgtgtcctgtgct

SEQ ID NO: 33380 - DNA, 201 bp, Bos taurus
cctgcttcgggcactgtgccgcccgtgttcctttacaaggcctggctcccagctgtttcacggtggaggcatctgacactctgataaatgaacaggccatyggatattccatccaacagagggcagtggctcactgaaactctcacatatttgctctgaaaatagattttcctgaaactttccacttaaatagctgggatt

SEQ ID NO: 33381 - DNA, 201 bp, Bos taurus
gtaacaaatatgttctcccaaaagctgtgtgcacatctgctcatattgtacatgaggaaatgttcagtgaatctttttgtaaaaggaagacttccttcttmgcataatgtgcttaattttctctctgtaggagaactctatgtcagttagaaaccagtttgtttagtcggattgactggtagatgctaagctccttgagtg

SEQ ID NO: 33382 - DNA, 201 bp, Bos taurus
aatctcctttgcccagggaaatttcctggtccccagtatgtctcagactagggctcatttttgatcaatgttttgagtattatggaagttttcctgaaagygagatgtggaaatatgaatgccttctccctgttgaaggtgtcttatttgagtggatgaatctaaactgaaaaagactgattatttctgctcactagtggg

SEQ ID NO: 33383 - DNA, 201 bp, Bos taurus
tcagatcagtcatttgtcagtaaggcatttgcagagtttaacagtgctgaatggtagctaaacccaagaaattgcattctgatgggtagttgatattattygatatcaatattgtaccatacacagtaggagcatggatatgggggtcttagccacttgttcaattttacaacattcttgaaaaacagctggggaagaaaa

SEQ ID NO: 33384 - DNA, 201 bp, Bos taurus
gtgtctggagttaagcagcctacctgaaacgtgctcttcaggccgcaggatgaaactgggttttggactgcacctggctgcagacctctcgccactgaagrgtgctttcttccacttaatggggccccatagtggtgaatagattcccggggtacgaggaatccctttcccatttgactttcagatctctgctttgagggt

SEQ ID NO: 33385 - DNA, 201 bp, Bos taurus
gcctcagtgggggacagtgggccatagagttcttagtgaagaggcacagtggaggcaaggatccaatcaaaccgtgcgtttctgatctccacgtgcaggcragggagcaaaggcatgggcctgagagcctcatcacgaaaggattgcaggctggagctacagctggggctgaggcaaagcgttattagaggaaaagagaac

SEQ ID NO: 33386 - DNA, 201 bp, Bos taurus
actcacatcccaggacgatggaggaaagacattcaggccacgtgacagtgacagtatattaataactggagccagaaacaaacttttgatactctaagccrctaaaacgttcaccttccttgtgactgcagcataactcagtgactcgtacattgtacatgtaaataaaaattttgcagggaactggtatgtgcccctttc

SEQ ID NO: 33387 - DNA, 201 bp, Bos taurus
ttgtttttattcattttattatcctcagtgggtcttttcaacctgaaaattctatgttttagttttaagaaagtctcatgctacttctttatctccatttyctgtgatctttctttcaaggcctttaattactctgatattggcattcctgcatagacattcttatgtttacccataatctattaccttttttgtctccta

SEQ ID NO: 33388 - DNA, 201 bp, Bos taurus
acacagaaatatgttaaggtctatttttaaaagtttacctgtcctgaaataaacgtgtttcatgtatttgtttaaactctgtgttcgtcttttattttcartattttcccactgtccatgataatattttatacaatggattatttaaaacctctgtgaaatttgcctggaggcaagcttgcagttcaagaataattaaag

SEQ ID NO: 33389 - DNA, 201 bp, Bos taurus
attcccaacaagtttataagaatagtcttttgtttacttgggataatatggtgcactatattaatatttaagttccttgaatgctgtgaactcctcaaacrtatctgaatgaatgactgaacctttgtaaattaagggacacttgtacgaataaagtgattttatggttttaactaaggtcaggtctaagtaggtcttgaa

SEQ ID NO: 33390 - DNA, 201 bp, Bos taurus
cgttgggctcttgtgtgggctaaggatatcgagtataggttaaaggatcttagtgaaggctaagttgaaagtattaaacatgagtcaggtgagaacttgaytgggtagtgctagcttgggctctgaccaaaaaagtaataaaagtgggaggcttggagtttgtgtacagttttcagatgcagattccaagacagtttcaaa

SEQ ID NO: 33391 - DNA, 201 bp, Bos taurus
aaaaaagagaaagagagaaatgttgtacttagtagggatattatagaatttcccttataatcattaccaagataagttttcctactattacccttaatatkttccctaaaaatcacactaaatagtgtaagtctaaaaacagtagtaagaggcataagaatcaataagaaatatctttcgtttcttagatgaaagataact

SEQ ID NO: 33392 - DNA, 201 bp, Bos taurus
ctaccacaacagccactgttttataaaccacatgtagatttgagcaatctcctaggtggactaaaaaaatttacatgcctaggtctctcctgttcggcccygctgcctatgagaggcaactcatccacatttcagggtggcatcaagcagtataccatttcatcggagtccagaagtggcaggacaaagggccaagactct

SEQ ID NO: 33393 - DNA, 201 bp, Bos taurus
gaagaaagattttcctgaaacaggaaaagatgtatttaaattgaaattaaaacaaatgtgttaaaaaagtactttagcctttgatgtgttagtcactgttwaagtgtgtataaatttttatttgtataaatatgtaactaaatataaacattgggttggccaaaaagtttgttcagatttttctgcactctcatatatgca

SEQ ID NO: 33394 - DNA, 201 bp, Bos taurus
acgacttacaactcttactgtgcagttgaggaattgccatagataactaaaaccaccactgactgctcatatattgaaataattaatgccttaatctgtamacctggctcataattctttaagtttatttttactgtataattactttgctttttacatgttgcaataaaattgtggcaatgctgcggatgccattcttct

SEQ ID NO: 33395 - DNA, 201 bp, Bos taurus
actaagattcacattcctactgcaagtagtaaagaattaacttctatagatttgcttgaaataaatagaaaaagaaaacaacctgagagcaaatgcaaacygaatgttgataagaaaggtagataaacagaagctcatcttgccaagaacatgatacaaatgcttataaattcattgtggtattataacttgatgagtaca

SEQ ID NO: 33396 - DNA, 201 bp, Bos taurus
ctgagagctacttctctgcctttatccataaaagaaataagcatacaatctattctttgaagagagtctctcaacataaatatccaaaaatttcagggccrttttattatttatgggatcgacgtattacaaaatatttctggtgtaaaattcaacttatgttgactttaccttgggaacattttattttgttttagtacg

SEQ ID NO: 33397 - DNA, 201 bp, Bos taurus
ggtagggatcgtagtctctagttttggggccaaattttgattttcccagtgttgggtagtgtagagggatataagagctataagcattctcttagatgctrtggcccatttactttaagtgactgggcctgaggatgtatagagaatagagcaaaaatgcagagcaagccagtgagcctgggccttaaatgctgcataggc

SEQ ID NO: 33398 - DNA, 201 bp, Bos taurus
aaacactataaaaggctatctggagggaaagggtgaattgggtggtgtttaatgtgtacagattttcaattttgcaagatgaaaagagctctggatactgrctgtgcagcagtataaattatctaacactgctaaactgtacacttaagtttgattaagatggtaaattttatatatgcattttaccattttttaagtgaa

SEQ ID NO: 33399 - DNA, 201 bp, Bos taurus
ctttgcggaaatgagccggagcctccaaattcatggtcgttggtcctgtaaaggcagatttcaggagcagggccgaagacagagagaaaatgtatagctayattttgaattgcagaatgctagtttctttttccctaacctatcagaatcctggcagccagttgttaattccctctccctaatacctgatcaggttcacca

SEQ ID NO: 33400 - DNA, 201 bp, Bos taurus
ttgtgggccctactagcaaaatgtgagcctgtaagtcacaaacattaaatgtaggaaatacctaacctgcagatgactggggaattctttaagcgcatgcraaatatgtatttacaacttgttttttgtgaggagttagacaaaacataacctgtggtggattcattttgatatttggcaaaactaatacaattatgtaaa

SEQ ID NO: 33401 - DNA, 201 bp, Bos taurus
ctcaaattttaagattatttttaaggactcaataggttaatacatataaactacttaagaacaatgcctggcagataaaaagaccatggaagtgttggctrctactatgatttttactcatataaaggcagcaaaatatgtgtcacatagtagttactaagtaaaagagagttctatctttctcatatttgggtaagaggt

SEQ ID NO: 33402 - DNA, 201 bp, Bos taurus
gtttctgcattatctatctgctactactggaagtaagctctgtgaggacagtagcattgtattactttcatactccctagagcagtgcctgacacacacartcagttctcaatgcctcactattgactaactgtcagatattgttctaagacgtttatacacactacttcatttcactccccacaggacatatgtaatttc

SEQ ID NO: 33403 - DNA, 201 bp, Bos taurus
ctgacacaatactctcaaatcccttagaaaaaagaggctcccatcaattttacttgctgcattgcttattgatttgagtatctcaaactccccctttttaytgctgtatacttagcctagcttatgcagtatgcatatataatttggtacccttacatttttcactaataatacttgatggattttttttcttatggattg

SEQ ID NO: 33404 - DNA, 201 bp, Bos taurus
ttcattattctacttattgaacattgcaatttattttgtttgtatgcttactctcactgttagaatgtacacagtgagtgcattttatttatgcttgtacrctcagatatgcttgaaatgaattgaattatattggattggcctgccttgagtggaactgtactgaatttatttaaatttaattggcatttgttaccatct

SEQ ID NO: 33405 - DNA, 201 bp, Bos taurus
agtggtcttagggaactgatctgaaggggaggcactatgctacccttcttttctcctccaactgtacaggttttcactttccttcagtctcacctcctctyagcatgaaactttactaaaggctctgaggtcttcacacaatagttttctaccagcctcaccccaagtatctgccaggcgtaataggcaagtctaattttt

SEQ ID NO: 33406 - DNA, 201 bp, Bos taurus
ttagagcaacaataaacaaatggggcctattcaaactttgcacaggaaaggaaatcaccagtaaaacaaacaaaaaacaacctatggaacaaggtgggcasgggggaggcccacaggaaatatttgtgaatgatgcagcaaacaagaagttgatattcaaaatatacaaatagctcataaaattcaataccaaaaaaacaa

SEQ ID NO: 33407 - DNA, 201 bp, Bos taurus
actttcactttctacttgattgtctggtacctggccctaggctgattcagagtgggaagaatattggcttggtctgaggatttgataaaggagatgaggtrtggcctctggtttgtatatcaaaggtacctcccaagggagttgtttgctctctaggattaactattcctgggaatggaggtctcctggatctaggccata

SEQ ID NO: 33408 - DNA, 201 bp, Bos taurus
aaaagaactatgaaactaaatggcctttgctttaggctgggtaagaggaagagacagtgtctgtggaaatggaggaagaggcttgcaataaagcaccaggrtggatgatggaacatggccacgatacgggggatttcaacacaactctgaagcagatctcctttgctcaatggcccagtactttcccagtctcaccttata

SEQ ID NO: 33409 - DNA, 201 bp, Bos taurus
aagaccagctagccagccctgtgatgaatgctctggttccaaagcatggtcaactgatgttttgtacggtttaccttcccctatactttaatgatgctggraaagattgaagacagaaggagaagggagcagcagagtatgagatggttagatagcatcaccaatacaatggacatgaatatgagcaaactccaggagata

SEQ ID NO: 33410 - DNA, 201 bp, Bos taurus
tgacagttctgctaagttgctgagggaagtaggaatctgtctcctttcctaaactactgatctgaccaggtaggtcccaggctgggtcaagaaggggccamgtcttcctcttttgcatacccctagtgtgagaggaaggacatagactcttgagccaagtagacttgcttttgaattcaggtctatgactctcctgtggta

SEQ ID NO: 33411 - DNA, 201 bp, Bos taurus
acacacagaacattaggactgaagcagtgactattccatttctgagaactgttgagaatgatatggcttcattctgctctatatggagaaagagttgtgtrttcatggggaggagtgggcataagacatccaatttagactctcttgaaaagcctgaagtattgagctagtcatcactgcagtatacttcacatgctaggt

SEQ ID NO: 33412 - DNA, 201 bp, Bos taurus
atattttgtatattaaccccttatttgatatatggtttgcaaatattttctcaagatatggaaacgctttgtaggagactgtggatactgttggtgaatarcatactaacatgctatttgtatactatctgtactatttgcatactatttttactaatgtttactatttgtatactagtctgcatttttaaatgtatctat

SEQ ID NO: 33413 - DNA, 201 bp, Bos taurus
tggagcagtaaagatctaggagaggggacggaggacctgaagaagttacgaactggtgttctcaaagcactgacacaggtggacaagatggggctttcagrgaaatttgataagctaggctcatccagtcactaaagtggaaccccaaatgaggaccccttcatgaggaacacagcagctgatgcgtctacatatctacca

SEQ ID NO: 33414 - DNA, 201 bp, Bos taurus
ctgagaagcttgaaaaccaaagcaaaaagaggatgtagacaagtacataagcttacttttcagaaaagatgtgcattattcaggtttctccaaagaaacaraagcaccaagacatatagagaaaaagaaacatagagaaaaagagatttattaaaaggaactgggtcatgtgattatgaagactgagaggtcccacaacct

SEQ ID NO: 33415 - DNA, 201 bp, Bos taurus
tccccagtcaagaagctaagatgtagctcagaagcttaagaagtcttcttttgggagtgttgaccatcagcaaccctatggcacttacctgagtaaactaygtaagttattctgctgctgcccagggtcctttatttatagtaccaaggcagaccggctctccctgacaatgggctcccattaagctaaccttggccctca

SEQ ID NO: 33416 - DNA, 201 bp, Bos taurus
gaaactgactttgcttgctcctctttcatgtgttagtttcatggctaccattgaatgtacagactgtctctagcctaatttgtagatataatttgtcattygtgcttctgtcccccctaggttttccaaacctgctagtccacaagtacccctccttaactctaacctgctgtctgttgctttcactatccaaaaagaaag

SEQ ID NO: 33417 - DNA, 201 bp, Bos taurus
atttaggagaagacacacggacctccatcctgaactccagagtgacagcagttgaagtggaggtcagttctgctctggctgctctctaggacccgatggaraactgggctcagagggacaaaggccttccaggagagagactcccaatatgttaaaaaattgaaaaaaatccctaaacaagcttaccaaaactgtgacaaa

SEQ ID NO: 33418 - DNA, 201 bp, Bos taurus
ccttttctccatacactctccagcatttgttacctgtcaattcccccataactggtaatctcaccacacaagcactacctccttgagaaacctgccaccaygttctgctggccatcctctgctcacagtgggatgttgttctaggaccttgcttcagacaggtaagctgaccagggtgaggtggtacctcactgtagtttt

SEQ ID NO: 33419 - DNA, 201 bp, Bos taurus
cctatggaagctctgtaatcaaatcctgctggccttccaagtcatattccctggggattcccagtccttggctggatccccaggctgaggagcctgatacrgggcctagaaccttcacaacagtgcaagaacttcttggatattactgttctccagtttgtgagttgcccacctggcaggtataggatttgattttatcat

SEQ ID NO: 33420 - DNA, 201 bp, Bos taurus
taataataaaaccgatttaccagcagcgccagttaattatgcaccattgctatggttattctgtgagacaataaaaggtaatggggccgtttctgaagttrgtgggaaggaacccagcacaatcaccgaggtggactgctgactctcttgaaaaatttctccccaagtcagcatgtgtctgggtgagcagaagtcattaaa

SEQ ID NO: 33421 - DNA, 201 bp, Bos taurus
ttctgtaatgttacattattatttgaaaaatacttataaattgctttaatagacataagaaaatagcaaaggataattttctctggatggcctcttcctaragaaattttaaagcaaatttctgcagcaatagtgtttatgtcttttactatgtactataaacaaagtaaaaacaacaacttaacactttaattctccttt

SEQ ID NO: 33422 - DNA, 201 bp, Bos taurus
caataaaataccatcagatttatgttcttgttgtccaaagagtctatattagctccaacagactgcaaaagaagcttctttttacccatttttcaaacatycaaatactctttgggactgaggagtaagtagctgacctaggaatagctgaaaaagtgagagcaagaaacagcaggataaaaaaagcaaacaacaggatga

SEQ ID NO: 33423 - DNA, 201 bp, Bos taurus
ctagcaccacctcaattccacctcagatcatcaggcattagaatctcataaggagcccacaacctagatccctcacatgcaaagttcacagtagggtttaygctcctaagagaatctaatgccaccactgatctgacattcttctggtccatggcccaggggttggggactcctgccctaagcctgccattgaaaataatt

SEQ ID NO: 33424 - DNA, 201 bp, Bos taurus
agagagaattgaaatgaaattcagctttttcctcaacaggtggatgagacaatgatattatttactgatgattgagtgaggagtaggatttcagtggacaygtttgtggacatcaagatctccacttggagtcactaattttgtaatactagtcaagcaagcagttgaatataggaacataaagttcaggtaaggctgggt

SEQ ID NO: 33425 - DNA, 201 bp, Bos taurus
agaaatactgaaagcaaaacttgaagggcactttaaaaaccaagaactaagacaggttaaaagacaggaagaaaactatgatcaacaggttgaaatgtctytgcaagatgaggatgaatgtgatgtttatattctgaccaaagtatcagatattttgcactcattatttagtacttacaaggaaaagattttaccgtggtt

SEQ ID NO: 33426 - DNA, 201 bp, Bos taurus
tggggaactcaaatcaggtgctctgtgacaactagaggggtgggatgaggtgacaactagagggagggacgttcacgagggaaggaacttacgtatacctrtggctgattcatgttaatgtaaggcagaggccaacacaatattgtaaagcaattatcctataattaaaatgttttacatgtattttattcaagtatagtt

SEQ ID NO: 33427 - DNA, 201 bp, Bos taurus
tctggaccagcgcagggtccatttgtcagttagtttaggggagcttcaggggcccaagttaggcactcttttaaagaggcagtgcttgctaagttggttcmgtcatgtctgactctctgcgaatctatggactgcagcccaccaggctcctctgttcatgggattctccaggcaagaatactggagtgggttgccatgccc

SEQ ID NO: 33428 - DNA, 201 bp, Bos taurus
aggttctgcacgctctctgttgttcttggctattaaaaaagaaagcatatttgttactgaaatgtagttaacatcttaccactgaattatgtatgtcactyagataaatataattgctgtaaatgtctatatggtctcggattcagtttttatttagaaatgggagcttttttgtttataggatcatcaacaactaaaaaa

SEQ ID NO: 33429 - DNA, 201 bp, Bos taurus
gagatcattaaaggcctgcatatgtgaatgaatgatggtttaaaatgctgtcagtctggtgatgcagtatggagtgtatgggagacaaggggagagagccragagtcagggctgttccaacagtaattttagtgtggaatacgaagacctagactgtagtgctggcaaaagatagacatgaaagcaagggtggaaaactag

SEQ ID NO: 33430 - DNA, 201 bp, Bos taurus
gatggacagggaggcctgatgtgctgtgattcatggggtcgcaaagagtcagacacaactgagcgactgaactgactgactgaccacttaaaatgaggtayggccatgtgacttgttttggcctacaaaacacaaggggaagtgatttgtgttacttctgggcagagtatttaagagccaacacttagcacatgatgctct

SEQ ID NO: 33431 - DNA, 201 bp, Bos taurus
tttctgccaaaaatacataagcacattccattcatgaaggaaaaaaaacagaataaacaagctgactgatgctataaataaactgaacaatattcttccaraggatcataaaagacaaggaaaactgaacaactgtactgaatggaagactaaggggaaataacaactacatgcaatgtgaaatacaagtctagaacagaa

SEQ ID NO: 33432 - DNA, 201 bp, Bos taurus
gagtagatatgtaggctggaaggccaatgagacatgagatatgattggttgggtgtggaacctagaactgcctcaagcttgggtacagagtcaggtcaccmgtttggtggggccaagaaaattgcagagaaacagagacagtgtcattctctctgtgtatttcttgttacatggtataataaacttcctttttatttaagc

SEQ ID NO: 33433 - DNA, 201 bp, Bos taurus
attcttctcactttttggcagtgatcaaccatgatcaacttgataaacattcacaccttaaccttcccactcacttgcctctcatattatctgccctgtcyttgtcacctttgccaattcctcttctttcactcactctccaattatgtgcagttcccaaggctcaatctcagatcccctgcttttctctctaagcacaat

SEQ ID NO: 33434 - DNA, 201 bp, Bos taurus
acgaatgatatttgagtatcttttcacccgatcattcctatatctccttgaaagtcttaccaagtcttttgcctattttaaaatgggctttttgtttctaytgtggatttctagttctttacacattctggatacaaatcttgttgaatacatacacctcaaatatttcccccaatctgtggtttatttattcattttctt

SEQ ID NO: 33435 - DNA, 201 bp, Bos taurus
tggattataacccaaagtataaaaacaaatatccacgagtccatactgatataaagtactgaattaattaataaaaagagacaaatctcccttgcagaacrattcaaagtaaattgtggaggtattccaccttcaaagatgtgagcataattccgcattccttatgtgtgggcagtattagtaacgtccttccacacagca

SEQ ID NO: 33436 - DNA, 201 bp, Bos taurus
ggagaatctcctgatctggacactgtgggcccttccagataatcacgggagcagctattcagtgtgttttcaagcctcctcaagggtgggtgcatggaggsaagacagtgggaagccactttcccactgaaagagaataacccaaagggcaacaaggaacaagttgtggctttagaaaaaaaaaaaaatcttctatttgag

SEQ ID NO: 33437 - DNA, 201 bp, Bos taurus
gcctgcgctggagttgggcggcgcccgggccccggcaacagctctcggctggaggagctttggggctgggggtggattgcggagaggcctgggagcggackctctgtaacacaccctccctgccagtttcttcgggtctttcccccgtaggggtaaggggagtgaacagcaggcctggtacttaggctcaccactaacggc

SEQ ID NO: 33438 - DNA, 201 bp, Bos taurus
ttgaggctgcctctgtggccgcccgaggccccagagctgtgagacttggcaaagtaattaagactgagaacccaaccgagcggagctgagtaaaaggtggrcgggcccatcccacaggccaaatgttttggaaaggcaaaagcaggagagttggagaaactaggtaagtgccgcggagtggattttctaattctcttccgt

SEQ ID NO: 33439 - DNA, 201 bp, Bos taurus
gacgctatttcagtctcgtttcttctgtgaagaatccctgactacactgagcatcagtgacctctctcttctaggacttacagtgacattcttggcctgcrctgtctatttagtccccatcatggagtgtcctgcttatacatctaaatctttcatcgagatctgaaggtgctgctctgaccctggccaagtagtaggagt

SEQ ID NO: 33440 - DNA, 201 bp, Bos taurus
gcaattaaatagctgtgtgacctgggacaagtcactttacctctctgaacttgagttttaccacctgtaaaataaggagattggaaacatgatctctattrgttcttcttgacatataaatctatgaattcaaagcacagtgggagcatgcctgcatcattttctcatgagggaaactcttgaaatgatttcattatctat

SEQ ID NO: 33441 - DNA, 201 bp, Bos taurus
agtactatatcattgctaaatgtcttagtttgatgattgtgttatggttacatattttggggtgaagggcataataaaacaataataggcttatatatagygagagatggacgatggttagatagatcaacagatggaatttatcaactgataaattagatagaagattcacgcactgttcttagagctattctgtagatt

SEQ ID NO: 33442 - DNA, 201 bp, Bos taurus
gaggatcctaaggtttcctatgacttcctactctgtaaggtcaacttgtgtcccctgttcctccactgcaacgaggccacttctcagcctcccctcacccygtgcacactataagtacctgctcagccctgcctttgcccaggctggtgaactttctcttttattccctgccctaacaaattgttcaaggcctccttagtc

SEQ ID NO: 33443 - DNA, 201 bp, Bos taurus
tgtaatgctgaaactgctgtctccttttaaaaagtatttctttgttgctttactgataagatttctgtattatttaattagactacaatgggtattgagtycagtagcattggactgtagatcatttcatcaacaccctaatgagtctaagccatttaccatatctccactactgattcagttggaataattttgagagtc

SEQ ID NO: 33444 - DNA, 201 bp, Bos taurus
cagtttcactggggccccgatgaagcttctcaaacactggcctgatcacagcacccagcctctcacatgcagtggctcacagttgcacccatgagcaaggycaggcttttaagcagtgtctgtaggcctgttgcactccactttcacctcctcaacagctgttctccaacaacttatgctcagttcaccagcctacttgtt

SEQ ID NO: 33445 - DNA, 201 bp, Bos taurus
cttgttttggtgttaattctttcactcagccagattggcagatttacccaagacaggtgaataaactgagtaaagagaaaatgaaagaaaagtgaaacaaycaaaaaatacttaaaaaaaaacacaaggaaatcttggtctcatttgagaggtattgaatcgatgttatcatttttcctttaatagaaaggtgtgggagga

SEQ ID NO: 33446 - DNA, 201 bp, Bos taurus
acgtagaaatttttatcagtgattaagtgccattctttttgtgtgtgtgtttgtgtgtgtgcatttctataataataagttatccacagtgccattttccycttgaggtattttaatacacccacctaatattatactagctttctagtagagaatgatattaggaggtgtcatagacccagggatcagcatggcatcacc

SEQ ID NO: 33447 - DNA, 201 bp, Bos taurus
atcactcatcatacactgagattacacagaataaaattgtttctgtggttgtcccttttctttgttggctctgaattattttctcttctacattccatttytgctatcatttctaatatctctgcctcaccaccacatcttaaaatatgatataggatccatgcttacgtctaaatgtgtctatactaatgatgctccact

SEQ ID NO: 33448 - DNA, 201 bp, Bos taurus
cttttgctccctgtggcactgacaggtaactccttggcactcagctggtagccagcatggtctggggtatccaggaaggctttttcacttgggctggcatytgggctggtgtgatagttaattatgtatgtttatttgggtgagccatgtatccagataactgaccaaacattattctggatgtgtcagtgagggtgtttt

SEQ ID NO: 33449 - DNA, 201 bp, Bos taurus
tttctttgctttgatacattttaaaatagatttgcttagacatccagagaagttaatagagttgtccatggctatggcctaaaaggagaggagacaccagsagaaacaattaacttgagctcatgtaggggaaggaggaaaggaagaggaacagggctcatgggtctgggtgcctctggccccagggaagcatgcagtgat

SEQ ID NO: 33450 - DNA, 201 bp, Bos taurus
ttcttttgtgtttgacattcttctgagtactttacgtatattaacttacttaattatcaaactggagatttttcttgtccctcctacacagtgcaaccccygtcctggacaatggtgaacgggccagaaatagactttttcccctcatacaggatgcaatctaatgagttttgagggaactgatcaaaaagttaactgtga

SEQ ID NO: 33451 - DNA, 201 bp, Bos taurus
cgtgcccccagggttacctcccttactctctgaggtgcagctgcctgtgtgccagatgggggctgtagtgcctcagcagcagtaggaggcaggggagaaaygcatgtggcctcagtaaagtgggcactgttcacttgtacccatgcacaatgtgagggacaggagaagcctctgctgtaggctctgtgagcagcagtggaa

SEQ ID NO: 33452 - DNA, 201 bp, Bos taurus
aagatgttcagcataattagtcattagggaaaatgcaaactgtaaccacagtgacattctactgtgcagctcttagaatggctggaataaaataccaagcrctgaggaagatgctggaactcttactcattgctggtcagaatacgaaacagtacagctgctttgaaaaacagttgagtagtattttctgtagttaaatat

SEQ ID NO: 33453 - DNA, 201 bp, Bos taurus
ataggtccgtgcacacaccccatagccccaccttcctctccccttcctgattcccagcacttccccaccccctcctgaggcctctatttctagaaggcagmgcaattcatcaatctatccctctccccaaacccagcccaagacctccttcggcctctccaaagatttcctttctctcgcagcagtataaaaaattcattt

SEQ ID NO: 33454 - DNA, 201 bp, Bos taurus
tgttgatgacatacagtctcaaaagagcctccgaactcatcagcacaaagctgctgctcctgtgctgcctggaagtggtgacatctgtaactcagtggccrggcacacagctgaaattcgactgactagctggagcctgggcagatcttccgtcggctccatggctggggagccaggccagcctagactacctggcagtcc

SEQ ID NO: 33455 - DNA, 201 bp, Bos taurus
gctaattgttgtgcaaggtgcttctgccctcccccagttgccaggagagctcacagtcctagctcagcagagctctcattagcatctctgtgtctgtgacrcagtccctaaggggggaatcctcctcgcagcctggcaaacagccgaatctcctccgtagacccagagccaagaggctgtgtgccggccagcaacaaaaca

SEQ ID NO: 33456 - DNA, 201 bp, Bos taurus
aatgaaaaattagtgttcatctgtatcactctaagatcactgatttctgaaaattaaaaaaataaaagtctgcccaaactaatggccatgtttaaatgacrggcatgaaagaaaaaaaatctagtcattctagttaaccaaatcaggtggaaatgaatctacctatggcagatatataaatatctgcagaaatatatggcc

SEQ ID NO: 33457 - DNA, 201 bp, Bos taurus
agcagggcttcattcagcagagtacagtaaaaatggatgcaaaatcccttacctctccatctggtcccagggcagactctcctccttctgcgttctcttcmgccttctgcaaaacaatgtcaaatgttaggtatgaacccagaaggtgggtacaggaaggacctcatggcaactcagtggcaggcacataacagcatttca

SEQ ID NO: 33458 - DNA, 201 bp, Bos taurus
aaataagaggatgaaacagatgttcatttcaagctctaggctgatcctaatgtctgtaaatgtgtcattctgatatatgaatgtgagtcctgcaagacttratcatgagaaaataggagccccaggattcacctccatgaacttggttcaccctcatccaattctgttgaagacagacctaaaaaacaactaacaaggggt

SEQ ID NO: 33459 - DNA, 201 bp, Bos taurus
aagagttaaagctgggcatgctggggtatagagcggggtgggaatggtcaggctaaggatactaggggagacgagtttgaaggtatgtgtaggcatgaacmaaatgaagacaggatgtcagggcaggaagcacacataaacaaagacacgaggtctgactattctgtaatttgggaagtacctattggagcgtaggatata

SEQ ID NO: 33460 - DNA, 201 bp, Bos taurus
aagccaggtgtagcctctaactcacaggctccttctcctgcctcacaccgtctctacggaaagttgctacagagggccatgcatcactgaagagcacgaaygaaggtcagatggctctcagaagggtccaaactgcattcaaagactcactggaagctgtctccttagtcaggtttcctttcagagtggccaggagagttc

SEQ ID NO: 33461 - DNA, 201 bp, Bos taurus
ctgagccatcggggaagcccttatacttaatatgaagaataaattcctaataggaggaaaacaattagtaactgtaaagataaaacaaagatgactggggktgggggcagaggggcaactgcagtgcaagattctgtctctgacaccaggacttcatgactagaaaacactctgcacttaatgagaatcttcaacagttat

SEQ ID NO: 33462 - DNA, 201 bp, Bos taurus
ggcagcagaagtgacaggcagaagcaggtgatgaaacagctttgctccccagcgggacttctttcctcaaactcattccctcagcccttattatgtgtccrtcactgcacctccaggtctctggtggccccacagactgtccgggaagaaagggagcactgagtacggtgggaggggagcaagcctgtgggcaaggaggct

SEQ ID NO: 33463 - DNA, 201 bp, Bos taurus
agacttcaggccccagctcctgttggtattctcatttcaaggaggtggcttctagacactgcagagatgtcactttttggggcagagcaaatttctaaagkgttgcctatactgctcagcatacaaaaggtactactattatgtgggagaatccgacgattttacttttcctatgtcaggcttccagaatttacagaaaaa

SEQ ID NO: 33464 - DNA, 201 bp, Bos taurus
taaaaaaggaagttttcttattgtttatttttctctagctgtatgatatacttatatatgctcacttcatgtttcataaataatgtgaagtggttttttaraaagttaacatttacttttttaccctcctcatttttatatttatttcagatcaataaatggactgggaaaaattttagaaacacagagatcaaggtactt

SEQ ID NO: 33465 - DNA, 201 bp, Bos taurus
cgtcttaagtacctcatgactgggaaagagcattcaggccaagttctgggatctaagcaacaggtagatatagattctattgctcccacacctgtcatcartatcaatatggccacagtggcccccagtttctgtatgtctgggttccaatattcaagttccagagacagtaaagagaatccagttgggccagctgtccgt

SEQ ID NO: 33466 - DNA, 201 bp, Bos taurus
ctcttccagcatgggaacatgaaatcatcacatggagcattgaagaagaatggaataaaattgataacaaaacaaacaaagaaaagacagatcatatggtrtgggcatggatttcctccagtgcccctttgagagggtcagtgagggaacagcagagtgacacagctcagacctccccaggctgcgactggatttcacatg

SEQ ID NO: 33467 - DNA, 201 bp, Bos taurus
agtggccaatgaatctttacatttacaaactgatattgcccatttcagagaattgtttagggcagtccctaaccagtatgaaaatctcctctttaaaataktgtgaaagcagaggtaatttaagttccttctgatttagcttttattaataaacaaatctgttaaccccctggaagattcttttgagacattcaagctgtg

SEQ ID NO: 33468 - DNA, 201 bp, Bos taurus
atgaatgctgaacattttcaggcccttccttgattatatcacatgggttgatacatgggtcgatctgattcccgttgagatggcaaaataccaccacatcrgctctctctctgactttctctcactgctgtcttatctcccagtgagggtctgcacttgtttggacactgttcagatcttacttatcgtggctgtcaaagg

SEQ ID NO: 33469 - DNA, 201 bp, Bos taurus
tccccttacgccagagctgtgcttcattggacaataaagctcagctgctgctttcatggaacatgaagattggtgggacaaagaaacaagtaaatttaggytctgcaggtggggaaatggagcacacagaagggatctcgacctactaatcataatgtgaaaataagatagtaccatatattttatagtgtgtattatttt

SEQ ID NO: 33470 - DNA, 201 bp, Bos taurus
agccctgcccctcttcattatctgtttcgccatgagtatctggaatctttgctcagattgatccttgtgctttttgccccagctcggctcctgtgcacackcccacaggcatcactcatgtctggctcctaacatccataccttctggttaaggacattggctaacagaaagctggttgcatagagctttctactgactcg

SEQ ID NO: 33471 - DNA, 201 bp, Bos taurus
aaggtaatgcatgtgaagatggaaaagcagaagtttgataaagaagtatctgctgagcatgcagcgacaatgagacatggcgtggaccctgatctctaggygctgccaagttacttccaccacgcctagcccatattctctacagatatccctggagatccctctattctagggatgggtttttatggaaaatcatttagg

SEQ ID NO: 33472 - DNA, 201 bp, Bos taurus
ggatgccactgttaagtcatcccaaagtattgtctctgaagggcctgtgtttctcaactgctctgtgatggttgatacttttcagtatgagtaagcttgargagttttaatttgcaggcctataaattaatacaggctgccaagtgacttggttctaagagctgctctttgatgtataactttgtgaaacttaatatttcc

SEQ ID NO: 33473 - DNA, 201 bp, Bos taurus
cacacactcgtgattccaaagtcttactcatcaagctgccttggtcagcctcatgattttcttgggccctgtatgggtcttttcccactctgagtccttcyagtctcttgtcaccatgtaaatggagtctgagttcctcaaagggggagttttcctttgaccatcacaaccataaacttcagaccttgacttcagtggaaa

SEQ ID NO: 33474 - DNA, 201 bp, Bos taurus
ggtatacatataatgcagcattagtcagacttacaaaggaaagaaattctgacatattctacaacatggataaaccttgaagacattatgctcagtgaaakaagccagatacaagaggacaaattgtatgattctacttatatgaaatacctagagtattcaagtttacagagacagaaagtagggttgcggttgccaggg

SEQ ID NO: 33475 - DNA, 201 bp, Bos taurus
ccctctcttctgtaggatcacacaggcagccactgaactgaaataggaaataaacagcatcagagctaacagaccaacctgggagatgaactttccaggcraggataccacagtgaagaaacacgtggacacttggctgagggggggactgaccggggtttgtaaatgctagaaagatgttcatggggttatgctaattaa

SEQ ID NO: 33476 - DNA, 201 bp, Bos taurus
aatgtgaatattagaccaacaaaaagacaaaaaaccttagtgattgattccgatgcagaaagtgaaaatgaaactgatgatactggagaatgttattctgytcctgcagatgcctgaattgagatatttcatgaaaattaaaaacctttacaggtgtgtcgggtgtacccgctgtatgtaataacccacacaatgttagtg

SEQ ID NO: 33477 - DNA, 201 bp, Bos taurus
ctgctctgtccacagtcttcaccactgcatggggctttcagatatttacatatgtaactatagatactgggatgtcagagggaaacaggccattacttccygtgagacttcccaaacggagttactgttaagatccagcctcctgcttaacttctaaagatgggctgactcccctgacttaccggcagtcaggccggtaag

SEQ ID NO: 33478 - DNA, 201 bp, Bos taurus
cctggatggacgtggctagaaaatcggtagcctcattctgcttgctctgtatctctctagaggtggcccagagtaactcattcctgaaaggccagcctctytacgaagaagcgtgcagcaccttcctcagaggagggagtgcatgcgggcaccccagtgcaggcttccctggaccacccgagttcatctggagacccgctc

SEQ ID NO: 33479 - DNA, 201 bp, Bos taurus
tgaaagctctgccttagcttaagaagcactctttatggcaaaatcttttggccccggaagtcccttgacaataatgttaaaatgcttctacttaagaatgygtgtggttgtgcgttttccttcgggacaatccctcttcctccccatttccataggttcttctgaatcccaactgtctctgatgtagccacctgcctctca

SEQ ID NO: 33480 - DNA, 201 bp, Bos taurus
taggtcatttgctagtttttattaatcttaccacgtctttcctgtagtaggggctcatcatttattttagagatgttaatctcaaaaccagagcccagacyatatatctcacctacttagatggacttagttcctaaaaaccgcaatacatttccttcccaacagattcttatttgataaggaaaagaacttcctttttaa

SEQ ID NO: 33481 - DNA, 201 bp, Bos taurus
ctagaaaagattggattttatgcaacctcttttccttgaattaacagcaataaaaaaaaaaaaaaagtctagaggataacaggccaagagtggtatgaaarttcgataaattgtcagatacctactgcttcttgctttctgctctgccatcccttacaaaaggcccagtatggctgctggaaatctgccattatgtccaca

SEQ ID NO: 33482 - DNA, 201 bp, Bos taurus
tgcatatgacaggtatcaggttaatggtcttactatataaagaatttctatagattaataatgaaaaactaaaaatgggccaagtgagtgaagtcgctcarttgtgtctgactttgcaaccccgtggactgtagcccaccaggctcctccggccatgggattctccaggcaagaatactggagtgggtgccatttccttct

SEQ ID NO: 33483 - DNA, 201 bp, Bos taurus
gagcagattgaagtaacccctcaccctagtctttctgtgatgtagcttctatctgtcctggagttacgacctgagaagcaggcttcaagagtggcatacaytttgtggcttccaaagttattctcagggcatataggctacagatggcatcctggcactcctgccttgctccagattgctggtatttcccagaaaagagct

SEQ ID NO: 33484 - DNA, 201 bp, Bos taurus
ggtggagggtgcgatctaaattacgtgggaaaaaatccgctctgaaatcttattaaaaagactaactagtcgtaaacttaaccagccatcacttgatcaarctcctctgctgcctgaagcagtgttattttaaacctctctgaggactcttggccatatttaaaaccaccttggcaagccctgaaaagtagcaagcataca

SEQ ID NO: 33485 - DNA, 201 bp, Bos taurus
tgtcttggctcatgctgccgaatgtttacttctgactcataatgttccttccatgtggagggccttttattacagcaacattcctggcctttccctacccytttactcatccctcccaggacaggttaggtgacataacagaatgatgactttgagacaaggaattgaattgtgtggctcagtttctccctcttcttggga

SEQ ID NO: 33486 - DNA, 201 bp, Bos taurus
aacatttacttaaaaaatgaacacagattcaatgtggtcctgaatcattatgctgctcaactcttttgagttctgatttgctttcttgaatgagattactkccagcatagagtggcttagccaagagagtataagtcattatagcagagaagagaggcaaagagccattggaagtggataacttagtttctctttcagctc

SEQ ID NO: 33487 - DNA, 201 bp, Bos taurus
aatgcatcagtttgaggataatatttctttaacacttccttcacatttgctaagcttcctttttagtaaagactgggcaggctgaaggcctaagcatctgracagaatttcataacaatgtgatgttttcattttgtttattttatggtcattttctattacatcagataacactgagttttcaacttatggccacgatat

SEQ ID NO: 33488 - DNA, 201 bp, Bos taurus
ttaacacagaagctcaaatatcagtcctatgaaggcagtggagttgtcaacaagttgcattttccaattctgttcagagtgagctgagaccagtggcccarcagtaacagaacttgtcattagggtctaaagaagcaccacattaaaaaaaggtgctgtccaactctgattttgccagcccattagtcccttccttccttt

SEQ ID NO: 33489 - DNA, 201 bp, Bos taurus
ccaccctcatgagaaaggtggttgtttttgtcacagtttcctttttcatagttgagggaactgagacatacagaagttaaataacttggtcaattttatakgcagcaaagaactaggatttatatatataaatcacacacacacacacacacacacacatcatctgatcccaaactctgttgatcatttttcacatatccc

SEQ ID NO: 33490 - DNA, 201 bp, Bos taurus
caaatggaaggagaaacaacatattccctattttgacatatcaccaaggactacataaatgcacatctctttcactccatctcctttagtttgttataaaygccctacggtgaaacaaccttcccttctcgcccacagacttagctgagaatatagaagtgacaggaactgatctcctaacgtgaagaaacagcaattccc

SEQ ID NO: 33491 - DNA, 201 bp, Bos taurus
tccagttatttcatcaaatactactttaggccttcctgtgaaggtactgttatagatgtggctaactttaagcagctaaccattagtaatgtgggtgaacrggcctattctaatcaagtgaaggtcttaagagcaaaaactgaggtttcccaggaaacagaaattctgcttccagactgtagcatcaactcctgcctgagt

SEQ ID NO: 33492 - DNA, 201 bp, Bos taurus
agaccagtaaatagaggaaatcacaggaaaattaagttgaaatgtacagtagacctttgaaaatagagttgtaagtctggagagagatttgtatgcaggcrtatcttggagcatcgtgaaaatatagttgatagctgaaactggagaatgtcaagcaaagaatcagaagggaaaattatcaaggataaactttaagaagtt

SEQ ID NO: 33493 - DNA, 201 bp, Bos taurus
gagaggccatattcacataacttctgttagagtatattgctataatggttctatttgattattagttactgttgtttgttttttactgtgcctaatttacrcactaaattttatcataggtatgtacagggaaacatacaaaaaaattacatacaagtggacccttaaacaacattggtgtgaactgtgttggtcctctta

SEQ ID NO: 33494 - DNA, 201 bp, Bos taurus
aactttcaccatagtataaatggtgctgacagctgcagcatctcataaccataacgtaatcaaaaggtaaaggaataaggccactatacgtaggatttcayagtattcaaatattataaaaatgttaaggcaagaggctctttctgacaacacgttaataatggtggggacaattaacctatgtccagaagaaatgggccc

SEQ ID NO: 33495 - DNA, 201 bp, Bos taurus
tccatgtgtttgagaaacagcttggaggccagtgtgaggtgagtaagggagggagtagtgggaggtccgggaggcatcctggagtcaaacctcataaaggytcggaggccacaggaggggctttgagttgcgtcctaaaagttgtgggaagccaccatcgaaaggtttttaggaaggcagtatcatgatttgacttagttt

SEQ ID NO: 33496 - DNA, 201 bp, Bos taurus
atatatgcccggccattcattataggccttgtgtacgtcctttaaattgaacgagatggaaaatactacatgggattttggagggttgtttggaacacaarcctagatttgaatgaagaattgaacttcgacatgagagtgtggtgcaaaaggactggcagagcaaagccacaggaggaggcagattgtggtgtctgccat

SEQ ID NO: 33497 - DNA, 201 bp, Bos taurus
taggaaatgaagtagataatgtttctagaataatatcctgttaaaaatacttttaactattagccaaacatttttatatatgcttcttcacaaattaatgytttcattgcaaatgatcatatttataaggaaacatgatagttaacaatagttaacatttattaaaatgaagggaaagaaattgtcaggttggctaaaata

SEQ ID NO: 33498 - DNA, 201 bp, Bos taurus
tctcaacttcctttccaaccacagagtgatttaaacttgagacttctgtctcctaaggagtccaactgcagtaccagcatgcgaattagctgtgtggcctyctggaagaccccacgcaggcttccctggttctgtgtggtgttttctgtcgaaccagcagacgagtgtgtgtgtgtgctgaccctgtcttctctcatttca

SEQ ID NO: 33499 - DNA, 201 bp, Bos taurus
cctgacaagatttcacctggaattccaggcacagatttgttttactgaggaagctcattccagaagctaggggcaaagtgagaggtccaaggccccagagytaaagaattaagaaatgttttttctttcgctaacgcaaactgcaaacggttctgcggtatccctcgtgagaggccgggacacctctggagagaaagagta

SEQ ID NO: 33500 - DNA, 201 bp, Bos taurus
aaaactaacagggcctcctgaaataaagaaaacccctttgtcattttccacatcgtgaaagtctttggttcttcaatcacttctttctctgtctctcttcrtcctttcaatgggcctccaattccaaggtcttcagtattaagttccttgtgttgcacagaaaggagttcaatgaagtcatcctctttcagatctagcttg

SEQ ID NO: 33501 - DNA, 201 bp, Bos taurus
taatgcagaacaataggggcaagtgtaggggtgaaggcaggatgctttgggagagcacagatggttggtcgcttaccccagtgttgaactaaggaaggccygtctggaggatgtgatgagatctaggctaagtcctctctaagaagcatcatttaggcaaagagaattgggtatggaggatgaaatagcatgccaggcaaa

SEQ ID NO: 33502 - DNA, 201 bp, Bos taurus
tgttacaagtctttcatttaaaagatgaaaaattaagggccaacaaaattaagtgacttgtccagggtcacacagcctgttgttagcacagctgagacaaratccatgtcaactaactcccaggtgaatgttgctttaatttttgtttttagggacttttgagtgctttattaaaatggatcttttggagtctttaaaaga

SEQ ID NO: 33503 - DNA, 201 bp, Bos taurus
catcactcattagttagtcatagttaagcaagttctatattagtgatctaaaggtataatgggaaaattgctaaactgagagaaagttctgattcaataaycaatatttgcacattctaggaacactttgaaattggggtttggcagaaatggtctctttgtgaatgtatctttgtattgtgaattctctccaaagtgaaa

SEQ ID NO: 33504 - DNA, 201 bp, Bos taurus
agtaaatgcaaatgaggctatgatcaggaatctctcaactcttgaaaatattgcagaatctgttactaaaacagtaagtttgctcaacaaaaattcctagwttctctggccaaagttgtcctttataagagtattatcttttagcagagcatccaaacgtttgtgctgtggccagcactgcctgccgcacttggattgaca

SEQ ID NO: 33505 - DNA, 201 bp, Bos taurus
aagcattagtagtagagcttaagtgagagaatgtagatttcctaaggattttcagtaggaaaaagaagagtcagaaaattttgaggccagaaatgtagtgkaaagtagaatgtcactttggagtcctatctctcaacaagtaaagggccagaggagaaattacttttgaaaatgggtggatgtgcagtaatttgaatgttt

SEQ ID NO: 33506 - DNA, 201 bp, Bos taurus
ataggccatgcttctcatccctttacattatccgagtgtttgactgtcccaagatgaatccaccttttcttaataaaatattgatgcttggagaggcttayccatcttgcccgaggccacacaaagccaacagtagaactacaaagttaaccatggaatcaagtattcctcctcccgttgaggatgttcatatttctctac

SEQ ID NO: 33507 - DNA, 201 bp, Bos taurus
gtgccctgttatgaaaagttaaaacgaaaaatcacctgtgatgttttccaaggtgtttttcaactcattctaggagactgttaaaccaaacacattttaarcttaattcttttaaaacaataagtaaccttttgtttcctgttgaatcttccaattacagtccaattagtgtggccagataatttagatgtgttgattata

SEQ ID NO: 33508 - DNA, 201 bp, Bos taurus
gtgggcaggagggcaccagtgatgcacagtagttaagaactttggttctacagtcggactgcctgagttcaaaacctggctgcggctttcccttcagtcartttacctaagctgagtctcagtcctaaacctgagacaagaataaccccaacctgtgtatgtggattaaattagttaatatttgaaaatccttagaagagt

SEQ ID NO: 33509 - DNA, 201 bp, Bos taurus
ttttaggctgttgaacagggagccattcttatggggcctagactccacctaatatagtgtgcaatgcttcctgacagaggtaacatactacagaaaacttytgtctggcctgtgttctccttacacctcagtttcaaatggcttttattataaaacactgtactggcttttcttatgaaatattgtataaaatactttaca

SEQ ID NO: 33510 - DNA, 201 bp, Bos taurus
gggcagaaagaacactgctgcttgcaattccatgcagatacatatcatatatttaacatatttaaataccacacataccacatatttaattcaaaatcttygctaaaagaaaagagtaagagagggcttatcatattgagtgaagtaagtcagagaaagacaaatatattatatcacttatatggggaatctaaaaaaatg

SEQ ID NO: 33511 - DNA, 201 bp, Bos taurus
agcacatcaatggtctagaaaaagttgaggtttttcatgaaacccattttttgttttaaaacaaactcacataagattttgcagtctttaattttgcatcktcaacaaataaactattaattctgcctaatcaaagtacttcatgggctcaaatccatattttcatattcatgaatttgtgaaagtatttcttgctagtag

SEQ ID NO: 33512 - DNA, 201 bp, Bos taurus
aaggaaaccaatataaattaaacaagcaaaacaaatgacagaggaagaaatatgtaagttttccactgggtaccagcatgacaaaaaaaaaagtttgataytttgatgcacttgatttaaaattcatacatccctgcctacttttataacactgattactatcagagaagggaaatgggtaactggggaggagactttata

SEQ ID NO: 33513 - DNA, 201 bp, Bos taurus
gacgaagaatccaaacagagagaaggaacaagagggcctaccaagtagctgatgatcttggtcttaacttgtcatctcaacagggataaatgctggtctargtgaaatgttttggcctcccaagaagaaaggaagtagaacaacccaaggtagcatggatatcttcaccattatttatgagctttaaagctaaatgaggaa

SEQ ID NO: 33514 - DNA, 201 bp, Bos taurus
ggtcttctgcccattttttcaattggattgtttgttgttttattgtcaagctatataagctgtttgtatattttggaggttaatctcttgttgatcgcatkgcttgcaaatatttcttcccattgcataggttgtctattttgtttatggttccctttgctatgtaaaattgtgtaaatttgattaggtcccatttgcaag

SEQ ID NO: 33515 - DNA, 201 bp, Bos taurus
tatttcaggtaccttttccacataagaccagagcctcttggccttaccttttccaaccattaactttgccccagatgcactacagtgatctgctctacacrggctgtttccaagtagagcttcacctactatctgcatgtgggcacagtaactcaccttccttcctggggcttccctgagaaaatgcaaggcacccagata

SEQ ID NO: 33516 - DNA, 201 bp, Bos taurus
atgagcagtagagctcttttgattcatagtacctctctcatgcagtcttgaaattaacccctgaaaaagatttcagttcttccccaattgggtcatatccytattttcaggccagtcactttgtttgtgggggtggtggtgttttggtgagttagcttgggtcacttgtccacccttgaagtgagggagatgttgacattg

SEQ ID NO: 33517 - DNA, 201 bp, Bos taurus
gtgacattctatcaagaactcaggcagcatatgttcccagttcattattctgcactgcctgtctgtgacatagtctagcctaactcttgtctgtttgcttktatgaagaatacatgctagatacttttacatatagctccagaaatacgctccttgcttttttaatataaactaatttaatgtgaaattgtttttcaaaat

SEQ ID NO: 33518 - DNA, 201 bp, Bos taurus
ttaacagagttgtttttatcaagattttagtaagatttttctttaattagtaactcattttctgttggagagctgatgggattgacccttgagctcacttratctgtccttgacttcttaacatgttgattcaagttcctttatcaaagtttctctgaattcctcatttcttatttacttctcaccctgtgttgggattag

SEQ ID NO: 33519 - DNA, 201 bp, Bos taurus
aaactgtgataggtggaagttaagttcgtaaaatacagtttaggtagaaaatccactatattttaaggtttttaatggtctagtccaatgatttggccacrgtatatagtaaacaacctgatcatatgagaaagaataaatctttccatacatctccatcagtttgttctacaggccaatctctgcttgtaagtgaagctg

SEQ ID NO: 33520 - DNA, 201 bp, Bos taurus
ttatctgagtgatatttgtaacaatgaatttaaaaattcctaaccttctggagtgattacttccgattaataacagctggtatcttttgttcttttgaggrtagcactgttagttggtaggctatgctttctatatattttgtttttgttttccccaaacttccgcaaataggaaaacaggcctaattctatgacattact

SEQ ID NO: 33521 - DNA, 201 bp, Bos taurus
ggcagacctgctcaggctctgcattcagactttccatggccagggctaattcttaccacacaacactcaggtaagaagactgggagtgacagcaccccagrtaccatgtaagtattactctctagttatcagccagtgatccttaccctcatgttaaaagctgatccccctctatctgaatatgatcagaatttttgtaag

SEQ ID NO: 33522 - DNA, 201 bp, Bos taurus
ctctctttcagcttctgtgcattagccctctacccctaactgctcctgcaccacactgctgcctcatcagatcctcccatccttcaaggcccagatacagrcatcatcccctacagcaagtgttttccacctactgccttccttctctgcctgactaacttggaatctgccaggcagaattaatttcgttatttcaacaat

SEQ ID NO: 33523 - DNA, 201 bp, Bos taurus
agaaagtcaggaaagcaggctcatctgaactgtggaggagaaaactcaggaaagcctcctttgccccaaagggctgagctgaggatgaacatgtaggtatracactgctccactcagccagttcccagcggctggacttcagacatcaggttggagggggagctgtgcaaacaggacaggcaggcaggagatcaccaagtc

SEQ ID NO: 33524 - DNA, 201 bp, Bos taurus
gtcaaaagaagggccaggattactctcagcagaactgcgtttcagctgcttctgtcacttttctattttgctttccagaaatgaacgatttctgcactggratgagcagagcagaaaacatcactggaaaggagaagccctttgattttggattatcagagtggaaaactccatcaacctccctgaagatttgtctcacct

SEQ ID NO: 33525 - DNA, 201 bp, Bos taurus
acctgaaccaggactcactgtctctgtggaaatggtgattaatctcttcccttccttcctgtatccttcttcccagcacagcttgtgctacccagggcctyttgtacaatccagtagaacctggatgaacggaggagagagactcccagggaggacggggtgaaagaatgccttggggtgagtgtgaaggcctgtaatggc

SEQ ID NO: 33526 - DNA, 201 bp, Bos taurus
aaagtgacatacctgagggaagagaaaaactgaagctgtgatcgggcagtgatcagaagccagggacccacaaacccacagatattacagaaggccatgcrgacttttttaggaaactccaggaaagagagaaggaacactgaaccagaatagaccagaggcaaacctgggagaaacccaagttgcagccatcgtcaatac

SEQ ID NO: 33527 - DNA, 201 bp, Bos taurus
aactgtcaaacttccattgctatttgcactatatgtgcagggcatcaaaatgctttaaatacaagtcagaaattatcttcaggccctacccaagaggcagmgagtatttgggctaaatctggtgggacaagagttgtatttctatgttatcattttatattatataagagctatttatagaaaggctcaaagcaggccaaa

SEQ ID NO: 33528 - DNA, 201 bp, Bos taurus
cctgcataataaaagcatgacaacacttgatctctaaggcctcttctggttccaacattctctgtcaatctactcatgttaattttcaaggtttagtttcyaggtctgcaatgtggcctttctacactggtaggataaaattctctatttggttcaaagactgaatatgttcatgttgttgactaatattttattgacagt

SEQ ID NO: 33529 - DNA, 201 bp, Bos taurus
gatcacatacttaatccaaaatatttaagccaaaatgggcacactttggaacatgaaagtgaggtttttggctgctttggctaaatgtcactggaagacarttgtggagatgtatgtctacagcaggaccaggcttgttgttcagttgctcagtcgtatctgactctttgtgaccacagggactgtagcacaccagacttc

SEQ ID NO: 33530 - DNA, 201 bp, Bos taurus
taggactggaaatcacgtgagcgagatcccgagccggccttctcccacccgcctcaagcccttgttagggctaggggttgggaaatgaatgggcgttggaktccgctgggggccgggcgagaggctggatggggtgacagtgaacgtgcctgggagaatcccaaatgtcgctaactcaggcaaccatccgcacgtcaaagg

SEQ ID NO: 33531 - DNA, 201 bp, Bos taurus
agcaaagtgccaggaaagggacaatctagcaggtgaaagcttttaattaataaccaccctactccaaccaaggaccactgaaaaagactgtggccccttcytagcctcaccagcacagactgagcaggaaacctaggtttccatccttgtaaagctgtgacaggacacctcccgcaacctgccctgtagtatcagagaagg

SEQ ID NO: 33532 - DNA, 201 bp, Bos taurus
ttttaaaatcatggtttttttttggggggtggtgcactttggttctttacatactttggatatttccctttgtcagaagatatgatttgcaaatacttcckcacattttgtgggttgtcttttgcttctgttaacagtgttatatacaaacattttttatgtaaaaagttaaattttgatgaaatcgaattcatctttttt

SEQ ID NO: 33533 - DNA, 201 bp, Bos taurus
ggtcactggcgttgctcaggccggggagagagtggcaggtggtccctgcttctatttccctcatcctcaccctcccattaatcaccctcttctggaactcytctcatgcaaattctctggccctcaacacataaggatataagaaaggcttttgtgtaacttggaaaaggaaggttgcagcccagaattgacacaagtttt

SEQ ID NO: 33534 - DNA, 201 bp, Bos taurus
ttaactgctttaagtcaggaaacagctgtcattaattgacatgcatctcctgtatgtagtcaacatgattcagagatcttcatcactagcgaaacattctracacttctacaaagagttatacaatttggctcattctgtatcaatagctcatctgtataagattttggaaaagtaataaaatatacagaatcctaagaat

SEQ ID NO: 33535 - DNA, 201 bp, Bos taurus
tagatatttatattttgggagattaattccttctcagtagcaccattaacaaaaattttctcctattctgtaggttttttgtttatggcttcttttgctaygcaaaaacttaagtttgattaggtcccatttgtttatttctgtttttattcccattacactaggagatggattcaaaaagatattgctgtgatttatgtc

SEQ ID NO: 33536 - DNA, 201 bp, Bos taurus
taagggcccaacttgctgtcatccgcgagcccctgggaggaggaggaagccgcgcagcagcataccgctcggttccaggtcctccagccagggatccgggygagggaagcggccgagagcgaaacgcccggagctcaggggtgggagaggctcactcacccagcagcagcaacttgagctcgcggcgcgcgtccttcttgt

SEQ ID NO: 33537 - DNA, 201 bp, Bos taurus
ttctgcatatttaaatatattttaaattaaatacattcaatataaatataaaattgttttgggaggatccttgagaatatcgtgatatgattgggggtgamagggagaggaagtatatagtttgataatttaaaccattctcatggggtagataaaaaaatacttttttcccctagagaagtccagaaataccgatatggt

SEQ ID NO: 33538 - DNA, 201 bp, Bos taurus
cattttcataaaaatcaccttaaattgtggactgatttcctcttaaagcccaggttcttgttcactacactgccctgcctctgttggaaactgtcttcacygtaattacatggagattagctaaataaaatccaattcatcatttaagttttatcggatacctagtgcaggagacagatgcctgagtcaccaaccgtgtga

SEQ ID NO: 33539 - DNA, 201 bp, Bos taurus
ttgcaggaaattagaccagccagtttgacaccagttaaatctcagaagcatttttaaaagatcaaatgctggaacatttaaaaagcacagcttgataacartcaattaaggtagcctcaggatgtggccaggagattttagtaatttgtgtgtgtacagcatggatggaaattctaaaaggcattgccataagagtcaaga

SEQ ID NO: 33540 - DNA, 201 bp, Bos taurus
atcctttttcctttacccctttcctcttctgctctcaccatcttttattcgtgatatgattttgggtttcatgggaaaagcaaagctagattaggaagaargaggaaatcgggcattccagaacagcatatactcaaaattcagggataaataacaccctcaaaactgaatattcttggatcaatgaaaagtgtcattctt

SEQ ID NO: 33541 - DNA, 201 bp, Bos taurus
caagtgtgtacctgagaaaataccttgctcaggcatacagtgctaccaggtacatagtctcaggcaggagaacgttattgatagcattgtttgaagtagcraagagatgaaaacaaactagaaatgaataaaaagaaagaatatgtataaaatgtaaaatattctcatgagggtctattccataggattccaaagacttaa

SEQ ID NO: 33542 - DNA, 201 bp, Bos taurus
ctgagaactgaatgttctaaaaatgcaaaatagataatttccccagaaagatgccaaataaacaacataaaacaaaaatattttggcccaccacaaaagaygcttgctgtttccacaactattctatgtatccctcaaagttaaagcaatcagaatgtcataaagtgtgcagtattaaaatggccatcatgttatagaaga

SEQ ID NO: 33543 - DNA, 201 bp, Bos taurus
gtagtgactgcaccaatttccactcccacctatggtggaggaagattgttttttctccatatcatcttcatttgttagatttttttgatgatggccagttygacaagtgtgaggtaatatataattgtagttttatttgcattcagcaatgttgaacatcttttcatatgcttgttggccacctgtatgtcttctttggaa

SEQ ID NO: 33544 - DNA, 201 bp, Bos taurus
tatttacataatagttcttgagatatgggctacttggtgtatcatttattgctgctacagtatagtttgacctcataaccacagtatgggtactgaagttyccatccttattcaaatcaagaaggagaatgatcattaattttatcaagaaaagcagaagttttcttagagctcccagcttcttaagatcctttggccaga

SEQ ID NO: 33545 - DNA, 201 bp, Bos taurus
agtcatggggggcactggggcataggggtgggtgaggaacggtcagagcatcacagatgtcccaagcttaatccatgggggagaagaaagggttgaaggayggaggagtgggcagttcatttactgataaattctggtcttcttcatgtaaatggtgaaagtatgtggtgtcagggaaaactgcagcactcaaattttatt

SEQ ID NO: 33546 - DNA, 201 bp, Bos taurus
gaagcttaattaacttataatatgtggtcaatttggatggcaaaacccatctttcttccctgtgactcaaacctcctgggctttcctcataaaacacccaygtcctatttgctacccatgcccagttgccgttcgtttgtgttgacagtttcattgtttcctgctgacccctgtccatccacaattactgtggtatgtagc

SEQ ID NO: 33547 - DNA, 201 bp, Bos taurus
gtctctcataggattattatgttacaatttgaattgagatcttaaccttagtcccacaaagctctcttcctccagtctacttttcatactgtcctcacacycattatttaggcactcatatcttattgtgccatttgacacataaaacatattaggattctctgtttttttccataccagtcagcacagataaagtccaca

SEQ ID NO: 33548 - DNA, 201 bp, Bos taurus
tttccgatgttctaaagggattaatttaccatatcgtatagccctggaagactgtgataattgaaaacatccatattcattgcatgttcaaagggatctgyctgactttgtaatgtaaaaagtgcatttttaacctgaacggggacctgcatctgccattgcttaatcctattagtccaacagtcccaaagctttagtgta

SEQ ID NO: 33549 - DNA, 201 bp, Bos taurus
aaaatgtgtgcatctgtttggaatgcattgctaataaacattcccaaatacatttgctccagcctagcagtatgaaaccactagggcaaatccagaaagtyacatattgtgctggctagctcagaatgtgtgaacatggtgatcaaggacaccagaaagaagcctattattcctgtatataaaaaaagtaatgtgtatggc

SEQ ID NO: 33550 - DNA, 201 bp, Bos taurus
ataaagagataggacaatatgaacttataaatatatatctgctctcataatttatgctttacagacatagcaatagggcctatagcataggatactgaaartatgactccccaaacccaaaattacagttctagaacaaactattcttgtcagttaggccccctccagcttagaagcaattactggagccacagcaaaaac

SEQ ID NO: 33551 - DNA, 201 bp, Bos taurus
tgatctgatgatatttttaagaattttcttttttttcactttgtgcctactcaaatgtcataccatactgaccactgtataagaagcatgttttccatatraaaaggttatggtgcattgcaacgactagatacatcccagacttaacagtgaaaagcaaacattccagctagactgtgagacataaagcaaaattatatt

SEQ ID NO: 33552 - DNA, 201 bp, Bos taurus
tggggggttgtgctacaagtgctgagtagactcctccaaatcaacatggtaagttctttttttccttttatttgaatggtgtctagcttccataaaactcycctcagttttggccttatacaagcaacttcctgttaaaaagctctccctgaatcttattggaatctcaaatttattacattagcaaaaagaattaattat

SEQ ID NO: 33553 - DNA, 201 bp, Bos taurus
gaattttttgtggaactctctctccagtataatcactaagacaattcattgatcagatgtctaagttgaagatttgaatattctaactccaaaatctaacrgtgaagtctgttatattacacagatacagcttcagtgagcctttagcactctgggtattgtgcatgtcctctagtaattcatcatctgtgaatcttgagg

SEQ ID NO: 33554 - DNA, 201 bp, Bos taurus
ggccagctgttaccaagccagcccctttcattcagggcacacagacaaattacattcccagaattcactgcagttagttgcggtcatgtgaccgggccctsaataataaaatgggagaggaagtgatattctctactttcagaattggcaataaaacctcccctgtgattctccactagcactctttcctcataggccagt

SEQ ID NO: 33555 - DNA, 201 bp, Bos taurus
catgttattatttaaattatatcattctctttaaaatgctttcattgtctacataaagcctcatatcagaagaagctggccaagtctttttaaatatgacmattttggatattctcatttgtcactctgatccactcttcatttacccccaccctgctttctggcctaggaacctgacttccatggagagtaacaccatga

SEQ ID NO: 33556 - DNA, 201 bp, Bos taurus
gatatcatacagtatttgtccacgagaacttgaagttttcttatctttttaaagatgacaacaacactttcccaagctgatagagttgttactgggagtcmataaggcaacatttgcacagaggtgatggaatagctagaatgctacatcaacagtaggttttaaaaaacaatacatactattaaaaatgttatctatcaa

SEQ ID NO: 33557 - DNA, 201 bp, Bos taurus
aaatcctttcttaaaattcttaatcatactttctaaaacaataggttttgaggttgaactgcccattaagtgagagttcctaacttatggtggtgccacamaatgaacaaagggaaacactcactttcatctgcctggcctctcacctcacggaaatttagctgtctcttagcattggcacaaagaaggcaatggcaaccc

SEQ ID NO: 33558 - DNA, 201 bp, Bos taurus
tcaatttgactttgtcattcagaaagaaaaaatattggcctttaagacttgctttgcctgtagattgaggtgcacttatctcttcctttcctcattttccrtactcttaacatttccacagaagaaagaaatttgcactgtccagaaggaatgaaaatgtaagaaactctcctggcctctgttcctatatatttgtactca

SEQ ID NO: 33559 - DNA, 201 bp, Bos taurus
ctcaaatggattctgatagcttcttttaaagtttaatgtggtgtttgtggagtgtaatcatgttgcctttggtgctaaccagtaaaatgactataaaatgwccagtaaaatgaattttccctcacttccttatcagaactttagctgatgttcaattagttaccaaactcaacttgttttatctatggaacattgagaata

SEQ ID NO: 33560 - DNA, 201 bp, Bos taurus
tcagcttcaagaaaattaattctgaccttttgagagaattctattggtttgtatatgggcttgcctgtctctgaattcagggcacacacatttctacacayaagcattcaatcaggagccttggggcaagtttggcatgggactttggtctctgcttctttctacacggttttaatccagagcacctggagaatatactct

SEQ ID NO: 33561 - DNA, 201 bp, Bos taurus
cagtataaacttaggagagtctctgtaggatgatataacaaagcatggttatttccataattgcatttggtccagctcttgggccaccacatttctgatgytccagtgaagtagaaaagagctcatagattttcaaggctgccacccaagccagaggtaggctgttaacagttcaagacaggagaaaattgtaatatatgg

SEQ ID NO: 33562 - DNA, 201 bp, Bos taurus
aatgagtcagctctttgcatcaggtggccaaagtagtggagtttcagcttcaacatcagtccttccaatgaacatccattgtccagcatcatattaatgtrgcaagatagggcctgaaagtgttatacttattaacttttatattactaataagctgtcatttactgtatgccaagatccatgataagtgcactatgtata

SEQ ID NO: 33563 - DNA, 201 bp, Bos taurus
aaggtcccacgtgctgcatggcacagccaaaaaaatcaaaaacatcaagaacatgcaggaatgcttctaatgaccactggtgttttttgattaatagatamgtgatttgttttaaatgttaaaatttggtaatgaacaaagcatttgttccttaaataagatattgactgcaagtttaatacactctggtcgtctttccaa

SEQ ID NO: 33564 - DNA, 201 bp, Bos taurus
tatcaataggtgcagaaaaagcatttgacaaaattcaacatgcattttcagcaaactaggattaggcttcccacctgacccaaactatcactggatagatrttaaagtcctgacactcctccaggcttcctctgataccatcccagcagggaggtggaagaataaactccggggggctggaagtcccagctccctatgtgg

SEQ ID NO: 33565 - DNA, 201 bp, Bos taurus
aaattaaaaggatacaacttaaatgtccaatattatccatccatttaattagtgtggctgattatctaccccagtgtcctgctccaagtcccaggcctgcycttcccactaagttcaccagctgttgatacagaattcccagcccctggcagtttcctatctccggtgcctctgtctctcttgcttttttgtcagacagct

SEQ ID NO: 33566 - DNA, 201 bp, Bos taurus
ccacacaccaacatcagcagctgaacaatagagaggctggcccatcaaatgccggatgcactgaactacagagtaggaccccacccaaggtgctcctttargagattgatgcgccaccccaggggcccccatctaggtacctgacacgccaaacaacagaaggaccccaggcgagggagcccgctaaatgcctgaatggga

SEQ ID NO: 33567 - DNA, 201 bp, Bos taurus
ccatctacatgctctcccttcctgcttctctcctgcctacccttgggagtttccatgtcctactgtgatgttcattcccagtgtcacttattccacgcagmtgatagacagaggaggtgggatacaggcaagagaactacagccgcctcccaggtgagttctccagaaagatctaacataaccgacaggagcagaagggga

SEQ ID NO: 33568 - DNA, 201 bp, Bos taurus
tgtcttagcagagatcacaatgggctccatggcagcccggccctggggagaggggaggtcgaggggtgagtctcaagactccttgaaagatgaggtggccrgcagttcatgcgttcaccctgcctcacctcagggctgatctgggcaggaacactggagaactcagggttggacgcaaaggcgctcagattgtccacagcc

SEQ ID NO: 33569 - DNA, 201 bp, Bos taurus
ggccatactgttgccagagatgggaatgcaggctgatgggaactcaggctgagccctcagtgataggttttcctgtgagtgaaggatgggagaacttcctytccaggcctggaagccctctgggtgagaacatgctgggaacttgcccagaagtggctctgggctctaggttcttgattcccgtcagatccaaggtctctt

SEQ ID NO: 33570 - DNA, 201 bp, Bos taurus
tctgctccagaggtgctggccctccctgcagtccctcagcatcatactgagctgagtgaggattacaggctaaagcagaggacatgaggggccaagagagmtctgggtttggtgaaagagcaacagggtcatgctgtaggtggaagttgctccagagttacaggccaagcaggtgactggcttctggatagttggagatct

SEQ ID NO: 33571 - DNA, 201 bp, Bos taurus
aataaacttctcgtacatttttttctgattaaaaatacattgcataagtaggaaattattacttattaaccagtgaataagaaaattttttgagctgagcrctttgctaaattgtgtacaagaagtccccattcagtctggaaataccattagtacacacatgaaattattagagttaagtgataaagttttcagttctga

SEQ ID NO: 33572 - DNA, 201 bp, Bos taurus
gcctctctgattttaagcagatgacttctgtgagcctcagctttcctatttataaaatgattgggctggatgagataaattctataagccctgattctctrtagccttagagtctaagtctggcctaaaatcaagtaagcaaaatgaatgtattcataatcctggatgccattagagtagtcaaatatatgtgtagacaga

SEQ ID NO: 33573 - DNA, 201 bp, Bos taurus
ctattcatctccttccgaagactctgagccccctggatagtatccgggtcccctaaggatccgcaagagacaattactttcctgggttacgcaggcctaarcttgtcattccaggctaccagcctgagactgtctgtgcccaaaggacaggcagcatcacagacatgcatccacagaggggccctttgtggttccataaag

SEQ ID NO: 33574 - DNA, 201 bp, Bos taurus
gtatcacctttcctattgagttcaaccaccggcccctgctctcttttcatcaggacaacatcctctgcgtgtacagccaccggcagagtgtagagatcaayctgcagaaggtaaaggccaacaagacaaccacctcagtgcctcttttgcccaacaactgccccttggatgtgtcccatgctatatgctctgttggagaca

SEQ ID NO: 33575 - DNA, 201 bp, Bos taurus
tccttctgggacggttaatctcctttcagagactgtaagtcctagtggcttctcagcggtccttaagaagataaggacaaggtcactaaggccactgtaaytcagacctctgatctacagttgctcaagattctgagagagtaatagcaaacgacgtctttcagcaagtaacgtacggcagtgagagatacacctgatgtc

SEQ ID NO: 33576 - DNA, 201 bp, Bos taurus
agcagtcacttgggacctcagagtttcctgccacattgccttgtgaagaaattctgagacctttcctccagcatggcctctggttccaggtttatgtaggygggctcctgggaaggatcataacactccagcccccagggcacaagccaggccctctctggagagtcagccttgttggaccctgcatggtcaaagagctgt

SEQ ID NO: 33577 - DNA, 201 bp, Bos taurus
agataaaaccctatcatcttaatccaactgcccatcttagcatcattaacagtgggccaaccagatgtgacttctgatgtgatacactgtgaaattcagayatcacctctgcttggtaatcaagcaaaaaatactttccttggctccatcaaactattggatgtgattgccagtttacaggaaacacaggggacagacatc

SEQ ID NO: 33578 - DNA, 201 bp, Bos taurus
tgattccagaagaatagtaaatataagtggacaagctggcaaggtaggggaaccttggggctcctctgaagggctttctgggatataagggcctctgccarggctgcaggctctggttctaaatttttttctaatttcacatctcatctcagagttcatctttcccttgagagagtttgtcactggcgagactcttggccc

SEQ ID NO: 33579 - DNA, 201 bp, Bos taurus
aaacagaacacagagaggccaagtaacttgcccagtgccacacagggattgcccagaagatgcagtcctaaacagtacactatgccacccatccctggagygccaggcccactctgagagccgggctgagttaagacatgatgttcccttgaggaaaacccagtttcaggacgtgaaaagggacgctatcctttagtgagt

SEQ ID NO: 33580 - DNA, 201 bp, Bos taurus
gctggggccgcgggctgctgacatgccagcccatccctgcccagccctcccctcccacagaaaggccaagtcaggtaccagggcctctgagaagcaaagcrtagctccgactcttattcgtaagcctctgccggttctggtatcacctatgccctgcccctctcctgggccatcaggatcacagaagggagactgcaacac

SEQ ID NO: 33581 - DNA, 201 bp, Bos taurus
caaaagtgctccataatctacaaagtgctactgccagtattgtcagaggggaagaactgctaagaattctgaatggcctcactcttccaggaagccctccyggacttcccctcttgtgttcctagaaccctaaagtgcatgcacatccctacagctgcacttaacactctgtattgtatacttcattatttaagggccctc

SEQ ID NO: 33582 - DNA, 201 bp, Bos taurus
tggcctgtcccagtcctgtcagaactttcctgaaaagctgaacacgctcaatgtcaagggtcaaaagggcaaggggcactcggggtaagagaagaggaagygactgccagtgtgggcctgctggtcaccacgggaacctgaacttcctgctgtcctcctcagcagctcctctccccacccggccttcccagtcctggagct

SEQ ID NO: 33583 - DNA, 201 bp, Bos taurus
cccacgtctggcctcacagagacactagggcatggggttagagcaggcccgggggtagcaccatcagggctcaaatgccacgtctgtcctctgctgggttkttacgcacgttactcaaattcctgtgcctcagtttctactcactggggataataaaagtacctactgggaacttccctggtggcccacggttaagaatcc

SEQ ID NO: 33584 - DNA, 201 bp, Bos taurus
ttaaaggtaagtgaccccaaaggttgtcttctaagacctgcctctgtttttaaatttatggtttctgatgggccaaatgttgagtgaaataagaggccaaytaagcgagttagaccttcagtcagcctctgggtagagcttcagggctgggaacagtgcaattgtgtttcttgatgagatggccgttcccgcagagcaagc

SEQ ID NO: 33585 - DNA, 201 bp, Bos taurus
ggaactttcagatcagaggcagagagagcatccaggcctggacgcagcatgctgtgtgcgtctgcaggagtcactgcccttcctccttcctgcctgctgtmcatcttgctctcgtagcttagaggacaggatagaccgcacgtaactgtgatgcgcagcaggatgaatcccttttgaggagagtcaaagcattaggctcgg

SEQ ID NO: 33586 - DNA, 201 bp, Bos taurus
cacttgatgagtaaaatacatggggggctatggttctccagaatgagagaaagagctcaggaacaataggctcccataaggccaaatcattctcacctccrtagctcacaggtcctccctacagcccacagaggcaatgaccaggcaggttggtagattgggcattggagctgggctttgacagatgagtaggagttcagt

SEQ ID NO: 33587 - DNA, 201 bp, Bos taurus
aggacagaggggccattctgggcaagattgctgtgttcttcccgccctgctccccacaacctgtagcatggagcgggacattgatcacggggccaggtgtkcagagcactcaggctactggttaaccaggtgaaggacttcagtccactgtgtgatcaggaacccagggcgggggagttccagacactccctcacctagca

SEQ ID NO: 33588 - DNA, 201 bp, Bos taurus
caccccctggctgaagtcctccaacatgctggggccatccgagctcctgtcttccgatttgccctggtcacttgcccagtgggatggcttcccaggctccyctctctgctgttcaaagagaatgacaactccatggaattccaacagggacacagaaaagacaagttgaaagtatatagggaacttggaactccagtagtc

SEQ ID NO: 33589 - DNA, 201 bp, Bos taurus
actttacactgttttgtgctttctgagctagagttccccataacgttgaccaggtaaatgtccaactaaacaggaggccggggggattggaggcccagtgrgatttggaggacagagaactatggttttcaaaacaggctgtctctgcgagtagggggcaaccacctggaaacccagcgtccctcaagccaatgggagatc

SEQ ID NO: 33590 - DNA, 201 bp, Bos taurus
ctctccgccctccgtcccagcctccttttctggctgcttgcgttacctggggcgcctggtccggctgctaccctgactggggctggactcagcaaattgtktacacagacaaataggccctgattaactcgttcaacctcatgtctcattctaccacttgacctaaagtttttccccttccctcctgtcaggcgcatctct

SEQ ID NO: 33591 - DNA, 201 bp, Bos taurus
agtggacgcaggaaaatcctacacacctgttggcagatttcactctggcccagagttaccttcttgatttaattccccaagacttctatgtctgaatcatrtaggaaaatgacttcttggataaaatattaaaaggccacacgtggatgttcacagtctccctctgacagctctggtgataatggctcagagggagaagtg

SEQ ID NO: 33592 - DNA, 201 bp, Bos taurus
acagagggtccccgggaccactgaggggccacagaccagccttccggtcctcccttcctcctttccttccttgatggccttttgcgtgcctgcgacataamtgtaattgctgatttctctgcctccccacccaagtctctaggagaccaggtggccccaggaagctcttctacagtactccttgctcctggggtgtagaca

SEQ ID NO: 33593 - DNA, 201 bp, Bos taurus
ccaacctgttctttgaagtcaagcccaactgtctagactaaaagtctaggccactggcccaggggctccttcaatgtttaaaccaataggatatgagtcaygtatgtcacttaaaagacttcagtaaccaaaactagttcatcacagtaatcaagttttgtttctgcagcattaggaggggcgatggcaccatccagtttc

SEQ ID NO: 33594 - DNA, 201 bp, Bos taurus
actttttcttccacctcattccctcctctgagcattccccaataaaccttccacaactctcaggttcctaagggaacctgactgaggccaggctcacccakgttcaccttggctcagcttaagccagtggtttgttctctgtttttaaacaatgacacctcttacgctgagaactcagggacagctgcttgcttaagggta

SEQ ID NO: 33595 - DNA, 201 bp, Bos taurus
cagaccttacctgtaccagattccagccttggagggactctgcgatgatggacgtaacagacggacagactcctccaaacaccatcaagtggttcggcccrtattttattgcatcgtagaaggctttcaacccttttgcattatcacactggggagcaacacagaaagagtagccaaaattagaaacagctttccccaggg

SEQ ID NO: 33596 - DNA, 201 bp, Bos taurus
cttgaaactgagtcactgtcacgacaaggtcttagtatagtactgtctatagagctttttgcaacgatgaaaatgttctatatctgtgtagtctaacaggrcaactactggccacaaatagctataggatacttgagatgtggtagtgctactgaagtgctacattttttactttaattaaattcaaattaaataactacc

SEQ ID NO: 33597 - DNA, 201 bp, Bos taurus
tttaacatcttagtggatccctcattgattagcgagttgaataaaatatttgacttgtgtttatttcatacttgagagagtcataattttatctttttgaraatcattccttaccaagattaaagtccaacactttctgctaagaaattctattactatttgatgacagtactaccttacctgtctatagtaatttatagt

SEQ ID NO: 33598 - DNA, 201 bp, Bos taurus
aagattattattatccttacatcaaagatgagggcactgagacttagagaaataaagtaagttgctccaggacacacagctagtaagtggtagagacagcratcaagtccaagtctctctgacattggaatctttgtcctcaactacacaacttccactacaatgtcgcattctacagcagctcatgggtatggtaaagaa

SEQ ID NO: 33599 - DNA, 201 bp, Bos taurus
gtgatattgagcatcttttcatgtacatatgggccatttatatgtcttctttgggaaagggccaagaaacaggttcttaagtaaatcggatttgactagargacttggactctgaaagagggcaccttctgctttttcctcacctacaaaggatttttcctcattccctacaaaggattacctttcccacaaacaagggag

SEQ ID NO: 33600 - DNA, 201 bp, Bos taurus
cctaccacccccacccccgtacgcccagtccaggcctcggtgacccagcatagtctcactgtgacctttatcctttctcctggtgcctgcccccgtccccycagagcctactgcggaagagcgcagcccggcaagccccatcgctgagactggaccctcagcggagccgggcagcaccgcagccacttcacccagccggac

SEQ ID NO: 33601 - DNA, 201 bp, Bos taurus
ccaggcccagaggaaagccaattttgaacctgtcctctggcattgggcttcctgatatgacaccgagggtcttctccctctggttttgctccccggcagtmctgaggcctggcacagggacccatttgactgaacgctgcaggcctaggaaatcagggaatctagaggacgcagggtcctccttaacaattttacaatgaa

SEQ ID NO: 33602 - DNA, 201 bp, Bos taurus
actggcctatcatattaatccactaacctaaaaaatctgttatcttcataacgtcctgttacttctaaccaaaccaattctaaatgtcaaacacatccttraaaggccatatactagctaagatatctaacctaattaaataatcattagaagaagactctttgatactgcctcctaggctcctaaattaacttttgtaaa

SEQ ID NO: 33603 - DNA, 201 bp, Bos taurus
agtcaggattaccccaatgtgtgctgattgcctccatttctcacgttcattcttatgaccaccagtcctgaatcctctcccttattcaaacttctgaggarggatgctactctaggaggaaattattacatgaattagcattatcttgctaacagtaagtactactgtctttgcttaatactaacaaataagatgcagatt

SEQ ID NO: 33604 - DNA, 201 bp, Bos taurus
tacaaatctttcttaaacttattaaaaaacagaaaagggataacttccaaacttatattatgaggctagcatcaccctgttaccaaaaaagagaaggacamgagaagaaaaaatacaaaccagtatcactgataaacatagaagtaaaacttctcaacaagatagtcacaaaacaaattcacaatacatttaaaggctcat

SEQ ID NO: 33605 - DNA, 201 bp, Bos taurus
ggttggtggtggttacaaatctgccttccaacacagaggacactggttggatccctggtcagggaactgctatcccacacgccacaggccaactaagtccrtgtgctgcaaataccgagctcacgtgctctggagctctcatgctacaactaagagaggcccacacgcagaaacgaggagcctgagtgcccaactagtgcc

SEQ ID NO: 33606 - DNA, 201 bp, Bos taurus
gccaaagccaactccaggaaccctagaactctgcaaccagagaccccagtacccagctccacccacccctgggggaacaccagccctagggctatcccaayccctttagccagccaagaccaggccccaccagctagcaagtcaacaccagcctcaggacaccttcagcccctcacctaaatgcgcctctcctaccagtgg

SEQ ID NO: 33607 - DNA, 201 bp, Bos taurus
aaaatgcagacagtgcagtgtggggcaagacacggaggcatggacctgaatccaaggcagcaaatccacaaggttcagctgtgagccataatgagtaagaytgatgggtgatgccaatgagtttgtgaaatagaaattaaaagaaacccaaaaaacaaaaaactcaggctgaagcatcattctgacatatgtagcctaaag

SEQ ID NO: 33608 - DNA, 201 bp, Bos taurus
atgtttccccaaggccatggtttcttttattagagaatggtgttagaaaccaagatctgggtactagatgtacttaatcaatgcttctatagtgtcattgyttctaggccctcttagatgaaagaacaagaaaatatatgtgtgtgtcctaaattgtatatatacctaacattatatgtgtaatgtgtgtgcgttcaattg

SEQ ID NO: 33609 - DNA, 201 bp, Bos taurus
aattagatttagatggggtcatgggagtgggatttccaggatgggattagtgtctttagaagaagaaagaccagaagtctctatctctattcaaaggcacygaggaagggccatgtgaagacacagcaagaaagaaactgtctacaagcagaaaacaggtccttaccaagaactgaatctgttggcaccttgatcttggac

SEQ ID NO: 33610 - DNA, 201 bp, Bos taurus
aggcctcaaaatcaaccttgtcatttttagagtagttaagatgagacagatttgactggttattacagtgcaggaggcttcagaaagtatccgttattatygttggggccagtttgactcttttcatttcgatcacatttttgtatttgttgttcagttgctcagtcatgtccccgactctttgtgaccacatggactgca

SEQ ID NO: 33611 - DNA, 201 bp, Bos taurus
aattagaataagtgtaatagaaggagaggatctagaaaaggtaggacccagggcatccaattccaattgcttaaccagttttcccatgaattactgaggcrttgacgtatctcaaggcactgtttgtcagatttcttgctgcttcctttataacgtcttatttattggtgtagaaacaggaggcttcctccaaaaataggc

SEQ ID NO: 33612 - DNA, 201 bp, Bos taurus
ggagatgagcagaagtgtggaaagaagccaggagttccattgctgccagttgtcattattacaatccaggcacctgaaatgaccatgactcctggatgctrccatcttggttttgattttgaatgacctatgctctggacctaaggaaggcattcccaagtgaacatcctgggaggattctccccaggagatcaggtggcc

SEQ ID NO: 33613 - DNA, 201 bp, Bos taurus
aacctcagggccccctgcattcttcaagagcctcctcagatgaccccgaaggagcctgactcttgctctttctgtctgaatatcatgttacctctagtgtycaggacacttccgggcctccatcttgaacttgtctttgcacctgaatctttggtttaagtataattccttgtaagggagcacagttctgaagtgtctgtg

SEQ ID NO: 33614 - DNA, 201 bp, Bos taurus
cataatgaccccacagtctcagaagcttcaccaggtcttatccctagtattagtattctcaaagataatctctgccaggacccctttgtttgagaagatcrgctcatcaacttgaccgtacaagttcaggttgtgaatattaatgttcaagaatgtaaaattcaaaaacaaacaaaaatttaagaaaaaataggtaaaaaa

SEQ ID NO: 33615 - DNA, 201 bp, Bos taurus
cctatggaggtcttggagacactttcagatggcccatgagattaaaacttcctggtaataatagtaagatgttattggcctgtcttcactctgttctgtcrtgagtacacagtatagtttcccagaggctatgtcgaatgtgatactgcatcagattgaatgcagaggcagagagtctaaaggccttttgtgaagccagat

SEQ ID NO: 33616 - DNA, 201 bp, Bos taurus
gaagcttagtcatgagaggagctactctgaaagtccagtggtccagaatggcagtctggtggtgtgagggctgggtcctctctttctgtgggaacattgcrtgggggaaggggcaggggacggcttgggaatcaacaaatgtggatcctttttagaactgtcactcaccagccatttgatcttatgtaagaagagggcagc

SEQ ID NO: 33617 - DNA, 201 bp, Bos taurus
tttatgagaacatcattaaggccatgaggcctcagcccgagtactttgctgttggctactacggacagggcttcccttctttcctgcgggtaagaagcgckagggtggtctccctggccattgagccatgcagttggaggagggaatgtcttcatctcttttccagatgagtctagtgtgttagcagctggagccctgtgt

SEQ ID NO: 33618 - DNA, 201 bp, Bos taurus
gacacagatgggactggccataaaccagtgggaactgcgccagttgctaggggcttaattccaggccagctaaccatgaggggtcatgtctccttcagccrcccaacttgaccgaccggaagcaaagccgcacaggatctgtgatgatcccctacatcatgtcatccacactgcggagattgtccatcacctcagtggctt

SEQ ID NO: 33619 - DNA, 201 bp, Bos taurus
acaacaaaaaatctttaaaaaaaaaaattagcctcatatataatccaaatcttctcctgtatccttctccctccttcccccatgcagaggcttgtggcctrgggactgagggtgggaacaagactgatcttcactgtccctctgcacttaccaaggtgtgttttctctgacattggggccaacggaagaagaaagagggag

SEQ ID NO: 33620 - DNA, 201 bp, Bos taurus
acaatctcaacagtggtttcaaaaaccaggcctcttttttcataaccctccagcagcctcgtaatgccaggcaccttcctgttgtgattactggaccaaayggggccctaccacgtggagagttgctagtattttcacctcaagccctgagaatatttcctttttttttttttttttttgaaattctgatacatctctttt

SEQ ID NO: 33621 - DNA, 201 bp, Bos taurus
caccagttttgaagcccaaattattatagaatatattcttctttacccttttacccttctcgttcagtttttccaggaagtgagatgctgttttcagagcrtcagtttgaaacagggtgattcttttctatttacaaacagtgcttttttttcagaaagattttctcagtgtcatccttgatctttggttctgtttcttaa

SEQ ID NO: 33622 - DNA, 201 bp, Bos taurus
gaattggacaatgaacagttgacatgttttaagatcaacgtttaaaaagctttatgcctgttcacaatttggggacaaaaaggcaggcttccttttcctaygtttgatgaaaactggcgtaagatatttgtaaatataatcaagagcaaaactgcacaaacttgcacattgacaagtgcagcaagttattctgattgcagt

SEQ ID NO: 33623 - DNA, 201 bp, Bos taurus
tgtttgaggagcactgcttagaccctgctaaatgctagggaggaaagtagacaaaggggaagggggcccttgccgggaagggggccttggagtacaggccktgagctccgatagataccgggaggaagaagctgccgcaaacggtaaggcagagtgagcgggtgaaagaggctgcgcaagacgaccgaattattctcgctg

SEQ ID NO: 33624 - DNA, 201 bp, Bos taurus
cccatcccccctctcccatcattcattgttcttgtcacaaattaaaacgaaaagcaggcagtgctgagggaaagctgtggccccactcttgacacctccckcgcagaaaagcatgtgacaaccggttcccatggcaacgggctttctttgaaataatttctccttcggtgtaccagtcccccgcctgtctcttcttgggag

SEQ ID NO: 33625 - DNA, 201 bp, Bos taurus
ataaaaatgatacaacaaccaaaaagtaggggataaaagcaccaattactgttcaaataacaagcaacaacaacaatacaagaaatcctcttcagttcctrtaagactaaagagctacaaacagagggaaaaaaaaactggatgagagcactgcctagcaaaacataaggcaagaaactcaagctgcagggaagaaaatga

SEQ ID NO: 33626 - DNA, 201 bp, Bos taurus
ctatgagataggcccaaatgtttctatgcttaccataaatcacattgtatacttttttgataccttttatcttccagtccatacagatgtagaaggacttscctggaaggccaatggttaagactcaatgatttcactgcagggggagtgggtttgatccctggttgagaactaagatcctgcatgactatgtgatacggt

SEQ ID NO: 33627 - DNA, 201 bp, Bos taurus
agccttatactcataatactccattttgtctctacatacatgacagttccataaaataaccacagagaaaaagaagtaagaaaacttaaatgcacattgcyatgactgtgcaaatactttcactgaattttagaagataaagaaagcagattaatatcctgtgtgagatattcaagacttctgacacaacacgactgaaat

SEQ ID NO: 33628 - DNA, 201 bp, Bos taurus
tcaagtcacagcagaatacctgcaatggagtggggccaccaggcctaaccagggactaccagagaggggcaataaggggtgttattgccaaggtcagggargacagaatgctaggaatttagggaggcaggtgaaatttaaaagaccatagaggccagagtagggggtaaagctaagaagtcaggcccatcagtgggagat

SEQ ID NO: 33629 - DNA, 201 bp, Bos taurus
taaggcaggagtctggaggcaaggcagagggagaagaaatcaggatgaagatgtaaaaggcagcagaacaagaatgagcaggctgaggtcagcagagaccrgagccccggagcccctcctcattcctgataccaatacccccctccctggacagaatcgcctcccttccctcctaacacaaaggggctctcttctcctcct

SEQ ID NO: 33630 - DNA, 201 bp, Bos taurus
ctgggctgttctgtgtggggaatggcccacactgcccatgtgaccagttccaggtagtgagaactgtcctttcactctgccccaggatgagtggatgaccrtcctgtggcccttaggagagctgatgctcattctgctttgtttctgaagaaggaaagaaaggaggcagcagcttttcatcccaaaactactctctacttc

SEQ ID NO: 33631 - DNA, 201 bp, Bos taurus
tttgctacctgaccccttccagaaaaagtctgctgacctctggcctggtcttctgaccttttctgatgtcatctcctctgtatcttccccacctcagcccyactggcctctttacggttccccaaatgtgccaagcacacagagcttcataaatgctccccctggggactctgtacatctggtccctttgcctggaagatc

SEQ ID NO: 33632 - DNA, 201 bp, Bos taurus
tcaaacagaagggtaaggattcaatactggccattctctgacctaattgcaacggaactgttgggaaggtcaggttgtagtatgttgaaatgtggttggaratcaggaattttctgggcctagatggaaagctgttcttcaaacacagcttcaaagtaagttttaggaaatggccaaaatcagcactatcagaatacctgt

SEQ ID NO: 33633 - DNA, 201 bp, Bos taurus
tgttctgtcacgaatattttccccttcacggtttcttaaaagcaaaagttaaggtttttccagtctctagtcgctaagcaatcctctgggtatatgctaaygtagagaagttgttaacaagaatggaaatgcagataaaaagtagcagataaaaatccagctgctctactgactttttaggcaactcccaaagccccttcc

SEQ ID NO: 33634 - DNA, 201 bp, Bos taurus
ggaaatcagtgaggcctagccttccatggcttggtacattattcattcattcaacaagtattttttagcacttttgacatgtcaggcattgttttaggtgytggggcctataccacagtgaacaaaacaaagcttctgctttcaaggagcttacaatctagtagggaaaggcagaccattaaaagaaatacaggtcatgta

SEQ ID NO: 33635 - DNA, 201 bp, Bos taurus
agtcttaattgatagcttctccccatcctatcattcttgcattatctctttttaatctggccaggcaagtgttcagaaaggaaaatattggtctaaaaaaytcggcgataaacctgtcttataaatacattgtaaaaattacaaaaatccttacatgaggctttaatatttattagtcatgagggaaataacatgaaaatt

SEQ ID NO: 33636 - DNA, 201 bp, Bos taurus
gattattcaagctccagatagctttggccagttccctccaaccaaatggccaatcctttgatcccaacctatgcctgctgtgatctcagctgaagtgctartacattacacaaagatgtttacattacagaaacactgtctacacatatggccaattttacctcaatcctcatcagtatacataagggccttctttacata

SEQ ID NO: 33637 - DNA, 201 bp, Bos taurus
ccagtagaccatttcgaatgaggcatgtgcctaagaacaaggactttctttcatggcctgggagtaaggcctgctggcaggaatgggagggcccacgtaartccacaaagcccttctgtgatacatagcttgctgcaaagtctggctggaaagtgggagcagggccaagattccacagaggccagaggtctaggccaggcc

SEQ ID NO: 33638 - DNA, 201 bp, Bos taurus
ttacctttcagatttcattttggatttttagagattcatcgtgtttcattcaataacattcactactttttccagttttcaaatctacctagctttgggcrataggagttcctttaagatcaactcctgtgaacttttgatgtaactccattggtatttgaaagcgtccttgatttttccatgtaacatctcctaagttta

SEQ ID NO: 33639 - DNA, 201 bp, Bos taurus
gctgcccacctacccccgcccccccccaccccagtgccatggtcaggccacacggctacttctgtcctctctcttcgctgtccacttccagttcggttgtyaaatcagtctgtcctcactgaggcctcctctgctatctgtcatgaattccattctttatttgtcagtaaagtaaaacagctatattacacctctatgaag

SEQ ID NO: 33640 - DNA, 201 bp, Bos taurus
acggttttgtgtctacattcatccattgagcactgaatctcctagatttgagatctttcatcaaaattggaacactaacatagaaggttccttttacaaargtccatgttctagctttggtttttccctaagtaaaaaacaaggtctgtctgcgtcttgagctgcttctctggtggaaatgggtttaagccagtttactat

SEQ ID NO: 33641 - DNA, 201 bp, Bos taurus
agccatgctcttactcagcactgggtcactgtacccggcttgtaagaagtgttgacttagcagaaacaaagacatcatattaaagaactatttttagaacmtttttagaactattaaaagatggtttctattatttgatttataaaaagttgaatatgtaagagaatcaaaaggtaagagattagagatacgaaagtagag

SEQ ID NO: 33642 - DNA, 201 bp, Bos taurus
accacaagatgcacagacaactctcccataaggaaggggtaaaaggctgtaggtagatggctggaaagtgttttcattgggaaggcaaacatgaattcacrgtcctaagatagggatacggtagctctggtgaaacaaacccttactggccccagcagtcactttcaccaggcctgttttgtgcagcagggaggttgatgc

SEQ ID NO: 33643 - DNA, 201 bp, Bos taurus
ggagtactctaagtcacagagaccttcaggtacctaaggttgccattgggctcctaatctgtgcgggggtgggggtggggaatgcagacctgggtggcccmagaacccattctcttaacctctgtgcaatgctggcagtcctggaaaagcgtgtcccagagagccgtggccctctgggcccccttggagggctgtccactc

SEQ ID NO: 33644 - DNA, 201 bp, Bos taurus
atatctccatggcttccagtccccttcagcaaccccaggctctggaatcctccaggaaaggggaaaggcactctctcttggggcctcatccccttctcttygccctgcagttgccctaggggacacatcctgggaatgaggcaagaacctgggacaaaagaacccactgattcaaaggcctgggaaactctacaggcctca

SEQ ID NO: 33645 - DNA, 201 bp, Bos taurus
cccgagacccgcctggtccgtacacccagcgctccagctcctccacccgggcctgtagccgctgaacatcggtcacagccgccatgactcccgctgcccckcctcagccaggaatagccagagggcaggacatccgtccaaatagagaaggcgggccaatccgagtggacgggagcccttgcatacaggaagtgacgcaac

SEQ ID NO: 33646 - DNA, 201 bp, Bos taurus
atgactctgaagctaatcactgtacaaatatgaaaataaatctttatctttaagctcaattttatcttcagcaagagggttgtgtggtttgggccttatgmaaatcacatttagtattcaataatcagatgtcacatatgttatataaagcagcaagtggaaaaaataaattataaaaatgcatgaggctaaaagttaaca

SEQ ID NO: 33647 - DNA, 201 bp, Bos taurus
gttgtcagatctaccatgtcaataggaaaactgttcttggttgtcattagccctgaaaccaaagccctgagcatctaaactaactagtcaaccccatatgkgatttctggtaatgtaaaaataaagatatgcctggaaatgcctcctttgattccagcctccagcaggaaaactaagcatggataaattaaggcaaaggaa

SEQ ID NO: 33648 - DNA, 201 bp, Bos taurus
taattttcttttaaatctatgaatgcctgtgcccaaaggatcttaaggtgaattagcattgtaacaccaaatgttaaaaaagtaacagaagtcaaatttayatcaacagagtatcccagtgaattccaaactggaacaaaagcctagagataaaatattttgcacaacctcccaaattatatctaaggaaattaatgtaaa

SEQ ID NO: 33649 - DNA, 201 bp, Bos taurus
agtaaaacatgacacaatgaagcacttcaaagttagtaaagtgaaaggaaatggtttatgatattaacaaagcattcaaaatcctaaaaatcctcaaaagyaaaaaccaaatggtcctttcctcagaatttatattcttaaaaatagaagcaaaaggtcagcagtgaaatggggctcagttaaaaatcaagctgaattctc

SEQ ID NO: 33650 - DNA, 201 bp, Bos taurus
aatactcagctctgccctcatatcacgaagcaactatagacaatacataaaagaataagcctgattgtgtcctggtaaaactacttaaaaaaaaaacccartttggcccaggaggtctaaatgtctatttgaggcattttctttttaatatcttttgtttattaatagtctagaaaaaaataacaagagcgtacttcattc

SEQ ID NO: 33651 - DNA, 201 bp, Bos taurus
aagatgtctccagggtttaatctaaggcagaatttctagaacacacagtccacccatcatcttcaactgtaaaagttaatgccacattgttctccaaaatkgctacaccaagtgacattactactagtaatctcttcttgttcttctacatcctcaccacactgcctattgtctgatttccatcactagtcttcaccttcc

SEQ ID NO: 33652 - DNA, 201 bp, Bos taurus
ctaagtaaaacaccaaaaacataaaatttccctactcttaaaatgctggccatgtaactatttaaggcatagcattaaaaatctagctgtcccttcacatyccaaacacaacttgtcatctggcctcttgagaattagacccttaatgactgtccccatctggtgccattcaatcttctttctggttcatcttttgttctg

SEQ ID NO: 33653 - DNA, 201 bp, Bos taurus
cacaaaagaaaatctggtgatttccatctggtataggtgtttacaatattaaataacttataaaacttgctagactaagaagaataccctctttgtgtgayaaaaaggctacatctgataagatcaccatcagacttaatggtgaaatttcaatagttttcccattaaaatctgaagcaacacaagaatctgtgcaccatc

SEQ ID NO: 33654 - DNA, 201 bp, Bos taurus
ttgtgcttgattgcattctgctccttgcattcagactgtgtgccggcaattgaaaagtagagtttgtagctaccaaatgagtgcagataatgtatctcatyactaggattggaatcaggtgtgatctcctagggcctctaatttgttcagtattttctatgggtacagagacaatgaacaggaattgcttagaaggcatga

SEQ ID NO: 33655 - DNA, 201 bp, Bos taurus
aatctcaatcactccacacatcctcacaaaaacaagtaaagaaaatcaacaagcagtgcaaataaaagcacacatgcccaggcctgcagcattactagacracagaatgtaagagacttgctcataggtagaaagatgggcagatataccagggaagtggaaacaaagtagactgcaggccaaaaaatactaagtaagaca

SEQ ID NO: 33656 - DNA, 201 bp, Bos taurus
actagactattccaaagagaataatgcctcaattcaaatcaactgatagagctttataaaaactgcttttacaaaagttcaaattacactacatctaaatrttttgcaatgcggctaattacaagggtagctctaggtctacgcctttcatttcagtgttcagagtgagaatgaagttccaaatatgtgttgaagcaactt

SEQ ID NO: 33657 - DNA, 201 bp, Bos taurus
agaagtctacattcagggaaaatatcctttaaatgtgaaaggaaaggagagatatttttggacaaacaaacaaacaaataaacagaaaaaagaaaatgcayagctaggatacccactttaaagaaaatattgaggattgtcctcaaggcacaaggaaaattaaatgagatagaaggctggagatgcagaaagaaatgaaga

SEQ ID NO: 33658 - DNA, 201 bp, Bos taurus
acagtacataaagcaagaaagattgttttttttttcccctgccaggtgtgagatgcttctgcaacaagagcatcatggaggctcctttccaaagaagaaarggtgataaaaaatgagaaaaaattcaagtgacaaaaaaaattgaatagaacaggctttttaaaagtgtgttggttttggttccactaggtggcagtaaat

SEQ ID NO: 33659 - DNA, 201 bp, Bos taurus
gtgccaggacaccagagagaatgagacagtgtcctgctctctggagctcctggtcctgcacaccgcagtgtgacaaagctgtcttctccctggccctcccrgtaggaactgtccgggagctagcctccagctgctccaaatgcccaggctgctcctccaaggggcctttgcattatttgctgtttcttttcttaagggaat

SEQ ID NO: 33660 - DNA, 201 bp, Bos taurus
gctacattttaggatagtttttttatatagcaatagatgactaaaacaattcccctccccttttctaggtattgcatgaactctttggaaaattgtactcygaaggagggaaagggcaccccaataatggttgaggttgactgtccctttaggctaatttaattgatttaaaaaaagattggcatgtgattgttcctgtct

SEQ ID NO: 33661 - DNA, 201 bp, Bos taurus
tagggtttgcctcattctcctctgaatcctggtgtcccgaatggctgtgggatggtgattctgtcccatttttctctaaggtcaggcctgctcgtgccctygcttcacaagggcaggagggtgccgagacctgacagaggacaggtgggctgcccaacgcgcgccagccctcccactcagccagctggcaggccttgtatg

SEQ ID NO: 33662 - DNA, 201 bp, Bos taurus
cctggctctaatgagaaacagaggtgtctgcaagggaaagtaataaagcgcccagcaagtaaacgctgccagctgaggaaggcgaggtgagaagtcactgygtctctgggcctagaggaacaatgcacctccggtgctgaaagaatcccggggctttccgtctctccagcaccggaaggctagtgctgaatttccctgaaa

SEQ ID NO: 33663 - DNA, 201 bp, Bos taurus
cccatggggtcgcaaagagtcggacacaactgagtgactaacactttcactttcaatatacgtttcaatggtcttctctcatatcatcccactttctcctycccccactagacagtggttctttattctgcattttagaatcattgaggactttttttttttaatgctaatatctgggctctctcctggatcaatgaaata

SEQ ID NO: 33664 - DNA, 201 bp, Bos taurus
ccactaagctggctttttagaaaagtggcatttggaatgaggtttaactatatggacaaattctaaagttaactgttagaatcctcgggcttgcctaagayattttccccctccttgagtgataacagaatttcctagtcactattattctttcctaaaggcttctcattcttggatacaatgtctttctgttttgtctgg

SEQ ID NO: 33665 - DNA, 201 bp, Bos taurus
atagcatcagaacaatatgtctaaggtaataaagagtacagccaggacaggatgttgagactgaccccagagctcatggtcatggccattgtgctgttctmagatagtgtcatgagactgatggtcgtacatcagtaccagagtcttagattcaaattctgatgccaccatttacaagttcaatatagaaaacagtgttgg

SEQ ID NO: 33666 - DNA, 201 bp, Bos taurus
gacatagggcccaggaggtgagggctgtgtctggctgcatcagtaagtaaaatcccagagaaagattctgactgctccagcctgggtcatgctctgtcccrgtgcttcaaatgattggcctggccccgggaaccctgggacagttttgggaaaggagcatttcccccaagaagggagtcctgtcagcaggagaaagggaca

SEQ ID NO: 33667 - DNA, 201 bp, Bos taurus
tttttcttgatgaactttttttctttaaagaccttaagaagcaatcatttggtaacaggtaggagatgagaaatccagccactagaaaaatgagtcataamactcttattcaaagactcaaaagtattcttcacatgtatttcctgcagggtttcattccttcctggggcaggagtcagtctggcagataacttatctggg

SEQ ID NO: 33668 - DNA, 201 bp, Bos taurus
ggccctcacacccagtcattctgcttctgaaacagctctcccatctccccactttttgccagttcccatcctctcattctctgcccttaatgctttactgmtcttgaagatactcagatcttgtcactccttcactcttgaatctctcaaggctccctactggcagggggaaaatgtcagctcttgagcaggacgtctaaa

SEQ ID NO: 33669 - DNA, 201 bp, Bos taurus
caactgtggctagagcaggccaaattggattttccttatagcttttccttcacctctgagagtgatgtcattaaacggtcaggccatgaaatgctaaggayagcctgtttccactgtaccatgggtcatgctggaatgccagggaaatataccccagaatgtcataaagctttaaagacatacaataaaacctgcatggag

SEQ ID NO: 33670 - DNA, 201 bp, Bos taurus
ttgaggacctaaaagacctctttggccctcggactttccctgtggggcacaaggcacagtgcgggttgtctgtgccatcccccctgaaacaaagcccgccrctccattgggcggctctgactctgcagaggacaacagtgactgttttgtgcatgtgtgtttgtgcgtctgtgctccaagcagctggccccccacgaggcc

SEQ ID NO: 33671 - DNA, 201 bp, Bos taurus
acaaacttgtggctgttaagaagtggccccatcatttcatcgtgtggagtcattggttaacttgcccaggcaaggcttgctctcgcagctctgtgaggagytctctggccagttttctcgacctatgggcttccacgcaaagatgatcccatctgtacaaagtatagtccaggaagccaataatctcgttcattatcgcat

SEQ ID NO: 33672 - DNA, 201 bp, Bos taurus
atacaaactgataccagatagtgggctgcagacaacacatctttgcagaaaggaggggaatttagaacggctcctaggccaagtcaggtaaaatggcagcraaactcctgttcctattatggaactggaaaccagaagtccatggaagagggtaacacagatcaatgaggcatcaccttcacacaagggccctgaatcatt

SEQ ID NO: 33673 - DNA, 201 bp, Bos taurus
tttattggtccgatgggggtactctgtttatgagccactgtatgcataacctctaccaggccttaagtgtgatgaaaaagcagcaactcatgtttactccygatcatgtcgtgctttctgtcatcagttactgtcaggggttccaccatagccagagtactcacacgaaaatagaggggatcctctacacggcacaaccat

SEQ ID NO: 33674 - DNA, 201 bp, Bos taurus
atctcttgacaatttcttccacccaaactttttcatacccctcccttattttcatggtttttcctatagggttggccttactttctggacatctgagtggrtgcctcttctctctcttctaattacggaggtagctcttttctctctcaacgcagggcagggggcctcctgcttttctctgttcctgcctcatcttgctcc

SEQ ID NO: 33675 - DNA, 201 bp, Bos taurus
ctggaatccaagtgtcacagccaagaggcaaatgcagctggagaatatgattaccaaacaggaacagctcttctttcgtcgggggtaagcacgacagtgartccatgaagggtccaaagatctgcatttccgtctgcctcactcatgacagagcaatctgtctgtcctcccctatccctcatgccacagtgacccaaagga

SEQ ID NO: 33676 - DNA, 201 bp, Bos taurus
ggtctccatcacctctcccctccgcctgcagctctgagcacttagcatgcctgagctcaggccccgggcatcacaccacacactggaggcagggcagttgycacccacctaccttgccattcattcccaaggttgtaactgtgtgtgccttacataagatgacagcagcactgaaaatccacttagggatcaactgattct

SEQ ID NO: 33677 - DNA, 201 bp, Bos taurus
tgcaataggaatgaatcatgggttctaagtaagtaagtatgtggcctgacatggtgctaaaaagagctctgactcctgtggatgagcctgggaaaaccagraatgacaatagggaggccagcgaggttgctaaagaattgtaacaatgacaatgaagaaataactcagtgtggtattctttcatcatagttggatacaata

SEQ ID NO: 33678 - DNA, 201 bp, Bos taurus
gcatgttccttcctcccggtgaccgtgctgttcctcggaagggccggcctgggcagcccagcttcttcctcgctgggggctgggctgctggtgccaggagmaggaaatgaggacctgtctggcctccaaggcggagagatcccaggggcagtttgggtggcagcttgtgtggaattcattctcagccccttcatgatcaga

SEQ ID NO: 33679 - DNA, 201 bp, Bos taurus
cccacctgtggcttttcttattgtggtacacagggccatccccagagtacagccctctggggacagctgggcagtgacaggccaaagaggtcaaaggaggractgacacttccatctggtcccctaacgtcacttcaccaccagtaccctcactatccatcaaaaaggcaaggcagggtccatgtccttctctgcaactcc

SEQ ID NO: 33680 - DNA, 201 bp, Bos taurus
cggggatatgtattcaatattttgtgataaaccataatggaaaagaatatacatatatgtataaccttgctgttcagcagattgacacaatagccaagatrtacttaaattttttaaaaaaggaatgattctgctgtataaaaaaaagctaactatctaaaatgtatttctttttttttattgttattaaagatatataac

SEQ ID NO: 33681 - DNA, 201 bp, Bos taurus
caaatgaggatatctgtttgctttgcacatatgtgaagggaaaatatcaatgattagacaaaaaggcactatagcaaaaggggactattctttgccaaatragcagttctgttcctcttcctctccacagcaaagtactttttactaaagtttatatctattaaaataattagttttatttgcagcaactcaataccaatt

SEQ ID NO: 33682 - DNA, 201 bp, Bos taurus
ctttcagggtcaacttcagatttttaagagttctaaaactggtaggccttggctccggatctctaacagatgaaggaacccagtaatatctgtattccacrtggaatgaatagaaaattggctaaggtctctctgagtggatgagactagtgggaaggagggatctagaagcctcaggagggggcagggatctgtgcttct

SEQ ID NO: 33683 - DNA, 201 bp, Bos taurus
ctaaaatggaatataagtcatctcttgggaagagacgtattccctcaaagcagactgaaacatcttcagatactccctgttgtgatgtttcaaaaccaatrtcctgatctaaaaaataaaatacacaaagaacagttagcaaaacacagaagggataatagagtggatacaagatgaacacagagaaatgggagaggctct

SEQ ID NO: 33684 - DNA, 201 bp, Bos taurus
agctatttgaggaaatgattccagtagcatcagctttaaaatgaacacccatgtgaaacgggattatagaaaagaacacaaggggagggctaaaaagtcartagagaaattgttggaacagccacagaagctgaaatcacagaagtggatgatgtaagtgggagtaagagaaaacctatctttaaagacactagcccgtgt

SEQ ID NO: 33685 - DNA, 201 bp, Bos taurus
taggcaagagaatgaaataagcagagcaatgatatattgtatcttatttaggacaattttggaaaaactacttgattgttgtacctccttttgtagcaccmcaaagctggaatctaatacctatctgctaaacacaaggatgctattttaactgctgatctttcaagtagaacttattgttaggtgtattctgtataggta

SEQ ID NO: 33686 - DNA, 201 bp, Bos taurus
aatatttatacttttttgttactgttttaactttctttttgttatttgtgccttatactgtattgagccatatcattaaaaaacatagaatgcctcacgartttgtatgtcatccttgtgcaaggggattactagtcttctctgtattgttccaattttagcatttgtgccaccaaagtgagcactaattatgtcttttct

SEQ ID NO: 33687 - DNA, 201 bp, Bos taurus
tcttatttctaggtatttggtgagaggaaaggagtgatatctgcttagcttgccctcttgaatctcggtagttctttttataactttatccacttgaattmtcctcctctagtcaggttgcacttgggtcacatgctgacttgtcaccactttacattagctcaacaaatggcagcctctagggtattttcatgtcaacta

SEQ ID NO: 33688 - DNA, 201 bp, Bos taurus
tgctcaacatgcattgtaatgggcagtggcattttcactgggcctgggctgcgaattctcttgaacctttcccttgagtcttcagtttgacacacaccctrgaggcatccacacgtcaggcctgttccctttctatggcatcacccctcaccctcccaccttggtgagattccaggaggcaggacaggctttgggcctctt

SEQ ID NO: 33689 - DNA, 201 bp, Bos taurus
ggcacctgcagagaagggagaggggaggcatggagtcaccaaggccggaggagcctccagctctgttctggtgaccctgcctcagcatggtgtctgctaaycagcccataaatgtcggggccactctgactccagagtcagcccaattctgacctgggagaactacagtgtccccccgtgggacactgtcagggtttaaaa

SEQ ID NO: 33690 - DNA, 201 bp, Bos taurus
aaagtgggtctcactgtgctaaaagcaaggtgtgagagggccacgtttcttctggaggctccagggagagtgtttcctgcctttttagcttctgtaggggytgtattctgtggctcatggcccttccttcatcatcaaagctgtcaatggccagtagagtcctgcactccctcatgtatgaaacctgctcctctgccttcc

SEQ ID NO: 33691 - DNA, 201 bp, Bos taurus
tatctcagaagcctgctggccaagggggcatttttgctgtttgagaggacactctgatcctgacctgggagcgtatgggggagcatttgcgagggggcagragaagctcctgagataaggaggcccctctgaggtgggagacagatggtgctccagatatgagaccaagaggcagatggtgggtggtgggtggaagagccc

SEQ ID NO: 33692 - DNA, 201 bp, Bos taurus
tccaaaggccaggacaggggttgcaaactctagcattcgcagtgaccaggcaatgcgagatggggacatagcgtgggagatgtccaaggagccatccatcrcagctctgcccagctggccgcttcttatctatgtagcgctctaggaatgtgcattattgggaacctgttctccttcctatctccagaactccttgcttgg

SEQ ID NO: 33693 - DNA, 201 bp, Bos taurus
aatgtcatttagattatgttggttggttttactgtcaagttcttctgtattcatgctgttttcctgtctagtagcatatcaattgctgagtaaaacttgcyaaagttctcagatgtaattccagcttttcccattgctctttcaagatctagtagttttttgtttccagttcaagatggtagagtagaaggatgtgcactc

SEQ ID NO: 33694 - DNA, 201 bp, Bos taurus
agcaagagtatctggagtgtagtaagcaggacaagcatagtaaaggcaggcatggagacagagaggagacttctctaggcaggcaagaggctttctccagrtgggtaaggggcctggatcatagtgtggccaggaggtagagaggaggggtagtgctagaccccatgaagattagacgctgcagggggcttcctgaaaagc

SEQ ID NO: 33695 - DNA, 201 bp, Bos taurus
tcctatgtgagctggaggcttcatcctggctgcactgcagacctgggagagggatgaaggatggaaatgggagggaaacatccctgagtgcctgctaggtrttggccctggggtcagagtgccactgaccctactcttgaagctcctcaaactacaacaggggctcaagccacaggagggccccgcaggcctctatgcctc

SEQ ID NO: 33696 - DNA, 201 bp, Bos taurus
gccctgccctactcacccccgtgacccactccccacagggtcttagtccaagttcgaccatcccttcatggctcagacccactccccacagggtgggcccygtctctcagggagaaacaaccctacaatagtcctcaagtacccgcctgctctgacctctgagatgctgcctggcctcaactcccccaggtctaccccaag

SEQ ID NO: 33697 - DNA, 201 bp, Bos taurus
tgtgtgcaggcaccatcctgagtcgtgaaaaacagaaaagtgcttggagatcttgttctggaggggaaacagacatgaataagaagaagacaaaaaatgcrtaatgtgatttctagggatatgtgccaagagccctggagcagggaaatgggggaagtgggttgggggcctaggttgaaagctaccatacaatcatgggca

SEQ ID NO: 33698 - DNA, 201 bp, Bos taurus
ctgcagatttgccttttcgcagttttggaggaacagagaaaacgggtattgggtggagctggatgagaagccacagagggccctgggaatctggagatgamctctggctcctgcctcctctctgagccttaaggaccccaatatgattgaggaaggccagaggctttgtaggtctctctcttcatcatcaggggaatatta

SEQ ID NO: 33699 - DNA, 201 bp, Bos taurus
tttctccctgagatgggtgtgtgggttcttctgttatgggggctatatgtacagtcttgtaggctttattggcccctagcccatttggctttcagaccccrcattgtccaaatgctactggttgctgtttagcaagacagcacaaggtctggtcacaaggcagctggctacagaaccctagggagcctcatggctagtgct

SEQ ID NO: 33700 - DNA, 201 bp, Bos taurus
ggctcagtgatattggcttgttagcccaaaatgtaccatgaattatttgtagctgcttttccatctcctaccactaatcaagcaaggtgtgtacactttcyaggaggtcaggccttccagatgcagaggcaagaagaggaggcatggagcctgccttcactcacaactatttgacaggaggagagcacttccacgcatgat

SEQ ID NO: 33701 - DNA, 201 bp, Bos taurus
ctcactagggctactccttagcactcccactgagcaccatctcacacagttcataccctctccccttggagaccagccatctcaggccttgttctttcaarctgtcccctttcagccctgtcttggtggcaggggactgccaaagcctgaagtttctctaccttggcacacttgagtcccagcaagaacaccttccccgcc

SEQ ID NO: 33702 - DNA, 201 bp, Bos taurus
ctgtgtggtatgtttctattccattctattctttattcttacgatttcctttaggtgaaataggctggctgtgatccattaatcacaccctttaatagctygtgtcccatagtttggcctgtatttttaaagcatgacttgtagctcgagtacttttcagcagaggacgataggttgtctgagtaagagcccatctcctgt

SEQ ID NO: 33703 - DNA, 201 bp, Bos taurus
gatgacgagagactagacactgtgtacaacatcccgccactggcctgctgaactgtgagggaattaagaccctcagcctctgtttaggccacaataccccrtcagctcatgtttgaggacttcctaatcctggagacagccaccatgtctctcagcactgaagtaccagagtgctttcatttgcatctctgtcagacatgg

SEQ ID NO: 33704 - DNA, 201 bp, Bos taurus
tatcccccgggctcctggaagggcacctgaaatgcagcaggtgttcattgctgagtgagtgcaatgccagcctcctccactggcctctgcccccttctccyctctctgcattctcatgtgggaggataaagcacagcgcttattcttaacacaaacaaaggcctaaagttaaaggaaaaaaaatggacatcatagttcgag

SEQ ID NO: 33705 - DNA, 201 bp, Bos taurus
tgacattggccttgatgtttttagtaagcctctcttctggtcagagaggtgggatgtctgtccaaaattctcagagcagcagatccagtgctcaggtctcytgacctggccacagcaagcacatcagctgcatattagaattttcttcagctctctatggggtgacttgcatgatgtgaccttcatgatgcctgatgtgct

SEQ ID NO: 33706 - DNA, 201 bp, Bos taurus
ctgtggtaaatgaaaaggctgggccagaacagggctcccgtgccagctcacctaacccagtgccagccatgggtaccttgctgggtctttggagggaaatrggtgccagcagtgccacctgctggccgcactaggcacggcactacaggtgatgggtggagctgaagtgtcccaaggaccaaattccaacctctctaggtt

SEQ ID NO: 33707 - DNA, 201 bp, Bos taurus
gcagatttaaaaattaaaaagattttcaggcagctctttttctcaagtgttttactacctacatggaacaatagggcatttagacttttctccacctgctkgtccaggggccctgtgttgaactctattttttgaaatctgacttagtggagtgtgcatttcttttctgttccaaattgggtgctcaatagctgaagactg

SEQ ID NO: 33708 - DNA, 201 bp, Bos taurus
tttctcaacagtgatgacttaataatatgattatgtatcctttaataacgggtccctgcccactcccagactgggcaactatcatctaattttagcttgcragctctctggaaaaacctactatttcctggcacagagtacctattgaataagtctgttttatagtggagccaagaataacaatcatttctcatagttgaa

SEQ ID NO: 33709 - DNA, 201 bp, Bos taurus
atttctgcactcacactcagcttgaaatcattcattcaactttccttgtaagagcgcctatgtttataaggctgtagcttctgctctgagacctcagaaaytgatctccatattatatctgggttcttggataagcttagtggagattcccacccctgccccaaaaagcacagggatgtagttcatatgaaggcaagagtt

SEQ ID NO: 33710 - DNA, 201 bp, Bos taurus
aagggagatggaggaagaaaggcaacaaaagggaaaggagtgaggacagccactgagccagaggtgggggcagcatagttgcttgacttctaggaaaagcrttcttagcctttcctctcttcccttccctactttcatcacctggaaagctccatcaggccagtctacagggttctggggctgaaccgccaacctcctcac

SEQ ID NO: 33711 - DNA, 201 bp, Bos taurus
agaaaacacatatgcgtgtacattcttagatcacagattctctgattcagttttgaggcgccaaaggaggaaaacagagggaagctgttctccaattcatrgttattaaatggaaaagcaagtttggtataatgatacagcacatttctctaacagtggtctacactgtttttttctgatatatctggtgacttgcagcag

SEQ ID NO: 33712 - DNA, 201 bp, Bos taurus
ggaggtcaataaataatttttgccatgaatgccagatgtcaaagagtaaacctgacatccaggtgaaccagatcacatgatataaaatgcttccttaaagrcagcatttggcatccaaactgagggaagtgagtataatgatacctgacctctgagactgtgttcttatttgctagttgttttctgcagccaatgccaagg

SEQ ID NO: 33713 - DNA, 201 bp, Bos taurus
gagaagagaaacatgattatggatttagacctcagggccagtgtcagatggggctatctgtgttttatactaatgcaactggggaatcctcagggtgactratgaggatgtcctggccaacatccccagttgtgtaaggtaagcccagggatctcacctgcatccgactttccccccaaacaacaagggtgcaaaccagta

SEQ ID NO: 33714 - DNA, 201 bp, Bos taurus
acatttatttctcacagttctgggagccggaaatcaaagatgaaggcaccagaagaaacagttcctggtcagggctctattcttggtgtgcagatggccamcttctggttgtatcttcacatggctttccccagtgtgtgaacatgaagaaagagagacagatcttataagcacactaaccccataacgagagccatatga

SEQ ID NO: 33715 - DNA, 201 bp, Bos taurus
tgaacaagtgctgagaaattggaggcatcaatttgactttaaatatctattctattttcctcaagtatctgctccatatttctagcagatatcaaggcttkgcaattgccttgaggattttggcctgaaagagaggcagcctttggcagcctatcttgtacataagcctcagctgcagaggagataatgcacgcaagacat

SEQ ID NO: 33716 - DNA, 201 bp, Bos taurus
tttccaactcagagaagaggttaggatgtttgtgtctctggccaagctaaggagagccatggctgcctctctgggggcatcctagcagtggagggtgggtktaagactgtcccgcagcagaggcttgaatgtacatggaagcagaaggaactggagtggggcagaccaccttcatatcactaggagatgagccatcacctg

SEQ ID NO: 33717 - DNA, 201 bp, Bos taurus
tgatttgaacttcctggagtacaagggactttcaagagtcttctccagcactgcagtttgaaagcatcaatttttggtagtcagcctttctacggcccaaygctcgcatctgtacatgactactggaaaaaccatagtttttaagatatggactttgttggcaaagtgatgactctacttttaaatacactgtctaggttt

SEQ ID NO: 33718 - DNA, 201 bp, Bos taurus
cagagcacattgctttttatgatatgataaggcatcatgtggttctcagattccatggaattcttgttctaagtacccatccctttccatcatcgccctcrttcttggattggtccaatgcacagattcggggaagaaatcttgttgtcagtgtccttgcagtttccgtctcttagcaacagcccatgctcctgttcctct

SEQ ID NO: 33719 - DNA, 201 bp, Bos taurus
ataccctgggaccctcaggcatgcacaccaagggaggggtactgagtgtttgtagtgaggtcactatgatcagctcaaaactaggaccttccaaatatccrccaagtgaacaaccagaagtactccatgtatctgtcatgcagcaccgcatagcactgaacatgaccaacagcatggggaaaacccaagctcatattggta

SEQ ID NO: 33720 - DNA, 201 bp, Bos taurus
ctgggcacacaagaaaagattacctttgatattcccaaactacagtcaagagatacttgattgtaggctgtcattgcaataggccacggcccctgtggttycagcaggtcaaactgggagccagtcttccaccttgcctcacttccatcatacagaaacatgaggcagcaacccagcaacccgctcagcagtgtctacaag

SEQ ID NO: 33721 - DNA, 201 bp, Bos taurus
tagaagaggagaggaaggatttcctcattgaaacaacggagggagcatggccctgcgcacaccttgatttagaaggtctggccttcagaactggagagaaraagtatttgttgctttctgccacccactgtgtgatagtctgttacaactgcctgaggccaaccctggtgcacaggttcttctgctgttttacatgaattg

SEQ ID NO: 33722 - DNA, 201 bp, Bos taurus
cccaggcttcaagcagcaaagaggggctgggcgctcagggctgggagctggcccgcccacatccctctacccaggtggctccaggaggcccctgctggcamcgatccccaagtaaacctaaacaagcctggggttgagggaggtcatgcccaaatcctaacagaaacttggcagtcacaagtcggagctctgggccctggg

SEQ ID NO: 33723 - DNA, 201 bp, Bos taurus
cctcctcataccaccttccttctcaccaactctaagccaccatactggctctgttggcacagccaagttcaggtggggcctggactccatggctccccaamtgcgcccttgctcagagtgcccgttgcctgagaggacctgttgagaggtcacctccccagggggcctggcctaaattctcacaactctccaacagtccat

SEQ ID NO: 33724 - DNA, 201 bp, Bos taurus
gtgggctacagtccctttggctgcaaagagtcgaacaccactgaagtgactgagcacatatacaatgtgttaaaaaaagattttgcactaaataagaattmtagtgttcaaagaaaaaaaatccagactccaatcatcttgtattacccagttactatgctacaatgaatttcagttataaaatacagggttcttagcaaa

SEQ ID NO: 33725 - DNA, 201 bp, Bos taurus
cacttttggaagctcgtgatattctcttcttgaccagggcccacaacagatttatggtactgtaagtttctctctatagtggagcacgttatagctagacmtctagatagaaaaggaggccctgcagaagcaagcatgccaaagcaaaggaaaaacaggtcagaagacactgaggggtatggtatatattagtagtatggc

SEQ ID NO: 33726 - DNA, 201 bp, Bos taurus
gagtcaaactctggggtggagagggcttagcactctgggctcaacaaggccttcgggtgcttctgatgtgtgctcaattttaagagccattattctaagcwtggtttccttcatgtgccttttaaagtgaaagtgaagtcactcagtcgtgtccgactctttgcaaccccatggactgtagcctaccacgctcctctgtcc

SEQ ID NO: 33727 - DNA, 201 bp, Bos taurus
cgtctcctgcattgcagatgaattctttaccactgagccattggggaagtctaaagggatacccccaggcattaaaagcaggagaagattcatgacccatygcttgcaggaccagttaagaagagatgtctgacccttgaaccattgaaggagacttactgttatggtaggattctggttatataactctctgatttagaa

SEQ ID NO: 33728 - DNA, 201 bp, Bos taurus
ctagaggaagatgaatatttcaccatcttggacctagttggttctcatcgtattctgtggccatgtctttcttttaaaggctatgccctgaccccttcccycctgcttcacttgcagtagctagaattcccagtaccatattgtttagtggtgagagtaaacatccttgccttgttcctgactatagagggaaacattcag

SEQ ID NO: 33729 - DNA, 201 bp, Bos taurus
gaggaagaggtggggaaggattccttaggtttcctggccctgtagcccccaccactgtgtgctgctctgatctccccctcctagtggccaaagtggtgggkggtcatgcctagagactggagttatgtcctctcatctccctctgcaccagccaggatctgaggtctgacccccagtggtccttgctccctggaggccacc

SEQ ID NO: 33730 - DNA, 201 bp, Bos taurus
cttcctctttcatcagagcagctcggaatgtccagcaccaactttgcctgcatctgttttgggaagtaagatgatagctttctccataattattcattgaygtgtacatatcaagatataaggcaagtgaattttctgggcatttgtagttatactctcttctgacttaaagcagatatgcaagccatcttttccaaagtg

SEQ ID NO: 33731 - DNA, 201 bp, Bos taurus
agctggcctgccttgagctcaggctgtctcacaccaggggcaggacctgatagaactctctacctggaactccagagaccaagggctgtggatggggcacygtggcctctgctatagcagggatacatcaacccttatattaacctcttcatttcttttatttttttatgtatttctttttattttttctgtgtatatgct

SEQ ID NO: 33732 - DNA, 201 bp, Bos taurus
gtcttcatcttggactaaatttattatgtggttggagccaaaaggaaacaatgaattcaaacaaaattctgtttcagtttttcagtggcaggtctttggtkgtctctctccatcccagagaactcatgcttttgaactatggtgttggagaagactcttgagtgtcccttggactccaaggagatcaaaccagtccatcct

SEQ ID NO: 33733 - DNA, 201 bp, Bos taurus
gcacaggacacagctctgcaccttccagcagtcactctcagcagctaaaggctgcaccccccagccccacaagcaccttgccttcctacaggccatctgaycccacctccttgctctgttggtgattaaactgtaattaaaacatgtttatggactttcccagtggcccagttgtttagaatccacctgccaatgcagggg

SEQ ID NO: 33734 - DNA, 201 bp, Bos taurus
cctcctctcacatgtgggtgtgcagagcagtcactgccctcttctctcctaccagctggtgcagaaacgactcctggccttgaaggaagacaagggagtgyggacacccagcagtcaaagtgtaccccaagtggactcaagtccttctgagtctgacgccagcaaagatgcccagagatatgatcaaggcccccagctagg

SEQ ID NO: 33735 - DNA, 201 bp, Bos taurus
ctggtaatgtggttccagtgtgggtctgaaggccagaggatcagaggaactgatatgtaactctcagtctgagtccataggcctgagaaccaggagaaaamcaaggtcccagctcaaccaaggtcaggagcttattctcccttcatttgcctttttctattcaggccctcagtgggttggatgatcccacccacattggag

SEQ ID NO: 33736 - DNA, 201 bp, Bos taurus
gcagagacttttggcccagaaaacccaccacaccagcacaaagggtccactttgaagctgcagcctggtttgtgctgttgaggcccaatgtgcagagttaracctatcccaggggaggtagctactgcttctgaagtgctgatgctcagtgaagaccacatggaggccaggcaagtaggagattacagatcccagcccaga

SEQ ID NO: 33737 - DNA, 201 bp, Bos taurus
aagcatcgggcaatatctatcaagacaaaatacagcaaatcatttgcccttgcactcccttttgatcatctctactatggaacaaaagaacaagtacttamggatatgtgaataaggatatttaatgttgtttgtagtaggaaataaacaatctgggaacaatcagaatgaacattaatgggagactggtagaataaatta

SEQ ID NO: 33738 - DNA, 201 bp, Bos taurus
taggccttgccggtactgctaatataaaacacaaagggctagtgtttagaaaattagtgcatagagtgttatgaacataaactggaaaaacaaaaaccccraggctgtgtactggccttcattagattggttgagaaagctgaaagctatcggttagcgtactgcataaataacacttgccagcaatgtgttgaagaccaa

SEQ ID NO: 33739 - DNA, 201 bp, Bos taurus
agtggccgtggagatggaaatcagaaccaaattcaaagggaaatgcaggaaccaatgacttggaagtctgaaaaagcactctagtccctctgaccttaatracataacacattcccttggccactttacagaggtcccagttcaaacaggcactcctatttacctctcctccctgtgaatctcaaaaaaaattttaaaaga

SEQ ID NO: 33740 - DNA, 201 bp, Bos taurus
cagtgtgcactctccagtgctccataatctctggcatttcctcagctggccttcagctccctcgttcactctgaaatccatcggtcacaggcagaactccygcagccttgggatggggcagggagtccctctgttttccctcctggtgctcctgtcttgtgtgctccttcattttccctccctcattttaccaaagtgttg

SEQ ID NO: 33741 - DNA, 201 bp, Bos taurus
tggagctctgatttggacattccattccttttcttcttggggagaaaagtgtgaccaatgatgatggtgggccttcaaagatatgtgccgaggaatattcygtaaatgaagatggcaaggataactccttttaattttcttgtattctgcagtccttgcctaatttatcctcatagcatcccggagaaatagaaaagagat

SEQ ID NO: 33742 - DNA, 201 bp, Bos taurus
ggaagttgacaagttgacgaacaccagacttaattttgcccatcaatctaaattaatatactgcacaattacttatacttaactctaggcactgttgagargaattaaataggtctctgcccttataaattcatagttgaactcagctggcacaaagagaaaacaaaagctaccttcagattttacatgccctaagaattt

SEQ ID NO: 33743 - DNA, 201 bp, Bos taurus
tcgcttcacgtgaacagcagactggccaggcatgtcggaggcgtatgaattcatctgcccctgagtggtgccacctgctgctgctccatggcatcagcatytggccacctccacagtctgacgtgcaactgaagctcaaagttcaggaaagcaagagtgatgcttactggatcttatagaaccagcaactcctgagcaaca

SEQ ID NO: 33744 - DNA, 201 bp, Bos taurus
ggttcaggccttgaagtggtggtgaacctctgccccatcccctgcaacctaatggcggcagcagtcatcctggctcacagtgcttgagacccatcctcgtytggggagtctgaggggcctaaggtctggctgggtcctgggcacctggcttcctcagtgatgacagctgggcagagtctggggacctggccctgggagcac

SEQ ID NO: 33745 - DNA, 201 bp, Bos taurus
cagagagttctctctgtcctccctttttaactttcttcttttccttctttttttttatttcctcctctgccttaaccttattccagaatcaacaaacaagktttacatttgtctggcaggaacaaattatgcccaactgttttcttggcctcagttccctattctgttcccagttttatttctaaaacataaatttgacca

SEQ ID NO: 33746 - DNA, 201 bp, Bos taurus
ggatctcagatgtctccattgctagatagcaatgctggaagcagtatttaaagtggtagggagacaatgatagtagtatgactgaagaccccacgtgcagrgatactgccctttatgtacagctgcgacaaaaagacaccatgtactatgcacagctcatgagatgtagtacacaagttccatccagaataagagagatat

SEQ ID NO: 33747 - DNA, 201 bp, Bos taurus
caggtcttttatgtctcctgtattggcaggctagttcttggccactagcaccagcatgacactttccaaaacttaagtgaatatttctgtatactaggctrctatttaggaacatgccatagtggccacagaacctactgctcctcatctgatggtgaccccagagatattcttatattctgagtctgtttttccagaagg

SEQ ID NO: 33748 - DNA, 201 bp, Bos taurus
cagatacacttctcttcagctttctttatctgcactaaggtcactttgaaaaatattcactcatacacttccatttcctctcatttctattttccaatcayggacattttcagagccaatgttagatttcttcagcttacctctgacctcagctacggttatagtgaacaattctgagtaccttgacagcatgccatctca

SEQ ID NO: 33749 - DNA, 201 bp, Bos taurus
agtctcctgcattgacgggcgggatctttaccactggcggcacctggtaggcccctttgtaccataatgaaatgttattatggagaagaagttgaaacagmagccagaaactttaagcctggccaataccttaatagcttctctggtgaggagagcctatgtgatacctccattagaaatactctgccttctgcagagaaa

SEQ ID NO: 33750 - DNA, 201 bp, Bos taurus
gtccaggaaagatcaataggaagttatggcagagctgacaccaggcacctattgggggagtagcttgaaggtttagttctccacttggttcgggtgacaaycatggtgacaagcctagaaaaccactggaggtaatggaagatggcaactacttctcatggacacatgcgagcacaccatgaactgctgtgggtcaaagga

SEQ ID NO: 33751 - DNA, 201 bp, Bos taurus
taggctgtatagtgcaggatatacagcatatattacattcctcttcttgagatgttcatgagctaaaagatgaatctgaaacctttggtctttctggatcrttgcctccaaagtttgcttgggaaactacaataccacttattagaatgacatataacaatatgagtacctaagtgctgagtgaggactttagcttttctt

SEQ ID NO: 33752 - DNA, 201 bp, Bos taurus
ctaataaatattagcggggttgtaggatataatgtccatatacaatgatcagttgcttttcctgcaagcaagtaaggaacatttggaaattaatttttttrtaatttatgaaattccccaaaacacggagtattaaaaaaaaaaaaatccaagtaaatatacataggatatgtatgcagaaaaattaaaaacaaaatgata

SEQ ID NO: 33753 - DNA, 201 bp, Bos taurus
acatcaaagtgaaaacagcttttaaactaagccaagttctttgaaactttgaaatgcttagtcatgatgttactcagttttatttcaaatcaaaagtcacmagtatttacagttcggcctgtagaccatcagactaaaaggctatccagctttaaaaggctaatcagctaaaaggctgattatgaattagaattttacttt

SEQ ID NO: 33754 - DNA, 201 bp, Bos taurus
aaccacaattacctcacctttttttaatcttcaattgactttccccaggtacctgatgcctcagaggaccctaccaaccggtaaatacctccagcccctcrcctttgtggtggcagacttgagatttgttgtcccgtctctctgcttgtctgccttgtgaatctaacttttctctgctgagaacctcagagttttaatgtt

SEQ ID NO: 33755 - DNA, 201 bp, Bos taurus
gcaaaagcaatacagttccacttatgcttccctacactgtcttcagaactacagtcaggtccaagtgtgtcctaagaaggaaaataaaatagcaaaacaayataaagcagtcctctgggtgcatctgaggtatgagatttctctaataatgttggagaaatataatttcagttgccctcattagggttcaaagttctatgg

SEQ ID NO: 33756 - DNA, 201 bp, Bos taurus
taggttgatgtgcaatagcacacatgacagaaaagaggcatgctcattttgaagaggtcgtgactgctatctctggggtttactgttgttgtttttttttyccccaattggcttccttcttaaatcccagctatgttctcttccttgtttttcagctttctcgaagtacaagtgatgaatataattgtaagatatttaaag

SEQ ID NO: 33757 - DNA, 201 bp, Bos taurus
taacaaaccagttaaacattctttgcttcatttatatgtagtattaaatgaggatattcttatccatgttgtctatgtaactattatattatggtattgartagacagtgcctttagaacaaaataagaaatagagccagccatagagtattctggtaatgaaataaaactaattctgccttttttctttcaagaaatgtc

SEQ ID NO: 33758 - DNA, 201 bp, Bos taurus
tttatatttcctttcttggtgtatatatcatgctatttacttgacctagaatatcattttctttcactgtttctgccttttttttttttcttaatatcctycagtgttcctatttaagcagttatcttcacaagtttcagtcctataatctgagcttaaggccgcaggtgggtgtatactagagaaatgttgagctctctt

SEQ ID NO: 33759 - DNA, 201 bp, Bos taurus
ggtgtacctgacctaaagagaaatactttcacaagcattataagagctctaaatttcaaatgatttcctattgcttcaaactctcacagcactttaacttkctgttttcactgtggtgaagtaatggaacaaagtttgtaggatttaaacacaatacttcaaaatctacaattttatgcaagaagttcttactttatcttt

SEQ ID NO: 33760 - DNA, 201 bp, Bos taurus
gattttaacggcagttttgaaatgaaattcatgactttattcatgtatgcaaaatttcccatactggatatgagcagataccttgtgggaaaaaatgccartgtctgaagatcctgtgaattaaatggaagagcaatcctaatggtaattatcaatcttaaggaacacagagaaatatcttagaatataaaatgtcaactg

SEQ ID NO: 33761 - DNA, 201 bp, Bos taurus
taagtaacaggcaatgttaggttttcaaacctgccatagaagtgtctaataagtccatgatctccataccttcctttatgattcacactgttacttggaayaagaggcagatcaatttagggcagggttagagggataatcatagtaattatctattatttgactagattatccttccttaagtgagtccagtctcccttc

SEQ ID NO: 33762 - DNA, 201 bp, Bos taurus
agatgccctattcttaacaaaaaaatataaacaatccaaataaaatatgggcagagaacttgaatagacatttttctaagaaagatatagtaaggcccacrggcatgggattagatacttaacaacagtagtcattcagttcagttcagttcagttgctcagtcatgtccgattctttgtgaaaccatgaatcccataata

SEQ ID NO: 33763 - DNA, 201 bp, Bos taurus
tcacacaagcactttctcatttatttccttttttaagttcctctatccttgtatctagagcctctcaaactatggtagggccaatgttctcatggtcatcwgtttcattgatgaacttcatttatgttcaattccaacttcaatttcggctttatcacacttagtttcttgctgcactttcatctttgttggccaatcctt

SEQ ID NO: 33764 - DNA, 201 bp, Bos taurus
gaaggatgctgaagtgaaaaggctagaaccatataaaactgaccaagcgaaaaacaaaactaaaagtgttgcctctatagcaacttgaaaaggttataatygtattaccaagaaaaagaaatcagacacatttagggcatattggaaaaaaacaagttttctcagagtggctgagctgttttgtgatttgaagcagtggaa

SEQ ID NO: 33765 - DNA, 201 bp, Bos taurus
ctatccttgcttgatcctcacaataagaagtataacaaaagtaatccagtcattcctttctaaaagagacattcctgaaattcagtgttcgtatatctagratttatgttgtgataataacattgtttagcattactataactttaacctaaaaagaaatgttactatctataggtgttacatcttccagaaattcttaac

SEQ ID NO: 33766 - DNA, 201 bp, Bos taurus
ttgatgcattttgtttgtccttgacagataataacaattcaaccctgttttcaagacgttgatttgtattttaccctagacaagaacaatttacactgatmtagaacaagctttctgtatcgttacccatttcacctgttcccaatataattgccctattaactgtactttaaaagaaagagcagatgttttcaatgtgtg

SEQ ID NO: 33767 - DNA, 201 bp, Bos taurus
agggactagattttcaggtagccatcctctccttgtgtccttacatggcaaacagtgagagaagcaagctctctcttcttagaagggcactaatcccatcrtgagtactatctcccaaaaggccccatctccagaaaatgtcacactggggattaggcttcaacatataaatttgatgggtgggggagagacataaacatg

SEQ ID NO: 33768 - DNA, 201 bp, Bos taurus
tatctccagacctttggcctcagcagcctccttcacattccttcatatttgatttgacaacttacactggaaacttgaacacagcctattttttttttaartaaaattgtttaaaaatgtttggtctaagttttttacatggttaaccagaagttcataatgaacaggtgaattctagaaatctaaagaattttggatagg

SEQ ID NO: 33769 - DNA, 201 bp, Bos taurus
atatatttgccaatcactattatttaatatcattattattaataaagacttggcatataagagaatacaggttggtctggatacaagagttggcccacaayaggaattgaagaagcagagaatagaagaaggcagatgagcaattatgatgtgatgagcatgattggggtttagagtgtgaagtcaggaaataggagacat

SEQ ID NO: 33770 - DNA, 201 bp, Bos taurus
ccttttaatcacaaatacattaagttgttaattcatcacacattatggtgtacatattctgtgcccaggattgtgtttggcactagagtaactcagtctartagggaaaggtggtaagtgaactaactatattataagaatgatgaaagaagtaaactcccaggctaggtagagttactatagaaacacagaaaagactca

SEQ ID NO: 33771 - DNA, 201 bp, Bos taurus
gatgtccctctccactgggaatgagacaatgtcttccttactctgttcaggaaatgaagtacgcccacagttctgtgcacccaggtgtcaacaactccatmacactcggcctaaagcatcgctttgctggtgtctgtgttcagggaatttgccagaatgcttatcaggtgggtatgctccctgacaccacagaagaaaatg

SEQ ID NO: 33772 - DNA, 201 bp, Bos taurus
cttttttctctaagattacaattttgtttgtatgacatgtaaggatgtgtcttctcacatgtgttgcatgacccacaaccaacacaaaccagaattccagyggcctagaggaaaaaaaaaaaaaaaaactgttttaactatttaaatcatgattgaacttgaaacatgaaagaacatgcaacatcattatttttttcttat

SEQ ID NO: 33773 - DNA, 201 bp, Bos taurus
aaatacattctcgctaaacagaaaaagttgagagaaaggctgaagttacaggaaaatatatagaataagataattgttacaatgttaaggacattgttcayaacatccacagtagatatcatttattaatcatttaaacttgtgccaggaattagcacaaatagatgtaactacatttaattacaatgctattaagtgggt

SEQ ID NO: 33774 - DNA, 201 bp, Bos taurus
ctctgggcaggcaggggagtggtggtgtatagatgcagctttgtttatctgcagggtgtggatcattgactaccagaactctgccatcgttttcttgtgtrtgaacaaagtgtgataatactttgcccggaaccgggtcagcatttggcagggagggagctctgtttcacaggcagagcaatctgttaacgtgtaatttga

SEQ ID NO: 33775 - DNA, 201 bp, Bos taurus
ccagtggttaggactccacacttctgctgcaaggggcatgggtttgatccctggttggggaaccaagatctcgcatctccccaggcttctgacaaaacatyctgagatgtctgggcttctgccccagcactccctgaccagagacaaccccatcaacccatgatattagtagcacgacagggtgactcctttgcttaagaa

SEQ ID NO: 33776 - DNA, 201 bp, Bos taurus
tctctgtctgagcttccctcacctcacttcagctaagtttagcttgaatagagagttcagctttgccaaaccaccacactcctctctgtcggcctggacckctgaccgagacagggtgggctctgtctccttcccacttagcttgcttcatccttacaggatgttacttaaggccttatgaagcagccaatccttttcaat

SEQ ID NO: 33777 - DNA, 201 bp, Bos taurus
tgtgagcagtgtgaagcccaccccaatgcccacaacagtcctctggggaaaggacgcttgcccaaattcagtttcctcctggctgagaactccactactgmgttgtgtgcacctgcctctgtttctccttagagaaccttgcttctaggaggcactcaatatttgagttaatacaaggctggagtaaatattgagcaacct

SEQ ID NO: 33778 - DNA, 201 bp, Bos taurus
tacccacagtttggcaaggcctggggaaactaggttatgcttagaaatatgttcatgtccgtaaaaataaaatgaagatggcctgtcaaagtaagtgctgrtgcacatcataaacatacaattagaaattacgggtatcatgttattcttttctgtgtaccatctcttgttttggccacagcacgcagcatgtggatctta

SEQ ID NO: 33779 - DNA, 201 bp, Bos taurus
tcaagtaagaagggaaaaaaagcagtaaatctggtggctctcaaagctgagacatttcttcttcaccctccacacaactctgctgaaaactgttctggtcmagtaactttgatccttttagaaaatctgttgtccgtgtggacaaaagcaattcttcatttgaataggacatcaattctttctcctgctttttccctgtgg

SEQ ID NO: 33780 - DNA, 201 bp, Bos taurus
ttctccttggcccctttcctggtacatagtaagtgctcaagaaacagtccctgaataaatgagtgactgaatgggatgaatgaactgtgttgtgtgaacaygttaggtcctcatttggccattggctcctggttcttggggatggggcctctccttccctctgcctgcagggcctggcatggtgcctcggctggagaaggc

SEQ ID NO: 33781 - DNA, 201 bp, Bos taurus
gtcagtctctcccatcaggaagcttccataggcctcttatccttacccatcagagggcagacagaatgaaaaccacaataacagaaaactgaccaaactcyacctgaggacttactcaaaagagactctgaaatcacttcccctttattgctggatttctttttagaaaaaaatcagttcagttcagcccagttactcagt

SEQ ID NO: 33782 - DNA, 201 bp, Bos taurus
agtgcctcatacccacagatactggaaacaaccaggctatcacatttcctccacattcatccagctctgactacctttctaatttgtgagatatggtgttratgtgaacaaatccactactgacaaataacgaccgtgcaaaaaagttgatttccaaaatcacttcctgtggtatccaggatggcctccaagaattaaagt

SEQ ID NO: 33783 - DNA, 201 bp, Bos taurus
gagtctactgatccatcctctgctccccatctcttacccttccctggtaaacccctactcctacttgagcacttacttcaaaaatctctgtcttcgttaartctcatccaatcctcactcccctcccctcccccaggcttgccctctgggttcctcttttattacagttgttaggtgtttacattccagtttctttactag

SEQ ID NO: 33784 - DNA, 201 bp, Bos taurus
agcttcaaagaaaaggtgattcttgaaccaaaccttaaaagagaagctggcacttgccaggcagatgacagctgggactaattcccaagagaggatactgrgagcaaatgctttagtgttccaggggaattgaaaatgatctgactatgagaggaaaggggacagtattagagaaaggtaaagggacaggtaagaatcatc

SEQ ID NO: 33785 - DNA, 201 bp, Bos taurus
aagcccatgccagttctcaagggcatctgtaggccttaaaagaaagcaaagaaggcattgttccctgacacctccctgcaagatgcataatgaggacttgytgtgggccaggcactatgctttatgcacatcaaatcacttaagcctcacaacaagctagaaaagctgctattattgtccccactctagagaaaagaactg

SEQ ID NO: 33786 - DNA, 201 bp, Bos taurus
agctgcagccctcaactggacgttattaggcttctgaccctgtccctctgcaatgtgtgggactggtggtctccaaaaagatatgtccacaccaaactccyggaagctgtaaatactgccttatttgggcaaagggtcttttcagaggtaattacaactcttgagatgagatcatcctggactacctgggtgggcctgaaa

SEQ ID NO: 33787 - DNA, 201 bp, Bos taurus
tattcacacagagcctatgatttggagataactccaaatttctcatttctaggatccaaagtaccccctgcagagggcacagcctggctgcagagggcaayaggaagaaacaggaaggccatctactctcctccatgagcaaagtcagaattcctgagagtacgaagaggcttctgagagaaggtgaggtgtacgtgtggt

SEQ ID NO: 33788 - DNA, 201 bp, Bos taurus
ccgcagaagaattcttataatgagattactttctacctactctagagatgtgcctacactgcatcctcatgcttggaaacgtctccctagcacgtccccaygtgcagcaagatactggacacctccagggtggggcgtcatggatgcatcacctcacatgggcgccagcacctccatcccagtgttctttaccgcaacagt

SEQ ID NO: 33789 - DNA, 201 bp, Bos taurus
ggagtcagagttcagggatgggccatggcccccagccacaccgccccggctttctcccggaggccctgagcccctcagggtccctcgatgagtctggccgmctggtgatgacttgggcagcccaccgagaccccaggggtctcttacctcaaactggatcagcaccgtcccactttcgaggcccttctttagctgctccat

SEQ ID NO: 33790 - DNA, 201 bp, Bos taurus
tcatctgtaaaacagagtagtaatcctctctctagattcaggcaagaagaaagaatgttttaagttcttatgtgctgatgttattttatattttactgacrtttatttctgggaactaaccaattttaatccatgactcacgtttaccttacagtccactgagattcccaggtggttctggctacacctgggtctgctgag

SEQ ID NO: 33791 - DNA, 201 bp, Bos taurus
caaatcctattgggatttttttagtctctatgaggacacaaggtttttctactgctccatatttcatgctatttgattgtcccttcatcaaaggtgacacrcagccaggtaataaaccttccaaagagtggctgcattaatactctgggtgtgttcctactgagccatggcagccacctggacctccaccaaacacctcca

SEQ ID NO: 33792 - DNA, 201 bp, Bos taurus
ctctgtcttgtcagcagtgctgacttgcaggatgagtacgatgtgatcacatcacggttaacaatgaaagcgttgatggccacactgcaaaacaggattcraagctgacggggcacttcatggtcattgttctaagtcaaactagactggcccctaagctctctgagaagcccgtgacctgattgtgtccactggcatcag

SEQ ID NO: 33793 - DNA, 201 bp, Bos taurus
gttgatgtaggccactgagtttgtggtaatttgttacaacagccctaggaaaccactgtgctcagatctaccccagaattatacctactcttctagatcgkcaaaccatagaggccaaaagccagtattctacacgtccatcaccattttctcatactatgctcactctttacagggcttcccaagtggctaagtagtaaa

SEQ ID NO: 33794 - DNA, 201 bp, Bos taurus
cagaggagaggccaagtgtgaggatgcaggggaaggaaataaatgtggaacacgctggaaaggaacttcctcgggcacaggaagccagagaccctggagargaaatgaaggaaaggcaggcggccacaatctcggccaagaatgggagtgaacgtggtccaggagccaagtgttcttatgcgacagccatccttgtcccgg

SEQ ID NO: 33795 - DNA, 201 bp, Bos taurus
tagccttctctcattttcttgaatgcccttgatgtcttttcctccttggagctttgctgtgcaccattctgtcttctaaaatactcatctacttacccttrtctcctcatctactcatcccatctccatggcatccccaccctttgcagtgcccgcttctttcctagctgacttgcagtcagcttcagttttcagcttcag

SEQ ID NO: 33796 - DNA, 201 bp, Bos taurus
agaagcagacctggaatttaacttacgatcatttgattccaaagacggcaagtcagccacagacatttttttggagtggtgggtcaatgctgtttgttttytttttagggtgcagcatatatatatatatatatatatatatattttttttttaatacaaataaagtgacaattttattatttggaataaagttatgtgat

SEQ ID NO: 33797 - DNA, 201 bp, Bos taurus
gttaattctatattttctataatgaaatcaaaatcttggctagtttcatttggaatatgtgaaaatgaattaaaacttcgtattaataaatatatgagaaytgacttaaagaggaaaaaataagaaaatggagacttctcatgatcaggtatttaaataggttgtaaagttataataattaaatcatttttgcaaagctta

SEQ ID NO: 33798 - DNA, 201 bp, Bos taurus
atctatacatggacacttttgcaagaacagacagtatactacaatgatgctttgaaaatataggatttaggctccaatttggcttaagggtgcagtgattyattaaattttgttctccttaaatcattttagagaatactgcttggcagtaaaggagctcttctgtgcaaaagaatggctggtggtggaagaaaagaccca

SEQ ID NO: 33799 - DNA, 201 bp, Bos taurus
ctttcaccactgagccacctggaaagctcctataaactgcatacccaaaacaaaataatgcagagctagcaaacgaattaagaaacagcaggcccagaaawactaacatttggagaagtctaaattcaaaaacaaacaaaaaattctgtgctatcaagttgatataaaaaaatgatccaacaatgtctgcgccatacacat

SEQ ID NO: 33800 - DNA, 201 bp, Bos taurus
acttacatttggcctaaaagtctaccattctttctacatggcaattggctaatgtgttcaaacgcaggaatacagatagcccatcgtgctcacgcaacccrcacaaaagaaacccaagcaccacaaccgcactgttatatgtgtactctgacagagctcaagactctacagattaaagaactggccagaagtatttaaata

SEQ ID NO: 33801 - DNA, 201 bp, Bos taurus
ggtactaacaattcacattcaagcaaagttgatgactaaaataatatataggtaagacaagtttttagtgagactttccaaataaatatttctgagttcayaaaaagatacatttgcttaattggtgtaatttaaaaactaaatccacactcaaaaattttaatgctcagcagacattttattttaaaaggaagtctagca

SEQ ID NO: 33802 - DNA, 201 bp, Bos taurus
tcacatcttctggattctggagtcttttcaccctatcagaggtttctttccttgggcctccttatcccaccttgagtaggcattgctttagaaaccttcamaaacacttaggcacctagggtttgggcacatcctctctagtctcttctagtcagtcaaacttttaatttctttaggtggaaaagcagctcttatgttaac

SEQ ID NO: 33803 - DNA, 201 bp, Bos taurus
aactgagccaatatttgcctaatttctccccatagatctagagaaaggacattttataatatatccctatcattccacagagttgtataaattcccctggytttattatttttttgaacttgagaaaatgattcttaagttcaagatgactgatacatatatgctttcaaaacaggaagaaagagaaaggagaggtgacag

SEQ ID NO: 33804 - DNA, 201 bp, Bos taurus
ggccagcaattctgcagtcacgtatccactggcctcagaagcttcgctaaagaatgaagcaacctcttcagaatcacaagcaaatgtgctttggagggccragggaagcactaacacctgatatgaactgtaagagaaaagaaaacgtctatcagacccttgcttgggttgcggccgggggtggaggggtcattcattcat

SEQ ID NO: 33805 - DNA, 201 bp, Bos taurus
cgaacacacacacaaaccaaacatcctaccagcagttagtttgtggagcttgggcaacaaatagactattggctgttacatttgactgtgctagaagccayccggacaccagggttctcagaaaagcaaagcacacatgggtgggaagggatgactcagcagaacagtggcccctccccactttacactgttaagtgcact

SEQ ID NO: 33806 - DNA, 201 bp, Bos taurus
atcacagtccctcaggatccagagacggaatttcagggagagggttcagtgaaagtcagggagagtgagaaacataaacgggaagcaatagtttagagcartagtgagaagctagactgtacgagtcaaagggagggatttggtgtttttttttaatgatagggtgatatgcatatttataggaagtatgtaggctgaatt

SEQ ID NO: 33807 - DNA, 201 bp, Bos taurus
tagtctccatcataattatttaatgaattcttaaattctgtaattgcctactatttccctactactcaatattagcaccacatgtaagttattgatccccmaaattatgctgcatttagaatacagtattttcttctatccatagaataaatattcagaagtaaaagagacaatcttttctttttgagtgaaggtaaaact

SEQ ID NO: 33808 - DNA, 201 bp, Bos taurus
ccaggtcagtctgaatggacctggggatcacaagctctcttttactatacaaacaatctcattctagtttatgtaacattctgcctcaattcagtttcatycctatttgaacctgggcctatagatcaattccagcaccagaaaactactgtagtgcctttgccttggcaatgaaaaatgagacaaaaaaaatctagcttt

SEQ ID NO: 33809 - DNA, 201 bp, Bos taurus
cacacgcacacacacataagccacaaataaaggagataattaagataattttgaaaagcttacaatgagggcagccttcttaccagtgacactaaaagtaktaaccctacagggggaaaaatggataaatttgactgtttaatgattttaaaaattctgtgtaataaaagctatttggcaatcatgatagttgcctgctgc

SEQ ID NO: 33810 - DNA, 201 bp, Bos taurus
ttctctgttaaatttgtcttttttctaggtgtacttttttaaagctatcatcatagtgcatacaattttatatcctgcttttttcacctaacactgaaacmgcagtaattttagccagctacatggacgtcagtaattgtgttttattggctccatggttgctgcagggggtctgtcatttgagctcttacactgtcttgc

SEQ ID NO: 33811 - DNA, 201 bp, Bos taurus
cagagtccacagggctgggtgatctcagccctgggtctgtgccccacttccctggggctgatcatgataccacgctccctgccaggcctgccctagggggyactaagaatgtctggtgagcataaagggctgggggtcccttttcctgtgggcagtgggtggcccttgtgaagtcctctctggaaactaggcactccacaa

SEQ ID NO: 33812 - DNA, 201 bp, Bos taurus
ctgattctatgccaggtgaaatcagatgggatgcagggcccaggtcaggtgagaagctctgggtctgaggtggacagggctccagctgtgcctgtgctggrtgatgaggcacctggcccttttctccttggcagctggctgcccttccctcctctgccctgcttggtttgcagtgaaatactcaggattactgtgagccct

SEQ ID NO: 33813 - DNA, 201 bp, Bos taurus
gatcactgaaaaggaagttggagaaacataaccttcagtgttgaggtccagggcccttggcactggaggctgatgagtggatgaccggccttagtccctcytctgcagcccggcgcctcctgaaagcataagctctgggctcgtagctcaggtcggaaggtagcagtctcgtccactcctttaaagaaggaccccatcctc

SEQ ID NO: 33814 - DNA, 201 bp, Bos taurus
tagccttattgcaggggagatggcaatggcctttagaggcaatgaccgcatcccaagcatcctttgacaagactggagagccccattctagacacatgagrggcctggagggcaaatccaggaggagaagggctctagttaaggccctcagcagggcaagttccactgcaccccgacctgagtgacatctacccggtgggc

SEQ ID NO: 33815 - DNA, 201 bp, Bos taurus
tctgtggggggagggtcaagcacagctttactgcgcatgctccagagcgcggcaccaggcacagcctctctgcgcacggctcatagccgccatcttgaatwgcagtgccgtgtgcagtcctaataaacgcggccccgagctgcagtgtcggctgccgccatggtttctcactaagaactctgctgtgaagtgcccggtgga

SEQ ID NO: 33816 - DNA, 201 bp, Bos taurus
ctgtagagcccagtctgctatccaggttcattcataggtgactgaccagtctgtaggcttgcccaggggtaacctatccctggtcaaactgtctgaagtcrggtcgtgcagacgtggctacagagtgcagcttcttgtgctgagaagctaccaacttttctccgcaaaggctggtaggacagggcagatgctctgagggca

SEQ ID NO: 33817 - DNA, 201 bp, Bos taurus
agctgctactttcagaaacagagcattatgatgctgtatcattcttcccgtaactatgtcctcacggacaaaagctttaacatgcacggtggcacatgccygaagttagactacttgtgaacagctcagtagctttaaagattcagaataaactatgtatgcttttgctaaaactgaggtgcttcctaggtagtcgccctg

SEQ ID NO: 33818 - DNA, 201 bp, Bos taurus
cccgcgcctctgtacctctggagttcagcaggctgagcaagtttgcccaccgtccggaactccagccaaaccagactgcaggacaactgtgagccgagagscagcacgtggcccttctcactgaacgctcggcctggtcctcattaactgccgtctcaagctactttggactccacggaaaccacgtgtgtttccactgct

SEQ ID NO: 33819 - DNA, 201 bp, Bos taurus
caggaatctgtttccagccacatttcacccaaatgtgagtttctttcccaggagtctgtgtgctctgcatggttgagaaggcgccgggctattctctctgytcccttgataaaggcactttcaccatcaaatggctccactgaatcagcccaacattttccctccctgctccctccccgctaactacattttggcacttct

SEQ ID NO: 33820 - DNA, 201 bp, Bos taurus
ctcatatctggttcttaggattcaaagggacacgatccaggcaaggtaacatttctacacatgctggataacaaaggaaatgtaatgccaagctcctgagktttggctccaaggcccttctgaatctcctctgtttacttagcatcgccccacccaggcataattaagccaaacaaacctgaatgttagcagttgtcttat

SEQ ID NO: 33821 - DNA, 201 bp, Bos taurus
atatacagatatcctgccatatgtctctggagaaaggagagctgagaggcatgaatggagccattgactcagctgttttttgggcacaattgctttggggmaggaggtggggggcagtcctcccactgtgaatgaactgctggggcacagctagtggatggacttcacccagtaattcctggttgattttttatttgggtc

SEQ ID NO: 33822 - DNA, 201 bp, Bos taurus
actctcttcttcactctagaagccagactgatgaaaacagctaatgtgtatagtattgctggcaaccttggcataaggaaaaaagagatcctccccacccygatgtcaccttgataatcgaataaaacagcctggaagtgacacagattatttctgcacacaactcgttggactgaactgattacttgcactgacccaaaa

SEQ ID NO: 33823 - DNA, 201 bp, Bos taurus
caaagcacttcaaaccatgatagtatttatctggaatttcctaccagtttgttctttcagatgccctctcacacactctctcttgctttctttgcttatcmatttatttatttgtaatttttcatctttgtttcctttcctaatattttttttcctactcccttcaatatgtccttcaaaactcagctcagctaagttcca

SEQ ID NO: 33824 - DNA, 201 bp, Bos taurus
gagaatcccaagccagagctccccagctgagctctgtgagaaactgtgagagataataaacactcaccattttaaggccctaggctttggggcaatttgcygcatggcaatagagaacaggtacaagaggaaagggagtgtgcgctaagactggggaagtgggccagagtcaatcacacagggaattctaggtcccattaa

SEQ ID NO: 33825 - DNA, 201 bp, Bos taurus
gccaatgcttcaagtacaagatactgtgatttcaccgatggtgaggctgcttggggaattgctttcctaaactttccttccagtgtttagattatggcacrcagtctagaggtatattatgagtgatcctcttgaacttagtcagaaagtcctcataaatcacattcaagaaaatatagttaacttccatatacatatata

SEQ ID NO: 33826 - DNA, 201 bp, Bos taurus
agtaactggttcagaaaatgacgacatggcactgtattttaatcaactgtcaaaatcaggttgttcaattcgccagcacatcatcccttcccaaccaaacrtatcttgcttaaaatgaaattgctttgtattgatttattttgtttccatgtaagaaagtaaggatgacagctaccaaaagacaaaagggcaaagggtgat

SEQ ID NO: 33827 - DNA, 201 bp, Bos taurus
tgttgttctagatctttccttttcaggtatatgttcattcaaatgtacatgctcccctccctctcattataaaacgtctaaaagcactacctactttcctygagataatctccctctccccacccctataccaaattactaatcgttgcttctctccaggcaaaatcatcattccatccatggagcctgcactgaacctcc

SEQ ID NO: 33828 - DNA, 201 bp, Bos taurus
ccatattggcagccagatttagcataattgtttttccactctgaagattctaaagaatagagacaaagaagcatatacataaacaggattgctgaagtagrcggtttaagttcactgacccagagtatgtatacttctccaggtatagaagcctaacataaaatttcatatcttggccagaccagctgtttgcctattagc

SEQ ID NO: 33829 - DNA, 201 bp, Bos taurus
cagagaagacaatgttagaggtgaggtggggaagtcgcagcaggtcttacccaggtaaaagtagtgaggggaaggccagagagaatgatgagagagaagcrtgctcctggcagagcgcagagtctgtgcaaagcccagaacaggggaacacaggaaactctgattccctgaaaagggccagagcacggtgcaagaggtgaa

SEQ ID NO: 33830 - DNA, 201 bp, Bos taurus
acaaggacagaggggcaagacacaaagtcgccgcacaccgctgcctgtctcaggcgccattcctagttcctccaccaaccacttaccttgagtctaatgayagtcagccttcacctctccaggccagaaacacctccggaagccgtcacagacccagcacttagggattacctccttgtggataccccagcacaacgcagc

SEQ ID NO: 33831 - DNA, 201 bp, Bos taurus
ggaggcccagtttgcagagcagcagagggctggggttcaggggactggagtctcagcagctggcgctggctctggctagtccttggcgtctgtgtttgaayccaggtggcccaggcacctcctctaactgcccctctgcctcctaagaaggagagccctgcaagtgtagccaaggaagctggacacaggccggaaggtggg

SEQ ID NO: 33832 - DNA, 201 bp, Bos taurus
ggccttgtaacctgtgttagctgacccttggatttccttcatgctgttccctttccctagaattcctggccctctgttcccatctatacttgttctgagayaccacctcctctgcgaagcatttccccacttataactgacctccctctcctctgtgttcccaggatatgtttcatgaactttaataaatgcaaaactttg

SEQ ID NO: 33833 - DNA, 201 bp, Bos taurus
tgacttctacttctctgctgtaaccaggaataccaacctgttggtaaaactgctttgagatgaatagtatgaaatggggaatgaggattgaggacagaagyggcagttgccatggaaatgcaggggtttttgtagagcccagttttgggtgatgccactcataaaggtctgtgaaatgagaatgttctcctgtgatggtaa

SEQ ID NO: 33834 - DNA, 201 bp, Bos taurus
tgtttataatgagagttgataaaattgtacctgtggtttgaattttcagtttagatacattctcctccattctttttcttcctcactccacctagtctgamttctctctccagtgaaaatattgaatattaaaatctctctccccgcttgtacctaaaatatctgtttctcaaaaaggattctcacggtgtttattggccc

SEQ ID NO: 33835 - DNA, 201 bp, Bos taurus
gaagaagaggaggagcgggggagggaagaagaggagaaggggagtgccgaagtcccgtttgtgaccttgcttagctttttcaatccaaaatggcggttggrtgtgagaggagtcatctggctgaggggtaaggggatgaatagaaccagagcaaacttctaatgaagagacaggctgacacaaagggcagaacattggctt

SEQ ID NO: 33836 - DNA, 201 bp, Bos taurus
aaattaaataatcatagctatatccatctggaaaacgtacgcagaagagatgcataagccagcaattagtattagcttccagcctttcattgactaactcygagggccttgtggtggctgtcgcactcgggaccatgaatatcccagctcctggctctgtgcttccagggtaatgattcttcaagcggttgcatagggagg

SEQ ID NO: 33837 - DNA, 201 bp, Bos taurus
cacaattttgattagtgttgaccaaaaaggattattactattgtcactcatccgtgttactactgcggccataggaccctgtcaaaaagtaaattaaagayacacgtgatgcctcttgggctacaggatgcctggatgctcagagcctgaggccaaccgtgctaggaccacagaggggagagaggctctgccctcctcttt

SEQ ID NO: 33838 - DNA, 201 bp, Bos taurus
tagctattctagccttgaaaaagaatgattcaaaagagacttgaaaaagcaggacctcgccatccccgggagcacaaacgatggccgtgagaacagaggarccccttcaatctccgtgttgggaattatttatcactggagctgtgaatagaagggccaagctgtgcggttattacgtcctcgtctcaaagccggccaggg

SEQ ID NO: 33839 - DNA, 201 bp, Bos taurus
ccctccatctatagcattttccaggcaagagtactggagtagggtgccactgccttctctgggtatggatatgtagtcctggacatattagtcttttttamattctcagatctgtcagggcctttctagtaccaaggcttttcttactccttcactgtttcctcctgctacttaccctccatcatgtccctgcatggctct

SEQ ID NO: 33840 - DNA, 201 bp, Bos taurus
gcctctccagcatggcttgtcaggataactggactttgcatatggcagcaaagggctcccagggagagttttccaagggacaagaggtaagtgccaccacsttcttaagacctgggcccagaaactagcaaaacaccatttccaccacacttcattgttcaaagcagtcacagggactatccaaactcaaatgaggcaaca

SEQ ID NO: 33841 - DNA, 201 bp, Bos taurus
accaaagctgaaggagtggcctctctcaggtatatatgccattctcagagggaaaagggtaaaagccaaaccaggcagtgtctcctaaaatgaagcgtgcrttatattccactggccaaagcaagtcatatggccaagtccaatgtcaactaagtgaggtgtatatgtctcctacaggacaacactgcctgtcacgtggta

SEQ ID NO: 33842 - DNA, 201 bp, Bos taurus
cttccacagggtggaatgccaaatgtaggaacaagaaatagcagtgcaagaatttaaaaaatgagaaagaggaggggaaaattagatttacttgtgacagraaaactgaagctgttaattcttcttctttttttttaattataaaccaggaagtagatgtagaccaaagtgttcaaagaaaaagcccaacaggtagggtgg

SEQ ID NO: 33843 - DNA, 201 bp, Bos taurus
ggcctctggaaatggtcaatgtgagactgcaggagccaagtcaccatgctggatgccatgagaggtggctggtgcaaaagccctggtcagggtgcccgggygccaggcccagctgggcttgactccatgtgtgatctgggtccaatcccatcctgaccgtggacctcagtctgtccgtgaagaaaacaaggggagctttta

SEQ ID NO: 33844 - DNA, 201 bp, Bos taurus
catacatgctgagtactggctcgggtgcagagacacagcagcaaatgaaacgaagtccctgcttgcgtggaacctggcctttgcaaactcttaaacgtcayctcctcagtgaagccttttcaggtcaccccattaagaacaggtccagcttcttacaatttttacagcatgcaaggccaagaattcaataatgcttgacaa

SEQ ID NO: 33845 - DNA, 201 bp, Bos taurus
ggcatggaagggtagacagaaatttgtccatggcccccatccaagtctgagtcaagttaccactgaaatgaatgcctttggatcttagagaagaaagcacraagcactggaaagaatgtaccattaggaatgcaatgtggccttgagtggcctatgaggtccagcacccataatgggaaatggacgagtgagtgagtgccc

SEQ ID NO: 33846 - DNA, 201 bp, Bos taurus
agctggcctcattcttcctccattccagacattatacaattattcctcatataccatttcctgagtgtcactgtatagacagtatatgctacatgttttastttttaatgctactctggttcagttcagttcagtcgctcagttgtgttcgactctttgtgactccatggactgcaacatgccaggcttccctgtccatca

SEQ ID NO: 33847 - DNA, 201 bp, Bos taurus
gtctggcttaaaatcatcaccagcaatgcataaagagcccgcatttggaaacgactgaatttctcagcggcagccgctgcctgcctgccgcccctgcccgygcacatgctcagtacccgcctctgcatatgcccagggataggtacagcacgtgtgcattcttttcagttctgcagaagcagcagatgggtaattgcagcc

SEQ ID NO: 33848 - DNA, 201 bp, Bos taurus
tattaaaggcacagaaaagcataaaaagatttgtaattaagataaaaaatcaaggaacctacccttctgttttaaaagttcagcccaagcaagggacaagkggctgcattcaaggtcacagagtgtatatttgtagatttataggtttaatgtgaaataaagcacttgaaggaaacaaaaaagagttgctaccagtcatgg

SEQ ID NO: 33849 - DNA, 201 bp, Bos taurus
gagaaggaaacggcaacccactcctgtattcttgcctgggaaatcccatgcatggacagaggaccctcgcaggccacagtccctggggtcacaaagagtcraacacgactcagagacgaaacaactgcaacactggatcacacgcctcattccagccaagtccccctccttacgcattcctgcactgtgcctgcacactgt

SEQ ID NO: 33850 - DNA, 201 bp, Bos taurus
cccagcttctagagctgcactgcccacatgccctggctcagggctccgtcctgcatcttcaaagccagcaggtagcatcttgcttcagtggccacattgcygtttccctctggaagtaaatctccctctgcctccttctcatcagcacacttgtggttacattgaaggccccactagataatctaggacgataccaatacc

SEQ ID NO: 33851 - DNA, 201 bp, Bos taurus
agaatgaaaacaaaggatgcgctttgctgactgtgcccccttgattgtgtatttgtcaagtcaagattagtcacagcaattcaggaaatttatcctccaasctcctgcaattccaaacaccacggctgacatttcgggccgcgcggtcgggctgtccgtcttcccgtggaggacacgctttccttggcgcttacctttcgg

SEQ ID NO: 33852 - DNA, 201 bp, Bos taurus
cctttcgggagctgtccccaggccaagcagagagcctgcacaaagcgctcagtgtggctggacgcacgaatggactcctcctttgccaagccagacacagrggccacgaaaaggcctgggcttatttgcgtcactccaaaagcaacggcaatagcagctgctgagtgggaggctctagttaatgaagagcttagttaacag

SEQ ID NO: 33853 - DNA, 201 bp, Bos taurus
acctagactcaaatctattagttaggccatacggctgagaaacttagcctccaagagcaagatagctacactgttctgagaaatcagagacattatatgcrtaaagcatcaagcatcgaggtttaacagtgttcattaggtgttcatttccttctggtcctcctactgaattacgtaatttccttaggtgaacagcttagt

SEQ ID NO: 33854 - DNA, 201 bp, Bos taurus
agagaaagcccgggtgcccaacaaagacccagcacaacccaaagtaaaatttctgtaccttattctacccaattaagggagtccttacactgttagttttsaactaacagttgggctatatgaggtatttagcaatgtcagaaatgataacaaaaaataaccaattttcattactactcccccagactgatcaatcatgtc

SEQ ID NO: 33855 - DNA, 201 bp, Bos taurus
gtgaacagtcacaaaatgttgccaacagctaattaatcctggccaattaaaaatataaccaaaacacgtgcccaggaatcatgttttaccgtgaagaagtkgggggaggggcttcttctatcacatctgcccggccacacacatcaagtgtgccacatacacatcttaggaatactgacatttgtgtacaatgaactgtta

SEQ ID NO: 33856 - DNA, 201 bp, Bos taurus
cagatcgccagagatgttgccaggtacggggaaggggcttacgtactgccccagggggctcaggagccaccaggaggctccagaggggccacttcgggacwctgcttttgcttttgacaaccccatctgtccagggctgaactgcacagctgtctaattggggcgactggagaggcacgcgtgaatggcccttggatggat

SEQ ID NO: 33857 - DNA, 201 bp, Bos taurus
tccgcaaggcctgcgggatcgggggctcaggtggctcctccctgtccttcctcatctcgggcgtcgcgctcctctccccttctctgcctcaaccagccccygagagctcggcctgcaggacagcctcaccccgcccccaggggacccttatggtggcaacacagggttccacagccctggaatccggagagctcctgcagg

SEQ ID NO: 33858 - DNA, 201 bp, Bos taurus
gtagggtcaacggccttctcttcaacgcaagaggaacagtaagcaccaaagacagacttgaggcgaagagtgtgaggggagccgtcaagtccattcgcctrttccaaacatgaagagcctgagggccggagcagcggagggactcgctcacccactggttgtcccagtggggacgtttgtgtagagtgagccccgagagaa

SEQ ID NO: 33859 - DNA, 201 bp, Bos taurus
attttccatctgctctccaaaatctaatgacctgacagattatccccaaaagaataaatctgtatgatccagaataaatcaagcaggtacacaagaaggcrtaccaacattcaacaactaattttgaggaatttctcaaaaacggcaagttcgtttttcctcttaactatcttcctgggaaacacaacaaccagggtggct

SEQ ID NO: 33860 - DNA, 201 bp, Bos taurus
gccgacagagggagctttgatgcagagaaggctgccctctgtgtgatggcacggaagaggtgagtggaagttcagagggcgaggaaggcgatgaatgttcyggggagaggctcacaggccttactacggatgggaaaacggtgcaagaaagcaactgtacagacatcggattggctgctgtccacagacgagagccggcac

SEQ ID NO: 33861 - DNA, 201 bp, Bos taurus
gggccccagcaaggcaggacaggcacgcggtgcccacagcccaggccacgattatgccagtaggtaacgcaggcaccaaatccatttcctagaaaccaaaytgcatgcccaggactttgataatctgcaaagggaaaccccctccacacccacttaactcaagctctcgaattcacttggccactggtgtaactacttcaa

SEQ ID NO: 33862 - DNA, 201 bp, Bos taurus
ggcgtgcagtcacacctgtgcgttgtctggcccaggacacacctggccagcctcctatgctccagagtcattgtctttgctgggggtttgccaaggttgtktgagacccgccctgtggccagggcgctgaagtggctggaggaggggtggggcgtggggccagacttggggggctcgccttctcccctccagcagctcctt

SEQ ID NO: 33863 - DNA, 201 bp, Bos taurus
tcccggccgagaggcctgcgccgctgagtgacctctattctccctgggacatacacacacagaatattgcatgtgtgacagaatgggccgcgtgactattkcgccccagcaccttcaaagtgccccctccacgggctcccggcagctatcctaaaagcccgtctctgtaccaacaagagctgtggcctggttcctgtaaac

SEQ ID NO: 33864 - DNA, 201 bp, Bos taurus
tgcagacaggacgtgggcctggcggtaagggtgtgtggacggggaggggtggggggttgggggctgcgcttctgtggcagggaaacagtagagtgggaacrcgtttccgaatcagaaaaggccactccgtcctgcacacctgtcctcttaaaatccgtcttagtccgcgtcctgatgttctgccatctgtctgcccgcctc

SEQ ID NO: 33865 - DNA, 201 bp, Bos taurus
agctgccccacgcccagccccctgacagggtgccctcctgcgcctgccgcagctctgcccactgtggctgcagcccccaggtctgctccatctctccctcrtcctgccttcgaggggacggccttctgtgcacaagtgaggtcctgatggctggggcccctactgtccagatgagacccggtttctatcaggcgagggtgc

SEQ ID NO: 33866 - DNA, 201 bp, Bos taurus
ccatgctccacaccacacacccttagagctgagagtgtgtggtcctcatcctcgccactgctccagcacatgagaaacacagaggaagggtgacaggcctrgtccatctcactacagctccatccagaagaggacagagccattccaggacagagccatctaatcccaccattacacggggacgttctctcaccctggact

SEQ ID NO: 33867 - DNA, 201 bp, Bos taurus
gactgaaaaaggaaaatcttggctattatgaactgaaatgcaaagccatttaataacagatgtaagaagatgtgctttttttctatgtgtgttaatgtaartgagctttttattttatatacataaacataatgatgtatctatctcccggggtttgctcaaactcctgtctgtggtctcagtgatgccatccaaccacct

SEQ ID NO: 33868 - DNA, 201 bp, Bos taurus
gaaggggtcaaagaatgtctggactgcgctcagagggccctgtgtcctcacccacactgtttccatcctgctggatcaggtaggaggacacagaggggctmacatagaggcctttcattctcatgagtgattctttccagttctttaaagtaagctgtttatgatctttaaccagcaacattgggtgaaattggtggctct

SEQ ID NO: 33869 - DNA, 201 bp, Bos taurus
ctgtttcatgcttaatgatcgctcttttgttatgctgacatgtgtgtgtgtcaaaggcatttatttagactttgtgggcaggaactaggtccttctgcagytccacaggagaggtttggaggccagttccccagcatcagctgctggggttggggcttggttagaggaacttggtccatgagagaaggaggcacaccatgg

SEQ ID NO: 33870 - DNA, 201 bp, Bos taurus
gaagagctagatttaaagtggttcaagcttgtactgttcctattttggaaggtgagtctttctactaattctcagaggccattgttcttatttctctgcartattttgtgttctgtccatggtggacaatatgtgttgctttgcctgcctagttctcttccttcatgagtaccaacccaggccagcccatccaatctacct

SEQ ID NO: 33871 - DNA, 201 bp, Bos taurus
aagttaacagaatcttcaatttaacattttcaacgatgaaattaaggtcaagaatttcacatttatgatagcacatatagaagggcattcaatataaacaygtccatccctatgaagcttgcaaatttgacaatgctgaatggaaggttttagaatcacattcacaagtgatgcatcacaagaatcacaaatctgggccct

SEQ ID NO: 33872 - DNA, 201 bp, Bos taurus
cttgcagctctacaaccagcattcatcatctttctttgcctccatgtgacattccccatgttgtatattttccttctaaagtaggttccataataatatgragtgccacatctggggccaggttgtctgcacttgaatgctagctgtctgagtgaccttgtgcaagttatttagtatttctgtcctcttctgtaaaatgag

SEQ ID NO: 33873 - DNA, 201 bp, Bos taurus
tatagctctagatatttacttaaaatgggtgaaatgtataatatgtcaattaaaactcagtaatgctcttaagtaaattatactgttagatattaattagygctaaagcttcaaagtagaatcagcaggataaacactttagagactaggaaaattcaatatttatagaattcctgagaggaatttttaaaaagattttga

SEQ ID NO: 33874 - DNA, 201 bp, Bos taurus
acccaatgaccataagaatgtgtgcactggcaaagacaaatgtaactttttcttctactctgataaggacagcagtgctttctcgggttcataggagcccyagagtgtgtatttcagtaaaaggactcctataagaaatcttgacctagaagttactctccaggatttaaaaactgaagatgagccaagagagaagtcctg

SEQ ID NO: 33875 - DNA, 201 bp, Bos taurus
caccatatagcatgtggtactgtgtgtgtggctgcgattctctcagcttgggctccagtggaagattgggaaggcagtggacagtttgctgagtagcattkaaagtgcgttacaggcagtgagttcccatttaccaaacaaggcagcacagactgccacgggaaccgtggggtgggttttcctgactgacctgaaggcgaa

SEQ ID NO: 33876 - DNA, 201 bp, Bos taurus
tgatttcaatcagtaggaagagacacaagttactcacttgggacaattacaatttcccaaaccaggacattcatagactcttaagagtgtattaactgagrtaataatggattcagagtacagcaacctcgcaggacccagaaacccatgaatttacataatattcagattgccggttcatcttttctctgtgctccccaa

SEQ ID NO: 33877 - DNA, 201 bp, Bos taurus
aagtataaatagaaacaactcaaacatccttacatatcatattttctctacttatactcttatagaaacaattagatacaattttactctaacgtatttamggatctaagacccattggaaattcattttaaattataaaataggcagatagacatttttataaaagtagcataaaatcgatgaaagagtgcataattaaa

SEQ ID NO: 33878 - DNA, 201 bp, Bos taurus
gaaacattactggaaggaaaacaattaaagcccacagtgtgaatggcctaatgtgctatggcaccccaagacagatggcctgctggactcaacagactcaytttaggatgtcagatggcagggggaaacaggaaagaaggctaagaaagaagaagtccaagaggcggtcaaatggttaaaggcccaagtaatcaagacaga

SEQ ID NO: 33879 - DNA, 201 bp, Bos taurus
ctggaccattctgaagaaggtatgtcttcttctttcaaatcagatgttaaggtcaaataacctgtaaaatacttccaacctggcataagttcagacatggraacagaagtcggtattgaaaatgattgagttgctgaaactgcagaaaatattacaggagaggttacttctgagaaatcagacatagagtctatgtgtggt

SEQ ID NO: 33880 - DNA, 201 bp, Bos taurus
tgttgtagcctaaatagtcccgtttatagtgttatttaagaatctttagcactcagtgaaacgacagttttcccattatgagtaaattgacagtaaaaggraaaatctctgtattacaaatgtgagcacttctcctggagttgttctaaatctgtgggatggtcactgttcccagacggtttttatacttaggaggggtgc

SEQ ID NO: 33881 - DNA, 201 bp, Bos taurus
aggtgtcttaggttagggcttttctcatggtagctatcccacagtctggtttcctagcccaagttaatttgctcagattatcctcggggcattcaggctcrgtccttactctaggtaatgcagcccgtgcctccctgcccagcccccgcttgctagtggtggatgcaggagtctgtgctgcttctgtgctaggggagttac

SEQ ID NO: 33882 - DNA, 201 bp, Bos taurus
ttccaacaatgatttggggtgagttacacatcaaagcttcagactctcacttaaatgttttgtttttttttttttgagtgtagatatatactcaccagctrtaaacagataccagatatacacagattttcaccttagggaactaagcattgtaaacaatgttttacagaataccttatcatttatttatgattatgatag

SEQ ID NO: 33883 - DNA, 201 bp, Bos taurus
accttgccttttgtttgtgggggaaaaaaagttaaagattaagcttaatgaaagtagtgagaaaaagcaaaaggaaagcaaaggaaaatagtccagcaagmccaaataataagagtatatacattaagcaaagtcaaggacctttagttccatgtcaagggctatagataatttgagtcatatcctttgagccattgtgca

SEQ ID NO: 33884 - DNA, 201 bp, Bos taurus
aaaaacatacttatttttctaatatctagtttatagtatcttttaaaagataactctcaataaaataaatttttaaacaattgattttcagattggaaaamaagtaatataagagaaagacactacatggtttcattaccatctgtttcctgatttgtatttcctcatttcattctgaatattcagaatgtgatcatcttt

SEQ ID NO: 33885 - DNA, 201 bp, Bos taurus
gttctctgtgatctattgtcttcctgctgtctactctggctttcttcctataaggaaattgagaattgtctccagctccctacagcttgaaagtcaaagtratagccaattatgtgactttagccttatgggagcatatggattttgtggagaatttttttttaattaaaatctttgagctgttaactcataaaagaaaat

SEQ ID NO: 33886 - DNA, 201 bp, Bos taurus
agcaaatgctgataagaatgcagcaatatttttatgttaacgtctaagttttgctcagaatttaactggatttttaagttactgttttatctcacctaaawtttagatttataacatttagttcatgctcacacacaaacacacacacacacctctgtattatcatctcttggtaaaataatttaatttattcaagtattg

SEQ ID NO: 33887 - DNA, 201 bp, Bos taurus
atgagttatgcatgtttcagtttttactgacctgaatttctaatattcataaatttgggcaggtaattcaggtcatttataaaaaccatacaataaatcawtacagttctaaatcacatacagaattttcttccttaagaagaaatgcaagcatatcacaagttatttttcaaagaatttttcaagtatatatagaaatgc

SEQ ID NO: 33888 - DNA, 201 bp, Bos taurus
taaaaaaaaaagaaaatgcagggcctcttgttcaaattattttcaggatttcaatgatatcagccaagcttgaaattaagagtgagtatttctaagcaatrggccctgtacaactgcacaggtcataggcccagaaggcctgccaatgggtcaggacagtaagaattagaattacaaaattatttccctattcttttggta

SEQ ID NO: 33889 - DNA, 201 bp, Bos taurus
ctccaggacgtttggccatgcagcacttcagcgggagttttcaatttgtaaaggttgaaaagtcatttttcctttccagctcataaaaggtgaagctttayggccagagggcattttgttcagatctcagatcccagtcttctttgcttcatgtgtgaatacattaccctggtttcacagttacttctaatttctatttat

SEQ ID NO: 33890 - DNA, 201 bp, Bos taurus
aatacatggtacacacagacacaaacgaataatgattacttatatatataaacggtggtaagtacaaccattatttacagaaaatttccaacaaatgaatrtataagtaaggagaaaaatagatcaccataaaaaaaaaactaatgctgcaataattgctataggcaagatccactgatgaatgttaaaatcagtggatac

SEQ ID NO: 33891 - DNA, 201 bp, Bos taurus
tatgcacaataatcccaagtttaattttataatattttattgggaatcttttggaggggtggtaggattttgaaaatcttagaaggaaacaaaaagttttyaaggtaaggatataattctacttgaaaagagtggtcccaggtgttaatactggtagaattaaaagatgcacaactgttttcacacctagactttcttgga

SEQ ID NO: 33892 - DNA, 201 bp, Bos taurus
gctgtgcaaaaccatttaaatttaattaggtacattcacttatttttgtttttatttctcttgcattaggagaaacatcctagtaaaagtcttgctataayttatgttaaagaatactctgtgtaggttctctttcaggagttttatgatttctggttttaggtctataatgcattttgagttttcttttgtatatggtgt

SEQ ID NO: 33893 - DNA, 201 bp, Bos taurus
tagctatctattttgtatatgacagtgcaaatatgtcaatatgctattctcttgtctcactctctccccgtacctgctatgtcctcaagactgttcactayatttgccctgcaaataagttcatttattccctttttgtagattccatacatatgtgctaatatgataaaaataagttttaattattaaatgcctaagtag

SEQ ID NO: 33894 - DNA, 201 bp, Bos taurus
aaatggaaaaataataccctgcttacaatatcatcatttattaaaggtaagaaagacattaataatcaggatcagtaagtataaatacatgagtatttttrcacactactaatgtgaattatcaatgcaaagaaatagaggaaaacaacagaatgggaaagactagagatctcttcaagaaaattagagataccaagggaa

SEQ ID NO: 33895 - DNA, 201 bp, Bos taurus
gaaaaggccacaaggtcctcctaatccagttgaataattcttgtttagattgattcaacatttttaaattatttttctcaatttacatttttacatttacrttatttttcatatccttcccctgtatagtttattataagatgttgaatatagttccctgtgctatacaatgaatccttattgtttattttatatgtagtg

SEQ ID NO: 33896 - DNA, 201 bp, Bos taurus
gtagaaacgaatttctgcatagagatggaaagtagtgaaacaagtatactgcttatgagtacagtatgtatggatagacacatgggtgggctcagaaggakaatttggccctcatagtagtgaatagcttatatggggcatttcttctgggtttcctttgaccagtcatcacactttgcctggttctaagtccatatttgc

SEQ ID NO: 33897 - DNA, 201 bp, Bos taurus
caagtcagattcctaaagctacccctcacttactgagattacatagacagtgcaatcaaaacctttgaacctcccggattctataggaaggagaacacacratcaacaagcacctcactcacactaaaatcttaagctccatttctcacataaaactgtatcttaaaacctttctagtcattttaatgagagagagatggg

SEQ ID NO: 33898 - DNA, 201 bp, Bos taurus
tcttcagtggtgcttaccaggaaagagttttatatactcccttgtttctttcagattatttgtggcttgtggcatttaacaggggtccacctatgggtaarcccagagccttagtgccaatcttgcatttccatttctctctgccctctctcagttgagtaaacaaccaaaatcattttgttctgtcattttgttctgtag

SEQ ID NO: 33899 - DNA, 201 bp, Bos taurus
atgcaaagagaatatctaaataaggtctacaagaaaattttttgtaatgctgcttcctagaggctggaatattaatcaaagctaaatactaattctctttmttacttctacatatggaactctgatttaatttaagtaatgccatattcataagccttattaaaattaattgctcttttcattttttaatctggtttgtca

SEQ ID NO: 33900 - DNA, 201 bp, Bos taurus
tcatactgaagccctgagtgacactgtggcccaggaacctacaccaactctcagctaaaatggcatcagcattttacattacatctctaagattttgaggrtaattgtcattttaacctgaactagcctatcctaaccgcatacctggactgaaatattgatatattaaattaatatctaaaatcgagatgacaataacaa

SEQ ID NO: 33901 - DNA, 201 bp, Bos taurus
atccttctagagcactctatttcctgctaccctagccaccaactcccctgagtacatggtgatgtctggtcccctgagactcaagtagctgcaccaccttyactcctggccctcacaggggcaagcccaaaccttccagggcagcctcaggagcgaacccctgtggacaacccacatgcaaaggtggaaataaaaccacga

SEQ ID NO: 33902 - DNA, 201 bp, Bos taurus
tctatatgttgaactgaaaacccattttttatttgcacttttataatcccttatatatatatataaagtataaataaaatgttttttaaagatatgaattkaattcagttcttctcagagaatttattcattccagcaataaatcttgctacctttctaagtccttgctttgtgccagaaattgtgctaagctcttagata

SEQ ID NO: 33903 - DNA, 201 bp, Bos taurus
acatgtgatctatcctggaggatgttccatatgcatgtgaaaagaatgtgcattatgctgtttttggatggaatggccaattaagtccaactgatctaatrtgttattgaaaaacaatgtttctttattgatttctgtctggataatctggccatttatgtaagtgtgatgttaaacacccatactaatattgtgttaatg

SEQ ID NO: 33904 - DNA, 201 bp, Bos taurus
gtaaaaaatgtgtctcagaatcagcagtgcttgctcagaatagaactttctaagcagcactacaaatccactaaattgacattttgggggcttggggccaygactataaactttaataaacaacagagatgatgcagctgagccatagaccacttagagaaatcctgcttcctgttgatgctaggaaagaacgtcctggaa

SEQ ID NO: 33905 - DNA, 201 bp, Bos taurus
ccctggcccctcggtcattgcccctctgcccggtggcagcaccacaaagacttgtttctgcggcaggtccaatgcccaaaatgacagtgccatccactgayattaggcctggtccttctgtgccctgttctttactatgtcgagagtacctgctgactcggaatttcagggcattctgctttcactgaggcattttattgt

SEQ ID NO: 33906 - DNA, 201 bp, Bos taurus
tccactgaatgaatgaataaatacagtgtgatccaagtacatttactttagagcagttaccaaaataccactttatgcatgctaatcataccctaaaaacraaagaagtctgatcattttataagaatctggactcaagatctggactcattggagcaaatgatgagaaccctcaagcaactaagtatgtaactgaagaca

SEQ ID NO: 33907 - DNA, 201 bp, Bos taurus
atattacgtgaatgatacctgtcttgaaataatttgaaagcgtctcttctttgtaatagggaaagacattcataattttctattttcaacccttgctttartgcataataattaagatgctatttgaaaacttgataatgatgggtaaccctgaatatgtctgagacttctcacaaggagataataaaccaaatactttag

SEQ ID NO: 33908 - DNA, 201 bp, Bos taurus
actgagactcacgcgctgtcccttggcaaccataatgtggtactcttctcggaaccagtaggccatcactgctatggtgatttcaggccatgacaaggtgkcagtttcaaactaggctgatgatctggtttgaggatgtttttgcagttatctttctaggtaggaaggggcccagatttcagcatctaaatttttcatttg

SEQ ID NO: 33909 - DNA, 201 bp, Bos taurus
acagaaataagtttgctgacccagctgccgaactcgagaacaacagtcacaagtaccctgtgactcctgggtgctggaatatagttagtttgagctggggkatgctgcaggtgtaaaatgcactctaacttgcacagaatgtgaaaaaaagtaatgtctcattaataacgtttttgactatctgaaataatatttcgaaca

SEQ ID NO: 33910 - DNA, 201 bp, Bos taurus
tcttgcctggagaagtccatgcacagaggaacctggagggccaagtccatgaggtcacagagagtcggacgtgactgagcatgcacaatttgtatgtttcrtgagccaaagttattggccaactacacaaggcactgtaatagaacactttcagccattctttacagtttttgtttttgtttttttttaatctgtgaagtt

SEQ ID NO: 33911 - DNA, 201 bp, Bos taurus
tctgaacttgcccatgttagaatgcgactctcctgcgggccattcacttttccagagatcgccctcgtggtttcctaaaagtgaattgtagagacatctcyactctaggaggccacttggaaatccccccaccagctgcaggaaacactatggtcacttaaaatctgcctctccctgctaagctcgcctattattctacta

SEQ ID NO: 33912 - DNA, 201 bp, Bos taurus
gacacccaagagccagggcagtggctgaggaggagccaccctgactggccctgggggctgatcacctcccccttaaatgacttatcagccagcaaggagarttagtgcagctgatgccaaggcctgggttccaaggtgaccttgttctgccaaggccacttgctcagacaggagcctccgctcttacattctcatggaaag

SEQ ID NO: 33913 - DNA, 201 bp, Bos taurus
acgctggctcgcagaaaccagggggacccggggggcctggggggccgggcacaccggggatgcccgccaccccaggggggcctcgctcgccgtcccggccrttcctcccgtagctggcaggacccgggtcacctgaaacacacagaaggcacgctcgtgagcaggagacccgcagacgcagacgcagaaggcactggctcc

SEQ ID NO: 33914 - DNA, 201 bp, Bos taurus
tcaaaacgggtattatgaggaggcagattactcctctctggaggccgcgggagatgctcactgtgcagatggagctgacctgggaggagaaagacttgccragtctgaaagactggccggcgactatctgagcgatggcataaccatgcctactgtctgtacttctggctgtctgtccttcccgtctgcaccacgagagtc

SEQ ID NO: 33915 - DNA, 201 bp, Bos taurus
cagtccatgggggcgcaaagagtcagacacgactgaagtgacttagcacgcacacatgcacgtgattgacttcagctggataatccaggccaatgtccccrtctcaaactgaaccgctttgaccaagtccttcttgccgtgtaatgtaaggtagtcataggttctgaagattagagcagggcttctttgggggccactata

SEQ ID NO: 33916 - DNA, 201 bp, Bos taurus
caccaggtgctgagtcccctgcaggtgcctctggggcctgcgtgtggcagagccagcacccacactggacacggacagctggttgcaggagagaggctgtraggtgggtgtggggaggggccggagccccagggagctgcctgtgatgtgtctgtgttcccgggagactgctgaggtcggggtccagagtgtccaagggct

SEQ ID NO: 33917 - DNA, 201 bp, Bos taurus
gtgtctcttgtttcttgagtggccactgatacctgtgcgaccctgggtgagtcagtgaacaccttcacctgcttccccaaagcatgcatagctgaaaccgygtggccgtaggtaagagcctttcaccatcagctgtctcaccctgatctttcaggacactggaaagaatttctcctatgactgcttgaacagagacttctg

SEQ ID NO: 33918 - DNA, 201 bp, Bos taurus
agttcccaaccacaagtggccctcctcactccactgcggaggatatttggcaatgtctgagcatattttcaattgtcacaagtgaaggatgctactggcayttagtgagcagaggccagagatgctgttaaacatcctgccatgcaaaggacaggcccacaaatagaattatccagccccaaatgtcaattgtgctgagat

SEQ ID NO: 33919 - DNA, 201 bp, Bos taurus
aaaaaacagaatagtttagccatccttgcaaacttgtacttgtaatatctgaggaaatgaaaaatagtattttaatggcccgaggcatgatgtaggtgatracacacattgtcagtttaatatagatttgatttcactactgtgtaaattcagaaataggaaaggcccaagtgtatgggaataaaggtgtgagtatatgaa

SEQ ID NO: 33920 - DNA, 201 bp, Bos taurus
ggaaggtttaatctaagaaggatgtattttgaaatgattgtattggaattgtaactttggtttcatctatccaaaccttaaatgttcggggcctctgggaragaattcctttcctgtgtcagtaggttaatctctgatcacctgaactgagatgtctgtgtgactagcagtgtgtggcctgtgcacgtgtggtttgaggat

SEQ ID NO: 33921 - DNA, 201 bp, Bos taurus
acccaaacctttttcctacaaccacttttctagggtgctgcaacaattggagggctgttagcatcaggatgggatcaatcaggactctgctctacatgagygtttccctgtggttcctttgaacagcatcttgaagtagtttctcttataacaattatatcatgtgcaatatcacgagcatgagactatactggcaatatt

SEQ ID NO: 33922 - DNA, 201 bp, Bos taurus
aacaaaaatgttggccactgacccaaacctagaaagcaatgtaatgattttccaaggcatagaaaagatgctttttcccatactgtgcatgtttcactatycattgggtggcccaggccatgtggccaaggttagaaagcaggtaagggccacccagggaaagaccagtgcaggattcaagacccttgaggacagacaaga

SEQ ID NO: 33923 - DNA, 201 bp, Bos taurus
ggaagtctagataagaaaggtaagaaattgatttatttagagagaaacatagtgcacaaatagagggtaagccatctcaaaaggcgagaggccctgaaatrtgggatggtcagcttttatgagctgagtaatttcataggctcatgagcaggagcctatgggctgtttattccaactatttgggggaaggggcagagattt

SEQ ID NO: 33924 - DNA, 201 bp, Bos taurus
acacgactgaagtgacttagcacgcaagcgcactggctccatagtgactgttcccaatctttgtgctcagcacagcacgacttctgttctcagtagggccygaccgtcacgctcactatgacttggttctcgtcctgagtatgctctgattctggtcctctctatggcttgactctagtcctttcttaatcctgaatctgt

SEQ ID NO: 33925 - DNA, 201 bp, Bos taurus
atatggttatgagttggtgttggccacaagagacactttatgtgactttggaagccagcttgaagcagaagtcgtatttttcactctgaaggttggtgccrggcgctaggcattggccaccagcccagattgttactgctgtgctagctgacttggtgggtgtggggcggcagtggggcccaagttcctccacttctcagg

SEQ ID NO: 33926 - DNA, 201 bp, Bos taurus
ttcattctcaaagtcaggagacctctttgaaagtgcagaaagtctcgttggaggtcaaaggggagtgatgtcaagatacattctgcccataggcctctgcrgtagaatctatcttgcctaagagatgcgtgcccacctatgggaggatcctgagatatatcaaatatggactgtgaaccaggcaaatcaaagttattggcc

SEQ ID NO: 33927 - DNA, 201 bp, Bos taurus
ccacaggaatgagagttctgaactcaatgtcagcaccctcatcctagccatcgagcactggaaaggtgagcccccagaatatttggctttgaaggccagcycggctcaattacaggagctccaagggactgagggaaatagagacttcactctggaaaggtgtacagaaaacctcacatgcaccagaccaaaggccaaagc

SEQ ID NO: 33928 - DNA, 201 bp, Bos taurus
tgggtgaaagttataagggaaatctttatattatttttgatatttaaagatatttaaacatatctttatataaaataagattaaaaaattagaaaaggagrggttgattgaagagagtttaataaagggacaaagacaggacaagatagggatggtaaagcatcagggttggcaacaggatgacactgttaccttgaaaga

SEQ ID NO: 33929 - DNA, 201 bp, Bos taurus
gagttggtgatggacagggaggcctggtgtgctgcgattcctggagtcgcaaagagtcggacacgactgagcaactgaactgaactgaactgaatgttttrtagcttagagcatatagatctttcacctcctaggtttagttgattcctaggtatattattatttttgatgtggttttaaaagaaattgtttttttccttt

SEQ ID NO: 33930 - DNA, 201 bp, Bos taurus
tctcagattctgggccttcactctttaatcttgtctttagcatattcagataatcagagtttctctgacattactgtttatatttcactaatcagttttgycctggcctactcttcttctctcctactccactttttagggtttcttgatggcccattccccagttctgttcataattatttccattctatttatgaagtc

SEQ ID NO: 33931 - DNA, 201 bp, Bos taurus
tagcttccattaagttaaccacccaaagattgttttctcatgaaatgttgagctttagtacattaaacttgagtgaacgtgtgaaaccctagtcacctcartcttaatgaaggcagaaccctaggttcatgcccttctcctcactctctgtccctccccttctctctctctcccgcagtagcctcactgtcttcactatgt

SEQ ID NO: 33932 - DNA, 201 bp, Bos taurus
gtggaggccagctgccaggtcctatgtagtgacagtggctagttgcaaacagacttgtagggacggggacagaaccaactatgggctcacagccagtgagrttctggttactggcctactgttccatggctgcacactctcccctttggtgtgtataaagtattaatatcttagttactcaagaactactttgtccacagt

SEQ ID NO: 33933 - DNA, 201 bp, Bos taurus
ttccttttcatatttagaattatttttcaatgtataaaaatagatggcacaaaccaattgcaatttccagcttttattgaaaatgtgaaatatctggtcawtttaggcccacgtgtgtgcttagtcactcagtcgggcccaactctttgcaaccccacggactctaggcaagaatactggagtgggttgccatttcctcct

SEQ ID NO: 33934 - DNA, 201 bp, Bos taurus
atggggttctcgtggcaggaatactgaagtggtttgccatttcttcctccagtgtaccacattttgtgaactgttcactgtgacccctctgtcttaggtgrccctacaagacatgtctggtagcttcactgagttatgcaagctcctttgatgcaattcttattggagatttgcatctcaaatttgcatattaaggtgatt

SEQ ID NO: 33935 - DNA, 201 bp, Bos taurus
agatcctaaattagaaggaatttattttagtgttgaattcctgggaacaactctgaagatctgtataaatcccatgacatcagcccatcctctttcttccrtaataattagaagaggttggtaaatacataagcaacagcagtggccctttgcccactgcagtcagccaacatgattgttacaggcaagaaccaaaatctg

SEQ ID NO: 33936 - DNA, 201 bp, Bos taurus
gtgaggtcaaacacggcctacaaaaatagcagatcaaacttggttattgacaactttcttttttctggtgcagtcacttccatattaaacttttccaggtrcacattttcttaataagtattttatgacaaagacaaccattgtgtaggttatttttactccagagaggatcactgccaatgtcctgtggaggtatttttt

SEQ ID NO: 33937 - DNA, 201 bp, Bos taurus
gtggagtgaatgaagtagcttgaagaactcacaggacaacgtgtgtggaacagatagttttgggggtatggagatgggtggtcttggcaggaactggatcrtgaatgtcctcagatacaagatcaatgagtctggacctggagacgtttctgacagcattgtttggtataacaggtccatgtgctcttaatatggccttaa

SEQ ID NO: 33938 - DNA, 201 bp, Bos taurus
cgtcccaccttgagatcttagaaaagcatctcatcccagcttcccaggcagctcctcagcctctggcaaggttaaattccatggcctcgcaccctcaaagkgtacccaaccttagcaaaaccccacaagccatgcctccaaggctctattatttcagcatctggacaagcacaccttgtaactgcattaacgaggaggccc

SEQ ID NO: 33939 - DNA, 201 bp, Bos taurus
atgaaatactcttggcttcctgggcagaaatgagtacatcaacacttcaggctatgacaatgcatattatccattatggataaaccaattaaaaagggcckgattaccaaatgtaagacaatgaaaggcagtgctcttcaagtaaacataagtggttactagtgtacatggccggagaaggcaatggcaccccactccagt

SEQ ID NO: 33940 - DNA, 201 bp, Bos taurus
agggaggctgtgaaaaaaggtaagaggaggacttcgttgaaaacatggcctaagggagacaccatgttagaagatgaacatgtatttgtctttcactgtcyagaacttagaatgtcttttctcaaagaaacactgaaaatgatgagttcccacactagtccaaacagaaaacctattttagataatgacgtgaattaaaaa

SEQ ID NO: 33941 - DNA, 201 bp, Bos taurus
tgtagaagctgattactcaggtgtaatccacaaagaatcaataatgcagcagaaagacaagtaaaacaagtataataaagggtagtaagtgatgactaacractcttcctttgccaactgtgtaacattggaagatgagttaatctcaccgcttcagtctctggcagccccagtaaatgtagtaataaaaatattaatctc

SEQ ID NO: 33942 - DNA, 201 bp, Bos taurus
agcagttcccctatctctcttgtgggatctccatattccctgagacacaacgatattgaaattagggcaattagtaactctacagtggcctctgagtagtyaagtgaaaggatgaatttcttgtctctcactttaaatcaaaagtgagaaatggttaaacttagtgagaagggcatgtcaaaagcagagagaggcaaccaa

SEQ ID NO: 33943 - DNA, 201 bp, Bos taurus
attgactgcagtaaacatcagccatctgtaatttctgagaaatgacttcttaggatagttttttatatagatgacaactgtatattctttgtgggcttctytgatagctcagatggtaaagaatcctcctgtgatgcaggagaccctggttcgatttctgagtcaggcagatctgctggagaagggagaggctaccctctc

SEQ ID NO: 33944 - DNA, 201 bp, Bos taurus
tccataactctgtagaatatccttttaggaaagccctttcagactcttctttctttgtcaccccttccctgaatttcactgtttccaccactccttgccaycacatgccagacagtgatcaattctgtccattcaacatctctcaaatctgtctttgagaccagaattctaataacaacccttttataattccccttcctc

SEQ ID NO: 33945 - DNA, 201 bp, Bos taurus
agaattaatcatatttagagttcaaatgagtaaactttttttttttctgtacatgataccttaatgagactcaaagcacatttttttttgactttttgtgrtatcatggcatatttatggacacatgctaaatagagactcttgagaattaatagaaaaaggtgtgaattttcatgatcaggttcatgatggtcaaatctt

SEQ ID NO: 33946 - DNA, 201 bp, Bos taurus
gcagcgtcccgtgcacttaatcaccgaccactacctccatctaccccactggaacacatcacagagatgaggtgggggtctccttattcattaaaccctcyttgtcaaatacccactctgagaagccttcgggtgaatacactctcctagtatcatgttcatctgaattaatcattgtcacccaaggactcttccagtcat

SEQ ID NO: 33947 - DNA, 201 bp, Bos taurus
tactgttgaggtgtgcagagcaagaaagtttctctggggaaactgctcagtgaagagagagagaaaaaaaaaagtaagagttaactgctagagcagcagcracagacctacccttcttgctcctgaatctgcactgtcagatgatttctagtgctttcctagaaaaagaagaacatgctctgctgttgggcatgaaacaat

SEQ ID NO: 33948 - DNA, 201 bp, Bos taurus
tgaatactttgtgatgatcaaaaaatctgtgtgctcctagaccccaccagacctatagctttcattttaaaattgctttttcctgggacagtattgaagaragcccaggtaaacaggctttgccagagactctactaaccacaggatgttgaatggaaattattatcattatttttatatttaagtccttgacactatcag

SEQ ID NO: 33949 - DNA, 201 bp, Bos taurus
aataaaaaaatctgaatagctgggttcatttattaatgagatgtctctaagaaaatgaaagggatgttttcctcccagagtaaaatcaagtatcacataaygctctaaggaattccactttctaaaacaagatctgccctcatgctgtaaaaggtattgcccaatcaaagaccagttaatcaaatgctttgtcagcaaaaa

SEQ ID NO: 33950 - DNA, 201 bp, Bos taurus
ccctgaatccatcttgtacccagagagatctcctggggatgatatgtaaagataaacagcagcccagagcagctaggccatattatatttttattaacatmgtaactcttttaccccagaaatatcccaaattggataattacctcccacgttgcttttccattggcttgggagctaaacaccaggctctttctcaattag

SEQ ID NO: 33951 - DNA, 201 bp, Bos taurus
gaaacaagacaaagttcatgataaccctctcctgacaggtcaaactcagccacccagcttgacttccctggggagaacttgcatcaaattgaacacaaatrtttacttactcagacttaaagaggaaccagagcctccttcctgcaggaattgccaccctgctctggagaactgggcaatcacaactccaaagcagtgacc

SEQ ID NO: 33952 - DNA, 201 bp, Bos taurus
tggtcttgaaggaacaagaatgaatactaatggcgcttgggtggaatggttggcgacaacacacttcaacacaaagtggtaaatattatggaatcatttgkaatccaagccattgacacaaaaagaggaaatgagtaattcttcccatccatgtgttaaagaggcctaaaacagtgggggccagagtgggagcctctcagg

SEQ ID NO: 33953 - DNA, 201 bp, Bos taurus
tgggtgaacaaactaagtaaattccctaccacaaccggtagacttaaagggctaatttgtgatttgctaattaattgcacattaagcttattattaagaarttgttgtttagttgctaagttgtgtctgactcttttacaaccccatggactgtatgtagcccgccaagctcctctgttcttggaatttcccaggcaagaa

SEQ ID NO: 33954 - DNA, 201 bp, Bos taurus
gtcagcaccctcagcaccgcttcttctctgcaagcacagcagtcattcttacaggcatgggcaacacgtgctgaggggcctgtctgctgttcccttagtgygtcatcacctggcacctctatggagcttgcctaccagtcctgatgccttctgtgcccctggactttatgaggccgtactctgagggcacagcttccctct

SEQ ID NO: 33955 - DNA, 201 bp, Bos taurus
gaaggagaaactgtgctaactagcccaacttctctcttgggagagctgcctttgcaagcgatgctctcagactctctgagccttgaggtaacctagaagcraaggtgctgtcctcttggagaaggcctgcagtggtccagagctgcccgtgactgatggggagcatctcccaaatcctggggcacagttccagctccctgg

SEQ ID NO: 33956 - DNA, 201 bp, Bos taurus
gaaaagatgttcacgtatatttagtttatggcattgccataaattccagacaagacattgaccaattatgaccattggccattgaatcaattattctctgraagaacaaatgcttctctgtatcccaatttatggaaccagtcatagaccatgctcttgtatcaaccacaaactttcctcttttctttcctaaagatgtat

SEQ ID NO: 33957 - DNA, 201 bp, Bos taurus
tccagactcagcccgtcagtgtctcactctcctgagccaagggcactggcattgcaccaaatcaggtgcacctgctccagctagccatggccagagccagratcatggagagaggggaagtcactcctgcagcggtggttgtggcggcaagatcaggctccctggccgcagaggcggtgtgtggagctctgggccagcagg

SEQ ID NO: 33958 - DNA, 201 bp, Bos taurus
gcactggttttatgggttggactgcctgtgaacatgattcagaattcagactgagaaagaaaatatactcccaggcttccaactgacaacactcttttttycttagttgcttttttcttggagtagagttgaattggaattctggtatacaggttgcattagtttctggtatacaacaaaatggctcagctatacctacac

SEQ ID NO: 33959 - DNA, 201 bp, Bos taurus
aaagattttggtgatgagggtggtggaggtgaacatgttgagaagtggtcaaatctgtgatatgaatgtaacgctgaccggatttgctggtgaattgcatktgggatatgaaagaaagaatgctttaaatgatggctcagaaaagttttgggcctgaggaatcaaatgttagtgaagcagagtccatcagtgaggggatgg

SEQ ID NO: 33960 - DNA, 201 bp, Bos taurus
gtccctgaatgatctgaatttcttagatttgaatgctttttgaccttcttgtaatgtatatattgccaactcacacgatttcttatatacgtttcactctmaattaaatctgtaatgggttttgaccaaactcttatttcaacatttttttagtgtcatatttatggaacctagttcagtcaccgcattttaaagtttatc

SEQ ID NO: 33961 - DNA, 201 bp, Bos taurus
caatactttgaaggcttgatattagcctaatagaccaaatttaacatttggtctccttgcttctttagtagggtattggccattgttaagcaagtgacacytgttaccccctccaggaagggagtcttcctgcattgaggctcccattaccagaagcagtggcccaggatgtcaagccactgcatggtttgcaggtattag

SEQ ID NO: 33962 - DNA, 201 bp, Bos taurus
agtgactgaactgaactgactggactcatagaggtggagagtagaatggtggttgccaggtgctggagggagggagaaacagggagtggctaatcaaagcrtataaggttatggctgggaaagatgagtaagttccagagacttgctgtacaacattgtgcctataattaacaacgctggaatataacatataaaataata

SEQ ID NO: 33963 - DNA, 201 bp, Bos taurus
gcagcagtggccttctgggcagcggacataatggcaggcagcagggcccatatattattgccctatacacgccagttccactgatcacacatctgaagcawaaggcagagcgggcatccagccaggccaaaaggcctcttgctttctgatattacagagctacctatcagaattagtctttctcccccagttttcctgata

SEQ ID NO: 33964 - DNA, 201 bp, Bos taurus
tctgggtcatggaagatcaaaggcttggctggtctatggcagaacagttagaaaactatgaaatttaaggtaatatgaggggaaaggattcacataggacrtgaaaaggcaaggtcattgtctggactaacaaactaaaattgaaaacaaacataagatttagaattttaactccgtgtgcttgaaagcatcctcttcttc

SEQ ID NO: 33965 - DNA, 201 bp, Bos taurus
gacacttaatgatggaagtgccctagagacacttaatgatggaagtgcccaagaataacaccacttctttccctgcaagaagtcaaaggcactaaggacaygaaacagtgatgaaaacaaggataaagaagaattcaattactttcccacatataacactttcctcagaccattaagatttgtcctaatatttacatgaaa

SEQ ID NO: 33966 - DNA, 201 bp, Bos taurus
cctgtttcttgctgttttcattttctcatatctttatttctagtctttctgtaacatttctttttcaatatgcaacatggtctgcttgtactttgtgaaayaacccaaaaataattttattagcaggtgagttaatcttcattcatatttattgataatgaccaatcttctcttaattctgtcattatgttatacttaaca

SEQ ID NO: 33967 - DNA, 201 bp, Bos taurus
agctagatcttctgtataacttgctgcagctcctgcatcggtatttgctgtgtaagtttgcacttttaggctgtagagatggcctctttctttaaacctcrtgaaacagcctgtgctagcttcagagttttttctgcatcctcttcacttctctcaaccttcacagaattgaagagagttagtaccctgctcctgatttag

SEQ ID NO: 33968 - DNA, 201 bp, Bos taurus
atggtgtgcgggaaggggctgcaattactggaagtggccaccttcttttgtgactttctactttcgtgcctttttagttgacgtcaatttacccgcaaaastacgatcatccttggccaacagtgaagtggggacagatctgggacaatagtacaaccctgacagagcccttgagaggtcctgccattcgtcactccaaac

SEQ ID NO: 33969 - DNA, 201 bp, Bos taurus
cgcacttgggaatgttctttggactcacaggataatgaaagctccatcaaattctgctgaacccctctgaagctcccttccactggtggcctgacagtctytgcattctctcctccacctgtgagaactgatgagtccctccctccttcctacagccacgcctcagtctgggctctcatgcccccaggcctctctgctcac

SEQ ID NO: 33970 - DNA, 201 bp, Bos taurus
tagttaaatgaattagctatgacgcagaagtttccaaactctgtgctcaaactttatgttagaaatacctgacggaattgctggttaaagactatggtgarggtttccctgatagctcagaggtaaagaatccgcctgccagtgcagaagacacagattcaatccctgacctgggaagatcccacatgccgtggagaaact

SEQ ID NO: 33971 - DNA, 201 bp, Bos taurus
cccttacaaattaaaaatcagtatagtaaacatgaagaaagaaggtatcttagggtccctaatggtgtacttccagaatttctagtgggatatagacaaargatagatgttacggtgctccttttccctcaatttctaataaaatataaactaataaaaacatcccattgatttacaaagaatgatttttaaagtaatcaa

SEQ ID NO: 33972 - DNA, 201 bp, Bos taurus
aaagtactggagtttcagctttagcatcattccttcccttagcagtcaagaaaaaagggtgagagaaaatgatctcctgaaattatgttgctgatagactmaggcctccctcttaaaaaagagatttattcttctttacaaaggaaagttcgcaacattcctaaaggttagtgagaccataatcatctgtatttattaatt

SEQ ID NO: 33973 - DNA, 201 bp, Bos taurus
gaatcccagatggcatgaactggccccgtttaccccaggctcctctgggctcccagccaacccacatcttcagggtgctcctgaaggctctgaaaactgcrggcacttgaggatagacaggccttgttcaccctatggctacagtgccactgcccaggcccatgtgagtggcttgctttgtggcatcattttactgagcta

SEQ ID NO: 33974 - DNA, 201 bp, Bos taurus
ggccatcagcaaagacctgggagaggtggctcattcagggaaggaaataagtggagtggatgtaagaataaagacatatcttctcataaatctctatcaamgagcaagcagaccaggccacccgcacattacaggagaaaatgctaccaaattccggtagcttttatttctatgaatgagactttcatttgtccaggtaaa

SEQ ID NO: 33975 - DNA, 201 bp, Bos taurus
ctttaatccaattttctgccgatgggtcaggctgtttgttgtttggcctagcatgccctatcctggagtctacagactatggtaggcctgggacgacctcmagaaggacttatttcaatacacacctcccaggattgctactgcccatgcccctgtccgtgtggtaggccactgccaacccaggtctccacagaagagcct

SEQ ID NO: 33976 - DNA, 201 bp, Bos taurus
ttggaaggactatcatgggagggtactataaacacagagagcagcaagtgtgattaaaacaacaaaaaaagatgaaacaagaggcttctacatcatttctmtgctaaataaataccaatgactcccattatttatatggtaagttccaaaatctttattttactgttcaaggacctccatgaatattggagcatgttatct

SEQ ID NO: 33977 - DNA, 201 bp, Bos taurus
ttttccagggcaagttgatgaatcaggcatggaaattgatggggaggataagtaatacgttggaaaagtgattaagttttaaactgtactgaactggaatrttaatatctgaaagagcttgggaatctataagatcaatctgagaagttttcatagaatgggaaatgggggtcagacatggtcaaaggcaatgactataga

SEQ ID NO: 33978 - DNA, 201 bp, Bos taurus
ccaaaagacatctggccccaatggctctggttataatagaaatcaatgtgtcatagtggtacagaattcaagttttggaattggaaagtcaagtttgaackctaactagccatgttactgcaagaggtaacctaattgctatgaatctgtttctttatctatagattagggatattgtattacatagctcctaagattttc

SEQ ID NO: 33979 - DNA, 201 bp, Bos taurus
actaagtttcaccacaattctatgaacctactgaattagtaagatctatgaccttggggaaaaaaaattaaaagtaacgtatttttctatttttattgaasttttatgcttaaaagctagtgttatactcaatcttcatacacagttacttaataaaagaaacatgatctaagattaacaagtatctattaatttagatgt

SEQ ID NO: 33980 - DNA, 201 bp, Bos taurus
tggacaaaaacaaattcattagttatcaaaacagtatatataatgttagggctcagaacaggctgctccaatgtaggccacaatggtatattgattatttygaactaaagttacttgagaaatagctggtggggaaaatcacataaaatacactctgaactccacccaccccggcccctgtcttcctcaaaagtgggaaat

SEQ ID NO: 33981 - DNA, 201 bp, Bos taurus
aaaaactgaaatgttttttttttctgaagtagatttaagaattgggtttaagtggatgaatagccctacctaaactgaggaacaaagatgactatgaaaayaaatttagtttggcttctttgtgtgaagcacaaggacacagagtgaccataatttaacttagttaaccacattggcggaaacaggtcaggctaaagaaca

SEQ ID NO: 33982 - DNA, 201 bp, Bos taurus
ttattatcagcaaataaacatacacacattaatggttcaaatatctattgcaattcagtgttaagacaagttatgcagaaatcttccaaagaacgccaggrcttatttttatatgcccaagaagattgtatcagccaaataaggcaatgcattattagtaatactcattcatccattcagctatgatttttggaaagcaac

SEQ ID NO: 33983 - DNA, 201 bp, Bos taurus
ccccatgtttaattagtataaaaacattagccttgcagatttagtttcatttcttcttttttttttgactggggatatggaggaaaaataactaatatgtratatagacatgggatgagttcaaaatcactgctttctctgcccatgtgttttctcaacttgttatttttaaaccattttttgaaaatctgcaagcgtcta

SEQ ID NO: 33984 - DNA, 201 bp, Bos taurus
ttaaggcaacaaatacagagctgccaacatggaggcaaaggatacagctgttgtagcacttctgatattaaagaacatgtgtgactttgctttctgatctytgaagtaccatgcaaattcaagaggttctggcaaccaaaggcaacaagttaaggctaagagtttaaaccgcaagcattcgttaggttgaatgtgagaata

SEQ ID NO: 33985 - DNA, 201 bp, Bos taurus
tctcctgtcagaagaaccaaagccatctttaaaagaagattaaaagaatatttgagtgctttttagtttctcatttaggtttataaatctatttatggaargtccacttagcagctgttcagtctttcatcttggatccattgtagaaccaattgattttgtcccattcaccagtcgcttgctttataggtcatagaatct

SEQ ID NO: 33986 - DNA, 201 bp, Bos taurus
tctgaggaaactttgggaagtggtagcccattcaattaaatgtagaactgcaggttattttggtttcatgagcattatcatgtttatccttctccttgcargacttcataatattatcttgtcttagtctcaaattattctttactgcacaaagtcaagaaacttgattataatattttcatcaaattctgcaacatgaat

SEQ ID NO: 33987 - DNA, 201 bp, Bos taurus
ggcctctcctgaggtttactcttttgtattcaagtcagaacttgtgtctcccgtttggagacagagacccttgatacattgtgcagttgtcctgcagtctktgtacttatacaaaggccccctgctcttctttcatctcaagatttggactggcgtggcaagtgacctgaccagttgggaagagctgcttcttaattttgc

SEQ ID NO: 33988 - DNA, 201 bp, Bos taurus
acttctcagtaattgtagtggtagttgaatttctacttcactgactgaaattaccggttttaaaaagcacttattctatgccaagcatcctgctaagtackttacataaattatctcatttaactcttataaaaccctatgatataaatgttgttttactcactttacaaatggtgacactcaagcttagaacaaaggtta

SEQ ID NO: 33989 - DNA, 201 bp, Bos taurus
tatgctggttgacgtccgaagctggtagaattctgaatttggcaataaatggtgcatatcaaagaaactcatgaaaatgaaaagttgtctggccttctgarcttagttgtttcattttattccaatacatcatactgtctaacacttgcttgtacagtatatagagcccaaggccaaaaaatgtaagatgccaagcaggaa

SEQ ID NO: 33990 - DNA, 201 bp, Bos taurus
tcccagcattaatcaagcaaagggcctggtatcagaagacttcaagatggaatctcttcattgttcctcattagctgtgtggccctggacaagtcaatgayttatcattctgaggctgagttccttaaatgagagtgtctatgactatctcacagcaactcactggcagtggccaggtgagaggagggggaataggaaggg

SEQ ID NO: 33991 - DNA, 201 bp, Bos taurus
gaaggagatgatgtcatgtggctcttctggcccactgggtttctaaacctgtatacttttgagcagactggcaccaaatgtggtcttatgagtctgaatgyttaatttggcccccaaagatttcctaatggggagtgcacttcctaactccactatatctgttatttctctcctacaatccattcttcacgtaacaaagtg

SEQ ID NO: 33992 - DNA, 201 bp, Bos taurus
ggctcctgtgatgctctcgagcactcctgcagcattttttatactgccttccctccttgtgatcctgtgaatttttcagaaaataggaccatgctggattmatttgacatctctgatatccaagactatttttgggacacagtagtagtacttaatatttgttgactgtaatggcttccctggtggctcagatggtaaaga

SEQ ID NO: 33993 - DNA, 201 bp, Bos taurus
aatgaattcattgatatagtctctgtttagtgagactgttttagctcaaggggctagaaaggggtctagcatcttgtttggttggttgaaacatgggccamcattacatgaagtcaaaagaccagaactgaatgccttggtatactgtagaataaatgtcaaatagctttatcatgtaaaacctgcttacctacccctgga

SEQ ID NO: 33994 - DNA, 201 bp, Bos taurus
gatttaactttgatgttcactggtctaaagctgacctgtatgcataacaggaaatgaaaaataagacagggtggtagtcaccatctcttctttcactgcasgtggtcagcacttattctgagccctcctaatacatttgctgcttcctatgcctgtgtttgtgtgtctcatttccgctgctacaacttttttaagaaaagc

SEQ ID NO: 33995 - DNA, 201 bp, Bos taurus
ccttacagtaagcctgccccaaaagaatgtctttggagactgtacagttaactcagctgaggaaaaggagtggagacatttccaaaatccaccttaagttrcttccacctggaacccacatcacagaatcattttgcctgagacccagcctgttccaaattcctctcactcttaatctactgccagaccaaggtctactca

SEQ ID NO: 33996 - DNA, 201 bp, Bos taurus
tgttacctttattatatgggagaagaaaaataatctgccctgtgctctagaggaagattatcaatctgccaaggctgtttgctatgcaaatactttgggargatagttctaaacatggcaagtcatttcttctgctcacaagatgtgagacacccatagaaaattgtcccccaatatggcctctatatggcctctcactat

SEQ ID NO: 33997 - DNA, 201 bp, Bos taurus
atgaaatagcctttcttactgttttatgcagacttaggccataataactctacctcactttagcacaggttcctgcacagaagtctggtaccaggaaaacrgcgaaaccagaaaggagcaaggccctgaatagcacccgggaattgtccccagtggccttgtttgaagatgctcatgatgtgagccctggtctgcactgcc

SEQ ID NO: 33998 - DNA, 201 bp, Bos taurus
atcctttaaatagctgcttcctttgtgcactcatggcctctctaaggtgacagaacacggttacatgaagcgtagaatgaaagaatgaaatagtgcccccmaaataaggccttatttattactgaaggcaaaatattgaattacgggaaaagaaataggtaaccatctcacaaacaagccaatgttattcatttggaatac

SEQ ID NO: 33999 - DNA, 201 bp, Bos taurus
atcagggacttttgagagtccttttaattactttcaccaagatctctgttcttttcaacaatgcccttaggcatagaattcttcacaatctgttgcacacraagtcagtttccccagggagaactataaagctctttgtctttaaggcctgcctctccctagggcaaaacctctgtgatgctgcaaaggagttggaggcag

SEQ ID NO: 34000 - DNA, 201 bp, Bos taurus
accctatctgttcttttacagaattctgagagaatccagggcataatcaggagctatcttacaggttcctgcagagaaatactcatggcagtagaggcagrgggacactcagcaaagtctcagggcacacaagagtgtccttctgctggaaatttcccaaggattaggcagtcatccaacacgtccacagacactggcttt

SEQ ID NO: 34001 - DNA, 201 bp, Bos taurus
aaaacaaatatacaaatggaaaacatactacaactttgctaaaaatttagaaagcaatttaccaatgtattcctccaaaagccaccaaagagaagtttcaktcataatatacaacaaaattctttgaatcctctttttcacctatcttcttagagtcctgccccacatagtagagcaaatcaccctaaactctcatcccca

SEQ ID NO: 34002 - DNA, 201 bp, Bos taurus
ttctctggcttatagatgtctggaaacatctcttcatttgccacttcctgaatctgcagtttagaaaatgtgtttaatgcctgaatgctggtgacttcctrtggaactgaccactgcctttgaactatactaatattaaaagattgttaaacactgttagctccctcttctgctgttgagtaagagtagtctgcgtctgac

SEQ ID NO: 34003 - DNA, 201 bp, Bos taurus
aattcagcattatgttaaaacattcaacttcatacatgtccaaaatgatgaaacttactagaaaattgcaccaggtacgtatttcctaacaatttgtatcrctgcataagacaatcagtgatattttagggaagatcatgctataaatgaaatgcaagaagatgatgtctgatgttgaaagaaggaagaagggatagaaaa

SEQ ID NO: 34004 - DNA, 201 bp, Bos taurus
atcgttttaacttttagcctagtttatagaggactcagtgaaaggagttaaatgacagagtttatagcatctaccacaaatttctaggtaacattttgatraatcaggtataatatgtgtgtatttatatattaatatcttgtaagaaaacagattgtaatggtgccactaattattacaatatttatgttacttaaataa

SEQ ID NO: 34005 - DNA, 201 bp, Bos taurus
gttgtccttcctaaactagaccatcaaagatgaaggggaaggggagtaccacagtcgtctgattgttggcagaacccagtctgagatccatcatttgatgrttttgagaaccaactttatatatgttttccagttttccggggtagaaagttgtggtctttctccccacacaccccaccctagcctttatgcactcgcact

SEQ ID NO: 34006 - DNA, 201 bp, Bos taurus
atgaagaaaggcatcttcaacctcaaaagggcactgtttggtctggtcttctttcaaagagtagagagtccaagatgaaagcaaacctggcgcttttaccrcagtcaactgggggaagatgtcatttaatctactggataatagtgggaataagtgccagagtcatttcctagaattaatgagaaaatggcacgcaggcac

SEQ ID NO: 34007 - DNA, 201 bp, Bos taurus
tgttaaactttgtatcatccttgtatacacacctctggaaaaggctataagtttttgtttttaatatactgggtgtttaggaaaagagtactgtagttgayatataagaaaacctggaattttggcagtggtttttcctcaatagttactggctattttaccaccatgaaaaaccacctttaatctcttaggctgaatgaa

SEQ ID NO: 34008 - DNA, 201 bp, Bos taurus
ctttatataaggcctctagtttgcatatccaatttgcatttctgacaggctcactaagattaatttgtcctaaaaaacaactcttgactctcctacttttmttaaacctgctcctactcacacatctccccactctcccagttacccttgacaagaacttaagcatcattttttattcctctcctattcctccctaacaca

SEQ ID NO: 34009 - DNA, 201 bp, Bos taurus
agaaatgtggagtctggtggcacaatgtccagtgatatattgtgatgacaggagaagtgtgcacttgggtgcccaggaacagtgtaccttacctctccccyatcccgtattgccactgagggctttcggttctttgagagtgaaaggcagtgcagtatctcatcattttctccagaaactcttacaaaggttaagatagta

SEQ ID NO: 34010 - DNA, 201 bp, Bos taurus
tctgttaagattatggcattttctacagcaaacacaacagtaatgattatcgaatgctcccattagaatatttcatgagtcattcactcagaagcaaacamacacccaagattaatctaaagtagattgcttattactggttcttggcattatgctttcctaggggtaccagactctcctgtgaacaccaataaaagtatc

SEQ ID NO: 34011 - DNA, 201 bp, Bos taurus
tgcctgactgatatgatcattgaagagagaatatcagagttagctcaatctgaaagaagataacattagctaaacagacaggatcagctttgcatacagayaaatactgctgtactttgtggagatgacaaagttcccaggggcttaaataactacccctacttcctgattcctgcctaaaattttgttatgtatttatcg

SEQ ID NO: 34012 - DNA, 201 bp, Bos taurus
tgtggccacactacttaactctgaactactgtgagtgggaacaacttgaatctctattgtttgaaaccataaaaaacaaaaagaaaaaagagacataaaayacttaggatatctaccttgaaagaaaagcagtttctgaaaaacagcaagtcatttgttccatgtagtcacctaaaattgtccttatagaatagtctccag

SEQ ID NO: 34013 - DNA, 201 bp, Bos taurus
ttcttgttgcttctgtctcaaaagccacagcaccaggcctcctgaacagaaagcacccaaccccctcaaaagtgagcaccctgctccctctagtccagcarttctagttcttctaccggcctctgtctgtgtctctgcttctatagctttgttctctgtgatctgtgactttcctttttttgttagcctttagcgcttcat

SEQ ID NO: 34014 - DNA, 201 bp, Bos taurus
aatgtatttgatacttagtgtcaaagtacagattattatgaatttctgtgatatgaatatgcttctatgtgtatttctattattggaagggcaaaaacagktttgtatgagatgtaaaaaacaggaaactagaaagttaatatttctgttttgactatttgtagcatatatatataggtatatatatattttaaagattat

SEQ ID NO: 34015 - DNA, 201 bp, Bos taurus
atcctcacacattttgcagaaatgagttacaataaaccccagggctgggctttcccttcctctgacctctgtgttatttatcaggcagaggctgcaaaatmtcccacttcatactctgaaaaaccatgctcacagtaataataacctctgtctgtccgtgtgtcctgtctccttaggaatgttaatttacaaagagtaaag

SEQ ID NO: 34016 - DNA, 201 bp, Bos taurus
tggcccccaggctggaacttccctgacagttaaaggtacaccctaatgctggcttcagggggttgttgtttttgtggctgttagattaatcctggacacartgcaaaaggctgaggcctctcagaaggtgggtgggaaggggcagcttctagagagtgaaccaatgccctggggtgcagtacactcggcagacacaattcg

SEQ ID NO: 34017 - DNA, 201 bp, Bos taurus
attccttccacttattcaaactgagagttgagtttctgtttcattacctcagagaaaagatgacagggccaatgcagaattagcttgcaaatctttctggmttttattttcccaaagcttcataccttaggagtaattagcagatgagataaaaggaagaaaagattttccagtatatgcagaaccttggatatctacagg

SEQ ID NO: 34018 - DNA, 201 bp, Bos taurus
tatttgtccactgaggcctcttaggttgtttccatattgtggctatcatgaataatgctgtaatgaacatgggagtgcagatatatctttgagatactgayttcattccttctgaatacatactcagtgtgggattgctggatcatattgtagttctatttttaatttcttgaggagcctccatattgtcatatggttttc

SEQ ID NO: 34019 - DNA, 201 bp, Bos taurus
ggagactcaaataagctcattttgtcatttgttggcagctctggttaaaagtttggcaaggtagtgcattaaaagcacgcaatgaaagtaaacttgatcakgtacctctcatttacccaggctctttcaggctcccagtgctggggttaaattgtaagctggcagaactgcacttgatatcttatattatggcagtgaaaa

SEQ ID NO: 34020 - DNA, 201 bp, Bos taurus
ttgcgggctgtacaaggtgggaacccccaggggcaggaggcactgagtcttggttcacggctcacctgagctatgcccttggtcactaggtcattttggcytgaggaactgcctccagttccctgagcaatcaaatccatttatatgagagactgcatgacggcatttcagttccaagaatcagcagtgagcgctaaggga

SEQ ID NO: 34021 - DNA, 201 bp, Bos taurus
ataggttttcttttggaaacaacactagtttccatttatcatgtagatttaagcccttattgcattgctattaatatactatgacaatgaatgcaaaaccrctggagaaactaaaacttctctgaagcataattagaagtgagaaatgttctgagtcccaggggttttttttctgaccatttatattctgaccaacataaa

SEQ ID NO: 34022 - DNA, 201 bp, Bos taurus
gagtttggctgtgagttgcttcaattttctttgggttttcccatcattggacagccatgttagtgggaggcctggaggtgatcagaaattgaagaattccrccttagaagaggactggaaacagcaagggaatattttaatgttgattatgattatatattttaggaaataaaagggattatgatatcctgttactggctt

SEQ ID NO: 34023 - DNA, 201 bp, Bos taurus
tcatgtaattcagaaccaaggtaaaagggtctcatgtcagaaatagtactattagcagccagatcattatagaggttgtttaattaattctttactgtgargagaaatgccattgacacttcattattttgatactgaaactacaattgggggctttcaaaatgtgtatgtgaaaccacaaatagatcccctcggtccttt

SEQ ID NO: 34024 - DNA, 201 bp, Bos taurus
tgtttcagataaatgagaatctttatgtaagacgaaactgggttattgactcaggacttctcctatctgctgaatctaatacagcaaacatttattggttrtcctgatactgacatagctttgtgaattacattcctaggaattctttccagatattcctgccaacatatttagtttcatcttctaggctgaaaatcaatc

SEQ ID NO: 34025 - DNA, 201 bp, Bos taurus
agtacggaccccttgggctggctcataaactgagtgggccagcctggggacgaggaccaagagggcttcaggagatatttcaaaatgagagtaaacactcrtctgcaaaggcctgtgtagcctactagcaaaaagcacatgtagtccacgtatatgaaacactaaagccagactgttgtagatgcccagtatgctcgtcac

SEQ ID NO: 34026 - DNA, 201 bp, Bos taurus
aaagtaaaataaatattactttacttgcaggctgctgtggaaattcaaggtgaagtatacgtaaagttctttacatgtaatagtcgcttaataggtggtarctatttatactgaataataataaagacaatttctctctttctgagttccttgctttccttaaagaatgtgtgctttcctcccttcgtgcttttatcttgt

SEQ ID NO: 34027 - DNA, 201 bp, Bos taurus
tcaaactagggtatgaaatctatgacacgtgtacagacatcacagtggcaatggcagctgctctgaggtgtgtttctaagttcaacagctccagagaaatygtggagtttaagtgcgactattccaactacgtgccaagggttaaggctgtcataggtgctggctactcagaaatatccatggctgtctcccggacgttga

SEQ ID NO: 34028 - DNA, 201 bp, Bos taurus
tattaatcattccactcataatgaacttttaagatttgaatcagggggagtataaaagcatttactggatcagtcgttttaaaaagtaggagccaaatttygaactctagctcatgaatctgttaatgtcaagactttcttttctttcaagtatctactcctactcctcagaaagaaataaaaatgcatatttacatacac

SEQ ID NO: 34029 - DNA, 201 bp, Bos taurus
aggtcaccaatgcaaaaaaatcctcccgagtgtttcctctgaagcatggtcctggtaccaggacacacatgttctacagaaggcatttacttcccaaggcmcctgggactgcagccttaactcacttcaaggatcccatcccttaatgttaataagaaagcagaaaaccaccaacagactgtaactgtaccacaggtcagt

SEQ ID NO: 34030 - DNA, 201 bp, Bos taurus
ttcttgcctggagaatccccatggacagaggagcctggcgggctacagtccatggggtcacaaagagtcggagacgactgagcgactaagcacaccatgargttaatggtaattattgctgtatatatggggaaattgaggcacaggagtattaagcagcttgcccaaagtcaggaagaaatctaaggtggagccctgatt

SEQ ID NO: 34031 - DNA, 201 bp, Bos taurus
aataaaatgtcaggagacatctttgcaaaattacaataatggtgttattgtcatatttctggtgtttatctatgcaaaaattagcaaactgataagactgrtctctgtagatcctctttgtattggccaaacatcttgggttatgaacctggaaggaaacaagtaggaagtttcactctaaaagagctattatatgttatt

SEQ ID NO: 34032 - DNA, 201 bp, Bos taurus
tctttttagatttgggatacaagtttgcttttggttcagaactctttttgttttttcagcaaacattgttcactacttacttggcccctgacaaccttaaygcatctgaaatggaacactccctatgtgcatggccatgtccaatcactgagcaagagaggagcaacaatgcctgatttacattaggagttcatcttcatc

SEQ ID NO: 34033 - DNA, 201 bp, Bos taurus
tcatatcaaaaaagttgatacacctctccatcatgtctccatagatactctgatagagaaataactttctgctcagcaggtcatgcatatcactcagggtmtcatttcttctgttcttagttaagtcatttaatcaagactcaggatatgagatgtggcagctagaaaaaaatctgtgtttatggatcattcccataatca

SEQ ID NO: 34034 - DNA, 201 bp, Bos taurus
tgagtgatttgcaagtagagcatctaaattttgttctcctttctactctcctctatttatttcaaattcctagactacctgagaaattttattaagtggcrtaaatgtgttctaccaaggtttgcaatgtcatgcattgggttggtagagccaaaagaaagtgctttcctgagttatatgattttgctctctcccagtcta

SEQ ID NO: 34035 - DNA, 201 bp, Bos taurus
gtgacaatctctcattgactgaactcttcctaagtaagaagaaagttttcttcttcctgctgggctctgctattgtagactctgagagtgtccccttctcycctcctgattctatttcaattgaggtttgtgtttaataatttttacagctctacgaaaatgtgcccaatgatggacttgataccttgagagatgaaaaag

SEQ ID NO: 34036 - DNA, 201 bp, Bos taurus
tccccttcactcaaattcttgtcaaaactctcccatgcaggtgactagttcaagtgcttgcttcaaagtttctagagttttttgactctgatgaactttayattcacctcgtctcaggccctcaaacccaaaactacacatgtgatgtgtgcttagtcactcagtcatgtctgattccttgcgaccccacgtactgcagcc

SEQ ID NO: 34037 - DNA, 201 bp, Bos taurus
tattaaagttgctatggtttacttagagacttgacgcaaggaaatatttgaaaaggacaacaaagcgaaatgattatggaatgggcctcattaggctgttygctagaaagttttctggttaatattttgatccatctcatgatacatcataagtcattatggtatagaacatttagttatacttgtggcctcactttctct

SEQ ID NO: 34038 - DNA, 201 bp, Bos taurus
tcttggacttcactttctgccttgcctttctctctcctgcaataagtcctacatttttgcacctaaacttcccttaagcactggcctccagattttacacycatatcagtagaataacagctttggcgcgagggtgtctgacagagagctgctctccttctggccatcccaccaagtattagaatgaatcaaacctcaaaa

SEQ ID NO: 34039 - DNA, 201 bp, Bos taurus
agagctggtgtgtgggcccaggccgtccactgtgctgtgctgctgcttctgaacagatgttttttggtttgtctgtttgtttgtttcagttttcttaaacmgggaaccaaaggggggccccgttaagttgtaaagcaaatgcattctagcaactgagatttatgacagttttcaaattagagtgaattcttaaggaattca

SEQ ID NO: 34040 - DNA, 201 bp, Bos taurus
ttaaaaatggaaaggatactcacagaactactttaattcttcttaatctcttttgatcatattcacttgaaaatttgctgaaaacttggccctttctctaygggaaaaaaaaagagcatacacacaaaaatttgtattgaatttcagaggatttgccaactatttctgtgaatctccaaggactccttgggcccatgaaag

SEQ ID NO: 34041 - DNA, 201 bp, Bos taurus
aggccaattcactgcttgagagcattaaacatctgggtaactgctcctgggaaatgagagtgtgggtgtatgtcagactagtgcgtggctgtcctcaggcrtaggccatcatgagaattaaatgtacaacccataattacctcattcatacacttactttcttttaaacaaaacttactaagttgcaggtattttcatcaa

SEQ ID NO: 34042 - DNA, 201 bp, Bos taurus
ataaatctgaacttccaggtatgcaccacagatcctaaaagttatttcatggtgaacagcctcatctctagccttttttgtgcttcttacttggcctgttmaaagcaccagcaccacttagagcagcagcaggtaaagagcagtgctctagaaatcacaaatgtggagtaggccccagctttacattatttattgaaatat

SEQ ID NO: 34043 - DNA, 201 bp, Bos taurus
aaaataagcgacccgcctcccccggcccagggattcttgtgcactagtccagttgtcagtcctttttatggcagatgctctgtgcttacttttctgctgaygcactggtgaattctttggggaggcctctctgcggatgtccacgcagcaattctttcacaggtgaggcttcttctggttcagttctctgaagcttcctcc

SEQ ID NO: 34044 - DNA, 201 bp, Bos taurus
aattttattgctataatctgttagaagttagaacctgactttcaatttccagactttcaaaacagtacaggtgagctggccagaaattttgtaaaatcctrcagccagtccagcagtacctgttgaatgactgaatctccatgacagtaaatgactatgctcagtaggagctgattctactgaatagaacggaccatttct

SEQ ID NO: 34045 - DNA, 201 bp, Bos taurus
tcttcttgactagcaagttggaagtctgacaaaaactgtttagaaggacatggcactatgatttccatagtgagaccagaaaatcaggactgtgtgttgakacttagtctcagaaagatttactctgcagaaggaaacctttggacaaaatgtcaccgagatgaaattaaccattttgagccaaagagcttccatatgagg

SEQ ID NO: 34046 - DNA, 201 bp, Bos taurus
agagagagagaaatcccatgcttgggctgacatctggtaagtaggaactcatctgccctttgagcaatggaatctgaacttcagtgagtagaggttacagkgagtccaaatcttttaaaattctctttgcctcattcagtattcagaaatcaatcacagtggagctattgtcgttggtattgctcaaaagcttcaataaat

SEQ ID NO: 34047 - DNA, 201 bp, Bos taurus
tgaaaatagaaaactctctacagtaaaaatggaaaacataggttacttttacatttgcaaaaattgcctacatattaggccataaaaataaccatccaatycaaacttcaaaaaatgtatacagatctgattaaaacataaataatttgtataaggccctcagtgaactgccgcccgtctctcccctgcgcgtccatcccc

SEQ ID NO: 34048 - DNA, 201 bp, Bos taurus
agaacaagaaaaatgaaaaggagataattaaacatggataataacaaaattctttaacaattttattgtgaaaagtgaaaatacaaaaattatttgaatayatttaaaatgtgtgtagatttatggttatagttgcattcaggtgtatcttaaagaagcaatggtacgtcctttctaaaagttgatcattagggatacagg

SEQ ID NO: 34049 - DNA, 201 bp, Bos taurus
tcagctcatttaatcatccattgcattgaaatttattgagcgccttctacatggcaggccctggggaagtcacgggagacaagaaaggccatgtccctgcyctcataaacttgcagtctagaagggaagcctaacttctaacacaccctttcaatccagtgtgatatgggttatgaaaaacaagaacagggaccctgggag

SEQ ID NO: 34050 - DNA, 201 bp, Bos taurus
cagaaagtcaacagtatgaacctcacttatttaaacattattcattttcaataaccattggaggtggctacaatattgttttaaaaccacaggctattcaygaatatcttaaaatctcccttgaactaatttatatttccagcctcttgtaactgttctgtgaagtgtcccctttgatcctacttctacatcaaccttcgt

SEQ ID NO: 34051 - DNA, 201 bp, Bos taurus
gggatgggtccttttctagaaaatcagagctacaaagctgagtggaaccccagactcgtcctgtctcttttttattttacagagggaataagcgaaggccmgggaacttgagatgagctcaaggctgtgactgagaggagcagccctgggatggaaacatcaggtctccagcgcccaggccagggcctcttctctccactg

SEQ ID NO: 34052 - DNA, 201 bp, Bos taurus
ttgttcttggcccctttctaatttgttttttattcatttatagaccaccatgatttttttaacaaccaaattgtatggttttattttctcaattgcgagtyaacctgaacagactattggccctaattatggacagaattaagaactggaaatcaactgttttgtaatgaaggaaattattactgctaaatatacccaact

SEQ ID NO: 34053 - DNA, 201 bp, Bos taurus
cgacttagcgactaaacaacaaccacaaatacttaagtactcttttacctgaaagagtaatatgatgttcagggtattttttctaagcttttaatgttaastcatgaagttcatgcattctcaaaatgcttaataaaactaaacctgctgggcttgaactgaaaaataaatggtttatatgagttttaatctaataaaaat

SEQ ID NO: 34054 - DNA, 201 bp, Bos taurus
ggagctgaggaaggctccttgaagggggaagatgggccaaggcctggctcttggagatgcagaaactgcacgggcagttgtgtggagatgtgtaccatcaygggtgtagctcatgttgggccagtgggagatgctggaagaggggcagggcccctggtgtggaaggcttggaagccaggctgggtaagttgctgagcaagg

SEQ ID NO: 34055 - DNA, 201 bp, Bos taurus
tactcagaagtcaggagctaagtgaagataagagggaacctctgtgtgctgtaggagccactgtcctcccacctctcaaatgcagggctgtgtgctcatgrcgtcactggccttggatgcacagacctcccccacagctggtgtcagcctccacggttcctgggctgggcagcccatcacaccatagagtctgcgctccag

SEQ ID NO: 34056 - DNA, 201 bp, Bos taurus
ttgctctcctctggatgttgtggcccaggtaactgagtaaacgggaatctcgcgtcagtgtcttgcatcgctacaccagcacaggcaggtcagaaggcagrgagggcattctgcttcttatggggccctccatgtgcgtttggatttgcaaggggctttagaagaatgctttatcttggcccagagcccgtctcacttgga

SEQ ID NO: 34057 - DNA, 201 bp, Bos taurus
cgcatttaacaggacgaggaacggcgtttgcattgacttttcttcaaatacaaatactctaagaatcacctgtgcctcagggaaagatattaagtggccasaagtgacagctcagagaactcaccctcccaactccccaagaccccaatatttaagacaagctactaagggaagttttctggaataaagtaaccgccttat

SEQ ID NO: 34058 - DNA, 201 bp, Bos taurus
aagcaaaagcattcaaatttacaagctctgatttgctgctgtggacagtgcgtaagtgacacgcttcaagttttaagcacttgaaaaggaggacttttttyccttgtaaacagcaaagtttctgaaaggaaatctggaagatagctcacagattttgaaaagcaacatgaagaaaccaagtccttaccttacaaaagaact

SEQ ID NO: 34059 - DNA, 201 bp, Bos taurus
cctctctctctggaggagtggccatagcacccaggaagtcctgggtctgggtctcctcttagcaggggctcaagttcccttggaggggatcacctcctccyctgtgttgtagatcatggccaaggctgcgcccgcttcttgtctctgctggataaggactcatccctaatgttgtgttttgtcttactctagcagcaattt

SEQ ID NO: 34060 - DNA, 201 bp, Bos taurus
accaaacttagagaaccaatggtttacagcattcacccatttagtagaccctttgaagggtagagaaaatttaaggtctctggccattaagtagaaggagrtctacatattcttgtctctctaagaacacctcctctctccctgcactgtgcctcccaccgacccaggccagagggaaagctgtggtactaggcagcctag

SEQ ID NO: 34061 - DNA, 201 bp, Bos taurus
gggtggtggttgctgtttctcttgtttgttgattgccttcccccctctccccactgtcagctgttaattgcaactcaagtaggctcaagtagggcctctcytcagcacatcacaaagccaggagctctggtctctggtctctgagcctgtgctccttcatcgggatccgccgactgcctcccaccccagcctttgtgatgt

SEQ ID NO: 34062 - DNA, 201 bp, Bos taurus
cgcagacgtcgtcggcagggtggtgagcggagggtgagaagtccagcccccagcaccacttaatggaaaattaattggacctggaggactgaagtaataaytcggatttgtcttagaacacagtgttgggctccctacctcattaacttcttggctcaggcattgagtagttattttattcagttttgacctcttgagttt

SEQ ID NO: 34063 - DNA, 201 bp, Bos taurus
tgtaaacagactcaattcatgtttcaccactgtctcttcaattgtgtgaccaaggatgggttactctctgagcctgatttcctcagctttaaatagggatrcacccttgcagaattgttgagaggagtaaatgaatattgcaaggtgaagcacttagcatagtgccaggatatagaagcatttggtaagtaattagctttc

SEQ ID NO: 34064 - DNA, 201 bp, Bos taurus
caaggttataggccctaccatgttttccccactccccccccagtctctgcatcactaaggcagcagccgcatctgggccctgcagttttcagctgtctctratactttctctgagaaaagcccagggtaaggagcagtggtgtggcaatgcctacttcagcagcaaggacagtatggccatgaggcagcagtatgtcacat

SEQ ID NO: 34065 - DNA, 201 bp, Bos taurus
aaccccaagggccgcggcatgccagtcttccctgtccctcaccatcccccggagcgccagacaaatcacctgatcctatcattgtcccaagcttggatttrtatttccaattctggtgaccagatctagtcaacatagttagaacactcctgcctctaacacattcctcacacctaattagttaccaaattgtaccatgtc

SEQ ID NO: 34066 - DNA, 201 bp, Bos taurus
tgctggctggaagcgaccaaaacgtccaaggacagaggaaggctaaagaagaaggcgtgtgtgtccgtggcggcgtaatattcagtcatgaaaaataataygcatggctgagttccttcactgtacacctgaaactgtcacaaagtgttcatcagccatatcccaatacaaaatgctttgggggttaaaaaactaaataaa

SEQ ID NO: 34067 - DNA, 201 bp, Bos taurus
ggcaggaaccaagggagacctggcagcaggaaaacatggccagagtcacgccccaggcaagtgcagccagggtgctgccatgggtgcctactggcccttgrgtctccctgccgccttcactgagcataacttctctgttctccttgggtctctgtggctccccagaggccgaaggccccaggcagaagcacctgaccagtc

SEQ ID NO: 34068 - DNA, 201 bp, Bos taurus
tattagcaaggaaagagcttttataagtttggccaagggtggaatggatgtgacaggttttagaatctgccctctcagccaacgaccagttagttacaagrgagtgggaaggcctttcacctacctggcagcagagctggaagttctggctgtgggcaaggagacacttatgccttgaagtctctatatacttactatctg

SEQ ID NO: 34069 - DNA, 201 bp, Bos taurus
tgattatagcatgcagcagtttggaaactactggcatatcctggcaccttgactcgcatctccctgcagtgctgtgaaagtattagcgtggccactgcacrtcagggcacatcagggttgttcccccaagcaatgggggtccagcactttcagaccaggaggtgattcagctcccaaatccatcctgaggatctgctctct

SEQ ID NO: 34070 - DNA, 201 bp, Bos taurus
acctagaacagatccagttttgtccgtactcatttcaaagccagacactgcactgtccttctaacctgtccagtccggggcttgggaaggtgtgtctggaraggcccatcggaaggagtggaaagtacacatccccatacttatccactctccagggggtgcctgagaaaaccaagcaccagatcctgtcaagatttggtg

SEQ ID NO: 34071 - DNA, 201 bp, Bos taurus
tggagaattccatggacagaggaacctggcaggctacagtccatggggtgtcaaagagtcagacatgactgagtgactttcatttcacttcattgacctcrtttaactgtaattaaatggccctatctccaagcgcggtcacattctaaggtactaggggttaagactaacatatgaatttggtgggggacacaattttgt

SEQ ID NO: 34072 - DNA, 201 bp, Bos taurus
acatttttgtgctacctttgcagagtagagagtcttgagaaaatgttctaggacaagtacatgtgctgcatgcagtaaactgagaaaactgcgcaaggccrgttttttctggctccccgcttcatctggtcttggagatcggatgctcttttccccccggcacagggcacacacctttaccgagggtctcctggccagctt

SEQ ID NO: 34073 - DNA, 201 bp, Bos taurus
gagcctttatgagctggtgttcccgtaaattctaaccagccctgcagctcagcagagcccccaggggagcttcagccacaggtgggcccccaaagacactygcttcccagttatcctactagttttcacctaagtgacacttattaagctcctgttgtgtgcctaaccttgtgctgggtattgtaggggatacagaagagg

SEQ ID NO: 34074 - DNA, 201 bp, Bos taurus
gaaccagtcacctatcagatcacaatctggtgggaaagatgtaagtgacagtttgtaactggcatctctggctctatgaagggccagatgtgctcatattmcttgtaaaagagacagaaggcaccagtgtctgtcctcagctgccatctggcattttacagttctgggtggggagtctgtctctccaccagtgcttcatcc

SEQ ID NO: 34075 - DNA, 201 bp, Bos taurus
gggtcaggcaagggaccgagtatccccagggaacctgactttcaaggtcagcaggatttgattatagaacttccacaggactggggaaacagagactcttyaaggacacaaacaaaatcttgtaggtaccaggacccaggagaaaggagcaatgaccccgtaagaaactgagccagacttgcctgtgtgtgatagggagtt

SEQ ID NO: 34076 - DNA, 201 bp, Bos taurus
ggacacaccatcagataattctaggcctggaaaggcccctagtgattacctggtgcagtccctcattgcacatttgaggagacattggctctgagaaaccmcgaggctggcagggctctgggcccgctgcttacccatgtgcttggaactgatgttaggcttctctgctgaggctctccaagagtcagctaatggcagtgt

SEQ ID NO: 34077 - DNA, 201 bp, Bos taurus
tagcacagaaatgcatacctgtcaaaatgctgcactgtcacttttaagcctagtttattttcatacatgtgtataaaacagtgcagtgtgatggaaagacrgccagaccagtgaaaggagacttggaacgcagctctgctctgttttctcagccaagtagccttgcaaagcaagtcacatgacctccctaggcttcagtat

SEQ ID NO: 34078 - DNA, 201 bp, Bos taurus
gcctgaggtgctgtgggatttctttttttaagtaagtttattacgtagctccgtttttaaaaactgcagcttcaagatacatcgaaggtcaaacgtgcacraagaatgcaggcctggcctagagtgagctagaaagcagagaagccggcaaagcctcaggttccaccctctctgccccatctcaattcacagcagccccgt

SEQ ID NO: 34079 - DNA, 201 bp, Bos taurus
agttgatttactgtgttgtgttagtttcagctccttcagctcctataggtctccttcttcagccctttccccctgggccaggtgcaagttgagttctgagrcgaatagcagcagtttctcctgagggttcctcctgtcctcaaagctgaaaggctggagagggtgagcaacctataggctccaggccatctctgttgattc

SEQ ID NO: 34080 - DNA, 201 bp, Bos taurus
tcagctgtaaaaaggggccgagatttgactccgagtctgtcctcagagcccatggctgtcacctttacctttctcacctatgccagttgcctgcttggccrtgtgcagacggtccacactctctgctcctagatgtctcagcagtaaaatgaccacacaatttctgctctgctcacttcctaagagagcagtggccactgg

SEQ ID NO: 34081 - DNA, 201 bp, Bos taurus
atatggtatctttcctattaaaaaaaaaaaagtcctaatctgtattaagcaagagataatgagagtgtatatacagagaaggcaatttaattatagaaaaytgtggggagaacatcctgaagagagaggtgactcagcatccaggctcagcctggctactctgtttctaaatgacctaaacctaaaaagagagatgttcac

SEQ ID NO: 34082 - DNA, 201 bp, Bos taurus
tttggggactggccacccagatagactgtgtctatagccaagtggaggatttgcagggacagaaaagccatcccactttcagtttgctgatgtggcacccraggcaggagtagctccatctgtggcctagaaagttatttcaacacatgtaatttttagaaaatcattaaatgacattttagaataatttttaaccacatg

SEQ ID NO: 34083 - DNA, 201 bp, Bos taurus
ggcatcaggccagagagaacagcggccttctgctcccctcagtcctggagcgtgacccgtgtctgctgtgcatttgttaaccgttgtcagaggccaaggcygccgtgttctgtcagtgtaagtgcactttttagctcctgttatgagagagcttataaaacattttctatggaatatacttaataacattgattttcaaag

SEQ ID NO: 34084 - DNA, 201 bp, Bos taurus
gcccctcctgctcacagcagaaatgtctgcaggcctagggcgcagttcctaagctgcggtctctctggacctctttggctgaggcagagagagagcccatyttgacttccacacgtggccccagaaagctggaggcggggaaaggaggctgtaggtgcctctcgtgggaagttgctgtgagtagaaaatgctagcattagg

SEQ ID NO: 34085 - DNA, 201 bp, Bos taurus
attgtggttagtttctccctggttagtttcttctgacaaagttaatcaactatatgtgtacatatatagagagagctccctctgagagctcccttccaccrcgctccctattcttttgtttttaagtgaataataaggctctgtctctactttagaaacttcatgtgtgtgtgtgtgtgtatgtgtgtgtgtgtgtgtatg

SEQ ID NO: 34086 - DNA, 201 bp, Bos taurus
gtttagaggagtatgtaagcaaatgtgttttgaagactactttattgtttttgttcaatgcccaaattgtgtccagctatttgcaacctcaaagactgcarctccccaggcttctctgtcctccaatatcactgggagtttactcaagttcatgtccattgagtcagtgatgccatccaaccatgtcatcctctgttgtcc

SEQ ID NO: 34087 - DNA, 201 bp, Bos taurus
actatttaaaatttactaacatttaggctttttgtaaatttatgttaacttcatctagagcatttgaggtcatagcagtcctcctatgttttttcttcttyttttttttttttttctattttttctttcatctcctttcttttccgctaaatgatatacctctagcatgcagaaataacattttgctcagatgtacagctc

SEQ ID NO: 34088 - DNA, 201 bp, Bos taurus
agcagtgtcatagaacacaacttatatatatatatatatatatatatatatatttaaaatcttattgctatatcttagatcggaacaacaagaaaccacartttggaaaactatgatttacaataggtcaaacaattgagatactgagctataaattttacaaaagatgtgagaaattggaggctgaaaataaggaatcaa

SEQ ID NO: 34089 - DNA, 201 bp, Bos taurus
tcacatcttaggcatgatttttaactctcatagttactaatgtaatgttggcaaaatgatgggagaatggaagcatacatagcatctttataggaggcaaygtcagagaaactggcttaatgactacaggtcttctagcaaaagaaccttctaaaaagaaatggatatcttttactagttagaatttgtgcatttttattg

SEQ ID NO: 34090 - DNA, 201 bp, Bos taurus
atttacaaactgtcagagataatcctcatcaatttttttcctaccctctttctgataaaatttttatataacctattgtcttatcagagaactcaattaaragccccacaaaactgaagttatttttattctcactggcatgagtcaattatttaatttgattggtaccacaagagccagacatttctatcataatatccc

SEQ ID NO: 34091 - DNA, 201 bp, Bos taurus
ctagcgcccatgaaccacactgtattgatgggattcttaatgaactctctagcaacaatgcactggccttaataatttaggtcctgttaaatcgtgtctgyttctttactacatttggaactgctactgatctagaaaagagtcaatatcaaggggaagtattctctgcacttccagcatatgtccagtacatccaattat

SEQ ID NO: 34092 - DNA, 201 bp, Bos taurus
atccattctctttcacactcccctgcagtttaatgttccctaaatgaatcctcaaaactgttataagagaaacgagaaacacatcatccactcagtggtcmtttgtcgtcttataagggttcaaagcagggaagggagggtggatcaccaatgtgagggtgtttcagctatagcggttctctgaggcaatgcaaaggtaaa

SEQ ID NO: 34093 - DNA, 201 bp, Bos taurus
agttatttaaaaacagatgtctagaaaagtagtactatttaatggaataaaaaaaattcatttccaaatacatttacgcagaatcatatgctaatgctgaratgcagattgatgtgtttgagatttttccccaagtcttcctttattaaaattgcttttttatgattctgaatctgtttgggcagttttgtttacctttaa

SEQ ID NO: 34094 - DNA, 201 bp, Bos taurus
atgatatctctggtttagagaccagcttctcagatttaggggtaaatctaatcctggagatgcaaccagagtaacttttagttgggtgcataaattttgaygagaaggtattactggaccttaggaagatgtgagagtggatcttgcatcgcagtgaataggactctgaaaggatgggtcacaaagcctctgggtacaaag

SEQ ID NO: 34095 - DNA, 201 bp, Bos taurus
cctaaatgcaggggggagaaacaactaaataataagcctgttagaatacacacagaagaagctctgtttaaccctaagctatttaacatctcagtggtttygtaagcaccagagtcttattaaatcttatgtgtgtctgtgtgtgggtaaggcacggggtggcccaggaatgatcgctgccaccctgacggtcacactgaa

SEQ ID NO: 34096 - DNA, 201 bp, Bos taurus
tttggattgactggttttatctccttgaagaacaagggactctcaaagagtcttcttcagcacacatttgaaaagcatcaattctagtttaaagcatcaakcattctaatcaaagaaacataataactgctggactgggacttccttgacagtcaagtggttaagatttcatgctcccaatgcaggagacacaggttggat

SEQ ID NO: 34097 - DNA, 201 bp, Bos taurus
cactattctgaagcacagaaaaaaatgaaaaaacatgcataaaaatatcaagtctttccccaataacatgacatttccaaatatagtgatatccatgctcmttaacagcaaagattcattttatttacatttgatattggaatccttctggcatgtagctggtatgtgtgtttaaaatcagttagatatataaaataacta

SEQ ID NO: 34098 - DNA, 201 bp, Bos taurus
ttcagagcaaatatctctcaaagtattttttatatcaaattattaaatacagcccaaagtatttttttaaatcaagataattccctccttgagaactgtgyttataatgtttctgtctcatgaaaaaatgatcaaacaaaaatgatagtgaacaagaatgacattactatctcactgtctcacatatgataatgaaatcaa

SEQ ID NO: 34099 - DNA, 201 bp, Bos taurus
aattgcaaaatgcaattcattctttaaataattggaaatcagtattgtgaatggattttgattgctaggaaaaatttttttggctttttcttattagcaargcacagctgaaaatgaagatggaagacaaataaaatattaacttgttaatggaccctggaaaaataaatgagtttttcttaatttcttagtgactgtgga

SEQ ID NO: 34100 - DNA, 201 bp, Bos taurus
atgtttgccttggaggaaccagcttccaacctcaagacgcagcagagattggcagtggctgcagctctgactccagcaacaccaagtcggctgcgggaggrggggccttttcacaaacgttgccttttataagtgtcttcatggatcgctagatatgtaaagtgactacgcccgtaggagaacctttcaatttgtgtatat

SEQ ID NO: 34101 - DNA, 201 bp, Bos taurus
cccgccagatggcccagaggccaggcgtcccaggttggggtactgagtgcgtttcggtgcgcgaagcagccttctgcccagtgaccgctccagaccgctcrgtctgggccaaacgctcctgatctccgtccctctctgccgcaaagagcccagccgctgaggctcctggagccggaacacgaataccacttgctctgaggc

SEQ ID NO: 34102 - DNA, 201 bp, Bos taurus
ggttttcattctgtctgccctctgacagataaggataacaggcttatggaaacttcctgaaggagagactgatggtgagggtaactggatcttgttctgaygggcagggctatggtggctcggtgtctgcccgcaatgtgggatacctgggttcgatccctgggtcgggaagatcccatggagaaggaaatggcaacccac

SEQ ID NO: 34103 - DNA, 201 bp, Bos taurus
ccaatttccagtatacaagttttccaacttttcaagatacctcctagcttgctcctaggtatcagctaccagcatattcagggatgtcccacaagaatccstccacttggttctaaacgtcctctaaatcccccttaactagcacacgctaatttgttctggcgttccatctcaacaatggtacaaaggagagaagaagaa

SEQ ID NO: 34104 - DNA, 201 bp, Bos taurus
tagttaatatttttccaggcaccttttttttccatttcaggcacccttataaaaataagactctagttctaagagcaggcatttggacctttctggcaggractcctgccctgggcaagcacacttgatgatcacacggtacatggtcccttctctcatgaccatctgctagactggctctctgcccactcacaagctcac

SEQ ID NO: 34105 - DNA, 201 bp, Bos taurus
tccaacaagaaatgattgattgctcggggcatgagattctattctattccatcaaagtgacgttcaggtgcagaaagctccacacatgtgacaaacagaartgagaaaggaatgaaatgtgagacaccatcgatctccccatgtggtccttcagccccctggaaaaactgacctccggcgtcgcagaagcccagcagagag

SEQ ID NO: 34106 - DNA, 201 bp, Bos taurus
agactgtgtcaggagagcctgttccctgctcccaggcccctggtgctttctcccccagagcacttccggtactatctctgaatggtaggcttgactgtctmctcagctggactgggtgccaggcctggtggataagtttctgtctctagagcccgaacaagcccctggtgcatatgaggcttttagcaagtgtttgttgaa

SEQ ID NO: 34107 - DNA, 201 bp, Bos taurus
actttcagaaatgacacctgagttcttgtgttttgtaaaaattcctctgaggcttcagtaaatgtatgttgtccaatatggggatagtggaaatagagagraagagacagaaacatgaatgattttgaaagaagaattcacagaattttgtgattactgacttatctaaatctttcatggggatttatttttatttgtgtg

SEQ ID NO: 34108 - DNA, 201 bp, Bos taurus
attttaaaaagcatatttgagtagtcttaatgcagtctattcacttggcttgatgaagtatccaaaccagcacttagtaccagctacatacattccatatygcttttggtcactagaggttatggagagtaacaggcttaatatgaatcacagtgtacttgaggggagtctacttcctaggattttaaagcacttcaatga

SEQ ID NO: 34109 - DNA, 201 bp, Bos taurus
atgttccaagggctctggaaaggacaccttgcagagactgatttttctcagaacagctgagcttcccaggtaactgtgggccactcaagccagccaccacytcattcctgctcccttatgtttctgtgcctggcatattgctgggaacatagctgctcctcaagaaatgacatctaaagaataaatggatcaggccgtaag

SEQ ID NO: 34110 - DNA, 201 bp, Bos taurus
cctactttacaacacctttacttcgtttttaatgaacatcatttttgtaggacatttgttcttttataaacttgagatccagcatatatatttctttatcrctaaagatatttgtaaattctataaattaatagaacactgatgcacaatgaaatacatttgaaactttatgtattaccaataatggtaacaatttatttc

SEQ ID NO: 34111 - DNA, 201 bp, Bos taurus
tcatcatgtggcacaccttgaaaacatacttatcttattttaaaattgaaaaaaaagaaagactgctcaggcagtagtaggatgacttgatcggaaggatyggaaggcctaaaggctggagtcgggggtggggtgggcgatcagtgacaatactaccttagttatgaagcagaaatgaaaaagccctgattaaggcagcat

SEQ ID NO: 34112 - DNA, 201 bp, Bos taurus
ggagactattcaggtgggcctgacctcatcaggagagcactttatgggaactgagcccttttgaagtcagagatattggaagtgtgagaggacccatggargaggccatatgacaaggacccaagagtagcttctagaagctgacaactgtccctggctcatggttaacaagacaacagggaacctagttgtacaactgta

SEQ ID NO: 34113 - DNA, 201 bp, Bos taurus
ggcctttgcattggcttttctccttgcctctaacactcgtcccctagaaatcagcagagctcatgccttcgtgtttattgttcagatttcaccttttaaaygaggccttccacaactgccttgtttaattctgggattaaacctttccactcccccactcccataccctattcttctttacactgctctagttttcctttt

SEQ ID NO: 34114 - DNA, 201 bp, Bos taurus
acaagggagtcttgtcagtttatctaagatgacacaaacaccagagagcaaaagcaaggcccctcctccaactgctgagccaaataagcactggggccaarcaattagtgcaacacaaaggcaagcattacaatatcagagccaacctccattgtctccgtgcaccccacaggcttgacaagttttctcatgggccacagc

SEQ ID NO: 34115 - DNA, 201 bp, Bos taurus
actaataaaagtctacttatgttatactctttctgacaacctacagtaaaattaaggcaaatgttatttggaggagtctgcttactggtcacataaccaayattttagttaaatttctatcaactgaactgtaaaaaattaaagatcctagataaaatgtgctcccatgcttcaaatctgaccgattccattacgtgcact

SEQ ID NO: 34116 - DNA, 201 bp, Bos taurus
taacccttctggtgatcattattcccatttcctctgtgctttctatctccagactcagcttctcttctctcctcttcctctacttctttttgcttttcctytagaatctctgttccatggaaagcaaacgatccttaacattaacttttccatccaatactttgttttatctggctggaattaaaccttagtttttatcta

SEQ ID NO: 34117 - DNA, 201 bp, Bos taurus
tagaaatatcaaaacttggtcttttggtgtgagagacaggaagaagacaagatgcttgggggagctgaataggtggacagaaggagttatggatcaagatygctggaggtaaaggaaaataaaccaattagcagggaagctgagcctgcctaaagtcaattctttgagccattcttgctttacacagctctcttttctttt

SEQ ID NO: 34118 - DNA, 201 bp, Bos taurus
ctgcacccaaatctacaggccaggctcctctgtcctaggatctagatctgcttgtcctagcccatacactggtaatgtgttgacattaggacattgagttygcaatttgtaaccttgcggccatgaaaactcacttccaagctgtgtcctagtcatctgctgcccaaatctctgatgcctgcttctttcatccccactcat

SEQ ID NO: 34119 - DNA, 201 bp, Bos taurus
cagcgcaaagaacaaatgaatttttattcagtacacaaatatacagattttaggtagctctattactcagtatcatcaaacgaggtcatttaatggaaaaytagaaatgtgcaagtaaaaaaggtagaaaataagttatggttgatgataaccaaaaatgaggcgagatgtaagaggaatgttttagtaaaaggctttgtg

SEQ ID NO: 34120 - DNA, 201 bp, Bos taurus
cagaaagttgagagatttttaagaaaagggttaactgagatgaaattttaaattgtctgctgaataataaaccttttgtagactacagctgacaatacttyctgtagcaaaggaatagggaccgtgtcctgtagttaacgggtagaaatggagtcagagacaaagagcaaaatgtgaggcagagaataattttaaaagcag

SEQ ID NO: 34121 - DNA, 201 bp, Bos taurus
taataggcataggaaagggatggtgttaaacaatctatgatataaagaacagatcccaaaaggcccaaaatgttaacagttgtaacaatgagtccaactaycacccagatattggtttctaataaaaggaaccaagggtccttggaaaaaaggatgattttagatctcgggcaagaaatataattttaacaaacatgccat

SEQ ID NO: 34122 - DNA, 201 bp, Bos taurus
gagtatggaattaagggaagaaatatcctacaattttagaatcttcagtctattgtaggcagattttcagacacaagcaaaacccatcttttaatgttgcygtatccctgatgggtgttttaaatatttctggtacatttacacattttaaagtttgttttgttttgttttaaagctgtttaatttgtaaacacgccctgg

SEQ ID NO: 34123 - DNA, 201 bp, Bos taurus
ctgtatagagtgataaccagaacatataaatgtctgtgctgtataccaaaagtataacaaacaccatcagcgttgggaaagagggtgacaaccaggatcakattcctcttcccaagaaagccaaacaactccagctggaaagcctgttctctctgctgacttctaatttcaggaactatttgtatacttgaaccatttact

SEQ ID NO: 34124 - DNA, 201 bp, Bos taurus
agccaggagaaaataggaaacaatgcgatgtttagaggagagatacgtgtgtatatatgtatatgtatcttcataactattaataatggcctgcaaatacrgctctaagcctcctagcattaaaatcaaaaaagaaaatgtagcctaatacaagataaaaagatgaaaatactgaaatgaactctagattctccaggccct

SEQ ID NO: 34125 - DNA, 201 bp, Bos taurus
cattaaaagcagacttgcctcctctttagagaatgtaatgatcatctgagacactgaacaagaaacagtctctctgtcatagctattgttttctgttaccrcactctttccggcccaatcctccttctggtaacagatccggctgccttgacctcgaggggtgggcctataactcaggtgagccaaacaataggccttccc

SEQ ID NO: 34126 - DNA, 201 bp, Bos taurus
gctgacactggcactccataatgccagatagcatctccttttgttggtaaatatatatatttatatgtatataaatagtatgtttcatgtataaagttggyggttgaacaaatctaaggattattttctgagtaccattgaatgtcatacccataaaatattttttttttcatttgctttgaattagcataaataatacca

SEQ ID NO: 34127 - DNA, 201 bp, Bos taurus
ccaaggcaaaaaggaggattccaagatgatagtaaagagatgcttcctgctggcttctgtgcaactgacccagtgtcactccagagaggcacataaagccsaatgaataacttcaagataaaatatgtagctgatatatctaaccttctgaaatatgatacttctagatgtaaaatctgtctggtagagcagattaaacaa

SEQ ID NO: 34128 - DNA, 201 bp, Bos taurus
ctgctcaaatgtttctcatagagttttattcaaattattttcttttattcaaattatttcttttctttaagtctgggcctttaactgtttcctcttttatygttctactttaattttgcctctgaatttggagcattagaagaaaacagtaattgatgggggtcacttagggaaaggtaagtaaacttcacagcattaaga

SEQ ID NO: 34129 - DNA, 201 bp, Bos taurus
aatcttggtgctttttcaaataaataaaagaggaaaaatattttaaggctttataagttattatatatccttatgtattatggtttggatagttttaactyaattaaatgaacccacatgtttgttgcattggcaaaggtataagaataagatacaattcctacaattccttatctaaaggaaggggaataatgatataaa

SEQ ID NO: 34130 - DNA, 201 bp, Bos taurus
atatgctaaaatgaaggtattttgttgatttcttttgaacacagcttactgctttattatacttatagtggcacaaaaacttaaataatacttgaaattcrctgacattcttcatgcagatacatccacatgtttttctaaggtctataaacttttaatctgatcttattcatgttcttagaattttcacacatccttaaa

SEQ ID NO: 34131 - DNA, 201 bp, Bos taurus
gctttgtccacaagtggttcttcgagctaccctatcaccttgcgtcaggatgtctttttcctgtgatttttttgaaccaaagtaaaacaaaaggctatctygatcaaatagaactgacgagaattatcctaatttttctcctacagtggcataggaaagaagcagggtcatgatgagctcaggaagatgaaaagatataag

SEQ ID NO: 34132 - DNA, 201 bp, Bos taurus
ataattgtggcctcctggcatctgctgccaagccccacatcccagactcatctctatggatagaaacaaacccaactctgtggcctcctctgccacactcrggcctgcactgcagagaaggccaccaccaaactacttagtgatgctggcacccagaccagtacatgcctcgtggccttgctgaatagttctttactcggt

SEQ ID NO: 34133 - DNA, 201 bp, Bos taurus
cagggattaactttttttctttttttttagtttgatcttttatctgctctcttctccctacttgtaatcactagttcttaatcactgtctcgattcccttyagaaactctatttaccagctttgtctgcagctaggacaatcagatctgactctgagcccaagtgtaacttggcccttgtgccacctaaacataagaacac

SEQ ID NO: 34134 - DNA, 201 bp, Bos taurus
gctttactttggaaatcttaacactcaaatatcctataacttcttagactcccacctttctcactttctcacttccactatatgtgctattgaatttgctygagctgtaaaccttctgatttctacttattccttcctttcttagacattatctcatcaaaactctcagctccttggtactatgatcctggagaaatccaa

SEQ ID NO: 34135 - DNA, 201 bp, Bos taurus
atagctgttgtcccacataccaaaataatacagcttgtatttagttagctttacttgagtaaagaatttaatcaagtatccataggtatgtacctgttctmtctctccattcttgcctgcttttccttcccaggctctcttacaaccacacagaagccaaaacacaattttagatggaacattcaactaacagcagtctgt

SEQ ID NO: 34136 - DNA, 201 bp, Bos taurus
tttattttccccctaacctgtctttagggtctgattcctatattttgttcataatctctagcgtcacttgccactaaaagacatcagacattttggatttkttaagttataaaagctcttagcatttcagaaattcacctcatagcattgctcataaaaaggtagattttattaagaaacaaatgaaaatgaagaatgggg

SEQ ID NO: 34137 - DNA, 201 bp, Bos taurus
aacattattaatttgatccctatgcattgtttttgtctctgtctacatcatagcttctgtttcctgaatatttctataccatgtacttttccttaacccaygatatttttcaaatttgtaacagaaactaaatgagatactggggggaaatgagctctaaaaaattttgcacttctcagaaatttctgaccctgagcatgg

SEQ ID NO: 34138 - DNA, 201 bp, Bos taurus
ttccagctggactggaaagtggctgaaaaaatccattctctccaccagtacctagagtactaagatatgaaaattataactaggggaagggaggatattargaaagatgcaaataagaacttcacttggtgggaaagggattgttcttagcagaagtccacctaggaaccaccgggattaccctattggatctgcaggcac

SEQ ID NO: 34139 - DNA, 201 bp, Bos taurus
caggtggtctttcttttatctctcagagcccccaacatttggttttattttctgagaaaactaagaaatgaaagaggcagtggaatttataggcttagcaygtggagaggttttgttgtgcgtgactttggacttccctgtgggaacagcaaactgaatttggcagactgtcgatactgatcataggctaggtttgatttt

SEQ ID NO: 34140 - DNA, 201 bp, Bos taurus
tactgaccactgcagctctgacattctttggttataccttgagtgacctagattaaggatgcttggtagcaataatatattaggctgacaagaacagcatrcaatgacatttattagttttaagatattacacatttccaattttctgaaccatggttaaatatctgttatcagtaatacttttactaaagctatcttaag

SEQ ID NO: 34141 - DNA, 201 bp, Bos taurus
tgattttttcagttgcctagcgtgtggcactttgctacaacggtcctgagtgactaaactcctctggtctgtccgctgtcttagctcaagtggagaaggtraacacgattcttagtaatacagaaggtaaattgtttttaacaactgcatatagatttctttagcaaaaatgtggataacaagccatagcttgaataacat

SEQ ID NO: 34142 - DNA, 201 bp, Bos taurus
tctgctattatagaagattggttacaaagatgtttggaaggttgcaaacaaaaaataattattgagataccaaagtattaatcactacaggaagggaacartactcatttagttggagaaacaaaggggacattagaatccagattcttggaggaggatggtctcccagacacaaattggaggcaggttctacccggctgt

SEQ ID NO: 34143 - DNA, 201 bp, Bos taurus
gttcattatctcctcattacaattaaattagctttgccagataagaagtacccatcatataccaatggcgtcacaattctgatcaagaatatgtagggacraaatccctgttcaccttggcaagaaggatccaggatgaaaaaaaaaaaaaaatcaacccaaactccttccttctcatcgtttctacactccctaataatc

SEQ ID NO: 34144 - DNA, 201 bp, Bos taurus
gaagaaagaagtctgaaaacttgaggaggaaagagagggcacatcaagaaaagacatagaacggaatatgatagactataccactcaatgtagtaaagatmaatcaagttaaacaaaccaataatttatgcaatattctttttctacattatagttaatgacttgctaagagaaagaggcagtgagagctagaatgttgtg

SEQ ID NO: 34145 - DNA, 201 bp, Bos taurus
gaatttttacatgttgttaagaggataacccttatattaacaagtatatactagttagaggttcagcagccatccagactatggaatgaccttaagattgraagcttccttttaaaaacaaactagaaggagcctcgtctgtatataaggaagcaccatttgtacttgtagactaacttcttccagttaggaaaacatttt

SEQ ID NO: 34146 - DNA, 201 bp, Bos taurus
agtagtacaagtataatgaagtctagatgtttgtgatcttctattatggactttatgccctgaagggcttctgatagggtgttgcctaattctgggagagrtttcaaggcctctatttgaatcttgatggaaggcatgctatgaattttgtcactatcacctggagatttgacctataaagagagtggtagctaattaaaa

SEQ ID NO: 34147 - DNA, 201 bp, Bos taurus
gtaatagtttacacaaatatcagaaatgtttaaactcaaaaccacttatgacaattgactgaggtaattcttaaactggaatcacattcacatttactacrtatatttctttggttacttaccaactggaatgcaatcctgagaaaaagtgagtggcagttttcagagaggctttaaatatatatggtccacaggagttgt

SEQ ID NO: 34148 - DNA, 201 bp, Bos taurus
atcttttttaaatacccttttaagtttggcagttttctttgagggtgccacctcctggtgtagcagcttctttgcgagttctgtaatagactctgaattcyacagtgttataccaaacattcgccttctttttgaagtgtatggctcacatttcacacagatcctgtatgatgatttccttgcatagtgggaagtttttga

SEQ ID NO: 34149 - DNA, 201 bp, Bos taurus
aaaaaaaaatcttattgttttgataattacttgaataataaattcttacattccttttctgactgctatccatgattttggagactataatttttcaactyatttgtcttatttaattttgcagcaactaacactgaagaaatatttctcctgttaactcttttagggatttgacacttaaatttataaattttatgagac

SEQ ID NO: 34150 - DNA, 201 bp, Bos taurus
ttccctagtaggataatttgttcattctgtgaagttaatggactactgcagcatttgtaggtattcttctaatatcttaaaaattacatttgccttagctraacacagttcaaaagtacatgctcacaaatgacatcttcaaaatgttttaactttttataaaagtacgtagttactgagaaatgaaaaaaaaaaagccct

SEQ ID NO: 34151 - DNA, 201 bp, Bos taurus
tgatggacagggaggcctggcatgctgcaattcatggggttgcaaagaatcagacatgtctgagtgactgaactgaactgatacaaagaacagtatggagkttccttaagcctgggaacctgcggcctaacaggcatgtggccaatatagtgcagagactctgagaggttaaggtgagcccagaggtggagcaagagagaa

SEQ ID NO: 34152 - DNA, 201 bp, Bos taurus
gaatgttcatgattttttttttttttttaatctgatctgagtgcagagaggggagaagaaaagacctttggacaaggcggatgatgatccttattgtagcrttgaatcactgcaatttatggttaaaagtgtgactatgttagatatcatcattgttctcatggctgaaatcaacactgagtaaaattggctagttaccta

SEQ ID NO: 34153 - DNA, 201 bp, Bos taurus
agaaagtgaagggtgtgtaatttgagctaaatcaatgtctgccttacataactatctattcttcaaaatctattttgttcctcttttctcttctttcatcrtgggcttccctggtggctcagacagtaaagagtctacctgcaatgtgggagacctgggttgggaagattccctggagaaggaaatggcaacccactccag

SEQ ID NO: 34154 - DNA, 201 bp, Bos taurus
tttatattttaaccttagaaaaataaatgtatcagaccataagaatccacagagagagaggcgacaagggagaaatgtcagttctcccttgggaaaagagrttctccttaggggaagggaggttgcaactgctttttgacacttagcagtcagagtaagtgacaatgaaaagtagataatgcttgtgacaataatagcaat

SEQ ID NO: 34155 - DNA, 201 bp, Bos taurus
aaccatacccactatgcttggtaaactttgttgtcacatactctcaattgttttccaactatggtgcatccctcatgtcttatcacactttttagatatayaagggtgtttaactcatggctttggaatgagctgaagctaagtggctcaagctgagattgcttctttggttttcttaacatggtacattcaaaagctgga

SEQ ID NO: 34156 - DNA, 201 bp, Bos taurus
ccaacactagggatgcactggagaggtggcccacatgagccatgggctgcaggcagcctacaccaacccaaaggccccaggtccttgcttatggccctacrttcctagctttcctgatctgttggtcccttcatggatttgctaaagaactgaatcctggaatcagaggctaggccaaggagccctccaggcctcttgacc

SEQ ID NO: 34157 - DNA, 201 bp, Bos taurus
gctcacgattgagtaccaccttaagcaagctagtgagagagcattgtactccaagttttagcagtgtattgttttgaacttaatttgcatattttgttcartagtgtgactaaacttcatgtgtattatcagtttgttttcttttatggggaattgctcatagtaacatttgctagttttccctaagaagttgttggcaat

SEQ ID NO: 34158 - DNA, 201 bp, Bos taurus
tgcttatttactcttgagtgtacactggctaatgaaaagccacacaaatgtggtttgaaatgttgtcacacatgataaaactgtcacagaaattttatcayaaacatgactaaagcacaggaaattttctcggggtcatccttccaagtttcatcgtttctccacagattcttgagagactattttaataggaaatgtatt

SEQ ID NO: 34159 - DNA, 201 bp, Bos taurus
gtttatttgtcagagtttggaatctctagcgcagacactgaggtggaatttgagatgcaagatactttttggtactcaacacctgtgaaaaaaaagagaaracacaggattgggtagaaggagaaacaagcggatgttagctggttgaaatctcagtcaggccagcaagaaatttggcaggcctgttgcctaccaggatgg

SEQ ID NO: 34160 - DNA, 201 bp, Bos taurus
atacttcatgttataaacatctgcaggataaaatgtcagataataatcataggaaattaaaattcagtttaaccacatcatattgaacctatattttgccwttataatttactaaatttgatcctttctatgtgttacttgttgattttttaaaaataaacaaccttattcatatctgtcgctttttcaaaatcatctttt

SEQ ID NO: 34161 - DNA, 201 bp, Bos taurus
aaaggagaacaaaggcctatgaaatcactccagaattaactggcctctgttgccataaaacagcagttcatttcatcatgaatcaaaaatgagaacaatayacaaataggttaacattctgaagtgtatggatgagaatagccatgtcattgtagattaggaaatgtaaaatttcaaggaatgtgatctttctgaacattt

SEQ ID NO: 34162 - DNA, 201 bp, Bos taurus
ttatgaacgctgataatgcagtggctcataaacttatgttatttgctcccttgtttaggttgcagttctgagctctttagttgctatggtgacagtaatamtaaaggctgattggaagaagacatcttatctgggatttttgttgttgagagaggagaccacgctccatgttgccctattagagaagatactgggttacat

SEQ ID NO: 34163 - DNA, 201 bp, Bos taurus
gtatatgctgaaaaaaatgcataatatgatgaaagttgcagtatagatgtgtcaatttggtttcataaacatacactggccatatacacagttatccagtkgttaagatgctgtgtttccactgcagggggcttgggtttgatttctggtccaggaactaagatcccacatactgtgcaatggggccaaaaaacagaagga

SEQ ID NO: 34164 - DNA, 201 bp, Bos taurus
gcttaagcttccatcagttcttttactagctttgtctgtttttgacatttttttcttttttgtttatgtaaggtgagatcatgaaattttactcagatttrcatcttttccccccaaatgtattttatgaatctaaccaggtaaccaatctaacagctttcatatcacaagcctccttgagttttttaaacaagtttatct

SEQ ID NO: 34165 - DNA, 201 bp, Bos taurus
ccaaaggagtaatagaaagatactaccttggccagctctgtggctcacaacttagaccctggaggagctataaatggatgattaattacaacaagagtctmggaagggaaagggttccactggaagtcctctctccccctgctgttagaaaatgtccatccaacttactctccaatcactagagatactggtaagtcatgg

SEQ ID NO: 34166 - DNA, 201 bp, Bos taurus
tcttcaaatatatatctgtgaacattgctcttcctcatgacctagtttcattggaactcctggaattgatgggttttattccactgctcagattcagctartgtttgtgaagtgtcaactacttgtcaaattctgtactagctgcctagaagggactcccttgtgcaagataatcatggatactggcttcatgggatctag

SEQ ID NO: 34167 - DNA, 201 bp, Bos taurus
ttataaaaaacacagtctttagaataatttatgttctttacactgttttttttttctatatgtgactgctgatgtagttaatatcttatttgaattatttragacatgcattctcaatccataaatagtagaattataattgttatcaactagacatttttatattatttttaaaatgagatttttatcttcaaaatacta

SEQ ID NO: 34168 - DNA, 201 bp, Bos taurus
aatacattacaatggactttcagtatgaggagaaatttcacaagcatcttcctgaaacagggaaggtttcagggaagaagtgaaacttgaaccggcccctytcacctgataggcacagatatttgctgcagccctggtagggaatgacttgtttttggggcttacgtaaagtgaattgcttcgtatctctgtaaagatgtt

SEQ ID NO: 34169 - DNA, 201 bp, Bos taurus
agggggctggccagcctaagaattgactgggcttgggtatagaatgaccacacaccagctgtggctgggagagcaaaatcgtgtgattacaaaacatgacygcttaactacttccctttcatcaagggctgatgatggaacatggccatatagaagggctgaggcaggacagaacacttcctttgtaactcaattcttgtt

SEQ ID NO: 34170 - DNA, 201 bp, Bos taurus
ccccaccctaggccttccctaccagacactctggggctgagacccaggaatctgagttttaacaagtcctccagaggggccagggagggggagcttgcagrttcaagaagctgaggatctctgttttagggaaaaggagagatcctgccaggggagtaagaaggttaaagcaatgcaggaccccacagggtagtgtacaca

SEQ ID NO: 34171 - DNA, 201 bp, Bos taurus
atctgggtgcttgataacttgataattaaatttacaaaaggttggaaatatttgccacagaaagatttaaaatcattcctgaaatcctaatgacagctccygcaatatgtgtatgcctcttgagggcccagtgaggataggtggtattaaaaatataattggttttaaagtacattagattaaatttttttcctatgattc

SEQ ID NO: 34172 - DNA, 201 bp, Bos taurus
attactttaaacactttctccctgaaatacttagaatagtgaagatgttacaagctattgtaacaaataaatttcaaaatttcatgggcccaacatagtcrtcgttcatctaccagtccagtgtgggtgtttctggatagcaagtggcttttcagccttcagatgactactgccctggccaacagcttggctgcaactttg

SEQ ID NO: 34173 - DNA, 201 bp, Bos taurus
aagaagacagtttcatattgagattatagcagctctctcagacttgccctactcgtgggcccagccattatcagaacctgaagatggagacaggacttgayattcaaatggtgcatttgaagcacacagtgaagtatattgtataaatgcaaatgaacagaaatatggcattgtaagagctcagccgtttgtgcaattagg

SEQ ID NO: 34174 - DNA, 201 bp, Bos taurus
gtaaaacccaaaggccctgctccctcctctgctgtccactgccctcatttctgtgactctctgcagcacccattcagctccaggaacaccagccttcttgytgttcctggaacaagacaaacacacctgctccaggggcactgggcttgctgttccctctgcagggctcaccccctcagggaggtcattcctgcccacctt

SEQ ID NO: 34175 - DNA, 201 bp, Bos taurus
gtagacttacacaaagagcttccacacagggcctaacgtagagatcttcagtcactcagcacacctcctctggctctgccatacttaaaatatccaacacygagcccacaggccattgcacactcctcagccttcagagcagaaagttctaatatgatgaggaagatgtagtcccaggataacaatgtataaatgcactaa

SEQ ID NO: 34176 - DNA, 201 bp, Bos taurus
agtctgactcaggcccttgtgtgtatatatatttttgtgtgtgtgtgttttaataaaaatgtaactgtataaatgaaaagaaaatgggagtaccctttcayctctatgtgtgccctccactcccattactaacaaaaacaatccttttaaaaatatcaaaaaatgctttgtttgcctccaggtctgatgggagatggcaaa

SEQ ID NO: 34177 - DNA, 201 bp, Bos taurus
agggctggaactgacacttgctcagaaaataggcccagagagctcctaacaggagctaagtaagacactaagggcacaagaaaaggaagcaggagcttagrcaagggcccaggcagagcctcagacactgcacacagaccgtctgctcggtgactgtctttgctttacgcagatatcacaatcatcttcacccaaagccat

SEQ ID NO: 34178 - DNA, 201 bp, Bos taurus
aaccccgagtggggcctcagatttgccatttgaattctccctggcagctgcttcgctttgaatttagagagtggtgctttcaactttgtgaatgaaatgtrgggccagcagagtcagaagcccgggcctccttcctgctggcacccagtcttcatggtttcctgtgttagttgccttcgtgagcagcagaaactagaagga

SEQ ID NO: 34179 - DNA, 201 bp, Bos taurus
ccataatgataggaaagaactttgtaaatacattccacatagtattatttttctaattaccaatgtccatttatcttcaggtagatcattcaaggtgtaartgctatgttcaaagaactatgaaacacttaaagctgtgttatgacgcaggagctacctgagtcccctactaaatgatgctgatggacatgctgtagtgcc

SEQ ID NO: 34180 - DNA, 201 bp, Bos taurus
acggtaggaaatttctgagtaaagagaaggctctatataaatccaaccgtggagacagagaatatggacaagcagattagaatgtataaaccacagtattrcaaatatgaagagcagatgatttttaatgtgatagtatgtttgtcagaaagcatcatctttctcttgccagacacttgatctgattgcataaacctgggt

SEQ ID NO: 34181 - DNA, 201 bp, Bos taurus
aaaacacagtatttttcatttacaatccaaaatgttttgaattaaatttcttttgacctagtacataactagtacaaacagaactctttaaggttacaacytacctgtgacctgtaagattaattttcagttctttattgtccttagcatgtctgcaatagtagtagaggtttgttctgggattgattcatatatttgtta

SEQ ID NO: 34182 - DNA, 201 bp, Bos taurus
tggtagcgaactgggtactctgaactcctctaaagagctcaccctaaagtgccgctgaccacagagcaaatgcgctcacaaactcttgagtgcttatattygtgcacgccaaaagaaagagggatcttggcccaagcattgtaacaggcttggagtttacttgtaaaaatcatcaactctctgcttaccacctcctcagcc

SEQ ID NO: 34183 - DNA, 201 bp, Bos taurus
gccacagagaaactaggactcaatttttaggggtcacggagaagtcagcagtgaacatggaatatgcgccgtcttctgttgtctagacagatgctatgctygctacaggttttatgtgtgatctttaataccaaggagagactcaccaagagtctttcaagggagctcctagaccagctctttagataccaatatggaacc

SEQ ID NO: 34184 - DNA, 201 bp, Bos taurus
ttcctcctaataacggccttaaatttcagttccctagccactaactagtacacacgcagatggagtgtttgagtaaataaagaacatggaacgttttagtkctccatgtcaggccctcaatttagctatctaaaggcattagagacattaagtgacaggcactgcagttttccattagaaaatgccaaaattgaattgctt

SEQ ID NO: 34185 - DNA, 201 bp, Bos taurus
gaatggagacaccacccaggttcagacgatgctcatggccctagaaggtatgaccaaaacaaacggattccatacaaccatttacattggagctaagtacrcagaaaaacaagatgttctgatgaaggaaaattaaaagctggccaaagtgtaaccggtttgtagatgggagccaacaaatgggccaggcgagtagggaag

SEQ ID NO: 34186 - DNA, 201 bp, Bos taurus
gtaactattattttgggaaaataattcttaaggcaatgcttttattttgggggtaatatacttcatgaatacacagtgtgtgaagtaccagcacagaagcyacacacaaaagtgggtacaaaatgaacactggcctttatgagcggagaaccaggagccccaggacctacttggctaggcttcaaatcagctttcccattc

SEQ ID NO: 34187 - DNA, 201 bp, Bos taurus
ctttttaagaaagtgcattctgtttttacttaattgtttgaaaatggatctaaattgtatgtccattaacatgctaatatcaaaagtatttttcctgaccrttgtacaatgacacgagttcctcaaatatcatccaatttacctcttgtgagtaatgtctttaactttcataactagagcaggaatatgtattatttagat

SEQ ID NO: 34188 - DNA, 201 bp, Bos taurus
tcgaacctgcacctcctgcattgaatggcaaagtcttaacctctggactgccagggaaatctccagtcaccgtgtttaattagaccctaagtgaaagtgamcttgttagtcgctcagttgtgttccactgtttgcgaccccatggactatatagcctgccaggcttctctgtccatggaattctccaagcaagaataatgg

SEQ ID NO: 34189 - DNA, 201 bp, Bos taurus
cccaccaggctcccccgtccctgggattctccaggcaagaacactggagtgggttgccatttccttctccaaactaaggaatacttgatgtatatattaayggttaccaggccactttctgggcagagctccaaaccaagtggaatagttacgaactgccactcaagctggaggaagctgcagtcagaggtggctcccagt

SEQ ID NO: 34190 - DNA, 201 bp, Bos taurus
tttttcactttggggaataagataaactaaaacaataaaaaagactaaggctcctattttatacaatttcacttacaacctgaaaacaatcattcttaatrttttttctttgccaactttaaaggaagcagaatggaatccaagactaaaaaagtacaggataatgggaaaaaacagtgaagcaaatactctgctgggaat

SEQ ID NO: 34191 - DNA, 201 bp, Bos taurus
agagaaagacaaatgctagaagaagtaggcctgcccgccctgttggagcagaagggaagtctgcaatgtataaattgggtaattgctggctgaccttgccyatgaacacatgcagcacctcctggggactcacagatcccatggggcatttggcagtcacccaagaagccgtgtgagcagatggagtgagatgggcaagtt

SEQ ID NO: 34192 - DNA, 201 bp, Bos taurus
aatttaaggttacaagggtaattcataaaacccaggggcatgaaggcagccaagcttcagaagggtctatagcaaagacccagaaaaccattgggggcctmtcgatttctccttatttctctaagtactcctgtcccttctctctctctctctctcaggtcatctttatctgggtgatttgcctctgcttgagctttcact

SEQ ID NO: 34193 - DNA, 201 bp, Bos taurus
tgcaactcttctgacaccactcctacaaagtataggtctttttcaaggtaaagcaccacgtttatcttagttatgtacgtcttaaccactagatataaaaytgtactgcagttcttacaagactccatgggtgacactgatgaagttttgagtgttgtacctttaaccccatttcccccataagccttgtgatttttgttg

SEQ ID NO: 34194 - DNA, 201 bp, Bos taurus
agactagggtaaaaagtgtggaatatgccctcatttttacttgctacccatttctgacatgaggatccatccaatgatgtatatttgtgtgtacgcatgcrtggagatgacaaaacccacaggcaaaatgaaggtgacagtcactgctcagtgaaatgacctcaaccctcctcttttgctcagcatcctgctcctcattct

SEQ ID NO: 34195 - DNA, 201 bp, Bos taurus
ggcaacctaagagggcccagtgatctgtgcctcctgacactcatgcccccatgtaactccttcccctgatataggctggagctagtgtcttgtctgtaacraacagaatgcaggccaagtgatggaatgacacttctgaaattaggttataaaaagagtgtgacttccatcttggaatctttcactctcagccctcactct

SEQ ID NO: 34196 - DNA, 201 bp, Bos taurus
tgcaacaatcctattgttaaaaacaataatccaataagccaagaaatataaactctagcacttaattcttttcctgaactatctgtaaggcctagaagagyaggcattcaataaattttatttgatggattaaaacaaaacaaaacaccaccctttcatcctttctagttccactcttactgctagaacatatcccaactt

SEQ ID NO: 34197 - DNA, 201 bp, Bos taurus
caatgtgaagaagcaggacatccacaacagaataaaatcattagttaaatgtgtgtgggggggaagttacctcttaacagataattctgtctttattgagraaaaataagacaactgactcagtgtctgagagtcaaatgatacctcctgggaatgttttctgtagttgaaaatgactgacagcatcataacctgtgacag

SEQ ID NO: 34198 - DNA, 201 bp, Bos taurus
gaggcctgactccattctcaggcctctgtttaggcttggggtgaggtgggggcaagattgaagtgctacacttgcaccccaaaggttggtggatggctgtytgaatacatacagataggccttaagaaagagctttatgggaatggaaagaaatagagatgtggcagtggcagccctttgcctagaggccacagtagaatt

SEQ ID NO: 34199 - DNA, 201 bp, Bos taurus
tacctaagtcccacactaatctaatctttaactgatccactgagggcttagaagaaattgttgcattttgataatctgcctttctgaatccttgtccacaygccctagatatacccacatgtagatatgtgtttccatttttggagtgactataccctctggtctacatgttacacaaattccatattagaatttctggct

SEQ ID NO: 34200 - DNA, 201 bp, Bos taurus
tgaagaaaatagcccatgtttaaaaaaaaaaatctgtatttagaaaacggaattcatttttcatttgcattttatcaaagtttattcttgttagaagttgkcacgttccctatcatttgaaatttcagagcaactgcccccaaaataaatgtacctgttgttttgtaaattctttaatatctgtgatgcttgaattataac

SEQ ID NO: 34201 - DNA, 201 bp, Bos taurus
ccaaggaaaaaagaagagaagaagagtctagaaagaagattcattcatctagtttttccttccaaactcggcaatcaaatggacactcctcctcctaataytatttgggccagtcattcagagtttaacaatatcccaatgtttttcacagtttcacaatctgcagtctcagactctccctaaaagtgcagtttatgaaat

SEQ ID NO: 34202 - DNA, 201 bp, Bos taurus
tggatggaggcttagttttggtttcagtcttgtgggataggatgaatttcgggatcttccctgacatttccttgtcattttattcctggttggccttataygtggattgagtatgacagtcatgagtgtgtcacagagttgtgcctacattccttagcatctcattttaggcctatgtcaaggggctgcctggtgcctaat

SEQ ID NO: 34203 - DNA, 201 bp, Bos taurus
aaacatgcatttcttatgaacttctttgatggtgacctctgtgacttcatattttccaagttcataaactttatgagctgtttgatggcatttactctttytaattttatctttcattgtccccttcttaaatcctgtagctatttagtaagtttaagctggtccagtggaaaacatgttattgggtccagattaagtctc

SEQ ID NO: 34204 - DNA, 201 bp, Bos taurus
ggaatttgtgaccaacagtcaaatgttcctcagaggcatttttatcatcttgtagttgtgagacttcttgtaaagggactgaggaaggagccagaaccacrgggcatgatcaggtccgagaagagctgtaaggaagtaataatgactttcacactcatgggcgacctggatttccacgcactatcaaccaagtttgtcact

SEQ ID NO: 34205 - DNA, 201 bp, Bos taurus
gcacaccttgggatgcctggaaatctctgctctgaggataaagcggtcatttccacggtctccgtgctgccttggccgtcggcaccctctgctgaagacayacgtgtcatagaggtgagtggagcacacgtttcttatgcttcccgtgaacctattaatgctgcagaggagaactagacatatagaagcagctgggttcta

SEQ ID NO: 34206 - DNA, 201 bp, Bos taurus
gcttgaggaggatgcagaggtggagaggggagggttagagcttgaagtctcaggcaggccctcccaccctccgcctgaccctacaactcccactcttcttycctccaatacgaagagctccctgggggaagccagctgggggctgttctcctcttttttccctgtaggaactttctaaagtttggggcacctactgtgcag

SEQ ID NO: 34207 - DNA, 201 bp, Bos taurus
caaagaatttggacaaatggagtggttcttgtcttagcaaaatagaccaatttaaatattaaagaactggtattcttcttctgcaaatcctttcagccatyccaccactgggactttcccactgactatataacctcacagaatacctccatctcctctctaccttcctcttctttgattcaagctccaaaggatactgct

SEQ ID NO: 34208 - DNA, 201 bp, Bos taurus
tcagaaaataaaaatagaaattagcagagcatcgggccttcaagttgttgctctatgtgaataaggacagtgcttggtggcttgttttcctcattcacaargtgggggagaacgttggttggcctcttcacatcctttccacaccaaaattcaaacaaagaaagcagaacaaaacaatggagtagaaaacaaatttttaaa

SEQ ID NO: 34209 - DNA, 201 bp, Bos taurus
gggtctctgcaattggttcctccctttgaaagcaattttgggtcatttgctctgagtttaggtagagaagttcctgcttagcactgaccaactttactctrtcttaaagacattcaatcagataggccctccattatattggaggaattctaatcagacagaggtcaggaaacaaagcagaaagtaagggatgttggatgg

SEQ ID NO: 34210 - DNA, 201 bp, Bos taurus
caggtgagctgacttcttagcttccatcggttgccaggtgtggtacaactgcattcggatataggaagtgtggagcatgcagccttgtttgtcttcatgayaacagcagcagatggccctactgggaactctcactggccattcaggttggacagctgaacccctgcattcacacaaagagagcaaatgacagagcttagg

SEQ ID NO: 34211 - DNA, 201 bp, Bos taurus
gggtaccatgcaggtctgatatctatgaaaggagacaggggaggcataatgctatccctgttatatgaatgaaaaaactctttccatcctttttgtggccrgagataagggaagaattcccctaaattgcgtcagagtcttattgatgccatggcagctgagggtgaagctaccaatggccccttaccactgccactaagt

SEQ ID NO: 34212 - DNA, 201 bp, Bos taurus
caaatattgaaagatcacagcataagaaaatgaaatattgaaacatgatacttttaatctatgaccatcaatggataccattttgctttaaatcctacaayataatccattttcaagagaaagcatgttttatctgggaagtttcataaagtaacaccctcttccccagcatgcattttagtgtgtcagcaagtcagtgtt

SEQ ID NO: 34213 - DNA, 201 bp, Bos taurus
gatgggtagagaggtgaagattgggaggttggttttgatctgtgaatcctgagaagttgagagaaatttcaagggggtatgtttgatgtaagggtaagttycaacacagatgagatgagggccaaggaggagaatgttcacaaacatgggataagaacaaacagatgattgagaaaatggagaagatggagaagatctgtg

SEQ ID NO: 34214 - DNA, 201 bp, Bos taurus
taccgctgaaccacctgggaagcccttttctaattagaggagacttgaatgttcattcttttatcctacgattatggcaggtgctgtgcttggccctgggratgcagcaatgagcaggtttaataacctgagggaaggaggggtgggagactgaagagggagtgagatagagatgcagtaggattacctggtaagaacctg

SEQ ID NO: 34215 - DNA, 201 bp, Bos taurus
tagacaatgaacttgccaagtgtaccaccttgaatacagggatttcttcagtagttatcagctgagttgagtgtgcacttactgagtacctgccatgtgcytggtgccatgaagtaaacaagtagtaaaatcagtcttgatatccccaaagagctttcagcctaataaagagaaaaggcaggtaatacagatcagtgtcac

SEQ ID NO: 34216 - DNA, 201 bp, Bos taurus
tcaattaagttcatcattttttaaaatgttatatcattgtatttaagattttaatatgaattttctttaaccaccaagtttttgagtgagtgagtgaagtygctcagtttccgactcttcgcgaccccatggactgtagcctatcaggctcctccgtccatgggattctccatgcaagagtactggagtaggttgccattt

SEQ ID NO: 34217 - DNA, 201 bp, Bos taurus
gtaattttaattttggaggatacatcatagtttgatagaatgatattaaagaaaagcatatggtaggaagagtgaagagcacatgcaaaaatatggaaacrtgcaagaaaacgtgcattcagagatgggctacagtaattcaggagggctgcagcatagtgaaggaggtactgagatggggttgaaaaggtaagcaaagcc

SEQ ID NO: 34218 - DNA, 201 bp, Bos taurus
tagatcttggtgcaattatggcaggcggcttctttttctttttaataatgagaaacataatggaaacaaaagtttccagtggcctacagaggcttcccaamacttccactgtgaaaactgaatgcctcaagccacacatgagccaatggctcaggggcccactgtgtgtggttttcctctagaactgagctgcttcacagg

SEQ ID NO: 34219 - DNA, 201 bp, Bos taurus
tgttttctggcccagggatcttctcactactcaacaagtctaactaatggagggtgagtcgtggcttgggtttaatataaagatgtaggataattagaatrtagttggagcttcaaaagcaaggaaatttcattagagaatgttgatcagaagagtataaaatttactcaatagagaacatttacgtagggtaaaaccaaa

SEQ ID NO: 34220 - DNA, 201 bp, Bos taurus
tccccaatattcatatttctactgacagtctgttaaaggcaatccaagcttttcctgtcttgctcctcaaaatttttccaaacctctgctcaattccaaaytcatgtccatatttttcggtaattgtttcagtaagactcatcttccaggtaccaaaattgtattagttactttttatgctgtaacaaattgccatacatt

SEQ ID NO: 34221 - DNA, 201 bp, Bos taurus
aaaatatgataaactttgctgaataagttggttttgactgatttacctgatatttacttccacttaacatggcatcagtggtttctgtttctgtgtatttmctagtttgtgcttagaaagtcaggttcctgatgccatttcactagtaagcagaatgtggattagctagtttttaaaaagatgtgaacatctaacttgaaa

SEQ ID NO: 34222 - DNA, 201 bp, Bos taurus
atggcttttactctggtcagtgaccattgatgttcatgtgtacgagctcttcaatggtacataaccactactgtggtgggcctacttcacctactaagagygttttggcactctgggactgtgattatgtgtttgttacataacctgtcaatatcagtcttttagaacaaagagaacaggcccctttcctagctccaaggt

SEQ ID NO: 34223 - DNA, 201 bp, Bos taurus
tcagattggcaatatattttcacatggaacaggaaagaaatcctttgtgttacttattcacttctccttatgtttgagaatttttttgaagtttaaaattractataaaaaatgaacaataattgcaataacattgaagttctcaattgatgctagagatagaagggtagtggcttcaaaattatgagggaaattgttttt

SEQ ID NO: 34224 - DNA, 201 bp, Bos taurus
ggaatgttgactcatagaaactcaaaagactggccagagcatagcagcgagacaaaacaagccaaagtcagtgctaactttagagtacatagaaattaagrggagaaggggcgctgtggggccactatgagaggttttgagaccctggtgaaattctgactttgatccaacttctgatcaccaactcagcacccaattcca

SEQ ID NO: 34225 - DNA, 201 bp, Bos taurus
tgcacaaatacagttaaattcctaggatatacagggtactgaatccatctagtgcttaggataaagaaaaattaggcctaagcttaaggcatttatgctcytgatgcgtagaaaaaattttccaacataaatttacctaataaagcaaggccagaatggtaagtgtacataggatgtgcacgtactggtggaaaataaagt

SEQ ID NO: 34226 - DNA, 201 bp, Bos taurus
atgatagggagcaactttggggcttctgcagtcttagaattttctgaaaggtcatatatctttggatttgctttgctctttattctatacattaatataartttgcttttcttttaatttgagcattaataacctctagttgaaatatttctagatgattgtttactcaatttccatccaaaaaagaaataatatgtaatc

SEQ ID NO: 34227 - DNA, 201 bp, Bos taurus
agtgaaagggtgacagttctggacttcataaggagagataaacactcttttgctgagattgctaaattctacagtaagaatgaatcttctgtctatgaaayagtgaagacagtaaaagaaatttgtgctagttttgctgttatacctcaaacagcaaaagaaatggccacagtgagggacgactgcttattttggatggaa

SEQ ID NO: 34228 - DNA, 201 bp, Bos taurus
gaaaccaggctgtttgtcctgttgactctgccacagcctggatttgctgattgaatcctcattgcattgcttaccatgttcttctctttctcatattttcygcaaactggtggcttttgtttcatttaaaattatccatacctgtcttgaatgagtgagtagatgagaaaactatgaatttagaaatattggaatctgtcc

SEQ ID NO: 34229 - DNA, 201 bp, Bos taurus
actgttgatggttctctgtaaatacttcctctgagtctgtgtgcttgtctcattggtaagctccacaagggcagaggccacatcttctctgattcttagaygccctcagtgccaagtatactacccgacactcggtgaggctggaaggccgccatgagtcatccactaaccttcagaggagacctaccagtcatgtcgccc

SEQ ID NO: 34230 - DNA, 201 bp, Bos taurus
gctctctctctcacattaaaattctaagaaattttctacatctttcacggttacatcagaaacacaacctcacatacacttgtggggagagtttgagtaarcacctaccatgccccaaagtttccccttccactgtatgtgtacaaacctggatcataatgtgctaagcagttttgcaggtctcttaacagtgaaccatct

SEQ ID NO: 34231 - DNA, 201 bp, Bos taurus
atatttatctttccaaaaattatgggaataaaacttttaatttttttcatatgtcttgagcaaaagaggagtgagatgtacaaagctagccaataccaagyaagtgaaacacaccaaaaggaactgtcagtatatattaagttattgcctatagaatctggaactgcatcaccttaggtcaaacaatgaacaaggagggag

SEQ ID NO: 34232 - DNA, 201 bp, Bos taurus
cttgtttcatttcagcagcaactctgcaggatacatatagtttccacattttctgcagaagactggggaaggttaagaaaacgtctgagacaacagggctrtagcagaaccaggacctaaatttagttctttgtgtgtgtagatcccattccttctactattctattctggttaaatggatctttttaaaattttggtctc

SEQ ID NO: 34233 - DNA, 201 bp, Bos taurus
ttggtggccactctgtagttggtaatcattaaaaggtgtatgtgacagataaaaaataaaaagaactgaccctactttccttggtaactccatcacttgckccagtttcaagattccactaaggcctcctgtgaggtgggaggaagatgttgagaatatccatgaagtttacttcctggaaaccatgactggagggagcaa

SEQ ID NO: 34234 - DNA, 201 bp, Bos taurus
tacccctttctctatggccctttttaagattattattattactattaataatagtattactattagtattactattgctgtctcctttcttcctgtgtccrtgaactataggccagggaaagacttgagttagtaagacttttagtttctagtcttgactatgttattaatcagtcatgtaagcttaatatatagaattat

SEQ ID NO: 34235 - DNA, 201 bp, Bos taurus
cccatgaaagactgtccccatctctgcttttttttaggggcagtgggcaacataaaataggcctgccagatggctacaactcattactgcctggcagcagrctggggaaaatgagagtaaattaatcagcattcaggaggaatgaatggcaaaggggcgatgtgtattgatgctattttaacgcaagtcaaattaaacctg

SEQ ID NO: 34236 - DNA, 201 bp, Bos taurus
ttgccattgccttctccagagtcaagactgcctgggatcaaatcctaaatccatcagtttctatgatcttgggcaaactgcctcattttgattctctacaycttcttttgttcatctgtgaattaagagtaagtgactacaacataagaattaaacaagacccacaaaggtcttttcacagtgtatggcaccaaagtgatc

SEQ ID NO: 34237 - DNA, 201 bp, Bos taurus
gattgctaaaagtttagcctgcctggattataatagctcttgcaaatcttttttttttaatgagaaaagagtgcttggttagcatgataaaagattccaartgcatttatctcataaaaggaaaaatgaaagttttttaggatgttcatttgaacattactctttctcttattatgactatcatgtcccccaaaagatgga

SEQ ID NO: 34238 - DNA, 201 bp, Bos taurus
acattaaaaattttgtggaacatatttattatttatatttatcagtcaagatttcagtaccaatagtttttatgcttctgtgctttaaaatataatcatcrtgaagtcttgaaatgttgattcaaaattcatttcagtgtaattttattttgtgaatataaaaaaagcgttttcatcagtgaaggcctatatgatcacagc

SEQ ID NO: 34239 - DNA, 201 bp, Bos taurus
tcaggctatagaaagaattgatggagacatttttagataatattacttcatttaaaaaaatgtgtgtggataatgtgtatatttgtatatcatgttacttyggtttataccagatccagctaccctcttcagaagtttctaggtagaagagtaaagaatttagaattaaaaataaaagacttgagttggggtccttgcctg

SEQ ID NO: 34240 - DNA, 201 bp, Bos taurus
gggacatgtccgcattcatgatacccaccaggagcatattctaggcctgcatcttgctctctgcaaagggctaggccccctcatcatctttgagcctgtgrttctgtcctagctccctattccagaatctatgggctctttccctgcttggcttcgtaccctagtcttggaggagaactttctccagggccacttctgagc

SEQ ID NO: 34241 - DNA, 201 bp, Bos taurus
actccagtattgctgcctggaaaatctcagggacagaggagcctagcaggctacagtccatgggatcgcaagagtcggacatgacttggagactaacccayacaacattcaaacttcaactcgaacattaggtaactgagttccaaaggtgttcttctgtctctcctccactgggaaatttacaatggccccctctctcta

SEQ ID NO: 34242 - DNA, 201 bp, Bos taurus
ctgctaccagaacatcaatgggtcctgtgttaagacctcttacacaccaggtcctcgggcaattctatatgcagtcctcggtttgggggctgtgctggccrtgtttggaaacttactggtcattattgttattcttcacttcaaacagctgcacactcccactaactttctgatcgcatctctggcctgtgcagacttctt

SEQ ID NO: 34243 - DNA, 201 bp, Bos taurus
cactcagtcatgtctaactctttgcaaccccatggactgcagcatgccaggcttcgctgtccttcaccaactgctggagcttgtgcaaactcattcccatmgagtcggtgatgccatccaaccatctcatcctctgttatccccttctcctcctgccttcaatctttcccagcatcagggtcttttccaatgagtcagttc

SEQ ID NO: 34244 - DNA, 201 bp, Bos taurus
caggactctgctttccgaagttttcatcacctccaacactgacagctttaaatccactattatacaacaactgtaaaagtaactctaaaccctccagttaygggtgaccctaaggaccctgattcgattacgcatgaatgagattggtagttcgagagaagaatggcattatgtcctccatctctttaggaaaatctgtca

SEQ ID NO: 34245 - DNA, 201 bp, Bos taurus
tgtctttaatgtcaaatggaattcagtcataaatctctcagttcccctcattcccatcagtactgctctcttccaaggccatcattacatttaaaatgtcyctgaatctcttctgctcctgctaacagacacacaagtagacacatgttatatggcaaacaaggctggagccaggatctgatccacatccatctggcccaa

SEQ ID NO: 34246 - DNA, 201 bp, Bos taurus
tatagtaaccaactccatgagacattaactggcaatccacgttaccagtgagtatacattacagcactaaaataaaaataaactcattgaagaaatagctrgagacctcaaccatgcttttctgttggtgaaatggcatgacagtttggggatttgtaactgagaataaatttaattatgtcactaccttgctgctgctaa

SEQ ID NO: 34247 - DNA, 201 bp, Bos taurus
caaaagaattatatgctatcagaacactgagttattatatatatgtgttcatcaaagaaaaatcattaatattcagaattatagtgtttaatgaatatacrgtatcacatcttatgtatatttcaaaaacaaaaactgaaatctgtaactatgatgctttctttcccaatgacccaaagagtttcagttttattatatgtg

SEQ ID NO: 34248 - DNA, 201 bp, Bos taurus
catgtcactcctgggccctccatgatatccacataatagtttggtgtatattcgtgtaaatttttatatgaccattctcaatctcacccttaatcatctayctatccatcagtctgtccatccatgtatcatttatctcttaaaagactgtgatctcactatcttgtaatgagacttgtttttttcttggagcttttaaat

SEQ ID NO: 34249 - DNA, 201 bp, Bos taurus
tttaatgtctccttgggaagaataaaacataagcagtaaatctctgttgtgatttggattcagcgtgctaaaggctgactgatgattcctttcttctgccrtttgactataatatcagagtatgcttaggggagttaaaaatgcaaatacatgtatactgctgtttcactgtgtcaggttaactgccttgaaaagccagat

SEQ ID NO: 34250 - DNA, 201 bp, Bos taurus
tgcctttgatcactgtagtcaaagttgtatctgaccggtcccttttcatatgatgcggaagtgtccccttaaatctttacagtgtcacactattttatagrgtctcatgtcagctcaacatgcagtgtttacaactttgttaagctttgtcttcttgttgttgttgctgttcagtcactcagtcatgttcaactctttgtg

SEQ ID NO: 34251 - DNA, 201 bp, Bos taurus
gaaattacttttacatcagttatgagaacagcagggggtggaggtaggggagacactaaaaagggctctgaaaaatgaatggtctaacacatcattttttwaaattgcatttagtattttacaaatgacaagtacattctccaaattttgaggacccactgcttttctagaggaaatctactaccacctattattattgct

SEQ ID NO: 34252 - DNA, 201 bp, Bos taurus
tcctctcaacagaaaccagtaacagcaaagtgaagtggaaaagggtagggaattaaaagaatgtattcaataaacattttatctcataaatatttattgamctggaaagacagaatttactgagctgttaaaaaagatatagctcctgtaatcaaagaactcacaatttggaggaagagagaaaaagaaagggaagcatga

SEQ ID NO: 34253 - DNA, 201 bp, Bos taurus
ctccttcaccttcaagtaccaggccaggcacatgggagggctctgtgaaaaaggacactggtttcctgcaggtggcctgcattatcagaattgacgtggtragagacaaatgtgggttcccatttctcctcagggattcctgcttgtcctagcagggcccctggtctttgctgcccctgttccaagtgcagcttttcctcc

SEQ ID NO: 34254 - DNA, 201 bp, Bos taurus
tcacggcgggggtgtgggggcggggggagtgcgggggagaaacgcccggttttctttttaccctagttcttgtatttccgggccaggagctgatggtttgyaaggcattgctgctgctgctgctaagtcacttcagtcgtgtccgactctgtgagaccccatagagagcagcccaccaggcccctcggtccctgggattct

SEQ ID NO: 34255 - DNA, 201 bp, Bos taurus
gaaaagcagagtgaaattaggtagtgagtctaattgaaatcaggtcacaaatctcaaacaaataaaaggcctattccttttagagatttctgatttgtagraagaacactgacttttactgcaatagtaagctagtttttttccttcactaggtaaaatgaaggaaagcagacagaccaggggtagggtggagaaggacgg

SEQ ID NO: 34256 - DNA, 201 bp, Bos taurus
gttgcttcttctaacctagggttgtggtcaagagcacgaattctggaggtgcattattcaagttcatatgccaaaatttcacttgcaagctttgagacctkggtcactttaccggtcctctgtgcctctgggtcctcatctgtaaaacagggaaagaaacagtgctaatctctcagggttgcttcaaggattaaatgattt

SEQ ID NO: 34257 - DNA, 201 bp, Bos taurus
ataaccattcatgctggcggagtgttgatagatgcaagctgcatagggagagaatgctagcttttttgtttataaagcttgcaatgaagagaacgggttgrttttctggaacatctgcagggctaataaatttcgtgtttatacaaatgaaagacagttttacactgggagttaattttggtgaaaattgaccatacctct

SEQ ID NO: 34258 - DNA, 201 bp, Bos taurus
gtgagttgagggagaacggcctttggtcaaatctgcatccatgagactgacatgtgaacccagaggagcttctagagaccacaagagacacagaaacagtraaatggcccccaggatgtctgtcggcaggaagcaggcaccttcacaaggcaggatccagatcctggacagggctgactccaaattccagagagaacagat

SEQ ID NO: 34259 - DNA, 201 bp, Bos taurus
tcaccaccccctcaacaacaattcatataaacacaatgtaaataaaaggatcactctatcacaattgaatgaagaaataaactcatttctactactgctaygattacttgttttatgctaaatttttacttagaattcttaatgctagactatcgtgcccttgtatgtgatacagagcggatgtctgtttttgcatcccac

SEQ ID NO: 34260 - DNA, 201 bp, Bos taurus
tcaaatagatcaaaaactttctgtttaggcgtggattccctaaaaaggggcagatctagggaaaagattatttgcaagctgctccactgatgagcggggtsggggagggggtcatgcatggagaaagggagggaaattcccagctctggaggagaaagaagggaatacccacaaaaattagaggtactttggcatgaattt

SEQ ID NO: 34261 - DNA, 201 bp, Bos taurus
gcgcggcgcgcgcacgtggacgcggccaaggtcgccgctcctcctggcgccctgctcgcgcagccttcggtcgccccgggcggagaaggggacgcggggayagaccttggccgagacgtgctgggggaaaaagtccctggaggcaaagcaaacccacgcttttttcctcgggttgtttgattttcttttacttattcgttt

SEQ ID NO: 34262 - DNA, 201 bp, Bos taurus
gatgctcataaatttagatgcagtgagataaacatgaaaggaatgattaatggaataattttcagtgccttccttgattacatgatttaccaaggagaagmaactcataaaaacactgtgtaaaagagaaataggccatgcaaacaactcacccaaatatttctataaccttgaagaatgaatgtaaaattaggtagatat

SEQ ID NO: 34263 - DNA, 201 bp, Bos taurus
acatggccagtgggagaggctaaagaggagtgaaacctgccagtcttgttttagcaaacaaggactcaccagagggaagggcctgaaacaaagcaggcaargaggaagccctggagggcatggtgattttatgcctacagccacttttcacctggggtcacttaccaattctgggcatatctagaggttgagaatccaggc

SEQ ID NO: 34264 - DNA, 201 bp, Bos taurus
tggtgaaatctactaatctttttaattttggaagtttagattattaaaaattaaaattatttgaaatggtttatgaatattagtactaggatattaaaatkgttatatttgtataaatcaagataaatgctccaagcaaaggaaaagcaattactaaattcttaaactgttcttcttacatctaaattctaaaaccaagct

SEQ ID NO: 34265 - DNA, 201 bp, Bos taurus
gaccagctgagccacaaggaaagccccagaaagtgagtgattaaggactaaatggaaagaaaaaacacaaaagatgctgaaacaatgcaattgagtggtayaagagtaagaaggggtggtacacaatgaaaggaccctgatgacataagcactgagccctcagctggtactaatagttagctggaagtcacctacaattga

SEQ ID NO: 34266 - DNA, 201 bp, Bos taurus
gactcgggaatcgagaagggtatggctgagtggttctggctcagagtctctgatggagttgcagtcaaggcagtcaactgaggccaccatcatttgaagcygggactgacaccacttctaaaatggcttacttatacagcagttgactggaggcctcaggtcctcacccttgaaactctcctcaaaccatgaaactggctt

SEQ ID NO: 34267 - DNA, 201 bp, Bos taurus
agaaattagtaggaagggagaaagaagctaataatgagaccgaaggtaaaaaaaaaacctatggaagatgtgtccgaaatatgaactcttggggaaaatgmaatttatcaatttgttgcatttttaaaaatgttctggatttggaagtcaacagaggagatccaggcactgagttatatgatcaaatgccttagatctcct

SEQ ID NO: 34268 - DNA, 201 bp, Bos taurus
gaacattacagaatgaaatcttaattgtctggctccctacataaccttatcaaaatgtacacagtaagtcgctggcttaactttttgctccttagagtcargttatctaacatcatcttataatatttaaatcgtatttcacatctaatgagagaatgcagacacatatactaacatttagaatcaacgtatccttttctc

SEQ ID NO: 34269 - DNA, 201 bp, Bos taurus
aaaaaatatccagtgactagtaagtcttgattactaatccagagtcttttctcttgctttccagtggcaaccactattatcagtttcctggtgtttctttycaaagatattctatgaattgaataacaggacatgtatacacatatacacattttgaaaacacaaacggtggcatattaaacactgtttttcactttgctt

SEQ ID NO: 34270 - DNA, 201 bp, Bos taurus
ctggtgggtaacagaagtgaaggaaacggagaggtagggcgccgcgatctcgagccctcttccttgctcccaagccctggtcaagcctatcctgtttaagyagcacgaaaactaaactgtgctcactcttagcggtaacctcggctgggcgaacccctctgatgctgagtttactggtccggacgttactttacagaaaac

SEQ ID NO: 34271 - DNA, 201 bp, Bos taurus
tcctttgaatgtagtgactcattattttagagtctggatgtttaatgtgttatttgatcctaaatacagatgaagcacataatttcaagcattggcctagraacaccagtgaacctgactacagacttcataagggctcctgatttgtgatctatgacggaggactttgtgactcagagagcattatcagccgtttcactg

SEQ ID NO: 34272 - DNA, 201 bp, Bos taurus
cataaggtgaggaggaagccataagaagccacagctctgagcatcctctctgagctcctggtcctggggatgctgcttgtcttggagatcctgcttgtctygtgcagtgggaaccacgggcgggttctgagtgacaccagtccagggcagcccacttcaccagcaaagtgatgatggcaaccaaatccacttagaaaacaa

SEQ ID NO: 34273 - DNA, 201 bp, Bos taurus
cttaatttcatgggaaggacacatttcctctgctgttatgatgaaagcaatcattctctagacagctaaaaagcgaagaccactgaaaagtgcctacaatrtaatgaaaagtaaaacagcaagatgtaaaacttcatgaggaaagacttcattctataatgggtgcacagaaaaaaaaatagtatgccagtatgttaatga

SEQ ID NO: 34274 - DNA, 201 bp, Bos taurus
accttggaacctgaaatacctgttagtctagcatagactttggagtcaaaaggcctgctgtgaatcattgatttgcctcgtacttaatccctgggaatccrtgggcagtttattcagcacctgtctgtaccttggttttctcaaccataccatggagagaagatgcctgtatctaagattactgtgaggattaaatgagat

SEQ ID NO: 34275 - DNA, 201 bp, Bos taurus
caacgtcagaagccagaaagagcctccaagaaatgtatgccttgatgggttgacaagtgtttcttttctcttcttactagcttttcctccttcagttcccrgaacccagtgctgctgtgatttgccacaaaggttgtatttgtgcccaccaggtcaatatttgaaagtctgattgcctgttgtactgcaacctgacaaaat

SEQ ID NO: 34276 - DNA, 201 bp, Bos taurus
ataattgtggtgtgctacaaagtcttcacaactctgtcaggaagatatcattaacagatgaggaaatccacattcacagagcttcagcatcacacggcttmtatgtgctattgcaaggtctatccacctgaaaggcccaagttcaaggctgctttaccacatggtagcttattggaacagatacaatcctgtttcttatgg

SEQ ID NO: 34277 - DNA, 201 bp, Bos taurus
ctggatttgatccctggtcagggaactagaccctgcatgccgaaactaagacctggtgcagcaaaataaataaataattttaaaaagaaacaaacgatgtytgttttatagactgagggccagtatcacacaatgtataaagtcacttggggttactaagcatgagatggaccggtgagcagatcaggctgaggatgacac

SEQ ID NO: 34278 - DNA, 201 bp, Bos taurus
cttataagccagaaaaagagtcacagaaataaccacccacaatccatcagcaccttctgctggctttacatccaaattatatttcaggtatgacacatccygcaatcttccctgccagaatccagtttaagacatcatgactttgaatccagactatgactgtgctcttggcctgcttatggtctgttccccaccagctgc

SEQ ID NO: 34279 - DNA, 201 bp, Bos taurus
aggctgccctgcctgcaaacttggcttaaacctgagttacagaggactggcccccttaagcttctgtccaaggccagcatttatcttaaaggccaaagagygacctcccagcccaggcagaaaagagtttctaaggcgggaaactcggcagggtatgaggaagggcctgcagtcatctctcctgtgtttctgacttccctc

SEQ ID NO: 34280 - DNA, 201 bp, Bos taurus
agacttctcaactaagagaaaatactaagtttggaaagtttcgttctcgttcaataaagaagctttaaaaacaaagtgatcactggttaaaacatagtatytttgagtttccactaagatcaatcttgtggccgctatttgtattcaatcaacagagttgacattgacagatttgagaagtgagttttgactgtcctctgt

SEQ ID NO: 34281 - DNA, 201 bp, Bos taurus
gatgggatgtcattttaacgttgcttttaattgacaagggcctcggtgactgtgtgcgtgtggctacatgcctggcataggatgggcagtggaattagaartcgttacctgctccttctggccaagaacctggagctgtaattgtgtcaactggctagaacacattgtgttaactcgtcatcaaaggccttattttgctga

SEQ ID NO: 34282 - DNA, 201 bp, Bos taurus
gtttctggcagttttcataagctgacctcctgcgttgagagcgaagagtcttagccactggaccaccatggaactccaaaactttttaaacgtagggcccygatcggtcttctcagttttcttgaaatttccaaatcccaaatttctcatctgatcaattagaaaaggccttcagtgttccctctcccgcttcccgtgtga

SEQ ID NO: 34283 - DNA, 201 bp, Bos taurus
tttgtggcagcgctatcacgggcgtccctgacttctgagcctgtgagctccgagcctgtgcagtgtcggccatggccttggacttggttcttcatactccygccttgatcacttaggaaggtgacctttcagcaaaaaagccagaaagtacaggccaggaatagactgtgacatgaaagagaagcccgtatggagagtgtt

SEQ ID NO: 34284 - DNA, 201 bp, Bos taurus
atctttattcttttttaaacatttatttatttggctatgctggttgttaatcgaggtatgtcagatttttgatctttgttgtagcatgcgagatctatttscctgaccaggaattgaaccctgcccctcctgcattgagagtgcagtgtcttagctactgggtcaccagagaattctccaccatctttcatgagtgccaat

SEQ ID NO: 34285 - DNA, 201 bp, Bos taurus
atataaacccttttatttatcagaaatggggagagaacactcaaatttcaccaaattcttgttgcagaagtcaaaacaatgtaacaactattgtgcaagamatttacaaatgaagcacacttcagtatatgctattgatttttaattcactcacttaaaatgtaatagcttttcattgtttttagaatattcctagataag

SEQ ID NO: 34286 - DNA, 201 bp, Bos taurus
ggaaaattcctcattatttcagaaacatcatgctgaaacttggacttccatactcagcatttctgtcctaattttcaagtgtggatttcacacactcaccmtttcatcaagggaatgaaatagacacgaggagaaatattatgtaatattcaattatcactccaactctttcagactatccttttagacttttcgggtgtt

SEQ ID NO: 34287 - DNA, 201 bp, Bos taurus
atggcttccccagcctgccaatacccctctgtggcttcccttgactctcagaggtccttcaacacagagggaggggccctggcaggaccagctctgcctgmctctcctgcttctacatcactccttactttgatgtcctgactctggccaactgggcttcttgattttgccctgctccatcctcccacagagcttttgtag

SEQ ID NO: 34288 - DNA, 201 bp, Bos taurus
agctggtgactcatgaagacataagttggaggagaaaacagaattgtaggtggtttcatgggtatttgagtaaaatatttagttctcaaaaattacctatktatattgataggaattatcagtgtacctgggatgagttgtaatatgtgttgggatttcaggtggctgaataaataacactcctttagtcctcttctgaat

SEQ ID NO: 34289 - DNA, 201 bp, Bos taurus
cttactgagtgctgtctttacccacttaaacatagcctgaaagttcgattttcagaatgagggtgttctgtgagtttatcctgtgtagacaaggccaggcwcatcttctgaaaatggcgctgtcccccttttctcttttccctccacagtgagtggtctctctctgagccctatgagcccacacacctggccggcccatca

SEQ ID NO: 34290 - DNA, 201 bp, Bos taurus
tctgctgttgtcagaacatcaggacaattggtcatctttaaaaaatgcatcctcttaatgcaagtgcatgtgagcacttctacctgtgtgttcaaaagcarttattgtcagcagtgatcactgtaacatcagaggctgactgatttacttaccaggacttgatgtaattttgccccaacaaacagcctctgggccctagaa

SEQ ID NO: 34291 - DNA, 201 bp, Bos taurus
actccagtattcttgcctgggaaatcccatagacagaggaacctggaataaatgcttgtctcagtcccacagaacctcatggaaacttggctttcggccgyggcataacccagatgcactcaagggtctcctccttttgaaacaccaggcaataggagtttcggcaccacaagttccagttctgcagctagtggggcctct

SEQ ID NO: 34292 - DNA, 201 bp, Bos taurus
cagtcagatggataaaggggcccactgacctgtgtcttggaactcaagcccagagagtccagaagcttcatagttagaaaaatctctgtctagatgagaarggccaccatttgccatagttgtgccagatctatttctgaaattaactcttgttttcctagatgtttcgtattctggcctctctatctgtgtgagagtgtg

SEQ ID NO: 34293 - DNA, 201 bp, Bos taurus
atgcagtgaccaggttagatgtaaaacacgtcagggatctataggagggagtgtccgaccctgtgagggaaggaaagatatgagagggagttcttcctagraaaagtgacacaatctgtgtgccagataggcaaagaagaggagaatttgggagaagcaaggccatttcagtcagaacaacatgtgtaaaggatggaggta

SEQ ID NO: 34294 - DNA, 201 bp, Bos taurus
actaaggatgaagcagaagcgcaccaggcctccccgggacttagcctgaaagcggttccatgctgtcttccagtgtcctcaacgggtggctagagacctcygtggggccacaaatggcctcttgttctgtgaactccgtttctcccgtgtcaccccacaggtctgggcctctcaggtgcgggataaaaaatttacagagtc

SEQ ID NO: 34295 - DNA, 201 bp, Bos taurus
gtttaagtcagtaacacgttgggatcttgcttaaatgttgtgatcttctcttttacagcaggatcttagttttttaaacggctctaaatcttaaatacacrctctagaagttatcagaactggccctcccagcaaagcccttccctctgttgtgtgcaagtgtgtatgattctggcaggcagagccttagtgaggtgctga

SEQ ID NO: 34296 - DNA, 201 bp, Bos taurus
tctggcctgggtccacagttgacttcctcagactcacagaagctcttattggacaagtgccggctatatagcaggcactgtgttaagcaaaggacatgccrttgaatccttgaaacggcccagtgaggtagactctctcgtccttattcccattttacggatgaggagactaaggagcagagaggttaagttgcacagcct

SEQ ID NO: 34297 - DNA, 201 bp, Bos taurus
agagcaatgttgaagttcaaacacagcagataaagcctggagtgataggtttacctgccaagtcttgttagtgcaagttgctatgcccaatgcacagtgargccaaacacaccaacatgtaggagtttggagcagagaaaggtttattgaagagctatgcaaggagaggggtggttcattccctaaaagccccctgagttc

SEQ ID NO: 34298 - DNA, 201 bp, Bos taurus
tcgagcatcgatagtgtcccttcctatggcacttgccaccctccttcttgacccaagctctctactagaccctcagctcttagagagaaggaaccaagctyggtgtcccctgggcacctggcacatggcctggcccacagtaggtgcttggtgattattgtctgatacgattcacattgcagggaagccctgcaatttgat

SEQ ID NO: 34299 - DNA, 201 bp, Bos taurus
ccttacaaagatggccagtctttacaaagtttgacataaatagccacacaaatgcaaaaagctccttcaattctttgaactcacaagatgagtgcgaatamctataattacaaatgtaagattattatcattgtttttctaacagcaggaatgggttatgtgggtccatctacccatctagtccagttcttgggtaagcca

SEQ ID NO: 34300 - DNA, 201 bp, Bos taurus
tcactgctggagcacttttgagttctcttgcacttcctgtgacccttaagagtgttcatactcataacataaagcatggaaagtcagaatgcattttcacrtcacctttgccaaggattggctctccctctggctgaattaaccactgattcttagtctgctctcctaagtcacaagctaatctatcctgtgatcatttca

SEQ ID NO: 34301 - DNA, 201 bp, Bos taurus
ctccgcctttgccattcaacgtcccatgggtatctttgcatttccgtctatacctagcgtgctttttgcttttgaccgtgtcctttgagctaagttttaarcaccttcaaatctttctgtttgctctaattttaaatacttgcctatcttgcttatcttgtccgtttatttatttttcttcacgtgtatagatgcgcacca

SEQ ID NO: 34302 - DNA, 201 bp, Bos taurus
cttcagaacctgtttctactctatataatcctttcctctttctccaaagcaaatgtttgctccaattttgttaatatcctatgaagattgccccctaggayttaatgcatgtgactatactattctagtggttagatataacacttacagggtattaggtttcaaagaaattaggaataaaaataacataatcatcagaga

SEQ ID NO: 34303 - DNA, 201 bp, Bos taurus
atatctacatatgaagaaatgtaacagataagactgccctgggcatatagtaatgggagaaagatggttatatatcccaacaaattgttattgaaagggamtgaatttgtaaataggcaagcggtgacctgcaaaatatgtcttagctaaaatttcatgatgaaggcaagtgggagttaccttatcctgggttccttagca

SEQ ID NO: 34304 - DNA, 201 bp, Bos taurus
cagaaaagtcaccgtgtctgcaccttaactcagatgacagatgtttgtcagtcacttacctgtgtgtcagactgtgctgaacgtgagcagggagaaaccayacagagtgaggtcactgcagttctgccaaggaagacgttacagtgtatggggtaagaaagataattaaacagagcacgacaaaagtgttggcccgttgcc

SEQ ID NO: 34305 - DNA, 201 bp, Bos taurus
taaatacagtgtgtttaaaattgttctatatctctgtttcccacctgcctccaaaatcagatcctctttctaattcatagttagaatagatttcaagacayactggcagaaaccatgagtatctttgacttcttcctcctcttctttagccctaagaatttgcaaagctatttcaaacctcttcactcttctctctgcttc

SEQ ID NO: 34306 - DNA, 201 bp, Bos taurus
ctagtgaccccatggactgcagcctaccaggctcctctgtccatggggtttgccagacaagagcaccggagtgggttgccattgccttctccaagtaccayctgggaaaccctttatttaattcagtatgtccaaagcattagcttttcaacgtgccattagtataaaatattatgaatcagctagtttgcattctttgtt

SEQ ID NO: 34307 - DNA, 201 bp, Bos taurus
ctctaaaatgagcaactttaaaaagaaaataaaaataaggtgggttgctggagaaatgggtatttattttttcaatatgttttaccaaacatatatgatcraaattctgttgtctgaatcaaatattaggctgaaaatgaagtcaggaaacagagaataacctaacagcccagaatgagcacccctttacatccatcacca

SEQ ID NO: 34308 - DNA, 201 bp, Bos taurus
aaattgaagtgtttacagtgaggccctcatgtacgtgtgaaaaccccactgtgcctgcttaaatgctccctcgaacacattttaaaatgaggtcttttttyccctctgtttcagtgtttcagccagtcattcgccccttattctgtctcagctctttgtgtagaaggtgccaaagactaaagaggcccagggaagatttac

SEQ ID NO: 34309 - DNA, 201 bp, Bos taurus
ccttggaattgggcaggcccataaacaaggctttgccatcaggtaggcccctggctgtgctcccctgttgggcaagattactggccagactctctgattamgagagccctccagctgaatcccacagtgagtgggtctagagactgtgtttcatggtcaagctgggttgttgtctaggctttcttgataagaaagccttgt

SEQ ID NO: 34310 - DNA, 201 bp, Bos taurus
tttatactacgtatttcaatgtttcctcatgtacaattaaacaattgaaaatatcaccatttcctggttctcagattaaaatctattacttccacatagargaaatgaatgcaatttaatattcaagtaaatagaagtatatttgttccagctccctcagatatgtgaacttcttttttttttttaaagtagaccttataa

SEQ ID NO: 34311 - DNA, 201 bp, Bos taurus
atctttctgagcaatttgcttagctttatctttcaaccaacataattcatgctcatgagaattcaattcatcttctaactgattgaagactctcaacctgyaaattaaaatgttattttactattagtttactacaagtgttgaactactatttcctttctttaaataagggcttccctggtgactcagacagcaaagaat

SEQ ID NO: 34312 - DNA, 201 bp, Bos taurus
taccaagaggtttttggagagagatcctagaaaagacaagcctattgaatcctgtatctagacatgttatgctagtctccagtttttgctggactgtgagmttcccaaggcctgggaaagtgttttgcaattttctttcctgtctccaaagcctagcaaagacatacagtaagcagtaaatgtgtaccataccactgaaat

SEQ ID NO: 34313 - DNA, 201 bp, Bos taurus
tcttctaaaatgtattattgttttatttttatacatggaatatttatccctctttttctccattagtttttaagccaaagcacatgccctcaataaatctmtgctttgatatcatgctctcagaaatacctgctctgcctttcataaaccttataattatgtactcagtgtctctattttccactgatctttgctcccctt

SEQ ID NO: 34314 - DNA, 201 bp, Bos taurus
acaaccagtgcaaaaaagaaatttctattagcagtgcttcataaacctgactatacttagaactgcctgtggcacgcacttaagatttaaggatggcccaygccgtcacttgggtttagttggtctaaaatgggagccagggctcgagctccccccggcccccaaccttttaaaaagttcaccatcaagtaattctaagta

SEQ ID NO: 34315 - DNA, 201 bp, Bos taurus
cacttagctatttattaaaaactattaattaaaacttcccctcaccttattcaaagttagagctgtacaagaatccctccccatattactaaaatgactcrtgtgtgagtgtatattttgagagaggagtttttttctgtgtatttttcaggattagtatcagtttaatcctccagaaggagatggaagtgaagcaaccca

SEQ ID NO: 34316 - DNA, 201 bp, Bos taurus
catactcagttcagtttagttgctcagtggtttttgactctttgcaaccccatggacagcaggacgccttttaagatttttctctttatgttttgtgttgrgggccagagtgaggcactcggcccgtggcaaaggtcatgaggaaggaggttcgacatatgcaaaggggggatcaagcctcaggagtccccctggaaatcc

SEQ ID NO: 34317 - DNA, 201 bp, Bos taurus
acaaaatgaaatgtgatataaatacaaagagataataatagttgagcataggtcttatataaactacacaaataactgaattgactaatctctctgaatawaatgttgctgttttacaggttttaaaaatctttgattttaatttttgtaatctttgattttaattttcatcacaggaaaattgttcttagaccacttctt

SEQ ID NO: 34318 - DNA, 201 bp, Bos taurus
cacagaatgtaaagattgttccaggtattaaaatcaatgaagtttgtttaaaaaaaaagaacacttctgccaaattggcagaaaaaaagtgaatgtaaaayaatcaaactaccaaactctttatcgatttaactatgagttttaaaaaaccagatattaagaaaattcagagttcaaaaaatcgtgaccatgttttattga

SEQ ID NO: 34319 - DNA, 201 bp, Bos taurus
atctttttttccaggatcctttagacttttgtggagtgaactgggcagggcatattttccgtaagacaaatgtattggctcaattgtggctcaggttaagrtatcattatcttccttcaggccactatgttagacatttccaaaaggaatatgtattccatgtgtgactaattcatttctaattaagattattaaatcact

SEQ ID NO: 34320 - DNA, 201 bp, Bos taurus
aataaaacatcatttctggacaagaagacttactgttataaaggtatctattatcctcaaattgattgaagagttggacttgttgactgaacaacatcctmgaattaatatttaatctgcaattccataaatcaaaattccagttgattttttgagggattcagtaaacctacaattaaaggcaaagtgaaagaattaaag

SEQ ID NO: 34321 - DNA, 201 bp, Bos taurus
ggataggtactttgaattacatcttcaaagatgcagtggtgttaaataggacaggggagcagggtgggcagtgtcatgccagtggagagaattccagatarcaggagacttggaacagttaatgctgccctcctatgaaatgagcaaaagatttgcttttttttccttcaggataacatttgtgatgaccaaagggaaagg

SEQ ID NO: 34322 - DNA, 201 bp, Bos taurus
cattctttgggatttttgtactcttgttaggcagcagaaataatgaataatattctttgaactgagaaagacctttgagactgataaacaaagcagcaatrccatatagtgcaattatgaagtttattgtagataactcacttacagacaggattgggcagatgaagatctaaaggcatttgtagctacacttcacattgc

SEQ ID NO: 34323 - DNA, 201 bp, Bos taurus
attatctctaaacatattagactcctcaaaatgtattcttagaaaggataaattgatgaattactattctcagaggcaacatgacacttgattcttgattrtctcttccagatgcagagtcaactgagaattaactacttgagtgtgaagaaggaaatatccaggtctcctttccatccaataatctccattccattgaaa

SEQ ID NO: 34324 - DNA, 201 bp, Bos taurus
aagatcacaaaactatctaatggaagcacttcaacaactcctttgtcctacttgatacgtcattctgcttttttatgtacttgatagaggcactcattttycttcaatactttaactggtgtctgttgaactatcctacaatttcaagttttcaaaggagagcatgtgatattaaataagaaattatggctaaattatctt

SEQ ID NO: 34325 - DNA, 201 bp, Bos taurus
aacttgatgactacttccatgatataactgtaggttatattttatcagttaaggttctgatatctagatgtatattttaaagctgaccaaaaaaaattctyatgttaagcaatggcataaattctaagcagaaatatgcttgatcactataaaaatgtattaagaacaaaaataaattgtagatatgttttcataacataa

SEQ ID NO: 34326 - DNA, 201 bp, Bos taurus
ttgatgcaatcatcaataaaactttgtccacaataagtttatgtgaaaaaattatattacaccacagtagaaattatattttaagatttcaactgcaattmtatttctttcttggcaaattaatgctgaaatttcttatggaaatatgaatggagtttgaaaaccaattcaacattttcaactcgactattccaaatgtct

SEQ ID NO: 34327 - DNA, 201 bp, Bos taurus
cacacaggaccatctccatgtcactccagtggccatcttcaactcctcatcttcatctaacccagacaatctacaatattcattaccactcttggccaggrattagggagtaagtgcttagaaaatagtggttctgaaaaattaccatctattggatatgctttgtggttatcttaaattggtgcaattttctaggccttc

SEQ ID NO: 34328 - DNA, 201 bp, Bos taurus
tttctaacatttgaaattactgggtactaaatataaatatatatgtaccatacatacatacatcaattttacaatttttttcgtttctctatagtccgagrgaagccacgggacttccctggtggcccagacagtaaagaatctgcctacagtgcaggagacccaggttcaatccctgggttgggaagatctcctggagaa

SEQ ID NO: 34329 - DNA, 201 bp, Bos taurus
gttgaggctcagggaaacagactccccaagcatatacagagggcctgtgagctctctgcaccaaggaatggatccacacctcagcctgaccatcttagacracatctgaagacacggggcccaggacccaggctctccacaaacagaagtagaaggaaatgggcatttccatagagcgggtatttccctaaactccaacac

SEQ ID NO: 34330 - DNA, 201 bp, Bos taurus
tttttctgatatttagttttcattatttattcttcatcgcttcaactcttagctctttaggaaagactgtgttttttgcttttctctgaattcttagggartttagtcccatatcttctgagtactgtgtgtacataaaatgatactgttatcccccaatctaaacttctctttcttctaaaacttacttttagatctcct

SEQ ID NO: 34331 - DNA, 201 bp, Bos taurus
aacatatgcggccgtgtccctgaaggggctgccttgtttggtctcagcatccatggagctagaaaagcttacccggcagcagtctcttgcaatatgtcgtmtataaaaaggaaactattttcttagttccacatagacattgtctagtattttttaatagctgttttctaacaattatcttaaagttttgaaaaacaagta

SEQ ID NO: 34332 - DNA, 201 bp, Bos taurus
tctctccacatcctaaggccctgagcttgtacactgagctggaggctgaactgaagtaaggtttctcctctaggggatgagttaaaaataattcactgtgytcaggcccagcagtctttagggagagacatctgtactgactgcagattcaaacatcacagaggaagtgacccttccatcatcagggattgactggtttcc

SEQ ID NO: 34333 - DNA, 201 bp, Bos taurus
ggacagggaggcctggcgtgctgccattcatggggtcgcaaagagtcggacacgactgagcggctgatctgatctgattcgctgatcttaagagaatagtyccaaggaggcccaataaaatcacgtgaatctttaaaagtagaaaaaggagggagaagagagagtaagccagagagagattaagcagaggaggaatgcaga

SEQ ID NO: 34334 - DNA, 201 bp, Bos taurus
tgagggttccatgtacctcctaaaatagtgtgcaaacctttatacttgcagtttctagggtgtggtctagacatatttttaatctaacattctatgcaccrttgccgcaggaacatcctgacaatatcaggatgcatcaatatttattctaacatcacatctggtacatttggatcagctgaggtttgaagcaatgtttta

SEQ ID NO: 34335 - DNA, 201 bp, Bos taurus
agacacacacatgcaagaagaaacaccagacaagacacgcatagaggaaagatcatgacagacacagcaagaagccagccaccaaggagacaggcctcttkgaggaaccaaccctgccacaccttggtcttcagcttctcgcctccagacttcgagaaaataaatttctgtcatttaagccaccaagtctgtattttatga

SEQ ID NO: 34336 - DNA, 201 bp, Bos taurus
cagattttttgccactgcgccagctgggaagcccaaagctgctagtgagcaccctacgactcctgctttggtttccttccctgggcctccctggcttaccrcaatagctccttcctttcccacagcctcttcctgacctcaactctcaatgcccacatccactcttcttccaccagcctcctggctgaacaagcctctgtc

SEQ ID NO: 34337 - DNA, 201 bp, Bos taurus
ccttgcactgcagccagacccagtgaccctggactgcagggcaggggttccctgtgtccttccctctggctttaatgccagcatccttgtagagtggagcygggccactgtgcttcattattgcctccaaagcaaaggtgttccacatcatccactctcctctgtagccacagaatcacggaatgatcttcggcctggaaa

SEQ ID NO: 34338 - DNA, 201 bp, Bos taurus
aatgtttagtaactaagtgtacatagttaaacaactagagagctgacatccagtaagtttggtgtgatatttggtttgtataatattatttcagcatactrttaaatcatgcagaattctttctggaaaagtattcaagaggatgccagaaaggccatgttaataataagtttctgtacttcagtagattttgagtgtgtt

SEQ ID NO: 34339 - DNA, 201 bp, Bos taurus
aaccacatgtggctaatagccaccataattaggcagtgcagttctagattatggatcctgtgtagtcatgtttttactccaaagtggatttggtgaaaatrataatgtgcttatttacattaaggcattcaagttcttggcatataaatcattgatttgcagtgcattctaaactagcatttaaatgtaactcattcgtac

SEQ ID NO: 34340 - DNA, 201 bp, Bos taurus
ggccttccttctctctaaattgtttctcattcatccttttgcttttatatcagcatgtattgttggtaatataatattctttagactaacagatccccccmaaacctcattttattaaagcagccgttttattatctctcactgtttctttgggtcacgaattcaggaagggtgaggttttggctaggcatctctcatgtg

SEQ ID NO: 34341 - DNA, 201 bp, Bos taurus
gaaagtagctcgatgtaatgtgcctgatatggattactgtctcatattctcttctccacccatcccccatacccactcccagcattaaggttaccattctraacagaaaaaaatatgtttaaggaattgtagcatacagtcaaatttatattattttataaaaatactgctgttgtgcagaggtagtgtgtcattggaaac

SEQ ID NO: 34342 - DNA, 201 bp, Bos taurus
tgcaagacccatgtaactaaaagcacccatgtctgtgtgtgttgagtgttcagttttaggggttacagtgtcagtctgggacttctgtatcataaggccayactgttaaaatcagtatttatatttttgctttgttctatttgcataaaggctgggttttttttaaagtttttttggccatctgactatgtacaagcagac

SEQ ID NO: 34343 - DNA, 201 bp, Bos taurus
cattactgggctccagcatcacagctgtctatggttaggggggaaaggattcagcttggtggtctaatttaaacaagcgtttgaaaatagaaatgtatatkttatatgttcattcagtgccattaaacattttctaggtttttacttagtgtttcatttctcattcctcttctgattgatgtttttatatttagaaaaaga

SEQ ID NO: 34344 - DNA, 201 bp, Bos taurus
tggaggcttaactcagggatactttgcttctagtctcattcagactgtttggaagaatttgtttctagtgtttgtagaagtgaggccctgaagttccagargctgccttgtccttgccgtgcagctcagttcccatcatagaagcttacttcgtcaaggccatcgggagcatccttcagctcaaagaaggcctaagccatt

SEQ ID NO: 34345 - DNA, 201 bp, Bos taurus
ctcagcagagcatgtgggcgacccgcaacgatatgccttatccctaccagaacaggcaaggccctggcggccccacgcaggccccgccttaccccggcatraaccgcaccgatgacatgatggtccctgatcagaggataaaccacgagagccagtggccttcccacgtcagccagcgtcagccttacatgtcctcgtcag

SEQ ID NO: 34346 - DNA, 201 bp, Bos taurus
cagcaacaggaatggtgtaagaaaggccgaatcagggagaaagaaggtcaggtctgaagtgcaatagagcaagaggactgagaggctagcagatgcagggrcactatgggccgtcctgggagcgtgtgagttaccagacacagggagatgcgtggagctgataaatgtctcaagccctgcaggtgcaacatcatcttccag

SEQ ID NO: 34347 - DNA, 201 bp, Bos taurus
ggggagatttctgggacccctggagtgggtagcacatcccttctctgtaagttacattctctgtccagattgtcagcatcatctggccctccaacttcccygtcccattggctgggtctccccatcattgccctggctcagaaatagagagccgtgtccagcccactgtggccagtgggcccaggtctcacatcctaagcc

SEQ ID NO: 34348 - DNA, 201 bp, Bos taurus
gccagcccctgcctcactcagtccctgggaggcacacgtgtgtcggctcacccaggctgagctcctgccgctccatttctcgccttcaaccctccaggaargatgctgtgtgcggccagcgtcgcaagcagacagaaatcactgttttcgatgtccctctgttagacgctcgttcttggtgtctggatgctgaagtgtcct

SEQ ID NO: 34349 - DNA, 201 bp, Bos taurus
gtcatgaggggagacatctcactctgttctgtttctcaccagattgcgcaaaagctgaggcaggccctcggccgcttcccggtgatgtaggacaggtggaktgaacgtggagaaacgccgaagtgcttccttctgacttgggacaacgcaattggatttttttttccaccatcgtccaaaaagaaacaaaaaagaaaacca

SEQ ID NO: 34350 - DNA, 201 bp, Bos taurus
ccactgccccaccctgctcacccagactgcctctgtgtgggtatggccctcctggttctggtgtagatgtctttttggtctgtgacccatttcttgccctygcctacacctcacctgactctggccagcatcctctgacccaggcatggtcttgctgctgctggagccctggaaccagagagttggagctgaaagggatgg

SEQ ID NO: 34351 - DNA, 201 bp, Bos taurus
tttgactatcccattctacaaatggccatcattttcaaaatggtaaacataagcttaacatgacttagcaattccactcctagtatatacacaagagaatrtaaaacatctccacaaaaaaacttgtacatgaatgttcacagcagcattattcataatagccccaacatggaaaggacctaaatgtccatcaactgatga

SEQ ID NO: 34352 - DNA, 201 bp, Bos taurus
tcttttaaagtttttgaaaatattgtttacacatgttaatatttcctgaattattctccttctttgatgtctctggcccttcatttcacatcagagatcaygagcttgccgatgtgtgcggcgtgcgcagacgtctccttaccgtgccagtgacgggcctccgacatctcctggacggcctgcagtcgggctgctctgtca

SEQ ID NO: 34353 - DNA, 201 bp, Bos taurus
acctcccccaaaccacaactctattctccccacccagacaacctctcaggtcactccaattctgtcctgagttgcccatggtaaggggacacgttatttayatgcctgtcgcaggtaacaccatgtgtggtgtttgtcacagggtggggggttcaggctgtctctgtgactcttgatgtatcatgtttttttgtggtttta

SEQ ID NO: 34354 - DNA, 201 bp, Bos taurus
ccagcgacattgaactgagtgatgactgggctgccaagaagtctcccaaaatctcccgagctagcaaatcacccaaactcccaaggtaacctggatgtgcrggagtgtgctccctgctgtgtgtctctggagatgtgtcaggtgtgtctgcggcagagtcccactgaaatcgacagctgaggggcacaggcagcaaaggca

SEQ ID NO: 34355 - DNA, 201 bp, Bos taurus
cattgaaaggacatcttattactaaggaattcatgtaaatttgataacaaaatggcattatagaaagtacactaattagatctgcattttctgcttttcaytgccatgttttatcaattcaataccatcttggttggggaaagaaacagatcaaaggtgctgtgtgtctagtgtcactgatggaaaaagtaagtaggagga

SEQ ID NO: 34356 - DNA, 201 bp, Bos taurus
ataaatggtatttgcaaaattatgaggccttccctggagtcaaagccttcagaactgactgtataggcactgcgtgagatgaaaggagctggggttatggrggatatccatatggggatatccggtccatatttctttctactctccaatgttgtttctcagtaaacattctaaaatctttgtaacacacctcttattagt

SEQ ID NO: 34357 - DNA, 201 bp, Bos taurus
tcaactgtttgctggttccaaaaccggggtgaccacgtgggcagggcagcccttcacgtcctgagccccctttctgtccctggaaggccttgatttttccrtggtgtgcaccctccagtgaccccgagtcactcccccacctctcctctccgcagagcaagtgtgtgggccccgtgacccccagaaacaggtctccccaga

SEQ ID NO: 34358 - DNA, 201 bp, Bos taurus
aaatgatggatttttatccaacaatataattgcctatggctctccaaacagaggtttcacaatgtttggctccggcatcatagcaatagagaaaataaaamttatcatacggatttcatgtattcattcattcaactatttattaagtctatctataaggcggtgtcgtgggttctggggacccatgctaaatgttaaagc

SEQ ID NO: 34359 - DNA, 201 bp, Bos taurus
gagttggtgatggacagggaggcctagcatgctgcagtccatggggtcacaaagagttggacaggactgagccactgaactgaactgaactgataatggtyaactataaaggaaaaacaggcccgtttactggatgtaagacattttcattacctcctgcagcccccaagccctggtctcaatcctggtcaatctcgtagt

SEQ ID NO: 34360 - DNA, 201 bp, Bos taurus
tcaagatcaaagaatctttataaagtgaaatgagttaaaaatgaacctcacaataaacctctctacatcctagacaaatactgtatgtatgtcaaagccaygaaactaaatcattcagcctctacctttacagaccttacactttaagacgtattaatacatagttagaaaatgtggtaagccccaggaagacaaactgca

SEQ ID NO: 34361 - DNA, 201 bp, Bos taurus
agcttaagaaatccaccctctccctgcccccatctctgtcttccctgcaccctgacagcggggagcagtggagccttttggtgccctggtatctgggcctygcctccttcatttcttttactcctcaccacctaaccaccctccttggtgtagaggggttccgcggcagcccaggccctcctgaccccatggctcctactt

SEQ ID NO: 34362 - DNA, 201 bp, Bos taurus
tcttttaaatcagagcctgcgtgcttaaggggatgggagcccactccagcattcctgcgtacagaatcccatggacagaggagcctggcgggccacaatcygtggggtcatgtgcaattcttcccacgtacgtgtgtgcgggaataaacacgtggtgtgcacgtgaagagctcttccaggagctgactggccactggatgt

SEQ ID NO: 34363 - DNA, 201 bp, Bos taurus
cacgattttactcaagtttgaatcgtccttatcagaacctcccgtctctgacagtgagctgcctgggctgatcccagggcagagttcccttcagtcctccrggacttctcgcctcaccctttggggctctgagccccaggccagggcccctcgacggatcctcctttccacagggcctccagcaccccttgctgggcagcc

SEQ ID NO: 34364 - DNA, 201 bp, Bos taurus
gtaccactccccgcccccctaaccctggagataccagagcatccattgtctggatggtgctcacgtgaagtcggtgggcccgctcccagttgcgatcaagrctccccaccttgagcacagcgcacgccctctcatcattctctctgcttgacagcgtcatgtctcggccgcctttcccagtggtggcatatgcccctcgga

SEQ ID NO: 34365 - DNA, 201 bp, Bos taurus
gatgtcacagaattcccagcgcttttgggggtcggtggtgaaacaccatgggcggggctccccatcaggattacggcagtagttcatcttcagattcttgyttggaaatctgaaggtgcaagaaggactttaacagcaccgaacatttaccttcacagatgagaatcatttcaaatgagcaaatactgagcaccgctgtgt

SEQ ID NO: 34366 - DNA, 201 bp, Bos taurus
aacccccagccggggtggggtgtcccaaatgctgacatgtaagacacactgtatgttttctaactgtgagatctgtcccacttaaaggatggccctgttcrcacagctgataccttcctgttttagagaatgctgaaatggcaaaagcagcttcctttttattggcgtccctgctggaacaaagtgttggcccagagtccg

SEQ ID NO: 34367 - DNA, 201 bp, Bos taurus
agacagctgagggaccagacgctgtctgagcatctctggagttttcatgagtacagcccagtacaagggaggggagggtggtatgaaggccacttcactcrcagatgaaacagccggaggatacacggaggtggctgagagctgtctgccccagggcaggagactggggccccagtgccccgcctccactcagctttcctc

SEQ ID NO: 34368 - DNA, 201 bp, Bos taurus
tcgactgactgtgagtatgtaaagaacacgctgggctcagaaggcaagacctatggtcgaactgcgggacactgggcctccgtaaaaacctgggggatcgmggctaaccagctcaccagcacataccccaaagggtccaggaaaggagtcctaagggagacccactcagtgtcagaaccatcctcctggactctcaccgta

SEQ ID NO: 34369 - DNA, 201 bp, Bos taurus
agagtcagacacggctgaggcgacttagcacacacgcacgtcctcgtgagaatgaggaagctgatttatagaaaaagcaacttggctgcctcagaaacggygacattttcagactgtgacagaatacttccacttgagctcaaaaatacgtttttcttggaaggggcctttttgctttttcttttcaacgttcataagaca

SEQ ID NO: 34370 - DNA, 201 bp, Bos taurus
agggaaggtgggactcaaagtcaggctgggccgggttaggtttgccctgggggagccttcaaggatttactgttagcttcattcattcagtgcttaaaagrtgaaataccgaggccctcccctgtcagcatcctggggccactgaaaggcaaggcaggtgaggaggaaggctgagtgcctttctccggatccaagcagcac

SEQ ID NO: 34371 - DNA, 201 bp, Bos taurus
catgtacacactgctatatttaaaatagataaccaacaaggacctgatgtaaaaaacaacaacaataacaataaaaggcttcgagaagcacattctctttrcttgcaaggtcaggctttttagatgagagttctcatacttgcaacattcatttcttcattttacttctgacatcttactggtgggtttccttccacccta

SEQ ID NO: 34372 - DNA, 201 bp, Bos taurus
ctgttgttccagataacctttctgatcaagaggtggaaattcagtgaccgtcgaaaaggatgtaaaagaaccttttccctctcgctcagtatttacaacgrattaggctggcctagtaaactacaggaaataaatctgctgaacagttcccttttctgattgctagctaggttaacatgctttcataaacaaataaatacc

SEQ ID NO: 34373 - DNA, 201 bp, Bos taurus
ctgatagaaaatatcttacggtttgaggcctacagtctctgtggcaactactcaactaccgctgtggctcaaaatcagctgcagaaacctgaaacaaacgygtggggccgcatccttccaaaccttgtttatgggcactgaaaatggaattttctacataggcacacctcgttttgtcatgctttgctttactgcacttcg

SEQ ID NO: 34374 - DNA, 201 bp, Bos taurus
tttatttattactttgctatgatctgaatgtttgtcttttcctcaaattcatatgttgaagcataatcctcgctgtgatggtatgtggagcggcggccttyagaatgtgatatggtcacgagagcaggaccctgaggaatagggttagtgcctgtattaaaagacaccacagagctctttgccttggccaccacaggaaga

SEQ ID NO: 34375 - DNA, 201 bp, Bos taurus
gacagtgatcctactgcacacttaaaatatttttaaatgccttaggaaccatggagcaagcagtgttaaaaataataatgtaccaactaaagatatttagygctctgctaagacaggaggcgatgcagcagaatgagaaaatctgcagattgtgtccacaccatgcgtgttcaagctggagccccacctcacacggggtct

SEQ ID NO: 34376 - DNA, 201 bp, Bos taurus
aggagcctggtgagctctagtccaaaaggtcgcaaagggtcagacacaactcagcaactgtgcacatgcgctaagagagcacggctgaaccattctggccrgaacgctcttcacagctactcacctacagcagcagcttcccacccaaggggcaaatgtgtcacccagggtctccaggttggaggccagagggcagaaggt

SEQ ID NO: 34377 - DNA, 201 bp, Bos taurus
tgaggaaggagagagaaaattcacaaaggaaaatcctagagagatgctcagagacagcacaacagaggtctgcagcggccccttcctgtccagctacactygtgaggggaaactgtccaagggactgaagcaccacttggaggaactagagaacacagtgaccagggcccacacggggccaggagtagctcctcctcccac

SEQ ID NO: 34378 - DNA, 201 bp, Bos taurus
cacgtctctctgtggccgggaaaatctctggctaaaggtttggctgcagccagtgccaaaaggctccggttttcaagcagttcattatttcttaattgccratttgcatgcaagcctccaggccagggacatcagtaagcatcccggaaacgtgcccctgtggactctgggacactcacatttattgactgcccactgtgt

SEQ ID NO: 34379 - DNA, 201 bp, Bos taurus
taactgactctttttgtttattttatagtggtatttattatatcctctggattttccagatatttttattttgtacacgtaagaactcccaacttttcagygtgataatattatagcagtttaagtggcacccaaataatttctaacaatcactccaaggctataataatttaaatatctatttaacttcaaagcaaatca

SEQ ID NO: 34380 - DNA, 201 bp, Bos taurus
cttgcccggtccagcagccaggccgcggccggggtccacgctccggctgcagccgcccccaggagccacgcggctggggcaatcccccgttctccaggccrggacattttaacagcacaccgctcctccctgccctcagttacagttcgccctgcaccccagggctaaccggaacagaaagcgcctggcacagggaaggcc

SEQ ID NO: 34381 - DNA, 201 bp, Bos taurus
tctgtaagatctttgggctttttgcatctgtggtggggggaccactgaagaactgtgggcagaaaaattatcttcaaagatttgaaaaggcagaacagagyagctattgtcaaatggtgtaaccataagggatttgatacataggaaatgaatactgtctatcactgttctttaactctgatgtggttcatctagactgta

SEQ ID NO: 34382 - DNA, 201 bp, Bos taurus
tgttacttcctcgaagaaacaggctgttctcctgggatgtcttctcactggatgttccaaggacttgactccaagatctgccctgtaactgactatggttygtatagttttttgggccttaattttcccatctctgaagctggaatttttttcttgtttattaacaatagcaacaatggaattatggttctgtgaagcctt

SEQ ID NO: 34383 - DNA, 201 bp, Bos taurus
ccagcggcaggcaggggcgtctgtgtagggctctgtcgtccaaacagaagtgctgacggcccacccgggcatgcctgggagacaccaggaggtgggttccrgaccgccaccacaagacaactatagcaataaggcaagtgacatgaattttttttttatggtttcccggtgcataaaaaattatgtttacactataccata

SEQ ID NO: 34384 - DNA, 201 bp, Bos taurus
ctattgtcaaggcaacttagacccgagcgtttactgttggccacacatagacaccgtggggatgacttatttggaaaaggcccaggtggcttgctgcattycagtcttcctcctctctcctcctttccctgggttgagggagcatggagtcccactctttaattcaaaagcctttccagtgcggctcacctacctccatgc

SEQ ID NO: 34385 - DNA, 201 bp, Bos taurus
ccttgcattacatcagggtccattcactggattgatggatactcccatgaccacccctaacttgcaaagggtcagcctcatactgaagatgcatcacatcmatggaccccactgcggccgttttcatcgcctccaccgggtggcttcgcttaaacagccaaagggaactcagatgtgctggcccgatttaggataagggga

SEQ ID NO: 34386 - DNA, 201 bp, Bos taurus
cctcatccaagtggagggtaatgcatttttgattgattctttaaggttttttttttttttccccccaaaattcccaaatttttgtgtgtgcagacctgccytcctactatgactaattcaaaatggccataataggttacaactgaagcaaagttgacatgagttgaagcagtcagactaaataatggggaaaacatttga

SEQ ID NO: 34387 - DNA, 201 bp, Bos taurus
ttgagtagtatcagtacagaaaaggacgtagggattatcaaattctaacactttgcttttcagatgagtaaacaatagtctataaaagccaggtcacagcrcaagctatcacaaggctatgacagaagcaggagtggaggtgtcttctcagctctggtccaggctcttccaccacttatcctggttttgcacaatttgggg

SEQ ID NO: 34388 - DNA, 201 bp, Bos taurus
agcagattattaatagaaactggagtcataaaaccatgatgtgaaggaatagatgaggatttaattaaatgggaagtcaaaactcagctagagttctccckgagggtcagtggtaaagaatccacctgccaatgcaggagacacaggacacccagattcgattcctgggtcaggaagatccccaggaggagtaaatggcaa

SEQ ID NO: 34389 - DNA, 201 bp, Bos taurus
aagtgaaggtggtgatttactgcccattaaaaggtgctaataagcagaaaggaaaaagcctctgcccagcgctgccttggcccctcagccccggctctccrgtgtgggtgcgggaagctaatgaaccttttatattgccagtcataaaaagggccaatggctctccatgcagtaatggactctacagtgaaacctgcctaa

SEQ ID NO: 34390 - DNA, 201 bp, Bos taurus
cgttgcattagcactgagctaggaaggtgctcaaattaattgtgagtgaaaaatccatgcttgagactcataaaatgcaggaaatgacttgctttatactrggggaaaggcagagtcataaactggcaagaagagggagagataagtcatcaaagggcagtagcaatgccaaagtgcgtaattggagagaatctgtccccg

SEQ ID NO: 34391 - DNA, 201 bp, Bos taurus
ttcaccgggtggccccaggctccgagctgtgggcagcttttgttccttcatgaagcaccaggcacagatgagtaacaactgatctgaagtgaatcgggtgrggccatgttcacagcaaccccgacctgtcaactagctgctgaaactctgggttgcgtgtcgcctccagcactacgcaaaaggggccagcctgctggctct

SEQ ID NO: 34392 - DNA, 201 bp, Bos taurus
atggcaaatgcacacagatgtgaactcaccacccactcctgcactaagggagacatttctactgaagcacagaagtctgactcacctaccaaatccctctmaagacaggtctccagacagcctcgcccacaggataggcgttgatgttccagacggaactaggagtccccccgggacgtggttctcctccaggacttctcc

SEQ ID NO: 34393 - DNA, 201 bp, Bos taurus
tgataattctttgttatgagcggtgggttagagaaatggtcagttctgatggacacattcaactattaaagggagaatattttcattaatgtattagcttrcacctgtccagttttaagctaaggtcagcatagtgagatattcctgccgtgacagaacatcatggtttataaagactgtgcacacaccgccatacttgat

SEQ ID NO: 34394 - DNA, 201 bp, Bos taurus
aggcccgcagcggcggcaatgaacagggcttaccacgcaggggagaggcgcgctgaactcacagacagaagattccgggacatgtgaggtgtctgcgggcrtctggggggctcagggccgagggaaggggcacacacctgtgccccagctgtgtggagacgttgtacaatgatttcactggaggaggaaatgcctgagctg

SEQ ID NO: 34395 - DNA, 201 bp, Bos taurus
tgtagaagaataaacagtgaacacttccagaagaaacgcatcctccccaaaccgccgggcagccaggcagacccttcccgcggggccgagggcgccgcgcrcgcggatccccgacttccgggagagtaacaggtgttagcgaagccagccgcgtcggcctggaggtttcggaagaccgggctatgcggctcggccgtttcg

SEQ ID NO: 34396 - DNA, 201 bp, Bos taurus
agttatccagtgggagctgcccacggccctggcatttccacaggccagagctgagccagtgaccgccgtcgtagtcaacaaggctggagagcacttttctrgagccagacctcaggggccagcgcttccgtaggaccacgaaggagcggggaccactgagcagcacgggcagaagacctgggcactgcgcgctggaaaaag

SEQ ID NO: 34397 - DNA, 201 bp, Bos taurus
ataatactccactgtatggacataccgtactttatttatccaccagtggatggatattgggcatttgtccactttttgtctactgtgaattgaccgatgckgctatgaacattcatgtacaagtttttgtgtagacatatgttttcatttctgttggttatatacaaaggattggaatagttgagtcatatgctaactctg

SEQ ID NO: 34398 - DNA, 201 bp, Bos taurus
cctcttcttccagaaaggactgaaagcctatcaggtgacatcaagacacggaaccaagcgaaacgctcgaggatggaaaacctccgtgtgtgttagcagartgctttcagacgggccacagcagggctgctgctgtggtccaagggtcatcggcacgtgctgcgggtggaactgcgtcccttccaaaaatgtactgaaggc

SEQ ID NO: 34399 - DNA, 201 bp, Bos taurus
agaagggaacgtgcatacgcctagagaagggcaagaccagccaacacagtccggacaggcctcccagcacccagggcccagacaggcctcctcttgtctakgtctaaagactgtactgatggaagacatttttcatgctgctgtgaggggatgactgtgagtcagacaacaaggaagactaccacgtacttggggccagag

SEQ ID NO: 34400 - DNA, 201 bp, Bos taurus
ggcaccggctgagacgtgtgtggagggtgtggaccctccccgatacagagccaccctcggctggacacgctgcgggcttctctggccggcctgagcacatmtaaggcagagctgtgggtgcagcaatgggcactctctcctgctggatcaaggactttctctccctcctgctctcccagaagggcccgcctgctcctccag

SEQ ID NO: 34401 - DNA, 201 bp, Bos taurus
caaaaaagtcctgagaaaaacccttgtgaagtggctttgaataaaaccactacttacagtctggtacctgatggcttaggttcaaatcttggccctgacaygtcccagcttggggacctgtgaagacaggaatttccttctcccctccctgcctgggactgtctacagggccgggacagtaactgaatgtgggatgcaggc

SEQ ID NO: 34402 - DNA, 201 bp, Bos taurus
gctggggcctttggtgaccagcccccgccctgatggagggacagaagcacccagcaccgaacagcagggagcaagccacctcaccatcaggaggggagcckaggccgccagcaacaaccctccccagtttctgcttttgctcagaaggtcgagagagaaacacaccgtggccaaccctagaagcaagcagcagcccgggtg

SEQ ID NO: 34403 - DNA, 201 bp, Bos taurus
cagagggctgatcgcagtaggccagaagagaggagcgggcgggcagacagacggacggagccctgaaggtgctgcgggagtggggaatagtaatgggatgygtcgggggaaagtcatcaggcctggctctcggggaagctgtctatccgagggcagatggcacagtgatgctgccaggcgctgcctctgatcagacatgtg

SEQ ID NO: 34404 - DNA, 201 bp, Bos taurus
gccccctgcctgcccacctccccctccaccctctctcgggcgtcttcagatgcccagggccctccaggtgcagctcagcgggcagaggccccgcctctccrtgcagccaggtgcctgcactctgactctgcacatgaattcattcgggttcatctcctgaaatgctcccaggcgggccatcccaccgctccgtcctctgag

SEQ ID NO: 34405 - DNA, 201 bp, Bos taurus
tcttggcatcctgagaggcaaagagaagggcccgcttgagtagccccgagtcgccacggaggggagtgttggaaacagaaacgctgggtctccgtctgagyagctgcggggccagcaattactctgtttcaagagacttgctctcactttcgcccacagttaagagtcaagtggtcacgcgcagattccgaatctctgtcc

SEQ ID NO: 34406 - DNA, 201 bp, Bos taurus
ctgagtgttgtcttgcccacccacccgcgctggccatgtttctgcccagaggagaccatctgagaggaggacagaggccctgagggcgtctctgcaccccrtcacaccttcctgttccccagctctcagtggggctccagcagttccagggccctctgctctgcaaacgctgtggcttgagtgcagcctgcaaacagggag

SEQ ID NO: 34407 - DNA, 201 bp, Bos taurus
gagatagtgctcccgctcgaggatgataacgctgagcagcgaggtgccagtgccaggagatgaagagggtccatttcggagaattctcctccaaggctccrggccttggctatctcctaacgtaaacacggactcttaaaaatgtgaagaatctgcttaatgtgtaaaccgaggtgatgggggcgtaggcctttccatttg

SEQ ID NO: 34408 - DNA, 201 bp, Bos taurus
gggtggggcaggctccttggagaccaggctcctccttgtaggagcaccttccttttcacttctgtggcttggttttgcagcttggccagagttatgaaaakattctactaatccccagctgtattcatgcttttattctgcagaaacatgggcagggaagcaggcgcctgtgctcagaatgtgtatggaggccgtgcaggg

SEQ ID NO: 34409 - DNA, 201 bp, Bos taurus
gaacctcattcactgcaacatctttttcttttatttctcctcaaagtatgtttcaggcttctttccttaggaaaacaaatctttctttgacccaatcatcmgtttaaataatctctcagttttcctttgccacggcaaactcctcaaaggggacctctctctgagcagtcttgctcagaagatacagtgccttacctttct

SEQ ID NO: 34410 - DNA, 201 bp, Bos taurus
tgcagtctggactttatcagatcagaggcagacccgttcccggagccgatctctcccagcccagaggtttctgccctccaggcggccctctgccagacccstgctttagtgctgtggatgctgagaccacgctgcatcattgcgtgcattttcctcctctctttccccttccgtccctctcagccaaccaacagtcaggcc

SEQ ID NO: 34411 - DNA, 201 bp, Bos taurus
gagtttccatgcccacggccgggcaggtccctccccccgacctcctagcgagcctcctgccagcgttatcacctcgtcactgtcattaggacgtttgctcracctgtcctccaaggacccagggccctgtggtttcctcaattcagcgtatgtcatcaggggaatattagaccatctgccaaccagtaggcaagagcagca

SEQ ID NO: 34412 - DNA, 201 bp, Bos taurus
agcctctcgaggcccttccccgggtctggcctcgtcctcctccatgtgcgcacaccctcctgttcaccacccaaatcaagctggatcttcgcctccacccrtaccctcgggaggcctttcctgcacccgaggcttcaaacatgctgtccctctgtccatctccccctgcagcccccacggttcccccctaactgaggccgc

SEQ ID NO: 34413 - DNA, 201 bp, Bos taurus
tccttgccctctgcctgacatgagggggtggtcctcccaggccgtactcacacctgtccagccgcacccagcagcccacactgagccaggtgcgccctcaygggagcgtcggcaccgggcccctggcgtccccggactagacagccacaatggacgggaaacactctcagtctaaagcgcaaacacagaccctgccagcga

SEQ ID NO: 34414 - DNA, 201 bp, Bos taurus
ttggggccctgcctgagctcatctgcgtgggcccctctgcctgcaggggggacccccacgacctttgctccttctgtccagcttgtcccccggggcactcrggcccactcggctggctcccctggtgcagagatgcccctcaggacttgagatggagcacgccggctcctctgcagtggcctcatgctgggctggccgctc

SEQ ID NO: 34415 - DNA, 201 bp, Bos taurus
ctcaaaagagccaagtacaaactacagtaattccactaggcttaactgaagtccccttcatactgtactctcctccttgtctcctgctgtgcacatttacytgactctgctttggggatttgtttgtttcccttgcaatagtcttggctgcctttcttttgctttgccatatgttgttcttcatcataccgtctttgaatt

SEQ ID NO: 34416 - DNA, 201 bp, Bos taurus
aagattaccagggccaagtgtcaggaatcataagcaagagaagccagggacagagctgaggatcttgctaacatgtgggttctgattcagtaggtttgggrtgaggcctgagactgcattcctaacaagactccggacactgcctttggtccagggaccacacttggaagaacaaggttctaaattcaggtctgctgttga

SEQ ID NO: 34417 - DNA, 201 bp, Bos taurus
tactgagcttagaatcaatttcgtcttctcccttggccaactgttcttatgcagtctgacccccgcacgtcttccagcatcaaattgtcccactcttcccrgacctttctgggctccaggcctactttccagttcttagatagattctttctgattttcaacctgccacggcttgtcccagccctggaccacggttccacc

SEQ ID NO: 34418 - DNA, 201 bp, Bos taurus
ccccgttctcatcaagcagggttctgctcaggtgccactttctctgaaggctctctcctaatctgaattaagcctgcatttcattgcaggagtttctgtaygttcctgcccacctcaccctgggagcaatatcagaagatgatgagggcgtgagtcttggtcatagataactcttgcttcaggtctcgcttccatgtgtta

SEQ ID NO: 34419 - DNA, 201 bp, Bos taurus
acagtcacccatgggggccctaaggctcccagtaacacttttcttaaggtccttcctgctacctcatcatcaaaacacataatggagagttgacaggagcrgggccagatcaggtagggccttacagatcatcataaggagtttggattttaatttgtataagaagggaaacaactggaggatgtagaggagagtaagctg

SEQ ID NO: 34420 - DNA, 201 bp, Bos taurus
accctcgatccaactctcctgaagccagattcagacctcacattcctaattatatgtgtcaacgattttatttctgtgattaatttattttgagattggtrtctgtcatttccaacaaaaatacccttcttttaaaaattttaaacattttcctctcttccattttttatttccttttttattttccttccctttcctttt

SEQ ID NO: 34421 - DNA, 201 bp, Bos taurus
tggaaggtattgtcatggggcaaagggataaggaggagcggagtcatttgtttggcatggtttattcaaggaaggcctcatggagtgggcagtgtgagagragatggtagaactctcaagacagaggagacaggcggcaacacacgcgatggcaatgcagatggctcagtgcagccactgcaggcctgagcactgcaggac

SEQ ID NO: 34422 - DNA, 201 bp, Bos taurus
atacagaggttgtttatgtctaccactttggcctgtatgggtcacttggcaagcagtgtacccacccaagtgaccattatccttaggccatcattggaccmtgtaaaacccacaagagaacaagatggtagcaccagaattaagtttggattctctaggtttctgttaatctggctgccaccaagaagttgcaccagtcag

SEQ ID NO: 34423 - DNA, 201 bp, Bos taurus
agcagtctcatttcatttgaacataaagatggcacagttttgaactcatttgacatccgaaacactgcaaccagcagccctgctactggcctccgcagttycgctgcagggactctaagagctctagcacaattatcagctttatattaagtatctgaaagtgcatatatttaagtgacaaacttcataaattcaagggaa

SEQ ID NO: 34424 - DNA, 201 bp, Bos taurus
ggatattaataatttccctatcaggggtctaacccaggcccatggcaatgaaagccctgagtcctaaccactgatttgcctgggaattttcctttcctccyagagttcttgaagtacctaagtctccaaaaggtgtgctatttttccctccacttccttattttattttttatatgatccttttcaattttggtaatatcc

SEQ ID NO: 34425 - DNA, 201 bp, Bos taurus
agaattcaaatatatttttcatattatatttgtgattggagggagaagactagcacatgaactatcttaggtattgccaggcttttgctgtgaaaggccaygtagtgtttgaggctttgcagaccaaatggtatctctcataagcactcttttctgcctttgtcatgcagaagtagctatagatgataagtgatggatgga

SEQ ID NO: 34426 - DNA, 201 bp, Bos taurus
agagacaagaaatagattctcccctagaaactctagaaggagcacagtcctgctaacatcttaaattggcctgatttcacactcctggcctccaggactgygagaaaataaatttctgttattttaagccactaaatttggagtaattgtcactgcagccagaccttggtattttgatggttggcctgaatttagtgactt

SEQ ID NO: 34427 - DNA, 201 bp, Bos taurus
ttagcagctgaacagcaacaatgtgatcttggctacatcttctcaatgatatgttttgtacactttgtactacacatgtcatttccattcctctactttgycctctaacttgattgtccattctgcaggtattgtttgctcagctcagcatgctttctaggtccctagatgtgaccttgcttttctggactcttccctaca

SEQ ID NO: 34428 - DNA, 201 bp, Bos taurus
atactgcatgctggatatcgtcatatccccagttctcacactggaggatctgcttgcatgcatatatggacacccagtctgtgaatctaagctctgtcctraaaatccctggagtcaccctcagtctgatgcttgggctgagggatatgccctttggtggtgtggttgcttcttaggtgacagatctgaagaatatgtcta

SEQ ID NO: 34429 - DNA, 201 bp, Bos taurus
ccctctgagaatctatatttttggtcttagaacaaatcctaggtcctgtcccataggctaggataagatttcttaacaagtaccagatgccaatatcttargaggtcagcctgggcccacactcctcacattctctggtatatattgctttacaatgtcaagctgcctctaattccattccaaaaggcaaatatttaatga

SEQ ID NO: 34430 - DNA, 201 bp, Bos taurus
agttggtgatggacagggaggcctggagtgctgcagtccatggggtcacaaagaataggacatgactgagcgactgaactgaataagaaaagggcttattktgggccttatgaattacgattctggagataaagatttcaggtaaaaccaaaagagtgttccagggatgagaaagaggggtttataaaggcagaagacatg

SEQ ID NO: 34431 - DNA, 201 bp, Bos taurus
ccccttaaatcgtttctccgttggggattacttattcccgtttgggggcctgggggaaatggggatctgtgtctatatctgtgttaaaactttgatccaakaagacagtggagtttcactgttggccattttctccgtaatcccagtgaccttcaaggagataaacaggctgataagaaaatgcgagatctttaaactctg

SEQ ID NO: 34432 - DNA, 201 bp, Bos taurus
atatttcctgagcgtagccttgtgttcagccaaaacaagtgacatcttgggaaacatttcttgggaaggagacgtgcattctagttgcctgtggccaatakgtttcctctcaccatcaactcctgttggttggttgtccatgtagcacagctttgagacggattctggaggccactttcactgtcttaggaagctgatctt

SEQ ID NO: 34433 - DNA, 201 bp, Bos taurus
cacccctagctcctctcccagtcctcacagaatttaaggttatgacacacactgagagaaagttaaacaaagccggggccgggtacctagccttagggackagagcctgccccggagatgagatggtggggcaggaagcaaggagaaggagccggtgtggaaaccctctcctttgcggccctttcagattcggcctcgttt

SEQ ID NO: 34434 - DNA, 201 bp, Bos taurus
cattgagcatggttcagctttagttggtccaacttcaactgcattggctcaccttttttcatctttgtgaggatacacaactctccaccttatctttcctrttagcttggccaatagagagtggattacatactttttgaccaacccactatttccccagatggctttggtagcctctgctggctttttccaaaatgtccg

SEQ ID NO: 34435 - DNA, 201 bp, Bos taurus
atatttctccttcactgtctgactgacttcactcagtgtgacactttctaggtccatccatgttgctgcaaattgctcatcatggatcctgtgatctatcrgttccattcctaggtatatcctataggcaaagtcacaggtgaaggtgttcttggccagtaccaggagtagggggaagtaagggaagatgcctagtgctca

SEQ ID NO: 34436 - DNA, 201 bp, Bos taurus
aatttggaaaaagtgcactgaggatggcagagcaataggacagggggagactggatccccaaaagtgtgaagccaccctatcaggcctgtactgcttataktcagatggcttcatgagagaaggtgaatttatatcttctttaagctactattatttgggcctttgttagcagccgtaccaatatcataagtaaaatatca

SEQ ID NO: 34437 - DNA, 201 bp, Bos taurus
gctcatggccactagaggactctcctcaacaggaaggaagtgctgaaggtaaggctgtgacatttctatccaaacctttgcctcctcttgattctcactgmtcattctggcccttaattttccaatggccttgttcccagtgatttcaaattcattttgatctacattaatcctgcaatagatgttcagaagaaaaaaata

SEQ ID NO: 34438 - DNA, 201 bp, Bos taurus
aaatcaaagaggaaatcagaaaatatctcaagacaaatggcaatgaaaatacaaaatctgtggaatgcagcaaaagtagttctaagatggaagtacatagyaatataggtcttctttgagagataaggaaaaaatgcaaataaaaacctaaactaccacctaaaagaattagcaaaagaacaaacaactcaaagtcaacaa

SEQ ID NO: 34439 - DNA, 201 bp, Bos taurus
aagccagagtcatcccagatacgaggcccatgtcagctgcacactcctgtcagcacattaagggcagctgggaaagagcccatgtttgatggccttggctkcagcttcagtctgagtccttcctgagtccattcccctgactagctgcccatgcctatgtggatgtctattcatttaaccagaagtagctccacctcgcca

SEQ ID NO: 34440 - DNA, 201 bp, Bos taurus
atggctgcattgtatcggaagagagcgccctgctcctgcggtcctggtctggaggtttaagaatggaaagaaggcaaggtatggatgttaagtagccaaaygggcattctgtagcaggtacagcagacaggctcaaccaaatttatgccaacttccttttagtgaaccttcccgtactacaagtactaaaagctgtatttc

SEQ ID NO: 34441 - DNA, 201 bp, Bos taurus
ggttataacctacaaaaattccaaggtttccaagggaagctagataagtcaactttagggcagtgagattaatttttacgtgtgatgctgcattaataggycttgactgtggccatgtggagctagaatggcagccagaagctgggagctgtagtttactacttactacttagtaagtaaataagtagtaggttagtaagt

SEQ ID NO: 34442 - DNA, 201 bp, Bos taurus
gcatttccctcgatgacgggtacctgagagtgagcagaaatgcggggttcagggcccagtgctgtttctggggtgacctagttctggaggcctccacaggktgagaaacttacccgggtgtatggatctggagtttaaaggtaaacacaattccgtcatgctggctcttatgtacgcacagtagtactgtgtgtgcgctca

SEQ ID NO: 34443 - DNA, 201 bp, Bos taurus
ttctttccatctgggtgcaaaggcggccgacagaacccctgtgtttacggagcaagtgagctggaaatgacttctactttccatttaggaccagcacaccytggcccacaaaacagattttgctgcttgataaaatgaatctgaggggacattatcgctgttttaccaaagcagtcatagctgacgaacatggacaacaac

SEQ ID NO: 34444 - DNA, 201 bp, Bos taurus
ctgttttttgctccaggcctctgtccttcgggctgtggaggacagtagtagcaggtaggaggcttggacaaaagctgcatgtatctcactctggctgaacyccacttctgggccccatctctccacctgccctcttcagttaggagaccagaacccagaacacaagtgttcacaagtgggctctggattccagagttgcag

SEQ ID NO: 34445 - DNA, 201 bp, Bos taurus
aagttcatgtgactcactttattgacatacttgctttgttgtgccgtctggagcccagccggagacatctctgaggcctggctgtgtttgaaaagactcaycgtggtcaccgtgtggaatgagtgctgtgtaggttccagggcagtggcaggcgggcgccttaggcactgctgaagattcaagtcaaagatggtggcctta

SEQ ID NO: 34446 - DNA, 201 bp, Bos taurus
tcaacatttaaccatagctttttcaaaacatcatcctccaaggaggtctgaatcagtttagcagcagccagacccttgacagctagtgaggcccttggacrgatccatgagctgctctgaccgcctccccgccctgccacctggcttctgatgccagcagcctcctccggccctgtgtgaggcccttcaggggggaagtgg

SEQ ID NO: 34447 - DNA, 201 bp, Bos taurus
attccaccattctccaagatgctctcaaagacctatctcttcctttgttgttgagacagccccagttcctccactgttatttctctcactgaaatacacaygactttatttaactaaggtttgtccctgctagttttgagccagttctgctacgataaaagaagtgtctaaatttcaaattagggcacctttaagtcatgc

SEQ ID NO: 34448 - DNA, 201 bp, Bos taurus
cctggtcaggatcaggtctaggggactttggagtctcgctcttgcatttaaatcccagggcagcatgtcattctggtcactctgcactgctgcagtgagtytcttttcttacctgaaaataagagatggtaacacactccctttgtactagacatcccgaggcctctgtgctttgttcaggaatgggaaaacgacaaaata

SEQ ID NO: 34449 - DNA, 201 bp, Bos taurus
cccaaattcaccactagggcccgtttccaaactgggactgggccagagtgaacttatcaaccatcaccttcttgttctagcttttggagctgtttggaggytcaagaggcggtagtcttgggcccctgtgcctctcagaatgccctgtgctacaggaaggagtgtggcctttgctatcaggcaaacctgggttctggtctc

SEQ ID NO: 34450 - DNA, 201 bp, Bos taurus
catgtccagttctaactgttgcttcctgacctgtatacaggtttctcaagaagcaggtcaggtggtctggtattcccatctctttcagaattttccacagyttattgtgatacacagttgcccttcaatcagtaaacagttaagtaaactggtaatccatacatggaatactacacacagtaaaaggaaataaattactaa

SEQ ID NO: 34451 - DNA, 201 bp, Bos taurus
tctttatacccatacaaagtcatcaagtatcatcaagtgtcaggtttaactttctttttatgaatgaggggacccaccaaggtaaaagtgccaaggccctstgaatgttgtgatgcagcccacttcttttgaactctgaagacaaatgctttttagacttgttgccataggcctggaggaaggtgtcagtcatgttacgga

SEQ ID NO: 34452 - DNA, 201 bp, Bos taurus
ttcatatggtatatatgtatttgcctattcaaacaatatttactgaatatttacaatatacaaggcattagcaaactttctgtaaggggcctgatagtaamcattttaaactttgctgacctcatttgatctctaggacatagccttctttgttttccatataatcctataaatatgtaaaaatcacttttaggtcagggg

SEQ ID NO: 34453 - DNA, 201 bp, Bos taurus
tggttaagttataagtcaggaacctagggaattgttttcccattgaaattcttctaaattcatgtgtttaacaagtatttattgagaatagagtatgtccrtagagtactgtttctttatatcatggtgttagtttccgctgctcagcagagtgaatcagctattgtgctaagtcgcttcagtcgtgtctgactctgtgcg

SEQ ID NO: 34454 - DNA, 201 bp, Bos taurus
tagaattcagcttaagtcatggcgatggccagcttgggaacagggagaacgggccctggcagcttcctgctctgcctgtaaacacactcctttggcctggkagcgaataacaattccaggaaaatgaagggtcacaagatagatagtaactatggaatttgcccaggacaaagattacccatacttctttgcaagcaaatt

SEQ ID NO: 34455 - DNA, 201 bp, Bos taurus
aagtgaggaagcagaggcctagttatcaatagatgctgtctcactcctcaccttcccccactacatgcgcctttgtatttccagctgcttctcttcaaggractgggcagagggggccgtctgctgccccgccccccaggtccctcagaaggcactcagtccatctggctccactgcccccttagctgaggctgttctgcc

SEQ ID NO: 34456 - DNA, 201 bp, Bos taurus
cagaaggcccaggacccagatcctcccatcgtgcacacacactagtccctggagcccagttctacccacgaatgggtggggaccagccccagaaacccctrggcctaagccctgtctatcagcaagtctgctctagccttgggaatagcctcagccgctggcaggtggatgccaacccctggacaattacagctccacagc

SEQ ID NO: 34457 - DNA, 201 bp, Bos taurus
gtgttcttagcgatgtctgcttatgctcaaagatcattatgcctgcctaaatgtctcccgctgtatgtttaataatttatcccagatttttctaagtaacyacagtaagctgatcatcttaaattcacaaattctactttttccacacacttaaaagaatgtatttaagtgttgttgctgttgttgtttagttagtaagtc

SEQ ID NO: 34458 - DNA, 201 bp, Bos taurus
gtggccaatattttgaaagtcatgatttcatatacttggtctgaatttacagttgttaaatattaatatgaaggtaaatttgacatcagttactccttttyggccaaaaatgggaatctctgtatactcatgaaaaaaaaattattattgggctggtttggatctttcttgcatcaggtgagatctttccttgcggtgcat

SEQ ID NO: 34459 - DNA, 201 bp, Bos taurus
atctcatctgatcttggaagctaagcaaggttgggcctgattagtactcggatgggagaatccacaaacctctgaacctcagagtccagtctttctgcctyggacaggcctggcacacagatgtgctgactgttctgatcactggcgagagctctgtagctttcaacattcaccttcactaacagctactccctgagaaag

SEQ ID NO: 34460 - DNA, 201 bp, Bos taurus
gaggccttcagaatgtggtgtgtgaatggaataccatggcccaggcattgggaaggaattataacagtttcaaaagaggcttagtaggaatataaaaggartgaaaaggctgatatggccacccatgattccatcctcgcagcagacgaaggtacctcttacaacccactcccgtattcttgcctggagaatcccatggac

SEQ ID NO: 34461 - DNA, 201 bp, Bos taurus
aaactgtggttacttcttgaggcagtggtatggtatggagtaggaagaggcatgaaaaacctggggggttataaaagttctacattttgatttgagtagtkgttacaggggagtatacatatgtataaaactcatctaggagtacatttaagagtggtacacttcactgtatatatattaaaccttaattttaaaaaatga

SEQ ID NO: 34462 - DNA, 201 bp, Bos taurus
tgggggactggggtggggggtgggggtggggggttggtaacctaaaatcttttctacctgtccctagctaaccccagggcctcaagcccactgttctccckgagtttcctgatattgtttctgccctgcggtatcttgggttcatatcaggcccagaatagaaaggaagataaatgataagggtgtgaataccctcagggg

SEQ ID NO: 34463 - DNA, 201 bp, Bos taurus
ccaggggcaaaggaaaggaacggaagaaggaagagaggatatgagacacagggggcttctcaatgaggggaagtgagacaggctccctccctccccagagmaaaccttttcctggggccccagataaggtacagctcctgctaagatgctactgaagacagcagccaagtttcctctcattttccagtgtaagccccttca

SEQ ID NO: 34464 - DNA, 201 bp, Bos taurus
acagaggaaggtagaaagagaaaagacccattggtagatggggggagacacggaattgggtgattctgattttttacctgctgagcttgaggtgacagttrtatttatgacaaaaggcaggcgctggtcatgtctgcctcccttgctatggtattccttggttctctgttggcttttgcactcagcctcacactgactaga

SEQ ID NO: 34465 - DNA, 201 bp, Bos taurus
aaagagtcggacaagactgagcgactgaactcaactgacctgaatattccattgtctggatgtaccacagactgtttatccattggcctcctggaggacaycttggttgcttcagagttttggcaatgatgaataaagctgctataaatatctgtatataggttttcatgtggccataagttttcaactcctctggtacat

SEQ ID NO: 34466 - DNA, 201 bp, Bos taurus
aggatattaaatgcagtttcctgtgctatacagtagggccttgctgttgatcccgtaattataatttttgatgcacctggctcttctgctaaaccattagygccttgagggccatcaccatgtttctatttgaatacgtttgttcttatttttgccactgtgtctgataaaatccacacatcattttttcccacaaattga

SEQ ID NO: 34467 - DNA, 201 bp, Bos taurus
ttaaagctattctatgacacttaaaaaaaaaagcaatgaaagattagctatagccttcacagattaaattcctcatacaaatataaaaaggccaactttgyttaagaaaaatattttatgaaagcagtatcacacagtgattcagagcactgactctgcagtcagactactgcctttggccctatacaggctgcacaaact

SEQ ID NO: 34468 - DNA, 201 bp, Bos taurus
atgcaggcaaggcccagaagtagtggtaaacctagaaatctaacagttaaacacctgcaattgtttctccacccaaagcgtgagttgttatatacataacraaaatctgaaaggcctaaagagcttttagcagattcacaaaaattacagaagcaaaagctggtgatcaggatccaccaaaaagcaagatgcctaactctc

SEQ ID NO: 34469 - DNA, 201 bp, Bos taurus
tgcagcgaggccagcccgtccctggggcctttccatccccttgctttttactgcatcaaccttcagggtgtgcgtgggtttggagggtgacagagaaaackgactaggccagcgggcatctgcttttcttctgactggcctctcttcctggggcctggctgacctgcagcaggcccagctgggagggggaggaaaggcatc

SEQ ID NO: 34470 - DNA, 201 bp, Bos taurus
gcctccaatcttagagtatcaacagtgcttccaccccagggttagaagggtccagaaggaacactgggctcagttattcataatatctgccacaggcttgrgagtgagttagaagcattttggccagctgcctgccagcccaggcgtgggatacaggctggtaacaggggtcattagttctagcactgtttctttccattc

SEQ ID NO: 34471 - DNA, 201 bp, Bos taurus
aggcggttgtcttctgtaccgtccagagattttagctgtggtccatgacacagacaggctttttgtggctgcgccatgctgcccagcgccagaagggtacrtacatgactttaatgaggacaggcccatgggacctgtgatgtctgattttgggttttttggtgtttgttcttgttttgctgttgtttttagtttggcctg

SEQ ID NO: 34472 - DNA, 201 bp, Bos taurus
gagctgtaagaccactgtacccacctttcctacaactggaaactgcttttaggaaaaataaaaagaaggtgatttttctttctattcttcagggccttttrgaacatctggatagtggggaggttgtggttggagatggcagcttcctcctaactctggagaagaggggctacgtgaaggccgggctctggactccagaag

SEQ ID NO: 34473 - DNA, 201 bp, Bos taurus
cacacctgtgaccagacaaacggtccggctcagccattggctggtgctgcagtgggccacgcccacaagcagccagctgttaatgaggggccgttaatgargtgatcccgacaatggtcagggtagtggtgaccagtggtcaggtggagagtgaggtaagggccagatcctggccttctccctggggccctcaggtctgtt

SEQ ID NO: 34474 - DNA, 201 bp, Bos taurus
cttgtcagatttccatgaggctaagccagcgggtacagtggcagaatcgccttgtaggccaacaaggaggataaccaattgccttctatggcagtcagccyagaggatggtcttcaagtcaagtgcagaagccaaaggaagctgtgggggccaagttttggactcgggttagctagatgagtaagagaggccctggagggt

SEQ ID NO: 34475 - DNA, 201 bp, Bos taurus
acagaacacttccttactctgtaagatggcccaccagatactctttctgtgaccgtgggattacaaataacaagagctggaaagtcaggtcttcttaaaakgggcagaatggcctcgaagcttctctgtgtttgttggcatgggaagagactgggtggtcaggaaacaacagctgtgacagaaataaaagagctggaaaca

SEQ ID NO: 34476 - DNA, 201 bp, Bos taurus
cttcatttatataaaagattatatactcctctggggcccctacaaagcaccaaccttaatcttcaaggtagcttggaaaataagtcatggttttgttattytggggccaaaacattctgaagagattgatcacaagctcctggagccaagtctggtgaataaatacactagggttgactccaggagctaatgggtcgtttc

SEQ ID NO: 34477 - DNA, 201 bp, Bos taurus
tctgtttctactgattctgcttttgtgtcagagtattcagccccacaggattggaactatgaactagagaagcaagaagctgagccagtttctttacctcrtgtgaaagctgtatctgaacatgcagttttgtcagaagaagaggacgataaatttgagccttcttccccaacttcagcttctatatttgtctcaccctcc

SEQ ID NO: 34478 - DNA, 201 bp, Bos taurus
gagcatcttctcatgtgcctattggccatttgtatatcttctttagagaagtaagacagcaaactcaattgataaatatgtgtatgttctgactgcttcaycaaccagccctttgcctgaggcctccctgttccttgagacacaacagtgttgaaattagtccaattaataatcctataatggcttccctgtggctcagtt

SEQ ID NO: 34479 - DNA, 201 bp, Bos taurus
tagcacgtggtaggtgctgtgatattgtgatataatcaggaatatttatttggtcttctacttgggtatgggaggcccagaagacttaatgctgacagctraaatgtgtgggatgccagacagggaggagtgtggtgttgtgggattaggcccctagcctgggggatatctgacatccaggtaatgtcagaattaaactgt

SEQ ID NO: 34480 - DNA, 201 bp, Bos taurus
atttggccagtagagacgaaagtgcacaggagaaatgaaaacgataaagctagaagtgagacttgaacacagatggagttgtagaagaaatcactcattgwgcgaatgttggccctgctgctgttctagagcctctagatatgcagctagaggatctcagcacaggcaagcttatcatcgtaaacgaggaaggttgtaatg

SEQ ID NO: 34481 - DNA, 201 bp, Bos taurus
attaaaactttgtttgctttgcagtaagtaatgaattttctcccatatatgtaaaactttgataacttttaaaagagattacttggggggaaaaaaatcartgcgtccctgtaaaacagcatttagatagctctccccagaattttcattctacagaattccactattcgaggcttgcagtcgaacagtaagtgcaaggcc

SEQ ID NO: 34482 - DNA, 201 bp, Bos taurus
gacccagcacagccaaaaagaaactcattttacaaaacaatgataccctctgcaaaagaaagacacccaaaacataagacagaaaagtttaaagtaaaaaratgttaaactatatacattttgcaaatataaccaaaagatagctagcatggcatattaatatgagaggaaaaaaaaaacctttaaggcaaaaagccctac

SEQ ID NO: 34483 - DNA, 201 bp, Bos taurus
ggaagaaaggactgaagtaagtagaccagacccggccccggcgttttcggaggggaagaggaactcccggagccatggtcggggcagacggccccggagcragagactccgccccggggacccgagacgccctcaggaggcaacaggggtaccagtaggtgaaagctccgacggctggggcctggggtccgcccctcggcg

SEQ ID NO: 34484 - DNA, 201 bp, Bos taurus
ggccacaccatgaggcacataggatttcagtttcccaaccaggactggaacccagggtcccagcactgggagtacagagtcttaaccactggacagtaacrcaaggcccccagaatgcttgtttcaatgctaattcctgtggattctacccctaatccgttacatcaaaaccatgcagagagcttatgaatctgtaccttt

SEQ ID NO: 34485 - DNA, 201 bp, Bos taurus
gtgcttggttttaattttacaatgttactttgactcttgttaagcaaccacgtttattcttcatatatgtcatacaaagactcaagagctgccacattcargtatttgaattagtgaacatagattcagatactgagtttagacactgtacaaaagcatgcccattgtttagaggcttctaagctttaaaagtgtaagtct

SEQ ID NO: 34486 - DNA, 201 bp, Bos taurus
ttaactccctcttagttctgctcttaccttgacttgactagaacagactttttataacttctttaactgcctgcattttcccaactgggatccctacaaamgatttttctttaaacatagtagagcataaaagggtgtaggaaagtattcaaatagaatcacacaaactaacctctcctccctctcacctcccctctcttt

SEQ ID NO: 34487 - DNA, 201 bp, Bos taurus
taggggaagactaactggcagccctaaccagatttccacaatacagaagaggtgagccttacagaagaaatctagattctgtttgctaagaaaagggagcrtgggtgtggagagggaaaaaaaaaaaaacagcaaagagaaaatctatgaatcctcaaaacaccacttgctgtgctcctacctagccttttatccttttca

SEQ ID NO: 34488 - DNA, 201 bp, Bos taurus
agggagggagtagaaggaagggggaaagtgaaacaaacgtgtgcccttggttactggggcctctaatacacagacagcatatggcctggcttagagtcaarcttctggtggttatcaggcagtaaaaggattctttcaattacatctgttcttgatcctgtagtctataaacattttggtgcaaatcaaacaaacaacaca

SEQ ID NO: 34489 - DNA, 201 bp, Bos taurus
gcgctccggacagagggtcctccccagcccgttcctctgggctggcaggagggtttggatgttttcctgttacctgaggccaacagataagaaggaaagtrtcgggctcctggttcttgctgactgtgaaagtcagatggagcctgtttgccatcagcggccactcattcaagaggtcagtcaccccggagtgacaaagga

SEQ ID NO: 34490 - DNA, 201 bp, Bos taurus
atcactcatttatatctctctatcatttattacgggcgtccctggtgatgacctcaattactaagattaattagatgaataaatggtatcaccttgttctygcaataagatatgtcctttgagaatagaggttggtatgacattacttttaagtttctctattatgcaaggcagagaataagcaaatgcagatgctgagtg

SEQ ID NO: 34491 - DNA, 201 bp, Bos taurus
agcaggccagtgaaaacagagtgagaactctggctgaagaaccaccatctgagccttaacgaagattccttacaggaagttcaccaacagaggaactgagraaaatcttttaagatatggccaccatcaaaaacattagttttccctagtacattccaagtaaaccaagtaaaataagtaatgtttgtctataagaattta

SEQ ID NO: 34492 - DNA, 201 bp, Bos taurus
ggcgttggccccgcgctgttccccgccgcggaccccttctcctgcagctctaacaagcaatcaaaagcagcctagggactccggcctcctccactgacccsgtgcccatcaccgacacagtccgtccacaaaaactttccgcccgctcgcagcacccggaactacagggccgcgcgacgaaacggaactcagcgcccggga

SEQ ID NO: 34493 - DNA, 201 bp, Bos taurus
aaaggtgcaaacttaaaaaacgttatagtgcgttcattcctcacatcatataccaggataaatttcaaatggattaaatatctaaatcaggagtcaaatcyacctttgtatgatcacaagaatgatttttacattttaaaagcactgttaaatatatatatatatcccacaaaacttaaactatttacaatatggcccttt

SEQ ID NO: 34494 - DNA, 201 bp, Bos taurus
gaaatttgcaggcaggcagggcatcaaaacatgtaactcccatcgagtctttctcactaaaccactgaaatctgtgattcaccataacaaggaaataaacsaagagggaagttactgaagccagaaagctggggatccaactctgaagagaggtcagtacaattcccaagatgatggtgaaggaaaatcctaggatgacag

SEQ ID NO: 34495 - DNA, 201 bp, Bos taurus
tcttgcccttctcttcagtagactcccttgttacaggtccttgcgctggggtgaagagtactctctgaaaagcgtactagatgaacagtgagctggcgagmgctggcctccgagccctcctgcatttctactttccgtctcagcccaccggcgttttggatctcaataccaattttaccttttactctgagaaaccagaaa

SEQ ID NO: 34496 - DNA, 201 bp, Bos taurus
cagggctaaagaatcgctggctagagctctcggagggaggtgagaagggaccaagtcaacaactctcatttccatttcatctctgattggaaaggccaagyatcaaggtccagagagtaaacggagttccctttgactctctccttcacgtgtggctgagccccagagtggacgtgatttatacagggtgggccccagaga

SEQ ID NO: 34497 - DNA, 201 bp, Bos taurus
ctggtcaaggtggggagtggggccccggtgcagggagcagggattctggagcctccttttggtcaggtggtcagagaggcctctctgggaagaggccatcygatccacgaggatcaagaggagccaactctgcagattggagaaagctccttccaggcagagaactcagcaagtgcaaaggccccacagcagaaaaagtcc

SEQ ID NO: 34498 - DNA, 201 bp, Bos taurus
tggactctgaggcctcagccttcccattcccaggcaggcaacagctgtgcccccagcctccagcccctctaaagatgaagggagaaaacttactgtgttcrgaggccattccatttctcacagagcaattctctccatctttccatttctttgcaaatcagggcacactcatctggcctggccaacccagaggctgcctga

SEQ ID NO: 34499 - DNA, 201 bp, Bos taurus
tattacagacctctgggaacagccccatcccaccccttccaagaggagaatgaagcatggatgcagaaaaaactggccctggtgaactgaggcatggtccmtgggaaaacctctgggctagggatcaagagagctggatcttcgcccaagccttcccggacctggcctcttctgtagaagggcgggttggatcagatgaac

SEQ ID NO: 34500 - DNA, 201 bp, Bos taurus
gaactttgtcttccgtgagtgttttaccttcaacatcaagataaaagtttctgtgccattgagtgccaccaatccctgatttggatggtgggggaggagaytgggtagatatttcacatatttgtgaaatgttttatcactaagtttgcatttatgtgcaattaggtcagtatggaaagtggtttttcagatactggatca

SEQ ID NO: 34501 - DNA, 201 bp, Bos taurus
gtgtaaatgtatagtgcctatcctagtttcccagtttgtcccaccccaaacgcttccaggttcacgtggaaaagatcagagaaaaataccctcttttgggyaggggaaataaacactttaaaatatgccgtgacaaaggcctacccctcaggagaaacatacattaccagagccttgtctgacctagaggaagggcagtta

SEQ ID NO: 34502 - DNA, 201 bp, Bos taurus
ataaaggctggtagtggagggcctgtcctaccttgggtccatagtgaggctgtggtccttgtaactagtcagctcccagttaagactggtgaagtgaaaayggggtctgggcctgggtctcctacctgggagaggaggctgaaggccagtgccccactggagatggccagtagtaaagatgagctccattcaggagacacc

SEQ ID NO: 34503 - DNA, 201 bp, Bos taurus
cagcaacaacaggaaccatttttggggactgagaatttcaaacaagatgctatcctagaagtctctgcccagagcctggcctagagcagacctgcaaaggrtattggtccccacaccctcagctgtcaggtgggggcaatgtccgagctgcgggttcctaggggtggccctggggcaggcattttaaataattttgactgg

SEQ ID NO: 34504 - DNA, 201 bp, Bos taurus
agagcccctggcagacccagcagggccctcagatcttgacagctcggctccttcatttcacagaggaggaagccatgtgccccaaagcagaagtggtagtrgggctaccctcagggtcaggccgtggttccctgagccccagccccgtgcagccctcactgcacagagtggctgtccccttctgatcattaggaagtcacc

SEQ ID NO: 34505 - DNA, 201 bp, Bos taurus
ccggtatttaaacaaaaatgcctagagactgacacactgttctataataagggaataaatatcagtagcaaaaataattataaacaacggtaaactactcrcgaagactttcttagatcttaactgaaaggattaatatgtaaactcattgcctttcttgtggtccctaggaaaggttaagattgtagattataagcatta

SEQ ID NO: 34506 - DNA, 201 bp, Bos taurus
gcttcatatatatatgtgtgtatatacatatatatatatctctcatgtatctctattatatataatctgtattatctaacagtaggacttcacagaacaayataattcatcctcatagaggtcctcctgatttaaaaatactggattttcttagtttactctcacaagtttatcagtcatggatatatatatatgtatgta

SEQ ID NO: 34507 - DNA, 201 bp, Bos taurus
agaagtctataaataggctattagaaaggatggccatatttcgcttaacttgtctggtttaatctactaatcacagcacaggtgacctcagaattcactaktgtggccaacaccttgagattcttgagaatttgtcctactatcttctttctgttttactccaagtaagtgtaaaatcttggtttggaggaatgtgtcttg

SEQ ID NO: 34508 - DNA, 201 bp, Bos taurus
agtacattaattttctccttaggtttgtctaatcctaccattaattccatacattgagtttttgtttgtcaattatggtatttttcatcatatctagaatktctcctttgtccttttcatggtttctagttctttgatgaagttttgagggaatacaaagagttactcagtgcattgtcaagcaggtagactcttgcccta

SEQ ID NO: 34509 - DNA, 201 bp, Bos taurus
cgggtccactgaccatgatttccctgacgaggtctgaggaaaaggagagagaggcatagactaaaattaccaagaagtacactgaaagacatcactgactygatggacgtgagtctgagcgaactccgggagttggtgatggacagagaggcctggtgtgctgcgattcatggggtcgcaaagagtcggacacgactgagc

SEQ ID NO: 34510 - DNA, 201 bp, Bos taurus
tccctggcaccaaatccagggcactagagtttgactttcagttgtatgaatcccaatcttccacatttgtaacatgagatgcttgttacctaactcactgsctcactcagagagtgagaggtaattgtcacatggtgctggtcagagggtaaactgaatacatttttctcgagagtaatttggctatatgtactcaaaaat

SEQ ID NO: 34511 - DNA, 201 bp, Bos taurus
cggggcctcccagggactgccggttgctcagcccgagtctacagattggaagccacttactttggagagcgggggccacggtcttggagaacctgaagttrgagttgacccgtgaacacatccctgtggtgtagtaggaactcccacactcgtgcgaccagagggggctgcaggcctgtggagcacagaacggacccccag

SEQ ID NO: 34512 - DNA, 201 bp, Bos taurus
tggtgaccctacggcccctcctgggcttttctttggtccaggtgggaccacacggtgatcggtagcatatggccctgtgcgggacacagacagggccgctracggataaccctccaactacccacccccagcccaaattccacttcgtggctcagccccccacactctgcttccaccttgtgtctccagcccagcttggcc

SEQ ID NO: 34513 - DNA, 201 bp, Bos taurus
gacttttcacagccaaggctttcttctccttcactgcagaatccagtgcaagctgggtggctttgttctgtgtcatgagtccttcatcctggagctagacrttctctgtctcctccgagggagaaaatagggctgctggaagacatggatatttttaaggctcaaggctgggatagctagcctcgcttccacttacattcc

SEQ ID NO: 34514 - DNA, 201 bp, Bos taurus
agtccctggcccactccctgagagcgtgatcctgcaggcctgccggggggcccaggaacctgaatttccacagacaccccaggtgacactttgaggatccrtgctctggagttcaagcttgcaggcctccaccccagcctcattttcaaaagttttcctcctccactccccatctccattggccctgaaccacccatctga

SEQ ID NO: 34515 - DNA, 201 bp, Bos taurus
ctctaaaagcaattgcagttctttgcatgagcacaggagtgggccggggccaggagagctaacaagaggaagccgttcccacgactggcctgactttttgrtgtaccactgagaacaatgagcaaagctacctctgagctagctatgattctgtgcccctgggccaggaataaatctgaacttaccggaaagatcatctca

SEQ ID NO: 34516 - DNA, 201 bp, Bos taurus
tcaggaggcctcccagcctcccagatgggtttccctctgctcaagtatccattctgggtgggggacagagtgaaggacaggccatgtggtacaaacaggcrctgaggctgaaggcattcatagacgggcgtgggaagggaagcagagataggctttgaacacagcacttgttaaaatttgctcaatgtgtggtcctctggg

SEQ ID NO: 34517 - DNA, 201 bp, Bos taurus
cactggacagagttccatgtgctatacaagtctgaccttgttggttatccattacaaaatagcaatgaggaatacttagggagtttcggatggccatgtayacactgagatactgtactttataggacgtttttgaataagcaaaagcttgccagctttgagagaggcctggagagacggaacacttctcaagctaaccag

SEQ ID NO: 34518 - DNA, 201 bp, Bos taurus
attcaaaaaccttcagaggccagagagataatagaaatgaatgaggtagtcaattcaaattagaagctgtggttccaatttaaataagaacatggggaggrggaacgtggtagacggcaaaggcctagcccttctggaaggggagcctcaattctgctcttgcctgttgttgccagggaagaatgtaggcccaggaatggt

SEQ ID NO: 34519 - DNA, 201 bp, Bos taurus
gggccttttccttggctttgggttcctctactttacattactcatacctgttaatcctgcatttaaacagtcctgttgctttgactccaagtgtcttagaytggcctggcctggtccttctgtgcatctcagggcagccccgcccccgtgagccttctggaaaagctgcctctctttgggtgatttggaggacagctctcg

SEQ ID NO: 34520 - DNA, 201 bp, Bos taurus
gcaccaccaagggggtgggagaccacctaagccgccccttcacctgacccagacccactgattcaccccacctttatgccacttaaggaaggaggccgccytcctcagagagtggagagcaagcaagggcgcctgttgcctgtttttgacccatctgcagcatgagtcccaggaaagccgagcctgaatttcttgtctggc

SEQ ID NO: 34521 - DNA, 201 bp, Bos taurus
tgaaaagttgttattaaattctgcacgtggccctgacctggatttaaagatttgcaggaagacaaattccaaacagatgcccattagggccctgacaaccrcagcttaaagataacatttacattctgccggggtttgtgtgtctctgctccctgctcagcccctcttcggcctccagtgggatcaataccttgactgagg

SEQ ID NO: 34522 - DNA, 201 bp, Bos taurus
ccaaagcctggggcactgagtcacccatggggctgaactgccttgtgactaggggcttgtgagaaggtggaaggggtgggcaatacagggaaggtgagagrcaggacccaaaaaggcctcaatagggctgaaatgaacactgggctacgctgagtgcctaccaagcttaacagcctcagagacctctgttcacactggggt

SEQ ID NO: 34523 - DNA, 201 bp, Bos taurus
ggttcaccccaggcttgtttgtgtctaatttcctgggggcaaatgggccccttattttcactttgaggtttagggtttcccctagagttggtggaggaggsgggtctgtggagacagtccaggatgttttgcataagtgcggaaagtcttggagttggaagttaaagatgaggtcgaagtgaaggggtgaaggtgagccag

SEQ ID NO: 34524 - DNA, 201 bp, Bos taurus
gggcctgcctgatggaggggtgccccatctccttcccacagaggctgcctggtgagaggctgcaagttcggtctatgcgatctgctgcacagaagctgagyggccctgggtgagccactgcccctctttcagctctcactgcctctctataaaatggcgctagttattcagacctctcagggtggtttggaggattaaaag

SEQ ID NO: 34525 - DNA, 201 bp, Bos taurus
agtagcagcacctgcatcacagagatgaagtgagaagtagatgagtaaacaggtgcaaagctgctgcaacagtacctggggcccagcaggtacttgataaygggagctgtgatcatcgccctcttgacacagaccacagccccctcccaccaggtgccactcactggggcctgaacgcacacaccttggagagctcccagg

SEQ ID NO: 34526 - DNA, 201 bp, Bos taurus
cgcccaccctgcttccaggccccacccaccctgcatccagtcctctcatgccctcccagggaatgtgtctctgctttggctccagcaagccggacagtgcraactgtcccctggtacattaacgtccgcccaagcagtcattaacagagtcacaatcaatttctccagaatgattgctactgcacagggaacttaatggaa

SEQ ID NO: 34527 - DNA, 201 bp, Bos taurus
gtgtaatccaggcatgaatgcatgtacagacacacacacacacacacacacacacacacacacacacacactcagatatgccaggtccaagcctccacccmgagatgttacatgctgggcacactcacaaatgtacagacacaccaggcacagacactgcagacaagcaagctggctaggggcacacaggaagacagagat

SEQ ID NO: 34528 - DNA, 201 bp, Bos taurus
gctgggccgctcgctgcccgtcctccgtgtctgcggggtctccctggcacagccgagtcggggtctccccgagcttgacagccccgtcacagtccttgctyagtagatgacctcataaaccgtggccttcttgtcaccagagcctgttacgatatatttgtcatccgccgaaatgtcacagctcaagactgacgaggattc

SEQ ID NO: 34529 - DNA, 201 bp, Bos taurus
ggccggatttccaggccagtgccttctgctgtctgcctctggctgctgcttcgcccgtgaccgttatctgcttctagtcttccttccccagcagccacgaratgaaggaaagctaccagaatggcctgccagccgtggtggactctgagaagccaggaccagatgtgggaatggtcccttgccttctccctcatcccctgt

SEQ ID NO: 34530 - DNA, 201 bp, Bos taurus
tggaaaaccgcaggaacatcactgtaaaagactgctggcagtgacctccttgcccaggctcgggtgtgtttcagaagccaggccagaaaggagacacgcaygaaaagatttcagtgatgtgcctctgtgctggaagcagcggcagggaaggtccagtggctctgcagccaggagatccggctgagagcctgactgggccac

SEQ ID NO: 34531 - DNA, 201 bp, Bos taurus
aaccatggtgagcttcctcctctttcatggaggaagccagcgtggctagtgtgactctgaagcagaaagagcaggcttaccagggctgtcagcagggccayaccaggtggtgagtcataggatacagtaaggcatttgcccttgatctgaggcagtgaggaggcttcagggctttcaaacatgtccgcatagtgaggaagg

SEQ ID NO: 34532 - DNA, 201 bp, Bos taurus
ttatagatgagagaaagagttcagagaggttaagtaaccagcagaaggccacacagccaacagatgtggaagccaggattaaacccatgcctctctgactycttgctcctcctgtcctcaggccaggaactttgggtctcataagacttctgggaaagggcatttgaactgcagtgacaagtcatcaactcaatggacatg

SEQ ID NO: 34533 - DNA, 201 bp, Bos taurus
aaaaaaaaaaaagcacagagctgagtgaatgattaaatcagaccttacagtaaagtactgatattatgtactaatctcttgtgtcatcggctatggccccrctttcctgcactaaattgctgggctggactttcctcctagaatactctgggtccttaaacccagatctcttccactaggaaaacatcaggttgtgaaagg

SEQ ID NO: 34534 - DNA, 201 bp, Bos taurus
catatataatgactgtatataatgttacattttgggttggccgaaaaattcgtttgggttgtctgtaacatggaaaaatccaaactttttggccaacccartatctagtaacactgaaaccatctctaccgtgaactccaaaatctgtgtgggatcacaggggaaaccagctagccatggtcaacagctggccatgcaaaa

SEQ ID NO: 34535 - DNA, 201 bp, Bos taurus
ccctgcaccacccactctgtccccttaactccgtgatcctcccagaagcttcacactgtccccctccccctcaggctctaaggctaggccaacccctgccycagatgcacccagagatgagcccagctctgctgaggatgcatgtcacacccagaccaacagggggctttctgctctggcctgggcatgggggtggagtgg

SEQ ID NO: 34536 - DNA, 201 bp, Bos taurus
aaacaccatttggaaagtgctttacatgtttactatacccatctcaagcacgctcctcactcaaaacaggctattttaagcaaatattctttggtctatcrattcttttctgccgctctaagatattaaacttacaaacaagaaaatctacctaaatacaaacaccccataactgaatcttaaaatgttatgtgactttga

SEQ ID NO: 34537 - DNA, 201 bp, Bos taurus
agggaatcttcccaacccagggatcaaacccacatctcttgcttctcctgtagagtgggcattccttattcaaagtggagttgagtaagatgtgacttgakggtgaggggtagagagagaaatcctgagatcagccactttcttgctaatgagtctagagcacattatgtgtagttttggtatatcctctagaggtttcta

SEQ ID NO: 34538 - DNA, 201 bp, Bos taurus
cagctgggaaagtaagatcccactgctgtgtgtggcccccaaaagaggcattagttggatcggctctagacctgagacattagggtctccttgcaaagacycccgagtggggccactgattatcgtgccgtaccttgtgttctctgggcttgggcttccggtgacataatgctctttttttgactcagggtggctccttgg

SEQ ID NO: 34539 - DNA, 201 bp, Bos taurus
ctgtaatcggtcttcaagcaggggaaaggggacgcagagatggctcaaggaaataagactggaatttttcataaaccaggcccagactacccatacacatytagatcacgctgagcttcttgggttcagctgcgagaagaggggctggtagaggccaagctatcttaggcccagggattccaaatggaacacaattatttt

SEQ ID NO: 34540 - DNA, 201 bp, Bos taurus
atggccaagtaatcaacaaaggaggcaagaatatacaatggacatggcagtctcttcaaatggtgctgagaaaaccagacagctacatgtgaaagaatgawaacattctctaacatggttatacaaaaataaaactcaaaatggactaaagacctatatgtaagactgaatactataaaatttctagaggaaaacatagca

SEQ ID NO: 34541 - DNA, 201 bp, Bos taurus
tttctagaaaggtttgtaacagatgggtttatcttaatggacaatgtcaccatcaaactccattagtctaaaagacccatttccacactagggccagtcarcaaaaccaggacacttgtgcagcctggttagatcattcccttctctggacaatatcaggaacacagaacacaaatgtttttggccacagtaattggaaaa

SEQ ID NO: 34542 - DNA, 201 bp, Bos taurus
gggatggaacccgggtcttctgcattgcagacagtttctttactgtctgagccaccatggaagcccatgaaaggatagctatcaaatttgggttgaagggraaaaaatcaatgaaaacaccaaagtgaacagtctaggtgactgtaaccatgatggtgctattaataaaaatactgaacacaggaaaacctgttcctagga

SEQ ID NO: 34543 - DNA, 201 bp, Bos taurus
cttaagttttatgagttctggatcccctcactttcagggaccccttttagggtctggagagtctctgacaacgtgttcagtgcttatatatatatttttgyaaagtctgcaaaattgagactttcttccctattctttttcttacaaaagacccccatattatatatttttcaaaccctgcaaagttcagatcagccctag

SEQ ID NO: 34544 - DNA, 201 bp, Bos taurus
ttgaatttctgtattaggacattatgaacttgaaaaagaatttctgatccagatttgattataagtggacatttgtttttttaaatgatatatctgtgccrtaaaagtttttcaaaacatgtgtttatgagttaaaatcatccatgtaatattaacagctagccacttatctaacttgaaattcccaggaaaggagttctg

SEQ ID NO: 34545 - DNA, 201 bp, Bos taurus
agggtagagtctgacccacttggaactttttcctttgtgttcatagcattgtaaatctccatgagcatatatagcatttcccaaatctatttggccatggrtttttttttttttaagtagacccatgaatatcttaaaaggtgcaatttgggaatcgtcgatgtagaggtattcaaaggaggatggacaagattaaagttg

SEQ ID NO: 34546 - DNA, 201 bp, Bos taurus
gacttagcagcagcagcagcaatacctgatttggataatggggccgggagttgttggcagtttttggtaggatggtcaggaaagatgttacttggaaataygatatttaagcaaaggcctgaaaaagatcaaagaatgagtcatgtggatctaggatgagacaatttcagatagaacagtaattgtaaaatccctgagctt

SEQ ID NO: 34547 - DNA, 201 bp, Bos taurus
tcactctttattatatatatgagacttgtccttattattgtttgcatttgtagattgtctgttctcattttggaatatatcacaatttgcttagaagttgyattgttgatgatgtttgagttacttccaatttttagctattagaagtatactgctgtgaacatcttagtatatctcttttggtgaacacttgttggagaa

SEQ ID NO: 34548 - DNA, 201 bp, Bos taurus
tacggaatttatgactatgttcagccagtctcctaattgcacgttgtttcactgcagaactcagagcagcagcagtgggtaccggctggcacaagcagtcmaggaggaaggacctcagtggcctggttagctcaggtagggcctatttccatattcagttttcatgtcaggaaaaacagtgatcccgaagaattttgtatc

SEQ ID NO: 34549 - DNA, 201 bp, Bos taurus
ccaaacctcacccgaacccagtaaccccattcctgacaaatcccatcctataggaagtcggctatggcatctcttcctctgtctgggcctctcagagcctygcctgccttccacttcctctgctcatcaccccatgtccagaccctgcctgggggatgggggagctctgaggcttggcccctttcccagctgggtgccatt

SEQ ID NO: 34550 - DNA, 201 bp, Bos taurus
ggccgaatctgcagccggggtaaaatagaacacttcccccagcccacccacaatagaaataaaggctgggtcccttaggggaccagccaggcacggcacaytgcggaggccatgggcagacagacacacggacaagaagttagccagagacagaaggatggcacagggcctctttgctcacagcactcgatgggtaccgat

SEQ ID NO: 34551 - DNA, 201 bp, Bos taurus
gctggattgaacagtataggcagaatgaaccatatgaagcttgcaggcctgagaaaatatgacattcaagatttcaatttaaatacaggatagggttccasaggggaatgtacctggagaagtaatttagatccaggtctgagaggcctaatatgccaagtttttttttttttttgctctgtcctatgtactcatggttaa

SEQ ID NO: 34552 - DNA, 201 bp, Bos taurus
aaacagatgtcctcaacctgtccagagaagccacttgctgaacttaatcctttggctcggtctagttgggacttggcctctgatagaaggaccattgatayaggaacattgagctgtgactggttctttatcccacagtgggaaagagggagagggaggggcctgcaccctcaggtggatggtctcgggcagaggctggct

SEQ ID NO: 34553 - DNA, 201 bp, Bos taurus
attccagctctttctgtagggcctccacgtgttagggttaatggcacagccatcaccatacagatggacatgcttagcatctttttggtactggtttactytttttattatggttttggccctcagtctaggttcccaggaagtgataacactttccacaggtgttatccaccatgggtcataggctccataccctacagg

SEQ ID NO: 34554 - DNA, 201 bp, Bos taurus
aagatgttccaattgcaacctttcactcactctaagagccggttaaagctgattgaggtaaagggtcagtggagatcctacagaggcccagcagaggccaraattttgcagcgaagttaagagtcggtaggaaaacaggacttctctggtagtccagtggctaagactctgagctcccaatgtagggggcctgaagttcta

SEQ ID NO: 34555 - DNA, 201 bp, Bos taurus
cccatggatagagaagcctagagggctatagtccatgggctacagacactaagcatgcatgcttgcttacttgctaggcttagtagctatatggcctaggrcagtgattctcaaagtgccttccttggtccaacagtattagccttacccaggaacttaggagaaatgcagattcttgggccacatcccagccttctggat

SEQ ID NO: 34556 - DNA, 201 bp, Bos taurus
ccctgattggcctggggaagcggggccgaagagggccacttgaggcagaagtgggcctaggaagccaagcacgagcctctcctctggcaaggagaagtggygaagggcactcaggcgctaggaagacagaggatgcctcaatagcaactcatttcagttactgctcctgccccccaatcaagattaaagcctctccaggca

SEQ ID NO: 34557 - DNA, 201 bp, Bos taurus
ggtcacctggaagtctcctgagggccaaggcccatgtctgaggaaggagctcatgaagcagacccagaaccctgaaaaggttcctgactgaggacaaaccyctgggcctcagttcccttgtctgaaaagtggttgtgaagaatatctgagctaattctcccaatgaaaacatcttatgctgtggctgacacttgtttagtt

SEQ ID NO: 34558 - DNA, 201 bp, Bos taurus
aaagtgggaacggggaggagctgggccctcctccgggagctgaccggggagtgccagcagcctctccctgggaagctttgtgggaagcccccacgggaggrgagaggggccaggtccctgcactgcccatgtcagtcagcagtcatcagcagcatggttcagccgcctctgggcagctgtggcccgcgggggcagggaggc

SEQ ID NO: 34559 - DNA, 201 bp, Bos taurus
caagtaccttttttagctccacacgtgactcagattcagaaaggttcctctggcatctttcttcccttgtgttactgccttttaggtcaacacccttgacmcataaacagcagattaggaatcctcattatgtcaggctgctgctgaaagggactagagagttagaggccctatggccagtaggccagagaggtggggtgg

SEQ ID NO: 34560 - DNA, 201 bp, Bos taurus
aacatatgcatagtcttgtgaggtacttattattgttactcccatgttacaagtaaggaaactctggcacagacaggtttggtattgcccaagaccatggrtctagtaaatgctgaaacaagggtttgaacctagtgtacattcagaacctctctacaaatggtacaaacagttttctatttgtgacatttgttgttgaca

SEQ ID NO: 34561 - DNA, 201 bp, Bos taurus
ttccagcctgtgtaaaggggaggaagaccattggtcctggacccatttcaagaccacgttcccccgtccttgtcacagaggacgggcccttaccttgtttraagctctttaggaagccttctcgtggagctaacttgtctgggtcgtgcacaacacgttggggaattttcagtacagtgcgtacagcaggaatacggagac

SEQ ID NO: 34562 - DNA, 201 bp, Bos taurus
taaacccagagctaagactctgaacgctcagtgcaggggcctgggtttcatctctggtcagggagctggacccaccatgcctcaactaaatattccacacrctacaactaaggccagtacagacaaataaatattttttgtaaagttaatccaatgccattttaattggaatactaacttgggactttcctggtagtgcag

SEQ ID NO: 34563 - DNA, 201 bp, Bos taurus
cctccaacctctgacctacttaggaagggaaagaagacctgcactagaatctgttatgtgccaagtgggttaacaacctctgtataaccttgccttattcrggccataactatgccatgaactctgatactactatccttactttaccaaggaagaacagatgatgggctgagcacgtggaactagtcctgatatacaagt

SEQ ID NO: 34564 - DNA, 201 bp, Bos taurus
ttggggggttactgccttgggcctgacaagtgagggtggtattggcaggagggggtgggggtggagagaagtggaggcacttggagacacacttctgggtrgagctgatgggccttcctgatgaattgaaggtggggcacagggaaacagagggactccagagtactcctagaaacactcccaggtttggggagcaagttg

SEQ ID NO: 34565 - DNA, 201 bp, Bos taurus
ctctttgcatgaggtggccaaagtaagtttcttcaatatgtaataattctccttccattgctttccctccaatgtacttgtgttttgttccatcatattgrtttttgaaggaactgggccttttgtcctgaagaatatctcacttcctggacttgtctagttgttttttggaatctgacttgttgttctcctggctccctt

SEQ ID NO: 34566 - DNA, 201 bp, Bos taurus
ctgatgcagccccacaccagggccttggctcagacagcagagctcaggctgaattttagtccatttagatgaatttttgctcccttggctgagagtccttrtgtcagacaaaacctaggggtggtggctctggccaaattcagtccatgctttttttgttttttaataaatttattcattttaattggaggctaattactg

SEQ ID NO: 34567 - DNA, 201 bp, Bos taurus
catgtggaggccaaggacaaattttttcagggcaaccacaattagtaaaaacagcttctgtgtacacataccaaggggctgtggggtcatgtctacattayaatcagggcctctctgtatggtcatcctgacccccaacctactttagcagatcatcaagtgcacacaggctcttggattttctctagacaacccttagct

SEQ ID NO: 34568 - DNA, 201 bp, Bos taurus
tgaaaacctttgttctcaaactaataatgaatgtacagatatgatagtaacagttctctaagaggtaacctttaatgcaaccttttagcccctttagaagrgatgcacacagtgatgtttttttcctaggctcaaagctgagtactctatcattttaataatcttttaggtaatcctatgacaattctaccaacaagtttc

SEQ ID NO: 34569 - DNA, 201 bp, Bos taurus
aacattgaaaagaaataaggacatttatagagacctctgggacaacaccaagcacactaatatatgccttacaagggccccagaagaagagtgggagaccktggtttgatccctgagttaggaccatcccccggagaagggaaaggctaaccactccagtattctggcctggagaattccatggactgtatagtccatggg

SEQ ID NO: 34570 - DNA, 201 bp, Bos taurus
gcttcacacacagttatagaaaagttatgttttttttccctattattaacataatggtgaccaataatacttaaaatcagatactacttgacctcaaaacyactagatgtcatgattctgagttgctttaatatatctaattttttcaggctttatggataaagatttttttgcttatttttaaatttctgagctcaaggt

SEQ ID NO: 34571 - DNA, 201 bp, Bos taurus
ggggagctgaatcctactggctttccagctaaatgatagattggtttgttatttgttgttgataatgtgacttgtgataaattctttcttataggccagtktaggaaaatttattttctcaatatttgttaagatcttactatgaaatacagtgggtcacaggtaatagtggaaaatagatggcctcggagaagatggaca

SEQ ID NO: 34572 - DNA, 201 bp, Bos taurus
acaagatctgaaaatccccaggcttgtcagggacacacaaaccaaggacactactcttggacaaaacatggagagtcattcacctcttccttgggcccaaytgggtcaaatattaactcacttgaatggattagagatttgttctaggaggcaaaacttgataaatgtggccttttgtccccaagttggctttttctgaca

SEQ ID NO: 34573 - DNA, 201 bp, Bos taurus
aagttatccatgtccctagataggggtcccctaatcctgacctcacatcagaattgcctataaaattttttataatgtcaagatcctaggcctactgaatytgaatttgggggactgaggtctttgcatatctatgtttgattaactccacagtgattcttagtagagaaccatttttcttggctgacactgattttcacc

SEQ ID NO: 34574 - DNA, 201 bp, Bos taurus
catggatattaaattattaatttttatactgtgcttttcttgttgtaagtcaataaacatattttcatattaagtatttttgtagcccttaaagaggccaygagttgtagcactaaacctgtagtgatgctaaacaatcctgggagtacaactgtgagtctagaaagacaaaaggatttgggattctgttgcttacatggg

SEQ ID NO: 34575 - DNA, 201 bp, Bos taurus
tgctttcctccgcaagccggctcccacctcacccacgcatccatttgggtttcagtaacgcccccttttcctcaccctctttccagttttctggccacagrgggctgctgtcctgttctctctgaagaaagagcctaagggagagaaaatgagtcaacaagtggcggcctgggctcagattctgaaaatcgcttctccggg

SEQ ID NO: 34576 - DNA, 201 bp, Bos taurus
agtgggcgagtcaagggatgtggtctgggtatggaggtgttttttcatctagaggagttctctccatgacctcagtgactcagtactggtgagcaagccarttcccaaaggccaatgatacttcaggtaccagaatgtttcattttcaactgtggtccaaagagagggttgagttgggcctgaattgcaatcagccaaaag

SEQ ID NO: 34577 - DNA, 201 bp, Bos taurus
accctgtcaccagcaatgaggttgaaagtataataattaccagtttgaaagatgcaaatttagtttttctcttctgtgtttggggctatataattattatrtgatgactgtctattaatgcctcatattaaattctatttacaaatcctgtttttcttcttaaagtgatttacattgaaaacaccactgaataatccctag

SEQ ID NO: 34578 - DNA, 201 bp, Bos taurus
agcaatggtggaacttgctgtccaacacaaggagctaactaatgaagacccgatggaactggaggcccagagaaaggatgaagagagacaaaaggaagaartgactgaagaaccgaagagctttacaacacgggaaacggcaaggagattttctctatttgaggaggcactaatagttttgggggcacaggaccagaacac

SEQ ID NO: 34579 - DNA, 201 bp, Bos taurus
ccgcccccagtgcacttcatagttgcctggtgtagcctagatgctagagccctgggatagggggagatggttgaagtaggaaatggggctggaggcagggyttcctctggcctctgtgggtccagctcttacactctcttctctttcctctttctatctgtagcgatccagcgaacttgggccatgagcctctcggactcc

SEQ ID NO: 34580 - DNA, 201 bp, Bos taurus
cccagtagagtagaaaatattactttttccagccccaaacttgtcagtgatggcatgagaattcatcagtcttttgccaatatgagccaactcagagtgcygttcaaggggaagtctattaaaaaaacagtgtggtggctgttacgtggatgatgttcctgggcctctagtgagtgctgtcaattatgggtttggggaaca

SEQ ID NO: 34581 - DNA, 201 bp, Bos taurus
tgacttaatgtcagcatttatcctattatccacaaaccatcatcctgtttttcctttttaaattcatatttttcttattctttctttcagtgcactttcayacttcagattcttaaagaaaaaaagtgggatatagtataataaaggaacatataaataaacatgtaagtaaataagtagtttcaatataagaagagctta

SEQ ID NO: 34582 - DNA, 201 bp, Bos taurus
aaggaagaaagaagaagggatgctggttatggaatatgtgacccctttccattgttcatgtatttataatttatctgttgtgataacagttaaaaaacaarctactttcaagtttgtgatgctcacagggaaattggtctgaccaaactgtatccattctcatctaaagcagttgttctaagaaaaactttactttgtata

SEQ ID NO: 34583 - DNA, 201 bp, Bos taurus
aaataaataaatataattttaaaaaatggagtagagtccagaaactctcccttccttttattttgcattgctttctggcccaatattgtccctggaggtcrcctctcaggaggagcaggggcaatcacagtacatcattcaatccccaaatgtgttttactttctgtgttgagcttaaagctgaaaaggccttcctgaatc

SEQ ID NO: 34584 - DNA, 201 bp, Bos taurus
cccacagtctgtaaggccaatgagacctaactccaggccctcatttcctagcacctttccctctactgaccccactccagacacactgatacttgcccatrccaagtgtggccagtatcaaggtctggaatgtcctttattcctctttgcaatattcataggctttaacttgttcctttgttcaggtatctggaaaaatca

SEQ ID NO: 34585 - DNA, 201 bp, Bos taurus
acattgcatccagactaggatgaaaaatatgttgctatatttttttttgttgctatattttaatactcaaaaagagtaactcagtttatttcctttccctratttttcaatttcactaatcccaactgaaaaattcaaatctttcaattttactacctccttttgtgaaaatccaccctaggttacagaattccaaaggtg

SEQ ID NO: 34586 - DNA, 201 bp, Bos taurus
accccagattgtaccaggaactttccagggcctggcagttgagcacacagagggtggtctgctactctccatgctcgtggccatagcatccatcctctccygctcaacaccaaattccctctcaggcaggcattgccttagacccttgccaactggaaaaggtttctccaaggtgggaaccagattttctggcactcaggc

SEQ ID NO: 34587 - DNA, 201 bp, Bos taurus
catgattgattaactcactgaggacccgtactgcgctattcacgaatgtcagaatatttcccctttgctaaatactgaataattcactgaccttccttggygtttttgtttttctgcctcttgtgtcaaattccttgcaaacactgttttttgagggaatgtggggagagaggtgttcacttgtaatgaaccatcccttca

SEQ ID NO: 34588 - DNA, 201 bp, Bos taurus
ttcccctggttatcaaacttgcctgcacagacaccttcactcttgaggttctgatgctttcagatagcggtctaatggccatgtgctcctttgtgctcttrctggtctcctacacggtcatcctggtcagtgtgcggcggcgttcctcagcaggcatggccaaggcaagggccaccctgactgcccacatagccgtagtaa

SEQ ID NO: 34589 - DNA, 201 bp, Bos taurus
ctatctgaagtctggccaggtttctgcagtcataagaaatgttcttttcctagaaacaaagtaaatttatagaactgttattaccactgtagcctgtggckagacatttacaaattgaatatctgtgatattaaagcaaatcatttttaccaataaggaggactgattaacttgaattaaagagtaatgatgataaaaaaa

SEQ ID NO: 34590 - DNA, 201 bp, Bos taurus
ccccaaacagttacatatttttccacatcactatttttaatataatttatcctccttactttgttatgtgaaatttgtaaactgctgttgttaggaggaayaatcttttccctctctcacaattttgctttccatcaacatatagtacggaagcatccatcttgatgttagcaagacttctttgcttttgcacttccttcc

SEQ ID NO: 34591 - DNA, 201 bp, Bos taurus
gttgcagaggtgctctgccttacccataaaaggaaaacagctgataattttagcaaggtagtcacttatattatactggcccatataatctgacctctcaraaaaaggaactcagaaaacaatattttctctataattgaaccttttaagaaatgtttccctctttgatctctgtggttagtactccttagaaccgctcca

SEQ ID NO: 34592 - DNA, 201 bp, Bos taurus
aagtatacagccctgttgaaacatgctgtactaaagaaactgtcctcggggcctattgtcaaaaaccatgtcttttagaagttgggatacacagccagtgrggctgggtcctgaacatggagatgacattccctctaggtactgcactgtccaggtgagttttactttactatttattagctaaatatttatctagctgtc

SEQ ID NO: 34593 - DNA, 201 bp, Bos taurus
ttatttctacctacaaatgacaggtacagtaaaggacaatggaatgattccaatgacttgatttttttgttaagttcaacaaataactattaggccttctrgatggcaggaaaggtctatatagtcaaagcgatggctggatggcatcactgactcgatggacgtgagtctgggtgaactccgggagttggtgatggacag

SEQ ID NO: 34594 - DNA, 201 bp, Bos taurus
tcaggctgtgtagcctctatatatttacagatgcagtattctttccacatgtaattatccaggctcttcctttcctttctgttggcatgagtattctgttrcatttgaatgacttgagtcattctttgcaagctaaattttagtttgggaagtgttttatatatgactatattttcttctatagaaatgaaggatttccat

SEQ ID NO: 34595 - DNA, 201 bp, Bos taurus
ttttttattgaaattaacatctgattcttccagaagctctatactcaacacagcctaacatcacatgtatttaatatgggctttatacacatagattatartatttgaattgaaccttcagaaatcatctatacctttcatttccaagattcagtgtcttccagtcaatcagaaatataaatgtcacctaatgcacaggta

SEQ ID NO: 34596 - DNA, 201 bp, Bos taurus
ttatccttgaatcctcttaacagccttttaattttgtaggtgtggtggggaccaactgaaagacatgaaagtgaggccactgatcctattaatcttttatyctctttcccttattggtatcttcatcccaccttgggctccaatcccatctcctgttcccactgtacttgtcttctgatccacaggggtggggtgatggcc

SEQ ID NO: 34597 - DNA, 201 bp, Bos taurus
tgtttttttctgttctttctgttccttcctcaatgaactttttttgccacagaggaaaaaaaaatagtagagtctgcagggtgtcattagtatgctgtctractaaagcaccctattaatgtatcacatgctgtcttttccattttgccagtttttttcttgttattaaataagaactctcttaaactgtatttcatgtgt

SEQ ID NO: 34598 - DNA, 201 bp, Bos taurus
ctccaccagcccctgccaacttcccagtaaaaggcataaagtcactgaaaaaactgtgagtccaaaactgttaataaagatgatgataaacaaaacacctrcttatcagaatttagctaactttgttttttcccattgttaatcttagttccttaatgtatgctgaggggggttaattattaaaactgaggagttggtggt

SEQ ID NO: 34599 - DNA, 201 bp, Bos taurus
agtttcatatttatgaacacttaaggtgctctggatatgaatatgactttggcaaggaacataagaattagtcattgaatgtgttttatatacagccatamatatgtgctagtaggtatttaatgaccttgctccaattacagaaaaatatttggaaaaaagttaagaacccaggttaggaaggcgtctgaaatggcaatg

SEQ ID NO: 34600 - DNA, 201 bp, Bos taurus
gttaatcaacttccctgttaaattgcatgtttttcttcatgtcattgattatatgtgtcttctccccccagtctctggtcatttttattgcttttaactakaagtgatttattactatcaagtcatttccccattcgtgaatcttgctatttccaatgattaacatgaacaggttaccatggatacatttttgtgaacttt

SEQ ID NO: 34601 - DNA, 201 bp, Bos taurus
ttttataagtattaggggcaaatagggcaccaaatatttaatgagatttttgtctgcttgcattcctatcaaagactgtaattatctgctcaacccagaayattagcttaatttacattttccttcttactcacattctggtcgctgtctagattttttaaaaaacttaatccttttcccaagtatatttcaatagtttct

SEQ ID NO: 34602 - DNA, 201 bp, Bos taurus
agcatattgatttcaagatgcaaagagttgaatacattcattgttcaccagttggttatcttctttagtgaggatgctaatattctgcagagagagttaayagagaggttgctgtgaagggagccagctggcatttgcattgctaagaatagccttccgagattattttgagatagatcaatataaaaaacaaaataaacc

SEQ ID NO: 34603 - DNA, 201 bp, Bos taurus
atccccatactggctattactctctcaattttatttaactcctatggtcccatggcaaaagatttctctctttgttgtttatctttccaaaattggtacargaaatttagcctgagtgacatttttgggagagccctggtagtgcttgcctttacggggcacagatactcaggatggagcagcatcatagtatctgcttac

SEQ ID NO: 34604 - DNA, 201 bp, Bos taurus
gtcacctgggccttggatggggggtgggaattagagacatgggggtgggagcagccaaaggtccgtcattcaggactcagcacacaggcacagcctggccrttcctcacatctcacagacttccttgttaacagcatacctcgtagtgtgttgcacctgatgtgaaagtggggaggaagtttgagcacttgtggctggacc

SEQ ID NO: 34605 - DNA, 201 bp, Bos taurus
ttctatcttagggcataacatattttgggggaaagctgttcagatttgcagacctggaaaaattttaaatagccttaaaataaaaattggtcttgattttkattttggggtgggggttatacaaactcagacataaagttactttgttcacaaatctctaaagctgaaagtgctgaaacttcccccaggtttctgttacac

SEQ ID NO: 34606 - DNA, 201 bp, Bos taurus
agtgttattgttttcattttaccaatgaagaaacaggcttctgaggttcacttgttcaaggtcatagagccaataaaccgaggagagccaagatctgaacygaggtctgtcttactccaaatccatccccttaaaccactttttactgccccacgtgcctatggtatcccctgaggtatgaggtggcagtgacatgttaaa

SEQ ID NO: 34607 - DNA, 201 bp, Bos taurus
aaccaataccctggagctcgtcctagtagggatgcaggagccctctcatcaaattgtcctgatgagtcagaagtgctaaggaatcagcaaagaattttatyccattcatttactttctgtatcactttatctcttgagaaggtgaattcctttgcttattcaaaattttcaaggggaaaatttacaacaagggaagagggg

SEQ ID NO: 34608 - DNA, 201 bp, Bos taurus
actgcagcattagcttcacgaggctcttggactcagggtctgaagtgaacacaaagctcagggcaccaaaggccaagaacaacagcctggtttccaaatgktttgaatttttcttccaacacctccttcctactctcaaactgagtccaaattcctaatggaaacacagtttttattttttgtcccctctgtggaattttc

SEQ ID NO: 34609 - DNA, 201 bp, Bos taurus
gcccagaaaaatggccaacaaaatgtcaactatcattagaaaaggtacaaaatattatcctataattctggagaacaagggtgcttatgtatttggtacaytgtgtgccgttcaaattgttattcttaaagaaaaatgtaatggatctggagaagattcaaaaaaattaagtataatgatcaaggggatgaagttatacct

SEQ ID NO: 34610 - DNA, 201 bp, Bos taurus
aataatgaggatgaacttgagtgacaaaaagtttgtctaaacttgtaacaaatcattcccaacatcttgacatgtggtgaataattaatttccactgtagyggctacctgcctgttcagttcttctcagatgattccaatatagggagccttgggcttgtcaagtgctctgaagaagtgaagtgtcatgttcggctattta

SEQ ID NO: 34611 - DNA, 201 bp, Bos taurus
ccccttttaaaatctaaacctctttccccagaacttaccactatttccgtggttgctgtttcctgtctcctgcgatcgcactgagcacggccacccttgaycttaattccataggcagcccgaagctgctgtacaaccgccaaacgcaccagcctctgatcccacatcccggacatgtcgctcactctccgaggtgcgatc

SEQ ID NO: 34612 - DNA, 201 bp, Bos taurus
tgtaccccggcccagacatcaggtggctttcctccatgtctccagggttttgctcaaactcagactccagtctttaggccagaaaaggactccttgctgtmaaagtaaatgaaggaacaaatgccaaaggtgacttgtccattagctggtggatgaaggtttccctggtggctcagatggtaaagagttggcctgcaatac

SEQ ID NO: 34613 - DNA, 201 bp, Bos taurus
taaatagttgaatcaaagatatatttcatagttcaattttaccatgttagctaaataagagggtattaaaagaaaggattatcatatattaaattaaaagyttgtcactttgcagctctaatccatttgaaaaaaaaagatgatttcgatacaatttaatcagttagaggtctttattgccttaagtattaattgattagg

SEQ ID NO: 34614 - DNA, 201 bp, Bos taurus
ataggtaaaggtcaaagtggtcaggattgatcactgcatcttctgttttgcttagcagtcatgcattcacagacccaaatttgaaacctggattaactaayagttaaattttactgaattttaaggggaaaatgtggatgacagtataaaatcaatggtaaacagtaaaaaaggcataaaacatcagtttgtccatgacat

SEQ ID NO: 34615 - DNA, 201 bp, Bos taurus
cctatggcctcttagaagcacaaaccaccaccagcctgtataaccacttcccttattttatatcatcaagcaccttggcaccaaactccttcatgggctargttagcatctatttcactgtcttccactgtgccatgacccctgtcatccttggcagtttccatgctgagacagataatccttctgaccctgtggactctc

SEQ ID NO: 34616 - DNA, 201 bp, Bos taurus
gaaattttcagacatgctccttgatctataaaaaatataaatatttgtacaacctaatgtttaaaaattcaattaaatgaatctggtaatttccattctaycagacttaaagattttgttataaaaatataaatcatatatccaccctaaaatactttgaaaattactaatacctagtcttgagcaaggtgaagctgtttt

SEQ ID NO: 34617 - DNA, 201 bp, Bos taurus
gaattaattcagaacttgttgttttcataaatagcttaataggtaaagatttcatgatggatttcatcctgcatttatggcctcggggacagaaaataatytttctattgccctgaacttagagccttctcttatctgggtcaacttcttctttttttctcctttcaaaataattttctctaagtagctctcagagaagga

SEQ ID NO: 34618 - DNA, 201 bp, Bos taurus
ttacccaagtgcctagtttgttagttccaaacattacatctcagactttgtaaagatgcttcaaatctttttttatggttgcaaagactttttaaaactcrataaactaacagaacttgttttgagagccctcctaggtaatttaaaatttctatctccatgatgcatttctagaggtggaagaaattgaagaaatgacta

SEQ ID NO: 34619 - DNA, 201 bp, Bos taurus
tttaatacaaatcttcatggttcaataaggcacttccatttgaactgaagatggaagagaaaattaacccaaacttgagtataagaaaaaaactacccatmagttacaactgtttatcattaagatacacttaggaaagtggtcatacaactctattctggatagatttctatctactggagttagttaatgcctaagctt

SEQ ID NO: 34620 - DNA, 201 bp, Bos taurus
actgaggatccagtattcctcctatcacttccatccaagagatcttggccactgttcactacctttggttctaaaaggaaggattttctgtagctctttaytgatttttgtttgtatctctttgaaatatttgcaaatatgaatctcggtagaattgtattttattcaatccctggtgtctttgaagctgggaacataaat

SEQ ID NO: 34621 - DNA, 201 bp, Bos taurus
atggcataaaagactcttcagactttggcctctgcctctttttcaagtttcactgtcccctccctactcataccttaccttcaccttcctaaatgctgtayagttttatctccatatctttgcacatgctgtcacccaagcccaggatttcctttctgggctgtctgatgcattcccagtcatgctttaagaccaaaatct

SEQ ID NO: 34622 - DNA, 201 bp, Bos taurus
tttaacttgcttgctactgcctgaagtaggattcagcccaagtgtctgtcacctacttagaaaacactttctatggccgcccataaattttaaaaatttaytcatctatatttctatagataggaaaaagtgattctataaacatgtaccaagccaaagcaggtgtccacgaaccccctacaggtaaaggcccagaaataa

SEQ ID NO: 34623 - DNA, 201 bp, Bos taurus
acttacaatctttaaggtttttcccagaaattgattttatcctaaatatctacacaactggtctctccttccattttgttaaaacttattcttttgtagtmcacaggaaattcttatttttttcttttcacacactgacccaagtataattcttgaccttcccatcatttcaaaaatgaaaaaaaaaaaaaaaaaattcac

SEQ ID NO: 34624 - DNA, 201 bp, Bos taurus
aggactctattgtttccagcatctgctttaaagttgctgaaattgcaaagaaaagttaactctatttaacatatgtctagtgcatacaagcccttttattktttcttaaacccttgagctacctttgtgaagataatactatcttcaaataagaagacaaaagtaaagtttcccctctgtttatataatttcgattgaaaa

SEQ ID NO: 34625 - DNA, 201 bp, Bos taurus
ggcctcattttacacttttgcaaatctctttaatacctgtcttaatagaaacaagatctgtctgcttcggcattcaacttgtgatatgctatcttgattamagaatatgaagacattctggccttagacaaaaatgtaattggaaaactatttttgttactacataatacccaacaagtggtgtttttcttagaagttaat

SEQ ID NO: 34626 - DNA, 201 bp, Bos taurus
atagttggttgttatgaactttgtgatgtggtgatctttttatcaaagtgacaacacaggccagatcatactggatgtttctcctgtatttagtatggccmaaatttctaggctttaaaaattaattaggagcatgctactctcttattcttatgtgaagcttaaaatcactggttataaggcaccgtagttattggaaac

SEQ ID NO: 34627 - DNA, 201 bp, Bos taurus
ataatgaagagacaacttgaattttcaatgatttcattaggttttgccttctgagtgttttgtctccctacaacagtatagaaaagcataaacacatagayggacctttgttcaacactcacaaattattcatctaggtatttaagcataaaacaataacatacttaccctatttattgtcccttgaggtcaaagactgta

SEQ ID NO: 34628 - DNA, 201 bp, Bos taurus
tttatgagcttgatataactaacgagaagatttggagaaaggtatggttttgatttgtttggtttttaatgatcaatgggacacgcagtttatgagcaagycctaggctggcatgggatacaaagaggagaaaaacacaatcccagcctccaaacttaaaaactcaagtagagaaggtatgataagtatacgaataacagt

SEQ ID NO: 34629 - DNA, 201 bp, Bos taurus
ttccaacaataaatctcagttgcaatagccaactacacaactctaagcagtctacacaactacacagtctgagcagggtagggcctcattgctctaggcaygatcagacaatcctacaggaaaatgaaaataatctgctctgatgtcaggaaactttatagactcatagaataatagagctggaaatggcctcaactgttc

SEQ ID NO: 34630 - DNA, 201 bp, Bos taurus
gtctcctatgttatcatagcacaatggggggctgagaaggaagatgctgcagacatggaaagtgtcctcaagaatcttacagtcaaataggataataaatragacgtgtaacgtgtaacgtgtaataagatgtgcaatgggactttagaggacaggaatcactttccactagatgagtctgaggctagtggcattttgtat

SEQ ID NO: 34631 - DNA, 201 bp, Bos taurus
tggagatttcaattgcctgagatcaagttctctaccactgcctaatcatgtgatcttgggtaaaaaattttttaacatatttaagtcctgttttgcttacrtgcacacagggaaagataataatagcaactacaatttatagagttgttactaggattgaataaaataatccacttaagaggctgagcattgtaagtgctc

SEQ ID NO: 34632 - DNA, 201 bp, Bos taurus
tcagctaatatccttattaactttatgaggtatatgctataattatcctaattttgtgaatgcagaaattaagacgattaaggccacaaaattaaggtcayaaagctagcaagttgcaaagcagaagttggaatctaggtagtctggctgcagaatctgtgctttaactgtgcattataagccctgtggccaagcacttca

SEQ ID NO: 34633 - DNA, 201 bp, Bos taurus
taccttattcacttccaaggggactacaaataagcatgatcttccaagaggacagctacaatagatccatgtaactttaaaaatgtttgtacttcttgagytcaaaattccttttctagggatctaccttaggaaaataatcggtgctacaaaaaaaggtttatcatcaaggatgctcaccatagtgttttctaaaattca

SEQ ID NO: 34634 - DNA, 201 bp, Bos taurus
ggcacccctgggccagcaaccccaggcctgggtgtcaaggagttgttgtctttgctggatctagtgagatctgtgttataggaaagggtcctaacaggagytgtggccttttctagtagaacacaacttttacttttgtctagcttgtttcactttttctatttcatattcagtgctctcatttcatttaatctatgtttt

SEQ ID NO: 34635 - DNA, 201 bp, Bos taurus
tgtattaagtctttattttttttataatatagtaactagtatcattgaaagttagcgtaagtttctcataaaaaaaggaatagttcatgaaaaatccttakagctctgtgcagttgataaccttcatctctgcccgtattacacccatgtgttatcatatgtacttcatactttgttgaaataaaatgtgcttagaaatag

SEQ ID NO: 34636 - DNA, 201 bp, Bos taurus
gtcagcccgaggaggcctcggcctgaaaggaagacggcggcgggaccacggggcccagctgttcaggaggctgctccacctggggttctgctggggcctgyggctgagaaccaaccactgtgctgactcaccatgattgtggttgagaaaaacccagcaagatggtggctcccatgagctcaggagctgtaaaatataggc

SEQ ID NO: 34637 - DNA, 201 bp, Bos taurus
tctgttaagggccataatgagtgcttttaatcttgagagaagaaaaccaacaagtaaactaattgagaaaaaacatgatggacagagcagtgtcccgctgraggctgaagtcaatcaggcccttgtgcatcttcatgtctctcccagtcccagctttttccttttccggatgcttccatccatggtcacctttcccctgac

SEQ ID NO: 34638 - DNA, 201 bp, Bos taurus
agctaccaagtgtagcttgttgcttcggaggggaggagcagccttttttagtgtaaatgcctaactggtcctctgagaagctgtaagatgaccagggaacyaggagaatgccctgagcaaagattcatccattaggcagaaggaagataaagaagaattctgggtacttgctccagatctagaaacaagcatttagttctg

SEQ ID NO: 34639 - DNA, 201 bp, Bos taurus
aaagatttgtatgtttcaacttgtccttgtatacctggctccttgtgtacctgtatgtcagtcacagaatccatccttgaggtgaagcactcctattgtaygaattctcatgcttagctttctctcttttatgatgtgatatcaactttcttctaaattgattatttttccaaagttctatcttttaatattacatttaat

SEQ ID NO: 34640 - DNA, 201 bp, Bos taurus
tggccaggtgtgaatgctaaggagggaagtgaaccctagggattcccctgtccggtggctgagatccttatttggtgaagctactacctgcgccctgggtmccagggccagcctgatagtctgggatcacagcaggggaagtgcggctgctgacgtcccagccgaagagatgaatggaattccaggcagctggagtcatgc

SEQ ID NO: 34641 - DNA, 201 bp, Bos taurus
caccagcaatatgtgaaaaggcctattttcccaccaggctgagattttgaaagagaaaagaaggaggcaatgtctaggctctgaagaagcaagggaagaakaaggccaagtccggagcacaagcccagagcactcagcttggcagatgaggtgcacagatagcagaggactgtgtggtccaggccatggtgtttcatttgt

SEQ ID NO: 34642 - DNA, 201 bp, Bos taurus
ctgaagaaaggcccgcgggaggacgaggccctgagccgggaatgcaggatggcggcgatgcagaaggaaaggggtgctccgaggtaggtaccggagaaggrcggccgggagctgggcctgcgagctcctagggtgcctggcagtgacagaggctccgctgagagcagtccaggagaagagcaggcccaaccgaatcgtcct

SEQ ID NO: 34643 - DNA, 201 bp, Bos taurus
gtggggggccaggaccccatttcctgcctcccaggtcatattttttccctccacaaatatgtgacacttattcagagaggaggggaggaggagcaggatgktagcttggagagggcctcaaggccccagagaggccccacatggttccagcctccaccttagcctacagctgagggaggggctccagtgtccgagggagct

SEQ ID NO: 34644 - DNA, 201 bp, Bos taurus
tggccatattgggatttggggcatttcccttattcttttctggggccagtgccatcttttccttttattcctgtccttgaggctaggatttggggctggarctgattggtggtcaaaccttccaaacttggacctttttagatagctggggatcctccacttccagggatccccagttacccatcccttgattatatgaaa

SEQ ID NO: 34645 - DNA, 201 bp, Bos taurus
tgggaaaacccatccttccatggctgtggcactttggtgacaatgtcagagattgagttgactggtaaatcttagattttacaggcacagggcctaccctwtaccatgatatttaggcagtatctcagcttgagcctgattctgaaagagacatctcacgagagatttataagccaaatgcccttagccccctcaaactca

SEQ ID NO: 34646 - DNA, 201 bp, Bos taurus
actctcaactttaactggggctcaaattacaaccaccttaaaaaacaaagcacccactgccattccctccaagttactacctaccctcgattaacagtcaraagtctcaaaattaataaatgaatattttttaattaaataaattgttttatcattccaggactttcttggcagtccagtgcaagactttgccttccgata

SEQ ID NO: 34647 - DNA, 201 bp, Bos taurus
ctgtagagtagaccttggccccagctctgcccctcctcagggcagcttcctctggcaccgcctcctggcacccaccccaccagtgttactctgggctgtcrtgtccttacttgcaaatacagctccctgtatttgccctgaactgccctgcctgactccttgaggtcaggatggtttctcttccatcattctagcttttga

SEQ ID NO: 34648 - DNA, 201 bp, Bos taurus
tacggtgaaaggccgcagtcttccgtcttccatcccccgtgtgccaccctcttcccttttccagaagtgactgtattaccagctaattatctttgtatgtmtccttgaataaactgggatttttcctagggaactgcaatatcatgggggtatgacataaatactgccaaattgactaccagtttgcactcctcccagccg

SEQ ID NO: 34649 - DNA, 201 bp, Bos taurus
gcacagtggctgtactctctgccaggccgagtctactgagcactgcctagaaccatgagacaagtgctagggcaaaacggtggatgaagaacaaggggcarccatcagggggcaggggccccgggtcccttcaggtgcagaaccttctgttcatgctgtccagcccagcagagggggcagagtggagatcagagcagaggg

SEQ ID NO: 34650 - DNA, 201 bp, Bos taurus
tgttgtacttatctctgtgaccccagcacctaactcaaggccagacagagagtaagtgctcaacacggaggagccactacgaaccagagaaagagactggrtagcacatagcttcctattggccgagccaccatctctgccactttctggaaactggtgggtccctggatgtgggagaagagagcccaggaccgcttgcct

SEQ ID NO: 34651 - DNA, 201 bp, Bos taurus
agagggctcagtccagagcagttgccccagccctaggcaccatctgccccagtcttctgagaaggtaaaggagacagagaatggggctagcccaggcctgmaggcttctgggagcctggcaaagagaaggtgggaagccctcctggtcttatggagagccagagcaggcactctgactcatgtgtaatggcctcacccact

SEQ ID NO: 34652 - DNA, 201 bp, Bos taurus
cagacacatattataggacagaactagggaagaggaagacatgaaagaaggggtcaagaaagacctgaaaataacatttaacatccacatttttaaagtawacaatacatactcattgactcttagggaaataggtttaaatttatcttaagttaaagaaaaaaacccacactgggatcaacaagtccacattgctatttt

SEQ ID NO: 34653 - DNA, 201 bp, Bos taurus
gggctaattcattcggggctggagctaggaacgtcgacgtcggctccagcgctgagcgcagcctcactcccaattggctgggcctccggcctgcctatcgycgcgcaccacccctgggttcccttcccagtccgcagtagaaatactgccttctcccttctttgaccccggcccttcctccccttcgtccctccctcttac

SEQ ID NO: 34654 - DNA, 201 bp, Bos taurus
aaggcctgaaataaaatcttctatgcaactttgttactgctgaaagaacactttcctttctttttcatgatttatcttgagagggggcccaatactattcycaccatttgcttttctccttaaagcaccataaccaagcaaacagccagtggttgtggccactgccaggcacgggagcctggccagagcagccctgaaaca

SEQ ID NO: 34655 - DNA, 201 bp, Bos taurus
ccgaatagacgaacgatactgcgcagccccaccatggcaggtggctttctattcttcatgtcagggtggggtgagccttgttagggtgagttagccaggcrgggcctgggttctgaggtgtttgtttttgctgttccttcatacctcctgtcatttgttcatcatgtaagatattttgcctgtgttggaaggaaggggaca

SEQ ID NO: 34656 - DNA, 201 bp, Bos taurus
agcttgcttcctcccaggaaagcagtccttctactctttttgtttcctgcccactctgaggacacaaagcccttctctctggccaggtatctgttggtaaytccaggagagtgtatccatctcttcatctgcagcagctatactaggtatctgataccccatttgggagcacccctgagatccttagtttctgaaggtact

SEQ ID NO: 34657 - DNA, 201 bp, Bos taurus
cctgttgctttgaatcataactgttccttctatctaaagtagccttttcaccaaattctccacttatttttagatccaactctatatttactggagccacrgggccttctcagactagccctaccaccttggaatcagtctctaattgttctttatgtatgtcttcatttcttaaggtcagggccatgttctttatttcct

SEQ ID NO: 34658 - DNA, 201 bp, Bos taurus
tcagccattgaaattaatacattaagatatctcagaacttctggccaacagataagacatgactatttcatgatgacaagatataaaataaggataaataygacaagaaaatatcttcattctaacatgggtagtaattatgttcctagtgttgtcaacagatcctgcccttctttattctaataagaagatgttgaggtc

SEQ ID NO: 34659 - DNA, 201 bp, Bos taurus
ccacggagcctccgcttccaaatctctttgtctactcttacagactgcattgtgtccttgcccccacagcctcccgcggagatgagggggaggcccaacarggaggtaatatagattatgtgaggtgataagggtgggaccttcatcgcataggactggtgtccttgtaagaggaagagagagagactcccccaaaccctt

SEQ ID NO: 34660 - DNA, 201 bp, Bos taurus
cagaaaacttggaatgagctgcctgagagactcctggtcattgtaactattcaatcaaatgctgagagaccagggatttttataaagggactccagcaccrtgttaactggatgactcaacagccccttcactctaagtcaaacaattctctgtaggatacaaactctagatcctgctgacaaatggtatcttagctgtca

SEQ ID NO: 34661 - DNA, 201 bp, Bos taurus
gccactggcaaactaaaaagaagcactggggcccggtgctattcatgagccatgtgtttcattttaacctgagatgaaatagccagcaaccctgccttcaygctgtgtgttccacaagggccccactccccacctaccggttctgtggtcaggtccatgactgtcttgagggccctcggtttagaagagagaattggaaag

SEQ ID NO: 34662 - DNA, 201 bp, Bos taurus
ttcaaatacctggacttgtaagcagacgggagagaaagcagtgcagctgctgctgcctttccaagttgtcagccctggaattggtggcagatggggggacraggcttctgaacctgtagacccaaggagagaaagctacccctgtgacagctaaaaaatgtagccaaaattccattatttgagtcagtctataatatgttc

SEQ ID NO: 34663 - DNA, 201 bp, Bos taurus
tcactgctagggctctcattccaggtgaagcaggttgccaactccctcctagatagtgacctctctctctgaactaagcccctcaaagtcatgggccctgrtggactctgcttgctgtgcatgtccagatggggaaggggagaggggaagcgaagcttcacatgcgtggccccagaggagctgctcaacttgactggtttc

SEQ ID NO: 34664 - DNA, 201 bp, Bos taurus
aaaattaatctagaatgtcaaacctactatttcattgtattgttgcttaaaaagatgctaagggaaaatgtaagttaattttaaaatgtactagtaatttrgtagacagatgtgcagaaattatgaaggtgatatggttaaagtttgagaatcagttaacagtgaaactagaaaagcactatggatattttggaagaaaaa

SEQ ID NO: 34665 - DNA, 201 bp, Bos taurus
tcactttatagttattctttaagctgttaatatgctttatacaatcttttgtataaaagagatgtacttaaaaaaaaaaaattgtaaggggctgtctcttraggtagcagatgctccaccacatatgtttaatcagagctaaaggttcacatatcagatgtgttatagcaggaactcaagtactcatcaggaatttggact

SEQ ID NO: 34666 - DNA, 201 bp, Bos taurus
caggttcctctgtccatgggatttcccacccaagaatactggagtgagttacctcttccctctccagtgggtctcctttgtagcaaaagtggtgggtccaygctaagtaagttcctgtgtatgtattattttacgtgaagaagaggaaaacttttaaattgtgttgcttggtagcaatctctaagataagaaggattctga

SEQ ID NO: 34667 - DNA, 201 bp, Bos taurus
atcaggtttaaactagaataagagataggaatagaagcatgctttcctcagtttctctccattttgctttttccttccaaaatccacaggatggaaagackagggtatacattgcttcctacttcctcttcatgcctggtagatctctgactaagtcatatcttctaatgcctcatttgctctgcttcattgtcttgatgg

SEQ ID NO: 34668 - DNA, 201 bp, Bos taurus
ttctgttcttgtgatttatttgtcattaattccttgataatggcaaacactcaagttcagttttaaaaacagttccttatgcttgaaggcaggaagttgayttaaataacttgtagatcatatgatttcactttaaaattgtaaaatagttacattaaaatgtatgattcccattttactttcatcatacatttttttgcc

SEQ ID NO: 34669 - DNA, 201 bp, Bos taurus
cactaatcagtactactacgtaactgacgtgagcacaaagtcaggaatttcagaggatcctgggaaaccagtcacatccagctacaaaataaaatgaggaygtaaaagaagttaaggaaaaaggatagggcaaattattcaaattgcattactgttccttttaaaggtctctaggcaaacatctgatggtgggctttaatt

SEQ ID NO: 34670 - DNA, 201 bp, Bos taurus
aaacaaatataactcctggttagcttttattacatgggaacaagagcaattaaatcaaaacaattccacatagtaagggaaatagaaatgtataatgggcraacgagaagatgaccgaactttgaaacctcatgattagaaacaaatatttaggaaattgttgattttcaggaaatacttgtgtaattgtgttcttaggag

SEQ ID NO: 34671 - DNA, 201 bp, Bos taurus
gtacagtgtttttggaaattaactatgtgtgtgtgcccacatcagtgtatagctttgtgactctttctagctggctataagggaaacctttacctaggccrgattttctcaatagcatcactatttatactttggaccaggtattttttaatatgaaggttgcccagtatatcgagtggtatttaacagcatccctggcct

SEQ ID NO: 34672 - DNA, 201 bp, Bos taurus
ttgctcaagctgcaaccccaagaagatgttgaatagcaagtggcaacagtgaatgtgtggagacctgttcatatggctgtctaaggggccagggtggtgtyaatagaaatggagttcagttcagttgagttcagtcactcagttgtgtctagcttttcgtaaccccataaatcacagcatgccaggccttcctgtatatca

SEQ ID NO: 34673 - DNA, 201 bp, Bos taurus
aggaatgtaatatatagctttatctgcctattcatatctaagattacaggaattcaagtattctcagcatgatgttgacacggtttgataggagtctctayattctcactgtagctttcactgaagggttttttgtgtgttattaagttcttttattagtaatgctaatactacttggggattagattggttatgtttccc

SEQ ID NO: 34674 - DNA, 201 bp, Bos taurus
cccaaatgtctttaaattcttgctgggtagtaaaataagaagacacattaaaaactcgtggagactaccaagggagcattaaatgcaaccttgaaggcackgaggtatgtggcttccaacagtgcctacacaagtgaatcgaagatttccttaaatgcttaattttaagaggtaaatgacacaggcatttacaaacacact

SEQ ID NO: 34675 - DNA, 201 bp, Bos taurus
cttaggtctttgccattaaaagaaccttaataaactttaactgtcttgccacctctatatctagctcacaagaaatgctccgagaaaaaccagtgactgcrgtaggtaatgtccacaaggatttgtaactaggaatgaagggagcaggcaagaaggataactacttcatacagatgctttcctaatttgctggatgttaaa

SEQ ID NO: 34676 - DNA, 201 bp, Bos taurus
acaattttctaatggaaagttctttaaatatcagtctttagcacatgtaaaattaatgcataaatacatataaagaataaaacatttccatagaaaagaayctaatacgttagtgtttacagttaatctaagaactgcacaaattagattaaaattgtttctagttaaggcatttaagttctgggggactactttaacatg

SEQ ID NO: 34677 - DNA, 201 bp, Bos taurus
aacagcatcacaaagcttctcataagatttagctaggagtgttagggtaggagaaggatttgaaaaatactaaacctgctttgaaaatggaggaaaggccmtggaccaaagaacctaagcagactctagaagctggaaaaagcagagaaagaaaatctcctctagaacttccagaatgaatgctgtggaaacattgatttt

SEQ ID NO: 34678 - DNA, 201 bp, Bos taurus
tcaggcctcctttacctacccttctgatcctactccttccaaatttccttttctcagaacacagaattaaaagtcaaccacatttgattcagaaactatgmcctactagtatttgtcttaggccaagatactgacctctgagtcacaagttctgtaagatgcactttgggataagtaaatagttatgatataacagtgcca

SEQ ID NO: 34679 - DNA, 201 bp, Bos taurus
tgacatcattactgctgactgcattacctgctggagaaccagaggctctgataatctgactctctgactgttcttgtaattccacacctttattttcctgraaggcaaagagcaaaatgttatcgacctaaaaaggtttatccaaattgttcaaagtcacctgtctttaggaggtctaagattttagtgaccaataattgt

SEQ ID NO: 34680 - DNA, 201 bp, Bos taurus
agtacaaaagagaggccaaggaaaacttgttcttcaaagagtcactgaaaattatctgataaaaaataagatacattcttataaacagacccagcatttarcatccctcataaagaggtaagaagttgagtataaggggagaaagaggacatagtaagagatgaaaaagtggtggatataaagttctagctctatttggtg

SEQ ID NO: 34681 - DNA, 201 bp, Bos taurus
atcttatttctgagcccagaagtctgatatagtttcactgagctaaaatccagctggcagggctgcattcctttctggaggccctaggagagaattcacayttttgcctttcccagtttctagaggctgctcttggttcttgatgtagctccttttcattttcaaagccagtgatggccagttgagtttttctcttgatac

SEQ ID NO: 34682 - DNA, 201 bp, Bos taurus
aaggagaatgaggtcagaaaacagccattcattccttcaggatcagagtcaggtgcagagaagagccttaaccaaagctatgaacttcccagagcagctcmcatccttttaatgagggaggcaaaggtataaagacccaacatttctgtccaaagaaggatgcctgggcaatacttgtttcacaactccccagtggattgg

SEQ ID NO: 34683 - DNA, 201 bp, Bos taurus
tgcttgaaactgttttaactaccagtcttattgcaaattcttatctgttccttttctctgttcttagcacactcatgtaggagagaattagaaagaaaacrtatgtttccaataattgtagtgaatgtatgtttccaataattgtagtgaatgcatgggttccacaaagctgtgaaaagcccttggtaatgaaaacttttt

SEQ ID NO: 34684 - DNA, 201 bp, Bos taurus
tgagcagattactttagccatcttagcttttccaaacttatattctttggctcttatttattgttttactgtgtataagtttgatcattacttgaaagtcktagctccgaactgcctactttttaatgtactcaaacagaaaaataacaatcatgctagagtggcaaaatttctgcaaggatcataaaagagaatatatat

SEQ ID NO: 34685 - DNA, 201 bp, Bos taurus
ttttattaaatcttaaggtaaaagaaccactttagaagctgaaactaccaagctcagttgacactagaataaatcccattgcttccaggttgactagtackgctaagttccaacccttctagaatgtcactagtactgaagcctgagtcaccatcgtctctgacttggaacactctactggcctcctaatgagcttcccta

SEQ ID NO: 34686 - DNA, 201 bp, Bos taurus
aaacattccaattgttcattctgatcgtctaagcaatctttcagttgaatagtacatgtgaattataacatcctatggccaaaccataaaatcaagaaccrgtggctctgttaatcagttttaatttaggatgtgagccagatatatattagagtgattgcctggactggccaatagcttcagatcagatcagatcagatc

SEQ ID NO: 34687 - DNA, 201 bp, Bos taurus
aagcagttttagtgccatgtgaatcgttaagtcagccctgaatgtcactggttactataggaacctgggtaatggaaaatgaaaacagctggatttatgaygcccataaatgtgttgaacagctgcctactcactgccaatgaatactgttgagtggtaaatggtaagacctttacatacaagtatgtgggaaggaaaatg

SEQ ID NO: 34688 - DNA, 201 bp, Bos taurus
ggccaaaattgccccttgccttccagctctgactgtcgcatgcctgactctctgcctccagtgggggtggggagaggggccgcggggagggagcctgtacraagccacctaactctcatttgatattcactcaatcctttgttctgtgagccggccaggctgcacattggagcctttcacaggaaagttctcttttttttc

SEQ ID NO: 34689 - DNA, 201 bp, Bos taurus
caaaagacactgctctcagacctcctacatctatatgagattttaatcactaccaccttccccaagactcaccaaagcagaagggggcaccgggcccttckcagggacccaaagtgtatctaagctgaagtcacatactccctccaattctcttatcctctctggccaggaaaatggtgcttacctcatcaaacatgcttc

SEQ ID NO: 34690 - DNA, 201 bp, Bos taurus
gtacagatatttaatagaatgtttcttgctgtgtctttggggtgacccaaggcacagtgctgcaggcctagcaatgtcatccacaagagatagctctctayactcaacaaattataaaaaccaagacacaagcttcccatatatagcttattaaatggggaaaaatttttttaaataactattcagtgaataagccaaaca

SEQ ID NO: 34691 - DNA, 201 bp, Bos taurus
ttcttacctgctttcttctcacttgcatctttgcttctttctcctcttctaaagtacctccaagataacacaaatttcctggagggcccgtatttccattyaaaacatgctctgaaatgcaatcagctcttgaaataatttcacagaaatgttaccaaggcaaagcagaaaaaggaatgtaaaatgtaatatggccatggt

SEQ ID NO: 34692 - DNA, 201 bp, Bos taurus
caaggcactaattcccgcacctgccaggagtgatggcggctcatagctcatagctgagttcctccacagacaatgcccttggccctagaaaattgtcccayctgacgttattccctctccttgaggatagtccacacccaatgattgtttgctacgggggttcagtggcctggctcccctgcctaagtttggacctactct

SEQ ID NO: 34693 - DNA, 201 bp, Bos taurus
gaacacttctggaatccccatacaagtgctttttgacaaatacaaattttcaggccaaaaaatcatgtctattcttaaagatattttcatcagaatctgayagtactgcaagggccttctgcctatattcattttattaaatgttgacttcacatcaccaaccatttccatcttttagaaaagtttctgctttccttaaaa

SEQ ID NO: 34694 - DNA, 201 bp, Bos taurus
ggtgctcgacttctgccatgtcttctaccttcgtctttatttctttttttgacaaccaccttccctgccccctatttcaactagccaataaaccacaaggyttacaaaaacagtcctcagaaaatactgctggaatggtcatctggaccccaaacaacagacatggaaacaagaacaaacctcagctgcaggttcaattaa

SEQ ID NO: 34695 - DNA, 201 bp, Bos taurus
aacctctggaactaatgagttaactctagtgtcctggcgtccacctgacttcttttagtaaacgtttcctgccagaccggggcgactcaggccggcaagcygacagccctgccaaagtgggacgcaagacctggcgagaccagcagcccacgagagccggggggtggcgcacgtggccgccggggtcccccgggtatcctc

SEQ ID NO: 34696 - DNA, 201 bp, Bos taurus
taaatgcacattttcaaattgtcccccagaaagtcttccctgaacttaatattttaaaacacaatttcaaataattaagtaaccttttagcagggagtctmattaagcaaccagcttcatttttctgcttgtggtaggaatttaagtctgatttttaatcctcagtgacttcactcctttcaagacatggcagaaaaagac

SEQ ID NO: 34697 - DNA, 201 bp, Bos taurus
atgtagcttgactaaatataataaacctgagactcaaaaactttatactgaaatatcagtgacaccataaagaatatgaagtaaatgaataataggttcaygaagggtggatgaaagagaattatataaggagggatatttacaatccaacatgagggggcaaaagtcaaagagacttttgattgatgggcttaagccaaa

SEQ ID NO: 34698 - DNA, 201 bp, Bos taurus
tgttcccagcctcctagactggtgcttactcttaacactgacatgtgaatatggcccagtccttgaaattctatccttgacatgacaatggcctgtatgarcggtggtcttgagatacctgaggggtgaaacaaaagaaaactagccaaaaacataaccatttttcataaacttcactctatctctccttgccctgcatgg

SEQ ID NO: 34699 - DNA, 201 bp, Bos taurus
attgaaattcttcccgagatatgcagctaactctctatgagtttgtttatctaaaacagggaatgcctccttctgttttttcatcctaaattcctttcagratgcattgttggttggttctgagttctgacttaactcttgtataacttgttgttacatatctttttaatcagtagtatgtggttattcacagtattttaa

SEQ ID NO: 34700 - DNA, 201 bp, Bos taurus
agcatcctcctgttaatggtcactcaacagctcattgtgactttggtgctcttgcaggaggagatgaatgcaaattcttttttactctaccatgttgaacyggactcctatattttactattgcaatcaattggaaatttgttgaattggtcctttaccacaaacggtttaagaagcactggggttcaagcagtgtcaagt

SEQ ID NO: 34701 - DNA, 201 bp, Bos taurus
ctgtctttgcctgaacagtgcctgacacctagtagatcctctgtgaatactgttaaattaacgtgcacttttatgctcatgttctgaccctccttacaccrtacttagaacccaagggcttcaagtgagggtcaacaggtaacaggagaattagggaagcccagccgacccctggattggatccacagcgatggcacgagg

SEQ ID NO: 34702 - DNA, 201 bp, Bos taurus
tttctataaagtcagctgatattttcatgctattaattcgctacattataatcccttgttcagacactcagcggctatgcccccaaccaagtttcttaaamctgaaccaaccaagcacaccaacaagctcgggattcctgttttgtgtcacctctacattccacaggagaacccagtcctctttatctcctgttatcatac

SEQ ID NO: 34703 - DNA, 201 bp, Bos taurus
acactactatacataaaatagataaccaataagaatctattggatagcacagggaactatattaatatcttgtaataatgggaaggaaagaaagaaaggaragagggagggaggaaagaaaaaaatgaaggaaggaagaagggaaggaaagaagaaagaaaaaagtaaaatagaggattaagttggggaactgttctatca

SEQ ID NO: 34704 - DNA, 201 bp, Bos taurus
aggggcttgtaaccttgtgtgagtctatgccataacctcctttgtcatatggagaagcctatagacccttcctcggaatactgttcttaaatgtatagcayacataacataggcctatgaaggaaaccaactatattaaaatgtagttatcaaatattaaaaaatattttaatgtagatagtgcttcccaatcaatgcata

SEQ ID NO: 34705 - DNA, 201 bp, Bos taurus
tacccttaccgctgaaggtggcagccaggctcctgtggtctccatcttggcagtcttctttgccttcaaaaagcttattgctctaaagaaggcagggtgcmggtgcggtcactctgtttaaggccttaggggtttaagaaggcagcttggggtgagggcaaggcctaacccacaagagtgcttcctccgaggtgggcatta

SEQ ID NO: 34706 - DNA, 201 bp, Bos taurus
aatgaggctgtcttgttggaccttctgagcatcttgatagaaacatctcctttcagagggtatgggtggcaggtgcacgctagcgttgggcacatgaagaygttggcctagaagcagggttctgcacgtccccatgcgtaccagggccctcccagcctggacctctttttccatttcaacctgaggatatggatctttcac

SEQ ID NO: 34707 - DNA, 201 bp, Bos taurus
atcaaagctatctataatctctaaaagatgtccttataatactaatttaatcaagctgcaaaaaaaaaaaaaaaccaaactaccatatagaaaggaatatrccatcatcatcactctttgaaattcatgcacttgttgcaagttgccattctagaccaatgtatatcccttgctctctgaaatgtatcaggtgtttcatct

SEQ ID NO: 34708 - DNA, 201 bp, Bos taurus
ggctcaaccctaggtctcctgacttgaagtgtgttttttctttagctacaccatgctgcttctctacaattaatggaggctgggtatgggccatcttttcrccccaggtctggagatgggaatgggtgttgtcagactagcgccgtgccctcaccatcttctccttttaggtgctctcttggcttctatgtagcatgggca

SEQ ID NO: 34709 - DNA, 201 bp, Bos taurus
ctctctaatgaccgtgaaccaccctgcctggaaatgcgtgtgcaggcagcaccctgtcctcctcgacttttctgatggtctgtgggggtgcttatcccacmctggtcctcccatggcctggcgcatgcggtgaatgcagaggcggctggagtgccttccgcctgcaccttggagcagacatcaaattaactctggcccttc

SEQ ID NO: 34710 - DNA, 201 bp, Bos taurus
ttatttgagtttttgatgtctgcctcctcctgtgggctgtaagctccatgagagcagtatggtctgtctgctgttctgtgtatagtgcctgtgggtgttcmtaagtatttatggactgaattaataaatggcttgtttttctttggttgatgcaagatggcaaggaaagctgcaggacctcacattggcaagaagccaaaa

SEQ ID NO: 34711 - DNA, 201 bp, Bos taurus
gcatttggtgttgaggttgtctctattcttcagtttgacacttaatttgttaccggtttatttgtgttttgcatatttctaaaaatgattttgagatagcycaaaacaaggccaaagcctattaaaacaagaaaaaatataaggtccaaatggagaagagggaattagagatgaagaataggaggataattataattatat

SEQ ID NO: 34712 - DNA, 201 bp, Bos taurus
caccttcttattctcactcttcctcagtcttctttgtcttcatgtcttactgccccccagcccagtgtcctgctccagctcagtcagggtccgtgtgaatraattcctgaaggctggccttgtgatcccatgagggcctctttcctctaggtctgtaactgtgcagatcttttttgtcacctagaaattcctcaagctatc

SEQ ID NO: 34713 - DNA, 201 bp, Bos taurus
accaacgcaggggacatgggtttgatccctggtccaggaagattccacatgctgtggagcaactacgtccatgggctgccgctactgaagtctgtgcactygaaagcctgtgctccaaaacgagagtggccaccagaatgagaagcctgagcaccacaggaagagcagcccccgttcgccccgtttgctgcaactagagaa

SEQ ID NO: 34714 - DNA, 201 bp, Bos taurus
atggcaccaaggtgctgtgaaatcctcagacacccaagatcagagagccctctggttccaccagggggaaaggttgtgctaacaggtgggctggacgaggrggcctcacctctcactctcatctgctgccttctcggcctcctccagcttctgcagagctgttgccagacgctcctgggcacgatccaactcttcctcaac

SEQ ID NO: 34715 - DNA, 201 bp, Bos taurus
aggaaagtcagctagtatcgtcccggctaagagaaaaagagaagacaaagatcactgttgcctgttttcatctctgctcactctccatccacttcactgtytaagcagccatctggctgcaaaggctgtgtttctcccaggtgtatgttcagtgggggagccattactcacgtcgtctggggaggccaacttcccagacat

SEQ ID NO: 34716 - DNA, 201 bp, Bos taurus
gcggggacagagcagagacgggtgggctttctgatgtgtcattttcctggggcctcaggcaatgggcaaggaaaggccccatttggtgatcaggccctcarcttagagaaaggtgccctccaaagtgggcaaatgtacaaccagtggtagagacagattgatctagagaactagggcctggcccatcacccacagccctct

SEQ ID NO: 34717 - DNA, 201 bp, Bos taurus
agggcagctgcacacctaattcaggcagatctaaatgccaccttcctcaccaggatcctcccttctagcagacaagcaggctcagtgctgtttacttagaygtttgatttagccactctgtgatgggccttataatgtgggagagtaaaggggtgatgctgggtagatatgggagaacttttggtaaggcaagcttagaac

SEQ ID NO: 34718 - DNA, 201 bp, Bos taurus
agccaaagacggcgaaggcgccaacacaaaccagccagcttcctgcctctccagatcccacagccctcagtcccggcgggatccctccctgggcaggaccrctttcccagggaggcaggccatttgaaaagcctcttctgccagtaaggctggaccaccaagtaagatggggcccagctcccctgcacagtcatccacccc

SEQ ID NO: 34719 - DNA, 201 bp, Bos taurus
atagcagaaaagaacgatttatcttcgaaagtagaagttttccagaaacgtgagacaagaaagtaaagcaacatctcaggcccaatttcgtacagacggaytacaaaagttatagcactccacagctcagaaacattactttagggacttttagaaacttctaactgcttctgatttttcctcatagtcactctaaactca

SEQ ID NO: 34720 - DNA, 201 bp, Bos taurus
tacatcaaactaggtcctggacacggatgccaagcaattaaatgggcagtcatgaagcatgcaaatagcgagagaagacagggccttgatttaaacacacraagtctggaggctgagagagtagtgcagagggaagcatagaacacttcacccatctgcaggaattcactctgcgagggcctcaaacactgtgcgagtaaa

SEQ ID NO: 34721 - DNA, 201 bp, Bos taurus
aatccctagatgtccagcttccatcagacatttttacaaccctacattgagcaatcagatccccttcaaaagagatataagcaagagcaggttttgagatktgaaaggtagagagaggaccaggtggtactaggcaactgaaaggaagagggggcttggatgggtatgaaaagactgcaaatcaacttcccttttgaatag

SEQ ID NO: 34722 - DNA, 201 bp, Bos taurus
tagactgacatgcacacagttaggtgttgtgttgaacggccttgcagcacacagagctcatttgatgtgctcttttgtcagcccaatgagccgccgcttcygccaccactctttggtggtggccctaggaaagccccaagtgaaactgcaatgttagggcgtatctcgtgagacaattactttttcaaattgtttatgctt

SEQ ID NO: 34723 - DNA, 201 bp, Bos taurus
ataaggtacgtttttatcaataaaacaaattgttcagtgtcactggtatgcattagatccaagactacttttaaggaatacatgattaagtggggtatgargaactaacaacaatagtgtcccaaggctgaggtgtctttttctccagtgcccctagaattacttctgttcttgacatagtgtcgagtggaaagcttgact

SEQ ID NO: 34724 - DNA, 201 bp, Bos taurus
tggtcaggagctggaagctttagcaggtgagtgaatgcagcctgtggtactctgtgatccagcagatgaccagagctggaaaggcaaggaagcttttggtrtggcccatgtgctctgattttggggcacagagaggtagagaagggggagcccggggtgcacagaagacacccagagcagcagacattcaaaaagacaagt

SEQ ID NO: 34725 - DNA, 201 bp, Bos taurus
tggctcagctcccagggcaaggccaaggtagagcaaaatcttgcacccaggtccctgacttccggccaggattcccggccacgcctctcttcaggaaccakctcttggcgtagttcttggcaattcctcttcagctccatccaccacccctgtgcacactagcaggcctctttcttccaggaatgattacacagaaaatgg

SEQ ID NO: 34726 - DNA, 201 bp, Bos taurus
cccctgtcctttcactgtcttatttcctattttgggctcttcaaccttagtaagatcctttgtcccttgacccctcccttttatccgactcctcagttccytcttggcctcacttcctttcttctcagttttagatctcatcttaacagattttactttatacttaagctgaagtgccagggctccttgctttcacaggcc

SEQ ID NO: 34727 - DNA, 201 bp, Bos taurus
cttgaatctaaataaaagcattggcttgttggggccacacattggtaccatactcagggtgaagcctggcccccagtaagaactcttagcaagtgggctcygacttatgtagggtgctaagtcacttcagtcatgtccgagtctttgcgaccctgtggactatagcctgccaggctcctctgtccatggaattctctcagg

SEQ ID NO: 34728 - DNA, 201 bp, Bos taurus
gatatccagccactcgtaataaagctacttttagaaccctcaggctggtgggtctgagcttatttgaaaaaagcctgtctcccacttttagaatttgttcmgaactggccagaagaagaagcaacacatcccatgcatggctaactgggcatggtaattgactgaaactttcttccctcatggctcagctggtaaagaatc

SEQ ID NO: 34729 - DNA, 201 bp, Bos taurus
agagagagttaaattggcctaactcttaccctcgagagaagttcaagttgagaacaattgagagaagacatccagtgacacttgggagctccctgattccyatgtcagggatgtaaagacatggccaagaggccaaagaaaggtgttgggagaacagctgtgttcagagggagtttgtggtgttggttgagtgttgtgacg

SEQ ID NO: 34730 - DNA, 201 bp, Bos taurus
aaatctccctccctctcttctggctcttgactgggttactgttgtaggaggtgggaattaacttatgggaatagacatagttcccccaaaattgcacataycataaaaaagagagacctatagattcatcttcctatagcatatacatactcacaacttggctgaacccttctacagggactcctagatatacgaaccaaa

SEQ ID NO: 34731 - DNA, 201 bp, Bos taurus
cctggtgaactctgaggctgggtgactgcagggaaggccagtggggaaagctttggaggcgatccagaaacttcagctggtgatgaattcaacatcaagcrcagttcattcaactcaaggagatttgggttcagactcactttgcaatcatcgtcttccatccacagccaacaagaatgttgtccagaaagtcaaagctga

SEQ ID NO: 34732 - DNA, 201 bp, Bos taurus
ccaggagcagagagatagaaggaagttgcagcaaggtggggagttacctagaagtggagcacacaccacctccagtaattggaaagcttggaggcattgcrggcatcttcaatgaagggtaaatcccttgtatagccaaccggccagcttctggaatcttctttggggctggtgggaggagccaatcttggccaaggctgg

SEQ ID NO: 34733 - DNA, 201 bp, Bos taurus
aaacactacatataagccctgcctttggtaagttatcgtaagattaaaagggaaagatcatggggctgttggtggtttttgttttctggtttttgatgttrttgttgctttaaggcatttctgtattccagaagttttcatgaaatgcattgtctttttaaatgaagcttgtctttcacagtaagagcatttccatcgaag

SEQ ID NO: 34734 - DNA, 201 bp, Bos taurus
gctaaaggtttccagttgacacagctggcttatcccttgccaatgatcacaccaatcatgtttgtaagtcatcccaccagaccccagaattctcagtaagygacaagctactgaaaagaaagaagtatctccatttcaaaaaattctcttgtgccaaaattcaggttaagttctattggaataacggagcaatgatagaat

SEQ ID NO: 34735 - DNA, 201 bp, Bos taurus
gttaaagataatcatagaaactgtagggactagcaggccgccaagattcaggggagttttggtcccacaagatcagcaaacacggaaaaggccagaagccygcagtgtgtggtgtctatttcagatggaagtgttaaaccagcgtggtgtcttacctccaggcagtgctttcactcttgttcctggggccaggcccctagg

SEQ ID NO: 34736 - DNA, 201 bp, Bos taurus
agatctctgtgggaaaattaagttgaagacttagatttaattttttgcttgctttcaatttatctacatgatggaaacaaagccatttgtcttccctcgayccccatgcttctcatcctggaccgataaaaaaagacataagagaagaagacagaggaagagagagtgtctaaaagaatgcaaagagagaagttgtaagaa

SEQ ID NO: 34737 - DNA, 201 bp, Bos taurus
cctggactgcacagtcactcaataaatgttgatttctttcctttacagtcctaaatcacaacataaattttttttaatgtgaacaacataaactcccacaygctgacctacagtcagtacacaccttctttcagctgaatttctactttctataactacagtactctccaaagatagtttataataatgagttaacaataa

SEQ ID NO: 34738 - DNA, 201 bp, Bos taurus
gccttgcatagacttccccatgtgctcctacaatgcatcattaatgctgtatcctccacctcttataaggattcactcttctcacaaagtctgactgatgyaatacctccagaatgttcagagacatgtcttagcattgtcattgttaagagcacagcagacataagcatcagtatttccattttccgagaaagctgacca

SEQ ID NO: 34739 - DNA, 201 bp, Bos taurus
tctcacgtgcgcctcctggcccatctgcaagtttgtgtttcgtttcctgggtccaaaacaaaagttctcacggggaagagagggttggccgaaggtgaaayggacaaattagggtgtcccaggtcgaggagggcaggactgggagccgggggaggcgagtgagctggcggggaggggaacaagagggggcgccggcctctg

SEQ ID NO: 34740 - DNA, 201 bp, Bos taurus
attactaggagcaaaatagccacagcaggctgggacactaaagctgagcatagttctttagagatacccaggctaggatgaatattctcttctaggagtarggtagtggatatccctgagcaaagtgagattcttggctggagagcagatgttcatttggatttaccaaaatcaagaaggagactgcctcaatgacatagt

SEQ ID NO: 34741 - DNA, 201 bp, Bos taurus
cctgccaccagtgtccttctcccacagtgagacacagccactctctgcctcctcaggcctactcaaaggtaggcctgggccatgctcctatggagtcactsctttgccctgggtcccagtgcatgtgaaacctcttgggcaccctccagtagtggagtctctgtctcacccagttctgtgaagtgcctgcactcaagccca

SEQ ID NO: 34742 - DNA, 201 bp, Bos taurus
aggaaacagctcaaactcaagccacattatgtcactgttctgctcttgaccttctaatggctctcacatcaaccaaagccaaattccttacaaggcccttyaaaggtcttacgccatccacctcatcccttccacatttcaaatcacttcctccactcctttaggcatggctccagccatgggtctctcttggctgctcct

SEQ ID NO: 34743 - DNA, 201 bp, Bos taurus
tataaatcccactagaacgtgcagcaggcctaaaagcaggggtcttgtatgcctgagtcacagctttagccccagtacctcacataaggcctggctccccrtagatggctgagtaatttattaattattttacctccatgttccagggtttgatcgtctacactgaaggctccaagactctatctagctggtgcctggagc

SEQ ID NO: 34744 - DNA, 201 bp, Bos taurus
tgcaggagagtggttaggcaggttttggtgatgtaaaggatcactgccagattaacatacagtaagaaggtttttcttgttcagctatgtaaaatttcttkagaaaggttttatctatcctggttgaaagaggagtatttaatgcctttgtttttcggtagtcaaactaaccactcaccttgcccaagtgggatcaggctt

SEQ ID NO: 34745 - DNA, 201 bp, Bos taurus
agtaacaatgctataggggtgtacacactcggccaggaagtgctgtggaaatagctttgagaaaaggtgatacaggcttttgatttagagacaaaggatayacaaattgggtttgtttaaaaatactcaaacttactcttcaaaactaattcttttgccttggactcctgtagatttttttaagggagaaaaatttaaatg

SEQ ID NO: 34746 - DNA, 201 bp, Bos taurus
catatttttgtcccttcatagaattatccagctcaacagtcccaggaatgagttttagacctcactaggcagtttccctcctggggcccctattcacacayagggagccgtgggcactggatacaccagtgcttaacttgggtgcagacatcaaagcagtcacccctccttgtcgctcagctctgatccgccagagcttgt

SEQ ID NO: 34747 - DNA, 201 bp, Bos taurus
ctccaataggccaggaattgttccacccaatccagtgtggatccttgttgctcaaatggggctctatacagacaaaaccagcaacaccaggaacaccaggrctagaaacatggactcttgggccccacctcagacctactgagtcagtatttgcattttgatgtgatttctaggtgattcagacacatgaaaatttgggaa

SEQ ID NO: 34748 - DNA, 201 bp, Bos taurus
gcaagcaaaaccatctttccaggctgctttgcaagttacagacttgcaccccagccagctgggagcatctgtcagccaaaatgcaggcaatttaggaacaytgtgtcttaaccgaggctgctcccttccagcccgcagctgtgctgttccctatttaagtcttgtcacacctttgccacctttaagcctaaagatcaggca

SEQ ID NO: 34749 - DNA, 201 bp, Bos taurus
cttgctgcaggagttaggcctactctctagttgcggtgctcaggcttctcatggtggcttctcttgttgctggtacacaggttcagttgcttctcatcacktgggatcctcctggcccgggggtcaaacccctacatcctgcactggcaggaagattcttcaccactgagccaccagagaagccccaaggttcttttattt

SEQ ID NO: 34750 - DNA, 201 bp, Bos taurus
aacttactaatttttgaaaatattaaagaatacagtcaataaactttcatggttaaggcaagctcactcaccacagaactcaagaaaggctctgaaattgraagtgacagagaattcacaggacatgggataaaacatatggggctgaaaacagaacaaatctgtgcaaagagtagatccctaggatttgttctaaggaat

SEQ ID NO: 34751 - DNA, 201 bp, Bos taurus
ctcttataccttggcttcattatattttctttgctagttgtaaggtagctttgaattctagttttggactacatttcggtcacctctcttgagaacagtgyattctaaagtatgatgaagtgactcagtagtttaaactgagtggtcttttcatgctaccctttctgctaagcagtttacttgcatttaaggtattcactg

SEQ ID NO: 34752 - DNA, 201 bp, Bos taurus
ttctagaaatggggattatattgtcagtaattttagagggaaatgtcattgtccattttcatagtttatgtggtgaccagggaaaataggctcttttagamgtttttaaagtatatgggaaacattttatacttgtttcttgttttttctattgagagagtattgtgctgacagattttgaagcatatataatactgtttt

SEQ ID NO: 34753 - DNA, 201 bp, Bos taurus
ccagtttcctgattttgatgattatattgtgattatctaggaaaaacacccatagattgtagaaactatgtgttgaattgttcaagtgtaataggacatcrtggaagcagcttactcttagatggttctagattttaaaaacttctttgtattgtacttggaacttttctgtaagtttgggggtctttcaaaattaatcac

SEQ ID NO: 34754 - DNA, 201 bp, Bos taurus
ctggagcaagtattgggttttctttcctattctttaaagagggtatttgttgcacaaaagtggtgtaacagtagaaaacaaattctaaaaaatagactcayattctcaccaccctaatcgactgactttttattttcccatgtttgtattctataatcagaagcaaataacatttttaatgtaactgtgcagatataactg

SEQ ID NO: 34755 - DNA, 201 bp, Bos taurus
tcccagaacatacaacctctttcccactgcagggcctttgcactgctggttcccttcgcttagaatattctgctggctctctgcacggctggcttctctcrgacttcagctcctcagggaggcctttcctgcctgtctatacagattaagttgtactggtattccctatggcagcatctggcttattgtttcataacattt

SEQ ID NO: 34756 - DNA, 201 bp, Bos taurus
agcctcctctaccctgggttgttccagggaacagaatcccaccatggatgacaaacctcccttccagttaaccgtggccatcttcacaggccttttacaargaaaatacccctgggagacgaagtctctacttaaggagcatccttttaaaaaatgttctatttttatagggagtgtagccttattttttttttttttaat

SEQ ID NO: 34757 - DNA, 201 bp, Bos taurus
atttatgtggaaaaaatgaccaagccagtgtgttaagaccttttgattaccaaacaaaattatctggctagtttggtaagtaaagataacaacaataaggygactgatatcaaaataacaaggccttagtcaaagaaaggcattatggagaagacaggtctgatggtcttgtctaccatgtgtagggaggggatagtccag

SEQ ID NO: 34758 - DNA, 201 bp, Bos taurus
aggaaggaggaggcccagaaagcagggccagagcagggtaaatttgagtgaaaaaatcattgctgagttttgcagcaggaaatggtggagcagtcagtccyccagggccaccgggtacctctcttctaagtggaggagacaagctggggctgaggggagcagatacttccagccatactctggttctttgcagtggctggg

SEQ ID NO: 34759 - DNA, 201 bp, Bos taurus
gaaaaaacattgctggaagttcaaaggaaagctttggctttgctgatgaaaagtccagttgtagctggtctcaatccctctctagatttcctgccgtgaaygtggccaggatgtccatggtgacatcttctggtcatgaggcaaagcaagagtggaatggaggtgggacccagagatccgaccctgtagctaaaccaaccc

SEQ ID NO: 34760 - DNA, 201 bp, Bos taurus
cttttcctcccatgataactccaaatatatcagtgtatgcaaacagacattgacagcggtggtggtgaagtgtcagctacattggtaaggtctgggaccartttatcctaagtaaatatttgatgatattcaattcaaggagttatgtaggtgaaatatggcaaaaccacatctccacctttaaaaagtagctgagaatat

SEQ ID NO: 34761 - DNA, 201 bp, Bos taurus
aaaatgcatatatgtgtataattgagtcattttgctgtatagcagagattagcgcattataaatcaaaatatttcattaaaaaataaatgaagattaaagrgcatcacaggtacagcagagatttttaaaagctggaagccaatactatgaaaaatcatttcaaaattactactttcactatattaattttgaaaatatta

SEQ ID NO: 34762 - DNA, 201 bp, Bos taurus
gtcatggggtcacaaagagtcggacaccactgagtggctttcactttcacttttctcctgtttacttataaataaatgagttccagagaaattgtgtgatragtcaaaatactacagtagttactgcatggccggcccagctatgagcctcctaccagctaattttcctggggactgaaccacctcaaaggtggaggagca

SEQ ID NO: 34763 - DNA, 201 bp, Bos taurus
gaaggcctgtattctccagtgaggggctggctgtcaatcccgacagggcctggttggaaactagaggagtcaggtggggacccagacttgcagacaccgtrgatgtgcaggaatgagggcctagtggctctgagcctttcaagtgtaaagagaagccagaagcatgagaaggagaaaaatttatggtcagctaattattta

SEQ ID NO: 34764 - DNA, 201 bp, Bos taurus
tttcagaagctgtgtgtgtgtgtgtgtgtgttaatgctgcagaacagttaaatgacctgacaagtacattccttaaaggcttcaagcaatcactcttaagrctgagtctgaacactgaggggaatatatttaatgctactttaataccttctcaaaccagtttaagtaattttcttttcgtgggccatcactttttccaga

SEQ ID NO: 34765 - DNA, 201 bp, Bos taurus
tccaatgaccacagtgatgttgtctcagcctcattcgatattcacagctaatcagtgggtaagcaatgctgtggaaagcagaaaagcctgcccagactaaygcaacttgggaattcctctctctgcgtgagctgggttgagagagccagccctgcactaaccatccatcctgacttcaggaagggatatggatgagaggct

SEQ ID NO: 34766 - DNA, 201 bp, Bos taurus
ggccttggtgtaagtgtttatcaaatctgacacacacctcggggctgtgttcacaagtgcactgattggttgatcattggctgtggttggttcatggactmaacagaagatggccaggtgtgaataaaagacttggagctttagagtcaagctggttcatcccctcccagagcagaggccttagacaagacacccaattct

SEQ ID NO: 34767 - DNA, 201 bp, Bos taurus
gatgatgccctatgtctccacaaagataatatttatcagcagttatcattttggcattacaatcagcagcatagagtcaatttcagagaataaaaaagaayacggaatccagattttagaatgcctaacttgcagattccaacttcctgcctgttctttttcccctaatgttagataaggcaaaattagaacaagcaatgg

SEQ ID NO: 34768 - DNA, 201 bp, Bos taurus
ggtcacgatgctgaaagaggggaggaaaagagaagagaatgatgactctttaggctttgtagaggcagctgtcatcacgggcccactgaacacggttatgyaggttgtgcccagcactgagatgcctggcaatgagggaggggtggcactgccagcagaaatccaacctggtctctactcaccaagtcatagttggcctgg

SEQ ID NO: 34769 - DNA, 201 bp, Bos taurus
ggtcggatacaaagaggaggacacacggggagaagaggaggcaggcagggaagagagtcaggaaggagaaggggcagggtgcctataaccaggctagctgyggaatcattgagtcagcccagtgggcagaggtcccaggactcccagccctgcataggcagagtaggaggcaggggttacctccacacacacctcgcactg

SEQ ID NO: 34770 - DNA, 201 bp, Bos taurus
gggggatagacaggtaagagcagtttacagtaacttggaaaccaaagcaaggcaattatataaagtaatttgtctctatgtccaattaataaaatggcccraccatcaccaaaaatacatctaatcaacaataggtaaagggaagcaagtattaatgaaatcaatgaagggcccaagggtagaaaaatggaccaaagttgg

SEQ ID NO: 34771 - DNA, 201 bp, Bos taurus
acgaacacaacaggcacatgcttccctaaatttttatatgggtacacatatgtatactgaatatcttttttatatatacacatcatctcagacatatatayggttcataaaactgaaaacataaagatcttcctctctgcataggaaaatgttctacagacctgtgggaatattaaaacaaagaggaagaggtccgtaatc

SEQ ID NO: 34772 - DNA, 201 bp, Bos taurus
tgattcctattctccgtggagaggcagactcagtgttattgcctgaagattgttttatggattttagttttttaattcccatgagagcattcaaatggccrcagctgctgggcttatcaaagtgtagctgaagacatctgcactgtgtttcctgctgttttttatattctccatgcttatttaaatgtaatgtaactgacc

SEQ ID NO: 34773 - DNA, 201 bp, Bos taurus
gttcaagtcccatatacactccttagtatccatggttttgcacctgcagattcaaccaaccagcaatcctgtggtactgcagtactgtatgtatttattgraaaaaaaaaaaaaaagcctgtaaagtggacctttgcagttcaaacccatgttgttcaacggtcagttgtatatacctttttgaacagaatttccttcctc

SEQ ID NO: 34774 - DNA, 201 bp, Bos taurus
tcacttaatttttaaaacccagggcagatttttaagaatcattgaaatttattttgaaaagttcaagttcagaagtcatgagacttttattttgaacacaygattttgtttaattcaaaaagatatttataagtttaattttttcacagcttgtaactagaattgagaaactgtctagttttaaaaatccctttttaatta

SEQ ID NO: 34775 - DNA, 201 bp, Bos taurus
ctgttatttaggaagaagcagaagagaaattgagaaagcaaaaggagttgaagcaagattttatggaccaaatggccttgaaggaattaatacttcaggckgcaaaagaggaagaggagacatttagaaaagccatgctggcaaaatttgctgaggatgatcgaatagaattaatgaatgcgcagaagcaaagaatgaagc

SEQ ID NO: 34776 - DNA, 201 bp, Bos taurus
aggttcacaagaaatgaaaacataaatccatttaatggatagaaaaatttgtctcaaatcagacaaacttcaatgttacgatgaccacacagaacttaaartactaaaaatgaagcaataagagtgaaagcttttgaagatgatgtatcagtatgaaagtaagaaaacaaaaattcaatatggcaagagttatatccatca

SEQ ID NO: 34777 - DNA, 201 bp, Bos taurus
aaaatgttgattggttggttttcccatcagcctaaatttagataacggatctgaggctatgtcctgtccagggtttaacaacttttatccccttcagcatyggcagtggtcaggtgggacggactagggattgccagtaagggaaactggaaacagctgtccaagtagctggactgggacaggagctgtgataaagaatgg

SEQ ID NO: 34778 - DNA, 201 bp, Bos taurus
aatcgatagtataaacaaatacagaatttagatgaatgagagattcagtgaggacataatagttttattggcaaaatgcaggatcacggccttaacaaaaycgaaggattagcttctgatccaaatacgtttaacagtttgcttactcagttcggttcagtcgctcagtcgtgtccgactctttgcgatcccatgaattgc

SEQ ID NO: 34779 - DNA, 201 bp, Bos taurus
gaatatggaaaaactaaaagctcacctggagttaggcatccaaaaattatcaggaccattccaaaaatggtcaacaggtgtcatgcacattcaaagtgtgktattgactcagatatagacaagtagattagtaataaaaatgaaaaaagcttgaaacagattcaagcatgtgtgtaaacatgtatgtaaagcatgtacaca

SEQ ID NO: 34780 - DNA, 201 bp, Bos taurus
tggagaccgggcatctgtttctactcccttgagtctgggctggttttgtgacctattgtgacaactagaatgcagcagaagtgatactgggccaggtcctrcaagtctgtgcagcttccacttttgccctcttcgagccccaaatcacatggaaagaggttccgcctcccagatggagatactgaaaggggcctggctaaa

SEQ ID NO: 34781 - DNA, 201 bp, Bos taurus
ctcgaaaattccactaaaacgttgttcatccttagtcatttttcctaggagtccttcaaataccccaccaacttctccaacaagtacaggtactctttcargcaaaggatcctatcagacctcacaccagtttattatttctcctagtgaaattgcccacaatgaagatggcactagtgctaagggatttctttcaacagc

SEQ ID NO: 34782 - DNA, 201 bp, Bos taurus
tggtgacctgggtcccagttgtccctcagtcaggccacattactctttgcttgcttccctctgaggccatttatggccctcttccctggagccctggcacytgcggataatgtcgctgatgggagccacctgaaatctcgcgagggtgggcgagacccccttccctcctaatgacgagagccagatgggccagaaaggtga

SEQ ID NO: 34783 - DNA, 201 bp, Bos taurus
catggctaatttgtatccaaggggatgctcagtgctcttgtcctcagttctaaatgccctgtgctcttctacaaacccttgatcatctcccctttctggcyctggaatgacccattcattccaggtggtggttgatgagttgcttctggttcctgtttcctgactctcttctgttcccttggaaattctgtactaaacagt

SEQ ID NO: 34784 - DNA, 201 bp, Bos taurus
cctgtttcttatgtaccacatgccattttaaggaacttaacctgtgaatgatgaggagctgcaggggattggactggccagtttgtgtttcacattgattrcactggagtctgtgagaacagcgtcaggtgaacagggacggaggctgtggcagtaacgcagtgagagctcctaagggcctggactagagcaccagtaaag

SEQ ID NO: 34785 - DNA, 201 bp, Bos taurus
gtctagaaatgtatagatttggccgtcattaacacattaggtgctgaaagttgatggggttgctaaggaaagagtggggtatacaaaaataacagtaagarggctgcagacacagtcagccttaatgtttaaggagtgagtaaaagaagagtcatcaaagtaggttaggaagcaggaaagaaaatagtgatgcgggagtca

SEQ ID NO: 34786 - DNA, 201 bp, Bos taurus
gatgcatgctttattataaagagtaatgtctatgaaagtaaaatacatttttttacattaaacaacttgaaaagtacaaagatatgttttaaaatgtcccyagtccatatccagaggtgatcattgttaacattgagtgtatataatttcatgtattttgccatacatgaatatagttagaagggaaactagctagagaga

SEQ ID NO: 34787 - DNA, 201 bp, Bos taurus
ctgactctggcactatagcacaaagcagcacagaaaagtcataaacgtatggatgttggttgtggtccaataaaggtttatttatggaaactgaaattttwaaaaaatatttatttgtctgtagtgggtcttagttgtggcacctgggatctttggtcttcattgcagcatgcagactttctagttgctgcattcaaactc

SEQ ID NO: 34788 - DNA, 201 bp, Bos taurus
aatattatgtagtgtttgaaatgtctcagagggtcctggaatgcttcatgacttgttcaaaagcattatgagacgatgtgatctggaaagcagagagtgcktagctgcagttgttcccggtgggatcctgctgccgtcagttatactagggaagagtgcaaagtcatggggcgtcattgctaaaaatagtgcagccagtgg

SEQ ID NO: 34789 - DNA, 201 bp, Bos taurus
ctgatttactgtggggctttaatgagctaatagctaactgcctggcaaagtattaataacttatctacaggaagtgctcagtaagtatttaaatggccttscataccgggagcaagtgaagttgtgtagactggaggaactccccatgctctcctccctcagagcccagggctggaggctggccttgggtgcgacttgtgc

SEQ ID NO: 34790 - DNA, 201 bp, Bos taurus
gcaagtctagtcctgaaaaaatgaaaatgttggcaaatgagttagcaaacatgggctgctagtgaggagggaaaaaatgactatctgtggccttgggaaaktttctctacttgggctgatgatcttggcagtggctgagaggagccagaagggaaaaggagaggcttcagtggtcatcactctggaatgtgatggctgatg

SEQ ID NO: 34791 - DNA, 201 bp, Bos taurus
tatagatgagaaatataatgttgtacacatgagacatataatgttataaatcagtgtcaacaattaaaaaaattcactcaaattcacatcactggagaagrgtttttctagtgagttattgagtagttactttacattctaatttaataattagataggcagaaaaattttgaaacattttaatgaggcatactaatgaat

SEQ ID NO: 34792 - DNA, 201 bp, Bos taurus
tagttgtatgatgggtaatgacattatatttaggaaggtgccattattccataggtaccctgtattctttcaaatgagtatgttcactgcctttacttaargtactgataagtagtgtttttgtacaatttcagtgcctgcatttgtattttagtatgcaaatgctctggtgtcaggagaagatcaaatgacctgggagca

SEQ ID NO: 34793 - DNA, 201 bp, Bos taurus
agaatacgaaataacaaagaatcaaagcagtaagggaagcttggtaagtgtgcgtgtgtgtgtgtgtgtgtgtgtgtgtgtgtgtgtgtgtgtgtgtgtgkatgaaaggccctagggttttgtctcatgttccctcccccttggcttcctatctgtccctaggtcagctcatctagatttgtagaattaattacatctata

SEQ ID NO: 34794 - DNA, 201 bp, Bos taurus
aaggtggatgctctatcaagttacctcatcttttcagttaaagagaattcaaggtgtttgtaaaccaaaggaatgaaatgacttcaagtggaaaaggaaaygaggtgtaactatatactacaagacagcaatgcaatttagagctagaaggatctaatgtactctaaatctatcagaagtttgcactataaacatataggt

SEQ ID NO: 34795 - DNA, 201 bp, Bos taurus
tatatattgtaaaagttagaacaatggctagtttgttgtattttgtttcatgccttccatttgacactgttctgaagattaggagctttaaaagaaacttrctaccaaatgtcagcatctcttaatggagactgtctcatcaatatattatatttcattttattaatgtaacaccatttgattcatgtgagtatattgctg

SEQ ID NO: 34796 - DNA, 201 bp, Bos taurus
aggttctaaaagttatcatcaaccatttcatcagtacagcctggtatgggtgtgataggccatgggatgctcaaagtctttctactgttttcagtcataartcttcagatgtcaagatattgttgaatcaagcctgtaaattcctcactatactgggtcaactcaagttacagatcatgttgtaatcattttttttctcct

SEQ ID NO: 34797 - DNA, 201 bp, Bos taurus
tcctactggcctggagcaaagagggttgtgacaggtctgtgctcttctctgaagcttctctgtttctctttgctattctctgtttctaccttctacttcamatggatggtagccttgggccaggaaggcagtgaagtgtagaacctccaaataaaatcagtcagacatgaactgagatgaggctatttggggaactcatct

SEQ ID NO: 34798 - DNA, 201 bp, Bos taurus
gtaataatgccataacttacatgtttgaaaataaggagcaaatccagtaatacatgtgaaatattaaaaccattgcacatggttgtgtcactgtcagtgaygaacagtatacttaaggtcatgcacttgaaacaaaagttacctataggtcacagaatacaggacaaaagtaactatggggcagagactaaggaaggggaa

SEQ ID NO: 34799 - DNA, 201 bp, Bos taurus
aaggaggcaatgaaaagacagtctcaataagtggtgctgggaaaattggacagctacatttaaaagaatgaacttagaatattctctaacaccatacacaraaataaactcaaaatgtactgaagacctaaatgcaaaactggatgctataaaactcctagaggaaaccatagactgaacactgtttgacacaaataacag

SEQ ID NO: 34800 - DNA, 201 bp, Bos taurus
cagtagatctcagcgtatctcagatgcttcaacggaggatgccaagggcattaaatgtgataatatatatcccaaaactgttacataaaaaacactaaacmaaggtagctggtttagtaatttgaactgatttacctgacctgtgtttttaaaattctgttctttggttctcttgttccccaagggagagtgaacagtggg

SEQ ID NO: 34801 - DNA, 201 bp, Bos taurus
ggatgctctgaaccgggaaggggcctgaaaaatgccctcccttggctgcccttcctcatgaggcatattggtgtcacaggagggggacaactgcctgactrctgccaaagagagaagagatggcctttaaaatctaggctactgcaacctcctgggtagtcaatctggtgcctttcaagccatcagagagcatcttaaaga

SEQ ID NO: 34802 - DNA, 201 bp, Bos taurus
gcccaccacttcaagcctccacattgcccaagccctcacactgctctagagtgggtatgtgaaccaaaagggcacagcatcccttgaaacctctatccttygttctttgcaaccaaagtgttacatttacagtgacttgagggataagtaacaccttgaacaaagacaaaatccttgtgaccagctggtctgtagctctgc

SEQ ID NO: 34803 - DNA, 201 bp, Bos taurus
tccaatattcttgcctggagtatccccgaggacagagaagcctggcgggcttccatggggtcacaaaagagtcagatagaacttagcgactaaacaacaaygacaacagtgtacttattgctctgtgtctcaatggctgatgctaaaagttagtaaaaaagcttaagaccttagcatattttatctcggctgatttatctt

SEQ ID NO: 34804 - DNA, 201 bp, Bos taurus
ctattataatcgagtgtaataagccacaagaagtggaagctttccactggaaagtattgtttttggtaatcattaacagataatcttgtaatctcttctcytcactaaaatttataactgtttgcactcaattttggagctctgatttgtgaagtctattttggctttttggacatttttgtcttatttctccaacttctt

SEQ ID NO: 34805 - DNA, 201 bp, Bos taurus
agaaatctttgcatgcttaacaactgagtgcatgatttaactaaattttaagcaaagagctatttgcctttaagaatatccatggatagtatctgaaattktcccccattgaatcactggactaggataaagactgccttcatcaagtcctgatggtatctggggataattctttggcagatatgaacatattaggattca

SEQ ID NO: 34806 - DNA, 201 bp, Bos taurus
tcactgaagttataagtgaaagataccaatttgtttcctttaaactttactcaggtcagaaaaaaagaggctgttaagataatttcatattttttatgcckaatttccaatttaataaattagactgcttgttaactttaaattttaaagttctaaagatttgtctttgctggaatgaatctatgtaaatagagttttctg

SEQ ID NO: 34807 - DNA, 201 bp, Bos taurus
atggcctctgttgtttttttctacatattgttgtgacaggcataactgatgttctggttttcccatgtctgaaactgcattcctagtgctgcattaacacrcccatcacatttatctgaatggccaatcagtcagagaaaggcttctctattccattcatttcagtggacatgtgggcagctttgtgcaggacagattctg

SEQ ID NO: 34808 - DNA, 201 bp, Bos taurus
agaaacttgctttttataaacctagagtcaaggtctgagcattcacaccactcctatcactaaaagccaccactgagcctgcaaaaccttcctgattctayaggcctccagtcctgcagcaagaaatgctagaagcccacatactgaccttgacctatttccctggtcaggacatttttttccaccattcttggaagcact

SEQ ID NO: 34809 - DNA, 201 bp, Bos taurus
agcctccagggtccatgatagaggatgtacctgatgctatggaatgaggctaaaggacagtttgcatttccagtatgagacataggccagaaaactcttaycaggcatttctgggcttagttttgaaagatgcataagggcaaagcaagttgaagccaagaaagcagcatatgcaaaggccactgggaatcaaggatatgg

SEQ ID NO: 34810 - DNA, 201 bp, Bos taurus
gaaaaggtaagtcttgttccctgcagagaattccagcaaatctcaaagaggtactaatagtagaaaccatgagcttgaaacctggtgtgtgagcttcaagrtctattcatggttctaatattctggctgggaagccttctccctgcagcagcacttacgatcctgtaaacacaaaatgacgcttcttcaaagcccaaagtg

SEQ ID NO: 34811 - DNA, 201 bp, Bos taurus
ccaggctaattagaactctcctcaactcaggtatcacttcaactcattttttaaaatcaacactaatggacaaaatacaaggcaattaagttcaggactamatttctttaatatttaggtaaccagcttagtacaaacaacggttgttgtctttgactatttgaattcgcatccattcaagctgggatgacagacttgggt

SEQ ID NO: 34812 - DNA, 201 bp, Bos taurus
tgcaacccaggcagctatttctaagagccagtccaactcgaaagatagaagctaggaactgactgaatttccatccccagtgaatgtgtttggttaataakcatcctccctaggccccaggaccccataagacaagttattacaccaacctgaattaagcaaagaaggctactcagtcagaatctccaattaaaaaaaaaa

SEQ ID NO: 34813 - DNA, 201 bp, Bos taurus
tcttctgattctgaaatttcacactgtgtggttggagagagttaggggttttcctaaattctgcagatgtttcctgggtggattaaaagctgaatataaayagatcaaattgtagatgatgtagtggaggttctttgagttttagctaaagacttggtagttgtttaacagtgaagtttccatggtgattagcatttagtt

SEQ ID NO: 34814 - DNA, 201 bp, Bos taurus
agaagtggccttatataggaaacatcctgtggggctcagaagcacgctgccctctggtcgccagagctctgtgcccaggagtaccccctatgtgggttgtrtaggcccttctgttgtgacagggccacagtagttctactgtgggctccctagtgggcagggttggcccctggcctggttggctgccccaccctgcttcct

SEQ ID NO: 34815 - DNA, 201 bp, Bos taurus
cccaccagtaagcactccctccaggttcagaagagaacagaagacaaaaagcataggtcttggagtcaactagcccgggatctgatggctacaatccatgygcgagtgacagcctctccgagcctctgtctcatcctcggtgaaacaggcagagcagtacttatctcagagggtgggggtgatgtttaatgtggtgacgta

SEQ ID NO: 34816 - DNA, 201 bp, Bos taurus
ttttcgccttttgggccctgaggaccaggctgtccgtctgatccgttgtgtcctggtaatccactggctccgggaggccctgcatcaaaacacgagaagcrggaacactgaaaaaaatgttcactgaagttaacattatttcctttagccagtgagactgggcaggcatcaaggcctctcccagagcttctcctgcttctt

SEQ ID NO: 34817 - DNA, 201 bp, Bos taurus
ccttaggccatagtttgttgactcctgatctaaatcctcagcttttacaccatggaagtgacccagttcaaggggtgggaaaggcaggtaacccctgccaygatcaagctaaggccttcaaggagatacagcatccatgcaagcagaagctgtgactacggtaatgtgacttttgtcccctgtaaataagataaggtacag

SEQ ID NO: 34818 - DNA, 201 bp, Bos taurus
ccaatacaaatacaacaccaactgggccacctccagcatccacatagccatggaggcatcattatcctcacttttcctaacaagaaaatgcaggcccaagyaggtggagtaatgtgtctagtgagtagcagggcccagattcaaactccagcctggatggcaacaaggcctttgccccaccccctgagcatcactgctttc

SEQ ID NO: 34819 - DNA, 201 bp, Bos taurus
actaaaattcatttggaagagtaaaggcaagaataatcaaaacaatttctaagaaaataaaatggggggaacttccctatggccaatcaagacttactacrctgctgctcagccctgagatttctttggaaggaatgatgctaaagctgaaactccagtactttggccacctcatgcaaagagttgacttattggaaaaga

SEQ ID NO: 34820 - DNA, 201 bp, Bos taurus
tcattctttaacacttgcagtgttatggtgggttaaaaacagacagaaaatccaagactaaataaatagctgttttgggagaccacagagaataacttcarcctacacattactgtcatattgggataaaataaaataatgaacacgaaagccctttgaaaaatataaaagcatgctatgtacatgtaatatttggcttga

SEQ ID NO: 34821 - DNA, 201 bp, Bos taurus
ctccctcatatagtaaatttctgaagatagaatcggaataagattaaaacacaacaggtgaaaaaagctaatgatttgctattgattttcatcagagtttkttttattatatgataccaaaatattttaaaatatgcaaaagcaatgaaaagatactaatataacagtagtattaaatatactgtttttaatggattttag

SEQ ID NO: 34822 - DNA, 201 bp, Bos taurus
tttctctgagacattcttcaacctttcttcaaccaggagatatttggtacctctcctccacagtcctatactctgtgtgtgagagaatatgcatacacacrctatattttatacagtttatcacacagtgttataactgttaactgacttccttctcctgtaagaatgtaaataaaaaagaacctattcttgcacttacat

SEQ ID NO: 34823 - DNA, 201 bp, Bos taurus
tttttattgatttgtgggagtcagtacattctgaataggagcaaacacatatttgtattataaaaataaatgcatttttctgatactattagaataccacraactccccttactttggccccaatttcactaatgattctctgggaggtaatgtagtcgacttcatattctctctaaaacaatgtgtgccagggaatctgt

SEQ ID NO: 34824 - DNA, 201 bp, Bos taurus
taatttacaaatttaacacaaccccagtgaaaacaccaacaggttcttagcgtgttctgttttgaattcagtagccatttttacaattaataagggaaaaygaataaactagaataatgaggaaaactataagagtaacaaggaagttctgctcttatgaagaaggtattaaaatactttatgaagctttaataagtaaaa

SEQ ID NO: 34825 - DNA, 201 bp, Bos taurus
gcaggtcctgacactaaactaatgcagaacagtggtaagacaaagtttaagaggacaagcattgatagactgatgaatactctagtactatgggtaagttrttataacaaaattaggcaatatcacaatcattatctgaatatgtttcttacattctgatgagatttctttcagaaatcttcattcttcttgtggaatttg

SEQ ID NO: 34826 - DNA, 201 bp, Bos taurus
cggttttgacactgtggatctcctaaaagttccctacaccactttgaaaatcttcgtgttcagtggcattgggcagtctcctaacttaatcagggcctcaractagtttccctatctgtaaactggaagctgttaatagcaccaaccgcacaggattgttgtgattatttaatgagtcaataacatctggcccatagtgtg

SEQ ID NO: 34827 - DNA, 201 bp, Bos taurus
aacccactacatttatgggggtatctgtggaataacaaggaattagaagtcattttgtctttaagcaaactattctctctaactgctgccttcctgaaatyatagtaattatttaaaaatcttacaatttaataacatttccaataccattaagatctttgatgtattttgaggaacattatatgattgatctgagtgagt

SEQ ID NO: 34828 - DNA, 201 bp, Bos taurus
catggggccctaggatgcaggtatttctgaatcatcacaacttcactccatcttatccccaggttaaaaagaaaaaaatccacctagcttgatggtttggrgcttgaaggccttttccgttatccctttccaaatacaatcccacatacctccccctacaaacagccacaacccaaagtgattacaatataaggctgacat

SEQ ID NO: 34829 - DNA, 201 bp, Bos taurus
tgccatgtgcttttaggtccctgaccagggattgaaccagagtcttggcagtgaaagcccagaatcctaaccaccaggccgcctgggggactcttaattarattgtggcatatagtcaaattatttccatggtctggctcttcactataatagttttcataattaccttttcttgaactcttttgggccagttctcagtct

SEQ ID NO: 34830 - DNA, 201 bp, Bos taurus
tgctggtctaacagagtccatgttactagaaagaaattgacttttgctaataattatattaattgaaaagtgaaattttaagcattctttttcatcctaaygtgagaacttgttgtgtatttatgtgtattacatttgagaaattggttggatattttgcattgacatgtactccattaaaattttccccacttgaaataa

SEQ ID NO: 34831 - DNA, 201 bp, Bos taurus
tttaatctactcttttccacctccatctcttccatcaggccattcttctggattctttgactagtgccctttcttacctttcaagtttttcttctttagtygaagggcaggagctgcctgtggtagtgagggtcatgagaaggacattaagggtcacaccaggctgggtctgaagaggtgacattgagctggtgtcaaaga

SEQ ID NO: 34832 - DNA, 201 bp, Bos taurus
tttaacactcgcccactcttgctgtgaattcctgaggactgacttatcactgtctcctttgccacttaagcttctactttccagtattgtgtctgttgttyattgtactgaaccggatgtcaaacaccctgacctccctccaacttctacacgcctctgccccctccccaactaccaaagtagactttgaagggaaatgga

SEQ ID NO: 34833 - DNA, 201 bp, Bos taurus
tatgagctggctctctttttcttgactcaaaggccatcaatgggaagtattatcatttttagttggtctcctgtgaaatctgaaacacactttatccactyatttaagttcaggatcatgggcccctgctagtccttggtatatgaatgaaggaaaggggtcctgttctaaactgcattaccattctcctatcactgcaca

SEQ ID NO: 34834 - DNA, 201 bp, Bos taurus
atctatggtaggatacttacgttaagaaaaactctaaatttttaggtaaatttagaataatgaagaacctttaaccttaaaagctcttgagtgttctccgmagtcctcttcaaaatcactgaaaaatgctgccatttactaaggtgtgcttctttaattaaacttgcttgttttcatgtcccagcatttgagatactaaga

SEQ ID NO: 34835 - DNA, 201 bp, Bos taurus
tgggcatcttgccaggccactaatttcttctccatcatactctaaggtattcaactacaaaagaaaaataaatagctagtgtcacatctgttcaatgtacmtgtttgaaggcaatactgctttatttgtactgaaattctatgggaaaaattctgtctttattctttcatagtgttagagataagacacattactagattt

SEQ ID NO: 34836 - DNA, 201 bp, Bos taurus
actattgattttgagagtgcttttaagtcctggatttatgctctttatcagatagatgactgatctgtgtcttgtcttttcaatcccttagcactgtctgmtgaagatgcaaagttttaattttgataaaattcattttatcaatattttcttttatggattatgcttttggtttcatacctaagaaatcattgcctgaca

SEQ ID NO: 34837 - DNA, 201 bp, Bos taurus
gtctgactcttagtgatcccatggactgcagcccaccaggctcctccgtccatgggattttccaggcaagagtactggagtggggtgctattgccttctcygaatacagtaattatttgttctcattcatgtacaatattctactgtaaaaaacagaggtaaattctacaagcataatgttaagcaaaagaagccaagcac

SEQ ID NO: 34838 - DNA, 201 bp, Bos taurus
ttttctcatttctctgattaaagttattctttggctaaaattattcctcagacaaaaggcaggctgtagacatgatcaggggaggactgtaggttcctgcyctgtttcatatggctaccccaggtttggtgtttttttttgcatgaaatatctttttccatctcttcgctttcagtttgtgtgtatccttacatctgaagt

SEQ ID NO: 34839 - DNA, 201 bp, Bos taurus
atatgtcattgtgcaataggtagttcacctcgtgcttcaggtgaagtgaaatatatacgcctactctgaggaatctagaaactatttggggaagtaagackaatgaagaaattgctacagaatactgagatgcaattttgagttactgtaatttcaggactaacaaataatatgaccttgttttgtaactcgagaaagaaa

SEQ ID NO: 34840 - DNA, 201 bp, Bos taurus
tttgccacctagctctttcttccttgaagcacctacatgaaacactataatgagattcttcctagggaaaactttctccttttagtggactttgcctattkcctgcagtttctgagtggttaatgatattttcttcggatgtcttgagaatccatctctcagagttttctctgaaaatcttggcaaaagccaaccatttcc

SEQ ID NO: 34841 - DNA, 201 bp, Bos taurus
acataaatttcagaggaaataggagtacctgtgaacctcagcatgcatttctgagagcaagaaaggtgatctcgtttgagaggccagtttcaggagtcctygtaagttagaaaagcatcaatattttgggaagaacttaagcacctattatgtacagacaacatggcatggaattccaagctgtggcaaatatttgtttcc

SEQ ID NO: 34842 - DNA, 201 bp, Bos taurus
ttggagtgttttttaaatagatttaaaaggtataattgatatacaaataaatacacatatttattgtgtgtaactcggtgagtttggacataggcaaacayctgtgattgtgtcaccacaattaggtaatagatatgtccaacagagcgacttttaaaaaattctagcaagcacttaactagtcaaactgtcttctctatg

SEQ ID NO: 34843 - DNA, 201 bp, Bos taurus
tgtcagctacaggtcataaagctttatagactcatgacctctgatctctgaccctgtgatttattttctctgagcagaagtgtgacccctcctccatctgmgaaaaatgaggcaacgtggttgggtggcttctgccattcatcaggcagtgaaatgtgtctggttctcaattttccatctgcactcttgcttcaggccaac

SEQ ID NO: 34844 - DNA, 201 bp, Bos taurus
cttgtccttttacagaccctaaaatgccatactatcttatatctttataggttgattctgcctatctttcaaaacccttataaaatgtcatcttctttgtrgagccattgctgattttctccaattaaatgtacctccctccactgcttctttgctttccagttgactctgctttagggtagttatctataagtttgtgtt

SEQ ID NO: 34845 - DNA, 201 bp, Bos taurus
aataagctcccacgtgatgccagtgttgctgggctgcggtcgttaaatagcaaggtgctaaaccacgttctggaagtgtgggcctaaggtagatccaaacyggaattatcaataacaaaatcatgtggaactttcaaaaccttgcagaatttactttgagataccttctctagacgaggtgctctagctcaccctccctgg

SEQ ID NO: 34846 - DNA, 201 bp, Bos taurus
cagcttggagcattccggcatgaccaagaatcctgaagagaccccagactcaggtgctgaggatcactatacttggcctctgtctgagctgctggaggtgrgacaggtcatatagcctgtgtcaaccagggagaggtaagctgtttgagcacaccaagcactggccccaggctacagttggaaattactagactgttttaa

SEQ ID NO: 34847 - DNA, 201 bp, Bos taurus
tgtatttcattttcaatacagaaatctttaattacagccaatctctttttgaatagcttttggtgatgaaaaatccattatttcactaaatggcctattgyttttgaggatttataattgttaggaggttcttcactgtgatgaactgaaatctattttttaattaattgaggtatttttgagggggcccctcaccccaca

SEQ ID NO: 34848 - DNA, 201 bp, Bos taurus
accctttatgatgtgatcagcgctgtgactggccacacgggttaccaagtgcaatgttgtgtggtgctctcagagggtcaggagggcttgggctgactgtyctgggccactgcaagaacccatctgcgtgggtgggatggacatgggagaagagggacccagcaggactgtgcctgcttcatcagtgactgtccaactgga

SEQ ID NO: 34849 - DNA, 201 bp, Bos taurus
gtgagaaccacaaaccctgatctacaacagtggaaatggaggcccagtgcagtgaggatcagtgaggggtggtgaaggtagcaggaggaggcctgcagtgyggctcccagattcccacatgtggcatgccttcacgtgatggagaattccacactccccggtcagaaagggatgtgaacaggctggtttaggggggctgca

SEQ ID NO: 34850 - DNA, 201 bp, Bos taurus
cctccacggagctggaggccggacccgcgggtgaggccgggccgcacacatggtcgccgtccgggtcttgggcccgggctcgggcccccgtggcctgcagyagcgttcggaaggcaagctcgatgcggagcgagtcgtagccgatgaagggcttccaggtcttcttgtcctccttgtagaaccagcgcacctcctccgggc

SEQ ID NO: 34851 - DNA, 201 bp, Bos taurus
atttcacaactttgcatgtgtcatgttttcattgttattctgataaaaacattttcctattttacccaagatttcttgtttaactcactggttatacagaygtgtgctacttaatttctgaacatttggagattttctagttatctttctctcactgagttttaatttagtgaagtcaaagaacatatgttatatgatata

SEQ ID NO: 34852 - DNA, 201 bp, Bos taurus
ttggatgaaaagaatatatgggataatgatatgacttttctcccatcccttgctcaacactgtggtggagaaggaagaggcctccccagaaagcactttcygaacagcaagagcagcacatgtgtgggtttgtcttagaacacagagttcctggattcggctcctggtggacttggtcaggcctgttgggctgaggttcac

SEQ ID NO: 34853 - DNA, 201 bp, Bos taurus
attttcctctcacatagattcagtctttgcttttttgaaagactttggattctggttatcaagttaccataggtctcctatagagaagaaaatctatatayatagcaattaaatatgatattttgtagtaagattttctgaattacagattaggattcattttttccccctttattcagggagtagaaacagaataaggga

SEQ ID NO: 34854 - DNA, 201 bp, Bos taurus
ccacacaactgagtgactcaggctggatttgaactcatctgtgtcaaactctgatcctcctaatcctaactactctctgcacctcagtctgcacctgttcyccacctctgtctttacttcctcattcccagcctgggttgacagggcagatccttccatgtgaaactctctcctctacagactcgactcttccaagcctgt

SEQ ID NO: 34855 - DNA, 201 bp, Bos taurus
gactcagtatttcaagtcattatttttatagctgcctgccagacaacaatttaattttagcatcatcactttatttatccccaaagcgttcatattattaratattggatatatatattttataatgtttccattacagttctataaaaatgttgctactagtaataagaaacatagttctgatacacttcttaatattaa

SEQ ID NO: 34856 - DNA, 201 bp, Bos taurus
tccttaagaatctagactatcatgtgatccagcattcacactcctatgcatatatctggagaagaacatggtttaaatggaagcatgagcccaaattttcrttgcagcgctatttacaataaccaagacatggaagcaacctaaatgttcattgacacaggaatggataaagaaaatgtggtatatacatacaatggaata

SEQ ID NO: 34857 - DNA, 201 bp, Bos taurus
gacataggacacagaagaggttaggaatagcagcaccacctcaggcagcagaagaaaggtagggagagaaataagagcttcctcctcttctgttgctgttycagtgaatttcttcagactcactagaaccatggaatgagtggaaagtcaggagaagaaggcattaaccaagaaaaggatcgaagcccaatggcaggaagt

SEQ ID NO: 34858 - DNA, 201 bp, Bos taurus
cccactgtcttcataggacttcttggtaacctggcctaactgcgtttagaggcattccaatgatactgctcaaaatgatagcttccattttgaaaactatraatattgtagattaatgttctattccatatgaaacaatggaatacagtaaatttgtaagtaaagtattctttgcctctttccagatcagtcactttacaa

SEQ ID NO: 34859 - DNA, 201 bp, Bos taurus
aaccttgactcagtgatacagctttcacacccaacagcaaaatgttcttaactcttaactgagagaatagaaatgtctctccatttagggccaacacacayaggggaaaggacctggcagaaaagcagaagtgtgacctggaactcagctctacccaggttagctggcccccacttgcccacctaagactctggagacttt

SEQ ID NO: 34860 - DNA, 201 bp, Bos taurus
acatacccaaacacacaccctcttcccacatgactctcagaatatgccccagatctgagagattcatctttatcaaaaataggccatctgctttagactgmaagtttgtctccccccataattcatatgttgaaattctaaacccagtgagatggtgtttgtaggtgaggcatttgaaagttgattagatcatgaaggcat

SEQ ID NO: 34861 - DNA, 201 bp, Bos taurus
cacaaattatctacagttaaaatagcaataacttcccatgtaaccctctttccttaactagaaccagaaaagataggcaggggttggagagaaggaaaggmatatgcagcaattcttgttatcatttcaatttctgaacccaaggaataaaagtttttttcttaacacaagatcagatgggttgatgtttgcttgctcaag

SEQ ID NO: 34862 - DNA, 201 bp, Bos taurus
cagtttcttcctccacatcactctcttcatcccctcgaatcctaattcaagccctggcaatcctctcctaggccttattacagggcttttgagagggcacrtttttgaagaatgaaaaagcctgtttatgaggcagacccaagatgtaaattagccaaattaacatactctgtgcctacaaagaaggaaaactatattata

SEQ ID NO: 34863 - DNA, 201 bp, Bos taurus
tgatgattgggttcctgttcacccagagaatgtggctggcaaagataagcacaccagaacatgcacttcatgggaaagcatgaatccatccacctccaacraataagaggctgtctttcctttcagtactcactctcaggggtttgatgttgatagattctgaagtatcctattctagagcataaaccaggtgctctcaag

SEQ ID NO: 34864 - DNA, 201 bp, Bos taurus
ccatgattttcccttagcttttttgaccagtgggtctcaatacataagcctggatctgaatcacctgaagaggttttcaatgacacagtttctgattccartagatttagggaggggccctgaatttgcatttctaacaagttccgaggtgtgcagctccctacatttggagaacctccctttcttcccttccctgtcctg

SEQ ID NO: 34865 - DNA, 201 bp, Bos taurus
cacaagaggaattgctgggtcaaaggatatgtatatctgtgattttgagagatgtcgccgaacttccctccaatatgggtgtaccacctgaccccaggccycaccactggcaggaaatggaatccggggtctcctgactccacaaccaaggctcccacccctgccccacaccctacttcgacaaaccctcaaagttacaac

SEQ ID NO: 34866 - DNA, 201 bp, Bos taurus
tgaagagttaaaggaaccagaagtgaaccaactggccctgcaggacccagagagaggcatggaggtacccaggcacagtggaaagcagggctgaggccaarggtggttcgtttaaaagtcaaaagtacagtgcagtgcagttacacctctgcccaggtttcctctctcacccctcttagctaaaccacccttaaagaatgg

SEQ ID NO: 34867 - DNA, 201 bp, Bos taurus
tggggcctggacatgagaatttttttaagttttcccagatgactctacttgaagccaaggctgacagagaaccattgactggatcaaaatgaaactgcccrcttcagttgtggcccagtccagctcatctggttagagttctacatggggttctgaatggcctgtttccctggccttgtcctgcatataatgactagaggg

SEQ ID NO: 34868 - DNA, 201 bp, Bos taurus
ttatgtgcactagggaaaacattatctagcaatagtagataatctgctgttttctggccagcattcctctttcttttgggaaatcaccaaaaccaattccrtgtatttgaattgaccccaagcccatgaccacatgctttcaaattgtagtgctggagaagactcttaagagtcccttggactgcaagatcaaaccagtca

SEQ ID NO: 34869 - DNA, 201 bp, Bos taurus
aatatgagctatggttaataaatgggaagcttaacaaggccagttactttgaatttctctttgtctgttcatcttcagaaataaggatcctcccttcctcyaggtatagggaaggcctttctcacaccagggtcttaggacctgcttcagagtccaaagaggtcagttagtccttcctgcacctgtcatttctcaaatttc

SEQ ID NO: 34870 - DNA, 201 bp, Bos taurus
aagactccagcgccaggaaaaggtgccagaaagtggagacaactggaagagaaggaaacccctcaagggcaagagcccgatggttcatcagaaaacaaacrgaactcctcagtggaagtttccacatctgtgtgatcagcagcatcatctggggaagtttaagaaacaaagcattccaagatggacaggaaggctggagcc

SEQ ID NO: 34871 - DNA, 201 bp, Bos taurus
gtgtgttttatctgtgtcccccttcttcccatgaaagtggtggtgagcctatagtaaagtacagttccaaacacaagagtagatcatacagagttttggcyctgtgttagacctttggtttcctctgatattttttacccctaggcatttccctttggttcagtatttagatatgtctaagatatttgaaggcttttaaaa

SEQ ID NO: 34872 - DNA, 201 bp, Bos taurus
aaaattattctttcagctcattatcttaaaggcttttctttttttgaccgggctagtctttttgtaaactataaaagtaatgccagaattcaaacttagtmttttcaataattatgtatcttttgaagtctctggcacttccctttttaaactgagaggtgttttcaaattttggtgattaagcatgttagaggcctccca

SEQ ID NO: 34873 - DNA, 201 bp, Bos taurus
gtcctaacctctggatcactagggaattccccaaattcatttctataccttgagggttatctaaggtggtgcctttaccacatagcacatgcaccagatartatttctaatgtatgtggatgtaaactgaaaagactgctcatggcctttgggctaccccaggccttactgggctgctttcagcaaactactgggaaattg

SEQ ID NO: 34874 - DNA, 201 bp, Bos taurus
atagctacactcagatttgtgttttggatggatttaaataatttcctcaaataaaagtacatttgctttcaaatgcattttattctttctttctcctcctyctctccctcttgctttttggtgctggagctcacaggctttgaagtgcttggtgttacacccattggaactgtgtgttctgagctaggttttcctcttccc

SEQ ID NO: 34875 - DNA, 201 bp, Bos taurus
gccagtaaatacaactctgtcaagttcatgcccgtattatcaggttatatccaaatctgcgatctgattctggactcacagcattgtcaccgtaatatagytgtcaaacccaacagaatttggccaaaatgatgctagcaatgtaacgttttttcaaaaatattttcataaatttatatacagtaaaattgactcttttgt

SEQ ID NO: 34876 - DNA, 201 bp, Bos taurus
gggtgaaggtaagagaagacgcctaacagccaagaggcagggcagtgaaggtctaggagctgcatcccagtttgccaccatcttgccatatgatgctggayaagtcccctcacccatctggtctccagcccttctgcgttctcagtgacaatctacagtccttttcccttctgtctggcagagatcccaaatctggggcct

SEQ ID NO: 34877 - DNA, 201 bp, Bos taurus
tgaggaaactcaagctggtatttcctggccaggcttaaagatatctctaaaatgacagcatgtgtctttggattcagaactgaattggcaacaggatagaytgtccaagagccccctggttcaggttggccacccactggtgacagtttccaaaatacaggtgctcacctgctcatctcactctctctttggccacatttg

SEQ ID NO: 34878 - DNA, 201 bp, Bos taurus
tatcaggcttgaatgatatttttttctggacagtgtgactctgtaatagctctagactgagcccagttcttcctctgtgtgcactttcccttattcggacyttaacatttacctacagcataattatcgatatgcgtgactttctttctcccaccacacagtgagttgctaaaggatgggggctgtgtgttaccaatcact

SEQ ID NO: 34879 - DNA, 201 bp, Bos taurus
catctggcctgtgtttaaatgatcacattaggaaagcagcctgtgggatttcagcttaattacctataacatacactattcatgcaaagaggaatgggggraagtgagggaaactaatattaaaaatgaatgcaatgtaatgtattgctccccatcccccaaccttttggtacaaagacaagtaaagcaaagaggtgcaaa

SEQ ID NO: 34880 - DNA, 201 bp, Bos taurus
ccaagcaccttccaggcgccttcaaagcccgcctccccccacgtccttcagtctgtacctggcctgcttgtgcctcctgctacagggttgtggggcctctmtctgtcttcagaacttgtgatgggtgacaaggaggggtttctggagcgcttgattgataaactgattaccttgaggaaatctggccctttttgcgcaagg

SEQ ID NO: 34881 - DNA, 201 bp, Bos taurus
cctggactggacgtgctttcagatgggggcctgtgctggtatataaggcatcgtgtcctgggctgtgctcctgtggatgtgcaggggagctgcagtgaagraagacaggggccttgggcccggccagcagtattccgtctgcaggagaaccctagtctactgtgggtcttctccattctatttttcttgtcctagaggagc

SEQ ID NO: 34882 - DNA, 201 bp, Bos taurus
tcacttgcaggacttggagcagcctgtcttcctttccgaggatgctctaagtagggtttatcccaccccagctgtagtactatgtgctctgcccagacctyggcttctgacttgtttccagtggccaccagccttggctggacttggggagtgctgtctgttgtactgtgggctttaaggaaagcctgggccatcctggaa

SEQ ID NO: 34883 - DNA, 201 bp, Bos taurus
tccaggggatcttcccaacctagggattgaacctgggtctcctgcgttgcagacagacgctttaccgtctgagccgctagggaaaccaaaagctctcattratctgattctcctgcctacttctgcagccttacctccccactagcctgcctgtacaatgtcaagcattttcttatctctgtctttgctttttcttcccca

SEQ ID NO: 34884 - DNA, 201 bp, Bos taurus
taaagtgcagatttgatcatgtcacggcctaccataccacccttaagggtttccgttgcctctgagtacagctcaaattccctaacaaggttggcaacacycttcgtggctggcctttgcccagcgttgcagctttatttaccagcccactccatggctctctacatgcgtttcctcagtctggacctttaccccaactgc

SEQ ID NO: 34885 - DNA, 201 bp, Bos taurus
gcagttcatcgggtcgcaaagagtcagacacgactgagcaactgaactgaactgattcataagaaatattggtttctaattattttcttatgatgtgtttkcctggctttgatgttaggttagtactgcatgcatgtatgctaagttgcttcagtcatgtctgactctttgcaactctatggactgtagcctgccagcttc

SEQ ID NO: 34886 - DNA, 201 bp, Bos taurus
cgatattatttgaaatgttttctagtgattgagtgatgctcagtctgatgtcttcaggaactgctgtacacatgaaatgttggcctcaatatttaatgtcyccatcctgccatgttttgagtttgtataatttctcttgcctctcatctttcctccttcaatgtcagtggccacttatagagatgtctttgtactcaccac

SEQ ID NO: 34887 - DNA, 201 bp, Bos taurus
ttgacatcccttcctcactaagcttagtcacttgtagatttgattgaaagtgagagacgtgattcttcctttcacctgaacactttgaagccattgtagarttattaattggcctaatttaagtatcactgtatctcagagaataggaaggactgaggagagagagacaggttggggaactgtcagtgaaaagagtagtca

SEQ ID NO: 34888 - DNA, 201 bp, Bos taurus
tttaaggcttcaggattagacacagatgcaaatttacagccaatcaaggcttttatcaataaaacatgcagcttcggcctcgtattggtcaaatgaattarcatttaggaaactaagctaaagaaaaaatttaagtaccttctggacaacaagagtttgtaactttctattacttcctttctactatatggcctaagaaat

SEQ ID NO: 34889 - DNA, 201 bp, Bos taurus
agtgtaggcagtaaaagtaaacatggaattatctcataagctcctaagtttccaagagtcatgtactattctatctatatcccagtgttagaaacatagcrgatcctcaactgatgttgaagtgaaagtatatgtaaatggggaaaatattattccaaaagtcattttctaaaggttacctctctatggaagtaccaccat

SEQ ID NO: 34890 - DNA, 201 bp, Bos taurus
ccgggtctcccgcactgtaggcagatgctgtaccgtctgagccaccagggaactctataaccttccctcatggcagatgagagtgaaaacagagggccgtyctggacagcaatctgacagcagttaatttacaatttatgcatatattctccatatattctgtacagcaatcttatttctgggcatagtgacagacaactt

SEQ ID NO: 34891 - DNA, 201 bp, Bos taurus
gccagcatgtctagatttcattgatctgcccttggtacatctacatcatctgattgggcctgaaaccccagtaacaggcctgctgtgggggcagtgcacamccttacctctgggtatagggcggtgaggttgtggggactggttgtttgtccagaaaagttggttaatatattttatatttagggccatacaggaatcaag

SEQ ID NO: 34892 - DNA, 201 bp, Bos taurus
agcatttatcccttctatttttagttcacttctttaattgagatgaacatgatataatctcactgagtcaaaggatggcatctagtcctgtgcttcccgcygaagaccaacaggtttccttgggcattgatgatctccatttttcattgcaaggtaattaagattggttggggtaaccccatggcaactatgcaaacctca

SEQ ID NO: 34893 - DNA, 201 bp, Bos taurus
ttccatttttaaggccagcagaggagcatcttcagatctcaatctctttcatctctgcttttgttatcacatcttcttctgactctgaccctcctgtctcyttcttataagggccttgtcattatgctgcacccattcagataatccaggaaaatgtccctattttaagttccttaatttagtcacatctgcagagttcct

SEQ ID NO: 34894 - DNA, 201 bp, Bos taurus
gccttgcttcagcagcacagactaaaactccgaaaataaggttcttggccatcaacaggactgatgccaaagaaagcttcagctcaacacataatctcacytatgggtacccttgatttcaaaatcccagtagctaaactccttaaaaatccacctccttttgtttcccagagcctccgtccccctttattaatcagagcc

SEQ ID NO: 34895 - DNA, 201 bp, Bos taurus
aatggatgtggcactgagaaaccagaccagccctgcccacagcacataatcaccgggtttcttattcggatggcccaagccagtgccaggcctcttgtacrtgtaggagccaggacataaaatcccagcctttcttccaaaacaaacctagggagcctttattctgcgttgctttcctttgatgaggttttccggggcccg

SEQ ID NO: 34896 - DNA, 201 bp, Bos taurus
agcccagaacctgagaggtgatgcaattgatcgtgggaacaatctcaggtagcctcggcctgcagcagcttgaagtaggatttgttttcctggccaaagaytgaagtcaggcagcggcagggaacactgaatcctggtcactagaccaccagggacagtggctagtggcaaggccctagcccgtcagcggtgtagaagtga

SEQ ID NO: 34897 - DNA, 201 bp, Bos taurus
cctgggtgtggggcgaagggtagtaggtgaaaggatgacgtcagccgcctccacacctggacccagcctctctgaagcaaaatgttttctggagtatctcygagcgctggcctgcacagctcctcctgcacagactacttactgccttcttggcctgccggcccctgaaggagggctggaagggagtgttagtgagacctg

SEQ ID NO: 34898 - DNA, 201 bp, Bos taurus
acccgagtctggttcctctctctttgccctccctgacccaccctggcccttccccaacctgctgtgggtgtccacctggcctgcttccccaaactccctcyttctccaacctcaataggagcagaaggtccttagagtgagctgaaggggctgggccaggggatttctgaccctgcttgttgcccaactgcaggtgcccac

SEQ ID NO: 34899 - DNA, 201 bp, Bos taurus
ctcactaggccagccggaaagccacgtgggtaagagggacgctcttcaaatcaccccctgcccactcaactctctgggaatctgggagacaatcactgctycaggccaaggctctgcccttcgctaagtggaacacggagaaacctggtattatttcctggtgaacaaaacaaaagcactaccacaccccagaaacttgcc

SEQ ID NO: 34900 - DNA, 201 bp, Bos taurus
accagcggacattgttttgagaaatgccagtgacatcccatgtctgacacagctcagaaaactcaagttctcagcagtacatggccttgtctgaaatcacrtccataatgcctcctagtattaataaccttaaatgtctcaaccacagcgactccattttgactttcagtttcatttttctccttaattggccaaagcagg

SEQ ID NO: 34901 - DNA, 201 bp, Bos taurus
cccaggcccaggcgcacactgaccctttgtcctctgcaggtgaccctgccctcagcatgagtcgctggatgtttcaccagcaggccctgcaggagtacatyctgatgtgctgccagtgccccaccggggggcttctggacaaacctggcaagtgagtgccttgtctctggggagggcggggcgagggggctgagcacgcag

SEQ ID NO: 34902 - DNA, 201 bp, Bos taurus
tgtcaccgcatcaaagaagagagatgtgacatttccccaacccccgaaagtgaaagaagaaagggttctttactttcagggccatatcctgaatgacagargtcatttttttgcaactgatctgtgtgggtgcaggcttctaattgtttcctgaattacctgctatctattagccatctggccgcttgccagaacatgcta

SEQ ID NO: 34903 - DNA, 201 bp, Bos taurus
attgaatttgtgaatgtggaggaactgcagttaccaagggctgactataaattacacttggattaacccctacacattgttcaagggtcagatgtaactcyatatggctttatttttatttttgcctctttccacacatgtttgattgccctgtagtaggacttggtaatatctttatattaatagccactaataacaaaa

SEQ ID NO: 34904 - DNA, 201 bp, Bos taurus
tcccttgggtttggccattctgatattcttgctatgtttggagacttattttgcaacatactttcagattttttgaggtgaattagatatgttcatcttayaatcagcttgcttttggttaagtatgttaaaactcaagttgaataaaatttaagttagtaatataaaaagtaatgagctgttctacagtatgatttggaa

SEQ ID NO: 34905 - DNA, 201 bp, Bos taurus
gtaccccacagttgggtggagctggaggctatgctcagtggttgaggggttgctttttggactcactggttgggtggggccataggttatgctttatgatyaggtgaggtggttacctggacattcaaactgggtgggttttcaagccatgctcagcaaataaatgggttgtaggctatgctgtgctgctgtacagcacca

SEQ ID NO: 34906 - DNA, 201 bp, Bos taurus
attataaacagatatatctttgaatacctttgtgtatgtctctttgttcatatgtgttagtttctctagggcagtgcttatcaaacttttccacatcataytgtatgtagaagatatttttcctgcccatattatcacctgggagatgatgacatatggcaaagccacagagttctctgtggcgaagtgttacaaataaaa

SEQ ID NO: 34907 - DNA, 201 bp, Bos taurus
atggacacagagaatgggagaggagatgacagaaagcaaaatgatgggaagtgaatggatgagtgataactgcagaccagaaaaccctggagctgaactgycttcagagaaatggctaaatgagaagcaaactgatttgtgctgtggtgcccctagaaggctttgggttgaaacctctaaaagggcctgaaggtagggatg

SEQ ID NO: 34908 - DNA, 201 bp, Bos taurus
ctcaacaccacagcataatgtcatacatgacaagtccacagctaacatcatactcaagagtgaaagagtagaagatttccccctagaattaggaataagayaaaggtgcctactctcaccattcctattcaacatagagttctagcagagcaatcaggcaagaaaaagaaataaaagcacccaaattgtctatttgcaaat

SEQ ID NO: 34909 - DNA, 201 bp, Bos taurus
tacataactccctgaaaatctaacacagggcatgaccctcagggctccagggaagactccagtaaccgcaagttcacagagaggcccggggagccagcagrataagtttctatgtggtgcattgtgcactgcagaggaccaagagccctgtactatggtacccaggcctggaacagagaagcagaagtagagacaggggca

SEQ ID NO: 34910 - DNA, 201 bp, Bos taurus
caacaaaccttttagtttacaactttcatttttataagagtggaaactgagacagggaatacagtaactcactcacagtcagtgcactgctcacagtgaarctgagattcaaaccaagatctgacaaactaaatcttgtttaattttcactacattttcactgcctttaaggtttcccaaaagacagaaagtctaagttac

SEQ ID NO: 34911 - DNA, 201 bp, Bos taurus
ctagtgaggatccttctgtaggtacagccttggagttgggaaatcctccggcaggtcgagtcgactaaaaaagcaagcgggaagatgaggcacgataggayacctcctccctcgctcaccgcgggctgtcacagtaattggcggttgtgccactcacgcagctttctaaggcacctccaggctccctggagccctttctct

SEQ ID NO: 34912 - DNA, 201 bp, Bos taurus
tagctccattttgtttgtaagtataccgaagctcagagaggtaaatattttgttctaattacaaagcaagtaagtgataaggccagatttcaaagctatakgggttcatttattcatcctctattcaacaaatatgatgagtatgtattctatatgtggccactatggtaggggcttcaccagatccagtcttactctcag

SEQ ID NO: 34913 - DNA, 201 bp, Bos taurus
catccttttcttagcatttaatgttcacagaattaatttatcattgaaactaagtataacttaactgtgaaatgtacaatcaccacattgaaatctgagckgcaaatgaaatttgattagctcgcctgagaatatatagttaacaagaaagtattagctaatagttaacagttttataggttagacagtctacaagtgcca

SEQ ID NO: 34914 - DNA, 201 bp, Bos taurus
acagaatagtatgcgtttgtgcacagcaggtacaccctccaacatgtggatgttgtcactttgtcagagtgattttttttaatgtgcactttatcacccayttctggatgagcaagagtcaactactacattttatcaaatctaaaatccattgtttataacatattattttatgggccaatgagaaagaaaaatgcagct

SEQ ID NO: 34915 - DNA, 201 bp, Bos taurus
tcgtgctttgtgggcactctttcttttctggaagaatgtcattctctccattttcctccttctttttaataacagtaacttgtgtggaatgtgatcatggyccaatcttgctgctcacgtatcaaagtaagaatggaccaggaaaactgccccagcttcactctcatgttgttaacatgaagcacgaaaaaatatggctgt

SEQ ID NO: 34916 - DNA, 201 bp, Bos taurus
agtgacctgtctgcctgtcaagtagccagtaggtgctgtgtacagtgatgtccgtgggcttggcaaggttgtttctcagattccaggaaggccctgacttyccaggaaccctctgaagaattcccgtccatttgtcttttgattcacacacacacatatatattggccatgccccactttatgggggatcttaattctcca

SEQ ID NO: 34917 - DNA, 201 bp, Bos taurus
cactaataaccatcttcacctggttggatcctgctcatcctttcaatcccagcatcactgtcactgcctcagagaggccctcaactgtcctcaccccatgrgaggttttattcccagtcccttgttgttgtcgcgaagttgtgtctctttggctctttgtaaccccatgacctgcagcatgccaggcctccctgttcatca

SEQ ID NO: 34918 - DNA, 201 bp, Bos taurus
cactctgggcctgaggctctgttttgtaatctgcaatgggcaaccctattgttctgcttggtgggttccttgtggggaccttctgcggcctggcacctcayccccttccacactaagatggaccaagtttggtctgaactaaattctcccttcctgcatcccaagggcttctaagtggccaccgatatgcctgcttggttc

SEQ ID NO: 34919 - DNA, 201 bp, Bos taurus
tgacatcagagaggcagtaagggttcttaagcaaggaggatgaagtgacccgatcattttggttgtcctatggaaactgtgttaaggagggcaatgagatrattagctaagaatacatcaatgctttgtatgaccagtgaagaataaattacagtaattcagaggtggtggtctcaaccacagaagcttcaatgagaatgg

SEQ ID NO: 34920 - DNA, 201 bp, Bos taurus
taggccaaatgtatggtgcttttaaatgctaatcagtattgtaagaaatgatgttcatcctaaagaggtaagtccctatgctcccccagccccggaggtcyggctgcaaagtcctttctctgggccccttcattcacgtctgagcaggatggccaactgtctgggcttcgcagagtctgtcaccatatatgtgtcacacgt

SEQ ID NO: 34921 - DNA, 201 bp, Bos taurus
cctcgtctctggttttcctgtgtgggaattaggcccaagtctggtacccagcacagccgcctggtgtccagcccagcctcaggcagcccacatttcaacarcaggcatcctgagatggcccagggcggacttgactgtctacagtattctaaccacgctcctgccgatgtcttttgtccctagggttgtccttcgggatgg

SEQ ID NO: 34922 - DNA, 201 bp, Bos taurus
ggtttttgatgaatgcatgtccacaaagatagactgtacacttaaaaaaaattacttacttactcacctttggcggtgctgggtcttcttcgcttctagcrggcctcccctagctgcggtgtcgtgcttctccttgtcgtggcttctctggttgcgtagccccggctctaggctcagtagccgcagcactcaggctcagtg

SEQ ID NO: 34923 - DNA, 201 bp, Bos taurus
tagaccatgtgcccaacacatagtgaggtcaagccaaaatgtcagagtttcgagcacagaaggcttcatagcagggccaggcaaagaaaatggctggctcrtgtccaaaaaacccaaactccccgaagggtttcagcaaagaacttttaaaggccagatgagggcagggcgtggcaggctgctgcatcttcttggtatagg

SEQ ID NO: 34924 - DNA, 201 bp, Bos taurus
ttgcccaagctaaccactgtaccacctggccttagtggaaccctggcctctcagtaggactacctaggtatccagtgaccatgtgatgtggctccagagtkgaaaaaggaagagtctgatgagtggatcactggccggggctggcaatggcgccaaaggaaaaaccgaggtcacctcctcgactggtcagctctaagggat

SEQ ID NO: 34925 - DNA, 201 bp, Bos taurus
taagagaacctactccccagctttgtggagaggatccattgcaatgaggcacccaacgtgcttagaacagttgctgctcaagaaatgttggccttagtagstgaagagtagagtcaaacagctatttgcaaaaaaggatgtccattgaagaaactattttgcagaaaccacagaggccatctggccttggattaaaggttt

SEQ ID NO: 34926 - DNA, 201 bp, Bos taurus
acgcccaggatgcggaggaccatgaagaagtcaccctggtagacaaggggcggagcctgacgggctcatccctgccagaccggatacgcggcgcgccgtgyggtgctgcttctccctgaggccccaggcagtcccgttccaggactctaggttctcaggtgttctcacccctttcagcaaaaaaacccgctctccacgact

SEQ ID NO: 34927 - DNA, 201 bp, Bos taurus
ggctaaatcagcagggatgacaaagccatcgacacagaaccgctagaagatctttcacgctctcacctctttgcacccaggccagtggggtccagaccctmgcttgaaggctttggagaagcagaagaaggcgtcaccctgaagacacaggtggatcaaatgctgggaccaaatggttcaaggctggggggcggggcgcgg

SEQ ID NO: 34928 - DNA, 201 bp, Bos taurus
ccaggaggagtctgtcctcagtggaggacagaggagcctggtgtgctgcagtccatggggtctcaaagagtcagacatgacttagtgactgaacaacaacmaattccaggaggggctcagggaagaaggtgagttagggcacatgacaacaggtgatgggaggcaaagatgtgagaggtgagtggtgggatgagggaggag

SEQ ID NO: 34929 - DNA, 201 bp, Bos taurus
tcttgaatctgagcagacctcaggcttgctttgacccgaagaacacaaagtaagtggcatagggccaacgccgggcctgtttcttcagaggcccggcagcytccccttcctgcctcttggatgaagcccagcttccaggaagtccaaagaggacaactcgtggccagtctcagcctcgatcaagctcccagctgaatgcgg

SEQ ID NO: 34930 - DNA, 201 bp, Bos taurus
ctggcagcccgtttggggaaggcccacgtcagaagctgcagccccaccaccaccaccacttacatagctcctgcaacctgcaaggcatggcctggagctcytcctgggcaccatcggcttaaatctgaaccagccagtgactgggcatcaacaccagctagcatcaccgtcctcacagaaaatgaagctgcaggagtatga

SEQ ID NO: 34931 - DNA, 201 bp, Bos taurus
gtcattccataattcactgcaaatcagtaaagtaattaaacagcttatgttaatgaccccgtgtcccaggcacattgtgaggccctgggaatacagttcakttcagttcagtctctcagtcgtgtctgactctgcaaccccatggaatgcagcacaccaggcctccctgtccatcagcaactaccggagcttgcttaaact

SEQ ID NO: 34932 - DNA, 201 bp, Bos taurus
gctgcggcggcgctacctggactggaggaagaagaggctgcaagataagctagcggcgacgcagaagaagctggatctggcctgagatccccgccctgttkgtccccgccgactcccgcgcgaccacctcgagggcatctaccctgtcccgtgcggggcctcggccatagctaggcccgtctcacgccctgcgcccgcagt

SEQ ID NO: 34933 - DNA, 201 bp, Bos taurus
ctcattaaaaaaaaaaaaaaatccctagctctcaaagtccatatcaggcccagagaagtaagagttaaattggcataagctgcacctcacattgcgagcaygcgtgactgcatccgtggcccagcgcgtgtcgttgccaagcagactcgcagcgatcagtgtgcagcggctgactcctctagtccaagactgacaaacttt

SEQ ID NO: 34934 - DNA, 201 bp, Bos taurus
tcgaaactatccccctgcttgtcctgggtcagaaccaccagagagacaccatgacagccaggaagacggatcattcattcactccctcacttatccacackcttggtcattcacacattgactcactacttgttcatcaaacatgtacactgcaggccataaggatagaaagatgattaagattgctccttccttgaaaag

SEQ ID NO: 34935 - DNA, 201 bp, Bos taurus
cacctgggaagaaaaagggacactatctaagtctatattgggagggtgatgtcataatgggtcccccagaaagaacaagcctactgacaaaggggccacargggcagagcacctcataagtaaactgagtcacaaagccttagcaccactcctagtgttcaccatgggagtagcctcagaggccagacgtctcagttggta

SEQ ID NO: 34936 - DNA, 201 bp, Bos taurus
gcatcaaacctgagccccctgcattggaagcctgaggtcttaaccactggcccaccagggaagtcctaaggctgactgctttttacttccccaaaaacctyaatcaacttaaatctaacttaggcctgtccattttggtgttttcaaaatgagttcaggcaaaggtgagcaaaaacagggggcaggatgaaactggtacag

SEQ ID NO: 34937 - DNA, 201 bp, Bos taurus
aggcacctggtcgcatggaagttaccgtgaagctgtaggtggaggttgaagggagaagataatacagcaagagtagaggccatggtcatggcactcaagartagagggcacccagttcatgatggacagctcagattacaagggaatttggcccatagccaagcattcaggttctgctttgtttgttttttcttttatttt

SEQ ID NO: 34938 - DNA, 201 bp, Bos taurus
aatgatggagacggttaagaagagagaaattcaccaataaataaggagtaagagaaaagagccagtgagtccctaggccccaggcagggacctcgagggayggcaccagacatgagcccctctgtttcctaacactaagtctgggaactggggatcctggttccctattgcactaagcaagtgagctgagatgctggccca

SEQ ID NO: 34939 - DNA, 201 bp, Bos taurus
ggcagattctttacccactgggccacctgggaagccacctaggagacttagtttgcgcatctttaaaatgggcgggtgctgccaacctcctacagttgttrtaacaatgaggtgcccttaaggcccagaagtgcaggagtggggttctcggcccgccctgagggccctcccagcacggcccgtctcggtaggacagaaccc

SEQ ID NO: 34940 - DNA, 201 bp, Bos taurus
ggccccccacccatcaggagatgaagagtgagtccctcatcatgccagggtcacatctggcaccaaagggaagggactttcatgggagtcactcagaggcraaccttggggacagcatggctggcctgggggctgagaattagccagtcccaccgtatccagagccataaatactccatgatctttgacccacagtaatcc

SEQ ID NO: 34941 - DNA, 201 bp, Bos taurus
ccaagtatcctgctctcccccatgagagcccaccctgggctgtttccccaggcgatgaagacctcctggccataacagctcaagaggtggccaagcagaarctgatgtttcccagcgccacagtgcacaaggctctgtccccaaagcctcagcacttccaggtgaggcccttcactgagtctcaggagagcagaagaagca

SEQ ID NO: 34942 - DNA, 201 bp, Bos taurus
gcccgggagattgtgaagtgcccccaaggctggcacgtgaagcaaacctgggctgtggagctgaaccatgcagtggacaatgagggtcagtcctctggackctggctgagggcggaagggcctggagctgaaaaccgccaagctctcgggtggagtgggcctatgtccctggggtccccagccttcagagagtggggccac

SEQ ID NO: 34943 - DNA, 201 bp, Bos taurus
agattatggagagcggctacacccgcatcccagtgtttgaagacgagcagtccaacatcgtcgatatcctctatgtcaaggacttggccttcgtggatccygatgactgcaccccgctcaagaccatcacccgcttctacaaccacccagtgcacttcgtcttccacgacaccaagctggatgccatgctggaggagttca

SEQ ID NO: 34944 - DNA, 201 bp, Bos taurus
agcttcttctgtagaagtttaaagcatgggaggactttgtcatttctgtagtttcctggaaggaaggggatcctctctgctcccaggtggccatctcgaayctgagctttggttctcaaaatccaaaaagactgttgaccaatattctgtgttgaggctcaagcttcctcatgtggcctgatggatttatattcagtggtt

SEQ ID NO: 34945 - DNA, 201 bp, Bos taurus
ggcaaagagaaaaacatggtgtgatggtctgggcccgtggggcccacggacctgatgttccctgactctccattgccccttgaacatccaccaaggcctcytcctgccactcgctaagccccagggctccgggggctcctgtgcaggtgaggatgcggcaggtcaacaggccgcccggccacagctctgccttgcttccct

SEQ ID NO: 34946 - DNA, 201 bp, Bos taurus
gagaaggccaggacctgaacatattattgaccagagacgtattcatatgtctgttgatacccgacctttatgagctgcaaaagtttcaatattcacttatyagaaactaaggccacaggaactagtttctgcaaaaatcctctagtcagtaatcaaagtgtctgcaaggcccaaagtgcccctactgttccccggagcctg

SEQ ID NO: 34947 - DNA, 201 bp, Bos taurus
ctggacgttcccaggtccactgatcctgccggagggcctccccacagtcccggaggcgttttctcagcaagctcgagctttgaggaccattctctcttgayaggagcaatcatctgacctcctcaacaaaggggaaaaaccttacggactggagggcctttcttccttcagactgtttaaggatattttccgaactaggag

SEQ ID NO: 34948 - DNA, 201 bp, Bos taurus
tctaggggtggcctggatctggtggaggaaggaggaggagagagtcaggaagaactggggtaccagaagggctgtggggctttcatgggtggtgtcctacrggagaaggaagcagacgtggcctgtgaccatcctgagggaaagaggtctctctccagagcgccagctgagtggccgtggacgtgtgtattcaggggcccc

SEQ ID NO: 34949 - DNA, 201 bp, Bos taurus
ctgaaacatgacataaaaaaccagaaaaggacacacacccaagagatgagcagctcaacgctttaacacaaagcaaacagctgagtggccagcgcccagcrtcctgaagtcctgctggtgctgcccctcacctgtcagtcatggttttcctgcctctcccctcagaaggctactggctgcagagttttaaggccacatcat

SEQ ID NO: 34950 - DNA, 201 bp, Bos taurus
agtctctaagtcatcacaagagcctatgttccctctgcaaacgccatctccgccatcaacaataagtttgaatgttcaattatgtacctttaaaaataccrtgaatcccttccatggttttttccttttttttttcttcaattttagtgtaaagcatattataaacgattagattcagaaacaactttaccaatattattc

SEQ ID NO: 34951 - DNA, 201 bp, Bos taurus
catacacacacagatatacacatgtatctcttcctacctaactgcacacagtaacaattccagctgttacaacaacacaatataataacatcagcactgcrcccaacatcagacacctgcactagctgttcacctgctgaaacgctctgccctaagacttcaccaggtaagctgaactaccacttcagagagaccttctta

SEQ ID NO: 34952 - DNA, 201 bp, Bos taurus
cagcatataccagaactctatttgttttatggtcaattactgtcaggagatgaattgtatggatattgcacggtttgtttatccacttatcatttgatggrtgtagatctgattcttatcctagcaagcagttaacttggtcggactcaaacttcaaagtgtctcccctgttaaataaatgcagaattcaccaatttcctt

SEQ ID NO: 34953 - DNA, 201 bp, Bos taurus
tacaatcttatgagatagatgctgctattatcttcatttaaggctaaataacttgcccaaggccacgctagaactaacgaagccgagattcaaaaccgagytcctcattaagaatactgatgtcctcctctaggaggagaggaaaacataggcaaaacactctccgacatacatcacagcaggatcctctatgacccacct

SEQ ID NO: 34954 - DNA, 201 bp, Bos taurus
taaccatgtgaccatctgatgaaacaattcattttaatgagctaatacaagaaagtaaataaaattctatgccccaattctccaattttggcctgaagatktgcatttcaagtgtgcctctctagagaacgtgtttcttattgtctgttctaacgagtgactttaaagccagaacactgatcaatgctaacatgtgagaaa

SEQ ID NO: 34955 - DNA, 201 bp, Bos taurus
ctctcccaagggtcaccctccctgctgggtcagagactttgctctgtctggtcctcttctctgcctcttcctctgcaccaggcaggccttcccttgcctcyaagctctattgccactctccctgcccacccacccagctatcctctttcatcccttcttgcctcagcactaatggccaccgccacccaccccgcccaaccc

SEQ ID NO: 34956 - DNA, 201 bp, Bos taurus
accctgcctgaatggggttgtcttccagggggcctgtcttgggggatggatgtcagcccgtgctgacagtgggaaggcgtgcttgacatccagggatgcartgaaaagtgataggtggcctctgatctaactggtaagaaatatttttcttacgcttactttgctttttgaaaagaaagagttaaactgtaatacagatgg

SEQ ID NO: 34957 - DNA, 201 bp, Bos taurus
agaccccatggtggcttccctccttaggaagcagatggcctcgggaggtttgagctctggtgatgacactgaagtcttcaccacacacaggtcttgaacgktggtctgttttctgtcctgctggccagtttaagaagtcatggccaaatacaattagagggaagatcctggccaccgccctcctgcaaagtccagggtgtc

SEQ ID NO: 34958 - DNA, 201 bp, Bos taurus
aagcagctcccaggcttgcaactgcccacagtgagtggggctgggtgcagaggtgcgtgctgcagtcggtccttagggaaaaggccagggttgaatgccamgaggactcaatgaggggaccaatgtgacacagcacagacaaaatggggaaaacccaaaccgtgggaaggccagagaaacaaagaaaagcaagggaccttt

SEQ ID NO: 34959 - DNA, 201 bp, Bos taurus
tggtacaacctggaaaagcagttcttcaggcagcttctcccaggggtgcttccaaaaacacccccaatcgcaaagacagcctttccaaacgaagtttgttytcaaggagaaatgctttagtttttcaccccataaatgaaacaatggttacatttaatcagctgatctctaaaatctttcttagaaaacacgaccgactac

SEQ ID NO: 34960 - DNA, 201 bp, Bos taurus
taaaagaagaatgatttgccctaaaatgatcacacttctagactagattccctcatctcagaggaaaaaactctagctggccttataatcagaagatgctmataaaacatgcttaagtttacaacatgtctaccaggaggacaatcaagaatcctagggaaaataccagcatggaaaaaactaacaccatgaacaaagggt

SEQ ID NO: 34961 - DNA, 201 bp, Bos taurus
agttcaacgtggagtccctttctcccacccccggtcaacaagaaggggtgagagacagagccaccaccccgtgagcttcttctcccaccagggttgcacaygcacggacctgcccttggcccccgcgaacctgctccatcgcctcgactcgccccttgtcccctctgccctctcagactctccctggatgctgaccttttc

SEQ ID NO: 34962 - DNA, 201 bp, Bos taurus
tgatccccaaaatgctcattttctattgaattacattagttttacagtgataaatcaccttaatccttctgcagaaatatatggcctattaataaattcartaagtacttttggtgaaagaatttttatagaggaacagtgagcattgttcaatggtatagatttaaagtctggcctcaagcaatgctgctgtaggcccac

SEQ ID NO: 34963 - DNA, 201 bp, Bos taurus
gcgcagttcctccttcaggatctaatgggcaggtagaggaaggggaactccatttgcagccttcaaagggatgtcgaacccttcagtgacagggccagcakaggaccagaacagctcagaacggaatgagtgaactgcatggtcagaggacaaagggtgaatcaggggtcagggcgacctcaacaccgtcagcaaggaggg

SEQ ID NO: 34964 - DNA, 201 bp, Bos taurus
ccagcacttgtaggggaacttccttgctgggacacgctacctatgtgagctctccgagcctgggttctgcatctacaaaaagggagattctaatgctgtcratgttctcgagttgctatgaagattcaaagaactgactcatctacagggtgatcctgtgttcagtttatgccagctgtgcctgcatcactgttatatatt

SEQ ID NO: 34965 - DNA, 201 bp, Bos taurus
gtcccttctctatcctgctgttaccaaggtctcctgaatgaaaagcaaaggaagatccaatgtccccttattaccgtctctcctctgctccccaagcaccygcctgttctatcatgtatcaaaccattttatctcttttaaagaggctgcaaagcaacactgctgaatttgtgtccaaggacagagtcagctcagtgcatt

SEQ ID NO: 34966 - DNA, 201 bp, Bos taurus
acccacagaggccatgagaaacgaaatcttttccaaggatctttgaagaaagccctgcaggtgaaaaattagcagaagctgaaaagtcatgctcgcctgcyggtggagcccagcagtgtctcggggagcacacggggtgtcctgttgtggcgtcctctggaggtaagacctgccgagtcccagaatgctcactggccacca

SEQ ID NO: 34967 - DNA, 201 bp, Bos taurus
gcaacccgagcttcatcagggaaagtgaacccgggagctttgcctgaatttggctccacaaccaactacattcactgaacatgaacctgaacatgactcargactgacacgttcttcgggagcatgacagacagcattcagcaccatcaatgccccacagaacccggaatcaaacaaaaggcccaagagttatgccttctg

SEQ ID NO: 34968 - DNA, 201 bp, Bos taurus
taaacacaatgacgggattcttggatttagaagagaaaagggcttctcttttactttgttggccctccttttcactgggttaaagaacctaagcccccttycaacacaacggtttctttctgtttagatcgacactgtaccggcaggagtatttaaatatttgcaacaaattggaatgaattatccagaaacatccaacta

SEQ ID NO: 34969 - DNA, 201 bp, Bos taurus
aggaacgtccatgtggatgatcccaggagtaacactgactgtcaaaacagtccctgtccttggggatcttgcacctcggtacaggctgggaggttagaaaycactagtaaggacacaggcaagtgtgaggaagtcccccgggccctggggactcacgggagtgtggggaggtcatatttcactagagcgctttgtggaggg

SEQ ID NO: 34970 - DNA, 201 bp, Bos taurus
taggacctcagcaacatcctctgcactcttctgcatggccacattgccctgcctctgtcaggaaaggctgtctctcaacctctgaatctcagctggtttgytaactgctttggccaacaaaatatggcagaaggatgttgtcccagctctggtcttgtgtggcagcttcttcttcctgcctcttagagctcatcacaaagg

SEQ ID NO: 34971 - DNA, 201 bp, Bos taurus
agaagtaggatggagacgtctgggcagacatgaagaggctgagagttttgaactagccaaattccccttaatcttttagtagtggaaacaagacctcacakcctcccaaaaacctttccctgaagcttttcgataactgtggctgagcaactgtatcacaagaccctcggccatcagccctcatcacctctagatgctaaa

SEQ ID NO: 34972 - DNA, 201 bp, Bos taurus
cacaggggctgaacaagtccctccagccactgggttagttcccaccttccccgaacactcccaccgcccaccgtcacgggcagccggccctgggctcccckcggatggctgagtggtgtctctcctgctttccctgctggtctgcggaaagccccgcctgccagccctcctccttctcagcccagctcctgcccagcacag

SEQ ID NO: 34973 - DNA, 201 bp, Bos taurus
aagagcaggggggccagaggaatcagaatgaagggtcatgaagccattcacttcctccttccagtctgagcagcttgagaaacaggaggcaggttgatggktcagaaatggttggcctagagacactagagggaagatgtgaatgtggctgagggagaggagctcttgggctatcttaggtcttgcttgagtttggggtgg

SEQ ID NO: 34974 - DNA, 201 bp, Bos taurus
aaaccacaactgtcctagctttctgctccccgctttcaggttgctaaacaaagcagagcattgtgttcccggcctctgtgtcatcatcatcatcgcccttyggaacttcatgagccagaccaggacttccactttcgcctgagaaagaccagatactctgaacagctaccacccacctggcagtaactcaaaattgtttct

SEQ ID NO: 34975 - DNA, 201 bp, Bos taurus
cgaggctggacagactcaggcctgtgggacccctggaagggtctacacttgttgagacttggaagtgtgggcagggctgtgttctgctggccttatagacygggggtcacttactttggcatttttaacaaagatttaaagcttagggaatttgccagttggcttggtcttagcagcatgtactttttttttacttaaata

SEQ ID NO: 34976 - DNA, 201 bp, Bos taurus
ccatctcacactgtccagagtggccagcactggttttccatccttgctgtaggcacctgctacaatccctgctcccaggccagcgtgggactctgagagcrcgtctgtggacgtctgtctgtgtttcctaacggacgtttgtgggcatccctcagagagttgaccacgtgtaagatcgtgggatcgtggggtagcgaccgg

SEQ ID NO: 34977 - DNA, 201 bp, Bos taurus
ccctgaagtggaagtgtggagtcccagcccctggatcaccaggcaaatcccagaaaggaagtcactctgaatgtcacagtacaagtgactcctgtggaatrtaggcccaggaagaaaccccatccccaaacaagtaactgggccagccttgctagtggctgccctgggagagggtgtcacacagccctctttgctggtgtc

SEQ ID NO: 34978 - DNA, 201 bp, Bos taurus
ccacacggtgtgaccaaaaaataataaaaaaccatttcaaaaaagaaagaaaaagtgagaatgggccatggagaaaataaaacgagatgtgcatagggaakgtatttgtgtaagtcggaggatgaattataatcctcagtgaaacaaaacgtgctctttctgacggtgggcaagctttcaacatgtcagattactttaaaa

SEQ ID NO: 34979 - DNA, 201 bp, Bos taurus
gaatcatcaacttttaatgattctgctgaaactggcctccttggaggcggctaacagggaacgtgtgtctactttgagattcccagcccgtccccaaggcrgctcaggtttttacctggcccctatatcagatctggccattggacaccttggattgatttcacttggggccctgagcggaggaagcaatcagaacagctt

SEQ ID NO: 34980 - DNA, 201 bp, Bos taurus
tcaagctgtgggctctgtccctgggtgggtgttgcaccacacggccctgtggaatgccgtgggctccaaaggggtccagaatacagggctggaggaccagrcagggctctgatgagcggcccgttgtggacacattgaccttcactgtcaaggcctccagtggttcttcaaggaagaacctgcttcacaccctgcttccct

SEQ ID NO: 34981 - DNA, 201 bp, Bos taurus
ccattccttcctccaggggatcttctcgacccaggaatcgaatctctatctcttatgtctcccgtattggcaggtgggttctttaccactagcaccactgkggaagcccttcccaagtgtgaaccaggttctgaaccacaagcaaatcttttacctctttgtctgtgctgcctctggcattccattagatgcgccgtcttc

SEQ ID NO: 34982 - DNA, 201 bp, Bos taurus
cagagccctgcacctcgcagtgggtcagctcggggtcgtgttggcctctctctctcctgcactgtattttctgggaagggcttgtatctcccagtttatcygtggaaagtctattgaggtggggccagcgtggtggacttgctgggcagctctcaagggacttgaaggatgggcatctatcggaaggtggcttgtgaaggt

SEQ ID NO: 34983 - DNA, 201 bp, Bos taurus
agtgttgcattcatttctgatgtaaagtgattcagtcatatatatatatatatccttttgcatgtacttttccattatggtttgctgcaggatattgactrtagtgccctgtgccgtttagtaggcccttgctgtttactttacgtatagtagtgtgtatctggcggcttctcaggtggtgctagtggtagagaagctgcc

SEQ ID NO: 34984 - DNA, 201 bp, Bos taurus
gagaggcagacgcaggtttacttctggccgggtggcgtggtcagacccctggggccagccagagtccctggggaagcaggtctgtcccaggtgtttcttgkataggagggctgctgtccaagggatgtgcaggggtcagagaatggggaccctggagcagccagagacccggagcagggaaaggcaagcagagcaggagcg

SEQ ID NO: 34985 - DNA, 201 bp, Bos taurus
ttgcacagtatttatttcagttttggccatgttgactcttacgtaaatatggtaactgcttgtttaaaattcttttcacaatacaataatcacattgaaargtcagtcaggttttggcacaaatggccaacatccttctgccaatgatggttctcgattaattttattgcctctagaagttcatcaatgtattttgagaat

SEQ ID NO: 34986 - DNA, 201 bp, Bos taurus
actcagggccagtgggtcccagacccactcagtcactgcttctctggcttacctcccagtgagtctcactttgttcgtctgtctctgttggctgctcatgmctgcatccctgctcaacctggatggcccctccttggctgcctgctctccctgcctcctcactcatttcccatttatattccacgtaggtgccaaaatttc

SEQ ID NO: 34987 - DNA, 201 bp, Bos taurus
ggcagcggcgtttatccaagcaccagctgctgtccccggccactctgctggactctaaggagaaacgacccatggaggtccacgtgcctctcgggtagtgsagaagcttggccaagagttccttggtgactcctgtcttcgggcactgcaggctgggcctcactgacttgcacagtcatcctacacacctgtttagtccct

SEQ ID NO: 34988 - DNA, 201 bp, Bos taurus
ggcttggtgaggtgaaaggagctgtgtcccctgtccttgggggtgggtcccatgtcacctgggcgaacctcaggggacagaagccggcctggaggtcgggrtgatgttaacacaaggtcatgtgcccggtgcacagcgaggtcaaacaaactgaaacatcggaggcggggccagaggaaggtttctttcggggccatgcga

SEQ ID NO: 34989 - DNA, 201 bp, Bos taurus
gcaggcattggaagatttctgcttaacttggcagaattcatggctgctcagtatcttggatttagttatttattggaagcccttgcctttcatgtgttgtyttgctaagttattataaactactatacttttacactggatggtatcatagtagttagaggccaaaattgcttagttctgtatagaaaatgggcttaaagg

SEQ ID NO: 34990 - DNA, 201 bp, Bos taurus
tctttgcaactcccacgaaaggcttttacctttaaaaaacccctcaaatgtccacccagagctgcacgcacacacccacggttgatggtgtggccactagygccagctagtggagcaagcaaaagcgtagacgtgcaaagtgtgagttaattttaaacttgggggccaaaggcagttttgtatgggcttccctggtggctc

SEQ ID NO: 34991 - DNA, 201 bp, Bos taurus
accccccacccccacccccggctcctctgtctatgggattctccaggcaagaatactggaatagattgccatttcctcctccagggaatcttcctgactcrgggatcaaacctggagtttgaagtcattacagctcccatgggcaggaaggtcccagaatcgtagatctgaccttcatcatcctggttctggggtgacatt

SEQ ID NO: 34992 - DNA, 201 bp, Bos taurus
ctcccagtgatttgcatcagtttcccagctgaatgcagtcggtaagcacaagatataagagacatctgtatttggtagaaagatataaaactgtattcatmaaccacatggtcatctatgtagaaaacactaaggaagctacaaaaaatttttactagaactcataaggtaaggttaatgaggttgcagaatacaagatca

SEQ ID NO: 34993 - DNA, 201 bp, Bos taurus
tgttgtaggaaaaggcccatggcagcagggctggtggtgaatctcttttctgctcaggggcggcggtccccgtgggagtggctggcagccaggaggggcgmagtcgagagggcctgcctgggcatctgtctgtgactcctcccctcctgcctccctcagctggagtgcaagctgcagtctttgcctgttctggaaacccga

SEQ ID NO: 34994 - DNA, 201 bp, Bos taurus
ttaagattacatttctaggggaaagtggaaattgcagtgaagttggagaggaagtctgggtttgatatgggatttagcacaagggacaccattagggcctrtggttttctcttctgtgttccctttgagtggtatcactgctgttacaaagagatcatccagaactcctggccctttccaccttgtgaggacacagtgaga

SEQ ID NO: 34995 - DNA, 201 bp, Bos taurus
gctttcccattagaggacagttgcttgggagagccttagaaactaatattgcatttcacttcataaagattgtggcaaacccaacagccagagaatccacrttccaattgccgatgagaggtgaggacatgttcccacagcctctgctgctaatgaattacagttgtaacacacagtgtggcacggtaccatgttttaagt

SEQ ID NO: 34996 - DNA, 201 bp, Bos taurus
gatgacaactcgtaatttgtcaggaagtcaagaacagcaggagtggctctgagatacacactaacaaacctctagcatagagggaggccagtggtgatttrgaaaaaccacatgtcatttcctcttttttctttcttctacattttcagctcttctcttgtgacacgtcgatacatagactagagcaaaggccgggtgtag

SEQ ID NO: 34997 - DNA, 201 bp, Bos taurus
tctactgctttgttgggaaaaacaagaaggggaattaagaaatatatctttatgtcgatcaatcacactccaatcaatttttttgcaaaaggaatatacayttggctctaagaagaaaacactgtgtgtatgtgtctgtgagtgatttaactttgtttattaaaaaggtttctggggaaaaccagtaatatatatgtttat

SEQ ID NO: 34998 - DNA, 201 bp, Bos taurus
actctgttttgaacctgagacattatttaacctctttggatctcagtctgcctgggtgagaaataagggccatatcaggttcagcattcctttattccacyggaagcacacgggcatgaaagagacttcagtgaattaattcctggacatctttcagctaaatgttgaggacgtgatccttagatggggcttccccagtgg

SEQ ID NO: 34999 - DNA, 201 bp, Bos taurus
tgtcagctgtgttcaccatttggaagttttataaagcttgtagatatctttaaaatgtggaaattcaataagtgaggtttatttctggtcataaataaagrtaattgaatgttgatgattttgcataatgcctattcatagcctttttcattttggagatcggtttgaaatagtgaaaactacggcttacaaggtcttgga

SEQ ID NO: 35000 - DNA, 201 bp, Bos taurus
gaatactgattattgccaaatttatgtaaacagtgatgctaattgtcagatgaattacaactcaaaggcgcctgtttaatatgtaaaaaacaaaccctgcrgtgtctaggtgtgggcatgtatgtgtgtatgtgatgttggagagtggaaagaaagggacaaattcaaatttaaaaaatgaattatgctgtaaacaaaaat

SEQ ID NO: 35001 - DNA, 201 bp, Bos taurus
ctatgaaactgactttattctgagtcaaaaatggtcaaatacgggcaatttcatatggctcaacttacttctcacctcagagtggaggtagagcttggctytgggcttggattccatgcaggtaggtccacgttgtgaaactgcctccaaggtacacacagaggcctgcccagcctggagatcctgatcaagcccaataag

SEQ ID NO: 35002 - DNA, 201 bp, Bos taurus
ggtataactctaacaaaatatatatgagactgatatgaggaaaactacaaaaccttgatgagagaaagcaaagaaaaactaatatattaatattaaagtaygtaacaggaggactcaatattgtccagatggcaggacttcccaacttgatctatagattcaacacaaggccaatcaaaatcccagaaagatattttgtag

SEQ ID NO: 35003 - DNA, 201 bp, Bos taurus
ctctcacctctatttagttaccaactggcccacagtattcattttaaaacaaaatcaagccccacagctaaggagagggtagtgtgatgaaagtttacagkcagatacagatggccagtgggcacacaaagaggtgctcaacatcactaaatatcagagaattgaaaatcaaaactacaagaggtatcacctcacactagt

SEQ ID NO: 35004 - DNA, 201 bp, Bos taurus
agggaagccccccttggcccccagaggaaggaaaagaggacatggatccctagaaggcactcagagatgaagaggggactcccttcccagagatagagctkgggccgtggaccactggagggaccgccgggactgactatctttggaggagtcctcagctgagtgcagacttcacatcatctatgcagggggctcagcagt

SEQ ID NO: 35005 - DNA, 201 bp, Bos taurus
ttacacttgcagctgctcaggtggatctaggaggtgggaagaggcacttctctgtggagtggacacgtgatagaaggattagcagaaagaccccctctcaygtgccctgctggggccatcagtgccacggctgcagcgcagaataaagccaggatcaacgccacctgtgccaacctgccgctcttcaccaggtgtggtcgg

SEQ ID NO: 35006 - DNA, 201 bp, Bos taurus
catgatacctcttttaattgcaatagacacattcttaagtcatttaatccaacaggacccattaccagtaaacaaaaagcacatttttggccgcttccccrgacagtacaaaggaaggaggaaagtaaacgttttccccagtgagtggccctgtcccctctgtgttttgagtggggatttgtagatgtaaactctggttcc

SEQ ID NO: 35007 - DNA, 201 bp, Bos taurus
acagtatctgtcggctccacgagctggttttcctccaaggcggatggagccgaggatttgttacttgatctaacagcaatggctttccaatagccagacaygcacagcatcattgatcagtgtgccctctccttgtttgcattggaacactgctcaatttacaccaattaaagaatgcttggtttggatattgaagaatca

SEQ ID NO: 35008 - DNA, 201 bp, Bos taurus
gagctgatggttaaacagtgggttgtccaggaggaagccatggacagcccatgcctggtgggaggagcaacacacacaaaggttggtacaaaaaggcccckcgtacacactgagaaccaagggcagctggagatgctgcaggggagggggcaggctggcgaggacacagagcccggccagaggggttccaggtgcgtgttc

SEQ ID NO: 35009 - DNA, 201 bp, Bos taurus
aacccaagaaggcaagtgaggaagaatagacagggtctgtgcctgtgagaagaggacaggattgagcaacttcataaaagaaaaaatgagggggcaagtcygaaagaaaatcatatggaaattagttgcctgtcaacatagacaggtttgaaatgtccgatagcttgggagaactgtagtggaagaagacaacagaccatg

SEQ ID NO: 35010 - DNA, 201 bp, Bos taurus
tctgggggaggagtgtgtagacagccagggggtcagcagggccaccaggagactcaggccggggcaggggtggtggtggttttctggcagggaggaggccyggacacgcatggaggatgagatctgattgtcagctggctgctgtgcggtggggagactacagaagggatgggggccgggtgactgccatggtatcccagc

SEQ ID NO: 35011 - DNA, 201 bp, Bos taurus
tcctcgctcgtggccgtttaagagaatgttcttcaggagccttgagtaaaagagaaatccccaaacttaatgaatgaaggtaccaaaatttacatcaatcmgtgttatatgatgtgtgttggacagtaatatatatgtttcaaagtaataattttgtatatattttaaataaagtattattgttctttccgtgtagaagcc

SEQ ID NO: 35012 - DNA, 201 bp, Bos taurus
tgagggttgagcacagcaagagaagtctgttaagagccaaggccaagagacaatctgtgaacatgtgaaacccctgggttcacccactttaagcacccctrtttacacagaaagataccaaggccttctctcctgtaaccactgtctactagggagtatgggcttgcagtttcaggtgctaatacaggtgaacagcagaac

SEQ ID NO: 35013 - DNA, 201 bp, Bos taurus
tacatacctgtcaataattgctttaaggaaagatggattaaatgctccaatcaaaagacatagaatggctgaatgggtaaaacacaagaatcatacacacwctgcctccaagagattcacttgagacctaaagatacacagagactggaagtgaaggtctggaaaaggtattctatgaaacagcaaaagaaaagttggggt

SEQ ID NO: 35014 - DNA, 201 bp, Bos taurus
cacagtcctgaaagtcaaaatacacaggaaacttcaccaggatacgaatcagggaccaggcacaggaagaggggatatattatgaaccaatatggcacagrtcatgcattttcagtttccccctccatagatgggggctcctgttggggttagcctgcttttcctccactgttggttattcaagttagaggtgattaaatt

SEQ ID NO: 35015 - DNA, 201 bp, Bos taurus
ttacctaccagtccctttgtgtttttggatttacacacaatatttaaaagctgcctttcacatacgctgactttttcacaactcatccaaggggatatgayctcacagtcttacggtggagttcctgtcttctagtcgctgtctctgtggaaaaggccaaggggatcaaaggtgttcccaagtcagcccttgcctgcctag

SEQ ID NO: 35016 - DNA, 201 bp, Bos taurus
ttaaggaaaggtgatattttaggtaaaacaaactatacaacagcaatatggaaataaaaagttgcgaagtatttggggagaatgacaggctgactcaattygagtgaattcacaagtgaatcaagaaatggatggaggagttggtcagaagaaaatgagtatagtttttgttggattttatgtgaaaatataatgataagt

SEQ ID NO: 35017 - DNA, 201 bp, Bos taurus
gaccagtggaagacagagtggacctggccagtccattggacctgggagatagctggacctgggagagaactcctttcctctttttctcacatatggactayttggaaaccctgaagatatcctatgaaaccaatcaattagatgtgcgtgttagaccctgagactagctaagtaaccatttttctctctttttaatatgtg

SEQ ID NO: 35018 - DNA, 201 bp, Bos taurus
acatccactggagaggtgacacacccctgtcctcacaggaacccaggacctactaaagctttctgaggcaggtatttccgctagccgcaaattggtgctgyctcataccattacaccaaacgcctgttcccaacttactggacactccccaagccctcttcgatgaaggacctcctaattaagaacatgcccctccaaaac

SEQ ID NO: 35019 - DNA, 201 bp, Bos taurus
ccaaaactgccatcccctttgctcttcaccctgctggccctctgccgggtgtcccaggctgttcaaaactgctagaggaaacttagcccttcagactgccrtcactgacggtttatgaggccctcaaagcggtccactatgcccactgctatcttctgagcctcctcaaggcttgctagctttcacaaactgctgtaaagt

SEQ ID NO: 35020 - DNA, 201 bp, Bos taurus
gctctgggccggtcgcacccgtgtacctccgcagggcctggaccttggggaccgggagagccaggatcctcaccaatatcgtcatcccgtgcctcaagttytggaggccacgtcccaggtgacgtggaagcccgtgttgctgccgggagcattgaagctggctcctggtgtgagcatgtggaacccaagtacgcaggtgct

SEQ ID NO: 35021 - DNA, 201 bp, Bos taurus
atttttgagatttcatgataatgctgtttggccctctctctgagcagtgaggtcacattagaagtggagaagcttctgaacattacatcattacctcataygcataaacaaaccactcccaaagagtgtaagtcctagacatttgtttctaagcagctttagtcatgctgctggtgtcgcctttgcctgactgtaggagtc

SEQ ID NO: 35022 - DNA, 201 bp, Bos taurus
agaaagctgaagagaagccatcgctaggcaggagggggtgctttccggagtaaacaaacctgccagcagtccctcttctcagcagaaagggaagctctggyggacaaggccaaagacacagagaagggagggagctgccggctccgtgggcccatctgtcctcatccccttgtcctgctttccctacagtggggggcagag

SEQ ID NO: 35023 - DNA, 201 bp, Bos taurus
catctccgtgactgtgctttgttagatggaagatcttagaaataagggaggggcaattctatcaagagacaggagccatctggtcattttacattctttaygtcactgaaatagtgacataagcaggcaatagggagtcataatgttgactaaactatgactaaccttaactatcaaggagaaataaggttaccttagaaa

SEQ ID NO: 35024 - DNA, 201 bp, Bos taurus
tgaattttaaaactcttttggagatgggagggaaaatggtagcaatgataaaagaaataaaacaaaagaattggggctgttctgttactggaaagtaatcrtactacctatgaaatgctgtagtgttatttgaaagtatacctgaactgggtacaaacataatttacaaattctaggacaattacaaaaaaaaaatttttt

SEQ ID NO: 35025 - DNA, 201 bp, Bos taurus
ccaaaaatgaaattaagaaaacttttccatgtatagtaacatcaaaaagatttaaatacttgaaattaatttaacaaggacatacaagagttgtatgctgwaaactacaaaacactgttgaaagaaataaagacctaaataaacaaaaagaaatcccacaggcacagatcaaaatatgcaatattattaatatggcaatat

SEQ ID NO: 35026 - DNA, 201 bp, Bos taurus
gtacaacaaggttaatgtatttaacatgatcaaactatacactttaaaatggttaagatggttaagatattctctgtattttatcacaattaaaattcttyttaaaaattttcaatccccagataaacctaaacggaaaatttatttcttttacaagaaatactaagggaaacgcttcaggatgatactagagagtaactg

SEQ ID NO: 35027 - DNA, 201 bp, Bos taurus
atattagtatatattcgcgttgcttgagcacatccaatctctttcttctacatgctacatagtcttccctggggtatgtccagtacattttacttatccarctccccagaaatcaaccttagactgcccccagatccctgcaaagaggagtgaaatttccagatatgcccccttcttatcagtccttgtgagatttttttg

SEQ ID NO: 35028 - DNA, 201 bp, Bos taurus
ggttgggccgatggtctttctaacaggtgggattagggcctccccaacctctgccccgtgtccaaccattgcctcgtccccaggagcctgagctgcccttyagcgaaagggcaggccaccccaatccatccccttgtgctcagagcagggatgggactgtgaggctttgacagtctgaactgggggctatggttgggcctt

SEQ ID NO: 35029 - DNA, 201 bp, Bos taurus
ttcctggcaaaccaagacttgtaactcattctcctcactattgctttgtttatttataaaatgtgcttttaattaataatgactattctttattaaaaaarcagtacatatacaagggaaagaattccaaaactgcatgcataataaaaaatatcttcctgctacttcatgccccttcctcccaatatctgtcctggttgt

SEQ ID NO: 35030 - DNA, 201 bp, Bos taurus
cttgctcatttgctggtggtagcatcaaggacagtcttgatactcctgaaggatgtatgttaagaatctgcagcttcagaacactgctaaatgttgatgcrgggtagtttcctgggctcatgcatgggctaaatgactagccttcacacttatgttaataccgactcatgtccatctggttggtgatgccatccaaccatc

SEQ ID NO: 35031 - DNA, 201 bp, Bos taurus
tctgatgggttctactttgcactgcaagcaacagcatacgcctcaggagaaggactccgctcttgtattattgatagggaagctgagagagggggaggaaygtctagtcaatatgttggatccttgttggtcagagaaatgatttggttaggggaattctcttatcaatgccacttatattggctaaagagacctcgtctt

SEQ ID NO: 35032 - DNA, 201 bp, Bos taurus
aatatattgagtgagattcccaaacatagaggtttaatttctgatctcatggatgcaaagcaaataaacagaatggccaataaatttgaaccaatacataragacatgtgatggttttgaagggaaaagaaagtggatattgtactattgaattaggatgaataggtttcattagaaacagcatcttgatgaagaatcagt

SEQ ID NO: 35033 - DNA, 201 bp, Bos taurus
agatttttgcctggaaaagtcagtgaaaagaatatgtatactatgatatatgatcctatttataaatgtgttatatgcacatatgtgtgtaggtaaaatayctgtttagaatagctccctggtacctcagacggtaaagaatctgcctgtaatgcgggagacctgggttcaatcccgggctctgggagatccccttgagaa

SEQ ID NO: 35034 - DNA, 201 bp, Bos taurus
tttaggtgaaacagttacctgttgtgatcttgaaggggtgttctatgtggcaacaacccgatgtgtgccctgtgcctttggtgtgagagctgcatttgacrggaaacaagtcacagtgatagctttcctcaggttgtgctgatagcatcagcttggtagagagtggggctccagagggaggagccagggtctgttccgggt

SEQ ID NO: 35035 - DNA, 201 bp, Bos taurus
gcagccaagcgtcatcccaccaggccctgcagcagggttctcagcggtgtttctctggaaacacctacatgctcttttcctctacctttgagatcaaacaygcagttttgaagtggccagtggccaagattaggctcagtgaagctgaaggagttgggattaggtaagtctgaggacagatttagcggtgagtcttggcca

SEQ ID NO: 35036 - DNA, 201 bp, Bos taurus
tgtgctttcttctgcctggaatctcacagttcgtgtccttctttcgagttttcctctacaagctcatctcaaacccagccttaccccagggaggatggcaygtttgaggcccctccccataccatgtgagtttcccagaccctcaacaggcagcctgagttcccaaggaaatggaaggtggtggggaagggctccaagggg

SEQ ID NO: 35037 - DNA, 201 bp, Bos taurus
gaccatgaaatcaatgtgagggggtggggggggggggtgttcagagcaaggagaggcttctacactgagcctgaaccatagtgggtagactgtactaatayatctagggaaagactatgtcaggggaaaaacaacctgatcagtcctggaaatagaaaagaagagtaagagttgactgttcctatctgtttacaccagcat

SEQ ID NO: 35038 - DNA, 201 bp, Bos taurus
aatgagataccgtgtctcatctatcagagtcataaaagtctctaaagcctgtcagccctgtcttggcaaggcgatgggaaactgctcgctcagattttgtkggggagagaacaactcaacctctccaaagggcaattggccactacctttcaaaaattacaaatgcagatgccctttgacctaccagttctgcctctagac

SEQ ID NO: 35039 - DNA, 201 bp, Bos taurus
ttttgcagcctgagacccttgtgggccttccccagatcagaatcttccctcctcccttctcccctcccccaccccagggaaagacagccgggccccagacrccggctcacccagttcccaaacaaaagccccactgtcagcaggtcacagaacagccaagcccatgcctgattcttgggtctggacctcggccaatggcac

SEQ ID NO: 35040 - DNA, 201 bp, Bos taurus
gatatagtcctgcatggaaatcctcaccaagattcatgcaagaggggctgtaggtgaggaatacaggagaggggacactggagaaaatgattactagagaygatgattctagggtaagggctggcccaggtgctgaggagagacttccactctctagacatttgggggaagttacagtagctcagatgtacacatctagta

SEQ ID NO: 35041 - DNA, 201 bp, Bos taurus
tagctgacaacatagcagccattctgatttgtggtcccacttttgtaaccaagcattttccccatctctggaagctttggggacattttatttgtctccaytagactagaatttcacagtgatgtgacttggtgtgggaggatcaaagtcatgaacatgaaatatcaaaataagatggttagagaaacactgtgcttttgg

SEQ ID NO: 35042 - DNA, 201 bp, Bos taurus
ctggatggcagctcagctgtgtggggggttcagagacttaaatttggaggaaattaagaagtaatctagccctctgcgcagtgtatccatcccagtggccrcagctgcatctttgtgtgttcccattgaacctgactctctctggaccctcctaagagtggaccctcactgaaacttgggactggggaggggagaaggtgg

SEQ ID NO: 35043 - DNA, 201 bp, Bos taurus
ccccttgcttaatcagatagtgaatgcaggcgagggccacggtcttgttgtcaccatggatgacaaggtgcagaggtgtctggccattgttggtgggcagrtttacgggaaacttgtactcctccaccaagacctgcaggcatgcaagcttgccactctgggctgcaaagtggatggcagtgaaaccctgcaggggccaga

SEQ ID NO: 35044 - DNA, 201 bp, Bos taurus
tcactctcctgctcccacaaagatcatgccaagggagataccctacttcttcactggatgtgtgacttatctttcttcttcttcctgctttgccaagcccrattggcctctgctgctggtagaagcttcttcctctcattaggtctccagatagcagacagagggaacatctgtcttctcctttcaaggccccaggacaca

SEQ ID NO: 35045 - DNA, 201 bp, Bos taurus
aacagactattcctatgctgtttaaatgtggcagagaagagtgagagaaggaaaccaagccataacaattataagacattcagacaaatctcactttgagytgatgaaaaatgctgcatgaaaactagtaaatagtatctggcataatattagaataataatacatgataaccaagtgagggttcattccttgtgttgaag

SEQ ID NO: 35046 - DNA, 201 bp, Bos taurus
caggggattgagagtggggacagaggaagaggttcaagaggtaaaggccagcacacagcctgctctttgtttacatggttggctcaggctgtgacaagtamgaaagatgacaatgtgtggtgttggcttggttggaataaaaccattcacatgttcatttgtttgctgatgcattcaaccattcatggattccacaatcac

SEQ ID NO: 35047 - DNA, 201 bp, Bos taurus
ttttatctgtagttaataattgccttggccctttgtttacttagggttttttttttttttttgtacttaattgctaactcaccccacaatttccaaaagcktctcagaatatttttctacaaggccatcaacatcagccaatctaattctttctttctttcttttccctttttttctgttgaagccatccgtcatgaagac

SEQ ID NO: 35048 - DNA, 201 bp, Bos taurus
cacattcagagggtcgtggtcccagggcagcaccttgagagatggttaaggacccagaggagtgagaaagagtgtccttggacataggaaggtattcaatrtgccctcaagttgccgggccagagacaaagaggttgacttcagctcagcagcgggtctttctcatggttagagccatcccctggactactgtgctcccta

SEQ ID NO: 35049 - DNA, 201 bp, Bos taurus
ctcaatattacaggttagggatagctgaatgaatctttcaagggggaaattttaaacgaggagagtagtgggaggtagtcttagttgtccatttagctgamcagttaaggtctgttcttgtccttggcaaagagattttcataaatgcagccaaattataactgcccaaggagagatcataaaagttaaccttatctttct

SEQ ID NO: 35050 - DNA, 201 bp, Bos taurus
gccattgctctgatgacgttcggcactatgtatcccatgagcgtgtacagtgggaaagtgttactccaggtaatggtcatctttcagtatgcatgcttagrattagccatgttcttttaccagattataaaaataaacgtgttcatctgccagattatgaaatttttaggagggtcctgttggagatgaagccaaacagta

SEQ ID NO: 35051 - DNA, 201 bp, Bos taurus
aacaaaatagaaggccagtgcaagtgaaagtattaacgacccaattaattgataacatattgatgtattgccttctgtgacggttaactttatatgtaaayttgtctgggccatgtggagcccagatattagggtgtttctgtgagaatgttttttggatgagattaacatttaaatacagacttgagtaaaacagattgc

SEQ ID NO: 35052 - DNA, 201 bp, Bos taurus
cttctgcttcatctggtactgagctgacaagacaatgatgtgtcaatatgggagggaagcactgttcgagagaagctttatctgtctccattggagggccytagtaagagatttttttagtgtggtagtaatgactacatgcagagaacgcaatggcaccccaactccagtactgtggcctggaaaatcccatggatggag

SEQ ID NO: 35053 - DNA, 201 bp, Bos taurus
ttctctgtgaactgtttcagacatctcctcaaagagggaaccttccaacatcaggcaatatttcagggtttgtacgtagattatttttgcagttgatgctrgaggatgagaaagtgacaatgtttcttcagtctccctgtccagtgagtatttaacaattaaattaaatcttaatgatgaactgtgtgtaaagatatttta

SEQ ID NO: 35054 - DNA, 201 bp, Bos taurus
ggttgccatgccctcctccaggggatcctcccaacccagggatcaagcccaggtctcccacattgcaggtggattctttaccgacttaaccatcagggaarcccaacttcattaggtatctgtttttagatgtggtgaaagggttttcagcggaaatctattcagatttgcattataaaaaaagatcgacttgcagcgtag

SEQ ID NO: 35055 - DNA, 201 bp, Bos taurus
cataagcgttgattaatgttagtcactaggaggcttccctcatatcttttaaaatcataaactctaccagttggacatgactttaagtctaaatgtaaatmtatgacgtaaaaatttccttcaggcgtagcaataggccatatgtgtatctggtgaattgctgtttataaaactcaaaggaaatttttccctgtattatgt

SEQ ID NO: 35056 - DNA, 201 bp, Bos taurus
ggacatcaattgggtgtcctacaatttaattcaattctgacactacgtggagttagtacaaaccccatacatgaagagcttagtcctgtaagactgcctcmcttttctgattctgatttcaagtctgatacttctgactgaatggctataaactaggcgttttcatgacctccttctcagctcaggtttgatcatttgcta

SEQ ID NO: 35057 - DNA, 201 bp, Bos taurus
tctttttaattgatttttaagcctcagttcctttcttagttcatcaaacctgctgattctatttgcatcatcagtgtatttgttttgccgctagatggcartaatgtacctttgaaccctgtggcctctgagttctcagaatcggggatctgaaggagccttggaatttttgcttaatccccaccccccacccatttaaca

SEQ ID NO: 35058 - DNA, 201 bp, Bos taurus
ctctaataattagaggtacccatatggaacttctggaattgaacagggggttcaagtcctggtttaccgtgtggtgtcatggcctgctcattagggcatgygctgtggagccagcctgactgggacctacgttccggatccttatcttccttgttagaccttgggtagttcatgtaatcgtcatgagcctgggttttcccg

SEQ ID NO: 35059 - DNA, 201 bp, Bos taurus
tgagagggccttactctgggggagtaaactttgtggtttataccacacagttccattctttcagagaagactcatctttttccctgatgggagtagaagcmcgactttggccgtttctttgcttgaactagggagagcggctgctttcatatgtagcctttttagtgaagacatgagtgttcagccctacttctccttgtc

SEQ ID NO: 35060 - DNA, 201 bp, Bos taurus
tgcaggaggtggtgattttaggtgcatgtgggagatagaaaggaaaatggagcaacacctctgatggaacccaagactctgttgattctgattatgtttcrtatagatcatctgtatcattctgtatataagcatgccttgcttgatttttctctgtaccattgtcagcagaaattttccagagttattcctttaagatcc

SEQ ID NO: 35061 - DNA, 201 bp, Bos taurus
ccttctccagcagatcttcccaacccaggaatcaaaccagtgtctcctgcattgcaggtggattctttaccaactgggccatttcagtaggttaatcattstctcattgtggaggatgggtttggagttgtagtgagtggctgagagcacaaaccccattggcacgcctttgcaggaattcaaatgatagtgaggaggccc

SEQ ID NO: 35062 - DNA, 201 bp, Bos taurus
gtttaaaggcttttccaagaactatgtttccaaagagcgttaataataactttggaacatcctacgagtgaggcacagtgcgtagtcaccgcctttggttkgggcgggccagggatctcctcctgcttttggcactgcttctgtcaatcgcactggacgagttactgcagtttcctttgtcccaagttgagaactcttttg

SEQ ID NO: 35063 - DNA, 201 bp, Bos taurus
tggggtgccattgccttctccgagttctggccctagggagatttttttttcttccccctgaaagctaatccatggtagtagcttcagaagcaggggagagratgaaaggccacatgttttggggtcatcataaatttatatttacaacttccctttctataaagagaactaaaatattcttaacacctggttacattgctt

SEQ ID NO: 35064 - DNA, 201 bp, Bos taurus
tgccagcgattatgacttgggacaagccagtgtgtaggcttgggtttacagtgcagaaaggtcaaacttcggttaacaggccacatcattagcacacagasagcactatatgtaaggtttaaaagtagctacattaacacttttgtgagcttcgtgtaaactggatggtgttcatccaggccaaaaagtttgctttatata

SEQ ID NO: 35065 - DNA, 201 bp, Bos taurus
tatgtgcttacaggttacacagtacagccgccacttgacactcattgaaatataaatgacatcagattgctgaagcggtagagtgcagtttaaagaaatayagatttcacaaaacctacaatttgtaatccacaacttgtaggatgtattgaaggaggacatggggagaagcgtcccacgccaggcagccatacccacctg

SEQ ID NO: 35066 - DNA, 201 bp, Bos taurus
gaaaatggaacagaaaaccattaggaaagttaataaatgcgtgacaactgacttagtagtctaggtactctctgggaggatcatcactgttgaatatggakaattcctatatacagaaggtttgaagtttcagaatttagagaatttaggctctgtaaggtgcggggtggggatgtgggagaaagctgaagacagtcagca

SEQ ID NO: 35067 - DNA, 201 bp, Bos taurus
aggattcagcagatatcctagggagttctggacctggagttatcctttggagatgtcctgaatcaagataagaggactaggcctttatcctctctaagtcycagctgcccaggaaggggacaatgcctttgatgaggcaactctctttagctgagacaatctgtgtgtctctgtggggcctgaaggctgggggctgtctca

SEQ ID NO: 35068 - DNA, 201 bp, Bos taurus
taaatccaatagacaatttaacgtgatttgagttttcctaaaagtgtgttgaatttttctcttaaaaacatttagaggcaatattagagtggccaggttgyatccatttcacttattctattttcttgatatgaatagataatccatacaggacaagactcgtccagaatatgcactgtctagtttaatttggcttggttg

SEQ ID NO: 35069 - DNA, 201 bp, Bos taurus
tttaaaatttactgctgtgcataatgctgtccatgttcttttagaatcaccttatgcacaggaacttgctgcttcacaagtggaggttgttttgttctccytcctccctcatatccttggccgtggaggtaaaatacacacatgtctcaggtgtcctcctgcctataccacctaagtttgactgtcctgtcaggccatagt

SEQ ID NO: 35070 - DNA, 201 bp, Bos taurus
cctctaatgtatgttcttgacaagcatcaggtcaagcatcaagcattcaccgtagtctagaactctgaaaattcctgggacaaaggaaataaagaaggccyagttatttcctttatggagctcacactgaattcagaccataagtgataaataatgttacaccatgatgtaataaatgcaggtataggggtcggcccagag

SEQ ID NO: 35071 - DNA, 201 bp, Bos taurus
ttatatcaaacaggcttttccccttaaattctcaacaataggagacttttcccctagtaaaagattatttccgcacccaggaaatttgaagaaaatcaackcagtgatatttttaaagtcccaaattcccttcatgaatttattgttgtctaagcagtattctttagaatgtacttatttgaaggaaaatccttagacatt

SEQ ID NO: 35072 - DNA, 201 bp, Bos taurus
gtatcctgaatagattgaaaaatgttaaatcaagtgaatttatgttaaagaaataagtgagttcacataatttaaaaattcctcaaccattaaaatgttckctggactttactatttagagttagatttagttcattgctagttgagttctttaaacccctcattcatttagttccataatatcagtatgaaaagtgcatc

SEQ ID NO: 35073 - DNA, 201 bp, Bos taurus
attgcccccacaatcagtattatataataaaaaggcaaaaccattagagagcctaaattaatctttcatcagttacacatttcaccaagttattagtcacyatttattttgatgccaatcatagaaatacaagttgtacaaataactttactaaactggtaaagggaatcccctagattctacttatactggccagaagac

SEQ ID NO: 35074 - DNA, 201 bp, Bos taurus
caaggccaagcagagaggagctctgcaaacagagtgatgagtgagaggaaatacccacatgcccccaccctatcctcatcccctaggagctgagagagacrtgaaagaaatggcctcacagcatgaaaactagaaaaggctagaagacaatgaagaaatagcatgccaccagtcatttctactcatgcaagatgagtaggc

SEQ ID NO: 35075 - DNA, 201 bp, Bos taurus
gttgggaactgcactttgagaactgcttctagggccttctctcagaggagcctttagccatgcacagaatagaaggtagagacaaaactgccttgcccagragaaacaaggcctatcctggtcatctggccattctcctggcctcctcaggccattcacatcttccagaagcacctcttcctccaggaatcttggacctcg

SEQ ID NO: 35076 - DNA, 201 bp, Bos taurus
ctgcattggaaggcagattcttaactactggaccactaggcaagtcccacacacatattcaatctttcaacacacatatatacaagcccttgctacatgcygggcactgcaccaggcactagagatgcagcaggaaacaacacagaaaaatttctgctcttacagagtttactttccagtgattacaaatgaacagacagt

SEQ ID NO: 35077 - DNA, 201 bp, Bos taurus
aagttttaggaacattgtgtgtgtgtgtgtgtgtgtgtgtgtgtgtgtgtgcattttcttgcagagagagcccataacttttagaatattctcaaaggagyccatgattcagagacacttaaaaaaccattgtttcagactaaaaaatcactaagagagaaagtttcaaaaaagagaaatcttttttaatgaaaatgtcag

SEQ ID NO: 35078 - DNA, 201 bp, Bos taurus
tgaaactgcatagcaattgtttatgaaattaacgtgcattgtgtcctgcctgtggcagctcttgaaaagctgtttttaaattatgaatttaggtaattttygaaagagaaaaatttaatatgtaaaaagcttattttacttacaattcctttacatttatactaatgtaatagaaggacctcaaaatataccaattggata

SEQ ID NO: 35079 - DNA, 201 bp, Bos taurus
aagagctcttagacagcatctaatccaatccccaaactgatttaagtaactcgtctttatcctacatccaactctaccctaacagttcacttaatgaattmttttaaaataatcttcatgtgaatgaggtaaaactattgtttttttgaggtaatgaggtaaaactattgaactttggaaacagaattagcgtgaaacctt

SEQ ID NO: 35080 - DNA, 201 bp, Bos taurus
tgagagggccaagctgggggcgtgcatgacggtgggctgagtgaaccccacccactcttatcccagaaatggctactgcgtgctgtggatgccccaggagraaacagctcaggccctcgtcttcagaactttagctttccaggttattctccctccaaacaagcaaataggttaaaaacgatcttgctcttcttctacaac

SEQ ID NO: 35081 - DNA, 201 bp, Bos taurus
aaggaaatgctcagtagataacaattctctttcccatttctttactagtctcctgaaataatattttctgatggcatacatctttaaagaagtcctcagtrtgaccaagtaccaattggggagttaagaataagtctacaggagaaagataaacccactgtttattgcttattaaatgcaaaacattcccaattattatgg

SEQ ID NO: 35082 - DNA, 201 bp, Bos taurus
ctagggatgtgtcatggcctgggatctggacaggggaaaaagatatcttctcttggaattcataaggttgcttcttcactgaggtttagagttcaaatatrtatcgaaaacaatgaggccattggagccctggggaaaataatccaatattgttgaaaggacactctttaaagtcatatggaactcccactgaagatgatc

SEQ ID NO: 35083 - DNA, 201 bp, Bos taurus
ttgcctttcctcacgttgtgatacctcttctctgttagacttcttgacactctgtcctctaatccgtatcttttttaagcacttctccaataaaataagayacccctctctaattctcaattctccatttaaaaatcttgaaatagttttattttctgattattgaaaaataaattcagagtctgggtaattccaaacgaa

SEQ ID NO: 35084 - DNA, 201 bp, Bos taurus
tgatgagaaatctaaactttgcccacatgaccaaaattgatatcccagactcacaggctcaagaccagggcacaacaattgagtcaaatgtccctgaacayggtgaattctacagagaggcatttgccctccttccctcagagagcaatgttaccaccctggatactctgtttttttccttcaatccttgacttggataag

SEQ ID NO: 35085 - DNA, 201 bp, Bos taurus
tcgtgcacaggcgagagaagaagatgcattttatttctgtatcatttccgacatgaaacagtattacctgcgactttatgattaaacaagtgctagctcayattacacagctcttaatgactagatttgtagatttgtgctgcagtgtcttggggctgaacatacctgagtgtgatatcctatgcttcaacacatcctatt

SEQ ID NO: 35086 - DNA, 201 bp, Bos taurus
atctctttctccttccatggctcatgcttcttatgcactccatattgtgctcctcttgccccttcccactcagatatttttttatctaggctgttgccttygttagcatttttctggaccagtctttctccctgttttcaatttctgcatcaaaatgttcccttcccgtgtacctttcccacagtgccttgacagacggtt

SEQ ID NO: 35087 - DNA, 201 bp, Bos taurus
atcacccttccacaaggctccccggaatgggttgattctccccaaggaaagatggaacgctgaccagaagggatagaaataggatgctaggcagccacaaktaagtacacaagtatctttaaatgactgctgaatcagctaagaataatgacagaattatcttcaggagcaaaagtctagcaaatagtacttgaagggaaa

SEQ ID NO: 35088 - DNA, 201 bp, Bos taurus
cccattcccttaaagaaagcaaaaaaaaaatcataaataatatacttctccttcaagattaccctgacatgtaagataaatgctgatactgtttctcatgrgtctgactttcagtttcttgtgactcagtcaaggtctggcaactatttcctcctcattcaatgctctttggctctataaccaaaacaaaactggatttac

SEQ ID NO: 35089 - DNA, 201 bp, Bos taurus
cttagagactccagtggacacatggcatggctgcttcccgttcctccatgaatctgtgaatcctcaacccatatttgtagaacagatttctctctcttcaktttagcaaatttcaatgcattttacaatattcaggtcaaatgtgctctgctgtgccccattcttcctgtctccatacagttaatctaaccttcctttccc

SEQ ID NO: 35090 - DNA, 201 bp, Bos taurus
cagtgataagagtgccctttggaaggaagaggggtgatgccagcttggcacccaggaagattgtgatgaactggcatgagttgagtctggctatccactcktcccttgttcctacccatgcttccaaacctccttttccagggatgctatgagcttcccaggattcttacaataaattatctttgcatagccatatcatag

SEQ ID NO: 35091 - DNA, 201 bp, Bos taurus
ttagtccaataagaggtttgggactttcaaatcacaaccacagtacggctgaatggccaggcccgacagtttagtcacgctgcttttgtggccatcttccyactgagcactcgactcagttataccattaaaattagtacaattccaaagaggctttggtccctagggcccctccgttatggaaaggtgtgaacagaaaat

SEQ ID NO: 35092 - DNA, 201 bp, Bos taurus
agtccatcacatactataagggggctggcatcaatatgtgcactcactctggtccttgtgaccaagtccatcatcagccccacaaatagctgcttctcaaycatccctcagagcctagaagcaggatctgtgctatctgagcaaggaattctgtgatgctggagacctagaggagtcttgagtaggagagagtgtgggctc

SEQ ID NO: 35093 - DNA, 201 bp, Bos taurus
ggtgtggaaagcagggagggcagaacaacctctgagactctagccaactgcagtatatattaagggcagcccagatggccgctagccaacaacccgtgccrggtaatttgcaagctgcactttctccttttgaaggtctctttctccaggatacggggaggaggtctgtcccttcccacttctgcacctgccacctgagca

SEQ ID NO: 35094 - DNA, 201 bp, Bos taurus
gctggaatgacccaggcaggagaggctgctttccagtgaagagtggggccgggtgcaggtgtgtgcagtgaagggtgggctcagcaggctggggtgctcayacctgcactttccaaaggcttggcccttgagctgctcctgggagaaaacctctgagccctgggaagatcctgctggatagcagtgtctttgttcacctgg

SEQ ID NO: 35095 - DNA, 201 bp, Bos taurus
ggagacagtcttggaggtctgggttggaacatctgttcaagggtcatgtggataagacttcccaggaagcatgtacagtatgagaatgggggcccctggaraaggggctgaagaggagcccgtgaaggaggctttcattcagccaacaaatagtgaccgagggcccattatctatcaggcccttgggctttataagtgatc

SEQ ID NO: 35096 - DNA, 201 bp, Bos taurus
tggaaagtggacatgcctccaacaggagaggacatgaggaatggtgaggacatgtcaggctggagtaatggtctgaccaaaaatctgaaaggaaagctcarggacatcggtgacaggctggagggtgttggacagactcagagagccttgaatgtctgtccagggagttaggctcttctgtgtgcaggagaggaagtgagg

SEQ ID NO: 35097 - DNA, 201 bp, Bos taurus
gtttgctgaattatgacaaagggagaaacatgcccttacaatgaagaggtctggcagtacctccatagccaaatggccaaggagtggcatcgcgtgacatratgcacctcctggtctgatgcagagagagacatttaacatctaatcaggacagtatagttggaggagtccagacaactggcctaagccctcaaaggaatt

SEQ ID NO: 35098 - DNA, 201 bp, Bos taurus
ttctttaccattttagccaccaaggaagccaattatcttctttattagttagttatcaattaagtacagaataaaaaaaatcatatataaatacaatgtgraacaacacacatacatgcattaacacacacagaaccatgaaggaaataaaggataaatcactctttgactccacttttccagtgctctcccaggcctttt

SEQ ID NO: 35099 - DNA, 201 bp, Bos taurus
tatatgtaaaggacagccaactgcccaaatctgtcctgggcccttaatagaaatgtgagtgtgcacaaaggcaggacattttaagaccagtagagtctagkggaatgatggcaagtggtgaggccagccattggtaccacattgctcacctttccatttattctggggcagcttgggaacacttcagaaccaagataaaag

SEQ ID NO: 35100 - DNA, 201 bp, Bos taurus
acatacacttacatatatattattaagcttcaaacagtattaggacatggatattattgttcctgtcattgttttaggtgaggaaactgaggtttagagasgtgagagaactggttttaaacctaggtagtcttctctggcatctctgctttaatcatgcaaacatcccttctttcgtacatgttgcctctctgaaaccag

SEQ ID NO: 35101 - DNA, 201 bp, Bos taurus
ccaacgcagaggcaaaatctctcatgtgggccaaagggagtccttcatcactttggcaaattgcccgagtgctccgagatccttttcctctgtaagacgtkgctaaggccctctgtccctcagtacattttacacccgatcctttgtagttgtctgggctattgaagatcatatgaataatgtatgtcacacaggagggaa

SEQ ID NO: 35102 - DNA, 201 bp, Bos taurus
aaaaataagatttatttatttattttggcatctgtgtcagtacaggctggttcataaaagcacgtggtcgaaatggatatgctgtgactgaggaagctgartttcaaaaccagctgctctgtctctgggattattgctatgtcagctcggatcaaccttctgtcatcaaaggacgttctcatgggaggctaagcacccaat

SEQ ID NO: 35103 - DNA, 201 bp, Bos taurus
tggtagttggggtacggggccttagttacttagcagcatgtgggatcttctgactagggtttgaacctgtgtcccctgcactggcaggcagattcttaacractggcccaccaggggaaccccaaggtttattctttaaagggagcagagaatgtctgaactggagacaccagggaccacttatggatgctgggtgctgag

SEQ ID NO: 35104 - DNA, 201 bp, Bos taurus
tcaatgtatcatttatgtgaaggaaatggattaggccatgtccaaccattaatgatttggtttagagccttgctccccagggaatgtcagctacctgtctytacctgaacttaatgacttatatttatttgtttcttaagtttttattttatatcagaatattgctgattaacaatgttgtgatagtttcagatgcacagc

SEQ ID NO: 35105 - DNA, 201 bp, Bos taurus
tagctgggtatgtgactactgggagaatgctttaaaaaagaaacaaatcctgtagaggccaataaagagaaaaagcgacaactgtaatcaaagtctttctygccttctggcaatttatactgcagataggcccttgatgctaaattcttgagcagagaggaaggagaggaggattcagactaagttttcagtttacagagt

SEQ ID NO: 35106 - DNA, 201 bp, Bos taurus
ttctatatctaagaggaaattttccttcctaaatagggctcccaggaaacaaccctgataatgtcctctttgtaacaaatgacaaaccagttttcatcagraagttcccatagcaaagaagatcattatcttcatttaggtctcagatatcaacataaaaattaccttttccaatttcttcaggagttatgagaaaaaaga

SEQ ID NO: 35107 - DNA, 201 bp, Bos taurus
aaaatcatagcaagagtaatatgctgtgatctcatatccaacttatataattcctttgccaaacatgcccactccttcaaaatgataataaatcaaaactyattgagaagataaaaatccattgagaaattaatcacaaatatcttctaaggctaaatggaaaccatatccaacttattaactgttttgtaacattagtgc

SEQ ID NO: 35108 - DNA, 201 bp, Bos taurus
gttaccaaagcagcagttattattcagaacatctgtaagatgcactgataaccacaaacaaacaaattcactatagattatcccttagtatggatcatgcyaaaatatttgcttcatgagaggtctcaagattcaaatttaacatggcctcacacgttttgaaaacgtggtttgcatgttacactggattattcctttctt

SEQ ID NO: 35109 - DNA, 201 bp, Bos taurus
taattgaactgaaatcagaagacctgaattatcatcattgttcattctctgactaatcatgtcatttatattctctaggccccttcgttatttaagaaacrtatacaataaaaacgattgctttctatatcttttggagttgtttaaagattatgctgaaatgctttgaattataaaataagatataaaatatgagattca

SEQ ID NO: 35110 - DNA, 201 bp, Bos taurus
aattagaccttcttttttgacttctggggccaaattggcaccagttacacagagcaaaaagtctgcttagaatcatggatcattcagctgctgaaaaatayggggaattaatctgggtaatttaaatacagaaatagtctacactctactgtttggggcttttcttcccacttaaattttcttatatagatacaacttaaa

SEQ ID NO: 35111 - DNA, 201 bp, Bos taurus
cgtatcagctcttgtcaagctaactttgtctcgtgctcagtaaatttaccttttggttaaaaacagggttcaggtacttccactgtttttacattttcccrtccaagtgacagccagtttagaaactgtagctatcctttagcagcaaacaatcctgtcaccgctgcatgtttcgttttccactccctgggtgctgctctt

SEQ ID NO: 35112 - DNA, 201 bp, Bos taurus
ttgagtattaaagatgtaagcaatggaaaaatagtcatgagtttgagtccagagaccagagttttagattgactgtggccattaactccaacataacattwattattggagaaagaaatcacaacccactctggtgttcataactggaaaatcccacggacagaggagcctggtaggctacaggccatgtggtcgccaaag

SEQ ID NO: 35113 - DNA, 201 bp, Bos taurus
attcttgtatgaaatatagcttaatttgattaaaaattaagtagagggaacattcttttagaaatacagatgactgacaagggattataaatattgcatamaatacaatccaaagtaaaaaagaaaataagtatcattggcctttaatctctgaaaagctgcaggaatgaaataacagtaaagtaataaaactcgactgcc

SEQ ID NO: 35114 - DNA, 201 bp, Bos taurus
ggggcttctttggttttcagcattacaaaggacttttttttttattgtttaatgccaacctgtgtgcagaatacaaaggcccctcccagtcccatacactmtcaagagtaaaattagtatgaaatccagtagaagaatattgattatacaattagtcccgaagctcaaaggccacagggcaacctcatgcgcttgctacta

SEQ ID NO: 35115 - DNA, 201 bp, Bos taurus
gtgaaggccagggaagcctggtgtactgcagtccaaggagtctcaaagactcagatacaactgagcgactaaacaataacaatctaaatgggaacaaactrgatgtttttaaggccatccagtatgatgaagccatatcaatactgaattaatacatcaccaaagaaattatatatgcagaatatcaaactaataataatg

SEQ ID NO: 35116 - DNA, 201 bp, Bos taurus
aactctgtaagtgctggttacaccacatttaatgtgataatctatttagccatcatgttccttcttgaagaggaaaattttaaagtagtattttttttttwaagtgagcttgcaaatatgccagtttaaaagtgaattttattagtaaactatatatgaaagcttctcaaaggttccctaaagctatgacaggatcataaa

SEQ ID NO: 35117 - DNA, 201 bp, Bos taurus
taagagggcggagaggcccgaaacaggttttcacctggaccctacgcgacacaagctctccagagaaggaaggccgcatgcacaggccccggcctgcctcrcccttcctccccgtaccctgcccaggccaaggccccagggctccagcgtcatcgggccttaccttggctgcagtccttgccacggaagccagttcgcgag

SEQ ID NO: 35118 - DNA, 201 bp, Bos taurus
ctggtgtgctgtggtccattaggtcatagggagtcagacacgactgagcaactgagttgactaagagagatagtcaatttcagttctagtgaaaggtaccragtaagcctgggacattgggatatgacataaagtacagagcttattgtatattaccatggccatgtcaaaaagaaacaagaacaaagttccaccatctga

SEQ ID NO: 35119 - DNA, 201 bp, Bos taurus
cagcaagttttaataatattaaatatgtgttggaatatgtgccatgttcagacacatctcagtctgaagcatcttgcatactgatgccaaaggagacttayttaaactttaaattttttatttcagttttttttttttttttggtttaccttaaaaaatagaattagtagacaaaatcaaccacttaatttacattttaga

SEQ ID NO: 35120 - DNA, 201 bp, Bos taurus
ttgtttacaacaataaactcaagatataaagggaaagctgagtgtcagaatcttttgggaaatgttttgacattgaactcttcaagcaggatggaatcttyccttttctcctcactcaaccccattatgcctctcccttcacctcaagatgatgtctttccctttcagtagctctgagaaggagtttgttaaaacttaatt

SEQ ID NO: 35121 - DNA, 201 bp, Bos taurus
gtgctgcagtccatggagttacaaagagttggacaaaactgagcaactgaacaacaacaaagagagtaagttggaaagttttccgtaaatcaagttcttcygttccctcctatctatgccaatactttcatttttattgcattattatatagaaaggttttgagatagcccacccccttttcctctacttatcttttttca

SEQ ID NO: 35122 - DNA, 201 bp, Bos taurus
agtatttctactaagagaaaggtgctaaaatcccaaatcagatatttggatttaatgaatttttatatatgttctgattcattagctgccattcccatctyctcattaatatgatatgagatactcagatttttttatttgctttctttttcttattggggccaagactgaataaagaatattgtgtcagatattttgcaa

SEQ ID NO: 35123 - DNA, 201 bp, Bos taurus
aggatgctagtaaagttttgaccaactggaaatgaacatgtgtccctgtgttagaatgatcaataatcactcatgctttcagttatgtatttacctcaagragcagaaatgatctttagcctagtgtcaaatattaagatgtaggcccatgaccttttccagtaaaatatgtacagttacttagaatatggttttgcacat

SEQ ID NO: 35124 - DNA, 201 bp, Bos taurus
tggccacatggtctcagttgcaactctgccattacagcttgaaagcatctacagacctgtctaagaaatggggtggaatgtgctgtaacgtaacttcattyacaaaacaggagcttggccagacatggcccttgaccatattttgccaacccatgctatggtgtcatgtcagttaggaattgaatttcctgaaatgtgagc

SEQ ID NO: 35125 - DNA, 201 bp, Bos taurus
gaattctccaggccagaatactggcatgggtagccattccctttcttcaagggatcttcccaactcagggatcgaatccaggtctcccgcattgaaggccrattctttaccaactgaaggattagggaagccctatcactctctcagttcagttcagtcactcagtcttgtccaactctttgcgaccccatggactgcagc

SEQ ID NO: 35126 - DNA, 201 bp, Bos taurus
aaaaacaactgactgactctagggccctgggacctcgatttaagtcattaccaaagaggggtgtctccagctggtaagtgttggtgatgctttcagttccygttctggccctgtttataaaagtttcactctttcgctattcctgctttgcatgtaaaggtgatgctaaaactgagcttggtttgtaactacagacagctt

SEQ ID NO: 35127 - DNA, 201 bp, Bos taurus
aaacaagtggtctggggacacatgaagtttccaccattttatttgtagtttatttattaagagcaaaaaacagcaagtaaaatagggccctgtctgaaaayggacacccaagaatgccaagagactgagagcatgctcaataatgcagagtagcagtcgtgctcggcaaatccattccatggcccactcgtttctgtctgc

SEQ ID NO: 35128 - DNA, 201 bp, Bos taurus
attaatttggacttttcctgaaaatcctttctaggcccaggttgttctggaaacctctgaaactcatccatttctccccaaattcttccagactggtgaartattaaggccatttggatcttttgaaactctgtggattaaatttaggcatgcttatactgttgaaacagagaaggcaatggcaaactactccagtactct

SEQ ID NO: 35129 - DNA, 201 bp, Bos taurus
tgtaacaaatggttaaatggggtaaatggttcagctggtgatttctcactaccagttcaccagcaccattcctccagataggggatctctaacctgacagygctggaggacaagggcactctaagctcagctccctccagtgctggttgccatgacaacaacctcagagaacccttcatttcactactaggcagagtctgc

SEQ ID NO: 35130 - DNA, 201 bp, Bos taurus
tatttaatcacaattgtgtagaatcatatagaattggaattttaaaaatgagtttttctcatgttagccccattcttatctaataggggagtttttctcaygaagcacttaagaattaataaattatattaccatgaattcattctgatgatataataagtatcagatttaacaatcatgaaaacaaaaacaaatttggca

SEQ ID NO: 35131 - DNA, 201 bp, Bos taurus
agaaattcatctcccaagtgtcacgctcagcagagttgcaccagcttctataacagatgtctagacaatttgactttgaaatacataccccacacctaaayggcctgaagtttcccagtcagtgcccagccaaagttcaaaaccagagaccacacaggaatagaggattgaagattataaataaacttattcatagggaaa

SEQ ID NO: 35132 - DNA, 201 bp, Bos taurus
aatctttccacaacagtactatagacctgctagtactaagataataatcaaactgaaagtgcttcttcaaacaaatatttctatgaccaaacaagaaatayaattaggcgaatatacctccaacaatatagttgttgctgttcagttgctaagtagtgtctgactcttggcaaccgcatggactgcagcatgccaggctcc

SEQ ID NO: 35133 - DNA, 201 bp, Bos taurus
tgagccacaaaagatcaagagaattatgaatcatataaaacaagggtatagaaagtataaagaacgacagaaatgtcaaacctgctttggaaacttttaarattaacctacaataccaggttcactggtacagatatgaagatgctactgtcagcagcaaaagaaagctcacttcacccttcaagactagaaatgttcata

SEQ ID NO: 35134 - DNA, 201 bp, Bos taurus
gctctccgccgccagactgcggttgtggtcaacaagagaagcgctaccgccgtcccggcttccgtaggcagacggttcggcggccccggatgttgatacaycacctgccccggaaacggtggtgggaagcccaagggggcgggggcggcgttgccgggctctccggaaggagacgtggcggcggttgggccccgggctgcc

SEQ ID NO: 35135 - DNA, 201 bp, Bos taurus
ctctgtgtttctccactgcttccctttcctcacccacctgcttctccacttcaaccttctcctcctggttcgctgcttctgagaacatggggcccctttcsgtctttgctttcgcagccttccatccagccgtcagctcagactctgatctcccagtgtcacaggtttctagggccttctccccaccagtttcacactgaa

SEQ ID NO: 35136 - DNA, 201 bp, Bos taurus
cgcccctgcccctctcaaagctgaagccaaagcaaaggccaggaaagcagtgttgaaaggcgtccacagccacaaacaaaagaagatctggaggtcacccygcttccaacggcccaaaacactgcggctcaggaggcagcccaaatatccttggaagagcgcccccaggagaaacaacgctgaccactcaccacccagtca

SEQ ID NO: 35137 - DNA, 201 bp, Bos taurus
gtcacacctgctgtcacagttgtccgcgtctcgcctctagtaaatatcagacatgccggcggtgggtgagggcctaggcagccatgatggcctctcccagraggacaacatcaatgccagaaacacagtggctttgccaggaagcgaatcccacagtgtgggtgggcgcaggagtgggcctgaggcttctgcctggggagc

SEQ ID NO: 35138 - DNA, 201 bp, Bos taurus
cagctacttaaagagtagccttgataaactaataaatatatgaaaagatcttcaactttgacagtgatcagggaatgccaacaataatcacaaatgagatygataccatttcacacttagcaaaattactaaaatccaaatgtttggtaataccaaaagttggcagggatgctgaggaacgagaactctgctctattactt

SEQ ID NO: 35139 - DNA, 201 bp, Bos taurus
ctctattctgcctggctttggggaaccatatgggccctagggcgctctcatctgcttccccacacacccatgcgcaggtcctcctagggcctgagcacccrgctactcctaggtttgaattcaggcatccagggctgcccatctccggtctgatgctgagacaggagagtggcttttgaggcctggagtctgggattaaat

SEQ ID NO: 35140 - DNA, 201 bp, Bos taurus
cttctggtggtatttctctctatgttgaattttcttagtgtctgaggttatttttagctgttacttcagtgagcttcaaggttgcacgacctgttttaacygcccgtgtctctgattactccttgccatgacagcattttcgtgtgatgctcgggaaagaaatgagatcttttcttccaggcctttgactcaaagcagaac

SEQ ID NO: 35141 - DNA, 201 bp, Bos taurus
gtagcaactcgattcttctttttttggaggatgttcaaggtaaggttttataaggttcatgtgtttaaaaatcatagctttggagtttctaccctgccacrtgattgtctttacatacatcctggatcactcagcatatatttactcaaattatgagactttgattaaaatcaatgaaaatagaaaatatcaaatggttgc

SEQ ID NO: 35142 - DNA, 201 bp, Bos taurus
gatcagcagaatcattagattccagaaaatgcagaacctctgaggcctctgtattcttccattctgatgtcagactactggcagcccacgctgagctgccktataagaaagtgcagctaggccactagaaagaagcagaggaaggaggggccagctggcattgctggggtttggaagctctgcactgcagattctgttaac

SEQ ID NO: 35143 - DNA, 201 bp, Bos taurus
tgtattgattattgtctatggattaatgtaagtgaaataaaaaactaaccacaaggtcatttgaattatgacatgcatttagctgtatgaaatgaggaggycaaagcttgataaacttcagtaaataattttatcaccctccaccccctttagaggtaggaaaaggaattttactcagtacaactgccttttgagcagtga

SEQ ID NO: 35144 - DNA, 201 bp, Bos taurus
gcacttaatccttaatgcacagttaaaaactaagtttggaaaaaaaaaacttaagtgtgagccagagggggctctttgggcttaataaagaggcccttatwtcctacagtgaaaaaaccgacatgggattagacagttacaagagctctgaagatacctagatcttcagcctagggaggtttgctatacagctagggccct

SEQ ID NO: 35145 - DNA, 201 bp, Bos taurus
agggccacggaggagagtttcagagagacaggctcttttctccgtactactcagaatccagtgggtctctctgaatccaagatgaagtcctagaggaaatrtgtgatgcaggttgaatggaggcccctggtcgtgctaaggcagtatgactcctcccctggttttcttgggtaccataatcacgtcctgacctctctggac

SEQ ID NO: 35146 - DNA, 201 bp, Bos taurus
aaaggcatttctaaagattccctgataaggccacttcattatacacaaaacagctttcaacaaagctatgtcaagagtggggagtagggggtctggagggytctctccaggccaacctctcttccacttcatgaggtaggtagctcctaaggtatgttcatagattctttgaatttccctcgagattagtttcaaaatagt

SEQ ID NO: 35147 - DNA, 201 bp, Bos taurus
atccattgccaggcttgaagcaggaactggttctttatgacctgaggctctgagatctttgctcaccatcttaaatttctcagaaggtctaaatttgtaasggttcatgtttcacaattctagaagccttttcaatctggcttcgttgcttgccagagttccagaataaaccctcctacaatatggaccatgctctaccca

SEQ ID NO: 35148 - DNA, 201 bp, Bos taurus
gaaggttggggcccagagagtctcctgcagaatcttcaaactcctcctgttttctttggatgaagactatcatccggatgacactgtgttaactgtgagartctggcctgagccttggactactcatatataaaggggaatcaaatgcctggtcccatagttgatccagtaagatcgtgtaccttgcccatgagacttctc

SEQ ID NO: 35149 - DNA, 201 bp, Bos taurus
tagagcaatgggccagtgaaatcaggatcattaatttgatcattgtcttagccagtcttgtaaatacatgccatcctctgccatgaggggctggtgaaaamgtaacttaagcttacaaggccatgggcactagggggacatggaacgccacatgtttcttctaactggaagggagttggttatattctcttggtttatgaa

SEQ ID NO: 35150 - DNA, 201 bp, Bos taurus
cctccctgtccatcaccaactcctggagtttactcaaactcatatccattgagtcagtgatgacatccaattgcaagcctctccagcttatttctctacaraaaactttacaggccagaagggagtggcatgatatagttaaagccctacaagggaaaaaactacaatctaggatactcttacctggattagaacagaaga

SEQ ID NO: 35151 - DNA, 201 bp, Bos taurus
gcctgtgcacggcaactagaaagcagcctccctctccatagctagagaagaagcctgtatgcagcaatgaaaacccagcatagctagataaagaaataaayaaaaattacatatatatataaagtacgtcaatagactgattgagtaactccttttttgctcttccctgtgttttatatatcctcaataacacccaaaagg

SEQ ID NO: 35152 - DNA, 201 bp, Bos taurus
gaactatctcttggaaagcagctgaaatcctaacataattaagagatcgttttactagatcctatgaagcaagcatgtggttctagagaaagcagtggatygaatttcagcaagaagaatttagagtaaatataatattttataatggataatatttcaaaatttatagaaattataaagtgtccttcagtggaaatgtta

SEQ ID NO: 35153 - DNA, 201 bp, Bos taurus
atataagtgatatatattttttctcaagttgacaaaaggcatttttaagatgaaaagcagaggaggaaatccaaaacaaagcatgacatttttactgtctrtattttaaaacttctatacagctaaaaacaaccataaaggaaattaatattttcttgttttgcactttcttatttcttttcagcttaattgagaagctaa

SEQ ID NO: 35154 - DNA, 201 bp, Bos taurus
acagacaaactgaggcacagagaggtaaaggaacttgcccaaacctgtaaagctaggaagtactagagttaaattcaaactcaagtggtctggccccagamtctcagcccttcagtgcaacttaagcatctttgtagttgagacagtacttttaagaacaactgttcttccaggcccatttcacaaggtttttcctgttat

SEQ ID NO: 35155 - DNA, 201 bp, Bos taurus
cacaacgaggtgctgtgcctacctcttaatgcagtcctgttaaaatgaggctgctttgcttcacatagtcatttggggacccagggtcttttcctccagtrgctcactcatccctgtcttcagaagattcagtgccctaggctggttcatttcacattggtaggatttttttgttgtttgtttttaagagaccagctctag

SEQ ID NO: 35156 - DNA, 201 bp, Bos taurus
agtttccagtctgattagggagaaggcttggagcacaggcagaggacgatcctgctatagatcatacatacaaacagaattggtgggggaatgttctggtrtagtcaaagggatattctggaagagagagcatgtgaaccaggtcttggagaaaggaaaaaggaaacacggtaggcagggtggagcagagcagactagagc

SEQ ID NO: 35157 - DNA, 201 bp, Bos taurus
gtgtggaagggtaagattgtaacttggtatggtggatatttaataagtggtaaaccgcaacattctccatttgaaagttaattaaggccactagatgaccrggcttgtgcagaaaacctgttcatggtttagccatggaaacagtcacaacaacactgggctaaaaatagtgaccttaagagacatttttactgatcattc

SEQ ID NO: 35158 - DNA, 201 bp, Bos taurus
actaagcatcaggtacgactgctcctctgtaaagtgtaacttcagaaaactgcccttttctaaatgccttgctttacagaagagggggattcctaggtggygctagtggtaaaaagcccacctgccaatgcaggagaggcaaaatttaatccctgggatgggaagatcccctggtagaggaaatggcaaccactccaatat

SEQ ID NO: 35159 - DNA, 201 bp, Bos taurus
ctctgtgtcaactaccactcagctgtttggcccttggaaattacacactggggtgtggctgtgttcttataagatgattgacaaaatagattaatgcccaratttggcctgtgggtcagggtttgccaacctctgatctataatcttccttgttttaaattctctaccctgagtatcaactctaccgactagtttgcaata

SEQ ID NO: 35160 - DNA, 201 bp, Bos taurus
gtctgacccaggtaaagtatactttaataaaagacttttgcagagagtgtctgaaactaaagggatgacttaatgatgaaatttcaggtgtgaggaaataytttgtttagatggggagaaacaaattagccaggaaagcagaggatgaatgaaatttagggaacacttctttttataattaaaattttaactataaattac

SEQ ID NO: 35161 - DNA, 201 bp, Bos taurus
aaactccaagacttctaaaataagaagaaccagatgggattaaaaaaaaaaaaagtagcaagaaaattgaactagttgggcttgctaatgtcttaaatctyattgtcttgtgacccctattttattttctttactactcatccctctccaagcttacaacccaaactcaattgggtatgtcaatttcatcctagaaaagtc

SEQ ID NO: 35162 - DNA, 201 bp, Bos taurus
aagtcattcttttattaatgagatcaactctaggtgagctgagagaggtaagttcctaaagcatctgtgaagaaaaacaacatccttaaaacaccagaaaycagcacaccatgttaaaaacaaaatactgagaggcaggtttgtgctgttctttcctggggaaagaggtgaaaaatcagtcctccaaaatatcttttgatt

SEQ ID NO: 35163 - DNA, 201 bp, Bos taurus
tcttcctggcccagggatcaaacctgggtctcctgcattgcaggcagattctttaccatctgagccaccagatattctatggccccaaacaaattccaatmaatattattcatctgtcagcccttgaaatagaatgtgggctactccaccatatctttcttacctgtagggattagcaaggaaaacctcactctctgacag

SEQ ID NO: 35164 - DNA, 201 bp, Bos taurus
tctttttctccttttgaaaatttaaacaacaacaacagtgtccagaaccaccggaattccacaactccactggaaaacaactgaaatgtaatacggtatgrttagaccctggagcatttcattctatgtgaatggtgccttctgaagtcacaaaacacaatagtcctatcatgtctgatatttttacagagctgtactttt

SEQ ID NO: 35165 - DNA, 201 bp, Bos taurus
agatttctgacctccagaaatgcaagagaatgaacttgtgttaagtcaccacatttgcaataatttgctactgtaggcctaggaaactaaggtagccaccrgttaggatggttcacaatattccagttctcttcccagatccatgataagattgtatttctctgtttcacatagaagctaggagtgaccatgtgacttgct

SEQ ID NO: 35166 - DNA, 201 bp, Bos taurus
gagtccatttggaagagaatcacagtaaaaaagaaataagatggaggtccagattttgagggatgacatagaagagtgggagcaagaagcattgacaaatracatagatgaagttagggaggtgatggaacagttcttacatgtgactagccataagggataaaggtttcagacccctgcgctgcacaaaacattgcatat

SEQ ID NO: 35167 - DNA, 201 bp, Bos taurus
tggaaggctactgtatgtggggtctcaaagaatcagatacaacagaagcgatttagcacatgctattgctattatcactattcaggtttctttgcaggaaraagaaggtgacaaagggaaccaggtatggggtatctgagactacggggtatctgaggcctttcagaacatagttgtgattttaaagaattggctgaagta

SEQ ID NO: 35168 - DNA, 201 bp, Bos taurus
ctgacacctactgctgtcttacagatgggcccggccctgagatttcaaacattctacaggaaacacactgacacacatgcatactctgcccaggccccacrctacccagacactttttaaattgcttttccagtaggatcccaggaaaaggttctatttaactaccacctgcacatggccaggatatgactggtctgacaa

SEQ ID NO: 35169 - DNA, 201 bp, Bos taurus
ggaacacacagtgatctgctcccatccagactcctagctgatggggcccatgggcttctgtcaagagttctgggggtccccatccacccagagcatctgamagatactttgccccagaaggccaggtatagtcacaggagggtattttcaactaagacccaccccaaccctgccggcagaacgggtgcagggccatgacca

SEQ ID NO: 35170 - DNA, 201 bp, Bos taurus
tcccctgggcagaggagcctggcaggctacagtccacagcgttgcaaagaatgggccatgactgagcaacttttactcactcacaggccagggtaggaaaygacacacagtgcatgaacgcacgtgccactggctacagttcagtcacatggctacggttcagtcacatggctacagttcagtcacatggccacacctgac

SEQ ID NO: 35171 - DNA, 201 bp, Bos taurus
gaggtgattttggttgggaatggccctgtgggaatcctggagtattggcagtattctgttttttagtgtggattgtgttaaatggatattagttaaggtaygcatttatgtttcatgcttttttctgtataagtaatattttttcttaagaaaaagttgtaaactcgttcatgggatggtgtgacagagcaaaaaagaaca

SEQ ID NO: 35172 - DNA, 201 bp, Bos taurus
taggaacttctcggctaggttcttgtgctactggcttcatgttcatatcaaaagtgctgtattcaggaagggcatctcgcaagtacagcaaactatcgtcragccgtttctctaatttgacaacttggatctcctggattcgaggattataaagttcaaagcaaatctcaacacctaaaaagagaaaacatattcttacaa

SEQ ID NO: 35173 - DNA, 201 bp, Bos taurus
cccagaggagcaccctccagaggcagaaaaacggttcggcctcatcctgttcaccgagtctctgttctgtgacaatggcagaggggtctggcctgaaggtyatgtggtgggggcgggggcgggggtgcggtgaggaaggggtgagggtgacagatccctcagacctatgggcctgtgggctgcagagagaagcctggattt

SEQ ID NO: 35174 - DNA, 201 bp, Bos taurus
atcaccacaaggccatagggaaagccggggagccgcagccccttctggagtcttaacagaagactcttcagaactgttagtagtattcggtcctctgctgyatgtacactggccacctaaacatgggccagacacattttaggaactgcttttatgacagattttattttcttgggctccaaaatcactgcagacagtgac

SEQ ID NO: 35175 - DNA, 201 bp, Bos taurus
tcttagtcccaggaattattctgtgggttggggtctaaacacagcatgggaagaagccctcaagcacccaagcatctctaggggccacaggactgggacayggacacccagaactccgacaaatgccagctgcccgtgtcaggcgttcagggtcagtcaggccctgttgtatctcccagcgtgctggtccaccgcccaccc

SEQ ID NO: 35176 - DNA, 201 bp, Bos taurus
gttcatcagcgtcgtcttgccctcagccctccgccttctctcagccatgagtctgcactcccacccccacctcactggtctttctgatgggcctgaggctygcagcatctgggtccacaaccttcatccagggctctatcccagggcttccagcagaaggcagctgagggccccagatgtgggctccaggagcctcttggc

SEQ ID NO: 35177 - DNA, 201 bp, Bos taurus
cactgacctagagccagatatcctggaatgtgaagtcaaatgggccttagaaagcatcactacgaacaaagctagtggaggtgacagaattccagttgagstattccaaatcctgaaaggcctttcaggtaggaccaaaatcaaatcccttacgattatacagtagaagcaacaaaccgagtaaaaaaaaaaaaagtgaca

SEQ ID NO: 35178 - DNA, 201 bp, Bos taurus
gccaacacaatattgtaaaacaattatccttcaattaaaaaaaaaatagcctggctatacctaaactcagaatttgctgttactagagatgatcagtaaaygttcactgactagtttttacttactacaatgaaaacaatttactattcatcttgatggaaaacaaaacacggctctggagatttcaggacggtaaaggag

SEQ ID NO: 35179 - DNA, 201 bp, Bos taurus
acagggacccccctgcctttggcacggggagccctgagctcaactgcggccagactccggttcaggggagttactgctatcctcctcaacttctccccacytcccagctcatctctgcctctggcctcaccctcctctctgtcctccacatttgcaggaggtcttcccaaacataaactcaaaggtagtggaaaaccctgc

SEQ ID NO: 35180 - DNA, 201 bp, Bos taurus
ccaagaaacaattcacaaacacgctctccaagggagtgggtttagacccgaaggagccaggtaggcttggagacttggcagtggaattctgggcagaaagrgctgcaggtcctaagactaggggctggagcagctcttggaactataggagcctgagtctctgagtttgatgatcaggggcaaggtcagaaacgtaggtga

SEQ ID NO: 35181 - DNA, 201 bp, Bos taurus
aggatgtctgaggctgtgggaccccggcctccgtctcctttctgggagctcctgtggttggatttgggcttgttcatggacccagcccctgatgaacccgmaaggggccccaaaaccagatgctgtgctcagttcttcattttatttttaccaagacatctcagtcaagtgtcaggaacacttatcttatttaagataaga

SEQ ID NO: 35182 - DNA, 201 bp, Bos taurus
agacgttgcatgggtttcttgtactccccctggggtctgaggcagacacacatggggcaaactttgaatagcctcgacaagaatgtgtaaagggcattgtrgcaaagtgaacgcagggcctgccccctgctccacagcattaaaaggagcaggaaggaactgtggcagagaagggacaatggcgtgacctggggtaagcat

SEQ ID NO: 35183 - DNA, 201 bp, Bos taurus
taactagaagatccccccagaccttgtcagctgagcgaagcagctctaagtgtcttcattttgttccccagctcagctcaaggccatagtcacagagactyaaaacacagcatttctcagctgtatgggtacaagtgatctggtagcaaggtggccagggaggtaatcacagctgtgtgtgtgtgtgtgtgtgtgtgtgtg

SEQ ID NO: 35184 - DNA, 201 bp, Bos taurus
tcccggtaactctcacaggtcactaacctgcgggccgcccggggttcgctgtcctctggtgcctgatgctgcacgctccttgaactgggatacctctcctytctcactggcccagggtgtacacgtggggctttacggaaatgaaatgaaaaccccgtaaaagtagtctagcctggaggcttatgtaccattttaacaaag

SEQ ID NO: 35185 - DNA, 201 bp, Bos taurus
tactggcacaatttctctcataaaatagaaatgatagcactgccctcatagacatctctgtggtgaatctgattattttagctgccttgctggccaataayagcccctgtggcagctcaatcatgtggcatttggaattgattttaaaacaggcagaaacactgactgctgttcttaatttaaaattatttcatgcttaag

SEQ ID NO: 35186 - DNA, 201 bp, Bos taurus
catgaatgtattgctttattatcaaaggagagctaagagtgtgtcacagattggtgggttgatccctgtagatccaaatgaggtgtaggagaccctggccmctttcctttcccaagtgactgacacggacgggaagcaccctggcaagacacttgtcctcttctgaaccccattgtatggcctattgtcatctttacttcc

SEQ ID NO: 35187 - DNA, 201 bp, Bos taurus
actaggtaatttcacccagatggtgtaatcaaaatcaaaatgtttatgttgccaagttcaccaaaaggggagacagagctctcaggagaagagaatcccamacttaggcaacattagatgcaccgagaacaagtttcacttgtcacatgtccttcgagttggtgtccaacgacactaaactcattctttgtattaataatc

SEQ ID NO: 35188 - DNA, 201 bp, Bos taurus
acagtgagagtcaggggatgttacaggaggggctggtggaggagaaccaactcggagctgtagagactttacaaataggataatatttgaattggcccatrgaaccaataggatgcatgtgtgtgtatatatatatagacagattcattttaatgaattgactcatgtgatcattgggctagcaagcccacgatctgcagg

SEQ ID NO: 35189 - DNA, 201 bp, Bos taurus
gtgagagcctcgcttccagatttatggtaagggatggatagttctgtccagcctgccaactaatatccaagcagacatgaacaggccgcttttctccctcrtttcctgaagggatacagccctgtgcggtgttcagtgagtcctgacgctgcgaagtggctggtgcagggtgactggtccagtcaccctgggccctcccca

SEQ ID NO: 35190 - DNA, 201 bp, Bos taurus
ttcctcaaaaagcaaaacaaattactttatgatccaataattctacttctgggtatgtgccccaaagtactgaaagtggggacagaaagaggtatttacaractgtgttcacaacattagtcacaccagctgggaggtggaaggaacccagtatctgttggtagataaacaaagagtggtctgcacacaaaatagaatatt

SEQ ID NO: 35191 - DNA, 201 bp, Bos taurus
agacggccctgaggtccatctcattggcagctctcccaccccagcccctcccaccccagagacaccactagaatctctccttcctccatctacacactaamaatgtacctttccacggcctatttgtctccagtaattgtaaagtatttgaatgaagactcccagaaacaaattttccatgaaattgaaaaccttttatca

SEQ ID NO: 35192 - DNA, 201 bp, Bos taurus
tccgggagatggtgatggacagggaggcctggcgtgctgcaattcatggggtcacaaagagtcagacaacactgagcgactgaactgaactgaactgaatmtttattgtagccatcttcaaggccagaaaccatctaagccatgacaaaagaggaagcagaagatgaggggactgcacagccactttggcagtaaggtgtc

SEQ ID NO: 35193 - DNA, 201 bp, Bos taurus
tggccaccctttcagccccagctcccaggagaaccaaggtcaaggccctgtgaagggatggcaaagaggcggctggttggcccatcactgtccttttctgracctgtggcagacattgttaatcaatcaccacactctgcctctgagccagaatggggtttctgctcctcaacctggccttgcgggtggatataacatatc

SEQ ID NO: 35194 - DNA, 201 bp, Bos taurus
ccagggccgtggagacctggtgttccaacctcttgtcccaccttccaccctaagtctacatactgagtccctccggtatctatgaggtttaggttacctgrgcacattaggcccttggactacaacaaggggccggtatgctgagaagcagcagtgtgcatctggttttaccctggacttgctgcgtgaccttggtctctg

SEQ ID NO: 35195 - DNA, 201 bp, Bos taurus
ccatctccaaacaaagatgaattgaggaaccccaatacctctttatgttcctcaagaccttttctcatccctagaccttattttcaacccaggcaagaaayctggaaagaaaacagtttcttggcttcctttgctcctttttaaaaccgagaggagggtatggggggctttccatctgtgatctaaggaagttagagaaac

SEQ ID NO: 35196 - DNA, 201 bp, Bos taurus
tactcttctgggcctcatggtggccttcagggttccttcaccgaggcagctcgatatgtcacaggtgccatactggtccctgagtatgcagaaacatgggygaggctgcatgcccacaaggagcctaatgttcagctcagaaacgtgttgttagcttaaaaattattatatatatatatgggcctccccagtggctcagca

SEQ ID NO: 35197 - DNA, 201 bp, Bos taurus
ggaaaaataaagaagctacttttggctaaaagggagttggttactgtaaggtgaattcctgtaggggatggcaggggtctcccaggcagatggcctcactmgtgctgatcaggcgatccttgattggctgggctaagattccatttctgggggagccaaaagcgtaattaagtatcagtttggtgacctgtggcttggcat

SEQ ID NO: 35198 - DNA, 201 bp, Bos taurus
ggactggagagagaggccttcacccagaagagggggcaaagggcctgagcctggtctgtgggagccagaagacacctcttgtccagtgattaagcctgggytggctcccaggagcccagggccactcttctgtcatcactctttagtgctgggtatggaaggatttctccaggcgctgttacagtgggaggctccctgtct

SEQ ID NO: 35199 - DNA, 201 bp, Bos taurus
tctttttgtccttccccgtgggtcacacagcttggacaaaaaaaggtaacttgccttaaattgcaaagttaaagaactgaggcactgagggtcaaacttcrgttgactttgccactctgcttcatggcctctgacactgctattgaattcagttcagttactgggttctgccagctgctgtctgtgccagctctgtgctgg

SEQ ID NO: 35200 - DNA, 201 bp, Bos taurus
tatcaatattctcaacaccatttgctataaagattatccttccttcattgaactgcttttgtacctttgttaaaattcaactggcaaaactttgtgtgtgmctatttctggactttattttgtgctgtgatctaagtgtctttccgtcttgatgctgcactgtcttaattactgaaacaatttcagtaaatatataggcct

SEQ ID NO: 35201 - DNA, 201 bp, Bos taurus
acacttctaagaagttcagggaagggcctcatgaaaagagtagccctggatctgagtgtagaataggggttctcagccaggggctctttggcccccagagracatttgccagtctctagaggcatttaaaaaaatttcatgtatttatttagctgtaccaggtcttagttgcagcatgtgggatctggttccctggccagg

SEQ ID NO: 35202 - DNA, 201 bp, Bos taurus
gtggccatggcaccacagcctcctcctcctcgacgctcgtctctaccatctccctcacccgctcagccctttgaggcctttgtatataaggttcacctggraaacaggggtatagcgactcaacttacagcactgcccatgatggagcttttgtttctccatcttctcccctggtccaggcccgctttcacactttgctga

SEQ ID NO: 35203 - DNA, 201 bp, Bos taurus
atttttacacaaatgagtcaccccgctcacttttacacaaatggttgcatcccactcacttctgtatttgatcccacagaagaattaagatacttgttcargtttcatggtggactctgttgaaatgagaatcaagaagtcttttttttaatttgtttttaaattggaggaaaattgctttacaatgtcgtgttggtttct

SEQ ID NO: 35204 - DNA, 201 bp, Bos taurus
tcctgattgctggactggacacctggctcactgtaacagggggagggcagtgccctccagttatagcagctcaggaaccaactctctctgtgtcctctggygcctcagcatctgcctccctttccactctttcccccttgaccttctcaagtgttctgcatatgacaaaacactcacacatcgaccaaccttgggaagatg

SEQ ID NO: 35205 - DNA, 201 bp, Bos taurus
aaaggggcatctgatttctccctccctcgtggcctgaacaccagctcccatttatgtaactaacaatgtgagagggggctgcaggctgtctgggggtaatrggcccagggacaggtatcaggaaatgaaggttccaatcccagctgattcactatgtgccactgagacaagagctcaaagactgagcctcatcttcaaaaa

SEQ ID NO: 35206 - DNA, 201 bp, Bos taurus
acagtgtttggagggaacagacctagggccccatactctgaccaccctccaacctcctctccagccacaagtccaataccgccttcttggccattccctgyctctggaaccaaccaaccctgaggttagccctttattgcccaccaaccaggagctccaagattcattaggattattccactgagatggaggccattgtca

SEQ ID NO: 35207 - DNA, 201 bp, Bos taurus
cacatgctgaacttcatccttatttcttgaaagcaggttggctctccagattctgtctctgcctgaagaacctccaacctcaccctgctgtgaaatacccsatcccacaggccagtgtgacctggggcaggttatgtaacccttctgggtctcagggttcggttctttgtaaaatggggtaatgatagtgaattaaatgag

SEQ ID NO: 35208 - DNA, 201 bp, Bos taurus
ctgaagtcattaggtaaaatgctataagtcactactgaacttacaaaacctttttccctatgacaggttatgtgcataaaaaaaatataaaatcagcttgyttttaagccagcccccactacaattagcaaccagtctaaatcaagtttggatttcccccagcctctttcttgaattggaacaccccctccagatggtgtt

SEQ ID NO: 35209 - DNA, 201 bp, Bos taurus
tgctggaccccacacagacaacacggaaagcctactagagggcagtgacgaggccaagctgccgttcataaagccttcctgtcacacacagggccaacacrgtacaaggagcagtaggggactttctgccttcctggaaagataaactacacatatttgttagagagaagaatgtcacaactaaaggctgaaacatgctta

SEQ ID NO: 35210 - DNA, 201 bp, Bos taurus
agtgaagtaagttgttcgacatgatagcaaagaacttttcagtgggagtgaatttactttgtcacaggaaagcaaaagtcaccacgttaaaaatcccatgmtaattgccaatgctggctttccagtccccaaattctgaaaacaaaattattgcaattcccactgggactgtctgcatgctcatttatagcactagatagc

SEQ ID NO: 35211 - DNA, 201 bp, Bos taurus
agtgatgtctctgttttttaatatgaaggtggaagaggggaggtaaacaggagggaaggattactgtggctgatgctgttctttcaacttcctgttaagcrggtgtcatggccttctccagaggtccacatcgtagttgagtggtacccaagttcttggctcatattagggcaaggaagcaacagattctattggcaaaat

SEQ ID NO: 35212 - DNA, 201 bp, Bos taurus
acaacagagcaagacagttgccagcccagtttctaacttcttaatggcctagtctggtagagggaatgttccagcagaagtcatagatacaggtgcaaatmctgtttctattgccttgatttggccatggacaaaatttgcttttctcttagcattcttctttaaagaagcatatcatagggctgaattataaggatcaaa

SEQ ID NO: 35213 - DNA, 201 bp, Bos taurus
gtcatctgcatatctgaggttattgatattcctcccagcaatcttgattccagcttgtgcttcttccagtcagggtaccttattacatttaattgccatgkcttcttaggctgtgacaatctttcatatcttgagagaaatagtcaaatttgaactagctttcataggaaatgtttgacaatattgaggactattgtttct

SEQ ID NO: 35214 - DNA, 201 bp, Bos taurus
ttggccagatttagatatctaagtgaaagactcttcatcatcatcaatatcgatagcaatatcttcattatcccagctacaatttgataggtgtctccatkattccaggacttcttcaaggccattttcatattaagttttaataattataataataaaaacattattattatatgatatttcaatttaaaatatccacat

SEQ ID NO: 35215 - DNA, 201 bp, Bos taurus
gggctgcagattcagacacaactgagcacacaaacacatacattagagttgatccatttcattgtattagctattaactcccttatctctccactattttyccccatttcttctaataacaataacataaaacgagtattaaaattttgtctgtaagaacagaataagctcacatgtgaaaaagttgagtttctaaagata

SEQ ID NO: 35216 - DNA, 201 bp, Bos taurus
cttttcatggcctttatttcaaagtctattttctgatatgagtattgctactcctgctttcttttggtttccatttgcgtgatctatctttttccttgttytgaggtgggcctcttatagaaaaggtatataggggtcttgtttttgtatccattcaaccagtttttgtcttttggttggggcattccacccattttcatt

SEQ ID NO: 35217 - DNA, 201 bp, Bos taurus
aatcatttcatttcttgactgatctacgttatacctctggcttaataaccaggtctggctgcaacatgttgctaaaggttatgtctataatgaaatttttyttgtgaaatatcttgctgagactctgctctctgctacacagaagttaatatcaagtgtcttgaaatagtattactgtacatgatattttatttataatat

SEQ ID NO: 35218 - DNA, 201 bp, Bos taurus
taatatttttgcaaagaactgagcattctgtgttataatgtggtaaatttggaagtatgatgctcacagtcctcagggattgctgcttttgcttgtgtagrcttgggaatgtccatttgtgtctatttttcccaagtgtgtactccttttgtacattgaaatttttggctcattttctctatcttcagacagtgatctaac

SEQ ID NO: 35219 - DNA, 201 bp, Bos taurus
ttgtaaaatatacagagaagctgactatagagaactaagtaaaataaaatgaggcaacattaccaataggaaagagtcagcatagactcagaatgaggttyatatttctaagagaaaataaagggggaataaactttcaaacttaaagttagcttaattttctatctctacattaaatattcaaatatggacatatatgtt

SEQ ID NO: 35220 - DNA, 201 bp, Bos taurus
aatgtaattaaaaaaaatgtaaatccaggagaaataataccaaaattacctatggtgtgttataaaacagaataatatgtagcagtcaaaatgaatctacyagagccatatatttcaaaatgtaaccatattgctgtgctttgtggttcggtttgtgtccaactttttgtgactccatggactgcaccacaccaggctcct

SEQ ID NO: 35221 - DNA, 201 bp, Bos taurus
ggaaataagtaggcttgaatttcaggccagatctaaccatatgaatttgaggaagcatttttatatgtatgtcctcagggatgagaggaactaccccaacrtccaagatcagggccggtggtccagaggagctactccacgcctgaggtcaggggagccggccaggaggaactacctcacgtccaaggagtggtggctgcc

SEQ ID NO: 35222 - DNA, 201 bp, Bos taurus
aacactgaacaggacactggacacagggctggtttcaacttgctagtgtgtaaggttggggcccaaagggtctcagggcccctgttgccaacctcctaatrggtgaggctgcatcctggggctattgacagcccagggaaataccaagtgccaggtcccaggacctctggctgcaaggccctagaggtcctagagttcgta

SEQ ID NO: 35223 - DNA, 201 bp, Bos taurus
ctaaattgaaggatatttgtaataaaaagatataagcctccaactcccatttttgccaaacattaataaaaatcaaattagaagcaagtgccttgaaaggmcactggcaaaagattttagtattgtagcaatgtgaatctgataagaaaaggaaatgctcttccttctttttttattttaggaataatataaatacaactt

SEQ ID NO: 35224 - DNA, 201 bp, Bos taurus
ccatgaagttttaatgctctattatatatcctttagttggatgtgaggtgctaaaatcccagaaaatagagggatctaccttgaatcagatagggataggktaggaaaataaagcttactggtggatatgatgtctaagctcactttgatggactgaacagaacattgttggtgcctagatggttaagaatgctgaagaag

SEQ ID NO: 35225 - DNA, 201 bp, Bos taurus
gaacacttagcagaggcagccagatttccccacctgtcagatctttctcttcccacttgcctccaacaggaactctccaatccaatcttgcttcccaaagyttcgtgtctcgacttggcagcctgaaacacagcgtctgcactcttcctgactacgtttccacatcctcctcaagaaagtgtcctgtccttaactcctatg

SEQ ID NO: 35226 - DNA, 201 bp, Bos taurus
ttcctgatcaccttggcctcctcctcaggtggtcccatgtgggattctgtgtctcctgtctctaggatccttgaatctaataaactttgtttttctcagcytctctttctgtctcttcttgtggccacccctgaatagccatctcataaaacgaaacacattcaatctattttgtgctttctctaagtcatggaccaaacc

SEQ ID NO: 35227 - DNA, 201 bp, Bos taurus
acttatgccttagagtcttgatgccagaagaagagaaaaagtaatttattaaaacagtcaacttttaaaaacagttttacaggaagggatgtagaatgtaytctcagcattacctcagttgaaataaaggtaaggtattaaagtgaggaaattttggaagatattttcctgctcatttgtgggttggtgggtttttgtttt

SEQ ID NO: 35228 - DNA, 201 bp, Bos taurus
aatgcccccacccttttcaaaaaatcatatgaggtaatatgggtggaaaaatcagtgtacatgtgggaattagagagaggctggggagactaaattcccartatatttgataaggcatcaagagttccactttcttaatttcctttcttctctgaaaccatatttggctttagtcctgaggacagaaactttctaattgca

SEQ ID NO: 35229 - DNA, 201 bp, Bos taurus
atgagtacatgagtataaaaaccctactcaaaatagcaattgcagtggtcagaggatcttgttttgcagaaattttctgtaaacttattaggatacccttmtctgtgtctgtctttgcttcttgaaaccagctgattgcttcttcccctcaagtacaatacttcatgcatgtcttcaactcaggatctcaaggtattctgt

SEQ ID NO: 35230 - DNA, 201 bp, Bos taurus
gacaggtaaggatatcttgggcctgtactgggatgatatggagaaaggacaagtttgagacagaattcccaggcagaattggagagtgtgacagagaccayctttttcacttggcctcagtctcttgagttctgctagagactcaggtgcctttcatatctttttttttttttttttttttttaacatataaagtataaac

SEQ ID NO: 35231 - DNA, 201 bp, Bos taurus
ggaagatcccctggagaagggaacaagtacccacttcagtattctggcctggagaattccatgaactacagtccatggggtcgcaaagagtcggacacgamtgaccgactttcatacttcatacatacataaagtcttagctgggcttcccagctggttcagtggtaaaaaatccatcagcaacgcaggagacacaggttc

SEQ ID NO: 35232 - DNA, 201 bp, Bos taurus
aaggagaggaggcctggggtaagcctttctgataaataactatgttgatttccacagcaaaagggagggttagaactgggaagggactgaacaagacgctyagtaaaatgtctttttcatggtggcctccctgcttacctgatgttgtagaaatcatgaagcaataaaaccctttgagaatccatgagccagtcataattt

SEQ ID NO: 35233 - DNA, 201 bp, Bos taurus
gcatgaggatgaaggctgagatggaagtactaaagatgcaagtcaaaaaaattaaaaaaaaataaagataaataaataaataaaaataaataaagcaagtmaaggaacaccaaacactatcaacaaaccaaccaccagagccaggaaggggtaaggaaggattctcatcttcaagtttcagaagaaccatggccctgctga

SEQ ID NO: 35234 - DNA, 201 bp, Bos taurus
atttttaggtgtgatgcattcccaaaggcatcatcttttaagtcacagcctgaattacacacactctcttttaacatcaaactaatagattaaggcagcargaactctaaagtagggtaaagtcagaactgatcattttttatccctgttaactaactgactcaggggaaacttgaaattttcagaattaatgaaccaatt

SEQ ID NO: 35235 - DNA, 201 bp, Bos taurus
atatactgaaagagtatgtaatcaatgtggaattttcttcagccagaattctctatttgtacttgttaatggctttaacattataaggtaccaaaaatcakattagagaaaacacttactaatataataaatatgaaaaattagtcaccaacaattttattttgtatcaaagaaattattttggagagaagctctgtaagt

SEQ ID NO: 35236 - DNA, 201 bp, Bos taurus
aactgctaaaaagactcttattaccaaactttttaaaatcacaacctacttaaaattgcatgtctagggcacatacagatattaaacagtttctctgaaawtattaaggcctttagccatctgaatgagtgattatttttttataaattagtgagatttttattgaatctgtgtaaggaataaaattttaattgaaaactg

SEQ ID NO: 35237 - DNA, 201 bp, Bos taurus
ctttgtagtgctgatccaatagtcatttctctttgtgtctcagtggtgaggagcagtaggctgttcctcctggtagttatctgagagccatgtgaaaatgrcttaaggccctagcatccctgcccgcccctactatttacccctgggcccttcagatacatggggtaggttctaaaactctgtatcacaaaagaaaaaact

SEQ ID NO: 35238 - DNA, 201 bp, Bos taurus
gtgtcccctggtgtgtgccaatttcacatccaaataacagatccagtttaggaatctgttgaccattcactgtgcgtaaggcaccatcctaggactttacrtgctattacctgatttaatccccacaatgaccctttaagtgttgatattgtgatttttttttttttttttaaggaactggtaactgagttacatttctaa

SEQ ID NO: 35239 - DNA, 201 bp, Bos taurus
aactgtagtctaattatatttagacatatgtaacaggaaaaatgaaaatttgtttttatgaatatttcagaaaagaaacaaaccaatgtttcttgtataargcttgctgtaacaaaatctaactgcatgccacaccttgaatgataaatcagttcagttcagtcgctcagtagtgtccgactctttgcgaccccatgaatc

SEQ ID NO: 35240 - DNA, 201 bp, Bos taurus
ctgtcaggatttgtgcagtgttctgcttagtactgtagttatttgcatatattttgcttatgatgtataaaataattttcctaatcatattattttcaccyatcatcatttctacaaaagtctctgcaatacattaaaatgtcagaatttggtggggcaaagattaatacacgattccttatatttttaaagaaagatttt

SEQ ID NO: 35241 - DNA, 201 bp, Bos taurus
taactagatgaattgataaaatagcagaggatattgaggcacaattgccagagaggactgggtcacttggtgtgcagcccaggctgatgagtccaccagtkttgacaacagcacaagaatgctttgtgttgtgtgatatatcttcaggaagttgtgcacaaggatatgtcatgtgcacttttgttgccaaccaataccgca

SEQ ID NO: 35242 - DNA, 201 bp, Bos taurus
tgtcacataaggataataatttctaatttcagcaatatacatgattaaatgaatgttctgcatccagaaacaatgagaaattgtagttttaaacacatatrgaagatttcaacaatatcaacaagaaaagaatacatgtatatctgtgtgggagctaattttcaggattagaaataaagagagatctcaaagtcacaatgg

SEQ ID NO: 35243 - DNA, 201 bp, Bos taurus
cacacagacttgtcaagcatttgggtgttttcttcttggctggtgaattgtctttctttgaagggctgttcctttctgctcttgcccccagtaattgcctyagtgattatgcccttatgtctaagtgtttccaacctttactgccaaagaaaagattaggaaaggatagctctagagtttaggttttttgtaattttcttt

SEQ ID NO: 35244 - DNA, 201 bp, Bos taurus
accttaagttattttgccaagtccctgagacttagaccctgatcccacaggagatctgtgcatggttacacctcagccaccagtaccattaccacggtaaytgtaccttcaccctgggacccaggtgctatagcagttccagggtgctttatcccaggatccatgctccacagactctcactgcttgtgtgccaggactgg

SEQ ID NO: 35245 - DNA, 201 bp, Bos taurus
atgaataacctgtagttatttgtcttttctattatttaatattcctatagttattgcttttattaagttcttttttattcttcttttattaagttctttcrttctcattattagaagaaatattgaattgaggtgaggaatagcatgctaagatatatgctgagaactaccaagggattctctaggcaaaaatactggaag

SEQ ID NO: 35246 - DNA, 201 bp, Bos taurus
tgatttcattacttccagacctaaagaaaggccagttctctggcgagatactttgttgcatagggcttaaggaaagcttgaggaagaaggttcatatcctmcttaaagtggcctggagtgcctaagctttaactctctcaaaacatcatggataactatcttaggtaaaaaatttaacctcatattactatgggaaaattc

SEQ ID NO: 35247 - DNA, 201 bp, Bos taurus
catagcacaacataacctcacacgacccttctggcccttttcaggtgaaccttatatatactcacagaacaaaagtagcttgtggccaagcgagcaccttktgatgcacatgaactgtactataaccgatctcagctgttacataatcattatttacaaaatgtggggcaagagtgagaggccatgaggtgagagagactg

SEQ ID NO: 35248 - DNA, 201 bp, Bos taurus
tttttggaatatgtactcatgtatgttatggtaatttcaataatgcttaatgaaaatctccatctataacccataaatgatgaaatgcctggcacattatmaaccttatctacttcatgcatagagactcattgtgttttttatgttataattggcatcttggaatagattggcaaacacaggtgaaatatcttcacctgt

SEQ ID NO: 35249 - DNA, 201 bp, Bos taurus
tttaaattaatatgagaaattggagaaaacattccttgcaaaacagacatactgtaagaaagagttccaaaatctggataataattttaaaacttccaatyttcatctgctaatgagatttgaatgacatatttatgaaatgagaaaaatctggaatcagaaaagatggtattttagctaaaactcataatttcaacatca

SEQ ID NO: 35250 - DNA, 201 bp, Bos taurus
gtctcaggaaagtagtttgctatgttatatgctatatgctatatgttatatgttatgtgctgtgttggatcagtgacttcttgtacaatatatactaactrcaatatttcactctgtggattgaagtttctcatatatacgtagaagctcataaatcataccctgtttccctgatgccaacacaatttgaacatccaaatt

SEQ ID NO: 35251 - DNA, 201 bp, Bos taurus
taaatataaagaagcatggttttctttatattgtttaaataacttgatagaaataatatcactaaaacctacactaaatcaggttttcagtaacctggaamaaattatgcagctacagctatattgtttttcaattattagtgggtaaaatactatggtaagaatccctcctgaaccatgccaccacttggatacccagct

SEQ ID NO: 35252 - DNA, 201 bp, Bos taurus
catttgaggtggttctgttattcacatgcttgttatcaataatttaagtacttcctttctaagatgcaaactttgtgtagtgtataattcagaaaactctrtaatttaggtctataatgacacaatgctctgatttttaaaaatatataattttattttggaatttcactgggagaaattccggtactttaattattcatt

SEQ ID NO: 35253 - DNA, 201 bp, Bos taurus
gttagtgaaacccatcatgcaactgagaaggtcctgaaatttaagacagaagtttaagcacccaccacaagagatacaggccattacatgagcttaccatktgtgctgtgaccatgaagatacagaccaatgatctgagctgtgaatgcaaaaaaaatcccctcttttaaggggtgggcctggcacctgtgggtggttttt

SEQ ID NO: 35254 - DNA, 201 bp, Bos taurus
ccaaaatagaaacatataacattacgaattgatgccatttttgaggtcacttttacagttagagcaaaaccatatagaccttaatcttggcacaccaaacsattccagacaaagagggaaaattcctgaaattgttttattttggaaaatcaatggtacttaattaatttattgttgttcagtggcccaggtgtgtccaac

SEQ ID NO: 35255 - DNA, 201 bp, Bos taurus
ccaggccattaacctcacctttgaggttataaaactcaaaatacttacatttaactgccagatagtctcattatttttcttttcctgctcagtgataaccragaccaatttaattctgacttctctaaagtaattaatttggggtgtttttaaaaaatcagaattctgcagaagcaggtttcttttctcttccatgcaatt

SEQ ID NO: 35256 - DNA, 201 bp, Bos taurus
ttcttatattaggactcacagagacacagaagaaactgtcaaagaattccttatttatccatatttatgatcatggaatttcaaagattccaatgtcagtygcaatatattaaaatgacttaaacttgccacttttcaaaaatatgaggttcatttcctattaacatgttcaacttaaaaaaattactaaaaataagaatc

SEQ ID NO: 35257 - DNA, 201 bp, Bos taurus
ttttttgtttggttttcttttccttaactccttgaagtttccttttatagacaggttgctataaaatcttatcctggtttggaaaatgtaattgttgcaargcttaagggatctctgtattgtcacttttagatcaataactcatgttaaaatataactctttattaagcagggagaaatctggcctcttctcaaatgtaa

SEQ ID NO: 35258 - DNA, 201 bp, Bos taurus
gttttctgaaagtgtctggaaaccttaataatgagctatatggtctcaaccacatcttttatgcattaagtctcattttcctcatttctaatttagggccygtaaacacaacatctccaataaacaaagtttacctaattattcatttaaaaatacttattaaacacctgctacatggccatgctgcccttatggaattca

SEQ ID NO: 35259 - DNA, 201 bp, Bos taurus
agtcactaacaaaaaatgttgtttcttcactcattttgctatattagttattttcacattgaattgctacctatatccctgtagttctcatatttgttgtrgctactttcaaagcactgatatctaaattttatacagatatatgtaaaagccttcaaaattagtactgcaaaaaacaaaagaatatgcacaacagtagac

SEQ ID NO: 35260 - DNA, 201 bp, Bos taurus
tcagttttttctcaggttataatttattacaaagaattatatataattcccagtgatatagagtaaatcattgttgcttgtacaactcatacaagaagttyatatagctcaatatataaaataggtattttgtatacagggtcttgtatctgtgaatctgatagccctaatttgtctctctctctccctctttctccattt

SEQ ID NO: 35261 - DNA, 201 bp, Bos taurus
cttccgggaggaaggtttctagggcacaaatgttaaggaggttctcataagggcagtacaagtggtggttcagccccctagtgtgaatgcaatcttaaatyttgccccctaagtgcctcactcacatcactctggtctctgcaatagcccatttttggaattacctcactgccttatcaattggcttccaaattttcagtg

SEQ ID NO: 35262 - DNA, 201 bp, Bos taurus
cttctcatcttttaattgtaaatagtgtataaaattttttcactgttgtcttttatttaggattaaccagttttttaaaaaatgtattctcaggaaacacrtgtgtaccataatatgtctcagtacagggttatcagcatatgtggcattgtgatataagagtgaactttcatgttcaagcttatccctttaattacctta

SEQ ID NO: 35263 - DNA, 201 bp, Bos taurus
gtgctggaattgagcttcctcatttgtttgggagcaatttctgggcaatttctgaagggcacagcctgacaaatcctaggtggtatttctacaagttgatraattagtcaatacaccaggcatgcagcatctaacaatggcccaagctgaatttgaggggaaaacttgcattctgggtcctatacagaaaagtaaacaaga

SEQ ID NO: 35264 - DNA, 201 bp, Bos taurus
ttaacaacaacaaaaaaaaagctatacacaatacatattacaacattacaaataaactactctgaacagtgtggggaaaagaagagaactgaaagaaaaayggctctaacgctattgcttgcaccttcctagtgttgacattcttgccgcttttcatttattttcttttccaaatttctgaaaagggattacaaagtaaat

SEQ ID NO: 35265 - DNA, 201 bp, Bos taurus
gaagtcagaggagtgagcagtagaagtttgggttatataccattttaaattggtctggtcacattcaaatcttggctgtctataataaaatatagtttcaytccaacctcataaaccttctttcttccttttgttcttcaaatgtataaacactttatagacagagatatacttgctttcattgcgattattttgatttac

SEQ ID NO: 35266 - DNA, 201 bp, Bos taurus
ttttaccaagtatttaagggactcttttaagttgaagacactgacctttccttctactatacttactttcttatttcttctgtgtattccctgagctccayttttataaatttctgtattttttttagtagtttgaataattatttgttagtcaatattttgatgaaagaaaaggttatattatcaaattatatattttgg

SEQ ID NO: 35267 - DNA, 201 bp, Bos taurus
agagcaaaagaaatgtaaccttagactaacaaggaaatgactgggggtgcaaaatcatgttgaaacagcaaaataatggggaattatgcaaatatggatartattttatctttgtgcagaaaaggtggactatgtgcaaaattctataagtaaaatacccagggcaactcaaatgtgagttcaagaaattgattgtattaa

SEQ ID NO: 35268 - DNA, 201 bp, Bos taurus
tgggaaaaaagccaagagagtagtgcagtgcggcagcagataaagcaacagacaagcgacaggcagtggcagaacacagaaaccaaagaaagcaaccaccraaataaaggagaatgaaaacagcagcagcaagtggcagagttggcggggggaggccagatatctgttccaatttactgaatcaaccactcagctcagaag

SEQ ID NO: 35269 - DNA, 201 bp, Bos taurus
tcttagtctccctctttcttttattttaaccttttcctgtcattttcaattcttgccatgttaacccacgtccatttcccaagcactagcctctctgtcayttctaggccttcacatgtgcatactcacacacactgcagactctctgaccaactggctgacctgtactcactctttagacctcagattcctttcacaaga

SEQ ID NO: 35270 - DNA, 201 bp, Bos taurus
ggccgaactgcttcctacatctttccacttcctagtttcacagatatctcaaatttacctgttcaaaactgaaaccttgattcccacccggcctctgaatytactcctcttcaagttactcccaatccagtaaatggcattatcttccatgcagctggtcaaaccagaaatctgggcatgagcactcttgacttcttcctt

SEQ ID NO: 35271 - DNA, 201 bp, Bos taurus
acatatacagatattaagaatattttaccttacaaatgaattcaatgtcttctctttcaatatcctttaccaccattatcttcattttgttcaggaaatgyaatgcaagatcactaagagcatctctaaaatacagaaacagtgattatgtcaatactggtttggaacagaaattctgctatttaactccttagggttttc

SEQ ID NO: 35272 - DNA, 201 bp, Bos taurus
ctcaggtgtatttcttttgaactcctttataatggagatatgttctgctttgaagctgcaaataattaaatatgtttgtatattcttttcttcaggttttrtatctctgttgtctctcatacattttaaagcctgcccaatggttctttaatggtcttatgaataagtacagctagtgcagtgtttatcttttctcttatt

SEQ ID NO: 35273 - DNA, 201 bp, Bos taurus
aggagcttggtgggctctagtccatgggatcacaaagagtcagacacgactgagcgactctcactcactcactcactgctttcctttcattttccagtgtygttatggcatggcttttcttgaagtcagtttgaactggcagtcacgtgactgccagatcagacttttaatgacctggtatatgtcttttgcggaggaaaa

SEQ ID NO: 35274 - DNA, 201 bp, Bos taurus
ccagtattcttgcctgaagaatcccatggacagaggagcctggcaggctacagagtcggacacagctgaagcgactgagcatgcatgcatacaagcacacrtgctacttcaaaatataactgtttcttccatagaaatctaaatacacaagtcatttccttcatgaatctccttaattctttcagtgagacgtaatatccc

SEQ ID NO: 35275 - DNA, 201 bp, Bos taurus
ggccgcgaccgcaggtcctggaggctgccccgcgacgccaggcggacccttccggagcctgtataatcgagtcaccttaatttccaggccacggtattttmcactcagggctggggagccccagaacccactgtctccccatcaagtgaggaggagcggccgagatactcagcacgagtgtcacggcatgaaagcagatct

SEQ ID NO: 35276 - DNA, 201 bp, Bos taurus
cttttagtattctggaatcccatgttagactcataaacttcctgtaatgcagtctggtggcccctgcttctacttcctctaccccttacttcatcctgtgygttgttgccacatgtctcccgctctggaggcgaggtcagcaggtggctcctgcagccctgcctcttctgaccttctgcagtatagatcccactctctatg

SEQ ID NO: 35277 - DNA, 201 bp, Bos taurus
accgccatactgttctccatagtgactataccaatttgcattcccaccaacagtgcaggagggttcctttctctccacactctctccgacatttgtcgttkgtggattttttgatgatagtcattctggccggtgtgaggtgatacctcactgtagttttgatttgcatttctttagtaactagcaatgttgaacatcttt

SEQ ID NO: 35278 - DNA, 201 bp, Bos taurus
tcaaacaagctgtctctccacatctacagagcttttatgtttcagttgaaaataatctatttcagaacatgtgggtctctcagttcaggtaccattctggstgctaggagaagtctcttttgctctgtttgttcgtttggtattttctggtgtccttgtacttccttggggtcctggaatggtcctatcttattcccatca

SEQ ID NO: 35279 - DNA, 201 bp, Bos taurus
gtaagatattttaaagaggtcattgaatacctgacatggctccaaaccatatctagagcctggggccctggttttccatctctccctgggcctggatcccrctcccataaatgagtcttctggagcctgctcacacgtaggcagccctctgttctcttaccacctatctaatcattccttggcatatctcctatctagcac

SEQ ID NO: 35280 - DNA, 201 bp, Bos taurus
agaaactgacacttttctataggacaagagatggagtattccaataaatggggttctgtaaatcattcaggctagatcagattgtcattctacaaaaagtrgtcttactgaaatctttgtatattttcataaaggataaaaagaaaagactagctttcttagacttagttatgggtagttatcaagtcataaattactaag

SEQ ID NO: 35281 - DNA, 201 bp, Bos taurus
gggacacatatatacctatggccgattctactgatgtatgacaaaaaccatcacgatattgtaaagtaattatcctccaattaaaataaataaataaattwaaaaaaataggccctaacgatgtggagactaacctggacttgtgggcagagtaaaggtcaagttatcttgttgaaatatatcacaccaaagatgtgctga

SEQ ID NO: 35282 - DNA, 201 bp, Bos taurus
ccaccaccctcctcccccagtgatgacatttaacataacatagagcattatcaaaactaggaaaccgactaaactacacacaacactgttaaataggtttrctcagatttctacagtttttatgtctttatgaatggtcctatgtcatccaattatatattagattgctataaccacaaactgtaccatcacccacaaaga

SEQ ID NO: 35283 - DNA, 201 bp, Bos taurus
tgcaatgaattcatttcttacatgatcccacaggattgaattttattatctcaacttcaggatggaaacagtttagtcctgtgtgctaatgactgattctyccagagtgtggccacttggctgccagggctttttgaggttcctgccatatccaagttgctcattgttgtgtatttttcacttgcttctgtttctactcca

SEQ ID NO: 35284 - DNA, 201 bp, Bos taurus
ctcaatctgtttctgggtttttctgcagaagtggcagaaatagtatatacagggggaaataaatctatgattacttaataaattggatttgtttaaagcaytgaatttttcaaaacatggggtacaaaagtaaaaaagagttttcagaatttggttgatgaaaaagtaattgctgttttggactacaaattttacatcatt

SEQ ID NO: 35285 - DNA, 201 bp, Bos taurus
gaattctgctagcaatcacactgggccccagacagagcagagaatccttccctattgtaagactgtggggtgtgacctgaactaggcccttaaagggtttsgtaaaaggatttgtcaggtgtcctgtatctcctccaaaaatgcactaggtcattaatttggccatatcacatatctcaggcttctatgtattaataacat

SEQ ID NO: 35286 - DNA, 201 bp, Bos taurus
tggaatattctgattttgcaggagtctcagaggcaacacactgtagccgtggttgagtgggcctgttcaacccttgtctggcagggaggggcatctacacytcctgcctgaagataaaccatgatctctcagcaagcgtgtatttccttggggcagagaatggggcttgatggcgattaagtacagtgtgaggaacaaata

SEQ ID NO: 35287 - DNA, 201 bp, Bos taurus
tcattattgagatcactgtaagcaataatatacatgatatataatattttataacttagctactttaaaaattataattaaactagactctgtcagatgayaaatcttacacagtggagaagtatattattttcattttagctgaaggaaagaagcttaactataccattaaccagaaattagctcttaaaattccaaaag

SEQ ID NO: 35288 - DNA, 201 bp, Bos taurus
actgatgctgaagctgaagctccagtgctttggccacctgttgtgaagagctgacacactggaaaatactctgatgctgggaaagactgagggcagaagamgggcctgacaggggagaaaatggttgatggcatcactaactcaatggacataagagtttgagcaaactctgggagatagtcaaggacagggaagcctgga

SEQ ID NO: 35289 - DNA, 201 bp, Bos taurus
cctttctggaccttcctcttgcgaataatggatatgctgctgtagaccttcctgcttctgttttttctgcttcctctgaagaaagtgcgtccagtggtccytggccactgggtctttattggaaaagctgttttccaagatcatttagctctaaaaaagtgatgaacccacagggactttgagactttgtgtgtgtgtgtg

SEQ ID NO: 35290 - DNA, 201 bp, Bos taurus
gacaaatctatgaggaaatcatgtagagatagtcaactatcactacaataataataccatataacaaataaccctgaaatatcagtgacttattaaagccrttgttttttctctttcacaggtctgtatgtgaactgagactctgctgattccatctggttaagacttggttggactcagctgagttttgccccaggacac

SEQ ID NO: 35291 - DNA, 201 bp, Bos taurus
ttgtatagaaagtcacaatcagtgggagaattaaggaaccaatgaaaaaaataacatctcttttccagctcacaaagtcctagagagttgttttgagggcrcaggccactaggactaatgccagacattaagaggattctggtaattcctctagttcagccttcctgtttaccaagcaacttgctggcttccgtgtggctt

SEQ ID NO: 35292 - DNA, 201 bp, Bos taurus
cttaagagtaaagctttgtcagacctcttattgggagggtgataaggcttttgcatttgcctatccacccatccatcctttgtctcaacgtcaaggcctgygccgggtcaaggctttatcgcacgcaaccacacaggactagaggggggacttgacgcaggagtaagatgtggagggaggacctctggatcccccccaccg

SEQ ID NO: 35293 - DNA, 201 bp, Bos taurus
ggcctacgctgtcaccacctacatgtttgggactttgctgttggcacatgctggggatcagggagtagaagcccagtccacgtgttgacaacttggcaaakgcggccagcggaccaagttgagatgactggacttatgctccaggctctaggtgacactggcagccaacccttcacctacggtctatcaagcccctcccca

SEQ ID NO: 35294 - DNA, 201 bp, Bos taurus
agcttgggttctgcagtcactcaggcctggatttgactctctgaaaggtttccccgctctgtgaaattaggataaaaggacccacctgctgtgggaaacckgcatgctctcaggccacaggtgggagtataccagatgcccaaggtaccggtgtgagtcctcttcacctcagcatttcttctgactcttgatactgtgggt

SEQ ID NO: 35295 - DNA, 201 bp, Bos taurus
tatcaggaaagcaacaaagattacacacattattttataaaccagcacacaaaggtttaaaacagttctgaaaatgaagttagctgtcttgagtcaagggrataaaaaaaaagtcagtattgaccatttacaatctctgacctttgtggagacggtaagaatctgttgtagtgcagctacatacagtacaattcaggcaat

SEQ ID NO: 35296 - DNA, 201 bp, Bos taurus
tgtgccacaagggaagcccaagatggtttaattgctgagtaaatgtacagtgaagtttctagatctatagaaaagcaaatcatggtcttctggtcacttaytgtctaatgtgaatatgacagtgtcgggcttttatcaactacaacactggttgacaaatctcagcaatggctcatcttatgggacgtgtcccagtgctgc

SEQ ID NO: 35297 - DNA, 201 bp, Bos taurus
taagtggggagagagttctggcaggcaagaggccaaagtctgaatctaggtttatgattttgcttttattgtctgctgcttcactgagcctggagttcagwggagttcataattaatcaagatcaaaggattaccaacttgaaacaaacaaaacgacccgctgctgaagaaccctttcttctcctacttttttctccgaaa

SEQ ID NO: 35298 - DNA, 201 bp, Bos taurus
agaggacattattttattagcgggtaactaacttgttggtcagttctgctctgcactgtcagctctgctttcaggacttgctcactggttttaccctttgycatctggtttgctgtcatggtgttgatacctggatcactgtgggtgctacaagagtgcagttctgtgaccaggagcttcagtcacctgggagcttgctgg

SEQ ID NO: 35299 - DNA, 201 bp, Bos taurus
gaagaatccaggaagtggggggtgcgacagtaatgggagacttgcctgaaatcaagacgactgagtatgaagacctgggacggacaggaggaaaaggagcrggaagaacgaggccaccacgcatggtagaaccacctcgtgatttcgtcagtgcagtaaaagctcagacagagggctctgcagcagggccgctgtgcctct

SEQ ID NO: 35300 - DNA, 201 bp, Bos taurus
aagtaattctctaaggtgaggggtgggccagggttcaaaaccaggttatcaaactctgaagttcacacttttaatggcaatgtctttgatgattattagayagggccatgggtttcttgcttgataacagaggagactgaaatggagtgtgtacttcttgcccatttgagggatggcatgggacacaggataaagatgggc

SEQ ID NO: 35301 - DNA, 201 bp, Bos taurus
aggacagaggcttaggcctggaccaccagagaaaccagtgtcttgaaccagcccgtctccacacagaaggaaaagtgctctggaggcaaacaagccacttyaactgctctggcccagatattatgcaggtcacatttgtttacaattccttggccagaactagtcacatggcttcacaaaccacaagatgcctttgaagag

SEQ ID NO: 35302 - DNA, 201 bp, Bos taurus
gctatcagctagaactttaaaacatcaaaacacagattatataaaattccaaggaaatgataggattgcaaaaacaggcttcgtctagagtatgaacttaygatttggagactgtgggttactaaggggtccagagacaagcctagaggcgtggggccctctgaaattgtgcacagttctcaaagaggtgatgacttctaa

SEQ ID NO: 35303 - DNA, 201 bp, Bos taurus
ccagggaattccctcacttcagcttcagaacctggtctgggcactcctgcatttctcttctcagaagcctgctctgcttaccatcatccagatatccatgrggccaacatgggcagtgttgccagttccagaattgtggataacagagacctgggtctattatcaacctgaccccaaatcacaggcacaaatattatgaat

SEQ ID NO: 35304 - DNA, 201 bp, Bos taurus
agatgtttgctctctccacggggacctgagcaggcctgaagtcgctgcatttagtgttgctcgcagaggcatgcagagagactcagcattttgagcagagrgtggcccaaggggtgagtggactcaaaatcctagaactcacattctggaaggaacttgttaggaatcacggatgtttaacctagggagaagaggggagac

SEQ ID NO: 35305 - DNA, 201 bp, Bos taurus
tgactttctttggaagtaggattgttgcagatgtaattaatgaagataaggtcatgttggggttgagtgggctcttaattcaatatgcccagtggccttayaggaaaatgatgtgaagacacagaggggaaattactatgtgattacagaaagagagagattagttacattgttacaaactaaagaagaccaaggatcagt

SEQ ID NO: 35306 - DNA, 201 bp, Bos taurus
acatcccaaattccaaacatgacaaaaaaatacatgagccagggaaaaagattctctctgattggttaagatatgtgaggtgggaaagcgagaaggccaayggcaccagatacaatgggcacagagcaacatgaatgtgcacccaatcctgccttctgacagctttaaccagaaggccaacgtcagatgtggaaagacatt

SEQ ID NO: 35307 - DNA, 201 bp, Bos taurus
tccctcaaactagaatgttcttatcctgcatcttcaccttgacaaactgctacttatcttttaacagccagatcaaatgttcctccctcattccataaacrtttagtgaatgaagatttctcgactcctccaacgttaattgttctaactcctttattcccaaaggactatgctaatgtcagttgcacttactctgctgct

SEQ ID NO: 35308 - DNA, 201 bp, Bos taurus
ggaaatttggccacaaatgtcaagatctaggcaatgacatagtcaaatgcttttatagagaacccatttgtacttgacattaattggggttgtctgctggraggccagacttcttggaaaagttgggaccagaagtacagcgtgctatgcaaccggataccgattgactaaagcaacttgagaaatgcaccctacttcacc

SEQ ID NO: 35309 - DNA, 201 bp, Bos taurus
cccaaaaaaattaaattaaaaaaaaataaaaaaataaacccctactcactagtgtccaattagcctaaaggttgatatacataagattgtatatcttgcayacatgtaagattgtatataaacagcagtatacataagattcatattaagatgtgaaaaatacagacttctagacccacatgtggaaattcacatttaata

SEQ ID NO: 35310 - DNA, 201 bp, Bos taurus
atttttcaggcaagaatactggagtgggttgccatttcctactccagaaaatcttcctgacccaggaattgaaactgcatctcctgaatttaccactgagygaccagggaagccccagaagttaatgggaatggtcatgttaatcggggatagtatgacagtcaaaagagcactggatcagaagtttgcaaattaagaaat

SEQ ID NO: 35311 - DNA, 201 bp, Bos taurus
gtcttactttccagctgcagcaggcaaataggaattggaggagatggcagaagtggattttgcctctggggtcaaggccacaggcagctcagataatagayggcaacgccccaaaatccctgaatttctgatttcttgacagtggcctgacctttgttcccagggtccaaacattatagtggccaccccttccccacatga

SEQ ID NO: 35312 - DNA, 201 bp, Bos taurus
gcatgaagtgcctacagcagcagagatacaaaatgcctgtggcaacagagaccagtaggtggttgcaaggacaggtgcatcaagcactcccccagggaagytggcctcagctatggaatcctgggcagtggcaggctgtgcaggctccctgtgaggtgtgggccatgtgtggcatttgctcataggataatggcagcagca

SEQ ID NO: 35313 - DNA, 201 bp, Bos taurus
acgttgcaaaacagctctctacttgctgctctgggcttcaaagggatattatgttttaatgcactgctgtataattcatcagccctcacccctcccagtcraaattactgatggaaataagcaaacaccccaaatttgctatttccctttcccaatgccaacagtgaggaaatgttcccatgtaaatcaaagctgggtgtg

SEQ ID NO: 35314 - DNA, 201 bp, Bos taurus
gtcccaacggatctgagagcagcatgtgcccgatgccccaggttctctcaggagcagcatcaggcccttctagggacttattatatagcctataaggcctkcagggtagagcccagctctaaggaagagttccgtggaaagagaagcctggcaacctaatctcatccagagtaaggagggtggctacacaacacgatgacg

SEQ ID NO: 35315 - DNA, 201 bp, Bos taurus
tcagccttcaaagaactgaagagagttagggcctttgctctggattagaacattcacaccttggctactatttgatgcaagatgcctaacttttggcccayctaggctttcaacatgccttcctcactaaatgtaaacattcttggtttttttatttaaagtgagagacttgtgactcttccttagaggccactgtagggc

SEQ ID NO: 35316 - DNA, 201 bp, Bos taurus
atgtagaaaaatgtaaaaagtaacctgggaagcagtaggtgatagaagactgggagacttgatgtgatgttagcacaagtaagaaatgcacgcagtgggtmagagtttgaactagggccatgactgctaatggtaagagaaatggacctggtatactttagaggaaaaggatctggggtttgacatttgaatggaatgaaa

SEQ ID NO: 35317 - DNA, 201 bp, Bos taurus
ataaacacaaaatgtaggacattatacctgatctcttaaaaaaagacaatgttgtaaaacaattggcgggggaccactctagacttaaagagaataaagartcatgagcaccacaagcagtgcacaaatctggattgtatctttctctgggggaaaaaaacagctataaaagatattttaaggactattggagaaatttga

SEQ ID NO: 35318 - DNA, 201 bp, Bos taurus
aaagcttaagatattctcaaagtgagagggtttatttgaattcttaaattaagctactgatccagtttccatttttacagtctgtgattgtggctaattgkggatagccaaaattgcatctcattgtttttagatgaaatttctttgattactggtgagagtaagcactttaaaatacatttttattgttattggcatttt

SEQ ID NO: 35319 - DNA, 201 bp, Bos taurus
tttcttttagaaacttgaagcctgaggtccaggcaggctacaaagctggttggagacaacattcaggtaggattgggttcttttggttgaggccaaatgcyctttctacttgttttagtctgttctggcatctgtaaaagagtatcatagacaaggttacttggaaagaacagaaatttatttctcatgattctggaagcc

SEQ ID NO: 35320 - DNA, 201 bp, Bos taurus
tgtaagataatctccctcttgagcgagctccagactgctcggacacatagatacctaggcatagttaaaccctacaaatggccaatatgcatattaaaaartaacttcagtttcactactaataagaagttgtttgtttaattggcaatgattcaaaagaaaacatgccaactgttagcaaggccatgatgaaactggagc

SEQ ID NO: 35321 - DNA, 201 bp, Bos taurus
atgatctccaattcctactagactataagcaccttgaaggaagggctttgtctatttccctcacttttagggcattgctgccaagaacagagcctggaatmtaaacaggtgatcttggagatttttgtggtatatctggggactctcctgtggcctgctaacttttctccaccccagtgaaattcgtgagtaaaaataaga

SEQ ID NO: 35322 - DNA, 201 bp, Bos taurus
agagaagtaaccattaaattgggaatgtggtgatcattgagggccttgaaataggcagtttcagtggaattgttgagtcaaaagtcactgcaaaatgagcyaaaaggtgaggggtttcaattttaaattgagagggaaagacattttagccccttttcttgcaaaaagcacccacaatcaggagaaggtgagacaaaacca

SEQ ID NO: 35323 - DNA, 201 bp, Bos taurus
tgtcaggggcacgtcagagtcagagagcgggtgatggtctaatggcccctttggctccaacagctggaatctcagctgacctgggctgttctctttctacycttaaaagttttgcattgcagtggccagtcaatggatcaagtgaaatgacaaggcagtggtttatccagcatctttaatcccagcatttaaagagctgtt

SEQ ID NO: 35324 - DNA, 201 bp, Bos taurus
gctaagctcgtttcctgtgtttcctgcggctgaggcagttgtgctggtggttccatacttcctgaaggtctccagctagtgaatggcagatacacagacayagcacttgaacccagacacagcacttgaacccaagatggcctgactccagaatgactaaactcaactgtcaaccagcctcaggtcttcattcagctggca

SEQ ID NO: 35325 - DNA, 201 bp, Bos taurus
cctcctgataatagtagtgacataatataataacagctattactatctccgtcttacaagtgagtgacttgagagccaagaaggttaataagcaggggaartgagattcaagtccaagaaatccactccagggcttggggtttccaaccacaggactacgctgcttctcactaaagggacagaatagcagacattcctttc

SEQ ID NO: 35326 - DNA, 201 bp, Bos taurus
ttaacatcctcatttagttactctgtgagggtgccagcatccataataatgaaattactttgattatcttccatagagtgtccgtgggcagttagcagctycgtaaggagcacagtacagattttctgccagtttatacttagggttggagaaggcaatggcaccccactccagtactcttgcctggaaaatcccacggac

SEQ ID NO: 35327 - DNA, 201 bp, Bos taurus
tcctcttggctcctctcctccagtgaggcccagcccatccacaggccgctgaggacctgtgttaggtccatggaaagagtccagaggccaaggcagcttarcacaaggaagagatgatcagaaaagaaatgcaaagcattcaggagcacaagagaacaggcccaacaagcagtgagcatcaacgctacctccagaagcgtg

SEQ ID NO: 35328 - DNA, 201 bp, Bos taurus
cattccccacattggaactactctcccaggtgggtggggctgaggcccattccagtaatggagcacatcttcctagaatcagggtgaaggcctcagcaagkgggggcaggacactctgagagccagatccacgctcactgcccacgcccgggggatcatggctccggatcacaggagctggagcagcaggtggctaatcag

SEQ ID NO: 35329 - DNA, 201 bp, Bos taurus
catgtgactgaggccattgtggactgtccagtgggtccagagccctggtcagcaccatgtgaagcagaagaaatgcctgggcaatgcacagaaccacgagwgagagtacatgttgttactgtaagtctctagggcttaggagatttgttacccagcaatagaaaacccaagcatggtcccctgaaatgccagggaaaattc

SEQ ID NO: 35330 - DNA, 201 bp, Bos taurus
tggaaatccttttgagaaagaaactgggtagataacaaccaaccagtcccctaacagagttttcacactaatagcctactattggagttggccccaaatcwctcttgttcccaaatttatgctattcctttcttttgtatttttagttttttatttatatgatcagttcagttcagtggctcagttgtatccgactctttg

SEQ ID NO: 35331 - DNA, 201 bp, Bos taurus
cccagtgaggccctggtgatgggctcatatccgggcagctctctggagctccttgacgcacactgggatctccccagggcaagtgagagcagcatccatgrgtaagcgcctgtgtttgcccacaccaaatttatgctcctatctcccagggacccctgtgtcgttcctaacagatgtatttgctcatggcagaaatagaaa

SEQ ID NO: 35332 - DNA, 201 bp, Bos taurus
attccagaggagcaaaagcccatccctttgagagggatatgagcaaagtagggaagcaggagagaacgtggcaagttctgggaatggcgagacattcattktgccatgaacaaaaagctcatgttatgatctacttaatgtattcattctgactttgaaatttccataaagatagcttgtcatgtttctctgtgtaggaaa

SEQ ID NO: 35333 - DNA, 201 bp, Bos taurus
tcctctgaatctttcctgtgcttcctgatctcaaggcaatggaagtagtcagaacccataaggaaaagctgaaggggaaataagagtaggggccagtggargttcatgggtgtggttcacagtaaattctttttcctgctacaggatttgttttcagtctcatctgctttctttctaggtcctagcctcatggcctgcaca

SEQ ID NO: 35334 - DNA, 201 bp, Bos taurus
gtggggtgacttggccgaccacccagccagtgcaaaagctagatctcaagccaggatccctggactcaagctagtgctcttcctcggagccatgctgcttrtccaggtcagctcccggccccagccctcatgcggcagctgctcccccggctggcgcagagcagctgcataacagacaagggccctggctctcagcagagc

SEQ ID NO: 35335 - DNA, 201 bp, Bos taurus
cttgctttggggagccttgaagaagcagagacagactccatggtagctctgcaatacccagctgggtggtccatccctggccaggacatcgtggtgggccyggcaggaagcagtttccctctggctcccatggggtaacgctgacatctgaagtaagtcagagcagcatggtggccccaggcagctgcctgcctcctgccc

SEQ ID NO: 35336 - DNA, 201 bp, Bos taurus
taggcataactccttgccagggtaattgtgcagatggccatcgccctagggagcatagagcagggcaagtcagaatgtgggcctggggggtgcatggagcraagatccatgagccactggcagaatgaagcttgggttctacctccgatacagtgtgtgaccttggaagtgtgccttccctctgctttagggcctcatctg

SEQ ID NO: 35337 - DNA, 201 bp, Bos taurus
agctaggccttggtctcttccttccccaggccaggtgttcaatacgttttccattaacacactcctgcccagacgctggtgctgagctgtactctggcccrcagcctcactgaggtcaccctgcctgttgccaggtggtctgcaccagcctcccccatgtccctgctctgccctgctttgtcttgtctctgccctggtgac

SEQ ID NO: 35338 - DNA, 201 bp, Bos taurus
tcatggggctgagctgtgagctcgtctgggatgctacagcagggtctcagtggtcaccaagagcagacctgggaatagttggctaatctagagaggttgcraaggccattttagggaacagttcccctttggttctctgaacctactctaccgtgtgaagaagagcccaccttgcaatgtaggtgagaagcccagatgctg

SEQ ID NO: 35339 - DNA, 201 bp, Bos taurus
gcaccaggaggcctcagtccgctagcctgaactccacccataacaccctgtacggtttctgccaagtctgtcatctgtcacctgtgttgaagggactagcycaaggcctcctacacaaagttcctcagcactggctgggactcccctctggctcagccagtccaagaaccagacaggggcagagccggaggcgcaggggac

SEQ ID NO: 35340 - DNA, 201 bp, Bos taurus
agctcggaacaaggggcctttagtgctacccagcttcatcagatcagagaggtcccttcagtccagaaattgctaacttgaggaaatgacttttctgaackctgtagggcctcaggttcagaaaggtctaggaagcagggtttgctttcctgcagacatggatgtggcagggcctatcccagaaactcctggcgtgagggg

SEQ ID NO: 35341 - DNA, 201 bp, Bos taurus
tcagaccacttggccacaactggataatcacacagggtaccggggtgctttagaacaggaagatgaaaccactggtccatctgaaaattccccaggaagtrgcctacaaagtccactgcctggctcctacccgggtagaggccgagttacattaaacccttcccatctcccgatcacctgacctgtccccaggaggccagc

SEQ ID NO: 35342 - DNA, 201 bp, Bos taurus
ccaaacattgggaagtcactattccctgtcctcaagatatacaggtcatcactgatgtttaacaacagctggccaatagtcgcatgcgattctggttaatrttggaagttcgtccgttcttgaacattatctctagcatattcgacatgagccatccacagacaagccactatgcagtgactctctacctattccccacta

SEQ ID NO: 35343 - DNA, 201 bp, Bos taurus
tgcttttttggctacaccccaagctgaggtaccattagatcaatgtcactcaaactcctggagagccacattcccacagcaaaaagtcccaaactaagttmtttcgaaaagcattcctatcagtgatgaggcagtagatgccctcaagccaatcatccatgtaatctggcatttcaggagcttcatttgcccagccaaaaa

SEQ ID NO: 35344 - DNA, 201 bp, Bos taurus
cccagcttgtggaggagagaaaggtacagcaaccacagtggaagagctaacctttcacaggtgaggctagagttatctggatgggcaggcagcctgacccrggcggtcatttggttggggtccagcagtgtttcctctgttatctgccaggcagttttctgttgaggagctggaggacctggggcatcaggaatgggcagg

SEQ ID NO: 35345 - DNA, 201 bp, Bos taurus
aaacaaacctcggtttggcccaagggccccccactataacaaatccgagactgggagtcagacagactacaggaaataggagaaaaggcgggggcggagcrgggccgtgggggcccggcctgaggcagcctgcaacagagaaaagagaggaatcagggttgcaaactcagcccttcttctggtcttttagccaggggccgg

SEQ ID NO: 35346 - DNA, 201 bp, Bos taurus
acaaaaaggagactgtgctcggtccctcagtctcatgacagccccaggtcatcaacccccaaccttctgagaactgtccttatgggcccatgagcaccacrccctctgacatcagagcagaaccccctctgcctgccctgtctgggttaacaacactcctgttctcccaggcagaagcccaggagtgactatttgaccctg

SEQ ID NO: 35347 - DNA, 201 bp, Bos taurus
ccttccttgatcccacccacctaaacaaatccgggctcctggagccttttgttcatcattctccattccacaaacattcatccattcagccagcagacacrttttgagcccttaatataggcagtgctctaagttctagaataatagctatgtctgtgttgtacttaagcagcactctgtcatttacaaagtaatttctct

SEQ ID NO: 35348 - DNA, 201 bp, Bos taurus
cagcctctgggctatgaatagatgaggctggggccccggaggagtctaatgactcaacagctagagaggttaagctttcccagaaaagtgtttccgtttgygtttgatgaacttagggcccaacaaaggaagggtttcctgtctggaagactagggatgaaggagctggaggaacccttgcagttcctggaggctgtgact

SEQ ID NO: 35349 - DNA, 201 bp, Bos taurus
aggagagctgttgtctcagcctcactctgggcccatcccacatggcaagctgtgtctgcaatcccagagctgttggcacagggagcacggactcaacctcyccaccaggctcaggccaccaaggaccatcgcagcccccaagctgtaccctccccagtgagagctctgcccttgccttctctgcctcctggctgcgtgact

SEQ ID NO: 35350 - DNA, 201 bp, Bos taurus
cctcctccctctccttaggcccatcttttctcctcaactgtcgaatccctctctcttcccctcggaaagctccagaatcagctttaggcctctggaccttmcagccactcccactctcactcttcctcctgctcctccctgtctgtctgtctgtcgatccgtctctctgtccaggcaggctcctccagggccgccgtgggc

SEQ ID NO: 35351 - DNA, 201 bp, Bos taurus
gtgcctgagctgtggaaattctctggccgccctggaaatcacagagcctcccaggctgggcaggcttgtccctgagctcactgcgcatgcgggcaaggccyttcctgaagcaggctgtggctgctgcagctaagagacagtcaggagctgacttgcccttggggagcctgccagggcccctctccccagggcacacaggaa

SEQ ID NO: 35352 - DNA, 201 bp, Bos taurus
tgaccccaccggtggcccttttagctactccactggctaaaaggaaattggaagggtcaaggtcctgcttccaaagtcttggggcccaactccaatcaccmcaggaaggctgggcagggaggcatgtagagcctctctcgggagtgggcacgggggacctctctggctctctctgcctcaaggccacttccggccaatcag

SEQ ID NO: 35353 - DNA, 201 bp, Bos taurus
agaagagtgtccctccagcagggcctgcccacattgcaagaagcaaaaagcagacagtgtgaaaaagcagctgagcaggctgggtcctgaaagcagaaacycagctggccagggacagcttcttaaaaagttctaaatgaggggtggcgattacattctctaaatcagaccctcagcctctggaggggtggctctgttact

SEQ ID NO: 35354 - DNA, 201 bp, Bos taurus
tcgtgtgttctctccccccagaagaagttaaagcagcttcactttgtttcctttcatctccctatcagtcctcagtagtctcaaagtgaatctcatggccrttctcctttggttttccttccgtctgtttttctttttccataaggagtctctttactctttctagtttggccgtttcatttctgcttttgtctttattat

SEQ ID NO: 35355 - DNA, 201 bp, Bos taurus
aagctggttttacataaatgtaatgggtccaagcccttaacgtcagcaagatataatagctacaacaacaacaaaaataacaataactatttttatacccrttatgggccttggttcggatgctggctccaccactcaccggggcagaatgggtatatttgacaagttatttaacctcccccagcttcaattttctccttt

SEQ ID NO: 35356 - DNA, 201 bp, Bos taurus
cacgtggagctgccacgggggcaagttttcagggactcctgggtctacttggcttttatccttgtcaagacttcccgagaggccacacagaagctgcagcmgcaacctagagatctttgcattgcatccgattctgaggtcccgggagaggctatgggtccagagtccggccacgcccccctcagtgccccagtccagccc

SEQ ID NO: 35357 - DNA, 201 bp, Bos taurus
gcttctctggggaccacctgaggaccccagtcagaccagtagctcagccagggccagcagctctgggctgagggggcgatagagcccaggcctctgcacayaccccaagaccccctgccctggatgatgccagaacaacgtgtcagtaacaccccaagaagggccactcatgactcccaaacacacctccaagggatgttc

SEQ ID NO: 35358 - DNA, 201 bp, Bos taurus
ggccacctcttgataagtgttgtgtgttttctcggccatttatttggactagagttcttatgcaaaggaactggcaactctataattttcaaaagatataygaggagggcctagtttggtttcttggtccccagctcccctcagctgtgaaaaggattcagttggctccgtggctgtcttcatggtctaattggatgctgt

SEQ ID NO: 35359 - DNA, 201 bp, Bos taurus
gcctcacctgagagagccaaaggcaaagggtacatggagaggctaccattcaaaagtacctgctatgctttgtccacaagtgatgcttaggtaattgggcrtccattggcctaaaaaagaaaaggacgaaggaaaaagaatagaaggactttgatccaaacttcacatcttattaaaaaaaaaaaaaaagaaaaatggatc

SEQ ID NO: 35360 - DNA, 201 bp, Bos taurus
cccacctgcttcacataaaaggcagtacattgtacacgttaaaaggataaactctggtggtgtgctgcccaagcacatgttggggctctgccactccctcrctgagggcctttggataggttacttaacctctctgaacttcagtttcctgaccagaatgtgaagaacaatagagtgtatccactattgttccttatttta

SEQ ID NO: 35361 - DNA, 201 bp, Bos taurus
gtaattagcctccaattaaataaacttataataaaaaaaccaactttttgataaaaagtatctacttaacccagaaagaaatgtattgtgagaaagtcagygtgactgcagacctccttactaaattaaccggtaatgtccatttctcataaaaaggtttatattttatttatacttgatagttcagtagatctaacataa

SEQ ID NO: 35362 - DNA, 201 bp, Bos taurus
gttatgttacagaggagttagaagtttgtacacgaaatggtaaaagcacaaaggactctgatctattctgaaaatggagtcatgaaaatttcaagtcttgkgttatccttgaggatccaggtctcagaggaggaatgggaagtgtgagtggctgatcacagctaaaagctgccttggatgccctttttaatatttttaagc

SEQ ID NO: 35363 - DNA, 201 bp, Bos taurus
ataaatatttcttaaatgacaataatcaaataatggagatctagaattggtggtacattttcaaaattgctatttgttaattgtatagtgggcttgaattraattttaatgggcttgaattgaaagtagtccaaagtgagtgtttttttccatagtaaagtatgttctaatcattaccacagtagttcatatttggtaatg

SEQ ID NO: 35364 - DNA, 201 bp, Bos taurus
acagagcagagttagaatccaaattccattatggactagctagggaacactgggcaatttaaataagaataatgatagtgccatttctaaaggccattgtragcaaaaaatgcatgtagttgctttgtgttatttctgtcacacagaaagcacccaataaatgctaacattcattgtcaaaatgatccttgggcctccatg

SEQ ID NO: 35365 - DNA, 201 bp, Bos taurus
ttcctactcttctggaagatattatatcacttactctcttctaaaaataatcctatagacctcccctttctctatgtagtgccagtgtcttttattttacygagaaaataaaagtgattagaaaacatttcaggaacttctattaatacatctgaccatctacctacagccttgctccagtgatctttcttctctgatgtt

SEQ ID NO: 35366 - DNA, 201 bp, Bos taurus
caaacttctcagatagccttcttacattagtgaaacaatgcactgaaatccaagaggtaattcatcttggtcaccctgtcttctgcagagcactccagccygaaggttaatggaaaagaaggctgtgtctgccatcttggatctcattccatttcaattttctggtcacaacaccatgattttctagccaagaggggtgaa

SEQ ID NO: 35367 - DNA, 201 bp, Bos taurus
gcttcaggcaaccagaagcttctctggccctcacagcaaagtggtgcagtttgtaagaggcatgctactatttccacgtgatagatgagattacagagatrtgaaaaggatatgcccattcactgagcacaacttctgggaacaaactatgtaacaggcattactctaagttcttcagatacagtcatggccaaaacagtg

SEQ ID NO: 35368 - DNA, 201 bp, Bos taurus
agaattgggcgagaggaaatgatgaatacagatgtgttgcaacacaggctatatagctagtcctgtggggagctctgtagctagaatggccctttggtgaygcctccaatttagacaagggagttgagccttcgtgcatccccattcaccaatcattggttttgtattggccctggagaaaatgagtaaccatgggtatgg

SEQ ID NO: 35369 - DNA, 201 bp, Bos taurus
tggaggccagcggggcttttcaagtctccaaaacccatggcgacaactaatctagaactgggaggcagtggaggaaaagaggcgtgcaactggtcagcgcygagcactaagaggaaaaaaggccttttgtaatatttcaaacttcctggtttatctgatgaccctcaacccttctagaagcctcctcctagaatcacattc

SEQ ID NO: 35370 - DNA, 201 bp, Bos taurus
ctcaggcatcccattcaaccttctcaactagatgcttcatgaagtgttgctgagaccaattgcatcagatcgctgctaaaatacagatgtctgggccctgycacagacctactaaaccagaatcttcaaaggcagtgctcaaggactctgcatttgttttaaaactccctaggtaatccttagaaacaatgaggttggcaa

SEQ ID NO: 35371 - DNA, 201 bp, Bos taurus
ctaaacagtcacaaagagtcagagtcggacacgactgagctactttcacacgtgattatgccagaaaggttaatttactaattttcaaattaaaaaataayggccataaagtttggccaagttcagaattattttattaagtagcttccccaggttggtggcctgaataaattaaggtgatggagacctcccttttgttgc

SEQ ID NO: 35372 - DNA, 201 bp, Bos taurus
gattttttgctcttcattatgggccatccactttgaagaattgtgttctgccagcttcctctatgacatccaaggcacaagtataatctcttggtttctcytttggccctgtttgatctccactgcatttcctcatagattgtggttcaaggttatagatgtttcctttttttgttaaagatggagtttatatgtctgact

SEQ ID NO: 35373 - DNA, 201 bp, Bos taurus
gtgcggcggggtgggggagggtcctgggagcagtgcctgcatcatctggtggctggttagacatgcagactctcaggccttgctggatcagcatctgtgtrttgacaagatcaccgggggaactgggaaggcacatcacagttccggaagtttggtctggggtataggtgggcagactacacccatgggccaaagcctacc

SEQ ID NO: 35374 - DNA, 201 bp, Bos taurus
tgggacttgagcatccacttctgccgggccaagatggggctgaacgtccccaggggttgtcaggggatgaaacaagctccttggcccagagcagagctccraatgtggcagctgttaacttcttgaggggctgaaggaaaagtcacctgaggaagctggctcgtctagggtgggggtcccctgagaagccattctgcagag

SEQ ID NO: 35375 - DNA, 201 bp, Bos taurus
cctatgcaagggggccgtggggtcctcaaatctcaggctacactgtgggctaaactttagagcagccaagaaggcctcttggaggaggcctcttgagtctytttcctgaagctgcaaacttgggacaccatcccactggtgtggaagagccactggagggaggcccaactcacccctccctctctccaccacctccccccg

SEQ ID NO: 35376 - DNA, 201 bp, Bos taurus
ttcaagccaagaagactgttactctccacgatgcccaaatggccaggatttccctctgaaaaaccataaaaagctgggagaaccccaccctatccaggcaygtttatattcagggatatgcctctggctctccttttaatattcagttggcctctccttcaagggcaatagaatgcatgagatcacaacagccttggcttt

SEQ ID NO: 35377 - DNA, 201 bp, Bos taurus
cctgactcttcttagctgggtttccgcacttggaaccaggttgggaatgtcctctctctatcaaaattgctggaacttgtgaatattactttacctggccmaaaaaaaaaaaaaatggagatacgtcttctgcagatttggagatgcgattcagttaagctttttgagatggggagcttatcctggatcatccacgtaggc

SEQ ID NO: 35378 - DNA, 201 bp, Bos taurus
tccttattacttgagggtgagaagttaatttcaagaccctgcagagattaacagactcctagtgaagagagggaccaaggccaaggtcaggacaggacacyggctcctggactctgggactgaccgccccatctcctttagatcaggctcacccccagtctgtacaatgtatctggtgaattggacagtgctccctgtttg

SEQ ID NO: 35379 - DNA, 201 bp, Bos taurus
ggggagcctggtgggctgccatctatggggttgcacagagtcggacacgactgaagtgacttagcagcagcagcagcaaggccatctcacattctttctckggagttgctaagataagcagggtagatgtgcatgtgtccattttatggatgaggaaacggaggcccaggctggtagaatgacttggcaaaatgatgtagg

SEQ ID NO: 35380 - DNA, 201 bp, Bos taurus
gggatagaacttggtgccgtcaatgtggaagacagacatattccttttcatcactgagtgaccaggagaggtgacatggccacagccagtccagtgggatrgggcaaggagagaacaggggaccttcggagccatggcagggggataagtgaaggacacctttgtttttagcctagttgtgtgggcctgggtggaggtggc

SEQ ID NO: 35381 - DNA, 201 bp, Bos taurus
tgacagattctttcactattaagaatgtgtagacttcagagacacttttagcctattcctcaatgtccattgaactactatttgtttaaaagagaaaaatrcattctctattctttcagcaagatcatgctttcattcattcacttacccttcaaacccactattcactacttattacatggtagatataaaggaatgaat

SEQ ID NO: 35382 - DNA, 201 bp, Bos taurus
cccctaagaaagcgcacccctgcctggccactgtgcaaaaacacatgatgtcaacaaatcagcatttgatgctgaagctccactgactgagtatgtggaaygggaagggtggaaaggtaggaggaaccattctaaaagcctgtgctctaaaaactattttttgtggtgttaatagctgtttcacaaggaaaaggaaatcta

SEQ ID NO: 35383 - DNA, 201 bp, Bos taurus
cctttaactgtaatcccagttaaggaaaggactgaaatacctttccttaactattacccaattatacatcccacatgaacttgttttctttcagtttaaayaatttctagaaatccataaaaatgaaaatcgatgcataacttgattatgttaaccacatgctgataaagggaagtgaaaaaactcaaatggtcatttcac

SEQ ID NO: 35384 - DNA, 201 bp, Bos taurus
agactcacgtccatcgagtcagtgatgccatccagccatctcatcctctgtcgtccccctctcctcctgcccccaaacacacacatacagacatatacatrtacacaatatcctctcaaggtgtcatattttgaattttctaccatgttcaagaatattttatggcttttcaagtagcctaaaaccaaagcaaatcctgag

SEQ ID NO: 35385 - DNA, 201 bp, Bos taurus
gagggacaaggattcaaggcctggctagccacagccaatgtctgatcttggaagaagagcatccctgagaatgggggtaacagaggtcagaccatgcaccrctgaggactagggctttagtcaagtccaccgctggagttttcattacattagtcatagattctcatttgcttaagcgagtttgaattagattttctgtca

SEQ ID NO: 35386 - DNA, 201 bp, Bos taurus
tgcctggtgggataggtccttgggtgctccaaggacattccaaagcaacacaggaactgctgttgagaatgatacaacaaatccaaggaaatgaaggaagyggccacagggtagggacaggaatttcaaagaacgagaagacagaattctgcaaggctatctggtcccactggaacaaatgaaccccagtggctgggactc

SEQ ID NO: 35387 - DNA, 201 bp, Bos taurus
ttctccagtaaaagtcctcagcattgttggatgtgctctgggtcccagaatggaaattattgttccttcttggtatttaaaatacacacaccacacaaacrgaaatcaagaccctagcacttctctggcacctcttgctccttttaactagagctctttatgatggagacacactattggcacctccagccttgttaacag

SEQ ID NO: 35388 - DNA, 201 bp, Bos taurus
ttctgaactaccagagaagcctgaatcctcaaatcatatagtctaaattcattataatttgtgaatacagaacaaagggtagtgaagtaaaacttttgacyaagtgttactaattaaatatttgcaacatgtcagacatttcatttatagaaaaatacagtattgaagtatttatataaaacaattttaaatataaaatta

SEQ ID NO: 35389 - DNA, 201 bp, Bos taurus
cttttattgataatgattgggttgtttccagttaggtgcattttgaaaaatgcaggtattaatatcctatgagtatgagtatatgtcctggtgcacatgtrcaagatgactctaatgcagggtgtttcaaagtgaagtgttttcatcagcaatatcattatctgggaattcattagaaatgcaatttccctggtcacatcc

SEQ ID NO: 35390 - DNA, 201 bp, Bos taurus
aaatcgatccctggtgctaaaaaggttgggcaccattctactccattgacagaccctaggacagaccttgtctcctggccattgcacatgctgacccctcrcagtgtttacctgggtgatgatcaacgagccttctcttagctcagacatctcggcctccctgtgtgccccccaggactcactctggcttataggcttggc

SEQ ID NO: 35391 - DNA, 201 bp, Bos taurus
taaagtcaggtcttgtacaactagggacagcccctctgccccagtacctgctgaaattattcacgctggtcgattctaagtctgctcaccctgccttatcrtggctttcctttagaaaccaagataagggctgtgggtcatgttctccccctagctccttcctcatcctgactggtcctggtgctcctcttggttgccttg

SEQ ID NO: 35392 - DNA, 201 bp, Bos taurus
cagagggacctggaaggccttgtctctggagacctttcaggaaagaaaagagcattctccctggtagggagtttcccttgcagagctccacgctggtctcygaggggcctgggctgcttctgaggcagagaaagaacacctaggaaatcagctaaaacaggggtgagaagagggctgagcagaagccttgggtctcccatg

SEQ ID NO: 35393 - DNA, 201 bp, Bos taurus
cttccaagaggcatctgtttactctgcttaggaatcaaatggccctaagtagaagcagccagcagccccactgtgagcctgtctccttgccgaggggaaawggagagggtctacgcaggcccatgagctgcctgcagggactctatgcatagcagtgacaagttctgaaggatccaaaatggaacaagtaccacttcacgg

SEQ ID NO: 35394 - DNA, 201 bp, Bos taurus
acttatctcttgcaaaccacctccccaaagcctgctgaaattcttggggttgctgaaaggcagaagaaaattgatttcgccttgcatctcacagcaccccrgctgtgtttaacacaggggtatggctgtgtgtgttctcccgatatgcattgtaccatgggtttgtctgcttcagccataaaaaggctctgttacttctcc

SEQ ID NO: 35395 - DNA, 201 bp, Bos taurus
ggagcacagagaaatcaaggctctttgccatcagatgcacacctggatcaagtccggtctgcggcctctctgagtctgggcttcttgattatgtggactgrtatattcctttttagacgtaagccagtttgagtcgcatttgttaccacttgcaacctgatgcatatgtaagttactcactttctcttcatggtggagcag

SEQ ID NO: 35396 - DNA, 201 bp, Bos taurus
gaggccaggtagataataatgttgaatcaagtctgttgtaaattctgttcttttttggtatagtcattgttacttttcacttctgcagctttcagccttartcttggggccataatagaaaataatgggggttttggctggctggaaagctcatgacccttctaagaggataactactacctaattccagccgattatgtc

SEQ ID NO: 35397 - DNA, 201 bp, Bos taurus
aatctgaagtgaatacagacacaaaaagagggaagagagtatttattttatcatttgtgacacaggtaagaaataagcaccctaaaggcgtatcttcagakccaggccaggacaatccagagcttatcttccaggagtgtggtcctagctcactttgtttgcccgttgtctctggttttcctttcgctcctgcacaatctg

SEQ ID NO: 35398 - DNA, 201 bp, Bos taurus
cacaacggttgtaccaatttatattttgtatggggccgatattaatcattgatcactttggagagagaatttcatgattaataaccagactgaaaggtctragtggccttgaccttttgtcctgttgtcttataaaaatctttctaatctctgtttttcatttgagaattaattagaaagatagacttaaggaactcctct

SEQ ID NO: 35399 - DNA, 201 bp, Bos taurus
aggacacagcctaaacaaggcagatgcggcagagagcagcgcggacagaaatgctgtgtgtcactttctagacaggccatcgagctatcaccattccagtmgcagtccatcagtcagttctcagcttgctactcccctgtgcgttgctctcaagtacccaacccggaccctggcctcacatgatggaagggatcttaacag

SEQ ID NO: 35400 - DNA, 201 bp, Bos taurus
cacttacttaaccagcagctaaattaagagctggagttgaggtggttccttgtgtctgttcatgacaagctctgcgaggagaggcatgctgggttctagayggcagaggcctcagtgaagccaggattaaaccaagaaagaggctgagcttgtgcagttgctgagcttagcccgggagtccccgccatgaatggaatctgg

SEQ ID NO: 35401 - DNA, 201 bp, Bos taurus
cagggaggcctggcgtgctgcagtccacggggtcgcaaagaataagacatgactagcaactgaactgaactgatacctagcagaggaatcgctggatatgmagctctgctctcctatgtaggccaccctgaagcatagaaagttgaagtatagtaccctagggttcctgctcttggtttcctgcaaaggaaacgtttcagg

SEQ ID NO: 35402 - DNA, 201 bp, Bos taurus
cccaacacagaaatgcccagatggcctgctttgtcctctcccctcctcagccatcctctccccgctgcagggagtacttcactctgggtaccagcttgatyctttcctgactctagggcccattacccacacctagttcttggtgctttcgagctccaaaaggacagagacaatgtctgtttttctgcctgctgtgtcctc

SEQ ID NO: 35403 - DNA, 201 bp, Bos taurus
taaagataacatgcaagtgagaatacactgtatttaggaagctagacaatctctcaaacacgtttatatattccaactctcatggcccactattagaaaaraaattatatctgggatgtttcagaaatatctaaattatacatgttcagttcagttcagtcgctcagtcatgtccgactctttgcgaccccatgaatcgca

SEQ ID NO: 35404 - DNA, 201 bp, Bos taurus
cacatacacttggttcttagttggtcataatgtgggccataacctcctaagaatcccatgtaatacctttcattccactgtttctccatagaccagagaaytcctggccatttcataggtaagagaggtcctgattcagcttttaaccatggaatactcagtcccttgggaagattcccttgttttgaaatacacaattaa

SEQ ID NO: 35405 - DNA, 201 bp, Bos taurus
ataaatggcttaaaacaatactcgtgtattttctagtatgttcggcagatcagtgacctgggtgtggctcatctgctttggggcctctcacaaggctgccrttgagggttacagtcatctccaggttcaactggggcaggatctgcatccacgctcactcagtggctgtagacaggatttggctcctttaaggccgtgagt

SEQ ID NO: 35406 - DNA, 201 bp, Bos taurus
ttggaagtgtgcttgctgactcagagtgacatagaggtacatctaacaatcaaattaaatgcagttcagagttaaccatacactgaagtaataagcaggaygtatttattttccatttcctttctgtggccagagattcaaaggataaagtcattaaaaatctttcagatgtttgctttctctggtgaaatgagcgtgtgc

SEQ ID NO: 35407 - DNA, 201 bp, Bos taurus
gcccagtacatactccatggaacttttagtggcttgagatggaactgggcaagatctgtatctatgtctgtgacaaaattgatccaaaaaaatattgcttmcatcactttataacatataagggaaaaagttatcttcagagtttgatagcaggaaaagtgtctttttgctgactaatgaatagagcttctcaggttgggg

SEQ ID NO: 35408 - DNA, 201 bp, Bos taurus
ggctgggagttcagccagatcaagtgggcttggcctggacgggaagtccgggggcctgaggtcagtggaatccagaagtcaccaaaggccattcagtgggrtgggtccaaacaggagaaggatcaagggcgaaaggttagctgcagccaggtctgaccttgctctggccgctactgcaaagctacccttggctgccagtcc

SEQ ID NO: 35409 - DNA, 201 bp, Bos taurus
cagaagagatgaagcaagagtgaaatggacagacgagaactggcctaaacaattccggaggcagaatgtgggtgagagtagtgtcttttaatgctctcacsccctggacttgagggagggggccaagctgggggtgtttcaggagctgggctcctatttgtccaggagtctctctggggctcaggcgaggaggccctgtcc

SEQ ID NO: 35410 - DNA, 201 bp, Bos taurus
acaaaatattgggggaaaagaggcccctgtaatagactttaatggaatcagatagcatagaacttcctgtcttcagaaggatattttttgaggaagatatktggcctttaaatctggcatttgtagtaataagtataaattaaaaggtgacaaaggggaaagtgtgattgacttgttctaggggagagagtggatgagtta

SEQ ID NO: 35411 - DNA, 201 bp, Bos taurus
cccctggccctgcctttttcgcagagaccccaataaaggctgtgtcctcggctctcccctcactcttctgcctcctgaccaccgtgggggttttcccatgyggcctcccactctgagaagctggaagtgtaataagcttggttctcctgagctctcctggggctgcacctgactgacgtcccatacgagagcacagaacac

SEQ ID NO: 35412 - DNA, 201 bp, Bos taurus
cttttcctgcgcttcttcactaaagagccactcgatggggtctcactgggaggggagacctgggctgatgtgttggtatccaggcctcttatccgatctgyggagttcctcttcagctgggactccatcctcgaggctccttccgacaggatcggggaggtggccaggtgcatggggatcacctcctgaagggcagcaaac

SEQ ID NO: 35413 - DNA, 201 bp, Bos taurus
gggcatattctttaccatctgaactaccagggaagcccttttaatcactataatgggtttaaatcactgttaacgattgtggggaaatgacttcagggtaygtttgcctccttaccatcatgccagcatccaaccacaatcatgacgtttacagctttcacacacatcattataaccaggcacgtgatatcccatgccttg

SEQ ID NO: 35414 - DNA, 201 bp, Bos taurus
ttcttcttttggctcagtgaccccaggctgcccactccagctcaggccatcagagaagggacatggatccacagcgacattctcctgagtcaccctgctgrgaacgttgcagggactccaggcctggtcactggtggcctcttacaggtgaggtcctaggggctgagtgatccagcagggccatgggccagctccggacag

SEQ ID NO: 35415 - DNA, 201 bp, Bos taurus
ttgaagaccaggtagaggggctggggcagcagaggcacctggccagacacaaggcccctcacccgggcctgcactgggcaggccactgcccattcactgcytctccatttctgggcaacttcctgagaccagcatcgggctccgagagtccatctccaacacttctggccaccagttctgaccaccaggcctctctcaacc

SEQ ID NO: 35416 - DNA, 201 bp, Bos taurus
catttaccaaaaaagtaaccgaaaacaaacaaggccgctcaagcgtgacctgccagtgaaacctttctaaatccttgtttggattcccactcgttcctctytcagggttttcagaaccgtggcccgagagcctgctatctgtttgtctgtcctcatcgcagccttcactcttgtccgcatctccaccttcacaaggacggc

SEQ ID NO: 35417 - DNA, 201 bp, Bos taurus
tgacggaagtcgatgctaacgagaggacctgatgcttcagcgtagttgcaggctgaggctctaggtggcgtaagcggcctgaggatgccagcagtcagccrcctggactctaggttctggtccaaggtcatggagacaacaactgttgaaatcaggactatggcctgcttctgactcgtcatctaggacccttcccacctc

SEQ ID NO: 35418 - DNA, 201 bp, Bos taurus
tctctgccacgtgctagggacacacagaacagacagacgtggccgtgggtgtcgcagtcccgtggatggagggagatcacatacagtcacctcatcgtaakgtgggacatgctcctgggggcccagggctgggagtgtcaggggcccggcccagtggaggagtgagggacagctgggtgaggggcaggcagagccctgagg

SEQ ID NO: 35419 - DNA, 201 bp, Bos taurus
tgccacgctgacctccaccctcacactcctaggcctcagcttgctgatcctgggttgttgtctgcctgccccaggacactatgaacccattcaaagcagtracccaggcttggccagctctgtgtctccagggtttgactccagggcttctgttaatgtttgtggaacaaggcagctcccgggatctagacaactatgaat

SEQ ID NO: 35420 - DNA, 201 bp, Bos taurus
cctaaggccaaagtcaagagtctgcctgcagccccagggccagccctcagggaaccagcacctcctccttcccttgcttctgtttccccatctgggtcaakatgggtcatctgggcatggccaggcctccgggagagtgcaacatacatgcagtgtgtatgttagaggtgggctggcaggagatgccgtgtgtaggggtga

SEQ ID NO: 35421 - DNA, 201 bp, Bos taurus
accctcagcactcacatgggctcagccccatcaggccatgctgggtggaataatgaatggttttggattcctcaaaccccacctgacagccagagtaccayggtgggggccctgggtgggttgtcttacatatgatcacggtttcctaattttccaccctgaggaacactacaggtccctctcttccggtggctggttgcc

SEQ ID NO: 35422 - DNA, 201 bp, Bos taurus
gatcttaggtccctgagcagggatggaacccacatccactgcattgcaaggcaattcttaaccaccggactaccaggcaagtcccgtgttacaccctcctyttagccagtggtactgcaaaggttgacttctgtgataagcagaacatgttaatggccacatttgcataggcttccttgccccctccccacctccctttct

SEQ ID NO: 35423 - DNA, 201 bp, Bos taurus
caactccagaccttcatcttcagaaccgaaccccagggaggcggagagacaacgtgactgtctaattctttatttactgaattacagactccaccgtcccycagcccccggccctgaggtgcttagtgatgagctttccgagccgctgagcggctctctgaagggacatctcctgagcagcactgtgagaccagcagcaga

SEQ ID NO: 35424 - DNA, 201 bp, Bos taurus
gatgaaggagtatccagcaggcagccgattatgtgaatatatgggtctggccctcactagacaagtctgggctggaaatccagatctgggagtcgtcatcrtacagatggtaattagagccttggggaagggtgagatcaccaatgagggcggacagaacaagatgaggttttaacgtaacagtaaaattcactgaatcat

SEQ ID NO: 35425 - DNA, 201 bp, Bos taurus
aacacattgttggattagacctgggtttcttatcacagcttttctgtgcctcctctgtaaaaattagctactacccatgagtcccttgcaagggatcctcrcatggtaaatacttattaaatttagtttcattgttttcctttcattgaacacattcatttcattaaacaggtgctgttttaagtcttgggattcagtagt

SEQ ID NO: 35426 - DNA, 201 bp, Bos taurus
acaggcagtggactggagtcttcttttggagcctgagatgctaaattacaggcttcttggagggatcctgcagcgcagaggcctgggaccattgagaacgmagaaagctctcaagtcccacccctgaggaccatgagcagagctcagtggtaagcagtggcaagtttccagcccggcctcatttatggacagtggtcacac

SEQ ID NO: 35427 - DNA, 201 bp, Bos taurus
acatggtccctcatggaggaggttccatgccagtgaacagaggggcagtgggcagtgactcccagcagtaaacgtgcccacccagggccagtgagggaccragtctgatctaaggtggagtcaggaaaaggagggcaagatgcctgaaccttgtccagggtcacctggccactagttaacagctgcaggccaccctctgcc

SEQ ID NO: 35428 - DNA, 201 bp, Bos taurus
ggttcttcccctgctccccacctgctggcccctccgtgtccttcagacccctgaatccacatccctgagagagacctgcaggtaactcaagaatctgaacmcctcctgtgggccaggcgctgtgctctgccagctggaaaccacagcaaggacaaaacagagaagaaatccctgccctccatctcaatctaaattataaat

SEQ ID NO: 35429 - DNA, 201 bp, Bos taurus
tcacatacatccagagatgcaatcacacttgactcattccttcattcgagttcctgtcgtgtatctgatcctgtgttggactctgataatccagtagtgcragcaaggcacccacagtccctgataccctagagctggcaatcgaaggtggaggacagactttggacatgaaggtatatacttcattgagttcaacaggtg

SEQ ID NO: 35430 - DNA, 201 bp, Bos taurus
tttcataaagagccagatagtaaatattttaggcttcgagggccttgtagatgctgctgcaactattcagctcaggtgttctgaggcaaaagcagccatamacagtatacatgtaaatggccatgagtgtggtcaaacaaaatttgatggacagaagcaaagcagggagcaagatttatcctacaggctttggtttgatta

SEQ ID NO: 35431 - DNA, 201 bp, Bos taurus
cactgcatcccaggagcacaaaaagacaccaaacaaacaaactaaccaggcacacatgtttaaaacctttgctcccgtttgctcacatcccattggcagarcgagtagctggccagtcccctagtcagtagggtaaaaagaatgctctgtttcaagaagtaggggggagtgactacttcctaaaccatgattcaatttatc

SEQ ID NO: 35432 - DNA, 201 bp, Bos taurus
tgtgcaaggcactaggaaactggccatgagggtgacagggttcttctggctcagagctcaccagctgatacacagaaactgcatgtctggccctctgatgraataggagccacttttcacaggcaaggatcccagccgcctttagtatgcatcgagtgtgtggccctgaacttgggcagtttacaaagcaatgctactgct

SEQ ID NO: 35433 - DNA, 201 bp, Bos taurus
gttggtaatggccccgggactgtttattgaaatgacttttattttccttctgctccatagtttcacctctaacataaatcaagcatccatgtatgtacagrttatttctgggtgtgcttttcaagtcccttgtgcccatcccaccctggtttaattactgtaaatgtataaaacattgtgacaataaagtaagcccacttc

SEQ ID NO: 35434 - DNA, 201 bp, Bos taurus
gatttagttggtgctgtatcgtgttctagtcatttctcgaagtgtgagtgcttcagaatatctatgctatttcaggtccgcttctttgacacgatcttctytttacaaactgagcttatcactatcgtggacgaagaaaagtttcctctccccttcagttggtctaatactcaaatcgacatgaaagagatcgacagaaga

SEQ ID NO: 35435 - DNA, 201 bp, Bos taurus
tgtgtccaaggagatttatggtttcctccaaagggccaacatgcttacacctttccaaaataagattctttcaaagcagccaatagttttagtgatggacmtgcaggacaaggggcccctgaatgctcaagcccttcggccagcaaggaccgtctgccctgtggtttgctggggtctcactgctcctggggaatctagtga

SEQ ID NO: 35436 - DNA, 201 bp, Bos taurus
agaaccaaagaaatgaggccaactggggaaaccagaaaactggaggaatattcagaccagttcacaaactgaaatcggggagttgagagaacactgcacakccctcccaggggcccccggatacttcccggtcaccgtgaacctcaaaccagctgcagcgtctgtggccaggacgacagacaaggatggtgggaaatccag

SEQ ID NO: 35437 - DNA, 201 bp, Bos taurus
gagagaggaacttggaactagatatttggaagtgatgctactaccctcgtgtgatttttttgttatattatatgctaacaatgacaacaaaactcctaaayatatatgttataaaaacttaacaaaaatacattaaaatattttctaaaatgaggtatattgctttgaaccccttggataaaaatataaaaatgataaaat

SEQ ID NO: 35438 - DNA, 201 bp, Bos taurus
caccagggtagtcccatctctgtgtttctgtcacaccaattcttggacctcatctggtgcttaatggatatttcttgaatgttgatggccaccagttacaygagcttttcttcaaaacactgctttctgggatcctttgttcccacctgcagagaaggacgctgtcactagatggggcttaaggccctttcaactctgtcc

SEQ ID NO: 35439 - DNA, 201 bp, Bos taurus
aactgcaggatcaggagatggcagagcacgctcccagacagagttggcttccaagcgttctcaaagttcgctttgaaaataaagctctaaggatgtcactrcataactgggatgacagtttctccaggtaaaagaatatttgtcattctgaaggcagattccttttctcttgacgaatctggaaactcagccttctcttag

SEQ ID NO: 35440 - DNA, 201 bp, Bos taurus
cccttcaatgccaaggacaagcacgcagagctccacggagacccagaggtttcagagggtggaggagttatccctatgatgcctggtgatagtgtttgagrcagggggccattgctcagaggagttcacagccaaagcactgacagtctcttaactgggggagaggatgagaagttgcaagattacaggaaacaagaattc

SEQ ID NO: 35441 - DNA, 201 bp, Bos taurus
tcaggccctgtaggtggtcagagagggaaaagtagatggacccacttgaggcaggagcgctgttcaggctgcatgctgcatttacatgcagctgtccactygacacatggcctcagaaatatagtgcaagaccttgggggagtgctctgacagagtgcgctttttttcctgcttaatttctctaaaatgcaatgggtggtt

SEQ ID NO: 35442 - DNA, 201 bp, Bos taurus
gagagcaccaagcagatgtaacaaagttggagccctcagacccctccctcccaccaaggtgtttgggtgcacggggctctcatggccaggagactccaagytcagattctgacttccctgcaatgctggaccagggtcttcagcaagtcagcccccaggcaggacaggcaacccctgctcccctgtacctggccggcatca

SEQ ID NO: 35443 - DNA, 201 bp, Bos taurus
cccatgggggtaattgaagggtgcttgttgggtgcttcctcagggttgtagggcggggactggacatcagtgtggggccttgacacactctggctccctcygtgtcctcacagtggagccctggcgtcaggaagcttgttcttaacaagcagatcgggtgaacctgatgaagttggggccacatcaccgtttctgaaatac

SEQ ID NO: 35444 - DNA, 201 bp, Bos taurus
aggcatgtgctttggtccagtgggctgtgtggcaggtggtggctcagggaaggaggagagtataaggaatacagggccatggaagaagcaggaggccagcrggagatgctgtgtgtgtacccggggggacacacggcaagtaacctgggggaagggagccagccagtaatgcaggtatttggggccaaagctcatcatggg

SEQ ID NO: 35445 - DNA, 201 bp, Bos taurus
tcctcctgtgactagtgcacggtcagatccagagtccagctgataagctgagtcctgacagatgaaagatggagcatgcaccatctggtggtgtgagtacmagctcagcctcttcattcttactctgtgtgaagataagcgtgccctggatgcagagaaggagggcacacccctgtgtcccagctttcaggctgcagtgcc

SEQ ID NO: 35446 - DNA, 201 bp, Bos taurus
ttaggatcctttggaacacctccatgttatggagatgaagttacaaagttaggacttcatttatgacagaagttacaaaggaaatggacaccactgctttmttgagccactggacacagtgtctaggtctcattagcagatgtttgtcctgttgaggaacatggccaggctgtacctttccaactttctgtgtttattatt

SEQ ID NO: 35447 - DNA, 201 bp, Bos taurus
gatgggagcctggtgttatccctttgttttttccctcttccaaaactaagaatagtttttgtatgtatgttcatgtttccagtcagaatgcacaaactacygtatttctcttttttcctcaagagaattaaaaataaactccagataaccaggaattggaggagcatacctggaaccgtagggatgagttaccgcccaccc

SEQ ID NO: 35448 - DNA, 201 bp, Bos taurus
tcattctaacctgaaaataggcctccttaaaactgtaaaggatcctacaaaaggatttcagtccaaagctgatggtgtgataacatgattaaatcattgaycttgctgagtaactgcaggccattaggaaagaaactactagtgaatggaatcagcaaaaccctttaattactgattaaagatacaagcaagtgacagggg

SEQ ID NO: 35449 - DNA, 201 bp, Bos taurus
gatgatctgaaataatatattctaatactttctaaattttgtccataaagaaatgacagggaagaaaacccttagaataccaaaaaattatctctgaggtyccaacatttctcacagtcaagtcataacaattaaacaacctaaaacaaagttacaaagattaaccaaccgaaaacaaagcaaactgaagtaacccaactc

SEQ ID NO: 35450 - DNA, 201 bp, Bos taurus
gctgctgctgggtctttgcagaggggattacagactccacccatgtaggccgctggaccagagtgcactgaaatcaatagacgtgctgcctgttctgtaartcttcacacacccacaagggaaaaagtcctggcacatcggacctttttcttgtgtaatcagacccgtggtccctggagagtgcatctgtgacaccattgt

SEQ ID NO: 35451 - DNA, 201 bp, Bos taurus
cctggtgagtgttcattatctgtttgtattcatctcttgctgacatttgtctgcattcatttcagcatttgtcatcacaaggaccattcagaatcaatacrttcatagacttccacttgcaaatatggcgatctttgtgtttaaactaagaaatatcttcctaattcagttggcctggaatacaatgttgggatgaaaggc

SEQ ID NO: 35452 - DNA, 201 bp, Bos taurus
cgccaaaggtcatgcagtctaccgaggaggtcatgacctttggaagaacggcctccacttataaatagctgtgtattgagtgaaatgaatggaaacccatytatattttggaaaatgtaattgggccgatggactatgaggagaggggccccggaagagaaggggaggaggtcgctgccgccaacgtgctgggtcagtgaa

SEQ ID NO: 35453 - DNA, 201 bp, Bos taurus
gtcgcttggccccttgggagcgattgattcccagccagcttgagacaggtttggtggagaacgtgacaggtactgtggggtgtgtgggggaaaggggggcrgggtaagtgccttgccaaggcccctgggctttgacttactgtgcttcccagggcttttcttgggatgaagagagtggttgctgaattaaagaggaagatc

SEQ ID NO: 35454 - DNA, 201 bp, Bos taurus
tgcagccaggcccttcccccgcccccgtcaggtttcctgggaggagggggctgaagggaatgaactttgtgcatctgactacccgtctgactacccttggrggcccccaagggctcatcagcacagcacctcctcctggtctgcccgtctgccccattagtgccctttgttggctaaggcaactcccgtggacagaaaagc

SEQ ID NO: 35455 - DNA, 201 bp, Bos taurus
ggtctggttgaagagccccagccagggccctttgtcctgctcagattccacttccaaaagaagtcagctgagttcttctgctaaacagcagggcgtctacygtggggttccaggcaggccgggggctgaccctgaagatataaagggagtccaactgtgactgtgctgcccgtggcagggggacaccagtggctccctgga

SEQ ID NO: 35456 - DNA, 201 bp, Bos taurus
gcaaaagactgatgcagggtaggccagagatgatgaggtctgagctgggaggacagacggaggacaaacaagagggatttgggagttctggggatggaggygcctgtctccgggaggccctgcctctgcacctggggtggggtccgttgggaccagtgttgcaaacagtccacctgcatccttcacaagcccctgcagcaa

SEQ ID NO: 35457 - DNA, 201 bp, Bos taurus
ttcttaaccactgggccaccagggaagtcccccttcactccttaaagacacacgaacagatgttgtcccctctcctgtctcgagatgctgctgtctggggrtatgatacctgagacagctgcggccatcctgagattaggaggggaacaaacctggggacaaagccaccaagctggggagggaagaacaaaaggacggaaa

SEQ ID NO: 35458 - DNA, 201 bp, Bos taurus
gcggcggatacaggtgaaggcctctctgacggtgtggcatttgatcagaggtctgaagtgatagagaaagccatggcaacagctgggaaaggagcatttcrggagcagcagcagaggccctgtaactactgcagtgatttcttacttgtgtcttatcacttactgaacttggaggtccttgaaggcaagggttacatctta

SEQ ID NO: 35459 - DNA, 201 bp, Bos taurus
ttcatagctttctggatcccaactatccttctgccttctcaacacaccagacttcaaaaaagtactggctgttctctagcacctggaactcactgttcccwgacctgtcttttggtcgcacctgcttacctttcagatcctgtctcatttagaaagctcttctctccatatctgcctagaaataccatcctgcaagtgcca

SEQ ID NO: 35460 - DNA, 201 bp, Bos taurus
acagtccatagggtcgcagagtcggacacaactgaagcgacttagcacacaccaagtcctggaattagactactgcagtggcctcccaacgatgctctccrggtccactctgtccccctacatttcatctgttaatcagcagccagagagctcctaaaaagtcaacctcagatcacgcctctgctgaagggcctccagtgg

SEQ ID NO: 35461 - DNA, 201 bp, Bos taurus
tgtccatccatcagtttccatcacttaaaagctcagaaacctttctgccttttatttccagatctgaaatgccagtcccctctgtttgagctcttgactgyggccatgttggccatctcctctgcagagtcctagttgttgtatctaatacctccagaaccttccttaacaggatgttggaggtcctcacctaaattcaaa

SEQ ID NO: 35462 - DNA, 201 bp, Bos taurus
gcagtcctgagagatgggtggtcttggtccctcatttaccacatagtgaaatgccatctacccactagaaaacccactttgcaacatttgagcagccatcrttgtccctactggtacaagattttcttctgtgaaataaatgattatgtcttttcctgcttttctgttgagttatttctcttttttaattgcagtacagat

SEQ ID NO: 35463 - DNA, 201 bp, Bos taurus
gatgataggggaacctggaggagatccagactggccaggaagttcccctttgccagcacagtgtggttgacattgattagcccccaaacacaatcagcaaygaaagcacacttagtgctggcctcctttgtatgtatactgaaatgcactagattatcccagtgcataatctctgaaaacatcattgacttttgttaatat

SEQ ID NO: 35464 - DNA, 201 bp, Bos taurus
agcccttaggggcctgaaaatcagatgtgatcacctccagaaagagcattcacttcctattctctgcatcaacacctctagattcaatataaagtggtgcrtctgactggccaagtcttggtcactcacccaagctctaattcccgagggaactggaaaaacaatactgctacttttattttccataaaaataagggaggt

SEQ ID NO: 35465 - DNA, 201 bp, Bos taurus
aagctgcagcagaccctgcagatagcagagatgctccccaagggggaggcagagttggtcagagggtgaccgtgctctccaaggcaaggcagagagaaaamatgaatgaggaacataataaatgtttgtcagaactgttgacaagcttttttcagaatctaaaaaaaggcttcagctttatctcaaagacagaatggcggc

SEQ ID NO: 35466 - DNA, 201 bp, Bos taurus
taggtattagctgagaggaaaatttactaaaatgatattactgatttggaaaagcccgctgtaaaaatacttttaggttgttagaaaatttgaatgagatytaggaattagatgagaggaaaatttagtgaaatgctaaggtagatactgttagttgaatacagcagactgtttaactatgtgagctcattttgaaaaaca

SEQ ID NO: 35467 - DNA, 201 bp, Bos taurus
aaacttggggagctgtagtttccatgaatcaggcgttttgtgtgagcctgtagtgatcacagagaagcgcactcatggccctttcacctcatttgctcacrctcagtggacggagcaggctgcggggaagagcagagtggtgatgaacgggtgtctgtccacccttcccagggtcagctgtgtctattagattatggtcgg

SEQ ID NO: 35468 - DNA, 201 bp, Bos taurus
tgattgccagcagaaccaacggatagaggattggaacttttagccccacccatcatgacttctggggaggaaagaatgactggaggctgaactagtcaccmatggccaatgatttaatccacggtgctgatgtaatgaagcctccatgaaaccccaaaagggtggggttcagagaactcacaaattagggcactagaaaac

SEQ ID NO: 35469 - DNA, 201 bp, Bos taurus
tggggcagtgaaggcgcctctcccgacccccatcatcggtcgttccacatgcaccacagggagagccctgagcacatggccgacaggtagtaagtgcttamtaagtattattttaaaaaacattaagcaagtgagctgaaaagttgttgtctaagaaggaaaaggcgtaggttagggtgtctttgaggcaggttgtatttg

SEQ ID NO: 35470 - DNA, 201 bp, Bos taurus
cccaggaatcaccctttcaaggggcattgaggcccatgtcgggtgggactgtgggttggagaggatgccaagaagtgaaaaacaacgaggtgacccagatrgggccagaaggcaaaggtgaggcctgaagcagtggaactgagaggggcagagtagggggaagaaggaaattcatctctcgtgctgggatgcagacgagtt

SEQ ID NO: 35471 - DNA, 201 bp, Bos taurus
gactcagccggggcttgatttcgggccgtgcaaacccctgttgcagggaggaaatggtcgttcgtgggtttggatgaaaggctcgacttaatggatttttwaaaaaatggatgatggagattgtggagctgcagcggagtgagggctgacggtggtcatatttggaaaacggcgtctctggtgttaataagcttggcgatc

SEQ ID NO: 35472 - DNA, 201 bp, Bos taurus
ccagtaacacgtttctagggacctgaagctgtttgtttggcccaggagagtcatgagaaactgtggttcccccaccaagtgggtctcctgtgcagctgagytccttagaaggcctgcggaagtgtctgcatcacattgcccaatgatttcatctttcttgtttgatttttcctaagtatctcacgtgtggggtgttcgttt

SEQ ID NO: 35473 - DNA, 201 bp, Bos taurus
ggctctggcttgccagctcgctcacgccacaggtcacctgctgctcagacagctgcagccccctgagctttaaatgatcacaaccgctatgcacagccctscagagggggctggacatggagggatgctgcaggcacggcacctaagcctgctggctgtggggtgaattcctgatgatgaggaaggcttggcacagggcgc

SEQ ID NO: 35474 - DNA, 201 bp, Bos taurus
agcatctcaaagagttggatatgaccgagcgactaaaccaccactacatataaagaaactgagattctcaatttctcagtcacccaaggccaggcagcaaktggagctcaacaggtacctggagctctaggtgaaccgatttgctgcagtccagaatgccccctccgggcccctccaccctcccgggtggcacacacatgg

SEQ ID NO: 35475 - DNA, 201 bp, Bos taurus
gttaggacttggtgctttcactgccaggccccaggttcaatccctggttggggaactaagatcctgcaaaccgggcagcatggccaaaaaaagagagagarggagactgtaagaagagtgggatccaggagctaaagagacagagggtgtttctgagacacaggatcgatcacttagacaagtgctgctgataggcccagg

SEQ ID NO: 35476 - DNA, 201 bp, Bos taurus
caggcctgccgccccctgtgatttctcagagcctttctttctccccagtggaacttgacttcctagggctaggcgggggccaacctgatgcagggttgtargggtggggagagctgaggcagagctcagatagtggttggaatgtcacttcctcctcctcctttgctccaggcaggccagtaactgtccttccaccatcaa

SEQ ID NO: 35477 - DNA, 201 bp, Bos taurus
aaaaaatggcatctgagccctgatgaatgagtaggactgagctggggagacaggcacagacttacaaggcaagagcgtgtgtaaaggccctggggtgggcrgtaggagtgtgggggctacagtgtaactgcattgtgatgacgaggcgggagaggcaggacctggagaagagggaaggggcagatcatgagggcccttttc

SEQ ID NO: 35478 - DNA, 201 bp, Bos taurus
caggtctttagaatccaaagggaccttggagatgtccttttcctaatttacggactggaaaagtaaggcaaattctaggtactagagtcagagccaagacragactgaatgagggcctggggtcctgagaggcactagggtgggcactcgtgcccagagacccagagctatgggggagctggtgtctttgtatataggcca

SEQ ID NO: 35479 - DNA, 201 bp, Bos taurus
tcattttagagatgaggagactcaaggccagagagggacagtgactcctgaagctcacacagcaggtcatttcactagactcagccttcacagcccgagaygcccgcttgacagaggccctgggtggacctgccctcttccccctggtatcatgtcctcggaggctgctgagcaggggctagggtctccccagcaactact

SEQ ID NO: 35480 - DNA, 201 bp, Bos taurus
catccttcagccaacggggctcaacaccagggccccccagagttcagaagcaggattcctgcgttctaccagaaggcacgatgtccacagtgttttgtttyggtttttcggccgtgccacgcggcatgtaagttccccgaccagggatcaaacctgtgccctcttcagtggaaacacagtcttaaccactggaccaccagg

SEQ ID NO: 35481 - DNA, 201 bp, Bos taurus
agttctgtgaccaggaattgccacaagccctctcaaggagcaaaagaagctgcctttgcagggagaaaggatgcagaagcaacggaggccttgtagaatcygcttcctccggattcagtcacttgccccaggtcccacttgagcagtgtgcttcattggtttgcttttcacacatcagagccagtgtccgttagtcctggc

SEQ ID NO: 35482 - DNA, 201 bp, Bos taurus
gctcttgtaaaaacaacaacaaacaaaaaaaacccctgaaggatgttactgacataattggggaaatttcaatgtggaccacatgtcagataacatcgtgytgaaattaaattgagtaagataatggtgattttagacacggtccttaaccttaggagacacatgatgaagggtttagggctggagtttaatgatctctgc

SEQ ID NO: 35483 - DNA, 201 bp, Bos taurus
tcctcagcctgacaggcactcccccacatgtccccacacaagtgcactgggacttcagctgcctgctcccatgcctccaacgcgtcatttcccctgctccytgcaaacctgctcctcctggaggccacccccttaacgaacggggcagggaggggggccctgccaagtgctcagatcagatcctcctttctcattcccaca

SEQ ID NO: 35484 - DNA, 201 bp, Bos taurus
cagggctcttggcctggcatggtgggaggatgcacacgcatgcgggtcatgaggctcctggggcagaatgccgtagcacccaggggatcctccccaccccytttgctcccggggcccaacagaggaaaatgaggaaatccctgtgtcctcccgcagcttttggcccccaggctctgaggacaaagccacatgggggtggtt

SEQ ID NO: 35485 - DNA, 201 bp, Bos taurus
gtccttttttcttagcagaccctttcctgccctggttcctgataccttctctgtgagataggttagtggggtctcttcttaatgaggccagaaggcgcccygtgagctaatcgctccccagaaaggatgctttcggagcagggtggtcccaggtcaggagtggccaggctctcttaggtctgtcccccgcccagagcaggc

SEQ ID NO: 35486 - DNA, 201 bp, Bos taurus
gctgactgaagtctttgtccggcttctgcagggatgaaccgaggctcatatgtgtatactgtccagccacaaattcaggcctcaaaagcaggacacacccyagagggtcataaacttcagctgcaaatgggtgatgtcaaccaaggacctcaccatggggtggggtcgagcccttctccccacttgcagtcacccgggggc

SEQ ID NO: 35487 - DNA, 201 bp, Bos taurus
acaaatagatgtgttggcctgcctcataacagcacttaaacagcagtgacacagccagctatgtgatttccaacattttggccaaaagtgatcatctccartattgcaatcttgccaaattcttttattttaccataacctgtggagaaggaaatggccacccactccagtattcttgcctggagaagcccatggacagag

SEQ ID NO: 35488 - DNA, 201 bp, Bos taurus
ggatttatccttagtccagaggcatggcccttactgtagaggacattcttgatactaatgcttgacttttctggaatctcagctaaatgaaagaggtgttwagcaaggcctctccactctggaccggctgcacgtgcatgttctgggcgccgtgaagtcttggtacccctgttcacttctcacctcgcagctgatgctgcc

SEQ ID NO: 35489 - DNA, 201 bp, Bos taurus
tggatctgtgccatcttggcagcgggggcccctgtcttcttgccccatatgtcccggatgttatccctgatggagaaacagcctttgcagaaatgagcccrttgcggccccccaggcagaaaccaaggtcagagaaagaaaccaaggccagagacaaagaaaggcaaggccaccctccccttctgtcccctctgggtgcct

SEQ ID NO: 35490 - DNA, 201 bp, Bos taurus
caaacccaggctgtcttgaccactcttttctgtgctgtctatattagggtgaccatataatctgttgtccaagctgagattttacgtgtgatgaaaggccycattatacattttgccaggacagcaggcataagcccagtataacaggaagaaggggcgtgggtcctcttcccatcaagtcttcgctgcctgccaggcaca

SEQ ID NO: 35491 - DNA, 201 bp, Bos taurus
atttaacagatctttatattgaaggactctctgtgtgtctttaatatgcaaatttgctttgtaaatcaataagatgaaatagtcttccgttttccaaacaycgtgaccctggaacctttcttctggagccaggttccttggaactcaactttgcttcgtcttgggtgtctctggacaaaagcagagcttatttatttcctg

SEQ ID NO: 35492 - DNA, 201 bp, Bos taurus
actggacacggcacagtggccagtggggatggaggcatccaagggcaacaaaaatggacagaaatgcacatcaaaactgtctgtctgcaaaggggaagaartgcaaatgctccgtgtcaaaactggccacctataggacacctggagatggatacgtagacaaccccacagcagggatgttaaggcccaggggaataaagt

SEQ ID NO: 35493 - DNA, 201 bp, Bos taurus
gacttatgatctgggtttttgaggttttgttcaaggatgccttttccaacacttactcataaaggacaggtggcatggcggccgtaggtgtgcagtgcacrcagcaggctgcctaggaggacagagggggaagggcagagcggagacccaggctctgcaaccctgctgtgtggcctgggccagtccccaagcttccttttc

SEQ ID NO: 35494 - DNA, 201 bp, Bos taurus
cgctggcccttggccctggtgagtcagagcccaggctggtccgaggccgcacccgctggcctccctgccccgtgagagggggaggcaggaacatcccatcyggaagtagccgctcttccaagtctggaatcaggaggagctcagtaaatgctggttgaatgaatgaatgaatggatggctgcaccatctcttctcacccag

SEQ ID NO: 35495 - DNA, 201 bp, Bos taurus
aagacccagcccccaagcagtgggaaggacggaagcacctttctgtgaccacccagagcagcggccatcccggccaggtgctggcaggggctgcaggccarcctgctcgatgtcccgctgtcactgctcctcatctgtcccctacctgtaaaatggggcacgcagaaggggcgaccccgtgggccccagtgaggatggagg

SEQ ID NO: 35496 - DNA, 201 bp, Bos taurus
gaggagctgggaggctggtcagcagagatcgcgggacttcggctggttaaggatgggcagagagccttcacccgcctctgagggcctgcaggtgcccctaycccaaatctcatccttgtccaggggcgttctgcctaagccagtgccaccactgacctaggagccaggggcatccccacacctcccaggcctgtctctgat

SEQ ID NO: 35497 - DNA, 201 bp, Bos taurus
aggttctgggtggacaggatttcaggggtcattgttggatcctctacaactaggccacttgcccctcgctgcagccctgggaggcaggccctgtcgggccrttttgcagatgagctgcgcacctgtgccatgtggggctgaaaggttgttgtcaaatcacgcgaagacactgggattcttggcccccggaggagaagaatt

SEQ ID NO: 35498 - DNA, 201 bp, Bos taurus
ctataaattgtaaggtacatgaataaaacgcaaaaagcatgccgccagtcttcgtaaccaacatcgccacatcatgaccaatctgttcattttggaactaygatgtaatggcctccagagagggacgggggtggcgggggtggggtggtgcttctcacctggggggtcctctccctgcaccgtcttctgctgcttctgtct

SEQ ID NO: 35499 - DNA, 201 bp, Bos taurus
gcctcacccagaggcaccgggcagtcggccccaggggccaccctccgcctccgaaagcagcaccagcaggggcagtggaaccccagacacaccacgaaacrgcaccgcaaaggccctgagcagtgcactgccgctggaaccgcagtccacacggtggcccgggacctgcgtgcggagcctacgcggggagactgcctacta

SEQ ID NO: 35500 - DNA, 201 bp, Bos taurus
gcacgcagtgagaggctgtggcctcctttgtcctaaattctgacatggagattctagaccgtgcaaaggatagagtttcctgaggcagcctgagtcacacrgacagatgtcttggcctgccttacagagtcgagaagcttaaagagataggcaaagactagccctctgaggaacctacaaacggtgcttcacctcaacaaa

SEQ ID NO: 35501 - DNA, 201 bp, Bos taurus
cacttaacttggaggccggtatggaaggacctgggtaggagaaacacagccccttctgagctccgagcggaccccacatctcagtttgagcaaaggccccrtgcgggcaaagttaaggtgccccttcactttgtgctacgtttgttccccaggacaggacaagggcgtccaagccagggagctgagcgggtgttgggtgca

SEQ ID NO: 35502 - DNA, 201 bp, Bos taurus
cccacagccacacatggctgctgggcgccagatcatacggcccagaacttagaacatctctgtcactgcagaaagttctgttgggctggcgctgctgccaktgggaaaggctgggccccagtccccgctctgccattcactgtcaggtggtgggggttatgcccctctgggcactggcttcctcttccgtgaacaggggca

SEQ ID NO: 35503 - DNA, 201 bp, Bos taurus
ggggtggggggtgctgggatggctggccacagggccactcacctgagatctggttcagggagaccctggaggcctcacgcccctggccaggggttgccttytcttcaactccactttcagttccactcaggatgcctgaagtgaaagtaaaagtgagtcactcatttgcatctgactctttgccaccccgtggactacgga

SEQ ID NO: 35504 - DNA, 201 bp, Bos taurus
cccacgtgtccacgtcctggtccatggccgggaccttctttgctggggacggcccagaggggatagcgcgtgaagctgcccacggccccacacagtaggcrctcagtgaatgcttgctacctgttccattcttaaagtacctactatgtgccgggttctctccgagtctgagggccgcagcggcgataaaaagtgacgcgt

SEQ ID NO: 35505 - DNA, 201 bp, Bos taurus
tccggacgtttaattcaccttgtcccctggccgccagcgggcaaatcgctccgtaactcgatcagccaagggacaattggatcagagagcgcttatccgcyggcccctctcaccgtgcgaatgtcagaggccccccgggcacagagacctgctctttccaaagtctcagctttgaaaagcaggtggtgaggctcgggcttt

SEQ ID NO: 35506 - DNA, 201 bp, Bos taurus
cagttaagccaggctcttgagtgaattcaggggtgggatggagcgacccggacccttccccagctcccaggaatcaaacgaggctgagaggctggccggcrtgctctccattacagtcctgtgggcaagcccagcatgcagggggctgaataaatacttcccggacggagtggggagacaggtgcagagggccaaagctct

SEQ ID NO: 35507 - DNA, 201 bp, Bos taurus
gctacgtccagctggaggccactggacagctgtcactttcagtgaacatcttcaggcgtcctctggtttttgcattttagaaaaaccagtgcattgttttyaggcccaaacatttgtggggcctcttagaaaggccgtggggaccgaggcaggttgtccacttgggtgaggggtctcatcttcagtttcaactcctcctgg

SEQ ID NO: 35508 - DNA, 201 bp, Bos taurus
agtgaagttgatgggccttcattcgaaccataaaaatctactgctgttgagtgaaagtctctgaaacggggaagcagagcgacgcgggcagggagggcttygtagctcacggtctctcggggggcctgggacacccagagaaggcggccttctctgacccggcctgacgcaccctcgccagacactgctcgggacacgacg

SEQ ID NO: 35509 - DNA, 201 bp, Bos taurus
gaaggctgaggctggaagccagtgatgaggacatagaaagaaaaatgtgagggcccgggtccctgatgattccgtgtcagggtcacaccggccctgaaccrcctacttcctttacgaaagagtaaacgcttctaactttaggctgcagttgtgtcggggttttggctacaaccagcagagtctcctctgatgcaggcccgt

SEQ ID NO: 35510 - DNA, 201 bp, Bos taurus
ctctggctctagggtcatagcgcctgcatcgtggggcaagggggggggtgctgggtgctgtcgaggccacccctcccaggccagagctgagcagatctgcrggaacttccagcatctcacagtttaaatctgaaaccacgagagactgcagccttactcccctgtcgcccccgaagtgccctccagtctggacaagggccc

SEQ ID NO: 35511 - DNA, 201 bp, Bos taurus
cggggtttcctagggccctggcccctcgtgccttactgggggaggtgggtagcaagatagccccgccggacacccttggcctcgtaggttgaagcccagcytgccgcacgctctgactcaaggcgcttccgctcgggaaatgcacacatggccccgagagatgtgtacagacagactcacgacagcgccttcgccagccaa

SEQ ID NO: 35512 - DNA, 201 bp, Bos taurus
ggacggctcccacggcggggcccgcggtacggacgctcagcagagaatcaaagagctccctgaagctgcacagaggctccaggaggcttctcagacgacayggcctcgaaggtgtgggcgacaggcaggaatggctcctcatgtgtgatggaaattgggttgaactggcgtcgtcctgagccggctgagtgtcttgcccct

SEQ ID NO: 35513 - DNA, 201 bp, Bos taurus
tccatgggctcacaggaccaagggtgtctctcaggcctcagtccgctcacctgcaaaacagcagccgtcacgccttcgcatccaagtctgaggattcgacragaatggacgtcccaggccgggggcccctgcgacaatggttatgttaaggggacatgcctggctgggctgggactaagggctcagacgggcacccgcggt

SEQ ID NO: 35514 - DNA, 201 bp, Bos taurus
aggaagacaaggagggttgccgcacatccagggtgaggcgggggccccatgcgtagaccccgggtctgggcactaaattctcatcaccaaatgccctcccrtgacaacaggaagaggttggtggccgggcagaagcttgctcagcatctggggctctggctgctccgaccgggggtctggccatcctgaccagcccgagtc

SEQ ID NO: 35515 - DNA, 201 bp, Bos taurus
caggggacatgatgggctggttggtctcagcagcgtgtaattggacgagagcttccctgggcaccaggggcagaggcgggccccggggacttacagctgtytaatgtttcatcgccctctgtcagtgtctctgccactcagtaacaaacactccggtcctcacctggtgcggcttttttgtcagcatcgcgggccccgggg

SEQ ID NO: 35516 - DNA, 201 bp, Bos taurus
gcccttgaggccttatatgctggtgataaatttcacaaaattcatcctgtactttcacgagctactcgttgagcctcctgcgtttatttagtgccgggttycgggccagcggctggggagagagtcagggaggagccaagtcaagggcttctgggccgggtagcctggcgtgggggagacctgagactgggggtcccacag

SEQ ID NO: 35517 - DNA, 201 bp, Bos taurus
ctgcgccctcctcccgggcaggcacagtactccttgcggggggcctcggtggggagtcaggagtctggcagggaggggacggcgggggtgggccctgggcragggggcggtgacaggcaaatgcacgaggtggactcacaccctctgaaaattacaaagagctgattgatgaacgctttctcggtggcccgtatcttgtgc

SEQ ID NO: 35518 - DNA, 201 bp, Bos taurus
ccagaggtgcaggtggaacagcggctgccccgccccaagaacacccagtagagcacaggacacagtttagtgggaatttggggccaggccttccccaaagrgacatgcccaccccaggagccaacctgatcctcgggcagacggggctgtcccgcgctctgggtgcccacgacccgccctgtcgtgtgtcagaggagtgcc

SEQ ID NO: 35519 - DNA, 201 bp, Bos taurus
gctgggccccaccgtcctcgcccgctgcatgggtgtcagtgagttatctcagaaggctgagctgctgcccaaaccagcgtcacatcaagagtcgaacaggyggctgctggggggccacctgtcgccagcagacacacgggttcaactcaaaagcctccctctgggatgccccaatgcagggactgaactcccccaaaccca

SEQ ID NO: 35520 - DNA, 201 bp, Bos taurus
ccgcggtggggaagcggtgctggaggctgggacgcggagcctcatcccctcggggcgggtgggggggtccgagtcagtgcagctcaggcatgcatggcccktccagactccctgaccaagactgccagtcagagttccctaagcttttcaaggtttctctttttgataagattgtctaggcaagagtgctggggtgtgtca

SEQ ID NO: 35521 - DNA, 201 bp, Bos taurus
tgcccagcgctgccccggggccccaggggacggacagacagtggacatgccagacaggagggcgaggggtatgagcggcacttgcccacgcacaggacgcrctcgtcctgttgcgccctggccgggccccagtgtgggcaggaccccgggacggcactgcctgcagaggggcccagagcccggctctggccttgcctggcc

SEQ ID NO: 35522 - DNA, 201 bp, Bos taurus
cacagcagccgggcctcctcttgtttactctcagctgattccatctcatttcctgcttggtatttgctctattacactgttaaattttgtgaaatcagacrccaacctcataagcttgcatatcctctcacacagcatctagaccagcacctcccggctccacgctgcctgcagacccctcggaaacggcactttaaacac

SEQ ID NO: 35523 - DNA, 201 bp, Bos taurus
cgcaggcacccggcagagcagaggcatcatgcagcacatgcaggcgcacacgcgtgccgcggccccgcggccccaaagccgaggccgggcaaggagcgccrgcagcagccacctaccatccagaggggacttctcctctgcgttcttgtcctcctcggccagcatgacctcctctgcgagcaagacacagcctcaggccag

SEQ ID NO: 35524 - DNA, 201 bp, Bos taurus
agggtgggagggcagtgccagaaggggctgggcacagggccagggaagaggagagcacagcccagcccatctcaggcggggaggagagaaagaaggaactrgggagcaggaaggccaaggccccgccaggcaggatggacaggccaggaagccaggagcaggctctggcctgggaaccaggacaggagagggctccctccc

SEQ ID NO: 35525 - DNA, 201 bp, Bos taurus
attgtacaatcaagtctcataagatggctactctcttgctctctgtacatcccttgcaagaactggccctgcctcactcttaccttattcacatgattttmttcctctcctaagctgaaagtttaatcagtaactacatgtatgatcagtccaactcccaccaacaattattctagccctggaactagaccagaatggctc

SEQ ID NO: 35526 - DNA, 201 bp, Bos taurus
aatatctaaaacagatgaatgtggatcacaaggtttgtatatataattcttgaaggttaaaagaattgtacataaaaaggagatggacatttaagacagaraggtcatagaataacaccagtcaaacattctgttaaggaaatataaaacaatttcacagaactgaaacttgtgtatcatgaaaagaaaagctgagaaata

SEQ ID NO: 35527 - DNA, 201 bp, Bos taurus
ataattattaaaagatgctttgaacttaagatagctattgaactttatagtttaagtggtgttatacattataagctgatacgattttttttctctacackaaatccttaacctatgcatgatggaggctttgactagaacaatcttaaatagcattgaacctgtcttataggatatctaattcccacaggagctcaatgc

SEQ ID NO: 35528 - DNA, 201 bp, Bos taurus
caaggagatccaaccagtccatcctaaaggaaatcaatcctgaatattcattggaaggactgatgctgaaactgaaattccagtactttggccaccttatrttaagaactcatttgaaaaaaccctgatgcttggatgagatggttggatggcatcactgattcaatggacatgagtttgagtaagctctgggagttggtg

SEQ ID NO: 35529 - DNA, 201 bp, Bos taurus
ctatgtaccaaaaatactatgtgctcagagtgaagaaatgtgcaacataggtttatctctatgaactcataatctataaggaaagatgtaaaagaatcaarggttataatgtggtttgttactgctcacatcgtgtatgcccagatgctatgaaagcaaagaagagaattctcagttaatccataagatattgggactttt

SEQ ID NO: 35530 - DNA, 201 bp, Bos taurus
atgtatacaacataattgaatcactgctactcccatccctgggcgtccaaaatatacttagaaatttaaaattataaagacaggccaacaatggccaaagmcagatctaaagatgaaaagagaaaatcagcaaatgaagctcactgaaaaatctgctaatactgttgttgaatcctaatcatttattcatttatccattca

SEQ ID NO: 35531 - DNA, 201 bp, Bos taurus
gttaacaagctttaatccttacaaaactggaatcgacccttgaaaattggatttatacgtgtgatggttaattttatgtgtcagcttaactaggccacagrtatttggtcaaacattattctgtgtacttctgtgaagatattttgggaggcaattaacattcaaattgatagactgaaaagcaggttgcccttgttaaca

SEQ ID NO: 35532 - DNA, 201 bp, Bos taurus
tccttctccattcaaccatggctgaaacaatgatggtaagaacaaattaggaaggtataaagtctccatattacagagtcaaaagatctttttgcataaayaccaagaaatagatcaaaatcaagtgctgatacaaacagatcaaatcaagtgttttccatcgtatttacattttaaatatatcataaaataaaacaaaat

SEQ ID NO: 35533 - DNA, 201 bp, Bos taurus
tttgcttggccatcctctatgtgcaaatgttctacaatgttttgaaacttgtgtggtctcagaaagcctcttccttagggaacagagctgcacagattgckggggaagagatggcctggcggaaacatggcagggaaatggaccactcttattcaaagtcctgctagggcttcctctgccttctaaaccagtaaactctcc

SEQ ID NO: 35534 - DNA, 201 bp, Bos taurus
taggatgtgtgcaaactaattactgaggggaagctcattctggagagaggcaagaaagccaactgcttattatgggttgctccagaactccagcctgtcamaccttggcgaaagcagagaatgcagacctgaaaatgcagtcttaaacctgcagccatttctatgcctagtggcaaagcagaatactgtaaagcaactttt

SEQ ID NO: 35535 - DNA, 201 bp, Bos taurus
catggaagacagtttttccacggatggagggaaggcagtggtttggggatgattcatgattcacatgattacatgtgttgtgcagtttatttctattattmttatattgtggtatgtagtgagaagattaaacagctcactgtaatacagagtcagtgggagccctgagctcaggtggtaactcgagccctggggagtggc

SEQ ID NO: 35536 - DNA, 201 bp, Bos taurus
agcccagctctgccaagccccgcgctgtggcctgcacggtgctccctgcacgggggtcacttccgaacacctgggacgagtgtgagtctgagccaagcgcygtaggcagcatccccttggcctgaattccgaatctccatccacccgccttgcacgtagagtgtgcttcctttgcctcagcaggtaccaaactgccagaga

SEQ ID NO: 35537 - DNA, 201 bp, Bos taurus
aggagtacaggaatgcatttttaaggtagttgtgaagaatttctaggaagcagtcatgcaataaagctgagtattgcctctttttaaggttaagtaaagtyctaactggagaaggcaatggcaccccaccccagtactcttgcctggaaaatcccatggacggaggagcctggtaggctgcagtccatggggtcgctaaga

SEQ ID NO: 35538 - DNA, 201 bp, Bos taurus
agaataaccagaaagtgtgctgactgaggtctaatcactaaattttgggtaaaagcttgaaaatggcctgttgatagtacataataaccagaacgattatyctctcccttgccgagaattctaattaatggggaaatgcaaaagaaaagggtgagctgagaacagaaggtctcagccatcaagagcttgactctcccagca

SEQ ID NO: 35539 - DNA, 201 bp, Bos taurus
cagtgacttgacaatttcatgccatttcaaaagggccaagtttatattcagacacaggaaaactctggagtgttacctgcatatatgttaatcagccgcckcctcgtgaagagcccacagtggccggcgcgctacggaaccagggcttcctaaggtgtggccagtgcctcctcaccgagctcccaggagcagtgacctctg

SEQ ID NO: 35540 - DNA, 201 bp, Bos taurus
ttacttttttttttttttgcagaaagtatatatacatatactcctcctattgatgattcattaatgagtaaattctagaccattcctttttaccagatatygtattatgttagtgacttttttgcgttgctttaccatagagatattgcttggggaacgtttttgtgggtgcctgccaaatagtagacaaaggtcagatga

SEQ ID NO: 35541 - DNA, 201 bp, Bos taurus
cttgccttctgcagaagctgctggctgattgtaaccagggctgaataacaagcctggtggctgcaggaccccacgaggataatgttggcccactagtgggytgagttatcttctggagttgggtgttgtggggctgggtatccctaatctaatactggctttctggtggatggaaccagttgctgacaaggcctgcttgaa

SEQ ID NO: 35542 - DNA, 201 bp, Bos taurus
gctctttcgtccttgggtcaccatattcttccctctctttaattttagggccaattctttggccccttttgataccctgcgcatgtctaactatctacccrtttcccttctcaggcatttgggagcccagtctcaaaggtaaaggggtgatggccactctcacttcttcaggctgtacaggggcatcatggggctctggct

SEQ ID NO: 35543 - DNA, 201 bp, Bos taurus
aagtacacctttagaacatataaaaagcatatcaaaatgtggcgtaagagagatataaattaaaactccacatttgagctaaagagtcctggtaattttcrggataaactgaagttggaaaactggataaaatatgtctcccttctgagagtggtcagtgctattaggagctctctgacccttgagcctgaaaatcatgtc

SEQ ID NO: 35544 - DNA, 201 bp, Bos taurus
gttgacactagatctaggacccacaggcctaaaactaggtaactccaaagctggccacacccaccagtggccagcagcctccacataaagcagggcctcaraactaacctgaccaggggttagccaagcatatcagatcaccaagagtaatcagcctgctacaatagaaggacccacacagcttacacagggggagaccct

SEQ ID NO: 35545 - DNA, 201 bp, Bos taurus
aaattgtaaagcatatgaagcttatatggcttttttctatttacattctgaatagaataatattcttaattttatagaacttatgtctctatagcttatayactagtgtgctagatttttctaaataaaacatttccttggctaataaaactacaagttgtattataaagctttagtgaaagtgactttaatttagaatta

SEQ ID NO: 35546 - DNA, 201 bp, Bos taurus
ctccccgctcagtcttctctagcatcaccctggcagtgagttgaatcatcttgctacagcctggcaagagtggaagtctaggttcaacacttggcctttgmtgggatgcagttgcaacttggtctgtggtattcacccagaaaaaaagtggttaaaagtcccctgtcttgtttagctgcctctttcttggtcttttggcca

SEQ ID NO: 35547 - DNA, 201 bp, Bos taurus
ttggaaatctcttagaatacacatagatttttttatctctctcaaattgcagatgctcttgggctgagaaacatatcaagttaaatgaattattaatgcaytagcataaaatcgttaattgcttattttgcttccatgataaattcattttaaaaaaacacaccaaaaaatggaatttgggagatggggagaagaaaggga

SEQ ID NO: 35548 - DNA, 201 bp, Bos taurus
atataggcaaagtcaatatactcaatatccatgttctagagtaaatatacataaatgcatgttatcatgggttttactgacaataacaggccatttttctrgtaatagctttaacattttgtaatcattaaaacagactgaagcaaagatattggggaaaaaagtatgaaactcacatacagaaagagaggatacagggcc

SEQ ID NO: 35549 - DNA, 201 bp, Bos taurus
ggttcaagctttatatttaggttttagtattgactagcccctgaagctttgaagaaaataacataggttaacaccttctacttgatctcaggcttatgcartaaagcttgaaatttgcttacatcattattcttggctagtgtaattataaatgtgattagtaagaataaagtacaattatactgtttataaaaccagtag

SEQ ID NO: 35550 - DNA, 201 bp, Bos taurus
atgaaaaggcttggcaaatcttaagaatttgaatttagtttcatgctaattgaggggcccataaagaattttaagaaggaaaacaatgtgtatttctttcyattttgaaaataaaagttagcttcaggagaatggaatgggggagcagtgtgggttgaaaatgaagagacaatcagcaggcatcactgtcaagaattaatt

SEQ ID NO: 35551 - DNA, 201 bp, Bos taurus
atctaggaatagagaaataaaagcaagagcttctaccttaattctactcagaattggatatttagccataaattctttgaaaattagcaaagcatacaacytcctgtattgtattttaatgtctgcatttacattatctgacttttcctacacagttatctacctgaaaagcttactgcttaatacagtaatgatctgatt

SEQ ID NO: 35552 - DNA, 201 bp, Bos taurus
ttcctaagggccagccattttctggttgtccagacacaaaggtgcagagacaacactgtggacccagacagggctcacaaaaagagcataccttctggaaytagaaagctgatgactctcccaatacttttcagacagtggcataggtggggggtgagactagaggacgggaggaaaaataagtaggaagaatgtttgaag

SEQ ID NO: 35553 - DNA, 201 bp, Bos taurus
gaaattacatctgaaaaaatattctgaatattaatctctttctcatcatgacatacttcaaaatgcttgtcatactatggccactgatctaaaattattayatcatgaattctggccaacatctactacctctatatcacttaactgggcttcacttgtggctcagatggtaaagaatctgcctgcaatgagagagaccca

SEQ ID NO: 35554 - DNA, 201 bp, Bos taurus
gttccctgtcagcagagccagttgctccagaaatgtcccctggtgggctgtgtgcaccctcctgctttcactggacaatgataactataggtttgctagcrtacaggcctggcccctgacacagttggctgtaaagcctagttgcaactgttcaggtagtctcatgtgctgggtcatctcctggggcaggagctactttag

SEQ ID NO: 35555 - DNA, 201 bp, Bos taurus
aaatatttctggagggaaaacagcactgcatattttacttattcccctagattttgttcttcctctaggttccatctcaattttctttgttattttgatgmatctctaatgttttcactcaatatgtttaattttcattatttttcaatattgatttcagattttataataatggtgatcaagaggagatcagtttataca

SEQ ID NO: 35556 - DNA, 201 bp, Bos taurus
aacttcatggcgctggccagacccaggaagaaatgtgataatcctttgttctttcagttgaccatgtaggtcaggatattcctgtaaacctccaacaagamaaatgttactctttgttttgcagctgcaacggtgcacaaacacggccaagagaagttatcccaccttcgaagtcaggggcagaagacaggaggaccccat

SEQ ID NO: 35557 - DNA, 201 bp, Bos taurus
ctcccctattctggcactttgtctaactgtgattgtgcatgtaaatatgatctgatggtttattttgagaaaaaaagtgaaagaaaggaacacggccacartgtaataaagctatacatagaagaactataaaagaaaggtcttaatgacccaaatagccacaacggtgtggtcactcactaagagctgaacatcctggag

SEQ ID NO: 35558 - DNA, 201 bp, Bos taurus
tgttttccttgaaacataataattgaaaattcctgctttttgtttaattatcattcaacacaaattaaaagaagcaaaaaaagatgaattaaaattacaarggccaacaaaagaaatgatggtgaaataattttcttatcctatttttatatatttaatatttgaaatatcaatatctactttgatactatctaatcaaag

SEQ ID NO: 35559 - DNA, 201 bp, Bos taurus
tcatttagcatcactctctttttgacctccaaggggcctttctgtgcacatgtaattgggaagctctcctgatttcatcttctgtttgagcagggatcaamctcctcctttaattgcctgctctttttgtcttaaagtataggtctacagagaacaaacttcacatgttttccccagggccccatctatcttctgcctcaa

SEQ ID NO: 35560 - DNA, 201 bp, Bos taurus
atgaggtggccaaagtactgatgcagacaaatgctgcttgattccatttatatgagttacctagaacagtcaaaatcacagagtcacaaagtacctgccasgggccgaggtgtgagggtgtggggagggggtaggagttaatgttcagtggggacagagtttcagtttaggaaagtgaaaaatttgggagatggatgatgg

SEQ ID NO: 35561 - DNA, 201 bp, Bos taurus
ctattcaatatgtaggaaagtctctaaacactccgcatccattccctcactgctttaaagttttgtttcccctttatttaatgtgagggactggccatttmtggcagtgatttctttatcagtctcctaggaagcctatctaatcctgaagcaaataagcctatttgtacgatggccttactcccagagtccccatgagag

SEQ ID NO: 35562 - DNA, 201 bp, Bos taurus
cataactcttttgtgtaacacttaaccataaaatctcagtgacaggcaacaaatatacctgttgctcacacatctgtgattggctgggtttctgctgatcyaggcaatgcttgatcaggcggtggtttcaattcaggttagatctctgtgttactcagttttctgagacccaagaaatattcttctcatgctaatgtcaga

SEQ ID NO: 35563 - DNA, 201 bp, Bos taurus
agacaattcttacctactagcatgtctgctaaaggtatgtctgagactgttagagagtgccacattcctcctcgggtgatttattctgatgggccagaaakctccgggtcactaatagtgagaagactgtcatatgttttcaatgaaaaggaaaaagacctttggtgatttccctggtggcccactggttaaaacttcacc

SEQ ID NO: 35564 - DNA, 201 bp, Bos taurus
gcttcttaatgtcaggcctctcatcttcctcattcttatttctcccctgcaagaccataagcaaacaataggtgcttaataattaagaagagtgcttaccrtgtgtcaggccccaaactaaggaccttgcatttgttcactcacctactcttctccacaggcttgtgagatgggcactatttatatccttattttatagat

SEQ ID NO: 35565 - DNA, 201 bp, Bos taurus
cggtgtcagcaagaaacagaccttgttagtttacattatgtagatcctgacaagtacaaaggcattttggaggtgttagaaaaagcatatgagggtgaggyattatcattcctttctttgaaactgaagagtaggaaatagacccaaaagaaaaacagaaggaagtaaagacttcatcgtatgtcagagccttaatttcac

SEQ ID NO: 35566 - DNA, 201 bp, Bos taurus
atatatatatatatgtatgtgtgtgtgtgtaaaatggaatatgttcagcatgagaaagaaggaatcctgccatgcattccctacgtggccctacatggatrgatcttgattacatcatgctaagttaaataagtcaggctataaatgataaatcctgtaagataccacttacaggtagaatctaaaaaggccaactcatag

SEQ ID NO: 35567 - DNA, 201 bp, Bos taurus
gaacctgatggtatgtaaatttgaaaagaaaagaaaaacataattaaaagagtttgaaaaaaatctggacaagatttactgctaccaaaagaaaccttccraatgcactctcacaatctcttgattgatattcttgagataaaacattacccccagagagggatgtcagtctcttccccacttaccagagaggcactcgac

SEQ ID NO: 35568 - DNA, 201 bp, Bos taurus
taaaaaagggctttatgacagtagtgtggaatttttaagaactcagagacagctctcagaggaagtaatatctaagctgaggcctgaagaacagatgggtrttagccaaatagaatgagagccacggtaccaagcagggtgacagcacgtgcagaggcccagaaagtaaagggagcacacagagttgggaagtccagcccc

SEQ ID NO: 35569 - DNA, 201 bp, Bos taurus
agctgattaaaaacagtctttaaaaatctccccaaagcagggacttccctggcagtctagaggtttagactctgcacttccacagcaggggccacaggctygatcctgtgtgcggtgtcaaaagaaaagagattccccaatgaagacaatccttctcaaaggtaagatgcaaaatgagcacacttccaagttgcttgtacc

SEQ ID NO: 35570 - DNA, 201 bp, Bos taurus
aaataaagcagtcatctctcccagtctttttgtttttgtttttgctacttagcttgtaggatcctaattccccaaccaaggatcgaacccgggcccccagyagtggaaactcaaagccctaaacactagcccaccaggggattccccttcaccagtcgcgaaggagtggccatatgttcaagataaatcttgtcagtcagc

SEQ ID NO: 35571 - DNA, 201 bp, Bos taurus
ccagacactgtccctttctctcttctgccacctctgccaactgctgtttcctctcccctagtgaaggaggacataaaattggaattatggtgaataacctrtagtttgataaaacatgttttgtacaaatgaagtaattacagtcccgtttgaggaaatacttcttacaacccgggaaccgtccttagtacttatgtgtac

SEQ ID NO: 35572 - DNA, 201 bp, Bos taurus
ggctctggcgcctcctcgctctcttttcgctgacgccgagaccgctgtgtccctgaaaagactgccgcgctgatttaagtcagccctgctccgcggtgcckcctccctttatcgcgtagacagtgcctgactcacccggttccagttccacgccctttctccgcctcagctcgccctcacaggacctacaaactggaacca

SEQ ID NO: 35573 - DNA, 201 bp, Bos taurus
gaccgtgggctccttgggactttgatcgggagatttcagagactttgccccttgtcaaagaaaccccgggtttgccccggccttccagctggtgcctaacratctcaggaccaagggcagtgttgccgtgggaacacatgacttccagagaaggagctgaggagtgaagttccagcctccccttgcttcccagtcgaggcc

SEQ ID NO: 35574 - DNA, 201 bp, Bos taurus
acaggttgaggaagtttccagctatttgtaatttgctgtaacattttatcatgaatgaacattgcattttaccaaattttttttgtttgttggcttttttycaggggggcaggggcaatgactgaaatgattatatggcttttcctttatgctgtaaatagagtggtttacattatttgatttcaaatgttaaaccaacct

SEQ ID NO: 35575 - DNA, 201 bp, Bos taurus
atctaatggtgtaacatggtaactatagttagaaacattgtgctgtataactgaaatttgctaagacagtaaaacttaaatgttctcaccaaataaatatrtaaataaaaaggtaaatacgtgacataatgaatgtagtatataactcagcaggagaaatttttccacaatgtacctgtaagaaacatgtatattaccata

SEQ ID NO: 35576 - DNA, 201 bp, Bos taurus
atttatagttcagatgctaatgccaagagtgacatacaagtaacatgacaacgggtcacattacttacaagaaccactcatgaaacaaattaattttctcmcaggacacaaatttcccacttttcatgctatgctatttccttttggtggagctgcccacactcaaccaaatgaaaacatcctggacagatacagtcaagt

SEQ ID NO: 35577 - DNA, 201 bp, Bos taurus
tggcctccagctgttaactcttttaggtccagcttcacaaacatacgctctgctctggggctcccggaaacttcctcagatctgtgtcttgtctgatagcycatgtacccaatcccagggcccccctttgcttcccgcaggtcttattccctactaaactgtctgcacacaccaccccacactcccatttgcttccacaag

SEQ ID NO: 35578 - DNA, 201 bp, Bos taurus
ccaaagtggccccctgccctgtcaggcctggcagacacctttggccatcactcatgttgcctcaaagtgtctcctgccccagggtcatccacacacatcaragcatccatcacgttgcagttgggcctttcagtcagccacactggcgtccagtcctgcatgcgagcacatcctcagaaagtgctgccaagctgcatcagg

SEQ ID NO: 35579 - DNA, 201 bp, Bos taurus
ttgcctggaaactcccatggacagaggagcctggtaggctacagtccatggggtctcaaagagtcggacacgactgagcgacttcacttttttcacgttcrtgaatgatagagaactggtcagtagggcttagcaacttcccaaagaagagctctggtaaaggtagatcagaccagaccacacggagtaaagaggtgttta

SEQ ID NO: 35580 - DNA, 201 bp, Bos taurus
gtaagaggccgtgctatctgctgaaccccagcctcagcccccgtgtgcccggccagcctcggagggaagaccgcagtgctggggcgccggccctttcagcygccgccttctttcctaaggtccttaacgagcatgctaattagtggcaatttccctggtggtttgtgtgatgtggagactcctccactaagaaatggccca

SEQ ID NO: 35581 - DNA, 201 bp, Bos taurus
ctttgcatttccattgtgccgagcacatacaaagtgcccggtaagaacctctgtgcttggggaatgcatgaacataagcaggaatcgtttggcaccttttsctgcttgagcagctgtgagacagcttgtctccgctccgctcttctttctcttatctaagctcaggcttgggctccccacgtggctcagtggttaagaatc

SEQ ID NO: 35582 - DNA, 201 bp, Bos taurus
taaggactagtcttcgagttactgctttgaattttctggccatgtgggagcagtttgtttctctggtctcttatgacctggtgttagctggataggagctwgtgctgataccattggccaggtatgtcttgtctgtctggatatcaaaaagtctcaccgttcatctctatcgatcacccatagtgaaagaaattatttctg

SEQ ID NO: 35583 - DNA, 201 bp, Bos taurus
gtgtgtagatgcttagctttatgcagtagatgcctattttatttatttttgatgcctattttaaaatgtaggtttaagttggatcttttgatcatctattrtaatttttgagctatacagcaacagtaattccattagtctaattcatttttaaatgttctatagcgttttctttttctgcttttgcaaaaaattaaactg

SEQ ID NO: 35584 - DNA, 201 bp, Bos taurus
ggaatgatacttatatttggggtgcattcatctgggatggtctgaagtaggaccttggatgaaaaagtgtgagtgtcctgctggttctggaggccacggtrcttgggatggcttctcagacttgctgtatcgccctcctgtggaaaagatgtgcagttcaggaaatctgtcctatttctgaacagagggatgggaagcatt

SEQ ID NO: 35585 - DNA, 201 bp, Bos taurus
acccgtctgcatttttcaccgaggcttacggtggagaagtaacactggtcacacgtcaccgtttgacatgcatgttattagacgaagggccgctgaaaaaygccaccctctggtcagttttaactcttctgttgccatacagttgctgttagtgtcaccttcagggagtgccttgtttagacagggccactttttgttttt

SEQ ID NO: 35586 - DNA, 201 bp, Bos taurus
tgtctatggggtcgcacagagtcggacacaactgaagggacttagcagcagcatgacaacatcacatagaatctttagtcttaggattaaataagactacrgtcaatctatggccaacataggtagctgacaagtacccagactcagaacagggccatgagaaaagaattctctagccttgaaatccggagaaggcaatgg

SEQ ID NO: 35587 - DNA, 201 bp, Bos taurus
agtacaaaattaaagagaaagtaaaataaagataactttcacttcaaaactataaatttcagagatggaataaacttcaagtgaagtctgattaaggactyggtttcttcttaacctccttgtaactttcaatggcgtctgctgcatcctcaggctagccttctaatgatcagggcaccatatgtcctggtaggccaggac

SEQ ID NO: 35588 - DNA, 201 bp, Bos taurus
tggagaatcccatggacagaggagcctggtgggctgctgtccacggggtcacagagagtcggacgcgactgagcgcacggcagacacggcacatcttcacrtcagtctttggcctgcagcactctggactgcataaagagctctaaacacaggcattggtaatagaaatgctgacacggcccaactgtcacccctggcatg

SEQ ID NO: 35589 - DNA, 201 bp, Bos taurus
ccagtgggtggaccccagtgctttctggaagggcttccctgctgctcagaggacagaggtctcaccagaatcagtgggtaatcccgacctgttggcaagaygggccagattgccttcatgccctgattcacacacacacagaaggttttaatgcttttccctcattcacaagagtgcatcaagctttaaagatccctgtgc

SEQ ID NO: 35590 - DNA, 201 bp, Bos taurus
aatcagccaggaacttggcctcagggagcagagtcatgcaagaagagagacgacgtgcttagaaacaagaggactgggcagaaaataataagcggaaggcragtaaaagtcatgttagaggagatcaggcggagagatgtgtttggtgttttcagtgaaatgcatcttacgaatcaatacctgatcgtgtttacagagctt

SEQ ID NO: 35591 - DNA, 201 bp, Bos taurus
gtctgtgacacgcacggccgacacttggcaggttgaaacaggacccactcgttctcgcataggtctgtgagtcagaagtcctggctgggctctctgcctartgtctcgcaggccaaagttgtggtgtcggtcaggcaggctcttccctggagcctctggggaggatcctgcttccaaagtcattgagattgttgacagggt

SEQ ID NO: 35592 - DNA, 201 bp, Bos taurus
agacagatagatagatagatactttttaccttagacatgagtaaagaattgcatttgagccaggagatggagggctctctggaggagatgccatgtgtttyctctgtgagggtaacgctgtcttctaaaatgaaactatgaatctgagaggaaatggaattctccttctggaaaagtctgccatccaagggccagagacca

SEQ ID NO: 35593 - DNA, 201 bp, Bos taurus
aagggctgggacacagagtcggcaaacagtcagtggattttggccaaaagtatttctaatgagtgaggagctctggaaggtgtcctgggcccctggttacygcagctctgaagccccacttctctgcagggtccactgtggggagttacagggagacagagaatgcagagaccgtggtctggcaggactggcctggaattc

SEQ ID NO: 35594 - DNA, 201 bp, Bos taurus
tttttcagagaggttttgggtaccgtatttcatttacaccttagtgatccactccacggtggcatgtgtttcttatattatccccatgcttctagcagatrtttataacctgtcaggaccctctttcctgctaaaattgttgttgttcagtcggtcagtcatgtctgactctcttgtgaccccatggactgcagcacgcca

SEQ ID NO: 35595 - DNA, 201 bp, Bos taurus
tcatccaccttgacccttctacttcaggtataaaagtagacagggggataaaacatgagcaaatcagcagaaatcactgctggagaacatttcaagacccmtgctttagggagaagtacattttttcttagaatattgattgtgcatctagagaaaaagaggtggagaggaaatgtgtaagacatctatctagggttgatc

SEQ ID NO: 35596 - DNA, 201 bp, Bos taurus
ggctccaatcacatttcaccagtatttccacacgcgtaccttctctgttccatagtccatgccaagacatcacactgcattgagtcaccgtgtctctttcrtctcttttcatgtgtgacagtttttcggttttttttccttgttaactcatgaccttgacagtctggagaaataggagccaggtatttttgttctcactct

SEQ ID NO: 35597 - DNA, 201 bp, Bos taurus
gtttaagccaacgtgggggatatgttatttctaatatccttgtaacatcccacagagtatataataataaacatgagaaacagcatatcaaatttcttctmatttctatctgtctcccagtgaaatcaaaggattacaatctgtacataatctacttccagagttcttattgcaatagagtaagactattacccatttaaa

SEQ ID NO: 35598 - DNA, 201 bp, Bos taurus
gcctgacatccagtagatgcttgataaaagttgacagaattgaattaaaaaaaaaaaaaaaggtggtgttgtgttttcttgataacagagtgtccctactrccaaagcaattatgagggccagtctttatgcccatattagcttactgggctttctgtggactaggagtgtaatcccaatgggaaacaccgactgcccaaa

SEQ ID NO: 35599 - DNA, 201 bp, Bos taurus
tgcctgctgatgggtgagagctgcgaggaaagcctgccaaagtgaggggtttcccgcgaccagccaggcccgtctcaggaggccctgacaccatgctctcrcagccatccacacctgcctctgacgagcggaaaaacacatcagctcctctctggacagaggtaagtgacacaggagacttcaggagtcggccttcaggct

SEQ ID NO: 35600 - DNA, 201 bp, Bos taurus
tcttcttaacttcctgaagggttgggtggatcgactgtttggcagacaaccaagggattccactgttttgcccagaatgcatcttcaggtccacatagttycagggaaaacaaccaaaataaagaaacaagcccacagccttaccaatcgatggatcagaaatataactgtctggggatggggtgagcggagagagtctgg

SEQ ID NO: 35601 - DNA, 201 bp, Bos taurus
cactggggctgtctgtgaacacatcaggaagcatatctatcctctttcctttgaaactcagcactgaactctgactggggcccacagcaagtgctcaatawacagttgtttgattaattaattaatactatggatgtcctgtcggcaagattcaagaaataattattgaatccatagtgaggcctgtatctctgccatcaa

SEQ ID NO: 35602 - DNA, 201 bp, Bos taurus
aggtagtacagtgactacctggactaaggatggagaaaagcaacagatgtgagggaaacagtgaagtgtgacagaggcactgaaatggccctgagtggctyggtttggatgactctagttagttctatagatggaaagggaacacagaagggatcctcagaaaaagaaaggaggaaagagaggaaagtgcagaactgtccc

SEQ ID NO: 35603 - DNA, 201 bp, Bos taurus
ctccagtattcttgtctggagaatcccatggacagaggagcctagagggctacagtccatggggtcacaaggaagcaggcacactgaagcgacttagcacrcatgtactgagatttccgttttcctcagagaagtaggggccactgtgacgggggaagggctggaaatgtgttctagtcagagatctcaggagaacttatt

SEQ ID NO: 35604 - DNA, 201 bp, Bos taurus
ctgtgtgtgagagagcagtgccaaggccagcaggctaggaaggacagaggtgagaaggcaccgtggagcaatttccacagcatctcactactctgttctgmtgattgcttatcaatcagcagaactccctatagagacttcaagaaactcaagagacgggctgggaattgcaggccttagtgtggcagatgctatgcattc

SEQ ID NO: 35605 - DNA, 201 bp, Bos taurus
gcctgtggtacagtggctccctaagcgtggccctgccccatctttctctaaatatatttttgagcagtgtcacagaaagagatgtggagtcatggaaagayccagcatttggcctgaaatgatctgggctcaaatcccagcttcgcctccgagacgtcccccacatgctctgagaataataattcttacccaccccatccc

SEQ ID NO: 35606 - DNA, 201 bp, Bos taurus
cctcctggcaggaggaagcatggctggagagcagagagatcaggggccgaaggtcacaataaaaccaaggtcaaaaatggggaatttagcccagagccacrcattccattctactaccaagccatcccagccaacaaacatcaccttctctccactcagaactttccacagagggagttccctggcagttcagtggttatg

SEQ ID NO: 35607 - DNA, 201 bp, Bos taurus
tcccatggccacttttcttgggcctggtccttttgtaaagaagtaaaagcttcctcagacactctcccttccccgcaagagtgccagctttgtcttggtgrttggaacttgtaacttggccatgcttagctgcagagggcctgggagaggaagtattaacattttctagcttctgtagcggagggctggcagtgcagagga

SEQ ID NO: 35608 - DNA, 201 bp, Bos taurus
gcctcggaagtccacacagacaagtctttcagctgcaggtatcctgtggcattgactccattccttctgttctgctctggccctgtttgggcacatctgcygcccatgggatgtggagaaatggtgcttttcagggtatactgtagctgggccacaagtgctgccccgtcattcacctaagtgtctgatctttggaggcca

SEQ ID NO: 35609 - DNA, 201 bp, Bos taurus
tttcacaaggtcaaggccaaactcccgtcctcccccacggtctgctcttccctcagtctttgtcggctctgcaaatagcagctccaccactcagccaagcrtctcagaaccatcctggccatttactttctgcctcacctcccatgtaacctggtatgaagtcctgcctttgccttcaacacacatccagagtctgatcgt

SEQ ID NO: 35610 - DNA, 201 bp, Bos taurus
ggaacttcctggttgccagtcacttttcgtggacctgtggttgggtcgtcctcggttttcccctttccgtcactcattcagctagtcaccaggccctatgrgtattctctcctatatagcccttgaatcctgcttttctctgttcccatgggtgtaatcccagtcctggccacgtcgccccctgggtgactgctccaactc

SEQ ID NO: 35611 - DNA, 201 bp, Bos taurus
ctgtctacataaaccagatgtgtctccccctcccccgacttagtgtcccagccgggctgtgtggacgctcaccatacccctgttgggtagaggagtccttmagagcatcttggccaggtacctttcagatgactgaagactttaaagtgcattccagcccggtttgagacttccggtctcgtgggcattcccagctcacct

SEQ ID NO: 35612 - DNA, 201 bp, Bos taurus
tcatctacttaatgacaaattaataaaataattcatatgttcactatttcttactctttaaactttagatgactagtgttctctgtatctctggatacttrcgttattctagtgttttcctatattttcactgaattttgaccacttttttttttttttaaacaaacactgtttataaatactatgaccagaagttgagta

SEQ ID NO: 35613 - DNA, 201 bp, Bos taurus
ggcccacatggaaactaaagacaccagctgactaccagcatccacaaccagacatgtgggtacagaaacttccaaatgactcccacctccagcattctagyactttactgaggttacagacataaaggaagaggtaagtcatgcttactgtatcctttctgatttcctgacagaatacatgaacaaaacaaatggttgttt

SEQ ID NO: 35614 - DNA, 201 bp, Bos taurus
taatccccaataccttagaacatgactgtatttggagacagggcctttaaagtggtaattaagttgcactgaagtgtcagtgtgggccccaacccaacccractgggattctaataggaagtggagactacaatggtcagcgagacttcagggatgtgcgcacactaagaaaaggccatgtgaggaggtggccatccacaa

SEQ ID NO: 35615 - DNA, 201 bp, Bos taurus
ccatgggatttcccaggccagaactctggagtgggttgccatttaggggacttctagtagtcaaagctgttagcactgccaggcctccgtgtgcatggtgkctctgcaccacagccacgcgtactctcccacgtttctgtgtgtggcaggagcagtctccacaaacacacctgcattcttgttgcttgcatcgtgggccgc

SEQ ID NO: 35616 - DNA, 201 bp, Bos taurus
ttcttcaccttgaggcatcagcagccttctaataaaacctgttgctttgaggagaaagatagtcattagcctggtgaatcaacccttaatatagaaatatrtttgctcatgggaaaaggtgatgtttatggtgtgcttttggagaaggcagtggcaccccactccagtactcctgactggaaaatcccatggacggaggag

SEQ ID NO: 35617 - DNA, 201 bp, Bos taurus
ctttgtctgtgggtaaggcaggattcccctctaaagagctctctctacttcccacactcatgctaatgggccacctaaatggccagaatttatggagtggytcctgtgagtccagaattttttctgaactttcagttcagtcgctcagtcgtgtccaactctttgcgaccccgtggtcagcacgccaggcctccctgtcca

SEQ ID NO: 35618 - DNA, 201 bp, Bos taurus
actcatctacaacttgcttccactaatgagagaaaatgtctgctgatcacttggactttggtcctgaatgttttccaggaatggaggccacatcactcatyccccaatacaatctgccttttgctagttgatcagcctggatataaatagaaagagcctgggccaggccccatgctgaatttctccattgcctttgagata

SEQ ID NO: 35619 - DNA, 201 bp, Bos taurus
tatagtgcatttttgcctctccatcttggtgattggcttttaaaaggcttcaggatattgtaagtgggctccattcttagcagcaatgctctgtttggcargaaaatccccaaagtcatccacattagaactgaaccactgtgaggtccttgcggctccctcgtgtcataggggcttttgcaggcctaatggaactcttct

SEQ ID NO: 35620 - DNA, 201 bp, Bos taurus
attttatgtgtcaaagaaggaaatatttggaacagatttcaattgcaagtctcatcactgctcttaaacaaggctttcagtgtgccctactggctgtgagrcattcctccttttacaaattttcaagtgaaaaacatagaaaaagatggttcattcagagcctagaacagagaaatcgatatgccagggaagagagtagga

SEQ ID NO: 35621 - DNA, 201 bp, Bos taurus
tgacaaattggactataagactagatcggattatagcctaggttaaaaatagtaaatcaatgctgaatccttaggacttgataactatataatgataactytaaaaaatatccttgtctcaggagagaggacaaaaatttggaaaatgttaaaaattagcaaattctgacagggaaacataggagtttatattaatctttc

SEQ ID NO: 35622 - DNA, 201 bp, Bos taurus
caagcctgttaataattcctgggaaaccaaaatagaaaataaaatccaaccttttttcttcttctgtgcttggtctagtttcacgtgctcatagagggccrtgtgcagagggcttgaacttggcacttcacaccagagttcctggttcaaaatggctccctccacacctcagctgggagggccatctgcagatctcgcgca

SEQ ID NO: 35623 - DNA, 201 bp, Bos taurus
atatttatgttcttttttgtagattgattttccaggctgacctgaatgctctctttcttggccgtggctatatacccatagcacttggcccatagtggacrtttataatttagtcttgaaaatattgcttgttgactcgttagaaatgatagagcaaaaggcctggaaacttgtcatcagattaacagttgggactgcgta

SEQ ID NO: 35624 - DNA, 201 bp, Bos taurus
cttagagaccccatggtctgtagcctgtcagctcctctgtccatggaattctccaagccagaatactggagtactgggcaaatgaattaactcttttgagyctgttttccctatctaaagtgtaatacgactacaactcattttaaagggctgtttctgaggattcggtaagataatgaggtaaaatggccagaacaatcc

SEQ ID NO: 35625 - DNA, 201 bp, Bos taurus
ctgcttcttcagcacctactgagggggggcgcatggcccaagtctggccaaggtggagtgaggtatgcaaacaagagcggcttggaatcagctctggtggyggtagtggcttcctttgtccagggcccagcagcccttgggcagtaagagaggccagaatctggtggtggcacggctggggggcaggcctggggtgccatg

SEQ ID NO: 35626 - DNA, 201 bp, Bos taurus
ggagactaactcttccctctggttcagggcctcctctgtgtcctgcttggaaagctaggcaccgagtggtcagcaaatgattccaggtcacacagctgatkcaggccaggtgcccagccctcactctctccaccttcccaggcgccatggtgatcccatgcgtcagggtccctcggagaggcccaggtcttgtggctggga

SEQ ID NO: 35627 - DNA, 201 bp, Bos taurus
agctgccagaacagcgtctttacgcgtgtttatgctccccttgcacgaagataaaactgcagctcatcactgtggttcataaggcccatacgtccaagccytcagttgccccctggatcttagctcagactctcccccttgcgtcccctctgttccagcaacactacccgtccctcttgtaagctggccagtacggaagct

SEQ ID NO: 35628 - DNA, 201 bp, Bos taurus
cactgctgcctgaggagccctggattattttttccattctgaccaaacgagcttgcttacggtaacgttctgaaaggcgtgttagcccccacctctaagcygttgcttgggccgctcacctgttttggaaatgggctaaaaggacagcgtgtgtgcccccgtgccgcaccaacagggccttcagaacgagtacttctcaca

SEQ ID NO: 35629 - DNA, 201 bp, Bos taurus
aagcatgtatggtgtgtaacttttcagcaaggttatgaacatttgtattaggaaacatccagttaatctttttgggaaagtgtttttgtccggtgtttaaracagcacagtatattgttctgcctgcctgcatacagtctaggttccacagtggaaccactgttcctctggtggtggtggttacaacaacattgagatatc

SEQ ID NO: 35630 - DNA, 201 bp, Bos taurus
cacacaaagacattggactgatcagaaatgctggatgctaccagttgaagagtgagcaggctggctagtctctcactctgagaaatgtaaggccatgggaratcccagcgctctatatcttggatcacttttcctgtgcccttccattggattcccaggtctgtgttttccagattactccagtcattgagggccatctgc

SEQ ID NO: 35631 - DNA, 201 bp, Bos taurus
agcactgcaggactgcctttgctgcttggaacggcttcccagactggccaaatgctggaatctaaatcctagtatcaggattagaaatctgtggtttcttraaatcatggatataggccagggacttttaggctttattgttgttgtttagttgctaaaggtatttaactggtcatggaccaccctcatgttcatcaatta

SEQ ID NO: 35632 - DNA, 201 bp, Bos taurus
ttttttttttttttaaataaaatatcaatctaggccccagtgcacatcaattgaatcaaaatgtccactgggagggcctgaaagctgatatcctcaacaaktttctgccgatgatttttggtttcaaacagggatgagaaccactgggagagactaattctaagattaaaatccacctcccagaagtggccacccctcaaa

SEQ ID NO: 35633 - DNA, 201 bp, Bos taurus
agtgctcctacatcaatagcgcttttgatttttgagcagcactgcagaggcagagaatggtagagagagaactcagagatggccggtgcttttcaaggtcrcacggtcaaggcagagaatgaaatccaaattcaggcttcttctcaagaaactggagctgaagtttcttggcctcgttggtcagtttcatttttcaacatt

SEQ ID NO: 35634 - DNA, 201 bp, Bos taurus
gcaaaatcaacaataacttcagcgatttttctaaagagtatagctagcaacagatttttttcaggaaaaagcgtttcatcactgtcatagtttagaaaagytagcacatggagataataaagaacagacagacttttcgttgattttatcattgcttttaaattctcggcaaaccatgtacctgcttattacttgtacttg

SEQ ID NO: 35635 - DNA, 201 bp, Bos taurus
atggaaagcaccactgtccttggtagcttgagccctccgtacactgataccaggatccctcctgctctccaagttctgggagctatgctaaagaccacctmtcctaggatgtaatttcatactccgaagtcaaaacgctcccttgggtatattcaagcttctcccaactgatgcacagattccagagatgcaagaagcaac

SEQ ID NO: 35636 - DNA, 201 bp, Bos taurus
aagaataatattttttatgtagccggattaaaattattatgtataacaaaatggatagtaattccttaatgtaattcgataccagctcatatacaaacttyagaattgtttccaaagtatgatttacaactgatttgtcctcgccaagagccagtcaggactgtgtcttacatctgatgtctctaaggtctccttactcaa

SEQ ID NO: 35637 - DNA, 201 bp, Bos taurus
tctattgctgatttatcgcttttgtgtgcttcaggctttctgggggaagaaaaaaaatcctcgacccctgatgggaaagtcggcaaagccggaagtgggckcaggagttgtgtggagcctcacttcacttcttgaaggcagccagcagaatcacccctggcttggactgcttcgggactggggctcatgggcagggacagg

SEQ ID NO: 35638 - DNA, 201 bp, Bos taurus
ttaaaaaggagcagaagaatgcttatgaggtgccagtcatattttattttttaatctgagtaaagattgttgttttgtcactaagtcaaggccaactcttktgcaatcccatggagtataacctatgccagggatactccaaggatatctgtccatgggataccccaggcaagcatactgcaatgggttgccatttcctac

SEQ ID NO: 35639 - DNA, 201 bp, Bos taurus
agcaaatcatttgcaaagcattgctagttctttagttattacattatattagctccaaatatatgataattactgcaatagaacactttgatattccccgsactttctcattcttaccccactcagtagacccaggcatcctgaccaagttgtcatactcctcttagaagttagaagtgtggaaataaatgaagatcaacc

SEQ ID NO: 35640 - DNA, 201 bp, Bos taurus
ttagttttgacacttcttggacttcgaatgaatgaaagcctcataggaggtgacttttggtgtctggcttttttcagtgaacctaatttctgtgagatacmttcatactgaagtatatttcagtattttgtcctcttcatcactatgtagttttccactgtatgaacatgctactattaattcatttgctgggcacttgag

SEQ ID NO: 35641 - DNA, 201 bp, Bos taurus
acttctggcctctctcccagcaccaatgtcacttcttttctccagtgaagtgaaatgactggggctcacagacaccagcttgaaagtgcctgaatgacccraggaggccgctgtgactgtattagtcagccgtgtctgactctttgccacccacggactgcagcccaccagcctcctctgtccacgggatttcccaggcaa

SEQ ID NO: 35642 - DNA, 201 bp, Bos taurus
gtaagctttaaatgaaaatacttttgactatgttagtgatggactatgttagtgatgaaccaaataaggaagaaaaggggagaaaactagaaagataaagraggcacaatggaggcagaaggagagaaagatagatggtaggtaaagaagaaagtaaggagggagaaaaactggactgactttgaggactaaatccttact

SEQ ID NO: 35643 - DNA, 201 bp, Bos taurus
tgttcttcaaactagaaactggaccaagtaagatttgttcaaccaccaatatacatagagcacctactatgcactagacgaaacagataaaacctctgtcmttgtgtgcttatgcaagaacaatttgaactttatttcttcatctgaatatatcacttgttatagatctcagaaatattgcctatcgttcaataagaggta

SEQ ID NO: 35644 - DNA, 201 bp, Bos taurus
gtgaacttccttgttttaaaaagatgtgggggcttctctttcccttagaacaaaatctgaattgctaccctgggtttgtaaggctctgtaccatctggccsccgtctagctctctggcatccactgcctagtgctactctctcatttgttaactcagctccaggtgtgttgatgctcttctggtcccttgaacacacaaag

SEQ ID NO: 35645 - DNA, 201 bp, Bos taurus
ttctatggcagttattcctgaaaagtcaagttcagattacaaagaaaaaacattagaaaactaaagttctatatgaattctatggccacttcggttattgraggtataagagctcaaataactttccacctaagtttgttgttgtttagtcgctaagtcaggcccaattctttgcagaccctgtggactgtagcccaccag

SEQ ID NO: 35646 - DNA, 201 bp, Bos taurus
gcgttctggccgagcggagggcgaggtcaagagttggccgtctgcacaggtgggccgcggcgggagggcaggggcgcgcccgcggcgggccgggtaggcgygcgagactcggggcggggtcagaggggaacgaacggcttcctgagtggcttttcgccgcttccggggcctggcgcccgcgcgaggaagacggtgttcttg

SEQ ID NO: 35647 - DNA, 201 bp, Bos taurus
tgctggcttttggattccagagaaatttgtgtgttcattatctatatctatgtctgtatctgtttatgtctgtgtatcccttttctttatgttcaaggccrtcgctaagccgaaaacaatgcttggtttcctctgtgaggcttcttacggggtgagaaggtgaagctggtccctggccaagacccatctgaaagctgtggg

SEQ ID NO: 35648 - DNA, 201 bp, Bos taurus
cactgtgtgccttttatgttcttggagtcctggagttggaaacgacatcgaaagttcatcatgtttcagttcccacttggaacagaattctacctaaaccrtccagcttgtgtcgttgtcgctctcttctctgagtctccggctaggaggatggtcatccggatatgatggatgggagttggctggcaacctgcttataac

SEQ ID NO: 35649 - DNA, 201 bp, Bos taurus
cttcttcctttgctctctggaggaaatgtcactggctcttgcagttggggcagaaaccaccatagggttcctgggcctttgagagggcagtgacaggggargctcttggaacccaaaaaccccgcgcacatagcgtgtcgggcgcctctccaggctgggccccactggaccatctgttaatccacttttcctcctgctgtt

SEQ ID NO: 35650 - DNA, 201 bp, Bos taurus
cccattctcactgctcagcccgttttggctaccgaacctgacaattaatgttgaccctggaaacactgacctccccagtggaggccttcatctgctgggcrcatctggcaagcagtcagtggtgcttacctggattccttgattaatgtagatgtaaagattttatcaaggctcctggcggccgggcttcaagatgtaatc

SEQ ID NO: 35651 - DNA, 201 bp, Bos taurus
taccctgatcaccaaggaacagaccggggcgggtgggggttaggttttgaaaagacatcaggagagccatgaaatgcagtcactgagagactgagaaatgmggccctcggggtggtagctcagggcctccaggtgacggtgacctctgctgactgcctgctggggtcagggggtggctcacacccacagtacgtggccaca

SEQ ID NO: 35652 - DNA, 201 bp, Bos taurus
acatacacaagcattctctctatgggttctcatactaaaaccaacatttatctgctatagcataagagagtttccatgtgagcaaatcctctgtgagaaaytgacccttatccattcttatgatgataaatgtgaaccataagaaatatataataatgtttacttctccagcattatcagagtttgaacagattcacataa

SEQ ID NO: 35653 - DNA, 201 bp, Bos taurus
aagagctacaaaagcctaggagaagctaaatcagattgaagtggaaaggtaaagaaggtttcctggaagtgacatgagaagagatttttaaagtatgtgtyagctagatggataatgagagaaaggcattagagatgaaggaagcaacaaggtaaaaaaaaaagctcagaagaaagaaaccacaggctgttttcagaaatg

SEQ ID NO: 35654 - DNA, 201 bp, Bos taurus
atttttttcccctgaagtcctgtctgttgcatcataatccctttaactcaacattttattttatataaagcactttgactagaaacaaaaatagagtttayataataatcaaatttggtggcacacaagtgaaggactggctctttagaatgttatctcaaagaaaatattttctatggtaaagtctcacttctaggtatg

SEQ ID NO: 35655 - DNA, 201 bp, Bos taurus
ttctgtttccagataattggtatgtttagggttaatggttttgtgtgtattggttttccctctacagccctgctgtgaaaactctggatggaatgcttatmtatacacatctctagccttcccagtgcctgcccagatctggctcagcaggtccacagaaccctctatttgtgaagaggacgtggctgccacgagtcagcc

SEQ ID NO: 35656 - DNA, 201 bp, Bos taurus
agcctaatgtcaaacagagcaaaacaagggaattgttaggaaaaatcatatcaactacctcacccctgaaaataagtattagcagcaatgataataatacyaaatgaataataaaagctgcaagtgggcacctccataggccagacaataagtaccatttcgctttacctttcgacagtcctgccaagtaagtggtaggat

SEQ ID NO: 35657 - DNA, 201 bp, Bos taurus
ggggcggggggagggaatgagaggttagatgagccattgaaagtcatagaaaacaggaaatagaatctgagtctcttgacttctagcccaggggcctaacsaccaaactgaattatagcctcagagtatcaacagatcactgaccagcactgacaagtcaggttcatggcactcattcattcacacttccacatggccaaa

SEQ ID NO: 35658 - DNA, 201 bp, Bos taurus
gcttgggtccagtaacacttttgcccttttgaagcaagaagactgacattttccagcactaatgctatgtttattcaggccttaggatatcatttcattgrtcattactcagttctgtgaattgtgctcttgaaagacattataccttgcttgttgtctcttaaatagaaatgaaaaaattagcatataggatatcatgac

SEQ ID NO: 35659 - DNA, 201 bp, Bos taurus
ttgatttgctgacaatctttggcgttacctaacttgtagaagcatctccctgatctgtgccttcatctttacctaatgttctccctgtgtacatatacctktccagatttccccttttttataaggacaccagttaaattggatcagggggcccactcaattcccatataaccagcattaaccaatgatatctgcacaaaa

SEQ ID NO: 35660 - DNA, 201 bp, Bos taurus
tggaatccattgctcatgaatcagaggaagagaagaggtgattattccgagccaagaggtcattaagaatccttgcttcggtcagaaggccagtctcctcsttagctctttctccagcttcctggctgtggtctttcttctgggcatgctccttggagctaccaccttgtagggccagggatgtaggaagtggtctgagcc

SEQ ID NO: 35661 - DNA, 201 bp, Bos taurus
acagtcacttccaacttaaaatgaatttattgtttttaaaatatttatttattcctttggttgcgtcaggtcttagttgcaggcaggtgggattttcaccrtgtcatctttctgtttggcttatggactcactctctagatgtggcccgcaggctccagagcactcaggcacagtggttgctgcgcacgggctcagttgct

SEQ ID NO: 35662 - DNA, 201 bp, Bos taurus
cttcccacagtcagcatcctctcattaaagtcttgataacaccaaattgctttttaaatgcctcgtactctataaagctgatgagcagtgaaataaatctrttcagtcaacggagattgggtttattctcaggggtggcaggaggtgggtacgtcaaggagaagggactgaactgaatccttttcacaagaaattatttca

SEQ ID NO: 35663 - DNA, 201 bp, Bos taurus
tcagcagtaggggtctcctcaggcatgtgtctctttctatcagggagataaatttacaggagcgcctacctaacatttatcttggtcccacaggccagaamgtatacatttttctcccctagatcaatcactggagagaagaacggggttaccatttttggtttgggccagtgtgggtcagagggaagggcccaacctccc

SEQ ID NO: 35664 - DNA, 201 bp, Bos taurus
ctggagcctggtaattccactttttgctgaagctaaaaacaaaagcagatttccttagtttcttcctaatgtccatcttctctcccaagatgccatccagracatagcattttgtttagttctcacgcccctcagacctctcctggctgttagcgtttctcttcccttgtttttaatcctcgtatttttttttttttttgt

SEQ ID NO: 35665 - DNA, 201 bp, Bos taurus
ttggaggctcagattcacagcattcaccctgttggttccaaactcgggtgaacagatttctgagctcctggcaacctgttccagtgtggctacagagggtmatctggagtcacaccgatgggcctccaatcaagggctcccttgattaggacagttgtggtctgcccatatctcagctctgcttgtgcttctgccctgaca

SEQ ID NO: 35666 - DNA, 201 bp, Bos taurus
agtatattaccctgagggaacagtgtaccaagaaaaataaaggctgactgcagaatatgctaaacttgtggccaagaaaatggaggaggccaaagaaaaaygccagaaagagactaccaagagagggaggctgtcctctccaagagcttccacctctgaggccagtcaaaactaagatgtgagttggttccaggacagagg

SEQ ID NO: 35667 - DNA, 201 bp, Bos taurus
caaggtatccaatgtttgattgaactccctgagatcttgctctctgtgcaggctcctagtgctgttgtgaaactggactcacctttggcctagaatggaaygatttcagacaagagatgataagtattagggctgaaacacagatggctgcagaggagactctggcatctggcaaatctttgctttcttagggcccttcag

SEQ ID NO: 35668 - DNA, 201 bp, Bos taurus
gctggggaggagggtctctccctgatctcctgcagtgacagccttggctggccacgcacagccattcctgtgcagacccaggcctctggggctcccatcaycacacagcgctgctcacaaacaccggaagtatctttccaacaaactgtaattacacacgtgcttccctgaagttccacactctccgctgggcaggccgtt

SEQ ID NO: 35669 - DNA, 201 bp, Bos taurus
atagctcaagtaggcaggatttattaaagaggcagcagacagtgtaccctcaagtttcttgtctcgacagactacttacagttccagtaggcagcagatartgcaccgggactgaccccataggagtggctccctcttgcttcccatcttataggttctgtctcttctctctggaacccgattggttcagccttatgcaaa

SEQ ID NO: 35670 - DNA, 201 bp, Bos taurus
accctctgaacaccagtatcttccacgtggacatgtagcatccacccacttgctgaacatcaagtgaagaccagtgccaggccctagggatgccagtaagmtgtgggtgagacagagaagcaggtgctgaatgtttgctgtctttagaccagaaaaggtgaatgctctcccggaggtctgaccttgagtgcctgggacctg

SEQ ID NO: 35671 - DNA, 201 bp, Bos taurus
tattaattatggtatggctaaacctggcccatgtggaattcagggtgtctgagaagaaaaaagtttgttgggttgataagaattatttaaaaagtaggacrggatattggccttaagatcagttttcttaacgttttcctcttaactgctaagggcacaatttgaagagctctgtgctgacttactgcagaagatagaagt

SEQ ID NO: 35672 - DNA, 201 bp, Bos taurus
aggctcccgtgtctgcccagcccatcagagaggttgctacactcttgtcgatgagtgtcatcagcaaacttggcaactgggccagctccctccagcctccmgaaggattcaatgaaggatccttctggaatagggggagcccagacccatgttccctttcaggaggccccctttctccgtcatttctgtgtcaccagggct

SEQ ID NO: 35673 - DNA, 201 bp, Bos taurus
ctcccacagtgattcatctggccacgttacagcacaaatgtgtcagttttcagggacttggagagctcttaagcaagcacaggtgtgttgttgaggatgcygatatgcaaaggagcaacagtagacagatccatgccccgaggaggctgccagccagtgaggaccagcccagtttccaactggacccccttgatgtggagc

SEQ ID NO: 35674 - DNA, 201 bp, Bos taurus
gctcctgccacggagctgagagagccgggaactcttctcgattctccatcttgcccatcaaattaagtgacaatgaacggggctatcattcccatgcactraattctctccagaatctttttttatttatgtcctatctttcccattaattaaattttaatagcagttttttcctccagagtttccaccatatggatgaac

SEQ ID NO: 35675 - DNA, 201 bp, Bos taurus
actcacctctcctcctctgggtgcacatctcaacgcccggccaagtgaacactttcactctaccccctgctgctaagtctgggctttgtgcttccagccgmttcacttccacgtaccaggccagccatttaaatgtccgtatgttcccagcatggctctgtgggggcacttgtgactctgaatgtaaaacaggagactcca

SEQ ID NO: 35676 - DNA, 201 bp, Bos taurus
aataacattgacacctaagaatagagctcgggtgagtaaggaagtaggtgggtagagaggtctaagaaccggaaaggcccagcaagggcactgtgagtcaygccaacttcagagagagtttgcagaactgccaagggcgattgtttcggccagggcttaatcctgttaaggtctttcgtgaaatttcagttttgagacatt

SEQ ID NO: 35677 - DNA, 201 bp, Bos taurus
gcttcgcgctttctgtgttttttatttaatcctcacagccacccagtgaggtcagttctgctctttggctgatggggagggggcctggagaagggatgcargttgttaatgggcacaggtgtgggttgtaagcggcagagcgtggatttgcccctgggacctagccacagggtcctgacaccgaatgtgcccagggccgtg

SEQ ID NO: 35678 - DNA, 201 bp, Bos taurus
gcctgcctcagtcagctcttctgtctcacctggaaaggcttgtcttcactctcatggtctcttgagtttctgtgtgcacttctgcttggtccagactgctygatgtcctgggatggcagggcctttggtgcagggcgcgtggtggggagcaggtgtctccgcgctcagggctttgtctgcgtggcctgccgtcctcggagg

SEQ ID NO: 35679 - DNA, 201 bp, Bos taurus
ctgagagtgaccttgggtcacgtatctttgccaggacctatgtgcatgtcttggaaaggagttgggattgatgcttggctcaggggaaaggctaccttgtmatataggggcccactgggtagtcattcatgaaaaagcagccattcgggtgaaaaagaagaaacaaggccaagcggtctgtactcctaagagcagacggct

SEQ ID NO: 35680 - DNA, 201 bp, Bos taurus
acaaataaaactttgtgtagcacacgtatatagccagactcaaggaggcagctgacttgggataactttttttttctgtctaaaaatcaaaatcatgacaygaggcaccaacatctgggaagatctctacatccttctgaacacaacagtccagtccttctaggttcctggcatcaatatcaactctgagagggtgactgt

SEQ ID NO: 35681 - DNA, 201 bp, Bos taurus
gatcatgatgaaaacatcaaagaacacacaaatatctcctcctcctgagccagcccagctatgttcatctagaacatgacactgaaggctctggacacacrggataacagcacagaaacttaagagaaggcagcagttggattttgtttttcaggacagaaagcttgagcagtctgtataaagcgcaatgctttgaaattc

SEQ ID NO: 35682 - DNA, 201 bp, Bos taurus
gctccacctggaggacaggcgctcccttctgctgattgctgtttccagacattggaatgaatgaatcaagtccatggcctgattttctgacctgaaaacargcaggaagagaatacttatgtgaatggtcatatctttgaggacagtgactgcaggagctggaggagagtttctgatggctgggccagccctgcttctctg

SEQ ID NO: 35683 - DNA, 201 bp, Bos taurus
catagagggctccagcttggggcatgctgtggacccgccctccccccgccacacacacacttcttactcaggctctgcagcaggagcaccgacggaggccrgttcacacacgacactaacctagggcgagggtatctgctcctcacaggggatggagccagagccctagatctgctgtggccactgccttcccaagaagag

SEQ ID NO: 35684 - DNA, 201 bp, Bos taurus
aataaagaaccttcaactactctgaacctcctgccctcattctgcagaagtgacaagttgtttcatcatcatctgccttgattgtcctgggcaccagaaayaatgtcgtcactcattcattcatcaaatatttactgcaaccccgcgccccccgccagcctatatgaaagcactgggctagcagcactggagtgcaaagtc

SEQ ID NO: 35685 - DNA, 201 bp, Bos taurus
gatctatcccactgaggctgattctgctggaggggtctcttgccgactccttggggcacggtgccatctcagggtctcagtgttgatcagatgccagcagkttggacattcagcccctgaagaagccagaccagagttggaaagggaataagctactggcgtgtacagcttccaccctgcctcctatgtcctttgttcatg

SEQ ID NO: 35686 - DNA, 201 bp, Bos taurus
gtgatggtgaaaaacctcgggttctttccttgattctgcaaggttcctagcctagagcagagcctcatctgtggccgctgagtctggcccgcccggcagartccttgctgtcacatcccaggtggcacctctgtgggtgctttgctggtgaccctgagcgcgctgggcttcgggaagagaaagtgaagggtgagtagcggt

SEQ ID NO: 35687 - DNA, 201 bp, Bos taurus
tatttctgccacaacaactttcctttcctctgtgttacttggcaacgtctggttctccactcgccttttaaagatataatacgcgaatacactctgactayaaacaggccacatacagttaaaagattctaaagagtcagagactcttctaccacccgtcactcctccaccgcatcccgaacaccacgctctcctccagag

SEQ ID NO: 35688 - DNA, 201 bp, Bos taurus
agcatctatcattggagaatctggcagcagttcccagactcaggcctggtcagtggtccttcagctgcggtctcagccagaatggcatatacagttgataygtacacaagacctaccagttccggccagtctaaggatcacaactactgacattgttccacagttattcacatggagcaagtatgatacattcaaatgttt

SEQ ID NO: 35689 - DNA, 201 bp, Bos taurus
tttctcctcctcaaagccgcgctgcgggtctgtcgggagccttgtttgcttcctcccacagctgtctacaccgccggggccaaatggggggccctttctgyctggatccaataaatcgctcaccccaaatttagaaagataagaagcgacacaaatcatccggaaggaggccccattcgggcattctccgtcccacctagg

SEQ ID NO: 35690 - DNA, 201 bp, Bos taurus
gcctcatctgacacaaacaaccatgcctgggacctgggcgatacgttcagagcagtgtcagtgcagaagcagatacgggacatcaacgaaaaatgtccagyggcccatctcaactttttccccccaacagttcagtatgactgggggattcaataatctgcaccacaaaacccactggctgggcaccagaaactccacact

SEQ ID NO: 35691 - DNA, 201 bp, Bos taurus
acaggttcgttggcacaggctagtcatacacactatagaatctacactgatgtcttggttggggtacaaatacctggtaagaaagctaaggccgggcccaygagtaccaccagttcctaaatcttcagcagctgatactcagtattttcatccagacttttaaggattcttcagttggcatcaggcaaacctcttccctgg

SEQ ID NO: 35692 - DNA, 201 bp, Bos taurus
taaatataccacatcttctttatccgttcatctgtcaatggacacagattgcttccatatcttggctattgtaaacagtgctgcagtgagcactagggggygtgaatcttttcgaaatatggtatatttatacaacggaatattattcagccacaaaaaagaatgaaataatgccatctgcagtaacatgggtgggcctgg

SEQ ID NO: 35693 - DNA, 201 bp, Bos taurus
gcagatctacgggccacctcctcctcgggtatgagcatgggttgctttctgcttgtcaaggaccaagcccgccaagctctgggggccgtgagaactgaatrtgcatctcgagagagtgctgagtgcacatcagttcccagcagcctagacgtctggccaggaatcagcctgccctgagtctgctgggacaaagcaaccaga

SEQ ID NO: 35694 - DNA, 201 bp, Bos taurus
ttattttctccaactcaatgtattttgaacagaagttaacagtttcttgcatctagtcctgcaaaaactgtgggcctgacaggcctcagtttcacctcttygtattccctgccgttggcaagcatctacacatctgatatgcacagctaagcgtttggccttagtttgcctcattcctgagttcccacctatgtcaggctc

SEQ ID NO: 35695 - DNA, 201 bp, Bos taurus
tttttaaaatgtatctgttgcactttatatattatataacaggtaatacagttaaagcaatgaaatgaattagaaaaaagacgataagtccattggatttrgaactcagttgtttgtaggaaatctttacatagcaaaactaagcatctatgctcacaggagagcctctcaaatccaaatttttttttttcatttaaaatt

SEQ ID NO: 35696 - DNA, 201 bp, Bos taurus
ccaccaccaccaccccgaggccagtggcagcggtctgcagtcaacagctggtctcctggggatcttctcctcccttccacatctctgctgttaggagactygggccaggaatcatcgccactccccaccctgtaaacccaacccaaatggcatctagatgcccactgtggtgaggatgaagcaggtctttactgaatctgc

SEQ ID NO: 35697 - DNA, 201 bp, Bos taurus
catcaccaagtctacaaacaataaatgctggagagggtgtggacaaaagggaactctcctacactgttggtgggattgtgacctgatacagccattatggrgaacagtatggtgggcccttaaaaaactaaaaatagagctaccatgtgaccctgcaactccaccactgggcaaataccctgagaaaagcacaattccaaa

SEQ ID NO: 35698 - DNA, 201 bp, Bos taurus
ttccatgtcagtcatcacaagatgcccttcttacacacactctgtccaccttaccctgcactcgtcactgacatgctgtatatttatttcaggttttttcrctgtctttccctgacttgcgtaagagttctatgagagtaaagtctacaatagaagtacatagaatcactggaaaaaatttctcaattaaagatgtacttt

SEQ ID NO: 35699 - DNA, 201 bp, Bos taurus
gtgtctgtggagggcctttggcggccctcccctgccgtgtcctccatgtcagagatggagctcgtgtctctcccttctctgagaagggcatttattttgtyatggcctgatctaaccatgattctctcctgaaggcccctcccaatgttatggatttgagcagcacgtgcactgggggggatcatgagcctttagtctgtg

SEQ ID NO: 35700 - DNA, 201 bp, Bos taurus
gcagaattccagacagaaacgctcctcaggcctgaggtacggcccagctctcctggggtttgcagtctgcaccctgcccagctccacctccttcccaggayggcacctcacacacccagggccctgcatcctgggtcaggggcctcctgagggcactagcacagcccctcctctcatccttggaccaccctgcggtacagc

SEQ ID NO: 35701 - DNA, 201 bp, Bos taurus
catcagtttttcacttaccaattggttttctgccaattctcagaagaaaaggtttagttgtgaaagactgctttaccgtgctgaaccctaaaacaatatcygcttcctgtggactctggagacctgagtctcgctttgaatgcagggcgggcgggacccagagcacagggagaggctgccaaccaagggcagagcacccca

SEQ ID NO: 35702 - DNA, 201 bp, Bos taurus
aaatggccccatgctcgtggaaagttaccggtgccattgtcccttcctctgggcaacatgtgggtcactctctcagggcccctctgctaacagcccacttycaggacaaatttgagctgacactgtcagtcaccctgctccccccaggcaccaaatccacaggccatcatgggccattttcaaaacagtgctgtcaccctg

SEQ ID NO: 35703 - DNA, 201 bp, Bos taurus
tacatgggatagaattgtaataaatctgtgggaagatggactacctacaaacccattcattgaacactgtttgtttccaaagttgcgtttttatgacttgyacatgtttaaaataattttcccttttgtcttcctcagctgactctgtaaactacatcagctactgttccaagtgctatatgcatcttatctgtgtattac

SEQ ID NO: 35704 - DNA, 201 bp, Bos taurus
cagattggtcatcagtggtgaagggggtcaacatattgtaactagacttgtcatcagtttgtagtgtatacaaataataaataatgctgtatacctgaaayttggaaggaaagttatgaccaacctagatagcatattcaaaagcagagacattactttgccaacaaaggttcatctagtcaaggctatggtttttcctgt

SEQ ID NO: 35705 - DNA, 201 bp, Bos taurus
accgccagccccggccctcggcgcatagttgagggatggagtcacacaggaaactcaaggagacgtttgcctgtgagtctgcctgtgaggtttgggggagmaacaagcaggcactcggccaagcgcagcgctgcccctcctcgcccaccgcgaacccacattcccaggagggaagcggcccgggcacccgcgcgcccgcag

SEQ ID NO: 35706 - DNA, 201 bp, Bos taurus
ctcctgtcgagaaaggctttggggaggcccatagctctcagccctggttacgttaggaatgtaagtgtgggaatggctacccacttatgtatgcttatatrtaaatgaaatgaatgactgcagagatagaaggggtgggagggaggaatcaggattattttactgttataaattacactactagtgaagtaatcagtataa

SEQ ID NO: 35707 - DNA, 201 bp, Bos taurus
cttgctttctagaactctctgcaatcaaacaaactagattatctctgggaaggtggtagaagagagactcctgccttttattacatctggtttatgttccrtgttatgaaatagaattaattttgtaaaatggcttttgggatgtacttaaaataatctttcttactcaaagattgtttttactgcttcattttaaatttt

SEQ ID NO: 35708 - DNA, 201 bp, Bos taurus
accaggagtaggtgactttaccgccctgccctgcctctggaggcttttagtgcaaaagaagttggaagtctaactctgccaagatggttctttacgggccyaagtacaccattttctctgttttctggcttttggaataaagttatcattccttgccccaacaactgtccattactgccctgtcctgtcctgcagggccag

SEQ ID NO: 35709 - DNA, 201 bp, Bos taurus
ctctccctcccatgcttaggacctatagtggaaaaggccagccctctctttctacttctggttccaccagtgttgggtgggggtaggggcgggggcgaggrgggcagagccagaccacacactggccatgtcacggcagacctctgctgggtgtcgctgcttctctggcataccctgacaggcatcactgtgggtgtactc

SEQ ID NO: 35710 - DNA, 201 bp, Bos taurus
ttgtctgctttgctaaccatgactctttactggttaattatccacaaagacgtttgctccacagtaattttccagttctaaattccttccaaacacaatgygtgcgtaatcactagaaacttgcacacaaacgtggtcatcctacttacataatttaatgttatgcaaagactaagtcctagagaaggaaatggcaacccc

SEQ ID NO: 35711 - DNA, 201 bp, Bos taurus
acagacaaggtcagctagccagctggctgcccgtgagactcacctggtggagagaaggcagaactcccacagggcaggcagcctgcctggcctggctgggyactgaaggtgcctgaggggcagggaaggcactctcccacgctgtctgcctggttgctgttctggaaggttccaggtgggcagggcctggggctgggagtc

SEQ ID NO: 35712 - DNA, 201 bp, Bos taurus
aacttattgttgtttctagaggtcctatggccagtagcaagcagaagaaggaagaaagtcaattgcaagagtgatagagaagagatgtgttgagtccccartgaatatgaagcaaacagggcccagattgtctgctttctgagtttacaaaagaaggaaaaaaaaattttttttaatcttgtttagacagtttgcttttgc

SEQ ID NO: 35713 - DNA, 201 bp, Bos taurus
ccttaatgttgatggctgttgcctctcaggatggttgtcactgaatgttgggttgactttggtaatgtcttaaaataagacagcaatgaactttgatgaamagatttacttttccttttagacaatttttctgtagcatataatgttgtttgatagcactgtattatcagtaagatttattttttcaaaattgaaataaat

SEQ ID NO: 35714 - DNA, 201 bp, Bos taurus
tgggggtgcagttcctaacacagctgagtatgggacttggtgtgtccttaaggttgggttagtttgctagtggccaaggccagggcccagctggtctcagygtagggtctgggatgctgtcattgggaacatagttttcttgtgtcttttatctgtcacctggtgaggctggtttagagatgaatgcaggcttcctggatc

SEQ ID NO: 35715 - DNA, 201 bp, Bos taurus
tgttctccgaattgataatttagtggagaccttcattaatcagttatgccaatgtatgatgagacgtattcttatgaaggtaagttggaattacttccttraggaagtgacaactgatgtgagatctgaagaaagagtaggaattaacagtgtgaaaatatatttttaaggcttcttcatagaagtagcaacctatataaa

SEQ ID NO: 35716 - DNA, 201 bp, Bos taurus
ttaggttattttaataacatgtttttttagtccttgaggaatgcattaagctaagttttgtttgtgtattacctgagtttgtaattttgttgaaacttaayagcatgttacactatgtttcaggcttcccaggttgtcctagcggtaaacagcctgccttccaatgcaggagacataagagatgaaggttcgattccaggg

SEQ ID NO: 35717 - DNA, 201 bp, Bos taurus
acctattggatagcaatttccatttctcccttctcctataccctgccaaccaccatcctatttctgcttctatagatttgactatttttaatacctcatayaagtagaataatacaatatttatttttctgtaactggtttaccttacttagcatgtcttttccaggtctatccatgattttgtaaatggtagaatttcct

SEQ ID NO: 35718 - DNA, 201 bp, Bos taurus
catgcttggaaaaattccacctggcacaaatcagtcactaggtggctgaatattgtgaatggaaatagctggcaagaagggaaattctcttggtaaaagayagaggcacataagcgctcgagggtaacatgaaaaaaaaaaaaaaaaacaatttgcttttgagaagctttgataatattttagtggaaacaatattccttt

SEQ ID NO: 35719 - DNA, 201 bp, Bos taurus
caggcaattcagactttaaacaaagctcaagttgaaattatccagaattgaaacaaacctttaccagcagatatcagttttgaaaggcaaagaagtagctraaactaagctatggctagttatgaattgttcacttaacatttttttacaggtgctgcaaaactgaaaacgttggtaagcagagctgaaagaactattttg

SEQ ID NO: 35720 - DNA, 201 bp, Bos taurus
ctttagctctaacccttgtgctctgttgcctgtgcttagtcatgctggctctgtacctttgtgatagaatgttgcctagagcctgaaatatagatgataayccactctcaagactctgacctttaaatatataacacttttccattcacacagagataaaaagttgcagaatataaaataacaattgtcttgttggagatt

SEQ ID NO: 35721 - DNA, 201 bp, Bos taurus
atttaaatacttctaggataggagggaccaaaatcctaactgatgattgaagccagggcaaattgctttattagaacacagtagttccaatagaggcccakggacacacaggcatcaagatctctggagtaaactactataaataaggcaaaatttgtctggtgacccagatcttacatgaagtttcctcagggttcatag

SEQ ID NO: 35722 - DNA, 201 bp, Bos taurus
aatgaagaggtgacaggatggttatctagagcagtggtttcaaactattttgctcatatatctcacagtttaaaaaataacagtcaatgcaatatctgatyttaaatatattttacctattcattttttgatcaccagttaatttagaaaatataatgtatttgatgtaaagcttattctaggaatagacatgtcatttcc

SEQ ID NO: 35723 - DNA, 201 bp, Bos taurus
acatttatagactaactctgagctaataacatgatcaggtcttttgaagaaatattaaggtgtatagttatgtggaaaaagtcctaagacagagagagatmtgacctcctagagtttgggatccttggaaacctacctatcagtgtgaagacagtaaacacaaactagcaaggatataaattcctgttgctgaccatttga

SEQ ID NO: 35724 - DNA, 201 bp, Bos taurus
ctcttttcagtgatttgcagtgccacctctgtatagatctgtttctagcatcttcatattctgcagtgttgctctatcttctgactcctcttctgtacatstacactacatcttttcttcagaattttttttggcattctttgttgtttgtcagacatctggattttagatttattttgttaatttactaatccacacata

SEQ ID NO: 35725 - DNA, 201 bp, Bos taurus
aatcccagggacgaggggtcgcacagagtcggacacaactgaagcgacttagcagcagcagcagcatgtaaccttgagaagtaggtgccagtcagagtatyggcctgagaggcggataaattcagtcagtatacctaagctatttgtctgtgaccagatgatatcctgaaagggatgggatcctgagtcagaatgaaacca

SEQ ID NO: 35726 - DNA, 201 bp, Bos taurus
aatcttaccaaaatctatttaccagccaataaaatgtcacgaataactgcatcaaatgttcccaaaaggcccaacaaaatcatgaaagacaacatccgctkttgcaatcaaagggtcattatttactttcaatacagcagtctcagcactatgatgaggatgaaaccctgattgaaattgctcaaatgagtcaaattgcat

SEQ ID NO: 35727 - DNA, 201 bp, Bos taurus
tgttttgacttttatctgaaagcaaagttacatttgatgtatttcataaactaactgaatccagagattttgatgcatagtggtccttggccagaacaaakactgaatgtcatggactgaattaaacacatttcccatctctctctgtgctttatttccttttgaccacaatggccttcttttttatgggaagggataagc

SEQ ID NO: 35728 - DNA, 201 bp, Bos taurus
caaatttagcaaaacatttaggtaactaccttttcaacaagaggagcaataagaattaattattgtttactttcacacttgttttgtaatctctgtcacakcaaaggcagagcaagcaaatttaaataagagagaccagtaccatgggtactttttactgctctagtgcctaaatgaaaaacaagtaacacatttttagga

SEQ ID NO: 35729 - DNA, 201 bp, Bos taurus
tctagtactgtcacacctgcaacaaaggagagataaaaagtgaatgaatcacgacacagtgaggttctcaaatcaaattaacaaaagctgttattcagctkttatgtcattcagaatggcctctatcagctaacaaatgatttcactgaggtcaaaactaatcactatggattgaaccatttcattcacatgaaaacataa

SEQ ID NO: 35730 - DNA, 201 bp, Bos taurus
aggccagaagcatactcaagtcattgcatctcctctgcatgtcatatttgacccacatcattaatgcatggaagatggtttcttcatcaggaacattgacrtcatcactggccaggagtttatggagctcctcagctggaagcagtagaaactcttgatttcttataacttccattatgttttcctagagggagagaaata

SEQ ID NO: 35731 - DNA, 201 bp, Bos taurus
aaaaaaaaaaaaaagtcacacaaactgctggatcaacttcatccaccagggacagagactaaaagcaagaagaactataacactctagtctgggaaaggaratctcaaacacagtaggttagacaaaattgaaagaaataaaactattatgcagatgaagaaacaagataaaaagccacaaggccaaataagtgaagagaa

SEQ ID NO: 35732 - DNA, 201 bp, Bos taurus
aaaccactttccaccagtcaccttttgttttagttaattcttactgaacattaaacactcagtgaaagatgtcactttcttatgggaacattctcagctcratacaggatagatcacatttcttgctctgtgtttttatatctgcctctgcatctcattcataacactctggcagtatgtaattatacacctgtatcatca

SEQ ID NO: 35733 - DNA, 201 bp, Bos taurus
actgataactgtcttacgagtcaccattcagctaaaaaattgcaggcggattctttaccagctgagtcacaaaggaagacctcagctaaaataatttgtgycaaaattaatattactgtcagatagtcattggcttataatggttcaacttaaaatttttgacattataatgatgtaaaattaatgcatgttcagtagaaa

SEQ ID NO: 35734 - DNA, 201 bp, Bos taurus
atcacgttttaaaactcaatgagtttccagttttattagcctcacttctttcttaggtcatgtgaatctattgaactctagactgttgttgaatatatatrcagtgctgcaatttttagtttataagacatttgggattgttatatatcctgcattattttatgaggaaaataagtttcagttgacagattatatggaaga

SEQ ID NO: 35735 - DNA, 201 bp, Bos taurus
tattaagaataaaataactatattaccagtaaacaaaaggaaatgtactgtctttaaaacttcatgtcactgctgtgtgaaatgctctcactgccttcagygaagaataaaaatggcatgaataatttagaaaaataattttgtgttttgattttgaatatgcatctttgtactatttgaatgcattcagtaattctaaat

SEQ ID NO: 35736 - DNA, 201 bp, Bos taurus
tttgcagatgtatttagagaaataaataagactgatgggacaagtcaccattatcaacatggtgtggcggaaacagcattatctttatagttagaagaacrtagctgtttcaacggagaaggcaatggcaccccactccggcattcttgcctggaaaatcccatggacggaggagcctggtgggccgcagtccatggggtc

SEQ ID NO: 35737 - DNA, 201 bp, Bos taurus
ttcacttacttgaaagtgaaataaaattatatcttatgtaagactcttgttactttggatttcagtcactaatagttaaaaatattcaaacaaaacaactyagtgagaaattgtgccattttaatggcatccaaggtcatccagagaaccaggtggccaattaaagtgctatttcctattgcataactctaaggcacttgt

SEQ ID NO: 35738 - DNA, 201 bp, Bos taurus
acaaagataatcttctcttattgatcaatacttcaatctaacttgctttaaaaacatagcaccttgctattagagcactttttaaaaatggaagtacattkaaaaagtgaacataaacttttaagcatttttaagacaagtaatacacatttgtgcatatgaatggaagaaaatcacttgaattaaatacttcattggaac

SEQ ID NO: 35739 - DNA, 201 bp, Bos taurus
tgtactttacagacacaaagatgtggctaataaaatttatgttgtcctagaatataggctctttcttcttttccataattcagtgaacactcttgctcctyctattcccagtccctctatgtacatctggcagtttatattttcataagccaatagagtgttttccttcatgtatttacgccttttgtctgtaatgtctct

SEQ ID NO: 35740 - DNA, 201 bp, Bos taurus
taagtccatttatgcattatgtagactcatcaataagtggaaaaatattgaaacagacttcactatgcctttctaaatttttttgctccattacctgtgtyatttgttctgtatagaattaggactgtcacatattcataaaatttgccttaaattattatgtaatgtgtcttttcaatgactttagtactctgaatatta

SEQ ID NO: 35741 - DNA, 201 bp, Bos taurus
tttgttttttcttctgatacttctgttcttagggcaggtcctgtttaggcagttgagatttaattctaaccttttcttttttttttttttaaatgctaaakaatttagatttgttagtaaagcaggaatgggttctatctgcatgtcatagaattttgtatgtgactctctttgaagaatcataaaacacaacttttgtag

SEQ ID NO: 35742 - DNA, 201 bp, Bos taurus
acttgtttttattatttttacaacccaggaagatgctttggtgtccataggccaaacttcaacttgccataacccctatcccacaggcctctgtgcttgartttgtcctgatcctagaagttactgaaaacactttaataaaatcataatgaaaaaggccttaaaacacaagtggtacagtgaaaatgcttcctttccttg

SEQ ID NO: 35743 - DNA, 201 bp, Bos taurus
agaaagcttgttgtaaattgttctaataaatttgaaaagttgagcttccgaccaaagatagacatctttgcatttagtctttctaactattgacataatgrctaatgtagcaatgtgagaaaattttccctttttcattaaatccaaaatttttcatcccatatagaagagagaaactttctccaaatatgttctacaatt

SEQ ID NO: 35744 - DNA, 201 bp, Bos taurus
ctggcccttcccagtttccagtgttcagtttcctgtttggaagcttgggtcctgctcagaatatatcatcaatgtgtagacattcttcaggctggcagggrggattggtggcacactgaggcctccatctctacagggtctgattgatgacagtaatctgaattttcctcatctgtaaagtgggacacttaatctgtattg

SEQ ID NO: 35745 - DNA, 201 bp, Bos taurus
ctggaaaatatctttaatggccactgcctgtctgattttacagtattattcttcagatactcacatttctaataacattgatgctttctgtctgtgtactrtgtatttgaaacactggccttacacaatttcagctcagtggtacccatccaagaaccaatatccatggtctatagaagggaataatattttggtcaacca

SEQ ID NO: 35746 - DNA, 201 bp, Bos taurus
gcatataatatcagaaaccaacagtaattaaaagtaatcaaatttagtgaaatatgtacaaaataaagagatctgtacacattttaaggagttatcaatcratatactgtttactatgtgaaatgagacaatgcttattactaaaataaaggctaagtctcttctttgcctcattttctgcttttgtaaaatgtattgctt

SEQ ID NO: 35747 - DNA, 201 bp, Bos taurus
aaagcaattcactgatataataaatgccagaatcaaagtggcagtctggaggaaaaataccaggatttaggatccacagatatgagatccaatctagtctytaccattttaaattttctgggaataaatttgataaccaatctacaaaaccaaatctataaaaaaaggagattggattagagttgctctaatgttcttacc

SEQ ID NO: 35748 - DNA, 201 bp, Bos taurus
gatgtaagcagaggaaaaaattttttttcatttcatgtataagggaactgagacaataatagaccgacctttggatctagaccaatgcttctctacctatwtctgtcacctgtataacgcatttctataaggtctaatagagccatgaaatgtgttctcagtgggtgcttggatgtgcttatgcgcttcaatgcatcatga

SEQ ID NO: 35749 - DNA, 201 bp, Bos taurus
gaaaaacattgtatttgcaaaattacacatagaaatactctgagatctaagagagttctccagagatcatttgtgtttgaatcaataaaggacccacgacrattagttatctggataactttaaagcattgtcttagatggagattatttgaagccgaaccacacttcctgtgaaaccctatatttttgtttcatctttgc

SEQ ID NO: 35750 - DNA, 201 bp, Bos taurus
tgaccccatgcgcagaattattttttcttttttttaatggggggagggacgggcagttcaccattcttatctggggagcagaggtaaataaatacaagaayctgcagacctaagggctgacactataataataggaaggtgaagattccatcactcagaactccttgacaagtgacatttgaatactgtgtctaaacttga

SEQ ID NO: 35751 - DNA, 201 bp, Bos taurus
cttacttgtttttataaaaacctaagcaagcatggtgtaggcaaggcgaggtggggcagtggggaagtggctataagctttggaccagctgactacattcygctgaaggtaaatgatcagctttcaaatatcctatgccatgtaggaatgcacatgcccagattaaagtatagtgcagacctggggaagagttcagagatg

SEQ ID NO: 35752 - DNA, 201 bp, Bos taurus
ctgactctaattccagagggccaaagcagtggtgccatcctttccttcactgagaaatggttgtgctctggctgtggacacactgttcaggagtcctctcyggggattcttaatcacttagtggcccacacattcaggcagggcacaaggtagattcaaccagcagatttgctattttagggaaagccatctgtttagatt

SEQ ID NO: 35753 - DNA, 201 bp, Bos taurus
gacagttcctgttagcacatagtaaaagccatacaggtattagccatatgattgtaagtaactaaataaggaaagcagtccaagaaggccccacagagaamgttgttattgttcagtcggtaagtcgtgtccaactttttacagagaaaatagcattggcttaatggcctgagatagtgacatgagcactatctgggaagc

SEQ ID NO: 35754 - DNA, 201 bp, Bos taurus
ataaaaaggtgagaggagtatagatgaaatgtttaaagttcaacctgcttatcaaatatatagacatagctttgaaatttctaatccagagtaaagataayaaaggaaaattgatatttctcctcctcttttccaaaaaggacatttggtatgctcctgcttcagaggtactgtttaagaaaattagaatatttgatagag

SEQ ID NO: 35755 - DNA, 201 bp, Bos taurus
tacctttggagaatgtatacccagattttacaaatcacctcttaaaaaatgtctcatttaaggaataataattcacgtgtagccctaggaaataaagacaycctctcatcgtgtcacatcctcccttccttctgtgcaccttgtaaacttcctgccagcctgcaaggcttatttcttgctgtgtacctgccttatcctccc

SEQ ID NO: 35756 - DNA, 201 bp, Bos taurus
acctatggtgctcattagtaaatgtgtagaaatgcttctcctggttattagtcatatctcggattcgtttgtataccggagcactcctatttctcacttcytggagaactgtctgtagcacgatgacattcctgatggcagggtcctcaaggacatcaatcttttaagtaaataaataaatggttattttttcccatgttc

SEQ ID NO: 35757 - DNA, 201 bp, Bos taurus
gtgttccaaaaatgccagtgaggcataatttgaattttcatttaaaacaattttgttttattgtaatgagaccctcttgaagtaattagtagaaacaaccmctggacatgaaactagttttgagattcactttctttgatataagtcagtttcttaagacatagatccataatgccagtttcccataaaaattagtttgaa

SEQ ID NO: 35758 - DNA, 201 bp, Bos taurus
gaaccgaactgaggtgcccacacttctgttctcagtcatcagtggcagtagcctacttcagtgtgtaataatgctagcttcctctacctgcctcactgttraggatgaccttaagattatatccaagttcaggaaagaatgttgttagtgattagttatgtcccctaggctatgacagcataatcatgtctcatttaccaa

SEQ ID NO: 35759 - DNA, 201 bp, Bos taurus
tgcagatgagaagtgaaggggatcctcaggataacgtgagagaacagacaacaaggccagatcagagctaatgaaaaacctctaggagaatcttatccaarattatgaaatgaacagaatgttgcatacatctgaatgtctttcaaagagatttaagctggaggttaacaaattgtagtctgaagttcaaatccaacctaa

SEQ ID NO: 35760 - DNA, 201 bp, Bos taurus
ttcaatcacgaccaatttacagataatgttgtgctagtttctcgtgtgtgttgtcagtttcatcacctgtgccagattgtcaagtgaatgccctagataaygtggataccttagtcaacaagtttcatcatgcttctaagtggaaatgttctggaaattttcctctcagctcttttcacttgcttgtacctttctggatga

SEQ ID NO: 35761 - DNA, 201 bp, Bos taurus
tctgtttcattatgtgtaaacaagtgggcctcttctttcttttccatacaattctataatgaatttctttgataagtataatctttgctacagtagatagyattttctacatatcccacttggtcctaagagctgtatggatctgaattcatttaatgttgactcttaacttcctcatgaagttgctataagcaacccact

SEQ ID NO: 35762 - DNA, 201 bp, Bos taurus
cacacgctgtccgagtaacaagaagccgtcccagaaacagtcacagaaggtactagatcataggtaagtgttgctgggtaaacccgcttaagcctcatcaygaagacaatttagaactagccatgtcatgcatcctttagtttgattaaatgagttcatttcttgatttatcctttcaaagagattagtcaagactctctt

SEQ ID NO: 35763 - DNA, 201 bp, Bos taurus
caaatggaagctggaatggagaataccttcaaaatcccaaagcaaaataacgtgccaccctatgtgctgcagacccaaccacgccatcaatcaaatacaaragtaaagatatgctagatgtcaaacacgtacctctcctacaagactcttctcaggaaggaggagacgaaaagcaaaggaggtaaacaaaggaggaggaac

SEQ ID NO: 35764 - DNA, 201 bp, Bos taurus
ttagggccaaagaagtttgagctgttgtggagaacagtgggaagaggcagcagaagttaagtgacagccttggagttttcagtgtggaatggtgctaacartggccagactagtgacttggactcataagacctcttaactttgctgtaggtcacctggagttctgtaaccagaaaagtgatgagctaagattgttgctat

SEQ ID NO: 35765 - DNA, 201 bp, Bos taurus
cagccctttgacctttgggctctttacagaaccaaaaccaacctaaaataaatcactgggaacatacagatgacagaaaatgaccatcgcgttgtcttctyatataccctttattgttatatttagaaaatgaacttccctcaacttttgacatagccaccctatatctttttgatctttggttatattttgctatgcaaa

SEQ ID NO: 35766 - DNA, 201 bp, Bos taurus
ttttggaatgtacagatggagacatttggtagaataataaatatcagatttggaaatcaggagataagttgctcatttacatctatctctctaatcaatcrttcatttacctatgtacctaatcaattactcatctatctatctatccacctacctacctgtgtgctcagtcgcttccgtcgtgtctgactctgcgacccc

SEQ ID NO: 35767 - DNA, 201 bp, Bos taurus
gattttcttcagtgttgtacaacacagaatttggctgggctttgtcccagctactgggagggaacttctaaatccttggactacctgagtgatggagtgtytttgttattcatggttggtctttcagatcacacctggtagtttatactaacaaggaaagtgatggcagactcgtggatagtttctctaatgagatagacc

SEQ ID NO: 35768 - DNA, 201 bp, Bos taurus
gccccccacacatcaaccaagcactgcattctccctcacacagcatccatcaaacgacagtcatcaaggaaagagagtaggggaaaaaagaatcttcccaygtaactgggcatcttttcagacaaagctcatgcagcatcatcagacagtcatattagaaggcgctatataaacacaggcaggaagggtagtgctaacact

SEQ ID NO: 35769 - DNA, 201 bp, Bos taurus
catcatcgttttcattattccttgtttagaaattaagtttataaaatgtattctagcagaggtttaaggaaatcaggctatcttgtggtcatcagaatttrtggaactctgtccaaaatcctccactggattagattttagctctgcaaacagtcttatctcttaagagctaggacctgaaattaaattataaattgatac

SEQ ID NO: 35770 - DNA, 201 bp, Bos taurus
tttttttttttaatggtaatttgttgtggaatatgcacacccagtgtatttgggaggacaatgggaaggttgtgttttctgctttgagactgaatcaaccmctgggatctggagaaggatgaagggctgtgaggttgcctgattttatcatccagtggcagcccacgttggaggagggaggagcgagctccggggttgggg

SEQ ID NO: 35771 - DNA, 201 bp, Bos taurus
cttggtttagcttgtttaagaaggttctttttccatttactttgctgtctaagagattgggagaggcagctgcttcgatgaaaattagaggaaaacctttyccacaaatagaagaagctaagaggaaaaaaataggaccatttcatgttgcaactgttactggtgcaaccagaagaggaaatggccttataagtacctgca

SEQ ID NO: 35772 - DNA, 201 bp, Bos taurus
agattctatcaccctagcttttcagtgaacactggcagaaattaaattactttgtcttgacctaaagcagaggctgatgctcagcactttccttttagagmcagagttcacatttagagatgttctaatttcctttttagagacgctgcttcttgtcggcaattccggttcctgacgaaagagctttgctgtgttgccggc

SEQ ID NO: 35773 - DNA, 201 bp, Bos taurus
aagctccaaaaaaagaaaacaaagaaacaaaacacattctagtcacataatttcatacatgaaagtgaaagaatggagaacaggccaatgacttgttctgytttttcaccatggagggaaagtagttctggggcgtccccaagagatttacattatgtctgattggccagaatgaaggcacatatccacttctagctggaa

SEQ ID NO: 35774 - DNA, 201 bp, Bos taurus
agtgttcaatatgcattcaatatctacttatgtcgtaaagcatgtatatcaaagtaaatactgaaagtcatcagtgcacggaactgcagagagatacatamggaagtgctttcctgaatattttccatgctggggttcttcctttttcccttgatatgctttcattgtgcctcactgaaggataaaggagtagaacacaca

SEQ ID NO: 35775 - DNA, 201 bp, Bos taurus
aatagtatcaggctggccaaatcactctttgaaaaacatttaatttgagtatcgtttggtcagtagataaccaaagacattcattttagagtgttttaggktttaaggatatatttatagtgcattttggcaattataagcaattagtttttaggttaaaaatagccttgaagacagctttacagtacttcagattctttc

SEQ ID NO: 35776 - DNA, 201 bp, Bos taurus
aaatttttgatataaaataaatatctaacatagcttcattacctacagagttaaacctaaaactgtaacaacatattcaagcctttccaggatctaccccyaacccatctcaccagctctttcttctacttctcagagtagtagttcccagattttaatgtgcttatgaatcacccggggagctggtgaaaatgcagaatc

SEQ ID NO: 35777 - DNA, 201 bp, Bos taurus
catccaggagagaagagagggacgttgaggtaaaccccacattcactaccctttttagttttgataaataaaccaaacaaaaactacagcttcaagtttayggcagtcacactgggcttggagatgaattctcaaggcaacctggacttgggaagtcaaaatccaggagaaaagagaactatagagaagtaaaccaatgtt

SEQ ID NO: 35778 - DNA, 201 bp, Bos taurus
ctccaaaaacagatgaatgagaaagctgatggccaagtctaaggggctaaactctggaaactgctcccctcagcgctcacactcaagatgggaactcagaytgacaagaaactgctagacatgaaatcaaacttgagcagaacaggaaaaggaaagagaaggtccagagaaaagaagaaaagaataagccaggaaatctca

SEQ ID NO: 35779 - DNA, 201 bp, Bos taurus
tatatgctttctccatgttctttgtgtaaaataaaagtagtactattcgctgtctttaattatttaatgtttttcctttgtgtcttttctcgtccaattayaacataaaccccttaggccctggtcaactgtcacacttcttagacacatagcacagtcctactcaggaaagaaccactccaaacaacaacaaaaagtata

SEQ ID NO: 35780 - DNA, 201 bp, Bos taurus
cgagcagatgtaaatcaggaaccactgcttgttagagaagtgttgtctttaccagcttggcagtcatttaggggttattgaagccaggtgctgggctattmaacgtatttaaatattcaaattaggattaaagatttttccatgggaaagacagcatattcaagaattccatagcaaacagtaccttaatttatttcttct

SEQ ID NO: 35781 - DNA, 201 bp, Bos taurus
acagacaatatttgaggacatatgctttgaaaatgtagattcttccacccctccttgtattaactctcccaatctctaggtgaccaatggcctacatatgyaggattactactttatcaagtgaaaacaagaacactggatggtttgtaaaatgttttcaaatctctttacgtttatttggccgtgtctggtcgtagtcat

SEQ ID NO: 35782 - DNA, 201 bp, Bos taurus
cctgggggcagcaatattctacctggctgtgtggttccacctctccaaagcttccctggaggtacaggactttattcagttctttaaaagatgagcgcctragctcacctcattcactgtggccttccatcgtcacaagatcagaccaacctctttgcagttaggactcttgattttccaagtccctgtaatttatgcgtg

SEQ ID NO: 35783 - DNA, 201 bp, Bos taurus
tctttgcttatgtaactcaaactgatcttttctaaaattccttagagagattcttccttacccctactttagttttttgatactgagagagtcaattcttygggaggttgataagaggtctggggtccccaaggaggagaaaggggtctggggctctccaaacagagttagggatctggaattctcaaggaggaggaaagg

SEQ ID NO: 35784 - DNA, 201 bp, Bos taurus
ttatctgtcctttgttgtcaagctgtcttgtatcatctactttcagagtgcttaggcccatctacttttcaattcaattccatccaaaagacttttaaatraaatcaaactactttagtacccaattatgagtaagaaaatgatcctgcttttatagcttggtgcccaggggacacaagtcataaggtgcttctgattcac

SEQ ID NO: 35785 - DNA, 201 bp, Bos taurus
tctggaggttagaagtctaagaccaagatggctaaagacccagggtctggtgagagcactcttcctagcttgcatatggccacctctcactgcatctccaygtggcagagaagagacggggtgatgcaagctctctcatggttttgaaggacaatcagcagctacagagtcaggcagaaaacgtcaggccaatgtgtgaca

SEQ ID NO: 35786 - DNA, 201 bp, Bos taurus
gctaaagctggtgacttttggaaagtatctaggtcccctaaggatgggagctggttgccagtggagctcacaatgtgattagagggttggaattttcagtygctgatctcctgggagggaagaggggctggagattgaactcagttgtcaatggccaatgttttaatcaatcattgtatatttgattacatatgcttatgc

SEQ ID NO: 35787 - DNA, 201 bp, Bos taurus
ccattgtctccccacaaacaacctagaatgtctcccagtcttccaaccataaaacagatggttatgccaacttgagatgtagaccatgaagaaaatgacaygtgctttcagctaaagctatgagaaatttgtgctttatatgctcaggatagcaaccttcaggcacacaaacggatattattatagtatatcagtttgtat

SEQ ID NO: 35788 - DNA, 201 bp, Bos taurus
tgttggaagggctgaaggagaaggagccaggggtgactggaactattggattcaagaaaacaccagcatcagaatcaagaagaccctgccatcaacccagytggggcaacaaccgtagctgtcttatgactctcacaggcaagcaaggtttcagctgctgtaactccctctcagcattcacaactctgagcccatgttctc

SEQ ID NO: 35789 - DNA, 201 bp, Bos taurus
cccagcatatgtagtctaagagagaaaggaaaaatggcaacaagggggaaggtgggaaatttttaaataatgggtaacacatgataaggactattctaaaraccttgcatgtacagttcatggggtgttggaaaggaaggaattttcctttactttccctggttcttctggctggtttaagaattaaattgacatgagaca

SEQ ID NO: 35790 - DNA, 201 bp, Bos taurus
ccaggccccgtcaaaacctctaccagaagttctccagcagctcttcctgaactttatgggtaagttcaaggcaaaggttccaggaagtcatattttagccygcctctggcccaagccccagtgcagcatgatcagtagtgagccgaacactgcattttcatctccatctggcttgtgtgtcgaacacacaattgattctga

SEQ ID NO: 35791 - DNA, 201 bp, Bos taurus
agaagaaaacaagcagcggtctccagcctccaggtcatgaactgatgcctcccgtcagatgaccgagggcattagattacagtgcacaatagatgtaatgygctaggatcatcccaaaaccaccccctccccctggtccatggaaaacttgtctcccctggtgtcaaaaagcctgggtaccactggtttaaggagttaaat

SEQ ID NO: 35792 - DNA, 201 bp, Bos taurus
ctcacctttgccacaactgaattcctcttcccttccctccacataaatgtctacaaacataaaagacaaactttactccaaatttttttttaaactacttytctattttttttatctccttacacaactcaagtcaactaatcccttagcaaatttcaactttatatgatactatttcactatccaccttcttatatttta

SEQ ID NO: 35793 - DNA, 201 bp, Bos taurus
ctgatgcctgctgcagggagggcgtcttacccacgtggacgcagagaacttgctctcactgcctccatccagccaactcatgttaatagcataaaacattmctcattacttttgcctctaacctgctggacgtcttcagaatacgtcataagaaaacttggattttgcactatcaccacctagtggctaaaagcaggcaat

SEQ ID NO: 35794 - DNA, 201 bp, Bos taurus
tgtaagctggttcaggagagaatggtaggagtggatggagggatggacccacatgccatcgagtcctgttcatctaagttaaacagctgttaaaattttartatctttgagcattcttctctttaaagtctataaaactcaaaggtatcagactctacaaaaggagttcttatgctattaatactcagtctgcaactctcc

SEQ ID NO: 35795 - DNA, 201 bp, Bos taurus
gacctcacaactgtctgctaaaacccatttcttggctaaagtttaaaagcatcaagtaacagaacatgaggattccaaaacgaagccacggggttcagaayactccctgctcatccttgctacctttgtttacttctcttgtcttgtctgtatgaatatcctcctcctccaaaagcacctcctcaaatgagccacaaagga

SEQ ID NO: 35796 - DNA, 201 bp, Bos taurus
aacagacaaaaggccactcacataagaagaatcagattttagcttctggtctagtttagaagtaggacatcatactggaaagatgatgccttcaacttacygtaacattaatgttaagtaaggaattaatactgtaaaattttaagaattaagtgatcagaaaccaaggtattaatggtcagtatgaattgtctctgctgt

SEQ ID NO: 35797 - DNA, 201 bp, Bos taurus
ataatacactattattatcaatacttttaagcacaattgcttaaattactacccaatgaagctggaaaataactaaatacagtcaagaaaaatcagctttmtgtactatttatatatttgtagaccatcagaatcacagtcctctctagtacgatttctcaaaaatgatttcataaaggtcccaattagtatacagtgaaa

SEQ ID NO: 35798 - DNA, 201 bp, Bos taurus
ttattggattgcttgtgtacctgtatccatctgtacatttttaaaattcccagagtttgataaaccggtatatttctctaccaatatgggaattttgttaygtacattcctaaagggcaaggttcattggttttatttattctgtactgtctttggcataatttcatctacacagttggtaataattagatatttacagaa

SEQ ID NO: 35799 - DNA, 201 bp, Bos taurus
tgatagtttcaaatgcatccaaagaaaaccatggaaaacttgactggctttgtaattcagaatttaagaagaccaatgtttttctaaaatctaaatacaayatgtctttgggcagaagctgtagaattgggtacaaactagtactttctggtgtttggccactaagaggaaacgaaagagaggccaaaagttgaaaatata

SEQ ID NO: 35800 - DNA, 201 bp, Bos taurus
gatcaccagtaactgtatctttgttcccattttcagccttgtcacacaatcacaagaatcaccttgaaatgtaactaatgtgcttaaccctaggacattcrttcatttatttataccttgataaactccagtgaaatttcaagtgaccagaatacacactctgaagctagatgatgtttgcgatcaaatcagtggaagaag

SEQ ID NO: 35801 - DNA, 201 bp, Bos taurus
tagaaagcaattaagtaattttctcatgtaataatctcaacaaagtcctgttgtccccatcatggtttattatgtataaggaagattttttgtagaatttrtgcattgaatatcatctgtttcagcattccaaattgtattttgtagatatacaattatgtgtgtctaaataacagctttttagaagtcaaggagaaaata

SEQ ID NO: 35802 - DNA, 201 bp, Bos taurus
gacatctcatataaattgtgatttcttcaggagatagaactgttaggcttggcaatagtaaacatattaatcctaaactcccagtccttccccctctaggyaccctcccatccattggcaaccaaaagtctgctctctatatatgtaagtctatttttgtttcatagatatgtttatttgtgtcatattttatacactagt

SEQ ID NO: 35803 - DNA, 201 bp, Bos taurus
acacatttatgagctggctccccttaagattctctgtagtctggaaagatgattggcctacacgtaactgactgccactgtggccttgttagccactccarctgaatgaactgtctgcagggaagctgctgctgctgctgctaagtcgcttcagtcgtgtccgactctgtgcggccccacagacggcagcccaccaggctc

SEQ ID NO: 35804 - DNA, 201 bp, Bos taurus
tacttaataggaacccttcttcttgaagtcttggaataggtcatctgcctcctctgggtttagaaaagatcagtatattctaactcaagtacctggcattyctctcttacagaaacttctgtgtgttctttaattttgggaattgtgcctctgaaaagagttcaaggcctttgataatgaaatgttaacactcgtcccttc

SEQ ID NO: 35805 - DNA, 201 bp, Bos taurus
ctggaggaggaaggatcccaggctcagaggtcagcaggtagaggacaatctcagtcagatttatcgttttgcctggggccagatttgtctaaaagcttcaygcttttgcacagatctcccccaggattatcagctcacggaggggtcacgtgcgtatggccccactctcacccctctgggtaaacatcagaaaatctggca

SEQ ID NO: 35806 - DNA, 201 bp, Bos taurus
cagagctatcaggcatttgatcattttactgttgtttgtattaccaaatgaaaggaaaacagtttggggctgagtattttcagtgttaccagtgactcagyaccaggtacaagactcattttacttaagattgtaggttgaactcaaactggagtccttgaaaagaaagaccagttctttatccagtgcattaaagaaagt

SEQ ID NO: 35807 - DNA, 201 bp, Bos taurus
tgtatgtgcttaagttttcatttctctggaataaatacccaggagtgcaattgctgggtcatatggtagttgtgttgcaagtgttgttttgtaaaaaaccrccagaccatttttcagagcagccatatcattttatgttcccgctagcaatacgtgaatagtccagtttctccatctcttcttcagcatgtagtgttgtca

SEQ ID NO: 35808 - DNA, 201 bp, Bos taurus
atcttagctgatatgcacttcctctttttcgggccgtgaggattccaagagcagtcatggggagacctctcctgccagctctgctttcttgagaaagaaaytgagcttcacttggtggcccgactacagggaactcattaatagatgtgtcagcatttatgccaggctgattaaaatgcagcaaacgaatcattcatggtc

SEQ ID NO: 35809 - DNA, 201 bp, Bos taurus
cggccacggggtggcccagctgctggcatcggggcggggggctgcaggggaggcagttaaaggcacagggaccgcaatgatgccctggacctgcgagggartagcctcgggccaggggcagggagcgtgggcattaatcacggtggtcctcgggctacagggaggtgcagaaaaagcagctccgactctagaacaaaggca

SEQ ID NO: 35810 - DNA, 201 bp, Bos taurus
aggttacaggaaacaatcttggttaaaacatggaggacctagaatctcaggcatttatctctggcacataatttggtttactgtagggatattgtcctctmctaaaatttaagagacaaagtccatgaaaacagcagtttgaactattaggtggcagttatcttcaaactgacatcaccgacccaatggacatgagtttga

SEQ ID NO: 35811 - DNA, 201 bp, Bos taurus
gtcttatgtgataaaatccagttatgtcccctgtgttttacattactatctgcattctacaaaagtattatccccatttcacaaatgagaaagtaaaatgrcttagttgagaccacatatttactaagttttgtaactatgtgttttaagctctataacatctccataggtaaaatttgaacttgagcctaattaaaaaag

SEQ ID NO: 35812 - DNA, 201 bp, Bos taurus
ctgtaaatcagtacatgccagcttctactgccttcaaaagaaaggggtggactgcttctcccttcttcaacaacgttccagttgcccctgttttcatatcmcatgcaattccacctctaaagaaatgtgggccaaccagctgaagggaggggtgaagctgtgatatttgtcctcacccaaactgttgtagaacttcatgaa

SEQ ID NO: 35813 - DNA, 201 bp, Bos taurus
ttcttttgtttttttcatgctgccgagacttggactctctcaggttgtgtgtgtgtgttttgcatgaccttctagcttaacatatgctgcttagtgttacrtgtctcttttcctctcccttcccccactccttctctacatgcacacgtgcacacacacacgattggttaacatatgctgcgtagtgttaggtgtttcttt

SEQ ID NO: 35814 - DNA, 201 bp, Bos taurus
tgtgtaagagcctggaagacagacttaaggagaaagatgcccacacaattcagtatcttaaggaaagaccttctcctgtgaatggtcactaaggaggactygtgctcagtcgctaagtcatgtccaactctttgtgacaccatagactattgccaaggaggactagacctgatcaaaggtctatcatggccccggctctgc

SEQ ID NO: 35815 - DNA, 201 bp, Bos taurus
tggtacaaccactttgcaaactgatttggcattatccatggggtcacaaaagagttagtcacaacttagcaactaaacaacaacagcaactattttgtgcrggcttgtcgtttcacttttatgtttgtttttgtgtcttttttcttcttttaaaatatagttgacttacaatattatattagtttcaggtgtacagcaaag

SEQ ID NO: 35816 - DNA, 201 bp, Bos taurus
aggatggactgcagaagataaagtataaatatccctttcttacttttcattgccagtcacattttctcatattcaatgtcattcttcccttccaagaaatygaagtagatattgattttgaaaatgtatttcttagcggtaagaaatagcaaattacacctgaattataactttaaatgtacattttatgtccttcagata

SEQ ID NO: 35817 - DNA, 201 bp, Bos taurus
tattccatccctgaagtctacctatttaaaaaaaatgtgtccaggatcttttaaaaatatgcctctctggtgccatgtctgattgaccgacatttgggcarttgtccaattgtccataagtaagaaaattgtcagtaatcggtgctgtgaatacacacgcctacctgattcatccacggggctcagcttggtaccagtgct

SEQ ID NO: 35818 - DNA, 201 bp, Bos taurus
gggactcattggccaaatataatttttccactgggtttatccgaagagtaaggcagtgtgtgtcttcatggctccttagcttgtccacatcaaacagtgtrtgaagccattggcggccattgaccctcctactagctagattacactggaatagtgtcacattttactaacactcctcagaaaactttccttgactgtact

SEQ ID NO: 35819 - DNA, 201 bp, Bos taurus
taaaaaatagaaagaatggctaataaaatattttagctaggaaagagaaaaagttcacagtaatatttcactgagcacaccaactaggtgaaacatttgarcaacaaaatcaaaattatttgaagaataaaatcagatcttttgtatataagggcttccctggttgttcagacagtaaagaatcctcttccaatgcaggag

SEQ ID NO: 35820 - DNA, 201 bp, Bos taurus
aaagaagaaatgatttaaataactttcttttgcacacaccacttatgtctcttcacatcaatgttttctgactttgaagtgaccccttcaaaggaagaatyttccccttatcctcgcctctctcttacctctgccagatgaatactttttccagatatttaaaaataatgtatcactgatgttttatttcaaatatgcaac

SEQ ID NO: 35821 - DNA, 201 bp, Bos taurus
actatgtacctctcaagtctgaacaattcatccctctctttgtcaaaatgagaaagccagggccagtgctgagacccaataaactcttccctcgattggarcaaattcctggaggataagggaagcagaatgagatgggaagttggaatgagaaggagggaatagaataatgtcaaactcctcctagaggccaatatcttc

SEQ ID NO: 35822 - DNA, 201 bp, Bos taurus
tttattatctgccaggaataaggtaagtgagcacaaagtgttcataaacagaagtgaacacaaagacttttttctattctcatttttaaatatgacaaaaycagcaaaagtctagatacggaaaaacaggcactatgatccacaactttggatataaactagtgccacaattttgagaagtagttttgtgatacacaataa

SEQ ID NO: 35823 - DNA, 201 bp, Bos taurus
ctccaggcctctcatatatgcactgaaggccattcctgggagggcctagcacttcagggcttctcctttgtggagctgacaccagggcccagagagtacaygcacgcagagctgtggatgctgagagctgagattggactggaatgctcagaaatactacacgctgtgggagccttgataaggcacgtatggtggccatta

SEQ ID NO: 35824 - DNA, 201 bp, Bos taurus
aatcctttggaagcagggaaccaacaaaaggcaaaaaagaagggatagttgagaaagagaccagtaccctaaagggtaccttagctcatgatcttagaaaytgatgtcttagagcctaccttgctcttagatttttaggtttctgatattatttttaaaattcaagtgaaaggaaaactctatataagcttccttaaggtg

SEQ ID NO: 35825 - DNA, 201 bp, Bos taurus
cacactataaatctttataaagtcctgctagctatgaaataagacattgaagactgactcagacatttaaaaattaatagcagagagacattcagttctcyctgtccacaaatgcctctgttttagagggcagcagaagggaaacaaaagaataatgagaatcatttggccagcggtattgctagcacattttagctgcta

SEQ ID NO: 35826 - DNA, 201 bp, Bos taurus
aaaaagaaatggaaaaaatgcatttctatcaatatgataaaattaagtgttgtacattgcgctatggactacagtggagtatcataacagattagtgtgcrtatttattactagttattttcccagacaaggatatcactcaaggacatattattaaatgccaaaaataggatcacagaaaaataaatgtcttgtatcatt

SEQ ID NO: 35827 - DNA, 201 bp, Bos taurus
ggaaaaagtaccaaaaactatcatcagagaagcaaaagctgaaagaggaaaagttgtatgaaaggaatagggaaagttctataagtaccagttccagttaytttcacacatgaactcttaaaacttgtaagtaacaccaaatcagaattgtatttggtctgatttaaaaaaaagaaaaatgggaagagagagagagaggat

SEQ ID NO: 35828 - DNA, 201 bp, Bos taurus
cttgaaaaatactgataaattagtaattatttactaacttactaatactgattagtatttacattagctctctgggtcaacacttgaattcacaaggaaarcaaaaccaccatgaaggaatttagtactaaataagggattcatgcctaattgatcaatgctcacaaaatagaagctatttttgagcttctccaaggacac

SEQ ID NO: 35829 - DNA, 201 bp, Bos taurus
ccaaactttgtgagaaatatgtgtatttggtaagaatatttggtaaggtatttggtaagaatcacattctgtttttggtggtatatctggaatatgaaacrcaacttagatgtatagatgaaaaaaggcttttcacaattcccttcatgtctaaattttggaatgcattgttttacagaactaataactcaaatctagctc

SEQ ID NO: 35830 - DNA, 201 bp, Bos taurus
cactgttctgtcgcttcaaatttttgtcgcgacgtgacagaaccgaggaaattacacactcccccaacatctatggtgccgtcattaggatttaacctggytgaaacaacctcggctgggccccatcaagcaggagcccaactcagcgaaagctcacacggaggaagctgaacacaaagaaaacccagcgcaggggaagtg

SEQ ID NO: 35831 - DNA, 201 bp, Bos taurus
tggaaaggaatgtaggtatgttatccatagcaattgttaaaaacatatatgatgcatttttgttcaatctgatgtaataaataagtcaatgattctatatrgactgcttatacctaactgtaaaagttcaatgagaattctcagcatggttttaaaaaataagatctgtgaaaaagatcaattatacacatggaatgtgct

SEQ ID NO: 35832 - DNA, 201 bp, Bos taurus
agtagatcaatttcactgatagtgctgttgggggcaactataactttattgtttttctccctccttgatttgtcaactactgaaaacagaatttttttttmtttttccaggtctattagtcttttattcaaaggttttcatagtctcttggtggtggtggtggtggtggtggtttagttgctaagtcaagtctgactcttg

SEQ ID NO: 35833 - DNA, 201 bp, Bos taurus
ggtccaagggtaaggggttttaaaaaggactagaaaatatactttatgaaggtaaaggtttgtcatgaaatgattaaagaaaaccatgctgtttttgaaawaagttaaaaagtgacatgagcttgaactctgtcagaacttccctaggacatactttggtcagaactgagggtacaactttctacaaaaatgtcacagaca

SEQ ID NO: 35834 - DNA, 201 bp, Bos taurus
agtgaccatggtatttgaaatccaggagtccctaaactctagaagtattggacaagtatctagaagtactaaagaatttgcctttataagacagatgtatraaatagtcaggagatattaaaaaagaagagcaaaatggacccgtgtcaaatgttagtatttatattattcaagttttagtttctagtatagatatatact

SEQ ID NO: 35835 - DNA, 201 bp, Bos taurus
ttttcaaaggaagttaccttttacagcagtcataatcttacagctttctcttccttcaggtttagttcttagctgattaacctttccttggtcctgtctcyggtcccaccctttttcttggatcttttcaatgactgcttacatttactctctttttccttttcattaacctaccatccctgattttcctgcacaaacacc

SEQ ID NO: 35836 - DNA, 201 bp, Bos taurus
caaatatactacatatgagaaatactgggttttaaaacatgtaacactttgtaatgagattagacatttggctatgatgacatagctttcacaacagatcrttacaattcaattgtgctgtgcactcagtgtagataatcattcactgtcatgtctattccagattataacatttcaagtctactgggttgatctcctctg

SEQ ID NO: 35837 - DNA, 201 bp, Bos taurus
aatggaaactttggaataagatttaattctacttctgacaattcatttctctcttaatggtgagaatacacagaatttatcaaacctgctggactgattcyacatctttaatctgaggccatgtctagaagaatgattgctaatgtaattcaagcagcaaaaacatatttagtcaagttagacatttgcataatacataaa

SEQ ID NO: 35838 - DNA, 201 bp, Bos taurus
tggccttttctccgtgcatatgaaatattctccaagtgtttctacctcttacaatgctatcttacaatgatatcagtcctgtggtattaggattagggatyggccctgaaggacttccctggtggctcagacggtaaagcgtctgcctacaattcgggagacctgggttcaatccctgggtcaggaagatctcctggagaa

SEQ ID NO: 35839 - DNA, 201 bp, Bos taurus
ttagacaaaaagcaaactcagaggattttattattcgagttaaaaatgggtcgtaaatcagaggagacaactcacatcagtaacacatctggcccaagaaygggtaacaaacatacagcacagtggtggttcaagaagtattgtaaatgagatgagagccttgaagatgaggagtgcagtgtctggccattggaagttgac

SEQ ID NO: 35840 - DNA, 201 bp, Bos taurus
ctacctgacataggtgcagtggagtccaccaaacatttctaaagaggtaaaacttcaaaagagaactgacaaacattttatgaaacttctttttgcaggtrgatgttaaaggccgaacagggagtggaggtaatcctcccaggctgcatcagaaagcttgaacagatgaagtgaaaacacatcaatttgagattaaaaaga

SEQ ID NO: 35841 - DNA, 201 bp, Bos taurus
agtcttatttacccctgtagccactttagagaaagacagaggaaactagtaacattaggatttcttgaaaagtcaggatgtttaattagctgatttaattyttttgtaggataactttgaatccatgttaacttatctgaatacatagaaattatggtagtaaaaggattcagcttcactccaaatagaagtcttatatta

SEQ ID NO: 35842 - DNA, 201 bp, Bos taurus
gccctgcatggcatggcttataacttcattggattatgcagccccttcatgatgacaaggctgtgctctatgaaggggatattgtgaaatggacagtactrtaatgactgttgcttcactttttctgtagctattactttgtccttaatttttgcttcatctgtactgtgatggcagtagttttataggtagagatagata

SEQ ID NO: 35843 - DNA, 201 bp, Bos taurus
tttgtctaaaaaggatttcttagtgggaccagaaagtttagtagtgaaatagaacttttgaagcagttgcagtcaagttgagaagtagttttccagatgaracaagaagaacaaaacatgatagataagaggatgaagacctctagcaaaataaatcagtttcttctactgtagagggaatttgttcagtgaagtttaatt

SEQ ID NO: 35844 - DNA, 201 bp, Bos taurus
agaatatattctgctttcagagtcctggagttcaatagtgagactgtttatgcttttcactgagattttatttaaaacacactcaagttctcttttcaaarcttgctgctgctaagtcgcttcagtcgtgtccgactctgtgcgaccccatagacgacagcccaccaggctccctagtccctgggattccccaggcaagaa

SEQ ID NO: 35845 - DNA, 201 bp, Bos taurus
ggaaacttaagttagccaaatatttggtctttaaatgattttctgatacttattctaatataattcagaaaaatgtatcatctcagtccattcaggccacrggaacagaatagcatagactgggtggcttataaacagccgcaatgtaacttacagtcctggaaactgagaagtccagtgtcaaggcactggcacatttgg

SEQ ID NO: 35846 - DNA, 201 bp, Bos taurus
tcaattattttgtccttgtaaggatgttctcccttatcctatctactgtaattttctaggaatctcacttgttctgaaaagttttgttgtatacttagttrattccctgatactaggtttctgtgttcaatagattcagcctattttgcatttgtattaatctctcttgatgtttgactacaaatttgatttgttcttgat

SEQ ID NO: 35847 - DNA, 201 bp, Bos taurus
catgtcattccatggcaaacaaatattgccttgcttaatatgtgagcaaacagtacaaagtacacatgctttctaaatccaagatctagactccattattractgaacaggggcctctgaggcctaccagctatctagaaggccccatgtcaggtatttctaatctatgtttctgaatcattggatgccactttaggggtt

SEQ ID NO: 35848 - DNA, 201 bp, Bos taurus
cactgtgtgttagcatccatgcccaccactgttgtgaagggactcttgctaacattaatattgaggacatattgttgagtctaatcatacttctcttcttkgttctcagttacttgaaatctctttacctttcaaaagaattgagagcatccacatcatcaggtcatctttttcattgacctcaatgacaatatccttttc

SEQ ID NO: 35849 - DNA, 201 bp, Bos taurus
caaaatggaaaattgaagtgttacttgaatatcatacaatcaattagagtaaatacaattacctttttaaattaataggatctagtagtacaagtatcgamtgtattgtgctgttttaaatataaattggtgtgatgttagacacaggagttaaacccagaactttcacttttctgaattcttttgctttctaaaatatta

SEQ ID NO: 35850 - DNA, 201 bp, Bos taurus
taaatgtgtacatttcataataaataaaggtatataaataaatcaaagagcatctgaaaggaggtaatgatcaaatttgtcagatggctaacaactccaaygaatatataaaattctccatatgtacattttgcttacaaagaggtaatggatgagtgtaatgggagattcatttgagtcctgaaaattaaagcattgttg

SEQ ID NO: 35851 - DNA, 201 bp, Bos taurus
ggctgtgcagtttcatagagccaataagtgattgttatcagtaaattataatgtgagtcaaaatgccaggaattaattccacaggaatggccataatacarcagctcaacttttaatatgggatagcttccatgtcacactattgctctattttaaatatcatactttcatcttcatcattctcttataaaaatccataca

SEQ ID NO: 35852 - DNA, 201 bp, Bos taurus
cttccttctatatttttgcaaagtttttctaagttaaccattgtcccttttagaatcgttggaataaagatctaagtgctagattgttttgagatctgatmagagacaccatataaaacaattaaggaagcaaacaaacatataaaatagttaaagaacaatcaaaacatgggttatcaagcacaagttgcttaaatctaa

SEQ ID NO: 35853 - DNA, 201 bp, Bos taurus
gtacagttgatataaaattatttttctcttgataacctctaactagttaaattcagaaatctccatcaataagcttcagttgcaccatgttccttctataycagtaggaatattcagtacatatgatatcaaggcagaagcctaagatataatgcatgggagcttttcatcttatttttgtgatttaaattttctccttgg

SEQ ID NO: 35854 - DNA, 201 bp, Bos taurus
tatctgtgacccaaaataaattctctgttccatataagaatataccagagaaaaatagggcactaaaaatcgtacaaagagatttataatcctttcttccmtacagactcacctcaaggaatatagaatttagaatcctgataaggccacaagactaaaataaagcccatctctaaagatcaagaataactactctccata

SEQ ID NO: 35855 - DNA, 201 bp, Bos taurus
gctcttactgtgtattagtctcccttttctgtttgctttgcttcgtttcatataatatacatgtggtgtgtcacagcagggattattattggcaatctttyttgaaatggttatttatttgcatatttctcattttctctactaatctaaaacacatttgaattactgaagtatcaaaaaatattcctcattgtagaattc

SEQ ID NO: 35856 - DNA, 201 bp, Bos taurus
agagaaataagccaatcaattgtgcaatttcaggccatgaccctttagtgaagctctggaataaacattatatgtcagtgtttgcccatgtttaaggcaasctaactggccttcatactcccctaacagtaaatcttggccaacttttcccaataagacccagatggtggtatgggcatagattcctaatcactgctgccc

SEQ ID NO: 35857 - DNA, 201 bp, Bos taurus
actatatggcctttttcaaaacacaaggattacctactgttgtcaaacagaaaatgcttaataaatgtgtctgtgttcaataaaactttctttactaaaayaggccataggccaaatgacagagtgctctggtattagtattaaatatttttaatatcatataagaaattaatcgccagtccagttttgatgcaggataca

SEQ ID NO: 35858 - DNA, 201 bp, Bos taurus
aatttatgtataaaatatgctaatgcctatcttttagccagccaacagggagtacattttattaaagatttaaattagttaaatcaatgtatattttatayagatatattgaaatctcaaagttggaaatggaaagtaagaatgagggaattaagtacagaatagccgaatgcactgatactctttccaaaatgctctttg

SEQ ID NO: 35859 - DNA, 201 bp, Bos taurus
ttgttatgacatataagtggccacacggaagagcagtgggtaaattttgaactatgagataagagttccggaaattgtctggtgtcagtttggtgctaccrttccaggttaaggctgtggaatatcatttttaatataattcccaggcggattatagcttgggttagaaaggaaatgtgtgcaatgttgaaatcagaggtg

SEQ ID NO: 35860 - DNA, 201 bp, Bos taurus
tagtaacatcagggttttccaaaaatattgagaaccttaaaaaataaaaatatgccatcctggactcatgtattcatccatgttcttttgtacgtgtataygtgtgtatgcatggatgattgtggaaaattgcattctgctacacatgaaaataaagaagagtccatgatttcaaggacccaaactgagtggcagttagaa

SEQ ID NO: 35861 - DNA, 201 bp, Bos taurus
agggaggcctggcatgctacagttcgtggggtcgcaaagagtcggacaagactgagcaactgatctgatctgatctgatctggtagagaaatgtggatgamgatattgatgactggccatgattagtaatttctgaaactagagaatttgctcagtccgtagtcatgtctgactctttgcaaccccatggactgcagcgcc

SEQ ID NO: 35862 - DNA, 201 bp, Bos taurus
tgtatggagagaaagataaaaactattgtttttctaaagcagtttgtctgttacagtgattcagaaaatgttttcattacatggccttcaaagattattgyatttagaaaactacttgctaaatccactgccagaaaattagaaagcattccctagttagttcttcagttatcccatatggcaagagatgaaagtgtcagt

SEQ ID NO: 35863 - DNA, 201 bp, Bos taurus
gaccctgatgggctacagtccatgggatcacaaagagtccttcatgcctcatggacaaaaaatcaaaacataaaacagaaacactataataacaaaattcrattaagacttaaaaaataaaatattgaaaacagtaattcttgcaaaccttttcttctgaaataagtcggtccacttatagaacagaaaataatttataaa

SEQ ID NO: 35864 - DNA, 201 bp, Bos taurus
atttgaaaaatatagtatttttatgagtatgatctataagtgaaatattattcattgtcaggaattgctgatgagtttgttaagagatcttcctaacatartgcagctgaattcaaattatgtgatgaaattaagcaggctgaatgagtaatttccatgcatggacaatgggaatttgttgttcagctactccagattatt

SEQ ID NO: 35865 - DNA, 201 bp, Bos taurus
tgttcttgtgttttcattgaaggattaatcttatggataacagttactgattatgatttctttatattgaaactttctgaatattttataaaacaataatyaccaaacaacagtgagaactaataaaaaactcagtttgaatgtttatattgtgttttagaaaattttccaagtaactttaataataattatcttgatttg

SEQ ID NO: 35866 - DNA, 201 bp, Bos taurus
agcaggaaatttagcttttaccaaatacagtattatattgtataatttttctatgctttaggttactggctacatataagttattacctcaggtaagataraaaggatattgaaaatattagaataatcaggcaaatagtatgattatgaatagtaaattatttaatgtctcttaaatctagtttcttagttctgcttttg

SEQ ID NO: 35867 - DNA, 201 bp, Bos taurus
ggtaccaggaggcctccgaggcacatgttagtactgagcagcgtccgtaactttgctagactccacagttgagaagccagctaggcagccactacgcagtracactggaggtctcagtacagaggcctgaaagtttccttccgcccaaccaccacgtcctattcctggacctgagccttgaagagcagcaggccagcgagg

SEQ ID NO: 35868 - DNA, 201 bp, Bos taurus
attggccataatcttttaaatatctaaagtgaaatgagggacagtaaatttcttctttcactgaataacatatttgacttattgccttcctgttcctatayggccagaacctctgaccatataggagagactctgaattcttcacccacaaaccctgaaagaaaggtaagagaagataaggacctataagaaccaaccaac

SEQ ID NO: 35869 - DNA, 201 bp, Bos taurus
ttttatatggacagtacattatgagataacctgcttaaaaatatttcatctgcagatttggtatcattctattcctttaattcaaatgaattatattttcyggaagagacacctctacaagtccaatacaatcagaataaaattgacagggaataaggtcttggataacgcaaaggacaggtgatattcatagttacgatg

SEQ ID NO: 35870 - DNA, 201 bp, Bos taurus
atcaagagagtggatggagtaatttcagtctgaagttctgacaggctcaagatccaggaagttttagttctagtccaaaggcaagaaaaaagccaatgtcycagtttataggccatgagacaggaaatattctctattgcttggtggagggatggcctttttattctgttcaagcttttaactgattgaatgaggcccagt

SEQ ID NO: 35871 - DNA, 201 bp, Bos taurus
tggcattggtgattaatcctagaatcacactctagaaatgactgtgtgttaactggagcttaaagaaggagtgtgaggacttagattagtcatcagtaggytgtatgtagcgtgatttatagacggtgatgagttttcatttaacagttttatttttttaaatcttgcactatagaaccctttttgagactattaatggta

SEQ ID NO: 35872 - DNA, 201 bp, Bos taurus
tgaaaagatttttttgccccaaatagcattttatatttatttgttagtgacttccttgccccaccctcctttgtataaaaacctttcactttatataaccrttgagggctcaccagttgttagatggaatgctgcctgattcatatagtatataatacaattaattagatcttcaaattcactcagttgaattttgttttt

SEQ ID NO: 35873 - DNA, 201 bp, Bos taurus
tttgaaggttactggtgacaagatgtactttcctaaatgttccaaaagtctaacttaactcccacattcagttgcaagtcggactatattgacctggcccrttatggatcgtataggataaacttggaaattgagacatgtgcttaactcatttcctggacttgttttctattggtttctgaagttcttggtaaacgcctc

SEQ ID NO: 35874 - DNA, 201 bp, Bos taurus
agtctccaacaatttcactagtttggttcaacggtttctggagaaacagaagctattgctccaaatgactcctgacaatttttagtcactcaagcttcctrtaccgttgccccttcaattgctcagataagaaggggccagcaaagtcagctacggattgcgaagaaaggagctggcttttgctttttgtcacattaacag

SEQ ID NO: 35875 - DNA, 201 bp, Bos taurus
attctgcactgatggccagaccagttcatatgaaatgaggaacgaaaagcagtaacaggtggagcctgcgagacacttgagaaactgaaccattcccagcrtctcagctcttcaggaaagtccttaaactcctgaaaagacttgctgtggagtgatccttggtaggaattgatgagtagcaggactgtttgctttagaagg

SEQ ID NO: 35876 - DNA, 201 bp, Bos taurus
agaaaattgctagtaacaattctgattagtctagagtagcctatgcactgtttgtcttcccctaaccaataaactagcagacaaaggtgcaaaagagtgcrtgtgttaaagtgcagagtaaaccaggagcagcagcatttctaatgtgcgtggtgctaatactaagtttatcagaactatgttacagtacagatgagagtt

SEQ ID NO: 35877 - DNA, 201 bp, Bos taurus
gagagtgtgtggtggggtatagggtcatgataaaaacaccacaaaaatctgtttttgacatcaatgtgtagaggggaccaagtctgatttttggtgtgagwatacattctgattttaaatatttaatacacatatataatattgactaaccatgaacttcctgatgttcaagctggttttagaaaaggcagaggaaccaga

SEQ ID NO: 35878 - DNA, 201 bp, Bos taurus
ttctgtcaaaaaagcacaaggaaacaaaacaccttgagggacagcaatatcagtgcttcaaaagtcgagaggtgttgggattgtcagacatagaataccaygtaattgtgctttataaaattgaaagaactaatatcaagtttaaggcaaaaatataataaaatgacaaaaaagaacaaaaagcaaaaattactaaatata

SEQ ID NO: 35879 - DNA, 201 bp, Bos taurus
tgtcctaatagctgacatccacttgaacttctacccattgcataggagccatatcccaaccactcccttgaaagtgccctctaaaatctcagggtgtctgmtggctaaaatctaattggttttcaaatttttttcttactttatttctctgcattctttggcactatagaccacacctttattttaaaatatttcttaact

SEQ ID NO: 35880 - DNA, 201 bp, Bos taurus
tgtaacaccaggtggcaacagaatgtcttcctcattacaatcactagcgatgagctgcggagacctcctgtacatgatggcctttctcgacgggcatcccygcttggtggtggggaaaaagagaaagggctgtatgaagccatttcagcaccatcctgagcttaatagtgctgtctttcattgcctcttaacaagctgcgc

SEQ ID NO: 35881 - DNA, 201 bp, Bos taurus
tgtttttggcagatgaagtccaagtgtttgctcatagagatctattttcgtaaaaataaagctgatcaaagaagcatgaaatggagagcattttgaggccmtgttgaaattgaagttagtgtactctgcttactcttgaaaatcttggttttgtgatttgtctaaaaaatgggggaaaggaacgagttcaagaagaattac

SEQ ID NO: 35882 - DNA, 201 bp, Bos taurus
tttgcacaatgagactaaattggaagtatagccaacaggtgatccattaaggacttgagtgcagctaagccttcctttgggatgtatacttttacagccartaaacctggccttactagctcctagtcgctttgcttgccaataacacagccttataatgtaacagagtccagtagagccactcctcttaggtttccaacc

SEQ ID NO: 35883 - DNA, 201 bp, Bos taurus
tttcaggttcaaactgctatcagaaatgaaataaaacatactctattcacatgccagtgtttctgaggttttcctggttgaatgcatattacattgtatayactcttgattttcttcacataaggccaatagtttggttgctgtagtctgatatgggcctgaaagttgccactgactgtattcctataagttatggtattt

SEQ ID NO: 35884 - DNA, 201 bp, Bos taurus
aagcaaatcagcacatttttagccagtagaaaatataaatgaatttaaaaatcaggatgcattaattgaatgcactcaattataatttaagttcctaactraagttttccgtctttagatttgggtattccaggctaccctttacttcatggatgctaatattaatagatgaacttagaagcaaaatcaagaccttatcca

SEQ ID NO: 35885 - DNA, 201 bp, Bos taurus
aggtaagatgagtcatggttttaggaatctggagaacgaccctctggagccaagaaggggctggaccacagcccagatagactttgaaggatggagagagmagggtaggaagagtcatgggaggagactgtacgtgcagagaatgggagaagcaaaggcagagggtgcgttctcacagtggtgggcagatgagagcagcgg

SEQ ID NO: 35886 - DNA, 201 bp, Bos taurus
aggagttgacacatttccaagaggtgctcaaggccctctgctctcaggaggcagaaccatctcgcctttgaaagctgacctttccctctccaccccctctyttttccaggcccttctccagagctaacttattcacacatagcaggcagacccctgaagcctactttaaaaagtctcggtctgtaagctatgataggatca

SEQ ID NO: 35887 - DNA, 201 bp, Bos taurus
cagacttttaactgaagacccttatccccacattattcctcatctgtttctacccttattcaaaatacaaaatactggggcacccagaacaagaataaggytcattgttccttggtagtaatatagccctgaacttcaggagccatagaattttacctagcctgctgctatagcacactcagaaaattgccagagatagtc

SEQ ID NO: 35888 - DNA, 201 bp, Bos taurus
attcgagtctataaaagagtttgggaagcaggcgactaagtagtagatgaaaataaccaagcagaatgacagagtagggggcggaaggatgcgcccaggcrcagacaactcatttctgagagcagggtatgtcaccacccaagactgccaccaaagggcttttaaaaaaacattcagcctagggaaggtagaaatcctggc

SEQ ID NO: 35889 - DNA, 201 bp, Bos taurus
tacatttccaccaacagtacttgctaacatgaagcttagcacacaacaaaaactcagatctagagctacagaaaagttacattattattcaaaaagaaaartgttgaaagtgttagtcgctcagtcatgtgtgacactttgctacccgggagctgaagtctgccaggttcctctgtccattgagttctccaggcaagaata

SEQ ID NO: 35890 - DNA, 201 bp, Bos taurus
tgaataattcaccaattttgttttctactatgtgccttaaagatacctcactagtaaaactggtatctggcacaacagaatgacataggcagactgtaatrttgtagtgacagtaatgaggttgactgttacacttatttaaactctgagtattaaatgttgcatcctaattatttatatagaacattggtccaataacaa

SEQ ID NO: 35891 - DNA, 201 bp, Bos taurus
tcacaagtagagttcagaagttcctctttgagaaggggcattaactctggaaaaggagctgagcgttagctgttggtgtaggtctctgaaaacaatatcamgtgcagtaaaatcctgggagctccagataaggttagaagtttcccagagagagctccatgctccaggtctggcctcaggagcctgcctcaagtgtggagc

SEQ ID NO: 35892 - DNA, 201 bp, Bos taurus
cgcgccgagcgcggagcccgggccagcctccgcgcggcgcggcgggccaggcacgggccgcttcccactcctcggtcctctgggcctccgcccgggacttrcaactaacttcgcccaagtttcctgcgccggcgccgccgcgcccctgtcggcgcgctagcttcggagcgtgcgcccgcgtgtgctccgcggccagagccc

SEQ ID NO: 35893 - DNA, 201 bp, Bos taurus
agttttgtgtatatgtctacacgtttgcatattagcaagcagagcagcaaagtgttaaacgtgttggttgaaaaggcacctggaagttttgtttatgatakatatatatttaatttaattgatgaatttgtttatgttggactgggtcttcatcgctgcacatgggcttttctctagctgcagcgagcggggctgctcttc

SEQ ID NO: 35894 - DNA, 201 bp, Bos taurus
ctcttcaccgtccccaagcttcctggcatcagctcacattttttgcaaactgcccgagaccaagtgtcctacctcttccagctctagccctcagctggaarccgatttattaaatagctgcacaaggtttggaaggttgcccgggatgttcccatccggacaaaaaaagagaatccagtgagacaaaactgagatcctggg

SEQ ID NO: 35895 - DNA, 201 bp, Bos taurus
tcaacctctataatcttcccattcgtgctatataagttatagtttcagtttaaatatcattttaaatgctaaaatcttaaatcattgctcatttgggatgyatggtattaagaaacacttgttacttaatttctgtataagtaagaagcatatatatctgttcctttactcaaatgacgtctctcctattctatttaacct

SEQ ID NO: 35896 - DNA, 201 bp, Bos taurus
aggccagctctctcccgataccacacacacacacacacacacacacagtaaagagcactgatgaaacacatgagattatgaagctctctttggtacagagracatttaaggccttgttttctcttgttcacctaaagttagaactgagtgtcttggtatctatattacttgtaacagatttatcctcacatcttactggtt

SEQ ID NO: 35897 - DNA, 201 bp, Bos taurus
tgaatggatgggagggaaaatccaagggcaggtacaaaggcagagggaagagaagggaggaggtggggggtcaggcagggggaggactggctgtggggccsatggacactgattcatctcaccctcctccccacctctcagtcatgggctcactcaacagtcaggggactggtgatggagacacaacaagccttctcttgg

SEQ ID NO: 35898 - DNA, 201 bp, Bos taurus
tgtggttacttgtgtactgattgtccaccactaggttataagccctgtgaggacatgggttgaacaatttctatctctggcctagaagataaaaatctgtkaagtccatgttctataaggtgtatgttgaatttgggaggtttttgttgagatgaatgaatgggagcaaagaagactacagggcctgatctaccacccttg

SEQ ID NO: 35899 - DNA, 201 bp, Bos taurus
ccctgttcacggcacgtgtgccctccctggccccactgctaaggctctaggttgttccgccagggactgtcggaggttggcctgggctgcatgcatatccygggtctaagctgatcaggttcaggcactcgggtagtcctcagaggcgcagactcggttgggcctgtgttttgtgcccttcgcaggtccgagcagctcagg

SEQ ID NO: 35900 - DNA, 201 bp, Bos taurus
catgacatcatataccagaaacaaagtccatcctaaattatgtattacaaactctacttttgaaaatacgataggaaagagttcaatttaatctaccactragtgagtagataattgattgacccaaaccttttgggcaaactaggcttatctttgtgatacttatttgagtttgaattttcttgaaggaatgaagtcctg

SEQ ID NO: 35901 - DNA, 201 bp, Bos taurus
ttcagccacgccctgggagccccgtgtcctctctcctcaccggttgccgggcgccgccatcttcttcaaaaaatcctaataaaagaagaaaaatggggggraaaaatggccaagacatacgtgaaaagatgttccacataattagctgttgttgttgtcactaagtcatgtctgactctgcagccccatggatgcaccacg

SEQ ID NO: 35902 - DNA, 201 bp, Bos taurus
gagacccagaagcacacacagctcctgacctagggtggagtcttggaagactccagcaaactgatggaaaaccacgagaggcgtgatgcctgtggtaggargtgatctggcagaactgatggcggcatgatcatttattgaactcttcatcttaacagcagccctcggaagcacggagaagtgtcccattttgaagatgaa

SEQ ID NO: 35903 - DNA, 201 bp, Bos taurus
aattgtgcaaggccccaagtggttcatgaataggtaattaattaaaatgttatatgcagtgtcatgcagtatgtgaaggtttttatggaaattattaacayttctttgaaaatttctctttgggcctatttataaatatatgtctaaagatatgatatctttgatatataaatattctctgtgtgtatgtgtgtgtgtatg

SEQ ID NO: 35904 - DNA, 201 bp, Bos taurus
attgtttgaataacttgctagcagcttgaaggagaataggattacaattaaactttctcaaagtagcagacttctgtgtctgttctacgagttcaaaccartttctgacaccgacaatgaattacattcatgtgtttcaagtctcctaataaaacatctttaagaactatagactatgccttgttccatgtgttagttgct

SEQ ID NO: 35905 - DNA, 201 bp, Bos taurus
aagagtaatcaatttgatccggcctccaaaacaggtgtcattttgataaatggtcctaattaagctgagacttcaggtaggaaaccgattgagttagtgcrttggcacctatgtggccatggctggacaagtacagatgttacagtggggtaaaggcagcactttattaactactgagtcaagtctccaagttttgcattt

SEQ ID NO: 35906 - DNA, 201 bp, Bos taurus
tgccgatgatgtgaaaagaaaggataaaaatgatccagattgtaagatgattgctgtgatgcctgggtgacacaggataagtggtaaggattggcagcacratatgagaaacggaaaatgtaacagtgaggtttagaacttgaaaaatgacaaaatgattatatctttgcgggtatgaggaaggagggcaatggaaaggtc

SEQ ID NO: 35907 - DNA, 201 bp, Bos taurus
atagtgctgagcctgatacagatgttcccacattgcccagtcctttgattaaccttttatgaagtatctgcctaccggaatctcgattaggatgttcccaygtgtcttattaaaaggctgccaggctttattgaactttgtgtttatactttgtgttctgtggacagttttggtgccgagtaagtggaaaatagaaagcat

SEQ ID NO: 35908 - DNA, 201 bp, Bos taurus
gacaattagaacaggtgcatcggagcccatggtgtgagagcctgataaaagaaatggtaagggtgtggactcaattagctgggcaggaatgagaactgacyggcccctagccatgacctcgaaagtggatcaagatggcatttaaaacaaagaaactatattacagcaaatatagggcctttataattgcttaagtaccta

SEQ ID NO: 35909 - DNA, 201 bp, Bos taurus
tacggttgacccttaacaacagggctttgaactttgagtccattcaaacagggatttttttccccccagtaataaatactatagtactagtcttcccaggmggcgctagcggaaaagaacctgcctgccaatgcaggagacgtaagagaggaggatttgatcccccggttgagaagatctcctggagaagggtatggcaac

SEQ ID NO: 35910 - DNA, 201 bp, Bos taurus
tagagggccctgtgctatacattagaaccttattgtttatctagtcactgttttacttttaaactagagactattgtgcattctgtgtccctattgttttkccaagtcaaggccaagttcctgatttcataattcgaagatctctatcggttgtttactccttccctattcacagatcttagccgcagttccatcactttg

SEQ ID NO: 35911 - DNA, 201 bp, Bos taurus
aaagagttgtcaagatacctcctactaaaatcagatttcccagtggacaggcttgtgatatataaagagtcctcctactcagagagaatagggcccttccrgcactccttcttgtaccattgcatctacaaggacagaaagttgtatatttcagttcagttcagtcactcagtcatgtccgactctttgccaccccataaa

SEQ ID NO: 35912 - DNA, 201 bp, Bos taurus
ggtgggtttcagatgacctggtggccctctgctacctggggcggcaggacctggagggaggctgtggatgcgtggaaggaattcctgcgaggtcagtacayagcatttctccttccacatggccaggaggagcagagggatagaaaacaaagccagagccacagggaggcagcgaacagagcttgctggtgagcaaggcac

SEQ ID NO: 35913 - DNA, 201 bp, Bos taurus
cagttggcccagggtcacctgccctcgcggtgtttggcacaacccaggtcatctatactttgacaagtgcagccgcttcggccagtccactatgggagccrcacacacacgaaggggctacttctcaagagtctctgtcttcagtaaagcagcaaggccatgaaaagatggaggcggttgagaagccgtaaaccggagtgt

SEQ ID NO: 35914 - DNA, 201 bp, Bos taurus
ctttggtctcctggttggcataaatcaagatcaccaggccacatcttggggcttttgtgacgacctggcaaaacaaggtaaccaaaagtactctacacacygtgaaagccccagtgtcagggggagagagcggatcactgttaatttagtcttcatctgttgggccagggcaaacgtgttttactgagtgaagttttcttg

SEQ ID NO: 35915 - DNA, 201 bp, Bos taurus
ttgttcaaaggggtaattggcctttgtacatgtacaggcatatgaacaaggcattcggctggtgattacagaaagagagagaaaaggaaaagggtcaagcraaaagcagtcctggccaccagaggcaggaaatggaagttctgacaaagggttccctggctttcaggcctagatggcttgataattaaactgactgcaccc

SEQ ID NO: 35916 - DNA, 201 bp, Bos taurus
ggccccaggtaggccaaggagagcactagagctgagcagcgcacctgtggacaggtgttcagcaaagccacgcctcccgagaggtgctgggcgccttctcmgtctcctcctttgtcctttgaggcccatgatacttcttaaggaaggtgggaggggtccttgtcatgcaggggttggcagaagtcactccctcaataagcc

SEQ ID NO: 35917 - DNA, 201 bp, Bos taurus
catcaagaacggccagggcttcatcctagtctacagcctcgtcaaccagcagagcttccaggacatcaagcccatgcgggaccagatcatccgagtaaagmggtgagagggccgggggcgcgggcagggggcttcgccggtgggggcccctcagccctcctgttcggggatcagaactccctcccgcgtgctctcgggtgg

SEQ ID NO: 35918 - DNA, 201 bp, Bos taurus
gggcctttcagtgaattagagagggcaaatggtgcatgagggtgtcaggctatggtttgtgggtagaaggcatgctcaggtcatgaattacttcagagttyacctgccattgtcctggcccaatcactcattcctcaaagtgcaacagttcagtccaacaaaaccttgcctgagcagctactgaggaccaggaactgtgct

SEQ ID NO: 35919 - DNA, 201 bp, Bos taurus
tctctccccttctcccaccttccccgctaccacccttctctcacccaaattccctgctattacccttttctcacccagattgctgcaatggcctgttgccygctctttcttctaggactgccttcacaggggagtgaccagtgccaccacgtggagatccacgcatatggaggccccattctcagggctcactgctctgtg

SEQ ID NO: 35920 - DNA, 201 bp, Bos taurus
gacagaggagcctggcaggctacagtccatggggtcgcaagagtcggacatgacttaagaactgaaccaccaccaccatgccgtagggtatacagtagtakaaacggaacgttgtaacatgaaacttacataatgctataagtcaatgttacctcagtaaaacaaagtgtttaaaaactgaagtgaatattgaaataaaga

SEQ ID NO: 35921 - DNA, 201 bp, Bos taurus
cttggcctcccgcctccatctggctattggtgtggacgtgggaagtatgggctttgtaaatacagtccatttccctccttggtgatgaggtaaatgctttycaagtctggccgccgcaccccagacttttagctcagacctgtatcagctttgctcgagtcctctgttgagccagccccttcccacgctgggatgctggcc

SEQ ID NO: 35922 - DNA, 201 bp, Bos taurus
aggcagcagatggtttgcagatttggagcgaggattccagaggggaccagggtgatgttggggagagagtggccaggggcccagtggcagatggacaaagsggagcggagagccactgggctctgcttacgcctccttgggccttttcagatggttacacaatgacagttgatagcaaattaaggatgaaatgttttaagc

SEQ ID NO: 35923 - DNA, 201 bp, Bos taurus
gtgtcgttatcgggctagtgtgtcggtttctgggcctggttttcctgttgttggaatgtgcaatgctcgaagctcagaacattgaaatgaatctaaaggcragtccagctgttggccggcaatgagccttttcctcctgcatctcactgggccttcatcctgcttagggagttggcagcattaaatcccgcccccccaccc

SEQ ID NO: 35924 - DNA, 201 bp, Bos taurus
gccaagcccaccctcctcctccagctgtggccgggtgtcaggaacctagttctcgagggatgggtgtagctccccttcggtgccaaggtcagaacctcgckctggcagaggaccaggcggccagttcccagggctcgcgttacaccgcagcgcccacagttggcagccgaacccattatcactcttgctctgagggtggcc

SEQ ID NO: 35925 - DNA, 201 bp, Bos taurus
cctttgagaatcgggaatgtccactgaactctaacaacctggagctgcttgaggaattcggggaaaccagcgccaatgggacggtggaggttttatgaagygactctggccacgatcccagggcagggaccagacatcttgggtgctggtgaccttgtcacccgacgggaaaggcatggggctctctgtccagtggccctt

SEQ ID NO: 35926 - DNA, 201 bp, Bos taurus
ggtgaagtcgaatgatggcactcaagcctgtttcacattcccaaggaacagaagaactcactaagacatgtctcagcagccgatgggctggcctcagacaygcacacacaccccttctcctgacctctcccaactacacgggattttacagtataaacagaagcattctggcctggagagtaggtttggcaaaagttatgt

SEQ ID NO: 35927 - DNA, 201 bp, Bos taurus
ttggccattttgctttaaaaagaagaaagaaacttgttttataattacctagtctatgaagagatgccacatttcttcccacatcagaggagcaagacttkaacaaatccaaagctggcccacttggctgaagaatggaaacaactgacgacattgctcccaaaagctttacagacaagatggcatagcttgctgggagtt

SEQ ID NO: 35928 - DNA, 201 bp, Bos taurus
cagcaccacaatcaatggtagaattcttcagtcttatttgttttctttcgtcatttgagctatccttccttgttaatcaaaaaacattaaaaaactaaaayagcaagcaaaatctgttactggttactatgctctgttagccattatgttgccaaagtatattcaaatttgatataaggtgactctggggaaggtaagaca

SEQ ID NO: 35929 - DNA, 201 bp, Bos taurus
ttcccttctccaggggatctttgtcacccagggattgaacccctatctcctgaattggcaggcaagttctttgctgctgagccaccagggctcccagttaracatttaatttattagttactgtgtgacaactatgaaactgtattgttttcttttttattattacgtcattcattcttcacattcaaaattacttgccca

SEQ ID NO: 35930 - DNA, 201 bp, Bos taurus
tcatcacaactagagaaaagcccacgcagcagtgaagacccagcacaggcgaatataggtaaataaaattatttttaagagagagagagagacatgtaacractgggccttttcaacctctggaatcctaaaactcttctaaattggagaaaactaatgacaaaaccttcagaagaagccttggttttgaacgctggaaat

SEQ ID NO: 35931 - DNA, 201 bp, Bos taurus
tcttctcctctgagttggggatctctgcacatacaacagatggccggagtgttcgtgtgtctcagccaggaagtgagagggcggcgtgtcgttcaccagcygggcacgtccccatccttcagggccactgctgtaaagggctgtttttcaccttcgggttcctgcggctctcactccactcaggctcacacgtacctttac

SEQ ID NO: 35932 - DNA, 201 bp, Bos taurus
tttgcatggcatgttttttttttctctcttttgctagctacttatttcactgtgagctctgcaaacatggtgggccgcagaggtgccaggcaccatcatgrtgtccaaaaattggctttgtgcatatgctgaattagagattggctggcagaagcagttcacagatcctggattggcagggattcctcatgaaaggaggca

SEQ ID NO: 35933 - DNA, 201 bp, Bos taurus
tcttgaccttcagtgggcatccctaaccttctaaagctgaccttcaaagttccgtttcccccacagcccttcccaggccaaaccaccccacttgatggctmtttctgtagcttctaatcccttaagcaccacttacagatggactcgcttgcacttttaatggtaggtcatttgcacgagttaacctgaccccaacccagc

SEQ ID NO: 35934 - DNA, 201 bp, Bos taurus
aaaatgatttgaatatattttaaatgtatttgtacaatatgacatatttaagtttgtataaatgaggagtctctaaactatggtccataggccaaatgcakctgcggtctgtttttgtattataaattaagttttattgtcacacagccttgcagtgtctgtggctgcttctgctttagaatagcagggttgcagagctgt

SEQ ID NO: 35935 - DNA, 201 bp, Bos taurus
tttagtgaggtttgtgggtatcaatttatattctaagattctaaaattctttgcttagaattgtattcttcgtttattttatgaagccctttttgaggccrcatagaatacctggagagtgttatagaggtaatctttgcctctcatggttcactttgggcaattttctctgtgcggctggtgagccagttactgctgtcc

SEQ ID NO: 35936 - DNA, 201 bp, Bos taurus
aaggccttgaatagatgttgctccagtgaagaagcacaagtgggcaacaagcgtaggaagaggtgcttggcgtcttacttcatacatgtatctgcccttcmttcctttttatggccaaataatattctattgcatgaagatgccatattttgtttattcatttatcagtcgatggacatgtgggttgtttggctattagga

SEQ ID NO: 35937 - DNA, 201 bp, Bos taurus
tgtcttctgtgttccagactatgatctctagcttgtgggggtttttactctctgtcagagaagacacaaaaaagagaacaggccagccaccaatcagcagyatccatactcataactagagagccttgaaagaaaagctgtacacaattcatgtggccaaatatattctgtttaaaatattgagttaaaattcacataaca

SEQ ID NO: 35938 - DNA, 201 bp, Bos taurus
aaaaattcactgaactttaattattaaatgggtctatttcttcacacccaaatcaataaagcctatttattttttgaaaggcctatcaaacatcagcattygaacaaagcccttttatccatcatgattttacttgcttcttgtaaaacgttcgtaccctgtgaattataggccttgtcttctttgcccaagtgacttgcc

SEQ ID NO: 35939 - DNA, 201 bp, Bos taurus
gacggcagctgttgaacgcagcctctatttcccaggagctgtgaatgcaacttctcttcagcgccagggccagtgtatgccaaccgaagggccaaaaccckccagtcagcaactggtgtacatgtctggcaaggagcagcattgaccttgaggtgtgctagtcaccttcaaccttaaaatccccaaagggccaagtgagcc

SEQ ID NO: 35940 - DNA, 201 bp, Bos taurus
ctgcccgacagtgactggttatgcgttccagggagcaaagttatagaattctgtaaacagtctcttgaagcttacatagtcacatacacattcacaacaayagccaccgtgtcctaagttactataccaaaacgttaggcactatttcctgttttccttcccagcaattctgcaaagtccgtgttatcactcccatttcac

SEQ ID NO: 35941 - DNA, 201 bp, Bos taurus
gccagtgcagatttgagggtggcagaagggtgctgaggatttaacatcactgccgcatttctcattctggaggagaccaagccatggctgttggaagtccrtcaggtgggaatgagcacaggccaggagtccctggagcagccgaaggatgtttgcggaggtccacacttgcacaccctccagccttctcgacatgtcctc

SEQ ID NO: 35942 - DNA, 201 bp, Bos taurus
cctgattccaattctcctgggaggaaatgccttggttacattgtctgtgatgttaacaggcacatgctaacatgaacattgttaacattgtctgtgaattkttacaggccaacatttcattctccaagaaatagtattagtcccaaagtcctaaaatttcatagaacaatatgatacataaaaatatgtctaacttactca

SEQ ID NO: 35943 - DNA, 201 bp, Bos taurus
taaagtcagagctgatcagagacccaggctctgcccgacatgcccgcgtggcatgcctttgagccatccactcggaccgaccatctggacctcatcgtgtrgattttggcctccacctcgaatgactgttggccccagatcaatgattccgcttcattgtggcctatgagaaattcatagtgcctgaaataggcactaaga

SEQ ID NO: 35944 - DNA, 201 bp, Bos taurus
gtccaagggactctcaagattcttctccaacaccaccaaacacatcttggttagtatgcttattattgtttcttgctcagcatgcttattagcagtttccytgatggctcaatggtagagaatctgcctccggtgcaggagacataggagactagagttccatttctgggtcagaaagatctcctggaggaggaaatggca

SEQ ID NO: 35945 - DNA, 201 bp, Bos taurus
ggagggtctctcatttctattgtcacaattaaagttagtgcatcccatggaataaaaaagaatacagctttacacaaaactggttaatgataacttgcatrtgagctcagtcacttcagtcgtgtccgattctgcgcaaccccatggactgtagcctgccaggctcctctgtccatgggattctccagtcaagaatactgg

SEQ ID NO: 35946 - DNA, 201 bp, Bos taurus
agattcctgagctcagatttgattgatattccgaccccaggttaagtcagctcagctttcggtaccaaaatgtaagcagatttcccagattccttatcacrccagttgtcttgtttccacataacattcatggcaaccaaatatctcttaattcatttgttaatttaatatctgactcatccaaatggactgtaattggta

SEQ ID NO: 35947 - DNA, 201 bp, Bos taurus
gatgagtactcatattttatgtaagagacagtttaggaacaactttcataatgaaacagaggtgggtacagaaatttagcaaactggcctgtatgctgacygctttgagatctgggttccatgactgtcagcaaattggcatggaatgtgagtggtagaatatttaaagctcaagtcagaactgataaaaatgtattgaag

SEQ ID NO: 35948 - DNA, 201 bp, Bos taurus
cccgcctttccttgaaagaaatgtcctgcctctcaaagcttccccatcacagaggagctggtcaagctccccttcttcctggccttttcctaaggcttaaygagccacagtatctgtcatcagtcatccgttcgctgaaacgttttggtttctgtataacatcttaacctctgtggccaaagaccatggagtgcagcatca

SEQ ID NO: 35949 - DNA, 201 bp, Bos taurus
ctctgtctgacagccctgtattccagaacatggaattctgtattccagaaatggaaaccttaaaaaaaaaaatgtgcacctggacagatggccttgtatamgttgtctcctgggggagactcttactcactgggtcagcagcctgagtcagccctgaggaaaacatggcccgagggagtgaacaacagattgagaataatt

SEQ ID NO: 35950 - DNA, 201 bp, Bos taurus
agtgaaggggcagagacaataactggtcacattccaactggtaacccggggtgggttttatctatgacgtggtccccaggaaggtgggctcactctgctcyggcacttgcttcaggggatctcccatatcacctggaatggtttgattcacctaggtcttccttttgtttaaatcttcaacttcctcagataacctcggtt

SEQ ID NO: 35951 - DNA, 201 bp, Bos taurus
gacagccagatccatctcccaaccttcctgttctttgttttcattcccaggcttaggacattaattaaagcctccttctcacctttattcacagagattcygtctgaaagttcagggctgtcagcagaaatgtgtcattgcggcagcggcagctccatccaagaaaataccaataagcacattaaacaaaagaggagttaa

SEQ ID NO: 35952 - DNA, 201 bp, Bos taurus
agcaaagatgtctcacaggtgagggtactgcaggaaggaggggcaaaaccactcagccctgatatttgtctgaactttccggcaagcattgtggacttggrcagtttccccacagctgatgctccaggtggtgaagggcaggcttgccatctcttcttcctccccatttccttctgtcaccacagtggctctctggttcca

SEQ ID NO: 35953 - DNA, 201 bp, Bos taurus
gaagtgtccagctctgtgacccgtggactgcagcacgccaggcttccctgcctttcattatctccaagagtttgctcaaacaaatccatggagttggtgawgctttctaaccatctcatcctcggcagccctattctccctctgagttggcctcatttggggggctttgagggtaggggagtcatatcaatgtgtattttt

SEQ ID NO: 35954 - DNA, 201 bp, Bos taurus
tctcagtggagctatttaatttttaagtttgtcaacaatctggtcatcccgttaacctactatttctttcctttatcccaatcccttttcctaatgaggcragtcctgtctgcccacctcctccatatatacctctctttcttattcatactttacacccacacagggaatgctttgggtgttctggttgcagttggagca

SEQ ID NO: 35955 - DNA, 201 bp, Bos taurus
actggtttctcagttctcaggccttcagacttgactgagacttacgccatcacctccccaccctcattcttaagcctttgaactcggacttagacacacayccttggttctctagttctcaggccttcacactgggactgaattagccctctggcttcccttgttctccaccttgcaaacacagatcctagacttgtctgt

SEQ ID NO: 35956 - DNA, 201 bp, Bos taurus
tgttaaatagccatagcttattttgaaatacaaattaattatctattacaagcatgctattgcttatctccttcaaagtctcattagtatgcaaattactrtaattaggtcactgtcagacattattagtgtagagtcactttccgtggtttagaatgaaaggttttggttcctaaatagttttaaaactatttgtgaaat

SEQ ID NO: 35957 - DNA, 201 bp, Bos taurus
taaagatggctgccaagaatctcatccttggttactcaattgaacactaatctaggtgcttctgggaaggggctgtacagatgtaatgaaggccccaggtkagctaagcttagagtgtggagaccactactcagtcaggggagagtccttgacaagcacaggttgtctctggcccattgtggggaggtcctgataagggac

SEQ ID NO: 35958 - DNA, 201 bp, Bos taurus
aatacttcattgaattgagctgaagagttaatgggctttatgtaagttatacgattttaacccgctacttgtaaatagcacttgggtgggccttctacctygcagaaggaaatggcaacctgctctagcatcgttcctggaaaatcccatgaacagattctccaggccagctacagggatgagcctggcaggctacagtcc

SEQ ID NO: 35959 - DNA, 201 bp, Bos taurus
acttatattttagttctgtttagagtttctgtgacttttcttctgttcctgattttaatagcaatttgagcctgagtttaaacttcacacatttctaaaaktgtcaactcccagcttcaaaccaatttatattttttaataattttacactcaaaaataaaaatattgctatttcaaattgaatacatatatatataacat

SEQ ID NO: 35960 - DNA, 201 bp, Bos taurus
atccaaatgcaattacatgcaagcatctgattcaatgatgaaatgaccatttctttaggactgtgaagagtctttcgagagtagaagcattccaaaccccyagatcccagctgggtgatctatcatcgcccacctatagtaaatgtgaatgcatgaagtggggaaaaaaatatcatgtcaaaaatgaataatcattagatt

SEQ ID NO: 35961 - DNA, 201 bp, Bos taurus
gggattgaagttggataaaatcattgttgtgtgggccccgagctgccttaggatagtgtggatatgatgggacagaacacggtggctgaattagggggcaycagagtggccagtggcccagaagcatgactatgagctcaggacgcgaagccaaagggcacacgcttgcccccagagtttattgaaatgtcaggttgacag

SEQ ID NO: 35962 - DNA, 201 bp, Bos taurus
gcatgatcaccatactgcctttagtcttaagcagagtgaatctgtgtggtcttagagcagcattatccatgctaaaaggggggcttcattagcttgaggcmaagatgatgctcaggctttcccaggtggcgctggtagtaaagaacctgcctgcccatgcaggagactttagagatgcaggttcaatccctgggtcaggag

SEQ ID NO: 35963 - DNA, 201 bp, Bos taurus
tgttgaatttcagatgatgctgccagctgcagacttttctgcgttactaattttcagacatcacttactttataacacttcacacagctgtctacccccarcttaaatgactttctgatttctgaacaagaagtagctatacaaataatggcttcagaccaaggtccttggcagaatgatttcatccaccaggcctggcac

SEQ ID NO: 35964 - DNA, 201 bp, Bos taurus
gtgttgtctgactgcaaagagagaaagattgtggaagggacaggccttgtgatgatgcctgtgacttccacacacgtcctgtgactgtgagagccacagcrtctccagagctgtctgcggccccagaaagtcacagaggagaagtcgggatgtgaactcaccatgttgcatcagtcaccgtgtggatacacttaacacact

SEQ ID NO: 35965 - DNA, 201 bp, Bos taurus
tctttccatatatttccatttcattgatcagttttccattttttccctttcaatggcttaagctttaaataacctttctttttatcttagggtccttgagyggaagcacaactacagtatttttgctaacataagcagaaaaggaagttaggataacaattcccaaataggaaaatcctctaaaaaaagaaaaaaaaaagt

SEQ ID NO: 35966 - DNA, 201 bp, Bos taurus
ttgttccagtcactttcattccatgagggtttcatcatctacaatatgtgccctcacccatggatcctgtaatgcgaccaagcccttaacacatactcaaygggaagtagttttgcaagttacacatattttcatttttatgtaattaatgtttctttctatctacatttcaacaaggaacattttaaggacaggatgtca

SEQ ID NO: 35967 - DNA, 201 bp, Bos taurus
cctgaggaatctttcagtccagcctagttcccctgaaagacctcactaactgttagcggctgtggcgggcttgctgtatgctatatattatgagttaagaracgctgtgcttaatagattggatatgctcctttgcatcatgcttagaaggttggattgtcctgtgcaaagatttatacaaatgtaaaccaggtgtctcac

SEQ ID NO: 35968 - DNA, 201 bp, Bos taurus
gatgccaaaatgctggaagaggcttcctccagttgcactcagcaagttaagttcccgacataaatcccttcttacataatacaatttggaactgcctcatrtaatgcttttgagacagactgagatggagactctgtggtcagtgttatttaatttaattagcttaattgatatgcagaataactctggacagtcttatta

SEQ ID NO: 35969 - DNA, 201 bp, Bos taurus
tgctggatcaggctgagccccgggaggtgcagagatgagcagaagaaagcacaggaaccacgggcacagctgaaggtttgaacgtaccttttctctgagcrtggcccattgctgtacattgtgaacgttttctgctccacctccaaccccacccacccacagtccttgagtgtttggatcagcatatccagcctgcagcct

SEQ ID NO: 35970 - DNA, 201 bp, Bos taurus
gttttgtttttgttgtgctgagaagtttcgaagaaatgaaaaactctggaatatcagattttaaggtataaagtctggcacgcgagacgccaaatgctttkgtttttggtgccacactgtgctttgggaatctgtaatgacgttctcagagactagaagaaaagagtaaaccagaagaagccttttaaaatttccgttcag

SEQ ID NO: 35971 - DNA, 201 bp, Bos taurus
ggatgtcttggaaagcagccttgacatcgatgattcgtatgacattctaatgtcttggaagtttccatctgaaatatttgcgtaggaataaaaaagcagayagatacattcctggatgaggatggctagctgtgctagacatgaaatctttgtgcttcctgcagagaacacgctgaaccgatttatcaatgtactcattgc

SEQ ID NO: 35972 - DNA, 201 bp, Bos taurus
aaagctaagatttaactaacaactgggtgggtaatggttatcagattaatcatgacagggttgccctcgaaggagcaaggtttgagtgtggactgggaggrcagtaaggatgaatcttttgttgctcttcatcaaagtgatggtcaattttatacgtcaacttgcctgagctaagggacaccaagaaggctggtaagacat

SEQ ID NO: 35973 - DNA, 201 bp, Bos taurus
atgatggacttttgtaactgtctagcttccattgggtaaaaccttgttatcaaagatttaaaggatccatttagaatcacatgtccatcacaggaaagacyataaatcaagatggacaggcgaggagtgataccccaaacctcctttcaacccaccttgtgggtactgctttgagcacacgtaggcttcactgggttatgt

SEQ ID NO: 35974 - DNA, 201 bp, Bos taurus
taagaaaaaaaaaaaaagcccactaaacgcaaatatactctctgattctattgctttgcttactcagaaatcacccgtgtaaaactgctgccgctatgctrggcataacgtttttccctttctttttgatttctttaacacatggttcgtggcctttggtacatttcagcagagttaattaagttttcagctacaagtcta

SEQ ID NO: 35975 - DNA, 201 bp, Bos taurus
gagacaagaaaaggccccttccagtttccccagcccagatctttcattgaaattagaggaaacttctcctgtctgtcacctgaatctttgctcttgagaaygtggtttcaggtgggggctggcggcctcttgacccctgtggtctgaaaatatttacttaggaaggactgtgctcttgtcccaaagagtctggggtcttgt

SEQ ID NO: 35976 - DNA, 201 bp, Bos taurus
tctctgaatgtttgtcatcgggatcatgtgaggccccctctcatccattttcttgagagtttctgggttggcagccagtgtgtttactgaacagtgcttcrtggccattgatagactcagggtaaaaactacagcatcacctagatgtcgacagacatgctgtctgtgtaatgtatatatttacacatgtgtattagaata

SEQ ID NO: 35977 - DNA, 201 bp, Bos taurus
cgaaattccagggccttaagtaagagacctttatttttcacaagctggaagctggaagtctgagggtgccgagtaaggtcagcttcctccaggctggtacrtggccagcctctcaccttggctcgcatggtggggagagagtgctggtctctcgtcctctttttataagggcacggcttccttcatgggaccccaactctc

SEQ ID NO: 35978 - DNA, 201 bp, Bos taurus
cgcaggtaggcatttgactagtgctttgccaagttaacataaatcgtaaaaccttttcatagtcccttagcatgatagaagaaaaatgagttacaaatatytatggagagtctagtgtcccaggcagattgattataaaatgtggaaacctacataataaacagaaaaatattgggaatgttttgaacaggaaggctggct

SEQ ID NO: 35979 - DNA, 201 bp, Bos taurus
ctgacccatcccattatggaaagggtgttctggttaatcttccaggaggtaattacatctagggcctcagattcccctgcaatttcacccgattctcccaycccaaattacagggttaacacggcagccccctaggaggtagtttgtacattcccaggtcgattaataatattttcttatcatatttttggtttgataaat

SEQ ID NO: 35980 - DNA, 201 bp, Bos taurus
gtgtgtgcttatctgccctctgaatattaggagataaataaagaagattctttgctggggacactgttcagagatttccccccattttaaaagctgtttgytttcttagacttcttttatattttggatataagttctttatccaatatgtgttttgttaatatttctccttgcctgtgcctttttttttaaatcctctta

SEQ ID NO: 35981 - DNA, 201 bp, Bos taurus
gatttgtagttacttttcagtcactcggttataatgcaaacacttccaagtagatcacagactcaaaaatttgttcacggccaactgattgccttttaaayaaagaagtcagcaaaagaacaaaactgcttttttctatgaagcaaaactcagtgtaggcgtgggtctccctttggccacctgccctttgatttagatttt

SEQ ID NO: 35982 - DNA, 201 bp, Bos taurus
cctatctaccttgtcaaggagctgacacacaaacttatttttttcaaaacctgccaggcagaagctcaacgtatttagggagtctaaaagcctaaatgacratttccaaatgaatattaggagagttaatctgtttccccttatctaccgtataaatctttctcttcgtgcccaagggcttcagattttaatagaaaatat

SEQ ID NO: 35983 - DNA, 201 bp, Bos taurus
tatttcctaatgtacaaaggcaatttcaattattttttcaaaactgaggaaaactggtaatttttttaaaagcacatttactatgaaaataagaactaaasaagaactaaacaagaactaaagagcctcttgatgaaagtgaaagaggagagtgaaaaagttggcttaaagctcaacattcggaaaatgaagatcatgaca

SEQ ID NO: 35984 - DNA, 201 bp, Bos taurus
gcatttccttctccattcctctgggaggggacctttcttgtgttgctgtcactgtttggacttcaggccattaacatttggttctagaaactaggcttctrtaactctctaaggatccaggttttatggaatttccctcttccgacaatttctgaatgcgtagttgttctctaactctcgtgagctcatttctgtcttacg

SEQ ID NO: 35985 - DNA, 201 bp, Bos taurus
agcaggactcttcagtgtccagactgagtcacgagggcaggccccatcctctacttctggttcagatcattctttgtatcatcccttctagttcagatacyaccctgtttatgctttctgagagacagcatggttttgaggaatgagtcctgagtcgtcagaaagtttaggttgaaaacaggtttgttactttcaaacaga

SEQ ID NO: 35986 - DNA, 201 bp, Bos taurus
tttcaaacagccttgggatgcagggcctgaccatctcactgcaatgcagcttggttagttcccttaggctccaccagcgctgtgttatggagcacgtgacyggtcgtgggccatcaccatctgacatacgacagtcatgagctactagaaacattcagtcctgggctggatgggatctttgtgctggcaaagagttgggac

SEQ ID NO: 35987 - DNA, 201 bp, Bos taurus
gtaaccttgctctttggctcatcggattattcgtggtcttgaaatactattttatgcagatgccagccggtctgctggcatgccacatgtgcctgagtgayagagaatggtgactttgaaaggtgtttcacatgctaaatgaatgtcctcttcctaccggattctgaaataattccagtgtgatccaaatgctgatagtat

SEQ ID NO: 35988 - DNA, 201 bp, Bos taurus
taagacagagactttgacacatgtttgtagaatccattataggtgttttgggtcatgtttataggaaatagaaaggggtgatgttcaggtccacggcagaraactcacttttattaatcattatattaataagataaagatttgacagcaacagttccatctatgattttgagttgccaagagaaaaatctgtcttccatt

SEQ ID NO: 35989 - DNA, 201 bp, Bos taurus
tagagcagatcactgtggttgaaacaaaactggggccggggggatatgttaggaaaggaagaatagcatctaaaaggctaagcctaatgagatgggaggarcttcccaggggcaaagaactggcctgccaatgcaggaaacataagagatgcaggttcgatccctggatcgggaagatcctctggaggagggcatgacaac

SEQ ID NO: 35990 - DNA, 201 bp, Bos taurus
tttgtatataaacagactgtatatacatttctgttgtaggggaaaggattcttcataaaaattctgcatttggagaactgttgtgattcccttgggcctcrgagctgttttaagaagataacgttccatattttcaaaagcaagataacttcccaaggagaagagaagagacatggctagaaatccacatggccgtgatct

SEQ ID NO: 35991 - DNA, 201 bp, Bos taurus
ctaaaagctatcaatcagacatgcaaggtgaaacaatgttactgtgaagatagggggtctcaaccccctatcaaaggagaccctcaacccacctgcaaccstcaaagtgacccgaaacccacctcccaggttcagagcacgatgctctgaaaagctaacacttgccttgactgatctgagctttattcagcaggagagttc

SEQ ID NO: 35992 - DNA, 201 bp, Bos taurus
attaagatttaaaaacatgcacattgcaaatgatatggattttgaaccattgttttttccttccgaacacaaaatccaagtaagtgttagatgttaacgawaccatggctgaaattctgagtttgaaaactgatttttaaaataaaatagtgagaccgaattgtgtttttccattagcaccaatctggggctcaaaataag

SEQ ID NO: 35993 - DNA, 201 bp, Bos taurus
ggatgtggcagggtcggcagtgggggcccagcgcccgcctcagcctccgagctcctgcagcctaggcctggcttcccgggggccgcggatgagcgtttccrccaccagatccatttggctctatttaggaactaagtacaggaaggtagttattgtacaagattagtttcctgtaggccataaattggcagtagcagaaaa

SEQ ID NO: 35994 - DNA, 201 bp, Bos taurus
gcacccaggactcccctggtggcccaggggttgggactctgagcttccactgcggggggcttgggtctgatccctgatgggaaaactaagatccctcatgytgcacggccaagaaaataactaaaatcaaataacaaaaagacatcaagacaataaagaaaataacaaaacagcatcctgtatgcctgcaatgattctacg

SEQ ID NO: 35995 - DNA, 201 bp, Bos taurus
ttttcatctttaagcccaggaagttttgtaaagttcctcatatcatataacgttcaggaaaattccaggaaaaggtgatatgaagatgtaataaggaaaamaaaaaacagaaatgaacttcatcttggttacttgcaaggatcttctgataaaaatcccatttgcagttagaacaaagaaaggggatacatgggaagaaat

SEQ ID NO: 35996 - DNA, 201 bp, Bos taurus
tgcgtcctgtagatggttgggcaggaggctttccctctaccaccaggaatccagcgtcttcacggaccagcatctgcagagccaacgcatcacgagaaatyttaggtgttcaccacatgtgcatcctccctgagctcactagagctccaccagaccaccctccagtgtctccatcttgtccagaacttgtgtctgcctcat

SEQ ID NO: 35997 - DNA, 201 bp, Bos taurus
acatgactgccttccccgtctttccacatgcagaggatgagaagagtcagagaggtgttaaacaggaaaaagggctcctgcgtccacggccttcacgttcygtgagatccagcctctttcctaagagcctcctgagcccactcagtcccttctcaccgtcgaggctggtttgggcaaacagaccctacgtggccccgcatc

SEQ ID NO: 35998 - DNA, 201 bp, Bos taurus
tgctgaagctctagtctcccggggcttgtgagcgtgagcgcgcctggaggaggtctggggggacagcgagtgcagacgcggccttggggcagccctaagcyaacatgacccgtgtccataggaagagggagagtcggacagacacagacagaggcaacgagaagatgcgggcagaaggtggtcacctgtgagccgaggggt

SEQ ID NO: 35999 - DNA, 201 bp, Bos taurus
ccgtggagtttaagccccgatttagtgagctctgcatcattcctgcaagttccgttttgacatttcctctcaaataaagtatcagacactctagggaagaygcacgttgtctccccagaacgatccccagggaggatcttgcttggccttggcaatcattcttgctggcgtgatttgtatccagaactaggactgtctgac

SEQ ID NO: 36000 - DNA, 201 bp, Bos taurus
ttaaggtctatttatttattcattcattttcggccgtggcgggtcttcacggctgcagtgaagttctctcttgtggcaggtgggccccctctcccttgccrtgctcaggcttctcatcgcagcggctcctcttgaggagcacagctctgggctcgtggactcagcagttgtggcctgagggtgctagagcgctggctcagt

SEQ ID NO: 36001 - DNA, 201 bp, Bos taurus
tcctcgcctacctgatcggccggaagaggagccacgccggctaccagaccatctagccgcgggcgcagccccggccgcttccctgggcttagatcactgtygggggcacttccttgcaaactggttttcaaatctgctttatccaacgtgaagttcatctggcaacacttactatgcacaagagagtaactatggaaatga

SEQ ID NO: 36002 - DNA, 201 bp, Bos taurus
ctttcacgcggcgactttcaccgtcgccactgaagaccgcgcggcgcggagggcaggggccagcgggctgtctgccgccgggacgctgcgtctccggggcytcctcctggacgtttccatggagaacggtggttggtgaacgtgtctttcttgagtctgcggcacctggacggcagtgtaattccctgatgggaggctgcg

SEQ ID NO: 36003 - DNA, 201 bp, Bos taurus
gcccacacggtgcagggcgacccctcagggcagacgtaaagctaacgtccaggtgcccacttatcagcgtgcagggtgactgatttagactgttgcttaayactaaagggccctgctctacagaagcgggagggactctgggcgaaccgccgtcccctgcagccaccctggcccccggctgcccaccccgcccgcccccct

SEQ ID NO: 36004 - DNA, 201 bp, Bos taurus
gccacagaaactacttcaggaaaccgacattcttatattcaccaaactgggggtcctaacccagttagcggtagcaaagccagttcggccggcaggagcgktttcgggacagacagacctaaattgttaccaatcacactgaatcgggtgcaggtgaaaaagatgtagaagcctctacccaggcggctcggcctgcccctc

SEQ ID NO: 36005 - DNA, 201 bp, Bos taurus
gtgtggggcactgaggtgcgctcctccaagtggcttcactgagaagataccccctggagggaaggacattcagttccttctgccaagtgcagaggccactstctggtctcttgccttccggaagcttgggtgccatggagactgtcatgtgacccagcaaacacagtcgtccagggctgcaccggacgggcgtccactctc

SEQ ID NO: 36006 - DNA, 201 bp, Bos taurus
gagttggacacaactgacctctaacacttttacttttcatataatcgaacagacaagttatcttcattttaatagtatcaggacaaaaagttccaaattcrttcctgaatcttaaacataaggcaaaaatctcttcttataattacataaaaggtggacctataacttaaaatgtggaaacgttgatggtgtcatcttact

SEQ ID NO: 36007 - DNA, 201 bp, Bos taurus
acacttgggccagcaccatctcggacctcaggattttcacctgtggaataaaggtctggctcttaatctcaagggaggccacaggcctgcctcccaagtcyctgaggggattcttcaaacaatatttttttccaccttcctcctattggttgaaagtcaaggccataaggactcgagtccctgaggggagcaggagacatc

SEQ ID NO: 36008 - DNA, 201 bp, Bos taurus
ttatgtgaaattaacattctaatttcattcctgtcatgtaccatctatttgtagcaatataaggagaaaaggggttacttttctatttttaaaaaaatcarctagtttccacaatggaatatcaaccatttctgcaaaatagttctttgccattgttactaagaagttatattaaacattttctgttctattttagtgata

SEQ ID NO: 36009 - DNA, 201 bp, Bos taurus
actcagtttgcctgaaatatcagatttatggtttcagagcagtaaaattggttatgtcacaaggaaacactgaggatttgcagattttcttcaggcattcmaggttttctaaagtttttgcaaagggaggtgacatgatcagagctctacttccaaataccagtctggtagtagtctttagtggagatcagagataagaga

SEQ ID NO: 36010 - DNA, 201 bp, Bos taurus
tgagaacaagagatattcctgagactctatttctgctcgcattactccttaggtgcaaacctccacttcctgcctggacttccacgtgtcttgtgttttgsactgacccagtcagactgttctctggtctcattctgttgaaccattctcttcagttttatctctaaccaagcaatagcatttaccctgcttgttagagtt

SEQ ID NO: 36011 - DNA, 201 bp, Bos taurus
ggcaggaactagaatttactgagagtggtactccatgaagttgcagttagggaaggtctgtgtgccacaaaaagcagcagtttgatttcactgtgattgcrgtgggccaccattagacgcttttttttttttttctttctcttgaatattcgtgttttattttattttattttttttaattttattttatttttaccttta

SEQ ID NO: 36012 - DNA, 201 bp, Bos taurus
aattcctgatctatagaaattaagataataactttgttatttttaagtttgggctatttgtcacacagcaatagctaactaattcaggaactatggccacraactacatgaagcagagtgaggtgcctaccaacagagtgggtggggtctaccacattttctcaacacccaacctaccaagctgaagggtaggcctaaatg

SEQ ID NO: 36013 - DNA, 201 bp, Bos taurus
ttgtgcactggtgggagggtgcctatgggatgcagcaatacttatttctgtgtgaaacaacctagtgtctgtttttaaggcgtatcagtgagaaatcaaasaagtgccagctgatgaagaatatttagtttcttttccaaatgaatctccttgggtcttataaacagcatttttatagactacatgtgttacctttacaac

SEQ ID NO: 36014 - DNA, 201 bp, Bos taurus
ctttcctgctcctccttccttcaggtttatacctaaaattcacctttgtcagtacggtcttccatagcctccctacataaaatagcaacagctggccattycgtatttctctcctttccctatttgtctttatctgttcagttcagttgcacagttgtgtccaactctttgtgacccatggactgtagcacgtcaggcctc

SEQ ID NO: 36015 - DNA, 201 bp, Bos taurus
cacctgaccgtagctcagaagctcagcataggtgggaatttgaaccgtgtccttgtccttttaggccacccagcattgagtgtgcacgtttgactctgcarcatattgagcagttgttctcattttatgcgggcagaatctgaatgtcatagttttcttatgaacatcgactactttttaatggtgcttgacattgaaagt

SEQ ID NO: 36016 - DNA, 201 bp, Bos taurus
gaactctgggagttggtgatggacagggaggcctggcgtgctgcaattcatggggtcgcaaagagtcagacatgactgagcgactgaactgaactgaactrttggtcatgtgtagaggtatggcctttgaagtcaaacgatctggctctgtaagtgtctgtccctctctgcacacagctcacgtcctctcctgcccttagt

SEQ ID NO: 36017 - DNA, 201 bp, Bos taurus
cacaagggagattgaaaaaaaaatgtttttctttgctttcctcctggttcttctaatatctttaatcatcttggactcccaacccatccagtctcatccayactaatataatagatacttttaggacttgatggaattctcataaaactcagcatctcaagctagggagggaatatgggggctttcactggatgtttagac

SEQ ID NO: 36018 - DNA, 201 bp, Bos taurus
ctcgacctactggagtctgcattttaacactcctgttcctgatgcttgaattgactttctctccccaccccagctagctagtctctaaagaggctgagaaygaaggcctcgcttgtggagtggggaagtcatgccctggtgagctgactctgcccacagcaacaggaggagaaaggagaacaactttggaggtgagagacc

SEQ ID NO: 36019 - DNA, 201 bp, Bos taurus
tggaagactctgttagtttagatgtaatattcacttttagccttcttcatttataataatcccaattttatttggaatggcaattcacccagctattaaaraaagaagccacacatgtttaccaggactccaattcaattacgtgtgattgtgtgtctgggacatgaattctaaatgcaagtttgttggagattactatca

SEQ ID NO: 36020 - DNA, 201 bp, Bos taurus
taattctgtcacatttgaataatatttcatgaactgatccttaggaagcactggaggaagagtttaacagacaactcaattatacctattaaattgtttgyaatcctctgaggccttatcatctgaatagacggttctagaaaattcactcaaacatgtacacatttatacattcatcccacaaaatgtggtacaaactcc

SEQ ID NO: 36021 - DNA, 201 bp, Bos taurus
ccccttctgtcatctgatttaatggaaattctagtcagtgtcagcttgtacagtgattttagagactgattaatgagttgtcactgttttaaattggatakaggtaatcagaggcaggaataaaagtatcttagcatctgagcaacccagaacattcaacaagtgatgaatgaaaccatgagagcccttcagatgtgtgat

SEQ ID NO: 36022 - DNA, 201 bp, Bos taurus
gtgtgtgtgcacgcgtgtgtgctaaatccagggggcctggcaaatagaaagccttgatacaagcacactgactgaagggctgtttggtatcgtttctgatratgacagacctgagcgttcatgaaccctgctcatctgtctcctgcagaccttcttttctgtgtcagatggtgagcatgctcagtaggtttttatctgtat

SEQ ID NO: 36023 - DNA, 201 bp, Bos taurus
gactcagtggaaagaatggagtctttattttttttcagaatattttgattccataatatgactgacacatatccatatgtcccaaagcagcatcttgggcrttatagaagttttgcctaacaattttcttcagaaagctcagaacacttagccaaatccttaatagattactctttaatagattttctaaggaaaaaaaat

SEQ ID NO: 36024 - DNA, 201 bp, Bos taurus
gggacccacatggctgcagagggcctgtaatcctagtgataataccagtgcggttcacagactcacaggcattgcgtctcatgcttcagatctggtgcctmgcttaggtttgcccaccctgcaggccagtgcatggatcagctggaaacctctcttcctttgatttaaacccacatctttcaagactgtttaatgaaggtt

SEQ ID NO: 36025 - DNA, 201 bp, Bos taurus
cgcacagagtcagacacgactgaagcggcttagcagcagcagcagcatacatgtatatatttccttgctctgtcacctgagagggcctagatgcaatgacractcagtagtaatacgcacacctagtgccctgatcttgcttttatatatgtattttctggccacgccatgcaacttgtgagattttagttcctcaaccag

SEQ ID NO: 36026 - DNA, 201 bp, Bos taurus
ttggctcctgttactactgtttttgtggatattatggccatgtttccatagtaagaattgccctcagctaccgtatatagaaggcaggcaaatgataacayagcaagtagatgaaaggccaaatgcgggaaatttttaatttgtcacgtctattaataatctggtttcccaggtggcgctagaggtaaagaatctgtctgc

SEQ ID NO: 36027 - DNA, 201 bp, Bos taurus
tcaattactttcgtgtgttgtttgtcttcagtacctgtcatcaaccaaatgtttctccatttttatatgtgtaatgaatttttgtggcaattatgttgtcrtgaatcactgtgatattgaccttaccaaatatgttttgcctatatcatatcacctgaattattaaattgtaactttagggtaaaatgaaactactatgaa

SEQ ID NO: 36028 - DNA, 201 bp, Bos taurus
catgagattgaatagaaaactacttttatttttcatctcaaataatataaaccaccccatttcaaatatgggaactagtattagatatctacagaattgtygttgctcagtcactaagtcgtgtctgaccctttgcaaccccatggactggagcacgccaggacactgcatttgaaaatcaagatacttcaagaagtagtt

SEQ ID NO: 36029 - DNA, 201 bp, Bos taurus
ccgcatgacacagttgtgagaaatcatgaaggaaatttctaatacagctctgtgggagtaaaagctttccgcctatggagcaactgatacaatattatccygccaaatgtatgattttggtaaatgactgtgaccttcagctatagtatagccttcatgacacacatttacttgtaataacttcctttctggaaaaatgta

SEQ ID NO: 36030 - DNA, 201 bp, Bos taurus
ttatacagggagagcttagattggtgggaatgggttataaagcagcaaatagcagcctattatatcacctttcacactatgcatgtgtttgaagtatattytacctatctggccagcaggtagctggacggatgctatgattcatacagcatataaaagatgtcatttgtgatatgactcccaaattctagacacccatgt

SEQ ID NO: 36031 - DNA, 201 bp, Bos taurus
cacactgaaattttttcagagaactgactacctccagcagagtatctctaattaccttgggtcaatcagaagctccattgttccaaaagctggagagaccrcccctgagaagtccctacaagtcctcaccaacttgaacgatgtctgcccttgactctcttggaatctggtccaattatgatgaacattcatggaccacgt

SEQ ID NO: 36032 - DNA, 201 bp, Bos taurus
atttcttgtacctcctgcatttggcaggcagattctttatcactgagccaccaggtaagtctcaccctgtttcatgtttgactacaaatatttataggccrccagcctggaggtcttcacatctctgtctctggcaggtaactgaaggtcggcttaactctccggggaagaagactgatggctcgtggggctgaaccgcag

SEQ ID NO: 36033 - DNA, 201 bp, Bos taurus
ccagcgtcacccacccgagcctggcgacaggcgcgcccaggcgagctccgcggggccgaggtgtctggagagcggccccgggcgcccgcgcgcggcccacygagggtaaccagaaaagccagcctcggggtcgaagtcataaagttactaatcctgtgcagggggagtaagcgtgcctcgggccgcctggggcggtcattt

SEQ ID NO: 36034 - DNA, 201 bp, Bos taurus
caccagggaaatcctgggaatacatttgcaagccaaactaatcctacatttaagttaggttcagcctataggaagccaggctgtattgactcatctactcsgtcttgacccgtttttgctgttttcttctaaaagcttctggagtgttccttcctcccctcccctcctctatgctgtgtccctcgttcttgtacccatcac

SEQ ID NO: 36035 - DNA, 201 bp, Bos taurus
aagttcttatccacatcacttaactaggctggcctaagcgtgacagaaggggttaggagcagccacagagggaattgaagaatgtggactcagtcgtcgtrggggtgtaggctgaggccccgcttacccctgcagctcagttgactgcagtgtcatcacaggagcgttggatttgaatttaggggacctgcattcaaatat

SEQ ID NO: 36036 - DNA, 201 bp, Bos taurus
ggccagtgccacctggtgttcaacaccgatattcccccttctacagtcagcaaaccacagcgcagcaggaacaataccttcccactgacccagaaagtcargaggcctaagcggccgtggcattgcgtcctattttcccaaatgctctggtttggctgggattactttctcttcccctcgatgttagaatactccatcagg

SEQ ID NO: 36037 - DNA, 201 bp, Bos taurus
ggacaggaccttccccctaccccaccccttctgggccaaactgtgtgttgaaggctcaagcagtcgagaccccggagtaaagccaaggaggccgtctggartcctacttcgggattcctcggaacctctgtgcatccacggtctcatttaagagccatctcggggcaccgagggaggcggttttggggtgcaggcggccgg

SEQ ID NO: 36038 - DNA, 201 bp, Bos taurus
ctttggagaaggatgtgtccctagggtgcatgctttgtgacactaaacacagactctgtgtttgcagcgattcctccttttctcaaggcctcaccctgacwctccacccttaacagtaacatatgacaattacctttttatgcttaatcatcagacatttgtaatgttatagattgttttttgctcgggactaaaaacagt

SEQ ID NO: 36039 - DNA, 201 bp, Bos taurus
ataaaatagaagcaggcagcacacacatctgactcacagcacagccaaatatggtcaatttcgccccgttagaccactgttctaaccactgagaaaaaaaktagattttcatttcatgaaatatttactttaaattgaaatgttgaatctacagtatagtcaagaaagaagaaattcttgattgtcagtgttttcctgtgc

SEQ ID NO: 36040 - DNA, 201 bp, Bos taurus
ggatctcctcctcagcagttacacagggccttcccagaggatagagtaggttagcaattaactaggcggctttggagacagaggagtgctaggtgccctgrtcgtgggtgtggcaggtaggggcccaggagtgcctcacatctttagatctgtcctgcgcatgttgataaagatacatattaacttgatactgacattttt

SEQ ID NO: 36041 - DNA, 201 bp, Bos taurus
ggaagcctgctaacgtggtggagctgggagagaccgtgtcttccgccggggtctgtgcttcagggcacagctgctgctccctgagccctcttcccgctctyggcctctgagagagcccccctttcttggtgtcctggctggcgaccctggcagctctgtaacaccagccgtgcttcttctctggcatcttcagcttttcct

SEQ ID NO: 36042 - DNA, 201 bp, Bos taurus
ggtaaaagtggaggaaagaaagtaacatgccttgtaaatgtcttttcatgaaaatccataagaagtctcgtcttttggaaagggcatggccacagggtctyttgaaacacgttgcctctgtgcgctggtttgagatgaggggcttgggggagggcggctctgggcctgtatgtctcgggcgggggtgggaggaattgggcc

SEQ ID NO: 36043 - DNA, 201 bp, Bos taurus
ctcggcctctttgggaatgggacccagatactgtgcattttttaaaatataaatttatttattttaattggaggctaattactttatgcattccgggccakgcacggtcacggtgaagacaggggtttcgggttaaaggttgggagaaagttaagaggggacgggggtgtgcgtctctgctaccctagagagaggccagaa

SEQ ID NO: 36044 - DNA, 201 bp, Bos taurus
gagaagggaagcgtcctaaagggcaggaggccatctgcgagggtctggcagttctccgcactgaggggtaaagtgcacggggcagtggtcacagtgccccracgtgtgatggccagagaccacgtcctggaagatcaggccagactggggaactcaggcccatcctgagggcaacagcagccacagaagctggctgatgtg

SEQ ID NO: 36045 - DNA, 201 bp, Bos taurus
ccaggcaccactcagctaatgttgatttgcatgcttacttattttttacttttatttattccgatacaacctcaaactcaccaggaagttgtaaagacagkacaaaggccttctgaataccttttacccatctttgccaactgtttacatctggccccattttatttttttcaaatgtatttatgtgctttgtcaggtctt

SEQ ID NO: 36046 - DNA, 201 bp, Bos taurus
ataaatagtcataaatccactagtgtccacaaaagcctcttggccattcggaactgacgaagatgttgcccactcaagggatcttctcccagagctgtggmggagtttgctgggagagggctggccggggtgggttcacgggaggtgctggtccactctcttctgaagctgagaaaagacactgttctcaatgttttcatt

SEQ ID NO: 36047 - DNA, 201 bp, Bos taurus
gcacagaggtaatccacactctccccacccaggtcagtgtgagctctcaggtccagacactcaagtccaacaagcttactaataaatgtgccaaaaaggcrcgtaaaaagaaaacagcagtctttacagagaaatcaaggctgacaattcaatggcatgaagatgttaatttactattgcccttccctggtggctcagtgg

SEQ ID NO: 36048 - DNA, 201 bp, Bos taurus
ctcttaataggtaactgggttaattctatgaccccactctctccctgaatgtacatccctaatcaattacgccaagatcacagacagaatgactctttcakcttggcatcactgactggcaatttcaatggaaaaccctgaaccactgggaatgatttctccctacatgtatctaggtcaggaatcatcattgtcatattg

SEQ ID NO: 36049 - DNA, 201 bp, Bos taurus
tcagatacagagggtgtggtactgagtcatacacagtaaaaattaccatcagttatgatggtagacacaatctgcaggcctcatgacaggacagaaagatkatcatttccatcaattagtaaaagatggaatgggatgccagggaaaaagaaagtaaggatggccaagctgatttttatttaaaacatatatgactgtcat

SEQ ID NO: 36050 - DNA, 201 bp, Bos taurus
ttgtttcccaagtgcctgaagcaggtctctaatccactctaaataaactctaatccactcctattgttttgttttttttttcactcctattgttttgaatrggttttaataattcccaaatcatatctgcagtccccagctttttttcaggattctctctcatccagtgcaagaaacactagtagtcgactaagcagagta

SEQ ID NO: 36051 - DNA, 201 bp, Bos taurus
tgacgctcatgcaggcctagggttatttctgctacgaggaattcagggttttgccctgtcttctgtcatctcttccccacatggatggcccagagaaggartatttctgtctaactttaagtggcagtgagctgggtgttgcactagggggtcacccgggccttccaggagctcccggtcaaagagagcagtgatgggcag

SEQ ID NO: 36052 - DNA, 201 bp, Bos taurus
tgtcttttctttaaccatatacaaaaatagcaataacgaattgccccacatttgctgtagatgataattagctggctcattgccaagaagataatcaatcygttgattttaccaaaggcaatgagactgacttccccatcattttataaaacataattctaaagctgtgggcgctctcgtgctcctgaccccagagttact

SEQ ID NO: 36053 - DNA, 201 bp, Bos taurus
ttaggaatgttatattacatctggctcagagacggttggctgttgatggttaaatttaggccgaaatccacgaggagctaattgatgatctgtactgaccsttaagcttggatcaaatctgtctagagaaatttatgcttagatagtgcatctagctgttgcagggctgagaataggagaacaggggatttctttataaac

SEQ ID NO: 36054 - DNA, 201 bp, Bos taurus
agctgccatgcgggaggaacctgtgtggaggccagaaggggaccctgggtcctcccccgcttagagccgtatgtttggtgaagatttagggtagagaaccrggcaggtacccgtgctggcccttgcctgcctccatctccttcacatcgggctgtctcccctgtgtttcatgatctttttgttccaagcaccacagcttca

SEQ ID NO: 36055 - DNA, 201 bp, Bos taurus
tacagttcctacttttcaagtagcttagtaatcctcatctattttcatgcccaaaccactcagaataaaagcaccttatagtggttacagtgacttccttkggtatggatgttgtttggacactcctctgtcctgtgtgaacctctgggtcctttaagcattgctgtgctacaggctgtgagaaaaagctaaatggactat

SEQ ID NO: 36056 - DNA, 201 bp, Bos taurus
ctgccccacatctgcaatcagtcacttcctgaagcagccttgtccttttaatagggaaaggtattcagagactgctgtgtgggtacattggttttatttcrctaagcctaaaagtgagttaaaattaagagcatcctggtctaatttcagttttcaaagtggtgcctcaaagtctgatgatttgattatttgagagtgagt

SEQ ID NO: 36057 - DNA, 201 bp, Bos taurus
aggtgatattaacacagcagatattttggattcagagggccactctaagtgtttttctctctctccctcacctccttgcatctgttccctttctccctcgmagtttgctcctgatgcaaaatgcgattgttacttgcaattttagtttgagatatgaacatttggagttatgtgtttttgaaagaaaatgaaatgtagatg

SEQ ID NO: 36058 - DNA, 201 bp, Bos taurus
caggcacaaaaaccacctgcagttctattttgaccaagaattctcatgtggagatgattttcaaaatgatggagaatagagacaaaggccagtgtgccctraggaggctgggtttcacatttaatgcccaagggagagaggaaaggcacttcaggaagaagggatctggccactagggctcacagagaggcaagaatcagg

SEQ ID NO: 36059 - DNA, 201 bp, Bos taurus
gagaggcaggtggcctagtgtccgccattgtccatatccagccaactgccagctgtgtgaatgaggctagtggaatgagccagcacagacacgtgacagarcccagcagagaccaccagggccaggcaggaacggctcagcagaacactgagctaattaaggggtgacttgctgtttaagccactgtgtttggaggtggtt

SEQ ID NO: 36060 - DNA, 201 bp, Bos taurus
cagagacaggacggctgagtgggaagggaatcagggaaaagagctaagtcttcctggttttaaaaggccaagtctgaggacaggatgtgtacacactgttrgctgtactttgtgattacaacttttgagcatattttcaatataggtctctggaccattctctgctctgtacacatacctttcacaagtatttaaagcaga

SEQ ID NO: 36061 - DNA, 201 bp, Bos taurus
aaatgccctttagtcctcagaatggctgacccacctctctgatttgtgtctggaaggcaaaatggactaggatgtggccacttagtattcagaccatgtcrggatgcaagtaaaaagcctatagagcagcgctggacgcacggtcgccaggccaaacacagccagcctctcaaatcacagttaaattataagcgagtgtgg

SEQ ID NO: 36062 - DNA, 201 bp, Bos taurus
caggacagacggaggcagggagcgtggccaagcaggctggcttctgacactctgtccaagagtgcttgaccacattcattgccgaagcgcctctcaggacmacacttaacttctgaggggcaacaagggagggagggagaacagattgaagtatttggtggcagcacaaatgacacgtgtcgttctcgggatagttgccat

SEQ ID NO: 36063 - DNA, 201 bp, Bos taurus
tcagttcagttcagttcagttcagttactcagtcgtgtctgacactttgtgaccccatggactgtagcacgtcaggcctccctgtccatcaccaactcccrgagtttactgagggtctgagggtctggcccacagcaaatgcttatcaagcacagctgatacaatgagtatgacaatattgacatctatgggttttttcct

SEQ ID NO: 36064 - DNA, 201 bp, Bos taurus
atcaataagaagagaaaaatgattactcaataaatgttagaagttcattgaatagatttcaatttctttattgtcttaacttaatatagaatatatttctstgtcaatccaacagctaataccctgatttatgttgaagcaccaaaagatatccccattttttaacaatccccatttataaacaaaatcagaatgtgaatc

SEQ ID NO: 36065 - DNA, 201 bp, Bos taurus
ttgagaagcatttcaggattaagcaaatgagtaattgtaccaatgctgtttcagaactctagctacctgagctgtcatgtcctacacgtggccaccacacygctcacatatctgttattagttactgtgtctgtgtgtaggactgtgttagttgctcagtcatgtctgactctttgcgaccccacgaactgtagcctgcca

SEQ ID NO: 36066 - DNA, 201 bp, Bos taurus
tgacgttgcctataattgagtgaataacagttttttcataaccttgacagtaaacatatctgaattcaccatttgattttctaaaacttgctgaaaaaagkcaaccaatagtaaagaagcattgtaagaagaaatttagtacacatgcacacacacaaacacatatatacctgtattcacatacatatgttgtctatataa

SEQ ID NO: 36067 - DNA, 201 bp, Bos taurus
ggtagggctgtgggccaggcttcacgtttgcccttgggtgggtggggccttaggctgtgctccctgcctgcacatttccacagactggactccatgagctrgcagggttaaatggacagatgggtaatcaggctgtgccccaaagttgatcaaggctacagatggggctttgcaatcagataggccattggttgtgttctg

SEQ ID NO: 36068 - DNA, 201 bp, Bos taurus
ttgcaccctttgtttggggggcctattcaaaaatatttctatcattttgtattctttccatgtagttctttcaataatttaaagctgtggatacacgttgycccaactgcttgttattttggccagaaatgttgctaataattgaggaaaataaaagcagtttaacaaattctgttgaaaacaagatgaaagggtgaataa

SEQ ID NO: 36069 - DNA, 201 bp, Bos taurus
ttcttgtattatagtttttgctgtatcagccataatcaaaagcacatatgcaagcatgaagatgaatttcagtaaatacagtcctgtcagtatccgaataygtgactcccacccttttctctcttgccttttcagtgttgtagagaatgaggtggttaagcagtcagcatgtctccctgcagtttcagttagtagcacctt

SEQ ID NO: 36070 - DNA, 201 bp, Bos taurus
tgctgtgattcatggggtcgcaaagagtcagacacaactaagtgactgaactgaactgaactgagtaccagacaacatgtgttctaatagattacagtgcrcctagaacaaggcctggtgtataatgtggattagccaaaaagttcattcgagtttttccataatatcttatgaaaaacgctatagaaaaacaaacgaggt

SEQ ID NO: 36071 - DNA, 201 bp, Bos taurus
tgtttctcctctataaaatgggaacaataacaaacccctacctcatagggtgactttgagaattaaataaattacttcatgtaaagtgattagcagagggmctgacacatagtaaaggctcagcaaatgctggtgatttgtattcctcatttcttatttatatcttatttgcctgtcctgttatagtagtggatacattat

SEQ ID NO: 36072 - DNA, 201 bp, Bos taurus
gccttttccttctccaggggatcttcccaacccagggattgaacctaggtattccacattgcagacggattcttaaccagctgagccacaatggaagccckagaaggccatacaaagccataaaaagttggtctgatttaatagtaaggcttaatttaatccaaggttttaagattgaaggagaggatcaggaacctatga

SEQ ID NO: 36073 - DNA, 201 bp, Bos taurus
gtctgaaggcccctggctaattgcctttctgcccatcatcctgcctgcttctcccttgtttttatatcaaggtgacaagctcaaatgccacagctctggtrggccatgaagatacacagacccatagtaaccaggtcctaaaaattttcaagagaagccagaactccaaaatctggtggaaacgtccctcatttttaaata

SEQ ID NO: 36074 - DNA, 201 bp, Bos taurus
taaacttttaaatctatttttgtacctaaacatgccaaaatttcttctttgttgtaatattcctgattttttttctttgtgtcacagcccacacttctttstatccacctaatgatacctccctggggggcatctgaaatattataataggtagaaaggccactcccttcatctgatatttgctgaaagctgagtcaagtt

SEQ ID NO: 36075 - DNA, 201 bp, Bos taurus
gacactggggcagctggccatgtttgcagtcaacacgcttcatagttaattacatatctttatccatccattcatttggcaaatatttactgagggcagtwataggccaggcactgttttaggctttgtggttacagcagtaactaaaacaaattccttgctctctgagacagacaaaaatgcatgtatatcaggaagtgc

SEQ ID NO: 36076 - DNA, 201 bp, Bos taurus
gaagggtcagtttgccatgatcaagatgtttagtgaagggagtttgggggagaatgtatacctgtatacctcaaaggctgagttcctttgctgtgcacgcraaattatcacaacattgttaatcagctacactccaacataaaataaaaatttaaagaaatgcttactgaagatgaggaggtataagcaggatgaaagaac

SEQ ID NO: 36077 - DNA, 201 bp, Bos taurus
caatctgctaaagggtagttcaacaaatctaggggccaaataatgaagatctgttcactaaatggacaagatgcctccatcagttgaaggtcatcagagasagtcttcaggtttatggcctgggtgatggggcaccattgacagaacaggaatagtctagaaggtaagggtcagttatccagaccagcaggggaaggcata

SEQ ID NO: 36078 - DNA, 201 bp, Bos taurus
tcctaagaggtagccctcgacttcatgattcaaggaagcatttccttccaggtggcaatattgaaagagagaaggaaaaatagagatggccagcaggtgcygggtcttaaggaaggtttgtggacaccagcactcagttcttccattgggtcccattggttagaaccttgccacatggccatatctgagtacaaagagccc

SEQ ID NO: 36079 - DNA, 201 bp, Bos taurus
gttagtttctctttgtccagtttaattaaattagctggtcctctgcttaactaatagcctccaagacattgtaatgacctgcatgtaattttggaaagagycctggagtcaaatgatctggattcttttcacttgttggtcttgtgaccttcaagaggactttaagtaactgagccttgattttcacatggacaaaatgaa

SEQ ID NO: 36080 - DNA, 201 bp, Bos taurus
tcagatgttaagagcggtggctggcctaggattttcataatcaaattacatagcactagtggaactctttctgggaatccaggccaatctctgaaggctayaattccaagtaacatggagaaattagagaaagacgttttcattagcatgaagctttagacttgtggccaaaaatttgaaaggaaacgcaaaatccaatca

SEQ ID NO: 36081 - DNA, 201 bp, Bos taurus
actgggccgaagtgcccagaaacactctccatagacgcgggactccaggggtcagccagcagccgccctcacagtgcggccgagtgacaccatctgtcccyggcatctgctcccactcagagcacacctgaggacaatggaaagaaggacacctgtctcagcctcagccggtgtcccgtggtctgcccctggagtggccag

SEQ ID NO: 36082 - DNA, 201 bp, Bos taurus
gaactgcatggagtgtgttgaggagaggttgtggaaatgctgtgattataaccactgccttcaaagtattttgctttgaaggggagcagagaaacaggagrggaattgaaaagtattctggggtcatttgaggtgttttgattttatttttcataggacagatcacagcatgtttggatgctggcaggaaaagtctagaag

SEQ ID NO: 36083 - DNA, 201 bp, Bos taurus
tctttgttaaataggaatctaatggagttatgggcatttactctttttatcatataggtgagggaaggaaaaaaatgctagtaaccttctactggtttgasaggacaatcttataagtattcatactgtatagaaatatggaaatgtccaacatgaaatctagagagcatcagattattaagtaagacaatttatcgaatt

SEQ ID NO: 36084 - DNA, 201 bp, Bos taurus
tagaggcagagatggggagggacagacagacgatgaaccatcacggccatgtcaaataccgtggctttccttcacatgcattcttgttttaggatttgggrttctgaggcgatcaccccattggccgtaactgtctttcttggcactggttattgtcagagtagaccaagcaagcccctggagctagaacctgaagagatc

SEQ ID NO: 36085 - DNA, 201 bp, Bos taurus
ccccagaccgcagtccgcatagcccgcagccgcgcatcttcagcaccttggcttgtgtgttaggctagcctttccaagccaaccttcccaggccgtctccyccagcttttgaaataaaccccccaaacgggtgcagtcaactcaagatcgccttccaccgcgcccgccgagacccccccttctgcggtcatccccaggccg

SEQ ID NO: 36086 - DNA, 201 bp, Bos taurus
agagctggagagaattgtacctgctttgctactaaccccaaaaccaagtggcatccatattaaaatttcatattttaaaaatctaatcatggaagtttgcrttctggcctgatttctttcccctttttggtctcacagcaaagtgacttggaatcctagccaaaatatttagttaaaaactggagatgattagagttcgtc

SEQ ID NO: 36087 - DNA, 201 bp, Bos taurus
ccagctgcaaccaagaaattggaaggcctcagagaatgaaaggtaaactttccgaaagcctcagtctctttttcaaccccgcaggaagcggtttacgtctrgggtattggatagcagtttgggcccagttaacacatctctcccaccacaaatcaccctgtcgcatactcagatgacattggccaaataaactcggggatc

SEQ ID NO: 36088 - DNA, 201 bp, Bos taurus
gcaggcaacagagcatgggacaaactgctttgggtctaaccaaccgttccctatcataatgccaaatctgatgaagggacttcagggaaacctcgggtttkgggcttctccccttcatgctggaatgattcaaaactgtgtatacaaactgattattctgaccaaatgacgtgatatgaacttccatgagaatgacagctc

SEQ ID NO: 36089 - DNA, 201 bp, Bos taurus
ctcaggggaatttggcaatggcatatatttaaaaaaagaccaaagagatattttctgtgttttttttttccctctaagattatgtctctctgcagattctmtaccctgaatagtattcattctactatttaaaaatcagtaaaaatttctgtgtcatgattctaaaaaactttttttacctttgttatcttttcctgtagg

SEQ ID NO: 36090 - DNA, 201 bp, Bos taurus
gggcatctggagcccggccttggcctcttttctctggttccgggagtattaacccagcttctgtggaaaactcccccagggtcgcgcgaggcggggaatgrtgtgtggaaggccctgcccctttgatctcttttcatcaacttctcagtgcgcagcggcggcgggctggaggtgagctcggagcaggccagagccgccctt

SEQ ID NO: 36091 - DNA, 201 bp, Bos taurus
ctgcatccgaaggtgaagtcttaaccactggaatgccagggaagtcctggcaaatccttttttaaacaaaatcggttattggagagttaagatccctctcmatgccatttggaggtagcctgacgggggaaacatggaatatctgagccggaatttctcgtggcgttcacaagcttcggtctaccagggaggcccccaagt

SEQ ID NO: 36092 - DNA, 201 bp, Bos taurus
ccttgctgtccaggagaccctccaaagtcttctccaacagcaaatgtgttcacacaaatctctcagccagggtggattccaacaacgaggcctatgggtarccttagcatcagtcttcttttgacctgcaaggaatttactagtcaagaaaggctccttgactttgagaatgacaaatacatagtctcttatctgggcacg

SEQ ID NO: 36093 - DNA, 201 bp, Bos taurus
ctttaccactgagccaccaggatgccccttttctttgtgcattcttaaacctttcccttttctacttcttttcattaaagcctttaaaagtcatttttttwaatctcattccaataaatatcaatgtaactccctcattattattaatatcctttaagaatgaggtggtctttttgtttctatttaatcacaagaatctat

SEQ ID NO: 36094 - DNA, 201 bp, Bos taurus
gggaagtccccccaaacagcaccttttaaattactaattgcctgcctctgttttgttatcttttgtttttttgttcactgggccgcgcttattgttgttgrctctttcttcttattgggtaaatgcagaggctggtttgatggtctatgtaatttctgggtcatagtgactcaaacttgtgtgaaatggatgagcttctcc

SEQ ID NO: 36095 - DNA, 201 bp, Bos taurus
gaaaaccctgtaagtttttttgtgacatgacacaaaaatgttttatttctcatgcatacaaagtctgttgtttgcgatgactttatgatttaggccacatycatggtgtggtgatgccatcataacatgtggattccaagtcgtcatgacaggggaagaaagagctaatggttcctcacagctcttacatatgttggccca

SEQ ID NO: 36096 - DNA, 201 bp, Bos taurus
ccagtgcccagtctgggtctccaggccaccctccactctggcacagctccctccaggggtacccaaacctccaaactgccacgcccagcacacatctgagrcaggctggggcctaggaccctctgctctagcactgcaatgcttaccccaggcacccctctcctctagcaacaaaatacaaagaaactgaatgggactaaa

SEQ ID NO: 36097 - DNA, 201 bp, Bos taurus
ataaaacctcaccttcttctaagacaattataatccgaagaaatcattccttctttggatttctttaagctcaaggaacagtctcgtgtggaaaggccccygaccccctaaatgttcttccctggatgctgagcattaaaaaagagaacacaagaacaagttcatggtagagtagtaatataatgataaatgtaacttcag

SEQ ID NO: 36098 - DNA, 201 bp, Bos taurus
catcagcaggcctgtgctggcgtgtcacacaagactggctcctacagccgaccctgtctctgcctcttaaaggcattgtttgcgctgctccacaaatgttrccattgattaaactgaatctggccaatgcaaaggctggagggctgattcaatgcctgggagtatttcataaatactgcatctgaaagtgatagtttttct

SEQ ID NO: 36099 - DNA, 201 bp, Bos taurus
ttctccatagatggattatatgtcatggcaattatgtgttgtagtatgccctgcagtctttacataatttttgttgagggagaaaagactgttttgctctmaactcttaaaaacttttttttaaattgtggtaaaaatacataggggcttccctggtagctcagctggtaaagaatctgcctgcagtgcaggagaccccag

SEQ ID NO: 36100 - DNA, 201 bp, Bos taurus
tctagggcaacagaaagttcttctcatgccccagccttagactcaacctctttcttctccaaggagctctggtgctttttagggggaaatggtagtaattygattctgggacagagtcacttccgttgtgacaaaagcagggcagaaagttcccagttttacaacttggccactgtttctcaaacctcagttatctaggac

SEQ ID NO: 36101 - DNA, 201 bp, Bos taurus
gatggggtcttaaataacataaatgtatttcttcgtggtttggaaagggaggctggatgtctaaaatcaagatgttttctgaggccaccctccttggctcragggtgacccccttctccctgtgttcacacctgctgttctcctgagtgatatctgtgtcctgaccacctcctgttacaaggacacagccttatcaggttg

SEQ ID NO: 36102 - DNA, 201 bp, Bos taurus
tccaggagttggtgatggacagggaggcctggcgtgctgccgtccatggggtcccaaaaagtcagacatgactgagtgactgaattgactgactgactgayaaggataatctttagtttgtcataactattgcaactattttgttcttatttgacattaaccttttaatttttaagaatattgatgtaaatgatcatctat

SEQ ID NO: 36103 - DNA, 201 bp, Bos taurus
taatcgttgagtgaatgagtgaatcttccttcactttgaatactgggaaatgaagcttagggaaagtaatcaagtcactttagaaatgaattgttttaatrtccaagtatgtgggtctctagtgatctggcttctcctaggaatgaacttcagagcatctagacaggaaccagagaaggcaatggcaccccactccagtac

SEQ ID NO: 36104 - DNA, 201 bp, Bos taurus
gattttgagaagggacgaatcagctgcatttccaattccaggcagggggcagatccattccttttacctgaaattggactttaatcagcctccttttatartttcctcaatggttaaaacagcgttgtagttgttgtaggtgttcacaggtcatattgtttacaaggacaaatctaccatataaatgctggctttgtgatt

SEQ ID NO: 36105 - DNA, 201 bp, Bos taurus
ctcagaggcgatcacgttcctcccagggctggaaagcagattggcaaaggccaaagatgagacaaaaggcatgagccctggaaatgatttaaaataacaayaacaacaacaaaattgattagggcctcccagttccaattctgtctccccttccggggatgattcctgggctatccagcaaatcccttaaggcctgggata

SEQ ID NO: 36106 - DNA, 201 bp, Bos taurus
ctccataaaaaacctgttagtgatgacttaccatccttttcacagactgaaaaatgaatgcatagagaggtgaagtggtgaaggaggcccaaggcgtctcytggagcccgagctcctgtagctgcttccgcttctgggagtctgtcccttccacttccgggagcgggcgcgctcggccggcatcttgttgagttgagctca

SEQ ID NO: 36107 - DNA, 201 bp, Bos taurus
ataggatataaaaaggcgtgtacctccagtctttgtaataggagcaaagattacaaaagcacatatcacgattattactgtgcacatatattcattcattyactttggaatggttttcgagcactgactatgtaacagatggtggtgcttaatgtagggaatacaaaggtgaaaagatattcctgcttgcacagaggattg

SEQ ID NO: 36108 - DNA, 201 bp, Bos taurus
ctataaccagaaggaattcaatatggtccagaatggcacaaggtctacaaccaggcagattctagctaaagatagcatttaaagaaattagacaatactgrggagccctgtccctgtgtctttggataagctctaacttctctgatcctcagttttattcatccattaaatgatggtagtatacagtcactcctccatatc

SEQ ID NO: 36109 - DNA, 201 bp, Bos taurus
ccatcaaagctgctcactttttttttcttaaatagagaataaccaggctgaagagttacaagtgatgctttccacagcgtagtatataaaaccttcatctyccagctgctagcatcaaccacatccaaatcatttaagtaaaaactgggtctgacttctgagtgatgcaaagcctgactcttggggaaatggcaaggtttg

SEQ ID NO: 36110 - DNA, 201 bp, Bos taurus
gggctcattgtgtagggccatcaagccctaaaagccaggggccggcactctgttctgtggacaacaagggcacatctcaggctttccagaagaagaacgaygagattagatctgtttatcaggccaagcgttcaagaagccatatgtggggtggatggcagctgggagtgacttgcctcgggaggccagttccagaaactg

SEQ ID NO: 36111 - DNA, 201 bp, Bos taurus
atgtatttttaagagttattccatttacctagagggtgtttcaatacgtttgtagtagttgtggtgagtatgagcctggaaaggtcatcaggccgacaaayagaactcctaaagcatgtggtcagtccgcttcttccccaatgcaagaaaacataaaaacaactgtaagggccaaagaaactcagcaagcagctggggaca

SEQ ID NO: 36112 - DNA, 201 bp, Bos taurus
aagttacgtgttaactaggactggattctaaagtctccagatctgtctcggtctccaggatgaaaccaacacttaccaagaatgaaacttaacacccttgyggcctagctaggtaagaaatcaggtttggaatgcaatatattttccaagactgaattttataattacattcattataaatacaaaaagaagataagaata

SEQ ID NO: 36113 - DNA, 201 bp, Bos taurus
gtctgttaagagtctggaaatgagataattcatcttccctggactgtcgctgctcgagactctcggaaggcctcttaggatgtgctgggaacaggaaggtyaccttgaacctcaaccagggacacgaagggaaatgagatgagctggtgagttcttaatgctctcatttaggtaatgggtcgattggttagaaaggggagg

SEQ ID NO: 36114 - DNA, 201 bp, Bos taurus
gaaggctgtctgttcaatgtcaaaccgcatgaggaaaagccacacaataaatggtgcaattagaacagcgagttagcgctaatggaattttagcactaacrgcattaacgtcacaggaacaaacgggacaagggccagtgagctctgcccggcgacctggagcgctggtccagcctcaacaatccatctcactaagggaac

SEQ ID NO: 36115 - DNA, 201 bp, Bos taurus
aggtgctgggcagacccggcctcactggtctagctggcccaggttaaccggagcgctgatggtcgggctgcatactctgcgtgaaattttatgaagacacratgtgatgaggccacaaagggagctatatcagtgtcctaaaattgaaaaagaaaagaagtaacaaattatataaaatttgaacattttcccagaaatgtc

SEQ ID NO: 36116 - DNA, 201 bp, Bos taurus
cagggtggctggagaggaggggaatttgaaataagaacatggataagagaaggaaggggcagcagataacgtacagccagttgggccatcgtgaagactayggatttccctccaagtgagataaaaggtcattagatgattttcaaggaaagcaacatggcctgatttaggtttaaactcatcacacgggctgctgtgttg

SEQ ID NO: 36117 - DNA, 201 bp, Bos taurus
attattgcttttggagtcatatttcagaaaatagttgaaaactttgttggctcaagtaagtttggttgctcagttttatgatttgaaaaatattaacttaygcatctgtttatttgcagtatttatgccctttcacagagataaatcatgaaatggcaccatttcaaatatgtaagcatcatgtagtaaaaaaattaacat

SEQ ID NO: 36118 - DNA, 201 bp, Bos taurus
ttcccccaagtatttgaagattttatactcatcagttgttcgagactgttcaaataagtttctaagagtagcttcccctaatttctttctgtaaaacatayccatcttcaccctgcgtccttgttccgttttgtttcttcactgtactcagctacctcccgttgattgatcgattgattctctcctgtgtagaatataaac

SEQ ID NO: 36119 - DNA, 201 bp, Bos taurus
catgaggccgtccccactcctgtctctcctctttcttcttccggtagccgtgcagctcctgggtaagtaggctaatgaggtctgagcttcctgacttgggrcctggggtctatgataccccctcctttgggggagagtattaagggattccttccacacctgcgtggaggaggaagccgggctacagcaccaccagctctg

SEQ ID NO: 36120 - DNA, 201 bp, Bos taurus
tctcccagtgatgtgagcacttagcatcaggatgccccctagatccaaggacactcactggacatggatggctgctgacccctaggagttggccaccctgyaggagttctttgggtttggcaatccaaggtggtgatcatttgagagcttaatgcttttttattttgatagatagtttttgttttcagaacttttctgaat

SEQ ID NO: 36121 - DNA, 201 bp, Bos taurus
caggatcttaagacttccctggtctccctcagtgggaaagcccagagcccaaggcagcaggggtggatgtgggttgggtgggacagtcaactggccctacrgggatatattacagaggaaaacatagctaagaaggcagttgctttacttagaaggcagttgctttacttgaagaaagagaggacagaagttatcgagaag

SEQ ID NO: 36122 - DNA, 201 bp, Bos taurus
ttaatgatgaagcaaatcagaccaccacttaagtaccttaaagataattgagtaatcattgatacgtctcacctgttagccatgtgtttgattttggatgrctctgggcctgggaatgaatggcacaccctgcaaattttcctgctctggggaaaactatcatctccctgatccttccaggtcaggatcacagggagagcc

SEQ ID NO: 36123 - DNA, 201 bp, Bos taurus
ggctgatgttggcccataaatcattcttactgtgaatttgggtaaagttagacacatatacagcacctggtttaacatcagactctttagaaatttttttkgggggggttcattagggcctgtgctttgtaactgctgctgctaagtcgcttcagtcgtgtccgactctgtgcgaccccatagacggcagcccaccaggct

SEQ ID NO: 36124 - DNA, 201 bp, Bos taurus
gagcacagttgagcacacataagcattcaggccttatttacagatgtatatacagagattccattgctttcaaatcccacagtttgatagaaaattgcacycaccatctgaagctgttcaagcacacagtgcagacacagtgacaagaacacatttttgagtgtggccttgatactgatccattggtaaagcaagacttga

SEQ ID NO: 36125 - DNA, 201 bp, Bos taurus
atcttagtatttatcaataagcatactatagcagaagaaaaatgtttttcatattaccttagtttgtaaatgccttagacagtgggagaatcctatccagytggaaatatctcctacctggccttttcagaagaatgaatcaacaggaatgtgttcattcaccttcaacccgaagatgaatttttattttaaaaaacatta

SEQ ID NO: 36126 - DNA, 201 bp, Bos taurus
aaaccccaagcatggttggccagacctccaggggctcaagaattccaagacccactctctatcttatctgtagtgccactcagcttactggtaacaactgrtacactggcaagcagacacatcatcagggcagtgtccaggcaggtcagaagcaaggtcagaggcctgctctgctttcttgtctctgagcagtgaagatgg

SEQ ID NO: 36127 - DNA, 201 bp, Bos taurus
ctcatcaaataacagatttttcacatgttgtactgaggctagatgcgtatttactctgaccgtggtgaatgacggagggtgagacaagttatgtaacagtrtttcaaacctcctttctgcttcttgtttacctaaagcggacagaatctgaaaagaagaaaagaacaagttactgtttcaatttcataatacacattaaaa

SEQ ID NO: 36128 - DNA, 201 bp, Bos taurus
cacagccacctttgggactgttagaagtaggatccagccatcacaggccaacacttagatttagtagggttctcaccagacaaaatagtctcagacacttktctttctttaaactgttcttactggcccagtatacaatgttattaaaatcaagtttatgaagtagccaggtaggtattttttgtttttaattaggcgtta

SEQ ID NO: 36129 - DNA, 201 bp, Bos taurus
cccagcgcatttaacaatctctttctgtttttactagtgggcttctagtttgctttgtgtgggatggggtcacaggtcacagccagtcttttatcacttayaacaataaagatggtcttctttcttaaactttaaatgcaggaagcttagattgttttctagtctgaaaacaaaatctttttaaaaatcttccctgtttcc

SEQ ID NO: 36130 - DNA, 201 bp, Bos taurus
atctgccagaaaagacactcattaagtaacaatcactcaacagtatgagtgaccaccatagtaacacttaatttctgtgctgggccttggaaatacaacaragactaaaacagacatacttggttttgtggagtttattgtagtgggtttgttctgggccctaagtaaggacttttccagaaaggttctaagtgatgcata

SEQ ID NO: 36131 - DNA, 201 bp, Bos taurus
agttgtgagtcacagtgatttttgttggccgcggttcctgcaggtttggtggcacaggagtgactccatcagtgtgtttgtgtggttcccagaaaccagcrtccgtaggcctcccgcttccctgctcaggacctgccttgttatgtctgtcagggaggaggcggagatgacagacctgtgatatgtgaaaggggtttcagg

SEQ ID NO: 36132 - DNA, 201 bp, Bos taurus
cctggcctctgaagttccagggttggattgtatgtttccaggtattagtgggcgatatgagaggaagaagagggggcggcacaggaaaagggggtccctaygttaagcaagtggccaaagctgtccacggtggtgtgtggcagtaagggcattgatttgttcctggctctgacagctgggcggccttgcacaagtccccta

SEQ ID NO: 36133 - DNA, 201 bp, Bos taurus
ggggccagagggagggacttggggctgtggagacacatccagaggccaggccagagctggagcagcaggggtggtggggaaggcaggggtcgatggcccgyagaccacccattgggtgctgaacatggagggggcagcagagtcagggaaagaaggtgagttccacgttgttgaaccgtggttctgaggaggcagcaggac

SEQ ID NO: 36134 - DNA, 201 bp, Bos taurus
ctggcccctgtggtcaccacatgcttgtgtcaccaggaagattgcctgtccagctccttcctctccctctgctccccatgtccttctgccaggtcatcaarccactggcccctcggagtctggatttcacagaaatgtacgtgcatacggctcaggactggaagggacctctggaagtagttggtacatctgtcgtgcact

SEQ ID NO: 36135 - DNA, 201 bp, Bos taurus
aactgtctctgagccagtgatccatctgaagtgtaaacttaaggttttcttgagtcttttctgagccttttcctgagcatgtgaaattactttctaatttyctccatatattagttgttttaaatgttctaatgtctagctcccagagtctttattggtatggagatgtggaggaaaaggaggttagagttaagggtggga

SEQ ID NO: 36136 - DNA, 201 bp, Bos taurus
actgaatttttctttgctgagggatcttgaaagacagaaagaaggcagttgtgataggtaaagggttggtactaaggttatgaagttcaatatgctgctgyagatgccagggatctcaggattcagatagtctacatcacaggtaaggatgtgcaaacattcattcacaacctgcaaaaatcactcagtcatcgacacgga

SEQ ID NO: 36137 - DNA, 201 bp, Bos taurus
catccctggtggtccagtggttaagacttcatgctcccaatgcaggggacatgggtttgatccctggtcagggaactaagatcccacaaggcctgtctggrtaactagatttctctgaaggaggcaggtacttgtatttccagcccattttatatttagggccagagcccgggggccactgttttaataggcgtacatgaa

SEQ ID NO: 36138 - DNA, 201 bp, Bos taurus
gcccagattccctcctatttacctccctccccatcccccggccagtccaccctctttttcagttgtaaaaaaacacccacagatgcagctgtattgaggtragatgctcacctcagggcccatgagtgttgggaaaaggtgggttagaggccagtggaatgacatgaatatgagagaagagaggatttgcttttgcccaag

SEQ ID NO: 36139 - DNA, 201 bp, Bos taurus
ctgcacctgagcatgacccctctctcctgccttctagtttcatctactgtccaagcggggctcttgcacctcaggacctggcacaggagactggtcccagytcctctgatactggccatgctcacccctcggacctccctgccctcagggagcttgagggaggtgctgcctccaggaccactccttggtgctggcccatgt

SEQ ID NO: 36140 - DNA, 201 bp, Bos taurus
agcttacaggataaaaccagttctgaaagcaaatgagcagccatcatgcctgagtgctaattgctcttctcccattagtggctgtggaattttctgcaccrctactttttatggaatccaacaagtttttaattctttcacttgcaggcttctttttcttcttggaaagagacatattatttgctacagaaggtagcagca

SEQ ID NO: 36141 - DNA, 201 bp, Bos taurus
caacacataaacttaaaactcctgctgttccagcccctgcaggtctgttaaccaggctgattttgttcaaactggccagaagaataaagcaaaaggcagtracttcagaagcagagcctccactggaggaccagggatcccagttactcattcatcaaggcatcgctcggcctccatgagcaacttgtgagcatcaaaatc

SEQ ID NO: 36142 - DNA, 201 bp, Bos taurus
tgtggaaaaacctgaaggaatgttttggccgaccctatataaaggcccaaaaggctaaacagacatgttggaaatcccgtctctgggtgtccctggggagyggtgacaggtaggggccagcagggggtttcagggatgctggtgaagttctgtttcctgatctacatggtggttacatgggtgtgttcggttgaaaattta

SEQ ID NO: 36143 - DNA, 201 bp, Bos taurus
tatgtgtttaattccatatgggaataccagaacatgctgaaatagaaatgccaagtactctgtaggactgagcaaagacataattcgattttggcctcatytatgtttctctggactatattgtgatgggaatatggaagcattttgctccttttgttttttaatcttgacaatgagaagtaagagtttctttagggcctt

SEQ ID NO: 36144 - DNA, 201 bp, Bos taurus
cattagcattgatgagtgaggccagaatggacagggaacaggtcaacttgttcatcagtgggttttatgacctcttttgccctgagtggaactcagctttstaggtaacattctgggctggcccatgaccttggtctcacatgggtgtcatgtgacctgcaaggcaagtaccaccattcccagaatatcctctgggatgtt

SEQ ID NO: 36145 - DNA, 201 bp, Bos taurus
gtccatggaggcctgctgccctcctgcagtgggcactggtgtgggcacaggtggaaacagacagcctcggaaacaaagagtagtcatggtgcatctttgcrggggaagataccaggccacctgggcccccaagatccagtgacagcatctgctaccatgagaagatgatgcccagggtccgctcttacctgatttacaggc

SEQ ID NO: 36146 - DNA, 201 bp, Bos taurus
cttttcaggacttttcaaacttaggatagaactagccaccacttacactttgcattcccaccaatatgtgattcctcatattctttcaatgatcctttttsaaatgttgtcaatttgcttggtaaaaagcaagaaaaaatgtaataggtttataatacttttcatgcaaataatacatagaaacaaacacaaacaataaag

SEQ ID NO: 36147 - DNA, 201 bp, Bos taurus
tagtatttcagtttcattccatcaatttttcatcataaaggtaacataattcaacttcccacctactccttgtcccaaaaaatgaactagcaagtggtatrggggctacaagataatgaacaaaagctggaagcaggaagagcaatttagatggtccagtggccctggaaattaattagcagtcagaatcagggtggttat

SEQ ID NO: 36148 - DNA, 201 bp, Bos taurus
acctcaaattgcaattctctgctgatctcaaataaacttctctttgcaggagaaatatttggctgtttctgatcaatattaggaacacaggcacccatcartgtttctaccctccgagttactaagttttcagaccatatccaagaatcagcttgacctttattgttaaattctctttgtaaaaagtacatatatgggatt

SEQ ID NO: 36149 - DNA, 201 bp, Bos taurus
gagcagatgctcttgtgtcttcctttttgctgtttcgtggctgctgctcctcggacaccacttctgcttgtctcttgtctaggcagcttggccagcgcgtycctgccctctaccatcccttctcgaccatgtggcggtgcagatgtgatcatcctttgtggaagtggccatccatgctttggccctcccattctaaccctg

SEQ ID NO: 36150 - DNA, 201 bp, Bos taurus
gctttgcggaaaagaatttccacaaagacggaaagtagtgaagcaactgaagtatttattaacaggaaaaaaagagtacagtatgaagtgtggacagaaaygagtggcctgagagacagtcgctgagctgcaccctcgtggcagtctgaattacttttatggagttttcttctgggtttccattgactaatcattttgatt

SEQ ID NO: 36151 - DNA, 201 bp, Bos taurus
ggaaatatttggccaggggaggggagtttacttttaaacatgatggggtgacatcagcaacatggctgaaagacaggtgcctcatcatttttctcgccacyaacaacactttggcctccatccatggacatactcaaaggaggaaaaaccctgccaaccaagggtactctatccagaaaagtctttcaggaatgaaggata

SEQ ID NO: 36152 - DNA, 201 bp, Bos taurus
ttccaggactatatagttcatggggtcccaaagagtcagacatgactgagtgactttcacttgttaccttttgaagatcagtatgtcttgcccccaaaatraaaacatatggccagaagaatttaggaaacatgatatacagagatgttcaatacacataagtagattcaccagattgattttggtaactctgaaccattc

SEQ ID NO: 36153 - DNA, 201 bp, Bos taurus
gtaaaatataaggaagtgagagaaaggaagagttgacagtctctagataagaaaaccttgtgttaaaatcaaacagatggactatcagtgataagggatgragtaagatagggtgtttttgtttttgttttttttaatcttagcagaaatgaacctctgagcagtaaagaactcaggaaatgagagtagctctgctccctt

SEQ ID NO: 36154 - DNA, 201 bp, Bos taurus
ttttatgccgctatgtgcacacccactgttgcttctttggggtagccgccagaaacagaactaatgggtcagagctgtattttggccctggactgagagtraggcttcatcctacaggaagtggacgtgggtcctttgtgtttcagaaagtgtgacagagccttcctctcaccctcggagtcacccgaaggaagttcgctg

SEQ ID NO: 36155 - DNA, 201 bp, Bos taurus
acctagtgtgtgccaaggccagtgctgggagagcacccactgtgtgccagccccatgccagggagccctggtggtttgctgggtcctgcactagacgagtrtcccatgtatgccaaattctgggccaggtgaggacccaggatatggtcagcactgagcacggtgagcatgcactgtgcacctggcactgtgccaggggag

SEQ ID NO: 36156 - DNA, 201 bp, Bos taurus
ccagagagaggacagaagtgtccctgggggaacacctgggtgtttctcttttatctcaatctaaaccccccaaacacactcacacattgcatgatgatggraaggtcaatcataaactgtgaaacacacataaaaaaatggtaaggtagaaattgctgataatctaaatatgccacttctttgttgaacaggagttctctt

SEQ ID NO: 36157 - DNA, 201 bp, Bos taurus
tgccttcatgacccagctccacggggccctctcacccaccctggcccctcatcccatttttctgcaccctgtcccctcggccctgacccctcctccctccyggcaaactccaggtcctgctctgtctctggggaaccatcccagaatttccaacaccatgatcccaacacagtcaccacacctaaggccactcagcagtca

SEQ ID NO: 36158 - DNA, 201 bp, Bos taurus
agaagcctttctgcggtcatctgcaactcaacagcctgacgatgctggtctgaagaagccttggggaccctcgggacagcacattgcacctgtgttcaccrcacagaggcagcccttacagtgacccagatggagacacctccatccgtgagtgtgtaaccagaatagagcccagccacctcaggaacagacagagttgag

SEQ ID NO: 36159 - DNA, 201 bp, Bos taurus
ttaaaaccatggcagtcctttaattttgcagccatgtacacagccatgtgtctaacaaagctggaaactatcagaaattacaaagtggctttatctcaacmtacacactctacgctcaacagcagaagaccaagtctgcaagtttggtgctctatcctcagagctgcccatgcgggcctggcaggagtatgagcccgggcc

SEQ ID NO: 36160 - DNA, 201 bp, Bos taurus
gtggctccacttagctggagcttggtccgccagagcctgtttacatgtggccaccagcccttcagtgtcccacctgggtaccacagcagctggactcgagraggaagccaccagctcccttatggcctgtgctcagaggtcccagagtgttattgcttctgccatgttcggaacggtcaggcctatgtcaggcctgccagg

SEQ ID NO: 36161 - DNA, 201 bp, Bos taurus
gtgcccaagaccacctccaaggagcccgggccggaagctctggactcaggtattggtgggtagggttgctgtgccccacggggtctgtccatggtgctgcyaccccttgcaggccagcggctccctctgacctttgagcccaggccctcacagaggccagacggtctttctcagaagctctggtgtctctttggctgcagt

SEQ ID NO: 36162 - DNA, 201 bp, Bos taurus
tggaatcgttcctgctaactgatccccaagtagacaactcagaccaagccagcagagggacctagaaaacagcagatgtgcctcaaaaaagtcaggcaatmtataattatgaatttttaagatcaaaagtgattctaaataactagaagtaatattgtccccctgtgtagcacagttgattaaggacatttttctcggaca

SEQ ID NO: 36163 - DNA, 201 bp, Bos taurus
ttttgtcttacagttgtgtggaaaacagaatctggaagggatgaatgtggatattattaataccttcatacctttgtcttctctttcttttggcctgtacyctcatcctgtacctgtgttgtcaattcctgcttatttttcaaagcgagctcaaataccaccctttgagaagccttgtgttgctccccagaagtggcccct

SEQ ID NO: 36164 - DNA, 201 bp, Bos taurus
ggccattttaagagctccagacatattctgaatctcacggaaatcaccgagtgaatgaagcagcacagaactgggtttcctggaagctgtgagcaccaggyggcccgggagctgctgatgcgttgacagaagaagaatggccgcaaggaagacctggagtgtcaatcagggtagttctttgttaactgtctggagtgtggg

SEQ ID NO: 36165 - DNA, 201 bp, Bos taurus
gttggtctcatgtaggcagaacgatgcccctggcatcctgcctgcatcacttatcctcacatctttcgtacaacttccagcacctgtgtctaattatctarggccatttactgggcaccagagtccatcttgggagaaggcaatggcaccccactccagtactcttgcctggaaaatcccatggatggaggagcctggtag

SEQ ID NO: 36166 - DNA, 201 bp, Bos taurus
catcgctttgaaatggcgacttttctggatcctccagggctggtcagacgcgtcctgcatggggaacagagttgccttgttctgttccagtgatgcttgcrtttctcctctgctcccacggtgactcctccctgacctgccatgtttacagaaaagaggcaaaagggaaaatgggtcttcagggctgatcagccctgccag

SEQ ID NO: 36167 - DNA, 201 bp, Bos taurus
ctgagcacagggattgagtaagtagactttggatggatgttatcaggaaccaggagcctgcaggttcccaggtttaccctggttctttccctgccttgccrttggcccgtccctgtgcgtcaactcagggtgaagagtcgggcgtgagctttaatctagttccttcccactttgatgtgttgcagcgtggcaagatggggt

SEQ ID NO: 36168 - DNA, 201 bp, Bos taurus
cgcacgggtcccgacagccacgggtcacccatcacgggaccaaggctccaaagcaggctgcctctgaggacagacactctgggccgtcactccagccgccstgtgtcccatctggaaggagtcagctgggtgagcgcacagaacagcccctgcagaggcccacgtggatgctccaggaattaattacctccagcccgtggt

SEQ ID NO: 36169 - DNA, 201 bp, Bos taurus
aaatgcaaaagtcccgtcttccttggggcaagaggaagttggctgtggctctgtcttctccgctggggaaacttcccacagacagggaacagatgggcctrgatttagataccatctgcttttcagttgtaattaacatcggatccaggggttggttggattttaccattgtgttggccttccccgttgaccgctggggag

SEQ ID NO: 36170 - DNA, 201 bp, Bos taurus
gaatacagtcccctgtgctttacagtaggacttcattatttatccatcctgtgtataatagtttgcatctgctaatcccaatctcccaaaaggcccttttyctgaactaacctaacaactccttctcttgtcaataggcaagacatagacctctctcaaaagagtcaaggcctcaagaaatctattttgggtctcatatcc

SEQ ID NO: 36171 - DNA, 201 bp, Bos taurus
ctgtctcagcccactctatgagcttcactgaaagtcccggatcctctgccctcagctgcaacaagtttcaactcttggccagttttgaacttactgcatcmccacccaattccccttcctcctttatcattttgtagcaggtacatagcacttcacccaggaccacaggtgtgtctttaggtagcagggccccagcatcac

SEQ ID NO: 36172 - DNA, 201 bp, Bos taurus
catttgaaccaaaataatgaacaaatcaagagtccacataaaaaaagacccaagtatctggcatttcttgagagatggtatctggccaaccagaaccccamgactaccctggcaatgactggatggagctgagtcaaggttgaacactgtggctggggtccgggccatccagctcatcacagcatcttggacaatgaggac

SEQ ID NO: 36173 - DNA, 201 bp, Bos taurus
cgttactgggttctcactgcctgggacacaatctcctgcccagatcacctggggaccaggtcctggacagccagggaccacccccatggcccacagcccaytgacaggattcaaattatctgaccctaaatctgctctgcctgctcatgaccttgcctggccctttccttcccacagaagccacctccattcctctctctc

SEQ ID NO: 36174 - DNA, 201 bp, Bos taurus
gcgagcacgctgtcctccgagccccgggatgctccgtgacagcgacctccaatcaggctggcgtgttttccgcgcgattggagtcagtgcgcccgctcagrgcacgtgcctcgctcgccaggccaccagtgctcctgggaaatgtagttctccaggaggccagcccctgagaccgcctctccagatgggtgcagcatctgc

SEQ ID NO: 36175 - DNA, 201 bp, Bos taurus
agctgctgagcacccacctggcttctgcagacccgttacttcccccccataactggtccccagcgaatgcactcagagctctcagtgcatcagcccacgarggcctgggaaagcttcatctcaggcctgttacccacagcgactcagccgagccctgacataagcatgtgagtgcaaatagctcattcgggagatgacact

SEQ ID NO: 36176 - DNA, 201 bp, Bos taurus
ctaaacttctcgaagacagtgggtccttctcttctctgtacactcctccttgctttggtcaacgaagtgtcttctgggatgatccatggccccaagtcacstagtgggttttttgcctttacatagtacatacaattgagcatgatttgaccttgaacctttgatcctgttccagcatttctacagctctcagtgtggcca

SEQ ID NO: 36177 - DNA, 201 bp, Bos taurus
attgaaattcccttctgctcttcccatgactggactcactgggggatggaatggaaaggacattgccattgaagctttcctccccagagtggacaggccaygacgtccccagagctgcccaggtactagtgtctgcttactctgtgctggagagctcatcaaattgaaaggcgggggatccacctctgcctagtctgactc

SEQ ID NO: 36178 - DNA, 201 bp, Bos taurus
ttcagttttacttaggacaaatatgtgatccactgaaaggtgatgtttttcaacttcccagatgggcatggccatatgacttggtttgggccaatgagttraaagtaaaagtgttgtgtgaggtctcttcaagagcagatgcacctctttctctgttccttactttgtcagtgggcctagaacatggatgtgatggatggc

SEQ ID NO: 36179 - DNA, 201 bp, Bos taurus
gagtggcaaatggtcaggaaccttgaatggcttctaggagtcacattgggttcctggccagagacatcagtcctacaaccactaggaactaaattattccrgtgaacatagaagaagaccatgagacttgaatgagaatttcagttccaggttcacatttgacttcagtctggtgagtcctcaagcagagggacccagcca

SEQ ID NO: 36180 - DNA, 201 bp, Bos taurus
aaggaaggcttcattcgaccagggcctgtcattccagtttcctctaaaaaacaaaaagcaagaaaacctccctcttgaacactctgagacttatgacaaawggtacctgggaaaaaatagaggccctaacagtgcaggagcagctgcaaccatgggtctttgcccgggtggacacggagccaagctggtgagtcattgtca

SEQ ID NO: 36181 - DNA, 201 bp, Bos taurus
atcccgtagtcacaaaccaacaaaggtaagggccgccaccctgatcctcaaaaccgtagaagtgatcagccctcctttccatggtgcccctcgcatgtcgyggcccgtccggaggcccctcctgtctttggcccgcttccctctgagccatcaggaggacagtggggcatcgagcgcctcgccccagctgggctcgcagct

SEQ ID NO: 36182 - DNA, 201 bp, Bos taurus
aatgagattctaaagctctcactggccctgaaatacctggaggggccaggtcagcctggcatgacctcagtggttcccttggtcatggggatggtcttcarcaatggcgatggggcccctcaagcagcacccagttcccatctctgcatttgtccagcttgcagacacataaattctaagggtcaccaaacttcaccctgg

SEQ ID NO: 36183 - DNA, 201 bp, Bos taurus
tctcctagatggggaggaggaggaagaggccacacagacatctaccatttttggctacaaagcatttctccctgttcctaaggtcacttcctgtgccattygggaaatactccttccccatctaggagaacataagatccctgcctttccctagaagtgtgacctctggggtcctctgctgttacttacctcttcttcccc

SEQ ID NO: 36184 - DNA, 201 bp, Bos taurus
tctgtgtccattgtatatacaaggccgattaatcattacaggtttctgtgctaatcacccaccacagttgggctgaccaccagggctggccaggaatgacrgatttctccccaagacttggcaggaaccaagctgcaccgttttcattctgacgccgctaagagatagctcccctgttccaggccttatcaatttttattt

SEQ ID NO: 36185 - DNA, 201 bp, Bos taurus
gatacagctgccacttactgagtttataaataggcgagtctctaaaacctctttagcatcacgttcctcgtgatgacgttagaaattgtggcactcttgcrggggaggaaatggcaatccactccagtactattgcctggaaaatctcatgcaggctacagtccacaggatcacaagagtctaacacgactaagtgactaa

SEQ ID NO: 36186 - DNA, 201 bp, Bos taurus
ggcccatgggagccccagggttgggagaggcatgattagaaaagaccatgatcctccccaccccacaagtcatctctccccgcaaccagaaaaacacacaygcataaaactaaactgaggatgtttttcatttgctttaatgtgggtcaggggtggcctattttggtataacagcaaggggcatgatagtcccaaaactta

SEQ ID NO: 36187 - DNA, 201 bp, Bos taurus
aggaagcaggctagggaagtcagactggaaagttgaggctttaagaagtcttgagaggatggtggggaaagtaacagaggccatgaacaggggagctgctrggtgatgctctaaggtcccagaagaggaagcagcccagagaaagcagggagaatgggccccagccttcctctcatcaattccaactattgtaatcaattc

SEQ ID NO: 36188 - DNA, 201 bp, Bos taurus
aagcagggtaacaccctgccagtcctggaaccggctgcgtggggctgcagttcccaattttctctttgaagtcagtcctcaggggccacctgagaccatcyggatcgctttagcctcctggagaagccttgcgggcagcacttagagccagtcacgtggtgaaggcttcctggccacaagtccagcagcccaaggagcaca

SEQ ID NO: 36189 - DNA, 201 bp, Bos taurus
tctctgagtctgcttcatggacactcaggatgggcaggggaatcagacagatccgtggggcaagtattgagtatttgttccataaaacagctgctgctacrtatgctgctgtcagcaatgacacttctatttataccgatatccaagtctcactggccagaagattttatgaaggtccatggccctcaaaacttcaagctc

SEQ ID NO: 36190 - DNA, 201 bp, Bos taurus
gtgaagtggtttatttgagaggccatccaggaagcacctggtggtcagaggggatttagagggggcagggaagtggccagtgcaggggagtcactgagcaygttgactgttgagggcatctggactccgtgtcccttgagcctcaaggagatggtgcaacacctgtgcaggattgggccgcctgcaggaggggagctgagt

SEQ ID NO: 36191 - DNA, 201 bp, Bos taurus
cactaataataaatcaactataattcaataaaaaatgtatagaaaaaattttcaccctaagattccttgtaatagctgtaattagaaaattttcaattctyaggcattgactaaatatgagaatgagttttgagttttaggaagacaccagctctgagactgtctgtgccaggggcaggaaggggacaggctggcaggatc

SEQ ID NO: 36192 - DNA, 201 bp, Bos taurus
taatttcccagccctcagctccactcctaatccccttctccacctgcatccagagctgttttccccaaacaaaatctgctcatttttcttccatggcccgrtgtagccatcacctccacaagtcatcccaagggcaaaggaagggcaaacactttggggttcccagagaccttctcctcgtggcctcatatccttaaccag

SEQ ID NO: 36193 - DNA, 201 bp, Bos taurus
cagcagcacgctttgtgccgagaatctagattttgccattcccctcgatttccttgagaaaagtccccagcagccctggcagtcttgccaactgcctttgygaacaataacccaccatccctgcccagggaacagccggtgcacagagcacacacccatctgtacatggccgggcagcagatacaacaaccacaatcatta

SEQ ID NO: 36194 - DNA, 201 bp, Bos taurus
gataaatctagggcacacgccaccccctccaccccagcagcccccaccactgacaggtggagaaaagttagacaagtcaccttggattccacctctttccrttgaggccctaacaacctgcatcgtggagctgttaaccccagcaggggtcatccctgcaagagccattccaaaccttaaggtgttgtgcaaacgagctgg

SEQ ID NO: 36195 - DNA, 201 bp, Bos taurus
tcaggctgtagcacagacactcatggagtgctcagttctctttacatccaaccccatttaaacccccacaacgatcccccaaggcaggccctcccgtcagygctactctgtggtgaggcaagcggactcagaggctgagtaactggcacatgccggcacccggcagagtgggggccacccaggggccctgtgcaccaccca

SEQ ID NO: 36196 - DNA, 201 bp, Bos taurus
tgggcaggacaaccccactgttaggccagcccatggctactcctctgtctacgcttccttctgcggaaaagggaaggagcccagggaatggtgtcactggrtgtgtggaggcctgcgacagtgtcttctctcccctagcctggtgctgacgggaggggtcaagcccagggtccagatgaaggactggacaggacaggtctt

SEQ ID NO: 36197 - DNA, 201 bp, Bos taurus
atgctgtctcccctccatccccaggcctccgggcagccgccccccgacaggggcacaggggcccctaaggtttgggccatgctccaagggccgcagccatycaggtgtggctgaaggactggatcctctactgttctgtctgtcctcccccagacagcctgggggtgtcatgagtccacccaagactgccccctgctgtcc

SEQ ID NO: 36198 - DNA, 201 bp, Bos taurus
ccgtcccctccgctctgccaagggctggaacacagcctccctggaggagcagaaagtccagaagcagacctgacaacgcctggtgactttcttgtgtgccygagggccacaagtgggcaaaggaagaaaaccacacccacctgccagccattgacaatcttctggttgaaaatcccaaactcatagcggatcccgtagccg

SEQ ID NO: 36199 - DNA, 201 bp, Bos taurus
ttactattaggggagaaaatattgggcctaaagtgttgaaagacactgtagttagaaagtagaaactagcactaaggataggggctggattgggagtgacrggtggtggggaagcagcagctcctgcttgagtggacggagtccttgctgtgagcctgggttggaaatcagtcttgtcagtgatgtgcatctgatgtaaat

SEQ ID NO: 36200 - DNA, 201 bp, Bos taurus
tttcgtacactcctcccaaacacagaaaccagagagtgaagtttaatcacgtaggattttacatgtgtcaagcgttcactataaacatttcttgggcttamtgcttccaaaggcctggaggagacttctacaaagggacaaactgggagaagggagccagaccttctgcctatgagtcaccatgcagaacacatgtgggta

SEQ ID NO: 36201 - DNA, 201 bp, Bos taurus
agaaagagggcttctgtcacatttaagggccagcaagttggctgatgtgggtggagtttagtgagggagggaaaaaggagctgaagataaggtcagaaagkcagagggcctagggggtctgtgtcctgtaggcttttgaaatatcttcaggcttagagaaacagacaatgatatttcaggtttcaagcagggtagttacat

SEQ ID NO: 36202 - DNA, 201 bp, Bos taurus
gatggacagggaggcctggcatgctgcgattcatggggtcgcaaagagtcaaacacgactgagcgactgatctgatctgctcctggaacaggctgaggggyagccgaacactgcccaggcctcagccagtttactgggcagcccgtgtgccccctggcccacagatgccccctcattgcctctggatccagttcactcccc

SEQ ID NO: 36203 - DNA, 201 bp, Bos taurus
ctctctcctggcccattgttgttggacctggggtgaaccctgagattggtgggtagtgtctgaggacaatctattttccagtggccccattgtttataggkggggcagggtttggtgggtggctggggatttgggcaagacttagcccagtgtctcgtttggttatatctaaagtaggggcctggagggttaggtcccata

SEQ ID NO: 36204 - DNA, 201 bp, Bos taurus
gaagcccactcaccttggagcatcaccactggtgaagggtgggggccacggggaccactccatttttgaacgcacctggtgatgcacccacagctgcacaygggagccaagctcagctcaggccctcgctctgggggcaccacctcaccagaccagacttccggggatcttctgtcccctcacccaccgcctgcctgactg

SEQ ID NO: 36205 - DNA, 201 bp, Bos taurus
tcgcattcctcctgggcacagaaccccttctctccgagtgcaggtggagagaacgaacagcaactgtatacgagtattcgggcctgcgcttgacgacatckgcgagcgtgagagaccgtgaagaggagtaaccgccagggcgcgactcctcgccgcgaccaggaggacggtgagggcttaccgctccgggttcctccggtt

SEQ ID NO: 36206 - DNA, 201 bp, Bos taurus
ctccactctagctgacctcacctggaggtgcacagcccagacctgcctctggtctgcttctgacacacccaacatatctcatgtggtggtgagagtcccaragagagtgaggtcaaaggccaatggctaaaatcctgagggcactgcagctatgactggagtgacaacagatgagccagtatagaccactggagcctggat

SEQ ID NO: 36207 - DNA, 201 bp, Bos taurus
gcaaatcaggtcacacgttacttcttcagagagctcacttttttgaatactacctatagccaccatcactccattattttctgtaacatagggtcagtacmttggggccctcaggctaaatagcgcttactgcctattttcctaaataaaattgtattggaatgcagccacatttattttttaagattgcctgtggctgtt

SEQ ID NO: 36208 - DNA, 201 bp, Bos taurus
ctgtccatgggattctccaggcaagaatattggagtgggtcaccatgcattcctccaggggatcatcctgaccctaggatcaaacccacaaagaggccaarttcaacaaaaccgggtggtctggatcttgtactagaacaagaaccccaaatacaccaaggtagtttgggcacccactgttacaggaactggcccctaatt

SEQ ID NO: 36209 - DNA, 201 bp, Bos taurus
acagcttcctacaaatagaatgtcctaattcagtatgtcagttggatcattcgatgaggtgaataaatcatttgtaatcagaataaaagaaataatgtatrcaaagaaaagccaaaaatgcaaattaaggaaaacatgcattttgctggctttctttgataatctacttgcatgtgttaaaaaaaaaaaaatagcacacca

SEQ ID NO: 36210 - DNA, 201 bp, Bos taurus
gtgccacctcctgggcctttggggaagcgctacacctggctgtccggatgctggctggagcagggatgggtgctgggccatcagggagcccctgaggggcrcttagtgctggcaggttaacatcttgatgcgaagttgcatcacaggggaaacaccccaggcctctggaaacatccctccacagctggcaggtgtgtgggg

SEQ ID NO: 36211 - DNA, 201 bp, Bos taurus
tgccagggaagtccccagaacaatatatatttaatctcataagacctgcaaaatcttacccaagtcacccacataatcaggtggattgtttgtatgtaatygaatttctcttttggtgactcccacaggtgtgtggagcacaggggtcttgacccatgttgggcttcaggtgactcacactctcaaaacctgatgaagcat

SEQ ID NO: 36212 - DNA, 201 bp, Bos taurus
ccgcagcaaacttggttggtatgtacttcacagagccacagatctcagcatgctacagccctctctcctccaagctgcagtttaagataggagatgcgatrtaatccgtgttttatactgaggccataccgtagcatcacgtcatataatactgcaataatgtcaaagaacccacatgcatactggaacaaagccaaggta

SEQ ID NO: 36213 - DNA, 201 bp, Bos taurus
ccggggccagcagagagcaggagaggactgggggaggagctggttcaaagaagcccgggtgaggaactgaaggcttcccttgacttttggtttcccagccygctggccccaagggttccaccttgcccctggggctccgaacgaggacaacagatgggctcgggctcaaggtgaaggtgcagggaacaccatccatccgtc

SEQ ID NO: 36214 - DNA, 201 bp, Bos taurus
tggtttgtcttgacctttgtttctgcccttggccgtgagaacactgcttgctggaagaaaggtgctttccctgggtctggactgagagggtctggcacagmggggcagcctgggagggccacagagacaccgtccacatgagcccagaggctgggggtgtgcagagcccgtagtacctggggcgtctctggacttggacag

SEQ ID NO: 36215 - DNA, 201 bp, Bos taurus
gagtgaaaatgcaatgagaccttgactggtgagaagctccccttagagaaggatgatttatggtgagaaaacacaaacacaggctgggtcaaaaaatgtcraaaaagattaaaagttaaggcatgtatgctcacaatggagaaggcaatggcaccccactccagtactcttgcctggaaaatcccatggacggaggagcct

SEQ ID NO: 36216 - DNA, 201 bp, Bos taurus
tggacaagagtttgcgccgatttcaagagatagtgaaggacaggaaagcctggcgtggtgcaatccatggggctgcagagaggtagatacaactgagaaaytgaacaacaacattttaatatactagttatgaacatttgttgcaaaaaatgccagataagcaaagaaaaaagtcacctatagtcaggacatctggagata

SEQ ID NO: 36217 - DNA, 201 bp, Bos taurus
tctaattcatcacatttacctgcttgaaatatgacactgatctcaggtttttaatcagggtcatggaatggcataagtagggatgggtttttacaaagatrtttgttttctaggccctaacacaagatgtagaatgcaaatttaaaatcttgataataaaacaaaatactaacttgatctagatttgctgaaaatttgatg

SEQ ID NO: 36218 - DNA, 201 bp, Bos taurus
gttgaacctgatacctccccaaatcatggcttgataaatcaataaactgattactgaactcataagttcccttatgtgagaagaagcttgaggaagtgagmctattaaacctggtttggttttagtataaatatggattggacttagtataaattggatttagaaatatccaaaataatggtatctgaactgcatcattat

SEQ ID NO: 36219 - DNA, 201 bp, Bos taurus
gaggtcatggaactggtcccctccttgcactcttaaattctgccaaagtaacagaaatcaagacgatttatagagtctgctttgtgatgaccgagaaactytggcctctccctagaaggtcatccaaaaaaacacaggattcttcttaaaagtccacgtcatgtggttgacttataggcacagatctaaaggatgaacatg

SEQ ID NO: 36220 - DNA, 201 bp, Bos taurus
tacatatataaaaattaaatgactaaaatgcaaacttctgtaggtcgagcatttttatcccctctgcaatgtcaaaacatattagctgctcagttaaaatycactgagaacgttgatttcatttttgaaataaagttgcttaaagcaataatcagaatatagtaagagggaagcttttctaaggagactgggtgcagatgg

SEQ ID NO: 36221 - DNA, 201 bp, Bos taurus
gagtatgagatgaaacttggcagcttggcttattacaactggagtgattataacctgcacactggagaggagagaagggccttcctgggttggggatcatyagagggagagcctatagcttgggagtaggacttgtacagtgttgatccaggtggtcactggtgagcccatctctaagcataaagggtcagtgttgagaac

SEQ ID NO: 36222 - DNA, 201 bp, Bos taurus
gcacccttggctgaaccaccagtcatcagcattgagggctttataataaaatgcccaagtgagaaagacactggaggggtagcaaggcgccagggcccccragggctcgaggagagctggacccacctgtgtcctgctgcctgacctgtcgatgcgtgctgtcacctgcgctgggccacagatgcccagacaggtaaagca

SEQ ID NO: 36223 - DNA, 201 bp, Bos taurus
ctgctcctgtctgaagtgtttgcctgctgatggacacaggtcactctcccaagccccttccttccccacaggccatcaaaatcatttttccacctgcactmggatgaactccaagttcctgtcttcatgtgtctcttgctactaatgattttccctttgtgccagtgagtcatcatccctcaaagttcaagtctcttacag

SEQ ID NO: 36224 - DNA, 201 bp, Bos taurus
tattgccagttctcatcataggagctgtggctggggggagccacccaaaatgggaaattcacacaatgaaaaaattccaaatcattctagacaatacttcrgatggccagttgggcctgattcaattgggcagttgggcctgattcagaaaagttacatataacttttggttacatataaaactcacaaaacaggtcttta

SEQ ID NO: 36225 - DNA, 201 bp, Bos taurus
ccaggggagtcgtgggcaccagagaagctgttactggaatggccatctcgaccatcactatccgagctctgtgccaagttcagagcttttccatggtgctrggaaagggtgacaaaggccttccatctttcataccttctttcagattcgttataggcattcagtaattcaagatatagaataattgaatcgttgcacacg

SEQ ID NO: 36226 - DNA, 201 bp, Bos taurus
ccacgggcccccacttctgccccacagacgggacgctcactgttgacatctgggcccctgccgaggaagatttccctgaggccttcatgccatgaacctartccacacgagaggcagcttctgagctgagccagccttccatatcaagccagctcaggggccagatgcacatgaagacacctgcagatgactccagagctg

SEQ ID NO: 36227 - DNA, 201 bp, Bos taurus
aagaggccagcagctcctcccccgtggtggggggacacagcaatgccacagctgtccccgtcatccgccaccacacagaaaccgcatgtcaaacacacacrtgtgctccatgcagacagcctggcccagctcactcaaccatcccccacaccaccctccttccctgggcgcggtgactccagacaagagccagggcccaag

SEQ ID NO: 36228 - DNA, 201 bp, Bos taurus
atttctgtctgtccaagactgacctgtgaaatgtggacaaaaacaccaccgtcggcccctgcacaccatggcagctgtggaattacaggccttcgggacaraggctccatcaaccaagccggacattgcagcagccgggcagccatgataatagcgggaatgtagctcccccgcagagaccctggggccccctgcttcctt

SEQ ID NO: 36229 - DNA, 201 bp, Bos taurus
gagttcggccccaggcgtgcaggacttggaaggcgtgcgggtgagccctgtgcacagcggtggcagccctctgccaaagcaggttctctcccagtcagccrgagacgctcctgaggcctctggtgggcgagcgtcagggctgaaagaaccagagcggacgggtggagaagaggaggaggcactgcgtctgcaggaaggctg

SEQ ID NO: 36230 - DNA, 201 bp, Bos taurus
ttctgacagtctggtgaggcgcacgtcgcactgggcgtcagtgtgctgtggaaccacagcctcaggcgcatcctaggttatgggtgctgagagtcgaaccrgctagcgggaagagtgtgaatgagaggtgcagtcaagagctcttcagggtgaaggagcatgccctttatgtgtgaatcagcatgccctgtccgaggagtt

SEQ ID NO: 36231 - DNA, 201 bp, Bos taurus
gcacccacacctgtggtcctgcctggccaggctgaggccatctgcttcgtgctgagttggttaagatttcaaagaccatccgtaagttcagacttgggtcrggggaggcggtaaggccaccatcatccaactagattagcctccatgtagaccaggctcatcctgtgtgaggaggacaagtggaaagctggacgtgtggct

SEQ ID NO: 36232 - DNA, 201 bp, Bos taurus
ttaagaaggccaagaaaccttttttcttacctcttgggaaacctatattcccttagaaagagaggagaataagaacaaatgcttccagggagttccctagyggcctcatggttaggattccaggctttcactgccatggcccgggttccatccctggctggggaacagatcttgcaagccacagacagacaaacccagtgc

SEQ ID NO: 36233 - DNA, 201 bp, Bos taurus
attgaaaaatgcatttctcaaggagaaaaaaactgtgaaaccaggtacaaaatttattattagagacaaaatacaacaaatgggagagcacacagagaaamagtttgctaatttcagacagaagcagggcagaaatatacatgggagagtgagcctgtgggcagctccctaaggaggaggagcccagtaaagagatggtta

SEQ ID NO: 36234 - DNA, 201 bp, Bos taurus
gacctggtcattggctgttaggccctacatgacctggtcactttctatgtggcttcctgtattccctttgttgtctaatgtcagaaactataactatctarttcacactaggttctctataaattatttgctgaacaaaatatttcttcttttgaaaataagagaaacatagagtttacttcgttagcttctccacatttg

SEQ ID NO: 36235 - DNA, 201 bp, Bos taurus
agagaactataaaggatattctgcattttgcaggttacatttgcaggtaacacagccagctattgcatcaagaatggatattcatgcaacctttgacttaygggtagaggacattttcacaaggaatgagcataatacgaaaggcttctgagactaaaaaattccaacatatgggagaggtgcccttggtggcagccttcc

SEQ ID NO: 36236 - DNA, 201 bp, Bos taurus
tgaccaagtcattggtttgaagatgccagaatgtgtagccagtatggagtcactgatgtgaaaaggaccacttgggcctttggtcggccatgcaaccagaygcctacaagactttccttgtagagaagaggcactcccctgctcaggagagagggatgttctgcagcctccccaccttttagggccctggggcatccaggt

SEQ ID NO: 36237 - DNA, 201 bp, Bos taurus
tttgaggccctcttccatccccttgagacccactggattgctgcagctcccaggcatcaggctgacctgttcagaggagaaagcacagttgctgcccataytcatggccttactcgagtctctcatcccaaatgggcacctcgcaggctgacttcaattttagtccctaaaacactgagtttggacacaagtttaaaacaa

SEQ ID NO: 36238 - DNA, 201 bp, Bos taurus
agtctctagttcatagtattatgaactagtattatctattaagcagtcttgataggaggttgctcaagaggttaaagggactacagcatgaaaaggatttyggacagactagttgggcaagaattagaaaggaagaagcatgcaggttatgcacagagcacattgcccacatcagaaaactatacagtatggaggctcatg

SEQ ID NO: 36239 - DNA, 201 bp, Bos taurus
atgctcaaatatatctcttgcttcctctttaaaattatttttgttgaccctgtgccaggaagcactcactttgttttggccttttatatatatcacacagkatcttcctgttttccttgcaaggtcagtgtttgctacaaccaagtagggccctttggatgaaggatctgactaaaatttctatactctacaaaagctgta

SEQ ID NO: 36240 - DNA, 201 bp, Bos taurus
gccccacataccagtcctcagacactatccttgggactcctccaggacgctgcagccagccactgagaccctgtctcatgaaccacttggctgataccaaygcctggacacccagggccctatagccagagatcccaggaccccgctccactcaccagtggaccagaactaacccttgaactagtatcacccattagtggg

SEQ ID NO: 36241 - DNA, 201 bp, Bos taurus
cgctgggaaagcagacctagtgtgttaaagaccagaacaagaagcaaagcgcaccagcacacctgccttccctggggaaacccagtggcccacttccggcrgtcctttatagaaaattcagtcaagacagacagacacaggcagacagagagacagagagggaaatagaccgaatgcttcctctggaagaacagagagtga

SEQ ID NO: 36242 - DNA, 201 bp, Bos taurus
ctgaagtacaaagtgcagctgattatgtagctttgtcttctttcaaatgcttgctttcacaaagctccttctggcatggtttgggtatcatcttgcttgaygcagtaggttggaggttatgacctcttaaaactcatatctctcaatgccattttctgattactccaaataagtacgaagtttgtgactttttaaagaact

SEQ ID NO: 36243 - DNA, 201 bp, Bos taurus
ggaggaaaaggggatgacagaggatgagatggttggatggcatcactgcttagtcttacatttctgactctttagaaagaaatcagtcggaaaaggaaatkttattttaaagccaatttcccccattgaattccacatttgtgggaaaaagcattttttgagccatagtttaggattaaattgtatgtcttttatccacct

SEQ ID NO: 36244 - DNA, 201 bp, Bos taurus
tctcctgaaaacagctcttgtttctgaagtccttttactgggaaatgctgttgaacaatttgcacaggacaagtaggagagctggagaaaagacaacaccraacctctgcattcagttcagtacatttaatggatacctcgatcagtcttctattgacatgaggttcttccctgggccatagtttcatattcctatcttga

SEQ ID NO: 36245 - DNA, 201 bp, Bos taurus
ttggcctccaagttcatgcataaagagaccatagagcacagttagcaaaccaatatttataacattttaaaacactttgaataaatacaactcactgatcyggttgtaatagctgttacactgcttggagaaaggcaatggggaagggatatgtgaatatccttccccataggctaggagaggttggatttctccctgact

SEQ ID NO: 36246 - DNA, 201 bp, Bos taurus
tttgggtggactccgggtgttggtgatggacagggaggcctcgtgtgatgcagttcatggggttgcaaagagtctgacatgtctgagcaactgaaatgaamtgaactgaactgcacatttttacctttaaggcattcactgctacatccaagagattctacatcagtaaaaaggcagtgatttagagaagaactgtgtttg

SEQ ID NO: 36247 - DNA, 201 bp, Bos taurus
agatctatgggatggctatcaggcatattaacatgtatgttgggagtctctgtaaaagaggagagagaaaagggcagaaaaaagtttttgaagaaataacrgccaaatagtttccaaatattttattaaaagctagtccacagatccaacaaactcaatcatttccaaggagagccacacctagagacatcatggtcaaac

SEQ ID NO: 36248 - DNA, 201 bp, Bos taurus
tttatatatttagaacttacctttaaggaaaacctgaatgaactgtttggccaacccagtatattttatgtataaataatggagttcctactcaatttctmaatttttattcttcccagaacatttctgagcattttcctacctgtttttctctgtcccagtcatgacgtttcctttataatgtatgcattgattttatac

SEQ ID NO: 36249 - DNA, 201 bp, Bos taurus
atgatttctaaagatgtccaatgattcatatataagagaaggtaagaggcacataaactagattagagtagccatggactaggctgaggatagagaccctrtggatgtacagccatcctcttcccctcagacccttggtcagctcctaatgctttgagtctctgcagcttggagtttgccctcatcaactgtatgagaacc

SEQ ID NO: 36250 - DNA, 201 bp, Bos taurus
ttctttgaagggttctagtgagtaactgaatggtaaaggggagagtttaagagaactcctcaatttgtagacatctggacataagtgcatgtagcctgacrttagaagtgaggatagtctatgagcctaaagcccttaactcgtgggctctgcattgactgtaggtagagtcataattgaattgctggacaccagatggaa

SEQ ID NO: 36251 - DNA, 201 bp, Bos taurus
aaggaaaaatgagatgagctatctgtctttcactgccatttctgagctaatatgagggcttattggaaaacttgaaacaaccaatagagaccatgaaaatrttagtatcagaaatacatagaataaaaattttgttaagaccagctatgaatttaaaatggatttggaaatttctcttacaaggacccacttgtactcttc

SEQ ID NO: 36252 - DNA, 201 bp, Bos taurus
aaatcaattttctaatctagaatgatctccaatgccaggtatgattctgattttccctggtaatacaaccgatagtagtgatttttaaatgtcttcagttyaactgtgggcaataaggttgtatcatctcctccacaaaaagagactgctcttgggaactgtcacatctttgcctgaagttctctcactcagtgctggaat

SEQ ID NO: 36253 - DNA, 201 bp, Bos taurus
gttgcagtgattctccttaaggagtgaggggtccaaggcccacactaggctccccagcctagggatcctgcatcaggaagaagagcctacagaacattttkctttgaaggtcaatggggccagagagctataggaaacagagtgctgtgcttagttgtttgatcgtgtctgactctttgcgaccctagaccctgactgatt

SEQ ID NO: 36254 - DNA, 201 bp, Bos taurus
ttttgtcagctcctcagtacagcagattttgtttcttcctgcctcccggtgttaataagaaggtggtccagcaggttctctccgcctccttgccttttttyccccgtaattctgtggcaaagggtgttactgcatatttccctggcatgcgcccttgctttgatctgaattttcctgtgctctgttgtctggttgtgcagc

SEQ ID NO: 36255 - DNA, 201 bp, Bos taurus
tttagaccaagcatcagcacatgtggcttaccaacccagaaatcacttctgtggctatacagtcaggggctccctgctccagagacacatacctaccagcrtcaagggccttggctatacttcgatgaagcccctcgcagttccctgagctagtacaagcctggaaaatctgcatctcaggccaggtgcacaccatccctc

SEQ ID NO: 36256 - DNA, 201 bp, Bos taurus
ggtatcgattttctacctcacatctaggggaaaaaatgaagattattttctattgttatctacattcaatagtgaatctacattcactttaaaatcaagcrggtccttttatataaactatacttttttgagtcagtacaattacattcttcactgttgcccaaatcagatggactaacaagagtctgcattcattttcaa

SEQ ID NO: 36257 - DNA, 201 bp, Bos taurus
attccctcggaagcagctgaatcctgccaaaccctgagttctttgcatttgtttttttctctgcctataatgctcttctcttactctcttcctaggaaacmctttggaggcagagtggttaggaatatgggccttgtagaaagagttagaatcaaaacttagttctaatagtgctagtatttgcttagtgggaaatgcatg

SEQ ID NO: 36258 - DNA, 201 bp, Bos taurus
tcaatgaggaaaaagataataaaatggaggatagagaatggaaaatggtgatatcaaaagtgaaggttatgtaatagtgtgtgtttatgtgtcacggagtrtgacacagagtgacaagcaaccagacatttaccaactgccacctccttagtaggaaaaacaaggaacaaagtgagtgggtggagtttctctgtggaaact

SEQ ID NO: 36259 - DNA, 201 bp, Bos taurus
tgaacatatatgcagaaatcctcaacaaaatactagccatctgtatcctataatacattaaaaagatcatacaccatgatcaagtgggattcatcccacaratgcaaggatgtttcagcatcaaaaaatcagtgtgatatgccatatcaacaaattgaagaataaaagccatatgatcatctcaatagatgcaggaaaagg

SEQ ID NO: 36260 - DNA, 201 bp, Bos taurus
tgttacactggataaagtatttttcagaacaaggaaaattatcagaaacaaaaaggaataatacataatgactaaaaggccaaaatagacataaaattctmaatgtgtatgctccagaaaacagcttcaaaatacaagaagcaaaaattggcctaattgaaaacagagaaagacaaatcaataaccccctctcagtaactg

SEQ ID NO: 36261 - DNA, 201 bp, Bos taurus
tgatgtgagaatagttgaatcaccctttgggcacctgggggcaccttggcccattcttggtataaacagctgtgttggaggagtgtgatctgctagatagrgagctagattttgaatgctggccttaagctagactctctgagcctggttttgttgagaataaaatcggagctataataacagctcacaaatggctaccag

SEQ ID NO: 36262 - DNA, 201 bp, Bos taurus
ctggcccttaagtgttggcatctctgagctctgtagaacagaggtggggacatcatgctgcctgggctaaatctactctggggattgaaaggagaccctcrgtctgagttcttgtgggatcttctatcctttggactccttgcagggcctccctgtgacaacccaactgcctggagtggtgtcaacctaggcttttgggag

SEQ ID NO: 36263 - DNA, 201 bp, Bos taurus
tctttctgcttaacctggaggttggctgcctaagtgaggtggtaggtcagccattcccaggcctggccgctctgcatccatggccccatggaatgtggtcrctgttggctcctgcagatgatccacaagagagcagagcatagagaggtaacagcaaagtgagctggaccctgatcagcagctgggtgtgtggcatgggtc

SEQ ID NO: 36264 - DNA, 201 bp, Bos taurus
gactgggcaggattgtcaggaagcagattccaggcaattcaaggcctggaacaaaaatcagggggaaggagcaggttggggctttgggggcaggtatgcgyttgggatgacgtgaggagcatctacctcggatggtctcggacaagttggcagtcccacggagaggagggcccccctgcagggtgacgtgggccacctcgc

SEQ ID NO: 36265 - DNA, 201 bp, Bos taurus
cacccaccacctccatccaggtaagcatcacccgttcaaatgaaccccagctgttgggaccgcctgctctgacattctgcgtctccatgtggcctaaggtyctcaggctccagctgctcaagaaggtcctctggactacactgtgaggaccagggagtcctttgcatggccctctgcactgaggcccaggccctgtgacac

SEQ ID NO: 36266 - DNA, 201 bp, Bos taurus
tcgtgacagagtgacaacagaggcaagaatccccagccacaagtggggttccctttccacatgtgcctcccatgagaggcccgcaccctgggctgatctgygaggctctggtgaaattccccgtcatggtgacatatgtaaacagtggttaaccctggcaggcctccatgggaattggagggaaggggcaacctgagattt

SEQ ID NO: 36267 - DNA, 201 bp, Bos taurus
ctcactctttatttttcggccgaggcatgcaggaacgtggctccccgaccaaggaccgaaacctcacccccggcagggaaggtgtggagccctaaccagargaccaccaggaaatgccctcttaatctttatgtaactgaatatatcaaatctttgtaaatgtatcaatctattttcccccatttttgttcaataaatcct

SEQ ID NO: 36268 - DNA, 201 bp, Bos taurus
ctctccccaaccccgcaaagcaaacttgtggaccggcttcccaccagcagaagcgacagagctcttgggtcgatgcctggctggggccgtgattctgcttyggcatcgtggggggtctccctgcctggtctcttctgttctctccctgcccctgcaattgtttctggggccccaggcaccctgccaatcaggacatctggg

SEQ ID NO: 36269 - DNA, 201 bp, Bos taurus
agcatgaggaggggaagtggggccggctgctggctgtgtgtagggggctggcagcctctcgctaggctgcgtccaccaggcagcacccgtataccctgttktggccatgtggaggtgtggaccatgtggagatgggtctgttgatgccgcgcgtgtggactcgtgtgtttcagggctgatgtgggaggtaccggctgatct

SEQ ID NO: 36270 - DNA, 201 bp, Bos taurus
agctccaccacctcctgcaggtgaggttgctcccatgtcatggagacccacctgtctgtcttctgaccctgggtggcctttgggccagccggtgggcagcyggtcccactcctgtccttggcactgctctcccaagcaggaaatggatcccggcagctgcggtcctacagggcaggaaggcggcctcggggagggcttttc

SEQ ID NO: 36271 - DNA, 201 bp, Bos taurus
tttgggccccgccaggcctggccctggttctcatctatgacatggcgtgacagctcacaggaatcgccccccgctcaccaggcagctgtgagccttaaagragttaaaacacagaagctcctggcccagtcaggtgtgtgggagaccctcagggaatctagtgacagtggtgccgatgacagtgtcaaaagcagccggagc

SEQ ID NO: 36272 - DNA, 201 bp, Bos taurus
ggccacgaagacgcagtggtccctgagtgtccatgcagggcacgagtgtgtatcatcaatgctggcatctgagactctgctctgaactcaggggtgttctkgtcctcctgtagagggccttggtggcacttgaacttgggctcctgtaaggagccctgctggacccctggggctccctgcagggactgctgcatgggaggg

SEQ ID NO: 36273 - DNA, 201 bp, Bos taurus
atgccctggcaggcgtcactcaccaatcccagggcccttgccctaaatcctgaccctctgctgtccagagccccgggcagctcctggtggcagtaacactygtcctctcagcctgggtcacccttgatggagggtggacgaagcagagtcctgagctgcgggctgcgggaggagcatggagaccgtggggctgggcctcac

SEQ ID NO: 36274 - DNA, 201 bp, Bos taurus
cctgcagcaaactagaagctttacaactcttgcccacagatggtttgagaagcacgtcgagaagatatgacgtgtgttcagttaacagggatacgttcctkccctgcaccacccgcgtggccagggctgggcgcccagtcagcccccaatgcgaacacgcacccatgttgccattctccatgccgcggatgtcagggcgta

SEQ ID NO: 36275 - DNA, 201 bp, Bos taurus
gggccaccagctggggggcactcatagggtgtctgagaagggcactgacagcacagaagcctggtttcccagacgatccttactggagggtccctggtgtkgcaaggaaacagctggagtgatggagcaggggggcccggggggactcaggccaggcgagggagagggtcaccaagcaggggtggggcaaggatctgtgcg

SEQ ID NO: 36276 - DNA, 201 bp, Bos taurus
aatgaaattttccctgagtagtccgtttttttctttcagctctgttttttctaaagttaatttctgtcaccttcttgaataggccaagcaaatccagataygtataactaaatttaatagaatgacagacgaacagggaaagcgattctaagaattttagctactttacatttccctatctcctgaggcctagtttagtgc

SEQ ID NO: 36277 - DNA, 201 bp, Bos taurus
gtctccatggtgagtggagggtgtgccccaaagcccagaggacccatcacttctacctgcagctgacggctgacaatgaccaaagaaaggatccatcctaygggctaccagtgtggcctgagaacttacacgagggtaaatcagagaatgactcttacggaccattcagagctgtggagagcaacctggtccatttcagac

SEQ ID NO: 36278 - DNA, 201 bp, Bos taurus
gcggaattgtacacaaaacttctctaaactttcgggatgaacagaagctgtgatttctgaaatgatcagactgtaggggcatgcggcccctgggactcacrgggactatgcacagtgtgtaaggaccagcccagacaccactctcgtcaaccggctccgggatcgagttaccagtaacgagctacaatccaacggccattt

SEQ ID NO: 36279 - DNA, 201 bp, Bos taurus
agatccgtgacagatggatgccttgcctgtgtttatccacccaaggcggcctcccttatgcagcaagcagagggatgctggttggtggccactgctggagrttccagccatgggtaacacatccatatgttcatggacactgtctcctcaatgccccactggcttcaaggcctcgggatcagaacaagtgtccttcctcac

SEQ ID NO: 36280 - DNA, 201 bp, Bos taurus
tgctgactaggaagaaagaggaaggcccctgctattacttcttttgttttcactgatatcatctctctcccttaacacacgttgatattcagggtggaccrgggggcccccatgggggcttttgaactttatctcctgtaatcctcacgaatggaggaggtggtctttcccacctgtcacagatggggcaagcctgtccag

SEQ ID NO: 36281 - DNA, 201 bp, Bos taurus
taagtccacgaaagaaagtaaaagtttacaatagttcatgaatcatgaaatgcttcagatgccgggagcaaacagcacagcgactcaggctgttcagtgakccctttgtctcctaacaggtggcgggtgcctgctgggacaagacttgggtttcttgaccctctggcagggacatccacgtgcacattttgaatcagttcc

SEQ ID NO: 36282 - DNA, 201 bp, Bos taurus
ctggcagcggacaacagcccagcaggtcagctggggtggtctatcaccctggagggtgcctggcctcagctgggggggctggccggtggacacaccagcaktctggggatggttttgctgattaaagtgatggcatttgtgagtggtcccccaaatctgcaccatctactcgctgtgagggcccaagagatggcagagatt

SEQ ID NO: 36283 - DNA, 201 bp, Bos taurus
aaaccactttcctaggggacctgatccagtttattgccaaatcatctatatgctaatgaccctgatcttagagttctggccagtccctctccctgatgatycagactcccatccagcatgtgcaatgagatgcaactcacacttaaaatgttccaactggacttttggcccatcactctaaattcagccagtcatctccat

SEQ ID NO: 36284 - DNA, 201 bp, Bos taurus
tgaccgtgaaggatcttcactaaccagcctccaccctgaatgatggcttccattccagacaaataaccatagagctcggctctttcccagacagcctcccrctgcaacgcgacaccggcacattaaagcccatgatgcatggcacccagcctgcttatagcttctttatggcctcgtcagctgtaactggacgattacaaa

SEQ ID NO: 36285 - DNA, 201 bp, Bos taurus
gcaagctcccttgcttgttaaccccaccacttacttatccggagcagtggcctccattttccctcgatcagggtcctcctgagtggagccagcctccaacytcccgtgagagtacctgggaacaccagccaacaagatctgcccactcctgagatggaccaaacattctacaagatggtggagcagaaggacgtgtgctca

SEQ ID NO: 36286 - DNA, 201 bp, Bos taurus
ctatgctgtcttttacttgaaacgtctggctcacttggtctaaaccgtggcctccgatgccagaaggctgggctgtgtcatgtgctgggtggggtgctggrtgagtagatgcaccagtgagttggccctatgaagaaggcccaggcaggtggttttggaaaggcctgcacccttcactgggaaagcctgtggcttttgcat

SEQ ID NO: 36287 - DNA, 201 bp, Bos taurus
ccatactgttttgtatgtgtaatcccacccaggtgcccgctttctcccagctctttaaaccattctgctttgaccttgtcattatcagtagttgtgccctraatctcacttcagatgttgatcgtcccaccctgctttctagagtagtcccaggctgtttactccactactgtctgctatgcttgttaaccctcttgtcct

SEQ ID NO: 36288 - DNA, 201 bp, Bos taurus
gccctgcttttataaccagtccttctccacaaggaagactggccccgggtgggagggactcagcagtatctagggacatgtcagttgtcacaggggatgtygtgtgtccaagccagggaggccgccaagcatcggatgctccaatggcccccacagcaagagacttcagtcccaaacattgatggtggtgggtgcaacaca

SEQ ID NO: 36289 - DNA, 201 bp, Bos taurus
caggagccttgaggcatcgcagctaaactgatggccctcaccatctgaatcactggggggactcttggggtcggtggttgtctccaggccccgggttatcmaagtgagtttccaggtgtggaagggagggtgtttcatgctcaggtgtggtcagtcaggagagatggttaccagctgggtctcgcaccaggctggccctgc

SEQ ID NO: 36290 - DNA, 201 bp, Bos taurus
acaaagtgtgtgaacaagcccacgacaatggggatttgattgaaacccaagccccgtgttctagaagtttccatggcctgtgagggatgccacgccctccyccacttcatcccacaccgatggaaaggtgaaggtttattactgtcattttcatttaatagaggccatcgtagcccctaaaggttaattaattttcacaag

SEQ ID NO: 36291 - DNA, 201 bp, Bos taurus
tgaacagtcacgtccaacctgagcgccgatggccttgaccaccctgcctcccccgtggatgggggtggggatgtgctgggctgctgcatttggaggccagrgcttcatacaaccaggctccctttcagcttccttccttctgtctgaggtccagcccgcatccggtcagcatgaaatacaccacagatgacctcgtccccg

SEQ ID NO: 36292 - DNA, 201 bp, Bos taurus
gtgcagtaactgtcacctacacagtgtaaccaagccccaggccgctgcatgttaacaagcggaggtgggcttttcagcttcctgacatcacaaggtcaccrggcagacactcacacatggccagttggaggggtggttgtcccatccagtcttaaccgacttagcttgaactagacacagctgactccaagttcttggaac

SEQ ID NO: 36293 - DNA, 201 bp, Bos taurus
agagatgggccagggatcattaaactggctggctttctctccctcctccacagtcatggttagactgaacgtgaaatgaacatctagtccaccctccatcrtgggagcctagtagggccagatcaggatcgtgcttcaagttccccaaagtaagcgtcccctcactttggggaggcttccaccagacaactaagcacacag

SEQ ID NO: 36294 - DNA, 201 bp, Bos taurus
gaggaagcaaaatccagtcttctcagcctcagctgtccagatgtccttgaaagggactctgcagccgggggcccccgagtcccagcagtgggaccatttgytcactgcagttctcggcgccctggtggccccatctcttaacaatcagttctctcaggatggacaacgttttcaaggtatcctagcagagtggtccggatt

SEQ ID NO: 36295 - DNA, 201 bp, Bos taurus
gccttgtaatacatagccccccccccaacaaggttaaaatacagaacaaaaatgggatgttaaatcacttaatttgacataaattagtttttcttaaacasttttaaaaaaacaatctcatgcatttgcaacagagttaagattggtttgggggagagtgcaaaaaaaccttagctattccaggagcccacagtagagagg

SEQ ID NO: 36296 - DNA, 201 bp, Bos taurus
atgggactccctagtggtctggcagttaagactcagtgctccactgcagagggcccgggtttgacccgggtcaggggactaggtcccgcgtgctgcaactragacccggctcaaacaaataaatgaacaaaacaaaactacagcgaggtatccctgcacactggtcagagtgcccattattaaaaagtacaaataaaaaat

SEQ ID NO: 36297 - DNA, 201 bp, Bos taurus
gacttaggtgcacctctcagagggctggttgagaaaaatcacgcaggggagacccatggagccattcagatgtgtgtggccacgaaatgatctctaagacrctctataaagtagcgctcaggacagggaggggagtgtgtgctgctgcttgtaagaaaacacaagggctctgcacacacaggagcacacagagggcctctc

SEQ ID NO: 36298 - DNA, 201 bp, Bos taurus
gggaccccagagccctggagcacagagatgctgttctctctttagcgaggaaataacagtaggataggagtggatttcattcttcaaggaacagagaccaygtgtgtgattggcagagctccctcgggaagacaggttctcatttagccagtctgagtgacaccttgaacaccatggctatcgatgggtatttgtgaggag

SEQ ID NO: 36299 - DNA, 201 bp, Bos taurus
agctcccattgctgaaggcacctcctaaactctttaaaatttatttatctaattaaaaacctctcagcagcccaacacactggaagatttcatttttaacyaacacacagtcaacccaacctgtctgggcagggcagtcccatcccaggagcatcacccccaccgggccttgggaggccagggtgaccagaacagccatcc

SEQ ID NO: 36300 - DNA, 201 bp, Bos taurus
actgtcctccagtgctcacacaggcgggggacactcggaaggcctggcggctcctctggccaccagactgtccggcccaggtcatttctgagcagcccacrcacccctccctgaacagagatactgatggatgtctactttgacctctgttcctccgtctgccctggatccctctctgagggctcccgacggcccaggctg

SEQ ID NO: 36301 - DNA, 201 bp, Bos taurus
gggccaagtcaattcaaggcaacttgagttataaactagttctcaggagtcaatctgcctgtgaagcctggaagaccccatagataaagggcagtgatcgyggcattgagtgacaacaggcctcttccacacaaaatgaggctctcctttccaggaggataaaccaccatagatgctgatcagagataggctcagaggtcc

SEQ ID NO: 36302 - DNA, 201 bp, Bos taurus
gctagatggctgtttgaattaggtggcttatggtttacagccaaaaacatcttctgtaagacaagattccaacctacacagaaccccaagtcaggagaccmaggtcgattctgggcccagcttctccggaaacctgagaccggcatccatgcctcactctattcacctgtgtggggaggaggcgaatgagacactgcacgt

SEQ ID NO: 36303 - DNA, 201 bp, Bos taurus
ttgtcttacccagctccgttctccctaatttattctctggtcttgggtgaagctcttgctgagatttaataaaactcatattgctctgaacccttgtgtcrgctgcgctggtccctctaagccaggagggggcagcgttttcctgtggagcaaagggctccgaaagcaggggattggggtgggggcagggggcagactatc

SEQ ID NO: 36304 - DNA, 201 bp, Bos taurus
gcttcacctgggagtgtccacaggccatacagccagtttcattcggttctctcccaaagacccccaccccctggagaccacaagctcagtcaccaccagtrgggcagcacgatttcttcacctctgaatagtgatccttccacactgagttctgatgcggtactgagcactctgtagtcacttcaaagacatgaccttctc

SEQ ID NO: 36305 - DNA, 201 bp, Bos taurus
aaatgattatgaaaaatgattataacgattgcttcttatttctttctggcttttccaatcaatccagctaaaagtcggttgcaaggtgacatgtgcatgtrgggtgtttgacgtgataaatacacaggtgtagagccaagcttgagagcttcggctgttcaaacaccactgttctttcaagaaatactctcttgggtcagg

SEQ ID NO: 36306 - DNA, 201 bp, Bos taurus
ggtctcctgcctggagcggtggcacaggctcagagttctcgggcaggcagagggccctgtggaggcacactggcatttccacgggagagccattttaatamggaattgaaccgctgagtcgaaagttatagagactgcttgctttcttattggtatcattctgttttcttgacttgaaatcagagaacattcaaccaaaaa

SEQ ID NO: 36307 - DNA, 201 bp, Bos taurus
aggtctgactaatatccttagaaaggcctgctggcaagattggctttggcggttgtataggaacttggtttcagggagagtttccaccatccctgagttgrtaagaatggagcagggcctaaactgtttgtacaaacaatgtgattcatacaggacacctgcttcccttcaaagagtctgagactttggtccacgccacac

SEQ ID NO: 36308 - DNA, 201 bp, Bos taurus
gctgctgaaaggggaagccagagatgtggtcatagtttgagtcaatttaagggtaaagaggactttttttttttaaggcagcacttaaggaagccggcctrttgactgatggaagggattcattagagagatgatgggagaaagggacaacgcagttcaggagtggggttggagtaccagggaggggagaggatgggatgc

SEQ ID NO: 36309 - DNA, 201 bp, Bos taurus
ttccacgtgagcacgtgatgcctgggagcaaatgtgaagggtgagtgctttgctgtctgaacttgagatgttgtcacaggcgagcatctgcagaacgttarctctcaacctggtgcttccatgcgcatccactttcattagctttcttcctcttcgtgttcagtggtgtgttttactggggaacacgtcacaagtggacgt

SEQ ID NO: 36310 - DNA, 201 bp, Bos taurus
tgtgcccagagcagaggaagctgctgagaagcctaggagatgagatggagagctagctggtgcacctcacaggggtcttccaggccctcagacttattttyttattttttaacacagattgagatgaggagccatggaagggttgggagagacagtgccttgttcaaggctctcacaacatgaacaacaagagcgatattc

SEQ ID NO: 36311 - DNA, 201 bp, Bos taurus
ccgtcccctttgcagggtttcagcttatgttaattagcacatgtcagaacagagcatgaaaacacataacctgcatcactagaagagtctacaaaggcccytgggttcccctccagcccaggaactgagtgaggcagctgacttaactgttggcagccaccacagtgcagaccagccaggtgtctggccctaggtcaaagg

SEQ ID NO: 36312 - DNA, 201 bp, Bos taurus
gcagaaagaagaccagaaagtaaagcccaaacatagttaaaggaagccaaagccaggaagtaggacagatggcagaacagcccccggcccttggttctcarccttcccttgagggtttggggctggtggacactcagttccccaactccaactcggaggctcctttcagcaggtctaggtgggcctgggtgtccccgttcc

SEQ ID NO: 36313 - DNA, 201 bp, Bos taurus
cctggcccgtcacgtgcaccagaacatttccaaatatatcttttagactctacctggagctggattcacagtctagtcaaggaggcaggacacacaaacarctctagaaggagaaattgttggccttagccatgtgaagtgaaaagcgaaagtgttagtcgctcagtcatgtccaactctttgtgaccccatggactgtag

SEQ ID NO: 36314 - DNA, 201 bp, Bos taurus
ggcagggcctggcagccaaccaggccagcggatagccctacctactctatgaccacagtattcagccctgccacaacagaagggcccatgcagcccaagcrggggcacctctacagcatacagctctagtgactaggcagagaatgctgctgggctgcataagaggtgtccaaacaaggccactcctgcacaaccgggaaa

SEQ ID NO: 36315 - DNA, 201 bp, Bos taurus
tagggtgaccaagtgccctggtttgcccaggaaatgatattttagaactaaaactgagaaagtcctgggcaaaccagaacaaataagtcaccccacacccrggcactttcacctggtctgaagtcatgggtagattagaccttgtttcaaaactggatggagagtcattcagataaggtgctgggaagggagtgtcaattt

SEQ ID NO: 36316 - DNA, 201 bp, Bos taurus
cctcattcatgtgtctttctgtggttgttttctgccttacttttgccttactggaattcaagtttctacaagagcaggcaccatgaattgataatttctcyctcgacactttctgggaagtgatggatccgacaccagagggtgagtgtaaagtgttcatggagacagccaaggttgcttagcagagagccagcacacagc

SEQ ID NO: 36317 - DNA, 201 bp, Bos taurus
acaactgactgactaacactttcacgttcgagtaaccacagctttctgagcctcagaacctgtcctctctctacagaatgggcccaataatagtaactacytcatagactgtgtgaatattagagaggatgcagactgcacgatcaatatagtaccttgtgcacagttaatgcctacgattatgctttctcagggcctccc

SEQ ID NO: 36318 - DNA, 201 bp, Bos taurus
tgctccatgattgggtggtgtcactggctagattctctgcctgggtagggccacaagctgtgtttaacacttagataaggccataggctgggctgaactayagggcagaactgtaggctagactcagccttgggttgaattctaaggctgcccagggtcactgttcaggctctctggctatgaaggcccagaggcaaaagt

SEQ ID NO: 36319 - DNA, 201 bp, Bos taurus
ccctgggcaggctccaccacctctctgggcctcctcagtaggacactcggagatgatggagaaggggtctaacgtcaggatgtctgccacaggctccccarcagagcaggctcagggcctcccgcttgccacttctccaggcctctctctctcacctgcttcctcctctactggtgacacagggctaaccagcaaccttct

SEQ ID NO: 36320 - DNA, 201 bp, Bos taurus
tcagccttctagggtgagatttttgttatctattcctttgtaaccaactgctccaaagtttagtagcttgaaacaacaatgtatcatttcccatgattctrtggggttgactggggttggttgggtgatttctctgctcagcgtggtgaaacccagccccctcttgaggatgcattctgctgagagcttccctggggctag

SEQ ID NO: 36321 - DNA, 201 bp, Bos taurus
atgctgagcgatccagtctatttccctcattttgaaggtgagaaaacgaaggcccaatgaggtttagtaaactgcctaaaactctacggtgactccgggtrgagtcaaggctcctgtctcctggcccaggacctttcctggagcctcccactgacactcagactgccactaggaaagtctacatggatacccccaactgat

SEQ ID NO: 36322 - DNA, 201 bp, Bos taurus
cctgttttacagatcttataaaaactgatgcagggaggctaagaggtcttgtggttcttcattcttagagaacattattttattacatgtaacaattagargaattatgaaaagtaacttctcacatttccatgtgcttacttaccaacagaacaattttttgtgaaagatcaatgaagaaacgtaacaactccgtgttta

SEQ ID NO: 36323 - DNA, 201 bp, Bos taurus
ccccaggatctaataagctcatctgagagaaggagtttgagacaaacgtgcaaccgcccgcaggaatgcatctggtttcagatttcaaatcccgtgtctcycaggcccctggattcagaactcaaggccacaaatcataggcatgaagcactttcttaagactccaccctaacgttggatggctccccatcgaatgcctgc

SEQ ID NO: 36324 - DNA, 201 bp, Bos taurus
ctggctctgtggcctgggcttgggtacactgaccgtatgacgaatgtatagagactcttgtatagaaacgtcccatgagagataccactgcaggccagcaytggtacccaccctacaccctctgcagaaaaggaaacagtcccgggaggagaaggaacctggacaggggcctcggctggagcccaggagagtaggggtctg

SEQ ID NO: 36325 - DNA, 201 bp, Bos taurus
ggggccctttcagtttcttctagaagtggagaaagcgtagagaggagcagcagtccatcctaagcaaaaagacaagaagccagggcaagtgcagtgtggtraggaaaggccctccgttggcgaggtttcccagtgcactggtcatctggggccagctccccacgtggatgggaggaccttttacagaaccattggcctctg

SEQ ID NO: 36326 - DNA, 201 bp, Bos taurus
gctccgcaccatgtgactatgcacactggccattaatgtcctatttggagagggactctgggctggcagccacatttgggacccccagagggtctgaggartctgaggcccagggaggggctgggacccgccaagctctccccgtgagtcaggtggctgctcctgttttggcatctaaggctgacggccactccacctccc

SEQ ID NO: 36327 - DNA, 201 bp, Bos taurus
aaataaagcctaatgactgtatgtccgttgaaacttagactctggccatgtacggtctgctcagagcaactgctccccaagccccatcccaaagctccttytctgccagacagtgaggaaaacggccaatctcttcatgttgaaaacaatcagacagcattctacagagaggtttccctgccacaggacagctttatacat

SEQ ID NO: 36328 - DNA, 201 bp, Bos taurus
ctacagacatcacttcctcctccttgaaatcagtccttcccttggccacgctcccttgcctgttctcccaccctgctaagcattctacctctgcccctttrcaggcataatgttttcatattggccaatcagcgtatttcttcacccccgccactgtgattggctcagagctcggcatgtgactccagctggaccaatggg

SEQ ID NO: 36329 - DNA, 201 bp, Bos taurus
gcctgcaccagcagctacttcacccaagggctttctacttgatgaaggctgcctcacaaggtcaactcacgtcagggaacccttgagcccctggggttatrtccggggccttcaaccagctctcctcagctctgccgagcggaccttaggtcaggctgtgctggggctaaagacaaggcatagggtgaagggttggccaaa

SEQ ID NO: 36330 - DNA, 201 bp, Bos taurus
tctcccccacttaggagggagccagtgttgcaggaagagcaagaccacacctctggttccagaagagggagcaaagccattccctttggctcttatccaakgctgcaggccaagtcagcacttgtccccgtggtcctgcaaacactatccatccatctgagcctctgcagacgtggccaccgatgggagcagctgggctga

SEQ ID NO: 36331 - DNA, 201 bp, Bos taurus
agagcagtggagccttagagattggaggccaggtgtgcatcccagaatgcaccacagtctccccacctgcctgatttagggccagctggtttgctcccccyacagcatgtctgatccttgagccctggcaactctgaccagcagggaatctgagactcagcatattcacctgctgccctcaccacaaggcagggccgtgcc

SEQ ID NO: 36332 - DNA, 201 bp, Bos taurus
ggcctgaggagggccttgaagtgtgtcagctggggcctgggaagtctgccaggcaaggggggacagctaggagtcagcgagctctcaccccacggggacaygggcctaccactgccagttctaaggcaagctgcatttcctactttccaagcgtaggcactaatactgccttgaaaatgtttctagaatctgaacacttct

SEQ ID NO: 36333 - DNA, 201 bp, Bos taurus
ataggccacggcagagagggtggattttatcctccggcagaagggagtctttgagggatttgccctgctttcccagccagagcatgtcctggaatttcttytcccaggccctgcgagagactgacctgtgcttcttccccagcaggcccatggatgtagacctcctaggatctgggctgtctggccctgggtctagggctg

SEQ ID NO: 36334 - DNA, 201 bp, Bos taurus
agatagggcagacacaaggaaagaaggcatttattctttaactacaaactccctaactatgtagaactgtcatcctaaatgcagaggggccgattaaatgkttatgttttatcacttgtacgtctagccaatttaaaatccactagaaaattttttttctttttttttttagtcagaggcttttactgcctgcttgcatgg

SEQ ID NO: 36335 - DNA, 201 bp, Bos taurus
ctcttatcatcaacctttatttagcactgttttaacagatttttgtagtaatatacaaaggggagatgggggaagaggtaacttggcaataggccagggcraacagagtcaggcacccagtaagatgtgcccagatcagatcagatcagatcagtcgctcagtcgtgtccgactctttgcaaccccataaattgcagcacg

SEQ ID NO: 36336 - DNA, 201 bp, Bos taurus
atgaatataagtaatggttaggttgtccttcactgctgatatgtttctgtctctaagggttattgcaatcagggatgaacattgctcctcaagccacttaygtccccactgtggtggagtagagtgggattcctggcccatcgcagccctcttttagttgggtgagttgtgtttcctctctgagcctcagattcttcatct

SEQ ID NO: 36337 - DNA, 201 bp, Bos taurus
tatgctttgcaacacataaacacacaattgagttacaaaggtgcacatatttcttctcttctgtccatatccatacttaccttcccttataccttgaggtyatcttacttcctcctcctgccatgtacccacacacttgtcctcccatacccttgtcccactgttttctgcctagatacccagaattgagtgtgctgtgca

SEQ ID NO: 36338 - DNA, 201 bp, Bos taurus
ctccaaggccctgctggccaatcactccaatgtttacagaaattaatcaaaaacttaagggagttttccagcggtagttcaatacctatggctcgtacttwaaagtcaaatgtcattttaggccgtttggatttaaataaactgcgataaacctgaccaaaaagggacttgaggaaatttgctgaggtacaagtaagacag

SEQ ID NO: 36339 - DNA, 201 bp, Bos taurus
ggaagaggctgtaaaagtacatagtaagcaacataaaatgccccagaagaatttaaacttcatttttcaggcgttagggaatcattgaaaagtattgacayggtcacatctgttcacaattctagtagctatgaggaattgggctggagaagtgagagtaaaaatagacagttgttagaggcctttaggtgtagcccaggt

SEQ ID NO: 36340 - DNA, 201 bp, Bos taurus
ctctgcactctctgagggaagcccccagacgtcacaggctggctgagaaagcctcgtttgacctcaaggctttccatgtgggctgaggagaagggatttcyctgaggccctgggattcagctgacatcgtacctgcagacccagcgcccctttgccccatctgagcagggcaagtcgggagaggagcctggccaagtcggc

SEQ ID NO: 36341 - DNA, 201 bp, Bos taurus
tcaagatctttgtggatgccgatttttatcttaggatatcaatcctgaactaataaacacattattcctaaaggtaaaataaaaagaacctgagtgttttrtgttatatttctattgcagagcactgttataatagatgtttaactgtgttaagcactgaaacatatttccctatttgtgttggttggtaagatgcttaaa

SEQ ID NO: 36342 - DNA, 201 bp, Bos taurus
ggactcttcgcctgcaaaagaaaacagccacagtgtggacagtgactgcccggggagagtgggacttggggtgaaaagtgggggcactgctgttatttttygcaaggttcatgatacccagagattctccaaatcataatcgaaatagtcagcttcacacggaatttcttttactactaccagtttgtcttacaaggcact

SEQ ID NO: 36343 - DNA, 201 bp, Bos taurus
gctagtgactgctataacttccggtgtatctggtcaactctctgcaagagggtgagagcccaaggtttagacttggacttaggtgagggtgaaggccttcrgaggcttttaggctaggttctgtgctccaacactgctggtcagaagcatgcaccagagcatcggcactggccaacctaattatagaagagtcccttatct

SEQ ID NO: 36344 - DNA, 201 bp, Bos taurus
ctgctggcatcttgttttaaaaactagggctgctgctcagtgtcctacaatgtacaggacagaccccaacaacagaattatctggccccaaatatcaatayttctggagtggagaaaatcttctatagcaaattctgaccagcgatcgttcatcctcaccctgagtgcttcaagttgttttcatcaaatacataggtgtct

SEQ ID NO: 36345 - DNA, 201 bp, Bos taurus
ttgtcaggaagggctctccaaggagacgtctctggtaagaaagccaggggctaacaggggagctgctatttggtggctctcctgtgtcactgatgctttayacacgtggccttactctttgggggagcctcagagacaggtgacatcaggaaccttagccaatgaaagtcccagccagggtgaggagccggccaatgggag

SEQ ID NO: 36346 - DNA, 201 bp, Bos taurus
caagtcattaaaatatgccaagtactgtgctaagtctttaccagatcatactgtttaaatcacacactgtgtggtgaacagagaaagaaatgcaaggtaargagactttctcagggtctcaaggccacactacggttgagcaggaattagcacccaggtctgtctggctccaaagcccatgtgatgggaggtaactgcttg

SEQ ID NO: 36347 - DNA, 201 bp, Bos taurus
gagattgaggccagcggtagagacttgggagatatcaacagttagaaaaagtgggctcctctaggcaggatgttgaacggcagaggaagtgaccttagagyatgacctttatcctcaggtcagggccatgtcttagtcatgtttgcactgagcacaaggtctgcacacagtgggtcatcaggagagctgggtttactgctg

SEQ ID NO: 36348 - DNA, 201 bp, Bos taurus
gaatgggagcaaaattccctctcccaagacccagttaccttgagagtggtgagtgcttttttctgggatacaaggcctttgacttcaggctcactctggtygtgggcttccccatccacagaaatggggtgaatcccatctgggaatagcagaaatgccccattagaaactggtgtggggcttcactggtgatctagtggt

SEQ ID NO: 36349 - DNA, 201 bp, Bos taurus
tgctgggaggaggctgggaatacagtgaagtcactccctgtagactcgggaaggcttggtctgatctttctgccactcataacctccttggtggttttgcygaggccaagcattgactgggcagtctggtgggcaggggctgtagccagagtggagagccctggctgctggcattgggtgtcccacatgactgactcacag

SEQ ID NO: 36350 - DNA, 201 bp, Bos taurus
taaaaaagaaatgagaattaaattctaaatggactccatacaaacaaacttgtgaccttgagtaagtcagcatattttttgaagggtatactcctctgtayttctatacaagagggatgctaagctttgcctagaggaatgctgtcagaacccgtagaccatgtagcagatgtacagcagacattcagtcaacctcctctt

SEQ ID NO: 36351 - DNA, 201 bp, Bos taurus
tccggccagtgcacgggcccaatggaggtctctgggcaggaagcactgggaacaaggaatcctctgtctgcagtcgcagcacagcttggacagaggaggtrgattacgagttcctgggaggcggccttctgcgctttgcctgacatttgggcaaatgggtggggagaaggggaactgagtgtatgtgtgtatggtggagaa

SEQ ID NO: 36352 - DNA, 201 bp, Bos taurus
gggcctcagtcttcttgtctgtcaagtgggaataatgttctaggttttcttatgagtttgtcctaagattgcagttatgggaaaactttgaaaaattgccmatgagatggtacatctgggccacccactgggaagatggggcctctctgatcttttctcccacctgctcctctcaggcagcccctggaattttgccttcac

SEQ ID NO: 36353 - DNA, 201 bp, Bos taurus
cacacttaatttctcacagttctgggggctgggaagtccaaggtcaaggggccagccaatctggttcctggtgaaggccctcttctggtttgtagacagcyatcttctctgtgttcttatgcagtggaaagcagagaagtcatctttctcatgtctcttacaaaagcacgcatcctgtttatgagcacctcctaaaggccc

SEQ ID NO: 36354 - DNA, 201 bp, Bos taurus
ttcagaatatccctgatgtgatattgttgcccccactgtacttatgaggaaactgaggctctgagaggcaaaaagaagttgccctggttcaaaagaaagtmaaagcttctctcccagttttgtccttatttcccacagatgtcttccatgctcatagtcattggaaaagaccctgatgctgggaaagattgagagcaggaa

SEQ ID NO: 36355 - DNA, 201 bp, Bos taurus
ccccagccctgtggggaagcgaggctgccagggtacagaggagccctgtccctgctggtcccactggacacctgtctcctgagacagacaccaggcccccrtctcctctggggcgtgacgtcaatcattaagtggcttctgagatgagctgggattgcgtgggttctgaggtgcgtgtgtgtgcacatggccctaggtgca

SEQ ID NO: 36356 - DNA, 201 bp, Bos taurus
agatcagagccctgaaggaaacatagttgctgagaaagaggatgggggaggcacctcagggaaagtggggtggaggatgggaaggaggcaggccagggcakattgggaactgcaaggggcaagatcctgaggtgtaaggcgtttggtgtatggagggaactgggacaggttccggtctgaaagggtctgcaaggtcagggc

SEQ ID NO: 36357 - DNA, 201 bp, Bos taurus
gttaaaaggctgaggagggaggagccttgagattctggcatcagcttgtcctggaacttttggttttaaaaatgtaaatctcttattgcctttgcggaggrgaactttggccggggagggtgcggatgagcaactgagttgggagtgtctagggaaacaccttccttccattgacagatgactaggaagcgcaggcccaga

SEQ ID NO: 36358 - DNA, 201 bp, Bos taurus
ctccagacttcgaactagaggttgtaggccaagtcatcacgctgagaggaggttaagtgatttcttagggctaagaggggaaggaacagaggatactgctrggcccctggatgtgcctctgtaccccagccctcccttccccttcgtgccgccttgcgtttggggtgcttgcttaggccgagctgagatggggctctaggt

SEQ ID NO: 36359 - DNA, 201 bp, Bos taurus
atggctctgtggacaagttagggcccttaccctctgggcaagtttcttcacagctggccagctgtgctttctgtggaaaccattcctcccatgaacaggcrtctcttaggtgtgctggtgggggctcaactaagtcctcagtttcttcagtgtccacattcccttggactaagagtcgttcagtagctaagtcgtatccaa

SEQ ID NO: 36360 - DNA, 201 bp, Bos taurus
acttataaagtaatgtttgaaaaatcaaagtgctttaccttaatttagctgaacgtagtattctggtaagtgaaacgcaatttccttccatgatacccttyccaactgtgggaatgatgcttttgcggcaagcaacatacaacgaacacgccaaccagtgtataacctctccctggcaggcaaaagataaaacagcaaaat

SEQ ID NO: 36361 - DNA, 201 bp, Bos taurus
gactcctcaggtcgtggaactttccagacaagaatactggagtggattgccatttcctgctctatgagatcgtcccacgaactgaaccctcatctcctgtytctcttgcaccggcctaacactgtgccttctgggaagtctgccacgtgtcactaccacgtctgaaaacattttcttaaatgacaaaccagttctggttgc

SEQ ID NO: 36362 - DNA, 201 bp, Bos taurus
ttggtgaatcccttccacagtgctggtgtagttacgtgccctggtgagtattgagctagctcagaggctgaggcctgtgtgcggctgtacctgccggcctsttcatagtattactttgtccgtggagctgtcatttcttcatgtttctgccactgtctttgttgcatctccttggccacactgtcccaccttctgttgggt

SEQ ID NO: 36363 - DNA, 201 bp, Bos taurus
ccttctgtaaaagataatgacggtaccttctcacgtgactgaaggagtttcatgcatctgaaatcttggcctagtgcttggcatctatccaaactggcccrtagttacacacttggactcattgcctttacttccattaactgaaaataataggagacttccctggtggtccggtggttgggaccgtgcactcccagtaca

SEQ ID NO: 36364 - DNA, 201 bp, Bos taurus
cccagccctgaggcatctttcctgagcacatagttgagccctcgctcagtggcagacgaatgtccgtgtcccgtccccacagtgtccctgcaaggcagaarttctggccccattataccaaatagaggctcagaggagcaaaagcacagtggcttggctgcggacccagggcctcctgaatactgcaggcctgccctgccc

SEQ ID NO: 36365 - DNA, 201 bp, Bos taurus
acgctttgcctgcaagggagattttatgactattacctcctttttatagaggtgctgagagggtaaggaacttgcccaaagtcacacagcaaatccttatyggagactaactgagctgcgtgctggtttttaaagccgtgttgagagtggggaggggtaccatagagttgcagatttcattctttttctttttttagccaa

SEQ ID NO: 36366 - DNA, 201 bp, Bos taurus
gaaataggaaatcaaacacagtgtaactggctagggccgccagctgccagtggcaaggagctctgtggcccagtgtcagctattccaggagtctcacagcrtgctaagctgagtaacacctccagcttgtacacaccatgtctgtgtaaacaaacacacaaaagagaacagaagacatgcttcagtgggctttggaaaaca

SEQ ID NO: 36367 - DNA, 201 bp, Bos taurus
acagctgtcgcaaacacttctggagcacaaaggacctcaatcccttgagcctcatgttgcccgcccctaatccaggccctagcatttctcaggccaaccaycagaccttcagaggcacctataacttgagttcaaggtcagaaaactaagggggtggagggtgcagacctcaattcagatagtggccttgccttggtcagc

SEQ ID NO: 36368 - DNA, 201 bp, Bos taurus
aatttccctcatctgtaaaatgaagtggtgattcaatctgatgacttctaagcctctttcatatagtcttcaaggggatcccagataatgtttccagtttytagttaggaaaactgaggcccagagaagcaagtgatttgttcaagttagggatggagtcctatggttaggcaccgtagtccaagtctctgaccttcatgg

SEQ ID NO: 36369 - DNA, 201 bp, Bos taurus
ctctcaggcctgaagctcagcaccgcttcagccttcagtttctgttcctacacattgcaatctgcttcctttgcagttgtctgcccttgaacccttcactyagcactctggcctgttttctccctctgttgactcctggagaaagagacatgaatgtgtagttttcaaccctcaccgatggtgagtaaggcttgaagagct

SEQ ID NO: 36370 - DNA, 201 bp, Bos taurus
caggggtagggcagggaggacacgtggggccagcgccaaatgtcccagggccactcgagtcctcgtccagctttgcccctccctgggcctctcttcccccrctcactgctgtctaacaaatatatgaacagcgccatggaaactgtaaagtcctctggattcggccgtgtaaatgacaatggttactagagtggaaactta

SEQ ID NO: 36371 - DNA, 201 bp, Bos taurus
ccaaatagtcggaattctcattgatcaggtgctgcagggagtcgtagccacaagcctggcagatgtctgtcatggtgccgatggccgcctgactgatgagyagggtttggtccccagccttctccagtactggatatagggctgacatcaagagcaaacggaagtccttccctagtgcgtgtgcgaagtggcctatccctt

SEQ ID NO: 36372 - DNA, 201 bp, Bos taurus
catttctaaccgtcttatcccccagctcatctgcagcatgtcagctctggcttacccctctaaccaaaaaaggcaaagaatgtgtcagccttgcttccctyggccagttgtctccatgtgctgtgctgggctgtgttcccacagtgtcagctggatccataggaagcagggggatgttggacatattttctacttctggtt

SEQ ID NO: 36373 - DNA, 201 bp, Bos taurus
ggagatgagctggttcaatcactccctgtgactaaagaggaaactgaggcccagaggaggggaaggcagtagctggccagacctgggccttgaacctaggrctctaagcccttcccgtctcctcgtcctaattggatcctttttgatcaggttccaaatggcctctcggacgcagccaggtcagggctggagtggtggatg

SEQ ID NO: 36374 - DNA, 201 bp, Bos taurus
ttcgagtgggacctaaagactctgtttacctctcacggtcagaggcttgtagcctgggaggccttggcttttacacattggctcagctggccgcacactckaaccatatatggagcagccagtaaaaaggaagaatgttctaagttaacatgattctgagctcttggccagagcactacctgctacaggcctgaaccccag

SEQ ID NO: 36375 - DNA, 201 bp, Bos taurus
gatgggagagaaggaaaggaaggcagccagttaccgtagtccaggcccttctgggtgatcctggccacaatgccagggttggtagtcgtcacagccgtgcycagggcggccagcaccaccagggttgcccacctccgcgcggtgtcagggcctctggccatgtcttcgtcctgcagagctgccaaaacctcgaggtcttgg

SEQ ID NO: 36376 - DNA, 201 bp, Bos taurus
tgaaggagcagtgagcaggccataccctggatttaagggctgcacacggcaggtgctcagtcagtgatgggagagaaggaaaggaaggcagccagttaccrtagtccaggcccttctgggtgatcctggccacaatgccagggttggtagtcgtcacagccgtgcccagggcggccagcaccaccagggttgcccacctcc

SEQ ID NO: 36377 - DNA, 201 bp, Bos taurus
ccccactgccaatcagtgggcaagagtttcaggggtgtgtaggtggagggaccgggctgcatgcagaagcggcacagtcagctccgccagtcatcctggarttggccattcagtggtctgatcagcatcatcttgactctttttaagtaaaattagtctatagttacagagttggtttgttcccatttcttggaggctgat

SEQ ID NO: 36378 - DNA, 201 bp, Bos taurus
ctctgaagggggcccctgaagtccagattcagaaatttgggggacaaatctgggttctctttaacccttttctttctgaacctatgagaaattctccctgygagacatctgggccagaagttggggctggtgggggccccttgtgccacagtgctagtaagggggtccgctgtttgtcccagtcctccactgtggccccca

SEQ ID NO: 36379 - DNA, 201 bp, Bos taurus
gccctgtggtctacgaggatgcaagtggatcccatctccatctcagggtcaacccatgctaattaggtgggctgaggggctggatattccggaggcccctrctaacccttgggtcctgagcaacctggggcagagagcaggaagcccacagtggaggcacagtggggccaggcagtcctctgtccccaagtcacatgccct

SEQ ID NO: 36380 - DNA, 201 bp, Bos taurus
tctcttcttcacatgcctcatgaaatcatcctggcctatgcctgctacctctttttacatttttgctatggatttctaactgatatcctaacttcattctygtggccccctaacctttttaaagttgattataaactatttaaagtatacagacaattgtagagggtgatagaatcattaatctactacctaaatttgaca

SEQ ID NO: 36381 - DNA, 201 bp, Bos taurus
agtggctgaaggcttcatggctgcaatagcatttgtttactggtatggcaggtgacattctctgtccacgttattatctcatttaattttcaccactaccytgtgaagcttccctggtggctcagatggtaaagaatctgcctgcaatgcagatttggaagactgagcaactaacactttctcactttctttcactttact

SEQ ID NO: 36382 - DNA, 201 bp, Bos taurus
tattctagtggccagtcaaggtgtgtcctactgcattactagctgacctgagatataataaaaacgctgaaaatatcagcaactgtgatttgctcctttgsatgcctttccattccccaaagcaggccagattctgcaagttccttataccttttcattggaaaagaccctgaagctgggaaagattaaaggcaaaaaaag

SEQ ID NO: 36383 - DNA, 201 bp, Bos taurus
aaagggggcaggatgggaaaatgaggtctatggactggttggggttcttctacctatcacaagctatggactgcacctggtacactgctttatcaatgacrtgtgctaatttcaaggcccatgatgatacaaatatggatagttcagagcaaagccagctctgttacataaagaaagggatatcattttgtacattttctg

SEQ ID NO: 36384 - DNA, 201 bp, Bos taurus
ggaaaggggaattcagggaagaggcagatggtaccaagttctaaattgggaactgagcttagcagtttcaaggcagaggaagatcaagaggccagtgtaayttgcagacatttaacaagaaggaaggtggcatgaagtgagaagcagagaccaggtcagggagcaccttgtaagccatacgggagatcaggagattggatg

SEQ ID NO: 36385 - DNA, 201 bp, Bos taurus
gtgggatgcattgatggccagaaaggatctggctgcaacccaaacccactcctctgactttgagaacagagactacacactagccttccaatggcccatcygacaatgatgagaccatggctgacgggaattgtctcaactgtgtcaggaatgagcacacacttgctaatggcctatttccttccccactgacatccctac

SEQ ID NO: 36386 - DNA, 201 bp, Bos taurus
gactaagccacactcttgctcccgggaagaggactgctgctgctgctgctaagtcgcttcagtcgtgtccgactctgtgaccacccgacagcaaaaaaggrgagactttgagaagaggccctgcagaaggattgttccagaatgtgtgagaaatctttggtctaacttcacttccctgttcttcagccaggctgtgtctgg

SEQ ID NO: 36387 - DNA, 201 bp, Bos taurus
gaataatcagtgctcttaggataaaaaccaaaagccttgacatgggccaataggcctcatgtgatgcagttcctgatatttctccagcctcagctcacaawctctcatcagtaactctgctctggccgccctggattactttccaggctttcctaccacagttcctttgcatatgctcttccctatacctagaatcaacta

SEQ ID NO: 36388 - DNA, 201 bp, Bos taurus
tcctgccaacttttgaccttgtgtatctcttgtcgtttttaaacctgaccctcagagtggagtgaaaaatttgtggaaatccaggggagatagaaaagcartgctgtgaaatatagtaagggaagtgctttttcagccctgttggtagtactaatttatacagtcagtgtgagaataaggatgcttttgatttctgccttc

SEQ ID NO: 36389 - DNA, 201 bp, Bos taurus
gagaaagggacctgtgcaggaaccctctgccagcagggtctctccacctgggaactgaccgtgtagaccaggtaactctctgttctgggggccgcactgcrtgacgtttaaccacatccctgacctttatccactaggtgccagtggcacttccccccctgcccccttgtgacaatcaaaaaaccaaaaagtctcccgaca

SEQ ID NO: 36390 - DNA, 201 bp, Bos taurus
ggtctccatcctctcctccaattcatttgaaatttaaaatcatgtttcttacttcaggaaagtattttctttcacatttgattttttttttaatgcttgcrttgtttttttttcttcctgttgctgttcagttgtggcttgaccctcccgtggttctgagtgaattgcaggctcttactcctggctgttggtttcctttgc

SEQ ID NO: 36391 - DNA, 201 bp, Bos taurus
gactctcgtcatgggtaagggaaaggacatcttgagttttagagatgaagctttcacaggtcatgtcagataagctgcccctgggcggaccaaggtgatcrtctccagcttcgattttcatgaggttctcgggttcgttttcaagggactcggaagtccggctcatgtgcgtataggccagagactcatacagtttggagt

SEQ ID NO: 36392 - DNA, 201 bp, Bos taurus
ttaaggccatgagcactgcccaatgggaagaaagagagggaatgaaccactgccctggggaatctcaaagcaaagttcaaacgccaacacttgcggtcctyggggaagactagcactgtctggggccagagccaactgcaggtctgggggaagggatggcgagggaggcgcctggggatcccactcactcactgtgattat

SEQ ID NO: 36393 - DNA, 201 bp, Bos taurus
agagcagactgattctgtgtgacgtggtgggcagggaagaagccagatacccatcaccttagctccctttccctgcatcccttccctggcagtaccctctrgggcacctcttcagtttggtgaaacagcagccttcaagcttctcctatcagtcactcttatcagtatcaggaaacaggctctgaggtcccgctgttctcc

SEQ ID NO: 36394 - DNA, 201 bp, Bos taurus
cttttcttggccattaggatctctgagatgatatggtcactttccctcaaggcttctgtcactaacactttgcctgccggttcttcttttctggtcataaktagggccagaaatgcaggtcccactgggagttgaggtcgtaagggagagaagccagaactttttgattctctgtccttagtcaaatgagacttggagcag

SEQ ID NO: 36395 - DNA, 201 bp, Bos taurus
ggatggaggcaattatggccagcacgcttccattagggccctgccagccccaggtacaggcaacctctgcggggctggttaattatgacacaggacagccrtggggagaggcccatgtggcaggctgggctgcagaacctctgaggccaagcgcattgcagttggtctttactctgggcctgctctgggggactccgtgcc

SEQ ID NO: 36396 - DNA, 201 bp, Bos taurus
gcgagatttactgttattattttttttttttcctgctagttcagaaatctgaccatcttggagggcagaggcttagtcggagctggggatctcagcacagkggggattcagcaccctgaagaggttcatatctgcatttagcattgtctggaacatgccccttccccgtctttccctgaaacatgtttgcttttaggagct

SEQ ID NO: 36397 - DNA, 201 bp, Bos taurus
ctaacactctcacttcactcacaacgcacttcaacatcaatgggatggaattctgagcaaggcattcacttcaattgtggaggttccatgacttgggttcrctattttgttcgtttggtcactcggtccttcaatattcaatcaacaggtattaactgagcatctactactcggtataaggccctagagatacaaaagtgg

SEQ ID NO: 36398 - DNA, 201 bp, Bos taurus
aggagaaaccaagctcagaatccagctggtccagggtcattagtattcaccatccagcaaccaaaacagcaaggttggccaggaggtgataataacaaggrtcaacatgcacggagtgctcactgtgtgtgtcccactctatttcctaaatcaccacctggcccgtcagctcccagacttcaggaagagtgtgttaataca

SEQ ID NO: 36399 - DNA, 201 bp, Bos taurus
gctccatccttctcctggccacacagcaagataaagttatgcactgagctataactatgcctgagctggtggaaggaatgtatcccactcttagggccagytcataaaacctcatgtattgggttgctcaaagagtttttccttttttttttttttaaagcccaaacaaactttttggccaacccaatagaatccattcct

SEQ ID NO: 36400 - DNA, 201 bp, Bos taurus
ccccaaccaaggccaaggtaggttggagggggaagttcagagagactgtagtggctctcagatctggctacacaacggactcttatgggctccaattataygtgtggcctggctctgtgcctgaattttctgattcagtagctttaagcaggaccttgacctccccgtctctgcaaaactccagggtttgaaaactcagcc

SEQ ID NO: 36401 - DNA, 201 bp, Bos taurus
ttgtgcattttaaatatatagaccctttgatcaccattatctactctccagagttcccatcagtctccaatgaggccccaaaggtgatatttttgtagctmtgtgatgacgctgcccaattccttagtaaaattattcacatacaggccctggacagaattaagaccagcagacttcaatactttaaggcttgaacaagtg

SEQ ID NO: 36402 - DNA, 201 bp, Bos taurus
ggatgcggccgcccaaaagggagaaccacagtgggagtgggaaatgtcatgagaaactgcttcacatgcagtcaatcagccacgcagaacacaagtaagarcaatgaacaaggagtcctggaggccagtgaggggtcagaagcatgcagaacagagacaagaggagaaactggactccaagtagtcaaggggctaactccc

SEQ ID NO: 36403 - DNA, 201 bp, Bos taurus
aagagtactggagtggggtgccattgtcttctccgattttgtactaagagctatacatatattttttccctctaataaggatccaactagctatatctgtscccactgaacagatgaggaacctgaggctcgaagcgaacatgtaatttccctgaagacacagagacctggggccaggtctgagattgaaacttgggatgc

SEQ ID NO: 36404 - DNA, 201 bp, Bos taurus
agcggggcaggcagcaggtgtcagagtgatggccttcagccagctaagagacggtgtgtgagaatggcttcaaggtctctgttgtggcattaactcctgcrtgccaggtgccagggcctctatccacccctactaccttctcttctccaggtgagaaacatcccctctcccacaaccattccaggccaggtactgccactc

SEQ ID NO: 36405 - DNA, 201 bp, Bos taurus
gattgatttttttcaatgtgcatacttatacacaaatgcacccaaatcgataatggacaaaattgttgagagctctagtgtgagtcaaggccacagtaaasccaaggtcctagaagcttctacgtcatttatagacatcactttccatcaaagagcatggctaaaatgataaatctcagaaaaacaaagaaagatggccat

SEQ ID NO: 36406 - DNA, 201 bp, Bos taurus
agggatccatgcagtggactgaactcataactttggcctccttagtaccactgagttgtccaaaaggagatacataagaatcactcttcccacttaacaayatccggcaactgacaagacaatcagagcacacggaccacaggatcagccctctagaatcaggagtctaacttcctgactcccaggtattcccgttgggcc

SEQ ID NO: 36407 - DNA, 201 bp, Bos taurus
acatgttggtgtctattcttctagatttcctctgtatgcttgaacacacacatttaataaaaatgagagtgggcttaataaggcgggacaaggaggggccrgcactcagtgagtcagcagctggtgtccttgaaggtgaggaagaggaaaacggaaaaaaaaaaaaaaaaagccaaacacaaaaatccagtggaggggaag

SEQ ID NO: 36408 - DNA, 201 bp, Bos taurus
tgaaaggagtggagggtgttggtgcaaactgccagtttcttaaccctctgcgttcaccaccctcgcccctctcttccgtctcccagaggcctgtgggcacraccattctcccctgctaccttcagctacatgtctaggatgcatcgaacaccagaagcacttctgtggatcgcaggttccaggatctagccaggggtgtat

SEQ ID NO: 36409 - DNA, 201 bp, Bos taurus
aggataggaccaactgagcttctaggactcagcttattttccaaactaatcttgaagttatgtttgtacatcttttcacagaagactaaaaggaagtgggyttttctggaaaactctgaatgggatgtggctgggagtgggttgctggcgaagactcatgaggggaaattgatggcctggaaggggtgattggtccacctc

SEQ ID NO: 36410 - DNA, 201 bp, Bos taurus
tgctcctgcggtacaatgagaaactggatagactgttcatcagtgaactcaacacacagcatatacacattgaccccaaaaccactggtcctagaggagaygccaccggcaaatctcagaagaaactcctgtctgcacagcccgcggtcaacaaagaccttggcacagctgcaaagtccccagttgaaccattgttttgct

SEQ ID NO: 36411 - DNA, 201 bp, Bos taurus
cagacaagattaacaaggctcaagtgtcagacccaggagttgagcctgaggccacagcatccccaccagtggagtggccacataagagtgtgctttaggaragaaggagggggtccggttgcacacaccagctgggcagctcacccggaattccatgtccaggttgctggtggaggccacgggatccttcaggagggagta

SEQ ID NO: 36412 - DNA, 201 bp, Bos taurus
gccctcttaataaggcttatgtgcttctgcacagttcacctgactgtgaaatgggtatgattgccccttttgtacagatggagaaactgaggctcagaaargctaagggattgcccacaggtccacagttccccaggcttcccaatccactctccactcccaggtgtggagtggagtggagagtcttgcgccaggtcctca

SEQ ID NO: 36413 - DNA, 201 bp, Bos taurus
tggacattggtgacgccatgggggcacctggcgggggtggtggtgctggtgagggaatcagagggaagtggagagggaaactggccatgagctaccgctgyccctcccaggcaagctcaggggtcctagaacccacgcccaccatagtaaccatggggaaaccgagaggccaggggcagcggattaacctgccaagatcat

SEQ ID NO: 36414 - DNA, 201 bp, Bos taurus
gggcaccaagagagtcaaagtggggtggcgtttctgttttgggaaggggggtctgggaaatatcccactgctagatgagatatatgaagaaagacaagacrcaaaggaggtggctcttgagggaaacagccttctgggcaagcgcaaaagccaggagcagaggctggctgggtgtgtttgaggaagagccaggaggcacgt

SEQ ID NO: 36415 - DNA, 201 bp, Bos taurus
ttttactccggcacacagcacgtccgagccacctcgacctctgggccccctgttcagtgaactcagaccagccacctggccacagggagagtcagtctgcktgtctgctgaatggaatcttcctttggttccctcaagggcaggtttgggtaaaggctagcatcacatgaacccaaggccctgttcctttgaattttaacc

SEQ ID NO: 36416 - DNA, 201 bp, Bos taurus
cttaaaagatgaggagtagggcaaggggcccactgatttcaggggacattttctgtgtccttgagagaacctaagagttgagttcatgcagctccagaatkgaacctcttgaaggcctccaacaaccagctgtgcagccttgaagatgtacttaaagccgaattaagtgtgcgcaggtctctggggagagagacctgctag

SEQ ID NO: 36417 - DNA, 201 bp, Bos taurus
ttttttaattcgttatctttttgtcttcaaggtcagaattctgaaagcaaaggtgtcagcagggctgcattccttctggaggctccaggggagaatccatyctgtcggcctttctagcctctagaggctgcccgcattcatttcttgcagccccttcctccaccttcacattgcatcattccaacattggtttccattgtt

SEQ ID NO: 36418 - DNA, 201 bp, Bos taurus
aaacacttgtcacaggtaagccatttttgtctacagtaattgcttttcctgttttgtgtgctggcctgagagttgacatttttctgaataaatcctttcartggatgaatctaggtggctgctgcttcttgcttcccacttagcacatggagggctgggcataggtggttaggcgtacagcctcactaggaaagaatgtgt

SEQ ID NO: 36419 - DNA, 201 bp, Bos taurus
agaggcgctgccatcgtctctgtctgcagaaggcagttggtgacgtgcccgggttcttagaggaagagagtggaggggttggtggtttgactggccatgcrgttccaaagtcggctcctccccatggtgatgcctgggtttcttcatgcttgtgaagagccacgggccaattatgctcattacccgttttacagaaggaaa

SEQ ID NO: 36420 - DNA, 201 bp, Bos taurus
attagtgtagggttgatctgggagtgctttaatgtctacttttctctggtgagaaagccatttaattttgtgagatttcaccccaacaagagaggagggcmtccaggcatattgaggaagctgtgctctaaacatgctttttccagatgtatagattccaaggtagaagaaggagtgcacatatacaaatcccctgggtcg

SEQ ID NO: 36421 - DNA, 201 bp, Bos taurus
ggtcaccacggcatcagcgtggcctggttcccaggtcatttttaatttgtattctgatgaaacctcccaaaccccatcaaactctgccttgagccccaacrgaagtcacacggctgggcccaaggggacctctggttaggggccagggggcggaaggggaggggagcagagggtgtctgatcatttcgtgtgactgatgtg

SEQ ID NO: 36422 - DNA, 201 bp, Bos taurus
ccagcaaggggtgggccaagaaagatgccgccacgggacacctcgatcgggatgtgcgagatccttcccgagggagggggcagaggccccggcatggatcyggagcacagagaaaatcagggtcatggctctgaagcaggtcttgacggcaaccattcccagagcgatgcggccaagaaaaccatgaattgccccttgcgt

SEQ ID NO: 36423 - DNA, 201 bp, Bos taurus
caagacaccacatgagatttcccttctcctggctctcctgggggcttacccaagtctatgttgggaggggtagcaggagttaatgtcgactcctgtgactrttcttggggaggggctgccccagttgactgaccaatggctcttttggagactttcaggatcctcagagggtccttggagttcagccagggcagctctgtg

SEQ ID NO: 36424 - DNA, 201 bp, Bos taurus
agggcctcagaggacggacctgctcctggtggtgcctccttcatcacagacacaggcagttggtccccaagatgcatcctgacagcatccaggaacaaacmtcagcctgtgtctaagaacctcgggcctccttgctgcagtcattgtacatgctgctgttgttcagtcgctgagtcacagccaactctttgcaaccccatg

SEQ ID NO: 36425 - DNA, 201 bp, Bos taurus
tgtggtctcccaatatggccactcccacccactgaatgcccattgcacacagcctatcgcagtgccactcacgccaactcttggggagctacactcctgtytggtaaccatggcctcacaggtcagcaaacacatatcagaggctgaaacctactgttgtcccatctgaagtgctccttgtgtgtagcctttccccggctg

SEQ ID NO: 36426 - DNA, 201 bp, Bos taurus
aggaaaggggatgttagtttgtaataaacaggcctattctttgagggccaagtacacacaaaaagacgacaagagtgaagagtcagaacttcaattcaagmgacagatcccaccccatgccaaatcatctctgtagctgaaaagcggatgggatggggctcctctggtcacttgccccccaggctgtctgtggcaacatgc

SEQ ID NO: 36427 - DNA, 201 bp, Bos taurus
ccccgggcctccaccgggcagaagctgccttcaaacagcacctgcatcttgcttacacccatagggaagagcacacggccgggtggcactggcaccccatytcatgtctgtgcagacatcactaatcaatcggtgattctctctgagcccaacttggcctctagacaggcagccactgtcaaccaattccaacaggcacca

SEQ ID NO: 36428 - DNA, 201 bp, Bos taurus
gcaagaacactggagtgggttgccactgccttctccgaatgagctgcctacttactctcaaaaaacatccaacttctgcccacatgatgccaaggccctgygtgaactgtcccctgatctctgttctttcacttattctgctttaccgcactcaccgtcttccccagctcacaaaacatgccagactcctgcttgcctcag

SEQ ID NO: 36429 - DNA, 201 bp, Bos taurus
tgcacgtgctattccctccaaccacaacgctcatggccctcctttaacccagttaatatcagttcaccttgcctgacttctcaaccagctcaaagcccacrttcaggccccagcagctccgtaaacccttcttagagccaccacagctacaatgtaacctatgagattattcaagtaaggcctgtctccctcaccagagct

SEQ ID NO: 36430 - DNA, 201 bp, Bos taurus
aaatttatacgtaactcaaaaccaaagttcctggccctttggtggtcgtttgctgacatgaacacacacagcagcaaaacgctcgtcccccagggtgcctrttcccagctgggctgaacaaggcctccgcgtttcagcttttttactgtaaataaacaagtggggacttgctggcggtccagtggttaagggtctgcatgt

SEQ ID NO: 36431 - DNA, 201 bp, Bos taurus
cagtgtacctccacctctggcaaataaagataactagaccttaatcttgctgcctctggagtattctctaaaattacctgatgtgtcatattttcacaaaycaggacttaagcttacaatttgggtttatagacactgtcactgaggagacagaaaagggatttttggacaaacgtttagtcccttaacattaaaaatata

SEQ ID NO: 36432 - DNA, 201 bp, Bos taurus
agccgggcaatttcaggacgcatgcggtgctgaaacaagacacgtatgtcattaaacacatgggcagagaataaatggacagttttaaagactaagttgcyagtggaaaatctggggagatgacatttgaaaagaacagggagaaaagagcagaagagaaacagcttcttcatctgacacaaattcaccacggctggtctt

SEQ ID NO: 36433 - DNA, 201 bp, Bos taurus
acttgggtgttctgtatttttatttgctaaatctggcaaccttgttgtagagagcatctggcctgggatgatgtatctgttctttaaggaaccctggatgkactttgtaccttctgagtaacttgtatctctgctgacttgaactttcctcctgagttatttgcagggaaatggtggcttatggaatctcccgatagttta

SEQ ID NO: 36434 - DNA, 201 bp, Bos taurus
agggagagaccagggaagctcagagaagaggaacagtgagcccatgatccacatttagccattcccgggggacagtgacaaagtcaccaggatgcagcggyggggcctggctcccctctaggaaccttgggtgagagggggcaggagggaataacaggctggaaggctggtctgcctgtgaactcaggggatcgttggggt

SEQ ID NO: 36435 - DNA, 201 bp, Bos taurus
aagatggagcagaaagagacagggccacaagccgaggagtgctgacagacagcaaaagctgggagagatgagggctggactctctcccagagcctctggamgaggatggccctgccagcactttgatttcagcctttcggcctccagaactgtaacaggatatacttctattgtttgaagccattcagttcatggtaattt

SEQ ID NO: 36436 - DNA, 201 bp, Bos taurus
cttccaggccccggtggccgcgcggagactgggaagtggagtgtgctgagcccagtcagcctggaacaaagccccagagtcagggcgaggggagccagagyggcacctagggaagctgggtgttgtcattcacatttcaaccttctcatcgcccagaaaaagcacgcactcggggtgacggggatgcttttgaactgtggt

SEQ ID NO: 36437 - DNA, 201 bp, Bos taurus
aataaattagaaaaataaagccttcctccactcaacccccacccccttccccacgcagccagccactgcggggctggatacagaccagggtttgggccccrgttgagctggcttcctctctatccccacgcctgacttgctgtgtgacctcaggcaagtcactcagcctctctgggccttgtgtcttcatctgtaactggg

SEQ ID NO: 36438 - DNA, 201 bp, Bos taurus
ggtgctcctcgaggccaggctgcgggtcccagtatctggagagccagcctctgtgcatttctgagtcccggggtccgcagcagcacatgctcaggcatggygggcccaaggcaggacccactgtgttcgcagagtctgtgtgggttggggcctagctggctgtttgccttctccaagttttcttttttaaagtcacctttt

SEQ ID NO: 36439 - DNA, 201 bp, Bos taurus
gactgcccccacctgctagatgagctctgaatttagactgagtaacccagagggccccctcatcattttattgtatatatatgaagtagtggctgcaaagyatatgtaatggggggggcctagatgaaacccaatatatttgatgtctcgaggactagcagtggggatgctctgctcttttgaagatgccaggaagctgtg

SEQ ID NO: 36440 - DNA, 201 bp, Bos taurus
agagaaaaccaggccggccaggaccgtgccaccctggggaaccagaggtgggtcctggagtgggtggtgggtggctggctgagcctggtcaccttcacctkgggccacatcgagcccttgatggccggtgaacagcagggtctaagtaaagggagccacagaactgacgcccactgttcgcattttgggcttcctaagaag

SEQ ID NO: 36441 - DNA, 201 bp, Bos taurus
ggtcccccaaaagttcaggccccttgaacttgctgttgaattactgccagtgcttatttatttgttcatgcttgctgtgccgggtctttgttgctgcgctygggccttttttagctgcagtgagagagggggctaccctctcgttgtggtctgtggcttcttatcgacaggctttgcttgttgccaagcaggggctcgagg

SEQ ID NO: 36442 - DNA, 201 bp, Bos taurus
tctttggcttctggatagatcagggtttaatattttctggatgtttaaagagtcttcttggtctcttttggtccatgtctgagaccatggggcccagacamttttagtttctgcagtaagagtgtttgtggcattttggattcgggaatccactgtcccatctgtgcgtgtctgttcctactcggcggcctctgaggcatg

SEQ ID NO: 36443 - DNA, 201 bp, Bos taurus
tctgaggtgttaagagaagctgaaaatccagattcttctgtgaaatttctgaatttttaaattgttgaaccgagtccattaaacagtagacaatggactgkaggccgccgtcttgtaacttctattctctaagtttagatttaggaggttgatgagagccagggcaggagttttgtttgttatttccctgctcccacgggg

SEQ ID NO: 36444 - DNA, 201 bp, Bos taurus
cttccaagcagaggggtcagcgggtgcaaaggccctgaggcagagctcaagtatgcagaaggatcagcaaggagggtgatgtgcttggaccatgtgatgcraaaaagatgaggccagagagataatatggagcccaaaggtgaggcatggaaagctctgtggtaaggtgatggccacagtggcctgtgactctggatctgt

SEQ ID NO: 36445 - DNA, 201 bp, Bos taurus
cccacaccccacaggagacacacacacaccacagtgaagaatccgcgcagccaaaacagagacagatggcagctacccaggtgcgactagggccgtccccrctcgcttctgttggcaataatctccagcagaagagggaagctgaagcccgctccctacagacccacacccagcctgtgtgtccagacctgggagggcctg

SEQ ID NO: 36446 - DNA, 201 bp, Bos taurus
tgccaggaaggacccttctcccagacaagaaaccaacctgggccttactcgttcaggtaagtaaatcgagctctcagaggacacgtggacagtcggctgamgtcttctgggcgcctaccatggcccagcactttcagacccttgagctccttttacggcccaaataccaccaaacccccttttacagatggggaaaccaag

SEQ ID NO: 36447 - DNA, 201 bp, Bos taurus
cgaaggcttccaaacttctgtcccttagaggaggtgcccttttatttcacaattcggttcacaccatcatactcactggcaactaaacaaaagcttccccygaacaatacttaccccatgcactcttatctatcctcctgtctggggttactttgtttaaatgctggtcataactcattaaacagatttcctgtcccatcg

SEQ ID NO: 36448 - DNA, 201 bp, Bos taurus
cacgaggagtgcacatcgtggatttctaaaaagtgccaagaaggcacccccatcccttgaaatgagaagaatgaagatgtctgtgaacacatgtcttggtrcagcttcggaaggtgatgggcgttaggtgttagcaacagcaacagatccgtcccggtgagagacacagcttggaggatctttctgcataagacattttcc

SEQ ID NO: 36449 - DNA, 201 bp, Bos taurus
agaagctccagtttcctttactcacagcctggagtcatttccgttgcctgtgctttaactaaagctgaggggtcagagacgcagaggcctgggacttaccygtgtgggagcgcaggtgcacggtgagctggctggagttgcggctggcgtaggggcagagctggcacttgtagggccgctcgtccgagtggatgcgcaggt

SEQ ID NO: 36450 - DNA, 201 bp, Bos taurus
gcacgtgaggcgcgggcccctgtgcgttcactccacacacaaccactgccgggaatatgatgctgcgggtcaaatgcagcccctgacctcgtggcgcttaygcttcagcagtgggacaggccttaaatttgttctgcaaacaatcatttaattacggggacctgatctgagagaacaatgcccatgtgtgtggtctcagag

SEQ ID NO: 36451 - DNA, 201 bp, Bos taurus
gggactcctgaggctcgatcccgcctttgcgtatgtcgagcctccttcctcatgacctttgccacgggccgagtgcctcactctggcccccaacaagggasgagtgaggaaacaaaactgagcagagacagagggggagtcgcgaggcaggtgtgtgacgtcttggccaaccccagtaggcacaggtggcatgtgtattgc

SEQ ID NO: 36452 - DNA, 201 bp, Bos taurus
tggacttccaaagacgggttagcaaagggcattgagatctttaggtaaggtgtgacctcaggtaatttagttatatgattagggaatgtaatggcttctcrtacaaattggtttcacagcagtggcctatttgaagctatgttaggtatgtgtcataagatggaatttgcctagcattcacctacattgtcctctgtgatt

SEQ ID NO: 36453 - DNA, 201 bp, Bos taurus
agtggtcagcagggactacttaattgcagttaagcctgtgctgttcattgtggcattgaaaatagagcagcgtgtaatgtggttaaactttctgcctctcygggcccagatgggtgggtggaactcattttttttttttttttggaaacttttaacctggtagcacttatactgaattaagttttactggctatcagcttt

SEQ ID NO: 36454 - DNA, 201 bp, Bos taurus
ctttgctcactcattttcctctgagagaaaccatttccctttttatataaataatgtaaaaatttggagataaagtacgtggggcatagggaaggtgaaaygcagcctttacaatgtaaagtgctttctccctggccctagttcattagtgaaatctagtgatttgagttacccagctaacctcttccgccactgtaggat

SEQ ID NO: 36455 - DNA, 201 bp, Bos taurus
agcgggtgccagcggtccctgggctgactcgtttcaagaggctcacctgggccatagagaaatctagatcttagacattcagtggaggatctccagggccytcggacgtccagtggactgcgtctgagagtcctcctgggttggtgactgagcaaacactgtgtctgtcagaaacaggtggcatccaggtgtagcctgtgc

SEQ ID NO: 36456 - DNA, 201 bp, Bos taurus
gcagggggcggtgtgtaaaggcctgaggacctcagtaacaatttcagcttctactctgaacgcagtaggaagccacttggagccaagaggagacatgtatwcatgaacaaagttacacggcctgaactccgtaaagccagggcagaaactgaatccccagctcacttcctcctgccgtatccatccccactcgcgtgtgct

SEQ ID NO: 36457 - DNA, 201 bp, Bos taurus
aggctacccattcccatgttctggcctggagaattccacggactgtatagaccatggagtagcaaagagtgggacacgactgactcactttcaccttcacytcactttcagtgtcacagggccagaaatatgggtgcaataaacgaacgtgttttggaactttcttccaaacaattaggtctttaaacctctggcttaagt

SEQ ID NO: 36458 - DNA, 201 bp, Bos taurus
cttttttaaagagcggtactggaatttcatcatattgaatataaacgggaaaaagtacatggtagaataaaacttaaaatgcttttatggaattttcattrtaaggctgtctgtaatggagttgacctcatattcacctaagattctctggctccgagttcagatttcatgccaattaacatgttaatgacatatatcatt

SEQ ID NO: 36459 - DNA, 201 bp, Bos taurus
taagatagtgctcagatgactggtaaatttttcagggggggaaaagttaaatatctcatgctatatatatttcagatgaatcaaaattaaatctagaaackaaaacataaaacaactagaggaaaatgtaagtcagtagttacctgctatcagtcaaggaagttatttccaggtataaatactaagaaagaatagtagaaa

SEQ ID NO: 36460 - DNA, 201 bp, Bos taurus
ttttcagcaggtgtctggcccctgctcctccctgaatcacctccaggtacctctgctcactggattgcagccacactctggcaacctctttcttgaagaarccgagtgtggctgggcctgaaagctttgctctctctttctcttgggcctccagggcttgtctcctagacactaggctgcccaggtccttcctgtcagtat

SEQ ID NO: 36461 - DNA, 201 bp, Bos taurus
tccgggagttggtgatggacagggaggcctggcgtgctgcagctcttggggtcgcaaagagtcggacacaactgagcgagtgaactgaactgaaaagccamctaaggccaaagaaatatttctctagtgtaagaaaaacagttcaagcaatgctggcctagatgttggggagacagatcggagcaggggagactgtggtga

SEQ ID NO: 36462 - DNA, 201 bp, Bos taurus
gctggcccgtgaggtttaagcggacgcctgcttggggcatgggcttccggcgaggaccctcctttcgttcccaataaagggagaaaaaacagcggcgcacrgtggcctttcctgctcttgggtccatcgcccgaggacgggacgcgtgggtagggccagcttggagccgcggtgcgtatttacaacacgcacctggtatct

SEQ ID NO: 36463 - DNA, 201 bp, Bos taurus
ctgtcaccgcttttaaaatctgagttccacgtgagcaaggatgtagcctgttctgttcactgccgtgtctgcagtgcagcgcctggcacttcagcaggcaytgaatgaacgtttgttgaacggctacataaatgatccagggggcatagtgccctgaagtgcctgaaagcattcagagggctgctacggccttgcctagtc

SEQ ID NO: 36464 - DNA, 201 bp, Bos taurus
aacataattaaataaaataagaaccgaagctctcaggccagtggcctggaagcactaaatcatgctaacaccagtggacccagaatcaggtccttcacctraggccactgatgccttggctgcagccgcatgaggggtgccgagccagaggctcccagacaagtggtcactcccgatcgtaggatcggtgctgttctcagc

SEQ ID NO: 36465 - DNA, 201 bp, Bos taurus
agtcccagcatgctccttaaaatcacacatttctgcggctcatgcaatacggtgtgcaaaatctggtgtttggctcagaattcggaactcctaagtcaggygttgtaggtgattcagatgtccgcgtggactctcgggtgaatgggcttcttgtctgttgtctggtaacactggttgtctgtgtggctcccgtgtttgcac

SEQ ID NO: 36466 - DNA, 201 bp, Bos taurus
ggccgggtgtgcaagtggagacaccctgagcagcgtccgcgggtggggaggagctgctgtgctgaggagcagaggagactggtttccccaccggagtccgwgaatccgtgggcctggggactcccagggactgccgtgcaacgtggacaatcctagatcttcagacccgtggggagcctctgagacttttttttaagttag

SEQ ID NO: 36467 - DNA, 201 bp, Bos taurus
tggatgactgttccacaaatgctggaagcctcagcctcataaatccttggcccacaaagaccttttatgaagacgcaccgcccacggatggctcggcagtrcttcctgcggtgttccccaggcctgctcgcggtgtgtctcccactgctcctcccctatcatttcctgctgtgtatacctctctacttcccttattgcaga

SEQ ID NO: 36468 - DNA, 201 bp, Bos taurus
tttttgaattcatcagagaaatatatgtacagctcataacaggaatagaagctgcaaagataattcacccactttaagtgccaagtcacagtactcaccaycttccatcttaagtgaagtgtgacagtcgtcagtcatgtccaactctttgcggcctcatggactttagcctgccaggctcctctgtccatagaattctcc

SEQ ID NO: 36469 - DNA, 201 bp, Bos taurus
ctgtaatccaagccatcttcttccaggtctttattgagaatttgctctgtgcttagccttgattcaacatgtatttgataaacagtttatattccaattayggtaccaagcactggaaataaaattacagatagcatattctagaggggaagaaggatggttaataaactaattagttatgatgagtgcttttttgggcaa

SEQ ID NO: 36470 - DNA, 201 bp, Bos taurus
ccctcaagtgcagcagtgaccaccaaaatccctggtggcagagggagcgcatgcccctcaggtgatggccactggtccgtgtaaacctccagtctctctgygttggcctctctctcactcccgtagactcctcaggctgcacaaaatagttttcctccccactctctctgtctccatcctgtcttgtctctgcatgccctt

SEQ ID NO: 36471 - DNA, 201 bp, Bos taurus
cacaacccagtttctccctgtatttgctccatggtggaaactttactaacttaatttgatagaaacccacaattccagacattttccttttgataccagayagtgcagcaatttcaagcctcattttcttaagctacatagtccagggaagaagaatcttctttagtcctcaagtattgcttggcattcattctctcattt

SEQ ID NO: 36472 - DNA, 201 bp, Bos taurus
tgcaaggaatggagctgagattcgaagacgggctcctcggattcctgagcctctgttctttgtccctgtgctccactgcctaaatcttcaattacagatgmttttttagagtaaattatagtatatccacacaaaggaacattgtacagttataaaaagtaatattatagaagtatgattatttagatgaaaagagggaca

SEQ ID NO: 36473 - DNA, 201 bp, Bos taurus
ccacgctttgtctgtaagcaggttttcctgtgacttgtggtccacaggaaaaaaatctgttcagatgaaagtatttgaaagtcttctccgtggccccagarcaagctgaagcacttcaaagcaatgacaaccaccctggaggagagctttctgaaattcgcctgcagtaaacaacctgcctgagacggaaggccaggcggg

SEQ ID NO: 36474 - DNA, 201 bp, Bos taurus
cagaacaaagaacaccctcaaggtctgggcctgagccacagaaaggggaagtcgccgtttactgagaaggggatatctgggggagggttttgggaaatccragctcagattggccatgttcagtccgagaggcctaatgatgtcttgaaggcaattggtcatatagatctggaactctggaaactagagcttgggaaaaaa

SEQ ID NO: 36475 - DNA, 201 bp, Bos taurus
tcactctctgtgcacctgctggcactacgggcatttgtggttgtgagcctgggtgggcagcattcctgggacttggaccttcttgccaagccttgctccayggccgtcatgaactagatcctcccctaaaggctagtccaacgcccccaacctgtttgtaacttgcttctgcttcctcctttttggatgcctgatcattca

SEQ ID NO: 36476 - DNA, 201 bp, Bos taurus
acccgggtgccccggcctcaagaacccctggccacctgctgaaatcgccttgcatcctgtgccccctggtggaaccaaaaccttctgcactgatcacacgyggccgccccctggcgggcatcagttgacactattttcactgtgaaaccccaactgagtgtctccttaggagtttgagtgagtggataacagcaggcaaat

SEQ ID NO: 36477 - DNA, 201 bp, Bos taurus
gcgagcactcaggacacagggtctgtgcaccacatgtatgcccacgctgcggggatcgcacgttctcgtagctcaacaatattgtgtagttcctaagccgmgtccaactctttgcgatcccatggactgtagcccaccaggctcctctgtccatgggatttcccaggcaagaatcctgaagtgggttgccctttcctcctt

SEQ ID NO: 36478 - DNA, 201 bp, Bos taurus
tttaattttttggatagacaattcatttacataattcaaaattcaagaggcacaaaagaggactcagtgaagtttctttctcactcctgtccccatctatmcagtccccagccacacagacaaccaatttagcctgttttttttttttttttaatatatacacctttctaaagataacgcatttaaattttctaaggcaaa

SEQ ID NO: 36479 - DNA, 201 bp, Bos taurus
tctccaagcctccatcctgttgagtagggcctccagtccttcagagctgaactggaggtggttaagcacacagtcccctggaagagtctgagatcgattgkgaggccacacccacttccaccccgtggttactggactcatgggttcttcctattgggaggcagcgtgcagagagttctacttgatgtgaactctgaaccc

SEQ ID NO: 36480 - DNA, 201 bp, Bos taurus
ccctcttgagcctctgcttttacatctgtactttggggtaaggaaacctataccttgttgggtttttgtgatcactgattgtgatcactggtttttaactkatcactgaataacatatgcaaagtccttagcataggaactggctggtaaattacagtcaggataaaagcacaggatttgagcttatcctccaaaccttcc

SEQ ID NO: 36481 - DNA, 201 bp, Bos taurus
tggcaggagcagcagcggagcgaaggaaacaaagaaaacaggcaactttgagtgtttgaggttgaagtaggttgacatccaaaatcctctgtgtcccaaartccggatcagggcaagactcttccctggccagtgggaagtcttggcaagtcatatgatcaagagcaggatgcatcactgtctggggtcgggggtgaaatt

SEQ ID NO: 36482 - DNA, 201 bp, Bos taurus
acagatacttcccagatcacagtggaaggcgtcccttcatgcgagattagagctcaggctctggattcagactagtttggagccctgactctaccctgtgyttgggttagaggcctgagccatcattaactctcagctctttcctaatctataaagaggggtgggggtagggggcatggaatctgctgtaggcctcaacaa

SEQ ID NO: 36483 - DNA, 201 bp, Bos taurus
gccgcccctcaaatgtgcaagctcgttttcagcatggggcttggcactagctgttctaggagctctctctctgatcttggatggtttcccagctcacctcyctaccatggcccatgggctctagaaagccccctactggccaaacccctgccccacaagcgctccagacactcctgatcatctggctccagtccacactct

SEQ ID NO: 36484 - DNA, 201 bp, Bos taurus
aaataccggctgacagaggcgggtgctaggaccaggtcagcccaggggcagtcatccagcctggtggctcagagtctgtgagcacccagctgaccactccygccagcatttcttcatcctggcagcctgggttcaaagtggttcttcgtcttggcagaccagaagctagattttgaagaggttccccctcccaggggatgg

SEQ ID NO: 36485 - DNA, 201 bp, Bos taurus
aaatactgctttggtgaacattttcacaccaatgcctttatttatttatttttcccaacttaggatggttttctccggccgctcccttagaagggagattrtggtcaaaggagacgaatgtgttgtgtgactcaggaagcgtgtgggtccccaaaaggctcttcggaaggagtggggcgagagccagggtgacgcccctca

SEQ ID NO: 36486 - DNA, 201 bp, Bos taurus
tctagatggctgcacactgatttcaggagcaattctcaagggaggttttagcatcacaagtgaaattggccagctgggccaaggctctttcccatggcctyccacctctgatgtggttggacaggcactgtgtgtgcccaggtcaggaaatttgaatcaagagcctgctgcgtgtgactcatcacaccagggcaggggttt

SEQ ID NO: 36487 - DNA, 201 bp, Bos taurus
gaggaagcctcctttattacatgttttacagctgaaggaatggagcacagatgagaagtaaccacctcaggttatctgggattccaaccaaggtgaattcyggtgaattccaggtgaattccagacccagctccctggaccaatcacaatattaagatgacacagagacttcacattattaacctctccagttccctttgc

SEQ ID NO: 36488 - DNA, 201 bp, Bos taurus
tttgaaattccaaaatgtttgctgtcaaattttggtctttctcattacattcaaaagtctattttgaaacttaaaatcaggggcccaattttctctttctrtgtcttcaatttaaatgcactgtctctcttctgggactggggaaggctggatgcccagtggccccagatgaaagacagtgctgggacagtcgtctgcatg

SEQ ID NO: 36489 - DNA, 201 bp, Bos taurus
acatgtgtgctaaaccacctgtgcacaggtcctcatctctgcatctgctcttcatcatctgtcccctgaaaccactagaagtggtacagctgctccttatyacatgggaggcagggtgtggagtcagccaaacctgcgttcccctgcgttccgggtgaccctgtgccagcagcctctatagaaatgaccctgaaggaccat

SEQ ID NO: 36490 - DNA, 201 bp, Bos taurus
tcacacacgtgcacgcgcacatgcacacacacacacatgtacttgcacagccacgtgtggttatatttgcaggaaagatgaagcagtccccccaaagtcaytgtgttctggtttgaatgcaatcagccaataagcagggcagtgcacacttattttcctgacgccctggcttctgtctttggtctgagatgtgtgctggcc

SEQ ID NO: 36491 - DNA, 201 bp, Bos taurus
tttctgactcagctcagacagaccagtgttctctgtgttgggaacatggaggaggaatgcatttggggaacaaagttttaggggcttatggcatgtttctrcttgctaaacaagactgatgccaagactcagctcccccagaaacctcctctgatccctacacacacttcagccccaggctacatgatgtaccctctgctc

SEQ ID NO: 36492 - DNA, 201 bp, Bos taurus
gagcaagcgtcttttcatttcatggctgcagtcaccatacaaacacataatgtgcacaagacattgatttagttaattattgtcactattattattgtttkatcagaaacatttcctgcttggacaaaaacatacagaaacagtgcaaaacggaaaggatcctcttaaaagtggacctcaggcatcttctgggcaaggagc

SEQ ID NO: 36493 - DNA, 201 bp, Bos taurus
ttattgtaacaccgatccaagaatttcttaattcctgctagtcccaagggtttggaacatctgtctcttgccttctcctgacttttaatttcttttcttcrattaattactatgagtagactgattttctgggaaaggtaagtgcatgtatatatatatatatatatacacaaacacacatatgtgtaccattgagtaaaa

SEQ ID NO: 36494 - DNA, 201 bp, Bos taurus
acctgggaagcccatttttacatgtggccagttcattcatctgtggccaattcatggttcaatcagtgactacaaccgaaggataattaagaaaatgagamtgtgtcaggaaaatgtcaccagaaagttctaggaaagttttaaccacctgagaaagaatggacccttagatgcattcctggagattctctcaaaggcatc

SEQ ID NO: 36495 - DNA, 201 bp, Bos taurus
tgcaaccccagccacagccctcagcaatgccttgcacagagcagatgcaggatagttcttgtgtcgttcctgccgcaccgaaatgaactgcagtgacctcrtggtaaaataagtacgttcacagatgtcaacaccgtaattaaaattccagtcttctggctttaaattctccaccgtgaagaaatgtcaagtgtcctactt

SEQ ID NO: 36496 - DNA, 201 bp, Bos taurus
atgagttttcatctttttcccacacagtttttgacctttggttttttaattcacagtgacctacttttaggtttgttttctcttgtaacaaattctatttrcgtcacccgctacattgcagtgaaagaattgtgagcttctgggcatggtattcacagtgcatgaaatatgaaaccacggcgagaagcagtgttgtggagc

SEQ ID NO: 36497 - DNA, 201 bp, Bos taurus
aaggcatctaaatcaggtggaatttccttacatattgccatacatcttttaacggggtttttaaaaagtaggggtcaggaaaacatgagatgttttctttktaggtttatttgcaggagtacttgaagcacaaagcaatagaatgaatgatgccctatacctcctctctttacctaagttacctggaaacccagagctcag

SEQ ID NO: 36498 - DNA, 201 bp, Bos taurus
aaggaatttctgtgctcctttgctctaccttctccttgactttcctcctggaggaagatgacgccgactgagggaaatgaagtgaactctcagtgctgacktgtggccagacctaggtgtctctaagctgttggtcatctgtgctttttctctcccaagggcaccctgtgtgtgtgtcccctccccgtgcctctctccgtc

SEQ ID NO: 36499 - DNA, 201 bp, Bos taurus
aaagaacatacaattattccaggaaagctaaatatgtttttgggccaaagaacgaatagattattcagaaacagaggtcatgagagagacaagcagatgayggggtaaaggaacaggtcaaaaaggcagactgaggaaagattactccatgttctgtcctgagctggggtcccgtaggccaaccactaccctaatgtatca

SEQ ID NO: 36500 - DNA, 201 bp, Bos taurus
tgtagtgaggagaagggccaagatgggaggtgctgtggcacagcagggttgcttattaaggtctgttacctatttagcacctatgttaaacaagtctcccyagggccctttgggatatggcccatggcacacagaggatcaaacgagatggactggggttagggttggggggatgagggtctggccacactccctgctcgt

SEQ ID NO: 36501 - DNA, 201 bp, Bos taurus
ttataatccatgtataataaaactgtggtaaaggggaagataatagattatttacattacattttaaagagatccaagctaagtagatttcttaaataaaygaagcgtgccttttcagttgcatttcaggaattttgaaggaaatactttcaaactgatagtggctatgacccctccccaacacaaaccaaaatatactgc

SEQ ID NO: 36502 - DNA, 201 bp, Bos taurus
ccggggtggggggggcggtgggaatcacatcaaaggaagtgctttcctgtctctgattggattactggcaagaaggtacagaggggcatccaaaagttttytcaggagggccaactttgcaacgtcctgtctagagaagttgttgacacgttcgtcccttccgctataacacaagcattcagaaaatctccactgtgtata

SEQ ID NO: 36503 - DNA, 201 bp, Bos taurus
gaataaaaaaacatatgaatgaactacaacaaacaattccttttttttcccctcaactttaagccacaaattaatcctggaataagtaagcattagacaayaaaaggcaatattgtgaattacagtatttcccaaaatgtgggacagaaattacttctgtctacaaatgcatatttgtagttcacaagataaatctaggtg

SEQ ID NO: 36504 - DNA, 201 bp, Bos taurus
agagctaatggtgggaaggatagtcacaagctaggttcactgataaaaatgaagatgatggtgccatgtagcaacagaggtcaggtgggaagtagcaaacyagaagtccaggggaggccagagtgacagtccagagggctgggtctgcagagaactgtggagatgattaataatatatggcatccttaggatcaaaacaga

SEQ ID NO: 36505 - DNA, 201 bp, Bos taurus
tccctgcctgtacatggaagaagcatgttcttggagagtgatgtgacaaaccttcccatgtccaccttgttcttaaaatcctgcagtggcctcacagtggyacctgaagatgaagttcatcctcaggaaaacacagcggaagaggctcttgtggcagggaccctggttagttttcaagtcttaactttgcttttcccttat

SEQ ID NO: 36506 - DNA, 201 bp, Bos taurus
caatcaccagctgtgcagtgtgagactattcactttacactatagtcctcattttccccatctgtaaaatggattcgtgtgattcccaacaagcccattcrtgtttgtcagtctttaagtctaagtttccatgattttacagaagggtaagctcttggtaattcctggtaaggggaaaaggcatcgtcactgctctcatgg

SEQ ID NO: 36507 - DNA, 201 bp, Bos taurus
atgtaaactcatgaagtccagcacatgcatattatacagataaagccaatataagaaaaactttcaaagtttttaagttataatggtgcatttcccttctrtggagaggctagaagtcccaaatgagactgaatattggcctatggatttcttattcccaccaaatgtgaccatcctaacattaatttgctggcaccaaag

SEQ ID NO: 36508 - DNA, 201 bp, Bos taurus
ccgcatttacctcttggccagttctaattatcagcatcgatgctttctatcggcaattatccaggctcagggagctgcctcagtaaataattggagtgcarggggccccggaaggttattcacacaggcacactggctttgctccccagctctgacttgcagtcagcatggcctgagtgggagcaatatgggcctctgcaa

SEQ ID NO: 36509 - DNA, 201 bp, Bos taurus
gacttcatttaaatggatattataaacccctatttgtttaaaccatttttagtcatgttttttggttacttgcaaccaaaaccaccgattgagagtaattrcatatttactgtaaattaaaatctaatatactgtttaaaaatctctctttcagcataaagcatttgcaaagaagatcatatgcatttcccagtatcatct

SEQ ID NO: 36510 - DNA, 201 bp, Bos taurus
gtgccctggctcccacccagccttcaagacttcctctgctctgggaaaggtttaaggcttcagggatcttgcaagctctgagatattcctgtgaattagarttcacatataaacaaaagctgctcatattttagactactcttcatatgctaagcattttacaagtatagccgttttaagactcacagcctgatgaggtaa

SEQ ID NO: 36511 - DNA, 201 bp, Bos taurus
ccaggctcctctgtccatgggattctccaggcaagaatactggagtgggttgtcattcccttctccaggagatcttcccgaccagggatcaaacacaggtmtcctacagtacaggagattctttgccatctaatccacgtggaagtcccctgaacctgaagacaggtgagtagatgttacccaacatacaacacaaagaga

SEQ ID NO: 36512 - DNA, 201 bp, Bos taurus
gagaagtgcttctcagatttaagattcttcaaggaattttttcaaatgcagattctgcttcagtaggtctgggaccaagtctgagagtctacttttaacayggcctttcaatgatgaaagtgatgtgaaagtgaagtgctagatgctcagtcatgtccaactccttgccaccccatggactgtagcccaccaggctcccct

SEQ ID NO: 36513 - DNA, 201 bp, Bos taurus
tcacctggtctctgtcacaactatttaactctgccattgtagcataaaaatggccatagacaatgcataaatgaatggatttggctgtattccagcaaaaygaaatttacaaaaataagcagcgggggacttctgtggtcttccagaggctaagattccacattcccaatgcaggggacctggatttgattcgtggttggg

SEQ ID NO: 36514 - DNA, 201 bp, Bos taurus
caaaaaggaaaaaaactttcaagattgtggaggaagaaacaaaactttgtttgcaggtgacatcatttctctgtaaaagtttccaaagaaccaaccagatyaagataaaaaaaaagcaaccatacaagcaaacagtaaaccagaactaagaagcacatgaaacacggtcttgggatacaaaggtcgtaagtcaactgctct

SEQ ID NO: 36515 - DNA, 201 bp, Bos taurus
accagcacagagtatatctgagttttaccacacaacctataagatccaataattatgttcttcctcagtaaagatcaaggaaggactagctttaattgatycaaactatatttgtgacatgacactgtttcatggggaacaattaatagtgaagctgtcatttcataaacaactaagactcaagaacatgtcactgtctcc

SEQ ID NO: 36516 - DNA, 201 bp, Bos taurus
acagagtggtgagtgaaggacagtgaggtggcaggaggacacaggctgggggcagtcccagcctgaccactagtgggcctctggcaagtcactagcttcgytgagccctcctctcttcatctgtaaaaacagcagagcccacgtttgtgtgacccagccccaactctgggggccagaagtcactaatctaacggtatcagc

SEQ ID NO: 36517 - DNA, 201 bp, Bos taurus
tgtatggagctgtgtagtcacgtacatgaatcctgtgagaaaacgtgtcttctcaaaacaacggtgaacttttgtcagtgcacacagtgccctgtgcacarcttcctaagtgtctctgtggttttgtcccttggcgtctgtgtatcacgacactagccttcccacaaacctcagcgctcactgctaccctgttccagttta

SEQ ID NO: 36518 - DNA, 201 bp, Bos taurus
cacaactctgcatggggaagatgtttcccagaggcaaagccagcatctgcagcctgggtgggaaccctccaggtctctttgctttctcctgctctgaagartattccacttcctcctcttctcagctgggaacttgccttgcctgacacctccagtctctttatgtttggggtgactgttttggaaatcaaaagttccata

SEQ ID NO: 36519 - DNA, 201 bp, Bos taurus
caaattctttctccatgactcttggcagctttcaacacttaacaaatcggctaagcaaagcaacatccttgcccctcatcttgttccaagttccaaggackgactttcacctacgaggcccaggccctggctgggagagtgagggtccctgcttaggctggccaccctgcactggagccttcgtccagcagcaggtctgtg

SEQ ID NO: 36520 - DNA, 201 bp, Bos taurus
atcatgattaaaagtgaccctcagtggtttcctaagcaatcgggattcagcagcctaaagacccggatcatggccccttgctcttcagtggcctccccatytgggcactcagaccctctctctctaaactctggacctgcgtgaccctgcacagttcccaggtagtaccaccccctctccagacagccttagggtggcccc
